United States Patent Application Publication US 2007/0042381 A1 - sequence listing, part 11

SEQ ID NO: 450430 - RNA, 22 nt, Human
cuauuaggcuuccauuucaugc

SEQ ID NO: 450431 - RNA, 22 nt, Human
gaaaugcaggcuuggauucagc

SEQ ID NO: 450432 - RNA, 22 nt, Human
auacaugucaucauauguuugu

SEQ ID NO: 450433 - RNA, 20 nt, Human
cugagcugagcuccaugggu

SEQ ID NO: 450434 - RNA, 22 nt, Human
ugaaggcccuaucuccauauac

SEQ ID NO: 450435 - RNA, 22 nt, Human
gggagagaugcugauugccaau

SEQ ID NO: 450436 - RNA, 22 nt, Human
ugccugaguuuaacccucagag

SEQ ID NO: 450437 - RNA, 22 nt, Human
agcaauaacagaaaacuuuccu

SEQ ID NO: 450438 - RNA, 22 nt, Human
aguauggggcugugugugcaca

SEQ ID NO: 450439 - RNA, 22 nt, Human
ugccagggcugcuacuggcuga

SEQ ID NO: 450440 - RNA, 22 nt, Human
augcaucuauucccaagggcag

SEQ ID NO: 450441 - RNA, 22 nt, Human
ccagugcauaaucaauacagcc

SEQ ID NO: 450442 - RNA, 22 nt, Human
gacagagugcagggcuagaaga

SEQ ID NO: 450443 - RNA, 22 nt, Human
auugaaagaguuuucugcugca

SEQ ID NO: 450444 - RNA, 22 nt, Human
ugucccagucaaggcugucauc

SEQ ID NO: 450445 - RNA, 22 nt, Human
ggggccagcuucgcgugcucuu

SEQ ID NO: 450446 - RNA, 22 nt, Human
ucagucucuggggcuucuguuu

SEQ ID NO: 450447 - RNA, 20 nt, Human
ccaccuggccaaggcugugc

SEQ ID NO: 450448 - RNA, 22 nt, Human
aagggacccuggaucaaaugga

SEQ ID NO: 450449 - RNA, 19 nt, Human
ucccuggcgccucucgggc

SEQ ID NO: 450450 - RNA, 22 nt, Human
uggcucagcgcggccuggucuu

SEQ ID NO: 450451 - RNA, 22 nt, Human
aagcagagccaccagcuuugga

SEQ ID NO: 450452 - RNA, 22 nt, Human
cagggaguuuuuguuccucuag

SEQ ID NO: 450453 - RNA, 22 nt, Human
aucagcaaguccuguuaauucu

SEQ ID NO: 450454 - RNA, 22 nt, Human
cuuuucaugccagcccaucaca

SEQ ID NO: 450455 - RNA, 22 nt, Human
ugaauggucacugagcaucugu

SEQ ID NO: 450456 - RNA, 21 nt, Human
uggcugagccaggugugugga

SEQ ID NO: 450457 - RNA, 22 nt, Human
ccuguacaagcucuuggugaca

SEQ ID NO: 450458 - RNA, 22 nt, Human
gcugucaccaaagcaggcacug

SEQ ID NO: 450459 - RNA, 22 nt, Human
ucagaagcaaacaucacucuag

SEQ ID NO: 450460 - RNA, 22 nt, Human
uuuaauuuuccugguaggccug

SEQ ID NO: 450461 - RNA, 22 nt, Human
uggcucagccauucguguugcc

SEQ ID NO: 450462 - RNA, 22 nt, Human
ucagcagggagaggagaaugca

SEQ ID NO: 450463 - RNA, 22 nt, Human
uccaggcugggcugaagggugc

SEQ ID NO: 450464 - RNA, 22 nt, Human
ccucccagugccuccagagcag

SEQ ID NO: 450465 - RNA, 22 nt, Human
ggucauugaaaucagaaggguu

SEQ ID NO: 450466 - RNA, 22 nt, Human
uccagcuggggacaugggcuuc

SEQ ID NO: 450467 - RNA, 22 nt, Human
agcaggguuccaggaguugcag

SEQ ID NO: 450468 - RNA, 20 nt, Human
aagggcagagggaacagacu

SEQ ID NO: 450469 - RNA, 22 nt, Human
augauuucuauauaaacuuaaa

SEQ ID NO: 450470 - RNA, 22 nt, Human
uguaaguaguaauggaaggaca

SEQ ID NO: 450471 - RNA, 22 nt, Human
cuaugaccccagcaugaauaag

SEQ ID NO: 450472 - RNA, 22 nt, Human
ugaaaguugcacauaagagaau

SEQ ID NO: 450473 - RNA, 22 nt, Human
agucccagcucugccacuuacu

SEQ ID NO: 450474 - RNA, 19 nt, Human
ccugugacuaucuuuguaa

SEQ ID NO: 450475 - RNA, 22 nt, Human
aaauguguuccuuugcuacaga

SEQ ID NO: 450476 - RNA, 22 nt, Human
agggcagagggugccucaccug

SEQ ID NO: 450477 - RNA, 21 nt, Human
uccugcagggcagcagagugg

SEQ ID NO: 450478 - RNA, 19 nt, Human
ucagggcaguccggucccc

SEQ ID NO: 450479 - RNA, 22 nt, Human
uuuaccaaauagauuaugucag

SEQ ID NO: 450480 - RNA, 22 nt, Human
ugucauuuucuaaucuguuguc

SEQ ID NO: 450481 - RNA, 22 nt, Human
uuaacagagugccuggcaugua

SEQ ID NO: 450482 - RNA, 21 nt, Human
auauuucucauaagguuaugg

SEQ ID NO: 450483 - RNA, 22 nt, Human
aaauguguguauguacauauau

SEQ ID NO: 450484 - RNA, 20 nt, Human
aaaauauguauaacucuucu

SEQ ID NO: 450485 - RNA, 22 nt, Human
acauuuaaauaugccuuauauu

SEQ ID NO: 450486 - RNA, 22 nt, Human
uguccugcaacugaaggagaag

SEQ ID NO: 450487 - RNA, 20 nt, Human
guugaaaguaauaugaugcu

SEQ ID NO: 450488 - RNA, 22 nt, Human
ugguggcaauguccuggagaag

SEQ ID NO: 450489 - RNA, 22 nt, Human
gaagccacaacuuuuucuuagc

SEQ ID NO: 450490 - RNA, 19 nt, Human
agcaccugugagagccugg

SEQ ID NO: 450491 - RNA, 22 nt, Human
agcucuggaauaaugaugugau

SEQ ID NO: 450492 - RNA, 22 nt, Human
ccuguacaucugcucucauugc

SEQ ID NO: 450493 - RNA, 18 nt, Human
gugagcagagagcaucac

SEQ ID NO: 450494 - RNA, 22 nt, Human
caugucuuuguuaugcucacca

SEQ ID NO: 450495 - RNA, 22 nt, Human
uaauuucacugauaugaaguca

SEQ ID NO: 450496 - RNA, 22 nt, Human
gcaccaggcagcugagcaggcc

SEQ ID NO: 450497 - RNA, 22 nt, Human
caguugaugggacucauguggg

SEQ ID NO: 450498 - RNA, 22 nt, Human
ucaggcugcuguacugugaaug

SEQ ID NO: 450499 - RNA, 22 nt, Human
aaggugucggcagagccgcuuc

SEQ ID NO: 450500 - RNA, 22 nt, Human
gagaugaauguaaacaaaggca

SEQ ID NO: 450501 - RNA, 22 nt, Human
ugacacagaaauuaagcuguca

SEQ ID NO: 450502 - RNA, 22 nt, Human
ucucagaggcccgacguucucc

SEQ ID NO: 450503 - RNA, 22 nt, Human
auuuuccagccuuucuagaacu

SEQ ID NO: 450504 - RNA, 22 nt, Human
caguggguccuaaguacaguuc

SEQ ID NO: 450505 - RNA, 22 nt, Human
aaaggccaugguuggaguguuu

SEQ ID NO: 450506 - RNA, 22 nt, Human
guguuuccucacuucucugacu

SEQ ID NO: 450507 - RNA, 22 nt, Human
ggaggccauaguuugggaguca

SEQ ID NO: 450508 - RNA, 22 nt, Human
gcuggagguuucaccugaguuu

SEQ ID NO: 450509 - RNA, 19 nt, Human
auuccucaaggacagaaau

SEQ ID NO: 450510 - RNA, 22 nt, Human
aaaggcuaugagauagaagaua

SEQ ID NO: 450511 - RNA, 22 nt, Human
acagggcagcaacuuugugccu

SEQ ID NO: 450512 - RNA, 22 nt, Human
uauaguaaaauuuucauuuaug

SEQ ID NO: 450513 - RNA, 19 nt, Human
gcaugcuugguggcuucug

SEQ ID NO: 450514 - RNA, 22 nt, Human
gcagagccccucaagccagccu

SEQ ID NO: 450515 - RNA, 20 nt, Human
gcaugaggaaucauugcagc

SEQ ID NO: 450516 - RNA, 22 nt, Human
uagaaacagaaaacuguaauag

SEQ ID NO: 450517 - RNA, 22 nt, Human
aaguaaaacacacaguccaccg

SEQ ID NO: 450518 - RNA, 21 nt, Human
agaugcugugcuccaggagca

SEQ ID NO: 450519 - RNA, 22 nt, Human
acugagcucuugacugggaguu

SEQ ID NO: 450520 - RNA, 22 nt, Human
caccuagggcaucccugcccca

SEQ ID NO: 450521 - RNA, 22 nt, Human
acuuugcagagccagaagagaa

SEQ ID NO: 450522 - RNA, 22 nt, Human
uucaggauggaguaccuuuuau

SEQ ID NO: 450523 - RNA, 22 nt, Human
uagcugcugcagcacagggagg

SEQ ID NO: 450524 - RNA, 22 nt, Human
uggucaguugcaucagagaagu

SEQ ID NO: 450525 - RNA, 22 nt, Human
gcaggcagguggcaucuuguga

SEQ ID NO: 450526 - RNA, 22 nt, Human
cagucccacuagugccaauacc

SEQ ID NO: 450527 - RNA, 22 nt, Human
gucugucucucuccagagugca

SEQ ID NO: 450528 - RNA, 22 nt, Human
caucagcacuaugauuaaagua

SEQ ID NO: 450529 - RNA, 22 nt, Human
uuuauccauucaccaguugaac

SEQ ID NO: 450530 - RNA, 22 nt, Human
aagggcugagcacagugagcca

SEQ ID NO: 450531 - RNA, 22 nt, Human
ucuggcucuccagugcucuuag

SEQ ID NO: 450532 - RNA, 22 nt, Human
cagcaguggaacuacccaggga

SEQ ID NO: 450533 - RNA, 22 nt, Human
caguauuuguucccuaucaaug

SEQ ID NO: 450534 - RNA, 22 nt, Human
guuacaaauguaaauucugggg

SEQ ID NO: 450535 - RNA, 22 nt, Human
ccacagaguuacaaaacaguca

SEQ ID NO: 450536 - RNA, 22 nt, Human
gccccuggcuggccagcuccuc

SEQ ID NO: 450537 - RNA, 22 nt, Human
acagauauaugauuguguaaau

SEQ ID NO: 450538 - RNA, 22 nt, Human
ugaggaaacuuacaaggcagaa

SEQ ID NO: 450539 - RNA, 22 nt, Human
ccacaggaccagaggagaucac

SEQ ID NO: 450540 - RNA, 22 nt, Human
gccucccuguucuuccacaaua

SEQ ID NO: 450541 - RNA, 22 nt, Human
gcugagagcaaagcaugucuag

SEQ ID NO: 450542 - RNA, 22 nt, Human
caagauggaguccgggaaugug

SEQ ID NO: 450543 - RNA, 22 nt, Human
gcagggugugucucauacaguu

SEQ ID NO: 450544 - RNA, 22 nt, Human
ucagggcacguuucugcaaugc

SEQ ID NO: 450545 - RNA, 22 nt, Human
uuagcucagaaaauuuaaacuu

SEQ ID NO: 450546 - RNA, 22 nt, Human
aagccuuccugagugcaaggcc

SEQ ID NO: 450547 - RNA, 22 nt, Human
caggguggcacucagcgcaucu

SEQ ID NO: 450548 - RNA, 22 nt, Human
augcacgccccacacuggugug

SEQ ID NO: 450549 - RNA, 22 nt, Human
ggagagcagggaggcugcucug

SEQ ID NO: 450550 - RNA, 22 nt, Human
gugcuuuccauccucccugcug

SEQ ID NO: 450551 - RNA, 22 nt, Human
aaguuucauguggagguagacu

SEQ ID NO: 450552 - RNA, 19 nt, Human
gggcuuggggcugaagccu

SEQ ID NO: 450553 - RNA, 22 nt, Human
caguggcaugguugacugcagu

SEQ ID NO: 450554 - RNA, 22 nt, Human
gccaggcaaauuaaggaaugca

SEQ ID NO: 450555 - RNA, 22 nt, Human
ucuggcucauacaagccugcaa

SEQ ID NO: 450556 - RNA, 22 nt, Human
ccuggaggcucugggagggcag

SEQ ID NO: 450557 - RNA, 22 nt, Human
auccaggguguggagagagcuc

SEQ ID NO: 450558 - RNA, 22 nt, Human
gcugaagggagugcugagucug

SEQ ID NO: 450559 - RNA, 22 nt, Human
ucucagagugacaaugagaauu

SEQ ID NO: 450560 - RNA, 22 nt, Human
uaugagaaaauaaauaucuguu

SEQ ID NO: 450561 - RNA, 22 nt, Human
gcagcugaauguccauugcugc

SEQ ID NO: 450562 - RNA, 22 nt, Human
ucuccuccuuuuuucaacauag

SEQ ID NO: 450563 - RNA, 22 nt, Human
ccaggagcauuaagagaacaua

SEQ ID NO: 450564 - RNA, 22 nt, Human
auuucuacaguacacaugcauu

SEQ ID NO: 450565 - RNA, 18 nt, Human
gccugggaggaggaaaug

SEQ ID NO: 450566 - RNA, 23 nt, Human
gccagccuugcucuccugcagcc

SEQ ID NO: 450567 - RNA, 22 nt, Human
gaggcucaguuaugucaucagg

SEQ ID NO: 450568 - RNA, 22 nt, Human
acaggcugcccgcuccccaccu

SEQ ID NO: 450569 - RNA, 22 nt, Human
cauacuuuugcccugacauucu

SEQ ID NO: 450570 - RNA, 22 nt, Human
gcuguucugcgucccaggcugg

SEQ ID NO: 450571 - RNA, 22 nt, Human
caagagagaugcagcucacuca

SEQ ID NO: 450572 - RNA, 22 nt, Human
cagcagccuacaaugcacagaa

SEQ ID NO: 450573 - RNA, 22 nt, Human
aagucauuaucucuucuaaucu

SEQ ID NO: 450574 - RNA, 22 nt, Human
aagauuucugcuccugagagaa

SEQ ID NO: 450575 - RNA, 22 nt, Human
gccuucugauugcuggacugac

SEQ ID NO: 450576 - RNA, 22 nt, Human
ugugaaaggggucacagggaaa

SEQ ID NO: 450577 - RNA, 20 nt, Human
ugggccugagccugugggcu

SEQ ID NO: 450578 - RNA, 22 nt, Human
accaggcagcaccaaagccggu

SEQ ID NO: 450579 - RNA, 22 nt, Human
ugcccagcacugugccagucac

SEQ ID NO: 450580 - RNA, 22 nt, Human
uagggaggcuacuucuuguagg

SEQ ID NO: 450581 - RNA, 22 nt, Human
uguggcaggcaagauguacaga

SEQ ID NO: 450582 - RNA, 22 nt, Human
ccaggugugccagcagggacug

SEQ ID NO: 450583 - RNA, 22 nt, Human
cugcugccggcgagccucccuu

SEQ ID NO: 450584 - RNA, 22 nt, Human
gaggaagcagggcuuggcugag

SEQ ID NO: 450585 - RNA, 22 nt, Human
agcuuuauauuuaaugaauucu

SEQ ID NO: 450586 - RNA, 22 nt, Human
accuggcacuacaggcaccugu

SEQ ID NO: 450587 - RNA, 21 nt, Human
acagagcauaaugguguggca

SEQ ID NO: 450588 - RNA, 22 nt, Human
uccauuuucaucucauguauaa

SEQ ID NO: 450589 - RNA, 22 nt, Human
uucaucuugauggcuuccuaau

SEQ ID NO: 450590 - RNA, 22 nt, Human
agagggcugcugcacagugcuc

SEQ ID NO: 450591 - RNA, 22 nt, Human
agggccugacacccuugccagc

SEQ ID NO: 450592 - RNA, 22 nt, Human
auaaacacuucuagggcacaca

SEQ ID NO: 450593 - RNA, 22 nt, Human
gggccugggaacuugcauuuag

SEQ ID NO: 450594 - RNA, 22 nt, Human
uccaggcuggacaugaggcggg

SEQ ID NO: 450595 - RNA, 22 nt, Human
acaguguguuggaggagacugu

SEQ ID NO: 450596 - RNA, 19 nt, Human
uagcagcugccaaaggaga

SEQ ID NO: 450597 - RNA, 22 nt, Human
acauucaugucccacuucuagc

SEQ ID NO: 450598 - RNA, 18 nt, Human
uggcagggaggaaauaua

SEQ ID NO: 450599 - RNA, 22 nt, Human
ggaagccagaaagugagaauau

SEQ ID NO: 450600 - RNA, 20 nt, Human
ucaaaggcaaaggugggugu

SEQ ID NO: 450601 - RNA, 22 nt, Human
uggagaugaauauguguaccug

SEQ ID NO: 450602 - RNA, 22 nt, Human
agaaugcauuuuguguagcuau

SEQ ID NO: 450603 - RNA, 22 nt, Human
uaaguuuuaagcaaucugauaa

SEQ ID NO: 450604 - RNA, 22 nt, Human
ccagagcugaugggcccagggu

SEQ ID NO: 450605 - RNA, 22 nt, Human
aaauccuaagcagaggaauuua

SEQ ID NO: 450606 - RNA, 22 nt, Human
ucaggcugcaucuguaagggug

SEQ ID NO: 450607 - RNA, 22 nt, Human
ccucaggggucacugugaggag

SEQ ID NO: 450608 - RNA, 22 nt, Human
ugggauaguggccaggaccccc

SEQ ID NO: 450609 - RNA, 22 nt, Human
ucugaacauccagcaaugcaca

SEQ ID NO: 450610 - RNA, 22 nt, Human
acccagcuguuucccgugucau

SEQ ID NO: 450611 - RNA, 22 nt, Human
ccugccuggcuuccagaagaga

SEQ ID NO: 450612 - RNA, 22 nt, Human
aagaauuauugcaauacuagau

SEQ ID NO: 450613 - RNA, 22 nt, Human
uaugcauaugaccccaagcuug

SEQ ID NO: 450614 - RNA, 22 nt, Human
acagcuuuucugauagauccug

SEQ ID NO: 450615 - RNA, 22 nt, Human
auauauuuacucuccuguugca

SEQ ID NO: 450616 - RNA, 22 nt, Human
caaaauuagaaaugcagcuguu

SEQ ID NO: 450617 - RNA, 22 nt, Human
gggccuggggacaccaccauga

SEQ ID NO: 450618 - RNA, 22 nt, Human
acauuucucauaggagagccac

SEQ ID NO: 450619 - RNA, 22 nt, Human
caccaggugcuggaggacauca

SEQ ID NO: 450620 - RNA, 22 nt, Human
uacaugcuccacuuucuccugu

SEQ ID NO: 450621 - RNA, 22 nt, Human
ccugcugggccugagcaaugag

SEQ ID NO: 450622 - RNA, 22 nt, Human
uggagaugcacgagcaggugga

SEQ ID NO: 450623 - RNA, 23 nt, Human
gagggcucugagugcuugggcca

SEQ ID NO: 450624 - RNA, 22 nt, Human
cagggcaguaacgggaacaucu

SEQ ID NO: 450625 - RNA, 23 nt, Human
gaggccacauuccccugcuugag

SEQ ID NO: 450626 - RNA, 22 nt, Human
aauaauguugacgauagucuua

SEQ ID NO: 450627 - RNA, 22 nt, Human
ucuccacucugagugccuuuca

SEQ ID NO: 450628 - RNA, 22 nt, Human
guuuauuagaguuuucugucug

SEQ ID NO: 450629 - RNA, 22 nt, Human
ggcuucucucuucacauggcuu

SEQ ID NO: 450630 - RNA, 20 nt, Human
ugcagcugguuucacaggga

SEQ ID NO: 450631 - RNA, 22 nt, Human
aggccuguuggcgugggcucua

SEQ ID NO: 450632 - RNA, 22 nt, Human
cuggcucacaggugagaugcau

SEQ ID NO: 450633 - RNA, 22 nt, Human
gcucccagacugaccagaggug

SEQ ID NO: 450634 - RNA, 22 nt, Human
uuggccuucccuaccugggcca

SEQ ID NO: 450635 - RNA, 22 nt, Human
acagacagauuuugucugaugu

SEQ ID NO: 450636 - RNA, 22 nt, Human
augggaggaucacuugaggcca

SEQ ID NO: 450637 - RNA, 22 nt, Human
uagagaaaagcagggaucagga

SEQ ID NO: 450638 - RNA, 22 nt, Human
uggagcaggugccaggugugug

SEQ ID NO: 450639 - RNA, 22 nt, Human
aaaggucagcugccaucguucu

SEQ ID NO: 450640 - RNA, 22 nt, Human
uccaguggagugugggggugaa

SEQ ID NO: 450641 - RNA, 19 nt, Human
ugaguucugugguucucaa

SEQ ID NO: 450642 - RNA, 22 nt, Human
gcccaucaucacuguggaggcu

SEQ ID NO: 450643 - RNA, 22 nt, Human
ggccucgcggcuucugguggcu

SEQ ID NO: 450644 - RNA, 22 nt, Human
aggagggcuaggaaaaccagga

SEQ ID NO: 450645 - RNA, 22 nt, Human
aacccagccguguagcugccgc

SEQ ID NO: 450646 - RNA, 22 nt, Human
caguuuauaugucagagcugua

SEQ ID NO: 450647 - RNA, 22 nt, Human
gaaggccauuuuuagguagaau

SEQ ID NO: 450648 - RNA, 22 nt, Human
uuuaauuuguauuucuagaggg

SEQ ID NO: 450649 - RNA, 22 nt, Human
ugaaugaugcaguauaaugaua

SEQ ID NO: 450650 - RNA, 22 nt, Human
cgagaguuagcuaggagucaca

SEQ ID NO: 450651 - RNA, 22 nt, Human
uccagcucuaacaugcugggcc

SEQ ID NO: 450652 - RNA, 22 nt, Human
uuauuauuuuguguacagcaaa

SEQ ID NO: 450653 - RNA, 22 nt, Human
gaaggcuaaaggggcagagguu

SEQ ID NO: 450654 - RNA, 22 nt, Human
aaaaaugcuuggacuuaauaaa

SEQ ID NO: 450655 - RNA, 22 nt, Human
uacacauguuuggcaaguaugu

SEQ ID NO: 450656 - RNA, 22 nt, Human
ccagggugagugucauggguua

SEQ ID NO: 450657 - RNA, 22 nt, Human
gaagcccagcaaacugugauca

SEQ ID NO: 450658 - RNA, 22 nt, Human
uacagauugagguuuuuaauau

SEQ ID NO: 450659 - RNA, 22 nt, Human
cuucccugauaagagccucaga

SEQ ID NO: 450660 - RNA, 22 nt, Human
aagggcaggagaagacggauau

SEQ ID NO: 450661 - RNA, 19 nt, Human
uucacauuggaagaaguag

SEQ ID NO: 450662 - RNA, 23 nt, Human
ggaguuggauuguacuugcugcu

SEQ ID NO: 450663 - RNA, 22 nt, Human
uagaauaugauuaauuuucuua

SEQ ID NO: 450664 - RNA, 22 nt, Human
caggagugcagguggugaggca

SEQ ID NO: 450665 - RNA, 21 nt, Human
ggcuuuaugcucacccagccu

SEQ ID NO: 450666 - RNA, 22 nt, Human
aauuagggaggacaaagguaca

SEQ ID NO: 450667 - RNA, 22 nt, Human
ucacugcaaucucugccuucca

SEQ ID NO: 450668 - RNA, 22 nt, Human
auuagggaaacugacuugucuc

SEQ ID NO: 450669 - RNA, 22 nt, Human
uuucucauagucaugccucuua

SEQ ID NO: 450670 - RNA, 22 nt, Human
cuuggccucuucucaggguggg

SEQ ID NO: 450671 - RNA, 20 nt, Human
acagaaagagagaaugucag

SEQ ID NO: 450672 - RNA, 22 nt, Human
cauuucugggagacaugcuaga

SEQ ID NO: 450673 - RNA, 22 nt, Human
ugcccugugugugcaagcacug

SEQ ID NO: 450674 - RNA, 23 nt, Human
aggcccugccugucccucuuuuu

SEQ ID NO: 450675 - RNA, 21 nt, Human
cugguguagcacucaggugcu

SEQ ID NO: 450676 - RNA, 22 nt, Human
uccugcaggcuugaguccucag

SEQ ID NO: 450677 - RNA, 23 nt, Human
aggcuuccuaucuuagagcuggg

SEQ ID NO: 450678 - RNA, 22 nt, Human
ccagagagguagcuuacccucu

SEQ ID NO: 450679 - RNA, 22 nt, Human
acuaaagaagccaaaguuuucu

SEQ ID NO: 450680 - RNA, 22 nt, Human
ucagcuuugccaccagcuguaa

SEQ ID NO: 450681 - RNA, 21 nt, Human
agggucaggaaccaggguacc

SEQ ID NO: 450682 - RNA, 22 nt, Human
gucucagagagcuacucucuua

SEQ ID NO: 450683 - RNA, 22 nt, Human
agccccaguccgcugcgggcgg

SEQ ID NO: 450684 - RNA, 22 nt, Human
uaggagaggugaauggcacacu

SEQ ID NO: 450685 - RNA, 21 nt, Human
cagggcacacagaggauggua

SEQ ID NO: 450686 - RNA, 22 nt, Human
aaaaaucuaugacugcuucucc

SEQ ID NO: 450687 - RNA, 22 nt, Human
cagaccugagguugaguaccag

SEQ ID NO: 450688 - RNA, 22 nt, Human
ucuaccacuaagugugcuuuga

SEQ ID NO: 450689 - RNA, 22 nt, Human
acaaagucaaauugcagccgcc

SEQ ID NO: 450690 - RNA, 22 nt, Human
uccagccaccaccuugauugcc

SEQ ID NO: 450691 - RNA, 22 nt, Human
gcucucuggguggugggcaaca

SEQ ID NO: 450692 - RNA, 22 nt, Human
gagggggagaugugcacacacu

SEQ ID NO: 450693 - RNA, 22 nt, Human
gccuggcaggccucaugagggg

SEQ ID NO: 450694 - RNA, 22 nt, Human
gaggaaggcuaaggggcuuaga

SEQ ID NO: 450695 - RNA, 23 nt, Human
ugcuucucugcuugacaguucug

SEQ ID NO: 450696 - RNA, 20 nt, Human
acaaaugcauucugugacau

SEQ ID NO: 450697 - RNA, 22 nt, Human
ucaggcaggcucagaggaaaac

SEQ ID NO: 450698 - RNA, 22 nt, Human
ggcugccuacuuucccagaguu

SEQ ID NO: 450699 - RNA, 22 nt, Human
uugcauguguaauuuuucuaaa

SEQ ID NO: 450700 - RNA, 22 nt, Human
uuuauguaaguggaaugaugcc

SEQ ID NO: 450701 - RNA, 19 nt, Human
gaucagagugucagcuugu

SEQ ID NO: 450702 - RNA, 22 nt, Human
ucaggaauccagacagggcaca

SEQ ID NO: 450703 - RNA, 22 nt, Human
aggucaggguauucacgucugu

SEQ ID NO: 450704 - RNA, 22 nt, Human
gcaugugucuccccaguggagg

SEQ ID NO: 450705 - RNA, 22 nt, Human
gcauagucaguaggauucucaa

SEQ ID NO: 450706 - RNA, 22 nt, Human
acuuccuguguuggucuugcug

SEQ ID NO: 450707 - RNA, 22 nt, Human
gacaggcuuccuaagugccaga

SEQ ID NO: 450708 - RNA, 22 nt, Human
gggcuggaggaccggccucgga

SEQ ID NO: 450709 - RNA, 22 nt, Human
agagccuggggauuggcaaggg

SEQ ID NO: 450710 - RNA, 22 nt, Human
uggguggaauaaaucaguucug

SEQ ID NO: 450711 - RNA, 22 nt, Human
aagggcucuguugccauuucag

SEQ ID NO: 450712 - RNA, 22 nt, Human
ggcuagaguggaacuggagcgg

SEQ ID NO: 450713 - RNA, 23 nt, Human
gccugccugaccugugcaaaguc

SEQ ID NO: 450714 - RNA, 22 nt, Human
auggggugagacuaggauuaaa

SEQ ID NO: 450715 - RNA, 22 nt, Human
uucaggauaugugauaucugaa

SEQ ID NO: 450716 - RNA, 20 nt, Human
ccuggaagagcuccccaggc

SEQ ID NO: 450717 - RNA, 17 nt, Human
agaugcuggccacaugu

SEQ ID NO: 450718 - RNA, 22 nt, Human
ccagcagagcauggggaggaag

SEQ ID NO: 450719 - RNA, 22 nt, Human
gcagggaccagggccagaucca

SEQ ID NO: 450720 - RNA, 22 nt, Human
ggcugagccaugggcacugcag

SEQ ID NO: 450721 - RNA, 22 nt, Human
acauuuguaugcguuuuuacug

SEQ ID NO: 450722 - RNA, 22 nt, Human
agggcucccgcgguguccggga

SEQ ID NO: 450723 - RNA, 22 nt, Human
ugcagggcuuccucuuggaguu

SEQ ID NO: 450724 - RNA, 22 nt, Human
agaggccaucugcucugugggg

SEQ ID NO: 450725 - RNA, 22 nt, Human
ccaaagucagugcucagucguc

SEQ ID NO: 450726 - RNA, 22 nt, Human
ucaaaguccuugcuuuuucugu

SEQ ID NO: 450727 - RNA, 17 nt, Human
uccaggcagcaacugag

SEQ ID NO: 450728 - RNA, 22 nt, Human
agaagccaacagggcaggagag

SEQ ID NO: 450729 - RNA, 22 nt, Human
ucaguauccacaaaugcucaaa

SEQ ID NO: 450730 - RNA, 22 nt, Human
uuuuucauugcagccucucucc

SEQ ID NO: 450731 - RNA, 22 nt, Human
ccagagcagauguggccuuggu

SEQ ID NO: 450732 - RNA, 22 nt, Human
acagagcaugcucaguguguga

SEQ ID NO: 450733 - RNA, 22 nt, Human
cuauuucuaaaccuauaaguga

SEQ ID NO: 450734 - RNA, 22 nt, Human
ucagagugaggcccagcaaucu

SEQ ID NO: 450735 - RNA, 20 nt, Human
ccucaguguccuggacuggg

SEQ ID NO: 450736 - RNA, 22 nt, Human
gggcguggauggucagugcagg

SEQ ID NO: 450737 - RNA, 22 nt, Human
cccugcagagggaugggggcag

SEQ ID NO: 450738 - RNA, 22 nt, Human
uggcugagugauauuugcaaag

SEQ ID NO: 450739 - RNA, 22 nt, Human
uccuugaaugaagagaggugac

SEQ ID NO: 450740 - RNA, 22 nt, Human
agagggcauuaacucugucuug

SEQ ID NO: 450741 - RNA, 22 nt, Human
ggcuggaaaagacaaagcuauu

SEQ ID NO: 450742 - RNA, 22 nt, Human
uggcagcuacagacagagguga

SEQ ID NO: 450743 - RNA, 22 nt, Human
aggugcuuggcucgugcacaca

SEQ ID NO: 450744 - RNA, 19 nt, Human
ccugggagucagcugaagg

SEQ ID NO: 450745 - RNA, 22 nt, Human
agugaaauccuggucaacaggu

SEQ ID NO: 450746 - RNA, 22 nt, Human
cagggcugagaauuuagagaca

SEQ ID NO: 450747 - RNA, 20 nt, Human
agaagcugauacugauggaa

SEQ ID NO: 450748 - RNA, 20 nt, Human
ggcagagggccugggagaag

SEQ ID NO: 450749 - RNA, 22 nt, Human
uccuggaguugugcagugcaca

SEQ ID NO: 450750 - RNA, 22 nt, Human
ucuuuccacauucucuguuuag

SEQ ID NO: 450751 - RNA, 22 nt, Human
ugcuagaauaccuaccuggagg

SEQ ID NO: 450752 - RNA, 22 nt, Human
caggacauugauccauuggcac

SEQ ID NO: 450753 - RNA, 19 nt, Human
cucucacucgccacauccu

SEQ ID NO: 450754 - RNA, 19 nt, Human
aauucuguuucagcagauc

SEQ ID NO: 450755 - RNA, 22 nt, Human
agccacagcgaaccucucuucc

SEQ ID NO: 450756 - RNA, 22 nt, Human
cugaaggagcauagucaguuuu

SEQ ID NO: 450757 - RNA, 22 nt, Human
acacaucagaaauaugaaugag

SEQ ID NO: 450758 - RNA, 22 nt, Human
gcagacagacugcagugauuuu

SEQ ID NO: 450759 - RNA, 22 nt, Human
ugauuuccuaggucuggagaag

SEQ ID NO: 450760 - RNA, 22 nt, Human
aaggguggauuucugagcucua

SEQ ID NO: 450761 - RNA, 22 nt, Human
ugcagaccucccauggcugccu

SEQ ID NO: 450762 - RNA, 22 nt, Human
agcugccauccgaggugucaga

SEQ ID NO: 450763 - RNA, 22 nt, Human
acagccuggccugaguuaaggc

SEQ ID NO: 450764 - RNA, 22 nt, Human
cagcuuuaccaauauuuggaaa

SEQ ID NO: 450765 - RNA, 22 nt, Human
ugccagaguuacaugaggguca

SEQ ID NO: 450766 - RNA, 22 nt, Human
aaagccagcucugagcugcacc

SEQ ID NO: 450767 - RNA, 22 nt, Human
aggcacugaaggaagcuugcgc

SEQ ID NO: 450768 - RNA, 22 nt, Human
gggcugaggcuaccacuggucu

SEQ ID NO: 450769 - RNA, 22 nt, Human
uauuuugagguauuuuugagcu

SEQ ID NO: 450770 - RNA, 22 nt, Human
aaaugucugagacuucugaacu

SEQ ID NO: 450771 - RNA, 22 nt, Human
cauuccuuaacguggggagucu

SEQ ID NO: 450772 - RNA, 22 nt, Human
uauagagguggaaacugagguu

SEQ ID NO: 450773 - RNA, 22 nt, Human
ucucagggcagcaaggaagcau

SEQ ID NO: 450774 - RNA, 22 nt, Human
aacucaguuacauauuagaaua

SEQ ID NO: 450775 - RNA, 22 nt, Human
uguauuuugugaggaucacucu

SEQ ID NO: 450776 - RNA, 22 nt, Human
uguagcauguaaauugguuauu

SEQ ID NO: 450777 - RNA, 22 nt, Human
ccagaggcuggguucaccucag

SEQ ID NO: 450778 - RNA, 22 nt, Human
ucacugcaaccucugccuuccg

SEQ ID NO: 450779 - RNA, 22 nt, Human
acuauacauugaauguuaaggu

SEQ ID NO: 450780 - RNA, 22 nt, Human
caggagcaguuagaagcccacu

SEQ ID NO: 450781 - RNA, 22 nt, Human
ggaaggagggcggcaaugauga

SEQ ID NO: 450782 - RNA, 22 nt, Human
aggcagcccacaggacacagga

SEQ ID NO: 450783 - RNA, 22 nt, Human
ucccacucccaggcaggccucu

SEQ ID NO: 450784 - RNA, 22 nt, Human
cugggcaguaugaauauucaaa

SEQ ID NO: 450785 - RNA, 22 nt, Human
ccugugucuuccccacuggugu

SEQ ID NO: 450786 - RNA, 19 nt, Human
ggaggccuggguauuugcc

SEQ ID NO: 450787 - RNA, 18 nt, Human
cccagcuccacuucccuc

SEQ ID NO: 450788 - RNA, 16 nt, Human
cagccugcagugguca

SEQ ID NO: 450789 - RNA, 22 nt, Human
uagcugccaaaagggugggcua

SEQ ID NO: 450790 - RNA, 22 nt, Human
caucuggcuagcuaucauugug

SEQ ID NO: 450791 - RNA, 22 nt, Human
ucuuuuauuaggcugaaauggg

SEQ ID NO: 450792 - RNA, 22 nt, Human
acuguguccucauguggcagaa

SEQ ID NO: 450793 - RNA, 22 nt, Human
ucacaucuuauuagaguaucuc

SEQ ID NO: 450794 - RNA, 18 nt, Human
cucagagaugcccuuauu

SEQ ID NO: 450795 - RNA, 22 nt, Human
uggggcugugagacuacaggau

SEQ ID NO: 450796 - RNA, 22 nt, Human
aaaaguaauugcaauuuuguag

SEQ ID NO: 450797 - RNA, 22 nt, Human
agagccuguaacaucuuucuua

SEQ ID NO: 450798 - RNA, 22 nt, Human
uuugcuuguucaagauuucugu

SEQ ID NO: 450799 - RNA, 22 nt, Human
gggagggaaggaccuuaugaau

SEQ ID NO: 450800 - RNA, 22 nt, Human
aauuugauuuucuuaaaccaua

SEQ ID NO: 450801 - RNA, 19 nt, Human
aaaguuuuauucucauuug

SEQ ID NO: 450802 - RNA, 21 nt, Human
aucccagcacccaggagugca

SEQ ID NO: 450803 - RNA, 22 nt, Human
aauguguauaugaacauacagg

SEQ ID NO: 450804 - RNA, 20 nt, Human
gugcaauggcucagucucag

SEQ ID NO: 450805 - RNA, 22 nt, Human
agcugccagggacugggcaugg

SEQ ID NO: 450806 - RNA, 22 nt, Human
cagggugccucccgcucgccgg

SEQ ID NO: 450807 - RNA, 22 nt, Human
gaggcagcaugguaccuuggag

SEQ ID NO: 450808 - RNA, 22 nt, Human
aaugugguuaacccauuuaaga

SEQ ID NO: 450809 - RNA, 22 nt, Human
gggcugagugucccaggccgaa

SEQ ID NO: 450810 - RNA, 22 nt, Human
ugccugccaugcagaaagcuga

SEQ ID NO: 450811 - RNA, 22 nt, Human
ccagggugcucuguggcgucgc

SEQ ID NO: 450812 - RNA, 22 nt, Human
ugcagcucauugcuggggucug

SEQ ID NO: 450813 - RNA, 20 nt, Human
agaaucugacccagagagac

SEQ ID NO: 450814 - RNA, 19 nt, Human
cagcaauaaugccagaugg

SEQ ID NO: 450815 - RNA, 22 nt, Human
accuggccauccagcuggcauc

SEQ ID NO: 450816 - RNA, 22 nt, Human
agccugcuucccuuugugcccc

SEQ ID NO: 450817 - RNA, 23 nt, Human
cuuuccuuucuuugacacccagc

SEQ ID NO: 450818 - RNA, 22 nt, Human
cauggaaggcaaaagacacaga

SEQ ID NO: 450819 - RNA, 22 nt, Human
caggcagcugcuggguucagcc

SEQ ID NO: 450820 - RNA, 22 nt, Human
aaguauauuuuuugaagcauau

SEQ ID NO: 450821 - RNA, 22 nt, Human
ugguccaggguguaguacagag

SEQ ID NO: 450822 - RNA, 22 nt, Human
agggcugagcccaggcauguag

SEQ ID NO: 450823 - RNA, 22 nt, Human
uuuccauauuuggucuuuggga

SEQ ID NO: 450824 - RNA, 22 nt, Human
gccagcuggagugagagugggc

SEQ ID NO: 450825 - RNA, 22 nt, Human
uuguucaugguuguaaguuuga

SEQ ID NO: 450826 - RNA, 22 nt, Human
gcugccuuuuaaagccucgcuu

SEQ ID NO: 450827 - RNA, 22 nt, Human
ucucacugcaaauauuauguau

SEQ ID NO: 450828 - RNA, 22 nt, Human
gagggcugauaacaggaauaca

SEQ ID NO: 450829 - RNA, 20 nt, Human
cagaggcaaggagacuugga

SEQ ID NO: 450830 - RNA, 21 nt, Human
ucaaagcacauauuugcacau

SEQ ID NO: 450831 - RNA, 22 nt, Human
gccaggcauuauuccgaucccu

SEQ ID NO: 450832 - RNA, 22 nt, Human
ugaggcagguaagcaaguuuug

SEQ ID NO: 450833 - RNA, 22 nt, Human
uagucaaaccucagaauacccc

SEQ ID NO: 450834 - RNA, 22 nt, Human
cuggcuccauccuugagcucug

SEQ ID NO: 450835 - RNA, 22 nt, Human
uccuggaguauuucuguggugu

SEQ ID NO: 450836 - RNA, 22 nt, Human
ugggccacggggguggagagcu

SEQ ID NO: 450837 - RNA, 22 nt, Human
cauuuguaguuaaaaaugucuc

SEQ ID NO: 450838 - RNA, 20 nt, Human
uccagcugggaacagcugau

SEQ ID NO: 450839 - RNA, 22 nt, Human
ccagcccuccuccaucagagga

SEQ ID NO: 450840 - RNA, 22 nt, Human
gccaugccugugucuccaggcc

SEQ ID NO: 450841 - RNA, 22 nt, Human
aguggcaguggggcagggcccu

SEQ ID NO: 450842 - RNA, 22 nt, Human
uucaaaauuguucuaagcucug

SEQ ID NO: 450843 - RNA, 22 nt, Human
ugcucucucaggccuggcccac

SEQ ID NO: 450844 - RNA, 22 nt, Human
ucauugcauuuauucacuggca

SEQ ID NO: 450845 - RNA, 22 nt, Human
agccaaggagugcagguggcuu

SEQ ID NO: 450846 - RNA, 22 nt, Human
agcugucugucuccugaggaga

SEQ ID NO: 450847 - RNA, 22 nt, Human
augauuuccaguuguugcuaag

SEQ ID NO: 450848 - RNA, 23 nt, Human
uggggagaguuacccuggaagcg

SEQ ID NO: 450849 - RNA, 22 nt, Human
ugaggcagccugcauuaaagag

SEQ ID NO: 450850 - RNA, 22 nt, Human
auguguagaacuguaaugccca

SEQ ID NO: 450851 - RNA, 23 nt, Human
cccagagcacagccuccagaugc

SEQ ID NO: 450852 - RNA, 22 nt, Human
uuuugaaagaguccugcuacag

SEQ ID NO: 450853 - RNA, 22 nt, Human
uaauuuuacuuccugagcaccu

SEQ ID NO: 450854 - RNA, 22 nt, Human
ccagcagcuuuauuggcucucc

SEQ ID NO: 450855 - RNA, 22 nt, Human
ugucauguguucuuaaauacau

SEQ ID NO: 450856 - RNA, 22 nt, Human
uugugcauuucucugagugugu

SEQ ID NO: 450857 - RNA, 22 nt, Human
gaggcaggcagauugcuugagg

SEQ ID NO: 450858 - RNA, 22 nt, Human
uugcauguuauuuaaucuguau

SEQ ID NO: 450859 - RNA, 22 nt, Human
aggcugagugcuccccuagaug

SEQ ID NO: 450860 - RNA, 22 nt, Human
gggcagguuauuggaguaggga

SEQ ID NO: 450861 - RNA, 22 nt, Human
uauguacauguuaaagggcaaa

SEQ ID NO: 450862 - RNA, 22 nt, Human
cccucccaagcacucugacaua

SEQ ID NO: 450863 - RNA, 22 nt, Human
ccugggagagucuguggucucc

SEQ ID NO: 450864 - RNA, 22 nt, Human
ucugagaguccaucuccaagcc

SEQ ID NO: 450865 - RNA, 22 nt, Human
acuuagaacaggcagaauucca

SEQ ID NO: 450866 - RNA, 20 nt, Human
agaggcuuccuugggaggag

SEQ ID NO: 450867 - RNA, 21 nt, Human
cuugaaagguagagucuacag

SEQ ID NO: 450868 - RNA, 22 nt, Human
uuugaaagagcugauacaugaa

SEQ ID NO: 450869 - RNA, 22 nt, Human
ugagagucucagaccuccuggu

SEQ ID NO: 450870 - RNA, 22 nt, Human
uggccugguaccacauagauuu

SEQ ID NO: 450871 - RNA, 22 nt, Human
ccagagcaauucucacagaacu

SEQ ID NO: 450872 - RNA, 22 nt, Human
cuuucauucuuagauauuagug

SEQ ID NO: 450873 - RNA, 21 nt, Human
ugcaugcuauguuuuuauuuc

SEQ ID NO: 450874 - RNA, 22 nt, Human
aaugucugagucucuguauccc

SEQ ID NO: 450875 - RNA, 22 nt, Human
gcugugugcucacguaguggaa

SEQ ID NO: 450876 - RNA, 22 nt, Human
cagcagaggaaagcaaaucuaa

SEQ ID NO: 450877 - RNA, 22 nt, Human
gccccagcucugccacaacuag

SEQ ID NO: 450878 - RNA, 22 nt, Human
aucaggaaauacuuauuuauaa

SEQ ID NO: 450879 - RNA, 22 nt, Human
uggaaggcaugggaacuguucu

SEQ ID NO: 450880 - RNA, 22 nt, Human
auggaaagcuaagccauuuacc

SEQ ID NO: 450881 - RNA, 23 nt, Human
aggugccaacugagagcugagag

SEQ ID NO: 450882 - RNA, 22 nt, Human
acucugagcaucccaagucuua

SEQ ID NO: 450883 - RNA, 22 nt, Human
acagaacugagaauucucuauc

SEQ ID NO: 450884 - RNA, 22 nt, Human
cagcugugggccugacguggca

SEQ ID NO: 450885 - RNA, 22 nt, Human
ccugcagaccacacucaguccu

SEQ ID NO: 450886 - RNA, 22 nt, Human
aggcacugaagugguaaaugua

SEQ ID NO: 450887 - RNA, 22 nt, Human
uccugagggcgauucagcaggu

SEQ ID NO: 450888 - RNA, 22 nt, Human
ccagagucuaugaguccucauu

SEQ ID NO: 450889 - RNA, 22 nt, Human
gccagggcaggggagcaucugc

SEQ ID NO: 450890 - RNA, 22 nt, Human
uggccuggcagagcaaggccug

SEQ ID NO: 450891 - RNA, 19 nt, Human
cagagccucagagcuagaa

SEQ ID NO: 450892 - RNA, 22 nt, Human
cuguccauuuucgugccuccuu

SEQ ID NO: 450893 - RNA, 22 nt, Human
ucacugucugaaagaaauggcc

SEQ ID NO: 450894 - RNA, 22 nt, Human
ucacuuagauggggaucaucac

SEQ ID NO: 450895 - RNA, 22 nt, Human
ccugccagcccgcguucaugcc

SEQ ID NO: 450896 - RNA, 22 nt, Human
augcaguaaauguuaagaaaaa

SEQ ID NO: 450897 - RNA, 22 nt, Human
gguucccggaucuccgaguccc

SEQ ID NO: 450898 - RNA, 22 nt, Human
aagggcucugggcuacgcacug

SEQ ID NO: 450899 - RNA, 22 nt, Human
ugggacugcucuugcugggguc

SEQ ID NO: 450900 - RNA, 22 nt, Human
ugacacaggcagcucccagcac

SEQ ID NO: 450901 - RNA, 22 nt, Human
uacaaaugaguuguaugaacca

SEQ ID NO: 450902 - RNA, 22 nt, Human
ugucucugguauuaggugaaaa

SEQ ID NO: 450903 - RNA, 22 nt, Human
agguggagaagagaugggcagu

SEQ ID NO: 450904 - RNA, 22 nt, Human
agcugggaggugggcagugaga

SEQ ID NO: 450905 - RNA, 22 nt, Human
aaugauggauuuagacaagcug

SEQ ID NO: 450906 - RNA, 22 nt, Human
aggcuccaugcaaaggcuguuu

SEQ ID NO: 450907 - RNA, 22 nt, Human
ugagaggcagaauggugccugc

SEQ ID NO: 450908 - RNA, 22 nt, Human
cagcugccugcaacacaagcuu

SEQ ID NO: 450909 - RNA, 22 nt, Human
uugaagcaggaaaauuucuauu

SEQ ID NO: 450910 - RNA, 22 nt, Human
caggcagagcaacugguccaga

SEQ ID NO: 450911 - RNA, 22 nt, Human
uggcagcagggaggccaguguu

SEQ ID NO: 450912 - RNA, 22 nt, Human
cgucuuccucuuacgaugcgcu

SEQ ID NO: 450913 - RNA, 22 nt, Human
ggucaggguuccagguaucuuc

SEQ ID NO: 450914 - RNA, 22 nt, Human
cuggacagaaaaggccacugga

SEQ ID NO: 450915 - RNA, 22 nt, Human
gaggggcagaaugugaucaggg

SEQ ID NO: 450916 - RNA, 22 nt, Human
acaggcagagaacucagccaga

SEQ ID NO: 450917 - RNA, 22 nt, Human
cccaggaguuugaguucagcau

SEQ ID NO: 450918 - RNA, 22 nt, Human
cuagagaggcagauguccugug

SEQ ID NO: 450919 - RNA, 22 nt, Human
uggccagguugggcuuugcagc

SEQ ID NO: 450920 - RNA, 22 nt, Human
acacugaaugcuguuuagaaau

SEQ ID NO: 450921 - RNA, 22 nt, Human
uccauauuaacuaaaacuagaa

SEQ ID NO: 450922 - RNA, 22 nt, Human
aagcuuuaagugucagucagcc

SEQ ID NO: 450923 - RNA, 22 nt, Human
uuugcauuguuucaaaagugaa

SEQ ID NO: 450924 - RNA, 23 nt, Human
acucacaaagcaggaucauguug

SEQ ID NO: 450925 - RNA, 22 nt, Human
uggcuuucucccccagcuucuc

SEQ ID NO: 450926 - RNA, 22 nt, Human
cugcaggggccucgagcacagg

SEQ ID NO: 450927 - RNA, 23 nt, Human
uggccuggagagaaaagaugagu

SEQ ID NO: 450928 - RNA, 22 nt, Human
agucucagaguaccugagggac

SEQ ID NO: 450929 - RNA, 22 nt, Human
uucacaaaaaugcugaacaguu

SEQ ID NO: 450930 - RNA, 22 nt, Human
aaggcaggaugcggacccaucu

SEQ ID NO: 450931 - RNA, 21 nt, Human
aaugugugcuauuuaucuuuu

SEQ ID NO: 450932 - RNA, 23 nt, Human
gccuggccaccccagggcugcuu

SEQ ID NO: 450933 - RNA, 22 nt, Human
aaggccaucuacuuacggaauu

SEQ ID NO: 450934 - RNA, 22 nt, Human
auauaaaguguuuagaaagcug

SEQ ID NO: 450935 - RNA, 22 nt, Human
cagcaggggaacugugggccag

SEQ ID NO: 450936 - RNA, 22 nt, Human
agaggccacuuugccugugaug

SEQ ID NO: 450937 - RNA, 22 nt, Human
cccaggugggcaccucgaggaa

SEQ ID NO: 450938 - RNA, 22 nt, Human
ucagauggguuuugaaggaugu

SEQ ID NO: 450939 - RNA, 22 nt, Human
uaaaugugcacagguuagaagg

SEQ ID NO: 450940 - RNA, 22 nt, Human
cucuccagccacagaagcugcu

SEQ ID NO: 450941 - RNA, 22 nt, Human
gaugccuccaaaugagggcaga

SEQ ID NO: 450942 - RNA, 22 nt, Human
ucagaaaugaucguuauucauu

SEQ ID NO: 450943 - RNA, 22 nt, Human
ggcugaguugagaggauuacuu

SEQ ID NO: 450944 - RNA, 22 nt, Human
ccuggcagcaggugggcccgug

SEQ ID NO: 450945 - RNA, 22 nt, Human
uggcagcaguagccaccccagc

SEQ ID NO: 450946 - RNA, 21 nt, Human
agaaaaacacgauauaagccc

SEQ ID NO: 450947 - RNA, 22 nt, Human
ggcgcuggccacgguggcucug

SEQ ID NO: 450948 - RNA, 22 nt, Human
cagagugaacagugggaugugc

SEQ ID NO: 450949 - RNA, 22 nt, Human
ccugcaggcugcaggccaguuc

SEQ ID NO: 450950 - RNA, 22 nt, Human
ucuguuuaggcaaaauagcuac

SEQ ID NO: 450951 - RNA, 22 nt, Human
ggcugggcugcugggucagagc

SEQ ID NO: 450952 - RNA, 22 nt, Human
caggcccagcccagcccuucga

SEQ ID NO: 450953 - RNA, 22 nt, Human
ggccaggagauggacaccacau

SEQ ID NO: 450954 - RNA, 21 nt, Human
ccucugcucgggcaugcguuu

SEQ ID NO: 450955 - RNA, 22 nt, Human
cagccuucugaaugaacguacu

SEQ ID NO: 450956 - RNA, 22 nt, Human
gaggggaaagugugaggcugcg

SEQ ID NO: 450957 - RNA, 20 nt, Human
gaaaugugaccucuucugug

SEQ ID NO: 450958 - RNA, 22 nt, Human
ugggcucauggcccagcacugg

SEQ ID NO: 450959 - RNA, 22 nt, Human
guggauggauugaggcaguggg

SEQ ID NO: 450960 - RNA, 22 nt, Human
ugcagugccucggcagugcagc

SEQ ID NO: 450961 - RNA, 22 nt, Human
cauggcagagaaggggaacugg

SEQ ID NO: 450962 - RNA, 22 nt, Human
ggcccaaggcccaggucgagcu

SEQ ID NO: 450963 - RNA, 22 nt, Human
cagcugagucugagguucuuug

SEQ ID NO: 450964 - RNA, 22 nt, Human
uggcugaggcuuuucuuaaaga

SEQ ID NO: 450965 - RNA, 22 nt, Human
ucaggcugugggcacuggccau

SEQ ID NO: 450966 - RNA, 18 nt, Human
gagaggcccggcugugcc

SEQ ID NO: 450967 - RNA, 22 nt, Human
ggaggcuccacugcucuuccug

SEQ ID NO: 450968 - RNA, 22 nt, Human
ccuggaaggcaggcauggauug

SEQ ID NO: 450969 - RNA, 22 nt, Human
gaggccaaguuggagaccaggu

SEQ ID NO: 450970 - RNA, 23 nt, Human
gcagacagagcagacuaagacaa

SEQ ID NO: 450971 - RNA, 22 nt, Human
ggccagagucuauaugcagaca

SEQ ID NO: 450972 - RNA, 22 nt, Human
aaaauccugcugacucgagaug

SEQ ID NO: 450973 - RNA, 22 nt, Human
gcagccacuaguuuuccuguuu

SEQ ID NO: 450974 - RNA, 22 nt, Human
uggggcugucccgguuuggcga

SEQ ID NO: 450975 - RNA, 22 nt, Human
gggcuggcucccagguguugaa

SEQ ID NO: 450976 - RNA, 20 nt, Human
aggcucaggguguuuaggaa

SEQ ID NO: 450977 - RNA, 22 nt, Human
caggguggaaaagcuaguugga

SEQ ID NO: 450978 - RNA, 22 nt, Human
cagcugugaauugucuuaucua

SEQ ID NO: 450979 - RNA, 22 nt, Human
cacuuagucucaccaguucagu

SEQ ID NO: 450980 - RNA, 22 nt, Human
acagcuguggucuccuuagugu

SEQ ID NO: 450981 - RNA, 22 nt, Human
agggcugcaucugccuggugaa

SEQ ID NO: 450982 - RNA, 19 nt, Human
acauuuaaauucagaucuc

SEQ ID NO: 450983 - RNA, 22 nt, Human
gagaaccucuccacaagucugg

SEQ ID NO: 450984 - RNA, 22 nt, Human
cugccagcucgccacaaugaca

SEQ ID NO: 450985 - RNA, 22 nt, Human
cugggagcccugacuagccugg

SEQ ID NO: 450986 - RNA, 22 nt, Human
uggccugacugucaggcuguau

SEQ ID NO: 450987 - RNA, 22 nt, Human
gggcugagcacauacugacagc

SEQ ID NO: 450988 - RNA, 22 nt, Human
ucugucuuagcaucuuugcuca

SEQ ID NO: 450989 - RNA, 22 nt, Human
ugaccugcagucaagaggggaa

SEQ ID NO: 450990 - RNA, 22 nt, Human
guauuuucaagagcaguaguau

SEQ ID NO: 450991 - RNA, 22 nt, Human
ucuuaaaaguaugccaauugga

SEQ ID NO: 450992 - RNA, 22 nt, Human
acaggggauugauuggaagucu

SEQ ID NO: 450993 - RNA, 22 nt, Human
uaacagcuggcguuauaggaau

SEQ ID NO: 450994 - RNA, 22 nt, Human
augucuuuuaugauuacgggau

SEQ ID NO: 450995 - RNA, 22 nt, Human
ucauugcaccccagucccagcu

SEQ ID NO: 450996 - RNA, 22 nt, Human
uacuuuuugucucuuugaaugu

SEQ ID NO: 450997 - RNA, 22 nt, Human
agcaggagcugugggaagaugg

SEQ ID NO: 450998 - RNA, 22 nt, Human
auuaauuuuucugacagccaca

SEQ ID NO: 450999 - RNA, 22 nt, Human
auaucuuuguaugguucagcag

SEQ ID NO: 451000 - RNA, 22 nt, Human
ugccaggcuuagagcaggggcu

SEQ ID NO: 451001 - RNA, 22 nt, Human
uccaucaccauuucugcgagcu

SEQ ID NO: 451002 - RNA, 20 nt, Human
aaagucuuaugguuaauuuu

SEQ ID NO: 451003 - RNA, 22 nt, Human
agggcugcaccggggcuucgcg

SEQ ID NO: 451004 - RNA, 22 nt, Human
agccugcuggaccaagcucaug

SEQ ID NO: 451005 - RNA, 22 nt, Human
ugcaaucucggcacuuugggag

SEQ ID NO: 451006 - RNA, 22 nt, Human
cucagaaguucagccuagagua

SEQ ID NO: 451007 - RNA, 22 nt, Human
ugagagagccugaaucucuuac

SEQ ID NO: 451008 - RNA, 22 nt, Human
gaaucacgguauucugcacggg

SEQ ID NO: 451009 - RNA, 22 nt, Human
caagaaaugggauuugacugcc

SEQ ID NO: 451010 - RNA, 23 nt, Human
ucuuuacauacugaugaguucuc

SEQ ID NO: 451011 - RNA, 22 nt, Human
uuugcauuuugauaagaucacu

SEQ ID NO: 451012 - RNA, 22 nt, Human
gaaggaagucauuagugcagac

SEQ ID NO: 451013 - RNA, 22 nt, Human
ggaaagaggauaguggguaggu

SEQ ID NO: 451014 - RNA, 22 nt, Human
ggccugagcucuggggaggcaa

SEQ ID NO: 451015 - RNA, 22 nt, Human
gggaaccagccgcuuccgccuc

SEQ ID NO: 451016 - RNA, 20 nt, Human
uauuuacaacuuagagccuc

SEQ ID NO: 451017 - RNA, 19 nt, Human
auuugaaagcugugcuugc

SEQ ID NO: 451018 - RNA, 22 nt, Human
gcagauggcagcccaggcuggg

SEQ ID NO: 451019 - RNA, 22 nt, Human
uccagugguaguaaagaggucu

SEQ ID NO: 451020 - RNA, 22 nt, Human
ugauuuccaaaaggcuucuaag

SEQ ID NO: 451021 - RNA, 22 nt, Human
uuuuaauccucuugguaucuua

SEQ ID NO: 451022 - RNA, 22 nt, Human
gaaacuuuuaaaccucaugagu

SEQ ID NO: 451023 - RNA, 20 nt, Human
cagccuccacucacucagcu

SEQ ID NO: 451024 - RNA, 22 nt, Human
auauuucuugagcaccugguau

SEQ ID NO: 451025 - RNA, 20 nt, Human
caguagcaauaauuagaagc

SEQ ID NO: 451026 - RNA, 22 nt, Human
gcaggcaggagcccaacugccu

SEQ ID NO: 451027 - RNA, 22 nt, Human
cugccaucugagccaaaagugc

SEQ ID NO: 451028 - RNA, 22 nt, Human
ggcugcaggaugcccagccgug

SEQ ID NO: 451029 - RNA, 22 nt, Human
acaaagugaauugcaucgaguu

SEQ ID NO: 451030 - RNA, 22 nt, Human
acagggcagagugaaaugcuau

SEQ ID NO: 451031 - RNA, 21 nt, Human
acagaugggaugagcacacug

SEQ ID NO: 451032 - RNA, 22 nt, Human
gcuggcuguguuccuucugcca

SEQ ID NO: 451033 - RNA, 22 nt, Human
aggcagggugaugauaaugauu

SEQ ID NO: 451034 - RNA, 20 nt, Human
ucugcccaccccggcuccca

SEQ ID NO: 451035 - RNA, 22 nt, Human
aucaggaucugcaucauaagaa

SEQ ID NO: 451036 - RNA, 22 nt, Human
ccugagagcauuccacacugaa

SEQ ID NO: 451037 - RNA, 22 nt, Human
aagggcagcuauuaucgucauc

SEQ ID NO: 451038 - RNA, 22 nt, Human
ccagggaggguccuguggcuuc

SEQ ID NO: 451039 - RNA, 22 nt, Human
aucuaggauuugaaugcacagu

SEQ ID NO: 451040 - RNA, 22 nt, Human
agcagccagaaagggcagucga

SEQ ID NO: 451041 - RNA, 22 nt, Human
ucugaggcauacccaggccccc

SEQ ID NO: 451042 - RNA, 22 nt, Human
ggucauugucagagccuguacu

SEQ ID NO: 451043 - RNA, 22 nt, Human
ccagcuccagguagaugggcag

SEQ ID NO: 451044 - RNA, 22 nt, Human
aagcaauaagccagauuuggau

SEQ ID NO: 451045 - RNA, 22 nt, Human
ucugucacccaggcuggagugc

SEQ ID NO: 451046 - RNA, 22 nt, Human
cuccaggccauggcugcggagg

SEQ ID NO: 451047 - RNA, 22 nt, Human
uggcugccuagugucugagcag

SEQ ID NO: 451048 - RNA, 22 nt, Human
auauucacugagcauaaagcca

SEQ ID NO: 451049 - RNA, 22 nt, Human
aggccagcuguuacuagagcca

SEQ ID NO: 451050 - RNA, 22 nt, Human
agccucugacugucagcaaggu

SEQ ID NO: 451051 - RNA, 22 nt, Human
ugcugccucagcuuccugggcu

SEQ ID NO: 451052 - RNA, 22 nt, Human
agaaauguuguggguuuuguua

SEQ ID NO: 451053 - RNA, 22 nt, Human
aagggcagcugacagaugcuua

SEQ ID NO: 451054 - RNA, 22 nt, Human
ucuggaguccagauccauuugg

SEQ ID NO: 451055 - RNA, 22 nt, Human
agcugccucagcaacacagacc

SEQ ID NO: 451056 - RNA, 22 nt, Human
gccugguguccagaggcgagug

SEQ ID NO: 451057 - RNA, 19 nt, Human
ccagcagcuuugauucucu

SEQ ID NO: 451058 - RNA, 23 nt, Human
ucugucacuuucugcuguggagu

SEQ ID NO: 451059 - RNA, 22 nt, Human
uccagcagcccgaaggcccauc

SEQ ID NO: 451060 - RNA, 22 nt, Human
accgggaaguccugcacugggc

SEQ ID NO: 451061 - RNA, 22 nt, Human
ggcugugaacccuggcagugug

SEQ ID NO: 451062 - RNA, 17 nt, Human
ugcauguccuuuguucc

SEQ ID NO: 451063 - RNA, 22 nt, Human
agccaacuaggagauuaaggua

SEQ ID NO: 451064 - RNA, 22 nt, Human
acagagcaauucuuggguguuu

SEQ ID NO: 451065 - RNA, 22 nt, Human
gcagggcaugggcccugucugc

SEQ ID NO: 451066 - RNA, 22 nt, Human
aaggagucucagcugggccuga

SEQ ID NO: 451067 - RNA, 22 nt, Human
ccagggcugcugugggacucca

SEQ ID NO: 451068 - RNA, 22 nt, Human
guaaacaugcuguguacucagc

SEQ ID NO: 451069 - RNA, 22 nt, Human
ucugcagcuucuugccagagag

SEQ ID NO: 451070 - RNA, 23 nt, Human
ucaugcccaggcuccagauguca

SEQ ID NO: 451071 - RNA, 22 nt, Human
uggagcucaaaggccuguggga

SEQ ID NO: 451072 - RNA, 22 nt, Human
ccugucugcagauaucucaggu

SEQ ID NO: 451073 - RNA, 22 nt, Human
uagcagcuuaaguaauuagaau

SEQ ID NO: 451074 - RNA, 22 nt, Human
ccuggcagguggcgcccucggc

SEQ ID NO: 451075 - RNA, 22 nt, Human
cccugcaguccuuucuuggcuc

SEQ ID NO: 451076 - RNA, 22 nt, Human
acuccugguuuguguccuggcu

SEQ ID NO: 451077 - RNA, 22 nt, Human
gggcagguggcagggucucugg

SEQ ID NO: 451078 - RNA, 22 nt, Human
agucucagcaagcauggcuagu

SEQ ID NO: 451079 - RNA, 22 nt, Human
cagugagggcauucagugcugg

SEQ ID NO: 451080 - RNA, 22 nt, Human
cagcugccuaugaccuagccuc

SEQ ID NO: 451081 - RNA, 23 nt, Human
ccuggcuggauucucugcauuca

SEQ ID NO: 451082 - RNA, 22 nt, Human
cugcugagcaucagggcugccc

SEQ ID NO: 451083 - RNA, 22 nt, Human
ggcuucccaaggagccaggaug

SEQ ID NO: 451084 - RNA, 22 nt, Human
ccugccugcaaaaugggacaag

SEQ ID NO: 451085 - RNA, 22 nt, Human
caaaugcagucccuuuguugcu

SEQ ID NO: 451086 - RNA, 22 nt, Human
ccagcagaagcucccgcugggu

SEQ ID NO: 451087 - RNA, 22 nt, Human
uauacagaaccgccugaagucu

SEQ ID NO: 451088 - RNA, 22 nt, Human
gggagggaagguaccuguguga

SEQ ID NO: 451089 - RNA, 22 nt, Human
cccucugcugccuggcuggguc

SEQ ID NO: 451090 - RNA, 22 nt, Human
gcacugaaugccaaaguguagg

SEQ ID NO: 451091 - RNA, 22 nt, Human
gccugcagauauauaggauggu

SEQ ID NO: 451092 - RNA, 22 nt, Human
agaauuagguaaguucaucuga

SEQ ID NO: 451093 - RNA, 22 nt, Human
guuuacaugcagaaaaucaaug

SEQ ID NO: 451094 - RNA, 22 nt, Human
cagcugcaugucuguggugguc

SEQ ID NO: 451095 - RNA, 22 nt, Human
acaggcaggcgggacagcccga

SEQ ID NO: 451096 - RNA, 22 nt, Human
cuguggcauugccgaggcuggc

SEQ ID NO: 451097 - RNA, 22 nt, Human
cagcuggccugaucccuguggc

SEQ ID NO: 451098 - RNA, 22 nt, Human
aguccggggucuggacaccugg

SEQ ID NO: 451099 - RNA, 22 nt, Human
gaaggccaagaggcuccaagau

SEQ ID NO: 451100 - RNA, 22 nt, Human
uccuuuccaugcuucuagaggc

SEQ ID NO: 451101 - RNA, 22 nt, Human
uacaaaaguaauuacgguuuuu

SEQ ID NO: 451102 - RNA, 22 nt, Human
uuuuuaagcuccuuugauguca

SEQ ID NO: 451103 - RNA, 22 nt, Human
ggaaagccaggugcucuggugu

SEQ ID NO: 451104 - RNA, 22 nt, Human
auuauguagcuaaaaauugugu

SEQ ID NO: 451105 - RNA, 22 nt, Human
cuauuagguuggugcaaaagua

SEQ ID NO: 451106 - RNA, 22 nt, Human
ggugaagggccuuaggagacag

SEQ ID NO: 451107 - RNA, 22 nt, Human
cauggcaggugcagauucugug

SEQ ID NO: 451108 - RNA, 22 nt, Human
ugcagaagacacaagguaacgu

SEQ ID NO: 451109 - RNA, 22 nt, Human
ucugucugcgcuugcccuggug

SEQ ID NO: 451110 - RNA, 19 nt, Human
gcauuucucuuuacagcca

SEQ ID NO: 451111 - RNA, 22 nt, Human
auucaguuaaaaacuguacuuc

SEQ ID NO: 451112 - RNA, 22 nt, Human
uucauuaguucugaagaugucu

SEQ ID NO: 451113 - RNA, 22 nt, Human
aaggcaguuugggccaccaucu

SEQ ID NO: 451114 - RNA, 22 nt, Human
ggagaggugaauggcugcucua

SEQ ID NO: 451115 - RNA, 19 nt, Human
uggcuccugccugccuucu

SEQ ID NO: 451116 - RNA, 22 nt, Human
cugcccugagggccuguguguu

SEQ ID NO: 451117 - RNA, 22 nt, Human
agcuucuugaccaagccuguaa

SEQ ID NO: 451118 - RNA, 22 nt, Human
ugacauuuuaucaauaucacag

SEQ ID NO: 451119 - RNA, 22 nt, Human
ugugccagaaaauaugcugagg

SEQ ID NO: 451120 - RNA, 22 nt, Human
aaaugcauuuuuaauuagaccc

SEQ ID NO: 451121 - RNA, 22 nt, Human
gggcuagaaauucugcagugga

SEQ ID NO: 451122 - RNA, 22 nt, Human
gccagguggcugagcagcugca

SEQ ID NO: 451123 - RNA, 22 nt, Human
caaggccaguuucuccuaguca

SEQ ID NO: 451124 - RNA, 22 nt, Human
ugucccaguucccaggguugcu

SEQ ID NO: 451125 - RNA, 22 nt, Human
agcagugggggaguguuaguuu

SEQ ID NO: 451126 - RNA, 22 nt, Human
caguauuuauggcuugaguauu

SEQ ID NO: 451127 - RNA, 22 nt, Human
uggaggaaaaaaccaggcagag

SEQ ID NO: 451128 - RNA, 22 nt, Human
cagccagggagggcaaaugaga

SEQ ID NO: 451129 - RNA, 22 nt, Human
uaauguguugaauauuuguaca

SEQ ID NO: 451130 - RNA, 22 nt, Human
agggugcagaaggagccuagga

SEQ ID NO: 451131 - RNA, 22 nt, Human
cuccucugucuggcccugagcc

SEQ ID NO: 451132 - RNA, 22 nt, Human
gucucagaguccuacuuauucc

SEQ ID NO: 451133 - RNA, 22 nt, Human
cucugcaugccuugcucagaca

SEQ ID NO: 451134 - RNA, 22 nt, Human
uggcugcugcuuggucuucuuc

SEQ ID NO: 451135 - RNA, 22 nt, Human
uucauucccaagaguaaacaua

SEQ ID NO: 451136 - RNA, 22 nt, Human
caggaugugaggaggccauuug

SEQ ID NO: 451137 - RNA, 22 nt, Human
agauuucagaugcucggcaguu

SEQ ID NO: 451138 - RNA, 22 nt, Human
aaggaaccauuugugugcaugg

SEQ ID NO: 451139 - RNA, 22 nt, Human
uggcagcaaguucuugggaggu

SEQ ID NO: 451140 - RNA, 22 nt, Human
uggcaggaaaaacauuggagau

SEQ ID NO: 451141 - RNA, 22 nt, Human
aaguguuuggggaucauuuuaa

SEQ ID NO: 451142 - RNA, 21 nt, Human
ccuggcugcacaguugcuggu

SEQ ID NO: 451143 - RNA, 22 nt, Human
agccagcaggugagugcagccu

SEQ ID NO: 451144 - RNA, 22 nt, Human
agagagcccgggccagggcaca

SEQ ID NO: 451145 - RNA, 22 nt, Human
ucccagagacagagccuccucc

SEQ ID NO: 451146 - RNA, 22 nt, Human
accucugcaacccuggaauggg

SEQ ID NO: 451147 - RNA, 22 nt, Human
gcccagaaguugaggcugcagu

SEQ ID NO: 451148 - RNA, 22 nt, Human
uggcucucagcucccagcagcc

SEQ ID NO: 451149 - RNA, 22 nt, Human
ccaucccuucucuggccagcag

SEQ ID NO: 451150 - RNA, 22 nt, Human
cagaguggcacucugcuggaug

SEQ ID NO: 451151 - RNA, 22 nt, Human
agcaggaguuugaugcuuuuau

SEQ ID NO: 451152 - RNA, 22 nt, Human
ggcuucagugacuggugcccuc

SEQ ID NO: 451153 - RNA, 22 nt, Human
ggccucaguuucuccauggguu

SEQ ID NO: 451154 - RNA, 18 nt, Human
uccgaggcaccauaaaaa

SEQ ID NO: 451155 - RNA, 22 nt, Human
ucucaagcuuguugguauguuu

SEQ ID NO: 451156 - RNA, 22 nt, Human
aggcucugugacaaucaagcug

SEQ ID NO: 451157 - RNA, 22 nt, Human
uggcuucuugggaugggucauu

SEQ ID NO: 451158 - RNA, 22 nt, Human
uggcucagaggggaagugguuu

SEQ ID NO: 451159 - RNA, 22 nt, Human
cagagaaagggugaauuccuuc

SEQ ID NO: 451160 - RNA, 22 nt, Human
gaagcccauuuguacagcacau

SEQ ID NO: 451161 - RNA, 22 nt, Human
uuaaagggccgauuuccaggcc

SEQ ID NO: 451162 - RNA, 22 nt, Human
cucuuaaagcuuccaguuucaa

SEQ ID NO: 451163 - RNA, 22 nt, Human
uugcaucuagggcaacccagag

SEQ ID NO: 451164 - RNA, 22 nt, Human
ucuuuuuauauugacaaaaggu

SEQ ID NO: 451165 - RNA, 23 nt, Human
ugagaagccauuagagcaggugg

SEQ ID NO: 451166 - RNA, 22 nt, Human
gaagcccuauccucuccuggga

SEQ ID NO: 451167 - RNA, 19 nt, Human
uguuggugcggauguggag

SEQ ID NO: 451168 - RNA, 22 nt, Human
agcaggguauguuagagcugua

SEQ ID NO: 451169 - RNA, 22 nt, Human
ucucagugcuauccauauucca

SEQ ID NO: 451170 - RNA, 22 nt, Human
ugaagcaguuacuggguguuaa

SEQ ID NO: 451171 - RNA, 22 nt, Human
ggugcagugguguggcaaaggg

SEQ ID NO: 451172 - RNA, 22 nt, Human
aggaccuguagggccugcaucc

SEQ ID NO: 451173 - RNA, 22 nt, Human
cuggccugagcacagcggcugc

SEQ ID NO: 451174 - RNA, 21 nt, Human
guggcucugccaggacugaaa

SEQ ID NO: 451175 - RNA, 22 nt, Human
ucucugagcugcuucuugcaua

SEQ ID NO: 451176 - RNA, 22 nt, Human
ugguggcaucacucagccuccc

SEQ ID NO: 451177 - RNA, 22 nt, Human
ccuguacauuagcugugaauug

SEQ ID NO: 451178 - RNA, 22 nt, Human
caauuucucgaacucuaaucca

SEQ ID NO: 451179 - RNA, 21 nt, Human
aggugcaggccucaagcccca

SEQ ID NO: 451180 - RNA, 19 nt, Human
ucauucaggaccaguggau

SEQ ID NO: 451181 - RNA, 21 nt, Human
ucagcuuugcaacugcacauc

SEQ ID NO: 451182 - RNA, 22 nt, Human
uuuguacauauauaaaaucugu

SEQ ID NO: 451183 - RNA, 22 nt, Human
ucugucucaaguucuugcacuc

SEQ ID NO: 451184 - RNA, 22 nt, Human
ucacacgugagguucuauccug

SEQ ID NO: 451185 - RNA, 22 nt, Human
aguuucuauuuucaugucuguu

SEQ ID NO: 451186 - RNA, 22 nt, Human
uacagaauuagauuauuagaga

SEQ ID NO: 451187 - RNA, 22 nt, Human
aaccaggacaauuuugaaagua

SEQ ID NO: 451188 - RNA, 22 nt, Human
gggaggaaagagaaguggucca

SEQ ID NO: 451189 - RNA, 22 nt, Human
ggcucuggaaaguguccuugau

SEQ ID NO: 451190 - RNA, 22 nt, Human
gccaggcuguuuuuauuacugu

SEQ ID NO: 451191 - RNA, 22 nt, Human
agaagugccauacuguggucca

SEQ ID NO: 451192 - RNA, 22 nt, Human
gaaaagggcaagagagagggca

SEQ ID NO: 451193 - RNA, 22 nt, Human
cacauaaguggguuccauugca

SEQ ID NO: 451194 - RNA, 22 nt, Human
guguaucaaagcacagacuuca

SEQ ID NO: 451195 - RNA, 21 nt, Human
uuucaauguguucuuuguagu

SEQ ID NO: 451196 - RNA, 22 nt, Human
ucugucuuugagaucucagccu

SEQ ID NO: 451197 - RNA, 22 nt, Human
cugucuguuuuaccuucuccag

SEQ ID NO: 451198 - RNA, 22 nt, Human
gaggggcucuugggcaugaagg

SEQ ID NO: 451199 - RNA, 22 nt, Human
ggcuucccuuuccgagaggaga

SEQ ID NO: 451200 - RNA, 22 nt, Human
gugggaugcaguggugaguggc

SEQ ID NO: 451201 - RNA, 22 nt, Human
ggucucugacuuagagauggau

SEQ ID NO: 451202 - RNA, 22 nt, Human
aaauugcaaaaguacuuuuagg

SEQ ID NO: 451203 - RNA, 20 nt, Human
agcaccagugggggcagccc

SEQ ID NO: 451204 - RNA, 23 nt, Human
agacagaggcugaggcuggccgc

SEQ ID NO: 451205 - RNA, 22 nt, Human
cuggcagcugugugaagaacug

SEQ ID NO: 451206 - RNA, 22 nt, Human
cuuccaaauguaaauaaguuuc

SEQ ID NO: 451207 - RNA, 22 nt, Human
cugggcagcuaccaccacugcu

SEQ ID NO: 451208 - RNA, 22 nt, Human
aauuuagauugauaaacaugga

SEQ ID NO: 451209 - RNA, 22 nt, Human
cagccuguagaauacaguaaau

SEQ ID NO: 451210 - RNA, 23 nt, Human
ggaaagagaggaguugugcauag

SEQ ID NO: 451211 - RNA, 22 nt, Human
ucugagggugggagaaggagcu

SEQ ID NO: 451212 - RNA, 22 nt, Human
guuauuuuaucucugagagguu

SEQ ID NO: 451213 - RNA, 22 nt, Human
cagcucucuaaggucuugcuuu

SEQ ID NO: 451214 - RNA, 22 nt, Human
ggccugaggccaccagcagccc

SEQ ID NO: 451215 - RNA, 22 nt, Human
ccugcaggggagagacuucuag

SEQ ID NO: 451216 - RNA, 22 nt, Human
auucuggccuuggcucugucac

SEQ ID NO: 451217 - RNA, 20 nt, Human
ccagcuuucccugcagcauc

SEQ ID NO: 451218 - RNA, 22 nt, Human
uucaugugaucacagauuguaa

SEQ ID NO: 451219 - RNA, 19 nt, Human
agcagccaucgaccaugga

SEQ ID NO: 451220 - RNA, 21 nt, Human
uaucuacuggugucuuucaga

SEQ ID NO: 451221 - RNA, 22 nt, Human
uggagcugagagccaggcuggc

SEQ ID NO: 451222 - RNA, 22 nt, Human
gccaggcuggucuugaacuccu

SEQ ID NO: 451223 - RNA, 22 nt, Human
agaguggggaagguguugagaa

SEQ ID NO: 451224 - RNA, 22 nt, Human
ucagaggacgcacuaggguugu

SEQ ID NO: 451225 - RNA, 22 nt, Human
gccucccuguagaggccagccu

SEQ ID NO: 451226 - RNA, 22 nt, Human
agaggcccucucucuccugaug

SEQ ID NO: 451227 - RNA, 22 nt, Human
ccagcaccuugaucuuggaguu

SEQ ID NO: 451228 - RNA, 22 nt, Human
ucuuaaaccacaaaauucagag

SEQ ID NO: 451229 - RNA, 22 nt, Human
gcauccagucuuggcuccugga

SEQ ID NO: 451230 - RNA, 22 nt, Human
aucuggcuugacuuugcgacuu

SEQ ID NO: 451231 - RNA, 22 nt, Human
acaugauuaaaagauuuuaaag

SEQ ID NO: 451232 - RNA, 22 nt, Human
ccagugggugcugggcucugcc

SEQ ID NO: 451233 - RNA, 22 nt, Human
cagcagagcuuauguuggguca

SEQ ID NO: 451234 - RNA, 22 nt, Human
uuagcuaaacuguaacuagaau

SEQ ID NO: 451235 - RNA, 22 nt, Human
uuuagaguugaguauucauugg

SEQ ID NO: 451236 - RNA, 22 nt, Human
gccaggcacugcucuaagcccu

SEQ ID NO: 451237 - RNA, 19 nt, Human
cccucaggucugagcaguc

SEQ ID NO: 451238 - RNA, 20 nt, Human
gacaucauguacacauugcc

SEQ ID NO: 451239 - RNA, 22 nt, Human
gcugucacaucaaggcacuaaa

SEQ ID NO: 451240 - RNA, 18 nt, Human
acagacaaaauggaaaug

SEQ ID NO: 451241 - RNA, 22 nt, Human
guugaaagagcauggacuugaa

SEQ ID NO: 451242 - RNA, 22 nt, Human
gggcagcucuggcugugggaag

SEQ ID NO: 451243 - RNA, 22 nt, Human
aguucuagaagacuuuuccauu

SEQ ID NO: 451244 - RNA, 22 nt, Human
ggcucaggcuggagugcagugg

SEQ ID NO: 451245 - RNA, 22 nt, Human
ugggacaguuguccuccacucu

SEQ ID NO: 451246 - RNA, 22 nt, Human
caggaugagguagaggcagaua

SEQ ID NO: 451247 - RNA, 22 nt, Human
cuguuuaucuaggaguugcagg

SEQ ID NO: 451248 - RNA, 22 nt, Human
gcacacaguauaugcucauuaa

SEQ ID NO: 451249 - RNA, 22 nt, Human
cagcaaaauuugaggauugccu

SEQ ID NO: 451250 - RNA, 22 nt, Human
ccuauugacaauucucuucucc

SEQ ID NO: 451251 - RNA, 22 nt, Human
ggccuggccuccagaugugggc

SEQ ID NO: 451252 - RNA, 22 nt, Human
cccagcucaagcagagagcuaa

SEQ ID NO: 451253 - RNA, 22 nt, Human
aacaggcaaacugugggauccc

SEQ ID NO: 451254 - RNA, 19 nt, Human
cucuuaaauugucucuugc

SEQ ID NO: 451255 - RNA, 22 nt, Human
aaggcaguacuuuauguccaua

SEQ ID NO: 451256 - RNA, 22 nt, Human
uuccagaauuuuguucugcuug

SEQ ID NO: 451257 - RNA, 22 nt, Human
agcagcugcagggagggucugc

SEQ ID NO: 451258 - RNA, 22 nt, Human
ucucucagcuuugagaccugcu

SEQ ID NO: 451259 - RNA, 22 nt, Human
ccagggugugggcgucggcacg

SEQ ID NO: 451260 - RNA, 17 nt, Human
uuuucucucuuggauuc

SEQ ID NO: 451261 - RNA, 22 nt, Human
ugguugccucucagagauuccg

SEQ ID NO: 451262 - RNA, 22 nt, Human
cucagaauuuagggcucugagg

SEQ ID NO: 451263 - RNA, 22 nt, Human
cagaggccaccuguggccacug

SEQ ID NO: 451264 - RNA, 21 nt, Human
agcagaggcugccuggugacu

SEQ ID NO: 451265 - RNA, 22 nt, Human
ugugugccugagccgugccugg

SEQ ID NO: 451266 - RNA, 22 nt, Human
agaauuuuugauuaucuacucg

SEQ ID NO: 451267 - RNA, 22 nt, Human
agacaucauguuacagauuaag

SEQ ID NO: 451268 - RNA, 22 nt, Human
guuuuuaucuaauagcaguuau

SEQ ID NO: 451269 - RNA, 22 nt, Human
gcagccagccccucugaccucu

SEQ ID NO: 451270 - RNA, 22 nt, Human
agagaggcgaguuaccugugcu

SEQ ID NO: 451271 - RNA, 22 nt, Human
uucugucucccugauguagagc

SEQ ID NO: 451272 - RNA, 22 nt, Human
gcuaucuucauggaaauacagg

SEQ ID NO: 451273 - RNA, 22 nt, Human
uccuuuuugguccaaggugacc

SEQ ID NO: 451274 - RNA, 22 nt, Human
uuccauaauaaccugagagaaa

SEQ ID NO: 451275 - RNA, 22 nt, Human
cuucagaggggacucaaaguca

SEQ ID NO: 451276 - RNA, 22 nt, Human
aucuguaaaugcaaauguagcu

SEQ ID NO: 451277 - RNA, 22 nt, Human
ucauuugugugagugauuugac

SEQ ID NO: 451278 - RNA, 22 nt, Human
aagauucucagagugaaagaau

SEQ ID NO: 451279 - RNA, 22 nt, Human
cauuucuauggcaaugggaaaa

SEQ ID NO: 451280 - RNA, 22 nt, Human
ucaugcccagagcaguaaauua

SEQ ID NO: 451281 - RNA, 22 nt, Human
cagggagaagucuggucagucc

SEQ ID NO: 451282 - RNA, 22 nt, Human
gucugcccucacgccagcuggg

SEQ ID NO: 451283 - RNA, 22 nt, Human
gcugccugcacagagcugcuuu

SEQ ID NO: 451284 - RNA, 22 nt, Human
uccugcagccaagggucaucga

SEQ ID NO: 451285 - RNA, 22 nt, Human
caaaggcaacauauacuuguuu

SEQ ID NO: 451286 - RNA, 22 nt, Human
acuuugugcccaacagaaagaa

SEQ ID NO: 451287 - RNA, 22 nt, Human
gcagcugcuggaaguuccugcc

SEQ ID NO: 451288 - RNA, 22 nt, Human
gggcagugguccaggcuacagc

SEQ ID NO: 451289 - RNA, 22 nt, Human
gcagcuuucugggacagaaagg

SEQ ID NO: 451290 - RNA, 23 nt, Human
aggagaagagauuuccacaugca

SEQ ID NO: 451291 - RNA, 22 nt, Human
ccagagagauugcuucuaaaga

SEQ ID NO: 451292 - RNA, 22 nt, Human
agcagccagaaauccagaggug

SEQ ID NO: 451293 - RNA, 20 nt, Human
guauuaggagguaaauguaa

SEQ ID NO: 451294 - RNA, 22 nt, Human
ucugucauaaacacacacaagc

SEQ ID NO: 451295 - RNA, 22 nt, Human
uucacaaagcuggagcauuucc

SEQ ID NO: 451296 - RNA, 22 nt, Human
uggagggcaucuguggucaggc

SEQ ID NO: 451297 - RNA, 22 nt, Human
ccugacgaaaggcgugcuggag

SEQ ID NO: 451298 - RNA, 19 nt, Human
uucaggauugacccuacug

SEQ ID NO: 451299 - RNA, 22 nt, Human
auauucuuccaaaacaucauuu

SEQ ID NO: 451300 - RNA, 22 nt, Human
guccugggaaggaagccaggga

SEQ ID NO: 451301 - RNA, 22 nt, Human
ggcacugacugugcagcgcacc

SEQ ID NO: 451302 - RNA, 22 nt, Human
auacaaaaauuagccgggagua

SEQ ID NO: 451303 - RNA, 22 nt, Human
aggagaaguaaggcuagaugau

SEQ ID NO: 451304 - RNA, 22 nt, Human
ugcuggcucaguuugcagacuc

SEQ ID NO: 451305 - RNA, 22 nt, Human
cacugcaguuccccagugcgca

SEQ ID NO: 451306 - RNA, 19 nt, Human
agacucugccacucuucuc

SEQ ID NO: 451307 - RNA, 22 nt, Human
gugaaggacuagcauggagggc

SEQ ID NO: 451308 - RNA, 22 nt, Human
uaccaaauguaaucauucuaau

SEQ ID NO: 451309 - RNA, 22 nt, Human
cuguguccugcgucaagccaau

SEQ ID NO: 451310 - RNA, 22 nt, Human
gcucugagccgggggccugucc

SEQ ID NO: 451311 - RNA, 22 nt, Human
cccagcccagcguucgaggggu

SEQ ID NO: 451312 - RNA, 20 nt, Human
accucugcaucaauccuuug

SEQ ID NO: 451313 - RNA, 22 nt, Human
agaggucauaucucagaagaga

SEQ ID NO: 451314 - RNA, 22 nt, Human
ucuguaucuaauuuuacaguag

SEQ ID NO: 451315 - RNA, 23 nt, Human
aagcugccuucgcaguuggucug

SEQ ID NO: 451316 - RNA, 21 nt, Human
acagggcaugcagcuggcugu

SEQ ID NO: 451317 - RNA, 22 nt, Human
aaggugucacugggacaggaaa

SEQ ID NO: 451318 - RNA, 22 nt, Human
ccaggcaucacgggcauguggc

SEQ ID NO: 451319 - RNA, 21 nt, Human
gcaggggauagaaauggucug

SEQ ID NO: 451320 - RNA, 22 nt, Human
caaugacauggauaaucauauu

SEQ ID NO: 451321 - RNA, 22 nt, Human
aucaggauuauuaaaucuggau

SEQ ID NO: 451322 - RNA, 22 nt, Human
caggaagcugagcugcacugca

SEQ ID NO: 451323 - RNA, 22 nt, Human
ugggcaggggcccugcuuccgu

SEQ ID NO: 451324 - RNA, 23 nt, Human
uguaaaaugggguaguguuacca

SEQ ID NO: 451325 - RNA, 23 nt, Human
ucuguacacaucagcaucuccca

SEQ ID NO: 451326 - RNA, 22 nt, Human
ccaaggagcucauauucuuguu

SEQ ID NO: 451327 - RNA, 22 nt, Human
guggguggaggcgucgagggca

SEQ ID NO: 451328 - RNA, 22 nt, Human
aagggcuggcccugggaagagu

SEQ ID NO: 451329 - RNA, 22 nt, Human
guccucagcaccagaacuaggg

SEQ ID NO: 451330 - RNA, 22 nt, Human
uggcaggauuugcccggaagga

SEQ ID NO: 451331 - RNA, 22 nt, Human
uuuauuauagugguggggacug

SEQ ID NO: 451332 - RNA, 17 nt, Human
gcaguggagggguaguu

SEQ ID NO: 451333 - RNA, 22 nt, Human
gcccucagcuccuggacacaug

SEQ ID NO: 451334 - RNA, 22 nt, Human
acagaacugcaggaggaaaagc

SEQ ID NO: 451335 - RNA, 22 nt, Human
ugggaggaucgcuugagcccag

SEQ ID NO: 451336 - RNA, 22 nt, Human
agguggagugaaggaaaggcag

SEQ ID NO: 451337 - RNA, 22 nt, Human
aucuacaggcugaggugggagg

SEQ ID NO: 451338 - RNA, 22 nt, Human
aucaggauuacacggggaugcu

SEQ ID NO: 451339 - RNA, 22 nt, Human
cacguuuuaugacagaagaagc

SEQ ID NO: 451340 - RNA, 22 nt, Human
ugaagcaggugaauggaugucg

SEQ ID NO: 451341 - RNA, 22 nt, Human
ggcagagcuuguuccuucuguu

SEQ ID NO: 451342 - RNA, 22 nt, Human
ugccugggccucugaggaaggc

SEQ ID NO: 451343 - RNA, 22 nt, Human
agaaagaacguugguuaucuua

SEQ ID NO: 451344 - RNA, 22 nt, Human
gugcauuugugcaugcacaugu

SEQ ID NO: 451345 - RNA, 22 nt, Human
ggcuggcuggcugguagacaag

SEQ ID NO: 451346 - RNA, 22 nt, Human
ccacccagaccagggaucuggg

SEQ ID NO: 451347 - RNA, 22 nt, Human
agccuccacagaugcaaagggc

SEQ ID NO: 451348 - RNA, 18 nt, Human
ggcaugugagugcugagg

SEQ ID NO: 451349 - RNA, 22 nt, Human
gagcccagguucugcuuccagc

SEQ ID NO: 451350 - RNA, 22 nt, Human
guuauguacuuuuuaaaucuug

SEQ ID NO: 451351 - RNA, 22 nt, Human
uauagaaguaagcauugugaug

SEQ ID NO: 451352 - RNA, 22 nt, Human
ugccagucucacccuggguccu

SEQ ID NO: 451353 - RNA, 22 nt, Human
ucaggggcccuucccucagcag

SEQ ID NO: 451354 - RNA, 22 nt, Human
cagcauggggcuuggagucagc

SEQ ID NO: 451355 - RNA, 22 nt, Human
gcugcugcgcuugucuacuguu

SEQ ID NO: 451356 - RNA, 22 nt, Human
gagcagcucgagaaggaagcag

SEQ ID NO: 451357 - RNA, 22 nt, Human
guccucuggccuuucccaggac

SEQ ID NO: 451358 - RNA, 22 nt, Human
uggcucagucuggguugacuga

SEQ ID NO: 451359 - RNA, 22 nt, Human
aggcccugaagucggccccuca

SEQ ID NO: 451360 - RNA, 22 nt, Human
auccuugagccaaugacugauu

SEQ ID NO: 451361 - RNA, 22 nt, Human
acagagauguggaugagggauu

SEQ ID NO: 451362 - RNA, 22 nt, Human
ccuccuggugggcgcuucuggc

SEQ ID NO: 451363 - RNA, 22 nt, Human
accaggcacucuuguggcagug

SEQ ID NO: 451364 - RNA, 22 nt, Human
ggcggggguccaggagccugca

SEQ ID NO: 451365 - RNA, 22 nt, Human
agaaugcaagauaaacuuuauu

SEQ ID NO: 451366 - RNA, 19 nt, Human
gagcacagcggcauuuggu

SEQ ID NO: 451367 - RNA, 20 nt, Human
cuguggcaucugucauggug

SEQ ID NO: 451368 - RNA, 22 nt, Human
cuggagggugagccucaucucu

SEQ ID NO: 451369 - RNA, 22 nt, Human
uagacacauccguggaagcuuc

SEQ ID NO: 451370 - RNA, 22 nt, Human
augcaucauggaaaacucaguu

SEQ ID NO: 451371 - RNA, 22 nt, Human
cggggcugcucguccuccugug

SEQ ID NO: 451372 - RNA, 22 nt, Human
agaagugccgaaaggaagacag

SEQ ID NO: 451373 - RNA, 22 nt, Human
ggugaggcuaagugacacaggg

SEQ ID NO: 451374 - RNA, 22 nt, Human
ggacacagauaaucacacagau

SEQ ID NO: 451375 - RNA, 22 nt, Human
uccucugccccagaugaaauuu

SEQ ID NO: 451376 - RNA, 22 nt, Human
ccaggccuggaccaugccaggg

SEQ ID NO: 451377 - RNA, 22 nt, Human
ggcuccugggaugggacugagc

SEQ ID NO: 451378 - RNA, 22 nt, Human
agcuguguagggaaucagagaa

SEQ ID NO: 451379 - RNA, 22 nt, Human
ucggagcuguagaugaaacccu

SEQ ID NO: 451380 - RNA, 22 nt, Human
gccaaaucacagggccaaaagc

SEQ ID NO: 451381 - RNA, 22 nt, Human
cugggcagcuguaucagggagu

SEQ ID NO: 451382 - RNA, 17 nt, Human
gagagcugcugcuuccg

SEQ ID NO: 451383 - RNA, 22 nt, Human
gggacuggcacagggcugggag

SEQ ID NO: 451384 - RNA, 22 nt, Human
ugaaggcacuugccuaggggca

SEQ ID NO: 451385 - RNA, 22 nt, Human
uuaguaauguguuaauaugaau

SEQ ID NO: 451386 - RNA, 21 nt, Human
uuuuuucuugcgugaggccug

SEQ ID NO: 451387 - RNA, 22 nt, Human
caguggccaugguggcaggggu

SEQ ID NO: 451388 - RNA, 22 nt, Human
cuggggcugcggacgggagccc

SEQ ID NO: 451389 - RNA, 22 nt, Human
uuugaaaggaaguuaauacuuu

SEQ ID NO: 451390 - RNA, 22 nt, Human
ggaagagagggcugggccucaa

SEQ ID NO: 451391 - RNA, 22 nt, Human
acacagggcagagagcuggcuc

SEQ ID NO: 451392 - RNA, 22 nt, Human
agcuguguggugucugacagcu

SEQ ID NO: 451393 - RNA, 22 nt, Human
ggccuugggauguggcugcagc

SEQ ID NO: 451394 - RNA, 22 nt, Human
uuugcauuucuaaugagcuccg

SEQ ID NO: 451395 - RNA, 22 nt, Human
agggccagaugaagccacaagc

SEQ ID NO: 451396 - RNA, 22 nt, Human
ggcagcagggcugucucccuac

SEQ ID NO: 451397 - RNA, 22 nt, Human
cugcugggcuccucaugugacu

SEQ ID NO: 451398 - RNA, 22 nt, Human
aaaugcagguaguauuuauuuu

SEQ ID NO: 451399 - RNA, 22 nt, Human
agacccugucaguguuaggaaa

SEQ ID NO: 451400 - RNA, 22 nt, Human
ccuggagcuuggucacgcugcg

SEQ ID NO: 451401 - RNA, 22 nt, Human
cugcugugggcaggguagcugg

SEQ ID NO: 451402 - RNA, 22 nt, Human
cugcaggcucgaagacacggau

SEQ ID NO: 451403 - RNA, 22 nt, Human
uggccuccccuaacagccucuu

SEQ ID NO: 451404 - RNA, 22 nt, Human
agaaauacuaggaauauucaua

SEQ ID NO: 451405 - RNA, 22 nt, Human
ugaaagaacuagcaucuucaag

SEQ ID NO: 451406 - RNA, 22 nt, Human
cauuuuauccucugggaagcua

SEQ ID NO: 451407 - RNA, 22 nt, Human
cucuuccuacagucugcuaugc

SEQ ID NO: 451408 - RNA, 22 nt, Human
augauugcagcccuacagcugu

SEQ ID NO: 451409 - RNA, 22 nt, Human
cagggccaugaggcacaggguc

SEQ ID NO: 451410 - RNA, 22 nt, Human
ugggccugggcuccuguccucu

SEQ ID NO: 451411 - RNA, 22 nt, Human
gccgugcgugcgcaggugcugu

SEQ ID NO: 451412 - RNA, 22 nt, Human
gcuggccucaucacugacuucu

SEQ ID NO: 451413 - RNA, 20 nt, Human
cagaccugcacccacuucga

SEQ ID NO: 451414 - RNA, 22 nt, Human
uggcugcagaucaagggcaggc

SEQ ID NO: 451415 - RNA, 22 nt, Human
ugcccacaggaagacaccagcg

SEQ ID NO: 451416 - RNA, 22 nt, Human
uucacaguggcugugccauuug

SEQ ID NO: 451417 - RNA, 22 nt, Human
ccagugcacagccaggcaggug

SEQ ID NO: 451418 - RNA, 22 nt, Human
uaaugcuuuguuuugaucuaac

SEQ ID NO: 451419 - RNA, 22 nt, Human
gcagggcuauuggaaggagaug

SEQ ID NO: 451420 - RNA, 22 nt, Human
ccugccaggcuuugggcuucug

SEQ ID NO: 451421 - RNA, 22 nt, Human
ucuguggccuguguccaagugc

SEQ ID NO: 451422 - RNA, 22 nt, Human
agauggguaacuggagucugcu

SEQ ID NO: 451423 - RNA, 22 nt, Human
agagccaggaaguggcgugggg

SEQ ID NO: 451424 - RNA, 22 nt, Human
uggcagugggaagcuggaaguc

SEQ ID NO: 451425 - RNA, 22 nt, Human
gcagagcauguccucaggacag

SEQ ID NO: 451426 - RNA, 22 nt, Human
agagaacacgugcaucugcaau

SEQ ID NO: 451427 - RNA, 18 nt, Human
uggccuggagacaacucu

SEQ ID NO: 451428 - RNA, 20 nt, Human
agcugaggcaccugagguua

SEQ ID NO: 451429 - RNA, 22 nt, Human
ugcacacaaaugugaacgugcc

SEQ ID NO: 451430 - RNA, 22 nt, Human
auugaaagguuuugagcagaua

SEQ ID NO: 451431 - RNA, 22 nt, Human
aaggcacuagcaagcugccugg

SEQ ID NO: 451432 - RNA, 22 nt, Human
gagagaggccuccauguacuga

SEQ ID NO: 451433 - RNA, 22 nt, Human
gcguaaggccucuggucucgga

SEQ ID NO: 451434 - RNA, 22 nt, Human
acaggcuguugggguccagggu

SEQ ID NO: 451435 - RNA, 22 nt, Human
cacugcuuauaaauucuaggca

SEQ ID NO: 451436 - RNA, 22 nt, Human
gugaggugggcuggccagagac

SEQ ID NO: 451437 - RNA, 22 nt, Human
gggcagagacucagaaacagaa

SEQ ID NO: 451438 - RNA, 22 nt, Human
aacaguaucuuuuaucagaaau

SEQ ID NO: 451439 - RNA, 22 nt, Human
gugcauauaugcacauaugugu

SEQ ID NO: 451440 - RNA, 22 nt, Human
ccucacagcuuuucaaagugga

SEQ ID NO: 451441 - RNA, 22 nt, Human
caggccaggcugcauuugcccc

SEQ ID NO: 451442 - RNA, 22 nt, Human
uuccaaagaaauugaccaagac

SEQ ID NO: 451443 - RNA, 22 nt, Human
uggaaggagcuaaggaccuggg

SEQ ID NO: 451444 - RNA, 22 nt, Human
guugacagcuggugagcugcua

SEQ ID NO: 451445 - RNA, 22 nt, Human
cagaauuugaaguaauauucca

SEQ ID NO: 451446 - RNA, 22 nt, Human
ucaccagggcuccagccagccu

SEQ ID NO: 451447 - RNA, 22 nt, Human
cccagcucucugcucuuagccu

SEQ ID NO: 451448 - RNA, 22 nt, Human
uggaggcaguaacugagcaaca

SEQ ID NO: 451449 - RNA, 22 nt, Human
aggcucagcccaagguggagag

SEQ ID NO: 451450 - RNA, 22 nt, Human
ggaggagacggagugauuagug

SEQ ID NO: 451451 - RNA, 22 nt, Human
gcuccugggcucuaccuugcua

SEQ ID NO: 451452 - RNA, 21 nt, Human
aagaacuauugagguacacag

SEQ ID NO: 451453 - RNA, 22 nt, Human
uacaaaguauauuucuagcugu

SEQ ID NO: 451454 - RNA, 22 nt, Human
cuccugguucagagagcugaga

SEQ ID NO: 451455 - RNA, 22 nt, Human
gaagagcugcaguuuccugggc

SEQ ID NO: 451456 - RNA, 19 nt, Human
gcacacccugcaccaccau

SEQ ID NO: 451457 - RNA, 22 nt, Human
ccucucccacguggcagaggcu

SEQ ID NO: 451458 - RNA, 22 nt, Human
gcugucacucuccggccuuccc

SEQ ID NO: 451459 - RNA, 22 nt, Human
uuuguuuucaaugugucauuca

SEQ ID NO: 451460 - RNA, 20 nt, Human
cucuuaaauguaaaguaggc

SEQ ID NO: 451461 - RNA, 22 nt, Human
gccaggccugcaagugcuggug

SEQ ID NO: 451462 - RNA, 22 nt, Human
ggaggcacuucccgucucagcc

SEQ ID NO: 451463 - RNA, 22 nt, Human
ccagggcaacgcugucucagag

SEQ ID NO: 451464 - RNA, 22 nt, Human
ucaagagauugaauaauaacug

SEQ ID NO: 451465 - RNA, 22 nt, Human
ucucuuauuuugccuuugacaa

SEQ ID NO: 451466 - RNA, 22 nt, Human
gaggcugguaggaaaggaaaca

SEQ ID NO: 451467 - RNA, 22 nt, Human
acuggcagcuguaggaugcaug

SEQ ID NO: 451468 - RNA, 20 nt, Human
ggggcugcaugcagagaaga

SEQ ID NO: 451469 - RNA, 22 nt, Human
agagccuggaccugagcuacaa

SEQ ID NO: 451470 - RNA, 22 nt, Human
gcaaaggccacuggggcgaugg

SEQ ID NO: 451471 - RNA, 22 nt, Human
aggcaccuugagagcaggagcu

SEQ ID NO: 451472 - RNA, 19 nt, Human
cugagagaugcuucacaca

SEQ ID NO: 451473 - RNA, 22 nt, Human
ucuaggagaaccaucagggagg

SEQ ID NO: 451474 - RNA, 20 nt, Human
ugcugcaguuucaugggacu

SEQ ID NO: 451475 - RNA, 20 nt, Human
cagaaggucuaagcuuuaga

SEQ ID NO: 451476 - RNA, 22 nt, Human
ugagcaucuuuuuacagguuua

SEQ ID NO: 451477 - RNA, 22 nt, Human
aguguuccugcucucaggaagc

SEQ ID NO: 451478 - RNA, 22 nt, Human
acuaagaccuagauacuagggg

SEQ ID NO: 451479 - RNA, 22 nt, Human
cagaggaaaguauuucuggaag

SEQ ID NO: 451480 - RNA, 22 nt, Human
gcacuaaaccaacauguaauaa

SEQ ID NO: 451481 - RNA, 22 nt, Human
ccacagggcacagacaggaagc

SEQ ID NO: 451482 - RNA, 22 nt, Human
ggcugccuggaccuccucuuuc

SEQ ID NO: 451483 - RNA, 22 nt, Human
aguauuucugcucaugaaagag

SEQ ID NO: 451484 - RNA, 22 nt, Human
cccagcagccagaaugaggagc

SEQ ID NO: 451485 - RNA, 22 nt, Human
ugcuggaggccugacuguguuu

SEQ ID NO: 451486 - RNA, 22 nt, Human
gagggcuccacacgggcccagc

SEQ ID NO: 451487 - RNA, 22 nt, Human
gcuguacaaauuccacaagaga

SEQ ID NO: 451488 - RNA, 22 nt, Human
gaagccacagagauuguggggg

SEQ ID NO: 451489 - RNA, 22 nt, Human
cugcugcugagagcucagccug

SEQ ID NO: 451490 - RNA, 22 nt, Human
ccagggcucaggcucccagugg

SEQ ID NO: 451491 - RNA, 19 nt, Human
ugcaagugucuuggacaag

SEQ ID NO: 451492 - RNA, 22 nt, Human
ucugccuguugcuagaauguca

SEQ ID NO: 451493 - RNA, 22 nt, Human
aguuuauagcccagauucaugg

SEQ ID NO: 451494 - RNA, 20 nt, Human
guaaaauauggucuuugggu

SEQ ID NO: 451495 - RNA, 22 nt, Human
ugaggcuuagagaagaugggau

SEQ ID NO: 451496 - RNA, 22 nt, Human
cuggaaggucuguccccacugc

SEQ ID NO: 451497 - RNA, 22 nt, Human
ccagcugcugugcagggaggcu

SEQ ID NO: 451498 - RNA, 16 nt, Human
agcagggcgggaagga

SEQ ID NO: 451499 - RNA, 22 nt, Human
cagcugcccaggccaccuggag

SEQ ID NO: 451500 - RNA, 22 nt, Human
ucauucuccucuggaaaaggca

SEQ ID NO: 451501 - RNA, 23 nt, Human
ugacacauuuccuuuccacugca

SEQ ID NO: 451502 - RNA, 22 nt, Human
gcuguauuccugcacuguauag

SEQ ID NO: 451503 - RNA, 22 nt, Human
gguuucaacuucaaccucucca

SEQ ID NO: 451504 - RNA, 22 nt, Human
uuucagaugcaauuaauuuuca

SEQ ID NO: 451505 - RNA, 22 nt, Human
gugcagagaaaugagaagucga

SEQ ID NO: 451506 - RNA, 22 nt, Human
uauuacugagguuuuauggagu

SEQ ID NO: 451507 - RNA, 22 nt, Human
ugccugucucugacugccauua

SEQ ID NO: 451508 - RNA, 22 nt, Human
agggaauguagcaagaugccaa

SEQ ID NO: 451509 - RNA, 22 nt, Human
agaaugcuccagagcugaaaga

SEQ ID NO: 451510 - RNA, 22 nt, Human
gaggaagggcugccugccgggc

SEQ ID NO: 451511 - RNA, 22 nt, Human
ccucugcucugguccaugugcu

SEQ ID NO: 451512 - RNA, 20 nt, Human
ugcucugucuaaaacuuccc

SEQ ID NO: 451513 - RNA, 22 nt, Human
ggggacaguuaaagaccaagac

SEQ ID NO: 451514 - RNA, 22 nt, Human
auugaaagcacaaagaacaagu

SEQ ID NO: 451515 - RNA, 22 nt, Human
aagucauugguagcuugauagg

SEQ ID NO: 451516 - RNA, 22 nt, Human
uaauacuuaccuugcagagucu

SEQ ID NO: 451517 - RNA, 22 nt, Human
gguggccuccagggcauaggug

SEQ ID NO: 451518 - RNA, 22 nt, Human
cacagggcagagaccugggugc

SEQ ID NO: 451519 - RNA, 22 nt, Human
uucacuuaacaucauaucauga

SEQ ID NO: 451520 - RNA, 22 nt, Human
agccugagccccauccagcuga

SEQ ID NO: 451521 - RNA, 22 nt, Human
gaugcacuuucuuuucaacagu

SEQ ID NO: 451522 - RNA, 22 nt, Human
acuuuuuacaggguguauacca

SEQ ID NO: 451523 - RNA, 22 nt, Human
ugaggcaggacugagcgggaug

SEQ ID NO: 451524 - RNA, 23 nt, Human
uggcugagcccacuaucuuggcc

SEQ ID NO: 451525 - RNA, 22 nt, Human
gguuugguuuuggccaucuucc

SEQ ID NO: 451526 - RNA, 22 nt, Human
aaaguucugggggagaagaacg

SEQ ID NO: 451527 - RNA, 22 nt, Human
cauuuguagcuauuuacuguau

SEQ ID NO: 451528 - RNA, 22 nt, Human
agaaaaaucuuggcgcuugucu

SEQ ID NO: 451529 - RNA, 22 nt, Human
ggagcacccugcucagccaagc

SEQ ID NO: 451530 - RNA, 22 nt, Human
gacagcagggacauguaggaag

SEQ ID NO: 451531 - RNA, 17 nt, Human
agaaagaggauccacag

SEQ ID NO: 451532 - RNA, 22 nt, Human
auacuuuggucacuauuauugg

SEQ ID NO: 451533 - RNA, 22 nt, Human
aggcagaugguaacugugauau

SEQ ID NO: 451534 - RNA, 22 nt, Human
agggagguaggagcuucuagcu

SEQ ID NO: 451535 - RNA, 22 nt, Human
ugcagaggagucagccugggca

SEQ ID NO: 451536 - RNA, 21 nt, Human
gccauuguuuucuaccuggag

SEQ ID NO: 451537 - RNA, 22 nt, Human
ucuguaguagguuguaguucuu

SEQ ID NO: 451538 - RNA, 22 nt, Human
uccaaacacccuccaugcugca

SEQ ID NO: 451539 - RNA, 22 nt, Human
auucauuugcuauuguguaugg

SEQ ID NO: 451540 - RNA, 22 nt, Human
gcucagaggcacgaccucuugg

SEQ ID NO: 451541 - RNA, 22 nt, Human
gcuggccugaccagccacaggc

SEQ ID NO: 451542 - RNA, 22 nt, Human
augggggccugaacaggcaaaa

SEQ ID NO: 451543 - RNA, 22 nt, Human
ucacugcucuccaauguggagu

SEQ ID NO: 451544 - RNA, 22 nt, Human
cugucaucacaguugagcagcc

SEQ ID NO: 451545 - RNA, 22 nt, Human
uaugcacauugguuuccucauu

SEQ ID NO: 451546 - RNA, 20 nt, Human
cacaagagaauacacacugg

SEQ ID NO: 451547 - RNA, 22 nt, Human
ccugcagggaaucgaggcagaa

SEQ ID NO: 451548 - RNA, 22 nt, Human
cauugacaucaggcuuggccaa

SEQ ID NO: 451549 - RNA, 22 nt, Human
aggcgcagaaggccaggggccu

SEQ ID NO: 451550 - RNA, 22 nt, Human
uuuacacaaaagauagcacacc

SEQ ID NO: 451551 - RNA, 22 nt, Human
agaauucugacaauagaauugg

SEQ ID NO: 451552 - RNA, 22 nt, Human
gggucuccauguuaacaucacu

SEQ ID NO: 451553 - RNA, 22 nt, Human
cacugcagaucagaggcugaga

SEQ ID NO: 451554 - RNA, 22 nt, Human
auuuuagagaaacaaacguagg

SEQ ID NO: 451555 - RNA, 22 nt, Human
ucccugggcaucacguugcuuc

SEQ ID NO: 451556 - RNA, 22 nt, Human
gcagcugagagaagaacagggc

SEQ ID NO: 451557 - RNA, 22 nt, Human
aggcugaguuucucauucucgc

SEQ ID NO: 451558 - RNA, 22 nt, Human
acagcaagccagcuugucacug

SEQ ID NO: 451559 - RNA, 22 nt, Human
cacugaagaugcgacuagugcu

SEQ ID NO: 451560 - RNA, 23 nt, Human
gaagcagaugucugaguaggcag

SEQ ID NO: 451561 - RNA, 19 nt, Human
augucuguugaauuucaua

SEQ ID NO: 451562 - RNA, 22 nt, Human
ucaaggcuaaacuuucagagua

SEQ ID NO: 451563 - RNA, 22 nt, Human
cuguggcuuucucugccuccuu

SEQ ID NO: 451564 - RNA, 22 nt, Human
guggaggagaggcgccuugcgg

SEQ ID NO: 451565 - RNA, 18 nt, Human
aggccugggaagcugagg

SEQ ID NO: 451566 - RNA, 22 nt, Human
acagacuguuugguucaugucu

SEQ ID NO: 451567 - RNA, 20 nt, Human
cagagaccugucuucacaga

SEQ ID NO: 451568 - RNA, 22 nt, Human
caggugggaccaugauagggca

SEQ ID NO: 451569 - RNA, 22 nt, Human
gaagcaaagagcuagugccgcu

SEQ ID NO: 451570 - RNA, 20 nt, Human
ucucugagcuucucuugggg

SEQ ID NO: 451571 - RNA, 22 nt, Human
uccagccuuucuacucacugag

SEQ ID NO: 451572 - RNA, 22 nt, Human
ggggcagcuaccggaaguaggg

SEQ ID NO: 451573 - RNA, 17 nt, Human
acacagggagagggagc

SEQ ID NO: 451574 - RNA, 22 nt, Human
ucauuuaauugguuuugcucgu

SEQ ID NO: 451575 - RNA, 20 nt, Human
cccugagaccagagagcagc

SEQ ID NO: 451576 - RNA, 22 nt, Human
ugaagcccugugucagcuucca

SEQ ID NO: 451577 - RNA, 22 nt, Human
gcauguguggaggagaugugcu

SEQ ID NO: 451578 - RNA, 22 nt, Human
ugagcccaggaguuggagaccg

SEQ ID NO: 451579 - RNA, 22 nt, Human
uagcugucagcaaucaaguggu

SEQ ID NO: 451580 - RNA, 22 nt, Human
uguccacaucacucacuuguca

SEQ ID NO: 451581 - RNA, 20 nt, Human
aggagcugaauuagaggguu

SEQ ID NO: 451582 - RNA, 22 nt, Human
uaugcacaauaugaucuauuug

SEQ ID NO: 451583 - RNA, 22 nt, Human
ggccucugguucacagggagga

SEQ ID NO: 451584 - RNA, 22 nt, Human
gccugagcaggcguggaccaug

SEQ ID NO: 451585 - RNA, 22 nt, Human
guuucuuagguaaauucuuuga

SEQ ID NO: 451586 - RNA, 22 nt, Human
agggacuauuuacccaucucac

SEQ ID NO: 451587 - RNA, 21 nt, Human
ccauaauuuuguuucagaagu

SEQ ID NO: 451588 - RNA, 22 nt, Human
ugcaggugccucuugagcuugu

SEQ ID NO: 451589 - RNA, 22 nt, Human
uggcucaggaucuaagcagaau

SEQ ID NO: 451590 - RNA, 22 nt, Human
aucuggguucaccaugcuccug

SEQ ID NO: 451591 - RNA, 21 nt, Human
uggaccuguccuucucgcugu

SEQ ID NO: 451592 - RNA, 22 nt, Human
uguccucuuccagugcuccuuc

SEQ ID NO: 451593 - RNA, 22 nt, Human
gcaggaagaggcucgaagcccc

SEQ ID NO: 451594 - RNA, 22 nt, Human
ggccagagaagucagacccuug

SEQ ID NO: 451595 - RNA, 22 nt, Human
cugucagguuggucucagagcu

SEQ ID NO: 451596 - RNA, 22 nt, Human
ucccagagacaucauuucuccg

SEQ ID NO: 451597 - RNA, 22 nt, Human
auuucuuuucaagagggugcuu

SEQ ID NO: 451598 - RNA, 22 nt, Human
aagauuuacuagcauaauagcu

SEQ ID NO: 451599 - RNA, 22 nt, Human
augcaguagauaggcacuuuua

SEQ ID NO: 451600 - RNA, 22 nt, Human
agcuggggguuggauaagggua

SEQ ID NO: 451601 - RNA, 22 nt, Human
cuagggcacuaggacucaugug

SEQ ID NO: 451602 - RNA, 22 nt, Human
cuaaaugccuuuccuaccuaac

SEQ ID NO: 451603 - RNA, 22 nt, Human
uggggcagcuccaucuauucca

SEQ ID NO: 451604 - RNA, 23 nt, Human
acagugugguggacaaggagcag

SEQ ID NO: 451605 - RNA, 22 nt, Human
gcagagccaggagcccaggauc

SEQ ID NO: 451606 - RNA, 22 nt, Human
uagggcucacugagaugaauau

SEQ ID NO: 451607 - RNA, 22 nt, Human
gccuggguccacugaucaugcu

SEQ ID NO: 451608 - RNA, 22 nt, Human
cagagaaagaagcccauucauu

SEQ ID NO: 451609 - RNA, 19 nt, Human
agccagugagccucugggu

SEQ ID NO: 451610 - RNA, 22 nt, Human
uccugggaagagaccugagcau

SEQ ID NO: 451611 - RNA, 22 nt, Human
cccugggcagucugcacuucag

SEQ ID NO: 451612 - RNA, 22 nt, Human
uauaacaguuuaggugguguca

SEQ ID NO: 451613 - RNA, 22 nt, Human
ccuggcagguggagguugcagu

SEQ ID NO: 451614 - RNA, 22 nt, Human
gguuggggcgagcuggaggccc

SEQ ID NO: 451615 - RNA, 22 nt, Human
gcugcucuuuucagagaugaga

SEQ ID NO: 451616 - RNA, 22 nt, Human
uaauccaauggcacaauguaug

SEQ ID NO: 451617 - RNA, 22 nt, Human
cucuggagugcagccugguggc

SEQ ID NO: 451618 - RNA, 22 nt, Human
uugauacagcagccugugaucc

SEQ ID NO: 451619 - RNA, 19 nt, Human
gcugugggacagcagggug

SEQ ID NO: 451620 - RNA, 20 nt, Human
uuguuucugcuauuuucuaa

SEQ ID NO: 451621 - RNA, 22 nt, Human
gccucugcucggacuuugccuc

SEQ ID NO: 451622 - RNA, 22 nt, Human
aaaaugaacagaacaaugggga

SEQ ID NO: 451623 - RNA, 22 nt, Human
auucuaggcuugaaacaugaag

SEQ ID NO: 451624 - RNA, 22 nt, Human
guggcugggcuccgagcggcuu

SEQ ID NO: 451625 - RNA, 22 nt, Human
ccugcagacacuuguccagcaa

SEQ ID NO: 451626 - RNA, 21 nt, Human
ugacauuuccaauauaaagcc

SEQ ID NO: 451627 - RNA, 22 nt, Human
ggccaggcugcugggaccccgc

SEQ ID NO: 451628 - RNA, 22 nt, Human
cccucugccugggaccaagucc

SEQ ID NO: 451629 - RNA, 22 nt, Human
uagucuuuuuaauaaauaaugc

SEQ ID NO: 451630 - RNA, 22 nt, Human
cugagcagccccaccagccauu

SEQ ID NO: 451631 - RNA, 22 nt, Human
gcuguccugggaacaggcacua

SEQ ID NO: 451632 - RNA, 17 nt, Human
cccugccaccaggaagc

SEQ ID NO: 451633 - RNA, 22 nt, Human
gccugccuagaauugcagcuuu

SEQ ID NO: 451634 - RNA, 22 nt, Human
agggaccugcucacugccuggc

SEQ ID NO: 451635 - RNA, 21 nt, Human
gacaaagugaagcaggcagga

SEQ ID NO: 451636 - RNA, 22 nt, Human
ggcugggagcuggacaggccgg

SEQ ID NO: 451637 - RNA, 22 nt, Human
uggccugaggcucggcaugggu

SEQ ID NO: 451638 - RNA, 22 nt, Human
aagggcugggucugguuaaccc

SEQ ID NO: 451639 - RNA, 22 nt, Human
ccuggcugaaccaaugaagugg

SEQ ID NO: 451640 - RNA, 22 nt, Human
uaggcagggauuaggguugauu

SEQ ID NO: 451641 - RNA, 22 nt, Human
ugcuggaggggccugaccagga

SEQ ID NO: 451642 - RNA, 20 nt, Human
ggagagcagggaagacagua

SEQ ID NO: 451643 - RNA, 22 nt, Human
gaagcagcucagauugacugaa

SEQ ID NO: 451644 - RNA, 22 nt, Human
gaggcugcugagagcccuguuu

SEQ ID NO: 451645 - RNA, 22 nt, Human
aaaucugggagcagcucggcca

SEQ ID NO: 451646 - RNA, 22 nt, Human
ggggcuguuuuuggaauggcug

SEQ ID NO: 451647 - RNA, 22 nt, Human
gccagccuucuguggccugcaa

SEQ ID NO: 451648 - RNA, 22 nt, Human
uccuguggagaggacuggaggu

SEQ ID NO: 451649 - RNA, 22 nt, Human
uccagccuaauguucuucccac

SEQ ID NO: 451650 - RNA, 22 nt, Human
agagucagcuuaugacacaguc

SEQ ID NO: 451651 - RNA, 22 nt, Human
aucuccaggcauuucaagagac

SEQ ID NO: 451652 - RNA, 22 nt, Human
uuuacauugcauuagguauuau

SEQ ID NO: 451653 - RNA, 22 nt, Human
agaugagggguagaaaggacuu

SEQ ID NO: 451654 - RNA, 22 nt, Human
auuuccaccggcucaggaaguu

SEQ ID NO: 451655 - RNA, 19 nt, Human
ucuuucauuucuagcucug

SEQ ID NO: 451656 - RNA, 22 nt, Human
aggcagguguuaacccucugag

SEQ ID NO: 451657 - RNA, 22 nt, Human
auuauuucucacucacauaaua

SEQ ID NO: 451658 - RNA, 22 nt, Human
acagagcuaauguugcauaggc

SEQ ID NO: 451659 - RNA, 22 nt, Human
cuguccuccggccaccuacagu

SEQ ID NO: 451660 - RNA, 22 nt, Human
ugcuuaaaauaguucauuuuug

SEQ ID NO: 451661 - RNA, 21 nt, Human
ggccuuggcgggggccgaauu

SEQ ID NO: 451662 - RNA, 22 nt, Human
cucucccagucaggcucaggau

SEQ ID NO: 451663 - RNA, 22 nt, Human
gaugagggccugguggcugugc

SEQ ID NO: 451664 - RNA, 22 nt, Human
ucaguuuucaauuucaucagag

SEQ ID NO: 451665 - RNA, 19 nt, Human
agcauuuggaauucuacac

SEQ ID NO: 451666 - RNA, 22 nt, Human
gccaggcugacucccccggccu

SEQ ID NO: 451667 - RNA, 22 nt, Human
uaauccaaaacugaaucugugg

SEQ ID NO: 451668 - RNA, 22 nt, Human
cugggaggcaccgcgucgugcu

SEQ ID NO: 451669 - RNA, 22 nt, Human
gcuggcagagagcuggugagga

SEQ ID NO: 451670 - RNA, 23 nt, Human
aggaaggagguccuaacaguauc

SEQ ID NO: 451671 - RNA, 21 nt, Human
ggagauggguaucgccugggc

SEQ ID NO: 451672 - RNA, 20 nt, Human
ugagugauggaggcggguca

SEQ ID NO: 451673 - RNA, 19 nt, Human
accaggcuuauggucagug

SEQ ID NO: 451674 - RNA, 22 nt, Human
ucuuuauuuuaugcuugugcaa

SEQ ID NO: 451675 - RNA, 22 nt, Human
ugcuggccaacaaggcuccaag

SEQ ID NO: 451676 - RNA, 22 nt, Human
auuuacagaugaugcuauuuga

SEQ ID NO: 451677 - RNA, 18 nt, Human
gcaaggcucaggccaggc

SEQ ID NO: 451678 - RNA, 22 nt, Human
uccucagggggccaacccagcc

SEQ ID NO: 451679 - RNA, 22 nt, Human
gcccagcacagcuggaagaguc

SEQ ID NO: 451680 - RNA, 22 nt, Human
agcuggcuccagaaggagucgu

SEQ ID NO: 451681 - RNA, 22 nt, Human
cacauccuucagcugagcccag

SEQ ID NO: 451682 - RNA, 22 nt, Human
gcugagggcauguguggcgacu

SEQ ID NO: 451683 - RNA, 22 nt, Human
uucuuacagcccuauuacuaaa

SEQ ID NO: 451684 - RNA, 22 nt, Human
ggcugccucuggaagcuggaga

SEQ ID NO: 451685 - RNA, 22 nt, Human
ccugggaggcggagguugcagg

SEQ ID NO: 451686 - RNA, 22 nt, Human
gaaaacugugauuagaaugccu

SEQ ID NO: 451687 - RNA, 22 nt, Human
gcucugcugcuuacuagauggu

SEQ ID NO: 451688 - RNA, 22 nt, Human
uggggcuguggauucucacgaa

SEQ ID NO: 451689 - RNA, 22 nt, Human
ugaaagcucugucaucauuccu

SEQ ID NO: 451690 - RNA, 22 nt, Human
acacuucucccaucuccuguug

SEQ ID NO: 451691 - RNA, 22 nt, Human
uuucuuuguuguuaucacauca

SEQ ID NO: 451692 - RNA, 22 nt, Human
uccaaacgggagccaaaugagc

SEQ ID NO: 451693 - RNA, 22 nt, Human
auacaagacucagcacagacgg

SEQ ID NO: 451694 - RNA, 22 nt, Human
cgccuggaaccucuaggaccag

SEQ ID NO: 451695 - RNA, 22 nt, Human
agcucagcuuccucuccaugcu

SEQ ID NO: 451696 - RNA, 22 nt, Human
gugcaugugucuuuauaguaga

SEQ ID NO: 451697 - RNA, 23 nt, Human
ugcucccaggugacgcugcuguu

SEQ ID NO: 451698 - RNA, 22 nt, Human
aacaguaaaaaucauuuaguug

SEQ ID NO: 451699 - RNA, 17 nt, Human
agccugcugaucucaca

SEQ ID NO: 451700 - RNA, 22 nt, Human
aaucaggaugacugucauuuca

SEQ ID NO: 451701 - RNA, 22 nt, Human
aggccugaaguguggagugggg

SEQ ID NO: 451702 - RNA, 22 nt, Human
gcaguggggaaugcuggggaga

SEQ ID NO: 451703 - RNA, 22 nt, Human
aggguggcaguuacuggagcaa

SEQ ID NO: 451704 - RNA, 22 nt, Human
cucagugguugagagccugggc

SEQ ID NO: 451705 - RNA, 21 nt, Human
uuagaagcuaaugcagcuggu

SEQ ID NO: 451706 - RNA, 22 nt, Human
caggguacagaguuuucuaaac

SEQ ID NO: 451707 - RNA, 22 nt, Human
agggcagaggcggacacggaag

SEQ ID NO: 451708 - RNA, 22 nt, Human
gcaggagcuggaaagugauguu

SEQ ID NO: 451709 - RNA, 22 nt, Human
gaggaagaauugguuauuggag

SEQ ID NO: 451710 - RNA, 22 nt, Human
cccacaggcuagggguagggca

SEQ ID NO: 451711 - RNA, 22 nt, Human
cucacugugaccucagcagaca

SEQ ID NO: 451712 - RNA, 22 nt, Human
gugcuuccccaagccacagccu

SEQ ID NO: 451713 - RNA, 22 nt, Human
ucacugcucucuaagcaucgcc

SEQ ID NO: 451714 - RNA, 22 nt, Human
guggccugccagcagauggcgc

SEQ ID NO: 451715 - RNA, 22 nt, Human
caaagagcuguucagugucgcu

SEQ ID NO: 451716 - RNA, 22 nt, Human
uuucacauaucaacucuauccu

SEQ ID NO: 451717 - RNA, 22 nt, Human
uuucuccaauguaucagcacac

SEQ ID NO: 451718 - RNA, 22 nt, Human
ggagauuuauagcacacuucag

SEQ ID NO: 451719 - RNA, 22 nt, Human
uaaauguaccuucugccuuacu

SEQ ID NO: 451720 - RNA, 22 nt, Human
gaacauuuccagaaaggaacua

SEQ ID NO: 451721 - RNA, 22 nt, Human
guccugggccugcugaggcuga

SEQ ID NO: 451722 - RNA, 22 nt, Human
cagagcugggcauggugaaagg

SEQ ID NO: 451723 - RNA, 22 nt, Human
ccuaugccugucacucugcgcu

SEQ ID NO: 451724 - RNA, 22 nt, Human
aaaaguuuaagacucauucuag

SEQ ID NO: 451725 - RNA, 22 nt, Human
ccagcuuuauagcuucaaagga

SEQ ID NO: 451726 - RNA, 22 nt, Human
gggcagcugccaagugcaucgc

SEQ ID NO: 451727 - RNA, 21 nt, Human
guggcccugccgcagugucca

SEQ ID NO: 451728 - RNA, 22 nt, Human
aaaauccuuagccgagugaggu

SEQ ID NO: 451729 - RNA, 21 nt, Human
guuugcaugaacaagucagcc

SEQ ID NO: 451730 - RNA, 22 nt, Human
acuggcucagaguuccuagaga

SEQ ID NO: 451731 - RNA, 22 nt, Human
uuucccaauugagagguucugu

SEQ ID NO: 451732 - RNA, 22 nt, Human
ugccugggccuucccaccucug

SEQ ID NO: 451733 - RNA, 22 nt, Human
cagaccagaaggaagccgacaa

SEQ ID NO: 451734 - RNA, 22 nt, Human
gacaagacuauguagaaaguau

SEQ ID NO: 451735 - RNA, 19 nt, Human
cugaggugcaguaagaggc

SEQ ID NO: 451736 - RNA, 21 nt, Human
uucaaagagugggcauuguca

SEQ ID NO: 451737 - RNA, 23 nt, Human
uuccuuaacuguuaagauugucu

SEQ ID NO: 451738 - RNA, 22 nt, Human
gauacauuuuaucuccuaacag

SEQ ID NO: 451739 - RNA, 23 nt, Human
cccuggccuuggggcacaggcug

SEQ ID NO: 451740 - RNA, 22 nt, Human
caggaucccuggccuccgccca

SEQ ID NO: 451741 - RNA, 19 nt, Human
agaggccucagcagcuggc

SEQ ID NO: 451742 - RNA, 22 nt, Human
agcaugaagacuucagagcuag

SEQ ID NO: 451743 - RNA, 22 nt, Human
uuuccauauucugcgucugcca

SEQ ID NO: 451744 - RNA, 22 nt, Human
cagaaagaccugggcucaagag

SEQ ID NO: 451745 - RNA, 20 nt, Human
agcuggagaagggcccuucc

SEQ ID NO: 451746 - RNA, 22 nt, Human
cugagccuguguuucucuggca

SEQ ID NO: 451747 - RNA, 22 nt, Human
guggccuggaguuugauguagg

SEQ ID NO: 451748 - RNA, 22 nt, Human
cagcagagcugugugggaaggg

SEQ ID NO: 451749 - RNA, 22 nt, Human
agagaaaacucauugagguguc

SEQ ID NO: 451750 - RNA, 22 nt, Human
auaauucagguuuucuggcaca

SEQ ID NO: 451751 - RNA, 18 nt, Human
uuucacagauucaugacu

SEQ ID NO: 451752 - RNA, 22 nt, Human
gcugugcagucuuuggugugcc

SEQ ID NO: 451753 - RNA, 22 nt, Human
uccugccucuugccuucuucac

SEQ ID NO: 451754 - RNA, 22 nt, Human
ucucagagauuuuguuucccuu

SEQ ID NO: 451755 - RNA, 22 nt, Human
gaaccaaguaggauacaaggag

SEQ ID NO: 451756 - RNA, 22 nt, Human
ccacagcugaccgcaggugagc

SEQ ID NO: 451757 - RNA, 22 nt, Human
agacuucuuugugagcauuuuc

SEQ ID NO: 451758 - RNA, 22 nt, Human
gaacagaauuaccgaagaucug

SEQ ID NO: 451759 - RNA, 22 nt, Human
aguuucuguuaccauauuugac

SEQ ID NO: 451760 - RNA, 22 nt, Human
gcuccugucuuggggcacuggc

SEQ ID NO: 451761 - RNA, 22 nt, Human
aguaacaagugccaacguuaga

SEQ ID NO: 451762 - RNA, 22 nt, Human
aggucauuccagccauuccccu

SEQ ID NO: 451763 - RNA, 22 nt, Human
cccagggacagcuagguggggc

SEQ ID NO: 451764 - RNA, 22 nt, Human
ggugaggaaagauggugacagu

SEQ ID NO: 451765 - RNA, 22 nt, Human
agccacagggggugagggacaa

SEQ ID NO: 451766 - RNA, 22 nt, Human
aauauaauuuuauuccuagagu

SEQ ID NO: 451767 - RNA, 19 nt, Human
ucucagaggaaaaauugcu

SEQ ID NO: 451768 - RNA, 22 nt, Human
aaucaguuucuuggcaaguuua

SEQ ID NO: 451769 - RNA, 22 nt, Human
aaguccaucucugccccacaca

SEQ ID NO: 451770 - RNA, 22 nt, Human
caaauccagaucccagucguag

SEQ ID NO: 451771 - RNA, 22 nt, Human
ugcccuguuccugccuccagcu

SEQ ID NO: 451772 - RNA, 22 nt, Human
aggagguggccugagcgugccc

SEQ ID NO: 451773 - RNA, 22 nt, Human
cuggugcaggaaggagcuggca

SEQ ID NO: 451774 - RNA, 20 nt, Human
cccucugcacauggcugugg

SEQ ID NO: 451775 - RNA, 22 nt, Human
agagauguucauucagcauguu

SEQ ID NO: 451776 - RNA, 22 nt, Human
agggcuccuaugaugcucugcc

SEQ ID NO: 451777 - RNA, 22 nt, Human
ugcugggcuaggguggagcucu

SEQ ID NO: 451778 - RNA, 22 nt, Human
gaucauuugcaggaaacauuaa

SEQ ID NO: 451779 - RNA, 22 nt, Human
ucucuuccaguaagagucuuua

SEQ ID NO: 451780 - RNA, 22 nt, Human
ugggcuccagcaccugugcucu

SEQ ID NO: 451781 - RNA, 22 nt, Human
uggaggaugagugugggcucug

SEQ ID NO: 451782 - RNA, 22 nt, Human
ggcaaggccuugcccagcauuc

SEQ ID NO: 451783 - RNA, 22 nt, Human
agucccagugagaugagccacg

SEQ ID NO: 451784 - RNA, 22 nt, Human
gcugcugguccucagagcucau

SEQ ID NO: 451785 - RNA, 22 nt, Human
uagaaaucauuuagaaguauug

SEQ ID NO: 451786 - RNA, 22 nt, Human
cagugcauagauccugaggccu

SEQ ID NO: 451787 - RNA, 22 nt, Human
guuuauuauacaacaaaagcua

SEQ ID NO: 451788 - RNA, 22 nt, Human
ugggcagaggacagggaagauc

SEQ ID NO: 451789 - RNA, 20 nt, Human
agggcagagggauuacaggc

SEQ ID NO: 451790 - RNA, 22 nt, Human
agggugcauguuugcaagagug

SEQ ID NO: 451791 - RNA, 21 nt, Human
cauuucuauugaugagaaaag

SEQ ID NO: 451792 - RNA, 22 nt, Human
uccugccucaggcucuggagua

SEQ ID NO: 451793 - RNA, 23 nt, Human
ggacagggcccugcccuauggcc

SEQ ID NO: 451794 - RNA, 22 nt, Human
ggaccugaacauaaaacgaggc

SEQ ID NO: 451795 - RNA, 18 nt, Human
ugaacagaugaguugaag

SEQ ID NO: 451796 - RNA, 22 nt, Human
cacaguccuacagagaucagag

SEQ ID NO: 451797 - RNA, 22 nt, Human
auaaacaguagagaaagguggu

SEQ ID NO: 451798 - RNA, 22 nt, Human
accaggcaacugugaaugggcu

SEQ ID NO: 451799 - RNA, 22 nt, Human
ugcaguggaaucuggagagcag

SEQ ID NO: 451800 - RNA, 20 nt, Human
accaauguuagcuuaguacu

SEQ ID NO: 451801 - RNA, 22 nt, Human
agcuaagacuuagugacuuagu

SEQ ID NO: 451802 - RNA, 22 nt, Human
gggcugaccccaccccucacuc

SEQ ID NO: 451803 - RNA, 22 nt, Human
gaggaguggaguugcuggguug

SEQ ID NO: 451804 - RNA, 22 nt, Human
uaagcauucaaugcuuagcacu

SEQ ID NO: 451805 - RNA, 22 nt, Human
ucaagcaucuuggucuacgauc

SEQ ID NO: 451806 - RNA, 22 nt, Human
ccuuucucuaucgacccaucgc

SEQ ID NO: 451807 - RNA, 22 nt, Human
auguguccacaggugugagaga

SEQ ID NO: 451808 - RNA, 22 nt, Human
ugcagcuguaacagaggccuca

SEQ ID NO: 451809 - RNA, 22 nt, Human
gaggccugucgcuaggccucug

SEQ ID NO: 451810 - RNA, 22 nt, Human
cagagcauugagggucugccaa

SEQ ID NO: 451811 - RNA, 18 nt, Human
gggaucaggcugccuagg

SEQ ID NO: 451812 - RNA, 22 nt, Human
aaacaccagucccaguauacac

SEQ ID NO: 451813 - RNA, 22 nt, Human
cugcuuugaaaauaaacuuguc

SEQ ID NO: 451814 - RNA, 22 nt, Human
uauauguaagcuauguaagagu

SEQ ID NO: 451815 - RNA, 22 nt, Human
gggcuggggcucaauaauuugu

SEQ ID NO: 451816 - RNA, 22 nt, Human
ucagagcuuuggagaccaggaa

SEQ ID NO: 451817 - RNA, 22 nt, Human
uggccuggugcucaggcaguag

SEQ ID NO: 451818 - RNA, 19 nt, Human
gccugcagaaaaggcaggg

SEQ ID NO: 451819 - RNA, 22 nt, Human
ucagaggagggacucagaccca

SEQ ID NO: 451820 - RNA, 22 nt, Human
gcugggagccguaccugucacg

SEQ ID NO: 451821 - RNA, 22 nt, Human
caaggaaaacagaugaucaaca

SEQ ID NO: 451822 - RNA, 22 nt, Human
gucagaggggcagcugccaggc

SEQ ID NO: 451823 - RNA, 22 nt, Human
agagcuguucaacguagcaaug

SEQ ID NO: 451824 - RNA, 22 nt, Human
agccuggcuaaauucucccaug

SEQ ID NO: 451825 - RNA, 22 nt, Human
ucucccacagccgugcuucaag

SEQ ID NO: 451826 - RNA, 22 nt, Human
agcagaaccugcagaccugucu

SEQ ID NO: 451827 - RNA, 22 nt, Human
uuaggaaaaucaugagagauga

SEQ ID NO: 451828 - RNA, 22 nt, Human
uaagaacauaaauucauacggg

SEQ ID NO: 451829 - RNA, 22 nt, Human
aucagagaaguuucacuggcau

SEQ ID NO: 451830 - RNA, 22 nt, Human
ugacacauuaaaugcucacaaa

SEQ ID NO: 451831 - RNA, 22 nt, Human
guucacauccuugugaggauuu

SEQ ID NO: 451832 - RNA, 17 nt, Human
uuauuuuuugggcugag

SEQ ID NO: 451833 - RNA, 22 nt, Human
gccuuggccaacaccuugcaaa

SEQ ID NO: 451834 - RNA, 21 nt, Human
uggccucccacacuuccaugg

SEQ ID NO: 451835 - RNA, 22 nt, Human
uuagccauuaaauuacaaggug

SEQ ID NO: 451836 - RNA, 22 nt, Human
aggaugaauaacugaaauggug

SEQ ID NO: 451837 - RNA, 22 nt, Human
guuuucuuugaaugcuucuaga

SEQ ID NO: 451838 - RNA, 22 nt, Human
ggugacuggagggacccaggcc

SEQ ID NO: 451839 - RNA, 22 nt, Human
gugaagagcuguugcagagauu

SEQ ID NO: 451840 - RNA, 22 nt, Human
cacccagcacagagggaggcga

SEQ ID NO: 451841 - RNA, 22 nt, Human
cugcucucuguuccccuggauc

SEQ ID NO: 451842 - RNA, 22 nt, Human
uugaaaggugacauuguuagag

SEQ ID NO: 451843 - RNA, 22 nt, Human
uauuuguugcgggaauugcuau

SEQ ID NO: 451844 - RNA, 22 nt, Human
ccucagggaaugggaggcuggg

SEQ ID NO: 451845 - RNA, 22 nt, Human
gccuuucaguuccaucaaagga

SEQ ID NO: 451846 - RNA, 22 nt, Human
aguggcagagaccccagccagc

SEQ ID NO: 451847 - RNA, 21 nt, Human
gccagagcaguacaaugaggu

SEQ ID NO: 451848 - RNA, 18 nt, Human
gcuuuauuucuuggggaa

SEQ ID NO: 451849 - RNA, 22 nt, Human
aggcucagucccggcccgcgcc

SEQ ID NO: 451850 - RNA, 22 nt, Human
agccaggccuuuucucaagguu

SEQ ID NO: 451851 - RNA, 22 nt, Human
uggcugcuuguuuuagugaggc

SEQ ID NO: 451852 - RNA, 22 nt, Human
cacaucuucuuaacuccaaagu

SEQ ID NO: 451853 - RNA, 22 nt, Human
aagcagccuggacuugggcugg

SEQ ID NO: 451854 - RNA, 22 nt, Human
ucucagagagaugaaacuucca

SEQ ID NO: 451855 - RNA, 22 nt, Human
cuugaaagucacaugcagcccu

SEQ ID NO: 451856 - RNA, 20 nt, Human
ggccuuggguuucgccuguu

SEQ ID NO: 451857 - RNA, 22 nt, Human
uuuauugcauacacaaauguca

SEQ ID NO: 451858 - RNA, 22 nt, Human
ugccuggguucccaccccaaag

SEQ ID NO: 451859 - RNA, 22 nt, Human
aaguuacuggcaagggcugcag

SEQ ID NO: 451860 - RNA, 22 nt, Human
uggcuuccuggacagaugcggu

SEQ ID NO: 451861 - RNA, 22 nt, Human
aggaccugaaauucuugcuuuu

SEQ ID NO: 451862 - RNA, 19 nt, Human
ggcugcugguuacagaggc

SEQ ID NO: 451863 - RNA, 22 nt, Human
uuaaacauuuauggaggcagca

SEQ ID NO: 451864 - RNA, 22 nt, Human
cccaggcagccugcagggaagg

SEQ ID NO: 451865 - RNA, 22 nt, Human
agaggagugggaagcagugcaa

SEQ ID NO: 451866 - RNA, 22 nt, Human
ccugcugugaaacuggcauaug

SEQ ID NO: 451867 - RNA, 22 nt, Human
ucccagaggcuccagucucuau

SEQ ID NO: 451868 - RNA, 22 nt, Human
ugggagcaagcuggugcuggag

SEQ ID NO: 451869 - RNA, 22 nt, Human
caaugauguuuagauaaaaucc

SEQ ID NO: 451870 - RNA, 22 nt, Human
cccagguggcagaagcugcagu

SEQ ID NO: 451871 - RNA, 22 nt, Human
augcaguacagauaauucuaca

SEQ ID NO: 451872 - RNA, 22 nt, Human
ugugcagcuaguccuggacuug

SEQ ID NO: 451873 - RNA, 23 nt, Human
gcagagcugcccuauugccuugg

SEQ ID NO: 451874 - RNA, 22 nt, Human
uuuaaauuauaguuaaugucug

SEQ ID NO: 451875 - RNA, 22 nt, Human
ccucaguguuaggauaagagaa

SEQ ID NO: 451876 - RNA, 22 nt, Human
gcagcuuuuuggaugucaguua

SEQ ID NO: 451877 - RNA, 22 nt, Human
caaaauuagggagugagcugga

SEQ ID NO: 451878 - RNA, 22 nt, Human
agucucuuuaaucacagugucu

SEQ ID NO: 451879 - RNA, 22 nt, Human
uauuaguagcuugaaauuggug

SEQ ID NO: 451880 - RNA, 22 nt, Human
aguggccagugcugcucugggg

SEQ ID NO: 451881 - RNA, 23 nt, Human
ugggaccuguuugcccacagaug

SEQ ID NO: 451882 - RNA, 22 nt, Human
cguagguggcucagcaccuggg

SEQ ID NO: 451883 - RNA, 22 nt, Human
uacccagcuucaagucaggacu

SEQ ID NO: 451884 - RNA, 22 nt, Human
caggaaggcgcggcugugccug

SEQ ID NO: 451885 - RNA, 22 nt, Human
ucaggauccauagacucccaaa

SEQ ID NO: 451886 - RNA, 22 nt, Human
gcucuggacuggggccugagaa

SEQ ID NO: 451887 - RNA, 22 nt, Human
cugagccacugcuuguucagug

SEQ ID NO: 451888 - RNA, 22 nt, Human
cagaugagaguggccaggguuc

SEQ ID NO: 451889 - RNA, 22 nt, Human
caugcuuucuguccaaauguua

SEQ ID NO: 451890 - RNA, 20 nt, Human
cuucaggacccauccucccc

SEQ ID NO: 451891 - RNA, 21 nt, Human
aaaugaaugugguagugcaag

SEQ ID NO: 451892 - RNA, 22 nt, Human
cuuaacagauacaucugugguu

SEQ ID NO: 451893 - RNA, 22 nt, Human
agcaaaguagcugcuguucuua

SEQ ID NO: 451894 - RNA, 22 nt, Human
ggaaaguggugguggaaagagg

SEQ ID NO: 451895 - RNA, 19 nt, Human
caguggagauuggaggagg

SEQ ID NO: 451896 - RNA, 22 nt, Human
augaggcagguggaggcugcca

SEQ ID NO: 451897 - RNA, 22 nt, Human
ccagagcuaaacacacaggcug

SEQ ID NO: 451898 - RNA, 22 nt, Human
cacauuuaauccuuuauaagua

SEQ ID NO: 451899 - RNA, 22 nt, Human
uaaaugcaguacaaauuguucu

SEQ ID NO: 451900 - RNA, 22 nt, Human
ugggccagcaauugcugcucag

SEQ ID NO: 451901 - RNA, 22 nt, Human
ccuggagcacauggcaggaggc

SEQ ID NO: 451902 - RNA, 22 nt, Human
caguccugagccaaucaugaug

SEQ ID NO: 451903 - RNA, 22 nt, Human
agcuggaggauaacucacuucu

SEQ ID NO: 451904 - RNA, 22 nt, Human
gaaaguuucuucauuaagaugu

SEQ ID NO: 451905 - RNA, 22 nt, Human
ucucugagacaguagccucugc

SEQ ID NO: 451906 - RNA, 22 nt, Human
ccuccaggauaagucagggccu

SEQ ID NO: 451907 - RNA, 22 nt, Human
gaaaggucaguuccacuuccau

SEQ ID NO: 451908 - RNA, 22 nt, Human
uguguacucaauugagccauuu

SEQ ID NO: 451909 - RNA, 22 nt, Human
agccagugcaacagcagugaag

SEQ ID NO: 451910 - RNA, 21 nt, Human
uggcucaguugcugggcacag

SEQ ID NO: 451911 - RNA, 22 nt, Human
agagcagaggcauggccguggg

SEQ ID NO: 451912 - RNA, 22 nt, Human
gaaggccuagggaugcucugcg

SEQ ID NO: 451913 - RNA, 22 nt, Human
guguaauugaaauugagaacca

SEQ ID NO: 451914 - RNA, 22 nt, Human
cgggcuggcugcagcugcugga

SEQ ID NO: 451915 - RNA, 22 nt, Human
ucucuggagcugcagauccagg

SEQ ID NO: 451916 - RNA, 22 nt, Human
cagggcccaagacacaaugagg

SEQ ID NO: 451917 - RNA, 22 nt, Human
aaagacugggacugcagcaggc

SEQ ID NO: 451918 - RNA, 22 nt, Human
augcaguaaauguucuaguuug

SEQ ID NO: 451919 - RNA, 22 nt, Human
gagcuuugcuggaagccugggg

SEQ ID NO: 451920 - RNA, 22 nt, Human
gcugggagugggcaagaugaga

SEQ ID NO: 451921 - RNA, 22 nt, Human
uggagcugauacagcuggcuuu

SEQ ID NO: 451922 - RNA, 22 nt, Human
gaugugggguugagggaccagc

SEQ ID NO: 451923 - RNA, 22 nt, Human
cuugcaggcagggccuccugga

SEQ ID NO: 451924 - RNA, 22 nt, Human
gugaggugguacaauauuaacu

SEQ ID NO: 451925 - RNA, 20 nt, Human
uccaggcagcucagaguguc

SEQ ID NO: 451926 - RNA, 20 nt, Human
ccaggcacugucccaugcag

SEQ ID NO: 451927 - RNA, 22 nt, Human
uggcccugugugcaggcugcac

SEQ ID NO: 451928 - RNA, 22 nt, Human
ugagccaggaguuugaggcugu

SEQ ID NO: 451929 - RNA, 22 nt, Human
caggaaagaaaugagaacacca

SEQ ID NO: 451930 - RNA, 22 nt, Human
uaauuucuucaucucugcagcu

SEQ ID NO: 451931 - RNA, 22 nt, Human
uuccuccacgugacaggagcca

SEQ ID NO: 451932 - RNA, 22 nt, Human
gcugccugaagugucuacacug

SEQ ID NO: 451933 - RNA, 22 nt, Human
ucucugagguuguuuccagcac

SEQ ID NO: 451934 - RNA, 22 nt, Human
ggcuguggccagcggggcugag

SEQ ID NO: 451935 - RNA, 22 nt, Human
cccugcagggaggauucugaag

SEQ ID NO: 451936 - RNA, 22 nt, Human
gccucugcaugcucagcaccca

SEQ ID NO: 451937 - RNA, 22 nt, Human
acauuucugcauguaggguaau

SEQ ID NO: 451938 - RNA, 22 nt, Human
agaguucugcucuucucaguga

SEQ ID NO: 451939 - RNA, 22 nt, Human
aaguucaaggaagccuccaguu

SEQ ID NO: 451940 - RNA, 22 nt, Human
gaaggcaacaccaggaugcacu

SEQ ID NO: 451941 - RNA, 22 nt, Human
cacaugcauaaggauaauuacu

SEQ ID NO: 451942 - RNA, 22 nt, Human
guccaguguguuuaucuuggau

SEQ ID NO: 451943 - RNA, 22 nt, Human
aaaauuuugcccuauccuucau

SEQ ID NO: 451944 - RNA, 22 nt, Human
cuggggacuugcagacacaauu

SEQ ID NO: 451945 - RNA, 19 nt, Human
gggcaguggcacuagggag

SEQ ID NO: 451946 - RNA, 22 nt, Human
uauccaaagagauucauguucu

SEQ ID NO: 451947 - RNA, 22 nt, Human
uuucacauacaguguauaguag

SEQ ID NO: 451948 - RNA, 22 nt, Human
ugauuuccuagcugacaugaaa

SEQ ID NO: 451949 - RNA, 22 nt, Human
caugucuguguacacaugcaca

SEQ ID NO: 451950 - RNA, 17 nt, Human
uggcacagaggugcuau

SEQ ID NO: 451951 - RNA, 22 nt, Human
accagcagaguugaggaggaca

SEQ ID NO: 451952 - RNA, 22 nt, Human
ucuguacaccaggggccauucu

SEQ ID NO: 451953 - RNA, 22 nt, Human
cuggcucaggguggucuggguc

SEQ ID NO: 451954 - RNA, 22 nt, Human
agaggccagggacacugcucaa

SEQ ID NO: 451955 - RNA, 22 nt, Human
cuaguucuuaacuguuaugauu

SEQ ID NO: 451956 - RNA, 22 nt, Human
gcugccuuugugagccaagggg

SEQ ID NO: 451957 - RNA, 22 nt, Human
acuuucuuaggcuguauaaaug

SEQ ID NO: 451958 - RNA, 22 nt, Human
aaaauuuccaccaucuuugugu

SEQ ID NO: 451959 - RNA, 22 nt, Human
cuguaaauaugaagaauauaug

SEQ ID NO: 451960 - RNA, 22 nt, Human
cccugggcaagcccuauuuucc

SEQ ID NO: 451961 - RNA, 22 nt, Human
gggccccaaaaugccaggcucu

SEQ ID NO: 451962 - RNA, 19 nt, Human
uugguggugguuuugguuc

SEQ ID NO: 451963 - RNA, 22 nt, Human
caaggccagagccagcgauaag

SEQ ID NO: 451964 - RNA, 22 nt, Human
agaagccagaggcaguggguac

SEQ ID NO: 451965 - RNA, 20 nt, Human
ggagcugcccugggcuggag

SEQ ID NO: 451966 - RNA, 22 nt, Human
cuggagugaagucuggcagcuu

SEQ ID NO: 451967 - RNA, 22 nt, Human
agggcaaguugagugugcgugg

SEQ ID NO: 451968 - RNA, 22 nt, Human
ggccugaggcgucccagcugug

SEQ ID NO: 451969 - RNA, 22 nt, Human
aucuggcugagcgaggcccaca

SEQ ID NO: 451970 - RNA, 23 nt, Human
cuggcuccgaagacuccaggauc

SEQ ID NO: 451971 - RNA, 22 nt, Human
agcaguggccuggggcucugug

SEQ ID NO: 451972 - RNA, 22 nt, Human
acaccauacucauguugguucc

SEQ ID NO: 451973 - RNA, 18 nt, Human
gcccugguggagcuggug

SEQ ID NO: 451974 - RNA, 22 nt, Human
ucuguacauuuguguugugaau

SEQ ID NO: 451975 - RNA, 22 nt, Human
auguucuaaucccugcuaugua

SEQ ID NO: 451976 - RNA, 22 nt, Human
cauguuaaugaauuuuugcagu

SEQ ID NO: 451977 - RNA, 22 nt, Human
uucucuggaacugaaacaagau

SEQ ID NO: 451978 - RNA, 22 nt, Human
aacauuaauuacagucaaacau

SEQ ID NO: 451979 - RNA, 18 nt, Human
gucaccuggaucagauua

SEQ ID NO: 451980 - RNA, 22 nt, Human
caggcugcagcagcaguggccc

SEQ ID NO: 451981 - RNA, 21 nt, Human
gggccuggcugcgcaggacgg

SEQ ID NO: 451982 - RNA, 22 nt, Human
aaggcugaguaaaacagagaac

SEQ ID NO: 451983 - RNA, 22 nt, Human
uccuuucccuuuccauccuggc

SEQ ID NO: 451984 - RNA, 22 nt, Human
uccaggcaaggauaauaaacau

SEQ ID NO: 451985 - RNA, 22 nt, Human
acaaagucuuuuacaacaguca

SEQ ID NO: 451986 - RNA, 22 nt, Human
uugaaaggugcugugugcugau

SEQ ID NO: 451987 - RNA, 22 nt, Human
cagggcagccaggccccguggg

SEQ ID NO: 451988 - RNA, 22 nt, Human
cagccaucccagccugugguuc

SEQ ID NO: 451989 - RNA, 19 nt, Human
ccaggccugcgggcguugg

SEQ ID NO: 451990 - RNA, 22 nt, Human
aguggagaagaggauggucucc

SEQ ID NO: 451991 - RNA, 22 nt, Human
uaaaugugagugaugcggugaa

SEQ ID NO: 451992 - RNA, 22 nt, Human
gccagcuggagacuggcagggg

SEQ ID NO: 451993 - RNA, 19 nt, Human
caaggccaccauuucuccg

SEQ ID NO: 451994 - RNA, 22 nt, Human
aaaugcacaauaaaguaaaggc

SEQ ID NO: 451995 - RNA, 22 nt, Human
cuagaaaaauacuuuauuguga

SEQ ID NO: 451996 - RNA, 22 nt, Human
uuugcauucuagaaaaauuucu

SEQ ID NO: 451997 - RNA, 22 nt, Human
uacauauacugagugauuugcu

SEQ ID NO: 451998 - RNA, 22 nt, Human
cugggagaugacucagagcagg

SEQ ID NO: 451999 - RNA, 22 nt, Human
aagaaauuaaugugccauuacu

SEQ ID NO: 452000 - RNA, 22 nt, Human
gaaaggucuuccggucuuccag

SEQ ID NO: 452001 - RNA, 22 nt, Human
cagaggaaguuccuugaugaga

SEQ ID NO: 452002 - RNA, 22 nt, Human
guccugucccccaaggcugugg

SEQ ID NO: 452003 - RNA, 22 nt, Human
uaccaaaagcuuguuucauaca

SEQ ID NO: 452004 - RNA, 22 nt, Human
auacauguuguaccauauguuu

SEQ ID NO: 452005 - RNA, 22 nt, Human
aucucccagccacagcauucuu

SEQ ID NO: 452006 - RNA, 22 nt, Human
cacuguaucuuuuccaaagucu

SEQ ID NO: 452007 - RNA, 22 nt, Human
agucccagacuccaguuuucug

SEQ ID NO: 452008 - RNA, 22 nt, Human
ggagccuguuaguugagugcuc

SEQ ID NO: 452009 - RNA, 22 nt, Human
cauggggagacaccuagggaaa

SEQ ID NO: 452010 - RNA, 22 nt, Human
cauguacauucuguagauggag

SEQ ID NO: 452011 - RNA, 22 nt, Human
uacccagggcuuuucugaugca

SEQ ID NO: 452012 - RNA, 22 nt, Human
uucagauguggcuuugucaggc

SEQ ID NO: 452013 - RNA, 22 nt, Human
ggcuggaaguccaagaucaagg

SEQ ID NO: 452014 - RNA, 22 nt, Human
agugaccaaucaugguuagauu

SEQ ID NO: 452015 - RNA, 22 nt, Human
ggcagcaaauauugucagcugu

SEQ ID NO: 452016 - RNA, 22 nt, Human
uagcagggccaggcugggaacc

SEQ ID NO: 452017 - RNA, 21 nt, Human
gcaggguccuuuccauuccua

SEQ ID NO: 452018 - RNA, 22 nt, Human
gccugcuggauguggccaggcc

SEQ ID NO: 452019 - RNA, 22 nt, Human
accugcaggcacaggugugcgc

SEQ ID NO: 452020 - RNA, 22 nt, Human
ugcagaguaaaagcagaugcua

SEQ ID NO: 452021 - RNA, 22 nt, Human
uugcuauuuugagagucauagu

SEQ ID NO: 452022 - RNA, 23 nt, Human
uuuuaauuuggacauaagaagau

SEQ ID NO: 452023 - RNA, 22 nt, Human
ucuggccuauuucugucagauc

SEQ ID NO: 452024 - RNA, 22 nt, Human
ggcugccauaacugauaccaua

SEQ ID NO: 452025 - RNA, 22 nt, Human
cagcugcaggaacaaaaaugug

SEQ ID NO: 452026 - RNA, 22 nt, Human
ggcaggguggcagaggcucaga

SEQ ID NO: 452027 - RNA, 22 nt, Human
ccaggcccugcuccucacacca

SEQ ID NO: 452028 - RNA, 22 nt, Human
uaacagaaaggggacagaaaua

SEQ ID NO: 452029 - RNA, 22 nt, Human
ucagaguggugguuuugccuuc

SEQ ID NO: 452030 - RNA, 22 nt, Human
cuguccucuguccucagcagga

SEQ ID NO: 452031 - RNA, 22 nt, Human
aaguccaguuucauuugagguc

SEQ ID NO: 452032 - RNA, 22 nt, Human
agaguguuuuucugucaaggac

SEQ ID NO: 452033 - RNA, 22 nt, Human
ccaguucugacacaagcacagu

SEQ ID NO: 452034 - RNA, 22 nt, Human
ucucuuucuauugcaccaugcu

SEQ ID NO: 452035 - RNA, 22 nt, Human
gcucccagcaauugaggcagcc

SEQ ID NO: 452036 - RNA, 22 nt, Human
cagcuuuauugagguauaauug

SEQ ID NO: 452037 - RNA, 19 nt, Human
ucccuuccugucgggcucc

SEQ ID NO: 452038 - RNA, 22 nt, Human
auuuccauacacccauuucuga

SEQ ID NO: 452039 - RNA, 22 nt, Human
cuccagugggggugagccuaga

SEQ ID NO: 452040 - RNA, 22 nt, Human
agguaaggcuguaagcuaagcc

SEQ ID NO: 452041 - RNA, 22 nt, Human
cugugccaggcccagcugacuu

SEQ ID NO: 452042 - RNA, 22 nt, Human
agagccaguuacaacuguggag

SEQ ID NO: 452043 - RNA, 20 nt, Human
agcaggaaugaugcuuucau

SEQ ID NO: 452044 - RNA, 22 nt, Human
uguccucuaauuggccucuugc

SEQ ID NO: 452045 - RNA, 21 nt, Human
uuacuuuugcagcaaccuaau

SEQ ID NO: 452046 - RNA, 22 nt, Human
ugcagccaauucauucauucuu

SEQ ID NO: 452047 - RNA, 22 nt, Human
uagggcucugcucaucaguugu

SEQ ID NO: 452048 - RNA, 22 nt, Human
ucucaguggacgugucugucuu

SEQ ID NO: 452049 - RNA, 22 nt, Human
aguugaagguuggcugauccau

SEQ ID NO: 452050 - RNA, 22 nt, Human
ucagggacgugagcucagaguc

SEQ ID NO: 452051 - RNA, 22 nt, Human
auuuagaaauuccaaaaguauu

SEQ ID NO: 452052 - RNA, 22 nt, Human
ucuggagcaacagagcaggaca

SEQ ID NO: 452053 - RNA, 17 nt, Human
cccagagaugcugccuu

SEQ ID NO: 452054 - RNA, 22 nt, Human
ugcuggcuacugauggcaggcc

SEQ ID NO: 452055 - RNA, 22 nt, Human
ccaggccauucccagaguugcu

SEQ ID NO: 452056 - RNA, 17 nt, Human
cgagggcuugcuggcuc

SEQ ID NO: 452057 - RNA, 22 nt, Human
uggcagcaauuugugauguuga

SEQ ID NO: 452058 - RNA, 22 nt, Human
uuuccaaaggcuaaacucaguu

SEQ ID NO: 452059 - RNA, 21 nt, Human
aaaaagcuggggcaugcaugc

SEQ ID NO: 452060 - RNA, 22 nt, Human
ucacagaaggcaucacagaaga

SEQ ID NO: 452061 - RNA, 22 nt, Human
uaaguucagaguucucauuugu

SEQ ID NO: 452062 - RNA, 22 nt, Human
gugcauuucucauacacuaaau

SEQ ID NO: 452063 - RNA, 22 nt, Human
ucuggcucccuggagcuccaca

SEQ ID NO: 452064 - RNA, 22 nt, Human
uacaguuuguuacauuguuagu

SEQ ID NO: 452065 - RNA, 22 nt, Human
acucaggaagaaagcagcuggu

SEQ ID NO: 452066 - RNA, 22 nt, Human
agggacacacuccaguguuauu

SEQ ID NO: 452067 - RNA, 22 nt, Human
guccucugggcagcugccccac

SEQ ID NO: 452068 - RNA, 22 nt, Human
cagggagggacaauugucaccu

SEQ ID NO: 452069 - RNA, 22 nt, Human
aguacagaccugucucuuccug

SEQ ID NO: 452070 - RNA, 22 nt, Human
gaacccaguccaggugcagccu

SEQ ID NO: 452071 - RNA, 22 nt, Human
aggcuccuugcucacaggcuca

SEQ ID NO: 452072 - RNA, 22 nt, Human
gagagugagauccuccugggga

SEQ ID NO: 452073 - RNA, 22 nt, Human
gagcuuuacuucugacuggugc

SEQ ID NO: 452074 - RNA, 22 nt, Human
uacaggaagcacucaagaaaug

SEQ ID NO: 452075 - RNA, 22 nt, Human
ccagccuuacugcccuucagug

SEQ ID NO: 452076 - RNA, 22 nt, Human
ggcucaguguuuguggaacaua

SEQ ID NO: 452077 - RNA, 23 nt, Human
uccugcagauaagcugguugaca

SEQ ID NO: 452078 - RNA, 22 nt, Human
aggcagcagacuguuaaucaga

SEQ ID NO: 452079 - RNA, 17 nt, Human
gcuggcugacccaugcc

SEQ ID NO: 452080 - RNA, 22 nt, Human
aucaguuuggaacauucaggcc

SEQ ID NO: 452081 - RNA, 22 nt, Human
aaggcacuugcccagagcugca

SEQ ID NO: 452082 - RNA, 22 nt, Human
ucuccucuauuucuguauguau

SEQ ID NO: 452083 - RNA, 23 nt, Human
cccagcagagaugaggagggguc

SEQ ID NO: 452084 - RNA, 22 nt, Human
ucucuggaauuuugagagugac

SEQ ID NO: 452085 - RNA, 22 nt, Human
ggagauagacuuggugagccac

SEQ ID NO: 452086 - RNA, 22 nt, Human
uauauagaaaagcagauguugg

SEQ ID NO: 452087 - RNA, 22 nt, Human
ccaagaugaucuuuacaguguu

SEQ ID NO: 452088 - RNA, 22 nt, Human
cuuccccaaccccgacugugug

SEQ ID NO: 452089 - RNA, 22 nt, Human
cacccaggacaggccagaugug

SEQ ID NO: 452090 - RNA, 17 nt, Human
uucaaugauuaaugcau

SEQ ID NO: 452091 - RNA, 22 nt, Human
uggaagcacuuggguuuuguug

SEQ ID NO: 452092 - RNA, 22 nt, Human
gccaggcuguggggaacuugaa

SEQ ID NO: 452093 - RNA, 22 nt, Human
cuacuuuaauuuucugcagaga

SEQ ID NO: 452094 - RNA, 22 nt, Human
agaccauagggaccucagguug

SEQ ID NO: 452095 - RNA, 22 nt, Human
gccuggcccagggcuccgcagg

SEQ ID NO: 452096 - RNA, 22 nt, Human
uugcugaaaucuaugacauccu

SEQ ID NO: 452097 - RNA, 22 nt, Human
cugagagucagcuucuccuccu

SEQ ID NO: 452098 - RNA, 22 nt, Human
ugauuuccuggcuuuggaguuc

SEQ ID NO: 452099 - RNA, 22 nt, Human
aggcucaggaggagcugccgga

SEQ ID NO: 452100 - RNA, 22 nt, Human
gggauggcucaaaggagucagg

SEQ ID NO: 452101 - RNA, 22 nt, Human
cuuguacauagagaagaagccu

SEQ ID NO: 452102 - RNA, 22 nt, Human
gagaaggcugauccuuggaguu

SEQ ID NO: 452103 - RNA, 22 nt, Human
gagagcuguaauagucaugucu

SEQ ID NO: 452104 - RNA, 22 nt, Human
uguccucacaggaaugaacuuu

SEQ ID NO: 452105 - RNA, 22 nt, Human
gccagggagucugggccacaga

SEQ ID NO: 452106 - RNA, 22 nt, Human
uccaucuguuuacuauaaagau

SEQ ID NO: 452107 - RNA, 22 nt, Human
ucccaagugucuuggaccaggg

SEQ ID NO: 452108 - RNA, 22 nt, Human
uacuuuagaaggaaauaaguuc

SEQ ID NO: 452109 - RNA, 22 nt, Human
auuccaaagacagaagcagcug

SEQ ID NO: 452110 - RNA, 22 nt, Human
ccugccuguacuagagacccag

SEQ ID NO: 452111 - RNA, 21 nt, Human
guuauuuuaagugagcuuugc

SEQ ID NO: 452112 - RNA, 22 nt, Human
aggcugggaaauguauuccagc

SEQ ID NO: 452113 - RNA, 18 nt, Human
ucugagggugcgggagcu

SEQ ID NO: 452114 - RNA, 22 nt, Human
ccacugcccaccccgacgucua

SEQ ID NO: 452115 - RNA, 22 nt, Human
agccccacacucucucugagaa

SEQ ID NO: 452116 - RNA, 22 nt, Human
guggaggguuugcaaugugcag

SEQ ID NO: 452117 - RNA, 22 nt, Human
gugucaugggguuuguuauaca

SEQ ID NO: 452118 - RNA, 22 nt, Human
acagaccaaguuuccagcaggu

SEQ ID NO: 452119 - RNA, 22 nt, Human
aacauugcagcuuaauugcagg

SEQ ID NO: 452120 - RNA, 22 nt, Human
uacuguacauuccguuuguugc

SEQ ID NO: 452121 - RNA, 22 nt, Human
ucacuuauaaaaugcaagaucu

SEQ ID NO: 452122 - RNA, 22 nt, Human
gccacaugcaauugcagcacgu

SEQ ID NO: 452123 - RNA, 22 nt, Human
aguuauucauuuauucuguaca

SEQ ID NO: 452124 - RNA, 22 nt, Human
gccugcagggcccuuguggguc

SEQ ID NO: 452125 - RNA, 22 nt, Human
uaaggcacccuucugaguagag

SEQ ID NO: 452126 - RNA, 22 nt, Human
ugaggccugcauugaacuagaa

SEQ ID NO: 452127 - RNA, 22 nt, Human
uuccauuguuucugucuucacu

SEQ ID NO: 452128 - RNA, 22 nt, Human
ucuuugcaacucccauuuccau

SEQ ID NO: 452129 - RNA, 22 nt, Human
ggggaaggauugaguugaccca

SEQ ID NO: 452130 - RNA, 22 nt, Human
ccucaggaaccacauugcugcu

SEQ ID NO: 452131 - RNA, 22 nt, Human
ucagcuggagaugagaaccgaa

SEQ ID NO: 452132 - RNA, 22 nt, Human
agugaaauuuguuuagauaggu

SEQ ID NO: 452133 - RNA, 22 nt, Human
gggcaggugcccagggccagag

SEQ ID NO: 452134 - RNA, 22 nt, Human
uacaugcucaguaacuuucagu

SEQ ID NO: 452135 - RNA, 22 nt, Human
aggggcuggcuuaucugagagu

SEQ ID NO: 452136 - RNA, 22 nt, Human
auguaucaacaaauuguacagu

SEQ ID NO: 452137 - RNA, 22 nt, Human
auguuucagauacagaucaaau

SEQ ID NO: 452138 - RNA, 22 nt, Human
agcagguguagggcucuuugua

SEQ ID NO: 452139 - RNA, 22 nt, Human
uccagggcuggguuggcucagc

SEQ ID NO: 452140 - RNA, 22 nt, Human
gccugccuguuggcugaggugc

SEQ ID NO: 452141 - RNA, 22 nt, Human
uggcagggugggcuucagcccc

SEQ ID NO: 452142 - RNA, 22 nt, Human
cagagcugugauaaauagauau

SEQ ID NO: 452143 - RNA, 22 nt, Human
ggugaaggucagagcaggaaaa

SEQ ID NO: 452144 - RNA, 21 nt, Human
gcucccugcucagcuccuggg

SEQ ID NO: 452145 - RNA, 22 nt, Human
gugucaugcacacucaguguug

SEQ ID NO: 452146 - RNA, 22 nt, Human
ucugcagaaguggcugggccac

SEQ ID NO: 452147 - RNA, 22 nt, Human
ccccuuccaggaagcagaaucg

SEQ ID NO: 452148 - RNA, 22 nt, Human
guuauguaucuugauugggugg

SEQ ID NO: 452149 - RNA, 22 nt, Human
cuccucuggcuuccuggaggca

SEQ ID NO: 452150 - RNA, 22 nt, Human
cagggacauugguggccagguu

SEQ ID NO: 452151 - RNA, 22 nt, Human
uuaaaaugcagauucugauuca

SEQ ID NO: 452152 - RNA, 21 nt, Human
cagagcuguccaaacccugac

SEQ ID NO: 452153 - RNA, 22 nt, Human
aguuuuuccguggcuacgauaa

SEQ ID NO: 452154 - RNA, 22 nt, Human
ccugagggaaggaugcuaccca

SEQ ID NO: 452155 - RNA, 22 nt, Human
acagccuguguaccagcuggga

SEQ ID NO: 452156 - RNA, 22 nt, Human
ugcuuuauucgacaucugguag

SEQ ID NO: 452157 - RNA, 22 nt, Human
ucucuggggauggaccugggag

SEQ ID NO: 452158 - RNA, 22 nt, Human
agagccaggaugucuucugggg

SEQ ID NO: 452159 - RNA, 22 nt, Human
ccucagagccuccagaaggaau

SEQ ID NO: 452160 - RNA, 22 nt, Human
ggcagcuccucaaaaaauuaaa

SEQ ID NO: 452161 - RNA, 22 nt, Human
ucaaggugcugugcugugcuag

SEQ ID NO: 452162 - RNA, 20 nt, Human
acugcuucuuucucugaccu

SEQ ID NO: 452163 - RNA, 22 nt, Human
acagguccuuauaagagcacuc

SEQ ID NO: 452164 - RNA, 22 nt, Human
gcuggcuguaucaccuggccag

SEQ ID NO: 452165 - RNA, 22 nt, Human
cuguccagucuuuagcaagcug

SEQ ID NO: 452166 - RNA, 22 nt, Human
agggcaugaagcaguggacagc

SEQ ID NO: 452167 - RNA, 23 nt, Human
gggcuccagucucugcucaguug

SEQ ID NO: 452168 - RNA, 19 nt, Human
cagaaauagcgaaguguaa

SEQ ID NO: 452169 - RNA, 22 nt, Human
gcagcuggcccugacacgcaga

SEQ ID NO: 452170 - RNA, 22 nt, Human
uggcucaguaaucgagucuccu

SEQ ID NO: 452171 - RNA, 16 nt, Human
gcagaggaaaggggag

SEQ ID NO: 452172 - RNA, 22 nt, Human
uaaccauauuuuccauuaaguu

SEQ ID NO: 452173 - RNA, 22 nt, Human
aacauuucuucugaaacugagu

SEQ ID NO: 452174 - RNA, 22 nt, Human
agcaggaacucagggaguucuc

SEQ ID NO: 452175 - RNA, 22 nt, Human
ugcucacagcccagaacauaau

SEQ ID NO: 452176 - RNA, 22 nt, Human
acagggucaagggugcuacaag

SEQ ID NO: 452177 - RNA, 22 nt, Human
aguggcagagcaggugcuggaa

SEQ ID NO: 452178 - RNA, 22 nt, Human
uaauuucuggagggagaaagag

SEQ ID NO: 452179 - RNA, 22 nt, Human
cagccagccucucaaccaugca

SEQ ID NO: 452180 - RNA, 22 nt, Human
caaaauucugcauuucuaauaa

SEQ ID NO: 452181 - RNA, 21 nt, Human
cccugcaggccagggcugagc

SEQ ID NO: 452182 - RNA, 22 nt, Human
cuguucucuggcgguggcuguu

SEQ ID NO: 452183 - RNA, 22 nt, Human
agggucagguuaagggagucau

SEQ ID NO: 452184 - RNA, 19 nt, Human
agaaaucucgagauuuguu

SEQ ID NO: 452185 - RNA, 22 nt, Human
uuugaaagucaaccuuccaguu

SEQ ID NO: 452186 - RNA, 21 nt, Human
agacagaacaacugcucucca

SEQ ID NO: 452187 - RNA, 22 nt, Human
uucauuacugcgguagucacac

SEQ ID NO: 452188 - RNA, 20 nt, Human
ccucucugaagaggucaucu

SEQ ID NO: 452189 - RNA, 22 nt, Human
uugcauugaugucuauacgcug

SEQ ID NO: 452190 - RNA, 22 nt, Human
gcccucucggcauagcaggggc

SEQ ID NO: 452191 - RNA, 22 nt, Human
agugaaauaugcccauugcugu

SEQ ID NO: 452192 - RNA, 23 nt, Human
ucugucaccuauggcugcucuuc

SEQ ID NO: 452193 - RNA, 22 nt, Human
gccugccuuuuggaggcacauu

SEQ ID NO: 452194 - RNA, 19 nt, Human
guggccagggcaggggcug

SEQ ID NO: 452195 - RNA, 23 nt, Human
uggcugagguccagguaguuuca

SEQ ID NO: 452196 - RNA, 22 nt, Human
ugcauuauaacugaauguuguu

SEQ ID NO: 452197 - RNA, 22 nt, Human
caagagcugugaccucauucac

SEQ ID NO: 452198 - RNA, 22 nt, Human
cccaggcacaccccgaacggaa

SEQ ID NO: 452199 - RNA, 22 nt, Human
caggaugagaggcccagggaag

SEQ ID NO: 452200 - RNA, 22 nt, Human
caaggagauaaaauguugagcu

SEQ ID NO: 452201 - RNA, 22 nt, Human
augugaggcagcacggagauua

SEQ ID NO: 452202 - RNA, 22 nt, Human
caaagguauaaguuaauauaca

SEQ ID NO: 452203 - RNA, 22 nt, Human
uggcucagagcagggacucugg

SEQ ID NO: 452204 - RNA, 22 nt, Human
guuagaaagugucugcuugggu

SEQ ID NO: 452205 - RNA, 22 nt, Human
agcccagaggcugggcgugcau

SEQ ID NO: 452206 - RNA, 22 nt, Human
aggagagaauguuccaggcuug

SEQ ID NO: 452207 - RNA, 22 nt, Human
gcagcagcccagggcucucaga

SEQ ID NO: 452208 - RNA, 22 nt, Human
ggcuccuguccccucagcugcu

SEQ ID NO: 452209 - RNA, 22 nt, Human
ugaaagguuaaaaguaguauug

SEQ ID NO: 452210 - RNA, 22 nt, Human
gcagggcagggcaagaacuggg

SEQ ID NO: 452211 - RNA, 22 nt, Human
uggcagagaugaagaguuguuu

SEQ ID NO: 452212 - RNA, 22 nt, Human
cagggugccaaagaacaaauau

SEQ ID NO: 452213 - RNA, 22 nt, Human
uuccaaagucauguugcugaua

SEQ ID NO: 452214 - RNA, 22 nt, Human
ccugccaggccagugagcuucc

SEQ ID NO: 452215 - RNA, 22 nt, Human
ggcagaggugaaguucacaagg

SEQ ID NO: 452216 - RNA, 19 nt, Human
gaaggcugaaaugaagcac

SEQ ID NO: 452217 - RNA, 22 nt, Human
ucugucacuuuuauuuacugaa

SEQ ID NO: 452218 - RNA, 22 nt, Human
cugaaggagguagagugacaua

SEQ ID NO: 452219 - RNA, 20 nt, Human
ucagagagagggugccacuu

SEQ ID NO: 452220 - RNA, 22 nt, Human
agccaggaagaaggucacacca

SEQ ID NO: 452221 - RNA, 22 nt, Human
agcugccuguccuaggccauca

SEQ ID NO: 452222 - RNA, 20 nt, Human
ugccaugguaacagagugug

SEQ ID NO: 452223 - RNA, 22 nt, Human
gucuuuauuugagauugucauu

SEQ ID NO: 452224 - RNA, 22 nt, Human
gaaggccugugguagugagacg

SEQ ID NO: 452225 - RNA, 22 nt, Human
ccugggcagguguggcuucccc

SEQ ID NO: 452226 - RNA, 22 nt, Human
gugugcagggggccagcgcagc

SEQ ID NO: 452227 - RNA, 22 nt, Human
gcagggccuuagcagcggcugc

SEQ ID NO: 452228 - RNA, 22 nt, Human
caaggccauaagagauacaaaa

SEQ ID NO: 452229 - RNA, 21 nt, Human
aagccucaagcagaagacaga

SEQ ID NO: 452230 - RNA, 19 nt, Human
guggccugcgcugggugcg

SEQ ID NO: 452231 - RNA, 23 nt, Human
cacacccaucacuaagagcuccu

SEQ ID NO: 452232 - RNA, 22 nt, Human
agcugcuacugcucugccagag

SEQ ID NO: 452233 - RNA, 23 nt, Human
uggcucugagcuuccugguggcc

SEQ ID NO: 452234 - RNA, 22 nt, Human
aaagcagcagcacguggaagag

SEQ ID NO: 452235 - RNA, 22 nt, Human
uuaaaguucauuaaaugagcca

SEQ ID NO: 452236 - RNA, 22 nt, Human
ugggcuccaauuuguccuuuca

SEQ ID NO: 452237 - RNA, 23 nt, Human
cagggccaggcagcagcugucac

SEQ ID NO: 452238 - RNA, 22 nt, Human
auaauaaaccaggaugggucug

SEQ ID NO: 452239 - RNA, 22 nt, Human
gagauuggccuggcuugccaac

SEQ ID NO: 452240 - RNA, 22 nt, Human
gagcaggcauucuaguggcuga

SEQ ID NO: 452241 - RNA, 22 nt, Human
cuggcucauccagguguugcuc

SEQ ID NO: 452242 - RNA, 22 nt, Human
ucagcuuucuauguugcuaaac

SEQ ID NO: 452243 - RNA, 22 nt, Human
cagcauggugccagugagucca

SEQ ID NO: 452244 - RNA, 22 nt, Human
uggcugagaccaucagggugua

SEQ ID NO: 452245 - RNA, 22 nt, Human
cuccauugaacauccucucaga

SEQ ID NO: 452246 - RNA, 22 nt, Human
acugccaggauggcacuagagg

SEQ ID NO: 452247 - RNA, 22 nt, Human
cugcucuggggaagccagaugu

SEQ ID NO: 452248 - RNA, 22 nt, Human
uggccugcagcucucagggaag

SEQ ID NO: 452249 - RNA, 22 nt, Human
uuuccucugucaugacagcuga

SEQ ID NO: 452250 - RNA, 22 nt, Human
ggccagaaaguuaagcuguggc

SEQ ID NO: 452251 - RNA, 22 nt, Human
ucucuguacaguacaugccgug

SEQ ID NO: 452252 - RNA, 23 nt, Human
ggguccagagacaggcaugggug

SEQ ID NO: 452253 - RNA, 22 nt, Human
aggcugagcugguagugaguac

SEQ ID NO: 452254 - RNA, 22 nt, Human
uuagucuucuuccuuauauguu

SEQ ID NO: 452255 - RNA, 22 nt, Human
gcagaggcaaucagguaugugg

SEQ ID NO: 452256 - RNA, 22 nt, Human
gucaggcugccagucuuuauug

SEQ ID NO: 452257 - RNA, 22 nt, Human
gugcuuccugccuggugccuuu

SEQ ID NO: 452258 - RNA, 18 nt, Human
ucaagacaucaugaaaua

SEQ ID NO: 452259 - RNA, 22 nt, Human
aacuguaagacaaaugacuucu

SEQ ID NO: 452260 - RNA, 22 nt, Human
gccaggcuggaaagaacagaca

SEQ ID NO: 452261 - RNA, 22 nt, Human
ucugccuuuucacugccacuaa

SEQ ID NO: 452262 - RNA, 22 nt, Human
gucaaacaaauuaacauaucca

SEQ ID NO: 452263 - RNA, 22 nt, Human
ccagagcccgggaccuggacuu

SEQ ID NO: 452264 - RNA, 22 nt, Human
uaaggccaauuaacaaccaggg

SEQ ID NO: 452265 - RNA, 22 nt, Human
agaggucagaacaggaaagugu

SEQ ID NO: 452266 - RNA, 22 nt, Human
gggcaguggcucacgccuguaa

SEQ ID NO: 452267 - RNA, 22 nt, Human
aaaagagguuaaccaggugugu

SEQ ID NO: 452268 - RNA, 22 nt, Human
uccaugucuucaugugucuaac

SEQ ID NO: 452269 - RNA, 22 nt, Human
aaugaucuggcucaggauauca

SEQ ID NO: 452270 - RNA, 18 nt, Human
uguacaguuaugagcauu

SEQ ID NO: 452271 - RNA, 22 nt, Human
ggcagcaguggcugcuauuguc

SEQ ID NO: 452272 - RNA, 22 nt, Human
caaaagauacuugcaucuaacu

SEQ ID NO: 452273 - RNA, 22 nt, Human
uccuucaguucaauuaguccgu

SEQ ID NO: 452274 - RNA, 22 nt, Human
ccagcccugaacccugcugcau

SEQ ID NO: 452275 - RNA, 22 nt, Human
acuuccuguuaugugugccucu

SEQ ID NO: 452276 - RNA, 22 nt, Human
cccaggucugugccagcucuga

SEQ ID NO: 452277 - RNA, 22 nt, Human
agguaacacuacuuaguauacu

SEQ ID NO: 452278 - RNA, 18 nt, Human
gcagagugcgucucugug

SEQ ID NO: 452279 - RNA, 23 nt, Human
uucaagauacgguuuccaggcug

SEQ ID NO: 452280 - RNA, 23 nt, Human
ucuccagugucucuucauugagu

SEQ ID NO: 452281 - RNA, 20 nt, Human
agugacagagacuguguggc

SEQ ID NO: 452282 - RNA, 22 nt, Human
gcagccacugggagugcuuaua

SEQ ID NO: 452283 - RNA, 22 nt, Human
ugaaaucuacccuauucagggu

SEQ ID NO: 452284 - RNA, 22 nt, Human
augaguucaauuguuucaguca

SEQ ID NO: 452285 - RNA, 22 nt, Human
auuaaauuagcaaacugugaaa

SEQ ID NO: 452286 - RNA, 22 nt, Human
uaugcacacaucgcagcaggaa

SEQ ID NO: 452287 - RNA, 22 nt, Human
aaauccuaaggagaauaugauu

SEQ ID NO: 452288 - RNA, 22 nt, Human
cagagcugauuggauccagaga

SEQ ID NO: 452289 - RNA, 22 nt, Human
agggcagcaaugcagcugcugc

SEQ ID NO: 452290 - RNA, 22 nt, Human
ccaggugguucaggucaccaua

SEQ ID NO: 452291 - RNA, 22 nt, Human
aaguguuuacuuaaagucaugg

SEQ ID NO: 452292 - RNA, 19 nt, Human
aucagcaagguaggaugug

SEQ ID NO: 452293 - RNA, 22 nt, Human
uuaauuuuuauguauagugugu

SEQ ID NO: 452294 - RNA, 22 nt, Human
uccaggcaggguuaaggguccu

SEQ ID NO: 452295 - RNA, 22 nt, Human
gaggggcagagguagagaacaa

SEQ ID NO: 452296 - RNA, 22 nt, Human
gccuguguggaugcgccggugc

SEQ ID NO: 452297 - RNA, 22 nt, Human
accugagaccuaaucugacugu

SEQ ID NO: 452298 - RNA, 22 nt, Human
agcagagguguuuauuauggga

SEQ ID NO: 452299 - RNA, 22 nt, Human
aguggcagggcuggcugcugca

SEQ ID NO: 452300 - RNA, 22 nt, Human
auuguaucuugucauuaugcau

SEQ ID NO: 452301 - RNA, 22 nt, Human
aauguacaaaccuucuuuguag

SEQ ID NO: 452302 - RNA, 22 nt, Human
aggcugagcggggucccagagc

SEQ ID NO: 452303 - RNA, 22 nt, Human
auauucguggucaaguaaggcc

SEQ ID NO: 452304 - RNA, 22 nt, Human
uccuuccuggggucucugcugc

SEQ ID NO: 452305 - RNA, 22 nt, Human
ggccaggcgaugaccccuccac

SEQ ID NO: 452306 - RNA, 22 nt, Human
agaacagaggccuuauguuuca

SEQ ID NO: 452307 - RNA, 22 nt, Human
uauugaguuacagaaaauacuu

SEQ ID NO: 452308 - RNA, 22 nt, Human
ggaggaguguggggcacucugc

SEQ ID NO: 452309 - RNA, 22 nt, Human
uaaaggcuuuuacaggagugca

SEQ ID NO: 452310 - RNA, 22 nt, Human
aaauggauggaauugacauuua

SEQ ID NO: 452311 - RNA, 22 nt, Human
ugaaggagggaagaaggcucug

SEQ ID NO: 452312 - RNA, 22 nt, Human
caguguuuguauagaauaugca

SEQ ID NO: 452313 - RNA, 22 nt, Human
gcuggccaguguggugaccacc

SEQ ID NO: 452314 - RNA, 22 nt, Human
gggugggagucuggcccucaaa

SEQ ID NO: 452315 - RNA, 22 nt, Human
ccuggagcacucucccuggcug

SEQ ID NO: 452316 - RNA, 22 nt, Human
acuuuugguucuguaacuguga

SEQ ID NO: 452317 - RNA, 22 nt, Human
ugucagcagcugguuugcuguu

SEQ ID NO: 452318 - RNA, 22 nt, Human
uugugugguagcuucauugaac

SEQ ID NO: 452319 - RNA, 22 nt, Human
uuucacauaaauauuaugccua

SEQ ID NO: 452320 - RNA, 22 nt, Human
ccucagccuuggccccaggcag

SEQ ID NO: 452321 - RNA, 22 nt, Human
uggcuugucauguaucugaggc

SEQ ID NO: 452322 - RNA, 22 nt, Human
uaguuacagcaggcaggauaua

SEQ ID NO: 452323 - RNA, 22 nt, Human
cugggaggauacacaagaucag

SEQ ID NO: 452324 - RNA, 21 nt, Human
uguaugcacgcacaugcacac

SEQ ID NO: 452325 - RNA, 22 nt, Human
gagcugucuggggacucugggu

SEQ ID NO: 452326 - RNA, 22 nt, Human
caggaggcagaggaugcccagu

SEQ ID NO: 452327 - RNA, 22 nt, Human
ccaggagguggagauugcagug

SEQ ID NO: 452328 - RNA, 22 nt, Human
ugcacacaguucucaggaaaga

SEQ ID NO: 452329 - RNA, 22 nt, Human
aucccaugagaccacguuggcu

SEQ ID NO: 452330 - RNA, 22 nt, Human
gagucacaaagccuuucuuauu

SEQ ID NO: 452331 - RNA, 22 nt, Human
cugccagcucaaagcgcagcua

SEQ ID NO: 452332 - RNA, 21 nt, Human
cagugcucaaucugacagugg

SEQ ID NO: 452333 - RNA, 22 nt, Human
guggagcaaucagagggucagu

SEQ ID NO: 452334 - RNA, 22 nt, Human
ccagucacuggaaaaugggaau

SEQ ID NO: 452335 - RNA, 22 nt, Human
gaggccugcuuuggcacucugg

SEQ ID NO: 452336 - RNA, 22 nt, Human
gccaggcauuuguuaggugcug

SEQ ID NO: 452337 - RNA, 22 nt, Human
gcucaagggaugggagugggug

SEQ ID NO: 452338 - RNA, 22 nt, Human
cucuggcuuugcucaugcaucc

SEQ ID NO: 452339 - RNA, 22 nt, Human
ggggcagagucuggacuguugu

SEQ ID NO: 452340 - RNA, 22 nt, Human
uggcgugcccuccagacuuggc

SEQ ID NO: 452341 - RNA, 22 nt, Human
gucugcugcagagcauggcuuu

SEQ ID NO: 452342 - RNA, 22 nt, Human
uccuaguucucugccagucgcu

SEQ ID NO: 452343 - RNA, 22 nt, Human
ggcccaucucuugcucuggguu

SEQ ID NO: 452344 - RNA, 22 nt, Human
accagagcgcucaagccuuccc

SEQ ID NO: 452345 - RNA, 22 nt, Human
gugaccaucagagaauaacaaa

SEQ ID NO: 452346 - RNA, 22 nt, Human
cugggcuccuaaccauccaggu

SEQ ID NO: 452347 - RNA, 22 nt, Human
uuucuaguccucaugcaucauu

SEQ ID NO: 452348 - RNA, 22 nt, Human
gggcuggcaucaguugccgaga

SEQ ID NO: 452349 - RNA, 22 nt, Human
ccuggaaggugaugguacagca

SEQ ID NO: 452350 - RNA, 22 nt, Human
cuggcugcaggaaggagugggc

SEQ ID NO: 452351 - RNA, 22 nt, Human
gcugcaggcauuuuccugggca

SEQ ID NO: 452352 - RNA, 22 nt, Human
uccagaccaugugagaggcgca

SEQ ID NO: 452353 - RNA, 22 nt, Human
ugcagggcacggugcgcguggg

SEQ ID NO: 452354 - RNA, 22 nt, Human
ucccagggacugggcuaggcuu

SEQ ID NO: 452355 - RNA, 22 nt, Human
gggccagguggaccccagccuc

SEQ ID NO: 452356 - RNA, 22 nt, Human
cuauuuuaacuugauuaccucu

SEQ ID NO: 452357 - RNA, 22 nt, Human
uugacaaaaaccucauuucacc

SEQ ID NO: 452358 - RNA, 22 nt, Human
auugucuuuggugcuuccagga

SEQ ID NO: 452359 - RNA, 22 nt, Human
aagcagaauuucccacuaguug

SEQ ID NO: 452360 - RNA, 18 nt, Human
cugucaccgccaccacac

SEQ ID NO: 452361 - RNA, 23 nt, Human
guggccuccccggaaugccucgc

SEQ ID NO: 452362 - RNA, 22 nt, Human
uuuucacacaaggugauaaguu

SEQ ID NO: 452363 - RNA, 19 nt, Human
gcugcucugggucucaucu

SEQ ID NO: 452364 - RNA, 22 nt, Human
caggagacaaguuagcagcuga

SEQ ID NO: 452365 - RNA, 22 nt, Human
agagcagccugugaugaugcac

SEQ ID NO: 452366 - RNA, 22 nt, Human
aaugcuuugacuauaucuauaa

SEQ ID NO: 452367 - RNA, 22 nt, Human
aaaggaagaugccaggacucug

SEQ ID NO: 452368 - RNA, 22 nt, Human
aaagcaaucagauucagauguc

SEQ ID NO: 452369 - RNA, 22 nt, Human
ggugggcacauucagucucugu

SEQ ID NO: 452370 - RNA, 22 nt, Human
aaggagucugggccauucagag

SEQ ID NO: 452371 - RNA, 22 nt, Human
guucucucugcuuccaagaugg

SEQ ID NO: 452372 - RNA, 22 nt, Human
acaaaguuugugguauuccaag

SEQ ID NO: 452373 - RNA, 22 nt, Human
cccagcagaaucugaugagggc

SEQ ID NO: 452374 - RNA, 22 nt, Human
guacaugucaaaaaaugcauaa

SEQ ID NO: 452375 - RNA, 22 nt, Human
uggacucagugcugccauuccc

SEQ ID NO: 452376 - RNA, 22 nt, Human
agggcagcagcggcccaggccu

SEQ ID NO: 452377 - RNA, 22 nt, Human
caguauguacucuuaucaugua

SEQ ID NO: 452378 - RNA, 22 nt, Human
gagagcugauagaugagcuacu

SEQ ID NO: 452379 - RNA, 20 nt, Human
uccaagcccuccuuccauuc

SEQ ID NO: 452380 - RNA, 22 nt, Human
agcuuccugaugcaagagggcu

SEQ ID NO: 452381 - RNA, 22 nt, Human
gccugaagaacagcugugagga

SEQ ID NO: 452382 - RNA, 22 nt, Human
cacaggcuccggccuugcagcc

SEQ ID NO: 452383 - RNA, 22 nt, Human
agggaggcaggaaaguugucug

SEQ ID NO: 452384 - RNA, 22 nt, Human
cagacaggcuagccagacucac

SEQ ID NO: 452385 - RNA, 22 nt, Human
ggccaggagcaagccaggcucu

SEQ ID NO: 452386 - RNA, 19 nt, Human
auaaggcaggaggaaauuu

SEQ ID NO: 452387 - RNA, 22 nt, Human
aggccucaggaagguaaagaag

SEQ ID NO: 452388 - RNA, 22 nt, Human
gugcccugaguggguaggagag

SEQ ID NO: 452389 - RNA, 22 nt, Human
ggcugucucugugacugccacc

SEQ ID NO: 452390 - RNA, 22 nt, Human
uugucugucccagcuugugcau

SEQ ID NO: 452391 - RNA, 21 nt, Human
uggcccuggccacggcugcca

SEQ ID NO: 452392 - RNA, 22 nt, Human
auauguguacgugcaguauaua

SEQ ID NO: 452393 - RNA, 22 nt, Human
gaaaggcaguacagcugagccu

SEQ ID NO: 452394 - RNA, 22 nt, Human
cugagaggcacaaggcauuucg

SEQ ID NO: 452395 - RNA, 22 nt, Human
ucaaaaguuucacauagagaua

SEQ ID NO: 452396 - RNA, 22 nt, Human
aagcuuuagagaugaguuccuu

SEQ ID NO: 452397 - RNA, 22 nt, Human
agcuuccucaccucagaggucu

SEQ ID NO: 452398 - RNA, 22 nt, Human
ugugugcauucacaugcaugcc

SEQ ID NO: 452399 - RNA, 22 nt, Human
aagauucuacaguagguacauu

SEQ ID NO: 452400 - RNA, 22 nt, Human
ccagcagcgauagggugagugc

SEQ ID NO: 452401 - RNA, 22 nt, Human
gaagggugugugugagggacac

SEQ ID NO: 452402 - RNA, 22 nt, Human
uggccgggccgggcgccuccac

SEQ ID NO: 452403 - RNA, 22 nt, Human
uuaugcaacaggugagcagaca

SEQ ID NO: 452404 - RNA, 22 nt, Human
guucauauuacuuugagugcag

SEQ ID NO: 452405 - RNA, 22 nt, Human
uucaauucuaaacuaauauucu

SEQ ID NO: 452406 - RNA, 22 nt, Human
gcugcagcccggcgcgccugag

SEQ ID NO: 452407 - RNA, 22 nt, Human
aaaaucaguacacuuuauuuug

SEQ ID NO: 452408 - RNA, 22 nt, Human
cagaggcauacucccagucuug

SEQ ID NO: 452409 - RNA, 22 nt, Human
cugugcuuccaggauggcagcu

SEQ ID NO: 452410 - RNA, 22 nt, Human
ggaggagcacuucugagcucag

SEQ ID NO: 452411 - RNA, 22 nt, Human
cauuuguacagaacagcuuuau

SEQ ID NO: 452412 - RNA, 22 nt, Human
aagcacuuagaagagugccugc

SEQ ID NO: 452413 - RNA, 22 nt, Human
cugguuccaggauggaucuuuc

SEQ ID NO: 452414 - RNA, 20 nt, Human
uccugagauuuaagggguuc

SEQ ID NO: 452415 - RNA, 22 nt, Human
ggcuggccuguguggccgccac

SEQ ID NO: 452416 - RNA, 22 nt, Human
cuuguggcccauggcuuccugc

SEQ ID NO: 452417 - RNA, 22 nt, Human
gaguccaguuguucacagaggc

SEQ ID NO: 452418 - RNA, 22 nt, Human
agggcagcauugccuuucucca

SEQ ID NO: 452419 - RNA, 22 nt, Human
guuauauauaguauuucucuga

SEQ ID NO: 452420 - RNA, 22 nt, Human
uggcuggggagccccgacuccc

SEQ ID NO: 452421 - RNA, 22 nt, Human
ucagcaguggcucucaugcagu

SEQ ID NO: 452422 - RNA, 22 nt, Human
uauuuugucuucugcucaucac

SEQ ID NO: 452423 - RNA, 22 nt, Human
cauaagaaauaaugaugaugac

SEQ ID NO: 452424 - RNA, 22 nt, Human
caggaccuggaaugcuugugaa

SEQ ID NO: 452425 - RNA, 22 nt, Human
ccacaggggucucuguagcuga

SEQ ID NO: 452426 - RNA, 22 nt, Human
agaagccauagucugggaggca

SEQ ID NO: 452427 - RNA, 22 nt, Human
ggugccagccuagugcaguggu

SEQ ID NO: 452428 - RNA, 22 nt, Human
gcucugcuguguuuguucagca

SEQ ID NO: 452429 - RNA, 22 nt, Human
ggccugccucacagucagcacc

SEQ ID NO: 452430 - RNA, 19 nt, Human
aggugcaggucacagggga

SEQ ID NO: 452431 - RNA, 22 nt, Human
uuuccucuuuguaccuugacua

SEQ ID NO: 452432 - RNA, 22 nt, Human
agaggcagccguauuucaaagg

SEQ ID NO: 452433 - RNA, 22 nt, Human
cauuuguaucauauguaucuua

SEQ ID NO: 452434 - RNA, 22 nt, Human
gcagcuuuaaacauuggaaaua

SEQ ID NO: 452435 - RNA, 20 nt, Human
cacguuuuuccacuagcaaa

SEQ ID NO: 452436 - RNA, 22 nt, Human
uugaaagaggcaaaguuugauc

SEQ ID NO: 452437 - RNA, 22 nt, Human
ggcugccacgucgaggguccaa

SEQ ID NO: 452438 - RNA, 22 nt, Human
uaggcuggaggaagcagugccu

SEQ ID NO: 452439 - RNA, 18 nt, Human
acccucuggcuucugagc

SEQ ID NO: 452440 - RNA, 22 nt, Human
aaucaguuaggguguuaaugag

SEQ ID NO: 452441 - RNA, 22 nt, Human
aggcaauccccugaggauacuu

SEQ ID NO: 452442 - RNA, 22 nt, Human
cuggccuggcaggggaccucua

SEQ ID NO: 452443 - RNA, 19 nt, Human
gcaggcacagcccugggug

SEQ ID NO: 452444 - RNA, 19 nt, Human
aucugccuuagugcugcug

SEQ ID NO: 452445 - RNA, 22 nt, Human
cuguaugaggaucagacuggac

SEQ ID NO: 452446 - RNA, 22 nt, Human
caggguggcaggcaccauggcc

SEQ ID NO: 452447 - RNA, 22 nt, Human
ccugggaggcuguuuccagccu

SEQ ID NO: 452448 - RNA, 22 nt, Human
cugccaggacugacgucuucag

SEQ ID NO: 452449 - RNA, 22 nt, Human
cccagcauccucagggagcggg

SEQ ID NO: 452450 - RNA, 22 nt, Human
ucaaggagcccacagucuaaug

SEQ ID NO: 452451 - RNA, 20 nt, Human
ucucaggguucagcaaagua

SEQ ID NO: 452452 - RNA, 22 nt, Human
aacagcuuugcuucuggagaca

SEQ ID NO: 452453 - RNA, 22 nt, Human
uugcauaaaugcuuaaaauuug

SEQ ID NO: 452454 - RNA, 20 nt, Human
gcuuuuucuaauagcagucc

SEQ ID NO: 452455 - RNA, 22 nt, Human
gcugccuugaacuuggccuggg

SEQ ID NO: 452456 - RNA, 23 nt, Human
cagugugacgaggugaggcaggc

SEQ ID NO: 452457 - RNA, 22 nt, Human
acaggcugcugagccauuugcu

SEQ ID NO: 452458 - RNA, 21 nt, Human
ucacuuauaauguauuugcug

SEQ ID NO: 452459 - RNA, 22 nt, Human
agugacucacuagcucucagug

SEQ ID NO: 452460 - RNA, 22 nt, Human
uggcagaaguucacuaguagcu

SEQ ID NO: 452461 - RNA, 22 nt, Human
uagggcuauaagagaauaagac

SEQ ID NO: 452462 - RNA, 22 nt, Human
aaggcauaugcuguguacaguu

SEQ ID NO: 452463 - RNA, 22 nt, Human
gggagcuguaguccagauaccg

SEQ ID NO: 452464 - RNA, 23 nt, Human
uagggcagcugggagggacaugc

SEQ ID NO: 452465 - RNA, 22 nt, Human
ucuggcucuaacuaggcaucag

SEQ ID NO: 452466 - RNA, 22 nt, Human
ggcagugaacagaaaugcagaa

SEQ ID NO: 452467 - RNA, 22 nt, Human
auaaggaaugauguaucaguuu

SEQ ID NO: 452468 - RNA, 22 nt, Human
cauaccuuucucaagcacaugu

SEQ ID NO: 452469 - RNA, 22 nt, Human
uuccaguucccaugaggauuaa

SEQ ID NO: 452470 - RNA, 22 nt, Human
gggaccugccauugcucacagg

SEQ ID NO: 452471 - RNA, 22 nt, Human
aaaucaguuaagaugaggccau

SEQ ID NO: 452472 - RNA, 22 nt, Human
uacauggguagguuaagucaua

SEQ ID NO: 452473 - RNA, 22 nt, Human
ggugcuggacacguggcacucc

SEQ ID NO: 452474 - RNA, 22 nt, Human
cugggccucauccucagaguuu

SEQ ID NO: 452475 - RNA, 22 nt, Human
guggccucuguuggcuccuagg

SEQ ID NO: 452476 - RNA, 22 nt, Human
uggccugccugggagcagcagg

SEQ ID NO: 452477 - RNA, 22 nt, Human
agcugccugcuuaugagcucca

SEQ ID NO: 452478 - RNA, 22 nt, Human
caguaaaagauggaaauagaau

SEQ ID NO: 452479 - RNA, 22 nt, Human
uuuaccauccucuuuuagaauu

SEQ ID NO: 452480 - RNA, 22 nt, Human
aaggcacucagccuugggacag

SEQ ID NO: 452481 - RNA, 22 nt, Human
cccuuucccuucuggcucaggg

SEQ ID NO: 452482 - RNA, 22 nt, Human
gccaggcagacaggucaucagg

SEQ ID NO: 452483 - RNA, 22 nt, Human
ccagggugaggaggcucccacg

SEQ ID NO: 452484 - RNA, 22 nt, Human
gggcagguguugucaaucuaau

SEQ ID NO: 452485 - RNA, 20 nt, Human
gaguuccccauuucuccugg

SEQ ID NO: 452486 - RNA, 22 nt, Human
ugguaaaguguacugaauauga

SEQ ID NO: 452487 - RNA, 22 nt, Human
acagagcuuaauucaggagcuu

SEQ ID NO: 452488 - RNA, 22 nt, Human
uccucaggucaaagcaggagaa

SEQ ID NO: 452489 - RNA, 22 nt, Human
cacugggcaauucugagccuaa

SEQ ID NO: 452490 - RNA, 22 nt, Human
cugcucugaagccaggauucug

SEQ ID NO: 452491 - RNA, 22 nt, Human
ucacauaaauuauacaauuuca

SEQ ID NO: 452492 - RNA, 16 nt, Human
uggcugagagaggguu

SEQ ID NO: 452493 - RNA, 22 nt, Human
cauuaucucuucuauaugcuag

SEQ ID NO: 452494 - RNA, 22 nt, Human
ggaggccaugaggcucuaggug

SEQ ID NO: 452495 - RNA, 22 nt, Human
gcagcuuucuaagcuuuauugc

SEQ ID NO: 452496 - RNA, 22 nt, Human
auagaaaacagauguccuuaaa

SEQ ID NO: 452497 - RNA, 22 nt, Human
uuuacacauaccucuuuaaagu

SEQ ID NO: 452498 - RNA, 22 nt, Human
ccagcuuucugggugguuucug

SEQ ID NO: 452499 - RNA, 22 nt, Human
cuuggcagauccaaaaaugaca

SEQ ID NO: 452500 - RNA, 21 nt, Human
agcaacucugacuagaugagg

SEQ ID NO: 452501 - RNA, 22 nt, Human
cugcaggguuuuucaaggacaa

SEQ ID NO: 452502 - RNA, 22 nt, Human
uggagcauauucuggagcuugg

SEQ ID NO: 452503 - RNA, 22 nt, Human
aggggagcuaacaccagagccc

SEQ ID NO: 452504 - RNA, 22 nt, Human
uugaaaguccuucuugaguuac

SEQ ID NO: 452505 - RNA, 22 nt, Human
agggaggauaguagucaguuua

SEQ ID NO: 452506 - RNA, 21 nt, Human
agauuguauggaggugagagg

SEQ ID NO: 452507 - RNA, 22 nt, Human
cagagcugacccaaggauugaa

SEQ ID NO: 452508 - RNA, 22 nt, Human
caggggaaggagccuugaaacu

SEQ ID NO: 452509 - RNA, 22 nt, Human
ggcugggcucgcugauuggcug

SEQ ID NO: 452510 - RNA, 22 nt, Human
gccaggcuggugcaaggauauu

SEQ ID NO: 452511 - RNA, 22 nt, Human
cuuagaaauaaugguuucaguu

SEQ ID NO: 452512 - RNA, 22 nt, Human
aggagaaggaagugcaucacua

SEQ ID NO: 452513 - RNA, 22 nt, Human
caggccucaggggcucaggcug

SEQ ID NO: 452514 - RNA, 22 nt, Human
uaaagguaguuuuaaaggugcu

SEQ ID NO: 452515 - RNA, 22 nt, Human
ugcagggccuucuagaccaugg

SEQ ID NO: 452516 - RNA, 22 nt, Human
uccugcagguggaugauucucu

SEQ ID NO: 452517 - RNA, 22 nt, Human
ccagucugaggccuggugaggg

SEQ ID NO: 452518 - RNA, 22 nt, Human
gagcagugggaaggaacagggu

SEQ ID NO: 452519 - RNA, 22 nt, Human
ucucagugauggcccauuugga

SEQ ID NO: 452520 - RNA, 21 nt, Human
acagucuccccagaucucucc

SEQ ID NO: 452521 - RNA, 22 nt, Human
gccaggcagcugggagggugcc

SEQ ID NO: 452522 - RNA, 22 nt, Human
aaaggucagacuuaggcugggc

SEQ ID NO: 452523 - RNA, 18 nt, Human
ugagaggcagguagagga

SEQ ID NO: 452524 - RNA, 22 nt, Human
cugcugagguccuugcucagac

SEQ ID NO: 452525 - RNA, 22 nt, Human
uucuuuccucccagccuuugga

SEQ ID NO: 452526 - RNA, 22 nt, Human
aaauguguauaugaaacaugau

SEQ ID NO: 452527 - RNA, 20 nt, Human
ggcucugcuugugagcagcc

SEQ ID NO: 452528 - RNA, 19 nt, Human
ucucaauguucagaaagcu

SEQ ID NO: 452529 - RNA, 22 nt, Human
acagggcaaccucugggagacu

SEQ ID NO: 452530 - RNA, 22 nt, Human
cccacagguccccaugaacucg

SEQ ID NO: 452531 - RNA, 22 nt, Human
cugcagcuuuggaaaccuguuu

SEQ ID NO: 452532 - RNA, 22 nt, Human
cacaugggcguaauguccaugg

SEQ ID NO: 452533 - RNA, 22 nt, Human
gcugaguguaaugauggcagag

SEQ ID NO: 452534 - RNA, 22 nt, Human
ggcucagacucccaggcccucu

SEQ ID NO: 452535 - RNA, 22 nt, Human
agccacaccuguccugccagcu

SEQ ID NO: 452536 - RNA, 22 nt, Human
cagcuguguaugagagcaugcu

SEQ ID NO: 452537 - RNA, 22 nt, Human
cagguaagagacggauuggccc

SEQ ID NO: 452538 - RNA, 22 nt, Human
ggccucuguucugcauuccucc

SEQ ID NO: 452539 - RNA, 22 nt, Human
cacagggcagaggguccguggc

SEQ ID NO: 452540 - RNA, 22 nt, Human
ucucaguguuguucugcagaug

SEQ ID NO: 452541 - RNA, 22 nt, Human
aggcucaggcaggaauggcgga

SEQ ID NO: 452542 - RNA, 22 nt, Human
caucagagugguggccuggugu

SEQ ID NO: 452543 - RNA, 22 nt, Human
agggcccuccccgcucagggca

SEQ ID NO: 452544 - RNA, 22 nt, Human
aggcaggaaaaucgcuugaacc

SEQ ID NO: 452545 - RNA, 22 nt, Human
uuuucucuacaaaauaaccagc

SEQ ID NO: 452546 - RNA, 22 nt, Human
gugcuuucugcugcauuccucu

SEQ ID NO: 452547 - RNA, 22 nt, Human
acaggacauguaccaggugguc

SEQ ID NO: 452548 - RNA, 18 nt, Human
ccagguggugacagagau

SEQ ID NO: 452549 - RNA, 19 nt, Human
agggccaggauucuggaac

SEQ ID NO: 452550 - RNA, 22 nt, Human
agccaaagaucagugugcaagu

SEQ ID NO: 452551 - RNA, 22 nt, Human
gaaaagcuaggccaguucagcu

SEQ ID NO: 452552 - RNA, 22 nt, Human
gaugguuuggaaugaaguagcu

SEQ ID NO: 452553 - RNA, 18 nt, Human
caugggugacagguggau

SEQ ID NO: 452554 - RNA, 22 nt, Human
gcagagccuugcgucaugugcc

SEQ ID NO: 452555 - RNA, 22 nt, Human
agggcugcuccuccuucaggcc

SEQ ID NO: 452556 - RNA, 22 nt, Human
aggcugaggcagguggaucacu

SEQ ID NO: 452557 - RNA, 22 nt, Human
auugauaucaguuugcugauug

SEQ ID NO: 452558 - RNA, 22 nt, Human
ugcugccaccccucaccagagc

SEQ ID NO: 452559 - RNA, 19 nt, Human
uccuucagucagaucuggg

SEQ ID NO: 452560 - RNA, 22 nt, Human
aucugccuggcuccaggugagc

SEQ ID NO: 452561 - RNA, 22 nt, Human
ugaagcagaggggucuugagcu

SEQ ID NO: 452562 - RNA, 22 nt, Human
ugcuuuauguggcugauacuca

SEQ ID NO: 452563 - RNA, 22 nt, Human
uccuggagagugggcgagcaca

SEQ ID NO: 452564 - RNA, 22 nt, Human
ccagguguagcacugcucacag

SEQ ID NO: 452565 - RNA, 19 nt, Human
ucaaggcucccugagggau

SEQ ID NO: 452566 - RNA, 22 nt, Human
augcuucagugcuaccuucaaa

SEQ ID NO: 452567 - RNA, 22 nt, Human
ugcaucuuacguuuugaaaggg

SEQ ID NO: 452568 - RNA, 22 nt, Human
acagccauagaugcuuauguaa

SEQ ID NO: 452569 - RNA, 19 nt, Human
gggaugggcccucacccuc

SEQ ID NO: 452570 - RNA, 22 nt, Human
ucucgacagccuggcacagugg

SEQ ID NO: 452571 - RNA, 22 nt, Human
ucucccuggagcccugaagcau

SEQ ID NO: 452572 - RNA, 22 nt, Human
acccaggggcagccuugcugug

SEQ ID NO: 452573 - RNA, 22 nt, Human
aaugccucuuggaagaagacuu

SEQ ID NO: 452574 - RNA, 22 nt, Human
ggccugaggcaauagucagaca

SEQ ID NO: 452575 - RNA, 22 nt, Human
agagccagguguagucucggag

SEQ ID NO: 452576 - RNA, 22 nt, Human
agccccaguaagggagggccug

SEQ ID NO: 452577 - RNA, 18 nt, Human
aaguaacagaagagcaca

SEQ ID NO: 452578 - RNA, 22 nt, Human
ugcaggugcguuuucaagccuc

SEQ ID NO: 452579 - RNA, 22 nt, Human
agaaaacauuacauaggugugu

SEQ ID NO: 452580 - RNA, 22 nt, Human
acaggccugugugcacacgagg

SEQ ID NO: 452581 - RNA, 22 nt, Human
aggcugaaaacgagauggcaau

SEQ ID NO: 452582 - RNA, 22 nt, Human
ggcucugcuggauugaggccag

SEQ ID NO: 452583 - RNA, 17 nt, Human
cugaagauaauggcaac

SEQ ID NO: 452584 - RNA, 22 nt, Human
aaaaaugaauucuucaguggca

SEQ ID NO: 452585 - RNA, 22 nt, Human
gaaacuguauguaguuuuuggg

SEQ ID NO: 452586 - RNA, 22 nt, Human
uuagauaauguagagauaugag

SEQ ID NO: 452587 - RNA, 22 nt, Human
ucccuguccugggcaaucccag

SEQ ID NO: 452588 - RNA, 22 nt, Human
caggacugauguuccuccagcc

SEQ ID NO: 452589 - RNA, 22 nt, Human
ggcuuuauaggguagaggauca

SEQ ID NO: 452590 - RNA, 22 nt, Human
uggagggaacccaggcugcucu

SEQ ID NO: 452591 - RNA, 22 nt, Human
aacacuguacuggaagauggac

SEQ ID NO: 452592 - RNA, 22 nt, Human
ccauccugcauugcuauucaga

SEQ ID NO: 452593 - RNA, 22 nt, Human
cacacagaugguaagggaggga

SEQ ID NO: 452594 - RNA, 22 nt, Human
gaguucaguaguuauagucuag

SEQ ID NO: 452595 - RNA, 22 nt, Human
gcucccagggcagcgcagaaga

SEQ ID NO: 452596 - RNA, 22 nt, Human
uuuaacuugaucaguagagcau

SEQ ID NO: 452597 - RNA, 22 nt, Human
gagcagcucugggugacccagu

SEQ ID NO: 452598 - RNA, 22 nt, Human
uagcauuuauggucaugugucc

SEQ ID NO: 452599 - RNA, 22 nt, Human
augcucuggaguacgugaaauu

SEQ ID NO: 452600 - RNA, 22 nt, Human
aaaugcacagaggccagagagg

SEQ ID NO: 452601 - RNA, 22 nt, Human
cucaggauuuaaaggggcacuc

SEQ ID NO: 452602 - RNA, 22 nt, Human
ggcagcucugugucugggaagc

SEQ ID NO: 452603 - RNA, 22 nt, Human
cuggaagugggguuggcuugaa

SEQ ID NO: 452604 - RNA, 22 nt, Human
ccugugcccucagccuggcucu

SEQ ID NO: 452605 - RNA, 22 nt, Human
gcaagcaagcagguagagcuga

SEQ ID NO: 452606 - RNA, 22 nt, Human
ucucagggaccaugaugaugac

SEQ ID NO: 452607 - RNA, 22 nt, Human
ggcuccugaaagacuaugggaa

SEQ ID NO: 452608 - RNA, 21 nt, Human
agcuggugucagagcucuggg

SEQ ID NO: 452609 - RNA, 22 nt, Human
aggggcugacuggaaagugcca

SEQ ID NO: 452610 - RNA, 22 nt, Human
ucaaguauaucuagucauuagg

SEQ ID NO: 452611 - RNA, 22 nt, Human
gcugccuccugaaagcgcucug

SEQ ID NO: 452612 - RNA, 22 nt, Human
uagggcucagaguccaguuucu

SEQ ID NO: 452613 - RNA, 22 nt, Human
gggcaugguggcaggcaccugu

SEQ ID NO: 452614 - RNA, 22 nt, Human
uacauguauugauuucucuucu

SEQ ID NO: 452615 - RNA, 22 nt, Human
aauuauauuguggugugaaugu

SEQ ID NO: 452616 - RNA, 21 nt, Human
gcagggacaaagcuucaggag

SEQ ID NO: 452617 - RNA, 22 nt, Human
gggccccuuguaucucuggcuc

SEQ ID NO: 452618 - RNA, 22 nt, Human
ugauguucuguauaucauauag

SEQ ID NO: 452619 - RNA, 22 nt, Human
caggagccgccaggcacguugg

SEQ ID NO: 452620 - RNA, 22 nt, Human
uuucaaauggagucgugaaaug

SEQ ID NO: 452621 - RNA, 22 nt, Human
ggcugagacuagagugaggcau

SEQ ID NO: 452622 - RNA, 22 nt, Human
uuucuacauucaaaaacuacca

SEQ ID NO: 452623 - RNA, 22 nt, Human
uauaaaguuucgaaagauguau

SEQ ID NO: 452624 - RNA, 22 nt, Human
ccucagggccaucucugucccu

SEQ ID NO: 452625 - RNA, 22 nt, Human
ucaccccuacauuucccuugcu

SEQ ID NO: 452626 - RNA, 17 nt, Human
agaggcagauacuugga

SEQ ID NO: 452627 - RNA, 22 nt, Human
auggcagaauuaggauuucaag

SEQ ID NO: 452628 - RNA, 22 nt, Human
aaauuugauaagccauuguuac

SEQ ID NO: 452629 - RNA, 22 nt, Human
uagcagcucugauucugggccc

SEQ ID NO: 452630 - RNA, 22 nt, Human
gccaccucggcuuucucugcuc

SEQ ID NO: 452631 - RNA, 22 nt, Human
uucaaugauuuuuagggaucau

SEQ ID NO: 452632 - RNA, 22 nt, Human
agggcuccuaugccccauggac

SEQ ID NO: 452633 - RNA, 22 nt, Human
aggcuccuaucgcuuucagcaa

SEQ ID NO: 452634 - RNA, 22 nt, Human
agaggccuaaccaagauguccu

SEQ ID NO: 452635 - RNA, 22 nt, Human
ucaaugauagacaagaucuaag

SEQ ID NO: 452636 - RNA, 22 nt, Human
agaacugguggugaucaguuau

SEQ ID NO: 452637 - RNA, 22 nt, Human
gggcaguguggucgugccuuug

SEQ ID NO: 452638 - RNA, 20 nt, Human
ugcuugucaugcacucaggc

SEQ ID NO: 452639 - RNA, 20 nt, Human
gguagcagcugcugucaucc

SEQ ID NO: 452640 - RNA, 18 nt, Human
ugagagugugugcucuug

SEQ ID NO: 452641 - RNA, 22 nt, Human
gagcuuccugaugccgaccagu

SEQ ID NO: 452642 - RNA, 22 nt, Human
gcacugaacuuuaaucauuucu

SEQ ID NO: 452643 - RNA, 22 nt, Human
gccaccaggagcccaguccaaa

SEQ ID NO: 452644 - RNA, 22 nt, Human
acuuuguauaagacaauaaaga

SEQ ID NO: 452645 - RNA, 22 nt, Human
aaguuugagagccuuuaguaua

SEQ ID NO: 452646 - RNA, 22 nt, Human
cagcaaucgggugauaugcaau

SEQ ID NO: 452647 - RNA, 22 nt, Human
ugccagggugucaggagagcua

SEQ ID NO: 452648 - RNA, 22 nt, Human
gaaucucaaggcuugugaggau

SEQ ID NO: 452649 - RNA, 22 nt, Human
uccuccagugucuggggccuug

SEQ ID NO: 452650 - RNA, 22 nt, Human
uggccugccuucgcugagcuga

SEQ ID NO: 452651 - RNA, 22 nt, Human
ugcagggauuauguagggguug

SEQ ID NO: 452652 - RNA, 22 nt, Human
ccagcuccugggucuuagucag

SEQ ID NO: 452653 - RNA, 22 nt, Human
cugagcugacaucuuccucuuu

SEQ ID NO: 452654 - RNA, 22 nt, Human
ggccaggaagggaagaucagca

SEQ ID NO: 452655 - RNA, 22 nt, Human
ucauuucucugagucugauaau

SEQ ID NO: 452656 - RNA, 22 nt, Human
ugggcugcugcggugcucuugg

SEQ ID NO: 452657 - RNA, 22 nt, Human
aacaaguaaguuuauauauauu

SEQ ID NO: 452658 - RNA, 19 nt, Human
caguggccuggaggucucu

SEQ ID NO: 452659 - RNA, 22 nt, Human
aauuagggaaaacauuugcuuu

SEQ ID NO: 452660 - RNA, 22 nt, Human
ccagcccuguaaggaugaggca

SEQ ID NO: 452661 - RNA, 22 nt, Human
aagaggcagcccgcugaggcug

SEQ ID NO: 452662 - RNA, 22 nt, Human
ccaaaggccaagcucagguaaa

SEQ ID NO: 452663 - RNA, 22 nt, Human
gugucauguagaaauugaugaa

SEQ ID NO: 452664 - RNA, 19 nt, Human
uggcauugguccagauaaa

SEQ ID NO: 452665 - RNA, 22 nt, Human
gcuuccuaaaugcacagggcag

SEQ ID NO: 452666 - RNA, 22 nt, Human
ugcccauguuucucuguauccc

SEQ ID NO: 452667 - RNA, 22 nt, Human
agcagccaggaaucugcagagc

SEQ ID NO: 452668 - RNA, 22 nt, Human
uucucacuauguauguagauug

SEQ ID NO: 452669 - RNA, 22 nt, Human
gucauugcaguggcaaaucaca

SEQ ID NO: 452670 - RNA, 22 nt, Human
ccuggcaggcuggggacagugc

SEQ ID NO: 452671 - RNA, 22 nt, Human
cuuugaaagcucccaggacuua

SEQ ID NO: 452672 - RNA, 22 nt, Human
acagccuggacuggcucucugc

SEQ ID NO: 452673 - RNA, 22 nt, Human
uugaauaguuuuggauagcaua

SEQ ID NO: 452674 - RNA, 22 nt, Human
ucaucaaagcgcuuggaguagg

SEQ ID NO: 452675 - RNA, 22 nt, Human
agggccagaguacaucagggcu

SEQ ID NO: 452676 - RNA, 22 nt, Human
uucuuucccuuccagcagcucc

SEQ ID NO: 452677 - RNA, 22 nt, Human
agggcugaaacauaauccuucu

SEQ ID NO: 452678 - RNA, 22 nt, Human
ggcacugggcaccggcugaggg

SEQ ID NO: 452679 - RNA, 22 nt, Human
gcuguggccgucagggaaaugg

SEQ ID NO: 452680 - RNA, 22 nt, Human
ggaagggccucgggcgugggac

SEQ ID NO: 452681 - RNA, 22 nt, Human
uuauuagggugguuuauguucu

SEQ ID NO: 452682 - RNA, 22 nt, Human
agcugcccuuaauaggcauuca

SEQ ID NO: 452683 - RNA, 22 nt, Human
uaucuugagagacaacacagca

SEQ ID NO: 452684 - RNA, 22 nt, Human
uccaggcaagggaggagcaugg

SEQ ID NO: 452685 - RNA, 22 nt, Human
aguuuuucugcuggucucacua

SEQ ID NO: 452686 - RNA, 22 nt, Human
cuggcagguccagcuggacuca

SEQ ID NO: 452687 - RNA, 22 nt, Human
gccuggaguucagccaaguccc

SEQ ID NO: 452688 - RNA, 22 nt, Human
uguuucuucucacacaaacuca

SEQ ID NO: 452689 - RNA, 22 nt, Human
gcugguccacucccuggaggcu

SEQ ID NO: 452690 - RNA, 22 nt, Human
ugucuccuacugccuguggauc

SEQ ID NO: 452691 - RNA, 22 nt, Human
ugaggccuuuucugucuggcua

SEQ ID NO: 452692 - RNA, 22 nt, Human
gaggcagcggcucacagagaaa

SEQ ID NO: 452693 - RNA, 22 nt, Human
uaauuauaacaguuacaucuua

SEQ ID NO: 452694 - RNA, 22 nt, Human
cacaugcaucugucauguuugg

SEQ ID NO: 452695 - RNA, 22 nt, Human
uggcaccugaacuuagaggugu

SEQ ID NO: 452696 - RNA, 22 nt, Human
guggcagggugcucaucaugca

SEQ ID NO: 452697 - RNA, 22 nt, Human
auuuuuuagaaccuggccugau

SEQ ID NO: 452698 - RNA, 22 nt, Human
aagaauguucauuaaacuguug

SEQ ID NO: 452699 - RNA, 22 nt, Human
acagagcuucccagccugagca

SEQ ID NO: 452700 - RNA, 20 nt, Human
caucagugccugacaggucc

SEQ ID NO: 452701 - RNA, 22 nt, Human
acuuguguaacacagaaagaac

SEQ ID NO: 452702 - RNA, 22 nt, Human
ggaccagagaagugagcaccug

SEQ ID NO: 452703 - RNA, 22 nt, Human
gccuggagacaaggacaaaggg

SEQ ID NO: 452704 - RNA, 21 nt, Human
aaacugaagagacaggaacuu

SEQ ID NO: 452705 - RNA, 22 nt, Human
caagagcugcaaauagcgugac

SEQ ID NO: 452706 - RNA, 22 nt, Human
agaagccaccagcugaggaaga

SEQ ID NO: 452707 - RNA, 22 nt, Human
agcauugccugccuauugcuaa

SEQ ID NO: 452708 - RNA, 22 nt, Human
agcuuuaucuucaccugggaau

SEQ ID NO: 452709 - RNA, 22 nt, Human
agcuuuaucacaauauuggcua

SEQ ID NO: 452710 - RNA, 22 nt, Human
agaggcugaaugaugucaucau

SEQ ID NO: 452711 - RNA, 22 nt, Human
acccagcaugacaccugcacau

SEQ ID NO: 452712 - RNA, 22 nt, Human
ugagccuggagucguggagggg

SEQ ID NO: 452713 - RNA, 22 nt, Human
aauuucaaugcacucaugguug

SEQ ID NO: 452714 - RNA, 23 nt, Human
uccucccaaauuucagccucauu

SEQ ID NO: 452715 - RNA, 22 nt, Human
ccagcucuggcuucuugcuggg

SEQ ID NO: 452716 - RNA, 22 nt, Human
cuguccuguagcuccaucaguc

SEQ ID NO: 452717 - RNA, 22 nt, Human
aggacccugaggucuccuguga

SEQ ID NO: 452718 - RNA, 22 nt, Human
cagcuguggagauggggugcau

SEQ ID NO: 452719 - RNA, 22 nt, Human
agggucagagaucggccaugug

SEQ ID NO: 452720 - RNA, 22 nt, Human
ucaguguagcagacuuguagcc

SEQ ID NO: 452721 - RNA, 22 nt, Human
agccaggcuacuccuugcugac

SEQ ID NO: 452722 - RNA, 22 nt, Human
cugcccugacugaccuuuugaa

SEQ ID NO: 452723 - RNA, 22 nt, Human
aaagguuugcauggaauuuacc

SEQ ID NO: 452724 - RNA, 22 nt, Human
aggcuauuuccacucuucucau

SEQ ID NO: 452725 - RNA, 22 nt, Human
uggcuggcuagugggcaggauu

SEQ ID NO: 452726 - RNA, 22 nt, Human
ucagaagccggaagugcuccuc

SEQ ID NO: 452727 - RNA, 22 nt, Human
ggcucagguuuccuucccagcu

SEQ ID NO: 452728 - RNA, 22 nt, Human
uuugcauuuauaaguuggugga

SEQ ID NO: 452729 - RNA, 22 nt, Human
ucucccacgguacaggauaaac

SEQ ID NO: 452730 - RNA, 22 nt, Human
aacuucuugguccugagcuguu

SEQ ID NO: 452731 - RNA, 22 nt, Human
ggaccugcucucccaguucucu

SEQ ID NO: 452732 - RNA, 22 nt, Human
ugaggaaguugaucucaucagu

SEQ ID NO: 452733 - RNA, 22 nt, Human
caugaauauuuaguauuuacuu

SEQ ID NO: 452734 - RNA, 22 nt, Human
aguuucauauuaccaugucacc

SEQ ID NO: 452735 - RNA, 22 nt, Human
cuccucacuuuccagacugggc

SEQ ID NO: 452736 - RNA, 22 nt, Human
gcacugcaucuacuggcaagua

SEQ ID NO: 452737 - RNA, 20 nt, Human
uggagccacagucagguucc

SEQ ID NO: 452738 - RNA, 17 nt, Human
cacaggugugguuugag

SEQ ID NO: 452739 - RNA, 22 nt, Human
guggcagcugguaugcagacag

SEQ ID NO: 452740 - RNA, 22 nt, Human
ucaguggaacugucugggugag

SEQ ID NO: 452741 - RNA, 22 nt, Human
agggcugaagggaggugcucau

SEQ ID NO: 452742 - RNA, 22 nt, Human
gagggcagaaaauuaugcggug

SEQ ID NO: 452743 - RNA, 22 nt, Human
gagccagcgccuugccucuggg

SEQ ID NO: 452744 - RNA, 22 nt, Human
cccagccuuugcuuccugguuc

SEQ ID NO: 452745 - RNA, 22 nt, Human
acaauguaggauauguacuugu

SEQ ID NO: 452746 - RNA, 22 nt, Human
aaucaguuguccaaaguucaca

SEQ ID NO: 452747 - RNA, 22 nt, Human
caguggcugugaccagggaccu

SEQ ID NO: 452748 - RNA, 22 nt, Human
ggagucccagcaaagccuuccc

SEQ ID NO: 452749 - RNA, 22 nt, Human
agggcagcucucaccucuggcc

SEQ ID NO: 452750 - RNA, 22 nt, Human
agcugccacauggugucacugu

SEQ ID NO: 452751 - RNA, 22 nt, Human
gggagaaggagcuaguucuuga

SEQ ID NO: 452752 - RNA, 19 nt, Human
uguuuuguuaaagcagucc

SEQ ID NO: 452753 - RNA, 22 nt, Human
acagagagcugugauugaguua

SEQ ID NO: 452754 - RNA, 22 nt, Human
aggcccugcccagugccacaag

SEQ ID NO: 452755 - RNA, 22 nt, Human
cagaaggcaaacaaaaggauuu

SEQ ID NO: 452756 - RNA, 22 nt, Human
auacuuacuuuucuucagacua

SEQ ID NO: 452757 - RNA, 21 nt, Human
uucaaaguuugccuaaagauu

SEQ ID NO: 452758 - RNA, 22 nt, Human
ccagaggaaaaauaucucccua

SEQ ID NO: 452759 - RNA, 22 nt, Human
agggcagcacagcugugcuccu

SEQ ID NO: 452760 - RNA, 22 nt, Human
gcagggcucauucuaguacaau

SEQ ID NO: 452761 - RNA, 22 nt, Human
ucuggcucuauaacuccuagcu

SEQ ID NO: 452762 - RNA, 22 nt, Human
ggcucugcagugacuugagggg

SEQ ID NO: 452763 - RNA, 22 nt, Human
caguguuuaaucauugugaauu

SEQ ID NO: 452764 - RNA, 22 nt, Human
aggcagguccccuggaaggcac

SEQ ID NO: 452765 - RNA, 22 nt, Human
gucagcagugucagcucugggg

SEQ ID NO: 452766 - RNA, 22 nt, Human
accaguccgcggagcuccgggg

SEQ ID NO: 452767 - RNA, 22 nt, Human
uuuccaauaaagugucauuguu

SEQ ID NO: 452768 - RNA, 22 nt, Human
agcugggucuugggccaggaga

SEQ ID NO: 452769 - RNA, 22 nt, Human
aagaaauuaaggaaugcaacga

SEQ ID NO: 452770 - RNA, 22 nt, Human
auuuguuccacacauauuuacu

SEQ ID NO: 452771 - RNA, 22 nt, Human
uggcaggagguuuucuccagga

SEQ ID NO: 452772 - RNA, 22 nt, Human
uucuuaaagaggcaaaacacag

SEQ ID NO: 452773 - RNA, 22 nt, Human
uaacagaauuugcuaaacuccg

SEQ ID NO: 452774 - RNA, 22 nt, Human
gccucugcaucaucacuccagc

SEQ ID NO: 452775 - RNA, 22 nt, Human
cacuguuuuauuccaacauagg

SEQ ID NO: 452776 - RNA, 22 nt, Human
aggcagcuggcagcacccaggg

SEQ ID NO: 452777 - RNA, 22 nt, Human
guaucacuuuugagagugagaa

SEQ ID NO: 452778 - RNA, 22 nt, Human
aauguuguuuuucugcaugucu

SEQ ID NO: 452779 - RNA, 22 nt, Human
gcucccacaaccuucuugcucc

SEQ ID NO: 452780 - RNA, 19 nt, Human
ugcagcucagggcaggggc

SEQ ID NO: 452781 - RNA, 22 nt, Human
aggccuuccucggagacaggga

SEQ ID NO: 452782 - RNA, 22 nt, Human
acagagauggcacagagaaggu

SEQ ID NO: 452783 - RNA, 18 nt, Human
gucacuguguuucugagc

SEQ ID NO: 452784 - RNA, 22 nt, Human
cagaaggcuuuguggaguagac

SEQ ID NO: 452785 - RNA, 20 nt, Human
cuaucuccuggcgugccuuc

SEQ ID NO: 452786 - RNA, 22 nt, Human
agagcuggccagggaucacucu

SEQ ID NO: 452787 - RNA, 22 nt, Human
gcuggcugggucccugagaggc

SEQ ID NO: 452788 - RNA, 22 nt, Human
caggugggccgggguuuguucu

SEQ ID NO: 452789 - RNA, 17 nt, Human
agggucaggugaaguuc

SEQ ID NO: 452790 - RNA, 22 nt, Human
ucucaggcuaccuugcacaagg

SEQ ID NO: 452791 - RNA, 22 nt, Human
gaggcucugugaugugccaggc

SEQ ID NO: 452792 - RNA, 22 nt, Human
gcacagggccuggcacauaaga

SEQ ID NO: 452793 - RNA, 17 nt, Human
uagcugccccgaaugcu

SEQ ID NO: 452794 - RNA, 19 nt, Human
acaggcagaauugggugug

SEQ ID NO: 452795 - RNA, 22 nt, Human
caggcaggugcagauuccucuu

SEQ ID NO: 452796 - RNA, 22 nt, Human
aggucacauggauaaugaucag

SEQ ID NO: 452797 - RNA, 22 nt, Human
uaggcaggugugcacugcccac

SEQ ID NO: 452798 - RNA, 21 nt, Human
gccagggaagagaguuggcug

SEQ ID NO: 452799 - RNA, 22 nt, Human
agggccagcugcagaauuagca

SEQ ID NO: 452800 - RNA, 22 nt, Human
uggagagcaagucgcagacaug

SEQ ID NO: 452801 - RNA, 22 nt, Human
cuauuagguaugcagccuauuu

SEQ ID NO: 452802 - RNA, 22 nt, Human
uggccaggggaguuccccucca

SEQ ID NO: 452803 - RNA, 22 nt, Human
gagcugccugaacaagcagcag

SEQ ID NO: 452804 - RNA, 22 nt, Human
ucccuggacagccuugccuggg

SEQ ID NO: 452805 - RNA, 22 nt, Human
gaaggccucacucugcagcaua

SEQ ID NO: 452806 - RNA, 22 nt, Human
gaggaagcugcguggcauuuca

SEQ ID NO: 452807 - RNA, 22 nt, Human
uguauguaaaguuuguaauaga

SEQ ID NO: 452808 - RNA, 22 nt, Human
ccuggauucaagucuuucuuuc

SEQ ID NO: 452809 - RNA, 22 nt, Human
cuggagcagcagguggccaggg

SEQ ID NO: 452810 - RNA, 22 nt, Human
ccagcuccccucagcagguaau

SEQ ID NO: 452811 - RNA, 22 nt, Human
agcucuccacacauaggacuag

SEQ ID NO: 452812 - RNA, 22 nt, Human
ccaggcugcuguugguguccgc

SEQ ID NO: 452813 - RNA, 22 nt, Human
ugaguccaucgcagggaagugg

SEQ ID NO: 452814 - RNA, 22 nt, Human
uugcagagcaguaggaauauag

SEQ ID NO: 452815 - RNA, 22 nt, Human
aggcaguuguagagagggcucu

SEQ ID NO: 452816 - RNA, 22 nt, Human
agccucucuuuauucccagcua

SEQ ID NO: 452817 - RNA, 22 nt, Human
gcaggcugggguagccccacuu

SEQ ID NO: 452818 - RNA, 22 nt, Human
uuugcaaauaccaugaaacuug

SEQ ID NO: 452819 - RNA, 22 nt, Human
gccucugggcucugccccuggc

SEQ ID NO: 452820 - RNA, 22 nt, Human
cuagaaauacaggcacgugcca

SEQ ID NO: 452821 - RNA, 22 nt, Human
cagcagcugggaaggaggcuga

SEQ ID NO: 452822 - RNA, 22 nt, Human
agagcugauuugauuacagugc

SEQ ID NO: 452823 - RNA, 22 nt, Human
ugucaugcccaggagcaaggua

SEQ ID NO: 452824 - RNA, 22 nt, Human
uagagcugauaaugaggccaag

SEQ ID NO: 452825 - RNA, 22 nt, Human
caagaugaucccugaaggcagc

SEQ ID NO: 452826 - RNA, 22 nt, Human
uaugaagacaaugauagcauga

SEQ ID NO: 452827 - RNA, 22 nt, Human
gcugccuguggcccuucugggu

SEQ ID NO: 452828 - RNA, 22 nt, Human
ccaucagcuccaguaucuucug

SEQ ID NO: 452829 - RNA, 22 nt, Human
cccaggaggucgaagcugcagu

SEQ ID NO: 452830 - RNA, 22 nt, Human
cccagaaggucgaggcugcagu

SEQ ID NO: 452831 - RNA, 22 nt, Human
aaggcagccucugccagccggg

SEQ ID NO: 452832 - RNA, 22 nt, Human
uguuugcucugacuaucuugcg

SEQ ID NO: 452833 - RNA, 18 nt, Human
aggcccuggccucgaaca

SEQ ID NO: 452834 - RNA, 22 nt, Human
gaaagagaaccugggccuagau

SEQ ID NO: 452835 - RNA, 23 nt, Human
cugcuguguuggucucgauggga

SEQ ID NO: 452836 - RNA, 22 nt, Human
ucucugagcgcauuccuccggc

SEQ ID NO: 452837 - RNA, 22 nt, Human
cugaaggacuuggugauaguug

SEQ ID NO: 452838 - RNA, 22 nt, Human
aagggcaggaaaagauggaugu

SEQ ID NO: 452839 - RNA, 22 nt, Human
cagagacuggagugcaguggcg

SEQ ID NO: 452840 - RNA, 22 nt, Human
uuuuauucucaagacaauggga

SEQ ID NO: 452841 - RNA, 21 nt, Human
agcagccauggaugguaugua

SEQ ID NO: 452842 - RNA, 22 nt, Human
gggaaggagguggcuugaagug

SEQ ID NO: 452843 - RNA, 22 nt, Human
augaccccuaaaauuuacuguc

SEQ ID NO: 452844 - RNA, 22 nt, Human
cagcugagaaauggggaaaggg

SEQ ID NO: 452845 - RNA, 22 nt, Human
gcaggcagucaucuuucauauu

SEQ ID NO: 452846 - RNA, 22 nt, Human
gagcucccaggccccagcaagg

SEQ ID NO: 452847 - RNA, 22 nt, Human
gcaguaaaaaaggauaugugca

SEQ ID NO: 452848 - RNA, 22 nt, Human
agcuuuaugcuuccuacaagcu

SEQ ID NO: 452849 - RNA, 22 nt, Human
cugccuggaccggcagcccucc

SEQ ID NO: 452850 - RNA, 22 nt, Human
cccuggaggagcuuagagcuug

SEQ ID NO: 452851 - RNA, 22 nt, Human
agggagacacaugaggaaguca

SEQ ID NO: 452852 - RNA, 22 nt, Human
caggggcucugagauugucuaa

SEQ ID NO: 452853 - RNA, 22 nt, Human
ugagcauggugggugcagagca

SEQ ID NO: 452854 - RNA, 22 nt, Human
gggucaggcucagcagggcagc

SEQ ID NO: 452855 - RNA, 22 nt, Human
gccuggagaagauggaacuagc

SEQ ID NO: 452856 - RNA, 22 nt, Human
aagaggucauaccagauaaggg

SEQ ID NO: 452857 - RNA, 23 nt, Human
uuucuguuggguauauauccaag

SEQ ID NO: 452858 - RNA, 19 nt, Human
agcaaauauaauaguguuc

SEQ ID NO: 452859 - RNA, 22 nt, Human
aagauuauggcagauaacaauu

SEQ ID NO: 452860 - RNA, 22 nt, Human
agcagggcagugcuucagcucu

SEQ ID NO: 452861 - RNA, 22 nt, Human
ccuugcaggggaacaggcagug

SEQ ID NO: 452862 - RNA, 22 nt, Human
aaaguuuccugcuaagugcuau

SEQ ID NO: 452863 - RNA, 22 nt, Human
agccaagcaccacuggcacucg

SEQ ID NO: 452864 - RNA, 22 nt, Human
ggucccaggaaucuguguucua

SEQ ID NO: 452865 - RNA, 22 nt, Human
gagggcagagucuaaugaugca

SEQ ID NO: 452866 - RNA, 21 nt, Human
gccaccccuggcacaggugcu

SEQ ID NO: 452867 - RNA, 22 nt, Human
cagguggcaugacugccuacaa

SEQ ID NO: 452868 - RNA, 22 nt, Human
ucucccaggugggugccuggag

SEQ ID NO: 452869 - RNA, 22 nt, Human
aguguggcugcguagggcucuc

SEQ ID NO: 452870 - RNA, 22 nt, Human
acaggcagguaauuuacauauu

SEQ ID NO: 452871 - RNA, 22 nt, Human
ggucccaguugcccaggucagg

SEQ ID NO: 452872 - RNA, 22 nt, Human
ugauuuccacgugcacccaggu

SEQ ID NO: 452873 - RNA, 22 nt, Human
caguagcacucugucagugaag

SEQ ID NO: 452874 - RNA, 19 nt, Human
gagguggguccccgcagcc

SEQ ID NO: 452875 - RNA, 22 nt, Human
ugggagaugguucugagacuuu

SEQ ID NO: 452876 - RNA, 22 nt, Human
cccagcccugaccuauuggaaa

SEQ ID NO: 452877 - RNA, 22 nt, Human
cuccuugguguaguacugagca

SEQ ID NO: 452878 - RNA, 19 nt, Human
gccugagccagccaugcaa

SEQ ID NO: 452879 - RNA, 17 nt, Human
cccagcuggcagugccg

SEQ ID NO: 452880 - RNA, 19 nt, Human
ccucugccagcccgccucu

SEQ ID NO: 452881 - RNA, 19 nt, Human
gucacauuugucucccagg

SEQ ID NO: 452882 - RNA, 22 nt, Human
uggcacugggacagaugcucuc

SEQ ID NO: 452883 - RNA, 22 nt, Human
ugaugguugauuauaaaucagu

SEQ ID NO: 452884 - RNA, 19 nt, Human
ccuuggaguuccaggugga

SEQ ID NO: 452885 - RNA, 22 nt, Human
agaccacagucaggcuccuggu

SEQ ID NO: 452886 - RNA, 22 nt, Human
uguuuguucccucucuuuccug

SEQ ID NO: 452887 - RNA, 20 nt, Human
uguuaaaggacacuugcuuu

SEQ ID NO: 452888 - RNA, 22 nt, Human
agagacagaggcaauauagcuu

SEQ ID NO: 452889 - RNA, 22 nt, Human
auucuucugccuacuuucaucc

SEQ ID NO: 452890 - RNA, 22 nt, Human
cuacauaaucuggauuugucug

SEQ ID NO: 452891 - RNA, 22 nt, Human
cacugugucaguuugguuagac

SEQ ID NO: 452892 - RNA, 22 nt, Human
gcugcucugaaaaugacuguug

SEQ ID NO: 452893 - RNA, 22 nt, Human
aaucgguugaacccaggaagug

SEQ ID NO: 452894 - RNA, 22 nt, Human
gcagagcccuggggguauggug

SEQ ID NO: 452895 - RNA, 21 nt, Human
ggcuccugcuuugugaggggc

SEQ ID NO: 452896 - RNA, 22 nt, Human
uugcauugaucccagcuugggc

SEQ ID NO: 452897 - RNA, 22 nt, Human
ccugucugaaggcagggggaug

SEQ ID NO: 452898 - RNA, 22 nt, Human
augggcaguuaggaggccagga

SEQ ID NO: 452899 - RNA, 22 nt, Human
uauuccuauuucuaaacauaug

SEQ ID NO: 452900 - RNA, 22 nt, Human
cauucauuuacuuucaacagcu

SEQ ID NO: 452901 - RNA, 22 nt, Human
cagagugagggccugcaccugc

SEQ ID NO: 452902 - RNA, 22 nt, Human
cagagccaaaugcugugguuau

SEQ ID NO: 452903 - RNA, 22 nt, Human
accugccucuaagcagcaggug

SEQ ID NO: 452904 - RNA, 22 nt, Human
acaguggaagaagcacugaacu

SEQ ID NO: 452905 - RNA, 22 nt, Human
cauuauguucaguagcuuaaaa

SEQ ID NO: 452906 - RNA, 22 nt, Human
cauccacuagaaugacagaguu

SEQ ID NO: 452907 - RNA, 22 nt, Human
augucacagcucccauuccucc

SEQ ID NO: 452908 - RNA, 22 nt, Human
agggcacaucugcugggaaugg

SEQ ID NO: 452909 - RNA, 22 nt, Human
cagaguguuucuuugggugggu

SEQ ID NO: 452910 - RNA, 22 nt, Human
gcagcugggccccagccucucc

SEQ ID NO: 452911 - RNA, 17 nt, Human
ccugggaggaguuauga

SEQ ID NO: 452912 - RNA, 22 nt, Human
cugaugcuauaagccacagugg

SEQ ID NO: 452913 - RNA, 20 nt, Human
cagcuuggaugagaggcuga

SEQ ID NO: 452914 - RNA, 22 nt, Human
ugcccugcagugagugcgucug

SEQ ID NO: 452915 - RNA, 22 nt, Human
aucagagaccggucaagucaug

SEQ ID NO: 452916 - RNA, 22 nt, Human
cccuguccuggaugggagcacu

SEQ ID NO: 452917 - RNA, 22 nt, Human
agcugcuguggggcucggccug

SEQ ID NO: 452918 - RNA, 22 nt, Human
guacuuccguggacuaauuguu

SEQ ID NO: 452919 - RNA, 22 nt, Human
gauuucaaagguucugcaugcc

SEQ ID NO: 452920 - RNA, 20 nt, Human
augccucuaauuuugcaaac

SEQ ID NO: 452921 - RNA, 22 nt, Human
uugaagcauuugcuauagcauu

SEQ ID NO: 452922 - RNA, 22 nt, Human
uagggcagaguccaggaugggc

SEQ ID NO: 452923 - RNA, 22 nt, Human
ucaaaauuucagcacuagcccu

SEQ ID NO: 452924 - RNA, 20 nt, Human
gcaggcagggaaugggggug

SEQ ID NO: 452925 - RNA, 22 nt, Human
acugaaggaaacuuuuguguuu

SEQ ID NO: 452926 - RNA, 22 nt, Human
ugaaggagcugauguaaggggu

SEQ ID NO: 452927 - RNA, 22 nt, Human
cugcccugggaguaccuguccu

SEQ ID NO: 452928 - RNA, 22 nt, Human
gacaagacugguuuauuuaagg

SEQ ID NO: 452929 - RNA, 22 nt, Human
gaggcagaggaagguggucucu

SEQ ID NO: 452930 - RNA, 19 nt, Human
cugaggcccauguaccaug

SEQ ID NO: 452931 - RNA, 22 nt, Human
ugucuguacaaauuuucugugu

SEQ ID NO: 452932 - RNA, 22 nt, Human
cagggagaucuuggcuccuggu

SEQ ID NO: 452933 - RNA, 22 nt, Human
gggaaggagccugcuugcuaga

SEQ ID NO: 452934 - RNA, 22 nt, Human
aacaggcaacaguugacucuga

SEQ ID NO: 452935 - RNA, 22 nt, Human
ggagcuguugcgcaugcgcucg

SEQ ID NO: 452936 - RNA, 22 nt, Human
acaaugcaccagcaucuucacc

SEQ ID NO: 452937 - RNA, 22 nt, Human
acagcagccugcagcccugugu

SEQ ID NO: 452938 - RNA, 22 nt, Human
acaggcagcgucauugcugcuc

SEQ ID NO: 452939 - RNA, 22 nt, Human
ggcaggagcucuccaguuugcc

SEQ ID NO: 452940 - RNA, 22 nt, Human
cagauuuaccuaacuccaaguu

SEQ ID NO: 452941 - RNA, 22 nt, Human
caagauggguguugugaugguu

SEQ ID NO: 452942 - RNA, 22 nt, Human
accaaagggcagaacaugagca

SEQ ID NO: 452943 - RNA, 22 nt, Human
uuucacaucagagguagauuag

SEQ ID NO: 452944 - RNA, 22 nt, Human
cugcccucuagaggaggacuga

SEQ ID NO: 452945 - RNA, 22 nt, Human
caguuucucucaauaagcaucg

SEQ ID NO: 452946 - RNA, 22 nt, Human
acagagccacuuuggugccuac

SEQ ID NO: 452947 - RNA, 22 nt, Human
ucagggcauggcugcacuuggc

SEQ ID NO: 452948 - RNA, 22 nt, Human
cugagaggaugcugcaguggag

SEQ ID NO: 452949 - RNA, 22 nt, Human
ggcagcugauuagcaucaagga

SEQ ID NO: 452950 - RNA, 22 nt, Human
uugcauugggagugaggagacc

SEQ ID NO: 452951 - RNA, 22 nt, Human
gggcuggagccagcuguggcug

SEQ ID NO: 452952 - RNA, 22 nt, Human
uguuccaucaguuuuugguuga

SEQ ID NO: 452953 - RNA, 22 nt, Human
ucagagaguuacacaaauuguu

SEQ ID NO: 452954 - RNA, 22 nt, Human
cagacccucgggugaguuggcc

SEQ ID NO: 452955 - RNA, 22 nt, Human
uggcagagcuggcugcggauga

SEQ ID NO: 452956 - RNA, 22 nt, Human
gcagcagagcuuuguccuggcu

SEQ ID NO: 452957 - RNA, 22 nt, Human
uagcuuuaauaagcugcugaau

SEQ ID NO: 452958 - RNA, 22 nt, Human
cccugccuugggguccacaccg

SEQ ID NO: 452959 - RNA, 22 nt, Human
agggcagagagaugaaugggau

SEQ ID NO: 452960 - RNA, 20 nt, Human
agugggagagggcagacugc

SEQ ID NO: 452961 - RNA, 19 nt, Human
cucuccagcuccaguagcu

SEQ ID NO: 452962 - RNA, 22 nt, Human
gcaaggcugcugccacccaucu

SEQ ID NO: 452963 - RNA, 20 nt, Human
cucugcagcaaggccugggu

SEQ ID NO: 452964 - RNA, 22 nt, Human
guguuccauguuugagguaguu

SEQ ID NO: 452965 - RNA, 22 nt, Human
gagaagcaaucgugacaucucc

SEQ ID NO: 452966 - RNA, 22 nt, Human
cuguucaugcugauucuguaug

SEQ ID NO: 452967 - RNA, 22 nt, Human
agcugccaucagccuuuggaug

SEQ ID NO: 452968 - RNA, 22 nt, Human
ccagggucuuggagaggagugc

SEQ ID NO: 452969 - RNA, 22 nt, Human
guggccugccgugugguauggg

SEQ ID NO: 452970 - RNA, 22 nt, Human
uccugagauucugcauuucuaa

SEQ ID NO: 452971 - RNA, 22 nt, Human
gccugagagucugcauuucuaa

SEQ ID NO: 452972 - RNA, 22 nt, Human
ugcaagcacucaaugcaaacag

SEQ ID NO: 452973 - RNA, 22 nt, Human
accaugccaguggcagccagac

SEQ ID NO: 452974 - RNA, 22 nt, Human
ucagcuuggacagcuugguuga

SEQ ID NO: 452975 - RNA, 22 nt, Human
gcaggguauaauacuuagguga

SEQ ID NO: 452976 - RNA, 22 nt, Human
aggcaguggagcuggaauaggc

SEQ ID NO: 452977 - RNA, 20 nt, Human
uggagccaaggugugucugg

SEQ ID NO: 452978 - RNA, 22 nt, Human
ucagggacugcagagggaagcu

SEQ ID NO: 452979 - RNA, 17 nt, Human
ugagcaguagaagaugc

SEQ ID NO: 452980 - RNA, 22 nt, Human
uucagugugugauaccugcugu

SEQ ID NO: 452981 - RNA, 22 nt, Human
ucagggcauucaagaggccugg

SEQ ID NO: 452982 - RNA, 21 nt, Human
gcagccagacgggauucaguu

SEQ ID NO: 452983 - RNA, 22 nt, Human
uucuaguucccacauaguugcc

SEQ ID NO: 452984 - RNA, 21 nt, Human
auccauccaucuuggccuaac

SEQ ID NO: 452985 - RNA, 22 nt, Human
uugauagguuuuauguauaguu

SEQ ID NO: 452986 - RNA, 21 nt, Human
uccuuccuugagguccuuucc

SEQ ID NO: 452987 - RNA, 22 nt, Human
agaaaugggccuugggacacaa

SEQ ID NO: 452988 - RNA, 22 nt, Human
ccuuccaggugcaggcaagccu

SEQ ID NO: 452989 - RNA, 22 nt, Human
caguggucugugcuucuguaca

SEQ ID NO: 452990 - RNA, 22 nt, Human
ggguaauuggggccuugcagug

SEQ ID NO: 452991 - RNA, 22 nt, Human
ugcuucaggagaugucaccaug

SEQ ID NO: 452992 - RNA, 22 nt, Human
caaugugucaggaaaagggcca

SEQ ID NO: 452993 - RNA, 22 nt, Human
uauuucugauugcucaugaggc

SEQ ID NO: 452994 - RNA, 20 nt, Human
cugccaugauugauagagug

SEQ ID NO: 452995 - RNA, 22 nt, Human
cuauugaaaguguacaauucaa

SEQ ID NO: 452996 - RNA, 22 nt, Human
aaaugcauguagaauaauagag

SEQ ID NO: 452997 - RNA, 22 nt, Human
uuagauaacaguagaauaucaa

SEQ ID NO: 452998 - RNA, 22 nt, Human
gcaggcaggcuuccuugaacug

SEQ ID NO: 452999 - RNA, 22 nt, Human
uggaggaaguggcuggccagaa

SEQ ID NO: 453000 - RNA, 22 nt, Human
cugacccauauaagaguggagg

SEQ ID NO: 453001 - RNA, 22 nt, Human
agcagagcccuuccauggccuu

SEQ ID NO: 453002 - RNA, 22 nt, Human
ugugcucuggaguugccuucac

SEQ ID NO: 453003 - RNA, 23 nt, Human
uuuuccagaaucgacucuguaga

SEQ ID NO: 453004 - RNA, 22 nt, Human
agguauagaauugaaaggguuu

SEQ ID NO: 453005 - RNA, 22 nt, Human
gcagagaguugggcugcgccag

SEQ ID NO: 453006 - RNA, 20 nt, Human
ggaccagguggggcgguggc

SEQ ID NO: 453007 - RNA, 20 nt, Human
aggcacuggauuucuuauau

SEQ ID NO: 453008 - RNA, 22 nt, Human
ugccaggcgugguggugcgcac

SEQ ID NO: 453009 - RNA, 21 nt, Human
ucagaguguguuacagcaagc

SEQ ID NO: 453010 - RNA, 22 nt, Human
ggcugcagauagccagccacca

SEQ ID NO: 453011 - RNA, 22 nt, Human
ucuggcucugaauucacuucug

SEQ ID NO: 453012 - RNA, 22 nt, Human
gucagagagggcacgugcacac

SEQ ID NO: 453013 - RNA, 19 nt, Human
ucucuggggacacuuucac

SEQ ID NO: 453014 - RNA, 22 nt, Human
cagagcaguccuugucaaucag

SEQ ID NO: 453015 - RNA, 22 nt, Human
aggauccuguauggagaagcug

SEQ ID NO: 453016 - RNA, 22 nt, Human
agaagcuugaaggagcagugac

SEQ ID NO: 453017 - RNA, 22 nt, Human
ccugggagggcaagugcugaug

SEQ ID NO: 453018 - RNA, 22 nt, Human
agcagggccuggcacuccuggg

SEQ ID NO: 453019 - RNA, 22 nt, Human
ucaaauaugugauagaagcuaa

SEQ ID NO: 453020 - RNA, 22 nt, Human
gagagggccgggggccagcucc

SEQ ID NO: 453021 - RNA, 22 nt, Human
uguugagacugagggagucagc

SEQ ID NO: 453022 - RNA, 22 nt, Human
uucaggaugcagagguuguagu

SEQ ID NO: 453023 - RNA, 22 nt, Human
ugucuuuauauauuuggaaaau

SEQ ID NO: 453024 - RNA, 22 nt, Human
agaaagcacucugucuuuuacc

SEQ ID NO: 453025 - RNA, 22 nt, Human
cagaguggcgacccccucagcu

SEQ ID NO: 453026 - RNA, 22 nt, Human
uaaaugugcacuuuacuuuuca

SEQ ID NO: 453027 - RNA, 20 nt, Human
auguagaugaaagcaaaggc

SEQ ID NO: 453028 - RNA, 19 nt, Human
aggagaagacucucucccc

SEQ ID NO: 453029 - RNA, 22 nt, Human
ugcauauuuguaugauguuuag

SEQ ID NO: 453030 - RNA, 22 nt, Human
uacuguauuugauaagugaagu

SEQ ID NO: 453031 - RNA, 22 nt, Human
ggagcagccgcgucucagggca

SEQ ID NO: 453032 - RNA, 22 nt, Human
cugaggcaguuuaauuuuugaa

SEQ ID NO: 453033 - RNA, 22 nt, Human
ucaugacaacuauauuauucca

SEQ ID NO: 453034 - RNA, 22 nt, Human
gccaccagggggugcaaggucc

SEQ ID NO: 453035 - RNA, 22 nt, Human
cagggacaugacuggucucugu

SEQ ID NO: 453036 - RNA, 22 nt, Human
uuucacaaguaaaguccuaagu

SEQ ID NO: 453037 - RNA, 22 nt, Human
uuaucacuuaugagcuuuuugc

SEQ ID NO: 453038 - RNA, 22 nt, Human
uuccucucucuugccagaaugu

SEQ ID NO: 453039 - RNA, 22 nt, Human
aacauuucagcaaauaagaaca

SEQ ID NO: 453040 - RNA, 22 nt, Human
gggcugccuuucuucugggagc

SEQ ID NO: 453041 - RNA, 22 nt, Human
cucagaguccauaguuuacagu

SEQ ID NO: 453042 - RNA, 22 nt, Human
aagaacauuuuguagaaugaca

SEQ ID NO: 453043 - RNA, 22 nt, Human
gggcugggauggcuugaagauu

SEQ ID NO: 453044 - RNA, 22 nt, Human
uuuugauaucaugaugaacaga

SEQ ID NO: 453045 - RNA, 22 nt, Human
gucacaggccuggaugaggggc

SEQ ID NO: 453046 - RNA, 22 nt, Human
uacauggugguggcacuugacu

SEQ ID NO: 453047 - RNA, 22 nt, Human
aguguacauguuuacagcaucu

SEQ ID NO: 453048 - RNA, 22 nt, Human
gagccuggauugucaccgacuu

SEQ ID NO: 453049 - RNA, 22 nt, Human
ucuggcuccacuuucuucauuu

SEQ ID NO: 453050 - RNA, 22 nt, Human
ucugcuguaaagaauuucugcc

SEQ ID NO: 453051 - RNA, 22 nt, Human
gcagcuuuaaucugaauaagua

SEQ ID NO: 453052 - RNA, 22 nt, Human
gggugggccugucuggccaugu

SEQ ID NO: 453053 - RNA, 22 nt, Human
acaagagacaagagguucuucu

SEQ ID NO: 453054 - RNA, 22 nt, Human
uguccuuuucuuuagugcagcu

SEQ ID NO: 453055 - RNA, 22 nt, Human
cccuggaggcggauguugcagu

SEQ ID NO: 453056 - RNA, 22 nt, Human
aaaucuaggcucauccuggucc

SEQ ID NO: 453057 - RNA, 22 nt, Human
ugccaggcccagcuccagagcu

SEQ ID NO: 453058 - RNA, 22 nt, Human
cugaagccacgauagcuuccua

SEQ ID NO: 453059 - RNA, 22 nt, Human
agugggcagugcgcucggaugc

SEQ ID NO: 453060 - RNA, 22 nt, Human
uauuucugggaguucagaaauu

SEQ ID NO: 453061 - RNA, 22 nt, Human
gcagaggccaucaacuuugcca

SEQ ID NO: 453062 - RNA, 22 nt, Human
acaaaauuaccuaguuauuuuc

SEQ ID NO: 453063 - RNA, 22 nt, Human
agaggaggcagcuuaacucagu

SEQ ID NO: 453064 - RNA, 22 nt, Human
acaaaguccugguguauggcca

SEQ ID NO: 453065 - RNA, 20 nt, Human
uucauucauuccacaacuuc

SEQ ID NO: 453066 - RNA, 22 nt, Human
uggcucagugcauucacaguaa

SEQ ID NO: 453067 - RNA, 22 nt, Human
uucucauucugacucaguguag

SEQ ID NO: 453068 - RNA, 22 nt, Human
ucacugcugcugccaugaugga

SEQ ID NO: 453069 - RNA, 22 nt, Human
aguggggaagagcaugggcccu

SEQ ID NO: 453070 - RNA, 22 nt, Human
ugccagaagugcuuuauaagug

SEQ ID NO: 453071 - RNA, 22 nt, Human
ugaggcucaagaauagacagua

SEQ ID NO: 453072 - RNA, 21 nt, Human
ugaaugaggaggauggcauuu

SEQ ID NO: 453073 - RNA, 22 nt, Human
ugcuccauucucuagccagugc

SEQ ID NO: 453074 - RNA, 22 nt, Human
cauugcucaggcccagcaggaa

SEQ ID NO: 453075 - RNA, 22 nt, Human
ugugcagcucuagagccaagcc

SEQ ID NO: 453076 - RNA, 22 nt, Human
aaacagacugaagaguugaagc

SEQ ID NO: 453077 - RNA, 22 nt, Human
ucaggcagcuccaggaauggua

SEQ ID NO: 453078 - RNA, 22 nt, Human
cauugcacugcagcccgggcaa

SEQ ID NO: 453079 - RNA, 22 nt, Human
gcaggcuccaggccggccccuu

SEQ ID NO: 453080 - RNA, 22 nt, Human
agggaagaaaauccaucgcugc

SEQ ID NO: 453081 - RNA, 22 nt, Human
ugagcuuccucccugcauccau

SEQ ID NO: 453082 - RNA, 22 nt, Human
ccucccaccauuuagagagagc

SEQ ID NO: 453083 - RNA, 22 nt, Human
gcauuuagcuuuaaaauauuuc

SEQ ID NO: 453084 - RNA, 22 nt, Human
agcauuuaugacuaauguaaaa

SEQ ID NO: 453085 - RNA, 22 nt, Human
ggcucugcgcgguaaagugacu

SEQ ID NO: 453086 - RNA, 17 nt, Human
agggacagcaguuuagg

SEQ ID NO: 453087 - RNA, 22 nt, Human
acaucucaugaaugauaaauca

SEQ ID NO: 453088 - RNA, 22 nt, Human
gcagggugaaggucacauagaa

SEQ ID NO: 453089 - RNA, 22 nt, Human
auaauuuacaacugcuuuuaau

SEQ ID NO: 453090 - RNA, 22 nt, Human
gcaggugaaugauggacuagga

SEQ ID NO: 453091 - RNA, 23 nt, Human
ccaggcaguagcuauugaaguga

SEQ ID NO: 453092 - RNA, 22 nt, Human
acucaggaaauugagauaaugg

SEQ ID NO: 453093 - RNA, 18 nt, Human
uauauuucacacauauuc

SEQ ID NO: 453094 - RNA, 22 nt, Human
acuguccauucacucauauuca

SEQ ID NO: 453095 - RNA, 22 nt, Human
guggggaaaggaguggggcuca

SEQ ID NO: 453096 - RNA, 22 nt, Human
ucugagaggauuccugucccga

SEQ ID NO: 453097 - RNA, 22 nt, Human
ggcaggcaggagcgugcuuggg

SEQ ID NO: 453098 - RNA, 22 nt, Human
uaaaguucagugcaugaaugug

SEQ ID NO: 453099 - RNA, 22 nt, Human
aucuacagcugucugcacagua

SEQ ID NO: 453100 - RNA, 22 nt, Human
agagugaaguuuuugaaaguga

SEQ ID NO: 453101 - RNA, 22 nt, Human
uaguuucauaugcaaaauagua

SEQ ID NO: 453102 - RNA, 22 nt, Human
uccuggagauaauugcagugaa

SEQ ID NO: 453103 - RNA, 22 nt, Human
ggcccugggaugcucagcagug

SEQ ID NO: 453104 - RNA, 22 nt, Human
cauucauuagaauagauaugua

SEQ ID NO: 453105 - RNA, 22 nt, Human
aggcugcuggcaggcguggacg

SEQ ID NO: 453106 - RNA, 22 nt, Human
uggcccugacagguccugggca

SEQ ID NO: 453107 - RNA, 22 nt, Human
uguaggccuauguccagcaauu

SEQ ID NO: 453108 - RNA, 22 nt, Human
aucuagaaaguguugaagauca

SEQ ID NO: 453109 - RNA, 22 nt, Human
uccaggcagucauuaaucucua

SEQ ID NO: 453110 - RNA, 22 nt, Human
guucaaggaagggaggaaagcc

SEQ ID NO: 453111 - RNA, 22 nt, Human
uccuucaggccucauucucaua

SEQ ID NO: 453112 - RNA, 22 nt, Human
cugggaggacaacuuggagcuc

SEQ ID NO: 453113 - RNA, 22 nt, Human
caagagcucccagaccugggca

SEQ ID NO: 453114 - RNA, 23 nt, Human
ccagcugugccuggcccaggagc

SEQ ID NO: 453115 - RNA, 23 nt, Human
ugcauuauccucucugaagacca

SEQ ID NO: 453116 - RNA, 22 nt, Human
agggggcccuugcaggugagcg

SEQ ID NO: 453117 - RNA, 22 nt, Human
cagugaggaguccagggcagag

SEQ ID NO: 453118 - RNA, 22 nt, Human
aaguucaauggaaaagcuuuag

SEQ ID NO: 453119 - RNA, 22 nt, Human
ggcucccugccuguccucaguc

SEQ ID NO: 453120 - RNA, 22 nt, Human
acacaugagaaacaucaguugu

SEQ ID NO: 453121 - RNA, 22 nt, Human
uggagccaggagccugggaguc

SEQ ID NO: 453122 - RNA, 22 nt, Human
gaggcaguuugccaugccagga

SEQ ID NO: 453123 - RNA, 21 nt, Human
gcugucucuggcuccugggaa

SEQ ID NO: 453124 - RNA, 22 nt, Human
auguacaguuucuagacucaaa

SEQ ID NO: 453125 - RNA, 22 nt, Human
gcuguggcuugcagcuggggcu

SEQ ID NO: 453126 - RNA, 22 nt, Human
ggaggccaguccuggccgggcu

SEQ ID NO: 453127 - RNA, 22 nt, Human
gcaaaugaguuguaacauaaaa

SEQ ID NO: 453128 - RNA, 22 nt, Human
gcagccacacuguuacagaaug

SEQ ID NO: 453129 - RNA, 22 nt, Human
ugauuuccaauaaggagaaugu

SEQ ID NO: 453130 - RNA, 20 nt, Human
ucugcucagcccucaguggc

SEQ ID NO: 453131 - RNA, 22 nt, Human
cuuccucacggugcaacaggaa

SEQ ID NO: 453132 - RNA, 22 nt, Human
ugcagggcaguuuguuucggca

SEQ ID NO: 453133 - RNA, 22 nt, Human
ucuuccugaaacccuguuccag

SEQ ID NO: 453134 - RNA, 22 nt, Human
agaugguuuugucuuuaugauu

SEQ ID NO: 453135 - RNA, 18 nt, Human
ggccugaggauuucagca

SEQ ID NO: 453136 - RNA, 22 nt, Human
auccaguuuaugucauauucuu

SEQ ID NO: 453137 - RNA, 20 nt, Human
ucagaugggagugagccauc

SEQ ID NO: 453138 - RNA, 22 nt, Human
cccaguggagauaggagugugg

SEQ ID NO: 453139 - RNA, 22 nt, Human
aaguuauuuccucgugacugaa

SEQ ID NO: 453140 - RNA, 22 nt, Human
gucucuuuuauggugaguugau

SEQ ID NO: 453141 - RNA, 22 nt, Human
ggcccucccugagccagguggg

SEQ ID NO: 453142 - RNA, 22 nt, Human
agagcccugaagcagagcuaaa

SEQ ID NO: 453143 - RNA, 22 nt, Human
cagccaggccuggugaccaaag

SEQ ID NO: 453144 - RNA, 22 nt, Human
ugaguccauguggaggggaggu

SEQ ID NO: 453145 - RNA, 22 nt, Human
agggcugcaggcaagauauggc

SEQ ID NO: 453146 - RNA, 21 nt, Human
uagagaaaagaagcuguuccu

SEQ ID NO: 453147 - RNA, 22 nt, Human
agaccaagugcaggugccacua

SEQ ID NO: 453148 - RNA, 22 nt, Human
ucaaacuagccugacugguauu

SEQ ID NO: 453149 - RNA, 22 nt, Human
guuuuacacaccuaugaaagac

SEQ ID NO: 453150 - RNA, 22 nt, Human
caucagcagucacaugaugcug

SEQ ID NO: 453151 - RNA, 22 nt, Human
ucuguccuguuuccuccugaca

SEQ ID NO: 453152 - RNA, 22 nt, Human
cauugcaccacauugcaucccu

SEQ ID NO: 453153 - RNA, 22 nt, Human
caggccugaguguggaagucuu

SEQ ID NO: 453154 - RNA, 23 nt, Human
gggcagguuuuuauaggcuucag

SEQ ID NO: 453155 - RNA, 20 nt, Human
cacaggcuauaugagagcca

SEQ ID NO: 453156 - RNA, 22 nt, Human
uugaaaguagcagcugcauaug

SEQ ID NO: 453157 - RNA, 22 nt, Human
agccuggcuguaaccucauggu

SEQ ID NO: 453158 - RNA, 22 nt, Human
uccaggcaguuuuccagguugu

SEQ ID NO: 453159 - RNA, 22 nt, Human
ucagcuuuuuacaugugaaaua

SEQ ID NO: 453160 - RNA, 22 nt, Human
uuugcuauaaaagggucacacg

SEQ ID NO: 453161 - RNA, 22 nt, Human
cucacugacgaggaagcugaga

SEQ ID NO: 453162 - RNA, 22 nt, Human
ugaaacaaaaguauguagcuug

SEQ ID NO: 453163 - RNA, 22 nt, Human
auuguacagaugagguaaguga

SEQ ID NO: 453164 - RNA, 22 nt, Human
ucuggcuccacaccucacugca

SEQ ID NO: 453165 - RNA, 22 nt, Human
cagaaacuauguaagaaaguga

SEQ ID NO: 453166 - RNA, 22 nt, Human
uugaaagugccaaguccuagug

SEQ ID NO: 453167 - RNA, 22 nt, Human
ugccaggcccucccacagauua

SEQ ID NO: 453168 - RNA, 22 nt, Human
gcccugcugucuucagaguaua

SEQ ID NO: 453169 - RNA, 22 nt, Human
ggacccugggcuugcuccuggg

SEQ ID NO: 453170 - RNA, 22 nt, Human
caggggccggcuguccgugccc

SEQ ID NO: 453171 - RNA, 22 nt, Human
gcuggggcugggcugaggaaga

SEQ ID NO: 453172 - RNA, 21 nt, Human
uccacaaguuagaaggaaauu

SEQ ID NO: 453173 - RNA, 22 nt, Human
guuccacaaaauguacccaguu

SEQ ID NO: 453174 - RNA, 22 nt, Human
aaaucuggccccuugccuauuu

SEQ ID NO: 453175 - RNA, 22 nt, Human
ugcagggauuguuggcauccau

SEQ ID NO: 453176 - RNA, 23 nt, Human
gugcucugcggucugcuagucug

SEQ ID NO: 453177 - RNA, 22 nt, Human
aguuuuucugggaggcacugcu

SEQ ID NO: 453178 - RNA, 22 nt, Human
ggggaccuuuccauuucugaga

SEQ ID NO: 453179 - RNA, 23 nt, Human
ugugaagguggguccaagggcug

SEQ ID NO: 453180 - RNA, 22 nt, Human
cuguccugauggugccacuggu

SEQ ID NO: 453181 - RNA, 22 nt, Human
aaggagaaaugguagaugugca

SEQ ID NO: 453182 - RNA, 22 nt, Human
ccucaggauacaggagccacag

SEQ ID NO: 453183 - RNA, 22 nt, Human
ugggggucaggaugaggccuug

SEQ ID NO: 453184 - RNA, 22 nt, Human
ggcuggcucagggcuugagaga

SEQ ID NO: 453185 - RNA, 22 nt, Human
uggaccugaagaauaggaagua

SEQ ID NO: 453186 - RNA, 22 nt, Human
ggcugcuucucacucauuugca

SEQ ID NO: 453187 - RNA, 22 nt, Human
ucagccucucugaguccagacc

SEQ ID NO: 453188 - RNA, 22 nt, Human
agcuguggcagcagccguggca

SEQ ID NO: 453189 - RNA, 22 nt, Human
cugucuguuucugauucaaccu

SEQ ID NO: 453190 - RNA, 22 nt, Human
agcugagcuaguaguuccagug

SEQ ID NO: 453191 - RNA, 21 nt, Human
ugaggccucuccugggcuggc

SEQ ID NO: 453192 - RNA, 22 nt, Human
uccugcagcugcagaccugggg

SEQ ID NO: 453193 - RNA, 22 nt, Human
ugaguccacuuuaaaaugucag

SEQ ID NO: 453194 - RNA, 22 nt, Human
ucuggauggucagcucuuccug

SEQ ID NO: 453195 - RNA, 22 nt, Human
aacaucagaauauccauguugg

SEQ ID NO: 453196 - RNA, 22 nt, Human
agggcagagaucugagugggca

SEQ ID NO: 453197 - RNA, 22 nt, Human
agaaggcagaugggacggagca

SEQ ID NO: 453198 - RNA, 22 nt, Human
uccugaggcacaauccuagaau

SEQ ID NO: 453199 - RNA, 22 nt, Human
agugaagaggaaguggggcaca

SEQ ID NO: 453200 - RNA, 22 nt, Human
gaguuauuaauggcugaguuug

SEQ ID NO: 453201 - RNA, 22 nt, Human
agcugaggcucugagagggaag

SEQ ID NO: 453202 - RNA, 22 nt, Human
gaaggcaggcuucugauuaggu

SEQ ID NO: 453203 - RNA, 22 nt, Human
ugccucuguggaaauggugguc

SEQ ID NO: 453204 - RNA, 22 nt, Human
gagaaacuuggaguuauucugg

SEQ ID NO: 453205 - RNA, 21 nt, Human
agacagagugcagucuacaua

SEQ ID NO: 453206 - RNA, 22 nt, Human
cuccagaagacccauccucaug

SEQ ID NO: 453207 - RNA, 22 nt, Human
ccaggaaugaaauguagauaaa

SEQ ID NO: 453208 - RNA, 22 nt, Human
uggacagguugaguaggaggag

SEQ ID NO: 453209 - RNA, 22 nt, Human
uugacacagaucaauauucaac

SEQ ID NO: 453210 - RNA, 23 nt, Human
aguuuuucugcaugguucuguau

SEQ ID NO: 453211 - RNA, 22 nt, Human
gucaggauuuuaaaaucccagu

SEQ ID NO: 453212 - RNA, 22 nt, Human
cuguccuugcuggccagguaug

SEQ ID NO: 453213 - RNA, 22 nt, Human
ggcugaaguguaguggcucacu

SEQ ID NO: 453214 - RNA, 22 nt, Human
cacaggagaacccacagauucu

SEQ ID NO: 453215 - RNA, 22 nt, Human
ugcauauuauguguaucugucu

SEQ ID NO: 453216 - RNA, 22 nt, Human
ggcagaggugacagugucuuuu

SEQ ID NO: 453217 - RNA, 20 nt, Human
cugagcccccagccugcagg

SEQ ID NO: 453218 - RNA, 22 nt, Human
ggagucaccaaguaggagucuu

SEQ ID NO: 453219 - RNA, 22 nt, Human
cacaaaauaucaagcacuuuua

SEQ ID NO: 453220 - RNA, 22 nt, Human
ggcugccagugagugcagaccg

SEQ ID NO: 453221 - RNA, 22 nt, Human
cucagaaucugccaaguucagg

SEQ ID NO: 453222 - RNA, 22 nt, Human
uuaguuagucccugguaccuuu

SEQ ID NO: 453223 - RNA, 22 nt, Human
gcuuuaaaccucuacucugucc

SEQ ID NO: 453224 - RNA, 18 nt, Human
ugacucacccugucagug

SEQ ID NO: 453225 - RNA, 22 nt, Human
agaguggagagaaacaacucug

SEQ ID NO: 453226 - RNA, 22 nt, Human
gccuaauaugcaaaauugauac

SEQ ID NO: 453227 - RNA, 22 nt, Human
acagcuggcaggggggcaugaa

SEQ ID NO: 453228 - RNA, 22 nt, Human
ugaacccaggagguugcaguga

SEQ ID NO: 453229 - RNA, 22 nt, Human
gacagcauggugucuguucagg

SEQ ID NO: 453230 - RNA, 22 nt, Human
uccuggaggcaaaugagcacau

SEQ ID NO: 453231 - RNA, 18 nt, Human
ucagagagaauaguaauu

SEQ ID NO: 453232 - RNA, 22 nt, Human
ccagcugcgggcaucgagaguu

SEQ ID NO: 453233 - RNA, 22 nt, Human
gaggccuguagucauggaugua

SEQ ID NO: 453234 - RNA, 22 nt, Human
aacuguaaggcuuagaacagca

SEQ ID NO: 453235 - RNA, 22 nt, Human
ugguuuugcuccaguauaaaua

SEQ ID NO: 453236 - RNA, 22 nt, Human
ugcaauaacccaguaucuguga

SEQ ID NO: 453237 - RNA, 22 nt, Human
ugggcuacucugggagccuaac

SEQ ID NO: 453238 - RNA, 22 nt, Human
ggggcagagcauagcuccaauu

SEQ ID NO: 453239 - RNA, 22 nt, Human
uggcuuccacugugugcccccu

SEQ ID NO: 453240 - RNA, 18 nt, Human
cagauccaggcagcuauu

SEQ ID NO: 453241 - RNA, 22 nt, Human
gcagcugauggaaguccuauug

SEQ ID NO: 453242 - RNA, 22 nt, Human
gcaccugggcaaggauucagag

SEQ ID NO: 453243 - RNA, 22 nt, Human
caggauggccccggggcugugc

SEQ ID NO: 453244 - RNA, 23 nt, Human
cccagcuuucccacugccgagag

SEQ ID NO: 453245 - RNA, 22 nt, Human
gcagagcuccccaagacaccaa

SEQ ID NO: 453246 - RNA, 22 nt, Human
uccagggaagagcagaggcuac

SEQ ID NO: 453247 - RNA, 22 nt, Human
uuaauaaacaggugcagcugaa

SEQ ID NO: 453248 - RNA, 22 nt, Human
augaagcugaccuugucuugcu

SEQ ID NO: 453249 - RNA, 22 nt, Human
cagcauugaucccaggcugugg

SEQ ID NO: 453250 - RNA, 22 nt, Human
aguuuuuccugauuuuacagaa

SEQ ID NO: 453251 - RNA, 20 nt, Human
cuccagggaacagacuggag

SEQ ID NO: 453252 - RNA, 19 nt, Human
ccagaggacuguuaaugaa

SEQ ID NO: 453253 - RNA, 22 nt, Human
acagaguagcucaagaagauug

SEQ ID NO: 453254 - RNA, 22 nt, Human
auuucugauaaacguaagcugc

SEQ ID NO: 453255 - RNA, 22 nt, Human
aagguacaaaguauuauuuaaa

SEQ ID NO: 453256 - RNA, 22 nt, Human
agggccagagucuguguagaua

SEQ ID NO: 453257 - RNA, 22 nt, Human
gccagagguucaacaacugucu

SEQ ID NO: 453258 - RNA, 22 nt, Human
uggggcucaccuaggcuggaag

SEQ ID NO: 453259 - RNA, 22 nt, Human
aaauacaguguguguucuuuga

SEQ ID NO: 453260 - RNA, 22 nt, Human
cucagcagcagggaagagguca

SEQ ID NO: 453261 - RNA, 22 nt, Human
auguucaaacuuuuuacacacc

SEQ ID NO: 453262 - RNA, 22 nt, Human
cucuuaguuuaucuuugacaaa

SEQ ID NO: 453263 - RNA, 22 nt, Human
ggcucugccugcccagcagcac

SEQ ID NO: 453264 - RNA, 22 nt, Human
ugagcuucuuuauuuggccaga

SEQ ID NO: 453265 - RNA, 22 nt, Human
ucagggcaagucucagaagguu

SEQ ID NO: 453266 - RNA, 22 nt, Human
ugcacacacgcggcacaucugu

SEQ ID NO: 453267 - RNA, 22 nt, Human
ucagugucuugggcuugaaugc

SEQ ID NO: 453268 - RNA, 22 nt, Human
cagcugccaagaaucuuuucua

SEQ ID NO: 453269 - RNA, 22 nt, Human
cagaguguuagcgcugguuggg

SEQ ID NO: 453270 - RNA, 22 nt, Human
uacugccuggagcauuggugcu

SEQ ID NO: 453271 - RNA, 22 nt, Human
gcugugcagauguagggagugg

SEQ ID NO: 453272 - RNA, 22 nt, Human
cucagggcuugaguguccagga

SEQ ID NO: 453273 - RNA, 22 nt, Human
ugcagaggagcuggaaggcugg

SEQ ID NO: 453274 - RNA, 22 nt, Human
acucaggaauggggcugggacu

SEQ ID NO: 453275 - RNA, 22 nt, Human
aaggccugggaggccucucuuc

SEQ ID NO: 453276 - RNA, 22 nt, Human
aucugccucuucuucauugcga

SEQ ID NO: 453277 - RNA, 22 nt, Human
ggccaccuuccaguugccugca

SEQ ID NO: 453278 - RNA, 22 nt, Human
acccugagucagacagccugac

SEQ ID NO: 453279 - RNA, 20 nt, Human
accaggagauggaggcaggg

SEQ ID NO: 453280 - RNA, 22 nt, Human
cuuauguaaacuacagauaaua

SEQ ID NO: 453281 - RNA, 22 nt, Human
ugggcugcugucugcacaugcu

SEQ ID NO: 453282 - RNA, 22 nt, Human
ucugucugcaccuaagcacagu

SEQ ID NO: 453283 - RNA, 22 nt, Human
gcauuguccugcuucugagugu

SEQ ID NO: 453284 - RNA, 22 nt, Human
aauauguuccacuuaaagcugg

SEQ ID NO: 453285 - RNA, 22 nt, Human
accucugcucaagaccccuccg

SEQ ID NO: 453286 - RNA, 22 nt, Human
cagauaaaggcuuacuaguagu

SEQ ID NO: 453287 - RNA, 22 nt, Human
aucaggaucugggagccugaaa

SEQ ID NO: 453288 - RNA, 22 nt, Human
agagcugugcuuugcaccacgu

SEQ ID NO: 453289 - RNA, 22 nt, Human
uaggccagaggagcagcuuugg

SEQ ID NO: 453290 - RNA, 22 nt, Human
gcaagcugcuuaagcucauugu

SEQ ID NO: 453291 - RNA, 22 nt, Human
cagggcccaggccacuggguug

SEQ ID NO: 453292 - RNA, 22 nt, Human
ccagcagcagcguccaaggaga

SEQ ID NO: 453293 - RNA, 18 nt, Human
uggagcugagugcugugc

SEQ ID NO: 453294 - RNA, 22 nt, Human
gggcuccagcccgggaccaggu

SEQ ID NO: 453295 - RNA, 22 nt, Human
ccagguggcuucugcccgaugu

SEQ ID NO: 453296 - RNA, 22 nt, Human
gggagggaggugcugguucacg

SEQ ID NO: 453297 - RNA, 22 nt, Human
ccucuggggugagugggccacu

SEQ ID NO: 453298 - RNA, 20 nt, Human
aggcugccaggucucacauc

SEQ ID NO: 453299 - RNA, 22 nt, Human
acuaaggaauaugacaaacuca

SEQ ID NO: 453300 - RNA, 22 nt, Human
uugccuugauucuucucaugug

SEQ ID NO: 453301 - RNA, 22 nt, Human
aagccaggcaugcuuggacagu

SEQ ID NO: 453302 - RNA, 22 nt, Human
ggaggaccccagcagcucccca

SEQ ID NO: 453303 - RNA, 22 nt, Human
ccuggcuuccuggagcucacaa

SEQ ID NO: 453304 - RNA, 22 nt, Human
ugugccauuucuauucugcagc

SEQ ID NO: 453305 - RNA, 22 nt, Human
gccuccccugcaauuguccuug

SEQ ID NO: 453306 - RNA, 22 nt, Human
ccuggcagcuaagugcuuugag

SEQ ID NO: 453307 - RNA, 22 nt, Human
aaaguguagagacuuuggaacc

SEQ ID NO: 453308 - RNA, 19 nt, Human
agcuguggaugugggauuu

SEQ ID NO: 453309 - RNA, 22 nt, Human
gucaccaggucugaugcagcca

SEQ ID NO: 453310 - RNA, 22 nt, Human
gcuguacauucuguggguuugg

SEQ ID NO: 453311 - RNA, 22 nt, Human
cgggcagauugggaagguucau

SEQ ID NO: 453312 - RNA, 22 nt, Human
ucuuugcaugugcuucuuggcc

SEQ ID NO: 453313 - RNA, 22 nt, Human
agccuggaccaggggccucaga

SEQ ID NO: 453314 - RNA, 22 nt, Human
gccagagguaucaaagauagua

SEQ ID NO: 453315 - RNA, 22 nt, Human
uuccgcuggggccgccuggcgg

SEQ ID NO: 453316 - RNA, 22 nt, Human
cauuagggucucucagcugaau

SEQ ID NO: 453317 - RNA, 22 nt, Human
cuggagagaaaugacaaagcua

SEQ ID NO: 453318 - RNA, 22 nt, Human
ucucagagaucuuucugcaugu

SEQ ID NO: 453319 - RNA, 22 nt, Human
gaguccagacaccauaccugau

SEQ ID NO: 453320 - RNA, 21 nt, Human
gcagagccugagguucuugag

SEQ ID NO: 453321 - RNA, 22 nt, Human
ugucagugguagacccagaggu

SEQ ID NO: 453322 - RNA, 22 nt, Human
cauggcagugauucagccuuug

SEQ ID NO: 453323 - RNA, 22 nt, Human
uggcccugcuggccaaaggcua

SEQ ID NO: 453324 - RNA, 22 nt, Human
uauugucuguccgggucaaagc

SEQ ID NO: 453325 - RNA, 22 nt, Human
gcaggggcugagcaccagcggg

SEQ ID NO: 453326 - RNA, 22 nt, Human
uacugugaauacaaaauaaauu

SEQ ID NO: 453327 - RNA, 22 nt, Human
cagggucuuauaaggccaauuu

SEQ ID NO: 453328 - RNA, 22 nt, Human
gucauuucuguuucuucagugc

SEQ ID NO: 453329 - RNA, 22 nt, Human
acugaaggcuuucccaagguca

SEQ ID NO: 453330 - RNA, 22 nt, Human
ggaggccaucagggagggcauu

SEQ ID NO: 453331 - RNA, 22 nt, Human
gaggcucacuaggcauccuggg

SEQ ID NO: 453332 - RNA, 23 nt, Human
augcucugggcugugggaccugc

SEQ ID NO: 453333 - RNA, 22 nt, Human
ugagggaggcccuuugagcaga

SEQ ID NO: 453334 - RNA, 22 nt, Human
cacaggagcuguggggcagugu

SEQ ID NO: 453335 - RNA, 22 nt, Human
uccuggcccacuaugccagcau

SEQ ID NO: 453336 - RNA, 22 nt, Human
ugggccaggauuucaagacccu

SEQ ID NO: 453337 - RNA, 22 nt, Human
acuugguugaugucauaagguu

SEQ ID NO: 453338 - RNA, 22 nt, Human
aaugaugguuucaucacuugaa

SEQ ID NO: 453339 - RNA, 22 nt, Human
gcaagcuggcuguuagaggaug

SEQ ID NO: 453340 - RNA, 22 nt, Human
uuugaaagggacaaagucacug

SEQ ID NO: 453341 - RNA, 22 nt, Human
ccugugucagccccugccucca

SEQ ID NO: 453342 - RNA, 22 nt, Human
ugcuuuauucaggguuuacccc

SEQ ID NO: 453343 - RNA, 22 nt, Human
gcccagcuuuuugaggcaggca

SEQ ID NO: 453344 - RNA, 21 nt, Human
uggagcugaauuuuuggcauc

SEQ ID NO: 453345 - RNA, 22 nt, Human
acaguaaaucaacagaauaucu

SEQ ID NO: 453346 - RNA, 22 nt, Human
gggccuggcaugcagccccguu

SEQ ID NO: 453347 - RNA, 22 nt, Human
uugggguguuggauggagcaag

SEQ ID NO: 453348 - RNA, 22 nt, Human
agcuggguguguaucagauaaa

SEQ ID NO: 453349 - RNA, 22 nt, Human
ccaggccuucugaggacacucu

SEQ ID NO: 453350 - RNA, 18 nt, Human
cugaggcuggcaggagcc

SEQ ID NO: 453351 - RNA, 22 nt, Human
ugcccaggauugugaggucagg

SEQ ID NO: 453352 - RNA, 22 nt, Human
cagagcugcagauugaaggcau

SEQ ID NO: 453353 - RNA, 22 nt, Human
gaauacaaauaauaccaaggug

SEQ ID NO: 453354 - RNA, 22 nt, Human
uauaucaccaaaaacaguucug

SEQ ID NO: 453355 - RNA, 22 nt, Human
ugcuguggcaguuuauguauag

SEQ ID NO: 453356 - RNA, 22 nt, Human
ucuaccacuuauuagcucugug

SEQ ID NO: 453357 - RNA, 22 nt, Human
uuaauuuuaaccuguuuguguc

SEQ ID NO: 453358 - RNA, 22 nt, Human
acugccuugaaagauuguugag

SEQ ID NO: 453359 - RNA, 22 nt, Human
acccaggaugauaauguucaca

SEQ ID NO: 453360 - RNA, 22 nt, Human
ucaaugaugcugaagguagcgu

SEQ ID NO: 453361 - RNA, 19 nt, Human
acagaaauuaguuauuuuc

SEQ ID NO: 453362 - RNA, 23 nt, Human
uccagggauuaaugaagucaguc

SEQ ID NO: 453363 - RNA, 22 nt, Human
auaauuuaauuuucacaguggu

SEQ ID NO: 453364 - RNA, 22 nt, Human
ugcagggccaugguggcggcug

SEQ ID NO: 453365 - RNA, 22 nt, Human
aaauuucuguuguuuugagcca

SEQ ID NO: 453366 - RNA, 22 nt, Human
aguaucaaggaucuccagcacc

SEQ ID NO: 453367 - RNA, 17 nt, Human
uuccccugaccaagccu

SEQ ID NO: 453368 - RNA, 20 nt, Human
ugcuguaagauuagagagcu

SEQ ID NO: 453369 - RNA, 22 nt, Human
aaacuguaggagggaaaggaag

SEQ ID NO: 453370 - RNA, 22 nt, Human
uucugggacaucuggacaguuu

SEQ ID NO: 453371 - RNA, 22 nt, Human
uuuccucugagugagcugggag

SEQ ID NO: 453372 - RNA, 21 nt, Human
ggagggcagcccagacuggcu

SEQ ID NO: 453373 - RNA, 22 nt, Human
ucuuuccauggccacacagucu

SEQ ID NO: 453374 - RNA, 22 nt, Human
cagggugccuguccucagcaaa

SEQ ID NO: 453375 - RNA, 22 nt, Human
agcauuuauuucuuagaaauug

SEQ ID NO: 453376 - RNA, 21 nt, Human
uggccaaaaccauauuauuaa

SEQ ID NO: 453377 - RNA, 22 nt, Human
cuaauacucauuucuguaacuc

SEQ ID NO: 453378 - RNA, 22 nt, Human
acaggcauauuucuagauuaca

SEQ ID NO: 453379 - RNA, 22 nt, Human
agucccagaucuacaggaggga

SEQ ID NO: 453380 - RNA, 22 nt, Human
agcuguggcaaccuugucagac

SEQ ID NO: 453381 - RNA, 22 nt, Human
aggggacacggcuucuccaggg

SEQ ID NO: 453382 - RNA, 22 nt, Human
ggcuccuggcaucuggugggua

SEQ ID NO: 453383 - RNA, 21 nt, Human
ugucagagcuuguaggacauu

SEQ ID NO: 453384 - RNA, 22 nt, Human
gagccuggauagccuuguucca

SEQ ID NO: 453385 - RNA, 22 nt, Human
gcucugagucucagcuaccaca

SEQ ID NO: 453386 - RNA, 22 nt, Human
uuugaacaugcugcaugauaau

SEQ ID NO: 453387 - RNA, 22 nt, Human
cacaaaaguaggaggcaggcgg

SEQ ID NO: 453388 - RNA, 22 nt, Human
gccuguuggugacuuucuguug

SEQ ID NO: 453389 - RNA, 22 nt, Human
ggcuugcuucuuguccaggaau

SEQ ID NO: 453390 - RNA, 22 nt, Human
ggcugugccucaaggcuacuca

SEQ ID NO: 453391 - RNA, 23 nt, Human
uggcucugagagguucagaugcu

SEQ ID NO: 453392 - RNA, 22 nt, Human
cagcagcugauggggaagugau

SEQ ID NO: 453393 - RNA, 22 nt, Human
ccacagcaugcaggccugacac

SEQ ID NO: 453394 - RNA, 22 nt, Human
ucugagcuuuuauuaucaaccu

SEQ ID NO: 453395 - RNA, 23 nt, Human
cccagcgcugagcccugcaggca

SEQ ID NO: 453396 - RNA, 22 nt, Human
cuggacuuuggcccaucugcca

SEQ ID NO: 453397 - RNA, 22 nt, Human
caggcagccugcggucugcaca

SEQ ID NO: 453398 - RNA, 22 nt, Human
gaguuguucaacgugugugaaa

SEQ ID NO: 453399 - RNA, 22 nt, Human
guguuaaccagcuaaacuuugc

SEQ ID NO: 453400 - RNA, 22 nt, Human
acagcacaaucugagucccaga

SEQ ID NO: 453401 - RNA, 22 nt, Human
gccucacugcagccccaggaag

SEQ ID NO: 453402 - RNA, 18 nt, Human
guaggucaguaccaagca

SEQ ID NO: 453403 - RNA, 22 nt, Human
agagcagguggcaacucuggga

SEQ ID NO: 453404 - RNA, 22 nt, Human
cacaguggauugggugaugccc

SEQ ID NO: 453405 - RNA, 22 nt, Human
ccucccacauugaggacaugcu

SEQ ID NO: 453406 - RNA, 22 nt, Human
gaggccugguuuccagcauccu

SEQ ID NO: 453407 - RNA, 22 nt, Human
auccagcuuugucuggucuucg

SEQ ID NO: 453408 - RNA, 22 nt, Human
ccagcucucagcgggagacuca

SEQ ID NO: 453409 - RNA, 22 nt, Human
uuuuaucuaccuaugcucauuu

SEQ ID NO: 453410 - RNA, 22 nt, Human
aagcagugcgcucaucuaaggg

SEQ ID NO: 453411 - RNA, 22 nt, Human
uggagggcucuuucaccuggua

SEQ ID NO: 453412 - RNA, 22 nt, Human
ccagggcagaaaaagagggaau

SEQ ID NO: 453413 - RNA, 22 nt, Human
cagcuuuccagagaccugcccc

SEQ ID NO: 453414 - RNA, 22 nt, Human
uccuccuucgggacugcuugac

SEQ ID NO: 453415 - RNA, 22 nt, Human
acacugaagagcacuuucaaag

SEQ ID NO: 453416 - RNA, 22 nt, Human
ucagcagcagcucagcauguuu

SEQ ID NO: 453417 - RNA, 22 nt, Human
ggugcccaccugucuuccugga

SEQ ID NO: 453418 - RNA, 22 nt, Human
caggcagaguuagugauuuagg

SEQ ID NO: 453419 - RNA, 22 nt, Human
uccugucugucuuuggucccuu

SEQ ID NO: 453420 - RNA, 22 nt, Human
auggcagauggcuggagcaggu

SEQ ID NO: 453421 - RNA, 22 nt, Human
acuuugcaaugggcagaaccca

SEQ ID NO: 453422 - RNA, 22 nt, Human
aucagcaagcauuuauugagug

SEQ ID NO: 453423 - RNA, 22 nt, Human
guccuggggaauacagaagccg

SEQ ID NO: 453424 - RNA, 22 nt, Human
auuagcugaccucuaaggagcc

SEQ ID NO: 453425 - RNA, 22 nt, Human
uacagagaguacagcauccaca

SEQ ID NO: 453426 - RNA, 22 nt, Human
cagcagagacgguaagcagaac

SEQ ID NO: 453427 - RNA, 22 nt, Human
uuuuauuggagugauaccaagc

SEQ ID NO: 453428 - RNA, 22 nt, Human
cagucucugugccagauccugg

SEQ ID NO: 453429 - RNA, 19 nt, Human
cuggcucuuggguggagga

SEQ ID NO: 453430 - RNA, 22 nt, Human
caggcccagugaucagggcucu

SEQ ID NO: 453431 - RNA, 22 nt, Human
uggcuccuaggauggugccugg

SEQ ID NO: 453432 - RNA, 22 nt, Human
cuucacauguuggaguccuuug

SEQ ID NO: 453433 - RNA, 22 nt, Human
gcugccuguugaagggucugug

SEQ ID NO: 453434 - RNA, 23 nt, Human
gggcugcuccaggccaaggcugg

SEQ ID NO: 453435 - RNA, 22 nt, Human
cuuucacacacauacauuugga

SEQ ID NO: 453436 - RNA, 22 nt, Human
agcugggagcagagccacagcc

SEQ ID NO: 453437 - RNA, 22 nt, Human
ugggacacccucacgccugcac

SEQ ID NO: 453438 - RNA, 22 nt, Human
agaagccauugaagcagaccuc

SEQ ID NO: 453439 - RNA, 22 nt, Human
agcagggcuggggcacgagcca

SEQ ID NO: 453440 - RNA, 22 nt, Human
uaaaggcuucugcagggacuga

SEQ ID NO: 453441 - RNA, 22 nt, Human
uaugcacgucuauuuaugaaga

SEQ ID NO: 453442 - RNA, 22 nt, Human
uagcauuuggacauugucaccu

SEQ ID NO: 453443 - RNA, 22 nt, Human
cuggcaggcggcagagcccagg

SEQ ID NO: 453444 - RNA, 22 nt, Human
caggcacuggggaugcugggau

SEQ ID NO: 453445 - RNA, 22 nt, Human
aaaguguaaaagcauguuaggg

SEQ ID NO: 453446 - RNA, 22 nt, Human
agcugcucuugggugacuucaa

SEQ ID NO: 453447 - RNA, 22 nt, Human
gcuguacaguuuacuagguggg

SEQ ID NO: 453448 - RNA, 22 nt, Human
ccacagggaacaugacagccuu

SEQ ID NO: 453449 - RNA, 22 nt, Human
gcaccugguuuauauaaucaua

SEQ ID NO: 453450 - RNA, 21 nt, Human
ucugagaacuucugcugcagc

SEQ ID NO: 453451 - RNA, 22 nt, Human
cucagcccagcccaggaccagg

SEQ ID NO: 453452 - RNA, 22 nt, Human
uaaggcagaaauaugagcaggg

SEQ ID NO: 453453 - RNA, 23 nt, Human
ccugugugcccuuaauucacagc

SEQ ID NO: 453454 - RNA, 22 nt, Human
gcaguguuguuaaaagauuaga

SEQ ID NO: 453455 - RNA, 22 nt, Human
gcugucacacaugggaucucag

SEQ ID NO: 453456 - RNA, 22 nt, Human
ugcugggggcuuucuggauacc

SEQ ID NO: 453457 - RNA, 22 nt, Human
gagcccuggcagucugggaugg

SEQ ID NO: 453458 - RNA, 22 nt, Human
guaauuaggaauaaaaugggaa

SEQ ID NO: 453459 - RNA, 21 nt, Human
aacauuucugggagaacucac

SEQ ID NO: 453460 - RNA, 22 nt, Human
ucacuggggccuuuggucagga

SEQ ID NO: 453461 - RNA, 22 nt, Human
ggggcaggagcccuucuucagc

SEQ ID NO: 453462 - RNA, 22 nt, Human
guuagggaagcgcuguguucuu

SEQ ID NO: 453463 - RNA, 20 nt, Human
ccuggagccuggaaggaguc

SEQ ID NO: 453464 - RNA, 22 nt, Human
cucuccuccaacagcccugccg

SEQ ID NO: 453465 - RNA, 22 nt, Human
aucaggaagccagucuaaugga

SEQ ID NO: 453466 - RNA, 22 nt, Human
cagagcugguaagugguagagg

SEQ ID NO: 453467 - RNA, 22 nt, Human
agcugagcacauucaaacaggu

SEQ ID NO: 453468 - RNA, 22 nt, Human
ucuguccucuuugaagcugcuc

SEQ ID NO: 453469 - RNA, 20 nt, Human
ccugccuguguuugugauga

SEQ ID NO: 453470 - RNA, 22 nt, Human
cagggugacugcccuggccacu

SEQ ID NO: 453471 - RNA, 21 nt, Human
ccugugugucugacugggcua

SEQ ID NO: 453472 - RNA, 22 nt, Human
ucagcuuuccugcagcuaaggg

SEQ ID NO: 453473 - RNA, 22 nt, Human
gagaggcuaugagguucugugu

SEQ ID NO: 453474 - RNA, 21 nt, Human
uuuauuaacaacuguggacgu

SEQ ID NO: 453475 - RNA, 23 nt, Human
aggaggaaaaguuaucugcugag

SEQ ID NO: 453476 - RNA, 22 nt, Human
ccagcugguguuccuuaggacc

SEQ ID NO: 453477 - RNA, 22 nt, Human
gagcugagaucgugccauugca

SEQ ID NO: 453478 - RNA, 22 nt, Human
agugggcaugaucuggugucug

SEQ ID NO: 453479 - RNA, 22 nt, Human
uagcagagcagggaucagagcc

SEQ ID NO: 453480 - RNA, 22 nt, Human
cagaaacuucuggugucaaaua

SEQ ID NO: 453481 - RNA, 22 nt, Human
aggauccuuuggccacuucuua

SEQ ID NO: 453482 - RNA, 22 nt, Human
cuguccuuacugcuucuggcuu

SEQ ID NO: 453483 - RNA, 22 nt, Human
gaaucucaguggaagcaggaag

SEQ ID NO: 453484 - RNA, 22 nt, Human
uguaugcuuguguauaauauaa

SEQ ID NO: 453485 - RNA, 22 nt, Human
aggcugucugaccccagagccc

SEQ ID NO: 453486 - RNA, 22 nt, Human
cacugcaguaacucuaggacug

SEQ ID NO: 453487 - RNA, 22 nt, Human
ggugcugguucaggguggcugu

SEQ ID NO: 453488 - RNA, 22 nt, Human
aucuauuaugcugagaaacugu

SEQ ID NO: 453489 - RNA, 22 nt, Human
cggcagagcccugagucagccu

SEQ ID NO: 453490 - RNA, 22 nt, Human
gcagcugcaggcaggcuugcug

SEQ ID NO: 453491 - RNA, 22 nt, Human
ggggcagccuccaggaaagcug

SEQ ID NO: 453492 - RNA, 22 nt, Human
ucccagccugacagugcaucaa

SEQ ID NO: 453493 - RNA, 22 nt, Human
aaggucauuguugcauguucuc

SEQ ID NO: 453494 - RNA, 22 nt, Human
uaaguucaguuggucgaaguag

SEQ ID NO: 453495 - RNA, 22 nt, Human
caggaagauuagaccaagagcu

SEQ ID NO: 453496 - RNA, 22 nt, Human
agcagggccaacaguaaacacc

SEQ ID NO: 453497 - RNA, 23 nt, Human
cuggaagugcuuuuauagcuuug

SEQ ID NO: 453498 - RNA, 22 nt, Human
ccagcagacacacaggcguggg

SEQ ID NO: 453499 - RNA, 22 nt, Human
agaauucuccuucagggcagga

SEQ ID NO: 453500 - RNA, 22 nt, Human
acucacuuuccauucaagcacc

SEQ ID NO: 453501 - RNA, 23 nt, Human
ucucagaggauuccugggccuug

SEQ ID NO: 453502 - RNA, 22 nt, Human
gggcugaguuccugccucacuc

SEQ ID NO: 453503 - RNA, 22 nt, Human
ggucacaggggagaagagugau

SEQ ID NO: 453504 - RNA, 22 nt, Human
agaaguaggcagggcuguauca

SEQ ID NO: 453505 - RNA, 22 nt, Human
gggagguucuguucgcacuuga

SEQ ID NO: 453506 - RNA, 22 nt, Human
uaaaauguagcuucuaggcugg

SEQ ID NO: 453507 - RNA, 22 nt, Human
ugccugucuuggaguccuggcc

SEQ ID NO: 453508 - RNA, 22 nt, Human
augaaaacggaccagagcuauu

SEQ ID NO: 453509 - RNA, 22 nt, Human
cccuccagccauggacccaggu

SEQ ID NO: 453510 - RNA, 22 nt, Human
agccaguguuaagugacugguu

SEQ ID NO: 453511 - RNA, 22 nt, Human
gugucaugggagucagaaguga

SEQ ID NO: 453512 - RNA, 22 nt, Human
ugcaguggaggccgugagacag

SEQ ID NO: 453513 - RNA, 22 nt, Human
cuccagggaaaggggcguccgc

SEQ ID NO: 453514 - RNA, 22 nt, Human
uuccuguccgcaauggccuggg

SEQ ID NO: 453515 - RNA, 22 nt, Human
aggacagagggaccagagccca

SEQ ID NO: 453516 - RNA, 22 nt, Human
uggcugggagcuggaacugggc

SEQ ID NO: 453517 - RNA, 18 nt, Human
cagaaaucacaccagcac

SEQ ID NO: 453518 - RNA, 22 nt, Human
acaugcaugucuaugggcaggu

SEQ ID NO: 453519 - RNA, 22 nt, Human
guggcccucugauagggucagg

SEQ ID NO: 453520 - RNA, 22 nt, Human
ugcccaggaucuggcgaugcuc

SEQ ID NO: 453521 - RNA, 22 nt, Human
uguacaauagcuauuaucucca

SEQ ID NO: 453522 - RNA, 18 nt, Human
gaaaggagagacaguagg

SEQ ID NO: 453523 - RNA, 22 nt, Human
ggcuuuaugcacagcagauggu

SEQ ID NO: 453524 - RNA, 23 nt, Human
ccucccaggcugcgagucccgag

SEQ ID NO: 453525 - RNA, 22 nt, Human
ugcucccaggcauucucuguug

SEQ ID NO: 453526 - RNA, 22 nt, Human
aagggcucugugugccucccca

SEQ ID NO: 453527 - RNA, 22 nt, Human
ucauuuguacuugugugcuugu

SEQ ID NO: 453528 - RNA, 21 nt, Human
gcugcugccccuagugaggcc

SEQ ID NO: 453529 - RNA, 21 nt, Human
uuuaauuugcauguaugacgc

SEQ ID NO: 453530 - RNA, 22 nt, Human
acacagaaccucauagccucuc

SEQ ID NO: 453531 - RNA, 22 nt, Human
ccagaagucaggaaugagucuu

SEQ ID NO: 453532 - RNA, 22 nt, Human
ggcagcaguccauggcccaagg

SEQ ID NO: 453533 - RNA, 22 nt, Human
ucuggagcuuccucauuuacag

SEQ ID NO: 453534 - RNA, 22 nt, Human
ccugggcaucucaugcaccugc

SEQ ID NO: 453535 - RNA, 22 nt, Human
cugggagggguagccaauccua

SEQ ID NO: 453536 - RNA, 21 nt, Human
uugaaaguaaauucagcagcu

SEQ ID NO: 453537 - RNA, 22 nt, Human
agcugcaggcccaugcucaguc

SEQ ID NO: 453538 - RNA, 22 nt, Human
ggaggcaggaaagacagguuca

SEQ ID NO: 453539 - RNA, 22 nt, Human
uuguuucaaauauuucagaaua

SEQ ID NO: 453540 - RNA, 22 nt, Human
gagcuggugaucagcuggagga

SEQ ID NO: 453541 - RNA, 22 nt, Human
aggccagaugucgggcuagaag

SEQ ID NO: 453542 - RNA, 22 nt, Human
aaggcaguuaauuuggcuagaa

SEQ ID NO: 453543 - RNA, 22 nt, Human
gggcugcuuccuggggaaugcu

SEQ ID NO: 453544 - RNA, 22 nt, Human
agucugcacucagguggagguc

SEQ ID NO: 453545 - RNA, 19 nt, Human
aaaaggaauauucuuuggg

SEQ ID NO: 453546 - RNA, 22 nt, Human
caauagcagcuucugaaugcaa

SEQ ID NO: 453547 - RNA, 22 nt, Human
gcaaggcugugcacuuugcauu

SEQ ID NO: 453548 - RNA, 22 nt, Human
cccugcugucaggugcugggag

SEQ ID NO: 453549 - RNA, 22 nt, Human
gggcacuggaaggcucucaggc

SEQ ID NO: 453550 - RNA, 22 nt, Human
uccaggcaugguguaauuuugc

SEQ ID NO: 453551 - RNA, 22 nt, Human
aaaugcaugagaaaguauucug

SEQ ID NO: 453552 - RNA, 22 nt, Human
uccagggacagcgcuggagcua

SEQ ID NO: 453553 - RNA, 22 nt, Human
uggcucuguugugcugagccag

SEQ ID NO: 453554 - RNA, 22 nt, Human
ucaaaggcuugugguucuggga

SEQ ID NO: 453555 - RNA, 19 nt, Human
ugucacugucauggcccag

SEQ ID NO: 453556 - RNA, 20 nt, Human
agagaauucccuuuggagau

SEQ ID NO: 453557 - RNA, 22 nt, Human
ugcucuguaaggucagaaaagg

SEQ ID NO: 453558 - RNA, 22 nt, Human
uuacauuuuaguuaaccuguga

SEQ ID NO: 453559 - RNA, 22 nt, Human
ugccugucuucaggagugucac

SEQ ID NO: 453560 - RNA, 22 nt, Human
auaauuuacuaagcucuaccuu

SEQ ID NO: 453561 - RNA, 22 nt, Human
gcagagcuguuaauggagcuga

SEQ ID NO: 453562 - RNA, 22 nt, Human
aggcuggggaauugaauuugcu

SEQ ID NO: 453563 - RNA, 20 nt, Human
uccuggccuucucgggcagu

SEQ ID NO: 453564 - RNA, 22 nt, Human
acagagcugggugcccccugga

SEQ ID NO: 453565 - RNA, 22 nt, Human
agaggcaacauggggaacagau

SEQ ID NO: 453566 - RNA, 22 nt, Human
auuuuaucugcuuacuuucagg

SEQ ID NO: 453567 - RNA, 22 nt, Human
auugacaagacaauggcucuua

SEQ ID NO: 453568 - RNA, 22 nt, Human
agcugcugcgccucacccuggc

SEQ ID NO: 453569 - RNA, 22 nt, Human
aggcucagcugguggugaucgc

SEQ ID NO: 453570 - RNA, 22 nt, Human
cagcuuuguggccuugaccucg

SEQ ID NO: 453571 - RNA, 22 nt, Human
ucucagggugaggaaagaauuu

SEQ ID NO: 453572 - RNA, 19 nt, Human
ucucagagcccuagaggcc

SEQ ID NO: 453573 - RNA, 22 nt, Human
gcugagguggagauugcaguga

SEQ ID NO: 453574 - RNA, 22 nt, Human
gcuggcagguccaagauagagc

SEQ ID NO: 453575 - RNA, 22 nt, Human
gagagggcucuguguggguacu

SEQ ID NO: 453576 - RNA, 22 nt, Human
ccaccaggacagcccugagggg

SEQ ID NO: 453577 - RNA, 20 nt, Human
ccaagagcaugcaugaggaa

SEQ ID NO: 453578 - RNA, 19 nt, Human
ugagacagggauucaggug

SEQ ID NO: 453579 - RNA, 22 nt, Human
aaagaggauggaguagucagcu

SEQ ID NO: 453580 - RNA, 22 nt, Human
gaggcacaccagggagucuugu

SEQ ID NO: 453581 - RNA, 22 nt, Human
uucuuuccccauggaguucgga

SEQ ID NO: 453582 - RNA, 22 nt, Human
ucuggcuccaggaccgggcaca

SEQ ID NO: 453583 - RNA, 22 nt, Human
acagguggccccgagggagugg

SEQ ID NO: 453584 - RNA, 22 nt, Human
cagaaguaagauuacugugaga

SEQ ID NO: 453585 - RNA, 21 nt, Human
augaagucuaugcuucugugu

SEQ ID NO: 453586 - RNA, 23 nt, Human
ccuccugggcacaggccugaugg

SEQ ID NO: 453587 - RNA, 22 nt, Human
cccaggcagggacgugcucugg

SEQ ID NO: 453588 - RNA, 22 nt, Human
caguuuauuuccaagaugacaa

SEQ ID NO: 453589 - RNA, 22 nt, Human
ggggaccuucccagagcaguug

SEQ ID NO: 453590 - RNA, 22 nt, Human
cccuggcaaaacacucucuuga

SEQ ID NO: 453591 - RNA, 22 nt, Human
cacagggcagugcugcccacuc

SEQ ID NO: 453592 - RNA, 22 nt, Human
auggggcugggauucuccucgg

SEQ ID NO: 453593 - RNA, 22 nt, Human
gccuggagcucggcugagggcg

SEQ ID NO: 453594 - RNA, 22 nt, Human
aagcucugcucagcagacuagg

SEQ ID NO: 453595 - RNA, 22 nt, Human
agagugaagguugacacuucac

SEQ ID NO: 453596 - RNA, 22 nt, Human
cagggccaaguuggugccuuuu

SEQ ID NO: 453597 - RNA, 22 nt, Human
acugagcugcuugaagugaacu

SEQ ID NO: 453598 - RNA, 22 nt, Human
aagcugcagacccccugucuca

SEQ ID NO: 453599 - RNA, 22 nt, Human
gcucacuggccugaagaggacg

SEQ ID NO: 453600 - RNA, 22 nt, Human
agggccagggaaacgaucagca

SEQ ID NO: 453601 - RNA, 22 nt, Human
ucaguggauuguagaaggcuua

SEQ ID NO: 453602 - RNA, 22 nt, Human
caggauggagggagggcuguua

SEQ ID NO: 453603 - RNA, 22 nt, Human
uuguuucaugaguguaaaggga

SEQ ID NO: 453604 - RNA, 22 nt, Human
gucugucaucugagauggagug

SEQ ID NO: 453605 - RNA, 22 nt, Human
caggcagccugagggaucuggg

SEQ ID NO: 453606 - RNA, 18 nt, Human
acauuucuaggugaaagc

SEQ ID NO: 453607 - RNA, 22 nt, Human
cccaggcagucuggcucuaaag

SEQ ID NO: 453608 - RNA, 23 nt, Human
agggcugaaugcagagaagcaga

SEQ ID NO: 453609 - RNA, 22 nt, Human
ggcugggcaggucugcacaggg

SEQ ID NO: 453610 - RNA, 22 nt, Human
ugaggccugggcacauaaccuc

SEQ ID NO: 453611 - RNA, 22 nt, Human
cugucagcacucuacuacagau

SEQ ID NO: 453612 - RNA, 22 nt, Human
cuggaagguuccucccagcucc

SEQ ID NO: 453613 - RNA, 22 nt, Human
agcagggcuuuggcuggcuuuc

SEQ ID NO: 453614 - RNA, 22 nt, Human
uucuccccugacccugaugagg

SEQ ID NO: 453615 - RNA, 22 nt, Human
ucugcaggacugaggccuguuu

SEQ ID NO: 453616 - RNA, 22 nt, Human
gacaugcaugaaugcaggucuc

SEQ ID NO: 453617 - RNA, 22 nt, Human
uuguuuucuccacugcaucuua

SEQ ID NO: 453618 - RNA, 22 nt, Human
caguacuuggucaaggaagcag

SEQ ID NO: 453619 - RNA, 22 nt, Human
aaagccuugcccgucacuggga

SEQ ID NO: 453620 - RNA, 22 nt, Human
gauuucaccugaucuugucauc

SEQ ID NO: 453621 - RNA, 20 nt, Human
aguaccuuuuguauguuacc

SEQ ID NO: 453622 - RNA, 22 nt, Human
ugggcacaggggaauggaugaa

SEQ ID NO: 453623 - RNA, 22 nt, Human
uggcccucagucuugcuccugc

SEQ ID NO: 453624 - RNA, 22 nt, Human
acuguacaacugcugagcagaa

SEQ ID NO: 453625 - RNA, 22 nt, Human
gggcugcuuauacugaugauaa

SEQ ID NO: 453626 - RNA, 22 nt, Human
ucaguguaaguuauguagaugu

SEQ ID NO: 453627 - RNA, 22 nt, Human
accugcaggggugcucucuggg

SEQ ID NO: 453628 - RNA, 22 nt, Human
acagagaugcaaguguguauuu

SEQ ID NO: 453629 - RNA, 22 nt, Human
aacuagaacgucuaguugcugg

SEQ ID NO: 453630 - RNA, 22 nt, Human
uccagugguuugaaaggggugu

SEQ ID NO: 453631 - RNA, 22 nt, Human
aaggcuuuugggaauuuucaac

SEQ ID NO: 453632 - RNA, 22 nt, Human
cagcugccacaggacuuucuga

SEQ ID NO: 453633 - RNA, 22 nt, Human
aucauaaagugcuaucugauug

SEQ ID NO: 453634 - RNA, 22 nt, Human
agacaaagacagcaucucaggu

SEQ ID NO: 453635 - RNA, 22 nt, Human
gguuccccaggcggcccuugga

SEQ ID NO: 453636 - RNA, 22 nt, Human
gccuccuggccuuugcuccuca

SEQ ID NO: 453637 - RNA, 22 nt, Human
ugagccuggguggucgaggcug

SEQ ID NO: 453638 - RNA, 22 nt, Human
gggcugagcuaagcuggguuga

SEQ ID NO: 453639 - RNA, 22 nt, Human
guguggcuaccucagaggagca

SEQ ID NO: 453640 - RNA, 22 nt, Human
augaggcaguacacacaaagcc

SEQ ID NO: 453641 - RNA, 22 nt, Human
ugagugaggaagcgguggagga

SEQ ID NO: 453642 - RNA, 22 nt, Human
agcagcuguacuuucaucuguu

SEQ ID NO: 453643 - RNA, 22 nt, Human
gcagugguggagcuuacauauc

SEQ ID NO: 453644 - RNA, 22 nt, Human
uauguacauggagagcaauuga

SEQ ID NO: 453645 - RNA, 22 nt, Human
uaaggucauggugaauaauaag

SEQ ID NO: 453646 - RNA, 22 nt, Human
acacauuucucuuuuuguaagu

SEQ ID NO: 453647 - RNA, 21 nt, Human
ccuggcagaagccugauaugc

SEQ ID NO: 453648 - RNA, 22 nt, Human
ucagagugaggcgucaacauga

SEQ ID NO: 453649 - RNA, 22 nt, Human
gauggggaugagaagugagcag

SEQ ID NO: 453650 - RNA, 22 nt, Human
ggaggccuagccagcuccaguu

SEQ ID NO: 453651 - RNA, 22 nt, Human
ucagaccauccugcuguuagug

SEQ ID NO: 453652 - RNA, 22 nt, Human
uuucacaaugcaauccuacuuc

SEQ ID NO: 453653 - RNA, 22 nt, Human
cugagguggaacagaggugaag

SEQ ID NO: 453654 - RNA, 22 nt, Human
ggcucugggucuguggggagcg

SEQ ID NO: 453655 - RNA, 22 nt, Human
ucaggagagaaagaauacaauu

SEQ ID NO: 453656 - RNA, 22 nt, Human
ccugccuggaucagccauccug

SEQ ID NO: 453657 - RNA, 22 nt, Human
caggcagauuugcugcccucca

SEQ ID NO: 453658 - RNA, 22 nt, Human
uaaaugcaaugugcuuuaccag

SEQ ID NO: 453659 - RNA, 22 nt, Human
guuugcauaaaguggaugcagg

SEQ ID NO: 453660 - RNA, 19 nt, Human
ggaugagggucaggcauag

SEQ ID NO: 453661 - RNA, 22 nt, Human
agcaccaucagaugcaauaucu

SEQ ID NO: 453662 - RNA, 22 nt, Human
uggugcugauaauggcaggauu

SEQ ID NO: 453663 - RNA, 22 nt, Human
acaaguggguccuacauaaagc

SEQ ID NO: 453664 - RNA, 22 nt, Human
uaugacaagguggaguaugagu

SEQ ID NO: 453665 - RNA, 22 nt, Human
gucccagaaacauauugcuggu

SEQ ID NO: 453666 - RNA, 22 nt, Human
cacagacccagaagggaugaag

SEQ ID NO: 453667 - RNA, 22 nt, Human
ugcagggccuuguugaugugcu

SEQ ID NO: 453668 - RNA, 18 nt, Human
ucugucuguacaaguauc

SEQ ID NO: 453669 - RNA, 22 nt, Human
aaauguguuucuuugugaaugg

SEQ ID NO: 453670 - RNA, 22 nt, Human
guugaaagcuuuucauuuaguu

SEQ ID NO: 453671 - RNA, 22 nt, Human
cacccuagcugucauuucaguu

SEQ ID NO: 453672 - RNA, 22 nt, Human
uuuugucuaagaacuuugcaaa

SEQ ID NO: 453673 - RNA, 22 nt, Human
uuauguacucugcaauguuuga

SEQ ID NO: 453674 - RNA, 22 nt, Human
uuagaaacccagacucuuaggu

SEQ ID NO: 453675 - RNA, 22 nt, Human
ccagaggaugcuggucagccuc

SEQ ID NO: 453676 - RNA, 19 nt, Human
uagucuuuauucuuaauuu

SEQ ID NO: 453677 - RNA, 22 nt, Human
aggugaguuacaggaggagguc

SEQ ID NO: 453678 - RNA, 20 nt, Human
ccacaggaguccagucgacc

SEQ ID NO: 453679 - RNA, 22 nt, Human
caguucagcuagaagaaacaaa

SEQ ID NO: 453680 - RNA, 22 nt, Human
uaaguuuaaauguacaugaagc

SEQ ID NO: 453681 - RNA, 22 nt, Human
uugcagaggcaaaaaugaacuc

SEQ ID NO: 453682 - RNA, 22 nt, Human
uaggcaggcugaauguagauuu

SEQ ID NO: 453683 - RNA, 22 nt, Human
gagcagugguugaacagaggca

SEQ ID NO: 453684 - RNA, 22 nt, Human
uguggcagcuggagguggagaa

SEQ ID NO: 453685 - RNA, 18 nt, Human
acaaauguagugucuuaa

SEQ ID NO: 453686 - RNA, 20 nt, Human
gagggcucguggauggauaa

SEQ ID NO: 453687 - RNA, 22 nt, Human
ccagggcaaaugagaucauagc

SEQ ID NO: 453688 - RNA, 22 nt, Human
uuuagggaagaagcccauggcc

SEQ ID NO: 453689 - RNA, 22 nt, Human
uugcagcagggugaauucacuc

SEQ ID NO: 453690 - RNA, 22 nt, Human
cucuugggagugcucuggagaa

SEQ ID NO: 453691 - RNA, 19 nt, Human
uugaaauuguuugauaugg

SEQ ID NO: 453692 - RNA, 22 nt, Human
acagaauucuaguauguggcuu

SEQ ID NO: 453693 - RNA, 22 nt, Human
ugguggcuucugaggauggcga

SEQ ID NO: 453694 - RNA, 21 nt, Human
cagagguggccugaccucuga

SEQ ID NO: 453695 - RNA, 22 nt, Human
ccagagcagggcagcagggcuc

SEQ ID NO: 453696 - RNA, 22 nt, Human
ucccacugugccuguuguaauc

SEQ ID NO: 453697 - RNA, 22 nt, Human
guccuggggauuauagaguguu

SEQ ID NO: 453698 - RNA, 22 nt, Human
ccugcucagccccagcucaccc

SEQ ID NO: 453699 - RNA, 22 nt, Human
gaggcccaggucaagcagccac

SEQ ID NO: 453700 - RNA, 22 nt, Human
uacuguacucaacaugugaguu

SEQ ID NO: 453701 - RNA, 22 nt, Human
gugcuugggggaaguaacagac

SEQ ID NO: 453702 - RNA, 22 nt, Human
uagaggcauuaaugaauaaaca

SEQ ID NO: 453703 - RNA, 22 nt, Human
cagaagucacccucagaauaac

SEQ ID NO: 453704 - RNA, 22 nt, Human
caccugagcacuggggccgccc

SEQ ID NO: 453705 - RNA, 22 nt, Human
ccagcuccuucugucuguggag

SEQ ID NO: 453706 - RNA, 22 nt, Human
gccucucucuacccaguaugau

SEQ ID NO: 453707 - RNA, 22 nt, Human
acauguggucaaucuguguagg

SEQ ID NO: 453708 - RNA, 22 nt, Human
guauuuauaggggaaugagagu

SEQ ID NO: 453709 - RNA, 22 nt, Human
gcagagguggcaucugggcucu

SEQ ID NO: 453710 - RNA, 22 nt, Human
gagagcuguccggcugagcagc

SEQ ID NO: 453711 - RNA, 22 nt, Human
cacugaaggacaguaggaaggg

SEQ ID NO: 453712 - RNA, 22 nt, Human
gcagcuuugucacggagugucg

SEQ ID NO: 453713 - RNA, 22 nt, Human
uuugcaaauauguguuucuauu

SEQ ID NO: 453714 - RNA, 22 nt, Human
agaggggcucauauccugucau

SEQ ID NO: 453715 - RNA, 22 nt, Human
acagugucugacacauuguagc

SEQ ID NO: 453716 - RNA, 22 nt, Human
aacaaagucguugccuagaaga

SEQ ID NO: 453717 - RNA, 22 nt, Human
aaacuuuaagacaguccucaag

SEQ ID NO: 453718 - RNA, 22 nt, Human
guuguauucuucaauaucagag

SEQ ID NO: 453719 - RNA, 22 nt, Human
gggcugagacgauggggucuuc

SEQ ID NO: 453720 - RNA, 22 nt, Human
uuggaaggugagucccuggguu

SEQ ID NO: 453721 - RNA, 22 nt, Human
agggucugacuccucuggcaag

SEQ ID NO: 453722 - RNA, 22 nt, Human
acagcagcuaaccccugggcca

SEQ ID NO: 453723 - RNA, 23 nt, Human
gucagggcuggggucagagugac

SEQ ID NO: 453724 - RNA, 22 nt, Human
cacucuccagcacaccccauuu

SEQ ID NO: 453725 - RNA, 22 nt, Human
acccuggacuggggcugaggcu

SEQ ID NO: 453726 - RNA, 22 nt, Human
aagcagccagccaucaugcccg

SEQ ID NO: 453727 - RNA, 22 nt, Human
uagcauuucccaaaugcauuug

SEQ ID NO: 453728 - RNA, 22 nt, Human
gcugucugagaacaugguggaa

SEQ ID NO: 453729 - RNA, 22 nt, Human
cuccagcugccaccagauguuu

SEQ ID NO: 453730 - RNA, 22 nt, Human
gagugcaggccugagcaccauc

SEQ ID NO: 453731 - RNA, 22 nt, Human
acauacuuaacauuaaagucau

SEQ ID NO: 453732 - RNA, 23 nt, Human
uggaccugaaccagugccucugu

SEQ ID NO: 453733 - RNA, 22 nt, Human
ugcuuuauuggaaccucauccu

SEQ ID NO: 453734 - RNA, 22 nt, Human
aagccaggcugcacuugcuggg

SEQ ID NO: 453735 - RNA, 20 nt, Human
cagcucugggaaagaggcca

SEQ ID NO: 453736 - RNA, 22 nt, Human
uccagggguaccggccaggcag

SEQ ID NO: 453737 - RNA, 22 nt, Human
ucugaaaguaucuggaucuuuu

SEQ ID NO: 453738 - RNA, 22 nt, Human
ugugcuucaucacuucucaguu

SEQ ID NO: 453739 - RNA, 22 nt, Human
uuucaaugacacaaaagagaaa

SEQ ID NO: 453740 - RNA, 22 nt, Human
cacagcuuccauuagaaugaga

SEQ ID NO: 453741 - RNA, 22 nt, Human
acuggcaguuugagaaugcauu

SEQ ID NO: 453742 - RNA, 22 nt, Human
uggagcugagaaguggagcucu

SEQ ID NO: 453743 - RNA, 22 nt, Human
cuggugagacgguugacaggag

SEQ ID NO: 453744 - RNA, 22 nt, Human
aucugacaaccuauugacuuga

SEQ ID NO: 453745 - RNA, 22 nt, Human
cugcccuguuuggacagcccgg

SEQ ID NO: 453746 - RNA, 17 nt, Human
agcugagcuggccaggg

SEQ ID NO: 453747 - RNA, 22 nt, Human
cuacuucugugaugaaacuaca

SEQ ID NO: 453748 - RNA, 22 nt, Human
agcugcucuuugaaggacacuu

SEQ ID NO: 453749 - RNA, 22 nt, Human
gccuaggaguacagaaugguuu

SEQ ID NO: 453750 - RNA, 22 nt, Human
cauugcacuccacccuaggcaa

SEQ ID NO: 453751 - RNA, 22 nt, Human
cgggcagugcccagcggggcag

SEQ ID NO: 453752 - RNA, 18 nt, Human
ugcucuggucucacuugg

SEQ ID NO: 453753 - RNA, 22 nt, Human
uucacauuggugauauguuucu

SEQ ID NO: 453754 - RNA, 22 nt, Human
gagggagugccagagggccagc

SEQ ID NO: 453755 - RNA, 22 nt, Human
auccugugcaaugacugcaucu

SEQ ID NO: 453756 - RNA, 22 nt, Human
ccugagggcgccgagcucccag

SEQ ID NO: 453757 - RNA, 22 nt, Human
ggcaaaaaccgcaauaacuucu

SEQ ID NO: 453758 - RNA, 22 nt, Human
acugaaggucucagcaaggaug

SEQ ID NO: 453759 - RNA, 22 nt, Human
aaauuuaagaagugugugcgug

SEQ ID NO: 453760 - RNA, 22 nt, Human
gaguggggucugggcaucaguc

SEQ ID NO: 453761 - RNA, 22 nt, Human
uggcuggcaaggcuggagucag

SEQ ID NO: 453762 - RNA, 22 nt, Human
auaaauuuauaauuguuuccug

SEQ ID NO: 453763 - RNA, 22 nt, Human
ccugugccauccugagcauccc

SEQ ID NO: 453764 - RNA, 22 nt, Human
gagggccagcagccucagcaug

SEQ ID NO: 453765 - RNA, 22 nt, Human
gaaggagggugcggaucugagc

SEQ ID NO: 453766 - RNA, 22 nt, Human
agcuucuggaagccuggcagca

SEQ ID NO: 453767 - RNA, 18 nt, Human
cccagccucuccuuucua

SEQ ID NO: 453768 - RNA, 22 nt, Human
uucacagacauugcagacugaa

SEQ ID NO: 453769 - RNA, 22 nt, Human
guggcuugaccaucccugcuac

SEQ ID NO: 453770 - RNA, 22 nt, Human
agucucugcacaguaagaagca

SEQ ID NO: 453771 - RNA, 22 nt, Human
cugaguccagggacagaggcgu

SEQ ID NO: 453772 - RNA, 22 nt, Human
aggugcagcugacaccaugugg

SEQ ID NO: 453773 - RNA, 22 nt, Human
uguacaguauauuucaaagcca

SEQ ID NO: 453774 - RNA, 22 nt, Human
agcugcccugggucuugcugcu

SEQ ID NO: 453775 - RNA, 22 nt, Human
aaggcucucugauggcagcagu

SEQ ID NO: 453776 - RNA, 22 nt, Human
gaaauugucagcuucuuucagu

SEQ ID NO: 453777 - RNA, 22 nt, Human
aguauguauuuuauacuuacag

SEQ ID NO: 453778 - RNA, 22 nt, Human
cuguggcugcagccuugguccu

SEQ ID NO: 453779 - RNA, 23 nt, Human
agccucuuuucuccugcccugca

SEQ ID NO: 453780 - RNA, 22 nt, Human
gaggggcugcccuggugucagg

SEQ ID NO: 453781 - RNA, 22 nt, Human
gcugucacucaccaggccugca

SEQ ID NO: 453782 - RNA, 22 nt, Human
uacaguucacaguaucauaaau

SEQ ID NO: 453783 - RNA, 22 nt, Human
ggggcacacuuuugguagauau

SEQ ID NO: 453784 - RNA, 22 nt, Human
gagagcuggccagcuucaguau

SEQ ID NO: 453785 - RNA, 22 nt, Human
ugaggccucuugguauggugug

SEQ ID NO: 453786 - RNA, 22 nt, Human
ggacagcccauacacaugucug

SEQ ID NO: 453787 - RNA, 22 nt, Human
acuuccugcuaugagcuucugu

SEQ ID NO: 453788 - RNA, 22 nt, Human
ucagucuccuuuccucuagaca

SEQ ID NO: 453789 - RNA, 22 nt, Human
aaagagcccuuccaugacucuu

SEQ ID NO: 453790 - RNA, 22 nt, Human
acugggaguucuccaugucccu

SEQ ID NO: 453791 - RNA, 22 nt, Human
uauucacauucucaggccuggu

SEQ ID NO: 453792 - RNA, 22 nt, Human
cuccucuggaaauuccucugcc

SEQ ID NO: 453793 - RNA, 22 nt, Human
cugucuccuccacugcauggga

SEQ ID NO: 453794 - RNA, 22 nt, Human
uugaggaguguuuagggugagg

SEQ ID NO: 453795 - RNA, 22 nt, Human
gggcaggaugcaguuucagaga

SEQ ID NO: 453796 - RNA, 22 nt, Human
ucugucacugagcucaggauuc

SEQ ID NO: 453797 - RNA, 22 nt, Human
aggucauugaaguuauuuucuu

SEQ ID NO: 453798 - RNA, 22 nt, Human
accucugcuucccggguucaag

SEQ ID NO: 453799 - RNA, 22 nt, Human
gcuggagcuugagaggacaggg

SEQ ID NO: 453800 - RNA, 22 nt, Human
ugaggccucauuuagggagagg

SEQ ID NO: 453801 - RNA, 22 nt, Human
aaaugguguuucuaaugcuaga

SEQ ID NO: 453802 - RNA, 23 nt, Human
ugcugguguuuuugggaccaggg

SEQ ID NO: 453803 - RNA, 22 nt, Human
ucaugaaaauagaucagaaauu

SEQ ID NO: 453804 - RNA, 22 nt, Human
gggaggagugaagauucaccug

SEQ ID NO: 453805 - RNA, 22 nt, Human
agccucugcacgggcacgggug

SEQ ID NO: 453806 - RNA, 22 nt, Human
gacacagagauaggccuguguu

SEQ ID NO: 453807 - RNA, 22 nt, Human
aggaccugagaguuggaaaucc

SEQ ID NO: 453808 - RNA, 22 nt, Human
aaaugcagcagcuaauugaaaa

SEQ ID NO: 453809 - RNA, 18 nt, Human
ugaauuaguuugugguuu

SEQ ID NO: 453810 - RNA, 22 nt, Human
gccuucagcccugacuggccag

SEQ ID NO: 453811 - RNA, 22 nt, Human
cuggggaggcagggcugccccu

SEQ ID NO: 453812 - RNA, 22 nt, Human
aggaagccugcaggugacugcu

SEQ ID NO: 453813 - RNA, 22 nt, Human
uauuacaguucgaguuucuagg

SEQ ID NO: 453814 - RNA, 19 nt, Human
ccucuccgcccaccagccc

SEQ ID NO: 453815 - RNA, 22 nt, Human
acaaacuaccuacagauguuca

SEQ ID NO: 453816 - RNA, 22 nt, Human
cugccuguuagucuagcaguua

SEQ ID NO: 453817 - RNA, 22 nt, Human
caguacuuugcaucauuccacu

SEQ ID NO: 453818 - RNA, 22 nt, Human
ugggcugccggcaggcucugcc

SEQ ID NO: 453819 - RNA, 22 nt, Human
cuuaagaauauugaaguugugg

SEQ ID NO: 453820 - RNA, 22 nt, Human
auccaaaccuggacaugagugg

SEQ ID NO: 453821 - RNA, 20 nt, Human
cagcccuccaguggaggcag

SEQ ID NO: 453822 - RNA, 22 nt, Human
gcucccaccuccagccugaguu

SEQ ID NO: 453823 - RNA, 22 nt, Human
aagugacacauggcacuucuau

SEQ ID NO: 453824 - RNA, 18 nt, Human
gugcugugggcaguggcc

SEQ ID NO: 453825 - RNA, 22 nt, Human
agggccuggaacugugggcagg

SEQ ID NO: 453826 - RNA, 22 nt, Human
uccaggcagagcaacaaaauau

SEQ ID NO: 453827 - RNA, 22 nt, Human
ggaggccaaggaggagcuugcc

SEQ ID NO: 453828 - RNA, 22 nt, Human
cgagcaugaugacggcuguggc

SEQ ID NO: 453829 - RNA, 22 nt, Human
cagagagcaugggaggcccgag

SEQ ID NO: 453830 - RNA, 22 nt, Human
ccagcugcccaagaggcauccu

SEQ ID NO: 453831 - RNA, 22 nt, Human
guggccuggaaaggcuggucug

SEQ ID NO: 453832 - RNA, 22 nt, Human
aggagcugcauggauaccuggu

SEQ ID NO: 453833 - RNA, 22 nt, Human
ggugugccuggggcuuagcugc

SEQ ID NO: 453834 - RNA, 18 nt, Human
ggcuuugcugggguuucu

SEQ ID NO: 453835 - RNA, 22 nt, Human
acuuuggguaagccaggugcua

SEQ ID NO: 453836 - RNA, 22 nt, Human
acucacauuucaucaggccaag

SEQ ID NO: 453837 - RNA, 19 nt, Human
agacaaguuuccagaagcc

SEQ ID NO: 453838 - RNA, 22 nt, Human
gcugcugugugggagacaggcg

SEQ ID NO: 453839 - RNA, 21 nt, Human
ucucacaauaugaugccagau

SEQ ID NO: 453840 - RNA, 22 nt, Human
cugcugugugaccauggacagg

SEQ ID NO: 453841 - RNA, 22 nt, Human
cagggcucccucuggcucccag

SEQ ID NO: 453842 - RNA, 22 nt, Human
uggcucagcaagacauugaccu

SEQ ID NO: 453843 - RNA, 22 nt, Human
ugaccaaagaguugcuuguauu

SEQ ID NO: 453844 - RNA, 22 nt, Human
cuggagggggaaauguucauug

SEQ ID NO: 453845 - RNA, 22 nt, Human
uucugucacuuaggaggucaua

SEQ ID NO: 453846 - RNA, 20 nt, Human
guggccuguccuguuguggg

SEQ ID NO: 453847 - RNA, 22 nt, Human
aagaauguucuuguagucauga

SEQ ID NO: 453848 - RNA, 22 nt, Human
agacuucucaguuuuauuagua

SEQ ID NO: 453849 - RNA, 22 nt, Human
aaagucaaaaugcucuccuguc

SEQ ID NO: 453850 - RNA, 17 nt, Human
gccuggcccagccuggc

SEQ ID NO: 453851 - RNA, 22 nt, Human
auguacauuuguaguaauauca

SEQ ID NO: 453852 - RNA, 22 nt, Human
gcucccagaaccaaggcugggg

SEQ ID NO: 453853 - RNA, 22 nt, Human
uggagaagucaaagugaacagg

SEQ ID NO: 453854 - RNA, 19 nt, Human
aggaaagguggccuuagca

SEQ ID NO: 453855 - RNA, 22 nt, Human
ugaaaucuuagccauucugccu

SEQ ID NO: 453856 - RNA, 22 nt, Human
cagcagcccacgcgugcugucc

SEQ ID NO: 453857 - RNA, 22 nt, Human
uccuggagggaggcggugcuac

SEQ ID NO: 453858 - RNA, 23 nt, Human
aagcuuccuucacgucuccuggg

SEQ ID NO: 453859 - RNA, 22 nt, Human
acacuucuauucccugcacaaa

SEQ ID NO: 453860 - RNA, 22 nt, Human
aggggaggagcuuuucuugccu

SEQ ID NO: 453861 - RNA, 22 nt, Human
ggcgaggccgggacaggcugga

SEQ ID NO: 453862 - RNA, 22 nt, Human
auggcucauuuaucuugcagcc

SEQ ID NO: 453863 - RNA, 22 nt, Human
uaugugcaguuugcucuuaaca

SEQ ID NO: 453864 - RNA, 22 nt, Human
cacagggcaggccccaggccuc

SEQ ID NO: 453865 - RNA, 22 nt, Human
caggggccaggcugucugcugu

SEQ ID NO: 453866 - RNA, 22 nt, Human
cugccugugugugccugcagaa

SEQ ID NO: 453867 - RNA, 22 nt, Human
ugcuauaagaauuauauuacuc

SEQ ID NO: 453868 - RNA, 22 nt, Human
acauuuaaauaccuauguuucu

SEQ ID NO: 453869 - RNA, 19 nt, Human
gcucugugaugcugagggg

SEQ ID NO: 453870 - RNA, 22 nt, Human
gccuggaguacuccuugaagug

SEQ ID NO: 453871 - RNA, 20 nt, Human
cugggcagguguuugaucuc

SEQ ID NO: 453872 - RNA, 22 nt, Human
ccagugcaggugagcaccaggu

SEQ ID NO: 453873 - RNA, 23 nt, Human
acagagguccaaacaguauaagc

SEQ ID NO: 453874 - RNA, 21 nt, Human
aaggcagaagcauggaaugag

SEQ ID NO: 453875 - RNA, 20 nt, Human
agccaggcucaagcuccccc

SEQ ID NO: 453876 - RNA, 22 nt, Human
agggggugcuacuuccagaguu

SEQ ID NO: 453877 - RNA, 22 nt, Human
aaaggccaagcaugagguggac

SEQ ID NO: 453878 - RNA, 22 nt, Human
aggagucagauaugggaaaguu

SEQ ID NO: 453879 - RNA, 22 nt, Human
aaggccagccugagagcuaaca

SEQ ID NO: 453880 - RNA, 23 nt, Human
gcucagagguuuuucucuggaug

SEQ ID NO: 453881 - RNA, 21 nt, Human
gccucugcugucuuauuguga

SEQ ID NO: 453882 - RNA, 22 nt, Human
gaggcucaguuauuuuagccug

SEQ ID NO: 453883 - RNA, 22 nt, Human
aagagccagugggaaagucuug

SEQ ID NO: 453884 - RNA, 22 nt, Human
ucugccuuggcaaccacagcuu

SEQ ID NO: 453885 - RNA, 22 nt, Human
uggccagguguggguucucaga

SEQ ID NO: 453886 - RNA, 22 nt, Human
guacaaaguggaccugauagua

SEQ ID NO: 453887 - RNA, 22 nt, Human
gcagcuggugcaaaugucacuc

SEQ ID NO: 453888 - RNA, 22 nt, Human
gucagugucuuaacagagauua

SEQ ID NO: 453889 - RNA, 22 nt, Human
gagggcucugucuggaagggaa

SEQ ID NO: 453890 - RNA, 22 nt, Human
aggcacugugcagucccaagca

SEQ ID NO: 453891 - RNA, 22 nt, Human
gaggagguuccggguggagaag

SEQ ID NO: 453892 - RNA, 23 nt, Human
gcagauggccccagagugcugcc

SEQ ID NO: 453893 - RNA, 22 nt, Human
agcugagcauuugauccaccuc

SEQ ID NO: 453894 - RNA, 22 nt, Human
aggcccugcuuuccagagcuca

SEQ ID NO: 453895 - RNA, 22 nt, Human
cuugaaagaagggucuuuuaau

SEQ ID NO: 453896 - RNA, 22 nt, Human
agcuggcagagcauuuguggcc

SEQ ID NO: 453897 - RNA, 22 nt, Human
auguucuguuuuguaauucaua

SEQ ID NO: 453898 - RNA, 22 nt, Human
accucccagcucugagcuuggg

SEQ ID NO: 453899 - RNA, 22 nt, Human
agcugagccagcagcaacagga

SEQ ID NO: 453900 - RNA, 22 nt, Human
uggcugagggggcucugcucag

SEQ ID NO: 453901 - RNA, 22 nt, Human
gggcaugagaggcaggcaagug

SEQ ID NO: 453902 - RNA, 22 nt, Human
gaugcugagagguggagggaac

SEQ ID NO: 453903 - RNA, 22 nt, Human
cucucagacugaagggccugug

SEQ ID NO: 453904 - RNA, 22 nt, Human
uuagccauugucagcacauggc

SEQ ID NO: 453905 - RNA, 22 nt, Human
acguuuucuagagaauaugcag

SEQ ID NO: 453906 - RNA, 22 nt, Human
agcugacugaugaagaggccuu

SEQ ID NO: 453907 - RNA, 22 nt, Human
agacuuugagcucuuagagaag

SEQ ID NO: 453908 - RNA, 22 nt, Human
gugggccucuugaggguggcua

SEQ ID NO: 453909 - RNA, 18 nt, Human
cagucccaaaccuuagga

SEQ ID NO: 453910 - RNA, 22 nt, Human
auguccaguuucuacacacaua

SEQ ID NO: 453911 - RNA, 22 nt, Human
gaguggagaucgugccacugca

SEQ ID NO: 453912 - RNA, 22 nt, Human
uuuacucuugcuacacaacugu

SEQ ID NO: 453913 - RNA, 22 nt, Human
uagcuuuagaaauauucucaga

SEQ ID NO: 453914 - RNA, 22 nt, Human
cggcugaggaucuccaggccug

SEQ ID NO: 453915 - RNA, 22 nt, Human
ugcugcuccugccuggcuccca

SEQ ID NO: 453916 - RNA, 22 nt, Human
acagugucaugucguguucccc

SEQ ID NO: 453917 - RNA, 22 nt, Human
aagggcugaaagaccuugggca

SEQ ID NO: 453918 - RNA, 22 nt, Human
uaaagucaucuuuacaucuuug

SEQ ID NO: 453919 - RNA, 22 nt, Human
ggcucagguuaccagucccucc

SEQ ID NO: 453920 - RNA, 22 nt, Human
acagggcaugugcaagagacau

SEQ ID NO: 453921 - RNA, 23 nt, Human
uagagcagggaaaucugucagag

SEQ ID NO: 453922 - RNA, 22 nt, Human
uagcacaucuggcgcuuauagg

SEQ ID NO: 453923 - RNA, 22 nt, Human
agcaggaaggcuuuggggguuc

SEQ ID NO: 453924 - RNA, 20 nt, Human
cugugcuuuggaaccuggaa

SEQ ID NO: 453925 - RNA, 20 nt, Human
caggcacacucauuccugcu

SEQ ID NO: 453926 - RNA, 22 nt, Human
agcugggcagacugcagugguu

SEQ ID NO: 453927 - RNA, 22 nt, Human
aggguagggcccggagacagac

SEQ ID NO: 453928 - RNA, 21 nt, Human
gaaaagcaagggaguagaaca

SEQ ID NO: 453929 - RNA, 22 nt, Human
uggcucagcagguuagaaacua

SEQ ID NO: 453930 - RNA, 22 nt, Human
caaggccagggaauuuuucugg

SEQ ID NO: 453931 - RNA, 22 nt, Human
uuuuccucuguuauuaguguga

SEQ ID NO: 453932 - RNA, 22 nt, Human
agggaagagcuugcaagaaacc

SEQ ID NO: 453933 - RNA, 23 nt, Human
uuucauaugguguggaugaagaa

SEQ ID NO: 453934 - RNA, 22 nt, Human
aggcuggaguacaguggcuauu

SEQ ID NO: 453935 - RNA, 22 nt, Human
gagagcuguguucauucuacca

SEQ ID NO: 453936 - RNA, 22 nt, Human
gaggcagcagggcugguuccuu

SEQ ID NO: 453937 - RNA, 22 nt, Human
ucagggcaaagggcagaguuug

SEQ ID NO: 453938 - RNA, 22 nt, Human
agauguggccggcuagggagag

SEQ ID NO: 453939 - RNA, 22 nt, Human
ccacacagggggaugaguuauu

SEQ ID NO: 453940 - RNA, 22 nt, Human
gcuggggagcuagaccucagca

SEQ ID NO: 453941 - RNA, 22 nt, Human
gaauccaggguuguuugagcua

SEQ ID NO: 453942 - RNA, 22 nt, Human
gcagcaggcuuuucauaccuug

SEQ ID NO: 453943 - RNA, 22 nt, Human
aauuagggagccaucauaaggu

SEQ ID NO: 453944 - RNA, 16 nt, Human
uggaaggggucuccgg

SEQ ID NO: 453945 - RNA, 22 nt, Human
cucaguuucuucauauuguagg

SEQ ID NO: 453946 - RNA, 22 nt, Human
ccucaggggugcccacagcugc

SEQ ID NO: 453947 - RNA, 22 nt, Human
uuuccucuccggggccuccagg

SEQ ID NO: 453948 - RNA, 22 nt, Human
gagggcucugaaaggaggucac

SEQ ID NO: 453949 - RNA, 23 nt, Human
agcaauaagaagggauacaugug

SEQ ID NO: 453950 - RNA, 22 nt, Human
cuuuauuagauguagacuuucu

SEQ ID NO: 453951 - RNA, 22 nt, Human
agcaguggcugaagauguuccu

SEQ ID NO: 453952 - RNA, 22 nt, Human
uuuuuccuagcgauuugucagc

SEQ ID NO: 453953 - RNA, 21 nt, Human
acagcagacaggcuuaggacc

SEQ ID NO: 453954 - RNA, 23 nt, Human
gggauauggaccuuggaggaguc

SEQ ID NO: 453955 - RNA, 22 nt, Human
ucuucagagacucugagccccu

SEQ ID NO: 453956 - RNA, 22 nt, Human
acagaaugcguagugcauguug

SEQ ID NO: 453957 - RNA, 22 nt, Human
uagucccauuuugagguauuug

SEQ ID NO: 453958 - RNA, 22 nt, Human
gaacagcuucuugggagcuggg

SEQ ID NO: 453959 - RNA, 22 nt, Human
cucauggauauaagaacuguuu

SEQ ID NO: 453960 - RNA, 22 nt, Human
auuaaauuaaguggcuaauuua

SEQ ID NO: 453961 - RNA, 22 nt, Human
ugggacagagugagcuuuggcc

SEQ ID NO: 453962 - RNA, 22 nt, Human
uuaacauuguccuuagcagauu

SEQ ID NO: 453963 - RNA, 21 nt, Human
ccacauucucauucugacugc

SEQ ID NO: 453964 - RNA, 22 nt, Human
uugaaagucacaauggcauuaa

SEQ ID NO: 453965 - RNA, 22 nt, Human
uuacaguuuaguccaagccaga

SEQ ID NO: 453966 - RNA, 21 nt, Human
gcagcaguguucuagaauacu

SEQ ID NO: 453967 - RNA, 22 nt, Human
uaaugcuucaauuuccuugauu

SEQ ID NO: 453968 - RNA, 22 nt, Human
cugagccagggccacacaugga

SEQ ID NO: 453969 - RNA, 22 nt, Human
uuucuaaaugguggcugcauug

SEQ ID NO: 453970 - RNA, 22 nt, Human
ugauucacagacuucacaaggc

SEQ ID NO: 453971 - RNA, 22 nt, Human
ccaaagucuggagcagcagagc

SEQ ID NO: 453972 - RNA, 21 nt, Human
auggagucaggggaaugggcc

SEQ ID NO: 453973 - RNA, 22 nt, Human
ucagaggagaaguugggaaaau

SEQ ID NO: 453974 - RNA, 20 nt, Human
uucuggaggcuacaagucug

SEQ ID NO: 453975 - RNA, 22 nt, Human
ugaugauguuuaucuugguauu

SEQ ID NO: 453976 - RNA, 22 nt, Human
gagggcugcugccagauaugcc

SEQ ID NO: 453977 - RNA, 22 nt, Human
acacugugagcugaagggcugc

SEQ ID NO: 453978 - RNA, 22 nt, Human
agugaaaucagguuuugacugc

SEQ ID NO: 453979 - RNA, 22 nt, Human
agaauuagucacaauuauagga

SEQ ID NO: 453980 - RNA, 22 nt, Human
agcagagccagaauuggaccag

SEQ ID NO: 453981 - RNA, 22 nt, Human
ugucccuggaacuauggcucca

SEQ ID NO: 453982 - RNA, 22 nt, Human
aggaagugcuaagagaacauca

SEQ ID NO: 453983 - RNA, 21 nt, Human
ugccagcauuaaacagucauu

SEQ ID NO: 453984 - RNA, 22 nt, Human
caguggaaaucagagugagagu

SEQ ID NO: 453985 - RNA, 19 nt, Human
ggcugucuggcguguggau

SEQ ID NO: 453986 - RNA, 22 nt, Human
cagaggccauauuucuucacuc

SEQ ID NO: 453987 - RNA, 22 nt, Human
gagcuguccgccccugggccga

SEQ ID NO: 453988 - RNA, 22 nt, Human
agguggagacccagagaaggcg

SEQ ID NO: 453989 - RNA, 22 nt, Human
ugaguaauaaacugucuugcuc

SEQ ID NO: 453990 - RNA, 22 nt, Human
aggguggccaugagggagagau

SEQ ID NO: 453991 - RNA, 22 nt, Human
uggcuccaucauccaugcaaga

SEQ ID NO: 453992 - RNA, 22 nt, Human
cuggggugugcucagagcaggg

SEQ ID NO: 453993 - RNA, 22 nt, Human
agcagggcagcugaugcgcacg

SEQ ID NO: 453994 - RNA, 22 nt, Human
cugcugugcacccaggaaggcu

SEQ ID NO: 453995 - RNA, 22 nt, Human
ugccugaugcaggaguaucaga

SEQ ID NO: 453996 - RNA, 22 nt, Human
gcagugcuuuagucuguccuuu

SEQ ID NO: 453997 - RNA, 22 nt, Human
cccagguggguuggccucuguc

SEQ ID NO: 453998 - RNA, 22 nt, Human
cuggcagcuucaggacacucgg

SEQ ID NO: 453999 - RNA, 22 nt, Human
cacuuaagcaguuaauuuaucu

SEQ ID NO: 454000 - RNA, 22 nt, Human
aaaggucaagcuggacucaggu

SEQ ID NO: 454001 - RNA, 22 nt, Human
ugaaggaaugaguauacuguuu

SEQ ID NO: 454002 - RNA, 22 nt, Human
caggcagagugagguggucuaa

SEQ ID NO: 454003 - RNA, 22 nt, Human
uguaugcaccauuguauuaccu

SEQ ID NO: 454004 - RNA, 22 nt, Human
ugacaggcagugcugggcaugu

SEQ ID NO: 454005 - RNA, 22 nt, Human
gagcucaggagcaucagaagaa

SEQ ID NO: 454006 - RNA, 22 nt, Human
aaaugcauugguuucuacuugu

SEQ ID NO: 454007 - RNA, 22 nt, Human
agcagcugagaugguaagauuc

SEQ ID NO: 454008 - RNA, 22 nt, Human
gcaggcugugaggcucagaugg

SEQ ID NO: 454009 - RNA, 22 nt, Human
gcagaagcccggucagcgcacg

SEQ ID NO: 454010 - RNA, 22 nt, Human
cagccagugguugaagaugcag

SEQ ID NO: 454011 - RNA, 22 nt, Human
aagggcuguaagccaaguaaag

SEQ ID NO: 454012 - RNA, 21 nt, Human
gccaaggggguagcuauuccu

SEQ ID NO: 454013 - RNA, 22 nt, Human
ucagaagcaggagugugcacaa

SEQ ID NO: 454014 - RNA, 22 nt, Human
agcugcagucaagcugggccac

SEQ ID NO: 454015 - RNA, 22 nt, Human
uagcuaucuguguccagaucca

SEQ ID NO: 454016 - RNA, 22 nt, Human
uuuugagauggugucucgcucc

SEQ ID NO: 454017 - RNA, 22 nt, Human
ugacauuuaucuucuacaauga

SEQ ID NO: 454018 - RNA, 22 nt, Human
aggauccuuuuucugcuguuug

SEQ ID NO: 454019 - RNA, 19 nt, Human
uccugcagguggcuugcag

SEQ ID NO: 454020 - RNA, 22 nt, Human
ugucagaggcucagggucucag

SEQ ID NO: 454021 - RNA, 22 nt, Human
ugagagugaaaugucacauguc

SEQ ID NO: 454022 - RNA, 22 nt, Human
agcugcagcguucauuuuucca

SEQ ID NO: 454023 - RNA, 22 nt, Human
gaaauguguuguucauuucuaa

SEQ ID NO: 454024 - RNA, 22 nt, Human
acaaagcuagagaagagaauug

SEQ ID NO: 454025 - RNA, 22 nt, Human
agacuguaauuuguggccuccu

SEQ ID NO: 454026 - RNA, 22 nt, Human
ugcagggcuccuggcuccaauc

SEQ ID NO: 454027 - RNA, 22 nt, Human
ccaggcuuucccagccucucca

SEQ ID NO: 454028 - RNA, 22 nt, Human
gagauguacaauguguauuaau

SEQ ID NO: 454029 - RNA, 22 nt, Human
agaggggcucaagcaguggucu

SEQ ID NO: 454030 - RNA, 22 nt, Human
aggggcagccucacaauccucu

SEQ ID NO: 454031 - RNA, 22 nt, Human
ggagaccagaaggaagcuucga

SEQ ID NO: 454032 - RNA, 22 nt, Human
gcacggcuaauuuuuguauuuu

SEQ ID NO: 454033 - RNA, 22 nt, Human
agcagcuggugagcaagcucag

SEQ ID NO: 454034 - RNA, 22 nt, Human
gcagcuguggguuccaagucua

SEQ ID NO: 454035 - RNA, 22 nt, Human
gagaaagggauaauuugaagag

SEQ ID NO: 454036 - RNA, 22 nt, Human
cagccagugugaccgaggagga

SEQ ID NO: 454037 - RNA, 22 nt, Human
aaguggagccagggaaacugaa

SEQ ID NO: 454038 - RNA, 22 nt, Human
acaaagucacaauaauuaaccu

SEQ ID NO: 454039 - RNA, 22 nt, Human
uccuuugguuguagacaggaau

SEQ ID NO: 454040 - RNA, 22 nt, Human
aagugacaccucuucccuuucc

SEQ ID NO: 454041 - RNA, 22 nt, Human
uaugcacagaaguuugcugaau

SEQ ID NO: 454042 - RNA, 22 nt, Human
agucucugugagcucccaaugg

SEQ ID NO: 454043 - RNA, 21 nt, Human
uggcugccuacaugcugcagg

SEQ ID NO: 454044 - RNA, 18 nt, Human
ccagagcuggcuccucgc

SEQ ID NO: 454045 - RNA, 22 nt, Human
ucacuuuugaucccuaugcagu

SEQ ID NO: 454046 - RNA, 22 nt, Human
aggcucagugauguaaaauaua

SEQ ID NO: 454047 - RNA, 22 nt, Human
aaucaguuaaauauugaguaca

SEQ ID NO: 454048 - RNA, 22 nt, Human
agauuucacaugcugcucuauu

SEQ ID NO: 454049 - RNA, 22 nt, Human
cauuuauugaguggccacagug

SEQ ID NO: 454050 - RNA, 22 nt, Human
aaaggccacacugcucuuucuc

SEQ ID NO: 454051 - RNA, 22 nt, Human
gccaccagccccaugcgcugug

SEQ ID NO: 454052 - RNA, 22 nt, Human
uccuggcccuguggccugcagu

SEQ ID NO: 454053 - RNA, 22 nt, Human
gcucuccaaacccuguggcuuu

SEQ ID NO: 454054 - RNA, 20 nt, Human
gcugaagauucccaugcaag

SEQ ID NO: 454055 - RNA, 22 nt, Human
gggggucccaagcugggcugcu

SEQ ID NO: 454056 - RNA, 22 nt, Human
gugggcugcccuugaggucagc

SEQ ID NO: 454057 - RNA, 22 nt, Human
agugugaccuuauuuggaaaca

SEQ ID NO: 454058 - RNA, 22 nt, Human
cuguauuuaguuaaaaugcuaa

SEQ ID NO: 454059 - RNA, 22 nt, Human
gcugccaguguggcaugaugca

SEQ ID NO: 454060 - RNA, 22 nt, Human
aucuggcucaccuggguaaaua

SEQ ID NO: 454061 - RNA, 22 nt, Human
guacucucuugaaggccuuucu

SEQ ID NO: 454062 - RNA, 17 nt, Human
uggacccuugggccucc

SEQ ID NO: 454063 - RNA, 22 nt, Human
ugucuuuagccagcagucuucu

SEQ ID NO: 454064 - RNA, 22 nt, Human
cccagcacaggcaauuccauac

SEQ ID NO: 454065 - RNA, 22 nt, Human
aaggcacugagccagccgucuc

SEQ ID NO: 454066 - RNA, 22 nt, Human
aaaagacauaugugggcauucu

SEQ ID NO: 454067 - RNA, 22 nt, Human
gagguacaugaggauacacagg

SEQ ID NO: 454068 - RNA, 22 nt, Human
ugagaguauuuuggcauuauca

SEQ ID NO: 454069 - RNA, 22 nt, Human
agugaaaugauucugagcaaga

SEQ ID NO: 454070 - RNA, 19 nt, Human
uuuacucuccaaggugagu

SEQ ID NO: 454071 - RNA, 22 nt, Human
ggccaggccaagaggguuggaa

SEQ ID NO: 454072 - RNA, 22 nt, Human
cugagggcccugaagcuuggca

SEQ ID NO: 454073 - RNA, 22 nt, Human
agcagcuguggaaaaguaacua

SEQ ID NO: 454074 - RNA, 22 nt, Human
uaccugcagcgggaauccauua

SEQ ID NO: 454075 - RNA, 22 nt, Human
aagaugauagaucugucaaugu

SEQ ID NO: 454076 - RNA, 22 nt, Human
cagagcuggcggugagaagaca

SEQ ID NO: 454077 - RNA, 22 nt, Human
ucacaucucccuggaggacaca

SEQ ID NO: 454078 - RNA, 22 nt, Human
ugaaugauacagaauuauguag

SEQ ID NO: 454079 - RNA, 22 nt, Human
uccagcagguuggucaggugca

SEQ ID NO: 454080 - RNA, 22 nt, Human
acacaugcugauaagaauauaa

SEQ ID NO: 454081 - RNA, 20 nt, Human
gaagccagaggggaaaggag

SEQ ID NO: 454082 - RNA, 23 nt, Human
cagcuuucagggcuuuagggaag

SEQ ID NO: 454083 - RNA, 22 nt, Human
gggcucagacaucccuccugga

SEQ ID NO: 454084 - RNA, 22 nt, Human
auacauacauguacacauaaau

SEQ ID NO: 454085 - RNA, 22 nt, Human
uucuggagagaaaccuuacaaa

SEQ ID NO: 454086 - RNA, 22 nt, Human
aguauguagugcaaucagucag

SEQ ID NO: 454087 - RNA, 22 nt, Human
aagcugccugggaggaagggcu

SEQ ID NO: 454088 - RNA, 22 nt, Human
cugugcuggagaugggccagag

SEQ ID NO: 454089 - RNA, 22 nt, Human
cuggcugguuacuauuucuggu

SEQ ID NO: 454090 - RNA, 22 nt, Human
ugaucagucccaugaucuucca

SEQ ID NO: 454091 - RNA, 22 nt, Human
ugggaccucucuugagagagca

SEQ ID NO: 454092 - RNA, 22 nt, Human
aguaaugucccuuaaauguggu

SEQ ID NO: 454093 - RNA, 22 nt, Human
acauuucuuuucaucucuauau

SEQ ID NO: 454094 - RNA, 22 nt, Human
auggauaauggugauaguugca

SEQ ID NO: 454095 - RNA, 22 nt, Human
cagaccuggaaaacaggcuugc

SEQ ID NO: 454096 - RNA, 22 nt, Human
uagauuucucauucauagauug

SEQ ID NO: 454097 - RNA, 22 nt, Human
acacaggggcucggcugggugc

SEQ ID NO: 454098 - RNA, 22 nt, Human
uucuuugcccuuaaugaaauaa

SEQ ID NO: 454099 - RNA, 22 nt, Human
gcugcccucccagggcaagcuu

SEQ ID NO: 454100 - RNA, 22 nt, Human
gucuucuguaagaugagguccc

SEQ ID NO: 454101 - RNA, 22 nt, Human
uucuucaauuauuggaaagaaa

SEQ ID NO: 454102 - RNA, 20 nt, Human
gaggcucugggcauggcgcc

SEQ ID NO: 454103 - RNA, 22 nt, Human
cagaauuuagcacaauguaugg

SEQ ID NO: 454104 - RNA, 22 nt, Human
aauuucuucagcucuaaaaugg

SEQ ID NO: 454105 - RNA, 22 nt, Human
cugcacagagcagggcagacac

SEQ ID NO: 454106 - RNA, 22 nt, Human
aacucagcauccugcacagaga

SEQ ID NO: 454107 - RNA, 22 nt, Human
cagcacugcuucgcagccaggg

SEQ ID NO: 454108 - RNA, 22 nt, Human
gcagagccugacgggauuuuuc

SEQ ID NO: 454109 - RNA, 22 nt, Human
gcuccagguauuugcccuuuua

SEQ ID NO: 454110 - RNA, 22 nt, Human
uuuuuaaugcagucugagacau

SEQ ID NO: 454111 - RNA, 22 nt, Human
aagcuggacucugccauuuacu

SEQ ID NO: 454112 - RNA, 22 nt, Human
ugguggcagcugagugucaggu

SEQ ID NO: 454113 - RNA, 22 nt, Human
cagggcuccccagagagccucu

SEQ ID NO: 454114 - RNA, 22 nt, Human
gcuuccuggagggagagagcug

SEQ ID NO: 454115 - RNA, 22 nt, Human
ucucauucauacccuacaugcu

SEQ ID NO: 454116 - RNA, 22 nt, Human
ccugggcuugcaucugugcugg

SEQ ID NO: 454117 - RNA, 22 nt, Human
agccaggccagacucacacccu

SEQ ID NO: 454118 - RNA, 22 nt, Human
gcugccugcucggcuccuggga

SEQ ID NO: 454119 - RNA, 22 nt, Human
cugccugggccggccacccucu

SEQ ID NO: 454120 - RNA, 22 nt, Human
gcaggcucuucuuucugcccag

SEQ ID NO: 454121 - RNA, 17 nt, Human
agcagaagucagaggga

SEQ ID NO: 454122 - RNA, 22 nt, Human
cuggcugcuuguagacucgacu

SEQ ID NO: 454123 - RNA, 22 nt, Human
uaaagguaugucuuaaucaaac

SEQ ID NO: 454124 - RNA, 22 nt, Human
ggcacugauaauguccucucuc

SEQ ID NO: 454125 - RNA, 18 nt, Human
cagagcagagguggagcg

SEQ ID NO: 454126 - RNA, 22 nt, Human
cagggguguuuuuggccaggag

SEQ ID NO: 454127 - RNA, 19 nt, Human
uggcucugucgaaggcaca

SEQ ID NO: 454128 - RNA, 22 nt, Human
ucucagagaagugaugagcaau

SEQ ID NO: 454129 - RNA, 22 nt, Human
uuauccaacaugacuuaugucc

SEQ ID NO: 454130 - RNA, 22 nt, Human
uccugcaguuacaucccagcca

SEQ ID NO: 454131 - RNA, 22 nt, Human
agaagccauguuuaguaggaug

SEQ ID NO: 454132 - RNA, 22 nt, Human
uagaugaccuuguguuaggcaa

SEQ ID NO: 454133 - RNA, 22 nt, Human
agcagggcagguaaggaucaga

SEQ ID NO: 454134 - RNA, 22 nt, Human
cccucuggcucuucucaggccg

SEQ ID NO: 454135 - RNA, 22 nt, Human
uaaaugcaagugcuccugggag

SEQ ID NO: 454136 - RNA, 22 nt, Human
auugaaagauuuugggcucaug

SEQ ID NO: 454137 - RNA, 22 nt, Human
ccaggagccugggccaggcugg

SEQ ID NO: 454138 - RNA, 22 nt, Human
ugaaggugaaugucuaugggga

SEQ ID NO: 454139 - RNA, 22 nt, Human
agcuuuaccugccuuggggcac

SEQ ID NO: 454140 - RNA, 18 nt, Human
uggcucugcagccagaug

SEQ ID NO: 454141 - RNA, 22 nt, Human
gcagaggggaagcugaggaauu

SEQ ID NO: 454142 - RNA, 22 nt, Human
auauuauucuaguaacagugau

SEQ ID NO: 454143 - RNA, 22 nt, Human
guuagaaacacauucuuauuga

SEQ ID NO: 454144 - RNA, 22 nt, Human
cugggcagugguggcccuuccc

SEQ ID NO: 454145 - RNA, 22 nt, Human
cugucccaggagcuguaagaca

SEQ ID NO: 454146 - RNA, 22 nt, Human
uccugccuuagagcaaggaaaa

SEQ ID NO: 454147 - RNA, 22 nt, Human
cugagagguaagcagcgcagug

SEQ ID NO: 454148 - RNA, 22 nt, Human
cucuggacagcaggugcugugg

SEQ ID NO: 454149 - RNA, 23 nt, Human
ucugcucugaaguucggcugagc

SEQ ID NO: 454150 - RNA, 22 nt, Human
auacaagaucacuccagaaaau

SEQ ID NO: 454151 - RNA, 22 nt, Human
gagugguaggcaguguuaggaa

SEQ ID NO: 454152 - RNA, 22 nt, Human
ugucucugcuuuccuugcaggg

SEQ ID NO: 454153 - RNA, 22 nt, Human
ugcagggcuauaacuccauucu

SEQ ID NO: 454154 - RNA, 22 nt, Human
gcagggccagggcucaggcugu

SEQ ID NO: 454155 - RNA, 22 nt, Human
aagggugggcaccgccagguca

SEQ ID NO: 454156 - RNA, 22 nt, Human
uucuuucccaguagaugugaaa

SEQ ID NO: 454157 - RNA, 22 nt, Human
gggccagagcuuggcagcuggg

SEQ ID NO: 454158 - RNA, 22 nt, Human
aaaugcacugaacacauguugu

SEQ ID NO: 454159 - RNA, 22 nt, Human
uuugaaagcuacuuucggguca

SEQ ID NO: 454160 - RNA, 22 nt, Human
ugagcccaggaguaugaggcug

SEQ ID NO: 454161 - RNA, 22 nt, Human
gcuccaggagagggaagcagau

SEQ ID NO: 454162 - RNA, 22 nt, Human
aagggcucgguagcaguccuga

SEQ ID NO: 454163 - RNA, 22 nt, Human
ggcccagaauacuuuguaaaau

SEQ ID NO: 454164 - RNA, 22 nt, Human
ucuggcucagggcucugaggga

SEQ ID NO: 454165 - RNA, 22 nt, Human
aguuuaugaaacacagauuuga

SEQ ID NO: 454166 - RNA, 22 nt, Human
gaauucugguuuugaaaugaau

SEQ ID NO: 454167 - RNA, 22 nt, Human
gcucccugcacucugcagcccu

SEQ ID NO: 454168 - RNA, 18 nt, Human
cucucuggucuggauccc

SEQ ID NO: 454169 - RNA, 22 nt, Human
aaaggucaaaaucgugacauug

SEQ ID NO: 454170 - RNA, 22 nt, Human
auucuguauggaaaagcacuau

SEQ ID NO: 454171 - RNA, 22 nt, Human
ugagcugggcugggcugagcug

SEQ ID NO: 454172 - RNA, 22 nt, Human
aggcacaguggcucacaccugu

SEQ ID NO: 454173 - RNA, 22 nt, Human
aguucacauuccgagguacugg

SEQ ID NO: 454174 - RNA, 18 nt, Human
ugacagaaccuggagccu

SEQ ID NO: 454175 - RNA, 22 nt, Human
agaagggccagcuggacaccug

SEQ ID NO: 454176 - RNA, 21 nt, Human
uaaaucucuguauucuucagu

SEQ ID NO: 454177 - RNA, 22 nt, Human
ugugacaugugucaucuuuucu

SEQ ID NO: 454178 - RNA, 22 nt, Human
aacaaccaaaaagaugaaugua

SEQ ID NO: 454179 - RNA, 22 nt, Human
ugaaaucuuauacuuugguagu

SEQ ID NO: 454180 - RNA, 22 nt, Human
aggcagagcuaggaagaauugu

SEQ ID NO: 454181 - RNA, 22 nt, Human
ucagcaguuuuauaugcagcuu

SEQ ID NO: 454182 - RNA, 22 nt, Human
gaaggccaguuuugagauaggu

SEQ ID NO: 454183 - RNA, 17 nt, Human
gcugcagcgguaggcag

SEQ ID NO: 454184 - RNA, 22 nt, Human
gaaccucagugaaacuggaggu

SEQ ID NO: 454185 - RNA, 22 nt, Human
uggagccagcccaggccccucu

SEQ ID NO: 454186 - RNA, 22 nt, Human
cagagccacuuggagaugagaa

SEQ ID NO: 454187 - RNA, 23 nt, Human
ucaguuuuggcuguucaguguug

SEQ ID NO: 454188 - RNA, 22 nt, Human
gagugcaguaugagaggcugcu

SEQ ID NO: 454189 - RNA, 22 nt, Human
acccugccgugggcugcuugug

SEQ ID NO: 454190 - RNA, 22 nt, Human
ccaggaagcggugagggcugcc

SEQ ID NO: 454191 - RNA, 22 nt, Human
aagauuuccuucaguagagcua

SEQ ID NO: 454192 - RNA, 23 nt, Human
ugggaguguugggaucucugcuc

SEQ ID NO: 454193 - RNA, 19 nt, Human
gaucuuugccaauuuaagc

SEQ ID NO: 454194 - RNA, 22 nt, Human
agggcagaaauauugauacugu

SEQ ID NO: 454195 - RNA, 22 nt, Human
acaggcuggugguccuggccau

SEQ ID NO: 454196 - RNA, 22 nt, Human
gugcauguuaaugguguacaaa

SEQ ID NO: 454197 - RNA, 22 nt, Human
gggcagguuggcaucccgggca

SEQ ID NO: 454198 - RNA, 22 nt, Human
ccuuccaggagucucugcaggu

SEQ ID NO: 454199 - RNA, 22 nt, Human
agaaauguacgauguuaugcag

SEQ ID NO: 454200 - RNA, 21 nt, Human
aauaaaacaguuggugucaau

SEQ ID NO: 454201 - RNA, 22 nt, Human
uccugccuguuuaccuguacuu

SEQ ID NO: 454202 - RNA, 22 nt, Human
ccagcccugccagagagagcug

SEQ ID NO: 454203 - RNA, 22 nt, Human
cagguccccuccccuaccaggc

SEQ ID NO: 454204 - RNA, 22 nt, Human
cagagccugccucuggcugugg

SEQ ID NO: 454205 - RNA, 22 nt, Human
gacccuguuucuacaaauaauu

SEQ ID NO: 454206 - RNA, 22 nt, Human
auguagcaugaggcacugugcc

SEQ ID NO: 454207 - RNA, 22 nt, Human
acccagccuacaaagcucaccu

SEQ ID NO: 454208 - RNA, 21 nt, Human
ucaggggcuguguuuuccauc

SEQ ID NO: 454209 - RNA, 22 nt, Human
uggugugggcguggcaggcaag

SEQ ID NO: 454210 - RNA, 22 nt, Human
caugcuuugggucagaaaugcc

SEQ ID NO: 454211 - RNA, 22 nt, Human
uacauaaugagcuaguuaaguu

SEQ ID NO: 454212 - RNA, 22 nt, Human
gcucugucaacagcuagcugug

SEQ ID NO: 454213 - RNA, 22 nt, Human
uuucauaauacuguacaugaaa

SEQ ID NO: 454214 - RNA, 22 nt, Human
augaugguaaauucaguauccg

SEQ ID NO: 454215 - RNA, 22 nt, Human
cagcuccuauuagacacugaau

SEQ ID NO: 454216 - RNA, 22 nt, Human
agcaggugaauuccuggaugug

SEQ ID NO: 454217 - RNA, 22 nt, Human
acccaggagguggaggcugcag

SEQ ID NO: 454218 - RNA, 22 nt, Human
agcucccagaagccagagucgg

SEQ ID NO: 454219 - RNA, 18 nt, Human
gggcaagcggcugucacc

SEQ ID NO: 454220 - RNA, 22 nt, Human
gcaaagucucaagacccaagug

SEQ ID NO: 454221 - RNA, 22 nt, Human
aggagcugaagucucugcacuc

SEQ ID NO: 454222 - RNA, 22 nt, Human
guguaaggugaaaucaacaaau

SEQ ID NO: 454223 - RNA, 22 nt, Human
ugucucugaacagcuuacuaaa

SEQ ID NO: 454224 - RNA, 22 nt, Human
gcgaaaaauguguaaauauguu

SEQ ID NO: 454225 - RNA, 22 nt, Human
uggcagagcccagaacugagca

SEQ ID NO: 454226 - RNA, 22 nt, Human
agcagggcucacauuaguggau

SEQ ID NO: 454227 - RNA, 22 nt, Human
auguaacaggugaagcucugag

SEQ ID NO: 454228 - RNA, 22 nt, Human
gcccucagaggacagcugacuu

SEQ ID NO: 454229 - RNA, 22 nt, Human
aguuacaaccaugacacaagca

SEQ ID NO: 454230 - RNA, 22 nt, Human
agagugggugaucucuguuguc

SEQ ID NO: 454231 - RNA, 22 nt, Human
aucacugucgucaucugagauu

SEQ ID NO: 454232 - RNA, 22 nt, Human
cagccucuaagcacagccucuc

SEQ ID NO: 454233 - RNA, 20 nt, Human
gccagcacagggagcaguuc

SEQ ID NO: 454234 - RNA, 22 nt, Human
agucaguggcuccgagccuggu

SEQ ID NO: 454235 - RNA, 22 nt, Human
gaagaagcaggaguguguagca

SEQ ID NO: 454236 - RNA, 22 nt, Human
ggcuguccuuggccaaggcacu

SEQ ID NO: 454237 - RNA, 22 nt, Human
aggcaucugaguuugcaagcuu

SEQ ID NO: 454238 - RNA, 22 nt, Human
caggaaauaucuccuggcagag

SEQ ID NO: 454239 - RNA, 22 nt, Human
ccacccuggacaggccucugag

SEQ ID NO: 454240 - RNA, 22 nt, Human
cagcaugguggagcugcucuuu

SEQ ID NO: 454241 - RNA, 22 nt, Human
uuucucaaggugucauguauuu

SEQ ID NO: 454242 - RNA, 22 nt, Human
aagggagacaguugugugagga

SEQ ID NO: 454243 - RNA, 22 nt, Human
ggcucuggugcccuggcuccca

SEQ ID NO: 454244 - RNA, 22 nt, Human
acauguguauagccuguauaga

SEQ ID NO: 454245 - RNA, 21 nt, Human
acagauuuuauaucucugcug

SEQ ID NO: 454246 - RNA, 22 nt, Human
gcuuccugucccucagccauga

SEQ ID NO: 454247 - RNA, 23 nt, Human
agccagggcacugguggagauug

SEQ ID NO: 454248 - RNA, 22 nt, Human
ccaccagcagugugcaaggauu

SEQ ID NO: 454249 - RNA, 22 nt, Human
aauguguauacuggcaauuaag

SEQ ID NO: 454250 - RNA, 22 nt, Human
acugauacaucuguggaagugg

SEQ ID NO: 454251 - RNA, 22 nt, Human
uagaaagcuugggguguuuaaa

SEQ ID NO: 454252 - RNA, 22 nt, Human
cccaggaccgcgcggcugagcg

SEQ ID NO: 454253 - RNA, 22 nt, Human
uaagacaugguugaucuagugu

SEQ ID NO: 454254 - RNA, 22 nt, Human
uagagcuauuuagagcauuuua

SEQ ID NO: 454255 - RNA, 22 nt, Human
gcagggcaucccugagcgggug

SEQ ID NO: 454256 - RNA, 22 nt, Human
aggcugugcaauuaggguaaga

SEQ ID NO: 454257 - RNA, 22 nt, Human
uaugaagauauaucugaucucu

SEQ ID NO: 454258 - RNA, 22 nt, Human
caggaaugacccaacaguuuca

SEQ ID NO: 454259 - RNA, 22 nt, Human
uucugucugauggugccagaac

SEQ ID NO: 454260 - RNA, 22 nt, Human
uuuccucuucuggcaggcaggg

SEQ ID NO: 454261 - RNA, 20 nt, Human
acaggagaucugaggaaagg

SEQ ID NO: 454262 - RNA, 22 nt, Human
auucccaucgucaacuucacug

SEQ ID NO: 454263 - RNA, 22 nt, Human
gcucugcuggaaguucucugga

SEQ ID NO: 454264 - RNA, 22 nt, Human
gugccagggaguggaggagcuu

SEQ ID NO: 454265 - RNA, 22 nt, Human
caaggccugccucuggcagaaa

SEQ ID NO: 454266 - RNA, 22 nt, Human
cugugcuucgcaacuccaaggu

SEQ ID NO: 454267 - RNA, 17 nt, Human
agugacuuggaaagagc

SEQ ID NO: 454268 - RNA, 22 nt, Human
ucagagaguuggaaagaauuaa

SEQ ID NO: 454269 - RNA, 22 nt, Human
gcugccucccccauggcuggaa

SEQ ID NO: 454270 - RNA, 22 nt, Human
ggccucugccccagccacaccu

SEQ ID NO: 454271 - RNA, 20 nt, Human
ugaagcagccuugauucugu

SEQ ID NO: 454272 - RNA, 22 nt, Human
aucaggaagaagaauguguugg

SEQ ID NO: 454273 - RNA, 22 nt, Human
agaauccugaugaaaaggagag

SEQ ID NO: 454274 - RNA, 22 nt, Human
aaggcacuguacuaguuaguua

SEQ ID NO: 454275 - RNA, 22 nt, Human
agagcuguuuggacaucugagu

SEQ ID NO: 454276 - RNA, 22 nt, Human
gugucccaaagauuagaaauca

SEQ ID NO: 454277 - RNA, 22 nt, Human
uuacaguauuguuaaacucuuu

SEQ ID NO: 454278 - RNA, 22 nt, Human
ucugccuggauuccauucucca

SEQ ID NO: 454279 - RNA, 22 nt, Human
ucucagagaacaguuggugcuu

SEQ ID NO: 454280 - RNA, 22 nt, Human
uugugucugggggagugacauc

SEQ ID NO: 454281 - RNA, 22 nt, Human
accugccuauggagccacaugg

SEQ ID NO: 454282 - RNA, 22 nt, Human
ccacacagucaguuuccaagaa

SEQ ID NO: 454283 - RNA, 22 nt, Human
uacaaagagguaauugcauaua

SEQ ID NO: 454284 - RNA, 22 nt, Human
ccaggacuucgaggcuacagug

SEQ ID NO: 454285 - RNA, 22 nt, Human
gagaggagucccuaucacaguu

SEQ ID NO: 454286 - RNA, 22 nt, Human
ugagccugcugucgcuggaccc

SEQ ID NO: 454287 - RNA, 22 nt, Human
aggucaaggccaaaagaguggu

SEQ ID NO: 454288 - RNA, 22 nt, Human
gccugggugaauuugauccuaa

SEQ ID NO: 454289 - RNA, 22 nt, Human
ucccagaguuuccuguguccca

SEQ ID NO: 454290 - RNA, 22 nt, Human
acugccuugucucuugccuguu

SEQ ID NO: 454291 - RNA, 23 nt, Human
agggcugaugccauugcagcucu

SEQ ID NO: 454292 - RNA, 22 nt, Human
uugggacagaaaaggagaagau

SEQ ID NO: 454293 - RNA, 22 nt, Human
gaaaucugcuucuugcauagua

SEQ ID NO: 454294 - RNA, 22 nt, Human
cugcagagcauaaaucugaaua

SEQ ID NO: 454295 - RNA, 22 nt, Human
cccaggcugaguuagagguguc

SEQ ID NO: 454296 - RNA, 22 nt, Human
gcuggccaggugcuuugguucu

SEQ ID NO: 454297 - RNA, 22 nt, Human
ucccaggaucugagggcagaga

SEQ ID NO: 454298 - RNA, 22 nt, Human
agucugucagucauucuaacaa

SEQ ID NO: 454299 - RNA, 22 nt, Human
gugagggcagcuuggucagugu

SEQ ID NO: 454300 - RNA, 22 nt, Human
ucagaacagaagaaggaacacg

SEQ ID NO: 454301 - RNA, 22 nt, Human
aggaggccccuccuggguugcu

SEQ ID NO: 454302 - RNA, 22 nt, Human
cugggaggcccacguugggaag

SEQ ID NO: 454303 - RNA, 22 nt, Human
gaugaagccugacuucucggug

SEQ ID NO: 454304 - RNA, 22 nt, Human
uggaggcauaggccugggcccu

SEQ ID NO: 454305 - RNA, 22 nt, Human
gcagauggaaagugcuugaggg

SEQ ID NO: 454306 - RNA, 23 nt, Human
uggccugcagaguuucugcuggg

SEQ ID NO: 454307 - RNA, 22 nt, Human
gaggcagcaucuauggugggaa

SEQ ID NO: 454308 - RNA, 22 nt, Human
agcaggaguguccccuggcugu

SEQ ID NO: 454309 - RNA, 22 nt, Human
gaaaucugaacaacagcuguca

SEQ ID NO: 454310 - RNA, 22 nt, Human
ccugccugcagaaaguaucucc

SEQ ID NO: 454311 - RNA, 22 nt, Human
gccaggcagagccccgugcagc

SEQ ID NO: 454312 - RNA, 22 nt, Human
ugggcaaguaucggacucugag

SEQ ID NO: 454313 - RNA, 22 nt, Human
cccugcagaucagugagaacuu

SEQ ID NO: 454314 - RNA, 22 nt, Human
ucacaugcuugaggaaagaaaa

SEQ ID NO: 454315 - RNA, 22 nt, Human
gccagcaguauguccuggcagu

SEQ ID NO: 454316 - RNA, 22 nt, Human
cuuggcagagggcugggcucag

SEQ ID NO: 454317 - RNA, 22 nt, Human
agcuucuggaaggcaaggcuug

SEQ ID NO: 454318 - RNA, 22 nt, Human
cuuacagagaagaaaauguagu

SEQ ID NO: 454319 - RNA, 22 nt, Human
gagggcugaagauuguggcccc

SEQ ID NO: 454320 - RNA, 22 nt, Human
ggaagccaugagggacaguucu

SEQ ID NO: 454321 - RNA, 22 nt, Human
uacauuuauaaggcuucucugu

SEQ ID NO: 454322 - RNA, 22 nt, Human
auacagaagaacuauagccacu

SEQ ID NO: 454323 - RNA, 22 nt, Human
agccaggcgcaguggcuuaugc

SEQ ID NO: 454324 - RNA, 22 nt, Human
ggaggccaaggagggcggauca

SEQ ID NO: 454325 - RNA, 22 nt, Human
gcauugucaaaagugguaugac

SEQ ID NO: 454326 - RNA, 22 nt, Human
agguauauauucugguccuuau

SEQ ID NO: 454327 - RNA, 22 nt, Human
cugcuguggguuaagacacugu

SEQ ID NO: 454328 - RNA, 22 nt, Human
ugugcauguauugauuuguacc

SEQ ID NO: 454329 - RNA, 21 nt, Human
ggccugaguauaggacaggcc

SEQ ID NO: 454330 - RNA, 22 nt, Human
uccaggcacgaggcccugugca

SEQ ID NO: 454331 - RNA, 22 nt, Human
gcuggugcauuagcugcaguuc

SEQ ID NO: 454332 - RNA, 22 nt, Human
ccacagggucagccacucugca

SEQ ID NO: 454333 - RNA, 22 nt, Human
ccuggugccacuagagaauguc

SEQ ID NO: 454334 - RNA, 22 nt, Human
ucuuuacacaagacaagaauaa

SEQ ID NO: 454335 - RNA, 22 nt, Human
ucucagagggaaaggccaauuu

SEQ ID NO: 454336 - RNA, 22 nt, Human
ucacaagacagaaaacauuuag

SEQ ID NO: 454337 - RNA, 21 nt, Human
gagugcaggucugaugccauc

SEQ ID NO: 454338 - RNA, 22 nt, Human
aggggugugcauccuggaggau

SEQ ID NO: 454339 - RNA, 22 nt, Human
ccagacccugcucuggggcucu

SEQ ID NO: 454340 - RNA, 22 nt, Human
acaguggagaaggcaugaggcu

SEQ ID NO: 454341 - RNA, 22 nt, Human
agcagcauagaagcugggagga

SEQ ID NO: 454342 - RNA, 22 nt, Human
ugccaggcccugugcuggaugc

SEQ ID NO: 454343 - RNA, 22 nt, Human
ggcugcagaaguacuuccggau

SEQ ID NO: 454344 - RNA, 22 nt, Human
uucaagguaugguagcugguca

SEQ ID NO: 454345 - RNA, 22 nt, Human
uuugacaaaggaaaaaugcaca

SEQ ID NO: 454346 - RNA, 22 nt, Human
ccugggugaugugcugcccucg

SEQ ID NO: 454347 - RNA, 22 nt, Human
ugucuagggagcugcucaggcu

SEQ ID NO: 454348 - RNA, 23 nt, Human
uuguuuuuagagguggcaugaga

SEQ ID NO: 454349 - RNA, 22 nt, Human
gaggcagcuuggggcugugggu

SEQ ID NO: 454350 - RNA, 22 nt, Human
uagaaacugauagucuugugcu

SEQ ID NO: 454351 - RNA, 22 nt, Human
ucauuuguugcuguuaccugag

SEQ ID NO: 454352 - RNA, 21 nt, Human
ugaaaguuggagucaaaugua

SEQ ID NO: 454353 - RNA, 22 nt, Human
cacagggcagguacucucagag

SEQ ID NO: 454354 - RNA, 22 nt, Human
uguaugugcuugagaagguggg

SEQ ID NO: 454355 - RNA, 22 nt, Human
ugggcugcuguuacaggggcug

SEQ ID NO: 454356 - RNA, 22 nt, Human
ucauuuauaaggaugcaauuaa

SEQ ID NO: 454357 - RNA, 22 nt, Human
uccucugcuccaucuuuacugu

SEQ ID NO: 454358 - RNA, 23 nt, Human
uauuacaauuggucuuauuaaga

SEQ ID NO: 454359 - RNA, 22 nt, Human
gagccuggauugaagugggugg

SEQ ID NO: 454360 - RNA, 18 nt, Human
ggcugagguugacuagaa

SEQ ID NO: 454361 - RNA, 22 nt, Human
cagggccacuguagaugaggag

SEQ ID NO: 454362 - RNA, 22 nt, Human
auggaagguccuacagagcgca

SEQ ID NO: 454363 - RNA, 22 nt, Human
acacagccaggguaguaaggcu

SEQ ID NO: 454364 - RNA, 22 nt, Human
auaccuuuuagacauguaguug

SEQ ID NO: 454365 - RNA, 22 nt, Human
agagauaugaguaguugugaca

SEQ ID NO: 454366 - RNA, 22 nt, Human
ugcagaagcugcaggucagugg

SEQ ID NO: 454367 - RNA, 22 nt, Human
ccaggccuuucuucuuggucug

SEQ ID NO: 454368 - RNA, 22 nt, Human
ccaaaguccuuucuccaccugc

SEQ ID NO: 454369 - RNA, 22 nt, Human
cacagcuggggaagcugaggcc

SEQ ID NO: 454370 - RNA, 22 nt, Human
gaggcauaaaucacaguguuca

SEQ ID NO: 454371 - RNA, 22 nt, Human
cucucuggaagggggagcugau

SEQ ID NO: 454372 - RNA, 22 nt, Human
guuggccugaauggucaagagg

SEQ ID NO: 454373 - RNA, 22 nt, Human
agggcucugagcuggaccaccu

SEQ ID NO: 454374 - RNA, 22 nt, Human
uaguggagguggucugugaacu

SEQ ID NO: 454375 - RNA, 22 nt, Human
augaggcaaggcuggccguguu

SEQ ID NO: 454376 - RNA, 22 nt, Human
aagccagccagugccagucuua

SEQ ID NO: 454377 - RNA, 22 nt, Human
ugggaccaagucauuucuuuag

SEQ ID NO: 454378 - RNA, 22 nt, Human
cagccacguagcccuuggccgu

SEQ ID NO: 454379 - RNA, 22 nt, Human
ucugucacccagagugcagugg

SEQ ID NO: 454380 - RNA, 22 nt, Human
uggacagcgaaagugccuggga

SEQ ID NO: 454381 - RNA, 22 nt, Human
aauuugcaugaugagaacaaua

SEQ ID NO: 454382 - RNA, 22 nt, Human
agccuggauucgugcauccaca

SEQ ID NO: 454383 - RNA, 22 nt, Human
uggaugcuguaggacacgcucu

SEQ ID NO: 454384 - RNA, 22 nt, Human
agaauuguugggguaauaaaag

SEQ ID NO: 454385 - RNA, 22 nt, Human
aggugccagaugcacagcugaa

SEQ ID NO: 454386 - RNA, 22 nt, Human
aagaacagauucagccugaacu

SEQ ID NO: 454387 - RNA, 22 nt, Human
gggcaugguggugcacaccugu

SEQ ID NO: 454388 - RNA, 22 nt, Human
uugauuucuuacucuuccaagg

SEQ ID NO: 454389 - RNA, 22 nt, Human
gaaggagagagacaucgucccu

SEQ ID NO: 454390 - RNA, 20 nt, Human
uccagggcuagggagcucau

SEQ ID NO: 454391 - RNA, 22 nt, Human
acagcagccuuguugguuucga

SEQ ID NO: 454392 - RNA, 22 nt, Human
uagccgcuuaauuauuugguga

SEQ ID NO: 454393 - RNA, 20 nt, Human
ggcucuggaaucuggugggc

SEQ ID NO: 454394 - RNA, 22 nt, Human
auuccaaacagugcugcagacu

SEQ ID NO: 454395 - RNA, 22 nt, Human
acuaagugauucuaagcaucuu

SEQ ID NO: 454396 - RNA, 22 nt, Human
uuagugucuucuucauccucug

SEQ ID NO: 454397 - RNA, 22 nt, Human
uauguguacaucugguugagca

SEQ ID NO: 454398 - RNA, 22 nt, Human
augucuuucuuauggucuguug

SEQ ID NO: 454399 - RNA, 22 nt, Human
auccaaagcccuaaguuaacug

SEQ ID NO: 454400 - RNA, 22 nt, Human
aggacucaucccugcuugucag

SEQ ID NO: 454401 - RNA, 22 nt, Human
ccagggcauguccaagacuuag

SEQ ID NO: 454402 - RNA, 22 nt, Human
uggagaagauuggucaccauuc

SEQ ID NO: 454403 - RNA, 22 nt, Human
auccugggcagugugucacucu

SEQ ID NO: 454404 - RNA, 22 nt, Human
agaggugacauaggagaggcuc

SEQ ID NO: 454405 - RNA, 22 nt, Human
ucugaggcuaagagacagaggc

SEQ ID NO: 454406 - RNA, 20 nt, Human
ucucccaggcucagggaaga

SEQ ID NO: 454407 - RNA, 22 nt, Human
ugguuugcccacucgagugauu

SEQ ID NO: 454408 - RNA, 22 nt, Human
ugccaggcgauugcuaucagca

SEQ ID NO: 454409 - RNA, 22 nt, Human
cagagcugagucuucaagguug

SEQ ID NO: 454410 - RNA, 22 nt, Human
ugcuuuauguuaucagaagggu

SEQ ID NO: 454411 - RNA, 23 nt, Human
uuugaaaguaucaacucgccuga

SEQ ID NO: 454412 - RNA, 22 nt, Human
ugccucugaggaagauuguguu

SEQ ID NO: 454413 - RNA, 22 nt, Human
caagggcucacggucugcuggg

SEQ ID NO: 454414 - RNA, 22 nt, Human
uggaggaauaacagcaaccuua

SEQ ID NO: 454415 - RNA, 20 nt, Human
cagucccaauccagggccag

SEQ ID NO: 454416 - RNA, 22 nt, Human
cugaggaguuuggguuguucaa

SEQ ID NO: 454417 - RNA, 22 nt, Human
guaaucucagcuacuugggagg

SEQ ID NO: 454418 - RNA, 22 nt, Human
acugugugcccugacgccaggg

SEQ ID NO: 454419 - RNA, 22 nt, Human
ggagcugcuccuucagccaagu

SEQ ID NO: 454420 - RNA, 22 nt, Human
ggggcuggcucacuaagagacu

SEQ ID NO: 454421 - RNA, 22 nt, Human
acagaguacauucagagacuau

SEQ ID NO: 454422 - RNA, 22 nt, Human
cagagacagggcagggagugug

SEQ ID NO: 454423 - RNA, 19 nt, Human
ggcucucuuaaagcuguuu

SEQ ID NO: 454424 - RNA, 22 nt, Human
uccugguggcuuucccugccuu

SEQ ID NO: 454425 - RNA, 22 nt, Human
gcucugcugucuucuugcaggc

SEQ ID NO: 454426 - RNA, 22 nt, Human
ugggccuccaauuccagcggga

SEQ ID NO: 454427 - RNA, 22 nt, Human
acagauuuuaaaugacacuccc

SEQ ID NO: 454428 - RNA, 22 nt, Human
cagaggcucaccagccuuucac

SEQ ID NO: 454429 - RNA, 22 nt, Human
uuuagggaaauugaggguuaag

SEQ ID NO: 454430 - RNA, 22 nt, Human
cccaagggagugccuggucaac

SEQ ID NO: 454431 - RNA, 22 nt, Human
gacaagacauugguaaagauau

SEQ ID NO: 454432 - RNA, 20 nt, Human
gcaaauggaucccacaagcc

SEQ ID NO: 454433 - RNA, 22 nt, Human
uacccaggaggaaacugaggcu

SEQ ID NO: 454434 - RNA, 22 nt, Human
gaaugcuaagcaugugggaguu

SEQ ID NO: 454435 - RNA, 22 nt, Human
cagcuugcuaauuuugacuuca

SEQ ID NO: 454436 - RNA, 22 nt, Human
cagagcuguccaaacccugaca

SEQ ID NO: 454437 - RNA, 22 nt, Human
uucuaguucauauucucaaaga

SEQ ID NO: 454438 - RNA, 22 nt, Human
uuuccuuccuugcuagccugag

SEQ ID NO: 454439 - RNA, 22 nt, Human
cugccacuuucacccagugcuc

SEQ ID NO: 454440 - RNA, 22 nt, Human
cugccuggaaggagcaagggga

SEQ ID NO: 454441 - RNA, 22 nt, Human
gcucucugucguuaugcuucau

SEQ ID NO: 454442 - RNA, 22 nt, Human
gugucccacucuggaggugaag

SEQ ID NO: 454443 - RNA, 22 nt, Human
aggcucugcagaccccagcugu

SEQ ID NO: 454444 - RNA, 22 nt, Human
agcagcaggcuguguggacuga

SEQ ID NO: 454445 - RNA, 22 nt, Human
auaccuguguauccacaagcgu

SEQ ID NO: 454446 - RNA, 22 nt, Human
uuugaaaggagcuuuauccaga

SEQ ID NO: 454447 - RNA, 22 nt, Human
auuugucuuugagugcccugcu

SEQ ID NO: 454448 - RNA, 21 nt, Human
agcugcuccagggagcucagg

SEQ ID NO: 454449 - RNA, 22 nt, Human
uggcagcuugaaugcagucuuu

SEQ ID NO: 454450 - RNA, 22 nt, Human
cccuggagcaucucugcugucu

SEQ ID NO: 454451 - RNA, 22 nt, Human
uaguggaggggaugcaaagcuu

SEQ ID NO: 454452 - RNA, 20 nt, Human
uuucauugucagaaucuuau

SEQ ID NO: 454453 - RNA, 22 nt, Human
ugugaagcuggauccuggagcu

SEQ ID NO: 454454 - RNA, 22 nt, Human
gugcuuccaucuagagggucac

SEQ ID NO: 454455 - RNA, 22 nt, Human
gcagagcaguacucucuugacu

SEQ ID NO: 454456 - RNA, 22 nt, Human
ccuccagguguuacauaugacu

SEQ ID NO: 454457 - RNA, 22 nt, Human
ugucuuuucuacuguaagcaua

SEQ ID NO: 454458 - RNA, 22 nt, Human
gaggagggagcuggaagcucuu

SEQ ID NO: 454459 - RNA, 22 nt, Human
caguuuauagcucuagcagcuu

SEQ ID NO: 454460 - RNA, 21 nt, Human
aaggaaaagcuuggucucuga

SEQ ID NO: 454461 - RNA, 22 nt, Human
ugucucugugagaucugacgau

SEQ ID NO: 454462 - RNA, 22 nt, Human
ucaggccacggcucacugagac

SEQ ID NO: 454463 - RNA, 22 nt, Human
uaacagaagaugaaacuucuuu

SEQ ID NO: 454464 - RNA, 22 nt, Human
cagcucccagagugaccagcag

SEQ ID NO: 454465 - RNA, 21 nt, Human
aggaaguggccagauugggaa

SEQ ID NO: 454466 - RNA, 22 nt, Human
uucauucaucucuaaaaugccu

SEQ ID NO: 454467 - RNA, 22 nt, Human
uuucauaauagugcaguuuguu

SEQ ID NO: 454468 - RNA, 22 nt, Human
uggcugagaaguucugguggga

SEQ ID NO: 454469 - RNA, 22 nt, Human
ccagccagccuugaucugagua

SEQ ID NO: 454470 - RNA, 22 nt, Human
gccugcagcaugcuaggucuug

SEQ ID NO: 454471 - RNA, 22 nt, Human
aggcugagacugugcauuagug

SEQ ID NO: 454472 - RNA, 22 nt, Human
gcagaggcucuuuaaugcuuag

SEQ ID NO: 454473 - RNA, 22 nt, Human
agcuggagaugcccagcaccgg

SEQ ID NO: 454474 - RNA, 22 nt, Human
uuguuuucacagcuuugcccgg

SEQ ID NO: 454475 - RNA, 22 nt, Human
uuagagaaauucugguaaugua

SEQ ID NO: 454476 - RNA, 22 nt, Human
gcugagucuugagcacugagca

SEQ ID NO: 454477 - RNA, 19 nt, Human
ggcugucucggcccagcca

SEQ ID NO: 454478 - RNA, 22 nt, Human
aaaugcagauuuugaugcagca

SEQ ID NO: 454479 - RNA, 20 nt, Human
cccucugcuacacugggagc

SEQ ID NO: 454480 - RNA, 22 nt, Human
cugccucuauucacugaggcag

SEQ ID NO: 454481 - RNA, 22 nt, Human
gucaccagugcuaagaggugga

SEQ ID NO: 454482 - RNA, 22 nt, Human
ccagagccuggcaucugcauaa

SEQ ID NO: 454483 - RNA, 22 nt, Human
uccugcagagccgcccucaggu

SEQ ID NO: 454484 - RNA, 22 nt, Human
gcugaaggucucuggagagguc

SEQ ID NO: 454485 - RNA, 22 nt, Human
ccagcuggcacuguggcugccc

SEQ ID NO: 454486 - RNA, 22 nt, Human
gaggagaaagcagugauuugug

SEQ ID NO: 454487 - RNA, 22 nt, Human
ucagggcaggacaguguaggcc

SEQ ID NO: 454488 - RNA, 22 nt, Human
caaggccacguucugcaugcgg

SEQ ID NO: 454489 - RNA, 22 nt, Human
uggcagaguuggagguggaaga

SEQ ID NO: 454490 - RNA, 22 nt, Human
uggggugccgacagggagggca

SEQ ID NO: 454491 - RNA, 22 nt, Human
ugccuggguccaggccaagccu

SEQ ID NO: 454492 - RNA, 22 nt, Human
guggagacgggacagaagcuaa

SEQ ID NO: 454493 - RNA, 19 nt, Human
ugugaaagcuaguguucuu

SEQ ID NO: 454494 - RNA, 22 nt, Human
cucuggaauuaaggaagccugu

SEQ ID NO: 454495 - RNA, 22 nt, Human
cucuggccgcagcucagcucug

SEQ ID NO: 454496 - RNA, 22 nt, Human
aggcugagauagguggaucauu

SEQ ID NO: 454497 - RNA, 22 nt, Human
uuucuauuuacagugcuaggua

SEQ ID NO: 454498 - RNA, 22 nt, Human
ggccucucuccuuggcuugcag

SEQ ID NO: 454499 - RNA, 22 nt, Human
ccucuguccuggggaguggagc

SEQ ID NO: 454500 - RNA, 22 nt, Human
aaguccaguuuuuccagguggu

SEQ ID NO: 454501 - RNA, 22 nt, Human
ccugacucuggccaggccagcu

SEQ ID NO: 454502 - RNA, 22 nt, Human
gccuuccuuuuaccaccagcca

SEQ ID NO: 454503 - RNA, 22 nt, Human
ccugagugccaugagagcaccc

SEQ ID NO: 454504 - RNA, 21 nt, Human
gugucaugguugacuuuggca

SEQ ID NO: 454505 - RNA, 22 nt, Human
ugaggccugucauugucuuguu

SEQ ID NO: 454506 - RNA, 22 nt, Human
gcacagaaguaaaauacaaguc

SEQ ID NO: 454507 - RNA, 22 nt, Human
cugcugcauuccucuuuaugag

SEQ ID NO: 454508 - RNA, 22 nt, Human
agaagccaaaugccagugaccu

SEQ ID NO: 454509 - RNA, 22 nt, Human
guccacauaggaacccagcuuc

SEQ ID NO: 454510 - RNA, 22 nt, Human
uccucuggcucuuucccuagga

SEQ ID NO: 454511 - RNA, 22 nt, Human
gaaugcacacgugugugcaugc

SEQ ID NO: 454512 - RNA, 22 nt, Human
uuuguaaagucuguucugaguu

SEQ ID NO: 454513 - RNA, 22 nt, Human
ccuggagcaggagcugcagagg

SEQ ID NO: 454514 - RNA, 22 nt, Human
uuugcauugcagugguuuacag

SEQ ID NO: 454515 - RNA, 22 nt, Human
cuuccugaacaaugccaucaau

SEQ ID NO: 454516 - RNA, 22 nt, Human
uugaaagaagaagcugcgaugu

SEQ ID NO: 454517 - RNA, 22 nt, Human
cagaaggcuggcagauugagau

SEQ ID NO: 454518 - RNA, 22 nt, Human
uuugacagcuuguuacaaaguu

SEQ ID NO: 454519 - RNA, 22 nt, Human
agcuguucccucacugcaguca

SEQ ID NO: 454520 - RNA, 22 nt, Human
ccugucuggccaccagggcgau

SEQ ID NO: 454521 - RNA, 22 nt, Human
uagggacacugcucaugaguuc

SEQ ID NO: 454522 - RNA, 22 nt, Human
agaagcagcuuucaaggugauu

SEQ ID NO: 454523 - RNA, 22 nt, Human
uggccugcuuucauuugaugcu

SEQ ID NO: 454524 - RNA, 22 nt, Human
ucuacugugguccuuguaacca

SEQ ID NO: 454525 - RNA, 22 nt, Human
uccugagaugagacagugcugc

SEQ ID NO: 454526 - RNA, 22 nt, Human
cagugcagccaaggacaggcac

SEQ ID NO: 454527 - RNA, 22 nt, Human
aggaagcucggagagggcaaau

SEQ ID NO: 454528 - RNA, 22 nt, Human
gcugccagcucacucuccugag

SEQ ID NO: 454529 - RNA, 20 nt, Human
gcucccugguagaaauguuu

SEQ ID NO: 454530 - RNA, 22 nt, Human
ucuuagcauuucauaacaacug

SEQ ID NO: 454531 - RNA, 22 nt, Human
acugccaaugguaguuugaugg

SEQ ID NO: 454532 - RNA, 16 nt, Human
ccuuucucugccuucc

SEQ ID NO: 454533 - RNA, 22 nt, Human
agacaggcuuugcuguauauca

SEQ ID NO: 454534 - RNA, 22 nt, Human
guucuuaagaccacaauaaaaa

SEQ ID NO: 454535 - RNA, 22 nt, Human
auucagugugagguuuucaagu

SEQ ID NO: 454536 - RNA, 22 nt, Human
agucccuucucaaagugugcgg

SEQ ID NO: 454537 - RNA, 18 nt, Human
gacccagcagaugggcuu

SEQ ID NO: 454538 - RNA, 22 nt, Human
uuucccaaguguaaacauggca

SEQ ID NO: 454539 - RNA, 21 nt, Human
uucuuuccccagaggacuaaa

SEQ ID NO: 454540 - RNA, 22 nt, Human
uuuauugacccaaagcgagagu

SEQ ID NO: 454541 - RNA, 22 nt, Human
cuucuccucugaguccugggag

SEQ ID NO: 454542 - RNA, 22 nt, Human
gcacccaggccggcgacugcag

SEQ ID NO: 454543 - RNA, 21 nt, Human
acucaggagacuaacuauguc

SEQ ID NO: 454544 - RNA, 22 nt, Human
aucugaaagcuaggaguucuca

SEQ ID NO: 454545 - RNA, 22 nt, Human
ugcagccuugccuccucccagc

SEQ ID NO: 454546 - RNA, 20 nt, Human
ugcuuccuggccacugcggg

SEQ ID NO: 454547 - RNA, 22 nt, Human
cugcagagaauuguggggcuuc

SEQ ID NO: 454548 - RNA, 21 nt, Human
ugcagagauaucugaagcaga

SEQ ID NO: 454549 - RNA, 22 nt, Human
cugggggcaauggucagagugu

SEQ ID NO: 454550 - RNA, 22 nt, Human
ucauugcagaaauaaaggugaa

SEQ ID NO: 454551 - RNA, 22 nt, Human
ugcauuguugaugaguugaaua

SEQ ID NO: 454552 - RNA, 23 nt, Human
agaccugcaucugauaggcccug

SEQ ID NO: 454553 - RNA, 22 nt, Human
gggagccaaggagagaggccuu

SEQ ID NO: 454554 - RNA, 22 nt, Human
gaaggaaaggucucaugccuuu

SEQ ID NO: 454555 - RNA, 22 nt, Human
cuguggagcuuguggcaguggg

SEQ ID NO: 454556 - RNA, 22 nt, Human
cagccaucaguaaagacagcuu

SEQ ID NO: 454557 - RNA, 22 nt, Human
gaagccaacauuccaaguagaa

SEQ ID NO: 454558 - RNA, 22 nt, Human
ccaggacucaguggggaaaggg

SEQ ID NO: 454559 - RNA, 22 nt, Human
cuccaggccagggaaguggaca

SEQ ID NO: 454560 - RNA, 22 nt, Human
uaacagaaacagauaaguguaa

SEQ ID NO: 454561 - RNA, 22 nt, Human
cagaaguaagauuacugugagu

SEQ ID NO: 454562 - RNA, 22 nt, Human
cccagcaucccagugggcagca

SEQ ID NO: 454563 - RNA, 22 nt, Human
agccuggacagcuacggagaac

SEQ ID NO: 454564 - RNA, 22 nt, Human
ccaguuuuuccagugcuuucug

SEQ ID NO: 454565 - RNA, 22 nt, Human
aaacuguaagagaauaaacuac

SEQ ID NO: 454566 - RNA, 22 nt, Human
agcugguuagcaaucuaaguga

SEQ ID NO: 454567 - RNA, 22 nt, Human
ggguggcacaggugcagagggu

SEQ ID NO: 454568 - RNA, 22 nt, Human
uuucauguuuucuuaaauggca

SEQ ID NO: 454569 - RNA, 22 nt, Human
gcucagagauguucaguagcuu

SEQ ID NO: 454570 - RNA, 17 nt, Human
auuucacuuagcaugag

SEQ ID NO: 454571 - RNA, 22 nt, Human
cuguagcaaguuauucaauaaa

SEQ ID NO: 454572 - RNA, 22 nt, Human
caguuaaaggcccaauaucugg

SEQ ID NO: 454573 - RNA, 21 nt, Human
cucaggauggcggccuggugg

SEQ ID NO: 454574 - RNA, 22 nt, Human
augccacugacauggacaauuu

SEQ ID NO: 454575 - RNA, 22 nt, Human
cagggccaccguguuugcugcu

SEQ ID NO: 454576 - RNA, 22 nt, Human
ugccucugugugcaggugagca

SEQ ID NO: 454577 - RNA, 22 nt, Human
gagagcugcaagguagggcggg

SEQ ID NO: 454578 - RNA, 22 nt, Human
gccuggaggaauguagcugagg

SEQ ID NO: 454579 - RNA, 22 nt, Human
agacaaguucugugggucaccu

SEQ ID NO: 454580 - RNA, 22 nt, Human
auguuuaaaggguugagaaaua

SEQ ID NO: 454581 - RNA, 22 nt, Human
guguccuuuuaugugacugguu

SEQ ID NO: 454582 - RNA, 22 nt, Human
ggagaaagcuguaguggaaugu

SEQ ID NO: 454583 - RNA, 22 nt, Human
ugccagcacuucuggcugucug

SEQ ID NO: 454584 - RNA, 20 nt, Human
aggagaugauccagagucag

SEQ ID NO: 454585 - RNA, 22 nt, Human
aacauuuaugguagucauugca

SEQ ID NO: 454586 - RNA, 22 nt, Human
agggaggagaauggacuccuuc

SEQ ID NO: 454587 - RNA, 22 nt, Human
agcagggccugagugaccuaac

SEQ ID NO: 454588 - RNA, 23 nt, Human
ucacaggggccagcgcucugugg

SEQ ID NO: 454589 - RNA, 22 nt, Human
auaguggugagcugcauuuaug

SEQ ID NO: 454590 - RNA, 22 nt, Human
guggcccugucccaggccuccu

SEQ ID NO: 454591 - RNA, 22 nt, Human
gaaaaaugcuccaaaucugugg

SEQ ID NO: 454592 - RNA, 22 nt, Human
aagaauuuuccagcaugucagu

SEQ ID NO: 454593 - RNA, 22 nt, Human
ggcagcuggguuggccagaaac

SEQ ID NO: 454594 - RNA, 20 nt, Human
acaauagauuugagcaaagu

SEQ ID NO: 454595 - RNA, 22 nt, Human
cauugcuguuaauugucucuag

SEQ ID NO: 454596 - RNA, 22 nt, Human
ucucuucuugauuuucacugga

SEQ ID NO: 454597 - RNA, 22 nt, Human
ucccagagugugggcaucaagg

SEQ ID NO: 454598 - RNA, 22 nt, Human
ucccuggguccugcuugcucuc

SEQ ID NO: 454599 - RNA, 22 nt, Human
uggcagcacuagguacugagcu

SEQ ID NO: 454600 - RNA, 22 nt, Human
cacagcuggugacagagcccag

SEQ ID NO: 454601 - RNA, 20 nt, Human
cccaggagugagcagcuuua

SEQ ID NO: 454602 - RNA, 22 nt, Human
cccuggaggucagaggccuggg

SEQ ID NO: 454603 - RNA, 22 nt, Human
gcaggagcccuggcauguucuu

SEQ ID NO: 454604 - RNA, 22 nt, Human
agggaagugaaugacagauauc

SEQ ID NO: 454605 - RNA, 22 nt, Human
ugagacaguucugcagcugggu

SEQ ID NO: 454606 - RNA, 22 nt, Human
ggggcugggauuugaacccagg

SEQ ID NO: 454607 - RNA, 20 nt, Human
ugaaggccauuuguuccaga

SEQ ID NO: 454608 - RNA, 22 nt, Human
aaguuuaagguggaaguggugg

SEQ ID NO: 454609 - RNA, 22 nt, Human
guguguccucaguaguggcaug

SEQ ID NO: 454610 - RNA, 22 nt, Human
cugggcugcaguuccugguccu

SEQ ID NO: 454611 - RNA, 22 nt, Human
gcagagugggagcccagggcug

SEQ ID NO: 454612 - RNA, 22 nt, Human
agggcagcccuucugggagggc

SEQ ID NO: 454613 - RNA, 22 nt, Human
acuuggagagcauugcugggga

SEQ ID NO: 454614 - RNA, 22 nt, Human
agcugagcugcagaugacugua

SEQ ID NO: 454615 - RNA, 20 nt, Human
gcauugaguauagacagaug

SEQ ID NO: 454616 - RNA, 22 nt, Human
cuggcugcuggccugaggaugc

SEQ ID NO: 454617 - RNA, 22 nt, Human
guagggacuuguuuuacuagua

SEQ ID NO: 454618 - RNA, 22 nt, Human
cucucugcuguauccuuaggcu

SEQ ID NO: 454619 - RNA, 22 nt, Human
cagucacacaaguggacuuggg

SEQ ID NO: 454620 - RNA, 22 nt, Human
ugccagagaagacccagucacu

SEQ ID NO: 454621 - RNA, 23 nt, Human
aguuccagaaaaaugcucaagca

SEQ ID NO: 454622 - RNA, 22 nt, Human
guauuugauacaugaaauggug

SEQ ID NO: 454623 - RNA, 22 nt, Human
uugcaucuaccauaucaaagau

SEQ ID NO: 454624 - RNA, 22 nt, Human
aaacugaauucccaagggcaug

SEQ ID NO: 454625 - RNA, 22 nt, Human
uuuacagucucuauagucaaaa

SEQ ID NO: 454626 - RNA, 22 nt, Human
uauugaaaugaaugacagugau

SEQ ID NO: 454627 - RNA, 22 nt, Human
aaugcacaugucuuggccucac

SEQ ID NO: 454628 - RNA, 21 nt, Human
uagggcaggcauuggaagaga

SEQ ID NO: 454629 - RNA, 20 nt, Human
ucaggaugugcugagugaag

SEQ ID NO: 454630 - RNA, 22 nt, Human
gggcuggcucugucuagaaagg

SEQ ID NO: 454631 - RNA, 22 nt, Human
cuaguccacuguccugccucca

SEQ ID NO: 454632 - RNA, 22 nt, Human
gugugcagggaugagugcaggu

SEQ ID NO: 454633 - RNA, 22 nt, Human
uuuucuuauggugaagcacaaa

SEQ ID NO: 454634 - RNA, 22 nt, Human
uugcagggaccugcagaaagcu

SEQ ID NO: 454635 - RNA, 22 nt, Human
ugugaaggagcaugcagagggg

SEQ ID NO: 454636 - RNA, 22 nt, Human
agucucuuuugcgaagaguguu

SEQ ID NO: 454637 - RNA, 22 nt, Human
uaaguggaagguuauaugcuaa

SEQ ID NO: 454638 - RNA, 22 nt, Human
ggcagcaacucggagagaagag

SEQ ID NO: 454639 - RNA, 22 nt, Human
gaggcagcagaacauggaagag

SEQ ID NO: 454640 - RNA, 22 nt, Human
agggcagcacaaggcauggacu

SEQ ID NO: 454641 - RNA, 22 nt, Human
uccagcuuugagauuuuaugga

SEQ ID NO: 454642 - RNA, 22 nt, Human
ugcagggccgcuggaggucaug

SEQ ID NO: 454643 - RNA, 22 nt, Human
uuuauccauaucauuaaaaucu

SEQ ID NO: 454644 - RNA, 22 nt, Human
cauuuacuguugaaucccuagc

SEQ ID NO: 454645 - RNA, 23 nt, Human
ucagagagcuguugagagcugcc

SEQ ID NO: 454646 - RNA, 22 nt, Human
agagccugcuguguaagucaca

SEQ ID NO: 454647 - RNA, 22 nt, Human
ucagaggaauuugcuuuucaug

SEQ ID NO: 454648 - RNA, 22 nt, Human
ucaaagucauggcaggcucaga

SEQ ID NO: 454649 - RNA, 22 nt, Human
uauuucugaggcccaggaagug

SEQ ID NO: 454650 - RNA, 22 nt, Human
aggccuggcuuugguuugcuga

SEQ ID NO: 454651 - RNA, 22 nt, Human
auacauguucguguacauguuc

SEQ ID NO: 454652 - RNA, 22 nt, Human
ucagggacauuuagacacugau

SEQ ID NO: 454653 - RNA, 22 nt, Human
aaggccauuauucugauauauu

SEQ ID NO: 454654 - RNA, 22 nt, Human
cuggcucaccuccgcuccagca

SEQ ID NO: 454655 - RNA, 22 nt, Human
agcuuccuuggcgcugaggccu

SEQ ID NO: 454656 - RNA, 18 nt, Human
uccauuguucuacuguga

SEQ ID NO: 454657 - RNA, 22 nt, Human
augauggugggagaugacccag

SEQ ID NO: 454658 - RNA, 22 nt, Human
uggccacccagcugacgccuuc

SEQ ID NO: 454659 - RNA, 22 nt, Human
aacagcagggggaccugcuggu

SEQ ID NO: 454660 - RNA, 22 nt, Human
gauuauauaauggaagcucuug

SEQ ID NO: 454661 - RNA, 22 nt, Human
uggcugaguaaguugugauaug

SEQ ID NO: 454662 - RNA, 23 nt, Human
ucuuuccucagcacacaccaaga

SEQ ID NO: 454663 - RNA, 22 nt, Human
gcagggucgcucuaggagauca

SEQ ID NO: 454664 - RNA, 22 nt, Human
auuugucuagugguauucacgu

SEQ ID NO: 454665 - RNA, 22 nt, Human
cacucugagaaguacaagcucc

SEQ ID NO: 454666 - RNA, 22 nt, Human
uuccauaaucaccuuauucuuu

SEQ ID NO: 454667 - RNA, 22 nt, Human
gaggccacgguuuuccuugggg

SEQ ID NO: 454668 - RNA, 22 nt, Human
ucaucacucauuggacaacaga

SEQ ID NO: 454669 - RNA, 22 nt, Human
ugaggcucacaaaucugcauuu

SEQ ID NO: 454670 - RNA, 22 nt, Human
cauuuucagcacccaucugaaa

SEQ ID NO: 454671 - RNA, 22 nt, Human
caagggccuccaccuugcucgu

SEQ ID NO: 454672 - RNA, 22 nt, Human
aaugaugggaaggagaaaagca

SEQ ID NO: 454673 - RNA, 22 nt, Human
ugugcaguuucuauguugucca

SEQ ID NO: 454674 - RNA, 22 nt, Human
gaacagcccuguuaagucuguu

SEQ ID NO: 454675 - RNA, 22 nt, Human
aggcacugauucucagaguuac

SEQ ID NO: 454676 - RNA, 22 nt, Human
agcagcuggggccugugacgau

SEQ ID NO: 454677 - RNA, 22 nt, Human
uggagcaggugggaugucguga

SEQ ID NO: 454678 - RNA, 22 nt, Human
cugggaguugacgaggcuugua

SEQ ID NO: 454679 - RNA, 22 nt, Human
ugucucagaggcaggaagagcc

SEQ ID NO: 454680 - RNA, 22 nt, Human
aagauguaucaguuaagucuuc

SEQ ID NO: 454681 - RNA, 22 nt, Human
acagggcagaaauguugcaucu

SEQ ID NO: 454682 - RNA, 22 nt, Human
acuuaaaaagaaucuuuucacg

SEQ ID NO: 454683 - RNA, 22 nt, Human
gaggguccccaugcagagcuca

SEQ ID NO: 454684 - RNA, 22 nt, Human
ugcagggcccucauuccugucc

SEQ ID NO: 454685 - RNA, 22 nt, Human
ucacaguaaaagcauggaagag

SEQ ID NO: 454686 - RNA, 18 nt, Human
ggagagugagaucaaaca

SEQ ID NO: 454687 - RNA, 22 nt, Human
ucaggugguccuaagugccauc

SEQ ID NO: 454688 - RNA, 22 nt, Human
agcagggcugcagugugucuuu

SEQ ID NO: 454689 - RNA, 23 nt, Human
aggaggccugaaacugaggcuga

SEQ ID NO: 454690 - RNA, 22 nt, Human
agauggaguuaguaccagaguc

SEQ ID NO: 454691 - RNA, 22 nt, Human
ucagagcugcccaugcaagggg

SEQ ID NO: 454692 - RNA, 19 nt, Human
agccacagaacuugcagga

SEQ ID NO: 454693 - RNA, 22 nt, Human
aauuaggggaggacguaucaua

SEQ ID NO: 454694 - RNA, 22 nt, Human
gagcuuaggccagggacaggga

SEQ ID NO: 454695 - RNA, 22 nt, Human
ugucaccaguuccaggaaauaa

SEQ ID NO: 454696 - RNA, 22 nt, Human
uggggcaguuaauaaacauucu

SEQ ID NO: 454697 - RNA, 22 nt, Human
aaggccugggaguacugggaca

SEQ ID NO: 454698 - RNA, 22 nt, Human
ccugccugcuuucugcuuugca

SEQ ID NO: 454699 - RNA, 22 nt, Human
acagaacugggaaaugcacaua

SEQ ID NO: 454700 - RNA, 20 nt, Human
uccugguggauacugcuuaa

SEQ ID NO: 454701 - RNA, 22 nt, Human
acagguggaaacaugguguugg

SEQ ID NO: 454702 - RNA, 22 nt, Human
gcccucuggcagccuuggcugg

SEQ ID NO: 454703 - RNA, 20 nt, Human
aucuggcucagauccugcag

SEQ ID NO: 454704 - RNA, 22 nt, Human
uucugaaaggcagguuguuugc

SEQ ID NO: 454705 - RNA, 22 nt, Human
uggcugggggugcuauagcugc

SEQ ID NO: 454706 - RNA, 22 nt, Human
gagggcucuaccaaguaacucu

SEQ ID NO: 454707 - RNA, 22 nt, Human
uacaguagacaauguuaguaug

SEQ ID NO: 454708 - RNA, 22 nt, Human
ucugugucugcagaaguucagc

SEQ ID NO: 454709 - RNA, 22 nt, Human
ugggcugagcacugaggaagga

SEQ ID NO: 454710 - RNA, 22 nt, Human
caggagacuauggcccaaggcc

SEQ ID NO: 454711 - RNA, 18 nt, Human
agcagaauucuaggguuc

SEQ ID NO: 454712 - RNA, 22 nt, Human
caauaauauccugugcuguuug

SEQ ID NO: 454713 - RNA, 22 nt, Human
aagccagguguugugguaagag

SEQ ID NO: 454714 - RNA, 22 nt, Human
aggucagaagugccagggaauu

SEQ ID NO: 454715 - RNA, 19 nt, Human
ucaucucacagggccuggc

SEQ ID NO: 454716 - RNA, 22 nt, Human
uuguuaaaaauagauuuccagg

SEQ ID NO: 454717 - RNA, 22 nt, Human
gccuggcaggggccugggagug

SEQ ID NO: 454718 - RNA, 21 nt, Human
aaauuucugcaagccucaacu

SEQ ID NO: 454719 - RNA, 21 nt, Human
ucagaguggaagacaguuuga

SEQ ID NO: 454720 - RNA, 22 nt, Human
uggaggcagucaaaugacugac

SEQ ID NO: 454721 - RNA, 22 nt, Human
acccucaacaaauucacucuau

SEQ ID NO: 454722 - RNA, 20 nt, Human
gucaggauuaguaaacucug

SEQ ID NO: 454723 - RNA, 22 nt, Human
gagcaggccagcaauggaaggg

SEQ ID NO: 454724 - RNA, 22 nt, Human
cccucagcuucucccugcagcu

SEQ ID NO: 454725 - RNA, 23 nt, Human
agggaaaguaguaauggccuuug

SEQ ID NO: 454726 - RNA, 22 nt, Human
agccuucaguaaauccacugug

SEQ ID NO: 454727 - RNA, 22 nt, Human
ccucccacuucuugcugagguc

SEQ ID NO: 454728 - RNA, 22 nt, Human
cuguaaaacugcuuaaguaugc

SEQ ID NO: 454729 - RNA, 22 nt, Human
caucaucaaaacaaauggaguc

SEQ ID NO: 454730 - RNA, 19 nt, Human
uccucaggggcucacagac

SEQ ID NO: 454731 - RNA, 22 nt, Human
aggcuuccuggaggaagaggua

SEQ ID NO: 454732 - RNA, 22 nt, Human
gcuuuaaauggcuugcccaagu

SEQ ID NO: 454733 - RNA, 22 nt, Human
caugaguucaucugcuucucuu

SEQ ID NO: 454734 - RNA, 22 nt, Human
cagagcuggcucugcauguaca

SEQ ID NO: 454735 - RNA, 22 nt, Human
uugucugugaaauggaaauagu

SEQ ID NO: 454736 - RNA, 22 nt, Human
agagccuggucugagauaggac

SEQ ID NO: 454737 - RNA, 22 nt, Human
uaaaguauccaguuauucuucu

SEQ ID NO: 454738 - RNA, 22 nt, Human
ccucagcucuucccugugcaca

SEQ ID NO: 454739 - RNA, 20 nt, Human
uaaggcuguuuuguauuccu

SEQ ID NO: 454740 - RNA, 23 nt, Human
agagcaucaugaugcuaagucug

SEQ ID NO: 454741 - RNA, 22 nt, Human
ggaggccaaggcgggcggauca

SEQ ID NO: 454742 - RNA, 22 nt, Human
gcuggccugcugggcaccaccg

SEQ ID NO: 454743 - RNA, 22 nt, Human
cagcugagcaucacuagucugg

SEQ ID NO: 454744 - RNA, 22 nt, Human
guuauaaaugacugcaaaaguu

SEQ ID NO: 454745 - RNA, 22 nt, Human
ucucuucuagcuucuugugguu

SEQ ID NO: 454746 - RNA, 22 nt, Human
ccuggugcuuaccagagcuuuu

SEQ ID NO: 454747 - RNA, 22 nt, Human
uaaucacagaaacagacuguuu

SEQ ID NO: 454748 - RNA, 22 nt, Human
guaagggauuugaacauagguu

SEQ ID NO: 454749 - RNA, 22 nt, Human
aauuuagaauucgcuagcuaau

SEQ ID NO: 454750 - RNA, 22 nt, Human
gccucgaggcugagaaggcaca

SEQ ID NO: 454751 - RNA, 22 nt, Human
gggccugacugagagcuccuca

SEQ ID NO: 454752 - RNA, 22 nt, Human
gcagcuggagcaucuucucauc

SEQ ID NO: 454753 - RNA, 20 nt, Human
gagauggcuaagugcugaac

SEQ ID NO: 454754 - RNA, 21 nt, Human
ccuggccaaucugauaggguu

SEQ ID NO: 454755 - RNA, 22 nt, Human
accaggcagcugggggugaugu

SEQ ID NO: 454756 - RNA, 22 nt, Human
gggcuuggcacaugggcucagc

SEQ ID NO: 454757 - RNA, 22 nt, Human
uacaggcacugaaaugcuuauu

SEQ ID NO: 454758 - RNA, 17 nt, Human
uguuuucauucauugcu

SEQ ID NO: 454759 - RNA, 22 nt, Human
uuucccaagaaaaauaauugga

SEQ ID NO: 454760 - RNA, 17 nt, Human
gguggccugcaguggcu

SEQ ID NO: 454761 - RNA, 19 nt, Human
agcauccagucaugggauc

SEQ ID NO: 454762 - RNA, 22 nt, Human
ugcauguuaagaaaauauugag

SEQ ID NO: 454763 - RNA, 22 nt, Human
gaaauucaggacaaagacucuu

SEQ ID NO: 454764 - RNA, 22 nt, Human
gggcaggaggcuaauucugcau

SEQ ID NO: 454765 - RNA, 22 nt, Human
guggcuucugcggugugcgcag

SEQ ID NO: 454766 - RNA, 22 nt, Human
uuuguaaaggccugaauuucag

SEQ ID NO: 454767 - RNA, 23 nt, Human
uugaaggagaaagcuuucuuggu

SEQ ID NO: 454768 - RNA, 22 nt, Human
aguauacauauauuagccuucg

SEQ ID NO: 454769 - RNA, 22 nt, Human
agccucugcuuaugcaaaggua

SEQ ID NO: 454770 - RNA, 22 nt, Human
acaagauuuuaugacucuuuuu

SEQ ID NO: 454771 - RNA, 22 nt, Human
ucaguuuucucaucugugaaau

SEQ ID NO: 454772 - RNA, 22 nt, Human
gccugccacgcaugcagaguca

SEQ ID NO: 454773 - RNA, 22 nt, Human
uaucuuugcaaauaucucuaag

SEQ ID NO: 454774 - RNA, 22 nt, Human
ucccaggauguuggcggcaggu

SEQ ID NO: 454775 - RNA, 18 nt, Human
aaugcacacauuuacucc

SEQ ID NO: 454776 - RNA, 22 nt, Human
aagcuggcaauuaucaaaacug

SEQ ID NO: 454777 - RNA, 22 nt, Human
gcagcugcuguggcaucaagcu

SEQ ID NO: 454778 - RNA, 22 nt, Human
agucucugcugguugugccuau

SEQ ID NO: 454779 - RNA, 22 nt, Human
aaugucugaaaaucagacugca

SEQ ID NO: 454780 - RNA, 22 nt, Human
aggucccaggcauagcuggucu

SEQ ID NO: 454781 - RNA, 22 nt, Human
ucaggagggugacaggcccugg

SEQ ID NO: 454782 - RNA, 22 nt, Human
ugagccagccuugcagcugugc

SEQ ID NO: 454783 - RNA, 22 nt, Human
uaagcugugggagauuggcaua

SEQ ID NO: 454784 - RNA, 22 nt, Human
uccugggcuugcuccuccagcu

SEQ ID NO: 454785 - RNA, 22 nt, Human
gagccugaugaaacaggcagac

SEQ ID NO: 454786 - RNA, 22 nt, Human
agggagaaaauuggaugcacaa

SEQ ID NO: 454787 - RNA, 22 nt, Human
cauuaggguaauugaacacuua

SEQ ID NO: 454788 - RNA, 22 nt, Human
gcagggcucugcuguaguccua

SEQ ID NO: 454789 - RNA, 19 nt, Human
cacagggcaggucucaugu

SEQ ID NO: 454790 - RNA, 22 nt, Human
gguuuauuaaugugaacuguau

SEQ ID NO: 454791 - RNA, 22 nt, Human
cacagcuugggcucugacaaua

SEQ ID NO: 454792 - RNA, 22 nt, Human
ucuggcucacuucaggcuucac

SEQ ID NO: 454793 - RNA, 22 nt, Human
ccuuggaggacugcugcuucuu

SEQ ID NO: 454794 - RNA, 22 nt, Human
cagcagagcauuugguaggagg

SEQ ID NO: 454795 - RNA, 22 nt, Human
agauacaucuugaacuucuaga

SEQ ID NO: 454796 - RNA, 22 nt, Human
uguggcaggaagagcuucugag

SEQ ID NO: 454797 - RNA, 22 nt, Human
uggacucaaguccaaguucacg

SEQ ID NO: 454798 - RNA, 22 nt, Human
ccucaggauccgcaggugcagu

SEQ ID NO: 454799 - RNA, 22 nt, Human
ucccagagaaagucaaggucuu

SEQ ID NO: 454800 - RNA, 22 nt, Human
cugguccuugacgcgugggagg

SEQ ID NO: 454801 - RNA, 22 nt, Human
uggccugggcaugaagcaucgu

SEQ ID NO: 454802 - RNA, 22 nt, Human
agccauugaguuuuaugugcua

SEQ ID NO: 454803 - RNA, 22 nt, Human
acugggaggcaaagagcaagga

SEQ ID NO: 454804 - RNA, 22 nt, Human
uuucaauguaugucuuucugag

SEQ ID NO: 454805 - RNA, 20 nt, Human
ccagagcugauggcugcccg

SEQ ID NO: 454806 - RNA, 22 nt, Human
aggaccuggaucacagagaucu

SEQ ID NO: 454807 - RNA, 22 nt, Human
cuuagaaaucgaacucagguua

SEQ ID NO: 454808 - RNA, 22 nt, Human
ugcaggccggcccuaggccuca

SEQ ID NO: 454809 - RNA, 22 nt, Human
ggaggccuugaggccaggagcu

SEQ ID NO: 454810 - RNA, 22 nt, Human
caguguggagggagagagccug

SEQ ID NO: 454811 - RNA, 22 nt, Human
aauuaugagguagauaucacau

SEQ ID NO: 454812 - RNA, 22 nt, Human
agcugugguucugggcagcgac

SEQ ID NO: 454813 - RNA, 22 nt, Human
ccagcuggugggucuuucucug

SEQ ID NO: 454814 - RNA, 22 nt, Human
agggcugacacaccuuauccuc

SEQ ID NO: 454815 - RNA, 22 nt, Human
uuucacaacguuguggugagag

SEQ ID NO: 454816 - RNA, 22 nt, Human
gucacuggggccacaugcagaa

SEQ ID NO: 454817 - RNA, 22 nt, Human
cuggcagcuggaggcuagaggc

SEQ ID NO: 454818 - RNA, 22 nt, Human
uguguuccugccuggcucuggu

SEQ ID NO: 454819 - RNA, 22 nt, Human
cauguacaguuuuucuguccug

SEQ ID NO: 454820 - RNA, 22 nt, Human
caggacagguguucuagaucag

SEQ ID NO: 454821 - RNA, 22 nt, Human
gcuggaaggcuaggcucaguug

SEQ ID NO: 454822 - RNA, 22 nt, Human
cccuucccuucugggagaucca

SEQ ID NO: 454823 - RNA, 22 nt, Human
aacuguaauuuuuacauaguaa

SEQ ID NO: 454824 - RNA, 22 nt, Human
acagagcauauaaagugcuuug

SEQ ID NO: 454825 - RNA, 22 nt, Human
gcuggagauaguaggauccaua

SEQ ID NO: 454826 - RNA, 22 nt, Human
ggccagagaauaugccuuacgu

SEQ ID NO: 454827 - RNA, 22 nt, Human
agaacagaugugggcagaccug

SEQ ID NO: 454828 - RNA, 22 nt, Human
aggcugagagcaacgugucaga

SEQ ID NO: 454829 - RNA, 22 nt, Human
ggcuccuguggcaagacagcuu

SEQ ID NO: 454830 - RNA, 22 nt, Human
aggcacugaauauccaguaaaa

SEQ ID NO: 454831 - RNA, 22 nt, Human
gugggcaaggucccugccagcu

SEQ ID NO: 454832 - RNA, 22 nt, Human
cugggaggcagucucucuagaa

SEQ ID NO: 454833 - RNA, 22 nt, Human
acaacacagcaaaaccccaucu

SEQ ID NO: 454834 - RNA, 22 nt, Human
ucauuucuauugcuacugucug

SEQ ID NO: 454835 - RNA, 22 nt, Human
uacaguagaauuuuuaguaacu

SEQ ID NO: 454836 - RNA, 23 nt, Human
cauggcagcaagagcucauggcc

SEQ ID NO: 454837 - RNA, 22 nt, Human
cagcacugcugcuguacacaca

SEQ ID NO: 454838 - RNA, 22 nt, Human
uuccucucgcucuccggggccc

SEQ ID NO: 454839 - RNA, 22 nt, Human
agauacauuaguaguuacuugu

SEQ ID NO: 454840 - RNA, 18 nt, Human
aggcagcagcaucuucuc

SEQ ID NO: 454841 - RNA, 22 nt, Human
cacucaggguacaauggagggc

SEQ ID NO: 454842 - RNA, 22 nt, Human
ugaggcuugucucagauggggg

SEQ ID NO: 454843 - RNA, 22 nt, Human
cccugcagccggccagcucauu

SEQ ID NO: 454844 - RNA, 22 nt, Human
aaacagcugucauuguuuuaaa

SEQ ID NO: 454845 - RNA, 22 nt, Human
uucacuuauagggauguuauug

SEQ ID NO: 454846 - RNA, 20 nt, Human
guggccucucacauucugag

SEQ ID NO: 454847 - RNA, 18 nt, Human
aaaaugcaggcgacaugg

SEQ ID NO: 454848 - RNA, 22 nt, Human
guuucauucggcagcucauaag

SEQ ID NO: 454849 - RNA, 22 nt, Human
guuugaaaaaagcaguauguaa

SEQ ID NO: 454850 - RNA, 22 nt, Human
cuggaaggcucugcugccuguc

SEQ ID NO: 454851 - RNA, 22 nt, Human
cagcaucccucaggggccucug

SEQ ID NO: 454852 - RNA, 22 nt, Human
augggaugcauggcuguggcca

SEQ ID NO: 454853 - RNA, 22 nt, Human
cagaggccuuucuacagugaua

SEQ ID NO: 454854 - RNA, 22 nt, Human
gcugagguaggagguugcagug

SEQ ID NO: 454855 - RNA, 23 nt, Human
acugagccagggccugggucagc

SEQ ID NO: 454856 - RNA, 22 nt, Human
ugaaacaaauuuggaaaaucua

SEQ ID NO: 454857 - RNA, 22 nt, Human
cugccagcacugccuccugagg

SEQ ID NO: 454858 - RNA, 22 nt, Human
gccuucugaucgcuggacugac

SEQ ID NO: 454859 - RNA, 22 nt, Human
uggcugagaccuucccaaauuc

SEQ ID NO: 454860 - RNA, 22 nt, Human
gcugcagcagaaguucucagag

SEQ ID NO: 454861 - RNA, 22 nt, Human
agcacagaguugcagagagcgu

SEQ ID NO: 454862 - RNA, 22 nt, Human
acagaauuaucaggaaauguua

SEQ ID NO: 454863 - RNA, 22 nt, Human
uucucuagguuuuagaugaaga

SEQ ID NO: 454864 - RNA, 22 nt, Human
agggacagucuacuguucacug

SEQ ID NO: 454865 - RNA, 22 nt, Human
uuccaaaggaauggggagcuau

SEQ ID NO: 454866 - RNA, 22 nt, Human
cuggggugucucgucugccauu

SEQ ID NO: 454867 - RNA, 22 nt, Human
gaggggcuggcacgauggcugc

SEQ ID NO: 454868 - RNA, 23 nt, Human
ucugagagaacaaugccuccuau

SEQ ID NO: 454869 - RNA, 22 nt, Human
ucucagagcucacaccuccugg

SEQ ID NO: 454870 - RNA, 22 nt, Human
agaauucuggaguugggaggaa

SEQ ID NO: 454871 - RNA, 22 nt, Human
caaaugugguuucucagcauuc

SEQ ID NO: 454872 - RNA, 22 nt, Human
agccuggccaggccugcccagg

SEQ ID NO: 454873 - RNA, 22 nt, Human
uguucaauccccagguccugaa

SEQ ID NO: 454874 - RNA, 22 nt, Human
uauuucuauuccccaggcaagu

SEQ ID NO: 454875 - RNA, 22 nt, Human
uccagccacucagcagggauug

SEQ ID NO: 454876 - RNA, 22 nt, Human
ucacucagguucaugucuuugu

SEQ ID NO: 454877 - RNA, 22 nt, Human
ucagagagccucaggcacugcc

SEQ ID NO: 454878 - RNA, 22 nt, Human
aggccuguuccuuccugggcac

SEQ ID NO: 454879 - RNA, 22 nt, Human
gggcagauggggcacaggcuga

SEQ ID NO: 454880 - RNA, 22 nt, Human
gcuuuuauuucuucacaaaagu

SEQ ID NO: 454881 - RNA, 22 nt, Human
cagcuguguagaugcaggguca

SEQ ID NO: 454882 - RNA, 22 nt, Human
ggaagaagggucauuggcagcc

SEQ ID NO: 454883 - RNA, 22 nt, Human
gccuuccugcagcucugagcgu

SEQ ID NO: 454884 - RNA, 22 nt, Human
uucccaggcugugcuaccagag

SEQ ID NO: 454885 - RNA, 22 nt, Human
caguggcagagaacagagaccu

SEQ ID NO: 454886 - RNA, 22 nt, Human
ugguaauuuacgcauuucugua

SEQ ID NO: 454887 - RNA, 22 nt, Human
uccugggguccugacugcuucc

SEQ ID NO: 454888 - RNA, 22 nt, Human
agcagcagauccaaaaaaugug

SEQ ID NO: 454889 - RNA, 22 nt, Human
gccagguggucuggcuccagag

SEQ ID NO: 454890 - RNA, 18 nt, Human
caguuuuuauaucuggca

SEQ ID NO: 454891 - RNA, 22 nt, Human
agucacaguuccuacccaguaa

SEQ ID NO: 454892 - RNA, 22 nt, Human
acuuucauuuguaauaaacuuc

SEQ ID NO: 454893 - RNA, 22 nt, Human
aucuuugaagaggacuugaagu

SEQ ID NO: 454894 - RNA, 22 nt, Human
uuccucuccucacaugagucac

SEQ ID NO: 454895 - RNA, 22 nt, Human
cauuguuaccaucuuuuaccua

SEQ ID NO: 454896 - RNA, 22 nt, Human
ucucugauguauaucagagaac

SEQ ID NO: 454897 - RNA, 22 nt, Human
auuaauuuuaccuuuguaaaca

SEQ ID NO: 454898 - RNA, 22 nt, Human
aagggaggggauguaagccugg

SEQ ID NO: 454899 - RNA, 22 nt, Human
uucuuuaaaauagugagaaaga

SEQ ID NO: 454900 - RNA, 22 nt, Human
cugagccaaaaagcagagcuug

SEQ ID NO: 454901 - RNA, 22 nt, Human
uauuucuggcuuugagggugau

SEQ ID NO: 454902 - RNA, 22 nt, Human
ggaggagacccugugucaguuu

SEQ ID NO: 454903 - RNA, 22 nt, Human
guggugcaggccagcaggggcg

SEQ ID NO: 454904 - RNA, 22 nt, Human
agccagggauggcagugcccag

SEQ ID NO: 454905 - RNA, 22 nt, Human
cagacccugggccacagaggag

SEQ ID NO: 454906 - RNA, 22 nt, Human
ucacuucacacccacuaucaug

SEQ ID NO: 454907 - RNA, 22 nt, Human
ugaaguccuagaacuccuggua

SEQ ID NO: 454908 - RNA, 22 nt, Human
cagcuucccuuggcugagcaga

SEQ ID NO: 454909 - RNA, 22 nt, Human
uuucuauuggcgucacuguugu

SEQ ID NO: 454910 - RNA, 21 nt, Human
uggccaaacuggagcauuuga

SEQ ID NO: 454911 - RNA, 17 nt, Human
guccuacccauggucua

SEQ ID NO: 454912 - RNA, 19 nt, Human
aggucauugauagugcagg

SEQ ID NO: 454913 - RNA, 22 nt, Human
ucaggcagaaaaaucacuaauu

SEQ ID NO: 454914 - RNA, 22 nt, Human
aaugaacaucaaaugccuacca

SEQ ID NO: 454915 - RNA, 22 nt, Human
cugaagcacagcauauaaauaa

SEQ ID NO: 454916 - RNA, 22 nt, Human
ucaguuuuuguuugccagauag

SEQ ID NO: 454917 - RNA, 22 nt, Human
ggcugcaggcagaggcugucug

SEQ ID NO: 454918 - RNA, 22 nt, Human
gcaaaauuuacacuccuucuuc

SEQ ID NO: 454919 - RNA, 22 nt, Human
cuggcagguggauggggacucc

SEQ ID NO: 454920 - RNA, 22 nt, Human
ggugacugguuuaucuggcagu

SEQ ID NO: 454921 - RNA, 22 nt, Human
uucacagggcagcagcugagcc

SEQ ID NO: 454922 - RNA, 22 nt, Human
gauaugaaguggcauugugaag

SEQ ID NO: 454923 - RNA, 22 nt, Human
agcagccaaccuuacauucauc

SEQ ID NO: 454924 - RNA, 22 nt, Human
uaguuaggaauagcagcgacuc

SEQ ID NO: 454925 - RNA, 22 nt, Human
uaaagguacgaagugagggauu

SEQ ID NO: 454926 - RNA, 21 nt, Human
accaggcuugugggagggagc

SEQ ID NO: 454927 - RNA, 22 nt, Human
auguguacaaccaagcacuaaa

SEQ ID NO: 454928 - RNA, 22 nt, Human
cucugagagagcuggugagcac

SEQ ID NO: 454929 - RNA, 17 nt, Human
uggcaagaauggaaaug

SEQ ID NO: 454930 - RNA, 22 nt, Human
aaggccaugcacauccuaggca

SEQ ID NO: 454931 - RNA, 22 nt, Human
gaagaaggugccagaggcuuac

SEQ ID NO: 454932 - RNA, 22 nt, Human
cuggcagcguguuuaugaacau

SEQ ID NO: 454933 - RNA, 22 nt, Human
ggccuagggaguggccaugccu

SEQ ID NO: 454934 - RNA, 20 nt, Human
uucuuucaucuacacguugu

SEQ ID NO: 454935 - RNA, 22 nt, Human
caggaugggugucggccagcac

SEQ ID NO: 454936 - RNA, 22 nt, Human
ucucccaggucauacacagaga

SEQ ID NO: 454937 - RNA, 20 nt, Human
ccugucucacguuccgcccc

SEQ ID NO: 454938 - RNA, 22 nt, Human
gggaagggagggaccucagucu

SEQ ID NO: 454939 - RNA, 22 nt, Human
ccacugucagaggggcugugcc

SEQ ID NO: 454940 - RNA, 22 nt, Human
agcccagguugaggcugcagug

SEQ ID NO: 454941 - RNA, 22 nt, Human
gcacagggagacagccguggcc

SEQ ID NO: 454942 - RNA, 22 nt, Human
agggccuggaacuggagaccac

SEQ ID NO: 454943 - RNA, 22 nt, Human
agccaggcggggcagguuuccu

SEQ ID NO: 454944 - RNA, 18 nt, Human
gcagcuuuugauucaccc

SEQ ID NO: 454945 - RNA, 22 nt, Human
ggcacugacacuagcauggcac

SEQ ID NO: 454946 - RNA, 22 nt, Human
uagugcacacgcauguagcagu

SEQ ID NO: 454947 - RNA, 22 nt, Human
uuuaaauuuagaagaaacacug

SEQ ID NO: 454948 - RNA, 21 nt, Human
uauacaugugugcauacgugu

SEQ ID NO: 454949 - RNA, 22 nt, Human
aggagaguaccauugggccgca

SEQ ID NO: 454950 - RNA, 18 nt, Human
gggcucacacaggucauc

SEQ ID NO: 454951 - RNA, 22 nt, Human
ccagggcaggagaaagacucac

SEQ ID NO: 454952 - RNA, 22 nt, Human
ccuggcuccugccucugcaggg

SEQ ID NO: 454953 - RNA, 22 nt, Human
cuuuccaacucuagugaaauuu

SEQ ID NO: 454954 - RNA, 22 nt, Human
uuucaaagguggaagagugaau

SEQ ID NO: 454955 - RNA, 22 nt, Human
aaaaguaauugaugcaaucgua

SEQ ID NO: 454956 - RNA, 22 nt, Human
aggcucagucuguucaugcacu

SEQ ID NO: 454957 - RNA, 22 nt, Human
uuuguucauuuugagcucauca

SEQ ID NO: 454958 - RNA, 22 nt, Human
agugcaauguguacagaaaaau

SEQ ID NO: 454959 - RNA, 22 nt, Human
ggggcagaaguagugccccuga

SEQ ID NO: 454960 - RNA, 22 nt, Human
ucaggaguccugccugcagccu

SEQ ID NO: 454961 - RNA, 22 nt, Human
ucacaacuugaagcugauuuaa

SEQ ID NO: 454962 - RNA, 22 nt, Human
aggcuguccucucuugcucagu

SEQ ID NO: 454963 - RNA, 22 nt, Human
gcucagagauggggaaugaaaa

SEQ ID NO: 454964 - RNA, 22 nt, Human
uuuauuauucucuggagaaugu

SEQ ID NO: 454965 - RNA, 22 nt, Human
gguguccaucaggcugugcuuc

SEQ ID NO: 454966 - RNA, 22 nt, Human
gucaggaugcuauuguuauuaa

SEQ ID NO: 454967 - RNA, 22 nt, Human
agugucugccaacugcaugguc

SEQ ID NO: 454968 - RNA, 22 nt, Human
gcucagagcuugaaguuccacu

SEQ ID NO: 454969 - RNA, 20 nt, Human
uucugcuugcaaauaucaag

SEQ ID NO: 454970 - RNA, 22 nt, Human
ggacagagcccugguggccuaa

SEQ ID NO: 454971 - RNA, 22 nt, Human
agcucccagcagagcuggccac

SEQ ID NO: 454972 - RNA, 21 nt, Human
ugggagagggcucagcuaccc

SEQ ID NO: 454973 - RNA, 22 nt, Human
ugcagaaggaggaggaaaucca

SEQ ID NO: 454974 - RNA, 22 nt, Human
agcagcugaucaaagcacuuau

SEQ ID NO: 454975 - RNA, 22 nt, Human
cagaggcauauaauugcugggg

SEQ ID NO: 454976 - RNA, 20 nt, Human
ugcagagcuggcuggcuccu

SEQ ID NO: 454977 - RNA, 22 nt, Human
gaacccaggcuuuugaggcugu

SEQ ID NO: 454978 - RNA, 22 nt, Human
aggcucaguauagcuggcaagu

SEQ ID NO: 454979 - RNA, 22 nt, Human
ggggacugccuuccacagacac

SEQ ID NO: 454980 - RNA, 22 nt, Human
aggagcugagucagcccgacag

SEQ ID NO: 454981 - RNA, 18 nt, Human
gggaagccgggaagccgg

SEQ ID NO: 454982 - RNA, 22 nt, Human
cuggcuccaucacugggugaug

SEQ ID NO: 454983 - RNA, 22 nt, Human
ugcagagguuuccaggcaaguu

SEQ ID NO: 454984 - RNA, 22 nt, Human
ucucuucugaaaccugucuuua

SEQ ID NO: 454985 - RNA, 22 nt, Human
guagcccaccuggggagggcga

SEQ ID NO: 454986 - RNA, 22 nt, Human
ucucauugguauauacaugugu

SEQ ID NO: 454987 - RNA, 22 nt, Human
ugagccaguggaagauggcagu

SEQ ID NO: 454988 - RNA, 22 nt, Human
caagaugccccugguagggauc

SEQ ID NO: 454989 - RNA, 22 nt, Human
cugggcagaauuuuaggauggc

SEQ ID NO: 454990 - RNA, 22 nt, Human
agccugucugucuccaaagcug

SEQ ID NO: 454991 - RNA, 22 nt, Human
cucagcagagaccagggaggaa

SEQ ID NO: 454992 - RNA, 22 nt, Human
ucuuuauuucugaaucccccau

SEQ ID NO: 454993 - RNA, 22 nt, Human
uccuucagucuucugagccaua

SEQ ID NO: 454994 - RNA, 22 nt, Human
uaccacuacauuugcuaauggc

SEQ ID NO: 454995 - RNA, 22 nt, Human
cagaggcugccagccaugugca

SEQ ID NO: 454996 - RNA, 22 nt, Human
ugaaagcuguccacuaggcugu

SEQ ID NO: 454997 - RNA, 22 nt, Human
gaggcucagagugguuaaauaa

SEQ ID NO: 454998 - RNA, 22 nt, Human
agcaugaaaggcgugccaacuu

SEQ ID NO: 454999 - RNA, 21 nt, Human
gauuucacuuaccuucauuua

SEQ ID NO: 455000 - RNA, 22 nt, Human
uuugagaaaugggcucugugcu

SEQ ID NO: 455001 - RNA, 22 nt, Human
agcaauaugacauugcuacauc

SEQ ID NO: 455002 - RNA, 22 nt, Human
aacaaaugauaccaguucucaa

SEQ ID NO: 455003 - RNA, 22 nt, Human
ugcuagaaaucugaaacuagca

SEQ ID NO: 455004 - RNA, 22 nt, Human
caguuuuugccauuaagaguaa

SEQ ID NO: 455005 - RNA, 22 nt, Human
gcagaaggauccgcaggugcaa

SEQ ID NO: 455006 - RNA, 22 nt, Human
gcucugagaggugcagcaguaa

SEQ ID NO: 455007 - RNA, 22 nt, Human
uguaugcagcaaaacaauuagu

SEQ ID NO: 455008 - RNA, 22 nt, Human
uccagcagaaaagagguaggga

SEQ ID NO: 455009 - RNA, 22 nt, Human
ucaugcacaugugucaccauca

SEQ ID NO: 455010 - RNA, 22 nt, Human
auauuaggaguuaaauguauua

SEQ ID NO: 455011 - RNA, 22 nt, Human
ucccagccacagguguagcccu

SEQ ID NO: 455012 - RNA, 20 nt, Human
agucugucaauuuacagugg

SEQ ID NO: 455013 - RNA, 22 nt, Human
gcugcaggggggucuggacuug

SEQ ID NO: 455014 - RNA, 21 nt, Human
uccuccuucaaguccuggccu

SEQ ID NO: 455015 - RNA, 22 nt, Human
cauggcagaaaccugagcugcu

SEQ ID NO: 455016 - RNA, 22 nt, Human
aaaguuuuagaacuaggaagca

SEQ ID NO: 455017 - RNA, 22 nt, Human
caggcuggaguuaccuuuaggg

SEQ ID NO: 455018 - RNA, 22 nt, Human
uuguauauauucuuaaagaugu

SEQ ID NO: 455019 - RNA, 22 nt, Human
aagagcuggagcugcuacagga

SEQ ID NO: 455020 - RNA, 21 nt, Human
uuuagggaggauauuuaacuu

SEQ ID NO: 455021 - RNA, 22 nt, Human
uuagccaugugggaaaaacagc

SEQ ID NO: 455022 - RNA, 22 nt, Human
aggcacugcuucuaaguaggaa

SEQ ID NO: 455023 - RNA, 22 nt, Human
cucuggagcauuucaccuacau

SEQ ID NO: 455024 - RNA, 15 nt, Human
uucaggauaugacuc

SEQ ID NO: 455025 - RNA, 22 nt, Human
gugcugcagagucucgugccgc

SEQ ID NO: 455026 - RNA, 22 nt, Human
ugacuccaaacagaaaacgaau

SEQ ID NO: 455027 - RNA, 22 nt, Human
cagggcccauggcucagguagg

SEQ ID NO: 455028 - RNA, 22 nt, Human
aacaaauggaacacaaaucuuu

SEQ ID NO: 455029 - RNA, 22 nt, Human
cacagggcaccaguuggccauc

SEQ ID NO: 455030 - RNA, 22 nt, Human
cuguccuguggaccugaggacg

SEQ ID NO: 455031 - RNA, 22 nt, Human
gcucugucauuuugcagacacu

SEQ ID NO: 455032 - RNA, 22 nt, Human
cagagcuggacuuaaauauauu

SEQ ID NO: 455033 - RNA, 22 nt, Human
aaggagcucccggcagaccagg

SEQ ID NO: 455034 - RNA, 22 nt, Human
uucaggaugacaccauguccag

SEQ ID NO: 455035 - RNA, 22 nt, Human
ucauugcacuccagccugggca

SEQ ID NO: 455036 - RNA, 22 nt, Human
ggaggaugagcuacgaggagcu

SEQ ID NO: 455037 - RNA, 20 nt, Human
acuggagccaucucagccua

SEQ ID NO: 455038 - RNA, 22 nt, Human
cuguacauaaaggaauaggugu

SEQ ID NO: 455039 - RNA, 22 nt, Human
cucacugcccugaaguuggguu

SEQ ID NO: 455040 - RNA, 22 nt, Human
uaauuuauuucaacugccaagg

SEQ ID NO: 455041 - RNA, 22 nt, Human
uggagcaggaagucuauggcug

SEQ ID NO: 455042 - RNA, 22 nt, Human
augaggcaugugaggagaaggg

SEQ ID NO: 455043 - RNA, 22 nt, Human
gcagggucuugagaggcagcca

SEQ ID NO: 455044 - RNA, 22 nt, Human
agguuuauguuuggugcaggag

SEQ ID NO: 455045 - RNA, 22 nt, Human
cagcuggacuuuugauagaagu

SEQ ID NO: 455046 - RNA, 22 nt, Human
gggcagagagcuggaacuccuu

SEQ ID NO: 455047 - RNA, 22 nt, Human
ucagaaauguaagcugaugacu

SEQ ID NO: 455048 - RNA, 22 nt, Human
ucucugagcccagugucccccu

SEQ ID NO: 455049 - RNA, 22 nt, Human
aguggcaguggcugggcagagc

SEQ ID NO: 455050 - RNA, 22 nt, Human
uuucacauuuaggcgugaauug

SEQ ID NO: 455051 - RNA, 22 nt, Human
ugcauuccuccaccuccugcac

SEQ ID NO: 455052 - RNA, 22 nt, Human
cuguacaggucaaugauaagau

SEQ ID NO: 455053 - RNA, 22 nt, Human
uauucacauguacauaugcuca

SEQ ID NO: 455054 - RNA, 22 nt, Human
guauuagggccaaaggcaggaa

SEQ ID NO: 455055 - RNA, 17 nt, Human
aagauuucauuagcuga

SEQ ID NO: 455056 - RNA, 23 nt, Human
ucaggauauugugugccaaggug

SEQ ID NO: 455057 - RNA, 22 nt, Human
aggccugggucucgugccuacc

SEQ ID NO: 455058 - RNA, 22 nt, Human
ggcuccucucuggccgcucccg

SEQ ID NO: 455059 - RNA, 22 nt, Human
aucuggcucgcuaggcucuggg

SEQ ID NO: 455060 - RNA, 22 nt, Human
gggugggguguaucggauccua

SEQ ID NO: 455061 - RNA, 22 nt, Human
agagaauuuuaaaagccuugaa

SEQ ID NO: 455062 - RNA, 22 nt, Human
cuguuuaucccuuuggucagca

SEQ ID NO: 455063 - RNA, 22 nt, Human
accauuuuggguauuuucagag

SEQ ID NO: 455064 - RNA, 22 nt, Human
uagcagugccaggauuuugcug

SEQ ID NO: 455065 - RNA, 18 nt, Human
gcagcugacacuggaguu

SEQ ID NO: 455066 - RNA, 22 nt, Human
gggaccugccaaggccacccag

SEQ ID NO: 455067 - RNA, 22 nt, Human
cugggcugucaauggcccucug

SEQ ID NO: 455068 - RNA, 21 nt, Human
ucuggagcccuaagcugagaa

SEQ ID NO: 455069 - RNA, 22 nt, Human
gaggcagugaacaauuccugug

SEQ ID NO: 455070 - RNA, 22 nt, Human
guucccauacaguaucagugcu

SEQ ID NO: 455071 - RNA, 22 nt, Human
ucaaaagucugcauucuucaca

SEQ ID NO: 455072 - RNA, 22 nt, Human
aagauacugaugauguaggcua

SEQ ID NO: 455073 - RNA, 22 nt, Human
uaauuuacuugcaaauaacaau

SEQ ID NO: 455074 - RNA, 22 nt, Human
auucucugaagucaauggaaau

SEQ ID NO: 455075 - RNA, 22 nt, Human
augucuaaaagauaaaguuuaa

SEQ ID NO: 455076 - RNA, 22 nt, Human
ucauuuucaaguuugaacagga

SEQ ID NO: 455077 - RNA, 22 nt, Human
cagggcugcuggccgugcccuc

SEQ ID NO: 455078 - RNA, 22 nt, Human
gcuggagccuucugcucuguug

SEQ ID NO: 455079 - RNA, 21 nt, Human
accucaagcaacaaccaaggu

SEQ ID NO: 455080 - RNA, 22 nt, Human
aaaugcacaggagaaccaauuc

SEQ ID NO: 455081 - RNA, 22 nt, Human
ucccaaagcuacucuucugacu

SEQ ID NO: 455082 - RNA, 22 nt, Human
gcucaggaucccaggggugugc

SEQ ID NO: 455083 - RNA, 22 nt, Human
ggagccugugcccaagcccaga

SEQ ID NO: 455084 - RNA, 22 nt, Human
gacaaaacacauuaguuuaaaa

SEQ ID NO: 455085 - RNA, 22 nt, Human
aguggcagagugcacucaggca

SEQ ID NO: 455086 - RNA, 19 nt, Human
cuuuucaucaacagccaau

SEQ ID NO: 455087 - RNA, 22 nt, Human
cagagcugggaucccaugggcg

SEQ ID NO: 455088 - RNA, 22 nt, Human
uaagaauuguguugaauagagu

SEQ ID NO: 455089 - RNA, 22 nt, Human
ucagaggacuaccuucuccagu

SEQ ID NO: 455090 - RNA, 22 nt, Human
cagagugaaaacugagcucaaa

SEQ ID NO: 455091 - RNA, 23 nt, Human
aaauauucuuuuuuaguaagugc

SEQ ID NO: 455092 - RNA, 22 nt, Human
acagaggaagcauauagcacaa

SEQ ID NO: 455093 - RNA, 22 nt, Human
uucacauuaucaggauuguuuc

SEQ ID NO: 455094 - RNA, 22 nt, Human
caggccucuauggucagcugag

SEQ ID NO: 455095 - RNA, 22 nt, Human
ucuagggaacaugggucaagcu

SEQ ID NO: 455096 - RNA, 22 nt, Human
caggagaagucucuagggggug

SEQ ID NO: 455097 - RNA, 22 nt, Human
ugagcaguaacagcucacaggg

SEQ ID NO: 455098 - RNA, 22 nt, Human
gcuggccauauauuuugcuguu

SEQ ID NO: 455099 - RNA, 22 nt, Human
agggaaggaaaagcugucgcuu

SEQ ID NO: 455100 - RNA, 22 nt, Human
ggugaaggaggaagcugaugga

SEQ ID NO: 455101 - RNA, 22 nt, Human
guuugcauauuugcacaggaau

SEQ ID NO: 455102 - RNA, 23 nt, Human
caggcaggaugaggacuacacuc

SEQ ID NO: 455103 - RNA, 22 nt, Human
agaggcaggagguugacuugag

SEQ ID NO: 455104 - RNA, 22 nt, Human
caggccucagagaguggcgggg

SEQ ID NO: 455105 - RNA, 22 nt, Human
auugaaagcauggauuuggauu

SEQ ID NO: 455106 - RNA, 22 nt, Human
cugagccauaagggaggcuggg

SEQ ID NO: 455107 - RNA, 22 nt, Human
uggaaugacagagagucugaau

SEQ ID NO: 455108 - RNA, 22 nt, Human
gcagaaggucuggcacuucagg

SEQ ID NO: 455109 - RNA, 22 nt, Human
aggagcugacuuguaaagcauu

SEQ ID NO: 455110 - RNA, 22 nt, Human
aauuaaaagauaacccaugagu

SEQ ID NO: 455111 - RNA, 22 nt, Human
acagaauuaaaguguuugugga

SEQ ID NO: 455112 - RNA, 22 nt, Human
aagguuaaauagguauuuucca

SEQ ID NO: 455113 - RNA, 22 nt, Human
gacagaagaggaacuuggacag

SEQ ID NO: 455114 - RNA, 22 nt, Human
ggucucagcccucgccagcagc

SEQ ID NO: 455115 - RNA, 22 nt, Human
ugggacuugccucgagggcugc

SEQ ID NO: 455116 - RNA, 22 nt, Human
cagagagcuuagugugcugcau

SEQ ID NO: 455117 - RNA, 22 nt, Human
cugcugcugcuaucuacccagg

SEQ ID NO: 455118 - RNA, 22 nt, Human
guacauuuuacuuuguuugaau

SEQ ID NO: 455119 - RNA, 22 nt, Human
gagaaguuucugguuugcauag

SEQ ID NO: 455120 - RNA, 22 nt, Human
ccaaagucugcauuuuaacaug

SEQ ID NO: 455121 - RNA, 22 nt, Human
uucuccgcuaaguucucugcag

SEQ ID NO: 455122 - RNA, 22 nt, Human
aacaaacaaacauuuugucauc

SEQ ID NO: 455123 - RNA, 22 nt, Human
uuugcauugcauuaaguauucu

SEQ ID NO: 455124 - RNA, 22 nt, Human
gccagagcugagugagguucuu

SEQ ID NO: 455125 - RNA, 22 nt, Human
cuuuucauuguuuguacaugca

SEQ ID NO: 455126 - RNA, 22 nt, Human
ugagccuguggggugacaacca

SEQ ID NO: 455127 - RNA, 22 nt, Human
ccaggagccacucaggcccaca

SEQ ID NO: 455128 - RNA, 22 nt, Human
caggccuccacuccacgcagac

SEQ ID NO: 455129 - RNA, 22 nt, Human
acuuccuggcugggugaccugg

SEQ ID NO: 455130 - RNA, 20 nt, Human
ucugucucugagcuagacuu

SEQ ID NO: 455131 - RNA, 22 nt, Human
ccaggcagagggaauagcaagu

SEQ ID NO: 455132 - RNA, 22 nt, Human
cagauggaacacagaaaggaga

SEQ ID NO: 455133 - RNA, 22 nt, Human
agcagaaccacagcacuguuga

SEQ ID NO: 455134 - RNA, 22 nt, Human
aaugagcuagaccugcuuccuc

SEQ ID NO: 455135 - RNA, 22 nt, Human
ggucaggggcugcucuacagag

SEQ ID NO: 455136 - RNA, 22 nt, Human
ucugccugagcagagggaggcc

SEQ ID NO: 455137 - RNA, 22 nt, Human
aacauacagugagcaguggacu

SEQ ID NO: 455138 - RNA, 22 nt, Human
guuugcauguguacuuaauugg

SEQ ID NO: 455139 - RNA, 22 nt, Human
uccaggcauaagccuugagugu

SEQ ID NO: 455140 - RNA, 20 nt, Human
ugugcccaauguccagguuc

SEQ ID NO: 455141 - RNA, 21 nt, Human
acagaacuguauagugauaaa

SEQ ID NO: 455142 - RNA, 22 nt, Human
aaugagcugcugcuguuccacc

SEQ ID NO: 455143 - RNA, 18 nt, Human
agugugugcccuuucagg

SEQ ID NO: 455144 - RNA, 22 nt, Human
ggcagcugggucacaccgaucu

SEQ ID NO: 455145 - RNA, 22 nt, Human
uggaagccaggcccgcuccuaa

SEQ ID NO: 455146 - RNA, 22 nt, Human
cuucuuuacuuucuagaaauaa

SEQ ID NO: 455147 - RNA, 19 nt, Human
cugaagucuuuucagcugg

SEQ ID NO: 455148 - RNA, 21 nt, Human
ucccagagugcuugggacugc

SEQ ID NO: 455149 - RNA, 23 nt, Human
ggccauggagacuuagaaugggc

SEQ ID NO: 455150 - RNA, 23 nt, Human
agaagcagcuucuggaguaucgg

SEQ ID NO: 455151 - RNA, 22 nt, Human
gcagcccagagcgcaggacccc

SEQ ID NO: 455152 - RNA, 22 nt, Human
ggcuuccuggagaaggucugag

SEQ ID NO: 455153 - RNA, 22 nt, Human
caguacuuugaagauauuuuag

SEQ ID NO: 455154 - RNA, 22 nt, Human
aaaugucuuucaauagagaaau

SEQ ID NO: 455155 - RNA, 22 nt, Human
acaagaauuauuucuaguuaac

SEQ ID NO: 455156 - RNA, 19 nt, Human
cccagagcauccugaacuu

SEQ ID NO: 455157 - RNA, 22 nt, Human
acugcagggcauccuggccaag

SEQ ID NO: 455158 - RNA, 22 nt, Human
ugcuuuggccacuagaauucag

SEQ ID NO: 455159 - RNA, 20 nt, Human
uccuugaaagugggguauau

SEQ ID NO: 455160 - RNA, 23 nt, Human
aguacauucgaaaaauucuguga

SEQ ID NO: 455161 - RNA, 22 nt, Human
cccaggaggccaagguugcagu

SEQ ID NO: 455162 - RNA, 22 nt, Human
acuguacuguguauuguagaau

SEQ ID NO: 455163 - RNA, 22 nt, Human
caagaaggcuauaugggccagg

SEQ ID NO: 455164 - RNA, 22 nt, Human
ccuggcacgaagggcugagguu

SEQ ID NO: 455165 - RNA, 22 nt, Human
gaugccucuuuuggcugaauua

SEQ ID NO: 455166 - RNA, 22 nt, Human
cagagguauugcaaaagccuag

SEQ ID NO: 455167 - RNA, 22 nt, Human
acacuuuguuguggcauauacg

SEQ ID NO: 455168 - RNA, 22 nt, Human
augggagugacagggccacugg

SEQ ID NO: 455169 - RNA, 22 nt, Human
gggcugcugcugccagcgacac

SEQ ID NO: 455170 - RNA, 22 nt, Human
gguggcagcgucuaucugacau

SEQ ID NO: 455171 - RNA, 22 nt, Human
gccuucagcggccgcucgcugc

SEQ ID NO: 455172 - RNA, 22 nt, Human
aaaagcucuuucugcuguagau

SEQ ID NO: 455173 - RNA, 22 nt, Human
ugcuggccgugagcucucggga

SEQ ID NO: 455174 - RNA, 22 nt, Human
gcagggcauagaggcacggagg

SEQ ID NO: 455175 - RNA, 22 nt, Human
augugcauuaaaugucaauguu

SEQ ID NO: 455176 - RNA, 22 nt, Human
cccccaggcucugacacaggag

SEQ ID NO: 455177 - RNA, 22 nt, Human
uuugcauuguaauauuuaguuc

SEQ ID NO: 455178 - RNA, 22 nt, Human
aucaguuugagugcugugucaa

SEQ ID NO: 455179 - RNA, 22 nt, Human
agcagcugucccuuaacaucag

SEQ ID NO: 455180 - RNA, 22 nt, Human
agggggaggcugugcugcgucu

SEQ ID NO: 455181 - RNA, 22 nt, Human
ccaggcaggcgauggugcagug

SEQ ID NO: 455182 - RNA, 21 nt, Human
gcugccaccgcgugcuccagg

SEQ ID NO: 455183 - RNA, 22 nt, Human
guauuaggaaauaugaagaaag

SEQ ID NO: 455184 - RNA, 22 nt, Human
aagaugcgguugaccauggugu

SEQ ID NO: 455185 - RNA, 22 nt, Human
uuugugaagggaacagaagugu

SEQ ID NO: 455186 - RNA, 22 nt, Human
cugggccuggcguuccaggcug

SEQ ID NO: 455187 - RNA, 22 nt, Human
aaagaacagauguguggugcau

SEQ ID NO: 455188 - RNA, 22 nt, Human
uauccaaaggaacaaucacagc

SEQ ID NO: 455189 - RNA, 22 nt, Human
ccaggccugugcaaggagggag

SEQ ID NO: 455190 - RNA, 22 nt, Human
ucugagaggcagaccuuccuaa

SEQ ID NO: 455191 - RNA, 22 nt, Human
gccugcaguucugugcuaggca

SEQ ID NO: 455192 - RNA, 22 nt, Human
cucuccucagaacaggcccucu

SEQ ID NO: 455193 - RNA, 22 nt, Human
gcugccaugccacagcacucac

SEQ ID NO: 455194 - RNA, 18 nt, Human
cugagggcagccccuggg

SEQ ID NO: 455195 - RNA, 20 nt, Human
aagagcauaguacaggaaga

SEQ ID NO: 455196 - RNA, 22 nt, Human
cucugagaaagcugugagcuaa

SEQ ID NO: 455197 - RNA, 22 nt, Human
ccuggagccccucuggccagcc

SEQ ID NO: 455198 - RNA, 22 nt, Human
gcauuuauuucuuuacugcauc

SEQ ID NO: 455199 - RNA, 22 nt, Human
gagggccaauggauuucaacug

SEQ ID NO: 455200 - RNA, 22 nt, Human
agcagcucuuaacaaagcaugg

SEQ ID NO: 455201 - RNA, 22 nt, Human
ggccugcucugcagccucuaca

SEQ ID NO: 455202 - RNA, 22 nt, Human
aagccucaccuuuuagaagcua

SEQ ID NO: 455203 - RNA, 22 nt, Human
aaggccaggacaccaggggacu

SEQ ID NO: 455204 - RNA, 22 nt, Human
aaagauuucagaagccugugcc

SEQ ID NO: 455205 - RNA, 22 nt, Human
aagaaaacguuuugaggaguuu

SEQ ID NO: 455206 - RNA, 21 nt, Human
ugaggcaggggugcuuuuguc

SEQ ID NO: 455207 - RNA, 22 nt, Human
caguggugaagagcaggggcuc

SEQ ID NO: 455208 - RNA, 22 nt, Human
ccagaggucuccugcacgggau

SEQ ID NO: 455209 - RNA, 22 nt, Human
gagucugagaacugggcucagu

SEQ ID NO: 455210 - RNA, 22 nt, Human
uugauacaggccuucuagauga

SEQ ID NO: 455211 - RNA, 22 nt, Human
cucccacuccuggcucaccaca

SEQ ID NO: 455212 - RNA, 22 nt, Human
ucuggagauaagacagacagau

SEQ ID NO: 455213 - RNA, 22 nt, Human
aaaugaacaguugcauucucug

SEQ ID NO: 455214 - RNA, 22 nt, Human
cugccucugcgucccacagagu

SEQ ID NO: 455215 - RNA, 22 nt, Human
cauuuauugguuaggccagcag

SEQ ID NO: 455216 - RNA, 22 nt, Human
uucauguaauuccauaagguaa

SEQ ID NO: 455217 - RNA, 22 nt, Human
gccugggaacucugaucuccug

SEQ ID NO: 455218 - RNA, 22 nt, Human
ggugaggaauuggggacugacc

SEQ ID NO: 455219 - RNA, 18 nt, Human
gaggccugagaaccaggu

SEQ ID NO: 455220 - RNA, 22 nt, Human
gcagccugaggcccuuucuggc

SEQ ID NO: 455221 - RNA, 22 nt, Human
cagaggaaaugggaaggagaua

SEQ ID NO: 455222 - RNA, 22 nt, Human
ucacagacauggugagguaaca

SEQ ID NO: 455223 - RNA, 22 nt, Human
uaggccauucuuggagcuuacu

SEQ ID NO: 455224 - RNA, 22 nt, Human
aaaagggacuacucucagcucc

SEQ ID NO: 455225 - RNA, 22 nt, Human
ucuuuuggaaaugaugugcagg

SEQ ID NO: 455226 - RNA, 22 nt, Human
cuguagccagaagcagaaggcc

SEQ ID NO: 455227 - RNA, 22 nt, Human
ccucagggacuccaugcugcag

SEQ ID NO: 455228 - RNA, 22 nt, Human
gcuccagaugaaaggccagagg

SEQ ID NO: 455229 - RNA, 23 nt, Human
cauguacagaguuugauaaagug

SEQ ID NO: 455230 - RNA, 22 nt, Human
gaccucagugaauggucaugua

SEQ ID NO: 455231 - RNA, 22 nt, Human
aaggagagagcuuugcuggaac

SEQ ID NO: 455232 - RNA, 22 nt, Human
augcagcuucaggauuaugaug

SEQ ID NO: 455233 - RNA, 22 nt, Human
uuuccuaugauauucuaugugu

SEQ ID NO: 455234 - RNA, 22 nt, Human
ugugucaauuuucauuccuacu

SEQ ID NO: 455235 - RNA, 22 nt, Human
caggccuggagugcaauggcac

SEQ ID NO: 455236 - RNA, 22 nt, Human
ucccacugcuuugcucugcuca

SEQ ID NO: 455237 - RNA, 22 nt, Human
agccagagagccccagguucua

SEQ ID NO: 455238 - RNA, 22 nt, Human
gcagcuggggccacacuuaggc

SEQ ID NO: 455239 - RNA, 22 nt, Human
gucaggaugggcagccaaacua

SEQ ID NO: 455240 - RNA, 22 nt, Human
aggaggccgggauucuggagau

SEQ ID NO: 455241 - RNA, 22 nt, Human
cagagcauaauugacaugaggu

SEQ ID NO: 455242 - RNA, 22 nt, Human
gcagggcugcagagggcacugu

SEQ ID NO: 455243 - RNA, 22 nt, Human
aucucagucagguugaauuugg

SEQ ID NO: 455244 - RNA, 22 nt, Human
ugccuggcaagaggggcuggcu

SEQ ID NO: 455245 - RNA, 22 nt, Human
gcugcccuaauaucacauguua

SEQ ID NO: 455246 - RNA, 22 nt, Human
guggcgcagaggguggcagaga

SEQ ID NO: 455247 - RNA, 22 nt, Human
gagagggcugccuggugugagg

SEQ ID NO: 455248 - RNA, 22 nt, Human
ugaggcucagagcaccugcucc

SEQ ID NO: 455249 - RNA, 22 nt, Human
agguagaggccuccaggcagca

SEQ ID NO: 455250 - RNA, 22 nt, Human
gccuggagugcaguggcgugau

SEQ ID NO: 455251 - RNA, 22 nt, Human
agccuguccagaggacagggcu

SEQ ID NO: 455252 - RNA, 17 nt, Human
gagccacccugugcgag

SEQ ID NO: 455253 - RNA, 18 nt, Human
ccuggcuuccaucuuggu

SEQ ID NO: 455254 - RNA, 22 nt, Human
ggucccaggauugguugcgcag

SEQ ID NO: 455255 - RNA, 22 nt, Human
ccugucucccuggcauggcuca

SEQ ID NO: 455256 - RNA, 22 nt, Human
acauuucuuucuauucaguagc

SEQ ID NO: 455257 - RNA, 22 nt, Human
accaggcaaaaccacaggagca

SEQ ID NO: 455258 - RNA, 21 nt, Human
gcagaugggagucaucaggcu

SEQ ID NO: 455259 - RNA, 22 nt, Human
gcucaggacccaggugugaccu

SEQ ID NO: 455260 - RNA, 22 nt, Human
uuaugcuaaaugaaucaaguca

SEQ ID NO: 455261 - RNA, 18 nt, Human
cugaaggauccaggugua

SEQ ID NO: 455262 - RNA, 22 nt, Human
aaguuuuaacaaguacuuacua

SEQ ID NO: 455263 - RNA, 22 nt, Human
uuauguaccugaauuaguaaag

SEQ ID NO: 455264 - RNA, 21 nt, Human
ccuucuccacagggucuccgg

SEQ ID NO: 455265 - RNA, 22 nt, Human
gggcucugcgcucagcuccagc

SEQ ID NO: 455266 - RNA, 22 nt, Human
ccugggaguggcacucacagca

SEQ ID NO: 455267 - RNA, 22 nt, Human
cucaggauucucgacacucaca

SEQ ID NO: 455268 - RNA, 22 nt, Human
ggcucagaaacuaaaggcgcug

SEQ ID NO: 455269 - RNA, 22 nt, Human
acagaggaaggcugagcugccc

SEQ ID NO: 455270 - RNA, 22 nt, Human
cccagggaaugacucuggccuu

SEQ ID NO: 455271 - RNA, 22 nt, Human
gacccaggguggucaccugaaa

SEQ ID NO: 455272 - RNA, 22 nt, Human
gggcagcugcagggauggugac

SEQ ID NO: 455273 - RNA, 22 nt, Human
auuucagcccaguaugagcccc

SEQ ID NO: 455274 - RNA, 22 nt, Human
ucauuuguucucauucucuacu

SEQ ID NO: 455275 - RNA, 22 nt, Human
agguggcucugacagcucuggu

SEQ ID NO: 455276 - RNA, 18 nt, Human
ugcccagaaaagcaggga

SEQ ID NO: 455277 - RNA, 19 nt, Human
ggagccuggagcacgugcc

SEQ ID NO: 455278 - RNA, 22 nt, Human
gcugugugaaaacugggccugg

SEQ ID NO: 455279 - RNA, 22 nt, Human
augaggcaucuaacauugcaaa

SEQ ID NO: 455280 - RNA, 22 nt, Human
cagcugccuucugcgggaaguc

SEQ ID NO: 455281 - RNA, 22 nt, Human
agcaguggaccucagugcuauu

SEQ ID NO: 455282 - RNA, 22 nt, Human
aagcccagaugggagcauuuca

SEQ ID NO: 455283 - RNA, 22 nt, Human
guauuaggaggaacacaggccu

SEQ ID NO: 455284 - RNA, 22 nt, Human
ugugccaugaggcucugauaug

SEQ ID NO: 455285 - RNA, 22 nt, Human
guggcuucacauggcauuuggc

SEQ ID NO: 455286 - RNA, 22 nt, Human
cugcuggggucagagcacuggg

SEQ ID NO: 455287 - RNA, 22 nt, Human
cugggaggugcagcaaaaauca

SEQ ID NO: 455288 - RNA, 22 nt, Human
aauuaacagagggcuuauuacu

SEQ ID NO: 455289 - RNA, 19 nt, Human
ggcucucccuugagagagc

SEQ ID NO: 455290 - RNA, 22 nt, Human
gcugcagcagcugcaggguugu

SEQ ID NO: 455291 - RNA, 22 nt, Human
ggcagcugugaagugccucaca

SEQ ID NO: 455292 - RNA, 22 nt, Human
acacagggggcauucuaggagu

SEQ ID NO: 455293 - RNA, 22 nt, Human
aucaggauagucuguaaauugu

SEQ ID NO: 455294 - RNA, 22 nt, Human
acauaugcucaucugcauuccc

SEQ ID NO: 455295 - RNA, 19 nt, Human
ugcagaggguaggaaggcc

SEQ ID NO: 455296 - RNA, 19 nt, Human
uggaccugugcccauggcu

SEQ ID NO: 455297 - RNA, 22 nt, Human
guacauuucucuuguucuuauu

SEQ ID NO: 455298 - RNA, 22 nt, Human
agaagccagaauauucauggau

SEQ ID NO: 455299 - RNA, 22 nt, Human
agcugccaaguuggaguagcaa

SEQ ID NO: 455300 - RNA, 22 nt, Human
auucuucauguugaagcuguca

SEQ ID NO: 455301 - RNA, 22 nt, Human
auugaaaguccuaucuaaggga

SEQ ID NO: 455302 - RNA, 22 nt, Human
ggccugcacagagguggcucua

SEQ ID NO: 455303 - RNA, 22 nt, Human
uuagaaagcuuuccauagucaa

SEQ ID NO: 455304 - RNA, 22 nt, Human
cacacaggaugaagcagcagaa

SEQ ID NO: 455305 - RNA, 22 nt, Human
gcugagagaucaaggcaggauu

SEQ ID NO: 455306 - RNA, 22 nt, Human
gcugcucuccauggccgugagu

SEQ ID NO: 455307 - RNA, 22 nt, Human
uuuauuccaugugucuaugacc

SEQ ID NO: 455308 - RNA, 22 nt, Human
ggaagccagagugcugggcagg

SEQ ID NO: 455309 - RNA, 22 nt, Human
ggaggccaaagugugggcggcu

SEQ ID NO: 455310 - RNA, 22 nt, Human
acuuucucaggaauucacagac

SEQ ID NO: 455311 - RNA, 22 nt, Human
uugucccaggacuugcauagau

SEQ ID NO: 455312 - RNA, 22 nt, Human
uauuuguauguguguacauaua

SEQ ID NO: 455313 - RNA, 22 nt, Human
acccaggccugagagacaggag

SEQ ID NO: 455314 - RNA, 22 nt, Human
gcuuucuugguucugcaggggc

SEQ ID NO: 455315 - RNA, 19 nt, Human
gugauuucuuuccacaagc

SEQ ID NO: 455316 - RNA, 22 nt, Human
augggcuguccuaguccagccc

SEQ ID NO: 455317 - RNA, 18 nt, Human
cucucugggugaggacaa

SEQ ID NO: 455318 - RNA, 21 nt, Human
cacaggugggucagugaggcc

SEQ ID NO: 455319 - RNA, 22 nt, Human
cacacaugucucuccaugcucu

SEQ ID NO: 455320 - RNA, 21 nt, Human
ugcaggaaagugcugcgaccc

SEQ ID NO: 455321 - RNA, 22 nt, Human
ugcugcucuucaccauggccuc

SEQ ID NO: 455322 - RNA, 21 nt, Human
ugggggagaauugguugcuuu

SEQ ID NO: 455323 - RNA, 22 nt, Human
ugggcagagaguagaggcaacg

SEQ ID NO: 455324 - RNA, 22 nt, Human
uguaacaaaauaccuuggauug

SEQ ID NO: 455325 - RNA, 22 nt, Human
ccagccucacuggcaucaccua

SEQ ID NO: 455326 - RNA, 22 nt, Human
auguguaaaaagugcuuaauau

SEQ ID NO: 455327 - RNA, 22 nt, Human
uuauguaauuuguuugcucuuc

SEQ ID NO: 455328 - RNA, 22 nt, Human
gcacacccucucaccagcacug

SEQ ID NO: 455329 - RNA, 22 nt, Human
cagggccauaucuugugcacca

SEQ ID NO: 455330 - RNA, 22 nt, Human
uaaggcacccgugagcugccag

SEQ ID NO: 455331 - RNA, 22 nt, Human
uuccagcaggcagacaggagau

SEQ ID NO: 455332 - RNA, 22 nt, Human
agccaggcagggcucucgcucu

SEQ ID NO: 455333 - RNA, 22 nt, Human
acugggaggcaucuggagcuga

SEQ ID NO: 455334 - RNA, 22 nt, Human
uccuggagccacggagcuuuca

SEQ ID NO: 455335 - RNA, 22 nt, Human
aaaguuugaaugauauauuagu

SEQ ID NO: 455336 - RNA, 22 nt, Human
acagugugugcuuucccuuacg

SEQ ID NO: 455337 - RNA, 22 nt, Human
gcacugaaaauguuggauucca

SEQ ID NO: 455338 - RNA, 22 nt, Human
cucagaauuacaucccauuuua

SEQ ID NO: 455339 - RNA, 22 nt, Human
ggccagggccuggggacugucc

SEQ ID NO: 455340 - RNA, 22 nt, Human
accgaaggaaacuggaaccguu

SEQ ID NO: 455341 - RNA, 22 nt, Human
gggcauggaggucugucugcag

SEQ ID NO: 455342 - RNA, 22 nt, Human
aagcuuccugaaugcucauuua

SEQ ID NO: 455343 - RNA, 22 nt, Human
ccugagggaggguauaggcugu

SEQ ID NO: 455344 - RNA, 22 nt, Human
cacucugacuggcccugcagga

SEQ ID NO: 455345 - RNA, 23 nt, Human
uggcucagggucucuuaugaagu

SEQ ID NO: 455346 - RNA, 22 nt, Human
agaaacugaauuauuucugagg

SEQ ID NO: 455347 - RNA, 19 nt, Human
agucccaggcccgaaagag

SEQ ID NO: 455348 - RNA, 22 nt, Human
uuuauuauguacaggcacuaua

SEQ ID NO: 455349 - RNA, 22 nt, Human
acaguguguucugggaccucca

SEQ ID NO: 455350 - RNA, 20 nt, Human
uuaagaaaagcacauccugc

SEQ ID NO: 455351 - RNA, 22 nt, Human
cacaaugcguacauauaucaaa

SEQ ID NO: 455352 - RNA, 22 nt, Human
uuuaugagcaaugcugagggga

SEQ ID NO: 455353 - RNA, 22 nt, Human
caggaaggcccaccuguccugu

SEQ ID NO: 455354 - RNA, 23 nt, Human
aucagucuugguagcugugccca

SEQ ID NO: 455355 - RNA, 22 nt, Human
agcauggggcaaugcaugugcu

SEQ ID NO: 455356 - RNA, 22 nt, Human
ccagaagacaagaauguucuua

SEQ ID NO: 455357 - RNA, 22 nt, Human
gaucaaaagcuggguucuaaaa

SEQ ID NO: 455358 - RNA, 17 nt, Human
agcagcugaagcagcca

SEQ ID NO: 455359 - RNA, 22 nt, Human
aagcugccacacggugaguacu

SEQ ID NO: 455360 - RNA, 20 nt, Human
ucuuacaaucguuacaucca

SEQ ID NO: 455361 - RNA, 22 nt, Human
gugugcagucugcuaggcaggg

SEQ ID NO: 455362 - RNA, 23 nt, Human
uggcagagacccagaaucuacau

SEQ ID NO: 455363 - RNA, 22 nt, Human
aggcacuguggaagacaugguu

SEQ ID NO: 455364 - RNA, 22 nt, Human
cugccuggagcauucugaaggu

SEQ ID NO: 455365 - RNA, 22 nt, Human
gccaaaucuggauuuagcaaga

SEQ ID NO: 455366 - RNA, 22 nt, Human
agggcagcuagcuguagaaaga

SEQ ID NO: 455367 - RNA, 21 nt, Human
aggugccaaggagaagcaggc

SEQ ID NO: 455368 - RNA, 21 nt, Human
ucacaucuauguuaagcaaac

SEQ ID NO: 455369 - RNA, 22 nt, Human
aggaccuguaccucagcaucua

SEQ ID NO: 455370 - RNA, 22 nt, Human
cacuggggaaaacaggcuucuu

SEQ ID NO: 455371 - RNA, 22 nt, Human
ccugggcagggcuggacucuca

SEQ ID NO: 455372 - RNA, 22 nt, Human
aggcacaguuucauccccgggc

SEQ ID NO: 455373 - RNA, 22 nt, Human
agcagggggaguuagacuagau

SEQ ID NO: 455374 - RNA, 22 nt, Human
ugaggccugcccuggggaaguu

SEQ ID NO: 455375 - RNA, 22 nt, Human
uauggaaaguguuuucuucugu

SEQ ID NO: 455376 - RNA, 22 nt, Human
gcuuugcauuguuuaaucagga

SEQ ID NO: 455377 - RNA, 22 nt, Human
acagcaaaggacgaacacucug

SEQ ID NO: 455378 - RNA, 22 nt, Human
auccucagaccucagcaaagcc

SEQ ID NO: 455379 - RNA, 22 nt, Human
gccuggagcccaguguggggcu

SEQ ID NO: 455380 - RNA, 22 nt, Human
ugcugcacaauuggaaaguauc

SEQ ID NO: 455381 - RNA, 22 nt, Human
uuacuuugaugaucaaugagcg

SEQ ID NO: 455382 - RNA, 22 nt, Human
ugcagggaacuuggacagcuag

SEQ ID NO: 455383 - RNA, 22 nt, Human
uauagaagagacaugugcauag

SEQ ID NO: 455384 - RNA, 22 nt, Human
agcaccugcuaugugucaggga

SEQ ID NO: 455385 - RNA, 22 nt, Human
aaguggugguaugaaccgaggg

SEQ ID NO: 455386 - RNA, 22 nt, Human
cuaucuuuuguucauuuugagu

SEQ ID NO: 455387 - RNA, 22 nt, Human
cugaggcuuggaggggucuggu

SEQ ID NO: 455388 - RNA, 22 nt, Human
auugucgcuuauuuaggugcuu

SEQ ID NO: 455389 - RNA, 22 nt, Human
ucagagcuaaggggagagcaaa

SEQ ID NO: 455390 - RNA, 21 nt, Human
gcccucaggggaggauggccu

SEQ ID NO: 455391 - RNA, 22 nt, Human
ucagcagaggggaaggcaucug

SEQ ID NO: 455392 - RNA, 22 nt, Human
acacugaauauacaaugaauau

SEQ ID NO: 455393 - RNA, 22 nt, Human
aggccuguuccaggccccuuuu

SEQ ID NO: 455394 - RNA, 22 nt, Human
aggugccaauuuucagugaaca

SEQ ID NO: 455395 - RNA, 22 nt, Human
agucacccuccaacucuccacu

SEQ ID NO: 455396 - RNA, 22 nt, Human
gaggcucacgacgggacgaacu

SEQ ID NO: 455397 - RNA, 22 nt, Human
guaaaauugcaauuacuuuugc

SEQ ID NO: 455398 - RNA, 22 nt, Human
aggauccuccuuagaaaagacc

SEQ ID NO: 455399 - RNA, 22 nt, Human
guuuuccuucucagccauugcc

SEQ ID NO: 455400 - RNA, 22 nt, Human
cacagcuucugagugaggauuu

SEQ ID NO: 455401 - RNA, 22 nt, Human
cugguccuccuugccuucagau

SEQ ID NO: 455402 - RNA, 22 nt, Human
ccaguugguuucaaugggacag

SEQ ID NO: 455403 - RNA, 22 nt, Human
agucuucagagaaauuaacucu

SEQ ID NO: 455404 - RNA, 19 nt, Human
ggcuggcaagugacagugu

SEQ ID NO: 455405 - RNA, 22 nt, Human
aaaugguauuuacucuguauua

SEQ ID NO: 455406 - RNA, 22 nt, Human
cagcuggcgggcagagccgcca

SEQ ID NO: 455407 - RNA, 22 nt, Human
acugccauuggucaaaugagug

SEQ ID NO: 455408 - RNA, 22 nt, Human
gccagucugcucccacaaguuc

SEQ ID NO: 455409 - RNA, 22 nt, Human
uauguacauaacaugaaaugca

SEQ ID NO: 455410 - RNA, 22 nt, Human
uucaaucauuuuuacauagucc

SEQ ID NO: 455411 - RNA, 22 nt, Human
gcccagugguaaaagcaggccu

SEQ ID NO: 455412 - RNA, 22 nt, Human
ugguggacaccgcagccaugaa

SEQ ID NO: 455413 - RNA, 22 nt, Human
gacuguacuugagagaggaacu

SEQ ID NO: 455414 - RNA, 22 nt, Human
agccacagcaacaagugcaauu

SEQ ID NO: 455415 - RNA, 22 nt, Human
auuuauguaucuguguagauca

SEQ ID NO: 455416 - RNA, 22 nt, Human
acagagcaauaacagggagagg

SEQ ID NO: 455417 - RNA, 22 nt, Human
guuauuuuaacuucucaguaau

SEQ ID NO: 455418 - RNA, 22 nt, Human
uuacugaaaauucuucaggauu

SEQ ID NO: 455419 - RNA, 22 nt, Human
gucccuggggaaucagcuggag

SEQ ID NO: 455420 - RNA, 22 nt, Human
uugcauuguaggauguuagaag

SEQ ID NO: 455421 - RNA, 22 nt, Human
agcagcugggcucagagcuggg

SEQ ID NO: 455422 - RNA, 22 nt, Human
augugaaacugaagcauccaua

SEQ ID NO: 455423 - RNA, 22 nt, Human
cuucaggauuuaggaagaugaa

SEQ ID NO: 455424 - RNA, 22 nt, Human
uggacaacauagugagaccuca

SEQ ID NO: 455425 - RNA, 22 nt, Human
gcugucugggaugucacugcug

SEQ ID NO: 455426 - RNA, 22 nt, Human
aggucacacaacugucagaggc

SEQ ID NO: 455427 - RNA, 22 nt, Human
agcaggcuccuuccuucucugg

SEQ ID NO: 455428 - RNA, 22 nt, Human
uccauucuaugcuuacauuuau

SEQ ID NO: 455429 - RNA, 22 nt, Human
auguaagguucagaguauguga

SEQ ID NO: 455430 - RNA, 22 nt, Human
ucccaaggauaagagagucuga

SEQ ID NO: 455431 - RNA, 22 nt, Human
agauuuccaucuuuuucaugug

SEQ ID NO: 455432 - RNA, 22 nt, Human
aggacccagaggcagaggacgu

SEQ ID NO: 455433 - RNA, 22 nt, Human
aggaggcuguggagcacuccau

SEQ ID NO: 455434 - RNA, 22 nt, Human
aagccaggaagagagccuucac

SEQ ID NO: 455435 - RNA, 22 nt, Human
cagggcacaguuauggaggugg

SEQ ID NO: 455436 - RNA, 22 nt, Human
ccuggccuggcacucccucugc

SEQ ID NO: 455437 - RNA, 19 nt, Human
gcuguacaguaaggagaca

SEQ ID NO: 455438 - RNA, 22 nt, Human
gaggcagagguuguugcaguga

SEQ ID NO: 455439 - RNA, 22 nt, Human
acucaggaaaugagaggcucuc

SEQ ID NO: 455440 - RNA, 22 nt, Human
guaaaauucuagcaucugaaag

SEQ ID NO: 455441 - RNA, 22 nt, Human
guagggacaauauguuauuaga

SEQ ID NO: 455442 - RNA, 22 nt, Human
cagggcucaggaaaucagacgu

SEQ ID NO: 455443 - RNA, 22 nt, Human
gauuucaagcccccagagauuc

SEQ ID NO: 455444 - RNA, 22 nt, Human
uguguccauucaggcacugacc

SEQ ID NO: 455445 - RNA, 22 nt, Human
uacagauacagaucuagauaca

SEQ ID NO: 455446 - RNA, 22 nt, Human
agcugcugugugcucaggcagg

SEQ ID NO: 455447 - RNA, 22 nt, Human
gugcauuugacgaauacucacu

SEQ ID NO: 455448 - RNA, 22 nt, Human
agagaugucgccuugcccaggg

SEQ ID NO: 455449 - RNA, 22 nt, Human
agccacagagcaggagaccuuu

SEQ ID NO: 455450 - RNA, 18 nt, Human
uccucucuuuccccaggg

SEQ ID NO: 455451 - RNA, 22 nt, Human
aucacauuguuagcauagacug

SEQ ID NO: 455452 - RNA, 22 nt, Human
aaagguaguacuucuagaaggg

SEQ ID NO: 455453 - RNA, 22 nt, Human
acuguacuuuucuuggcuagau

SEQ ID NO: 455454 - RNA, 22 nt, Human
uguuuuaugagccauauaaccu

SEQ ID NO: 455455 - RNA, 22 nt, Human
aggagggcaggcuggcugccua

SEQ ID NO: 455456 - RNA, 22 nt, Human
cagggcugaacugagcuuguga

SEQ ID NO: 455457 - RNA, 22 nt, Human
accacuguaucuccagcacauu

SEQ ID NO: 455458 - RNA, 22 nt, Human
aagccagauagaagaacucauu

SEQ ID NO: 455459 - RNA, 22 nt, Human
uggaagaauaggauagaagaac

SEQ ID NO: 455460 - RNA, 22 nt, Human
cagguggguacaucacagagac

SEQ ID NO: 455461 - RNA, 22 nt, Human
ugcuuuauuuuaaauaugccau

SEQ ID NO: 455462 - RNA, 22 nt, Human
uuauacuaaaacgcauugaauu

SEQ ID NO: 455463 - RNA, 22 nt, Human
acagaaggcggggacaaggcgg

SEQ ID NO: 455464 - RNA, 23 nt, Human
ugaagugaaauuucacaagggac

SEQ ID NO: 455465 - RNA, 22 nt, Human
caggacagagcccagacugugu

SEQ ID NO: 455466 - RNA, 22 nt, Human
cuuccugcauugugccagaguu

SEQ ID NO: 455467 - RNA, 22 nt, Human
cagcugaagagaggugcugagu

SEQ ID NO: 455468 - RNA, 22 nt, Human
gggagcugagggaccucugugg

SEQ ID NO: 455469 - RNA, 22 nt, Human
ggaccugcauuuuaacaagauc

SEQ ID NO: 455470 - RNA, 22 nt, Human
cccauuuagauaacaguucaaa

SEQ ID NO: 455471 - RNA, 22 nt, Human
cugggccaucagaggggcugga

SEQ ID NO: 455472 - RNA, 22 nt, Human
aggaccugacuggcuccugcuu

SEQ ID NO: 455473 - RNA, 22 nt, Human
cagaggcaaaagagguggaggu

SEQ ID NO: 455474 - RNA, 22 nt, Human
ggcaggugcucugugggccugg

SEQ ID NO: 455475 - RNA, 22 nt, Human
aacuagaaaacaagaugcugau

SEQ ID NO: 455476 - RNA, 22 nt, Human
agaacuuaggaacaacagcuua

SEQ ID NO: 455477 - RNA, 22 nt, Human
ucagggcaucucuuaaguggug

SEQ ID NO: 455478 - RNA, 22 nt, Human
gaagccacccuccuuccagccc

SEQ ID NO: 455479 - RNA, 22 nt, Human
caucacugacgcugagauucca

SEQ ID NO: 455480 - RNA, 22 nt, Human
cuggccugagaaugcuacccuu

SEQ ID NO: 455481 - RNA, 22 nt, Human
cagucccaucucccagguggcu

SEQ ID NO: 455482 - RNA, 23 nt, Human
ggcagcucucaucugaugacuga

SEQ ID NO: 455483 - RNA, 22 nt, Human
gcacaugguaggcauuugaugu

SEQ ID NO: 455484 - RNA, 22 nt, Human
gugccuggcacacagaaggcaa

SEQ ID NO: 455485 - RNA, 22 nt, Human
uaaauguauaggcacuaaaccu

SEQ ID NO: 455486 - RNA, 22 nt, Human
aucacauugccagugauuaccc

SEQ ID NO: 455487 - RNA, 20 nt, Human
ucagggcaugggacagcccc

SEQ ID NO: 455488 - RNA, 22 nt, Human
cuggccuagcucucugcuugaa

SEQ ID NO: 455489 - RNA, 22 nt, Human
ugcagcccuuccuuccucuggg

SEQ ID NO: 455490 - RNA, 22 nt, Human
caguuucuacgaaggucaaccc

SEQ ID NO: 455491 - RNA, 22 nt, Human
guuauguauugggaaauccaag

SEQ ID NO: 455492 - RNA, 18 nt, Human
ugucucugaauuccagug

SEQ ID NO: 455493 - RNA, 22 nt, Human
ugcagcuguuacggacccuguc

SEQ ID NO: 455494 - RNA, 22 nt, Human
gugguaaucggauucuuaccgg

SEQ ID NO: 455495 - RNA, 21 nt, Human
ggcaggauggcaguggacccc

SEQ ID NO: 455496 - RNA, 22 nt, Human
aagagcaucgguggagccccca

SEQ ID NO: 455497 - RNA, 22 nt, Human
agcagcuuacauguggccuauc

SEQ ID NO: 455498 - RNA, 22 nt, Human
uugcagcuucgagucuaucugu

SEQ ID NO: 455499 - RNA, 22 nt, Human
gcagagugaagcaguauggaaa

SEQ ID NO: 455500 - RNA, 22 nt, Human
aacuagaaccacuuguauuucc

SEQ ID NO: 455501 - RNA, 22 nt, Human
ugcaccauguaaguggccacgu

SEQ ID NO: 455502 - RNA, 22 nt, Human
uagauuuccucuuccucauucc

SEQ ID NO: 455503 - RNA, 22 nt, Human
cugcagcuccccugagaucaag

SEQ ID NO: 455504 - RNA, 22 nt, Human
uuacaaaguucugaguucaaac

SEQ ID NO: 455505 - RNA, 22 nt, Human
ccugggucuugguucaugcucu

SEQ ID NO: 455506 - RNA, 22 nt, Human
ucacuccucauugcugcccauu

SEQ ID NO: 455507 - RNA, 21 nt, Human
uuuagggaccaggucauaggc

SEQ ID NO: 455508 - RNA, 22 nt, Human
ccugucaguugcugucagggau

SEQ ID NO: 455509 - RNA, 22 nt, Human
aagcagaauuuaauagaaaggu

SEQ ID NO: 455510 - RNA, 22 nt, Human
uuccaugugaguacacugugau

SEQ ID NO: 455511 - RNA, 22 nt, Human
guggccugaugccagcccugug

SEQ ID NO: 455512 - RNA, 22 nt, Human
uaauacaauggaguugggcccc

SEQ ID NO: 455513 - RNA, 22 nt, Human
uccauccauguaggaagauggu

SEQ ID NO: 455514 - RNA, 22 nt, Human
ucacaggcuccagggccuggau

SEQ ID NO: 455515 - RNA, 22 nt, Human
gccugccuucggugcgcagcgg

SEQ ID NO: 455516 - RNA, 22 nt, Human
ugccagaagauucucuaucaga

SEQ ID NO: 455517 - RNA, 22 nt, Human
ggugcucaagagggcauccucu

SEQ ID NO: 455518 - RNA, 22 nt, Human
aagggcaggcacccacccucac

SEQ ID NO: 455519 - RNA, 22 nt, Human
ccagcugaggcagccacacagg

SEQ ID NO: 455520 - RNA, 22 nt, Human
acugcagcaaagcccgugucuu

SEQ ID NO: 455521 - RNA, 22 nt, Human
agggccagccaggcccuacaaa

SEQ ID NO: 455522 - RNA, 22 nt, Human
aaaaauagcuucucuugucccu

SEQ ID NO: 455523 - RNA, 22 nt, Human
ugggggacugcacuggcgucag

SEQ ID NO: 455524 - RNA, 22 nt, Human
uaguccaguaaaacagcuaacg

SEQ ID NO: 455525 - RNA, 18 nt, Human
gcuccuggaccaggucac

SEQ ID NO: 455526 - RNA, 22 nt, Human
cacugucuuuugugaagacaau

SEQ ID NO: 455527 - RNA, 22 nt, Human
ugucccagaucacaggagggga

SEQ ID NO: 455528 - RNA, 23 nt, Human
uccuucagagccucccuccaagc

SEQ ID NO: 455529 - RNA, 22 nt, Human
agcucccagucuccucuccaug

SEQ ID NO: 455530 - RNA, 19 nt, Human
guuucauuaagauaggaaa

SEQ ID NO: 455531 - RNA, 22 nt, Human
uaaaggcucguauuguugugug

SEQ ID NO: 455532 - RNA, 22 nt, Human
ggagugacucacagcugggaca

SEQ ID NO: 455533 - RNA, 22 nt, Human
ugcagagggacagccacagcuc

SEQ ID NO: 455534 - RNA, 23 nt, Human
aggagacagggaagugccuggcu

SEQ ID NO: 455535 - RNA, 22 nt, Human
gcagcuggcucagagagguggg

SEQ ID NO: 455536 - RNA, 20 nt, Human
ucagauuuuucuaacuuuga

SEQ ID NO: 455537 - RNA, 22 nt, Human
ugagaugaauaacuccugcuaa

SEQ ID NO: 455538 - RNA, 22 nt, Human
uuauuagguuauucucuguacu

SEQ ID NO: 455539 - RNA, 22 nt, Human
ucucagggccccaaaggcuagu

SEQ ID NO: 455540 - RNA, 22 nt, Human
uguccugggaaugggaugcagu

SEQ ID NO: 455541 - RNA, 22 nt, Human
cccaggcagagagcuggugagc

SEQ ID NO: 455542 - RNA, 22 nt, Human
cccuggcagaaugucucugggc

SEQ ID NO: 455543 - RNA, 22 nt, Human
augggugugaaaauggucaucu

SEQ ID NO: 455544 - RNA, 22 nt, Human
gcagggacugugaucucacaga

SEQ ID NO: 455545 - RNA, 22 nt, Human
uggcucugucaaacugcacaca

SEQ ID NO: 455546 - RNA, 22 nt, Human
gcuugggauaugcugauguaaa

SEQ ID NO: 455547 - RNA, 22 nt, Human
acagguggcuuauuggcugauu

SEQ ID NO: 455548 - RNA, 22 nt, Human
ugaggcagucacccccuccugc

SEQ ID NO: 455549 - RNA, 23 nt, Human
uuacaguaggaguuggaaaacca

SEQ ID NO: 455550 - RNA, 22 nt, Human
cuuuggaauaauuuccuggagu

SEQ ID NO: 455551 - RNA, 22 nt, Human
aagcagcauaauugcuauuuua

SEQ ID NO: 455552 - RNA, 22 nt, Human
gagguggguguaucacagguca

SEQ ID NO: 455553 - RNA, 22 nt, Human
uguuacacagcagaauagcaag

SEQ ID NO: 455554 - RNA, 22 nt, Human
caguggcaaugggacagagcac

SEQ ID NO: 455555 - RNA, 22 nt, Human
aggaaccagagguugagcaacu

SEQ ID NO: 455556 - RNA, 22 nt, Human
agauguaguagugggucuuuua

SEQ ID NO: 455557 - RNA, 20 nt, Human
gcugucuggauuagaagccu

SEQ ID NO: 455558 - RNA, 22 nt, Human
ccagagaggggaagggcuugcc

SEQ ID NO: 455559 - RNA, 22 nt, Human
auuuucugguugagguuuaaca

SEQ ID NO: 455560 - RNA, 22 nt, Human
ccucccaccguaucucaguggc

SEQ ID NO: 455561 - RNA, 22 nt, Human
auggcaggcccagguguucauu

SEQ ID NO: 455562 - RNA, 22 nt, Human
auuucacaucuaucucagauuu

SEQ ID NO: 455563 - RNA, 22 nt, Human
ugucaacacaccuaucucaauu

SEQ ID NO: 455564 - RNA, 22 nt, Human
aauguacaucucaguguaguac

SEQ ID NO: 455565 - RNA, 22 nt, Human
agacagaacagaauaauuguug

SEQ ID NO: 455566 - RNA, 22 nt, Human
uccugaaaauaauuucacaaga

SEQ ID NO: 455567 - RNA, 22 nt, Human
guuguacaaaauaucagugagg

SEQ ID NO: 455568 - RNA, 22 nt, Human
ugaggcaggacauggacaacug

SEQ ID NO: 455569 - RNA, 22 nt, Human
cuggugguucaggagaauggcu

SEQ ID NO: 455570 - RNA, 22 nt, Human
cacuguacuggguugaaggacg

SEQ ID NO: 455571 - RNA, 22 nt, Human
ccugugcauccgguggucauug

SEQ ID NO: 455572 - RNA, 22 nt, Human
caguccuggggaccaggcugag

SEQ ID NO: 455573 - RNA, 22 nt, Human
gcugccugggcaggaggcgcug

SEQ ID NO: 455574 - RNA, 22 nt, Human
cauacuuugggauaagagugga

SEQ ID NO: 455575 - RNA, 22 nt, Human
gcagaggauagcauaugaaccu

SEQ ID NO: 455576 - RNA, 22 nt, Human
cugauuccaaagccaaagcuau

SEQ ID NO: 455577 - RNA, 22 nt, Human
aaaaauguuaucuacuguccga

SEQ ID NO: 455578 - RNA, 22 nt, Human
auuugucucugcacuuuacuca

SEQ ID NO: 455579 - RNA, 22 nt, Human
gggagggauuaguucugccugg

SEQ ID NO: 455580 - RNA, 22 nt, Human
aggcuggcuggcaggggacaca

SEQ ID NO: 455581 - RNA, 22 nt, Human
gccugcuguuaacugcaggaau

SEQ ID NO: 455582 - RNA, 22 nt, Human
acagaaauugggcaaauggaag

SEQ ID NO: 455583 - RNA, 22 nt, Human
ucacuguaucauguugcacuua

SEQ ID NO: 455584 - RNA, 22 nt, Human
ggccacuccgcugcuacuggaa

SEQ ID NO: 455585 - RNA, 22 nt, Human
auguaucaugcaggguccauga

SEQ ID NO: 455586 - RNA, 22 nt, Human
agagcugggacuuggacucaau

SEQ ID NO: 455587 - RNA, 22 nt, Human
uuguauuugauugucauaucgu

SEQ ID NO: 455588 - RNA, 22 nt, Human
auagauauuugaguuguuucca

SEQ ID NO: 455589 - RNA, 22 nt, Human
cccccaaggccaggcugagacc

SEQ ID NO: 455590 - RNA, 22 nt, Human
gcaggcuggucugaccaucccu

SEQ ID NO: 455591 - RNA, 22 nt, Human
uccugcagccauuagaggucaa

SEQ ID NO: 455592 - RNA, 22 nt, Human
ugcuggagaggaaggugggguc

SEQ ID NO: 455593 - RNA, 22 nt, Human
ugggccugauucuugaauccug

SEQ ID NO: 455594 - RNA, 22 nt, Human
acaaacuucccagacaagcucc

SEQ ID NO: 455595 - RNA, 21 nt, Human
acaggcucuggggaugcuggg

SEQ ID NO: 455596 - RNA, 22 nt, Human
aaguccuuggagaauagaaagg

SEQ ID NO: 455597 - RNA, 22 nt, Human
uggccuggccacauccagcagg

SEQ ID NO: 455598 - RNA, 22 nt, Human
uccugagaaggcacagcuugca

SEQ ID NO: 455599 - RNA, 22 nt, Human
agccucaguuucaggccuccuc

SEQ ID NO: 455600 - RNA, 22 nt, Human
ugccaggcauauggccucuuug

SEQ ID NO: 455601 - RNA, 22 nt, Human
gccuugcuuugcuucuggacag

SEQ ID NO: 455602 - RNA, 17 nt, Human
ucaggcugugccuggua

SEQ ID NO: 455603 - RNA, 22 nt, Human
agcuguguguuuccacugagcu

SEQ ID NO: 455604 - RNA, 22 nt, Human
gccuucccacccugcgaggcug

SEQ ID NO: 455605 - RNA, 22 nt, Human
agaaaucaauaucuauauguug

SEQ ID NO: 455606 - RNA, 22 nt, Human
augugaggaagaaagagguaag

SEQ ID NO: 455607 - RNA, 22 nt, Human
ggagacagugacuuagagacug

SEQ ID NO: 455608 - RNA, 22 nt, Human
caaggcaggaagccugucuuau

SEQ ID NO: 455609 - RNA, 22 nt, Human
gaagagcuauguccagggagca

SEQ ID NO: 455610 - RNA, 22 nt, Human
uguaaucauuacaguacaugga

SEQ ID NO: 455611 - RNA, 18 nt, Human
gcagugaagaaagagcuu

SEQ ID NO: 455612 - RNA, 22 nt, Human
guaacagaggguuugcagauau

SEQ ID NO: 455613 - RNA, 17 nt, Human
ccagagcuacugagacu

SEQ ID NO: 455614 - RNA, 22 nt, Human
ugaguacucggagugcuuugga

SEQ ID NO: 455615 - RNA, 16 nt, Human
ucagggcagaauggca

SEQ ID NO: 455616 - RNA, 22 nt, Human
gcugccacuuggucaugucaug

SEQ ID NO: 455617 - RNA, 22 nt, Human
ugcagggaaugcuugcagcaug

SEQ ID NO: 455618 - RNA, 22 nt, Human
cugcugcauuacucuucucaag

SEQ ID NO: 455619 - RNA, 21 nt, Human
ggccugagcaccuguccaccu

SEQ ID NO: 455620 - RNA, 22 nt, Human
accaggcugugaagugagacua

SEQ ID NO: 455621 - RNA, 22 nt, Human
uggacucagaaguguucuuuua

SEQ ID NO: 455622 - RNA, 22 nt, Human
ucuaggagcaugaagggaaggc

SEQ ID NO: 455623 - RNA, 22 nt, Human
ccucugcaccauagccuucagc

SEQ ID NO: 455624 - RNA, 22 nt, Human
agugaaauaaagcugccuaugg

SEQ ID NO: 455625 - RNA, 22 nt, Human
gcagggucugaggccacagagg

SEQ ID NO: 455626 - RNA, 22 nt, Human
caaagaugcugauguuggauca

SEQ ID NO: 455627 - RNA, 22 nt, Human
uggggagugaugccucggauaa

SEQ ID NO: 455628 - RNA, 22 nt, Human
cacugaguucccugacauuuca

SEQ ID NO: 455629 - RNA, 22 nt, Human
ugucacaaacauacauuauaga

SEQ ID NO: 455630 - RNA, 22 nt, Human
acagagcuguacuacuuacuga

SEQ ID NO: 455631 - RNA, 22 nt, Human
cugggacacccaaggaaagagc

SEQ ID NO: 455632 - RNA, 22 nt, Human
ugaagcaguucucagaaguggg

SEQ ID NO: 455633 - RNA, 22 nt, Human
aucuucaacuugaucauuugaa

SEQ ID NO: 455634 - RNA, 22 nt, Human
ugaaacaagggaccguccuuuc

SEQ ID NO: 455635 - RNA, 20 nt, Human
cccugagacaaaggaggggc

SEQ ID NO: 455636 - RNA, 22 nt, Human
ggccucugggguccugagccca

SEQ ID NO: 455637 - RNA, 22 nt, Human
cagcuuggaggaggaucuaaga

SEQ ID NO: 455638 - RNA, 22 nt, Human
uacuuccuguuuccaugucugu

SEQ ID NO: 455639 - RNA, 22 nt, Human
uuuguggcaggagcggagaccg

SEQ ID NO: 455640 - RNA, 22 nt, Human
gcuguacauuuguguacacuug

SEQ ID NO: 455641 - RNA, 22 nt, Human
ucugcgcugccuugauccuugg

SEQ ID NO: 455642 - RNA, 19 nt, Human
gaggaggcuucagcuuucu

SEQ ID NO: 455643 - RNA, 22 nt, Human
cagguggagcugacugagggca

SEQ ID NO: 455644 - RNA, 23 nt, Human
uggggccaagugaggaagggucu

SEQ ID NO: 455645 - RNA, 22 nt, Human
gggucagcugcugggggcugac

SEQ ID NO: 455646 - RNA, 22 nt, Human
ggcugcuguacugaugucaguu

SEQ ID NO: 455647 - RNA, 22 nt, Human
ggaggaagcacacggcuuguau

SEQ ID NO: 455648 - RNA, 22 nt, Human
uggcucagccagcccuaggaac

SEQ ID NO: 455649 - RNA, 21 nt, Human
gagagggcauuauaggaagug

SEQ ID NO: 455650 - RNA, 22 nt, Human
auaaacugaagggaacacugag

SEQ ID NO: 455651 - RNA, 22 nt, Human
ucuugggauugcccugcaguuc

SEQ ID NO: 455652 - RNA, 22 nt, Human
ccuggccagccagggcuggggu

SEQ ID NO: 455653 - RNA, 22 nt, Human
ccucugaguccucccugguugc

SEQ ID NO: 455654 - RNA, 18 nt, Human
agcagcugugccacacug

SEQ ID NO: 455655 - RNA, 22 nt, Human
uuuuuauaugaaggauagugcg

SEQ ID NO: 455656 - RNA, 18 nt, Human
ugaauagggguuugcaga

SEQ ID NO: 455657 - RNA, 22 nt, Human
caaaugcaaaauauaacccugu

SEQ ID NO: 455658 - RNA, 22 nt, Human
uuuuucugccauucaaagagga

SEQ ID NO: 455659 - RNA, 22 nt, Human
uuucacauuuguuuuaagaagu

SEQ ID NO: 455660 - RNA, 22 nt, Human
cugaggccucucuccugggcuu

SEQ ID NO: 455661 - RNA, 21 nt, Human
ccacaggggcuccccugucag

SEQ ID NO: 455662 - RNA, 22 nt, Human
gaaaugugugacaaguuucaau

SEQ ID NO: 455663 - RNA, 22 nt, Human
uagccucuggaauccuuucucu

SEQ ID NO: 455664 - RNA, 21 nt, Human
cccaagggaggcaggauaagg

SEQ ID NO: 455665 - RNA, 22 nt, Human
aaacugaaacaucaucauguug

SEQ ID NO: 455666 - RNA, 22 nt, Human
ugaaauauuuagagaguaaguu

SEQ ID NO: 455667 - RNA, 22 nt, Human
ucaggcugccuaucagacugug

SEQ ID NO: 455668 - RNA, 22 nt, Human
uggagcccagggugagaaggag

SEQ ID NO: 455669 - RNA, 22 nt, Human
aagugagugguaaggagcaugg

SEQ ID NO: 455670 - RNA, 22 nt, Human
uuaugcuaguauaguccuuaga

SEQ ID NO: 455671 - RNA, 22 nt, Human
ggcuuuauuuugcaugaaugcu

SEQ ID NO: 455672 - RNA, 22 nt, Human
caaggcaggcaguucacuugag

SEQ ID NO: 455673 - RNA, 23 nt, Human
gagagcugacugucaagacuguu

SEQ ID NO: 455674 - RNA, 17 nt, Human
ggugagaccucccacuc

SEQ ID NO: 455675 - RNA, 22 nt, Human
auggcagggcagccucucagag

SEQ ID NO: 455676 - RNA, 22 nt, Human
uggucgaccaguuggaaaguaa

SEQ ID NO: 455677 - RNA, 22 nt, Human
uguuuauaccuugguauaacca

SEQ ID NO: 455678 - RNA, 22 nt, Human
uccaauaacaucuaaaaacuua

SEQ ID NO: 455679 - RNA, 22 nt, Human
cugggccugggaggccaggucu

SEQ ID NO: 455680 - RNA, 22 nt, Human
cagcugaagaaagagugguuag

SEQ ID NO: 455681 - RNA, 22 nt, Human
agcucccagaaggcccugcgcc

SEQ ID NO: 455682 - RNA, 22 nt, Human
auaaaaaugagggcgguagcua

SEQ ID NO: 455683 - RNA, 22 nt, Human
cuggagccugcaguuuucacuu

SEQ ID NO: 455684 - RNA, 22 nt, Human
ucagagguaguagcagaguuga

SEQ ID NO: 455685 - RNA, 22 nt, Human
cagguggguguaugaaugcaaa

SEQ ID NO: 455686 - RNA, 22 nt, Human
ugugccaggcacuugcccaggc

SEQ ID NO: 455687 - RNA, 22 nt, Human
guggcucuaggugagcauggag

SEQ ID NO: 455688 - RNA, 22 nt, Human
ccuggaaguuggagguugcagu

SEQ ID NO: 455689 - RNA, 22 nt, Human
ccagaggcauguucaaagcaau

SEQ ID NO: 455690 - RNA, 22 nt, Human
cuggcucaguucuugguuuuca

SEQ ID NO: 455691 - RNA, 22 nt, Human
aagacccacaaggcugaauguu

SEQ ID NO: 455692 - RNA, 21 nt, Human
ugaggcucuguugugccugca

SEQ ID NO: 455693 - RNA, 22 nt, Human
ggccaggcacugugugagauau

SEQ ID NO: 455694 - RNA, 22 nt, Human
ccagcucugccaagcgucagcu

SEQ ID NO: 455695 - RNA, 22 nt, Human
uuaaacagucccagaggcugac

SEQ ID NO: 455696 - RNA, 20 nt, Human
cauuaugguugggcacagug

SEQ ID NO: 455697 - RNA, 22 nt, Human
gagccagguuugaaucucaguc

SEQ ID NO: 455698 - RNA, 22 nt, Human
gucuggggaagucagggcauca

SEQ ID NO: 455699 - RNA, 22 nt, Human
gcucagagaugucugcugccuu

SEQ ID NO: 455700 - RNA, 22 nt, Human
ucugucugcucauuuaccucag

SEQ ID NO: 455701 - RNA, 22 nt, Human
gccuggagaaaggaagguggga

SEQ ID NO: 455702 - RNA, 22 nt, Human
uccugagauaaaucucauguga

SEQ ID NO: 455703 - RNA, 22 nt, Human
cuuccugcaggacagccaucug

SEQ ID NO: 455704 - RNA, 22 nt, Human
uggcccugaggggcugugcccc

SEQ ID NO: 455705 - RNA, 22 nt, Human
agagccaggcaggcaauguuga

SEQ ID NO: 455706 - RNA, 21 nt, Human
gcugcucgagauccagugcuu

SEQ ID NO: 455707 - RNA, 18 nt, Human
ucagcuggggcugcagcc

SEQ ID NO: 455708 - RNA, 22 nt, Human
auuuccaaaaccacuuauugcc

SEQ ID NO: 455709 - RNA, 22 nt, Human
aagcgccacgagaagcuggacc

SEQ ID NO: 455710 - RNA, 22 nt, Human
caucugccuaaguggcccuguu

SEQ ID NO: 455711 - RNA, 22 nt, Human
aggcacugacaauucuggacug

SEQ ID NO: 455712 - RNA, 22 nt, Human
ucaaguguaguggugucagguc

SEQ ID NO: 455713 - RNA, 22 nt, Human
cugcagcugucucuacugggca

SEQ ID NO: 455714 - RNA, 22 nt, Human
cuggagcuaggaaguccaagau

SEQ ID NO: 455715 - RNA, 22 nt, Human
ucucuucuuguguuuuccugcc

SEQ ID NO: 455716 - RNA, 19 nt, Human
augauggucccauucaccu

SEQ ID NO: 455717 - RNA, 22 nt, Human
acagggccaggugagaggugcu

SEQ ID NO: 455718 - RNA, 20 nt, Human
agggcagcuugaggagccgg

SEQ ID NO: 455719 - RNA, 22 nt, Human
cugagcugggacucaguagcaa

SEQ ID NO: 455720 - RNA, 22 nt, Human
guggccaggacauugccaggca

SEQ ID NO: 455721 - RNA, 22 nt, Human
acagggucauuuuaugaucugu

SEQ ID NO: 455722 - RNA, 22 nt, Human
ggaaaaggccacagggacacau

SEQ ID NO: 455723 - RNA, 22 nt, Human
auugaggcagcauaguucaggg

SEQ ID NO: 455724 - RNA, 22 nt, Human
ugaaggccucugguacaugcca

SEQ ID NO: 455725 - RNA, 22 nt, Human
caaagacugcauaacacaugaa

SEQ ID NO: 455726 - RNA, 22 nt, Human
uuuaagaugguauuuuauaaag

SEQ ID NO: 455727 - RNA, 22 nt, Human
agucccagcccaguccuguaag

SEQ ID NO: 455728 - RNA, 22 nt, Human
gcagaagcugggcagcgaggug

SEQ ID NO: 455729 - RNA, 22 nt, Human
gccagcagguugucaaggagcu

SEQ ID NO: 455730 - RNA, 22 nt, Human
ugcuuuauggauuuguguccug

SEQ ID NO: 455731 - RNA, 22 nt, Human
ggcuggcaagugucugcucaug

SEQ ID NO: 455732 - RNA, 22 nt, Human
cuuacauuuaaucaugugucau

SEQ ID NO: 455733 - RNA, 22 nt, Human
ugcugaggucaccuugcugcua

SEQ ID NO: 455734 - RNA, 22 nt, Human
aacagacagaaaaaugugaucu

SEQ ID NO: 455735 - RNA, 22 nt, Human
gaggccugaggcugccuggagc

SEQ ID NO: 455736 - RNA, 22 nt, Human
ucucaagagggaggcaaucaug

SEQ ID NO: 455737 - RNA, 22 nt, Human
ucuggccaggauggcaagacca

SEQ ID NO: 455738 - RNA, 22 nt, Human
ugcagggaaaacccaggaugcu

SEQ ID NO: 455739 - RNA, 22 nt, Human
agaggccuccgaaaggugggcu

SEQ ID NO: 455740 - RNA, 19 nt, Human
ucauaaggagagaggaaau

SEQ ID NO: 455741 - RNA, 20 nt, Human
ugugugcacacaugacauuc

SEQ ID NO: 455742 - RNA, 22 nt, Human
auuguuaugaaaauaagauguu

SEQ ID NO: 455743 - RNA, 22 nt, Human
acaaaaauuagcugggcauggu

SEQ ID NO: 455744 - RNA, 22 nt, Human
gcagcuuuguggagaggcccau

SEQ ID NO: 455745 - RNA, 22 nt, Human
cuggugugauugagcccaggug

SEQ ID NO: 455746 - RNA, 21 nt, Human
ucagcagcuuuugcagucccu

SEQ ID NO: 455747 - RNA, 22 nt, Human
cagaggaggcgguauacacugc

SEQ ID NO: 455748 - RNA, 23 nt, Human
agcuggguggccugcgugaagcu

SEQ ID NO: 455749 - RNA, 22 nt, Human
cuguggcaggaagggacuagca

SEQ ID NO: 455750 - RNA, 22 nt, Human
cuguacagaguucugaguguac

SEQ ID NO: 455751 - RNA, 22 nt, Human
ucaugccacuuacaaaauaaug

SEQ ID NO: 455752 - RNA, 22 nt, Human
cugagauggaguuuugcucuug

SEQ ID NO: 455753 - RNA, 22 nt, Human
auguuucaugacugagcaaaau

SEQ ID NO: 455754 - RNA, 22 nt, Human
uaaucacaucaggguaaauggg

SEQ ID NO: 455755 - RNA, 19 nt, Human
gcagccaggugcucuaccu

SEQ ID NO: 455756 - RNA, 23 nt, Human
ggccuguguuuugucugaaguac

SEQ ID NO: 455757 - RNA, 22 nt, Human
uuuugcuuuuguaacacagugu

SEQ ID NO: 455758 - RNA, 22 nt, Human
ugaaaguuacaggaaaacagau

SEQ ID NO: 455759 - RNA, 22 nt, Human
cugcccagaaucacucacucga

SEQ ID NO: 455760 - RNA, 22 nt, Human
cuggagugaggucugggagccu

SEQ ID NO: 455761 - RNA, 22 nt, Human
caaggccaguccauuuuggaag

SEQ ID NO: 455762 - RNA, 22 nt, Human
ccuccuggcccugggccuggaa

SEQ ID NO: 455763 - RNA, 22 nt, Human
uucuaguucccucuggaaugua

SEQ ID NO: 455764 - RNA, 22 nt, Human
gcuuccugauauucauacuguu

SEQ ID NO: 455765 - RNA, 22 nt, Human
ccagcugacgaugccuggucuc

SEQ ID NO: 455766 - RNA, 22 nt, Human
cuuccaguaguaucauucucau

SEQ ID NO: 455767 - RNA, 22 nt, Human
ugaugcugagccugggacugac

SEQ ID NO: 455768 - RNA, 22 nt, Human
agcugucuaccugcagaguccu

SEQ ID NO: 455769 - RNA, 21 nt, Human
ccuucucuugcuucagcuuca

SEQ ID NO: 455770 - RNA, 22 nt, Human
gacauucacaguuuccgauggu

SEQ ID NO: 455771 - RNA, 22 nt, Human
uucaggagaauuccaagaagua

SEQ ID NO: 455772 - RNA, 18 nt, Human
cccucuccugcuaguggg

SEQ ID NO: 455773 - RNA, 22 nt, Human
uggggacaggagacuuacagcu

SEQ ID NO: 455774 - RNA, 22 nt, Human
gcaggagcaaacugcagugugg

SEQ ID NO: 455775 - RNA, 22 nt, Human
ucagagugcagggaguagcagc

SEQ ID NO: 455776 - RNA, 22 nt, Human
uggcaggaggaugaggcggcua

SEQ ID NO: 455777 - RNA, 22 nt, Human
ucccaggguuacagccagggca

SEQ ID NO: 455778 - RNA, 22 nt, Human
ucugagaguacgggcugcgcgc

SEQ ID NO: 455779 - RNA, 22 nt, Human
cauuaucugccauugacaccau

SEQ ID NO: 455780 - RNA, 21 nt, Human
aggugcagagccagggaccag

SEQ ID NO: 455781 - RNA, 22 nt, Human
cagaaguggccucagagggagu

SEQ ID NO: 455782 - RNA, 22 nt, Human
ucccugggccuccugcuaugca

SEQ ID NO: 455783 - RNA, 22 nt, Human
ugggcucugugccagguuggug

SEQ ID NO: 455784 - RNA, 22 nt, Human
ucuggcucucucaucacccaau

SEQ ID NO: 455785 - RNA, 22 nt, Human
uuuuaauacugcuauuguagga

SEQ ID NO: 455786 - RNA, 22 nt, Human
gguugccggggcaggacuggaa

SEQ ID NO: 455787 - RNA, 22 nt, Human
agaagccauucccuguaggcuc

SEQ ID NO: 455788 - RNA, 22 nt, Human
aauuugauucccugcaccuguu

SEQ ID NO: 455789 - RNA, 22 nt, Human
ggaguucacugugcaggcucug

SEQ ID NO: 455790 - RNA, 22 nt, Human
gcagcagaugcuuucauggaca

SEQ ID NO: 455791 - RNA, 22 nt, Human
auguguauacuugugcuuacuc

SEQ ID NO: 455792 - RNA, 22 nt, Human
cagaggaagagauacaagcccu

SEQ ID NO: 455793 - RNA, 22 nt, Human
acaugcauacaagcacauguag

SEQ ID NO: 455794 - RNA, 22 nt, Human
ucacagggauggaauagaaaua

SEQ ID NO: 455795 - RNA, 21 nt, Human
ccagacuggccuaugugguag

SEQ ID NO: 455796 - RNA, 20 nt, Human
ucauuucuugggguuccaag

SEQ ID NO: 455797 - RNA, 22 nt, Human
ucaaagcuuagauaauuucuuu

SEQ ID NO: 455798 - RNA, 22 nt, Human
gcugucugucucugugacuuaa

SEQ ID NO: 455799 - RNA, 18 nt, Human
uucaccagugugaugggu

SEQ ID NO: 455800 - RNA, 22 nt, Human
aagaacugugcuccaggcucca

SEQ ID NO: 455801 - RNA, 22 nt, Human
acagagguguuccagaccuagg

SEQ ID NO: 455802 - RNA, 22 nt, Human
uacaagacgagggaaguucuuu

SEQ ID NO: 455803 - RNA, 22 nt, Human
ccugaggcccuggcugugcuga

SEQ ID NO: 455804 - RNA, 22 nt, Human
ucuguuccauguuuuguuccau

SEQ ID NO: 455805 - RNA, 22 nt, Human
gugucccaggagaggagacaau

SEQ ID NO: 455806 - RNA, 21 nt, Human
ucccagggccaggugccauca

SEQ ID NO: 455807 - RNA, 22 nt, Human
ccuaagaauuaaugaauacacc

SEQ ID NO: 455808 - RNA, 22 nt, Human
cagaggaagcagacacaucuug

SEQ ID NO: 455809 - RNA, 22 nt, Human
aaagucuuuauuuuguaucuuu

SEQ ID NO: 455810 - RNA, 21 nt, Human
ugcagcugacacugguaugcc

SEQ ID NO: 455811 - RNA, 22 nt, Human
augcccgauaccuaguuaacuc

SEQ ID NO: 455812 - RNA, 22 nt, Human
uccagaggcuccaaagggagau

SEQ ID NO: 455813 - RNA, 22 nt, Human
gugugcaggugucagugcagcu

SEQ ID NO: 455814 - RNA, 22 nt, Human
uuucugcugugcuuucuugcgu

SEQ ID NO: 455815 - RNA, 22 nt, Human
auuuauuaugggauuuggcaca

SEQ ID NO: 455816 - RNA, 22 nt, Human
gcagcagaguuugggagauggu

SEQ ID NO: 455817 - RNA, 22 nt, Human
ugagcuggaaucuucuugacug

SEQ ID NO: 455818 - RNA, 22 nt, Human
ccucauggccuugagcugaggg

SEQ ID NO: 455819 - RNA, 22 nt, Human
ucaccaggauugggcuguaggc

SEQ ID NO: 455820 - RNA, 21 nt, Human
gccugccugcgugacccucuu

SEQ ID NO: 455821 - RNA, 22 nt, Human
uaggcagauguuaacaggaaaa

SEQ ID NO: 455822 - RNA, 22 nt, Human
cugcccugggauggucugugcg

SEQ ID NO: 455823 - RNA, 22 nt, Human
augcaguauaaaucauuucugg

SEQ ID NO: 455824 - RNA, 22 nt, Human
ugguccuggggaucugcaguga

SEQ ID NO: 455825 - RNA, 19 nt, Human
gcagccaccgcggcggccg

SEQ ID NO: 455826 - RNA, 21 nt, Human
ucagggcagcugcucuucaga

SEQ ID NO: 455827 - RNA, 22 nt, Human
aggcuccuuguucaucauccau

SEQ ID NO: 455828 - RNA, 22 nt, Human
ugcagugguugagagcccagac

SEQ ID NO: 455829 - RNA, 22 nt, Human
aggccugggcaagaaggggcgu

SEQ ID NO: 455830 - RNA, 22 nt, Human
aggcagugagugugacuucaca

SEQ ID NO: 455831 - RNA, 20 nt, Human
cucugcugcccgccggcugc

SEQ ID NO: 455832 - RNA, 22 nt, Human
uuagccauauagaaaaagagcu

SEQ ID NO: 455833 - RNA, 22 nt, Human
gcuggcucccauugguccuucc

SEQ ID NO: 455834 - RNA, 22 nt, Human
acaaggaggucuggggggcccu

SEQ ID NO: 455835 - RNA, 22 nt, Human
uagggcagauucgguggaguuu

SEQ ID NO: 455836 - RNA, 22 nt, Human
aagagcaucuauuucacagugg

SEQ ID NO: 455837 - RNA, 22 nt, Human
cacauguuuggcaugucaccaa

SEQ ID NO: 455838 - RNA, 22 nt, Human
cauuucugauuacagaauacua

SEQ ID NO: 455839 - RNA, 22 nt, Human
cagagcuggguuugggaaaccu

SEQ ID NO: 455840 - RNA, 18 nt, Human
ucaaagucuggcuccacu

SEQ ID NO: 455841 - RNA, 22 nt, Human
agccuauuccaggaugagcuca

SEQ ID NO: 455842 - RNA, 22 nt, Human
guguccacggcugagaaugauu

SEQ ID NO: 455843 - RNA, 18 nt, Human
aucucccauuggccaagg

SEQ ID NO: 455844 - RNA, 22 nt, Human
ugcugugagguugagaaggaag

SEQ ID NO: 455845 - RNA, 22 nt, Human
cagcuugggaguuugguuuuau

SEQ ID NO: 455846 - RNA, 22 nt, Human
aucagagauggcuccagugcuc

SEQ ID NO: 455847 - RNA, 22 nt, Human
ccugcccagcuucaccucaggc

SEQ ID NO: 455848 - RNA, 21 nt, Human
cagugagguccccagccuagg

SEQ ID NO: 455849 - RNA, 22 nt, Human
cauucugcauuuggaaggggca

SEQ ID NO: 455850 - RNA, 20 nt, Human
acuggacacugaggugagcu

SEQ ID NO: 455851 - RNA, 22 nt, Human
ccagagucuuuauauuccugaa

SEQ ID NO: 455852 - RNA, 22 nt, Human
agaagccaauccuugucucucu

SEQ ID NO: 455853 - RNA, 22 nt, Human
augugacaauauuuggucuuau

SEQ ID NO: 455854 - RNA, 22 nt, Human
ccagcugcugugaggaccacag

SEQ ID NO: 455855 - RNA, 22 nt, Human
gaaauucugugucccagagugc

SEQ ID NO: 455856 - RNA, 22 nt, Human
aguguugucaaacggcucagca

SEQ ID NO: 455857 - RNA, 22 nt, Human
cuguacaaguccuucaucaggg

SEQ ID NO: 455858 - RNA, 18 nt, Human
aguggucuguuauaucau

SEQ ID NO: 455859 - RNA, 22 nt, Human
aaggcugaauucaaggguaggc

SEQ ID NO: 455860 - RNA, 22 nt, Human
auaugaagucagacaaacuggg

SEQ ID NO: 455861 - RNA, 22 nt, Human
cagacuggccacaucugcacug

SEQ ID NO: 455862 - RNA, 18 nt, Human
caggagcaggaguugaac

SEQ ID NO: 455863 - RNA, 22 nt, Human
ugcaagagguaaaaugaaagga

SEQ ID NO: 455864 - RNA, 22 nt, Human
aaguguagauuauggagugucu

SEQ ID NO: 455865 - RNA, 19 nt, Human
ucugcuggcagaauucccu

SEQ ID NO: 455866 - RNA, 22 nt, Human
ggcugcagggcagcuggugugg

SEQ ID NO: 455867 - RNA, 22 nt, Human
guuacacaggaaaacauuagca

SEQ ID NO: 455868 - RNA, 22 nt, Human
ugaacagauggcccagcagagg

SEQ ID NO: 455869 - RNA, 22 nt, Human
agcacagguacggagaugcuac

SEQ ID NO: 455870 - RNA, 22 nt, Human
cagcagugaugugugaggguuc

SEQ ID NO: 455871 - RNA, 22 nt, Human
agugcagagagcaauacucuac

SEQ ID NO: 455872 - RNA, 22 nt, Human
ucuuacagaaaauagauaacau

SEQ ID NO: 455873 - RNA, 22 nt, Human
caggagcaaggagcagugggau

SEQ ID NO: 455874 - RNA, 22 nt, Human
cuggagcugcuguccuugggug

SEQ ID NO: 455875 - RNA, 21 nt, Human
ggcuguggagccaugacucac

SEQ ID NO: 455876 - RNA, 22 nt, Human
gccuuugcaccaucagugcaau

SEQ ID NO: 455877 - RNA, 22 nt, Human
ucugucugacaggguaugaacu

SEQ ID NO: 455878 - RNA, 22 nt, Human
cuccugggcucaagugauccuc

SEQ ID NO: 455879 - RNA, 22 nt, Human
ucucagaguuuagagcugagcc

SEQ ID NO: 455880 - RNA, 22 nt, Human
ucuuuugagggccagaggaaga

SEQ ID NO: 455881 - RNA, 21 nt, Human
gcaggaugcaucuuggugucu

SEQ ID NO: 455882 - RNA, 22 nt, Human
ucugucaggagauuggcagcug

SEQ ID NO: 455883 - RNA, 20 nt, Human
accccagccccucuaucuga

SEQ ID NO: 455884 - RNA, 22 nt, Human
uucagagccacuucaagucuaa

SEQ ID NO: 455885 - RNA, 22 nt, Human
caggccugucugcacaugaggc

SEQ ID NO: 455886 - RNA, 22 nt, Human
gcaccuggcugcccagguggag

SEQ ID NO: 455887 - RNA, 22 nt, Human
agaggccaguggcugugcuguc

SEQ ID NO: 455888 - RNA, 17 nt, Human
gcuuccucaugcaguuc

SEQ ID NO: 455889 - RNA, 22 nt, Human
ugguaaauauguccauucucuu

SEQ ID NO: 455890 - RNA, 19 nt, Human
gaguuauugccagggcaug

SEQ ID NO: 455891 - RNA, 22 nt, Human
gcaggaagccuuaccaagccca

SEQ ID NO: 455892 - RNA, 21 nt, Human
ccugucuuggacugaggcacc

SEQ ID NO: 455893 - RNA, 22 nt, Human
gcuggccugggcagccugucgg

SEQ ID NO: 455894 - RNA, 19 nt, Human
gagcugccuuuugaagacc

SEQ ID NO: 455895 - RNA, 22 nt, Human
agaagccauaguaucucagggu

SEQ ID NO: 455896 - RNA, 22 nt, Human
ccagagcccagcacacggugcu

SEQ ID NO: 455897 - RNA, 19 nt, Human
ucaggacugacuugaaguc

SEQ ID NO: 455898 - RNA, 22 nt, Human
gagaagcaauuuccaacugugc

SEQ ID NO: 455899 - RNA, 22 nt, Human
cuguccagaaagggggcaacaa

SEQ ID NO: 455900 - RNA, 22 nt, Human
agccuggcacugaggcagggcg

SEQ ID NO: 455901 - RNA, 22 nt, Human
auucuccacacauccagaccuu

SEQ ID NO: 455902 - RNA, 22 nt, Human
agccccaggcccggacgccucu

SEQ ID NO: 455903 - RNA, 22 nt, Human
cuuauguaugcuacuuuguggu

SEQ ID NO: 455904 - RNA, 22 nt, Human
gaaaagagaacaucugaggauc

SEQ ID NO: 455905 - RNA, 22 nt, Human
cuuaauuuaagccuagaaugca

SEQ ID NO: 455906 - RNA, 22 nt, Human
uguuuaagcugaugagguaucg

SEQ ID NO: 455907 - RNA, 22 nt, Human
aggaaacuccccuacaucucaa

SEQ ID NO: 455908 - RNA, 22 nt, Human
gggcugacaguuuccccugaaa

SEQ ID NO: 455909 - RNA, 22 nt, Human
gcucugcucuugacuuaccagg

SEQ ID NO: 455910 - RNA, 22 nt, Human
aucuggaagccagauacucagu

SEQ ID NO: 455911 - RNA, 22 nt, Human
aggcucagccugggccuagagc

SEQ ID NO: 455912 - RNA, 22 nt, Human
cagaggguugucaggcgccuug

SEQ ID NO: 455913 - RNA, 22 nt, Human
cauguuauuuauccauuaaaca

SEQ ID NO: 455914 - RNA, 22 nt, Human
uuacaguaugaucaacuuuuca

SEQ ID NO: 455915 - RNA, 22 nt, Human
acugaaaaugaauuagaaacag

SEQ ID NO: 455916 - RNA, 22 nt, Human
auuuaaauuuucugauggagag

SEQ ID NO: 455917 - RNA, 22 nt, Human
cugccuggcauggagaagagaa

SEQ ID NO: 455918 - RNA, 19 nt, Human
gggaaauucacuugcuucc

SEQ ID NO: 455919 - RNA, 22 nt, Human
caggaacacaaguucagggaug

SEQ ID NO: 455920 - RNA, 18 nt, Human
ccugcagcccaggaggcc

SEQ ID NO: 455921 - RNA, 22 nt, Human
cagagccaugguaugggcuugu

SEQ ID NO: 455922 - RNA, 22 nt, Human
aaacuagagcaugugaguggga

SEQ ID NO: 455923 - RNA, 22 nt, Human
ggcagccuccagggcacuggug

SEQ ID NO: 455924 - RNA, 22 nt, Human
cugagggcaugaacauuccaua

SEQ ID NO: 455925 - RNA, 22 nt, Human
acugaaggaagcgggcaggggu

SEQ ID NO: 455926 - RNA, 22 nt, Human
gcaggaugaaggcagaggcuga

SEQ ID NO: 455927 - RNA, 22 nt, Human
agguuuucagcuguauccugag

SEQ ID NO: 455928 - RNA, 22 nt, Human
aaggcugagggcuguaccuggc

SEQ ID NO: 455929 - RNA, 22 nt, Human
ucagggcaucaucaugaauaua

SEQ ID NO: 455930 - RNA, 22 nt, Human
aucagagauuguaguaugugca

SEQ ID NO: 455931 - RNA, 22 nt, Human
agcugagcucaggcugauguaa

SEQ ID NO: 455932 - RNA, 21 nt, Human
cacaagacacauaggguguuu

SEQ ID NO: 455933 - RNA, 22 nt, Human
uauuuuaucugccagaguggag

SEQ ID NO: 455934 - RNA, 22 nt, Human
ucauugcaagcucauuuaucug

SEQ ID NO: 455935 - RNA, 22 nt, Human
ugaaggccagggauuugcagcc

SEQ ID NO: 455936 - RNA, 22 nt, Human
uugcucugaacccagggcacca

SEQ ID NO: 455937 - RNA, 21 nt, Human
cugcaucucauagaacauguc

SEQ ID NO: 455938 - RNA, 22 nt, Human
ucagccuggcaggauggccugg

SEQ ID NO: 455939 - RNA, 17 nt, Human
gaaagguccuagaaauc

SEQ ID NO: 455940 - RNA, 22 nt, Human
augucccagcugagagacaacu

SEQ ID NO: 455941 - RNA, 22 nt, Human
ugucagaacucuauugaugucc

SEQ ID NO: 455942 - RNA, 22 nt, Human
ugcaggggcuugucugggccug

SEQ ID NO: 455943 - RNA, 22 nt, Human
ugccuguccugaggaugagggu

SEQ ID NO: 455944 - RNA, 22 nt, Human
ucaggagucugugcaguuccac

SEQ ID NO: 455945 - RNA, 22 nt, Human
cccucugaccuccugccacagu

SEQ ID NO: 455946 - RNA, 22 nt, Human
acagcugggugcugcucagagc

SEQ ID NO: 455947 - RNA, 22 nt, Human
ugcugucuuccaggauggugaa

SEQ ID NO: 455948 - RNA, 22 nt, Human
gccagcucagaugcaggaagga

SEQ ID NO: 455949 - RNA, 22 nt, Human
aguuuuaugcaguguucugaua

SEQ ID NO: 455950 - RNA, 22 nt, Human
ccugagcuggaagagcuugugc

SEQ ID NO: 455951 - RNA, 22 nt, Human
uaagaacauuuucggaaagaua

SEQ ID NO: 455952 - RNA, 22 nt, Human
cagucacauggaugauggauag

SEQ ID NO: 455953 - RNA, 22 nt, Human
acuggaagccaguugacaauca

SEQ ID NO: 455954 - RNA, 22 nt, Human
gcagggcaggauuugaacccag

SEQ ID NO: 455955 - RNA, 18 nt, Human
ugaggccucugcugggcc

SEQ ID NO: 455956 - RNA, 22 nt, Human
ggcaggguggcccuccagugag

SEQ ID NO: 455957 - RNA, 22 nt, Human
cagcuuuaccuuuaggaguaac

SEQ ID NO: 455958 - RNA, 22 nt, Human
cccaggcugauguucagcgggu

SEQ ID NO: 455959 - RNA, 22 nt, Human
cagggccagccauccugcuggg

SEQ ID NO: 455960 - RNA, 21 nt, Human
gcacagggacagaucaucaca

SEQ ID NO: 455961 - RNA, 22 nt, Human
augaaaacuuuagccucauuag

SEQ ID NO: 455962 - RNA, 22 nt, Human
cucugggcuuguugaccugcac

SEQ ID NO: 455963 - RNA, 22 nt, Human
cagaggccccagaacuagcucu

SEQ ID NO: 455964 - RNA, 22 nt, Human
gggauggggucaacauguaccu

SEQ ID NO: 455965 - RNA, 22 nt, Human
cguggccuuugagugagcuccc

SEQ ID NO: 455966 - RNA, 22 nt, Human
ugggaaauguguuucuggacca

SEQ ID NO: 455967 - RNA, 22 nt, Human
ucuggaaguuagaggaggaaag

SEQ ID NO: 455968 - RNA, 22 nt, Human
cuccagugcacccagaggauuu

SEQ ID NO: 455969 - RNA, 22 nt, Human
aggagcagcccacuccuguccu

SEQ ID NO: 455970 - RNA, 22 nt, Human
agagccagcauuugggcccugc

SEQ ID NO: 455971 - RNA, 19 nt, Human
ggagaagcccaggaauccu

SEQ ID NO: 455972 - RNA, 23 nt, Human
uugucugugcuuuuccaguugcu

SEQ ID NO: 455973 - RNA, 22 nt, Human
gaggcacaguguuuggucagug

SEQ ID NO: 455974 - RNA, 22 nt, Human
aaguucaaggugauaguggcag

SEQ ID NO: 455975 - RNA, 22 nt, Human
uucacagaugccugaugugugg

SEQ ID NO: 455976 - RNA, 22 nt, Human
ccuucauugcaucuuuaagaga

SEQ ID NO: 455977 - RNA, 22 nt, Human
cugaggcucaagggcagguggg

SEQ ID NO: 455978 - RNA, 22 nt, Human
uggcucugcugaaccuagugca

SEQ ID NO: 455979 - RNA, 22 nt, Human
gccuggagagcacugugcgcuu

SEQ ID NO: 455980 - RNA, 22 nt, Human
acauuugagaugccuuuuaggu

SEQ ID NO: 455981 - RNA, 22 nt, Human
gucacuguuuccuauuauauuu

SEQ ID NO: 455982 - RNA, 22 nt, Human
ucagcagucacauguuguccca

SEQ ID NO: 455983 - RNA, 22 nt, Human
cugccuggucucaggcaugggg

SEQ ID NO: 455984 - RNA, 22 nt, Human
ugaggaagggugugacggcacc

SEQ ID NO: 455985 - RNA, 22 nt, Human
ccaggccagcaggcacaccugc

SEQ ID NO: 455986 - RNA, 22 nt, Human
ugcauuaugcuacccagaagcu

SEQ ID NO: 455987 - RNA, 18 nt, Human
gagagcugcuaccuagcu

SEQ ID NO: 455988 - RNA, 22 nt, Human
gaccauuucuaggaaucagacu

SEQ ID NO: 455989 - RNA, 22 nt, Human
ccuggagcaaaaaucuaaggag

SEQ ID NO: 455990 - RNA, 22 nt, Human
ugggaaugugagcauucauuca

SEQ ID NO: 455991 - RNA, 22 nt, Human
gguggccucucaugcaagguag

SEQ ID NO: 455992 - RNA, 22 nt, Human
aaugcuuuagcagugauuagug

SEQ ID NO: 455993 - RNA, 22 nt, Human
uuugacagauccuuaacucagc

SEQ ID NO: 455994 - RNA, 22 nt, Human
aggcucuggcaacagcuggugu

SEQ ID NO: 455995 - RNA, 22 nt, Human
ugaggccugaagccugaaguga

SEQ ID NO: 455996 - RNA, 23 nt, Human
acucagagaccccgggaagugac

SEQ ID NO: 455997 - RNA, 22 nt, Human
aguaaacauuuucauauuuucu

SEQ ID NO: 455998 - RNA, 21 nt, Human
uuuauuuauauaggacacaug

SEQ ID NO: 455999 - RNA, 22 nt, Human
auaugcacauacauacauaggu

SEQ ID NO: 456000 - RNA, 22 nt, Human
acuaaaaacuacugccaauagc

SEQ ID NO: 456001 - RNA, 22 nt, Human
caaaugcaugagaaauaagagg

SEQ ID NO: 456002 - RNA, 22 nt, Human
ccaggugugauuuggcaguguc

SEQ ID NO: 456003 - RNA, 22 nt, Human
gccagaagggguggauccaggc

SEQ ID NO: 456004 - RNA, 19 nt, Human
uggggcuguguuuugaccc

SEQ ID NO: 456005 - RNA, 22 nt, Human
aaaugucuuucuucugcuacgu

SEQ ID NO: 456006 - RNA, 22 nt, Human
ggcagugguuagaaacaugagc

SEQ ID NO: 456007 - RNA, 22 nt, Human
ugugggcacuaaugacaugcag

SEQ ID NO: 456008 - RNA, 22 nt, Human
gugagcaggauuucauggugua

SEQ ID NO: 456009 - RNA, 22 nt, Human
accugcagcugagaaaaugacu

SEQ ID NO: 456010 - RNA, 22 nt, Human
agcaggguuuggggauuggcac

SEQ ID NO: 456011 - RNA, 22 nt, Human
uagagcaguuggcagcuguauu

SEQ ID NO: 456012 - RNA, 22 nt, Human
cugugucccuugucccagagcc

SEQ ID NO: 456013 - RNA, 22 nt, Human
ccucacuuuccuuucuccuggg

SEQ ID NO: 456014 - RNA, 22 nt, Human
uuuucauuuuuguagaugcaag

SEQ ID NO: 456015 - RNA, 22 nt, Human
cucucccccacagcagccuucu

SEQ ID NO: 456016 - RNA, 22 nt, Human
gcugagagaaaagugagguucu

SEQ ID NO: 456017 - RNA, 22 nt, Human
gugcccaggcccaaggcaccac

SEQ ID NO: 456018 - RNA, 20 nt, Human
gucucagaauggauuugcau

SEQ ID NO: 456019 - RNA, 22 nt, Human
ggcagcuggccuccucgcccac

SEQ ID NO: 456020 - RNA, 20 nt, Human
uaagaacaagacuaggaagc

SEQ ID NO: 456021 - RNA, 22 nt, Human
uaaugcacaugacugaacuauu

SEQ ID NO: 456022 - RNA, 22 nt, Human
cugagcuuccaguuccuccagg

SEQ ID NO: 456023 - RNA, 22 nt, Human
aaguucaagaucaagguuccag

SEQ ID NO: 456024 - RNA, 22 nt, Human
agucuucucauuucacaugcuu

SEQ ID NO: 456025 - RNA, 22 nt, Human
aaguuaugaaauuuggacagcu

SEQ ID NO: 456026 - RNA, 22 nt, Human
guccucugaaguugugcaaugc

SEQ ID NO: 456027 - RNA, 22 nt, Human
gcaggagcagucaggggcagcu

SEQ ID NO: 456028 - RNA, 20 nt, Human
gcagggcaagggauaugaaa

SEQ ID NO: 456029 - RNA, 22 nt, Human
cuggcaggcagacuucugcaag

SEQ ID NO: 456030 - RNA, 22 nt, Human
uagagugguuaacaguuuagaa

SEQ ID NO: 456031 - RNA, 22 nt, Human
gcugccaccguggagaugagug

SEQ ID NO: 456032 - RNA, 22 nt, Human
auguccuucuccucuuaccugc

SEQ ID NO: 456033 - RNA, 22 nt, Human
ggcagugaaugaaacagaggcu

SEQ ID NO: 456034 - RNA, 22 nt, Human
ucagaaauagucuuuaaaauga

SEQ ID NO: 456035 - RNA, 22 nt, Human
ggaggaggggugacugaaugcu

SEQ ID NO: 456036 - RNA, 22 nt, Human
uucuaacucuguuauguguuuc

SEQ ID NO: 456037 - RNA, 22 nt, Human
gagaggcugaaaucacaggagc

SEQ ID NO: 456038 - RNA, 22 nt, Human
ccagcuccaggacugggagcug

SEQ ID NO: 456039 - RNA, 22 nt, Human
ugcauuauacuuuuagaaauuu

SEQ ID NO: 456040 - RNA, 22 nt, Human
acagaaaugauguuuggcaaua

SEQ ID NO: 456041 - RNA, 22 nt, Human
cccucagcuccacccucagcag

SEQ ID NO: 456042 - RNA, 22 nt, Human
aagacaugcaauuagcaaggaa

SEQ ID NO: 456043 - RNA, 22 nt, Human
cagacuugacggcagcugcuuu

SEQ ID NO: 456044 - RNA, 22 nt, Human
agccuucacugggaccuuggau

SEQ ID NO: 456045 - RNA, 22 nt, Human
ggcagccagagggcagcuggau

SEQ ID NO: 456046 - RNA, 22 nt, Human
gagugugucggucagcguggcg

SEQ ID NO: 456047 - RNA, 21 nt, Human
ugagagccuccaaccggcuac

SEQ ID NO: 456048 - RNA, 21 nt, Human
ggggcagagcuaggcccugca

SEQ ID NO: 456049 - RNA, 22 nt, Human
acacaaacagucuauagcacca

SEQ ID NO: 456050 - RNA, 21 nt, Human
acagccugucaucucaugguc

SEQ ID NO: 456051 - RNA, 22 nt, Human
gcaccaggaggcccuucucauc

SEQ ID NO: 456052 - RNA, 22 nt, Human
cuuucacaguccugacugagcg

SEQ ID NO: 456053 - RNA, 22 nt, Human
ucucagugcagagaggcuaucu

SEQ ID NO: 456054 - RNA, 22 nt, Human
agggccugggauguccuccuag

SEQ ID NO: 456055 - RNA, 22 nt, Human
gggcugaggaacauauuuuguu

SEQ ID NO: 456056 - RNA, 22 nt, Human
gcucugagauugagccuuuggu

SEQ ID NO: 456057 - RNA, 22 nt, Human
uauuugauagagauaaaugaua

SEQ ID NO: 456058 - RNA, 22 nt, Human
augaaggcaguuaaacgucauc

SEQ ID NO: 456059 - RNA, 22 nt, Human
ggaggcugagaaguccaagauc

SEQ ID NO: 456060 - RNA, 18 nt, Human
aaaugcuaggcuacauga

SEQ ID NO: 456061 - RNA, 22 nt, Human
cuaucuuucgauucuagcuuaa

SEQ ID NO: 456062 - RNA, 22 nt, Human
ucuggccugaaaguccaugcuu

SEQ ID NO: 456063 - RNA, 22 nt, Human
caggaggcccaaagggcgcaga

SEQ ID NO: 456064 - RNA, 22 nt, Human
ccaggagcuggagggugcagug

SEQ ID NO: 456065 - RNA, 22 nt, Human
ucaggagauggucuuuauaggc

SEQ ID NO: 456066 - RNA, 18 nt, Human
cuuucagauggauaugcu

SEQ ID NO: 456067 - RNA, 22 nt, Human
aaagccuuggucaucugguucc

SEQ ID NO: 456068 - RNA, 22 nt, Human
agagucugaaugcucagaguug

SEQ ID NO: 456069 - RNA, 22 nt, Human
agugacagcugggaaggugaaa

SEQ ID NO: 456070 - RNA, 22 nt, Human
agucccagccuaggcugugcug

SEQ ID NO: 456071 - RNA, 22 nt, Human
gccuucugauaucucuuggcau

SEQ ID NO: 456072 - RNA, 22 nt, Human
gggccacacagaaccuccuggu

SEQ ID NO: 456073 - RNA, 22 nt, Human
cugccaggccuccgcugucccc

SEQ ID NO: 456074 - RNA, 17 nt, Human
cucuccuuccucugagg

SEQ ID NO: 456075 - RNA, 21 nt, Human
ugccagcauguaggcuaguug

SEQ ID NO: 456076 - RNA, 22 nt, Human
ucaguuuucucauuuaugagau

SEQ ID NO: 456077 - RNA, 22 nt, Human
gccugugcuuaacugacgugag

SEQ ID NO: 456078 - RNA, 22 nt, Human
uuacaucuaaacugugaacaau

SEQ ID NO: 456079 - RNA, 19 nt, Human
agucucaguguacagaggc

SEQ ID NO: 456080 - RNA, 22 nt, Human
aaugauuggcacuagauacaca

SEQ ID NO: 456081 - RNA, 22 nt, Human
augguguagcaugugauaugac

SEQ ID NO: 456082 - RNA, 22 nt, Human
auguguuuguaccuuuaaauau

SEQ ID NO: 456083 - RNA, 22 nt, Human
ccagaggugcugggagaggucu

SEQ ID NO: 456084 - RNA, 21 nt, Human
gccugcagaccccaccaggcu

SEQ ID NO: 456085 - RNA, 22 nt, Human
ucucagagugguggucccucug

SEQ ID NO: 456086 - RNA, 22 nt, Human
cccaggcacagauuaucccaau

SEQ ID NO: 456087 - RNA, 22 nt, Human
ggagcagagcugggcuuggcug

SEQ ID NO: 456088 - RNA, 21 nt, Human
cucuugucuuugcucaguagc

SEQ ID NO: 456089 - RNA, 21 nt, Human
uagggcucucugugucaggug

SEQ ID NO: 456090 - RNA, 22 nt, Human
cgaggcagaggcugaaacggcu

SEQ ID NO: 456091 - RNA, 22 nt, Human
ugcuaucucuauauccauuuau

SEQ ID NO: 456092 - RNA, 22 nt, Human
caggccagguggcaggcaaaac

SEQ ID NO: 456093 - RNA, 22 nt, Human
cugagauggccacugggucuca

SEQ ID NO: 456094 - RNA, 22 nt, Human
aguauuuccuggcuuaucugcu

SEQ ID NO: 456095 - RNA, 22 nt, Human
guucaagguuuuacagagugua

SEQ ID NO: 456096 - RNA, 21 nt, Human
auacuuugaauuacagccuug

SEQ ID NO: 456097 - RNA, 21 nt, Human
gcucucugcaugguggcucag

SEQ ID NO: 456098 - RNA, 22 nt, Human
uguuaaauguuccuuuacugga

SEQ ID NO: 456099 - RNA, 22 nt, Human
guagggacccacagucuauauu

SEQ ID NO: 456100 - RNA, 22 nt, Human
agcauccaacaggagggaaggg

SEQ ID NO: 456101 - RNA, 20 nt, Human
ucagagucaucaaagauggu

SEQ ID NO: 456102 - RNA, 22 nt, Human
aaaggcaggcuuucacaucuca

SEQ ID NO: 456103 - RNA, 22 nt, Human
ucccaggcaaaggcagcucauu

SEQ ID NO: 456104 - RNA, 22 nt, Human
cuguauuucccacauucucuau

SEQ ID NO: 456105 - RNA, 19 nt, Human
uaaaaacugaaggaagcag

SEQ ID NO: 456106 - RNA, 23 nt, Human
guggagccacaucacaggcuccu

SEQ ID NO: 456107 - RNA, 20 nt, Human
uaugaagauaugugaacagc

SEQ ID NO: 456108 - RNA, 22 nt, Human
cccuccagagcuugaccugcug

SEQ ID NO: 456109 - RNA, 22 nt, Human
gggacuggaacuacuggugcag

SEQ ID NO: 456110 - RNA, 22 nt, Human
ucagaagcugguguccuuugaa

SEQ ID NO: 456111 - RNA, 22 nt, Human
uguuugugcugccuggugggca

SEQ ID NO: 456112 - RNA, 22 nt, Human
caaaggcugccacuguggcugu

SEQ ID NO: 456113 - RNA, 22 nt, Human
cccagcaucuccaggcauggcc

SEQ ID NO: 456114 - RNA, 22 nt, Human
uaacagaaauagaaaugagagu

SEQ ID NO: 456115 - RNA, 22 nt, Human
gggcugagauuggugcccuguc

SEQ ID NO: 456116 - RNA, 18 nt, Human
gccugcaggcacgggggu

SEQ ID NO: 456117 - RNA, 22 nt, Human
uucuaugccauguucagcuacu

SEQ ID NO: 456118 - RNA, 22 nt, Human
guaacagaaagucaugcucauu

SEQ ID NO: 456119 - RNA, 22 nt, Human
uucuuccucagcagggcugccu

SEQ ID NO: 456120 - RNA, 22 nt, Human
uuuuccuauaugcaaagaaugc

SEQ ID NO: 456121 - RNA, 19 nt, Human
ccugugugggguagagauc

SEQ ID NO: 456122 - RNA, 22 nt, Human
ugcaguggaagagguggagauc

SEQ ID NO: 456123 - RNA, 22 nt, Human
gagugggcaccgugggcacacu

SEQ ID NO: 456124 - RNA, 22 nt, Human
acagccagggcauugucgccga

SEQ ID NO: 456125 - RNA, 22 nt, Human
ucauaauacaaagaguucugca

SEQ ID NO: 456126 - RNA, 22 nt, Human
ugccucuguugagccuuggcug

SEQ ID NO: 456127 - RNA, 22 nt, Human
agcagccacacgccuccuucuc

SEQ ID NO: 456128 - RNA, 22 nt, Human
cugggcacaaguggcccuggau

SEQ ID NO: 456129 - RNA, 22 nt, Human
caaaguccauaguuuacaauag

SEQ ID NO: 456130 - RNA, 22 nt, Human
agcuuccuacaaccaucucaga

SEQ ID NO: 456131 - RNA, 22 nt, Human
gcugucuuccuugcuccaaggg

SEQ ID NO: 456132 - RNA, 22 nt, Human
aggcagccuauggggagcucag

SEQ ID NO: 456133 - RNA, 22 nt, Human
ccagcagcuguggcuuugccuc

SEQ ID NO: 456134 - RNA, 22 nt, Human
ugcaggcuuuagccccauggcu

SEQ ID NO: 456135 - RNA, 22 nt, Human
agaggcuguuacacucccagau

SEQ ID NO: 456136 - RNA, 23 nt, Human
gggggcugguugacucucugcag

SEQ ID NO: 456137 - RNA, 22 nt, Human
ugcugccacaaauucagcugcc

SEQ ID NO: 456138 - RNA, 22 nt, Human
ccaggagucaauaaaggaagcu

SEQ ID NO: 456139 - RNA, 22 nt, Human
gcaggggaguccacucuaugca

SEQ ID NO: 456140 - RNA, 22 nt, Human
aaaacuguaucuucuugggacu

SEQ ID NO: 456141 - RNA, 22 nt, Human
auuaaauuggaucugcauaguu

SEQ ID NO: 456142 - RNA, 22 nt, Human
aauauguucaaaauagaucacu

SEQ ID NO: 456143 - RNA, 22 nt, Human
uggcagcugucuguggggucuc

SEQ ID NO: 456144 - RNA, 22 nt, Human
uggcagaggaaaaagucacugg

SEQ ID NO: 456145 - RNA, 22 nt, Human
gggcaggucugggucagccuga

SEQ ID NO: 456146 - RNA, 22 nt, Human
ccaguggguaggccauggugag

SEQ ID NO: 456147 - RNA, 22 nt, Human
cgaggcagggaagcugcaaaag

SEQ ID NO: 456148 - RNA, 22 nt, Human
augaggcaaucaugguccaguu

SEQ ID NO: 456149 - RNA, 19 nt, Human
cugugcaggccgggcugag

SEQ ID NO: 456150 - RNA, 22 nt, Human
aagcaaagaguuuaguggguga

SEQ ID NO: 456151 - RNA, 22 nt, Human
agcagugaugcaugacagccua

SEQ ID NO: 456152 - RNA, 22 nt, Human
guggcagcaaaauccugcauuc

SEQ ID NO: 456153 - RNA, 22 nt, Human
ccaggccugcaucugcugcgca

SEQ ID NO: 456154 - RNA, 22 nt, Human
uugaagcaugguacuuguucaa

SEQ ID NO: 456155 - RNA, 21 nt, Human
uuugaaagcccuauguuuuca

SEQ ID NO: 456156 - RNA, 22 nt, Human
aacagacaacuccuguggcuca

SEQ ID NO: 456157 - RNA, 22 nt, Human
ucagcaaugugauacugugcaa

SEQ ID NO: 456158 - RNA, 22 nt, Human
ugacaaaacugcaauuacuuuu

SEQ ID NO: 456159 - RNA, 22 nt, Human
ugaggcaguugagcuuccugag

SEQ ID NO: 456160 - RNA, 22 nt, Human
cuggagccggcgagccccagcc

SEQ ID NO: 456161 - RNA, 21 nt, Human
uccugcagaaugccuuccuac

SEQ ID NO: 456162 - RNA, 22 nt, Human
ccagcgcuucccaucagggagg

SEQ ID NO: 456163 - RNA, 22 nt, Human
gcccauggacacccaagugcca

SEQ ID NO: 456164 - RNA, 20 nt, Human
agggucaguagcacagagcu

SEQ ID NO: 456165 - RNA, 23 nt, Human
uuacuuuugcaccaaccuaauau

SEQ ID NO: 456166 - RNA, 22 nt, Human
acuuaguauuuuucagcuuuga

SEQ ID NO: 456167 - RNA, 22 nt, Human
ugugucccuuggaaccucagcu

SEQ ID NO: 456168 - RNA, 22 nt, Human
gagcaugguuccauagguuggu

SEQ ID NO: 456169 - RNA, 22 nt, Human
ccacccagccagaugcaggaag

SEQ ID NO: 456170 - RNA, 22 nt, Human
uggccaggcagguagaacggcc

SEQ ID NO: 456171 - RNA, 22 nt, Human
gcucugugccacaugcaguguu

SEQ ID NO: 456172 - RNA, 22 nt, Human
uguuucagucccuguguucaau

SEQ ID NO: 456173 - RNA, 22 nt, Human
uccagggcugacuugggagagg

SEQ ID NO: 456174 - RNA, 22 nt, Human
uucaagaugccagggacgcggc

SEQ ID NO: 456175 - RNA, 22 nt, Human
agccuccuggaguuucugggau

SEQ ID NO: 456176 - RNA, 22 nt, Human
gggcugaccaaugccuugcuuu

SEQ ID NO: 456177 - RNA, 22 nt, Human
cggggcaggagucccuguagag

SEQ ID NO: 456178 - RNA, 22 nt, Human
gggccacauugaagggugggua

SEQ ID NO: 456179 - RNA, 22 nt, Human
agaauuguaagcaauuugauua

SEQ ID NO: 456180 - RNA, 22 nt, Human
aguguuucucagaagggccuau

SEQ ID NO: 456181 - RNA, 22 nt, Human
aggcagcagucaugaggaaaga

SEQ ID NO: 456182 - RNA, 22 nt, Human
aucuuucagagcuccaucaggg

SEQ ID NO: 456183 - RNA, 22 nt, Human
ucccagaguauuagcaauugcu

SEQ ID NO: 456184 - RNA, 22 nt, Human
ccccuuccuuccucagacagcc

SEQ ID NO: 456185 - RNA, 22 nt, Human
uccaggcuagaagucacaggcc

SEQ ID NO: 456186 - RNA, 22 nt, Human
gcaguggauccaaugguaucuu

SEQ ID NO: 456187 - RNA, 22 nt, Human
ccccuuccacagugcuuccuaa

SEQ ID NO: 456188 - RNA, 22 nt, Human
aggcugggaagguaaaguugua

SEQ ID NO: 456189 - RNA, 22 nt, Human
ucugcugcugagcacacuccua

SEQ ID NO: 456190 - RNA, 22 nt, Human
guuuuguugcugcagagcucaa

SEQ ID NO: 456191 - RNA, 22 nt, Human
cuggccugaucucaugcugucc

SEQ ID NO: 456192 - RNA, 22 nt, Human
aaaauguaaagcuugaguguag

SEQ ID NO: 456193 - RNA, 22 nt, Human
ggaggaugccaagcugugcaca

SEQ ID NO: 456194 - RNA, 22 nt, Human
gcuuccuucuaccacaucaugc

SEQ ID NO: 456195 - RNA, 22 nt, Human
aacuuuaaggcuauaaauuaug

SEQ ID NO: 456196 - RNA, 22 nt, Human
agggcuggagccacagcuggga

SEQ ID NO: 456197 - RNA, 22 nt, Human
ccuggcucucugcagauccugg

SEQ ID NO: 456198 - RNA, 22 nt, Human
gugggugauguacuggaggcca

SEQ ID NO: 456199 - RNA, 22 nt, Human
auguaauuugcccucaaguuaa

SEQ ID NO: 456200 - RNA, 22 nt, Human
acacuguaaauugagugcguga

SEQ ID NO: 456201 - RNA, 22 nt, Human
gccagacacuccccugggcagg

SEQ ID NO: 456202 - RNA, 22 nt, Human
agcugcaggccucuccugggga

SEQ ID NO: 456203 - RNA, 22 nt, Human
uucuaguugagggagacaaaua

SEQ ID NO: 456204 - RNA, 22 nt, Human
gccaaagcagucuugccucugc

SEQ ID NO: 456205 - RNA, 22 nt, Human
caggcagcagaggaguguggga

SEQ ID NO: 456206 - RNA, 22 nt, Human
ugcagggcaguggagguugagu

SEQ ID NO: 456207 - RNA, 22 nt, Human
agagcugaauuuggguggugga

SEQ ID NO: 456208 - RNA, 22 nt, Human
gacagggcaagacucugucuaa

SEQ ID NO: 456209 - RNA, 22 nt, Human
aggcaggugggucacuugaguc

SEQ ID NO: 456210 - RNA, 22 nt, Human
cccugcagagccagcccugacc

SEQ ID NO: 456211 - RNA, 22 nt, Human
uuggcuuccaggaucucagcag

SEQ ID NO: 456212 - RNA, 22 nt, Human
agccacagagguugaugugguu

SEQ ID NO: 456213 - RNA, 22 nt, Human
auagacuugguuaguaaauuug

SEQ ID NO: 456214 - RNA, 22 nt, Human
ucagguggcuucggggaguggc

SEQ ID NO: 456215 - RNA, 22 nt, Human
aaacaguauuaucaauauauuu

SEQ ID NO: 456216 - RNA, 22 nt, Human
uucaauucugcucugaucuuag

SEQ ID NO: 456217 - RNA, 19 nt, Human
gguaaaagugagcuucagg

SEQ ID NO: 456218 - RNA, 22 nt, Human
cuguggaccugcucuuagagac

SEQ ID NO: 456219 - RNA, 22 nt, Human
gaggccuggguuggaggugcau

SEQ ID NO: 456220 - RNA, 18 nt, Human
cauuguacaaugcuuuau

SEQ ID NO: 456221 - RNA, 22 nt, Human
gucaggauuugaacucaggucu

SEQ ID NO: 456222 - RNA, 22 nt, Human
gguuucaacuuuugugaggaau

SEQ ID NO: 456223 - RNA, 22 nt, Human
acagcuuuuaugggaccagcca

SEQ ID NO: 456224 - RNA, 22 nt, Human
aagaagaugguuaacuuucagu

SEQ ID NO: 456225 - RNA, 22 nt, Human
ucagaagguggagguugcagug

SEQ ID NO: 456226 - RNA, 22 nt, Human
agaaacauuuagauuauauguc

SEQ ID NO: 456227 - RNA, 22 nt, Human
aaauucuuucauggcuaauaag

SEQ ID NO: 456228 - RNA, 22 nt, Human
gcuggggucugugaggagggcu

SEQ ID NO: 456229 - RNA, 22 nt, Human
ggcuggccucaggguccucgcu

SEQ ID NO: 456230 - RNA, 22 nt, Human
gcaguggauggccagcaggggc

SEQ ID NO: 456231 - RNA, 21 nt, Human
ggcagcccgcccucuccuggc

SEQ ID NO: 456232 - RNA, 18 nt, Human
agaaggagcuaugggcag

SEQ ID NO: 456233 - RNA, 22 nt, Human
cagucucuaaaucaaucugaau

SEQ ID NO: 456234 - RNA, 22 nt, Human
cagaacugggcagggagcagag

SEQ ID NO: 456235 - RNA, 22 nt, Human
cacagugcaugaugggcagaag

SEQ ID NO: 456236 - RNA, 22 nt, Human
gggcaguugauggaggucugga

SEQ ID NO: 456237 - RNA, 22 nt, Human
gcaaaucaccaccuagcuggau

SEQ ID NO: 456238 - RNA, 21 nt, Human
ucucugguuggaguugugcca

SEQ ID NO: 456239 - RNA, 23 nt, Human
uggcagcuguguaagagaaagca

SEQ ID NO: 456240 - RNA, 22 nt, Human
ccugagguggcugcagcacugc

SEQ ID NO: 456241 - RNA, 20 nt, Human
cguaaggcaagugcugcauc

SEQ ID NO: 456242 - RNA, 22 nt, Human
caagccucagaaucuucuccau

SEQ ID NO: 456243 - RNA, 22 nt, Human
agggacacaugugauuauuuau

SEQ ID NO: 456244 - RNA, 22 nt, Human
gcagugcuaaguagcuggccca

SEQ ID NO: 456245 - RNA, 22 nt, Human
cccagagcugagucugauauau

SEQ ID NO: 456246 - RNA, 22 nt, Human
ugggaggcagguaggugaugau

SEQ ID NO: 456247 - RNA, 22 nt, Human
uaaugaauaaacuugagaguca

SEQ ID NO: 456248 - RNA, 20 nt, Human
ccuccuggucaggugugcag

SEQ ID NO: 456249 - RNA, 22 nt, Human
cugagcugggaguagagacucu

SEQ ID NO: 456250 - RNA, 22 nt, Human
gagcagugacuggagcaugaga

SEQ ID NO: 456251 - RNA, 22 nt, Human
ggccuggaagaggacagagaaa

SEQ ID NO: 456252 - RNA, 22 nt, Human
cugugucccccucagccaggug

SEQ ID NO: 456253 - RNA, 22 nt, Human
ucucaggaucuaauacauggua

SEQ ID NO: 456254 - RNA, 22 nt, Human
aaaugcuguguuuuaacauaga

SEQ ID NO: 456255 - RNA, 22 nt, Human
uggaguuccuuugaaaggcucu

SEQ ID NO: 456256 - RNA, 22 nt, Human
agggcccuaaggaaggcacaca

SEQ ID NO: 456257 - RNA, 22 nt, Human
ggauggagguucucagaugcuc

SEQ ID NO: 456258 - RNA, 20 nt, Human
uggcuccugcgguggaacca

SEQ ID NO: 456259 - RNA, 21 nt, Human
uccauuguuuucccaggguuu

SEQ ID NO: 456260 - RNA, 22 nt, Human
gcagagcucaagguguucagcu

SEQ ID NO: 456261 - RNA, 22 nt, Human
ccaggcugggcggggaaccugg

SEQ ID NO: 456262 - RNA, 21 nt, Human
uccagggaacuucucaggaau

SEQ ID NO: 456263 - RNA, 22 nt, Human
gggccuggugcuucugacuccu

SEQ ID NO: 456264 - RNA, 22 nt, Human
gcugcuuccuuuccugcugacc

SEQ ID NO: 456265 - RNA, 18 nt, Human
aagccagagaccacugcc

SEQ ID NO: 456266 - RNA, 22 nt, Human
gccugccugaaggcuguaccag

SEQ ID NO: 456267 - RNA, 22 nt, Human
uuucuuauacuauauugucauc

SEQ ID NO: 456268 - RNA, 22 nt, Human
ccugccagcauggcuuaucucc

SEQ ID NO: 456269 - RNA, 22 nt, Human
ucugaaaauguugacuuuguuu

SEQ ID NO: 456270 - RNA, 22 nt, Human
auuucucagcacuuccuaucuc

SEQ ID NO: 456271 - RNA, 22 nt, Human
uguuucaggaccuaucuuuuag

SEQ ID NO: 456272 - RNA, 22 nt, Human
uagcugccauugcuccaggaag

SEQ ID NO: 456273 - RNA, 22 nt, Human
gggagaaguggaaaucucauua

SEQ ID NO: 456274 - RNA, 22 nt, Human
augaaauaucuugaagaaauuc

SEQ ID NO: 456275 - RNA, 22 nt, Human
uacaggcaugaaugaaaucugu

SEQ ID NO: 456276 - RNA, 18 nt, Human
gccagagggaagcaggug

SEQ ID NO: 456277 - RNA, 18 nt, Human
gagacacaagggccugga

SEQ ID NO: 456278 - RNA, 22 nt, Human
gaaucauuuagcucugcaugga

SEQ ID NO: 456279 - RNA, 19 nt, Human
ggcagaagguguaggggga

SEQ ID NO: 456280 - RNA, 22 nt, Human
auggcagagggauugaacagcu

SEQ ID NO: 456281 - RNA, 22 nt, Human
accagagcuggcagaguaucaa

SEQ ID NO: 456282 - RNA, 22 nt, Human
gagcuggcaggaggcuccccga

SEQ ID NO: 456283 - RNA, 22 nt, Human
cauuuguuggucagauuguagu

SEQ ID NO: 456284 - RNA, 22 nt, Human
cacaggggcaaacuguagggga

SEQ ID NO: 456285 - RNA, 22 nt, Human
gcucccagucugauggaggaga

SEQ ID NO: 456286 - RNA, 22 nt, Human
cccacucccugcacgccugccg

SEQ ID NO: 456287 - RNA, 22 nt, Human
uccugcaggggcugaggaacca

SEQ ID NO: 456288 - RNA, 22 nt, Human
ccuggcagcgugccgagcugcg

SEQ ID NO: 456289 - RNA, 22 nt, Human
aacuguacgauaauaaauuugu

SEQ ID NO: 456290 - RNA, 22 nt, Human
caccaggcugcccaggacaggg

SEQ ID NO: 456291 - RNA, 22 nt, Human
guacccaggcacgccuugcuga

SEQ ID NO: 456292 - RNA, 20 nt, Human
acagaauaugcugguugugg

SEQ ID NO: 456293 - RNA, 22 nt, Human
cagcacuggggggauucggagc

SEQ ID NO: 456294 - RNA, 22 nt, Human
acgcagaagggccuggcgugcc

SEQ ID NO: 456295 - RNA, 22 nt, Human
ugaugcuucacgcugaauaugc

SEQ ID NO: 456296 - RNA, 22 nt, Human
uuggauccaucucaggcauagg

SEQ ID NO: 456297 - RNA, 22 nt, Human
cagccucucuguaucucaggau

SEQ ID NO: 456298 - RNA, 22 nt, Human
ccagcuuuuccucucauugcuu

SEQ ID NO: 456299 - RNA, 22 nt, Human
agaguccagaaaacagugugcu

SEQ ID NO: 456300 - RNA, 22 nt, Human
augcagagacagauguggcaug

SEQ ID NO: 456301 - RNA, 22 nt, Human
agagccagcaagugaauaguga

SEQ ID NO: 456302 - RNA, 22 nt, Human
aacccgggaggcagagguugug

SEQ ID NO: 456303 - RNA, 22 nt, Human
uuacaugguuguuggaaaugcu

SEQ ID NO: 456304 - RNA, 22 nt, Human
cagggcuccaugcagggacucc

SEQ ID NO: 456305 - RNA, 22 nt, Human
uggcugagugaacauguccauu

SEQ ID NO: 456306 - RNA, 22 nt, Human
uggagggcaugcuguccauggg

SEQ ID NO: 456307 - RNA, 22 nt, Human
aauucugugcaggcagagcuau

SEQ ID NO: 456308 - RNA, 22 nt, Human
ucaggggaaaucucucagcgaa

SEQ ID NO: 456309 - RNA, 22 nt, Human
auccuucagcugcccuguuacc

SEQ ID NO: 456310 - RNA, 22 nt, Human
gacagcaggagaucaugauaga

SEQ ID NO: 456311 - RNA, 22 nt, Human
augaaggcuguguggagccccc

SEQ ID NO: 456312 - RNA, 22 nt, Human
caccugggcuaaacuaugcagg

SEQ ID NO: 456313 - RNA, 22 nt, Human
gcaccugggguacacagcuaca

SEQ ID NO: 456314 - RNA, 22 nt, Human
ccaucccuccuccaccagcuag

SEQ ID NO: 456315 - RNA, 22 nt, Human
auguacaguggaaacuaacaaa

SEQ ID NO: 456316 - RNA, 22 nt, Human
uguccuuuaugaaaugguguuu

SEQ ID NO: 456317 - RNA, 22 nt, Human
gcagggaagacccggagcagcg

SEQ ID NO: 456318 - RNA, 22 nt, Human
aaggcugccucugccagaggag

SEQ ID NO: 456319 - RNA, 22 nt, Human
cucagccccaauucuccccauu

SEQ ID NO: 456320 - RNA, 22 nt, Human
ucugguuagccaauaaugccaa

SEQ ID NO: 456321 - RNA, 22 nt, Human
aucuggcuuuuacugaauugcu

SEQ ID NO: 456322 - RNA, 22 nt, Human
uauugaaauccauuacguucuu

SEQ ID NO: 456323 - RNA, 22 nt, Human
uaugcacacauuagcacagggu

SEQ ID NO: 456324 - RNA, 22 nt, Human
cauguuaauaugcauugaguac

SEQ ID NO: 456325 - RNA, 18 nt, Human
cuccagggaacucaguca

SEQ ID NO: 456326 - RNA, 22 nt, Human
agcugccaggccccugagaacc

SEQ ID NO: 456327 - RNA, 22 nt, Human
ucuuuccuacuuuauugugaac

SEQ ID NO: 456328 - RNA, 22 nt, Human
ccagcuuuuggggugacaauuu

SEQ ID NO: 456329 - RNA, 22 nt, Human
ccaggcagcaaauuuucugaau

SEQ ID NO: 456330 - RNA, 17 nt, Human
ucaggauccaggguucu

SEQ ID NO: 456331 - RNA, 19 nt, Human
acuuugcaugugugucuaa

SEQ ID NO: 456332 - RNA, 19 nt, Human
agugcagggagcacccuca

SEQ ID NO: 456333 - RNA, 22 nt, Human
cuuuggcaaugaaacacaagaa

SEQ ID NO: 456334 - RNA, 22 nt, Human
aggcagguguuaccucugguuu

SEQ ID NO: 456335 - RNA, 22 nt, Human
gcugugagcugccugugucaca

SEQ ID NO: 456336 - RNA, 22 nt, Human
aucaguuuguauaugaaacacu

SEQ ID NO: 456337 - RNA, 22 nt, Human
cauuuguuaaccaguguggauu

SEQ ID NO: 456338 - RNA, 20 nt, Human
gucagugucuucaguaguga

SEQ ID NO: 456339 - RNA, 22 nt, Human
gcagaggccaggccaccagcaa

SEQ ID NO: 456340 - RNA, 22 nt, Human
aauugugcuaugauuaugaaag

SEQ ID NO: 456341 - RNA, 22 nt, Human
uccagagguauguagagaguau

SEQ ID NO: 456342 - RNA, 22 nt, Human
aggccugcagcaggagcaaacc

SEQ ID NO: 456343 - RNA, 22 nt, Human
uacagaguggugagaucuuuug

SEQ ID NO: 456344 - RNA, 21 nt, Human
uacaagaccggauucgggccc

SEQ ID NO: 456345 - RNA, 20 nt, Human
gcugccuuguccugcuuggu

SEQ ID NO: 456346 - RNA, 22 nt, Human
ugcagucuggauguccucagau

SEQ ID NO: 456347 - RNA, 22 nt, Human
acuccuggggauccauuccuuu

SEQ ID NO: 456348 - RNA, 22 nt, Human
ugcauuguuugauaggugaauu

SEQ ID NO: 456349 - RNA, 17 nt, Human
guuugcaugguguuaac

SEQ ID NO: 456350 - RNA, 22 nt, Human
gugucccagcagcacauuggcu

SEQ ID NO: 456351 - RNA, 22 nt, Human
ugaggcagggagaguggauaug

SEQ ID NO: 456352 - RNA, 22 nt, Human
gggaggaaggcuugggugagua

SEQ ID NO: 456353 - RNA, 22 nt, Human
uuguuacacauaauaacauuuu

SEQ ID NO: 456354 - RNA, 22 nt, Human
agaaaucugacugcugugcaca

SEQ ID NO: 456355 - RNA, 22 nt, Human
uguggcaguauaagagcuagaa

SEQ ID NO: 456356 - RNA, 22 nt, Human
caugcuuuaccaaagcagugau

SEQ ID NO: 456357 - RNA, 22 nt, Human
ugggacagugugccuugcuccu

SEQ ID NO: 456358 - RNA, 22 nt, Human
ccuggaggagcgcugaccagcu

SEQ ID NO: 456359 - RNA, 22 nt, Human
gaggugggagggcagucccuaa

SEQ ID NO: 456360 - RNA, 22 nt, Human
aagaauucacugguagagucaa

SEQ ID NO: 456361 - RNA, 22 nt, Human
caucacuguccucagcauucca

SEQ ID NO: 456362 - RNA, 22 nt, Human
ggagcagggaauuacagcgcag

SEQ ID NO: 456363 - RNA, 22 nt, Human
cacacaugaaucccuaguaccu

SEQ ID NO: 456364 - RNA, 20 nt, Human
guucucacugaucugcaggg

SEQ ID NO: 456365 - RNA, 22 nt, Human
agggaaagguagugaggucaca

SEQ ID NO: 456366 - RNA, 22 nt, Human
ucuuccaguguagacaucugcc

SEQ ID NO: 456367 - RNA, 22 nt, Human
cagaggaaggcucugggaaugu

SEQ ID NO: 456368 - RNA, 22 nt, Human
agggcuacugccugccuucagg

SEQ ID NO: 456369 - RNA, 22 nt, Human
ccugggagguggagguugcagu

SEQ ID NO: 456370 - RNA, 22 nt, Human
agaagccaauucugugugaguc

SEQ ID NO: 456371 - RNA, 22 nt, Human
uuucugaagggcagcagacucu

SEQ ID NO: 456372 - RNA, 22 nt, Human
uugcaggggaaggagcagagcu

SEQ ID NO: 456373 - RNA, 22 nt, Human
uccaggcacuauauauacuuuu

SEQ ID NO: 456374 - RNA, 22 nt, Human
uuuaaauucugucugccgcuua

SEQ ID NO: 456375 - RNA, 23 nt, Human
aguguuccaguugguugagagug

SEQ ID NO: 456376 - RNA, 22 nt, Human
cacagcuucccaaaguggaccu

SEQ ID NO: 456377 - RNA, 22 nt, Human
agagccacggcaggccuaggaa

SEQ ID NO: 456378 - RNA, 22 nt, Human
gaagccucaacaucucugcguc

SEQ ID NO: 456379 - RNA, 22 nt, Human
aagcugccagauucagucugcu

SEQ ID NO: 456380 - RNA, 22 nt, Human
ccuuuuucccuggagggacagc

SEQ ID NO: 456381 - RNA, 20 nt, Human
caaugcacacagcugcuucu

SEQ ID NO: 456382 - RNA, 22 nt, Human
ccaaggaguagagcaggaagcu

SEQ ID NO: 456383 - RNA, 22 nt, Human
ugcuuucaaaggcuuucuagau

SEQ ID NO: 456384 - RNA, 22 nt, Human
ucauuucuaucuaugcagcuuc

SEQ ID NO: 456385 - RNA, 22 nt, Human
agggcuccuccccggccuccac

SEQ ID NO: 456386 - RNA, 22 nt, Human
agugcacagcgugauguauugg

SEQ ID NO: 456387 - RNA, 22 nt, Human
auaaacaguaaaugugagcagu

SEQ ID NO: 456388 - RNA, 22 nt, Human
acaacaggguaaggcaggccau

SEQ ID NO: 456389 - RNA, 22 nt, Human
guauuuuauggccuggggccua

SEQ ID NO: 456390 - RNA, 22 nt, Human
auacuaagcucauuacauuuug

SEQ ID NO: 456391 - RNA, 22 nt, Human
auaacagagagcuacugaacug

SEQ ID NO: 456392 - RNA, 23 nt, Human
cagagcuggcucagagcugccug

SEQ ID NO: 456393 - RNA, 22 nt, Human
cugcuucugggaugauggagua

SEQ ID NO: 456394 - RNA, 22 nt, Human
ugaggcucugcuucuguggcuc

SEQ ID NO: 456395 - RNA, 22 nt, Human
gcugucuccauagcuguguguc

SEQ ID NO: 456396 - RNA, 22 nt, Human
agcccaagcuaugaggugaccu

SEQ ID NO: 456397 - RNA, 22 nt, Human
aggaaaaauaaggcagcagggc

SEQ ID NO: 456398 - RNA, 18 nt, Human
uugagggaggggcagagu

SEQ ID NO: 456399 - RNA, 22 nt, Human
auuagggaaggauuuggccuga

SEQ ID NO: 456400 - RNA, 22 nt, Human
acagaguaucuaucaggaguau

SEQ ID NO: 456401 - RNA, 22 nt, Human
auucaguuucauggcacagcua

SEQ ID NO: 456402 - RNA, 22 nt, Human
caggagcuacucagguuggguu

SEQ ID NO: 456403 - RNA, 22 nt, Human
cuccaggggccagaagccuggc

SEQ ID NO: 456404 - RNA, 22 nt, Human
cuggagccgcauggagcaggga

SEQ ID NO: 456405 - RNA, 19 nt, Human
gcccugcaggagguggggc

SEQ ID NO: 456406 - RNA, 22 nt, Human
gugggacucuucuuuggcagug

SEQ ID NO: 456407 - RNA, 23 nt, Human
ccucagcauggcaggagcccagc

SEQ ID NO: 456408 - RNA, 22 nt, Human
cccuggagcuagucugagcaga

SEQ ID NO: 456409 - RNA, 22 nt, Human
uaauuuaauccaaguguuacau

SEQ ID NO: 456410 - RNA, 22 nt, Human
gagcuggcuccgccaugcugcu

SEQ ID NO: 456411 - RNA, 22 nt, Human
ucaggaaagaguguauccauca

SEQ ID NO: 456412 - RNA, 22 nt, Human
aacuguaaagguugagugguaa

SEQ ID NO: 456413 - RNA, 22 nt, Human
caugggcucuucuggacugcac

SEQ ID NO: 456414 - RNA, 22 nt, Human
ucaguggauauuucuguggcug

SEQ ID NO: 456415 - RNA, 22 nt, Human
ugcguugcgcuccugcagcagg

SEQ ID NO: 456416 - RNA, 22 nt, Human
gcagacaauuuauuagcagauu

SEQ ID NO: 456417 - RNA, 22 nt, Human
uaaaucccuacaucuguguuuu

SEQ ID NO: 456418 - RNA, 22 nt, Human
ggugcagaggagccagcugggg

SEQ ID NO: 456419 - RNA, 22 nt, Human
ggcucuggugaggguaggagau

SEQ ID NO: 456420 - RNA, 19 nt, Human
ugagugggccccugcagac

SEQ ID NO: 456421 - RNA, 22 nt, Human
gcagcuguguaaugagcccaca

SEQ ID NO: 456422 - RNA, 22 nt, Human
uuuccacuguagagauguugaa

SEQ ID NO: 456423 - RNA, 22 nt, Human
cuggagagauccuccugaaaaa

SEQ ID NO: 456424 - RNA, 21 nt, Human
ucugucucuccacugcccugc

SEQ ID NO: 456425 - RNA, 22 nt, Human
gucccugcaucaccacgggacu

SEQ ID NO: 456426 - RNA, 22 nt, Human
agagccaggcggcugggcaccu

SEQ ID NO: 456427 - RNA, 22 nt, Human
cauuuucaugaguuucuguuca

SEQ ID NO: 456428 - RNA, 22 nt, Human
cugggagucaccaggagcaagg

SEQ ID NO: 456429 - RNA, 22 nt, Human
ugaggugaagaguggagcucag

SEQ ID NO: 456430 - RNA, 22 nt, Human
caagggaccugagauggucucu

SEQ ID NO: 456431 - RNA, 22 nt, Human
gggagggaaagcuugaucuguc

SEQ ID NO: 456432 - RNA, 22 nt, Human
agggcugacagugaggagucaa

SEQ ID NO: 456433 - RNA, 22 nt, Human
cagggcucuuccggagcaggga

SEQ ID NO: 456434 - RNA, 22 nt, Human
aaaguucaugguguuauagaaa

SEQ ID NO: 456435 - RNA, 22 nt, Human
ccuuuccuuuuuagugugggag

SEQ ID NO: 456436 - RNA, 22 nt, Human
uagcagcugugaguaaaagcca

SEQ ID NO: 456437 - RNA, 22 nt, Human
cuuauguauaauguuccacaua

SEQ ID NO: 456438 - RNA, 22 nt, Human
uggagccaugccuggccuuucc

SEQ ID NO: 456439 - RNA, 22 nt, Human
cuggcuucugggccagggcaga

SEQ ID NO: 456440 - RNA, 22 nt, Human
aagagggaggugcgggugcaga

SEQ ID NO: 456441 - RNA, 22 nt, Human
gaagagcuccaaaaacagugag

SEQ ID NO: 456442 - RNA, 22 nt, Human
agagaugaaaaguggagacugg

SEQ ID NO: 456443 - RNA, 23 nt, Human
ggcagagagcauggcuggggccc

SEQ ID NO: 456444 - RNA, 22 nt, Human
gcuggcagagacaagaagacua

SEQ ID NO: 456445 - RNA, 22 nt, Human
ugaagccagucaauguuaaguu

SEQ ID NO: 456446 - RNA, 22 nt, Human
uuuucuuacugucugugauccu

SEQ ID NO: 456447 - RNA, 22 nt, Human
ccugggugucaugggcagcugg

SEQ ID NO: 456448 - RNA, 22 nt, Human
cagcagagguuggaacaguucu

SEQ ID NO: 456449 - RNA, 22 nt, Human
cagagcauuuggaagccacgug

SEQ ID NO: 456450 - RNA, 22 nt, Human
ucuguggauuuuaguguucaug

SEQ ID NO: 456451 - RNA, 22 nt, Human
ugcuuuauaacuuaguuuaugg

SEQ ID NO: 456452 - RNA, 22 nt, Human
cagucuucuaaccuagcagccu

SEQ ID NO: 456453 - RNA, 22 nt, Human
cuuagggaaucuuagagcugga

SEQ ID NO: 456454 - RNA, 22 nt, Human
gauccuugcaacucugugaggu

SEQ ID NO: 456455 - RNA, 22 nt, Human
ccacuugugaaauaaucaaaua

SEQ ID NO: 456456 - RNA, 22 nt, Human
caggaaaaaugccaggagucag

SEQ ID NO: 456457 - RNA, 22 nt, Human
gcuggccuucugcagaguucug

SEQ ID NO: 456458 - RNA, 22 nt, Human
agaggaugauuuuaaggacacu

SEQ ID NO: 456459 - RNA, 22 nt, Human
cauuugcauaugaagaaguaag

SEQ ID NO: 456460 - RNA, 22 nt, Human
cauuuagaaacuguuuuuaaca

SEQ ID NO: 456461 - RNA, 22 nt, Human
uuauuuaaaagugguaagauuc

SEQ ID NO: 456462 - RNA, 22 nt, Human
uucagagauggaaggcagaaug

SEQ ID NO: 456463 - RNA, 22 nt, Human
ggucugagcuugagcccaugcu

SEQ ID NO: 456464 - RNA, 22 nt, Human
cagcuuggcuuccgcuuuacug

SEQ ID NO: 456465 - RNA, 22 nt, Human
acuguaaauuuugguugcaggu

SEQ ID NO: 456466 - RNA, 22 nt, Human
cucagggucugguccuuagauu

SEQ ID NO: 456467 - RNA, 22 nt, Human
aggugucuggauggguguccuu

SEQ ID NO: 456468 - RNA, 22 nt, Human
uggguacuccuauuaguucagu

SEQ ID NO: 456469 - RNA, 20 nt, Human
cucuccucacccgugucagg

SEQ ID NO: 456470 - RNA, 22 nt, Human
cauaacuagagugaaauguuga

SEQ ID NO: 456471 - RNA, 22 nt, Human
ggaucauuaacacauccaucac

SEQ ID NO: 456472 - RNA, 22 nt, Human
uuuuaucaaucauuaagacauu

SEQ ID NO: 456473 - RNA, 22 nt, Human
ugagcaguaggucugaauagug

SEQ ID NO: 456474 - RNA, 22 nt, Human
uuucauaaacaguagaagacua

SEQ ID NO: 456475 - RNA, 22 nt, Human
gagccagguuggaggcugcagu

SEQ ID NO: 456476 - RNA, 22 nt, Human
agcuggccuguuagagcugagu

SEQ ID NO: 456477 - RNA, 22 nt, Human
cccaggacucuucacugcagcc

SEQ ID NO: 456478 - RNA, 22 nt, Human
ccacagggacuguuaaaacccu

SEQ ID NO: 456479 - RNA, 22 nt, Human
augggcaguaacaguggcaguc

SEQ ID NO: 456480 - RNA, 22 nt, Human
caauaguaaauuacggaggaga

SEQ ID NO: 456481 - RNA, 22 nt, Human
agaauucuuggugguuagaaua

SEQ ID NO: 456482 - RNA, 22 nt, Human
ugcugggcuagaagcugaggcc

SEQ ID NO: 456483 - RNA, 22 nt, Human
gagagcugggaaagccguggag

SEQ ID NO: 456484 - RNA, 22 nt, Human
ucacacguccuugcuacuccuc

SEQ ID NO: 456485 - RNA, 22 nt, Human
aguuuccaaauauuguuuuagc

SEQ ID NO: 456486 - RNA, 22 nt, Human
acaguaauaaguguuggugagg

SEQ ID NO: 456487 - RNA, 21 nt, Human
ugauuuccagaaaauuggccc

SEQ ID NO: 456488 - RNA, 22 nt, Human
uggcagagucucuccuuuccag

SEQ ID NO: 456489 - RNA, 22 nt, Human
uugggugcugucauggggcacg

SEQ ID NO: 456490 - RNA, 22 nt, Human
aucagagacaaaaccagcacuu

SEQ ID NO: 456491 - RNA, 22 nt, Human
agggcugaugcaccauguagcc

SEQ ID NO: 456492 - RNA, 22 nt, Human
agggccagaggcaccuugcagc

SEQ ID NO: 456493 - RNA, 22 nt, Human
ucaggagcugcacugggcccac

SEQ ID NO: 456494 - RNA, 22 nt, Human
gccagagccacuuuugggugau

SEQ ID NO: 456495 - RNA, 22 nt, Human
ggcuucauggaggaggugaguc

SEQ ID NO: 456496 - RNA, 22 nt, Human
uuuccucugcugccauugcccc

SEQ ID NO: 456497 - RNA, 22 nt, Human
aagggcucccaacucaucuuuu

SEQ ID NO: 456498 - RNA, 22 nt, Human
gcuuuauuuugugagggauuac

SEQ ID NO: 456499 - RNA, 22 nt, Human
cugcugucuuuauuucacugcu

SEQ ID NO: 456500 - RNA, 22 nt, Human
augaugguuguccuaggugcau

SEQ ID NO: 456501 - RNA, 22 nt, Human
cugggcuguaauguggcacuga

SEQ ID NO: 456502 - RNA, 22 nt, Human
aucuggaacaaagcuuaggaau

SEQ ID NO: 456503 - RNA, 22 nt, Human
caaugauggcuaggcagcugcu

SEQ ID NO: 456504 - RNA, 22 nt, Human
ccucagagguuuucauucugua

SEQ ID NO: 456505 - RNA, 22 nt, Human
uccugggccuguacuccauccg

SEQ ID NO: 456506 - RNA, 22 nt, Human
ccauggaguuccucuggucuau

SEQ ID NO: 456507 - RNA, 22 nt, Human
aagcaguguucccagcuggccc

SEQ ID NO: 456508 - RNA, 22 nt, Human
uggcucagaaggcugccuucac

SEQ ID NO: 456509 - RNA, 22 nt, Human
aggcacugacagauucuguguc

SEQ ID NO: 456510 - RNA, 22 nt, Human
cagccucuuuccacaucaggca

SEQ ID NO: 456511 - RNA, 22 nt, Human
aggccuggccuuuauguucaag

SEQ ID NO: 456512 - RNA, 19 nt, Human
cagucccaaauucuuguca

SEQ ID NO: 456513 - RNA, 22 nt, Human
aggcucagagaugaguaagcac

SEQ ID NO: 456514 - RNA, 20 nt, Human
uacagucagggcacaggcag

SEQ ID NO: 456515 - RNA, 22 nt, Human
gcuugcuggugccugcaggcuc

SEQ ID NO: 456516 - RNA, 20 nt, Human
ggccugagcauggcuggcag

SEQ ID NO: 456517 - RNA, 22 nt, Human
cccaggcuggagugcaauggca

SEQ ID NO: 456518 - RNA, 22 nt, Human
cuccagcuuuuucccaguuggc

SEQ ID NO: 456519 - RNA, 22 nt, Human
ggccagaaguuggaaaagagcc

SEQ ID NO: 456520 - RNA, 22 nt, Human
agcuggggcugcagagaacagg

SEQ ID NO: 456521 - RNA, 22 nt, Human
ugugcuucagguugucgccacg

SEQ ID NO: 456522 - RNA, 22 nt, Human
uucauugugauucuuggcuagc

SEQ ID NO: 456523 - RNA, 22 nt, Human
caggcagaaggaaguaccaggc

SEQ ID NO: 456524 - RNA, 22 nt, Human
uuuaccaagcuuuaauuacaua

SEQ ID NO: 456525 - RNA, 22 nt, Human
ugcuuuaucugugagaaccuga

SEQ ID NO: 456526 - RNA, 22 nt, Human
cugcuguguaucauuuuagaug

SEQ ID NO: 456527 - RNA, 22 nt, Human
uugaauaguguuuucaguauac

SEQ ID NO: 456528 - RNA, 22 nt, Human
aggccagagaggggaccagccu

SEQ ID NO: 456529 - RNA, 22 nt, Human
uagggcaguuucauguuaucuu

SEQ ID NO: 456530 - RNA, 22 nt, Human
ccuccagcgcgauccacuccgg

SEQ ID NO: 456531 - RNA, 22 nt, Human
cucaggauccaucuccugcccu

SEQ ID NO: 456532 - RNA, 22 nt, Human
gcagcccaauggacugagacag

SEQ ID NO: 456533 - RNA, 22 nt, Human
agggccugcaucaggagcuugg

SEQ ID NO: 456534 - RNA, 22 nt, Human
ucaaaugcaggucuggucuugg

SEQ ID NO: 456535 - RNA, 22 nt, Human
ucucaccauggugcuugcuuau

SEQ ID NO: 456536 - RNA, 22 nt, Human
ugcagugugaccuguagcgagc

SEQ ID NO: 456537 - RNA, 22 nt, Human
aauauuucuccuucguuauagc

SEQ ID NO: 456538 - RNA, 22 nt, Human
aaguuguauauaccgcuuuaag

SEQ ID NO: 456539 - RNA, 22 nt, Human
agcauaaaggucaacguuuuag

SEQ ID NO: 456540 - RNA, 22 nt, Human
uaaauucuacaacuucaaagau

SEQ ID NO: 456541 - RNA, 22 nt, Human
ucucagagagcuguguuuuccu

SEQ ID NO: 456542 - RNA, 22 nt, Human
gacccuggaguuaguccugugu

SEQ ID NO: 456543 - RNA, 22 nt, Human
uugguuuaggaacuggcuugga

SEQ ID NO: 456544 - RNA, 22 nt, Human
uugaagcaaggcgaaucuugug

SEQ ID NO: 456545 - RNA, 22 nt, Human
ucugucacaauuugcuuacucu

SEQ ID NO: 456546 - RNA, 20 nt, Human
cccaggcagagcuagcggca

SEQ ID NO: 456547 - RNA, 22 nt, Human
aggagcugcaaauauuaguaau

SEQ ID NO: 456548 - RNA, 22 nt, Human
cugcuuccaugcaauggcaguc

SEQ ID NO: 456549 - RNA, 22 nt, Human
uggaaagacauucagccgcugg

SEQ ID NO: 456550 - RNA, 22 nt, Human
gagcuuccauggacgccaucug

SEQ ID NO: 456551 - RNA, 20 nt, Human
ucucagcauaagaacccuuc

SEQ ID NO: 456552 - RNA, 22 nt, Human
gggacuggaguagaggccggug

SEQ ID NO: 456553 - RNA, 22 nt, Human
aguuccagcugugaccagaaaa

SEQ ID NO: 456554 - RNA, 22 nt, Human
uggcagggucuugcuguguugc

SEQ ID NO: 456555 - RNA, 22 nt, Human
ucuuuccuuagaauaauucuuu

SEQ ID NO: 456556 - RNA, 22 nt, Human
ggcgugggaaguggggcuucug

SEQ ID NO: 456557 - RNA, 22 nt, Human
caugggcaccuuaaaaugaggc

SEQ ID NO: 456558 - RNA, 22 nt, Human
caccagcuuugcccacugccca

SEQ ID NO: 456559 - RNA, 22 nt, Human
gaggacagcuuagggcuuccug

SEQ ID NO: 456560 - RNA, 22 nt, Human
aggcacagagaaugcccuccau

SEQ ID NO: 456561 - RNA, 22 nt, Human
uuuaaugugagucccuuucaag

SEQ ID NO: 456562 - RNA, 22 nt, Human
accaugaugggaagcucagggc

SEQ ID NO: 456563 - RNA, 22 nt, Human
guccagugacaaguagcuggcc

SEQ ID NO: 456564 - RNA, 22 nt, Human
ucagagagguuggugauaagaa

SEQ ID NO: 456565 - RNA, 23 nt, Human
ccugcucaggcgugugcccugcu

SEQ ID NO: 456566 - RNA, 17 nt, Human
agagagagcaugccacc

SEQ ID NO: 456567 - RNA, 22 nt, Human
gcuguacaggguuauccuuucc

SEQ ID NO: 456568 - RNA, 21 nt, Human
cauuagggcagaagcaggaag

SEQ ID NO: 456569 - RNA, 20 nt, Human
uccucagaagacauuugggg

SEQ ID NO: 456570 - RNA, 22 nt, Human
ugccugucuccucugcagggug

SEQ ID NO: 456571 - RNA, 22 nt, Human
uggcucagagccuugagagcug

SEQ ID NO: 456572 - RNA, 22 nt, Human
auuguacuuuuauuacauguag

SEQ ID NO: 456573 - RNA, 22 nt, Human
ugagagugauugguucgaaugu

SEQ ID NO: 456574 - RNA, 22 nt, Human
cagcccuggaacagcugacuca

SEQ ID NO: 456575 - RNA, 22 nt, Human
cucagagaaccuaagcggagga

SEQ ID NO: 456576 - RNA, 22 nt, Human
gcuggucacucugggagcugcu

SEQ ID NO: 456577 - RNA, 22 nt, Human
ugccaggcuaaguggaggacuu

SEQ ID NO: 456578 - RNA, 22 nt, Human
ggcaccugcucaucuggacuca

SEQ ID NO: 456579 - RNA, 22 nt, Human
uuuccucugacugcuccccugc

SEQ ID NO: 456580 - RNA, 22 nt, Human
agguuuaugccuuggagcuggg

SEQ ID NO: 456581 - RNA, 22 nt, Human
cucuggcuucuaccuugcaguu

SEQ ID NO: 456582 - RNA, 22 nt, Human
uugaagcauuguggcuuguauu

SEQ ID NO: 456583 - RNA, 22 nt, Human
agccuucagcaguucaggugcc

SEQ ID NO: 456584 - RNA, 22 nt, Human
uaugcacacauguaugcaugug

SEQ ID NO: 456585 - RNA, 22 nt, Human
accagagcuuacaugcuagaaa

SEQ ID NO: 456586 - RNA, 22 nt, Human
ggaggcuccuaagcugacuuga

SEQ ID NO: 456587 - RNA, 22 nt, Human
ugacagaaagaauaugucaauc

SEQ ID NO: 456588 - RNA, 22 nt, Human
ucugaggcuucagacuguacug

SEQ ID NO: 456589 - RNA, 22 nt, Human
cuucucuucccagggacacagg

SEQ ID NO: 456590 - RNA, 23 nt, Human
aaacaugcagcacaugaaugcua

SEQ ID NO: 456591 - RNA, 22 nt, Human
uucaggauuauacucucuuccc

SEQ ID NO: 456592 - RNA, 22 nt, Human
aggagugcaaauaguccagaga

SEQ ID NO: 456593 - RNA, 22 nt, Human
aggggagaguuaaugugaaugu

SEQ ID NO: 456594 - RNA, 22 nt, Human
aaugcugcaagaggugaaaaga

SEQ ID NO: 456595 - RNA, 23 nt, Human
ggcucugugcugggccugcagga

SEQ ID NO: 456596 - RNA, 22 nt, Human
acagaauauugguuacuguugc

SEQ ID NO: 456597 - RNA, 22 nt, Human
auauuaggcaaggagauuauuu

SEQ ID NO: 456598 - RNA, 22 nt, Human
aagugguaggaagagagcacug

SEQ ID NO: 456599 - RNA, 22 nt, Human
agggucagggagugaguauuua

SEQ ID NO: 456600 - RNA, 22 nt, Human
auuugagaugguaaauaacuuu

SEQ ID NO: 456601 - RNA, 22 nt, Human
aaaguucagauuagacucaaga

SEQ ID NO: 456602 - RNA, 22 nt, Human
uguuuauugagugccuacuaua

SEQ ID NO: 456603 - RNA, 22 nt, Human
aggcuggcccuacuggcugccu

SEQ ID NO: 456604 - RNA, 22 nt, Human
ucagaggauugccucagcgagc

SEQ ID NO: 456605 - RNA, 22 nt, Human
uagauaaauuagaaaguuuacu

SEQ ID NO: 456606 - RNA, 22 nt, Human
aagagcauggaauggagaucca

SEQ ID NO: 456607 - RNA, 20 nt, Human
ucugaggcugagcucuacuu

SEQ ID NO: 456608 - RNA, 22 nt, Human
caguuauuaugaggucauuagg

SEQ ID NO: 456609 - RNA, 22 nt, Human
uggcugaggagggucuucuggu

SEQ ID NO: 456610 - RNA, 18 nt, Human
uguggcaggggugggaga

SEQ ID NO: 456611 - RNA, 22 nt, Human
gccugcagggccugggccuacc

SEQ ID NO: 456612 - RNA, 22 nt, Human
cagcuggaucccugcagaacuu

SEQ ID NO: 456613 - RNA, 23 nt, Human
gccucugcagccuaguuaguguc

SEQ ID NO: 456614 - RNA, 22 nt, Human
aaaaaucacuuuuauaggcagc

SEQ ID NO: 456615 - RNA, 22 nt, Human
acagaaagaagguguauuugag

SEQ ID NO: 456616 - RNA, 22 nt, Human
cugaggccagcugcagagcucu

SEQ ID NO: 456617 - RNA, 21 nt, Human
cagaaguaaggguaacuucuc

SEQ ID NO: 456618 - RNA, 23 nt, Human
ggccucagcgcacagaaacugcu

SEQ ID NO: 456619 - RNA, 23 nt, Human
ucccagccucuucucuugcauac

SEQ ID NO: 456620 - RNA, 22 nt, Human
agggcagauggaacuuccccga

SEQ ID NO: 456621 - RNA, 19 nt, Human
cagauguuuucaguucauu

SEQ ID NO: 456622 - RNA, 22 nt, Human
agcagcucacaggauuccugaa

SEQ ID NO: 456623 - RNA, 22 nt, Human
ccaaggagaaugacaccaugga

SEQ ID NO: 456624 - RNA, 22 nt, Human
acagcagagugugagauagcca

SEQ ID NO: 456625 - RNA, 21 nt, Human
ugggaccuagcuuugcacagg

SEQ ID NO: 456626 - RNA, 20 nt, Human
ugcagaagaacguucugguu

SEQ ID NO: 456627 - RNA, 22 nt, Human
gaacuguauaggagcaguguuu

SEQ ID NO: 456628 - RNA, 22 nt, Human
cccaaggcugcagugagcauga

SEQ ID NO: 456629 - RNA, 22 nt, Human
uggcaugauaggaggugcagaa

SEQ ID NO: 456630 - RNA, 22 nt, Human
agaugcugugaggaagcuagga

SEQ ID NO: 456631 - RNA, 18 nt, Human
uggcagccagcugcuccu

SEQ ID NO: 456632 - RNA, 22 nt, Human
aggcuuuaauuaucuacaggag

SEQ ID NO: 456633 - RNA, 22 nt, Human
acaaaguuauucuuucagagga

SEQ ID NO: 456634 - RNA, 22 nt, Human
guggcauuaggccaggugcaua

SEQ ID NO: 456635 - RNA, 20 nt, Human
auguccagugacuggaccau

SEQ ID NO: 456636 - RNA, 22 nt, Human
uacauacacaaauauacuguuu

SEQ ID NO: 456637 - RNA, 22 nt, Human
ugcacaucuuucagcaucauac

SEQ ID NO: 456638 - RNA, 22 nt, Human
uggcucaggugugagcugaaga

SEQ ID NO: 456639 - RNA, 21 nt, Human
cugugcuuuuuaagugugaug

SEQ ID NO: 456640 - RNA, 22 nt, Human
gagcagaacuacucacauaucg

SEQ ID NO: 456641 - RNA, 21 nt, Human
cucacaggaugcaguguuacu

SEQ ID NO: 456642 - RNA, 20 nt, Human
uuugagaccagucugcccaa

SEQ ID NO: 456643 - RNA, 22 nt, Human
acuggagcccguggaggcgcag

SEQ ID NO: 456644 - RNA, 22 nt, Human
caaggccacugcucagguuucc

SEQ ID NO: 456645 - RNA, 23 nt, Human
aggaaagcauucauuuuuaccau

SEQ ID NO: 456646 - RNA, 22 nt, Human
agguggguccuggcucugccau

SEQ ID NO: 456647 - RNA, 22 nt, Human
aucaaaguggaaguuuacuagg

SEQ ID NO: 456648 - RNA, 22 nt, Human
ugccaggccaauucuauuugac

SEQ ID NO: 456649 - RNA, 22 nt, Human
guggcugcucgggcuccggccc

SEQ ID NO: 456650 - RNA, 22 nt, Human
guuauaaaggugauaaugguca

SEQ ID NO: 456651 - RNA, 22 nt, Human
uucauauauaugcacuacguac

SEQ ID NO: 456652 - RNA, 22 nt, Human
gagagaagaaagccaugguccu

SEQ ID NO: 456653 - RNA, 22 nt, Human
uccagggaccucccugagagcu

SEQ ID NO: 456654 - RNA, 22 nt, Human
acccagcucuuugauggucuug

SEQ ID NO: 456655 - RNA, 22 nt, Human
gccuucugcgcucgugucuccg

SEQ ID NO: 456656 - RNA, 20 nt, Human
ggggcaguggcucaugccug

SEQ ID NO: 456657 - RNA, 22 nt, Human
ccugccagauccccugagcuga

SEQ ID NO: 456658 - RNA, 22 nt, Human
agucucaggcagaggaaggcua

SEQ ID NO: 456659 - RNA, 22 nt, Human
gggcaugccugcgcagugcaug

SEQ ID NO: 456660 - RNA, 22 nt, Human
gcacccagagggcagggucucc

SEQ ID NO: 456661 - RNA, 22 nt, Human
cacagaaucugugacuccaaga

SEQ ID NO: 456662 - RNA, 22 nt, Human
ccucugccugcacaucauccug

SEQ ID NO: 456663 - RNA, 22 nt, Human
ggagcugaugacgucaccaugg

SEQ ID NO: 456664 - RNA, 22 nt, Human
ucagggcaggcgagcagcugcu

SEQ ID NO: 456665 - RNA, 22 nt, Human
gaaguucaggugggaauugagc

SEQ ID NO: 456666 - RNA, 20 nt, Human
uccugggguaagccaugguc

SEQ ID NO: 456667 - RNA, 22 nt, Human
uugggggaagaggauagacagu

SEQ ID NO: 456668 - RNA, 22 nt, Human
gagacugauggggcucccagaa

SEQ ID NO: 456669 - RNA, 22 nt, Human
ugggaauggaugcuaagugcua

SEQ ID NO: 456670 - RNA, 23 nt, Human
ucuugaaaagccuacagcaguuc

SEQ ID NO: 456671 - RNA, 22 nt, Human
uucaagauccagcacaacagug

SEQ ID NO: 456672 - RNA, 22 nt, Human
ucaggccacuucacaggugauu

SEQ ID NO: 456673 - RNA, 22 nt, Human
gccaggcaggugucggagcccu

SEQ ID NO: 456674 - RNA, 22 nt, Human
uucuuacuaguauguuucagca

SEQ ID NO: 456675 - RNA, 22 nt, Human
caaaugcuaacuucuuuccaaa

SEQ ID NO: 456676 - RNA, 22 nt, Human
uggacaggugagugacucaggg

SEQ ID NO: 456677 - RNA, 22 nt, Human
cucaggagguuuccugucuagg

SEQ ID NO: 456678 - RNA, 19 nt, Human
cagaguccuugaccagucc

SEQ ID NO: 456679 - RNA, 22 nt, Human
ucagaggacagcagcuaaauaa

SEQ ID NO: 456680 - RNA, 22 nt, Human
uggggugggcaugcgcuguccu

SEQ ID NO: 456681 - RNA, 22 nt, Human
cagcaggcccaggugcugguga

SEQ ID NO: 456682 - RNA, 22 nt, Human
acuucaaacaauuaacagagaa

SEQ ID NO: 456683 - RNA, 22 nt, Human
ucucacugggucacagcagagg

SEQ ID NO: 456684 - RNA, 22 nt, Human
uggcucugccacuaacuuggua

SEQ ID NO: 456685 - RNA, 21 nt, Human
agaagccuggguggagguggg

SEQ ID NO: 456686 - RNA, 22 nt, Human
aaaugcagauugucauucagga

SEQ ID NO: 456687 - RNA, 22 nt, Human
aacaucuuuuuguuugcugaaa

SEQ ID NO: 456688 - RNA, 22 nt, Human
cggggcuguagcacagcugagc

SEQ ID NO: 456689 - RNA, 16 nt, Human
gggagggaguuggugg

SEQ ID NO: 456690 - RNA, 22 nt, Human
ucccagcacgucugcuguuucu

SEQ ID NO: 456691 - RNA, 22 nt, Human
acacacuucacccuugagcuaa

SEQ ID NO: 456692 - RNA, 20 nt, Human
accuuucaaaugauucagca

SEQ ID NO: 456693 - RNA, 22 nt, Human
ugagccagucugucugggugaa

SEQ ID NO: 456694 - RNA, 22 nt, Human
ucucaggguuuccugggggcug

SEQ ID NO: 456695 - RNA, 23 nt, Human
auguuauuauuagcagucuugcc

SEQ ID NO: 456696 - RNA, 22 nt, Human
agccuucaaccuagcuagagca

SEQ ID NO: 456697 - RNA, 22 nt, Human
gggcaugagagggcagcuggca

SEQ ID NO: 456698 - RNA, 22 nt, Human
agcaccuggucuccuggcgcug

SEQ ID NO: 456699 - RNA, 23 nt, Human
cagaggguuccauggagcauggu

SEQ ID NO: 456700 - RNA, 22 nt, Human
ccucaggaaaugaauaaauggc

SEQ ID NO: 456701 - RNA, 22 nt, Human
aaagccuugggauuugugauca

SEQ ID NO: 456702 - RNA, 22 nt, Human
gggcugcugccaaucacagccu

SEQ ID NO: 456703 - RNA, 22 nt, Human
guaucuuucccaccaaucacaa

SEQ ID NO: 456704 - RNA, 22 nt, Human
gaggcccaguccugcaagcacg

SEQ ID NO: 456705 - RNA, 22 nt, Human
acacuguagcugagggcaugcg

SEQ ID NO: 456706 - RNA, 22 nt, Human
ugaggcaggaguuaaugugcuc

SEQ ID NO: 456707 - RNA, 22 nt, Human
ggugauuuucgaguuucauguu

SEQ ID NO: 456708 - RNA, 22 nt, Human
aaugauggucauggcaacuuuu

SEQ ID NO: 456709 - RNA, 23 nt, Human
acagggcauugcuggccucgagg

SEQ ID NO: 456710 - RNA, 22 nt, Human
cauuuguauagugcuuagacca

SEQ ID NO: 456711 - RNA, 22 nt, Human
cucgcaggacagugcuaggacu

SEQ ID NO: 456712 - RNA, 22 nt, Human
ccaggguaccccaagggcaggu

SEQ ID NO: 456713 - RNA, 22 nt, Human
cagacacaccaggcccauucug

SEQ ID NO: 456714 - RNA, 22 nt, Human
guggccucaugucuauaaagag

SEQ ID NO: 456715 - RNA, 22 nt, Human
aaagaggaaccaagagcacgug

SEQ ID NO: 456716 - RNA, 22 nt, Human
uggccaccccuuucucugcacu

SEQ ID NO: 456717 - RNA, 22 nt, Human
ggcagaggaagcuggaaguggg

SEQ ID NO: 456718 - RNA, 22 nt, Human
gaaacaugucugacaauuuacc

SEQ ID NO: 456719 - RNA, 22 nt, Human
agggucaguucugugagguguu

SEQ ID NO: 456720 - RNA, 23 nt, Human
gcccaugcuguugggcccgagca

SEQ ID NO: 456721 - RNA, 22 nt, Human
gcuccucucccagagcugcagg

SEQ ID NO: 456722 - RNA, 22 nt, Human
cuccagugagugagcaggcgac

SEQ ID NO: 456723 - RNA, 22 nt, Human
gagguucacaggcuaucacagu

SEQ ID NO: 456724 - RNA, 22 nt, Human
uuucuuguaagauguuuauuaa

SEQ ID NO: 456725 - RNA, 22 nt, Human
cccuggagugugacgaggcauu

SEQ ID NO: 456726 - RNA, 22 nt, Human
uaaauuguuuucuagaaguugu

SEQ ID NO: 456727 - RNA, 22 nt, Human
gccuggcaggccuguuggggcu

SEQ ID NO: 456728 - RNA, 22 nt, Human
ggcugccauaacagaguaccac

SEQ ID NO: 456729 - RNA, 22 nt, Human
agcuucucaggagucugaggca

SEQ ID NO: 456730 - RNA, 22 nt, Human
gauggcagucaaccaggugagg

SEQ ID NO: 456731 - RNA, 22 nt, Human
guggcucucgccagccugcggg

SEQ ID NO: 456732 - RNA, 21 nt, Human
uuugaaagugggugauucuuu

SEQ ID NO: 456733 - RNA, 22 nt, Human
uggcucugcaccucaguguacc

SEQ ID NO: 456734 - RNA, 22 nt, Human
cugcagaguggagccucggcug

SEQ ID NO: 456735 - RNA, 22 nt, Human
aucaggaucaugcuggguggga

SEQ ID NO: 456736 - RNA, 22 nt, Human
uccuuuguuaaggagguuuguu

SEQ ID NO: 456737 - RNA, 22 nt, Human
gagcucugggaaacaaagugua

SEQ ID NO: 456738 - RNA, 22 nt, Human
ucccaggcugggggccugaagu

SEQ ID NO: 456739 - RNA, 22 nt, Human
guggcugcagcccagcggcacg

SEQ ID NO: 456740 - RNA, 22 nt, Human
cagagcuggccugugauuuuug

SEQ ID NO: 456741 - RNA, 22 nt, Human
gcaaaaaccacaauuacuuuua

SEQ ID NO: 456742 - RNA, 22 nt, Human
agcaaggcagucagcuggcugg

SEQ ID NO: 456743 - RNA, 23 nt, Human
gggaccagcuagggcugugaccu

SEQ ID NO: 456744 - RNA, 22 nt, Human
augaggcaaggaucagguaagg

SEQ ID NO: 456745 - RNA, 18 nt, Human
agagaugguguagaguuu

SEQ ID NO: 456746 - RNA, 22 nt, Human
gaagccacuauagauauucuaa

SEQ ID NO: 456747 - RNA, 22 nt, Human
cuggagaggcugggaacagguu

SEQ ID NO: 456748 - RNA, 22 nt, Human
ggucaugcugugaaucagugcu

SEQ ID NO: 456749 - RNA, 22 nt, Human
cugaaacauugcaauaacaaag

SEQ ID NO: 456750 - RNA, 22 nt, Human
gggcaggugccagcucccuguc

SEQ ID NO: 456751 - RNA, 22 nt, Human
ccucuccaguuuuaacgugacc

SEQ ID NO: 456752 - RNA, 22 nt, Human
ucuucaaacugaaaauuuagaa

SEQ ID NO: 456753 - RNA, 20 nt, Human
gggguuggcuggcacaggga

SEQ ID NO: 456754 - RNA, 22 nt, Human
ggaugcugggagacagcaggca

SEQ ID NO: 456755 - RNA, 22 nt, Human
ugaaaaaccucaguccgcuuua

SEQ ID NO: 456756 - RNA, 22 nt, Human
caggggcagucugugugcgugg

SEQ ID NO: 456757 - RNA, 22 nt, Human
gaggaagaagggauuagaacuc

SEQ ID NO: 456758 - RNA, 22 nt, Human
ccucuucugagugagacucccu

SEQ ID NO: 456759 - RNA, 22 nt, Human
gcuggccugggcagaggcuaug

SEQ ID NO: 456760 - RNA, 22 nt, Human
gaaaugugcagaauguguuaga

SEQ ID NO: 456761 - RNA, 22 nt, Human
cuguaaaacacuguaguaucug

SEQ ID NO: 456762 - RNA, 22 nt, Human
ucccagggucaguggugaggcc

SEQ ID NO: 456763 - RNA, 22 nt, Human
uggagcaggugcucaggguaau

SEQ ID NO: 456764 - RNA, 22 nt, Human
ggucccaggagaauaggugcaa

SEQ ID NO: 456765 - RNA, 22 nt, Human
caguacuuuucaaccaguauga

SEQ ID NO: 456766 - RNA, 22 nt, Human
agggccugagcuggcugaccuc

SEQ ID NO: 456767 - RNA, 22 nt, Human
gccagggaacccaagggccuca

SEQ ID NO: 456768 - RNA, 22 nt, Human
gaggcugcuguuagcccugggc

SEQ ID NO: 456769 - RNA, 22 nt, Human
cugagcugggaguggauagugg

SEQ ID NO: 456770 - RNA, 22 nt, Human
aaagauuugaguucugcuuaua

SEQ ID NO: 456771 - RNA, 22 nt, Human
ugcugcacucaccaacagauaa

SEQ ID NO: 456772 - RNA, 22 nt, Human
agcaagcuaccuagauagucua

SEQ ID NO: 456773 - RNA, 22 nt, Human
aacauaauguggccaaagucac

SEQ ID NO: 456774 - RNA, 22 nt, Human
agagugggccucugagucccag

SEQ ID NO: 456775 - RNA, 22 nt, Human
cuggggcucucuggaaugcuug

SEQ ID NO: 456776 - RNA, 22 nt, Human
uugugaaacauucauggauuug

SEQ ID NO: 456777 - RNA, 19 nt, Human
ugccugucaguagaucuca

SEQ ID NO: 456778 - RNA, 22 nt, Human
uacaaagugugcccaugcugag

SEQ ID NO: 456779 - RNA, 23 nt, Human
ugcagccacucaggagcucagug

SEQ ID NO: 456780 - RNA, 22 nt, Human
auguacacaugcaugcaugugc

SEQ ID NO: 456781 - RNA, 22 nt, Human
agagccuggcucccagcuaccg

SEQ ID NO: 456782 - RNA, 22 nt, Human
uaaaugcagcaguuucuguucu

SEQ ID NO: 456783 - RNA, 22 nt, Human
cauuucuacagcuucuucagaa

SEQ ID NO: 456784 - RNA, 22 nt, Human
ucacaguuauagucuguagaau

SEQ ID NO: 456785 - RNA, 22 nt, Human
agagccugaggccaggaaaaug

SEQ ID NO: 456786 - RNA, 22 nt, Human
cagccagagaaagggcacugcc

SEQ ID NO: 456787 - RNA, 22 nt, Human
aaaaauaggucaaccguguaug

SEQ ID NO: 456788 - RNA, 22 nt, Human
ucauugaauuucacagcuuuau

SEQ ID NO: 456789 - RNA, 22 nt, Human
cugaggcagagggcagaccaga

SEQ ID NO: 456790 - RNA, 22 nt, Human
auuuaaaugcuuaagaggguuu

SEQ ID NO: 456791 - RNA, 22 nt, Human
uuuggaaaguguacaaauuuga

SEQ ID NO: 456792 - RNA, 22 nt, Human
aucauguuccagaaacagugau

SEQ ID NO: 456793 - RNA, 22 nt, Human
ugggcaggcaagugaauaccuu

SEQ ID NO: 456794 - RNA, 22 nt, Human
ucagaggugguaaaggacagca

SEQ ID NO: 456795 - RNA, 22 nt, Human
aggagcuggguuccuuuggugg

SEQ ID NO: 456796 - RNA, 22 nt, Human
ucacagcaaaagugugcagagc

SEQ ID NO: 456797 - RNA, 23 nt, Human
uccuuugucuuugcauagauggu

SEQ ID NO: 456798 - RNA, 22 nt, Human
ccagcacugcucucagacugag

SEQ ID NO: 456799 - RNA, 22 nt, Human
gccuaggaguggggauggcggu

SEQ ID NO: 456800 - RNA, 22 nt, Human
cucugagcagaggccguggcua

SEQ ID NO: 456801 - RNA, 22 nt, Human
agcagcuucuuucacuccugga

SEQ ID NO: 456802 - RNA, 18 nt, Human
ucagcuuuugaaaaccaa

SEQ ID NO: 456803 - RNA, 22 nt, Human
cagcugaggucaaagaagcagg

SEQ ID NO: 456804 - RNA, 19 nt, Human
ggaccagguccugggcagc

SEQ ID NO: 456805 - RNA, 19 nt, Human
acagagcucucugcuucug

SEQ ID NO: 456806 - RNA, 22 nt, Human
uccuugaaugaauguucucucc

SEQ ID NO: 456807 - RNA, 22 nt, Human
uucaaugagcccggggccauag

SEQ ID NO: 456808 - RNA, 20 nt, Human
ccuccaggcacacccaugug

SEQ ID NO: 456809 - RNA, 22 nt, Human
uggcugagagucauccugugug

SEQ ID NO: 456810 - RNA, 22 nt, Human
ccuguacacggucuaugccucc

SEQ ID NO: 456811 - RNA, 22 nt, Human
aucuuuaguagaggaauauauu

SEQ ID NO: 456812 - RNA, 22 nt, Human
gagggcaguagccucguacccu

SEQ ID NO: 456813 - RNA, 22 nt, Human
ugagaagcagcuuacagguguc

SEQ ID NO: 456814 - RNA, 22 nt, Human
aggcagcaagauuauuuaaucc

SEQ ID NO: 456815 - RNA, 22 nt, Human
acugcagccuugaacucugggc

SEQ ID NO: 456816 - RNA, 22 nt, Human
aaggaagguucauagucaaaga

SEQ ID NO: 456817 - RNA, 22 nt, Human
cagagcagcagagcuuccaugg

SEQ ID NO: 456818 - RNA, 22 nt, Human
ugggccaggcaugugaucagca

SEQ ID NO: 456819 - RNA, 19 nt, Human
caggaugaucccaugacac

SEQ ID NO: 456820 - RNA, 22 nt, Human
aagccaguguccagaaugggca

SEQ ID NO: 456821 - RNA, 22 nt, Human
gauggcagguaguggucucauc

SEQ ID NO: 456822 - RNA, 22 nt, Human
uuaaacagagucugaaauguaa

SEQ ID NO: 456823 - RNA, 22 nt, Human
gcugccaugguccaggcuccag

SEQ ID NO: 456824 - RNA, 22 nt, Human
gagagugauucccucccauaga

SEQ ID NO: 456825 - RNA, 19 nt, Human
ugaagcaauaccauuuuug

SEQ ID NO: 456826 - RNA, 22 nt, Human
acauuucuccuugcaggaguca

SEQ ID NO: 456827 - RNA, 22 nt, Human
aagggcagagggaaucccacau

SEQ ID NO: 456828 - RNA, 22 nt, Human
uaaaugugucuauggacccgcc

SEQ ID NO: 456829 - RNA, 22 nt, Human
guauuuuacugcucaaagcucu

SEQ ID NO: 456830 - RNA, 22 nt, Human
cagcccucagguccucagcagc

SEQ ID NO: 456831 - RNA, 22 nt, Human
gggaagcagcauugugcuggcu

SEQ ID NO: 456832 - RNA, 22 nt, Human
ucccagccuuucuuuucugcug

SEQ ID NO: 456833 - RNA, 22 nt, Human
cagaggcugcucuggguggcau

SEQ ID NO: 456834 - RNA, 22 nt, Human
cugucccucaucaccucugggu

SEQ ID NO: 456835 - RNA, 22 nt, Human
uaguccauuuucacacugcuga

SEQ ID NO: 456836 - RNA, 22 nt, Human
uagggcucuggugggcucuguu

SEQ ID NO: 456837 - RNA, 22 nt, Human
gagauucuguagucaggcaucu

SEQ ID NO: 456838 - RNA, 22 nt, Human
ucccagauucuucugugugggc

SEQ ID NO: 456839 - RNA, 20 nt, Human
gcuuccuucccagcccccac

SEQ ID NO: 456840 - RNA, 22 nt, Human
uggcucagucauggaugaguaa

SEQ ID NO: 456841 - RNA, 20 nt, Human
ugucauuguuucuaggaccu

SEQ ID NO: 456842 - RNA, 20 nt, Human
gcccaagguccagaaggggg

SEQ ID NO: 456843 - RNA, 22 nt, Human
uggcucaggccuacgacgccuu

SEQ ID NO: 456844 - RNA, 22 nt, Human
gcagagccaugggagguuuuug

SEQ ID NO: 456845 - RNA, 22 nt, Human
cuggagcccaggccuggugucu

SEQ ID NO: 456846 - RNA, 22 nt, Human
cacaggcucuucucacuugauu

SEQ ID NO: 456847 - RNA, 22 nt, Human
gggaguguugagcgcccugcca

SEQ ID NO: 456848 - RNA, 22 nt, Human
cuggccucaccucagacuuacu

SEQ ID NO: 456849 - RNA, 22 nt, Human
uuuucauugagcaccugaguaa

SEQ ID NO: 456850 - RNA, 22 nt, Human
aaauauaauuucugccucaaua

SEQ ID NO: 456851 - RNA, 22 nt, Human
ccugccugguguaagucuaagg

SEQ ID NO: 456852 - RNA, 22 nt, Human
auguccagccaaccacuggauu

SEQ ID NO: 456853 - RNA, 22 nt, Human
ugcagggccuugggucuuucuu

SEQ ID NO: 456854 - RNA, 17 nt, Human
cugcuuugugcaacgcu

SEQ ID NO: 456855 - RNA, 22 nt, Human
cuguuuucccuggaguucagca

SEQ ID NO: 456856 - RNA, 22 nt, Human
cacauacaaugguguuauuugg

SEQ ID NO: 456857 - RNA, 22 nt, Human
ugauuucccuguagccucugaa

SEQ ID NO: 456858 - RNA, 22 nt, Human
uggggccugagguggagcugca

SEQ ID NO: 456859 - RNA, 22 nt, Human
ggcagugaaaaaguauguuucc

SEQ ID NO: 456860 - RNA, 22 nt, Human
gaggggcugggguugacuccaa

SEQ ID NO: 456861 - RNA, 22 nt, Human
cagccagguucaaguccuuaua

SEQ ID NO: 456862 - RNA, 22 nt, Human
acacagggaggaggugcugugc

SEQ ID NO: 456863 - RNA, 22 nt, Human
gcuggccucuggagaagggcuu

SEQ ID NO: 456864 - RNA, 22 nt, Human
agagaagagcaaugauaaauuu

SEQ ID NO: 456865 - RNA, 22 nt, Human
acuguacacacuucucugucuu

SEQ ID NO: 456866 - RNA, 22 nt, Human
gagccuggacaucucaggccca

SEQ ID NO: 456867 - RNA, 22 nt, Human
gagaaggggugauguggguaau

SEQ ID NO: 456868 - RNA, 22 nt, Human
cccaggcagugcugaucccuca

SEQ ID NO: 456869 - RNA, 22 nt, Human
uccaggcuccccugcgugcucc

SEQ ID NO: 456870 - RNA, 22 nt, Human
uuauacauguguuuugagauga

SEQ ID NO: 456871 - RNA, 23 nt, Human
uugauacagaagaaucaguuugu

SEQ ID NO: 456872 - RNA, 20 nt, Human
gcacugaagguuccagggga

SEQ ID NO: 456873 - RNA, 22 nt, Human
caacagaaggaagcagggucag

SEQ ID NO: 456874 - RNA, 22 nt, Human
guuugcauuucuugaacuauau

SEQ ID NO: 456875 - RNA, 22 nt, Human
cuacauuuguucuauagcuuuu

SEQ ID NO: 456876 - RNA, 22 nt, Human
aaaaugaauaaguuaacccagg

SEQ ID NO: 456877 - RNA, 22 nt, Human
uacaaaguuugagaaugcuuuc

SEQ ID NO: 456878 - RNA, 20 nt, Human
aagcagaagcugcucucagc

SEQ ID NO: 456879 - RNA, 22 nt, Human
cugcagccuccugggguacaug

SEQ ID NO: 456880 - RNA, 19 nt, Human
agaggcagucuccaacagg

SEQ ID NO: 456881 - RNA, 22 nt, Human
cagucacauugcccugcauuua

SEQ ID NO: 456882 - RNA, 22 nt, Human
aggccuagaggaauggccaggg

SEQ ID NO: 456883 - RNA, 22 nt, Human
ggucauuguucuuuucugugau

SEQ ID NO: 456884 - RNA, 15 nt, Human
cagucccagggaccc

SEQ ID NO: 456885 - RNA, 22 nt, Human
ccaaaggcggaacugagucucu

SEQ ID NO: 456886 - RNA, 23 nt, Human
ugucauugugacuacagaaccag

SEQ ID NO: 456887 - RNA, 22 nt, Human
uuuaaaauuuagaccucuccac

SEQ ID NO: 456888 - RNA, 22 nt, Human
uggcagggaguugcaggauuuc

SEQ ID NO: 456889 - RNA, 22 nt, Human
auucaaguucuucugucuuugc

SEQ ID NO: 456890 - RNA, 22 nt, Human
gggaaauugugugagaucuuug

SEQ ID NO: 456891 - RNA, 22 nt, Human
ugacauuucgguguaugugaug

SEQ ID NO: 456892 - RNA, 19 nt, Human
ugagaaggcaguggggagc

SEQ ID NO: 456893 - RNA, 22 nt, Human
agugggaccggugcuauuccag

SEQ ID NO: 456894 - RNA, 22 nt, Human
cuggcagcgcagcaugaagucg

SEQ ID NO: 456895 - RNA, 22 nt, Human
gccuggagacagcagaggcggc

SEQ ID NO: 456896 - RNA, 22 nt, Human
uccauggguagcccugguugag

SEQ ID NO: 456897 - RNA, 22 nt, Human
uuugaaaggaauuaggaugaca

SEQ ID NO: 456898 - RNA, 22 nt, Human
aggaaaaagaguugcugccuuc

SEQ ID NO: 456899 - RNA, 22 nt, Human
acagcuuuugaaaaauuacugg

SEQ ID NO: 456900 - RNA, 22 nt, Human
agcagggcuugccgcuuguccu

SEQ ID NO: 456901 - RNA, 19 nt, Human
agaaucaggucaggugaca

SEQ ID NO: 456902 - RNA, 22 nt, Human
cauuugaugacucaacucauaa

SEQ ID NO: 456903 - RNA, 22 nt, Human
ggagaagcagcuucuugaugaa

SEQ ID NO: 456904 - RNA, 20 nt, Human
aggaagccaaaggcugucuu

SEQ ID NO: 456905 - RNA, 22 nt, Human
ggagauaguccaggugaaggga

SEQ ID NO: 456906 - RNA, 22 nt, Human
uaagaaauuuaguuauagaaug

SEQ ID NO: 456907 - RNA, 22 nt, Human
ggcagcagcaagguuggagcug

SEQ ID NO: 456908 - RNA, 22 nt, Human
ccagcccucacugaggccucuc

SEQ ID NO: 456909 - RNA, 22 nt, Human
guucacaagaguuacagacaga

SEQ ID NO: 456910 - RNA, 22 nt, Human
agcagcugaccagugaguccug

SEQ ID NO: 456911 - RNA, 22 nt, Human
cacauaaucaccaaguccuuuc

SEQ ID NO: 456912 - RNA, 22 nt, Human
gccugugguuugauuaagcauu

SEQ ID NO: 456913 - RNA, 22 nt, Human
guuugauucaagaacaaagagu

SEQ ID NO: 456914 - RNA, 19 nt, Human
ugagaggcuuaaggcagcu

SEQ ID NO: 456915 - RNA, 22 nt, Human
aaaugaccagaauacaggcuuc

SEQ ID NO: 456916 - RNA, 22 nt, Human
gcagauggcucagacacugggg

SEQ ID NO: 456917 - RNA, 22 nt, Human
uugggcaaaguguuucuggagc

SEQ ID NO: 456918 - RNA, 22 nt, Human
uuguuuuggagaugagcuaaaa

SEQ ID NO: 456919 - RNA, 22 nt, Human
ggagccuggccuggcucugugu

SEQ ID NO: 456920 - RNA, 22 nt, Human
accaaggaguuugguauuuuag

SEQ ID NO: 456921 - RNA, 17 nt, Human
ccagguggaaucgugga

SEQ ID NO: 456922 - RNA, 22 nt, Human
auaugcauuuaccuggcauaua

SEQ ID NO: 456923 - RNA, 22 nt, Human
uggagcagcacaagaaagggga

SEQ ID NO: 456924 - RNA, 22 nt, Human
cagggccuccuaaggcaucuaa

SEQ ID NO: 456925 - RNA, 22 nt, Human
gggcuggucuggcuuagucagg

SEQ ID NO: 456926 - RNA, 22 nt, Human
ugaaagcagcaccaauaccauu

SEQ ID NO: 456927 - RNA, 22 nt, Human
gcucccaggaugaggagccagg

SEQ ID NO: 456928 - RNA, 22 nt, Human
ugcaggcaggggaugagcagcc

SEQ ID NO: 456929 - RNA, 15 nt, Human
aggcacugugggacc

SEQ ID NO: 456930 - RNA, 22 nt, Human
agcaggagagcagugcgugguc

SEQ ID NO: 456931 - RNA, 22 nt, Human
gagcacaggcuuugguggacac

SEQ ID NO: 456932 - RNA, 22 nt, Human
gagcugccaagauuacaaucag

SEQ ID NO: 456933 - RNA, 20 nt, Human
cuguaucagguuacaaagua

SEQ ID NO: 456934 - RNA, 18 nt, Human
cagaggagagacauucag

SEQ ID NO: 456935 - RNA, 22 nt, Human
uccucuucugcccaucagaggc

SEQ ID NO: 456936 - RNA, 22 nt, Human
cagagcaguaaaucuggggcac

SEQ ID NO: 456937 - RNA, 22 nt, Human
gugcuuucugcaugguuccuac

SEQ ID NO: 456938 - RNA, 22 nt, Human
ggcagaguggagugcggccucc

SEQ ID NO: 456939 - RNA, 22 nt, Human
agggcugaguggugcagucaaa

SEQ ID NO: 456940 - RNA, 22 nt, Human
ugcauauuuuauaaagauggaa

SEQ ID NO: 456941 - RNA, 22 nt, Human
ggggcagaaagcccacagagug

SEQ ID NO: 456942 - RNA, 22 nt, Human
cuagcaucagaugagaagcugu

SEQ ID NO: 456943 - RNA, 22 nt, Human
aagcagcugauuucacagcuca

SEQ ID NO: 456944 - RNA, 22 nt, Human
ggagggcucaauugacuccuga

SEQ ID NO: 456945 - RNA, 22 nt, Human
agggcagcuaaggugcugacug

SEQ ID NO: 456946 - RNA, 22 nt, Human
uguccaggucagcagcagggac

SEQ ID NO: 456947 - RNA, 22 nt, Human
gaacagcugcuagagaucugug

SEQ ID NO: 456948 - RNA, 22 nt, Human
uugggcuggcagagguggucuu

SEQ ID NO: 456949 - RNA, 22 nt, Human
gaugggaggaaccugggucccu

SEQ ID NO: 456950 - RNA, 22 nt, Human
ccagucugugugccagccugcg

SEQ ID NO: 456951 - RNA, 22 nt, Human
cugcagggaugugaggcccguu

SEQ ID NO: 456952 - RNA, 22 nt, Human
uucauguguauggaacauuuuu

SEQ ID NO: 456953 - RNA, 22 nt, Human
uuuccaaaggaggaaccaguuu

SEQ ID NO: 456954 - RNA, 22 nt, Human
agcucauggugcuaucucaggg

SEQ ID NO: 456955 - RNA, 22 nt, Human
acagaguauuggaaaggcagug

SEQ ID NO: 456956 - RNA, 22 nt, Human
ggcugccugugcccaggcacac

SEQ ID NO: 456957 - RNA, 22 nt, Human
uuguuucagcuguaugcuaugu

SEQ ID NO: 456958 - RNA, 19 nt, Human
uggcuucuguuuucauguu

SEQ ID NO: 456959 - RNA, 20 nt, Human
gugcauuucaccuguacugu

SEQ ID NO: 456960 - RNA, 22 nt, Human
uuucauaaugucacagucaaaa

SEQ ID NO: 456961 - RNA, 22 nt, Human
agcucagggcgaucugucucgg

SEQ ID NO: 456962 - RNA, 22 nt, Human
cugcucuggcuguguacuucag

SEQ ID NO: 456963 - RNA, 22 nt, Human
cugccuugaggagguuguggga

SEQ ID NO: 456964 - RNA, 22 nt, Human
cuccagggaggucugcaggacu

SEQ ID NO: 456965 - RNA, 22 nt, Human
cagugcaggcugggggcccugc

SEQ ID NO: 456966 - RNA, 22 nt, Human
agguggcuccucccauggcugg

SEQ ID NO: 456967 - RNA, 22 nt, Human
cugcuuugaggggcucuguaua

SEQ ID NO: 456968 - RNA, 22 nt, Human
ggcacugaaguggguguugggu

SEQ ID NO: 456969 - RNA, 22 nt, Human
uaguggaguagaaaccaaagaa

SEQ ID NO: 456970 - RNA, 22 nt, Human
ugaggaaguuguuucucuucua

SEQ ID NO: 456971 - RNA, 22 nt, Human
uguggcucucaugcacucccag

SEQ ID NO: 456972 - RNA, 22 nt, Human
cucuugaagcaggggccaguuc

SEQ ID NO: 456973 - RNA, 22 nt, Human
ucacaaaagcuuuugaauuugg

SEQ ID NO: 456974 - RNA, 22 nt, Human
cccaggccagaacuugguugcu

SEQ ID NO: 456975 - RNA, 22 nt, Human
caggccacaaguuggguucaag

SEQ ID NO: 456976 - RNA, 22 nt, Human
aaucacaauuacuuuugcacca

SEQ ID NO: 456977 - RNA, 22 nt, Human
ucacaggguuuggaagccuccu

SEQ ID NO: 456978 - RNA, 22 nt, Human
guuaauaaagguauagaaucag

SEQ ID NO: 456979 - RNA, 17 nt, Human
ugaaggaaggaugaugu

SEQ ID NO: 456980 - RNA, 22 nt, Human
gccaggcuggcaaaaggaaacc

SEQ ID NO: 456981 - RNA, 21 nt, Human
aucacauuggcuguuauuauu

SEQ ID NO: 456982 - RNA, 19 nt, Human
ggccccucucacaggaguu

SEQ ID NO: 456983 - RNA, 17 nt, Human
gccuuccuuccuccaca

SEQ ID NO: 456984 - RNA, 22 nt, Human
agagggaaugugauugcaccau

SEQ ID NO: 456985 - RNA, 22 nt, Human
cuuucucaaugccggaaggcac

SEQ ID NO: 456986 - RNA, 21 nt, Human
uccuguaagcuuggguggcuc

SEQ ID NO: 456987 - RNA, 22 nt, Human
cagggguggcugcagcagaggu

SEQ ID NO: 456988 - RNA, 18 nt, Human
gguggcucagucaugggg

SEQ ID NO: 456989 - RNA, 22 nt, Human
gccauuuagggaggcaagguga

SEQ ID NO: 456990 - RNA, 22 nt, Human
uaaggccaggcuguggucggca

SEQ ID NO: 456991 - RNA, 22 nt, Human
cugaggccuaagacaugaauga

SEQ ID NO: 456992 - RNA, 22 nt, Human
ugcuuaaaaugaugauuauuuu

SEQ ID NO: 456993 - RNA, 22 nt, Human
aagaaacuguugcgugacagcg

SEQ ID NO: 456994 - RNA, 22 nt, Human
ugucuucaucuccaugcacaga

SEQ ID NO: 456995 - RNA, 22 nt, Human
gaaauucacuguauuucuuggg

SEQ ID NO: 456996 - RNA, 22 nt, Human
agaugaaaagauaagcagcaau

SEQ ID NO: 456997 - RNA, 21 nt, Human
cuggacugaggagacagucgc

SEQ ID NO: 456998 - RNA, 20 nt, Human
caagcccucuuuagccugcc

SEQ ID NO: 456999 - RNA, 22 nt, Human
aucuggcucacuuagucuagga

SEQ ID NO: 457000 - RNA, 22 nt, Human
uguuucuuuguagauauucuuu

SEQ ID NO: 457001 - RNA, 22 nt, Human
uggagcagagaugggagcccaa

SEQ ID NO: 457002 - RNA, 22 nt, Human
uacaaagucccauugccaugga

SEQ ID NO: 457003 - RNA, 22 nt, Human
aaggcagcagugcacgacugau

SEQ ID NO: 457004 - RNA, 22 nt, Human
ccaggacuuauuacaguauaac

SEQ ID NO: 457005 - RNA, 22 nt, Human
gcacugaaugcuuuuacuguaa

SEQ ID NO: 457006 - RNA, 22 nt, Human
acaggcacugucaagucaugaa

SEQ ID NO: 457007 - RNA, 22 nt, Human
cagcuugugcaaagguccuggg

SEQ ID NO: 457008 - RNA, 22 nt, Human
agcccucauggaacagcuccua

SEQ ID NO: 457009 - RNA, 22 nt, Human
gggacaggcugagacuugagcu

SEQ ID NO: 457010 - RNA, 17 nt, Human
gcacugaacaauccugu

SEQ ID NO: 457011 - RNA, 18 nt, Human
aggcacagagcauacaua

SEQ ID NO: 457012 - RNA, 18 nt, Human
agugucuggauauuuggg

SEQ ID NO: 457013 - RNA, 22 nt, Human
uaauuuaauuccauggauucua

SEQ ID NO: 457014 - RNA, 22 nt, Human
gggcuucucuuaugcuaacugg

SEQ ID NO: 457015 - RNA, 22 nt, Human
aacccuggggcagcugcuaggg

SEQ ID NO: 457016 - RNA, 22 nt, Human
uaggcuggaacuuaggcagagg

SEQ ID NO: 457017 - RNA, 22 nt, Human
agauaacuuuuggguauucaug

SEQ ID NO: 457018 - RNA, 22 nt, Human
auacaucucauguaagagauaa

SEQ ID NO: 457019 - RNA, 22 nt, Human
aaggcugauuagacugauagcu

SEQ ID NO: 457020 - RNA, 22 nt, Human
ccaggccuuccaguacgcagaa

SEQ ID NO: 457021 - RNA, 22 nt, Human
uggcucaggccacuucuuuuau

SEQ ID NO: 457022 - RNA, 21 nt, Human
uccucugcagugagguggccu

SEQ ID NO: 457023 - RNA, 22 nt, Human
cugaggugagcuucccugggcu

SEQ ID NO: 457024 - RNA, 22 nt, Human
agggcugcugcuccgggcccag

SEQ ID NO: 457025 - RNA, 22 nt, Human
ggcagccauggacacuggcuag

SEQ ID NO: 457026 - RNA, 22 nt, Human
uuuauacuccacucugcaagcg

SEQ ID NO: 457027 - RNA, 22 nt, Human
gcaucuucacacaaagccagug

SEQ ID NO: 457028 - RNA, 22 nt, Human
caacagagagaccagaaacagg

SEQ ID NO: 457029 - RNA, 22 nt, Human
cauuacaugguccaggauauau

SEQ ID NO: 457030 - RNA, 22 nt, Human
aacagaaaucauuuagggcucu

SEQ ID NO: 457031 - RNA, 22 nt, Human
aaguccagaacuccugugauag

SEQ ID NO: 457032 - RNA, 22 nt, Human
ccuguguggaaaccgcaugacg

SEQ ID NO: 457033 - RNA, 22 nt, Human
agugcagugguuaggagccagg

SEQ ID NO: 457034 - RNA, 22 nt, Human
cuguccccgcgaguccagagcu

SEQ ID NO: 457035 - RNA, 19 nt, Human
aggcugugagggaggacuc

SEQ ID NO: 457036 - RNA, 22 nt, Human
gcugagcugaggcagggcuggg

SEQ ID NO: 457037 - RNA, 19 nt, Human
uggccagguacugucugcu

SEQ ID NO: 457038 - RNA, 22 nt, Human
ccugggcaacauagggagaccc

SEQ ID NO: 457039 - RNA, 21 nt, Human
caggaaaagcggaagucuagc

SEQ ID NO: 457040 - RNA, 22 nt, Human
uggcucugucacugugagcuau

SEQ ID NO: 457041 - RNA, 22 nt, Human
cugugcaguggcagcguguggg

SEQ ID NO: 457042 - RNA, 22 nt, Human
ucccuggcuguguucaggugcg

SEQ ID NO: 457043 - RNA, 22 nt, Human
uuuauguaguuacggacuauca

SEQ ID NO: 457044 - RNA, 22 nt, Human
uggccuggugucugcgaggccu

SEQ ID NO: 457045 - RNA, 22 nt, Human
gggcucucaaggcagggcccca

SEQ ID NO: 457046 - RNA, 22 nt, Human
uccugagauguggagcuccaug

SEQ ID NO: 457047 - RNA, 22 nt, Human
gccuggccgcuccgagcuccgc

SEQ ID NO: 457048 - RNA, 22 nt, Human
augauugaaaaugacauugcca

SEQ ID NO: 457049 - RNA, 22 nt, Human
gcucugaggcugugaggugcug

SEQ ID NO: 457050 - RNA, 22 nt, Human
uguagcacagagcuuugacacu

SEQ ID NO: 457051 - RNA, 22 nt, Human
uuuccucuuccgagggggaggc

SEQ ID NO: 457052 - RNA, 22 nt, Human
gggucuggacggcugcaggaag

SEQ ID NO: 457053 - RNA, 23 nt, Human
gggagccauggguggucauggag

SEQ ID NO: 457054 - RNA, 22 nt, Human
ugucuguaagguguuuauguua

SEQ ID NO: 457055 - RNA, 22 nt, Human
gcagugugaccgagcuugcuuc

SEQ ID NO: 457056 - RNA, 22 nt, Human
aggcacuguggguguggccgga

SEQ ID NO: 457057 - RNA, 22 nt, Human
ccauaagguugaaaacuguaca

SEQ ID NO: 457058 - RNA, 22 nt, Human
uuggcuucucuuaacccuaaag

SEQ ID NO: 457059 - RNA, 22 nt, Human
aaggaguuuggguagucauaca

SEQ ID NO: 457060 - RNA, 22 nt, Human
cugcccuggucccauggcugau

SEQ ID NO: 457061 - RNA, 22 nt, Human
aggcugaggaucccuguguucu

SEQ ID NO: 457062 - RNA, 22 nt, Human
caguacuugggaaugcugggga

SEQ ID NO: 457063 - RNA, 22 nt, Human
caugggcuuuggaggcuggagg

SEQ ID NO: 457064 - RNA, 22 nt, Human
uagaggugucacuuugggaagu

SEQ ID NO: 457065 - RNA, 22 nt, Human
uggccugaauuauggcagaucu

SEQ ID NO: 457066 - RNA, 23 nt, Human
cccuggagcuagucugagcagag

SEQ ID NO: 457067 - RNA, 22 nt, Human
ggugaccucaccuggucccacc

SEQ ID NO: 457068 - RNA, 22 nt, Human
caauuucuuguuaauucucagg

SEQ ID NO: 457069 - RNA, 22 nt, Human
gagcacagggaauagacagaua

SEQ ID NO: 457070 - RNA, 22 nt, Human
augcaguggcagcuccuggugu

SEQ ID NO: 457071 - RNA, 22 nt, Human
cacagccugcugcacucaagaa

SEQ ID NO: 457072 - RNA, 22 nt, Human
acuccuggguugcaguccucaa

SEQ ID NO: 457073 - RNA, 22 nt, Human
caaaguuuggcucucaugacau

SEQ ID NO: 457074 - RNA, 23 nt, Human
ugaguucucaucuuggcuucuau

SEQ ID NO: 457075 - RNA, 22 nt, Human
caaggccaugagcagcgagugu

SEQ ID NO: 457076 - RNA, 22 nt, Human
uguauacauuuaacuagauaga

SEQ ID NO: 457077 - RNA, 22 nt, Human
gcugccacauuuucaggacuaa

SEQ ID NO: 457078 - RNA, 22 nt, Human
auuuccucaugaucauaaugca

SEQ ID NO: 457079 - RNA, 22 nt, Human
uguucuugagccuuuagaccua

SEQ ID NO: 457080 - RNA, 23 nt, Human
uggagcugacagucagagggagg

SEQ ID NO: 457081 - RNA, 22 nt, Human
ugaagcaggaaacuucuuguuu

SEQ ID NO: 457082 - RNA, 22 nt, Human
uuuaucuuuggaucuucagaaa

SEQ ID NO: 457083 - RNA, 22 nt, Human
aggcagagagcaguggccgucu

SEQ ID NO: 457084 - RNA, 22 nt, Human
uuugcauuccugccugcauuca

SEQ ID NO: 457085 - RNA, 22 nt, Human
ggcuguggggccggguacagug

SEQ ID NO: 457086 - RNA, 22 nt, Human
ucugcagcuuuuugguggggug

SEQ ID NO: 457087 - RNA, 20 nt, Human
gugggcagaugugugcaugg

SEQ ID NO: 457088 - RNA, 22 nt, Human
ucuggagagucacagugccaga

SEQ ID NO: 457089 - RNA, 22 nt, Human
aaggcaguaaaaucuaccuugc

SEQ ID NO: 457090 - RNA, 21 nt, Human
gggaaauuaggauugcucauc

SEQ ID NO: 457091 - RNA, 22 nt, Human
ccuccuuuccuguuuuccugag

SEQ ID NO: 457092 - RNA, 22 nt, Human
gggcaguuuauucuagaugguu

SEQ ID NO: 457093 - RNA, 22 nt, Human
ggcagggaaacagcugauccca

SEQ ID NO: 457094 - RNA, 22 nt, Human
acaccagggccuagccagggcg

SEQ ID NO: 457095 - RNA, 22 nt, Human
agggcaguucagccacaggcuc

SEQ ID NO: 457096 - RNA, 22 nt, Human
cugugacuagaccugcaggaga

SEQ ID NO: 457097 - RNA, 22 nt, Human
gaagcagcaaguauaggacagg

SEQ ID NO: 457098 - RNA, 22 nt, Human
gccuggcaaggcccuguugacu

SEQ ID NO: 457099 - RNA, 19 nt, Human
cagagcagugguuccugaa

SEQ ID NO: 457100 - RNA, 18 nt, Human
agacccucuaagggcagu

SEQ ID NO: 457101 - RNA, 22 nt, Human
uccuggcccggccgggccugcu

SEQ ID NO: 457102 - RNA, 22 nt, Human
auagugguuggauaugucagag

SEQ ID NO: 457103 - RNA, 22 nt, Human
ccaggguggggcaggcccacug

SEQ ID NO: 457104 - RNA, 22 nt, Human
aggcaguuguugcugagcagcu

SEQ ID NO: 457105 - RNA, 22 nt, Human
uacaacauaacgggcauucagu

SEQ ID NO: 457106 - RNA, 22 nt, Human
cccaggcagcggggucuccuug

SEQ ID NO: 457107 - RNA, 22 nt, Human
agaugcugugucuguucccuug

SEQ ID NO: 457108 - RNA, 22 nt, Human
agcagugagugggaggaccaug

SEQ ID NO: 457109 - RNA, 22 nt, Human
ggcuggagugggcuccagaguu

SEQ ID NO: 457110 - RNA, 22 nt, Human
agugaguggacccugcaaggaa

SEQ ID NO: 457111 - RNA, 22 nt, Human
cccuccccacaaagcuucacac

SEQ ID NO: 457112 - RNA, 20 nt, Human
uagaaaucuuauaaaagacu

SEQ ID NO: 457113 - RNA, 22 nt, Human
caugcagugacucagacacagg

SEQ ID NO: 457114 - RNA, 22 nt, Human
uggcugccuagucccucagccu

SEQ ID NO: 457115 - RNA, 18 nt, Human
cagggcuguggggucacu

SEQ ID NO: 457116 - RNA, 22 nt, Human
cuuucaaugugccugccuuggg

SEQ ID NO: 457117 - RNA, 22 nt, Human
ucuuugcuccacacucuagaga

SEQ ID NO: 457118 - RNA, 22 nt, Human
uugcuuuguggugguucuucca

SEQ ID NO: 457119 - RNA, 22 nt, Human
gucuccugagccuugacugcaa

SEQ ID NO: 457120 - RNA, 16 nt, Human
gggcugggggauucug

SEQ ID NO: 457121 - RNA, 18 nt, Human
guucaaggucaagagaga

SEQ ID NO: 457122 - RNA, 22 nt, Human
augugaaagagguguucagugg

SEQ ID NO: 457123 - RNA, 22 nt, Human
cauacauaugcauguguguaua

SEQ ID NO: 457124 - RNA, 20 nt, Human
cagcaggaaaagugccucag

SEQ ID NO: 457125 - RNA, 18 nt, Human
ugaggcagucagugaugg

SEQ ID NO: 457126 - RNA, 22 nt, Human
caauuucucuuuauaucucaca

SEQ ID NO: 457127 - RNA, 22 nt, Human
cagcagcugcgugcccaggccg

SEQ ID NO: 457128 - RNA, 22 nt, Human
aaggcaggaugggaaaagauuu

SEQ ID NO: 457129 - RNA, 22 nt, Human
ugcagcauuauucacaguagcc

SEQ ID NO: 457130 - RNA, 22 nt, Human
cccagccucugggcucacccaa

SEQ ID NO: 457131 - RNA, 22 nt, Human
uugcuuccaguccaagucuguu

SEQ ID NO: 457132 - RNA, 21 nt, Human
agaauucuuaaguauucuaau

SEQ ID NO: 457133 - RNA, 22 nt, Human
gaggcuggaggucaaagaugaa

SEQ ID NO: 457134 - RNA, 22 nt, Human
gcagguggcagaggugggaucu

SEQ ID NO: 457135 - RNA, 19 nt, Human
caaguucuggagauuaggg

SEQ ID NO: 457136 - RNA, 22 nt, Human
accaggggugucaacagcauuu

SEQ ID NO: 457137 - RNA, 22 nt, Human
aaauguauugcauaggauauuu

SEQ ID NO: 457138 - RNA, 22 nt, Human
aguggcagaucucuggucugga

SEQ ID NO: 457139 - RNA, 22 nt, Human
aagcugccugccacgcuagaua

SEQ ID NO: 457140 - RNA, 22 nt, Human
cagcccuuuccuucucagcuuu

SEQ ID NO: 457141 - RNA, 22 nt, Human
cccagcuaccucugcuaggaga

SEQ ID NO: 457142 - RNA, 22 nt, Human
caguguacuuggaauguaacag

SEQ ID NO: 457143 - RNA, 22 nt, Human
agauuucccacuccauguauug

SEQ ID NO: 457144 - RNA, 22 nt, Human
gggugcagggucuccagcagcu

SEQ ID NO: 457145 - RNA, 22 nt, Human
cagagcccagggccuacguccc

SEQ ID NO: 457146 - RNA, 22 nt, Human
acaggccugagauuuugcauuu

SEQ ID NO: 457147 - RNA, 22 nt, Human
guugggaagcagauggaugagc

SEQ ID NO: 457148 - RNA, 22 nt, Human
gagccaccuucaacucaggaau

SEQ ID NO: 457149 - RNA, 22 nt, Human
ggcuggaaguccaagaucaaga

SEQ ID NO: 457150 - RNA, 22 nt, Human
ugaagccaucaggaagccagca

SEQ ID NO: 457151 - RNA, 22 nt, Human
ugaaggaagaauaggcaguguu

SEQ ID NO: 457152 - RNA, 22 nt, Human
agggcugacaguaaaaguauga

SEQ ID NO: 457153 - RNA, 22 nt, Human
ccugucuguccucucaugagcc

SEQ ID NO: 457154 - RNA, 22 nt, Human
gcagagcuaucuucuggauuug

SEQ ID NO: 457155 - RNA, 22 nt, Human
ugcagcagcagggaggaggcuc

SEQ ID NO: 457156 - RNA, 22 nt, Human
gccauccucugagcacuaggca

SEQ ID NO: 457157 - RNA, 22 nt, Human
cggcagcuccgcgccguaggac

SEQ ID NO: 457158 - RNA, 22 nt, Human
ccucugggagacugcuacugag

SEQ ID NO: 457159 - RNA, 22 nt, Human
ggagcugggguuggcaucuucc

SEQ ID NO: 457160 - RNA, 22 nt, Human
ugcuguagcccugcacagugca

SEQ ID NO: 457161 - RNA, 22 nt, Human
gcucuggcuacuguggcuaccg

SEQ ID NO: 457162 - RNA, 22 nt, Human
uucauuccuucccuaagcaacu

SEQ ID NO: 457163 - RNA, 22 nt, Human
uccuggguccauggcagccgaa

SEQ ID NO: 457164 - RNA, 22 nt, Human
cugcagcuguagaggacagugg

SEQ ID NO: 457165 - RNA, 22 nt, Human
uggcugucagcugccuggugcg

SEQ ID NO: 457166 - RNA, 19 nt, Human
cccaaggcccugggcaggc

SEQ ID NO: 457167 - RNA, 22 nt, Human
uauuucugaauccaaaagguca

SEQ ID NO: 457168 - RNA, 22 nt, Human
agucccagcuucccccaugcag

SEQ ID NO: 457169 - RNA, 22 nt, Human
agcagagaagacacaggcuuca

SEQ ID NO: 457170 - RNA, 22 nt, Human
agcuuuauagaaaggaucagug

SEQ ID NO: 457171 - RNA, 22 nt, Human
agaaguuaccacauacuucucu

SEQ ID NO: 457172 - RNA, 23 nt, Human
cucccuggaguuucuggaagaug

SEQ ID NO: 457173 - RNA, 22 nt, Human
cacacacaguuuuguauucugu

SEQ ID NO: 457174 - RNA, 22 nt, Human
cucucugaggcaggccuguggg

SEQ ID NO: 457175 - RNA, 22 nt, Human
uguggccaccagagcugcuauu

SEQ ID NO: 457176 - RNA, 22 nt, Human
caaaauguucuggcaccuuuaa

SEQ ID NO: 457177 - RNA, 22 nt, Human
uccacagaauguaagauccaca

SEQ ID NO: 457178 - RNA, 22 nt, Human
augaggcacaucacagccaaug

SEQ ID NO: 457179 - RNA, 22 nt, Human
cagggagaggcaucauagggaa

SEQ ID NO: 457180 - RNA, 22 nt, Human
uccaggcacagaguuggucagu

SEQ ID NO: 457181 - RNA, 19 nt, Human
gggcagaauggcaucucag

SEQ ID NO: 457182 - RNA, 22 nt, Human
uccagggaucuuuagagucuuu

SEQ ID NO: 457183 - RNA, 22 nt, Human
accucugccacuuucuaacucu

SEQ ID NO: 457184 - RNA, 22 nt, Human
caucacagggggcuagaagucu

SEQ ID NO: 457185 - RNA, 22 nt, Human
cugagcgcaugguugcugggga

SEQ ID NO: 457186 - RNA, 22 nt, Human
guguaaggccccagguucuuua

SEQ ID NO: 457187 - RNA, 22 nt, Human
uuucauuauucaugcuaguuau

SEQ ID NO: 457188 - RNA, 20 nt, Human
aagagaagaagucuuugaaa

SEQ ID NO: 457189 - RNA, 21 nt, Human
ccccugggagcccugucagua

SEQ ID NO: 457190 - RNA, 22 nt, Human
uucuucaaaauccagcaugauu

SEQ ID NO: 457191 - RNA, 22 nt, Human
cccuggguucuggcugggcugc

SEQ ID NO: 457192 - RNA, 22 nt, Human
gcugagcuagcuaucucagucu

SEQ ID NO: 457193 - RNA, 22 nt, Human
gagggcuccauuccccgugccc

SEQ ID NO: 457194 - RNA, 22 nt, Human
ucugucaccgagggcauccaaa

SEQ ID NO: 457195 - RNA, 22 nt, Human
agccaagcacucaacuccugga

SEQ ID NO: 457196 - RNA, 22 nt, Human
ccauaagguuuggggccaugca

SEQ ID NO: 457197 - RNA, 20 nt, Human
aauaaaagaagccuucaccc

SEQ ID NO: 457198 - RNA, 20 nt, Human
cagagccaagagcagcaucu

SEQ ID NO: 457199 - RNA, 22 nt, Human
ugaagccaccgaaccagaagag

SEQ ID NO: 457200 - RNA, 22 nt, Human
uccuggccuugcuccugaugcc

SEQ ID NO: 457201 - RNA, 22 nt, Human
acugugugaaacaucaaugugu

SEQ ID NO: 457202 - RNA, 22 nt, Human
ucacaugcuacugagccagacc

SEQ ID NO: 457203 - RNA, 22 nt, Human
acagcuuuaguguggguggugc

SEQ ID NO: 457204 - RNA, 22 nt, Human
uacuuucuguccuucuguuaaa

SEQ ID NO: 457205 - RNA, 19 nt, Human
acccucucagugccugagg

SEQ ID NO: 457206 - RNA, 22 nt, Human
acaggcuuacaggcugcaagua

SEQ ID NO: 457207 - RNA, 22 nt, Human
ucuccucugcgcggcagugccc

SEQ ID NO: 457208 - RNA, 22 nt, Human
agucaaagcuacaggcauuuga

SEQ ID NO: 457209 - RNA, 22 nt, Human
uggccucugggaaagcagauuc

SEQ ID NO: 457210 - RNA, 22 nt, Human
cagcaguguacaaggugucaga

SEQ ID NO: 457211 - RNA, 22 nt, Human
uuucuacagguugauggguuug

SEQ ID NO: 457212 - RNA, 22 nt, Human
cugagcucuaaugucagccuug

SEQ ID NO: 457213 - RNA, 21 nt, Human
aggugggagaccauguagguc

SEQ ID NO: 457214 - RNA, 22 nt, Human
caggaggcuuugggauccaagu

SEQ ID NO: 457215 - RNA, 22 nt, Human
ggcuucaccaggugcaugcaug

SEQ ID NO: 457216 - RNA, 22 nt, Human
cucagaagaacccaggguccca

SEQ ID NO: 457217 - RNA, 22 nt, Human
gucaggauuuacaaacuucagu

SEQ ID NO: 457218 - RNA, 22 nt, Human
guuuauuaacugucaagugauu

SEQ ID NO: 457219 - RNA, 22 nt, Human
uacauauagacaguuacucuag

SEQ ID NO: 457220 - RNA, 19 nt, Human
ggcuggaguggccaucugu

SEQ ID NO: 457221 - RNA, 22 nt, Human
gaaggcuggaaggcaaguagga

SEQ ID NO: 457222 - RNA, 22 nt, Human
ccagccuucugagcugccugga

SEQ ID NO: 457223 - RNA, 22 nt, Human
uacauguaggugacauuuuaau

SEQ ID NO: 457224 - RNA, 22 nt, Human
caagcuccuuacauccacaggg

SEQ ID NO: 457225 - RNA, 22 nt, Human
acagagcugggaucugaaccca

SEQ ID NO: 457226 - RNA, 22 nt, Human
gucucagauaacauguauucua

SEQ ID NO: 457227 - RNA, 22 nt, Human
uucacauugguucuugauagcu

SEQ ID NO: 457228 - RNA, 22 nt, Human
ugggagcugggguuggacgucu

SEQ ID NO: 457229 - RNA, 22 nt, Human
ccacagaggacaacugccuggc

SEQ ID NO: 457230 - RNA, 21 nt, Human
ugccaggccugagcugggguc

SEQ ID NO: 457231 - RNA, 22 nt, Human
uucaggauucugugucugacaa

SEQ ID NO: 457232 - RNA, 22 nt, Human
aaggcaggagcuguaucuuauu

SEQ ID NO: 457233 - RNA, 22 nt, Human
uaaacauggauucugaucacag

SEQ ID NO: 457234 - RNA, 22 nt, Human
gccaggcauuuauugauugaau

SEQ ID NO: 457235 - RNA, 22 nt, Human
gaggagaagcuaagaaacacag

SEQ ID NO: 457236 - RNA, 22 nt, Human
caggagacaauggcuguggggc

SEQ ID NO: 457237 - RNA, 22 nt, Human
gcagggcagccacaggcccccu

SEQ ID NO: 457238 - RNA, 22 nt, Human
aaugguuuguaccuguccuugg

SEQ ID NO: 457239 - RNA, 22 nt, Human
ggccaggcugguuccuugaccu

SEQ ID NO: 457240 - RNA, 22 nt, Human
uucccaguauuaccuucaggaa

SEQ ID NO: 457241 - RNA, 22 nt, Human
cauucacucagcgaugccagua

SEQ ID NO: 457242 - RNA, 22 nt, Human
gcaugcugcaccagagccucuc

SEQ ID NO: 457243 - RNA, 22 nt, Human
agggugggcuagacucuucccc

SEQ ID NO: 457244 - RNA, 22 nt, Human
cauugaaaccuaacauaggcug

SEQ ID NO: 457245 - RNA, 22 nt, Human
cuuaaauuggaugaguuaaguu

SEQ ID NO: 457246 - RNA, 22 nt, Human
ugggcagacgggagcuugccuu

SEQ ID NO: 457247 - RNA, 22 nt, Human
caggggcucuaaugcaugauca

SEQ ID NO: 457248 - RNA, 22 nt, Human
accuuaaaacugacacauggag

SEQ ID NO: 457249 - RNA, 21 nt, Human
aagcuucccugcucuccaggg

SEQ ID NO: 457250 - RNA, 22 nt, Human
gggcucugggauucagagcaag

SEQ ID NO: 457251 - RNA, 19 nt, Human
gcugugccucucuccugcu

SEQ ID NO: 457252 - RNA, 22 nt, Human
gaagcagcugccagagaugucu

SEQ ID NO: 457253 - RNA, 22 nt, Human
agcugccuggagucauuuccug

SEQ ID NO: 457254 - RNA, 22 nt, Human
ucugccuucgcugcucccugaa

SEQ ID NO: 457255 - RNA, 22 nt, Human
uccauguggccagacacuggca

SEQ ID NO: 457256 - RNA, 22 nt, Human
ccugcacuaccuggggcugcug

SEQ ID NO: 457257 - RNA, 22 nt, Human
aaccccgcucaggcugggugag

SEQ ID NO: 457258 - RNA, 22 nt, Human
gugaaaucugaggcccaugaug

SEQ ID NO: 457259 - RNA, 23 nt, Human
aggagccaggugcagcccuugug

SEQ ID NO: 457260 - RNA, 22 nt, Human
auuguaauuuuagagaaagugg

SEQ ID NO: 457261 - RNA, 22 nt, Human
aaguguguauuguuuaugcugc

SEQ ID NO: 457262 - RNA, 22 nt, Human
cagaccucaguccucaguagga

SEQ ID NO: 457263 - RNA, 22 nt, Human
ugagggcugcuuccagagcuag

SEQ ID NO: 457264 - RNA, 22 nt, Human
ccagcucuuuuggcugagugag

SEQ ID NO: 457265 - RNA, 22 nt, Human
ggcuucugagugcucugcuguu

SEQ ID NO: 457266 - RNA, 22 nt, Human
agaagccagcuucagcugcccg

SEQ ID NO: 457267 - RNA, 20 nt, Human
cuuguacaugauaaagauuu

SEQ ID NO: 457268 - RNA, 22 nt, Human
ucugucuccucugaggugccag

SEQ ID NO: 457269 - RNA, 22 nt, Human
cucagagucugcauuucuguca

SEQ ID NO: 457270 - RNA, 22 nt, Human
gugcagggagcccagaaggucc

SEQ ID NO: 457271 - RNA, 23 nt, Human
acuuuagauaaauuaugugcaca

SEQ ID NO: 457272 - RNA, 22 nt, Human
aggagucacucagggcuucauc

SEQ ID NO: 457273 - RNA, 22 nt, Human
agggccugggucuguacuccuc

SEQ ID NO: 457274 - RNA, 18 nt, Human
uccagagcuacuguggug

SEQ ID NO: 457275 - RNA, 22 nt, Human
gcaggggcuacucugagcuucc

SEQ ID NO: 457276 - RNA, 22 nt, Human
gauuucaauccagcuuucuucu

SEQ ID NO: 457277 - RNA, 22 nt, Human
aauuagggagagguagcuaggu

SEQ ID NO: 457278 - RNA, 22 nt, Human
auuccaguucuccucucuaaag

SEQ ID NO: 457279 - RNA, 22 nt, Human
uugauacaggcucuauuucauc

SEQ ID NO: 457280 - RNA, 22 nt, Human
acuccagggcuccaucccuugu

SEQ ID NO: 457281 - RNA, 18 nt, Human
cugaggcccagagagggc

SEQ ID NO: 457282 - RNA, 22 nt, Human
uuagccauuuuauacaagugua

SEQ ID NO: 457283 - RNA, 22 nt, Human
gggcucugggaugcucuuagag

SEQ ID NO: 457284 - RNA, 22 nt, Human
auaucacaguaguuguuuaguu

SEQ ID NO: 457285 - RNA, 22 nt, Human
gaagcccacguuuggugaugua

SEQ ID NO: 457286 - RNA, 22 nt, Human
gaggcugcccaacuggagugga

SEQ ID NO: 457287 - RNA, 22 nt, Human
uguuccuaaauaugaauggaga

SEQ ID NO: 457288 - RNA, 21 nt, Human
ugcagccauucagcccuaugc

SEQ ID NO: 457289 - RNA, 22 nt, Human
ggcugcucuucuuggcgaccuc

SEQ ID NO: 457290 - RNA, 22 nt, Human
acuuggcaaguaucuauaaagu

SEQ ID NO: 457291 - RNA, 20 nt, Human
uguacacaguacuuuacaau

SEQ ID NO: 457292 - RNA, 21 nt, Human
ugcauaaagaaauacaaauac

SEQ ID NO: 457293 - RNA, 22 nt, Human
gagggacagcuaaagagaaauu

SEQ ID NO: 457294 - RNA, 22 nt, Human
aucacauucuuucaaagcaguc

SEQ ID NO: 457295 - RNA, 22 nt, Human
cacugcuuuuuuggcuauguac

SEQ ID NO: 457296 - RNA, 22 nt, Human
aaugaucuacucucauuaucuc

SEQ ID NO: 457297 - RNA, 22 nt, Human
ccacccugagccgcaagagcag

SEQ ID NO: 457298 - RNA, 22 nt, Human
auguaucaauuaucugucugca

SEQ ID NO: 457299 - RNA, 22 nt, Human
aaaguuacuaucacaaugaaau

SEQ ID NO: 457300 - RNA, 22 nt, Human
gaaaaguacacagcccaaacau

SEQ ID NO: 457301 - RNA, 22 nt, Human
cccuccagcucaaagcaaccgg

SEQ ID NO: 457302 - RNA, 21 nt, Human
ccuuuacaauuuugcauuccu

SEQ ID NO: 457303 - RNA, 22 nt, Human
agccauugaauuuagugccuuu

SEQ ID NO: 457304 - RNA, 22 nt, Human
uggucagacaaaggagaauguu

SEQ ID NO: 457305 - RNA, 22 nt, Human
ugggcuggagcuuguugcuucc

SEQ ID NO: 457306 - RNA, 22 nt, Human
cuugucugugucggauaaaacu

SEQ ID NO: 457307 - RNA, 22 nt, Human
ucccuggcugggggcugccuug

SEQ ID NO: 457308 - RNA, 22 nt, Human
ccuggcugcuuucacuauggag

SEQ ID NO: 457309 - RNA, 22 nt, Human
gcagccagggagagaaccaggg

SEQ ID NO: 457310 - RNA, 22 nt, Human
gccaggcagcuagcaaccccug

SEQ ID NO: 457311 - RNA, 22 nt, Human
aacuuucaggcaaugaauauuu

SEQ ID NO: 457312 - RNA, 22 nt, Human
guguacauagaauugugcuuug

SEQ ID NO: 457313 - RNA, 22 nt, Human
uucaaugaggauagaacuggau

SEQ ID NO: 457314 - RNA, 22 nt, Human
agccaaggcagcuagagcucug

SEQ ID NO: 457315 - RNA, 22 nt, Human
gagacguggccuuugccugagc

SEQ ID NO: 457316 - RNA, 22 nt, Human
ucaguguccggagccugagugc

SEQ ID NO: 457317 - RNA, 22 nt, Human
agagcuggguggacuuguaguu

SEQ ID NO: 457318 - RNA, 22 nt, Human
caagggcauugcuugggaccuu

SEQ ID NO: 457319 - RNA, 22 nt, Human
auaacagaugugaagugcuaau

SEQ ID NO: 457320 - RNA, 22 nt, Human
gucucccacuuucuggccucuu

SEQ ID NO: 457321 - RNA, 22 nt, Human
ugcaggcuguaaucugaggcua

SEQ ID NO: 457322 - RNA, 22 nt, Human
uccuggaggggacagcaugggc

SEQ ID NO: 457323 - RNA, 22 nt, Human
aaagcagguugcaauuacagug

SEQ ID NO: 457324 - RNA, 22 nt, Human
cuucccagacgggguggcagcc

SEQ ID NO: 457325 - RNA, 22 nt, Human
cugccuguuuucugauagauuu

SEQ ID NO: 457326 - RNA, 22 nt, Human
uauguuaaauguuugauguuua

SEQ ID NO: 457327 - RNA, 22 nt, Human
aggggcuggaguucgagguuac

SEQ ID NO: 457328 - RNA, 22 nt, Human
aucuggcugacuuugugggaca

SEQ ID NO: 457329 - RNA, 22 nt, Human
cugucugucaaguucaucucca

SEQ ID NO: 457330 - RNA, 22 nt, Human
ccagcuccucuucccaguguca

SEQ ID NO: 457331 - RNA, 22 nt, Human
aagaugcacaauguggcaauua

SEQ ID NO: 457332 - RNA, 22 nt, Human
guucauuuuacuguaaauagca

SEQ ID NO: 457333 - RNA, 22 nt, Human
guuuucaugucuauugggcaua

SEQ ID NO: 457334 - RNA, 22 nt, Human
aggcuuccucgugccuuagaua

SEQ ID NO: 457335 - RNA, 22 nt, Human
cacccacccacugcucauuggc

SEQ ID NO: 457336 - RNA, 22 nt, Human
uuuuucaugagacuagaaguca

SEQ ID NO: 457337 - RNA, 22 nt, Human
uccaggcaaagggacuagcagg

SEQ ID NO: 457338 - RNA, 22 nt, Human
ccagucccaggcagaaauccag

SEQ ID NO: 457339 - RNA, 22 nt, Human
gcagacagccagacugcacugg

SEQ ID NO: 457340 - RNA, 22 nt, Human
ucuggagcuuguuucagauggu

SEQ ID NO: 457341 - RNA, 22 nt, Human
aaacacuagcaggaagcacuga

SEQ ID NO: 457342 - RNA, 22 nt, Human
acugugcuuucucuggaggcau

SEQ ID NO: 457343 - RNA, 22 nt, Human
ggggauggaauguaguagugau

SEQ ID NO: 457344 - RNA, 22 nt, Human
ggccugagcuugggcagcguau

SEQ ID NO: 457345 - RNA, 23 nt, Human
gcugggcuuacucuuucagugag

SEQ ID NO: 457346 - RNA, 22 nt, Human
cuggcuccuccaaggccuggag

SEQ ID NO: 457347 - RNA, 22 nt, Human
cuccugaguaguagcauuguca

SEQ ID NO: 457348 - RNA, 22 nt, Human
gcugggagcaaagccaugcaua

SEQ ID NO: 457349 - RNA, 23 nt, Human
agaaaaguucauaccuuuuuaac

SEQ ID NO: 457350 - RNA, 22 nt, Human
ugccuacauuccuugcuuaugg

SEQ ID NO: 457351 - RNA, 22 nt, Human
auugacaagcaguaugucuuag

SEQ ID NO: 457352 - RNA, 22 nt, Human
guaugcaucgacucaagucuga

SEQ ID NO: 457353 - RNA, 21 nt, Human
ugcucaugcaaugcaugucca

SEQ ID NO: 457354 - RNA, 22 nt, Human
uccucagaugcucuuggacgcc

SEQ ID NO: 457355 - RNA, 22 nt, Human
gccagguguccucacagugagg

SEQ ID NO: 457356 - RNA, 22 nt, Human
aaaggugacacucugccagcug

SEQ ID NO: 457357 - RNA, 20 nt, Human
uguucacaguaguugcugcu

SEQ ID NO: 457358 - RNA, 22 nt, Human
caacaguguugcaaucugaaaa

SEQ ID NO: 457359 - RNA, 22 nt, Human
caauuucuggaacuaauucuga

SEQ ID NO: 457360 - RNA, 23 nt, Human
agagccugaaagacuucuggcac

SEQ ID NO: 457361 - RNA, 22 nt, Human
aagcugccaaugguaagcugcu

SEQ ID NO: 457362 - RNA, 22 nt, Human
ucugaggcuauguucaggcuaa

SEQ ID NO: 457363 - RNA, 22 nt, Human
accugccuucucaaggacauga

SEQ ID NO: 457364 - RNA, 22 nt, Human
acagcuggaggucugugagcac

SEQ ID NO: 457365 - RNA, 22 nt, Human
ugcuuuauaucucucuucuuag

SEQ ID NO: 457366 - RNA, 22 nt, Human
aagggcaggcagagaucauaua

SEQ ID NO: 457367 - RNA, 22 nt, Human
cuggaagaggaagccagcugga

SEQ ID NO: 457368 - RNA, 22 nt, Human
gcagccaggaaagcuggacccu

SEQ ID NO: 457369 - RNA, 22 nt, Human
aacaugaaaguugcuaagugca

SEQ ID NO: 457370 - RNA, 22 nt, Human
uguauuagagcaguagaauuau

SEQ ID NO: 457371 - RNA, 22 nt, Human
cccagccaaggugcugguguug

SEQ ID NO: 457372 - RNA, 22 nt, Human
acaggcauugggauggagguug

SEQ ID NO: 457373 - RNA, 22 nt, Human
caaagccaggcuuucuaaugua

SEQ ID NO: 457374 - RNA, 22 nt, Human
gcccagcagcugguggagaagg

SEQ ID NO: 457375 - RNA, 22 nt, Human
gccagaaagaggaggaccuggg

SEQ ID NO: 457376 - RNA, 22 nt, Human
ggccucugccucaucugggcac

SEQ ID NO: 457377 - RNA, 22 nt, Human
uggcagaguggaccauacucaa

SEQ ID NO: 457378 - RNA, 22 nt, Human
uggcagcauguuauguaaggaa

SEQ ID NO: 457379 - RNA, 22 nt, Human
gagagcugcauucucagacaca

SEQ ID NO: 457380 - RNA, 22 nt, Human
ugucagagcaaugagguucagc

SEQ ID NO: 457381 - RNA, 22 nt, Human
acuguucauuuguccuguaucu

SEQ ID NO: 457382 - RNA, 22 nt, Human
gcaggagucacugacuuggucc

SEQ ID NO: 457383 - RNA, 19 nt, Human
ucugucacuggggguauuc

SEQ ID NO: 457384 - RNA, 22 nt, Human
aggcacugaaagguggccagag

SEQ ID NO: 457385 - RNA, 18 nt, Human
cucaccauucugcccaau

SEQ ID NO: 457386 - RNA, 22 nt, Human
aaacagaaggguagguaaacau

SEQ ID NO: 457387 - RNA, 22 nt, Human
cagggcagggagcuuagaauga

SEQ ID NO: 457388 - RNA, 23 nt, Human
uggcucugugucacauacaggau

SEQ ID NO: 457389 - RNA, 22 nt, Human
aauaacaggcucaucagaugcu

SEQ ID NO: 457390 - RNA, 22 nt, Human
caggaggccaacugugggacuu

SEQ ID NO: 457391 - RNA, 22 nt, Human
agagcugugaaaaugagguuug

SEQ ID NO: 457392 - RNA, 22 nt, Human
cagcucugugggagcguaugug

SEQ ID NO: 457393 - RNA, 22 nt, Human
ucaccaggauuccuaucaguag

SEQ ID NO: 457394 - RNA, 22 nt, Human
agaggagcugggaggcccucgu

SEQ ID NO: 457395 - RNA, 22 nt, Human
ugacuuccugcacucaggugau

SEQ ID NO: 457396 - RNA, 22 nt, Human
uaaaggcucacuggcuuggggu

SEQ ID NO: 457397 - RNA, 22 nt, Human
cagagccaggccugcccucuuu

SEQ ID NO: 457398 - RNA, 22 nt, Human
auguacauuuagaucauuucug

SEQ ID NO: 457399 - RNA, 22 nt, Human
cugcagccuaggugcagcuggg

SEQ ID NO: 457400 - RNA, 22 nt, Human
gggagggaucugcuaggcaaug

SEQ ID NO: 457401 - RNA, 22 nt, Human
cuuccagagauagggccucaag

SEQ ID NO: 457402 - RNA, 20 nt, Human
cuuccacacaagaagcacag

SEQ ID NO: 457403 - RNA, 22 nt, Human
gccaggugcauggcugagucuc

SEQ ID NO: 457404 - RNA, 21 nt, Human
ugggcagauggcaguguggcu

SEQ ID NO: 457405 - RNA, 23 nt, Human
acacaaggguaacugccagccau

SEQ ID NO: 457406 - RNA, 22 nt, Human
ccuggcugggccugauuucuca

SEQ ID NO: 457407 - RNA, 22 nt, Human
cacugccuccccaggcuccaca

SEQ ID NO: 457408 - RNA, 22 nt, Human
ggagaggaaaugccagcacuuc

SEQ ID NO: 457409 - RNA, 22 nt, Human
aagggaggccagagguuuugca

SEQ ID NO: 457410 - RNA, 22 nt, Human
ucaggagcagcaugggugagag

SEQ ID NO: 457411 - RNA, 22 nt, Human
caaaguuaucaacugcaacauu

SEQ ID NO: 457412 - RNA, 22 nt, Human
gccugggaagacuaagugggag

SEQ ID NO: 457413 - RNA, 22 nt, Human
agucccagcuacucaagaggcu

SEQ ID NO: 457414 - RNA, 23 nt, Human
cuggcucauccugguugcagugg

SEQ ID NO: 457415 - RNA, 22 nt, Human
accagagcucuucagcacagga

SEQ ID NO: 457416 - RNA, 22 nt, Human
gcuaucuuucugcaccauaauu

SEQ ID NO: 457417 - RNA, 22 nt, Human
aauaguguuguucacucaggag

SEQ ID NO: 457418 - RNA, 22 nt, Human
uuauuuuaccuuccucugagcu

SEQ ID NO: 457419 - RNA, 22 nt, Human
uauguacagggauagaacuuga

SEQ ID NO: 457420 - RNA, 22 nt, Human
cuccugggaauuuaguugugag

SEQ ID NO: 457421 - RNA, 22 nt, Human
aaagcaaugggucuaagguaaa

SEQ ID NO: 457422 - RNA, 22 nt, Human
uuuauucugugcuacaugaaga

SEQ ID NO: 457423 - RNA, 22 nt, Human
gaaauccaguucccuacucuua

SEQ ID NO: 457424 - RNA, 22 nt, Human
uuuccacugggcacggggccag

SEQ ID NO: 457425 - RNA, 22 nt, Human
gagccagggcugugagcugagc

SEQ ID NO: 457426 - RNA, 22 nt, Human
gguggccuuucaguggaucagg

SEQ ID NO: 457427 - RNA, 22 nt, Human
gauuuccuagacauggggcaga

SEQ ID NO: 457428 - RNA, 21 nt, Human
ggcagcacuaccugaagcaua

SEQ ID NO: 457429 - RNA, 22 nt, Human
uccauuggucucugugcccagg

SEQ ID NO: 457430 - RNA, 22 nt, Human
acacugugcagauucccuguga

SEQ ID NO: 457431 - RNA, 22 nt, Human
agggccagcugaugagaaugag

SEQ ID NO: 457432 - RNA, 22 nt, Human
gacagggccgcagauggagacu

SEQ ID NO: 457433 - RNA, 22 nt, Human
aggccagaaauuuggaguaugu

SEQ ID NO: 457434 - RNA, 22 nt, Human
ucacugcagacaaccucaguca

SEQ ID NO: 457435 - RNA, 22 nt, Human
cccagcucucgcacuuacuagc

SEQ ID NO: 457436 - RNA, 22 nt, Human
gcaggaguguauuugcauguaa

SEQ ID NO: 457437 - RNA, 22 nt, Human
ugugugcagccucugucuuugg

SEQ ID NO: 457438 - RNA, 22 nt, Human
cugugaauuaaguauuguuauc

SEQ ID NO: 457439 - RNA, 20 nt, Human
aaggcacuaugucugcuagc

SEQ ID NO: 457440 - RNA, 22 nt, Human
cugaggcuggcguuugaggaag

SEQ ID NO: 457441 - RNA, 22 nt, Human
augcugcacaagccacauguag

SEQ ID NO: 457442 - RNA, 21 nt, Human
uggcugaguggaugcaugaau

SEQ ID NO: 457443 - RNA, 22 nt, Human
agucucagaaaauaugcuuuuu

SEQ ID NO: 457444 - RNA, 22 nt, Human
uucaggauucucucccauuuac

SEQ ID NO: 457445 - RNA, 22 nt, Human
ugaggcuccagccaggccagca

SEQ ID NO: 457446 - RNA, 22 nt, Human
gagggaccuuuacacagacauu

SEQ ID NO: 457447 - RNA, 22 nt, Human
uggaagcaucacuucuugccug

SEQ ID NO: 457448 - RNA, 22 nt, Human
caugagcugcugggagccuguc

SEQ ID NO: 457449 - RNA, 22 nt, Human
ucucaggccccugaguuucucu

SEQ ID NO: 457450 - RNA, 22 nt, Human
aaguccagcucuaaauaucuga

SEQ ID NO: 457451 - RNA, 22 nt, Human
aaggcccuggccccagcuucuu

SEQ ID NO: 457452 - RNA, 22 nt, Human
gugggcuucuguuagggaggcu

SEQ ID NO: 457453 - RNA, 22 nt, Human
cucucugagugagggacaagcu

SEQ ID NO: 457454 - RNA, 22 nt, Human
aaaguggucaccuucucauuuc

SEQ ID NO: 457455 - RNA, 22 nt, Human
aaaugcagguucuugagccaag

SEQ ID NO: 457456 - RNA, 22 nt, Human
uccuucaggguugaggccgacu

SEQ ID NO: 457457 - RNA, 22 nt, Human
aaagccacugcauguguaguau

SEQ ID NO: 457458 - RNA, 22 nt, Human
aaagggaggggcgauaagccgg

SEQ ID NO: 457459 - RNA, 22 nt, Human
gcacagggcaacaggucuguua

SEQ ID NO: 457460 - RNA, 22 nt, Human
cagucccaggguugguucagcu

SEQ ID NO: 457461 - RNA, 22 nt, Human
gcucugcugagauaucugggag

SEQ ID NO: 457462 - RNA, 22 nt, Human
ucugagagcuguagaagccuau

SEQ ID NO: 457463 - RNA, 22 nt, Human
agcaggugacccaagcaggcug

SEQ ID NO: 457464 - RNA, 22 nt, Human
uucacaggauauaugugcaggg

SEQ ID NO: 457465 - RNA, 22 nt, Human
ugcaggagacauaauagggacu

SEQ ID NO: 457466 - RNA, 22 nt, Human
agugaaauggaugcugcuacug

SEQ ID NO: 457467 - RNA, 22 nt, Human
cuguuuuugugcugugucuccc

SEQ ID NO: 457468 - RNA, 20 nt, Human
accuugaacccgccagccau

SEQ ID NO: 457469 - RNA, 22 nt, Human
gaggccuggugugucucccgcu

SEQ ID NO: 457470 - RNA, 22 nt, Human
ggcugugcgggcagccguggga

SEQ ID NO: 457471 - RNA, 22 nt, Human
ggcucaggagaggggcuaaaag

SEQ ID NO: 457472 - RNA, 18 nt, Human
acaggccucaguccugca

SEQ ID NO: 457473 - RNA, 21 nt, Human
gagcucucaggcaagaagcag

SEQ ID NO: 457474 - RNA, 22 nt, Human
gggcaagcacagcgagcgugcg

SEQ ID NO: 457475 - RNA, 22 nt, Human
ucugucuccugccagugccucu

SEQ ID NO: 457476 - RNA, 22 nt, Human
cagugcuguuguaagcucauug

SEQ ID NO: 457477 - RNA, 22 nt, Human
ucagccugcuccaagugcugcc

SEQ ID NO: 457478 - RNA, 22 nt, Human
ucagagcuuaucucuugcugga

SEQ ID NO: 457479 - RNA, 22 nt, Human
ugucaugcagguuuguuauaga

SEQ ID NO: 457480 - RNA, 22 nt, Human
agccucucuccagcuuggcaga

SEQ ID NO: 457481 - RNA, 22 nt, Human
uuugcuauuuuucugugcagcu

SEQ ID NO: 457482 - RNA, 22 nt, Human
ugcugucccuaagucucuucaa

SEQ ID NO: 457483 - RNA, 18 nt, Human
gggcccuggcguccgccc

SEQ ID NO: 457484 - RNA, 22 nt, Human
gcacccagcccagggcgugaug

SEQ ID NO: 457485 - RNA, 22 nt, Human
uuucuuauauucugucauuguu

SEQ ID NO: 457486 - RNA, 22 nt, Human
gcuguggaugcuauggaucauc

SEQ ID NO: 457487 - RNA, 22 nt, Human
cuccagggagcuuggaaagacc

SEQ ID NO: 457488 - RNA, 22 nt, Human
uccugcagaccucagucagguc

SEQ ID NO: 457489 - RNA, 22 nt, Human
uacuguuuuuuagacucauggu

SEQ ID NO: 457490 - RNA, 22 nt, Human
caggagcagaggguggucagca

SEQ ID NO: 457491 - RNA, 22 nt, Human
cccugcagaucuaggguccuuc

SEQ ID NO: 457492 - RNA, 22 nt, Human
uggcugagguuaugcugguugu

SEQ ID NO: 457493 - RNA, 22 nt, Human
gaagcagcagcuggggacaguu

SEQ ID NO: 457494 - RNA, 22 nt, Human
agcugcuccuuuccugcaggcg

SEQ ID NO: 457495 - RNA, 22 nt, Human
uucagucagugacuaagcaguu

SEQ ID NO: 457496 - RNA, 22 nt, Human
aauuuuauuagaaggcaagggg

SEQ ID NO: 457497 - RNA, 22 nt, Human
auuauguagguuaggugguugu

SEQ ID NO: 457498 - RNA, 22 nt, Human
aggcucugcagugcuggaggac

SEQ ID NO: 457499 - RNA, 16 nt, Human
aggcucagaggcugga

SEQ ID NO: 457500 - RNA, 21 nt, Human
uuugaaagcuacaucuauagc

SEQ ID NO: 457501 - RNA, 22 nt, Human
ugaagccacagagcaucugccu

SEQ ID NO: 457502 - RNA, 22 nt, Human
ggccugcugacccaaguccugu

SEQ ID NO: 457503 - RNA, 22 nt, Human
gucagcacuuuuccgaggcaga

SEQ ID NO: 457504 - RNA, 22 nt, Human
ggcagggcuugucucugugaug

SEQ ID NO: 457505 - RNA, 17 nt, Human
ucagagggaugagcagg

SEQ ID NO: 457506 - RNA, 22 nt, Human
ucaaugauaguacaaucagccu

SEQ ID NO: 457507 - RNA, 22 nt, Human
aggcacugggggaugagcaagg

SEQ ID NO: 457508 - RNA, 22 nt, Human
gaccagagaaaggcacuggaag

SEQ ID NO: 457509 - RNA, 22 nt, Human
cccagggauuauaaaggugaaa

SEQ ID NO: 457510 - RNA, 22 nt, Human
cucagaguccccacaucugggu

SEQ ID NO: 457511 - RNA, 22 nt, Human
gcucugcuugcaucaugacugc

SEQ ID NO: 457512 - RNA, 22 nt, Human
uaacagaaguuguucauugugg

SEQ ID NO: 457513 - RNA, 22 nt, Human
cugggguggugcaggccucaug

SEQ ID NO: 457514 - RNA, 22 nt, Human
ccugagacaugaaccaggcucc

SEQ ID NO: 457515 - RNA, 22 nt, Human
aaauccuaauaaugcacuagug

SEQ ID NO: 457516 - RNA, 22 nt, Human
gaaaccucuuagccucucuuug

SEQ ID NO: 457517 - RNA, 22 nt, Human
ggcucaggggccaggccugucc

SEQ ID NO: 457518 - RNA, 22 nt, Human
agaagauuuagguugacgcuau

SEQ ID NO: 457519 - RNA, 22 nt, Human
ggcucuggagacauguggagag

SEQ ID NO: 457520 - RNA, 22 nt, Human
caggaggaggguacaccaucag

SEQ ID NO: 457521 - RNA, 19 nt, Human
ggcugggucuggcagguuc

SEQ ID NO: 457522 - RNA, 22 nt, Human
cccuggaagguucucuggcuca

SEQ ID NO: 457523 - RNA, 22 nt, Human
ugaggcagcccacuuuccuuag

SEQ ID NO: 457524 - RNA, 22 nt, Human
agcagggcuccauuucacugcc

SEQ ID NO: 457525 - RNA, 22 nt, Human
gggauggggggaagcguccaug

SEQ ID NO: 457526 - RNA, 22 nt, Human
uggaagcagugauucuugucug

SEQ ID NO: 457527 - RNA, 22 nt, Human
augauacaucuucaugucagug

SEQ ID NO: 457528 - RNA, 22 nt, Human
uugcaacaucugaacauuuauc

SEQ ID NO: 457529 - RNA, 21 nt, Human
acaugcauagagagauuucug

SEQ ID NO: 457530 - RNA, 22 nt, Human
uguguacagcaggauuucucaa

SEQ ID NO: 457531 - RNA, 22 nt, Human
acagggcauuuccucuaugugu

SEQ ID NO: 457532 - RNA, 22 nt, Human
cuggggcccaucgagggcugag

SEQ ID NO: 457533 - RNA, 22 nt, Human
ggggggugcugaucaguggagc

SEQ ID NO: 457534 - RNA, 22 nt, Human
uuaaauuccagccucauaauag

SEQ ID NO: 457535 - RNA, 22 nt, Human
cggcagagcggcgagccccucc

SEQ ID NO: 457536 - RNA, 22 nt, Human
ucuggagcuggcagggcccugg

SEQ ID NO: 457537 - RNA, 22 nt, Human
aaacuguauauuuauggcaugu

SEQ ID NO: 457538 - RNA, 22 nt, Human
cagcauuggguuaccuuuguuu

SEQ ID NO: 457539 - RNA, 22 nt, Human
aauacagaggggucacaauuca

SEQ ID NO: 457540 - RNA, 22 nt, Human
agccucugauggcucccaagga

SEQ ID NO: 457541 - RNA, 22 nt, Human
uagcugccuaugugauaagaga

SEQ ID NO: 457542 - RNA, 22 nt, Human
augcaagauguauagaagacuu

SEQ ID NO: 457543 - RNA, 22 nt, Human
ccaggcagcucugauuuauguc

SEQ ID NO: 457544 - RNA, 22 nt, Human
ggggcggggcucugagaagcau

SEQ ID NO: 457545 - RNA, 22 nt, Human
gggagucugggcuagacuccuu

SEQ ID NO: 457546 - RNA, 22 nt, Human
cuagaaaugcucaagagaaagu

SEQ ID NO: 457547 - RNA, 22 nt, Human
acuggcugaaguuuacuuuuug

SEQ ID NO: 457548 - RNA, 22 nt, Human
agaaacuucagcuauucuuuug

SEQ ID NO: 457549 - RNA, 20 nt, Human
uggaccugucucuuuaggga

SEQ ID NO: 457550 - RNA, 22 nt, Human
cauuagggccaccauaacaaaa

SEQ ID NO: 457551 - RNA, 21 nt, Human
augggcagaggcagagaggcu

SEQ ID NO: 457552 - RNA, 22 nt, Human
ugagguaggugguaagagauac

SEQ ID NO: 457553 - RNA, 22 nt, Human
gaaggagacccugaagaugcug

SEQ ID NO: 457554 - RNA, 22 nt, Human
aggcagagcugauguucuguga

SEQ ID NO: 457555 - RNA, 22 nt, Human
agcugccugggcuuguacaccu

SEQ ID NO: 457556 - RNA, 22 nt, Human
ucucagucagccuugauguccc

SEQ ID NO: 457557 - RNA, 22 nt, Human
uuaaugcagaaaucaaacugac

SEQ ID NO: 457558 - RNA, 22 nt, Human
uuucaguguaagguuuccagga

SEQ ID NO: 457559 - RNA, 22 nt, Human
ugcagcaggcacaggacggaag

SEQ ID NO: 457560 - RNA, 22 nt, Human
cacauaauacauguuccacuua

SEQ ID NO: 457561 - RNA, 22 nt, Human
agauacaugucaagagacuuau

SEQ ID NO: 457562 - RNA, 22 nt, Human
ugggcagacuaaggucaaagcu

SEQ ID NO: 457563 - RNA, 22 nt, Human
cucaggguaaugaaagacgaau

SEQ ID NO: 457564 - RNA, 21 nt, Human
guguuuccuguuuauggcuug

SEQ ID NO: 457565 - RNA, 22 nt, Human
ccagggugaccagcuggccuag

SEQ ID NO: 457566 - RNA, 22 nt, Human
uggaauggaaacaaacugagga

SEQ ID NO: 457567 - RNA, 22 nt, Human
aucccugcccucauggagcuua

SEQ ID NO: 457568 - RNA, 22 nt, Human
ugcaggaauuuuuugcagaaag

SEQ ID NO: 457569 - RNA, 22 nt, Human
cauuuagagucuugcaauuuua

SEQ ID NO: 457570 - RNA, 22 nt, Human
cuggcuuucucugugguguuca

SEQ ID NO: 457571 - RNA, 22 nt, Human
ccagagagaguacugggcucug

SEQ ID NO: 457572 - RNA, 22 nt, Human
caggacccaaccucccugcucu

SEQ ID NO: 457573 - RNA, 22 nt, Human
uacauaauuaaucuuuaaguuc

SEQ ID NO: 457574 - RNA, 23 nt, Human
caugccaguuugugcaggcagau

SEQ ID NO: 457575 - RNA, 22 nt, Human
ucaaagcaucagucaauuuagg

SEQ ID NO: 457576 - RNA, 22 nt, Human
uuagaaagaacuuuagauauca

SEQ ID NO: 457577 - RNA, 22 nt, Human
ggagggcugccagguggagcgg

SEQ ID NO: 457578 - RNA, 22 nt, Human
aggcucccaagcacugacccca

SEQ ID NO: 457579 - RNA, 22 nt, Human
acaaaguuaacaguuggauagu

SEQ ID NO: 457580 - RNA, 22 nt, Human
caggugccgggaaugcagcaau

SEQ ID NO: 457581 - RNA, 22 nt, Human
uuagauaauguuauuguaauuu

SEQ ID NO: 457582 - RNA, 22 nt, Human
gcagcuuuguaaaguaugaagc

SEQ ID NO: 457583 - RNA, 23 nt, Human
ucucagugaaucucagaauucgc

SEQ ID NO: 457584 - RNA, 23 nt, Human
gcaguggaaugucucuguuugga

SEQ ID NO: 457585 - RNA, 22 nt, Human
ccaaaguccauaguuuacuuua

SEQ ID NO: 457586 - RNA, 22 nt, Human
acugucugcccugagaugccag

SEQ ID NO: 457587 - RNA, 22 nt, Human
acaggcugacuuccugccaugu

SEQ ID NO: 457588 - RNA, 22 nt, Human
cccucugcaggcuggaccugcc

SEQ ID NO: 457589 - RNA, 22 nt, Human
agccuccuguagcccucaccca

SEQ ID NO: 457590 - RNA, 21 nt, Human
aagagcugucaggaaggcugc

SEQ ID NO: 457591 - RNA, 22 nt, Human
gacauucacagguaaacauucc

SEQ ID NO: 457592 - RNA, 22 nt, Human
gaggcuggaauauuagaaaugu

SEQ ID NO: 457593 - RNA, 23 nt, Human
aguuuguaaagaaauauuugcac

SEQ ID NO: 457594 - RNA, 22 nt, Human
agugcacaccuuaguacaaagu

SEQ ID NO: 457595 - RNA, 22 nt, Human
ugggaggagcccucugggaagg

SEQ ID NO: 457596 - RNA, 22 nt, Human
cucugaagggagggccaagccc

SEQ ID NO: 457597 - RNA, 22 nt, Human
ucagcugccuuucccaugcuag

SEQ ID NO: 457598 - RNA, 22 nt, Human
uuugaaauaugaggcauuauga

SEQ ID NO: 457599 - RNA, 22 nt, Human
ccucaugguacuuacuguagcu

SEQ ID NO: 457600 - RNA, 22 nt, Human
cucuggaaaaccacuagcagga

SEQ ID NO: 457601 - RNA, 22 nt, Human
uuccauaacugaccgaaugcau

SEQ ID NO: 457602 - RNA, 22 nt, Human
ggcugccugcucaggugcggcg

SEQ ID NO: 457603 - RNA, 22 nt, Human
gcugccuggaauaacggcuggc

SEQ ID NO: 457604 - RNA, 22 nt, Human
ggcuugggagcaggcaugugac

SEQ ID NO: 457605 - RNA, 23 nt, Human
uccagcagccaagaaggguagaa

SEQ ID NO: 457606 - RNA, 22 nt, Human
aaaugugucauauucaaaguca

SEQ ID NO: 457607 - RNA, 22 nt, Human
ggaugcugacuuuggagcaugg

SEQ ID NO: 457608 - RNA, 22 nt, Human
ucuggagcgaggucccugucug

SEQ ID NO: 457609 - RNA, 22 nt, Human
uucuugauuucaugcaguuaag

SEQ ID NO: 457610 - RNA, 22 nt, Human
aagggcagccugacucacgguc

SEQ ID NO: 457611 - RNA, 22 nt, Human
ccucagcugcuucccuggagcc

SEQ ID NO: 457612 - RNA, 22 nt, Human
ugaaugauguauaauauugaga

SEQ ID NO: 457613 - RNA, 22 nt, Human
ugaagaugucagcagggguggu

SEQ ID NO: 457614 - RNA, 22 nt, Human
aauuuguuacacagcaauauaa

SEQ ID NO: 457615 - RNA, 22 nt, Human
accaggagccacaggaggagcc

SEQ ID NO: 457616 - RNA, 22 nt, Human
aggcugcucugcgaagucagcu

SEQ ID NO: 457617 - RNA, 22 nt, Human
cuacagcagagcuacacuaacu

SEQ ID NO: 457618 - RNA, 22 nt, Human
gagccuggggacccuccugagu

SEQ ID NO: 457619 - RNA, 22 nt, Human
agcucccagcuccuuugagaga

SEQ ID NO: 457620 - RNA, 22 nt, Human
aagggcugcaauccaaaacacu

SEQ ID NO: 457621 - RNA, 22 nt, Human
ccacaggcugcugcaggucccg

SEQ ID NO: 457622 - RNA, 22 nt, Human
auguaacuguuauauuuuguug

SEQ ID NO: 457623 - RNA, 22 nt, Human
aggcucagccccugggaggaga

SEQ ID NO: 457624 - RNA, 22 nt, Human
uaccucaugcuguacagcacgu

SEQ ID NO: 457625 - RNA, 22 nt, Human
uuagaaaacauaagugguaaag

SEQ ID NO: 457626 - RNA, 22 nt, Human
uucccaugccuggccccuaucc

SEQ ID NO: 457627 - RNA, 22 nt, Human
uggcugaguuccuggcacacgg

SEQ ID NO: 457628 - RNA, 22 nt, Human
ugccuggcaacuguggugggcu

SEQ ID NO: 457629 - RNA, 22 nt, Human
cuggccaacuugcuuguuggca

SEQ ID NO: 457630 - RNA, 22 nt, Human
caugaaugcuggguucauguaa

SEQ ID NO: 457631 - RNA, 22 nt, Human
auguauguuaguguauuaucua

SEQ ID NO: 457632 - RNA, 22 nt, Human
uucaggagaaaguucaguacuu

SEQ ID NO: 457633 - RNA, 22 nt, Human
uacuuguuaucaucuuuuccuu

SEQ ID NO: 457634 - RNA, 22 nt, Human
ucugggcugggagcguguggac

SEQ ID NO: 457635 - RNA, 22 nt, Human
ugagagggcccagagcacacca

SEQ ID NO: 457636 - RNA, 22 nt, Human
gggcacagcugcuacccagugc

SEQ ID NO: 457637 - RNA, 22 nt, Human
caugcacuuaccugaaauucaa

SEQ ID NO: 457638 - RNA, 22 nt, Human
uucacagauguauuggaacucc

SEQ ID NO: 457639 - RNA, 22 nt, Human
uaaugcacagaauugacauggg

SEQ ID NO: 457640 - RNA, 22 nt, Human
ccaggccuagccccugagggua

SEQ ID NO: 457641 - RNA, 22 nt, Human
accaggaggccuggagcacaaa

SEQ ID NO: 457642 - RNA, 22 nt, Human
aucuacagugcacaggacagcc

SEQ ID NO: 457643 - RNA, 22 nt, Human
gauuuccucacuaacauccauc

SEQ ID NO: 457644 - RNA, 22 nt, Human
acagggcagugucuugaaaaau

SEQ ID NO: 457645 - RNA, 22 nt, Human
ggaggaccugcuggcccugcaa

SEQ ID NO: 457646 - RNA, 21 nt, Human
caaagccaggcaacucucucc

SEQ ID NO: 457647 - RNA, 22 nt, Human
ucuggcuccugaguccaugcuc

SEQ ID NO: 457648 - RNA, 22 nt, Human
gagagcugggcuuugggugaag

SEQ ID NO: 457649 - RNA, 22 nt, Human
gccuggaguuguggugaagcca

SEQ ID NO: 457650 - RNA, 22 nt, Human
acaaagucucuaauaaucuucu

SEQ ID NO: 457651 - RNA, 21 nt, Human
agcuuccugcagugggagguc

SEQ ID NO: 457652 - RNA, 22 nt, Human
aagguacaccaaaguucaaguu

SEQ ID NO: 457653 - RNA, 22 nt, Human
gcagcacauauaaacaaagaga

SEQ ID NO: 457654 - RNA, 22 nt, Human
augcuuuuccuaaaaugaugcc

SEQ ID NO: 457655 - RNA, 22 nt, Human
ugcauuucagaagaaaauucgg

SEQ ID NO: 457656 - RNA, 22 nt, Human
aguaggaggcgggagcaugaag

SEQ ID NO: 457657 - RNA, 22 nt, Human
ggucagguuuuuaggagugacc

SEQ ID NO: 457658 - RNA, 22 nt, Human
gaaaggccauuucugaggguuu

SEQ ID NO: 457659 - RNA, 22 nt, Human
acacagccgugaaucugcuucu

SEQ ID NO: 457660 - RNA, 22 nt, Human
ggcuuuauuaacucauccguaa

SEQ ID NO: 457661 - RNA, 22 nt, Human
uauugaaauucuucauguccuc

SEQ ID NO: 457662 - RNA, 22 nt, Human
cugucacacugauaucaggcuu

SEQ ID NO: 457663 - RNA, 22 nt, Human
aggagugagcuuuggggucaga

SEQ ID NO: 457664 - RNA, 22 nt, Human
gcugucugggaggccuccacuu

SEQ ID NO: 457665 - RNA, 18 nt, Human
cacaggcaggugauaggu

SEQ ID NO: 457666 - RNA, 22 nt, Human
gaggcacaucacuuggugcauu

SEQ ID NO: 457667 - RNA, 22 nt, Human
uggaagggagugacagucagag

SEQ ID NO: 457668 - RNA, 22 nt, Human
aaaauggucucagcuggcacca

SEQ ID NO: 457669 - RNA, 22 nt, Human
ggcagcuggggcagugcccugu

SEQ ID NO: 457670 - RNA, 22 nt, Human
ccaaaguccauaguuuacauua

SEQ ID NO: 457671 - RNA, 23 nt, Human
aaguaacagggauaauagcaguu

SEQ ID NO: 457672 - RNA, 22 nt, Human
cuucaagaagacagcagagcau

SEQ ID NO: 457673 - RNA, 22 nt, Human
uccaggagaggccugaccaggu

SEQ ID NO: 457674 - RNA, 22 nt, Human
gcagagaggaaugaagccaucc

SEQ ID NO: 457675 - RNA, 22 nt, Human
agggagcucaguuggaagcggu

SEQ ID NO: 457676 - RNA, 22 nt, Human
ggcacugggagaggugagacgg

SEQ ID NO: 457677 - RNA, 22 nt, Human
caagagcucaccggagagcauu

SEQ ID NO: 457678 - RNA, 22 nt, Human
cuggccuguccugacccagccu

SEQ ID NO: 457679 - RNA, 19 nt, Human
ugaagcaggcagagaagau

SEQ ID NO: 457680 - RNA, 22 nt, Human
gaguuauuggguggaaagguag

SEQ ID NO: 457681 - RNA, 22 nt, Human
cugaagaggacgcagcagcaag

SEQ ID NO: 457682 - RNA, 22 nt, Human
ggagcugcuuugaucugaagaa

SEQ ID NO: 457683 - RNA, 21 nt, Human
cucuggagucaagagcuucca

SEQ ID NO: 457684 - RNA, 22 nt, Human
auuguacaugcagugagucauc

SEQ ID NO: 457685 - RNA, 22 nt, Human
cauugcccaguaggaucaccag

SEQ ID NO: 457686 - RNA, 22 nt, Human
augguacaaaauguauaaaguc

SEQ ID NO: 457687 - RNA, 22 nt, Human
uuggaugaagucuagcuuuagu

SEQ ID NO: 457688 - RNA, 22 nt, Human
cagauccacccuuguagugaca

SEQ ID NO: 457689 - RNA, 22 nt, Human
gcugccugguuucucagcugca

SEQ ID NO: 457690 - RNA, 22 nt, Human
gcugagagcaguguggccuuaa

SEQ ID NO: 457691 - RNA, 22 nt, Human
aagggcuggccacauucugggu

SEQ ID NO: 457692 - RNA, 19 nt, Human
gacucacaccuuccgcugu

SEQ ID NO: 457693 - RNA, 22 nt, Human
cgugagcaaaauggacacuccc

SEQ ID NO: 457694 - RNA, 22 nt, Human
acacugcucacuucuucccuug

SEQ ID NO: 457695 - RNA, 22 nt, Human
cuguacaucccgagagccagua

SEQ ID NO: 457696 - RNA, 22 nt, Human
ucagcuuugggggucucaggag

SEQ ID NO: 457697 - RNA, 22 nt, Human
ccuggcagacugugagggcagg

SEQ ID NO: 457698 - RNA, 22 nt, Human
ucccagagaagagcuggaugga

SEQ ID NO: 457699 - RNA, 22 nt, Human
uggcucagcugucacagccugg

SEQ ID NO: 457700 - RNA, 22 nt, Human
cccaggacucggcacucuccuu

SEQ ID NO: 457701 - RNA, 22 nt, Human
cugcagggaccacaagcagguu

SEQ ID NO: 457702 - RNA, 22 nt, Human
aggcucagauucacauuugguu

SEQ ID NO: 457703 - RNA, 22 nt, Human
aaaugcuagggagaaacucucc

SEQ ID NO: 457704 - RNA, 22 nt, Human
aggagcuguuuuguucagcaaa

SEQ ID NO: 457705 - RNA, 22 nt, Human
accaaggagaaggugcaagcuu

SEQ ID NO: 457706 - RNA, 22 nt, Human
gcucacugcaaccucugcuucc

SEQ ID NO: 457707 - RNA, 22 nt, Human
cagucucucugaaguauuaaga

SEQ ID NO: 457708 - RNA, 22 nt, Human
ucaguuuucauuucaugagcag

SEQ ID NO: 457709 - RNA, 22 nt, Human
uccuucagggcugaccacaggc

SEQ ID NO: 457710 - RNA, 22 nt, Human
aaaaguguucaggaagaauaau

SEQ ID NO: 457711 - RNA, 22 nt, Human
ccuuucucuggcagcaggacag

SEQ ID NO: 457712 - RNA, 22 nt, Human
agggccagcuagagcccucgcc

SEQ ID NO: 457713 - RNA, 22 nt, Human
cgccucagccguggucaucuuc

SEQ ID NO: 457714 - RNA, 22 nt, Human
accaugggucagccaccucagc

SEQ ID NO: 457715 - RNA, 22 nt, Human
aagagcuggaagugaagauaac

SEQ ID NO: 457716 - RNA, 22 nt, Human
gugcagauccugauugcaguuc

SEQ ID NO: 457717 - RNA, 17 nt, Human
gacaggcucagugacga

SEQ ID NO: 457718 - RNA, 22 nt, Human
acaaaugcaaguuuuaugucaa

SEQ ID NO: 457719 - RNA, 22 nt, Human
uguguccuucugggagucccag

SEQ ID NO: 457720 - RNA, 22 nt, Human
auuauuaggacuacugggguug

SEQ ID NO: 457721 - RNA, 22 nt, Human
ucccagggacaccaagcuguuu

SEQ ID NO: 457722 - RNA, 22 nt, Human
uguaggaguccaaucaggagac

SEQ ID NO: 457723 - RNA, 19 nt, Human
agcuccugggcucugggcc

SEQ ID NO: 457724 - RNA, 22 nt, Human
ggccucacccaucggugccuuu

SEQ ID NO: 457725 - RNA, 22 nt, Human
gagugcaucguggccauuuuaa

SEQ ID NO: 457726 - RNA, 22 nt, Human
ggccuugggcuggcugcaguau

SEQ ID NO: 457727 - RNA, 22 nt, Human
ggcagccaugcacgcugccugg

SEQ ID NO: 457728 - RNA, 22 nt, Human
ucuguggcacgauugcacugca

SEQ ID NO: 457729 - RNA, 22 nt, Human
ucuggcucucauacucgccagu

SEQ ID NO: 457730 - RNA, 22 nt, Human
ugcaggcuggaggagggacuaa

SEQ ID NO: 457731 - RNA, 22 nt, Human
cugaagaugucugagaugcuca

SEQ ID NO: 457732 - RNA, 22 nt, Human
cugggcugcaggaguggggcaa

SEQ ID NO: 457733 - RNA, 22 nt, Human
cauuucuagacaaguccuggag

SEQ ID NO: 457734 - RNA, 22 nt, Human
uuucuaguucucugccaaaaaa

SEQ ID NO: 457735 - RNA, 20 nt, Human
uauuugaaauggccaagugu

SEQ ID NO: 457736 - RNA, 22 nt, Human
gaaugugugacucuauugagca

SEQ ID NO: 457737 - RNA, 22 nt, Human
cugcugggcagaggcugcauga

SEQ ID NO: 457738 - RNA, 22 nt, Human
agggaccucauguaaguggauu

SEQ ID NO: 457739 - RNA, 23 nt, Human
agacccagagacuggcucugcuc

SEQ ID NO: 457740 - RNA, 22 nt, Human
augauggugagguugagcacag

SEQ ID NO: 457741 - RNA, 22 nt, Human
auagcagaaaccaagcuucuuc

SEQ ID NO: 457742 - RNA, 22 nt, Human
gucugaggaagaugcaggggga

SEQ ID NO: 457743 - RNA, 22 nt, Human
ugaaaaggaguccuuguuuuca

SEQ ID NO: 457744 - RNA, 22 nt, Human
ucucaaacuaacaaugauuaua

SEQ ID NO: 457745 - RNA, 22 nt, Human
uggcagagguauauugggagga

SEQ ID NO: 457746 - RNA, 22 nt, Human
ccaggcugggcuacaaguugag

SEQ ID NO: 457747 - RNA, 22 nt, Human
cugugaccuccaggaaggggug

SEQ ID NO: 457748 - RNA, 22 nt, Human
agcuggcccucgagagccaauu

SEQ ID NO: 457749 - RNA, 22 nt, Human
cuggcagcucugagucccuucu

SEQ ID NO: 457750 - RNA, 22 nt, Human
augaagcuaaacccugcagcca

SEQ ID NO: 457751 - RNA, 22 nt, Human
cccucugccugcgcccuggugu

SEQ ID NO: 457752 - RNA, 22 nt, Human
agaaauguuacaguuguuauuu

SEQ ID NO: 457753 - RNA, 22 nt, Human
uacauaguauucacauuguuuu

SEQ ID NO: 457754 - RNA, 22 nt, Human
gggcccuggacguggcggcaga

SEQ ID NO: 457755 - RNA, 22 nt, Human
uggcucagauaauucaaggggc

SEQ ID NO: 457756 - RNA, 22 nt, Human
ugggccugaaggagcugcgccc

SEQ ID NO: 457757 - RNA, 18 nt, Human
gucuggaggucaggagcu

SEQ ID NO: 457758 - RNA, 19 nt, Human
auagucuuuccaauuauac

SEQ ID NO: 457759 - RNA, 22 nt, Human
cuggccugaggucggcuguagg

SEQ ID NO: 457760 - RNA, 22 nt, Human
acagcuuugggcaaugcuauga

SEQ ID NO: 457761 - RNA, 20 nt, Human
aguggggagucaggagugcc

SEQ ID NO: 457762 - RNA, 22 nt, Human
aagugggaauagaaaugaaggu

SEQ ID NO: 457763 - RNA, 22 nt, Human
gccugagaaggauaggaagcga

SEQ ID NO: 457764 - RNA, 22 nt, Human
ggcugucugugguggagcguug

SEQ ID NO: 457765 - RNA, 22 nt, Human
ucaaaauuagugaccaaaggca

SEQ ID NO: 457766 - RNA, 22 nt, Human
uggcucugggcaccguguccac

SEQ ID NO: 457767 - RNA, 22 nt, Human
caguggagugggacuggucuga

SEQ ID NO: 457768 - RNA, 22 nt, Human
caaauguguuuuuucuucuaca

SEQ ID NO: 457769 - RNA, 22 nt, Human
acaguggaauuuguagaugugu

SEQ ID NO: 457770 - RNA, 22 nt, Human
acaugauuuuuaaagagauaau

SEQ ID NO: 457771 - RNA, 22 nt, Human
gcccggcagucacacacccagg

SEQ ID NO: 457772 - RNA, 22 nt, Human
ucucagagaccugaacucccug

SEQ ID NO: 457773 - RNA, 22 nt, Human
cuauuacaauucugcaaggagu

SEQ ID NO: 457774 - RNA, 22 nt, Human
ggcugggcaaacaagacucuuc

SEQ ID NO: 457775 - RNA, 22 nt, Human
gagcugccuacauugccaagag

SEQ ID NO: 457776 - RNA, 22 nt, Human
uuuuccuaguaggccuauuaga

SEQ ID NO: 457777 - RNA, 22 nt, Human
ggcucagguugggucacaugac

SEQ ID NO: 457778 - RNA, 22 nt, Human
cuugcugggguaagucugugcu

SEQ ID NO: 457779 - RNA, 22 nt, Human
guggccugucagaagccguggg

SEQ ID NO: 457780 - RNA, 22 nt, Human
aagccaguguuuuugagaguug

SEQ ID NO: 457781 - RNA, 22 nt, Human
auccuugagccuuaucuuuugu

SEQ ID NO: 457782 - RNA, 22 nt, Human
gaacaguaucaguagugccagu

SEQ ID NO: 457783 - RNA, 21 nt, Human
uuuauguacuucauagaguag

SEQ ID NO: 457784 - RNA, 22 nt, Human
agcuuuaugggagcuuagauaa

SEQ ID NO: 457785 - RNA, 22 nt, Human
acaaagguggaccauguggcuu

SEQ ID NO: 457786 - RNA, 22 nt, Human
ggcuccuguccuccuggagcuc

SEQ ID NO: 457787 - RNA, 22 nt, Human
uuccagagaaaagguuuauuuc

SEQ ID NO: 457788 - RNA, 22 nt, Human
gggaggcuggcucuggccacag

SEQ ID NO: 457789 - RNA, 22 nt, Human
aggcaggagugacccugacagg

SEQ ID NO: 457790 - RNA, 22 nt, Human
uggggcuggcuauugucucccu

SEQ ID NO: 457791 - RNA, 22 nt, Human
augguuuguaacccaauacucc

SEQ ID NO: 457792 - RNA, 22 nt, Human
caagccugucucaccagugcua

SEQ ID NO: 457793 - RNA, 17 nt, Human
aggcaggagauuggaga

SEQ ID NO: 457794 - RNA, 22 nt, Human
ugucccaggcugaaguacagug

SEQ ID NO: 457795 - RNA, 22 nt, Human
caaagguaaagaucugcugugg

SEQ ID NO: 457796 - RNA, 22 nt, Human
ugggcugcccugaugguccuca

SEQ ID NO: 457797 - RNA, 22 nt, Human
uucuaauuguguuugcauaucu

SEQ ID NO: 457798 - RNA, 22 nt, Human
cugggccauggaagucucugcc

SEQ ID NO: 457799 - RNA, 22 nt, Human
agaccugcagggccaggccugc

SEQ ID NO: 457800 - RNA, 22 nt, Human
gagcugccugugugccaugaug

SEQ ID NO: 457801 - RNA, 22 nt, Human
cccaggagguggagguugcagu

SEQ ID NO: 457802 - RNA, 22 nt, Human
ucaauucugguccucaggaacu

SEQ ID NO: 457803 - RNA, 22 nt, Human
gggagccacagugaggugcaug

SEQ ID NO: 457804 - RNA, 22 nt, Human
ugcagauucaaaugaaaugcaa

SEQ ID NO: 457805 - RNA, 22 nt, Human
ugcauuauuugcaugugccugu

SEQ ID NO: 457806 - RNA, 22 nt, Human
uugaccuauguuucuucaucug

SEQ ID NO: 457807 - RNA, 22 nt, Human
aacuuuauuguuaggggcuaaa

SEQ ID NO: 457808 - RNA, 22 nt, Human
ugcugcuccccagcacacagca

SEQ ID NO: 457809 - RNA, 22 nt, Human
gagcagcuggacaggccucccu

SEQ ID NO: 457810 - RNA, 22 nt, Human
uuugaguugcuuauuuaauagg

SEQ ID NO: 457811 - RNA, 22 nt, Human
cacugcuucuggaggaauuugg

SEQ ID NO: 457812 - RNA, 22 nt, Human
aggcaggugcuuaugacuugcu

SEQ ID NO: 457813 - RNA, 22 nt, Human
uggccucugcaauggauucacc

SEQ ID NO: 457814 - RNA, 22 nt, Human
acagagcuuaggaugacuccca

SEQ ID NO: 457815 - RNA, 22 nt, Human
gccagguggcugagugacugag

SEQ ID NO: 457816 - RNA, 22 nt, Human
uucaagaucuggguuuucagcu

SEQ ID NO: 457817 - RNA, 22 nt, Human
cccccuggcaggcuggccucuc

SEQ ID NO: 457818 - RNA, 22 nt, Human
aguguccccuccaagggccugg

SEQ ID NO: 457819 - RNA, 17 nt, Human
gcaagggaugggagauu

SEQ ID NO: 457820 - RNA, 22 nt, Human
gccuuccuuacaccugcucagc

SEQ ID NO: 457821 - RNA, 22 nt, Human
cauuuguaauacugacuugcag

SEQ ID NO: 457822 - RNA, 22 nt, Human
cucugcagaggcccaaggcuga

SEQ ID NO: 457823 - RNA, 22 nt, Human
aaacuguaaauacuaguaagug

SEQ ID NO: 457824 - RNA, 21 nt, Human
acacugugucauaaugcuuaa

SEQ ID NO: 457825 - RNA, 22 nt, Human
agggcugcccagugugagagcu

SEQ ID NO: 457826 - RNA, 21 nt, Human
ccagccucagaucagggagcu

SEQ ID NO: 457827 - RNA, 20 nt, Human
uccaguggccugaaucugga

SEQ ID NO: 457828 - RNA, 22 nt, Human
gggagaaggaggacugugcugu

SEQ ID NO: 457829 - RNA, 22 nt, Human
aaaggccauuacuugcuuuuag

SEQ ID NO: 457830 - RNA, 22 nt, Human
cauuugcagagggugacacucu

SEQ ID NO: 457831 - RNA, 22 nt, Human
uccagccaagccuugguagcug

SEQ ID NO: 457832 - RNA, 22 nt, Human
cagggcuguaaauuagugcuga

SEQ ID NO: 457833 - RNA, 22 nt, Human
guagccauuggcaaugaagccu

SEQ ID NO: 457834 - RNA, 22 nt, Human
uccucacagucaacacuuugag

SEQ ID NO: 457835 - RNA, 22 nt, Human
ccagcuuuaucaagucugagcu

SEQ ID NO: 457836 - RNA, 22 nt, Human
uuauucagucugucuagggagu

SEQ ID NO: 457837 - RNA, 22 nt, Human
gaaaauguuagcuucauaguca

SEQ ID NO: 457838 - RNA, 22 nt, Human
ugggccacacacagaagaauca

SEQ ID NO: 457839 - RNA, 22 nt, Human
gcugcccagcaggccccagggg

SEQ ID NO: 457840 - RNA, 22 nt, Human
agaguguuucagucuuccuaga

SEQ ID NO: 457841 - RNA, 22 nt, Human
ugcauuugucuugucucaugaa

SEQ ID NO: 457842 - RNA, 22 nt, Human
agcucccaggcagucaugagga

SEQ ID NO: 457843 - RNA, 22 nt, Human
ucacuuauugcucaucucaugc

SEQ ID NO: 457844 - RNA, 22 nt, Human
uggcucuggauuaaucuaggaa

SEQ ID NO: 457845 - RNA, 22 nt, Human
gggcuggcgggaaaggcaauuc

SEQ ID NO: 457846 - RNA, 22 nt, Human
accacugggcgggcagccugcu

SEQ ID NO: 457847 - RNA, 22 nt, Human
ggugggugagcccugggagcug

SEQ ID NO: 457848 - RNA, 22 nt, Human
aguccaguguguucuggcagca

SEQ ID NO: 457849 - RNA, 22 nt, Human
uauuucuugagacucgucuucc

SEQ ID NO: 457850 - RNA, 21 nt, Human
aucuggaagaacugguaagug

SEQ ID NO: 457851 - RNA, 22 nt, Human
augugucaauuuucaaaugcuu

SEQ ID NO: 457852 - RNA, 18 nt, Human
acagaggcagacauguau

SEQ ID NO: 457853 - RNA, 22 nt, Human
gccuggcccagggcucuuguug

SEQ ID NO: 457854 - RNA, 22 nt, Human
ucauuuccucaaauucaagguu

SEQ ID NO: 457855 - RNA, 22 nt, Human
auaaggcauauagucacuuuuu

SEQ ID NO: 457856 - RNA, 22 nt, Human
gccaggaguucagaugcauguu

SEQ ID NO: 457857 - RNA, 22 nt, Human
cucaggagacaguguccacaug

SEQ ID NO: 457858 - RNA, 22 nt, Human
ggcacugagcugccuuggggca

SEQ ID NO: 457859 - RNA, 22 nt, Human
agggcccaggacagcaucaggg

SEQ ID NO: 457860 - RNA, 23 nt, Human
ugcagggcaaguuagagacccca

SEQ ID NO: 457861 - RNA, 22 nt, Human
gaggaaccacucugagaagcca

SEQ ID NO: 457862 - RNA, 22 nt, Human
cacaggcugcccgcagcuggga

SEQ ID NO: 457863 - RNA, 22 nt, Human
acagaaauuagcagugaguuua

SEQ ID NO: 457864 - RNA, 22 nt, Human
cggagcugccugccaagccugc

SEQ ID NO: 457865 - RNA, 22 nt, Human
gaguggggcccacugcugggug

SEQ ID NO: 457866 - RNA, 21 nt, Human
cagaggcugagagggcaaucu

SEQ ID NO: 457867 - RNA, 22 nt, Human
uggccugccccgagauccuggc

SEQ ID NO: 457868 - RNA, 22 nt, Human
aggcugagccugggcguggugg

SEQ ID NO: 457869 - RNA, 22 nt, Human
accugcaguggccacuccuaau

SEQ ID NO: 457870 - RNA, 19 nt, Human
gccugccuggguuucugag

SEQ ID NO: 457871 - RNA, 22 nt, Human
ucacacacauaaucuaagauua

SEQ ID NO: 457872 - RNA, 22 nt, Human
uggaggaugccauccaggauac

SEQ ID NO: 457873 - RNA, 22 nt, Human
ugucacuucaggaaugcaggga

SEQ ID NO: 457874 - RNA, 19 nt, Human
ugggcuuccccagggcaga

SEQ ID NO: 457875 - RNA, 22 nt, Human
aagagcuguaugccauaugauu

SEQ ID NO: 457876 - RNA, 22 nt, Human
aaggcacuuaacgugggaggau

SEQ ID NO: 457877 - RNA, 21 nt, Human
aucucacagcccagagaagcc

SEQ ID NO: 457878 - RNA, 23 nt, Human
agcuuugugaaagcagacauggg

SEQ ID NO: 457879 - RNA, 22 nt, Human
ugucucaguacacuccgauguu

SEQ ID NO: 457880 - RNA, 22 nt, Human
auuucucaguguacauuauguu

SEQ ID NO: 457881 - RNA, 22 nt, Human
gcaaaugcucuccuuggucagg

SEQ ID NO: 457882 - RNA, 22 nt, Human
ugcaggagcagagauggcugga

SEQ ID NO: 457883 - RNA, 22 nt, Human
ucuggcagggguucugcacuug

SEQ ID NO: 457884 - RNA, 22 nt, Human
caagaugggcaccccagcaccu

SEQ ID NO: 457885 - RNA, 22 nt, Human
agcagccaguucucugugguag

SEQ ID NO: 457886 - RNA, 22 nt, Human
aaacucuuuccacgauuacuuu

SEQ ID NO: 457887 - RNA, 19 nt, Human
ugagagugaggaaggcuuc

SEQ ID NO: 457888 - RNA, 22 nt, Human
gucccuggaauggacucugcgc

SEQ ID NO: 457889 - RNA, 19 nt, Human
ggcauccacgaaugcagag

SEQ ID NO: 457890 - RNA, 22 nt, Human
ucacuguugaccuggaaguggg

SEQ ID NO: 457891 - RNA, 22 nt, Human
ugucccauggauaccaggcuau

SEQ ID NO: 457892 - RNA, 22 nt, Human
guccucuggaagaugaguucuu

SEQ ID NO: 457893 - RNA, 22 nt, Human
ugaaaaggagccuuagguaggu

SEQ ID NO: 457894 - RNA, 21 nt, Human
uggcucugagccucauggcug

SEQ ID NO: 457895 - RNA, 22 nt, Human
cuggccuuuaaaaugaccuuau

SEQ ID NO: 457896 - RNA, 22 nt, Human
acauuucuaauuuaauguaaca

SEQ ID NO: 457897 - RNA, 22 nt, Human
aggcagcauccagaggagaaug

SEQ ID NO: 457898 - RNA, 22 nt, Human
cagggcucaggcucugggauuc

SEQ ID NO: 457899 - RNA, 18 nt, Human
gagcugggagaaggaagg

SEQ ID NO: 457900 - RNA, 22 nt, Human
uccagucaggcugaauucaagg

SEQ ID NO: 457901 - RNA, 22 nt, Human
aauggacaggagagcauaguca

SEQ ID NO: 457902 - RNA, 22 nt, Human
agccaggaauuggacaacacau

SEQ ID NO: 457903 - RNA, 22 nt, Human
uggcugcugagaaggcagcugu

SEQ ID NO: 457904 - RNA, 22 nt, Human
ugagccagauaagggcucacgc

SEQ ID NO: 457905 - RNA, 22 nt, Human
augccaggaacaaacaguggug

SEQ ID NO: 457906 - RNA, 20 nt, Human
ggaagccagggugcagggga

SEQ ID NO: 457907 - RNA, 22 nt, Human
cagaggugcauacaggucauua

SEQ ID NO: 457908 - RNA, 22 nt, Human
cucucugaggaaggagcaucug

SEQ ID NO: 457909 - RNA, 22 nt, Human
cauguacaaaaggcaaaugccu

SEQ ID NO: 457910 - RNA, 19 nt, Human
ugcagccacgugagagacu

SEQ ID NO: 457911 - RNA, 22 nt, Human
guguggcugccagccaagaggc

SEQ ID NO: 457912 - RNA, 22 nt, Human
ucacugaagacugggcucuaaa

SEQ ID NO: 457913 - RNA, 20 nt, Human
ugcucaggauggagaggugu

SEQ ID NO: 457914 - RNA, 22 nt, Human
cuuauguauauuuggaacguac

SEQ ID NO: 457915 - RNA, 22 nt, Human
ccuggcuggcaagaucgugaag

SEQ ID NO: 457916 - RNA, 22 nt, Human
agaggagguggugaugcuuuaa

SEQ ID NO: 457917 - RNA, 22 nt, Human
uaguaacagauuuauacagucu

SEQ ID NO: 457918 - RNA, 22 nt, Human
agugagggaugaagaacugcgg

SEQ ID NO: 457919 - RNA, 20 nt, Human
ccagagaguagguuagugau

SEQ ID NO: 457920 - RNA, 22 nt, Human
aaauguguuugauaggaauauu

SEQ ID NO: 457921 - RNA, 22 nt, Human
uucuggagcuaaaguccacucu

SEQ ID NO: 457922 - RNA, 22 nt, Human
gcuuuauguaaguccaaaggca

SEQ ID NO: 457923 - RNA, 22 nt, Human
ugggcagaguagcucagaagaa

SEQ ID NO: 457924 - RNA, 22 nt, Human
ugccucugggugaccaaggagc

SEQ ID NO: 457925 - RNA, 22 nt, Human
ggcucaccauggccucccugcu

SEQ ID NO: 457926 - RNA, 22 nt, Human
cuguggugagcaacugacugaa

SEQ ID NO: 457927 - RNA, 22 nt, Human
ugaaauuccaggagaguuaaaa

SEQ ID NO: 457928 - RNA, 22 nt, Human
aggagucaggaccaaauggaaa

SEQ ID NO: 457929 - RNA, 22 nt, Human
ccugucuggaacauggccuguu

SEQ ID NO: 457930 - RNA, 22 nt, Human
auucucaaacaagugguuugau

SEQ ID NO: 457931 - RNA, 21 nt, Human
ugcccacagcaaaugcagagg

SEQ ID NO: 457932 - RNA, 22 nt, Human
uccucugcuguucugguucuuu

SEQ ID NO: 457933 - RNA, 20 nt, Human
cagagcugggauuugaacac

SEQ ID NO: 457934 - RNA, 22 nt, Human
gaccauuuuuacagagcauuca

SEQ ID NO: 457935 - RNA, 22 nt, Human
cagggcucugccuugagggaug

SEQ ID NO: 457936 - RNA, 22 nt, Human
cagaggcacagcuucuuuuaau

SEQ ID NO: 457937 - RNA, 22 nt, Human
uuggcuucuggcagucuggacg

SEQ ID NO: 457938 - RNA, 22 nt, Human
uggcccugacugauguggaggg

SEQ ID NO: 457939 - RNA, 22 nt, Human
uucacaauagcuggcaucaucu

SEQ ID NO: 457940 - RNA, 22 nt, Human
auaaggcagaaaugauucuagu

SEQ ID NO: 457941 - RNA, 22 nt, Human
cucuccucugaaguggugaccc

SEQ ID NO: 457942 - RNA, 22 nt, Human
cuagucacucagcacugacaaa

SEQ ID NO: 457943 - RNA, 22 nt, Human
uuugcauugccucugacuuaug

SEQ ID NO: 457944 - RNA, 19 nt, Human
uuucaauggcuuagagaaa

SEQ ID NO: 457945 - RNA, 22 nt, Human
gcuggccauggggagugaggag

SEQ ID NO: 457946 - RNA, 22 nt, Human
acagguggaggcuuuaggaggu

SEQ ID NO: 457947 - RNA, 22 nt, Human
ggagggugcauuuuacccugug

SEQ ID NO: 457948 - RNA, 22 nt, Human
ucauugcaguagggagagaccc

SEQ ID NO: 457949 - RNA, 22 nt, Human
cuucaguuuaucccaucaucca

SEQ ID NO: 457950 - RNA, 22 nt, Human
aagcuggagaguuaggugaaua

SEQ ID NO: 457951 - RNA, 22 nt, Human
cacaggagagcugggaggugcc

SEQ ID NO: 457952 - RNA, 22 nt, Human
aguaaaaucuuaagcacagugg

SEQ ID NO: 457953 - RNA, 22 nt, Human
uuuugcuugagugcacaaaaug

SEQ ID NO: 457954 - RNA, 22 nt, Human
ggcucuggugugaagcagccuc

SEQ ID NO: 457955 - RNA, 18 nt, Human
acaaaggucugcaagacc

SEQ ID NO: 457956 - RNA, 22 nt, Human
auuucacaaagaacagaugcag

SEQ ID NO: 457957 - RNA, 22 nt, Human
uuuguuaauucuuauguuagag

SEQ ID NO: 457958 - RNA, 22 nt, Human
ucacaggacccugaggguggcg

SEQ ID NO: 457959 - RNA, 22 nt, Human
ugccucagaguugucccuacca

SEQ ID NO: 457960 - RNA, 22 nt, Human
acuguauaaggcauagguaagc

SEQ ID NO: 457961 - RNA, 22 nt, Human
cuauuauuagauaaucuacuug

SEQ ID NO: 457962 - RNA, 22 nt, Human
ucaaagagcuauucaguugugg

SEQ ID NO: 457963 - RNA, 22 nt, Human
acagugucuccugguacccagu

SEQ ID NO: 457964 - RNA, 23 nt, Human
aaauuauugcucuucaauugccu

SEQ ID NO: 457965 - RNA, 22 nt, Human
ucucagagccuaacuaaccuaa

SEQ ID NO: 457966 - RNA, 22 nt, Human
gcaaagcugggugugaaugcac

SEQ ID NO: 457967 - RNA, 22 nt, Human
agcuguccuggcucaggcugug

SEQ ID NO: 457968 - RNA, 22 nt, Human
acugucacuccaacugagucgu

SEQ ID NO: 457969 - RNA, 22 nt, Human
ugcagaagaaugagcuuggagu

SEQ ID NO: 457970 - RNA, 22 nt, Human
gagggcagugaauuuugaagcu

SEQ ID NO: 457971 - RNA, 21 nt, Human
aggggacagaguagcuccagg

SEQ ID NO: 457972 - RNA, 22 nt, Human
augcugugucaccuuaggauuu

SEQ ID NO: 457973 - RNA, 22 nt, Human
uucuuucucaacaugaauguuu

SEQ ID NO: 457974 - RNA, 22 nt, Human
uggcagagagagugcagucgac

SEQ ID NO: 457975 - RNA, 22 nt, Human
agccaggcagacucucuuucuu

SEQ ID NO: 457976 - RNA, 22 nt, Human
agcccuggcccggcugugcuuu

SEQ ID NO: 457977 - RNA, 22 nt, Human
auagugggaauuacgauauacu

SEQ ID NO: 457978 - RNA, 20 nt, Human
caucaucacaugagccaauu

SEQ ID NO: 457979 - RNA, 22 nt, Human
cgaggcaggcaggcggaggaua

SEQ ID NO: 457980 - RNA, 22 nt, Human
acugucaccaucagagcgggaa

SEQ ID NO: 457981 - RNA, 23 nt, Human
aucaagauaauccagaugaccua

SEQ ID NO: 457982 - RNA, 22 nt, Human
ugaggggagaagcagcagccug

SEQ ID NO: 457983 - RNA, 21 nt, Human
ucuccaguauccuucucugag

SEQ ID NO: 457984 - RNA, 22 nt, Human
ccuggggagaagagcuuccccc

SEQ ID NO: 457985 - RNA, 20 nt, Human
ugggagcuggugaggucuca

SEQ ID NO: 457986 - RNA, 20 nt, Human
cacagcuugccuuuuaugac

SEQ ID NO: 457987 - RNA, 22 nt, Human
ugcaaacaggagaguaaguaua

SEQ ID NO: 457988 - RNA, 21 nt, Human
uggcucugaaagagugcugca

SEQ ID NO: 457989 - RNA, 22 nt, Human
uggcugagagaagacggggaag

SEQ ID NO: 457990 - RNA, 22 nt, Human
augggcagaguggggacaggaa

SEQ ID NO: 457991 - RNA, 20 nt, Human
aacacagauaccaaagguug

SEQ ID NO: 457992 - RNA, 22 nt, Human
cucagggcuggaaagccaggaa

SEQ ID NO: 457993 - RNA, 22 nt, Human
aguccaaggagagacagcauuu

SEQ ID NO: 457994 - RNA, 22 nt, Human
gcaaauacauguugagcaccua

SEQ ID NO: 457995 - RNA, 22 nt, Human
ggccucucauguccugggcuuc

SEQ ID NO: 457996 - RNA, 22 nt, Human
ucucucagaggccaggguccug

SEQ ID NO: 457997 - RNA, 22 nt, Human
ugcucagacaagcugaacagua

SEQ ID NO: 457998 - RNA, 17 nt, Human
ggcugcugugcuggugc

SEQ ID NO: 457999 - RNA, 22 nt, Human
uuuccuuugcccaauacauguc

SEQ ID NO: 458000 - RNA, 22 nt, Human
cagcccugccauggagccuccu

SEQ ID NO: 458001 - RNA, 22 nt, Human
cacauuucucuaccucacacaa

SEQ ID NO: 458002 - RNA, 22 nt, Human
ucagcaaugagaacuggcauuu

SEQ ID NO: 458003 - RNA, 22 nt, Human
guccucugcuucaugcccugau

SEQ ID NO: 458004 - RNA, 22 nt, Human
ggcaaaaaccacaauuacuuuu

SEQ ID NO: 458005 - RNA, 22 nt, Human
uaagaacagauaaaguuucccc

SEQ ID NO: 458006 - RNA, 22 nt, Human
agugcugucuccuucccccggg

SEQ ID NO: 458007 - RNA, 22 nt, Human
cugcucuguucccccaucaucu

SEQ ID NO: 458008 - RNA, 22 nt, Human
caguucaggccggcugacucag

SEQ ID NO: 458009 - RNA, 22 nt, Human
cagaggcaggauaagaacugcg

SEQ ID NO: 458010 - RNA, 22 nt, Human
caugugucaaaugauguagcug

SEQ ID NO: 458011 - RNA, 22 nt, Human
uaguggagaguuguuuugugca

SEQ ID NO: 458012 - RNA, 22 nt, Human
ccagcuuuagguugccugccag

SEQ ID NO: 458013 - RNA, 22 nt, Human
ugcagggcacacgcacgggugu

SEQ ID NO: 458014 - RNA, 22 nt, Human
caggagcccagaguccucagcu

SEQ ID NO: 458015 - RNA, 22 nt, Human
ucuucaaagaauuuuaguaauu

SEQ ID NO: 458016 - RNA, 22 nt, Human
cccaguccuaaagcagacgcca

SEQ ID NO: 458017 - RNA, 22 nt, Human
ugcuugagacacauaugaauuu

SEQ ID NO: 458018 - RNA, 19 nt, Human
gcuggggccugaccagaca

SEQ ID NO: 458019 - RNA, 22 nt, Human
aggcaagggggcgccaccuucc

SEQ ID NO: 458020 - RNA, 22 nt, Human
aaugcuuuaauugcauguagug

SEQ ID NO: 458021 - RNA, 19 nt, Human
caagugaagccugggaugg

SEQ ID NO: 458022 - RNA, 22 nt, Human
uugacaaaggaccuugcuauuu

SEQ ID NO: 458023 - RNA, 17 nt, Human
gagaguguauuggaugc

SEQ ID NO: 458024 - RNA, 22 nt, Human
aauuucaagucuugaagaagua

SEQ ID NO: 458025 - RNA, 22 nt, Human
cuggcaggagcauucacagagg

SEQ ID NO: 458026 - RNA, 22 nt, Human
uggcuuccgccgcgggccucgg

SEQ ID NO: 458027 - RNA, 22 nt, Human
aguggggacuuaugccagcauu

SEQ ID NO: 458028 - RNA, 22 nt, Human
ugaggugaccgcagaugggaag

SEQ ID NO: 458029 - RNA, 19 nt, Human
uuagccauccacagugaaa

SEQ ID NO: 458030 - RNA, 17 nt, Human
ugaaggccaugaccacg

SEQ ID NO: 458031 - RNA, 22 nt, Human
aagcaaaagguuacacuucugg

SEQ ID NO: 458032 - RNA, 22 nt, Human
uccugccucuccaugcuaacua

SEQ ID NO: 458033 - RNA, 22 nt, Human
augcaguacauacaaacacuga

SEQ ID NO: 458034 - RNA, 22 nt, Human
ucucaggggauucacuggcacc

SEQ ID NO: 458035 - RNA, 22 nt, Human
cugugugugucugcagcauacu

SEQ ID NO: 458036 - RNA, 22 nt, Human
agccugccuugggcugcuugag

SEQ ID NO: 458037 - RNA, 22 nt, Human
cagugccaugucugagccccua

SEQ ID NO: 458038 - RNA, 22 nt, Human
cucaggaucgcuugcccuaggg

SEQ ID NO: 458039 - RNA, 22 nt, Human
ugggcagggaucucuuuugcaa

SEQ ID NO: 458040 - RNA, 22 nt, Human
gauuuucauuauagcuaguuuc

SEQ ID NO: 458041 - RNA, 22 nt, Human
cagugcagguggcagaggacag

SEQ ID NO: 458042 - RNA, 22 nt, Human
ccaguccagugccaugcauggc

SEQ ID NO: 458043 - RNA, 22 nt, Human
ccuguggcucucuuuggagguc

SEQ ID NO: 458044 - RNA, 22 nt, Human
guuugucuuaauuaggcaucga

SEQ ID NO: 458045 - RNA, 22 nt, Human
cagcuugaaauauuaggagaug

SEQ ID NO: 458046 - RNA, 20 nt, Human
guguuucaugugauacaaug

SEQ ID NO: 458047 - RNA, 22 nt, Human
cagacagcugcuuucuugcugu

SEQ ID NO: 458048 - RNA, 22 nt, Human
uggcucagugaagagauaacuu

SEQ ID NO: 458049 - RNA, 22 nt, Human
agagugaaguucaucgugcagc

SEQ ID NO: 458050 - RNA, 22 nt, Human
ccaggcugagcaugauuggagc

SEQ ID NO: 458051 - RNA, 22 nt, Human
ggcuguggucauuaggagguug

SEQ ID NO: 458052 - RNA, 22 nt, Human
accaggcacuccugaggucuga

SEQ ID NO: 458053 - RNA, 22 nt, Human
gguggcagucuuaagagaucuu

SEQ ID NO: 458054 - RNA, 22 nt, Human
uagcugccagaccauucuuacu

SEQ ID NO: 458055 - RNA, 22 nt, Human
cagagggagcccuccaggagca

SEQ ID NO: 458056 - RNA, 22 nt, Human
ugacagaacagguugggagcaa

SEQ ID NO: 458057 - RNA, 22 nt, Human
ucuggcucaggucagacaggga

SEQ ID NO: 458058 - RNA, 20 nt, Human
ucccaagggcugagaggauc

SEQ ID NO: 458059 - RNA, 22 nt, Human
ccagagaguaaacauuuuccgg

SEQ ID NO: 458060 - RNA, 22 nt, Human
aggggcuguggaaaccaacucu

SEQ ID NO: 458061 - RNA, 22 nt, Human
aagaagaaguguuauuuuuaga

SEQ ID NO: 458062 - RNA, 22 nt, Human
gucucccaucguuugugaggaa

SEQ ID NO: 458063 - RNA, 22 nt, Human
ugaguucucacccauucuucuu

SEQ ID NO: 458064 - RNA, 21 nt, Human
uucaagauauuuaaaaggugg

SEQ ID NO: 458065 - RNA, 22 nt, Human
agcugugggauuugggugugcc

SEQ ID NO: 458066 - RNA, 22 nt, Human
ccaggacuuuaaguccagcacu

SEQ ID NO: 458067 - RNA, 22 nt, Human
ggcugcugaguuggccaggaga

SEQ ID NO: 458068 - RNA, 22 nt, Human
ucacauuugcaauugcauuguu

SEQ ID NO: 458069 - RNA, 22 nt, Human
ccagcugauucgguggugguug

SEQ ID NO: 458070 - RNA, 22 nt, Human
gaggcugauucggggaacagca

SEQ ID NO: 458071 - RNA, 22 nt, Human
cacugaaucucaaggggagggu

SEQ ID NO: 458072 - RNA, 22 nt, Human
uccuucagaggacggcagccag

SEQ ID NO: 458073 - RNA, 22 nt, Human
uccagggagauacuggcugcca

SEQ ID NO: 458074 - RNA, 22 nt, Human
gugacucacacaggccugggcu

SEQ ID NO: 458075 - RNA, 22 nt, Human
cuucucucccuggcacucagac

SEQ ID NO: 458076 - RNA, 22 nt, Human
agggcaguguggugggacugac

SEQ ID NO: 458077 - RNA, 22 nt, Human
cugaagagcucuccuguccccu

SEQ ID NO: 458078 - RNA, 22 nt, Human
auguccuuugcuucucuggucc

SEQ ID NO: 458079 - RNA, 22 nt, Human
ccacagaaaguugucuagagua

SEQ ID NO: 458080 - RNA, 22 nt, Human
agcagaagaaagccacaugacu

SEQ ID NO: 458081 - RNA, 20 nt, Human
aguaggggaaugcaagagca

SEQ ID NO: 458082 - RNA, 22 nt, Human
aggccuggugugccggaugcag

SEQ ID NO: 458083 - RNA, 22 nt, Human
ugggauggcauccugggccuug

SEQ ID NO: 458084 - RNA, 22 nt, Human
ucuguccauuuuccauuuuggc

SEQ ID NO: 458085 - RNA, 22 nt, Human
cagcagugucuccagcaucaca

SEQ ID NO: 458086 - RNA, 22 nt, Human
cccucugccucugaguaggaca

SEQ ID NO: 458087 - RNA, 22 nt, Human
guggcagugugaggauccugcu

SEQ ID NO: 458088 - RNA, 22 nt, Human
aaacaucaauugcaucucccaa

SEQ ID NO: 458089 - RNA, 22 nt, Human
uaucaacauuaauauuuucugg

SEQ ID NO: 458090 - RNA, 19 nt, Human
ccuuugaaucaggacacuu

SEQ ID NO: 458091 - RNA, 22 nt, Human
gggcuacagacaugcucuaagc

SEQ ID NO: 458092 - RNA, 22 nt, Human
acuguggcucaucaggcuggug

SEQ ID NO: 458093 - RNA, 22 nt, Human
agggaagaagcugguaguaggu

SEQ ID NO: 458094 - RNA, 22 nt, Human
aggcugccaaagcuucugucuc

SEQ ID NO: 458095 - RNA, 22 nt, Human
aaguuauugcagcaauccaagu

SEQ ID NO: 458096 - RNA, 22 nt, Human
aggcuggagggcaauggcaaga

SEQ ID NO: 458097 - RNA, 22 nt, Human
ugcugccaggucuugcugucca

SEQ ID NO: 458098 - RNA, 21 nt, Human
uggcucuggguaggagagugc

SEQ ID NO: 458099 - RNA, 22 nt, Human
gugccaaaagcuauaauuuggu

SEQ ID NO: 458100 - RNA, 22 nt, Human
gggcugagccauuugaaccuug

SEQ ID NO: 458101 - RNA, 22 nt, Human
cugagaauuacucugaugagua

SEQ ID NO: 458102 - RNA, 22 nt, Human
gcagggcuguucaggagggugg

SEQ ID NO: 458103 - RNA, 22 nt, Human
uccaggagguuuggaggaagca

SEQ ID NO: 458104 - RNA, 22 nt, Human
ucaguuuugaaaacauugaaug

SEQ ID NO: 458105 - RNA, 22 nt, Human
cagggugcgccacucagaugua

SEQ ID NO: 458106 - RNA, 22 nt, Human
agugaggcuaauaggcaauggu

SEQ ID NO: 458107 - RNA, 22 nt, Human
ggcugccuccucgagacaggau

SEQ ID NO: 458108 - RNA, 22 nt, Human
ugaaggcauugaugaaggaauc

SEQ ID NO: 458109 - RNA, 22 nt, Human
cugucugcuagaacaucuauac

SEQ ID NO: 458110 - RNA, 22 nt, Human
gggaguggguuuggccuaggcc

SEQ ID NO: 458111 - RNA, 22 nt, Human
agggcccucuggcaggccaggc

SEQ ID NO: 458112 - RNA, 22 nt, Human
gcccagcugucuggcagggaug

SEQ ID NO: 458113 - RNA, 22 nt, Human
uucugugcccauuuuaaaaugg

SEQ ID NO: 458114 - RNA, 22 nt, Human
agagaagggccuguauguaauc

SEQ ID NO: 458115 - RNA, 22 nt, Human
ccagccaggcuggcuguggagg

SEQ ID NO: 458116 - RNA, 22 nt, Human
uagaacacuugaccacugcucc

SEQ ID NO: 458117 - RNA, 22 nt, Human
cagcugcuguucaguuuuguuu

SEQ ID NO: 458118 - RNA, 22 nt, Human
uccauaagcagguucuuccuga

SEQ ID NO: 458119 - RNA, 17 nt, Human
acaagcaguggccaugg

SEQ ID NO: 458120 - RNA, 22 nt, Human
gaggcucagggaguauaugaau

SEQ ID NO: 458121 - RNA, 22 nt, Human
gaaggcugaguggguacggagg

SEQ ID NO: 458122 - RNA, 22 nt, Human
uuauuguuuacuaguuugcaga

SEQ ID NO: 458123 - RNA, 22 nt, Human
aaaggccaauaaagacaagcug

SEQ ID NO: 458124 - RNA, 22 nt, Human
aauaaacugcucaauugcauca

SEQ ID NO: 458125 - RNA, 22 nt, Human
cucaucugauaaaucacucuua

SEQ ID NO: 458126 - RNA, 22 nt, Human
auuucucaguuccuacuguuua

SEQ ID NO: 458127 - RNA, 23 nt, Human
cuggggcuuucaaaucugggcag

SEQ ID NO: 458128 - RNA, 22 nt, Human
cugcuucuaagaaccugcagcu

SEQ ID NO: 458129 - RNA, 22 nt, Human
cagcaucuaaucuucaugccgg

SEQ ID NO: 458130 - RNA, 22 nt, Human
acauaccauacauggugagaug

SEQ ID NO: 458131 - RNA, 22 nt, Human
auuuccaaucucugcauauggg

SEQ ID NO: 458132 - RNA, 20 nt, Human
gccuggcacccggggcuggc

SEQ ID NO: 458133 - RNA, 22 nt, Human
augcacagacccaaaggccauc

SEQ ID NO: 458134 - RNA, 22 nt, Human
ucugaggcauaaccuguucugc

SEQ ID NO: 458135 - RNA, 22 nt, Human
cugggagcggcugucacugguu

SEQ ID NO: 458136 - RNA, 22 nt, Human
agggcuccaggggaccaucagu

SEQ ID NO: 458137 - RNA, 22 nt, Human
ugcaguggcgccaucucagcuc

SEQ ID NO: 458138 - RNA, 22 nt, Human
uaacagcucuguguggcuguaa

SEQ ID NO: 458139 - RNA, 22 nt, Human
aucugaagggaaguggaaggca

SEQ ID NO: 458140 - RNA, 22 nt, Human
gaggcagugucgguggcaggau

SEQ ID NO: 458141 - RNA, 22 nt, Human
gauggcaggcaggugaguagag

SEQ ID NO: 458142 - RNA, 22 nt, Human
aggccacaguacuuugcagacc

SEQ ID NO: 458143 - RNA, 22 nt, Human
augccaggccccacgcugggca

SEQ ID NO: 458144 - RNA, 20 nt, Human
gccaacgcgcuggggcugcc

SEQ ID NO: 458145 - RNA, 22 nt, Human
aggcucagagagcuguguccau

SEQ ID NO: 458146 - RNA, 22 nt, Human
ugggcagcauccuccacaguca

SEQ ID NO: 458147 - RNA, 22 nt, Human
augccagucaaagaagaugaca

SEQ ID NO: 458148 - RNA, 22 nt, Human
acucugaaugugcauguaaauc

SEQ ID NO: 458149 - RNA, 22 nt, Human
guggcucuccauugacauggaa

SEQ ID NO: 458150 - RNA, 18 nt, Human
ucucuuuuccccucauug

SEQ ID NO: 458151 - RNA, 22 nt, Human
gagucugaugucccccaggcca

SEQ ID NO: 458152 - RNA, 22 nt, Human
uggccucuuacgacauagccuu

SEQ ID NO: 458153 - RNA, 22 nt, Human
auaaacagcuccauuuagugcc

SEQ ID NO: 458154 - RNA, 20 nt, Human
cugugccuaaaccuccgggu

SEQ ID NO: 458155 - RNA, 22 nt, Human
caagagcuggguggcaagcuag

SEQ ID NO: 458156 - RNA, 22 nt, Human
gaggaggcacuaguuagugaca

SEQ ID NO: 458157 - RNA, 22 nt, Human
uccauggggcccaggaugagag

SEQ ID NO: 458158 - RNA, 22 nt, Human
uuccucagacccucauugugag

SEQ ID NO: 458159 - RNA, 22 nt, Human
acaaaugcagcauaaagugaac

SEQ ID NO: 458160 - RNA, 22 nt, Human
cccagguguuuguggcagaggu

SEQ ID NO: 458161 - RNA, 22 nt, Human
gggggacuaacuggauccugga

SEQ ID NO: 458162 - RNA, 22 nt, Human
gcugucccgcugacuuccagcu

SEQ ID NO: 458163 - RNA, 22 nt, Human
gggggacuggaccguccugggu

SEQ ID NO: 458164 - RNA, 22 nt, Human
aggugagugugacugcaagaga

SEQ ID NO: 458165 - RNA, 22 nt, Human
aagcagggugucuugacccaug

SEQ ID NO: 458166 - RNA, 22 nt, Human
ucagaggagccaaaguucugag

SEQ ID NO: 458167 - RNA, 22 nt, Human
aggacugggugcagagggcauc

SEQ ID NO: 458168 - RNA, 22 nt, Human
cuggagccuagguugaccuggg

SEQ ID NO: 458169 - RNA, 22 nt, Human
ccaggcuggagugcaauggugc

SEQ ID NO: 458170 - RNA, 17 nt, Human
ggccuguguggcugcag

SEQ ID NO: 458171 - RNA, 22 nt, Human
cugaggcugggcauggggucca

SEQ ID NO: 458172 - RNA, 22 nt, Human
uuauucagauuggcuacaggau

SEQ ID NO: 458173 - RNA, 22 nt, Human
ugcagggccagacuggguugga

SEQ ID NO: 458174 - RNA, 20 nt, Human
uuccuguauacaaagaguuc

SEQ ID NO: 458175 - RNA, 22 nt, Human
agucagugaaaacuagaauguu

SEQ ID NO: 458176 - RNA, 22 nt, Human
cagagacaguuucacagggucu

SEQ ID NO: 458177 - RNA, 22 nt, Human
ucugccuggguguggagcagag

SEQ ID NO: 458178 - RNA, 17 nt, Human
ugccagccugucccagg

SEQ ID NO: 458179 - RNA, 18 nt, Human
guccugagcucugcugua

SEQ ID NO: 458180 - RNA, 22 nt, Human
agggucugacaaugugacuuag

SEQ ID NO: 458181 - RNA, 22 nt, Human
gaggcucacugggcaaagacuc

SEQ ID NO: 458182 - RNA, 19 nt, Human
ccagguggaacugagguag

SEQ ID NO: 458183 - RNA, 22 nt, Human
acauaauggacaauaaugcauc

SEQ ID NO: 458184 - RNA, 22 nt, Human
aggaccaguaugagagcaucug

SEQ ID NO: 458185 - RNA, 22 nt, Human
acugcaucugaaacauggguca

SEQ ID NO: 458186 - RNA, 22 nt, Human
agagucugaggcagcugcagcc

SEQ ID NO: 458187 - RNA, 22 nt, Human
caaagcucaugcucuuagccau

SEQ ID NO: 458188 - RNA, 22 nt, Human
cuuuuaaugggagcaguauuug

SEQ ID NO: 458189 - RNA, 16 nt, Human
cuacccagugagaagg

SEQ ID NO: 458190 - RNA, 22 nt, Human
aggcuuguggauuggagcgagu

SEQ ID NO: 458191 - RNA, 23 nt, Human
uggugccucagaagcagugggcu

SEQ ID NO: 458192 - RNA, 22 nt, Human
gcaaaugcuaaaguguagagac

SEQ ID NO: 458193 - RNA, 22 nt, Human
caguggaauacgagcagauguc

SEQ ID NO: 458194 - RNA, 22 nt, Human
ggcaggagggcggacaaugacc

SEQ ID NO: 458195 - RNA, 22 nt, Human
uugucugaaagaucauuacauu

SEQ ID NO: 458196 - RNA, 22 nt, Human
uccaguggcaccuuggcccuca

SEQ ID NO: 458197 - RNA, 22 nt, Human
ggccagagagcagccaggauuc

SEQ ID NO: 458198 - RNA, 22 nt, Human
cagaugaggcaaccucauugcu

SEQ ID NO: 458199 - RNA, 22 nt, Human
agucucugccagcuuguccucu

SEQ ID NO: 458200 - RNA, 22 nt, Human
caagaacaguuugccaaauugg

SEQ ID NO: 458201 - RNA, 22 nt, Human
uagcuuuagugaaaaauaucag

SEQ ID NO: 458202 - RNA, 22 nt, Human
ggaugcaggggcagcagagccu

SEQ ID NO: 458203 - RNA, 22 nt, Human
aggccugaggaccuucuggagg

SEQ ID NO: 458204 - RNA, 20 nt, Human
ucacaggggaccaggagcag

SEQ ID NO: 458205 - RNA, 22 nt, Human
cacauaauaaauguuccugaug

SEQ ID NO: 458206 - RNA, 18 nt, Human
ucagagagcagcuuuauu

SEQ ID NO: 458207 - RNA, 22 nt, Human
uccaugggaagauuuugagugg

SEQ ID NO: 458208 - RNA, 22 nt, Human
caugucuggguauaugcauaug

SEQ ID NO: 458209 - RNA, 22 nt, Human
gaggagcacaugaggcugaggg

SEQ ID NO: 458210 - RNA, 23 nt, Human
auauuagggagauuagcccucua

SEQ ID NO: 458211 - RNA, 17 nt, Human
ugguggcuggagucagg

SEQ ID NO: 458212 - RNA, 17 nt, Human
agcacuaaaaugcuucc

SEQ ID NO: 458213 - RNA, 22 nt, Human
guccucuggugaaagcauuccc

SEQ ID NO: 458214 - RNA, 22 nt, Human
acauuucuuccuaauuaucccu

SEQ ID NO: 458215 - RNA, 22 nt, Human
uaucuacuccucuuucagaugc

SEQ ID NO: 458216 - RNA, 22 nt, Human
acagcagcaauagcagugacau

SEQ ID NO: 458217 - RNA, 22 nt, Human
uagcugugagcacccaggcugu

SEQ ID NO: 458218 - RNA, 22 nt, Human
uuagucaauagugaauauagag

SEQ ID NO: 458219 - RNA, 22 nt, Human
agaggagguccuuuucugaugu

SEQ ID NO: 458220 - RNA, 22 nt, Human
ucccagagugagccaggggcag

SEQ ID NO: 458221 - RNA, 22 nt, Human
cagccugcccuggaagcccagc

SEQ ID NO: 458222 - RNA, 22 nt, Human
cugggcacuuuggggagccuac

SEQ ID NO: 458223 - RNA, 22 nt, Human
ucacauuuguuccucugcacuu

SEQ ID NO: 458224 - RNA, 22 nt, Human
ggagccagagggaugcaguuga

SEQ ID NO: 458225 - RNA, 22 nt, Human
ucugaaggucugagaaccagga

SEQ ID NO: 458226 - RNA, 22 nt, Human
auuuucauggcuucugcucagu

SEQ ID NO: 458227 - RNA, 22 nt, Human
uauugacagagggucagaagag

SEQ ID NO: 458228 - RNA, 21 nt, Human
agcugggccucagccugcagu

SEQ ID NO: 458229 - RNA, 20 nt, Human
gcccacucuaauccacuguc

SEQ ID NO: 458230 - RNA, 19 nt, Human
ucuggcuccugccaggcug

SEQ ID NO: 458231 - RNA, 22 nt, Human
gcucucugccuuucucaaugac

SEQ ID NO: 458232 - RNA, 22 nt, Human
uuauuauugugaccugagaaug

SEQ ID NO: 458233 - RNA, 22 nt, Human
aucugguuuggggauccuugug

SEQ ID NO: 458234 - RNA, 22 nt, Human
cggcugagcagugcugauggaa

SEQ ID NO: 458235 - RNA, 22 nt, Human
agcuggagaucaugcugauacu

SEQ ID NO: 458236 - RNA, 22 nt, Human
uggcugaguuucaugcaucaug

SEQ ID NO: 458237 - RNA, 22 nt, Human
augucuuucucacagccaguuc

SEQ ID NO: 458238 - RNA, 22 nt, Human
ugcuuccagcucucuguaaggu

SEQ ID NO: 458239 - RNA, 22 nt, Human
ugugcagggaagggcaugcuau

SEQ ID NO: 458240 - RNA, 22 nt, Human
aggggcugcuggguccgccccu

SEQ ID NO: 458241 - RNA, 22 nt, Human
guggccaggccgacugccaggc

SEQ ID NO: 458242 - RNA, 22 nt, Human
acugaaagauaaaucaguuagc

SEQ ID NO: 458243 - RNA, 22 nt, Human
gccagggaggcuguaggguccu

SEQ ID NO: 458244 - RNA, 22 nt, Human
aaaguguaaggaauuuaaguaa

SEQ ID NO: 458245 - RNA, 22 nt, Human
ucccagaguucaaugggaaggu

SEQ ID NO: 458246 - RNA, 22 nt, Human
agcaaagucaguggaaccaucc

SEQ ID NO: 458247 - RNA, 22 nt, Human
accucugcaaugcaaugucaug

SEQ ID NO: 458248 - RNA, 22 nt, Human
ccccagcucagugcagggacau

SEQ ID NO: 458249 - RNA, 22 nt, Human
uauuagguaaaggacuugcagg

SEQ ID NO: 458250 - RNA, 22 nt, Human
cuccuucccuucaaguguuccu

SEQ ID NO: 458251 - RNA, 22 nt, Human
accagggcccgggagagcucuc

SEQ ID NO: 458252 - RNA, 22 nt, Human
auaauauaauccuacuucccau

SEQ ID NO: 458253 - RNA, 22 nt, Human
aagugacaaaaggguauccaaa

SEQ ID NO: 458254 - RNA, 22 nt, Human
cagcagcaaaucuagaagagga

SEQ ID NO: 458255 - RNA, 22 nt, Human
aacucagucauaaagcgaaugc

SEQ ID NO: 458256 - RNA, 21 nt, Human
cacucaggguaugugccaggc

SEQ ID NO: 458257 - RNA, 22 nt, Human
gcucaagagagaugcaguucuu

SEQ ID NO: 458258 - RNA, 22 nt, Human
ggugggcaacauuuggccugag

SEQ ID NO: 458259 - RNA, 22 nt, Human
uuugcauuauauuuauagaaga

SEQ ID NO: 458260 - RNA, 23 nt, Human
ggcaccaggccauggagcgggag

SEQ ID NO: 458261 - RNA, 22 nt, Human
ccagcuggaagagugcagaacu

SEQ ID NO: 458262 - RNA, 22 nt, Human
gagcuuccacucuagaaggagu

SEQ ID NO: 458263 - RNA, 22 nt, Human
ccagucagccaagcugcagcgg

SEQ ID NO: 458264 - RNA, 22 nt, Human
uggaaagagguagaggaucugg

SEQ ID NO: 458265 - RNA, 22 nt, Human
cccaaggccuucaagccagcuc

SEQ ID NO: 458266 - RNA, 22 nt, Human
uccugcagccuugggcuggagc

SEQ ID NO: 458267 - RNA, 22 nt, Human
aggcucaguucuguggugagcc

SEQ ID NO: 458268 - RNA, 21 nt, Human
ccagcugucuguccuuaggca

SEQ ID NO: 458269 - RNA, 22 nt, Human
aaaugcacucugcuucugugac

SEQ ID NO: 458270 - RNA, 22 nt, Human
gcagccagaagacucagaacaa

SEQ ID NO: 458271 - RNA, 22 nt, Human
agccaggccagcugucuugagu

SEQ ID NO: 458272 - RNA, 22 nt, Human
gaugaggcucaugcacccugcg

SEQ ID NO: 458273 - RNA, 22 nt, Human
acugugcaugaaccgaaacaaa

SEQ ID NO: 458274 - RNA, 22 nt, Human
guuuacaaauauuuuaaauggu

SEQ ID NO: 458275 - RNA, 22 nt, Human
ucccagggugcgccugcccucg

SEQ ID NO: 458276 - RNA, 22 nt, Human
accugagggcccaaacuuggua

SEQ ID NO: 458277 - RNA, 22 nt, Human
ggccugagucccaccuggcugu

SEQ ID NO: 458278 - RNA, 22 nt, Human
aaacuugauuuagaacuaaggc

SEQ ID NO: 458279 - RNA, 22 nt, Human
gcucccaggaagagaagggcca

SEQ ID NO: 458280 - RNA, 22 nt, Human
uaucuuuagaggaagagaaucu

SEQ ID NO: 458281 - RNA, 22 nt, Human
cacuguacccauuuaaauaaau

SEQ ID NO: 458282 - RNA, 22 nt, Human
gacaagacaugugaugacauca

SEQ ID NO: 458283 - RNA, 22 nt, Human
aggagagucuugagucacuggu

SEQ ID NO: 458284 - RNA, 22 nt, Human
acagagcaguucuggagcuggc

SEQ ID NO: 458285 - RNA, 22 nt, Human
cacaggguuguucugaggauuc

SEQ ID NO: 458286 - RNA, 22 nt, Human
uacaguaacauguuguacaagc

SEQ ID NO: 458287 - RNA, 22 nt, Human
caaggcugcugcgggucgcacc

SEQ ID NO: 458288 - RNA, 22 nt, Human
aggggccugguuggccucuguu

SEQ ID NO: 458289 - RNA, 22 nt, Human
accccagcucugagccacacca

SEQ ID NO: 458290 - RNA, 22 nt, Human
auaugucgcuacaucauuagau

SEQ ID NO: 458291 - RNA, 22 nt, Human
gacagccucaugaggagcaaaa

SEQ ID NO: 458292 - RNA, 22 nt, Human
uaagaacaucuguccccagauu

SEQ ID NO: 458293 - RNA, 22 nt, Human
ucuuuccucugagcuccuguag

SEQ ID NO: 458294 - RNA, 22 nt, Human
ugacccugcuucuuggugcagg

SEQ ID NO: 458295 - RNA, 22 nt, Human
ugacagcauaacacuggucuug

SEQ ID NO: 458296 - RNA, 22 nt, Human
ggcagccaugucccagggcuuc

SEQ ID NO: 458297 - RNA, 22 nt, Human
ucucugaagauauuuauuauua

SEQ ID NO: 458298 - RNA, 22 nt, Human
uaagacauuugaaaugugaucc

SEQ ID NO: 458299 - RNA, 22 nt, Human
gcacacacaugugaguacaugc

SEQ ID NO: 458300 - RNA, 23 nt, Human
cuggcucuguagguggcauccuu

SEQ ID NO: 458301 - RNA, 23 nt, Human
uaagaacagacaagcauuuacau

SEQ ID NO: 458302 - RNA, 22 nt, Human
cugggccagcaacugcaaugga

SEQ ID NO: 458303 - RNA, 22 nt, Human
uggccuuccuggugacucauga

SEQ ID NO: 458304 - RNA, 22 nt, Human
cugagcuggucuauggacuugg

SEQ ID NO: 458305 - RNA, 21 nt, Human
uaaggccaagucuauuucugu

SEQ ID NO: 458306 - RNA, 21 nt, Human
agaugaggauacugaggccua

SEQ ID NO: 458307 - RNA, 22 nt, Human
gggcugagaauucagcuuuccu

SEQ ID NO: 458308 - RNA, 21 nt, Human
agccugcaauguagguaccgg

SEQ ID NO: 458309 - RNA, 22 nt, Human
ugagccuggccugcagagacca

SEQ ID NO: 458310 - RNA, 23 nt, Human
cagggcugggcuugguguuaggc

SEQ ID NO: 458311 - RNA, 22 nt, Human
agggacacugaugagaaauucu

SEQ ID NO: 458312 - RNA, 22 nt, Human
cuucauuaaugucuauaaguuu

SEQ ID NO: 458313 - RNA, 22 nt, Human
ggucucagcaguugcuuugacu

SEQ ID NO: 458314 - RNA, 22 nt, Human
gcugagaggcacuaucuccgga

SEQ ID NO: 458315 - RNA, 22 nt, Human
aaagacugcaaaaacgcacaga

SEQ ID NO: 458316 - RNA, 22 nt, Human
ugaggcucaaggucugguggag

SEQ ID NO: 458317 - RNA, 21 nt, Human
cucuggaggcaagggagagug

SEQ ID NO: 458318 - RNA, 22 nt, Human
ccagaaaaugcagaacauagaa

SEQ ID NO: 458319 - RNA, 22 nt, Human
ugcacacaaguuggagaaugaa

SEQ ID NO: 458320 - RNA, 22 nt, Human
gggcagagguucaacuucaaca

SEQ ID NO: 458321 - RNA, 22 nt, Human
auggauaagaacaaauaucuga

SEQ ID NO: 458322 - RNA, 22 nt, Human
uguccuuuuggcugucuauggu

SEQ ID NO: 458323 - RNA, 22 nt, Human
aaguugaaugcguacgugacau

SEQ ID NO: 458324 - RNA, 22 nt, Human
ucugucacucccugaugaugaa

SEQ ID NO: 458325 - RNA, 22 nt, Human
ugugccugucacccucagagag

SEQ ID NO: 458326 - RNA, 22 nt, Human
aaggaccuauauugucagagga

SEQ ID NO: 458327 - RNA, 22 nt, Human
uugcucagcacuggagccagcu

SEQ ID NO: 458328 - RNA, 22 nt, Human
uaggacaggugaggggcugugg

SEQ ID NO: 458329 - RNA, 20 nt, Human
ggagaugcagcccaggugcc

SEQ ID NO: 458330 - RNA, 22 nt, Human
aaaaagguugauccagauuagg

SEQ ID NO: 458331 - RNA, 22 nt, Human
aggcugaggggcgagggacccu

SEQ ID NO: 458332 - RNA, 22 nt, Human
cuuaaauuuucaucuacaagaa

SEQ ID NO: 458333 - RNA, 22 nt, Human
aaaauguguuuaugcauuucgu

SEQ ID NO: 458334 - RNA, 22 nt, Human
aaggcaguaggaucuuccacag

SEQ ID NO: 458335 - RNA, 22 nt, Human
aggauccugcgcuuugggggag

SEQ ID NO: 458336 - RNA, 22 nt, Human
ugaggcagugugagauaauaaa

SEQ ID NO: 458337 - RNA, 20 nt, Human
uucaggauucuagaccacac

SEQ ID NO: 458338 - RNA, 22 nt, Human
ugucuuuagaaagaagcagaca

SEQ ID NO: 458339 - RNA, 22 nt, Human
gauuuuucaguauaaaauauau

SEQ ID NO: 458340 - RNA, 22 nt, Human
ccuguguggccaggcuggaguc

SEQ ID NO: 458341 - RNA, 22 nt, Human
gacauaauccuccucaccuacu

SEQ ID NO: 458342 - RNA, 22 nt, Human
aagggcagaaagggacgcuuug

SEQ ID NO: 458343 - RNA, 22 nt, Human
aggccucacauugggcuucaag

SEQ ID NO: 458344 - RNA, 22 nt, Human
aucuuccuucacuuucucccac

SEQ ID NO: 458345 - RNA, 22 nt, Human
gggauuugugggauggccagug

SEQ ID NO: 458346 - RNA, 22 nt, Human
ucaggcugcccguucagggcuc

SEQ ID NO: 458347 - RNA, 19 nt, Human
ucugaaguccagggcauac

SEQ ID NO: 458348 - RNA, 22 nt, Human
uuuuugcaccaaccuaauagaa

SEQ ID NO: 458349 - RNA, 21 nt, Human
gacaggcaaggagucacuuag

SEQ ID NO: 458350 - RNA, 22 nt, Human
aucugccugagucuagguuuuc

SEQ ID NO: 458351 - RNA, 22 nt, Human
gcucucagguacaaagcugugu

SEQ ID NO: 458352 - RNA, 22 nt, Human
acugaaauacugcucuuggauu

SEQ ID NO: 458353 - RNA, 22 nt, Human
aaggccagcuuguagggcuggu

SEQ ID NO: 458354 - RNA, 22 nt, Human
uggcuggacagugggcagugga

SEQ ID NO: 458355 - RNA, 22 nt, Human
cccugcagcuuuugcauaguca

SEQ ID NO: 458356 - RNA, 22 nt, Human
gagaagguggaccugaaggagc

SEQ ID NO: 458357 - RNA, 22 nt, Human
acugcuuuucuaagauucugug

SEQ ID NO: 458358 - RNA, 23 nt, Human
agagcuuucuaaaauguaaaucu

SEQ ID NO: 458359 - RNA, 22 nt, Human
uggccugcagaggcuguggggc

SEQ ID NO: 458360 - RNA, 22 nt, Human
cauuuaaucuggcucaugagca

SEQ ID NO: 458361 - RNA, 22 nt, Human
cugcugcaggaugggcacucug

SEQ ID NO: 458362 - RNA, 22 nt, Human
caaagugcuaggauuacaggcc

SEQ ID NO: 458363 - RNA, 22 nt, Human
ugucaccaugccagcuucugcc

SEQ ID NO: 458364 - RNA, 22 nt, Human
aaacucuggagauguuuaugca

SEQ ID NO: 458365 - RNA, 22 nt, Human
gcaggaaagguugagacuuugc

SEQ ID NO: 458366 - RNA, 22 nt, Human
gcaaguacaaacgcaucggcug

SEQ ID NO: 458367 - RNA, 22 nt, Human
uaagccacuagucuguuaugaa

SEQ ID NO: 458368 - RNA, 22 nt, Human
ucucacuuuccagacuuuucaa

SEQ ID NO: 458369 - RNA, 22 nt, Human
gaauucuuuucuuucugaaagu

SEQ ID NO: 458370 - RNA, 22 nt, Human
uggagcagggcaucacugugcg

SEQ ID NO: 458371 - RNA, 22 nt, Human
caggcacuucugcugcuugucu

SEQ ID NO: 458372 - RNA, 22 nt, Human
uuucuuucaauucuccuaaugc

SEQ ID NO: 458373 - RNA, 22 nt, Human
cuggcagcgguuugcagccugg

SEQ ID NO: 458374 - RNA, 22 nt, Human
caggggcucugggugaugugag

SEQ ID NO: 458375 - RNA, 22 nt, Human
gaauuguagagggaacagaagc

SEQ ID NO: 458376 - RNA, 22 nt, Human
cagcuuucaucagugacacuca

SEQ ID NO: 458377 - RNA, 19 nt, Human
ucaaagucugagucacuuu

SEQ ID NO: 458378 - RNA, 22 nt, Human
auuucauugaaguuaauucuuc

SEQ ID NO: 458379 - RNA, 22 nt, Human
gccucugcgccucagccgaccu

SEQ ID NO: 458380 - RNA, 21 nt, Human
agugaaauugcaucagaggga

SEQ ID NO: 458381 - RNA, 22 nt, Human
ucuggcucaggagcuguguuca

SEQ ID NO: 458382 - RNA, 18 nt, Human
uguagagccagguuugcc

SEQ ID NO: 458383 - RNA, 22 nt, Human
agaaauuccuaagguacacaag

SEQ ID NO: 458384 - RNA, 22 nt, Human
ugcugucccccgugucugggcu

SEQ ID NO: 458385 - RNA, 22 nt, Human
acaguggaagcaugaugcuauc

SEQ ID NO: 458386 - RNA, 22 nt, Human
gaggaggcuaagugggcucugg

SEQ ID NO: 458387 - RNA, 22 nt, Human
uugggaaggcguggaagcagaa

SEQ ID NO: 458388 - RNA, 22 nt, Human
accagaguaauguguggaaauu

SEQ ID NO: 458389 - RNA, 22 nt, Human
acagggccagccugggaccugg

SEQ ID NO: 458390 - RNA, 20 nt, Human
cgcccaggagggcccaugug

SEQ ID NO: 458391 - RNA, 23 nt, Human
ccacagagcugccaauuccugug

SEQ ID NO: 458392 - RNA, 22 nt, Human
uucuaccauugggaaaacagcc

SEQ ID NO: 458393 - RNA, 22 nt, Human
gugccugccccacuccucagca

SEQ ID NO: 458394 - RNA, 22 nt, Human
cuguuauuuagaacauggaauc

SEQ ID NO: 458395 - RNA, 22 nt, Human
cugucauuuaagacauucugga

SEQ ID NO: 458396 - RNA, 22 nt, Human
cucaggaugcaauuccaucaag

SEQ ID NO: 458397 - RNA, 20 nt, Human
gucagaggacccuagagcga

SEQ ID NO: 458398 - RNA, 18 nt, Human
acauacauucugucugca

SEQ ID NO: 458399 - RNA, 22 nt, Human
accauuugacucucuaaggaua

SEQ ID NO: 458400 - RNA, 22 nt, Human
cccagacugcagagcgggcaga

SEQ ID NO: 458401 - RNA, 22 nt, Human
acacugugucuagcauuuuaca

SEQ ID NO: 458402 - RNA, 22 nt, Human
ggguaccaagcugcuugggggc

SEQ ID NO: 458403 - RNA, 22 nt, Human
ggcucccaggagggccuggagg

SEQ ID NO: 458404 - RNA, 22 nt, Human
ugacacagauuagagacauacc

SEQ ID NO: 458405 - RNA, 22 nt, Human
caucuuuguaacuuccacauaa

SEQ ID NO: 458406 - RNA, 22 nt, Human
ccagagagggcgccaccuggag

SEQ ID NO: 458407 - RNA, 22 nt, Human
agcagccaaaugaagauuuuac

SEQ ID NO: 458408 - RNA, 22 nt, Human
cagagccagcuguccuuggcau

SEQ ID NO: 458409 - RNA, 22 nt, Human
uugaagauggaucgccacucuc

SEQ ID NO: 458410 - RNA, 20 nt, Human
gucuccacuggggguuaacc

SEQ ID NO: 458411 - RNA, 22 nt, Human
gagcagagacaguacaacuggc

SEQ ID NO: 458412 - RNA, 22 nt, Human
cagagggcucggcggccgcucc

SEQ ID NO: 458413 - RNA, 22 nt, Human
ucucagagaggggccgggccuu

SEQ ID NO: 458414 - RNA, 22 nt, Human
gauuuauuggucuuucauuggu

SEQ ID NO: 458415 - RNA, 22 nt, Human
auuuucaucgcuagguuggccu

SEQ ID NO: 458416 - RNA, 22 nt, Human
aagagcugcccaaggugaacag

SEQ ID NO: 458417 - RNA, 22 nt, Human
ugccucagcugaggccgcucca

SEQ ID NO: 458418 - RNA, 22 nt, Human
uuugaaagcaccauuugaguag

SEQ ID NO: 458419 - RNA, 22 nt, Human
gaacagaagaggcuggugccac

SEQ ID NO: 458420 - RNA, 22 nt, Human
gcugucugacuccaaguuggag

SEQ ID NO: 458421 - RNA, 22 nt, Human
cuggagugauacucagaaugug

SEQ ID NO: 458422 - RNA, 22 nt, Human
uuucauaugggcauuggcaaua

SEQ ID NO: 458423 - RNA, 23 nt, Human
acuuaaaugguucuuuaucucag

SEQ ID NO: 458424 - RNA, 18 nt, Human
agucuucugauccauuuu

SEQ ID NO: 458425 - RNA, 22 nt, Human
uccauuuuagaagaaaauccac

SEQ ID NO: 458426 - RNA, 22 nt, Human
cugcugcucagugucaucaugu

SEQ ID NO: 458427 - RNA, 22 nt, Human
uggagcuggaauuucugggccu

SEQ ID NO: 458428 - RNA, 20 nt, Human
agaauucuuacccuuugaug

SEQ ID NO: 458429 - RNA, 22 nt, Human
ugcugugguucccagaguggau

SEQ ID NO: 458430 - RNA, 22 nt, Human
gcuggcagaauuucuucuugcu

SEQ ID NO: 458431 - RNA, 22 nt, Human
gagcucauucauucauugccug

SEQ ID NO: 458432 - RNA, 22 nt, Human
ccagaggugccacagaaagagc

SEQ ID NO: 458433 - RNA, 22 nt, Human
agcugagagguggcaagcugua

SEQ ID NO: 458434 - RNA, 22 nt, Human
ggcucagaccucccagcuccag

SEQ ID NO: 458435 - RNA, 22 nt, Human
guggugcauccuugaguaagcu

SEQ ID NO: 458436 - RNA, 22 nt, Human
caggauggucagaugcauuguc

SEQ ID NO: 458437 - RNA, 17 nt, Human
cagacagauauccuggg

SEQ ID NO: 458438 - RNA, 22 nt, Human
aaggaaagacauauaaaugacu

SEQ ID NO: 458439 - RNA, 22 nt, Human
ucugagaguagagcugccucuu

SEQ ID NO: 458440 - RNA, 22 nt, Human
ugggcaggauaauaucucaugu

SEQ ID NO: 458441 - RNA, 22 nt, Human
ggggauggauuccgggucccug

SEQ ID NO: 458442 - RNA, 22 nt, Human
uguucauuuggcccuuuuguau

SEQ ID NO: 458443 - RNA, 22 nt, Human
uuucauugucaauaaacuguau

SEQ ID NO: 458444 - RNA, 17 nt, Human
ggcaccagacggagagu

SEQ ID NO: 458445 - RNA, 21 nt, Human
gggcgaggccugauguggcuc

SEQ ID NO: 458446 - RNA, 22 nt, Human
uagaacagaguuccagugauca

SEQ ID NO: 458447 - RNA, 22 nt, Human
ccugucugcggaggaguggaag

SEQ ID NO: 458448 - RNA, 22 nt, Human
gcugucugcugugcacugagca

SEQ ID NO: 458449 - RNA, 22 nt, Human
caugagauaauuuuucuccagu

SEQ ID NO: 458450 - RNA, 22 nt, Human
augucccaagauacagcuagag

SEQ ID NO: 458451 - RNA, 22 nt, Human
aaggcucccucuucucgagugu

SEQ ID NO: 458452 - RNA, 21 nt, Human
guagggacagagaguugguga

SEQ ID NO: 458453 - RNA, 21 nt, Human
cugcucuggggaccggcugug

SEQ ID NO: 458454 - RNA, 22 nt, Human
uagcaggguccaaugugaggca

SEQ ID NO: 458455 - RNA, 22 nt, Human
gaagccagcaguggagaaagga

SEQ ID NO: 458456 - RNA, 22 nt, Human
aaugguuuaacauaugcuugag

SEQ ID NO: 458457 - RNA, 22 nt, Human
agaggcaguauacaauccgagc

SEQ ID NO: 458458 - RNA, 22 nt, Human
gccaggcagcaggaagccagug

SEQ ID NO: 458459 - RNA, 22 nt, Human
gggaucagcaagccacugcacc

SEQ ID NO: 458460 - RNA, 22 nt, Human
uaccuuggguugaguucauucu

SEQ ID NO: 458461 - RNA, 22 nt, Human
gucacacuagggccaaguggag

SEQ ID NO: 458462 - RNA, 22 nt, Human
uucaagaucuuccaaaggauac

SEQ ID NO: 458463 - RNA, 22 nt, Human
gugugcaguagagaaagagcag

SEQ ID NO: 458464 - RNA, 22 nt, Human
ucuaauccuugcuaccugggug

SEQ ID NO: 458465 - RNA, 22 nt, Human
agcagcucaaagccugcaagga

SEQ ID NO: 458466 - RNA, 22 nt, Human
agggcagagacaugcuuccuga

SEQ ID NO: 458467 - RNA, 19 nt, Human
cuggcagccugucuguguc

SEQ ID NO: 458468 - RNA, 22 nt, Human
gagcuguccuaccaggaguccu

SEQ ID NO: 458469 - RNA, 21 nt, Human
ugaagccugaggcauagcccc

SEQ ID NO: 458470 - RNA, 22 nt, Human
uccuggagcuuccuucauggua

SEQ ID NO: 458471 - RNA, 22 nt, Human
uccagccaugcaugacaaucac

SEQ ID NO: 458472 - RNA, 22 nt, Human
gaaaugcauaaucuuaguagau

SEQ ID NO: 458473 - RNA, 22 nt, Human
gagcuuuaagggcacuggucuu

SEQ ID NO: 458474 - RNA, 22 nt, Human
uggaagaaggcagagaggcauu

SEQ ID NO: 458475 - RNA, 20 nt, Human
uccaugaguuagagacuaua

SEQ ID NO: 458476 - RNA, 22 nt, Human
ccucugagaccagcucugcacc

SEQ ID NO: 458477 - RNA, 22 nt, Human
cuugcaggauuuugcugcugua

SEQ ID NO: 458478 - RNA, 22 nt, Human
uagauuucgcugcaucucaauc

SEQ ID NO: 458479 - RNA, 22 nt, Human
uccuccucuaucagacagugcc

SEQ ID NO: 458480 - RNA, 22 nt, Human
uuucauguuuauggaaaaugag

SEQ ID NO: 458481 - RNA, 22 nt, Human
aggcaguguauugcuagcggcu

SEQ ID NO: 458482 - RNA, 22 nt, Human
agcagggcaguuaaaggguccu

SEQ ID NO: 458483 - RNA, 22 nt, Human
gugcuaggauuacaggcauggg

SEQ ID NO: 458484 - RNA, 22 nt, Human
accccagaggcggaggcugcag

SEQ ID NO: 458485 - RNA, 22 nt, Human
gcucaggaaaacagucuaguaa

SEQ ID NO: 458486 - RNA, 22 nt, Human
gagcagugagugaauguugccu

SEQ ID NO: 458487 - RNA, 22 nt, Human
agggccagcccauaaugccaaa

SEQ ID NO: 458488 - RNA, 22 nt, Human
gccugcagccucagagaauuuu

SEQ ID NO: 458489 - RNA, 18 nt, Human
gagaggagccagaauuuu

SEQ ID NO: 458490 - RNA, 20 nt, Human
cucucuggaaggugggagcc

SEQ ID NO: 458491 - RNA, 22 nt, Human
cagggcuagugacaccccaguc

SEQ ID NO: 458492 - RNA, 22 nt, Human
ucccagagguugagucacuuau

SEQ ID NO: 458493 - RNA, 22 nt, Human
gcuggcagacugggggcagaac

SEQ ID NO: 458494 - RNA, 22 nt, Human
cuggcucaauaaauauuagcug

SEQ ID NO: 458495 - RNA, 22 nt, Human
gcagggagguuugcugaccugg

SEQ ID NO: 458496 - RNA, 21 nt, Human
aggcucagagaucaaacagua

SEQ ID NO: 458497 - RNA, 22 nt, Human
guauacauagaugaugaacaag

SEQ ID NO: 458498 - RNA, 22 nt, Human
cacagggccuugugugacugca

SEQ ID NO: 458499 - RNA, 22 nt, Human
ucugcaggaggcuggcugcagg

SEQ ID NO: 458500 - RNA, 22 nt, Human
aaaauaacuucuacuauuugca

SEQ ID NO: 458501 - RNA, 22 nt, Human
agaugcuucaguguuuaauuua

SEQ ID NO: 458502 - RNA, 22 nt, Human
ugggugggagcacccugucugg

SEQ ID NO: 458503 - RNA, 22 nt, Human
gccugcagugagugcagaaggu

SEQ ID NO: 458504 - RNA, 17 nt, Human
ccagagaguaguuagga

SEQ ID NO: 458505 - RNA, 18 nt, Human
uccagagguguuggagcc

SEQ ID NO: 458506 - RNA, 22 nt, Human
aaugcacacauuugguacugaa

SEQ ID NO: 458507 - RNA, 22 nt, Human
cauaauuucuguaucagcacca

SEQ ID NO: 458508 - RNA, 22 nt, Human
acagggccucagccagggcaga

SEQ ID NO: 458509 - RNA, 22 nt, Human
ugagaaagugggugccuagcaa

SEQ ID NO: 458510 - RNA, 22 nt, Human
aaaugcaaggccaugugaagga

SEQ ID NO: 458511 - RNA, 22 nt, Human
guggcugcuaagucuccuuccu

SEQ ID NO: 458512 - RNA, 20 nt, Human
gucucaaguaucucacaguc

SEQ ID NO: 458513 - RNA, 22 nt, Human
uucuaguuaaaguauguauuag

SEQ ID NO: 458514 - RNA, 22 nt, Human
ccuggagauuauuugguccaau

SEQ ID NO: 458515 - RNA, 22 nt, Human
gggaccuggcgagggucacaca

SEQ ID NO: 458516 - RNA, 22 nt, Human
ccagcuggugacauccccaacc

SEQ ID NO: 458517 - RNA, 22 nt, Human
aauauaaauuccugggcccagc

SEQ ID NO: 458518 - RNA, 22 nt, Human
cucuguccuccaccugcuuuca

SEQ ID NO: 458519 - RNA, 22 nt, Human
ccagccugaaaugccucauccu

SEQ ID NO: 458520 - RNA, 22 nt, Human
cccugccugugggcaucaacau

SEQ ID NO: 458521 - RNA, 22 nt, Human
agugcugacucugggcacagug

SEQ ID NO: 458522 - RNA, 22 nt, Human
ucagaacagaagcuggcuauaa

SEQ ID NO: 458523 - RNA, 22 nt, Human
ggccauggaccccgagcugacc

SEQ ID NO: 458524 - RNA, 20 nt, Human
gccuggaggcaaugggaaga

SEQ ID NO: 458525 - RNA, 22 nt, Human
gaugauggacaaagcauuggug

SEQ ID NO: 458526 - RNA, 22 nt, Human
acauuucucagguaagucauuu

SEQ ID NO: 458527 - RNA, 22 nt, Human
cagggcucuucaucacacagua

SEQ ID NO: 458528 - RNA, 22 nt, Human
ucuucacaccgggcagcaggaa

SEQ ID NO: 458529 - RNA, 22 nt, Human
ugggcugcuucuauuggugguc

SEQ ID NO: 458530 - RNA, 20 nt, Human
uucacagaggacucagguca

SEQ ID NO: 458531 - RNA, 22 nt, Human
ucucagagggaaacaugaguga

SEQ ID NO: 458532 - RNA, 22 nt, Human
uuugggcaauucagugggaccu

SEQ ID NO: 458533 - RNA, 22 nt, Human
cccagcuugcgggcggcaggag

SEQ ID NO: 458534 - RNA, 22 nt, Human
ccugggugacccgugagcgucc

SEQ ID NO: 458535 - RNA, 22 nt, Human
cagagcuggagggaacccuggc

SEQ ID NO: 458536 - RNA, 22 nt, Human
ccagagggccuuuggaguuauc

SEQ ID NO: 458537 - RNA, 22 nt, Human
uagggcuguuuaaaagugaggu

SEQ ID NO: 458538 - RNA, 22 nt, Human
gaugggcguggcgcguuuggug

SEQ ID NO: 458539 - RNA, 22 nt, Human
ucagggcagccuaaggcaccuc

SEQ ID NO: 458540 - RNA, 22 nt, Human
gcagagccugggggucugcgga

SEQ ID NO: 458541 - RNA, 22 nt, Human
cacccagccuucacacaggagu

SEQ ID NO: 458542 - RNA, 22 nt, Human
uuauuuucuccucagaaagugg

SEQ ID NO: 458543 - RNA, 22 nt, Human
aggcagccagauggcagccugc

SEQ ID NO: 458544 - RNA, 22 nt, Human
aggcacuguucccaguuauccu

SEQ ID NO: 458545 - RNA, 22 nt, Human
ccacagagacaggguccuugcu

SEQ ID NO: 458546 - RNA, 19 nt, Human
ucuaacagaagugucgucc

SEQ ID NO: 458547 - RNA, 22 nt, Human
gggcagcagaggaucccuuaau

SEQ ID NO: 458548 - RNA, 22 nt, Human
cucaacagcucugccauacucc

SEQ ID NO: 458549 - RNA, 18 nt, Human
gaugggagcaagagaaga

SEQ ID NO: 458550 - RNA, 22 nt, Human
cuucugggcauucagcugcaca

SEQ ID NO: 458551 - RNA, 22 nt, Human
gcuggagccauuggcuuggccu

SEQ ID NO: 458552 - RNA, 22 nt, Human
cugggcagccucacacaauguu

SEQ ID NO: 458553 - RNA, 22 nt, Human
cugggggcaagcagacagcugu

SEQ ID NO: 458554 - RNA, 20 nt, Human
gccugccucagcuagcugag

SEQ ID NO: 458555 - RNA, 22 nt, Human
ggaagccaggcugggggaucug

SEQ ID NO: 458556 - RNA, 17 nt, Human
aggcagcucagaacauc

SEQ ID NO: 458557 - RNA, 22 nt, Human
ugcagccaucgcagagucugua

SEQ ID NO: 458558 - RNA, 22 nt, Human
uucaagaugcacaguggcauuc

SEQ ID NO: 458559 - RNA, 22 nt, Human
acuuuuaugauaaucaauguuc

SEQ ID NO: 458560 - RNA, 22 nt, Human
gugccugggcaugagcuuguug

SEQ ID NO: 458561 - RNA, 22 nt, Human
gacaagacagcuugcagacaac

SEQ ID NO: 458562 - RNA, 22 nt, Human
uuauuugcccauguuuagcaga

SEQ ID NO: 458563 - RNA, 21 nt, Human
ccaggcuccugaggcugguca

SEQ ID NO: 458564 - RNA, 22 nt, Human
acauuuuaauaugcuuagugug

SEQ ID NO: 458565 - RNA, 22 nt, Human
aaacaucaccauuuuaccuaau

SEQ ID NO: 458566 - RNA, 22 nt, Human
ucugucauguuuccauuacaug

SEQ ID NO: 458567 - RNA, 22 nt, Human
uagcagaaccagcagucaauuu

SEQ ID NO: 458568 - RNA, 22 nt, Human
aagagguaaccauagcaaccac

SEQ ID NO: 458569 - RNA, 22 nt, Human
cuggaagguucuuugugugccu

SEQ ID NO: 458570 - RNA, 22 nt, Human
gagaggccauggcugugcagug

SEQ ID NO: 458571 - RNA, 22 nt, Human
ugggcuggcugaacuucaaccu

SEQ ID NO: 458572 - RNA, 22 nt, Human
gcacccagggacuuggcuggcc

SEQ ID NO: 458573 - RNA, 22 nt, Human
ccugccucaucaacuugucgug

SEQ ID NO: 458574 - RNA, 22 nt, Human
ccaggaggcagagguuacagug

SEQ ID NO: 458575 - RNA, 22 nt, Human
ccaguggaauuaaaaauaagug

SEQ ID NO: 458576 - RNA, 22 nt, Human
cuuguaauuauaauguacuguu

SEQ ID NO: 458577 - RNA, 22 nt, Human
gcugcucucagagcucaugcug

SEQ ID NO: 458578 - RNA, 22 nt, Human
uuugaaagccuggcuuuucucu

SEQ ID NO: 458579 - RNA, 22 nt, Human
acauuugucuucuuucagauua

SEQ ID NO: 458580 - RNA, 22 nt, Human
ucugggagagcugcugucagag

SEQ ID NO: 458581 - RNA, 22 nt, Human
cugcugggucuaugcaagugga

SEQ ID NO: 458582 - RNA, 22 nt, Human
cuggccacaacuagcccaggac

SEQ ID NO: 458583 - RNA, 22 nt, Human
caggcacuggccagucagcaca

SEQ ID NO: 458584 - RNA, 22 nt, Human
uauuuagaacagacaauagaaa

SEQ ID NO: 458585 - RNA, 22 nt, Human
gcagagcaccaaagugaaagau

SEQ ID NO: 458586 - RNA, 22 nt, Human
ccuaggccuuacuuuccugugc

SEQ ID NO: 458587 - RNA, 19 nt, Human
acagaagcauagaaaagga

SEQ ID NO: 458588 - RNA, 22 nt, Human
gccaccucuuugucucugccgc

SEQ ID NO: 458589 - RNA, 22 nt, Human
uuucuauucuggaucuguggca

SEQ ID NO: 458590 - RNA, 22 nt, Human
ugcugccuucuaggcgugcccu

SEQ ID NO: 458591 - RNA, 22 nt, Human
cacauuucugugagucaauauu

SEQ ID NO: 458592 - RNA, 22 nt, Human
gagcucagcccaaagagcagug

SEQ ID NO: 458593 - RNA, 22 nt, Human
gggagcaggagccugccugcca

SEQ ID NO: 458594 - RNA, 22 nt, Human
ggucagggcucuuccaguggcu

SEQ ID NO: 458595 - RNA, 22 nt, Human
cacugcagcaccaugcagggcu

SEQ ID NO: 458596 - RNA, 22 nt, Human
aaggcagcccuggcucagccug

SEQ ID NO: 458597 - RNA, 22 nt, Human
uggggugguaauacaccguucu

SEQ ID NO: 458598 - RNA, 22 nt, Human
cagggcagaacauauagauagu

SEQ ID NO: 458599 - RNA, 18 nt, Human
aggccagcccugcuacug

SEQ ID NO: 458600 - RNA, 22 nt, Human
acuuccaaauaccaucacauug

SEQ ID NO: 458601 - RNA, 22 nt, Human
agcugccacugagggugcacag

SEQ ID NO: 458602 - RNA, 22 nt, Human
ugucuucaguaaaauacacuau

SEQ ID NO: 458603 - RNA, 22 nt, Human
ugccugcugcuaagcucuuugu

SEQ ID NO: 458604 - RNA, 22 nt, Human
uccuugaagagugggcggucga

SEQ ID NO: 458605 - RNA, 22 nt, Human
aaauaauguuaggccuuugcuc

SEQ ID NO: 458606 - RNA, 22 nt, Human
uggaaguggcagaaaaugaaca

SEQ ID NO: 458607 - RNA, 22 nt, Human
ccucagggucugaggagaccgu

SEQ ID NO: 458608 - RNA, 22 nt, Human
aauaaauguuaagauugucuca

SEQ ID NO: 458609 - RNA, 22 nt, Human
gccugguggacacugggcauca

SEQ ID NO: 458610 - RNA, 22 nt, Human
aauuaguauugcgauucauuag

SEQ ID NO: 458611 - RNA, 18 nt, Human
aaagaaggauuggagagc

SEQ ID NO: 458612 - RNA, 19 nt, Human
ugguggcaaugucagcuaa

SEQ ID NO: 458613 - RNA, 22 nt, Human
gaaggaaaucugugauuuaugc

SEQ ID NO: 458614 - RNA, 22 nt, Human
gcccuggccuucaucucagaca

SEQ ID NO: 458615 - RNA, 19 nt, Human
uugaaagauuagcuuucua

SEQ ID NO: 458616 - RNA, 22 nt, Human
cucucuucccgugaguguugca

SEQ ID NO: 458617 - RNA, 22 nt, Human
agguggguaucaugagagauua

SEQ ID NO: 458618 - RNA, 19 nt, Human
ugacaggcuguugccuuga

SEQ ID NO: 458619 - RNA, 22 nt, Human
ugcaccauuaauuuaugugaga

SEQ ID NO: 458620 - RNA, 18 nt, Human
ucugucucuguccuugcu

SEQ ID NO: 458621 - RNA, 22 nt, Human
ugaggccuggacucugcaugga

SEQ ID NO: 458622 - RNA, 22 nt, Human
aauaagaauuuacuugucaaga

SEQ ID NO: 458623 - RNA, 22 nt, Human
gaugcacaugugaguauagaag

SEQ ID NO: 458624 - RNA, 22 nt, Human
uuucucaucuggaaacagugcu

SEQ ID NO: 458625 - RNA, 18 nt, Human
gguggcaggucagaugcc

SEQ ID NO: 458626 - RNA, 22 nt, Human
gucaggaugagggaugaggagu

SEQ ID NO: 458627 - RNA, 22 nt, Human
aggacuuagaacauuauguacu

SEQ ID NO: 458628 - RNA, 22 nt, Human
ucacauacacuaggauauuuuu

SEQ ID NO: 458629 - RNA, 23 nt, Human
uucauuugucuacuucacuuguu

SEQ ID NO: 458630 - RNA, 22 nt, Human
gauuucaaggauguuagaggug

SEQ ID NO: 458631 - RNA, 22 nt, Human
cagcaauaagccagguuagaca

SEQ ID NO: 458632 - RNA, 22 nt, Human
cuggggcucacuuuggucaggc

SEQ ID NO: 458633 - RNA, 22 nt, Human
uuuucauuuacauuagggaaga

SEQ ID NO: 458634 - RNA, 22 nt, Human
ggaggccagggacccagucagc

SEQ ID NO: 458635 - RNA, 22 nt, Human
aaaacauguccauacagaaacu

SEQ ID NO: 458636 - RNA, 23 nt, Human
aaaguguagccagguuaagaacc

SEQ ID NO: 458637 - RNA, 22 nt, Human
agugaaauuccuggucuuuguu

SEQ ID NO: 458638 - RNA, 22 nt, Human
cucccuggaggcccagaccugg

SEQ ID NO: 458639 - RNA, 22 nt, Human
caaggccauauugccuguaugu

SEQ ID NO: 458640 - RNA, 22 nt, Human
ccugggcuggaguacagcagug

SEQ ID NO: 458641 - RNA, 22 nt, Human
gaggccugguagccgagcccca

SEQ ID NO: 458642 - RNA, 22 nt, Human
gcagagcugggucuguauccaa

SEQ ID NO: 458643 - RNA, 22 nt, Human
auugucuguacuuuaaaaaugu

SEQ ID NO: 458644 - RNA, 22 nt, Human
ucacaggguguacaucaccuau

SEQ ID NO: 458645 - RNA, 22 nt, Human
agcccuagagcuggaggucagu

SEQ ID NO: 458646 - RNA, 22 nt, Human
gaaaugcaaauucucucucgcu

SEQ ID NO: 458647 - RNA, 22 nt, Human
agguggggaaaccagcgauccc

SEQ ID NO: 458648 - RNA, 22 nt, Human
uagggcagccacccaggcugcu

SEQ ID NO: 458649 - RNA, 22 nt, Human
ucagcuuuugucagaaauugua

SEQ ID NO: 458650 - RNA, 20 nt, Human
accauaauguuaauuacaaa

SEQ ID NO: 458651 - RNA, 22 nt, Human
cugagggagggacuuugagacu

SEQ ID NO: 458652 - RNA, 22 nt, Human
acagagagguaaaauauauagu

SEQ ID NO: 458653 - RNA, 22 nt, Human
uagaucugauacaauucaucug

SEQ ID NO: 458654 - RNA, 22 nt, Human
cuucuuuccuuccuccaguggc

SEQ ID NO: 458655 - RNA, 22 nt, Human
agggacagaugaaugacugagu

SEQ ID NO: 458656 - RNA, 22 nt, Human
acaaaaguguaggaauuccuua

SEQ ID NO: 458657 - RNA, 22 nt, Human
gauuucaaggaguuuucacagu

SEQ ID NO: 458658 - RNA, 22 nt, Human
ggguggggcccaggaaaucuau

SEQ ID NO: 458659 - RNA, 22 nt, Human
auaugauuccacuauuguaugg

SEQ ID NO: 458660 - RNA, 22 nt, Human
uucugucuucccacugaggagc

SEQ ID NO: 458661 - RNA, 22 nt, Human
aagcagcagaccugauuuugaa

SEQ ID NO: 458662 - RNA, 19 nt, Human
cugugcuuuaaacuccuau

SEQ ID NO: 458663 - RNA, 22 nt, Human
ccagagaguaggaggcauuauu

SEQ ID NO: 458664 - RNA, 22 nt, Human
uccugggcuguggccccgggca

SEQ ID NO: 458665 - RNA, 22 nt, Human
cuggccuuuagccccagugucu

SEQ ID NO: 458666 - RNA, 22 nt, Human
cucaggagagucuuauaucucc

SEQ ID NO: 458667 - RNA, 22 nt, Human
uggcagagaacacggcugaucu

SEQ ID NO: 458668 - RNA, 22 nt, Human
ucauuuguggaagugauugugg

SEQ ID NO: 458669 - RNA, 22 nt, Human
gucuccugagacugcagucacc

SEQ ID NO: 458670 - RNA, 22 nt, Human
uuugaaaguguuuacuugggaa

SEQ ID NO: 458671 - RNA, 22 nt, Human
gcagcagaggcccuacucuuug

SEQ ID NO: 458672 - RNA, 18 nt, Human
caggaugagugaugggga

SEQ ID NO: 458673 - RNA, 20 nt, Human
ucccaaggaugccugggugu

SEQ ID NO: 458674 - RNA, 22 nt, Human
gugagcaggauaggggcucccu

SEQ ID NO: 458675 - RNA, 22 nt, Human
cucugagaggugagaagcagca

SEQ ID NO: 458676 - RNA, 22 nt, Human
ugggaccugcccuggccccauc

SEQ ID NO: 458677 - RNA, 22 nt, Human
gccuggugugcgccgcgcagcu

SEQ ID NO: 458678 - RNA, 22 nt, Human
aggccugggacgggagccguga

SEQ ID NO: 458679 - RNA, 22 nt, Human
ggcuggcuuucucuccgcaccu

SEQ ID NO: 458680 - RNA, 22 nt, Human
cuggcuggccggagcgaggcgg

SEQ ID NO: 458681 - RNA, 22 nt, Human
ggagccagggaagcugcuuccu

SEQ ID NO: 458682 - RNA, 22 nt, Human
gcaggaugagugaguacauuua

SEQ ID NO: 458683 - RNA, 22 nt, Human
guguccagggccguguugucuu

SEQ ID NO: 458684 - RNA, 22 nt, Human
gcugcucuugaggggcucacug

SEQ ID NO: 458685 - RNA, 22 nt, Human
agguuacagugauuauagguuu

SEQ ID NO: 458686 - RNA, 22 nt, Human
cagcugugagcagccaguugcc

SEQ ID NO: 458687 - RNA, 22 nt, Human
uguguuccuucgucuucccuuc

SEQ ID NO: 458688 - RNA, 22 nt, Human
uuugggcaguagauguaucacu

SEQ ID NO: 458689 - RNA, 22 nt, Human
guuuauuauucaacuucauguu

SEQ ID NO: 458690 - RNA, 22 nt, Human
uagggcucagcucuagcuccug

SEQ ID NO: 458691 - RNA, 22 nt, Human
ugggaugggaucucgcuguguc

SEQ ID NO: 458692 - RNA, 22 nt, Human
gccaccagugggggccugggca

SEQ ID NO: 458693 - RNA, 22 nt, Human
aaagauuuaagaauaauuugug

SEQ ID NO: 458694 - RNA, 22 nt, Human
agcacccuccaacuucccugua

SEQ ID NO: 458695 - RNA, 22 nt, Human
ccugucauacuaacguaguggg

SEQ ID NO: 458696 - RNA, 22 nt, Human
aucaggaucagggcuagcagag

SEQ ID NO: 458697 - RNA, 22 nt, Human
cccugcagagagugcuuuugug

SEQ ID NO: 458698 - RNA, 22 nt, Human
gcugccuggcuuuaguccacuu

SEQ ID NO: 458699 - RNA, 22 nt, Human
ugcagggcuacaggacuacaac

SEQ ID NO: 458700 - RNA, 22 nt, Human
uggcugaguguuccaaggagca

SEQ ID NO: 458701 - RNA, 22 nt, Human
ggguacuuaauauuuacggggu

SEQ ID NO: 458702 - RNA, 19 nt, Human
ucauuguugguuugucggg

SEQ ID NO: 458703 - RNA, 22 nt, Human
ggacucagcagccaggaguggc

SEQ ID NO: 458704 - RNA, 22 nt, Human
ccauggagcgggugagugagug

SEQ ID NO: 458705 - RNA, 22 nt, Human
aggcccuggcacugccugggag

SEQ ID NO: 458706 - RNA, 22 nt, Human
ugaagccuuguguggccucucu

SEQ ID NO: 458707 - RNA, 22 nt, Human
agaauaaaucaaauguccugag

SEQ ID NO: 458708 - RNA, 20 nt, Human
gaggaaaagcugccaggccu

SEQ ID NO: 458709 - RNA, 22 nt, Human
aucaguuuuuauuaauguagcu

SEQ ID NO: 458710 - RNA, 22 nt, Human
aucagcugaaaaacaggcagca

SEQ ID NO: 458711 - RNA, 22 nt, Human
ucuuuggauaucgcuagaccgu

SEQ ID NO: 458712 - RNA, 22 nt, Human
aaugcacaaaaauuguauguaa

SEQ ID NO: 458713 - RNA, 22 nt, Human
ggaaacagagggcaccugagcc

SEQ ID NO: 458714 - RNA, 22 nt, Human
ccucucucuccugcacacacac

SEQ ID NO: 458715 - RNA, 22 nt, Human
caaaugcauaguuuauaagaag

SEQ ID NO: 458716 - RNA, 22 nt, Human
aauggccagcaacaggagugaa

SEQ ID NO: 458717 - RNA, 22 nt, Human
gccugagcuacuagggagucug

SEQ ID NO: 458718 - RNA, 22 nt, Human
uguaacaguaagccugugagcu

SEQ ID NO: 458719 - RNA, 22 nt, Human
gagggcagagacagugauucac

SEQ ID NO: 458720 - RNA, 22 nt, Human
ggucccagcugcucaagaggcu

SEQ ID NO: 458721 - RNA, 22 nt, Human
aggcuucagaaagaguaauugg

SEQ ID NO: 458722 - RNA, 22 nt, Human
ucuuuacaguccucugucaauc

SEQ ID NO: 458723 - RNA, 22 nt, Human
gagccuggccuccugccucagc

SEQ ID NO: 458724 - RNA, 22 nt, Human
agggccugggccagcacccuuu

SEQ ID NO: 458725 - RNA, 22 nt, Human
auuuuaauaagauucccaagua

SEQ ID NO: 458726 - RNA, 22 nt, Human
guaagagcacugucuccugcug

SEQ ID NO: 458727 - RNA, 22 nt, Human
cuuuauguccaccagacugcaa

SEQ ID NO: 458728 - RNA, 22 nt, Human
ccagggcugagcugugaccaug

SEQ ID NO: 458729 - RNA, 22 nt, Human
gcaggggcaggagaucucaggc

SEQ ID NO: 458730 - RNA, 22 nt, Human
ggcugccucaaagcucaagcuc

SEQ ID NO: 458731 - RNA, 22 nt, Human
uguugauuaguguuuagacuua

SEQ ID NO: 458732 - RNA, 22 nt, Human
ugccaggcaacugcccagccau

SEQ ID NO: 458733 - RNA, 22 nt, Human
aggugcagaaaaaaguccuuua

SEQ ID NO: 458734 - RNA, 22 nt, Human
uggcugagggggcaguucagga

SEQ ID NO: 458735 - RNA, 22 nt, Human
caugggcuacagaagcaugcug

SEQ ID NO: 458736 - RNA, 22 nt, Human
ggcucaggaugagccuucucau

SEQ ID NO: 458737 - RNA, 22 nt, Human
gggcuucuagaccagcagugag

SEQ ID NO: 458738 - RNA, 19 nt, Human
ugaaacaaacuuaaaagga

SEQ ID NO: 458739 - RNA, 22 nt, Human
agccagccgggggaccacagug

SEQ ID NO: 458740 - RNA, 22 nt, Human
gggccagugaacaaugagggaa

SEQ ID NO: 458741 - RNA, 22 nt, Human
uccuugaagcuuguaucuaaua

SEQ ID NO: 458742 - RNA, 22 nt, Human
ugccugucuuaauaucuggaaa

SEQ ID NO: 458743 - RNA, 22 nt, Human
ccaaggcuccucagcuggucuu

SEQ ID NO: 458744 - RNA, 22 nt, Human
ucagggcacaggccuguggguu

SEQ ID NO: 458745 - RNA, 22 nt, Human
agaggcugggaaggguccccgg

SEQ ID NO: 458746 - RNA, 22 nt, Human
ucagcagggccuccuugugcag

SEQ ID NO: 458747 - RNA, 22 nt, Human
cagucccagacauaguaaggga

SEQ ID NO: 458748 - RNA, 22 nt, Human
gguccagggaacuuugaaggau

SEQ ID NO: 458749 - RNA, 22 nt, Human
uuacaggggacauuggggacau

SEQ ID NO: 458750 - RNA, 22 nt, Human
augaguaagaccauaauuuuug

SEQ ID NO: 458751 - RNA, 22 nt, Human
ccuggcaguuuugcccaggauu

SEQ ID NO: 458752 - RNA, 20 nt, Human
caguccaaucagaggccacc

SEQ ID NO: 458753 - RNA, 22 nt, Human
uagccuucucaagacaaaguug

SEQ ID NO: 458754 - RNA, 22 nt, Human
aaagaagguagggcuggugacu

SEQ ID NO: 458755 - RNA, 22 nt, Human
cugcagggugacguugcccacc

SEQ ID NO: 458756 - RNA, 22 nt, Human
cucugcugcccaggccugcuag

SEQ ID NO: 458757 - RNA, 22 nt, Human
ucagcaauccucccacaggugg

SEQ ID NO: 458758 - RNA, 22 nt, Human
cuggcagccaagugggauacuc

SEQ ID NO: 458759 - RNA, 22 nt, Human
auauuagggucucuaaauucua

SEQ ID NO: 458760 - RNA, 22 nt, Human
gcaguccaaaguggcucucacc

SEQ ID NO: 458761 - RNA, 22 nt, Human
gccugcagccagggaguucucu

SEQ ID NO: 458762 - RNA, 19 nt, Human
gcucugagaggggcauggg

SEQ ID NO: 458763 - RNA, 22 nt, Human
ggcuucugccacgagagggaag

SEQ ID NO: 458764 - RNA, 22 nt, Human
gcagggaccucacuacccccag

SEQ ID NO: 458765 - RNA, 22 nt, Human
ucuucucaguuucucuaggaug

SEQ ID NO: 458766 - RNA, 22 nt, Human
auuauuaggugcucucugacaa

SEQ ID NO: 458767 - RNA, 22 nt, Human
gacccaggguauccagagcugc

SEQ ID NO: 458768 - RNA, 22 nt, Human
gauggcacacagacauccccgc

SEQ ID NO: 458769 - RNA, 22 nt, Human
ugaggcaggaguucaggcugcg

SEQ ID NO: 458770 - RNA, 22 nt, Human
ugaagccauuacuguguuaggg

SEQ ID NO: 458771 - RNA, 22 nt, Human
ucugggagauccaagcagaacu

SEQ ID NO: 458772 - RNA, 22 nt, Human
ugaggcucagagaagugcuguu

SEQ ID NO: 458773 - RNA, 22 nt, Human
ccagcuuucucagaggcuucua

SEQ ID NO: 458774 - RNA, 22 nt, Human
gcccugucggaacugcgaccuc

SEQ ID NO: 458775 - RNA, 22 nt, Human
gcaggugggggucggugcaucu

SEQ ID NO: 458776 - RNA, 22 nt, Human
cagaagagaugaaauaguauua

SEQ ID NO: 458777 - RNA, 22 nt, Human
caggagcccguugcuccggcgg

SEQ ID NO: 458778 - RNA, 22 nt, Human
aauguuuuagauuacugcuggg

SEQ ID NO: 458779 - RNA, 22 nt, Human
gggauggggagcuggaaagggg

SEQ ID NO: 458780 - RNA, 22 nt, Human
aacagugagaagguggacagga

SEQ ID NO: 458781 - RNA, 22 nt, Human
gcagggcacaaggacgcacagg

SEQ ID NO: 458782 - RNA, 22 nt, Human
ugaagcagagaauuugacaguc

SEQ ID NO: 458783 - RNA, 22 nt, Human
gagcugugagggacacauugcu

SEQ ID NO: 458784 - RNA, 22 nt, Human
uguggaaaauuggaacguuccu

SEQ ID NO: 458785 - RNA, 22 nt, Human
uuauuuauucauucugucuguc

SEQ ID NO: 458786 - RNA, 22 nt, Human
acagaauucucucugcagaggc

SEQ ID NO: 458787 - RNA, 22 nt, Human
cagaguucaaagccugcuggga

SEQ ID NO: 458788 - RNA, 22 nt, Human
cagcugaguuuccaagucugcc

SEQ ID NO: 458789 - RNA, 22 nt, Human
acaaaggugagcagaagacaca

SEQ ID NO: 458790 - RNA, 20 nt, Human
gggcuggcgcauggggaaag

SEQ ID NO: 458791 - RNA, 22 nt, Human
cacagagagcuacgugcagcgu

SEQ ID NO: 458792 - RNA, 22 nt, Human
uugagggucuggaucugcugcu

SEQ ID NO: 458793 - RNA, 22 nt, Human
augcuuuuccaggagaaauaua

SEQ ID NO: 458794 - RNA, 23 nt, Human
gguggcaggaguggaugcugagc

SEQ ID NO: 458795 - RNA, 22 nt, Human
ucugugcaggaagucauuauga

SEQ ID NO: 458796 - RNA, 22 nt, Human
agcuuuauauaaaagaguacau

SEQ ID NO: 458797 - RNA, 22 nt, Human
ugggcugcccaagguggccaug

SEQ ID NO: 458798 - RNA, 22 nt, Human
ggcucaagcagucugccugccu

SEQ ID NO: 458799 - RNA, 22 nt, Human
cauuguauugaggauacuuaag

SEQ ID NO: 458800 - RNA, 22 nt, Human
auacauuagaaucugguacuca

SEQ ID NO: 458801 - RNA, 22 nt, Human
ucuaaaaaagucuguucacuug

SEQ ID NO: 458802 - RNA, 22 nt, Human
auagaacagaaacagaugcaca

SEQ ID NO: 458803 - RNA, 22 nt, Human
ucuuuacaaucuaagcauaguu

SEQ ID NO: 458804 - RNA, 22 nt, Human
agagccccugguggagugagaa

SEQ ID NO: 458805 - RNA, 17 nt, Human
cagugcagagcccuuuc

SEQ ID NO: 458806 - RNA, 22 nt, Human
cagaccaucuugaagcaaacug

SEQ ID NO: 458807 - RNA, 22 nt, Human
agaagcugccuacaugaccagc

SEQ ID NO: 458808 - RNA, 22 nt, Human
gggucuggcaugcugagaugga

SEQ ID NO: 458809 - RNA, 22 nt, Human
ucaggaugagcucauaacuaug

SEQ ID NO: 458810 - RNA, 22 nt, Human
agcagcugccagagagaguucc

SEQ ID NO: 458811 - RNA, 22 nt, Human
agugccuggaccccaugacaua

SEQ ID NO: 458812 - RNA, 22 nt, Human
cuuguagaauugaaauggucuc

SEQ ID NO: 458813 - RNA, 22 nt, Human
cugccucaugcugccugcagcc

SEQ ID NO: 458814 - RNA, 22 nt, Human
gacaggaggcagagcucaggug

SEQ ID NO: 458815 - RNA, 22 nt, Human
uugcucugacuggagugcagug

SEQ ID NO: 458816 - RNA, 22 nt, Human
uuagccauuaauguccugugca

SEQ ID NO: 458817 - RNA, 22 nt, Human
ggucacugcucuaaacaaaagu

SEQ ID NO: 458818 - RNA, 22 nt, Human
uucucuugugccaaguuguugc

SEQ ID NO: 458819 - RNA, 22 nt, Human
auccuuggaugugucuuuuugu

SEQ ID NO: 458820 - RNA, 21 nt, Human
cugagggccgcagcugggcuc

SEQ ID NO: 458821 - RNA, 22 nt, Human
acaggcaggcuucggccagagc

SEQ ID NO: 458822 - RNA, 20 nt, Human
uguggcaggaugagggcgga

SEQ ID NO: 458823 - RNA, 22 nt, Human
aagagguugucugugaugaguu

SEQ ID NO: 458824 - RNA, 22 nt, Human
gguggcuggaggagcugaugga

SEQ ID NO: 458825 - RNA, 22 nt, Human
aaggacagaaacagauugcugg

SEQ ID NO: 458826 - RNA, 21 nt, Human
caugaagccgguucccuguuu

SEQ ID NO: 458827 - RNA, 22 nt, Human
ugaguccaauaggggccuggaa

SEQ ID NO: 458828 - RNA, 22 nt, Human
cagguaggauggaagggcucaa

SEQ ID NO: 458829 - RNA, 22 nt, Human
augugcaugcacuuacaugugu

SEQ ID NO: 458830 - RNA, 22 nt, Human
gaaggccuaggaaggaagccuu

SEQ ID NO: 458831 - RNA, 22 nt, Human
auuuauuaccucggaguuucug

SEQ ID NO: 458832 - RNA, 19 nt, Human
gaaaggcugcugcuaccug

SEQ ID NO: 458833 - RNA, 19 nt, Human
gcucagagggcccugugcu

SEQ ID NO: 458834 - RNA, 19 nt, Human
ugcagaagacacaguggug

SEQ ID NO: 458835 - RNA, 22 nt, Human
aggcugucucaccucaggaggg

SEQ ID NO: 458836 - RNA, 22 nt, Human
aaaguucucuaugguguaaaaa

SEQ ID NO: 458837 - RNA, 22 nt, Human
cugccucucaggucccugagau

SEQ ID NO: 458838 - RNA, 22 nt, Human
uggagccugagucagcggaggc

SEQ ID NO: 458839 - RNA, 22 nt, Human
uuccaggacaagauguuucagg

SEQ ID NO: 458840 - RNA, 20 nt, Human
agucccuuuggucagguauu

SEQ ID NO: 458841 - RNA, 22 nt, Human
caguggaauauauaggggauuu

SEQ ID NO: 458842 - RNA, 22 nt, Human
agcuguggaagacugucagggu

SEQ ID NO: 458843 - RNA, 22 nt, Human
cgcaccacugaauuccagccug

SEQ ID NO: 458844 - RNA, 22 nt, Human
ugaggccugacagaccaagccu

SEQ ID NO: 458845 - RNA, 22 nt, Human
ggcccuguccuggcugucuccg

SEQ ID NO: 458846 - RNA, 22 nt, Human
uauguacaaucagcaguucaua

SEQ ID NO: 458847 - RNA, 22 nt, Human
agucugucuaauauuauucagg

SEQ ID NO: 458848 - RNA, 22 nt, Human
cugcagagcuaggcugagugaa

SEQ ID NO: 458849 - RNA, 22 nt, Human
ugggcaggaugcguugauucuu

SEQ ID NO: 458850 - RNA, 22 nt, Human
uuccugagggacuuuugagauu

SEQ ID NO: 458851 - RNA, 22 nt, Human
gaagggagaagguugggugacg

SEQ ID NO: 458852 - RNA, 18 nt, Human
cugcugugucgucugggc

SEQ ID NO: 458853 - RNA, 22 nt, Human
ugucaugccaggaaauaguccc

SEQ ID NO: 458854 - RNA, 22 nt, Human
uucaagauaauaggaaugaaaa

SEQ ID NO: 458855 - RNA, 22 nt, Human
ugcccaaguccuccaccgaggu

SEQ ID NO: 458856 - RNA, 22 nt, Human
agugcugaagacuggcuaggga

SEQ ID NO: 458857 - RNA, 22 nt, Human
ucuucauuuuauagcaucugug

SEQ ID NO: 458858 - RNA, 22 nt, Human
ccugcucagagcgucuugugug

SEQ ID NO: 458859 - RNA, 22 nt, Human
cccugccucugaagcugcucag

SEQ ID NO: 458860 - RNA, 22 nt, Human
ccacagccauuccagggaggcu

SEQ ID NO: 458861 - RNA, 22 nt, Human
auuuucucucaaaccuuaaaau

SEQ ID NO: 458862 - RNA, 22 nt, Human
cccaggcacauccacucuguga

SEQ ID NO: 458863 - RNA, 22 nt, Human
uaaacaagcugucugauauucu

SEQ ID NO: 458864 - RNA, 21 nt, Human
uuacaaagcaagugcuguguc

SEQ ID NO: 458865 - RNA, 22 nt, Human
acucugaggcaggucagggcag

SEQ ID NO: 458866 - RNA, 22 nt, Human
uguggcucucagauccuccaau

SEQ ID NO: 458867 - RNA, 22 nt, Human
ggcacugaauuucuuggcaucu

SEQ ID NO: 458868 - RNA, 22 nt, Human
acaggcugccuaccaaguauca

SEQ ID NO: 458869 - RNA, 22 nt, Human
gacuuucucuccucccaggugu

SEQ ID NO: 458870 - RNA, 22 nt, Human
caggcagcugacugucagauau

SEQ ID NO: 458871 - RNA, 22 nt, Human
guggcccaggcuuggcgcuggc

SEQ ID NO: 458872 - RNA, 22 nt, Human
acaucacagagcccagauaaag

SEQ ID NO: 458873 - RNA, 22 nt, Human
aaaagucagucucuccuagcuc

SEQ ID NO: 458874 - RNA, 17 nt, Human
agguggcugcugcgccu

SEQ ID NO: 458875 - RNA, 22 nt, Human
ugaagcagauggucuggucauu

SEQ ID NO: 458876 - RNA, 22 nt, Human
gugaggcagcaggagccucugu

SEQ ID NO: 458877 - RNA, 22 nt, Human
cugggccagggaggugucugua

SEQ ID NO: 458878 - RNA, 22 nt, Human
aagggcucacccaacucacuuc

SEQ ID NO: 458879 - RNA, 22 nt, Human
acugcuuuuagaaaucuauaga

SEQ ID NO: 458880 - RNA, 22 nt, Human
gcaaaaaccacaauuacuuuug

SEQ ID NO: 458881 - RNA, 22 nt, Human
acagcuuuaucucagggaucag

SEQ ID NO: 458882 - RNA, 22 nt, Human
cugucucugucuuaacucccag

SEQ ID NO: 458883 - RNA, 22 nt, Human
ugcaaacuauugguagagaugg

SEQ ID NO: 458884 - RNA, 22 nt, Human
ccaaguacucucaccaaagcuu

SEQ ID NO: 458885 - RNA, 22 nt, Human
agccauccucccaccucagccu

SEQ ID NO: 458886 - RNA, 22 nt, Human
ccagaagggcuauugcagugac

SEQ ID NO: 458887 - RNA, 22 nt, Human
aggcugggaaaccugaaguugu

SEQ ID NO: 458888 - RNA, 22 nt, Human
agccaggccuuagggagaggca

SEQ ID NO: 458889 - RNA, 22 nt, Human
ccucccuggccagagcagcagc

SEQ ID NO: 458890 - RNA, 22 nt, Human
guggagaccuccuaggaugugu

SEQ ID NO: 458891 - RNA, 22 nt, Human
ucauccagccucaucaggagcu

SEQ ID NO: 458892 - RNA, 22 nt, Human
gcucagagcaucccagugaaug

SEQ ID NO: 458893 - RNA, 21 nt, Human
aaaguucaugcuuuaauauuc

SEQ ID NO: 458894 - RNA, 22 nt, Human
caggcagaaauuuuguuucauu

SEQ ID NO: 458895 - RNA, 19 nt, Human
agggucaggacaaggacuu

SEQ ID NO: 458896 - RNA, 22 nt, Human
cagaguguggcaucuuccaacu

SEQ ID NO: 458897 - RNA, 22 nt, Human
cagggccuucguaaguguccgg

SEQ ID NO: 458898 - RNA, 22 nt, Human
cugcugugcagacagacucucu

SEQ ID NO: 458899 - RNA, 18 nt, Human
aggggcagcuugugugga

SEQ ID NO: 458900 - RNA, 22 nt, Human
gauaccagacagggagggagaa

SEQ ID NO: 458901 - RNA, 22 nt, Human
uuacaagugucagguacuggca

SEQ ID NO: 458902 - RNA, 22 nt, Human
caaggccaguucaccaagggca

SEQ ID NO: 458903 - RNA, 22 nt, Human
gguggggcccuggcacugguau

SEQ ID NO: 458904 - RNA, 22 nt, Human
uccucuggggcgugguccugga

SEQ ID NO: 458905 - RNA, 22 nt, Human
ggucccaggcugcgggcuggug

SEQ ID NO: 458906 - RNA, 22 nt, Human
caggagugaguuggggucuaca

SEQ ID NO: 458907 - RNA, 22 nt, Human
ccuggccucuccgaguaaccug

SEQ ID NO: 458908 - RNA, 22 nt, Human
gcagcuuuagaaacaagggcug

SEQ ID NO: 458909 - RNA, 22 nt, Human
caguagccacuagacacaugua

SEQ ID NO: 458910 - RNA, 22 nt, Human
uccuucaguuaucacaguacug

SEQ ID NO: 458911 - RNA, 22 nt, Human
augcugagacuggagcagcugg

SEQ ID NO: 458912 - RNA, 22 nt, Human
uggaaagaugaagauguuuaag

SEQ ID NO: 458913 - RNA, 22 nt, Human
agccagcuggagaccacuguuu

SEQ ID NO: 458914 - RNA, 22 nt, Human
ggcaguggaggacccugugucu

SEQ ID NO: 458915 - RNA, 22 nt, Human
uuaguuuucccaucuuuauggu

SEQ ID NO: 458916 - RNA, 22 nt, Human
aggcugagcaaagggccuuacc

SEQ ID NO: 458917 - RNA, 21 nt, Human
gcagcuggucucagagcuugc

SEQ ID NO: 458918 - RNA, 23 nt, Human
ccagcucccaggucugaggacug

SEQ ID NO: 458919 - RNA, 22 nt, Human
ucccaggcuaggccucugcguu

SEQ ID NO: 458920 - RNA, 22 nt, Human
uaggggugaggccaggcaucag

SEQ ID NO: 458921 - RNA, 20 nt, Human
gcugcucuccacggucugca

SEQ ID NO: 458922 - RNA, 22 nt, Human
gccugcaggcuguaguuuguga

SEQ ID NO: 458923 - RNA, 22 nt, Human
uccuucagugucccgcucaggu

SEQ ID NO: 458924 - RNA, 22 nt, Human
uuagaaaaaggcuguggucuua

SEQ ID NO: 458925 - RNA, 22 nt, Human
uggaagagggagcuggguggcc

SEQ ID NO: 458926 - RNA, 23 nt, Human
ucugggcaccuuguugacaugau

SEQ ID NO: 458927 - RNA, 21 nt, Human
cagcuuugucugucuucgggg

SEQ ID NO: 458928 - RNA, 22 nt, Human
aauaauuauuugagagcagacc

SEQ ID NO: 458929 - RNA, 22 nt, Human
aagggcuggaucucucugagca

SEQ ID NO: 458930 - RNA, 22 nt, Human
aggagaaggaggccccucacac

SEQ ID NO: 458931 - RNA, 22 nt, Human
ggcucugcccagguggacagca

SEQ ID NO: 458932 - RNA, 22 nt, Human
uguggucucguuauguugccca

SEQ ID NO: 458933 - RNA, 22 nt, Human
uccaggaggguuuucugccuuc

SEQ ID NO: 458934 - RNA, 22 nt, Human
uccugcagucugcacucugccu

SEQ ID NO: 458935 - RNA, 22 nt, Human
ugggacagggaaucugaucccc

SEQ ID NO: 458936 - RNA, 22 nt, Human
aggcugagcugaccugguuugg

SEQ ID NO: 458937 - RNA, 22 nt, Human
cucagagaagucuuugcuaaac

SEQ ID NO: 458938 - RNA, 22 nt, Human
guuugcauguauuaagucaaua

SEQ ID NO: 458939 - RNA, 22 nt, Human
cgagaguggacagggcgcagcu

SEQ ID NO: 458940 - RNA, 22 nt, Human
cagugcagaacacauggaaaau

SEQ ID NO: 458941 - RNA, 20 nt, Human
cugcaggguuagaggcucca

SEQ ID NO: 458942 - RNA, 22 nt, Human
aggcuucacgaugggugaggug

SEQ ID NO: 458943 - RNA, 21 nt, Human
ugaggcuguuguaccagggag

SEQ ID NO: 458944 - RNA, 22 nt, Human
cugagcauggccgguccauggu

SEQ ID NO: 458945 - RNA, 22 nt, Human
acauuucuaguuguucaucucc

SEQ ID NO: 458946 - RNA, 22 nt, Human
ucaggcaggacaauuauuuagg

SEQ ID NO: 458947 - RNA, 22 nt, Human
gggugacauuucccaaugagcc

SEQ ID NO: 458948 - RNA, 22 nt, Human
cagggccagccgcagcauccac

SEQ ID NO: 458949 - RNA, 21 nt, Human
gcagcagaggcuugacagaca

SEQ ID NO: 458950 - RNA, 22 nt, Human
agcaggggcaggguuuugugcu

SEQ ID NO: 458951 - RNA, 22 nt, Human
cuggccagaguuggagggugug

SEQ ID NO: 458952 - RNA, 22 nt, Human
cagcuccccucuguggggcagu

SEQ ID NO: 458953 - RNA, 21 nt, Human
ugcuggccucaagggugacuu

SEQ ID NO: 458954 - RNA, 22 nt, Human
uccagucauuuccauuguuccc

SEQ ID NO: 458955 - RNA, 22 nt, Human
uggccucaagucugagggccuu

SEQ ID NO: 458956 - RNA, 22 nt, Human
cugcccuggcagccuaccaugg

SEQ ID NO: 458957 - RNA, 22 nt, Human
acagggccucagcugauucugg

SEQ ID NO: 458958 - RNA, 22 nt, Human
aaauguagaccuauagggaccu

SEQ ID NO: 458959 - RNA, 23 nt, Human
ccagcccuccaccagcucuaggc

SEQ ID NO: 458960 - RNA, 22 nt, Human
ugaauccagagcuauuucgucc

SEQ ID NO: 458961 - RNA, 22 nt, Human
uuaaagaugcagcuuuagagaa

SEQ ID NO: 458962 - RNA, 22 nt, Human
caggagcucucaucgucagggc

SEQ ID NO: 458963 - RNA, 22 nt, Human
gaggccuggcucugcccuccug

SEQ ID NO: 458964 - RNA, 22 nt, Human
ucacauuuuaucugagauugac

SEQ ID NO: 458965 - RNA, 22 nt, Human
uugcagagagguuaggaacuca

SEQ ID NO: 458966 - RNA, 22 nt, Human
caggcauggugagaacucagcc

SEQ ID NO: 458967 - RNA, 22 nt, Human
ggugggcaggucacucugccuc

SEQ ID NO: 458968 - RNA, 22 nt, Human
augaggcagaaaaaagucggag

SEQ ID NO: 458969 - RNA, 22 nt, Human
aggaggaggugggacacaguga

SEQ ID NO: 458970 - RNA, 22 nt, Human
ucacugcagagaccucuaguca

SEQ ID NO: 458971 - RNA, 20 nt, Human
ccuggcuuugcaucugugau

SEQ ID NO: 458972 - RNA, 22 nt, Human
gagagcuggguucaaguagcug

SEQ ID NO: 458973 - RNA, 22 nt, Human
uccucccacauaggacaauggg

SEQ ID NO: 458974 - RNA, 22 nt, Human
caggcacuagcagaaugaggcu

SEQ ID NO: 458975 - RNA, 22 nt, Human
augaagucugcacaugcaugug

SEQ ID NO: 458976 - RNA, 22 nt, Human
gguuugcacgauauuuccaugg

SEQ ID NO: 458977 - RNA, 22 nt, Human
aaugucugccagaacugaucau

SEQ ID NO: 458978 - RNA, 23 nt, Human
cccuggaguaaauucuuggaagg

SEQ ID NO: 458979 - RNA, 22 nt, Human
ccucucuguguggccucuccau

SEQ ID NO: 458980 - RNA, 22 nt, Human
cuuuguuuauauuucuccucga

SEQ ID NO: 458981 - RNA, 22 nt, Human
ugggccugccccaggcuucagc

SEQ ID NO: 458982 - RNA, 22 nt, Human
caggugcccagcuccugcugug

SEQ ID NO: 458983 - RNA, 19 nt, Human
cagcugccuuuucuuugca

SEQ ID NO: 458984 - RNA, 22 nt, Human
ugcccaaguguuuggcugaguc

SEQ ID NO: 458985 - RNA, 22 nt, Human
acccaggagcaggcugggcagu

SEQ ID NO: 458986 - RNA, 22 nt, Human
aagaugcaugcugaagcuggcu

SEQ ID NO: 458987 - RNA, 22 nt, Human
ccucgaccuccccaggcucagg

SEQ ID NO: 458988 - RNA, 22 nt, Human
cuggggggagcugcguccagca

SEQ ID NO: 458989 - RNA, 22 nt, Human
acaguggagaagcaaaugcagu

SEQ ID NO: 458990 - RNA, 22 nt, Human
auuucugugcaguaaaugguga

SEQ ID NO: 458991 - RNA, 22 nt, Human
aacaggagaguaaauauaugau

SEQ ID NO: 458992 - RNA, 22 nt, Human
gcccagcacauugcugaggacc

SEQ ID NO: 458993 - RNA, 22 nt, Human
acagagcauuugggacagagag

SEQ ID NO: 458994 - RNA, 22 nt, Human
ccugaggacacacgcugcagga

SEQ ID NO: 458995 - RNA, 22 nt, Human
uccuguaguugcuaaguuuguu

SEQ ID NO: 458996 - RNA, 22 nt, Human
uccauuuuagagaugaagaaac

SEQ ID NO: 458997 - RNA, 22 nt, Human
agugcccuggcccagcuggacc

SEQ ID NO: 458998 - RNA, 22 nt, Human
ugcuuuuaagaacaaugcugcu

SEQ ID NO: 458999 - RNA, 22 nt, Human
aauaugcauguauacaugugua

SEQ ID NO: 459000 - RNA, 22 nt, Human
cagaaaaccugacucuagaacu

SEQ ID NO: 459001 - RNA, 20 nt, Human
gcucccagccugcagucccc

SEQ ID NO: 459002 - RNA, 22 nt, Human
ugaaggccacuuccugugagcu

SEQ ID NO: 459003 - RNA, 22 nt, Human
caagaaauguuuacugagcauc

SEQ ID NO: 459004 - RNA, 22 nt, Human
ugucccagggaaggcccagcac

SEQ ID NO: 459005 - RNA, 22 nt, Human
aggcccaguuauccuacuuguu

SEQ ID NO: 459006 - RNA, 19 nt, Human
aauguaguguuaugucaac

SEQ ID NO: 459007 - RNA, 22 nt, Human
cugggcagcugugcaaacaaua

SEQ ID NO: 459008 - RNA, 23 nt, Human
gagugcagaauagacaugcagug

SEQ ID NO: 459009 - RNA, 22 nt, Human
cauuucauaguugucacaauaa

SEQ ID NO: 459010 - RNA, 22 nt, Human
ccugggcagggagaccaggcuc

SEQ ID NO: 459011 - RNA, 22 nt, Human
agagcugagaauguggcuuccu

SEQ ID NO: 459012 - RNA, 22 nt, Human
ugucccagacacaguaugcgcu

SEQ ID NO: 459013 - RNA, 22 nt, Human
ugaaggccuaacuuccagugcu

SEQ ID NO: 459014 - RNA, 22 nt, Human
gggagcuggagcuggaagacuc

SEQ ID NO: 459015 - RNA, 22 nt, Human
caagagcuagaaauugguuaga

SEQ ID NO: 459016 - RNA, 22 nt, Human
gggcuucucuuuagugagcuga

SEQ ID NO: 459017 - RNA, 22 nt, Human
caggcagcgcucguggccuggc

SEQ ID NO: 459018 - RNA, 22 nt, Human
aaacauuugcaacucgguuugg

SEQ ID NO: 459019 - RNA, 19 nt, Human
aggacccuuauccuggcuu

SEQ ID NO: 459020 - RNA, 22 nt, Human
gaagagcugugauucaggcuua

SEQ ID NO: 459021 - RNA, 22 nt, Human
ccuggcugguggcagcgacaag

SEQ ID NO: 459022 - RNA, 22 nt, Human
cauuguuauagcauuacacacc

SEQ ID NO: 459023 - RNA, 17 nt, Human
ucuguccagggagugug

SEQ ID NO: 459024 - RNA, 22 nt, Human
uacaaagccugguagauaucug

SEQ ID NO: 459025 - RNA, 22 nt, Human
uuagauaaauugcaacuugauu

SEQ ID NO: 459026 - RNA, 22 nt, Human
agcugguucagaaauuagaugg

SEQ ID NO: 459027 - RNA, 22 nt, Human
gguucacacuuucaugauuuca

SEQ ID NO: 459028 - RNA, 22 nt, Human
uaagaacaguagaacaguaggu

SEQ ID NO: 459029 - RNA, 22 nt, Human
aaccauuugcaguuacugagac

SEQ ID NO: 459030 - RNA, 22 nt, Human
cucuggaguucucaugaggaac

SEQ ID NO: 459031 - RNA, 22 nt, Human
ugaggcagcauucuucaagaca

SEQ ID NO: 459032 - RNA, 22 nt, Human
gcagugggcaacaagagcugga

SEQ ID NO: 459033 - RNA, 22 nt, Human
uguuuauucauggcuaaugaaa

SEQ ID NO: 459034 - RNA, 22 nt, Human
aaaggcuccuucucccaugacc

SEQ ID NO: 459035 - RNA, 20 nt, Human
gugaccagaagacagugggu

SEQ ID NO: 459036 - RNA, 22 nt, Human
cacagguguucuugcagugaaa

SEQ ID NO: 459037 - RNA, 22 nt, Human
gcugucagaaggugaaggguaa

SEQ ID NO: 459038 - RNA, 22 nt, Human
cagaccagcucuaugaacccaa

SEQ ID NO: 459039 - RNA, 22 nt, Human
ucuggagccuuggaugggaaag

SEQ ID NO: 459040 - RNA, 23 nt, Human
acaugggagggacauggaggcug

SEQ ID NO: 459041 - RNA, 23 nt, Human
cuccucguaacucuguggugggu

SEQ ID NO: 459042 - RNA, 22 nt, Human
caggaccccauauucacugaac

SEQ ID NO: 459043 - RNA, 17 nt, Human
cucacggaggaugaauc

SEQ ID NO: 459044 - RNA, 22 nt, Human
cuggcagcucuacucagagccu

SEQ ID NO: 459045 - RNA, 22 nt, Human
agaacagcaguuaugguucauu

SEQ ID NO: 459046 - RNA, 22 nt, Human
acacauuuacauguuuacguau

SEQ ID NO: 459047 - RNA, 22 nt, Human
agccccuuccaguucucagauc

SEQ ID NO: 459048 - RNA, 17 nt, Human
gccaaaggguuccaauc

SEQ ID NO: 459049 - RNA, 20 nt, Human
aggaaaaauggaaacuggag

SEQ ID NO: 459050 - RNA, 22 nt, Human
uuugcaauuugugcugcaaaug

SEQ ID NO: 459051 - RNA, 22 nt, Human
ggagccaggggaccuucacaga

SEQ ID NO: 459052 - RNA, 22 nt, Human
aagcaagacagaaguuacugcc

SEQ ID NO: 459053 - RNA, 22 nt, Human
ggggccagcaauguugaggaau

SEQ ID NO: 459054 - RNA, 22 nt, Human
uaaguucauuagacuacagaua

SEQ ID NO: 459055 - RNA, 22 nt, Human
ggugaggggagagugaaagaaa

SEQ ID NO: 459056 - RNA, 23 nt, Human
uccaggcacgcauuucuucuagc

SEQ ID NO: 459057 - RNA, 22 nt, Human
uaaauguggagacucaggaguc

SEQ ID NO: 459058 - RNA, 22 nt, Human
ugaggcaguucuuacuuguauu

SEQ ID NO: 459059 - RNA, 22 nt, Human
ugcacuggggucccagcgcacg

SEQ ID NO: 459060 - RNA, 22 nt, Human
cccaggagguagagguugcagu

SEQ ID NO: 459061 - RNA, 22 nt, Human
cacaucagggcugcuugggggu

SEQ ID NO: 459062 - RNA, 22 nt, Human
aaguucaagucuccugaguaua

SEQ ID NO: 459063 - RNA, 22 nt, Human
uuccauaauaggcuuaagugaa

SEQ ID NO: 459064 - RNA, 22 nt, Human
gccugucugcgucacgcuuauu

SEQ ID NO: 459065 - RNA, 22 nt, Human
acaaagugcacaagaugagaac

SEQ ID NO: 459066 - RNA, 22 nt, Human
uccugcagaucaaagccuuuga

SEQ ID NO: 459067 - RNA, 22 nt, Human
ccagggcagccaacccagaugc

SEQ ID NO: 459068 - RNA, 22 nt, Human
gaggcagcgggucaggaccgug

SEQ ID NO: 459069 - RNA, 22 nt, Human
gcugggaggaauuuggggaaua

SEQ ID NO: 459070 - RNA, 22 nt, Human
gggaccugcgccacucacuguc

SEQ ID NO: 459071 - RNA, 22 nt, Human
ugguggcuguugcagaacugag

SEQ ID NO: 459072 - RNA, 22 nt, Human
cugggcucagcccaugcugucc

SEQ ID NO: 459073 - RNA, 22 nt, Human
aaauggaucuguggaauacauu

SEQ ID NO: 459074 - RNA, 20 nt, Human
ugugaaagcaguagaaugac

SEQ ID NO: 459075 - RNA, 22 nt, Human
uggcagaggcucugugauguug

SEQ ID NO: 459076 - RNA, 22 nt, Human
gggccucugugcagaggggccu

SEQ ID NO: 459077 - RNA, 22 nt, Human
gcucagagggaacaaggggcug

SEQ ID NO: 459078 - RNA, 22 nt, Human
ucuuacaccauucaaauauuuu

SEQ ID NO: 459079 - RNA, 22 nt, Human
agucaacaaaaauguggagccu

SEQ ID NO: 459080 - RNA, 22 nt, Human
uuacaaagaguguucuuuucca

SEQ ID NO: 459081 - RNA, 19 nt, Human
cccuggcaggcaagccugg

SEQ ID NO: 459082 - RNA, 22 nt, Human
aggaagagcuggaccagaggac

SEQ ID NO: 459083 - RNA, 22 nt, Human
uccaggcaaaaggaacugcuug

SEQ ID NO: 459084 - RNA, 22 nt, Human
cagagccacugucugccaggca

SEQ ID NO: 459085 - RNA, 22 nt, Human
gcucaggacuggaggagcgggg

SEQ ID NO: 459086 - RNA, 20 nt, Human
ccuuuauuauuuguaugaug

SEQ ID NO: 459087 - RNA, 22 nt, Human
gaagccaguguuugaagaauuu

SEQ ID NO: 459088 - RNA, 22 nt, Human
cucuggccagagccugcgggaa

SEQ ID NO: 459089 - RNA, 22 nt, Human
ggaaccaguggaaugauaugcu

SEQ ID NO: 459090 - RNA, 22 nt, Human
ugcagcugcuugauucaucuug

SEQ ID NO: 459091 - RNA, 22 nt, Human
auccaaaucaugucagaagaac

SEQ ID NO: 459092 - RNA, 22 nt, Human
guauuaggagguggagccuuug

SEQ ID NO: 459093 - RNA, 22 nt, Human
aucuggcuauugacauguuaua

SEQ ID NO: 459094 - RNA, 22 nt, Human
caguaugucuacuggacaaagu

SEQ ID NO: 459095 - RNA, 22 nt, Human
uuuaaauuuguguuuagagggu

SEQ ID NO: 459096 - RNA, 22 nt, Human
uaaguuuucuggaauaacuugg

SEQ ID NO: 459097 - RNA, 23 nt, Human
caggacaugggaggaaguauggc

SEQ ID NO: 459098 - RNA, 22 nt, Human
caggggcaggugugagaucauc

SEQ ID NO: 459099 - RNA, 23 nt, Human
aaaugcagggucgcagguuacag

SEQ ID NO: 459100 - RNA, 22 nt, Human
ggguuggggcccagcagucugc

SEQ ID NO: 459101 - RNA, 23 nt, Human
cugcagccgcguggggacgugga

SEQ ID NO: 459102 - RNA, 22 nt, Human
cugcucugaguauuaacggagg

SEQ ID NO: 459103 - RNA, 22 nt, Human
aggcugaggaucguacuuucca

SEQ ID NO: 459104 - RNA, 22 nt, Human
ggcaaaaacagcaaugacuuuu

SEQ ID NO: 459105 - RNA, 22 nt, Human
agggucuguggaugcaucuggg

SEQ ID NO: 459106 - RNA, 22 nt, Human
acuguguguuugucuagcacag

SEQ ID NO: 459107 - RNA, 22 nt, Human
ccuggcuuuuguuuauaaauuc

SEQ ID NO: 459108 - RNA, 22 nt, Human
ggcuagaauaauugacuucauu

SEQ ID NO: 459109 - RNA, 22 nt, Human
agagcauccaucggccaggacc

SEQ ID NO: 459110 - RNA, 22 nt, Human
ggagcuguuggcagcuaucuug

SEQ ID NO: 459111 - RNA, 22 nt, Human
gucacuguauccagguuccagc

SEQ ID NO: 459112 - RNA, 22 nt, Human
cacuguacagcauuaacaaggc

SEQ ID NO: 459113 - RNA, 22 nt, Human
uauaauuuaucaugucacaguu

SEQ ID NO: 459114 - RNA, 22 nt, Human
cagagcaucgcgcagagagccu

SEQ ID NO: 459115 - RNA, 22 nt, Human
gcugucugucucugucccacca

SEQ ID NO: 459116 - RNA, 22 nt, Human
agggacugagcuaggaucuagu

SEQ ID NO: 459117 - RNA, 22 nt, Human
aggucauuuccuuagaggcaga

SEQ ID NO: 459118 - RNA, 22 nt, Human
ucagcagugcagggugaggcag

SEQ ID NO: 459119 - RNA, 22 nt, Human
uugucuuuggaaauuuaauguu

SEQ ID NO: 459120 - RNA, 20 nt, Human
cuguagggugcagcaggcuc

SEQ ID NO: 459121 - RNA, 22 nt, Human
cgcugccaggucaccaggggua

SEQ ID NO: 459122 - RNA, 22 nt, Human
aaggcuuuuaacuacuguuuua

SEQ ID NO: 459123 - RNA, 20 nt, Human
auacacauauucuugcaacu

SEQ ID NO: 459124 - RNA, 22 nt, Human
ccagcauggcaccugagaugag

SEQ ID NO: 459125 - RNA, 22 nt, Human
cacaggagauugaucuauuggu

SEQ ID NO: 459126 - RNA, 22 nt, Human
agaaaucucaguaucucaggga

SEQ ID NO: 459127 - RNA, 22 nt, Human
guauuauuggguaguaugguaa

SEQ ID NO: 459128 - RNA, 22 nt, Human
gcuggccugaccugaggcuggg

SEQ ID NO: 459129 - RNA, 19 nt, Human
ucaaugcaugaaaucagcc

SEQ ID NO: 459130 - RNA, 22 nt, Human
uugaaggaggcuccuuuuuaaa

SEQ ID NO: 459131 - RNA, 22 nt, Human
ucaccaggcuccuguuaagaug

SEQ ID NO: 459132 - RNA, 22 nt, Human
aauacaaucaaauucacuagca

SEQ ID NO: 459133 - RNA, 22 nt, Human
cugaaugaggaaaagagugagg

SEQ ID NO: 459134 - RNA, 22 nt, Human
agggaggucuuugaggggcuua

SEQ ID NO: 459135 - RNA, 22 nt, Human
accagagcagacuacuggaggu

SEQ ID NO: 459136 - RNA, 22 nt, Human
cuguauuuucaugccuacguac

SEQ ID NO: 459137 - RNA, 22 nt, Human
cucuccuugcagauggcugccu

SEQ ID NO: 459138 - RNA, 22 nt, Human
ccagagaggccaaggucguggu

SEQ ID NO: 459139 - RNA, 22 nt, Human
agcucugcaggcacagcugagg

SEQ ID NO: 459140 - RNA, 22 nt, Human
cagggcagugaagaacacacgu

SEQ ID NO: 459141 - RNA, 22 nt, Human
ggcaaaaaguucccaucagugu

SEQ ID NO: 459142 - RNA, 22 nt, Human
aagaaauguagagccuaguaaa

SEQ ID NO: 459143 - RNA, 22 nt, Human
uucuaguuuucaguccaccagg

SEQ ID NO: 459144 - RNA, 22 nt, Human
gagcugucucuauaugaaugcu

SEQ ID NO: 459145 - RNA, 19 nt, Human
gcagcugugggaagagcca

SEQ ID NO: 459146 - RNA, 22 nt, Human
uguauuuucuucuggaagcuua

SEQ ID NO: 459147 - RNA, 22 nt, Human
uccaucagauucccuccugaga

SEQ ID NO: 459148 - RNA, 23 nt, Human
ccucagggucuagcagagagaag

SEQ ID NO: 459149 - RNA, 20 nt, Human
caggccucugggggcccugg

SEQ ID NO: 459150 - RNA, 22 nt, Human
uauugaggaucuccugcuaauu

SEQ ID NO: 459151 - RNA, 22 nt, Human
ucagagugaccuuacauggucu

SEQ ID NO: 459152 - RNA, 22 nt, Human
ggcugcagcggauuggggauug

SEQ ID NO: 459153 - RNA, 22 nt, Human
auuucucucauuguuagcuagg

SEQ ID NO: 459154 - RNA, 22 nt, Human
aggaaggguucuuugugaaaga

SEQ ID NO: 459155 - RNA, 22 nt, Human
ucuuauuauuguuguaaaagca

SEQ ID NO: 459156 - RNA, 22 nt, Human
gcucccucugcucaggcacuug

SEQ ID NO: 459157 - RNA, 22 nt, Human
ccagagagagaggucaauggca

SEQ ID NO: 459158 - RNA, 22 nt, Human
ggcuccagggaguggagagaag

SEQ ID NO: 459159 - RNA, 21 nt, Human
agcagcagaucuggugagggc

SEQ ID NO: 459160 - RNA, 22 nt, Human
acuuuggaucugauguaaucag

SEQ ID NO: 459161 - RNA, 22 nt, Human
caucucaugggcaugccaagcu

SEQ ID NO: 459162 - RNA, 22 nt, Human
agaggcagaaguguucaaaccc

SEQ ID NO: 459163 - RNA, 22 nt, Human
ucaaugauuagaguuuagugug

SEQ ID NO: 459164 - RNA, 22 nt, Human
uugcauugcuuggucuucaaga

SEQ ID NO: 459165 - RNA, 22 nt, Human
ucacauuuuuuacuggacuuaa

SEQ ID NO: 459166 - RNA, 22 nt, Human
cuggccagcauuuuugcuuuag

SEQ ID NO: 459167 - RNA, 22 nt, Human
cgggcagaucacacagggcuug

SEQ ID NO: 459168 - RNA, 22 nt, Human
cauuuguaguaucuguuuauau

SEQ ID NO: 459169 - RNA, 22 nt, Human
agucaguguucuccggagaggc

SEQ ID NO: 459170 - RNA, 22 nt, Human
auuuucauuuugcagggugaga

SEQ ID NO: 459171 - RNA, 22 nt, Human
gcugguuagaaaacagagcuca

SEQ ID NO: 459172 - RNA, 22 nt, Human
ucaggagacuuaugucacagug

SEQ ID NO: 459173 - RNA, 22 nt, Human
ccccagcugcauacuugccaag

SEQ ID NO: 459174 - RNA, 22 nt, Human
agccagagcugaugucauucuc

SEQ ID NO: 459175 - RNA, 21 nt, Human
aggagggcacaaggccaggaa

SEQ ID NO: 459176 - RNA, 22 nt, Human
cugccacuuacuaggcauggug

SEQ ID NO: 459177 - RNA, 22 nt, Human
aagaacaacugcuuuaaaagca

SEQ ID NO: 459178 - RNA, 22 nt, Human
cucucugggggccaugccaaga

SEQ ID NO: 459179 - RNA, 22 nt, Human
ccacugucugcaggccucagca

SEQ ID NO: 459180 - RNA, 22 nt, Human
gcaggcugauagaggauuccau

SEQ ID NO: 459181 - RNA, 22 nt, Human
gccaggcagcagcgaggauggu

SEQ ID NO: 459182 - RNA, 22 nt, Human
uggcucagaagaaaagguaaac

SEQ ID NO: 459183 - RNA, 22 nt, Human
ggccucuggucaagacaagcau

SEQ ID NO: 459184 - RNA, 22 nt, Human
uccagggauguccuguagcacu

SEQ ID NO: 459185 - RNA, 22 nt, Human
gcagcugccuauucagggcuug

SEQ ID NO: 459186 - RNA, 22 nt, Human
aaggcagaaauucaacuacugg

SEQ ID NO: 459187 - RNA, 22 nt, Human
uuguaacagguacuaaauaacu

SEQ ID NO: 459188 - RNA, 22 nt, Human
ugcacagagagaugagacacgu

SEQ ID NO: 459189 - RNA, 19 nt, Human
agcagcuggagguggagug

SEQ ID NO: 459190 - RNA, 23 nt, Human
gccuggagaaaagcugcaguuca

SEQ ID NO: 459191 - RNA, 22 nt, Human
cugaggcugggcugaggguaua

SEQ ID NO: 459192 - RNA, 22 nt, Human
ugaggcaggagguugagaacug

SEQ ID NO: 459193 - RNA, 22 nt, Human
ucuggcucauaggaaggccauu

SEQ ID NO: 459194 - RNA, 22 nt, Human
uucuaguguccuuggacuugcu

SEQ ID NO: 459195 - RNA, 22 nt, Human
ccccaggacacauggaccaagu

SEQ ID NO: 459196 - RNA, 22 nt, Human
uucagaaagugaaucuuguuau

SEQ ID NO: 459197 - RNA, 18 nt, Human
acucaggaaaugaugaca

SEQ ID NO: 459198 - RNA, 22 nt, Human
uuguuucauggggauguuuauu

SEQ ID NO: 459199 - RNA, 22 nt, Human
ggauggagaugaccauggugac

SEQ ID NO: 459200 - RNA, 22 nt, Human
cugugagcuggguggccaggac

SEQ ID NO: 459201 - RNA, 22 nt, Human
agagcuggcugguagcccugau

SEQ ID NO: 459202 - RNA, 22 nt, Human
gugauugcccagcaccauuguu

SEQ ID NO: 459203 - RNA, 22 nt, Human
agggaaauuaaugugagcaaug

SEQ ID NO: 459204 - RNA, 19 nt, Human
agacagagcucaguggguu

SEQ ID NO: 459205 - RNA, 22 nt, Human
ugucucagggcagcagcagggg

SEQ ID NO: 459206 - RNA, 22 nt, Human
augcuguguggucaaguuaauu

SEQ ID NO: 459207 - RNA, 22 nt, Human
agcaccuguggcucaugcucgu

SEQ ID NO: 459208 - RNA, 22 nt, Human
caggaagcugugaaggagacgg

SEQ ID NO: 459209 - RNA, 22 nt, Human
agcagggcuguguagguaauga

SEQ ID NO: 459210 - RNA, 22 nt, Human
cugccucugguuuuggucccug

SEQ ID NO: 459211 - RNA, 22 nt, Human
caaaagcaguucuaucugaguu

SEQ ID NO: 459212 - RNA, 22 nt, Human
ccuuccuggagcccaugcagau

SEQ ID NO: 459213 - RNA, 22 nt, Human
uagggacccucccugcucuaac

SEQ ID NO: 459214 - RNA, 22 nt, Human
cuacauuuggagaguauaggaa

SEQ ID NO: 459215 - RNA, 22 nt, Human
uggaggcaccacuggcugcccg

SEQ ID NO: 459216 - RNA, 22 nt, Human
cucccuggcuuuguccugaggc

SEQ ID NO: 459217 - RNA, 23 nt, Human
uuuauuuauuuaggcugagggau

SEQ ID NO: 459218 - RNA, 20 nt, Human
gggcuagaccagggcagagg

SEQ ID NO: 459219 - RNA, 22 nt, Human
gucacacucagaaugacuagag

SEQ ID NO: 459220 - RNA, 22 nt, Human
ccagagccagagaggugccugc

SEQ ID NO: 459221 - RNA, 22 nt, Human
uucaaauuaccacauuugcuua

SEQ ID NO: 459222 - RNA, 23 nt, Human
uggcuucugccccauucucucca

SEQ ID NO: 459223 - RNA, 18 nt, Human
cgaggcaggcggaucacg

SEQ ID NO: 459224 - RNA, 20 nt, Human
agucucuguagugccugaga

SEQ ID NO: 459225 - RNA, 22 nt, Human
agggccacaguggggccugaga

SEQ ID NO: 459226 - RNA, 22 nt, Human
gcugccuggagcucagccugcc

SEQ ID NO: 459227 - RNA, 22 nt, Human
aggcacugggaauaugcugagg

SEQ ID NO: 459228 - RNA, 22 nt, Human
aacagaacccgagugugaaucu

SEQ ID NO: 459229 - RNA, 22 nt, Human
agagccagcaacucuagcccug

SEQ ID NO: 459230 - RNA, 22 nt, Human
ugcagggacacgaagacaaaua

SEQ ID NO: 459231 - RNA, 19 nt, Human
acagaaauguaagugagac

SEQ ID NO: 459232 - RNA, 22 nt, Human
uccugccugcaaucccagcacu

SEQ ID NO: 459233 - RNA, 22 nt, Human
ucaucaaagucaaagaaugacu

SEQ ID NO: 459234 - RNA, 21 nt, Human
uuaagagcuuagcaguaggcc

SEQ ID NO: 459235 - RNA, 22 nt, Human
gagcacagcuggagguagcauu

SEQ ID NO: 459236 - RNA, 22 nt, Human
uuguccuuaccucaaucuggaa

SEQ ID NO: 459237 - RNA, 22 nt, Human
uugaaagggauauaucuuucug

SEQ ID NO: 459238 - RNA, 22 nt, Human
ucucagaggucuucagccucug

SEQ ID NO: 459239 - RNA, 22 nt, Human
uggcucagaugcucuuccagug

SEQ ID NO: 459240 - RNA, 22 nt, Human
uuugcagcaaggagagagcauu

SEQ ID NO: 459241 - RNA, 22 nt, Human
aaaugcaccuugcugugagacu

SEQ ID NO: 459242 - RNA, 20 nt, Human
ugcagggccuaaaaagggaa

SEQ ID NO: 459243 - RNA, 22 nt, Human
uuggcagggccaggcucucucu

SEQ ID NO: 459244 - RNA, 22 nt, Human
ccaaaguccacaguuuacauua

SEQ ID NO: 459245 - RNA, 22 nt, Human
aauguguagauguugcauuccu

SEQ ID NO: 459246 - RNA, 22 nt, Human
uggcagagaacacacaugauuc

SEQ ID NO: 459247 - RNA, 22 nt, Human
uguccucaaggagcuucagucu

SEQ ID NO: 459248 - RNA, 22 nt, Human
agcuuuauuaacucuccaggug

SEQ ID NO: 459249 - RNA, 22 nt, Human
gccaguuccuguggagucagag

SEQ ID NO: 459250 - RNA, 22 nt, Human
gcaggcagaucaccugucagga

SEQ ID NO: 459251 - RNA, 22 nt, Human
uggcucagauuuuuguaggcuu

SEQ ID NO: 459252 - RNA, 22 nt, Human
gcauggcaaauaucgagggcag

SEQ ID NO: 459253 - RNA, 22 nt, Human
augcagguugggcaaguguggg

SEQ ID NO: 459254 - RNA, 20 nt, Human
cugagcgucuaagaggugag

SEQ ID NO: 459255 - RNA, 22 nt, Human
gcagcguggggacaggagcuca

SEQ ID NO: 459256 - RNA, 22 nt, Human
aaaugcuugcucuugauuauuu

SEQ ID NO: 459257 - RNA, 22 nt, Human
cucaggaugucggugacuauug

SEQ ID NO: 459258 - RNA, 20 nt, Human
ggggcccaagcccucuugcc

SEQ ID NO: 459259 - RNA, 22 nt, Human
uagggaccuuagaauuguaugu

SEQ ID NO: 459260 - RNA, 22 nt, Human
ucaggcugguggucagauggcu

SEQ ID NO: 459261 - RNA, 22 nt, Human
gaacauuuaugaugcaauaccu

SEQ ID NO: 459262 - RNA, 22 nt, Human
cuauuucugccuaaugaccugu

SEQ ID NO: 459263 - RNA, 22 nt, Human
ggcagaagaaaggcuaagucuc

SEQ ID NO: 459264 - RNA, 22 nt, Human
gagcugcuucugugugccgggu

SEQ ID NO: 459265 - RNA, 22 nt, Human
ggagcugugcugggugaucagg

SEQ ID NO: 459266 - RNA, 22 nt, Human
gcugccucugcacagcucacuc

SEQ ID NO: 459267 - RNA, 22 nt, Human
agcagggcagcuuuuuucagaa

SEQ ID NO: 459268 - RNA, 22 nt, Human
uucaguuucagucuugcaaaaa

SEQ ID NO: 459269 - RNA, 22 nt, Human
uuucuacauuuguaaccagauu

SEQ ID NO: 459270 - RNA, 22 nt, Human
cugguucauccccuuccaggaa

SEQ ID NO: 459271 - RNA, 22 nt, Human
aguggagaauaugcagaaagcc

SEQ ID NO: 459272 - RNA, 22 nt, Human
cagaguguaucuguguaagcau

SEQ ID NO: 459273 - RNA, 22 nt, Human
augaaggauggcuggcugcccu

SEQ ID NO: 459274 - RNA, 22 nt, Human
ccugggcaggaugggcccggug

SEQ ID NO: 459275 - RNA, 22 nt, Human
ccaggcuggauuuugcaguuca

SEQ ID NO: 459276 - RNA, 22 nt, Human
uacauucaacaugucacuaugu

SEQ ID NO: 459277 - RNA, 22 nt, Human
agaagcagacucugaggcaagg

SEQ ID NO: 459278 - RNA, 20 nt, Human
gugggcagcaggcauacugg

SEQ ID NO: 459279 - RNA, 22 nt, Human
cuggguggcagagccugcagug

SEQ ID NO: 459280 - RNA, 22 nt, Human
ccagagcuccagggcuacagaa

SEQ ID NO: 459281 - RNA, 20 nt, Human
agaagccaagugacauguuu

SEQ ID NO: 459282 - RNA, 22 nt, Human
agaagugagugugacucagcag

SEQ ID NO: 459283 - RNA, 22 nt, Human
aagggaaaucauauggugcagu

SEQ ID NO: 459284 - RNA, 19 nt, Human
augagcuggcauuucaggu

SEQ ID NO: 459285 - RNA, 22 nt, Human
agguagagcuccaguagaaaau

SEQ ID NO: 459286 - RNA, 21 nt, Human
aguucauacugaguaacaaaa

SEQ ID NO: 459287 - RNA, 22 nt, Human
gcucugagcacugugcggcugg

SEQ ID NO: 459288 - RNA, 22 nt, Human
ucugccugccagucugguccuc

SEQ ID NO: 459289 - RNA, 22 nt, Human
gcaaaggcuagagacacaggga

SEQ ID NO: 459290 - RNA, 21 nt, Human
gauugaaaccauggcagugag

SEQ ID NO: 459291 - RNA, 22 nt, Human
auuacaaaagaagggagaaggu

SEQ ID NO: 459292 - RNA, 22 nt, Human
gagggaggcaucaugaauccag

SEQ ID NO: 459293 - RNA, 22 nt, Human
ugcuugggaauguggagucaga

SEQ ID NO: 459294 - RNA, 22 nt, Human
ccagggugggguccaggaacca

SEQ ID NO: 459295 - RNA, 22 nt, Human
ccagucccgcaugguccagaau

SEQ ID NO: 459296 - RNA, 22 nt, Human
uuuugaaagggugauuuggcuu

SEQ ID NO: 459297 - RNA, 22 nt, Human
ugggagcaccuugagggcagaa

SEQ ID NO: 459298 - RNA, 22 nt, Human
aaauccuaaaaguuugacuuaa

SEQ ID NO: 459299 - RNA, 22 nt, Human
auguggaaugaacaaaggaggc

SEQ ID NO: 459300 - RNA, 22 nt, Human
cuggcuccacucccugccugac

SEQ ID NO: 459301 - RNA, 22 nt, Human
cucccaggggaacuaucaagua

SEQ ID NO: 459302 - RNA, 22 nt, Human
cuggagcccugaaugggcagga

SEQ ID NO: 459303 - RNA, 22 nt, Human
agagaagacuuacagccacagu

SEQ ID NO: 459304 - RNA, 22 nt, Human
aagauuucucuccuggaaagca

SEQ ID NO: 459305 - RNA, 22 nt, Human
aggagugaguguccucagcaga

SEQ ID NO: 459306 - RNA, 22 nt, Human
uaaggcacacaguugcugcaug

SEQ ID NO: 459307 - RNA, 22 nt, Human
ucuggcaggcaaucggcucugg

SEQ ID NO: 459308 - RNA, 22 nt, Human
uucaggaugaaagugugcaaca

SEQ ID NO: 459309 - RNA, 22 nt, Human
gcucugagagugggugauucug

SEQ ID NO: 459310 - RNA, 22 nt, Human
uggugcaagucucugaggaggg

SEQ ID NO: 459311 - RNA, 22 nt, Human
caggucccgccccgggcugacc

SEQ ID NO: 459312 - RNA, 22 nt, Human
uccagaguacggaagagucauc

SEQ ID NO: 459313 - RNA, 22 nt, Human
aaaaaugucauuauggaacuga

SEQ ID NO: 459314 - RNA, 22 nt, Human
uuagaucuuaggcaaauguguu

SEQ ID NO: 459315 - RNA, 22 nt, Human
uccuugaauugugccacuuacc

SEQ ID NO: 459316 - RNA, 22 nt, Human
gguggguuuggaagagcaggcu

SEQ ID NO: 459317 - RNA, 22 nt, Human
cacagcuggugcacuagcucug

SEQ ID NO: 459318 - RNA, 22 nt, Human
aggugaaguugaggaggcagaa

SEQ ID NO: 459319 - RNA, 22 nt, Human
uuauuuuuaaaaguucacacag

SEQ ID NO: 459320 - RNA, 22 nt, Human
gacaauuucucaauauagaaac

SEQ ID NO: 459321 - RNA, 22 nt, Human
ggggagugacgcagggccauag

SEQ ID NO: 459322 - RNA, 22 nt, Human
gcugagagugggugcagugcuu

SEQ ID NO: 459323 - RNA, 22 nt, Human
gagcugggcacacgccacuuga

SEQ ID NO: 459324 - RNA, 23 nt, Human
gccucuggagccccagugcucag

SEQ ID NO: 459325 - RNA, 22 nt, Human
gcugucuguucgagcguguguu

SEQ ID NO: 459326 - RNA, 22 nt, Human
aggcucuguuauucuagagggc

SEQ ID NO: 459327 - RNA, 22 nt, Human
ugucucaguauacgaaacacuu

SEQ ID NO: 459328 - RNA, 22 nt, Human
ugggccugggagggcagacgcu

SEQ ID NO: 459329 - RNA, 22 nt, Human
cugcccugcuugaugacagcga

SEQ ID NO: 459330 - RNA, 22 nt, Human
uugugcaauuuaaaaucuuccu

SEQ ID NO: 459331 - RNA, 17 nt, Human
aauagcugcucagagag

SEQ ID NO: 459332 - RNA, 16 nt, Human
ggagagugucugcaaa

SEQ ID NO: 459333 - RNA, 22 nt, Human
uacugugacagaguacuuaaac

SEQ ID NO: 459334 - RNA, 18 nt, Human
gggaagaggaucuggccc

SEQ ID NO: 459335 - RNA, 22 nt, Human
ggggaccuaggcucugucucuu

SEQ ID NO: 459336 - RNA, 22 nt, Human
ggagacagugguagggccuaag

SEQ ID NO: 459337 - RNA, 22 nt, Human
gaagcagcuagcccacuaguca

SEQ ID NO: 459338 - RNA, 23 nt, Human
ucagcugcuuccuccugccugcc

SEQ ID NO: 459339 - RNA, 18 nt, Human
ccauuucaugauuauuac

SEQ ID NO: 459340 - RNA, 22 nt, Human
cugaggcugaagagggccuacg

SEQ ID NO: 459341 - RNA, 22 nt, Human
auacaaaguauuaauccuggau

SEQ ID NO: 459342 - RNA, 22 nt, Human
uucacauuauaaucaguucugc

SEQ ID NO: 459343 - RNA, 22 nt, Human
cagcccugcacgcugccuccgc

SEQ ID NO: 459344 - RNA, 22 nt, Human
gcagggcagagggagaaucucu

SEQ ID NO: 459345 - RNA, 22 nt, Human
aaggcacuuuucuaaagaccuu

SEQ ID NO: 459346 - RNA, 22 nt, Human
aaaguuugcaauuuauguuaau

SEQ ID NO: 459347 - RNA, 22 nt, Human
gucuggagccacccuaagcauu

SEQ ID NO: 459348 - RNA, 22 nt, Human
agcugcccuucucuugcccuug

SEQ ID NO: 459349 - RNA, 22 nt, Human
ggcagagacuggguuggcagag

SEQ ID NO: 459350 - RNA, 22 nt, Human
gcccuggaaucucuccauggga

SEQ ID NO: 459351 - RNA, 22 nt, Human
uauuuccugcauggugauguaa

SEQ ID NO: 459352 - RNA, 22 nt, Human
cgcagggccgcgagcgggacca

SEQ ID NO: 459353 - RNA, 22 nt, Human
uuuauuaugauggacaccuucg

SEQ ID NO: 459354 - RNA, 20 nt, Human
cagggcucugggccuggccu

SEQ ID NO: 459355 - RNA, 22 nt, Human
cuauuuaucuauuucugaauga

SEQ ID NO: 459356 - RNA, 22 nt, Human
cgaggcagacaaaaguuggaag

SEQ ID NO: 459357 - RNA, 22 nt, Human
aaguucaaguguaaucuuuauu

SEQ ID NO: 459358 - RNA, 22 nt, Human
uugugaguagugccgcaauaaa

SEQ ID NO: 459359 - RNA, 22 nt, Human
ucugucacuauuggccagaaca

SEQ ID NO: 459360 - RNA, 21 nt, Human
cucaggaucuuauauauuagu

SEQ ID NO: 459361 - RNA, 22 nt, Human
aaaguuucaauagaggaagugg

SEQ ID NO: 459362 - RNA, 22 nt, Human
ggagccaguuuagaccucaguu

SEQ ID NO: 459363 - RNA, 22 nt, Human
aguggggagguccaggccaccc

SEQ ID NO: 459364 - RNA, 22 nt, Human
ggucucaggagacuggagagca

SEQ ID NO: 459365 - RNA, 22 nt, Human
uuuuuguagucauuagaagagg

SEQ ID NO: 459366 - RNA, 22 nt, Human
gucccugggaugcccuucuggg

SEQ ID NO: 459367 - RNA, 22 nt, Human
agccacgucccugucaggguca

SEQ ID NO: 459368 - RNA, 22 nt, Human
ccagguguggggaggacucaca

SEQ ID NO: 459369 - RNA, 22 nt, Human
ucagggacuuacaaaccagaag

SEQ ID NO: 459370 - RNA, 22 nt, Human
gugugcaugcauagacaccaca

SEQ ID NO: 459371 - RNA, 22 nt, Human
cagagccauuauggagacuugc

SEQ ID NO: 459372 - RNA, 22 nt, Human
auggaguucugccagcgcugcu

SEQ ID NO: 459373 - RNA, 22 nt, Human
ucccagaggaaauggcagcuga

SEQ ID NO: 459374 - RNA, 22 nt, Human
gagcagcuuaugucaagccaga

SEQ ID NO: 459375 - RNA, 22 nt, Human
uuucuacagcuggugcaacuuu

SEQ ID NO: 459376 - RNA, 22 nt, Human
gacccagcuuaagucacauguu

SEQ ID NO: 459377 - RNA, 22 nt, Human
cccugcagaccaaugccauaga

SEQ ID NO: 459378 - RNA, 22 nt, Human
uggcucugaucagauguccagu

SEQ ID NO: 459379 - RNA, 22 nt, Human
uuugaaagaaaccagugaguga

SEQ ID NO: 459380 - RNA, 22 nt, Human
gggaaauugucaacacucucaa

SEQ ID NO: 459381 - RNA, 22 nt, Human
ucagaguguggugagaugugca

SEQ ID NO: 459382 - RNA, 21 nt, Human
gcaugccugcaucuuaguguu

SEQ ID NO: 459383 - RNA, 22 nt, Human
aagagcaucaaugacucgcagu

SEQ ID NO: 459384 - RNA, 22 nt, Human
auuuaacaagacagagaacugg

SEQ ID NO: 459385 - RNA, 22 nt, Human
gccaccuguuucgcuugcccag

SEQ ID NO: 459386 - RNA, 22 nt, Human
ggcagggugccuggcuccuguu

SEQ ID NO: 459387 - RNA, 22 nt, Human
uauuugaagggagaaagugcca

SEQ ID NO: 459388 - RNA, 22 nt, Human
guacuuccagccaagugagaca

SEQ ID NO: 459389 - RNA, 22 nt, Human
uguggcagaaccagaauucaaa

SEQ ID NO: 459390 - RNA, 22 nt, Human
cucacuguuuaauagcuggauc

SEQ ID NO: 459391 - RNA, 22 nt, Human
acagccugagaguggagcuggc

SEQ ID NO: 459392 - RNA, 22 nt, Human
cagggccagagagggcuggcug

SEQ ID NO: 459393 - RNA, 22 nt, Human
gaguccaggcucagaaacccgu

SEQ ID NO: 459394 - RNA, 22 nt, Human
gugccagcucuccccacaucug

SEQ ID NO: 459395 - RNA, 22 nt, Human
accugggagucacaccugagaa

SEQ ID NO: 459396 - RNA, 17 nt, Human
caggcagacauguaagc

SEQ ID NO: 459397 - RNA, 22 nt, Human
gagcuggugugugcccgagcac

SEQ ID NO: 459398 - RNA, 22 nt, Human
gccugguggugugcucaagugg

SEQ ID NO: 459399 - RNA, 22 nt, Human
guggccuggaugagcuucgaca

SEQ ID NO: 459400 - RNA, 22 nt, Human
ccagcagagucuaggaaggagg

SEQ ID NO: 459401 - RNA, 22 nt, Human
ccagcccuucccaacuggccag

SEQ ID NO: 459402 - RNA, 22 nt, Human
ugcuggggauccguaccaaccc

SEQ ID NO: 459403 - RNA, 22 nt, Human
ccuggccacucagguguggggc

SEQ ID NO: 459404 - RNA, 22 nt, Human
agcugcucaggagagccagguc

SEQ ID NO: 459405 - RNA, 22 nt, Human
ucagaacaauugggaaccauua

SEQ ID NO: 459406 - RNA, 22 nt, Human
ucugucacuuauuaagauggau

SEQ ID NO: 459407 - RNA, 22 nt, Human
acuguacacgugucauuuacag

SEQ ID NO: 459408 - RNA, 22 nt, Human
aagggcagaauagagaagaugg

SEQ ID NO: 459409 - RNA, 22 nt, Human
agcucccagaguccucugccca

SEQ ID NO: 459410 - RNA, 22 nt, Human
ugcugggggugucucaccaggc

SEQ ID NO: 459411 - RNA, 22 nt, Human
ggcauggcuggguucuggugag

SEQ ID NO: 459412 - RNA, 22 nt, Human
ugaaagggguugaguuacagcu

SEQ ID NO: 459413 - RNA, 22 nt, Human
uccagacccaugacccugggga

SEQ ID NO: 459414 - RNA, 22 nt, Human
cacagcuuaugccacugauugg

SEQ ID NO: 459415 - RNA, 22 nt, Human
uaccuugggcuauuaucuuuga

SEQ ID NO: 459416 - RNA, 22 nt, Human
ucauaaaacacaccagguaguu

SEQ ID NO: 459417 - RNA, 22 nt, Human
uucucagauccaucagaagucc

SEQ ID NO: 459418 - RNA, 22 nt, Human
gcccugugccagucacgcugug

SEQ ID NO: 459419 - RNA, 22 nt, Human
auugacaauuagcccuuaggug

SEQ ID NO: 459420 - RNA, 22 nt, Human
ucaaaguuuuugagaauuacau

SEQ ID NO: 459421 - RNA, 22 nt, Human
aggagguggcugaacuugaggg

SEQ ID NO: 459422 - RNA, 22 nt, Human
aagagcuggcucuugcagcagc

SEQ ID NO: 459423 - RNA, 22 nt, Human
uuugacaguaauaaagcacaag

SEQ ID NO: 459424 - RNA, 22 nt, Human
aguuauauuccauagauucaga

SEQ ID NO: 459425 - RNA, 22 nt, Human
cauuaagauuuuuuucuacugg

SEQ ID NO: 459426 - RNA, 22 nt, Human
cucaggauuuacuaauuucaag

SEQ ID NO: 459427 - RNA, 22 nt, Human
ccucugugugugcaugcaugcg

SEQ ID NO: 459428 - RNA, 22 nt, Human
uggcagagugcagaagaggcau

SEQ ID NO: 459429 - RNA, 22 nt, Human
ggguacaaagauuucauaagau

SEQ ID NO: 459430 - RNA, 22 nt, Human
cagcagggggcagcgcagauca

SEQ ID NO: 459431 - RNA, 22 nt, Human
caggccugugacaccgugucug

SEQ ID NO: 459432 - RNA, 22 nt, Human
ccaggagcaacuugaaggcaag

SEQ ID NO: 459433 - RNA, 22 nt, Human
gcccagaguucaaggcugcagu

SEQ ID NO: 459434 - RNA, 22 nt, Human
uggcaggaaaguaacagagcac

SEQ ID NO: 459435 - RNA, 22 nt, Human
cacugcaggucugagauggggg

SEQ ID NO: 459436 - RNA, 22 nt, Human
cagugucuuauuuguagcucag

SEQ ID NO: 459437 - RNA, 22 nt, Human
ggagaugcuauguaguuugguu

SEQ ID NO: 459438 - RNA, 22 nt, Human
agcugguaugaacaggauagga

SEQ ID NO: 459439 - RNA, 22 nt, Human
cuccagucuaguagagccugcu

SEQ ID NO: 459440 - RNA, 22 nt, Human
gccuggagcuacuggacacuga

SEQ ID NO: 459441 - RNA, 22 nt, Human
gcagcugguuaaugggagaauu

SEQ ID NO: 459442 - RNA, 22 nt, Human
cagaggcagaauggagauuugg

SEQ ID NO: 459443 - RNA, 22 nt, Human
gaggaggcuggcgccgccugcc

SEQ ID NO: 459444 - RNA, 22 nt, Human
gcucugggaacugacugccuuc

SEQ ID NO: 459445 - RNA, 22 nt, Human
caaaaugugagucccaccucaa

SEQ ID NO: 459446 - RNA, 22 nt, Human
ugagcccagagcccuuguaggg

SEQ ID NO: 459447 - RNA, 21 nt, Human
uggcugcuggcccucucucca

SEQ ID NO: 459448 - RNA, 22 nt, Human
gcagcugccccgacugugaguc

SEQ ID NO: 459449 - RNA, 17 nt, Human
cauguguaugugggagu

SEQ ID NO: 459450 - RNA, 21 nt, Human
ugauuuccaucuuaaaauaaa

SEQ ID NO: 459451 - RNA, 22 nt, Human
cuggugccuccucccugugcuu

SEQ ID NO: 459452 - RNA, 22 nt, Human
aggccugaaggaagaugagcug

SEQ ID NO: 459453 - RNA, 22 nt, Human
ccaaggaggccccaggucagcu

SEQ ID NO: 459454 - RNA, 22 nt, Human
cugugaggcccugggugcugga

SEQ ID NO: 459455 - RNA, 22 nt, Human
uaaaguucuggugagagguaag

SEQ ID NO: 459456 - RNA, 22 nt, Human
cucugugauuuugugagccaga

SEQ ID NO: 459457 - RNA, 22 nt, Human
gccugccugcugugugcaaguu

SEQ ID NO: 459458 - RNA, 22 nt, Human
caggaacacaaugagucucaaa

SEQ ID NO: 459459 - RNA, 22 nt, Human
uuucacauaugguuguugauug

SEQ ID NO: 459460 - RNA, 22 nt, Human
cagcagugcuucagugugagau

SEQ ID NO: 459461 - RNA, 22 nt, Human
ugcagggcuaagucagagccug

SEQ ID NO: 459462 - RNA, 22 nt, Human
acagagagaauuggguuuacag

SEQ ID NO: 459463 - RNA, 22 nt, Human
gcagggugccgacuucagggau

SEQ ID NO: 459464 - RNA, 22 nt, Human
ugcaggagcugugcggugaggg

SEQ ID NO: 459465 - RNA, 22 nt, Human
guuugcauaucugugaaaugga

SEQ ID NO: 459466 - RNA, 22 nt, Human
gaggcugaauggccagaagcca

SEQ ID NO: 459467 - RNA, 22 nt, Human
auuucucaucaagugccaacuc

SEQ ID NO: 459468 - RNA, 22 nt, Human
uacccagcuccucagaagacca

SEQ ID NO: 459469 - RNA, 22 nt, Human
uccaggcaaagccuuguagacg

SEQ ID NO: 459470 - RNA, 22 nt, Human
guucuugccagcauccucaggu

SEQ ID NO: 459471 - RNA, 22 nt, Human
augcagcaguuuacaaagcaau

SEQ ID NO: 459472 - RNA, 22 nt, Human
augacagaggagugcaggugau

SEQ ID NO: 459473 - RNA, 22 nt, Human
ucagcaggcgguuccuuguggg

SEQ ID NO: 459474 - RNA, 22 nt, Human
ugcagcauucuuggccacuacu

SEQ ID NO: 459475 - RNA, 22 nt, Human
ucagcuuucucaaagaagcugg

SEQ ID NO: 459476 - RNA, 22 nt, Human
auaugcauguacgugugcacaa

SEQ ID NO: 459477 - RNA, 22 nt, Human
ccagcagcucccucaggguccg

SEQ ID NO: 459478 - RNA, 22 nt, Human
ugccagcacaaguuaagagauc

SEQ ID NO: 459479 - RNA, 22 nt, Human
uagggcaggugaagaaaagcua

SEQ ID NO: 459480 - RNA, 22 nt, Human
ucacaggaaccaucagagaaau

SEQ ID NO: 459481 - RNA, 22 nt, Human
uccaggcucucaggugucagca

SEQ ID NO: 459482 - RNA, 22 nt, Human
cugagcaggauauucacagcag

SEQ ID NO: 459483 - RNA, 21 nt, Human
cagacccucuagaggccaccu

SEQ ID NO: 459484 - RNA, 22 nt, Human
ccaucagcaugggagcaugggc

SEQ ID NO: 459485 - RNA, 22 nt, Human
uagaaaugauuuugaugcuuca

SEQ ID NO: 459486 - RNA, 22 nt, Human
uggccucuggcugaggacuaac

SEQ ID NO: 459487 - RNA, 23 nt, Human
auuugagaaaguauuuuuaagac

SEQ ID NO: 459488 - RNA, 22 nt, Human
uagggcucagagaaguggggcc

SEQ ID NO: 459489 - RNA, 22 nt, Human
aggaagccuggggcugcccucg

SEQ ID NO: 459490 - RNA, 22 nt, Human
ugaaacaaaccaguaauuuugu

SEQ ID NO: 459491 - RNA, 23 nt, Human
cagggcccugcucaauuucucca

SEQ ID NO: 459492 - RNA, 17 nt, Human
aggaagggcaaguuucu

SEQ ID NO: 459493 - RNA, 22 nt, Human
aaggccuggauuuagguuguga

SEQ ID NO: 459494 - RNA, 20 nt, Human
ggcagcucacuacuuucugu

SEQ ID NO: 459495 - RNA, 22 nt, Human
cucuguccuugcacaguuccua

SEQ ID NO: 459496 - RNA, 22 nt, Human
ucucugcucugugccucaguuu

SEQ ID NO: 459497 - RNA, 22 nt, Human
ugugccuacugauagagccaag

SEQ ID NO: 459498 - RNA, 22 nt, Human
aucagugcuaaagcaaaugccc

SEQ ID NO: 459499 - RNA, 22 nt, Human
caagcugguaucagcuagagcg

SEQ ID NO: 459500 - RNA, 22 nt, Human
aaaugcacacaccaggaaacua

SEQ ID NO: 459501 - RNA, 22 nt, Human
ucagcugccccaguggccccag

SEQ ID NO: 459502 - RNA, 22 nt, Human
uggcagggugccaguugcgagu

SEQ ID NO: 459503 - RNA, 22 nt, Human
cucccugggcagauguggcucu

SEQ ID NO: 459504 - RNA, 22 nt, Human
cucucugguacauagaguuugg

SEQ ID NO: 459505 - RNA, 22 nt, Human
agugucugccagcugccaggug

SEQ ID NO: 459506 - RNA, 22 nt, Human
acagcagcgucaacuuaaaauu

SEQ ID NO: 459507 - RNA, 22 nt, Human
agcaggcuuucaagagucuucu

SEQ ID NO: 459508 - RNA, 22 nt, Human
gccuccugagaagccacaggcu

SEQ ID NO: 459509 - RNA, 23 nt, Human
aggauccugguacaggagcagag

SEQ ID NO: 459510 - RNA, 22 nt, Human
ccagggcaauuauuuggagggu

SEQ ID NO: 459511 - RNA, 18 nt, Human
uggugaaggguggaggag

SEQ ID NO: 459512 - RNA, 19 nt, Human
cucuggccucuggaugcug

SEQ ID NO: 459513 - RNA, 23 nt, Human
gccuucagcucgggaaggcuccc

SEQ ID NO: 459514 - RNA, 22 nt, Human
uaugagcuuccaguguugcaug

SEQ ID NO: 459515 - RNA, 22 nt, Human
uuaaacaguguuucaugugggg

SEQ ID NO: 459516 - RNA, 22 nt, Human
ugauuuccacagucaggggugc

SEQ ID NO: 459517 - RNA, 19 nt, Human
ccucugcgcuguccugcuc

SEQ ID NO: 459518 - RNA, 22 nt, Human
gaccauuuguugaaaagauuau

SEQ ID NO: 459519 - RNA, 22 nt, Human
cccagcauuucugggcugcacu

SEQ ID NO: 459520 - RNA, 22 nt, Human
aggcugagucaaguuaggguga

SEQ ID NO: 459521 - RNA, 22 nt, Human
auacagaaaaugaugcagaguu

SEQ ID NO: 459522 - RNA, 21 nt, Human
acagcagggcuggcaugacag

SEQ ID NO: 459523 - RNA, 22 nt, Human
acccuggggguggccagugcca

SEQ ID NO: 459524 - RNA, 22 nt, Human
uauuucugucagccagauaugg

SEQ ID NO: 459525 - RNA, 22 nt, Human
gaguguucccacaccccaguug

SEQ ID NO: 459526 - RNA, 22 nt, Human
cagaggacaauagaauggaaag

SEQ ID NO: 459527 - RNA, 22 nt, Human
caggccugacccugagcuucac

SEQ ID NO: 459528 - RNA, 22 nt, Human
gcugccacucugagcuugcuuc

SEQ ID NO: 459529 - RNA, 22 nt, Human
gaccauuugcuaguaaauugca

SEQ ID NO: 459530 - RNA, 22 nt, Human
aggagcccugcgggaggcagag

SEQ ID NO: 459531 - RNA, 22 nt, Human
cuggccucauagccaagcugug

SEQ ID NO: 459532 - RNA, 22 nt, Human
cagcuggcaaguggagcagggu

SEQ ID NO: 459533 - RNA, 22 nt, Human
caaauguguagagcuuuugggg

SEQ ID NO: 459534 - RNA, 22 nt, Human
gcaaggcuuugugaauuuuaaa

SEQ ID NO: 459535 - RNA, 22 nt, Human
gcucccaccuuugcuaucagua

SEQ ID NO: 459536 - RNA, 22 nt, Human
ccugggucacucaggcaggcgg

SEQ ID NO: 459537 - RNA, 22 nt, Human
agcuccugaaaagcgcuugcuu

SEQ ID NO: 459538 - RNA, 22 nt, Human
cagcaggcguugggagaaagac

SEQ ID NO: 459539 - RNA, 22 nt, Human
gcccagcagaucucagugucuc

SEQ ID NO: 459540 - RNA, 22 nt, Human
acucugaggagugacuagaggu

SEQ ID NO: 459541 - RNA, 22 nt, Human
gcuucucucucagacugcaagc

SEQ ID NO: 459542 - RNA, 22 nt, Human
agccaggcugcaguuggcuggc

SEQ ID NO: 459543 - RNA, 22 nt, Human
gaggccuggcugucagucccca

SEQ ID NO: 459544 - RNA, 22 nt, Human
cacccaggcagguggcugagaa

SEQ ID NO: 459545 - RNA, 22 nt, Human
auaaguucagguaaagaaauca

SEQ ID NO: 459546 - RNA, 22 nt, Human
cagccugcuagggcaaugccuu

SEQ ID NO: 459547 - RNA, 21 nt, Human
gggcuggacaugguggcucau

SEQ ID NO: 459548 - RNA, 22 nt, Human
ucaccagggagcuuguccucug

SEQ ID NO: 459549 - RNA, 22 nt, Human
aaguccagguccucauuccauc

SEQ ID NO: 459550 - RNA, 22 nt, Human
agagugauucuaguuagggaau

SEQ ID NO: 459551 - RNA, 22 nt, Human
cuuuccuagauggccaucuuuc

SEQ ID NO: 459552 - RNA, 22 nt, Human
ugcccugucuaagcugucagua

SEQ ID NO: 459553 - RNA, 22 nt, Human
auugcagcuggucaggguaauu

SEQ ID NO: 459554 - RNA, 22 nt, Human
cacaggagugcugcuauuguug

SEQ ID NO: 459555 - RNA, 22 nt, Human
uagaaagugaagguuaauuaau

SEQ ID NO: 459556 - RNA, 22 nt, Human
aggcuucuacguggucccaggg

SEQ ID NO: 459557 - RNA, 22 nt, Human
ucuggccaacaaaaacuaaguc

SEQ ID NO: 459558 - RNA, 22 nt, Human
acaggagugaaucuggcacuua

SEQ ID NO: 459559 - RNA, 22 nt, Human
acaguggaaagaaacgaauuag

SEQ ID NO: 459560 - RNA, 22 nt, Human
uuaauaaaguaugaauuggaaa

SEQ ID NO: 459561 - RNA, 22 nt, Human
cugggaggcacuauucaggagg

SEQ ID NO: 459562 - RNA, 22 nt, Human
auuuucaucauggguuuaacau

SEQ ID NO: 459563 - RNA, 23 nt, Human
aucaagucaucagcaaaauacau

SEQ ID NO: 459564 - RNA, 22 nt, Human
auaaaaacugacccauccuuug

SEQ ID NO: 459565 - RNA, 22 nt, Human
uuagaaauacaagugagguuga

SEQ ID NO: 459566 - RNA, 22 nt, Human
aagccaguccucuacugggcac

SEQ ID NO: 459567 - RNA, 22 nt, Human
uccaggcugauccaugaagaau

SEQ ID NO: 459568 - RNA, 22 nt, Human
auugacaaggaaacuauaccag

SEQ ID NO: 459569 - RNA, 22 nt, Human
caggggcuguggcacauggugu

SEQ ID NO: 459570 - RNA, 22 nt, Human
cagggacccgcacagguagcau

SEQ ID NO: 459571 - RNA, 19 nt, Human
uccaggcauccuucaggcu

SEQ ID NO: 459572 - RNA, 22 nt, Human
uggcucaguuccaucaucugga

SEQ ID NO: 459573 - RNA, 22 nt, Human
cacaagucuguggucuccaaca

SEQ ID NO: 459574 - RNA, 19 nt, Human
cucugccucccuccugggu

SEQ ID NO: 459575 - RNA, 22 nt, Human
cuggccgguauuugccucuggg

SEQ ID NO: 459576 - RNA, 22 nt, Human
gccuguccacuaaacagccaag

SEQ ID NO: 459577 - RNA, 20 nt, Human
cuccaggggaagagccuucc

SEQ ID NO: 459578 - RNA, 22 nt, Human
cuggguggcuguccagccagcc

SEQ ID NO: 459579 - RNA, 19 nt, Human
auaaggcaauuggauuugg

SEQ ID NO: 459580 - RNA, 22 nt, Human
agugggggccaacgagggcagc

SEQ ID NO: 459581 - RNA, 22 nt, Human
agccugguguggggcugcagag

SEQ ID NO: 459582 - RNA, 22 nt, Human
uguaagauauucagcuuauuga

SEQ ID NO: 459583 - RNA, 21 nt, Human
ugucagcaacaauacuuucuc

SEQ ID NO: 459584 - RNA, 22 nt, Human
ccaggagucuggaugagguguc

SEQ ID NO: 459585 - RNA, 22 nt, Human
cagaagcauuccagcaaauagu

SEQ ID NO: 459586 - RNA, 22 nt, Human
agccucuggcccuagacugcuu

SEQ ID NO: 459587 - RNA, 22 nt, Human
uagaggcagaagaaauugacaa

SEQ ID NO: 459588 - RNA, 22 nt, Human
agcagggcccacuaggggagau

SEQ ID NO: 459589 - RNA, 22 nt, Human
ucccacugugaauccaaggccu

SEQ ID NO: 459590 - RNA, 22 nt, Human
ucugcaggccucgacaaggcca

SEQ ID NO: 459591 - RNA, 22 nt, Human
auagauacauuagguaacuugu

SEQ ID NO: 459592 - RNA, 22 nt, Human
ggcugcagguugguuggcagcu

SEQ ID NO: 459593 - RNA, 22 nt, Human
aaguucaagcucugccuaaaau

SEQ ID NO: 459594 - RNA, 22 nt, Human
ggagcugggaauuggaucaucu

SEQ ID NO: 459595 - RNA, 22 nt, Human
ucccagagucuucuccuguaau

SEQ ID NO: 459596 - RNA, 22 nt, Human
uccuuggcagcagggagcauga

SEQ ID NO: 459597 - RNA, 22 nt, Human
gugccagggggcacugaacaga

SEQ ID NO: 459598 - RNA, 20 nt, Human
ucaggcaguggggaaaggca

SEQ ID NO: 459599 - RNA, 22 nt, Human
ggccccugcggacugccuagag

SEQ ID NO: 459600 - RNA, 22 nt, Human
aggcagccuuuagacagucugc

SEQ ID NO: 459601 - RNA, 21 nt, Human
ccuccaggagcagagcccuga

SEQ ID NO: 459602 - RNA, 22 nt, Human
ucucuuuuauguacacccugac

SEQ ID NO: 459603 - RNA, 22 nt, Human
caggggcugugggcggagccuc

SEQ ID NO: 459604 - RNA, 22 nt, Human
uaccauuucauucuuuccucau

SEQ ID NO: 459605 - RNA, 20 nt, Human
agcugguuaucuuaauucuu

SEQ ID NO: 459606 - RNA, 22 nt, Human
gggaagggagggccuccaguca

SEQ ID NO: 459607 - RNA, 22 nt, Human
ucaguggaguauggaugaaguc

SEQ ID NO: 459608 - RNA, 22 nt, Human
caaggccaagguuuugugaacu

SEQ ID NO: 459609 - RNA, 22 nt, Human
acccaggguagaaccucagagc

SEQ ID NO: 459610 - RNA, 22 nt, Human
ggcaggucagguccaugaccaa

SEQ ID NO: 459611 - RNA, 22 nt, Human
ccuggcugucguuuugugaaau

SEQ ID NO: 459612 - RNA, 22 nt, Human
agcagccacagcagaucugagu

SEQ ID NO: 459613 - RNA, 22 nt, Human
cauuucugucacguucuuuuau

SEQ ID NO: 459614 - RNA, 23 nt, Human
uugcauguagcccaugaguaacu

SEQ ID NO: 459615 - RNA, 22 nt, Human
ucucaggaaauaggauuugagu

SEQ ID NO: 459616 - RNA, 22 nt, Human
ccuggccucagacagagggugg

SEQ ID NO: 459617 - RNA, 22 nt, Human
gcccucagaguuccccacagug

SEQ ID NO: 459618 - RNA, 22 nt, Human
uaauuauuaugacaacaauugc

SEQ ID NO: 459619 - RNA, 22 nt, Human
ugcucugguccucccucggcgc

SEQ ID NO: 459620 - RNA, 22 nt, Human
acauucuguuuccccaaagaga

SEQ ID NO: 459621 - RNA, 22 nt, Human
gaaggcugaugacagauucugc

SEQ ID NO: 459622 - RNA, 22 nt, Human
cagcaauaagguaagcuucucc

SEQ ID NO: 459623 - RNA, 22 nt, Human
auaaagauuucuuuuucucuac

SEQ ID NO: 459624 - RNA, 22 nt, Human
cagagagagucaaaucuuugcu

SEQ ID NO: 459625 - RNA, 22 nt, Human
uagggacaaagagcugaggccu

SEQ ID NO: 459626 - RNA, 22 nt, Human
gcuggcauuacaggagagaacc

SEQ ID NO: 459627 - RNA, 19 nt, Human
aggcugcaagguggugggc

SEQ ID NO: 459628 - RNA, 20 nt, Human
cuuuggcaaugagaacaggg

SEQ ID NO: 459629 - RNA, 22 nt, Human
auuauguaacugugguucagca

SEQ ID NO: 459630 - RNA, 22 nt, Human
cuggguggaucgcagccccagg

SEQ ID NO: 459631 - RNA, 22 nt, Human
gcuggagcugcagccugggccu

SEQ ID NO: 459632 - RNA, 22 nt, Human
cccuuccuccucgccugucaga

SEQ ID NO: 459633 - RNA, 22 nt, Human
ucagagugggagaaugugccaa

SEQ ID NO: 459634 - RNA, 22 nt, Human
agggagaacaguugcagcagac

SEQ ID NO: 459635 - RNA, 22 nt, Human
guggaaguagauuugagaaggu

SEQ ID NO: 459636 - RNA, 22 nt, Human
aaaccaucagauaauucauacu

SEQ ID NO: 459637 - RNA, 22 nt, Human
augucuuuggcuuugacauggc

SEQ ID NO: 459638 - RNA, 23 nt, Human
acagccaguucaccucuccuugg

SEQ ID NO: 459639 - RNA, 22 nt, Human
ggggacccucaggacugcgucu

SEQ ID NO: 459640 - RNA, 22 nt, Human
ugaagccacuuuccagaaucac

SEQ ID NO: 459641 - RNA, 22 nt, Human
cugaaggaagcagaagcgaggu

SEQ ID NO: 459642 - RNA, 17 nt, Human
agcagcuggcacaggag

SEQ ID NO: 459643 - RNA, 22 nt, Human
ugagcuuacgugggaacagacu

SEQ ID NO: 459644 - RNA, 22 nt, Human
agagcugcaggguggacccagg

SEQ ID NO: 459645 - RNA, 22 nt, Human
cugggaguguucuaggucacau

SEQ ID NO: 459646 - RNA, 22 nt, Human
uacuuuuagccuauuugauucu

SEQ ID NO: 459647 - RNA, 20 nt, Human
ugcagcuucaccugugucau

SEQ ID NO: 459648 - RNA, 22 nt, Human
agggcagagauuaauuaagaca

SEQ ID NO: 459649 - RNA, 22 nt, Human
caaggaaacaugaaaugcauug

SEQ ID NO: 459650 - RNA, 22 nt, Human
cagugcagucaaggaagaacca

SEQ ID NO: 459651 - RNA, 22 nt, Human
gcagggcugggugggagacaga

SEQ ID NO: 459652 - RNA, 19 nt, Human
gagggcucauuugaacaau

SEQ ID NO: 459653 - RNA, 22 nt, Human
agggcugacaguggcguggcgu

SEQ ID NO: 459654 - RNA, 22 nt, Human
ucagcuuugaucucaggcaauc

SEQ ID NO: 459655 - RNA, 22 nt, Human
uucauaaugagguccuagaggc

SEQ ID NO: 459656 - RNA, 22 nt, Human
ccagcuggagccaagguggacu

SEQ ID NO: 459657 - RNA, 22 nt, Human
uuucacaauuuuaaggagcaaa

SEQ ID NO: 459658 - RNA, 18 nt, Human
ccugccagucuggagcag

SEQ ID NO: 459659 - RNA, 22 nt, Human
caccaucagcagcaggugucaa

SEQ ID NO: 459660 - RNA, 22 nt, Human
gagccaggcaccuucuguguug

SEQ ID NO: 459661 - RNA, 22 nt, Human
guuaauuugcagcuuucgagcu

SEQ ID NO: 459662 - RNA, 22 nt, Human
uggcugagaaugggaugaugcc

SEQ ID NO: 459663 - RNA, 22 nt, Human
ucagggcacauucugcaguggc

SEQ ID NO: 459664 - RNA, 22 nt, Human
gguggcagaauaauugaagguc

SEQ ID NO: 459665 - RNA, 22 nt, Human
gacccaggcccaaggcugccag

SEQ ID NO: 459666 - RNA, 22 nt, Human
gaggccuggucuaugagauguu

SEQ ID NO: 459667 - RNA, 22 nt, Human
cugugcuggcagaccuggaguu

SEQ ID NO: 459668 - RNA, 22 nt, Human
aaaaugugaucuacaaaugcaa

SEQ ID NO: 459669 - RNA, 22 nt, Human
cccaggcuggauuucgguggca

SEQ ID NO: 459670 - RNA, 19 nt, Human
ucaaaggcuuuuaggagac

SEQ ID NO: 459671 - RNA, 22 nt, Human
cccaggcuggagugcaauggug

SEQ ID NO: 459672 - RNA, 22 nt, Human
acuuaaaaacagauccagcagg

SEQ ID NO: 459673 - RNA, 21 nt, Human
uagcacuucgcuguaauuggg

SEQ ID NO: 459674 - RNA, 22 nt, Human
aaauugugcucacacugauauu

SEQ ID NO: 459675 - RNA, 19 nt, Human
caggaaugagguaauggcu

SEQ ID NO: 459676 - RNA, 21 nt, Human
aaaggccauaaucacggagca

SEQ ID NO: 459677 - RNA, 22 nt, Human
gggagcugagcuggaagagaau

SEQ ID NO: 459678 - RNA, 22 nt, Human
acaggccacaguggagucucug

SEQ ID NO: 459679 - RNA, 22 nt, Human
uaacacugguauuucauuuagu

SEQ ID NO: 459680 - RNA, 22 nt, Human
guccuggggauacagaagugaa

SEQ ID NO: 459681 - RNA, 22 nt, Human
ccaggugggaggaaagcagaga

SEQ ID NO: 459682 - RNA, 22 nt, Human
cauaauaucuccgauuacuugc

SEQ ID NO: 459683 - RNA, 19 nt, Human
guaagggcuaauggacuau

SEQ ID NO: 459684 - RNA, 22 nt, Human
cuggacagaaagggcugcugug

SEQ ID NO: 459685 - RNA, 22 nt, Human
aauuuuaucucuaagcaggcuu

SEQ ID NO: 459686 - RNA, 22 nt, Human
gcuugcucaacccccgucucuc

SEQ ID NO: 459687 - RNA, 19 nt, Human
caugagcugcucacuuccc

SEQ ID NO: 459688 - RNA, 19 nt, Human
cugguccugacugaggggu

SEQ ID NO: 459689 - RNA, 22 nt, Human
cagagcagaagcgguccucaca

SEQ ID NO: 459690 - RNA, 22 nt, Human
gccuguccuggaugcucugcaa

SEQ ID NO: 459691 - RNA, 22 nt, Human
ccugggcucaagugauccuccu

SEQ ID NO: 459692 - RNA, 22 nt, Human
acaggccugacacacagagggc

SEQ ID NO: 459693 - RNA, 22 nt, Human
ugccugugucacagugauguuu

SEQ ID NO: 459694 - RNA, 22 nt, Human
gcugagaguguaggauguuuac

SEQ ID NO: 459695 - RNA, 22 nt, Human
aggcaguuuauccccagagccu

SEQ ID NO: 459696 - RNA, 22 nt, Human
ucagagugguagccuauuuucu

SEQ ID NO: 459697 - RNA, 22 nt, Human
ucugagagccucuagccuaagu

SEQ ID NO: 459698 - RNA, 22 nt, Human
guuguauagagggcaugaaucu

SEQ ID NO: 459699 - RNA, 22 nt, Human
ugcuuccuugagcucuccaauc

SEQ ID NO: 459700 - RNA, 22 nt, Human
aauagguagccagauauauaaa

SEQ ID NO: 459701 - RNA, 22 nt, Human
acugccuuauaugcugugugug

SEQ ID NO: 459702 - RNA, 22 nt, Human
gccuggccugaacuaggaggug

SEQ ID NO: 459703 - RNA, 22 nt, Human
ugcugccaagcccgugcuccug

SEQ ID NO: 459704 - RNA, 23 nt, Human
gcugucaguuguuuuugucucua

SEQ ID NO: 459705 - RNA, 22 nt, Human
cuuggucauuucuuguccuguu

SEQ ID NO: 459706 - RNA, 22 nt, Human
aggagccuccuucucaugugca

SEQ ID NO: 459707 - RNA, 22 nt, Human
uuguuacagcagugauuucaga

SEQ ID NO: 459708 - RNA, 22 nt, Human
gccaggcugaggcucuggaaga

SEQ ID NO: 459709 - RNA, 22 nt, Human
ugaggcagcuuuuucugugugu

SEQ ID NO: 459710 - RNA, 22 nt, Human
aaggggaauagaguggguugug

SEQ ID NO: 459711 - RNA, 22 nt, Human
uacaggcauguagcauggugau

SEQ ID NO: 459712 - RNA, 22 nt, Human
ccugccugcggcccgcggggag

SEQ ID NO: 459713 - RNA, 22 nt, Human
ugcucacugaacucuugcuguc

SEQ ID NO: 459714 - RNA, 22 nt, Human
acaguguuuuagaaaagcuuga

SEQ ID NO: 459715 - RNA, 22 nt, Human
cagccagggagcaaagaguuga

SEQ ID NO: 459716 - RNA, 22 nt, Human
ugcacagcgggugucugucagg

SEQ ID NO: 459717 - RNA, 22 nt, Human
cauucauuuaugaaauaucuau

SEQ ID NO: 459718 - RNA, 22 nt, Human
gagcugaaauaugaagccaauu

SEQ ID NO: 459719 - RNA, 22 nt, Human
uuuuaccugaaccacacaguau

SEQ ID NO: 459720 - RNA, 19 nt, Human
ccugucugucuucagcuag

SEQ ID NO: 459721 - RNA, 22 nt, Human
agccagcugccuuucacaucug

SEQ ID NO: 459722 - RNA, 22 nt, Human
gcugucacacauggccccagcu

SEQ ID NO: 459723 - RNA, 22 nt, Human
gggcacuguacacugugcaugg

SEQ ID NO: 459724 - RNA, 22 nt, Human
cucacagguaccagcacccucc

SEQ ID NO: 459725 - RNA, 22 nt, Human
agugaaauugcuguaagaggaa

SEQ ID NO: 459726 - RNA, 22 nt, Human
cggagccugcuuguugcagcug

SEQ ID NO: 459727 - RNA, 22 nt, Human
aaguuugacagaaguuucuaau

SEQ ID NO: 459728 - RNA, 22 nt, Human
gccuucccaagacgccugaguu

SEQ ID NO: 459729 - RNA, 23 nt, Human
uggcuggcagaaacugaagcaug

SEQ ID NO: 459730 - RNA, 22 nt, Human
ccugagugcuuccagagucaug

SEQ ID NO: 459731 - RNA, 22 nt, Human
ggcugcagagcugggugggccu

SEQ ID NO: 459732 - RNA, 18 nt, Human
uggagccauugccaccau

SEQ ID NO: 459733 - RNA, 22 nt, Human
gcucagaggagcaucauaagga

SEQ ID NO: 459734 - RNA, 22 nt, Human
gggcugcacagaucuucaaggg

SEQ ID NO: 459735 - RNA, 22 nt, Human
auacuaaaguauagaacuuagu

SEQ ID NO: 459736 - RNA, 22 nt, Human
gcuccucuccucggagucgggg

SEQ ID NO: 459737 - RNA, 22 nt, Human
uaauguguccugaaagcuucug

SEQ ID NO: 459738 - RNA, 19 nt, Human
gcacugaagaguuggucac

SEQ ID NO: 459739 - RNA, 22 nt, Human
ugacucuguaccugucugccuu

SEQ ID NO: 459740 - RNA, 22 nt, Human
cgcagaagagguugucuagucc

SEQ ID NO: 459741 - RNA, 22 nt, Human
uuaaauuagucaagcuucucug

SEQ ID NO: 459742 - RNA, 22 nt, Human
aggcacugguccauuuucugca

SEQ ID NO: 459743 - RNA, 22 nt, Human
uggcagcugaggggaggcuuug

SEQ ID NO: 459744 - RNA, 22 nt, Human
ccaggggcuggugcugagcugg

SEQ ID NO: 459745 - RNA, 22 nt, Human
auuauuaaagcuuaggucuuau

SEQ ID NO: 459746 - RNA, 22 nt, Human
cuguacucaagguaaaccagga

SEQ ID NO: 459747 - RNA, 22 nt, Human
uggcucaguuucugcccagcug

SEQ ID NO: 459748 - RNA, 22 nt, Human
agggcagccucucagccuaggu

SEQ ID NO: 459749 - RNA, 22 nt, Human
uggcacuggcgcaggauggcgg

SEQ ID NO: 459750 - RNA, 22 nt, Human
uacaugcaugucacagaaugaa

SEQ ID NO: 459751 - RNA, 22 nt, Human
cuuuauuccuacaagauuuucu

SEQ ID NO: 459752 - RNA, 19 nt, Human
gcuggcagauguggccgug

SEQ ID NO: 459753 - RNA, 22 nt, Human
ugcccaagcagaggagugauuc

SEQ ID NO: 459754 - RNA, 22 nt, Human
agagacaggauaucugcucaug

SEQ ID NO: 459755 - RNA, 22 nt, Human
uugcagagccaugaggcuggcu

SEQ ID NO: 459756 - RNA, 22 nt, Human
agggcagugggaaagccugcuc

SEQ ID NO: 459757 - RNA, 22 nt, Human
uugauuuauagaauguucaagc

SEQ ID NO: 459758 - RNA, 22 nt, Human
gaagccaguacugugcucugca

SEQ ID NO: 459759 - RNA, 17 nt, Human
ggagagugggaauggcc

SEQ ID NO: 459760 - RNA, 22 nt, Human
acagauuuuauuauucagguau

SEQ ID NO: 459761 - RNA, 22 nt, Human
uugaauaggacucagcagugau

SEQ ID NO: 459762 - RNA, 22 nt, Human
acuugguuggucucacccuguu

SEQ ID NO: 459763 - RNA, 21 nt, Human
aggcugcuggcucaggguccu

SEQ ID NO: 459764 - RNA, 22 nt, Human
aaugaacaaaauaugcuuugca

SEQ ID NO: 459765 - RNA, 22 nt, Human
uugcagggcaggaccauggaca

SEQ ID NO: 459766 - RNA, 19 nt, Human
uccaggaggcugccauuga

SEQ ID NO: 459767 - RNA, 22 nt, Human
uggcucuguugagguauggauu

SEQ ID NO: 459768 - RNA, 22 nt, Human
ucccagcgcggggggaggaucc

SEQ ID NO: 459769 - RNA, 22 nt, Human
auucuccaucaccacuggcacu

SEQ ID NO: 459770 - RNA, 22 nt, Human
gaaagaggaaggagauguauua

SEQ ID NO: 459771 - RNA, 22 nt, Human
gccaggcagccacccucugcga

SEQ ID NO: 459772 - RNA, 22 nt, Human
uguauuccaaaaugcugaggau

SEQ ID NO: 459773 - RNA, 22 nt, Human
gccuggaggguugagguuuugu

SEQ ID NO: 459774 - RNA, 22 nt, Human
uccucacauggugagccacaca

SEQ ID NO: 459775 - RNA, 22 nt, Human
ccagggugggaggcugaaggcg

SEQ ID NO: 459776 - RNA, 22 nt, Human
gcucacagccggcuggcagggg

SEQ ID NO: 459777 - RNA, 19 nt, Human
gccugggaugggcagaacu

SEQ ID NO: 459778 - RNA, 22 nt, Human
ggcugcucugccuuccagcugg

SEQ ID NO: 459779 - RNA, 22 nt, Human
guuucauuaccugacccaugag

SEQ ID NO: 459780 - RNA, 21 nt, Human
gcaaggcuuuuguguuuccca

SEQ ID NO: 459781 - RNA, 23 nt, Human
ucucaagaggaagcagggcucau

SEQ ID NO: 459782 - RNA, 22 nt, Human
augggaggcaggcucagaaccg

SEQ ID NO: 459783 - RNA, 20 nt, Human
uugcauuggaugugcaggug

SEQ ID NO: 459784 - RNA, 22 nt, Human
gggcagggguagcauuccaagu

SEQ ID NO: 459785 - RNA, 22 nt, Human
gcucccagguucuugggccuug

SEQ ID NO: 459786 - RNA, 22 nt, Human
uuccuaaaagaauacacuggau

SEQ ID NO: 459787 - RNA, 22 nt, Human
ggcugagcccccucugcguagg

SEQ ID NO: 459788 - RNA, 22 nt, Human
ucucagaguuuuuuuccaggac

SEQ ID NO: 459789 - RNA, 22 nt, Human
gcagcugggacacugaggccag

SEQ ID NO: 459790 - RNA, 22 nt, Human
gcagaagggaauaaggagcuuu

SEQ ID NO: 459791 - RNA, 22 nt, Human
acacugaauaauugagaguuga

SEQ ID NO: 459792 - RNA, 20 nt, Human
ugccaggcugcacgccugcc

SEQ ID NO: 459793 - RNA, 22 nt, Human
gggcaguggguggcugcagccu

SEQ ID NO: 459794 - RNA, 22 nt, Human
aggcaggcucaggcccaugcuu

SEQ ID NO: 459795 - RNA, 17 nt, Human
gcauccaguaacaugcc

SEQ ID NO: 459796 - RNA, 22 nt, Human
uacuuuggauccuuacaauagc

SEQ ID NO: 459797 - RNA, 22 nt, Human
ccagugcccagcugcccaggca

SEQ ID NO: 459798 - RNA, 22 nt, Human
acauuucuucccuuuagcagaa

SEQ ID NO: 459799 - RNA, 22 nt, Human
agcuccugcacccagccuugag

SEQ ID NO: 459800 - RNA, 22 nt, Human
cagugagggcccccuuccaggu

SEQ ID NO: 459801 - RNA, 22 nt, Human
gagugucugaauuagagcacaa

SEQ ID NO: 459802 - RNA, 22 nt, Human
cacaggcuugucagcaugaggc

SEQ ID NO: 459803 - RNA, 22 nt, Human
cugggcacacagugacucugca

SEQ ID NO: 459804 - RNA, 22 nt, Human
gcugagagugagcacuggauau

SEQ ID NO: 459805 - RNA, 22 nt, Human
ccagcuuuugcacuggacuggg

SEQ ID NO: 459806 - RNA, 22 nt, Human
ugcucuccggcuuccguggccu

SEQ ID NO: 459807 - RNA, 22 nt, Human
gagaaacuaacaucugaaggug

SEQ ID NO: 459808 - RNA, 18 nt, Human
cugaggcuuagagagguu

SEQ ID NO: 459809 - RNA, 20 nt, Human
aggcagagcgcacuuuuaga

SEQ ID NO: 459810 - RNA, 22 nt, Human
ccuggcaguggugaagaagagg

SEQ ID NO: 459811 - RNA, 23 nt, Human
caguacuuaguguagcguuaauu

SEQ ID NO: 459812 - RNA, 22 nt, Human
cugggcaguuuauucaguucug

SEQ ID NO: 459813 - RNA, 22 nt, Human
cauugcacgggcgucugucugu

SEQ ID NO: 459814 - RNA, 22 nt, Human
gaguggagcaaaagagguagau

SEQ ID NO: 459815 - RNA, 22 nt, Human
accagacacugugaagacaggc

SEQ ID NO: 459816 - RNA, 22 nt, Human
uacacacaugcauuugccuuau

SEQ ID NO: 459817 - RNA, 22 nt, Human
uuacauuuggcuauguccucua

SEQ ID NO: 459818 - RNA, 22 nt, Human
gacgccucuucccugcugcacu

SEQ ID NO: 459819 - RNA, 20 nt, Human
gcuguugccaguacagaugg

SEQ ID NO: 459820 - RNA, 22 nt, Human
ucaggcaguagaauugcuugaa

SEQ ID NO: 459821 - RNA, 22 nt, Human
aggcucauucuugccucugagc

SEQ ID NO: 459822 - RNA, 22 nt, Human
cuacagguaugugcaugacauc

SEQ ID NO: 459823 - RNA, 22 nt, Human
ucaugacaucuguuuaucucaa

SEQ ID NO: 459824 - RNA, 22 nt, Human
cacagggcagugauuguccaca

SEQ ID NO: 459825 - RNA, 22 nt, Human
cagagcugagaauguugaugcu

SEQ ID NO: 459826 - RNA, 19 nt, Human
uagagcugcuuccuggcag

SEQ ID NO: 459827 - RNA, 22 nt, Human
ccugcagagccacgugccagcg

SEQ ID NO: 459828 - RNA, 22 nt, Human
caaggcugugcaggguccauau

SEQ ID NO: 459829 - RNA, 22 nt, Human
ggaggcagaacuucccgucagu

SEQ ID NO: 459830 - RNA, 22 nt, Human
gcagcuuugaagacuuauuugc

SEQ ID NO: 459831 - RNA, 22 nt, Human
gcucuguguugucagaggcacc

SEQ ID NO: 459832 - RNA, 17 nt, Human
cugagcauccgugcucu

SEQ ID NO: 459833 - RNA, 22 nt, Human
accauguguuuuacacauggua

SEQ ID NO: 459834 - RNA, 22 nt, Human
aucaccaggcaaaaugucagag

SEQ ID NO: 459835 - RNA, 22 nt, Human
augcaccugaacuccaucagcu

SEQ ID NO: 459836 - RNA, 20 nt, Human
acaugaaaggaaacaggaaa

SEQ ID NO: 459837 - RNA, 22 nt, Human
gcuggccugcgagggcaggcug

SEQ ID NO: 459838 - RNA, 22 nt, Human
gcuguauuuaacaacuggcuca

SEQ ID NO: 459839 - RNA, 22 nt, Human
acuguccauaauauuggugaac

SEQ ID NO: 459840 - RNA, 22 nt, Human
ccucagagaaagguauggcuga

SEQ ID NO: 459841 - RNA, 22 nt, Human
uguguuuuacaaauucucuuaa

SEQ ID NO: 459842 - RNA, 22 nt, Human
guugaaugaaucauucuaugua

SEQ ID NO: 459843 - RNA, 22 nt, Human
uccaggagagguguggggacug

SEQ ID NO: 459844 - RNA, 22 nt, Human
gcccagccuccaagcuccaagg

SEQ ID NO: 459845 - RNA, 22 nt, Human
uaaaaguggauaagcuguagga

SEQ ID NO: 459846 - RNA, 22 nt, Human
agggcagcugugagccacugug

SEQ ID NO: 459847 - RNA, 22 nt, Human
ccugagagcagcuuccugcuua

SEQ ID NO: 459848 - RNA, 22 nt, Human
ucauggcacuuagcacaguccu

SEQ ID NO: 459849 - RNA, 22 nt, Human
agcaccuucacaggcucucagg

SEQ ID NO: 459850 - RNA, 22 nt, Human
ggcugccugggagcccuccucu

SEQ ID NO: 459851 - RNA, 22 nt, Human
uugaacagcuguuacauuguua

SEQ ID NO: 459852 - RNA, 22 nt, Human
cauuuacauuuaagguuaauau

SEQ ID NO: 459853 - RNA, 21 nt, Human
agcuggcagauauggugucug

SEQ ID NO: 459854 - RNA, 22 nt, Human
gcauggaauucccuuaugggcc

SEQ ID NO: 459855 - RNA, 22 nt, Human
ggggcagauggaacagagcaca

SEQ ID NO: 459856 - RNA, 22 nt, Human
cagaguggcagucccaggccca

SEQ ID NO: 459857 - RNA, 22 nt, Human
agcagggcacuggaaggcacug

SEQ ID NO: 459858 - RNA, 21 nt, Human
aggcucagcagguguauaaag

SEQ ID NO: 459859 - RNA, 22 nt, Human
cagagcuggagcuugaauggag

SEQ ID NO: 459860 - RNA, 22 nt, Human
cuacuucuaaguacauggugau

SEQ ID NO: 459861 - RNA, 22 nt, Human
acagggccauuaucuguucuag

SEQ ID NO: 459862 - RNA, 22 nt, Human
gcaggcagagguggaggagaca

SEQ ID NO: 459863 - RNA, 22 nt, Human
ccagggugagaaaaggcuggau

SEQ ID NO: 459864 - RNA, 22 nt, Human
ccugcuucagggaugauggcac

SEQ ID NO: 459865 - RNA, 22 nt, Human
gucuuucuuaauucaagugcuu

SEQ ID NO: 459866 - RNA, 22 nt, Human
gcaaggacucccugggucauuc

SEQ ID NO: 459867 - RNA, 22 nt, Human
ggcacagggaggcccuggugug

SEQ ID NO: 459868 - RNA, 22 nt, Human
uaauccaggguauucuaguuuc

SEQ ID NO: 459869 - RNA, 22 nt, Human
auaaggcagugacuucaucuau

SEQ ID NO: 459870 - RNA, 22 nt, Human
aggaagcccaagucucaucuuc

SEQ ID NO: 459871 - RNA, 22 nt, Human
guagggacaugccauuaucuca

SEQ ID NO: 459872 - RNA, 22 nt, Human
uaggccagcccuuaguccuguc

SEQ ID NO: 459873 - RNA, 21 nt, Human
uuucccagcugaaaauaaaug

SEQ ID NO: 459874 - RNA, 22 nt, Human
auugacaagugagcugggcugc

SEQ ID NO: 459875 - RNA, 22 nt, Human
ccagucccagcucugccaugcu

SEQ ID NO: 459876 - RNA, 22 nt, Human
acaaaggcagccaaucaucugc

SEQ ID NO: 459877 - RNA, 22 nt, Human
gcccaggcuggagugcaguagc

SEQ ID NO: 459878 - RNA, 22 nt, Human
gagacaaaaguuggagugcaag

SEQ ID NO: 459879 - RNA, 22 nt, Human
ugugcccaucccucuggagugu

SEQ ID NO: 459880 - RNA, 17 nt, Human
cagugaggccuuuccuc

SEQ ID NO: 459881 - RNA, 22 nt, Human
cagaguccuggacacagagaca

SEQ ID NO: 459882 - RNA, 22 nt, Human
uggguagagacacagucugggg

SEQ ID NO: 459883 - RNA, 23 nt, Human
ugcuguccaacagacuggccaug

SEQ ID NO: 459884 - RNA, 22 nt, Human
cucaaggaaagucuggagaaga

SEQ ID NO: 459885 - RNA, 17 nt, Human
ccugucuuguuucugcc

SEQ ID NO: 459886 - RNA, 22 nt, Human
aauggcugccagggcaggaggu

SEQ ID NO: 459887 - RNA, 22 nt, Human
auguuauuaaaguacagauucu

SEQ ID NO: 459888 - RNA, 22 nt, Human
cauggcugcgagaagagugggu

SEQ ID NO: 459889 - RNA, 22 nt, Human
agaggcugagaaacccucuucu

SEQ ID NO: 459890 - RNA, 22 nt, Human
uagauuucaggcuggcuugcgg

SEQ ID NO: 459891 - RNA, 22 nt, Human
acuggcagagguuggacaccau

SEQ ID NO: 459892 - RNA, 22 nt, Human
gccuccugguugcuucuccaac

SEQ ID NO: 459893 - RNA, 22 nt, Human
cuggcucaauuuguacugcugu

SEQ ID NO: 459894 - RNA, 21 nt, Human
uggcucuguucaauauaugga

SEQ ID NO: 459895 - RNA, 22 nt, Human
guggggggacguuggucacuuu

SEQ ID NO: 459896 - RNA, 20 nt, Human
agugugcauuuagagucugc

SEQ ID NO: 459897 - RNA, 22 nt, Human
agagugguacuucuuuuucuuc

SEQ ID NO: 459898 - RNA, 22 nt, Human
aaacauugcuaaauaaugcugc

SEQ ID NO: 459899 - RNA, 22 nt, Human
gccucugcggagcuguacauca

SEQ ID NO: 459900 - RNA, 22 nt, Human
cuaaaauuaccuaccaguuuag

SEQ ID NO: 459901 - RNA, 22 nt, Human
gagagugucgggggccccagga

SEQ ID NO: 459902 - RNA, 22 nt, Human
ucagcccugggacccagggaug

SEQ ID NO: 459903 - RNA, 22 nt, Human
gcugugcuauaucucugagugu

SEQ ID NO: 459904 - RNA, 22 nt, Human
ugccuggcaaugccagaagcca

SEQ ID NO: 459905 - RNA, 22 nt, Human
auugaaagauaggcuacugugg

SEQ ID NO: 459906 - RNA, 22 nt, Human
gcaggcaguuugcuuuucccuc

SEQ ID NO: 459907 - RNA, 22 nt, Human
gagguauguaugcuacauucuu

SEQ ID NO: 459908 - RNA, 22 nt, Human
ggugaaggucuacugugugcca

SEQ ID NO: 459909 - RNA, 22 nt, Human
uauuucccagggagcaacaagc

SEQ ID NO: 459910 - RNA, 22 nt, Human
agggcagagcacugaauuggga

SEQ ID NO: 459911 - RNA, 22 nt, Human
agcuguggaguaggggguugga

SEQ ID NO: 459912 - RNA, 23 nt, Human
cauguacacacagcuguacagug

SEQ ID NO: 459913 - RNA, 22 nt, Human
uggaagugcucuucugaccaac

SEQ ID NO: 459914 - RNA, 22 nt, Human
gcagacaggcccaguggaggga

SEQ ID NO: 459915 - RNA, 20 nt, Human
cugcucugcuuugcaggugg

SEQ ID NO: 459916 - RNA, 22 nt, Human
uuagauauguuuuugcuaaugc

SEQ ID NO: 459917 - RNA, 22 nt, Human
uaaaugcagauuccugagccua

SEQ ID NO: 459918 - RNA, 22 nt, Human
ccaggccucaccugcccaccua

SEQ ID NO: 459919 - RNA, 22 nt, Human
accaggagccauagagucaggc

SEQ ID NO: 459920 - RNA, 22 nt, Human
gagcagcugguaggugaaccca

SEQ ID NO: 459921 - RNA, 17 nt, Human
acaggcagaucaccuga

SEQ ID NO: 459922 - RNA, 22 nt, Human
cugguacaaaaugcugauauca

SEQ ID NO: 459923 - RNA, 22 nt, Human
cuggacagaaaccaguccuggg

SEQ ID NO: 459924 - RNA, 22 nt, Human
cauggccucaaaggacugcaga

SEQ ID NO: 459925 - RNA, 22 nt, Human
cuggccuggggccucagcugcu

SEQ ID NO: 459926 - RNA, 22 nt, Human
acaguuugcccugacauucucc

SEQ ID NO: 459927 - RNA, 22 nt, Human
ugcacccucaucagucaaaugg

SEQ ID NO: 459928 - RNA, 22 nt, Human
uauccuuguacuauaguauuua

SEQ ID NO: 459929 - RNA, 22 nt, Human
ggccugugucugugccuguccu

SEQ ID NO: 459930 - RNA, 22 nt, Human
aaggcacucauucaaggagaua

SEQ ID NO: 459931 - RNA, 22 nt, Human
cugggcugagccugggcugugu

SEQ ID NO: 459932 - RNA, 22 nt, Human
uugaaaguuuauggagucugca

SEQ ID NO: 459933 - RNA, 22 nt, Human
ggucccagcuggucacugucag

SEQ ID NO: 459934 - RNA, 22 nt, Human
ggcaguggguuccccaaggcac

SEQ ID NO: 459935 - RNA, 22 nt, Human
gaaagguugggugaauggugga

SEQ ID NO: 459936 - RNA, 22 nt, Human
gcugucuggaggcucugaggga

SEQ ID NO: 459937 - RNA, 22 nt, Human
aggccuggccugggcggcauug

SEQ ID NO: 459938 - RNA, 22 nt, Human
uaguuauuauuguuacuaucag

SEQ ID NO: 459939 - RNA, 22 nt, Human
caguggauuagccagagcugga

SEQ ID NO: 459940 - RNA, 21 nt, Human
guggccugauuaugaaugggu

SEQ ID NO: 459941 - RNA, 22 nt, Human
accaggcagucaccguccagga

SEQ ID NO: 459942 - RNA, 22 nt, Human
cacagaggcaaccuucuggggu

SEQ ID NO: 459943 - RNA, 22 nt, Human
gagaagcagguuuagcagacaa

SEQ ID NO: 459944 - RNA, 22 nt, Human
uuuagaaauucaucuauggccu

SEQ ID NO: 459945 - RNA, 21 nt, Human
acagcagagaucaagacuaag

SEQ ID NO: 459946 - RNA, 22 nt, Human
uuuuuccaccguacuuccugag

SEQ ID NO: 459947 - RNA, 22 nt, Human
ucaaaggcaccaaggucacugc

SEQ ID NO: 459948 - RNA, 22 nt, Human
aaagauuuaugaaguucaauua

SEQ ID NO: 459949 - RNA, 22 nt, Human
gacagaguuguugauguaugcu

SEQ ID NO: 459950 - RNA, 22 nt, Human
uagucucuggagacucuagggg

SEQ ID NO: 459951 - RNA, 22 nt, Human
cagcucccuauggugaggcgac

SEQ ID NO: 459952 - RNA, 22 nt, Human
agaaauacuuuguaaaucucac

SEQ ID NO: 459953 - RNA, 22 nt, Human
ggcagcucugaugaugcucugg

SEQ ID NO: 459954 - RNA, 22 nt, Human
agggcugcuuugcuaaauaugg

SEQ ID NO: 459955 - RNA, 22 nt, Human
caguccugugucccuugguggg

SEQ ID NO: 459956 - RNA, 22 nt, Human
ugggcagaucuuugguggcuag

SEQ ID NO: 459957 - RNA, 22 nt, Human
gccucugcucucagguagccuc

SEQ ID NO: 459958 - RNA, 22 nt, Human
gguggggucacgacagagggaa

SEQ ID NO: 459959 - RNA, 22 nt, Human
uugcaccaaaugaguuaaaauu

SEQ ID NO: 459960 - RNA, 20 nt, Human
acauguacuaaugaauacag

SEQ ID NO: 459961 - RNA, 22 nt, Human
ugccaggcugucaauucaccca

SEQ ID NO: 459962 - RNA, 22 nt, Human
uccuugaagaaugauucuugga

SEQ ID NO: 459963 - RNA, 22 nt, Human
cuuauuagaaagaaaagacaug

SEQ ID NO: 459964 - RNA, 22 nt, Human
guguugaugacauuuuagaaac

SEQ ID NO: 459965 - RNA, 22 nt, Human
uagagcugggcagugcucugag

SEQ ID NO: 459966 - RNA, 22 nt, Human
gggaccugggccagaggacagu

SEQ ID NO: 459967 - RNA, 22 nt, Human
ugcaauaacuacuuuaauguug

SEQ ID NO: 459968 - RNA, 20 nt, Human
ugcagcugcaggaggguggg

SEQ ID NO: 459969 - RNA, 22 nt, Human
aggcucaggucucaggucuggc

SEQ ID NO: 459970 - RNA, 22 nt, Human
cccuguccuuggcugugaggcu

SEQ ID NO: 459971 - RNA, 22 nt, Human
aaugcugcucucauaauuauag

SEQ ID NO: 459972 - RNA, 22 nt, Human
gcauccagagguagccacugug

SEQ ID NO: 459973 - RNA, 22 nt, Human
gcaggaugggagcuucacuuug

SEQ ID NO: 459974 - RNA, 21 nt, Human
auccuugaucagaagagugcu

SEQ ID NO: 459975 - RNA, 22 nt, Human
aucaguuuuguucacuacuaua

SEQ ID NO: 459976 - RNA, 22 nt, Human
auucauucugaccucaagagaa

SEQ ID NO: 459977 - RNA, 22 nt, Human
guggggcaguggccugggagca

SEQ ID NO: 459978 - RNA, 18 nt, Human
gcucugcccaggcugccc

SEQ ID NO: 459979 - RNA, 22 nt, Human
guggauggauuuugaggaaugg

SEQ ID NO: 459980 - RNA, 22 nt, Human
gcugucacauuuggagcacugg

SEQ ID NO: 459981 - RNA, 22 nt, Human
agcugcccuggcggagcugcuc

SEQ ID NO: 459982 - RNA, 22 nt, Human
ucuauaaauuaugcagucucag

SEQ ID NO: 459983 - RNA, 22 nt, Human
ugugcuucugcagagacuauuu

SEQ ID NO: 459984 - RNA, 22 nt, Human
gcaggaguguggugggacaucc

SEQ ID NO: 459985 - RNA, 22 nt, Human
aaaagacaucuauuucaggcag

SEQ ID NO: 459986 - RNA, 21 nt, Human
ccagcuuucccaagucccuuu

SEQ ID NO: 459987 - RNA, 22 nt, Human
cuccuuccccuacucagcaucc

SEQ ID NO: 459988 - RNA, 22 nt, Human
gagagucuaggaaccucauaua

SEQ ID NO: 459989 - RNA, 22 nt, Human
gcaguggaagccucuuuaagca

SEQ ID NO: 459990 - RNA, 22 nt, Human
gcccaugcucucaggcgggccu

SEQ ID NO: 459991 - RNA, 22 nt, Human
agauaauuugaguaaauuaauu

SEQ ID NO: 459992 - RNA, 22 nt, Human
gaggacagugugaucugccagc

SEQ ID NO: 459993 - RNA, 22 nt, Human
ggcccacacugacagcugagcu

SEQ ID NO: 459994 - RNA, 22 nt, Human
ggagccagcagggugacacuga

SEQ ID NO: 459995 - RNA, 21 nt, Human
uugcaccaugauaaauucaga

SEQ ID NO: 459996 - RNA, 21 nt, Human
gcagccacagccaccaagcua

SEQ ID NO: 459997 - RNA, 22 nt, Human
uugauuaaacaggcauauucaa

SEQ ID NO: 459998 - RNA, 22 nt, Human
cuuauauuugucaacuuuacaa

SEQ ID NO: 459999 - RNA, 22 nt, Human
uccuuugguucucuaagaugcu

SEQ ID NO: 460000 - RNA, 22 nt, Human
augucacagucugacucaguga

SEQ ID NO: 460001 - RNA, 22 nt, Human
aaguggagcuauaggcucagau

SEQ ID NO: 460002 - RNA, 22 nt, Human
caggccucccggugcacacuga

SEQ ID NO: 460003 - RNA, 22 nt, Human
cuuucacagcugugcuuaugau

SEQ ID NO: 460004 - RNA, 22 nt, Human
uuuauguaauuucauaggugug

SEQ ID NO: 460005 - RNA, 22 nt, Human
gaaggagagggucaaggauaau

SEQ ID NO: 460006 - RNA, 22 nt, Human
gcauuccuacaggcugcuauga

SEQ ID NO: 460007 - RNA, 22 nt, Human
gucccaggcagagucaggaggg

SEQ ID NO: 460008 - RNA, 22 nt, Human
ccagcuggucugugcucauguu

SEQ ID NO: 460009 - RNA, 22 nt, Human
agcagggcuuugcagacuuggg

SEQ ID NO: 460010 - RNA, 22 nt, Human
cccuguacagucucuguggcac

SEQ ID NO: 460011 - RNA, 22 nt, Human
agucucugggcaugguugugac

SEQ ID NO: 460012 - RNA, 22 nt, Human
gcuuggaaguaggauugggaga

SEQ ID NO: 460013 - RNA, 22 nt, Human
agcugaagaaaugggaagcauu

SEQ ID NO: 460014 - RNA, 22 nt, Human
ugauugacuuuagaauagcacu

SEQ ID NO: 460015 - RNA, 22 nt, Human
gcuggcuccucuguccucacgg

SEQ ID NO: 460016 - RNA, 22 nt, Human
gccuggagaggaagccggugga

SEQ ID NO: 460017 - RNA, 22 nt, Human
uagcaguggaaucuuuugucca

SEQ ID NO: 460018 - RNA, 22 nt, Human
uucuuguauauaaaaaucauuu

SEQ ID NO: 460019 - RNA, 23 nt, Human
ugcagcugccucuggcgggccgg

SEQ ID NO: 460020 - RNA, 22 nt, Human
cucaggauagauuguccucuca

SEQ ID NO: 460021 - RNA, 22 nt, Human
auggacagugugucuguuucca

SEQ ID NO: 460022 - RNA, 23 nt, Human
aucaaaguggaaaucaauuaucu

SEQ ID NO: 460023 - RNA, 22 nt, Human
ucagagaguuuucacuagggug

SEQ ID NO: 460024 - RNA, 21 nt, Human
agcuuguguguaucacagugu

SEQ ID NO: 460025 - RNA, 22 nt, Human
ucagugcagaauagugaugcau

SEQ ID NO: 460026 - RNA, 22 nt, Human
ggcucacgcaauuaucccggcc

SEQ ID NO: 460027 - RNA, 22 nt, Human
aaugaaugaaccacauauaaca

SEQ ID NO: 460028 - RNA, 22 nt, Human
auccugggaagcugacauugaa

SEQ ID NO: 460029 - RNA, 20 nt, Human
cccuggagagaagcuccacg

SEQ ID NO: 460030 - RNA, 22 nt, Human
agaagccaugguaugcaacuac

SEQ ID NO: 460031 - RNA, 22 nt, Human
aaggcuuuuguuccuauuuagu

SEQ ID NO: 460032 - RNA, 22 nt, Human
gucaccagcaccaaugccacau

SEQ ID NO: 460033 - RNA, 22 nt, Human
gagaaagauguaggcugggagg

SEQ ID NO: 460034 - RNA, 22 nt, Human
gaaaguauuuaaguccauauuu

SEQ ID NO: 460035 - RNA, 19 nt, Human
ccuggcccugcugcgcggg

SEQ ID NO: 460036 - RNA, 22 nt, Human
agggccaguaccaggugggugg

SEQ ID NO: 460037 - RNA, 22 nt, Human
aggcuggguaccugucauaugc

SEQ ID NO: 460038 - RNA, 22 nt, Human
ugaaagguguccaauauuucuc

SEQ ID NO: 460039 - RNA, 22 nt, Human
cuccuuccugguuagcaccuua

SEQ ID NO: 460040 - RNA, 22 nt, Human
augaguaaaaccacuauuuaca

SEQ ID NO: 460041 - RNA, 17 nt, Human
uugggagagaaagguau

SEQ ID NO: 460042 - RNA, 22 nt, Human
auuccaaaaggauguuagaaug

SEQ ID NO: 460043 - RNA, 23 nt, Human
ccagggccccuacaccacugucc

SEQ ID NO: 460044 - RNA, 22 nt, Human
ggcugcugguagggguaggaag

SEQ ID NO: 460045 - RNA, 19 nt, Human
aggacucuggaggcaugag

SEQ ID NO: 460046 - RNA, 15 nt, Human
ugggcagaucacuug

SEQ ID NO: 460047 - RNA, 22 nt, Human
acuguccaagcaugccuggcuu

SEQ ID NO: 460048 - RNA, 22 nt, Human
agcucacaguguccuuccucaa

SEQ ID NO: 460049 - RNA, 21 nt, Human
agggagcuauuuauaguaagc

SEQ ID NO: 460050 - RNA, 22 nt, Human
ugccagccagguucugaggcua

SEQ ID NO: 460051 - RNA, 22 nt, Human
caguguggugugcacagcuuag

SEQ ID NO: 460052 - RNA, 22 nt, Human
aaagccagggacagugugcaug

SEQ ID NO: 460053 - RNA, 20 nt, Human
uauuuguauuugggaaaguu

SEQ ID NO: 460054 - RNA, 22 nt, Human
uggaggcaacugaagauguagu

SEQ ID NO: 460055 - RNA, 21 nt, Human
agagcugggacuugccugaga

SEQ ID NO: 460056 - RNA, 22 nt, Human
uagaaaguaaaucaguuuuauu

SEQ ID NO: 460057 - RNA, 22 nt, Human
aggcccaguccucugccgucug

SEQ ID NO: 460058 - RNA, 22 nt, Human
cagggccagcgucucgggcuau

SEQ ID NO: 460059 - RNA, 22 nt, Human
uccuuuuuauaguuagagaaac

SEQ ID NO: 460060 - RNA, 22 nt, Human
uccaggaggugaggggaccaaa

SEQ ID NO: 460061 - RNA, 22 nt, Human
cagggcugaaaucaagguguag

SEQ ID NO: 460062 - RNA, 22 nt, Human
caagaugaaacuacagggagga

SEQ ID NO: 460063 - RNA, 22 nt, Human
ucacacagguuugcaaugauuu

SEQ ID NO: 460064 - RNA, 22 nt, Human
gagagcuggauucuggauaggu

SEQ ID NO: 460065 - RNA, 22 nt, Human
ucacaggcuugugaacauugca

SEQ ID NO: 460066 - RNA, 16 nt, Human
agcagccagcacugga

SEQ ID NO: 460067 - RNA, 22 nt, Human
ccuccacaggagcugcagugcu

SEQ ID NO: 460068 - RNA, 19 nt, Human
aguagcagaaagugcagug

SEQ ID NO: 460069 - RNA, 20 nt, Human
acaggggcagcacaauaaug

SEQ ID NO: 460070 - RNA, 19 nt, Human
ugcauaaauuauauacuuu

SEQ ID NO: 460071 - RNA, 18 nt, Human
ggagagugacagagucgu

SEQ ID NO: 460072 - RNA, 22 nt, Human
caguggcgugaucucugcucac

SEQ ID NO: 460073 - RNA, 22 nt, Human
caagggaguuacugagggcggg

SEQ ID NO: 460074 - RNA, 22 nt, Human
gccaguggcaugcggcagggac

SEQ ID NO: 460075 - RNA, 22 nt, Human
ccugggcagugcuggaguugaa

SEQ ID NO: 460076 - RNA, 22 nt, Human
ucaagagacaggacguguuuca

SEQ ID NO: 460077 - RNA, 22 nt, Human
agaagccacaggccucgucugg

SEQ ID NO: 460078 - RNA, 22 nt, Human
uuuaaucaggcaaagcauaaua

SEQ ID NO: 460079 - RNA, 22 nt, Human
gccuuggcugaugugcgaauga

SEQ ID NO: 460080 - RNA, 23 nt, Human
uggcagugaucaaaagcuuacau

SEQ ID NO: 460081 - RNA, 22 nt, Human
uagaaacucaggauacucuucc

SEQ ID NO: 460082 - RNA, 22 nt, Human
ccaaagagcuagaauuauaggc

SEQ ID NO: 460083 - RNA, 22 nt, Human
gugugccagacaugaugcuaug

SEQ ID NO: 460084 - RNA, 22 nt, Human
uuaugggagcaauuggggaggu

SEQ ID NO: 460085 - RNA, 22 nt, Human
acugucucucuagcaguucagg

SEQ ID NO: 460086 - RNA, 22 nt, Human
cuggccagguuuugaacaguug

SEQ ID NO: 460087 - RNA, 22 nt, Human
ggggcucaguucggacagccug

SEQ ID NO: 460088 - RNA, 21 nt, Human
aggcagccagucaugcucccu

SEQ ID NO: 460089 - RNA, 21 nt, Human
cuccugggcuaagauauagug

SEQ ID NO: 460090 - RNA, 22 nt, Human
gaaggccacggaauggagcugg

SEQ ID NO: 460091 - RNA, 22 nt, Human
uuacucagucucccauacauug

SEQ ID NO: 460092 - RNA, 22 nt, Human
ugcugucugauucagggugauu

SEQ ID NO: 460093 - RNA, 22 nt, Human
ugguacuuggaggcagaaaaau

SEQ ID NO: 460094 - RNA, 22 nt, Human
agccucugugacucacagguca

SEQ ID NO: 460095 - RNA, 22 nt, Human
agaagcaguuauuuuuugcaca

SEQ ID NO: 460096 - RNA, 22 nt, Human
acccaggcugcuucucaguggc

SEQ ID NO: 460097 - RNA, 22 nt, Human
agcuggccuccgggugccuggg

SEQ ID NO: 460098 - RNA, 19 nt, Human
aggcagcaggccagggaug

SEQ ID NO: 460099 - RNA, 22 nt, Human
accacugcccauggugaaaacu

SEQ ID NO: 460100 - RNA, 22 nt, Human
ggcucaggacacagugguuuag

SEQ ID NO: 460101 - RNA, 22 nt, Human
ggagaagccacacauugggugu

SEQ ID NO: 460102 - RNA, 22 nt, Human
ugaaaugcuguagagacuguau

SEQ ID NO: 460103 - RNA, 22 nt, Human
ugcucugucaagaaaagaugcc

SEQ ID NO: 460104 - RNA, 18 nt, Human
ugagaggcuauuuuuugc

SEQ ID NO: 460105 - RNA, 22 nt, Human
ggaggcccagagaggugaagug

SEQ ID NO: 460106 - RNA, 22 nt, Human
ugcaauaaagugcuauaaaucc

SEQ ID NO: 460107 - RNA, 22 nt, Human
cagggcucacucggcuggcguc

SEQ ID NO: 460108 - RNA, 22 nt, Human
cacagcugcacagaggaggugc

SEQ ID NO: 460109 - RNA, 22 nt, Human
ugugcccauuccacuugaguac

SEQ ID NO: 460110 - RNA, 22 nt, Human
gcagaggaggacccaggaauua

SEQ ID NO: 460111 - RNA, 22 nt, Human
uuccagggcuaauuccugugga

SEQ ID NO: 460112 - RNA, 22 nt, Human
aagauuuaccacuuuauucaag

SEQ ID NO: 460113 - RNA, 22 nt, Human
ggcugcagcagagggacucacg

SEQ ID NO: 460114 - RNA, 20 nt, Human
augugagggguugaaguggg

SEQ ID NO: 460115 - RNA, 22 nt, Human
acaggcagggaccuuggcuaag

SEQ ID NO: 460116 - RNA, 22 nt, Human
uuuccuaagguagugauaauuu

SEQ ID NO: 460117 - RNA, 21 nt, Human
gugguuauuuucauuagcauc

SEQ ID NO: 460118 - RNA, 22 nt, Human
gugccugugccaggggugugcu

SEQ ID NO: 460119 - RNA, 22 nt, Human
cuggagccacugggucuuguau

SEQ ID NO: 460120 - RNA, 22 nt, Human
aggggagccccugguccuggug

SEQ ID NO: 460121 - RNA, 22 nt, Human
gcagcccaaaaaagagguagau

SEQ ID NO: 460122 - RNA, 22 nt, Human
gcugagcugggacaguccuggg

SEQ ID NO: 460123 - RNA, 22 nt, Human
aucagucuguguuagaaaagag

SEQ ID NO: 460124 - RNA, 22 nt, Human
caggaggaggugagguagaacu

SEQ ID NO: 460125 - RNA, 22 nt, Human
agcuggagcuucaagcagguaa

SEQ ID NO: 460126 - RNA, 22 nt, Human
ccucacugcuauguguuugcuc

SEQ ID NO: 460127 - RNA, 22 nt, Human
ucugccagugguuuggcccuga

SEQ ID NO: 460128 - RNA, 22 nt, Human
uuucagauuaucucaacuuugg

SEQ ID NO: 460129 - RNA, 22 nt, Human
cagcaguggccaucuguguggu

SEQ ID NO: 460130 - RNA, 22 nt, Human
guccucugacucagccuuggga

SEQ ID NO: 460131 - RNA, 22 nt, Human
guuugcauuccaauuuagggga

SEQ ID NO: 460132 - RNA, 22 nt, Human
cagccaggcccccgagucguug

SEQ ID NO: 460133 - RNA, 22 nt, Human
acccagcuaacccuacccugga

SEQ ID NO: 460134 - RNA, 19 nt, Human
acaagggcaggcaagguga

SEQ ID NO: 460135 - RNA, 22 nt, Human
agggcuggaggguacuaguuua

SEQ ID NO: 460136 - RNA, 22 nt, Human
uggcagggccugaaucuuauac

SEQ ID NO: 460137 - RNA, 22 nt, Human
ugggcucugcaucagugcccau

SEQ ID NO: 460138 - RNA, 22 nt, Human
caggaggcaguuucagaaguca

SEQ ID NO: 460139 - RNA, 22 nt, Human
ccagccacagcuuccagcuccu

SEQ ID NO: 460140 - RNA, 22 nt, Human
aggcugaggugugcugugaucg

SEQ ID NO: 460141 - RNA, 22 nt, Human
cugugcaguaggucagggcugg

SEQ ID NO: 460142 - RNA, 22 nt, Human
gugcagcugugugagagcucca

SEQ ID NO: 460143 - RNA, 22 nt, Human
ccaggcagggcucaaggaaccu

SEQ ID NO: 460144 - RNA, 17 nt, Human
cuggagccaagagggcc

SEQ ID NO: 460145 - RNA, 22 nt, Human
aagggcuccauccuuauaaaug

SEQ ID NO: 460146 - RNA, 22 nt, Human
ucuacuuuucccuauacaguuu

SEQ ID NO: 460147 - RNA, 21 nt, Human
guuuuaagggagaaaaccuag

SEQ ID NO: 460148 - RNA, 21 nt, Human
acaugucucuaaucucaguga

SEQ ID NO: 460149 - RNA, 22 nt, Human
uggagagcgugcuuagcacucu

SEQ ID NO: 460150 - RNA, 22 nt, Human
ccugagagcgaguggccucaug

SEQ ID NO: 460151 - RNA, 22 nt, Human
ggcauauguagcguguguucug

SEQ ID NO: 460152 - RNA, 22 nt, Human
auccaaagauggaaagaacuuu

SEQ ID NO: 460153 - RNA, 22 nt, Human
gcuguucucuguaacaugcauu

SEQ ID NO: 460154 - RNA, 22 nt, Human
ugcaucuguucagagcugucga

SEQ ID NO: 460155 - RNA, 22 nt, Human
gcagggcacacaagaaugauaa

SEQ ID NO: 460156 - RNA, 21 nt, Human
gcagccagccgagaccaugcc

SEQ ID NO: 460157 - RNA, 22 nt, Human
guccagagauggacgagcagau

SEQ ID NO: 460158 - RNA, 22 nt, Human
ucugagggcuugaggggaagua

SEQ ID NO: 460159 - RNA, 22 nt, Human
gugggggcaggcagugcuagga

SEQ ID NO: 460160 - RNA, 22 nt, Human
ggaugcaggaguugaagaagga

SEQ ID NO: 460161 - RNA, 22 nt, Human
gcagaggacagggauuuagauu

SEQ ID NO: 460162 - RNA, 22 nt, Human
ucccagggacucucugccuucc

SEQ ID NO: 460163 - RNA, 22 nt, Human
uccuguggaagacaguguuggg

SEQ ID NO: 460164 - RNA, 22 nt, Human
ucucaggacuuugggaagcuca

SEQ ID NO: 460165 - RNA, 22 nt, Human
gcucucuggaggccauggacag

SEQ ID NO: 460166 - RNA, 22 nt, Human
gcucccugccuacacggaccuu

SEQ ID NO: 460167 - RNA, 19 nt, Human
ccagucccauacaggagau

SEQ ID NO: 460168 - RNA, 22 nt, Human
uggacagguuugggugccuguu

SEQ ID NO: 460169 - RNA, 22 nt, Human
ugccacagaggugaagcccacu

SEQ ID NO: 460170 - RNA, 22 nt, Human
auguuuauguugggcuauauuu

SEQ ID NO: 460171 - RNA, 22 nt, Human
ugggguggauagaaagugaugu

SEQ ID NO: 460172 - RNA, 22 nt, Human
aggcacugagaggcuguguugc

SEQ ID NO: 460173 - RNA, 22 nt, Human
agggaaaguaagcauuucauua

SEQ ID NO: 460174 - RNA, 22 nt, Human
uggaggcauuuuagguugucac

SEQ ID NO: 460175 - RNA, 22 nt, Human
ugccagcaguagcaguaggcca

SEQ ID NO: 460176 - RNA, 22 nt, Human
ucuuccucuagaucugaggccc

SEQ ID NO: 460177 - RNA, 22 nt, Human
gcucucugggugugucuagaua

SEQ ID NO: 460178 - RNA, 22 nt, Human
gaauacaagccugccaccugga

SEQ ID NO: 460179 - RNA, 22 nt, Human
ggacagaggguugacagaguau

SEQ ID NO: 460180 - RNA, 19 nt, Human
cugggagguguucagagaa

SEQ ID NO: 460181 - RNA, 22 nt, Human
agccuguggaucccugcacugg

SEQ ID NO: 460182 - RNA, 22 nt, Human
ugcauuguugaauauuucauag

SEQ ID NO: 460183 - RNA, 22 nt, Human
gcagcaaucuucacagugucau

SEQ ID NO: 460184 - RNA, 19 nt, Human
cagugcccgacgcaggucu

SEQ ID NO: 460185 - RNA, 21 nt, Human
cuguuucuugugaagugacac

SEQ ID NO: 460186 - RNA, 22 nt, Human
agcagccacccagcugcucauu

SEQ ID NO: 460187 - RNA, 22 nt, Human
aagugaguggccuggagaggug

SEQ ID NO: 460188 - RNA, 22 nt, Human
gagcucuggcagggcaggucug

SEQ ID NO: 460189 - RNA, 22 nt, Human
cgugucaucugagccuugggcg

SEQ ID NO: 460190 - RNA, 22 nt, Human
aggcagcagggccacuggcuga

SEQ ID NO: 460191 - RNA, 22 nt, Human
gaaaucugaaucuucuguuggu

SEQ ID NO: 460192 - RNA, 23 nt, Human
agcccagcagagaaccuaggucc

SEQ ID NO: 460193 - RNA, 22 nt, Human
gcuggccagggcugcucgcgga

SEQ ID NO: 460194 - RNA, 22 nt, Human
uuguacaaguauuaugugaaca

SEQ ID NO: 460195 - RNA, 22 nt, Human
uguguauuaccauuuuacagcu

SEQ ID NO: 460196 - RNA, 21 nt, Human
ucagggcagugggagguuccu

SEQ ID NO: 460197 - RNA, 23 nt, Human
cccagaccuugugcugcccuugg

SEQ ID NO: 460198 - RNA, 19 nt, Human
ugggccugcaucugggucu

SEQ ID NO: 460199 - RNA, 22 nt, Human
cuggcuggccggaggcaucccu

SEQ ID NO: 460200 - RNA, 22 nt, Human
gacccaggguuucugcacaggg

SEQ ID NO: 460201 - RNA, 22 nt, Human
agcugccacagagccuggccag

SEQ ID NO: 460202 - RNA, 22 nt, Human
acaaggcugaacagugaagccg

SEQ ID NO: 460203 - RNA, 22 nt, Human
cugacucuccucaagcauaaau

SEQ ID NO: 460204 - RNA, 22 nt, Human
ugauuucuuccuugucauuaga

SEQ ID NO: 460205 - RNA, 22 nt, Human
aaggccagaguacuagaggcug

SEQ ID NO: 460206 - RNA, 22 nt, Human
agacagagauacuauguuguca

SEQ ID NO: 460207 - RNA, 22 nt, Human
ccugguguugugaaguagccgu

SEQ ID NO: 460208 - RNA, 22 nt, Human
agcgugaaggcgggcagucggc

SEQ ID NO: 460209 - RNA, 22 nt, Human
caguuucugggcguucacaggu

SEQ ID NO: 460210 - RNA, 19 nt, Human
guugaaaguaggugagggu

SEQ ID NO: 460211 - RNA, 22 nt, Human
uucaggauggcggauguugggg

SEQ ID NO: 460212 - RNA, 22 nt, Human
uggcaagagggaugcaagguuu

SEQ ID NO: 460213 - RNA, 22 nt, Human
uagaaauccccagucucauagu

SEQ ID NO: 460214 - RNA, 22 nt, Human
ugaggcaggacuugcauaaagu

SEQ ID NO: 460215 - RNA, 22 nt, Human
ugccaggcucaggaugucccug

SEQ ID NO: 460216 - RNA, 16 nt, Human
gagggcagaggcggaa

SEQ ID NO: 460217 - RNA, 22 nt, Human
cggcuggguucggcugcaggcc

SEQ ID NO: 460218 - RNA, 22 nt, Human
cauguuuucuaggcuuucacaa

SEQ ID NO: 460219 - RNA, 22 nt, Human
uccuuucaccaaaaaguguugu

SEQ ID NO: 460220 - RNA, 22 nt, Human
cuggggcuggugaggcaggcuc

SEQ ID NO: 460221 - RNA, 22 nt, Human
gccugagauucugcauuucuaa

SEQ ID NO: 460222 - RNA, 22 nt, Human
uuuuaucugcuucauuaguuga

SEQ ID NO: 460223 - RNA, 22 nt, Human
gcugggcaccggagagacccca

SEQ ID NO: 460224 - RNA, 22 nt, Human
ucacacacauuugcugucugau

SEQ ID NO: 460225 - RNA, 22 nt, Human
ugcuuuauagacaaggaaguag

SEQ ID NO: 460226 - RNA, 22 nt, Human
aggcacugaccugcuuccuuga

SEQ ID NO: 460227 - RNA, 22 nt, Human
uacaguaaccagucuacuuaga

SEQ ID NO: 460228 - RNA, 22 nt, Human
agugcuccuauggaucaguugu

SEQ ID NO: 460229 - RNA, 22 nt, Human
aggcacuguacuagguacaggg

SEQ ID NO: 460230 - RNA, 22 nt, Human
uuauguacaauguuaauguaaa

SEQ ID NO: 460231 - RNA, 19 nt, Human
uaaggccaaaaguaagugu

SEQ ID NO: 460232 - RNA, 22 nt, Human
caccagguuccgggcagagcug

SEQ ID NO: 460233 - RNA, 22 nt, Human
uaaguaaauuuauaaugugauu

SEQ ID NO: 460234 - RNA, 20 nt, Human
gcagcugcccccagucccug

SEQ ID NO: 460235 - RNA, 20 nt, Human
aggcagacaaggagucuguu

SEQ ID NO: 460236 - RNA, 23 nt, Human
ugucacauuuaguuggcauuguu

SEQ ID NO: 460237 - RNA, 22 nt, Human
cugcuggagguuggagcaugca

SEQ ID NO: 460238 - RNA, 22 nt, Human
gucuggaguggggccugagaau

SEQ ID NO: 460239 - RNA, 22 nt, Human
uguuuaaucuauaaaauggaga

SEQ ID NO: 460240 - RNA, 22 nt, Human
cucuggagguggagguugcagu

SEQ ID NO: 460241 - RNA, 22 nt, Human
uucaggaucaaguugccaguag

SEQ ID NO: 460242 - RNA, 22 nt, Human
cauugaaauauggaaacugaug

SEQ ID NO: 460243 - RNA, 22 nt, Human
ucaagaaagggcuucaccagga

SEQ ID NO: 460244 - RNA, 17 nt, Human
ucugggcuucagugguc

SEQ ID NO: 460245 - RNA, 21 nt, Human
ccaaaggcuauguaucuucug

SEQ ID NO: 460246 - RNA, 22 nt, Human
uucuaccuacccucugcauaca

SEQ ID NO: 460247 - RNA, 22 nt, Human
gaggcaggcacuguuaucagca

SEQ ID NO: 460248 - RNA, 22 nt, Human
gaggaggcacuugagcagaugu

SEQ ID NO: 460249 - RNA, 22 nt, Human
cuuacaaaggagaggagauagg

SEQ ID NO: 460250 - RNA, 22 nt, Human
acagauauaaacuauaguagug

SEQ ID NO: 460251 - RNA, 22 nt, Human
guguuuggucagacguccgggg

SEQ ID NO: 460252 - RNA, 22 nt, Human
agagccagccuucucagcuuac

SEQ ID NO: 460253 - RNA, 22 nt, Human
uaauaucuacuucauagaguuu

SEQ ID NO: 460254 - RNA, 22 nt, Human
aaaaugcaugagaaugugcucg

SEQ ID NO: 460255 - RNA, 22 nt, Human
auacaucuugucagauucaugu

SEQ ID NO: 460256 - RNA, 22 nt, Human
aaugaacaggugaaugucagau

SEQ ID NO: 460257 - RNA, 22 nt, Human
cugugcaagacuuacuuuaaua

SEQ ID NO: 460258 - RNA, 22 nt, Human
ucaaaggcccauugucccguug

SEQ ID NO: 460259 - RNA, 22 nt, Human
cugggcugcagcgggagcgacg

SEQ ID NO: 460260 - RNA, 22 nt, Human
ccaggaagccucagaugcugag

SEQ ID NO: 460261 - RNA, 22 nt, Human
gcucccacugcagcccugagcc

SEQ ID NO: 460262 - RNA, 22 nt, Human
ugaggcucaagaaucugcauuu

SEQ ID NO: 460263 - RNA, 22 nt, Human
ugcugccuccaacuccugggcu

SEQ ID NO: 460264 - RNA, 20 nt, Human
uccuuuggccuuagagcugu

SEQ ID NO: 460265 - RNA, 17 nt, Human
gaauuucuuggucaaaa

SEQ ID NO: 460266 - RNA, 22 nt, Human
ucuggcucugacacuacuguua

SEQ ID NO: 460267 - RNA, 16 nt, Human
agccaggcugccucgg

SEQ ID NO: 460268 - RNA, 22 nt, Human
gcagugggaagguuggcacaug

SEQ ID NO: 460269 - RNA, 22 nt, Human
aacugcauuugcauaaguccau

SEQ ID NO: 460270 - RNA, 22 nt, Human
cagcucccaguggcagcuccuu

SEQ ID NO: 460271 - RNA, 22 nt, Human
ucagaaauuuucucaguaguuc

SEQ ID NO: 460272 - RNA, 22 nt, Human
gugaggcagagaugccaaaacu

SEQ ID NO: 460273 - RNA, 22 nt, Human
uaaggccaaguucauauacaac

SEQ ID NO: 460274 - RNA, 22 nt, Human
aaaucaaaagacauguguuuua

SEQ ID NO: 460275 - RNA, 22 nt, Human
uuauucuucuucucuugccagg

SEQ ID NO: 460276 - RNA, 18 nt, Human
gcugcugguggagggagc

SEQ ID NO: 460277 - RNA, 22 nt, Human
gggcugagucugcugccuguca

SEQ ID NO: 460278 - RNA, 22 nt, Human
agcagcaggagccgugggguga

SEQ ID NO: 460279 - RNA, 22 nt, Human
aaauuauuaugccccucuauaa

SEQ ID NO: 460280 - RNA, 22 nt, Human
gggcucuggauggagccugcag

SEQ ID NO: 460281 - RNA, 22 nt, Human
ucucccacuggccuuguaugau

SEQ ID NO: 460282 - RNA, 22 nt, Human
ccuccugguccagcaucucuuu

SEQ ID NO: 460283 - RNA, 22 nt, Human
cagugggaagggcagaggcuuu

SEQ ID NO: 460284 - RNA, 22 nt, Human
aggcacugauucuguuuuccau

SEQ ID NO: 460285 - RNA, 22 nt, Human
ggcagaggagcuggaaacaugg

SEQ ID NO: 460286 - RNA, 21 nt, Human
agcagaggcagaauguaugca

SEQ ID NO: 460287 - RNA, 18 nt, Human
cagaugagaugcaaucuc

SEQ ID NO: 460288 - RNA, 22 nt, Human
uccuggccgccgcguggggccg

SEQ ID NO: 460289 - RNA, 22 nt, Human
auccacccugugguggcuuucu

SEQ ID NO: 460290 - RNA, 22 nt, Human
guuuggggucugcagagcggcg

SEQ ID NO: 460291 - RNA, 22 nt, Human
aagcugccuugcugaggagaaa

SEQ ID NO: 460292 - RNA, 22 nt, Human
gggagcugaauggcaauggaga

SEQ ID NO: 460293 - RNA, 22 nt, Human
cugagccagcuggcaugugcua

SEQ ID NO: 460294 - RNA, 19 nt, Human
agggagaauuccaagagga

SEQ ID NO: 460295 - RNA, 20 nt, Human
aggaaaaggguggugguaga

SEQ ID NO: 460296 - RNA, 22 nt, Human
auacaaguugugauaauguaaa

SEQ ID NO: 460297 - RNA, 22 nt, Human
cucccagggccaucgagucacu

SEQ ID NO: 460298 - RNA, 22 nt, Human
agauuugcggcuuuacuuugca

SEQ ID NO: 460299 - RNA, 22 nt, Human
ucuuucucucuaaucaagcaca

SEQ ID NO: 460300 - RNA, 22 nt, Human
acugcuuuagaccuagagcucu

SEQ ID NO: 460301 - RNA, 22 nt, Human
ugaggcagugauguuuaagcac

SEQ ID NO: 460302 - RNA, 22 nt, Human
cuguagcagugugcucuuuuuc

SEQ ID NO: 460303 - RNA, 22 nt, Human
aagcugccauagaacgagaggu

SEQ ID NO: 460304 - RNA, 22 nt, Human
gcuaggagauugagcucugaag

SEQ ID NO: 460305 - RNA, 21 nt, Human
uauuucuuugacucucucccu

SEQ ID NO: 460306 - RNA, 21 nt, Human
aacaaagggaugcucaucuuu

SEQ ID NO: 460307 - RNA, 22 nt, Human
ugaggcucaagaaagauuuguu

SEQ ID NO: 460308 - RNA, 22 nt, Human
caggcaggucagugaagaagga

SEQ ID NO: 460309 - RNA, 23 nt, Human
cgcccagccucagugaccugggc

SEQ ID NO: 460310 - RNA, 22 nt, Human
auuugcagagcucugaauuuug

SEQ ID NO: 460311 - RNA, 22 nt, Human
gagucugagucuaauggcccca

SEQ ID NO: 460312 - RNA, 22 nt, Human
uugcugaaaacaguggguauug

SEQ ID NO: 460313 - RNA, 18 nt, Human
ucagaggagauaccuaaa

SEQ ID NO: 460314 - RNA, 22 nt, Human
ggcacugagaacaggcugacuu

SEQ ID NO: 460315 - RNA, 22 nt, Human
gggaagggacuuguuuaagguc

SEQ ID NO: 460316 - RNA, 22 nt, Human
cagccccucacagagcuguccu

SEQ ID NO: 460317 - RNA, 19 nt, Human
acaaacugaguacacuugu

SEQ ID NO: 460318 - RNA, 22 nt, Human
ggaggccaaggcagguggaucg

SEQ ID NO: 460319 - RNA, 22 nt, Human
gucaggauuauuuuauuaaaag

SEQ ID NO: 460320 - RNA, 23 nt, Human
uugugggcagauuccauggggag

SEQ ID NO: 460321 - RNA, 22 nt, Human
ugaggcaggaggauugcaggau

SEQ ID NO: 460322 - RNA, 22 nt, Human
agaugaagacucaggagcaggu

SEQ ID NO: 460323 - RNA, 22 nt, Human
ugagaagcugcugacuuagccu

SEQ ID NO: 460324 - RNA, 22 nt, Human
gaaaugugggucaugacccauu

SEQ ID NO: 460325 - RNA, 22 nt, Human
gaagggugcauggagggaaguc

SEQ ID NO: 460326 - RNA, 22 nt, Human
aaggcacugcuuugcugcgccc

SEQ ID NO: 460327 - RNA, 22 nt, Human
gcagcuggacccacacggcuua

SEQ ID NO: 460328 - RNA, 22 nt, Human
gaggcugggaaguccaagauca

SEQ ID NO: 460329 - RNA, 22 nt, Human
gagcagcugagcuggaaugaga

SEQ ID NO: 460330 - RNA, 21 nt, Human
uucaaugaaaacaaagugagg

SEQ ID NO: 460331 - RNA, 22 nt, Human
ugaggcagauauuuauuggguu

SEQ ID NO: 460332 - RNA, 22 nt, Human
ggcagaggaggggugaauuugc

SEQ ID NO: 460333 - RNA, 22 nt, Human
caccagcagaagacugagggug

SEQ ID NO: 460334 - RNA, 22 nt, Human
agaaagcuuaugaaugggcaag

SEQ ID NO: 460335 - RNA, 22 nt, Human
ccagggucucugcugccugaga

SEQ ID NO: 460336 - RNA, 22 nt, Human
gcucugcugaagccccuugcau

SEQ ID NO: 460337 - RNA, 22 nt, Human
uuuccuuccagguuccuaaggc

SEQ ID NO: 460338 - RNA, 22 nt, Human
agagccaggacugugucucacu

SEQ ID NO: 460339 - RNA, 22 nt, Human
gcccucugcacagcucugagca

SEQ ID NO: 460340 - RNA, 22 nt, Human
gagccaggcccguacuugcugu

SEQ ID NO: 460341 - RNA, 20 nt, Human
caccaggcgcucugagaaca

SEQ ID NO: 460342 - RNA, 22 nt, Human
gccugcagccccucugcaguag

SEQ ID NO: 460343 - RNA, 22 nt, Human
aaaaccaggcguuuccuauuau

SEQ ID NO: 460344 - RNA, 22 nt, Human
acuuucuccagaaaaccaagga

SEQ ID NO: 460345 - RNA, 22 nt, Human
uccuccaggucuaggguggcuu

SEQ ID NO: 460346 - RNA, 22 nt, Human
cuuagaaaugcagauucucagg

SEQ ID NO: 460347 - RNA, 22 nt, Human
accaucuuaguggccagcucuc

SEQ ID NO: 460348 - RNA, 22 nt, Human
cagggagaaaucuccaggaggu

SEQ ID NO: 460349 - RNA, 22 nt, Human
gacagcagacagaacuaccugc

SEQ ID NO: 460350 - RNA, 22 nt, Human
ugcuccagugagcuggccaucc

SEQ ID NO: 460351 - RNA, 17 nt, Human
ggugaguguccaggugg

SEQ ID NO: 460352 - RNA, 22 nt, Human
gaagagcuuagacagaaucaaa

SEQ ID NO: 460353 - RNA, 22 nt, Human
guccucaggaaagcagauaaca

SEQ ID NO: 460354 - RNA, 22 nt, Human
ucuguaaucaagauauuugaga

SEQ ID NO: 460355 - RNA, 22 nt, Human
agagccaggaucuguuuugggg

SEQ ID NO: 460356 - RNA, 22 nt, Human
gcugggagcaaguacucaucuu

SEQ ID NO: 460357 - RNA, 16 nt, Human
ccacagggcaaggggc

SEQ ID NO: 460358 - RNA, 21 nt, Human
agggccugugcucuccagguc

SEQ ID NO: 460359 - RNA, 22 nt, Human
uuacauuuugggguaaggauaa

SEQ ID NO: 460360 - RNA, 22 nt, Human
ggcagaagauaggacagggaau

SEQ ID NO: 460361 - RNA, 22 nt, Human
cugugcuugcggguguggagcc

SEQ ID NO: 460362 - RNA, 22 nt, Human
aggcugaggcaagaggaucacu

SEQ ID NO: 460363 - RNA, 22 nt, Human
uccuggugucgccuggucaguu

SEQ ID NO: 460364 - RNA, 22 nt, Human
aagcuuuaugaucucucagcua

SEQ ID NO: 460365 - RNA, 22 nt, Human
uccagccaacugccuagggagc

SEQ ID NO: 460366 - RNA, 21 nt, Human
ggcagccugacccccagagag

SEQ ID NO: 460367 - RNA, 22 nt, Human
ugaagcaggcauugacugauga

SEQ ID NO: 460368 - RNA, 22 nt, Human
ugaggaagaacaagaauuuaga

SEQ ID NO: 460369 - RNA, 22 nt, Human
ugccaaauugcccuauaaauga

SEQ ID NO: 460370 - RNA, 22 nt, Human
uucuccucuguuggccuucccu

SEQ ID NO: 460371 - RNA, 22 nt, Human
aaaggccacuugaaggauuuuu

SEQ ID NO: 460372 - RNA, 22 nt, Human
agaacuguccuuggaggagagu

SEQ ID NO: 460373 - RNA, 22 nt, Human
cuccaggguuccccgauccacu

SEQ ID NO: 460374 - RNA, 22 nt, Human
acaggcucuggggcaggauggc

SEQ ID NO: 460375 - RNA, 22 nt, Human
ucuucacagaugcauauacuuc

SEQ ID NO: 460376 - RNA, 23 nt, Human
ggggaaguggcagugagugaggc

SEQ ID NO: 460377 - RNA, 22 nt, Human
uccagagcagguggucagaagg

SEQ ID NO: 460378 - RNA, 22 nt, Human
ccugccugggcucacuugccag

SEQ ID NO: 460379 - RNA, 22 nt, Human
caggcagccuucucgucucaca

SEQ ID NO: 460380 - RNA, 22 nt, Human
uuugaaaggguuaugagacuga

SEQ ID NO: 460381 - RNA, 22 nt, Human
agcagagucugugugcacuuua

SEQ ID NO: 460382 - RNA, 22 nt, Human
gagggcugccacguugggcgag

SEQ ID NO: 460383 - RNA, 22 nt, Human
guuuuccacuggauuguuugga

SEQ ID NO: 460384 - RNA, 22 nt, Human
ggcugcuuuaucggcugcugaa

SEQ ID NO: 460385 - RNA, 22 nt, Human
gcagggccagguacaagaagca

SEQ ID NO: 460386 - RNA, 22 nt, Human
cagaagaggacuggguagcuca

SEQ ID NO: 460387 - RNA, 22 nt, Human
uggcucaggauaauuuucccaa

SEQ ID NO: 460388 - RNA, 22 nt, Human
gaaggccacaagagaaguuaag

SEQ ID NO: 460389 - RNA, 22 nt, Human
uggaaagaauuccuaugguuca

SEQ ID NO: 460390 - RNA, 22 nt, Human
uugcugaagugaagguauguuu

SEQ ID NO: 460391 - RNA, 22 nt, Human
aucagcaagauugugucuugua

SEQ ID NO: 460392 - RNA, 22 nt, Human
cagcucucacacccuccuccca

SEQ ID NO: 460393 - RNA, 17 nt, Human
gcagugaaaagagauca

SEQ ID NO: 460394 - RNA, 22 nt, Human
gaccugccugagcugccucugc

SEQ ID NO: 460395 - RNA, 22 nt, Human
agagcugagcaccaagcauggu

SEQ ID NO: 460396 - RNA, 22 nt, Human
cugcccugagucaugccagaug

SEQ ID NO: 460397 - RNA, 22 nt, Human
caaagucccagcugcuuagaga

SEQ ID NO: 460398 - RNA, 22 nt, Human
uacuuuuuagcacagugugugc

SEQ ID NO: 460399 - RNA, 22 nt, Human
cagcaauauacacagucuaugg

SEQ ID NO: 460400 - RNA, 22 nt, Human
ccuggccagaggcgugccugug

SEQ ID NO: 460401 - RNA, 22 nt, Human
cugacucagcagcugaugaucc

SEQ ID NO: 460402 - RNA, 22 nt, Human
ggccuugggcagacacgucaca

SEQ ID NO: 460403 - RNA, 22 nt, Human
uggcuagcccuuguggggagag

SEQ ID NO: 460404 - RNA, 19 nt, Human
cagaccuguccagccugug

SEQ ID NO: 460405 - RNA, 22 nt, Human
cuauuaaacacuacugugcacu

SEQ ID NO: 460406 - RNA, 22 nt, Human
gagauauguuagaaagcuauug

SEQ ID NO: 460407 - RNA, 22 nt, Human
gggagccaugcuggucuucuuu

SEQ ID NO: 460408 - RNA, 22 nt, Human
uggcucagugacauuccuccca

SEQ ID NO: 460409 - RNA, 22 nt, Human
cuugggagacacaagaagacau

SEQ ID NO: 460410 - RNA, 22 nt, Human
cagagcugcgcuuuuuccuggu

SEQ ID NO: 460411 - RNA, 22 nt, Human
guuagggagucagguggcucuu

SEQ ID NO: 460412 - RNA, 20 nt, Human
ggcagggcaucaacagcucu

SEQ ID NO: 460413 - RNA, 22 nt, Human
gcuucuggaggagcugggcuga

SEQ ID NO: 460414 - RNA, 22 nt, Human
gguggcagaggugcaucagccc

SEQ ID NO: 460415 - RNA, 22 nt, Human
cuugaaagcuuugcgucuucua

SEQ ID NO: 460416 - RNA, 22 nt, Human
aggccaggcaacauucugaagu

SEQ ID NO: 460417 - RNA, 22 nt, Human
aaagacuuggcuuaugauuugc

SEQ ID NO: 460418 - RNA, 22 nt, Human
aaggaagacuugagaagguucc

SEQ ID NO: 460419 - RNA, 22 nt, Human
agggcuccgggcaggcgaugga

SEQ ID NO: 460420 - RNA, 22 nt, Human
aaaggaagauugagcuuuucca

SEQ ID NO: 460421 - RNA, 22 nt, Human
cacagcagaaaguguaggagga

SEQ ID NO: 460422 - RNA, 22 nt, Human
ggcagccagcaaugagaaguuu

SEQ ID NO: 460423 - RNA, 22 nt, Human
uaauccacaauagagauuaucu

SEQ ID NO: 460424 - RNA, 22 nt, Human
cuggcucacuagcccugcccug

SEQ ID NO: 460425 - RNA, 22 nt, Human
gccacagggcagaugcgcagag

SEQ ID NO: 460426 - RNA, 22 nt, Human
ucuggcuccuggcuccacugcc

SEQ ID NO: 460427 - RNA, 20 nt, Human
auauguguacguguauacau

SEQ ID NO: 460428 - RNA, 22 nt, Human
ggcugcuggaagacugaacaag

SEQ ID NO: 460429 - RNA, 22 nt, Human
ucugagcuggagcccaucaccu

SEQ ID NO: 460430 - RNA, 22 nt, Human
gugacagaguuuuagaucucau

SEQ ID NO: 460431 - RNA, 22 nt, Human
gcaggggcugcugggaacucgg

SEQ ID NO: 460432 - RNA, 22 nt, Human
ucagagaacacagaggugaugu

SEQ ID NO: 460433 - RNA, 21 nt, Human
agaggcaggcauuaaguacac

SEQ ID NO: 460434 - RNA, 22 nt, Human
cacagaaguuucauagucucga

SEQ ID NO: 460435 - RNA, 22 nt, Human
cagguccugcagggagaguaaa

SEQ ID NO: 460436 - RNA, 19 nt, Human
gcaggguguugacuguccc

SEQ ID NO: 460437 - RNA, 18 nt, Human
uagggcucuagggaguga

SEQ ID NO: 460438 - RNA, 22 nt, Human
caggaggcuccuagggcucugu

SEQ ID NO: 460439 - RNA, 18 nt, Human
gcccagaggucugggccc

SEQ ID NO: 460440 - RNA, 22 nt, Human
uagugaaacaguuaucaaucug

SEQ ID NO: 460441 - RNA, 22 nt, Human
agcugucucugguauuauguga

SEQ ID NO: 460442 - RNA, 22 nt, Human
cagcuuuuuagaaucuagggca

SEQ ID NO: 460443 - RNA, 22 nt, Human
ccugucugaggaggugcucuuu

SEQ ID NO: 460444 - RNA, 17 nt, Human
accaggcaacacgccca

SEQ ID NO: 460445 - RNA, 22 nt, Human
ggacacagcugcagccacaccc

SEQ ID NO: 460446 - RNA, 22 nt, Human
ggagcuguucaggacugcuuca

SEQ ID NO: 460447 - RNA, 22 nt, Human
ccuggcagacagcacugaagcu

SEQ ID NO: 460448 - RNA, 21 nt, Human
augacagaugcugcagaucgu

SEQ ID NO: 460449 - RNA, 20 nt, Human
aggcacuguugucuguaucc

SEQ ID NO: 460450 - RNA, 22 nt, Human
aagauuuccauuucuagcucau

SEQ ID NO: 460451 - RNA, 22 nt, Human
ugggcucuccuggaggacaaca

SEQ ID NO: 460452 - RNA, 22 nt, Human
ugugaccucaucuuaacuggaa

SEQ ID NO: 460453 - RNA, 22 nt, Human
augggcagcagcugccauucau

SEQ ID NO: 460454 - RNA, 22 nt, Human
ucuccuucgaggcccagcuccc

SEQ ID NO: 460455 - RNA, 22 nt, Human
ggcuggcuugccaagcucaggg

SEQ ID NO: 460456 - RNA, 18 nt, Human
ggcagcaagaagggaggg

SEQ ID NO: 460457 - RNA, 22 nt, Human
agcucucaagauaagaaagaac

SEQ ID NO: 460458 - RNA, 22 nt, Human
ucaggagaaucagggcuguccu

SEQ ID NO: 460459 - RNA, 19 nt, Human
uggagacugagagugagca

SEQ ID NO: 460460 - RNA, 22 nt, Human
gggggcaguaaccucaaagugu

SEQ ID NO: 460461 - RNA, 22 nt, Human
ucaucuaagagucuuacauuua

SEQ ID NO: 460462 - RNA, 22 nt, Human
gcagagccgugaauggauuuca

SEQ ID NO: 460463 - RNA, 20 nt, Human
uguuccaugacuauuuggau

SEQ ID NO: 460464 - RNA, 22 nt, Human
uuuuucaagacaaccugcaugu

SEQ ID NO: 460465 - RNA, 21 nt, Human
uaagccaccaugugaaaccag

SEQ ID NO: 460466 - RNA, 23 nt, Human
ugagcaucacaggagaaccaggc

SEQ ID NO: 460467 - RNA, 22 nt, Human
gguucacacuaagcuuaagugg

SEQ ID NO: 460468 - RNA, 22 nt, Human
ggagagaaauugagguagcaag

SEQ ID NO: 460469 - RNA, 23 nt, Human
cugucuccugggcuagguggaau

SEQ ID NO: 460470 - RNA, 22 nt, Human
ucucaggaagauuagggcuaag

SEQ ID NO: 460471 - RNA, 22 nt, Human
gcagagugagccgaggcugcuc

SEQ ID NO: 460472 - RNA, 22 nt, Human
ggcgcaggccuuggauccuggu

SEQ ID NO: 460473 - RNA, 20 nt, Human
gucaucgccggcagcaaaga

SEQ ID NO: 460474 - RNA, 22 nt, Human
aggcucagugcaaaucauucug

SEQ ID NO: 460475 - RNA, 22 nt, Human
caggaacaauguaagucucauu

SEQ ID NO: 460476 - RNA, 22 nt, Human
ugacaauacagagagagcaaaa

SEQ ID NO: 460477 - RNA, 22 nt, Human
auaauguagguauguguauuua

SEQ ID NO: 460478 - RNA, 23 nt, Human
gccucagagaaacagcugcacac

SEQ ID NO: 460479 - RNA, 22 nt, Human
cagggccagcgcccaggcccag

SEQ ID NO: 460480 - RNA, 17 nt, Human
agauggcaggaggcaga

SEQ ID NO: 460481 - RNA, 22 nt, Human
aggcagcagagguugaggaaag

SEQ ID NO: 460482 - RNA, 22 nt, Human
uagcuuuacaaagugcugcacc

SEQ ID NO: 460483 - RNA, 19 nt, Human
gccaggagggcucuggcug

SEQ ID NO: 460484 - RNA, 20 nt, Human
cagagaccaggccagguguc

SEQ ID NO: 460485 - RNA, 22 nt, Human
ccaaggagaaaugcugugcuuu

SEQ ID NO: 460486 - RNA, 22 nt, Human
aggugcaguggcucaugccugu

SEQ ID NO: 460487 - RNA, 22 nt, Human
gagaaagacguaggcugggagg

SEQ ID NO: 460488 - RNA, 22 nt, Human
uggccuggaaaaaugcagaugg

SEQ ID NO: 460489 - RNA, 22 nt, Human
aggaaucccgcaccagcugcug

SEQ ID NO: 460490 - RNA, 22 nt, Human
uacauguuugguaaaugauggc

SEQ ID NO: 460491 - RNA, 22 nt, Human
aagauggaguaguguaaugguu

SEQ ID NO: 460492 - RNA, 22 nt, Human
uggcugaauaauauucuguugu

SEQ ID NO: 460493 - RNA, 23 nt, Human
cagcugaagcagccugggcugga

SEQ ID NO: 460494 - RNA, 22 nt, Human
gcagagugagauaugaacccag

SEQ ID NO: 460495 - RNA, 22 nt, Human
cccagcuccuuacagggccgaa

SEQ ID NO: 460496 - RNA, 22 nt, Human
ugucagggcaugcgguccagcc

SEQ ID NO: 460497 - RNA, 22 nt, Human
gcaguggcaugaugugggcuca

SEQ ID NO: 460498 - RNA, 22 nt, Human
ggccuguguccuccuugcccug

SEQ ID NO: 460499 - RNA, 22 nt, Human
uuuguguuuuagcuggugaggc

SEQ ID NO: 460500 - RNA, 22 nt, Human
cccagacucaucccugggagcu

SEQ ID NO: 460501 - RNA, 22 nt, Human
cugaaggauuuaguucuuugcu

SEQ ID NO: 460502 - RNA, 20 nt, Human
gugugaagcccucaggagga

SEQ ID NO: 460503 - RNA, 22 nt, Human
uggcauuuccucagugcucaga

SEQ ID NO: 460504 - RNA, 22 nt, Human
agaggaaaaugaguuccagaau

SEQ ID NO: 460505 - RNA, 22 nt, Human
ccacuggcauccagcugccauc

SEQ ID NO: 460506 - RNA, 22 nt, Human
ggagcagagcucuucaucugca

SEQ ID NO: 460507 - RNA, 22 nt, Human
uggaaggcaacggagugagcug

SEQ ID NO: 460508 - RNA, 22 nt, Human
gggccuggggugacguaccccu

SEQ ID NO: 460509 - RNA, 22 nt, Human
cugggagauugcuagagaugca

SEQ ID NO: 460510 - RNA, 22 nt, Human
uaaagguagugugacauauugu

SEQ ID NO: 460511 - RNA, 22 nt, Human
uagcuuuaagacauggugaaug

SEQ ID NO: 460512 - RNA, 22 nt, Human
uccagggaugguaaugagcagu

SEQ ID NO: 460513 - RNA, 22 nt, Human
ucuggcucccagccugcucuca

SEQ ID NO: 460514 - RNA, 22 nt, Human
cucugcuuggaacuggacagaa

SEQ ID NO: 460515 - RNA, 22 nt, Human
agaaauguggaucguuuuaaaa

SEQ ID NO: 460516 - RNA, 22 nt, Human
gaaggcugcgaggggagugccg

SEQ ID NO: 460517 - RNA, 22 nt, Human
auucucaguucacuaguuucuu

SEQ ID NO: 460518 - RNA, 20 nt, Human
cugggaggucuuccaaauca

SEQ ID NO: 460519 - RNA, 22 nt, Human
gccuggagaccugcuccucuac

SEQ ID NO: 460520 - RNA, 22 nt, Human
aucacaaaggcugcuucaugau

SEQ ID NO: 460521 - RNA, 22 nt, Human
gugccuggcaugcgccggugcu

SEQ ID NO: 460522 - RNA, 22 nt, Human
ugucuacuugggcucuacagca

SEQ ID NO: 460523 - RNA, 22 nt, Human
gaggaaugucagcacaggccuc

SEQ ID NO: 460524 - RNA, 20 nt, Human
acugagcugcauggagagga

SEQ ID NO: 460525 - RNA, 22 nt, Human
ucuagaaauuuugccuuguauu

SEQ ID NO: 460526 - RNA, 22 nt, Human
ucugucucuuuguucugugagu

SEQ ID NO: 460527 - RNA, 22 nt, Human
ucaggaucaggggccuuuccuu

SEQ ID NO: 460528 - RNA, 22 nt, Human
cuguccagcuuggcuccugggg

SEQ ID NO: 460529 - RNA, 20 nt, Human
gcugccagugccugaugcuu

SEQ ID NO: 460530 - RNA, 22 nt, Human
cugaagccaugugcucacuggu

SEQ ID NO: 460531 - RNA, 22 nt, Human
cccaggagguggagguugcagc

SEQ ID NO: 460532 - RNA, 22 nt, Human
aagggcuggaauaucucuuaga

SEQ ID NO: 460533 - RNA, 22 nt, Human
ucccaggcuggggccaggugac

SEQ ID NO: 460534 - RNA, 22 nt, Human
acauuuaaccaaacuguuuaau

SEQ ID NO: 460535 - RNA, 22 nt, Human
gucauuguguggacauggagaa

SEQ ID NO: 460536 - RNA, 22 nt, Human
ccacugggcguuucuguccaau

SEQ ID NO: 460537 - RNA, 22 nt, Human
cuuuggaaaaauaccuggcaua

SEQ ID NO: 460538 - RNA, 22 nt, Human
gcuucucuggccugcagggcau

SEQ ID NO: 460539 - RNA, 22 nt, Human
gaugggggccagggccugcuuu

SEQ ID NO: 460540 - RNA, 22 nt, Human
uggcucaggguccccaaauggu

SEQ ID NO: 460541 - RNA, 22 nt, Human
agagggaucacccuguuucugg

SEQ ID NO: 460542 - RNA, 18 nt, Human
cugugcagcaaacugagc

SEQ ID NO: 460543 - RNA, 22 nt, Human
uggcugaguuacgaacagagca

SEQ ID NO: 460544 - RNA, 22 nt, Human
uacauguuauuucacuauuggu

SEQ ID NO: 460545 - RNA, 19 nt, Human
ggccuggauuuagggcucc

SEQ ID NO: 460546 - RNA, 22 nt, Human
ggagcugugcagugacuacaga

SEQ ID NO: 460547 - RNA, 22 nt, Human
aggcaguggcugagaccagggg

SEQ ID NO: 460548 - RNA, 22 nt, Human
acucagaguuugcguuccauac

SEQ ID NO: 460549 - RNA, 22 nt, Human
cagggcuguuagcugcugcucu

SEQ ID NO: 460550 - RNA, 22 nt, Human
ucccugcucagcucaccuggca

SEQ ID NO: 460551 - RNA, 22 nt, Human
agcaggaggguuuuguagaguc

SEQ ID NO: 460552 - RNA, 22 nt, Human
aaaaguauuggccaccauuucu

SEQ ID NO: 460553 - RNA, 22 nt, Human
gccuuuuuuguugcucugucac

SEQ ID NO: 460554 - RNA, 22 nt, Human
gcaugggcaagaggacuggggg

SEQ ID NO: 460555 - RNA, 22 nt, Human
cuagggacugggaccuuaguua

SEQ ID NO: 460556 - RNA, 21 nt, Human
cccuguguuccacagcagaca

SEQ ID NO: 460557 - RNA, 22 nt, Human
ccagcuugaagaugugcugguu

SEQ ID NO: 460558 - RNA, 22 nt, Human
gcagggcagugugucugugggg

SEQ ID NO: 460559 - RNA, 22 nt, Human
ccagggcaucacauccaguguu

SEQ ID NO: 460560 - RNA, 22 nt, Human
cauuaugugggaaaauguucuu

SEQ ID NO: 460561 - RNA, 22 nt, Human
agcuuaggaggaugaugaacau

SEQ ID NO: 460562 - RNA, 23 nt, Human
ucagagaggcccccugcagagau

SEQ ID NO: 460563 - RNA, 22 nt, Human
aaggcacuacgcugcuggggcg

SEQ ID NO: 460564 - RNA, 22 nt, Human
ugaggcaggagaaucacaugaa

SEQ ID NO: 460565 - RNA, 22 nt, Human
cuucuugcugggggccucagug

SEQ ID NO: 460566 - RNA, 22 nt, Human
caccagcuacagacuacugugu

SEQ ID NO: 460567 - RNA, 22 nt, Human
cugaaugucgaucagcuugggu

SEQ ID NO: 460568 - RNA, 19 nt, Human
ugcaggaggacugagcaga

SEQ ID NO: 460569 - RNA, 22 nt, Human
ggacuggacucucaggcucaca

SEQ ID NO: 460570 - RNA, 22 nt, Human
agcagccagugggagugauaca

SEQ ID NO: 460571 - RNA, 22 nt, Human
ugggcugaguggcagccagagu

SEQ ID NO: 460572 - RNA, 22 nt, Human
uuccugaugcacacagucauuu

SEQ ID NO: 460573 - RNA, 22 nt, Human
ccuggcucuucagagguuccua

SEQ ID NO: 460574 - RNA, 22 nt, Human
auauauuugagaauauucauga

SEQ ID NO: 460575 - RNA, 22 nt, Human
uucagcagugcagacacccagu

SEQ ID NO: 460576 - RNA, 22 nt, Human
ucagaggaacuggacuaaagcc

SEQ ID NO: 460577 - RNA, 22 nt, Human
caugcuccaaaaacaagagaau

SEQ ID NO: 460578 - RNA, 22 nt, Human
ucauccuuuugcaugggaaggc

SEQ ID NO: 460579 - RNA, 22 nt, Human
gcagggcuguggacacuuuggu

SEQ ID NO: 460580 - RNA, 22 nt, Human
uugcauugaaugcacauuuuua

SEQ ID NO: 460581 - RNA, 22 nt, Human
acaaaugccauauauaaauucu

SEQ ID NO: 460582 - RNA, 22 nt, Human
aagccagggucaggggccuccu

SEQ ID NO: 460583 - RNA, 22 nt, Human
ccuggcagcagcacaugccuuc

SEQ ID NO: 460584 - RNA, 22 nt, Human
cagcaauaguguguuuguuuca

SEQ ID NO: 460585 - RNA, 22 nt, Human
aaggagugcaugacucagagua

SEQ ID NO: 460586 - RNA, 22 nt, Human
uggagcugguaaacagugacau

SEQ ID NO: 460587 - RNA, 22 nt, Human
aguuucuaccgguacauucagg

SEQ ID NO: 460588 - RNA, 22 nt, Human
uuucaaauaccauaaaccuaau

SEQ ID NO: 460589 - RNA, 22 nt, Human
gaaaccagcuagaggcagaggg

SEQ ID NO: 460590 - RNA, 22 nt, Human
gcguccagggaaggcccagcug

SEQ ID NO: 460591 - RNA, 22 nt, Human
agggagcaugggugaagcaggc

SEQ ID NO: 460592 - RNA, 22 nt, Human
ggaaagagcuaaaagggugaga

SEQ ID NO: 460593 - RNA, 22 nt, Human
uaaaaaguagugagaauggcgc

SEQ ID NO: 460594 - RNA, 22 nt, Human
ucucccacagucucccauggcu

SEQ ID NO: 460595 - RNA, 22 nt, Human
guugggaaggcaagaaguagaa

SEQ ID NO: 460596 - RNA, 22 nt, Human
ucagagagguuaaauaucuugu

SEQ ID NO: 460597 - RNA, 23 nt, Human
uccaagggcuacaaacacagacc

SEQ ID NO: 460598 - RNA, 22 nt, Human
gaaggcuguuucugguagugau

SEQ ID NO: 460599 - RNA, 22 nt, Human
gcuggccucuacaggccggcca

SEQ ID NO: 460600 - RNA, 22 nt, Human
acguuuucagugacugugcuuc

SEQ ID NO: 460601 - RNA, 22 nt, Human
aggucauuguuaagucaccaua

SEQ ID NO: 460602 - RNA, 22 nt, Human
ugggagcacccugaggagcuuc

SEQ ID NO: 460603 - RNA, 22 nt, Human
uccaguggguugcugagggagg

SEQ ID NO: 460604 - RNA, 22 nt, Human
gcagcuuggauuucuguaguuu

SEQ ID NO: 460605 - RNA, 22 nt, Human
ccuuuguucacuggagagugga

SEQ ID NO: 460606 - RNA, 22 nt, Human
acagagagaaacaaucagcagc

SEQ ID NO: 460607 - RNA, 22 nt, Human
ugcaggugaaaauuaugaggau

SEQ ID NO: 460608 - RNA, 22 nt, Human
gagcccaggcagagguugcagu

SEQ ID NO: 460609 - RNA, 22 nt, Human
gccagagcugagacacgagucc

SEQ ID NO: 460610 - RNA, 22 nt, Human
gcagggcagcuuagucccuguc

SEQ ID NO: 460611 - RNA, 22 nt, Human
cauuuauucaugaucuguagcu

SEQ ID NO: 460612 - RNA, 22 nt, Human
ggcugaaggaugaaagcugcag

SEQ ID NO: 460613 - RNA, 22 nt, Human
gagaggcauggaacagauucuu

SEQ ID NO: 460614 - RNA, 22 nt, Human
aucaggauucaccccagagcug

SEQ ID NO: 460615 - RNA, 22 nt, Human
ccagagagaaaauggagggcca

SEQ ID NO: 460616 - RNA, 22 nt, Human
cagggcuguggaaaacuggugc

SEQ ID NO: 460617 - RNA, 22 nt, Human
aaggcagauauaaagacuagag

SEQ ID NO: 460618 - RNA, 22 nt, Human
auaugccauuagcuagaaauaa

SEQ ID NO: 460619 - RNA, 22 nt, Human
gagagcugugguuugaccaggc

SEQ ID NO: 460620 - RNA, 22 nt, Human
aguacuucagaggcugcccagg

SEQ ID NO: 460621 - RNA, 22 nt, Human
uaggaaaagucuagauugauga

SEQ ID NO: 460622 - RNA, 19 nt, Human
agccagggugagaaggagc

SEQ ID NO: 460623 - RNA, 22 nt, Human
ucuggccuuaucuguccaagcc

SEQ ID NO: 460624 - RNA, 18 nt, Human
aggcuucccaggcaggcc

SEQ ID NO: 460625 - RNA, 23 nt, Human
ggccuccuggucuaggcuagacu

SEQ ID NO: 460626 - RNA, 22 nt, Human
caucaaauggcaagugaaagcu

SEQ ID NO: 460627 - RNA, 22 nt, Human
ucacaugcccuguauuuaccag

SEQ ID NO: 460628 - RNA, 22 nt, Human
acuuuguuuggcuauuagaguc

SEQ ID NO: 460629 - RNA, 22 nt, Human
ugggcaagucacuucugucuuu

SEQ ID NO: 460630 - RNA, 20 nt, Human
gcugaccccugcugucaugc

SEQ ID NO: 460631 - RNA, 22 nt, Human
auuucuacugugagaaacauga

SEQ ID NO: 460632 - RNA, 22 nt, Human
ucaguuuuuaagaguuaugcga

SEQ ID NO: 460633 - RNA, 22 nt, Human
uuauuaggaacucaggauuuuu

SEQ ID NO: 460634 - RNA, 22 nt, Human
ggaggaagugcaguucuacuac

SEQ ID NO: 460635 - RNA, 20 nt, Human
uggagcuccagcguccaugu

SEQ ID NO: 460636 - RNA, 22 nt, Human
cagggugcagugucgcugcuag

SEQ ID NO: 460637 - RNA, 22 nt, Human
uuucaaaguggagaauuagaca

SEQ ID NO: 460638 - RNA, 22 nt, Human
gggcuggcaucgguugcugaga

SEQ ID NO: 460639 - RNA, 22 nt, Human
uauuucuuucagguauguguug

SEQ ID NO: 460640 - RNA, 22 nt, Human
uaaaacugcuugguauggucua

SEQ ID NO: 460641 - RNA, 22 nt, Human
cacugaaggaaggacuacugca

SEQ ID NO: 460642 - RNA, 23 nt, Human
ucuguacaauugagaagagaaca

SEQ ID NO: 460643 - RNA, 22 nt, Human
ucagcagggaggcucugugccc

SEQ ID NO: 460644 - RNA, 22 nt, Human
cuccagggcagcauggcagugg

SEQ ID NO: 460645 - RNA, 19 nt, Human
uagaaugcccacuuaaaaa

SEQ ID NO: 460646 - RNA, 20 nt, Human
ggcugcugugggcagagagg

SEQ ID NO: 460647 - RNA, 22 nt, Human
cagggccaagcugcagcaucug

SEQ ID NO: 460648 - RNA, 18 nt, Human
auggucucauacugggag

SEQ ID NO: 460649 - RNA, 22 nt, Human
ugucccauggacacaacuucuu

SEQ ID NO: 460650 - RNA, 22 nt, Human
ggagggagcauccccuugcuga

SEQ ID NO: 460651 - RNA, 22 nt, Human
acugugcacaauucuaaguccu

SEQ ID NO: 460652 - RNA, 22 nt, Human
caggcagcugaggacuuugcua

SEQ ID NO: 460653 - RNA, 22 nt, Human
cucugugggggagaggcagcug

SEQ ID NO: 460654 - RNA, 22 nt, Human
cuggccuggagccucugggugg

SEQ ID NO: 460655 - RNA, 22 nt, Human
ggugccaggcuguagucagggu

SEQ ID NO: 460656 - RNA, 22 nt, Human
uggaggagggcuggugucugua

SEQ ID NO: 460657 - RNA, 22 nt, Human
agagccuguuuugugggagaug

SEQ ID NO: 460658 - RNA, 22 nt, Human
ucaaaggcauugccaauaagua

SEQ ID NO: 460659 - RNA, 22 nt, Human
cuuauguacacacauauauugu

SEQ ID NO: 460660 - RNA, 22 nt, Human
aaggcugugucagaagcucccu

SEQ ID NO: 460661 - RNA, 22 nt, Human
ugggaggacuugugggcuucau

SEQ ID NO: 460662 - RNA, 22 nt, Human
gggauggcuuuguggcugacuc

SEQ ID NO: 460663 - RNA, 23 nt, Human
aaucuggcugauguuuuuucucu

SEQ ID NO: 460664 - RNA, 18 nt, Human
uggcaggaaaugcacuuu

SEQ ID NO: 460665 - RNA, 22 nt, Human
uccucagacacccugcuggcuu

SEQ ID NO: 460666 - RNA, 22 nt, Human
gagugaaaaaggaagggccaua

SEQ ID NO: 460667 - RNA, 22 nt, Human
cuucccuuggugaacagagcau

SEQ ID NO: 460668 - RNA, 22 nt, Human
ugcuggagaucauuaauguuca

SEQ ID NO: 460669 - RNA, 22 nt, Human
cucuucagauaaaagggauauu

SEQ ID NO: 460670 - RNA, 22 nt, Human
uguguacuugaaagggcagguc

SEQ ID NO: 460671 - RNA, 22 nt, Human
augcugaagagugcacaggcua

SEQ ID NO: 460672 - RNA, 22 nt, Human
uuucauuacguguuugacuugu

SEQ ID NO: 460673 - RNA, 22 nt, Human
gcuuccuagaucugugguacuc

SEQ ID NO: 460674 - RNA, 22 nt, Human
caguacuuauuucuauuuaggg

SEQ ID NO: 460675 - RNA, 22 nt, Human
aaaugucuuuaucucauguaac

SEQ ID NO: 460676 - RNA, 22 nt, Human
ucacagcuaagcuuggucacug

SEQ ID NO: 460677 - RNA, 22 nt, Human
acaaaggcauagugaauguuuu

SEQ ID NO: 460678 - RNA, 22 nt, Human
cacagaauaaauugguaucaga

SEQ ID NO: 460679 - RNA, 22 nt, Human
cuacauuucccagcugccuucc

SEQ ID NO: 460680 - RNA, 22 nt, Human
gagagugagauaauuucacaua

SEQ ID NO: 460681 - RNA, 22 nt, Human
cucuuccucucaugcggucaua

SEQ ID NO: 460682 - RNA, 22 nt, Human
aaggcauauauucuaaacagga

SEQ ID NO: 460683 - RNA, 22 nt, Human
uccucugcuccaggcuggacuu

SEQ ID NO: 460684 - RNA, 22 nt, Human
cucaggaguaguucagcagcug

SEQ ID NO: 460685 - RNA, 22 nt, Human
gccuggaguagcauggcaagcc

SEQ ID NO: 460686 - RNA, 22 nt, Human
agggcuggcaucucuaaugcug

SEQ ID NO: 460687 - RNA, 22 nt, Human
uuuuucauauuccccucucugg

SEQ ID NO: 460688 - RNA, 22 nt, Human
aggcugggcaccguuuugaucc

SEQ ID NO: 460689 - RNA, 22 nt, Human
gcucucugccauaugaggauac

SEQ ID NO: 460690 - RNA, 22 nt, Human
ggccaggcugcccugggagcag

SEQ ID NO: 460691 - RNA, 22 nt, Human
gcucagagcacucagacucagc

SEQ ID NO: 460692 - RNA, 22 nt, Human
agggguggccugccuuacuccc

SEQ ID NO: 460693 - RNA, 22 nt, Human
agucugucucugcuaaucacua

SEQ ID NO: 460694 - RNA, 22 nt, Human
gccuggugcuaugagggccagc

SEQ ID NO: 460695 - RNA, 22 nt, Human
accuuucacgguaucagacauc

SEQ ID NO: 460696 - RNA, 22 nt, Human
cauucucaauaguagaugagua

SEQ ID NO: 460697 - RNA, 22 nt, Human
cuggcuggucaucagcaguacg

SEQ ID NO: 460698 - RNA, 18 nt, Human
ggcuguggacaagauuag

SEQ ID NO: 460699 - RNA, 22 nt, Human
uacuuccagcaaucugcauauu

SEQ ID NO: 460700 - RNA, 22 nt, Human
aauuaguaaccuaauuccaucu

SEQ ID NO: 460701 - RNA, 22 nt, Human
uuggccuuguuaaggaggcccu

SEQ ID NO: 460702 - RNA, 22 nt, Human
gugccaggugcuaagcugugcu

SEQ ID NO: 460703 - RNA, 22 nt, Human
ugccuucaaucaggauggucuc

SEQ ID NO: 460704 - RNA, 19 nt, Human
gcgaggaagucacuguggc

SEQ ID NO: 460705 - RNA, 22 nt, Human
uauuucuguaacucagggucug

SEQ ID NO: 460706 - RNA, 22 nt, Human
aggagccaguuccaccccagga

SEQ ID NO: 460707 - RNA, 20 nt, Human
acaauauguagaugaauagc

SEQ ID NO: 460708 - RNA, 22 nt, Human
ugcucauuggcgaucugaggga

SEQ ID NO: 460709 - RNA, 22 nt, Human
gagguagccacagauagagacu

SEQ ID NO: 460710 - RNA, 22 nt, Human
ugcaggccucacaccuggcacc

SEQ ID NO: 460711 - RNA, 22 nt, Human
ucuggcucucaacaaauauuua

SEQ ID NO: 460712 - RNA, 22 nt, Human
ggcugcaguuugucuuuugcuu

SEQ ID NO: 460713 - RNA, 22 nt, Human
agaccaagaaaggaugaggauc

SEQ ID NO: 460714 - RNA, 22 nt, Human
cuauugaauagcccaaaucauu

SEQ ID NO: 460715 - RNA, 22 nt, Human
gaugugagugguagcugggauu

SEQ ID NO: 460716 - RNA, 22 nt, Human
gggcugagucaucuggggccuc

SEQ ID NO: 460717 - RNA, 17 nt, Human
gagauggguggaucacc

SEQ ID NO: 460718 - RNA, 22 nt, Human
aucaguuucuaccauguggaau

SEQ ID NO: 460719 - RNA, 22 nt, Human
cagggccaagccccuuuggcug

SEQ ID NO: 460720 - RNA, 22 nt, Human
gagaccaggaaguacagcagcc

SEQ ID NO: 460721 - RNA, 22 nt, Human
ucuuuuggguucuuaugauuua

SEQ ID NO: 460722 - RNA, 22 nt, Human
uggcagccacaucucguggauu

SEQ ID NO: 460723 - RNA, 21 nt, Human
ucaggcaggcgcagagggaag

SEQ ID NO: 460724 - RNA, 22 nt, Human
caagagcuuuagaaaugcucau

SEQ ID NO: 460725 - RNA, 22 nt, Human
ucccuggaacagagagacaacg

SEQ ID NO: 460726 - RNA, 22 nt, Human
uuagggcaggcaugagagaacu

SEQ ID NO: 460727 - RNA, 22 nt, Human
acccuguaugcuauaucccuaa

SEQ ID NO: 460728 - RNA, 22 nt, Human
gggcugagggccaauuccuacu

SEQ ID NO: 460729 - RNA, 22 nt, Human
agugugagccuacaggccaaag

SEQ ID NO: 460730 - RNA, 22 nt, Human
gagagugaaggcuucccagcaa

SEQ ID NO: 460731 - RNA, 22 nt, Human
ucuccuuugaaaguuaggacug

SEQ ID NO: 460732 - RNA, 22 nt, Human
uaugaagaaguucugugaaaug

SEQ ID NO: 460733 - RNA, 21 nt, Human
ugguggagugugcugagcaug

SEQ ID NO: 460734 - RNA, 22 nt, Human
uguucuuucaguuagacacagu

SEQ ID NO: 460735 - RNA, 22 nt, Human
aaaauacacauacuaggggaaa

SEQ ID NO: 460736 - RNA, 22 nt, Human
acaggugguaaaauggacuguc

SEQ ID NO: 460737 - RNA, 22 nt, Human
gguggccaggccagcucuggcc

SEQ ID NO: 460738 - RNA, 22 nt, Human
uggcuucaucugcagcacugcc

SEQ ID NO: 460739 - RNA, 22 nt, Human
ucuacugcacuggugucucauc

SEQ ID NO: 460740 - RNA, 22 nt, Human
aaauuucuggaagugucagagu

SEQ ID NO: 460741 - RNA, 22 nt, Human
uggcucuggggacaguaagucc

SEQ ID NO: 460742 - RNA, 22 nt, Human
gggcugagugggccucuuacuu

SEQ ID NO: 460743 - RNA, 22 nt, Human
cucccagguuacaucugagccu

SEQ ID NO: 460744 - RNA, 22 nt, Human
gagcucauccccaugguccguc

SEQ ID NO: 460745 - RNA, 22 nt, Human
cucuggacacuggcaugggguc

SEQ ID NO: 460746 - RNA, 22 nt, Human
cuccucuuuacccgcauggucu

SEQ ID NO: 460747 - RNA, 22 nt, Human
uaagaacaagauguuccuguuu

SEQ ID NO: 460748 - RNA, 22 nt, Human
agcagaggaggauuuaguuagg

SEQ ID NO: 460749 - RNA, 22 nt, Human
gaggcucagggaaacagcgcag

SEQ ID NO: 460750 - RNA, 22 nt, Human
uaaacagaaagcagauguacuu

SEQ ID NO: 460751 - RNA, 22 nt, Human
ggccaggcuggucucagacuuc

SEQ ID NO: 460752 - RNA, 22 nt, Human
ucucaggaagugauauugagac

SEQ ID NO: 460753 - RNA, 22 nt, Human
aaucagaauuuauugaaucuuu

SEQ ID NO: 460754 - RNA, 22 nt, Human
aucagcaagacuaggggaauac

SEQ ID NO: 460755 - RNA, 22 nt, Human
gaggcaugucuggccuguccca

SEQ ID NO: 460756 - RNA, 22 nt, Human
uuaggaaauuaugguuucagau

SEQ ID NO: 460757 - RNA, 22 nt, Human
gggcagagaaauggacaguugg

SEQ ID NO: 460758 - RNA, 22 nt, Human
acuguacacauucgucaagacu

SEQ ID NO: 460759 - RNA, 22 nt, Human
ucauauuuaggccuuuaauuca

SEQ ID NO: 460760 - RNA, 22 nt, Human
ggagccuggcaaugcugcgucc

SEQ ID NO: 460761 - RNA, 19 nt, Human
aagggcugggcaccucacu

SEQ ID NO: 460762 - RNA, 22 nt, Human
agggagcuuccgaacuacagcu

SEQ ID NO: 460763 - RNA, 20 nt, Human
ccugggguacacuggcaugu

SEQ ID NO: 460764 - RNA, 22 nt, Human
agagcuguagcuuccuagagcc

SEQ ID NO: 460765 - RNA, 22 nt, Human
ccuguacaagagccaucuggau

SEQ ID NO: 460766 - RNA, 22 nt, Human
gcugggcagccccuacagagag

SEQ ID NO: 460767 - RNA, 20 nt, Human
cauauauaccuagaagugga

SEQ ID NO: 460768 - RNA, 22 nt, Human
ugagcuguagcagaugcuguug

SEQ ID NO: 460769 - RNA, 22 nt, Human
gcagaugaggaagcuaaugcug

SEQ ID NO: 460770 - RNA, 21 nt, Human
guccucagcugaugggagcug

SEQ ID NO: 460771 - RNA, 22 nt, Human
cagaauggcuuuuauggcucag

SEQ ID NO: 460772 - RNA, 22 nt, Human
agaagaaaugaggccguucugc

SEQ ID NO: 460773 - RNA, 22 nt, Human
agagacaggguuuugucguguu

SEQ ID NO: 460774 - RNA, 22 nt, Human
uccucuggggucagggcacuac

SEQ ID NO: 460775 - RNA, 22 nt, Human
ccucgcggcacucgggccggau

SEQ ID NO: 460776 - RNA, 22 nt, Human
ccaggccucccuuuuccagcca

SEQ ID NO: 460777 - RNA, 22 nt, Human
ggaggguuagcaaaggcacaga

SEQ ID NO: 460778 - RNA, 22 nt, Human
ucaaaguagggguaagccaggc

SEQ ID NO: 460779 - RNA, 19 nt, Human
uccuccuuacuuccucuug

SEQ ID NO: 460780 - RNA, 22 nt, Human
ccagggcagggaccacgugucu

SEQ ID NO: 460781 - RNA, 22 nt, Human
cagacagaccugcaagggcaca

SEQ ID NO: 460782 - RNA, 22 nt, Human
cuucaagagaaugcagggaugu

SEQ ID NO: 460783 - RNA, 22 nt, Human
auaaggcacacauagauagggu

SEQ ID NO: 460784 - RNA, 22 nt, Human
ccugggagagccaucuguggcc

SEQ ID NO: 460785 - RNA, 22 nt, Human
ucucaggaauagaguggcagca

SEQ ID NO: 460786 - RNA, 22 nt, Human
aagcagaugggacuccaaggca

SEQ ID NO: 460787 - RNA, 22 nt, Human
cagugguggaaugaggaauugu

SEQ ID NO: 460788 - RNA, 22 nt, Human
ugcaggcucacccuggagcuga

SEQ ID NO: 460789 - RNA, 22 nt, Human
ggugaagggugucauggcauuu

SEQ ID NO: 460790 - RNA, 22 nt, Human
ccaguggacaauuucugaggaa

SEQ ID NO: 460791 - RNA, 22 nt, Human
cagcccagcagucuuagccugc

SEQ ID NO: 460792 - RNA, 22 nt, Human
ucucagggcgcagugaggcagu

SEQ ID NO: 460793 - RNA, 22 nt, Human
ugugucagaaggcaauggggau

SEQ ID NO: 460794 - RNA, 20 nt, Human
aaagucuguuuaucucugga

SEQ ID NO: 460795 - RNA, 22 nt, Human
cugucauugagccugucagggc

SEQ ID NO: 460796 - RNA, 22 nt, Human
ggcuccugauaggagaaugcgg

SEQ ID NO: 460797 - RNA, 22 nt, Human
gcuguacaucacaauuugcugu

SEQ ID NO: 460798 - RNA, 22 nt, Human
guaaaguucuacuagaaucaac

SEQ ID NO: 460799 - RNA, 22 nt, Human
caguuucuacgacuuaagcaca

SEQ ID NO: 460800 - RNA, 22 nt, Human
ugaauaaucuuggguauuaaua

SEQ ID NO: 460801 - RNA, 22 nt, Human
aguccccucuaacccaacuuua

SEQ ID NO: 460802 - RNA, 22 nt, Human
cagcugugcuguauuaagcucu

SEQ ID NO: 460803 - RNA, 20 nt, Human
gucugaggagcagugggaaa

SEQ ID NO: 460804 - RNA, 22 nt, Human
auuuuuccaauuaggauaaaga

SEQ ID NO: 460805 - RNA, 22 nt, Human
uuucuuaggcucuaaaaugacu

SEQ ID NO: 460806 - RNA, 22 nt, Human
uagaaacauauaggauggcagg

SEQ ID NO: 460807 - RNA, 22 nt, Human
gcaccaggcuuagagccccagg

SEQ ID NO: 460808 - RNA, 22 nt, Human
caggcugggcuccggagauaaa

SEQ ID NO: 460809 - RNA, 22 nt, Human
aggccugagcagaggaguggac

SEQ ID NO: 460810 - RNA, 22 nt, Human
caugggagguuggcuuggcaug

SEQ ID NO: 460811 - RNA, 22 nt, Human
gguggggccugcuccagcggcc

SEQ ID NO: 460812 - RNA, 22 nt, Human
uuuuagauugggaaauguaaag

SEQ ID NO: 460813 - RNA, 22 nt, Human
gccugugacucgucuugggcca

SEQ ID NO: 460814 - RNA, 18 nt, Human
ccucaggggaccuggcag

SEQ ID NO: 460815 - RNA, 22 nt, Human
uacauuccacuagugacuggcg

SEQ ID NO: 460816 - RNA, 22 nt, Human
gagggcucaacuacuacuaggc

SEQ ID NO: 460817 - RNA, 22 nt, Human
aagacuguacauuuuccagucu

SEQ ID NO: 460818 - RNA, 22 nt, Human
uaucuguuccaggcacucagcu

SEQ ID NO: 460819 - RNA, 22 nt, Human
gaggcugaggguuagagaguca

SEQ ID NO: 460820 - RNA, 22 nt, Human
agggccaggaacaccugaaggg

SEQ ID NO: 460821 - RNA, 22 nt, Human
acuuccuggcguagcugacauu

SEQ ID NO: 460822 - RNA, 22 nt, Human
uguuccauaaguggugcuuugu

SEQ ID NO: 460823 - RNA, 22 nt, Human
cagcucugaggaacacuccuuu

SEQ ID NO: 460824 - RNA, 22 nt, Human
gggagggaaggaggcgccgugu

SEQ ID NO: 460825 - RNA, 22 nt, Human
cauuuguaggaugcuucuuguu

SEQ ID NO: 460826 - RNA, 22 nt, Human
ccucugggugggaggccgggcg

SEQ ID NO: 460827 - RNA, 22 nt, Human
gcaggggcuaaggacacagaga

SEQ ID NO: 460828 - RNA, 22 nt, Human
ccugcagguccccggaugcgca

SEQ ID NO: 460829 - RNA, 20 nt, Human
uuggucagugguucaguuug

SEQ ID NO: 460830 - RNA, 22 nt, Human
gcagugacagggcugcugccuu

SEQ ID NO: 460831 - RNA, 22 nt, Human
aaagaacaucggagugggcggg

SEQ ID NO: 460832 - RNA, 22 nt, Human
ugggcugcacccucagccucug

SEQ ID NO: 460833 - RNA, 22 nt, Human
gaagagcuuaguuguccuagaa

SEQ ID NO: 460834 - RNA, 22 nt, Human
uauguguaggaggaggacaggg

SEQ ID NO: 460835 - RNA, 22 nt, Human
cucuggagcgcugcuucccgcg

SEQ ID NO: 460836 - RNA, 22 nt, Human
cucccugggccucaguuucucu

SEQ ID NO: 460837 - RNA, 19 nt, Human
accugcaguaauaauuccu

SEQ ID NO: 460838 - RNA, 22 nt, Human
agguaaagacugcaaggagaau

SEQ ID NO: 460839 - RNA, 22 nt, Human
aguuaaagucugaaauagagaa

SEQ ID NO: 460840 - RNA, 22 nt, Human
ugagugccugaacauagaguag

SEQ ID NO: 460841 - RNA, 22 nt, Human
ugcucugugguccaagauggcu

SEQ ID NO: 460842 - RNA, 22 nt, Human
ugaagggcaaccccaggcccag

SEQ ID NO: 460843 - RNA, 22 nt, Human
agaucaaagccaugagagauuu

SEQ ID NO: 460844 - RNA, 22 nt, Human
uccuguguuacugccuggagcg

SEQ ID NO: 460845 - RNA, 22 nt, Human
aagguacaguuuuaagaauaag

SEQ ID NO: 460846 - RNA, 21 nt, Human
aacauuucaggauccaaauug

SEQ ID NO: 460847 - RNA, 22 nt, Human
gguuucaacucagcuaguaagg

SEQ ID NO: 460848 - RNA, 22 nt, Human
ccccaggcagggccuaacagag

SEQ ID NO: 460849 - RNA, 22 nt, Human
cacagaauuaagggagaaauau

SEQ ID NO: 460850 - RNA, 22 nt, Human
gcagggcugcugaaacuuguuu

SEQ ID NO: 460851 - RNA, 22 nt, Human
uggccugggugcugcugacauc

SEQ ID NO: 460852 - RNA, 22 nt, Human
ucuggccagugaaaugcagaau

SEQ ID NO: 460853 - RNA, 22 nt, Human
cagggcaggaugcugugauuau

SEQ ID NO: 460854 - RNA, 22 nt, Human
ggcaggaggaagaguuagcacc

SEQ ID NO: 460855 - RNA, 22 nt, Human
gguggagcuguggacaggaagg

SEQ ID NO: 460856 - RNA, 22 nt, Human
ucuucauuccguagauauuuau

SEQ ID NO: 460857 - RNA, 22 nt, Human
ggagauggcucugcaaggucua

SEQ ID NO: 460858 - RNA, 22 nt, Human
uacagggguaacaguggggaau

SEQ ID NO: 460859 - RNA, 22 nt, Human
cuggccuuuuguuucuggagaa

SEQ ID NO: 460860 - RNA, 22 nt, Human
cccaagcagggugcagaggcau

SEQ ID NO: 460861 - RNA, 22 nt, Human
ccaggagcagauauggacauaa

SEQ ID NO: 460862 - RNA, 22 nt, Human
gagcucagcacuaaaaucaugu

SEQ ID NO: 460863 - RNA, 22 nt, Human
ggaagggcaaaagagaugaacu

SEQ ID NO: 460864 - RNA, 22 nt, Human
gcugucacaaauauuucucagc

SEQ ID NO: 460865 - RNA, 22 nt, Human
gagggcugaugcuuacuuauuu

SEQ ID NO: 460866 - RNA, 22 nt, Human
ggccagaggugguacauagcuu

SEQ ID NO: 460867 - RNA, 22 nt, Human
agcugcucccuauccuuuccuu

SEQ ID NO: 460868 - RNA, 22 nt, Human
ugcugaaggcaggggagguggc

SEQ ID NO: 460869 - RNA, 22 nt, Human
cuguuauuucugccaggugagu

SEQ ID NO: 460870 - RNA, 22 nt, Human
uuccaguuaaggaagcuauucu

SEQ ID NO: 460871 - RNA, 22 nt, Human
ggugaggcccagugaucugugu

SEQ ID NO: 460872 - RNA, 22 nt, Human
agugaccaacaaugcugagaag

SEQ ID NO: 460873 - RNA, 22 nt, Human
caaugguggugucagaagagau

SEQ ID NO: 460874 - RNA, 22 nt, Human
guuauaaauaccuaauaggauu

SEQ ID NO: 460875 - RNA, 22 nt, Human
gcagagcuucuguccuucagga

SEQ ID NO: 460876 - RNA, 22 nt, Human
caggaaaauggaaucaccugua

SEQ ID NO: 460877 - RNA, 22 nt, Human
uacauucuacuuuuucacuccc

SEQ ID NO: 460878 - RNA, 22 nt, Human
gaagaacaagcagugcuuuccu

SEQ ID NO: 460879 - RNA, 22 nt, Human
aacauguagcagaaacgacuaa

SEQ ID NO: 460880 - RNA, 22 nt, Human
ugaggcaguauuuuagugacuu

SEQ ID NO: 460881 - RNA, 22 nt, Human
gcagugggagcuuaggcagugc

SEQ ID NO: 460882 - RNA, 22 nt, Human
auugaaaauauaauucuaggag

SEQ ID NO: 460883 - RNA, 21 nt, Human
ccaggcagagcugugaguucu

SEQ ID NO: 460884 - RNA, 22 nt, Human
auuuauuauugugguuacuucu

SEQ ID NO: 460885 - RNA, 22 nt, Human
ggcccagccggcgagucucgcg

SEQ ID NO: 460886 - RNA, 22 nt, Human
caucugcuguuccuuggacuca

SEQ ID NO: 460887 - RNA, 22 nt, Human
gcuuccugagaaacaaucugau

SEQ ID NO: 460888 - RNA, 22 nt, Human
gagaggucaucucccaucagca

SEQ ID NO: 460889 - RNA, 22 nt, Human
ugggaccugaagcagguuggca

SEQ ID NO: 460890 - RNA, 21 nt, Human
gaggccacuaauaggggcaga

SEQ ID NO: 460891 - RNA, 22 nt, Human
cugcucugcagcuuggacuccc

SEQ ID NO: 460892 - RNA, 22 nt, Human
guggcugguuuccugcaugcaa

SEQ ID NO: 460893 - RNA, 22 nt, Human
ucacagugagccaugucagaga

SEQ ID NO: 460894 - RNA, 22 nt, Human
uccaggcaucccccaggacaga

SEQ ID NO: 460895 - RNA, 22 nt, Human
guccagggcuaaaucagguucc

SEQ ID NO: 460896 - RNA, 22 nt, Human
uacuguacugcaguucugcaaa

SEQ ID NO: 460897 - RNA, 22 nt, Human
cuuagggaauugggaggaugcc

SEQ ID NO: 460898 - RNA, 20 nt, Human
aagagcugacucacaguggu

SEQ ID NO: 460899 - RNA, 22 nt, Human
aagauuucagaguuugggggaa

SEQ ID NO: 460900 - RNA, 22 nt, Human
agaaggccuaacuugggggcaa

SEQ ID NO: 460901 - RNA, 22 nt, Human
ccacauuuuugauacucucacu

SEQ ID NO: 460902 - RNA, 22 nt, Human
ucacugggagaugugggaaggg

SEQ ID NO: 460903 - RNA, 21 nt, Human
agaaauguaucauucuuuucc

SEQ ID NO: 460904 - RNA, 22 nt, Human
gccagggaaacugcagaccagc

SEQ ID NO: 460905 - RNA, 22 nt, Human
uucaggauaguggugaguggca

SEQ ID NO: 460906 - RNA, 20 nt, Human
agacccuguguccuguggcc

SEQ ID NO: 460907 - RNA, 22 nt, Human
cucccucugucuuguccagaaa

SEQ ID NO: 460908 - RNA, 22 nt, Human
ggaggggccggcugccugccac

SEQ ID NO: 460909 - RNA, 22 nt, Human
cugacucccaaagaggacgcgu

SEQ ID NO: 460910 - RNA, 22 nt, Human
agaauaguggcaaugacugcac

SEQ ID NO: 460911 - RNA, 21 nt, Human
ccuauugaauauaggaagauu

SEQ ID NO: 460912 - RNA, 22 nt, Human
uuggaggcaaugggaaggaggc

SEQ ID NO: 460913 - RNA, 22 nt, Human
agugggcaggcagggugcgcag

SEQ ID NO: 460914 - RNA, 22 nt, Human
cgcugggcgccgaccugcuggc

SEQ ID NO: 460915 - RNA, 22 nt, Human
ggcaggcaggucuucauggccc

SEQ ID NO: 460916 - RNA, 18 nt, Human
agaguguucucagugaaa

SEQ ID NO: 460917 - RNA, 22 nt, Human
gcaggggaguggcaggcccgga

SEQ ID NO: 460918 - RNA, 22 nt, Human
auuuguaauuucuuaucugugu

SEQ ID NO: 460919 - RNA, 22 nt, Human
ucuuucagccacuuaccugucu

SEQ ID NO: 460920 - RNA, 22 nt, Human
acaagagauuaucuacagauga

SEQ ID NO: 460921 - RNA, 22 nt, Human
cucugguguccuuuagaauuua

SEQ ID NO: 460922 - RNA, 22 nt, Human
uuugggaacucuaucauggaaa

SEQ ID NO: 460923 - RNA, 22 nt, Human
caggcaggagccagggauucca

SEQ ID NO: 460924 - RNA, 22 nt, Human
cuggaaugccucccugucagag

SEQ ID NO: 460925 - RNA, 22 nt, Human
caaaugcuggcccugcuacuua

SEQ ID NO: 460926 - RNA, 23 nt, Human
aaggucacagaacuuagcaagcc

SEQ ID NO: 460927 - RNA, 22 nt, Human
uccuugaaaagaaugucuccau

SEQ ID NO: 460928 - RNA, 22 nt, Human
uuguaacagcuguuuauauagu

SEQ ID NO: 460929 - RNA, 22 nt, Human
uggcuggggccacaguuuuccu

SEQ ID NO: 460930 - RNA, 22 nt, Human
gggcacuggaggccaaggagcu

SEQ ID NO: 460931 - RNA, 22 nt, Human
uucauuccuucuguaccuugcc

SEQ ID NO: 460932 - RNA, 22 nt, Human
ugggcagggagcuggaaccaca

SEQ ID NO: 460933 - RNA, 22 nt, Human
cuggagugaagcuuauuuuuca

SEQ ID NO: 460934 - RNA, 22 nt, Human
cuccucccucuuugccacacau

SEQ ID NO: 460935 - RNA, 22 nt, Human
ggagccugcgggagcucccauu

SEQ ID NO: 460936 - RNA, 22 nt, Human
ucaggaggccaccaggaccugu

SEQ ID NO: 460937 - RNA, 22 nt, Human
gucaugccuggcuucuuagaca

SEQ ID NO: 460938 - RNA, 22 nt, Human
ccagcucugcagggccuggggu

SEQ ID NO: 460939 - RNA, 22 nt, Human
agcuguggcagcacuuuggagu

SEQ ID NO: 460940 - RNA, 22 nt, Human
caggcacugugcaagggucucg

SEQ ID NO: 460941 - RNA, 22 nt, Human
uggcucugugucucccagcagc

SEQ ID NO: 460942 - RNA, 22 nt, Human
cuggccugugggcugucuccgg

SEQ ID NO: 460943 - RNA, 17 nt, Human
aaguccagaguugagca

SEQ ID NO: 460944 - RNA, 22 nt, Human
agagcugcaccuaugcagaccu

SEQ ID NO: 460945 - RNA, 22 nt, Human
ggaaggaggggcaaagcaguuc

SEQ ID NO: 460946 - RNA, 22 nt, Human
agagccugucaauuguaaagag

SEQ ID NO: 460947 - RNA, 22 nt, Human
cccagacauaacagcagagagg

SEQ ID NO: 460948 - RNA, 22 nt, Human
gacauuucaaucucauuauggg

SEQ ID NO: 460949 - RNA, 22 nt, Human
agcaauauaaauguuggguaga

SEQ ID NO: 460950 - RNA, 22 nt, Human
gggugaggagcugccagucaug

SEQ ID NO: 460951 - RNA, 22 nt, Human
ucauucagguugggcaaguguc

SEQ ID NO: 460952 - RNA, 22 nt, Human
uuuuaaguuaauauaauugagg

SEQ ID NO: 460953 - RNA, 22 nt, Human
gcagccucaaacuccccagcuc

SEQ ID NO: 460954 - RNA, 20 nt, Human
uggcaggaauagggccagag

SEQ ID NO: 460955 - RNA, 22 nt, Human
uuggcucaggaccccugugacu

SEQ ID NO: 460956 - RNA, 22 nt, Human
cugccagguuggcgcucgcucu

SEQ ID NO: 460957 - RNA, 22 nt, Human
ugucacauguguggcauuuuuc

SEQ ID NO: 460958 - RNA, 22 nt, Human
ccagcccugccucucagggccc

SEQ ID NO: 460959 - RNA, 22 nt, Human
gcuccucuucucccacugaaug

SEQ ID NO: 460960 - RNA, 22 nt, Human
acccagagccagggucaggagc

SEQ ID NO: 460961 - RNA, 18 nt, Human
uggacaggguggagaaaa

SEQ ID NO: 460962 - RNA, 22 nt, Human
cagcauggggaucacuguaggc

SEQ ID NO: 460963 - RNA, 22 nt, Human
uaugcacauauaaccugcacug

SEQ ID NO: 460964 - RNA, 22 nt, Human
ucaguggagagcuuccaggauu

SEQ ID NO: 460965 - RNA, 22 nt, Human
ugggcagagucauacaggagac

SEQ ID NO: 460966 - RNA, 22 nt, Human
caguguggugagauuccaggug

SEQ ID NO: 460967 - RNA, 22 nt, Human
agggucaggagacacuggcaac

SEQ ID NO: 460968 - RNA, 22 nt, Human
auggccuggggagcaugggaag

SEQ ID NO: 460969 - RNA, 22 nt, Human
ccagagagcuacaaggcauaaa

SEQ ID NO: 460970 - RNA, 22 nt, Human
aaagacuagcauuuauauguac

SEQ ID NO: 460971 - RNA, 22 nt, Human
gcagccacagaggagggaugca

SEQ ID NO: 460972 - RNA, 22 nt, Human
cuacccagcaccuaggcugccu

SEQ ID NO: 460973 - RNA, 22 nt, Human
ucauacaucuuguauaucuauc

SEQ ID NO: 460974 - RNA, 22 nt, Human
aaagccagaguguguuagagac

SEQ ID NO: 460975 - RNA, 22 nt, Human
agacaaaggauuaaugaugaug

SEQ ID NO: 460976 - RNA, 22 nt, Human
aguccagugucaaggugccauu

SEQ ID NO: 460977 - RNA, 22 nt, Human
uagaaauguugguauuaacauu

SEQ ID NO: 460978 - RNA, 22 nt, Human
cccagggacagaugggcagcua

SEQ ID NO: 460979 - RNA, 22 nt, Human
gcucaggagcugacagccucaa

SEQ ID NO: 460980 - RNA, 23 nt, Human
uggagcugggcucagacccuggg

SEQ ID NO: 460981 - RNA, 22 nt, Human
uaguaugggaagaacuuuguag

SEQ ID NO: 460982 - RNA, 22 nt, Human
guuuucauuacugcugugauuu

SEQ ID NO: 460983 - RNA, 22 nt, Human
uuguacaaaggauuuggaagag

SEQ ID NO: 460984 - RNA, 22 nt, Human
uucagagagaccaaguggcgug

SEQ ID NO: 460985 - RNA, 22 nt, Human
gcaguguuuacauauuagaaac

SEQ ID NO: 460986 - RNA, 22 nt, Human
cagggcagcuuccuuuguuagg

SEQ ID NO: 460987 - RNA, 22 nt, Human
uuccucucaacaugccugccgg

SEQ ID NO: 460988 - RNA, 22 nt, Human
guaucuuuccacaucuucagua

SEQ ID NO: 460989 - RNA, 22 nt, Human
ccucuggcaacuucacagccca

SEQ ID NO: 460990 - RNA, 22 nt, Human
uagccaggcgaggucagugucg

SEQ ID NO: 460991 - RNA, 22 nt, Human
uccugucugcucacagagcugg

SEQ ID NO: 460992 - RNA, 22 nt, Human
acauugaucagccucccaugca

SEQ ID NO: 460993 - RNA, 22 nt, Human
uagggcuccacucccagagauu

SEQ ID NO: 460994 - RNA, 22 nt, Human
cagcaggcagccauuucacugu

SEQ ID NO: 460995 - RNA, 22 nt, Human
gggaggugauggcaagcagcgg

SEQ ID NO: 460996 - RNA, 22 nt, Human
gcugcagcuuuaggauccagug

SEQ ID NO: 460997 - RNA, 19 nt, Human
acucaagucuaaugaaauc

SEQ ID NO: 460998 - RNA, 22 nt, Human
uauuuauaaucugccaaagaga

SEQ ID NO: 460999 - RNA, 22 nt, Human
ugucucugauaaguaguucagu

SEQ ID NO: 461000 - RNA, 22 nt, Human
uuauugccugauugaggucauu

SEQ ID NO: 461001 - RNA, 20 nt, Human
uugcagcagugaggugaagg

SEQ ID NO: 461002 - RNA, 22 nt, Human
ggcagagguagcuggaaccagg

SEQ ID NO: 461003 - RNA, 22 nt, Human
cuguggcuaggaagcuguggga

SEQ ID NO: 461004 - RNA, 22 nt, Human
auguagagcaguguuguccaau

SEQ ID NO: 461005 - RNA, 22 nt, Human
gacacauagaucuaucucacuc

SEQ ID NO: 461006 - RNA, 22 nt, Human
uuuaguaaguucacugcaaagc

SEQ ID NO: 461007 - RNA, 22 nt, Human
uuccauauuuguguggcaaaag

SEQ ID NO: 461008 - RNA, 22 nt, Human
auccccagaaaauaggugccua

SEQ ID NO: 461009 - RNA, 22 nt, Human
augagcugggccauccagugau

SEQ ID NO: 461010 - RNA, 22 nt, Human
uguggccuccccacuucugggg

SEQ ID NO: 461011 - RNA, 22 nt, Human
auucauuuagguauucacuuac

SEQ ID NO: 461012 - RNA, 17 nt, Human
acacagccagguucucc

SEQ ID NO: 461013 - RNA, 18 nt, Human
cugcugcaggcacucagg

SEQ ID NO: 461014 - RNA, 22 nt, Human
aggccuccugcagggaugagug

SEQ ID NO: 461015 - RNA, 18 nt, Human
gcugucugaggucugagg

SEQ ID NO: 461016 - RNA, 22 nt, Human
aggccaaguagcuagcauugaa

SEQ ID NO: 461017 - RNA, 17 nt, Human
ccucacagggaccagac

SEQ ID NO: 461018 - RNA, 22 nt, Human
gugauuucagguuuuucauacu

SEQ ID NO: 461019 - RNA, 22 nt, Human
caguauguuugggagacaugac

SEQ ID NO: 461020 - RNA, 22 nt, Human
uagcugccuagacagcuauagc

SEQ ID NO: 461021 - RNA, 22 nt, Human
accuggagucauuugaggagua

SEQ ID NO: 461022 - RNA, 22 nt, Human
ugagaggccccagcucuuggcc

SEQ ID NO: 461023 - RNA, 22 nt, Human
cugcucuggucucuucauguuu

SEQ ID NO: 461024 - RNA, 22 nt, Human
aagugauuucugccugcauguu

SEQ ID NO: 461025 - RNA, 22 nt, Human
acaguggaauggugggccugca

SEQ ID NO: 461026 - RNA, 22 nt, Human
uuaacagacauauauauuugua

SEQ ID NO: 461027 - RNA, 22 nt, Human
ugaagcagcuucuuucugucaa

SEQ ID NO: 461028 - RNA, 22 nt, Human
caucaguguggcaguucacugu

SEQ ID NO: 461029 - RNA, 22 nt, Human
agaaauguauagugaauuuuuc

SEQ ID NO: 461030 - RNA, 22 nt, Human
gaaggccacaaaaaaugucaua

SEQ ID NO: 461031 - RNA, 22 nt, Human
agaggcugcacuugcucaugau

SEQ ID NO: 461032 - RNA, 23 nt, Human
ugggucagcugccuccaggacaa

SEQ ID NO: 461033 - RNA, 19 nt, Human
ggccaggcugacugugguc

SEQ ID NO: 461034 - RNA, 19 nt, Human
gcuguauuaaagauacaug

SEQ ID NO: 461035 - RNA, 22 nt, Human
ccagguguaggacaccaaggga

SEQ ID NO: 461036 - RNA, 22 nt, Human
uggcagcacuugaacuugagcc

SEQ ID NO: 461037 - RNA, 22 nt, Human
ggcugcuugcuguuucuuggau

SEQ ID NO: 461038 - RNA, 22 nt, Human
uggcugggcccccaccugccuc

SEQ ID NO: 461039 - RNA, 22 nt, Human
ugaaggccagcagagugaaggc

SEQ ID NO: 461040 - RNA, 22 nt, Human
caggcagcccugcaccaagugu

SEQ ID NO: 461041 - RNA, 22 nt, Human
aggccugacuugaauuuagggc

SEQ ID NO: 461042 - RNA, 22 nt, Human
cuggccaguuguccuggcuugg

SEQ ID NO: 461043 - RNA, 22 nt, Human
gcaucuuucuguccauucagca

SEQ ID NO: 461044 - RNA, 22 nt, Human
augccuggacugacaugcacug

SEQ ID NO: 461045 - RNA, 19 nt, Human
ucaguggaugaacauguuu

SEQ ID NO: 461046 - RNA, 22 nt, Human
accuuucauuaaagucuguagu

SEQ ID NO: 461047 - RNA, 22 nt, Human
ucaggggcuugaggugcauguc

SEQ ID NO: 461048 - RNA, 22 nt, Human
agauacaucauuuauaccuuca

SEQ ID NO: 461049 - RNA, 22 nt, Human
cugugccuggggggcagagcug

SEQ ID NO: 461050 - RNA, 22 nt, Human
ggagaugccagaauugcaaauu

SEQ ID NO: 461051 - RNA, 22 nt, Human
cacugccuggaaggagagacau

SEQ ID NO: 461052 - RNA, 22 nt, Human
uuuauuuggcauccagggagaa

SEQ ID NO: 461053 - RNA, 22 nt, Human
uggcugaggcacagcugccgcc

SEQ ID NO: 461054 - RNA, 22 nt, Human
caaugugguggcagaugucagu

SEQ ID NO: 461055 - RNA, 22 nt, Human
uauuucuguaugcauaaaagga

SEQ ID NO: 461056 - RNA, 22 nt, Human
ucaucuucuauuaauagggaga

SEQ ID NO: 461057 - RNA, 22 nt, Human
ccagaccacccuggccaugcac

SEQ ID NO: 461058 - RNA, 22 nt, Human
ucaagauaccaccauuauaugu

SEQ ID NO: 461059 - RNA, 22 nt, Human
uccaaaaaacguuugaauaguu

SEQ ID NO: 461060 - RNA, 19 nt, Human
cuccucagucccagagguc

SEQ ID NO: 461061 - RNA, 22 nt, Human
cuggagccauguauagccuaug

SEQ ID NO: 461062 - RNA, 22 nt, Human
gggugaagcuccugcaggggcc

SEQ ID NO: 461063 - RNA, 18 nt, Human
gggcuguguucaugccca

SEQ ID NO: 461064 - RNA, 22 nt, Human
gcuucauuacugacagucugug

SEQ ID NO: 461065 - RNA, 22 nt, Human
cagggcuguggcuuugugcugu

SEQ ID NO: 461066 - RNA, 22 nt, Human
gaggaagccccauugaagccag

SEQ ID NO: 461067 - RNA, 22 nt, Human
aauuuggcagugucuugaagua

SEQ ID NO: 461068 - RNA, 18 nt, Human
gagcccugagucugcaca

SEQ ID NO: 461069 - RNA, 22 nt, Human
uucugcaggagcccuaguguau

SEQ ID NO: 461070 - RNA, 22 nt, Human
ccagcagagggucuuggccauu

SEQ ID NO: 461071 - RNA, 22 nt, Human
aggcaguuucugggacagcaua

SEQ ID NO: 461072 - RNA, 22 nt, Human
ugggcucugcugcguaccaguu

SEQ ID NO: 461073 - RNA, 22 nt, Human
uccguauuugacuauugcaccg

SEQ ID NO: 461074 - RNA, 22 nt, Human
gcagggacaccuuugugaagcu

SEQ ID NO: 461075 - RNA, 22 nt, Human
agguggccggugccagccgggc

SEQ ID NO: 461076 - RNA, 21 nt, Human
ugcagcagaguaagcagggga

SEQ ID NO: 461077 - RNA, 19 nt, Human
ucugccucuggucaggcuc

SEQ ID NO: 461078 - RNA, 22 nt, Human
caggugggagccacagcguaca

SEQ ID NO: 461079 - RNA, 22 nt, Human
acguguucaauuuccaucugac

SEQ ID NO: 461080 - RNA, 22 nt, Human
ugaaaucuuuaguuucuguccc

SEQ ID NO: 461081 - RNA, 22 nt, Human
uggggcagcagaccuuucuugg

SEQ ID NO: 461082 - RNA, 22 nt, Human
aucaggaaugaauacuuuugga

SEQ ID NO: 461083 - RNA, 22 nt, Human
uuuagggaauagaagaucugaa

SEQ ID NO: 461084 - RNA, 22 nt, Human
augggaggguggaaaggcucug

SEQ ID NO: 461085 - RNA, 22 nt, Human
caaaggcuuugcuaugaugcau

SEQ ID NO: 461086 - RNA, 22 nt, Human
gaggagaagcuauuggaaggac

SEQ ID NO: 461087 - RNA, 22 nt, Human
cuaaaauuaucaagauaauucc

SEQ ID NO: 461088 - RNA, 22 nt, Human
ccugucagaugaaguaauugug

SEQ ID NO: 461089 - RNA, 22 nt, Human
auuuucuauucugcugguuuag

SEQ ID NO: 461090 - RNA, 22 nt, Human
agagaggcugggcguagggcuu

SEQ ID NO: 461091 - RNA, 22 nt, Human
aggccagcaccagagucaagaa

SEQ ID NO: 461092 - RNA, 22 nt, Human
ucucaagaucucaagauggccc

SEQ ID NO: 461093 - RNA, 22 nt, Human
aggagagagcugagcuuugcug

SEQ ID NO: 461094 - RNA, 22 nt, Human
uccaggcauuggagagauaaug

SEQ ID NO: 461095 - RNA, 22 nt, Human
ucuugacauuguuguuagcagg

SEQ ID NO: 461096 - RNA, 22 nt, Human
cugggugaguugaugaaggaga

SEQ ID NO: 461097 - RNA, 21 nt, Human
agcagccauuucacagagacu

SEQ ID NO: 461098 - RNA, 22 nt, Human
uguuuuuccaugugcagaacaa

SEQ ID NO: 461099 - RNA, 20 nt, Human
uggggccuguuucugugguu

SEQ ID NO: 461100 - RNA, 22 nt, Human
aagggcuccacuugaaucacac

SEQ ID NO: 461101 - RNA, 22 nt, Human
uuccucaggcuucccuuugucc

SEQ ID NO: 461102 - RNA, 22 nt, Human
ucucccacugcaagcccaggcu

SEQ ID NO: 461103 - RNA, 22 nt, Human
ggcagcuccucucagcaaaaga

SEQ ID NO: 461104 - RNA, 22 nt, Human
ccucugcugcuguugagcaccg

SEQ ID NO: 461105 - RNA, 22 nt, Human
gccaggggacgcggagcgacga

SEQ ID NO: 461106 - RNA, 22 nt, Human
gccacaggcacuuaagggcugg

SEQ ID NO: 461107 - RNA, 22 nt, Human
uauuucaucuggaacaagguaa

SEQ ID NO: 461108 - RNA, 22 nt, Human
auuauuagacuuauaugguagu

SEQ ID NO: 461109 - RNA, 18 nt, Human
ugcuggcaacuacuauug

SEQ ID NO: 461110 - RNA, 22 nt, Human
aggagcugcagauucugccuug

SEQ ID NO: 461111 - RNA, 22 nt, Human
gugcaugucggggugcauguca

SEQ ID NO: 461112 - RNA, 22 nt, Human
gccugagaguugaaguucagug

SEQ ID NO: 461113 - RNA, 23 nt, Human
ugaugggaaggaacgacuaccac

SEQ ID NO: 461114 - RNA, 22 nt, Human
gaaaggagaggguuaaggagcu

SEQ ID NO: 461115 - RNA, 22 nt, Human
agagcuguucagcagccagguu

SEQ ID NO: 461116 - RNA, 22 nt, Human
ggccucaguuucuucaacugua

SEQ ID NO: 461117 - RNA, 23 nt, Human
ugcucugggaggcccuggagagc

SEQ ID NO: 461118 - RNA, 22 nt, Human
ucuuccucucuaauugaucaga

SEQ ID NO: 461119 - RNA, 22 nt, Human
gaaugcacucacccaucacuca

SEQ ID NO: 461120 - RNA, 22 nt, Human
ucuuuucuggacucugcaugga

SEQ ID NO: 461121 - RNA, 22 nt, Human
accaugaucugcucugguguuu

SEQ ID NO: 461122 - RNA, 22 nt, Human
ucagccagugccuugaucuugc

SEQ ID NO: 461123 - RNA, 22 nt, Human
acaugggaucaaugaggcaggc

SEQ ID NO: 461124 - RNA, 22 nt, Human
auuuguacaaauuuauguuagu

SEQ ID NO: 461125 - RNA, 22 nt, Human
ggccugagaaccauggggccaa

SEQ ID NO: 461126 - RNA, 22 nt, Human
ggaagagccuggggugucaggc

SEQ ID NO: 461127 - RNA, 22 nt, Human
aggcacugacucaagggagcca

SEQ ID NO: 461128 - RNA, 22 nt, Human
gugagcagaacagguggcuucu

SEQ ID NO: 461129 - RNA, 22 nt, Human
guggcagguuauaagcaucuca

SEQ ID NO: 461130 - RNA, 22 nt, Human
caggaggagcauuagcgucuca

SEQ ID NO: 461131 - RNA, 22 nt, Human
cacauguacagaagcaggcugg

SEQ ID NO: 461132 - RNA, 22 nt, Human
gagcugcagcggcugacgcaac

SEQ ID NO: 461133 - RNA, 22 nt, Human
aauuauauugaaguugaauguc

SEQ ID NO: 461134 - RNA, 22 nt, Human
ggaggccaccugaccugcuguu

SEQ ID NO: 461135 - RNA, 22 nt, Human
gcagccuguuguaccagccugu

SEQ ID NO: 461136 - RNA, 22 nt, Human
gucuugaucuccugaccuugug

SEQ ID NO: 461137 - RNA, 22 nt, Human
cacagaguggaggcuuggccug

SEQ ID NO: 461138 - RNA, 22 nt, Human
cagcuucuggcguggagccuga

SEQ ID NO: 461139 - RNA, 22 nt, Human
uaugcauauagaugcacacaca

SEQ ID NO: 461140 - RNA, 22 nt, Human
gaagaacugugacagaagcagu

SEQ ID NO: 461141 - RNA, 20 nt, Human
acaguggaaauugaugucug

SEQ ID NO: 461142 - RNA, 22 nt, Human
acagauugaucuugagaauuau

SEQ ID NO: 461143 - RNA, 22 nt, Human
acagaguuaauggauaggcagg

SEQ ID NO: 461144 - RNA, 22 nt, Human
cagucccuaguggagcucacag

SEQ ID NO: 461145 - RNA, 22 nt, Human
gaaggcugcugggaaguguggu

SEQ ID NO: 461146 - RNA, 22 nt, Human
cucaggaggccauucucaaggu

SEQ ID NO: 461147 - RNA, 22 nt, Human
gggcucucaugaguguguggua

SEQ ID NO: 461148 - RNA, 22 nt, Human
ccucagaggugaacaucagugc

SEQ ID NO: 461149 - RNA, 22 nt, Human
uccuugaauccuagcauccuau

SEQ ID NO: 461150 - RNA, 22 nt, Human
gaaggagaggauugugaggcug

SEQ ID NO: 461151 - RNA, 22 nt, Human
uguauacaggauuacucauagc

SEQ ID NO: 461152 - RNA, 19 nt, Human
ugucccagacuccgugucu

SEQ ID NO: 461153 - RNA, 22 nt, Human
ugaacauauucaccucuaaaua

SEQ ID NO: 461154 - RNA, 19 nt, Human
uggcuuccaucucucucau

SEQ ID NO: 461155 - RNA, 21 nt, Human
gcagaggaaugguauacauaa

SEQ ID NO: 461156 - RNA, 22 nt, Human
ggugucuguugccuccugguua

SEQ ID NO: 461157 - RNA, 22 nt, Human
gucucagaccacccucuuuggc

SEQ ID NO: 461158 - RNA, 22 nt, Human
gccuggagggauagaaugcaag

SEQ ID NO: 461159 - RNA, 22 nt, Human
uucuuuggggaauauucugguu

SEQ ID NO: 461160 - RNA, 22 nt, Human
cagcuuguuuuauuuggggacc

SEQ ID NO: 461161 - RNA, 22 nt, Human
uuacaaacaagaucuuauucuu

SEQ ID NO: 461162 - RNA, 22 nt, Human
ccagagaggcaaaacuccuucc

SEQ ID NO: 461163 - RNA, 22 nt, Human
uggcagggccuaccccaauauc

SEQ ID NO: 461164 - RNA, 22 nt, Human
aggcucagggacucccucccuc

SEQ ID NO: 461165 - RNA, 22 nt, Human
aauuagggaaguauuuaguagu

SEQ ID NO: 461166 - RNA, 22 nt, Human
cugggacuuuacccuguggccc

SEQ ID NO: 461167 - RNA, 22 nt, Human
ggcagcuccaaaaggaaacacu

SEQ ID NO: 461168 - RNA, 22 nt, Human
gcaggguaggugacagguaguc

SEQ ID NO: 461169 - RNA, 22 nt, Human
ccaggguuuaaauucugacuau

SEQ ID NO: 461170 - RNA, 22 nt, Human
caaagguauucucauuuuggaa

SEQ ID NO: 461171 - RNA, 22 nt, Human
uaauaaaugaaagugcuggcau

SEQ ID NO: 461172 - RNA, 22 nt, Human
ugagcccagagaucugagcuau

SEQ ID NO: 461173 - RNA, 17 nt, Human
gguucaguucugcauuc

SEQ ID NO: 461174 - RNA, 21 nt, Human
gaaggagaaagcaagugcugc

SEQ ID NO: 461175 - RNA, 22 nt, Human
caggaugguggcaugaucagaa

SEQ ID NO: 461176 - RNA, 19 nt, Human
ggcagacacaguugacaug

SEQ ID NO: 461177 - RNA, 22 nt, Human
uaucuauuccaaauaucagcgu

SEQ ID NO: 461178 - RNA, 22 nt, Human
gugcaggggccuccccuugcug

SEQ ID NO: 461179 - RNA, 22 nt, Human
aggagaguucacacuggucaga

SEQ ID NO: 461180 - RNA, 22 nt, Human
cagagugaaauaggggaucaag

SEQ ID NO: 461181 - RNA, 22 nt, Human
aaugggaaagagacuagaugcu

SEQ ID NO: 461182 - RNA, 22 nt, Human
gcugucuguggugucagcugac

SEQ ID NO: 461183 - RNA, 22 nt, Human
agccaggggauucaucagggac

SEQ ID NO: 461184 - RNA, 22 nt, Human
ugcugcacgauaaauaauuucu

SEQ ID NO: 461185 - RNA, 22 nt, Human
ggcagugagcuggagggaagga

SEQ ID NO: 461186 - RNA, 22 nt, Human
cauggcaggaggcugcuggcag

SEQ ID NO: 461187 - RNA, 22 nt, Human
ugggcugaaaugcuguggacua

SEQ ID NO: 461188 - RNA, 18 nt, Human
aaauguacuguccauggc

SEQ ID NO: 461189 - RNA, 19 nt, Human
uaaaaugucuguggucagu

SEQ ID NO: 461190 - RNA, 22 nt, Human
uuuaauuugaaaugaguaaccc

SEQ ID NO: 461191 - RNA, 22 nt, Human
cuucaagauccauagauauugc

SEQ ID NO: 461192 - RNA, 22 nt, Human
cauuuguuaauuacuauuaucu

SEQ ID NO: 461193 - RNA, 22 nt, Human
gccaggcuggccagcaccuucu

SEQ ID NO: 461194 - RNA, 22 nt, Human
uagcuuuaaaaaucaucaaagc

SEQ ID NO: 461195 - RNA, 22 nt, Human
uagaaaggauauugagaugaau

SEQ ID NO: 461196 - RNA, 22 nt, Human
caggcuugauuauucagacaau

SEQ ID NO: 461197 - RNA, 22 nt, Human
gaggccaaucaauagggcaaua

SEQ ID NO: 461198 - RNA, 22 nt, Human
uggcucaguggcagccgcagcu

SEQ ID NO: 461199 - RNA, 22 nt, Human
acuggcaguggcagcagaaaga

SEQ ID NO: 461200 - RNA, 22 nt, Human
uagcuuuaccauagaagaguau

SEQ ID NO: 461201 - RNA, 22 nt, Human
ugggaccuguuacauugaguua

SEQ ID NO: 461202 - RNA, 22 nt, Human
aacaaaugaccugauuucuucc

SEQ ID NO: 461203 - RNA, 22 nt, Human
agcccagcagaaaguccagccu

SEQ ID NO: 461204 - RNA, 22 nt, Human
auaugaagaauuccaauuugga

SEQ ID NO: 461205 - RNA, 22 nt, Human
gcaaggaccuuugagcgugcca

SEQ ID NO: 461206 - RNA, 19 nt, Human
aggcagcacccaguccuug

SEQ ID NO: 461207 - RNA, 22 nt, Human
aacauugccaugguuaauuuua

SEQ ID NO: 461208 - RNA, 22 nt, Human
uggcccugacacgugguacugg

SEQ ID NO: 461209 - RNA, 22 nt, Human
uggcaggagacacauggcauag

SEQ ID NO: 461210 - RNA, 22 nt, Human
agugggaggcggcugacgggcg

SEQ ID NO: 461211 - RNA, 22 nt, Human
agggauguaaauucuucuucuu

SEQ ID NO: 461212 - RNA, 22 nt, Human
gcugcuccgucugagcucuggu

SEQ ID NO: 461213 - RNA, 22 nt, Human
ugccaggcuuuggucaaaggcu

SEQ ID NO: 461214 - RNA, 22 nt, Human
agggcuguuuuuggcaccuggg

SEQ ID NO: 461215 - RNA, 22 nt, Human
ggagccagagucugcaguguaa

SEQ ID NO: 461216 - RNA, 22 nt, Human
agagcugaaaaagcugacccgg

SEQ ID NO: 461217 - RNA, 22 nt, Human
aaguggacuaauacaaggacua

SEQ ID NO: 461218 - RNA, 22 nt, Human
acagagcuaaauuucaauccca

SEQ ID NO: 461219 - RNA, 22 nt, Human
cuggcucuaucuccaaggcugg

SEQ ID NO: 461220 - RNA, 22 nt, Human
aguggcagagguugacugcagu

SEQ ID NO: 461221 - RNA, 22 nt, Human
uacagaagcugagacacugaga

SEQ ID NO: 461222 - RNA, 22 nt, Human
aaucuguucuacucuauucaga

SEQ ID NO: 461223 - RNA, 22 nt, Human
acacaggggaaaguggagcuga

SEQ ID NO: 461224 - RNA, 22 nt, Human
ggagugacucucggggccacua

SEQ ID NO: 461225 - RNA, 20 nt, Human
caggaggcaaggucaagguc

SEQ ID NO: 461226 - RNA, 22 nt, Human
uauuucuugaguggucaguuuc

SEQ ID NO: 461227 - RNA, 22 nt, Human
cagaagcauugacuccuugcuc

SEQ ID NO: 461228 - RNA, 22 nt, Human
cucucugguuucagcgaagggg

SEQ ID NO: 461229 - RNA, 22 nt, Human
guuuuuccuugcugaggacccg

SEQ ID NO: 461230 - RNA, 22 nt, Human
cuggcccagagagcagagcuua

SEQ ID NO: 461231 - RNA, 19 nt, Human
ggcauccagaacuaccagu

SEQ ID NO: 461232 - RNA, 18 nt, Human
uggcagagugucuguucu

SEQ ID NO: 461233 - RNA, 18 nt, Human
acugugguuuauguguag

SEQ ID NO: 461234 - RNA, 19 nt, Human
gagcugagaguagcacugg

SEQ ID NO: 461235 - RNA, 22 nt, Human
agcccaagcauaggagggaggc

SEQ ID NO: 461236 - RNA, 22 nt, Human
uaauuuuaacugugcuguuugg

SEQ ID NO: 461237 - RNA, 22 nt, Human
gugggccuugcagggugcaggg

SEQ ID NO: 461238 - RNA, 22 nt, Human
cuuauuuuaagucaguuugggu

SEQ ID NO: 461239 - RNA, 22 nt, Human
uauuuaaaaagaggccagcugg

SEQ ID NO: 461240 - RNA, 22 nt, Human
uuagaaaggaaucuucauuuca

SEQ ID NO: 461241 - RNA, 22 nt, Human
gcugagagcggccagcugggaa

SEQ ID NO: 461242 - RNA, 22 nt, Human
cagagcagggugcaccuugggc

SEQ ID NO: 461243 - RNA, 22 nt, Human
agucuccuuggccucaaugccu

SEQ ID NO: 461244 - RNA, 22 nt, Human
gaaugaauagguguccagaugg

SEQ ID NO: 461245 - RNA, 22 nt, Human
aucuggcuuucuuaaugacuua

SEQ ID NO: 461246 - RNA, 20 nt, Human
acagcagauaccacaacuau

SEQ ID NO: 461247 - RNA, 22 nt, Human
cagggcaguaccgcccucuggc

SEQ ID NO: 461248 - RNA, 22 nt, Human
agagugcaaccgaaacaagcag

SEQ ID NO: 461249 - RNA, 22 nt, Human
cugggcugucccaaccccaucc

SEQ ID NO: 461250 - RNA, 22 nt, Human
uggaggagaauuuauggucgaa

SEQ ID NO: 461251 - RNA, 22 nt, Human
caggcugggcagccuccccggc

SEQ ID NO: 461252 - RNA, 22 nt, Human
agggcagaaaccaccuugaugg

SEQ ID NO: 461253 - RNA, 22 nt, Human
ccacacugaaccucagugucuu

SEQ ID NO: 461254 - RNA, 22 nt, Human
cuggcucccagcuuucagggag

SEQ ID NO: 461255 - RNA, 22 nt, Human
ccagcuuuccaggguugacugg

SEQ ID NO: 461256 - RNA, 23 nt, Human
gacacaggagcacccagcugagc

SEQ ID NO: 461257 - RNA, 22 nt, Human
agcagugaaacagcugcauaug

SEQ ID NO: 461258 - RNA, 22 nt, Human
agggcugccauuucuggcccaa

SEQ ID NO: 461259 - RNA, 20 nt, Human
cacaggccuugugagcagac

SEQ ID NO: 461260 - RNA, 20 nt, Human
uuggcucugaucaguggagc

SEQ ID NO: 461261 - RNA, 22 nt, Human
gcugccucuguagcuuuggacc

SEQ ID NO: 461262 - RNA, 22 nt, Human
ugcagggaagcaaggguggcuc

SEQ ID NO: 461263 - RNA, 22 nt, Human
agagacaccgcgcaucauggcu

SEQ ID NO: 461264 - RNA, 22 nt, Human
gggaaggacauucugggcucag

SEQ ID NO: 461265 - RNA, 22 nt, Human
cuccccagguucaggagguggg

SEQ ID NO: 461266 - RNA, 22 nt, Human
uucuguuuacucagaaauacaa

SEQ ID NO: 461267 - RNA, 22 nt, Human
gccugagccgccugagcggcgg

SEQ ID NO: 461268 - RNA, 22 nt, Human
ucucagagaaaugugucaccau

SEQ ID NO: 461269 - RNA, 22 nt, Human
ugaaaucugucccacuuuagcu

SEQ ID NO: 461270 - RNA, 22 nt, Human
cugaggccuggugaggugguga

SEQ ID NO: 461271 - RNA, 22 nt, Human
cugccgagugggucaugaggca

SEQ ID NO: 461272 - RNA, 20 nt, Human
cugcuguguuauuguagaac

SEQ ID NO: 461273 - RNA, 22 nt, Human
gaaugugucacccugucccaug

SEQ ID NO: 461274 - RNA, 22 nt, Human
uccucagugcuagccaacugcc

SEQ ID NO: 461275 - RNA, 22 nt, Human
cacuguguaagaagaugggcuu

SEQ ID NO: 461276 - RNA, 22 nt, Human
cugugucggacgugggcagcag

SEQ ID NO: 461277 - RNA, 22 nt, Human
ucagucuucccuccagugcaac

SEQ ID NO: 461278 - RNA, 22 nt, Human
aggugauguccacagcuugcag

SEQ ID NO: 461279 - RNA, 22 nt, Human
agagacuggagaugggcagugu

SEQ ID NO: 461280 - RNA, 22 nt, Human
gggaucagaaacauagcccuga

SEQ ID NO: 461281 - RNA, 22 nt, Human
ggggaccugggcuucaaggguu

SEQ ID NO: 461282 - RNA, 22 nt, Human
aguggcaggaaaguggaagaga

SEQ ID NO: 461283 - RNA, 22 nt, Human
uccugaggaaaguucaugaaug

SEQ ID NO: 461284 - RNA, 22 nt, Human
uguguauuucuggaacagacua

SEQ ID NO: 461285 - RNA, 21 nt, Human
uggcagggguaguaguacagc

SEQ ID NO: 461286 - RNA, 22 nt, Human
uugacagcaaagauugugccua

SEQ ID NO: 461287 - RNA, 19 nt, Human
ccagagagcuagguacaga

SEQ ID NO: 461288 - RNA, 22 nt, Human
gcagcuggauuucaagagggag

SEQ ID NO: 461289 - RNA, 22 nt, Human
cuacaaaaguaauugugguuuu

SEQ ID NO: 461290 - RNA, 22 nt, Human
aaacuucauggauaauauaaag

SEQ ID NO: 461291 - RNA, 22 nt, Human
uuguaacacuuuucuauuaaua

SEQ ID NO: 461292 - RNA, 22 nt, Human
agagcagauggccagggggccu

SEQ ID NO: 461293 - RNA, 22 nt, Human
aagcuccccgaaacccaccucu

SEQ ID NO: 461294 - RNA, 22 nt, Human
ucccagcauaacaaacugcccg

SEQ ID NO: 461295 - RNA, 22 nt, Human
gccugcagaggugcugcuagcu

SEQ ID NO: 461296 - RNA, 22 nt, Human
uggagcaggacggggaguggua

SEQ ID NO: 461297 - RNA, 20 nt, Human
ucccaggcuccacccuagac

SEQ ID NO: 461298 - RNA, 22 nt, Human
ucugccuugagguccucagcuc

SEQ ID NO: 461299 - RNA, 22 nt, Human
ccaggcaggcuagaauguaaau

SEQ ID NO: 461300 - RNA, 22 nt, Human
ccauccuaucugaccuacuugu

SEQ ID NO: 461301 - RNA, 22 nt, Human
gcagagcagugcuugcccagcg

SEQ ID NO: 461302 - RNA, 22 nt, Human
aaggugucaccagauuggcagg

SEQ ID NO: 461303 - RNA, 22 nt, Human
uucacauaaugauacaaagcuu

SEQ ID NO: 461304 - RNA, 15 nt, Human
uccaggcauucauuc

SEQ ID NO: 461305 - RNA, 22 nt, Human
aaauuuucucucuaagacuuaa

SEQ ID NO: 461306 - RNA, 22 nt, Human
aaagaacaaaugauauaugguu

SEQ ID NO: 461307 - RNA, 19 nt, Human
aagcagcccuggcaagagc

SEQ ID NO: 461308 - RNA, 22 nt, Human
uccugcagcauccgucgucugu

SEQ ID NO: 461309 - RNA, 22 nt, Human
ugcucuggggagcuccucugcg

SEQ ID NO: 461310 - RNA, 22 nt, Human
ugccuuccuggagcugaaggcu

SEQ ID NO: 461311 - RNA, 22 nt, Human
aggggccucgcaggaccgcucc

SEQ ID NO: 461312 - RNA, 22 nt, Human
gcagauggugccaugucuugug

SEQ ID NO: 461313 - RNA, 22 nt, Human
ccaguggaguuuuuauacccag

SEQ ID NO: 461314 - RNA, 22 nt, Human
ucccagagauuuccucuccuuc

SEQ ID NO: 461315 - RNA, 22 nt, Human
agagggcuuugauucucaguuc

SEQ ID NO: 461316 - RNA, 22 nt, Human
uccagcagguccgagacaaguu

SEQ ID NO: 461317 - RNA, 22 nt, Human
uugaagcauuucuuugagcuuc

SEQ ID NO: 461318 - RNA, 22 nt, Human
gcaugagggggguuaggaaguu

SEQ ID NO: 461319 - RNA, 22 nt, Human
gcaggaugggagcuucacucug

SEQ ID NO: 461320 - RNA, 22 nt, Human
gggcucuggaaggugcaccaug

SEQ ID NO: 461321 - RNA, 19 nt, Human
auaaggcagugacuuuuuu

SEQ ID NO: 461322 - RNA, 22 nt, Human
ucccagagcucuggagguugga

SEQ ID NO: 461323 - RNA, 22 nt, Human
acauuugaggauguuaagaaug

SEQ ID NO: 461324 - RNA, 22 nt, Human
acuggcagccacaacuggcagg

SEQ ID NO: 461325 - RNA, 22 nt, Human
cuguccuaugaguacucacuag

SEQ ID NO: 461326 - RNA, 22 nt, Human
augcuguguccuagugaaagaa

SEQ ID NO: 461327 - RNA, 22 nt, Human
uacaagaugacaggugcaugau

SEQ ID NO: 461328 - RNA, 22 nt, Human
agcugcagauucuaucuagaag

SEQ ID NO: 461329 - RNA, 22 nt, Human
aaugggagagaacacaaagucc

SEQ ID NO: 461330 - RNA, 22 nt, Human
ucaggggcugugcauuucccag

SEQ ID NO: 461331 - RNA, 22 nt, Human
uugaauucauuucucauugagu

SEQ ID NO: 461332 - RNA, 20 nt, Human
gagauuuccaaucaugccca

SEQ ID NO: 461333 - RNA, 22 nt, Human
agauggggcucaguguggaggc

SEQ ID NO: 461334 - RNA, 22 nt, Human
aacaguaacgagauguccuaac

SEQ ID NO: 461335 - RNA, 22 nt, Human
ccagccuggagggcaguggugg

SEQ ID NO: 461336 - RNA, 22 nt, Human
auacaguauuaccuguucagga

SEQ ID NO: 461337 - RNA, 22 nt, Human
ugggggugugccagggaccucc

SEQ ID NO: 461338 - RNA, 22 nt, Human
guccaagagucaagaagggggc

SEQ ID NO: 461339 - RNA, 22 nt, Human
agcagggguaacagaaggaaag

SEQ ID NO: 461340 - RNA, 22 nt, Human
gccucugcaacuccgccuuggu

SEQ ID NO: 461341 - RNA, 22 nt, Human
cuccagugagcgcggggcaugg

SEQ ID NO: 461342 - RNA, 22 nt, Human
ucagggacagggugcugcugcg

SEQ ID NO: 461343 - RNA, 22 nt, Human
aggcugccucgugagcucgcug

SEQ ID NO: 461344 - RNA, 22 nt, Human
gcaggccuuggcaaugagccug

SEQ ID NO: 461345 - RNA, 22 nt, Human
ugccucagagugggcuugcuau

SEQ ID NO: 461346 - RNA, 22 nt, Human
aucaggauagugguuaccuggg

SEQ ID NO: 461347 - RNA, 22 nt, Human
ugacauuuaucaaagaaauggu

SEQ ID NO: 461348 - RNA, 22 nt, Human
uuugucagucaugucugcuuuu

SEQ ID NO: 461349 - RNA, 22 nt, Human
gagaaagcuucuuucccacagg

SEQ ID NO: 461350 - RNA, 22 nt, Human
uuaagucacuuaucuaaagaca

SEQ ID NO: 461351 - RNA, 22 nt, Human
ccuggcagcuguuuggcuuggc

SEQ ID NO: 461352 - RNA, 22 nt, Human
aguacuuugcacuuugcucaga

SEQ ID NO: 461353 - RNA, 22 nt, Human
accagugcuuccugcuggagcu

SEQ ID NO: 461354 - RNA, 22 nt, Human
aagauuuccuggauguaauucc

SEQ ID NO: 461355 - RNA, 22 nt, Human
agucucagggccacccggggaa

SEQ ID NO: 461356 - RNA, 22 nt, Human
acaugcuuucuagguccuucug

SEQ ID NO: 461357 - RNA, 22 nt, Human
ucucuggccgagagucccuggg

SEQ ID NO: 461358 - RNA, 19 nt, Human
gggcucuggccucaguggg

SEQ ID NO: 461359 - RNA, 20 nt, Human
gagccuuccccucaccacug

SEQ ID NO: 461360 - RNA, 22 nt, Human
ugccuaggaaaccucaugcuuc

SEQ ID NO: 461361 - RNA, 23 nt, Human
cugcagucgccggccugggugcc

SEQ ID NO: 461362 - RNA, 22 nt, Human
ucugccugagggagcugaggaa

SEQ ID NO: 461363 - RNA, 22 nt, Human
ugcucugguaacucacuuccau

SEQ ID NO: 461364 - RNA, 23 nt, Human
ugggcagcuucugcaugcccacc

SEQ ID NO: 461365 - RNA, 22 nt, Human
ucacugaauacuugucucaucc

SEQ ID NO: 461366 - RNA, 22 nt, Human
ucuccccaaaggacucacucuc

SEQ ID NO: 461367 - RNA, 22 nt, Human
uugcucugauuagguggaaaca

SEQ ID NO: 461368 - RNA, 22 nt, Human
aagaugcuuauugcuccugcag

SEQ ID NO: 461369 - RNA, 22 nt, Human
ucucaggguuuguacaagugua

SEQ ID NO: 461370 - RNA, 22 nt, Human
cuggcucaugugaugagggcaa

SEQ ID NO: 461371 - RNA, 22 nt, Human
ggccucucuccagucagugcag

SEQ ID NO: 461372 - RNA, 22 nt, Human
gcagcugcagguggucccaugc

SEQ ID NO: 461373 - RNA, 22 nt, Human
aaaggccaccaacaugaagcau

SEQ ID NO: 461374 - RNA, 22 nt, Human
ucagagagcuggugggcagagg

SEQ ID NO: 461375 - RNA, 22 nt, Human
gcugcccaguucugcugcugcc

SEQ ID NO: 461376 - RNA, 22 nt, Human
gccuggugaaaggcagagagcg

SEQ ID NO: 461377 - RNA, 22 nt, Human
agcagcucuggcacuguagcau

SEQ ID NO: 461378 - RNA, 22 nt, Human
ugcugccagagagacagggacu

SEQ ID NO: 461379 - RNA, 22 nt, Human
uggcagagagacucuccuugau

SEQ ID NO: 461380 - RNA, 22 nt, Human
uucuuuugggaauuacguaugc

SEQ ID NO: 461381 - RNA, 22 nt, Human
aagcccagaugugagaacugag

SEQ ID NO: 461382 - RNA, 22 nt, Human
gacagggcauggugcagaguuc

SEQ ID NO: 461383 - RNA, 22 nt, Human
uuaugacaggaaaaucacagaa

SEQ ID NO: 461384 - RNA, 22 nt, Human
caggcuugggagcagagccacu

SEQ ID NO: 461385 - RNA, 22 nt, Human
ugcugccauggucgcugguguc

SEQ ID NO: 461386 - RNA, 22 nt, Human
uccuucagggggccgccugcac

SEQ ID NO: 461387 - RNA, 22 nt, Human
agccucucuuucugguggcuaa

SEQ ID NO: 461388 - RNA, 22 nt, Human
uuauuagcugggcuucagggug

SEQ ID NO: 461389 - RNA, 22 nt, Human
gaaggcuugcagcucuguggca

SEQ ID NO: 461390 - RNA, 22 nt, Human
cagcaggguuaagugacucacc

SEQ ID NO: 461391 - RNA, 22 nt, Human
ugaaacagucuccagacuugga

SEQ ID NO: 461392 - RNA, 22 nt, Human
gccaggcaauguguuagaagcg

SEQ ID NO: 461393 - RNA, 22 nt, Human
ugggagaagcagcagccaagug

SEQ ID NO: 461394 - RNA, 19 nt, Human
gcuuuaguuuacucaucua

SEQ ID NO: 461395 - RNA, 22 nt, Human
ucugggagcacacgcagugauc

SEQ ID NO: 461396 - RNA, 22 nt, Human
cuggaaguauaggggagaugau

SEQ ID NO: 461397 - RNA, 22 nt, Human
gccuuggccuuccuaggccuga

SEQ ID NO: 461398 - RNA, 22 nt, Human
uccugcagcugauaaauacagu

SEQ ID NO: 461399 - RNA, 22 nt, Human
aggcccugggcaguucuguagc

SEQ ID NO: 461400 - RNA, 22 nt, Human
ccagggcuggguuugucggugu

SEQ ID NO: 461401 - RNA, 22 nt, Human
uuggcugaagguuaagugcugg

SEQ ID NO: 461402 - RNA, 22 nt, Human
agccauccuacuaccucagcau

SEQ ID NO: 461403 - RNA, 22 nt, Human
uccuucagcucucuauuuagau

SEQ ID NO: 461404 - RNA, 22 nt, Human
uaugcacaccuggguccuuguc

SEQ ID NO: 461405 - RNA, 22 nt, Human
uaggcucagggcugggugacgg

SEQ ID NO: 461406 - RNA, 22 nt, Human
ucuggcucuuugggugauugua

SEQ ID NO: 461407 - RNA, 22 nt, Human
aacuguucuucauuuucaguau

SEQ ID NO: 461408 - RNA, 22 nt, Human
uggcugaggagagggcggaagu

SEQ ID NO: 461409 - RNA, 22 nt, Human
ucuauuuuauacucaaaucuuc

SEQ ID NO: 461410 - RNA, 21 nt, Human
uccagaccucccucuccuagc

SEQ ID NO: 461411 - RNA, 22 nt, Human
gcugagcuagaaaaggaccaca

SEQ ID NO: 461412 - RNA, 22 nt, Human
ucaaugauaucagcaggaugug

SEQ ID NO: 461413 - RNA, 22 nt, Human
acacaggagauauguaauggcu

SEQ ID NO: 461414 - RNA, 22 nt, Human
cccugcagacgucuugaugccu

SEQ ID NO: 461415 - RNA, 22 nt, Human
gcugugcagccaagugccucug

SEQ ID NO: 461416 - RNA, 22 nt, Human
gcuguggcuguacagagaccau

SEQ ID NO: 461417 - RNA, 19 nt, Human
cuggaaugauagagaccuc

SEQ ID NO: 461418 - RNA, 22 nt, Human
aagugagauuauauguacggga

SEQ ID NO: 461419 - RNA, 19 nt, Human
acauuuagaauguacuugc

SEQ ID NO: 461420 - RNA, 22 nt, Human
uuuauauccaucuuugaaguaa

SEQ ID NO: 461421 - RNA, 16 nt, Human
aggcagagauuuaccc

SEQ ID NO: 461422 - RNA, 19 nt, Human
agggaaggauucugucauu

SEQ ID NO: 461423 - RNA, 22 nt, Human
cucaugauguagcgaaugagaa

SEQ ID NO: 461424 - RNA, 22 nt, Human
augcuuuuaugucacaugguca

SEQ ID NO: 461425 - RNA, 22 nt, Human
agcagcugagccccagcuguga

SEQ ID NO: 461426 - RNA, 22 nt, Human
agggggcaucagguccuggcuc

SEQ ID NO: 461427 - RNA, 20 nt, Human
uuuacauuuugaaacaguga

SEQ ID NO: 461428 - RNA, 22 nt, Human
cagcuuguuaccgagggagggu

SEQ ID NO: 461429 - RNA, 22 nt, Human
ugcucuggaguggcuugugcac

SEQ ID NO: 461430 - RNA, 22 nt, Human
cucugggcaggaccaguggacc

SEQ ID NO: 461431 - RNA, 22 nt, Human
uucagcagucguccaggaaaag

SEQ ID NO: 461432 - RNA, 22 nt, Human
ggucucagacuggcaggcagug

SEQ ID NO: 461433 - RNA, 22 nt, Human
ccaaaauuauuacauuuguagg

SEQ ID NO: 461434 - RNA, 22 nt, Human
aaauaauuauagcgagucuauc

SEQ ID NO: 461435 - RNA, 18 nt, Human
aggaaagaaaggcaggug

SEQ ID NO: 461436 - RNA, 21 nt, Human
gccaccucgucucggagcagc

SEQ ID NO: 461437 - RNA, 22 nt, Human
aggggcucaguuacuuuggcag

SEQ ID NO: 461438 - RNA, 20 nt, Human
uagauuucauacuucucuuu

SEQ ID NO: 461439 - RNA, 22 nt, Human
ugaagacacauacaagggaaug

SEQ ID NO: 461440 - RNA, 22 nt, Human
ccaguguucauaauuuuacacu

SEQ ID NO: 461441 - RNA, 22 nt, Human
ugcuuaaacccugaucaugugu

SEQ ID NO: 461442 - RNA, 22 nt, Human
ucagcugcucuguugagcugaa

SEQ ID NO: 461443 - RNA, 21 nt, Human
gcagacugcccugcugucccc

SEQ ID NO: 461444 - RNA, 20 nt, Human
uacauucaaaacaaacucug

SEQ ID NO: 461445 - RNA, 22 nt, Human
uacuuacagagcuuauaaguua

SEQ ID NO: 461446 - RNA, 22 nt, Human
gggacaggccccucgcuagcuu

SEQ ID NO: 461447 - RNA, 22 nt, Human
gaggugaguggaucacgagguc

SEQ ID NO: 461448 - RNA, 22 nt, Human
ugcagggccuugggaugugucc

SEQ ID NO: 461449 - RNA, 18 nt, Human
uccagcgugcuccagggc

SEQ ID NO: 461450 - RNA, 22 nt, Human
ccuggagcuuuuccauccugga

SEQ ID NO: 461451 - RNA, 22 nt, Human
uauuucuaagcuguaagucuga

SEQ ID NO: 461452 - RNA, 22 nt, Human
agcagcaacuuauuuuucuuau

SEQ ID NO: 461453 - RNA, 22 nt, Human
gagaggccaccugacgagcagu

SEQ ID NO: 461454 - RNA, 22 nt, Human
uugcauaaagauuuuauugcau

SEQ ID NO: 461455 - RNA, 22 nt, Human
cugccuuggaaaaugugguaau

SEQ ID NO: 461456 - RNA, 22 nt, Human
gcaggcagagaaggaacauuua

SEQ ID NO: 461457 - RNA, 22 nt, Human
ucaggggacuuaggagagaagu

SEQ ID NO: 461458 - RNA, 22 nt, Human
gccucugccaagggggcugcgg

SEQ ID NO: 461459 - RNA, 22 nt, Human
aaaaacugguaacuauucccca

SEQ ID NO: 461460 - RNA, 18 nt, Human
uccuccuuuggccuuuuc

SEQ ID NO: 461461 - RNA, 22 nt, Human
uguggcuuaagaaugccuuuaa

SEQ ID NO: 461462 - RNA, 23 nt, Human
ugccucugccucccuagucugca

SEQ ID NO: 461463 - RNA, 22 nt, Human
aagccacugagauuucacugca

SEQ ID NO: 461464 - RNA, 22 nt, Human
gcugcagcucgccuuccggccu

SEQ ID NO: 461465 - RNA, 22 nt, Human
ggcagaaggccucccagcuccu

SEQ ID NO: 461466 - RNA, 22 nt, Human
aggcagcagugauaagauagga

SEQ ID NO: 461467 - RNA, 22 nt, Human
cauggccuugagugacugcacu

SEQ ID NO: 461468 - RNA, 22 nt, Human
aagacauuacuggaaucugacu

SEQ ID NO: 461469 - RNA, 22 nt, Human
cuaggaggcgggggcugcagua

SEQ ID NO: 461470 - RNA, 22 nt, Human
agauguuccagccaaugggaau

SEQ ID NO: 461471 - RNA, 22 nt, Human
uuggccuuaaccucucugugcc

SEQ ID NO: 461472 - RNA, 22 nt, Human
ccaggcugcuuagccuuaucuu

SEQ ID NO: 461473 - RNA, 21 nt, Human
gggugcuguggucaugcagga

SEQ ID NO: 461474 - RNA, 22 nt, Human
ugggagcucagaaagggagguc

SEQ ID NO: 461475 - RNA, 22 nt, Human
ugucucaguucccuucucugga

SEQ ID NO: 461476 - RNA, 21 nt, Human
aguguccuugaucuugccuug

SEQ ID NO: 461477 - RNA, 22 nt, Human
uauucacaguugauuuacaguu

SEQ ID NO: 461478 - RNA, 22 nt, Human
gccagccugugcuuggccaggc

SEQ ID NO: 461479 - RNA, 22 nt, Human
aaggcagaaagggaugugagug

SEQ ID NO: 461480 - RNA, 22 nt, Human
uggcacugaccccaggccugug

SEQ ID NO: 461481 - RNA, 22 nt, Human
uuucuacaugucaauccaaacc

SEQ ID NO: 461482 - RNA, 22 nt, Human
ugccaaggagcuggaucagggc

SEQ ID NO: 461483 - RNA, 22 nt, Human
ugaugggaaaaugaggccuggg

SEQ ID NO: 461484 - RNA, 22 nt, Human
guggcugcuacagagcuggagg

SEQ ID NO: 461485 - RNA, 22 nt, Human
aagguacagaaauuaacaagga

SEQ ID NO: 461486 - RNA, 22 nt, Human
auacaaagacaaaucucaaucu

SEQ ID NO: 461487 - RNA, 22 nt, Human
gccugccuuuguaugacccuga

SEQ ID NO: 461488 - RNA, 22 nt, Human
ggaguuggugagcaccaggcuu

SEQ ID NO: 461489 - RNA, 22 nt, Human
aagagagagcauucuucuguua

SEQ ID NO: 461490 - RNA, 22 nt, Human
cgggcagcggcguggccauggu

SEQ ID NO: 461491 - RNA, 22 nt, Human
ugugacagaucuuuaaauaaug

SEQ ID NO: 461492 - RNA, 22 nt, Human
uggcuuccaaaggaaugggccu

SEQ ID NO: 461493 - RNA, 18 nt, Human
gggcaucauucacaaagu

SEQ ID NO: 461494 - RNA, 22 nt, Human
ucauugcagugauguuguaugu

SEQ ID NO: 461495 - RNA, 22 nt, Human
cacacuagucuauccauuagcu

SEQ ID NO: 461496 - RNA, 22 nt, Human
gcugaagcccacguggcuugua

SEQ ID NO: 461497 - RNA, 22 nt, Human
acagcuuuucaauucugcugag

SEQ ID NO: 461498 - RNA, 22 nt, Human
ucaggaaaauacugcuuaucca

SEQ ID NO: 461499 - RNA, 22 nt, Human
uccugccuaccuugcggaggug

SEQ ID NO: 461500 - RNA, 22 nt, Human
gauccuugcacuugacuuggca

SEQ ID NO: 461501 - RNA, 22 nt, Human
gauuuucugagccuucaaauuu

SEQ ID NO: 461502 - RNA, 22 nt, Human
agcagccauuuaaaaugaauug

SEQ ID NO: 461503 - RNA, 22 nt, Human
uaugugaauacagcaguggaug

SEQ ID NO: 461504 - RNA, 22 nt, Human
caucagcaggcaacacucuugg

SEQ ID NO: 461505 - RNA, 22 nt, Human
cugcagggagaggggacagccu

SEQ ID NO: 461506 - RNA, 22 nt, Human
uccuucagauuccugcuucugg

SEQ ID NO: 461507 - RNA, 22 nt, Human
uguacacugcaggaugcauugc

SEQ ID NO: 461508 - RNA, 22 nt, Human
ugugccagccucuggcuguguc

SEQ ID NO: 461509 - RNA, 22 nt, Human
agcugcugagccaggcugaugu

SEQ ID NO: 461510 - RNA, 22 nt, Human
acaggcagguugagaaacauuu

SEQ ID NO: 461511 - RNA, 22 nt, Human
gggcuccaacggugagcaugga

SEQ ID NO: 461512 - RNA, 22 nt, Human
guccucagggaauguggcgggu

SEQ ID NO: 461513 - RNA, 22 nt, Human
augguuuguguggcccagauga

SEQ ID NO: 461514 - RNA, 22 nt, Human
gggcugagccacagcuuuuguu

SEQ ID NO: 461515 - RNA, 22 nt, Human
aagcagaacugggaaguagugg

SEQ ID NO: 461516 - RNA, 22 nt, Human
agucaccaucuguggcagccug

SEQ ID NO: 461517 - RNA, 22 nt, Human
ggcaccuggagguuuacuggau

SEQ ID NO: 461518 - RNA, 22 nt, Human
cagacaugauguaagcagaggc

SEQ ID NO: 461519 - RNA, 22 nt, Human
ucccugcacagccgagccaugc

SEQ ID NO: 461520 - RNA, 22 nt, Human
ucaagagaaggggaaauagacu

SEQ ID NO: 461521 - RNA, 22 nt, Human
gcugccaguaguuggagcucca

SEQ ID NO: 461522 - RNA, 22 nt, Human
cagccaggagcucccccugcuc

SEQ ID NO: 461523 - RNA, 22 nt, Human
aagagcuggucacagguccauu

SEQ ID NO: 461524 - RNA, 22 nt, Human
uucucucauucaaauuaaagug

SEQ ID NO: 461525 - RNA, 22 nt, Human
gcugcccugucugcagcaggac

SEQ ID NO: 461526 - RNA, 22 nt, Human
gggaccuggucuagcacugagc

SEQ ID NO: 461527 - RNA, 22 nt, Human
aggcaggcaaccaccugggaag

SEQ ID NO: 461528 - RNA, 22 nt, Human
uggagaauucuauguugagggg

SEQ ID NO: 461529 - RNA, 21 nt, Human
uggcaggcagcuggaagcuug

SEQ ID NO: 461530 - RNA, 22 nt, Human
cuguuuucaaagagagagaaug

SEQ ID NO: 461531 - RNA, 23 nt, Human
agcuggaggcugucuacucccaa

SEQ ID NO: 461532 - RNA, 22 nt, Human
ucuucagauugcacugagcaag

SEQ ID NO: 461533 - RNA, 22 nt, Human
aagaugauaggacuugcuuaag

SEQ ID NO: 461534 - RNA, 22 nt, Human
uggcagagacaaggccgggccu

SEQ ID NO: 461535 - RNA, 22 nt, Human
ccagggcauccucacaucgcag

SEQ ID NO: 461536 - RNA, 22 nt, Human
ccuuuugcucucccauccagaa

SEQ ID NO: 461537 - RNA, 23 nt, Human
gugagcagcccacuaggaaugcc

SEQ ID NO: 461538 - RNA, 22 nt, Human
ccuggaguuuuuugguugacuc

SEQ ID NO: 461539 - RNA, 20 nt, Human
gcugaggucauuaugccuca

SEQ ID NO: 461540 - RNA, 22 nt, Human
ggccugcugcuaugacuuccug

SEQ ID NO: 461541 - RNA, 22 nt, Human
aaguuuaacuugaauucuuucu

SEQ ID NO: 461542 - RNA, 22 nt, Human
gcagcguggggcugagucagcu

SEQ ID NO: 461543 - RNA, 22 nt, Human
acaauucuggguauuuauauag

SEQ ID NO: 461544 - RNA, 22 nt, Human
uuaguuaguggggcugucaguc

SEQ ID NO: 461545 - RNA, 22 nt, Human
ggaccugcccuggcucagaugc

SEQ ID NO: 461546 - RNA, 22 nt, Human
uguuacaauauuaucaacugag

SEQ ID NO: 461547 - RNA, 22 nt, Human
gccuugccucagccauggaaac

SEQ ID NO: 461548 - RNA, 22 nt, Human
gagugugggcacgggggccuug

SEQ ID NO: 461549 - RNA, 23 nt, Human
agaguccacaagauuuuccagug

SEQ ID NO: 461550 - RNA, 22 nt, Human
uggcugagcugcagcguggcuu

SEQ ID NO: 461551 - RNA, 20 nt, Human
agugccagggcaggugagag

SEQ ID NO: 461552 - RNA, 22 nt, Human
ggcagugagucccggagaggcc

SEQ ID NO: 461553 - RNA, 22 nt, Human
gacacagcacuguacaaggaau

SEQ ID NO: 461554 - RNA, 22 nt, Human
cuccucacacccacugcaacca

SEQ ID NO: 461555 - RNA, 22 nt, Human
gcugugcuggaaggggaccugc

SEQ ID NO: 461556 - RNA, 22 nt, Human
ugccagcuccgaggagcugcag

SEQ ID NO: 461557 - RNA, 22 nt, Human
uccuugaacagagggccugggu

SEQ ID NO: 461558 - RNA, 22 nt, Human
agaggccagguccagaguuugu

SEQ ID NO: 461559 - RNA, 22 nt, Human
uccuuccucggggacccagauc

SEQ ID NO: 461560 - RNA, 22 nt, Human
ccugggcauucuuugaguucuc

SEQ ID NO: 461561 - RNA, 22 nt, Human
ggguuccuccaguuccuagagc

SEQ ID NO: 461562 - RNA, 22 nt, Human
acaaauuuauugaagggcauau

SEQ ID NO: 461563 - RNA, 22 nt, Human
guuacaaaggaagcuucacugc

SEQ ID NO: 461564 - RNA, 22 nt, Human
cagcuuugugcaaugcagucuc

SEQ ID NO: 461565 - RNA, 22 nt, Human
aggcagagcuggguuuugaaau

SEQ ID NO: 461566 - RNA, 22 nt, Human
cagagggcucuuggcugccugc

SEQ ID NO: 461567 - RNA, 22 nt, Human
ggcugcagaggcgaucugaggu

SEQ ID NO: 461568 - RNA, 18 nt, Human
caggucagccuggccuca

SEQ ID NO: 461569 - RNA, 22 nt, Human
gggcaguagcuucguaggcauc

SEQ ID NO: 461570 - RNA, 22 nt, Human
caugaaaaauuuacuguuaaca

SEQ ID NO: 461571 - RNA, 22 nt, Human
cacacaugagucuccccauugg

SEQ ID NO: 461572 - RNA, 19 nt, Human
uugcauuguaguuggacug

SEQ ID NO: 461573 - RNA, 22 nt, Human
ccagcagccaccuucucgaaau

SEQ ID NO: 461574 - RNA, 19 nt, Human
cauaauacaguggaucuga

SEQ ID NO: 461575 - RNA, 22 nt, Human
ucaggauaaaauguaauggcaa

SEQ ID NO: 461576 - RNA, 18 nt, Human
ccgggcuuuggugacaca

SEQ ID NO: 461577 - RNA, 22 nt, Human
aaggccugcucagcugucugug

SEQ ID NO: 461578 - RNA, 17 nt, Human
uucaagauauugaaaug

SEQ ID NO: 461579 - RNA, 22 nt, Human
uccaggcauguggccaguacuc

SEQ ID NO: 461580 - RNA, 22 nt, Human
ugucauuuaguccucugugugu

SEQ ID NO: 461581 - RNA, 22 nt, Human
uucaagaugucuucacaauagu

SEQ ID NO: 461582 - RNA, 23 nt, Human
ucagaaugcacugaauuuacccu

SEQ ID NO: 461583 - RNA, 22 nt, Human
cagggcucaucugugugaccag

SEQ ID NO: 461584 - RNA, 19 nt, Human
acaaagcugugagcagcuu

SEQ ID NO: 461585 - RNA, 22 nt, Human
gcacagcaauuucuauaagcuc

SEQ ID NO: 461586 - RNA, 22 nt, Human
agagcucaagacgcucacagua

SEQ ID NO: 461587 - RNA, 22 nt, Human
uugaagagugccuuccagacau

SEQ ID NO: 461588 - RNA, 22 nt, Human
ucugcucagugcuuaucucuaa

SEQ ID NO: 461589 - RNA, 22 nt, Human
ccuggcugccgagugugcagcg

SEQ ID NO: 461590 - RNA, 19 nt, Human
agcagagcagggccguggg

SEQ ID NO: 461591 - RNA, 22 nt, Human
aggcaggaacccugugugcgcc

SEQ ID NO: 461592 - RNA, 22 nt, Human
uaaaaguuuuaguuguacauaa

SEQ ID NO: 461593 - RNA, 19 nt, Human
cagaguacaccagauagga

SEQ ID NO: 461594 - RNA, 20 nt, Human
uccaggcagacagcuauggg

SEQ ID NO: 461595 - RNA, 22 nt, Human
aggcuggcuuggcucuccugug

SEQ ID NO: 461596 - RNA, 22 nt, Human
uacaguaucuucuggcaagcau

SEQ ID NO: 461597 - RNA, 22 nt, Human
caguagcaggcaggugcuuuug

SEQ ID NO: 461598 - RNA, 22 nt, Human
gcccuuccaacccagagggcaa

SEQ ID NO: 461599 - RNA, 22 nt, Human
acuccugggugcugaccagcgu

SEQ ID NO: 461600 - RNA, 22 nt, Human
agaggccggccgagcccauggg

SEQ ID NO: 461601 - RNA, 22 nt, Human
ugcagaagaccuuccagggcug

SEQ ID NO: 461602 - RNA, 19 nt, Human
agauggggaagagugugag

SEQ ID NO: 461603 - RNA, 22 nt, Human
uaaaucacuccuaauaaucagu

SEQ ID NO: 461604 - RNA, 22 nt, Human
uuucuucugagaucagggagaa

SEQ ID NO: 461605 - RNA, 22 nt, Human
aauuucaaacuaauaggaacca

SEQ ID NO: 461606 - RNA, 20 nt, Human
aaaguguaagcauauaauua

SEQ ID NO: 461607 - RNA, 22 nt, Human
ucagagaguccuggucauuugc

SEQ ID NO: 461608 - RNA, 22 nt, Human
ggucccugguucccucugagcu

SEQ ID NO: 461609 - RNA, 22 nt, Human
cugccagcagaggccagcgcug

SEQ ID NO: 461610 - RNA, 22 nt, Human
aaagcuuuucaguauguucaug

SEQ ID NO: 461611 - RNA, 22 nt, Human
gcccuuccuuagacagcaggau

SEQ ID NO: 461612 - RNA, 22 nt, Human
augcucugggcaggagcccugg

SEQ ID NO: 461613 - RNA, 21 nt, Human
ucucugggaggacuugugaga

SEQ ID NO: 461614 - RNA, 22 nt, Human
cugggacagcugagacaggaga

SEQ ID NO: 461615 - RNA, 22 nt, Human
agaccagcugccucccagggcc

SEQ ID NO: 461616 - RNA, 22 nt, Human
cuggagcaggcuugucccagcu

SEQ ID NO: 461617 - RNA, 21 nt, Human
aaaaugugagcgugaugcuua

SEQ ID NO: 461618 - RNA, 22 nt, Human
ugggcagaaaucaguaucagau

SEQ ID NO: 461619 - RNA, 23 nt, Human
ugagcccaggaggucaaggcugc

SEQ ID NO: 461620 - RNA, 22 nt, Human
gcagagcucaugccugcaccuc

SEQ ID NO: 461621 - RNA, 22 nt, Human
gcauggcagugaggauggugcu

SEQ ID NO: 461622 - RNA, 22 nt, Human
ggcagugacuguucagacgucc

SEQ ID NO: 461623 - RNA, 22 nt, Human
ggggccagguccagcuuccaaa

SEQ ID NO: 461624 - RNA, 22 nt, Human
augagacuaccuguaauguggc

SEQ ID NO: 461625 - RNA, 22 nt, Human
auggccugggcccgcuucagau

SEQ ID NO: 461626 - RNA, 22 nt, Human
gcugcaggagcuggagcugugg

SEQ ID NO: 461627 - RNA, 22 nt, Human
gucucaguuuuccaaacuguca

SEQ ID NO: 461628 - RNA, 22 nt, Human
gagcugcuggcuccucagguua

SEQ ID NO: 461629 - RNA, 22 nt, Human
gaaaucugucuuuguuugaaua

SEQ ID NO: 461630 - RNA, 23 nt, Human
aggugcagcccuggaccugcccc

SEQ ID NO: 461631 - RNA, 19 nt, Human
guuuuucccagacgaggca

SEQ ID NO: 461632 - RNA, 20 nt, Human
cagaggcauuuucagacucu

SEQ ID NO: 461633 - RNA, 22 nt, Human
aaggggaaaaaguguuaggagu

SEQ ID NO: 461634 - RNA, 22 nt, Human
gcucugucuucagcacacagua

SEQ ID NO: 461635 - RNA, 22 nt, Human
accugcagcuaaagauguaggg

SEQ ID NO: 461636 - RNA, 22 nt, Human
augaggcauucacagaaggcac

SEQ ID NO: 461637 - RNA, 22 nt, Human
gcagugaaaaagugcacccugu

SEQ ID NO: 461638 - RNA, 22 nt, Human
gcuggcagccaagugaagaggg

SEQ ID NO: 461639 - RNA, 22 nt, Human
uagagcuagcuucaaaaugcga

SEQ ID NO: 461640 - RNA, 22 nt, Human
uuucauugcagagucugugugc

SEQ ID NO: 461641 - RNA, 22 nt, Human
guaacacagaaaugaaauucca

SEQ ID NO: 461642 - RNA, 22 nt, Human
guauuuuacuuacgcaugacuu

SEQ ID NO: 461643 - RNA, 22 nt, Human
uuucucaaguucagauauuuga

SEQ ID NO: 461644 - RNA, 22 nt, Human
aggaugggccugggauaugcuu

SEQ ID NO: 461645 - RNA, 22 nt, Human
ucuuuccuguaacugcuguuca

SEQ ID NO: 461646 - RNA, 22 nt, Human
gcuuuguguagaaggaggaugg

SEQ ID NO: 461647 - RNA, 22 nt, Human
agggcucugagugggaaagagg

SEQ ID NO: 461648 - RNA, 22 nt, Human
cagcuggggcagccacgugcgg

SEQ ID NO: 461649 - RNA, 22 nt, Human
cauuuauuggcauguaguaggu

SEQ ID NO: 461650 - RNA, 22 nt, Human
aaaucacuaaguuauagugugg

SEQ ID NO: 461651 - RNA, 22 nt, Human
gggcuggaucuccugcaggcag

SEQ ID NO: 461652 - RNA, 22 nt, Human
ugaggcaguauucuccauucca

SEQ ID NO: 461653 - RNA, 17 nt, Human
ggaaaaggaugauacag

SEQ ID NO: 461654 - RNA, 22 nt, Human
agaaauguuuauggcugccuau

SEQ ID NO: 461655 - RNA, 22 nt, Human
cagcccugagaaggaggaucuc

SEQ ID NO: 461656 - RNA, 22 nt, Human
cggcuggguagaggugccgggu

SEQ ID NO: 461657 - RNA, 22 nt, Human
augcacuugcguguuugcaaau

SEQ ID NO: 461658 - RNA, 22 nt, Human
ugaaaaggguagaucccuaagu

SEQ ID NO: 461659 - RNA, 22 nt, Human
uuuaauuuucugggcccagcag

SEQ ID NO: 461660 - RNA, 22 nt, Human
auguuuaaucggcugccuuucc

SEQ ID NO: 461661 - RNA, 22 nt, Human
uuuacaaguuuacagaaugaug

SEQ ID NO: 461662 - RNA, 22 nt, Human
uuacauuagacccacuuucaug

SEQ ID NO: 461663 - RNA, 22 nt, Human
agcccuucaaccugccuacucc

SEQ ID NO: 461664 - RNA, 22 nt, Human
ggagcugcacgcucugaagccu

SEQ ID NO: 461665 - RNA, 22 nt, Human
gugccugguuuggggaguguuc

SEQ ID NO: 461666 - RNA, 22 nt, Human
agaugcugucacacacacuguu

SEQ ID NO: 461667 - RNA, 22 nt, Human
agucccagugagaugaaccagg

SEQ ID NO: 461668 - RNA, 22 nt, Human
ucucugguuauuaacuaacucc

SEQ ID NO: 461669 - RNA, 22 nt, Human
cagcagcuuugccaagucagcc

SEQ ID NO: 461670 - RNA, 22 nt, Human
caguacuuaguucucaugguuu

SEQ ID NO: 461671 - RNA, 22 nt, Human
cccagccucagcuuuacuucca

SEQ ID NO: 461672 - RNA, 22 nt, Human
gggcucagccccauugaaccag

SEQ ID NO: 461673 - RNA, 22 nt, Human
acacauuucuaaauuuuuaccg

SEQ ID NO: 461674 - RNA, 22 nt, Human
cuggcagcaguuaugaaacaau

SEQ ID NO: 461675 - RNA, 22 nt, Human
acagcagagacacucaggaggc

SEQ ID NO: 461676 - RNA, 22 nt, Human
ccauuuguucgcccagcuccaa

SEQ ID NO: 461677 - RNA, 22 nt, Human
ggcacugagcgggcucugagcg

SEQ ID NO: 461678 - RNA, 22 nt, Human
gugcucuccuggcugcccugac

SEQ ID NO: 461679 - RNA, 22 nt, Human
uugcugaauugaauccuuuggu

SEQ ID NO: 461680 - RNA, 22 nt, Human
uagcagcuuccagagagggcag

SEQ ID NO: 461681 - RNA, 22 nt, Human
acuuugcagggcuugauaucca

SEQ ID NO: 461682 - RNA, 22 nt, Human
aaacaugagcauuucuguuuaa

SEQ ID NO: 461683 - RNA, 22 nt, Human
gaggggcuggguagggcaaccc

SEQ ID NO: 461684 - RNA, 22 nt, Human
cugagaaggaagccuccacucu

SEQ ID NO: 461685 - RNA, 22 nt, Human
uguuuuauuucuccaagaggga

SEQ ID NO: 461686 - RNA, 22 nt, Human
gagccaggucgggccgcggcga

SEQ ID NO: 461687 - RNA, 22 nt, Human
aagcagccaccucaucuccacu

SEQ ID NO: 461688 - RNA, 22 nt, Human
ucucaguggcuuccucacuuuu

SEQ ID NO: 461689 - RNA, 22 nt, Human
uccaggcauagaaggcacgcac

SEQ ID NO: 461690 - RNA, 22 nt, Human
ugugccuuaugaauucuuucug

SEQ ID NO: 461691 - RNA, 22 nt, Human
gucccagggagguucagggcuu

SEQ ID NO: 461692 - RNA, 22 nt, Human
auugaaaggcaaaguaggaagc

SEQ ID NO: 461693 - RNA, 22 nt, Human
ggcccugugguuuugcaaaguc

SEQ ID NO: 461694 - RNA, 23 nt, Human
auaauaacgucugucuugucucu

SEQ ID NO: 461695 - RNA, 22 nt, Human
auccaguucucagugcuuacag

SEQ ID NO: 461696 - RNA, 22 nt, Human
cugcagagcagccaguccccca

SEQ ID NO: 461697 - RNA, 22 nt, Human
guccucugcccaggucaagguu

SEQ ID NO: 461698 - RNA, 22 nt, Human
uugaagcagcucaggaggcuua

SEQ ID NO: 461699 - RNA, 22 nt, Human
ccugucuguaucgguucagagu

SEQ ID NO: 461700 - RNA, 22 nt, Human
ccuggguggcagagguugcagu

SEQ ID NO: 461701 - RNA, 22 nt, Human
cagcucugcugggaggaugcag

SEQ ID NO: 461702 - RNA, 22 nt, Human
gcuggagccaagcugcucuugg

SEQ ID NO: 461703 - RNA, 22 nt, Human
aggcccagacucagcggggcgg

SEQ ID NO: 461704 - RNA, 22 nt, Human
cagucuggaggucagcuggcuu

SEQ ID NO: 461705 - RNA, 23 nt, Human
acagacaacacugaugagagaaa

SEQ ID NO: 461706 - RNA, 22 nt, Human
ugauuaacugucuauuaaucau

SEQ ID NO: 461707 - RNA, 22 nt, Human
acagggcaccugagguaggaag

SEQ ID NO: 461708 - RNA, 22 nt, Human
acagagcucccagccaucuccu

SEQ ID NO: 461709 - RNA, 22 nt, Human
ugccaggcaggacccuagaacc

SEQ ID NO: 461710 - RNA, 22 nt, Human
gcuuucucuucacugauguuca

SEQ ID NO: 461711 - RNA, 22 nt, Human
cuggccugaggccgccuucaga

SEQ ID NO: 461712 - RNA, 22 nt, Human
cugcccugucugcagccuggcu

SEQ ID NO: 461713 - RNA, 22 nt, Human
uauaacacucagaaagaaucau

SEQ ID NO: 461714 - RNA, 22 nt, Human
gagagucuagugcaccuaguuu

SEQ ID NO: 461715 - RNA, 22 nt, Human
ggaaagaccugagauaggaaua

SEQ ID NO: 461716 - RNA, 22 nt, Human
auugagaauccauuugagauga

SEQ ID NO: 461717 - RNA, 22 nt, Human
cuuccucccggcccaugcucug

SEQ ID NO: 461718 - RNA, 22 nt, Human
agguauuauuagcaucucuauu

SEQ ID NO: 461719 - RNA, 22 nt, Human
cacaaaaucuuucucgauuauu

SEQ ID NO: 461720 - RNA, 22 nt, Human
guccagggaaauagcgacaggg

SEQ ID NO: 461721 - RNA, 22 nt, Human
gcccucugcuggccucaccucg

SEQ ID NO: 461722 - RNA, 22 nt, Human
gcagagacuccacugucuugug

SEQ ID NO: 461723 - RNA, 22 nt, Human
uggagcagcuaagccucugaga

SEQ ID NO: 461724 - RNA, 22 nt, Human
ucuggagccacaaaccucagcu

SEQ ID NO: 461725 - RNA, 22 nt, Human
agggcagcagcccauggcucug

SEQ ID NO: 461726 - RNA, 21 nt, Human
uggcagagugcagucuauaca

SEQ ID NO: 461727 - RNA, 22 nt, Human
cccaucaggaacccaggagccc

SEQ ID NO: 461728 - RNA, 22 nt, Human
cuccaggagcugugucuuucuu

SEQ ID NO: 461729 - RNA, 22 nt, Human
cagcuggcguggagugauugca

SEQ ID NO: 461730 - RNA, 22 nt, Human
ggcuucuccagguacugagcau

SEQ ID NO: 461731 - RNA, 22 nt, Human
ccugaagaugcuguggccuggu

SEQ ID NO: 461732 - RNA, 22 nt, Human
gcugaaggcccggaggacaggg

SEQ ID NO: 461733 - RNA, 22 nt, Human
cucaggauagcugcgcagccug

SEQ ID NO: 461734 - RNA, 22 nt, Human
uccauuuuucaugacuccucaa

SEQ ID NO: 461735 - RNA, 22 nt, Human
uggcugggugcuauccaguacu

SEQ ID NO: 461736 - RNA, 22 nt, Human
ccuggaagauucaccacuacca

SEQ ID NO: 461737 - RNA, 22 nt, Human
ucuuagaaauuccccaguggcu

SEQ ID NO: 461738 - RNA, 22 nt, Human
ccucugagagaaggccuucagc

SEQ ID NO: 461739 - RNA, 22 nt, Human
aggcagcauuugaauccagguc

SEQ ID NO: 461740 - RNA, 23 nt, Human
agcaggaaaccgagggugauguu

SEQ ID NO: 461741 - RNA, 19 nt, Human
auuucaagagguuuauugg

SEQ ID NO: 461742 - RNA, 21 nt, Human
uggagcugccacuuguccucc

SEQ ID NO: 461743 - RNA, 22 nt, Human
ugcuuuauucagucucugccau

SEQ ID NO: 461744 - RNA, 22 nt, Human
gucccucugugucccugcaguc

SEQ ID NO: 461745 - RNA, 21 nt, Human
aaggagccuaggaggcucagg

SEQ ID NO: 461746 - RNA, 22 nt, Human
gagggcugcuggaaaaaugcag

SEQ ID NO: 461747 - RNA, 22 nt, Human
gagucaguaauggauaugucau

SEQ ID NO: 461748 - RNA, 22 nt, Human
ccuggccuuaagggcagggagc

SEQ ID NO: 461749 - RNA, 22 nt, Human
cacauggggcgcugcauuggcc

SEQ ID NO: 461750 - RNA, 20 nt, Human
aauguauauuuuaugccagg

SEQ ID NO: 461751 - RNA, 22 nt, Human
cauccugguuaccccauaguca

SEQ ID NO: 461752 - RNA, 22 nt, Human
ccuguggcacaugcagggauuc

SEQ ID NO: 461753 - RNA, 22 nt, Human
uuuuuggguccaggcuguaucu

SEQ ID NO: 461754 - RNA, 22 nt, Human
cagaacauuccaugugcccugc

SEQ ID NO: 461755 - RNA, 22 nt, Human
aaaguuagaaugauaucaacga

SEQ ID NO: 461756 - RNA, 22 nt, Human
cauuauggcagccaggauauug

SEQ ID NO: 461757 - RNA, 22 nt, Human
aacagcaugcuggguaacauug

SEQ ID NO: 461758 - RNA, 20 nt, Human
auacaaagagauugauguau

SEQ ID NO: 461759 - RNA, 22 nt, Human
aaaugcacagaaaggaugugga

SEQ ID NO: 461760 - RNA, 22 nt, Human
auuccaaagcacaucagaacua

SEQ ID NO: 461761 - RNA, 22 nt, Human
gggcugugcugaguaggaggug

SEQ ID NO: 461762 - RNA, 22 nt, Human
gcagguggauuaucagaagugc

SEQ ID NO: 461763 - RNA, 22 nt, Human
cugccucuggccucaggcccag

SEQ ID NO: 461764 - RNA, 22 nt, Human
aacagaaaagguagguggcuuu

SEQ ID NO: 461765 - RNA, 22 nt, Human
agcaaucaccaccucuauauuu

SEQ ID NO: 461766 - RNA, 21 nt, Human
ucacacacguuuccaagggca

SEQ ID NO: 461767 - RNA, 22 nt, Human
aggaagccaugguggacgucua

SEQ ID NO: 461768 - RNA, 16 nt, Human
gccuggaguggcaggg

SEQ ID NO: 461769 - RNA, 22 nt, Human
uuugaaaguucuucugacacua

SEQ ID NO: 461770 - RNA, 22 nt, Human
ugcugcauuuaucuucucaaac

SEQ ID NO: 461771 - RNA, 22 nt, Human
uccuguggucuggaaggaaugg

SEQ ID NO: 461772 - RNA, 22 nt, Human
gcuguggccaacaaaccacuuu

SEQ ID NO: 461773 - RNA, 22 nt, Human
uuccuuguuuguagcucuggga

SEQ ID NO: 461774 - RNA, 22 nt, Human
agaggaggcuggguccagauaa

SEQ ID NO: 461775 - RNA, 22 nt, Human
uuuagaaauugcagagugggug

SEQ ID NO: 461776 - RNA, 18 nt, Human
acagaaauagcugugccu

SEQ ID NO: 461777 - RNA, 22 nt, Human
uucaaagugcauguuccucaga

SEQ ID NO: 461778 - RNA, 22 nt, Human
accuuucaaaguggcuaucacu

SEQ ID NO: 461779 - RNA, 22 nt, Human
aaggcugagagucacaguccua

SEQ ID NO: 461780 - RNA, 22 nt, Human
gccaggcacaguucuaggugcu

SEQ ID NO: 461781 - RNA, 22 nt, Human
gccugcagacguguuuuccuca

SEQ ID NO: 461782 - RNA, 22 nt, Human
acugcccuguaacugccaggua

SEQ ID NO: 461783 - RNA, 22 nt, Human
agagccugcuaccucauuccag

SEQ ID NO: 461784 - RNA, 21 nt, Human
guggcccugguguggcugcac

SEQ ID NO: 461785 - RNA, 22 nt, Human
uuggaaggcccugccuagcagg

SEQ ID NO: 461786 - RNA, 22 nt, Human
ugccaggcucagccccuaucuu

SEQ ID NO: 461787 - RNA, 18 nt, Human
agucucagcggaggagua

SEQ ID NO: 461788 - RNA, 22 nt, Human
cugcucugacccuuucaccuuc

SEQ ID NO: 461789 - RNA, 22 nt, Human
caggagaagguuuggagugcag

SEQ ID NO: 461790 - RNA, 22 nt, Human
agcagggcucuguggagggugg

SEQ ID NO: 461791 - RNA, 22 nt, Human
cagagggcucaguccugcugga

SEQ ID NO: 461792 - RNA, 22 nt, Human
agcuguggggcaggcagcgagg

SEQ ID NO: 461793 - RNA, 22 nt, Human
ugucauugaggaaaacuaggug

SEQ ID NO: 461794 - RNA, 22 nt, Human
aauaccuuuccugccauucacu

SEQ ID NO: 461795 - RNA, 22 nt, Human
uuuucuaacaucuaguaauuug

SEQ ID NO: 461796 - RNA, 23 nt, Human
gugugccaagcacugugccagga

SEQ ID NO: 461797 - RNA, 22 nt, Human
uggagccuguguuucugcccag

SEQ ID NO: 461798 - RNA, 22 nt, Human
gcugucuggguugagggcccug

SEQ ID NO: 461799 - RNA, 22 nt, Human
gucaggauuaaugggaguaugc

SEQ ID NO: 461800 - RNA, 22 nt, Human
cugaggucucuuuccauaguga

SEQ ID NO: 461801 - RNA, 22 nt, Human
gcucagaaaagugaggcucagu

SEQ ID NO: 461802 - RNA, 18 nt, Human
aggcuucuuggcucaguc

SEQ ID NO: 461803 - RNA, 23 nt, Human
acuuuauugaccccaggucaguu

SEQ ID NO: 461804 - RNA, 22 nt, Human
agggaggaucugcuccuugucu

SEQ ID NO: 461805 - RNA, 20 nt, Human
aagcaauauagugcaaaugu

SEQ ID NO: 461806 - RNA, 22 nt, Human
uccagucucuacucugagauaa

SEQ ID NO: 461807 - RNA, 22 nt, Human
uaugcacaguuacaagaauauc

SEQ ID NO: 461808 - RNA, 22 nt, Human
ggcuucucgugccgaagcaaga

SEQ ID NO: 461809 - RNA, 22 nt, Human
gaucauuuugaugcccuuuuag

SEQ ID NO: 461810 - RNA, 22 nt, Human
aggcccuguccauggugcugaa

SEQ ID NO: 461811 - RNA, 22 nt, Human
gcaccugggacccagaggcacc

SEQ ID NO: 461812 - RNA, 22 nt, Human
accagccugucugagucguggg

SEQ ID NO: 461813 - RNA, 22 nt, Human
ugaggccagucucaucacaggc

SEQ ID NO: 461814 - RNA, 22 nt, Human
aauuucaauuacuuuugcacca

SEQ ID NO: 461815 - RNA, 23 nt, Human
uuaggcacuuaguagggccagag

SEQ ID NO: 461816 - RNA, 22 nt, Human
cauugacaguucuuuaaguugc

SEQ ID NO: 461817 - RNA, 22 nt, Human
cagcugaauucuucagacucca

SEQ ID NO: 461818 - RNA, 22 nt, Human
aggccagggucccacacucgca

SEQ ID NO: 461819 - RNA, 22 nt, Human
ccagagcccagggucaugcagg

SEQ ID NO: 461820 - RNA, 22 nt, Human
auacuguuuugugacuuaucuu

SEQ ID NO: 461821 - RNA, 22 nt, Human
aagccacuauggugauucucaa

SEQ ID NO: 461822 - RNA, 22 nt, Human
aggucaccauggcaugcuccac

SEQ ID NO: 461823 - RNA, 22 nt, Human
gaggcugcuuugaugacaggag

SEQ ID NO: 461824 - RNA, 22 nt, Human
gaggcugggaaguccaagacca

SEQ ID NO: 461825 - RNA, 22 nt, Human
aggucacccguuugacuaucca

SEQ ID NO: 461826 - RNA, 22 nt, Human
cagggcucagggacugcagaaa

SEQ ID NO: 461827 - RNA, 20 nt, Human
gagauggacagaugaagggg

SEQ ID NO: 461828 - RNA, 22 nt, Human
gagggucccugcucagggccag

SEQ ID NO: 461829 - RNA, 22 nt, Human
caggcagcugcgacaagagagc

SEQ ID NO: 461830 - RNA, 22 nt, Human
agccuccaucccaugcacaaag

SEQ ID NO: 461831 - RNA, 22 nt, Human
gcagugccuugcuucucugucu

SEQ ID NO: 461832 - RNA, 21 nt, Human
agcucagccgggcacaguggc

SEQ ID NO: 461833 - RNA, 20 nt, Human
aggccaggaaauguaguucu

SEQ ID NO: 461834 - RNA, 22 nt, Human
ggagcuggcuacagagaacucc

SEQ ID NO: 461835 - RNA, 22 nt, Human
agccagcuggugggucagcugg

SEQ ID NO: 461836 - RNA, 22 nt, Human
auucugucuuuuuaaaauaaua

SEQ ID NO: 461837 - RNA, 22 nt, Human
ucaaaguaaaaguauagaguuu

SEQ ID NO: 461838 - RNA, 22 nt, Human
gcagcugccgugagcucacgcc

SEQ ID NO: 461839 - RNA, 22 nt, Human
accauguuggccaagcuggucu

SEQ ID NO: 461840 - RNA, 22 nt, Human
ugcccaggcuccucgcagccuu

SEQ ID NO: 461841 - RNA, 22 nt, Human
cccaggaguaagugacauuguu

SEQ ID NO: 461842 - RNA, 19 nt, Human
caucuggaugauucuccug

SEQ ID NO: 461843 - RNA, 22 nt, Human
agggagcugcucugcuuccgug

SEQ ID NO: 461844 - RNA, 22 nt, Human
ugcagccaccaccucugcugaa

SEQ ID NO: 461845 - RNA, 22 nt, Human
uccaggcuaauuuugcauuguu

SEQ ID NO: 461846 - RNA, 22 nt, Human
gggcugcugcccaggaggcacc

SEQ ID NO: 461847 - RNA, 22 nt, Human
cugagaaaggaccucaaacagg

SEQ ID NO: 461848 - RNA, 22 nt, Human
caacagaagguguacuacugaa

SEQ ID NO: 461849 - RNA, 22 nt, Human
ccagcugguuaaaauagagaaa

SEQ ID NO: 461850 - RNA, 22 nt, Human
ugcuggaggcaguggaggugcc

SEQ ID NO: 461851 - RNA, 22 nt, Human
ucagagaguuagugucuuagcu

SEQ ID NO: 461852 - RNA, 22 nt, Human
acuugauuuugaaccuuucuac

SEQ ID NO: 461853 - RNA, 22 nt, Human
aucuggaauccuuguggacaau

SEQ ID NO: 461854 - RNA, 22 nt, Human
cuguacaucucugaggacagua

SEQ ID NO: 461855 - RNA, 22 nt, Human
gcucuggguagccacugccugg

SEQ ID NO: 461856 - RNA, 22 nt, Human
gccugccuggagcuugagguga

SEQ ID NO: 461857 - RNA, 22 nt, Human
acuugcauuauauuuaucacaa

SEQ ID NO: 461858 - RNA, 22 nt, Human
aguucaggcauaaggcaugaac

SEQ ID NO: 461859 - RNA, 22 nt, Human
cucccagguuccgacgccucuu

SEQ ID NO: 461860 - RNA, 22 nt, Human
uuccaaugacuaguggcauccu

SEQ ID NO: 461861 - RNA, 22 nt, Human
ggcagcuccuccuagucugccc

SEQ ID NO: 461862 - RNA, 22 nt, Human
ucacaugcucaccuaagccaca

SEQ ID NO: 461863 - RNA, 22 nt, Human
auuauguauuugguauaguuug

SEQ ID NO: 461864 - RNA, 21 nt, Human
cgcagagcgaacuugcggcgc

SEQ ID NO: 461865 - RNA, 22 nt, Human
ccugggcaauauagugaggccc

SEQ ID NO: 461866 - RNA, 17 nt, Human
acagggcagaaacagcu

SEQ ID NO: 461867 - RNA, 22 nt, Human
cuggcagcccaaccuagagucu

SEQ ID NO: 461868 - RNA, 22 nt, Human
agagccugaggaugucccagcu

SEQ ID NO: 461869 - RNA, 22 nt, Human
uuccuguauucuaaagggaaag

SEQ ID NO: 461870 - RNA, 22 nt, Human
ucucucagaggaagaggcagug

SEQ ID NO: 461871 - RNA, 22 nt, Human
acaaaauuuuuagacaaggcuu

SEQ ID NO: 461872 - RNA, 17 nt, Human
uagagcugguucaggag

SEQ ID NO: 461873 - RNA, 22 nt, Human
aaaguucagugccuucuauaca

SEQ ID NO: 461874 - RNA, 22 nt, Human
gaguucaguguuucuaguagug

SEQ ID NO: 461875 - RNA, 22 nt, Human
ugugccuucucaguccugcuca

SEQ ID NO: 461876 - RNA, 22 nt, Human
uuugcauuugcaaauaaugaaa

SEQ ID NO: 461877 - RNA, 22 nt, Human
cuccacagccccuccaguggca

SEQ ID NO: 461878 - RNA, 22 nt, Human
gaaagacauaguugcaagaugg

SEQ ID NO: 461879 - RNA, 23 nt, Human
uggcucucucagugcugcagagg

SEQ ID NO: 461880 - RNA, 22 nt, Human
acucuugucucaacuuuuguau

SEQ ID NO: 461881 - RNA, 22 nt, Human
uguucccauuuucugcauaauc

SEQ ID NO: 461882 - RNA, 22 nt, Human
uacaguaaccuuauuugucauu

SEQ ID NO: 461883 - RNA, 22 nt, Human
cccagcaguuguuggugcacau

SEQ ID NO: 461884 - RNA, 22 nt, Human
caggcuggagugcaguugugca

SEQ ID NO: 461885 - RNA, 22 nt, Human
agcaggagcccuuaucaccagg

SEQ ID NO: 461886 - RNA, 22 nt, Human
ggcuuuaugcagggauagaaau

SEQ ID NO: 461887 - RNA, 22 nt, Human
cuggauuuaauuaacuguugcu

SEQ ID NO: 461888 - RNA, 22 nt, Human
gucccaggugggcuccaccucu

SEQ ID NO: 461889 - RNA, 22 nt, Human
uuugaaagcaggugugggaggg

SEQ ID NO: 461890 - RNA, 22 nt, Human
caucccugcccucaugccuaua

SEQ ID NO: 461891 - RNA, 22 nt, Human
ugcagaagugagucaugaggaa

SEQ ID NO: 461892 - RNA, 22 nt, Human
agggcuccgggccaccggccug

SEQ ID NO: 461893 - RNA, 20 nt, Human
agcaggaaaagugccagucu

SEQ ID NO: 461894 - RNA, 22 nt, Human
cagccagcuucagauccaagcc

SEQ ID NO: 461895 - RNA, 22 nt, Human
auuuuacauaaggaagguuuaa

SEQ ID NO: 461896 - RNA, 22 nt, Human
ccagccuggacugggucuugug

SEQ ID NO: 461897 - RNA, 22 nt, Human
ugcacacacaugaaguagcaug

SEQ ID NO: 461898 - RNA, 22 nt, Human
ugcuggcugggcugcuggagac

SEQ ID NO: 461899 - RNA, 21 nt, Human
ugcuuuaugggaaaaauguca

SEQ ID NO: 461900 - RNA, 19 nt, Human
agcuggggcgguguguguu

SEQ ID NO: 461901 - RNA, 22 nt, Human
aggaguggaauuacuggguucu

SEQ ID NO: 461902 - RNA, 19 nt, Human
ucccagagucuagagguug

SEQ ID NO: 461903 - RNA, 22 nt, Human
gccugggagugcacagugaggu

SEQ ID NO: 461904 - RNA, 22 nt, Human
ugggccugggucuuugcugcca

SEQ ID NO: 461905 - RNA, 22 nt, Human
gcaaggcagcgcggaguagcua

SEQ ID NO: 461906 - RNA, 22 nt, Human
caaggagaaaacggcuucugaa

SEQ ID NO: 461907 - RNA, 22 nt, Human
ccuccagcugccucagucucuu

SEQ ID NO: 461908 - RNA, 22 nt, Human
uggagcaagcuggagagaacau

SEQ ID NO: 461909 - RNA, 22 nt, Human
ggcuguggacacugagcucaga

SEQ ID NO: 461910 - RNA, 22 nt, Human
ucauguuauugacucauaauau

SEQ ID NO: 461911 - RNA, 22 nt, Human
ggggauggaggcgugugguccu

SEQ ID NO: 461912 - RNA, 22 nt, Human
ugcaaaauaaugaacgauuuuu

SEQ ID NO: 461913 - RNA, 22 nt, Human
aaagguuaagguguucaagaaa

SEQ ID NO: 461914 - RNA, 22 nt, Human
accaggcaguauggugcugcaa

SEQ ID NO: 461915 - RNA, 22 nt, Human
gagcaggcucugccuguguguc

SEQ ID NO: 461916 - RNA, 22 nt, Human
uuuuccucugcagagcaguuag

SEQ ID NO: 461917 - RNA, 22 nt, Human
uucaacacaggaacaugauaua

SEQ ID NO: 461918 - RNA, 22 nt, Human
gaagaacaccugcugcccagug

SEQ ID NO: 461919 - RNA, 23 nt, Human
ccuggcagcaaacgaggagguua

SEQ ID NO: 461920 - RNA, 22 nt, Human
uuugugaaaugaagucacaacu

SEQ ID NO: 461921 - RNA, 23 nt, Human
cccauuuucauguuaacuccugg

SEQ ID NO: 461922 - RNA, 21 nt, Human
ugugucacuaacuagaggcua

SEQ ID NO: 461923 - RNA, 22 nt, Human
gccuggucucuuucaugucagu

SEQ ID NO: 461924 - RNA, 22 nt, Human
acaagaauguagauuaguuaag

SEQ ID NO: 461925 - RNA, 22 nt, Human
agagcagauggagcuggaagag

SEQ ID NO: 461926 - RNA, 22 nt, Human
ugcauuguaggauguuuagcag

SEQ ID NO: 461927 - RNA, 22 nt, Human
acagcugugagggucacuugua

SEQ ID NO: 461928 - RNA, 22 nt, Human
agacaucagcuugugugcaggg

SEQ ID NO: 461929 - RNA, 22 nt, Human
uguacaaugccagggaacacca

SEQ ID NO: 461930 - RNA, 22 nt, Human
ccuacacaucucaccucacagg

SEQ ID NO: 461931 - RNA, 22 nt, Human
ugcagccaucuuucuuggagga

SEQ ID NO: 461932 - RNA, 22 nt, Human
ccugccugucaucgccugcgcc

SEQ ID NO: 461933 - RNA, 22 nt, Human
cacaggccugucucuuucuaac

SEQ ID NO: 461934 - RNA, 22 nt, Human
gugucacaagagcccaggaaac

SEQ ID NO: 461935 - RNA, 22 nt, Human
auguacauuuuccuaauguuuu

SEQ ID NO: 461936 - RNA, 22 nt, Human
aauguguacuuuuucaugcuca

SEQ ID NO: 461937 - RNA, 22 nt, Human
uuauuuucagcuaggaaagcca

SEQ ID NO: 461938 - RNA, 22 nt, Human
aucaguuuggugcuuucaguga

SEQ ID NO: 461939 - RNA, 23 nt, Human
cccugcagucagggugagauggu

SEQ ID NO: 461940 - RNA, 18 nt, Human
ccugagcccugcuuacuu

SEQ ID NO: 461941 - RNA, 22 nt, Human
agguacagaugaaagucuaguu

SEQ ID NO: 461942 - RNA, 19 nt, Human
uccugggcugggccagguc

SEQ ID NO: 461943 - RNA, 22 nt, Human
cugagccaugagccugcgccca

SEQ ID NO: 461944 - RNA, 22 nt, Human
uugaaaggguuaaagugguaaa

SEQ ID NO: 461945 - RNA, 22 nt, Human
aucuuucaguuucauaccaauu

SEQ ID NO: 461946 - RNA, 22 nt, Human
gccccagccaaggugacacgaa

SEQ ID NO: 461947 - RNA, 21 nt, Human
ccugagccuguuuauccagaa

SEQ ID NO: 461948 - RNA, 23 nt, Human
ugggccuggccucccaguccagc

SEQ ID NO: 461949 - RNA, 22 nt, Human
cuggcucauuuuagcaucaggu

SEQ ID NO: 461950 - RNA, 22 nt, Human
accugaggcuguuagucuaggu

SEQ ID NO: 461951 - RNA, 22 nt, Human
uaaggcacuucaauguuuagaa

SEQ ID NO: 461952 - RNA, 22 nt, Human
gcagcuuuggagguggaacucu

SEQ ID NO: 461953 - RNA, 22 nt, Human
ccccagccagcaggaccucuga

SEQ ID NO: 461954 - RNA, 22 nt, Human
aguuauuucaguaacauaauag

SEQ ID NO: 461955 - RNA, 22 nt, Human
aggaaacuguccccucauccua

SEQ ID NO: 461956 - RNA, 22 nt, Human
cagugcaguugguggcaggggu

SEQ ID NO: 461957 - RNA, 22 nt, Human
cagcugggagcuccauuagaua

SEQ ID NO: 461958 - RNA, 22 nt, Human
cuucuuaaugcauaaacugugu

SEQ ID NO: 461959 - RNA, 22 nt, Human
aacagaauugcugcugccaaug

SEQ ID NO: 461960 - RNA, 22 nt, Human
agggcugguauguccaugaaag

SEQ ID NO: 461961 - RNA, 22 nt, Human
acugucuguccugcucuccgug

SEQ ID NO: 461962 - RNA, 22 nt, Human
gacccggcuccaggcccagcag

SEQ ID NO: 461963 - RNA, 22 nt, Human
guccucuuagccacuuaauuau

SEQ ID NO: 461964 - RNA, 19 nt, Human
ggcucagggcgcugccgcc

SEQ ID NO: 461965 - RNA, 22 nt, Human
aucagaagcuuguagucucucu

SEQ ID NO: 461966 - RNA, 22 nt, Human
gccugaaguuucaugccucuau

SEQ ID NO: 461967 - RNA, 22 nt, Human
agccauggcgccacuagaggga

SEQ ID NO: 461968 - RNA, 22 nt, Human
cccacacauuuuucacuuaccg

SEQ ID NO: 461969 - RNA, 22 nt, Human
caaagucagccagcuaguaggu

SEQ ID NO: 461970 - RNA, 22 nt, Human
agccucugcuggcccuggcacu

SEQ ID NO: 461971 - RNA, 23 nt, Human
ucagaggaucaucaaacguuuuc

SEQ ID NO: 461972 - RNA, 22 nt, Human
ggucagagggugggcugccugu

SEQ ID NO: 461973 - RNA, 22 nt, Human
aagggcuggagacugggucuuc

SEQ ID NO: 461974 - RNA, 22 nt, Human
agcugccagaugacagugcuau

SEQ ID NO: 461975 - RNA, 22 nt, Human
aaccaggacaauuugaauagaa

SEQ ID NO: 461976 - RNA, 17 nt, Human
cuggagccuccaacucc

SEQ ID NO: 461977 - RNA, 22 nt, Human
gaagagcugacagugucauccu

SEQ ID NO: 461978 - RNA, 22 nt, Human
cucaggauugugccuagggaga

SEQ ID NO: 461979 - RNA, 22 nt, Human
cugcuuuguguggucccuccag

SEQ ID NO: 461980 - RNA, 22 nt, Human
cuguguccucccgcugcaccca

SEQ ID NO: 461981 - RNA, 22 nt, Human
agggcucuguccccagaggccc

SEQ ID NO: 461982 - RNA, 22 nt, Human
ccaggagcaggagcuggacaga

SEQ ID NO: 461983 - RNA, 22 nt, Human
ccagggcugguggcugcagagg

SEQ ID NO: 461984 - RNA, 22 nt, Human
agccugugugcuuuggacaggg

SEQ ID NO: 461985 - RNA, 22 nt, Human
cuacauuuuaauaagcugcuua

SEQ ID NO: 461986 - RNA, 22 nt, Human
gcagcaggcacggucucgacau

SEQ ID NO: 461987 - RNA, 22 nt, Human
ccugggcuuucaaaaccagccu

SEQ ID NO: 461988 - RNA, 22 nt, Human
agcaggcuaagggaccuguuua

SEQ ID NO: 461989 - RNA, 22 nt, Human
gcacccaguuugucucaggguu

SEQ ID NO: 461990 - RNA, 22 nt, Human
uuuauucuugagagugagaaga

SEQ ID NO: 461991 - RNA, 22 nt, Human
uauguacaugauuucauuugcu

SEQ ID NO: 461992 - RNA, 21 nt, Human
uaaauaauaaguugcugagau

SEQ ID NO: 461993 - RNA, 22 nt, Human
uacagagacuuuauggcacaaa

SEQ ID NO: 461994 - RNA, 20 nt, Human
ggcaccaggcuaggauugga

SEQ ID NO: 461995 - RNA, 22 nt, Human
ccacugagaccuuuuggaggag

SEQ ID NO: 461996 - RNA, 22 nt, Human
uccagcuuauagguagauuuaa

SEQ ID NO: 461997 - RNA, 19 nt, Human
gcugcuggcucuggcugga

SEQ ID NO: 461998 - RNA, 22 nt, Human
aggucauuuuugccuucuauuu

SEQ ID NO: 461999 - RNA, 22 nt, Human
augcugaauugaugcgagggag

SEQ ID NO: 462000 - RNA, 22 nt, Human
ccucaggggcuuuucguuguug

SEQ ID NO: 462001 - RNA, 22 nt, Human
aaggcaguagguguuucaaacu

SEQ ID NO: 462002 - RNA, 22 nt, Human
agaaaugcucuuccugaccaga

SEQ ID NO: 462003 - RNA, 22 nt, Human
gcuggccacacugcugauggag

SEQ ID NO: 462004 - RNA, 22 nt, Human
gccagcagguggagagaucaag

SEQ ID NO: 462005 - RNA, 22 nt, Human
cagcuccugccugggcagcugu

SEQ ID NO: 462006 - RNA, 16 nt, Human
gagaagagcccggcag

SEQ ID NO: 462007 - RNA, 22 nt, Human
aucacuguguauguauaugcag

SEQ ID NO: 462008 - RNA, 21 nt, Human
gggcaggucucugaugucaac

SEQ ID NO: 462009 - RNA, 22 nt, Human
uggccugccucccggcuucuuu

SEQ ID NO: 462010 - RNA, 22 nt, Human
ccugggaggcggagguugcagu

SEQ ID NO: 462011 - RNA, 22 nt, Human
cagaauaugacaagauuuuccu

SEQ ID NO: 462012 - RNA, 22 nt, Human
agcaggaaguagucuguaagca

SEQ ID NO: 462013 - RNA, 22 nt, Human
uucucuuaucuggcauuauugg

SEQ ID NO: 462014 - RNA, 22 nt, Human
ggcuucucucccccagcuccac

SEQ ID NO: 462015 - RNA, 22 nt, Human
aggaccauccuaagguaggcaa

SEQ ID NO: 462016 - RNA, 22 nt, Human
aguuacaaacacuaucaguucu

SEQ ID NO: 462017 - RNA, 22 nt, Human
ugugggcaggcccgggucugag

SEQ ID NO: 462018 - RNA, 22 nt, Human
uucaaaacagcuagauauugga

SEQ ID NO: 462019 - RNA, 22 nt, Human
caguagcauguaauaaagacag

SEQ ID NO: 462020 - RNA, 22 nt, Human
gacuucuauuaauaccucuacu

SEQ ID NO: 462021 - RNA, 22 nt, Human
uaaacaucugucauguguuuau

SEQ ID NO: 462022 - RNA, 22 nt, Human
ggguccagcgacagcaggcuca

SEQ ID NO: 462023 - RNA, 22 nt, Human
aaaucugguucaguaaguccuc

SEQ ID NO: 462024 - RNA, 19 nt, Human
ccaggccucuggggccugu

SEQ ID NO: 462025 - RNA, 22 nt, Human
aaagacugguguguuacauaua

SEQ ID NO: 462026 - RNA, 22 nt, Human
uccuugaaaaucuugguuuaga

SEQ ID NO: 462027 - RNA, 22 nt, Human
gggggaagaaagaacauggcau

SEQ ID NO: 462028 - RNA, 22 nt, Human
cugaaggacacgugaggagcca

SEQ ID NO: 462029 - RNA, 22 nt, Human
aguccagggcucucugugggau

SEQ ID NO: 462030 - RNA, 19 nt, Human
cagaggcaccagguauaga

SEQ ID NO: 462031 - RNA, 22 nt, Human
uaugaguacaaggacucugucu

SEQ ID NO: 462032 - RNA, 22 nt, Human
cccagcucugcagaccugcccu

SEQ ID NO: 462033 - RNA, 20 nt, Human
aggaacuggaagggaggaaa

SEQ ID NO: 462034 - RNA, 22 nt, Human
ggaggugaggccguagggugug

SEQ ID NO: 462035 - RNA, 22 nt, Human
auuuaugauuagccuauuguug

SEQ ID NO: 462036 - RNA, 22 nt, Human
ggcuucuguccucuggaucugu

SEQ ID NO: 462037 - RNA, 22 nt, Human
ccugcagcuguaggagaaggcg

SEQ ID NO: 462038 - RNA, 22 nt, Human
cagagaccccgcugcccuucug

SEQ ID NO: 462039 - RNA, 22 nt, Human
uccagugguacauggagacacu

SEQ ID NO: 462040 - RNA, 22 nt, Human
gcuucgggguccaagcgcgugu

SEQ ID NO: 462041 - RNA, 22 nt, Human
ggccuugguaaagggaugcaug

SEQ ID NO: 462042 - RNA, 22 nt, Human
cugaggcauguuacaggacaua

SEQ ID NO: 462043 - RNA, 17 nt, Human
auacaguuuauuuuaca

SEQ ID NO: 462044 - RNA, 22 nt, Human
ggcaggcuggcuuuguuccagg

SEQ ID NO: 462045 - RNA, 22 nt, Human
ucugugcucuucucaguaucac

SEQ ID NO: 462046 - RNA, 22 nt, Human
cauuuacagugagaguuuuuac

SEQ ID NO: 462047 - RNA, 22 nt, Human
cagaguguauucugcaguugca

SEQ ID NO: 462048 - RNA, 22 nt, Human
aaguucaagagugacauauuag

SEQ ID NO: 462049 - RNA, 22 nt, Human
ugccuuggugcuucuucaugug

SEQ ID NO: 462050 - RNA, 22 nt, Human
uagcagggaaggugugcugagc

SEQ ID NO: 462051 - RNA, 22 nt, Human
agucucagccacacagaccuau

SEQ ID NO: 462052 - RNA, 22 nt, Human
agcugccauccuguucagcacc

SEQ ID NO: 462053 - RNA, 22 nt, Human
agaagccagauuguagugggac

SEQ ID NO: 462054 - RNA, 22 nt, Human
cucaggaggugguagaggcccu

SEQ ID NO: 462055 - RNA, 22 nt, Human
gucuggaggaggaagaaggcac

SEQ ID NO: 462056 - RNA, 22 nt, Human
uuauuagguuuacauaaagguu

SEQ ID NO: 462057 - RNA, 22 nt, Human
cagaaauguuuauauguggugu

SEQ ID NO: 462058 - RNA, 22 nt, Human
ugaggccucauaaugagauuuc

SEQ ID NO: 462059 - RNA, 22 nt, Human
ugcagcugcuggcccaggugcu

SEQ ID NO: 462060 - RNA, 22 nt, Human
agcagggcugugcuccuuccga

SEQ ID NO: 462061 - RNA, 22 nt, Human
uauuauguagaguaaggguuaa

SEQ ID NO: 462062 - RNA, 22 nt, Human
cuccugagcucugaggaagcuu

SEQ ID NO: 462063 - RNA, 22 nt, Human
ucaggcugagaaaaucuggacc

SEQ ID NO: 462064 - RNA, 22 nt, Human
aaggagagguuguccguguugu

SEQ ID NO: 462065 - RNA, 22 nt, Human
uuugaacaagagcuucacauua

SEQ ID NO: 462066 - RNA, 22 nt, Human
uggaguucucaggugagggcuu

SEQ ID NO: 462067 - RNA, 22 nt, Human
gccagcugcuggaacagcgcga

SEQ ID NO: 462068 - RNA, 22 nt, Human
aguguuucuggcaaaugaaagu

SEQ ID NO: 462069 - RNA, 22 nt, Human
ugccaggccucaggagucucca

SEQ ID NO: 462070 - RNA, 22 nt, Human
aaacauuguaauuuuagcaugg

SEQ ID NO: 462071 - RNA, 22 nt, Human
gggcuucucccuaaggacucug

SEQ ID NO: 462072 - RNA, 22 nt, Human
uacaaagcuguauagccugguc

SEQ ID NO: 462073 - RNA, 22 nt, Human
ugucacaguuuguacuuuauag

SEQ ID NO: 462074 - RNA, 22 nt, Human
ggccucugguucguggugaccu

SEQ ID NO: 462075 - RNA, 22 nt, Human
cugccaaggcuggggaggacaa

SEQ ID NO: 462076 - RNA, 22 nt, Human
cugagccuuauucaccagcccu

SEQ ID NO: 462077 - RNA, 20 nt, Human
ucacuaguaaccaucugcuu

SEQ ID NO: 462078 - RNA, 22 nt, Human
gacaaaggaucagagguuggga

SEQ ID NO: 462079 - RNA, 22 nt, Human
uguacauuuagagcucaauaga

SEQ ID NO: 462080 - RNA, 22 nt, Human
uagaaauguuagauguauugag

SEQ ID NO: 462081 - RNA, 22 nt, Human
agggaguuagaaauccaggaua

SEQ ID NO: 462082 - RNA, 19 nt, Human
auuuccaagaauuggagag

SEQ ID NO: 462083 - RNA, 22 nt, Human
caaggccaagucucugugaaga

SEQ ID NO: 462084 - RNA, 20 nt, Human
ucugugugccaucaccuaac

SEQ ID NO: 462085 - RNA, 22 nt, Human
agcugcugaaugacacugcaag

SEQ ID NO: 462086 - RNA, 22 nt, Human
ggaggccaucuggcuggaggcu

SEQ ID NO: 462087 - RNA, 22 nt, Human
gggcucuguccauuccuucaua

SEQ ID NO: 462088 - RNA, 22 nt, Human
uuaaacagguuuuugaauggcc

SEQ ID NO: 462089 - RNA, 22 nt, Human
uggccugggccugccggugcaa

SEQ ID NO: 462090 - RNA, 22 nt, Human
ucuggccugggccugccggugc

SEQ ID NO: 462091 - RNA, 22 nt, Human
agcagcaugaugacagagucuc

SEQ ID NO: 462092 - RNA, 22 nt, Human
ggaggcucugcuccguguguuc

SEQ ID NO: 462093 - RNA, 22 nt, Human
gcauacagagaggauguggcau

SEQ ID NO: 462094 - RNA, 22 nt, Human
caggaggcagagguugcagcga

SEQ ID NO: 462095 - RNA, 22 nt, Human
guauccuuugcggaaauuucua

SEQ ID NO: 462096 - RNA, 22 nt, Human
ugaguucuaguggcugcagauu

SEQ ID NO: 462097 - RNA, 23 nt, Human
gggagaauaugaggaugauggug

SEQ ID NO: 462098 - RNA, 22 nt, Human
gggcugcuuuuaagggucucag

SEQ ID NO: 462099 - RNA, 22 nt, Human
guauuugauagauuucaaagga

SEQ ID NO: 462100 - RNA, 22 nt, Human
gcugcagcuguaggacacaauu

SEQ ID NO: 462101 - RNA, 22 nt, Human
ucuggcccagccccugagguca

SEQ ID NO: 462102 - RNA, 22 nt, Human
caugucuuauauccugucuuca

SEQ ID NO: 462103 - RNA, 22 nt, Human
cuacagaaaaucagccacaggc

SEQ ID NO: 462104 - RNA, 22 nt, Human
aaagccagugguaugagagaaa

SEQ ID NO: 462105 - RNA, 22 nt, Human
agagcuuauaucuuggccaucc

SEQ ID NO: 462106 - RNA, 22 nt, Human
uguugaagauaaaguucucauu

SEQ ID NO: 462107 - RNA, 22 nt, Human
uaagcaaauagcuagaucagag

SEQ ID NO: 462108 - RNA, 22 nt, Human
gccugagagacccauggggcaa

SEQ ID NO: 462109 - RNA, 22 nt, Human
uguauuuuuagaccuuuagacc

SEQ ID NO: 462110 - RNA, 22 nt, Human
guuucuuuugugaucaccaacc

SEQ ID NO: 462111 - RNA, 22 nt, Human
cagcuccagcccaggcagcucc

SEQ ID NO: 462112 - RNA, 22 nt, Human
ugagcagggacuuugaguguag

SEQ ID NO: 462113 - RNA, 22 nt, Human
gccuuugccugcgacguggcug

SEQ ID NO: 462114 - RNA, 22 nt, Human
aaagcccauguggaaguacagg

SEQ ID NO: 462115 - RNA, 22 nt, Human
acagagcacugcccugugccgc

SEQ ID NO: 462116 - RNA, 22 nt, Human
uggccagaaccugcaguaggcc

SEQ ID NO: 462117 - RNA, 22 nt, Human
gcauguuuugcaacaagugacc

SEQ ID NO: 462118 - RNA, 22 nt, Human
uugauacauagcacaguuuagg

SEQ ID NO: 462119 - RNA, 22 nt, Human
ucauuuguaccauuuuuuaaga

SEQ ID NO: 462120 - RNA, 22 nt, Human
gggagagagaaaacguggcgca

SEQ ID NO: 462121 - RNA, 22 nt, Human
gcagcagagaacacaaugaugg

SEQ ID NO: 462122 - RNA, 22 nt, Human
gucccuggaucugggacagcug

SEQ ID NO: 462123 - RNA, 22 nt, Human
agccuggccugggcaggcacau

SEQ ID NO: 462124 - RNA, 19 nt, Human
ccuuccuccccagggccau

SEQ ID NO: 462125 - RNA, 22 nt, Human
augugugccccuuuuacucuuu

SEQ ID NO: 462126 - RNA, 22 nt, Human
uagaaaugcaguguacuguguc

SEQ ID NO: 462127 - RNA, 22 nt, Human
uguacaugugucuguauaucuu

SEQ ID NO: 462128 - RNA, 22 nt, Human
agcagggcuccugaaagccgcg

SEQ ID NO: 462129 - RNA, 20 nt, Human
gaggcugcggacugcuggac

SEQ ID NO: 462130 - RNA, 22 nt, Human
uggcagagucaucacaucugga

SEQ ID NO: 462131 - RNA, 22 nt, Human
gaggaccacagaugagccugca

SEQ ID NO: 462132 - RNA, 22 nt, Human
gggggcuggacuuucccacaca

SEQ ID NO: 462133 - RNA, 22 nt, Human
agccacagcauguguguaugua

SEQ ID NO: 462134 - RNA, 22 nt, Human
ugguaaagaaggcuagaucuga

SEQ ID NO: 462135 - RNA, 22 nt, Human
ucuccuggucaccucagaaguc

SEQ ID NO: 462136 - RNA, 22 nt, Human
gagugcaguaucuucugugucc

SEQ ID NO: 462137 - RNA, 22 nt, Human
gcacagccacugagugagaacc

SEQ ID NO: 462138 - RNA, 22 nt, Human
gacuucaaaggucaaacaucgc

SEQ ID NO: 462139 - RNA, 22 nt, Human
accugagaaugggggcaugugu

SEQ ID NO: 462140 - RNA, 22 nt, Human
caggagugucuccacacagcaa

SEQ ID NO: 462141 - RNA, 22 nt, Human
augggcagcugcagcaguggug

SEQ ID NO: 462142 - RNA, 22 nt, Human
aggcucaguuugguuuccauug

SEQ ID NO: 462143 - RNA, 21 nt, Human
gggcagaggggccuccugggu

SEQ ID NO: 462144 - RNA, 22 nt, Human
aaauguucccaauaugaagcug

SEQ ID NO: 462145 - RNA, 22 nt, Human
augccuguaaucccagugcuuu

SEQ ID NO: 462146 - RNA, 22 nt, Human
gcagccucagggcacucagaug

SEQ ID NO: 462147 - RNA, 22 nt, Human
guuuacaacaucuuguccuuca

SEQ ID NO: 462148 - RNA, 22 nt, Human
cagacagaaggcuccuugaggu

SEQ ID NO: 462149 - RNA, 22 nt, Human
cuucuaggcuucucagggggca

SEQ ID NO: 462150 - RNA, 22 nt, Human
acucugccaucccaggugcugu

SEQ ID NO: 462151 - RNA, 22 nt, Human
uuguugucauuguagaggauuu

SEQ ID NO: 462152 - RNA, 22 nt, Human
ucagcuuuuuggauugcccaag

SEQ ID NO: 462153 - RNA, 22 nt, Human
ugcagcuucuuguccugugauu

SEQ ID NO: 462154 - RNA, 18 nt, Human
uuaagagcugaaagggga

SEQ ID NO: 462155 - RNA, 22 nt, Human
uggagccauaacccuuucguac

SEQ ID NO: 462156 - RNA, 22 nt, Human
uccugaaaaauuacauguucag

SEQ ID NO: 462157 - RNA, 22 nt, Human
aucaguuuauacuuauaaaucu

SEQ ID NO: 462158 - RNA, 22 nt, Human
cugggcacagcguugggcucuu

SEQ ID NO: 462159 - RNA, 22 nt, Human
ugugaaagucaaauuaauugaa

SEQ ID NO: 462160 - RNA, 22 nt, Human
caggcagggagcuggaaaggau

SEQ ID NO: 462161 - RNA, 19 nt, Human
guagggacagugguucuga

SEQ ID NO: 462162 - RNA, 22 nt, Human
acauuucucagggaguuuugcu

SEQ ID NO: 462163 - RNA, 22 nt, Human
auugaaaaauucacaauucugg

SEQ ID NO: 462164 - RNA, 22 nt, Human
ugccugggguuggcaaacugcu

SEQ ID NO: 462165 - RNA, 22 nt, Human
agcugguucauucauucauggu

SEQ ID NO: 462166 - RNA, 22 nt, Human
gcaggaguuaggcgucguggau

SEQ ID NO: 462167 - RNA, 22 nt, Human
acaguggaguugggguagcccu

SEQ ID NO: 462168 - RNA, 22 nt, Human
aacacaaagaagcugcaggauc

SEQ ID NO: 462169 - RNA, 22 nt, Human
uggcccugacuuggaggccuga

SEQ ID NO: 462170 - RNA, 21 nt, Human
cugccuugaaugguacuggga

SEQ ID NO: 462171 - RNA, 22 nt, Human
caagagcucagaaacccuugcu

SEQ ID NO: 462172 - RNA, 22 nt, Human
acuggacagaggaaauauggag

SEQ ID NO: 462173 - RNA, 22 nt, Human
caggcugaucagggcugggaug

SEQ ID NO: 462174 - RNA, 22 nt, Human
uacuuugucauucuaaccuucc

SEQ ID NO: 462175 - RNA, 22 nt, Human
uuugacaggacuaacauauggc

SEQ ID NO: 462176 - RNA, 22 nt, Human
agggcaugugggagaggagccu

SEQ ID NO: 462177 - RNA, 22 nt, Human
auguccagagccggccugcuga

SEQ ID NO: 462178 - RNA, 22 nt, Human
aaaugcacagagccuuagagau

SEQ ID NO: 462179 - RNA, 22 nt, Human
agcugggccugagcuggaagcu

SEQ ID NO: 462180 - RNA, 22 nt, Human
uaacagaaauauuuccagguga

SEQ ID NO: 462181 - RNA, 22 nt, Human
uugccucccagcaugggcagcu

SEQ ID NO: 462182 - RNA, 22 nt, Human
cugucccagauguucucagcac

SEQ ID NO: 462183 - RNA, 22 nt, Human
gccuggugguauccuggcaaga

SEQ ID NO: 462184 - RNA, 22 nt, Human
agauacauauagaaaacaucaa

SEQ ID NO: 462185 - RNA, 19 nt, Human
agugaaauggaguauucaa

SEQ ID NO: 462186 - RNA, 22 nt, Human
agagugaaguaauuguuaggau

SEQ ID NO: 462187 - RNA, 22 nt, Human
ggagcugucuguagggcacagg

SEQ ID NO: 462188 - RNA, 22 nt, Human
acaggugugagaacaugccuug

SEQ ID NO: 462189 - RNA, 22 nt, Human
uguauuuuuaggaaugcgcuau

SEQ ID NO: 462190 - RNA, 22 nt, Human
ucuuggagaauggcagagaagc

SEQ ID NO: 462191 - RNA, 22 nt, Human
uucacaggaauguaggggucuu

SEQ ID NO: 462192 - RNA, 22 nt, Human
cccugcagugugaccucaccua

SEQ ID NO: 462193 - RNA, 22 nt, Human
ucuuacauauagcaugaguaca

SEQ ID NO: 462194 - RNA, 22 nt, Human
caugaagcuugaagcaguccac

SEQ ID NO: 462195 - RNA, 22 nt, Human
ccagucacagguguguuuauau

SEQ ID NO: 462196 - RNA, 22 nt, Human
cuggcugggagcgagcugcuca

SEQ ID NO: 462197 - RNA, 22 nt, Human
gcagagccaggagagacccuug

SEQ ID NO: 462198 - RNA, 22 nt, Human
acauacuuuuuaaaagauugcu

SEQ ID NO: 462199 - RNA, 22 nt, Human
uuucaguggguuuauuucaugu

SEQ ID NO: 462200 - RNA, 18 nt, Human
gcugagguggugucagag

SEQ ID NO: 462201 - RNA, 22 nt, Human
gggucccaggaaggagcagugu

SEQ ID NO: 462202 - RNA, 22 nt, Human
gcuggccuuugaggaagcugcg

SEQ ID NO: 462203 - RNA, 22 nt, Human
gccaggcucucagugacugccc

SEQ ID NO: 462204 - RNA, 22 nt, Human
gccugccugcugucaucugccu

SEQ ID NO: 462205 - RNA, 22 nt, Human
auggauaagucaaagaguaucc

SEQ ID NO: 462206 - RNA, 22 nt, Human
uauuaggguuuugaagguuugu

SEQ ID NO: 462207 - RNA, 22 nt, Human
uccagggcuuggcugggacggu

SEQ ID NO: 462208 - RNA, 22 nt, Human
auuuguagugaagugaaaauaa

SEQ ID NO: 462209 - RNA, 22 nt, Human
gaggcuggugguuaguuccauu

SEQ ID NO: 462210 - RNA, 22 nt, Human
cagccugacaccagcuuugggc

SEQ ID NO: 462211 - RNA, 17 nt, Human
uuccucucacauuuuuu

SEQ ID NO: 462212 - RNA, 22 nt, Human
ccuccaaguuugacucaggaca

SEQ ID NO: 462213 - RNA, 22 nt, Human
gugcugaguagaaugaaugccu

SEQ ID NO: 462214 - RNA, 22 nt, Human
agggagcuguggucagcucagu

SEQ ID NO: 462215 - RNA, 22 nt, Human
aggggcaguuccaaguuuugug

SEQ ID NO: 462216 - RNA, 22 nt, Human
gcagguggagcaguagucuggu

SEQ ID NO: 462217 - RNA, 17 nt, Human
gcuuuggaaggguagac

SEQ ID NO: 462218 - RNA, 22 nt, Human
uauaauuuggggaaaguggugu

SEQ ID NO: 462219 - RNA, 22 nt, Human
ugaagccacacuagcuuguccu

SEQ ID NO: 462220 - RNA, 22 nt, Human
gccaggugggagacagacagca

SEQ ID NO: 462221 - RNA, 21 nt, Human
uuugcauuuuacaugugggga

SEQ ID NO: 462222 - RNA, 22 nt, Human
cugucaccuguucacugcagca

SEQ ID NO: 462223 - RNA, 22 nt, Human
acaugucaauuuaguacucuua

SEQ ID NO: 462224 - RNA, 22 nt, Human
cagggagcuggugccagccgac

SEQ ID NO: 462225 - RNA, 22 nt, Human
uuuccuucaucaucugagagcu

SEQ ID NO: 462226 - RNA, 22 nt, Human
uccaggcuggccucgcgugaca

SEQ ID NO: 462227 - RNA, 22 nt, Human
acaugcauucucuaaaagcaaa

SEQ ID NO: 462228 - RNA, 22 nt, Human
aucuggcucccuuggaauccgu

SEQ ID NO: 462229 - RNA, 22 nt, Human
ucucuuaauaaguaaauacuga

SEQ ID NO: 462230 - RNA, 22 nt, Human
ugggauggagccugaguauagu

SEQ ID NO: 462231 - RNA, 22 nt, Human
gcugcccugugguccagcaggu

SEQ ID NO: 462232 - RNA, 22 nt, Human
agccacaggaaacagagacagc

SEQ ID NO: 462233 - RNA, 22 nt, Human
guuugcauggaagacagugagu

SEQ ID NO: 462234 - RNA, 22 nt, Human
ccucaggcuuacgggcaaugga

SEQ ID NO: 462235 - RNA, 22 nt, Human
guacucaguaauauaacauauu

SEQ ID NO: 462236 - RNA, 22 nt, Human
cagcucugugcaggccugggga

SEQ ID NO: 462237 - RNA, 22 nt, Human
ugaaagguuauuuaggucugcu

SEQ ID NO: 462238 - RNA, 22 nt, Human
ucagaggucacacagcaaguuu

SEQ ID NO: 462239 - RNA, 22 nt, Human
uuccucuuucucugugcuaugu

SEQ ID NO: 462240 - RNA, 22 nt, Human
aaugauauagcagacauagccu

SEQ ID NO: 462241 - RNA, 22 nt, Human
ucucagagggaggauuacugcc

SEQ ID NO: 462242 - RNA, 22 nt, Human
ugcagcuccucuggcugccuga

SEQ ID NO: 462243 - RNA, 22 nt, Human
uggcugagaaaaugguuuuagg

SEQ ID NO: 462244 - RNA, 23 nt, Human
agcagugaguaaacagauaggau

SEQ ID NO: 462245 - RNA, 22 nt, Human
aggcaguuuaggcagcgauuua

SEQ ID NO: 462246 - RNA, 23 nt, Human
cuugcagggcuggaggcuuagaa

SEQ ID NO: 462247 - RNA, 22 nt, Human
ugaagacagaccaaggagaaug

SEQ ID NO: 462248 - RNA, 22 nt, Human
uagacacaucaaguauaguuaa

SEQ ID NO: 462249 - RNA, 22 nt, Human
cuuagggagaaugccucugcag

SEQ ID NO: 462250 - RNA, 22 nt, Human
gcccagcugcacccuggugggu

SEQ ID NO: 462251 - RNA, 22 nt, Human
agcuuuaugaggagaccuuagu

SEQ ID NO: 462252 - RNA, 22 nt, Human
gcagggcagcucacugugguuc

SEQ ID NO: 462253 - RNA, 22 nt, Human
cucuggagguugagcccagcaa

SEQ ID NO: 462254 - RNA, 22 nt, Human
auauguguauuugguuagccua

SEQ ID NO: 462255 - RNA, 22 nt, Human
uuccauaauuaaguggagagaa

SEQ ID NO: 462256 - RNA, 22 nt, Human
agggccagggaagcuguauuuu

SEQ ID NO: 462257 - RNA, 22 nt, Human
uugaaggacaucuuguuucuag

SEQ ID NO: 462258 - RNA, 22 nt, Human
ccucaggguggcaucagaucuu

SEQ ID NO: 462259 - RNA, 22 nt, Human
uaauuuaauuucaugccagccu

SEQ ID NO: 462260 - RNA, 22 nt, Human
uccugggagagugggacuguau

SEQ ID NO: 462261 - RNA, 22 nt, Human
ucagguggcuuggagggggacg

SEQ ID NO: 462262 - RNA, 22 nt, Human
ugccacccagccaggaguggga

SEQ ID NO: 462263 - RNA, 22 nt, Human
aagcugccuuccaugugaggaa

SEQ ID NO: 462264 - RNA, 16 nt, Human
cagcuuuaugucagug

SEQ ID NO: 462265 - RNA, 22 nt, Human
ucagggcaccaaaaaagaugcc

SEQ ID NO: 462266 - RNA, 22 nt, Human
acuuccugcagcuucucagccc

SEQ ID NO: 462267 - RNA, 22 nt, Human
gucaggggccaugggccaagga

SEQ ID NO: 462268 - RNA, 22 nt, Human
gcuguucccauguggggcucag

SEQ ID NO: 462269 - RNA, 22 nt, Human
cccacucuggcucccuucuagu

SEQ ID NO: 462270 - RNA, 22 nt, Human
uggcucaguuugggggauugaa

SEQ ID NO: 462271 - RNA, 22 nt, Human
cuggagagaccgaaagaggcug

SEQ ID NO: 462272 - RNA, 22 nt, Human
cacugggcguguccugggugag

SEQ ID NO: 462273 - RNA, 22 nt, Human
cuggagcucuccagagccccgu

SEQ ID NO: 462274 - RNA, 22 nt, Human
cagggccaggcugauggccugg

SEQ ID NO: 462275 - RNA, 22 nt, Human
gcugggcuugguuucccugcuu

SEQ ID NO: 462276 - RNA, 22 nt, Human
gacccagaaggagugcccuaga

SEQ ID NO: 462277 - RNA, 22 nt, Human
ggaaggaggaugcucuggccuu

SEQ ID NO: 462278 - RNA, 22 nt, Human
ugcauauugugaaaauguagau

SEQ ID NO: 462279 - RNA, 22 nt, Human
ggguccagaguugaagagguua

SEQ ID NO: 462280 - RNA, 22 nt, Human
ugggcuggcccaccacaccucg

SEQ ID NO: 462281 - RNA, 22 nt, Human
ggcuuuauuaagcaggguaagu

SEQ ID NO: 462282 - RNA, 22 nt, Human
aagggccauaacuugcaguguu

SEQ ID NO: 462283 - RNA, 22 nt, Human
ugcccaggguggagugcagcgg

SEQ ID NO: 462284 - RNA, 22 nt, Human
ggcugccugaggcugaggcccg

SEQ ID NO: 462285 - RNA, 22 nt, Human
cuggcugccacuucagggucuu

SEQ ID NO: 462286 - RNA, 22 nt, Human
ucccagagucagagguggggcc

SEQ ID NO: 462287 - RNA, 22 nt, Human
acacuuuacagcuuccuuugca

SEQ ID NO: 462288 - RNA, 22 nt, Human
agaaaguucugugaguuguuca

SEQ ID NO: 462289 - RNA, 21 nt, Human
agcagcugggcaacauggagg

SEQ ID NO: 462290 - RNA, 22 nt, Human
aggaccugacauuguguuuucu

SEQ ID NO: 462291 - RNA, 20 nt, Human
gagggcaggcacccauuuca

SEQ ID NO: 462292 - RNA, 22 nt, Human
cccugaggggaguggugaggug

SEQ ID NO: 462293 - RNA, 22 nt, Human
caaagguaguauauauauuguu

SEQ ID NO: 462294 - RNA, 22 nt, Human
uccucagacuucccuuugugua

SEQ ID NO: 462295 - RNA, 22 nt, Human
ccagagcugcauccagcagguu

SEQ ID NO: 462296 - RNA, 22 nt, Human
guguccuuauaagaagagaugc

SEQ ID NO: 462297 - RNA, 22 nt, Human
uaggaaaaauacagaauuauau

SEQ ID NO: 462298 - RNA, 22 nt, Human
caaaggcaguuacugaaugaag

SEQ ID NO: 462299 - RNA, 22 nt, Human
ugauuucaaguagugacaugcu

SEQ ID NO: 462300 - RNA, 22 nt, Human
gguggaaggccuggaaggaggc

SEQ ID NO: 462301 - RNA, 22 nt, Human
aaggacuccaauucuuucaucu

SEQ ID NO: 462302 - RNA, 22 nt, Human
uccaagggcagccauagaacuu

SEQ ID NO: 462303 - RNA, 22 nt, Human
ccugccagucacuaugucaccu

SEQ ID NO: 462304 - RNA, 22 nt, Human
uccugagagcagaguccaggug

SEQ ID NO: 462305 - RNA, 22 nt, Human
uggcucagcauucacuggucuu

SEQ ID NO: 462306 - RNA, 18 nt, Human
gcaggagauggguggggu

SEQ ID NO: 462307 - RNA, 22 nt, Human
gcuggcagggacagcugcgugu

SEQ ID NO: 462308 - RNA, 22 nt, Human
ucugugacuugcgggaggagaa

SEQ ID NO: 462309 - RNA, 22 nt, Human
ugagccugguugcagugucugg

SEQ ID NO: 462310 - RNA, 22 nt, Human
ugacaccacaacuagccauuga

SEQ ID NO: 462311 - RNA, 22 nt, Human
ucaaauguucccuguacuggcc

SEQ ID NO: 462312 - RNA, 22 nt, Human
gccagagcagaauagaguggcc

SEQ ID NO: 462313 - RNA, 22 nt, Human
caguuuuuagauuaguuggugg

SEQ ID NO: 462314 - RNA, 22 nt, Human
aaaugcaauuguauguacucca

SEQ ID NO: 462315 - RNA, 22 nt, Human
aaaguguugggauuacaggugu

SEQ ID NO: 462316 - RNA, 22 nt, Human
gaggacaggagacucacuguuu

SEQ ID NO: 462317 - RNA, 22 nt, Human
gcucccagcauugcugcugaau

SEQ ID NO: 462318 - RNA, 22 nt, Human
gcucaggaaggcucaaccagga

SEQ ID NO: 462319 - RNA, 22 nt, Human
uacauaguuccauuuacaggaa

SEQ ID NO: 462320 - RNA, 22 nt, Human
gugccugggguugagcuaugaa

SEQ ID NO: 462321 - RNA, 22 nt, Human
ucagaagcauguggggagccug

SEQ ID NO: 462322 - RNA, 18 nt, Human
augggaggggccaagaga

SEQ ID NO: 462323 - RNA, 22 nt, Human
uaggugucugcucuuauuuaac

SEQ ID NO: 462324 - RNA, 22 nt, Human
augaggcaggagugcaguggca

SEQ ID NO: 462325 - RNA, 19 nt, Human
uccugcagaccagaccugu

SEQ ID NO: 462326 - RNA, 22 nt, Human
acagcagcacuauugacauuuu

SEQ ID NO: 462327 - RNA, 22 nt, Human
gcuguccagagcaugggagcaa

SEQ ID NO: 462328 - RNA, 22 nt, Human
cuuauaguaugauguugagaau

SEQ ID NO: 462329 - RNA, 22 nt, Human
aagggcugcauuugauguguca

SEQ ID NO: 462330 - RNA, 22 nt, Human
acagcagcuaaaggugucuccu

SEQ ID NO: 462331 - RNA, 22 nt, Human
ucuuugucugaacagggacauu

SEQ ID NO: 462332 - RNA, 22 nt, Human
ccugaagcaaggguaggcaggu

SEQ ID NO: 462333 - RNA, 22 nt, Human
ucaccagucuuucuuaccauug

SEQ ID NO: 462334 - RNA, 22 nt, Human
uaaaaucauucuggugucagua

SEQ ID NO: 462335 - RNA, 22 nt, Human
ugcagagguguugcugagauaa

SEQ ID NO: 462336 - RNA, 22 nt, Human
aggggaaggccagccuguagag

SEQ ID NO: 462337 - RNA, 22 nt, Human
cagggccauuggcguggcuguc

SEQ ID NO: 462338 - RNA, 22 nt, Human
ggcuggagauaugucuggaaca

SEQ ID NO: 462339 - RNA, 22 nt, Human
aggccucuucagggagcaugga

SEQ ID NO: 462340 - RNA, 22 nt, Human
uguuaacaucuuggacucguga

SEQ ID NO: 462341 - RNA, 22 nt, Human
cugcagggcagggccuccuggc

SEQ ID NO: 462342 - RNA, 22 nt, Human
ccagcugcaggggagcagugga

SEQ ID NO: 462343 - RNA, 22 nt, Human
uggcagaaagaaccaugugcaa

SEQ ID NO: 462344 - RNA, 22 nt, Human
cacugcccagcgucuuaggcac

SEQ ID NO: 462345 - RNA, 22 nt, Human
uggggacacagagccaaacuau

SEQ ID NO: 462346 - RNA, 22 nt, Human
acacauaugguugcugcaguga

SEQ ID NO: 462347 - RNA, 22 nt, Human
ugaggcaggaugcuugcacagg

SEQ ID NO: 462348 - RNA, 22 nt, Human
ugcagggaaagggcacugggcu

SEQ ID NO: 462349 - RNA, 22 nt, Human
gugccaggcccagggagcgggg

SEQ ID NO: 462350 - RNA, 22 nt, Human
ugaaggcccagccacagaaugg

SEQ ID NO: 462351 - RNA, 22 nt, Human
ucagagaaguaagguggggugc

SEQ ID NO: 462352 - RNA, 22 nt, Human
gccaggcauucuagaaguagug

SEQ ID NO: 462353 - RNA, 22 nt, Human
accaggcuggagugcaguggcg

SEQ ID NO: 462354 - RNA, 22 nt, Human
cagcuggaugggagaccauguu

SEQ ID NO: 462355 - RNA, 22 nt, Human
cugaaggaagcagguggccugu

SEQ ID NO: 462356 - RNA, 22 nt, Human
uggcuggcuuguucacugacug

SEQ ID NO: 462357 - RNA, 22 nt, Human
caaugauucugcaacugugugc

SEQ ID NO: 462358 - RNA, 22 nt, Human
gauacaaauucaugucugaauu

SEQ ID NO: 462359 - RNA, 22 nt, Human
gggcuggaggugagcaggacag

SEQ ID NO: 462360 - RNA, 22 nt, Human
aagcugcccucauucccagugc

SEQ ID NO: 462361 - RNA, 22 nt, Human
ucucccaggcuggagugcagug

SEQ ID NO: 462362 - RNA, 22 nt, Human
aagaugauguuguguuuucacu

SEQ ID NO: 462363 - RNA, 22 nt, Human
gaagcagcuuucuggugaggag

SEQ ID NO: 462364 - RNA, 22 nt, Human
aaacaucauaggcaugcaugau

SEQ ID NO: 462365 - RNA, 22 nt, Human
ucccaggaaaacacucgaggac

SEQ ID NO: 462366 - RNA, 22 nt, Human
guugaaaguagaugcuauuugg

SEQ ID NO: 462367 - RNA, 22 nt, Human
augaggcagauguugcaugagg

SEQ ID NO: 462368 - RNA, 22 nt, Human
caggccugggcuucggggcuga

SEQ ID NO: 462369 - RNA, 22 nt, Human
acacagggucuagaguuaggcc

SEQ ID NO: 462370 - RNA, 22 nt, Human
acagcugugaaaauccacagga

SEQ ID NO: 462371 - RNA, 22 nt, Human
ucacauuuauuucaaaguuacu

SEQ ID NO: 462372 - RNA, 22 nt, Human
caggaguggugugagggacucc

SEQ ID NO: 462373 - RNA, 22 nt, Human
uuuuauuaucuuugaaugggac

SEQ ID NO: 462374 - RNA, 22 nt, Human
aggcacagcacaccuggccccc

SEQ ID NO: 462375 - RNA, 22 nt, Human
gaggccacagcuaucagggaca

SEQ ID NO: 462376 - RNA, 22 nt, Human
cagaggcuaagaugagugggug

SEQ ID NO: 462377 - RNA, 22 nt, Human
ggauggcagucugcaugagaaa

SEQ ID NO: 462378 - RNA, 22 nt, Human
cacuuggaggaaggccuauuca

SEQ ID NO: 462379 - RNA, 22 nt, Human
ugggcagacugagcccuguccc

SEQ ID NO: 462380 - RNA, 21 nt, Human
aggcagaaagagcccaggcug

SEQ ID NO: 462381 - RNA, 22 nt, Human
aaauuagucgguuuaggaauuu

SEQ ID NO: 462382 - RNA, 22 nt, Human
ucagagugcagcgggaggcugg

SEQ ID NO: 462383 - RNA, 22 nt, Human
uaaaugugaccuucauuuuaua

SEQ ID NO: 462384 - RNA, 22 nt, Human
cccuggagggacagcugcucua

SEQ ID NO: 462385 - RNA, 22 nt, Human
uaggcagaaaggaaggcaaguu

SEQ ID NO: 462386 - RNA, 18 nt, Human
uucagcagcagacacacu

SEQ ID NO: 462387 - RNA, 22 nt, Human
ucagaggaacacuguuucaugc

SEQ ID NO: 462388 - RNA, 22 nt, Human
ugucccagauacuggacauaga

SEQ ID NO: 462389 - RNA, 21 nt, Human
acagaguaguugaaacagaga

SEQ ID NO: 462390 - RNA, 22 nt, Human
ucuucaaauccuacagugucug

SEQ ID NO: 462391 - RNA, 22 nt, Human
agaggccuaauugcuacccuuu

SEQ ID NO: 462392 - RNA, 22 nt, Human
aauuaacaaauguagcugugau

SEQ ID NO: 462393 - RNA, 22 nt, Human
cuuccucccccacacacucacu

SEQ ID NO: 462394 - RNA, 22 nt, Human
ucccuuaaaacucauguguugu

SEQ ID NO: 462395 - RNA, 22 nt, Human
cugggccucaaucucagaguuu

SEQ ID NO: 462396 - RNA, 22 nt, Human
uauacuuuccugcaacuuugau

SEQ ID NO: 462397 - RNA, 22 nt, Human
gaggaggaaguucucuguaggc

SEQ ID NO: 462398 - RNA, 22 nt, Human
cauaucccauuggccaggacau

SEQ ID NO: 462399 - RNA, 20 nt, Human
uucuuaaagaccucacuuug

SEQ ID NO: 462400 - RNA, 22 nt, Human
ucucccagaggaucccagugga

SEQ ID NO: 462401 - RNA, 17 nt, Human
uccuucagggccucaca

SEQ ID NO: 462402 - RNA, 22 nt, Human
uccagagccuauauguucaacu

SEQ ID NO: 462403 - RNA, 22 nt, Human
aggagcuggaguccaggcaagu

SEQ ID NO: 462404 - RNA, 22 nt, Human
auuuaugacuggugaauagaac

SEQ ID NO: 462405 - RNA, 22 nt, Human
ggcugccaggagaagcucagug

SEQ ID NO: 462406 - RNA, 22 nt, Human
ugagaaccaugaaaagcuguca

SEQ ID NO: 462407 - RNA, 22 nt, Human
ugauuucccucaucauaacaga

SEQ ID NO: 462408 - RNA, 22 nt, Human
uacacacagaggccaugggauu

SEQ ID NO: 462409 - RNA, 22 nt, Human
agcugggaugauaaccucaguc

SEQ ID NO: 462410 - RNA, 22 nt, Human
ugacagcugagccccaggcaag

SEQ ID NO: 462411 - RNA, 20 nt, Human
auaaaauaacugccacaaga

SEQ ID NO: 462412 - RNA, 18 nt, Human
aagaacugagguccuaga

SEQ ID NO: 462413 - RNA, 22 nt, Human
aaguggagagcccuggaggucu

SEQ ID NO: 462414 - RNA, 22 nt, Human
gggcuggugaggcugcccugca

SEQ ID NO: 462415 - RNA, 22 nt, Human
ucacgagaggcacagaauagag

SEQ ID NO: 462416 - RNA, 22 nt, Human
ggaggugguggcagugacaauu

SEQ ID NO: 462417 - RNA, 22 nt, Human
cuggcaggucucgcugacgugu

SEQ ID NO: 462418 - RNA, 17 nt, Human
acaggccugcuugcacu

SEQ ID NO: 462419 - RNA, 22 nt, Human
ccuuuggguucaaucucggucu

SEQ ID NO: 462420 - RNA, 22 nt, Human
auguccagggcacacagcagug

SEQ ID NO: 462421 - RNA, 22 nt, Human
ucagcuuuuaaaaacaagaagu

SEQ ID NO: 462422 - RNA, 22 nt, Human
cucuuuccaggguaccccaggu

SEQ ID NO: 462423 - RNA, 22 nt, Human
acaauucucucauaucuuauua

SEQ ID NO: 462424 - RNA, 22 nt, Human
aggcucugguuggcaaguaaag

SEQ ID NO: 462425 - RNA, 22 nt, Human
ugggcugaguguggaacuaguu

SEQ ID NO: 462426 - RNA, 22 nt, Human
ccagagccccugagcuucccug

SEQ ID NO: 462427 - RNA, 22 nt, Human
cucugagcuccuggaagcgugc

SEQ ID NO: 462428 - RNA, 22 nt, Human
uugucuuaaauggauggacaau

SEQ ID NO: 462429 - RNA, 21 nt, Human
uggcucugcucagagcagucc

SEQ ID NO: 462430 - RNA, 22 nt, Human
ugggcugcagggguugagagcu

SEQ ID NO: 462431 - RNA, 22 nt, Human
agaccgagaaguucuccaggcc

SEQ ID NO: 462432 - RNA, 22 nt, Human
uugagaagaggcuuuguaggaa

SEQ ID NO: 462433 - RNA, 22 nt, Human
auugcacaaacacagucagacu

SEQ ID NO: 462434 - RNA, 22 nt, Human
gcugagaguccaggaaaacauc

SEQ ID NO: 462435 - RNA, 22 nt, Human
gcagaggagaugaagauacuuu

SEQ ID NO: 462436 - RNA, 22 nt, Human
ugugaaggcagcagcucugucc

SEQ ID NO: 462437 - RNA, 22 nt, Human
gaaagccaucuggcugcuggga

SEQ ID NO: 462438 - RNA, 22 nt, Human
acgugcaggaucugguuggcga

SEQ ID NO: 462439 - RNA, 22 nt, Human
ccugugaggucaucugugguaa

SEQ ID NO: 462440 - RNA, 20 nt, Human
agagccuggaaaaagacauc

SEQ ID NO: 462441 - RNA, 22 nt, Human
cuuauguaaaacggaaagggaa

SEQ ID NO: 462442 - RNA, 22 nt, Human
cuacauuaaauuggcuuacuua

SEQ ID NO: 462443 - RNA, 22 nt, Human
uguaguaagugcgcaauaaaua

SEQ ID NO: 462444 - RNA, 20 nt, Human
ugcuggggacauacagggug

SEQ ID NO: 462445 - RNA, 22 nt, Human
uagaaaagaauuuuauuugaua

SEQ ID NO: 462446 - RNA, 22 nt, Human
caggccuggcccccggcacacc

SEQ ID NO: 462447 - RNA, 22 nt, Human
aagaguuaagcaacagauacca

SEQ ID NO: 462448 - RNA, 22 nt, Human
cuccuguauguugggcuucaca

SEQ ID NO: 462449 - RNA, 22 nt, Human
agccccugggaguagcugcugc

SEQ ID NO: 462450 - RNA, 22 nt, Human
ugggcugcugagaaugagagag

SEQ ID NO: 462451 - RNA, 22 nt, Human
caggggacauuaaagcuccaua

SEQ ID NO: 462452 - RNA, 22 nt, Human
ugaggcagguggauuacaaggu

SEQ ID NO: 462453 - RNA, 22 nt, Human
cuggcagcuuagcacucugguu

SEQ ID NO: 462454 - RNA, 19 nt, Human
uuugaaagaguuuuauugg

SEQ ID NO: 462455 - RNA, 22 nt, Human
aagagcauauuaauaguggaga

SEQ ID NO: 462456 - RNA, 22 nt, Human
accaucagucacauguagagaa

SEQ ID NO: 462457 - RNA, 22 nt, Human
uagagcuggaaaacugcaggua

SEQ ID NO: 462458 - RNA, 22 nt, Human
gcagucaguaaggcagccagaa

SEQ ID NO: 462459 - RNA, 21 nt, Human
gagacagcccagugccagggc

SEQ ID NO: 462460 - RNA, 22 nt, Human
cugcuuuguggaaucacacugg

SEQ ID NO: 462461 - RNA, 22 nt, Human
gauuucuucauucauuagaugg

SEQ ID NO: 462462 - RNA, 22 nt, Human
cagcugagaagugauagcugca

SEQ ID NO: 462463 - RNA, 22 nt, Human
auucuguauuucuaauaagauc

SEQ ID NO: 462464 - RNA, 22 nt, Human
ccacagagacagagcccagggu

SEQ ID NO: 462465 - RNA, 22 nt, Human
ugggcagaguugugaugaacug

SEQ ID NO: 462466 - RNA, 22 nt, Human
agauuucaaugugagcauuagu

SEQ ID NO: 462467 - RNA, 22 nt, Human
gcagcuggggaggucgugggga

SEQ ID NO: 462468 - RNA, 22 nt, Human
ugcagggcagauaugacuguag

SEQ ID NO: 462469 - RNA, 22 nt, Human
ucugaaaugcaggcaauuugcu

SEQ ID NO: 462470 - RNA, 19 nt, Human
agugguagaugagcaggag

SEQ ID NO: 462471 - RNA, 22 nt, Human
gcagggcucaacaggacacccc

SEQ ID NO: 462472 - RNA, 22 nt, Human
gaagcagcaaaucugcaguauc

SEQ ID NO: 462473 - RNA, 22 nt, Human
gggcucugguacuuccuggcuc

SEQ ID NO: 462474 - RNA, 22 nt, Human
cucagagaaaaggagcaagggu

SEQ ID NO: 462475 - RNA, 22 nt, Human
ccguggaguugugcugaguaug

SEQ ID NO: 462476 - RNA, 22 nt, Human
gacaucauagggugggaggaaa

SEQ ID NO: 462477 - RNA, 22 nt, Human
caggucagaggcgcagccccca

SEQ ID NO: 462478 - RNA, 21 nt, Human
gccuggcagguggaagggcuc

SEQ ID NO: 462479 - RNA, 17 nt, Human
agcugccagggagugug

SEQ ID NO: 462480 - RNA, 22 nt, Human
cagggcuccccgcaccgcagcc

SEQ ID NO: 462481 - RNA, 22 nt, Human
cagaagcagugagagaugugca

SEQ ID NO: 462482 - RNA, 22 nt, Human
cugugccuuuguagcugugccu

SEQ ID NO: 462483 - RNA, 17 nt, Human
gugcagggaugaaggau

SEQ ID NO: 462484 - RNA, 19 nt, Human
gguguccuagagauaagag

SEQ ID NO: 462485 - RNA, 22 nt, Human
gagcugcugguugcuggugccu

SEQ ID NO: 462486 - RNA, 22 nt, Human
auggccuggccagagcucugcu

SEQ ID NO: 462487 - RNA, 22 nt, Human
uagaggcacccuggaggagacu

SEQ ID NO: 462488 - RNA, 22 nt, Human
gcugagguggcugccuuaguaa

SEQ ID NO: 462489 - RNA, 22 nt, Human
aggagcugucagagugccagag

SEQ ID NO: 462490 - RNA, 21 nt, Human
uuuguucaggggcaaaguuaa

SEQ ID NO: 462491 - RNA, 22 nt, Human
uccagcuugacaaaugauuuua

SEQ ID NO: 462492 - RNA, 22 nt, Human
ggcagagcuugcagugagccga

SEQ ID NO: 462493 - RNA, 22 nt, Human
ccagccuggguguuagaagaca

SEQ ID NO: 462494 - RNA, 22 nt, Human
cgccugggaguccacaccugcu

SEQ ID NO: 462495 - RNA, 22 nt, Human
gcaggguccauggaggcagccc

SEQ ID NO: 462496 - RNA, 22 nt, Human
uccagggacacagaguccuucu

SEQ ID NO: 462497 - RNA, 22 nt, Human
cagcaauaacucaaagccauuu

SEQ ID NO: 462498 - RNA, 20 nt, Human
ccagguggugccuggagagg

SEQ ID NO: 462499 - RNA, 17 nt, Human
aggugcagaggcagagc

SEQ ID NO: 462500 - RNA, 22 nt, Human
uuucauuuugguuaugccauaa

SEQ ID NO: 462501 - RNA, 22 nt, Human
ucugcagcgugcaggcuggugc

SEQ ID NO: 462502 - RNA, 21 nt, Human
aaagagguuaauauuguaagu

SEQ ID NO: 462503 - RNA, 22 nt, Human
ugguccugccccgugcacagag

SEQ ID NO: 462504 - RNA, 22 nt, Human
gugcaaugugcuucgugccaug

SEQ ID NO: 462505 - RNA, 22 nt, Human
ccugccugcguccucugagggc

SEQ ID NO: 462506 - RNA, 22 nt, Human
ccuggcagcuccuccccggcgg

SEQ ID NO: 462507 - RNA, 22 nt, Human
ccacaggggcccacgagccgcu

SEQ ID NO: 462508 - RNA, 22 nt, Human
ugcagaaguauuccaggcccca

SEQ ID NO: 462509 - RNA, 22 nt, Human
aagcagccuggcaugaugcuuu

SEQ ID NO: 462510 - RNA, 22 nt, Human
cagugcugggcagaggagagcg

SEQ ID NO: 462511 - RNA, 18 nt, Human
ugggcugccuggccucug

SEQ ID NO: 462512 - RNA, 22 nt, Human
agaagagccuggggaccauggc

SEQ ID NO: 462513 - RNA, 22 nt, Human
augggaguuuucucugaugcuc

SEQ ID NO: 462514 - RNA, 22 nt, Human
acauaaaggugacuaacaucuu

SEQ ID NO: 462515 - RNA, 22 nt, Human
gcccauggcagaacugugagca

SEQ ID NO: 462516 - RNA, 22 nt, Human
agcucugggccaggaacccuaa

SEQ ID NO: 462517 - RNA, 22 nt, Human
accaaggagccacauacaaccu

SEQ ID NO: 462518 - RNA, 22 nt, Human
uuuguaaaaggaggaagcaugg

SEQ ID NO: 462519 - RNA, 22 nt, Human
ucagugcuucggcgagcaccua

SEQ ID NO: 462520 - RNA, 22 nt, Human
uguggaaaagaauaagggagau

SEQ ID NO: 462521 - RNA, 22 nt, Human
ugugaugguucacugggcauga

SEQ ID NO: 462522 - RNA, 22 nt, Human
aggguauguuuuuaucuacugu

SEQ ID NO: 462523 - RNA, 22 nt, Human
agcuucuguucaucuuccaggc

SEQ ID NO: 462524 - RNA, 22 nt, Human
gagcucagauucuggugucaga

SEQ ID NO: 462525 - RNA, 22 nt, Human
ugcaugcagcuggugauaagaa

SEQ ID NO: 462526 - RNA, 22 nt, Human
ugcugguggagaaaguggaggu

SEQ ID NO: 462527 - RNA, 22 nt, Human
cccaccccuggacaggugagug

SEQ ID NO: 462528 - RNA, 22 nt, Human
accugaggccuccccagcagac

SEQ ID NO: 462529 - RNA, 20 nt, Human
ccugucuggagacaaagaga

SEQ ID NO: 462530 - RNA, 22 nt, Human
ucucagagauuuauggaaaacu

SEQ ID NO: 462531 - RNA, 22 nt, Human
gagaggaguagacacuuugguu

SEQ ID NO: 462532 - RNA, 22 nt, Human
ggcuucaccgcgggguugcagg

SEQ ID NO: 462533 - RNA, 22 nt, Human
aggcucaguucacgucaacuuu

SEQ ID NO: 462534 - RNA, 19 nt, Human
auuuacugccuaaaaucuc

SEQ ID NO: 462535 - RNA, 22 nt, Human
ucuuucaaugagcauucuuucc

SEQ ID NO: 462536 - RNA, 20 nt, Human
ucucugcuguccacauuugc

SEQ ID NO: 462537 - RNA, 22 nt, Human
uucacaggcuuggagguggggg

SEQ ID NO: 462538 - RNA, 22 nt, Human
ucucugagaaguuccuuuguga

SEQ ID NO: 462539 - RNA, 22 nt, Human
uaagugcaauguuuuacuuaaa

SEQ ID NO: 462540 - RNA, 22 nt, Human
cuggcucagacagcugugcagu

SEQ ID NO: 462541 - RNA, 22 nt, Human
aauguguagcauuuaaugcagu

SEQ ID NO: 462542 - RNA, 22 nt, Human
cagcugccaugacauguccugc

SEQ ID NO: 462543 - RNA, 22 nt, Human
uuuccaaaaugaaucuaaugca

SEQ ID NO: 462544 - RNA, 23 nt, Human
aggcugagcucucccagcuucag

SEQ ID NO: 462545 - RNA, 22 nt, Human
ggccucugcaacuggcuguggc

SEQ ID NO: 462546 - RNA, 22 nt, Human
ggcagggguccugguguugacu

SEQ ID NO: 462547 - RNA, 22 nt, Human
caggggcucccugggugccagu

SEQ ID NO: 462548 - RNA, 19 nt, Human
cagaacagaggucauggcc

SEQ ID NO: 462549 - RNA, 22 nt, Human
ggucagcagugcagggcagagc

SEQ ID NO: 462550 - RNA, 22 nt, Human
gcacccagccagcaucucagag

SEQ ID NO: 462551 - RNA, 22 nt, Human
aguguuucccaguaggaugaaa

SEQ ID NO: 462552 - RNA, 22 nt, Human
uuuauccagaaucaggauuuuu

SEQ ID NO: 462553 - RNA, 22 nt, Human
gagauggggucagcugggacau

SEQ ID NO: 462554 - RNA, 22 nt, Human
uuguaaauaguaguaagaugcc

SEQ ID NO: 462555 - RNA, 22 nt, Human
acccugagggguauagcagaag

SEQ ID NO: 462556 - RNA, 22 nt, Human
uguccucaggaccuggcacagu

SEQ ID NO: 462557 - RNA, 22 nt, Human
agauuucaauggauauugcaag

SEQ ID NO: 462558 - RNA, 22 nt, Human
ugggaccugcucuuggaaugag

SEQ ID NO: 462559 - RNA, 22 nt, Human
ucugguaaccuuuaucccuccu

SEQ ID NO: 462560 - RNA, 22 nt, Human
aggccagaaaugucagggagug

SEQ ID NO: 462561 - RNA, 22 nt, Human
aaggccugaacaugaggagaug

SEQ ID NO: 462562 - RNA, 22 nt, Human
ggaggccaggaaggcucggaga

SEQ ID NO: 462563 - RNA, 21 nt, Human
gagugcagcaagguagagucu

SEQ ID NO: 462564 - RNA, 22 nt, Human
ccuggccugugaaucugagagc

SEQ ID NO: 462565 - RNA, 22 nt, Human
aaccugcaguuuuuauucugag

SEQ ID NO: 462566 - RNA, 22 nt, Human
uccauuuacuauucucauaucg

SEQ ID NO: 462567 - RNA, 22 nt, Human
aaguuucaaauauaaaauuaca

SEQ ID NO: 462568 - RNA, 19 nt, Human
uggcaggcccaggauggac

SEQ ID NO: 462569 - RNA, 20 nt, Human
agcuggccuguccuaggccu

SEQ ID NO: 462570 - RNA, 22 nt, Human
cugggcaggagggcucuaugga

SEQ ID NO: 462571 - RNA, 22 nt, Human
aggcugagucgggaggaucacu

SEQ ID NO: 462572 - RNA, 22 nt, Human
cagaggaagcuggguguggagu

SEQ ID NO: 462573 - RNA, 22 nt, Human
gcucucugaggugcuggcagag

SEQ ID NO: 462574 - RNA, 22 nt, Human
cagaagccugccucagaugcac

SEQ ID NO: 462575 - RNA, 22 nt, Human
uggaaagaaaaacaggccauga

SEQ ID NO: 462576 - RNA, 21 nt, Human
uccugcaggaggccugagagg

SEQ ID NO: 462577 - RNA, 22 nt, Human
aagagccagcuagugaagaggc

SEQ ID NO: 462578 - RNA, 22 nt, Human
auuauucuuaugucaucauggc

SEQ ID NO: 462579 - RNA, 21 nt, Human
cugcucugacagugaggccag

SEQ ID NO: 462580 - RNA, 23 nt, Human
uccagcagagccuuccaggaggg

SEQ ID NO: 462581 - RNA, 22 nt, Human
acugucugcuggccccugguua

SEQ ID NO: 462582 - RNA, 22 nt, Human
caugagaaguggccuucaaaaa

SEQ ID NO: 462583 - RNA, 22 nt, Human
acagccagggucucaggaggcg

SEQ ID NO: 462584 - RNA, 22 nt, Human
agucccagugacuuggccagaa

SEQ ID NO: 462585 - RNA, 22 nt, Human
cacacaggagagugcuggaggu

SEQ ID NO: 462586 - RNA, 19 nt, Human
aucugccuguuaucacaua

SEQ ID NO: 462587 - RNA, 18 nt, Human
ggcucaggcuauccuaac

SEQ ID NO: 462588 - RNA, 22 nt, Human
cagagaaacucagauagcugau

SEQ ID NO: 462589 - RNA, 22 nt, Human
ucacguuuuacugagugagaua

SEQ ID NO: 462590 - RNA, 22 nt, Human
cagagacagaaaauggaucuag

SEQ ID NO: 462591 - RNA, 22 nt, Human
ggcugagccuggagcaucuggu

SEQ ID NO: 462592 - RNA, 22 nt, Human
ggcugggcuccgggagcaugcg

SEQ ID NO: 462593 - RNA, 22 nt, Human
uugugaaauguuucaaaauagu

SEQ ID NO: 462594 - RNA, 20 nt, Human
uccagcugucuuucagagac

SEQ ID NO: 462595 - RNA, 22 nt, Human
cucagcagugacaagagaguau

SEQ ID NO: 462596 - RNA, 18 nt, Human
ggaaaaggagugucuagc

SEQ ID NO: 462597 - RNA, 22 nt, Human
cagcauuuucuuaauguaggug

SEQ ID NO: 462598 - RNA, 22 nt, Human
aaugcuguauaucuuagcuaau

SEQ ID NO: 462599 - RNA, 22 nt, Human
ggcuccacugcugaccacucca

SEQ ID NO: 462600 - RNA, 21 nt, Human
ucuuuccugcccaguugcccu

SEQ ID NO: 462601 - RNA, 22 nt, Human
aggaccugccaggugcaaagca

SEQ ID NO: 462602 - RNA, 22 nt, Human
ugccaggcccagcagggcggcc

SEQ ID NO: 462603 - RNA, 22 nt, Human
ugcaagaggaauucuagaagca

SEQ ID NO: 462604 - RNA, 22 nt, Human
uuguacuugccauagaacaaca

SEQ ID NO: 462605 - RNA, 22 nt, Human
ccugccugucccucaguccaca

SEQ ID NO: 462606 - RNA, 22 nt, Human
agcacagauucugaagaguccu

SEQ ID NO: 462607 - RNA, 22 nt, Human
ucuggcuuucauuuguuuaaag

SEQ ID NO: 462608 - RNA, 22 nt, Human
ggagaaggaagaaagcuacuau

SEQ ID NO: 462609 - RNA, 22 nt, Human
cugccucuguugggcauggucu

SEQ ID NO: 462610 - RNA, 22 nt, Human
ugugaaaggagccauagacagu

SEQ ID NO: 462611 - RNA, 22 nt, Human
aucuggcuccuacacuugaaga

SEQ ID NO: 462612 - RNA, 19 nt, Human
agggccugcagcucaagcu

SEQ ID NO: 462613 - RNA, 21 nt, Human
aaauguguuccauaaugcuuu

SEQ ID NO: 462614 - RNA, 21 nt, Human
aagggagauaggaaucaggcc

SEQ ID NO: 462615 - RNA, 22 nt, Human
aaagccagcaaggugaguuuca

SEQ ID NO: 462616 - RNA, 22 nt, Human
aucaggaucacagaaacuuuua

SEQ ID NO: 462617 - RNA, 22 nt, Human
cagcauggagacaaagugggca

SEQ ID NO: 462618 - RNA, 20 nt, Human
uccaagggcagcagaaucag

SEQ ID NO: 462619 - RNA, 22 nt, Human
cugcaggcccccuuccuggagu

SEQ ID NO: 462620 - RNA, 22 nt, Human
cagaggcagaggucaucucugg

SEQ ID NO: 462621 - RNA, 22 nt, Human
acuucuugggacccuggcaccg

SEQ ID NO: 462622 - RNA, 22 nt, Human
ugucacauaauuuaucuguagg

SEQ ID NO: 462623 - RNA, 22 nt, Human
gaggagcaugggaaggcucugg

SEQ ID NO: 462624 - RNA, 22 nt, Human
agcagaggacaguucuuaggaa

SEQ ID NO: 462625 - RNA, 22 nt, Human
cugggguggaggagcuccccug

SEQ ID NO: 462626 - RNA, 22 nt, Human
ugcugccacauuuaaagagggg

SEQ ID NO: 462627 - RNA, 22 nt, Human
caggauggugugagugugagga

SEQ ID NO: 462628 - RNA, 22 nt, Human
ugaggcaggaaguuauauaaug

SEQ ID NO: 462629 - RNA, 22 nt, Human
cagacacagauaugcauauggc

SEQ ID NO: 462630 - RNA, 22 nt, Human
caggaaugacugcagauggggc

SEQ ID NO: 462631 - RNA, 22 nt, Human
ucucaccaaagccuugaccaua

SEQ ID NO: 462632 - RNA, 18 nt, Human
gcaggugccacugcuguu

SEQ ID NO: 462633 - RNA, 22 nt, Human
aaguccagacuccuuugcgugg

SEQ ID NO: 462634 - RNA, 22 nt, Human
ggcucuggucagugaggggccu

SEQ ID NO: 462635 - RNA, 22 nt, Human
agccuggccacucagggccuga

SEQ ID NO: 462636 - RNA, 19 nt, Human
ccuguacauuauucucccc

SEQ ID NO: 462637 - RNA, 18 nt, Human
ugcucuguuuaaugauuu

SEQ ID NO: 462638 - RNA, 22 nt, Human
uucaagauggcugcaaauacuu

SEQ ID NO: 462639 - RNA, 22 nt, Human
auacaucuuccuuuuaaaaugc

SEQ ID NO: 462640 - RNA, 22 nt, Human
acagcagcauaaacugacuaag

SEQ ID NO: 462641 - RNA, 22 nt, Human
aggaaaaaagucugugauuaua

SEQ ID NO: 462642 - RNA, 22 nt, Human
ggcuuuauuauguggccaugug

SEQ ID NO: 462643 - RNA, 22 nt, Human
accaaaaauuguggggcugaau

SEQ ID NO: 462644 - RNA, 22 nt, Human
uuugcauuacuugacuuuaguu

SEQ ID NO: 462645 - RNA, 22 nt, Human
aauggcugggaguguauuuugg

SEQ ID NO: 462646 - RNA, 22 nt, Human
accagggcugacaaucugaugg

SEQ ID NO: 462647 - RNA, 22 nt, Human
uuuccucuuauacaguguuuau

SEQ ID NO: 462648 - RNA, 22 nt, Human
ggaagccaggccaaugagaaca

SEQ ID NO: 462649 - RNA, 20 nt, Human
aauuuacucacagaaugaau

SEQ ID NO: 462650 - RNA, 22 nt, Human
gggcugagugaccucaggccaa

SEQ ID NO: 462651 - RNA, 22 nt, Human
aggguauaaagagcaagcagaa

SEQ ID NO: 462652 - RNA, 22 nt, Human
ucacacacauggauaguauuuu

SEQ ID NO: 462653 - RNA, 22 nt, Human
uuaauuuauguccaaaccagau

SEQ ID NO: 462654 - RNA, 22 nt, Human
cccuggagcugcuugcauguug

SEQ ID NO: 462655 - RNA, 22 nt, Human
gggcagcagcaggaggucucug

SEQ ID NO: 462656 - RNA, 22 nt, Human
ggagcacuauaauagagauuuu

SEQ ID NO: 462657 - RNA, 22 nt, Human
aaugauugcaaacauugagaac

SEQ ID NO: 462658 - RNA, 22 nt, Human
cacugaagccugggaguaagac

SEQ ID NO: 462659 - RNA, 22 nt, Human
aauguguagggugccuguuuuu

SEQ ID NO: 462660 - RNA, 22 nt, Human
agagaaggucacuaaggaccca

SEQ ID NO: 462661 - RNA, 22 nt, Human
ccaggaggcggaagguacagug

SEQ ID NO: 462662 - RNA, 22 nt, Human
gcacaggcacagagggccacug

SEQ ID NO: 462663 - RNA, 22 nt, Human
uucacaaaacacuauuuucugg

SEQ ID NO: 462664 - RNA, 20 nt, Human
uuugucuguuaaguguuucu

SEQ ID NO: 462665 - RNA, 22 nt, Human
cccagcccccgagugucuggaa

SEQ ID NO: 462666 - RNA, 22 nt, Human
uggcagagugcggcauccccug

SEQ ID NO: 462667 - RNA, 23 nt, Human
agaggcaggaguggcuugcccgg

SEQ ID NO: 462668 - RNA, 22 nt, Human
cagugcccuuccaggacugcag

SEQ ID NO: 462669 - RNA, 22 nt, Human
aaagaagggacagacugccucu

SEQ ID NO: 462670 - RNA, 20 nt, Human
ugccaggcacggagugcaug

SEQ ID NO: 462671 - RNA, 20 nt, Human
aaaggaauauaugaaguaua

SEQ ID NO: 462672 - RNA, 22 nt, Human
cuuuggaagugaccacaauccu

SEQ ID NO: 462673 - RNA, 22 nt, Human
uaaauguguuguggaugaaguu

SEQ ID NO: 462674 - RNA, 22 nt, Human
guaagcaucugucucuucugca

SEQ ID NO: 462675 - RNA, 22 nt, Human
agggucagcuggcugucagggg

SEQ ID NO: 462676 - RNA, 22 nt, Human
aaguucuaauuuugcauucagg

SEQ ID NO: 462677 - RNA, 22 nt, Human
gugcaugugucuuuauaguagc

SEQ ID NO: 462678 - RNA, 22 nt, Human
uauucacaggcuggagugaugu

SEQ ID NO: 462679 - RNA, 22 nt, Human
gugcaggggaucagguugcagc

SEQ ID NO: 462680 - RNA, 21 nt, Human
gagacagacuuucguccccug

SEQ ID NO: 462681 - RNA, 22 nt, Human
cuucaagauauuucuagaauca

SEQ ID NO: 462682 - RNA, 22 nt, Human
gcaggugauucacccugggccu

SEQ ID NO: 462683 - RNA, 22 nt, Human
ccauuguaaagaguauacuuug

SEQ ID NO: 462684 - RNA, 22 nt, Human
gcuuuuauugucuuuacgacga

SEQ ID NO: 462685 - RNA, 22 nt, Human
ucaccuuagcuagaggaagaga

SEQ ID NO: 462686 - RNA, 22 nt, Human
uugcauugauguuccuucuugc

SEQ ID NO: 462687 - RNA, 22 nt, Human
gcucugugcaguucagggacac

SEQ ID NO: 462688 - RNA, 17 nt, Human
ccaggugggaggugggg

SEQ ID NO: 462689 - RNA, 20 nt, Human
gccagcccugacacaggagc

SEQ ID NO: 462690 - RNA, 22 nt, Human
ugcagggacaggcucuggggau

SEQ ID NO: 462691 - RNA, 22 nt, Human
uaaaauagcaugugcagugaaa

SEQ ID NO: 462692 - RNA, 22 nt, Human
gcagggcacagacagugccaag

SEQ ID NO: 462693 - RNA, 19 nt, Human
gcgaggaagucacuguggu

SEQ ID NO: 462694 - RNA, 20 nt, Human
uggcagaguugucccaccca

SEQ ID NO: 462695 - RNA, 20 nt, Human
ccagacagcaccugccuggu

SEQ ID NO: 462696 - RNA, 22 nt, Human
ucaccacugaacagaccuuugg

SEQ ID NO: 462697 - RNA, 22 nt, Human
acauuucuugaugccucuguga

SEQ ID NO: 462698 - RNA, 22 nt, Human
uccuucaguuaaagaucucaca

SEQ ID NO: 462699 - RNA, 22 nt, Human
ccuccagggcagacggggagca

SEQ ID NO: 462700 - RNA, 22 nt, Human
aggggccuggacauggacgcgc

SEQ ID NO: 462701 - RNA, 22 nt, Human
caggccugauacacugaacucu

SEQ ID NO: 462702 - RNA, 22 nt, Human
ggcagcugagcauggcuaccuu

SEQ ID NO: 462703 - RNA, 20 nt, Human
aucaggauucuugcuuuguu

SEQ ID NO: 462704 - RNA, 22 nt, Human
gcuggccuugugucugaggaag

SEQ ID NO: 462705 - RNA, 22 nt, Human
aagauggagcacgagcagaagc

SEQ ID NO: 462706 - RNA, 17 nt, Human
ucauuuguugugacuag

SEQ ID NO: 462707 - RNA, 22 nt, Human
cuccuggacauggagcggagga

SEQ ID NO: 462708 - RNA, 22 nt, Human
gaugguuuaugauagaugggaa

SEQ ID NO: 462709 - RNA, 22 nt, Human
acucugggccccagguggagcu

SEQ ID NO: 462710 - RNA, 22 nt, Human
gucaggauuggggucaugaguc

SEQ ID NO: 462711 - RNA, 22 nt, Human
uacauguaauuuucauaguaag

SEQ ID NO: 462712 - RNA, 22 nt, Human
uuguccuuggaugaagcuggga

SEQ ID NO: 462713 - RNA, 22 nt, Human
ggcugugagcaggcagaaugcu

SEQ ID NO: 462714 - RNA, 22 nt, Human
cagguggcuucucccuaggcca

SEQ ID NO: 462715 - RNA, 21 nt, Human
aggucccagguuugggcagca

SEQ ID NO: 462716 - RNA, 22 nt, Human
ucagcuggauguggaagugcua

SEQ ID NO: 462717 - RNA, 22 nt, Human
ugguuucccauuaucugcagga

SEQ ID NO: 462718 - RNA, 22 nt, Human
agcccucugcaaacaccugaua

SEQ ID NO: 462719 - RNA, 22 nt, Human
gauuucaaaaguagauccauca

SEQ ID NO: 462720 - RNA, 22 nt, Human
cagucccagcugcucagaaggc

SEQ ID NO: 462721 - RNA, 22 nt, Human
agaucucaccucuguguauuau

SEQ ID NO: 462722 - RNA, 22 nt, Human
uagaaaucagcaggcauaugua

SEQ ID NO: 462723 - RNA, 22 nt, Human
gccagggcugugcagguuuguu

SEQ ID NO: 462724 - RNA, 20 nt, Human
uccuggccucccuggggcuc

SEQ ID NO: 462725 - RNA, 22 nt, Human
ccugucagcugauggcuaugua

SEQ ID NO: 462726 - RNA, 21 nt, Human
gccugcaguuuugaagcccuu

SEQ ID NO: 462727 - RNA, 22 nt, Human
caugccaguuuugagaugcacc

SEQ ID NO: 462728 - RNA, 20 nt, Human
cucaggauacugcaaaguug

SEQ ID NO: 462729 - RNA, 22 nt, Human
agagccugugauugucaucacc

SEQ ID NO: 462730 - RNA, 22 nt, Human
uuucuacaguacugauuucaua

SEQ ID NO: 462731 - RNA, 22 nt, Human
cuuucuuauaccugucagggcc

SEQ ID NO: 462732 - RNA, 21 nt, Human
ucauuuuuauugcuaccuugc

SEQ ID NO: 462733 - RNA, 19 nt, Human
cuggugcuugagugaguca

SEQ ID NO: 462734 - RNA, 22 nt, Human
ucuguacaacaaagggaugaga

SEQ ID NO: 462735 - RNA, 22 nt, Human
gcacugaaauuauaugcauuug

SEQ ID NO: 462736 - RNA, 22 nt, Human
agugcagaguacauuuguggca

SEQ ID NO: 462737 - RNA, 22 nt, Human
aaauuauuacaagcuaguuggc

SEQ ID NO: 462738 - RNA, 19 nt, Human
cuugguuaugguaugaugc

SEQ ID NO: 462739 - RNA, 22 nt, Human
aauucuagcauugugaaaauau

SEQ ID NO: 462740 - RNA, 22 nt, Human
gcccucucuucugcagccucca

SEQ ID NO: 462741 - RNA, 22 nt, Human
auuguguaauuuucagcucaua

SEQ ID NO: 462742 - RNA, 22 nt, Human
ggagagcugguagcuggcucca

SEQ ID NO: 462743 - RNA, 22 nt, Human
gucagcugucuccccagagugg

SEQ ID NO: 462744 - RNA, 22 nt, Human
gagcuuuaagggauaaaaugau

SEQ ID NO: 462745 - RNA, 22 nt, Human
uccuugaauauaauaacaguag

SEQ ID NO: 462746 - RNA, 22 nt, Human
gaauucugucgcuuacuagaug

SEQ ID NO: 462747 - RNA, 22 nt, Human
aucaggaugaagcuguagcgaa

SEQ ID NO: 462748 - RNA, 22 nt, Human
cucugguucagggcucccuggc

SEQ ID NO: 462749 - RNA, 22 nt, Human
caagauggagaagcagcaaggg

SEQ ID NO: 462750 - RNA, 22 nt, Human
uccucaggaugugggguagaau

SEQ ID NO: 462751 - RNA, 22 nt, Human
augggaggaaggaggcccuuga

SEQ ID NO: 462752 - RNA, 22 nt, Human
cccauuuaaacacaagcuuuca

SEQ ID NO: 462753 - RNA, 22 nt, Human
aucucagggcuggagcccugga

SEQ ID NO: 462754 - RNA, 22 nt, Human
gcugcccauuccacuggauggu

SEQ ID NO: 462755 - RNA, 22 nt, Human
gggcacuguggggcccaugcug

SEQ ID NO: 462756 - RNA, 22 nt, Human
uggguagagcaggcuggggcuu

SEQ ID NO: 462757 - RNA, 22 nt, Human
aucacaggugguaggaaaagaa

SEQ ID NO: 462758 - RNA, 22 nt, Human
uuaacauuucuuuuccacucau

SEQ ID NO: 462759 - RNA, 22 nt, Human
uccucccugaguggggacagcu

SEQ ID NO: 462760 - RNA, 22 nt, Human
guauuaggugguggaauuguag

SEQ ID NO: 462761 - RNA, 22 nt, Human
ccaggcugcagucaaggggcau

SEQ ID NO: 462762 - RNA, 22 nt, Human
guucaaagcuccugguacagua

SEQ ID NO: 462763 - RNA, 22 nt, Human
caaagccauagaguagauaaga

SEQ ID NO: 462764 - RNA, 22 nt, Human
gggagccagcagggcauggagc

SEQ ID NO: 462765 - RNA, 22 nt, Human
ccagcuuuuagugggcuuauua

SEQ ID NO: 462766 - RNA, 22 nt, Human
cauugcacuccaucuugggcaa

SEQ ID NO: 462767 - RNA, 20 nt, Human
ggggcagguuuuuauggcua

SEQ ID NO: 462768 - RNA, 22 nt, Human
ugcuucaggaagaaacgccagg

SEQ ID NO: 462769 - RNA, 22 nt, Human
gcaggcugaugacuggaguugg

SEQ ID NO: 462770 - RNA, 21 nt, Human
auuuucauuuccaggggagga

SEQ ID NO: 462771 - RNA, 22 nt, Human
caggauggagaguuguugguug

SEQ ID NO: 462772 - RNA, 22 nt, Human
ggaggccacgguuuagcaccga

SEQ ID NO: 462773 - RNA, 22 nt, Human
aacaugaaacccaaacagaaua

SEQ ID NO: 462774 - RNA, 22 nt, Human
uggcccugaggacccagugugg

SEQ ID NO: 462775 - RNA, 22 nt, Human
uuaaauuuuagaaacagacucu

SEQ ID NO: 462776 - RNA, 22 nt, Human
aagcccaguuucacacugagac

SEQ ID NO: 462777 - RNA, 22 nt, Human
accugccuaguugguucugccc

SEQ ID NO: 462778 - RNA, 20 nt, Human
cugggcugcccagcuauggg

SEQ ID NO: 462779 - RNA, 21 nt, Human
ucccugcuuucuggcccaguc

SEQ ID NO: 462780 - RNA, 22 nt, Human
ugcacuccaggcugggugacag

SEQ ID NO: 462781 - RNA, 22 nt, Human
gcucccuguucucagccaugau

SEQ ID NO: 462782 - RNA, 22 nt, Human
caggugcuguccugcacauguc

SEQ ID NO: 462783 - RNA, 22 nt, Human
auucuuggagcagucaaagaag

SEQ ID NO: 462784 - RNA, 22 nt, Human
gaaugcacuuccaacaucuauu

SEQ ID NO: 462785 - RNA, 22 nt, Human
guaggcagucucucaggugauc

SEQ ID NO: 462786 - RNA, 22 nt, Human
cccuucucuuucacucacuauu

SEQ ID NO: 462787 - RNA, 22 nt, Human
ugcaggcugggaagagggacaa

SEQ ID NO: 462788 - RNA, 22 nt, Human
cagcagggaagcugugcuguuu

SEQ ID NO: 462789 - RNA, 22 nt, Human
uccaggcuagguuuacaggaca

SEQ ID NO: 462790 - RNA, 22 nt, Human
uguacauugucacucaucaagu

SEQ ID NO: 462791 - RNA, 22 nt, Human
agguggcaggaggucagagaaa

SEQ ID NO: 462792 - RNA, 22 nt, Human
cacuuggaggcccccugugccc

SEQ ID NO: 462793 - RNA, 22 nt, Human
ucucacagugcaggucugucuc

SEQ ID NO: 462794 - RNA, 22 nt, Human
agcaaacagugugcuaagaaau

SEQ ID NO: 462795 - RNA, 21 nt, Human
ucacaugcccauuacuggagc

SEQ ID NO: 462796 - RNA, 22 nt, Human
cauugcacuccagcuugggcaa

SEQ ID NO: 462797 - RNA, 22 nt, Human
cuucuuaacuguauauacuaug

SEQ ID NO: 462798 - RNA, 22 nt, Human
guuauuaguaagacucgcacau

SEQ ID NO: 462799 - RNA, 22 nt, Human
aaauguguuucgaaaacuggug

SEQ ID NO: 462800 - RNA, 22 nt, Human
augaugugugcugaucaagcuu

SEQ ID NO: 462801 - RNA, 22 nt, Human
ucagggcacugucaccugauau

SEQ ID NO: 462802 - RNA, 22 nt, Human
ucaggcaggcagagggcaaaug

SEQ ID NO: 462803 - RNA, 22 nt, Human
ggugaaggcacaagagggcaag

SEQ ID NO: 462804 - RNA, 22 nt, Human
agguggggaggagugucucuuu

SEQ ID NO: 462805 - RNA, 22 nt, Human
ucccagagcccaaguuggagag

SEQ ID NO: 462806 - RNA, 22 nt, Human
gccucugcaucuucgccgcacu

SEQ ID NO: 462807 - RNA, 23 nt, Human
cucugcaggagagugggcagggc

SEQ ID NO: 462808 - RNA, 22 nt, Human
agcagagccugggcuaggggug

SEQ ID NO: 462809 - RNA, 22 nt, Human
ugaguccaagagccagugggaa

SEQ ID NO: 462810 - RNA, 22 nt, Human
cagaaauggagcccaggaaucu

SEQ ID NO: 462811 - RNA, 21 nt, Human
ucugggcccaugcugccucac

SEQ ID NO: 462812 - RNA, 22 nt, Human
cagggccuuuuagcaucuucuc

SEQ ID NO: 462813 - RNA, 22 nt, Human
uggcucagccuggcccuuucau

SEQ ID NO: 462814 - RNA, 22 nt, Human
uguuccaugucuuuguaggacu

SEQ ID NO: 462815 - RNA, 22 nt, Human
uaacagaagaaaacauauugga

SEQ ID NO: 462816 - RNA, 19 nt, Human
ucagaggauuuggcuauga

SEQ ID NO: 462817 - RNA, 22 nt, Human
acucugccuuucagcagaugaa

SEQ ID NO: 462818 - RNA, 22 nt, Human
uucucuucuguucagugcccaa

SEQ ID NO: 462819 - RNA, 22 nt, Human
agaaaucacaggaggcagaagg

SEQ ID NO: 462820 - RNA, 22 nt, Human
cuggcugcgucugcucugacag

SEQ ID NO: 462821 - RNA, 18 nt, Human
cauaauuuucuuucuuua

SEQ ID NO: 462822 - RNA, 22 nt, Human
cugugcugauucagcacaggcc

SEQ ID NO: 462823 - RNA, 22 nt, Human
auaaagaggauguauuuacagc

SEQ ID NO: 462824 - RNA, 22 nt, Human
gcagccacccucaaggcugaau

SEQ ID NO: 462825 - RNA, 22 nt, Human
gcugcagcaagcccuccagggg

SEQ ID NO: 462826 - RNA, 21 nt, Human
ugauccuuucccccauguugc

SEQ ID NO: 462827 - RNA, 22 nt, Human
aggcccagcccguccucgugcu

SEQ ID NO: 462828 - RNA, 22 nt, Human
uucaaugagcccaagaacguga

SEQ ID NO: 462829 - RNA, 22 nt, Human
acauucuagaagucuuugcaau

SEQ ID NO: 462830 - RNA, 22 nt, Human
acagccuguuugaucuggugcu

SEQ ID NO: 462831 - RNA, 22 nt, Human
aaucuggcauguaagcuuagag

SEQ ID NO: 462832 - RNA, 22 nt, Human
agguaagggucacaguucauau

SEQ ID NO: 462833 - RNA, 18 nt, Human
agagcagcggcaucacac

SEQ ID NO: 462834 - RNA, 22 nt, Human
guuucgucaggcuuauucuauc

SEQ ID NO: 462835 - RNA, 22 nt, Human
acagaauugaaaguauaaucug

SEQ ID NO: 462836 - RNA, 22 nt, Human
guuucaaagcacagcucacauu

SEQ ID NO: 462837 - RNA, 22 nt, Human
gaagccccaaacccucgccauc

SEQ ID NO: 462838 - RNA, 22 nt, Human
cuguuuauaaauagaggggagu

SEQ ID NO: 462839 - RNA, 22 nt, Human
gcugucucggggcuuucuccug

SEQ ID NO: 462840 - RNA, 22 nt, Human
caagggugguauugggagcaua

SEQ ID NO: 462841 - RNA, 22 nt, Human
ccucuggucccagcucugcugc

SEQ ID NO: 462842 - RNA, 17 nt, Human
gcagccagugcagcagg

SEQ ID NO: 462843 - RNA, 22 nt, Human
agcugucagugcugugccugua

SEQ ID NO: 462844 - RNA, 22 nt, Human
ccugcuuaacauugccaugaca

SEQ ID NO: 462845 - RNA, 22 nt, Human
uuccuucucagcccucgaggau

SEQ ID NO: 462846 - RNA, 22 nt, Human
ccuggcagaauauuaaagugca

SEQ ID NO: 462847 - RNA, 19 nt, Human
aggcagcauucuggggcuu

SEQ ID NO: 462848 - RNA, 22 nt, Human
auugacaaucuacuauguucug

SEQ ID NO: 462849 - RNA, 22 nt, Human
agagcaauggcauccagcugau

SEQ ID NO: 462850 - RNA, 22 nt, Human
cagagcuguauuuaucuuucca

SEQ ID NO: 462851 - RNA, 22 nt, Human
cagggcuggauuucauuucuag

SEQ ID NO: 462852 - RNA, 22 nt, Human
gaugcugaagugaagugaucuu

SEQ ID NO: 462853 - RNA, 22 nt, Human
ugaggaaacugaggcacagaug

SEQ ID NO: 462854 - RNA, 22 nt, Human
gcucccugcagcugagaguucc

SEQ ID NO: 462855 - RNA, 21 nt, Human
agagccugagaucuuccagca

SEQ ID NO: 462856 - RNA, 22 nt, Human
uggagaagcuguagguggacuc

SEQ ID NO: 462857 - RNA, 22 nt, Human
auagacauauggcuuuguuucu

SEQ ID NO: 462858 - RNA, 22 nt, Human
uauuucuucgggauucaagcua

SEQ ID NO: 462859 - RNA, 22 nt, Human
acuguacaugcaucuugucuau

SEQ ID NO: 462860 - RNA, 22 nt, Human
cucagggcaguauggcugagag

SEQ ID NO: 462861 - RNA, 22 nt, Human
aguggcagagccaagauaugau

SEQ ID NO: 462862 - RNA, 22 nt, Human
ucugggcuuuacacugugcuua

SEQ ID NO: 462863 - RNA, 22 nt, Human
aagagcuggaguuugcagcccu

SEQ ID NO: 462864 - RNA, 22 nt, Human
cagcagcuacuuggagcagcag

SEQ ID NO: 462865 - RNA, 18 nt, Human
ucauuuguuuugcaugaa

SEQ ID NO: 462866 - RNA, 22 nt, Human
caggagugaaaugaggcccagg

SEQ ID NO: 462867 - RNA, 22 nt, Human
ugcuauugugaacagugccaca

SEQ ID NO: 462868 - RNA, 22 nt, Human
guguccucuuauugcucuuggc

SEQ ID NO: 462869 - RNA, 21 nt, Human
ucagagagucacagugaacug

SEQ ID NO: 462870 - RNA, 22 nt, Human
agggagccuuccuggcuguggu

SEQ ID NO: 462871 - RNA, 22 nt, Human
ccugcccagcuucccgagugca

SEQ ID NO: 462872 - RNA, 22 nt, Human
agguacaguagacagacaguua

SEQ ID NO: 462873 - RNA, 22 nt, Human
gaggcacauauauacagagccc

SEQ ID NO: 462874 - RNA, 22 nt, Human
agaaaauauucauugagaggcu

SEQ ID NO: 462875 - RNA, 22 nt, Human
gccagccccuuagggcucuccc

SEQ ID NO: 462876 - RNA, 22 nt, Human
cagggcucaccacugggauccu

SEQ ID NO: 462877 - RNA, 22 nt, Human
cucuuaaauaacaucauugcuu

SEQ ID NO: 462878 - RNA, 22 nt, Human
auuguauuuccagcuugaaugu

SEQ ID NO: 462879 - RNA, 22 nt, Human
aaaaguuaccucuguaauauaa

SEQ ID NO: 462880 - RNA, 22 nt, Human
ggugggcagcucuuggcaggca

SEQ ID NO: 462881 - RNA, 22 nt, Human
uggaaacuaagacuagagagac

SEQ ID NO: 462882 - RNA, 22 nt, Human
agacccagaaagcagcugcauu

SEQ ID NO: 462883 - RNA, 22 nt, Human
uggugcugacaguucugagugc

SEQ ID NO: 462884 - RNA, 22 nt, Human
cugucucucuaggacacugggg

SEQ ID NO: 462885 - RNA, 19 nt, Human
ggagaagcaucuagaaaua

SEQ ID NO: 462886 - RNA, 21 nt, Human
ccagagccugcugagcccccu

SEQ ID NO: 462887 - RNA, 20 nt, Human
cuuagaaauuuuuacccugg

SEQ ID NO: 462888 - RNA, 22 nt, Human
gcagggcaaauguggaaaggag

SEQ ID NO: 462889 - RNA, 22 nt, Human
gacagccaugcacuucugcugu

SEQ ID NO: 462890 - RNA, 22 nt, Human
cuucuuaaugacagauuaaaau

SEQ ID NO: 462891 - RNA, 22 nt, Human
ggagagaauuccauggacaugu

SEQ ID NO: 462892 - RNA, 22 nt, Human
ggggauggugggaaggcaaucu

SEQ ID NO: 462893 - RNA, 22 nt, Human
ucuuagaaugucaacugauguu

SEQ ID NO: 462894 - RNA, 22 nt, Human
gcagggaggaagagaugcuucc

SEQ ID NO: 462895 - RNA, 22 nt, Human
aggcacugugcuucuuauaugu

SEQ ID NO: 462896 - RNA, 22 nt, Human
uuugaaagaauuuauguacuuu

SEQ ID NO: 462897 - RNA, 22 nt, Human
auacauacguacauacguaugu

SEQ ID NO: 462898 - RNA, 22 nt, Human
cugccuugaaaaugaagcuuua

SEQ ID NO: 462899 - RNA, 22 nt, Human
ccaggcagccaagugugugugu

SEQ ID NO: 462900 - RNA, 22 nt, Human
uguuaaucaaucaacaguauua

SEQ ID NO: 462901 - RNA, 22 nt, Human
uuacaaguauuuaagaugcugu

SEQ ID NO: 462902 - RNA, 22 nt, Human
gugcugucguggaacugggcug

SEQ ID NO: 462903 - RNA, 22 nt, Human
ucaguggagcuaagcaugagau

SEQ ID NO: 462904 - RNA, 22 nt, Human
gccuggagaauuaaaaggaagg

SEQ ID NO: 462905 - RNA, 22 nt, Human
cagggcagggauguugcggcag

SEQ ID NO: 462906 - RNA, 22 nt, Human
caugucuugcccugauuaguag

SEQ ID NO: 462907 - RNA, 22 nt, Human
acaguguucacuuaacaaugga

SEQ ID NO: 462908 - RNA, 22 nt, Human
ucucaugugauucccgugcaug

SEQ ID NO: 462909 - RNA, 22 nt, Human
auggagugggccaauuuuagug

SEQ ID NO: 462910 - RNA, 22 nt, Human
agagcuuagaauuucagaugau

SEQ ID NO: 462911 - RNA, 22 nt, Human
cacagcugccauggcugcacuu

SEQ ID NO: 462912 - RNA, 22 nt, Human
aaagcugcugccaaucaggcuu

SEQ ID NO: 462913 - RNA, 22 nt, Human
uugcucaggcuuagagcuacua

SEQ ID NO: 462914 - RNA, 22 nt, Human
uuuucaucucugcuuuguaccu

SEQ ID NO: 462915 - RNA, 22 nt, Human
gggcagaggggcgcuucccucu

SEQ ID NO: 462916 - RNA, 22 nt, Human
uugaagcacaaugucuuuuauc

SEQ ID NO: 462917 - RNA, 22 nt, Human
caauguguguguuuuucucaac

SEQ ID NO: 462918 - RNA, 22 nt, Human
ggugucccaggccagcugugug

SEQ ID NO: 462919 - RNA, 22 nt, Human
gagucccaugaugauagccaca

SEQ ID NO: 462920 - RNA, 22 nt, Human
ugucaugcuuauguuacauacu

SEQ ID NO: 462921 - RNA, 22 nt, Human
auauuaggugcucaauacaugc

SEQ ID NO: 462922 - RNA, 22 nt, Human
ggccucagugggccgcugcagg

SEQ ID NO: 462923 - RNA, 22 nt, Human
uuucuuccuuaccuuacuagag

SEQ ID NO: 462924 - RNA, 18 nt, Human
agcuggcccuggcugccg

SEQ ID NO: 462925 - RNA, 22 nt, Human
aacuuaaacccacucauguaga

SEQ ID NO: 462926 - RNA, 22 nt, Human
aagucagagcaacugagacauu

SEQ ID NO: 462927 - RNA, 22 nt, Human
gcggcaggaagagcgcagcccc

SEQ ID NO: 462928 - RNA, 22 nt, Human
gcagagugccgagauggaagcg

SEQ ID NO: 462929 - RNA, 22 nt, Human
ugucaccucuuuggcugcagcu

SEQ ID NO: 462930 - RNA, 23 nt, Human
uggcagcagaucuuaaagugacc

SEQ ID NO: 462931 - RNA, 22 nt, Human
cacagggccuggggcagcugcu

SEQ ID NO: 462932 - RNA, 22 nt, Human
uucaaucauuagaaucucaggc

SEQ ID NO: 462933 - RNA, 22 nt, Human
uuuuuaagagauucuccagucu

SEQ ID NO: 462934 - RNA, 22 nt, Human
gagcagcuguccccaaagcuuc

SEQ ID NO: 462935 - RNA, 22 nt, Human
caugcacaacauacucaagagg

SEQ ID NO: 462936 - RNA, 22 nt, Human
guugaaaguggagaaccugguu

SEQ ID NO: 462937 - RNA, 22 nt, Human
agugugggugagggaggcccuc

SEQ ID NO: 462938 - RNA, 22 nt, Human
agaaaaggauugauggaucaga

SEQ ID NO: 462939 - RNA, 22 nt, Human
agaaaguucacugguauauuuu

SEQ ID NO: 462940 - RNA, 22 nt, Human
ccaccuccaccuauugccagcc

SEQ ID NO: 462941 - RNA, 21 nt, Human
aggcccagcuuuccucuugcu

SEQ ID NO: 462942 - RNA, 22 nt, Human
ugcagggaaaguguuggcagca

SEQ ID NO: 462943 - RNA, 22 nt, Human
ucuggagaacuugcaagaggau

SEQ ID NO: 462944 - RNA, 22 nt, Human
auccuucaaggggcugacagcu

SEQ ID NO: 462945 - RNA, 22 nt, Human
agcaugcacaugacuggcuuaa

SEQ ID NO: 462946 - RNA, 20 nt, Human
uuccagagaucugcauuuua

SEQ ID NO: 462947 - RNA, 22 nt, Human
uuucuauugaucuaauaaacau

SEQ ID NO: 462948 - RNA, 22 nt, Human
caguagcagggauuauuuuagg

SEQ ID NO: 462949 - RNA, 22 nt, Human
aaguguuaaaagauuaaaugcu

SEQ ID NO: 462950 - RNA, 22 nt, Human
cugccaggcacgugcagcauca

SEQ ID NO: 462951 - RNA, 21 nt, Human
aaguggagaagaaaagcugga

SEQ ID NO: 462952 - RNA, 22 nt, Human
uaaaauguuugcaagagaccag

SEQ ID NO: 462953 - RNA, 22 nt, Human
agggcacagccuaaagccuaug

SEQ ID NO: 462954 - RNA, 22 nt, Human
auggggugaccaugagcauuua

SEQ ID NO: 462955 - RNA, 22 nt, Human
aaggcugcuuuuaacaugcaua

SEQ ID NO: 462956 - RNA, 22 nt, Human
gaggccagaaugagcugaaugc

SEQ ID NO: 462957 - RNA, 22 nt, Human
cagcacaauuuucaggagucca

SEQ ID NO: 462958 - RNA, 22 nt, Human
cugcagaggguuugagcauccu

SEQ ID NO: 462959 - RNA, 22 nt, Human
caggcagaagaaguggaaggac

SEQ ID NO: 462960 - RNA, 22 nt, Human
uacaugaacaaaauagcagaaa

SEQ ID NO: 462961 - RNA, 22 nt, Human
uagccggguguugugucaugca

SEQ ID NO: 462962 - RNA, 22 nt, Human
guccucaguaagagggccucug

SEQ ID NO: 462963 - RNA, 22 nt, Human
agcagggcaugaauaaggguuu

SEQ ID NO: 462964 - RNA, 22 nt, Human
ugacaugcuuguuuuccuugaa

SEQ ID NO: 462965 - RNA, 22 nt, Human
aaggccaggagacuuggaguca

SEQ ID NO: 462966 - RNA, 22 nt, Human
ugaaaucuccucuuuauauauc

SEQ ID NO: 462967 - RNA, 22 nt, Human
gccaggcucagcagucaaccug

SEQ ID NO: 462968 - RNA, 22 nt, Human
gagaggcugacuggcuguccug

SEQ ID NO: 462969 - RNA, 22 nt, Human
cagagguacaagcuaaguuggg

SEQ ID NO: 462970 - RNA, 22 nt, Human
cucugggcacauuuuccaggac

SEQ ID NO: 462971 - RNA, 22 nt, Human
aaugauuuggcaaaggaaucca

SEQ ID NO: 462972 - RNA, 22 nt, Human
acuguacauauggauucuaaga

SEQ ID NO: 462973 - RNA, 22 nt, Human
gccuuaggggucagacagagcu

SEQ ID NO: 462974 - RNA, 22 nt, Human
ugggcugcuuccucagcugaga

SEQ ID NO: 462975 - RNA, 22 nt, Human
cagcucugaagaaaggugucua

SEQ ID NO: 462976 - RNA, 22 nt, Human
auguccagaguaaagcacauuc

SEQ ID NO: 462977 - RNA, 22 nt, Human
ucugcaggaaaaaagugccugg

SEQ ID NO: 462978 - RNA, 22 nt, Human
agcaguccaacugagguggcau

SEQ ID NO: 462979 - RNA, 22 nt, Human
gggcaaguccggugcccagagc

SEQ ID NO: 462980 - RNA, 22 nt, Human
agggagccagaguugggagcuc

SEQ ID NO: 462981 - RNA, 22 nt, Human
cugaagcaaaggaucgagcuaa

SEQ ID NO: 462982 - RNA, 22 nt, Human
gggcugaaaggccgccucagau

SEQ ID NO: 462983 - RNA, 22 nt, Human
gaaaggccagcucacagaugag

SEQ ID NO: 462984 - RNA, 22 nt, Human
uccugcagugugucuccugcac

SEQ ID NO: 462985 - RNA, 22 nt, Human
ugcaggugugguuccucagcca

SEQ ID NO: 462986 - RNA, 22 nt, Human
ugaaggcagcaugcacacuagu

SEQ ID NO: 462987 - RNA, 22 nt, Human
gccagcagcccagaaggacuuu

SEQ ID NO: 462988 - RNA, 21 nt, Human
aggaaaggccagcacguaggg

SEQ ID NO: 462989 - RNA, 22 nt, Human
caguuccuaugggcaaaacaca

SEQ ID NO: 462990 - RNA, 22 nt, Human
ccuucccuaaagcgucgcuuag

SEQ ID NO: 462991 - RNA, 23 nt, Human
uccuuccuuugagaggcuccauc

SEQ ID NO: 462992 - RNA, 22 nt, Human
cuggcagcauuaacagagagca

SEQ ID NO: 462993 - RNA, 22 nt, Human
uuuguuagagugugggaggcug

SEQ ID NO: 462994 - RNA, 22 nt, Human
ucugggcuugguuagggcuguu

SEQ ID NO: 462995 - RNA, 22 nt, Human
gguuucaaugagaagugcuugu

SEQ ID NO: 462996 - RNA, 22 nt, Human
caguacuugggggguucuaagu

SEQ ID NO: 462997 - RNA, 22 nt, Human
agaaaucauucccaaacccaua

SEQ ID NO: 462998 - RNA, 22 nt, Human
ggaggcucgcuggucgcacagc

SEQ ID NO: 462999 - RNA, 22 nt, Human
ugaucaguguugguucuaucua

SEQ ID NO: 463000 - RNA, 23 nt, Human
cacaccaggagccgucugggcca

SEQ ID NO: 463001 - RNA, 22 nt, Human
aagcacagaaaaggagcaugga

SEQ ID NO: 463002 - RNA, 22 nt, Human
cugcccugaccugccucagagu

SEQ ID NO: 463003 - RNA, 20 nt, Human
acuuuggggucuuucucaga

SEQ ID NO: 463004 - RNA, 22 nt, Human
ugggaguggggcauagaaggua

SEQ ID NO: 463005 - RNA, 22 nt, Human
gcuuggccagcagccgggaugc

SEQ ID NO: 463006 - RNA, 22 nt, Human
ugaagugaccuggggcagugua

SEQ ID NO: 463007 - RNA, 22 nt, Human
ccaaaugcuccacugacuuugg

SEQ ID NO: 463008 - RNA, 22 nt, Human
ucaggcagaggauggggagcgu

SEQ ID NO: 463009 - RNA, 22 nt, Human
agcagcauguugggaugugaaa

SEQ ID NO: 463010 - RNA, 22 nt, Human
ucaggacagccagggugcagac

SEQ ID NO: 463011 - RNA, 22 nt, Human
uuaugacauaugaguacaagua

SEQ ID NO: 463012 - RNA, 22 nt, Human
agugaaaugacugaaucagaua

SEQ ID NO: 463013 - RNA, 22 nt, Human
aggcugugacagggucauggag

SEQ ID NO: 463014 - RNA, 22 nt, Human
agugauggugagugagaagcuc

SEQ ID NO: 463015 - RNA, 20 nt, Human
ggcagcaggaguuuccucuu

SEQ ID NO: 463016 - RNA, 17 nt, Human
ucugucuugacugucac

SEQ ID NO: 463017 - RNA, 22 nt, Human
aaaugugugcacaaagacagcu

SEQ ID NO: 463018 - RNA, 22 nt, Human
ccagcuggcaggagagucaggg

SEQ ID NO: 463019 - RNA, 23 nt, Human
aaggccagaauuucaauggugcc

SEQ ID NO: 463020 - RNA, 22 nt, Human
aaggcgacacaggcagcaggcc

SEQ ID NO: 463021 - RNA, 22 nt, Human
aaaaguauaggguuuggaguca

SEQ ID NO: 463022 - RNA, 22 nt, Human
ugggcacuguagcuggugcugg

SEQ ID NO: 463023 - RNA, 22 nt, Human
gcuggcuuugcacugggugcau

SEQ ID NO: 463024 - RNA, 22 nt, Human
ucucagaggugcccuggcaucu

SEQ ID NO: 463025 - RNA, 22 nt, Human
agggcagagaaauguaguugag

SEQ ID NO: 463026 - RNA, 22 nt, Human
cugccugugcaugcagucagaa

SEQ ID NO: 463027 - RNA, 22 nt, Human
cuccagugcgcaggacagcccc

SEQ ID NO: 463028 - RNA, 22 nt, Human
uucaaguucauguguagucagu

SEQ ID NO: 463029 - RNA, 22 nt, Human
gccagcccagcuccaggggaaa

SEQ ID NO: 463030 - RNA, 22 nt, Human
uggcauuuuguucaguauaugg

SEQ ID NO: 463031 - RNA, 22 nt, Human
acagaaauaacuuuuuauguuu

SEQ ID NO: 463032 - RNA, 22 nt, Human
agggcaguucaacuucauagug

SEQ ID NO: 463033 - RNA, 22 nt, Human
guccuggcuuaguucgcuguaa

SEQ ID NO: 463034 - RNA, 22 nt, Human
uugaaaggccuguuuauccagc

SEQ ID NO: 463035 - RNA, 22 nt, Human
cucagagucccuucccucgugg

SEQ ID NO: 463036 - RNA, 22 nt, Human
ggcacagggagccgcaguugca

SEQ ID NO: 463037 - RNA, 22 nt, Human
auguagcagauauuugugcaca

SEQ ID NO: 463038 - RNA, 18 nt, Human
cagaaguccuucaaggcc

SEQ ID NO: 463039 - RNA, 22 nt, Human
cuggagccccagacagggagag

SEQ ID NO: 463040 - RNA, 22 nt, Human
ggggagaguccuuuccaguucc

SEQ ID NO: 463041 - RNA, 19 nt, Human
gagcccucuccauggccac

SEQ ID NO: 463042 - RNA, 22 nt, Human
aggagggagcuuaagccaggca

SEQ ID NO: 463043 - RNA, 22 nt, Human
aaugcacauaaauauggucuua

SEQ ID NO: 463044 - RNA, 22 nt, Human
aguccagucucacucuuggcag

SEQ ID NO: 463045 - RNA, 22 nt, Human
ggauccuucuuugaccucacag

SEQ ID NO: 463046 - RNA, 20 nt, Human
aguuuauuccaggagaacug

SEQ ID NO: 463047 - RNA, 22 nt, Human
ggcaguggugggaggcucgcuc

SEQ ID NO: 463048 - RNA, 22 nt, Human
cacugccugugagcugugugcc

SEQ ID NO: 463049 - RNA, 22 nt, Human
auuugauuagcuguguaauuuu

SEQ ID NO: 463050 - RNA, 22 nt, Human
ccagguggugaaagugggcccu

SEQ ID NO: 463051 - RNA, 22 nt, Human
uauuuuguuaauaauccagucc

SEQ ID NO: 463052 - RNA, 23 nt, Human
agguucaggagauggaggaacaa

SEQ ID NO: 463053 - RNA, 22 nt, Human
ucccagggcagcuguccagaag

SEQ ID NO: 463054 - RNA, 22 nt, Human
ugccugucuuuccucccucgua

SEQ ID NO: 463055 - RNA, 22 nt, Human
ucugaaauguucucuuguuuug

SEQ ID NO: 463056 - RNA, 22 nt, Human
agagcugccgagcuggggccau

SEQ ID NO: 463057 - RNA, 20 nt, Human
ugacucugcaaccgucucuc

SEQ ID NO: 463058 - RNA, 22 nt, Human
ucugggggcgaccagggacugc

SEQ ID NO: 463059 - RNA, 22 nt, Human
ucuuuauugcuacugguuuguc

SEQ ID NO: 463060 - RNA, 22 nt, Human
ugcagagaaaccaguggaggac

SEQ ID NO: 463061 - RNA, 23 nt, Human
ugcagagggacugaagccagcuu

SEQ ID NO: 463062 - RNA, 23 nt, Human
ugagcugguauuguccaucucca

SEQ ID NO: 463063 - RNA, 22 nt, Human
agauuucagguuggggcagaag

SEQ ID NO: 463064 - RNA, 22 nt, Human
ugucucagaguaucccugaacu

SEQ ID NO: 463065 - RNA, 22 nt, Human
gcuucuauuauuuggagcugag

SEQ ID NO: 463066 - RNA, 22 nt, Human
ugucagugaguuaguugcaagu

SEQ ID NO: 463067 - RNA, 22 nt, Human
caccugagugucaguauucuca

SEQ ID NO: 463068 - RNA, 20 nt, Human
ugggcugaggaucaggugcc

SEQ ID NO: 463069 - RNA, 22 nt, Human
uaacagaaaagaacugaguuug

SEQ ID NO: 463070 - RNA, 22 nt, Human
cucccuggaggugagcuggcac

SEQ ID NO: 463071 - RNA, 22 nt, Human
ucagcuuucucucgccaucagg

SEQ ID NO: 463072 - RNA, 21 nt, Human
gagcauggcuuacaucagcag

SEQ ID NO: 463073 - RNA, 22 nt, Human
uggaggaaguugcuggaaguca

SEQ ID NO: 463074 - RNA, 22 nt, Human
ugucucugaggugagggucagc

SEQ ID NO: 463075 - RNA, 22 nt, Human
aaaacaggugucagcaaacuau

SEQ ID NO: 463076 - RNA, 22 nt, Human
ccucucaucauuaucgcuuugu

SEQ ID NO: 463077 - RNA, 22 nt, Human
ggaugcaggacggcauggaugu

SEQ ID NO: 463078 - RNA, 22 nt, Human
uccaugugccaaggggcagagg

SEQ ID NO: 463079 - RNA, 22 nt, Human
guagcuuauuagggauaauagu

SEQ ID NO: 463080 - RNA, 22 nt, Human
cugagccagagggagucggguc

SEQ ID NO: 463081 - RNA, 22 nt, Human
guacauuggcaacucucuuaga

SEQ ID NO: 463082 - RNA, 22 nt, Human
aggccaggaccauuagcccaga

SEQ ID NO: 463083 - RNA, 22 nt, Human
gaggccaggagugcuguaaguu

SEQ ID NO: 463084 - RNA, 22 nt, Human
aaacaugcauucaagaaaaucu

SEQ ID NO: 463085 - RNA, 22 nt, Human
uucauucccuuauauuagcauu

SEQ ID NO: 463086 - RNA, 22 nt, Human
agcagccacagucugggacagg

SEQ ID NO: 463087 - RNA, 22 nt, Human
cauugucacccaaagcucauag

SEQ ID NO: 463088 - RNA, 22 nt, Human
ggguggcuccuaugggcauagc

SEQ ID NO: 463089 - RNA, 22 nt, Human
auaaggcagucccuuaacaagg

SEQ ID NO: 463090 - RNA, 22 nt, Human
uugaaaggcacaggcaccuggg

SEQ ID NO: 463091 - RNA, 22 nt, Human
gucccacaccuugaggggucuu

SEQ ID NO: 463092 - RNA, 19 nt, Human
agagaggcugugugaggga

SEQ ID NO: 463093 - RNA, 22 nt, Human
acuuaaaaccagacagcgucau

SEQ ID NO: 463094 - RNA, 22 nt, Human
agggccugucagcgguguccug

SEQ ID NO: 463095 - RNA, 22 nt, Human
auccuugagaaaauaaaugacc

SEQ ID NO: 463096 - RNA, 22 nt, Human
ccucccucuuucagucccacag

SEQ ID NO: 463097 - RNA, 22 nt, Human
uugguuuacuaggauucaaauu

SEQ ID NO: 463098 - RNA, 22 nt, Human
gcucccaguucccaaagugacc

SEQ ID NO: 463099 - RNA, 22 nt, Human
uccaggcagggcagccaucaag

SEQ ID NO: 463100 - RNA, 22 nt, Human
ugcauaaagugccauaguauua

SEQ ID NO: 463101 - RNA, 22 nt, Human
agacuguaauugacaugucagc

SEQ ID NO: 463102 - RNA, 21 nt, Human
gcagagccggggcgagaaggc

SEQ ID NO: 463103 - RNA, 22 nt, Human
ggaggcugcugccucacguggg

SEQ ID NO: 463104 - RNA, 17 nt, Human
aggcugcugggccaggg

SEQ ID NO: 463105 - RNA, 22 nt, Human
agugcaaaauucagaagcaauu

SEQ ID NO: 463106 - RNA, 22 nt, Human
agugaguggguuacagauggga

SEQ ID NO: 463107 - RNA, 22 nt, Human
cgccaggcuugguagcucaugc

SEQ ID NO: 463108 - RNA, 22 nt, Human
guuugcauuuauuagucuucug

SEQ ID NO: 463109 - RNA, 22 nt, Human
aucuaagaguuaacaucaagaa

SEQ ID NO: 463110 - RNA, 22 nt, Human
acaguuucuccauuuacaccuu

SEQ ID NO: 463111 - RNA, 22 nt, Human
ugcugccagccaggccauggag

SEQ ID NO: 463112 - RNA, 22 nt, Human
ucuagaaaaaaacugcugugga

SEQ ID NO: 463113 - RNA, 22 nt, Human
ugggcugcggauaggccucgga

SEQ ID NO: 463114 - RNA, 20 nt, Human
cagcuuuagaucuuugauua

SEQ ID NO: 463115 - RNA, 22 nt, Human
gcucaggauuucauccaugugu

SEQ ID NO: 463116 - RNA, 22 nt, Human
auaguauuuaauaguuagcuca

SEQ ID NO: 463117 - RNA, 22 nt, Human
ugcagugggccggaggccaggg

SEQ ID NO: 463118 - RNA, 22 nt, Human
agcaggaaagaaaaaucugugu

SEQ ID NO: 463119 - RNA, 22 nt, Human
cuucccacuaguaucacagagc

SEQ ID NO: 463120 - RNA, 22 nt, Human
acuguggccugcuguaugggcu

SEQ ID NO: 463121 - RNA, 22 nt, Human
cuuggcugucuauaggaaagag

SEQ ID NO: 463122 - RNA, 20 nt, Human
cugcagggugagugggcgau

SEQ ID NO: 463123 - RNA, 22 nt, Human
uggaggccagagguacugggac

SEQ ID NO: 463124 - RNA, 22 nt, Human
aggcagccaguucagguuucuu

SEQ ID NO: 463125 - RNA, 22 nt, Human
auguuucaucaguaagguuuug

SEQ ID NO: 463126 - RNA, 22 nt, Human
ucuacaaagaagaauuaauguc

SEQ ID NO: 463127 - RNA, 22 nt, Human
cagcaucaccgccauuucugau

SEQ ID NO: 463128 - RNA, 22 nt, Human
aauguuaaaaccuucagugcuu

SEQ ID NO: 463129 - RNA, 22 nt, Human
ggagccuuccagacugcccaca

SEQ ID NO: 463130 - RNA, 22 nt, Human
guuccauaucacagcagacgaa

SEQ ID NO: 463131 - RNA, 22 nt, Human
agccuccaaaugucaggucccg

SEQ ID NO: 463132 - RNA, 22 nt, Human
aacaaucaaguuucuaaaugac

SEQ ID NO: 463133 - RNA, 22 nt, Human
ucuugccucuuccccuuuccau

SEQ ID NO: 463134 - RNA, 22 nt, Human
ccagagaggccuuggcaagaca

SEQ ID NO: 463135 - RNA, 22 nt, Human
agucacuguucugucaugucaa

SEQ ID NO: 463136 - RNA, 22 nt, Human
caaaugaagaaccuucucaccu

SEQ ID NO: 463137 - RNA, 22 nt, Human
uugccaggagcucaucugaggg

SEQ ID NO: 463138 - RNA, 22 nt, Human
caggcagcugggucaccguccc

SEQ ID NO: 463139 - RNA, 22 nt, Human
gagugcaguuggggugagggga

SEQ ID NO: 463140 - RNA, 22 nt, Human
agcuuuaucagaggagucucua

SEQ ID NO: 463141 - RNA, 22 nt, Human
cuccucccugcgauugcucugc

SEQ ID NO: 463142 - RNA, 22 nt, Human
cucagagauauagucccugcuu

SEQ ID NO: 463143 - RNA, 22 nt, Human
ugagcccagucugucugacaug

SEQ ID NO: 463144 - RNA, 21 nt, Human
guuuucaugauagagucugua

SEQ ID NO: 463145 - RNA, 22 nt, Human
ucaggggagguugaaucgucuc

SEQ ID NO: 463146 - RNA, 23 nt, Human
cuggccuccgacacuggccaaga

SEQ ID NO: 463147 - RNA, 22 nt, Human
aggcugggcuccgcccaacucc

SEQ ID NO: 463148 - RNA, 22 nt, Human
gagggcugauaaaugcgcaugg

SEQ ID NO: 463149 - RNA, 22 nt, Human
ggcuuucuagaucuagcucugu

SEQ ID NO: 463150 - RNA, 19 nt, Human
ggugugaagugaggaguua

SEQ ID NO: 463151 - RNA, 22 nt, Human
gguuugcauucugaaaggcuca

SEQ ID NO: 463152 - RNA, 22 nt, Human
gguagcagggcugugagucaga

SEQ ID NO: 463153 - RNA, 22 nt, Human
ucucauguauugcccuggugug

SEQ ID NO: 463154 - RNA, 22 nt, Human
agccucugguccucccucagcu

SEQ ID NO: 463155 - RNA, 19 nt, Human
uccaaaggacccaccucca

SEQ ID NO: 463156 - RNA, 22 nt, Human
auuuccaagaaagcuuuaggau

SEQ ID NO: 463157 - RNA, 22 nt, Human
uaccugcacagccagccaugug

SEQ ID NO: 463158 - RNA, 23 nt, Human
ucuggcuccauccuuggggaucc

SEQ ID NO: 463159 - RNA, 22 nt, Human
uuguuacagcacuuaaccuuuu

SEQ ID NO: 463160 - RNA, 22 nt, Human
cagcugcccauccugggaaaug

SEQ ID NO: 463161 - RNA, 22 nt, Human
ucucugucccuaggagccuugc

SEQ ID NO: 463162 - RNA, 22 nt, Human
gaggaacccagcugggguugcc

SEQ ID NO: 463163 - RNA, 22 nt, Human
ugaaagcacucacuucugcucu

SEQ ID NO: 463164 - RNA, 22 nt, Human
ccuguccuccaagagcacaucu

SEQ ID NO: 463165 - RNA, 22 nt, Human
cugcucugagaggcucuuccua

SEQ ID NO: 463166 - RNA, 22 nt, Human
ugcucuucggggccacugcuug

SEQ ID NO: 463167 - RNA, 22 nt, Human
acacaguauuacaauaggugcu

SEQ ID NO: 463168 - RNA, 22 nt, Human
ucaaaugcucuuugcagagagg

SEQ ID NO: 463169 - RNA, 22 nt, Human
cuggugccauucuguggccuag

SEQ ID NO: 463170 - RNA, 22 nt, Human
agggguggagaguguugccagu

SEQ ID NO: 463171 - RNA, 22 nt, Human
agccagcaugaagacagaggcc

SEQ ID NO: 463172 - RNA, 22 nt, Human
gagaagccgagucagcugagcc

SEQ ID NO: 463173 - RNA, 22 nt, Human
gagaggagguggcuaugacagc

SEQ ID NO: 463174 - RNA, 23 nt, Human
caugggagugagaaugccagcuc

SEQ ID NO: 463175 - RNA, 22 nt, Human
gaggccagcgcgcagcacuuuu

SEQ ID NO: 463176 - RNA, 22 nt, Human
gcuggggagcaagaguagugag

SEQ ID NO: 463177 - RNA, 22 nt, Human
ugagaagcugcuugugcuguau

SEQ ID NO: 463178 - RNA, 22 nt, Human
aagggcugccagggggugccag

SEQ ID NO: 463179 - RNA, 17 nt, Human
gcucccugaggacagcu

SEQ ID NO: 463180 - RNA, 22 nt, Human
ccucuugccaaucagcuacaga

SEQ ID NO: 463181 - RNA, 22 nt, Human
uguacuuccccaaugacagcac

SEQ ID NO: 463182 - RNA, 22 nt, Human
gccagguggagguugcagugag

SEQ ID NO: 463183 - RNA, 22 nt, Human
auuguggugucaguuauaggca

SEQ ID NO: 463184 - RNA, 22 nt, Human
agauuaugcuggcugcuacaag

SEQ ID NO: 463185 - RNA, 22 nt, Human
agacaaagaaaccguagaagca

SEQ ID NO: 463186 - RNA, 22 nt, Human
agagccugucugccuuucuacc

SEQ ID NO: 463187 - RNA, 22 nt, Human
aaggugugaagagaugggaaga

SEQ ID NO: 463188 - RNA, 22 nt, Human
ucagcugaguucuagagcacuc

SEQ ID NO: 463189 - RNA, 23 nt, Human
gcagaggagcaagcuggacacca

SEQ ID NO: 463190 - RNA, 22 nt, Human
gaggcugccccuuccucagcug

SEQ ID NO: 463191 - RNA, 16 nt, Human
gaggcuggcagauguc

SEQ ID NO: 463192 - RNA, 22 nt, Human
gcagggaccuugcccacccucc

SEQ ID NO: 463193 - RNA, 22 nt, Human
gcugggagccccgagccagcgc

SEQ ID NO: 463194 - RNA, 22 nt, Human
ucauuucaaguucugacagcua

SEQ ID NO: 463195 - RNA, 22 nt, Human
acccuuucuuacucacacgcuc

SEQ ID NO: 463196 - RNA, 22 nt, Human
ugcagaagcagagaguugccaa

SEQ ID NO: 463197 - RNA, 22 nt, Human
cagggacccuacuagcucacac

SEQ ID NO: 463198 - RNA, 22 nt, Human
auuguaaguagaaauguuaugg

SEQ ID NO: 463199 - RNA, 22 nt, Human
gggcugacucugcacugagcca

SEQ ID NO: 463200 - RNA, 22 nt, Human
gaaaggaaauauucuaagcacu

SEQ ID NO: 463201 - RNA, 22 nt, Human
uagaauaugugguaggaucugg

SEQ ID NO: 463202 - RNA, 20 nt, Human
aggcugggguguuuugccca

SEQ ID NO: 463203 - RNA, 22 nt, Human
gcucuggacccuggaguggcug

SEQ ID NO: 463204 - RNA, 22 nt, Human
cagggccacccucugcugggug

SEQ ID NO: 463205 - RNA, 22 nt, Human
ucuuuuaucuguuguguaacaa

SEQ ID NO: 463206 - RNA, 22 nt, Human
uucaggauccccaccgcguuua

SEQ ID NO: 463207 - RNA, 22 nt, Human
caggguccggcugccuggcugu

SEQ ID NO: 463208 - RNA, 22 nt, Human
ucagggcagguuaacuugggug

SEQ ID NO: 463209 - RNA, 22 nt, Human
gcugggcuucucaaugcugccu

SEQ ID NO: 463210 - RNA, 22 nt, Human
uguuaucugagcaacgucgacg

SEQ ID NO: 463211 - RNA, 22 nt, Human
gacagaggcaagaccagaagcc

SEQ ID NO: 463212 - RNA, 22 nt, Human
ucugcuggccuuagcaggucua

SEQ ID NO: 463213 - RNA, 22 nt, Human
caccuggcuggaagugcuccgg

SEQ ID NO: 463214 - RNA, 22 nt, Human
gucaugccagcggagcucggga

SEQ ID NO: 463215 - RNA, 20 nt, Human
aacacugugcgugguaggug

SEQ ID NO: 463216 - RNA, 22 nt, Human
aaggcacugacugugcagggga

SEQ ID NO: 463217 - RNA, 22 nt, Human
ugccugcuaggcccugcugggu

SEQ ID NO: 463218 - RNA, 22 nt, Human
gaggcaguggucugaugcaagg

SEQ ID NO: 463219 - RNA, 22 nt, Human
agaagaaacugucggggauauu

SEQ ID NO: 463220 - RNA, 22 nt, Human
agaggcuggauugagcauagac

SEQ ID NO: 463221 - RNA, 22 nt, Human
acagaauugauggaaaucucag

SEQ ID NO: 463222 - RNA, 22 nt, Human
gagccagcuacauggucugcaa

SEQ ID NO: 463223 - RNA, 22 nt, Human
aaauucuaugucaauguuuauu

SEQ ID NO: 463224 - RNA, 22 nt, Human
cugcagggcagaagggcauaga

SEQ ID NO: 463225 - RNA, 22 nt, Human
uagcagggaagaugaucagaau

SEQ ID NO: 463226 - RNA, 22 nt, Human
gcauuuguguucuuccuagagc

SEQ ID NO: 463227 - RNA, 19 nt, Human
aggagaaguagcagaaauu

SEQ ID NO: 463228 - RNA, 22 nt, Human
aaggccagacaggaccacaucu

SEQ ID NO: 463229 - RNA, 22 nt, Human
aggcugcuuccuuacguggcug

SEQ ID NO: 463230 - RNA, 22 nt, Human
gaggcaggguguugauuacaga

SEQ ID NO: 463231 - RNA, 22 nt, Human
uuuuccuuucaucaggacaaag

SEQ ID NO: 463232 - RNA, 22 nt, Human
auuugucugcuugcugccuucc

SEQ ID NO: 463233 - RNA, 22 nt, Human
gucccuaguggaaagacaugau

SEQ ID NO: 463234 - RNA, 22 nt, Human
aaccauuugccauuaucuuaag

SEQ ID NO: 463235 - RNA, 22 nt, Human
aucuggcuggauucuuagcguu

SEQ ID NO: 463236 - RNA, 22 nt, Human
aggaggggcaaugauagucugg

SEQ ID NO: 463237 - RNA, 22 nt, Human
agccagacauggcuccugcucc

SEQ ID NO: 463238 - RNA, 22 nt, Human
cagagcagguaucuuuggugaa

SEQ ID NO: 463239 - RNA, 22 nt, Human
cagguacacucccuugugcuga

SEQ ID NO: 463240 - RNA, 21 nt, Human
aggccucuucauggccaugau

SEQ ID NO: 463241 - RNA, 22 nt, Human
uacuguacugucuuuuuugcug

SEQ ID NO: 463242 - RNA, 22 nt, Human
agccacagugcaagagagaaaa

SEQ ID NO: 463243 - RNA, 22 nt, Human
cuuaauuuuuguaguagaugga

SEQ ID NO: 463244 - RNA, 22 nt, Human
uggcugagccuuuggggcuuuc

SEQ ID NO: 463245 - RNA, 22 nt, Human
gagauuggauuuaauggccaaa

SEQ ID NO: 463246 - RNA, 21 nt, Human
uccuucaguucugcacuuucu

SEQ ID NO: 463247 - RNA, 22 nt, Human
cagcucccgccaucgggaggca

SEQ ID NO: 463248 - RNA, 22 nt, Human
cagcccaaagccccaggcuaga

SEQ ID NO: 463249 - RNA, 22 nt, Human
cuuaacagcaagaucuguguca

SEQ ID NO: 463250 - RNA, 22 nt, Human
aaggaagacacagaugaaguga

SEQ ID NO: 463251 - RNA, 22 nt, Human
guuuuccauggaggucugaccu

SEQ ID NO: 463252 - RNA, 22 nt, Human
ggcucagagaccugcgaucuga

SEQ ID NO: 463253 - RNA, 22 nt, Human
gccagcugguaggcaccuagcc

SEQ ID NO: 463254 - RNA, 21 nt, Human
ccagagagagggaaguggguu

SEQ ID NO: 463255 - RNA, 22 nt, Human
agugugagcccuggaguggugc

SEQ ID NO: 463256 - RNA, 22 nt, Human
gagcucuguguagccugagggu

SEQ ID NO: 463257 - RNA, 22 nt, Human
uauugacaauaggcaacugagg

SEQ ID NO: 463258 - RNA, 22 nt, Human
agacucugugcuccuugcuuuc

SEQ ID NO: 463259 - RNA, 22 nt, Human
gcuggccugucuagagccuuac

SEQ ID NO: 463260 - RNA, 22 nt, Human
uggcucuguuuuaugaguacca

SEQ ID NO: 463261 - RNA, 21 nt, Human
uccucugcucucauaccacaa

SEQ ID NO: 463262 - RNA, 22 nt, Human
cugcagggcccgccugagcccu

SEQ ID NO: 463263 - RNA, 22 nt, Human
aucaggaugacuauaaggcugc

SEQ ID NO: 463264 - RNA, 22 nt, Human
auaguaacuggcauguuuauga

SEQ ID NO: 463265 - RNA, 20 nt, Human
agguggcuccugcugggggu

SEQ ID NO: 463266 - RNA, 22 nt, Human
gaggcucagagacuuuaaguuu

SEQ ID NO: 463267 - RNA, 22 nt, Human
aagcugccuagaguugaauguc

SEQ ID NO: 463268 - RNA, 22 nt, Human
ucaggaugguguggaggaaaua

SEQ ID NO: 463269 - RNA, 22 nt, Human
aaagucaaugauuucuccugga

SEQ ID NO: 463270 - RNA, 22 nt, Human
uguggccuggaaggggcugcuc

SEQ ID NO: 463271 - RNA, 22 nt, Human
ggggcuccagucuucacauuuu

SEQ ID NO: 463272 - RNA, 22 nt, Human
aucuagaaguggcaugaauuac

SEQ ID NO: 463273 - RNA, 22 nt, Human
ugaaaaaacaaguuggcccauu

SEQ ID NO: 463274 - RNA, 22 nt, Human
ucagagucucccccaguuuggg

SEQ ID NO: 463275 - RNA, 22 nt, Human
uuuauuugucuugccauuuagu

SEQ ID NO: 463276 - RNA, 17 nt, Human
uguggccuucugagcuu

SEQ ID NO: 463277 - RNA, 22 nt, Human
ggcucugguugaccaugauggc

SEQ ID NO: 463278 - RNA, 22 nt, Human
uaaggaaaguacauguuuugac

SEQ ID NO: 463279 - RNA, 22 nt, Human
gcuguccucuuggacucagggc

SEQ ID NO: 463280 - RNA, 22 nt, Human
ccugcagaaaggguccccagga

SEQ ID NO: 463281 - RNA, 20 nt, Human
ugaaaggugggaauuguggg

SEQ ID NO: 463282 - RNA, 22 nt, Human
augaaacugggauaacuauagc

SEQ ID NO: 463283 - RNA, 22 nt, Human
ccucacuggccagccaggggug

SEQ ID NO: 463284 - RNA, 20 nt, Human
caggcagaggaugcugacca

SEQ ID NO: 463285 - RNA, 20 nt, Human
agccaggccucaaguuaagu

SEQ ID NO: 463286 - RNA, 20 nt, Human
cccucccagaugcuucccaa

SEQ ID NO: 463287 - RNA, 22 nt, Human
gucagaggaggcugaguaggaa

SEQ ID NO: 463288 - RNA, 22 nt, Human
auucagcaguuccugcuucagu

SEQ ID NO: 463289 - RNA, 22 nt, Human
ugcaguggugguaaagaugcuc

SEQ ID NO: 463290 - RNA, 22 nt, Human
cucuggagggaggcugagcugg

SEQ ID NO: 463291 - RNA, 22 nt, Human
ugaagcaggaucguuugcuuca

SEQ ID NO: 463292 - RNA, 22 nt, Human
aagucaauuaguaaacuuggaa

SEQ ID NO: 463293 - RNA, 22 nt, Human
aggcuucuuagauuggcuggag

SEQ ID NO: 463294 - RNA, 22 nt, Human
aaucuggcauuugagaguagga

SEQ ID NO: 463295 - RNA, 22 nt, Human
ggccccacgggggaguccuagu

SEQ ID NO: 463296 - RNA, 22 nt, Human
acacacaauuaguuuuaugcuu

SEQ ID NO: 463297 - RNA, 22 nt, Human
aaauguucuacuuugauaauua

SEQ ID NO: 463298 - RNA, 22 nt, Human
cugcucugugguccaugagaca

SEQ ID NO: 463299 - RNA, 22 nt, Human
uucacagucacccuucuccaug

SEQ ID NO: 463300 - RNA, 22 nt, Human
gugcaugaagacucagaaaguc

SEQ ID NO: 463301 - RNA, 22 nt, Human
aggcagaauguuggaaaggaag

SEQ ID NO: 463302 - RNA, 22 nt, Human
gaggcagagaccuucaggaccu

SEQ ID NO: 463303 - RNA, 22 nt, Human
ggcuucuccccuuugagucuuc

SEQ ID NO: 463304 - RNA, 22 nt, Human
ugaaggugucuuugugaacauc

SEQ ID NO: 463305 - RNA, 22 nt, Human
gcaguggcuaagcucgcaugca

SEQ ID NO: 463306 - RNA, 22 nt, Human
cugagucucccggcaguggagg

SEQ ID NO: 463307 - RNA, 22 nt, Human
ucucaggggccuggaguccugg

SEQ ID NO: 463308 - RNA, 22 nt, Human
acccugggucauauacagugug

SEQ ID NO: 463309 - RNA, 22 nt, Human
agcuugauuucucugcagugug

SEQ ID NO: 463310 - RNA, 22 nt, Human
cccaggcacucuuggucauuuu

SEQ ID NO: 463311 - RNA, 22 nt, Human
cuuaaauucuuaaugcccucau

SEQ ID NO: 463312 - RNA, 22 nt, Human
ccugagugaauucccucacugu

SEQ ID NO: 463313 - RNA, 22 nt, Human
ucaggggacagccagcuggagg

SEQ ID NO: 463314 - RNA, 22 nt, Human
ucuauacaugugcacacacauc

SEQ ID NO: 463315 - RNA, 20 nt, Human
aggagccauugacugcagca

SEQ ID NO: 463316 - RNA, 22 nt, Human
acacagggcugcgccugacccc

SEQ ID NO: 463317 - RNA, 22 nt, Human
cacccagcagcacuuaagacua

SEQ ID NO: 463318 - RNA, 22 nt, Human
acaggcagcacuaaucucuggu

SEQ ID NO: 463319 - RNA, 22 nt, Human
aaaaaccuuucccauacuaaga

SEQ ID NO: 463320 - RNA, 22 nt, Human
ucucugggugauggcagggcac

SEQ ID NO: 463321 - RNA, 22 nt, Human
gcagagugaggaagagcuucca

SEQ ID NO: 463322 - RNA, 22 nt, Human
gcccaggcuagcguagagugca

SEQ ID NO: 463323 - RNA, 22 nt, Human
cccugggacccgcugcagaggc

SEQ ID NO: 463324 - RNA, 22 nt, Human
uagggcucugagaguucagccu

SEQ ID NO: 463325 - RNA, 19 nt, Human
agacagagacugaaauaga

SEQ ID NO: 463326 - RNA, 22 nt, Human
caguacuuuucuggcuuucuac

SEQ ID NO: 463327 - RNA, 22 nt, Human
cugcccugugaggguccuuggg

SEQ ID NO: 463328 - RNA, 22 nt, Human
acagaauacuacagacugguua

SEQ ID NO: 463329 - RNA, 21 nt, Human
aggcccagagucuugggggga

SEQ ID NO: 463330 - RNA, 22 nt, Human
caucacagauguuguguggagu

SEQ ID NO: 463331 - RNA, 22 nt, Human
gcucugcucuaacauuccugac

SEQ ID NO: 463332 - RNA, 22 nt, Human
ucugaaggugcuagagaaagcu

SEQ ID NO: 463333 - RNA, 22 nt, Human
cagccuccugggacacucaccg

SEQ ID NO: 463334 - RNA, 22 nt, Human
acagcagcuggguucccaccau

SEQ ID NO: 463335 - RNA, 22 nt, Human
cuugugcauuucauuccucagg

SEQ ID NO: 463336 - RNA, 22 nt, Human
cuucagggugacgcaggcugca

SEQ ID NO: 463337 - RNA, 23 nt, Human
ggucccaguggagaggccucacc

SEQ ID NO: 463338 - RNA, 22 nt, Human
gauuuauuuuuaaucagcaggg

SEQ ID NO: 463339 - RNA, 22 nt, Human
aaagguuaguucuuagaagugc

SEQ ID NO: 463340 - RNA, 22 nt, Human
gaggagagagggacugucugca

SEQ ID NO: 463341 - RNA, 22 nt, Human
ucuucagagugaaagucuguga

SEQ ID NO: 463342 - RNA, 22 nt, Human
gcugaggccccagggugauggg

SEQ ID NO: 463343 - RNA, 22 nt, Human
agcugcucucacuggacgccug

SEQ ID NO: 463344 - RNA, 22 nt, Human
ccuguacauggccaucuuuacc

SEQ ID NO: 463345 - RNA, 22 nt, Human
caggauccuggcugcauggacg

SEQ ID NO: 463346 - RNA, 22 nt, Human
uaauacuuuugccuuguauuca

SEQ ID NO: 463347 - RNA, 23 nt, Human
cccuguagcccaggacaggcuuu

SEQ ID NO: 463348 - RNA, 22 nt, Human
agcugauuccacuuuuucccca

SEQ ID NO: 463349 - RNA, 22 nt, Human
ccauguggugggaaggagaaug

SEQ ID NO: 463350 - RNA, 22 nt, Human
guucaaguucauaucucuuaac

SEQ ID NO: 463351 - RNA, 22 nt, Human
agggcugaccuaagcuccacuu

SEQ ID NO: 463352 - RNA, 22 nt, Human
aaagccuugagauccuauaguu

SEQ ID NO: 463353 - RNA, 22 nt, Human
ugcugccaccugguggcugaag

SEQ ID NO: 463354 - RNA, 22 nt, Human
cacagguggcuccaaguuagag

SEQ ID NO: 463355 - RNA, 22 nt, Human
cccagccucuggauucugcccu

SEQ ID NO: 463356 - RNA, 22 nt, Human
aauguguguauuucuaggcgag

SEQ ID NO: 463357 - RNA, 22 nt, Human
aaaucaguucucccuuucuuca

SEQ ID NO: 463358 - RNA, 22 nt, Human
guccagcugaucuugacccagc

SEQ ID NO: 463359 - RNA, 22 nt, Human
gggaccaggugggugcauuccg

SEQ ID NO: 463360 - RNA, 22 nt, Human
uccucagggcggccuccgucuu

SEQ ID NO: 463361 - RNA, 22 nt, Human
agcugucuccagauacaggauu

SEQ ID NO: 463362 - RNA, 22 nt, Human
ccagagccggcucccucagcuu

SEQ ID NO: 463363 - RNA, 22 nt, Human
cucugugccucaguuuucuucu

SEQ ID NO: 463364 - RNA, 20 nt, Human
ggguggaguugcggucugug

SEQ ID NO: 463365 - RNA, 22 nt, Human
cacagcagaaauaugaaggcag

SEQ ID NO: 463366 - RNA, 22 nt, Human
cagcaugcaaguccagaugugg

SEQ ID NO: 463367 - RNA, 22 nt, Human
uguagaaagaauauguuucaua

SEQ ID NO: 463368 - RNA, 22 nt, Human
ccugggcaacauagugagaccu

SEQ ID NO: 463369 - RNA, 22 nt, Human
agcugcuaugacaacaccagcc

SEQ ID NO: 463370 - RNA, 22 nt, Human
ccaagggcugcugaggugucca

SEQ ID NO: 463371 - RNA, 22 nt, Human
cugagaggcggagcuugcagug

SEQ ID NO: 463372 - RNA, 23 nt, Human
ucccagggaaggugagcgaggcu

SEQ ID NO: 463373 - RNA, 22 nt, Human
gcugccuuuugcuccucccacc

SEQ ID NO: 463374 - RNA, 22 nt, Human
cauugaaaaacguugacugagu

SEQ ID NO: 463375 - RNA, 22 nt, Human
cugggcaguuuuacaucauugc

SEQ ID NO: 463376 - RNA, 22 nt, Human
cgucccaguuccagccgcgcug

SEQ ID NO: 463377 - RNA, 22 nt, Human
gcagcuggagccagccagacac

SEQ ID NO: 463378 - RNA, 22 nt, Human
uuguuaaaaugcauauucuggu

SEQ ID NO: 463379 - RNA, 22 nt, Human
auucacaaagaagggaaguaca

SEQ ID NO: 463380 - RNA, 18 nt, Human
ccucacagacuuccaugu

SEQ ID NO: 463381 - RNA, 22 nt, Human
auuacacaggcuggcucuuuga

SEQ ID NO: 463382 - RNA, 22 nt, Human
uuuguuuagaugguaaaucagu

SEQ ID NO: 463383 - RNA, 18 nt, Human
cagaagcaggcagugcag

SEQ ID NO: 463384 - RNA, 22 nt, Human
cagggcucgcucuugcccuucg

SEQ ID NO: 463385 - RNA, 22 nt, Human
gcagagccccauugcuggcggg

SEQ ID NO: 463386 - RNA, 21 nt, Human
cccuugccugcacuccucggc

SEQ ID NO: 463387 - RNA, 22 nt, Human
ucuuuacaucacaauuguaugg

SEQ ID NO: 463388 - RNA, 22 nt, Human
gugcucuggcuggucucccggu

SEQ ID NO: 463389 - RNA, 22 nt, Human
auaucuuuguuuuugccaagau

SEQ ID NO: 463390 - RNA, 22 nt, Human
caagagcugaggcuggagaggu

SEQ ID NO: 463391 - RNA, 22 nt, Human
agcagccagagucugaacauua

SEQ ID NO: 463392 - RNA, 22 nt, Human
gagcucugacugcugggugaca

SEQ ID NO: 463393 - RNA, 22 nt, Human
aggcuucagguuugcuuugcag

SEQ ID NO: 463394 - RNA, 21 nt, Human
auucagaaagggaauaaacuc

SEQ ID NO: 463395 - RNA, 22 nt, Human
cauuucugugacacuuccaucu

SEQ ID NO: 463396 - RNA, 22 nt, Human
acauuuacagugcuagacaauc

SEQ ID NO: 463397 - RNA, 22 nt, Human
ugaacgcagguccacauggcuc

SEQ ID NO: 463398 - RNA, 22 nt, Human
ggugggcacccgagacuggauc

SEQ ID NO: 463399 - RNA, 22 nt, Human
uaaaugugucuuuuuaaggccu

SEQ ID NO: 463400 - RNA, 22 nt, Human
cuugaaagauuuggccucugug

SEQ ID NO: 463401 - RNA, 17 nt, Human
agcuccugcccauggcu

SEQ ID NO: 463402 - RNA, 22 nt, Human
ccagggcaggggcuggaguuca

SEQ ID NO: 463403 - RNA, 22 nt, Human
agagugucugguagcugcucug

SEQ ID NO: 463404 - RNA, 22 nt, Human
guggccuggcgagcuggcgcgg

SEQ ID NO: 463405 - RNA, 19 nt, Human
cagcugcaccgugaccauc

SEQ ID NO: 463406 - RNA, 22 nt, Human
aggagaaagacuggacagccaa

SEQ ID NO: 463407 - RNA, 17 nt, Human
uccuucagugccucugc

SEQ ID NO: 463408 - RNA, 22 nt, Human
gccuggagcagacgugucccgg

SEQ ID NO: 463409 - RNA, 21 nt, Human
ugguuugcggccaaaguuaaa

SEQ ID NO: 463410 - RNA, 22 nt, Human
ccugagagagaagcgaccuggu

SEQ ID NO: 463411 - RNA, 22 nt, Human
gagccaggguuugaaacuagac

SEQ ID NO: 463412 - RNA, 18 nt, Human
aggcaggugcuggaaguc

SEQ ID NO: 463413 - RNA, 19 nt, Human
ccauggcaaugaucugaug

SEQ ID NO: 463414 - RNA, 22 nt, Human
cagcugccccgcuggcugacca

SEQ ID NO: 463415 - RNA, 22 nt, Human
uaugcauacaaugagauauucc

SEQ ID NO: 463416 - RNA, 22 nt, Human
ugaggcagaaaauagcaguuca

SEQ ID NO: 463417 - RNA, 22 nt, Human
ccugucugcaugagugagcaua

SEQ ID NO: 463418 - RNA, 22 nt, Human
gcccugagggguggugucugua

SEQ ID NO: 463419 - RNA, 22 nt, Human
uggcccgaccucugcucaugca

SEQ ID NO: 463420 - RNA, 22 nt, Human
uacccagcccaugccuaccuca

SEQ ID NO: 463421 - RNA, 22 nt, Human
uguuuuaaucucccauugcucu

SEQ ID NO: 463422 - RNA, 22 nt, Human
uggcacugggaugcuacuguua

SEQ ID NO: 463423 - RNA, 22 nt, Human
gugcagguguuuuggcugccag

SEQ ID NO: 463424 - RNA, 22 nt, Human
cuggcagcagcuucuggaucga

SEQ ID NO: 463425 - RNA, 22 nt, Human
aggcugcguuagccucacuccc

SEQ ID NO: 463426 - RNA, 22 nt, Human
uggcuggcgccgggcuagccac

SEQ ID NO: 463427 - RNA, 22 nt, Human
ccuggccucagccuagggcuga

SEQ ID NO: 463428 - RNA, 17 nt, Human
uguuccauuugaccacc

SEQ ID NO: 463429 - RNA, 22 nt, Human
cugccaggccucaucccagcca

SEQ ID NO: 463430 - RNA, 22 nt, Human
caagcagacaguaggccuagaa

SEQ ID NO: 463431 - RNA, 22 nt, Human
guuacaaaggacugggggccac

SEQ ID NO: 463432 - RNA, 18 nt, Human
uuucacaaccuccagagg

SEQ ID NO: 463433 - RNA, 22 nt, Human
ccaggccuguguuguguggagg

SEQ ID NO: 463434 - RNA, 22 nt, Human
cucagaagaacaaaggcucuac

SEQ ID NO: 463435 - RNA, 22 nt, Human
uuaauacagucuccagaaguaa

SEQ ID NO: 463436 - RNA, 22 nt, Human
ccagggcuggugggagaugcug

SEQ ID NO: 463437 - RNA, 22 nt, Human
agugcauuauauguuucaaugg

SEQ ID NO: 463438 - RNA, 22 nt, Human
gaggcuggcagaaaagcacagg

SEQ ID NO: 463439 - RNA, 22 nt, Human
gccagggcucgcggucccucgu

SEQ ID NO: 463440 - RNA, 22 nt, Human
uacuuagagcgauaauuuauac

SEQ ID NO: 463441 - RNA, 22 nt, Human
aaggccaugaccacuugcugug

SEQ ID NO: 463442 - RNA, 22 nt, Human
ugcuuccuucccguucuucucc

SEQ ID NO: 463443 - RNA, 22 nt, Human
uggggacauagccagucuggcu

SEQ ID NO: 463444 - RNA, 22 nt, Human
ucugaaaugcaaauuugacuga

SEQ ID NO: 463445 - RNA, 22 nt, Human
guguuuuaucagacaaaguaua

SEQ ID NO: 463446 - RNA, 22 nt, Human
cugccucuauaggaguccacca

SEQ ID NO: 463447 - RNA, 22 nt, Human
aggaaagcucccaguagggcuc

SEQ ID NO: 463448 - RNA, 22 nt, Human
uggcuccuaucaaggagugggu

SEQ ID NO: 463449 - RNA, 22 nt, Human
uacaaagugagcaaccucuuuu

SEQ ID NO: 463450 - RNA, 22 nt, Human
ccaggcaggcagcguucucagg

SEQ ID NO: 463451 - RNA, 22 nt, Human
cagugcuccugauguacccuug

SEQ ID NO: 463452 - RNA, 22 nt, Human
cuggaggcugaguugggucucc

SEQ ID NO: 463453 - RNA, 22 nt, Human
caacauuucaaggucuuuagga

SEQ ID NO: 463454 - RNA, 22 nt, Human
guucacaucacuucacugaacc

SEQ ID NO: 463455 - RNA, 22 nt, Human
gaaggaaaaauacucuguaagg

SEQ ID NO: 463456 - RNA, 17 nt, Human
aggaaacauuuucuuuc

SEQ ID NO: 463457 - RNA, 22 nt, Human
cugggccugguagggcuugaaa

SEQ ID NO: 463458 - RNA, 22 nt, Human
uccaggcauguugggaagauga

SEQ ID NO: 463459 - RNA, 20 nt, Human
uccaguuuuggagacauucu

SEQ ID NO: 463460 - RNA, 22 nt, Human
auaguguuacccuucuuaaagu

SEQ ID NO: 463461 - RNA, 22 nt, Human
augagcuguaagguggcuuccu

SEQ ID NO: 463462 - RNA, 22 nt, Human
gagaggccaaaaucccugcccc

SEQ ID NO: 463463 - RNA, 19 nt, Human
gccagcagaaugaugaggc

SEQ ID NO: 463464 - RNA, 22 nt, Human
ggcugccugaacuuuggggaaa

SEQ ID NO: 463465 - RNA, 22 nt, Human
uaaaugugggggccacgggcuu

SEQ ID NO: 463466 - RNA, 22 nt, Human
ggcaggagaauggcgugaacuc

SEQ ID NO: 463467 - RNA, 22 nt, Human
ccaggggaaacagggagcacuc

SEQ ID NO: 463468 - RNA, 22 nt, Human
gacauaauaaucugaccuagau

SEQ ID NO: 463469 - RNA, 22 nt, Human
cuguccuggagggcauaggacg

SEQ ID NO: 463470 - RNA, 22 nt, Human
gaagccagccuugucugccucu

SEQ ID NO: 463471 - RNA, 22 nt, Human
aaaguguugauaugugacaucc

SEQ ID NO: 463472 - RNA, 22 nt, Human
uaaaguuuggcagacaauaaca

SEQ ID NO: 463473 - RNA, 20 nt, Human
cagcugccuggcucugggau

SEQ ID NO: 463474 - RNA, 19 nt, Human
ggucucagugcagcugcag

SEQ ID NO: 463475 - RNA, 22 nt, Human
ucucuuaauuuuggaauagugu

SEQ ID NO: 463476 - RNA, 22 nt, Human
uaaggccauuauggugggcccg

SEQ ID NO: 463477 - RNA, 22 nt, Human
acucugugugaguagagccugu

SEQ ID NO: 463478 - RNA, 22 nt, Human
cacugcuuaguugguaaaugug

SEQ ID NO: 463479 - RNA, 22 nt, Human
cccuggcauaaaacuucuccag

SEQ ID NO: 463480 - RNA, 18 nt, Human
acaguaaagaaaggaauu

SEQ ID NO: 463481 - RNA, 22 nt, Human
auuagagguacaaaccuucacu

SEQ ID NO: 463482 - RNA, 22 nt, Human
gaaaucuuuauggaaauaacaa

SEQ ID NO: 463483 - RNA, 22 nt, Human
ugucccaggccucauguugcca

SEQ ID NO: 463484 - RNA, 22 nt, Human
cugggcuucucccccuggcaga

SEQ ID NO: 463485 - RNA, 20 nt, Human
uuuuuccuucucuacaggca

SEQ ID NO: 463486 - RNA, 22 nt, Human
uggcugcucaagggaggaggcu

SEQ ID NO: 463487 - RNA, 22 nt, Human
ucccagacaaucauuggccacc

SEQ ID NO: 463488 - RNA, 22 nt, Human
aacacagcuaauuucugucaau

SEQ ID NO: 463489 - RNA, 22 nt, Human
ucaaaauuuuauuucucaagga

SEQ ID NO: 463490 - RNA, 21 nt, Human
ugcaggagucugugagucagg

SEQ ID NO: 463491 - RNA, 22 nt, Human
gaggcacaauacaugucucaag

SEQ ID NO: 463492 - RNA, 22 nt, Human
cuauugaauuaacuauuaaagu

SEQ ID NO: 463493 - RNA, 22 nt, Human
aacucaguucuuuccacaaugc

SEQ ID NO: 463494 - RNA, 22 nt, Human
aaaucuguaagcaauugcucag

SEQ ID NO: 463495 - RNA, 22 nt, Human
cuucauuaaccaaaaugcaaua

SEQ ID NO: 463496 - RNA, 22 nt, Human
cugguuuagcuguaagguuccc

SEQ ID NO: 463497 - RNA, 22 nt, Human
cagcugaguuacucugaggucu

SEQ ID NO: 463498 - RNA, 22 nt, Human
gcagugaaacaauaggaucaaa

SEQ ID NO: 463499 - RNA, 22 nt, Human
aacagaaugcaggggaugcugc

SEQ ID NO: 463500 - RNA, 22 nt, Human
ugcaccccauuuuacauuuaca

SEQ ID NO: 463501 - RNA, 22 nt, Human
cucugaacucuugggcagcaug

SEQ ID NO: 463502 - RNA, 22 nt, Human
aaugauguauuaguacaacaca

SEQ ID NO: 463503 - RNA, 22 nt, Human
agucaggagcugcugcauugua

SEQ ID NO: 463504 - RNA, 22 nt, Human
cacugcauggaugauggcugua

SEQ ID NO: 463505 - RNA, 22 nt, Human
acaaagucugaaaccugaggca

SEQ ID NO: 463506 - RNA, 22 nt, Human
ccuguggcugccacuuggguga

SEQ ID NO: 463507 - RNA, 22 nt, Human
gagcagggagacaacucuggug

SEQ ID NO: 463508 - RNA, 18 nt, Human
ucagagguacagaaaagu

SEQ ID NO: 463509 - RNA, 22 nt, Human
uauuuccaagcugaauccaaug

SEQ ID NO: 463510 - RNA, 22 nt, Human
cacccacauggaaauucacagu

SEQ ID NO: 463511 - RNA, 23 nt, Human
acagcaagaggaccagaugugag

SEQ ID NO: 463512 - RNA, 22 nt, Human
caaaggagguaaugggugugag

SEQ ID NO: 463513 - RNA, 21 nt, Human
accagcaggagaucagaagga

SEQ ID NO: 463514 - RNA, 22 nt, Human
uggcagcugauuagauggugcc

SEQ ID NO: 463515 - RNA, 22 nt, Human
ggcuggcacucuguccaguguc

SEQ ID NO: 463516 - RNA, 19 nt, Human
cucagagaggggcagugcc

SEQ ID NO: 463517 - RNA, 22 nt, Human
uggcagcacaagguggcccaug

SEQ ID NO: 463518 - RNA, 22 nt, Human
cugcagugcaagcccagaugga

SEQ ID NO: 463519 - RNA, 22 nt, Human
gagauuucuuuugaugccuguc

SEQ ID NO: 463520 - RNA, 22 nt, Human
agcugaguuaauucaucacuua

SEQ ID NO: 463521 - RNA, 19 nt, Human
gaaggagagcugaguuagg

SEQ ID NO: 463522 - RNA, 22 nt, Human
gaggcucaaaccuggacagagc

SEQ ID NO: 463523 - RNA, 22 nt, Human
guuccuauauagccuuaaggau

SEQ ID NO: 463524 - RNA, 22 nt, Human
uucaagaugacccagucacacg

SEQ ID NO: 463525 - RNA, 22 nt, Human
ucuucucccaucuccaggcagg

SEQ ID NO: 463526 - RNA, 22 nt, Human
aggcccuggguuagggcccacu

SEQ ID NO: 463527 - RNA, 20 nt, Human
agccagaagaaggcuggaga

SEQ ID NO: 463528 - RNA, 22 nt, Human
gcaggagccaggccgagcuggu

SEQ ID NO: 463529 - RNA, 22 nt, Human
uaauuuuaugacaguguauuuu

SEQ ID NO: 463530 - RNA, 22 nt, Human
uccaagaucuacagcaguuuag

SEQ ID NO: 463531 - RNA, 22 nt, Human
cacagcugugagaagggagccu

SEQ ID NO: 463532 - RNA, 22 nt, Human
acagaguaggugcugucgacug

SEQ ID NO: 463533 - RNA, 22 nt, Human
ggggcaggagguguucucuuuu

SEQ ID NO: 463534 - RNA, 22 nt, Human
uccuuggcuuucuggagcuucu

SEQ ID NO: 463535 - RNA, 22 nt, Human
ugcugcucuguaaagugaugag

SEQ ID NO: 463536 - RNA, 22 nt, Human
aaacuguaaacacagcaguaca

SEQ ID NO: 463537 - RNA, 20 nt, Human
aacauugcuucaauguaacc

SEQ ID NO: 463538 - RNA, 22 nt, Human
ugaggaagccaaacagcuacac

SEQ ID NO: 463539 - RNA, 22 nt, Human
ugaggccaggaucccaggcucu

SEQ ID NO: 463540 - RNA, 22 nt, Human
cugagcccaggcgggagcugag

SEQ ID NO: 463541 - RNA, 22 nt, Human
ggcccugggcagaggagugggc

SEQ ID NO: 463542 - RNA, 22 nt, Human
ucaagcaggguagcaagcuggu

SEQ ID NO: 463543 - RNA, 22 nt, Human
ucccagcagcauagcucagaau

SEQ ID NO: 463544 - RNA, 22 nt, Human
agucccagcucagaaccacuag

SEQ ID NO: 463545 - RNA, 22 nt, Human
aauucuauaggcaagcuauuuu

SEQ ID NO: 463546 - RNA, 22 nt, Human
uggccuuggacagagcgcuccu

SEQ ID NO: 463547 - RNA, 22 nt, Human
ucagccacuacccaccuuaaca

SEQ ID NO: 463548 - RNA, 22 nt, Human
cagcucugggugacaggagggc

SEQ ID NO: 463549 - RNA, 17 nt, Human
gggcagggacuccuggg

SEQ ID NO: 463550 - RNA, 22 nt, Human
gccugagacagugugguccaau

SEQ ID NO: 463551 - RNA, 22 nt, Human
ucugaggccccugggcaggaug

SEQ ID NO: 463552 - RNA, 22 nt, Human
ccaguccuggccaguaacauga

SEQ ID NO: 463553 - RNA, 22 nt, Human
uugcacuccagcccgagcaaca

SEQ ID NO: 463554 - RNA, 22 nt, Human
cugcccugcccaggccuugggc

SEQ ID NO: 463555 - RNA, 22 nt, Human
aggcacugcagauuacaggcgc

SEQ ID NO: 463556 - RNA, 22 nt, Human
ugaauaugugacuuugauuuca

SEQ ID NO: 463557 - RNA, 22 nt, Human
gagggagagugauggaccauug

SEQ ID NO: 463558 - RNA, 22 nt, Human
gggugggaacaggaugccagga

SEQ ID NO: 463559 - RNA, 19 nt, Human
caaggguugggucugucau

SEQ ID NO: 463560 - RNA, 22 nt, Human
gggacagaaggaagugagcaca

SEQ ID NO: 463561 - RNA, 17 nt, Human
cagggcugucugccuag

SEQ ID NO: 463562 - RNA, 22 nt, Human
cuacauaaauauuuaugugucu

SEQ ID NO: 463563 - RNA, 22 nt, Human
ggcagagcugcaugagcacuca

SEQ ID NO: 463564 - RNA, 22 nt, Human
uacuguuuucuauaauggcugu

SEQ ID NO: 463565 - RNA, 22 nt, Human
ccacagggccuuuccugcuggc

SEQ ID NO: 463566 - RNA, 22 nt, Human
acaaauguggacauggauaaug

SEQ ID NO: 463567 - RNA, 22 nt, Human
cccaggcauuuucaacuuuagu

SEQ ID NO: 463568 - RNA, 21 nt, Human
uuuucccacugaaagcuccca

SEQ ID NO: 463569 - RNA, 22 nt, Human
ggagccugggcauuaguaauuu

SEQ ID NO: 463570 - RNA, 22 nt, Human
uuucaugugcaauuagcaauau

SEQ ID NO: 463571 - RNA, 21 nt, Human
acccuggguucuccauacccu

SEQ ID NO: 463572 - RNA, 22 nt, Human
cagagguaccagcagccucugg

SEQ ID NO: 463573 - RNA, 22 nt, Human
agugcacuggcaccaucucagc

SEQ ID NO: 463574 - RNA, 22 nt, Human
agggcugcugaggaagccuugc

SEQ ID NO: 463575 - RNA, 22 nt, Human
cugggcuacguguugacagcau

SEQ ID NO: 463576 - RNA, 19 nt, Human
gcuccugggccucacucau

SEQ ID NO: 463577 - RNA, 22 nt, Human
uccagcagggaauuaguagucu

SEQ ID NO: 463578 - RNA, 22 nt, Human
agggugccuggaagccacucac

SEQ ID NO: 463579 - RNA, 22 nt, Human
ugcaccauuuugucaggcuacu

SEQ ID NO: 463580 - RNA, 22 nt, Human
agagcugaggauccagcugagc

SEQ ID NO: 463581 - RNA, 22 nt, Human
uagaaaauagggccuguggagc

SEQ ID NO: 463582 - RNA, 22 nt, Human
agcagaacauuuucagggcugu

SEQ ID NO: 463583 - RNA, 22 nt, Human
ggcugccuccugcugggcugga

SEQ ID NO: 463584 - RNA, 22 nt, Human
cagucucagaggugggaguggg

SEQ ID NO: 463585 - RNA, 20 nt, Human
uuucacaucugucccuuuaa

SEQ ID NO: 463586 - RNA, 22 nt, Human
ccagagaccagaacauggggau

SEQ ID NO: 463587 - RNA, 22 nt, Human
ccugucucuguuaccacauuug

SEQ ID NO: 463588 - RNA, 22 nt, Human
cccaggcagccccagaagcuug

SEQ ID NO: 463589 - RNA, 22 nt, Human
aggcaggccccugagaauagac

SEQ ID NO: 463590 - RNA, 22 nt, Human
ggauggcauguugggcucuguu

SEQ ID NO: 463591 - RNA, 22 nt, Human
aggcagugcagaguccucuucu

SEQ ID NO: 463592 - RNA, 22 nt, Human
auuugucuuuggaccugugaga

SEQ ID NO: 463593 - RNA, 22 nt, Human
aacaaauggggccuuguaugaa

SEQ ID NO: 463594 - RNA, 22 nt, Human
uucuggagaucugccuauggga

SEQ ID NO: 463595 - RNA, 22 nt, Human
cccuggaggaccccaauguggc

SEQ ID NO: 463596 - RNA, 22 nt, Human
uuccuggugguggugacagcac

SEQ ID NO: 463597 - RNA, 22 nt, Human
aguguuccacacaucuggggaa

SEQ ID NO: 463598 - RNA, 22 nt, Human
caauuucuaacauuccauggau

SEQ ID NO: 463599 - RNA, 22 nt, Human
caggcacugugcuagauccuug

SEQ ID NO: 463600 - RNA, 17 nt, Human
ucuuuccugccaugcuc

SEQ ID NO: 463601 - RNA, 22 nt, Human
ucuccuggauggaccuucucuu

SEQ ID NO: 463602 - RNA, 20 nt, Human
ggcagagcuaugucuguugc

SEQ ID NO: 463603 - RNA, 22 nt, Human
guggagccaggaucuccgcaca

SEQ ID NO: 463604 - RNA, 22 nt, Human
uucaagaucgaguuuaaaguga

SEQ ID NO: 463605 - RNA, 22 nt, Human
gagagugaggcaucaggggcag

SEQ ID NO: 463606 - RNA, 22 nt, Human
ccaggagcaaagaucacuggga

SEQ ID NO: 463607 - RNA, 22 nt, Human
cuuucucugugugguaaagggc

SEQ ID NO: 463608 - RNA, 17 nt, Human
cugucugcgcaugaggu

SEQ ID NO: 463609 - RNA, 22 nt, Human
ccuggcugugcauugccggccc

SEQ ID NO: 463610 - RNA, 22 nt, Human
caggccuggggcuggcuuccag

SEQ ID NO: 463611 - RNA, 22 nt, Human
ccagaauagaaggcagcuguca

SEQ ID NO: 463612 - RNA, 22 nt, Human
ugggcuggcugaggcauucacu

SEQ ID NO: 463613 - RNA, 22 nt, Human
agcagagcggggccuccggaag

SEQ ID NO: 463614 - RNA, 22 nt, Human
ugaagcugugggcaguggagcc

SEQ ID NO: 463615 - RNA, 22 nt, Human
ggagaguggauuccagcuguau

SEQ ID NO: 463616 - RNA, 22 nt, Human
agauuguagaaacuguagcauu

SEQ ID NO: 463617 - RNA, 22 nt, Human
uccagagggcgauggcuggggg

SEQ ID NO: 463618 - RNA, 22 nt, Human
cucuccagaauaugccgccgug

SEQ ID NO: 463619 - RNA, 22 nt, Human
uguuucauguggacauaguugu

SEQ ID NO: 463620 - RNA, 22 nt, Human
gaagccaagugcaaaugccuua

SEQ ID NO: 463621 - RNA, 22 nt, Human
ugccaggaggaggugggacaga

SEQ ID NO: 463622 - RNA, 22 nt, Human
aaccugcauguuucuaaaagca

SEQ ID NO: 463623 - RNA, 22 nt, Human
aaguucaaguaguguuacaugg

SEQ ID NO: 463624 - RNA, 22 nt, Human
agcugguguccuccuggagcug

SEQ ID NO: 463625 - RNA, 22 nt, Human
cccagcuccagagccagaaaca

SEQ ID NO: 463626 - RNA, 22 nt, Human
acccagaggcggagguugcagu

SEQ ID NO: 463627 - RNA, 21 nt, Human
gggagcuggaaacugggugac

SEQ ID NO: 463628 - RNA, 22 nt, Human
accuggcaugaagcaugccuua

SEQ ID NO: 463629 - RNA, 22 nt, Human
uaagacaauucuucagucacaa

SEQ ID NO: 463630 - RNA, 22 nt, Human
aucagcaaucucguguauuagg

SEQ ID NO: 463631 - RNA, 22 nt, Human
agcagggcagugaucagaaagg

SEQ ID NO: 463632 - RNA, 20 nt, Human
gcccuggagccuuguccugg

SEQ ID NO: 463633 - RNA, 22 nt, Human
gccaggcaguucaaguacacca

SEQ ID NO: 463634 - RNA, 22 nt, Human
ccuggagcgcgggucaagcugg

SEQ ID NO: 463635 - RNA, 17 nt, Human
agccgggcauggaccag

SEQ ID NO: 463636 - RNA, 22 nt, Human
aguguuccuugcuuucccagag

SEQ ID NO: 463637 - RNA, 22 nt, Human
ccacugucuuuuccaggcugaa

SEQ ID NO: 463638 - RNA, 20 nt, Human
cuggguggcaagcaaggggg

SEQ ID NO: 463639 - RNA, 22 nt, Human
ucucucugccaacucacagcca

SEQ ID NO: 463640 - RNA, 22 nt, Human
agaaggcacucacacuggcacg

SEQ ID NO: 463641 - RNA, 22 nt, Human
agccacagcuccuugguggaga

SEQ ID NO: 463642 - RNA, 22 nt, Human
uguacaguguagucaugagguu

SEQ ID NO: 463643 - RNA, 22 nt, Human
gcuguguccucacacagccuuu

SEQ ID NO: 463644 - RNA, 22 nt, Human
uucaggauucuuucagacuggg

SEQ ID NO: 463645 - RNA, 22 nt, Human
gugccugugcggacucagggaa

SEQ ID NO: 463646 - RNA, 22 nt, Human
ucaggaugguccuuuaugagaa

SEQ ID NO: 463647 - RNA, 22 nt, Human
caaagcaaggcucaguuugaac

SEQ ID NO: 463648 - RNA, 22 nt, Human
aggccagacagcuagaaacagg

SEQ ID NO: 463649 - RNA, 22 nt, Human
cugaaauuccauuucagccaca

SEQ ID NO: 463650 - RNA, 22 nt, Human
cucacaggcaucucaucaggcu

SEQ ID NO: 463651 - RNA, 22 nt, Human
ggagggagucagcugauuagaa

SEQ ID NO: 463652 - RNA, 21 nt, Human
ucuugaaaauuguagcaguuu

SEQ ID NO: 463653 - RNA, 22 nt, Human
cccagggcccuggacagcuaca

SEQ ID NO: 463654 - RNA, 22 nt, Human
cucuuaaaaacuugauauauuu

SEQ ID NO: 463655 - RNA, 22 nt, Human
ugucagagcaaggccaggccag

SEQ ID NO: 463656 - RNA, 22 nt, Human
auaagguaugaaaaguaaaugg

SEQ ID NO: 463657 - RNA, 22 nt, Human
cagggugggcacccagccucca

SEQ ID NO: 463658 - RNA, 22 nt, Human
ccugccaggagcuggugcugca

SEQ ID NO: 463659 - RNA, 21 nt, Human
cacuggaauuuucugugacau

SEQ ID NO: 463660 - RNA, 22 nt, Human
ugcaauaaggaguaauaguaaa

SEQ ID NO: 463661 - RNA, 22 nt, Human
agugauggagcuuccucugcua

SEQ ID NO: 463662 - RNA, 22 nt, Human
aaaaugugcaguuuuuaagcug

SEQ ID NO: 463663 - RNA, 21 nt, Human
agaaaaguagaguuuucagag

SEQ ID NO: 463664 - RNA, 22 nt, Human
aggcugaggcggguagaucacc

SEQ ID NO: 463665 - RNA, 22 nt, Human
ggggcagagaauaaaaaccuaa

SEQ ID NO: 463666 - RNA, 22 nt, Human
ucccagcauuaaugccugucag

SEQ ID NO: 463667 - RNA, 19 nt, Human
uucuaccuuacuguaggcu

SEQ ID NO: 463668 - RNA, 22 nt, Human
augaggcaucugcagucacuag

SEQ ID NO: 463669 - RNA, 20 nt, Human
agcaagaguaaggacagcga

SEQ ID NO: 463670 - RNA, 22 nt, Human
agagccugcagcugugaagaaa

SEQ ID NO: 463671 - RNA, 22 nt, Human
aauaauuuuagcucagaguugu

SEQ ID NO: 463672 - RNA, 23 nt, Human
ugggccuggaaagccuuagagag

SEQ ID NO: 463673 - RNA, 22 nt, Human
agccugagagccaagcugugca

SEQ ID NO: 463674 - RNA, 22 nt, Human
cagaguguugaccauaagccca

SEQ ID NO: 463675 - RNA, 22 nt, Human
guuacaaaggucauaaaagugu

SEQ ID NO: 463676 - RNA, 18 nt, Human
cacaggcucccagugagg

SEQ ID NO: 463677 - RNA, 22 nt, Human
auguaucagaaauagcauuggc

SEQ ID NO: 463678 - RNA, 22 nt, Human
uuguaacaaucugucauaaaug

SEQ ID NO: 463679 - RNA, 22 nt, Human
auuucacucucccugccacuua

SEQ ID NO: 463680 - RNA, 22 nt, Human
ugucuuccucuuggcuugagcu

SEQ ID NO: 463681 - RNA, 22 nt, Human
aggggcugggacagagccaagc

SEQ ID NO: 463682 - RNA, 22 nt, Human
cucaggauauugggcuggagca

SEQ ID NO: 463683 - RNA, 22 nt, Human
ucuguagcaagugagaggcauu

SEQ ID NO: 463684 - RNA, 22 nt, Human
agauuucucuuucccuggcuga

SEQ ID NO: 463685 - RNA, 22 nt, Human
uuucucugaggcuggccucccu

SEQ ID NO: 463686 - RNA, 22 nt, Human
uuugaaaguccuaggagagucc

SEQ ID NO: 463687 - RNA, 22 nt, Human
gcuggggaggcagcagagaaca

SEQ ID NO: 463688 - RNA, 22 nt, Human
caauauucaguggaaaagccau

SEQ ID NO: 463689 - RNA, 22 nt, Human
gaguaagagcuggcuuuggugu

SEQ ID NO: 463690 - RNA, 22 nt, Human
auacuuuggggguuaguguaga

SEQ ID NO: 463691 - RNA, 22 nt, Human
uuaugaaagacauuucuguugg

SEQ ID NO: 463692 - RNA, 20 nt, Human
gggagaagggcugaugagag

SEQ ID NO: 463693 - RNA, 19 nt, Human
gugaggauacugcucagag

SEQ ID NO: 463694 - RNA, 22 nt, Human
ugcagcuucuccaucuccuugu

SEQ ID NO: 463695 - RNA, 21 nt, Human
ugcuucucuagaucaacuacu

SEQ ID NO: 463696 - RNA, 22 nt, Human
aggagucagauuguuugaaugu

SEQ ID NO: 463697 - RNA, 22 nt, Human
gucccugcccuccugggacuca

SEQ ID NO: 463698 - RNA, 22 nt, Human
ugcugccacugguagucucauu

SEQ ID NO: 463699 - RNA, 22 nt, Human
cuguacauauacauuuuuuucc

SEQ ID NO: 463700 - RNA, 22 nt, Human
ugaggcagaaauuccuguuuuc

SEQ ID NO: 463701 - RNA, 19 nt, Human
cacacccaugcuugccaag

SEQ ID NO: 463702 - RNA, 22 nt, Human
uggcccugucccuggagccugg

SEQ ID NO: 463703 - RNA, 22 nt, Human
gcagagaaaguuuuguccucag

SEQ ID NO: 463704 - RNA, 22 nt, Human
cccagcaggucggugcugccug

SEQ ID NO: 463705 - RNA, 22 nt, Human
cugaagcaaaugaaacagcucu

SEQ ID NO: 463706 - RNA, 22 nt, Human
ugcagggcaucuuugaagugug

SEQ ID NO: 463707 - RNA, 22 nt, Human
gccuguuggguaacagaguuca

SEQ ID NO: 463708 - RNA, 18 nt, Human
ugaccugcgcuucacggu

SEQ ID NO: 463709 - RNA, 22 nt, Human
gccaggugcuaucccugcgcug

SEQ ID NO: 463710 - RNA, 22 nt, Human
ugcucagggacaauggagaggg

SEQ ID NO: 463711 - RNA, 22 nt, Human
ucugccuguucaagucuucuag

SEQ ID NO: 463712 - RNA, 22 nt, Human
agcuuuauuugucauucacggc

SEQ ID NO: 463713 - RNA, 22 nt, Human
ucaaaguuuguggcaauuuauu

SEQ ID NO: 463714 - RNA, 22 nt, Human
augauugaccaucugcugggcu

SEQ ID NO: 463715 - RNA, 22 nt, Human
acagaggucauggagaguucuc

SEQ ID NO: 463716 - RNA, 22 nt, Human
agccagcagggcuuagaggaca

SEQ ID NO: 463717 - RNA, 22 nt, Human
ggagccagaggcugcugcugug

SEQ ID NO: 463718 - RNA, 22 nt, Human
uuucacaaucaaauggugaaau

SEQ ID NO: 463719 - RNA, 22 nt, Human
aaucuuucccuauuaaaugugg

SEQ ID NO: 463720 - RNA, 22 nt, Human
ucagaagagcuggugcugccug

SEQ ID NO: 463721 - RNA, 22 nt, Human
aggccagguggucaugcuugcu

SEQ ID NO: 463722 - RNA, 22 nt, Human
uguggcccagaugagugugcua

SEQ ID NO: 463723 - RNA, 22 nt, Human
ucaauuaugccauugcaauauu

SEQ ID NO: 463724 - RNA, 22 nt, Human
aaugcuguaaagaugcuaucug

SEQ ID NO: 463725 - RNA, 22 nt, Human
aaaggagacuucagaucuccuu

SEQ ID NO: 463726 - RNA, 22 nt, Human
uccugugccuccaccugcuccg

SEQ ID NO: 463727 - RNA, 22 nt, Human
uggcugagccacuuguucagau

SEQ ID NO: 463728 - RNA, 22 nt, Human
ucacauuuucauauucucugag

SEQ ID NO: 463729 - RNA, 22 nt, Human
ucauuuaauagcuuuugucuuu

SEQ ID NO: 463730 - RNA, 22 nt, Human
gcagcaugagcuauacaaagua

SEQ ID NO: 463731 - RNA, 22 nt, Human
aguggcagccgagcaggagaug

SEQ ID NO: 463732 - RNA, 22 nt, Human
cuggccuggcagggagggcaug

SEQ ID NO: 463733 - RNA, 22 nt, Human
aguggcaguuugggagcuacag

SEQ ID NO: 463734 - RNA, 22 nt, Human
uuuccucuaaacgcauuugcuu

SEQ ID NO: 463735 - RNA, 22 nt, Human
ggcucugcccagaugaagagga

SEQ ID NO: 463736 - RNA, 22 nt, Human
gucccagagagcacuaguccau

SEQ ID NO: 463737 - RNA, 22 nt, Human
caguggggaggccaggauagaa

SEQ ID NO: 463738 - RNA, 22 nt, Human
ugcgcaggagcucugccaggag

SEQ ID NO: 463739 - RNA, 22 nt, Human
gccuggaguggacuuggccccu

SEQ ID NO: 463740 - RNA, 22 nt, Human
gcagcuggucuggccuagagua

SEQ ID NO: 463741 - RNA, 22 nt, Human
cccaggagauggagguugcagu

SEQ ID NO: 463742 - RNA, 22 nt, Human
cacagggcuucucauggggugc

SEQ ID NO: 463743 - RNA, 23 nt, Human
gcugucugucaucucugcgggag

SEQ ID NO: 463744 - RNA, 22 nt, Human
uucaggaugcucagaguagucu

SEQ ID NO: 463745 - RNA, 22 nt, Human
uggcuggggccugaauccugca

SEQ ID NO: 463746 - RNA, 22 nt, Human
guggccagaagacugcaaugcu

SEQ ID NO: 463747 - RNA, 22 nt, Human
gcuggcaggguucucacugaaa

SEQ ID NO: 463748 - RNA, 22 nt, Human
gcagggccagugcagagaggaa

SEQ ID NO: 463749 - RNA, 22 nt, Human
uuaucguacgcuucagaaauuu

SEQ ID NO: 463750 - RNA, 22 nt, Human
uuugagaagcaucugguccacu

SEQ ID NO: 463751 - RNA, 22 nt, Human
auguggaggaaaugaguguaca

SEQ ID NO: 463752 - RNA, 21 nt, Human
uguuuauggaaaagagacaaa

SEQ ID NO: 463753 - RNA, 22 nt, Human
cuggcuuuuagugugaagacuu

SEQ ID NO: 463754 - RNA, 20 nt, Human
cucuccuugccgacuuggca

SEQ ID NO: 463755 - RNA, 17 nt, Human
gcagcagagagacccuc

SEQ ID NO: 463756 - RNA, 23 nt, Human
cagggcugguagggaagagcgug

SEQ ID NO: 463757 - RNA, 22 nt, Human
cugccuggguucaaguccuguu

SEQ ID NO: 463758 - RNA, 22 nt, Human
cccugcaggcucagacuggagu

SEQ ID NO: 463759 - RNA, 22 nt, Human
ggaggcucccacgcagcucaca

SEQ ID NO: 463760 - RNA, 22 nt, Human
uggcccugccacucacugcuga

SEQ ID NO: 463761 - RNA, 22 nt, Human
aggguggagggagucccugagc

SEQ ID NO: 463762 - RNA, 22 nt, Human
aacauaaauuugaaguggcaaa

SEQ ID NO: 463763 - RNA, 22 nt, Human
aguagaaagaaggcacugggcc

SEQ ID NO: 463764 - RNA, 22 nt, Human
uugagucaguaauuccauuucu

SEQ ID NO: 463765 - RNA, 22 nt, Human
aucauuccacauguaccacuag

SEQ ID NO: 463766 - RNA, 22 nt, Human
caauguaucaaccagaaaguuc

SEQ ID NO: 463767 - RNA, 22 nt, Human
uggagcuggaauuugagcugga

SEQ ID NO: 463768 - RNA, 22 nt, Human
ucucagagaugucaagagucua

SEQ ID NO: 463769 - RNA, 22 nt, Human
uauaauccugcuucacauugaa

SEQ ID NO: 463770 - RNA, 22 nt, Human
uuucaucucucuaaaagacagu

SEQ ID NO: 463771 - RNA, 22 nt, Human
uaggcagcugcaaacuucgguc

SEQ ID NO: 463772 - RNA, 22 nt, Human
aaaguguggagauugaacuaaa

SEQ ID NO: 463773 - RNA, 22 nt, Human
aguguccccuacagaggcauuc

SEQ ID NO: 463774 - RNA, 22 nt, Human
cugccuggggaaugugaggauu

SEQ ID NO: 463775 - RNA, 22 nt, Human
cagaaauucccauuucagauuc

SEQ ID NO: 463776 - RNA, 22 nt, Human
gggcugagcuguucugaguuua

SEQ ID NO: 463777 - RNA, 17 nt, Human
ucaugcccaacuauuac

SEQ ID NO: 463778 - RNA, 22 nt, Human
aauguuacgaucaacaacacau

SEQ ID NO: 463779 - RNA, 17 nt, Human
ccuuucucuuucaucuc

SEQ ID NO: 463780 - RNA, 22 nt, Human
uuaguaaauaaagucuacuuuc

SEQ ID NO: 463781 - RNA, 22 nt, Human
cggcugugucuucacaggagcc

SEQ ID NO: 463782 - RNA, 22 nt, Human
ucaggagauguaaccuuagcug

SEQ ID NO: 463783 - RNA, 22 nt, Human
caugcacagugauaucugaaga

SEQ ID NO: 463784 - RNA, 22 nt, Human
uuuccucugaugcugacuugga

SEQ ID NO: 463785 - RNA, 22 nt, Human
caggaaagagcugccaggcagg

SEQ ID NO: 463786 - RNA, 22 nt, Human
gccuggguuccaugaucuccag

SEQ ID NO: 463787 - RNA, 22 nt, Human
gcugucccgaaccccugguaau

SEQ ID NO: 463788 - RNA, 22 nt, Human
auucuagaugcuguaaguagca

SEQ ID NO: 463789 - RNA, 22 nt, Human
aaugcacagcguuccaugcuug

SEQ ID NO: 463790 - RNA, 22 nt, Human
aggcagcauuucugcuuaucca

SEQ ID NO: 463791 - RNA, 22 nt, Human
uccucugcuggaagggcaagag

SEQ ID NO: 463792 - RNA, 22 nt, Human
agaaaugacacacaugagacau

SEQ ID NO: 463793 - RNA, 22 nt, Human
cucucaggcuugggucguggca

SEQ ID NO: 463794 - RNA, 18 nt, Human
agcuggggccucuggucc

SEQ ID NO: 463795 - RNA, 22 nt, Human
aggccagcucacccuggcuccu

SEQ ID NO: 463796 - RNA, 22 nt, Human
ccauaaggagccagacauucca

SEQ ID NO: 463797 - RNA, 22 nt, Human
cuuccuggccauugccauggca

SEQ ID NO: 463798 - RNA, 22 nt, Human
gcagagaccccgcagugaggcc

SEQ ID NO: 463799 - RNA, 22 nt, Human
uauucauaguaaacaaaagugg

SEQ ID NO: 463800 - RNA, 20 nt, Human
cugcugugauucccuccucc

SEQ ID NO: 463801 - RNA, 22 nt, Human
gcucaggaccgaggggugggaa

SEQ ID NO: 463802 - RNA, 22 nt, Human
agggccugcucuaucacucuca

SEQ ID NO: 463803 - RNA, 22 nt, Human
agcacuuuccuggcaaaugugg

SEQ ID NO: 463804 - RNA, 22 nt, Human
guuuuauaggugaaauauuacu

SEQ ID NO: 463805 - RNA, 17 nt, Human
cauuuguugaucaguug

SEQ ID NO: 463806 - RNA, 22 nt, Human
gagacugcauagauggccacaa

SEQ ID NO: 463807 - RNA, 22 nt, Human
ccuggccucgugcucacggcuc

SEQ ID NO: 463808 - RNA, 22 nt, Human
ugaagguggcauaggagagaug

SEQ ID NO: 463809 - RNA, 22 nt, Human
ucucagagcuucagaaagcacc

SEQ ID NO: 463810 - RNA, 22 nt, Human
ugaggcuggcaaggcugguauu

SEQ ID NO: 463811 - RNA, 22 nt, Human
agggccaggaucacagccaaga

SEQ ID NO: 463812 - RNA, 22 nt, Human
aaacagaaauuuccucaugcuc

SEQ ID NO: 463813 - RNA, 23 nt, Human
uggagaugccccacucccugucu

SEQ ID NO: 463814 - RNA, 22 nt, Human
ucagaacauugacauucuuauu

SEQ ID NO: 463815 - RNA, 22 nt, Human
cuguuuauuacacuggauagca

SEQ ID NO: 463816 - RNA, 18 nt, Human
gaaaugugauucuagggc

SEQ ID NO: 463817 - RNA, 22 nt, Human
gcagccagguuugaggaccacu

SEQ ID NO: 463818 - RNA, 22 nt, Human
ugcaguggaaagacucagacuu

SEQ ID NO: 463819 - RNA, 22 nt, Human
agagugauggguugugcugacc

SEQ ID NO: 463820 - RNA, 22 nt, Human
cauguuuuguguacagaauauu

SEQ ID NO: 463821 - RNA, 22 nt, Human
cugcaguguucuggaaugcauu

SEQ ID NO: 463822 - RNA, 22 nt, Human
guggagacuucuacuagagacc

SEQ ID NO: 463823 - RNA, 22 nt, Human
agagggcuggacgcagguugga

SEQ ID NO: 463824 - RNA, 22 nt, Human
cccuggaguccuggcaguugau

SEQ ID NO: 463825 - RNA, 19 nt, Human
acacagggaucagaggguu

SEQ ID NO: 463826 - RNA, 22 nt, Human
auaaaagaaguuuugguacuug

SEQ ID NO: 463827 - RNA, 22 nt, Human
uaaauucccaacucugcucuuc

SEQ ID NO: 463828 - RNA, 22 nt, Human
accagagaaaacacagcaggcu

SEQ ID NO: 463829 - RNA, 22 nt, Human
aaacaugagcaucucuucaagc

SEQ ID NO: 463830 - RNA, 22 nt, Human
gcugauccuuuuaugucuagcu

SEQ ID NO: 463831 - RNA, 23 nt, Human
aaaaaaccauguaggcacucagu

SEQ ID NO: 463832 - RNA, 22 nt, Human
guauccuccccgcuggccuuca

SEQ ID NO: 463833 - RNA, 22 nt, Human
uaacugauauugaaaaacauca

SEQ ID NO: 463834 - RNA, 22 nt, Human
ggggcagcucccgagggcagga

SEQ ID NO: 463835 - RNA, 22 nt, Human
augcaguguuuggaagcuuaag

SEQ ID NO: 463836 - RNA, 22 nt, Human
augcagcugugggcaagaaaug

SEQ ID NO: 463837 - RNA, 22 nt, Human
acagccagaggagccaggcugg

SEQ ID NO: 463838 - RNA, 22 nt, Human
gggugcaggcagcccaggcagg

SEQ ID NO: 463839 - RNA, 21 nt, Human
ccucuggcuugugcugugccc

SEQ ID NO: 463840 - RNA, 19 nt, Human
ugucucagugucccuuccu

SEQ ID NO: 463841 - RNA, 20 nt, Human
caggaugauuggacacgaug

SEQ ID NO: 463842 - RNA, 22 nt, Human
agcuggguggagggcccacggu

SEQ ID NO: 463843 - RNA, 22 nt, Human
aagccaggggcugcuuaggaga

SEQ ID NO: 463844 - RNA, 22 nt, Human
caccaggcuggagugcagaggu

SEQ ID NO: 463845 - RNA, 22 nt, Human
auggggcuguucucugcccugc

SEQ ID NO: 463846 - RNA, 23 nt, Human
aucaaacuggugagaaugucagu

SEQ ID NO: 463847 - RNA, 22 nt, Human
cuugaaagcacuuaguaaauua

SEQ ID NO: 463848 - RNA, 21 nt, Human
ugcuccuuagcugccccugcc

SEQ ID NO: 463849 - RNA, 22 nt, Human
aagucuggaagucucaguuuuc

SEQ ID NO: 463850 - RNA, 22 nt, Human
cugggccagauccagccucaca

SEQ ID NO: 463851 - RNA, 22 nt, Human
cuuguccuuuacuugagacuca

SEQ ID NO: 463852 - RNA, 21 nt, Human
aggcacuguuugugguuuggg

SEQ ID NO: 463853 - RNA, 22 nt, Human
aaguucuacagcuucgcaggca

SEQ ID NO: 463854 - RNA, 22 nt, Human
cagaaccaggaacugauggaga

SEQ ID NO: 463855 - RNA, 22 nt, Human
cuguauuugaaagaaaagauuu

SEQ ID NO: 463856 - RNA, 22 nt, Human
gaggcucagagagguccacaua

SEQ ID NO: 463857 - RNA, 22 nt, Human
ucagcugagcuccagcucauag

SEQ ID NO: 463858 - RNA, 22 nt, Human
gcagccacucucauuccacgug

SEQ ID NO: 463859 - RNA, 22 nt, Human
agcccagccggauucccaguuc

SEQ ID NO: 463860 - RNA, 22 nt, Human
ucucacuggguauaaaugagua

SEQ ID NO: 463861 - RNA, 22 nt, Human
uuauuuauggcacuguuggugg

SEQ ID NO: 463862 - RNA, 22 nt, Human
uauuggugggggcagagagaga

SEQ ID NO: 463863 - RNA, 22 nt, Human
cagagccagaacuagaccuugu

SEQ ID NO: 463864 - RNA, 22 nt, Human
uucaggauuguguuuuuccuga

SEQ ID NO: 463865 - RNA, 22 nt, Human
ugucauaaaacacaagcuguug

SEQ ID NO: 463866 - RNA, 22 nt, Human
uuaugcaaaggggccucuuccu

SEQ ID NO: 463867 - RNA, 22 nt, Human
cugcccugccuggccagugugg

SEQ ID NO: 463868 - RNA, 22 nt, Human
guaucuuuugguggaaaaauaa

SEQ ID NO: 463869 - RNA, 19 nt, Human
cugccuguuauggagagaa

SEQ ID NO: 463870 - RNA, 22 nt, Human
uagggcagcugcaucaggcacu

SEQ ID NO: 463871 - RNA, 22 nt, Human
ugcagggauuagaggccgggga

SEQ ID NO: 463872 - RNA, 22 nt, Human
acagccugcugccugcuucuug

SEQ ID NO: 463873 - RNA, 22 nt, Human
cccagccugugacagccguccu

SEQ ID NO: 463874 - RNA, 22 nt, Human
gggaguggauuauguggaccca

SEQ ID NO: 463875 - RNA, 22 nt, Human
cugagcagcaacccagagccuc

SEQ ID NO: 463876 - RNA, 22 nt, Human
aaggaagaagacucuuuacucc

SEQ ID NO: 463877 - RNA, 22 nt, Human
cuacacaguucugccuaauggc

SEQ ID NO: 463878 - RNA, 22 nt, Human
aggaagcaaaaggcagggucua

SEQ ID NO: 463879 - RNA, 22 nt, Human
uggagccaaugaacauuugcug

SEQ ID NO: 463880 - RNA, 18 nt, Human
gagguccugcucuagccc

SEQ ID NO: 463881 - RNA, 22 nt, Human
guccaggucuggacccugagcc

SEQ ID NO: 463882 - RNA, 22 nt, Human
auaaaauuugcuacuguuaaau

SEQ ID NO: 463883 - RNA, 22 nt, Human
ugaggccuggagggaggaguuu

SEQ ID NO: 463884 - RNA, 22 nt, Human
auaguuguguggggauucuggu

SEQ ID NO: 463885 - RNA, 20 nt, Human
uuuuauauguaggguauaug

SEQ ID NO: 463886 - RNA, 22 nt, Human
agggacuuguguccuauguaug

SEQ ID NO: 463887 - RNA, 22 nt, Human
uagggcaggggaggaaucugaa

SEQ ID NO: 463888 - RNA, 22 nt, Human
gggagagagagcucauguugaa

SEQ ID NO: 463889 - RNA, 22 nt, Human
acucaguacaucuggaguuggc

SEQ ID NO: 463890 - RNA, 22 nt, Human
acagcaggauuuggcgauguug

SEQ ID NO: 463891 - RNA, 22 nt, Human
aaugucugccugaacuuuauau

SEQ ID NO: 463892 - RNA, 22 nt, Human
uguggcugucuguucuccuagg

SEQ ID NO: 463893 - RNA, 22 nt, Human
aaggcuuuaugugaccaaaaga

SEQ ID NO: 463894 - RNA, 22 nt, Human
uucuucauggguucuuuuagga

SEQ ID NO: 463895 - RNA, 22 nt, Human
aagggcucugcugucucucccc

SEQ ID NO: 463896 - RNA, 22 nt, Human
aagacuguaugagacaauauaa

SEQ ID NO: 463897 - RNA, 22 nt, Human
aauagcuuuggucaccaucugg

SEQ ID NO: 463898 - RNA, 22 nt, Human
uuuuugaaggcugaugugauua

SEQ ID NO: 463899 - RNA, 17 nt, Human
aggccagaugaggcaag

SEQ ID NO: 463900 - RNA, 19 nt, Human
agccuggcuuugcucugcu

SEQ ID NO: 463901 - RNA, 22 nt, Human
gggcuggcaggaccugggcuga

SEQ ID NO: 463902 - RNA, 22 nt, Human
ugcuggggcucugaccacucca

SEQ ID NO: 463903 - RNA, 22 nt, Human
uggcucugugcuucuaguaucu

SEQ ID NO: 463904 - RNA, 22 nt, Human
uggcugaggcuggagugcagug

SEQ ID NO: 463905 - RNA, 22 nt, Human
aggccugucuggggcucagcca

SEQ ID NO: 463906 - RNA, 22 nt, Human
augcaguacugauacaugccac

SEQ ID NO: 463907 - RNA, 22 nt, Human
auaagaaacauuauucuuucca

SEQ ID NO: 463908 - RNA, 21 nt, Human
uuagcaaagcaaacacaugcu

SEQ ID NO: 463909 - RNA, 22 nt, Human
uugacagcuauuuugcuuugau

SEQ ID NO: 463910 - RNA, 22 nt, Human
aguggaccagaagacugaagcu

SEQ ID NO: 463911 - RNA, 22 nt, Human
aaaaaaucagaucuuugguuaa

SEQ ID NO: 463912 - RNA, 22 nt, Human
ucagggcaagauugguuaauaa

SEQ ID NO: 463913 - RNA, 22 nt, Human
gagaagucauuugaccaccuag

SEQ ID NO: 463914 - RNA, 22 nt, Human
uaagaacagugacagccaacau

SEQ ID NO: 463915 - RNA, 22 nt, Human
ccagggcagcgccccuccacgc

SEQ ID NO: 463916 - RNA, 22 nt, Human
guauuacauuuaguaauuaggc

SEQ ID NO: 463917 - RNA, 22 nt, Human
aguuuagaguucaaauuaguuc

SEQ ID NO: 463918 - RNA, 22 nt, Human
cuuggggcugucacucuggcau

SEQ ID NO: 463919 - RNA, 22 nt, Human
cugcuuugauuagaagaguaca

SEQ ID NO: 463920 - RNA, 22 nt, Human
ggaggccaaggcaggcggauca

SEQ ID NO: 463921 - RNA, 22 nt, Human
aaauaauugaguuggucaauau

SEQ ID NO: 463922 - RNA, 22 nt, Human
cugucuuugguccugucuguua

SEQ ID NO: 463923 - RNA, 22 nt, Human
gccagcucagugccaggccccu

SEQ ID NO: 463924 - RNA, 22 nt, Human
uguggcugcucaggugcagacc

SEQ ID NO: 463925 - RNA, 22 nt, Human
uguacaaugccgagacuaacuc

SEQ ID NO: 463926 - RNA, 22 nt, Human
agucucagaaaagaagcaugga

SEQ ID NO: 463927 - RNA, 22 nt, Human
cagcagcucccauccgcugagc

SEQ ID NO: 463928 - RNA, 22 nt, Human
cucagagaggcaguggaaguca

SEQ ID NO: 463929 - RNA, 22 nt, Human
ucucagaguuccucuggagucc

SEQ ID NO: 463930 - RNA, 22 nt, Human
gccucugcccuccugggacugc

SEQ ID NO: 463931 - RNA, 22 nt, Human
acauuuaggauguuuugagaga

SEQ ID NO: 463932 - RNA, 22 nt, Human
ucagggcauccauugccuguug

SEQ ID NO: 463933 - RNA, 22 nt, Human
cuggagguaauguuauuuuugu

SEQ ID NO: 463934 - RNA, 22 nt, Human
gcaaagguagccaaggagcuca

SEQ ID NO: 463935 - RNA, 19 nt, Human
cugagcagcggcagcacuu

SEQ ID NO: 463936 - RNA, 23 nt, Human
agcagggccagaauacuugcugu

SEQ ID NO: 463937 - RNA, 22 nt, Human
uugaccauaccuccaggcaguu

SEQ ID NO: 463938 - RNA, 22 nt, Human
agagccagagaccuggguucac

SEQ ID NO: 463939 - RNA, 18 nt, Human
agaagccacgaggagucc

SEQ ID NO: 463940 - RNA, 22 nt, Human
aauucauccaugaacaauucca

SEQ ID NO: 463941 - RNA, 22 nt, Human
auccucagcaucuagcaugaag

SEQ ID NO: 463942 - RNA, 21 nt, Human
auggagccuaagaguggaggu

SEQ ID NO: 463943 - RNA, 22 nt, Human
cccagcagaccgcugugauggc

SEQ ID NO: 463944 - RNA, 22 nt, Human
agcagcuccugccaugagugcu

SEQ ID NO: 463945 - RNA, 22 nt, Human
cucugucccagacccaccucuc

SEQ ID NO: 463946 - RNA, 21 nt, Human
aggagcuguguuagcuggucg

SEQ ID NO: 463947 - RNA, 22 nt, Human
ggggugggcgugcagggacacc

SEQ ID NO: 463948 - RNA, 22 nt, Human
aagcagccacuggccaguuaua

SEQ ID NO: 463949 - RNA, 22 nt, Human
cucaguuucugacauuaaaauc

SEQ ID NO: 463950 - RNA, 21 nt, Human
ucucugugucuuuaagcugga

SEQ ID NO: 463951 - RNA, 22 nt, Human
gcacccagaggucagcagugcu

SEQ ID NO: 463952 - RNA, 22 nt, Human
uccacuuuagcaaugauugaau

SEQ ID NO: 463953 - RNA, 23 nt, Human
uccaggcaugagcucuggaugga

SEQ ID NO: 463954 - RNA, 22 nt, Human
ggcacugauuccauucaugaag

SEQ ID NO: 463955 - RNA, 22 nt, Human
uguugauuugugggcugcaaaa

SEQ ID NO: 463956 - RNA, 22 nt, Human
guacauuuugagguuaaaacaa

SEQ ID NO: 463957 - RNA, 22 nt, Human
agcaguggugugaggagggcuc

SEQ ID NO: 463958 - RNA, 22 nt, Human
cucaggaguuggaggcuacagu

SEQ ID NO: 463959 - RNA, 22 nt, Human
ugggcagaauugugguaguuaa

SEQ ID NO: 463960 - RNA, 22 nt, Human
ugcugcucucagccaccaggaa

SEQ ID NO: 463961 - RNA, 22 nt, Human
ugcugccagggcucugcccaca

SEQ ID NO: 463962 - RNA, 22 nt, Human
guucagcccacagagggggccg

SEQ ID NO: 463963 - RNA, 22 nt, Human
ugggcugcagagcccggccuuc

SEQ ID NO: 463964 - RNA, 21 nt, Human
gcugagagguugggaaguuca

SEQ ID NO: 463965 - RNA, 22 nt, Human
agaggccagcagugccuaucug

SEQ ID NO: 463966 - RNA, 22 nt, Human
gggcugggauugcuugcuguga

SEQ ID NO: 463967 - RNA, 20 nt, Human
uccaggagaacugggagccg

SEQ ID NO: 463968 - RNA, 22 nt, Human
aucaggaugcugucaguuacca

SEQ ID NO: 463969 - RNA, 22 nt, Human
ggcuucugguaaagaccacacc

SEQ ID NO: 463970 - RNA, 22 nt, Human
uucaagauggccccagugagcc

SEQ ID NO: 463971 - RNA, 22 nt, Human
gcccccucuuuggagccagcca

SEQ ID NO: 463972 - RNA, 22 nt, Human
aagcagcuuaaauuagagccug

SEQ ID NO: 463973 - RNA, 22 nt, Human
ggcagcaggcgacuucccuauu

SEQ ID NO: 463974 - RNA, 22 nt, Human
cuuuauguuggggugucuuagu

SEQ ID NO: 463975 - RNA, 22 nt, Human
uauuucuuguucccuccaaguu

SEQ ID NO: 463976 - RNA, 22 nt, Human
uggggcugaggagccucacucu

SEQ ID NO: 463977 - RNA, 22 nt, Human
uauaauccauucauugauuucu

SEQ ID NO: 463978 - RNA, 22 nt, Human
cagugggcugugauggauucac

SEQ ID NO: 463979 - RNA, 22 nt, Human
gugcugucaauugcuuucagua

SEQ ID NO: 463980 - RNA, 22 nt, Human
aguggacucuucccagugcuug

SEQ ID NO: 463981 - RNA, 22 nt, Human
agaggcugucccuugcuauucc

SEQ ID NO: 463982 - RNA, 21 nt, Human
gggccacaccuucugcagacc

SEQ ID NO: 463983 - RNA, 22 nt, Human
ugaguccauugauggauaguga

SEQ ID NO: 463984 - RNA, 22 nt, Human
agcccggcuuccccgguugcua

SEQ ID NO: 463985 - RNA, 22 nt, Human
cccuggaguccggagcucaccu

SEQ ID NO: 463986 - RNA, 22 nt, Human
ggcaggguccacaccugggaaa

SEQ ID NO: 463987 - RNA, 22 nt, Human
ugggugagugggaaaagcccag

SEQ ID NO: 463988 - RNA, 22 nt, Human
cucugagagcggucuguggcuu

SEQ ID NO: 463989 - RNA, 22 nt, Human
guaaaugugcuucuuuuaacuu

SEQ ID NO: 463990 - RNA, 23 nt, Human
agucagagagugugagacaacug

SEQ ID NO: 463991 - RNA, 22 nt, Human
agugcagccgagaucaggugcu

SEQ ID NO: 463992 - RNA, 22 nt, Human
caagaacauugugaucacuuca

SEQ ID NO: 463993 - RNA, 22 nt, Human
uccugguggugccagcugcagg

SEQ ID NO: 463994 - RNA, 22 nt, Human
gcagagcugucuaagucacuuc

SEQ ID NO: 463995 - RNA, 22 nt, Human
gcagggacgccagggacagcaa

SEQ ID NO: 463996 - RNA, 22 nt, Human
ccacagggcucuaggcgcuucc

SEQ ID NO: 463997 - RNA, 22 nt, Human
cuuacauugugugcaugagggg

SEQ ID NO: 463998 - RNA, 22 nt, Human
cagcccaggccgacaguuccuc

SEQ ID NO: 463999 - RNA, 22 nt, Human
ccuguacagugaaugaauguga

SEQ ID NO: 464000 - RNA, 20 nt, Human
gcugccuguuucuguaagua

SEQ ID NO: 464001 - RNA, 19 nt, Human
agaggcugucaccuguagc

SEQ ID NO: 464002 - RNA, 22 nt, Human
uaagaacaguguuucaucucua

SEQ ID NO: 464003 - RNA, 22 nt, Human
gggcuccaccuagggacacugg

SEQ ID NO: 464004 - RNA, 22 nt, Human
caguggguggcuaaguggcuga

SEQ ID NO: 464005 - RNA, 22 nt, Human
cuuguauuccccuaucucuaaa

SEQ ID NO: 464006 - RNA, 22 nt, Human
caggguggcacaucacagcauu

SEQ ID NO: 464007 - RNA, 20 nt, Human
agaggccaguuaggagucua

SEQ ID NO: 464008 - RNA, 22 nt, Human
uugacaauguccuuugaauuuc

SEQ ID NO: 464009 - RNA, 17 nt, Human
cugaggcccagggccca

SEQ ID NO: 464010 - RNA, 22 nt, Human
aagaugcagcuuccacuuuugc

SEQ ID NO: 464011 - RNA, 23 nt, Human
ugggcaucuccucugugccaggc

SEQ ID NO: 464012 - RNA, 22 nt, Human
aggaauucaagaccagcugggc

SEQ ID NO: 464013 - RNA, 22 nt, Human
acagaggccccgugggagagcc

SEQ ID NO: 464014 - RNA, 22 nt, Human
agggacccugaugacugaggag

SEQ ID NO: 464015 - RNA, 22 nt, Human
uaguggaggccuguugugugca

SEQ ID NO: 464016 - RNA, 22 nt, Human
ccagcuuguuugaagcucguca

SEQ ID NO: 464017 - RNA, 22 nt, Human
ugcucugcaagcaggagcaaga

SEQ ID NO: 464018 - RNA, 22 nt, Human
cccuuccucccaggcuucugug

SEQ ID NO: 464019 - RNA, 22 nt, Human
cuggagccggaccagggacggu

SEQ ID NO: 464020 - RNA, 22 nt, Human
uuucaaauagaaucuuuccaaa

SEQ ID NO: 464021 - RNA, 22 nt, Human
ccuucagaccuagacaggaauc

SEQ ID NO: 464022 - RNA, 22 nt, Human
agggagagguugaaaccucagu

SEQ ID NO: 464023 - RNA, 22 nt, Human
gccugagauucccggagccgug

SEQ ID NO: 464024 - RNA, 22 nt, Human
acagcuggaggccccauugucc

SEQ ID NO: 464025 - RNA, 22 nt, Human
uuaacaugucuugacuucaucu

SEQ ID NO: 464026 - RNA, 22 nt, Human
gcauuucugugcauacacauga

SEQ ID NO: 464027 - RNA, 22 nt, Human
uccacugcagcuucugauggaa

SEQ ID NO: 464028 - RNA, 22 nt, Human
agcaggugagcacagccaggcu

SEQ ID NO: 464029 - RNA, 20 nt, Human
cucugcuuuaggagagucag

SEQ ID NO: 464030 - RNA, 22 nt, Human
cccaguggaaggaguagaagac

SEQ ID NO: 464031 - RNA, 22 nt, Human
ucaaaccaccuuguuacugggg

SEQ ID NO: 464032 - RNA, 22 nt, Human
guauuuucaugauuucagacca

SEQ ID NO: 464033 - RNA, 22 nt, Human
uggggcuggcacagucucuauu

SEQ ID NO: 464034 - RNA, 22 nt, Human
gccugaggaaugcuccugacuu

SEQ ID NO: 464035 - RNA, 22 nt, Human
cugcaggaauucaaagugagcu

SEQ ID NO: 464036 - RNA, 23 nt, Human
ggcugagacuacaggcgcuugcc

SEQ ID NO: 464037 - RNA, 22 nt, Human
caggcagagucagauuagacuu

SEQ ID NO: 464038 - RNA, 22 nt, Human
ucccuggccauuccucuaggcc

SEQ ID NO: 464039 - RNA, 22 nt, Human
guuguacagcauccagugcaga

SEQ ID NO: 464040 - RNA, 20 nt, Human
ccugccugccucggcucauu

SEQ ID NO: 464041 - RNA, 21 nt, Human
agugaaaugaaguguaugcuc

SEQ ID NO: 464042 - RNA, 22 nt, Human
aucuauuucugcuaauaacaau

SEQ ID NO: 464043 - RNA, 22 nt, Human
caggaugaagggcaaaggcaag

SEQ ID NO: 464044 - RNA, 20 nt, Human
agaaggcuccuuuugccaag

SEQ ID NO: 464045 - RNA, 22 nt, Human
uguagcucuccagccagcaagg

SEQ ID NO: 464046 - RNA, 22 nt, Human
ugagccugcaauaagcacagcc

SEQ ID NO: 464047 - RNA, 22 nt, Human
caggauagaaaggccauggagu

SEQ ID NO: 464048 - RNA, 22 nt, Human
gagagcacaugaacauggagga

SEQ ID NO: 464049 - RNA, 20 nt, Human
aggcugagggugauuguguc

SEQ ID NO: 464050 - RNA, 22 nt, Human
caguagcacuagauaugugugg

SEQ ID NO: 464051 - RNA, 23 nt, Human
uggcauuuuaguuagcuucagug

SEQ ID NO: 464052 - RNA, 22 nt, Human
uggggccuggucagagcugcac

SEQ ID NO: 464053 - RNA, 22 nt, Human
gcagggacaucuuugucuagua

SEQ ID NO: 464054 - RNA, 22 nt, Human
ccagcugcagguguuccagaug

SEQ ID NO: 464055 - RNA, 22 nt, Human
gaggaaaauaacaacuaagggc

SEQ ID NO: 464056 - RNA, 22 nt, Human
ugaugggaggugcugcaggacc

SEQ ID NO: 464057 - RNA, 22 nt, Human
ccacaaguuucagcacccagag

SEQ ID NO: 464058 - RNA, 22 nt, Human
agagccagcauuugacacuggc

SEQ ID NO: 464059 - RNA, 22 nt, Human
cauguaaaacacucagaacagu

SEQ ID NO: 464060 - RNA, 22 nt, Human
agcagagcgccugcucagaggg

SEQ ID NO: 464061 - RNA, 22 nt, Human
cuugccuguggcuaguuggcuc

SEQ ID NO: 464062 - RNA, 22 nt, Human
ggcugccuugacccuggcuccg

SEQ ID NO: 464063 - RNA, 22 nt, Human
agcagagcugcaguggccugcu

SEQ ID NO: 464064 - RNA, 22 nt, Human
ugagccagaggaggcugugugg

SEQ ID NO: 464065 - RNA, 22 nt, Human
aaguucaaggcagguccugagg

SEQ ID NO: 464066 - RNA, 22 nt, Human
accagggcacaggagucugaag

SEQ ID NO: 464067 - RNA, 22 nt, Human
gugcaguggcagauccuagcuc

SEQ ID NO: 464068 - RNA, 22 nt, Human
ccaggccuggccaggggaugcc

SEQ ID NO: 464069 - RNA, 22 nt, Human
augacagaaggccucccugaca

SEQ ID NO: 464070 - RNA, 22 nt, Human
ccacugcccccugaagaccagg

SEQ ID NO: 464071 - RNA, 22 nt, Human
acagcugugaagcaagcacucu

SEQ ID NO: 464072 - RNA, 22 nt, Human
cugggcacuugcucacagcucu

SEQ ID NO: 464073 - RNA, 22 nt, Human
cuggcccuucucuugcuuccug

SEQ ID NO: 464074 - RNA, 22 nt, Human
agggcugggcugcuuguuguca

SEQ ID NO: 464075 - RNA, 18 nt, Human
cuuguucuucucuuggcg

SEQ ID NO: 464076 - RNA, 22 nt, Human
ucacaacucuuuccauuuaaua

SEQ ID NO: 464077 - RNA, 22 nt, Human
aacaugauuuaguauaaugcag

SEQ ID NO: 464078 - RNA, 22 nt, Human
acucaggagggaucagcuauca

SEQ ID NO: 464079 - RNA, 22 nt, Human
ccugauggagcccugcugcaug

SEQ ID NO: 464080 - RNA, 19 nt, Human
acacagggcuagaguuaca

SEQ ID NO: 464081 - RNA, 22 nt, Human
agcugacuucuugauccaauga

SEQ ID NO: 464082 - RNA, 22 nt, Human
caggugaccuuuguccuaaguu

SEQ ID NO: 464083 - RNA, 16 nt, Human
agaggccuugaggaag

SEQ ID NO: 464084 - RNA, 19 nt, Human
uggcagggagaguuugaag

SEQ ID NO: 464085 - RNA, 22 nt, Human
caggugggcuugggagaacacu

SEQ ID NO: 464086 - RNA, 22 nt, Human
uuauuuauuguguaccuacugu

SEQ ID NO: 464087 - RNA, 22 nt, Human
ucagcagggcugugguguggcu

SEQ ID NO: 464088 - RNA, 22 nt, Human
uucuagaugauaaaccagcagc

SEQ ID NO: 464089 - RNA, 22 nt, Human
ccuagaugggauggcggccggg

SEQ ID NO: 464090 - RNA, 22 nt, Human
ugucacauugaauaugauuuau

SEQ ID NO: 464091 - RNA, 22 nt, Human
uuaaugcuugucuagaucuucu

SEQ ID NO: 464092 - RNA, 22 nt, Human
ugaggcucagugagcccugcag

SEQ ID NO: 464093 - RNA, 22 nt, Human
uagacagauuuaaaggaaugga

SEQ ID NO: 464094 - RNA, 22 nt, Human
gccucccugagucacccaagca

SEQ ID NO: 464095 - RNA, 22 nt, Human
cagggcugaagaaauucaaaag

SEQ ID NO: 464096 - RNA, 22 nt, Human
caagaauuguacaaacugggug

SEQ ID NO: 464097 - RNA, 22 nt, Human
ugggggugaaagucuggacagu

SEQ ID NO: 464098 - RNA, 22 nt, Human
ggagugaguacuggaguagcug

SEQ ID NO: 464099 - RNA, 22 nt, Human
caauaugcaagcuauuaaguau

SEQ ID NO: 464100 - RNA, 22 nt, Human
auugaaagagaauguagcucuu

SEQ ID NO: 464101 - RNA, 22 nt, Human
ugucugguggguugacaggcag

SEQ ID NO: 464102 - RNA, 22 nt, Human
uuuguuaaauauuuauugagug

SEQ ID NO: 464103 - RNA, 22 nt, Human
agcuaggaaauugaggcugaga

SEQ ID NO: 464104 - RNA, 22 nt, Human
gaaggccacuuuguguugagaa

SEQ ID NO: 464105 - RNA, 22 nt, Human
ccuggagcccaaggcagugaga

SEQ ID NO: 464106 - RNA, 22 nt, Human
ucugucacucuagagauggcag

SEQ ID NO: 464107 - RNA, 22 nt, Human
ccaguggccaugcacgagcagc

SEQ ID NO: 464108 - RNA, 22 nt, Human
ggagccuugggcgcucucccau

SEQ ID NO: 464109 - RNA, 22 nt, Human
cuuguacaggaauccaugguau

SEQ ID NO: 464110 - RNA, 22 nt, Human
ugauuucauaguauauacauga

SEQ ID NO: 464111 - RNA, 21 nt, Human
gaugaagcaaucuuucuguug

SEQ ID NO: 464112 - RNA, 23 nt, Human
cagagcugauuaaacuuaaucuc

SEQ ID NO: 464113 - RNA, 22 nt, Human
gaagagcuaaaggcacaggcuu

SEQ ID NO: 464114 - RNA, 22 nt, Human
uggcagagacuccuccugggag

SEQ ID NO: 464115 - RNA, 22 nt, Human
aggugcaggagcugugcaggga

SEQ ID NO: 464116 - RNA, 22 nt, Human
cagagccaggucuaggagucuc

SEQ ID NO: 464117 - RNA, 22 nt, Human
ucacauuuguguuuuauuagag

SEQ ID NO: 464118 - RNA, 22 nt, Human
gagcugcccugagcuuugcaug

SEQ ID NO: 464119 - RNA, 22 nt, Human
cugcuuccauaaauaaugugcu

SEQ ID NO: 464120 - RNA, 22 nt, Human
gucucccaaccccugugcccag

SEQ ID NO: 464121 - RNA, 22 nt, Human
uuugauuuacuggauauucuca

SEQ ID NO: 464122 - RNA, 22 nt, Human
caaagccucugauuucacuugu

SEQ ID NO: 464123 - RNA, 22 nt, Human
ccaggugugcucugcaguggau

SEQ ID NO: 464124 - RNA, 22 nt, Human
caaagugcugagauuacaggua

SEQ ID NO: 464125 - RNA, 22 nt, Human
ugggcuccucgucacucgcugu

SEQ ID NO: 464126 - RNA, 22 nt, Human
uggagcugacucacaccagcua

SEQ ID NO: 464127 - RNA, 23 nt, Human
gccugggacugguagugugaccu

SEQ ID NO: 464128 - RNA, 22 nt, Human
aaaugcagaucccugaaucuca

SEQ ID NO: 464129 - RNA, 18 nt, Human
gggcauggaugcagcauc

SEQ ID NO: 464130 - RNA, 22 nt, Human
agugcuguccaguuucacaggu

SEQ ID NO: 464131 - RNA, 22 nt, Human
aaaauaucagcaaagggugaca

SEQ ID NO: 464132 - RNA, 19 nt, Human
uccccagcaccucugaguc

SEQ ID NO: 464133 - RNA, 22 nt, Human
ugaggcucuccaagcagaugag

SEQ ID NO: 464134 - RNA, 22 nt, Human
cuggagcugucuucacaggccu

SEQ ID NO: 464135 - RNA, 22 nt, Human
cuuacauugucuuaguuuucaa

SEQ ID NO: 464136 - RNA, 22 nt, Human
agcugucuuucugccuccugau

SEQ ID NO: 464137 - RNA, 22 nt, Human
aaaugcacaaaguaaguguaau

SEQ ID NO: 464138 - RNA, 22 nt, Human
ccuuguccucugguuuccuguu

SEQ ID NO: 464139 - RNA, 22 nt, Human
uccuuggcaugccgucuucucc

SEQ ID NO: 464140 - RNA, 22 nt, Human
cugcagugaaaucaggaagcaa

SEQ ID NO: 464141 - RNA, 22 nt, Human
ggcuggucacaccacugcaggg

SEQ ID NO: 464142 - RNA, 22 nt, Human
aggccuggugaaugaaguaucu

SEQ ID NO: 464143 - RNA, 22 nt, Human
acuuucuaggucucaguccuuu

SEQ ID NO: 464144 - RNA, 22 nt, Human
agagcugcaauuucauguggug

SEQ ID NO: 464145 - RNA, 22 nt, Human
accuuuuuguucuguucucagc

SEQ ID NO: 464146 - RNA, 18 nt, Human
ucucagaggccauccuag

SEQ ID NO: 464147 - RNA, 22 nt, Human
gacugucauucuagugcccaug

SEQ ID NO: 464148 - RNA, 22 nt, Human
gcagccaccucccauggcgggg

SEQ ID NO: 464149 - RNA, 22 nt, Human
cccagagccucauucuguuggg

SEQ ID NO: 464150 - RNA, 22 nt, Human
uuucacacuagucagaauacca

SEQ ID NO: 464151 - RNA, 22 nt, Human
aaagccaaaugaaagaugguuc

SEQ ID NO: 464152 - RNA, 20 nt, Human
gggaguggugguagccugug

SEQ ID NO: 464153 - RNA, 22 nt, Human
cugaggcuuugugugcaugccu

SEQ ID NO: 464154 - RNA, 22 nt, Human
aaaugcauaucaaagacuugaa

SEQ ID NO: 464155 - RNA, 22 nt, Human
gccucugcugacaagauggaca

SEQ ID NO: 464156 - RNA, 22 nt, Human
uuccucugaaauggcuuggaaa

SEQ ID NO: 464157 - RNA, 22 nt, Human
augaaacaaaccucuauggagu

SEQ ID NO: 464158 - RNA, 19 nt, Human
cucuggagcagacacugga

SEQ ID NO: 464159 - RNA, 22 nt, Human
caggacagaaauaaggaauaua

SEQ ID NO: 464160 - RNA, 22 nt, Human
uuagccauggacugaauugacu

SEQ ID NO: 464161 - RNA, 22 nt, Human
cugcaggggcuggaguuggcuu

SEQ ID NO: 464162 - RNA, 22 nt, Human
agggcuggcaagggauugaaau

SEQ ID NO: 464163 - RNA, 22 nt, Human
gccuggagcucuccacuugggg

SEQ ID NO: 464164 - RNA, 22 nt, Human
cccaaggcauggcaugguggca

SEQ ID NO: 464165 - RNA, 22 nt, Human
aggggcaggugcugcacuuaga

SEQ ID NO: 464166 - RNA, 22 nt, Human
ucuguacaugaguugagaauca

SEQ ID NO: 464167 - RNA, 18 nt, Human
cccagcuggugggucagu

SEQ ID NO: 464168 - RNA, 22 nt, Human
uuuucaagggcagggaaaucau

SEQ ID NO: 464169 - RNA, 22 nt, Human
accagcucagaagccagaaaga

SEQ ID NO: 464170 - RNA, 22 nt, Human
uaggcagagguaugguaaggac

SEQ ID NO: 464171 - RNA, 18 nt, Human
uguuccaaggaaggaauc

SEQ ID NO: 464172 - RNA, 22 nt, Human
aaugcagugagccauuaaaugg

SEQ ID NO: 464173 - RNA, 22 nt, Human
cugugcuugacagugggaagca

SEQ ID NO: 464174 - RNA, 20 nt, Human
acuuucucgguuucucaccu

SEQ ID NO: 464175 - RNA, 22 nt, Human
ugagaauuacaaaugagucaca

SEQ ID NO: 464176 - RNA, 22 nt, Human
aggggugaaagagggcccucaa

SEQ ID NO: 464177 - RNA, 22 nt, Human
aaugcacauguuguaauaaaua

SEQ ID NO: 464178 - RNA, 22 nt, Human
ccaggacccugcaaacccuguu

SEQ ID NO: 464179 - RNA, 22 nt, Human
gaggggcuugaggcccugaugg

SEQ ID NO: 464180 - RNA, 22 nt, Human
ucccaaggcacagggcagggac

SEQ ID NO: 464181 - RNA, 22 nt, Human
gaugcacugcaguauauacugu

SEQ ID NO: 464182 - RNA, 22 nt, Human
uccucuggauauaagccucacc

SEQ ID NO: 464183 - RNA, 22 nt, Human
ccuguguguaggccaggggagu

SEQ ID NO: 464184 - RNA, 22 nt, Human
ucugcugcacaaauucaucucu

SEQ ID NO: 464185 - RNA, 22 nt, Human
caguccugcccaggcugacaga

SEQ ID NO: 464186 - RNA, 22 nt, Human
agauguaaacucucaugucauu

SEQ ID NO: 464187 - RNA, 19 nt, Human
ugcagggcugcgccugggg

SEQ ID NO: 464188 - RNA, 22 nt, Human
ggcagggaagcuggcaucacgg

SEQ ID NO: 464189 - RNA, 22 nt, Human
gcucaaagaauauucagaauga

SEQ ID NO: 464190 - RNA, 22 nt, Human
cuguaauucacuagggucagcg

SEQ ID NO: 464191 - RNA, 22 nt, Human
cagagccccucagcucucuccc

SEQ ID NO: 464192 - RNA, 23 nt, Human
ucucugaguuguacuuucccuug

SEQ ID NO: 464193 - RNA, 22 nt, Human
aaaucaguuguuauauuaaaga

SEQ ID NO: 464194 - RNA, 22 nt, Human
acauguguggacaugaaucuac

SEQ ID NO: 464195 - RNA, 22 nt, Human
gaagcagccacggggagacaga

SEQ ID NO: 464196 - RNA, 22 nt, Human
ucucagaguaauucuuuaaggu

SEQ ID NO: 464197 - RNA, 23 nt, Human
agugcugaauugaaagcuccagg

SEQ ID NO: 464198 - RNA, 23 nt, Human
agaugaggcuucuccauguuggu

SEQ ID NO: 464199 - RNA, 22 nt, Human
caaacugagcaucagaaaguuu

SEQ ID NO: 464200 - RNA, 22 nt, Human
ggcagcaguaggagcuaaucuu

SEQ ID NO: 464201 - RNA, 22 nt, Human
cuuauucuacuccacaagcucu

SEQ ID NO: 464202 - RNA, 22 nt, Human
ccugccagggccuuggaagaaa

SEQ ID NO: 464203 - RNA, 22 nt, Human
uagcugucaccagaaauggcca

SEQ ID NO: 464204 - RNA, 22 nt, Human
gucccaggaguugcugggccuu

SEQ ID NO: 464205 - RNA, 22 nt, Human
uaaagaacacagggaauagcac

SEQ ID NO: 464206 - RNA, 22 nt, Human
gguuucaaaguggacaguuagu

SEQ ID NO: 464207 - RNA, 22 nt, Human
agguggaacguucaggugcuag

SEQ ID NO: 464208 - RNA, 22 nt, Human
auugucugaauccaaagcucug

SEQ ID NO: 464209 - RNA, 22 nt, Human
gguggcaggcccugagcauccc

SEQ ID NO: 464210 - RNA, 22 nt, Human
auguaaggcugccuaugacacu

SEQ ID NO: 464211 - RNA, 22 nt, Human
agucucugagguucagaugccu

SEQ ID NO: 464212 - RNA, 22 nt, Human
aaauauguauggaguucaugaa

SEQ ID NO: 464213 - RNA, 22 nt, Human
aagcagaaguugaucuaccaua

SEQ ID NO: 464214 - RNA, 22 nt, Human
uggagcugggguuugaaucugg

SEQ ID NO: 464215 - RNA, 22 nt, Human
aucaaaaugcuccagugauggu

SEQ ID NO: 464216 - RNA, 22 nt, Human
gaagaggaugacaggagccggu

SEQ ID NO: 464217 - RNA, 22 nt, Human
gccaccuggacagcugugcccu

SEQ ID NO: 464218 - RNA, 22 nt, Human
aagccagcauuuucccauuccu

SEQ ID NO: 464219 - RNA, 22 nt, Human
cagaaggcauagaugaaggccu

SEQ ID NO: 464220 - RNA, 21 nt, Human
acagcaagccuuccuuucagg

SEQ ID NO: 464221 - RNA, 22 nt, Human
gcugcagccaaauucauuguca

SEQ ID NO: 464222 - RNA, 22 nt, Human
cucaggggaccuggcuccgagu

SEQ ID NO: 464223 - RNA, 22 nt, Human
aucaggauggguuuggcuuagg

SEQ ID NO: 464224 - RNA, 22 nt, Human
ugaaccagagucuccagugguu

SEQ ID NO: 464225 - RNA, 22 nt, Human
aagaggaagucuccauggagag

SEQ ID NO: 464226 - RNA, 22 nt, Human
gcuguacaaggccucugccauc

SEQ ID NO: 464227 - RNA, 22 nt, Human
ucucucagucagaugcuaaaga

SEQ ID NO: 464228 - RNA, 22 nt, Human
auuucacucauucauguuacuu

SEQ ID NO: 464229 - RNA, 21 nt, Human
gaguggaacgcucuucacacc

SEQ ID NO: 464230 - RNA, 22 nt, Human
aggcugggaaauguagucuucc

SEQ ID NO: 464231 - RNA, 22 nt, Human
gcagaggagugauuaugccgug

SEQ ID NO: 464232 - RNA, 22 nt, Human
agaauucucuuccauugaaaca

SEQ ID NO: 464233 - RNA, 22 nt, Human
cccaggcaggagugugguggcu

SEQ ID NO: 464234 - RNA, 22 nt, Human
ggagccuguggcugcuugaagc

SEQ ID NO: 464235 - RNA, 22 nt, Human
agauuuagacugccuuaaucau

SEQ ID NO: 464236 - RNA, 22 nt, Human
caaaaacugcaauuacuuuuac

SEQ ID NO: 464237 - RNA, 22 nt, Human
caagagcuagacuuugucagga

SEQ ID NO: 464238 - RNA, 22 nt, Human
cugggagucuggccucuggucc

SEQ ID NO: 464239 - RNA, 22 nt, Human
gcugagugagguccagagcuug

SEQ ID NO: 464240 - RNA, 22 nt, Human
gcugggcugagcuagacuuggc

SEQ ID NO: 464241 - RNA, 22 nt, Human
ucucucagggggaaggcugaag

SEQ ID NO: 464242 - RNA, 22 nt, Human
ucagaguguuuuacuaaacaag

SEQ ID NO: 464243 - RNA, 22 nt, Human
cccagcuugcaaauggguugcu

SEQ ID NO: 464244 - RNA, 22 nt, Human
uugugucccccuuugagagcca

SEQ ID NO: 464245 - RNA, 22 nt, Human
ugggcugccagcucuccagaug

SEQ ID NO: 464246 - RNA, 22 nt, Human
aagggcugcuguagaagcagag

SEQ ID NO: 464247 - RNA, 22 nt, Human
ccuggccugcucggcucuuaag

SEQ ID NO: 464248 - RNA, 22 nt, Human
uggcugagcucccuguguguug

SEQ ID NO: 464249 - RNA, 17 nt, Human
uccuggcucugccacug

SEQ ID NO: 464250 - RNA, 22 nt, Human
agaauuagaggccauguacuug

SEQ ID NO: 464251 - RNA, 22 nt, Human
ucauguuuuaguaaagugaagg

SEQ ID NO: 464252 - RNA, 22 nt, Human
cuggagcuccagggucuccucu

SEQ ID NO: 464253 - RNA, 22 nt, Human
uaagcuauuccugaagaagguu

SEQ ID NO: 464254 - RNA, 18 nt, Human
agcugcagaccaggaggu

SEQ ID NO: 464255 - RNA, 22 nt, Human
ugggcagaggcagcagaaaccu

SEQ ID NO: 464256 - RNA, 22 nt, Human
gacagggaggagcagagcuucu

SEQ ID NO: 464257 - RNA, 22 nt, Human
aggucauuccuugucuucuugc

SEQ ID NO: 464258 - RNA, 22 nt, Human
uuuuuccuagugcuuucuggua

SEQ ID NO: 464259 - RNA, 22 nt, Human
gaggggcuggcuguggucccau

SEQ ID NO: 464260 - RNA, 22 nt, Human
caaaguauauuggauugaaugg

SEQ ID NO: 464261 - RNA, 19 nt, Human
agacucugugugagacuuu

SEQ ID NO: 464262 - RNA, 22 nt, Human
caagcuggaguuccucagagug

SEQ ID NO: 464263 - RNA, 22 nt, Human
uuuuccuacugauaaacaguua

SEQ ID NO: 464264 - RNA, 22 nt, Human
cagcuggcccuuugguagccuu

SEQ ID NO: 464265 - RNA, 22 nt, Human
ugggagcccaagggagcugccg

SEQ ID NO: 464266 - RNA, 22 nt, Human
gcugggcagccuggccgcugcc

SEQ ID NO: 464267 - RNA, 22 nt, Human
ggggaugguagaccggugacgu

SEQ ID NO: 464268 - RNA, 22 nt, Human
uggcagcagggccccuggagga

SEQ ID NO: 464269 - RNA, 22 nt, Human
cagagagaggccacugcuauua

SEQ ID NO: 464270 - RNA, 22 nt, Human
caggaaccuaaagagacauuac

SEQ ID NO: 464271 - RNA, 22 nt, Human
caacauauaauauuugaguucu

SEQ ID NO: 464272 - RNA, 22 nt, Human
uguguacacaaugauugcagag

SEQ ID NO: 464273 - RNA, 22 nt, Human
aaucaguuagaaggaagagaau

SEQ ID NO: 464274 - RNA, 22 nt, Human
cugcaggauucucccaguugga

SEQ ID NO: 464275 - RNA, 22 nt, Human
gggcaagcucuucagaagcucu

SEQ ID NO: 464276 - RNA, 22 nt, Human
gcacccaggcuugggcagcaac

SEQ ID NO: 464277 - RNA, 22 nt, Human
uagagcugcuggacuguaacag

SEQ ID NO: 464278 - RNA, 22 nt, Human
aaauacagauuccagggucuua

SEQ ID NO: 464279 - RNA, 21 nt, Human
uuagcuuucuagaaucuuugu

SEQ ID NO: 464280 - RNA, 22 nt, Human
aaacucuuccuuucuuuaaagu

SEQ ID NO: 464281 - RNA, 20 nt, Human
aacagggggcugcagagggc

SEQ ID NO: 464282 - RNA, 22 nt, Human
guaggaaagggagugaagggaa

SEQ ID NO: 464283 - RNA, 22 nt, Human
cccaggaggcagagguugcagu

SEQ ID NO: 464284 - RNA, 22 nt, Human
augcacagcagugaguucagug

SEQ ID NO: 464285 - RNA, 22 nt, Human
ccucccuuggccauagccagcc

SEQ ID NO: 464286 - RNA, 22 nt, Human
uccuucagcuacucaguuucca

SEQ ID NO: 464287 - RNA, 22 nt, Human
ugcuggcccaugaagacgcagu

SEQ ID NO: 464288 - RNA, 22 nt, Human
uucugcagcccaacaguaguuu

SEQ ID NO: 464289 - RNA, 22 nt, Human
gagggggcgugcaaggcuccgc

SEQ ID NO: 464290 - RNA, 22 nt, Human
acaguggaugugauguccaggu

SEQ ID NO: 464291 - RNA, 20 nt, Human
ccucaggaugagggugagca

SEQ ID NO: 464292 - RNA, 22 nt, Human
ucagccuuguggcccugcucca

SEQ ID NO: 464293 - RNA, 22 nt, Human
guccugggcccaggggcugccu

SEQ ID NO: 464294 - RNA, 22 nt, Human
ccacuguuuuucaguuaacuuu

SEQ ID NO: 464295 - RNA, 22 nt, Human
ccugcagguaaggcuaacugcc

SEQ ID NO: 464296 - RNA, 21 nt, Human
gguugguguguccaguggcca

SEQ ID NO: 464297 - RNA, 22 nt, Human
ugggcagacgcuguuggaaggc

SEQ ID NO: 464298 - RNA, 22 nt, Human
acuguguccuauuuccuugaca

SEQ ID NO: 464299 - RNA, 21 nt, Human
agcugagcccagaagacuggu

SEQ ID NO: 464300 - RNA, 22 nt, Human
ggagaugcuuuccaguggggau

SEQ ID NO: 464301 - RNA, 23 nt, Human
gggaccugguaggaggugauugg

SEQ ID NO: 464302 - RNA, 22 nt, Human
cagcccugagagaaccaucuau

SEQ ID NO: 464303 - RNA, 22 nt, Human
ccacucugauuuuggcuccacu

SEQ ID NO: 464304 - RNA, 22 nt, Human
aggcugaggcgggaggaucacu

SEQ ID NO: 464305 - RNA, 22 nt, Human
agggcacccucucugcaguacc

SEQ ID NO: 464306 - RNA, 22 nt, Human
ggccagcagucacagggucaga

SEQ ID NO: 464307 - RNA, 22 nt, Human
ucuuuccagaggaauuuuuaga

SEQ ID NO: 464308 - RNA, 22 nt, Human
guggccugggguuuguucugag

SEQ ID NO: 464309 - RNA, 22 nt, Human
acccagccacagcauugaggga

SEQ ID NO: 464310 - RNA, 23 nt, Human
ccagcuccgugagccucgggcuc

SEQ ID NO: 464311 - RNA, 22 nt, Human
caaaugcaggucagcagguguc

SEQ ID NO: 464312 - RNA, 20 nt, Human
caccacagaauuggggacag

SEQ ID NO: 464313 - RNA, 22 nt, Human
guggcagagguuccucagugug

SEQ ID NO: 464314 - RNA, 22 nt, Human
aagcacaaugaacaucuuagau

SEQ ID NO: 464315 - RNA, 22 nt, Human
agacagggucuugaucagagcu

SEQ ID NO: 464316 - RNA, 22 nt, Human
uguaauggaagugggauugcau

SEQ ID NO: 464317 - RNA, 22 nt, Human
gcuguauuuauuuucuaggguu

SEQ ID NO: 464318 - RNA, 22 nt, Human
ucugcaucauuuuucagagccg

SEQ ID NO: 464319 - RNA, 22 nt, Human
cgcuggccauagccuccugugu

SEQ ID NO: 464320 - RNA, 22 nt, Human
caucaucaaaagugacagagaa

SEQ ID NO: 464321 - RNA, 22 nt, Human
ccagggagccuggugugucagc

SEQ ID NO: 464322 - RNA, 22 nt, Human
agcaucuggucaugagugagaa

SEQ ID NO: 464323 - RNA, 22 nt, Human
ggccagagagccgcuguuagga

SEQ ID NO: 464324 - RNA, 22 nt, Human
cauggacucugguuuggggagc

SEQ ID NO: 464325 - RNA, 22 nt, Human
agggcagaccacgugcaaggau

SEQ ID NO: 464326 - RNA, 20 nt, Human
agauggugaaggccagggag

SEQ ID NO: 464327 - RNA, 22 nt, Human
agaaaugugagccccuuaucaa

SEQ ID NO: 464328 - RNA, 20 nt, Human
ucauugcacauaauggaagc

SEQ ID NO: 464329 - RNA, 22 nt, Human
cuuucauuugauaagaaugcca

SEQ ID NO: 464330 - RNA, 22 nt, Human
cuggccuggucuggccucucca

SEQ ID NO: 464331 - RNA, 22 nt, Human
uccuugaaaggggcugcagggc

SEQ ID NO: 464332 - RNA, 23 nt, Human
ggcacugaagcuacaauggugag

SEQ ID NO: 464333 - RNA, 22 nt, Human
ugggcacuggaagccugcugug

SEQ ID NO: 464334 - RNA, 22 nt, Human
augcuuuacaguuuuccaaaca

SEQ ID NO: 464335 - RNA, 22 nt, Human
gcccaggauucuuucuuccuua

SEQ ID NO: 464336 - RNA, 22 nt, Human
caaggccacuccagagacuggu

SEQ ID NO: 464337 - RNA, 22 nt, Human
uucuugcucaaugucuguuuaa

SEQ ID NO: 464338 - RNA, 22 nt, Human
caagggcucuuuugaggaaugu

SEQ ID NO: 464339 - RNA, 22 nt, Human
acuguacauguaaacauuguca

SEQ ID NO: 464340 - RNA, 22 nt, Human
uggcugagggcacuaugaagcc

SEQ ID NO: 464341 - RNA, 22 nt, Human
agaguguaauaagggcaagggc

SEQ ID NO: 464342 - RNA, 20 nt, Human
aaucagaaagugugagcucu

SEQ ID NO: 464343 - RNA, 22 nt, Human
agccuccaguagcugaagagac

SEQ ID NO: 464344 - RNA, 22 nt, Human
gcaggaugccagggcagcagcg

SEQ ID NO: 464345 - RNA, 20 nt, Human
ccugucuccucuuaccuggc

SEQ ID NO: 464346 - RNA, 22 nt, Human
caccugcaaggagcuuucauuu

SEQ ID NO: 464347 - RNA, 22 nt, Human
gggacccugggaggcuggcgca

SEQ ID NO: 464348 - RNA, 22 nt, Human
gugugcaggccacaggccaggg

SEQ ID NO: 464349 - RNA, 22 nt, Human
guuauuagaagugaaggauugu

SEQ ID NO: 464350 - RNA, 22 nt, Human
aaaaucugcuuccuuuuacaga

SEQ ID NO: 464351 - RNA, 22 nt, Human
ucagaggagaugguuaccaggg

SEQ ID NO: 464352 - RNA, 22 nt, Human
cccagcucucucaguucugcuu

SEQ ID NO: 464353 - RNA, 22 nt, Human
uacauguaagacaugagacucu

SEQ ID NO: 464354 - RNA, 23 nt, Human
uggcucagcuaguuuuccauuuc

SEQ ID NO: 464355 - RNA, 22 nt, Human
uggggaggacgggcgccuuccu

SEQ ID NO: 464356 - RNA, 22 nt, Human
uaaggcaccuguccaggcuggg

SEQ ID NO: 464357 - RNA, 22 nt, Human
agauggggcagaauggagccau

SEQ ID NO: 464358 - RNA, 22 nt, Human
ggacuucuaagugccagacacu

SEQ ID NO: 464359 - RNA, 23 nt, Human
agcacagacuagaaaggucuuuc

SEQ ID NO: 464360 - RNA, 22 nt, Human
cugggccagucucggccgcucu

SEQ ID NO: 464361 - RNA, 22 nt, Human
uccuggaggcaaaugaagacuc

SEQ ID NO: 464362 - RNA, 22 nt, Human
ggccccuggcaccaggcugauu

SEQ ID NO: 464363 - RNA, 22 nt, Human
ucuccucaccaccagcagcaga

SEQ ID NO: 464364 - RNA, 22 nt, Human
acguggagagaauagggcacca

SEQ ID NO: 464365 - RNA, 22 nt, Human
ugggugcuucgucagcucugag

SEQ ID NO: 464366 - RNA, 22 nt, Human
auccuugaacuuagacacuagg

SEQ ID NO: 464367 - RNA, 22 nt, Human
cagaggaggccaccgcauaggc

SEQ ID NO: 464368 - RNA, 22 nt, Human
cucccaagauaaauaaggcagu

SEQ ID NO: 464369 - RNA, 22 nt, Human
ucuuagaaaugaaguucuuucu

SEQ ID NO: 464370 - RNA, 22 nt, Human
uugaagaggacuuugcagcugu

SEQ ID NO: 464371 - RNA, 22 nt, Human
acaguggauauauuaaaugaga

SEQ ID NO: 464372 - RNA, 22 nt, Human
ucugggagacguguguugucag

SEQ ID NO: 464373 - RNA, 22 nt, Human
cccuggaggcaaagguugcagu

SEQ ID NO: 464374 - RNA, 22 nt, Human
cucugagcugaaacaugagcau

SEQ ID NO: 464375 - RNA, 22 nt, Human
ucacagaauagcacuguaagcg

SEQ ID NO: 464376 - RNA, 22 nt, Human
ugcagugguguccagguguacu

SEQ ID NO: 464377 - RNA, 22 nt, Human
aggcccagggcugcucucugaa

SEQ ID NO: 464378 - RNA, 22 nt, Human
guacaguuuucaguguucacug

SEQ ID NO: 464379 - RNA, 22 nt, Human
acauuuuuauucaucaaagcag

SEQ ID NO: 464380 - RNA, 22 nt, Human
ugaggcagggaguuuaauuguc

SEQ ID NO: 464381 - RNA, 23 nt, Human
ccaaagucgaagucuaguccaga

SEQ ID NO: 464382 - RNA, 22 nt, Human
acauuucugagcagggagcugu

SEQ ID NO: 464383 - RNA, 22 nt, Human
aaggcacuuuuccugagaugau

SEQ ID NO: 464384 - RNA, 17 nt, Human
aguguuuccuuaucauu

SEQ ID NO: 464385 - RNA, 22 nt, Human
uccucaggugacuagguaucuu

SEQ ID NO: 464386 - RNA, 22 nt, Human
guccucugggagccuugagccu

SEQ ID NO: 464387 - RNA, 22 nt, Human
ugaagcaacuggacaaguuggc

SEQ ID NO: 464388 - RNA, 22 nt, Human
ugggacuuguguggcaguauuu

SEQ ID NO: 464389 - RNA, 22 nt, Human
ggcucuggugggaagguuagau

SEQ ID NO: 464390 - RNA, 22 nt, Human
gcuggcaucacuggcuucggug

SEQ ID NO: 464391 - RNA, 22 nt, Human
ugcagaaggccugacauugcac

SEQ ID NO: 464392 - RNA, 22 nt, Human
agucucugcaugaugcagcaca

SEQ ID NO: 464393 - RNA, 22 nt, Human
augggcugugagguccggcagg

SEQ ID NO: 464394 - RNA, 22 nt, Human
agccagugaugaagacucugga

SEQ ID NO: 464395 - RNA, 19 nt, Human
accucugcagagauguuua

SEQ ID NO: 464396 - RNA, 22 nt, Human
ggguccagacacuccagaggaa

SEQ ID NO: 464397 - RNA, 22 nt, Human
gaggcucagagggacuuucaag

SEQ ID NO: 464398 - RNA, 19 nt, Human
aauuagggagucgguuaag

SEQ ID NO: 464399 - RNA, 22 nt, Human
cuuccugguuugaagcucgccg

SEQ ID NO: 464400 - RNA, 22 nt, Human
uggucucugacucugaagaccc

SEQ ID NO: 464401 - RNA, 19 nt, Human
ucaggcaguuauucacaaa

SEQ ID NO: 464402 - RNA, 21 nt, Human
ucucuacacuuucacuaggcu

SEQ ID NO: 464403 - RNA, 22 nt, Human
uuccuguaguugugcaauguac

SEQ ID NO: 464404 - RNA, 22 nt, Human
caggauggucuucauuuggcuc

SEQ ID NO: 464405 - RNA, 22 nt, Human
agauuuagugguggaauuuugg

SEQ ID NO: 464406 - RNA, 19 nt, Human
cccagcuugaccaccugcu

SEQ ID NO: 464407 - RNA, 22 nt, Human
cccaggcagugugugcaugcgu

SEQ ID NO: 464408 - RNA, 22 nt, Human
ccccaccugugcgucugccgca

SEQ ID NO: 464409 - RNA, 22 nt, Human
uuuccucuccaccaggaggucu

SEQ ID NO: 464410 - RNA, 22 nt, Human
agcucccauuaucuucugaaac

SEQ ID NO: 464411 - RNA, 22 nt, Human
ugcugucaguuggcaggaugag

SEQ ID NO: 464412 - RNA, 22 nt, Human
gaggaaaagagacagguuauug

SEQ ID NO: 464413 - RNA, 22 nt, Human
uaaggccaauuacauauguuca

SEQ ID NO: 464414 - RNA, 22 nt, Human
uccagucaucucccuucacauu

SEQ ID NO: 464415 - RNA, 22 nt, Human
aggugucugugaugggagcgau

SEQ ID NO: 464416 - RNA, 17 nt, Human
ggccuuggggccucagu

SEQ ID NO: 464417 - RNA, 22 nt, Human
acaguccuguacaggccauauc

SEQ ID NO: 464418 - RNA, 22 nt, Human
caggacaguuugcuuugcccug

SEQ ID NO: 464419 - RNA, 19 nt, Human
gcaggcaguggcauucgga

SEQ ID NO: 464420 - RNA, 21 nt, Human
agcugccacccuagcuucuga

SEQ ID NO: 464421 - RNA, 22 nt, Human
uucuuugaguuaguacagucca

SEQ ID NO: 464422 - RNA, 22 nt, Human
gcccugucccuuggcuucuagg

SEQ ID NO: 464423 - RNA, 22 nt, Human
agucaauucuuuucaacucaag

SEQ ID NO: 464424 - RNA, 22 nt, Human
gcagggacaacugugcaccuga

SEQ ID NO: 464425 - RNA, 22 nt, Human
ugccagugggugugcagagacu

SEQ ID NO: 464426 - RNA, 22 nt, Human
ggaagaggcucucauugagggc

SEQ ID NO: 464427 - RNA, 22 nt, Human
cuuucaaaacgcucuguaugca

SEQ ID NO: 464428 - RNA, 23 nt, Human
auggagcugguacuagcuaccuc

SEQ ID NO: 464429 - RNA, 22 nt, Human
auguacaaaaugccacugaauu

SEQ ID NO: 464430 - RNA, 22 nt, Human
cuuacauuaaguaagagauuga

SEQ ID NO: 464431 - RNA, 21 nt, Human
ucagaacaauuccaugccucc

SEQ ID NO: 464432 - RNA, 22 nt, Human
ugcagcugguuuagaacuagau

SEQ ID NO: 464433 - RNA, 22 nt, Human
ccccaccagcacccucucuauc

SEQ ID NO: 464434 - RNA, 22 nt, Human
aguugaaauuagaguccuggcu

SEQ ID NO: 464435 - RNA, 23 nt, Human
agagcuuagggaauucacaugag

SEQ ID NO: 464436 - RNA, 22 nt, Human
aagugccugaccuagccuggag

SEQ ID NO: 464437 - RNA, 22 nt, Human
acagacagggcaccugccuccu

SEQ ID NO: 464438 - RNA, 22 nt, Human
cuauuagguaugugguugcuau

SEQ ID NO: 464439 - RNA, 22 nt, Human
uaccugcaaaguuccuuuugcc

SEQ ID NO: 464440 - RNA, 21 nt, Human
aggcucagagagaaacucuug

SEQ ID NO: 464441 - RNA, 22 nt, Human
aaacuucagugaaugacuuaug

SEQ ID NO: 464442 - RNA, 22 nt, Human
gcugccugaucauacaccaggg

SEQ ID NO: 464443 - RNA, 22 nt, Human
ugggagagugcucaaugugcaa

SEQ ID NO: 464444 - RNA, 22 nt, Human
aggcagugugggccaagcuucc

SEQ ID NO: 464445 - RNA, 22 nt, Human
ucauuuguucaucugcucuucu

SEQ ID NO: 464446 - RNA, 22 nt, Human
gagaaggcuggucuuaagucga

SEQ ID NO: 464447 - RNA, 22 nt, Human
uacaaaugaaccaacuuugaug

SEQ ID NO: 464448 - RNA, 22 nt, Human
cuggaguguaaagagcauagaa

SEQ ID NO: 464449 - RNA, 22 nt, Human
auguccaggaucuauccccaga

SEQ ID NO: 464450 - RNA, 22 nt, Human
ucuauuucgcauauaaguuuug

SEQ ID NO: 464451 - RNA, 22 nt, Human
gcuggccauagaagccaaagag

SEQ ID NO: 464452 - RNA, 22 nt, Human
uggcccugcuaugauccugcaa

SEQ ID NO: 464453 - RNA, 22 nt, Human
ugccaggcagugucagauugag

SEQ ID NO: 464454 - RNA, 22 nt, Human
cugucaggggcggguggagcgg

SEQ ID NO: 464455 - RNA, 22 nt, Human
cagguggggcgcccucaggcag

SEQ ID NO: 464456 - RNA, 18 nt, Human
ugcuuuaugcuuauauaa

SEQ ID NO: 464457 - RNA, 22 nt, Human
gcagguguggaguggggugagc

SEQ ID NO: 464458 - RNA, 22 nt, Human
aggccugagccccagguuuguu

SEQ ID NO: 464459 - RNA, 22 nt, Human
cuucuuuaauguauacaaaaga

SEQ ID NO: 464460 - RNA, 22 nt, Human
gggagggacacaaagaguuccc

SEQ ID NO: 464461 - RNA, 22 nt, Human
agaauaaacugcuuuagggcag

SEQ ID NO: 464462 - RNA, 22 nt, Human
agucaggauaugccuugugggc

SEQ ID NO: 464463 - RNA, 22 nt, Human
acacagggcggaaagcaugaga

SEQ ID NO: 464464 - RNA, 22 nt, Human
cuuuggcaugguccucacuaua

SEQ ID NO: 464465 - RNA, 22 nt, Human
cagagcagaaaccugggugauu

SEQ ID NO: 464466 - RNA, 21 nt, Human
agcagaacagucgagcacugc

SEQ ID NO: 464467 - RNA, 22 nt, Human
gguccccguggaggcuggagcg

SEQ ID NO: 464468 - RNA, 22 nt, Human
gcauuuaaauuugaacuucaga

SEQ ID NO: 464469 - RNA, 22 nt, Human
aucagcaaggcaaucacugcag

SEQ ID NO: 464470 - RNA, 22 nt, Human
gcacagggcccugugcguaggu

SEQ ID NO: 464471 - RNA, 22 nt, Human
cuccagggaugagacagaguag

SEQ ID NO: 464472 - RNA, 21 nt, Human
aucuuuauuacgcagagaaga

SEQ ID NO: 464473 - RNA, 22 nt, Human
uggguggcggccugguucugag

SEQ ID NO: 464474 - RNA, 22 nt, Human
uugucuguaaagacggccacca

SEQ ID NO: 464475 - RNA, 22 nt, Human
cucaggaggaugacugccuugg

SEQ ID NO: 464476 - RNA, 22 nt, Human
ugccaggccacguagcuucaag

SEQ ID NO: 464477 - RNA, 19 nt, Human
agggcuaggcacauagggc

SEQ ID NO: 464478 - RNA, 20 nt, Human
guccugggagccacagcaca

SEQ ID NO: 464479 - RNA, 22 nt, Human
ggcuccuggggaggugagcuug

SEQ ID NO: 464480 - RNA, 22 nt, Human
gagagcugggggacuguggaug

SEQ ID NO: 464481 - RNA, 20 nt, Human
aggcucagauacccagggaa

SEQ ID NO: 464482 - RNA, 21 nt, Human
uucagcaguccucuagagaua

SEQ ID NO: 464483 - RNA, 21 nt, Human
ugcugccauagaccugaggga

SEQ ID NO: 464484 - RNA, 22 nt, Human
cuuucacauaauugaccuugaa

SEQ ID NO: 464485 - RNA, 17 nt, Human
acucaggaucugggagu

SEQ ID NO: 464486 - RNA, 22 nt, Human
uauuucuuguuauucucguuga

SEQ ID NO: 464487 - RNA, 22 nt, Human
agguaggguuaauggagauaua

SEQ ID NO: 464488 - RNA, 22 nt, Human
aguuucuaacauauagcauugg

SEQ ID NO: 464489 - RNA, 22 nt, Human
uuccagaaaucuuucagcucaa

SEQ ID NO: 464490 - RNA, 22 nt, Human
ucagaagaagagacuccacagc

SEQ ID NO: 464491 - RNA, 22 nt, Human
caguggcacccacgggcugggc

SEQ ID NO: 464492 - RNA, 23 nt, Human
cccagcagauuguaaagugucca

SEQ ID NO: 464493 - RNA, 22 nt, Human
uauguguuugacacccugcaag

SEQ ID NO: 464494 - RNA, 22 nt, Human
gugguaauagagcuccaaacua

SEQ ID NO: 464495 - RNA, 22 nt, Human
ggcugcuggggacgugggagag

SEQ ID NO: 464496 - RNA, 22 nt, Human
acaggcuucucacagaaaaggg

SEQ ID NO: 464497 - RNA, 22 nt, Human
ggcucugcaugugagugggugg

SEQ ID NO: 464498 - RNA, 22 nt, Human
aaucaguucuacaucuuaucca

SEQ ID NO: 464499 - RNA, 18 nt, Human
accugccuguucuucucu

SEQ ID NO: 464500 - RNA, 16 nt, Human
gcaggcagaucacaug

SEQ ID NO: 464501 - RNA, 22 nt, Human
gugcuucucuucacacccaacu

SEQ ID NO: 464502 - RNA, 22 nt, Human
ccuggcugcauuuugcuggaug

SEQ ID NO: 464503 - RNA, 17 nt, Human
aguggcaggcagauggg

SEQ ID NO: 464504 - RNA, 22 nt, Human
uguagaaagcucuucugaaauc

SEQ ID NO: 464505 - RNA, 22 nt, Human
ugcuuuauaggggauugcaggc

SEQ ID NO: 464506 - RNA, 22 nt, Human
ggcugaggcucaugccaucuug

SEQ ID NO: 464507 - RNA, 22 nt, Human
guggcugcuguccucucugguu

SEQ ID NO: 464508 - RNA, 22 nt, Human
agggauggaagcucgucugcaa

SEQ ID NO: 464509 - RNA, 22 nt, Human
ggaugcugcuaucaggcuucga

SEQ ID NO: 464510 - RNA, 22 nt, Human
guggauggacaugggcaagagg

SEQ ID NO: 464511 - RNA, 22 nt, Human
uuuuagaaauacugauuuagug

SEQ ID NO: 464512 - RNA, 22 nt, Human
ucaggcugcagcugucagcagc

SEQ ID NO: 464513 - RNA, 22 nt, Human
uucucuuauucuggauaugcag

SEQ ID NO: 464514 - RNA, 22 nt, Human
aacaaaugauuguugguuggag

SEQ ID NO: 464515 - RNA, 22 nt, Human
cacaccagagguuaccugcaaa

SEQ ID NO: 464516 - RNA, 22 nt, Human
uaaguucauaagcuuauucuua

SEQ ID NO: 464517 - RNA, 19 nt, Human
uguggccaugguucagcug

SEQ ID NO: 464518 - RNA, 22 nt, Human
uguuugaauuuugcuaacgugu

SEQ ID NO: 464519 - RNA, 22 nt, Human
uccugggcccaggcugccaggg

SEQ ID NO: 464520 - RNA, 22 nt, Human
cuggaaugagcagggcuuaugg

SEQ ID NO: 464521 - RNA, 22 nt, Human
uggccuggaagagaggucgagg

SEQ ID NO: 464522 - RNA, 22 nt, Human
cauuuguaucugggcugcugug

SEQ ID NO: 464523 - RNA, 22 nt, Human
ucccagggcacucacccucccu

SEQ ID NO: 464524 - RNA, 20 nt, Human
uauaacaguguugggugugu

SEQ ID NO: 464525 - RNA, 22 nt, Human
auucacagggacaaugggagag

SEQ ID NO: 464526 - RNA, 22 nt, Human
ggugaguugggguucacagguc

SEQ ID NO: 464527 - RNA, 18 nt, Human
gguggccuugacuucucu

SEQ ID NO: 464528 - RNA, 22 nt, Human
agcaggaaggucugugugaguc

SEQ ID NO: 464529 - RNA, 22 nt, Human
uagagcuggccgggacagcugg

SEQ ID NO: 464530 - RNA, 22 nt, Human
acucaggaaaugaagacugguu

SEQ ID NO: 464531 - RNA, 22 nt, Human
ccucauggaccucagacugucc

SEQ ID NO: 464532 - RNA, 22 nt, Human
acuuucucccacccacccgucu

SEQ ID NO: 464533 - RNA, 22 nt, Human
gcuucccacagcuggacugggg

SEQ ID NO: 464534 - RNA, 22 nt, Human
gaggaagaagcaaaccagcuaa

SEQ ID NO: 464535 - RNA, 22 nt, Human
gcugugcagguccccacugccu

SEQ ID NO: 464536 - RNA, 22 nt, Human
gagagcugcagccgagaggggg

SEQ ID NO: 464537 - RNA, 22 nt, Human
cagaaugcaaauuuuauaauau

SEQ ID NO: 464538 - RNA, 22 nt, Human
aaguaacaaugcuguugaauug

SEQ ID NO: 464539 - RNA, 22 nt, Human
cuggagccuucaccaggggaaa

SEQ ID NO: 464540 - RNA, 22 nt, Human
cucagagagggcaccagggcca

SEQ ID NO: 464541 - RNA, 22 nt, Human
agaaaucagaacccugaaguuc

SEQ ID NO: 464542 - RNA, 22 nt, Human
ugcaccugagaggucucugagg

SEQ ID NO: 464543 - RNA, 22 nt, Human
acaaaggcagagaauucaacau

SEQ ID NO: 464544 - RNA, 22 nt, Human
ugaggaugacgauggcaauggc

SEQ ID NO: 464545 - RNA, 22 nt, Human
cauggccugccuccuccuggug

SEQ ID NO: 464546 - RNA, 22 nt, Human
ugagcuggucuugaguguagcu

SEQ ID NO: 464547 - RNA, 22 nt, Human
caaggaaaaagcgagcucgggg

SEQ ID NO: 464548 - RNA, 22 nt, Human
acagggcagguggcuacugguc

SEQ ID NO: 464549 - RNA, 22 nt, Human
ucugaacagaaaagaugcacaa

SEQ ID NO: 464550 - RNA, 22 nt, Human
ugcugucugcaacaguacuaca

SEQ ID NO: 464551 - RNA, 22 nt, Human
aaggaggagcggaggcuuguug

SEQ ID NO: 464552 - RNA, 22 nt, Human
ugggccuggcccuguggaggag

SEQ ID NO: 464553 - RNA, 20 nt, Human
uaucaaucagaaagaagacu

SEQ ID NO: 464554 - RNA, 22 nt, Human
cggggcugcgcucuuccugccg

SEQ ID NO: 464555 - RNA, 22 nt, Human
gaauucugguccuguccaaggu

SEQ ID NO: 464556 - RNA, 18 nt, Human
cuguccaguagacucugc

SEQ ID NO: 464557 - RNA, 22 nt, Human
agggacccauagagagaccagu

SEQ ID NO: 464558 - RNA, 22 nt, Human
acauuaucccuggcacaacugc

SEQ ID NO: 464559 - RNA, 22 nt, Human
cuuaauuuaaaauaguucaggc

SEQ ID NO: 464560 - RNA, 22 nt, Human
uaucuuuaacuugcaguauuua

SEQ ID NO: 464561 - RNA, 22 nt, Human
gaccaaggaagaggggagccag

SEQ ID NO: 464562 - RNA, 18 nt, Human
acagggagggcgcugggg

SEQ ID NO: 464563 - RNA, 22 nt, Human
cagauuuagaguggggcuugga

SEQ ID NO: 464564 - RNA, 22 nt, Human
ggcagauggagaagcagcaggu

SEQ ID NO: 464565 - RNA, 22 nt, Human
cuuccaaagcacuuuauggacc

SEQ ID NO: 464566 - RNA, 22 nt, Human
agguggggugagcugcagacua

SEQ ID NO: 464567 - RNA, 22 nt, Human
aggacaguccgggguccuccac

SEQ ID NO: 464568 - RNA, 23 nt, Human
ucccuggaggcagguccagggcc

SEQ ID NO: 464569 - RNA, 22 nt, Human
aguccuucaagaaaucuggaaa

SEQ ID NO: 464570 - RNA, 19 nt, Human
ugucucugaaagaugagcu

SEQ ID NO: 464571 - RNA, 22 nt, Human
aucacgucaugguuugaucugg

SEQ ID NO: 464572 - RNA, 21 nt, Human
cagaggggcuagccuggcugc

SEQ ID NO: 464573 - RNA, 22 nt, Human
cagcuucuucaguccuggagcu

SEQ ID NO: 464574 - RNA, 22 nt, Human
cucugcagaauuugagcugcuc

SEQ ID NO: 464575 - RNA, 22 nt, Human
aaguucaaucagaugaaaaagc

SEQ ID NO: 464576 - RNA, 22 nt, Human
ugcagaggaccauuguccugga

SEQ ID NO: 464577 - RNA, 22 nt, Human
acugagcugugacaaugcuuaa

SEQ ID NO: 464578 - RNA, 22 nt, Human
cagggcucgcugccagcuucag

SEQ ID NO: 464579 - RNA, 22 nt, Human
uucaaaggcaggauagcagcug

SEQ ID NO: 464580 - RNA, 22 nt, Human
uauccaaaguggcauauuauag

SEQ ID NO: 464581 - RNA, 22 nt, Human
ugggccuggacaaggccacuag

SEQ ID NO: 464582 - RNA, 22 nt, Human
uacagucuuuggaaagagauag

SEQ ID NO: 464583 - RNA, 22 nt, Human
uauccaauucaccauugauggg

SEQ ID NO: 464584 - RNA, 21 nt, Human
agaggccuuacaggauagacc

SEQ ID NO: 464585 - RNA, 22 nt, Human
aauguacaauaagacaaagagg

SEQ ID NO: 464586 - RNA, 22 nt, Human
uuuggaaaguugucacuuuaga

SEQ ID NO: 464587 - RNA, 22 nt, Human
cuacaggucaguaagaccuaga

SEQ ID NO: 464588 - RNA, 22 nt, Human
gaaguggaagccaucggcaguc

SEQ ID NO: 464589 - RNA, 22 nt, Human
aggcacuggguaauuaguagcu

SEQ ID NO: 464590 - RNA, 22 nt, Human
ucugccugaaauucacauguaa

SEQ ID NO: 464591 - RNA, 22 nt, Human
ugauuuccaguugcugggugcu

SEQ ID NO: 464592 - RNA, 22 nt, Human
caggaugggauguagugggccc

SEQ ID NO: 464593 - RNA, 22 nt, Human
cagggcucccuugcaaggaggg

SEQ ID NO: 464594 - RNA, 22 nt, Human
cccagccagccucuucccauau

SEQ ID NO: 464595 - RNA, 22 nt, Human
caggcugagcucuggccugggc

SEQ ID NO: 464596 - RNA, 22 nt, Human
auuuugaaaagcauuugaguaa

SEQ ID NO: 464597 - RNA, 23 nt, Human
gcucugagggcuuaucccuccca

SEQ ID NO: 464598 - RNA, 22 nt, Human
aagcccagcaucccugcaccag

SEQ ID NO: 464599 - RNA, 22 nt, Human
cuccagggaggagcacggguuc

SEQ ID NO: 464600 - RNA, 22 nt, Human
uggcccugcugggucagagcug

SEQ ID NO: 464601 - RNA, 23 nt, Human
gacagagugagaccuugucuuac

SEQ ID NO: 464602 - RNA, 22 nt, Human
agcagaugagccucaugacugg

SEQ ID NO: 464603 - RNA, 22 nt, Human
gugaauggggcaggaaggaugg

SEQ ID NO: 464604 - RNA, 22 nt, Human
ugcugccuugaccuccugggcu

SEQ ID NO: 464605 - RNA, 22 nt, Human
cagugcagguuuagggcugggg

SEQ ID NO: 464606 - RNA, 22 nt, Human
aggcaaaauuacaaaguuauua

SEQ ID NO: 464607 - RNA, 22 nt, Human
aaugcacagcuaaagugguucc

SEQ ID NO: 464608 - RNA, 22 nt, Human
gcaaaaaaugcuuguugcuuag

SEQ ID NO: 464609 - RNA, 22 nt, Human
cacauuuaaagguugaagcuga

SEQ ID NO: 464610 - RNA, 22 nt, Human
ugugccuggcauucugggcuuc

SEQ ID NO: 464611 - RNA, 22 nt, Human
gagcuuuaggagaaggagguca

SEQ ID NO: 464612 - RNA, 22 nt, Human
gaaagaagcuuuagauggcuau

SEQ ID NO: 464613 - RNA, 22 nt, Human
caauguguuugcauauuaaaau

SEQ ID NO: 464614 - RNA, 22 nt, Human
agcaggugcauggcgagcgcgg

SEQ ID NO: 464615 - RNA, 22 nt, Human
ugaggcaggagaaucaccggaa

SEQ ID NO: 464616 - RNA, 22 nt, Human
acauuucugcaucucagagcua

SEQ ID NO: 464617 - RNA, 22 nt, Human
cauuagaagaacaguuauauua

SEQ ID NO: 464618 - RNA, 22 nt, Human
aggaagugaaagggaaggaguu

SEQ ID NO: 464619 - RNA, 22 nt, Human
ggagugaaucacuagaugcaga

SEQ ID NO: 464620 - RNA, 22 nt, Human
aggacuucuccgauaagucaga

SEQ ID NO: 464621 - RNA, 22 nt, Human
uucuaguuuagggcucuucaac

SEQ ID NO: 464622 - RNA, 22 nt, Human
gccugagcccaggugugcagag

SEQ ID NO: 464623 - RNA, 22 nt, Human
cagggcucccugcagccucugu

SEQ ID NO: 464624 - RNA, 22 nt, Human
gaggucagucagaccaggguuu

SEQ ID NO: 464625 - RNA, 22 nt, Human
cccagaggugcuucagaggugc

SEQ ID NO: 464626 - RNA, 22 nt, Human
gugauuccuauuaguacaugca

SEQ ID NO: 464627 - RNA, 22 nt, Human
gcugccugauguccagcaggac

SEQ ID NO: 464628 - RNA, 22 nt, Human
aucagcaaaaaugccuucagaa

SEQ ID NO: 464629 - RNA, 22 nt, Human
gccaccagguuagauccagccu

SEQ ID NO: 464630 - RNA, 22 nt, Human
cugagggccuuggcuccugccc

SEQ ID NO: 464631 - RNA, 22 nt, Human
uuauuuacaacucuucucuucc

SEQ ID NO: 464632 - RNA, 22 nt, Human
cugggcugcgggcgccccucca

SEQ ID NO: 464633 - RNA, 22 nt, Human
ucugccugcggcugcagguggc

SEQ ID NO: 464634 - RNA, 22 nt, Human
aaaagaggagugguuuaugaca

SEQ ID NO: 464635 - RNA, 22 nt, Human
agggccucuaccauccaagguu

SEQ ID NO: 464636 - RNA, 22 nt, Human
gaguggggcguggauccagcgu

SEQ ID NO: 464637 - RNA, 22 nt, Human
gagcaggaugggagcuggggcc

SEQ ID NO: 464638 - RNA, 22 nt, Human
gcaguaggagaagaggaugcuu

SEQ ID NO: 464639 - RNA, 22 nt, Human
aaagcaguauauugguaguugu

SEQ ID NO: 464640 - RNA, 21 nt, Human
aagccagcccacagugguuug

SEQ ID NO: 464641 - RNA, 22 nt, Human
ugaggcagcaauugauuauuca

SEQ ID NO: 464642 - RNA, 20 nt, Human
aggagaaauucgggacaccu

SEQ ID NO: 464643 - RNA, 18 nt, Human
uggaggcagaguucuggc

SEQ ID NO: 464644 - RNA, 22 nt, Human
uggcucagaacuacuucuaguu

SEQ ID NO: 464645 - RNA, 22 nt, Human
cuaaaugcccuacaaugacugg

SEQ ID NO: 464646 - RNA, 22 nt, Human
aaaagguuuugaguacaaauau

SEQ ID NO: 464647 - RNA, 22 nt, Human
caggagccagcugucccaacca

SEQ ID NO: 464648 - RNA, 22 nt, Human
uucaggagcuggcugcgaagga

SEQ ID NO: 464649 - RNA, 22 nt, Human
ucucugggauaaacugggccag

SEQ ID NO: 464650 - RNA, 19 nt, Human
ugaaggagggggauggcca

SEQ ID NO: 464651 - RNA, 22 nt, Human
cacaggagguuaggaagugguc

SEQ ID NO: 464652 - RNA, 22 nt, Human
gggccugugcacaguucuguua

SEQ ID NO: 464653 - RNA, 22 nt, Human
cucucuguuaugcuuucaugaa

SEQ ID NO: 464654 - RNA, 22 nt, Human
gaacaaacacaucccagcagug

SEQ ID NO: 464655 - RNA, 22 nt, Human
uacagaaaucacaucgcuuuga

SEQ ID NO: 464656 - RNA, 22 nt, Human
gaauuucuggacccuuugagaa

SEQ ID NO: 464657 - RNA, 22 nt, Human
gccaggcauguccucugcagaa

SEQ ID NO: 464658 - RNA, 22 nt, Human
ccagucccaucucugucgcuua

SEQ ID NO: 464659 - RNA, 22 nt, Human
accagguggccccagcgugguu

SEQ ID NO: 464660 - RNA, 22 nt, Human
uugcaagacacuuggaagcaca

SEQ ID NO: 464661 - RNA, 22 nt, Human
ugugaaggagaugaagggagug

SEQ ID NO: 464662 - RNA, 22 nt, Human
aaaggccagguuggcugguauu

SEQ ID NO: 464663 - RNA, 20 nt, Human
ugaggcucagagagguugag

SEQ ID NO: 464664 - RNA, 20 nt, Human
gggagucuggaugaaagaug

SEQ ID NO: 464665 - RNA, 22 nt, Human
gggcugcacguauucugcucac

SEQ ID NO: 464666 - RNA, 22 nt, Human
gagcagcuagauaaagcccuuc

SEQ ID NO: 464667 - RNA, 22 nt, Human
uuucucuaaauagggaggcuua

SEQ ID NO: 464668 - RNA, 22 nt, Human
ucaggcugaggucaucugcauc

SEQ ID NO: 464669 - RNA, 22 nt, Human
ugcugccaaaugcgagcucugu

SEQ ID NO: 464670 - RNA, 22 nt, Human
gaaaucugcggugaggccugag

SEQ ID NO: 464671 - RNA, 22 nt, Human
ccagagcugauuccugggacuu

SEQ ID NO: 464672 - RNA, 22 nt, Human
agggucugacugaauggaaaag

SEQ ID NO: 464673 - RNA, 22 nt, Human
aggcccagagagccaguuagug

SEQ ID NO: 464674 - RNA, 22 nt, Human
uuuucauuagaaugacugagaa

SEQ ID NO: 464675 - RNA, 22 nt, Human
cagccaggacagggaaacuagu

SEQ ID NO: 464676 - RNA, 22 nt, Human
aggcagagaaaaaccagauaug

SEQ ID NO: 464677 - RNA, 22 nt, Human
ugccaggcuccggaacgacagu

SEQ ID NO: 464678 - RNA, 22 nt, Human
ugccucugcugcuguggcauca

SEQ ID NO: 464679 - RNA, 22 nt, Human
guauuagguuggugcaaaagua

SEQ ID NO: 464680 - RNA, 22 nt, Human
cccagggcuuuucucacuagac

SEQ ID NO: 464681 - RNA, 22 nt, Human
cugagaggugacagcgugcugg

SEQ ID NO: 464682 - RNA, 23 nt, Human
auuuccuacuauaaaagagguaa

SEQ ID NO: 464683 - RNA, 21 nt, Human
uggcacugcuuagcagguucc

SEQ ID NO: 464684 - RNA, 22 nt, Human
aguaauaauuuauauuagggag

SEQ ID NO: 464685 - RNA, 22 nt, Human
gguggccucgguggugcacagg

SEQ ID NO: 464686 - RNA, 22 nt, Human
ccagagccucgcccggagccuc

SEQ ID NO: 464687 - RNA, 22 nt, Human
gagagugaggccugggaaucua

SEQ ID NO: 464688 - RNA, 18 nt, Human
aaggcuucaaagaguaga

SEQ ID NO: 464689 - RNA, 22 nt, Human
gggcugacucaaccuugcaaag

SEQ ID NO: 464690 - RNA, 22 nt, Human
acauuuuuuagagucccacauu

SEQ ID NO: 464691 - RNA, 22 nt, Human
agugcauugcaucucugcuuca

SEQ ID NO: 464692 - RNA, 22 nt, Human
auuucuuccucugucaguaacu

SEQ ID NO: 464693 - RNA, 22 nt, Human
ggguggaguagaaagaugaauu

SEQ ID NO: 464694 - RNA, 22 nt, Human
gcugccuguccugaggaguccg

SEQ ID NO: 464695 - RNA, 22 nt, Human
ucccaguguggcaggccaugga

SEQ ID NO: 464696 - RNA, 22 nt, Human
aagagcuggaugaagaaaucaa

SEQ ID NO: 464697 - RNA, 22 nt, Human
ucuuucuacaucauuugcuucu

SEQ ID NO: 464698 - RNA, 22 nt, Human
gggcugggaauggcuaaguaug

SEQ ID NO: 464699 - RNA, 22 nt, Human
agcuuuauggugccucacuuga

SEQ ID NO: 464700 - RNA, 20 nt, Human
cagagacccaggcuucagcu

SEQ ID NO: 464701 - RNA, 22 nt, Human
ccagggugugagaaggaaguag

SEQ ID NO: 464702 - RNA, 22 nt, Human
ccagguggaggugugagguccu

SEQ ID NO: 464703 - RNA, 22 nt, Human
ccugggagugucagacuugcuu

SEQ ID NO: 464704 - RNA, 22 nt, Human
cagccaccauacagcagaagcu

SEQ ID NO: 464705 - RNA, 22 nt, Human
agcagccaagguaaccugugcu

SEQ ID NO: 464706 - RNA, 22 nt, Human
uugcauuguugcaaugaaguau

SEQ ID NO: 464707 - RNA, 22 nt, Human
gaagcucucaaacucuccccuu

SEQ ID NO: 464708 - RNA, 22 nt, Human
gcuguacauucugcacaggccc

SEQ ID NO: 464709 - RNA, 22 nt, Human
ugcuaaauaaguggaauagaca

SEQ ID NO: 464710 - RNA, 22 nt, Human
gcaggcagagucaauuugaucc

SEQ ID NO: 464711 - RNA, 22 nt, Human
cagcagggcccccgggugcgcc

SEQ ID NO: 464712 - RNA, 22 nt, Human
gggcaggagagaacagucaugg

SEQ ID NO: 464713 - RNA, 22 nt, Human
uaucuacaggugucagguaaga

SEQ ID NO: 464714 - RNA, 22 nt, Human
aagucacacuagacaacugagg

SEQ ID NO: 464715 - RNA, 22 nt, Human
gcucuccacugaccacggggca

SEQ ID NO: 464716 - RNA, 22 nt, Human
ucucuggaauuggcugaggcaa

SEQ ID NO: 464717 - RNA, 22 nt, Human
agggcuagaguugagaugggga

SEQ ID NO: 464718 - RNA, 20 nt, Human
cacugaagacuucuugcuca

SEQ ID NO: 464719 - RNA, 22 nt, Human
gaaagccauagcccagcuuuac

SEQ ID NO: 464720 - RNA, 22 nt, Human
ucucugcugagaagggcuggca

SEQ ID NO: 464721 - RNA, 22 nt, Human
cccaggccccagggcuugucag

SEQ ID NO: 464722 - RNA, 22 nt, Human
ucagcagauggguuguguuggc

SEQ ID NO: 464723 - RNA, 22 nt, Human
aagaacaguguccugggacucg

SEQ ID NO: 464724 - RNA, 22 nt, Human
ucaguuuuguauguuguaaguc

SEQ ID NO: 464725 - RNA, 22 nt, Human
aaauuucuugaggcucucuagc

SEQ ID NO: 464726 - RNA, 22 nt, Human
ccagcuucucucugaugcagcu

SEQ ID NO: 464727 - RNA, 22 nt, Human
ccuuuuucaauauagaauugca

SEQ ID NO: 464728 - RNA, 21 nt, Human
agguggggcugcaccucugcu

SEQ ID NO: 464729 - RNA, 22 nt, Human
ugaugguuuuauuaauaggacc

SEQ ID NO: 464730 - RNA, 19 nt, Human
uguguaaagucugugguca

SEQ ID NO: 464731 - RNA, 22 nt, Human
ugaaggaauggaggaucagagc

SEQ ID NO: 464732 - RNA, 22 nt, Human
ggcuuuauuugcagccauuguu

SEQ ID NO: 464733 - RNA, 22 nt, Human
auguaguguagagauuagucuc

SEQ ID NO: 464734 - RNA, 22 nt, Human
guaucuuuuacaccaggaaauu

SEQ ID NO: 464735 - RNA, 22 nt, Human
gugugcagggcugccugugccg

SEQ ID NO: 464736 - RNA, 22 nt, Human
uaguaucuauuaguaacaagag

SEQ ID NO: 464737 - RNA, 22 nt, Human
uggaggaugccuggggaggccu

SEQ ID NO: 464738 - RNA, 22 nt, Human
uggcagagcaaaaagauagaau

SEQ ID NO: 464739 - RNA, 17 nt, Human
aggagucucagaugagc

SEQ ID NO: 464740 - RNA, 22 nt, Human
cucagaguccccaguggguuug

SEQ ID NO: 464741 - RNA, 22 nt, Human
guacauuucauuuaaaugaugu

SEQ ID NO: 464742 - RNA, 22 nt, Human
uuagggaaggcugcugucagcu

SEQ ID NO: 464743 - RNA, 17 nt, Human
uuagcaaaauagcacuu

SEQ ID NO: 464744 - RNA, 22 nt, Human
uggcccugcuguaucaucugcu

SEQ ID NO: 464745 - RNA, 22 nt, Human
uccaaagggaagcgcuuucugu

SEQ ID NO: 464746 - RNA, 22 nt, Human
ugcuucugggcaaaugugugug

SEQ ID NO: 464747 - RNA, 17 nt, Human
cagcuuuaugcuacugu

SEQ ID NO: 464748 - RNA, 22 nt, Human
aggagucauugagagggguccu

SEQ ID NO: 464749 - RNA, 22 nt, Human
aacucuauuuacccuacuaaac

SEQ ID NO: 464750 - RNA, 22 nt, Human
uauugaugcuuggauugggcca

SEQ ID NO: 464751 - RNA, 22 nt, Human
ugaggccaaugacccugggcag

SEQ ID NO: 464752 - RNA, 22 nt, Human
ccagggcaugggaagaacugaa

SEQ ID NO: 464753 - RNA, 22 nt, Human
auggggagagaagggcugagcu

SEQ ID NO: 464754 - RNA, 22 nt, Human
cugcugcucgaccagucccagg

SEQ ID NO: 464755 - RNA, 22 nt, Human
cacagggcuaaaugaaggguug

SEQ ID NO: 464756 - RNA, 21 nt, Human
uuagaaagcucacuacaguua

SEQ ID NO: 464757 - RNA, 22 nt, Human
cccaugccuucugacucacagg

SEQ ID NO: 464758 - RNA, 23 nt, Human
ugcugggcagagcuggugcugag

SEQ ID NO: 464759 - RNA, 22 nt, Human
ugggugggagcgcccugucugg

SEQ ID NO: 464760 - RNA, 22 nt, Human
caggagaaacauaauuuucugg

SEQ ID NO: 464761 - RNA, 23 nt, Human
acagcugcaccuggccgccuggc

SEQ ID NO: 464762 - RNA, 22 nt, Human
ggaggacaggggcugcagcaca

SEQ ID NO: 464763 - RNA, 22 nt, Human
cagugagggaagaucucagcac

SEQ ID NO: 464764 - RNA, 22 nt, Human
aguggcagagcugugucuugaa

SEQ ID NO: 464765 - RNA, 22 nt, Human
guuauuuucauuggcucagacu

SEQ ID NO: 464766 - RNA, 22 nt, Human
cagcccuggccccagguggucu

SEQ ID NO: 464767 - RNA, 19 nt, Human
aucugaaguaggugcagcu

SEQ ID NO: 464768 - RNA, 22 nt, Human
caugggagcuaucuccaucacu

SEQ ID NO: 464769 - RNA, 22 nt, Human
cagugcauaaucuaaauggggg

SEQ ID NO: 464770 - RNA, 22 nt, Human
uccucaggagagcuccuaugcc

SEQ ID NO: 464771 - RNA, 22 nt, Human
uggcucuggugcgggcuccugc

SEQ ID NO: 464772 - RNA, 23 nt, Human
caguggagacucaugcuuccuua

SEQ ID NO: 464773 - RNA, 22 nt, Human
ucuugcacuucaugaauauguu

SEQ ID NO: 464774 - RNA, 22 nt, Human
uuggcauuuauucuaaggucaa

SEQ ID NO: 464775 - RNA, 22 nt, Human
cuggaugcuuccucucugcuag

SEQ ID NO: 464776 - RNA, 22 nt, Human
aggcucagaggugagcaucugc

SEQ ID NO: 464777 - RNA, 22 nt, Human
gaaggagcuaaagggagcccug

SEQ ID NO: 464778 - RNA, 22 nt, Human
ugcauacacaagcauacaugua

SEQ ID NO: 464779 - RNA, 18 nt, Human
cggcagagugcuucuagc

SEQ ID NO: 464780 - RNA, 22 nt, Human
ucagcuuuggucacauugaguu

SEQ ID NO: 464781 - RNA, 22 nt, Human
agggcuccugaggcccuucugg

SEQ ID NO: 464782 - RNA, 16 nt, Human
cuuccucuucacuggc

SEQ ID NO: 464783 - RNA, 22 nt, Human
acccagggaccccgcugacgcc

SEQ ID NO: 464784 - RNA, 21 nt, Human
ccaggguccagcugccauggu

SEQ ID NO: 464785 - RNA, 22 nt, Human
ucugucaccauucagcuugaau

SEQ ID NO: 464786 - RNA, 18 nt, Human
ccucagggagagagacgc

SEQ ID NO: 464787 - RNA, 22 nt, Human
cugggccuagcaacagaggagu

SEQ ID NO: 464788 - RNA, 22 nt, Human
aggccugaggaccagauaaaug

SEQ ID NO: 464789 - RNA, 22 nt, Human
cuagggaccucagcuccuggag

SEQ ID NO: 464790 - RNA, 22 nt, Human
uggagcagagaugguggccuuc

SEQ ID NO: 464791 - RNA, 22 nt, Human
cagcagcuggugagacacagcc

SEQ ID NO: 464792 - RNA, 22 nt, Human
cugagccagcgggcucacuuuu

SEQ ID NO: 464793 - RNA, 22 nt, Human
gucaggaucaaauugaaguuau

SEQ ID NO: 464794 - RNA, 22 nt, Human
ggcccagcugugcuuccagccc

SEQ ID NO: 464795 - RNA, 22 nt, Human
ggcacagagcccagcuuccuag

SEQ ID NO: 464796 - RNA, 22 nt, Human
cuguauuuguccucuauuuauu

SEQ ID NO: 464797 - RNA, 20 nt, Human
cccagccccuaccuguugcc

SEQ ID NO: 464798 - RNA, 22 nt, Human
uggccugauuuugcuaagagaa

SEQ ID NO: 464799 - RNA, 22 nt, Human
aaaaagauguccugaaguuuag

SEQ ID NO: 464800 - RNA, 22 nt, Human
agcaguggagcgagauguuuaa

SEQ ID NO: 464801 - RNA, 17 nt, Human
uauacacagacagacug

SEQ ID NO: 464802 - RNA, 22 nt, Human
aucaaaguucguaacugauaac

SEQ ID NO: 464803 - RNA, 22 nt, Human
gaggccuggcugggaggaggug

SEQ ID NO: 464804 - RNA, 22 nt, Human
gguuugcaugugauguugggca

SEQ ID NO: 464805 - RNA, 22 nt, Human
cuuaggaacgcucugccuagug

SEQ ID NO: 464806 - RNA, 22 nt, Human
ggcauccaguucugaucaacaa

SEQ ID NO: 464807 - RNA, 22 nt, Human
gagagugaugaaugguuaaaca

SEQ ID NO: 464808 - RNA, 22 nt, Human
gugccugcugcagagucgcugu

SEQ ID NO: 464809 - RNA, 22 nt, Human
cagugccucuuaagugucaccc

SEQ ID NO: 464810 - RNA, 19 nt, Human
aucuuacagagcagaguac

SEQ ID NO: 464811 - RNA, 18 nt, Human
gucauugcaacauacugu

SEQ ID NO: 464812 - RNA, 22 nt, Human
ucuuaagcagagaagaaguuga

SEQ ID NO: 464813 - RNA, 22 nt, Human
gcugaaggaggcucugguacua

SEQ ID NO: 464814 - RNA, 22 nt, Human
ggcaggcagaggcugagacagg

SEQ ID NO: 464815 - RNA, 19 nt, Human
caggagagcaugcacuuug

SEQ ID NO: 464816 - RNA, 22 nt, Human
gggcagugacaaaggggaugaa

SEQ ID NO: 464817 - RNA, 22 nt, Human
aggagcugggcugcugcuggga

SEQ ID NO: 464818 - RNA, 23 nt, Human
agccuucaggcaaugucaguaga

SEQ ID NO: 464819 - RNA, 22 nt, Human
augauacaagcaaaacuaauca

SEQ ID NO: 464820 - RNA, 22 nt, Human
gggcagugucggggcccaggga

SEQ ID NO: 464821 - RNA, 20 nt, Human
ccagaagagaugaucaucca

SEQ ID NO: 464822 - RNA, 22 nt, Human
ccugugugucugucacugcaca

SEQ ID NO: 464823 - RNA, 22 nt, Human
aucuucaaagcacaucguuugu

SEQ ID NO: 464824 - RNA, 20 nt, Human
cugcccagccacugagggau

SEQ ID NO: 464825 - RNA, 20 nt, Human
uugauaggcagcuugucagg

SEQ ID NO: 464826 - RNA, 22 nt, Human
gagagaagggggauaugagccu

SEQ ID NO: 464827 - RNA, 22 nt, Human
agggcuccaggggcugggugac

SEQ ID NO: 464828 - RNA, 22 nt, Human
uuccagcuaacucacaucccuu

SEQ ID NO: 464829 - RNA, 22 nt, Human
uccugcaggccagaggggugag

SEQ ID NO: 464830 - RNA, 22 nt, Human
cuuauuagugucugucugaguu

SEQ ID NO: 464831 - RNA, 22 nt, Human
agucagcagugaaagcacagcc

SEQ ID NO: 464832 - RNA, 22 nt, Human
cagagccuaaaacgacuccacu

SEQ ID NO: 464833 - RNA, 22 nt, Human
caggguggcccuguggucucau

SEQ ID NO: 464834 - RNA, 22 nt, Human
caggggaagaugccaagggaga

SEQ ID NO: 464835 - RNA, 18 nt, Human
uaaaugcauguuaauaac

SEQ ID NO: 464836 - RNA, 22 nt, Human
cugccucucagccugaccgcca

SEQ ID NO: 464837 - RNA, 22 nt, Human
cucagggggaaucaggucacag

SEQ ID NO: 464838 - RNA, 22 nt, Human
uaaagcaggccacauaugugau

SEQ ID NO: 464839 - RNA, 22 nt, Human
uugcaaaagccgaggcacucca

SEQ ID NO: 464840 - RNA, 22 nt, Human
cacugaagccacuggaagagga

SEQ ID NO: 464841 - RNA, 22 nt, Human
ggccagaggccacagcuguguc

SEQ ID NO: 464842 - RNA, 22 nt, Human
gggagcugguuccugcccucca

SEQ ID NO: 464843 - RNA, 23 nt, Human
cagguggcuccacgagggguggg

SEQ ID NO: 464844 - RNA, 22 nt, Human
gugaaggcuacaagagaucaag

SEQ ID NO: 464845 - RNA, 22 nt, Human
cccagggagguagcaggagaaa

SEQ ID NO: 464846 - RNA, 22 nt, Human
ugucucugagaugacucccacc

SEQ ID NO: 464847 - RNA, 22 nt, Human
ggcaccaggcugggcauaggcc

SEQ ID NO: 464848 - RNA, 22 nt, Human
gcugccugccuaguuccacagu

SEQ ID NO: 464849 - RNA, 22 nt, Human
aaaugccucugcuguacacaau

SEQ ID NO: 464850 - RNA, 22 nt, Human
gagcagugaagacagaaguaca

SEQ ID NO: 464851 - RNA, 22 nt, Human
aagcugcccuguguuagaguuc

SEQ ID NO: 464852 - RNA, 22 nt, Human
uguauauucugccuaaaagcuu

SEQ ID NO: 464853 - RNA, 22 nt, Human
ucaggaucggccuuuuuuuaag

SEQ ID NO: 464854 - RNA, 21 nt, Human
uucuucaugaugauuaauggc

SEQ ID NO: 464855 - RNA, 22 nt, Human
uaaauguguaaaccuccauuac

SEQ ID NO: 464856 - RNA, 22 nt, Human
gggaccugaggcccugcuccac

SEQ ID NO: 464857 - RNA, 19 nt, Human
ucugaggguccagaugcau

SEQ ID NO: 464858 - RNA, 22 nt, Human
ccagggcagcagaauuggggca

SEQ ID NO: 464859 - RNA, 22 nt, Human
uaacagaaauaguaggugaggg

SEQ ID NO: 464860 - RNA, 22 nt, Human
ugggccacgugacccuuacccu

SEQ ID NO: 464861 - RNA, 22 nt, Human
cuuccucaugugcaaugcaagc

SEQ ID NO: 464862 - RNA, 22 nt, Human
auugaaaaaugacuauugcuua

SEQ ID NO: 464863 - RNA, 22 nt, Human
cuuuauguucaguacaaugcuu

SEQ ID NO: 464864 - RNA, 22 nt, Human
guggcaggucccauuggagcag

SEQ ID NO: 464865 - RNA, 18 nt, Human
uucacaggaaaugucuuu

SEQ ID NO: 464866 - RNA, 22 nt, Human
cacuucaauuaacuucagcauu

SEQ ID NO: 464867 - RNA, 22 nt, Human
aauuauauguuaaucuucaauu

SEQ ID NO: 464868 - RNA, 22 nt, Human
ggagccuguggccgucacgacu

SEQ ID NO: 464869 - RNA, 22 nt, Human
acugcagccuuugggcucauaa

SEQ ID NO: 464870 - RNA, 22 nt, Human
ugccuugguucucuacuuggag

SEQ ID NO: 464871 - RNA, 22 nt, Human
uucuggaguauuccuggcaccu

SEQ ID NO: 464872 - RNA, 22 nt, Human
cagccugcauuuguaucuguau

SEQ ID NO: 464873 - RNA, 22 nt, Human
gcaggagccacuucagggaugc

SEQ ID NO: 464874 - RNA, 19 nt, Human
ugggcagcucccucugucc

SEQ ID NO: 464875 - RNA, 22 nt, Human
uuugcauuaucucacuuauaua

SEQ ID NO: 464876 - RNA, 22 nt, Human
ugaggccacuuccccacagccc

SEQ ID NO: 464877 - RNA, 22 nt, Human
ggcaggcaagucugcucuguga

SEQ ID NO: 464878 - RNA, 21 nt, Human
uagcuuuaauauucccacauu

SEQ ID NO: 464879 - RNA, 22 nt, Human
acagaacuuccugcuggagugg

SEQ ID NO: 464880 - RNA, 22 nt, Human
aaauagcacagcagcugaggcu

SEQ ID NO: 464881 - RNA, 22 nt, Human
agcuugccucuuaaucaccuca

SEQ ID NO: 464882 - RNA, 22 nt, Human
acagauuuguucuuuugggcua

SEQ ID NO: 464883 - RNA, 22 nt, Human
ucacaguaucacacaaggauua

SEQ ID NO: 464884 - RNA, 22 nt, Human
cagagccauccaggugccuguu

SEQ ID NO: 464885 - RNA, 20 nt, Human
gagccugggaagucuaaggu

SEQ ID NO: 464886 - RNA, 22 nt, Human
ccugcuggccaguggagggcug

SEQ ID NO: 464887 - RNA, 22 nt, Human
caggcugucugaauggaggccc

SEQ ID NO: 464888 - RNA, 19 nt, Human
ccagagacauuggcaucuu

SEQ ID NO: 464889 - RNA, 19 nt, Human
uggcugggugccaauggcc

SEQ ID NO: 464890 - RNA, 20 nt, Human
gcacugaaauucaauguuug

SEQ ID NO: 464891 - RNA, 22 nt, Human
cauugcacagcccuguggugau

SEQ ID NO: 464892 - RNA, 22 nt, Human
aggagccaagcagaacuaagga

SEQ ID NO: 464893 - RNA, 20 nt, Human
gccuguccugagugucaugg

SEQ ID NO: 464894 - RNA, 23 nt, Human
ccucccaccuauuucacuuucuu

SEQ ID NO: 464895 - RNA, 22 nt, Human
ugucucaucucuuaaccccacu

SEQ ID NO: 464896 - RNA, 22 nt, Human
aagcuuuaaggaauuuuaugga

SEQ ID NO: 464897 - RNA, 22 nt, Human
ucauaacagcuaagucccuuuc

SEQ ID NO: 464898 - RNA, 22 nt, Human
aguggcaguagaugagcugguu

SEQ ID NO: 464899 - RNA, 22 nt, Human
ccagccagcugcccuuggggcc

SEQ ID NO: 464900 - RNA, 22 nt, Human
aaguucaagucugcaucuuuuu

SEQ ID NO: 464901 - RNA, 22 nt, Human
uaggggaacuggcacagggcag

SEQ ID NO: 464902 - RNA, 22 nt, Human
cagaggccucacuuccagccag

SEQ ID NO: 464903 - RNA, 22 nt, Human
ucucuccuuaucauuguguuua

SEQ ID NO: 464904 - RNA, 22 nt, Human
cagaggguugaugugaggcuua

SEQ ID NO: 464905 - RNA, 20 nt, Human
cuuggccuacuuagcuuugu

SEQ ID NO: 464906 - RNA, 22 nt, Human
gaggccugaaaggggaccuaug

SEQ ID NO: 464907 - RNA, 22 nt, Human
ccaaaguccauaguuuacauaa

SEQ ID NO: 464908 - RNA, 22 nt, Human
uuauuuaggagaaggaacccug

SEQ ID NO: 464909 - RNA, 22 nt, Human
acuaaauaguuuugacagaaca

SEQ ID NO: 464910 - RNA, 19 nt, Human
augauacaggugaaaauug

SEQ ID NO: 464911 - RNA, 22 nt, Human
cuuucucuguguuucacaugcu

SEQ ID NO: 464912 - RNA, 22 nt, Human
ugggcaggagagaagcuaaaga

SEQ ID NO: 464913 - RNA, 22 nt, Human
ucaggaugaccacgagccucua

SEQ ID NO: 464914 - RNA, 22 nt, Human
ggcuuccuaauacucccuacac

SEQ ID NO: 464915 - RNA, 22 nt, Human
ucacaccuguaaucccaggccu

SEQ ID NO: 464916 - RNA, 22 nt, Human
auggcagccuguggacagucaa

SEQ ID NO: 464917 - RNA, 22 nt, Human
aaugaugguauugaugagcuaa

SEQ ID NO: 464918 - RNA, 22 nt, Human
uccucacaagcaagcacaggua

SEQ ID NO: 464919 - RNA, 22 nt, Human
cagcuauuuucucauuaaggau

SEQ ID NO: 464920 - RNA, 22 nt, Human
agcuggugcucaggggcaugga

SEQ ID NO: 464921 - RNA, 22 nt, Human
uagggcugccuauggcuagaua

SEQ ID NO: 464922 - RNA, 22 nt, Human
cuuggcagcuuuuggaggagcc

SEQ ID NO: 464923 - RNA, 22 nt, Human
cagaacauucacucauaugugg

SEQ ID NO: 464924 - RNA, 22 nt, Human
ggcaugggagugagcaaccuua

SEQ ID NO: 464925 - RNA, 22 nt, Human
gaaaugcauggaucuuggcaga

SEQ ID NO: 464926 - RNA, 22 nt, Human
ccagccuccauguagauagcug

SEQ ID NO: 464927 - RNA, 22 nt, Human
uaggccaggacagagcuuccag

SEQ ID NO: 464928 - RNA, 22 nt, Human
cugccuggaaugccagcuucuc

SEQ ID NO: 464929 - RNA, 22 nt, Human
ggggcugguggugguuucucca

SEQ ID NO: 464930 - RNA, 22 nt, Human
gcugaguugaaagcagaggaua

SEQ ID NO: 464931 - RNA, 22 nt, Human
uuuugagauggagucuugcucu

SEQ ID NO: 464932 - RNA, 22 nt, Human
caggguggggcuggcuaucaaa

SEQ ID NO: 464933 - RNA, 22 nt, Human
gcagacagcauguugggcuauu

SEQ ID NO: 464934 - RNA, 22 nt, Human
gccugucucuuggaacuuggua

SEQ ID NO: 464935 - RNA, 23 nt, Human
agggccacugggaaggauuacug

SEQ ID NO: 464936 - RNA, 22 nt, Human
acugaaggcuuaacucuuucau

SEQ ID NO: 464937 - RNA, 22 nt, Human
gucagaggaauggaugagugau

SEQ ID NO: 464938 - RNA, 21 nt, Human
cucuugugucagagccagagg

SEQ ID NO: 464939 - RNA, 22 nt, Human
aggcaggagcaagcccuacaag

SEQ ID NO: 464940 - RNA, 22 nt, Human
uuuucauuguuacuaugagcua

SEQ ID NO: 464941 - RNA, 22 nt, Human
cuucugcaauaaguuuuggucc

SEQ ID NO: 464942 - RNA, 22 nt, Human
augaauacgcggucauacacau

SEQ ID NO: 464943 - RNA, 19 nt, Human
ccagagcccgccagauggg

SEQ ID NO: 464944 - RNA, 17 nt, Human
gcugagugcagggaguc

SEQ ID NO: 464945 - RNA, 22 nt, Human
ugcuggcuggccuggccuggac

SEQ ID NO: 464946 - RNA, 22 nt, Human
acaaaugcuuaguucaccaaaa

SEQ ID NO: 464947 - RNA, 22 nt, Human
acauuucucuugaugucucuau

SEQ ID NO: 464948 - RNA, 23 nt, Human
gcugcagcuguggauguucucag

SEQ ID NO: 464949 - RNA, 22 nt, Human
cuccucuuuggggauuuacaca

SEQ ID NO: 464950 - RNA, 22 nt, Human
caaaguccuagaacagugcuug

SEQ ID NO: 464951 - RNA, 22 nt, Human
agaggcuccuagccacuggcuu

SEQ ID NO: 464952 - RNA, 22 nt, Human
acagccagguaaaggcauggca

SEQ ID NO: 464953 - RNA, 22 nt, Human
aacaguaaugugguguuggguu

SEQ ID NO: 464954 - RNA, 22 nt, Human
ugcugugcuggcggcagaggcc

SEQ ID NO: 464955 - RNA, 22 nt, Human
cuucagaacuauaaaaaguacu

SEQ ID NO: 464956 - RNA, 19 nt, Human
aggcucugagcuccuggag

SEQ ID NO: 464957 - RNA, 22 nt, Human
gcagcuuggugaaaggugaugg

SEQ ID NO: 464958 - RNA, 22 nt, Human
agcauuuaggagaauuugagaa

SEQ ID NO: 464959 - RNA, 22 nt, Human
aggcaggcuagucgcuugagcc

SEQ ID NO: 464960 - RNA, 22 nt, Human
ugucaccagcugcuccucagga

SEQ ID NO: 464961 - RNA, 22 nt, Human
gcuggccauggccugcgccauc

SEQ ID NO: 464962 - RNA, 22 nt, Human
cacccagggcugugccugccca

SEQ ID NO: 464963 - RNA, 22 nt, Human
ucagaaauacuaucagcuuuug

SEQ ID NO: 464964 - RNA, 22 nt, Human
gcagcuuuaaaggaggcucuga

SEQ ID NO: 464965 - RNA, 22 nt, Human
guggaggacaaaagaagccuuu

SEQ ID NO: 464966 - RNA, 21 nt, Human
ccugccaggaaacugaguguc

SEQ ID NO: 464967 - RNA, 22 nt, Human
acagagagaggcccgaggcugc

SEQ ID NO: 464968 - RNA, 22 nt, Human
caggcagcaucagucugcugua

SEQ ID NO: 464969 - RNA, 22 nt, Human
ccucuggcuguaccacuggcac

SEQ ID NO: 464970 - RNA, 20 nt, Human
cuggcaggagcgagucuacc

SEQ ID NO: 464971 - RNA, 20 nt, Human
uggagcugugguaaggagca

SEQ ID NO: 464972 - RNA, 22 nt, Human
ugcuuuauuaagagagaaauuu

SEQ ID NO: 464973 - RNA, 22 nt, Human
cuggcucccucgcugaggugcu

SEQ ID NO: 464974 - RNA, 22 nt, Human
ggagccugagcggcccagggcc

SEQ ID NO: 464975 - RNA, 22 nt, Human
uacaucuuugucuaugaccagc

SEQ ID NO: 464976 - RNA, 22 nt, Human
ugcugggcuugaaagcugcuaa

SEQ ID NO: 464977 - RNA, 22 nt, Human
gagccugagugcugccuccccu

SEQ ID NO: 464978 - RNA, 22 nt, Human
ggcaucuguccaucucuccagc

SEQ ID NO: 464979 - RNA, 22 nt, Human
agaaauaugcugauuagaugaa

SEQ ID NO: 464980 - RNA, 22 nt, Human
uccugcagccacugcaggcaga

SEQ ID NO: 464981 - RNA, 22 nt, Human
cgacccuacagacagugcugag

SEQ ID NO: 464982 - RNA, 22 nt, Human
ucagagucauugcaaguagaag

SEQ ID NO: 464983 - RNA, 22 nt, Human
cuauugcauuugcaucuucauc

SEQ ID NO: 464984 - RNA, 22 nt, Human
ucaccaggcaacuauguacucc

SEQ ID NO: 464985 - RNA, 22 nt, Human
uggcauuucaccuuucauuucc

SEQ ID NO: 464986 - RNA, 22 nt, Human
uuuccucuucuucccaugucau

SEQ ID NO: 464987 - RNA, 22 nt, Human
acagccagaggugguccugggu

SEQ ID NO: 464988 - RNA, 22 nt, Human
caggggacaguaugguggauga

SEQ ID NO: 464989 - RNA, 22 nt, Human
cucucugggcccaguuggcacc

SEQ ID NO: 464990 - RNA, 22 nt, Human
ggccugcuccgggggcugagcu

SEQ ID NO: 464991 - RNA, 22 nt, Human
ugcaggaguccaaucaggagac

SEQ ID NO: 464992 - RNA, 22 nt, Human
auaauaacaccugaauaggaaa

SEQ ID NO: 464993 - RNA, 22 nt, Human
cugccugcaugcugccauagcu

SEQ ID NO: 464994 - RNA, 22 nt, Human
gucaggauguuuauucuccagu

SEQ ID NO: 464995 - RNA, 22 nt, Human
ucaucacuguaucauugauaga

SEQ ID NO: 464996 - RNA, 22 nt, Human
uccucaugccgggucucacgcu

SEQ ID NO: 464997 - RNA, 22 nt, Human
ggaagccacccagcuuugauag

SEQ ID NO: 464998 - RNA, 22 nt, Human
aaauguguuuagaugguuuauu

SEQ ID NO: 464999 - RNA, 20 nt, Human
auucuacaagaauaagcaug

SEQ ID NO: 465000 - RNA, 22 nt, Human
cuggcagcugcccgagaugccc

SEQ ID NO: 465001 - RNA, 22 nt, Human
gcauuauuaauagcugcaugag

SEQ ID NO: 465002 - RNA, 22 nt, Human
gugcucacugugagacguccug

SEQ ID NO: 465003 - RNA, 21 nt, Human
ccaccaggucuucugcucggg

SEQ ID NO: 465004 - RNA, 20 nt, Human
uacagaaacaggacuuuugg

SEQ ID NO: 465005 - RNA, 22 nt, Human
uccaggcaaaaaccaacuacag

SEQ ID NO: 465006 - RNA, 22 nt, Human
gcagggcuaauggggcaaguag

SEQ ID NO: 465007 - RNA, 22 nt, Human
uggcuggcccugggagugcaga

SEQ ID NO: 465008 - RNA, 22 nt, Human
ucucagagauucagggagaagu

SEQ ID NO: 465009 - RNA, 22 nt, Human
ggcagcaggagccaucugguag

SEQ ID NO: 465010 - RNA, 22 nt, Human
agccuggagaagauguguauug

SEQ ID NO: 465011 - RNA, 22 nt, Human
uucauuccugagcccauauuua

SEQ ID NO: 465012 - RNA, 22 nt, Human
aggccucagugaucaucaucag

SEQ ID NO: 465013 - RNA, 22 nt, Human
agaauguagucuuggagauuua

SEQ ID NO: 465014 - RNA, 22 nt, Human
ucaguuuucucaucuguaauuu

SEQ ID NO: 465015 - RNA, 22 nt, Human
agcagccauagauagcaugcaa

SEQ ID NO: 465016 - RNA, 21 nt, Human
agagaagaggacuuucucaca

SEQ ID NO: 465017 - RNA, 20 nt, Human
gaaauucucguauuaguuua

SEQ ID NO: 465018 - RNA, 19 nt, Human
uggcagggagugauauuag

SEQ ID NO: 465019 - RNA, 20 nt, Human
agagugagacuccaucucag

SEQ ID NO: 465020 - RNA, 22 nt, Human
aacaugaaguuuucuauaguga

SEQ ID NO: 465021 - RNA, 22 nt, Human
auguaguauuuggaaauguaaa

SEQ ID NO: 465022 - RNA, 22 nt, Human
cuugugcaauugacauugaauc

SEQ ID NO: 465023 - RNA, 22 nt, Human
cccccagccagcagugcucagc

SEQ ID NO: 465024 - RNA, 22 nt, Human
ucagggcagaauccaaagaauu

SEQ ID NO: 465025 - RNA, 22 nt, Human
ggccuuggugcucuguguugca

SEQ ID NO: 465026 - RNA, 22 nt, Human
gugauuucuaaucaucugaaug

SEQ ID NO: 465027 - RNA, 22 nt, Human
cucaaguaagaaacagaauugg

SEQ ID NO: 465028 - RNA, 22 nt, Human
ucugggagggagccucagaauc

SEQ ID NO: 465029 - RNA, 22 nt, Human
cacaggugcuccucggggagcu

SEQ ID NO: 465030 - RNA, 22 nt, Human
uaaauguguuagucaugguuuu

SEQ ID NO: 465031 - RNA, 22 nt, Human
cugggagcccgcguccuggugg

SEQ ID NO: 465032 - RNA, 22 nt, Human
guuauguaaucuaacacucagu

SEQ ID NO: 465033 - RNA, 19 nt, Human
ugagcaugcgagcugagaa

SEQ ID NO: 465034 - RNA, 22 nt, Human
ugaaugaguuuggcugcuguuc

SEQ ID NO: 465035 - RNA, 22 nt, Human
gaagagcuguagccugcucuuu

SEQ ID NO: 465036 - RNA, 21 nt, Human
ugccagggauuuacagagccu

SEQ ID NO: 465037 - RNA, 22 nt, Human
gccuggcacucacugaagaggc

SEQ ID NO: 465038 - RNA, 22 nt, Human
aaagccacguggccuggggagc

SEQ ID NO: 465039 - RNA, 19 nt, Human
cuguccuuggcugcacugu

SEQ ID NO: 465040 - RNA, 22 nt, Human
aguuggagugaacaugagauug

SEQ ID NO: 465041 - RNA, 22 nt, Human
aagaacuuccuaauauauuuuc

SEQ ID NO: 465042 - RNA, 22 nt, Human
gccccugggagcagagccacca

SEQ ID NO: 465043 - RNA, 22 nt, Human
cucuggaggccuaaggaagugg

SEQ ID NO: 465044 - RNA, 22 nt, Human
uggaggaaaauuacuggggucu

SEQ ID NO: 465045 - RNA, 23 nt, Human
gccaggcuccggucuguggccac

SEQ ID NO: 465046 - RNA, 22 nt, Human
gggccaggucggugaaugguca

SEQ ID NO: 465047 - RNA, 22 nt, Human
uucaggaucacuaaacccucca

SEQ ID NO: 465048 - RNA, 22 nt, Human
uggcugcagacaccuauggcag

SEQ ID NO: 465049 - RNA, 23 nt, Human
aggcacugaaugugucagugagu

SEQ ID NO: 465050 - RNA, 22 nt, Human
acauuucucuuagaguuggacu

SEQ ID NO: 465051 - RNA, 22 nt, Human
cagagccugcucacgucucugu

SEQ ID NO: 465052 - RNA, 22 nt, Human
uggccuggcugcccugucugga

SEQ ID NO: 465053 - RNA, 19 nt, Human
ucacaggcaucuccccaga

SEQ ID NO: 465054 - RNA, 22 nt, Human
gagaaagggaacuuacagagug

SEQ ID NO: 465055 - RNA, 22 nt, Human
ggcugccuucccugagccccgg

SEQ ID NO: 465056 - RNA, 22 nt, Human
ccagccagucccgcaugaccgc

SEQ ID NO: 465057 - RNA, 19 nt, Human
cugcugggugcugagggag

SEQ ID NO: 465058 - RNA, 22 nt, Human
ugucuccucauacugucauauu

SEQ ID NO: 465059 - RNA, 22 nt, Human
uuuuggucagguuggucucgaa

SEQ ID NO: 465060 - RNA, 22 nt, Human
cucaggauuaaggaaucuaaau

SEQ ID NO: 465061 - RNA, 21 nt, Human
aaguaaaucagagaaauaacc

SEQ ID NO: 465062 - RNA, 22 nt, Human
ggaggggcagccauggaacucc

SEQ ID NO: 465063 - RNA, 22 nt, Human
ucaucuuuccucaaaagaucca

SEQ ID NO: 465064 - RNA, 22 nt, Human
ucucugucugagccuggcagac

SEQ ID NO: 465065 - RNA, 22 nt, Human
ggucccugcugaagccuuggug

SEQ ID NO: 465066 - RNA, 22 nt, Human
auuuuccaaaauaauuguuacu

SEQ ID NO: 465067 - RNA, 16 nt, Human
ccaccugcagcucuca

SEQ ID NO: 465068 - RNA, 22 nt, Human
aggcagccugguuugaauggaa

SEQ ID NO: 465069 - RNA, 22 nt, Human
gaaggucaccuccccucucugg

SEQ ID NO: 465070 - RNA, 22 nt, Human
acaaguaccaaaugcucaagua

SEQ ID NO: 465071 - RNA, 22 nt, Human
ccagcccuugagauggaaggga

SEQ ID NO: 465072 - RNA, 22 nt, Human
ccuccaggcugaauaucuagaa

SEQ ID NO: 465073 - RNA, 22 nt, Human
ucccggcgcugggagguggguc

SEQ ID NO: 465074 - RNA, 22 nt, Human
agaggcucugccgccucaggua

SEQ ID NO: 465075 - RNA, 22 nt, Human
cucccaggcacagggaggagcc

SEQ ID NO: 465076 - RNA, 20 nt, Human
aagaaacuugaaaguacaag

SEQ ID NO: 465077 - RNA, 22 nt, Human
ggucucagaucuuuauuaaggc

SEQ ID NO: 465078 - RNA, 22 nt, Human
agcugcagugaacuguuuuguc

SEQ ID NO: 465079 - RNA, 22 nt, Human
ucugggcccuaaaccagcucua

SEQ ID NO: 465080 - RNA, 22 nt, Human
ucugagccguauggcuuggcua

SEQ ID NO: 465081 - RNA, 22 nt, Human
cuguccugcaguugggggcagg

SEQ ID NO: 465082 - RNA, 22 nt, Human
ucaaaggcugcuugucuucugg

SEQ ID NO: 465083 - RNA, 22 nt, Human
uuugaaaggugucgagaugugu

SEQ ID NO: 465084 - RNA, 22 nt, Human
ucagaacauuuaaaaagugguu

SEQ ID NO: 465085 - RNA, 22 nt, Human
agagcugggugaagugccauca

SEQ ID NO: 465086 - RNA, 22 nt, Human
acagccugcagccccaggucgc

SEQ ID NO: 465087 - RNA, 22 nt, Human
uccugcaggccuguucccagua

SEQ ID NO: 465088 - RNA, 22 nt, Human
caggagcucuuaaggaugugau

SEQ ID NO: 465089 - RNA, 22 nt, Human
gaggcugcaggcaaugcugccc

SEQ ID NO: 465090 - RNA, 22 nt, Human
ggagcagagcauuucacagccu

SEQ ID NO: 465091 - RNA, 22 nt, Human
ugccaggcauguaguagacuug

SEQ ID NO: 465092 - RNA, 22 nt, Human
ucucaguguuuaaaaagauuuc

SEQ ID NO: 465093 - RNA, 22 nt, Human
ggaggccaaggugggcggauca

SEQ ID NO: 465094 - RNA, 21 nt, Human
uaaagaagaugaaugugauca

SEQ ID NO: 465095 - RNA, 22 nt, Human
cugcugugcuuguggccacccg

SEQ ID NO: 465096 - RNA, 22 nt, Human
uaaauuaugucacaugacucug

SEQ ID NO: 465097 - RNA, 22 nt, Human
uuuccucuuugugacacagcug

SEQ ID NO: 465098 - RNA, 22 nt, Human
augcuauacucaaagaaauuca

SEQ ID NO: 465099 - RNA, 22 nt, Human
gugucccaauguucaggacggc

SEQ ID NO: 465100 - RNA, 22 nt, Human
caaaugcagauucaggaguucu

SEQ ID NO: 465101 - RNA, 22 nt, Human
ggacaggaugcugaagaugaag

SEQ ID NO: 465102 - RNA, 22 nt, Human
uacaaaaaauugauacugacga

SEQ ID NO: 465103 - RNA, 22 nt, Human
gugccuuccccgguggucuguu

SEQ ID NO: 465104 - RNA, 22 nt, Human
guuagguagaaguuuacuuuga

SEQ ID NO: 465105 - RNA, 22 nt, Human
cucuggaauguuuacaugcccu

SEQ ID NO: 465106 - RNA, 22 nt, Human
aggacuccauguguccuggaga

SEQ ID NO: 465107 - RNA, 21 nt, Human
auuuccaaggguaccuaagau

SEQ ID NO: 465108 - RNA, 22 nt, Human
cagucaccaccagguggcagua

SEQ ID NO: 465109 - RNA, 22 nt, Human
cagagcugcacauucuaugaug

SEQ ID NO: 465110 - RNA, 22 nt, Human
ggcuguggcagcuggaaguggu

SEQ ID NO: 465111 - RNA, 22 nt, Human
agggcgacaauggagagcguuu

SEQ ID NO: 465112 - RNA, 22 nt, Human
gcucugggauuaccagccuuag

SEQ ID NO: 465113 - RNA, 22 nt, Human
aggagcagaccguaguccugca

SEQ ID NO: 465114 - RNA, 22 nt, Human
cugagagaaucaugcugcaggu

SEQ ID NO: 465115 - RNA, 23 nt, Human
aggcagugggggccacuuugcuu

SEQ ID NO: 465116 - RNA, 22 nt, Human
auccacagucuuagccaucaaa

SEQ ID NO: 465117 - RNA, 22 nt, Human
caggcagagaggagcauuuaau

SEQ ID NO: 465118 - RNA, 17 nt, Human
gcugccaccuuuggagc

SEQ ID NO: 465119 - RNA, 22 nt, Human
agggacuugaugucagggagau

SEQ ID NO: 465120 - RNA, 22 nt, Human
ggcugaaacagauuucaagaca

SEQ ID NO: 465121 - RNA, 22 nt, Human
gggcgccgugggaaacagccgg

SEQ ID NO: 465122 - RNA, 22 nt, Human
uaacagaauagcagaaacagaa

SEQ ID NO: 465123 - RNA, 22 nt, Human
cacaccuguaauaccagcuacu

SEQ ID NO: 465124 - RNA, 22 nt, Human
aagagcugcacauauuuauauc

SEQ ID NO: 465125 - RNA, 23 nt, Human
ucguugaauagcaauagcacaac

SEQ ID NO: 465126 - RNA, 22 nt, Human
uucacauuagugguucuauaua

SEQ ID NO: 465127 - RNA, 22 nt, Human
ucaggcagguuggcugcagguc

SEQ ID NO: 465128 - RNA, 19 nt, Human
gucagcaccauggacaggg

SEQ ID NO: 465129 - RNA, 23 nt, Human
acagagaucuugacuuguaugga

SEQ ID NO: 465130 - RNA, 22 nt, Human
gggcagguggcaaagccagagg

SEQ ID NO: 465131 - RNA, 22 nt, Human
auagucuuagaucagauaaagu

SEQ ID NO: 465132 - RNA, 22 nt, Human
uccaggcaaagugcugggcugc

SEQ ID NO: 465133 - RNA, 22 nt, Human
ucccccacucuaaaggagccuu

SEQ ID NO: 465134 - RNA, 22 nt, Human
cagggagcuggcuggcugugcc

SEQ ID NO: 465135 - RNA, 20 nt, Human
uagggcucauuaugaucucc

SEQ ID NO: 465136 - RNA, 22 nt, Human
aaaggccacugcaagggaaggu

SEQ ID NO: 465137 - RNA, 22 nt, Human
cugggcagugcagcuauagaac

SEQ ID NO: 465138 - RNA, 22 nt, Human
aaguugaagcaugaaccaaggu

SEQ ID NO: 465139 - RNA, 22 nt, Human
uugggcugaaguagagggcaga

SEQ ID NO: 465140 - RNA, 22 nt, Human
uagacacaagagaaggguauaa

SEQ ID NO: 465141 - RNA, 22 nt, Human
augaagauaagaccaggcugga

SEQ ID NO: 465142 - RNA, 22 nt, Human
gugggaugguagguagguaaua

SEQ ID NO: 465143 - RNA, 22 nt, Human
ccaggguguagggauuccagau

SEQ ID NO: 465144 - RNA, 22 nt, Human
ugccucagucuaaagucucuca

SEQ ID NO: 465145 - RNA, 22 nt, Human
ccuccuagaggaaccccagggc

SEQ ID NO: 465146 - RNA, 22 nt, Human
acuguguggaccacucugaggc

SEQ ID NO: 465147 - RNA, 22 nt, Human
gauuuucaugauaaacuuguga

SEQ ID NO: 465148 - RNA, 22 nt, Human
caaggcaguuccccagagggcu

SEQ ID NO: 465149 - RNA, 22 nt, Human
gagggcucacugagaaagcagu

SEQ ID NO: 465150 - RNA, 22 nt, Human
gccacguugccacccgggugac

SEQ ID NO: 465151 - RNA, 22 nt, Human
acagguggagugguuagcaggc

SEQ ID NO: 465152 - RNA, 19 nt, Human
ucgagucaagacacuaggc

SEQ ID NO: 465153 - RNA, 22 nt, Human
caggcugggaacgccacccgcu

SEQ ID NO: 465154 - RNA, 19 nt, Human
agguggucuaggcuggaga

SEQ ID NO: 465155 - RNA, 22 nt, Human
agaacagaagggaggaaggccu

SEQ ID NO: 465156 - RNA, 22 nt, Human
ccugggcuucugucuagauguu

SEQ ID NO: 465157 - RNA, 22 nt, Human
acuuugcaauacuuaauacaaa

SEQ ID NO: 465158 - RNA, 22 nt, Human
cagcagcuucuguugaucagaa

SEQ ID NO: 465159 - RNA, 22 nt, Human
ugccaggcccugcgggguccca

SEQ ID NO: 465160 - RNA, 22 nt, Human
uggcugccuuucaccucaucuc

SEQ ID NO: 465161 - RNA, 22 nt, Human
ucaagagaagugcuccacagua

SEQ ID NO: 465162 - RNA, 22 nt, Human
cucacagaugcugugggucagg

SEQ ID NO: 465163 - RNA, 22 nt, Human
cuucugugcuucacaguugcca

SEQ ID NO: 465164 - RNA, 22 nt, Human
gccuucaguagugucagcugua

SEQ ID NO: 465165 - RNA, 22 nt, Human
ggggccuguagagcuucaggga

SEQ ID NO: 465166 - RNA, 22 nt, Human
uggaccugagccuggcccugcc

SEQ ID NO: 465167 - RNA, 22 nt, Human
cccugcagcauucucuaacugg

SEQ ID NO: 465168 - RNA, 22 nt, Human
agcccccaaaagugcuuaugau

SEQ ID NO: 465169 - RNA, 22 nt, Human
ccagggccaguaagauuggcau

SEQ ID NO: 465170 - RNA, 22 nt, Human
ugggcagguuguuauuugacau

SEQ ID NO: 465171 - RNA, 22 nt, Human
ggcugccaggagggaggccagu

SEQ ID NO: 465172 - RNA, 22 nt, Human
cucagagaaaugucacaacaau

SEQ ID NO: 465173 - RNA, 22 nt, Human
augaggcagcugcuggagaacg

SEQ ID NO: 465174 - RNA, 22 nt, Human
uccugccucuuuucuuauucca

SEQ ID NO: 465175 - RNA, 22 nt, Human
acaaaggcaggauugacuuagu

SEQ ID NO: 465176 - RNA, 21 nt, Human
agggaaagaaaaugagcuaau

SEQ ID NO: 465177 - RNA, 22 nt, Human
aagucuguuugagugucacacu

SEQ ID NO: 465178 - RNA, 22 nt, Human
uggagauggguuaauggagaga

SEQ ID NO: 465179 - RNA, 22 nt, Human
uauuuucuggacagucuugcuu

SEQ ID NO: 465180 - RNA, 22 nt, Human
ucauuuuucacacagggucacc

SEQ ID NO: 465181 - RNA, 22 nt, Human
ccagagggcaaaaugaagcuua

SEQ ID NO: 465182 - RNA, 21 nt, Human
agcagaggggacauguuugau

SEQ ID NO: 465183 - RNA, 22 nt, Human
cugcuccacaccuccauuuccu

SEQ ID NO: 465184 - RNA, 22 nt, Human
ucauugucuugauaugauuguc

SEQ ID NO: 465185 - RNA, 22 nt, Human
ggaaggucgagcugcaucuggc

SEQ ID NO: 465186 - RNA, 22 nt, Human
uuccaggggcagcagugauggu

SEQ ID NO: 465187 - RNA, 22 nt, Human
agggccucugacgcccccagcc

SEQ ID NO: 465188 - RNA, 22 nt, Human
ccaaggagcaaguuuacaccug

SEQ ID NO: 465189 - RNA, 22 nt, Human
ucacaggagggagagacaccca

SEQ ID NO: 465190 - RNA, 22 nt, Human
agcuuuaucccuugcccaucga

SEQ ID NO: 465191 - RNA, 20 nt, Human
aggcucagagcaguaguaca

SEQ ID NO: 465192 - RNA, 22 nt, Human
ugccaggcacgugagaguggcc

SEQ ID NO: 465193 - RNA, 22 nt, Human
gaggccuggaccagccacagag

SEQ ID NO: 465194 - RNA, 18 nt, Human
cucagggcaucagucugg

SEQ ID NO: 465195 - RNA, 19 nt, Human
ccuggaggugaagguucuc

SEQ ID NO: 465196 - RNA, 20 nt, Human
uauuucugggcaaccauuua

SEQ ID NO: 465197 - RNA, 22 nt, Human
ugucucugugacuccuuccgcc

SEQ ID NO: 465198 - RNA, 22 nt, Human
uccugcugagcgucugucauuu

SEQ ID NO: 465199 - RNA, 22 nt, Human
uauaauuuuagaagagauggaa

SEQ ID NO: 465200 - RNA, 22 nt, Human
agggugucagccacggaauggg

SEQ ID NO: 465201 - RNA, 22 nt, Human
cagugaggugcccagccugccc

SEQ ID NO: 465202 - RNA, 22 nt, Human
acccagcuggaugcauggaggc

SEQ ID NO: 465203 - RNA, 22 nt, Human
gaggaaaauggaguguaauuaa

SEQ ID NO: 465204 - RNA, 22 nt, Human
ucccugcagacguccugcgggu

SEQ ID NO: 465205 - RNA, 22 nt, Human
cuggguggcgucuggggccagu

SEQ ID NO: 465206 - RNA, 21 nt, Human
gcugugcacauaguagaagug

SEQ ID NO: 465207 - RNA, 22 nt, Human
cugggcugcaucaaagaggcau

SEQ ID NO: 465208 - RNA, 22 nt, Human
ugaaaggugacauuucuuggau

SEQ ID NO: 465209 - RNA, 22 nt, Human
aauuaggaauaaaugaguacuu

SEQ ID NO: 465210 - RNA, 22 nt, Human
ggccuucacgugaccuggcgug

SEQ ID NO: 465211 - RNA, 22 nt, Human
gccaccagggggcuccagugag

SEQ ID NO: 465212 - RNA, 23 nt, Human
uggcccugaaucuguccuggagg

SEQ ID NO: 465213 - RNA, 22 nt, Human
ggccucggcccacugcugcggu

SEQ ID NO: 465214 - RNA, 22 nt, Human
gcaguguuaggaauaaaaauga

SEQ ID NO: 465215 - RNA, 22 nt, Human
ccagguggacggcgaguacagg

SEQ ID NO: 465216 - RNA, 22 nt, Human
uauuuguugaguuguuaugucu

SEQ ID NO: 465217 - RNA, 22 nt, Human
uucauucauuacgugccaggca

SEQ ID NO: 465218 - RNA, 22 nt, Human
gccuccugaaaggaagagcucc

SEQ ID NO: 465219 - RNA, 22 nt, Human
ucucugggaaugggccugggua

SEQ ID NO: 465220 - RNA, 22 nt, Human
uggagaaggacagccugagaaa

SEQ ID NO: 465221 - RNA, 22 nt, Human
cucagcuggcaauucuggcucc

SEQ ID NO: 465222 - RNA, 22 nt, Human
ucacauucucagcaucuauaca

SEQ ID NO: 465223 - RNA, 22 nt, Human
caguggaggccuugggaccuuu

SEQ ID NO: 465224 - RNA, 22 nt, Human
ucagauggcacacagagccugc

SEQ ID NO: 465225 - RNA, 22 nt, Human
uucucuuagcuguaaagucaau

SEQ ID NO: 465226 - RNA, 22 nt, Human
auguaacaaaugguauacaugu

SEQ ID NO: 465227 - RNA, 22 nt, Human
uucuguuugccauauauaguag

SEQ ID NO: 465228 - RNA, 22 nt, Human
cugucaguucuuccagauagag

SEQ ID NO: 465229 - RNA, 22 nt, Human
uguguacaggccuugcuagacu

SEQ ID NO: 465230 - RNA, 22 nt, Human
uggggacacagagguucguugg

SEQ ID NO: 465231 - RNA, 22 nt, Human
uccaggcaugucccaagccgga

SEQ ID NO: 465232 - RNA, 22 nt, Human
uccagcuggggcaguggcuggg

SEQ ID NO: 465233 - RNA, 22 nt, Human
ucuccucucuuaccugguacaa

SEQ ID NO: 465234 - RNA, 22 nt, Human
ugaagccagcuuuggaagacac

SEQ ID NO: 465235 - RNA, 22 nt, Human
aggugccagugcuguggucccc

SEQ ID NO: 465236 - RNA, 17 nt, Human
gcuuccugugcugggga

SEQ ID NO: 465237 - RNA, 22 nt, Human
cugagagaugauauagcuuaau

SEQ ID NO: 465238 - RNA, 22 nt, Human
ugucugagugugccugggcauu

SEQ ID NO: 465239 - RNA, 22 nt, Human
acccaggagccgugagagguua

SEQ ID NO: 465240 - RNA, 22 nt, Human
agggaguguaaauggugcucag

SEQ ID NO: 465241 - RNA, 22 nt, Human
agcagugggugacagagcugag

SEQ ID NO: 465242 - RNA, 22 nt, Human
ggcucuggguucugcaaugcgu

SEQ ID NO: 465243 - RNA, 22 nt, Human
ugacuucaaaggcucuacuccu

SEQ ID NO: 465244 - RNA, 22 nt, Human
cucaggagcuuccucagcccau

SEQ ID NO: 465245 - RNA, 22 nt, Human
gagcagaacaggccggguggga

SEQ ID NO: 465246 - RNA, 22 nt, Human
agguccagcuguugcagccucc

SEQ ID NO: 465247 - RNA, 22 nt, Human
guguggcugauugacaugguca

SEQ ID NO: 465248 - RNA, 22 nt, Human
acagccaggagccaugggcagg

SEQ ID NO: 465249 - RNA, 22 nt, Human
ucuaugaaaagucuauucauuc

SEQ ID NO: 465250 - RNA, 22 nt, Human
gaagagcugcucagaacaugau

SEQ ID NO: 465251 - RNA, 22 nt, Human
gcugggaggaucucucccuguc

SEQ ID NO: 465252 - RNA, 22 nt, Human
cugugacagagcuugagugaga

SEQ ID NO: 465253 - RNA, 22 nt, Human
aguccaggaguugggugacauu

SEQ ID NO: 465254 - RNA, 22 nt, Human
gcugucuucacuuccugguuuc

SEQ ID NO: 465255 - RNA, 22 nt, Human
aaucagucauuagcucugaccu

SEQ ID NO: 465256 - RNA, 22 nt, Human
aaggcuaugaucuuuuucauga

SEQ ID NO: 465257 - RNA, 22 nt, Human
ugucuuuaaaauuaaacacauc

SEQ ID NO: 465258 - RNA, 22 nt, Human
agccaggcucaaggccugcucc

SEQ ID NO: 465259 - RNA, 22 nt, Human
cuuauuauaaaauccuguuuga

SEQ ID NO: 465260 - RNA, 22 nt, Human
agaugcagaaaaacuaagugau

SEQ ID NO: 465261 - RNA, 22 nt, Human
cagucccagacccagaaggugg

SEQ ID NO: 465262 - RNA, 22 nt, Human
cugauuccugauucaugcucuu

SEQ ID NO: 465263 - RNA, 22 nt, Human
ugggcuguggagcaccuuugca

SEQ ID NO: 465264 - RNA, 22 nt, Human
ugcagggagcucuggggugcag

SEQ ID NO: 465265 - RNA, 22 nt, Human
ucaugcaaggcugaaacauggu

SEQ ID NO: 465266 - RNA, 22 nt, Human
cugugcccuggccaggccucuc

SEQ ID NO: 465267 - RNA, 17 nt, Human
caaggccagcaucuuca

SEQ ID NO: 465268 - RNA, 22 nt, Human
gcauggcauuugaagguagaag

SEQ ID NO: 465269 - RNA, 22 nt, Human
ugcagccaggaaauauuugcug

SEQ ID NO: 465270 - RNA, 22 nt, Human
ccugggcaaaugccagagacaa

SEQ ID NO: 465271 - RNA, 22 nt, Human
agaguuaagacguacaugagug

SEQ ID NO: 465272 - RNA, 21 nt, Human
uuugagaauuggucagagugc

SEQ ID NO: 465273 - RNA, 21 nt, Human
ugaaaucugaugggacaaaug

SEQ ID NO: 465274 - RNA, 22 nt, Human
uugaaaggaauacagaggccua

SEQ ID NO: 465275 - RNA, 22 nt, Human
cccagcuccuuggaugggcagg

SEQ ID NO: 465276 - RNA, 22 nt, Human
gcucagagaaucagcagacacc

SEQ ID NO: 465277 - RNA, 22 nt, Human
agcagcugguaggaguggccac

SEQ ID NO: 465278 - RNA, 18 nt, Human
ugucauugccagggaagc

SEQ ID NO: 465279 - RNA, 22 nt, Human
ucaucugucccaggcuuuuuuc

SEQ ID NO: 465280 - RNA, 22 nt, Human
agggaggucuggcugcccugag

SEQ ID NO: 465281 - RNA, 22 nt, Human
uggcagagaauaaaucuugacu

SEQ ID NO: 465282 - RNA, 22 nt, Human
gaaggcacugaacuccuucugg

SEQ ID NO: 465283 - RNA, 19 nt, Human
gcaucagagcagaaggggu

SEQ ID NO: 465284 - RNA, 23 nt, Human
ccugggcauuggcugcagcuucu

SEQ ID NO: 465285 - RNA, 22 nt, Human
ugguuuaccccuguccuauauc

SEQ ID NO: 465286 - RNA, 22 nt, Human
cccagcacuuugaauaugucac

SEQ ID NO: 465287 - RNA, 22 nt, Human
uggggcuccuccuggcaggagg

SEQ ID NO: 465288 - RNA, 22 nt, Human
gggcuguaggagcuggaauggg

SEQ ID NO: 465289 - RNA, 22 nt, Human
ggcagcuguggacgucgucauu

SEQ ID NO: 465290 - RNA, 19 nt, Human
gggcuucugggaucaagag

SEQ ID NO: 465291 - RNA, 22 nt, Human
ugccugggggacuaaggccaaa

SEQ ID NO: 465292 - RNA, 22 nt, Human
auagaaauggcagcuggugcua

SEQ ID NO: 465293 - RNA, 22 nt, Human
ucauugcagacuaacaaucuca

SEQ ID NO: 465294 - RNA, 22 nt, Human
aacaugaaaaccuccacagcaa

SEQ ID NO: 465295 - RNA, 22 nt, Human
cagguuuagguggacgugcagg

SEQ ID NO: 465296 - RNA, 22 nt, Human
cagggccuuauccugccauuga

SEQ ID NO: 465297 - RNA, 22 nt, Human
agccuggcccugcugaacucug

SEQ ID NO: 465298 - RNA, 16 nt, Human
ggcaccagugaacaca

SEQ ID NO: 465299 - RNA, 22 nt, Human
ugcauuaugcuugugcuguaua

SEQ ID NO: 465300 - RNA, 22 nt, Human
cucuggagaacuccuugugucu

SEQ ID NO: 465301 - RNA, 22 nt, Human
ucagccugcgucauggugacac

SEQ ID NO: 465302 - RNA, 19 nt, Human
uccuuugaauaucaguuga

SEQ ID NO: 465303 - RNA, 22 nt, Human
aauuuuauuaacuggauguagc

SEQ ID NO: 465304 - RNA, 22 nt, Human
uccaggcagcccuuccugacuc

SEQ ID NO: 465305 - RNA, 20 nt, Human
cuguggcucaugcaucugcc

SEQ ID NO: 465306 - RNA, 22 nt, Human
uguacauagaucuugaaaauua

SEQ ID NO: 465307 - RNA, 22 nt, Human
cuggaggcacccuuagagaggc

SEQ ID NO: 465308 - RNA, 23 nt, Human
ucacacagcuggucagguacaga

SEQ ID NO: 465309 - RNA, 23 nt, Human
ggagccuggcauaugagacgcau

SEQ ID NO: 465310 - RNA, 22 nt, Human
uaaugcacauagaaguacuuag

SEQ ID NO: 465311 - RNA, 22 nt, Human
gccucugcaccaguacugugcc

SEQ ID NO: 465312 - RNA, 22 nt, Human
ucuguacauuuggggaccccag

SEQ ID NO: 465313 - RNA, 22 nt, Human
ucacuuaaaaauucuaguuaug

SEQ ID NO: 465314 - RNA, 22 nt, Human
gugucccaggccucuggaauua

SEQ ID NO: 465315 - RNA, 22 nt, Human
uugaggagcacuagucagguau

SEQ ID NO: 465316 - RNA, 18 nt, Human
ggacaucaucaggugcuu

SEQ ID NO: 465317 - RNA, 22 nt, Human
aaagucauguaaugauaugauu

SEQ ID NO: 465318 - RNA, 22 nt, Human
auguaacuucugugaaucugac

SEQ ID NO: 465319 - RNA, 22 nt, Human
acauuucuuugcuagacagcag

SEQ ID NO: 465320 - RNA, 22 nt, Human
aaugggagguaguaugggaggu

SEQ ID NO: 465321 - RNA, 22 nt, Human
uuucagauggagguuuaggaca

SEQ ID NO: 465322 - RNA, 22 nt, Human
agccaggauggucucgaucggc

SEQ ID NO: 465323 - RNA, 22 nt, Human
cggucaggugcagcguuggcac

SEQ ID NO: 465324 - RNA, 21 nt, Human
uguggcagauguugggaggca

SEQ ID NO: 465325 - RNA, 23 nt, Human
uggauaaagcugugcugcauagg

SEQ ID NO: 465326 - RNA, 19 nt, Human
cuggaaugagaacaugccc

SEQ ID NO: 465327 - RNA, 22 nt, Human
ccugagaggcccucucacuguc

SEQ ID NO: 465328 - RNA, 22 nt, Human
gagccuggagcuggaacgaagc

SEQ ID NO: 465329 - RNA, 22 nt, Human
uccucugccaaagggaguugcc

SEQ ID NO: 465330 - RNA, 21 nt, Human
uccaggaguggcugggcaggg

SEQ ID NO: 465331 - RNA, 22 nt, Human
uacaagauaagaauuggcaagg

SEQ ID NO: 465332 - RNA, 22 nt, Human
agccagccaguucacuaggaaa

SEQ ID NO: 465333 - RNA, 22 nt, Human
auucuggauuaucaguccacca

SEQ ID NO: 465334 - RNA, 22 nt, Human
aggaccagaggccagagucagc

SEQ ID NO: 465335 - RNA, 22 nt, Human
cccagcauggagugaggacuca

SEQ ID NO: 465336 - RNA, 22 nt, Human
ccauuugucaccucugcacucc

SEQ ID NO: 465337 - RNA, 22 nt, Human
aggcaggggagcuggaagggua

SEQ ID NO: 465338 - RNA, 22 nt, Human
agccaggauuggcugagccuua

SEQ ID NO: 465339 - RNA, 22 nt, Human
augcacaagaggcuagaaaaga

SEQ ID NO: 465340 - RNA, 22 nt, Human
uguguacaagaguguuuacugu

SEQ ID NO: 465341 - RNA, 22 nt, Human
ucaguuaagaggccacggcagu

SEQ ID NO: 465342 - RNA, 22 nt, Human
accaaggagacaaagguguauu

SEQ ID NO: 465343 - RNA, 22 nt, Human
cacagaggaaaggcaguuggua

SEQ ID NO: 465344 - RNA, 22 nt, Human
gccugggagagggauagugcag

SEQ ID NO: 465345 - RNA, 22 nt, Human
cuggcagggugggcuuugcuuu

SEQ ID NO: 465346 - RNA, 22 nt, Human
aagcagcacaguaauauuggug

SEQ ID NO: 465347 - RNA, 22 nt, Human
cagcacaguacaaggcacggau

SEQ ID NO: 465348 - RNA, 22 nt, Human
ucaggcuggagugcaguggcgc

SEQ ID NO: 465349 - RNA, 22 nt, Human
gaaacccaaacuaagacaguag

SEQ ID NO: 465350 - RNA, 22 nt, Human
uccugccuucauacugcuguau

SEQ ID NO: 465351 - RNA, 22 nt, Human
cagcuucugagcaagccagggg

SEQ ID NO: 465352 - RNA, 22 nt, Human
agaaaauuagauuuuacugugu

SEQ ID NO: 465353 - RNA, 23 nt, Human
ccugcagcugcuggggcuccacc

SEQ ID NO: 465354 - RNA, 22 nt, Human
uccuuccugcaggccaaguccu

SEQ ID NO: 465355 - RNA, 22 nt, Human
uuccauaaugagauucccagcc

SEQ ID NO: 465356 - RNA, 18 nt, Human
aagaggaggagcagguug

SEQ ID NO: 465357 - RNA, 22 nt, Human
caggcagcucaaccuugggagc

SEQ ID NO: 465358 - RNA, 21 nt, Human
uggcagaguugaguaguuaug

SEQ ID NO: 465359 - RNA, 22 nt, Human
acucaggaaaaauguagugaua

SEQ ID NO: 465360 - RNA, 20 nt, Human
gaggccucagccucagcucc

SEQ ID NO: 465361 - RNA, 22 nt, Human
cagaggccuauccaguguccau

SEQ ID NO: 465362 - RNA, 22 nt, Human
uuauuaggaaaaggucagaugu

SEQ ID NO: 465363 - RNA, 22 nt, Human
cacccaggcuggagugcagggg

SEQ ID NO: 465364 - RNA, 22 nt, Human
uccugggcugcagggaagagca

SEQ ID NO: 465365 - RNA, 22 nt, Human
acagggcagagaggcaggcuug

SEQ ID NO: 465366 - RNA, 22 nt, Human
uuuuucaucugauugauaacuc

SEQ ID NO: 465367 - RNA, 22 nt, Human
cacagggcuuugauggcugagu

SEQ ID NO: 465368 - RNA, 22 nt, Human
cucccaagggguaagggagcug

SEQ ID NO: 465369 - RNA, 22 nt, Human
augggaugaacuugaucugcuu

SEQ ID NO: 465370 - RNA, 22 nt, Human
auuaaauuuucacuaggcuccc

SEQ ID NO: 465371 - RNA, 22 nt, Human
gccucuggucccucaugcugug

SEQ ID NO: 465372 - RNA, 22 nt, Human
cugcucugcaaggcacagugau

SEQ ID NO: 465373 - RNA, 22 nt, Human
aggcugugauuccaccacucuc

SEQ ID NO: 465374 - RNA, 22 nt, Human
acacccagagcgccagugccga

SEQ ID NO: 465375 - RNA, 22 nt, Human
uuagaaaucaccucugaagauc

SEQ ID NO: 465376 - RNA, 22 nt, Human
uggauaaacucacuguaaguug

SEQ ID NO: 465377 - RNA, 22 nt, Human
agugaaauacugucguuuuuag

SEQ ID NO: 465378 - RNA, 22 nt, Human
ccagcucuagccccauguggcu

SEQ ID NO: 465379 - RNA, 23 nt, Human
agaaaagcuuggacacauggccu

SEQ ID NO: 465380 - RNA, 22 nt, Human
cagggccugagggcugcucugc

SEQ ID NO: 465381 - RNA, 22 nt, Human
ggccucugcccucacuccuguc

SEQ ID NO: 465382 - RNA, 22 nt, Human
ccuguacacaauuccgaggaua

SEQ ID NO: 465383 - RNA, 22 nt, Human
ucccagccuuccuuguggugaa

SEQ ID NO: 465384 - RNA, 22 nt, Human
auuauaggcuugagccaccgug

SEQ ID NO: 465385 - RNA, 22 nt, Human
ugagcagagucgcuccagagug

SEQ ID NO: 465386 - RNA, 22 nt, Human
cuuccaaacccaggguaugggc

SEQ ID NO: 465387 - RNA, 22 nt, Human
ccuggcagcgccgaagcuggcc

SEQ ID NO: 465388 - RNA, 22 nt, Human
ugcagaagauggucugagcacc

SEQ ID NO: 465389 - RNA, 22 nt, Human
ccagacuguggaguuccuggug

SEQ ID NO: 465390 - RNA, 22 nt, Human
cucuccuggggagcacacacac

SEQ ID NO: 465391 - RNA, 22 nt, Human
cacagcuuguuuagugacucac

SEQ ID NO: 465392 - RNA, 22 nt, Human
acagacaaguaguucagacaag

SEQ ID NO: 465393 - RNA, 22 nt, Human
uuugcauuuguuuagaaccuga

SEQ ID NO: 465394 - RNA, 22 nt, Human
gcuggggagggcgucaaggcca

SEQ ID NO: 465395 - RNA, 22 nt, Human
ucucagaguuugaaucuggagu

SEQ ID NO: 465396 - RNA, 22 nt, Human
uccucucagugugguuguggga

SEQ ID NO: 465397 - RNA, 22 nt, Human
aagggugggcccuggcagccau

SEQ ID NO: 465398 - RNA, 22 nt, Human
cagggcagggccacacccccug

SEQ ID NO: 465399 - RNA, 22 nt, Human
agggaccucuucuugcagcuga

SEQ ID NO: 465400 - RNA, 22 nt, Human
ucuuugcaggagcccuuugaac

SEQ ID NO: 465401 - RNA, 22 nt, Human
aucuuuaggaaccuaaccuauu

SEQ ID NO: 465402 - RNA, 16 nt, Human
gcacacacaucaauga

SEQ ID NO: 465403 - RNA, 19 nt, Human
auacacauacguaaacuga

SEQ ID NO: 465404 - RNA, 22 nt, Human
uuccuguaugucagugaagagc

SEQ ID NO: 465405 - RNA, 21 nt, Human
agucccaggggugagugaugu

SEQ ID NO: 465406 - RNA, 22 nt, Human
uuucuguagggauuucacaguu

SEQ ID NO: 465407 - RNA, 22 nt, Human
uccgcccgcacguauggagugg

SEQ ID NO: 465408 - RNA, 22 nt, Human
gcugcucucucccuaaguuggg

SEQ ID NO: 465409 - RNA, 22 nt, Human
gcuuuccuggcccugucccugc

SEQ ID NO: 465410 - RNA, 22 nt, Human
aaggaagagucuagaacaggca

SEQ ID NO: 465411 - RNA, 22 nt, Human
augcauaauguauguauugacu

SEQ ID NO: 465412 - RNA, 22 nt, Human
uucuacuuuggacauaaaggac

SEQ ID NO: 465413 - RNA, 23 nt, Human
agugagcagcuguagggcaagga

SEQ ID NO: 465414 - RNA, 22 nt, Human
uggcuuccugcauggauccucu

SEQ ID NO: 465415 - RNA, 18 nt, Human
cccagugcucacugccuc

SEQ ID NO: 465416 - RNA, 22 nt, Human
uuagcaucugcuguaagcuuau

SEQ ID NO: 465417 - RNA, 22 nt, Human
ccaggcugccgaggaaagaaag

SEQ ID NO: 465418 - RNA, 21 nt, Human
aggcucccagaaaugggcauc

SEQ ID NO: 465419 - RNA, 22 nt, Human
acaggcucucagccaguuggca

SEQ ID NO: 465420 - RNA, 22 nt, Human
agccuggagcuugaguuaugag

SEQ ID NO: 465421 - RNA, 18 nt, Human
uggcagcaggaagccauu

SEQ ID NO: 465422 - RNA, 22 nt, Human
ccgggccucgggacaccgggua

SEQ ID NO: 465423 - RNA, 22 nt, Human
ccaaggcaggggaucaaaguuu

SEQ ID NO: 465424 - RNA, 21 nt, Human
ggcagugaugugaagugcauc

SEQ ID NO: 465425 - RNA, 22 nt, Human
uggcuuccugcacagugucugc

SEQ ID NO: 465426 - RNA, 22 nt, Human
ugccugcucuuaccacucuccc

SEQ ID NO: 465427 - RNA, 22 nt, Human
auuuugaaaccaaguuauuucc

SEQ ID NO: 465428 - RNA, 22 nt, Human
guguuuccaguucagaaagcaa

SEQ ID NO: 465429 - RNA, 22 nt, Human
aagccagguguuuaggccagcg

SEQ ID NO: 465430 - RNA, 22 nt, Human
gaggaaccaaucugugauauuc

SEQ ID NO: 465431 - RNA, 22 nt, Human
ggccugagucacaucaggagag

SEQ ID NO: 465432 - RNA, 22 nt, Human
agggacuggcucucugagcagg

SEQ ID NO: 465433 - RNA, 22 nt, Human
cuuagaugaagucacagaaccc

SEQ ID NO: 465434 - RNA, 22 nt, Human
ggcucaggccagaccacgacuc

SEQ ID NO: 465435 - RNA, 22 nt, Human
uaggccaguggcagguugugug

SEQ ID NO: 465436 - RNA, 22 nt, Human
cagucccacaagaucuccacaa

SEQ ID NO: 465437 - RNA, 17 nt, Human
ucaggcugggugcagug

SEQ ID NO: 465438 - RNA, 22 nt, Human
ugcagggcccuugggguugaac

SEQ ID NO: 465439 - RNA, 22 nt, Human
ccuagagcucugcuuuaucuaa

SEQ ID NO: 465440 - RNA, 22 nt, Human
ccuuucucauuuuaagcauuag

SEQ ID NO: 465441 - RNA, 22 nt, Human
ucacaggguaucugggauggau

SEQ ID NO: 465442 - RNA, 17 nt, Human
uggagcugcguguguuc

SEQ ID NO: 465443 - RNA, 22 nt, Human
cagucccaugagcccagaacau

SEQ ID NO: 465444 - RNA, 20 nt, Human
auuuggcaugaaguauugau

SEQ ID NO: 465445 - RNA, 22 nt, Human
ccuggccaggcauggagucaca

SEQ ID NO: 465446 - RNA, 22 nt, Human
uucuggaggccccuuccuucuc

SEQ ID NO: 465447 - RNA, 22 nt, Human
uccaggagguagugcuuaauuu

SEQ ID NO: 465448 - RNA, 19 nt, Human
aggugaugugacucuagaa

SEQ ID NO: 465449 - RNA, 22 nt, Human
gcagaggagcaaguugcuacag

SEQ ID NO: 465450 - RNA, 22 nt, Human
uauugacaauuugugaaacuau

SEQ ID NO: 465451 - RNA, 22 nt, Human
ucaggugggaccugcuaggaca

SEQ ID NO: 465452 - RNA, 22 nt, Human
auuuucaugacuaccuuaaaua

SEQ ID NO: 465453 - RNA, 22 nt, Human
gccacccccaaguagguggucu

SEQ ID NO: 465454 - RNA, 22 nt, Human
acugcuuacaaaaggaaagaau

SEQ ID NO: 465455 - RNA, 17 nt, Human
aaucuguuuacagucag

SEQ ID NO: 465456 - RNA, 22 nt, Human
cuggggugagcagaaacagggg

SEQ ID NO: 465457 - RNA, 21 nt, Human
aacuuuagaaagacugggaag

SEQ ID NO: 465458 - RNA, 22 nt, Human
cagaagcacuaggaggaaacgu

SEQ ID NO: 465459 - RNA, 18 nt, Human
ugucucaggcugaaacag

SEQ ID NO: 465460 - RNA, 20 nt, Human
acagccagaggaggcagaca

SEQ ID NO: 465461 - RNA, 22 nt, Human
agucccagccuguaggauuggg

SEQ ID NO: 465462 - RNA, 22 nt, Human
cugcuguguuucacaccucugg

SEQ ID NO: 465463 - RNA, 22 nt, Human
gggaguggagagcaauggauga

SEQ ID NO: 465464 - RNA, 22 nt, Human
ucacuguauuugcugaugcaua

SEQ ID NO: 465465 - RNA, 22 nt, Human
aaagagcuucauuuccauuuau

SEQ ID NO: 465466 - RNA, 19 nt, Human
ccuggguccacucagacua

SEQ ID NO: 465467 - RNA, 18 nt, Human
agggaucaucacugcagc

SEQ ID NO: 465468 - RNA, 22 nt, Human
caggccugugaguugaggcccc

SEQ ID NO: 465469 - RNA, 22 nt, Human
auuguauuagcacaauacaauu

SEQ ID NO: 465470 - RNA, 22 nt, Human
caggaugcacuaggaaccaggg

SEQ ID NO: 465471 - RNA, 22 nt, Human
gcccagcaggacagagugguuu

SEQ ID NO: 465472 - RNA, 22 nt, Human
uuucacaugguacugccuguuu

SEQ ID NO: 465473 - RNA, 22 nt, Human
gcacaugagcugcugggauggg

SEQ ID NO: 465474 - RNA, 22 nt, Human
ggcagaccucuccagccccaca

SEQ ID NO: 465475 - RNA, 22 nt, Human
agcagcauucucugguaugggg

SEQ ID NO: 465476 - RNA, 22 nt, Human
gauccucuuuuccuaggaaggu

SEQ ID NO: 465477 - RNA, 22 nt, Human
auucagcauaaucaguagcuug

SEQ ID NO: 465478 - RNA, 22 nt, Human
ugaggccugaagccuggagccu

SEQ ID NO: 465479 - RNA, 22 nt, Human
ucagcuggcaguucagaggcug

SEQ ID NO: 465480 - RNA, 22 nt, Human
aguuuuauuccaaugugcagca

SEQ ID NO: 465481 - RNA, 22 nt, Human
uuccauuuauucuuguccagau

SEQ ID NO: 465482 - RNA, 22 nt, Human
auucauuccaggucagucagac

SEQ ID NO: 465483 - RNA, 22 nt, Human
ccugaagggacuccagagagca

SEQ ID NO: 465484 - RNA, 22 nt, Human
acagggcagagggcaguuggua

SEQ ID NO: 465485 - RNA, 22 nt, Human
agucaauuaucucuaggucauc

SEQ ID NO: 465486 - RNA, 22 nt, Human
cccuggugguacggcacuggca

SEQ ID NO: 465487 - RNA, 22 nt, Human
ucagagagaaauaguuuuugac

SEQ ID NO: 465488 - RNA, 22 nt, Human
gugucccaaucuacuuuucccu

SEQ ID NO: 465489 - RNA, 22 nt, Human
gguuccaccuggcgagggguau

SEQ ID NO: 465490 - RNA, 20 nt, Human
agugcaagaaagcacagcug

SEQ ID NO: 465491 - RNA, 22 nt, Human
acaaagaucuugcuuuccuacu

SEQ ID NO: 465492 - RNA, 22 nt, Human
aggugcuggaguagaagaaaaa

SEQ ID NO: 465493 - RNA, 22 nt, Human
gggcugugggacccggcacuuu

SEQ ID NO: 465494 - RNA, 22 nt, Human
uucucaggugaggcugaggcug

SEQ ID NO: 465495 - RNA, 22 nt, Human
gagccugggacugggggucaug

SEQ ID NO: 465496 - RNA, 22 nt, Human
uugaaaggugaacaugaugcac

SEQ ID NO: 465497 - RNA, 22 nt, Human
gagacugcauuguccaaggguu

SEQ ID NO: 465498 - RNA, 22 nt, Human
agccugguuuaagcauuuuaua

SEQ ID NO: 465499 - RNA, 22 nt, Human
ucauuucuguugugcaucacug

SEQ ID NO: 465500 - RNA, 22 nt, Human
ucagcuuuccuugcuuuagauu

SEQ ID NO: 465501 - RNA, 23 nt, Human
aagaauaaaugacauuaaaggug

SEQ ID NO: 465502 - RNA, 22 nt, Human
aggcuuccgaguagcugggacu

SEQ ID NO: 465503 - RNA, 22 nt, Human
uuugaaaauuagacacaggcua

SEQ ID NO: 465504 - RNA, 22 nt, Human
uggcugagagcaauugacucug

SEQ ID NO: 465505 - RNA, 22 nt, Human
aaauccuaccaagaaauucccu

SEQ ID NO: 465506 - RNA, 22 nt, Human
aagaaugucguugguauuuuaa

SEQ ID NO: 465507 - RNA, 22 nt, Human
ccacagggauaggaauggggcu

SEQ ID NO: 465508 - RNA, 19 nt, Human
agugucaucagcuacucag

SEQ ID NO: 465509 - RNA, 22 nt, Human
agccuggaggccaggagacagu

SEQ ID NO: 465510 - RNA, 22 nt, Human
ugcucuggguccugggccuccu

SEQ ID NO: 465511 - RNA, 22 nt, Human
uggcagaggaggcucagauuga

SEQ ID NO: 465512 - RNA, 21 nt, Human
ggacaccagucacacuggauu

SEQ ID NO: 465513 - RNA, 22 nt, Human
agccaggaaccagcuacagucu

SEQ ID NO: 465514 - RNA, 19 nt, Human
ggucacagggguuacaagg

SEQ ID NO: 465515 - RNA, 22 nt, Human
ucgugucagaucagagguuccu

SEQ ID NO: 465516 - RNA, 22 nt, Human
ugguccagaugccuuggcuuua

SEQ ID NO: 465517 - RNA, 22 nt, Human
cccaggaggcagaaguugcagu

SEQ ID NO: 465518 - RNA, 22 nt, Human
uagagcauuuagaggggcagga

SEQ ID NO: 465519 - RNA, 22 nt, Human
gagcuucccucugcagucccug

SEQ ID NO: 465520 - RNA, 22 nt, Human
uugaaaguuaucuagauucuga

SEQ ID NO: 465521 - RNA, 22 nt, Human
ugucaugccaccguuucccaga

SEQ ID NO: 465522 - RNA, 22 nt, Human
aucaaaguuucccagaaguugu

SEQ ID NO: 465523 - RNA, 22 nt, Human
uucuaguuuugccuuaucaaca

SEQ ID NO: 465524 - RNA, 22 nt, Human
ccugccuggcugucagcagagc

SEQ ID NO: 465525 - RNA, 22 nt, Human
gggacuucauagcuaggcacuu

SEQ ID NO: 465526 - RNA, 22 nt, Human
auuucucagugaaaugacaggc

SEQ ID NO: 465527 - RNA, 22 nt, Human
gacuacucaaacuuucucuaua

SEQ ID NO: 465528 - RNA, 22 nt, Human
aaggcacugaacuuaaauucug

SEQ ID NO: 465529 - RNA, 22 nt, Human
guuucaaaagucaggcuauucu

SEQ ID NO: 465530 - RNA, 22 nt, Human
cugccaggggccucacaggcca

SEQ ID NO: 465531 - RNA, 22 nt, Human
uaucugcaucugcauguguauu

SEQ ID NO: 465532 - RNA, 22 nt, Human
aaagauuugaaauuaggcauca

SEQ ID NO: 465533 - RNA, 22 nt, Human
uacccaggggcugagcagaggu

SEQ ID NO: 465534 - RNA, 22 nt, Human
cagcugaacauguagagcaucu

SEQ ID NO: 465535 - RNA, 22 nt, Human
aaagaaggaccuggaggaggau

SEQ ID NO: 465536 - RNA, 16 nt, Human
uccaggcauaucugag

SEQ ID NO: 465537 - RNA, 22 nt, Human
cugugugcugaaaugcagugag

SEQ ID NO: 465538 - RNA, 22 nt, Human
uugaagcagagaaauacuugaa

SEQ ID NO: 465539 - RNA, 22 nt, Human
cagcugagaccagaaugcaggu

SEQ ID NO: 465540 - RNA, 22 nt, Human
ucagagaaaugaaguagggauu

SEQ ID NO: 465541 - RNA, 22 nt, Human
accugccucagugcagcuggau

SEQ ID NO: 465542 - RNA, 22 nt, Human
cagggccugccugguuccugga

SEQ ID NO: 465543 - RNA, 22 nt, Human
caggugucuaauucucaccccc

SEQ ID NO: 465544 - RNA, 20 nt, Human
guauuagguguuccucuuuc

SEQ ID NO: 465545 - RNA, 23 nt, Human
uggcccugugcaugcugcuuccc

SEQ ID NO: 465546 - RNA, 22 nt, Human
cugaaggauuagagagcacuua

SEQ ID NO: 465547 - RNA, 22 nt, Human
ggcagauguuauaugaucugag

SEQ ID NO: 465548 - RNA, 20 nt, Human
uuacucaguuccugccaugc

SEQ ID NO: 465549 - RNA, 22 nt, Human
ugagggaguuggguguauagga

SEQ ID NO: 465550 - RNA, 22 nt, Human
gguacaaggagugaagguuugg

SEQ ID NO: 465551 - RNA, 22 nt, Human
agcuggaggggccagcaggugu

SEQ ID NO: 465552 - RNA, 22 nt, Human
ugugcugguacaugugaggaug

SEQ ID NO: 465553 - RNA, 22 nt, Human
uggcccugcagaacuagccugg

SEQ ID NO: 465554 - RNA, 22 nt, Human
ggcucagggaaugaggaagaau

SEQ ID NO: 465555 - RNA, 22 nt, Human
ucugcagcuugcacaggcaggc

SEQ ID NO: 465556 - RNA, 22 nt, Human
agcaugcugguguucauggcag

SEQ ID NO: 465557 - RNA, 21 nt, Human
ggacuuacauagguaaggggu

SEQ ID NO: 465558 - RNA, 22 nt, Human
uuguuuguaugcugagaagaau

SEQ ID NO: 465559 - RNA, 22 nt, Human
ccaggagcaccaggccugugcc

SEQ ID NO: 465560 - RNA, 22 nt, Human
auuuaguguguauugcuauuau

SEQ ID NO: 465561 - RNA, 20 nt, Human
cugcugugugugccucagcc

SEQ ID NO: 465562 - RNA, 21 nt, Human
ggugggcacaggagagcagag

SEQ ID NO: 465563 - RNA, 22 nt, Human
gcucacugccauucucuagaug

SEQ ID NO: 465564 - RNA, 22 nt, Human
aagagcugugggugguaguccu

SEQ ID NO: 465565 - RNA, 22 nt, Human
gccagagccggcuucacaggau

SEQ ID NO: 465566 - RNA, 22 nt, Human
gccuucaggaggguuccagaca

SEQ ID NO: 465567 - RNA, 21 nt, Human
ucuuguccuugcucucccacu

SEQ ID NO: 465568 - RNA, 22 nt, Human
acaggcagguccugucccagcu

SEQ ID NO: 465569 - RNA, 22 nt, Human
aaggaagauauaucaagcuuaa

SEQ ID NO: 465570 - RNA, 22 nt, Human
cugagcugcucccgcugcagcg

SEQ ID NO: 465571 - RNA, 22 nt, Human
guggcagagggugagcuggacu

SEQ ID NO: 465572 - RNA, 22 nt, Human
ccuccugggccuugcucuguga

SEQ ID NO: 465573 - RNA, 22 nt, Human
cagggcagagggaaacuccuuu

SEQ ID NO: 465574 - RNA, 22 nt, Human
uaguuaggguucugcagagaca

SEQ ID NO: 465575 - RNA, 22 nt, Human
cuuuacaaagcaauuuugucuc

SEQ ID NO: 465576 - RNA, 22 nt, Human
ccaggauggggagcagauagaa

SEQ ID NO: 465577 - RNA, 20 nt, Human
ucagccagcuaacaugggga

SEQ ID NO: 465578 - RNA, 17 nt, Human
ugcauuguuggaaauuu

SEQ ID NO: 465579 - RNA, 22 nt, Human
ugggggagauugugcaucucua

SEQ ID NO: 465580 - RNA, 22 nt, Human
ggcugcugguggaaugguaggc

SEQ ID NO: 465581 - RNA, 22 nt, Human
aaaugcaggaaauuaugcuuuu

SEQ ID NO: 465582 - RNA, 22 nt, Human
uguacuugaacuugacuguaga

SEQ ID NO: 465583 - RNA, 22 nt, Human
uggguaaacugggucuggagag

SEQ ID NO: 465584 - RNA, 22 nt, Human
gcagugaacauaacacagaagg

SEQ ID NO: 465585 - RNA, 21 nt, Human
gcugcaucaaucuacccaggg

SEQ ID NO: 465586 - RNA, 22 nt, Human
agagccuugaagaucuggaaaa

SEQ ID NO: 465587 - RNA, 22 nt, Human
agcauuuaguuaguaaauguuu

SEQ ID NO: 465588 - RNA, 22 nt, Human
cagguacauucguagacccauu

SEQ ID NO: 465589 - RNA, 22 nt, Human
ugcugcucaaugagaugccauc

SEQ ID NO: 465590 - RNA, 22 nt, Human
cacugcucgcugcagcauggcc

SEQ ID NO: 465591 - RNA, 22 nt, Human
guuauugcaguauagaggucua

SEQ ID NO: 465592 - RNA, 22 nt, Human
auacaaagcuaaauaugguuuc

SEQ ID NO: 465593 - RNA, 23 nt, Human
aggaacugaggccuagggaggua

SEQ ID NO: 465594 - RNA, 20 nt, Human
aauguauuguuuuguuucag

SEQ ID NO: 465595 - RNA, 22 nt, Human
gcugucaggaacaugccuuggu

SEQ ID NO: 465596 - RNA, 22 nt, Human
aggccugagguuccugugcuca

SEQ ID NO: 465597 - RNA, 22 nt, Human
ccucugcagcagagagccagag

SEQ ID NO: 465598 - RNA, 22 nt, Human
gcugucagugaggugagacaug

SEQ ID NO: 465599 - RNA, 22 nt, Human
uggcaggaaaaagggccagagg

SEQ ID NO: 465600 - RNA, 23 nt, Human
aaaguugauuugcaguuuaagag

SEQ ID NO: 465601 - RNA, 22 nt, Human
ggccuggcauggggacuaaggg

SEQ ID NO: 465602 - RNA, 21 nt, Human
uugaagcaaggguggcucuga

SEQ ID NO: 465603 - RNA, 22 nt, Human
cuguggcauugugaggacugca

SEQ ID NO: 465604 - RNA, 22 nt, Human
gccuggagcucaugugggcauu

SEQ ID NO: 465605 - RNA, 22 nt, Human
ccuucugcuggucaucccagug

SEQ ID NO: 465606 - RNA, 22 nt, Human
gaggagaaauuauccuuggugu

SEQ ID NO: 465607 - RNA, 22 nt, Human
aggaggccgauuucagaggucg

SEQ ID NO: 465608 - RNA, 22 nt, Human
aggcuucccagcugagcucagc

SEQ ID NO: 465609 - RNA, 22 nt, Human
aaagauuucacaucccaagccu

SEQ ID NO: 465610 - RNA, 22 nt, Human
cuguggcuaugguguacauacu

SEQ ID NO: 465611 - RNA, 22 nt, Human
caggaggcaucauggagcggac

SEQ ID NO: 465612 - RNA, 22 nt, Human
agaaauguauucuguauguuuu

SEQ ID NO: 465613 - RNA, 22 nt, Human
gaagaaggugcuacacagggca

SEQ ID NO: 465614 - RNA, 22 nt, Human
cauuugcaagagauaaauguuu

SEQ ID NO: 465615 - RNA, 22 nt, Human
ccaucccuucaccacagcagua

SEQ ID NO: 465616 - RNA, 22 nt, Human
cuccucugucuaccacgagggu

SEQ ID NO: 465617 - RNA, 17 nt, Human
aaggccauuuccaccca

SEQ ID NO: 465618 - RNA, 22 nt, Human
guaaaucccauccuuucucugg

SEQ ID NO: 465619 - RNA, 22 nt, Human
aaggguugaagauaaauaaggu

SEQ ID NO: 465620 - RNA, 23 nt, Human
uggcuccaugaaaauuacgagga

SEQ ID NO: 465621 - RNA, 22 nt, Human
ggccuuggggaggauggugucc

SEQ ID NO: 465622 - RNA, 22 nt, Human
uauauuaacacccacuugccuc

SEQ ID NO: 465623 - RNA, 22 nt, Human
ugaaaucuucacuaagucucuu

SEQ ID NO: 465624 - RNA, 22 nt, Human
gaggcuccccaugaggccccag

SEQ ID NO: 465625 - RNA, 22 nt, Human
agaucacaguggcaacucccuu

SEQ ID NO: 465626 - RNA, 23 nt, Human
aggcagagccaaggucaaaaccc

SEQ ID NO: 465627 - RNA, 22 nt, Human
aggcccagagcaggaaaggguu

SEQ ID NO: 465628 - RNA, 22 nt, Human
gagacagcagggccagggccug

SEQ ID NO: 465629 - RNA, 22 nt, Human
uccuggcccgaucccugugaag

SEQ ID NO: 465630 - RNA, 22 nt, Human
agugccuugugugugggcagcc

SEQ ID NO: 465631 - RNA, 22 nt, Human
cugccugcuucugagccagagg

SEQ ID NO: 465632 - RNA, 22 nt, Human
aggacuucaucaccuguauaaa

SEQ ID NO: 465633 - RNA, 19 nt, Human
agcuuccauauucucuagu

SEQ ID NO: 465634 - RNA, 22 nt, Human
guggggcaugcacgcugcuccu

SEQ ID NO: 465635 - RNA, 22 nt, Human
uuaacagauguuuauggagcau

SEQ ID NO: 465636 - RNA, 22 nt, Human
acacuacaaucucagaacuaua

SEQ ID NO: 465637 - RNA, 22 nt, Human
gcucagaggaugcuccuuuaug

SEQ ID NO: 465638 - RNA, 22 nt, Human
gagggccaacuagcaccacuuu

SEQ ID NO: 465639 - RNA, 19 nt, Human
ggagaggcuggagggaugc

SEQ ID NO: 465640 - RNA, 22 nt, Human
gcuggcagucccaucagcuggg

SEQ ID NO: 465641 - RNA, 22 nt, Human
auuucucacucacaguccaugu

SEQ ID NO: 465642 - RNA, 22 nt, Human
gugggcuggacccuccugcucc

SEQ ID NO: 465643 - RNA, 22 nt, Human
ugcauuguuuagaacucuuugg

SEQ ID NO: 465644 - RNA, 20 nt, Human
ccuaggcaugcugagucucc

SEQ ID NO: 465645 - RNA, 21 nt, Human
ucaggcagugcaaauacaugg

SEQ ID NO: 465646 - RNA, 22 nt, Human
auuagggcuggaugcaaggaaa

SEQ ID NO: 465647 - RNA, 22 nt, Human
acuguaaccaguguggugagag

SEQ ID NO: 465648 - RNA, 22 nt, Human
agcagacaacccagaugaccca

SEQ ID NO: 465649 - RNA, 23 nt, Human
agggcccaagccuggacagcagg

SEQ ID NO: 465650 - RNA, 22 nt, Human
acauuucuuagccuaguuccag

SEQ ID NO: 465651 - RNA, 22 nt, Human
aggcugagggcuccugagggca

SEQ ID NO: 465652 - RNA, 22 nt, Human
gaagucuggcugacgagaguua

SEQ ID NO: 465653 - RNA, 22 nt, Human
ucccuccuggugagcaggggcu

SEQ ID NO: 465654 - RNA, 22 nt, Human
ugcauuuuuaacaaggcuaauu

SEQ ID NO: 465655 - RNA, 22 nt, Human
auucuacaacccaauaauaauu

SEQ ID NO: 465656 - RNA, 22 nt, Human
uagggcuauucugaguaauaau

SEQ ID NO: 465657 - RNA, 22 nt, Human
ccugggagugugccaucucugu

SEQ ID NO: 465658 - RNA, 21 nt, Human
cccaggucguggucuucccag

SEQ ID NO: 465659 - RNA, 22 nt, Human
gugcccugguccccagcauaua

SEQ ID NO: 465660 - RNA, 22 nt, Human
agagagcauggcacagaggggu

SEQ ID NO: 465661 - RNA, 22 nt, Human
ugaaaucugcaugcaaaguccu

SEQ ID NO: 465662 - RNA, 22 nt, Human
ccaggaggcagaaguugcagug

SEQ ID NO: 465663 - RNA, 22 nt, Human
cugggcuggagugcaauggcgc

SEQ ID NO: 465664 - RNA, 22 nt, Human
uggcagagguaauucaaauccc

SEQ ID NO: 465665 - RNA, 22 nt, Human
gaugcagggcuggcaggagcuu

SEQ ID NO: 465666 - RNA, 22 nt, Human
uccagggagagccgcugcucca

SEQ ID NO: 465667 - RNA, 22 nt, Human
gagggcugauguugccaccuca

SEQ ID NO: 465668 - RNA, 22 nt, Human
auggcagagaaagcgagccaca

SEQ ID NO: 465669 - RNA, 22 nt, Human
agagccugcaucaggcuugggg

SEQ ID NO: 465670 - RNA, 22 nt, Human
cacaggaggaggugcccgggcc

SEQ ID NO: 465671 - RNA, 19 nt, Human
uggcagaggcaguuuguac

SEQ ID NO: 465672 - RNA, 22 nt, Human
ugauuuccccagucuugcugcu

SEQ ID NO: 465673 - RNA, 22 nt, Human
gcacagggagcaggucucuggu

SEQ ID NO: 465674 - RNA, 22 nt, Human
aggcacaggccucagcacccag

SEQ ID NO: 465675 - RNA, 22 nt, Human
uccugccucacaguugaaguuu

SEQ ID NO: 465676 - RNA, 22 nt, Human
uugaaaaaauugguagaggaug

SEQ ID NO: 465677 - RNA, 22 nt, Human
ggugaagguggaacgcagagca

SEQ ID NO: 465678 - RNA, 21 nt, Human
aagaagcaauuuauuggaagg

SEQ ID NO: 465679 - RNA, 22 nt, Human
aaggagaguacaggaguuggua

SEQ ID NO: 465680 - RNA, 22 nt, Human
ugcagcugaggccagcuaugcc

SEQ ID NO: 465681 - RNA, 22 nt, Human
ggagcuguaacgagccauugcu

SEQ ID NO: 465682 - RNA, 22 nt, Human
accaaaggcagagcugaacacu

SEQ ID NO: 465683 - RNA, 22 nt, Human
uagggcugugucuccaggacca

SEQ ID NO: 465684 - RNA, 22 nt, Human
gaaaaugugucaucccuacugu

SEQ ID NO: 465685 - RNA, 22 nt, Human
gagcugccaguguaugaauucu

SEQ ID NO: 465686 - RNA, 18 nt, Human
gggcacuggggacuggag

SEQ ID NO: 465687 - RNA, 22 nt, Human
uccuuuguugagauaaauuggg

SEQ ID NO: 465688 - RNA, 22 nt, Human
ugugacaucgcugugucuguuu

SEQ ID NO: 465689 - RNA, 22 nt, Human
ccaaguacagauuccuccacug

SEQ ID NO: 465690 - RNA, 22 nt, Human
agggccaccagagcagggcagu

SEQ ID NO: 465691 - RNA, 22 nt, Human
cagcuuugccaaguaaggucuu

SEQ ID NO: 465692 - RNA, 22 nt, Human
acacacuguugcucauccaggc

SEQ ID NO: 465693 - RNA, 23 nt, Human
uggggcugauggagacggaccag

SEQ ID NO: 465694 - RNA, 22 nt, Human
aauguguacaugacagauagaa

SEQ ID NO: 465695 - RNA, 22 nt, Human
aggcugcuucagcugcagggag

SEQ ID NO: 465696 - RNA, 22 nt, Human
ugcuuccugaggccgucuucuc

SEQ ID NO: 465697 - RNA, 22 nt, Human
cugcuguggaugcaggaccuca

SEQ ID NO: 465698 - RNA, 22 nt, Human
ccaggaguuugaggcugcagug

SEQ ID NO: 465699 - RNA, 22 nt, Human
ccaaggagcaaggcucaacaag

SEQ ID NO: 465700 - RNA, 22 nt, Human
gacagggcgagacucagucuca

SEQ ID NO: 465701 - RNA, 22 nt, Human
uggcucaggagggaucuuugcu

SEQ ID NO: 465702 - RNA, 22 nt, Human
ucaucacauaugucaugauuug

SEQ ID NO: 465703 - RNA, 22 nt, Human
caggcagcucgaugccuuguug

SEQ ID NO: 465704 - RNA, 22 nt, Human
acagcuuuguuuucccugcuga

SEQ ID NO: 465705 - RNA, 22 nt, Human
aaaauccacaacgcucauuuca

SEQ ID NO: 465706 - RNA, 22 nt, Human
uagcagggucucaggagucagg

SEQ ID NO: 465707 - RNA, 22 nt, Human
gccaggcugcuggcugcugucc

SEQ ID NO: 465708 - RNA, 22 nt, Human
uccaucaccacagaggacagag

SEQ ID NO: 465709 - RNA, 23 nt, Human
ccuggaguacuaaggggauggaa

SEQ ID NO: 465710 - RNA, 22 nt, Human
caggugggccaugaaaaaugac

SEQ ID NO: 465711 - RNA, 22 nt, Human
uccucagggaagaugagccuca

SEQ ID NO: 465712 - RNA, 22 nt, Human
agagccuguacuuuucugugaa

SEQ ID NO: 465713 - RNA, 22 nt, Human
aggcgugggaggaucugaggcc

SEQ ID NO: 465714 - RNA, 22 nt, Human
aggaaaugcugaugcuccugga

SEQ ID NO: 465715 - RNA, 22 nt, Human
augucuuucgcaucaguagcua

SEQ ID NO: 465716 - RNA, 22 nt, Human
cagggcccagucccugcuguca

SEQ ID NO: 465717 - RNA, 22 nt, Human
cagcaagauuuuuaaagcaagg

SEQ ID NO: 465718 - RNA, 22 nt, Human
uaccaggcagcugcacagaggc

SEQ ID NO: 465719 - RNA, 23 nt, Human
gagguacagcaccagugaauagg

SEQ ID NO: 465720 - RNA, 22 nt, Human
augaacacauguacacauuucu

SEQ ID NO: 465721 - RNA, 22 nt, Human
gcugagggcuguaacagcagag

SEQ ID NO: 465722 - RNA, 22 nt, Human
caguguuucugaguuccagcuc

SEQ ID NO: 465723 - RNA, 20 nt, Human
agucccagaucaaauuucug

SEQ ID NO: 465724 - RNA, 17 nt, Human
aagacagaagccaugag

SEQ ID NO: 465725 - RNA, 22 nt, Human
gccucugcggggcccgagcccg

SEQ ID NO: 465726 - RNA, 22 nt, Human
augaaggcuguguagauggaug

SEQ ID NO: 465727 - RNA, 22 nt, Human
ugggcuggugagggaucauuua

SEQ ID NO: 465728 - RNA, 22 nt, Human
gugugcagugagcaaaagaucu

SEQ ID NO: 465729 - RNA, 22 nt, Human
auguaacacccacuuuuauagc

SEQ ID NO: 465730 - RNA, 22 nt, Human
agggccuggcuucacuuucuca

SEQ ID NO: 465731 - RNA, 22 nt, Human
gcacacagauuaggaaacagaa

SEQ ID NO: 465732 - RNA, 22 nt, Human
uggguaggccaggaagcagugu

SEQ ID NO: 465733 - RNA, 22 nt, Human
uggcucugaccagguagaggag

SEQ ID NO: 465734 - RNA, 22 nt, Human
ugccucugugggccuuccuggc

SEQ ID NO: 465735 - RNA, 22 nt, Human
uuguccaaggucccacaguuag

SEQ ID NO: 465736 - RNA, 22 nt, Human
uccugggcugugugccacucug

SEQ ID NO: 465737 - RNA, 19 nt, Human
cuuauuagagugagagcuu

SEQ ID NO: 465738 - RNA, 22 nt, Human
ugggccuggagcccuggagagu

SEQ ID NO: 465739 - RNA, 22 nt, Human
uggcugaaucugcagcaggaag

SEQ ID NO: 465740 - RNA, 22 nt, Human
uuacuuuguucucaagauaugu

SEQ ID NO: 465741 - RNA, 22 nt, Human
ucagaggauuggacuuuuaugu

SEQ ID NO: 465742 - RNA, 22 nt, Human
uaagauaugguaggaaguuugg

SEQ ID NO: 465743 - RNA, 22 nt, Human
cuucccagaccuuagagugcag

SEQ ID NO: 465744 - RNA, 22 nt, Human
gcagaacauuucacaguaucuu

SEQ ID NO: 465745 - RNA, 22 nt, Human
uccagggaaggugugaggcugg

SEQ ID NO: 465746 - RNA, 22 nt, Human
cagucucuugcuucauuaguug

SEQ ID NO: 465747 - RNA, 22 nt, Human
cacagaagaaucaugcuguguu

SEQ ID NO: 465748 - RNA, 22 nt, Human
gagucacaaaagaugcccaggg

SEQ ID NO: 465749 - RNA, 22 nt, Human
agaaaucaugacuaagagcagu

SEQ ID NO: 465750 - RNA, 22 nt, Human
agaggaaguaaucaggaccugc

SEQ ID NO: 465751 - RNA, 22 nt, Human
cucucuggcuuggcacggagau

SEQ ID NO: 465752 - RNA, 22 nt, Human
ucccaaggccaggcaucuagaa

SEQ ID NO: 465753 - RNA, 22 nt, Human
ucagggcauguauguuucuuua

SEQ ID NO: 465754 - RNA, 22 nt, Human
cagccugggcuccagagucccu

SEQ ID NO: 465755 - RNA, 22 nt, Human
ccucugccaccucccacgaggc

SEQ ID NO: 465756 - RNA, 22 nt, Human
agcauggggcuccgcaaugaac

SEQ ID NO: 465757 - RNA, 22 nt, Human
gcccaugcacuuucugugaugg

SEQ ID NO: 465758 - RNA, 22 nt, Human
aggcucagggacggggccccuu

SEQ ID NO: 465759 - RNA, 22 nt, Human
uguucuugggaaucuuacaguu

SEQ ID NO: 465760 - RNA, 19 nt, Human
agagaaggauccuaugguu

SEQ ID NO: 465761 - RNA, 22 nt, Human
auaguuuucuaugcacuguuau

SEQ ID NO: 465762 - RNA, 22 nt, Human
cagggccugcuuccuucuuguu

SEQ ID NO: 465763 - RNA, 22 nt, Human
uagcuuuaaugaguugguaaga

SEQ ID NO: 465764 - RNA, 22 nt, Human
uucuugcaggucacucacugag

SEQ ID NO: 465765 - RNA, 21 nt, Human
aucagcaaaugccugucuccc

SEQ ID NO: 465766 - RNA, 22 nt, Human
ucuguacacuucagcaugcauc

SEQ ID NO: 465767 - RNA, 22 nt, Human
caggaggcagagguugcaguga

SEQ ID NO: 465768 - RNA, 22 nt, Human
uuauuauaaugagggauaaaaa

SEQ ID NO: 465769 - RNA, 22 nt, Human
ugaaggaaaugacggcagaaga

SEQ ID NO: 465770 - RNA, 22 nt, Human
gaggaugugucuggucugggca

SEQ ID NO: 465771 - RNA, 16 nt, Human
gagccaggugccuuga

SEQ ID NO: 465772 - RNA, 22 nt, Human
uauuaucauugguaauaugguc

SEQ ID NO: 465773 - RNA, 22 nt, Human
guuagggaucaggaacaagagc

SEQ ID NO: 465774 - RNA, 22 nt, Human
guggagcccugccuugcucaug

SEQ ID NO: 465775 - RNA, 22 nt, Human
ugugucagagguagagauggca

SEQ ID NO: 465776 - RNA, 22 nt, Human
aucaggaucacugggagucuug

SEQ ID NO: 465777 - RNA, 22 nt, Human
cauugcacaucugagaagagau

SEQ ID NO: 465778 - RNA, 22 nt, Human
ugauugaacugagcuucaagau

SEQ ID NO: 465779 - RNA, 22 nt, Human
cugaaggagaaggccacuguuc

SEQ ID NO: 465780 - RNA, 22 nt, Human
aguaacuaugcuugagaaucag

SEQ ID NO: 465781 - RNA, 22 nt, Human
cauuuauucauuugcuagggcu

SEQ ID NO: 465782 - RNA, 22 nt, Human
uucccucuccuacucaggaaag

SEQ ID NO: 465783 - RNA, 22 nt, Human
ucccacuggacgucugugcugg

SEQ ID NO: 465784 - RNA, 22 nt, Human
uccaggcauuccagccauucca

SEQ ID NO: 465785 - RNA, 22 nt, Human
uggccucucuaccaggcagccu

SEQ ID NO: 465786 - RNA, 18 nt, Human
uuccauaauguauguaac

SEQ ID NO: 465787 - RNA, 22 nt, Human
aggagcugcuuaaaugguuggu

SEQ ID NO: 465788 - RNA, 23 nt, Human
uggccucuccccaccuggcagaa

SEQ ID NO: 465789 - RNA, 22 nt, Human
ccaggugcucuugccagggcug

SEQ ID NO: 465790 - RNA, 22 nt, Human
gcacagggcugccaggcggcuu

SEQ ID NO: 465791 - RNA, 22 nt, Human
ccuuaaaagaacuaucucuucu

SEQ ID NO: 465792 - RNA, 22 nt, Human
cacaggcuuccaguccccagcu

SEQ ID NO: 465793 - RNA, 22 nt, Human
uagaaguuaaaggaauacagaa

SEQ ID NO: 465794 - RNA, 22 nt, Human
ucagaggauagaaauacuuauu

SEQ ID NO: 465795 - RNA, 22 nt, Human
cagggcuggguuaaaagcaggg

SEQ ID NO: 465796 - RNA, 22 nt, Human
gaauuagguaauagaacuagua

SEQ ID NO: 465797 - RNA, 22 nt, Human
uaugcauaauuggauaaguaga

SEQ ID NO: 465798 - RNA, 22 nt, Human
caaaugcaggucauaaccugag

SEQ ID NO: 465799 - RNA, 23 nt, Human
ugcaggggaggcuuaaagcaggu

SEQ ID NO: 465800 - RNA, 22 nt, Human
agacucugauucccucauguca

SEQ ID NO: 465801 - RNA, 22 nt, Human
cccucccagaugggcuugaggu

SEQ ID NO: 465802 - RNA, 22 nt, Human
ugucugucugcaagccagaaag

SEQ ID NO: 465803 - RNA, 22 nt, Human
cauucacagagggggaagcauc

SEQ ID NO: 465804 - RNA, 18 nt, Human
aguaguggguuuagcuuc

SEQ ID NO: 465805 - RNA, 21 nt, Human
ugcucacagaugugcucagug

SEQ ID NO: 465806 - RNA, 22 nt, Human
uacauaauugucuuuguccuca

SEQ ID NO: 465807 - RNA, 22 nt, Human
ucuccugguuuguuaaauaauu

SEQ ID NO: 465808 - RNA, 22 nt, Human
uguaugcuuuccaaaaaugcug

SEQ ID NO: 465809 - RNA, 19 nt, Human
ccugcagggaugagagguu

SEQ ID NO: 465810 - RNA, 22 nt, Human
agaaaugcauuagcacauauag

SEQ ID NO: 465811 - RNA, 22 nt, Human
cccucugcucaggugcauaggc

SEQ ID NO: 465812 - RNA, 22 nt, Human
gcagcccagguguagcucuuug

SEQ ID NO: 465813 - RNA, 22 nt, Human
uccauuuucuaaguaucacuua

SEQ ID NO: 465814 - RNA, 22 nt, Human
uuuguucaugccuauauucuca

SEQ ID NO: 465815 - RNA, 22 nt, Human
uggaggaaucagggcuuaggcu

SEQ ID NO: 465816 - RNA, 22 nt, Human
cugaggagagaucacguggugu

SEQ ID NO: 465817 - RNA, 22 nt, Human
ugucccucauugacgcugugcc

SEQ ID NO: 465818 - RNA, 22 nt, Human
augagcuucccagacaggaugg

SEQ ID NO: 465819 - RNA, 20 nt, Human
agccugccagcuggcccaga

SEQ ID NO: 465820 - RNA, 22 nt, Human
cagcaauaaugucuacaaaucu

SEQ ID NO: 465821 - RNA, 22 nt, Human
cagccugcagggcugccuguug

SEQ ID NO: 465822 - RNA, 21 nt, Human
gccagccuguuuaccuguggu

SEQ ID NO: 465823 - RNA, 22 nt, Human
ccagcugcuugggaaaaugucu

SEQ ID NO: 465824 - RNA, 22 nt, Human
ugggcagauuaaugcaguggcu

SEQ ID NO: 465825 - RNA, 22 nt, Human
aauuagggaaaauuuacuugua

SEQ ID NO: 465826 - RNA, 22 nt, Human
aucagagaaauggagggcgcuu

SEQ ID NO: 465827 - RNA, 22 nt, Human
uuguuuugcuaaagggucauca

SEQ ID NO: 465828 - RNA, 22 nt, Human
gucccagaggacagggucacau

SEQ ID NO: 465829 - RNA, 21 nt, Human
guccagagagccggcuccuga

SEQ ID NO: 465830 - RNA, 22 nt, Human
gcucaggaucagccaccucuuu

SEQ ID NO: 465831 - RNA, 22 nt, Human
agucucuuggcauucugaaaca

SEQ ID NO: 465832 - RNA, 22 nt, Human
aaauauguaagauuagcacuag

SEQ ID NO: 465833 - RNA, 22 nt, Human
augggcagagcuggugggaggc

SEQ ID NO: 465834 - RNA, 22 nt, Human
uggaccugggguggccuccucu

SEQ ID NO: 465835 - RNA, 21 nt, Human
agggcagauuagcuguaagag

SEQ ID NO: 465836 - RNA, 22 nt, Human
auuauucaacacuugagaaauu

SEQ ID NO: 465837 - RNA, 22 nt, Human
uccugcagacauuuacaccuuu

SEQ ID NO: 465838 - RNA, 22 nt, Human
uauguacaguccuuaacuuaaa

SEQ ID NO: 465839 - RNA, 18 nt, Human
gcugccugcauuccucac

SEQ ID NO: 465840 - RNA, 22 nt, Human
cuucuggaggacacuggcccca

SEQ ID NO: 465841 - RNA, 22 nt, Human
aaguugagaugucauaggagac

SEQ ID NO: 465842 - RNA, 22 nt, Human
ccaguggacuucucccuguggu

SEQ ID NO: 465843 - RNA, 22 nt, Human
accaucagagcacaguccgugc

SEQ ID NO: 465844 - RNA, 20 nt, Human
ccagcugagccaaggggaga

SEQ ID NO: 465845 - RNA, 22 nt, Human
agugguaacuaaguccugcuua

SEQ ID NO: 465846 - RNA, 18 nt, Human
aggaagcaggaggaaggc

SEQ ID NO: 465847 - RNA, 22 nt, Human
acagagguaggacaugagauau

SEQ ID NO: 465848 - RNA, 22 nt, Human
gcuguuccugcuuagaggucgg

SEQ ID NO: 465849 - RNA, 22 nt, Human
cuugccuucuguuccuauagaa

SEQ ID NO: 465850 - RNA, 22 nt, Human
ugaggcucagaagugccaagug

SEQ ID NO: 465851 - RNA, 22 nt, Human
gauuucaaccuaacaguaugac

SEQ ID NO: 465852 - RNA, 22 nt, Human
aaggcucuuggagugaaugcag

SEQ ID NO: 465853 - RNA, 22 nt, Human
ccagcugucacucagaaaggcc

SEQ ID NO: 465854 - RNA, 22 nt, Human
aagagcuggauugugcugcaga

SEQ ID NO: 465855 - RNA, 23 nt, Human
aagcugccagucugaagccuggg

SEQ ID NO: 465856 - RNA, 22 nt, Human
ucagggaccccucugaguggag

SEQ ID NO: 465857 - RNA, 22 nt, Human
uucucuucaucucaguaaaugu

SEQ ID NO: 465858 - RNA, 22 nt, Human
ucccagagcaguacuccaggag

SEQ ID NO: 465859 - RNA, 22 nt, Human
ggccucucucccuggcuugcag

SEQ ID NO: 465860 - RNA, 22 nt, Human
uagauuuuacuucugucauuac

SEQ ID NO: 465861 - RNA, 22 nt, Human
cagcaaaagccagcauaagcuc

SEQ ID NO: 465862 - RNA, 22 nt, Human
uuucauaaccucaagcuacagu

SEQ ID NO: 465863 - RNA, 22 nt, Human
auaugcauaugucaaaacuuau

SEQ ID NO: 465864 - RNA, 22 nt, Human
gcuggccacauugugccguccu

SEQ ID NO: 465865 - RNA, 22 nt, Human
uagugauuaaaggcagaauguu

SEQ ID NO: 465866 - RNA, 23 nt, Human
uccuccuuuugcuugugcuuccc

SEQ ID NO: 465867 - RNA, 22 nt, Human
uccaggcuggaaaugucaaacu

SEQ ID NO: 465868 - RNA, 22 nt, Human
uggcucugggaaucuguugcuu

SEQ ID NO: 465869 - RNA, 22 nt, Human
cagagcugcaaaugccccuccg

SEQ ID NO: 465870 - RNA, 22 nt, Human
cugugacuguguuggaugcaca

SEQ ID NO: 465871 - RNA, 22 nt, Human
ugguuuauuucucugaaagguu

SEQ ID NO: 465872 - RNA, 22 nt, Human
ugcuggcccaguauggacugca

SEQ ID NO: 465873 - RNA, 22 nt, Human
ugaggccagugacauauauuaa

SEQ ID NO: 465874 - RNA, 22 nt, Human
gcaggccagcugugcagauggg

SEQ ID NO: 465875 - RNA, 22 nt, Human
gagguagcaugcuggaagggac

SEQ ID NO: 465876 - RNA, 22 nt, Human
agcaauauuuaaagguuugcaa

SEQ ID NO: 465877 - RNA, 22 nt, Human
ccucucuguaagggucccuccc

SEQ ID NO: 465878 - RNA, 22 nt, Human
ucuacagacagagcagguggga

SEQ ID NO: 465879 - RNA, 22 nt, Human
caggagcaugcugaugccagaa

SEQ ID NO: 465880 - RNA, 22 nt, Human
ugggcucugaagucagucugcu

SEQ ID NO: 465881 - RNA, 22 nt, Human
aagagcugauuaagucaugagg

SEQ ID NO: 465882 - RNA, 22 nt, Human
agagaauuacagaagaauguca

SEQ ID NO: 465883 - RNA, 22 nt, Human
ugcauacacaugugcacauacg

SEQ ID NO: 465884 - RNA, 22 nt, Human
aaggaagggaaauagugauguc

SEQ ID NO: 465885 - RNA, 22 nt, Human
ccuggcaggccccuccuggauu

SEQ ID NO: 465886 - RNA, 22 nt, Human
auuaaauuggacgcugggggaa

SEQ ID NO: 465887 - RNA, 22 nt, Human
ccuucucuacuccugaugcaug

SEQ ID NO: 465888 - RNA, 22 nt, Human
uagcuguguagacacucagagc

SEQ ID NO: 465889 - RNA, 22 nt, Human
cuguccucaacccauccuucuc

SEQ ID NO: 465890 - RNA, 17 nt, Human
gacaagacagaauucau

SEQ ID NO: 465891 - RNA, 22 nt, Human
agcuuuauauguuguuucucca

SEQ ID NO: 465892 - RNA, 22 nt, Human
uggucaggcugcucugcggcgu

SEQ ID NO: 465893 - RNA, 22 nt, Human
aggcagguuucccggcugucaa

SEQ ID NO: 465894 - RNA, 21 nt, Human
ggcagcugaccgcgcggugca

SEQ ID NO: 465895 - RNA, 22 nt, Human
cagaggcacaagaaagcaaggc

SEQ ID NO: 465896 - RNA, 22 nt, Human
ugcuuaaacauacuauuuauau

SEQ ID NO: 465897 - RNA, 22 nt, Human
aggggccauuguucugcccgcu

SEQ ID NO: 465898 - RNA, 22 nt, Human
agcagagcuauucuugugcaau

SEQ ID NO: 465899 - RNA, 22 nt, Human
aguguggguuuuauggagcccu

SEQ ID NO: 465900 - RNA, 22 nt, Human
auuuauuaugggauuuggcuca

SEQ ID NO: 465901 - RNA, 22 nt, Human
aggaguguggccagggcucugg

SEQ ID NO: 465902 - RNA, 22 nt, Human
gauugaaacauaggcagucgag

SEQ ID NO: 465903 - RNA, 22 nt, Human
accaggcaugauguggagcaca

SEQ ID NO: 465904 - RNA, 22 nt, Human
ugauugaagaggugaggaaguu

SEQ ID NO: 465905 - RNA, 22 nt, Human
cauuuacuuaaaucuuuacaag

SEQ ID NO: 465906 - RNA, 22 nt, Human
ggugcagcugcagccugggagc

SEQ ID NO: 465907 - RNA, 22 nt, Human
cauagcaacagcaucaagucaa

SEQ ID NO: 465908 - RNA, 22 nt, Human
cccagcuccgagcuccgagccg

SEQ ID NO: 465909 - RNA, 22 nt, Human
uugauaaaaugauaucuucuuu

SEQ ID NO: 465910 - RNA, 22 nt, Human
uacaaagauaguguuagaguaa

SEQ ID NO: 465911 - RNA, 22 nt, Human
accucuggccuucaggcaucau

SEQ ID NO: 465912 - RNA, 22 nt, Human
ucuuccagcaaugugaaaucac

SEQ ID NO: 465913 - RNA, 22 nt, Human
gcagaauguaggccuucagugu

SEQ ID NO: 465914 - RNA, 22 nt, Human
augcugaggacaaagagaucaa

SEQ ID NO: 465915 - RNA, 22 nt, Human
agugacugggcagggcagggcc

SEQ ID NO: 465916 - RNA, 22 nt, Human
cucaggauguacuacagaaggc

SEQ ID NO: 465917 - RNA, 22 nt, Human
gaaugcagauggcugguguaug

SEQ ID NO: 465918 - RNA, 22 nt, Human
uggcuucugggacuugugagca

SEQ ID NO: 465919 - RNA, 18 nt, Human
agcagcugucagaaugcc

SEQ ID NO: 465920 - RNA, 22 nt, Human
cagugguauuugagagaaugga

SEQ ID NO: 465921 - RNA, 22 nt, Human
gcugucccaugguugcaagaug

SEQ ID NO: 465922 - RNA, 22 nt, Human
uuacaagauaaccugaugcugu

SEQ ID NO: 465923 - RNA, 22 nt, Human
cuggugggagcagcaggcagcu

SEQ ID NO: 465924 - RNA, 22 nt, Human
agcugacucuggccucuggucc

SEQ ID NO: 465925 - RNA, 18 nt, Human
gcagcugcaguuguagcu

SEQ ID NO: 465926 - RNA, 22 nt, Human
guacauguugguuguuuccagu

SEQ ID NO: 465927 - RNA, 22 nt, Human
aauguacaaggguuccaguuuu

SEQ ID NO: 465928 - RNA, 22 nt, Human
ugcuuuaucaaagcuauaguga

SEQ ID NO: 465929 - RNA, 22 nt, Human
gagcucccuggagguucagaua

SEQ ID NO: 465930 - RNA, 22 nt, Human
agcccuccucacaucagcgucc

SEQ ID NO: 465931 - RNA, 17 nt, Human
ucagcaggggccaagcu

SEQ ID NO: 465932 - RNA, 22 nt, Human
acaggugggcuuaagagucggc

SEQ ID NO: 465933 - RNA, 20 nt, Human
gacauucauaguuauuacca

SEQ ID NO: 465934 - RNA, 22 nt, Human
ucuuugcauggacauguguuuu

SEQ ID NO: 465935 - RNA, 22 nt, Human
agggugccugcugcagguucag

SEQ ID NO: 465936 - RNA, 22 nt, Human
gcacccagaauaaggacaggac

SEQ ID NO: 465937 - RNA, 22 nt, Human
ccaaugauggugcccacgauga

SEQ ID NO: 465938 - RNA, 22 nt, Human
ucccagagccucugccacucug

SEQ ID NO: 465939 - RNA, 22 nt, Human
gcauuucuuccuggugugagcc

SEQ ID NO: 465940 - RNA, 22 nt, Human
cugugucucuccuuacaagacu

SEQ ID NO: 465941 - RNA, 22 nt, Human
uacauuugcuuugauuuucagc

SEQ ID NO: 465942 - RNA, 21 nt, Human
uuacuuuugcaccaaccuaau

SEQ ID NO: 465943 - RNA, 17 nt, Human
auccccagcaucuagaa

SEQ ID NO: 465944 - RNA, 22 nt, Human
augagcugugggauuccagagg

SEQ ID NO: 465945 - RNA, 22 nt, Human
ggagccugacagugcccagcau

SEQ ID NO: 465946 - RNA, 22 nt, Human
cuucucucugcauaggcauggg

SEQ ID NO: 465947 - RNA, 22 nt, Human
gugucacaugguuuacugcagc

SEQ ID NO: 465948 - RNA, 22 nt, Human
aagggcagcuuaaauugguagc

SEQ ID NO: 465949 - RNA, 22 nt, Human
agggcagaaaucgauuacaccu

SEQ ID NO: 465950 - RNA, 22 nt, Human
cucaccacagagccuguccagc

SEQ ID NO: 465951 - RNA, 22 nt, Human
agguacagggugaaaguuuaug

SEQ ID NO: 465952 - RNA, 22 nt, Human
gaggccagaagucugagaucag

SEQ ID NO: 465953 - RNA, 22 nt, Human
cuuucacagcacaagccugccu

SEQ ID NO: 465954 - RNA, 21 nt, Human
guauugcagaguuaugugcuc

SEQ ID NO: 465955 - RNA, 22 nt, Human
ccagagagaaauggauuugagu

SEQ ID NO: 465956 - RNA, 22 nt, Human
gagugagggcagcaggggcugc

SEQ ID NO: 465957 - RNA, 22 nt, Human
uuucacaaguuucaggauucug

SEQ ID NO: 465958 - RNA, 22 nt, Human
uggcagcuccggguaggggcug

SEQ ID NO: 465959 - RNA, 22 nt, Human
gacaggggucccucugggcugu

SEQ ID NO: 465960 - RNA, 22 nt, Human
ccacucugcugugcuccaugau

SEQ ID NO: 465961 - RNA, 23 nt, Human
ccaggccucucagagggugugcc

SEQ ID NO: 465962 - RNA, 22 nt, Human
gcugucugcaagccaggaaaug

SEQ ID NO: 465963 - RNA, 22 nt, Human
ggcucaggaccugggauugcca

SEQ ID NO: 465964 - RNA, 22 nt, Human
ucaggaguaaagacagaguucc

SEQ ID NO: 465965 - RNA, 22 nt, Human
ggcacugaaccaggacacaagc

SEQ ID NO: 465966 - RNA, 22 nt, Human
uucugaggcacuggcucuccca

SEQ ID NO: 465967 - RNA, 22 nt, Human
ugccugaggagucagggcaggu

SEQ ID NO: 465968 - RNA, 23 nt, Human
agaugaaagcuucccaucacagu

SEQ ID NO: 465969 - RNA, 17 nt, Human
agcagcuggguugaucu

SEQ ID NO: 465970 - RNA, 22 nt, Human
caggaggaaaugugacccugcu

SEQ ID NO: 465971 - RNA, 22 nt, Human
cagaauuuuucgaauguacugu

SEQ ID NO: 465972 - RNA, 22 nt, Human
gcuguggccuggcgcagagcug

SEQ ID NO: 465973 - RNA, 21 nt, Human
ugggaccuauuucaacuggau

SEQ ID NO: 465974 - RNA, 19 nt, Human
cucugccucuggcuguggc

SEQ ID NO: 465975 - RNA, 22 nt, Human
uuguauuagcuguaaauuuucu

SEQ ID NO: 465976 - RNA, 22 nt, Human
ccagcaugagacgaugaugaag

SEQ ID NO: 465977 - RNA, 22 nt, Human
caggauggucucgaucuccuga

SEQ ID NO: 465978 - RNA, 22 nt, Human
agacccugcaccucucgugggc

SEQ ID NO: 465979 - RNA, 22 nt, Human
aaaagguagauucuccuucuau

SEQ ID NO: 465980 - RNA, 22 nt, Human
gucuuguuugggauguggaugg

SEQ ID NO: 465981 - RNA, 22 nt, Human
ucucagggagggcgagucagcg

SEQ ID NO: 465982 - RNA, 20 nt, Human
gaagcagcuucauguagaca

SEQ ID NO: 465983 - RNA, 22 nt, Human
ucuuuccuaggugauaugcaau

SEQ ID NO: 465984 - RNA, 22 nt, Human
ucugccuuccccauaaucugau

SEQ ID NO: 465985 - RNA, 22 nt, Human
aggaggggcauagaaauguaau

SEQ ID NO: 465986 - RNA, 22 nt, Human
augcagaaggagccaugcuugc

SEQ ID NO: 465987 - RNA, 22 nt, Human
uaugcacauuaucuaauccauu

SEQ ID NO: 465988 - RNA, 20 nt, Human
ucacaucuggcagcugauga

SEQ ID NO: 465989 - RNA, 22 nt, Human
auacaaagcuuucugucuggua

SEQ ID NO: 465990 - RNA, 22 nt, Human
ugaauaaacuaugaggaggaau

SEQ ID NO: 465991 - RNA, 22 nt, Human
uagcugccuuugggcuccugcu

SEQ ID NO: 465992 - RNA, 21 nt, Human
uucuacaggaugaaugaaaac

SEQ ID NO: 465993 - RNA, 22 nt, Human
uacaggaggauuaucaaaggau

SEQ ID NO: 465994 - RNA, 22 nt, Human
gccaguggcccucuggagaagg

SEQ ID NO: 465995 - RNA, 22 nt, Human
uccuggccucacaguccugggu

SEQ ID NO: 465996 - RNA, 22 nt, Human
cccagcccaucucaaaggucua

SEQ ID NO: 465997 - RNA, 22 nt, Human
uucagucuccucauuuuacaaa

SEQ ID NO: 465998 - RNA, 22 nt, Human
uggcucuguuuguuaacuagac

SEQ ID NO: 465999 - RNA, 22 nt, Human
ugggcuccuugggagcaaguga

SEQ ID NO: 466000 - RNA, 21 nt, Human
aucaccagcagaagcugcaga

SEQ ID NO: 466001 - RNA, 22 nt, Human
gagcagcuccagccgcaugacu

SEQ ID NO: 466002 - RNA, 22 nt, Human
agccacagagagggagcugcaa

SEQ ID NO: 466003 - RNA, 22 nt, Human
caguacuuaacuuauaggagag

SEQ ID NO: 466004 - RNA, 22 nt, Human
uccucaggcggugaggaggggc

SEQ ID NO: 466005 - RNA, 22 nt, Human
acaacugucaguaaagaauauu

SEQ ID NO: 466006 - RNA, 22 nt, Human
caguccuguguuaaacaagagc

SEQ ID NO: 466007 - RNA, 22 nt, Human
uuacacaacagugcaucagcag

SEQ ID NO: 466008 - RNA, 22 nt, Human
cauggcccucuucuggagcaau

SEQ ID NO: 466009 - RNA, 22 nt, Human
agaguccauaugugggaggagu

SEQ ID NO: 466010 - RNA, 22 nt, Human
aaaucugggucaagguggagug

SEQ ID NO: 466011 - RNA, 22 nt, Human
cucaagacugaucgcaguggaa

SEQ ID NO: 466012 - RNA, 22 nt, Human
ugcagccauuuucugccaaugc

SEQ ID NO: 466013 - RNA, 22 nt, Human
ggucccagaauugguuagcaca

SEQ ID NO: 466014 - RNA, 22 nt, Human
cccagagcuccgguccugccca

SEQ ID NO: 466015 - RNA, 22 nt, Human
ucuggcuccacucugugcaugc

SEQ ID NO: 466016 - RNA, 22 nt, Human
ccucagaguaggucucagcugu

SEQ ID NO: 466017 - RNA, 22 nt, Human
gcaggaagaugagcucagguaa

SEQ ID NO: 466018 - RNA, 22 nt, Human
ugggcagagaucuggaucaaac

SEQ ID NO: 466019 - RNA, 22 nt, Human
gagcugaguuaccuccagauca

SEQ ID NO: 466020 - RNA, 22 nt, Human
ucagggugaaccaggcaggaau

SEQ ID NO: 466021 - RNA, 22 nt, Human
auuccaaaggcuggccuggagg

SEQ ID NO: 466022 - RNA, 22 nt, Human
cucacuggcaagacuacaggug

SEQ ID NO: 466023 - RNA, 22 nt, Human
ggcaggagaaaggucucuucuu

SEQ ID NO: 466024 - RNA, 22 nt, Human
acauuucuccuacuuguuauuu

SEQ ID NO: 466025 - RNA, 20 nt, Human
ucuguacacucaucuucugc

SEQ ID NO: 466026 - RNA, 22 nt, Human
auacaaauuuauagaugcauuu

SEQ ID NO: 466027 - RNA, 22 nt, Human
cagcuggaggagcagcuuccag

SEQ ID NO: 466028 - RNA, 22 nt, Human
ucugucugagggagugacauuu

SEQ ID NO: 466029 - RNA, 22 nt, Human
cagaggcuguguaggcagacug

SEQ ID NO: 466030 - RNA, 22 nt, Human
gcugucugcugggucgcucagg

SEQ ID NO: 466031 - RNA, 22 nt, Human
ccagggcuccauugcucauccu

SEQ ID NO: 466032 - RNA, 22 nt, Human
gccuucugugcuccuggccuuu

SEQ ID NO: 466033 - RNA, 22 nt, Human
agagcagagggcucugggacaa

SEQ ID NO: 466034 - RNA, 22 nt, Human
gccucuggggcagcugagucau

SEQ ID NO: 466035 - RNA, 22 nt, Human
uacaaaugaccauagccacuua

SEQ ID NO: 466036 - RNA, 22 nt, Human
ugucaaauuuuuauugcaguau

SEQ ID NO: 466037 - RNA, 22 nt, Human
uacauagcaaggaaaugacaga

SEQ ID NO: 466038 - RNA, 22 nt, Human
guuauguaugagggaaugauua

SEQ ID NO: 466039 - RNA, 21 nt, Human
cacugcagccuugaccugggc

SEQ ID NO: 466040 - RNA, 22 nt, Human
agggcagaaguacagacacuua

SEQ ID NO: 466041 - RNA, 22 nt, Human
ccugucugagccagggugggca

SEQ ID NO: 466042 - RNA, 22 nt, Human
aggcucagacaggaaaaguaac

SEQ ID NO: 466043 - RNA, 22 nt, Human
uuuuuuaguuaggucagaaugu

SEQ ID NO: 466044 - RNA, 22 nt, Human
aguguccaacucagcuugucaa

SEQ ID NO: 466045 - RNA, 22 nt, Human
acuucucuucauagguggcaau

SEQ ID NO: 466046 - RNA, 22 nt, Human
ccacagagagugucagccuuug

SEQ ID NO: 466047 - RNA, 22 nt, Human
ugggccugugaugcugggcuau

SEQ ID NO: 466048 - RNA, 22 nt, Human
gcucaaggcaggcagacaugag

SEQ ID NO: 466049 - RNA, 22 nt, Human
cuacccaggcuggagugcagua

SEQ ID NO: 466050 - RNA, 22 nt, Human
ucucaguguggugcuuaggaua

SEQ ID NO: 466051 - RNA, 22 nt, Human
uaaacaaggguuacugagcaug

SEQ ID NO: 466052 - RNA, 22 nt, Human
ucgccagggaugcuguaaggaa

SEQ ID NO: 466053 - RNA, 22 nt, Human
ucgagucauguucucccauuaa

SEQ ID NO: 466054 - RNA, 22 nt, Human
aaggcagucugguuucaaagca

SEQ ID NO: 466055 - RNA, 22 nt, Human
aaaagguaguugccaaauaagg

SEQ ID NO: 466056 - RNA, 22 nt, Human
caggaaaggugugucaugaugg

SEQ ID NO: 466057 - RNA, 15 nt, Human
ugauuuccuacuaac

SEQ ID NO: 466058 - RNA, 20 nt, Human
uccuucaggcagggccuagu

SEQ ID NO: 466059 - RNA, 22 nt, Human
ucagagagugcaaaauauagcu

SEQ ID NO: 466060 - RNA, 22 nt, Human
acaugauuuuaguaucauaaua

SEQ ID NO: 466061 - RNA, 22 nt, Human
gucccagaggcuuuggccacag

SEQ ID NO: 466062 - RNA, 22 nt, Human
aggacccugagcgggcaugccg

SEQ ID NO: 466063 - RNA, 22 nt, Human
aucccuggacggcgccucccca

SEQ ID NO: 466064 - RNA, 22 nt, Human
aggccuggcaugagaccugaga

SEQ ID NO: 466065 - RNA, 23 nt, Human
ggcuggcccggggcugcuccuga

SEQ ID NO: 466066 - RNA, 22 nt, Human
ucaggcagcauuaaacuucagc

SEQ ID NO: 466067 - RNA, 22 nt, Human
ggccaccucugcccuacugagu

SEQ ID NO: 466068 - RNA, 22 nt, Human
ugggcagaaugugggauccaga

SEQ ID NO: 466069 - RNA, 22 nt, Human
cuacauuuuucaccgagccucu

SEQ ID NO: 466070 - RNA, 22 nt, Human
accaggcagcacuuuccuugca

SEQ ID NO: 466071 - RNA, 22 nt, Human
cugggugguucuaacuguugau

SEQ ID NO: 466072 - RNA, 22 nt, Human
gggcagaggcucuggcccaucc

SEQ ID NO: 466073 - RNA, 22 nt, Human
aggcaagcauugggaacagggc

SEQ ID NO: 466074 - RNA, 22 nt, Human
uagcagagaggggacaguggca

SEQ ID NO: 466075 - RNA, 22 nt, Human
caggcagcauuuacucugauga

SEQ ID NO: 466076 - RNA, 22 nt, Human
cugaggcacagugaacuucucc

SEQ ID NO: 466077 - RNA, 22 nt, Human
gcaguggggcgcugggaguugg

SEQ ID NO: 466078 - RNA, 22 nt, Human
aggugaguugguaggaaguuug

SEQ ID NO: 466079 - RNA, 22 nt, Human
ugucucugggugauucaguccu

SEQ ID NO: 466080 - RNA, 22 nt, Human
gacuuuggcaucuagacauugu

SEQ ID NO: 466081 - RNA, 22 nt, Human
caaaguuaugaaugauaagauu

SEQ ID NO: 466082 - RNA, 22 nt, Human
ugaugaaaauaugauucugagg

SEQ ID NO: 466083 - RNA, 21 nt, Human
uggaaagauucaaagaccagg

SEQ ID NO: 466084 - RNA, 22 nt, Human
ggccugugagcccuugcaugua

SEQ ID NO: 466085 - RNA, 22 nt, Human
uuggaaagcaagcuggacauac

SEQ ID NO: 466086 - RNA, 22 nt, Human
uggcugcaguucacaggagcaa

SEQ ID NO: 466087 - RNA, 22 nt, Human
gcagggacaaggcagguguucu

SEQ ID NO: 466088 - RNA, 22 nt, Human
gaaaaagugaccuugguagcua

SEQ ID NO: 466089 - RNA, 22 nt, Human
cucaggagaugacagaagguau

SEQ ID NO: 466090 - RNA, 22 nt, Human
aaggcagagggcuggaucagag

SEQ ID NO: 466091 - RNA, 22 nt, Human
auucuucacuguuucagaauga

SEQ ID NO: 466092 - RNA, 22 nt, Human
cagcuguggagggaggaaaugc

SEQ ID NO: 466093 - RNA, 22 nt, Human
aguaaacauaauuuaccuguag

SEQ ID NO: 466094 - RNA, 22 nt, Human
cuacauggagaagaaaauucuu

SEQ ID NO: 466095 - RNA, 22 nt, Human
gggacuguaaauucauauggcc

SEQ ID NO: 466096 - RNA, 22 nt, Human
gccugcagcugcuuccacacac

SEQ ID NO: 466097 - RNA, 23 nt, Human
ccugucugugcuggguggacaca

SEQ ID NO: 466098 - RNA, 22 nt, Human
cugaggccucuguucaccagaa

SEQ ID NO: 466099 - RNA, 22 nt, Human
caucauuucacuuagaugaagu

SEQ ID NO: 466100 - RNA, 22 nt, Human
agcagcagaagggagacccagg

SEQ ID NO: 466101 - RNA, 22 nt, Human
ucaaaugcuguauuguaguaau

SEQ ID NO: 466102 - RNA, 22 nt, Human
gccuggcacauugcaguggauu

SEQ ID NO: 466103 - RNA, 23 nt, Human
accaugaugggagugcaaauaag

SEQ ID NO: 466104 - RNA, 22 nt, Human
cucagggacguuagaggacagg

SEQ ID NO: 466105 - RNA, 22 nt, Human
ucccaggugaugcugaggccac

SEQ ID NO: 466106 - RNA, 22 nt, Human
cuagagggauguuaggauagca

SEQ ID NO: 466107 - RNA, 22 nt, Human
caagucaaagacuagaacuagu

SEQ ID NO: 466108 - RNA, 22 nt, Human
auaucuuuuagagcaagcuugu

SEQ ID NO: 466109 - RNA, 21 nt, Human
ccugagggugguugugaagau

SEQ ID NO: 466110 - RNA, 22 nt, Human
cagaggcagacccuccagggcg

SEQ ID NO: 466111 - RNA, 22 nt, Human
ugaggcagugcugggaagccug

SEQ ID NO: 466112 - RNA, 22 nt, Human
ugaagaauguugcagugagcau

SEQ ID NO: 466113 - RNA, 22 nt, Human
gcugcaggcgccugcggucucu

SEQ ID NO: 466114 - RNA, 22 nt, Human
ggccuggaaugcuuuccuacca

SEQ ID NO: 466115 - RNA, 22 nt, Human
gcagccccaggagacgcccagg

SEQ ID NO: 466116 - RNA, 22 nt, Human
guggccuuuccugaagaaauga

SEQ ID NO: 466117 - RNA, 22 nt, Human
ucucuggaguauaaccagggau

SEQ ID NO: 466118 - RNA, 17 nt, Human
aaguccagccugcagcu

SEQ ID NO: 466119 - RNA, 19 nt, Human
uuagaaacuguugacacug

SEQ ID NO: 466120 - RNA, 22 nt, Human
ggcaggaggugaguggcgggug

SEQ ID NO: 466121 - RNA, 22 nt, Human
uggcaggguuggccaccuuacc

SEQ ID NO: 466122 - RNA, 22 nt, Human
uccuggccugucuggaguagcu

SEQ ID NO: 466123 - RNA, 22 nt, Human
gcucugaggcugggagcacucu

SEQ ID NO: 466124 - RNA, 22 nt, Human
ggcucugcugguaagaugccuc

SEQ ID NO: 466125 - RNA, 22 nt, Human
caggccagugugcuucccaggc

SEQ ID NO: 466126 - RNA, 22 nt, Human
gagccugcccagcccuguccac

SEQ ID NO: 466127 - RNA, 22 nt, Human
cugcuuccauggucuggagacu

SEQ ID NO: 466128 - RNA, 22 nt, Human
gcagggacaucuucagaucacu

SEQ ID NO: 466129 - RNA, 18 nt, Human
ucugggcuucccgaggcu

SEQ ID NO: 466130 - RNA, 22 nt, Human
agcugcagagguuugugcaaca

SEQ ID NO: 466131 - RNA, 22 nt, Human
gcaguggcaccgcuggcucugg

SEQ ID NO: 466132 - RNA, 22 nt, Human
acccucccauuuccauguagca

SEQ ID NO: 466133 - RNA, 22 nt, Human
agugucugaaccaccggggcau

SEQ ID NO: 466134 - RNA, 22 nt, Human
gcagggcaguaagagcuagagu

SEQ ID NO: 466135 - RNA, 22 nt, Human
acacacacaagcagguugugga

SEQ ID NO: 466136 - RNA, 22 nt, Human
uuagggacagcucuguagguga

SEQ ID NO: 466137 - RNA, 22 nt, Human
gcguggugcugcccugcacaca

SEQ ID NO: 466138 - RNA, 22 nt, Human
gaauuugaaaagugaugggaau

SEQ ID NO: 466139 - RNA, 19 nt, Human
uugaggggccaggggagau

SEQ ID NO: 466140 - RNA, 22 nt, Human
gcugccugccuugccuggagga

SEQ ID NO: 466141 - RNA, 22 nt, Human
ccagcuggagcucgcagauagg

SEQ ID NO: 466142 - RNA, 22 nt, Human
uuuaugaacuacagauauaacu

SEQ ID NO: 466143 - RNA, 22 nt, Human
uucuaccagcuacucacugaua

SEQ ID NO: 466144 - RNA, 22 nt, Human
ucaggcagagggagaagccaag

SEQ ID NO: 466145 - RNA, 22 nt, Human
cagucccaguuugagacucugg

SEQ ID NO: 466146 - RNA, 22 nt, Human
ggcagcacgacaggaguggaag

SEQ ID NO: 466147 - RNA, 22 nt, Human
uuucaagcauaacugggaagag

SEQ ID NO: 466148 - RNA, 22 nt, Human
aguggcaggcggagauguagga

SEQ ID NO: 466149 - RNA, 22 nt, Human
gcccacagcucguuccucuccu

SEQ ID NO: 466150 - RNA, 22 nt, Human
caaaugugacuuuugggcuucu

SEQ ID NO: 466151 - RNA, 22 nt, Human
caagcuggcugggagaggcacg

SEQ ID NO: 466152 - RNA, 22 nt, Human
aggaagcccuugucauuucugu

SEQ ID NO: 466153 - RNA, 22 nt, Human
gaagcagcuggugagauggagc

SEQ ID NO: 466154 - RNA, 22 nt, Human
ucaacacucuuuggcacaguua

SEQ ID NO: 466155 - RNA, 22 nt, Human
ugagccuggggccugggcagcg

SEQ ID NO: 466156 - RNA, 22 nt, Human
ucauugcaggcauuccccugcc

SEQ ID NO: 466157 - RNA, 22 nt, Human
cagagcugucauuugccaguga

SEQ ID NO: 466158 - RNA, 22 nt, Human
cacccaggcuagagugcagugg

SEQ ID NO: 466159 - RNA, 19 nt, Human
ccagcccugucacuucuug

SEQ ID NO: 466160 - RNA, 22 nt, Human
ugcccagggauaagccuagaga

SEQ ID NO: 466161 - RNA, 22 nt, Human
ucugagagucucugaggcagau

SEQ ID NO: 466162 - RNA, 22 nt, Human
agggaugguggagguugcaagu

SEQ ID NO: 466163 - RNA, 22 nt, Human
uggccuggcucacagugagauu

SEQ ID NO: 466164 - RNA, 22 nt, Human
agccaggcuaaaugagccauga

SEQ ID NO: 466165 - RNA, 22 nt, Human
gccucugcaauuacauugugcc

SEQ ID NO: 466166 - RNA, 22 nt, Human
cucccagagagcaggugggccg

SEQ ID NO: 466167 - RNA, 22 nt, Human
aggcuucuaggguuggcagcgg

SEQ ID NO: 466168 - RNA, 22 nt, Human
aagaugcagcuuuacaauaagg

SEQ ID NO: 466169 - RNA, 19 nt, Human
ucaaaugccaaugucacag

SEQ ID NO: 466170 - RNA, 22 nt, Human
agggcccuuacgcaggcccuuc

SEQ ID NO: 466171 - RNA, 22 nt, Human
gggcugcuguagagaacauguu

SEQ ID NO: 466172 - RNA, 22 nt, Human
cacagaggacuguagcggggag

SEQ ID NO: 466173 - RNA, 22 nt, Human
aucuggaaaacacaguguagac

SEQ ID NO: 466174 - RNA, 17 nt, Human
gucugggcuuuagagac

SEQ ID NO: 466175 - RNA, 22 nt, Human
agggcucugggguggcagagau

SEQ ID NO: 466176 - RNA, 22 nt, Human
uuccaaagaaguucacauuuac

SEQ ID NO: 466177 - RNA, 22 nt, Human
cccagcugcaccucuauggccu

SEQ ID NO: 466178 - RNA, 22 nt, Human
uuucagugcuucuguuuaccgg

SEQ ID NO: 466179 - RNA, 22 nt, Human
ugccagcccaccuuggggccuc

SEQ ID NO: 466180 - RNA, 22 nt, Human
agagccaggugcugcuguuuga

SEQ ID NO: 466181 - RNA, 22 nt, Human
ucugcucuccauacuuccgcac

SEQ ID NO: 466182 - RNA, 16 nt, Human
uguuagcugugcauua

SEQ ID NO: 466183 - RNA, 22 nt, Human
ucagaggaaaggucagauggcu

SEQ ID NO: 466184 - RNA, 22 nt, Human
uucacagggccacuggcaggag

SEQ ID NO: 466185 - RNA, 21 nt, Human
accaucuuccaugcauuauau

SEQ ID NO: 466186 - RNA, 22 nt, Human
aaggucauuuaacaauuuauga

SEQ ID NO: 466187 - RNA, 22 nt, Human
ugcuccuuccucauccugugca

SEQ ID NO: 466188 - RNA, 22 nt, Human
ucagugaucuaaggguauggcc

SEQ ID NO: 466189 - RNA, 22 nt, Human
caggugggcguggcgagaaggc

SEQ ID NO: 466190 - RNA, 22 nt, Human
cacauuucuaggaaauuaaaug

SEQ ID NO: 466191 - RNA, 22 nt, Human
cagagcagacguugagauuaag

SEQ ID NO: 466192 - RNA, 23 nt, Human
auaaggcauaaagguacauugga

SEQ ID NO: 466193 - RNA, 22 nt, Human
ccaggcagagugcuccagaaag

SEQ ID NO: 466194 - RNA, 22 nt, Human
cagugagguggauggauggccu

SEQ ID NO: 466195 - RNA, 22 nt, Human
gugugcagcagagacaggacuc

SEQ ID NO: 466196 - RNA, 22 nt, Human
cagacuuucaaggagugaaggc

SEQ ID NO: 466197 - RNA, 22 nt, Human
aacugcauucagaaagcucacu

SEQ ID NO: 466198 - RNA, 22 nt, Human
caucuuuaaaggggagacaccc

SEQ ID NO: 466199 - RNA, 19 nt, Human
gcugugugaccuugggcaa

SEQ ID NO: 466200 - RNA, 22 nt, Human
aaguuugagaagcuuauagaua

SEQ ID NO: 466201 - RNA, 22 nt, Human
ggagugaaguggcgcgaucucg

SEQ ID NO: 466202 - RNA, 22 nt, Human
ggggaggcugaugugggcaaag

SEQ ID NO: 466203 - RNA, 22 nt, Human
ccugcagggugcugccacagau

SEQ ID NO: 466204 - RNA, 22 nt, Human
caaaugaagggagcugaagucu

SEQ ID NO: 466205 - RNA, 22 nt, Human
cugagaguguggcuuccaggcc

SEQ ID NO: 466206 - RNA, 22 nt, Human
cuggcucauagagcagcuccaa

SEQ ID NO: 466207 - RNA, 22 nt, Human
uguguuuugaacucaucuacug

SEQ ID NO: 466208 - RNA, 22 nt, Human
caggacaguauaggcuuuagga

SEQ ID NO: 466209 - RNA, 22 nt, Human
uuguaaaugaccuuuucuaauu

SEQ ID NO: 466210 - RNA, 22 nt, Human
gccuccuggauuuuagugccau

SEQ ID NO: 466211 - RNA, 22 nt, Human
ugccuggguguaaagggccaac

SEQ ID NO: 466212 - RNA, 18 nt, Human
aggugcagccucugaggc

SEQ ID NO: 466213 - RNA, 21 nt, Human
caguguggugaccagggucuc

SEQ ID NO: 466214 - RNA, 22 nt, Human
ccuggggcucaagauggcgccg

SEQ ID NO: 466215 - RNA, 22 nt, Human
uggcucaguagcagugugguca

SEQ ID NO: 466216 - RNA, 22 nt, Human
uaguaaaaguuuaguugaaagu

SEQ ID NO: 466217 - RNA, 22 nt, Human
gagcugccuguugcauagcaac

SEQ ID NO: 466218 - RNA, 22 nt, Human
gcagagcacccugcagugguau

SEQ ID NO: 466219 - RNA, 22 nt, Human
uuguuacaucuuauguaagugg

SEQ ID NO: 466220 - RNA, 22 nt, Human
uguggccagcagguggcugugu

SEQ ID NO: 466221 - RNA, 17 nt, Human
gccugcaggcccgcaga

SEQ ID NO: 466222 - RNA, 22 nt, Human
uggggcagggaugggaaacuau

SEQ ID NO: 466223 - RNA, 22 nt, Human
ggauaagaaaauuguaauaacu

SEQ ID NO: 466224 - RNA, 22 nt, Human
ugucacagggauaccauggggc

SEQ ID NO: 466225 - RNA, 22 nt, Human
uuagaaaugauuucaccucuuu

SEQ ID NO: 466226 - RNA, 22 nt, Human
gaggagcuggcagcgucuccgc

SEQ ID NO: 466227 - RNA, 19 nt, Human
ucucccagcugagaagggc

SEQ ID NO: 466228 - RNA, 22 nt, Human
uaugcauagguaucuauacuca

SEQ ID NO: 466229 - RNA, 22 nt, Human
ggagaaggaauauuggaguagg

SEQ ID NO: 466230 - RNA, 18 nt, Human
caugucugcgccacaagg

SEQ ID NO: 466231 - RNA, 22 nt, Human
ucggggucuuugacacgcucug

SEQ ID NO: 466232 - RNA, 22 nt, Human
uguauguguauguacauaugca

SEQ ID NO: 466233 - RNA, 22 nt, Human
cuggcagcgugagcagcaucca

SEQ ID NO: 466234 - RNA, 22 nt, Human
uguaccuuuuucugugcaugcu

SEQ ID NO: 466235 - RNA, 22 nt, Human
cagaagaauggugucugagcuc

SEQ ID NO: 466236 - RNA, 22 nt, Human
aaaugucuaucuggcauauucc

SEQ ID NO: 466237 - RNA, 22 nt, Human
uggaguucauccaugacagcuu

SEQ ID NO: 466238 - RNA, 22 nt, Human
aaaaaguuucaacugccaacuc

SEQ ID NO: 466239 - RNA, 22 nt, Human
agcugaaggcuagaacagcugg

SEQ ID NO: 466240 - RNA, 22 nt, Human
aaaaguucccugguuagaaaag

SEQ ID NO: 466241 - RNA, 22 nt, Human
cugccuggcuaaacucaagucg

SEQ ID NO: 466242 - RNA, 22 nt, Human
aaaagcaguuaucugggaggaa

SEQ ID NO: 466243 - RNA, 22 nt, Human
agugucauaugccacugcaucc

SEQ ID NO: 466244 - RNA, 22 nt, Human
gcucccagcauugcuucccagg

SEQ ID NO: 466245 - RNA, 22 nt, Human
cugagcacugggcacauagcug

SEQ ID NO: 466246 - RNA, 22 nt, Human
agacccucuccaugcccacugc

SEQ ID NO: 466247 - RNA, 18 nt, Human
cugccuguugcugagagg

SEQ ID NO: 466248 - RNA, 23 nt, Human
aaccagauaaauggcuccagggc

SEQ ID NO: 466249 - RNA, 22 nt, Human
acaaaauuaugaagaggccuug

SEQ ID NO: 466250 - RNA, 22 nt, Human
uggagcagccaugaugacagag

SEQ ID NO: 466251 - RNA, 22 nt, Human
cugcugggaaggucugcucagu

SEQ ID NO: 466252 - RNA, 22 nt, Human
auauuucuccaaauguuuucaa

SEQ ID NO: 466253 - RNA, 22 nt, Human
gcugggagaggcccugaaguga

SEQ ID NO: 466254 - RNA, 22 nt, Human
ucugccugcaguguggcagggc

SEQ ID NO: 466255 - RNA, 22 nt, Human
cugcuucuccaaaguaggacuu

SEQ ID NO: 466256 - RNA, 22 nt, Human
gccaccagcagaaaaggggcca

SEQ ID NO: 466257 - RNA, 22 nt, Human
acacaugcauaagccuucccuu

SEQ ID NO: 466258 - RNA, 22 nt, Human
acacaucucaggggacacucuc

SEQ ID NO: 466259 - RNA, 22 nt, Human
agagcaucuaacacauaagccu

SEQ ID NO: 466260 - RNA, 22 nt, Human
ccccagccuuccaugggaauug

SEQ ID NO: 466261 - RNA, 22 nt, Human
ggcagggcagcgcugauuaggg

SEQ ID NO: 466262 - RNA, 22 nt, Human
uguuaggguccugugcaggggc

SEQ ID NO: 466263 - RNA, 22 nt, Human
auaagagcuagucuuuuccuug

SEQ ID NO: 466264 - RNA, 22 nt, Human
gcauucaucuuccuccaugcag

SEQ ID NO: 466265 - RNA, 17 nt, Human
aucuggcugcuucuaga

SEQ ID NO: 466266 - RNA, 22 nt, Human
aucaggauucaguaucuccagc

SEQ ID NO: 466267 - RNA, 21 nt, Human
gugcucugggcagcagagggc

SEQ ID NO: 466268 - RNA, 22 nt, Human
ucccagaggucucugcugguuc

SEQ ID NO: 466269 - RNA, 22 nt, Human
caggaagagguaucaccgagca

SEQ ID NO: 466270 - RNA, 22 nt, Human
agggcugagugggagagaguug

SEQ ID NO: 466271 - RNA, 22 nt, Human
uacagaaaaacuggcauugaag

SEQ ID NO: 466272 - RNA, 22 nt, Human
aacucaguguguuucuuaguau

SEQ ID NO: 466273 - RNA, 19 nt, Human
aguggcagaucuggaagua

SEQ ID NO: 466274 - RNA, 22 nt, Human
agcagccaauuggaggaugaag

SEQ ID NO: 466275 - RNA, 22 nt, Human
augaggcauuccacucaaacuc

SEQ ID NO: 466276 - RNA, 22 nt, Human
uuuacuuugugucaagucaaga

SEQ ID NO: 466277 - RNA, 22 nt, Human
uggagcuggcuuguggaaguug

SEQ ID NO: 466278 - RNA, 19 nt, Human
ggacacagaaagcugcauu

SEQ ID NO: 466279 - RNA, 18 nt, Human
gagcagaggcucaacugg

SEQ ID NO: 466280 - RNA, 19 nt, Human
gagaggccugugcuugaag

SEQ ID NO: 466281 - RNA, 22 nt, Human
ugaacagaucaauagaacugac

SEQ ID NO: 466282 - RNA, 22 nt, Human
ucaaaauuaaaccaacguccag

SEQ ID NO: 466283 - RNA, 21 nt, Human
uugaaggaucacuucuguacc

SEQ ID NO: 466284 - RNA, 22 nt, Human
cacaugaugguggaagccauag

SEQ ID NO: 466285 - RNA, 19 nt, Human
agggaguuuauauuugcac

SEQ ID NO: 466286 - RNA, 22 nt, Human
auuuagaaguuggagggcaaga

SEQ ID NO: 466287 - RNA, 23 nt, Human
gagcugggauacaggcuuacugc

SEQ ID NO: 466288 - RNA, 19 nt, Human
aggcaggugcagagguccc

SEQ ID NO: 466289 - RNA, 22 nt, Human
gagccuucaucgcagccuuguu

SEQ ID NO: 466290 - RNA, 22 nt, Human
aaugcacauauauguguauaca

SEQ ID NO: 466291 - RNA, 22 nt, Human
aggguccaucaaggacugcaca

SEQ ID NO: 466292 - RNA, 18 nt, Human
gccaggcaggguggggaa

SEQ ID NO: 466293 - RNA, 22 nt, Human
uagagcuggaauuugcagcaag

SEQ ID NO: 466294 - RNA, 22 nt, Human
uggcagcagacaaaaggccauu

SEQ ID NO: 466295 - RNA, 22 nt, Human
ggcaggcaguguggugugaaac

SEQ ID NO: 466296 - RNA, 22 nt, Human
uggcugaacuaaugugcuguuu

SEQ ID NO: 466297 - RNA, 22 nt, Human
gccagggggucagcaggcacuu

SEQ ID NO: 466298 - RNA, 22 nt, Human
acuuucuauucccacagagaua

SEQ ID NO: 466299 - RNA, 22 nt, Human
uaguuaggaaaguccagggagc

SEQ ID NO: 466300 - RNA, 22 nt, Human
agccuggauccauguggcuacc

SEQ ID NO: 466301 - RNA, 22 nt, Human
gagccuccuccuggugugccga

SEQ ID NO: 466302 - RNA, 22 nt, Human
gccucugcccauccaccaucag

SEQ ID NO: 466303 - RNA, 22 nt, Human
gguucaguuuacauuaaaaucu

SEQ ID NO: 466304 - RNA, 20 nt, Human
gugccuggagaagaggcugu

SEQ ID NO: 466305 - RNA, 22 nt, Human
uggcucaguuuagcagcucagu

SEQ ID NO: 466306 - RNA, 22 nt, Human
gcaggcaguugcaguuuucuag

SEQ ID NO: 466307 - RNA, 22 nt, Human
uuuuagauaguuuaacugcacu

SEQ ID NO: 466308 - RNA, 22 nt, Human
gggaggaaaugugcagcgaauu

SEQ ID NO: 466309 - RNA, 22 nt, Human
aauauuuuaggcuuuccaggcu

SEQ ID NO: 466310 - RNA, 22 nt, Human
aggcagcaaagaaaugaugcug

SEQ ID NO: 466311 - RNA, 22 nt, Human
uucagagcaucucuaaagccag

SEQ ID NO: 466312 - RNA, 22 nt, Human
ucugccuggaugauggcagggc

SEQ ID NO: 466313 - RNA, 22 nt, Human
ucagcugccucucccuggaaga

SEQ ID NO: 466314 - RNA, 22 nt, Human
cugaggugcuagggucccugcu

SEQ ID NO: 466315 - RNA, 22 nt, Human
uguuuucauuugauguaacaaa

SEQ ID NO: 466316 - RNA, 22 nt, Human
aaguguuuauuuauaacgaucu

SEQ ID NO: 466317 - RNA, 22 nt, Human
gcugccucugcgacucugggcg

SEQ ID NO: 466318 - RNA, 22 nt, Human
augaggcucucaggggagcugu

SEQ ID NO: 466319 - RNA, 22 nt, Human
gcaggcuggaggcuguucuggg

SEQ ID NO: 466320 - RNA, 22 nt, Human
uaaaauguguuucuguaugguu

SEQ ID NO: 466321 - RNA, 23 nt, Human
gcuguacaggaaccaguuuggag

SEQ ID NO: 466322 - RNA, 22 nt, Human
aaugagacacgugaagcagaug

SEQ ID NO: 466323 - RNA, 22 nt, Human
uaaggccaaggggccauagucu

SEQ ID NO: 466324 - RNA, 22 nt, Human
uccaggaggaggaaggcugcca

SEQ ID NO: 466325 - RNA, 22 nt, Human
gggcagcagagcccugccgagu

SEQ ID NO: 466326 - RNA, 22 nt, Human
gaggcagagugcaccccaggag

SEQ ID NO: 466327 - RNA, 22 nt, Human
aauuucuccaagaaugcuuaga

SEQ ID NO: 466328 - RNA, 22 nt, Human
aagucaaucacaugcacacuga

SEQ ID NO: 466329 - RNA, 22 nt, Human
gggaccuggggacuccuuguuc

SEQ ID NO: 466330 - RNA, 22 nt, Human
uuauuacacugaaagaauugcg

SEQ ID NO: 466331 - RNA, 22 nt, Human
uaaaacugaauacauacugagg

SEQ ID NO: 466332 - RNA, 18 nt, Human
aucuuuccauagcauguu

SEQ ID NO: 466333 - RNA, 21 nt, Human
acagacagggccagugucccc

SEQ ID NO: 466334 - RNA, 22 nt, Human
cagccccucccucaggcaggug

SEQ ID NO: 466335 - RNA, 22 nt, Human
ugucaugccauuuaaaauguuu

SEQ ID NO: 466336 - RNA, 22 nt, Human
cugcagccucaaccuccugagc

SEQ ID NO: 466337 - RNA, 22 nt, Human
cccaggcaucccauuaaggagc

SEQ ID NO: 466338 - RNA, 22 nt, Human
cugagcugguucucuugugaaa

SEQ ID NO: 466339 - RNA, 22 nt, Human
ucugucuuuagaggccugugcu

SEQ ID NO: 466340 - RNA, 22 nt, Human
caggugcucccagagaagugcu

SEQ ID NO: 466341 - RNA, 22 nt, Human
ggagacaguauggcuuguagcu

SEQ ID NO: 466342 - RNA, 22 nt, Human
ugaugaaauguugaggcaguga

SEQ ID NO: 466343 - RNA, 22 nt, Human
ggguccagcuacaucagggugg

SEQ ID NO: 466344 - RNA, 22 nt, Human
gaggcagcaggcugaggaggau

SEQ ID NO: 466345 - RNA, 22 nt, Human
uuuaaaaucagaugggaguugg

SEQ ID NO: 466346 - RNA, 22 nt, Human
gcugucugucuucacaucucgc

SEQ ID NO: 466347 - RNA, 22 nt, Human
gagccagccgcaagagcuguga

SEQ ID NO: 466348 - RNA, 22 nt, Human
aggaggaauacaauccagcagc

SEQ ID NO: 466349 - RNA, 22 nt, Human
cugccugugccaccgccucauu

SEQ ID NO: 466350 - RNA, 22 nt, Human
gcaggagagccagcaggcuucc

SEQ ID NO: 466351 - RNA, 22 nt, Human
cacugcuuuaaggcugaguaac

SEQ ID NO: 466352 - RNA, 23 nt, Human
gugcaugugucuuuacaguagca

SEQ ID NO: 466353 - RNA, 18 nt, Human
gaggauggaaggagaugc

SEQ ID NO: 466354 - RNA, 22 nt, Human
agaaaguuuugugcuauauaug

SEQ ID NO: 466355 - RNA, 22 nt, Human
cagcccuggugccaagguuccc

SEQ ID NO: 466356 - RNA, 22 nt, Human
cccaggcugaugggaugggcca

SEQ ID NO: 466357 - RNA, 22 nt, Human
ggcagcagggucuagauugaug

SEQ ID NO: 466358 - RNA, 22 nt, Human
ccuggagcucacugggagccgg

SEQ ID NO: 466359 - RNA, 22 nt, Human
cccuggagucagguuggccugg

SEQ ID NO: 466360 - RNA, 22 nt, Human
cacuguacugugaauaaggagg

SEQ ID NO: 466361 - RNA, 22 nt, Human
uagcccagagucccaauuccag

SEQ ID NO: 466362 - RNA, 22 nt, Human
ugcauugcauuugucaugaaga

SEQ ID NO: 466363 - RNA, 22 nt, Human
acaaaggugcgucccuucagcu

SEQ ID NO: 466364 - RNA, 22 nt, Human
cagcaggaccauugaggcauca

SEQ ID NO: 466365 - RNA, 22 nt, Human
cagugcaguuucccagaugcug

SEQ ID NO: 466366 - RNA, 21 nt, Human
uucauaaaccauucucaugca

SEQ ID NO: 466367 - RNA, 22 nt, Human
cccaggcagaauuaguguuuca

SEQ ID NO: 466368 - RNA, 22 nt, Human
gcaggaagcauagaagaaugcc

SEQ ID NO: 466369 - RNA, 22 nt, Human
uggaggugagugugguacagca

SEQ ID NO: 466370 - RNA, 22 nt, Human
cccagcuucugagggggccuug

SEQ ID NO: 466371 - RNA, 22 nt, Human
aaugcaguuucauuuguagaau

SEQ ID NO: 466372 - RNA, 22 nt, Human
agccaggcgggucuuugcuccu

SEQ ID NO: 466373 - RNA, 23 nt, Human
uguagcaucucuuauuucucagc

SEQ ID NO: 466374 - RNA, 22 nt, Human
cuggagccccaggcugugcaga

SEQ ID NO: 466375 - RNA, 19 nt, Human
ucucugcuucucuuggcau

SEQ ID NO: 466376 - RNA, 22 nt, Human
gugauuucaaauauagagugag

SEQ ID NO: 466377 - RNA, 22 nt, Human
uagccgggugugguggaacucc

SEQ ID NO: 466378 - RNA, 22 nt, Human
aauauuuguuaguguuuuaaug

SEQ ID NO: 466379 - RNA, 22 nt, Human
gacaagacaccucucuccaucc

SEQ ID NO: 466380 - RNA, 22 nt, Human
cacuacuugaaagaauuacaga

SEQ ID NO: 466381 - RNA, 22 nt, Human
ggauuucuuccuuccucagaag

SEQ ID NO: 466382 - RNA, 22 nt, Human
gcuggaccaggugugcacaggc

SEQ ID NO: 466383 - RNA, 22 nt, Human
gagcugccagacaugggaauga

SEQ ID NO: 466384 - RNA, 22 nt, Human
cagcugggcuaagaguagaggc

SEQ ID NO: 466385 - RNA, 17 nt, Human
ugagaaguaggcaucau

SEQ ID NO: 466386 - RNA, 22 nt, Human
uggcucucaggccugcugcguu

SEQ ID NO: 466387 - RNA, 22 nt, Human
cuggagcagguuuaggaguccc

SEQ ID NO: 466388 - RNA, 22 nt, Human
aagacagaccacgugacagggc

SEQ ID NO: 466389 - RNA, 22 nt, Human
aacaacugaaaagcuuuuucug

SEQ ID NO: 466390 - RNA, 22 nt, Human
aaguguguugacugaauugggg

SEQ ID NO: 466391 - RNA, 22 nt, Human
aagacaagcaucaaaucaggca

SEQ ID NO: 466392 - RNA, 22 nt, Human
uccauuuucuugcucuagguaa

SEQ ID NO: 466393 - RNA, 22 nt, Human
cauugcugugggcauuugcugc

SEQ ID NO: 466394 - RNA, 22 nt, Human
aguucccaggugaugcugaugu

SEQ ID NO: 466395 - RNA, 22 nt, Human
caauguaucaagaagcaucagu

SEQ ID NO: 466396 - RNA, 22 nt, Human
uggcucaguuucaguccugguu

SEQ ID NO: 466397 - RNA, 22 nt, Human
agccaugcaccuuacucuugcu

SEQ ID NO: 466398 - RNA, 22 nt, Human
caugggaggucugcaaggugcu

SEQ ID NO: 466399 - RNA, 22 nt, Human
ccaucuccacugucccugucaa

SEQ ID NO: 466400 - RNA, 22 nt, Human
agcugcugcggaaagaugccac

SEQ ID NO: 466401 - RNA, 20 nt, Human
uccugcaguuccuaggaggg

SEQ ID NO: 466402 - RNA, 22 nt, Human
cucuggaguucuucaagcuacu

SEQ ID NO: 466403 - RNA, 22 nt, Human
cagggcaggaauuugacauugc

SEQ ID NO: 466404 - RNA, 22 nt, Human
uauuugaaaguguacaaaaacu

SEQ ID NO: 466405 - RNA, 19 nt, Human
ggcuccuguggcugcagcc

SEQ ID NO: 466406 - RNA, 22 nt, Human
uggccuuggcagugagaagagu

SEQ ID NO: 466407 - RNA, 22 nt, Human
gugcauuuggugacucucaccc

SEQ ID NO: 466408 - RNA, 22 nt, Human
gggacugggagauccuccuggc

SEQ ID NO: 466409 - RNA, 19 nt, Human
ugccuggcaccagcuccac

SEQ ID NO: 466410 - RNA, 22 nt, Human
gagagucacugucugcauuucc

SEQ ID NO: 466411 - RNA, 22 nt, Human
gaaggaagugcucauacuaguu

SEQ ID NO: 466412 - RNA, 22 nt, Human
ugcuuuauggagcccaucucau

SEQ ID NO: 466413 - RNA, 20 nt, Human
aggcugaguucuaugcacuu

SEQ ID NO: 466414 - RNA, 22 nt, Human
cacauggaagagauacagugag

SEQ ID NO: 466415 - RNA, 23 nt, Human
aaguucaagucacagccugucuu

SEQ ID NO: 466416 - RNA, 22 nt, Human
gaacaauagugguaacaaagcc

SEQ ID NO: 466417 - RNA, 22 nt, Human
cugaggcugcccagggccaggu

SEQ ID NO: 466418 - RNA, 22 nt, Human
uuucacaaacugaggagacaau

SEQ ID NO: 466419 - RNA, 19 nt, Human
accaggccucagaggcccu

SEQ ID NO: 466420 - RNA, 22 nt, Human
gaggcugcacuggcuaaaggcu

SEQ ID NO: 466421 - RNA, 22 nt, Human
guguggcugugggagauguuca

SEQ ID NO: 466422 - RNA, 22 nt, Human
gugcucaggaagcuguuccugc

SEQ ID NO: 466423 - RNA, 22 nt, Human
uguggccuccuguuccugggua

SEQ ID NO: 466424 - RNA, 22 nt, Human
uggcucaguuaggucagaaaca

SEQ ID NO: 466425 - RNA, 22 nt, Human
cuucuuaaucccuuauauauuu

SEQ ID NO: 466426 - RNA, 22 nt, Human
agacagcaugauacaugaugcu

SEQ ID NO: 466427 - RNA, 22 nt, Human
cuggggcuucaaugcuucggug

SEQ ID NO: 466428 - RNA, 22 nt, Human
agagcuggggccagagucaagg

SEQ ID NO: 466429 - RNA, 22 nt, Human
uaccuugggguuuuguugcucu

SEQ ID NO: 466430 - RNA, 22 nt, Human
gaaaucugcccagugcacuggu

SEQ ID NO: 466431 - RNA, 22 nt, Human
aaggaaaggaugagcaugcauu

SEQ ID NO: 466432 - RNA, 22 nt, Human
gccaagagaaugugagagaaau

SEQ ID NO: 466433 - RNA, 22 nt, Human
ugucucugccagcuagcagaau

SEQ ID NO: 466434 - RNA, 20 nt, Human
cagagcuguuauggaugaug

SEQ ID NO: 466435 - RNA, 22 nt, Human
gucaggaucucccaguacauau

SEQ ID NO: 466436 - RNA, 19 nt, Human
ccaggccaucccaguuccc

SEQ ID NO: 466437 - RNA, 22 nt, Human
gacauaaaccuugagauauuaa

SEQ ID NO: 466438 - RNA, 22 nt, Human
ugauuuccaugaagcugaaggc

SEQ ID NO: 466439 - RNA, 22 nt, Human
agcaggugacagggcuguggug

SEQ ID NO: 466440 - RNA, 22 nt, Human
gcugugcaguaguagguacagu

SEQ ID NO: 466441 - RNA, 22 nt, Human
gcagugauuggaucagagaugg

SEQ ID NO: 466442 - RNA, 22 nt, Human
aggugagguuugggagguguca

SEQ ID NO: 466443 - RNA, 22 nt, Human
agcagggcuucugugccugugc

SEQ ID NO: 466444 - RNA, 22 nt, Human
cauuucugcagaauugcucuuc

SEQ ID NO: 466445 - RNA, 22 nt, Human
aaaucagucccucuuggaauuu

SEQ ID NO: 466446 - RNA, 22 nt, Human
caguugcuacaguucaagugug

SEQ ID NO: 466447 - RNA, 22 nt, Human
gguggccugcccugaucccugg

SEQ ID NO: 466448 - RNA, 22 nt, Human
uggcagaggagaauuaagauua

SEQ ID NO: 466449 - RNA, 23 nt, Human
gccauggcugccccacaggccuc

SEQ ID NO: 466450 - RNA, 23 nt, Human
cauuucugggagauuuauaaaau

SEQ ID NO: 466451 - RNA, 22 nt, Human
ccagggccaagagaccucgagg

SEQ ID NO: 466452 - RNA, 19 nt, Human
agcuguggggccuagcacc

SEQ ID NO: 466453 - RNA, 22 nt, Human
aggcucagauccuuguguccug

SEQ ID NO: 466454 - RNA, 22 nt, Human
guguccagagaaacucacagcu

SEQ ID NO: 466455 - RNA, 22 nt, Human
acuuucucaaaucagacuuuaa

SEQ ID NO: 466456 - RNA, 22 nt, Human
aagaaaugcagaaaugugcugg

SEQ ID NO: 466457 - RNA, 22 nt, Human
acaguggagcucagaugaaaau

SEQ ID NO: 466458 - RNA, 22 nt, Human
aagacuuucucccaaauccuca

SEQ ID NO: 466459 - RNA, 22 nt, Human
cagacagacagccguggccacc

SEQ ID NO: 466460 - RNA, 22 nt, Human
acucccagguugccuggcaggc

SEQ ID NO: 466461 - RNA, 22 nt, Human
acuuugcacuaaguuacucauu

SEQ ID NO: 466462 - RNA, 22 nt, Human
cugugcauugucuugucuguag

SEQ ID NO: 466463 - RNA, 22 nt, Human
acuuuauuuccuauugcaucca

SEQ ID NO: 466464 - RNA, 22 nt, Human
agacaggacacaagcugcauaa

SEQ ID NO: 466465 - RNA, 22 nt, Human
caagagcuggagaggcagucua

SEQ ID NO: 466466 - RNA, 22 nt, Human
ugcaugcauaaauguacacaca

SEQ ID NO: 466467 - RNA, 22 nt, Human
gggcugacaccacccaggcgca

SEQ ID NO: 466468 - RNA, 22 nt, Human
ucucagucuuugcaaggaugcu

SEQ ID NO: 466469 - RNA, 22 nt, Human
agcaucuggugagggccuaguu

SEQ ID NO: 466470 - RNA, 22 nt, Human
caccaggcugaaccagagggga

SEQ ID NO: 466471 - RNA, 22 nt, Human
ggccugucucacccccgggugc

SEQ ID NO: 466472 - RNA, 22 nt, Human
gucagaggggacaagacacaga

SEQ ID NO: 466473 - RNA, 22 nt, Human
agcuuuuaguacguuaaaauug

SEQ ID NO: 466474 - RNA, 22 nt, Human
ugcaccauacccauuccccucu

SEQ ID NO: 466475 - RNA, 22 nt, Human
uaggugugggcucaggaaugug

SEQ ID NO: 466476 - RNA, 22 nt, Human
gaggaggaggaaguggaaccca

SEQ ID NO: 466477 - RNA, 22 nt, Human
ucauuguuucugcuuuucauga

SEQ ID NO: 466478 - RNA, 22 nt, Human
agaggcuccuucacucuggcac

SEQ ID NO: 466479 - RNA, 22 nt, Human
ugaaauguuugaagaccacuga

SEQ ID NO: 466480 - RNA, 22 nt, Human
acuguucauuuggauuucucug

SEQ ID NO: 466481 - RNA, 22 nt, Human
ucucaguguguuuucucucaga

SEQ ID NO: 466482 - RNA, 22 nt, Human
ucagucucaucaacucuauucc

SEQ ID NO: 466483 - RNA, 22 nt, Human
aguacauuuauuaaugguaaaa

SEQ ID NO: 466484 - RNA, 22 nt, Human
acccacgaagaugagcggcaug

SEQ ID NO: 466485 - RNA, 22 nt, Human
ugucucuggcccaugagcagag

SEQ ID NO: 466486 - RNA, 22 nt, Human
uguaggacauguacuuguaaca

SEQ ID NO: 466487 - RNA, 22 nt, Human
cugcagggaacugaggcccaga

SEQ ID NO: 466488 - RNA, 22 nt, Human
agcucccagggcugggcaaguu

SEQ ID NO: 466489 - RNA, 22 nt, Human
ggucucagcuggaguccuuggu

SEQ ID NO: 466490 - RNA, 22 nt, Human
cuggcuuucauuucaagcacgu

SEQ ID NO: 466491 - RNA, 22 nt, Human
gcaggagugacauggaugugga

SEQ ID NO: 466492 - RNA, 22 nt, Human
uagucuuuugagaaguauaucu

SEQ ID NO: 466493 - RNA, 22 nt, Human
gcaagauguuaacauagggaga

SEQ ID NO: 466494 - RNA, 22 nt, Human
aguuauauaacuaucuagaugc

SEQ ID NO: 466495 - RNA, 22 nt, Human
ccuuccuggcuguccgccugau

SEQ ID NO: 466496 - RNA, 22 nt, Human
uuugaaagggaaauaaacuccu

SEQ ID NO: 466497 - RNA, 22 nt, Human
ugggccuggguuccuccugggc

SEQ ID NO: 466498 - RNA, 22 nt, Human
auggcagggaccaagcugucau

SEQ ID NO: 466499 - RNA, 22 nt, Human
cccagcuccaagggacagcgaa

SEQ ID NO: 466500 - RNA, 22 nt, Human
ucucccaguggugcagaaagca

SEQ ID NO: 466501 - RNA, 22 nt, Human
ccagaggaguugaggcuuuggg

SEQ ID NO: 466502 - RNA, 22 nt, Human
aggaggcccuagagcucuagag

SEQ ID NO: 466503 - RNA, 19 nt, Human
uuugaaaggauuguuauuu

SEQ ID NO: 466504 - RNA, 22 nt, Human
acauuucuauagugcaucuguu

SEQ ID NO: 466505 - RNA, 22 nt, Human
uaccugagcccagugcagcaua

SEQ ID NO: 466506 - RNA, 22 nt, Human
gagccugaauuugaccugcuua

SEQ ID NO: 466507 - RNA, 22 nt, Human
ugcagcugauuaaagggcagac

SEQ ID NO: 466508 - RNA, 22 nt, Human
uggcagggaauacagauguuua

SEQ ID NO: 466509 - RNA, 22 nt, Human
aguggcagcugucaugcccuag

SEQ ID NO: 466510 - RNA, 22 nt, Human
uggcacugagcagccgcggcag

SEQ ID NO: 466511 - RNA, 22 nt, Human
cugccagcaaugugaccaugcu

SEQ ID NO: 466512 - RNA, 22 nt, Human
uggccuguggcuuaaggucugu

SEQ ID NO: 466513 - RNA, 22 nt, Human
ugucccaguuuugcagguuaga

SEQ ID NO: 466514 - RNA, 22 nt, Human
cacuggcaugugaggcgguggc

SEQ ID NO: 466515 - RNA, 22 nt, Human
agaaaagggcaggagggauaca

SEQ ID NO: 466516 - RNA, 22 nt, Human
uggcuucagacuucugcuacgu

SEQ ID NO: 466517 - RNA, 22 nt, Human
cucugaauggacacuccagugu

SEQ ID NO: 466518 - RNA, 22 nt, Human
aagggaggaggauuuauuguac

SEQ ID NO: 466519 - RNA, 22 nt, Human
aggcugaugcuggcugaggcug

SEQ ID NO: 466520 - RNA, 22 nt, Human
ccaguggaaauguggucaggau

SEQ ID NO: 466521 - RNA, 22 nt, Human
agugaaaugauaguguaaauac

SEQ ID NO: 466522 - RNA, 22 nt, Human
uagggcucgggcacaggacagg

SEQ ID NO: 466523 - RNA, 19 nt, Human
acccagagcccuuugcagg

SEQ ID NO: 466524 - RNA, 22 nt, Human
cucuggagaugguucucaauug

SEQ ID NO: 466525 - RNA, 22 nt, Human
uggcagguuuccuccucauagu

SEQ ID NO: 466526 - RNA, 22 nt, Human
gggccucucccuucucacgcau

SEQ ID NO: 466527 - RNA, 22 nt, Human
uggccucuuaggacauccucua

SEQ ID NO: 466528 - RNA, 22 nt, Human
acuucauuguaauauuauagca

SEQ ID NO: 466529 - RNA, 22 nt, Human
caguacuuguccucagguguua

SEQ ID NO: 466530 - RNA, 22 nt, Human
guggcugcagagccagcaagcu

SEQ ID NO: 466531 - RNA, 19 nt, Human
caggccagugucagggggc

SEQ ID NO: 466532 - RNA, 22 nt, Human
cccugagcccauaguugacauu

SEQ ID NO: 466533 - RNA, 22 nt, Human
ggcugcugugaccucaggugau

SEQ ID NO: 466534 - RNA, 22 nt, Human
gacaggcuuugagucccagaac

SEQ ID NO: 466535 - RNA, 22 nt, Human
cagggcaguuugugccuaugag

SEQ ID NO: 466536 - RNA, 22 nt, Human
cagggcugugcccaucuucccc

SEQ ID NO: 466537 - RNA, 22 nt, Human
uuuuuaguagagguggguuuca

SEQ ID NO: 466538 - RNA, 22 nt, Human
ccaggguggaggcuggauggag

SEQ ID NO: 466539 - RNA, 22 nt, Human
agggcagcagcuccuccuagcu

SEQ ID NO: 466540 - RNA, 22 nt, Human
uaugcacacaggcuuaauucau

SEQ ID NO: 466541 - RNA, 22 nt, Human
acucccacuccagaguagaagc

SEQ ID NO: 466542 - RNA, 22 nt, Human
ugcagcauugcaaagcagucuu

SEQ ID NO: 466543 - RNA, 21 nt, Human
gcaggcuggucaaaccucagu

SEQ ID NO: 466544 - RNA, 22 nt, Human
ggccucuguuuggagccaggau

SEQ ID NO: 466545 - RNA, 22 nt, Human
ucacagaaauaagauaguuauu

SEQ ID NO: 466546 - RNA, 22 nt, Human
cacagggccacuuucccaguaa

SEQ ID NO: 466547 - RNA, 22 nt, Human
ugaaccaggaggcagccagcac

SEQ ID NO: 466548 - RNA, 22 nt, Human
ugcuucucccaaccagggccug

SEQ ID NO: 466549 - RNA, 22 nt, Human
gcaggagcugcucuccugacga

SEQ ID NO: 466550 - RNA, 22 nt, Human
uaaggguucagaaugcaguggu

SEQ ID NO: 466551 - RNA, 22 nt, Human
acagaaauauagaagguaggaa

SEQ ID NO: 466552 - RNA, 20 nt, Human
cuguccccgaggucaccagg

SEQ ID NO: 466553 - RNA, 22 nt, Human
acaguaaaaagccuuagaauuu

SEQ ID NO: 466554 - RNA, 22 nt, Human
caaggagaguaauugaaugaga

SEQ ID NO: 466555 - RNA, 22 nt, Human
uuuuaagaugcuaguauuucag

SEQ ID NO: 466556 - RNA, 22 nt, Human
ugcucagugagucugugacagg

SEQ ID NO: 466557 - RNA, 22 nt, Human
uaucuuuauuaugucuaucugc

SEQ ID NO: 466558 - RNA, 22 nt, Human
aaaggccacacagagcagggag

SEQ ID NO: 466559 - RNA, 22 nt, Human
gaucauuuacuuguucuggacu

SEQ ID NO: 466560 - RNA, 22 nt, Human
cuccuuccugccccagugauaa

SEQ ID NO: 466561 - RNA, 22 nt, Human
agaggccuuucuguugagugaa

SEQ ID NO: 466562 - RNA, 22 nt, Human
augaggcuaugaauggggagau

SEQ ID NO: 466563 - RNA, 22 nt, Human
accaaggaagaaucuauuugag

SEQ ID NO: 466564 - RNA, 22 nt, Human
aggugccagcucucaggcagga

SEQ ID NO: 466565 - RNA, 22 nt, Human
cagggcaguuuuacuucucucu

SEQ ID NO: 466566 - RNA, 19 nt, Human
ucaggaguuaguugugcuc

SEQ ID NO: 466567 - RNA, 22 nt, Human
uuucacagguacaaacacuccu

SEQ ID NO: 466568 - RNA, 22 nt, Human
uuagaaaucugcugccaugcaa

SEQ ID NO: 466569 - RNA, 17 nt, Human
cucagaguugcuuuguc

SEQ ID NO: 466570 - RNA, 22 nt, Human
agguacagcaauauaagagguc

SEQ ID NO: 466571 - RNA, 22 nt, Human
uguguguauaugcauuuaucua

SEQ ID NO: 466572 - RNA, 22 nt, Human
gaaggccauuagagccugugcc

SEQ ID NO: 466573 - RNA, 22 nt, Human
ugcuucuggaaacaguggcugu

SEQ ID NO: 466574 - RNA, 22 nt, Human
gagagguccauuccccugucag

SEQ ID NO: 466575 - RNA, 22 nt, Human
gcuuagucaauuauaaauaggc

SEQ ID NO: 466576 - RNA, 22 nt, Human
gcugccaauccagcugugggag

SEQ ID NO: 466577 - RNA, 22 nt, Human
cuuaacagagagaaguguugcu

SEQ ID NO: 466578 - RNA, 22 nt, Human
ugggcaggugcuauuuuccaug

SEQ ID NO: 466579 - RNA, 22 nt, Human
ccauggcauuuuaugugucuua

SEQ ID NO: 466580 - RNA, 22 nt, Human
gggcugagaaguugaucccaag

SEQ ID NO: 466581 - RNA, 22 nt, Human
gcugggagcccuggucugcucc

SEQ ID NO: 466582 - RNA, 22 nt, Human
uaacagaaaggcucaggugcuc

SEQ ID NO: 466583 - RNA, 22 nt, Human
acaguggaugacauccuuuugc

SEQ ID NO: 466584 - RNA, 22 nt, Human
uguacaguaggaacuuguuauu

SEQ ID NO: 466585 - RNA, 20 nt, Human
ccagagcagccacugaaguu

SEQ ID NO: 466586 - RNA, 22 nt, Human
aguugcagacgcagagauguug

SEQ ID NO: 466587 - RNA, 22 nt, Human
guggguggaucaccugagguca

SEQ ID NO: 466588 - RNA, 22 nt, Human
uaaggccagcaugaaugcagca

SEQ ID NO: 466589 - RNA, 22 nt, Human
agugugcugcuuaaacaguugu

SEQ ID NO: 466590 - RNA, 17 nt, Human
gguguauggggagggaa

SEQ ID NO: 466591 - RNA, 22 nt, Human
ucccagccauuccuuuaggugu

SEQ ID NO: 466592 - RNA, 20 nt, Human
ugggcagcacugcuggcugg

SEQ ID NO: 466593 - RNA, 22 nt, Human
agaccaugggcucugaagagca

SEQ ID NO: 466594 - RNA, 22 nt, Human
auuuuuccaugauacuuaucug

SEQ ID NO: 466595 - RNA, 21 nt, Human
aucagaaguuuuggucaguag

SEQ ID NO: 466596 - RNA, 22 nt, Human
ggaaagagcccagcagugcuug

SEQ ID NO: 466597 - RNA, 22 nt, Human
ucaggcagaauuaucaaaagau

SEQ ID NO: 466598 - RNA, 22 nt, Human
aggcugagccacggggcuggcu

SEQ ID NO: 466599 - RNA, 22 nt, Human
cugggaggauucauugagguga

SEQ ID NO: 466600 - RNA, 22 nt, Human
cagcucuggcgucagggagcga

SEQ ID NO: 466601 - RNA, 22 nt, Human
ccucccugcgcuccugcggcgg

SEQ ID NO: 466602 - RNA, 22 nt, Human
cugcccuguggcucugagucau

SEQ ID NO: 466603 - RNA, 22 nt, Human
gccuggagccucagcaaggagg

SEQ ID NO: 466604 - RNA, 21 nt, Human
cugugcuucuuccuaagccag

SEQ ID NO: 466605 - RNA, 22 nt, Human
ggcagcucugcuccacaugagu

SEQ ID NO: 466606 - RNA, 19 nt, Human
aacuagaaagguuuugaga

SEQ ID NO: 466607 - RNA, 23 nt, Human
ugcucugugaauaguuggugacu

SEQ ID NO: 466608 - RNA, 22 nt, Human
caggccuggcugcagcucgccu

SEQ ID NO: 466609 - RNA, 22 nt, Human
agaagccaaucagcucucugcu

SEQ ID NO: 466610 - RNA, 22 nt, Human
ccugccugaaggucagccaccc

SEQ ID NO: 466611 - RNA, 22 nt, Human
gcaccuggacagugacccuagc

SEQ ID NO: 466612 - RNA, 22 nt, Human
aaugcacaugccacauguggua

SEQ ID NO: 466613 - RNA, 22 nt, Human
auugaauagaugcauuauacua

SEQ ID NO: 466614 - RNA, 21 nt, Human
uuucugucucugccacuaguu

SEQ ID NO: 466615 - RNA, 22 nt, Human
uugacaagaaucguugccuugg

SEQ ID NO: 466616 - RNA, 23 nt, Human
cuguggcugaguccuguuggagu

SEQ ID NO: 466617 - RNA, 22 nt, Human
cuuugaaaacuuaaauaacagc

SEQ ID NO: 466618 - RNA, 22 nt, Human
gcgguagcucaagcuuguaauc

SEQ ID NO: 466619 - RNA, 22 nt, Human
cuggccugggagcugcuagcgu

SEQ ID NO: 466620 - RNA, 22 nt, Human
cagagcucagagcagggcacuc

SEQ ID NO: 466621 - RNA, 21 nt, Human
cagagcagcguucugcugugg

SEQ ID NO: 466622 - RNA, 22 nt, Human
accugccuaucagcugccugcu

SEQ ID NO: 466623 - RNA, 22 nt, Human
gaaggcuggcuuucugagagca

SEQ ID NO: 466624 - RNA, 22 nt, Human
ugcauugcaguuaacucaguau

SEQ ID NO: 466625 - RNA, 22 nt, Human
uguacauacauagauauacaca

SEQ ID NO: 466626 - RNA, 22 nt, Human
uuaacagagaacauagaaguag

SEQ ID NO: 466627 - RNA, 22 nt, Human
gcagcuuucuuuuugcaugucu

SEQ ID NO: 466628 - RNA, 19 nt, Human
ggcugccuuuccuuaccag

SEQ ID NO: 466629 - RNA, 22 nt, Human
gggcugacaaccaucugacaag

SEQ ID NO: 466630 - RNA, 22 nt, Human
ugucucaggcccaagccaguaa

SEQ ID NO: 466631 - RNA, 22 nt, Human
uggccuggcccugaggcccugu

SEQ ID NO: 466632 - RNA, 22 nt, Human
aaugggaagucacuacuguuac

SEQ ID NO: 466633 - RNA, 22 nt, Human
ucauccaguaccauggaaggca

SEQ ID NO: 466634 - RNA, 22 nt, Human
acagcuuuguguuaaugggaag

SEQ ID NO: 466635 - RNA, 22 nt, Human
caugaagcauguuuugucauga

SEQ ID NO: 466636 - RNA, 22 nt, Human
agauggagaccuuggaugaacu

SEQ ID NO: 466637 - RNA, 22 nt, Human
uuuaaauaggacuccugggggu

SEQ ID NO: 466638 - RNA, 22 nt, Human
cccauucauccucgcuuccuuc

SEQ ID NO: 466639 - RNA, 21 nt, Human
aggcagcucaggcccagagag

SEQ ID NO: 466640 - RNA, 22 nt, Human
ggccugggcccacugucaagag

SEQ ID NO: 466641 - RNA, 22 nt, Human
ggcaccuggauguagcagugaa

SEQ ID NO: 466642 - RNA, 22 nt, Human
auggggcucugcggcugcuccc

SEQ ID NO: 466643 - RNA, 19 nt, Human
ugaggccaaggucacagau

SEQ ID NO: 466644 - RNA, 22 nt, Human
acuguguggaaauuugugaggg

SEQ ID NO: 466645 - RNA, 22 nt, Human
uucuguguggguagcuccuguu

SEQ ID NO: 466646 - RNA, 22 nt, Human
agggccuggugaccuggguccu

SEQ ID NO: 466647 - RNA, 22 nt, Human
ugcuuuauucccuucugaugug

SEQ ID NO: 466648 - RNA, 18 nt, Human
ucucugaauauuuuaugu

SEQ ID NO: 466649 - RNA, 22 nt, Human
auucaguaggucuagaauaaga

SEQ ID NO: 466650 - RNA, 22 nt, Human
cagucacuggaauagcugagga

SEQ ID NO: 466651 - RNA, 22 nt, Human
agaguguuauuugcucuguauu

SEQ ID NO: 466652 - RNA, 22 nt, Human
gggcccacuggcugucugaccc

SEQ ID NO: 466653 - RNA, 22 nt, Human
ucaaagucuaucuguaauuacu

SEQ ID NO: 466654 - RNA, 22 nt, Human
uuaaacagacaguaaaugaaac

SEQ ID NO: 466655 - RNA, 22 nt, Human
aaaguguacuaugucaugaaca

SEQ ID NO: 466656 - RNA, 22 nt, Human
agggagaaugaccaagguauau

SEQ ID NO: 466657 - RNA, 22 nt, Human
agggccagcacuccuggcagga

SEQ ID NO: 466658 - RNA, 22 nt, Human
ucuggagcuggagggcaaggca

SEQ ID NO: 466659 - RNA, 22 nt, Human
auggaaagggaagcaaggaaca

SEQ ID NO: 466660 - RNA, 22 nt, Human
uccuggagaauccugccaccug

SEQ ID NO: 466661 - RNA, 22 nt, Human
aaagauucgagcgauguauaaa

SEQ ID NO: 466662 - RNA, 22 nt, Human
aggugcagcaugaguccaacgg

SEQ ID NO: 466663 - RNA, 22 nt, Human
uuccucuccucccaccagguga

SEQ ID NO: 466664 - RNA, 22 nt, Human
agucccaggcagccgagccggu

SEQ ID NO: 466665 - RNA, 22 nt, Human
guccucaggaaggcuuucugac

SEQ ID NO: 466666 - RNA, 22 nt, Human
ccagagccucuuaugaagaucg

SEQ ID NO: 466667 - RNA, 22 nt, Human
gagguacagaguguuccaaugu

SEQ ID NO: 466668 - RNA, 22 nt, Human
ggcugugggaugcauaggagcu

SEQ ID NO: 466669 - RNA, 19 nt, Human
ggccaccucucuucccagg

SEQ ID NO: 466670 - RNA, 22 nt, Human
ucagaggacaagcucccuggug

SEQ ID NO: 466671 - RNA, 22 nt, Human
acauuucucccugcaugccugc

SEQ ID NO: 466672 - RNA, 22 nt, Human
ugaagcaggguggccagauugu

SEQ ID NO: 466673 - RNA, 22 nt, Human
cugagcugcuuugcuuuugggg

SEQ ID NO: 466674 - RNA, 22 nt, Human
uuucacauguggaaugccaggu

SEQ ID NO: 466675 - RNA, 22 nt, Human
cugagccaguagucagggacaa

SEQ ID NO: 466676 - RNA, 22 nt, Human
uuuaauuuuccucuuccuggag

SEQ ID NO: 466677 - RNA, 21 nt, Human
agaguaauuccugcuggaaag

SEQ ID NO: 466678 - RNA, 22 nt, Human
uuucagaugugugucucugaag

SEQ ID NO: 466679 - RNA, 22 nt, Human
cuucuugcaauuuucaucuuau

SEQ ID NO: 466680 - RNA, 22 nt, Human
guuuuuccugcugacuuggguc

SEQ ID NO: 466681 - RNA, 22 nt, Human
augcuuuauuauuuugcaggga

SEQ ID NO: 466682 - RNA, 22 nt, Human
gaguguuccagaaacuggcccu

SEQ ID NO: 466683 - RNA, 22 nt, Human
cugcugugugcuuacuuggguu

SEQ ID NO: 466684 - RNA, 19 nt, Human
cgcaggagccgaggugacc

SEQ ID NO: 466685 - RNA, 22 nt, Human
aucuacaggauuuuacagaguu

SEQ ID NO: 466686 - RNA, 22 nt, Human
gccaggcagauaugugagcuua

SEQ ID NO: 466687 - RNA, 22 nt, Human
uuucugaauaacucuaugauau

SEQ ID NO: 466688 - RNA, 22 nt, Human
cuucaucaacucuaacaaaugu

SEQ ID NO: 466689 - RNA, 22 nt, Human
agcugccagcaucccggaaggg

SEQ ID NO: 466690 - RNA, 22 nt, Human
aauggccagcugggagaguuga

SEQ ID NO: 466691 - RNA, 22 nt, Human
guccucagucaguuuggugggg

SEQ ID NO: 466692 - RNA, 22 nt, Human
uacuuucuagcucuccccaguu

SEQ ID NO: 466693 - RNA, 22 nt, Human
uuucuagaggcuccaggggagu

SEQ ID NO: 466694 - RNA, 22 nt, Human
gaagcccaggcuuccuuggcuu

SEQ ID NO: 466695 - RNA, 22 nt, Human
aaagaauuuguacacccuacua

SEQ ID NO: 466696 - RNA, 22 nt, Human
ucaguggauugacaugaaaaag

SEQ ID NO: 466697 - RNA, 22 nt, Human
guguccuuauuucugucucuca

SEQ ID NO: 466698 - RNA, 19 nt, Human
ugccagcauuaggcugaag

SEQ ID NO: 466699 - RNA, 21 nt, Human
agccuggcccagggggaggcu

SEQ ID NO: 466700 - RNA, 22 nt, Human
cuacaagauuuuuaaaacugua

SEQ ID NO: 466701 - RNA, 22 nt, Human
ugggcagaaggaagagccaccu

SEQ ID NO: 466702 - RNA, 22 nt, Human
cauuuagacauuugauuugggg

SEQ ID NO: 466703 - RNA, 23 nt, Human
gcaggugguucgaacagaaguuu

SEQ ID NO: 466704 - RNA, 22 nt, Human
aggaaacagugaacuuggcagg

SEQ ID NO: 466705 - RNA, 22 nt, Human
gacaugcaacaauuuggcauuu

SEQ ID NO: 466706 - RNA, 22 nt, Human
gguggguauaguuagggccucu

SEQ ID NO: 466707 - RNA, 22 nt, Human
agauggagaaugacaauuaagg

SEQ ID NO: 466708 - RNA, 23 nt, Human
agccacuucuaucuugcuccugg

SEQ ID NO: 466709 - RNA, 22 nt, Human
cugccucuugacagaucguggc

SEQ ID NO: 466710 - RNA, 22 nt, Human
gcacugcagguggguggagagg

SEQ ID NO: 466711 - RNA, 22 nt, Human
agccucuguagaaagcagugug

SEQ ID NO: 466712 - RNA, 22 nt, Human
aagcagaaaaacugagcuccaa

SEQ ID NO: 466713 - RNA, 18 nt, Human
ucuuggaguaaugaucaa

SEQ ID NO: 466714 - RNA, 22 nt, Human
agcucacagaaauccugcagga

SEQ ID NO: 466715 - RNA, 22 nt, Human
cuggcagcuuccuuugcaucug

SEQ ID NO: 466716 - RNA, 22 nt, Human
gggcacagagggucuugaagaa

SEQ ID NO: 466717 - RNA, 22 nt, Human
ucuucacaugaccuucaugucu

SEQ ID NO: 466718 - RNA, 22 nt, Human
ggccucagaccggagcuggcca

SEQ ID NO: 466719 - RNA, 22 nt, Human
caguagacacauuaauauggaa

SEQ ID NO: 466720 - RNA, 22 nt, Human
gaaggaaaacagaucugccuga

SEQ ID NO: 466721 - RNA, 22 nt, Human
gaggucaggggagaggcugaug

SEQ ID NO: 466722 - RNA, 22 nt, Human
agggccugggguagcuuacugc

SEQ ID NO: 466723 - RNA, 22 nt, Human
caucacuguccaaaguucaguu

SEQ ID NO: 466724 - RNA, 22 nt, Human
guacccagaggcaugaucccag

SEQ ID NO: 466725 - RNA, 22 nt, Human
cagucccagaagagccugggag

SEQ ID NO: 466726 - RNA, 22 nt, Human
ucagcccugaggacagaggcag

SEQ ID NO: 466727 - RNA, 22 nt, Human
auggcagcaaaugucuggcugg

SEQ ID NO: 466728 - RNA, 22 nt, Human
uccagaccauggauggcugcaa

SEQ ID NO: 466729 - RNA, 22 nt, Human
cagcuuugauucuuucugccau

SEQ ID NO: 466730 - RNA, 22 nt, Human
auguagcagaagauguuuuccu

SEQ ID NO: 466731 - RNA, 22 nt, Human
aaaaugaggucaauauccuuuu

SEQ ID NO: 466732 - RNA, 17 nt, Human
aggugcuggagcaucag

SEQ ID NO: 466733 - RNA, 22 nt, Human
uuuauuguuguuagucauaagu

SEQ ID NO: 466734 - RNA, 22 nt, Human
accccagcccugcuucugggag

SEQ ID NO: 466735 - RNA, 22 nt, Human
guccucagagugggcagguccu

SEQ ID NO: 466736 - RNA, 21 nt, Human
aaagagcccgcugagagguuc

SEQ ID NO: 466737 - RNA, 22 nt, Human
aagugaagaaauacaugagaau

SEQ ID NO: 466738 - RNA, 22 nt, Human
cagagcugcucaugguggccag

SEQ ID NO: 466739 - RNA, 19 nt, Human
uacuuuuucaggacagagu

SEQ ID NO: 466740 - RNA, 22 nt, Human
cagccaggagccucugcaacua

SEQ ID NO: 466741 - RNA, 22 nt, Human
augugcaaauccaaugugaaug

SEQ ID NO: 466742 - RNA, 22 nt, Human
uggcucagaguucaucuuuuag

SEQ ID NO: 466743 - RNA, 21 nt, Human
gcacagcaugaguguuggcau

SEQ ID NO: 466744 - RNA, 22 nt, Human
auagaauuacaguguguuugga

SEQ ID NO: 466745 - RNA, 22 nt, Human
ggcugcugggaauaugccagcu

SEQ ID NO: 466746 - RNA, 22 nt, Human
ccaccagcuuugccacccugcu

SEQ ID NO: 466747 - RNA, 22 nt, Human
gagaagcaaucaguggccaccc

SEQ ID NO: 466748 - RNA, 22 nt, Human
ucccagcagucagagcuaugug

SEQ ID NO: 466749 - RNA, 22 nt, Human
ucauuuaauaauuuuugaguag

SEQ ID NO: 466750 - RNA, 22 nt, Human
uuguuucugaguuuucauguau

SEQ ID NO: 466751 - RNA, 22 nt, Human
uauaauuuuaagugguaaauua

SEQ ID NO: 466752 - RNA, 22 nt, Human
gguuccacgguguuuggaggca

SEQ ID NO: 466753 - RNA, 22 nt, Human
caguggcuguuucuggaaggca

SEQ ID NO: 466754 - RNA, 19 nt, Human
ggaaacaggggccagagga

SEQ ID NO: 466755 - RNA, 22 nt, Human
gaaaguuuauagguuauauaau

SEQ ID NO: 466756 - RNA, 22 nt, Human
ucaagagagugcugcuuggggu

SEQ ID NO: 466757 - RNA, 22 nt, Human
uggcuggcaguaggcuaguggc

SEQ ID NO: 466758 - RNA, 22 nt, Human
aauuagagaucaguucuuugac

SEQ ID NO: 466759 - RNA, 22 nt, Human
aucaggaugacaacugcugggu

SEQ ID NO: 466760 - RNA, 20 nt, Human
ugucaugcauuagaugaaga

SEQ ID NO: 466761 - RNA, 22 nt, Human
agccucucuguuagucacuggg

SEQ ID NO: 466762 - RNA, 22 nt, Human
aauguguguucggggcccagag

SEQ ID NO: 466763 - RNA, 22 nt, Human
aucucagacauguuguccauga

SEQ ID NO: 466764 - RNA, 22 nt, Human
gacaggguacgggcuaggcaca

SEQ ID NO: 466765 - RNA, 22 nt, Human
acagucauagcagccuuuguua

SEQ ID NO: 466766 - RNA, 22 nt, Human
gagccuguguuuccuguagcca

SEQ ID NO: 466767 - RNA, 18 nt, Human
gagcugccauauuuaguu

SEQ ID NO: 466768 - RNA, 22 nt, Human
acccuggguucccgcagcacca

SEQ ID NO: 466769 - RNA, 22 nt, Human
aagggcucucugcauugaaauu

SEQ ID NO: 466770 - RNA, 22 nt, Human
uacaaaguuuucuuggauugag

SEQ ID NO: 466771 - RNA, 22 nt, Human
agggaguuccgaucugugcacc

SEQ ID NO: 466772 - RNA, 22 nt, Human
uacaaagucaccagcuucuugc

SEQ ID NO: 466773 - RNA, 22 nt, Human
agggaggaaggauguuccaaag

SEQ ID NO: 466774 - RNA, 22 nt, Human
agcuuccuguugagagagggag

SEQ ID NO: 466775 - RNA, 22 nt, Human
ggacacaguggaagacagcuug

SEQ ID NO: 466776 - RNA, 23 nt, Human
cuacaagagcaagcauggacaag

SEQ ID NO: 466777 - RNA, 22 nt, Human
acagggcccuugccagcacaag

SEQ ID NO: 466778 - RNA, 22 nt, Human
auaugcaagcacauagaauacu

SEQ ID NO: 466779 - RNA, 22 nt, Human
guggcaggagagacacagccau

SEQ ID NO: 466780 - RNA, 22 nt, Human
aggccuccuggcuccaggccuu

SEQ ID NO: 466781 - RNA, 22 nt, Human
uauuucuuuucgugacuuauug

SEQ ID NO: 466782 - RNA, 22 nt, Human
uuuccucuucgauuaaguuugg

SEQ ID NO: 466783 - RNA, 23 nt, Human
agcagccagagauccucggcccu

SEQ ID NO: 466784 - RNA, 22 nt, Human
cuaguccagucucaaaaugcua

SEQ ID NO: 466785 - RNA, 22 nt, Human
caggccucuccuuagucuggca

SEQ ID NO: 466786 - RNA, 22 nt, Human
auaugugugaugcauggacuaa

SEQ ID NO: 466787 - RNA, 22 nt, Human
ggcuucccagcagagggcgcac

SEQ ID NO: 466788 - RNA, 22 nt, Human
agccuggauccuaggcucagcu

SEQ ID NO: 466789 - RNA, 22 nt, Human
uggcuuccuccagagcaggagg

SEQ ID NO: 466790 - RNA, 22 nt, Human
cuguccucaccuuggcaggggg

SEQ ID NO: 466791 - RNA, 22 nt, Human
guggccucugugcuccugccua

SEQ ID NO: 466792 - RNA, 22 nt, Human
agcccaaggcuucccugcuggc

SEQ ID NO: 466793 - RNA, 22 nt, Human
uugcauugaaaauauauuuuaa

SEQ ID NO: 466794 - RNA, 22 nt, Human
uucuuucccagaagauauguuu

SEQ ID NO: 466795 - RNA, 22 nt, Human
auaauacaugguugaucuuuuc

SEQ ID NO: 466796 - RNA, 22 nt, Human
ccucccacauccuagcucugcu

SEQ ID NO: 466797 - RNA, 22 nt, Human
guacuucccugggaggcaagca

SEQ ID NO: 466798 - RNA, 22 nt, Human
gcuggccuccugcuagauggaa

SEQ ID NO: 466799 - RNA, 19 nt, Human
cagcucaguuugauucucu

SEQ ID NO: 466800 - RNA, 22 nt, Human
cuugccuucuuuuccuauagaa

SEQ ID NO: 466801 - RNA, 22 nt, Human
gaggccugguuugcaugagaau

SEQ ID NO: 466802 - RNA, 22 nt, Human
acugaguguaggacuuugaguu

SEQ ID NO: 466803 - RNA, 21 nt, Human
cugcuuuacuucagaggaucu

SEQ ID NO: 466804 - RNA, 22 nt, Human
uuuucauuguuccucgagcauu

SEQ ID NO: 466805 - RNA, 22 nt, Human
gcugguuaggugagggugcgcc

SEQ ID NO: 466806 - RNA, 22 nt, Human
caggcccugggcaggaucagcc

SEQ ID NO: 466807 - RNA, 17 nt, Human
acagagcacaucaagau

SEQ ID NO: 466808 - RNA, 22 nt, Human
gcagcugaaagggaucucuaca

SEQ ID NO: 466809 - RNA, 22 nt, Human
uuagggacaaauuugcagaacc

SEQ ID NO: 466810 - RNA, 22 nt, Human
acaguaaugauucugagucucu

SEQ ID NO: 466811 - RNA, 22 nt, Human
gugcgccagcucaaggggaggc

SEQ ID NO: 466812 - RNA, 21 nt, Human
cagaggcagguccugggacgg

SEQ ID NO: 466813 - RNA, 22 nt, Human
acaggggcuccgaaggugaggg

SEQ ID NO: 466814 - RNA, 22 nt, Human
uccuuuccagccucaccucagc

SEQ ID NO: 466815 - RNA, 22 nt, Human
ugguagggacacuaugcagaaa

SEQ ID NO: 466816 - RNA, 22 nt, Human
uggcucuggcgugaagcccaga

SEQ ID NO: 466817 - RNA, 22 nt, Human
ucucagugagcuuuucuauguu

SEQ ID NO: 466818 - RNA, 22 nt, Human
ccucccucuguuagagcugucu

SEQ ID NO: 466819 - RNA, 22 nt, Human
ggcgcucaguguugccccagag

SEQ ID NO: 466820 - RNA, 22 nt, Human
auacuguaucacuugugaguga

SEQ ID NO: 466821 - RNA, 22 nt, Human
ucagagaggauuuuaauaagug

SEQ ID NO: 466822 - RNA, 22 nt, Human
aguuaacaaguuggcaaucaac

SEQ ID NO: 466823 - RNA, 22 nt, Human
uucacauugugcagauuauggu

SEQ ID NO: 466824 - RNA, 19 nt, Human
ccagcagacacagcugccc

SEQ ID NO: 466825 - RNA, 22 nt, Human
uuucuguaauuaaaagggcagg

SEQ ID NO: 466826 - RNA, 22 nt, Human
uacaaaguagaaauucaguaaa

SEQ ID NO: 466827 - RNA, 22 nt, Human
cugcagagcaaguaacauccuc

SEQ ID NO: 466828 - RNA, 22 nt, Human
cacacauugaauucauucuugu

SEQ ID NO: 466829 - RNA, 22 nt, Human
ucuggcucuguguccucaccca

SEQ ID NO: 466830 - RNA, 21 nt, Human
gucagcagauccagcacuugu

SEQ ID NO: 466831 - RNA, 22 nt, Human
ucagaggguggcugggagcauc

SEQ ID NO: 466832 - RNA, 22 nt, Human
ccaggccugauugggaaucuug

SEQ ID NO: 466833 - RNA, 22 nt, Human
cggcagggcuccaugcauuucu

SEQ ID NO: 466834 - RNA, 22 nt, Human
ugacauuuaagccucugauuuc

SEQ ID NO: 466835 - RNA, 22 nt, Human
ugggcagagucguggggaauag

SEQ ID NO: 466836 - RNA, 22 nt, Human
ccaggaugacccccacuuuccu

SEQ ID NO: 466837 - RNA, 22 nt, Human
ugucccagguccuagaugacca

SEQ ID NO: 466838 - RNA, 22 nt, Human
ggcaaaguuuucaucucauaac

SEQ ID NO: 466839 - RNA, 22 nt, Human
cugggcacauuuugacuagugu

SEQ ID NO: 466840 - RNA, 22 nt, Human
uucuggaaguguuagaaucugg

SEQ ID NO: 466841 - RNA, 22 nt, Human
uggccugggucacaccaggguc

SEQ ID NO: 466842 - RNA, 22 nt, Human
agcagggcugcggccccaccac

SEQ ID NO: 466843 - RNA, 22 nt, Human
cccaggucccgccccagcucua

SEQ ID NO: 466844 - RNA, 22 nt, Human
cagagccccccuucugaucaca

SEQ ID NO: 466845 - RNA, 22 nt, Human
ucaaacuguuuacagugagaua

SEQ ID NO: 466846 - RNA, 21 nt, Human
agaaaaaccagcauguuuuca

SEQ ID NO: 466847 - RNA, 22 nt, Human
acuuccugggcaugcagagucc

SEQ ID NO: 466848 - RNA, 22 nt, Human
gagacauggcaaaagcacuggu

SEQ ID NO: 466849 - RNA, 22 nt, Human
gcccucagaugggaaaggaggg

SEQ ID NO: 466850 - RNA, 22 nt, Human
gccacaugucaugugcucagua

SEQ ID NO: 466851 - RNA, 22 nt, Human
aacacuguggucuuuucaguaa

SEQ ID NO: 466852 - RNA, 22 nt, Human
agucccuguacuuuccacugcc

SEQ ID NO: 466853 - RNA, 22 nt, Human
ccucuuccacugggccccaucc

SEQ ID NO: 466854 - RNA, 23 nt, Human
aacaccaaggcucagagagauaa

SEQ ID NO: 466855 - RNA, 22 nt, Human
auguaucagauaaagcaugugg

SEQ ID NO: 466856 - RNA, 20 nt, Human
gauuucaaagcagaguggcc

SEQ ID NO: 466857 - RNA, 22 nt, Human
uggcagaaguacacaagcaugc

SEQ ID NO: 466858 - RNA, 22 nt, Human
gccgaagcugccgucugguccu

SEQ ID NO: 466859 - RNA, 22 nt, Human
gaguccaguaguuaggacagag

SEQ ID NO: 466860 - RNA, 22 nt, Human
uggcuaggcuccaagagcugga

SEQ ID NO: 466861 - RNA, 22 nt, Human
acucucagaggguggcagcaau

SEQ ID NO: 466862 - RNA, 22 nt, Human
gccaggcaugggcuucugggcg

SEQ ID NO: 466863 - RNA, 22 nt, Human
agugcaugccuuccuguggaug

SEQ ID NO: 466864 - RNA, 22 nt, Human
aucuggcucucucauuuacaaa

SEQ ID NO: 466865 - RNA, 22 nt, Human
aaacaaacauagguuugaaagu

SEQ ID NO: 466866 - RNA, 17 nt, Human
ucaggauguagcaguag

SEQ ID NO: 466867 - RNA, 22 nt, Human
gggcugcugccaccagguggau

SEQ ID NO: 466868 - RNA, 20 nt, Human
auaauuuacccugcaccacu

SEQ ID NO: 466869 - RNA, 22 nt, Human
guguaauuauauaaagaucuac

SEQ ID NO: 466870 - RNA, 22 nt, Human
gagccauacaaccuauaaagug

SEQ ID NO: 466871 - RNA, 22 nt, Human
guuuaauuuuagguugucaagc

SEQ ID NO: 466872 - RNA, 22 nt, Human
agaggaggcucugggaucgucc

SEQ ID NO: 466873 - RNA, 21 nt, Human
gaacauuuggguuguuucuac

SEQ ID NO: 466874 - RNA, 22 nt, Human
gcugaagagagaugcguccagc

SEQ ID NO: 466875 - RNA, 22 nt, Human
aggugcuggagucugggcagga

SEQ ID NO: 466876 - RNA, 22 nt, Human
cucaggcccacagcagacccac

SEQ ID NO: 466877 - RNA, 22 nt, Human
ugaagcagcaccauuuuagagc

SEQ ID NO: 466878 - RNA, 22 nt, Human
uuaaaaccaucagcuguaagau

SEQ ID NO: 466879 - RNA, 22 nt, Human
cagcuggcuggucagugcacaa

SEQ ID NO: 466880 - RNA, 22 nt, Human
guaacaaaguuucuaggugcug

SEQ ID NO: 466881 - RNA, 22 nt, Human
guuuuauaauugcuucauaaga

SEQ ID NO: 466882 - RNA, 22 nt, Human
uggaagggggaagacagcucug

SEQ ID NO: 466883 - RNA, 22 nt, Human
cagaggcucagauggcccuggc

SEQ ID NO: 466884 - RNA, 22 nt, Human
ugccaggcauuugacagacacu

SEQ ID NO: 466885 - RNA, 22 nt, Human
uacccagcaaucccuagagguu

SEQ ID NO: 466886 - RNA, 22 nt, Human
ucagagguaagggcugagagga

SEQ ID NO: 466887 - RNA, 20 nt, Human
gagagcuggggaugaggcug

SEQ ID NO: 466888 - RNA, 22 nt, Human
ucauuguuauguuuugcugucu

SEQ ID NO: 466889 - RNA, 22 nt, Human
gaggcagagacuccaccuucag

SEQ ID NO: 466890 - RNA, 22 nt, Human
uuagauaaauuaagacuuuaca

SEQ ID NO: 466891 - RNA, 22 nt, Human
ggucccugaagaggccuggggu

SEQ ID NO: 466892 - RNA, 22 nt, Human
auaaaaguuuccaaucaugccu

SEQ ID NO: 466893 - RNA, 22 nt, Human
ucauugcaguugaguuguguua

SEQ ID NO: 466894 - RNA, 21 nt, Human
ugcagaggcacaaacaagccc

SEQ ID NO: 466895 - RNA, 22 nt, Human
uuucuuagcgaugcuugauaaa

SEQ ID NO: 466896 - RNA, 22 nt, Human
aucuggcuuuuaccccacggcc

SEQ ID NO: 466897 - RNA, 22 nt, Human
aaaguguugggaagaaagugca

SEQ ID NO: 466898 - RNA, 22 nt, Human
accagagauggggcuucucugu

SEQ ID NO: 466899 - RNA, 22 nt, Human
gcagcuuucuacuuccuacagc

SEQ ID NO: 466900 - RNA, 22 nt, Human
acagucuugagcaucagccaga

SEQ ID NO: 466901 - RNA, 22 nt, Human
ccucacugaagaggugacauuu

SEQ ID NO: 466902 - RNA, 22 nt, Human
gagggauggugugagaggcuca

SEQ ID NO: 466903 - RNA, 22 nt, Human
ggacaggguaaguacuagugug

SEQ ID NO: 466904 - RNA, 23 nt, Human
uggcaccaggcauucuaggggua

SEQ ID NO: 466905 - RNA, 22 nt, Human
uuugcauuuccagaguagcaga

SEQ ID NO: 466906 - RNA, 22 nt, Human
auccagggauaaaaguaagguu

SEQ ID NO: 466907 - RNA, 22 nt, Human
aguuucuagccucacuguuuag

SEQ ID NO: 466908 - RNA, 22 nt, Human
gugugccaacaaaagacagugc

SEQ ID NO: 466909 - RNA, 22 nt, Human
gguggccucugcaggccucgac

SEQ ID NO: 466910 - RNA, 22 nt, Human
ucuguccauucagccauccauc

SEQ ID NO: 466911 - RNA, 22 nt, Human
ccuggcucuguccucgcgcaaa

SEQ ID NO: 466912 - RNA, 22 nt, Human
ugcucuguugugcaugugggau

SEQ ID NO: 466913 - RNA, 18 nt, Human
aagcugcccucaggcagg

SEQ ID NO: 466914 - RNA, 20 nt, Human
ucacauccucucccaacaug

SEQ ID NO: 466915 - RNA, 22 nt, Human
aguuucuauguaagcuacguga

SEQ ID NO: 466916 - RNA, 22 nt, Human
ccuguacuagggucucauugcc

SEQ ID NO: 466917 - RNA, 22 nt, Human
aggacagaccuaggacuggagc

SEQ ID NO: 466918 - RNA, 19 nt, Human
gcauaaaaugucaaugugu

SEQ ID NO: 466919 - RNA, 22 nt, Human
guuuuauaugucucugcugaca

SEQ ID NO: 466920 - RNA, 22 nt, Human
aggcacuggucuaccccuuagu

SEQ ID NO: 466921 - RNA, 22 nt, Human
ccagcccugucaccaacuggag

SEQ ID NO: 466922 - RNA, 22 nt, Human
ugaggcucagaaauguaaguuu

SEQ ID NO: 466923 - RNA, 22 nt, Human
gugcaugugcauccauguguac

SEQ ID NO: 466924 - RNA, 22 nt, Human
uccugucagugaggcagaugaa

SEQ ID NO: 466925 - RNA, 22 nt, Human
agugcaauagcaaagaacaaca

SEQ ID NO: 466926 - RNA, 22 nt, Human
cucacuguccaacaggcuuuac

SEQ ID NO: 466927 - RNA, 22 nt, Human
acuuccugcaaucguccacucc

SEQ ID NO: 466928 - RNA, 22 nt, Human
cuguacaggugaggagggggcu

SEQ ID NO: 466929 - RNA, 22 nt, Human
uccugcagcucugagaagcauc

SEQ ID NO: 466930 - RNA, 22 nt, Human
aaagagcuaacauugccgagau

SEQ ID NO: 466931 - RNA, 19 nt, Human
aaggcagaaguuggauaug

SEQ ID NO: 466932 - RNA, 22 nt, Human
agauuuccugcacugccuuuga

SEQ ID NO: 466933 - RNA, 22 nt, Human
gacagguggggaaacuaaggua

SEQ ID NO: 466934 - RNA, 22 nt, Human
aaugaugguuaaacacuggagg

SEQ ID NO: 466935 - RNA, 22 nt, Human
ugcagcagacugaguaugagaa

SEQ ID NO: 466936 - RNA, 22 nt, Human
ugguaucagagccaucuguauu

SEQ ID NO: 466937 - RNA, 22 nt, Human
gccaguggucacugaggaagaa

SEQ ID NO: 466938 - RNA, 22 nt, Human
acagccaggaauucuggagaag

SEQ ID NO: 466939 - RNA, 22 nt, Human
cagggcacggagaagucacccc

SEQ ID NO: 466940 - RNA, 22 nt, Human
ucaaagucacaacucucuaauu

SEQ ID NO: 466941 - RNA, 22 nt, Human
cucuggccugcuuccucaggua

SEQ ID NO: 466942 - RNA, 22 nt, Human
ggucccagguugacagggagac

SEQ ID NO: 466943 - RNA, 22 nt, Human
ugcugaggagguggcugugcuu

SEQ ID NO: 466944 - RNA, 22 nt, Human
uauaguacauggaaucuucaua

SEQ ID NO: 466945 - RNA, 22 nt, Human
ggagggcaucaaucaggccugg

SEQ ID NO: 466946 - RNA, 22 nt, Human
cagagcugcuucccaguuugug

SEQ ID NO: 466947 - RNA, 22 nt, Human
ucccucuguguugggcaugccu

SEQ ID NO: 466948 - RNA, 22 nt, Human
auucaaguggcugcuauguuaa

SEQ ID NO: 466949 - RNA, 22 nt, Human
accaucuuaaggggacuucuua

SEQ ID NO: 466950 - RNA, 22 nt, Human
cugggcagugguggcaucuuug

SEQ ID NO: 466951 - RNA, 22 nt, Human
uggggcuguccuuagucugaga

SEQ ID NO: 466952 - RNA, 22 nt, Human
agagcagcuggggcagagacca

SEQ ID NO: 466953 - RNA, 22 nt, Human
cagcuuuauuaaugauugucuu

SEQ ID NO: 466954 - RNA, 22 nt, Human
agcucccugagaugccacagca

SEQ ID NO: 466955 - RNA, 22 nt, Human
ccagcuuuucagaaucugccug

SEQ ID NO: 466956 - RNA, 21 nt, Human
cagcuucuucugugaccuggu

SEQ ID NO: 466957 - RNA, 19 nt, Human
ucaaagcaagcauguucug

SEQ ID NO: 466958 - RNA, 22 nt, Human
ucaggcagguggcuggcuaugg

SEQ ID NO: 466959 - RNA, 22 nt, Human
caguggguaggaaaggcucuuc

SEQ ID NO: 466960 - RNA, 22 nt, Human
uccuugaauggacauuacacug

SEQ ID NO: 466961 - RNA, 22 nt, Human
ucucuggguuuuuguccuguac

SEQ ID NO: 466962 - RNA, 22 nt, Human
ggcccacuugaaauggagcuca

SEQ ID NO: 466963 - RNA, 22 nt, Human
ugggcagcagcaaagccagacu

SEQ ID NO: 466964 - RNA, 22 nt, Human
agcacccucagccuuauccaga

SEQ ID NO: 466965 - RNA, 22 nt, Human
gcagggcagaaggugcugagga

SEQ ID NO: 466966 - RNA, 22 nt, Human
agggcuccaaggaaguguagcu

SEQ ID NO: 466967 - RNA, 22 nt, Human
ugcugccaugcagagcaacaga

SEQ ID NO: 466968 - RNA, 22 nt, Human
gcugucagcgcccaaggagcuc

SEQ ID NO: 466969 - RNA, 22 nt, Human
ggccugcuauuggugggcagac

SEQ ID NO: 466970 - RNA, 21 nt, Human
aaggccugcuuacugcuaguu

SEQ ID NO: 466971 - RNA, 22 nt, Human
auaacagaguugggaagugaaa

SEQ ID NO: 466972 - RNA, 22 nt, Human
aaugccaguguguugauuccag

SEQ ID NO: 466973 - RNA, 22 nt, Human
cuguugucuucauugucauauc

SEQ ID NO: 466974 - RNA, 22 nt, Human
ucucacugauuugagaccaagg

SEQ ID NO: 466975 - RNA, 22 nt, Human
aagagcugcaucuaagccauga

SEQ ID NO: 466976 - RNA, 22 nt, Human
ccacugaaggucaacauagagc

SEQ ID NO: 466977 - RNA, 22 nt, Human
gccugggugucgaucacuagug

SEQ ID NO: 466978 - RNA, 23 nt, Human
ugggggugcacgggccacaucuu

SEQ ID NO: 466979 - RNA, 20 nt, Human
ccugggcuccaggagccccg

SEQ ID NO: 466980 - RNA, 22 nt, Human
augcugugucaggaauuugaua

SEQ ID NO: 466981 - RNA, 22 nt, Human
ucucaggaguagugggauccau

SEQ ID NO: 466982 - RNA, 22 nt, Human
caggaggaacaagagguucugg

SEQ ID NO: 466983 - RNA, 22 nt, Human
cagggagcuuucccaggacccu

SEQ ID NO: 466984 - RNA, 22 nt, Human
aucaguuucacuugcuugcaaa

SEQ ID NO: 466985 - RNA, 22 nt, Human
gagaaggacuacacaucuggcc

SEQ ID NO: 466986 - RNA, 22 nt, Human
uagaaaugcccagauucugcua

SEQ ID NO: 466987 - RNA, 22 nt, Human
gcucugggugaacuuggagcaa

SEQ ID NO: 466988 - RNA, 22 nt, Human
aggcuucccaagcagcugcaaa

SEQ ID NO: 466989 - RNA, 22 nt, Human
gggcugugagaguggggcugcu

SEQ ID NO: 466990 - RNA, 22 nt, Human
aauaugugagguauguucagug

SEQ ID NO: 466991 - RNA, 22 nt, Human
uauguagaagcugcucaaagaa

SEQ ID NO: 466992 - RNA, 22 nt, Human
ugcagggaaucuguggcuggac

SEQ ID NO: 466993 - RNA, 22 nt, Human
cacugaagguaggaccaaggcu

SEQ ID NO: 466994 - RNA, 22 nt, Human
uucacauuucauaccacagcuu

SEQ ID NO: 466995 - RNA, 22 nt, Human
ugggcuggcguggagaguuuag

SEQ ID NO: 466996 - RNA, 22 nt, Human
aaaaguauuuugagcacuuuau

SEQ ID NO: 466997 - RNA, 22 nt, Human
ucugagcauugaauuuucuucc

SEQ ID NO: 466998 - RNA, 22 nt, Human
ggugcagaaggaagggagcugg

SEQ ID NO: 466999 - RNA, 22 nt, Human
aggagcagaacuguuguggagg

SEQ ID NO: 467000 - RNA, 22 nt, Human
aaauccuaaugacaaguuuagu

SEQ ID NO: 467001 - RNA, 22 nt, Human
cgcuggggcuuuuugcuugaga

SEQ ID NO: 467002 - RNA, 22 nt, Human
agcuggccuucggugucacugg

SEQ ID NO: 467003 - RNA, 22 nt, Human
gggugggccacugagcagcgug

SEQ ID NO: 467004 - RNA, 22 nt, Human
ucucugaguaagugacaguuca

SEQ ID NO: 467005 - RNA, 22 nt, Human
ggccagggggcuucagacucca

SEQ ID NO: 467006 - RNA, 22 nt, Human
auuucacucuuaauugcuuccu

SEQ ID NO: 467007 - RNA, 22 nt, Human
uggaggaaguggacaguugugu

SEQ ID NO: 467008 - RNA, 22 nt, Human
guuuuauaggcuguugcuauau

SEQ ID NO: 467009 - RNA, 18 nt, Human
ucuggcucaggacugaac

SEQ ID NO: 467010 - RNA, 20 nt, Human
ucauccaggacaggaguggc

SEQ ID NO: 467011 - RNA, 22 nt, Human
gcugugcacuaccuauacaucc

SEQ ID NO: 467012 - RNA, 21 nt, Human
ggucuuccaaauaaggagaaa

SEQ ID NO: 467013 - RNA, 20 nt, Human
ugcagggcugccucccagcu

SEQ ID NO: 467014 - RNA, 22 nt, Human
caaauguguaaggaaguguuag

SEQ ID NO: 467015 - RNA, 22 nt, Human
agaauaauacugaaaugcugaa

SEQ ID NO: 467016 - RNA, 22 nt, Human
auacaaaauauauacuggagac

SEQ ID NO: 467017 - RNA, 22 nt, Human
agagaacaaauuaaaggugguu

SEQ ID NO: 467018 - RNA, 22 nt, Human
ugcagcucugaacagucaugaa

SEQ ID NO: 467019 - RNA, 22 nt, Human
ccugggaggcagagguugcagu

SEQ ID NO: 467020 - RNA, 20 nt, Human
uacugggcaagcccacagac

SEQ ID NO: 467021 - RNA, 22 nt, Human
gagggguguggagccaucaguu

SEQ ID NO: 467022 - RNA, 19 nt, Human
gcugucugaugcugagguc

SEQ ID NO: 467023 - RNA, 22 nt, Human
ggagucagccugucagagugua

SEQ ID NO: 467024 - RNA, 22 nt, Human
ggcacucagagauucaggcugu

SEQ ID NO: 467025 - RNA, 22 nt, Human
ggccccaggaccuccacggucc

SEQ ID NO: 467026 - RNA, 19 nt, Human
uggggccuccugucccugg

SEQ ID NO: 467027 - RNA, 22 nt, Human
cagaguacugggagaacagaag

SEQ ID NO: 467028 - RNA, 21 nt, Human
cagcaaaucauugggcagacu

SEQ ID NO: 467029 - RNA, 22 nt, Human
acuuuggggaacuuuucuccuc

SEQ ID NO: 467030 - RNA, 22 nt, Human
caaaguuuaaaguagauuucag

SEQ ID NO: 467031 - RNA, 22 nt, Human
gcuccucugucaaaugagagug

SEQ ID NO: 467032 - RNA, 19 nt, Human
ccaggccuggcgucuccgc

SEQ ID NO: 467033 - RNA, 22 nt, Human
ccagggcauguaacuaauggug

SEQ ID NO: 467034 - RNA, 22 nt, Human
uuuguacauccuaauucugagu

SEQ ID NO: 467035 - RNA, 22 nt, Human
uucauugucucuguuugccuuc

SEQ ID NO: 467036 - RNA, 22 nt, Human
cagugcaguggcugagcuggag

SEQ ID NO: 467037 - RNA, 22 nt, Human
aagagcuggcccaaucugagca

SEQ ID NO: 467038 - RNA, 22 nt, Human
uuguggcucgugagauguuagg

SEQ ID NO: 467039 - RNA, 22 nt, Human
ggucccaggcucccucuugucc

SEQ ID NO: 467040 - RNA, 22 nt, Human
ccugagcugaacuaagcaguuu

SEQ ID NO: 467041 - RNA, 22 nt, Human
auguuacauaguccuuauuugu

SEQ ID NO: 467042 - RNA, 19 nt, Human
ugaggggcucacagucuca

SEQ ID NO: 467043 - RNA, 22 nt, Human
ugcauccuuaaccagcaucacu

SEQ ID NO: 467044 - RNA, 23 nt, Human
gggugggccaaauuagguagccu

SEQ ID NO: 467045 - RNA, 22 nt, Human
uucacauuugcccuuaugugug

SEQ ID NO: 467046 - RNA, 22 nt, Human
aucaauucuuaggaaaauagcu

SEQ ID NO: 467047 - RNA, 22 nt, Human
cuuauuagaguuguguucuguu

SEQ ID NO: 467048 - RNA, 22 nt, Human
agcucccagagcucgagaguaa

SEQ ID NO: 467049 - RNA, 17 nt, Human
ugagacagggcaggccc

SEQ ID NO: 467050 - RNA, 22 nt, Human
caggcugcagugcaguggcuau

SEQ ID NO: 467051 - RNA, 22 nt, Human
ggccugcuuuccgagccugcag

SEQ ID NO: 467052 - RNA, 22 nt, Human
ugcagggcauaggguccaguuu

SEQ ID NO: 467053 - RNA, 22 nt, Human
gcugccugucccaggaugagga

SEQ ID NO: 467054 - RNA, 22 nt, Human
uagaaacauguucuguucuguu

SEQ ID NO: 467055 - RNA, 22 nt, Human
gcucaggagcucuugguggcgc

SEQ ID NO: 467056 - RNA, 22 nt, Human
uuucuguauuuaaaagaucugg

SEQ ID NO: 467057 - RNA, 22 nt, Human
uucagagaugacaccugguguu

SEQ ID NO: 467058 - RNA, 22 nt, Human
ggcauguuucaucacaucaaga

SEQ ID NO: 467059 - RNA, 22 nt, Human
acacugcagaugaaagcauaag

SEQ ID NO: 467060 - RNA, 22 nt, Human
gagcagaugugugccaggaugc

SEQ ID NO: 467061 - RNA, 22 nt, Human
ccuaggcccuaggcuuccauca

SEQ ID NO: 467062 - RNA, 22 nt, Human
gagucgagcagaaagccgucgg

SEQ ID NO: 467063 - RNA, 22 nt, Human
uaguccagccuuggguguagcc

SEQ ID NO: 467064 - RNA, 22 nt, Human
guuacaaacucaggugccaaaa

SEQ ID NO: 467065 - RNA, 22 nt, Human
caaagggcucuagacucagcag

SEQ ID NO: 467066 - RNA, 22 nt, Human
ggccaagauggaaggagagaug

SEQ ID NO: 467067 - RNA, 22 nt, Human
cucaccaggaacagcugcggag

SEQ ID NO: 467068 - RNA, 17 nt, Human
aucuggaagcuagcuga

SEQ ID NO: 467069 - RNA, 23 nt, Human
ucuggcucuaugugacagcucuc

SEQ ID NO: 467070 - RNA, 22 nt, Human
caaacuguucucugugggauuc

SEQ ID NO: 467071 - RNA, 22 nt, Human
cggcagagugugugcgugcaug

SEQ ID NO: 467072 - RNA, 22 nt, Human
uugcagcuucuaccacuguuuc

SEQ ID NO: 467073 - RNA, 22 nt, Human
cagugcagaggugcaagcaugu

SEQ ID NO: 467074 - RNA, 22 nt, Human
gggcauggugaugugcaccugu

SEQ ID NO: 467075 - RNA, 22 nt, Human
gccaaaucuugcacacucuugu

SEQ ID NO: 467076 - RNA, 22 nt, Human
acacaggaagucagcacugaug

SEQ ID NO: 467077 - RNA, 22 nt, Human
ucaaucacguguuccauguucu

SEQ ID NO: 467078 - RNA, 22 nt, Human
uugcagcugcaguaaauguuca

SEQ ID NO: 467079 - RNA, 22 nt, Human
ggacucuguuuuccugaucacu

SEQ ID NO: 467080 - RNA, 22 nt, Human
gcaagcaguuguggcuucugag

SEQ ID NO: 467081 - RNA, 17 nt, Human
uccaggcauaucuccua

SEQ ID NO: 467082 - RNA, 22 nt, Human
ggcagcacugcagcuuguuggg

SEQ ID NO: 467083 - RNA, 22 nt, Human
ccuggcugggguagaagugagg

SEQ ID NO: 467084 - RNA, 19 nt, Human
gaggaggaaaacuagugua

SEQ ID NO: 467085 - RNA, 22 nt, Human
gccaguggcuugccaggcagga

SEQ ID NO: 467086 - RNA, 17 nt, Human
ggcagcugccacuuuuu

SEQ ID NO: 467087 - RNA, 22 nt, Human
ucccagagcugauaagccuuua

SEQ ID NO: 467088 - RNA, 22 nt, Human
gcuguggcugaccaccaggggg

SEQ ID NO: 467089 - RNA, 22 nt, Human
gaguuauuucagaaggaaagau

SEQ ID NO: 467090 - RNA, 20 nt, Human
cagggcacacugcagccucg

SEQ ID NO: 467091 - RNA, 22 nt, Human
gaggaaaauauucagggagguu

SEQ ID NO: 467092 - RNA, 23 nt, Human
ggccucuguguucugcccacaug

SEQ ID NO: 467093 - RNA, 22 nt, Human
gggacagcuguagugcuuggcu

SEQ ID NO: 467094 - RNA, 22 nt, Human
cuccagcuucccucagcugugg

SEQ ID NO: 467095 - RNA, 22 nt, Human
caagcccaggauuccccaguua

SEQ ID NO: 467096 - RNA, 22 nt, Human
ggagccagugcccucuggugga

SEQ ID NO: 467097 - RNA, 22 nt, Human
ccugggcaacauagugagaccc

SEQ ID NO: 467098 - RNA, 22 nt, Human
gcucccagcuggagccucaaca

SEQ ID NO: 467099 - RNA, 22 nt, Human
cugcugugcaacauugcaccua

SEQ ID NO: 467100 - RNA, 22 nt, Human
ggcugcuguuucagagacuguu

SEQ ID NO: 467101 - RNA, 22 nt, Human
uccuugaagcaacgugcagaca

SEQ ID NO: 467102 - RNA, 22 nt, Human
uucucauggugucuuuauacau

SEQ ID NO: 467103 - RNA, 22 nt, Human
ggcagcuguaagaugagugaau

SEQ ID NO: 467104 - RNA, 22 nt, Human
cuggucugagggcucuugaggc

SEQ ID NO: 467105 - RNA, 22 nt, Human
cuagaaauauuuuacagucaag

SEQ ID NO: 467106 - RNA, 19 nt, Human
uguagcaguuuaaaacaac

SEQ ID NO: 467107 - RNA, 18 nt, Human
cuucagugacagucuggc

SEQ ID NO: 467108 - RNA, 22 nt, Human
aguccaaagcagaugagggcca

SEQ ID NO: 467109 - RNA, 22 nt, Human
aggagugggggcgagaaguuaa

SEQ ID NO: 467110 - RNA, 22 nt, Human
gccucugcacuguggcacacca

SEQ ID NO: 467111 - RNA, 22 nt, Human
auaaggcaagcugucaguuugu

SEQ ID NO: 467112 - RNA, 22 nt, Human
uuccaggaauucagcucucagu

SEQ ID NO: 467113 - RNA, 22 nt, Human
aggucauuacaauuaucauuuu

SEQ ID NO: 467114 - RNA, 22 nt, Human
gccaggcugcuccagggaggcc

SEQ ID NO: 467115 - RNA, 22 nt, Human
uuauuucauguaaaauuuaugu

SEQ ID NO: 467116 - RNA, 22 nt, Human
uaaagguagcaugaaacugcaa

SEQ ID NO: 467117 - RNA, 22 nt, Human
agccagggacgcugcaggcuac

SEQ ID NO: 467118 - RNA, 23 nt, Human
uguugaaguaacuguuacauaga

SEQ ID NO: 467119 - RNA, 22 nt, Human
aaauacagaguugcuuaaaagc

SEQ ID NO: 467120 - RNA, 22 nt, Human
ccugucucuuucaaucugagag

SEQ ID NO: 467121 - RNA, 22 nt, Human
ggaggccaaggcagguggauca

SEQ ID NO: 467122 - RNA, 22 nt, Human
ugaaagguagcuggccucauag

SEQ ID NO: 467123 - RNA, 18 nt, Human
cccagcccaccauuucuc

SEQ ID NO: 467124 - RNA, 22 nt, Human
gaggcccuccagcugucagcug

SEQ ID NO: 467125 - RNA, 22 nt, Human
caaugauugcuauuuacauaaa

SEQ ID NO: 467126 - RNA, 22 nt, Human
caguggaaacuaugcugcugga

SEQ ID NO: 467127 - RNA, 22 nt, Human
cagugaggcucugcugagcggu

SEQ ID NO: 467128 - RNA, 22 nt, Human
ccaggugucaugcgugugaccc

SEQ ID NO: 467129 - RNA, 22 nt, Human
agccaucauuucugucacuggc

SEQ ID NO: 467130 - RNA, 22 nt, Human
cagccagcugaauguaccauga

SEQ ID NO: 467131 - RNA, 22 nt, Human
uuuuauuaguggcuagaugggg

SEQ ID NO: 467132 - RNA, 22 nt, Human
aucaaaguaggcauauguuuuu

SEQ ID NO: 467133 - RNA, 22 nt, Human
uaugcacauucacacaaaaaug

SEQ ID NO: 467134 - RNA, 22 nt, Human
gcauaauauacaugcuugaucc

SEQ ID NO: 467135 - RNA, 22 nt, Human
gguggguauugaauacaggugu

SEQ ID NO: 467136 - RNA, 22 nt, Human
aggugcuagguguguaguggag

SEQ ID NO: 467137 - RNA, 22 nt, Human
agcauuuaauuacaguuuaauu

SEQ ID NO: 467138 - RNA, 21 nt, Human
ugaggcucaucuuauguggcu

SEQ ID NO: 467139 - RNA, 22 nt, Human
uuuaucacagaauaagaaguca

SEQ ID NO: 467140 - RNA, 22 nt, Human
acagaccaaaaaaggauauugg

SEQ ID NO: 467141 - RNA, 22 nt, Human
aauugcuaaagauuauguuuuc

SEQ ID NO: 467142 - RNA, 22 nt, Human
agaggaggccaggcccacaccu

SEQ ID NO: 467143 - RNA, 22 nt, Human
ucucuggagggcuccaggcggg

SEQ ID NO: 467144 - RNA, 22 nt, Human
cuagggacagaaagaggguaga

SEQ ID NO: 467145 - RNA, 22 nt, Human
acaggacaggcugggcuagacu

SEQ ID NO: 467146 - RNA, 22 nt, Human
ucaggcagaugcagggauggau

SEQ ID NO: 467147 - RNA, 22 nt, Human
ucuauuugcugguugcuucugu

SEQ ID NO: 467148 - RNA, 17 nt, Human
gccucugcuugugucau

SEQ ID NO: 467149 - RNA, 22 nt, Human
gcugccuucaguucugauucau

SEQ ID NO: 467150 - RNA, 22 nt, Human
augaagucuagcaagcauugaa

SEQ ID NO: 467151 - RNA, 22 nt, Human
ggggaggaagcuggaacacggg

SEQ ID NO: 467152 - RNA, 22 nt, Human
acauugaugaaaagguaucauu

SEQ ID NO: 467153 - RNA, 22 nt, Human
cccaggcucccaggugggacaa

SEQ ID NO: 467154 - RNA, 23 nt, Human
uugcuucugugcaauucaguacu

SEQ ID NO: 467155 - RNA, 22 nt, Human
uggcagcaaaaccagaaucaga

SEQ ID NO: 467156 - RNA, 22 nt, Human
cugagguguugaugaccuaugc

SEQ ID NO: 467157 - RNA, 22 nt, Human
gcuccucuauuccccacauuuu

SEQ ID NO: 467158 - RNA, 22 nt, Human
agagauucauguuuacuguagg

SEQ ID NO: 467159 - RNA, 22 nt, Human
aacuguaaugaauuguucauga

SEQ ID NO: 467160 - RNA, 22 nt, Human
ucucagggccucccucuguuuc

SEQ ID NO: 467161 - RNA, 22 nt, Human
uacauuguucaugcaugagaaa

SEQ ID NO: 467162 - RNA, 22 nt, Human
aguuacuugagacguuuaugaa

SEQ ID NO: 467163 - RNA, 22 nt, Human
ccuccugggacaggcuggcaca

SEQ ID NO: 467164 - RNA, 22 nt, Human
gaggggcugggcagucccugga

SEQ ID NO: 467165 - RNA, 22 nt, Human
agggaggaccaaugugugguua

SEQ ID NO: 467166 - RNA, 22 nt, Human
uaacaucuuuagcagcucgaac

SEQ ID NO: 467167 - RNA, 22 nt, Human
guauucuugguuaucaaaauac

SEQ ID NO: 467168 - RNA, 22 nt, Human
aguuuuucuccccuggcuucau

SEQ ID NO: 467169 - RNA, 22 nt, Human
uuguggcagaccaugagucuaa

SEQ ID NO: 467170 - RNA, 20 nt, Human
cccagagccauagccagaca

SEQ ID NO: 467171 - RNA, 22 nt, Human
uggcagagccuugccaaacucc

SEQ ID NO: 467172 - RNA, 22 nt, Human
aauguauaaaguguuaauaacu

SEQ ID NO: 467173 - RNA, 22 nt, Human
ccaggcucugucuggucagaag

SEQ ID NO: 467174 - RNA, 22 nt, Human
aggaaggagggcagauauuaag

SEQ ID NO: 467175 - RNA, 22 nt, Human
ucugaggcccugcaggcagugu

SEQ ID NO: 467176 - RNA, 22 nt, Human
guggcacagugggagagcccca

SEQ ID NO: 467177 - RNA, 22 nt, Human
uuuuuccuuagggguuacucac

SEQ ID NO: 467178 - RNA, 22 nt, Human
aaaagagucuuaggcagucaua

SEQ ID NO: 467179 - RNA, 22 nt, Human
ugugggcucccccucacucugu

SEQ ID NO: 467180 - RNA, 22 nt, Human
uggcuucugcuuucaguggagg

SEQ ID NO: 467181 - RNA, 22 nt, Human
gcuucucgggccugaugucguc

SEQ ID NO: 467182 - RNA, 22 nt, Human
cauauaaauacaacauguguua

SEQ ID NO: 467183 - RNA, 22 nt, Human
uuugcauuuuagauuuaggccu

SEQ ID NO: 467184 - RNA, 22 nt, Human
gggcccuggggccugauuugca

SEQ ID NO: 467185 - RNA, 22 nt, Human
uauuugcaaagaacuacacuag

SEQ ID NO: 467186 - RNA, 22 nt, Human
augcugugauuguagaaauauu

SEQ ID NO: 467187 - RNA, 18 nt, Human
uccugcagcuucuaugua

SEQ ID NO: 467188 - RNA, 22 nt, Human
cgcccagggcaggaggccgcuc

SEQ ID NO: 467189 - RNA, 22 nt, Human
caggggcugagaaggaacgucc

SEQ ID NO: 467190 - RNA, 22 nt, Human
gaaaauguuuguccggagcuga

SEQ ID NO: 467191 - RNA, 22 nt, Human
ggcaugggccgaggugccuccu

SEQ ID NO: 467192 - RNA, 22 nt, Human
gggugggguucaggaaucuuca

SEQ ID NO: 467193 - RNA, 22 nt, Human
uacuuuaaaaacugauaauuca

SEQ ID NO: 467194 - RNA, 22 nt, Human
uuacaaagagugccagagugug

SEQ ID NO: 467195 - RNA, 22 nt, Human
acacaaugugcaggacaccugu

SEQ ID NO: 467196 - RNA, 22 nt, Human
cauccagggcagccauggccug

SEQ ID NO: 467197 - RNA, 22 nt, Human
aggacagugguguucuggagug

SEQ ID NO: 467198 - RNA, 22 nt, Human
acugggccggugcagaguaguu

SEQ ID NO: 467199 - RNA, 22 nt, Human
aagucagcacuccaggaagcca

SEQ ID NO: 467200 - RNA, 22 nt, Human
gccugaugagcuuccagcugag

SEQ ID NO: 467201 - RNA, 22 nt, Human
aagggcugaaugaaggguugaa

SEQ ID NO: 467202 - RNA, 22 nt, Human
cugugccuaagaugcaugucuc

SEQ ID NO: 467203 - RNA, 22 nt, Human
aaggaggaauuucagggugaau

SEQ ID NO: 467204 - RNA, 22 nt, Human
ucucagagcuucaguuauuuuc

SEQ ID NO: 467205 - RNA, 22 nt, Human
auuacaguaacagcuacaaugc

SEQ ID NO: 467206 - RNA, 22 nt, Human
aguuuauguaaaauuaguaaug

SEQ ID NO: 467207 - RNA, 22 nt, Human
ucuuuauuuaagucuguuguaa

SEQ ID NO: 467208 - RNA, 17 nt, Human
aggcauggucuggggug

SEQ ID NO: 467209 - RNA, 22 nt, Human
ggcucuggagcacagacgucug

SEQ ID NO: 467210 - RNA, 21 nt, Human
ucugucugguuuuagaguggc

SEQ ID NO: 467211 - RNA, 22 nt, Human
gucccauaaguagugcaacuug

SEQ ID NO: 467212 - RNA, 22 nt, Human
aggacaggauugagcugaacug

SEQ ID NO: 467213 - RNA, 20 nt, Human
agcccaggccugugugaguc

SEQ ID NO: 467214 - RNA, 22 nt, Human
acauccagaucucagcauggcu

SEQ ID NO: 467215 - RNA, 22 nt, Human
uuuuccucaggaaugcuaagcu

SEQ ID NO: 467216 - RNA, 21 nt, Human
ucucugggcccuccugugggg

SEQ ID NO: 467217 - RNA, 22 nt, Human
ucucacucauuuccuaggucuu

SEQ ID NO: 467218 - RNA, 22 nt, Human
aagcuggaacaucuugaggaag

SEQ ID NO: 467219 - RNA, 22 nt, Human
gcaggagcucguuuccaggcug

SEQ ID NO: 467220 - RNA, 22 nt, Human
ucuuugcagaauuuaacuuugc

SEQ ID NO: 467221 - RNA, 22 nt, Human
gcagaggaucaggcucuggaaa

SEQ ID NO: 467222 - RNA, 22 nt, Human
acagagcacauagauuggaguu

SEQ ID NO: 467223 - RNA, 22 nt, Human
uacauguuuacuccaagucagg

SEQ ID NO: 467224 - RNA, 22 nt, Human
auuaagacugcccauguuuuua

SEQ ID NO: 467225 - RNA, 22 nt, Human
cacagcauaaugaaauauacuu

SEQ ID NO: 467226 - RNA, 22 nt, Human
agagugaaaagcuagagcagua

SEQ ID NO: 467227 - RNA, 22 nt, Human
gaggaaccaaaucagcuugcac

SEQ ID NO: 467228 - RNA, 22 nt, Human
uccuauugguagacauuucugu

SEQ ID NO: 467229 - RNA, 22 nt, Human
ucuggccacccgaggccccugc

SEQ ID NO: 467230 - RNA, 22 nt, Human
uggcugaauaaaauaugguguu

SEQ ID NO: 467231 - RNA, 22 nt, Human
ugcaggagaaaguacggagcgu

SEQ ID NO: 467232 - RNA, 22 nt, Human
acagugaaugcccaagaaaagu

SEQ ID NO: 467233 - RNA, 22 nt, Human
uacaaacucuuuauauuucaua

SEQ ID NO: 467234 - RNA, 22 nt, Human
cugggugguuuugaugugaauu

SEQ ID NO: 467235 - RNA, 22 nt, Human
aguggcagacacaaugugggca

SEQ ID NO: 467236 - RNA, 22 nt, Human
ggggccagcacugugccuuugu

SEQ ID NO: 467237 - RNA, 22 nt, Human
auaaaaguaggaccaacuuaca

SEQ ID NO: 467238 - RNA, 22 nt, Human
ugauuuuuagcuauucugaaga

SEQ ID NO: 467239 - RNA, 22 nt, Human
ucagaagacuacuaggacacau

SEQ ID NO: 467240 - RNA, 22 nt, Human
uacauuguuuuuucuugccauc

SEQ ID NO: 467241 - RNA, 22 nt, Human
ugccuggaugugcuggccucac

SEQ ID NO: 467242 - RNA, 22 nt, Human
uucagugucaauuuuuaaauau

SEQ ID NO: 467243 - RNA, 22 nt, Human
aggucauuaaaguuaaaugagg

SEQ ID NO: 467244 - RNA, 20 nt, Human
ggucccugcccucugucauc

SEQ ID NO: 467245 - RNA, 21 nt, Human
agcugcuuucagcuccuagag

SEQ ID NO: 467246 - RNA, 21 nt, Human
ccugcagcaccagaaggagau

SEQ ID NO: 467247 - RNA, 22 nt, Human
ggcaguggcuccucucuacucc

SEQ ID NO: 467248 - RNA, 20 nt, Human
uggcuccucuuggcuguggc

SEQ ID NO: 467249 - RNA, 21 nt, Human
agcagagugcuuugacuuugu

SEQ ID NO: 467250 - RNA, 22 nt, Human
gcugaggccucagaaggcugag

SEQ ID NO: 467251 - RNA, 22 nt, Human
ucagggcauacucuucaagguc

SEQ ID NO: 467252 - RNA, 22 nt, Human
uaauuucuaauucauuuucagu

SEQ ID NO: 467253 - RNA, 22 nt, Human
gccaggcuggugucacaacucu

SEQ ID NO: 467254 - RNA, 22 nt, Human
acugagcugcaagucagggagg

SEQ ID NO: 467255 - RNA, 22 nt, Human
aaaugcacagguuuuaaauccu

SEQ ID NO: 467256 - RNA, 22 nt, Human
gaaacaaucaucaugugauuug

SEQ ID NO: 467257 - RNA, 20 nt, Human
gcagcugaaaguaugacacc

SEQ ID NO: 467258 - RNA, 21 nt, Human
ccagaggccucucuuggccac

SEQ ID NO: 467259 - RNA, 22 nt, Human
ggucuuccgagaggccugugcu

SEQ ID NO: 467260 - RNA, 22 nt, Human
cagggcugguuugucgaagaaa

SEQ ID NO: 467261 - RNA, 22 nt, Human
cagguccuggcaucaggcaggu

SEQ ID NO: 467262 - RNA, 22 nt, Human
gugcugagcugcagaugcgcuc

SEQ ID NO: 467263 - RNA, 22 nt, Human
cagugcagaggccagggaggau

SEQ ID NO: 467264 - RNA, 22 nt, Human
acuacuuugggccauuuguuua

SEQ ID NO: 467265 - RNA, 22 nt, Human
gcccaggccggagagcagugcu

SEQ ID NO: 467266 - RNA, 22 nt, Human
caaagugcuggaauuacaggug

SEQ ID NO: 467267 - RNA, 22 nt, Human
auuuuuaugacaaaccauccuc

SEQ ID NO: 467268 - RNA, 22 nt, Human
gcaaagucugcaucuggaucag

SEQ ID NO: 467269 - RNA, 22 nt, Human
gagcaggcuugcagagaagggg

SEQ ID NO: 467270 - RNA, 22 nt, Human
auuaaaagcuucccaagaguua

SEQ ID NO: 467271 - RNA, 22 nt, Human
uccaugagggacacuggaugcu

SEQ ID NO: 467272 - RNA, 22 nt, Human
gggcuacauugugagagaaguu

SEQ ID NO: 467273 - RNA, 21 nt, Human
cauugucgacauuuuccccuc

SEQ ID NO: 467274 - RNA, 22 nt, Human
cuaguucuagaucccugaggaa

SEQ ID NO: 467275 - RNA, 22 nt, Human
ggcuuccuggggccuccugcaa

SEQ ID NO: 467276 - RNA, 22 nt, Human
uggcagcaauuagcuagagcug

SEQ ID NO: 467277 - RNA, 22 nt, Human
uggggcuggggaucuugagccu

SEQ ID NO: 467278 - RNA, 22 nt, Human
cucaggacccgguccagguggg

SEQ ID NO: 467279 - RNA, 22 nt, Human
gcagccacuuugcaaccaagag

SEQ ID NO: 467280 - RNA, 23 nt, Human
aggcccaacucugugagggcugc

SEQ ID NO: 467281 - RNA, 22 nt, Human
agggaccuugauggguuuggga

SEQ ID NO: 467282 - RNA, 22 nt, Human
cagagccaggguugcaccccug

SEQ ID NO: 467283 - RNA, 22 nt, Human
caggccugcaggaaaggcuccc

SEQ ID NO: 467284 - RNA, 22 nt, Human
gucaccagucccagcuccugaa

SEQ ID NO: 467285 - RNA, 22 nt, Human
ggcagcaugagccuggugaauu

SEQ ID NO: 467286 - RNA, 22 nt, Human
uuauccaaacuggugaaucauu

SEQ ID NO: 467287 - RNA, 23 nt, Human
gaagccacacaaaggucgccaag

SEQ ID NO: 467288 - RNA, 22 nt, Human
uaguaucuuucuauauuuccca

SEQ ID NO: 467289 - RNA, 18 nt, Human
cagcagagacauucaaaa

SEQ ID NO: 467290 - RNA, 22 nt, Human
acaggcugcugggcuccgugcu

SEQ ID NO: 467291 - RNA, 22 nt, Human
gaggcaggcccugaaugaguca

SEQ ID NO: 467292 - RNA, 22 nt, Human
gcuggcugaggucuagcucuuu

SEQ ID NO: 467293 - RNA, 23 nt, Human
gcauugucuccccacuucugggc

SEQ ID NO: 467294 - RNA, 22 nt, Human
uugaacauuaacuucagucuau

SEQ ID NO: 467295 - RNA, 22 nt, Human
gcucccugacucaguuccugag

SEQ ID NO: 467296 - RNA, 22 nt, Human
acccugggcuuggccugcucag

SEQ ID NO: 467297 - RNA, 22 nt, Human
uccugcagagucccacugauuu

SEQ ID NO: 467298 - RNA, 22 nt, Human
uuaccaaaucccgugcacauuc

SEQ ID NO: 467299 - RNA, 22 nt, Human
aaggugucggguuagcucagcc

SEQ ID NO: 467300 - RNA, 22 nt, Human
agggcuggcuccguuaccuuga

SEQ ID NO: 467301 - RNA, 22 nt, Human
ucugagccaauuucugugucca

SEQ ID NO: 467302 - RNA, 22 nt, Human
uggagcccagacacuggcauug

SEQ ID NO: 467303 - RNA, 22 nt, Human
gacuguacgucauugaaggcca

SEQ ID NO: 467304 - RNA, 22 nt, Human
aagggcucccugccugaggugg

SEQ ID NO: 467305 - RNA, 22 nt, Human
ccagggcacuuaggcccagccc

SEQ ID NO: 467306 - RNA, 22 nt, Human
cauuuucucaaugaacccucuu

SEQ ID NO: 467307 - RNA, 22 nt, Human
ugugccuggaucucugugacaa

SEQ ID NO: 467308 - RNA, 22 nt, Human
auucucugugcagauuuaagac

SEQ ID NO: 467309 - RNA, 22 nt, Human
gggcagguggagggcccagcca

SEQ ID NO: 467310 - RNA, 22 nt, Human
gauggguggucucagacuugcc

SEQ ID NO: 467311 - RNA, 22 nt, Human
cccagccucuggguucugccgg

SEQ ID NO: 467312 - RNA, 22 nt, Human
cugggcuggcgcauccgacacg

SEQ ID NO: 467313 - RNA, 22 nt, Human
cacaucagguagaccuacagag

SEQ ID NO: 467314 - RNA, 22 nt, Human
gggcugagggguaucucauggg

SEQ ID NO: 467315 - RNA, 22 nt, Human
ccuggcagucaggggaguccuu

SEQ ID NO: 467316 - RNA, 22 nt, Human
uaaggaaacaacuuguauuuuu

SEQ ID NO: 467317 - RNA, 22 nt, Human
agaugggcgcccuggacugagg

SEQ ID NO: 467318 - RNA, 22 nt, Human
ccagagccucaacacagguccu

SEQ ID NO: 467319 - RNA, 17 nt, Human
agugaaauuuacauugc

SEQ ID NO: 467320 - RNA, 18 nt, Human
cuuuaugugcagagcuuu

SEQ ID NO: 467321 - RNA, 22 nt, Human
gcaggugguccccguggagugg

SEQ ID NO: 467322 - RNA, 22 nt, Human
ugaccuauuagauuuccuugcc

SEQ ID NO: 467323 - RNA, 22 nt, Human
cagggcucgcucgcucgcucgc

SEQ ID NO: 467324 - RNA, 22 nt, Human
uuuccaaagguggcaggaacaa

SEQ ID NO: 467325 - RNA, 22 nt, Human
aggcgcagacauacagggucug

SEQ ID NO: 467326 - RNA, 22 nt, Human
aguggcaggcagaagcuucuca

SEQ ID NO: 467327 - RNA, 22 nt, Human
auuauaaaccuuugaggguggg

SEQ ID NO: 467328 - RNA, 22 nt, Human
gugcagugagcagugcagcacc

SEQ ID NO: 467329 - RNA, 22 nt, Human
ugcagcucauugguguccuggu

SEQ ID NO: 467330 - RNA, 23 nt, Human
ccuucagaagaaguaacaggggc

SEQ ID NO: 467331 - RNA, 22 nt, Human
ugugcuucuugcagcuccugua

SEQ ID NO: 467332 - RNA, 22 nt, Human
aaauguauccuacuuccugagu

SEQ ID NO: 467333 - RNA, 22 nt, Human
cagaaauggaauuuuccaucac

SEQ ID NO: 467334 - RNA, 22 nt, Human
gcacacagccagcugagggcua

SEQ ID NO: 467335 - RNA, 22 nt, Human
uguauuagaucugagaacuucu

SEQ ID NO: 467336 - RNA, 20 nt, Human
gcugggggugugcugaguga

SEQ ID NO: 467337 - RNA, 22 nt, Human
uagcuuuccuuguugccugugc

SEQ ID NO: 467338 - RNA, 22 nt, Human
aagccgggccugagaaaugaca

SEQ ID NO: 467339 - RNA, 22 nt, Human
uggaaggggagcuggaaagggg

SEQ ID NO: 467340 - RNA, 22 nt, Human
uaacacugauuuguucucaggg

SEQ ID NO: 467341 - RNA, 22 nt, Human
ugagccugggagauggaggcug

SEQ ID NO: 467342 - RNA, 22 nt, Human
ugaggcagaguaagauacauga

SEQ ID NO: 467343 - RNA, 22 nt, Human
uugaggagcaggaugggaggcu

SEQ ID NO: 467344 - RNA, 20 nt, Human
cucaggauugucuagccccu

SEQ ID NO: 467345 - RNA, 22 nt, Human
auuuuucucucacacuuaccag

SEQ ID NO: 467346 - RNA, 22 nt, Human
ggggcagaguagcuggggugug

SEQ ID NO: 467347 - RNA, 22 nt, Human
cagagccaacgccaccugccca

SEQ ID NO: 467348 - RNA, 22 nt, Human
gcaugucaugucauguaggaau

SEQ ID NO: 467349 - RNA, 22 nt, Human
aaguccagcagugcuuguugau

SEQ ID NO: 467350 - RNA, 22 nt, Human
cagagcuggagaaguggauuua

SEQ ID NO: 467351 - RNA, 22 nt, Human
cagccagcuggcacugugagua

SEQ ID NO: 467352 - RNA, 22 nt, Human
uggcuccuucauucuccugcca

SEQ ID NO: 467353 - RNA, 22 nt, Human
uaaggcacccauguucauacag

SEQ ID NO: 467354 - RNA, 22 nt, Human
cucuuaaagaauguuccagcug

SEQ ID NO: 467355 - RNA, 22 nt, Human
cuggagagggagcccuggcagu

SEQ ID NO: 467356 - RNA, 22 nt, Human
uugcagcuuagugauguuaucu

SEQ ID NO: 467357 - RNA, 22 nt, Human
ccagcucccugaagccuggucu

SEQ ID NO: 467358 - RNA, 22 nt, Human
ggaccagagcucgggcuucuca

SEQ ID NO: 467359 - RNA, 22 nt, Human
cugucugucaccaaaacagacu

SEQ ID NO: 467360 - RNA, 22 nt, Human
ugagcccuaagggucaagcagg

SEQ ID NO: 467361 - RNA, 22 nt, Human
gccugucaauuuuguguacaau

SEQ ID NO: 467362 - RNA, 22 nt, Human
uccugccugagcguggaggagg

SEQ ID NO: 467363 - RNA, 20 nt, Human
ccuggcugcauucaggacgg

SEQ ID NO: 467364 - RNA, 22 nt, Human
aggccucacucucagagcuucu

SEQ ID NO: 467365 - RNA, 22 nt, Human
cacucacuuauuucuaacagaa

SEQ ID NO: 467366 - RNA, 22 nt, Human
gucaggaugacaagugcuuuca

SEQ ID NO: 467367 - RNA, 22 nt, Human
uuugucuuguguccuuaggacc

SEQ ID NO: 467368 - RNA, 22 nt, Human
aaguccagugcuuuagauucca

SEQ ID NO: 467369 - RNA, 22 nt, Human
cagucccaaggaggaagcaguc

SEQ ID NO: 467370 - RNA, 22 nt, Human
ccauuaaaauggaauguaguga

SEQ ID NO: 467371 - RNA, 22 nt, Human
ugugaaagauacuaggcagagg

SEQ ID NO: 467372 - RNA, 22 nt, Human
cucccuggcacagcgagagguu

SEQ ID NO: 467373 - RNA, 22 nt, Human
cccagcuugucugauucagccu

SEQ ID NO: 467374 - RNA, 22 nt, Human
uccucagucguuugagccaaaa

SEQ ID NO: 467375 - RNA, 22 nt, Human
gagccaaggguugccauggaga

SEQ ID NO: 467376 - RNA, 22 nt, Human
agugucauuuuguccaucuucu

SEQ ID NO: 467377 - RNA, 22 nt, Human
agaugcugccucuccucacaag

SEQ ID NO: 467378 - RNA, 22 nt, Human
aagcaggcauuccagagacaau

SEQ ID NO: 467379 - RNA, 22 nt, Human
cuaguggaaacuaacuggaauu

SEQ ID NO: 467380 - RNA, 22 nt, Human
ugggugaggaugaugaggcagc

SEQ ID NO: 467381 - RNA, 22 nt, Human
cagggcugucuccaaaggcccc

SEQ ID NO: 467382 - RNA, 22 nt, Human
gcuguggaaaugccuaacauga

SEQ ID NO: 467383 - RNA, 22 nt, Human
ggagugucagaaacaguguccu

SEQ ID NO: 467384 - RNA, 22 nt, Human
gaugauuuuaugucuugucauu

SEQ ID NO: 467385 - RNA, 17 nt, Human
uggcucugaggcugaau

SEQ ID NO: 467386 - RNA, 22 nt, Human
uuauguauggauggcugaaagu

SEQ ID NO: 467387 - RNA, 22 nt, Human
ucaggauguccaaaauccagcc

SEQ ID NO: 467388 - RNA, 19 nt, Human
ugggcagguucaguaaugg

SEQ ID NO: 467389 - RNA, 22 nt, Human
ugcauuguugaccaguugugca

SEQ ID NO: 467390 - RNA, 22 nt, Human
agcagcagaggucagaaaggua

SEQ ID NO: 467391 - RNA, 22 nt, Human
uuagcugcauuaucaaaguuau

SEQ ID NO: 467392 - RNA, 22 nt, Human
uucaagucaaggaaagaggucu

SEQ ID NO: 467393 - RNA, 21 nt, Human
gcccagcaaggugagaaggcc

SEQ ID NO: 467394 - RNA, 22 nt, Human
aggucagcugcugauaggcagc

SEQ ID NO: 467395 - RNA, 22 nt, Human
agccugcaggaugggcagcacc

SEQ ID NO: 467396 - RNA, 21 nt, Human
acuuugggcacuuuccugccc

SEQ ID NO: 467397 - RNA, 22 nt, Human
cucugggcaaagaugccucauc

SEQ ID NO: 467398 - RNA, 22 nt, Human
uaguucuucaugaauucagcuu

SEQ ID NO: 467399 - RNA, 22 nt, Human
cgcagagggcaggcagugcugg

SEQ ID NO: 467400 - RNA, 22 nt, Human
gugucccagccccacaggccug

SEQ ID NO: 467401 - RNA, 22 nt, Human
ugacagggcuagaggcaaugca

SEQ ID NO: 467402 - RNA, 22 nt, Human
auuucuucaggucagaaauaga

SEQ ID NO: 467403 - RNA, 22 nt, Human
ccagaggagggcucugaugagg

SEQ ID NO: 467404 - RNA, 23 nt, Human
acacauuuuucccguucugaggu

SEQ ID NO: 467405 - RNA, 22 nt, Human
agucauaauuauaaacaucagu

SEQ ID NO: 467406 - RNA, 22 nt, Human
cauccugcggggagcagagggc

SEQ ID NO: 467407 - RNA, 22 nt, Human
uuaugcuaagugcaacaagcca

SEQ ID NO: 467408 - RNA, 22 nt, Human
auggcaagcaagcugaagagau

SEQ ID NO: 467409 - RNA, 23 nt, Human
cuagggcaguauuucacagacac

SEQ ID NO: 467410 - RNA, 22 nt, Human
uagcugcccaucuuuccuuuag

SEQ ID NO: 467411 - RNA, 18 nt, Human
gcuggcugcacuucugcu

SEQ ID NO: 467412 - RNA, 22 nt, Human
aggcaagaacagacaugggagu

SEQ ID NO: 467413 - RNA, 22 nt, Human
uugaagcaaauucugugcagua

SEQ ID NO: 467414 - RNA, 22 nt, Human
ccagaagaggacacagugugga

SEQ ID NO: 467415 - RNA, 22 nt, Human
ggccuuggugccauggccaguu

SEQ ID NO: 467416 - RNA, 22 nt, Human
agccaccaccacugaaagguua

SEQ ID NO: 467417 - RNA, 22 nt, Human
auuuccacauaagggaaauaag

SEQ ID NO: 467418 - RNA, 17 nt, Human
guccugggaggagagag

SEQ ID NO: 467419 - RNA, 22 nt, Human
ucucuuaaaagauuuuaaugac

SEQ ID NO: 467420 - RNA, 22 nt, Human
gccagcaguccugcugugugcc

SEQ ID NO: 467421 - RNA, 22 nt, Human
ugaugggacugccagcugcuga

SEQ ID NO: 467422 - RNA, 22 nt, Human
ucagggacuaggugcugccuga

SEQ ID NO: 467423 - RNA, 22 nt, Human
aaaaacuguaauuacuuuugca

SEQ ID NO: 467424 - RNA, 22 nt, Human
caagagcauuuaguuagcuggu

SEQ ID NO: 467425 - RNA, 23 nt, Human
uucuuucaagaaguucacagugc

SEQ ID NO: 467426 - RNA, 19 nt, Human
acagggcagcaauaggaua

SEQ ID NO: 467427 - RNA, 22 nt, Human
aagggcagggaguuugugucua

SEQ ID NO: 467428 - RNA, 22 nt, Human
gagcugagccuggguggaccgc

SEQ ID NO: 467429 - RNA, 22 nt, Human
aucugccuccaaguccaugugu

SEQ ID NO: 467430 - RNA, 22 nt, Human
guaacugaggcagcuuuuaaga

SEQ ID NO: 467431 - RNA, 22 nt, Human
gcagaggacacaggagggcaag

SEQ ID NO: 467432 - RNA, 22 nt, Human
ggugccaggcucccagcucagg

SEQ ID NO: 467433 - RNA, 22 nt, Human
ucaucucaaaacccaaggggca

SEQ ID NO: 467434 - RNA, 22 nt, Human
uccauucauucauugaugaaca

SEQ ID NO: 467435 - RNA, 22 nt, Human
agcagggcuggauuuggcaaga

SEQ ID NO: 467436 - RNA, 19 nt, Human
auagaaaggguuaaagaca

SEQ ID NO: 467437 - RNA, 22 nt, Human
ugagcuuacuucuguacacaga

SEQ ID NO: 467438 - RNA, 22 nt, Human
gccagcagccacagaagucacu

SEQ ID NO: 467439 - RNA, 22 nt, Human
gcuguccaugucuggccucagu

SEQ ID NO: 467440 - RNA, 22 nt, Human
ucauccaguuguggagagggaa

SEQ ID NO: 467441 - RNA, 22 nt, Human
ccggcucggcgaccaggcugaa

SEQ ID NO: 467442 - RNA, 19 nt, Human
ggcugccuggagcgagggc

SEQ ID NO: 467443 - RNA, 22 nt, Human
aagaacagguucuagaaccauu

SEQ ID NO: 467444 - RNA, 18 nt, Human
acagaacucaggggcacc

SEQ ID NO: 467445 - RNA, 22 nt, Human
ucauggauggccgggaggugau

SEQ ID NO: 467446 - RNA, 22 nt, Human
ccaggcucugcgcuggacaugg

SEQ ID NO: 467447 - RNA, 22 nt, Human
aucuggcuuggguguggguagc

SEQ ID NO: 467448 - RNA, 20 nt, Human
gggugagauguaggagaggg

SEQ ID NO: 467449 - RNA, 20 nt, Human
ccaggccugggccugcucua

SEQ ID NO: 467450 - RNA, 22 nt, Human
cacucaggcugugucaggagga

SEQ ID NO: 467451 - RNA, 22 nt, Human
ccagcuccaaguuugggcauca

SEQ ID NO: 467452 - RNA, 23 nt, Human
agcauggaauaggaaagaggcag

SEQ ID NO: 467453 - RNA, 22 nt, Human
agagccugggcagcuccucugg

SEQ ID NO: 467454 - RNA, 17 nt, Human
ucugccgacugccagcu

SEQ ID NO: 467455 - RNA, 22 nt, Human
agccucucugaugugacagcua

SEQ ID NO: 467456 - RNA, 22 nt, Human
aaagaaauagauggcauuuaaa

SEQ ID NO: 467457 - RNA, 22 nt, Human
aagcuuuaugacuuggagacag

SEQ ID NO: 467458 - RNA, 22 nt, Human
uauuugcaacauaaaacucuga

SEQ ID NO: 467459 - RNA, 22 nt, Human
ucauugcagcuucagguguuca

SEQ ID NO: 467460 - RNA, 22 nt, Human
gaggucaggcuugcagcagggu

SEQ ID NO: 467461 - RNA, 22 nt, Human
uaagaacagugucugucucaca

SEQ ID NO: 467462 - RNA, 22 nt, Human
cccaggucuaugccagcucuga

SEQ ID NO: 467463 - RNA, 22 nt, Human
ucccaggccauaaaacucagag

SEQ ID NO: 467464 - RNA, 22 nt, Human
cugagccaaccacagcaggagc

SEQ ID NO: 467465 - RNA, 22 nt, Human
uggcugaaggaagauucuucua

SEQ ID NO: 467466 - RNA, 22 nt, Human
uccagggccaagucauggaacc

SEQ ID NO: 467467 - RNA, 22 nt, Human
aucagaagaaauggaugugacu

SEQ ID NO: 467468 - RNA, 22 nt, Human
auaugugugccauuucagcagu

SEQ ID NO: 467469 - RNA, 22 nt, Human
gagcaacaguuuaugguuuuuc

SEQ ID NO: 467470 - RNA, 22 nt, Human
ggggaccuuuccauuucugaga

SEQ ID NO: 467471 - RNA, 17 nt, Human
gcccgugggcuacggua

SEQ ID NO: 467472 - RNA, 22 nt, Human
agggaaauuaaugugagcaaug

SEQ ID NO: 467473 - RNA, 22 nt, Human
guaugucuuaggguucaguaac

SEQ ID NO: 467474 - RNA, 22 nt, Human
acugguuuuggaaaucaguaca

SEQ ID NO: 467475 - RNA, 22 nt, Human
acgcggugcggcaaguucaugg

SEQ ID NO: 467476 - RNA, 23 nt, Human
gagcugggauacaggcuuacugc

SEQ ID NO: 467477 - RNA, 22 nt, Human
ugcuccaggcugcugaagaucu

SEQ ID NO: 467478 - RNA, 22 nt, Human
ugggcagggagcuggaaccaca

SEQ ID NO: 467479 - RNA, 22 nt, Human
gggcaugguggcaggcaccugu

SEQ ID NO: 467480 - RNA, 22 nt, Human
ucggggauggugucugagggag

SEQ ID NO: 467481 - RNA, 18 nt, Human
gccagcccuccaaccucc

SEQ ID NO: 467482 - RNA, 22 nt, Human
ggccgggcuguggagaaggggu

SEQ ID NO: 467483 - RNA, 22 nt, Human
uccugugccuccaccugcuccg

SEQ ID NO: 467484 - RNA, 22 nt, Human
aggcgaagggaccagacgguag

SEQ ID NO: 467485 - RNA, 22 nt, Human
ucagauggaaugaugccacugc

SEQ ID NO: 467486 - RNA, 21 nt, Human
ggccuuggcgggggccgaauu

SEQ ID NO: 467487 - RNA, 22 nt, Human
gccagagggauuccuggugugu

SEQ ID NO: 467488 - RNA, 22 nt, Human
gucccagaggacagggucacau

SEQ ID NO: 467489 - RNA, 22 nt, Human
gcugguggcagagcuccgcggc

SEQ ID NO: 467490 - RNA, 22 nt, Human
acugcacuccagcccgagcaac

SEQ ID NO: 467491 - RNA, 22 nt, Human
ggcgcggugacucagccucgcu

SEQ ID NO: 467492 - RNA, 22 nt, Human
uagcccauggacuggucagcug

SEQ ID NO: 467493 - RNA, 22 nt, Human
uaagggaacagcuucaaacuca

SEQ ID NO: 467494 - RNA, 22 nt, Human
ccccuuucucccgcgucuggcc

SEQ ID NO: 467495 - RNA, 22 nt, Human
gcggggacagaaggcgguucuc

SEQ ID NO: 467496 - RNA, 22 nt, Human
ggcagguguggugaccagagau

SEQ ID NO: 467497 - RNA, 22 nt, Human
gcgaguccacuggggggcgcag

SEQ ID NO: 467498 - RNA, 22 nt, Human
ggcgagcaugagucacucuggg

SEQ ID NO: 467499 - RNA, 22 nt, Human
ugagcugcuucuuauaaugugu

SEQ ID NO: 467500 - RNA, 22 nt, Human
auggugguagaagcacuaugug

SEQ ID NO: 467501 - RNA, 22 nt, Human
gcuaugggaugugcuguggaug

SEQ ID NO: 467502 - RNA, 22 nt, Human
uggcacagcuugucauaaacuc

SEQ ID NO: 467503 - RNA, 22 nt, Human
cuguccuaugaguacucacuag

SEQ ID NO: 467504 - RNA, 22 nt, Human
ugguccucacccuacccagcug

SEQ ID NO: 467505 - RNA, 22 nt, Human
ggagcugugcugggugaucagg

SEQ ID NO: 467506 - RNA, 22 nt, Human
acagccaggaauucuggagaag

SEQ ID NO: 467507 - RNA, 22 nt, Human
gccagccccagacauccuaucg

SEQ ID NO: 467508 - RNA, 22 nt, Human
uggcccgggaguuuugaagagu

SEQ ID NO: 467509 - RNA, 22 nt, Human
ggccuugguaaauuggcauuug

SEQ ID NO: 467510 - RNA, 20 nt, Human
gcuccccuucucugggccuc

SEQ ID NO: 467511 - RNA, 22 nt, Human
agggggcuccuuggugugcaga

SEQ ID NO: 467512 - RNA, 22 nt, Human
cacggccacugcagcaccccag

SEQ ID NO: 467513 - RNA, 19 nt, Human
ugguggaggugcaccugac

SEQ ID NO: 467514 - RNA, 22 nt, Human
uuccuccagccuggagcacuuc

SEQ ID NO: 467515 - RNA, 22 nt, Human
ggcagaggaagcuggaaguggg

SEQ ID NO: 467516 - RNA, 22 nt, Human
gcggcccgagcaggacgggugg

SEQ ID NO: 467517 - RNA, 22 nt, Human
uccggcggccggccugagcccg

SEQ ID NO: 467518 - RNA, 22 nt, Human
uggcaggaaaaagggccagagg

SEQ ID NO: 467519 - RNA, 22 nt, Human
ggagcugcucagagccaguccc

SEQ ID NO: 467520 - RNA, 22 nt, Human
ugcucccaggcauucucuguug

SEQ ID NO: 467521 - RNA, 20 nt, Human
ucugugugccaucaccuaac

SEQ ID NO: 467522 - RNA, 18 nt, Human
ggccucagccuggccgga

SEQ ID NO: 467523 - RNA, 22 nt, Human
gauggaggagauggcagggugc

SEQ ID NO: 467524 - RNA, 22 nt, Human
ucugggugucacuccugccugc

SEQ ID NO: 467525 - RNA, 23 nt, Human
gggugcugccuguagucaugcug

SEQ ID NO: 467526 - RNA, 22 nt, Human
ccuaggccgcccggugcguggg

SEQ ID NO: 467527 - RNA, 22 nt, Human
gggaaacuuucacaauguccag

SEQ ID NO: 467528 - RNA, 22 nt, Human
cuggccagggugcgaucguggu

SEQ ID NO: 467529 - RNA, 22 nt, Human
uccagccauaucuuguagcccu

SEQ ID NO: 467530 - RNA, 22 nt, Human
cacgcacgcuggguggaggcgc

SEQ ID NO: 467531 - RNA, 22 nt, Human
uuacgcagcugcuccaggaagc

SEQ ID NO: 467532 - RNA, 22 nt, Human
caugaccagagaggacggccag

SEQ ID NO: 467533 - RNA, 22 nt, Human
aggcaguggcuuuuguuguguu

SEQ ID NO: 467534 - RNA, 22 nt, Human
ucaccggcagacguggccugau

SEQ ID NO: 467535 - RNA, 22 nt, Human
cugcaccgugucucgggcugcc

SEQ ID NO: 467536 - RNA, 22 nt, Human
gggagccagcagggcauggagc

SEQ ID NO: 467537 - RNA, 21 nt, Human
acagaagcggcgaguggcccc

SEQ ID NO: 467538 - RNA, 22 nt, Human
uucuccccgucucucugaggcc

SEQ ID NO: 467539 - RNA, 22 nt, Human
ugggugaagaggcuaugcuacu

SEQ ID NO: 467540 - RNA, 22 nt, Human
gccaggucgucuccauguccaa

SEQ ID NO: 467541 - RNA, 22 nt, Human
cuucuggcguuggaggucugag

SEQ ID NO: 467542 - RNA, 22 nt, Human
aggcuccaugguucucccucag

SEQ ID NO: 467543 - RNA, 22 nt, Human
caggaaugguuaaucuaaagug

SEQ ID NO: 467544 - RNA, 22 nt, Human
ggccgcggauuuucccgcuggc

SEQ ID NO: 467545 - RNA, 19 nt, Human
acccagcccaggaguggca

SEQ ID NO: 467546 - RNA, 22 nt, Human
uggggcuccuccuggcaggagg

SEQ ID NO: 467547 - RNA, 22 nt, Human
agaguggagagaaacaacucug

SEQ ID NO: 467548 - RNA, 22 nt, Human
acgucuucguuggcagagauuu

SEQ ID NO: 467549 - RNA, 22 nt, Human
ccaugcccuugucaucuccagg

SEQ ID NO: 467550 - RNA, 22 nt, Human
uugacguccucgauggggaacu

SEQ ID NO: 467551 - RNA, 22 nt, Human
cugggcccaggcggcucucgga

SEQ ID NO: 467552 - RNA, 18 nt, Human
cugccagugugcucuccg

SEQ ID NO: 467553 - RNA, 22 nt, Human
caggccgggcacugcgcuaggu

SEQ ID NO: 467554 - RNA, 22 nt, Human
uuccuuggaaagagacgucgcu

SEQ ID NO: 467555 - RNA, 22 nt, Human
gccaggaccucagaugcagggc

SEQ ID NO: 467556 - RNA, 22 nt, Human
cugggaagggacgccagugccu

SEQ ID NO: 467557 - RNA, 22 nt, Human
acggccgaugacuccagcaugg

SEQ ID NO: 467558 - RNA, 20 nt, Human
cgggacacucaagcucuggg

SEQ ID NO: 467559 - RNA, 22 nt, Human
aaagcugggcuggccaacccag

SEQ ID NO: 467560 - RNA, 22 nt, Human
cgggaagguggagguugcagug

SEQ ID NO: 467561 - RNA, 22 nt, Human
ggaagcuguuaucaucuguauc

SEQ ID NO: 467562 - RNA, 22 nt, Human
ugcaaaaagagcgaggagcccu

SEQ ID NO: 467563 - RNA, 22 nt, Human
uucuuucugggguccuucggcu

SEQ ID NO: 467564 - RNA, 22 nt, Human
ugacucacuuaauuuacaaguc

SEQ ID NO: 467565 - RNA, 22 nt, Human
uguguggcaagcuguaugcuag

SEQ ID NO: 467566 - RNA, 22 nt, Human
auccgggguucauuuucacuga

SEQ ID NO: 467567 - RNA, 22 nt, Human
uacagcgaaaauuuagcuugau

SEQ ID NO: 467568 - RNA, 22 nt, Human
aaagcugcaagcuccugaggaa

SEQ ID NO: 467569 - RNA, 22 nt, Human
acucccuugguggagaaugcaa

SEQ ID NO: 467570 - RNA, 23 nt, Human
caccccacccugaggaggaggga

SEQ ID NO: 467571 - RNA, 21 nt, Human
agggccagaucaccaaggagc

SEQ ID NO: 467572 - RNA, 22 nt, Human
uuucuuggucuucccgaccugg

SEQ ID NO: 467573 - RNA, 21 nt, Human
ucuuggggaggagggcugcac

SEQ ID NO: 467574 - RNA, 22 nt, Human
auacagaagaccccuccgucau

SEQ ID NO: 467575 - RNA, 22 nt, Human
uuggggccgggauaagguuguu

SEQ ID NO: 467576 - RNA, 22 nt, Human
guggcagcggcccaggccgucu

SEQ ID NO: 467577 - RNA, 22 nt, Human
caggcccuuuccugggcauagg

SEQ ID NO: 467578 - RNA, 22 nt, Human
aaggggaguuagugauaaaacc

SEQ ID NO: 467579 - RNA, 22 nt, Human
ggcugcccucggggucgcaggc

SEQ ID NO: 467580 - RNA, 22 nt, Human
uacaaagugauuuuggaauuga

SEQ ID NO: 467581 - RNA, 22 nt, Human
cugggcccacgagggcucuggg

SEQ ID NO: 467582 - RNA, 22 nt, Human
gcagcagcggggccccugcgcg

SEQ ID NO: 467583 - RNA, 22 nt, Human
uccuggggaggucgaggcugag

SEQ ID NO: 467584 - RNA, 23 nt, Human
gguuggcuguacccaggcucccu

SEQ ID NO: 467585 - RNA, 22 nt, Human
ggcacugggugagggucacugg

SEQ ID NO: 467586 - RNA, 20 nt, Human
ugugcccaauguccagguuc

SEQ ID NO: 467587 - RNA, 22 nt, Human
aucauccauggcugaucauaaa

SEQ ID NO: 467588 - RNA, 22 nt, Human
cugcgggcugucaggcgugcca

SEQ ID NO: 467589 - RNA, 22 nt, Human
gagggugguggcuuaaggugcu

SEQ ID NO: 467590 - RNA, 22 nt, Human
cagcccaggacugcagguguuu

SEQ ID NO: 467591 - RNA, 19 nt, Human
cagcaaacacuguaaaugg

SEQ ID NO: 467592 - RNA, 22 nt, Human
agaaaucugacugcugugcaca

SEQ ID NO: 467593 - RNA, 22 nt, Human
uguaccacucuacuaaggguuc

SEQ ID NO: 467594 - RNA, 22 nt, Human
uggggucagcaggccuggccug

SEQ ID NO: 467595 - RNA, 20 nt, Human
uccagccacuuccgcugguc

SEQ ID NO: 467596 - RNA, 22 nt, Human
acucgcggcggacggcggccag

SEQ ID NO: 467597 - RNA, 20 nt, Human
ucucuggcaagaagcugcag

SEQ ID NO: 467598 - RNA, 22 nt, Human
caggguggaacaggcaauacuu

SEQ ID NO: 467599 - RNA, 22 nt, Human
uugggagaaauaguugauccgc

SEQ ID NO: 467600 - RNA, 22 nt, Human
ugaggauggaaugcugugcaag

SEQ ID NO: 467601 - RNA, 22 nt, Human
caggcacaaugagcgccaucuu

SEQ ID NO: 467602 - RNA, 22 nt, Human
cccaggaguuagagguuguggu

SEQ ID NO: 467603 - RNA, 22 nt, Human
aggaggguggggucugccuguc

SEQ ID NO: 467604 - RNA, 22 nt, Human
cacaggaagcaagccuggggcc

SEQ ID NO: 467605 - RNA, 20 nt, Human
gcagcagacagacaggggac

SEQ ID NO: 467606 - RNA, 22 nt, Human
ccugagcuuacaauuuaagaac

SEQ ID NO: 467607 - RNA, 22 nt, Human
uaaaaguuagcuaggacaaagu

SEQ ID NO: 467608 - RNA, 22 nt, Human
gcugccuggaauaacggcuggc

SEQ ID NO: 467609 - RNA, 22 nt, Human
gagcugcuggccuccugcggga

SEQ ID NO: 467610 - RNA, 22 nt, Human
gagguuggagggcuggccugca

SEQ ID NO: 467611 - RNA, 22 nt, Human
aaggaccaguuuugcagaauug

SEQ ID NO: 467612 - RNA, 22 nt, Human
aguguuugaguuugcggcauug

SEQ ID NO: 467613 - RNA, 22 nt, Human
uuuuuugucuugaagaaauggu

SEQ ID NO: 467614 - RNA, 22 nt, Human
cccagaggcugaguugggagca

SEQ ID NO: 467615 - RNA, 22 nt, Human
acccacagccgcugugcguccc

SEQ ID NO: 467616 - RNA, 22 nt, Human
ggucccagucccuuuccaccgu

SEQ ID NO: 467617 - RNA, 22 nt, Human
uccucuccaggugagccgaaau

SEQ ID NO: 467618 - RNA, 22 nt, Human
gaagcccuggggucagugucgu

SEQ ID NO: 467619 - RNA, 22 nt, Human
cagagccaaaccucagggcccg

SEQ ID NO: 467620 - RNA, 22 nt, Human
gccuggcaaggcccuguugacu

SEQ ID NO: 467621 - RNA, 22 nt, Human
agcaggccugccaccucggggu

SEQ ID NO: 467622 - RNA, 19 nt, Human
uccagaacugcccuggccu

SEQ ID NO: 467623 - RNA, 22 nt, Human
cgggcuccgggucuuugcaguc

SEQ ID NO: 467624 - RNA, 22 nt, Human
aggcuguagaucuagacaugua

SEQ ID NO: 467625 - RNA, 22 nt, Human
cucccagccuucgccagucuga

SEQ ID NO: 467626 - RNA, 22 nt, Human
auguuuguguuucccauucagg

SEQ ID NO: 467627 - RNA, 22 nt, Human
ggucauacaaggcacuggugau

SEQ ID NO: 467628 - RNA, 22 nt, Human
gugggggcaggcagugcuagga

SEQ ID NO: 467629 - RNA, 22 nt, Human
gugcucuggccaagcgcgugcg

SEQ ID NO: 467630 - RNA, 22 nt, Human
gcagggcugauggcuucccuca

SEQ ID NO: 467631 - RNA, 22 nt, Human
aagugcaggucucagcuacucu

SEQ ID NO: 467632 - RNA, 22 nt, Human
cgugcggccucggggcccggcu

SEQ ID NO: 467633 - RNA, 18 nt, Human
gccuggcuucggagccgc

SEQ ID NO: 467634 - RNA, 22 nt, Human
caucucccacuuccuugggggu

SEQ ID NO: 467635 - RNA, 22 nt, Human
ccaggagaaugggauuacccua

SEQ ID NO: 467636 - RNA, 22 nt, Human
ccaguccaggccauggauuuug

SEQ ID NO: 467637 - RNA, 22 nt, Human
ggagaagggaacugaguuuuug

SEQ ID NO: 467638 - RNA, 22 nt, Human
augaugaagcaugguuacacug

SEQ ID NO: 467639 - RNA, 17 nt, Human
ucuccuggcucuaucag

SEQ ID NO: 467640 - RNA, 22 nt, Human
uuggcgcccaggacgccgccgc

SEQ ID NO: 467641 - RNA, 22 nt, Human
aggcugucucaccucaggaggg

SEQ ID NO: 467642 - RNA, 22 nt, Human
uuaaaagaauccuguuauccuc

SEQ ID NO: 467643 - RNA, 22 nt, Human
gcuggccugaccugaggcuggg

SEQ ID NO: 467644 - RNA, 22 nt, Human
uccugcagccauuagaggucaa

SEQ ID NO: 467645 - RNA, 21 nt, Human
gccaccucaaucuucuagcgc

SEQ ID NO: 467646 - RNA, 22 nt, Human
guucuuaaagauucaucaagca

SEQ ID NO: 467647 - RNA, 22 nt, Human
gggcuguuugcauauguuuaua

SEQ ID NO: 467648 - RNA, 22 nt, Human
guuguuuuugaacggugguggc

SEQ ID NO: 467649 - RNA, 22 nt, Human
ucaggaugagucaucaagcugc

SEQ ID NO: 467650 - RNA, 22 nt, Human
gccacaggaaagcacccuggag

SEQ ID NO: 467651 - RNA, 22 nt, Human
uaaaaucaugacagauugacau

SEQ ID NO: 467652 - RNA, 22 nt, Human
cggucguaguucuucagcaggu

SEQ ID NO: 467653 - RNA, 22 nt, Human
cucaugucggcaggacucgccc

SEQ ID NO: 467654 - RNA, 22 nt, Human
aaaucugagaaauauuguccag

SEQ ID NO: 467655 - RNA, 22 nt, Human
agauugucauugacgaugagca

SEQ ID NO: 467656 - RNA, 22 nt, Human
acacaucagaaauaugaaugag

SEQ ID NO: 467657 - RNA, 22 nt, Human
cgcagcugcugcucugaaacag

SEQ ID NO: 467658 - RNA, 22 nt, Human
uggaagggguuacgcagcagga

SEQ ID NO: 467659 - RNA, 22 nt, Human
ccccagcagacucagggcaggu

SEQ ID NO: 467660 - RNA, 22 nt, Human
agccccaguucccuggaagucu

SEQ ID NO: 467661 - RNA, 22 nt, Human
ccacagcaugcaggccugacac

SEQ ID NO: 467662 - RNA, 22 nt, Human
gggagggucugagagcugcacc

SEQ ID NO: 467663 - RNA, 22 nt, Human
ccugguccccaucggcccagcg

SEQ ID NO: 467664 - RNA, 22 nt, Human
cccagcugaacuugcauuccaa

SEQ ID NO: 467665 - RNA, 22 nt, Human
acagauccugguuacagccauu

SEQ ID NO: 467666 - RNA, 22 nt, Human
ccugcacuaccuggggcugcug

SEQ ID NO: 467667 - RNA, 22 nt, Human
gagcaccgccuccacgaugccc

SEQ ID NO: 467668 - RNA, 22 nt, Human
ccaggcagccaagugugugugu

SEQ ID NO: 467669 - RNA, 18 nt, Human
cgauguguaugugauuug

SEQ ID NO: 467670 - RNA, 23 nt, Human
agguggagcugugcagccggggc

SEQ ID NO: 467671 - RNA, 22 nt, Human
uuauuuaaaauguagguuggga

SEQ ID NO: 467672 - RNA, 22 nt, Human
gagaaagggaacuuacagagug

SEQ ID NO: 467673 - RNA, 22 nt, Human
ucugggaguuucugugggagcu

SEQ ID NO: 467674 - RNA, 20 nt, Human
ccuggagccuggaaggaguc

SEQ ID NO: 467675 - RNA, 22 nt, Human
ucaccgccuugcccggccgggc

SEQ ID NO: 467676 - RNA, 22 nt, Human
ucccggcgcugggagguggguc

SEQ ID NO: 467677 - RNA, 22 nt, Human
acacacagaaggaagccccacu

SEQ ID NO: 467678 - RNA, 22 nt, Human
caggaaugccaaccagugcaug

SEQ ID NO: 467679 - RNA, 22 nt, Human
cuggcuccauccuugagcucug

SEQ ID NO: 467680 - RNA, 22 nt, Human
ucccagauuccugcucuuauau

SEQ ID NO: 467681 - RNA, 22 nt, Human
gcugcagggagcuggaaggcuc

SEQ ID NO: 467682 - RNA, 22 nt, Human
ggcggcgcguagccggagacuu

SEQ ID NO: 467683 - RNA, 22 nt, Human
ugcugcgggacccacugugggc

SEQ ID NO: 467684 - RNA, 22 nt, Human
ccaggagcccugccacaauggu

SEQ ID NO: 467685 - RNA, 22 nt, Human
cugguuuuccaauguuuugacu

SEQ ID NO: 467686 - RNA, 22 nt, Human
ugcccuccacaguggcuccacc

SEQ ID NO: 467687 - RNA, 22 nt, Human
acccacgaagaugagcggcaug

SEQ ID NO: 467688 - RNA, 20 nt, Human
gcugugccaugacccucgag

SEQ ID NO: 467689 - RNA, 22 nt, Human
acggagcccgugucagguggga

SEQ ID NO: 467690 - RNA, 22 nt, Human
aggcccugcugaggccucccuc

SEQ ID NO: 467691 - RNA, 22 nt, Human
uuggccguuucacugggcaguu

SEQ ID NO: 467692 - RNA, 22 nt, Human
uacguuuuaaacacggagccag

SEQ ID NO: 467693 - RNA, 22 nt, Human
auacaacagaaaaugauuauuc

SEQ ID NO: 467694 - RNA, 22 nt, Human
ggggaccuggccacccauccuu

SEQ ID NO: 467695 - RNA, 22 nt, Human
uggagugcaguugggaggacac

SEQ ID NO: 467696 - RNA, 22 nt, Human
uccuuucuucuucugcccaugg

SEQ ID NO: 467697 - RNA, 19 nt, Human
gggucccacugcccgucug

SEQ ID NO: 467698 - RNA, 22 nt, Human
cacgugcaggucuuaggagaca

SEQ ID NO: 467699 - RNA, 22 nt, Human
ugcucccaaaccugacaggcuc

SEQ ID NO: 467700 - RNA, 22 nt, Human
uguuugcucugacuaucuugcg

SEQ ID NO: 467701 - RNA, 22 nt, Human
augcggagccccaagcuugaag

SEQ ID NO: 467702 - RNA, 22 nt, Human
acuggcccuggcugcuaggcug

SEQ ID NO: 467703 - RNA, 22 nt, Human
gucacccguuugacuauccacc

SEQ ID NO: 467704 - RNA, 21 nt, Human
aucuuaaaaggucuuaacuuu

SEQ ID NO: 467705 - RNA, 17 nt, Human
gccuggcccagccuggc

SEQ ID NO: 467706 - RNA, 22 nt, Human
gaccaaggaagaggggagccag

SEQ ID NO: 467707 - RNA, 22 nt, Human
cucgccccggcacaguguccgu

SEQ ID NO: 467708 - RNA, 22 nt, Human
cuguguccaauggccuuagcag

SEQ ID NO: 467709 - RNA, 22 nt, Human
ccugcgcgucugggucugucuc

SEQ ID NO: 467710 - RNA, 21 nt, Human
cacuccacuuagaacaggguu

SEQ ID NO: 467711 - RNA, 22 nt, Human
gguggcagaggugcaucagccc

SEQ ID NO: 467712 - RNA, 19 nt, Human
ugcuccaggccuugccgca

SEQ ID NO: 467713 - RNA, 22 nt, Human
gugcaggugguuggcccagccg

SEQ ID NO: 467714 - RNA, 22 nt, Human
gaugggcaucaaacaugacgug

SEQ ID NO: 467715 - RNA, 22 nt, Human
agacacauuuucagcucugcca

SEQ ID NO: 467716 - RNA, 22 nt, Human
uuccuucuucauuguguuacag

SEQ ID NO: 467717 - RNA, 22 nt, Human
ggcgaggugucugccaucaagc

SEQ ID NO: 467718 - RNA, 22 nt, Human
gggcccuggacguggcggcaga

SEQ ID NO: 467719 - RNA, 22 nt, Human
ugugagauuuuauuugauaugc

SEQ ID NO: 467720 - RNA, 22 nt, Human
gggcagcaaaucugagucuggu

SEQ ID NO: 467721 - RNA, 22 nt, Human
gggagccccaccucggugcccg

SEQ ID NO: 467722 - RNA, 22 nt, Human
cagagguagccgagugcaaucg

SEQ ID NO: 467723 - RNA, 22 nt, Human
gagggcugccacguugggcgag

SEQ ID NO: 467724 - RNA, 22 nt, Human
ccugggacuuggucugggguuu

SEQ ID NO: 467725 - RNA, 22 nt, Human
gccuggagcucggcugagggcg

SEQ ID NO: 467726 - RNA, 22 nt, Human
ggccuuggaguccuccacugga

SEQ ID NO: 467727 - RNA, 22 nt, Human
ccaggccuguguuguguggagg

SEQ ID NO: 467728 - RNA, 22 nt, Human
caaugcagauaccuuccagaga

SEQ ID NO: 467729 - RNA, 22 nt, Human
accgugucugacacuuugggcg

SEQ ID NO: 467730 - RNA, 17 nt, Human
uaagggggaaacggagc

SEQ ID NO: 467731 - RNA, 22 nt, Human
aaagaggcucaaggugggccag

SEQ ID NO: 467732 - RNA, 22 nt, Human
cuccaggacugaggacagagcu

SEQ ID NO: 467733 - RNA, 17 nt, Human
uggcacagaggugcuau

SEQ ID NO: 467734 - RNA, 23 nt, Human
cagcacaguacauuuccugucuc

SEQ ID NO: 467735 - RNA, 20 nt, Human
aucaggcuuucuguugcgau

SEQ ID NO: 467736 - RNA, 22 nt, Human
cuacauuauguuuauugggacu

SEQ ID NO: 467737 - RNA, 22 nt, Human
ggagggaaccuuggcuggauug

SEQ ID NO: 467738 - RNA, 22 nt, Human
ggagccuggaguuucugauggg

SEQ ID NO: 467739 - RNA, 22 nt, Human
cugggaggcccacguugggaag

SEQ ID NO: 467740 - RNA, 22 nt, Human
uggugaagucagcggagcccgg

SEQ ID NO: 467741 - RNA, 22 nt, Human
ccaggcccugcuccucacacca

SEQ ID NO: 467742 - RNA, 22 nt, Human
gggaggaaggcuugggugagua

SEQ ID NO: 467743 - RNA, 22 nt, Human
gcauuuaaauuugaacuucaga

SEQ ID NO: 467744 - RNA, 22 nt, Human
uccuccuuuccccgcuggagcc

SEQ ID NO: 467745 - RNA, 22 nt, Human
gcgagucgccgcugcagcccua

SEQ ID NO: 467746 - RNA, 22 nt, Human
cagcuggcgacucuccucgaug

SEQ ID NO: 467747 - RNA, 20 nt, Human
caauaauuuacuucccuauu

SEQ ID NO: 467748 - RNA, 18 nt, Human
cugccuguugcugagagg

SEQ ID NO: 467749 - RNA, 22 nt, Human
gcacugccugugagcccugguu

SEQ ID NO: 467750 - RNA, 22 nt, Human
aggagggagcuuaagccaggca

SEQ ID NO: 467751 - RNA, 22 nt, Human
guggaaauuuuaggaucaucuu

SEQ ID NO: 467752 - RNA, 22 nt, Human
gggacuggaguagaggccggug

SEQ ID NO: 467753 - RNA, 18 nt, Human
ccucagggagagagacgc

SEQ ID NO: 467754 - RNA, 22 nt, Human
uccaggcuccccugcgugcucc

SEQ ID NO: 467755 - RNA, 22 nt, Human
gauugcugggucccacucccag

SEQ ID NO: 467756 - RNA, 22 nt, Human
cucccugggccucaguuucucu

SEQ ID NO: 467757 - RNA, 22 nt, Human
ugggaagauaugagugaccaac

SEQ ID NO: 467758 - RNA, 22 nt, Human
acuucccacugcagugacugag

SEQ ID NO: 467759 - RNA, 17 nt, Human
gcuccagaauucuaguc

SEQ ID NO: 467760 - RNA, 22 nt, Human
cggggccuagucuaccucggca

SEQ ID NO: 467761 - RNA, 22 nt, Human
ucgggacgguggcauuugugcc

SEQ ID NO: 467762 - RNA, 17 nt, Human
ucugcagggggccgugu

SEQ ID NO: 467763 - RNA, 22 nt, Human
agcuccagggaaagaguggauc

SEQ ID NO: 467764 - RNA, 18 nt, Human
agguguguuucuaggagc

SEQ ID NO: 467765 - RNA, 22 nt, Human
ucccuguccugggcaaucccag

SEQ ID NO: 467766 - RNA, 22 nt, Human
caggcucgguccaguggcaccc

SEQ ID NO: 467767 - RNA, 22 nt, Human
gaggggcucuugggcaugaagg

SEQ ID NO: 467768 - RNA, 22 nt, Human
cagggccagggcuauggugaag

SEQ ID NO: 467769 - RNA, 22 nt, Human
uuuccucacacagaagaucuug

SEQ ID NO: 467770 - RNA, 19 nt, Human
acugcagggaggaggugug

SEQ ID NO: 467771 - RNA, 22 nt, Human
ggccuugggauguggcugcagc

SEQ ID NO: 467772 - RNA, 22 nt, Human
gggcuccagaggcucacccugg

SEQ ID NO: 467773 - RNA, 20 nt, Human
uguauuuaaugaaggcuuuu

SEQ ID NO: 467774 - RNA, 22 nt, Human
gaagcgcggcgucggcgugggu

SEQ ID NO: 467775 - RNA, 17 nt, Human
uuuguucguuaguccgg

SEQ ID NO: 467776 - RNA, 22 nt, Human
ucucucugcagcccgggacacu

SEQ ID NO: 467777 - RNA, 22 nt, Human
agguggucuuguggaugccgca

SEQ ID NO: 467778 - RNA, 22 nt, Human
uccaggaggacugagggggcug

SEQ ID NO: 467779 - RNA, 22 nt, Human
aggccgugugagcaugugugag

SEQ ID NO: 467780 - RNA, 22 nt, Human
gcagccuccgcacugcgagucc

SEQ ID NO: 467781 - RNA, 22 nt, Human
guggggacgggauggcucacug

SEQ ID NO: 467782 - RNA, 22 nt, Human
cgugaugcucaggaggucauag

SEQ ID NO: 467783 - RNA, 22 nt, Human
cugcagggcagggccuccuggc

SEQ ID NO: 467784 - RNA, 22 nt, Human
gggggacaggaugaauaucugu

SEQ ID NO: 467785 - RNA, 22 nt, Human
ccaccgaaacgucugcggaucc

SEQ ID NO: 467786 - RNA, 22 nt, Human
ggagcggagggagggccacugu

SEQ ID NO: 467787 - RNA, 22 nt, Human
ggcacagcugaugcagacacac

SEQ ID NO: 467788 - RNA, 22 nt, Human
cggagcagagccacucgggccg

SEQ ID NO: 467789 - RNA, 22 nt, Human
ccgcguggcacccuccuggagg

SEQ ID NO: 467790 - RNA, 22 nt, Human
augaaacaacagacuuggucaa

SEQ ID NO: 467791 - RNA, 22 nt, Human
caauuaccaguaauugagguuu

SEQ ID NO: 467792 - RNA, 22 nt, Human
gaggcagagacuccaccuucag

SEQ ID NO: 467793 - RNA, 22 nt, Human
uguuccugacggccaaagaggu

SEQ ID NO: 467794 - RNA, 22 nt, Human
acaaacagaguugaaaaauagg

SEQ ID NO: 467795 - RNA, 22 nt, Human
gcagcagcaggcgcucggccgu

SEQ ID NO: 467796 - RNA, 19 nt, Human
gcacacccugcaccaccau

SEQ ID NO: 467797 - RNA, 22 nt, Human
aaagcagaacugagagagcugg

SEQ ID NO: 467798 - RNA, 22 nt, Human
gucguucucugccagggcguug

SEQ ID NO: 467799 - RNA, 22 nt, Human
ccuccccacagcccaggagacu

SEQ ID NO: 467800 - RNA, 22 nt, Human
ccuggggaccugccucagcccu

SEQ ID NO: 467801 - RNA, 22 nt, Human
aggggagguguccccaaaucuc

SEQ ID NO: 467802 - RNA, 22 nt, Human
caggcuguguuccuggaacccc

SEQ ID NO: 467803 - RNA, 22 nt, Human
uggaaggggagcuggaaagggg

SEQ ID NO: 467804 - RNA, 22 nt, Human
ccaguucuuucugugugcaaca

SEQ ID NO: 467805 - RNA, 22 nt, Human
ugggaaggggagcuggaaagga

SEQ ID NO: 467806 - RNA, 22 nt, Human
gggagggcuuggacccagaugu

SEQ ID NO: 467807 - RNA, 22 nt, Human
cccacaggcaggugcaugggcu

SEQ ID NO: 467808 - RNA, 22 nt, Human
guguuucccuggcacaagaacc

SEQ ID NO: 467809 - RNA, 22 nt, Human
gagcuccuauggucgguggcuc

SEQ ID NO: 467810 - RNA, 22 nt, Human
acagggcaccugagguaggaag

SEQ ID NO: 467811 - RNA, 22 nt, Human
cauugagcgacccugcaugacu

SEQ ID NO: 467812 - RNA, 22 nt, Human
gccagguugcugacgacgaucu

SEQ ID NO: 467813 - RNA, 19 nt, Human
acccucuccccacuggguc

SEQ ID NO: 467814 - RNA, 22 nt, Human
ggcuguggucauuaggagguug

SEQ ID NO: 467815 - RNA, 22 nt, Human
aucaugugacuagguuuggcca

SEQ ID NO: 467816 - RNA, 22 nt, Human
ugucuguccaucugucugggac

SEQ ID NO: 467817 - RNA, 22 nt, Human
aggcucgcaugcccugcaccac

SEQ ID NO: 467818 - RNA, 21 nt, Human
gucuuuuuaauugcgauuucc

SEQ ID NO: 467819 - RNA, 19 nt, Human
cugaaacacagagagggcu

SEQ ID NO: 467820 - RNA, 22 nt, Human
gguguggcaguggaccugugaa

SEQ ID NO: 467821 - RNA, 22 nt, Human
ggagaggguguggaaaguuauc

SEQ ID NO: 467822 - RNA, 22 nt, Human
ugguuaaaugcuccgaucuugg

SEQ ID NO: 467823 - RNA, 22 nt, Human
aguccagggcuuagucagcggg

SEQ ID NO: 467824 - RNA, 22 nt, Human
ccagcagccaccuucucgaaau

SEQ ID NO: 467825 - RNA, 22 nt, Human
gcccagcccagaaagguucgga

SEQ ID NO: 467826 - RNA, 22 nt, Human
uccgggagcugaacgucuugcg

SEQ ID NO: 467827 - RNA, 22 nt, Human
gcgcuccucccggcccuggugg

SEQ ID NO: 467828 - RNA, 22 nt, Human
uucuuuuaauagagauccugug

SEQ ID NO: 467829 - RNA, 22 nt, Human
gcugcaggcucugcaggaauug

SEQ ID NO: 467830 - RNA, 19 nt, Human
cgcacagccugccaggcgc

SEQ ID NO: 467831 - RNA, 22 nt, Human
aacccgggagguggagguuaug

SEQ ID NO: 467832 - RNA, 22 nt, Human
ugacagcccaccucacaggauu

SEQ ID NO: 467833 - RNA, 22 nt, Human
caauaaaguggaggcccgggcu

SEQ ID NO: 467834 - RNA, 23 nt, Human
cugagggcuggucugaagucugc

SEQ ID NO: 467835 - RNA, 22 nt, Human
cgauuuccgcuugaucugaucu

SEQ ID NO: 467836 - RNA, 22 nt, Human
agccacccuaccagcccugaaa

SEQ ID NO: 467837 - RNA, 22 nt, Human
uuauuuaaaagugguaagauuc

SEQ ID NO: 467838 - RNA, 22 nt, Human
acccaggucucucgacuucugg

SEQ ID NO: 467839 - RNA, 22 nt, Human
guucugucugagcaccacagga

SEQ ID NO: 467840 - RNA, 22 nt, Human
gaauacaaauaauaccaaggug

SEQ ID NO: 467841 - RNA, 22 nt, Human
gccacaggucggcuagaggguc

SEQ ID NO: 467842 - RNA, 22 nt, Human
caugcagugcuuugcgccgggc

SEQ ID NO: 467843 - RNA, 22 nt, Human
gccagugccugcugcucagggc

SEQ ID NO: 467844 - RNA, 22 nt, Human
gaaggacccucuggggucucag

SEQ ID NO: 467845 - RNA, 22 nt, Human
ggcggcacgcaggcugcugucg

SEQ ID NO: 467846 - RNA, 22 nt, Human
uggcagcagggccccuggagga

SEQ ID NO: 467847 - RNA, 22 nt, Human
gccccagcagcaaugcgguuga

SEQ ID NO: 467848 - RNA, 22 nt, Human
cuucucggccguguggaugcgc

SEQ ID NO: 467849 - RNA, 22 nt, Human
cuggccucacagaggcuaagcc

SEQ ID NO: 467850 - RNA, 22 nt, Human
gggcuccagccaggugucccca

SEQ ID NO: 467851 - RNA, 22 nt, Human
uacuuucuagcucuccccaguu

SEQ ID NO: 467852 - RNA, 22 nt, Human
cugcucaauuccggcacgcugg

SEQ ID NO: 467853 - RNA, 22 nt, Human
gaguggggcccacugcugggug

SEQ ID NO: 467854 - RNA, 22 nt, Human
cucaggcuaagaaggccaagug

SEQ ID NO: 467855 - RNA, 22 nt, Human
ucccucugcuagugcuugagcu

SEQ ID NO: 467856 - RNA, 22 nt, Human
ggccaaggcucuugagggcuga

SEQ ID NO: 467857 - RNA, 22 nt, Human
aggggcacgaguagagcucuag

SEQ ID NO: 467858 - RNA, 22 nt, Human
ugggugguugcugaggcuccuu

SEQ ID NO: 467859 - RNA, 22 nt, Human
acaugcauaaacuacuucuuau

SEQ ID NO: 467860 - RNA, 22 nt, Human
gggacagcuguagugcuuggcu

SEQ ID NO: 467861 - RNA, 22 nt, Human
uggagccagcaggacucagagg

SEQ ID NO: 467862 - RNA, 22 nt, Human
cccaggagacugagcuguaacc

SEQ ID NO: 467863 - RNA, 22 nt, Human
gggggaaaguggagguucguga

SEQ ID NO: 467864 - RNA, 22 nt, Human
caggcacaagaucggcuagaua

SEQ ID NO: 467865 - RNA, 22 nt, Human
uugacacagucaacuugauuuu

SEQ ID NO: 467866 - RNA, 17 nt, Human
ugggggcccuguguaga

SEQ ID NO: 467867 - RNA, 22 nt, Human
gagaugggcgagaagguggacu

SEQ ID NO: 467868 - RNA, 22 nt, Human
ggcagaggagcuggaaacaugg

SEQ ID NO: 467869 - RNA, 18 nt, Human
ggaggcucugugguuucc

SEQ ID NO: 467870 - RNA, 22 nt, Human
agaagagccacuguugacggca

SEQ ID NO: 467871 - RNA, 22 nt, Human
gugucccaaagauuagaaauca

SEQ ID NO: 467872 - RNA, 22 nt, Human
cugacagcgagagaguugcccc

SEQ ID NO: 467873 - RNA, 22 nt, Human
ggcggccugugggucggccuca

SEQ ID NO: 467874 - RNA, 22 nt, Human
ggacagacuuuacagccccggg

SEQ ID NO: 467875 - RNA, 22 nt, Human
ccugugggagggagcggcugga

SEQ ID NO: 467876 - RNA, 22 nt, Human
cuccuuccugguuagcaccuua

SEQ ID NO: 467877 - RNA, 22 nt, Human
aggagucaccugcccaaaguca

SEQ ID NO: 467878 - RNA, 22 nt, Human
gauggcgguggccaccuccuug

SEQ ID NO: 467879 - RNA, 22 nt, Human
caggaggaaaguuccacucaac

SEQ ID NO: 467880 - RNA, 22 nt, Human
agacagcacuuuuguauggggg

SEQ ID NO: 467881 - RNA, 22 nt, Human
gcucugugcaguucagggacac

SEQ ID NO: 467882 - RNA, 22 nt, Human
acugggcaaggauaugaugggu

SEQ ID NO: 467883 - RNA, 22 nt, Human
ugggucagauugagccccuggu

SEQ ID NO: 467884 - RNA, 22 nt, Human
aggaaagcucccaguagggcuc

SEQ ID NO: 467885 - RNA, 22 nt, Human
ccagcugggucccugcuggggc

SEQ ID NO: 467886 - RNA, 22 nt, Human
aagccgggccugagaaaugaca

SEQ ID NO: 467887 - RNA, 22 nt, Human
caggacccaaccucccugcucu

SEQ ID NO: 467888 - RNA, 22 nt, Human
agggugugcuguugggucuuuc

SEQ ID NO: 467889 - RNA, 22 nt, Human
ccucguccacaauccuugcaca

SEQ ID NO: 467890 - RNA, 22 nt, Human
cccacucccugcacgccugccg

SEQ ID NO: 467891 - RNA, 22 nt, Human
gggaggugauuaggaccaugua

SEQ ID NO: 467892 - RNA, 22 nt, Human
aaggcacauauuuuagagucac

SEQ ID NO: 467893 - RNA, 22 nt, Human
gaggugggaugugugugcuacu

SEQ ID NO: 467894 - RNA, 22 nt, Human
uuucugugauaggcugcgacgc

SEQ ID NO: 467895 - RNA, 15 nt, Human
uggugguguugagac

SEQ ID NO: 467896 - RNA, 22 nt, Human
gcggggccauguccaacggccu

SEQ ID NO: 467897 - RNA, 22 nt, Human
aggcagccuauggggagcucag

SEQ ID NO: 467898 - RNA, 22 nt, Human
aagcucucuguccccuggacug

SEQ ID NO: 467899 - RNA, 22 nt, Human
ccauggccaggaaagccaaggu

SEQ ID NO: 467900 - RNA, 22 nt, Human
gcaaaacagucgaugccuccca

SEQ ID NO: 467901 - RNA, 22 nt, Human
gcugucucauacaaggcccugc

SEQ ID NO: 467902 - RNA, 22 nt, Human
cagaguccugcaccagcuccag

SEQ ID NO: 467903 - RNA, 22 nt, Human
uccugaccacuaggaccaggcu

SEQ ID NO: 467904 - RNA, 22 nt, Human
agcuccugaaaauccagacugg

SEQ ID NO: 467905 - RNA, 21 nt, Human
uggcaggcagcuggaagcuug

SEQ ID NO: 467906 - RNA, 22 nt, Human
ccugggacgacucuguacccuu

SEQ ID NO: 467907 - RNA, 22 nt, Human
ucccagccugacagugcaucaa

SEQ ID NO: 467908 - RNA, 22 nt, Human
uccgguccggguacuccucucu

SEQ ID NO: 467909 - RNA, 22 nt, Human
agcuuuauuugucauucacggc

SEQ ID NO: 467910 - RNA, 22 nt, Human
ggggucccugcaccagcauguc

SEQ ID NO: 467911 - RNA, 19 nt, Human
ggguccauggugucaagga

SEQ ID NO: 467912 - RNA, 15 nt, Human
agcucuuucagcuac

SEQ ID NO: 467913 - RNA, 22 nt, Human
ggcaaucauuggcauucucugg

SEQ ID NO: 467914 - RNA, 18 nt, Human
cccacggugcuguagggc

SEQ ID NO: 467915 - RNA, 22 nt, Human
cuccguggcuguggacgcagcc

SEQ ID NO: 467916 - RNA, 22 nt, Human
caaucaaugcugcuaguuccuu

SEQ ID NO: 467917 - RNA, 22 nt, Human
agaggagguccuuuucugaugu

SEQ ID NO: 467918 - RNA, 22 nt, Human
gccagcagcgagaguuuaaccu

SEQ ID NO: 467919 - RNA, 21 nt, Human
uccaggagcacgggacuagga

SEQ ID NO: 467920 - RNA, 22 nt, Human
aaggugccacuucccucagacu

SEQ ID NO: 467921 - RNA, 22 nt, Human
agagggcgcccaggcccacgcc

SEQ ID NO: 467922 - RNA, 22 nt, Human
ccuaugaaagacaggagaugcg

SEQ ID NO: 467923 - RNA, 22 nt, Human
ugccuggcugggcugcucaugg

SEQ ID NO: 467924 - RNA, 22 nt, Human
uuggaaauguagaaaagcagau

SEQ ID NO: 467925 - RNA, 22 nt, Human
cgcgcugcagacagcggaggcc

SEQ ID NO: 467926 - RNA, 22 nt, Human
cugcacagccugucugggggcc

SEQ ID NO: 467927 - RNA, 22 nt, Human
agguggcuaugaggaugcaguc

SEQ ID NO: 467928 - RNA, 22 nt, Human
aaugcauacguguuuguggcaa

SEQ ID NO: 467929 - RNA, 22 nt, Human
gcagcugccgugagcucacgcc

SEQ ID NO: 467930 - RNA, 22 nt, Human
ggggcccagcaccccuccucgc

SEQ ID NO: 467931 - RNA, 22 nt, Human
cagccggaccugagggauuccu

SEQ ID NO: 467932 - RNA, 22 nt, Human
aagggccagggcucuagagaua

SEQ ID NO: 467933 - RNA, 23 nt, Human
uugggcaaaucacuaacgucucc

SEQ ID NO: 467934 - RNA, 22 nt, Human
uggggugccgacagggagggca

SEQ ID NO: 467935 - RNA, 22 nt, Human
ggugggugagcccugggagcug

SEQ ID NO: 467936 - RNA, 22 nt, Human
ugaggagcaggguggcuuacuc

SEQ ID NO: 467937 - RNA, 22 nt, Human
cuucuccgacaaccgacgccgg

SEQ ID NO: 467938 - RNA, 22 nt, Human
gggcugacaccacccaggcgca

SEQ ID NO: 467939 - RNA, 22 nt, Human
gcagagcugguacuugagccug

SEQ ID NO: 467940 - RNA, 22 nt, Human
ugucauggacuggauuucugcu

SEQ ID NO: 467941 - RNA, 22 nt, Human
uucuguucccuaggaccugggg

SEQ ID NO: 467942 - RNA, 22 nt, Human
gccacccuggacgcacuguucg

SEQ ID NO: 467943 - RNA, 18 nt, Human
uggggggcuugucugaag

SEQ ID NO: 467944 - RNA, 22 nt, Human
gcugccauggcugggggccgug

SEQ ID NO: 467945 - RNA, 22 nt, Human
ggcagagcuugcagugagccga

SEQ ID NO: 467946 - RNA, 23 nt, Human
cguuuuuuccucagauguucugg

SEQ ID NO: 467947 - RNA, 22 nt, Human
gggccccaagaaccuccuccug

SEQ ID NO: 467948 - RNA, 22 nt, Human
ucucacacuaaugcucuaucag

SEQ ID NO: 467949 - RNA, 22 nt, Human
ucuccaggcuuaaucucagcuu

SEQ ID NO: 467950 - RNA, 19 nt, Human
uccugcccaccagccaggg

SEQ ID NO: 467951 - RNA, 22 nt, Human
ugcgggucccagggucacaggc

SEQ ID NO: 467952 - RNA, 22 nt, Human
agcuccacucccugccuguuuc

SEQ ID NO: 467953 - RNA, 22 nt, Human
cuggcuccucaggacugcggga

SEQ ID NO: 467954 - RNA, 22 nt, Human
uggcccagaucucugaccuuga

SEQ ID NO: 467955 - RNA, 22 nt, Human
cuguuuauucucaucuaaaaug

SEQ ID NO: 467956 - RNA, 22 nt, Human
agcagugugggcugcacgcugg

SEQ ID NO: 467957 - RNA, 22 nt, Human
gggagacaaaggugagguucuu

SEQ ID NO: 467958 - RNA, 22 nt, Human
ucggagcuguagaugaaacccu

SEQ ID NO: 467959 - RNA, 22 nt, Human
ugggggagccuucacaguagcu

SEQ ID NO: 467960 - RNA, 22 nt, Human
cuugcuuuaucugguuucucau

SEQ ID NO: 467961 - RNA, 22 nt, Human
cccgaccucgcaaagcgcacuc

SEQ ID NO: 467962 - RNA, 22 nt, Human
gagguggcugcuugcugggaaa

SEQ ID NO: 467963 - RNA, 22 nt, Human
cuuuggucuccgucaucaauca

SEQ ID NO: 467964 - RNA, 22 nt, Human
cagagccacugucugccaggca

SEQ ID NO: 467965 - RNA, 22 nt, Human
ccucccugccggcuggacuagu

SEQ ID NO: 467966 - RNA, 22 nt, Human
ugaaucaaugaauugcacuuca

SEQ ID NO: 467967 - RNA, 22 nt, Human
aaugccuuggagagccuagagg

SEQ ID NO: 467968 - RNA, 22 nt, Human
gcaggggcugagcaccagcggg

SEQ ID NO: 467969 - RNA, 22 nt, Human
gccacguagaagugccgcgaga

SEQ ID NO: 467970 - RNA, 22 nt, Human
cagcugccuaugaccuagccuc

SEQ ID NO: 467971 - RNA, 22 nt, Human
ucuguuauaaaucacacugcau

SEQ ID NO: 467972 - RNA, 18 nt, Human
acagggagggcgcugggg

SEQ ID NO: 467973 - RNA, 22 nt, Human
cagggcuccccagagagccucu

SEQ ID NO: 467974 - RNA, 22 nt, Human
ugcugcccacuguauuucucca

SEQ ID NO: 467975 - RNA, 22 nt, Human
uggggugugcucagagcagggg

SEQ ID NO: 467976 - RNA, 22 nt, Human
ugggaccugcucuuggaaugag

SEQ ID NO: 467977 - RNA, 22 nt, Human
ucccacacagcccgcucaccgg

SEQ ID NO: 467978 - RNA, 22 nt, Human
ggagugacucucggggccacua

SEQ ID NO: 467979 - RNA, 22 nt, Human
auucccuuugacgaucccuagg

SEQ ID NO: 467980 - RNA, 22 nt, Human
cagcuccagcccaggcagcucc

SEQ ID NO: 467981 - RNA, 22 nt, Human
ccuuuguucacuggagagugga

SEQ ID NO: 467982 - RNA, 22 nt, Human
accuggaccugccaccuaugag

SEQ ID NO: 467983 - RNA, 22 nt, Human
cccaggucgucagcaguguggu

SEQ ID NO: 467984 - RNA, 22 nt, Human
acagugauuggcacugauucag

SEQ ID NO: 467985 - RNA, 22 nt, Human
ucaugucccguugcuggcugcc

SEQ ID NO: 467986 - RNA, 22 nt, Human
agcugcaccggcuggaccacug

SEQ ID NO: 467987 - RNA, 22 nt, Human
uaauuuugucacagugacaugc

SEQ ID NO: 467988 - RNA, 22 nt, Human
cugggaccugugugccugggcc

SEQ ID NO: 467989 - RNA, 22 nt, Human
uggcacaguuaaaguuguagaa

SEQ ID NO: 467990 - RNA, 22 nt, Human
ggcagcagaacuggcccuguau

SEQ ID NO: 467991 - RNA, 22 nt, Human
caggggcggguaaaaggccucc

SEQ ID NO: 467992 - RNA, 22 nt, Human
cgugcagcggagcuggucacug

SEQ ID NO: 467993 - RNA, 22 nt, Human
cuguggguggcugugccccagg

SEQ ID NO: 467994 - RNA, 22 nt, Human
cuggcuuucauggcgcaguuga

SEQ ID NO: 467995 - RNA, 22 nt, Human
gggggcgccgccgcucaucuca

SEQ ID NO: 467996 - RNA, 22 nt, Human
uauggcaagaugacauguucuc

SEQ ID NO: 467997 - RNA, 22 nt, Human
gugcugauugggagcugggauu

SEQ ID NO: 467998 - RNA, 22 nt, Human
cccucucccugcagaauguggc

SEQ ID NO: 467999 - RNA, 20 nt, Human
ggccggggagcucuccaggg

SEQ ID NO: 468000 - RNA, 22 nt, Human
ucgucugugaaauugggauaag

SEQ ID NO: 468001 - RNA, 21 nt, Human
ugcuccaggagggggcagucc

SEQ ID NO: 468002 - RNA, 22 nt, Human
ggggcuuccagcgcccgccggu

SEQ ID NO: 468003 - RNA, 22 nt, Human
agcagcaggagccgugggguga

SEQ ID NO: 468004 - RNA, 22 nt, Human
ugggagagauaggcuucuggac

SEQ ID NO: 468005 - RNA, 22 nt, Human
agccacugugugaccagcuguc

SEQ ID NO: 468006 - RNA, 22 nt, Human
acagaagugacaauuucuuggg

SEQ ID NO: 468007 - RNA, 22 nt, Human
cugggcuccuaaccauccaggu

SEQ ID NO: 468008 - RNA, 22 nt, Human
guugcauuaaucugcucaggcu

SEQ ID NO: 468009 - RNA, 21 nt, Human
cccuugccugcacuccucggc

SEQ ID NO: 468010 - RNA, 22 nt, Human
guauuucuuuacauaugcucau

SEQ ID NO: 468011 - RNA, 22 nt, Human
cgccguccccuaggaaagagcu

SEQ ID NO: 468012 - RNA, 22 nt, Human
uccaggagcucauccacgucaa

SEQ ID NO: 468013 - RNA, 22 nt, Human
agccagggacgcugcaggcuac

SEQ ID NO: 468014 - RNA, 22 nt, Human
ugucugccugcgggccggcaca

SEQ ID NO: 468015 - RNA, 22 nt, Human
uucccuuucuuaaagaguuagg

SEQ ID NO: 468016 - RNA, 21 nt, Human
gcccacagugaggaggauccc

SEQ ID NO: 468017 - RNA, 22 nt, Human
aggcaguguguagcuggaagag

SEQ ID NO: 468018 - RNA, 22 nt, Human
cccaggaggcagaaguugcagu

SEQ ID NO: 468019 - RNA, 22 nt, Human
gcuuucuuuucaagaauguauu

SEQ ID NO: 468020 - RNA, 22 nt, Human
gcuggguggaucggaggcucug

SEQ ID NO: 468021 - RNA, 22 nt, Human
ccagcaggagacuagcaacaua

SEQ ID NO: 468022 - RNA, 22 nt, Human
gcagauggauguggacggcgcc

SEQ ID NO: 468023 - RNA, 20 nt, Human
uccuccuugcagagcccaga

SEQ ID NO: 468024 - RNA, 22 nt, Human
uuuaauuuucugggcccagcag

SEQ ID NO: 468025 - RNA, 22 nt, Human
ccggcucggcgaccaggcugaa

SEQ ID NO: 468026 - RNA, 21 nt, Human
agggccucuguguacuggggg

SEQ ID NO: 468027 - RNA, 22 nt, Human
uggaaauaguugugagucaggc

SEQ ID NO: 468028 - RNA, 22 nt, Human
cugguggaauggcagagggaac

SEQ ID NO: 468029 - RNA, 20 nt, Human
ucccuggggcccuacuuccu

SEQ ID NO: 468030 - RNA, 22 nt, Human
cuggcacaggauccgagaccuu

SEQ ID NO: 468031 - RNA, 20 nt, Human
ggggcccaagcccucuugcc

SEQ ID NO: 468032 - RNA, 22 nt, Human
uucaauagaaagucccuaguua

SEQ ID NO: 468033 - RNA, 22 nt, Human
gccccacuguggaaccuaaguc

SEQ ID NO: 468034 - RNA, 22 nt, Human
ggugugggucagcuuuauuaau

SEQ ID NO: 468035 - RNA, 22 nt, Human
uauucacagcugccgcacucag

SEQ ID NO: 468036 - RNA, 22 nt, Human
guccaggccugccucugaggag

SEQ ID NO: 468037 - RNA, 18 nt, Human
uggcagccagcugcuccu

SEQ ID NO: 468038 - RNA, 23 nt, Human
auaauaacgucugucuugucucu

SEQ ID NO: 468039 - RNA, 19 nt, Human
uccuggggaggggcauggc

SEQ ID NO: 468040 - RNA, 22 nt, Human
gaggcaaagcauguggcucagg

SEQ ID NO: 468041 - RNA, 22 nt, Human
gugccuccaggcucgacuaguc

SEQ ID NO: 468042 - RNA, 22 nt, Human
gcguuggggaccccgaagcugg

SEQ ID NO: 468043 - RNA, 22 nt, Human
gucugcccuuggccugggacuu

SEQ ID NO: 468044 - RNA, 22 nt, Human
agggccacgugcaccgcggucu

SEQ ID NO: 468045 - RNA, 22 nt, Human
uggcccagcucagggugggcgg

SEQ ID NO: 468046 - RNA, 22 nt, Human
gggagcugaaggagccggcggg

SEQ ID NO: 468047 - RNA, 22 nt, Human
cccacugcugcucuccauggca

SEQ ID NO: 468048 - RNA, 22 nt, Human
ugugguuuugguucagaaacaa

SEQ ID NO: 468049 - RNA, 22 nt, Human
cccaggacucugacacccccaa

SEQ ID NO: 468050 - RNA, 22 nt, Human
cccaggaguaagugacauuguu

SEQ ID NO: 468051 - RNA, 22 nt, Human
augaacugcaguauaaacuugg

SEQ ID NO: 468052 - RNA, 22 nt, Human
ucccagaacccugccagguccu

SEQ ID NO: 468053 - RNA, 22 nt, Human
gggagaguagcuggaagguucu

SEQ ID NO: 468054 - RNA, 22 nt, Human
uuccuggcagaggccccgacag

SEQ ID NO: 468055 - RNA, 17 nt, Human
gcaggcacugcugccug

SEQ ID NO: 468056 - RNA, 22 nt, Human
aggcuguccucucuugcucagu

SEQ ID NO: 468057 - RNA, 22 nt, Human
ggcucacgcaauuaucccggcc

SEQ ID NO: 468058 - RNA, 22 nt, Human
agccccaguccgcugcgggcgg

SEQ ID NO: 468059 - RNA, 22 nt, Human
aauacagauggcaugugaagau

SEQ ID NO: 468060 - RNA, 22 nt, Human
aggcggcuccgggagugugggc

SEQ ID NO: 468061 - RNA, 22 nt, Human
cggagaggugggggcagcaucu

SEQ ID NO: 468062 - RNA, 22 nt, Human
gccagaggggcucgaaggcgcg

SEQ ID NO: 468063 - RNA, 22 nt, Human
gcugcugcuugaaggcucggag

SEQ ID NO: 468064 - RNA, 22 nt, Human
cgggcagugcccagcggggcag

SEQ ID NO: 468065 - RNA, 21 nt, Human
ucagagggcccuggaggcuca

SEQ ID NO: 468066 - RNA, 22 nt, Human
uccacagggaugccugcggcuu

SEQ ID NO: 468067 - RNA, 22 nt, Human
gccggacugcugcagcugcuag

SEQ ID NO: 468068 - RNA, 22 nt, Human
cugggugagcuggccagagggu

SEQ ID NO: 468069 - RNA, 22 nt, Human
uuccuuggagucaaacagggag

SEQ ID NO: 468070 - RNA, 22 nt, Human
uggcccaggugcacccagaggc

SEQ ID NO: 468071 - RNA, 22 nt, Human
gagggccaaugugucccugagc

SEQ ID NO: 468072 - RNA, 22 nt, Human
ccucccagaugugcccaaugga

SEQ ID NO: 468073 - RNA, 22 nt, Human
agaguggcaccuuaccugagac

SEQ ID NO: 468074 - RNA, 22 nt, Human
ccucuggccuaggccgggagag

SEQ ID NO: 468075 - RNA, 22 nt, Human
ugcuggccucggcgcugggccu

SEQ ID NO: 468076 - RNA, 22 nt, Human
cucccagggucuaggcugcugg

SEQ ID NO: 468077 - RNA, 22 nt, Human
gaggagagaagcuaacggugcu

SEQ ID NO: 468078 - RNA, 22 nt, Human
ugcagggcagcuagggagcuuu

SEQ ID NO: 468079 - RNA, 22 nt, Human
ucuggcccaucuucugccacca

SEQ ID NO: 468080 - RNA, 22 nt, Human
agccaggucaggaaagguccca

SEQ ID NO: 468081 - RNA, 22 nt, Human
gguggcugugagcauuauguga

SEQ ID NO: 468082 - RNA, 22 nt, Human
uacugucuuuuccuaaaugggu

SEQ ID NO: 468083 - RNA, 22 nt, Human
cgaggaggaaacgcggagaacu

SEQ ID NO: 468084 - RNA, 22 nt, Human
aggugcugccccgagaaggaug

SEQ ID NO: 468085 - RNA, 22 nt, Human
uuuguguuguacuucugugcau

SEQ ID NO: 468086 - RNA, 22 nt, Human
cccccagcucugcugggucccg

SEQ ID NO: 468087 - RNA, 22 nt, Human
ucccugccuccuggcagugcca

SEQ ID NO: 468088 - RNA, 22 nt, Human
agcggcgccgagcuuggccagg

SEQ ID NO: 468089 - RNA, 22 nt, Human
uaacaaaguauuguuuguguau

SEQ ID NO: 468090 - RNA, 22 nt, Human
gccagagaggccuuagaaucca

SEQ ID NO: 468091 - RNA, 22 nt, Human
cacagaggaugcccaagcgauc

SEQ ID NO: 468092 - RNA, 18 nt, Human
ggguccccagcugcaggg

SEQ ID NO: 468093 - RNA, 22 nt, Human
gcggcgccugggacccgccagc

SEQ ID NO: 468094 - RNA, 22 nt, Human
augggucccuggccgcccucgg

SEQ ID NO: 468095 - RNA, 22 nt, Human
ggagacucaccccgcauucuag

SEQ ID NO: 468096 - RNA, 22 nt, Human
ugcccacaggaagacaccagcg

SEQ ID NO: 468097 - RNA, 22 nt, Human
guagaggggugauucugugaga

SEQ ID NO: 468098 - RNA, 22 nt, Human
ggguggaaaguauuuggggacc

SEQ ID NO: 468099 - RNA, 22 nt, Human
ccugggcaaaugccagagacaa

SEQ ID NO: 468100 - RNA, 22 nt, Human
gccggggcuggggagagacaug

SEQ ID NO: 468101 - RNA, 22 nt, Human
cgcaggugccggcagauggggu

SEQ ID NO: 468102 - RNA, 22 nt, Human
cugggucccggcuucuauccac

SEQ ID NO: 468103 - RNA, 22 nt, Human
ccugggaaggugaggcccugga

SEQ ID NO: 468104 - RNA, 22 nt, Human
cagggccucugugggcucucuc

SEQ ID NO: 468105 - RNA, 22 nt, Human
cagcccuguugcgcuuccggcg

SEQ ID NO: 468106 - RNA, 22 nt, Human
agcugccgaugcccagcugcau

SEQ ID NO: 468107 - RNA, 22 nt, Human
gaacugggaaugcugucccauc

SEQ ID NO: 468108 - RNA, 22 nt, Human
agagcagaggcauggccguggg

SEQ ID NO: 468109 - RNA, 23 nt, Human
gacagagugagaccuugucuuac

SEQ ID NO: 468110 - RNA, 22 nt, Human
gcucccuggaauguuggcugcc

SEQ ID NO: 468111 - RNA, 22 nt, Human
gcucuggcuacuguggcuaccg

SEQ ID NO: 468112 - RNA, 22 nt, Human
gcuucccacagcuggacugggg

SEQ ID NO: 468113 - RNA, 22 nt, Human
ccccagugguugcaacagcaga

SEQ ID NO: 468114 - RNA, 22 nt, Human
ucugggccggagccgacggcag

SEQ ID NO: 468115 - RNA, 22 nt, Human
gcucaugggcccagagcagccc

SEQ ID NO: 468116 - RNA, 22 nt, Human
gccuggcgccgggcugccuguc

SEQ ID NO: 468117 - RNA, 22 nt, Human
gucccuggucuaccguggcuuc

SEQ ID NO: 468118 - RNA, 22 nt, Human
cagugcagccaaggacaggcac

SEQ ID NO: 468119 - RNA, 22 nt, Human
agggccagcagcuuggccaacc

SEQ ID NO: 468120 - RNA, 21 nt, Human
uuggccgugcagaugaacagc

SEQ ID NO: 468121 - RNA, 22 nt, Human
agcccugugugcuuguguuccu

SEQ ID NO: 468122 - RNA, 22 nt, Human
auggguggccccgugugcaguc

SEQ ID NO: 468123 - RNA, 22 nt, Human
ggcaguggugggaggcucgcuc

SEQ ID NO: 468124 - RNA, 22 nt, Human
gagccaggcccguacuugcugu

SEQ ID NO: 468125 - RNA, 22 nt, Human
aggccuuccucggagacaggga

SEQ ID NO: 468126 - RNA, 22 nt, Human
aaagcuauuuuauugcagcucu

SEQ ID NO: 468127 - RNA, 22 nt, Human
cggcagagcccugagucagccu

SEQ ID NO: 468128 - RNA, 22 nt, Human
ccuggccugugaaucugagagc

SEQ ID NO: 468129 - RNA, 22 nt, Human
aucccuggccacgaagcugccc

SEQ ID NO: 468130 - RNA, 22 nt, Human
agccccaggcccggacgccucu

SEQ ID NO: 468131 - RNA, 22 nt, Human
agcagcaccuguccucgcugcu

SEQ ID NO: 468132 - RNA, 22 nt, Human
ugggugugagcccgggagccgc

SEQ ID NO: 468133 - RNA, 22 nt, Human
aacugguucuggaggcugcagg

SEQ ID NO: 468134 - RNA, 22 nt, Human
gcccuguuuucuggguuccuug

SEQ ID NO: 468135 - RNA, 22 nt, Human
aggagccgggccugggcccugc

SEQ ID NO: 468136 - RNA, 22 nt, Human
gggcagagguucaacuucaaca

SEQ ID NO: 468137 - RNA, 22 nt, Human
uucuguuuauaauuugcaguug

SEQ ID NO: 468138 - RNA, 22 nt, Human
ugaaacagucuccagacuugga

SEQ ID NO: 468139 - RNA, 22 nt, Human
ccccaacccugguuccguggcg

SEQ ID NO: 468140 - RNA, 22 nt, Human
gugcgggccuggggguuucucu

SEQ ID NO: 468141 - RNA, 22 nt, Human
ugccgcgcgcccagguuaggug

SEQ ID NO: 468142 - RNA, 23 nt, Human
gggaaaucaaaagauauuucuuc

SEQ ID NO: 468143 - RNA, 22 nt, Human
auccaggcgaaugcagaaggcc

SEQ ID NO: 468144 - RNA, 22 nt, Human
aaccccgcucaggcugggugag

SEQ ID NO: 468145 - RNA, 22 nt, Human
uuccuuuucuucuaccacaugu

SEQ ID NO: 468146 - RNA, 22 nt, Human
aggcaguguggagggcuguugc

SEQ ID NO: 468147 - RNA, 22 nt, Human
agggcucacuacaacccuggga

SEQ ID NO: 468148 - RNA, 22 nt, Human
ccugucucugcagggcccugcc

SEQ ID NO: 468149 - RNA, 22 nt, Human
uuuguguuggaagaaaugcuac

SEQ ID NO: 468150 - RNA, 22 nt, Human
aaaguaauugugguucuugcca

SEQ ID NO: 468151 - RNA, 22 nt, Human
uccugccaccggggguggcgau

SEQ ID NO: 468152 - RNA, 22 nt, Human
cagggcucgcucuugcccuucg

SEQ ID NO: 468153 - RNA, 23 nt, Human
agacagaggcugaggcuggccgc

SEQ ID NO: 468154 - RNA, 22 nt, Human
ggggagaguauuuuauucaagu

SEQ ID NO: 468155 - RNA, 22 nt, Human
ugcgccugcgcaaagguuucug

SEQ ID NO: 468156 - RNA, 22 nt, Human
cgaggagugugaaggcuugucg

SEQ ID NO: 468157 - RNA, 17 nt, Human
gcguguccccgcgucuc

SEQ ID NO: 468158 - RNA, 22 nt, Human
ucggagcgucacuggcuggagg

SEQ ID NO: 468159 - RNA, 22 nt, Human
ucccgggcaggucgagcgagcc

SEQ ID NO: 468160 - RNA, 22 nt, Human
ccagagacaaggagcuggaguc

SEQ ID NO: 468161 - RNA, 22 nt, Human
gaggagaggcuggacgcgguga

SEQ ID NO: 468162 - RNA, 22 nt, Human
gggcuggagagucccacguggg

SEQ ID NO: 468163 - RNA, 22 nt, Human
ucguggaugcgcagggcggccu

SEQ ID NO: 468164 - RNA, 22 nt, Human
gaaaggagaggguuaaggagcu

SEQ ID NO: 468165 - RNA, 19 nt, Human
ggggcccggggucugcgag

SEQ ID NO: 468166 - RNA, 22 nt, Human
ggugacgaauccauagcaucga

SEQ ID NO: 468167 - RNA, 22 nt, Human
uccgcgcucucacccgcucccg

SEQ ID NO: 468168 - RNA, 22 nt, Human
uggguaaacugggucuggagag

SEQ ID NO: 468169 - RNA, 21 nt, Human
agggaaaaggcugagugaggg

SEQ ID NO: 468170 - RNA, 22 nt, Human
ccgcuguccuggagcugcugcu

SEQ ID NO: 468171 - RNA, 22 nt, Human
cggcgcaggcagaccgcgggcu

SEQ ID NO: 468172 - RNA, 22 nt, Human
cugaugcucuggauguagucaa

SEQ ID NO: 468173 - RNA, 22 nt, Human
ugcuuuauucgacaucugguag

SEQ ID NO: 468174 - RNA, 22 nt, Human
cgucaggguugagcagguagau

SEQ ID NO: 468175 - RNA, 22 nt, Human
guggcccaggcuuggcgcuggc

SEQ ID NO: 468176 - RNA, 22 nt, Human
acagggagucugaggggauagu

SEQ ID NO: 468177 - RNA, 22 nt, Human
gucugcccugcagacaugccuc

SEQ ID NO: 468178 - RNA, 22 nt, Human
cucuguccugguuuauacuggc

SEQ ID NO: 468179 - RNA, 22 nt, Human
cccgggaggaggaaguugcagu

SEQ ID NO: 468180 - RNA, 22 nt, Human
uacagcagcccaccuucuucug

SEQ ID NO: 468181 - RNA, 22 nt, Human
gcgacgcaggcacgacguguug

SEQ ID NO: 468182 - RNA, 22 nt, Human
gcccagccccuggguggacgug

SEQ ID NO: 468183 - RNA, 22 nt, Human
ggggugaagguuuucugaaagc

SEQ ID NO: 468184 - RNA, 22 nt, Human
gccccagcguggcuguguuagg

SEQ ID NO: 468185 - RNA, 22 nt, Human
ccauggccugaaggagugcauc

SEQ ID NO: 468186 - RNA, 22 nt, Human
gcugcuggcuuccugcuguuuu

SEQ ID NO: 468187 - RNA, 22 nt, Human
gccuggcucugaguuucucucc

SEQ ID NO: 468188 - RNA, 22 nt, Human
gccgugcgugcgcaggugcugu

SEQ ID NO: 468189 - RNA, 22 nt, Human
ggucuggccuccgggcaggugg

SEQ ID NO: 468190 - RNA, 22 nt, Human
gucuuuuuuacaccuuacauca

SEQ ID NO: 468191 - RNA, 23 nt, Human
uugcauuaauguggaggcacagg

SEQ ID NO: 468192 - RNA, 22 nt, Human
ccagagagggcgccaccuggag

SEQ ID NO: 468193 - RNA, 22 nt, Human
uugucgggcuuacgcagggcca

SEQ ID NO: 468194 - RNA, 22 nt, Human
gcugccaauccagcugugggag

SEQ ID NO: 468195 - RNA, 22 nt, Human
uucugggcacacaggcccuggu

SEQ ID NO: 468196 - RNA, 22 nt, Human
ggagacagugacuuagagacug

SEQ ID NO: 468197 - RNA, 22 nt, Human
gcggcuccgaagccaggccgcg

SEQ ID NO: 468198 - RNA, 22 nt, Human
gccuggggaacuugauccuguc

SEQ ID NO: 468199 - RNA, 22 nt, Human
gugcuaaugaauuggagugccu

SEQ ID NO: 468200 - RNA, 22 nt, Human
cuggccgcaguguggaguugug

SEQ ID NO: 468201 - RNA, 22 nt, Human
gaccugguccuuguacuuugaa

SEQ ID NO: 468202 - RNA, 22 nt, Human
ccagcagcgauagggugagugc

SEQ ID NO: 468203 - RNA, 22 nt, Human
ccucagucuauuuccagcaggu

SEQ ID NO: 468204 - RNA, 22 nt, Human
uuuauucucuaguuggucagau

SEQ ID NO: 468205 - RNA, 22 nt, Human
agcaguuuauccucauaaugga

SEQ ID NO: 468206 - RNA, 20 nt, Human
ucuuuuauuggcagauccug

SEQ ID NO: 468207 - RNA, 22 nt, Human
gguccccguggaggcuggagcg

SEQ ID NO: 468208 - RNA, 22 nt, Human
acaggcgcacaugagggccgug

SEQ ID NO: 468209 - RNA, 18 nt, Human
gguccugggccuggcuca

SEQ ID NO: 468210 - RNA, 20 nt, Human
ucucccugcccaucucagau

SEQ ID NO: 468211 - RNA, 22 nt, Human
ugguccugagcaccagccugac

SEQ ID NO: 468212 - RNA, 22 nt, Human
guguuuggucagacguccgggg

SEQ ID NO: 468213 - RNA, 22 nt, Human
gggcucggcaucuguggacucu

SEQ ID NO: 468214 - RNA, 15 nt, Human
gccccaggaaucaaa

SEQ ID NO: 468215 - RNA, 22 nt, Human
gccagcuggcugcaggucccag

SEQ ID NO: 468216 - RNA, 22 nt, Human
ucggugcgcgaggcgcgguccc

SEQ ID NO: 468217 - RNA, 22 nt, Human
aguccggggucuggacaccugg

SEQ ID NO: 468218 - RNA, 23 nt, Human
gguucugccgcuuacugcugugc

SEQ ID NO: 468219 - RNA, 21 nt, Human
cuguccccagugagcaccccc

SEQ ID NO: 468220 - RNA, 23 nt, Human
uccugcagauaagcugguugaca

SEQ ID NO: 468221 - RNA, 22 nt, Human
ucccugggguaucgcugaggca

SEQ ID NO: 468222 - RNA, 19 nt, Human
cccagaggaaugccuggaa

SEQ ID NO: 468223 - RNA, 22 nt, Human
gcacagagagcagugggggaca

SEQ ID NO: 468224 - RNA, 22 nt, Human
gucccugauaagagccaucgau

SEQ ID NO: 468225 - RNA, 19 nt, Human
ccuggcccugcugcgcggg

SEQ ID NO: 468226 - RNA, 22 nt, Human
uccagcaguccaugugagacac

SEQ ID NO: 468227 - RNA, 22 nt, Human
caggacccaucagccaggcacu

SEQ ID NO: 468228 - RNA, 21 nt, Human
aacaggucccccacgggcuuu

SEQ ID NO: 468229 - RNA, 22 nt, Human
gcugugcagaggugagaaucca

SEQ ID NO: 468230 - RNA, 22 nt, Human
aaagcacauuacaagcucaguc

SEQ ID NO: 468231 - RNA, 22 nt, Human
cagacugaaaaucccugguagu

SEQ ID NO: 468232 - RNA, 22 nt, Human
gccugccuucggugcgcagcgg

SEQ ID NO: 468233 - RNA, 22 nt, Human
gccuggcuucccuuggagcauu

SEQ ID NO: 468234 - RNA, 18 nt, Human
ugugccucugcaggacgu

SEQ ID NO: 468235 - RNA, 22 nt, Human
uggcaaggccacaggugcaguu

SEQ ID NO: 468236 - RNA, 22 nt, Human
uccuggguccauggcagccgaa

SEQ ID NO: 468237 - RNA, 22 nt, Human
cugggcuguuuguucuggucuc

SEQ ID NO: 468238 - RNA, 22 nt, Human
ggaccugcucucccaguucucu

SEQ ID NO: 468239 - RNA, 22 nt, Human
gccugagauucccggagccgug

SEQ ID NO: 468240 - RNA, 22 nt, Human
ugggaagaguuagagacagcug

SEQ ID NO: 468241 - RNA, 22 nt, Human
gagacagagagguacucaacau

SEQ ID NO: 468242 - RNA, 18 nt, Human
ggaaggugcuggagugca

SEQ ID NO: 468243 - RNA, 20 nt, Human
ugggguccuggaggggaucc

SEQ ID NO: 468244 - RNA, 20 nt, Human
gggugugggcccggccaggc

SEQ ID NO: 468245 - RNA, 22 nt, Human
gacggggcagccagcugguggc

SEQ ID NO: 468246 - RNA, 22 nt, Human
gcggagaggcagagacuccgcg

SEQ ID NO: 468247 - RNA, 22 nt, Human
gggaccuggacaugugugugcu

SEQ ID NO: 468248 - RNA, 19 nt, Human
agcagccaucgaccaugga

SEQ ID NO: 468249 - RNA, 22 nt, Human
cugggccacaagccugugugau

SEQ ID NO: 468250 - RNA, 22 nt, Human
ugguggggccagacuucagcuc

SEQ ID NO: 468251 - RNA, 22 nt, Human
gcaccagccugagccucuugca

SEQ ID NO: 468252 - RNA, 22 nt, Human
guggccaaggcagagaaagagc

SEQ ID NO: 468253 - RNA, 23 nt, Human
ggaagcucacguaguccugcacu

SEQ ID NO: 468254 - RNA, 22 nt, Human
cagggcucgcucgcucgcucgc

SEQ ID NO: 468255 - RNA, 22 nt, Human
ccugggcugcucauggggauga

SEQ ID NO: 468256 - RNA, 22 nt, Human
uggcggugacggcggcgccugg

SEQ ID NO: 468257 - RNA, 20 nt, Human
aggggcaccugcgacggggc

SEQ ID NO: 468258 - RNA, 22 nt, Human
ugucggccacgagggagccgcg

SEQ ID NO: 468259 - RNA, 22 nt, Human
gagauuuccauauuuuguaaca

SEQ ID NO: 468260 - RNA, 22 nt, Human
ccuggccgacauggugaaacgc

SEQ ID NO: 468261 - RNA, 22 nt, Human
ggaaggggagcuaaaucuacug

SEQ ID NO: 468262 - RNA, 22 nt, Human
uucuuuuaauuucugucugcag

SEQ ID NO: 468263 - RNA, 22 nt, Human
cagcgguggcaaggugacugug

SEQ ID NO: 468264 - RNA, 22 nt, Human
ugggcaaggcuggagccugcag

SEQ ID NO: 468265 - RNA, 22 nt, Human
cuggaaggagcccgggcggauc

SEQ ID NO: 468266 - RNA, 22 nt, Human
gaaggagaggauugugaggcug

SEQ ID NO: 468267 - RNA, 22 nt, Human
cuucagagugacucagcaucuu

SEQ ID NO: 468268 - RNA, 22 nt, Human
gcggggggcaggcaguacguug

SEQ ID NO: 468269 - RNA, 22 nt, Human
ggccagccuggggcucccagac

SEQ ID NO: 468270 - RNA, 22 nt, Human
ggagguggagcuggaaguucca

SEQ ID NO: 468271 - RNA, 22 nt, Human
ccuggggagaagagcuuccccc

SEQ ID NO: 468272 - RNA, 18 nt, Human
ggcggguguuuuauucac

SEQ ID NO: 468273 - RNA, 22 nt, Human
cccaggaacagcacagaacagc

SEQ ID NO: 468274 - RNA, 22 nt, Human
aggggagguggcagaaaugugc

SEQ ID NO: 468275 - RNA, 22 nt, Human
uccguuuucacacugcuauaaa

SEQ ID NO: 468276 - RNA, 22 nt, Human
accuuuaugaaacagcugucgu

SEQ ID NO: 468277 - RNA, 22 nt, Human
uccguggggccuguggcuuccg

SEQ ID NO: 468278 - RNA, 22 nt, Human
ucaggggcuugaggugcauguc

SEQ ID NO: 468279 - RNA, 20 nt, Human
uccugggguaagccaugguc

SEQ ID NO: 468280 - RNA, 22 nt, Human
ugcccuggcuccucccacgcug

SEQ ID NO: 468281 - RNA, 22 nt, Human
cuggccuggcaggggaccucua

SEQ ID NO: 468282 - RNA, 22 nt, Human
gagcagcaggccagguugcagg

SEQ ID NO: 468283 - RNA, 22 nt, Human
gcuuggccagcagccgggaugc

SEQ ID NO: 468284 - RNA, 22 nt, Human
cauuguguauuucuguaguacu

SEQ ID NO: 468285 - RNA, 22 nt, Human
cuggcagcugcccgagaugccc

SEQ ID NO: 468286 - RNA, 22 nt, Human
uguucuggugaggccauggggu

SEQ ID NO: 468287 - RNA, 22 nt, Human
uaugccuaccuccaaaauauau

SEQ ID NO: 468288 - RNA, 22 nt, Human
cugcacagucauuuccucucaa

SEQ ID NO: 468289 - RNA, 19 nt, Human
cucuggcuccugggcugcc

SEQ ID NO: 468290 - RNA, 22 nt, Human
uguguuuuggaaggaacaugca

SEQ ID NO: 468291 - RNA, 22 nt, Human
ccugguguuaucauaggucaug

SEQ ID NO: 468292 - RNA, 22 nt, Human
cagggagccccaauuccaugcc

SEQ ID NO: 468293 - RNA, 22 nt, Human
ggccauggcgggagccggcguc

SEQ ID NO: 468294 - RNA, 20 nt, Human
cagagcagugcccaggcggc

SEQ ID NO: 468295 - RNA, 22 nt, Human
gcccagcaccucucucaggguu

SEQ ID NO: 468296 - RNA, 22 nt, Human
ggggucacacuguggugacugg

SEQ ID NO: 468297 - RNA, 22 nt, Human
cagacagagucuucccaucagu

SEQ ID NO: 468298 - RNA, 22 nt, Human
ccaggcuccccaggaggcccuu

SEQ ID NO: 468299 - RNA, 22 nt, Human
ccgggagguggagauugcggug

SEQ ID NO: 468300 - RNA, 22 nt, Human
uccccaguaagccugcacugug

SEQ ID NO: 468301 - RNA, 22 nt, Human
agccagcuaccggggcuccugg

SEQ ID NO: 468302 - RNA, 22 nt, Human
agggcucagaaagcagguuuuc

SEQ ID NO: 468303 - RNA, 22 nt, Human
gccagcagcucuugggcgggca

SEQ ID NO: 468304 - RNA, 21 nt, Human
cagaggggcuagccuggcugc

SEQ ID NO: 468305 - RNA, 22 nt, Human
agcggcgccggagggaggugcg

SEQ ID NO: 468306 - RNA, 22 nt, Human
uccugucucaguguauuugcag

SEQ ID NO: 468307 - RNA, 22 nt, Human
guucuccaggggcuguucaucu

SEQ ID NO: 468308 - RNA, 22 nt, Human
guccuuucgagggugagugaaa

SEQ ID NO: 468309 - RNA, 22 nt, Human
cuggagcucuccagagccccgu

SEQ ID NO: 468310 - RNA, 22 nt, Human
cgcugcgaggcgcccuuguugc

SEQ ID NO: 468311 - RNA, 23 nt, Human
guccuagugcuuggugcccaggc

SEQ ID NO: 468312 - RNA, 22 nt, Human
ccacccagccagaugcaggaag

SEQ ID NO: 468313 - RNA, 22 nt, Human
cacucacccgguccuucccagu

SEQ ID NO: 468314 - RNA, 22 nt, Human
aaacacaucauucaugucguca

SEQ ID NO: 468315 - RNA, 22 nt, Human
uggaaauacaagaaguauguca

SEQ ID NO: 468316 - RNA, 22 nt, Human
cccaccacgugcuuugcuggag

SEQ ID NO: 468317 - RNA, 22 nt, Human
uuuaauuauaucugggcaguua

SEQ ID NO: 468318 - RNA, 22 nt, Human
aacagaaaucauuuagggcucu

SEQ ID NO: 468319 - RNA, 22 nt, Human
uggcuccacaggccagggugug

SEQ ID NO: 468320 - RNA, 22 nt, Human
acuucacagauauuuauuuggu

SEQ ID NO: 468321 - RNA, 20 nt, Human
cugcuccacccggcucucag

SEQ ID NO: 468322 - RNA, 22 nt, Human
ggugcggagacuccaugaggcc

SEQ ID NO: 468323 - RNA, 22 nt, Human
cggucaggugcagcguuggcac

SEQ ID NO: 468324 - RNA, 22 nt, Human
gugcaggacagcacaucuccug

SEQ ID NO: 468325 - RNA, 22 nt, Human
cuggcucgcauuauauuuuggg

SEQ ID NO: 468326 - RNA, 20 nt, Human
gaccagaucccuuaccagcu

SEQ ID NO: 468327 - RNA, 22 nt, Human
ugcacagagggaggcauaaaau

SEQ ID NO: 468328 - RNA, 18 nt, Human
agggagagaccgcggguc

SEQ ID NO: 468329 - RNA, 22 nt, Human
aagcaauucacaguucacuuaa

SEQ ID NO: 468330 - RNA, 22 nt, Human
cugguuuuuagugcuuaggagu

SEQ ID NO: 468331 - RNA, 22 nt, Human
gccuguuucuccuccuuggccc

SEQ ID NO: 468332 - RNA, 22 nt, Human
ggaaggggagcuggaaagggua

SEQ ID NO: 468333 - RNA, 19 nt, Human
acacaccagugccugugac

SEQ ID NO: 468334 - RNA, 21 nt, Human
acugggcuagccugacuucug

SEQ ID NO: 468335 - RNA, 20 nt, Human
ugagccugcuguaggaggcc

SEQ ID NO: 468336 - RNA, 22 nt, Human
uccaggagggggagccgugccg

SEQ ID NO: 468337 - RNA, 22 nt, Human
gagcuccugaaacguuccugcc

SEQ ID NO: 468338 - RNA, 22 nt, Human
accagaagcuggagcacaagga

SEQ ID NO: 468339 - RNA, 22 nt, Human
gaccacaguccagucaucaugg

SEQ ID NO: 468340 - RNA, 17 nt, Human
gugcuggccuggggcuc

SEQ ID NO: 468341 - RNA, 20 nt, Human
ugcuggaggcgccggcgcuc

SEQ ID NO: 468342 - RNA, 22 nt, Human
cccugcacagccuggcucucuu

SEQ ID NO: 468343 - RNA, 22 nt, Human
uuucuaguggguauucccuguu

SEQ ID NO: 468344 - RNA, 21 nt, Human
ggcagcucagcagauggggac

SEQ ID NO: 468345 - RNA, 22 nt, Human
ccagcagcucccucaggguccg

SEQ ID NO: 468346 - RNA, 22 nt, Human
cagcugcucugguggucucucc

SEQ ID NO: 468347 - RNA, 22 nt, Human
acagcagguuauuguuauggca

SEQ ID NO: 468348 - RNA, 22 nt, Human
uaggaaauaauucacucuggcu

SEQ ID NO: 468349 - RNA, 22 nt, Human
gcagacccugaacugggcaugg

SEQ ID NO: 468350 - RNA, 22 nt, Human
gcccagaguuugaagauacagu

SEQ ID NO: 468351 - RNA, 22 nt, Human
gcuguccugggaacaggcacua

SEQ ID NO: 468352 - RNA, 22 nt, Human
gggggcuggacuuucccacaca

SEQ ID NO: 468353 - RNA, 22 nt, Human
ugggugccaaccucugguggcc

SEQ ID NO: 468354 - RNA, 22 nt, Human
uuuucuaacaucuaguaauuug

SEQ ID NO: 468355 - RNA, 22 nt, Human
cgcccacgaaguagguggcauu

SEQ ID NO: 468356 - RNA, 22 nt, Human
gaaaacacuuugaucugaaagu

SEQ ID NO: 468357 - RNA, 22 nt, Human
ccaggaggaaagaccagcccau

SEQ ID NO: 468358 - RNA, 22 nt, Human
ggccucugccccgcggggcucg

SEQ ID NO: 468359 - RNA, 22 nt, Human
ggugggucuuguggggcagcuu

SEQ ID NO: 468360 - RNA, 22 nt, Human
aaagagcucggaaaguguugaa

SEQ ID NO: 468361 - RNA, 22 nt, Human
ccugugucaucagcuguggcua

SEQ ID NO: 468362 - RNA, 22 nt, Human
ccugguuuaaugcucacuguug

SEQ ID NO: 468363 - RNA, 22 nt, Human
uaucacauacuucucauccagg

SEQ ID NO: 468364 - RNA, 22 nt, Human
ggagaggguagggguccugccc

SEQ ID NO: 468365 - RNA, 22 nt, Human
uggccgggaagggacagugugg

SEQ ID NO: 468366 - RNA, 22 nt, Human
gaggggccuggcgaggacaugu

SEQ ID NO: 468367 - RNA, 22 nt, Human
uggcccugccgccacgacgucu

SEQ ID NO: 468368 - RNA, 22 nt, Human
aaggggggcaccugcaugcccg

SEQ ID NO: 468369 - RNA, 22 nt, Human
uguggguccuccugugugcccg

SEQ ID NO: 468370 - RNA, 22 nt, Human
aagucccaucugccuccaugua

SEQ ID NO: 468371 - RNA, 16 nt, Human
ccccucaggaaguaca

SEQ ID NO: 468372 - RNA, 22 nt, Human
ucccagucuagagccggauugg

SEQ ID NO: 468373 - RNA, 22 nt, Human
guggcgcagaggguggcagaga

SEQ ID NO: 468374 - RNA, 22 nt, Human
cagcuccagccaccggggggug

SEQ ID NO: 468375 - RNA, 22 nt, Human
gagcugcagcggcugacgcaac

SEQ ID NO: 468376 - RNA, 22 nt, Human
aguccgcgcuccaugggagucc

SEQ ID NO: 468377 - RNA, 22 nt, Human
aggcggguuuaggacaaugcuu

SEQ ID NO: 468378 - RNA, 22 nt, Human
aacccuggggcugcucugccug

SEQ ID NO: 468379 - RNA, 22 nt, Human
agcgcuggugaucucuauuuug

SEQ ID NO: 468380 - RNA, 22 nt, Human
gggccuuggcgaaguguggugg

SEQ ID NO: 468381 - RNA, 22 nt, Human
uggcuccguuguacaggcugga

SEQ ID NO: 468382 - RNA, 19 nt, Human
gggugaggaagagcguugc

SEQ ID NO: 468383 - RNA, 22 nt, Human
gcugucccgaaccccugguaau

SEQ ID NO: 468384 - RNA, 22 nt, Human
ugauuccugugcuuauuccagu

SEQ ID NO: 468385 - RNA, 22 nt, Human
gcgguauuugugugggugucga

SEQ ID NO: 468386 - RNA, 22 nt, Human
ccagacuggggcuccuugaggg

SEQ ID NO: 468387 - RNA, 22 nt, Human
uggccuuggcagugagaagagu

SEQ ID NO: 468388 - RNA, 22 nt, Human
acgccucugcagcugccgggcc

SEQ ID NO: 468389 - RNA, 21 nt, Human
cuuuucuagucccagccccgc

SEQ ID NO: 468390 - RNA, 23 nt, Human
uuaacaggaucucgggcaagagg

SEQ ID NO: 468391 - RNA, 22 nt, Human
ccuggccuccuggccuucucau

SEQ ID NO: 468392 - RNA, 22 nt, Human
ggggaagaaauagaacauuuug

SEQ ID NO: 468393 - RNA, 22 nt, Human
ggcggugguugagaggacggcg

SEQ ID NO: 468394 - RNA, 22 nt, Human
aagggugguguaggagaucaaa

SEQ ID NO: 468395 - RNA, 22 nt, Human
uccucuucaaaauagcucugaa

SEQ ID NO: 468396 - RNA, 22 nt, Human
aggaaaugccgcggcucucuuu

SEQ ID NO: 468397 - RNA, 22 nt, Human
gcgcugccucugcucuccccac

SEQ ID NO: 468398 - RNA, 22 nt, Human
ugccgcugucgccaccauggcu

SEQ ID NO: 468399 - RNA, 22 nt, Human
ugcuggaguggcacuguguggc

SEQ ID NO: 468400 - RNA, 22 nt, Human
cagaaacacuguauuuagggaa

SEQ ID NO: 468401 - RNA, 22 nt, Human
cagggagcuggugccagccgac

SEQ ID NO: 468402 - RNA, 19 nt, Human
ugccuggcaccagcuccac

SEQ ID NO: 468403 - RNA, 22 nt, Human
uccuggcccuguggccugcagu

SEQ ID NO: 468404 - RNA, 22 nt, Human
gucgaucaccucguccuccgug

SEQ ID NO: 468405 - RNA, 22 nt, Human
uuuggaaaugagaagccaccuu

SEQ ID NO: 468406 - RNA, 22 nt, Human
agcagcaggugaccucgaugcc

SEQ ID NO: 468407 - RNA, 22 nt, Human
caggccacacggcggcucccug

SEQ ID NO: 468408 - RNA, 22 nt, Human
auuggccagacuuauccuucag

SEQ ID NO: 468409 - RNA, 22 nt, Human
caggccagcagggccuccgugg

SEQ ID NO: 468410 - RNA, 22 nt, Human
gccuuuuaaggcagagggagau

SEQ ID NO: 468411 - RNA, 22 nt, Human
augaagcugguuuuggcuuggg

SEQ ID NO: 468412 - RNA, 22 nt, Human
gggagagcgcgcuagggccgag

SEQ ID NO: 468413 - RNA, 21 nt, Human
cccgugccuucagcaguccug

SEQ ID NO: 468414 - RNA, 22 nt, Human
ggccuuccauugcucuuuucua

SEQ ID NO: 468415 - RNA, 22 nt, Human
uuggaaaugcauuuguuauuau

SEQ ID NO: 468416 - RNA, 18 nt, Human
gaucgggggcgccccaag

SEQ ID NO: 468417 - RNA, 22 nt, Human
gcggggggcagcagucgcucag

SEQ ID NO: 468418 - RNA, 22 nt, Human
cgggagccucugggucacacug

SEQ ID NO: 468419 - RNA, 22 nt, Human
uuugggaaacuuaggggucaga

SEQ ID NO: 468420 - RNA, 22 nt, Human
gcugggucucucccugguccug

SEQ ID NO: 468421 - RNA, 22 nt, Human
gugccaccagaugcuguugcua

SEQ ID NO: 468422 - RNA, 22 nt, Human
ccugcgggcugugcugaagccu

SEQ ID NO: 468423 - RNA, 17 nt, Human
uccuggccuggugugug

SEQ ID NO: 468424 - RNA, 22 nt, Human
uugcauauccuccaacacaugg

SEQ ID NO: 468425 - RNA, 22 nt, Human
caggcgaccccuaggagcaaca

SEQ ID NO: 468426 - RNA, 22 nt, Human
gaggaggcuuccgggaggcacg

SEQ ID NO: 468427 - RNA, 22 nt, Human
cuggcuuuuuucccauuaugca

SEQ ID NO: 468428 - RNA, 22 nt, Human
gcagcugcgcugguguggggca

SEQ ID NO: 468429 - RNA, 22 nt, Human
gugcgccagcucaaggggaggc

SEQ ID NO: 468430 - RNA, 22 nt, Human
uggcuccaggggacacgcagua

SEQ ID NO: 468431 - RNA, 21 nt, Human
ucuccucccggggagaggccg

SEQ ID NO: 468432 - RNA, 22 nt, Human
uuggggaagcuuugaaauacuu

SEQ ID NO: 468433 - RNA, 22 nt, Human
uuccggacgcccgucuuccagc

SEQ ID NO: 468434 - RNA, 22 nt, Human
gcagaggggaagcugaggaauu

SEQ ID NO: 468435 - RNA, 20 nt, Human
guccugggagccacagcaca

SEQ ID NO: 468436 - RNA, 22 nt, Human
cguggggcggguggacacuugc

SEQ ID NO: 468437 - RNA, 22 nt, Human
augcuuuauuggagacagucau

SEQ ID NO: 468438 - RNA, 22 nt, Human
guguguggaaugcucauuuauu

SEQ ID NO: 468439 - RNA, 22 nt, Human
cagucccaguuugagacucugg

SEQ ID NO: 468440 - RNA, 23 nt, Human
gggcugcuccaggccaaggcugg

SEQ ID NO: 468441 - RNA, 22 nt, Human
gggcagcaggcuccacguuccu

SEQ ID NO: 468442 - RNA, 22 nt, Human
uccaggaguccuggguggcccc

SEQ ID NO: 468443 - RNA, 22 nt, Human
aagggaaacuuucacaaugucc

SEQ ID NO: 468444 - RNA, 23 nt, Human
aaggggauacuuccacuuucuuu

SEQ ID NO: 468445 - RNA, 22 nt, Human
cucggaauggaacaacagcggu

SEQ ID NO: 468446 - RNA, 22 nt, Human
cgcggucucuuuaaggcggguc

SEQ ID NO: 468447 - RNA, 22 nt, Human
ugugucuuuggcgaugucugga

SEQ ID NO: 468448 - RNA, 22 nt, Human
ccaggagagcucucguucagug

SEQ ID NO: 468449 - RNA, 22 nt, Human
ccuuuuauauggcucaucacag

SEQ ID NO: 468450 - RNA, 22 nt, Human
uccaggagugauaaggccacug

SEQ ID NO: 468451 - RNA, 22 nt, Human
ccacugugcccagccucauggg

SEQ ID NO: 468452 - RNA, 21 nt, Human
cccagaaguuccauggggggc

SEQ ID NO: 468453 - RNA, 22 nt, Human
cuccagauuccguuuauucagg

SEQ ID NO: 468454 - RNA, 22 nt, Human
gcccagcgagcagagguggacg

SEQ ID NO: 468455 - RNA, 22 nt, Human
ggaacuccugcuccaagcagcu

SEQ ID NO: 468456 - RNA, 22 nt, Human
augccccagugugugcuuccuu

SEQ ID NO: 468457 - RNA, 22 nt, Human
ucugguuucccaguuccuccgu

SEQ ID NO: 468458 - RNA, 22 nt, Human
accucccuaacccuuuuggcuc

SEQ ID NO: 468459 - RNA, 22 nt, Human
cuuccucuguggccagagugua

SEQ ID NO: 468460 - RNA, 22 nt, Human
aagggccacaugccauuuaaaa

SEQ ID NO: 468461 - RNA, 22 nt, Human
acgugcuggagaagagcucgcc

SEQ ID NO: 468462 - RNA, 22 nt, Human
aggggagccagggcugcgaguu

SEQ ID NO: 468463 - RNA, 15 nt, Human
cccaggaguucgaga

SEQ ID NO: 468464 - RNA, 22 nt, Human
cgccccagccaguugagcggcg

SEQ ID NO: 468465 - RNA, 22 nt, Human
uguuccucugaacuucuuccaa

SEQ ID NO: 468466 - RNA, 22 nt, Human
cuggcuuugaucagagugaccu

SEQ ID NO: 468467 - RNA, 22 nt, Human
aaccagacucuccaaaggcaaa

SEQ ID NO: 468468 - RNA, 19 nt, Human
aggaaggcggcggcugccc

SEQ ID NO: 468469 - RNA, 22 nt, Human
ucuccccaguauggauucucug

SEQ ID NO: 468470 - RNA, 22 nt, Human
uccuucccaggugucgccgccu

SEQ ID NO: 468471 - RNA, 22 nt, Human
uguuggcagugcuacagucagu

SEQ ID NO: 468472 - RNA, 21 nt, Human
uccugccuuaguccagagcag

SEQ ID NO: 468473 - RNA, 22 nt, Human
acugagggacucccaccuggca

SEQ ID NO: 468474 - RNA, 23 nt, Human
uggugggcccugcuugcucacug

SEQ ID NO: 468475 - RNA, 22 nt, Human
uuaugggcgaugcaaaccugau

SEQ ID NO: 468476 - RNA, 22 nt, Human
agggaagcagcagccgccuguc

SEQ ID NO: 468477 - RNA, 21 nt, Human
gcugcucgagauccagugcuu

SEQ ID NO: 468478 - RNA, 22 nt, Human
accccagaggcggaggcugcag

SEQ ID NO: 468479 - RNA, 22 nt, Human
aggcucccaagcacugacccca

SEQ ID NO: 468480 - RNA, 19 nt, Human
augggaagcggccagcgga

SEQ ID NO: 468481 - RNA, 22 nt, Human
ggagaggggaacuuguugcuug

SEQ ID NO: 468482 - RNA, 22 nt, Human
gugcagcugugguggagccagg

SEQ ID NO: 468483 - RNA, 17 nt, Human
ugcaugcgucugugaua

SEQ ID NO: 468484 - RNA, 22 nt, Human
accaggcccuccagcugcgugg

SEQ ID NO: 468485 - RNA, 22 nt, Human
cacagaggacuguagcggggag

SEQ ID NO: 468486 - RNA, 22 nt, Human
augugauacuccuucuagugga

SEQ ID NO: 468487 - RNA, 22 nt, Human
gggcccugcgacucgcggcgga

SEQ ID NO: 468488 - RNA, 22 nt, Human
agagcgagucuggggcucggau

SEQ ID NO: 468489 - RNA, 22 nt, Human
agggagcugcucugcuuccgug

SEQ ID NO: 468490 - RNA, 22 nt, Human
gagggaaacagauggguugugg

SEQ ID NO: 468491 - RNA, 22 nt, Human
gagcugggaagauagcuugagc

SEQ ID NO: 468492 - RNA, 22 nt, Human
caggguggcaggcaccauggcc

SEQ ID NO: 468493 - RNA, 19 nt, Human
augagcuggcauuucaggu

SEQ ID NO: 468494 - RNA, 20 nt, Human
acagagauccucucuuuauc

SEQ ID NO: 468495 - RNA, 22 nt, Human
ccggcgucucuuccacuuccua

SEQ ID NO: 468496 - RNA, 22 nt, Human
aggacagcagugcuggcacuug

SEQ ID NO: 468497 - RNA, 22 nt, Human
cagcagcaacaacggaagccuu

SEQ ID NO: 468498 - RNA, 22 nt, Human
uuccccuugcacuaucacccug

SEQ ID NO: 468499 - RNA, 22 nt, Human
ggaaggguuuaagcaggagagu

SEQ ID NO: 468500 - RNA, 22 nt, Human
ugcuggcugggcugcuggagac

SEQ ID NO: 468501 - RNA, 19 nt, Human
ugggcuuccccagggcaga

SEQ ID NO: 468502 - RNA, 22 nt, Human
ccaggcccugccugugguuccu

SEQ ID NO: 468503 - RNA, 22 nt, Human
aggagucauugagagggguccu

SEQ ID NO: 468504 - RNA, 22 nt, Human
gcacaaaagguacuucauguag

SEQ ID NO: 468505 - RNA, 22 nt, Human
cagaguggugcaagggcagugu

SEQ ID NO: 468506 - RNA, 22 nt, Human
uggcagaaugaagacuggggcc

SEQ ID NO: 468507 - RNA, 22 nt, Human
acgugcaggaucugguuggcga

SEQ ID NO: 468508 - RNA, 21 nt, Human
gcuccuggugcugcguggcgc

SEQ ID NO: 468509 - RNA, 22 nt, Human
gcuggccugcgagggcaggcug

SEQ ID NO: 468510 - RNA, 20 nt, Human
ccacccuguccggggcggag

SEQ ID NO: 468511 - RNA, 22 nt, Human
gccugagccgccugagcggcgg

SEQ ID NO: 468512 - RNA, 18 nt, Human
ucugagggugcgggagcu

SEQ ID NO: 468513 - RNA, 22 nt, Human
ggagggaguuucauuccugccc

SEQ ID NO: 468514 - RNA, 22 nt, Human
uguguuucugagaaucccaccu

SEQ ID NO: 468515 - RNA, 20 nt, Human
uggcccagcacgacgaggac

SEQ ID NO: 468516 - RNA, 22 nt, Human
guagcagagggcccagguaacu

SEQ ID NO: 468517 - RNA, 22 nt, Human
gccuggcuaagcagaaggaccc

SEQ ID NO: 468518 - RNA, 20 nt, Human
gggugugugcagggccuggu

SEQ ID NO: 468519 - RNA, 20 nt, Human
ccagagcugauggcugcccg

SEQ ID NO: 468520 - RNA, 22 nt, Human
agcucuuuuaucaugaggagag

SEQ ID NO: 468521 - RNA, 23 nt, Human
gcacagagcaguuaggggaagau

SEQ ID NO: 468522 - RNA, 22 nt, Human
cccguguggaugcgcuggugcu

SEQ ID NO: 468523 - RNA, 23 nt, Human
cuuuccuuucuuugacacccagc

SEQ ID NO: 468524 - RNA, 20 nt, Human
ccagguggugccuggagagg

SEQ ID NO: 468525 - RNA, 22 nt, Human
gcccagggcugcaaguggacgc

SEQ ID NO: 468526 - RNA, 22 nt, Human
cagcaguacuucucagagguau

SEQ ID NO: 468527 - RNA, 22 nt, Human
gcugggcaggccucgugagggc

SEQ ID NO: 468528 - RNA, 22 nt, Human
uggugcaggccaagcugcgagc

SEQ ID NO: 468529 - RNA, 22 nt, Human
acaccacaaguaacucuuuucc

SEQ ID NO: 468530 - RNA, 22 nt, Human
cggcagcgguuggagguuguag

SEQ ID NO: 468531 - RNA, 20 nt, Human
gcucagggccugggucugga

SEQ ID NO: 468532 - RNA, 22 nt, Human
ggggaggaagcuggaacacggg

SEQ ID NO: 468533 - RNA, 22 nt, Human
uuuuccuucugauacuccauuu

SEQ ID NO: 468534 - RNA, 22 nt, Human
ucucugucucccguguguccgg

SEQ ID NO: 468535 - RNA, 21 nt, Human
uggcccuggccacggcugcca

SEQ ID NO: 468536 - RNA, 22 nt, Human
gcucgguggccagccugaggcc

SEQ ID NO: 468537 - RNA, 22 nt, Human
gaugcgggcccgcuccacugcc

SEQ ID NO: 468538 - RNA, 22 nt, Human
gccaggaugacuauacaacagc

SEQ ID NO: 468539 - RNA, 22 nt, Human
cagaccagccauuugccucuuc

SEQ ID NO: 468540 - RNA, 22 nt, Human
uccagugguggcucccggaccu

SEQ ID NO: 468541 - RNA, 22 nt, Human
cugccguguuuuucauguuaaa

SEQ ID NO: 468542 - RNA, 22 nt, Human
ucguuagccucgagaucuuugu

SEQ ID NO: 468543 - RNA, 22 nt, Human
ugcacgugugagcauucacaug

SEQ ID NO: 468544 - RNA, 22 nt, Human
guuucgucaggcuuauucuauc

SEQ ID NO: 468545 - RNA, 22 nt, Human
ccacuguuggcccgaagggguc

SEQ ID NO: 468546 - RNA, 22 nt, Human
guacauauccuuuacguuuugu

SEQ ID NO: 468547 - RNA, 22 nt, Human
gccccucuccuugugcaccugc

SEQ ID NO: 468548 - RNA, 22 nt, Human
guucuucagauuccauuucagu

SEQ ID NO: 468549 - RNA, 22 nt, Human
cucgcggcgcccgaagcccuug

SEQ ID NO: 468550 - RNA, 22 nt, Human
gggcacagucugcagcccccca

SEQ ID NO: 468551 - RNA, 22 nt, Human
ccugaggaugccagcaugggug

SEQ ID NO: 468552 - RNA, 22 nt, Human
agaggcucuuugagcugggaga

SEQ ID NO: 468553 - RNA, 22 nt, Human
gaugugugugcccugggccugc

SEQ ID NO: 468554 - RNA, 22 nt, Human
ccaggcagccugcuccauucug

SEQ ID NO: 468555 - RNA, 22 nt, Human
ggacucucaggcugucggcuuc

SEQ ID NO: 468556 - RNA, 22 nt, Human
agacgcgguggugcaugccugu

SEQ ID NO: 468557 - RNA, 22 nt, Human
uuaaguauauccauuugacugg

SEQ ID NO: 468558 - RNA, 22 nt, Human
cagggucuuggcgccaucaccc

SEQ ID NO: 468559 - RNA, 22 nt, Human
uuuucuuggaguggcuguccuu

SEQ ID NO: 468560 - RNA, 22 nt, Human
ccuggguccaauucuggcuugu

SEQ ID NO: 468561 - RNA, 22 nt, Human
ugugcccuccugccaggggcug

SEQ ID NO: 468562 - RNA, 22 nt, Human
ccucuuccacugggccccaucc

SEQ ID NO: 468563 - RNA, 22 nt, Human
agacagcgaggacagaggggug

SEQ ID NO: 468564 - RNA, 22 nt, Human
gggcggggcuuccguccuccac

SEQ ID NO: 468565 - RNA, 22 nt, Human
gccaccagccccaugcgcugug

SEQ ID NO: 468566 - RNA, 22 nt, Human
gaccuccguguacaccucccag

SEQ ID NO: 468567 - RNA, 22 nt, Human
uggaaggggccaggcgcggagu

SEQ ID NO: 468568 - RNA, 22 nt, Human
uggcuggcuguccagcugggca

SEQ ID NO: 468569 - RNA, 22 nt, Human
uucuuuccucccagccuuugga

SEQ ID NO: 468570 - RNA, 22 nt, Human
gguggcaccuuacccugcgcag

SEQ ID NO: 468571 - RNA, 22 nt, Human
cccaccagaccugcaccggcac

SEQ ID NO: 468572 - RNA, 22 nt, Human
ccucuuccuucucacuguggaa

SEQ ID NO: 468573 - RNA, 18 nt, Human
ccucuggguuuuguuccc

SEQ ID NO: 468574 - RNA, 16 nt, Human
ggcagcagcuccgugc

SEQ ID NO: 468575 - RNA, 22 nt, Human
ggugugucugccaggaacugca

SEQ ID NO: 468576 - RNA, 22 nt, Human
gaaaccuuugccgauggggucc

SEQ ID NO: 468577 - RNA, 22 nt, Human
ucaucuccauacggucucgcag

SEQ ID NO: 468578 - RNA, 22 nt, Human
ggucucugcagcucccggcccc

SEQ ID NO: 468579 - RNA, 22 nt, Human
auggaggaugugcagcaugggc

SEQ ID NO: 468580 - RNA, 22 nt, Human
aacccagaaacgcaggcgguca

SEQ ID NO: 468581 - RNA, 22 nt, Human
gcagagcacccugcagugguau

SEQ ID NO: 468582 - RNA, 22 nt, Human
uggcugggagcuggaacugggc

SEQ ID NO: 468583 - RNA, 22 nt, Human
ccaagaggggaagggccgcagc

SEQ ID NO: 468584 - RNA, 22 nt, Human
ccugaggcccuggcugugcuga

SEQ ID NO: 468585 - RNA, 21 nt, Human
ccaccaggucuucugcucggg

SEQ ID NO: 468586 - RNA, 22 nt, Human
gcagcagaaggccaaggggagc

SEQ ID NO: 468587 - RNA, 22 nt, Human
uucuuugcccauguuuccuaag

SEQ ID NO: 468588 - RNA, 22 nt, Human
ggccgugcuccaaagucaucgu

SEQ ID NO: 468589 - RNA, 22 nt, Human
cccugccuacaggguuuucuuu

SEQ ID NO: 468590 - RNA, 22 nt, Human
acugcuuacccggccugacuuc

SEQ ID NO: 468591 - RNA, 22 nt, Human
aggaagagcuggaccagaggac

SEQ ID NO: 468592 - RNA, 22 nt, Human
cuuccugcaacaccuguguugc

SEQ ID NO: 468593 - RNA, 22 nt, Human
uugaugagaccauugccgcguc

SEQ ID NO: 468594 - RNA, 22 nt, Human
gcaggccugucuugcucgcccu

SEQ ID NO: 468595 - RNA, 22 nt, Human
cuggagggcugcagcgaggcug

SEQ ID NO: 468596 - RNA, 22 nt, Human
gggacaauggaggccucucucc

SEQ ID NO: 468597 - RNA, 22 nt, Human
ccgcgagguggagguugcagug

SEQ ID NO: 468598 - RNA, 22 nt, Human
uggaagggagcuggaauuugga

SEQ ID NO: 468599 - RNA, 22 nt, Human
agcagccuugugacuccggggu

SEQ ID NO: 468600 - RNA, 22 nt, Human
gggucugcuccaccugcagccc

SEQ ID NO: 468601 - RNA, 22 nt, Human
gucaggggccaugggccaagga

SEQ ID NO: 468602 - RNA, 18 nt, Human
ggugagggagcuggaagc

SEQ ID NO: 468603 - RNA, 22 nt, Human
cagugccaaggauggccuggga

SEQ ID NO: 468604 - RNA, 22 nt, Human
uuccaggccgggcaggaaacac

SEQ ID NO: 468605 - RNA, 22 nt, Human
uuccuuucucuggacugcagcc

SEQ ID NO: 468606 - RNA, 22 nt, Human
gcggcccggguccccagcagca

SEQ ID NO: 468607 - RNA, 22 nt, Human
cugaggagauccccccagaagu

SEQ ID NO: 468608 - RNA, 22 nt, Human
ucaggggacagccagcuggagg

SEQ ID NO: 468609 - RNA, 22 nt, Human
uccuggcaaagauguugguguu

SEQ ID NO: 468610 - RNA, 22 nt, Human
auggccugcagugcugccacag

SEQ ID NO: 468611 - RNA, 22 nt, Human
ugggguccucucacuuggaggg

SEQ ID NO: 468612 - RNA, 17 nt, Human
agcagcuggguugaucu

SEQ ID NO: 468613 - RNA, 22 nt, Human
gaccugugcagugacugguggc

SEQ ID NO: 468614 - RNA, 22 nt, Human
ucuuuuaucuguuguguaacaa

SEQ ID NO: 468615 - RNA, 22 nt, Human
ggcuggccuguguggccgccac

SEQ ID NO: 468616 - RNA, 21 nt, Human
gcuguucggcggcccucgcgc

SEQ ID NO: 468617 - RNA, 22 nt, Human
acaggaaaugaaaugguaucua

SEQ ID NO: 468618 - RNA, 22 nt, Human
cuccccacgccuggacuaagag

SEQ ID NO: 468619 - RNA, 19 nt, Human
ggccuggauuuagggcucc

SEQ ID NO: 468620 - RNA, 23 nt, Human
ggucccaguggagaggccucacc

SEQ ID NO: 468621 - RNA, 22 nt, Human
agggcuccuaugccccauggac

SEQ ID NO: 468622 - RNA, 22 nt, Human
agcgggcucacccgguuguugu

SEQ ID NO: 468623 - RNA, 22 nt, Human
augcccugggagugcuguacca

SEQ ID NO: 468624 - RNA, 22 nt, Human
aggccaagcucccagagaagcu

SEQ ID NO: 468625 - RNA, 22 nt, Human
ggagccaguuuagaccucaguu

SEQ ID NO: 468626 - RNA, 22 nt, Human
ccugguuugggugccagugagu

SEQ ID NO: 468627 - RNA, 22 nt, Human
ucugcuggaaaaccagggaauu

SEQ ID NO: 468628 - RNA, 22 nt, Human
ugagccuggccugcagagacca

SEQ ID NO: 468629 - RNA, 22 nt, Human
ggccuuccugcugcuccgggcc

SEQ ID NO: 468630 - RNA, 22 nt, Human
agagaugcuguggguagaggca

SEQ ID NO: 468631 - RNA, 22 nt, Human
aucuucccaggcuggggagagg

SEQ ID NO: 468632 - RNA, 19 nt, Human
aucaggcuucuauuuucuc

SEQ ID NO: 468633 - RNA, 22 nt, Human
aggccagugguucucugugucc

SEQ ID NO: 468634 - RNA, 22 nt, Human
caggcgggcaggugcggccccu

SEQ ID NO: 468635 - RNA, 22 nt, Human
acugugugccaggcgcuggucu

SEQ ID NO: 468636 - RNA, 22 nt, Human
agcuggguguagggcuggacaa

SEQ ID NO: 468637 - RNA, 22 nt, Human
cagaaccaggaacugauggaga

SEQ ID NO: 468638 - RNA, 22 nt, Human
auggggagcucaccaccuguuu

SEQ ID NO: 468639 - RNA, 22 nt, Human
agugggagcggcagucggggac

SEQ ID NO: 468640 - RNA, 22 nt, Human
ggcagcaggguagccauuucuc

SEQ ID NO: 468641 - RNA, 22 nt, Human herpesvirus 2
agguggucgagauggcgucgga

SEQ ID NO: 468642 - RNA, 22 nt, Human herpesvirus 2
agauggagguucagaucguacg

SEQ ID NO: 468643 - RNA, 22 nt, Human herpesvirus 2
aggcgcaugacguguuucaggc

SEQ ID NO: 468644 - RNA, 22 nt, Human herpesvirus 2
agugguuaaaucgaccgugaug

SEQ ID NO: 468645 - RNA, 19 nt, Human herpesvirus 2
agcugggccuggagcccgg

SEQ ID NO: 468646 - RNA, 22 nt, Human herpesvirus 2
agaccugguuuuuggugccccu

SEQ ID NO: 468647 - RNA, 22 nt, Human herpesvirus 2
gauguuggcaaucucgagacca

SEQ ID NO: 468648 - RNA, 22 nt, Human herpesvirus 2
acggaggcgaguugcuggacgu

SEQ ID NO: 468649 - RNA, 22 nt, Human herpesvirus 2
cccgcgccgggcgcuaaugaga

SEQ ID NO: 468650 - RNA, 23 nt, Human herpesvirus 2
ccgggcgugcguggccgccaggc

SEQ ID NO: 468651 - RNA, 22 nt, Human herpesvirus 2
cugucugauccacagcaccccg

SEQ ID NO: 468652 - RNA, 22 nt, Human herpesvirus 2
gaagcugcugcggucgcgcccc

SEQ ID NO: 468653 - RNA, 22 nt, Human herpesvirus 2
cgcgccuccgaaagaugguguu

SEQ ID NO: 468654 - RNA, 22 nt, Human herpesvirus 2
cggccaucugcaucgugggccc

SEQ ID NO: 468655 - RNA, 22 nt, Human herpesvirus 2
caugguggaccgcgggcucggc

SEQ ID NO: 468656 - RNA, 22 nt, Human herpesvirus 2
caucuucugcccuuccauccuc

SEQ ID NO: 468657 - RNA, 22 nt, Human herpesvirus 2
auuguccacguaggugcugaag

SEQ ID NO: 468658 - RNA, 20 nt, Human herpesvirus 2
agcgcgugaggccgggcgcc

SEQ ID NO: 468659 - RNA, 20 nt, Human herpesvirus 2
cagcuacaccgggagggcgu

SEQ ID NO: 468660 - RNA, 22 nt, Human herpesvirus 2
aaacugcacgccgccacggcgg

SEQ ID NO: 468661 - RNA, 22 nt, Human herpesvirus 2
agaggcuguccgccgggcguga

SEQ ID NO: 468662 - RNA, 22 nt, Human herpesvirus 2
ggguccuccgccgccgcgggcc

SEQ ID NO: 468663 - RNA, 20 nt, Human herpesvirus 2
gcggcuccccuagcugcagc

SEQ ID NO: 468664 - RNA, 22 nt, Human herpesvirus 2
gccugcuggccacguacgcaau

SEQ ID NO: 468665 - RNA, 18 nt, Human herpesvirus 2
gcucaugggcgacgagga

SEQ ID NO: 468666 - RNA, 22 nt, Human herpesvirus 2
gcuggcagcgguggccguggau

SEQ ID NO: 468667 - RNA, 22 nt, Human herpesvirus 2
ggacgccggcacccccgaagcc

SEQ ID NO: 468668 - RNA, 22 nt, Human herpesvirus 2
ggaggcccaagaugccggcggu

SEQ ID NO: 468669 - RNA, 22 nt, Human herpesvirus 2
gcccgccacccgcgacgagcug

SEQ ID NO: 468670 - RNA, 22 nt, Human herpesvirus 2
gcccggggcguuccgcucaaca

SEQ ID NO: 468671 - RNA, 23 nt, Human herpesvirus 2
uucaccgcgacuccaccuccgag

SEQ ID NO: 468672 - RNA, 22 nt, Human herpesvirus 2
uucaggagcccaaagucguccu

SEQ ID NO: 468673 - RNA, 22 nt, Human herpesvirus 2
uuggguuccgcggacgccgggc

SEQ ID NO: 468674 - RNA, 22 nt, Human herpesvirus 2
ucugaauuucccgcagaaccuc

SEQ ID NO: 468675 - RNA, 21 nt, Human herpesvirus 2
uggcgaccgucaaguccccga

SEQ ID NO: 468676 - RNA, 22 nt, Human herpesvirus 2
gucgaggcuucgggggugccgg

SEQ ID NO: 468677 - RNA, 22 nt, Human herpesvirus 2
ucacgcccggcggacagccucu

SEQ ID NO: 468678 - RNA, 20 nt, Human herpesvirus 2
ucagggagcuguggugggug

SEQ ID NO: 468679 - RNA, 22 nt, Human herpesvirus 2
ggcuccaggccgccacgcuggg

SEQ ID NO: 468680 - RNA, 22 nt, Human herpesvirus 2
ggcgcccggggacguggcgcug

SEQ ID NO: 468681 - RNA, 22 nt, Human herpesvirus 2
gggcguggccgcccuucuaaaa

SEQ ID NO: 468682 - RNA, 22 nt, Human herpesvirus 2
gggggaguuugagacggccgag

SEQ ID NO: 468683 - RNA, 22 nt, Human herpesvirus 2
ggucacccuggaguugcuccug

SEQ ID NO: 468684 - RNA, 22 nt, Human herpesvirus 2
gagaggccguggagcuugccag

SEQ ID NO: 468685 - RNA, 22 nt, Human herpesvirus 2
gaaagggguccguaaccaaagg

SEQ ID NO: 468686 - RNA, 22 nt, Human herpesvirus 2
cacgggcguccccggugucucc

SEQ ID NO: 468687 - RNA, 22 nt, Human herpesvirus 2
cgaagagcucccguaggauaag

SEQ ID NO: 468688 - RNA, 22 nt, Human herpesvirus 2
cugcugcagcuaggggagccgc

SEQ ID NO: 468689 - RNA, 22 nt, Human herpesvirus 2
ccagcgugucggggccgaagcg

SEQ ID NO: 468690 - RNA, 22 nt, Human herpesvirus 2
cagcucgcgcagcagcugcucg

SEQ ID NO: 468691 - RNA, 22 nt, Human herpesvirus 2
cagggcguggaggcagucgcgc

SEQ ID NO: 468692 - RNA, 22 nt, Human herpesvirus 2
caguuuuuccgcggugagcugc

SEQ ID NO: 468693 - RNA, 22 nt, Human herpesvirus 2
uuacaacaacaacgcccauguc

SEQ ID NO: 468694 - RNA, 23 nt, Human herpesvirus 2
uugcuggcggcggccguguacgc

SEQ ID NO: 468695 - RNA, 22 nt, Human herpesvirus 2
uggccagcugccggggcagcgu

SEQ ID NO: 468696 - RNA, 22 nt, Human herpesvirus 2
ugcgggccggcacggccgugga

SEQ ID NO: 468697 - RNA, 22 nt, Human herpesvirus 2
ucugagccugggucaugcgcga

SEQ ID NO: 468698 - RNA, 22 nt, Human herpesvirus 2
ucguacccgggcaccacguggc

SEQ ID NO: 468699 - RNA, 22 nt, Human herpesvirus 2
gucugggggccuuucucugugu

SEQ ID NO: 468700 - RNA, 22 nt, Human herpesvirus 2
uaggguagacucgagacggcgg

SEQ ID NO: 468701 - RNA, 22 nt, Human herpesvirus 2
gcagggcguuucguuggucuag

SEQ ID NO: 468702 - RNA, 22 nt, Human herpesvirus 2
gccccggcgcgucguccgucac

SEQ ID NO: 468703 - RNA, 22 nt, Human herpesvirus 2
gccuucccgguguuggucgacg

SEQ ID NO: 468704 - RNA, 22 nt, Human herpesvirus 2
guccccgcccaggcuguggagg

SEQ ID NO: 468705 - RNA, 22 nt, Human herpesvirus 2
gcucgguggccgcgcgguacgu

SEQ ID NO: 468706 - RNA, 22 nt, Human herpesvirus 2
gcggggcuuggagcgaccgagg

SEQ ID NO: 468707 - RNA, 18 nt, Human herpesvirus 2
guggaagacggugacggu

SEQ ID NO: 468708 - RNA, 22 nt, Human herpesvirus 2
auuagggcaaagugcgagcgcu

SEQ ID NO: 468709 - RNA, 22 nt, Human herpesvirus 2
cucggggcuccgccagggcgcc

SEQ ID NO: 468710 - RNA, 22 nt, Human herpesvirus 2
cugcagcagcgcgaggagccgu

SEQ ID NO: 468711 - RNA, 18 nt, Human herpesvirus 2
cuggaaggcacaucucga

SEQ ID NO: 468712 - RNA, 22 nt, Human herpesvirus 2
cuggagagacgcaucuacgccg

SEQ ID NO: 468713 - RNA, 22 nt, Human herpesvirus 2
cgcaucucgagggccccgggac

SEQ ID NO: 468714 - RNA, 22 nt, Human herpesvirus 2
cccugggcucucggggaacccg

SEQ ID NO: 468715 - RNA, 22 nt, Human herpesvirus 2
gcccagcaacggcuccucgcgc

SEQ ID NO: 468716 - RNA, 22 nt, Human herpesvirus 2
gccgucagcgggggagcccugg

SEQ ID NO: 468717 - RNA, 22 nt, Human herpesvirus 2
gcaccccaccgaaaaacggagc

SEQ ID NO: 468718 - RNA, 22 nt, Human herpesvirus 2
gaagaccagccugucgccuaug

SEQ ID NO: 468719 - RNA, 22 nt, Human herpesvirus 2
ccagggcgccaugcgcccgcac

SEQ ID NO: 468720 - RNA, 22 nt, Human herpesvirus 2
uccgaaggucugcgcgaggccg

SEQ ID NO: 468721 - RNA, 22 nt, Human herpesvirus 2
ucgaugguggacgaggccguuc

SEQ ID NO: 468722 - RNA, 22 nt, Human herpesvirus 2
ucaccaccauucgcgugacggu

SEQ ID NO: 468723 - RNA, 22 nt, Human herpesvirus 2
guccuuguuuucggucugguac

SEQ ID NO: 468724 - RNA, 22 nt, Human herpesvirus 2
gggccagcacguggccgugcug

SEQ ID NO: 468725 - RNA, 22 nt, Human herpesvirus 2
gggucgacucggucucgcagcg

SEQ ID NO: 468726 - RNA, 22 nt, Human herpesvirus 2
guccacggccgugccggcccgc

SEQ ID NO: 468727 - RNA, 22 nt, Human herpesvirus 2
guccaggauaaaccggguggug

SEQ ID NO: 468728 - RNA, 22 nt, Human herpesvirus 2
ugcccgacccggaggacgugcg

SEQ ID NO: 468729 - RNA, 22 nt, Human herpesvirus 2
ugggagucugcgguugggagcg

SEQ ID NO: 468730 - RNA, 22 nt, Human herpesvirus 2
ugugugcaccgcgaagaaucca

SEQ ID NO: 468731 - RNA, 22 nt, Human herpesvirus 2
uucaccgcgacuccaccuccga

SEQ ID NO: 468732 - RNA, 22 nt, Human herpesvirus 2
gguccggcauccagagggcgcu

SEQ ID NO: 468733 - RNA, 22 nt, Human herpesvirus 2
gggcggcgccuuggaaccaucg

SEQ ID NO: 468734 - RNA, 22 nt, Human herpesvirus 2
ggaaccaagcggaggcaccccg

SEQ ID NO: 468735 - RNA, 22 nt, Human herpesvirus 2
gaggauggaagggcagaagaug

SEQ ID NO: 468736 - RNA, 22 nt, Human herpesvirus 2
gccuccagggcgugggcgcgcu

SEQ ID NO: 468737 - RNA, 22 nt, Human herpesvirus 2
ucucgucgccgauuaccgcggc

SEQ ID NO: 468738 - RNA, 22 nt, Human herpesvirus 2
ucaaagggggcguggccgcccu

SEQ ID NO: 468739 - RNA, 22 nt, Human herpesvirus 2
ucaccaccauucgcgugacggu

SEQ ID NO: 468740 - RNA, 20 nt, Human herpesvirus 2
ucaccggcacgucggccucg

SEQ ID NO: 468741 - RNA, 22 nt, Human herpesvirus 2
ucacgcccggcggacagccucu

SEQ ID NO: 468742 - RNA, 22 nt, Human herpesvirus 2
ucacgcgggugcuggugucucg

SEQ ID NO: 468743 - RNA, 22 nt, Human herpesvirus 2
gauggucgugcugggccucagc

SEQ ID NO: 468744 - RNA, 22 nt, Human herpesvirus 2
gaggauggaagggcagaagaug

SEQ ID NO: 468745 - RNA, 22 nt, Human herpesvirus 2
gagcuggcggaggaucccgggu

SEQ ID NO: 468746 - RNA, 22 nt, Human herpesvirus 2
cgugcuggagcgccuggugccg

SEQ ID NO: 468747 - RNA, 22 nt, Human herpesvirus 2
gagaggccguggagcuugccag

SEQ ID NO: 468748 - RNA, 22 nt, Human herpesvirus 2
cgcgcacguccuccgggucggg

SEQ ID NO: 468749 - RNA, 22 nt, Human herpesvirus 2
cgcgccggguccguuguaucuu

SEQ ID NO: 468750 - RNA, 22 nt, Human herpesvirus 2
cgcgccuccgaaagaugguguu

SEQ ID NO: 468751 - RNA, 23 nt, Human herpesvirus 2
cggcccauaggaucucgcggcuc

SEQ ID NO: 468752 - RNA, 22 nt, Human herpesvirus 2
cggugccacgucagcuggcagg

SEQ ID NO: 468753 - RNA, 22 nt, Human herpesvirus 2
cggugccgucuggguggcuccc

SEQ ID NO: 468754 - RNA, 22 nt, Human herpesvirus 2
cggggccgccgguagcaccccg

SEQ ID NO: 468755 - RNA, 22 nt, Human herpesvirus 2
cgggggcugcagucggcgcuga

SEQ ID NO: 468756 - RNA, 22 nt, Human herpesvirus 2
cgcucgcuaugggguucgucug

SEQ ID NO: 468757 - RNA, 22 nt, Human herpesvirus 2
cgcgucguggacaucauggcgc

SEQ ID NO: 468758 - RNA, 22 nt, Human herpesvirus 2
cgcuggugcccauguccccgcg

SEQ ID NO: 468759 - RNA, 22 nt, Human herpesvirus 2
cgcuguucgaggccacgcgcgu

SEQ ID NO: 468760 - RNA, 22 nt, Human herpesvirus 2
cggccaucugcaucgugggccc

SEQ ID NO: 468761 - RNA, 22 nt, Human herpesvirus 2
uggccagcugccggggcagcgu

SEQ ID NO: 468762 - RNA, 22 nt, Human herpesvirus 2
uggccccgaacacaaccggcuc

SEQ ID NO: 468763 - RNA, 22 nt, Human herpesvirus 2
ugccgagugaacucucccgccc

SEQ ID NO: 468764 - RNA, 22 nt, Human herpesvirus 2
ugcccgacccggaggacgugcg

SEQ ID NO: 468765 - RNA, 22 nt, Human herpesvirus 2
ugcgcgaggccuuagacgcccu

SEQ ID NO: 468766 - RNA, 22 nt, Human herpesvirus 2
ugcgggccggcacggccgugga

SEQ ID NO: 468767 - RNA, 18 nt, Human herpesvirus 2
acaccucgaucaccgucc

SEQ ID NO: 468768 - RNA, 22 nt, Human herpesvirus 2
accgagcucguguucguggggg

SEQ ID NO: 468769 - RNA, 22 nt, Human herpesvirus 2
acgcgggugcuggugucucggg

SEQ ID NO: 468770 - RNA, 17 nt, Human herpesvirus 2
acgcggugucggcggug

SEQ ID NO: 468771 - RNA, 20 nt, Human herpesvirus 2
uacggccauggaccugguuc

SEQ ID NO: 468772 - RNA, 22 nt, Human herpesvirus 2
gugggccgugaugcgcgggcgg

SEQ ID NO: 468773 - RNA, 22 nt, Human herpesvirus 2
guggcgucggugguucuggucg

SEQ ID NO: 468774 - RNA, 22 nt, Human herpesvirus 2
gugcggcggcgaccgggacgcc

SEQ ID NO: 468775 - RNA, 22 nt, Human herpesvirus 2
gucccggucgccgccgcaccag

SEQ ID NO: 468776 - RNA, 22 nt, Human herpesvirus 2
gucggcgcggggguggccaaac

SEQ ID NO: 468777 - RNA, 22 nt, Human herpesvirus 2
gucgaggcuucgggggugccgg

SEQ ID NO: 468778 - RNA, 22 nt, Human herpesvirus 2
guccucgcccggcagcggcgag

SEQ ID NO: 468779 - RNA, 22 nt, Human herpesvirus 2
guccccgcccaggcuguggagg

SEQ ID NO: 468780 - RNA, 22 nt, Human herpesvirus 2
gucuggcaugacacccagcucu

SEQ ID NO: 468781 - RNA, 22 nt, Human herpesvirus 2
gucugggggccuuucucugugu

SEQ ID NO: 468782 - RNA, 22 nt, Human herpesvirus 2
uuggguuccgcggacgccgggc

SEQ ID NO: 468783 - RNA, 23 nt, Human herpesvirus 2
uugcuggcggcggccguguacgc

SEQ ID NO: 468784 - RNA, 22 nt, Human herpesvirus 2
uugacgagcuucgcgguacuac

SEQ ID NO: 468785 - RNA, 22 nt, Human herpesvirus 2
ccucggagguggagucgcggug

SEQ ID NO: 468786 - RNA, 22 nt, Human herpesvirus 2
ccggaccuguucuucaagcgcc

SEQ ID NO: 468787 - RNA, 22 nt, Human herpesvirus 2
ccuacgagggcacaagccccgg

SEQ ID NO: 468788 - RNA, 22 nt, Human herpesvirus 2
agguggucgagauggcgucgga

SEQ ID NO: 468789 - RNA, 22 nt, Human herpesvirus 2
aguuccugcugcagggacguca

SEQ ID NO: 468790 - RNA, 22 nt, Human herpesvirus 2
agugguuaaaucgaccgugaug

SEQ ID NO: 468791 - RNA, 22 nt, Human herpesvirus 2
cccgcggcgucgcgacagacca

SEQ ID NO: 468792 - RNA, 22 nt, Human herpesvirus 2
cccggcgcgccggacuucugcg

SEQ ID NO: 468793 - RNA, 22 nt, Human herpesvirus 2
cccgggauccuccgccagcucg

SEQ ID NO: 468794 - RNA, 18 nt, Human herpesvirus 2
cccgcgaugcuaaugaga

SEQ ID NO: 468795 - RNA, 22 nt, Human herpesvirus 2
cccgcgccgggcgcuaaugaga

SEQ ID NO: 468796 - RNA, 22 nt, Human herpesvirus 2
cccgccccguacguugugcacg

SEQ ID NO: 468797 - RNA, 22 nt, Human herpesvirus 2
cccugggcucucggggaacccg

SEQ ID NO: 468798 - RNA, 22 nt, Human herpesvirus 2
ccgaccgcgggcugacgcggcu

SEQ ID NO: 468799 - RNA, 22 nt, Human herpesvirus 2
ccgacgccgguggucccggcga

SEQ ID NO: 468800 - RNA, 23 nt, Human herpesvirus 2
ccgggcgugcguggccgccaggc

SEQ ID NO: 468801 - RNA, 22 nt, Human herpesvirus 2
ccgcgaauagcuacggccgcuu

SEQ ID NO: 468802 - RNA, 16 nt, Human herpesvirus 2
ccaucuccgugauggc

SEQ ID NO: 468803 - RNA, 22 nt, Human herpesvirus 2
cccccucguacuuccugaucgc

SEQ ID NO: 468804 - RNA, 22 nt, Human herpesvirus 2
augacgccccggaugacguggc

SEQ ID NO: 468805 - RNA, 22 nt, Human herpesvirus 2
aucgucggcuccccgccgcgcu

SEQ ID NO: 468806 - RNA, 22 nt, Human herpesvirus 2
ucgucggcggccccgcggaggu

SEQ ID NO: 468807 - RNA, 22 nt, Human herpesvirus 2
ucguacccgggcaccacguggc

SEQ ID NO: 468808 - RNA, 22 nt, Human herpesvirus 2
ucgggaaggccucgucggaccc

SEQ ID NO: 468809 - RNA, 22 nt, Human herpesvirus 2
ucgaugguggacgaggccguuc

SEQ ID NO: 468810 - RNA, 22 nt, Human herpesvirus 2
ucggcgcggagcaucucgucca

SEQ ID NO: 468811 - RNA, 22 nt, Human herpesvirus 2
guccacggccgugccggcccgc

SEQ ID NO: 468812 - RNA, 22 nt, Human herpesvirus 2
guccaggauaaaccggguggug

SEQ ID NO: 468813 - RNA, 22 nt, Human herpesvirus 2
ucgaccccgccguucgggcggu

SEQ ID NO: 468814 - RNA, 22 nt, Human herpesvirus 2
ggucgcgcaugacccaggcuca

SEQ ID NO: 468815 - RNA, 22 nt, Human herpesvirus 2
ggucgcgccugcccggcccaga

SEQ ID NO: 468816 - RNA, 22 nt, Human herpesvirus 2
gggucgacucggucucgcagcg

SEQ ID NO: 468817 - RNA, 22 nt, Human herpesvirus 2
gguccggcauccagagggcgcu

SEQ ID NO: 468818 - RNA, 22 nt, Human herpesvirus 2
ggggggcaagugcaguaaccca

SEQ ID NO: 468819 - RNA, 22 nt, Human herpesvirus 2
ggcccggaggaggcgcucguca

SEQ ID NO: 468820 - RNA, 20 nt, Human herpesvirus 2
ggccggacaugguguccgug

SEQ ID NO: 468821 - RNA, 22 nt, Human herpesvirus 2
ggccgucgaacagaucgggccg

SEQ ID NO: 468822 - RNA, 19 nt, Human herpesvirus 2
ggccuccgccucgacccgc

SEQ ID NO: 468823 - RNA, 22 nt, Human herpesvirus 2
ggcgcccggggacguggcgcug

SEQ ID NO: 468824 - RNA, 22 nt, Human herpesvirus 2
ggacgggugaguucgcuaggca

SEQ ID NO: 468825 - RNA, 22 nt, Human herpesvirus 2
ggacgugcgaucggaucccgcg

SEQ ID NO: 468826 - RNA, 22 nt, Human herpesvirus 2
ggacgccggcacccccgaagcc

SEQ ID NO: 468827 - RNA, 22 nt, Human herpesvirus 2
ggaggcccaagaugccggcggu

SEQ ID NO: 468828 - RNA, 22 nt, Human herpesvirus 2
gcgggcgagggcgucuaaggcc

SEQ ID NO: 468829 - RNA, 22 nt, Human herpesvirus 2
gcggaccuggugcccggacguc

SEQ ID NO: 468830 - RNA, 17 nt, Human herpesvirus 2
gcggaugcggguagcug

SEQ ID NO: 468831 - RNA, 22 nt, Human herpesvirus 2
gcggccgcgacaugucccacag

SEQ ID NO: 468832 - RNA, 23 nt, Human herpesvirus 2
gcggcgggggauguguccauggc

SEQ ID NO: 468833 - RNA, 20 nt, Human herpesvirus 2
gcggcuccccuagcugcagc

SEQ ID NO: 468834 - RNA, 22 nt, Human herpesvirus 2
gcgcucucgaccgcgguucccg

SEQ ID NO: 468835 - RNA, 22 nt, Human herpesvirus 2
gcgcagacggcagaugugcgcg

SEQ ID NO: 468836 - RNA, 20 nt, Human herpesvirus 2
gcgcgccaaccgcccaccag

SEQ ID NO: 468837 - RNA, 22 nt, Human herpesvirus 2
gcgcgccaaugggcucgggaaa

SEQ ID NO: 468838 - RNA, 22 nt, Human herpesvirus 2
aaggccgugguguugcggagcg

SEQ ID NO: 468839 - RNA, 22 nt, Human herpesvirus 2
gccuucccgguguuggucgacg

SEQ ID NO: 468840 - RNA, 22 nt, Human herpesvirus 2
aaacugcacgccgccacggcgg

SEQ ID NO: 468841 - RNA, 22 nt, Human herpesvirus 2
aaaguccgggaggggccgcagg

SEQ ID NO: 468842 - RNA, 20 nt, Human herpesvirus 2
aacgcccugggguugccgug

SEQ ID NO: 468843 - RNA, 23 nt, Human herpesvirus 2
aacgcccugggguugccgugagg

SEQ ID NO: 468844 - RNA, 22 nt, Human herpesvirus 2
ugggaaaucuauugaacucucc

SEQ ID NO: 468845 - RNA, 22 nt, Human herpesvirus 2
ccagggcgccaugcgcccgcac

SEQ ID NO: 468846 - RNA, 21 nt, Human herpesvirus 2
uggcgaccgucaaguccccga

SEQ ID NO: 468847 - RNA, 22 nt, Human herpesvirus 2
uggcggcguagaugcgucucuc

SEQ ID NO: 468848 - RNA, 22 nt, Human herpesvirus 2
ugggagucugcgguugggagcg

SEQ ID NO: 468849 - RNA, 22 nt, Human herpesvirus 2
ugggccgggcaggcgcgaccga

SEQ ID NO: 468850 - RNA, 22 nt, Human herpesvirus 2
ugggcgucgacgaggcgucggc

SEQ ID NO: 468851 - RNA, 22 nt, Human herpesvirus 2
ccagcgugucggggccgaagcg

SEQ ID NO: 468852 - RNA, 22 nt, Human herpesvirus 2
cagcucgcgcagcagcugcucg

SEQ ID NO: 468853 - RNA, 22 nt, Human herpesvirus 2
cagggcguggaggcagucgcgc

SEQ ID NO: 468854 - RNA, 22 nt, Human herpesvirus 2
caugguggaccgcgggcucggc

SEQ ID NO: 468855 - RNA, 22 nt, Human herpesvirus 2
caccgguccuucgcgggggccg

SEQ ID NO: 468856 - RNA, 22 nt, Human herpesvirus 2
caccucggucuccuccuccgag

SEQ ID NO: 468857 - RNA, 22 nt, Human herpesvirus 2
cacgagcucgcggcaccccggc

SEQ ID NO: 468858 - RNA, 22 nt, Human herpesvirus 2
cacgaagccccggcggguuugu

SEQ ID NO: 468859 - RNA, 22 nt, Human herpesvirus 2
cacggacggcgaccugcggcgc

SEQ ID NO: 468860 - RNA, 22 nt, Human herpesvirus 2
cacggccgacguccccagcgug

SEQ ID NO: 468861 - RNA, 22 nt, Human herpesvirus 2
cacgggcguccccggugucucc

SEQ ID NO: 468862 - RNA, 22 nt, Human herpesvirus 2
caccaacucguucgcgcgcugc

SEQ ID NO: 468863 - RNA, 22 nt, Human herpesvirus 2
cgaccgucaagagccugggccc

SEQ ID NO: 468864 - RNA, 22 nt, Human herpesvirus 2
cgaagagcucccguaggauaag

SEQ ID NO: 468865 - RNA, 22 nt, Human herpesvirus 2
cgacgcacccggagccgcuucu

SEQ ID NO: 468866 - RNA, 22 nt, Human herpesvirus 2
cgacggugcgcugguuuucggg

SEQ ID NO: 468867 - RNA, 17 nt, Human herpesvirus 2
cgaucccgugaccgacc

SEQ ID NO: 468868 - RNA, 22 nt, Human herpesvirus 2
cgagguuccgcccgaccgcacc

SEQ ID NO: 468869 - RNA, 22 nt, Human herpesvirus 2
cgcccgaacggcggggucgaug

SEQ ID NO: 468870 - RNA, 22 nt, Human herpesvirus 2
aggcgacaggcuggucuuccug

SEQ ID NO: 468871 - RNA, 22 nt, Human herpesvirus 2
agggucucauuagcaucgcggg

SEQ ID NO: 468872 - RNA, 22 nt, Human herpesvirus 2
aggcgcaugacguguuucaggc

SEQ ID NO: 468873 - RNA, 22 nt, Human herpesvirus 2
aggugcggcuggacgccaacga

SEQ ID NO: 468874 - RNA, 22 nt, Human herpesvirus 2
cgccgcugccgggcgaggaccu

SEQ ID NO: 468875 - RNA, 22 nt, Human herpesvirus 2
cgccgccuggcggaccgcaucu

SEQ ID NO: 468876 - RNA, 22 nt, Human herpesvirus 2
cgcaucucgagggccccgggac

SEQ ID NO: 468877 - RNA, 22 nt, Human herpesvirus 2
cgcccggaggacggccguggcg

SEQ ID NO: 468878 - RNA, 22 nt, Human herpesvirus 2
cgcccgugugggcgcccgagcu

SEQ ID NO: 468879 - RNA, 22 nt, Human herpesvirus 2
cgcccuccgcuacacgacccug

SEQ ID NO: 468880 - RNA, 22 nt, Human herpesvirus 2
uuugggucgggcucagggccag

SEQ ID NO: 468881 - RNA, 22 nt, Human herpesvirus 2
acggaggcgaguugcuggacgu

SEQ ID NO: 468882 - RNA, 20 nt, Human herpesvirus 2
agcgcgugaggccgggcgcc

SEQ ID NO: 468883 - RNA, 22 nt, Human herpesvirus 2
agcgccccgugugugaccgagg

SEQ ID NO: 468884 - RNA, 22 nt, Human herpesvirus 2
agcgcgccuccggagcgagcuc

SEQ ID NO: 468885 - RNA, 22 nt, Human herpesvirus 2
agcgcucgcacuuugcccuaau

SEQ ID NO: 468886 - RNA, 22 nt, Human herpesvirus 2
agaccugguuuuuggugccccu

SEQ ID NO: 468887 - RNA, 22 nt, Human herpesvirus 2
agaggcuguccgccgggcguga

SEQ ID NO: 468888 - RNA, 22 nt, Human herpesvirus 2
agaguggcuccuggagcgcucg

SEQ ID NO: 468889 - RNA, 22 nt, Human herpesvirus 2
gggcggcgccuuggaaccaucg

SEQ ID NO: 468890 - RNA, 22 nt, Human herpesvirus 2
gggcgcaugugucugccgagcg

SEQ ID NO: 468891 - RNA, 22 nt, Human herpesvirus 2
gggccagcacguggccgugcug

SEQ ID NO: 468892 - RNA, 22 nt, Human herpesvirus 2
gggggaguuugagacggccgag

SEQ ID NO: 468893 - RNA, 22 nt, Human herpesvirus 2
ggggcgcgucccuucagccacu

SEQ ID NO: 468894 - RNA, 22 nt, Human herpesvirus 2
ggggcgcugccgaagguucgug

SEQ ID NO: 468895 - RNA, 22 nt, Human herpesvirus 2
gggcguggccgcccuucuaaaa

SEQ ID NO: 468896 - RNA, 17 nt, Human herpesvirus 2
ggggaucaagauaggcu

SEQ ID NO: 468897 - RNA, 22 nt, Human herpesvirus 2
ggggccaacgugcgguaccgcg

SEQ ID NO: 468898 - RNA, 22 nt, Human herpesvirus 2
gcucgguggccgcgcgguacgu

SEQ ID NO: 468899 - RNA, 22 nt, Human herpesvirus 2
gcuggcagcgguggccguggau

SEQ ID NO: 468900 - RNA, 22 nt, Human herpesvirus 2
gcuguacgcguguuccacgugc

SEQ ID NO: 468901 - RNA, 18 nt, Human herpesvirus 2
gcggucggggucgcuacu

SEQ ID NO: 468902 - RNA, 22 nt, Human herpesvirus 2
gcggguccgggggucguucacu

SEQ ID NO: 468903 - RNA, 22 nt, Human herpesvirus 2
gcgguccccggcacgaggguga

SEQ ID NO: 468904 - RNA, 18 nt, Human herpesvirus 2
gcucaugggcgacgagga

SEQ ID NO: 468905 - RNA, 22 nt, Human herpesvirus 2
gcagggcguuucguuggucuag

SEQ ID NO: 468906 - RNA, 22 nt, Human herpesvirus 2
gcagaccgucacgcgaauggug

SEQ ID NO: 468907 - RNA, 22 nt, Human herpesvirus 2
gcauggccggcaacgaccgcgu

SEQ ID NO: 468908 - RNA, 22 nt, Human herpesvirus 2
gcaccccaccgaaaaacggagc

SEQ ID NO: 468909 - RNA, 22 nt, Human herpesvirus 2
gcccggggcguuccgcucaaca

SEQ ID NO: 468910 - RNA, 22 nt, Human herpesvirus 2
gcccgguucgaggccucgggcg

SEQ ID NO: 468911 - RNA, 22 nt, Human herpesvirus 2
gcccguuaaaagcugcuaauua

SEQ ID NO: 468912 - RNA, 22 nt, Human herpesvirus 2
gcccagcaacggcuccucgcgc

SEQ ID NO: 468913 - RNA, 22 nt, Human herpesvirus 2
gccccggcgcgucguccgucac

SEQ ID NO: 468914 - RNA, 22 nt, Human herpesvirus 2
gcccgccacccgcgacgagcug

SEQ ID NO: 468915 - RNA, 22 nt, Human herpesvirus 2
gcccgcccucaccgucggccag

SEQ ID NO: 468916 - RNA, 23 nt, Human herpesvirus 2
gccacgugcgugccgggcacgag

SEQ ID NO: 468917 - RNA, 22 nt, Human herpesvirus 2
gccgucagcgggggagcccugg

SEQ ID NO: 468918 - RNA, 22 nt, Human herpesvirus 2
gccuccagggcgugggcgcgcu

SEQ ID NO: 468919 - RNA, 22 nt, Human herpesvirus 2
gccugcgugggugccaucgcuc

SEQ ID NO: 468920 - RNA, 22 nt, Human herpesvirus 2
gccugcuggccacguacgcaau

SEQ ID NO: 468921 - RNA, 22 nt, Human herpesvirus 2
gcggggcuuggagcgaccgagg

SEQ ID NO: 468922 - RNA, 22 nt, Human herpesvirus 2
cguggucucgggagcagggcgc

SEQ ID NO: 468923 - RNA, 22 nt, Human herpesvirus 2
cgugggugugcuagaucgaacg

SEQ ID NO: 468924 - RNA, 22 nt, Human herpesvirus 2
cuccgacgccaucucgaccacc

SEQ ID NO: 468925 - RNA, 22 nt, Human herpesvirus 2
cucgccgucgagguggcggauc

SEQ ID NO: 468926 - RNA, 22 nt, Human herpesvirus 2
cucggggcuccgccagggcgcc

SEQ ID NO: 468927 - RNA, 22 nt, Human herpesvirus 2
cugcccgcgaagaaacucucgc

SEQ ID NO: 468928 - RNA, 22 nt, Human herpesvirus 2
cugcgcggcggagaccgggacg

SEQ ID NO: 468929 - RNA, 18 nt, Human herpesvirus 2
cuggaaggcacaucucga

SEQ ID NO: 468930 - RNA, 22 nt, Human herpesvirus 2
gaagcugcugcggucgcgcccc

SEQ ID NO: 468931 - RNA, 22 nt, Human herpesvirus 2
gaaagggguccguaaccaaagg

SEQ ID NO: 468932 - RNA, 17 nt, Human herpesvirus 2
gacgccgccauggccgc

SEQ ID NO: 468933 - RNA, 22 nt, Human herpesvirus 2
ggcuccaggccgccacgcuggg

SEQ ID NO: 468934 - RNA, 19 nt, Human herpesvirus 2
ggcggggagccgacgaucc

SEQ ID NO: 468935 - RNA, 22 nt, Human
gugccaaaagcuauaauuuggu

SEQ ID NO: 468936 - RNA, 22 nt, Human
cccaaggcugcagugagcauga

SEQ ID NO: 468937 - RNA, 22 nt, Human
ucugggagacguguguugucag

SEQ ID NO: 468938 - RNA, 22 nt, Human
augggcagacagggagcucacg

SEQ ID NO: 468939 - RNA, 22 nt, Human
gucugcccucacgccagcuggg

SEQ ID NO: 468940 - RNA, 22 nt, Human
uuucuucugagaucagggagaa

SEQ ID NO: 468941 - RNA, 22 nt, Human
agggcaguguggugggacugac

SEQ ID NO: 468942 - RNA, 22 nt, Human
uggcccugaggacccagugugg

SEQ ID NO: 468943 - RNA, 22 nt, Human
uccaguggcaccuuggcccuca

SEQ ID NO: 468944 - RNA, 20 nt, Human
ggaagccagggugcagggga

SEQ ID NO: 468945 - RNA, 22 nt, Human
ucucagagauuuauggaaaacu

SEQ ID NO: 468946 - RNA, 22 nt, Human
gugguaauuuaauccuacacug

SEQ ID NO: 468947 - RNA, 22 nt, Human
auugaaagauuuugggcucaug

SEQ ID NO: 468948 - RNA, 22 nt, Human
cagcugagaaauggggaaaggg

SEQ ID NO: 468949 - RNA, 22 nt, Human
ccugccagauccccugagcuga

SEQ ID NO: 468950 - RNA, 22 nt, Human
ccagagccggcucccucagcuu

SEQ ID NO: 468951 - RNA, 22 nt, Human
caguggcagagaacagagaccu

SEQ ID NO: 468952 - RNA, 22 nt, Human
augugcauuaaaugucaauguu

SEQ ID NO: 468953 - RNA, 22 nt, Human
caguacuuuucuggcuuucuac

SEQ ID NO: 468954 - RNA, 22 nt, Human
ugcccacauucaaaaggugaug

SEQ ID NO: 468955 - RNA, 22 nt, Human
uggagaaggggcagggucucca

SEQ ID NO: 468956 - RNA, 22 nt, Human
ggcaaaaaccacaauuacuuuu

SEQ ID NO: 468957 - RNA, 22 nt, Human
caggggccggcuguccgugccc

SEQ ID NO: 468958 - RNA, 22 nt, Human
agaagccagauuguagugggac

SEQ ID NO: 468959 - RNA, 22 nt, Human
cugcuguguaucauuuuagaug

SEQ ID NO: 468960 - RNA, 22 nt, Human
ugcauauugugaaaauguagau

SEQ ID NO: 468961 - RNA, 22 nt, Human
gugcuugggggaaguaacagac

SEQ ID NO: 468962 - RNA, 22 nt, Human
auacaucuugucagauucaugu

SEQ ID NO: 468963 - RNA, 22 nt, Human
uccagagguauguagagaguau

SEQ ID NO: 468964 - RNA, 22 nt, Human
caggagaagguuuggagugcag

SEQ ID NO: 468965 - RNA, 22 nt, Human
cccagggucccugcucucugug

SEQ ID NO: 468966 - RNA, 22 nt, Human
aaaugcuguaacugauauucug

SEQ ID NO: 468967 - RNA, 22 nt, Human
uacauucuacuuuuucacuccc

SEQ ID NO: 468968 - RNA, 22 nt, Human
auggggagagaagggcugagcu

SEQ ID NO: 468969 - RNA, 22 nt, Human
ggccuguccagccugccuggcu

SEQ ID NO: 468970 - RNA, 20 nt, Human
aaucagaaagugugagcucu

SEQ ID NO: 468971 - RNA, 22 nt, Human
cugccugugccaaugcuccuuu

SEQ ID NO: 468972 - RNA, 22 nt, Human
agacaucagcuugugugcaggg

SEQ ID NO: 468973 - RNA, 20 nt, Human
ccaagagcaugcaugaggaa

SEQ ID NO: 468974 - RNA, 22 nt, Human
accaaagggcagaacaugagca

SEQ ID NO: 468975 - RNA, 18 nt, Human
cuccagggaacucaguca

SEQ ID NO: 468976 - RNA, 22 nt, Human
ccucagccuuggccccaggcag

SEQ ID NO: 468977 - RNA, 22 nt, Human
gaggcugcugagagcccuguuu

SEQ ID NO: 468978 - RNA, 23 nt, Human
uccagcagccaagaaggguagaa

SEQ ID NO: 468979 - RNA, 22 nt, Human
uaagaacagugucugucucaca

SEQ ID NO: 468980 - RNA, 22 nt, Human
gggagcuguaguccagauaccg

SEQ ID NO: 468981 - RNA, 22 nt, Human
gcugggcuucucaaugcugccu

SEQ ID NO: 468982 - RNA, 22 nt, Human
caagagcucaccggagagcauu

SEQ ID NO: 468983 - RNA, 22 nt, Human
agcaggcuccuuccuucucugg

SEQ ID NO: 468984 - RNA, 22 nt, Human
cagggacccuacuagcucacac

SEQ ID NO: 468985 - RNA, 22 nt, Human
uuucuuagcgaugcuugauaaa

SEQ ID NO: 468986 - RNA, 22 nt, Human
acaaguaccaaaugcucaagua

SEQ ID NO: 468987 - RNA, 21 nt, Human
uggcucuguucaauauaugga

SEQ ID NO: 468988 - RNA, 22 nt, Human
cccuuccuugugacuggugggg

SEQ ID NO: 468989 - RNA, 19 nt, Human
ucacaggcaucuccccaga

SEQ ID NO: 468990 - RNA, 22 nt, Human
guaacaaaguuucuaggugcug

SEQ ID NO: 468991 - RNA, 22 nt, Human
aggacucaucccugcuugucag

SEQ ID NO: 468992 - RNA, 22 nt, Human
ccaccuccaccuauugccagcc

SEQ ID NO: 468993 - RNA, 22 nt, Human
ugcucacugaacucuugcuguc

SEQ ID NO: 468994 - RNA, 22 nt, Human
uuagagccaguuacaaggucaa

SEQ ID NO: 468995 - RNA, 22 nt, Human
agccuggagaagauguguauug

SEQ ID NO: 468996 - RNA, 22 nt, Human
aaguucaaucagaugaaaaagc

SEQ ID NO: 468997 - RNA, 22 nt, Human
uggcaccugaacuuagaggugu

SEQ ID NO: 468998 - RNA, 22 nt, Human
gcuggccugggcucaagaccag

SEQ ID NO: 468999 - RNA, 21 nt, Human
ccagagccugcugagcccccu

SEQ ID NO: 469000 - RNA, 22 nt, Human
cugcagggagaggggacagccu

SEQ ID NO: 469001 - RNA, 21 nt, Human
gcucuuggaaggggcucagcu

SEQ ID NO: 469002 - RNA, 22 nt, Human
caucagcaggcaacacucuugg

SEQ ID NO: 469003 - RNA, 22 nt, Human
uguacauugucacucaucaagu

SEQ ID NO: 469004 - RNA, 22 nt, Human
aggcuucagaugaccuuagcau

SEQ ID NO: 469005 - RNA, 22 nt, Human
aggcaggggagcuggaagggua

SEQ ID NO: 469006 - RNA, 22 nt, Human
gauuuagagaauguuuuguaag

SEQ ID NO: 469007 - RNA, 20 nt, Human
gccaacgcgcuggggcugcc

SEQ ID NO: 469008 - RNA, 18 nt, Human
cauaauuuucuuucuuua

SEQ ID NO: 469009 - RNA, 22 nt, Human
aggguggggugcuacaucuuua

SEQ ID NO: 469010 - RNA, 22 nt, Human
gaaaacacuuugaucugaaagu

SEQ ID NO: 469011 - RNA, 22 nt, Human
auccacccugugguggcuuucu

SEQ ID NO: 469012 - RNA, 22 nt, Human
agccucuggcccuagacugcuu

SEQ ID NO: 469013 - RNA, 22 nt, Human
caugaauauuuaguauuuacuu

SEQ ID NO: 469014 - RNA, 22 nt, Human
gauuuccuugcauauugguaau

SEQ ID NO: 469015 - RNA, 22 nt, Human
caguuuauuuccaagaugacaa

SEQ ID NO: 469016 - RNA, 22 nt, Human
cagcuggaugggagaccauguu

SEQ ID NO: 469017 - RNA, 22 nt, Human
aggcaggaacccugugugcgcc

SEQ ID NO: 469018 - RNA, 22 nt, Human
ggcugcagauagccagccacca

SEQ ID NO: 469019 - RNA, 22 nt, Human
cugagcugcuuugcuuuugggg

SEQ ID NO: 469020 - RNA, 22 nt, Human
cuuggcugucuauaggaaagag

SEQ ID NO: 469021 - RNA, 22 nt, Human
cuggagaggccccaagauauuu

SEQ ID NO: 469022 - RNA, 22 nt, Human
ggcagugacuguucagacgucc

SEQ ID NO: 469023 - RNA, 22 nt, Human
ucagagaguccuggucauuugc

SEQ ID NO: 469024 - RNA, 22 nt, Human
accaugccaguggcagccagac

SEQ ID NO: 469025 - RNA, 22 nt, Human
ccaggccuuucuucuuggucug

SEQ ID NO: 469026 - RNA, 22 nt, Human
auguuucaucaguaagguuuug

SEQ ID NO: 469027 - RNA, 22 nt, Human
cccuggaagguucucuggcuca

SEQ ID NO: 469028 - RNA, 22 nt, Human
agucauaauuauaaacaucagu

SEQ ID NO: 469029 - RNA, 22 nt, Human
gaggcagugucgguggcaggau

SEQ ID NO: 469030 - RNA, 22 nt, Human
ucauuuaauugguuuugcucgu

SEQ ID NO: 469031 - RNA, 22 nt, Human
aucuggcuauugacauguuaua

SEQ ID NO: 469032 - RNA, 22 nt, Human
cacagcagaaaguguaggagga

SEQ ID NO: 469033 - RNA, 22 nt, Human
cagggcuccaugcagggacucc

SEQ ID NO: 469034 - RNA, 22 nt, Human
uacuguuuuuuagacucauggu

SEQ ID NO: 469035 - RNA, 22 nt, Human
cucugguucagggcucccuggc

SEQ ID NO: 469036 - RNA, 20 nt, Human
cugccuggaggccucuaccu

SEQ ID NO: 469037 - RNA, 22 nt, Human
auugauaucaguuugcugauug

SEQ ID NO: 469038 - RNA, 22 nt, Human
aggcccagacucagcggggcgg

SEQ ID NO: 469039 - RNA, 20 nt, Human
aagaaacuugaaaguacaag

SEQ ID NO: 469040 - RNA, 22 nt, Human
aggccuguuccuuccugggcac

SEQ ID NO: 469041 - RNA, 22 nt, Human
cacauuucuaggaaauuaaaug

SEQ ID NO: 469042 - RNA, 22 nt, Human
aagcagcacgcuuugccaacaa

SEQ ID NO: 469043 - RNA, 22 nt, Human
aggugcaguggcucaugccugu

SEQ ID NO: 469044 - RNA, 22 nt, Human
gcucccugccuacacggaccuu

SEQ ID NO: 469045 - RNA, 22 nt, Human
guguuuccucuagaagccaugg

SEQ ID NO: 469046 - RNA, 22 nt, Human
uccaugugccaaggggcagagg

SEQ ID NO: 469047 - RNA, 22 nt, Human
cauuuauugguuaggccagcag

SEQ ID NO: 469048 - RNA, 23 nt, Human
cugcagccgcguggggacgugga

SEQ ID NO: 469049 - RNA, 21 nt, Human
gaaggagaaagcaagugcugc

SEQ ID NO: 469050 - RNA, 22 nt, Human
agauguggccggcuagggagag

SEQ ID NO: 469051 - RNA, 19 nt, Human
ggucucagugcagcugcag

SEQ ID NO: 469052 - RNA, 22 nt, Human
gagaagguggaccugaaggagc

SEQ ID NO: 469053 - RNA, 22 nt, Human
ucaguuuugaaaacauugaaug

SEQ ID NO: 469054 - RNA, 22 nt, Human
aagggcugagcacagugagcca

SEQ ID NO: 469055 - RNA, 22 nt, Human
cucuggagaugguucucaauug

SEQ ID NO: 469056 - RNA, 22 nt, Human
gggaagccaugcucagagguac

SEQ ID NO: 469057 - RNA, 22 nt, Human
uggcugaguguuccaaggagca

SEQ ID NO: 469058 - RNA, 22 nt, Human
uuuuggucagguuggucucgaa

SEQ ID NO: 469059 - RNA, 22 nt, Human
aaugcagugagccauuaaaugg

SEQ ID NO: 469060 - RNA, 21 nt, Human
gccaaggggguagcuauuccu

SEQ ID NO: 469061 - RNA, 22 nt, Human
uuuuaucuaccuaugcucauuu

SEQ ID NO: 469062 - RNA, 22 nt, Human
aaaauguguuuaugcauuucgu

SEQ ID NO: 469063 - RNA, 22 nt, Human
caaagccaggcuuucuaaugua

SEQ ID NO: 469064 - RNA, 22 nt, Human
agaggcaguauacaauccgagc

SEQ ID NO: 469065 - RNA, 20 nt, Human
ugcuccaucuaaagugauua

SEQ ID NO: 469066 - RNA, 18 nt, Human
gagcugccauauuuaguu

SEQ ID NO: 469067 - RNA, 22 nt, Human
cacagaagaaucaugcuguguu

SEQ ID NO: 469068 - RNA, 23 nt, Human
gcugucugucaucucugcgggag

SEQ ID NO: 469069 - RNA, 22 nt, Human
gcucccagauuucagccuugug

SEQ ID NO: 469070 - RNA, 22 nt, Human
auuuucaucgcuagguuggccu

SEQ ID NO: 469071 - RNA, 22 nt, Human
uagacacaagagaaggguauaa

SEQ ID NO: 469072 - RNA, 22 nt, Human
ucucagagaagugaugagcaau

SEQ ID NO: 469073 - RNA, 22 nt, Human
agcagccaguucucugugguag

SEQ ID NO: 469074 - RNA, 22 nt, Human
gucccagggaagaaggcagcac

SEQ ID NO: 469075 - RNA, 22 nt, Human
gcauuauuaauagcugcaugag

SEQ ID NO: 469076 - RNA, 22 nt, Human
gcugucacacaugggaucucag

SEQ ID NO: 469077 - RNA, 21 nt, Human
gcugccaccgcgugcuccagg

SEQ ID NO: 469078 - RNA, 22 nt, Human
guagggacaugccauuaucuca

SEQ ID NO: 469079 - RNA, 17 nt, Human
gugcagggaugaaggau

SEQ ID NO: 469080 - RNA, 22 nt, Human
ucacugcugcugccaugaugga

SEQ ID NO: 469081 - RNA, 22 nt, Human
aaggcuuuugggaauuuucaac

SEQ ID NO: 469082 - RNA, 22 nt, Human
cugauuccugauucaugcucuu

SEQ ID NO: 469083 - RNA, 22 nt, Human
uaaggccaaacuauuauaguuc

SEQ ID NO: 469084 - RNA, 22 nt, Human
agcaggaacucagggaguucuc

SEQ ID NO: 469085 - RNA, 22 nt, Human
guggcugcuaagucuccuuccu

SEQ ID NO: 469086 - RNA, 19 nt, Human
caaggccaccauuucuccg

SEQ ID NO: 469087 - RNA, 22 nt, Human
agggggcaggagagaccugcug

SEQ ID NO: 469088 - RNA, 22 nt, Human
gcagcuuuaaucugaauaagua

SEQ ID NO: 469089 - RNA, 22 nt, Human
gagaagccgagucagcugagcc

SEQ ID NO: 469090 - RNA, 22 nt, Human
ccaguggaauuaaaaauaagug

SEQ ID NO: 469091 - RNA, 22 nt, Human
cagggcagaacauauagauagu

SEQ ID NO: 469092 - RNA, 22 nt, Human
caguucuaauuaauaggaguaa

SEQ ID NO: 469093 - RNA, 22 nt, Human
uauauuaacacccacuugccuc

SEQ ID NO: 469094 - RNA, 22 nt, Human
gcuugaaaauucauagguauuu

SEQ ID NO: 469095 - RNA, 22 nt, Human
gagagcuguccggcugagcagc

SEQ ID NO: 469096 - RNA, 22 nt, Human
cccaggaguaagugacauuguu

SEQ ID NO: 469097 - RNA, 22 nt, Human
ugggaggaucgcuugagcccag

SEQ ID NO: 469098 - RNA, 22 nt, Human
gcugucugacuccaaguuggag

SEQ ID NO: 469099 - RNA, 22 nt, Human
uaugaagacaaugauagcauga

SEQ ID NO: 469100 - RNA, 22 nt, Human
caggguccggcugccuggcugu

SEQ ID NO: 469101 - RNA, 22 nt, Human
aggagagucuugagucacuggu

SEQ ID NO: 469102 - RNA, 22 nt, Human
aaacuugauuuagaacuaaggc

SEQ ID NO: 469103 - RNA, 22 nt, Human
ccacagggauaggaauggggcu

SEQ ID NO: 469104 - RNA, 22 nt, Human
gguggccugcccugaucccugg

SEQ ID NO: 469105 - RNA, 22 nt, Human
agagaugaaaaguggagacugg

SEQ ID NO: 469106 - RNA, 22 nt, Human
ccuggccacucagguguggggc

SEQ ID NO: 469107 - RNA, 22 nt, Human
gaugaggggucauuggcuggga

SEQ ID NO: 469108 - RNA, 22 nt, Human
agcagcaucaacccucccgugu

SEQ ID NO: 469109 - RNA, 22 nt, Human
aggcugcuggcaggcguggacg

SEQ ID NO: 469110 - RNA, 22 nt, Human
agugucugccaacugcaugguc

SEQ ID NO: 469111 - RNA, 22 nt, Human
gcucccaggaagagaagggcca

SEQ ID NO: 469112 - RNA, 22 nt, Human
cagagcagggguuucccagguu

SEQ ID NO: 469113 - RNA, 22 nt, Human
uaaggcauucucaugcugugaa

SEQ ID NO: 469114 - RNA, 22 nt, Human
caggggacauuaaagcuccaua

SEQ ID NO: 469115 - RNA, 22 nt, Human
ucccucuguguugggcaugccu

SEQ ID NO: 469116 - RNA, 22 nt, Human
aagauacauaaagguagagucu

SEQ ID NO: 469117 - RNA, 22 nt, Human
ccaggccuguguuguguggagg

SEQ ID NO: 469118 - RNA, 22 nt, Human
acagcuguggggacucuugccc

SEQ ID NO: 469119 - RNA, 22 nt, Human
ccagcagcccucuuccaagacu

SEQ ID NO: 469120 - RNA, 22 nt, Human
cccucccagaugggcuugaggu

SEQ ID NO: 469121 - RNA, 20 nt, Human
cacagcuugccuuuuaugac

SEQ ID NO: 469122 - RNA, 22 nt, Human
cugggagaugacucagagcagg

SEQ ID NO: 469123 - RNA, 22 nt, Human
ugcugccuccaacuccugggcu

SEQ ID NO: 469124 - RNA, 22 nt, Human
cucccaagcugugcugaacugu

SEQ ID NO: 469125 - RNA, 22 nt, Human
acucaagauagggaaaguacaa

SEQ ID NO: 469126 - RNA, 22 nt, Human
uugaaagugccaaguccuagug

SEQ ID NO: 469127 - RNA, 22 nt, Human
aguauggggcugugugugcaca

SEQ ID NO: 469128 - RNA, 21 nt, Human
ucccagggccaggugccauca

SEQ ID NO: 469129 - RNA, 22 nt, Human
ucccagagccucugccacucug

SEQ ID NO: 469130 - RNA, 22 nt, Human
cuguacagaguucugaguguac

SEQ ID NO: 469131 - RNA, 22 nt, Human
ggggaugguagaccggugacgu

SEQ ID NO: 469132 - RNA, 22 nt, Human
aggcucagacaggaaaaguaac

SEQ ID NO: 469133 - RNA, 21 nt, Human
uugaaggaucacuucuguacc

SEQ ID NO: 469134 - RNA, 22 nt, Human
ggccaggcugcugggaccccgc

SEQ ID NO: 469135 - RNA, 21 nt, Human
cagcuucuucugugaccuggu

SEQ ID NO: 469136 - RNA, 22 nt, Human
guuagaaagugucugcuugggu

SEQ ID NO: 469137 - RNA, 22 nt, Human
cuuagggaauugggaggaugcc

SEQ ID NO: 469138 - RNA, 22 nt, Human
ugcaggugaaaauuaugaggau

SEQ ID NO: 469139 - RNA, 22 nt, Human
cacaugaugguggaagccauag

SEQ ID NO: 469140 - RNA, 22 nt, Human
cucuggaguucucaugaggaac

SEQ ID NO: 469141 - RNA, 22 nt, Human
uuugcauugcauacaaggaacu

SEQ ID NO: 469142 - RNA, 22 nt, Human
uguggcuguguccaccugcugc

SEQ ID NO: 469143 - RNA, 22 nt, Human
ucugucugcucauuuaccucag

SEQ ID NO: 469144 - RNA, 23 nt, Human
cagaggguuccauggagcauggu

SEQ ID NO: 469145 - RNA, 22 nt, Human
aagggcucuguugccauuucag

SEQ ID NO: 469146 - RNA, 22 nt, Human
acagggcagagggcaguuggua

SEQ ID NO: 469147 - RNA, 22 nt, Human
uaguuaggaaaguccagggagc

SEQ ID NO: 469148 - RNA, 22 nt, Human
ucuacuguagugaugcugcagu

SEQ ID NO: 469149 - RNA, 22 nt, Human
ucuguacacuucagcaugcauc

SEQ ID NO: 469150 - RNA, 22 nt, Human
aaggaagguucauagucaaaga

SEQ ID NO: 469151 - RNA, 22 nt, Human
uucccucuccuacucaggaaag

SEQ ID NO: 469152 - RNA, 22 nt, Human
gcacagggcaacaggucuguua

SEQ ID NO: 469153 - RNA, 22 nt, Human
ucaggggcccuucccucagcag

SEQ ID NO: 469154 - RNA, 22 nt, Human
cuggcagcgugagcagcaucca

SEQ ID NO: 469155 - RNA, 22 nt, Human
ugacauuucgguguaugugaug

SEQ ID NO: 469156 - RNA, 18 nt, Human
ugaauagggguuugcaga

SEQ ID NO: 469157 - RNA, 22 nt, Human
gggugcagggucuccagcagcu

SEQ ID NO: 469158 - RNA, 22 nt, Human
ccuggccagccagggcuggggu

SEQ ID NO: 469159 - RNA, 22 nt, Human
ggcuguggcauuaggugaggcc

SEQ ID NO: 469160 - RNA, 22 nt, Human
gccuggaguagcauggcaagcc

SEQ ID NO: 469161 - RNA, 22 nt, Human
ucuggcucucucaucacccaau

SEQ ID NO: 469162 - RNA, 22 nt, Human
ggcacugaucugauuucccucc

SEQ ID NO: 469163 - RNA, 19 nt, Human
ggcugcugguuacagaggc

SEQ ID NO: 469164 - RNA, 22 nt, Human
gagcagugggaaggaacagggu

SEQ ID NO: 469165 - RNA, 22 nt, Human
aaugcacaugccacauguggua

SEQ ID NO: 469166 - RNA, 22 nt, Human
gcuggcaucacuggcuucggug

SEQ ID NO: 469167 - RNA, 22 nt, Human
aggcucuguuauucuagagggc

SEQ ID NO: 469168 - RNA, 22 nt, Human
aucagcaagcaugguuaggugu

SEQ ID NO: 469169 - RNA, 22 nt, Human
cuuauuagaguuguguucuguu

SEQ ID NO: 469170 - RNA, 22 nt, Human
cccagggacagaugggcagcua

SEQ ID NO: 469171 - RNA, 22 nt, Human
cagaggcugaugugggaugggc

SEQ ID NO: 469172 - RNA, 23 nt, Human
uguugaaguaacuguuacauaga

SEQ ID NO: 469173 - RNA, 22 nt, Human
cuggagcuccagggucuccucu

SEQ ID NO: 469174 - RNA, 22 nt, Human
ccuggccagaggcgugccugug

SEQ ID NO: 469175 - RNA, 22 nt, Human
uggcacauagcagguacucagu

SEQ ID NO: 469176 - RNA, 22 nt, Human
aaaggagacuucagaucuccuu

SEQ ID NO: 469177 - RNA, 22 nt, Human
cugccucuauaggaguccacca

SEQ ID NO: 469178 - RNA, 22 nt, Human
gagcuggaagucuguggucaga

SEQ ID NO: 469179 - RNA, 22 nt, Human
cagagagcaugggaggcccgag

SEQ ID NO: 469180 - RNA, 22 nt, Human
gaacagaauuaccgaagaucug

SEQ ID NO: 469181 - RNA, 22 nt, Human
ccagagcuucggggcggcugua

SEQ ID NO: 469182 - RNA, 22 nt, Human
uguacaguguagucaugagguu

SEQ ID NO: 469183 - RNA, 22 nt, Human
ggccagagucuauaugcagaca

SEQ ID NO: 469184 - RNA, 18 nt, Human
uccgaggcaccauaaaaa

SEQ ID NO: 469185 - RNA, 22 nt, Human
aggcucagauccuuguguccug

SEQ ID NO: 469186 - RNA, 22 nt, Human
ugaggcucagugagcccugcag

SEQ ID NO: 469187 - RNA, 22 nt, Human
agccuucaaccuagcuagagca

SEQ ID NO: 469188 - RNA, 22 nt, Human
ucucuggagcugcagauccagg

SEQ ID NO: 469189 - RNA, 20 nt, Human
gaggaaaagcugccaggccu

SEQ ID NO: 469190 - RNA, 22 nt, Human
gcuguacaguuuacuagguggg

SEQ ID NO: 469191 - RNA, 22 nt, Human
gucaggaugagggaugaggagu

SEQ ID NO: 469192 - RNA, 22 nt, Human
auauguguauuugguuagccua

SEQ ID NO: 469193 - RNA, 20 nt, Human
caggcaguuugugguuaggg

SEQ ID NO: 469194 - RNA, 22 nt, Human
ccucuggggugagugggccacu

SEQ ID NO: 469195 - RNA, 22 nt, Human
ugaggaaacugaggcacagaug

SEQ ID NO: 469196 - RNA, 22 nt, Human
cccugggcagucugcacuucag

SEQ ID NO: 469197 - RNA, 22 nt, Human
accaucagucauugucaguggg

SEQ ID NO: 469198 - RNA, 22 nt, Human
gggcugaguuccugccucacuc

SEQ ID NO: 469199 - RNA, 22 nt, Human
uggagaugcacgagcaggugga

SEQ ID NO: 469200 - RNA, 22 nt, Human
aucaguuugagugcugugucaa

SEQ ID NO: 469201 - RNA, 18 nt, Human
cagauccaggcagcuauu

SEQ ID NO: 469202 - RNA, 21 nt, Human
agggcagauuagcuguaagag

SEQ ID NO: 469203 - RNA, 22 nt, Human
ugaagccauuacuguguuaggg

SEQ ID NO: 469204 - RNA, 22 nt, Human
cuggcagccaagugggauacuc

SEQ ID NO: 469205 - RNA, 22 nt, Human
cagcauugaucccaggcugugg

SEQ ID NO: 469206 - RNA, 22 nt, Human
uggaguucauccaugacagcuu

SEQ ID NO: 469207 - RNA, 22 nt, Human
gaacagcccuguuaagucuguu

SEQ ID NO: 469208 - RNA, 22 nt, Human
caguuuuuagauuaguuggugg

SEQ ID NO: 469209 - RNA, 22 nt, Human
aaggugucggguuagcucagcc

SEQ ID NO: 469210 - RNA, 22 nt, Human
ccugccugguguaagucuaagg

SEQ ID NO: 469211 - RNA, 22 nt, Human
auuucucaguguacauuauguu

SEQ ID NO: 469212 - RNA, 22 nt, Human
auuuuuaugacaaaccauccuc

SEQ ID NO: 469213 - RNA, 22 nt, Human
aaaagguagauucuccuucuau

SEQ ID NO: 469214 - RNA, 21 nt, Human
ucaaagcacauauuugcacau

SEQ ID NO: 469215 - RNA, 22 nt, Human
acaguggagaaggcaugaggcu

SEQ ID NO: 469216 - RNA, 22 nt, Human
guccuggcuuaguucgcuguaa

SEQ ID NO: 469217 - RNA, 22 nt, Human
caggggacaguaugguggauga

SEQ ID NO: 469218 - RNA, 22 nt, Human
uaacagaaauuuuaguuagggg

SEQ ID NO: 469219 - RNA, 22 nt, Human
gaggcagagguuguugcaguga

SEQ ID NO: 469220 - RNA, 22 nt, Human
aggcuggggaauugaauuugcu

SEQ ID NO: 469221 - RNA, 22 nt, Human
cccuggaguccuggcaguugau

SEQ ID NO: 469222 - RNA, 22 nt, Human
cucuggagguugagcccagcaa

SEQ ID NO: 469223 - RNA, 22 nt, Human
gacauaauaaucugaccuagau

SEQ ID NO: 469224 - RNA, 22 nt, Human
uaauguguccugaaagcuucug

SEQ ID NO: 469225 - RNA, 22 nt, Human
ugaacagauggcccagcagagg

SEQ ID NO: 469226 - RNA, 22 nt, Human
gagggcucugaaaggaggucac

SEQ ID NO: 469227 - RNA, 22 nt, Human
acagaaauuagcagugaguuua

SEQ ID NO: 469228 - RNA, 21 nt, Human
uccugcagggcagcagagugg

SEQ ID NO: 469229 - RNA, 22 nt, Human
uauuucuaagcuguaagucuga

SEQ ID NO: 469230 - RNA, 22 nt, Human
gcagagugagauaugaacccag

SEQ ID NO: 469231 - RNA, 22 nt, Human
aaugccaguguguugauuccag

SEQ ID NO: 469232 - RNA, 22 nt, Human
ugccaggcauuugacagacacu

SEQ ID NO: 469233 - RNA, 22 nt, Human
agggcacccucucugcaguacc

SEQ ID NO: 469234 - RNA, 22 nt, Human
gagcagcuguccccaaagcuuc

SEQ ID NO: 469235 - RNA, 22 nt, Human
cuggcucauuuuagcaucaggu

SEQ ID NO: 469236 - RNA, 22 nt, Human
aucaggauguuuggcugucaua

SEQ ID NO: 469237 - RNA, 22 nt, Human
aaaugucuuugaguauuucugc

SEQ ID NO: 469238 - RNA, 22 nt, Human
uggaagcacuuggguuuuguug

SEQ ID NO: 469239 - RNA, 22 nt, Human
gggacuguaaauucauauggcc

SEQ ID NO: 469240 - RNA, 22 nt, Human
uggcuccuaggauggugccugg

SEQ ID NO: 469241 - RNA, 22 nt, Human
aguuucuaccgguacauucagg

SEQ ID NO: 469242 - RNA, 22 nt, Human
ugggccacaagccaugggacca

SEQ ID NO: 469243 - RNA, 22 nt, Human
auaguguuacccuucuuaaagu

SEQ ID NO: 469244 - RNA, 21 nt, Human
aaagagcccgcugagagguuc

SEQ ID NO: 469245 - RNA, 20 nt, Human
ucauuguguugccaauuccc

SEQ ID NO: 469246 - RNA, 22 nt, Human
ccagaagacaagaauguucuua

SEQ ID NO: 469247 - RNA, 22 nt, Human
cagaggaaaugggaaggagaua

SEQ ID NO: 469248 - RNA, 22 nt, Human
cucuguccacagguuugucccu

SEQ ID NO: 469249 - RNA, 22 nt, Human
gaguggggucugggcaucaguc

SEQ ID NO: 469250 - RNA, 22 nt, Human
auauucguggucaaguaaggcc

SEQ ID NO: 469251 - RNA, 22 nt, Human
acugaaauacugcucuuggauu

SEQ ID NO: 469252 - RNA, 22 nt, Human
caaagucagccagcuaguaggu

SEQ ID NO: 469253 - RNA, 22 nt, Human
guuaauuuaguagaguccagau

SEQ ID NO: 469254 - RNA, 22 nt, Human
ugauucuauggaaggcauaagg

SEQ ID NO: 469255 - RNA, 22 nt, Human
agauacaucauuuauaccuuca

SEQ ID NO: 469256 - RNA, 22 nt, Human
ugugccuuaugaauucuuucug

SEQ ID NO: 469257 - RNA, 22 nt, Human
ggccuagggaguggccaugccu

SEQ ID NO: 469258 - RNA, 20 nt, Human
ucugugugccaucaccuaac

SEQ ID NO: 469259 - RNA, 22 nt, Human
ucuuugcaggagcccuuugaac

SEQ ID NO: 469260 - RNA, 22 nt, Human
aucaggaucacugggagucuug

SEQ ID NO: 469261 - RNA, 22 nt, Human
cugccagccaggccagguaggc

SEQ ID NO: 469262 - RNA, 22 nt, Human
uagucccauuuugagguauuug

SEQ ID NO: 469263 - RNA, 22 nt, Human
uuucagauuaucucaacuuugg

SEQ ID NO: 469264 - RNA, 23 nt, Human
gccuggccaccccagggcugcuu

SEQ ID NO: 469265 - RNA, 22 nt, Human
uacuuuagaaggaaauaaguuc

SEQ ID NO: 469266 - RNA, 22 nt, Human
gcuuuccuggcccugucccugc

SEQ ID NO: 469267 - RNA, 22 nt, Human
cauccacuagaaugacagaguu

SEQ ID NO: 469268 - RNA, 22 nt, Human
gcccucugcuggccucaccucg

SEQ ID NO: 469269 - RNA, 22 nt, Human
agccuguggaucccugcacugg

SEQ ID NO: 469270 - RNA, 22 nt, Human
ucagugucuugaccugggugug

SEQ ID NO: 469271 - RNA, 22 nt, Human
cccucugccucugaguaggaca

SEQ ID NO: 469272 - RNA, 22 nt, Human
gggcugagucaucuggggccuc

SEQ ID NO: 469273 - RNA, 22 nt, Human
ucacaagacagaaaacauuuag

SEQ ID NO: 469274 - RNA, 22 nt, Human
aucuccaggcauuucaagagac

SEQ ID NO: 469275 - RNA, 22 nt, Human
cucaggaguaguucagcagcug

SEQ ID NO: 469276 - RNA, 22 nt, Human
acccagccacagcauugaggga

SEQ ID NO: 469277 - RNA, 22 nt, Human
uuauuauaaugagggauaaaaa

SEQ ID NO: 469278 - RNA, 22 nt, Human
ccagcugauucgguggugguug

SEQ ID NO: 469279 - RNA, 22 nt, Human
acaguggaguugggguagcccu

SEQ ID NO: 469280 - RNA, 22 nt, Human
ggaagccaggccaaugagaaca

SEQ ID NO: 469281 - RNA, 21 nt, Human
gcucucugcaugguggcucag

SEQ ID NO: 469282 - RNA, 22 nt, Human
uaagacauuugaaaugugaucc

SEQ ID NO: 469283 - RNA, 22 nt, Human
ucugggcagcagcagcuaguag

SEQ ID NO: 469284 - RNA, 22 nt, Human
caggaggcaucauggagcggac

SEQ ID NO: 469285 - RNA, 22 nt, Human
gcugcagcuguaggacacaauu

SEQ ID NO: 469286 - RNA, 22 nt, Human
uggcccgaccucugcucaugca

SEQ ID NO: 469287 - RNA, 22 nt, Human
ggccugagucccaccuggcugu

SEQ ID NO: 469288 - RNA, 22 nt, Human
agagugucugguagcugcucug

SEQ ID NO: 469289 - RNA, 22 nt, Human
cauuagggucucucagcugaau

SEQ ID NO: 469290 - RNA, 22 nt, Human
agcagaugagccucaugacugg

SEQ ID NO: 469291 - RNA, 22 nt, Human
caggggcuuaagugacagaagg

SEQ ID NO: 469292 - RNA, 22 nt, Human
caguucaggccggcugacucag

SEQ ID NO: 469293 - RNA, 22 nt, Human
uucucuuagcuguaaagucaau

SEQ ID NO: 469294 - RNA, 22 nt, Human
uuguuuuggaagaacuuacucu

SEQ ID NO: 469295 - RNA, 22 nt, Human
caaaauguucuggcaccuuuaa

SEQ ID NO: 469296 - RNA, 22 nt, Human
ggugggcaggcgaggcccaggu

SEQ ID NO: 469297 - RNA, 22 nt, Human
ccacugucagaggggcugugcc

SEQ ID NO: 469298 - RNA, 22 nt, Human
gucccaggcagagucaggaggg

SEQ ID NO: 469299 - RNA, 22 nt, Human
aggggcugcuggguccgccccu

SEQ ID NO: 469300 - RNA, 21 nt, Human
uucuucaugaugauuaauggc

SEQ ID NO: 469301 - RNA, 22 nt, Human
acucugugugaguagagccugu

SEQ ID NO: 469302 - RNA, 22 nt, Human
cgggcuccgggucuuugcaguc

SEQ ID NO: 469303 - RNA, 23 nt, Human
agucucagcuggaaacauguguc

SEQ ID NO: 469304 - RNA, 22 nt, Human
cucuggaguuagugaucugggc

SEQ ID NO: 469305 - RNA, 18 nt, Human
ucagagagcagcuuuauu

SEQ ID NO: 469306 - RNA, 22 nt, Human
aacuagaaaacaagaugcugau

SEQ ID NO: 469307 - RNA, 22 nt, Human
ccugcacuaccuggggcugcug

SEQ ID NO: 469308 - RNA, 22 nt, Human
ggcuccagggaguggagagaag

SEQ ID NO: 469309 - RNA, 20 nt, Human
agaaucugacccagagagac

SEQ ID NO: 469310 - RNA, 22 nt, Human
aguuuuaugcaguguucugaua

SEQ ID NO: 469311 - RNA, 22 nt, Human
cucccugguguccccuccagga

SEQ ID NO: 469312 - RNA, 22 nt, Human
uaaaauguguuucuguaugguu

SEQ ID NO: 469313 - RNA, 20 nt, Human
cagaggcaaggagacuugga

SEQ ID NO: 469314 - RNA, 22 nt, Human
caaagggcucuagacucagcag

SEQ ID NO: 469315 - RNA, 22 nt, Human
uggccugcagcucucagggaag

SEQ ID NO: 469316 - RNA, 22 nt, Human
cugcuuugaaaauaaacuuguc

SEQ ID NO: 469317 - RNA, 22 nt, Human
uaaaauagcaugugcagugaaa

SEQ ID NO: 469318 - RNA, 22 nt, Human
uccauucuaugcuuacauuuau

SEQ ID NO: 469319 - RNA, 22 nt, Human
gcagccucagggcacucagaug

SEQ ID NO: 469320 - RNA, 22 nt, Human
uucagcagucguccaggaaaag

SEQ ID NO: 469321 - RNA, 22 nt, Human
ccugcuggccaguggagggcug

SEQ ID NO: 469322 - RNA, 22 nt, Human
uucucuugugccaaguuguugc

SEQ ID NO: 469323 - RNA, 22 nt, Human
auuaaauuuucacuaggcuccc

SEQ ID NO: 469324 - RNA, 22 nt, Human
gggccaggucggugaaugguca

SEQ ID NO: 469325 - RNA, 22 nt, Human
uaugcauaauuggauaaguaga

SEQ ID NO: 469326 - RNA, 22 nt, Human
acgugcaggaucugguuggcga

SEQ ID NO: 469327 - RNA, 22 nt, Human
caggccuggagugcaauggcac

SEQ ID NO: 469328 - RNA, 22 nt, Human
ggcagauggagaagcagcaggu

SEQ ID NO: 469329 - RNA, 22 nt, Human
agccaggccuuuucucaagguu

SEQ ID NO: 469330 - RNA, 22 nt, Human
ugucaugccauuuaaaauguuu

SEQ ID NO: 469331 - RNA, 22 nt, Human
auguuuauguugggcuauauuu

SEQ ID NO: 469332 - RNA, 22 nt, Human
gggcugagcuaagcuggguuga

SEQ ID NO: 469333 - RNA, 22 nt, Human
cagcuucucagaaagcugaggu

SEQ ID NO: 469334 - RNA, 22 nt, Human
ccagagcugaugggcccagggu

SEQ ID NO: 469335 - RNA, 22 nt, Human
uuauucugcacuuuuaaaauau

SEQ ID NO: 469336 - RNA, 22 nt, Human
aucagaagaaauggaugugacu

SEQ ID NO: 469337 - RNA, 22 nt, Human
aacauaaauuugaaguggcaaa

SEQ ID NO: 469338 - RNA, 22 nt, Human
ccaggacuuuaaguccagcacu

SEQ ID NO: 469339 - RNA, 23 nt, Human
gggcuccagucucugcucaguug

SEQ ID NO: 469340 - RNA, 22 nt, Human
cucccaggcacagggaggagcc

SEQ ID NO: 469341 - RNA, 21 nt, Human
ugcagcagaguaagcagggga

SEQ ID NO: 469342 - RNA, 19 nt, Human
cagauguuuucaguucauu

SEQ ID NO: 469343 - RNA, 22 nt, Human
ugucuucaguaaaauacacuau

SEQ ID NO: 469344 - RNA, 21 nt, Human
ccaccaggucuucugcucggg

SEQ ID NO: 469345 - RNA, 22 nt, Human
aggugagguuugggagguguca

SEQ ID NO: 469346 - RNA, 22 nt, Human
cagcuuguuuuauuuggggacc

SEQ ID NO: 469347 - RNA, 22 nt, Human
cccagcucaucaggagccgccc

SEQ ID NO: 469348 - RNA, 21 nt, Human
gggcuggacaugguggcucau

SEQ ID NO: 469349 - RNA, 22 nt, Human
gcugccaccguggagaugagug

SEQ ID NO: 469350 - RNA, 22 nt, Human
guugaaagaugucuugguuccc

SEQ ID NO: 469351 - RNA, 22 nt, Human
cagugcaguuucccagaugcug

SEQ ID NO: 469352 - RNA, 21 nt, Human
uagggcucucugugucaggug

SEQ ID NO: 469353 - RNA, 22 nt, Human
agagaggcgaguuaccugugcu

SEQ ID NO: 469354 - RNA, 22 nt, Human
agccacagagcaggagaccuuu

SEQ ID NO: 469355 - RNA, 22 nt, Human
agaauucuuggugguuagaaua

SEQ ID NO: 469356 - RNA, 22 nt, Human
cugagcccaggcgggagcugag

SEQ ID NO: 469357 - RNA, 22 nt, Human
ugccucagaguugucccuacca

SEQ ID NO: 469358 - RNA, 21 nt, Human
ugcaugcuauguuuuuauuuc

SEQ ID NO: 469359 - RNA, 22 nt, Human
gaggucaggggagaggcugaug

SEQ ID NO: 469360 - RNA, 22 nt, Human
cugggcacaggggagcagaguc

SEQ ID NO: 469361 - RNA, 22 nt, Human
agggccugggucuguacuccuc

SEQ ID NO: 469362 - RNA, 20 nt, Human
cugcuguguuauuguagaac

SEQ ID NO: 469363 - RNA, 22 nt, Human
gcaccaggaggcccuucucauc

SEQ ID NO: 469364 - RNA, 22 nt, Human
uguccuuuaugaaaugguguuu

SEQ ID NO: 469365 - RNA, 22 nt, Human
cagcccugagaaggaggaucuc

SEQ ID NO: 469366 - RNA, 22 nt, Human
ggcugaggcucaugccaucuug

SEQ ID NO: 469367 - RNA, 22 nt, Human
agagccacugggagacagagca

SEQ ID NO: 469368 - RNA, 22 nt, Human
agucccagcucugccacuuacu

SEQ ID NO: 469369 - RNA, 22 nt, Human
uccucuucugcccaucagaggc

SEQ ID NO: 469370 - RNA, 22 nt, Human
aaagauuuaagaauaauuugug

SEQ ID NO: 469371 - RNA, 22 nt, Human
gccugugguuugauuaagcauu

SEQ ID NO: 469372 - RNA, 22 nt, Human
uagcauuucacugaucuucacu

SEQ ID NO: 469373 - RNA, 22 nt, Human
uguggcugacuccuggucccca

SEQ ID NO: 469374 - RNA, 22 nt, Human
gggcugggauggcuugaagauu

SEQ ID NO: 469375 - RNA, 22 nt, Human
ccaggugucuguggccagcccu

SEQ ID NO: 469376 - RNA, 22 nt, Human
gccaggugcuaucccugcgcug

SEQ ID NO: 469377 - RNA, 22 nt, Human
uucuuccucagcagggcugccu

SEQ ID NO: 469378 - RNA, 22 nt, Human
uacaaaguuugagaaugcuuuc

SEQ ID NO: 469379 - RNA, 22 nt, Human
cugguacaaaaugcugauauca

SEQ ID NO: 469380 - RNA, 22 nt, Human
agcauggggcaaugcaugugcu

SEQ ID NO: 469381 - RNA, 22 nt, Human
gaaggcaggcuucugauuaggu

SEQ ID NO: 469382 - RNA, 22 nt, Human
ccacucugcugugcuccaugau

SEQ ID NO: 469383 - RNA, 22 nt, Human
ucagaagcugguguccuuugaa

SEQ ID NO: 469384 - RNA, 22 nt, Human
aucuaggauuugaaugcacagu

SEQ ID NO: 469385 - RNA, 22 nt, Human
ccagcccuccuccaucagagga

SEQ ID NO: 469386 - RNA, 22 nt, Human
ugagaggcagaauggugccugc

SEQ ID NO: 469387 - RNA, 22 nt, Human
uggguagagacacagucugggg

SEQ ID NO: 469388 - RNA, 22 nt, Human
aaggagcucccggcagaccagg

SEQ ID NO: 469389 - RNA, 22 nt, Human
acuugauuuugaaccuuucuac

SEQ ID NO: 469390 - RNA, 22 nt, Human
gcugagguaggagguugcagug

SEQ ID NO: 469391 - RNA, 22 nt, Human
augggcagcagcugccauucau

SEQ ID NO: 469392 - RNA, 19 nt, Human
aggagaaguagcagaaauu

SEQ ID NO: 469393 - RNA, 22 nt, Human
guguccagagaaacucacagcu

SEQ ID NO: 469394 - RNA, 22 nt, Human
ggacccugggcuugcuccuggg

SEQ ID NO: 469395 - RNA, 22 nt, Human
cccuggaggucagaggccuggg

SEQ ID NO: 469396 - RNA, 22 nt, Human
ucuuuccuagaggcugaugagu

SEQ ID NO: 469397 - RNA, 17 nt, Human
ggccuguguggcugcag

SEQ ID NO: 469398 - RNA, 21 nt, Human
gcuccuggugcugcguggcgc

SEQ ID NO: 469399 - RNA, 22 nt, Human
agcugcaguaaagcucuccagg

SEQ ID NO: 469400 - RNA, 22 nt, Human
uacacauguuuggcaaguaugu

SEQ ID NO: 469401 - RNA, 23 nt, Human
cuuuucauugccuuagcgcagag

SEQ ID NO: 469402 - RNA, 22 nt, Human
caggggcaggugugagaucauc

SEQ ID NO: 469403 - RNA, 22 nt, Human
agcaggaguuugaugcuuuuau

SEQ ID NO: 469404 - RNA, 22 nt, Human
ggcuuccuaauacucccuacac

SEQ ID NO: 469405 - RNA, 22 nt, Human
uuuccucuuauacaguguuuau

SEQ ID NO: 469406 - RNA, 22 nt, Human
gucucccacuuucuggccucuu

SEQ ID NO: 469407 - RNA, 22 nt, Human
agcagggccucuggcacugguc

SEQ ID NO: 469408 - RNA, 22 nt, Human
auauuucuccaaauguuuucaa

SEQ ID NO: 469409 - RNA, 22 nt, Human
gcaaagucugcaucuggaucag

SEQ ID NO: 469410 - RNA, 22 nt, Human
agaaauguauagugaauuuuuc

SEQ ID NO: 469411 - RNA, 22 nt, Human
aggggcuggaguucgagguuac

SEQ ID NO: 469412 - RNA, 22 nt, Human
ccacauuuuugauacucucacu

SEQ ID NO: 469413 - RNA, 22 nt, Human
ccagagagaaaauggagggcca

SEQ ID NO: 469414 - RNA, 22 nt, Human
agagugauggguugugcugacc

SEQ ID NO: 469415 - RNA, 22 nt, Human
ccagccugaaaugccucauccu

SEQ ID NO: 469416 - RNA, 22 nt, Human
ggggaccuuuccauuucugaga

SEQ ID NO: 469417 - RNA, 17 nt, Human
cugcuuugugcaacgcu

SEQ ID NO: 469418 - RNA, 21 nt, Human
ggagauggguaucgccugggc

SEQ ID NO: 469419 - RNA, 22 nt, Human
aaggaagacacagaugaaguga

SEQ ID NO: 469420 - RNA, 22 nt, Human
ucaaaugcugccuuugugugcc

SEQ ID NO: 469421 - RNA, 22 nt, Human
uucaggaucacuaaacccucca

SEQ ID NO: 469422 - RNA, 22 nt, Human
uggcagagguauauugggagga

SEQ ID NO: 469423 - RNA, 22 nt, Human
ucuccccaaaggacucacucuc

SEQ ID NO: 469424 - RNA, 22 nt, Human
ugucucagauacgccaucaagg

SEQ ID NO: 469425 - RNA, 22 nt, Human
caugaagcuugaagcaguccac

SEQ ID NO: 469426 - RNA, 22 nt, Human
cugggcagcuaccaccacugcu

SEQ ID NO: 469427 - RNA, 22 nt, Human
cacuggcaugugaggcgguggc

SEQ ID NO: 469428 - RNA, 22 nt, Human
ccagagaguaucauggagagua

SEQ ID NO: 469429 - RNA, 22 nt, Human
uggacaggugagugacucaggg

SEQ ID NO: 469430 - RNA, 18 nt, Human
gcugucugaggucugagg

SEQ ID NO: 469431 - RNA, 21 nt, Human
gccagagcaguacaaugaggu

SEQ ID NO: 469432 - RNA, 22 nt, Human
ugccaggcccagcuccagagcu

SEQ ID NO: 469433 - RNA, 22 nt, Human
cugaagccacgauagcuuccua

SEQ ID NO: 469434 - RNA, 22 nt, Human
cccucaggagaugucagcugga

SEQ ID NO: 469435 - RNA, 22 nt, Human
uaaggcacccgugagcugccag

SEQ ID NO: 469436 - RNA, 21 nt, Human
agcugcuccagggagcucagg

SEQ ID NO: 469437 - RNA, 22 nt, Human
auccuugaacuuagacacuagg

SEQ ID NO: 469438 - RNA, 22 nt, Human
aagccagguuccauggaggagc

SEQ ID NO: 469439 - RNA, 22 nt, Human
aauuuggcagugucuugaagua

SEQ ID NO: 469440 - RNA, 22 nt, Human
aaucaguuagaaggaagagaau

SEQ ID NO: 469441 - RNA, 22 nt, Human
acagugucaugucguguucccc

SEQ ID NO: 469442 - RNA, 22 nt, Human
aacagcuuugcuucuggagaca

SEQ ID NO: 469443 - RNA, 23 nt, Human
caugggagugagaaugccagcuc

SEQ ID NO: 469444 - RNA, 22 nt, Human
agggcuggcaagggauugaaau

SEQ ID NO: 469445 - RNA, 22 nt, Human
caggcagcagaggaguguggga

SEQ ID NO: 469446 - RNA, 22 nt, Human
auucauuugcuauuguguaugg

SEQ ID NO: 469447 - RNA, 22 nt, Human
aggcacugggggaugagcaagg

SEQ ID NO: 469448 - RNA, 22 nt, Human
gaggccuggaccagccacagag

SEQ ID NO: 469449 - RNA, 22 nt, Human
ugaagcagcaaaugaugggaga

SEQ ID NO: 469450 - RNA, 22 nt, Human
cagaguguaucuguguaagcau

SEQ ID NO: 469451 - RNA, 22 nt, Human
cugcuuugcauagcugccagag

SEQ ID NO: 469452 - RNA, 22 nt, Human
caccugggcuaaacuaugcagg

SEQ ID NO: 469453 - RNA, 18 nt, Human
ggcugccuguuccugaag

SEQ ID NO: 469454 - RNA, 22 nt, Human
ucucugucugagccuggcagac

SEQ ID NO: 469455 - RNA, 19 nt, Human
ccuggguccacucagacua

SEQ ID NO: 469456 - RNA, 22 nt, Human
cucuccuugcagauggcugccu

SEQ ID NO: 469457 - RNA, 22 nt, Human
ucccagcagagccagcaagccg

SEQ ID NO: 469458 - RNA, 22 nt, Human
aagagcugugggugguaguccu

SEQ ID NO: 469459 - RNA, 22 nt, Human
uccagggagagccgcugcucca

SEQ ID NO: 469460 - RNA, 22 nt, Human
acaggcuuuuuuagaaugacau

SEQ ID NO: 469461 - RNA, 22 nt, Human
gcuggccucgcaggcaggaugu

SEQ ID NO: 469462 - RNA, 18 nt, Human
ucaagacaucaugaaaua

SEQ ID NO: 469463 - RNA, 22 nt, Human
acucugggccccagguggagcu

SEQ ID NO: 469464 - RNA, 22 nt, Human
gcaggcaggcuuccuugaacug

SEQ ID NO: 469465 - RNA, 22 nt, Human
cagcacaauuuucaggagucca

SEQ ID NO: 469466 - RNA, 22 nt, Human
ucaaacuguuuacagugagaua

SEQ ID NO: 469467 - RNA, 22 nt, Human
aagcagccucauuugugguaag

SEQ ID NO: 469468 - RNA, 22 nt, Human
gcucacugcaaccucugcuucc

SEQ ID NO: 469469 - RNA, 22 nt, Human
agccuggagguaaugaggaaac

SEQ ID NO: 469470 - RNA, 21 nt, Human
augacagaugcugcagaucgu

SEQ ID NO: 469471 - RNA, 22 nt, Human
augaaggcuguguagauggaug

SEQ ID NO: 469472 - RNA, 22 nt, Human
gggacaggcugagacuugagcu

SEQ ID NO: 469473 - RNA, 22 nt, Human
ccagcuuuucuuaucauuauaa

SEQ ID NO: 469474 - RNA, 22 nt, Human
uuguaacacuuuucuauuaaua

SEQ ID NO: 469475 - RNA, 22 nt, Human
agccacaccuguccugccagcu

SEQ ID NO: 469476 - RNA, 22 nt, Human
cuaguggaaacuaacuggaauu

SEQ ID NO: 469477 - RNA, 22 nt, Human
acucagaggcagcugcucaccc

SEQ ID NO: 469478 - RNA, 22 nt, Human
agucucagcuacuugggaggcu

SEQ ID NO: 469479 - RNA, 22 nt, Human
gccugguguccagaggcgagug

SEQ ID NO: 469480 - RNA, 22 nt, Human
ugaggcucugcuucuguggcuc

SEQ ID NO: 469481 - RNA, 22 nt, Human
cagcauuggguuaccuuuguuu

SEQ ID NO: 469482 - RNA, 22 nt, Human
ucuggcuccugaguccaugcuc

SEQ ID NO: 469483 - RNA, 22 nt, Human
uguguacagcaggauuucucaa

SEQ ID NO: 469484 - RNA, 22 nt, Human
ggaggacaggggcugcagcaca

SEQ ID NO: 469485 - RNA, 22 nt, Human
gagaagcaaucaguggccaccc

SEQ ID NO: 469486 - RNA, 22 nt, Human
uggccuccccuaacagccucuu

SEQ ID NO: 469487 - RNA, 22 nt, Human
gggcagguguuuccaaggugag

SEQ ID NO: 469488 - RNA, 22 nt, Human
aacuucuugguccugagcuguu

SEQ ID NO: 469489 - RNA, 22 nt, Human
ccagccagccuugaucugagua

SEQ ID NO: 469490 - RNA, 22 nt, Human
uccuucaaagcuccuagugagc

SEQ ID NO: 469491 - RNA, 22 nt, Human
ggcugagcguggcugccguggg

SEQ ID NO: 469492 - RNA, 22 nt, Human
uuuagaaauugcagagugggug

SEQ ID NO: 469493 - RNA, 20 nt, Human
uggagcugugguaaggagca

SEQ ID NO: 469494 - RNA, 22 nt, Human
agaugcuucaguguuuaauuua

SEQ ID NO: 469495 - RNA, 23 nt, Human
ucucugaguuguacuuucccuug

SEQ ID NO: 469496 - RNA, 22 nt, Human
uuguaacagguacuaaauaacu

SEQ ID NO: 469497 - RNA, 22 nt, Human
gcagggcagagggagaaucucu

SEQ ID NO: 469498 - RNA, 22 nt, Human
cuauuagguuggugcaaaagua

SEQ ID NO: 469499 - RNA, 22 nt, Human
gcagggacaucuuugucuagua

SEQ ID NO: 469500 - RNA, 22 nt, Human
auaaagaggauguauuuacagc

SEQ ID NO: 469501 - RNA, 21 nt, Human
uuugaaagcuacaucuauagc

SEQ ID NO: 469502 - RNA, 22 nt, Human
cagaggaaguuccuugaugaga

SEQ ID NO: 469503 - RNA, 22 nt, Human
ggagcugcuccuucagccaagu

SEQ ID NO: 469504 - RNA, 22 nt, Human
ucugccugagcagagggaggcc

SEQ ID NO: 469505 - RNA, 22 nt, Human
cggcugagacggccauagacac

SEQ ID NO: 469506 - RNA, 22 nt, Human
acagcugugaagcaagcacucu

SEQ ID NO: 469507 - RNA, 22 nt, Human
auuucucaucaagugccaacuc

SEQ ID NO: 469508 - RNA, 22 nt, Human
ggagcagagcugggcuuggcug

SEQ ID NO: 469509 - RNA, 22 nt, Human
ggcagcugugaagugccucaca

SEQ ID NO: 469510 - RNA, 22 nt, Human
gcugucacaucaaggcacuaaa

SEQ ID NO: 469511 - RNA, 22 nt, Human
uaugcacauugguuuccucauu

SEQ ID NO: 469512 - RNA, 22 nt, Human
agcauccaacaggagggaaggg

SEQ ID NO: 469513 - RNA, 22 nt, Human
ucacgagaggcacagaauagag

SEQ ID NO: 469514 - RNA, 22 nt, Human
cugcagccucaaccuccugagc

SEQ ID NO: 469515 - RNA, 22 nt, Human
agcugaggcauggacaggcugc

SEQ ID NO: 469516 - RNA, 22 nt, Human
cuguagcagugugcucuuuuuc

SEQ ID NO: 469517 - RNA, 22 nt, Human
cuccucuuuacccgcauggucu

SEQ ID NO: 469518 - RNA, 22 nt, Human
augaugugugcugaucaagcuu

SEQ ID NO: 469519 - RNA, 22 nt, Human
aagcccaguuucacacugagac

SEQ ID NO: 469520 - RNA, 22 nt, Human
caagggcuucaaguggccaaga

SEQ ID NO: 469521 - RNA, 23 nt, Human
aaggccagaauuucaauggugcc

SEQ ID NO: 469522 - RNA, 22 nt, Human
uagggcagauucgguggaguuu

SEQ ID NO: 469523 - RNA, 22 nt, Human
acguuuucuagagaauaugcag

SEQ ID NO: 469524 - RNA, 22 nt, Human
agagauguucauucagcauguu

SEQ ID NO: 469525 - RNA, 22 nt, Human
gaggggcucuugggcaugaagg

SEQ ID NO: 469526 - RNA, 22 nt, Human
gaggagaagcuauuggaaggac

SEQ ID NO: 469527 - RNA, 22 nt, Human
cugcaggggcuggaguuggcuu

SEQ ID NO: 469528 - RNA, 22 nt, Human
gaauacaagccugccaccugga

SEQ ID NO: 469529 - RNA, 22 nt, Human
aucaggaucugggagccugaaa

SEQ ID NO: 469530 - RNA, 21 nt, Human
aucucacagcccagagaagcc

SEQ ID NO: 469531 - RNA, 19 nt, Human
ccauggcaaugaucugaug

SEQ ID NO: 469532 - RNA, 23 nt, Human
uccuggugacaugccugagcauc

SEQ ID NO: 469533 - RNA, 22 nt, Human
uacuguacauuccguuuguugc

SEQ ID NO: 469534 - RNA, 22 nt, Human
uuuguaaaggccugaauuucag

SEQ ID NO: 469535 - RNA, 21 nt, Human
uuuauguacuucauagaguag

SEQ ID NO: 469536 - RNA, 22 nt, Human
gcugccugauuuacauagugaa

SEQ ID NO: 469537 - RNA, 22 nt, Human
ggcugccugccuccaagccggg

SEQ ID NO: 469538 - RNA, 22 nt, Human
cugagcugacaucuuccucuuu

SEQ ID NO: 469539 - RNA, 22 nt, Human
gaaagaagcuuuagauggcuau

SEQ ID NO: 469540 - RNA, 22 nt, Human
uagcaggguccaaugugaggca

SEQ ID NO: 469541 - RNA, 22 nt, Human
agaggcagccguauuucaaagg

SEQ ID NO: 469542 - RNA, 19 nt, Human
ggcucucuuaaagcuguuu

SEQ ID NO: 469543 - RNA, 22 nt, Human
acucugccuuucagcagaugaa

SEQ ID NO: 469544 - RNA, 22 nt, Human
aaggcugccucugccagaggag

SEQ ID NO: 469545 - RNA, 22 nt, Human
cagggacccgcacagguagcau

SEQ ID NO: 469546 - RNA, 22 nt, Human
cugaggcuggggaagggaagug

SEQ ID NO: 469547 - RNA, 22 nt, Human
gggcuccagcccgggaccaggu

SEQ ID NO: 469548 - RNA, 22 nt, Human
uaguggaggguguagcugcugg

SEQ ID NO: 469549 - RNA, 22 nt, Human
aguguacauguuuacagcaucu

SEQ ID NO: 469550 - RNA, 21 nt, Human
guguuuccuguuuauggcuug

SEQ ID NO: 469551 - RNA, 22 nt, Human
agggcagcugugagccacugug

SEQ ID NO: 469552 - RNA, 22 nt, Human
guggcaggagagacacagccau

SEQ ID NO: 469553 - RNA, 22 nt, Human
ccggggacuuaaagugaaggaa

SEQ ID NO: 469554 - RNA, 22 nt, Human
augucacagucugacucaguga

SEQ ID NO: 469555 - RNA, 22 nt, Human
cugccgaguacagccauagaaa

SEQ ID NO: 469556 - RNA, 22 nt, Human
ggcuggcacucuguccaguguc

SEQ ID NO: 469557 - RNA, 17 nt, Human
ggugaguguccaggugg

SEQ ID NO: 469558 - RNA, 17 nt, Human
agaggcagauacuugga

SEQ ID NO: 469559 - RNA, 18 nt, Human
ccugccagucuggagcag

SEQ ID NO: 469560 - RNA, 22 nt, Human
cugaggcuuggaggggucuggu

SEQ ID NO: 469561 - RNA, 22 nt, Human
ugcagcaggcacaggacggaag

SEQ ID NO: 469562 - RNA, 22 nt, Human
gcagugaaaaagugcacccugu

SEQ ID NO: 469563 - RNA, 22 nt, Human
uccugcaggccuguucccagua

SEQ ID NO: 469564 - RNA, 22 nt, Human
auggcagagaaagcgagccaca

SEQ ID NO: 469565 - RNA, 22 nt, Human
agagaauuuuaaaagccuugaa

SEQ ID NO: 469566 - RNA, 22 nt, Human
caugcuccaaaaacaagagaau

SEQ ID NO: 469567 - RNA, 22 nt, Human
cagagcugggaucccaugggcg

SEQ ID NO: 469568 - RNA, 22 nt, Human
uuagcugcauuaucaaaguuau

SEQ ID NO: 469569 - RNA, 21 nt, Human
gccaccucgucucggagcagc

SEQ ID NO: 469570 - RNA, 20 nt, Human
agacccucuggacugggccc

SEQ ID NO: 469571 - RNA, 22 nt, Human
cagguggcuucucccuaggcca

SEQ ID NO: 469572 - RNA, 22 nt, Human
gggcuuggcacaugggcucagc

SEQ ID NO: 469573 - RNA, 22 nt, Human
gugguaaucggauucuuaccgg

SEQ ID NO: 469574 - RNA, 22 nt, Human
cuaguccagucucaaaaugcua

SEQ ID NO: 469575 - RNA, 22 nt, Human
ggcagccaugucccagggcuuc

SEQ ID NO: 469576 - RNA, 22 nt, Human
ucagaggagccaaaguucugag

SEQ ID NO: 469577 - RNA, 22 nt, Human
gccuucugugcuccuggccuuu

SEQ ID NO: 469578 - RNA, 21 nt, Human
ggugggcacaggagagcagag

SEQ ID NO: 469579 - RNA, 22 nt, Human
ccauuguaguaucuguuuuagu

SEQ ID NO: 469580 - RNA, 22 nt, Human
cagcccugccauggagccuccu

SEQ ID NO: 469581 - RNA, 22 nt, Human
gagauuuccauauuuuguaaca

SEQ ID NO: 469582 - RNA, 22 nt, Human
gggccuggggugacguaccccu

SEQ ID NO: 469583 - RNA, 22 nt, Human
ucugagggcuugaggggaagua

SEQ ID NO: 469584 - RNA, 22 nt, Human
ucugucacucccugaugaugaa

SEQ ID NO: 469585 - RNA, 22 nt, Human
cgcagagggcaggcagugcugg

SEQ ID NO: 469586 - RNA, 22 nt, Human
gcagcaaucuucacagugucau

SEQ ID NO: 469587 - RNA, 22 nt, Human
agccuccuguagcccucaccca

SEQ ID NO: 469588 - RNA, 22 nt, Human
ugcagauucaaaugaaaugcaa

SEQ ID NO: 469589 - RNA, 22 nt, Human
uuuaucuuuaggacuuugcaga

SEQ ID NO: 469590 - RNA, 22 nt, Human
uggagaugaauauguguaccug

SEQ ID NO: 469591 - RNA, 22 nt, Human
guacuucccugggaggcaagca

SEQ ID NO: 469592 - RNA, 22 nt, Human
uguguugugacauucuuggaug

SEQ ID NO: 469593 - RNA, 22 nt, Human
caugucuuauauccugucuuca

SEQ ID NO: 469594 - RNA, 22 nt, Human
cuggccuggcaggggaccucua

SEQ ID NO: 469595 - RNA, 22 nt, Human
ucccacacagcccgcucaccgg

SEQ ID NO: 469596 - RNA, 22 nt, Human
ugccugggguuggcaaacugcu

SEQ ID NO: 469597 - RNA, 22 nt, Human
ugaggugaccgcagaugggaag

SEQ ID NO: 469598 - RNA, 22 nt, Human
accacugggcgggcagccugcu

SEQ ID NO: 469599 - RNA, 22 nt, Human
gcagagugccgagauggaagcg

SEQ ID NO: 469600 - RNA, 22 nt, Human
gaggcugcggggaggagccugc

SEQ ID NO: 469601 - RNA, 22 nt, Human
uuagauaauguuauuguaauuu

SEQ ID NO: 469602 - RNA, 22 nt, Human
gcagagaggaaugaagccaucc

SEQ ID NO: 469603 - RNA, 22 nt, Human
gaggcuggaauauuagaaaugu

SEQ ID NO: 469604 - RNA, 22 nt, Human
cagugagggcauucagugcugg

SEQ ID NO: 469605 - RNA, 22 nt, Human
gaaggccauuagagccugugcc

SEQ ID NO: 469606 - RNA, 22 nt, Human
ccaaggaguagagcaggaagcu

SEQ ID NO: 469607 - RNA, 22 nt, Human
auugaaagauauacuguucuca

SEQ ID NO: 469608 - RNA, 22 nt, Human
gccuggccgcuccgagcuccgc

SEQ ID NO: 469609 - RNA, 22 nt, Human
aggcagccaguucagguuucuu

SEQ ID NO: 469610 - RNA, 22 nt, Human
aaaugcagauuuugaugcagca

SEQ ID NO: 469611 - RNA, 22 nt, Human
aaagaaaccuaucagccacaug

SEQ ID NO: 469612 - RNA, 22 nt, Human
cugcccagaagcuuagagcuua

SEQ ID NO: 469613 - RNA, 22 nt, Human
gagagcugggaaagccguggag

SEQ ID NO: 469614 - RNA, 20 nt, Human
ucugucucugagcuagacuu

SEQ ID NO: 469615 - RNA, 22 nt, Human
cugacucuccucaagcauaaau

SEQ ID NO: 469616 - RNA, 22 nt, Human
ugcauaaagugccauaguauua

SEQ ID NO: 469617 - RNA, 22 nt, Human
ccacugcccaccccgacgucua

SEQ ID NO: 469618 - RNA, 22 nt, Human
agaugcugccucuccucacaag

SEQ ID NO: 469619 - RNA, 22 nt, Human
auuuuuccaauuaggauaaaga

SEQ ID NO: 469620 - RNA, 22 nt, Human
gggagaaguggaaaucucauua

SEQ ID NO: 469621 - RNA, 22 nt, Human
ggcucaggccagaccacgacuc

SEQ ID NO: 469622 - RNA, 22 nt, Human
agugacagcugggaaggugaaa

SEQ ID NO: 469623 - RNA, 22 nt, Human
gccucugcaugcucagcaccca

SEQ ID NO: 469624 - RNA, 22 nt, Human
uuuccauauucugcgucugcca

SEQ ID NO: 469625 - RNA, 22 nt, Human
gcugccacauuuucaggacuaa

SEQ ID NO: 469626 - RNA, 22 nt, Human
cccugggacccgcugcagaggc

SEQ ID NO: 469627 - RNA, 22 nt, Human
uuauuagguuuacauaaagguu

SEQ ID NO: 469628 - RNA, 22 nt, Human
gcugggcagccccuacagagag

SEQ ID NO: 469629 - RNA, 22 nt, Human
auggggcucugcggcugcuccc

SEQ ID NO: 469630 - RNA, 22 nt, Human
uauugacaauaggcaacugagg

SEQ ID NO: 469631 - RNA, 22 nt, Human
agcaguggugugaggagggcuc

SEQ ID NO: 469632 - RNA, 19 nt, Human
agggagaauuccaagagga

SEQ ID NO: 469633 - RNA, 22 nt, Human
caggaagcugugaaggagacgg

SEQ ID NO: 469634 - RNA, 22 nt, Human
acagggccauuaucuguucuag

SEQ ID NO: 469635 - RNA, 22 nt, Human
cuccagaagacccauccucaug

SEQ ID NO: 469636 - RNA, 22 nt, Human
cuucuggggauggagcccagaa

SEQ ID NO: 469637 - RNA, 22 nt, Human
uaauaucuacuucauagaguuu

SEQ ID NO: 469638 - RNA, 22 nt, Human
augcugcacaagccacauguag

SEQ ID NO: 469639 - RNA, 17 nt, Human
gccuuccuuccuccaca

SEQ ID NO: 469640 - RNA, 23 nt, Human
agucagagagugugagacaacug

SEQ ID NO: 469641 - RNA, 22 nt, Human
augugucaauuuucaaaugcuu

SEQ ID NO: 469642 - RNA, 22 nt, Human
aucaguuuggugcuuucaguga

SEQ ID NO: 469643 - RNA, 19 nt, Human
agcauccagucaugggauc

SEQ ID NO: 469644 - RNA, 19 nt, Human
accucugcagagauguuua

SEQ ID NO: 469645 - RNA, 22 nt, Human
auugacaaucuacuauguucug

SEQ ID NO: 469646 - RNA, 22 nt, Human
cagaacauucacucauaugugg

SEQ ID NO: 469647 - RNA, 23 nt, Human
aucaaaguggaaaucaauuaucu

SEQ ID NO: 469648 - RNA, 22 nt, Human
augaggcauucacagaaggcac

SEQ ID NO: 469649 - RNA, 22 nt, Human
ccagcuuuuggggugacaauuu

SEQ ID NO: 469650 - RNA, 22 nt, Human
caauguguguguuuuucucaac

SEQ ID NO: 469651 - RNA, 22 nt, Human
ucccagauucuucugugugggc

SEQ ID NO: 469652 - RNA, 22 nt, Human
cagccucuuuccacaucaggca

SEQ ID NO: 469653 - RNA, 22 nt, Human
ccaggcucugcgcuggacaugg

SEQ ID NO: 469654 - RNA, 22 nt, Human
gaaaaugugucaucccuacugu

SEQ ID NO: 469655 - RNA, 22 nt, Human
ucuuuuaucuguuguguaacaa

SEQ ID NO: 469656 - RNA, 22 nt, Human
agggagccuuccuggcuguggu

SEQ ID NO: 469657 - RNA, 22 nt, Human
ugugccugaguuggcugaguac

SEQ ID NO: 469658 - RNA, 22 nt, Human
aaugaugggaaggagaaaagca

SEQ ID NO: 469659 - RNA, 22 nt, Human
aggaggccgauuucagaggucg

SEQ ID NO: 469660 - RNA, 22 nt, Human
gcaggagcccuggcauguucuu

SEQ ID NO: 469661 - RNA, 22 nt, Human
agagcugauuugauuacagugc

SEQ ID NO: 469662 - RNA, 22 nt, Human
aggcacuggucuaccccuuagu

SEQ ID NO: 469663 - RNA, 22 nt, Human
aggcugcaggucugggucaugu

SEQ ID NO: 469664 - RNA, 22 nt, Human
acagaagagcacauuuaguaug

SEQ ID NO: 469665 - RNA, 22 nt, Human
gaagccagccuugucugccucu

SEQ ID NO: 469666 - RNA, 22 nt, Human
aaccugcauguuucuaaaagca

SEQ ID NO: 469667 - RNA, 22 nt, Human
aucaggauucaccccagagcug

SEQ ID NO: 469668 - RNA, 22 nt, Human
cccaggagagaggccaguuggc

SEQ ID NO: 469669 - RNA, 23 nt, Human
cagugugacgaggugaggcaggc

SEQ ID NO: 469670 - RNA, 22 nt, Human
agaccauggccauccuaggaaa

SEQ ID NO: 469671 - RNA, 22 nt, Human
ugacuuccugcacucaggugau

SEQ ID NO: 469672 - RNA, 20 nt, Human
ucaggcaguggggaaaggca

SEQ ID NO: 469673 - RNA, 22 nt, Human
aggaaaaaccuguuaaugguag

SEQ ID NO: 469674 - RNA, 22 nt, Human
uagucuuuugagaaguauaucu

SEQ ID NO: 469675 - RNA, 22 nt, Human
gcagagugaggaagagcuucca

SEQ ID NO: 469676 - RNA, 22 nt, Human
uggaggaugagugugggcucug

SEQ ID NO: 469677 - RNA, 22 nt, Human
acuccugggugcugaccagcgu

SEQ ID NO: 469678 - RNA, 18 nt, Human
ugcucuguuuaaugauuu

SEQ ID NO: 469679 - RNA, 23 nt, Human
gaagcagaugucugaguaggcag

SEQ ID NO: 469680 - RNA, 22 nt, Human
ugcagcagcagggaggaggcuc

SEQ ID NO: 469681 - RNA, 16 nt, Human
gccuggaguggcaggg

SEQ ID NO: 469682 - RNA, 22 nt, Human
aaguucaaguguaaucuuuauu

SEQ ID NO: 469683 - RNA, 22 nt, Human
cugccuuggcccuaguucaugg

SEQ ID NO: 469684 - RNA, 22 nt, Human
agcagaaccacagcacuguuga

SEQ ID NO: 469685 - RNA, 22 nt, Human
aucuacaggauuuuacagaguu

SEQ ID NO: 469686 - RNA, 22 nt, Human
auacauauaugguacuuccugg

SEQ ID NO: 469687 - RNA, 22 nt, Human
ccacaggggucucuguagcuga

SEQ ID NO: 469688 - RNA, 22 nt, Human
agcuguggcagcagccguggca

SEQ ID NO: 469689 - RNA, 22 nt, Human
uugccuugauucuucucaugug

SEQ ID NO: 469690 - RNA, 22 nt, Human
agagacaggguuuugccauguu

SEQ ID NO: 469691 - RNA, 22 nt, Human
aaagccagagcaagcugucaca

SEQ ID NO: 469692 - RNA, 22 nt, Human
auggaagguccuacagagcgca

SEQ ID NO: 469693 - RNA, 22 nt, Human
agggccagaguacaucagggcu

SEQ ID NO: 469694 - RNA, 22 nt, Human
agagcaauggcauccagcugau

SEQ ID NO: 469695 - RNA, 22 nt, Human
aucuuaaucgaguccaugaaaa

SEQ ID NO: 469696 - RNA, 22 nt, Human
cuacauaaucuggauuugucug

SEQ ID NO: 469697 - RNA, 22 nt, Human
gaaggcugaugacagauucugc

SEQ ID NO: 469698 - RNA, 20 nt, Human
ccugucucacguuccgcccc

SEQ ID NO: 469699 - RNA, 19 nt, Human
aggucauugauagugcagg

SEQ ID NO: 469700 - RNA, 22 nt, Human
ugcaucuuacguuuugaaaggg

SEQ ID NO: 469701 - RNA, 22 nt, Human
ugggcagauguggcucuccuug

SEQ ID NO: 469702 - RNA, 18 nt, Human
agugugugcccuuucagg

SEQ ID NO: 469703 - RNA, 22 nt, Human
cugugucccaguaccuugggua

SEQ ID NO: 469704 - RNA, 22 nt, Human
aguggcagagccaagauaugau

SEQ ID NO: 469705 - RNA, 22 nt, Human
gaccauuuguugaaaagauuau

SEQ ID NO: 469706 - RNA, 22 nt, Human
gcucagagaaucagcagacacc

SEQ ID NO: 469707 - RNA, 22 nt, Human
gguuucaacuuuugugaggaau

SEQ ID NO: 469708 - RNA, 22 nt, Human
aguuuauguagaauuggcaaua

SEQ ID NO: 469709 - RNA, 22 nt, Human
acaguaaaaagccuuagaauuu

SEQ ID NO: 469710 - RNA, 22 nt, Human
agagcuggccagggaucacucu

SEQ ID NO: 469711 - RNA, 22 nt, Human
caggagugucuccacacagcaa

SEQ ID NO: 469712 - RNA, 22 nt, Human
gcaggaugggagcuucacucug

SEQ ID NO: 469713 - RNA, 20 nt, Human
agcugaggcaccugagguua

SEQ ID NO: 469714 - RNA, 22 nt, Human
cauuaggguaauugaacacuua

SEQ ID NO: 469715 - RNA, 22 nt, Human
cccaggaggcagagcuugcagu

SEQ ID NO: 469716 - RNA, 22 nt, Human
uuugcuauaaaagggucacacg

SEQ ID NO: 469717 - RNA, 23 nt, Human
gggaccugguaggaggugauugg

SEQ ID NO: 469718 - RNA, 22 nt, Human
gcacacacaugugaguacaugc

SEQ ID NO: 469719 - RNA, 22 nt, Human
cuggcagcagcuucuggaucga

SEQ ID NO: 469720 - RNA, 22 nt, Human
ugagcuuccucccugcauccau

SEQ ID NO: 469721 - RNA, 22 nt, Human
uacccagcccaugccuaccuca

SEQ ID NO: 469722 - RNA, 22 nt, Human
cuugaaagauuuggccucugug

SEQ ID NO: 469723 - RNA, 22 nt, Human
ugggcuggcccaccacaccucg

SEQ ID NO: 469724 - RNA, 18 nt, Human
cucucuggucuggauccc

SEQ ID NO: 469725 - RNA, 22 nt, Human
ccuccagcgcgauccacuccgg

SEQ ID NO: 469726 - RNA, 22 nt, Human
cccaggcacucuuggucauuuu

SEQ ID NO: 469727 - RNA, 22 nt, Human
acuuccugcagcuucucagccc

SEQ ID NO: 469728 - RNA, 19 nt, Human
gcacacccugcaccaccau

SEQ ID NO: 469729 - RNA, 23 nt, Human
cuggcucauccugguugcagugg

SEQ ID NO: 469730 - RNA, 22 nt, Human
ggcuguccuuggccaaggcacu

SEQ ID NO: 469731 - RNA, 20 nt, Human
acaaaugcauucugugacau

SEQ ID NO: 469732 - RNA, 22 nt, Human
ccuggugccacuagagaauguc

SEQ ID NO: 469733 - RNA, 23 nt, Human
ccuggcuggauucucugcauuca

SEQ ID NO: 469734 - RNA, 22 nt, Human
uguggcagaaccagaauucaaa

SEQ ID NO: 469735 - RNA, 19 nt, Human
ugagugggccccugcagac

SEQ ID NO: 469736 - RNA, 22 nt, Human
ccccagcucagugcagggacau

SEQ ID NO: 469737 - RNA, 22 nt, Human
acagagcaguucuggagcuggc

SEQ ID NO: 469738 - RNA, 22 nt, Human
ccagaggucuccugcacgggau

SEQ ID NO: 469739 - RNA, 20 nt, Human
gagccuuccccucaccacug

SEQ ID NO: 469740 - RNA, 22 nt, Human
auuucuuccucugucaguaacu

SEQ ID NO: 469741 - RNA, 22 nt, Human
ugcauaaacuucucugguguga

SEQ ID NO: 469742 - RNA, 22 nt, Human
ugucucugaacagcuuacuaaa

SEQ ID NO: 469743 - RNA, 23 nt, Human
gcagaggagcaagcuggacacca

SEQ ID NO: 469744 - RNA, 22 nt, Human
gcagcuuuggagguggaacucu

SEQ ID NO: 469745 - RNA, 22 nt, Human
cugucugucaccaaaacagacu

SEQ ID NO: 469746 - RNA, 22 nt, Human
gcugccugccuugccuggagga

SEQ ID NO: 469747 - RNA, 22 nt, Human
ugacuccaaacagaaaacgaau

SEQ ID NO: 469748 - RNA, 22 nt, Human
ucucacuggguauaaaugagua

SEQ ID NO: 469749 - RNA, 22 nt, Human
gcugaggcuccucgggaggaca

SEQ ID NO: 469750 - RNA, 22 nt, Human
gaggcagugaacaauuccugug

SEQ ID NO: 469751 - RNA, 22 nt, Human
uccagccacucagcagggauug

SEQ ID NO: 469752 - RNA, 22 nt, Human
aacucagucauaaagcgaaugc

SEQ ID NO: 469753 - RNA, 22 nt, Human
uuaauuuauguccaaaccagau

SEQ ID NO: 469754 - RNA, 22 nt, Human
uguaucaaaccaaauuaauucu

SEQ ID NO: 469755 - RNA, 22 nt, Human
uuauguacaauguuaauguaaa

SEQ ID NO: 469756 - RNA, 22 nt, Human
aggguccugggugcaguugcuu

SEQ ID NO: 469757 - RNA, 22 nt, Human
guggggaaaggaguggggcuca

SEQ ID NO: 469758 - RNA, 22 nt, Human
ugauacagucagcucacaauug

SEQ ID NO: 469759 - RNA, 23 nt, Human
ugaguucucaucuuggcuucuau

SEQ ID NO: 469760 - RNA, 22 nt, Human
auucacaaagaagggaaguaca

SEQ ID NO: 469761 - RNA, 22 nt, Human
gguggcagaggugcaucagccc

SEQ ID NO: 469762 - RNA, 22 nt, Human
caguagcaggcacucagcacgu

SEQ ID NO: 469763 - RNA, 22 nt, Human
gaggccacagcuaucagggaca

SEQ ID NO: 469764 - RNA, 22 nt, Human
gaggcaggcccugaaugaguca

SEQ ID NO: 469765 - RNA, 22 nt, Human
agagccaggacugugucucacu

SEQ ID NO: 469766 - RNA, 22 nt, Human
ggagaaagcuguaguggaaugu

SEQ ID NO: 469767 - RNA, 22 nt, Human
ucauggauggccgggaggugau

SEQ ID NO: 469768 - RNA, 22 nt, Human
gcccucagcuccuggacacaug

SEQ ID NO: 469769 - RNA, 22 nt, Human
ccuuccuggcuguccgccugau

SEQ ID NO: 469770 - RNA, 22 nt, Human
gccaggcaaauuaaggaaugca

SEQ ID NO: 469771 - RNA, 22 nt, Human
cauggacucugguuuggggagc

SEQ ID NO: 469772 - RNA, 22 nt, Human
aaggcacuuuucuaaagaccuu

SEQ ID NO: 469773 - RNA, 22 nt, Human
ggcagcuguggacgucgucauu

SEQ ID NO: 469774 - RNA, 22 nt, Human
uuucccaauugagagguucugu

SEQ ID NO: 469775 - RNA, 22 nt, Human
ucccagaguauuagcaauugcu

SEQ ID NO: 469776 - RNA, 22 nt, Human
agaaaugcucuuccugaccaga

SEQ ID NO: 469777 - RNA, 22 nt, Human
ugcauuauacuuuuagaaauuu

SEQ ID NO: 469778 - RNA, 22 nt, Human
uuuguaaauagcaguacucaug

SEQ ID NO: 469779 - RNA, 20 nt, Human
agugucuggugcagggccuc

SEQ ID NO: 469780 - RNA, 23 nt, Human
uggugccucagaagcagugggcu

SEQ ID NO: 469781 - RNA, 22 nt, Human
ugggccuccaauuccagcggga

SEQ ID NO: 469782 - RNA, 22 nt, Human
aagggcuggcccugggaagagu

SEQ ID NO: 469783 - RNA, 22 nt, Human
gucaggaugacaagugcuuuca

SEQ ID NO: 469784 - RNA, 22 nt, Human
ucucccacagccgugcuucaag

SEQ ID NO: 469785 - RNA, 22 nt, Human
uggcagagcccagacuccaguc

SEQ ID NO: 469786 - RNA, 22 nt, Human
ccaggccuggaccaugccaggg

SEQ ID NO: 469787 - RNA, 22 nt, Human
acagaauuaaugaaaauuacaa

SEQ ID NO: 469788 - RNA, 22 nt, Human
gcugggagcaaguacucaucuu

SEQ ID NO: 469789 - RNA, 22 nt, Human
guggaggagaggcgccuugcgg

SEQ ID NO: 469790 - RNA, 22 nt, Human
ucacagcaaaagugugcagagc

SEQ ID NO: 469791 - RNA, 23 nt, Human
ggguccagagacaggcaugggug

SEQ ID NO: 469792 - RNA, 22 nt, Human
acaaggcugaacagugaagccg

SEQ ID NO: 469793 - RNA, 22 nt, Human
ccagcagggcagugcccuggac

SEQ ID NO: 469794 - RNA, 22 nt, Human
uugagaagaauguguugaguuu

SEQ ID NO: 469795 - RNA, 22 nt, Human
accaucaguacuggaugcugac

SEQ ID NO: 469796 - RNA, 22 nt, Human
uugcauugcuuggucuucaaga

SEQ ID NO: 469797 - RNA, 22 nt, Human
uucugcaggagcccuaguguau

SEQ ID NO: 469798 - RNA, 22 nt, Human
auaauaacaccugaauaggaaa

SEQ ID NO: 469799 - RNA, 22 nt, Human
accugcagcuaaagauguaggg

SEQ ID NO: 469800 - RNA, 22 nt, Human
uagagcugggcagugcucugag

SEQ ID NO: 469801 - RNA, 22 nt, Human
cugcagccuccugggguacaug

SEQ ID NO: 469802 - RNA, 22 nt, Human
cuuguacauagagaagaagccu

SEQ ID NO: 469803 - RNA, 22 nt, Human
uagaggugucacuuugggaagu

SEQ ID NO: 469804 - RNA, 23 nt, Human
cagagcuggcucagagcugccug

SEQ ID NO: 469805 - RNA, 22 nt, Human
uccaguggagugugggggugaa

SEQ ID NO: 469806 - RNA, 22 nt, Human
aaauuugauaagccauuguuac

SEQ ID NO: 469807 - RNA, 23 nt, Human
acuuuauugaccccaggucaguu

SEQ ID NO: 469808 - RNA, 22 nt, Human
uacccaggggcugagcagaggu

SEQ ID NO: 469809 - RNA, 22 nt, Human
uacaaaaaauugauacugacga

SEQ ID NO: 469810 - RNA, 22 nt, Human
cccaggcagugugugcaugcgu

SEQ ID NO: 469811 - RNA, 21 nt, Human
ccuccaggagcagagcccuga

SEQ ID NO: 469812 - RNA, 21 nt, Human
gccaccccuggcacaggugcu

SEQ ID NO: 469813 - RNA, 22 nt, Human
uuauuugcccauguuuagcaga

SEQ ID NO: 469814 - RNA, 22 nt, Human
gcagaggacagggauuuagauu

SEQ ID NO: 469815 - RNA, 22 nt, Human
ugggugggagcacccugucugg

SEQ ID NO: 469816 - RNA, 22 nt, Human
ccaggagcauuaagagaacaua

SEQ ID NO: 469817 - RNA, 22 nt, Human
cauggccuugagugacugcacu

SEQ ID NO: 469818 - RNA, 22 nt, Human
acuaaagaagccaaaguuuucu

SEQ ID NO: 469819 - RNA, 22 nt, Human
aaaguggucaccuucucauuuc

SEQ ID NO: 469820 - RNA, 22 nt, Human
cugggguggugcaggccucaug

SEQ ID NO: 469821 - RNA, 22 nt, Human
aggagugcaaauaguccagaga

SEQ ID NO: 469822 - RNA, 22 nt, Human
acagcagcgucaacuuaaaauu

SEQ ID NO: 469823 - RNA, 22 nt, Human
caguggagugggacuggucuga

SEQ ID NO: 469824 - RNA, 22 nt, Human
ccugcugugaaacuggcauaug

SEQ ID NO: 469825 - RNA, 22 nt, Human
acaaagcuagagaagagaauug

SEQ ID NO: 469826 - RNA, 22 nt, Human
cagagggcucggcggccgcucc

SEQ ID NO: 469827 - RNA, 22 nt, Human
acaggcuuacaggcugcaagua

SEQ ID NO: 469828 - RNA, 22 nt, Human
uggaggaugccuggggaggccu

SEQ ID NO: 469829 - RNA, 22 nt, Human
aggcgcagacauacagggucug

SEQ ID NO: 469830 - RNA, 22 nt, Human
aaaaaguuucaacugccaacuc

SEQ ID NO: 469831 - RNA, 22 nt, Human
agcagugagugggaggaccaug

SEQ ID NO: 469832 - RNA, 22 nt, Human
agggcugcuuugcuaaauaugg

SEQ ID NO: 469833 - RNA, 22 nt, Human
cugagagaugauauagcuuaau

SEQ ID NO: 469834 - RNA, 22 nt, Human
uuacugaaaauucuucaggauu

SEQ ID NO: 469835 - RNA, 23 nt, Human
aggcugagcucucccagcuucag

SEQ ID NO: 469836 - RNA, 22 nt, Human
ucucaaacuaacaaugauuaua

SEQ ID NO: 469837 - RNA, 22 nt, Human
agacucaagacugcagaagacg

SEQ ID NO: 469838 - RNA, 22 nt, Human
gugaccaucagagaauaacaaa

SEQ ID NO: 469839 - RNA, 22 nt, Human
accagagcgcucaagccuuccc

SEQ ID NO: 469840 - RNA, 22 nt, Human
uaggcucagggcugggugacgg

SEQ ID NO: 469841 - RNA, 22 nt, Human
gugggggcaggcagugcuagga

SEQ ID NO: 469842 - RNA, 22 nt, Human
gaggccagaagucugagaucag

SEQ ID NO: 469843 - RNA, 22 nt, Human
acagagcugggaucugaaccca

SEQ ID NO: 469844 - RNA, 22 nt, Human
ucaaucacguguuccauguucu

SEQ ID NO: 469845 - RNA, 22 nt, Human
auucuaggcuugaaacaugaag

SEQ ID NO: 469846 - RNA, 22 nt, Human
uauuuucuggacagucuugcuu

SEQ ID NO: 469847 - RNA, 22 nt, Human
aggccuguuggcgugggcucua

SEQ ID NO: 469848 - RNA, 22 nt, Human
caggcacuagcagaaugaggcu

SEQ ID NO: 469849 - RNA, 22 nt, Human
gaguccaguuagugaggcuggg

SEQ ID NO: 469850 - RNA, 22 nt, Human
agggaggaucugcuccuugucu

SEQ ID NO: 469851 - RNA, 22 nt, Human
uccuguggagaggacuggaggu

SEQ ID NO: 469852 - RNA, 22 nt, Human
caugggagguuggcuuggcaug

SEQ ID NO: 469853 - RNA, 22 nt, Human
ugccuggaugugcuggccucac

SEQ ID NO: 469854 - RNA, 22 nt, Human
gcuucuaucccuccacugcacu

SEQ ID NO: 469855 - RNA, 22 nt, Human
cagcagguauguuuguucagca

SEQ ID NO: 469856 - RNA, 22 nt, Human
ggcccacacugacagcugagcu

SEQ ID NO: 469857 - RNA, 22 nt, Human
cacaggccugucucuuucuaac

SEQ ID NO: 469858 - RNA, 22 nt, Human
aggaaccagagguugagcaacu

SEQ ID NO: 469859 - RNA, 22 nt, Human
cagaggcauuacugaaaaggug

SEQ ID NO: 469860 - RNA, 22 nt, Human
agcagcaggcuguguggacuga

SEQ ID NO: 469861 - RNA, 22 nt, Human
uuuuauuaguggcuagaugggg

SEQ ID NO: 469862 - RNA, 22 nt, Human
cacauacaaugguguuauuugg

SEQ ID NO: 469863 - RNA, 22 nt, Human
aaaguucagauuagacucaaga

SEQ ID NO: 469864 - RNA, 22 nt, Human
ggguguccugugccaagcuggg

SEQ ID NO: 469865 - RNA, 22 nt, Human
cagaggaagcagacacaucuug

SEQ ID NO: 469866 - RNA, 22 nt, Human
gggcugagagugacuguucugu

SEQ ID NO: 469867 - RNA, 22 nt, Human
ggcuggcaagugucugcucaug

SEQ ID NO: 469868 - RNA, 21 nt, Human
aggugggagaccauguagguc

SEQ ID NO: 469869 - RNA, 20 nt, Human
cccucugcuacacugggagc

SEQ ID NO: 469870 - RNA, 22 nt, Human
ucacauuuuaucugagauugac

SEQ ID NO: 469871 - RNA, 22 nt, Human
gaggcacaauacaugucucaag

SEQ ID NO: 469872 - RNA, 22 nt, Human
uccagaggcuccaaagggagau

SEQ ID NO: 469873 - RNA, 22 nt, Human
aggcucagaggugagcaucugc

SEQ ID NO: 469874 - RNA, 22 nt, Human
ugggcucugugccagguuggug

SEQ ID NO: 469875 - RNA, 22 nt, Human
guauuuucaagagcaguaguau

SEQ ID NO: 469876 - RNA, 22 nt, Human
guguaauuauauaaagaucuac

SEQ ID NO: 469877 - RNA, 22 nt, Human
agggcccuuacgcaggcccuuc

SEQ ID NO: 469878 - RNA, 20 nt, Human
ccuccaggcacacccaugug

SEQ ID NO: 469879 - RNA, 22 nt, Human
cagagcugauuggauccagaga

SEQ ID NO: 469880 - RNA, 22 nt, Human
gagccauacaaccuauaaagug

SEQ ID NO: 469881 - RNA, 22 nt, Human
uacauaauuaaucuuuaaguuc

SEQ ID NO: 469882 - RNA, 22 nt, Human
uuuccucuucgauuaaguuugg

SEQ ID NO: 469883 - RNA, 22 nt, Human
agagcccuuucuccaggcaccu

SEQ ID NO: 469884 - RNA, 22 nt, Human
ucagccacuacccaccuuaaca

SEQ ID NO: 469885 - RNA, 22 nt, Human
guggccagcaagugcugccucu

SEQ ID NO: 469886 - RNA, 22 nt, Human
gcugcuccgucugagcucuggu

SEQ ID NO: 469887 - RNA, 22 nt, Human
aauuugcaugaugagaacaaua

SEQ ID NO: 469888 - RNA, 22 nt, Human
acauguguggacaugaaucuac

SEQ ID NO: 469889 - RNA, 22 nt, Human
cacccaggcuagagugcagugg

SEQ ID NO: 469890 - RNA, 22 nt, Human
ugcagggcagauaugacuguag

SEQ ID NO: 469891 - RNA, 22 nt, Human
acuguguccuauuuccuugaca

SEQ ID NO: 469892 - RNA, 22 nt, Human
gugcauuggugcgccacuucac

SEQ ID NO: 469893 - RNA, 22 nt, Human
aagggacuuugucagcuuucca

SEQ ID NO: 469894 - RNA, 22 nt, Human
agagugaucagauaucaggugu

SEQ ID NO: 469895 - RNA, 21 nt, Human
aucagcaaaugccugucuccc

SEQ ID NO: 469896 - RNA, 22 nt, Human
uauguuuuucaagugcacacua

SEQ ID NO: 469897 - RNA, 22 nt, Human
ugagaagcagcuuacagguguc

SEQ ID NO: 469898 - RNA, 22 nt, Human
ggagcuguaacgagccauugcu

SEQ ID NO: 469899 - RNA, 19 nt, Human
guuuuucccagacgaggca

SEQ ID NO: 469900 - RNA, 22 nt, Human
cucuggaaaaccacuagcagga

SEQ ID NO: 469901 - RNA, 22 nt, Human
uccuggcccacuaugccagcau

SEQ ID NO: 469902 - RNA, 21 nt, Human
ucucuacacuuucacuaggcu

SEQ ID NO: 469903 - RNA, 22 nt, Human
cucuuaaagaauguuccagcug

SEQ ID NO: 469904 - RNA, 22 nt, Human
uggcuuccuggacagaugcggu

SEQ ID NO: 469905 - RNA, 22 nt, Human
ccugccugcguccucugagggc

SEQ ID NO: 469906 - RNA, 22 nt, Human
ucagagcuuuggagaccaggaa

SEQ ID NO: 469907 - RNA, 22 nt, Human
uuagagaaauucugguaaugua

SEQ ID NO: 469908 - RNA, 22 nt, Human
aagugaaacauguaucucuuua

SEQ ID NO: 469909 - RNA, 23 nt, Human
ugucccagagggagggauaggcu

SEQ ID NO: 469910 - RNA, 22 nt, Human
uuccauuguuucugucuucacu

SEQ ID NO: 469911 - RNA, 22 nt, Human
agcuuuauauguuguuucucca

SEQ ID NO: 469912 - RNA, 22 nt, Human
uagacagauuuaaaggaaugga

SEQ ID NO: 469913 - RNA, 22 nt, Human
ugcaaucucggcacuuugggag

SEQ ID NO: 469914 - RNA, 22 nt, Human
cugcugggaaggucugcucagu

SEQ ID NO: 469915 - RNA, 22 nt, Human
ugaggcucuccaagcagaugag

SEQ ID NO: 469916 - RNA, 22 nt, Human
ccacuggcauccagcugccauc

SEQ ID NO: 469917 - RNA, 22 nt, Human
aucaguuucacuugcuugcaaa

SEQ ID NO: 469918 - RNA, 22 nt, Human
uuuuucauugcagccucucucc

SEQ ID NO: 469919 - RNA, 22 nt, Human
ccucagggacuccaugcugcag

SEQ ID NO: 469920 - RNA, 22 nt, Human
acagguggggaggcugagguuc

SEQ ID NO: 469921 - RNA, 18 nt, Human
uuuuacucauagcaggcc

SEQ ID NO: 469922 - RNA, 22 nt, Human
ccugaagaugcuguggccuggu

SEQ ID NO: 469923 - RNA, 22 nt, Human
caagggaccugagauggucucu

SEQ ID NO: 469924 - RNA, 22 nt, Human
gcucccagguucuugggccuug

SEQ ID NO: 469925 - RNA, 22 nt, Human
uuuuugcaccaaccuaauagaa

SEQ ID NO: 469926 - RNA, 22 nt, Human
agucccagcuucccccaugcag

SEQ ID NO: 469927 - RNA, 22 nt, Human
ugcagggcccucauuccugucc

SEQ ID NO: 469928 - RNA, 22 nt, Human
cuucaagauauuucuagaauca

SEQ ID NO: 469929 - RNA, 20 nt, Human
agcccaggccugugugaguc

SEQ ID NO: 469930 - RNA, 22 nt, Human
aaugcacagcuaaagugguucc

SEQ ID NO: 469931 - RNA, 22 nt, Human
aacauacagugagcaguggacu

SEQ ID NO: 469932 - RNA, 22 nt, Human
gggcagguguugucaaucuaau

SEQ ID NO: 469933 - RNA, 22 nt, Human
gcagggcagcuuagucccuguc

SEQ ID NO: 469934 - RNA, 17 nt, Human
auccccagcaucuagaa

SEQ ID NO: 469935 - RNA, 22 nt, Human
aggaaaaucgagucuggaggca

SEQ ID NO: 469936 - RNA, 22 nt, Human
uuagaaaugauuucaccucuuu

SEQ ID NO: 469937 - RNA, 22 nt, Human
ggugcucaagagggcauccucu

SEQ ID NO: 469938 - RNA, 22 nt, Human
cucagcuggcaauucuggcucc

SEQ ID NO: 469939 - RNA, 22 nt, Human
gcagggacaaggcagguguucu

SEQ ID NO: 469940 - RNA, 22 nt, Human
agcagcauuuaaguuucuucua

SEQ ID NO: 469941 - RNA, 19 nt, Human
ccuuccuccccagggccau

SEQ ID NO: 469942 - RNA, 22 nt, Human
uccugcagaucaaagccuuuga

SEQ ID NO: 469943 - RNA, 22 nt, Human
aggcuuccucgugccuuagaua

SEQ ID NO: 469944 - RNA, 22 nt, Human
gccaggcauguccucugcagaa

SEQ ID NO: 469945 - RNA, 22 nt, Human
uauguguacaucugguugagca

SEQ ID NO: 469946 - RNA, 22 nt, Human
uuucaaauagaaucuuuccaaa

SEQ ID NO: 469947 - RNA, 22 nt, Human
uauuucuguaugcauaaaagga

SEQ ID NO: 469948 - RNA, 19 nt, Human
agggccaggauucuggaac

SEQ ID NO: 469949 - RNA, 22 nt, Human
uugcucaggcuuagagcuacua

SEQ ID NO: 469950 - RNA, 22 nt, Human
agcagacaacccagaugaccca

SEQ ID NO: 469951 - RNA, 22 nt, Human
uugaggaguguuuagggugagg

SEQ ID NO: 469952 - RNA, 22 nt, Human
cuggccacaugugugcugagca

SEQ ID NO: 469953 - RNA, 22 nt, Human
acaguggaagcaugaugcuauc

SEQ ID NO: 469954 - RNA, 22 nt, Human
auuagagguacaaaccuucacu

SEQ ID NO: 469955 - RNA, 19 nt, Human
agcaccugugagagccugg

SEQ ID NO: 469956 - RNA, 22 nt, Human
uccuucagugucccgcucaggu

SEQ ID NO: 469957 - RNA, 22 nt, Human
acacacagguaaaggagccugg

SEQ ID NO: 469958 - RNA, 22 nt, Human
uaauaaaugaaagugcuggcau

SEQ ID NO: 469959 - RNA, 22 nt, Human
ucaaguguaguggugucagguc

SEQ ID NO: 469960 - RNA, 22 nt, Human
auguaacaggugaagcucugag

SEQ ID NO: 469961 - RNA, 22 nt, Human
cauggcagaaaccugagcugcu

SEQ ID NO: 469962 - RNA, 22 nt, Human
cuggugcuggagccuagucccu

SEQ ID NO: 469963 - RNA, 22 nt, Human
gcugagggcauguguggcgacu

SEQ ID NO: 469964 - RNA, 22 nt, Human
ggaagccagagugcugggcagg

SEQ ID NO: 469965 - RNA, 22 nt, Human
acauuucucaucuaguagagua

SEQ ID NO: 469966 - RNA, 22 nt, Human
ugcacacaaaugugaacgugcc

SEQ ID NO: 469967 - RNA, 22 nt, Human
augugugccccuuuuacucuuu

SEQ ID NO: 469968 - RNA, 22 nt, Human
ucagaggaaaggucagauggcu

SEQ ID NO: 469969 - RNA, 17 nt, Human
aaggccauuuccaccca

SEQ ID NO: 469970 - RNA, 22 nt, Human
uccauuuucuaaguaucacuua

SEQ ID NO: 469971 - RNA, 22 nt, Human
ccuguacacaauuccgaggaua

SEQ ID NO: 469972 - RNA, 22 nt, Human
uuuguucaugccuauauucuca

SEQ ID NO: 469973 - RNA, 22 nt, Human
ggcucaggcuggagugcagugg

SEQ ID NO: 469974 - RNA, 22 nt, Human
ggaagagagggcugggccucaa

SEQ ID NO: 469975 - RNA, 22 nt, Human
gacccuguuucuacaaauaauu

SEQ ID NO: 469976 - RNA, 22 nt, Human
ugccucuguggaaauggugguc

SEQ ID NO: 469977 - RNA, 22 nt, Human
gcucccacgcaauucuuuucag

SEQ ID NO: 469978 - RNA, 22 nt, Human
cauuucuguacauguuuuggug

SEQ ID NO: 469979 - RNA, 22 nt, Human
gcugucugggaggccuccacuu

SEQ ID NO: 469980 - RNA, 22 nt, Human
uggcagguuuccuccucauagu

SEQ ID NO: 469981 - RNA, 22 nt, Human
cagucccagaagagccugggag

SEQ ID NO: 469982 - RNA, 22 nt, Human
agacuucuuugugagcauuuuc

SEQ ID NO: 469983 - RNA, 20 nt, Human
uaacagaaguagaagugggu

SEQ ID NO: 469984 - RNA, 22 nt, Human
gguccuggaaauugacggaaag

SEQ ID NO: 469985 - RNA, 22 nt, Human
uauugacagagggucagaagag

SEQ ID NO: 469986 - RNA, 22 nt, Human
cuuucauuugauaagaaugcca

SEQ ID NO: 469987 - RNA, 22 nt, Human
uugaagcacaaugucuuuuauc

SEQ ID NO: 469988 - RNA, 22 nt, Human
acaaggaggucuggggggcccu

SEQ ID NO: 469989 - RNA, 22 nt, Human
caguacuuuucaaccaguauga

SEQ ID NO: 469990 - RNA, 22 nt, Human
aaggcugagggcuguaccuggc

SEQ ID NO: 469991 - RNA, 22 nt, Human
auuguacuuuuauuacauguag

SEQ ID NO: 469992 - RNA, 22 nt, Human
gcuggaggaucacuugagccca

SEQ ID NO: 469993 - RNA, 22 nt, Human
ucucugggauaaacugggccag

SEQ ID NO: 469994 - RNA, 22 nt, Human
ggcuucucgugccgaagcaaga

SEQ ID NO: 469995 - RNA, 21 nt, Human
ggcagaaguagcauggacggg

SEQ ID NO: 469996 - RNA, 22 nt, Human
ucccaagugucuuggaccaggg

SEQ ID NO: 469997 - RNA, 22 nt, Human
agccaaggcagcuagagcucug

SEQ ID NO: 469998 - RNA, 22 nt, Human
uuggcugagagaggaaaagggc

SEQ ID NO: 469999 - RNA, 22 nt, Human
ucuggcucauaggaaggccauu

SEQ ID NO: 470000 - RNA, 22 nt, Human
caguuuauagcucuagcagcuu

SEQ ID NO: 470001 - RNA, 22 nt, Human
ggaggcuccacugcucuuccug

SEQ ID NO: 470002 - RNA, 22 nt, Human
uaaaucucacuggguauauugg

SEQ ID NO: 470003 - RNA, 22 nt, Human
uucuaccagcuacucacugaua

SEQ ID NO: 470004 - RNA, 22 nt, Human
aggcccaguuauccuacuuguu

SEQ ID NO: 470005 - RNA, 22 nt, Human
acaggcuucucacagaaaaggg

SEQ ID NO: 470006 - RNA, 22 nt, Human
agagggcuuugauucucaguuc

SEQ ID NO: 470007 - RNA, 21 nt, Human
ggccucugccuugccccacuc

SEQ ID NO: 470008 - RNA, 22 nt, Human
ugaaauguuugaagaccacuga

SEQ ID NO: 470009 - RNA, 22 nt, Human
uggggcugaggagccucacucu

SEQ ID NO: 470010 - RNA, 20 nt, Human
cuguaucagguuacaaagua

SEQ ID NO: 470011 - RNA, 22 nt, Human
cagggcaguuugugccuaugag

SEQ ID NO: 470012 - RNA, 22 nt, Human
aggcacugguccauuuucugca

SEQ ID NO: 470013 - RNA, 22 nt, Human
agccaaggagugcagguggcuu

SEQ ID NO: 470014 - RNA, 22 nt, Human
aggcagccuauggggagcucag

SEQ ID NO: 470015 - RNA, 18 nt, Human
uggacaggguggagaaaa

SEQ ID NO: 470016 - RNA, 22 nt, Human
gcagcagcccagggcucucaga

SEQ ID NO: 470017 - RNA, 22 nt, Human
acaggugggcuuaagagucggc

SEQ ID NO: 470018 - RNA, 22 nt, Human
ccaggaggcggaagguacagug

SEQ ID NO: 470019 - RNA, 22 nt, Human
uccagcuggggacaugggcuuc

SEQ ID NO: 470020 - RNA, 22 nt, Human
ccagaggugcugggagaggucu

SEQ ID NO: 470021 - RNA, 22 nt, Human
aaaugcuugcucuugauuauuu

SEQ ID NO: 470022 - RNA, 22 nt, Human
ugcugcucuucaccauggccuc

SEQ ID NO: 470023 - RNA, 22 nt, Human
uaacagaaauaguaggugaggg

SEQ ID NO: 470024 - RNA, 22 nt, Human
ucagaaaugaucguuauucauu

SEQ ID NO: 470025 - RNA, 22 nt, Human
gggacaggccccucgcuagcuu

SEQ ID NO: 470026 - RNA, 22 nt, Human
gauuucaauccagcuuucuucu

SEQ ID NO: 470027 - RNA, 22 nt, Human
agggcagaaaccaccuugaugg

SEQ ID NO: 470028 - RNA, 20 nt, Human
gcugcucuccacggucugca

SEQ ID NO: 470029 - RNA, 22 nt, Human
ugaaggccacuuccugugagcu

SEQ ID NO: 470030 - RNA, 22 nt, Human
cagcccaggccgacaguuccuc

SEQ ID NO: 470031 - RNA, 22 nt, Human
gaucauuugcaggaaacauuaa

SEQ ID NO: 470032 - RNA, 22 nt, Human
uucaggauuguguuuuuccuga

SEQ ID NO: 470033 - RNA, 22 nt, Human
gcagggacgccagggacagcaa

SEQ ID NO: 470034 - RNA, 22 nt, Human
uuccaugugaguacacugugau

SEQ ID NO: 470035 - RNA, 22 nt, Human
gcagaacauuucacaguaucuu

SEQ ID NO: 470036 - RNA, 22 nt, Human
gggaggagugaagauucaccug

SEQ ID NO: 470037 - RNA, 22 nt, Human
gcugagagcggccagcugggaa

SEQ ID NO: 470038 - RNA, 22 nt, Human
cuacauuaaauuggcuuacuua

SEQ ID NO: 470039 - RNA, 22 nt, Human
agaggccaggcugcagagggau

SEQ ID NO: 470040 - RNA, 22 nt, Human
aguuucuauuuucaugucuguu

SEQ ID NO: 470041 - RNA, 22 nt, Human
ugauugaagaggugaggaaguu

SEQ ID NO: 470042 - RNA, 19 nt, Human
uguguaaagucugugguca

SEQ ID NO: 470043 - RNA, 22 nt, Human
ugacacauuaaaugcucacaaa

SEQ ID NO: 470044 - RNA, 22 nt, Human
ucacugcagagaccucuaguca

SEQ ID NO: 470045 - RNA, 22 nt, Human
gguguccucaugauuuucuaga

SEQ ID NO: 470046 - RNA, 22 nt, Human
uccagggguaccggccaggcag

SEQ ID NO: 470047 - RNA, 22 nt, Human
uccaggcaaaaggaacugcuug

SEQ ID NO: 470048 - RNA, 20 nt, Human
gcaaauggaucccacaagcc

SEQ ID NO: 470049 - RNA, 22 nt, Human
cccaggcucccaggugggacaa

SEQ ID NO: 470050 - RNA, 21 nt, Human
gccugcagaccccaccaggcu

SEQ ID NO: 470051 - RNA, 22 nt, Human
ugcuuaauauugugauguaaua

SEQ ID NO: 470052 - RNA, 22 nt, Human
ucucucagucagaugcuaaaga

SEQ ID NO: 470053 - RNA, 22 nt, Human
aggcacaggccucagcacccag

SEQ ID NO: 470054 - RNA, 22 nt, Human
gggggcucugacucccucagcu

SEQ ID NO: 470055 - RNA, 23 nt, Human
cagcuuucagggcuuuagggaag

SEQ ID NO: 470056 - RNA, 22 nt, Human
acagaacuuccugcuggagugg

SEQ ID NO: 470057 - RNA, 22 nt, Human
acauuucugucuuagggacugu

SEQ ID NO: 470058 - RNA, 22 nt, Human
gggcucugguacuuccuggcuc

SEQ ID NO: 470059 - RNA, 22 nt, Human
acagggcagagugaaaugcuau

SEQ ID NO: 470060 - RNA, 22 nt, Human
aggcaguggcugagaccagggg

SEQ ID NO: 470061 - RNA, 22 nt, Human
gcugucacucaccaggccugca

SEQ ID NO: 470062 - RNA, 22 nt, Human
accagcuguguccuggcugcag

SEQ ID NO: 470063 - RNA, 22 nt, Human
gagagcugucagcguagcaccg

SEQ ID NO: 470064 - RNA, 19 nt, Human
uuugaaaggauuguuauuu

SEQ ID NO: 470065 - RNA, 22 nt, Human
uccugccuuagagcaaggaaaa

SEQ ID NO: 470066 - RNA, 22 nt, Human
aaggcuuuaugugaccaaaaga

SEQ ID NO: 470067 - RNA, 22 nt, Human
uuagggaaggcugcugucagcu

SEQ ID NO: 470068 - RNA, 22 nt, Human
uguuuauaccuugguauaacca

SEQ ID NO: 470069 - RNA, 22 nt, Human
cacauccuucagcugagcccag

SEQ ID NO: 470070 - RNA, 22 nt, Human
ccacagggcucuaggcgcuucc

SEQ ID NO: 470071 - RNA, 22 nt, Human
acuuccugcuaugagcuucugu

SEQ ID NO: 470072 - RNA, 20 nt, Human
aucuggcucagauccugcag

SEQ ID NO: 470073 - RNA, 22 nt, Human
gugcuuucugcaugguuccuac

SEQ ID NO: 470074 - RNA, 22 nt, Human
uggccugggccggcagauauac

SEQ ID NO: 470075 - RNA, 22 nt, Human
acauuucugcuagaauagguga

SEQ ID NO: 470076 - RNA, 22 nt, Human
caguuucucucauacauauuug

SEQ ID NO: 470077 - RNA, 22 nt, Human
ccacccugagccgcaagagcag

SEQ ID NO: 470078 - RNA, 22 nt, Human
aagauggagcacgagcagaagc

SEQ ID NO: 470079 - RNA, 22 nt, Human
gaaauccaguucccuacucuua

SEQ ID NO: 470080 - RNA, 22 nt, Human
gggcugcugccaaucacagccu

SEQ ID NO: 470081 - RNA, 22 nt, Human
ucucaccaaagccuugaccaua

SEQ ID NO: 470082 - RNA, 22 nt, Human
aacaugaagguaggaugguuuu

SEQ ID NO: 470083 - RNA, 22 nt, Human
cuguuauuucugccaggugagu

SEQ ID NO: 470084 - RNA, 19 nt, Human
gggcucuggccucaguggg

SEQ ID NO: 470085 - RNA, 20 nt, Human
gaaggaagggggcaagguga

SEQ ID NO: 470086 - RNA, 22 nt, Human
aaugaugguauugaugagcuaa

SEQ ID NO: 470087 - RNA, 22 nt, Human
ucagcaaugugauacugugcaa

SEQ ID NO: 470088 - RNA, 22 nt, Human
uagccgggugugguggaacucc

SEQ ID NO: 470089 - RNA, 18 nt, Human
agcagcugugccacacug

SEQ ID NO: 470090 - RNA, 20 nt, Human
gacauucauaguuauuacca

SEQ ID NO: 470091 - RNA, 22 nt, Human
gauaccagacagggagggagaa

SEQ ID NO: 470092 - RNA, 22 nt, Human
aaggccaacuaggaugagcuag

SEQ ID NO: 470093 - RNA, 22 nt, Human
uccagcucuaacaugcugggcc

SEQ ID NO: 470094 - RNA, 22 nt, Human
agggagcuuccgaacuacagcu

SEQ ID NO: 470095 - RNA, 22 nt, Human
acuuugcagagccagaagagaa

SEQ ID NO: 470096 - RNA, 22 nt, Human
cagucccagcugcucagaaggc

SEQ ID NO: 470097 - RNA, 22 nt, Human
uucaggauaugugauaucugaa

SEQ ID NO: 470098 - RNA, 22 nt, Human
ucuguuccauguuuuguuccau

SEQ ID NO: 470099 - RNA, 22 nt, Human
uguaaguaguaauggaaggaca

SEQ ID NO: 470100 - RNA, 22 nt, Human
uccugcagcugaagcucaugug

SEQ ID NO: 470101 - RNA, 22 nt, Human
caggcagagaggagcauuuaau

SEQ ID NO: 470102 - RNA, 22 nt, Human
caaaagcaguucuaucugaguu

SEQ ID NO: 470103 - RNA, 22 nt, Human
gaagcccaggcuuccuuggcuu

SEQ ID NO: 470104 - RNA, 22 nt, Human
cagucccacuagugccaauacc

SEQ ID NO: 470105 - RNA, 22 nt, Human
aguauguauuuuauacuuacag

SEQ ID NO: 470106 - RNA, 22 nt, Human
acacauaagccuaaucaucucc

SEQ ID NO: 470107 - RNA, 22 nt, Human
uaaaggcuuuuacaggagugca

SEQ ID NO: 470108 - RNA, 22 nt, Human
ggcugcagcagagggacucacg

SEQ ID NO: 470109 - RNA, 22 nt, Human
cgaggcagggaagcugcaaaag

SEQ ID NO: 470110 - RNA, 21 nt, Human
ggcuguggagccaugacucac

SEQ ID NO: 470111 - RNA, 22 nt, Human
aaggagaguacaggaguuggua

SEQ ID NO: 470112 - RNA, 22 nt, Human
gaaggcuugcagcucuguggca

SEQ ID NO: 470113 - RNA, 22 nt, Human
gggcguggauggucagugcagg

SEQ ID NO: 470114 - RNA, 22 nt, Human
uaaggcacacaguugcugcaug

SEQ ID NO: 470115 - RNA, 22 nt, Human
ccucagagccuccagaaggaau

SEQ ID NO: 470116 - RNA, 22 nt, Human
auuauaaagaacaugugugugg

SEQ ID NO: 470117 - RNA, 18 nt, Human
aggugcagccucugaggc

SEQ ID NO: 470118 - RNA, 22 nt, Human
uucaaugagcccggggccauag

SEQ ID NO: 470119 - RNA, 22 nt, Human
cugggcuccuaaccauccaggu

SEQ ID NO: 470120 - RNA, 21 nt, Human
uagaaaucagcuggugccucu

SEQ ID NO: 470121 - RNA, 22 nt, Human
uggggacaggagacuuacagcu

SEQ ID NO: 470122 - RNA, 22 nt, Human
cagcugaacauguagagcaucu

SEQ ID NO: 470123 - RNA, 22 nt, Human
uauaauuuaucaugucacaguu

SEQ ID NO: 470124 - RNA, 19 nt, Human
aggcagucauuggaauaua

SEQ ID NO: 470125 - RNA, 20 nt, Human
ggggcccaagcccucuugcc

SEQ ID NO: 470126 - RNA, 22 nt, Human
acuuugaaggggaacauuuuaa

SEQ ID NO: 470127 - RNA, 22 nt, Human
uuauacuaaaacgcauugaauu

SEQ ID NO: 470128 - RNA, 22 nt, Human
ccaaagucuggagcagcagagc

SEQ ID NO: 470129 - RNA, 22 nt, Human
caguggccaugguggcaggggu

SEQ ID NO: 470130 - RNA, 22 nt, Human
gcuguuccugcuuagaggucgg

SEQ ID NO: 470131 - RNA, 22 nt, Human
aguguggguuuuauggagcccu

SEQ ID NO: 470132 - RNA, 22 nt, Human
uggagcagccaugaugacagag

SEQ ID NO: 470133 - RNA, 22 nt, Human
augugacaauauuuggucuuau

SEQ ID NO: 470134 - RNA, 22 nt, Human
ccagcccuugcugaaggguggc

SEQ ID NO: 470135 - RNA, 22 nt, Human
uguaugcagggcuuguaugcag

SEQ ID NO: 470136 - RNA, 22 nt, Human
cucaccacagagccuguccagc

SEQ ID NO: 470137 - RNA, 22 nt, Human
aaagucuuuauuuuguaucuuu

SEQ ID NO: 470138 - RNA, 22 nt, Human
ucagggcaggcgagcagcugcu

SEQ ID NO: 470139 - RNA, 23 nt, Human
cagaccuggcagucauccucaac

SEQ ID NO: 470140 - RNA, 22 nt, Human
cugcugcucgaccagucccagg

SEQ ID NO: 470141 - RNA, 21 nt, Human
agaaauguaucauucuuuucc

SEQ ID NO: 470142 - RNA, 22 nt, Human
ggcaaaaaguucccaucagugu

SEQ ID NO: 470143 - RNA, 22 nt, Human
auuucauugaaguuaauucuuc

SEQ ID NO: 470144 - RNA, 22 nt, Human
gaaauguguuguucauuucuaa

SEQ ID NO: 470145 - RNA, 22 nt, Human
cagcuuuauuucacguguuugu

SEQ ID NO: 470146 - RNA, 22 nt, Human
ugcccagcugucaaaguagaua

SEQ ID NO: 470147 - RNA, 22 nt, Human
uguaugcaccauuguauuaccu

SEQ ID NO: 470148 - RNA, 22 nt, Human
uggcagagcaaaaagauagaau

SEQ ID NO: 470149 - RNA, 22 nt, Human
aacaugaaguuuucuauaguga

SEQ ID NO: 470150 - RNA, 22 nt, Human
agggaagugaaugacagauauc

SEQ ID NO: 470151 - RNA, 22 nt, Human
uucuuuggggaauauucugguu

SEQ ID NO: 470152 - RNA, 21 nt, Human
agcagagugcuuugacuuugu

SEQ ID NO: 470153 - RNA, 22 nt, Human
aacagacaacuccuguggcuca

SEQ ID NO: 470154 - RNA, 22 nt, Human
ggaggccuugaggccaggagcu

SEQ ID NO: 470155 - RNA, 22 nt, Human
ugucucugcuuuccuugcaggg

SEQ ID NO: 470156 - RNA, 22 nt, Human
agccagugaugaagacucugga

SEQ ID NO: 470157 - RNA, 22 nt, Human
aaaaugaauaaguuaacccagg

SEQ ID NO: 470158 - RNA, 22 nt, Human
auuuaaauuuucugauggagag

SEQ ID NO: 470159 - RNA, 22 nt, Human
gcagggaccagggccagaucca

SEQ ID NO: 470160 - RNA, 22 nt, Human
gcucugcucuugacuuaccagg

SEQ ID NO: 470161 - RNA, 20 nt, Human
aggaaaaggguggugguaga

SEQ ID NO: 470162 - RNA, 22 nt, Human
acagcuuugggcaaugcuauga

SEQ ID NO: 470163 - RNA, 22 nt, Human
uggcugaggcacagcugccgcc

SEQ ID NO: 470164 - RNA, 17 nt, Human
gagugcugguggagcuc

SEQ ID NO: 470165 - RNA, 22 nt, Human
aaacuagagcaugugaguggga

SEQ ID NO: 470166 - RNA, 22 nt, Human
uugcauguguaauuuuucuaaa

SEQ ID NO: 470167 - RNA, 22 nt, Human
augcagguugggcaaguguggg

SEQ ID NO: 470168 - RNA, 22 nt, Human
agcuucucaggagucugaggca

SEQ ID NO: 470169 - RNA, 22 nt, Human
ucucagagagcuguguuuuccu

SEQ ID NO: 470170 - RNA, 22 nt, Human
ugcaucuguucagagcugucga

SEQ ID NO: 470171 - RNA, 22 nt, Human
cuuacauuaaguaagagauuga

SEQ ID NO: 470172 - RNA, 21 nt, Human
uguucacauggagcagaaugu

SEQ ID NO: 470173 - RNA, 22 nt, Human
gcaggcugauagaggauuccau

SEQ ID NO: 470174 - RNA, 22 nt, Human
uuuuuccuagcgauuugucagc

SEQ ID NO: 470175 - RNA, 22 nt, Human
cuggagccuucaccaggggaaa

SEQ ID NO: 470176 - RNA, 20 nt, Human
gaggcugcggacugcuggac

SEQ ID NO: 470177 - RNA, 22 nt, Human
gaagagcuguagccugcucuuu

SEQ ID NO: 470178 - RNA, 22 nt, Human
ccaggacucaguggggaaaggg

SEQ ID NO: 470179 - RNA, 22 nt, Human
ugacaaaacugcaauuacuuuu

SEQ ID NO: 470180 - RNA, 22 nt, Human
acaguguguuggaggagacugu

SEQ ID NO: 470181 - RNA, 22 nt, Human
aggacagugguguucuggagug

SEQ ID NO: 470182 - RNA, 22 nt, Human
gccucugcaucaucacuccagc

SEQ ID NO: 470183 - RNA, 22 nt, Human
guggugaagccccaucucugcu

SEQ ID NO: 470184 - RNA, 22 nt, Human
accaugaucugcucugguguuu

SEQ ID NO: 470185 - RNA, 22 nt, Human
uguuuaagcugaugagguaucg

SEQ ID NO: 470186 - RNA, 22 nt, Human
ucugccuuuucacugccacuaa

SEQ ID NO: 470187 - RNA, 22 nt, Human
aggggccauuguucugcccgcu

SEQ ID NO: 470188 - RNA, 21 nt, Human
uucuccccagcgaauccucgg

SEQ ID NO: 470189 - RNA, 22 nt, Human
ccugcuucagggaugauggcac

SEQ ID NO: 470190 - RNA, 22 nt, Human
gugcuuccugccuggugccuuu

SEQ ID NO: 470191 - RNA, 22 nt, Human
cucuuaaagcuuccaguuucaa

SEQ ID NO: 470192 - RNA, 22 nt, Human
cuuggcagcuuuuggaggagcc

SEQ ID NO: 470193 - RNA, 22 nt, Human
agggccuggcuucacuuucuca

SEQ ID NO: 470194 - RNA, 22 nt, Human
uucacagacauugcagacugaa

SEQ ID NO: 470195 - RNA, 22 nt, Human
gaagucuggcugacgagaguua

SEQ ID NO: 470196 - RNA, 22 nt, Human
gaagccacagagauuguggggg

SEQ ID NO: 470197 - RNA, 22 nt, Human
gguccccguggaggcuggagcg

SEQ ID NO: 470198 - RNA, 22 nt, Human
gagauggggucagcugggacau

SEQ ID NO: 470199 - RNA, 22 nt, Human
uuucuuaggcucuaaaaugacu

SEQ ID NO: 470200 - RNA, 22 nt, Human
aaguccaguuuuuccagguggu

SEQ ID NO: 470201 - RNA, 20 nt, Human
ugggccugagccugugggcu

SEQ ID NO: 470202 - RNA, 22 nt, Human
auggauaagucaaagaguaucc

SEQ ID NO: 470203 - RNA, 18 nt, Human
uggagcagguaggcauga

SEQ ID NO: 470204 - RNA, 22 nt, Human
aagcagaugggacuccaaggca

SEQ ID NO: 470205 - RNA, 22 nt, Human
cccagggaagggcuaccugagg

SEQ ID NO: 470206 - RNA, 22 nt, Human
ccagucccaucucugucgcuua

SEQ ID NO: 470207 - RNA, 22 nt, Human
cagcaguguacaaggugucaga

SEQ ID NO: 470208 - RNA, 22 nt, Human
gcuuccucgcugggcagaggca

SEQ ID NO: 470209 - RNA, 20 nt, Human
ccugucuggagacaaagaga

SEQ ID NO: 470210 - RNA, 22 nt, Human
caugaagcauguuuugucauga

SEQ ID NO: 470211 - RNA, 22 nt, Human
cauugcacuucugcuuuuccuc

SEQ ID NO: 470212 - RNA, 22 nt, Human
gagugcaguaugagaggcugcu

SEQ ID NO: 470213 - RNA, 22 nt, Human
aggaccugcuaaugugccaagu

SEQ ID NO: 470214 - RNA, 22 nt, Human
gugccuuccccgguggucuguu

SEQ ID NO: 470215 - RNA, 21 nt, Human
gcccucaggggaggauggccu

SEQ ID NO: 470216 - RNA, 22 nt, Human
accucugcaacccuggaauggg

SEQ ID NO: 470217 - RNA, 23 nt, Human
aggagacagggaagugccuggcu

SEQ ID NO: 470218 - RNA, 22 nt, Human
uuaaaguucauuaaaugagcca

SEQ ID NO: 470219 - RNA, 22 nt, Human
aaggugaaacuggaagcuggcc

SEQ ID NO: 470220 - RNA, 22 nt, Human
cuggcucagugccuucagaagu

SEQ ID NO: 470221 - RNA, 22 nt, Human
gggaggucagggugccugcugg

SEQ ID NO: 470222 - RNA, 22 nt, Human
uccaggcuccccugcgugcucc

SEQ ID NO: 470223 - RNA, 22 nt, Human
uauguacaucguugaauucaaa

SEQ ID NO: 470224 - RNA, 22 nt, Human
gccuggcugagguggggaggca

SEQ ID NO: 470225 - RNA, 21 nt, Human
ccaggcagagcugugaguucu

SEQ ID NO: 470226 - RNA, 22 nt, Human
acaaaguuugugguauuccaag

SEQ ID NO: 470227 - RNA, 22 nt, Human
gccugaaguuucaugccucuau

SEQ ID NO: 470228 - RNA, 22 nt, Human
gcagggcaguaagagcuagagu

SEQ ID NO: 470229 - RNA, 22 nt, Human
ccagagccugcugagccccauu

SEQ ID NO: 470230 - RNA, 22 nt, Human
uaaaggcuuuuagugaugguaa

SEQ ID NO: 470231 - RNA, 22 nt, Human
ugcaggcucacccuggagcuga

SEQ ID NO: 470232 - RNA, 22 nt, Human
gggcuggaggaccggccucgga

SEQ ID NO: 470233 - RNA, 22 nt, Human
uauuaggguuuugaagguuugu

SEQ ID NO: 470234 - RNA, 22 nt, Human
ugagcuggucacuccuucugaa

SEQ ID NO: 470235 - RNA, 22 nt, Human
agacagcugcucgcagagcuau

SEQ ID NO: 470236 - RNA, 22 nt, Human
gagccagccuucuucugagguc

SEQ ID NO: 470237 - RNA, 22 nt, Human
uuuuuauaugaaggauagugcg

SEQ ID NO: 470238 - RNA, 22 nt, Human
cuguccauuuucgugccuccuu

SEQ ID NO: 470239 - RNA, 22 nt, Human
gucagcaggguccccuugagug

SEQ ID NO: 470240 - RNA, 22 nt, Human
ccagcccuugagauggaaggga

SEQ ID NO: 470241 - RNA, 22 nt, Human
augcagcugugggcaagaaaug

SEQ ID NO: 470242 - RNA, 22 nt, Human
agcugguucagaaauuagaugg

SEQ ID NO: 470243 - RNA, 22 nt, Human
gcuguauuuauuuucuaggguu

SEQ ID NO: 470244 - RNA, 22 nt, Human
acaggccuuggcaggcauguga

SEQ ID NO: 470245 - RNA, 22 nt, Human
auuuucucucaaaccuuaaaau

SEQ ID NO: 470246 - RNA, 23 nt, Human
uggaccugaaccagugccucugu

SEQ ID NO: 470247 - RNA, 22 nt, Human
caagaaauguuuacugagcauc

SEQ ID NO: 470248 - RNA, 22 nt, Human
acugccuugucucuugccuguu

SEQ ID NO: 470249 - RNA, 22 nt, Human
agccaagcacucaacuccugga

SEQ ID NO: 470250 - RNA, 22 nt, Human
ggcucagguuaccagucccucc

SEQ ID NO: 470251 - RNA, 22 nt, Human
ugcagggccuugggaugugucc

SEQ ID NO: 470252 - RNA, 22 nt, Human
uguuucagucccuguguucaau

SEQ ID NO: 470253 - RNA, 22 nt, Human
aagccaggcugcacuugcuggg

SEQ ID NO: 470254 - RNA, 22 nt, Human
guaacagaaagucaugcucauu

SEQ ID NO: 470255 - RNA, 22 nt, Human
cagcagccuacaaugcacagaa

SEQ ID NO: 470256 - RNA, 22 nt, Human
cugcaggcugagcgccugccgg

SEQ ID NO: 470257 - RNA, 22 nt, Human
gcuggagccaagcugcucuugg

SEQ ID NO: 470258 - RNA, 22 nt, Human
cuggcaggcagacuucugcaag

SEQ ID NO: 470259 - RNA, 22 nt, Human
cagagcuggcggugagaagaca

SEQ ID NO: 470260 - RNA, 22 nt, Human
aucaggaagccagucuaaugga

SEQ ID NO: 470261 - RNA, 22 nt, Human
uagcugccuagacagcuauagc

SEQ ID NO: 470262 - RNA, 22 nt, Human
caggcugggaacgccacccgcu

SEQ ID NO: 470263 - RNA, 22 nt, Human
uuagccauugucagcacauggc

SEQ ID NO: 470264 - RNA, 22 nt, Human
uggcucaguuuagcagcucagu

SEQ ID NO: 470265 - RNA, 22 nt, Human
ccuacacaucucaccucacagg

SEQ ID NO: 470266 - RNA, 22 nt, Human
aaagcaaucagauucagauguc

SEQ ID NO: 470267 - RNA, 22 nt, Human
caggaggaacaagagguucugg

SEQ ID NO: 470268 - RNA, 22 nt, Human
cuggccaggcuugggacagaca

SEQ ID NO: 470269 - RNA, 22 nt, Human
aaggcucuuggagugaaugcag

SEQ ID NO: 470270 - RNA, 22 nt, Human
cugcugugcaacauugcaccua

SEQ ID NO: 470271 - RNA, 22 nt, Human
ugcuuuaucugacuuggcgcug

SEQ ID NO: 470272 - RNA, 22 nt, Human
uccuucagaaaaccucagucuu

SEQ ID NO: 470273 - RNA, 22 nt, Human
ugucucaucucuuaaccccacu

SEQ ID NO: 470274 - RNA, 22 nt, Human
gcaaggaccuuugagcgugcca

SEQ ID NO: 470275 - RNA, 22 nt, Human
aaagccuugggauuugugauca

SEQ ID NO: 470276 - RNA, 22 nt, Human
agccaggcuacuccuugcugac

SEQ ID NO: 470277 - RNA, 22 nt, Human
augcuguguggucaaguuaauu

SEQ ID NO: 470278 - RNA, 22 nt, Human
aagggcugggucugguuaaccc

SEQ ID NO: 470279 - RNA, 22 nt, Human
ucaaaggcgguccaggaauaaa

SEQ ID NO: 470280 - RNA, 22 nt, Human
gcuggagguuucaccugaguuu

SEQ ID NO: 470281 - RNA, 22 nt, Human
aauaugugagguauguucagug

SEQ ID NO: 470282 - RNA, 22 nt, Human
ggccucugggguccugagccca

SEQ ID NO: 470283 - RNA, 22 nt, Human
gaggugaguggaucacgagguc

SEQ ID NO: 470284 - RNA, 22 nt, Human
agugaaauaaagcugccuaugg

SEQ ID NO: 470285 - RNA, 22 nt, Human
uggcucucaggccugcugcguu

SEQ ID NO: 470286 - RNA, 22 nt, Human
cagcuggcguggagugauugca

SEQ ID NO: 470287 - RNA, 22 nt, Human
acauuucuucccuuuagcagaa

SEQ ID NO: 470288 - RNA, 22 nt, Human
caacuuuaugauugguuuguca

SEQ ID NO: 470289 - RNA, 22 nt, Human
acacuucucccaucuccuguug

SEQ ID NO: 470290 - RNA, 22 nt, Human
ccagggcuccauugcucauccu

SEQ ID NO: 470291 - RNA, 22 nt, Human
gcagggcacagacagugccaag

SEQ ID NO: 470292 - RNA, 22 nt, Human
auaaggcaagcugucaguuugu

SEQ ID NO: 470293 - RNA, 19 nt, Human
guaagggcuaauggacuau

SEQ ID NO: 470294 - RNA, 22 nt, Human
acuuccuguguuggucuugcug

SEQ ID NO: 470295 - RNA, 22 nt, Human
cugucucucuaggacacugggg

SEQ ID NO: 470296 - RNA, 22 nt, Human
aaggagucugggccauucagag

SEQ ID NO: 470297 - RNA, 22 nt, Human
ugauuucauaguauauacauga

SEQ ID NO: 470298 - RNA, 22 nt, Human
aaggcagucugguuucaaagca

SEQ ID NO: 470299 - RNA, 22 nt, Human
aagauuucucuccuggaaagca

SEQ ID NO: 470300 - RNA, 22 nt, Human
caggagugaguuggggucuaca

SEQ ID NO: 470301 - RNA, 18 nt, Human
aggcacuggaauuaaggg

SEQ ID NO: 470302 - RNA, 22 nt, Human
aagcagcuuaaauuagagccug

SEQ ID NO: 470303 - RNA, 22 nt, Human
uuccuuccgggcaccaggcacu

SEQ ID NO: 470304 - RNA, 22 nt, Human
agggcagcagcggcccaggccu

SEQ ID NO: 470305 - RNA, 20 nt, Human
ugcccagcaagagugcaguu

SEQ ID NO: 470306 - RNA, 22 nt, Human
cugaaggaagcagaagcgaggu

SEQ ID NO: 470307 - RNA, 22 nt, Human
gugcauuuggugacucucaccc

SEQ ID NO: 470308 - RNA, 22 nt, Human
cuccagugcacccagaggauuu

SEQ ID NO: 470309 - RNA, 22 nt, Human
cugcaggcccccuuccuggagu

SEQ ID NO: 470310 - RNA, 22 nt, Human
augagcugggccauccagugau

SEQ ID NO: 470311 - RNA, 22 nt, Human
uccauuuuguagguaugcuaca

SEQ ID NO: 470312 - RNA, 22 nt, Human
ucagagcuaaggggagagcaaa

SEQ ID NO: 470313 - RNA, 22 nt, Human
cagaggcagaggucaucucugg

SEQ ID NO: 470314 - RNA, 22 nt, Human
gugcuuaauacaugucaauaac

SEQ ID NO: 470315 - RNA, 22 nt, Human
aagcuuuaagugucagucagcc

SEQ ID NO: 470316 - RNA, 22 nt, Human
ggcugcugaguuggccaggaga

SEQ ID NO: 470317 - RNA, 22 nt, Human
cagaggcaaaagagguggaggu

SEQ ID NO: 470318 - RNA, 19 nt, Human
ucugccucuggucaggcuc

SEQ ID NO: 470319 - RNA, 22 nt, Human
uucuuucccaguagaugugaaa

SEQ ID NO: 470320 - RNA, 22 nt, Human
uggccuggcucacagugagauu

SEQ ID NO: 470321 - RNA, 22 nt, Human
ucucccacugcaagcccaggcu

SEQ ID NO: 470322 - RNA, 22 nt, Human
ucccagaggcaguugguaacuu

SEQ ID NO: 470323 - RNA, 22 nt, Human
uagaaacacagaucugguguca

SEQ ID NO: 470324 - RNA, 22 nt, Human
ggugaagggugucauggcauuu

SEQ ID NO: 470325 - RNA, 22 nt, Human
gcuggagcuugagaggacaggg

SEQ ID NO: 470326 - RNA, 22 nt, Human
cugcagaggccucgccuccucu

SEQ ID NO: 470327 - RNA, 22 nt, Human
ugcugccuucuaggcgugcccu

SEQ ID NO: 470328 - RNA, 22 nt, Human
ucgggcucgcucuccuagcgga

SEQ ID NO: 470329 - RNA, 22 nt, Human
agggcagcuggaagguggcuuc

SEQ ID NO: 470330 - RNA, 22 nt, Human
accagagcagacuacuggaggu

SEQ ID NO: 470331 - RNA, 22 nt, Human
uguguuuuacaaauucucuuaa

SEQ ID NO: 470332 - RNA, 22 nt, Human
ugucacauguguggcauuuuuc

SEQ ID NO: 470333 - RNA, 22 nt, Human
uuugaaagcuacuuucggguca

SEQ ID NO: 470334 - RNA, 22 nt, Human
gggagggaaggaccuuaugaau

SEQ ID NO: 470335 - RNA, 22 nt, Human
uggccucaagucugagggccuu

SEQ ID NO: 470336 - RNA, 23 nt, Human
ucagaaugcacugaauuuacccu

SEQ ID NO: 470337 - RNA, 22 nt, Human
agcugggccugagcuggaagcu

SEQ ID NO: 470338 - RNA, 20 nt, Human
ggcagagggccugggagaag

SEQ ID NO: 470339 - RNA, 22 nt, Human
aaggugucaccagauuggcagg

SEQ ID NO: 470340 - RNA, 22 nt, Human
ugcacagcgggugucugucagg

SEQ ID NO: 470341 - RNA, 22 nt, Human
ggggauggaauguaguagugau

SEQ ID NO: 470342 - RNA, 22 nt, Human
gcaguggcaccgcuggcucugg

SEQ ID NO: 470343 - RNA, 22 nt, Human
acucaguacaucuggaguuggc

SEQ ID NO: 470344 - RNA, 22 nt, Human
augcaguauaaaucauuucugg

SEQ ID NO: 470345 - RNA, 22 nt, Human
aguggugcugcgcgcggagcuc

SEQ ID NO: 470346 - RNA, 22 nt, Human
acauuucuccuugcaggaguca

SEQ ID NO: 470347 - RNA, 22 nt, Human
uuucuacagcuggugcaacuuu

SEQ ID NO: 470348 - RNA, 16 nt, Human
agaggccuugaggaag

SEQ ID NO: 470349 - RNA, 22 nt, Human
ucuuauuauuguuguaaaagca

SEQ ID NO: 470350 - RNA, 22 nt, Human
ucugagaguacgggcugcgcgc

SEQ ID NO: 470351 - RNA, 22 nt, Human
gagcugaaauaugaagccaauu

SEQ ID NO: 470352 - RNA, 22 nt, Human
gcucucuguuauuaagaucuuu

SEQ ID NO: 470353 - RNA, 22 nt, Human
acaggugaccugcucauaugaa

SEQ ID NO: 470354 - RNA, 23 nt, Human
uggagcugggcucagacccuggg

SEQ ID NO: 470355 - RNA, 22 nt, Human
gcuguccagagcaugggagcaa

SEQ ID NO: 470356 - RNA, 22 nt, Human
cuggagccugcaguuuucacuu

SEQ ID NO: 470357 - RNA, 22 nt, Human
gccagagcaugcacugccugca

SEQ ID NO: 470358 - RNA, 22 nt, Human
ucaggagacuuaugucacagug

SEQ ID NO: 470359 - RNA, 17 nt, Human
gucugggcuuuagagac

SEQ ID NO: 470360 - RNA, 22 nt, Human
ugucucugugagaucugacgau

SEQ ID NO: 470361 - RNA, 22 nt, Human
gaggcagcaggcugaggaggau

SEQ ID NO: 470362 - RNA, 22 nt, Human
ugaaugauguauaauauugaga

SEQ ID NO: 470363 - RNA, 22 nt, Human
uggaaggcaugggaacuguucu

SEQ ID NO: 470364 - RNA, 22 nt, Human
gccuuggccuuccuaggccuga

SEQ ID NO: 470365 - RNA, 22 nt, Human
uuucuucucgacaccuuauccc

SEQ ID NO: 470366 - RNA, 22 nt, Human
ggcuuuauuauguggccaugug

SEQ ID NO: 470367 - RNA, 22 nt, Human
uggucagacaaaggagaauguu

SEQ ID NO: 470368 - RNA, 22 nt, Human
acaguucccgucuugcacagcu

SEQ ID NO: 470369 - RNA, 18 nt, Human
cagcugugcccuguuugg

SEQ ID NO: 470370 - RNA, 22 nt, Human
ucuuaaaaguaugccaauugga

SEQ ID NO: 470371 - RNA, 22 nt, Human
auaugcacauacauacauaggu

SEQ ID NO: 470372 - RNA, 22 nt, Human
ccugugugcugaugacgacaga

SEQ ID NO: 470373 - RNA, 22 nt, Human
uggcaggaaaguaacagagcac

SEQ ID NO: 470374 - RNA, 22 nt, Human
ccucaggaaaugaauaaauggc

SEQ ID NO: 470375 - RNA, 22 nt, Human
ucugccuggauuccauucucca

SEQ ID NO: 470376 - RNA, 22 nt, Human
aagcccagcugaaagcauuuuu

SEQ ID NO: 470377 - RNA, 22 nt, Human
cagcugcaugucuguggugguc

SEQ ID NO: 470378 - RNA, 22 nt, Human
gaaggaagucauuagugcagac

SEQ ID NO: 470379 - RNA, 22 nt, Human
agccaggcgggucuuugcuccu

SEQ ID NO: 470380 - RNA, 22 nt, Human
cccaucaggaacccaggagccc

SEQ ID NO: 470381 - RNA, 22 nt, Human
cugggcugucccaaccccaucc

SEQ ID NO: 470382 - RNA, 22 nt, Human
ccuggcagguggcgcccucggc

SEQ ID NO: 470383 - RNA, 22 nt, Human
gguggccucucaugcaagguag

SEQ ID NO: 470384 - RNA, 22 nt, Human
gggguugguuuaaaugcuugag

SEQ ID NO: 470385 - RNA, 21 nt, Human
acaggcucuggggaugcuggg

SEQ ID NO: 470386 - RNA, 22 nt, Human
cuggccaguuguccuggcuugg

SEQ ID NO: 470387 - RNA, 22 nt, Human
ucucaggguuuccugggggcug

SEQ ID NO: 470388 - RNA, 20 nt, Human
cuucaggacccauccucccc

SEQ ID NO: 470389 - RNA, 22 nt, Human
aggcucagagaugaguaagcac

SEQ ID NO: 470390 - RNA, 22 nt, Human
agugcagaguacauuuguggca

SEQ ID NO: 470391 - RNA, 22 nt, Human
uaacagaagaaaacauauugga

SEQ ID NO: 470392 - RNA, 22 nt, Human
cagacacagauaugcauauggc

SEQ ID NO: 470393 - RNA, 22 nt, Human
ucaccagggagcuuguccucug

SEQ ID NO: 470394 - RNA, 22 nt, Human
uguauuuuuagaccuuuagacc

SEQ ID NO: 470395 - RNA, 22 nt, Human
gaagcccauuuguacagcacau

SEQ ID NO: 470396 - RNA, 22 nt, Human
agccagggagguggagguugca

SEQ ID NO: 470397 - RNA, 20 nt, Human
ggcagccaaucagcgugccg

SEQ ID NO: 470398 - RNA, 22 nt, Human
gaggcacaguguuuggucagug

SEQ ID NO: 470399 - RNA, 22 nt, Human
ccugaagagcacucuagaguug

SEQ ID NO: 470400 - RNA, 21 nt, Human
aggugccaaggagaagcaggc

SEQ ID NO: 470401 - RNA, 22 nt, Human
agcaggagaacacuguggcucu

SEQ ID NO: 470402 - RNA, 22 nt, Human
auaauaaaccaggaugggucug

SEQ ID NO: 470403 - RNA, 22 nt, Human
gcucugcuugcaucaugacugc

SEQ ID NO: 470404 - RNA, 22 nt, Human
cagugauguuucugcaucagag

SEQ ID NO: 470405 - RNA, 22 nt, Human
ugcuggggucauggggcgcccg

SEQ ID NO: 470406 - RNA, 19 nt, Human
gccaggagggcucuggcug

SEQ ID NO: 470407 - RNA, 22 nt, Human
ggccaccuuccaguugccugca

SEQ ID NO: 470408 - RNA, 22 nt, Human
uccagccaugacucggacagug

SEQ ID NO: 470409 - RNA, 22 nt, Human
gccacucaugggaggugugcaa

SEQ ID NO: 470410 - RNA, 18 nt, Human
uacaugcauaaaugaagc

SEQ ID NO: 470411 - RNA, 22 nt, Human
ggccugagcucuggggaggcaa

SEQ ID NO: 470412 - RNA, 22 nt, Human
ucucuggccgagagucccuggg

SEQ ID NO: 470413 - RNA, 23 nt, Human
cccagcagagaugaggagggguc

SEQ ID NO: 470414 - RNA, 22 nt, Human
agcagcauagaugcuauccgag

SEQ ID NO: 470415 - RNA, 19 nt, Human
uggcagcauugguaccuug

SEQ ID NO: 470416 - RNA, 21 nt, Human
guggcucugccaggacugaaa

SEQ ID NO: 470417 - RNA, 22 nt, Human
gagggcaggggucuugcacggu

SEQ ID NO: 470418 - RNA, 22 nt, Human
agcauggggcuccgcaaugaac

SEQ ID NO: 470419 - RNA, 23 nt, Human
ugcucugugaauaguuggugacu

SEQ ID NO: 470420 - RNA, 22 nt, Human
cuccagggagcuguggagguuu

SEQ ID NO: 470421 - RNA, 22 nt, Human
gcucugaggcugggagcacucu

SEQ ID NO: 470422 - RNA, 21 nt, Human
uuuauuaacaacuguggacgu

SEQ ID NO: 470423 - RNA, 22 nt, Human
auugucugaauccaaagcucug

SEQ ID NO: 470424 - RNA, 22 nt, Human
ccagggcuggugggagaugcug

SEQ ID NO: 470425 - RNA, 22 nt, Human
gcaggagcucguuuccaggcug

SEQ ID NO: 470426 - RNA, 22 nt, Human
aaaguguaaggaauuuaaguaa

SEQ ID NO: 470427 - RNA, 22 nt, Human
uuuaccaagcuuuaauuacaua

SEQ ID NO: 470428 - RNA, 22 nt, Human
cagcaggaaagacaucugagca

SEQ ID NO: 470429 - RNA, 22 nt, Human
ugagcagagucgcuccagagug

SEQ ID NO: 470430 - RNA, 22 nt, Human
cauuugcaagagauaaauguuu

SEQ ID NO: 470431 - RNA, 21 nt, Human
gacaggggaagaagcaaggag

SEQ ID NO: 470432 - RNA, 22 nt, Human
gcugggcaccggagagacccca

SEQ ID NO: 470433 - RNA, 22 nt, Human
aaaucaguuaagaugaggccau

SEQ ID NO: 470434 - RNA, 22 nt, Human
aguaucaaggaucuccagcacc

SEQ ID NO: 470435 - RNA, 22 nt, Human
auuauuagugauguuguuacug

SEQ ID NO: 470436 - RNA, 22 nt, Human
agguuauaugucauacugaagu

SEQ ID NO: 470437 - RNA, 22 nt, Human
cccuggaggaccccaauguggc

SEQ ID NO: 470438 - RNA, 22 nt, Human
gcacugcaucuacuggcaagua

SEQ ID NO: 470439 - RNA, 22 nt, Human
cccugcagagagugcuuuugug

SEQ ID NO: 470440 - RNA, 18 nt, Human
acaggccucaguccugca

SEQ ID NO: 470441 - RNA, 22 nt, Human
ugcaauaacccaguaucuguga

SEQ ID NO: 470442 - RNA, 22 nt, Human
ggcagcuuuuaucccugacaga

SEQ ID NO: 470443 - RNA, 22 nt, Human
gugggugauguacuggaggcca

SEQ ID NO: 470444 - RNA, 22 nt, Human
ggaucauuaacacauccaucac

SEQ ID NO: 470445 - RNA, 22 nt, Human
gagggcucuaccaaguaacucu

SEQ ID NO: 470446 - RNA, 22 nt, Human
ucucuuucuauugcaccaugcu

SEQ ID NO: 470447 - RNA, 22 nt, Human
cauaucauaggucuuggauaau

SEQ ID NO: 470448 - RNA, 22 nt, Human
acaaaaauuagcugggcauggu

SEQ ID NO: 470449 - RNA, 22 nt, Human
uggcuucugggacuugugagca

SEQ ID NO: 470450 - RNA, 22 nt, Human
caggcagcugcgacaagagagc

SEQ ID NO: 470451 - RNA, 22 nt, Human
ggaggguuagcaaaggcacaga

SEQ ID NO: 470452 - RNA, 22 nt, Human
gggugggaacaggaugccagga

SEQ ID NO: 470453 - RNA, 22 nt, Human
ucuuaaaccacaaaauucagag

SEQ ID NO: 470454 - RNA, 22 nt, Human
cauucacagagggggaagcauc

SEQ ID NO: 470455 - RNA, 22 nt, Human
agcagccagaaauccagaggug

SEQ ID NO: 470456 - RNA, 22 nt, Human
gcagagccccauugcuggcggg

SEQ ID NO: 470457 - RNA, 22 nt, Human
ggagagcaggguccugagauac

SEQ ID NO: 470458 - RNA, 22 nt, Human
aguaaaaucuuaagcacagugg

SEQ ID NO: 470459 - RNA, 22 nt, Human
agggaaagguagugaggucaca

SEQ ID NO: 470460 - RNA, 19 nt, Human
gcgaggaagucacuguggu

SEQ ID NO: 470461 - RNA, 23 nt, Human
uucaaagcuuaagcucuuuccac

SEQ ID NO: 470462 - RNA, 22 nt, Human
gagggagagugauggaccauug

SEQ ID NO: 470463 - RNA, 22 nt, Human
cucaggauauugggcuggagca

SEQ ID NO: 470464 - RNA, 22 nt, Human
cuggacuuuggcccaucugcca

SEQ ID NO: 470465 - RNA, 22 nt, Human
uuuuccuacugauaaacaguua

SEQ ID NO: 470466 - RNA, 22 nt, Human
aaacagacugaagaguugaagc

SEQ ID NO: 470467 - RNA, 22 nt, Human
aaaaugugcaguuuuuaagcug

SEQ ID NO: 470468 - RNA, 21 nt, Human
aggcccagagucuugggggga

SEQ ID NO: 470469 - RNA, 22 nt, Human
uuggccuucccuaccugggcca

SEQ ID NO: 470470 - RNA, 22 nt, Human
ugaguccaucgcagggaagugg

SEQ ID NO: 470471 - RNA, 17 nt, Human
ugaaggccaugaccacg

SEQ ID NO: 470472 - RNA, 22 nt, Human
gugagcagaacagguggcuucu

SEQ ID NO: 470473 - RNA, 22 nt, Human
uugaagcaggaaaauuucuauu

SEQ ID NO: 470474 - RNA, 22 nt, Human
gagccagccgcaagagcuguga

SEQ ID NO: 470475 - RNA, 22 nt, Human
ggcagaggugaaguucacaagg

SEQ ID NO: 470476 - RNA, 22 nt, Human
ggaggaccccagcagcucccca

SEQ ID NO: 470477 - RNA, 22 nt, Human
ggcagcaggcgacuucccuauu

SEQ ID NO: 470478 - RNA, 22 nt, Human
cagcaguguggaagcugagggg

SEQ ID NO: 470479 - RNA, 22 nt, Human
cagugggugaugaguccugggg

SEQ ID NO: 470480 - RNA, 22 nt, Human
ccuggccucgugcucacggcuc

SEQ ID NO: 470481 - RNA, 22 nt, Human
aaagaugucauacacauuaaga

SEQ ID NO: 470482 - RNA, 22 nt, Human
gagggggcgugcaaggcuccgc

SEQ ID NO: 470483 - RNA, 22 nt, Human
aaauugcaaaaguacuuuuagg

SEQ ID NO: 470484 - RNA, 22 nt, Human
ucuuuccauggccacacagucu

SEQ ID NO: 470485 - RNA, 22 nt, Human
ggggcuggcucacuaagagacu

SEQ ID NO: 470486 - RNA, 22 nt, Human
cccaggcagccccagaagcuug

SEQ ID NO: 470487 - RNA, 22 nt, Human
gaggcagcaaaauauaucauaa

SEQ ID NO: 470488 - RNA, 22 nt, Human
gcagggcaaacccagguguuca

SEQ ID NO: 470489 - RNA, 22 nt, Human
cagcaggaggugagaugugacc

SEQ ID NO: 470490 - RNA, 22 nt, Human
cuggccugagcacagcggcugc

SEQ ID NO: 470491 - RNA, 22 nt, Human
uucaaugaggauagaacuggau

SEQ ID NO: 470492 - RNA, 22 nt, Human
gccagagcugagacacgagucc

SEQ ID NO: 470493 - RNA, 22 nt, Human
gcaggcucuucuuucugcccag

SEQ ID NO: 470494 - RNA, 22 nt, Human
uaggagcuaaaauauuuuauau

SEQ ID NO: 470495 - RNA, 22 nt, Human
cugccagcucucuggaggcucu

SEQ ID NO: 470496 - RNA, 22 nt, Human
aaauuucuguuguuuugagcca

SEQ ID NO: 470497 - RNA, 22 nt, Human
aucuggcuugacuuugcgacuu

SEQ ID NO: 470498 - RNA, 22 nt, Human
cuuccagagauagggccucaag

SEQ ID NO: 470499 - RNA, 22 nt, Human
ccuuccaggagucucugcaggu

SEQ ID NO: 470500 - RNA, 19 nt, Human
gggaugggcccucacccuc

SEQ ID NO: 470501 - RNA, 22 nt, Human
cugggcuguaauguggcacuga

SEQ ID NO: 470502 - RNA, 22 nt, Human
cccaggucuaugccagcucuga

SEQ ID NO: 470503 - RNA, 22 nt, Human
cacuuaagcaguuaauuuaucu

SEQ ID NO: 470504 - RNA, 18 nt, Human
aggaaagaaaggcaggug

SEQ ID NO: 470505 - RNA, 19 nt, Human
aguggcagaucuggaagua

SEQ ID NO: 470506 - RNA, 22 nt, Human
aggggcucaguuacuuuggcag

SEQ ID NO: 470507 - RNA, 22 nt, Human
cagccaggacagggaaacuagu

SEQ ID NO: 470508 - RNA, 22 nt, Human
uucugggacaucuggacaguuu

SEQ ID NO: 470509 - RNA, 22 nt, Human
ucgggguagacgccagcucgga

SEQ ID NO: 470510 - RNA, 22 nt, Human
ucagcagggcugugguguggcu

SEQ ID NO: 470511 - RNA, 23 nt, Human
uggccuggagagaaaagaugagu

SEQ ID NO: 470512 - RNA, 22 nt, Human
caguggcacccacgggcugggc

SEQ ID NO: 470513 - RNA, 22 nt, Human
uggcaggaaaaacauuggagau

SEQ ID NO: 470514 - RNA, 22 nt, Human
agagcugcaauuucauguggug

SEQ ID NO: 470515 - RNA, 22 nt, Human
cccagccugugacagccguccu

SEQ ID NO: 470516 - RNA, 22 nt, Human
gugcagugacccuggagagcug

SEQ ID NO: 470517 - RNA, 22 nt, Human
gagagcugggggacuguggaug

SEQ ID NO: 470518 - RNA, 22 nt, Human
uggcagagacaaggccgggccu

SEQ ID NO: 470519 - RNA, 22 nt, Human
accugagaccuaaucugacugu

SEQ ID NO: 470520 - RNA, 22 nt, Human
uccauuuucuugcucuagguaa

SEQ ID NO: 470521 - RNA, 19 nt, Human
ugaaggagggggauggcca

SEQ ID NO: 470522 - RNA, 22 nt, Human
aauagguagccagauauauaaa

SEQ ID NO: 470523 - RNA, 22 nt, Human
uggcagagacuccuccugggag

SEQ ID NO: 470524 - RNA, 22 nt, Human
agcuggagcuucaagcagguaa

SEQ ID NO: 470525 - RNA, 22 nt, Human
auauaaaguguuuagaaagcug

SEQ ID NO: 470526 - RNA, 22 nt, Human
caaagccucugauuucacuugu

SEQ ID NO: 470527 - RNA, 22 nt, Human
cuggcuccacucccugccugac

SEQ ID NO: 470528 - RNA, 22 nt, Human
uugcaccauuucacuuccauua

SEQ ID NO: 470529 - RNA, 22 nt, Human
auuaauuuuucugacagccaca

SEQ ID NO: 470530 - RNA, 22 nt, Human
ugggcucugcugcguaccaguu

SEQ ID NO: 470531 - RNA, 22 nt, Human
uucuuuugggaauuacguaugc

SEQ ID NO: 470532 - RNA, 22 nt, Human
ggcagcaacucggagagaagag

SEQ ID NO: 470533 - RNA, 22 nt, Human
uuucaguggguuuauuucaugu

SEQ ID NO: 470534 - RNA, 22 nt, Human
ucacuuuugaucccuaugcagu

SEQ ID NO: 470535 - RNA, 22 nt, Human
agagcaucuaacacauaagccu

SEQ ID NO: 470536 - RNA, 19 nt, Human
cagucccaaauucuuguca

SEQ ID NO: 470537 - RNA, 22 nt, Human
ucagaagacuacuaggacacau

SEQ ID NO: 470538 - RNA, 22 nt, Human
caaggccagggaauuuuucugg

SEQ ID NO: 470539 - RNA, 20 nt, Human
agugucugggccucaggccc

SEQ ID NO: 470540 - RNA, 18 nt, Human
cccucuccugcuaguggg

SEQ ID NO: 470541 - RNA, 17 nt, Human
acacagccagguucucc

SEQ ID NO: 470542 - RNA, 22 nt, Human
uauucacaggcuggagugaugu

SEQ ID NO: 470543 - RNA, 22 nt, Human
ugagccugcaauaagcacagcc

SEQ ID NO: 470544 - RNA, 22 nt, Human
ggcagcacgacaggaguggaag

SEQ ID NO: 470545 - RNA, 20 nt, Human
uuuuauauguaggguauaug

SEQ ID NO: 470546 - RNA, 22 nt, Human
aggccuggcaugagaccugaga

SEQ ID NO: 470547 - RNA, 22 nt, Human
ggguuggggcccagcagucugc

SEQ ID NO: 470548 - RNA, 22 nt, Human
uccagcagguccgagacaaguu

SEQ ID NO: 470549 - RNA, 22 nt, Human
acugaaaaugaauuagaaacag

SEQ ID NO: 470550 - RNA, 22 nt, Human
ccugggaggcuguuuccagccu

SEQ ID NO: 470551 - RNA, 22 nt, Human
gaaaguuucuucauuaagaugu

SEQ ID NO: 470552 - RNA, 22 nt, Human
aggcuucccagcugagcucagc

SEQ ID NO: 470553 - RNA, 22 nt, Human
agugucugccagcugccaggug

SEQ ID NO: 470554 - RNA, 22 nt, Human
agaaaguuuugugcuauauaug

SEQ ID NO: 470555 - RNA, 22 nt, Human
ggguccaggucuucaggcagag

SEQ ID NO: 470556 - RNA, 22 nt, Human
caggcagagcaacugguccaga

SEQ ID NO: 470557 - RNA, 22 nt, Human
augaccccuaaaauuuacuguc

SEQ ID NO: 470558 - RNA, 22 nt, Human
uuagucuucuuccuuauauguu

SEQ ID NO: 470559 - RNA, 22 nt, Human
cugugucggacgugggcagcag

SEQ ID NO: 470560 - RNA, 22 nt, Human
uuaaacaguguuucaugugggg

SEQ ID NO: 470561 - RNA, 18 nt, Human
ucaaagucuggcuccacu

SEQ ID NO: 470562 - RNA, 21 nt, Human
ucauuuuuauugcuaccuugc

SEQ ID NO: 470563 - RNA, 22 nt, Human
caaaguucucggcucaaguccu

SEQ ID NO: 470564 - RNA, 22 nt, Human
auagacuugguuaguaaauuug

SEQ ID NO: 470565 - RNA, 22 nt, Human
agguaaagacugcaaggagaau

SEQ ID NO: 470566 - RNA, 22 nt, Human
ccagggugagugucauggguua

SEQ ID NO: 470567 - RNA, 22 nt, Human
agggccuggcgcguggccgccg

SEQ ID NO: 470568 - RNA, 22 nt, Human
uaagacaugguugaucuagugu

SEQ ID NO: 470569 - RNA, 22 nt, Human
uguuaacaucuuggacucguga

SEQ ID NO: 470570 - RNA, 22 nt, Human
ccuggcugcuuucacuauggag

SEQ ID NO: 470571 - RNA, 22 nt, Human
uccuucagggggccgccugcac

SEQ ID NO: 470572 - RNA, 22 nt, Human
agaauuagguaaguucaucuga

SEQ ID NO: 470573 - RNA, 22 nt, Human
cugcagagaauuguggggcuuc

SEQ ID NO: 470574 - RNA, 22 nt, Human
aagagagaacucccuucgccag

SEQ ID NO: 470575 - RNA, 22 nt, Human
gaacuguauaggagcaguguuu

SEQ ID NO: 470576 - RNA, 22 nt, Human
auaauuaauuucaguaaucucc

SEQ ID NO: 470577 - RNA, 22 nt, Human
ucagggcaaaagggaaaccauu

SEQ ID NO: 470578 - RNA, 22 nt, Human
gcucccagcauugcuucccagg

SEQ ID NO: 470579 - RNA, 22 nt, Human
aggcagaauguuggaaaggaag

SEQ ID NO: 470580 - RNA, 22 nt, Human
aggagcugaaacuucucauaug

SEQ ID NO: 470581 - RNA, 22 nt, Human
uggccuggaaaaaugcagaugg

SEQ ID NO: 470582 - RNA, 22 nt, Human
uauaguacauggaaucuucaua

SEQ ID NO: 470583 - RNA, 22 nt, Human
ccaggaguuggagguugcagug

SEQ ID NO: 470584 - RNA, 22 nt, Human
ucccagcagcauagcucagaau

SEQ ID NO: 470585 - RNA, 22 nt, Human
aaggccauuauucugauauauu

SEQ ID NO: 470586 - RNA, 22 nt, Human
uacaguaaccuuauuugucauu

SEQ ID NO: 470587 - RNA, 20 nt, Human
gccuggaggcaaugggaaga

SEQ ID NO: 470588 - RNA, 22 nt, Human
gagccuggacaucucaggccca

SEQ ID NO: 470589 - RNA, 21 nt, Human
uaaauaauaaguugcugagau

SEQ ID NO: 470590 - RNA, 22 nt, Human
aaaguguggagauugaacuaaa

SEQ ID NO: 470591 - RNA, 22 nt, Human
gaggaggcuaagugggcucugg

SEQ ID NO: 470592 - RNA, 22 nt, Human
cauuacauuucaaaauguuucc

SEQ ID NO: 470593 - RNA, 22 nt, Human
ucaaagucucugcuucuguaac

SEQ ID NO: 470594 - RNA, 22 nt, Human
aagcagcugauuucacagcuca

SEQ ID NO: 470595 - RNA, 22 nt, Human
caauuucucuuuauaucucaca

SEQ ID NO: 470596 - RNA, 22 nt, Human
uauugucuguccgggucaaagc

SEQ ID NO: 470597 - RNA, 22 nt, Human
gcuggccugcaaagcccggcug

SEQ ID NO: 470598 - RNA, 22 nt, Human
ucaaggaggugcuuggcuucac

SEQ ID NO: 470599 - RNA, 22 nt, Human
aacacagcuaauuucugucaau

SEQ ID NO: 470600 - RNA, 22 nt, Human
uccagggccaagucauggaacc

SEQ ID NO: 470601 - RNA, 22 nt, Human
ccucuggucccagcucugcugc

SEQ ID NO: 470602 - RNA, 22 nt, Human
uugacaagaaucguugccuugg

SEQ ID NO: 470603 - RNA, 22 nt, Human
aaaucaguuagugguaggauug

SEQ ID NO: 470604 - RNA, 22 nt, Human
gggcucuggauggagccugcag

SEQ ID NO: 470605 - RNA, 22 nt, Human
ucaguguagcagacuuguagcc

SEQ ID NO: 470606 - RNA, 22 nt, Human
ggguaauuggggccuugcagug

SEQ ID NO: 470607 - RNA, 22 nt, Human
ucagaggaaagggaacauaguc

SEQ ID NO: 470608 - RNA, 22 nt, Human
uuuguuuagaaagagauuggug

SEQ ID NO: 470609 - RNA, 22 nt, Human
auugacaagugagcugggcugc

SEQ ID NO: 470610 - RNA, 22 nt, Human
aacucaguuacauauuagaaua

SEQ ID NO: 470611 - RNA, 22 nt, Human
gcugugcagucuuuggugugcc

SEQ ID NO: 470612 - RNA, 22 nt, Human
aggcacagagaaugcccuccau

SEQ ID NO: 470613 - RNA, 22 nt, Human
gguucacacuaagcuuaagugg

SEQ ID NO: 470614 - RNA, 22 nt, Human
uuucacauuuaggcgugaauug

SEQ ID NO: 470615 - RNA, 22 nt, Human
aagaggaaaugauugacuauau

SEQ ID NO: 470616 - RNA, 22 nt, Human
gcagaggagcaagcuggacacc

SEQ ID NO: 470617 - RNA, 22 nt, Human
gagagcacaugaacauggagga

SEQ ID NO: 470618 - RNA, 22 nt, Human
agcuguguagggaaucagagaa

SEQ ID NO: 470619 - RNA, 22 nt, Human
gcugucuuccuugcuccaaggg

SEQ ID NO: 470620 - RNA, 21 nt, Human
aucacauuggcuguuauuauu

SEQ ID NO: 470621 - RNA, 22 nt, Human
caguguccucagccagcagcua

SEQ ID NO: 470622 - RNA, 18 nt, Human
ucuggcucaggacugaac

SEQ ID NO: 470623 - RNA, 22 nt, Human
cccucagcuucucccugcagcu

SEQ ID NO: 470624 - RNA, 22 nt, Human
aauacagaggggucacaauuca

SEQ ID NO: 470625 - RNA, 22 nt, Human
cuccugggaauuuaguugugag

SEQ ID NO: 470626 - RNA, 22 nt, Human
uggcugcagacaccuauggcag

SEQ ID NO: 470627 - RNA, 22 nt, Human
gccacacugcuucuuugagccu

SEQ ID NO: 470628 - RNA, 22 nt, Human
uggcucucagcucccagcagcc

SEQ ID NO: 470629 - RNA, 22 nt, Human
uuacaaaguucugaguucaaac

SEQ ID NO: 470630 - RNA, 22 nt, Human
gggcugaggcuaccacuggucu

SEQ ID NO: 470631 - RNA, 22 nt, Human
agggcugaaacauaauccuucu

SEQ ID NO: 470632 - RNA, 22 nt, Human
gcuguggcugaagaugcaggga

SEQ ID NO: 470633 - RNA, 22 nt, Human
agcugcucccuauccuuuccuu

SEQ ID NO: 470634 - RNA, 17 nt, Human
acagagcacaucaagau

SEQ ID NO: 470635 - RNA, 22 nt, Human
agaggcaacauggggaacagau

SEQ ID NO: 470636 - RNA, 22 nt, Human
uuuaauuugaaaugaguaaccc

SEQ ID NO: 470637 - RNA, 22 nt, Human
cacagcugcccuacuccaugug

SEQ ID NO: 470638 - RNA, 22 nt, Human
cagagcugcagauugaaggcau

SEQ ID NO: 470639 - RNA, 21 nt, Human
ugcuccuuagcugccccugcc

SEQ ID NO: 470640 - RNA, 22 nt, Human
gcugugcacuaccuauacaucc

SEQ ID NO: 470641 - RNA, 22 nt, Human
uccuuucccuuuccauccuggc

SEQ ID NO: 470642 - RNA, 22 nt, Human
gcccucagaggacagcugacuu

SEQ ID NO: 470643 - RNA, 20 nt, Human
ugcuguaagauuagagagcu

SEQ ID NO: 470644 - RNA, 22 nt, Human
gugugcagggaugagugcaggu

SEQ ID NO: 470645 - RNA, 22 nt, Human
agggacuuguguccuauguaug

SEQ ID NO: 470646 - RNA, 22 nt, Human
uaaaugcagcaguuucuguucu

SEQ ID NO: 470647 - RNA, 22 nt, Human
gaggcuccccaugaggccccag

SEQ ID NO: 470648 - RNA, 22 nt, Human
agguacaguagacagacaguua

SEQ ID NO: 470649 - RNA, 22 nt, Human
ugcaguggaaagacucagacuu

SEQ ID NO: 470650 - RNA, 22 nt, Human
ugcagggccuuguugaugugcu

SEQ ID NO: 470651 - RNA, 22 nt, Human
gucaggaucaaauugaaguuau

SEQ ID NO: 470652 - RNA, 22 nt, Human
uauuagguaaaggacuugcagg

SEQ ID NO: 470653 - RNA, 22 nt, Human
uugaauaggacucagcagugau

SEQ ID NO: 470654 - RNA, 22 nt, Human
gagacugauggggcucccagaa

SEQ ID NO: 470655 - RNA, 22 nt, Human
ggcaaaguuuucaucucauaac

SEQ ID NO: 470656 - RNA, 20 nt, Human
gagauggacagaugaagggg

SEQ ID NO: 470657 - RNA, 22 nt, Human
cagcaggcccaggugcugguga

SEQ ID NO: 470658 - RNA, 22 nt, Human
cuguccuguggaccugaggacg

SEQ ID NO: 470659 - RNA, 22 nt, Human
ggagccugugggaugagaugug

SEQ ID NO: 470660 - RNA, 22 nt, Human
aauacagauauucagugguacu

SEQ ID NO: 470661 - RNA, 22 nt, Human
aaguguguugacugaauugggg

SEQ ID NO: 470662 - RNA, 22 nt, Human
ucucauucauacccuacaugcu

SEQ ID NO: 470663 - RNA, 22 nt, Human
ucugggagcacacgcagugauc

SEQ ID NO: 470664 - RNA, 23 nt, Human
cccuguagcccaggacaggcuuu

SEQ ID NO: 470665 - RNA, 22 nt, Human
gagcugccaagauuacaaucag

SEQ ID NO: 470666 - RNA, 22 nt, Human
caaauaucuuuggcaaagagaa

SEQ ID NO: 470667 - RNA, 17 nt, Human
agcuccugcccauggcu

SEQ ID NO: 470668 - RNA, 22 nt, Human
ggaggaugccaagcugugcaca

SEQ ID NO: 470669 - RNA, 22 nt, Human
gcucagaggaugcuccuuuaug

SEQ ID NO: 470670 - RNA, 22 nt, Human
aggcucagagagcuguguccau

SEQ ID NO: 470671 - RNA, 22 nt, Human
ugggggugugccagggaccucc

SEQ ID NO: 470672 - RNA, 22 nt, Human
cugagccagcuggcaugugcua

SEQ ID NO: 470673 - RNA, 22 nt, Human
uuuuccucaggaaugcuaagcu

SEQ ID NO: 470674 - RNA, 22 nt, Human
aggcucagugcaaaucauucug

SEQ ID NO: 470675 - RNA, 22 nt, Human
aucuggaacaaagcuuaggaau

SEQ ID NO: 470676 - RNA, 22 nt, Human
gaggcaggcacuguuaucagca

SEQ ID NO: 470677 - RNA, 22 nt, Human
cuugcuuuguccagaaauucag

SEQ ID NO: 470678 - RNA, 22 nt, Human
ucagagaguuagugucuuagcu

SEQ ID NO: 470679 - RNA, 22 nt, Human
aggaaagggguagguguggacg

SEQ ID NO: 470680 - RNA, 22 nt, Human
aucacuguguauguauaugcag

SEQ ID NO: 470681 - RNA, 22 nt, Human
ccccuuccuuccucagacagcc

SEQ ID NO: 470682 - RNA, 20 nt, Human
caggcagaggaugcugacca

SEQ ID NO: 470683 - RNA, 22 nt, Human
ucaaaggcccauugucccguug

SEQ ID NO: 470684 - RNA, 22 nt, Human
gccaggcagauaugugagcuua

SEQ ID NO: 470685 - RNA, 22 nt, Human
agaaauguggaucguuuuaaaa

SEQ ID NO: 470686 - RNA, 22 nt, Human
ucugucugacaggguaugaacu

SEQ ID NO: 470687 - RNA, 22 nt, Human
ggcggggguccaggagccugca

SEQ ID NO: 470688 - RNA, 22 nt, Human
cagaacugggcagggagcagag

SEQ ID NO: 470689 - RNA, 22 nt, Human
caagccucagaaucuucuccau

SEQ ID NO: 470690 - RNA, 22 nt, Human
ggcagaagauaggacagggaau

SEQ ID NO: 470691 - RNA, 22 nt, Human
uucuaguucccucuggaaugua

SEQ ID NO: 470692 - RNA, 22 nt, Human
gauggcagguaguggucucauc

SEQ ID NO: 470693 - RNA, 22 nt, Human
ccacccagaccagggaucuggg

SEQ ID NO: 470694 - RNA, 22 nt, Human
gagguacagaguguuccaaugu

SEQ ID NO: 470695 - RNA, 22 nt, Human
uugcugaaaucuaugacauccu

SEQ ID NO: 470696 - RNA, 22 nt, Human
aagcaaagaguuuaguggguga

SEQ ID NO: 470697 - RNA, 22 nt, Human
ggcagaggaggggugaauuugc

SEQ ID NO: 470698 - RNA, 22 nt, Human
cuuaggaacgcucugccuagug

SEQ ID NO: 470699 - RNA, 22 nt, Human
gggucagcugcugggggcugac

SEQ ID NO: 470700 - RNA, 22 nt, Human
agccauccuacuaccucagcau

SEQ ID NO: 470701 - RNA, 22 nt, Human
caggaaaggugugucaugaugg

SEQ ID NO: 470702 - RNA, 22 nt, Human
accaggcagcacuuuccuugca

SEQ ID NO: 470703 - RNA, 22 nt, Human
auuuccaaucucugcauauggg

SEQ ID NO: 470704 - RNA, 21 nt, Human
aggcccagcuuuccucuugcu

SEQ ID NO: 470705 - RNA, 20 nt, Human
uccugggguaagccaugguc

SEQ ID NO: 470706 - RNA, 22 nt, Human
uuacauuagacccacuuucaug

SEQ ID NO: 470707 - RNA, 22 nt, Human
gcagggcaucccugagcgggug

SEQ ID NO: 470708 - RNA, 22 nt, Human
ugcguugcgcuccugcagcagg

SEQ ID NO: 470709 - RNA, 22 nt, Human
cuccugguucagagagcugaga

SEQ ID NO: 470710 - RNA, 22 nt, Human
gggcugacucaaccuugcaaag

SEQ ID NO: 470711 - RNA, 22 nt, Human
agggaggucuggcugcccugag

SEQ ID NO: 470712 - RNA, 22 nt, Human
cugcagggaacugaggcccaga

SEQ ID NO: 470713 - RNA, 22 nt, Human
aaaguguugggaagaaagugca

SEQ ID NO: 470714 - RNA, 22 nt, Human
acugcagccuagggaccacagu

SEQ ID NO: 470715 - RNA, 22 nt, Human
ggcucaggacacagugguuuag

SEQ ID NO: 470716 - RNA, 22 nt, Human
cagcaggaaaaucaauucugug

SEQ ID NO: 470717 - RNA, 21 nt, Human
ucuguacaucauugagucccc

SEQ ID NO: 470718 - RNA, 18 nt, Human
aaguaacagaagagcaca

SEQ ID NO: 470719 - RNA, 22 nt, Human
caggcccugggcaggaucagcc

SEQ ID NO: 470720 - RNA, 22 nt, Human
uggcagcacuagguacugagcu

SEQ ID NO: 470721 - RNA, 22 nt, Human
ccucccacauccuagcucugcu

SEQ ID NO: 470722 - RNA, 22 nt, Human
ggacacaguggaagacagcuug

SEQ ID NO: 470723 - RNA, 22 nt, Human
ucuacagacagagcagguggga

SEQ ID NO: 470724 - RNA, 22 nt, Human
gaaggccucacucugcagcaua

SEQ ID NO: 470725 - RNA, 22 nt, Human
cacagugcaugaugggcagaag

SEQ ID NO: 470726 - RNA, 22 nt, Human
cuaggaggcgggggcugcagua

SEQ ID NO: 470727 - RNA, 18 nt, Human
aggccugggaagcugagg

SEQ ID NO: 470728 - RNA, 22 nt, Human
gaggccugggagccuguccucc

SEQ ID NO: 470729 - RNA, 22 nt, Human
cugaaaauguuacacaggaaga

SEQ ID NO: 470730 - RNA, 22 nt, Human
uagggaggcuacuucuuguagg

SEQ ID NO: 470731 - RNA, 22 nt, Human
cuccagcuuuuucccaguuggc

SEQ ID NO: 470732 - RNA, 18 nt, Human
cugagggcagccccuggg

SEQ ID NO: 470733 - RNA, 19 nt, Human
ugucuuaauuaacucagag

SEQ ID NO: 470734 - RNA, 20 nt, Human
ggccugagcauggcuggcag

SEQ ID NO: 470735 - RNA, 21 nt, Human
acagagccgggcacaaagcug

SEQ ID NO: 470736 - RNA, 22 nt, Human
uuuucauuagaaugacugagaa

SEQ ID NO: 470737 - RNA, 22 nt, Human
caauguaucaaccagaaaguuc

SEQ ID NO: 470738 - RNA, 22 nt, Human
guacauuuugagguuaaaacaa

SEQ ID NO: 470739 - RNA, 22 nt, Human
aggguauguuuuuaucuacugu

SEQ ID NO: 470740 - RNA, 22 nt, Human
gggucuccauguuaacaucacu

SEQ ID NO: 470741 - RNA, 21 nt, Human
ucccagagugcuugggacugc

SEQ ID NO: 470742 - RNA, 19 nt, Human
uccuuugaauaucaguuga

SEQ ID NO: 470743 - RNA, 22 nt, Human
uccaucaccauuucugcgagcu

SEQ ID NO: 470744 - RNA, 22 nt, Human
gcaaaucaccaccuagcuggau

SEQ ID NO: 470745 - RNA, 22 nt, Human
caagcuggaguuccucagagug

SEQ ID NO: 470746 - RNA, 22 nt, Human
uggcugggagcuggaacugggc

SEQ ID NO: 470747 - RNA, 23 nt, Human
gcugcagcuguggauguucucag

SEQ ID NO: 470748 - RNA, 22 nt, Human
auugaaaggcaaaguaggaagc

SEQ ID NO: 470749 - RNA, 22 nt, Human
uuacaguauuguuaaacucuuu

SEQ ID NO: 470750 - RNA, 22 nt, Human
ugggaccugaagcagguuggca

SEQ ID NO: 470751 - RNA, 21 nt, Human
aauuacagauggaauuacaga

SEQ ID NO: 470752 - RNA, 18 nt, Human
aaaugcuaggcuacauga

SEQ ID NO: 470753 - RNA, 22 nt, Human
uuuuccuaguaggccuauuaga

SEQ ID NO: 470754 - RNA, 22 nt, Human
ucagcaauccucccacaggugg

SEQ ID NO: 470755 - RNA, 22 nt, Human
uagauaaauuagaaaguuuacu

SEQ ID NO: 470756 - RNA, 22 nt, Human
uucagugucaauuuuuaaauau

SEQ ID NO: 470757 - RNA, 18 nt, Human
acagaaauagcugugccu

SEQ ID NO: 470758 - RNA, 22 nt, Human
augaagauaagaccaggcugga

SEQ ID NO: 470759 - RNA, 22 nt, Human
ugauuuccaauaaggagaaugu

SEQ ID NO: 470760 - RNA, 22 nt, Human
aagaaaguggguaauaugauuu

SEQ ID NO: 470761 - RNA, 22 nt, Human
gguucacauauugagaguauuc

SEQ ID NO: 470762 - RNA, 22 nt, Human
agagcugaauuuggguggugga

SEQ ID NO: 470763 - RNA, 22 nt, Human
aagaacuuccuaauauauuuuc

SEQ ID NO: 470764 - RNA, 21 nt, Human
ugggaccuauuucaacuggau

SEQ ID NO: 470765 - RNA, 22 nt, Human
caggccugagacaucugagaua

SEQ ID NO: 470766 - RNA, 22 nt, Human
gcaggggcugcugggaacucgg

SEQ ID NO: 470767 - RNA, 22 nt, Human
ccagagaccagaacauggggau

SEQ ID NO: 470768 - RNA, 22 nt, Human
gucccaggcuuauguggagcuu

SEQ ID NO: 470769 - RNA, 22 nt, Human
auccuugaaugacucugcccuc

SEQ ID NO: 470770 - RNA, 22 nt, Human
acacaguauuacaauaggugcu

SEQ ID NO: 470771 - RNA, 22 nt, Human
ucucaggaguagugggauccau

SEQ ID NO: 470772 - RNA, 22 nt, Human
gcagcauugugagguccugccc

SEQ ID NO: 470773 - RNA, 22 nt, Human
aacuagaacgucuaguugcugg

SEQ ID NO: 470774 - RNA, 22 nt, Human
cugcuuugauuagaagaguaca

SEQ ID NO: 470775 - RNA, 22 nt, Human
cuugccuucuuuuccuauagaa

SEQ ID NO: 470776 - RNA, 22 nt, Human
cauugaaaaacguugacugagu

SEQ ID NO: 470777 - RNA, 22 nt, Human
auugaaagguuuugagcagaua

SEQ ID NO: 470778 - RNA, 22 nt, Human
gcagaggaggacccaggaauua

SEQ ID NO: 470779 - RNA, 22 nt, Human
cauugacaguucuuuaaguugc

SEQ ID NO: 470780 - RNA, 22 nt, Human
aaagaacaaaugauauaugguu

SEQ ID NO: 470781 - RNA, 22 nt, Human
ugccucugguuaucugguaccu

SEQ ID NO: 470782 - RNA, 22 nt, Human
ugugcccauuccacuugaguac

SEQ ID NO: 470783 - RNA, 22 nt, Human
gugauuucagguuuuucauacu

SEQ ID NO: 470784 - RNA, 22 nt, Human
gggcaugagagggcagcuggca

SEQ ID NO: 470785 - RNA, 22 nt, Human
ggcaggguggcccuccagugag

SEQ ID NO: 470786 - RNA, 22 nt, Human
uagggcuccacucccagagauu

SEQ ID NO: 470787 - RNA, 22 nt, Human
cugcugugugcuuacuuggguu

SEQ ID NO: 470788 - RNA, 22 nt, Human
ggccuggaagaggacagagaaa

SEQ ID NO: 470789 - RNA, 22 nt, Human
acaguggaggccauaugguccu

SEQ ID NO: 470790 - RNA, 19 nt, Human
gaucagagugucagcuugu

SEQ ID NO: 470791 - RNA, 22 nt, Human
gccugccacgcaugcagaguca

SEQ ID NO: 470792 - RNA, 22 nt, Human
caggaggcccaaagggcgcaga

SEQ ID NO: 470793 - RNA, 22 nt, Human
ggccuugggcagacacgucaca

SEQ ID NO: 470794 - RNA, 22 nt, Human
gaaaacugugauuagaaugccu

SEQ ID NO: 470795 - RNA, 22 nt, Human
uuuuaauacugcuauuguagga

SEQ ID NO: 470796 - RNA, 22 nt, Human
gagcuucccucugcagucccug

SEQ ID NO: 470797 - RNA, 22 nt, Human
aagauuauggcagauaacaauu

SEQ ID NO: 470798 - RNA, 22 nt, Human
aagggugggcccuggcagccau

SEQ ID NO: 470799 - RNA, 22 nt, Human
cagggcagggccacacccccug

SEQ ID NO: 470800 - RNA, 22 nt, Human
gcucugagccgggggccugucc

SEQ ID NO: 470801 - RNA, 22 nt, Human
agggccagcugaugagaaugag

SEQ ID NO: 470802 - RNA, 21 nt, Human
agaggcaggcauuaaguacac

SEQ ID NO: 470803 - RNA, 22 nt, Human
ugacauuuaucaaagaaauggu

SEQ ID NO: 470804 - RNA, 22 nt, Human
agaggcuguuacacucccagau

SEQ ID NO: 470805 - RNA, 20 nt, Human
ggcagcucacuacuuucugu

SEQ ID NO: 470806 - RNA, 22 nt, Human
cuggccuggucuggccucucca

SEQ ID NO: 470807 - RNA, 22 nt, Human
ccaggcugcuguugguguccgc

SEQ ID NO: 470808 - RNA, 22 nt, Human
auagucuuagucuauaguuuug

SEQ ID NO: 470809 - RNA, 22 nt, Human
aguaauaauuuauauuagggag

SEQ ID NO: 470810 - RNA, 22 nt, Human
uccagucucuacucugagauaa

SEQ ID NO: 470811 - RNA, 22 nt, Human
agggcccuccccgcucagggca

SEQ ID NO: 470812 - RNA, 21 nt, Human
ucucugguuggaguugugcca

SEQ ID NO: 470813 - RNA, 22 nt, Human
gaagagcugacagugucauccu

SEQ ID NO: 470814 - RNA, 22 nt, Human
ucagggugaaccaggcaggaau

SEQ ID NO: 470815 - RNA, 22 nt, Human
caucacugacgcugagauucca

SEQ ID NO: 470816 - RNA, 20 nt, Human
guucucacugaucugcaggg

SEQ ID NO: 470817 - RNA, 22 nt, Human
gacaaaggaucagagguuggga

SEQ ID NO: 470818 - RNA, 22 nt, Human
acaaaggcaggauugacuuagu

SEQ ID NO: 470819 - RNA, 22 nt, Human
ccugggcucuauccugacccag

SEQ ID NO: 470820 - RNA, 22 nt, Human
cccuguacagucucuguggcac

SEQ ID NO: 470821 - RNA, 22 nt, Human
ucuguccauucagccauccauc

SEQ ID NO: 470822 - RNA, 18 nt, Human
gagcugggagaaggaagg

SEQ ID NO: 470823 - RNA, 22 nt, Human
aggguauaaagagcaagcagaa

SEQ ID NO: 470824 - RNA, 21 nt, Human
ucacacacguuuccaagggca

SEQ ID NO: 470825 - RNA, 22 nt, Human
aggcucagucuguucaugcacu

SEQ ID NO: 470826 - RNA, 22 nt, Human
ccugucuggccuuccacggggg

SEQ ID NO: 470827 - RNA, 22 nt, Human
uagaacacuugaccacugcucc

SEQ ID NO: 470828 - RNA, 22 nt, Human
uugaagaggacuuugcagcugu

SEQ ID NO: 470829 - RNA, 22 nt, Human
cagcaaaauuugaggauugccu

SEQ ID NO: 470830 - RNA, 22 nt, Human
caggaugugaggaggccauuug

SEQ ID NO: 470831 - RNA, 22 nt, Human
ccagggcaauuauuuggagggu

SEQ ID NO: 470832 - RNA, 22 nt, Human
uaacagaauccuguuauugcca

SEQ ID NO: 470833 - RNA, 22 nt, Human
agccuggaggccaggagacagu

SEQ ID NO: 470834 - RNA, 22 nt, Human
acacuguguggucucucucgga

SEQ ID NO: 470835 - RNA, 22 nt, Human
aggaggugacagccugcaucug

SEQ ID NO: 470836 - RNA, 22 nt, Human
aggcgcagaaggccaggggccu

SEQ ID NO: 470837 - RNA, 22 nt, Human
cugcccaggcugaaggaacauc

SEQ ID NO: 470838 - RNA, 22 nt, Human
cugggcugcaggaguggggcaa

SEQ ID NO: 470839 - RNA, 22 nt, Human
agcagcugccagagagaguucc

SEQ ID NO: 470840 - RNA, 22 nt, Human
gggccccuuguaucucuggcuc

SEQ ID NO: 470841 - RNA, 22 nt, Human
cuauuauuuccucaucuauaaa

SEQ ID NO: 470842 - RNA, 22 nt, Human
ccacagagacagagcccagggu

SEQ ID NO: 470843 - RNA, 22 nt, Human
aguggggaagagcaugggcccu

SEQ ID NO: 470844 - RNA, 22 nt, Human
aaucaagaaaaugaggauucuu

SEQ ID NO: 470845 - RNA, 22 nt, Human
acagcagcuaaccccugggcca

SEQ ID NO: 470846 - RNA, 22 nt, Human
uugggugcugucauggggcacg

SEQ ID NO: 470847 - RNA, 22 nt, Human
cccagcucaagcagagagcuaa

SEQ ID NO: 470848 - RNA, 22 nt, Human
uucaugugaauauauuugucuu

SEQ ID NO: 470849 - RNA, 22 nt, Human
agugucauuccagggacccucg

SEQ ID NO: 470850 - RNA, 22 nt, Human
gucuucuguaagaugagguccc

SEQ ID NO: 470851 - RNA, 19 nt, Human
cccucaggucugagcaguc

SEQ ID NO: 470852 - RNA, 22 nt, Human
agggacaguuacaucaucagac

SEQ ID NO: 470853 - RNA, 22 nt, Human
ugcugccagggcucugcccaca

SEQ ID NO: 470854 - RNA, 22 nt, Human
agguauagaauugaaaggguuu

SEQ ID NO: 470855 - RNA, 22 nt, Human
aaacaugagcaucucuucaagc

SEQ ID NO: 470856 - RNA, 22 nt, Human
cagcaauaaugucuacaaaucu

SEQ ID NO: 470857 - RNA, 22 nt, Human
cagcuuuauuaaugauugucuu

SEQ ID NO: 470858 - RNA, 22 nt, Human
ccagcuggaagagugcagaacu

SEQ ID NO: 470859 - RNA, 22 nt, Human
uguuccaucaguuuuugguuga

SEQ ID NO: 470860 - RNA, 22 nt, Human
gggcuguaggagcuggaauggg

SEQ ID NO: 470861 - RNA, 22 nt, Human
uagaaagugaagguuaauuaau

SEQ ID NO: 470862 - RNA, 22 nt, Human
gcagcauuaccaagacauggca

SEQ ID NO: 470863 - RNA, 22 nt, Human
agccaggcucaaggccugcucc

SEQ ID NO: 470864 - RNA, 22 nt, Human
gccuggagugguccugcugccc

SEQ ID NO: 470865 - RNA, 21 nt, Human
ugcugccaucaugcagagaug

SEQ ID NO: 470866 - RNA, 22 nt, Human
ggcucccacccauagggcgagu

SEQ ID NO: 470867 - RNA, 22 nt, Human
ggcacugacacuagcauggcac

SEQ ID NO: 470868 - RNA, 17 nt, Human
ucaggauguagcaguag

SEQ ID NO: 470869 - RNA, 22 nt, Human
ccucacugcuauguguuugcuc

SEQ ID NO: 470870 - RNA, 19 nt, Human
ggcucucccuugagagagc

SEQ ID NO: 470871 - RNA, 22 nt, Human
ucacagggcauuauggcuccag

SEQ ID NO: 470872 - RNA, 22 nt, Human
ucacauuuguuccucugcacuu

SEQ ID NO: 470873 - RNA, 22 nt, Human
ugcugccuuagcagccaggcaa

SEQ ID NO: 470874 - RNA, 21 nt, Human
ccugggagaucagcugccuuc

SEQ ID NO: 470875 - RNA, 22 nt, Human
uggagcugauacagcuggcuuu

SEQ ID NO: 470876 - RNA, 22 nt, Human
aaacacuagcaggaagcacuga

SEQ ID NO: 470877 - RNA, 22 nt, Human
gagguauguaugcuacauucuu

SEQ ID NO: 470878 - RNA, 23 nt, Human
ugccucugccucccuagucugca

SEQ ID NO: 470879 - RNA, 22 nt, Human
aaaggccaauaaagacaagcug

SEQ ID NO: 470880 - RNA, 22 nt, Human
agaaacauuuagauuauauguc

SEQ ID NO: 470881 - RNA, 22 nt, Human
gccaggccugcaagugcuggug

SEQ ID NO: 470882 - RNA, 22 nt, Human
aaagaauuuguacacccuacua

SEQ ID NO: 470883 - RNA, 22 nt, Human
ucuucauuccguagauauuuau

SEQ ID NO: 470884 - RNA, 22 nt, Human
cugccuggagcauucugaaggu

SEQ ID NO: 470885 - RNA, 22 nt, Human
cugggagucaccaggagcaagg

SEQ ID NO: 470886 - RNA, 22 nt, Human
gcacugaacuuuaaucauuucu

SEQ ID NO: 470887 - RNA, 22 nt, Human
uagauuucucauucauagauug

SEQ ID NO: 470888 - RNA, 22 nt, Human
acccaggacucucuuccaguag

SEQ ID NO: 470889 - RNA, 22 nt, Human
gcagcugcuggaaguuccugcc

SEQ ID NO: 470890 - RNA, 22 nt, Human
ugccugucagggggagugggaa

SEQ ID NO: 470891 - RNA, 22 nt, Human
uguggcaguauaagagcuagaa

SEQ ID NO: 470892 - RNA, 22 nt, Human
ccaaggagaaaugcugugcuuu

SEQ ID NO: 470893 - RNA, 22 nt, Human
cucacugugccuuuucccaaac

SEQ ID NO: 470894 - RNA, 22 nt, Human
uuggaaggugagucccuggguu

SEQ ID NO: 470895 - RNA, 22 nt, Human
ucucagagaugucaagagucua

SEQ ID NO: 470896 - RNA, 22 nt, Human
ugucuuccucuuggcuugagcu

SEQ ID NO: 470897 - RNA, 22 nt, Human
cagaaguaagauuacugugagu

SEQ ID NO: 470898 - RNA, 22 nt, Human
agaugaagauaucugcaggggc

SEQ ID NO: 470899 - RNA, 22 nt, Human
caggccucagagaguggcgggg

SEQ ID NO: 470900 - RNA, 22 nt, Human
ugcuggagaggaaggugggguc

SEQ ID NO: 470901 - RNA, 22 nt, Human
ugggccugggcuccuguccucu

SEQ ID NO: 470902 - RNA, 22 nt, Human
auggauaagaacaaauaucuga

SEQ ID NO: 470903 - RNA, 22 nt, Human
ucugugcaggaagucauuauga

SEQ ID NO: 470904 - RNA, 22 nt, Human
ucacacacauuugcugucugau

SEQ ID NO: 470905 - RNA, 22 nt, Human
gaagagcugcaguuuccugggc

SEQ ID NO: 470906 - RNA, 22 nt, Human
uugucuguccaggcaccccaag

SEQ ID NO: 470907 - RNA, 22 nt, Human
ugggcagaggcucugaagucca

SEQ ID NO: 470908 - RNA, 22 nt, Human
aaggaguuuggguagucauaca

SEQ ID NO: 470909 - RNA, 22 nt, Human
acaguaaugauucugagucucu

SEQ ID NO: 470910 - RNA, 22 nt, Human
ucucugucccuaggagccuugc

SEQ ID NO: 470911 - RNA, 22 nt, Human
auacaaauuuauagaugcauuu

SEQ ID NO: 470912 - RNA, 22 nt, Human
cugggcuucucccccuggcaga

SEQ ID NO: 470913 - RNA, 22 nt, Human
ggcagaggugacagugucuuuu

SEQ ID NO: 470914 - RNA, 22 nt, Human
cuguccuggagggcauaggacg

SEQ ID NO: 470915 - RNA, 22 nt, Human
ugggcuccguugccuggggcag

SEQ ID NO: 470916 - RNA, 22 nt, Human
caggggcucugggugaugugag

SEQ ID NO: 470917 - RNA, 22 nt, Human
agagccuugaagaucuggaaaa

SEQ ID NO: 470918 - RNA, 22 nt, Human
ugcauuaugcuugugcuguaua

SEQ ID NO: 470919 - RNA, 22 nt, Human
gugugcagugagcaaaagaucu

SEQ ID NO: 470920 - RNA, 22 nt, Human
uuguuuuuaugaacauccagga

SEQ ID NO: 470921 - RNA, 23 nt, Human
cuggcuccgaagacuccaggauc

SEQ ID NO: 470922 - RNA, 22 nt, Human
guggcccaggcuuggcgcuggc

SEQ ID NO: 470923 - RNA, 22 nt, Human
ccaggcaggcagcguucucagg

SEQ ID NO: 470924 - RNA, 22 nt, Human
uagcugugagcacccaggcugu

SEQ ID NO: 470925 - RNA, 19 nt, Human
aggugaugugacucuagaa

SEQ ID NO: 470926 - RNA, 22 nt, Human
gaggcuggcagaaaagcacagg

SEQ ID NO: 470927 - RNA, 22 nt, Human
uggagcaagcuggagagaacau

SEQ ID NO: 470928 - RNA, 22 nt, Human
ccuggagcgcgggucaagcugg

SEQ ID NO: 470929 - RNA, 22 nt, Human
gcacugcagguggguggagagg

SEQ ID NO: 470930 - RNA, 21 nt, Human
ccauaauuuuguuucagaagu

SEQ ID NO: 470931 - RNA, 22 nt, Human
agggcagcuaaggugcugacug

SEQ ID NO: 470932 - RNA, 22 nt, Human
gcuguccucugaucucuggagg

SEQ ID NO: 470933 - RNA, 22 nt, Human
aauuaugauuggucuaaaccag

SEQ ID NO: 470934 - RNA, 22 nt, Human
uccucugcuccaggcuggacuu

SEQ ID NO: 470935 - RNA, 22 nt, Human
agaguucugcucuucucaguga

SEQ ID NO: 470936 - RNA, 22 nt, Human
ggcagcucacugauuagcaauu

SEQ ID NO: 470937 - RNA, 22 nt, Human
acaaaguuauucuuucagagga

SEQ ID NO: 470938 - RNA, 22 nt, Human
uuugcauuccugccugcauuca

SEQ ID NO: 470939 - RNA, 22 nt, Human
cccagccucuguuugcuccucu

SEQ ID NO: 470940 - RNA, 22 nt, Human
gccaaaucacagggccaaaagc

SEQ ID NO: 470941 - RNA, 22 nt, Human
aacuuucuuucacagaaguauc

SEQ ID NO: 470942 - RNA, 22 nt, Human
gagggacagcuaaagagaaauu

SEQ ID NO: 470943 - RNA, 22 nt, Human
auaacagaugugaagugcuaau

SEQ ID NO: 470944 - RNA, 22 nt, Human
ccaaggagcaaguuuacaccug

SEQ ID NO: 470945 - RNA, 22 nt, Human
aagccaggccauucucugguuc

SEQ ID NO: 470946 - RNA, 22 nt, Human
ccuggcucuucagagguuccua

SEQ ID NO: 470947 - RNA, 22 nt, Human
ugaggcuugucucagauggggg

SEQ ID NO: 470948 - RNA, 22 nt, Human
gcuggccauauauuuugcuguu

SEQ ID NO: 470949 - RNA, 22 nt, Human
agcugccacagagccuggccag

SEQ ID NO: 470950 - RNA, 22 nt, Human
auggcagcaaaugucuggcugg

SEQ ID NO: 470951 - RNA, 22 nt, Human
ugaaggaaagagggaacauccc

SEQ ID NO: 470952 - RNA, 23 nt, Human
cgcccagccucagugaccugggc

SEQ ID NO: 470953 - RNA, 22 nt, Human
ggcuguggacacugagcucaga

SEQ ID NO: 470954 - RNA, 22 nt, Human
auguacacaugcaugcaugugc

SEQ ID NO: 470955 - RNA, 22 nt, Human
ugcagcuccucuggcugccuga

SEQ ID NO: 470956 - RNA, 22 nt, Human
ggcaggagaauggcgugaacuc

SEQ ID NO: 470957 - RNA, 22 nt, Human
cugagccaaggggacagugaca

SEQ ID NO: 470958 - RNA, 22 nt, Human
ucauugaacgaagagcuccauu

SEQ ID NO: 470959 - RNA, 22 nt, Human
aagccaggcaugcuuggacagu

SEQ ID NO: 470960 - RNA, 22 nt, Human
gaguucaguguuucuaguagug

SEQ ID NO: 470961 - RNA, 19 nt, Human
ggcccaaguacugagugcc

SEQ ID NO: 470962 - RNA, 22 nt, Human
aaggcugaguaaaacagagaac

SEQ ID NO: 470963 - RNA, 23 nt, Human
uccuucagagccucccuccaagc

SEQ ID NO: 470964 - RNA, 22 nt, Human
ccuaggcccuaggcuuccauca

SEQ ID NO: 470965 - RNA, 18 nt, Human
uugagggaggggcagagu

SEQ ID NO: 470966 - RNA, 19 nt, Human
ugcaggaggacugagcaga

SEQ ID NO: 470967 - RNA, 22 nt, Human
ggcugccucugaugugcagacg

SEQ ID NO: 470968 - RNA, 22 nt, Human
ugcagggcagcuagggagcuuu

SEQ ID NO: 470969 - RNA, 22 nt, Human
agagccugcagcugugaagaaa

SEQ ID NO: 470970 - RNA, 22 nt, Human
uguccuuuuggcugucuauggu

SEQ ID NO: 470971 - RNA, 22 nt, Human
acugucuccucaucaugccugg

SEQ ID NO: 470972 - RNA, 22 nt, Human
gaauuguagagggaacagaagc

SEQ ID NO: 470973 - RNA, 22 nt, Human
agcucauggugcuaucucaggg

SEQ ID NO: 470974 - RNA, 22 nt, Human
ugggcugcacccucagccucug

SEQ ID NO: 470975 - RNA, 22 nt, Human
cugggcugcagcgggagcgacg

SEQ ID NO: 470976 - RNA, 22 nt, Human
uguucaauccccagguccugaa

SEQ ID NO: 470977 - RNA, 22 nt, Human
uuuaauuuucugggcccagcag

SEQ ID NO: 470978 - RNA, 22 nt, Human
uguuccauaaguggugcuuugu

SEQ ID NO: 470979 - RNA, 20 nt, Human
gugcuucagaagccauugcu

SEQ ID NO: 470980 - RNA, 23 nt, Human
ucuguacaauugagaagagaaca

SEQ ID NO: 470981 - RNA, 22 nt, Human
ccuggcuccugccucugcaggg

SEQ ID NO: 470982 - RNA, 22 nt, Human
agagucagcuuaugacacaguc

SEQ ID NO: 470983 - RNA, 22 nt, Human
gccucugcggggcccgagcccg

SEQ ID NO: 470984 - RNA, 22 nt, Human
uacaaaguuugggguccucaaa

SEQ ID NO: 470985 - RNA, 22 nt, Human
gcugcucucucccuaaguuggg

SEQ ID NO: 470986 - RNA, 22 nt, Human
ggggacugccuuccacagacac

SEQ ID NO: 470987 - RNA, 22 nt, Human
gggcugagucugcugccuguca

SEQ ID NO: 470988 - RNA, 22 nt, Human
accagggcccgggagagcucuc

SEQ ID NO: 470989 - RNA, 22 nt, Human
ugaagcagcaccauuuuagagc

SEQ ID NO: 470990 - RNA, 22 nt, Human
gaguuauuaauggcugaguuug

SEQ ID NO: 470991 - RNA, 22 nt, Human
gagcugcugguugcuggugccu

SEQ ID NO: 470992 - RNA, 20 nt, Human
agggcagagggauuacaggc

SEQ ID NO: 470993 - RNA, 18 nt, Human
ggcaugugagugcugagg

SEQ ID NO: 470994 - RNA, 22 nt, Human
guaaacaucgacccaacagggg

SEQ ID NO: 470995 - RNA, 17 nt, Human
uguuccauuugaccacc

SEQ ID NO: 470996 - RNA, 22 nt, Human
aggcacugagaggcuguguugc

SEQ ID NO: 470997 - RNA, 22 nt, Human
gaaaaaugagcugaugucaggg

SEQ ID NO: 470998 - RNA, 22 nt, Human
guuaauaaagguauagaaucag

SEQ ID NO: 470999 - RNA, 22 nt, Human
gcucuggguagccacugccugg

SEQ ID NO: 471000 - RNA, 22 nt, Human
ucaaauaugugauagaagcuaa

SEQ ID NO: 471001 - RNA, 22 nt, Human
aggcaguggagcuggaauaggc

SEQ ID NO: 471002 - RNA, 22 nt, Human
auuauaggcuugagccaccgug

SEQ ID NO: 471003 - RNA, 22 nt, Human
agggcagagaucugagugggca

SEQ ID NO: 471004 - RNA, 22 nt, Human
cucuccuggggagcacacacac

SEQ ID NO: 471005 - RNA, 22 nt, Human
uccaguggcacuggagacuaga

SEQ ID NO: 471006 - RNA, 22 nt, Human
gauggguggucucagacuugcc

SEQ ID NO: 471007 - RNA, 19 nt, Human
cugggagguguucagagaa

SEQ ID NO: 471008 - RNA, 22 nt, Human
cugggcucagaugagaggaagg

SEQ ID NO: 471009 - RNA, 19 nt, Human
acagcagggauuuuuggag

SEQ ID NO: 471010 - RNA, 22 nt, Human
ggugggcaacauuuggccugag

SEQ ID NO: 471011 - RNA, 22 nt, Human
gaggcagagaccuucaggaccu

SEQ ID NO: 471012 - RNA, 22 nt, Human
acauuugacauuuaguaucagc

SEQ ID NO: 471013 - RNA, 22 nt, Human
ccacugggggcugcaggcacuc

SEQ ID NO: 471014 - RNA, 22 nt, Human
ugcauacacaagcauacaugua

SEQ ID NO: 471015 - RNA, 22 nt, Human
uguguguauaugcauuuaucua

SEQ ID NO: 471016 - RNA, 22 nt, Human
uggcucuguugugcugagccag

SEQ ID NO: 471017 - RNA, 22 nt, Human
aagccgggccugagaaaugaca

SEQ ID NO: 471018 - RNA, 22 nt, Human
gauuuauugucccuguccugcu

SEQ ID NO: 471019 - RNA, 22 nt, Human
uggcacugaccccaggccugug

SEQ ID NO: 471020 - RNA, 22 nt, Human
agauuguagaaacuguagcauu

SEQ ID NO: 471021 - RNA, 22 nt, Human
ugaggcagugugagauaauaaa

SEQ ID NO: 471022 - RNA, 20 nt, Human
acauguacuaaugaauacag

SEQ ID NO: 471023 - RNA, 21 nt, Human
ccuuuacaauuuugcauuccu

SEQ ID NO: 471024 - RNA, 22 nt, Human
gucccuggggaaucagcuggag

SEQ ID NO: 471025 - RNA, 22 nt, Human
cugcucuguucccccaucaucu

SEQ ID NO: 471026 - RNA, 22 nt, Human
aagggcaggaaaagauggaugu

SEQ ID NO: 471027 - RNA, 22 nt, Human
acuguaaccaguguggugagag

SEQ ID NO: 471028 - RNA, 22 nt, Human
cagggcacggagaagucacccc

SEQ ID NO: 471029 - RNA, 22 nt, Human
uggaagaaggcagagaggcauu

SEQ ID NO: 471030 - RNA, 22 nt, Human
cagggugggcacccagccucca

SEQ ID NO: 471031 - RNA, 22 nt, Human
cagcccagcagucuuagccugc

SEQ ID NO: 471032 - RNA, 22 nt, Human
uccucagggaagaugagccuca

SEQ ID NO: 471033 - RNA, 22 nt, Human
cccagcagaaucugaugagggc

SEQ ID NO: 471034 - RNA, 22 nt, Human
uauaauuuggggaaaguggugu

SEQ ID NO: 471035 - RNA, 22 nt, Human
auguccuuccauuuugaucugu

SEQ ID NO: 471036 - RNA, 20 nt, Human
cucuccucacccgugucagg

SEQ ID NO: 471037 - RNA, 22 nt, Human
cagugcaguugguggcaggggu

SEQ ID NO: 471038 - RNA, 22 nt, Human
cauuugcauaugaagaaguaag

SEQ ID NO: 471039 - RNA, 22 nt, Human
cccccaaggccaggcugagacc

SEQ ID NO: 471040 - RNA, 22 nt, Human
aagcuuuaugaucucucagcua

SEQ ID NO: 471041 - RNA, 22 nt, Human
uuacaaagagaaguuguagaau

SEQ ID NO: 471042 - RNA, 22 nt, Human
aagcagccuggcaugaugcuuu

SEQ ID NO: 471043 - RNA, 19 nt, Human
ggccccucucacaggaguu

SEQ ID NO: 471044 - RNA, 22 nt, Human
ggggaccuucccagagcaguug

SEQ ID NO: 471045 - RNA, 22 nt, Human
ugcauauuuguaugauguuuag

SEQ ID NO: 471046 - RNA, 22 nt, Human
agaaggcacucacacuggcacg

SEQ ID NO: 471047 - RNA, 19 nt, Human
gagcacagcggcauuuggu

SEQ ID NO: 471048 - RNA, 22 nt, Human
acuuccuggcugggugaccugg

SEQ ID NO: 471049 - RNA, 22 nt, Human
uaggcagggauuaggguugauu

SEQ ID NO: 471050 - RNA, 22 nt, Human
agaagccagaggcaguggguac

SEQ ID NO: 471051 - RNA, 22 nt, Human
uaaaugugggggccacgggcuu

SEQ ID NO: 471052 - RNA, 22 nt, Human
gcccucagaugggaaaggaggg

SEQ ID NO: 471053 - RNA, 22 nt, Human
aagcuuuaugacuuggagacag

SEQ ID NO: 471054 - RNA, 22 nt, Human
agaucaaagccaugagagauuu

SEQ ID NO: 471055 - RNA, 20 nt, Human
cagggcacacugcagccucg

SEQ ID NO: 471056 - RNA, 21 nt, Human
cccuguguuccacagcagaca

SEQ ID NO: 471057 - RNA, 22 nt, Human
acacagggauauuucagguggu

SEQ ID NO: 471058 - RNA, 22 nt, Human
cuugaaagcacuuaguaaauua

SEQ ID NO: 471059 - RNA, 22 nt, Human
ccucugagaccagcucugcacc

SEQ ID NO: 471060 - RNA, 22 nt, Human
ggagccugacagugcccagcau

SEQ ID NO: 471061 - RNA, 22 nt, Human
gcuuucucuucacugauguuca

SEQ ID NO: 471062 - RNA, 22 nt, Human
ccugggaguggcacucacagca

SEQ ID NO: 471063 - RNA, 22 nt, Human
aggagcccugcgggaggcagag

SEQ ID NO: 471064 - RNA, 22 nt, Human
caggccaggcugcauuugcccc

SEQ ID NO: 471065 - RNA, 22 nt, Human
cugggcugucaauggcccucug

SEQ ID NO: 471066 - RNA, 22 nt, Human
uggcagggugccaguugcgagu

SEQ ID NO: 471067 - RNA, 22 nt, Human
ccaaaggccaggcacugagguu

SEQ ID NO: 471068 - RNA, 22 nt, Human
gagccugggacugggggucaug

SEQ ID NO: 471069 - RNA, 22 nt, Human
ggugggcacauucagucucugu

SEQ ID NO: 471070 - RNA, 22 nt, Human
agaguggggaagguguugagaa

SEQ ID NO: 471071 - RNA, 22 nt, Human
gucauuguguggacauggagaa

SEQ ID NO: 471072 - RNA, 22 nt, Human
gaggacagcuuagggcuuccug

SEQ ID NO: 471073 - RNA, 22 nt, Human
aggcugcagaacagucaggugc

SEQ ID NO: 471074 - RNA, 22 nt, Human
agaauucuguucuucgggugug

SEQ ID NO: 471075 - RNA, 22 nt, Human
cacagaaguuucauagucucga

SEQ ID NO: 471076 - RNA, 22 nt, Human
uaaaugugcacuuuacuuuuca

SEQ ID NO: 471077 - RNA, 22 nt, Human
uuguguccugauuugacacaau

SEQ ID NO: 471078 - RNA, 22 nt, Human
ugggccacgugacccuuacccu

SEQ ID NO: 471079 - RNA, 22 nt, Human
aaguaugacauuuaagacaauu

SEQ ID NO: 471080 - RNA, 22 nt, Human
ggugaggcuaagugacacaggg

SEQ ID NO: 471081 - RNA, 22 nt, Human
cagggcagggagcuuagaauga

SEQ ID NO: 471082 - RNA, 22 nt, Human
gaguguucccacaccccaguug

SEQ ID NO: 471083 - RNA, 22 nt, Human
uggcucagucuggguugacuga

SEQ ID NO: 471084 - RNA, 22 nt, Human
gugcauuucucauacacuaaau

SEQ ID NO: 471085 - RNA, 22 nt, Human
uaaguucagaguucucauuugu

SEQ ID NO: 471086 - RNA, 22 nt, Human
uuggaaggcccugccuagcagg

SEQ ID NO: 471087 - RNA, 22 nt, Human
uuucacauguggaaugccaggu

SEQ ID NO: 471088 - RNA, 22 nt, Human
guuaaauucgaugauggauaaa

SEQ ID NO: 471089 - RNA, 22 nt, Human
gugcugcagagucucgugccgc

SEQ ID NO: 471090 - RNA, 22 nt, Human
caggaggcagagguugcaguga

SEQ ID NO: 471091 - RNA, 22 nt, Human
ccugucuguaucgguucagagu

SEQ ID NO: 471092 - RNA, 22 nt, Human
cuguacaggugaggagggggcu

SEQ ID NO: 471093 - RNA, 22 nt, Human
cagcucugaggaacacuccuuu

SEQ ID NO: 471094 - RNA, 22 nt, Human
caugggagcuaucuccaucacu

SEQ ID NO: 471095 - RNA, 22 nt, Human
augcagcuucaggauuaugaug

SEQ ID NO: 471096 - RNA, 22 nt, Human
caguacuuaguucucaugguuu

SEQ ID NO: 471097 - RNA, 22 nt, Human
acagccaggaauucuggagaag

SEQ ID NO: 471098 - RNA, 23 nt, Human
ugggccuggccucccaguccagc

SEQ ID NO: 471099 - RNA, 22 nt, Human
uggcugaauaauauucuguugu

SEQ ID NO: 471100 - RNA, 22 nt, Human
agauggagaaugacaauuaagg

SEQ ID NO: 471101 - RNA, 22 nt, Human
ggucccagguugacagggagac

SEQ ID NO: 471102 - RNA, 22 nt, Human
gaggaaaauauucagggagguu

SEQ ID NO: 471103 - RNA, 22 nt, Human
ccaggccuccugugaguggacc

SEQ ID NO: 471104 - RNA, 22 nt, Human
cuccaguaucuguaggaaaagg

SEQ ID NO: 471105 - RNA, 22 nt, Human
aaguuauugcagcaauccaagu

SEQ ID NO: 471106 - RNA, 22 nt, Human
uggccugccuucgcugagcuga

SEQ ID NO: 471107 - RNA, 22 nt, Human
uggcucuguucgccaucaggag

SEQ ID NO: 471108 - RNA, 22 nt, Human
aaguuauaucaucucauugacg

SEQ ID NO: 471109 - RNA, 22 nt, Human
agggcugcuccuccuucaggcc

SEQ ID NO: 471110 - RNA, 22 nt, Human
uccauuuacuauucucauaucg

SEQ ID NO: 471111 - RNA, 22 nt, Human
caagggcagaggcagggccccg

SEQ ID NO: 471112 - RNA, 22 nt, Human
cuuccccaaccccgacugugug

SEQ ID NO: 471113 - RNA, 21 nt, Human
gccugcaguuuugaagcccuu

SEQ ID NO: 471114 - RNA, 22 nt, Human
gccccagccaaggugacacgaa

SEQ ID NO: 471115 - RNA, 22 nt, Human
guacaguuuucaguguucacug

SEQ ID NO: 471116 - RNA, 22 nt, Human
gaaagcaguaaaugggucccau

SEQ ID NO: 471117 - RNA, 22 nt, Human
cccagggcuuuucucacuagac

SEQ ID NO: 471118 - RNA, 22 nt, Human
ccagcuccgggaguugcugcug

SEQ ID NO: 471119 - RNA, 22 nt, Human
uuaugacaggaaaaucacagaa

SEQ ID NO: 471120 - RNA, 22 nt, Human
aggcugagucaaguuaggguga

SEQ ID NO: 471121 - RNA, 22 nt, Human
gccaggcuguuuuuauuacugu

SEQ ID NO: 471122 - RNA, 22 nt, Human
cuguguggccucaagccagccu

SEQ ID NO: 471123 - RNA, 22 nt, Human
ggagcugucuguagggcacagg

SEQ ID NO: 471124 - RNA, 22 nt, Human
ccacugggcguuucuguccaau

SEQ ID NO: 471125 - RNA, 22 nt, Human
gcagcuuucugcaaugucaucc

SEQ ID NO: 471126 - RNA, 22 nt, Human
ccuggggagaagagcuuccccc

SEQ ID NO: 471127 - RNA, 22 nt, Human
uugugugguagcuucauugaac

SEQ ID NO: 471128 - RNA, 22 nt, Human
uugcaucuaccauaucaaagau

SEQ ID NO: 471129 - RNA, 22 nt, Human
aagagcuggaagugaagauaac

SEQ ID NO: 471130 - RNA, 22 nt, Human
uuauuuucagcuaggaaagcca

SEQ ID NO: 471131 - RNA, 22 nt, Human
uaaaauguuugcaagagaccag

SEQ ID NO: 471132 - RNA, 21 nt, Human
agcagccauggaugguaugua

SEQ ID NO: 471133 - RNA, 22 nt, Human
aacauaauguggccaaagucac

SEQ ID NO: 471134 - RNA, 22 nt, Human
aagaagguguggaaagaugcuc

SEQ ID NO: 471135 - RNA, 22 nt, Human
aacaugaaaguugcuaagugca

SEQ ID NO: 471136 - RNA, 22 nt, Human
gcagcauugcacuuuuguucuu

SEQ ID NO: 471137 - RNA, 22 nt, Human
ugagguguguccccagggaggu

SEQ ID NO: 471138 - RNA, 21 nt, Human
ugaaaguuggagucaaaugua

SEQ ID NO: 471139 - RNA, 22 nt, Human
uaaggcacccuucugaguagag

SEQ ID NO: 471140 - RNA, 22 nt, Human
uuuccucugacugcuccccugc

SEQ ID NO: 471141 - RNA, 22 nt, Human
uuggaaggagucaaccagcuga

SEQ ID NO: 471142 - RNA, 22 nt, Human
uacaugcaugucacagaaugaa

SEQ ID NO: 471143 - RNA, 22 nt, Human
gcagguggauuaucagaagugc

SEQ ID NO: 471144 - RNA, 22 nt, Human
uggagcagcuaagccucugaga

SEQ ID NO: 471145 - RNA, 22 nt, Human
uagacacauccguggaagcuuc

SEQ ID NO: 471146 - RNA, 22 nt, Human
aagaggucauaccagauaaggg

SEQ ID NO: 471147 - RNA, 22 nt, Human
caucacuguccucagcauucca

SEQ ID NO: 471148 - RNA, 22 nt, Human
uccagucaagcuugagaauuuc

SEQ ID NO: 471149 - RNA, 22 nt, Human
gaaucucaaggcuugugaggau

SEQ ID NO: 471150 - RNA, 22 nt, Human
ugagcccaggaguuggagaccg

SEQ ID NO: 471151 - RNA, 22 nt, Human
ggagccagugcccucuggugga

SEQ ID NO: 471152 - RNA, 22 nt, Human
agcugccacauggugucacugu

SEQ ID NO: 471153 - RNA, 22 nt, Human
ggcagcugaccuagcaccaucc

SEQ ID NO: 471154 - RNA, 19 nt, Human
ccucugcgcuguccugcuc

SEQ ID NO: 471155 - RNA, 22 nt, Human
aaaacuguaggaauugggugcc

SEQ ID NO: 471156 - RNA, 22 nt, Human
gagauuucuuuugaugccuguc

SEQ ID NO: 471157 - RNA, 22 nt, Human
aaucuguuuaguucugcguaug

SEQ ID NO: 471158 - RNA, 22 nt, Human
acauuuuuauucaucaaagcag

SEQ ID NO: 471159 - RNA, 22 nt, Human
gccugcagcaugcuaggucuug

SEQ ID NO: 471160 - RNA, 22 nt, Human
ugcuggggagugauugaccauc

SEQ ID NO: 471161 - RNA, 22 nt, Human
aaugcugcaagaggugaaaaga

SEQ ID NO: 471162 - RNA, 22 nt, Human
uggcagagucucuccuuuccag

SEQ ID NO: 471163 - RNA, 22 nt, Human
ucuagggaacaugggucaagcu

SEQ ID NO: 471164 - RNA, 22 nt, Human
cucugggcaggaccaguggacc

SEQ ID NO: 471165 - RNA, 22 nt, Human
ccugggaggcugugggucugcu

SEQ ID NO: 471166 - RNA, 21 nt, Human
gacaaagugaagcaggcagga

SEQ ID NO: 471167 - RNA, 22 nt, Human
ugcucugugguccaagauggcu

SEQ ID NO: 471168 - RNA, 19 nt, Human
guugaaaguaggugagggu

SEQ ID NO: 471169 - RNA, 22 nt, Human
uggccuuggcagugagaagagu

SEQ ID NO: 471170 - RNA, 22 nt, Human
ucugagggugggagaaggagcu

SEQ ID NO: 471171 - RNA, 22 nt, Human
agaaagaacguugguuaucuua

SEQ ID NO: 471172 - RNA, 22 nt, Human
cuguugucuccucucagauuau

SEQ ID NO: 471173 - RNA, 22 nt, Human
acagaaauauagaagguaggaa

SEQ ID NO: 471174 - RNA, 22 nt, Human
aaggcaguuugggccaccaucu

SEQ ID NO: 471175 - RNA, 22 nt, Human
ccuggccaggcauggagucaca

SEQ ID NO: 471176 - RNA, 22 nt, Human
ugguagggacacuaugcagaaa

SEQ ID NO: 471177 - RNA, 22 nt, Human
cccagagcuccgguccugccca

SEQ ID NO: 471178 - RNA, 21 nt, Human
agaagccaugugguggagaac

SEQ ID NO: 471179 - RNA, 22 nt, Human
agugaaauacugucguuuuuag

SEQ ID NO: 471180 - RNA, 22 nt, Human
accagccugucugagucguggg

SEQ ID NO: 471181 - RNA, 22 nt, Human
gcagagccaugggagguuuuug

SEQ ID NO: 471182 - RNA, 22 nt, Human
aaacucuuuccacgauuacuuu

SEQ ID NO: 471183 - RNA, 22 nt, Human
auacaguauuaccuguucagga

SEQ ID NO: 471184 - RNA, 22 nt, Human
gugaaaucugaggcccaugaug

SEQ ID NO: 471185 - RNA, 22 nt, Human
agccugagagccaagcugugca

SEQ ID NO: 471186 - RNA, 22 nt, Human
uggugcugacaguucugagugc

SEQ ID NO: 471187 - RNA, 22 nt, Human
cagcagggaagcugugcuguuu

SEQ ID NO: 471188 - RNA, 22 nt, Human
gguuucaaugagaagugcuugu

SEQ ID NO: 471189 - RNA, 22 nt, Human
agggagccagaguugggagcuc

SEQ ID NO: 471190 - RNA, 22 nt, Human
agccuucauaaucuugggcuuu

SEQ ID NO: 471191 - RNA, 22 nt, Human
agcugccugggcuuguacaccu

SEQ ID NO: 471192 - RNA, 20 nt, Human
uggcuccugcgguggaacca

SEQ ID NO: 471193 - RNA, 22 nt, Human
cucaggauucucgacacucaca

SEQ ID NO: 471194 - RNA, 22 nt, Human
ucacaggguaucugggauggau

SEQ ID NO: 471195 - RNA, 22 nt, Human
cuuuggaaaaauaccuggcaua

SEQ ID NO: 471196 - RNA, 22 nt, Human
ggcugccugaacuuuggggaaa

SEQ ID NO: 471197 - RNA, 22 nt, Human
uggcagagugcggcauccccug

SEQ ID NO: 471198 - RNA, 22 nt, Human
uggcagggucuugcuguguugc

SEQ ID NO: 471199 - RNA, 22 nt, Human
caaaugcagauucaggaguucu

SEQ ID NO: 471200 - RNA, 19 nt, Human
uggcauugguccagauaaa

SEQ ID NO: 471201 - RNA, 22 nt, Human
gaggaaccaaucugugauauuc

SEQ ID NO: 471202 - RNA, 22 nt, Human
agauuucacaugcugcucuauu

SEQ ID NO: 471203 - RNA, 20 nt, Human
uuaagaaaagcacauccugc

SEQ ID NO: 471204 - RNA, 22 nt, Human
uccaggcuaauuuugcauuguu

SEQ ID NO: 471205 - RNA, 23 nt, Human
ucuggcucuaugugacagcucuc

SEQ ID NO: 471206 - RNA, 21 nt, Human
ccuccaggugauuccgugcuc

SEQ ID NO: 471207 - RNA, 22 nt, Human
aaggcacuagcagaauuaguga

SEQ ID NO: 471208 - RNA, 22 nt, Human
ccagguggaaggucugugcucu

SEQ ID NO: 471209 - RNA, 22 nt, Human
cugugcaguaggucagggcugg

SEQ ID NO: 471210 - RNA, 22 nt, Human
caggauccuggcugcauggacg

SEQ ID NO: 471211 - RNA, 22 nt, Human
agugcauugcaucucugcuuca

SEQ ID NO: 471212 - RNA, 19 nt, Human
ccucuccgcccaccagccc

SEQ ID NO: 471213 - RNA, 22 nt, Human
gggugaggagcugccagucaug

SEQ ID NO: 471214 - RNA, 22 nt, Human
aagggcagaaagggacgcuuug

SEQ ID NO: 471215 - RNA, 22 nt, Human
cucugugggggagaggcagcug

SEQ ID NO: 471216 - RNA, 22 nt, Human
ugcuggcugggcugcuggagac

SEQ ID NO: 471217 - RNA, 22 nt, Human
aucuggcuuggguguggguagc

SEQ ID NO: 471218 - RNA, 22 nt, Human
guucaaguucauaucucuuaac

SEQ ID NO: 471219 - RNA, 18 nt, Human
gggcucugauccuucacc

SEQ ID NO: 471220 - RNA, 22 nt, Human
aaagaucagucugaagcaacau

SEQ ID NO: 471221 - RNA, 22 nt, Human
agggagcugcucugcuuccgug

SEQ ID NO: 471222 - RNA, 22 nt, Human
uuguuaaaaugcauauucuggu

SEQ ID NO: 471223 - RNA, 22 nt, Human
aaugaugguuaaacacuggagg

SEQ ID NO: 471224 - RNA, 22 nt, Human
guguacauauugagucugcuga

SEQ ID NO: 471225 - RNA, 22 nt, Human
ucucagagaucuuucugcaugu

SEQ ID NO: 471226 - RNA, 22 nt, Human
gcagacagcauguugggcuauu

SEQ ID NO: 471227 - RNA, 21 nt, Human
uggcugccuacaugcugcagg

SEQ ID NO: 471228 - RNA, 22 nt, Human
ugaucagucccaugaucuucca

SEQ ID NO: 471229 - RNA, 22 nt, Human
aagauuuccauuucuagcucau

SEQ ID NO: 471230 - RNA, 22 nt, Human
gcugccuuuuaaagccucgcuu

SEQ ID NO: 471231 - RNA, 22 nt, Human
agcagcugucccuuaacaucag

SEQ ID NO: 471232 - RNA, 22 nt, Human
ucucugggugauggcagggcac

SEQ ID NO: 471233 - RNA, 22 nt, Human
uccuggagggaggcggugcuac

SEQ ID NO: 471234 - RNA, 22 nt, Human
gcagggccagguacaagaagca

SEQ ID NO: 471235 - RNA, 22 nt, Human
uuuccucugcugccauugcccc

SEQ ID NO: 471236 - RNA, 22 nt, Human
cuccucuuuggggauuuacaca

SEQ ID NO: 471237 - RNA, 22 nt, Human
ucagggcacauucugcaguggc

SEQ ID NO: 471238 - RNA, 21 nt, Human
agugaaaugaaguguaugcuc

SEQ ID NO: 471239 - RNA, 22 nt, Human
cuguucaugcugauucuguaug

SEQ ID NO: 471240 - RNA, 22 nt, Human
ggcuuucuagaucuagcucugu

SEQ ID NO: 471241 - RNA, 22 nt, Human
ucccaggcuggcaggcagcagu

SEQ ID NO: 471242 - RNA, 22 nt, Human
ugccaggcauauggccucuuug

SEQ ID NO: 471243 - RNA, 22 nt, Human
ccaggcugggcuacaaguugag

SEQ ID NO: 471244 - RNA, 22 nt, Human
cugggcaguuuuacaucauugc

SEQ ID NO: 471245 - RNA, 22 nt, Human
cuugugcauuucauuccucagg

SEQ ID NO: 471246 - RNA, 22 nt, Human
cucugagagagcuggugagcac

SEQ ID NO: 471247 - RNA, 22 nt, Human
uacauguuugguaaaugauggc

SEQ ID NO: 471248 - RNA, 22 nt, Human
uuuuuaguagagguggguuuca

SEQ ID NO: 471249 - RNA, 22 nt, Human
uggcucagugacauuccuccca

SEQ ID NO: 471250 - RNA, 22 nt, Human
ggugcagaucuuucucuucagg

SEQ ID NO: 471251 - RNA, 22 nt, Human
uagcaggguaaauguagaugga

SEQ ID NO: 471252 - RNA, 22 nt, Human
cuggccacuggagguggcaccc

SEQ ID NO: 471253 - RNA, 22 nt, Human
caauaguaaauuacggaggaga

SEQ ID NO: 471254 - RNA, 22 nt, Human
uguacaaugccagggaacacca

SEQ ID NO: 471255 - RNA, 22 nt, Human
gcucuggacccuggaguggcug

SEQ ID NO: 471256 - RNA, 22 nt, Human
acagguggaggcuuuaggaggu

SEQ ID NO: 471257 - RNA, 22 nt, Human
cagagcugagaauguugaugcu

SEQ ID NO: 471258 - RNA, 22 nt, Human
uccucaggcggugaggaggggc

SEQ ID NO: 471259 - RNA, 22 nt, Human
ccucacugaagaggugacauuu

SEQ ID NO: 471260 - RNA, 22 nt, Human
cugccugggccggccacccucu

SEQ ID NO: 471261 - RNA, 22 nt, Human
agauuucccaaauacuuguuau

SEQ ID NO: 471262 - RNA, 22 nt, Human
ccagucccgcaugguccagaau

SEQ ID NO: 471263 - RNA, 22 nt, Human
agauuucccacuccauguauug

SEQ ID NO: 471264 - RNA, 22 nt, Human
uacuuuuagccuauuugauucu

SEQ ID NO: 471265 - RNA, 22 nt, Human
cucugggcuuguugaccugcac

SEQ ID NO: 471266 - RNA, 22 nt, Human
ugaggcagcaauugauuauuca

SEQ ID NO: 471267 - RNA, 22 nt, Human
gcaccugggcaaggauucagag

SEQ ID NO: 471268 - RNA, 23 nt, Human
uuucuguuggguauauauccaag

SEQ ID NO: 471269 - RNA, 22 nt, Human
ggggcuguuuuuggaauggcug

SEQ ID NO: 471270 - RNA, 22 nt, Human
cagccaucccagccugugguuc

SEQ ID NO: 471271 - RNA, 22 nt, Human
uaaauucuacaacuucaaagau

SEQ ID NO: 471272 - RNA, 22 nt, Human
auugaaagauaggcuacugugg

SEQ ID NO: 471273 - RNA, 22 nt, Human
uggggcuguggauucucacgaa

SEQ ID NO: 471274 - RNA, 22 nt, Human
caagggcauugcuugggaccuu

SEQ ID NO: 471275 - RNA, 22 nt, Human
guaacagaggguuugcagauau

SEQ ID NO: 471276 - RNA, 22 nt, Human
acagauuuuaaaugacacuccc

SEQ ID NO: 471277 - RNA, 22 nt, Human
cagcucccaguggcagcuccuu

SEQ ID NO: 471278 - RNA, 22 nt, Human
ggagacaguauggcuuguagcu

SEQ ID NO: 471279 - RNA, 22 nt, Human
ugaugaaacugagguuccaaga

SEQ ID NO: 471280 - RNA, 22 nt, Human
agccacagucugaugccugaga

SEQ ID NO: 471281 - RNA, 22 nt, Human
acacagggcugcgccugacccc

SEQ ID NO: 471282 - RNA, 22 nt, Human
ugcauugcauuugucaugaaga

SEQ ID NO: 471283 - RNA, 22 nt, Human
uucucacuauguauguagauug

SEQ ID NO: 471284 - RNA, 22 nt, Human
aggaagugcuaagagaacauca

SEQ ID NO: 471285 - RNA, 22 nt, Human
ugagccuggccugcagagacca

SEQ ID NO: 471286 - RNA, 22 nt, Human
uaccuugggguuuuguugcucu

SEQ ID NO: 471287 - RNA, 22 nt, Human
agcugcuguccuaggcacugua

SEQ ID NO: 471288 - RNA, 20 nt, Human
aguuuauuccaggagaacug

SEQ ID NO: 471289 - RNA, 22 nt, Human
ucaaagcaucagucaauuuagg

SEQ ID NO: 471290 - RNA, 23 nt, Human
caugccaguuugugcaggcagau

SEQ ID NO: 471291 - RNA, 22 nt, Human
uucagauguggcuuugucaggc

SEQ ID NO: 471292 - RNA, 22 nt, Human
ccaggagucaauaaaggaagcu

SEQ ID NO: 471293 - RNA, 22 nt, Human
ccuguguggaaaccgcaugacg

SEQ ID NO: 471294 - RNA, 22 nt, Human
agcugccaccucugccuuuggg

SEQ ID NO: 471295 - RNA, 22 nt, Human
aggggaggagcuuuucuugccu

SEQ ID NO: 471296 - RNA, 22 nt, Human
acaaagucacaauaauuaaccu

SEQ ID NO: 471297 - RNA, 22 nt, Human
gcucaggacuggaggagcgggg

SEQ ID NO: 471298 - RNA, 22 nt, Human
cagcaggguagguuguaucagu

SEQ ID NO: 471299 - RNA, 22 nt, Human
uugggacagaaaaggagaagau

SEQ ID NO: 471300 - RNA, 22 nt, Human
cacugcaggucugagauggggg

SEQ ID NO: 471301 - RNA, 22 nt, Human
uaaucacagaaacagacuguuu

SEQ ID NO: 471302 - RNA, 22 nt, Human
guccucugggagccuugagccu

SEQ ID NO: 471303 - RNA, 22 nt, Human
gcaggaugccagggcagcagcg

SEQ ID NO: 471304 - RNA, 22 nt, Human
uccugccuugccugggacauca

SEQ ID NO: 471305 - RNA, 22 nt, Human
uaacacugguauuucauuuagu

SEQ ID NO: 471306 - RNA, 22 nt, Human
cugucagcacucuacuacagau

SEQ ID NO: 471307 - RNA, 22 nt, Human
gcugaaggucucuggagagguc

SEQ ID NO: 471308 - RNA, 21 nt, Human
aagggagauaggaaucaggcc

SEQ ID NO: 471309 - RNA, 22 nt, Human
cccaagcagggugcagaggcau

SEQ ID NO: 471310 - RNA, 19 nt, Human
acccucucagugccugagg

SEQ ID NO: 471311 - RNA, 22 nt, Human
gccucccuguagaggccagccu

SEQ ID NO: 471312 - RNA, 22 nt, Human
ucaagagacaggacguguuuca

SEQ ID NO: 471313 - RNA, 22 nt, Human
agggcaugaagcaguggacagc

SEQ ID NO: 471314 - RNA, 22 nt, Human
uagaggcacccuggaggagacu

SEQ ID NO: 471315 - RNA, 22 nt, Human
cuuggcagagggcugggcucag

SEQ ID NO: 471316 - RNA, 22 nt, Human
acagagccaaaaggacauagua

SEQ ID NO: 471317 - RNA, 22 nt, Human
ugaggcagaguaagauacauga

SEQ ID NO: 471318 - RNA, 22 nt, Human
ugguccugccccgugcacagag

SEQ ID NO: 471319 - RNA, 17 nt, Human
uggcacagaggugcuau

SEQ ID NO: 471320 - RNA, 22 nt, Human
cugcucuguuucuuagcugggu

SEQ ID NO: 471321 - RNA, 21 nt, Human
aggaggaacccguggcugggc

SEQ ID NO: 471322 - RNA, 22 nt, Human
ccagcaggcagucauauccuuu

SEQ ID NO: 471323 - RNA, 22 nt, Human
ggcaaggccuugcccagcauuc

SEQ ID NO: 471324 - RNA, 22 nt, Human
ugaaaucuuagccauucugccu

SEQ ID NO: 471325 - RNA, 22 nt, Human
gaaaucugcuucuugcauagua

SEQ ID NO: 471326 - RNA, 22 nt, Human
accagagcuggcucugagcacc

SEQ ID NO: 471327 - RNA, 22 nt, Human
cagaagccugccucagaugcac

SEQ ID NO: 471328 - RNA, 22 nt, Human
uggccugaauuauggcagaucu

SEQ ID NO: 471329 - RNA, 22 nt, Human
ucccagccuuccagucugguuu

SEQ ID NO: 471330 - RNA, 22 nt, Human
ucacacagguuugcaaugauuu

SEQ ID NO: 471331 - RNA, 21 nt, Human
ucccugcuuucuggcccaguc

SEQ ID NO: 471332 - RNA, 22 nt, Human
gccuguuggguaacagaguuca

SEQ ID NO: 471333 - RNA, 22 nt, Human
accacccucagcagagcugaaa

SEQ ID NO: 471334 - RNA, 22 nt, Human
ucaggcugaaucauccuagcuu

SEQ ID NO: 471335 - RNA, 22 nt, Human
acagguggagugguuagcaggc

SEQ ID NO: 471336 - RNA, 22 nt, Human
aucaaaaugcuccagugauggu

SEQ ID NO: 471337 - RNA, 22 nt, Human
agaacagaagggaggaaggccu

SEQ ID NO: 471338 - RNA, 18 nt, Human
ccauuucaugauuauuac

SEQ ID NO: 471339 - RNA, 22 nt, Human
augccacugacauggacaauuu

SEQ ID NO: 471340 - RNA, 23 nt, Human
agaaaaguucauaccuuuuuaac

SEQ ID NO: 471341 - RNA, 22 nt, Human
gccacguugccacccgggugac

SEQ ID NO: 471342 - RNA, 23 nt, Human
gccuucagcucgggaaggcuccc

SEQ ID NO: 471343 - RNA, 22 nt, Human
gaagaggaugacaggagccggu

SEQ ID NO: 471344 - RNA, 22 nt, Human
gccaccuggacagcugugcccu

SEQ ID NO: 471345 - RNA, 22 nt, Human
caggaaagggaugggcugccac

SEQ ID NO: 471346 - RNA, 22 nt, Human
ucagaaauagucuuuaaaauga

SEQ ID NO: 471347 - RNA, 22 nt, Human
gggccugugcacaguucuguua

SEQ ID NO: 471348 - RNA, 22 nt, Human
ucccaaggauaagagagucuga

SEQ ID NO: 471349 - RNA, 22 nt, Human
uacagaaaaacuggcauugaag

SEQ ID NO: 471350 - RNA, 22 nt, Human
aacuguaaugaauuguucauga

SEQ ID NO: 471351 - RNA, 22 nt, Human
acagaacugggaaaugcacaua

SEQ ID NO: 471352 - RNA, 22 nt, Human
ggaagaggcucucauugagggc

SEQ ID NO: 471353 - RNA, 22 nt, Human
cacacacaguuuuguauucugu

SEQ ID NO: 471354 - RNA, 22 nt, Human
acuugguuggucucacccuguu

SEQ ID NO: 471355 - RNA, 22 nt, Human
acugcagccuuugggcucauaa

SEQ ID NO: 471356 - RNA, 21 nt, Human
uuuaauuugcauguaugacgc

SEQ ID NO: 471357 - RNA, 22 nt, Human
ccugcagcuguaggagaaggcg

SEQ ID NO: 471358 - RNA, 22 nt, Human
uauccuuguacuauaguauuua

SEQ ID NO: 471359 - RNA, 22 nt, Human
cuuugaaagcucccaggacuua

SEQ ID NO: 471360 - RNA, 22 nt, Human
accucaggauguggacacagaa

SEQ ID NO: 471361 - RNA, 22 nt, Human
gccgugcgugcgcaggugcugu

SEQ ID NO: 471362 - RNA, 22 nt, Human
aggcugaggaucccuguguucu

SEQ ID NO: 471363 - RNA, 22 nt, Human
ggcuuuauaggguagaggauca

SEQ ID NO: 471364 - RNA, 22 nt, Human
cucagaguccccacaucugggu

SEQ ID NO: 471365 - RNA, 23 nt, Human
gggggcugguugacucucugcag

SEQ ID NO: 471366 - RNA, 22 nt, Human
ugccagggcugcuacuggcuga

SEQ ID NO: 471367 - RNA, 22 nt, Human
cagaauuugaaguaauauucca

SEQ ID NO: 471368 - RNA, 22 nt, Human
augauucagcaauuuuauaucu

SEQ ID NO: 471369 - RNA, 22 nt, Human
ggcuguggggccggguacagug

SEQ ID NO: 471370 - RNA, 22 nt, Human
cacugcuuucacaguuuguucc

SEQ ID NO: 471371 - RNA, 22 nt, Human
ggagaagggacagacucagcuu

SEQ ID NO: 471372 - RNA, 22 nt, Human
uguguccuuuggaggaucagcg

SEQ ID NO: 471373 - RNA, 22 nt, Human
gcacaugguaggcauuugaugu

SEQ ID NO: 471374 - RNA, 22 nt, Human
gccaugcuugguaugcugugag

SEQ ID NO: 471375 - RNA, 22 nt, Human
ggcugaaacagauuucaagaca

SEQ ID NO: 471376 - RNA, 22 nt, Human
ccagaagagaucacaguucuug

SEQ ID NO: 471377 - RNA, 22 nt, Human
cugcccugaccugccucagagu

SEQ ID NO: 471378 - RNA, 22 nt, Human
acagagcuguacuacuuacuga

SEQ ID NO: 471379 - RNA, 22 nt, Human
gcagagccugacgggauuuuuc

SEQ ID NO: 471380 - RNA, 22 nt, Human
ugugccuggcauucugggcuuc

SEQ ID NO: 471381 - RNA, 22 nt, Human
gguucccggaucuccgaguccc

SEQ ID NO: 471382 - RNA, 22 nt, Human
ucagaagcaaacaucacucuag

SEQ ID NO: 471383 - RNA, 22 nt, Human
cucaagacugaucgcaguggaa

SEQ ID NO: 471384 - RNA, 22 nt, Human
agugugcugcuuaaacaguugu

SEQ ID NO: 471385 - RNA, 22 nt, Human
aagcuggcaauuaucaaaacug

SEQ ID NO: 471386 - RNA, 22 nt, Human
ggcagccauggacacuggcuag

SEQ ID NO: 471387 - RNA, 22 nt, Human
aaguccagacuccuuugcgugg

SEQ ID NO: 471388 - RNA, 20 nt, Human
gcagcugaaaguaugacacc

SEQ ID NO: 471389 - RNA, 22 nt, Human
cugaggucucuuuccauaguga

SEQ ID NO: 471390 - RNA, 22 nt, Human
uggagcaggugggaugucguga

SEQ ID NO: 471391 - RNA, 22 nt, Human
gccugcagccagggaguucucu

SEQ ID NO: 471392 - RNA, 22 nt, Human
cgcaccacugaauuccagccug

SEQ ID NO: 471393 - RNA, 22 nt, Human
uacauuugcuuugauuuucagc

SEQ ID NO: 471394 - RNA, 22 nt, Human
cuccaggcucguccaagaucga

SEQ ID NO: 471395 - RNA, 21 nt, Human
ugcaggcaggcagagaugcug

SEQ ID NO: 471396 - RNA, 22 nt, Human
aggcucaggugccucauucaca

SEQ ID NO: 471397 - RNA, 22 nt, Human
accauuugacucucuaaggaua

SEQ ID NO: 471398 - RNA, 22 nt, Human
cugaggcaugaaugugggcuuu

SEQ ID NO: 471399 - RNA, 18 nt, Human
ucacagugcucuugccua

SEQ ID NO: 471400 - RNA, 23 nt, Human
cagguggcuccacgagggguggg

SEQ ID NO: 471401 - RNA, 22 nt, Human
ugugcccaucccucuggagugu

SEQ ID NO: 471402 - RNA, 22 nt, Human
agagccaggcaggcaauguuga

SEQ ID NO: 471403 - RNA, 22 nt, Human
ggcauggcuggguucuggugag

SEQ ID NO: 471404 - RNA, 22 nt, Human
aaugggaagccagaagacaagg

SEQ ID NO: 471405 - RNA, 22 nt, Human
cccugcagagaccacugaccuu

SEQ ID NO: 471406 - RNA, 22 nt, Human
uugcauugaaugcacauuuuua

SEQ ID NO: 471407 - RNA, 18 nt, Human
gugugcaguugcaggggu

SEQ ID NO: 471408 - RNA, 19 nt, Human
uaaaaacugaaggaagcag

SEQ ID NO: 471409 - RNA, 22 nt, Human
gcugcagcccggcgcgccugag

SEQ ID NO: 471410 - RNA, 22 nt, Human
augccaggaacaaacaguggug

SEQ ID NO: 471411 - RNA, 22 nt, Human
cuagaaaugcucaagagaaagu

SEQ ID NO: 471412 - RNA, 22 nt, Human
ucuguaguagguuguaguucuu

SEQ ID NO: 471413 - RNA, 22 nt, Human
ucucagagcuucagaaagcacc

SEQ ID NO: 471414 - RNA, 22 nt, Human
uuucaagcauaacugggaagag

SEQ ID NO: 471415 - RNA, 22 nt, Human
cccaggcaucccauuaaggagc

SEQ ID NO: 471416 - RNA, 19 nt, Human
uuggaaggagccagagugg

SEQ ID NO: 471417 - RNA, 22 nt, Human
agcaguggccuggggcucugug

SEQ ID NO: 471418 - RNA, 23 nt, Human
agggcugaugccauugcagcucu

SEQ ID NO: 471419 - RNA, 23 nt, Human
ccugaagggucaggguccucagc

SEQ ID NO: 471420 - RNA, 22 nt, Human
acugaaggcuuucccaagguca

SEQ ID NO: 471421 - RNA, 22 nt, Human
ggcacugaaccaggacacaagc

SEQ ID NO: 471422 - RNA, 22 nt, Human
uuuccucuaaacgcauuugcuu

SEQ ID NO: 471423 - RNA, 22 nt, Human
uugugucccccuuugagagcca

SEQ ID NO: 471424 - RNA, 22 nt, Human
gcccugucccuuggcuucuagg

SEQ ID NO: 471425 - RNA, 22 nt, Human
aucaggaucugcaucauaagaa

SEQ ID NO: 471426 - RNA, 21 nt, Human
aguuugaugcaauuucugaga

SEQ ID NO: 471427 - RNA, 22 nt, Human
cuaauacucauuucuguaacuc

SEQ ID NO: 471428 - RNA, 22 nt, Human
cagaggcugggaccucaggcau

SEQ ID NO: 471429 - RNA, 22 nt, Human
ucagaagcaggagugugcacaa

SEQ ID NO: 471430 - RNA, 22 nt, Human
cuggccuucagacucggacuga

SEQ ID NO: 471431 - RNA, 22 nt, Human
ucccagggcacucacccucccu

SEQ ID NO: 471432 - RNA, 22 nt, Human
cugcagccuaggugcagcuggg

SEQ ID NO: 471433 - RNA, 22 nt, Human
cagccagguaugggcgugcggg

SEQ ID NO: 471434 - RNA, 20 nt, Human
acugagcugcauggagagga

SEQ ID NO: 471435 - RNA, 22 nt, Human
ucacagacacagggagaagcau

SEQ ID NO: 471436 - RNA, 21 nt, Human
acccuggguucuccauacccu

SEQ ID NO: 471437 - RNA, 22 nt, Human
agggaauguagcaagaugccaa

SEQ ID NO: 471438 - RNA, 20 nt, Human
gacaucauguacacauugcc

SEQ ID NO: 471439 - RNA, 22 nt, Human
agcugcucaggagagccagguc

SEQ ID NO: 471440 - RNA, 22 nt, Human
aggggcaggugcugcacuuaga

SEQ ID NO: 471441 - RNA, 22 nt, Human
ggcuuuauuugcagccauuguu

SEQ ID NO: 471442 - RNA, 22 nt, Human
guauuaggaaauaugaagaaag

SEQ ID NO: 471443 - RNA, 22 nt, Human
acagagcacauagauuggaguu

SEQ ID NO: 471444 - RNA, 22 nt, Human
ggcugccuggaccuccucuuuc

SEQ ID NO: 471445 - RNA, 22 nt, Human
agauuuagacugccuuaaucau

SEQ ID NO: 471446 - RNA, 20 nt, Human
cugagcgucuaagaggugag

SEQ ID NO: 471447 - RNA, 22 nt, Human
ucucagagcuucaguuauuuuc

SEQ ID NO: 471448 - RNA, 22 nt, Human
uuguccaaggucccacaguuag

SEQ ID NO: 471449 - RNA, 22 nt, Human
agcaggagcccuuaucaccagg

SEQ ID NO: 471450 - RNA, 22 nt, Human
agggcugcuauguugauucaga

SEQ ID NO: 471451 - RNA, 22 nt, Human
cuacuucuaaguacauggugau

SEQ ID NO: 471452 - RNA, 22 nt, Human
ggugaggggagagugaaagaaa

SEQ ID NO: 471453 - RNA, 22 nt, Human
aucaggauucaguaucuccagc

SEQ ID NO: 471454 - RNA, 22 nt, Human
agcuggaggauaacucacuucu

SEQ ID NO: 471455 - RNA, 22 nt, Human
auaauguagguauguguauuua

SEQ ID NO: 471456 - RNA, 21 nt, Human
auccauccaucuuggccuaac

SEQ ID NO: 471457 - RNA, 22 nt, Human
gaggcagcaucuauggugggaa

SEQ ID NO: 471458 - RNA, 22 nt, Human
uauguacauguuaaagggcaaa

SEQ ID NO: 471459 - RNA, 22 nt, Human
aggggcucaaagugugcaggga

SEQ ID NO: 471460 - RNA, 22 nt, Human
agccaugcaccuuacucuugcu

SEQ ID NO: 471461 - RNA, 22 nt, Human
guucacaagaguuacagacaga

SEQ ID NO: 471462 - RNA, 22 nt, Human
gggagaaggagcuaguucuuga

SEQ ID NO: 471463 - RNA, 22 nt, Human
gauggcagucaaccaggugagg

SEQ ID NO: 471464 - RNA, 22 nt, Human
agagcagguggcaacucuggga

SEQ ID NO: 471465 - RNA, 22 nt, Human
agggccagaaucccucagucua

SEQ ID NO: 471466 - RNA, 22 nt, Human
ugagcugggcugggcugagcug

SEQ ID NO: 471467 - RNA, 22 nt, Human
ucacauuuuuuacuggacuuaa

SEQ ID NO: 471468 - RNA, 22 nt, Human
uaucuuugcaaauaucucuaag

SEQ ID NO: 471469 - RNA, 22 nt, Human
acaguguguucugggaccucca

SEQ ID NO: 471470 - RNA, 22 nt, Human
uuuuucaagacaaccugcaugu

SEQ ID NO: 471471 - RNA, 22 nt, Human
ugggacugcucuugcugggguc

SEQ ID NO: 471472 - RNA, 22 nt, Human
cuacauuuggagaguauaggaa

SEQ ID NO: 471473 - RNA, 22 nt, Human
cauuuacuuaaaucuuuacaag

SEQ ID NO: 471474 - RNA, 22 nt, Human
acagauuuuauuauucagguau

SEQ ID NO: 471475 - RNA, 23 nt, Human
guuuucaacacaauaaauguaac

SEQ ID NO: 471476 - RNA, 20 nt, Human
cagagacccaggcuucagcu

SEQ ID NO: 471477 - RNA, 18 nt, Human
agucuucugauccauuuu

SEQ ID NO: 471478 - RNA, 22 nt, Human
uacaguuuguuacauuguuagu

SEQ ID NO: 471479 - RNA, 20 nt, Human
cuuccacacaagaagcacag

SEQ ID NO: 471480 - RNA, 22 nt, Human
gaaaugcauggaucuuggcaga

SEQ ID NO: 471481 - RNA, 22 nt, Human
aacacaaagaagcugcaggauc

SEQ ID NO: 471482 - RNA, 22 nt, Human
agggucagcuggcugucagggg

SEQ ID NO: 471483 - RNA, 22 nt, Human
cagaaggcuggcagauugagau

SEQ ID NO: 471484 - RNA, 22 nt, Human
ggcagcuggccuccucgcccac

SEQ ID NO: 471485 - RNA, 22 nt, Human
agguagagcuccaguagaaaau

SEQ ID NO: 471486 - RNA, 22 nt, Human
gaagccaacauuccaaguagaa

SEQ ID NO: 471487 - RNA, 22 nt, Human
gccaguuccuguggagucagag

SEQ ID NO: 471488 - RNA, 22 nt, Human
uauuuuaucugccagaguggag

SEQ ID NO: 471489 - RNA, 22 nt, Human
uaaagucaucuuuacaucuuug

SEQ ID NO: 471490 - RNA, 22 nt, Human
ccuccucugggaagauucagag

SEQ ID NO: 471491 - RNA, 23 nt, Human
aggauccugguacaggagcagag

SEQ ID NO: 471492 - RNA, 22 nt, Human
caggcugggcagccuccccggc

SEQ ID NO: 471493 - RNA, 19 nt, Human
ugugaaagcuaguguucuu

SEQ ID NO: 471494 - RNA, 22 nt, Human
agcucuccacacauaggacuag

SEQ ID NO: 471495 - RNA, 22 nt, Human
auaguauuuaauaguuagcuca

SEQ ID NO: 471496 - RNA, 22 nt, Human
aggggccuggacauggacgcgc

SEQ ID NO: 471497 - RNA, 22 nt, Human
gaagccacuauagauauucuaa

SEQ ID NO: 471498 - RNA, 22 nt, Human
gacagcauggugucuguucagg

SEQ ID NO: 471499 - RNA, 22 nt, Human
uuugggcaauucagugggaccu

SEQ ID NO: 471500 - RNA, 18 nt, Human
acauuucucucugcguga

SEQ ID NO: 471501 - RNA, 22 nt, Human
ucccuggacaacagacuucacu

SEQ ID NO: 471502 - RNA, 22 nt, Human
ccaaaguccacaguuuacauua

SEQ ID NO: 471503 - RNA, 22 nt, Human
cccagcagccuggauguucuuu

SEQ ID NO: 471504 - RNA, 19 nt, Human
aggguccagggagcggcuc

SEQ ID NO: 471505 - RNA, 22 nt, Human
agauuucccucuuguauuugca

SEQ ID NO: 471506 - RNA, 21 nt, Human
cacugcagccuugaccugggc

SEQ ID NO: 471507 - RNA, 22 nt, Human
ucucugauguauaucagagaac

SEQ ID NO: 471508 - RNA, 22 nt, Human
ugaaacagucuccagacuugga

SEQ ID NO: 471509 - RNA, 20 nt, Human
uagaaaucuuauaaaagacu

SEQ ID NO: 471510 - RNA, 22 nt, Human
ggcccacuugaaauggagcuca

SEQ ID NO: 471511 - RNA, 22 nt, Human
cuggagcccugaaugggcagga

SEQ ID NO: 471512 - RNA, 22 nt, Human
cugcugcugcuaucuacccagg

SEQ ID NO: 471513 - RNA, 23 nt, Human
ccuggaguacuaaggggauggaa

SEQ ID NO: 471514 - RNA, 20 nt, Human
cucaggauacugcaaaguug

SEQ ID NO: 471515 - RNA, 22 nt, Human
cuggguggcgucuggggccagu

SEQ ID NO: 471516 - RNA, 22 nt, Human
gucccucugugucccugcaguc

SEQ ID NO: 471517 - RNA, 22 nt, Human
agggcagcacaaggcauggacu

SEQ ID NO: 471518 - RNA, 22 nt, Human
augcaguggcagcuccuggugu

SEQ ID NO: 471519 - RNA, 22 nt, Human
gcugccuuuugcuccucccacc

SEQ ID NO: 471520 - RNA, 22 nt, Human
gcaagcaguuguggcuucugag

SEQ ID NO: 471521 - RNA, 22 nt, Human
ccagagccucuuaugaagaucg

SEQ ID NO: 471522 - RNA, 22 nt, Human
aauguuguuuuucugcaugucu

SEQ ID NO: 471523 - RNA, 22 nt, Human
uggcugcagaucaagggcaggc

SEQ ID NO: 471524 - RNA, 22 nt, Human
uacccagggcuuuucugaugca

SEQ ID NO: 471525 - RNA, 22 nt, Human
aaaaguguucaggaagaauaau

SEQ ID NO: 471526 - RNA, 21 nt, Human
uggcucuggguaggagagugc

SEQ ID NO: 471527 - RNA, 22 nt, Human
gcucccaccaggcagaccuacc

SEQ ID NO: 471528 - RNA, 22 nt, Human
gcucccagggaccgcagggcag

SEQ ID NO: 471529 - RNA, 22 nt, Human
caaaugugguuucucagcauuc

SEQ ID NO: 471530 - RNA, 22 nt, Human
ucccagcagucagagcuaugug

SEQ ID NO: 471531 - RNA, 22 nt, Human
cuggcagcuuccuuugcaucug

SEQ ID NO: 471532 - RNA, 22 nt, Human
ugggccaggauuucaagacccu

SEQ ID NO: 471533 - RNA, 22 nt, Human
cacacagaugguaagggaggga

SEQ ID NO: 471534 - RNA, 22 nt, Human
agcaggcuuguuaugucugaga

SEQ ID NO: 471535 - RNA, 22 nt, Human
ggcagagacuggguuggcagag

SEQ ID NO: 471536 - RNA, 22 nt, Human
cccauuuaaacacaagcuuuca

SEQ ID NO: 471537 - RNA, 22 nt, Human
gccugcagccccucugcaguag

SEQ ID NO: 471538 - RNA, 22 nt, Human
gaugcacuuucuuuucaacagu

SEQ ID NO: 471539 - RNA, 22 nt, Human
auguaacacccacuuuuauagc

SEQ ID NO: 471540 - RNA, 22 nt, Human
guggcucuccauugacauggaa

SEQ ID NO: 471541 - RNA, 22 nt, Human
caaaaugugagucccaccucaa

SEQ ID NO: 471542 - RNA, 22 nt, Human
gcucugggcugcccucuggaca

SEQ ID NO: 471543 - RNA, 22 nt, Human
ccuucccuaaagcgucgcuuag

SEQ ID NO: 471544 - RNA, 22 nt, Human
cagcauggugccagugagucca

SEQ ID NO: 471545 - RNA, 22 nt, Human
uacagucuuuggaaagagauag

SEQ ID NO: 471546 - RNA, 22 nt, Human
ugcaggaguccaaucaggagac

SEQ ID NO: 471547 - RNA, 23 nt, Human
gcagacagagcagacuaagacaa

SEQ ID NO: 471548 - RNA, 22 nt, Human
agcagggcucacauuaguggau

SEQ ID NO: 471549 - RNA, 22 nt, Human
ucuuccaguguagacaucugcc

SEQ ID NO: 471550 - RNA, 21 nt, Human
ucaggcaggcgcagagggaag

SEQ ID NO: 471551 - RNA, 22 nt, Human
aaggcacuuuuccugagaugau

SEQ ID NO: 471552 - RNA, 21 nt, Human
cucaggaucuuauauauuagu

SEQ ID NO: 471553 - RNA, 22 nt, Human
ccucuguccuggggaguggagc

SEQ ID NO: 471554 - RNA, 22 nt, Human
ggcagagcuuguuccuucuguu

SEQ ID NO: 471555 - RNA, 22 nt, Human
ccucuucugagugagacucccu

SEQ ID NO: 471556 - RNA, 22 nt, Human
ggcuggcauccagggaaaucca

SEQ ID NO: 471557 - RNA, 22 nt, Human
cucaggaugucggugacuauug

SEQ ID NO: 471558 - RNA, 22 nt, Human
aagggugggcaccgccagguca

SEQ ID NO: 471559 - RNA, 22 nt, Human
gcugucugucucugucccacca

SEQ ID NO: 471560 - RNA, 22 nt, Human
agcugccauccuguucagcacc

SEQ ID NO: 471561 - RNA, 21 nt, Human
gggcagaggggccuccugggu

SEQ ID NO: 471562 - RNA, 23 nt, Human
aucaaacuggugagaaugucagu

SEQ ID NO: 471563 - RNA, 22 nt, Human
auuguggugucaguuauaggca

SEQ ID NO: 471564 - RNA, 22 nt, Human
aaagacugguguguuacauaua

SEQ ID NO: 471565 - RNA, 22 nt, Human
cacauuugaaggaauuagcauu

SEQ ID NO: 471566 - RNA, 22 nt, Human
cagggugccucccgcucgccgg

SEQ ID NO: 471567 - RNA, 22 nt, Human
ccucucauagucuguauccuuu

SEQ ID NO: 471568 - RNA, 17 nt, Human
caggcagacauguaagc

SEQ ID NO: 471569 - RNA, 22 nt, Human
auaauuuaauuuucacaguggu

SEQ ID NO: 471570 - RNA, 22 nt, Human
aucagaagcuuguagucucucu

SEQ ID NO: 471571 - RNA, 22 nt, Human
uagggcugcugcagaugacagg

SEQ ID NO: 471572 - RNA, 22 nt, Human
cacuucaauuaacuucagcauu

SEQ ID NO: 471573 - RNA, 22 nt, Human
auucucaaacaagugguuugau

SEQ ID NO: 471574 - RNA, 22 nt, Human
ucaccaggcuggaaugcagugg

SEQ ID NO: 471575 - RNA, 22 nt, Human
ugcagggcaguuuguuucggca

SEQ ID NO: 471576 - RNA, 22 nt, Human
ccuggccucagacagagggugg

SEQ ID NO: 471577 - RNA, 22 nt, Human
gggcuacagacaugcucuaagc

SEQ ID NO: 471578 - RNA, 22 nt, Human
aggugagugugacugcaagaga

SEQ ID NO: 471579 - RNA, 22 nt, Human
gaaaugugggucaugacccauu

SEQ ID NO: 471580 - RNA, 22 nt, Human
ugucucaguacacuccgauguu

SEQ ID NO: 471581 - RNA, 22 nt, Human
uugauacauagcacaguuuagg

SEQ ID NO: 471582 - RNA, 22 nt, Human
uaaugcacauagaaguacuuag

SEQ ID NO: 471583 - RNA, 23 nt, Human
agaugaaagcuucccaucacagu

SEQ ID NO: 471584 - RNA, 22 nt, Human
agagccagguguagucucggag

SEQ ID NO: 471585 - RNA, 22 nt, Human
uccuggauucugcccugaaggc

SEQ ID NO: 471586 - RNA, 22 nt, Human
aaugaaugaaccacauauaaca

SEQ ID NO: 471587 - RNA, 22 nt, Human
uccaggagagguguggggacug

SEQ ID NO: 471588 - RNA, 22 nt, Human
cugaggucuagacaccccaggg

SEQ ID NO: 471589 - RNA, 20 nt, Human
agugggagagggcagacugc

SEQ ID NO: 471590 - RNA, 22 nt, Human
cagcugugcugauugcucagua

SEQ ID NO: 471591 - RNA, 22 nt, Human
cuggcugcgucugcucugacag

SEQ ID NO: 471592 - RNA, 22 nt, Human
caguggcgugaucucugcucac

SEQ ID NO: 471593 - RNA, 22 nt, Human
ccacagggccuuuccugcuggc

SEQ ID NO: 471594 - RNA, 22 nt, Human
ggcuucugaaaucucugugcgu

SEQ ID NO: 471595 - RNA, 21 nt, Human
ugcagagauaucugaagcaga

SEQ ID NO: 471596 - RNA, 22 nt, Human
ccugugugcacacgaggccaug

SEQ ID NO: 471597 - RNA, 19 nt, Human
gcaugcuugguggcuucug

SEQ ID NO: 471598 - RNA, 22 nt, Human
aggaagagcuggaccagaggac

SEQ ID NO: 471599 - RNA, 22 nt, Human
agcuggagaugcccagcaccgg

SEQ ID NO: 471600 - RNA, 22 nt, Human
gcagaggcucuuuaaugcuuag

SEQ ID NO: 471601 - RNA, 22 nt, Human
aggugcuuggcucgugcacaca

SEQ ID NO: 471602 - RNA, 22 nt, Human
accucugcuucccggguucaag

SEQ ID NO: 471603 - RNA, 22 nt, Human
cagagcagugaggaguugugua

SEQ ID NO: 471604 - RNA, 22 nt, Human
aauacaaucaaauucacuagca

SEQ ID NO: 471605 - RNA, 22 nt, Human
uuuaaauuuguguuuagagggu

SEQ ID NO: 471606 - RNA, 17 nt, Human
gauuuccugaaguucuu

SEQ ID NO: 471607 - RNA, 22 nt, Human
ccuggagggcgccgcacagucc

SEQ ID NO: 471608 - RNA, 22 nt, Human
ucaguuaagaggccacggcagu

SEQ ID NO: 471609 - RNA, 22 nt, Human
ugccucagagugggcuugcuau

SEQ ID NO: 471610 - RNA, 22 nt, Human
guccaagagucaagaagggggc

SEQ ID NO: 471611 - RNA, 22 nt, Human
aggagcuguuuuguucagcaaa

SEQ ID NO: 471612 - RNA, 22 nt, Human
ccugcagguccccggaugcgca

SEQ ID NO: 471613 - RNA, 22 nt, Human
ccaggugucaugcgugugaccc

SEQ ID NO: 471614 - RNA, 22 nt, Human
cuguaugaggaucagacuggac

SEQ ID NO: 471615 - RNA, 17 nt, Human
ucugccgacugccagcu

SEQ ID NO: 471616 - RNA, 22 nt, Human
ugggcaggagagaagcuaaaga

SEQ ID NO: 471617 - RNA, 22 nt, Human
acagaauuaucaggaaauguua

SEQ ID NO: 471618 - RNA, 22 nt, Human
gguuucaaauuaaagucuuaag

SEQ ID NO: 471619 - RNA, 22 nt, Human
aguguuccugcucucaggaagc

SEQ ID NO: 471620 - RNA, 22 nt, Human
gggcagcugccaagugcaucgc

SEQ ID NO: 471621 - RNA, 22 nt, Human
uuagaaaacauaagugguaaag

SEQ ID NO: 471622 - RNA, 22 nt, Human
cacauguacagaagcaggcugg

SEQ ID NO: 471623 - RNA, 22 nt, Human
agcacuuuccuggcaaaugugg

SEQ ID NO: 471624 - RNA, 22 nt, Human
acaguguucacuuaacaaugga

SEQ ID NO: 471625 - RNA, 22 nt, Human
aggucagaagugccagggaauu

SEQ ID NO: 471626 - RNA, 22 nt, Human
gccaggcagacaggucaucagg

SEQ ID NO: 471627 - RNA, 22 nt, Human
agcucccagcagagcuggccac

SEQ ID NO: 471628 - RNA, 22 nt, Human
ucugcaggaggcuggcugcagg

SEQ ID NO: 471629 - RNA, 22 nt, Human
cagcacugcuucgcagccaggg

SEQ ID NO: 471630 - RNA, 22 nt, Human
ccugaggacacacgcugcagga

SEQ ID NO: 471631 - RNA, 22 nt, Human
uggcagggaguugcaggauuuc

SEQ ID NO: 471632 - RNA, 22 nt, Human
caugaguucaucugcuucucuu

SEQ ID NO: 471633 - RNA, 22 nt, Human
cuggcagcugugugaagaacug

SEQ ID NO: 471634 - RNA, 22 nt, Human
caggaaauaucuccuggcagag

SEQ ID NO: 471635 - RNA, 23 nt, Human
cuccucguaacucuguggugggu

SEQ ID NO: 471636 - RNA, 20 nt, Human
gggcaguggcgcuaucucag

SEQ ID NO: 471637 - RNA, 22 nt, Human
uggggcuggcacagucucuauu

SEQ ID NO: 471638 - RNA, 22 nt, Human
gccucugcaacuccgccuuggu

SEQ ID NO: 471639 - RNA, 22 nt, Human
acagccugagaguggagcuggc

SEQ ID NO: 471640 - RNA, 22 nt, Human
cugugcuggagaugggccagag

SEQ ID NO: 471641 - RNA, 22 nt, Human
cacauuuaaagguugaagcuga

SEQ ID NO: 471642 - RNA, 22 nt, Human
agggcuguuuuuggcaccuggg

SEQ ID NO: 471643 - RNA, 22 nt, Human
cuuuauuagauguagacuuucu

SEQ ID NO: 471644 - RNA, 22 nt, Human
cccuggaguagcacugggucgc

SEQ ID NO: 471645 - RNA, 23 nt, Human
ggcagcucucaucugaugacuga

SEQ ID NO: 471646 - RNA, 22 nt, Human
aggagcugcagauucugccuug

SEQ ID NO: 471647 - RNA, 22 nt, Human
ucucagagauuuuguuucccuu

SEQ ID NO: 471648 - RNA, 22 nt, Human
cagguacacucccuugugcuga

SEQ ID NO: 471649 - RNA, 22 nt, Human
auuguaucuugucauuaugcau

SEQ ID NO: 471650 - RNA, 22 nt, Human
auauuagguuggugcaaaagua

SEQ ID NO: 471651 - RNA, 22 nt, Human
aguccagucucacucuuggcag

SEQ ID NO: 471652 - RNA, 22 nt, Human
ugaagguggcauaggagagaug

SEQ ID NO: 471653 - RNA, 22 nt, Human
uccuccaggucuaggguggcuu

SEQ ID NO: 471654 - RNA, 22 nt, Human
ugcagggauuguuggcauccau

SEQ ID NO: 471655 - RNA, 22 nt, Human
cccaguuguugccggcucugga

SEQ ID NO: 471656 - RNA, 22 nt, Human
ucagcuuucucucgccaucagg

SEQ ID NO: 471657 - RNA, 22 nt, Human
gccagagcacaggcugguagua

SEQ ID NO: 471658 - RNA, 22 nt, Human
auuaauuuccaggcacugugcu

SEQ ID NO: 471659 - RNA, 18 nt, Human
acccucuggcuucugagc

SEQ ID NO: 471660 - RNA, 22 nt, Human
uccaaacacccuccaugcugca

SEQ ID NO: 471661 - RNA, 22 nt, Human
guagggacuguucucaccugag

SEQ ID NO: 471662 - RNA, 22 nt, Human
caggccugugacaccgugucug

SEQ ID NO: 471663 - RNA, 22 nt, Human
cugcagggcagggccuccuggc

SEQ ID NO: 471664 - RNA, 19 nt, Human
cagcucaguuugauucucu

SEQ ID NO: 471665 - RNA, 22 nt, Human
ccugggcaacauagggagaccc

SEQ ID NO: 471666 - RNA, 22 nt, Human
cuuugaaaacuuaaauaacagc

SEQ ID NO: 471667 - RNA, 22 nt, Human
augggcaguguauuggaaggaa

SEQ ID NO: 471668 - RNA, 22 nt, Human
uuugacagacauuuacuacauu

SEQ ID NO: 471669 - RNA, 22 nt, Human
ggcacugauaauguccucucuc

SEQ ID NO: 471670 - RNA, 17 nt, Human
gcugccaccuuuggagc

SEQ ID NO: 471671 - RNA, 22 nt, Human
gccucugcaucuucgccgcacu

SEQ ID NO: 471672 - RNA, 22 nt, Human
aggcagggucuugcuauguugc

SEQ ID NO: 471673 - RNA, 22 nt, Human
gacaagacauugguaaagauau

SEQ ID NO: 471674 - RNA, 22 nt, Human
uuucauaaugucacagucaaaa

SEQ ID NO: 471675 - RNA, 22 nt, Human
gccaggcuccccggaucccugg

SEQ ID NO: 471676 - RNA, 18 nt, Human
acauuucuaugcuucugg

SEQ ID NO: 471677 - RNA, 22 nt, Human
uuuguuaauucuuauguuagag

SEQ ID NO: 471678 - RNA, 22 nt, Human
aaguucuacagcuucgcaggca

SEQ ID NO: 471679 - RNA, 19 nt, Human
ggcauccacgaaugcagag

SEQ ID NO: 471680 - RNA, 22 nt, Human
acccagaggugucuagcaagcu

SEQ ID NO: 471681 - RNA, 22 nt, Human
agccaggacguugcucagcucc

SEQ ID NO: 471682 - RNA, 22 nt, Human
ugaccugcguaggugguuucug

SEQ ID NO: 471683 - RNA, 22 nt, Human
agacccagaaagcagcugcauu

SEQ ID NO: 471684 - RNA, 22 nt, Human
caggauggagaguuguugguug

SEQ ID NO: 471685 - RNA, 22 nt, Human
agcagggcuggggcacgagcca

SEQ ID NO: 471686 - RNA, 22 nt, Human
ggaaacagagggcaccugagcc

SEQ ID NO: 471687 - RNA, 22 nt, Human
ggagugacucucggggccacua

SEQ ID NO: 471688 - RNA, 22 nt, Human
ggaggccacgguuuagcaccga

SEQ ID NO: 471689 - RNA, 22 nt, Human
uuugaaaggagcuuuauccaga

SEQ ID NO: 471690 - RNA, 22 nt, Human
ucccacugugaauccaaggccu

SEQ ID NO: 471691 - RNA, 22 nt, Human
cacagggcagugauuguccaca

SEQ ID NO: 471692 - RNA, 22 nt, Human
ccuccaggcugaauaucuagaa

SEQ ID NO: 471693 - RNA, 22 nt, Human
uggcucugucacugugagcuau

SEQ ID NO: 471694 - RNA, 22 nt, Human
uuguuuucacagcuuugcccgg

SEQ ID NO: 471695 - RNA, 22 nt, Human
ugggggagauuagagcuucuua

SEQ ID NO: 471696 - RNA, 22 nt, Human
cuagggaccucagcuccuggag

SEQ ID NO: 471697 - RNA, 22 nt, Human
gggagggauuaguucugccugg

SEQ ID NO: 471698 - RNA, 22 nt, Human
auccuucagcugcccuguuacc

SEQ ID NO: 471699 - RNA, 22 nt, Human
augaggcagguggaggcugcca

SEQ ID NO: 471700 - RNA, 22 nt, Human
uggaggaauaacagcaaccuua

SEQ ID NO: 471701 - RNA, 22 nt, Human
ugagaauuacaaaugagucaca

SEQ ID NO: 471702 - RNA, 22 nt, Human
uuauuuaauuuucucacucaga

SEQ ID NO: 471703 - RNA, 18 nt, Human
gggaagaggaucuggccc

SEQ ID NO: 471704 - RNA, 20 nt, Human
agucucuguagugccugaga

SEQ ID NO: 471705 - RNA, 22 nt, Human
ucugucuuuagaggccugugcu

SEQ ID NO: 471706 - RNA, 22 nt, Human
cugggaggcagucucucuagaa

SEQ ID NO: 471707 - RNA, 22 nt, Human
cccauuuagauaacaguucaaa

SEQ ID NO: 471708 - RNA, 22 nt, Human
uagagcaguuggcagcuguauu

SEQ ID NO: 471709 - RNA, 22 nt, Human
aaacauuguaauuuuagcaugg

SEQ ID NO: 471710 - RNA, 22 nt, Human
gcagccaggaaagcuggacccu

SEQ ID NO: 471711 - RNA, 23 nt, Human
ucacacagcuggucagguacaga

SEQ ID NO: 471712 - RNA, 23 nt, Human
cccuggagcuagucugagcagag

SEQ ID NO: 471713 - RNA, 22 nt, Human
ucugccuuccccauaaucugau

SEQ ID NO: 471714 - RNA, 22 nt, Human
gccuggagccucagcaaggagg

SEQ ID NO: 471715 - RNA, 22 nt, Human
gugucccacucuggaggugaag

SEQ ID NO: 471716 - RNA, 22 nt, Human
ccugucuggccaccagggcgau

SEQ ID NO: 471717 - RNA, 20 nt, Human
ccucaagcagacugacagcu

SEQ ID NO: 471718 - RNA, 22 nt, Human
ggggcagagagaaggaagcuug

SEQ ID NO: 471719 - RNA, 22 nt, Human
cccaguccuaaagcagacgcca

SEQ ID NO: 471720 - RNA, 22 nt, Human
aaugggaggauuuucucucuug

SEQ ID NO: 471721 - RNA, 22 nt, Human
cuguauuuguccucuauuuauu

SEQ ID NO: 471722 - RNA, 22 nt, Human
uggcccugcugggucagagcug

SEQ ID NO: 471723 - RNA, 22 nt, Human
aagacaugcaauuagcaaggaa

SEQ ID NO: 471724 - RNA, 19 nt, Human
aggacucuggaggcaugag

SEQ ID NO: 471725 - RNA, 22 nt, Human
cagggccagcgcccaggcccag

SEQ ID NO: 471726 - RNA, 22 nt, Human
uuuugagauggugucucgcucc

SEQ ID NO: 471727 - RNA, 22 nt, Human
auguuacagaaagcaaagauga

SEQ ID NO: 471728 - RNA, 22 nt, Human
cugugccuuuguagcugugccu

SEQ ID NO: 471729 - RNA, 22 nt, Human
gccuucccacccugcgaggcug

SEQ ID NO: 471730 - RNA, 22 nt, Human
cuuauguacacacauauauugu

SEQ ID NO: 471731 - RNA, 22 nt, Human
aaaggugacugcagcagcuauu

SEQ ID NO: 471732 - RNA, 22 nt, Human
uaaugcacagaauugacauggg

SEQ ID NO: 471733 - RNA, 22 nt, Human
ccugucuguauugguuugcuau

SEQ ID NO: 471734 - RNA, 22 nt, Human
ggcaguggugggaggcucgcuc

SEQ ID NO: 471735 - RNA, 20 nt, Human
cucaguguggccugaguguu

SEQ ID NO: 471736 - RNA, 22 nt, Human
ucaggaaaauacugcuuaucca

SEQ ID NO: 471737 - RNA, 22 nt, Human
uaccauuucauucuuuccucau

SEQ ID NO: 471738 - RNA, 22 nt, Human
gggcaguggguggcugcagccu

SEQ ID NO: 471739 - RNA, 22 nt, Human
ucugaggcuauguucaggcuaa

SEQ ID NO: 471740 - RNA, 22 nt, Human
acagaauugaaaguauaaucug

SEQ ID NO: 471741 - RNA, 22 nt, Human
uuuauguaguuacggacuauca

SEQ ID NO: 471742 - RNA, 22 nt, Human
gccuggagcuacuggacacuga

SEQ ID NO: 471743 - RNA, 19 nt, Human
ccugggaggcggagguugc

SEQ ID NO: 471744 - RNA, 22 nt, Human
gccuggaguucagccaaguccc

SEQ ID NO: 471745 - RNA, 22 nt, Human
cacugccuccccaggcuccaca

SEQ ID NO: 471746 - RNA, 20 nt, Human
uccaagggcagcagaaucag

SEQ ID NO: 471747 - RNA, 22 nt, Human
gggaccaggugggugcauuccg

SEQ ID NO: 471748 - RNA, 22 nt, Human
uugucugaaagaucauuacauu

SEQ ID NO: 471749 - RNA, 22 nt, Human
uguuaaucaaucaacaguauua

SEQ ID NO: 471750 - RNA, 22 nt, Human
agugcagugguuaggagccagg

SEQ ID NO: 471751 - RNA, 21 nt, Human
auuuucauuaauucagugugg

SEQ ID NO: 471752 - RNA, 22 nt, Human
ccugagagcgaguggccucaug

SEQ ID NO: 471753 - RNA, 22 nt, Human
ggccagaaguuggaaaagagcc

SEQ ID NO: 471754 - RNA, 22 nt, Human
agggauggaagcucgucugcaa

SEQ ID NO: 471755 - RNA, 22 nt, Human
accagugcuuccugcuggagcu

SEQ ID NO: 471756 - RNA, 22 nt, Human
uaacagcuggcguuauaggaau

SEQ ID NO: 471757 - RNA, 22 nt, Human
acuaagugauucuaagcaucuu

SEQ ID NO: 471758 - RNA, 22 nt, Human
uccagggacacagaguccuucu

SEQ ID NO: 471759 - RNA, 19 nt, Human
gguguccuagagauaagag

SEQ ID NO: 471760 - RNA, 22 nt, Human
aucagagauggcuccagugcuc

SEQ ID NO: 471761 - RNA, 22 nt, Human
cucuggacagcaggugcugugg

SEQ ID NO: 471762 - RNA, 22 nt, Human
gcucuggcuacuguggcuaccg

SEQ ID NO: 471763 - RNA, 17 nt, Human
aagacagaagccaugag

SEQ ID NO: 471764 - RNA, 22 nt, Human
cagaaagaccugggcucaagag

SEQ ID NO: 471765 - RNA, 22 nt, Human
gugauugcccagcaccauuguu

SEQ ID NO: 471766 - RNA, 22 nt, Human
guuagggaagcgcuguguucuu

SEQ ID NO: 471767 - RNA, 22 nt, Human
aaacaccagucccaguauacac

SEQ ID NO: 471768 - RNA, 22 nt, Human
ugcaccauuuugucaggcuacu

SEQ ID NO: 471769 - RNA, 17 nt, Human
aggugcagaggcagagc

SEQ ID NO: 471770 - RNA, 22 nt, Human
gcccucuggcagccuuggcugg

SEQ ID NO: 471771 - RNA, 22 nt, Human
ccagcucugcagggccuggggu

SEQ ID NO: 471772 - RNA, 22 nt, Human
guccagggcuaaaucagguucc

SEQ ID NO: 471773 - RNA, 22 nt, Human
gccagcagggcccaaaugcugg

SEQ ID NO: 471774 - RNA, 22 nt, Human
aaaucaguaaauguucauuaac

SEQ ID NO: 471775 - RNA, 22 nt, Human
agugggguccucaguaugguuc

SEQ ID NO: 471776 - RNA, 22 nt, Human
ucugccagaaguucugagagua

SEQ ID NO: 471777 - RNA, 22 nt, Human
cugccugcuucugagccagagg

SEQ ID NO: 471778 - RNA, 22 nt, Human
ugugugccugagccgugccugg

SEQ ID NO: 471779 - RNA, 22 nt, Human
cuucuggaggacacuggcccca

SEQ ID NO: 471780 - RNA, 22 nt, Human
gcucccugcagcugagaguucc

SEQ ID NO: 471781 - RNA, 20 nt, Human
agagugagacuccaucucag

SEQ ID NO: 471782 - RNA, 19 nt, Human
aggccugggguuuugcacu

SEQ ID NO: 471783 - RNA, 22 nt, Human
cugugcuggcagaccuggaguu

SEQ ID NO: 471784 - RNA, 22 nt, Human
aggugcagcugguggagucugg

SEQ ID NO: 471785 - RNA, 22 nt, Human
cacuguuuuauuccaacauagg

SEQ ID NO: 471786 - RNA, 22 nt, Human
ucauccaguuguggagagggaa

SEQ ID NO: 471787 - RNA, 21 nt, Human
gccuggcagguggaagggcuc

SEQ ID NO: 471788 - RNA, 22 nt, Human
acaguggaaaugugggagggga

SEQ ID NO: 471789 - RNA, 22 nt, Human
auguacaaaaugccacugaauu

SEQ ID NO: 471790 - RNA, 22 nt, Human
aauaauguugacgauagucuua

SEQ ID NO: 471791 - RNA, 22 nt, Human
cucccaggguagggagagacua

SEQ ID NO: 471792 - RNA, 22 nt, Human
acugggccuugccauggcagcc

SEQ ID NO: 471793 - RNA, 22 nt, Human
gaaggccuagggaugcucugcg

SEQ ID NO: 471794 - RNA, 22 nt, Human
uuccauaacugaccgaaugcau

SEQ ID NO: 471795 - RNA, 22 nt, Human
cuggagggggaaauguucauug

SEQ ID NO: 471796 - RNA, 22 nt, Human
uuuaguaaguucacugcaaagc

SEQ ID NO: 471797 - RNA, 22 nt, Human
auuuccuagccucucuugcagu

SEQ ID NO: 471798 - RNA, 22 nt, Human
ugggcacaggggaauggaugaa

SEQ ID NO: 471799 - RNA, 22 nt, Human
gcaggggaguggcaggcccgga

SEQ ID NO: 471800 - RNA, 21 nt, Human
aucuuuauuacgcagagaaga

SEQ ID NO: 471801 - RNA, 22 nt, Human
cagugccucuuaagugucaccc

SEQ ID NO: 471802 - RNA, 20 nt, Human
cucugcugcccgccggcugc

SEQ ID NO: 471803 - RNA, 22 nt, Human
cagcuggcuccaccucugggcu

SEQ ID NO: 471804 - RNA, 22 nt, Human
ugcagugccucggcagugcagc

SEQ ID NO: 471805 - RNA, 22 nt, Human
cagcuuguuaccgagggagggu

SEQ ID NO: 471806 - RNA, 21 nt, Human
uggccaaacuggagcauuuga

SEQ ID NO: 471807 - RNA, 22 nt, Human
cagagcagacguugagauuaag

SEQ ID NO: 471808 - RNA, 22 nt, Human
agccuggaguucccaggagaag

SEQ ID NO: 471809 - RNA, 22 nt, Human
auaaaaaugagggcgguagcua

SEQ ID NO: 471810 - RNA, 21 nt, Human
uauuucuuugacucucucccu

SEQ ID NO: 471811 - RNA, 22 nt, Human
cugugagcuggguggccaggac

SEQ ID NO: 471812 - RNA, 22 nt, Human
ccucagcucuucccugugcaca

SEQ ID NO: 471813 - RNA, 22 nt, Human
gaggcaggcagauugcuugagg

SEQ ID NO: 471814 - RNA, 22 nt, Human
gggaggaaagagaaguggucca

SEQ ID NO: 471815 - RNA, 19 nt, Human
ccuggcccugcugcgcggg

SEQ ID NO: 471816 - RNA, 22 nt, Human
gcugcucucagagcucaugcug

SEQ ID NO: 471817 - RNA, 22 nt, Human
agcugcaggccucuccugggga

SEQ ID NO: 471818 - RNA, 22 nt, Human
ggcaccuggauguagcagugaa

SEQ ID NO: 471819 - RNA, 22 nt, Human
augaggcaaggcuggccguguu

SEQ ID NO: 471820 - RNA, 20 nt, Human
acaugaaaggaaacaggaaa

SEQ ID NO: 471821 - RNA, 21 nt, Human
ucagcagcuuuugcagucccu

SEQ ID NO: 471822 - RNA, 22 nt, Human
ccagucccaggcagaaauccag

SEQ ID NO: 471823 - RNA, 22 nt, Human
agggagguaggagcuucuagcu

SEQ ID NO: 471824 - RNA, 22 nt, Human
uuuaaauaggacuccugggggu

SEQ ID NO: 471825 - RNA, 22 nt, Human
gagcugucucuauaugaaugcu

SEQ ID NO: 471826 - RNA, 17 nt, Human
uccaggcauaucuccua

SEQ ID NO: 471827 - RNA, 22 nt, Human
gcagaggggaagcugaggaauu

SEQ ID NO: 471828 - RNA, 21 nt, Human
augaagucuaugcuucugugu

SEQ ID NO: 471829 - RNA, 22 nt, Human
uacaugcucaguaacuuucagu

SEQ ID NO: 471830 - RNA, 22 nt, Human
ccuguacauuagcugugaauug

SEQ ID NO: 471831 - RNA, 22 nt, Human
agagcuggaaucagaccucagg

SEQ ID NO: 471832 - RNA, 22 nt, Human
gcagcaugagcuauacaaagua

SEQ ID NO: 471833 - RNA, 22 nt, Human
ucacagugagccaugucagaga

SEQ ID NO: 471834 - RNA, 22 nt, Human
uaaacagaaagcagauguacuu

SEQ ID NO: 471835 - RNA, 22 nt, Human
ucaucacuguaucauugauaga

SEQ ID NO: 471836 - RNA, 22 nt, Human
ugggggagccuucacaguagcu

SEQ ID NO: 471837 - RNA, 22 nt, Human
ugcuuccugaggccgucuucuc

SEQ ID NO: 471838 - RNA, 22 nt, Human
cccaggagauggagguugcagu

SEQ ID NO: 471839 - RNA, 22 nt, Human
uggggcugucccgguuuggcga

SEQ ID NO: 471840 - RNA, 22 nt, Human
acaguuugcccugacauucucc

SEQ ID NO: 471841 - RNA, 23 nt, Human
gcaguggaaugucucuguuugga

SEQ ID NO: 471842 - RNA, 22 nt, Human
ccagccagucccgcaugaccgc

SEQ ID NO: 471843 - RNA, 22 nt, Human
acacugugacaaaggcuguucu

SEQ ID NO: 471844 - RNA, 22 nt, Human
aggaggccgcugaugggcuccc

SEQ ID NO: 471845 - RNA, 22 nt, Human
cucccugggcagauguggcucu

SEQ ID NO: 471846 - RNA, 22 nt, Human
agccacagagagggagcugcaa

SEQ ID NO: 471847 - RNA, 22 nt, Human
gccaggcuggugucacaacucu

SEQ ID NO: 471848 - RNA, 22 nt, Human
acuuucuauucccacagagaua

SEQ ID NO: 471849 - RNA, 22 nt, Human
aaaaacuguaauuacuuuugca

SEQ ID NO: 471850 - RNA, 22 nt, Human
caguggaaacuaugcugcugga

SEQ ID NO: 471851 - RNA, 21 nt, Human
uggcugcuggcccucucucca

SEQ ID NO: 471852 - RNA, 21 nt, Human
ggccuuggcgggggccgaauu

SEQ ID NO: 471853 - RNA, 22 nt, Human
acagagcucccagccaucuccu

SEQ ID NO: 471854 - RNA, 22 nt, Human
acagcuuuaucucagggaucag

SEQ ID NO: 471855 - RNA, 22 nt, Human
cuguccuccggccaccuacagu

SEQ ID NO: 471856 - RNA, 22 nt, Human
auaucacaguaguuguuuaguu

SEQ ID NO: 471857 - RNA, 22 nt, Human
auguuaaaugguuuauuauuaa

SEQ ID NO: 471858 - RNA, 22 nt, Human
cacagggccuggggcagcugcu

SEQ ID NO: 471859 - RNA, 22 nt, Human
uggcuuccuccagagcaggagg

SEQ ID NO: 471860 - RNA, 22 nt, Human
uguuuuauuucuccaagaggga

SEQ ID NO: 471861 - RNA, 22 nt, Human
ugggcugcccugaugguccuca

SEQ ID NO: 471862 - RNA, 22 nt, Human
cccucccaagcacucugacaua

SEQ ID NO: 471863 - RNA, 22 nt, Human
auucauucugaccucaagagaa

SEQ ID NO: 471864 - RNA, 22 nt, Human
acagugugaugggccugccuga

SEQ ID NO: 471865 - RNA, 22 nt, Human
aaugaucuacucucauuaucuc

SEQ ID NO: 471866 - RNA, 20 nt, Human
ccagaagagaugaucaucca

SEQ ID NO: 471867 - RNA, 22 nt, Human
uagccgcuuaauuauuugguga

SEQ ID NO: 471868 - RNA, 22 nt, Human
guuucuuagguaaauucuuuga

SEQ ID NO: 471869 - RNA, 19 nt, Human
caggccagugucagggggc

SEQ ID NO: 471870 - RNA, 22 nt, Human
cacccacccacugcucauuggc

SEQ ID NO: 471871 - RNA, 20 nt, Human
ucaggaugugcugagugaag

SEQ ID NO: 471872 - RNA, 22 nt, Human
aggcugugagcaagaacaccua

SEQ ID NO: 471873 - RNA, 22 nt, Human
ucagaagguggagguugcagug

SEQ ID NO: 471874 - RNA, 22 nt, Human
cugggcaguuuauucaguucug

SEQ ID NO: 471875 - RNA, 22 nt, Human
uucuccucuguuggccuucccu

SEQ ID NO: 471876 - RNA, 22 nt, Human
gugggcugcccuugaggucagc

SEQ ID NO: 471877 - RNA, 22 nt, Human
gcacagagggcagugagccucu

SEQ ID NO: 471878 - RNA, 22 nt, Human
gcuuagucaauuauaaauaggc

SEQ ID NO: 471879 - RNA, 23 nt, Human
aggcagugggggccacuuugcuu

SEQ ID NO: 471880 - RNA, 22 nt, Human
uccuuggcagcagggagcauga

SEQ ID NO: 471881 - RNA, 22 nt, Human
ggcaggugcaccugagccaucu

SEQ ID NO: 471882 - RNA, 22 nt, Human
ugggcugaaaugcuguggacua

SEQ ID NO: 471883 - RNA, 22 nt, Human
guucaagguuuuacagagugua

SEQ ID NO: 471884 - RNA, 22 nt, Human
agcccucugcaaacaccugaua

SEQ ID NO: 471885 - RNA, 22 nt, Human
cugucuguucagauucauuacu

SEQ ID NO: 471886 - RNA, 22 nt, Human
aagaugcacaauguggcaauua

SEQ ID NO: 471887 - RNA, 22 nt, Human
agcagccaauuggaggaugaag

SEQ ID NO: 471888 - RNA, 22 nt, Human
gccaaagcagucuugccucugc

SEQ ID NO: 471889 - RNA, 22 nt, Human
cggcuggguucggcugcaggcc

SEQ ID NO: 471890 - RNA, 22 nt, Human
cugggacuuuacccuguggccc

SEQ ID NO: 471891 - RNA, 22 nt, Human
ccugugugucugucacugcaca

SEQ ID NO: 471892 - RNA, 22 nt, Human
auguuucagauacagaucaaau

SEQ ID NO: 471893 - RNA, 19 nt, Human
gagaggccugugcuugaag

SEQ ID NO: 471894 - RNA, 22 nt, Human
ugcagcugcuggcccaggugcu

SEQ ID NO: 471895 - RNA, 22 nt, Human
acagccuguguaccagcuggga

SEQ ID NO: 471896 - RNA, 22 nt, Human
cccaccccuggacaggugagug

SEQ ID NO: 471897 - RNA, 22 nt, Human
agccagacauggcuccugcucc

SEQ ID NO: 471898 - RNA, 22 nt, Human
ugccagcacuucuggcugucug

SEQ ID NO: 471899 - RNA, 22 nt, Human
cagcagcaugaauucgagccac

SEQ ID NO: 471900 - RNA, 22 nt, Human
acacauuucuaaauuuuuaccg

SEQ ID NO: 471901 - RNA, 22 nt, Human
acagguccuuauaagagcacuc

SEQ ID NO: 471902 - RNA, 22 nt, Human
agcagcaggagccgugggguga

SEQ ID NO: 471903 - RNA, 22 nt, Human
gcagguggcagaggugggaucu

SEQ ID NO: 471904 - RNA, 22 nt, Human
ucagaggauuggacuuuuaugu

SEQ ID NO: 471905 - RNA, 22 nt, Human
gggcugggaauggcuaaguaug

SEQ ID NO: 471906 - RNA, 22 nt, Human
aagagcuggaugaagaaaucaa

SEQ ID NO: 471907 - RNA, 22 nt, Human
uuccucugaaauggcuuggaaa

SEQ ID NO: 471908 - RNA, 22 nt, Human
cugcuguggguuaagacacugu

SEQ ID NO: 471909 - RNA, 22 nt, Human
agcagggcugcggccccaccac

SEQ ID NO: 471910 - RNA, 22 nt, Human
uacauuaacuuacguccacaug

SEQ ID NO: 471911 - RNA, 22 nt, Human
aggaccugagaguuggaaaucc

SEQ ID NO: 471912 - RNA, 22 nt, Human
ggcugagcccccucugcguagg

SEQ ID NO: 471913 - RNA, 22 nt, Human
cuggcucaccuccgcuccagca

SEQ ID NO: 471914 - RNA, 22 nt, Human
uacaaaugaguuguaugaacca

SEQ ID NO: 471915 - RNA, 22 nt, Human
aauauguucaaaauagaucacu

SEQ ID NO: 471916 - RNA, 22 nt, Human
ccugccugauuccaggauggcu

SEQ ID NO: 471917 - RNA, 22 nt, Human
aauuagggagagguagcuaggu

SEQ ID NO: 471918 - RNA, 22 nt, Human
ccuccuggcccugggccuggaa

SEQ ID NO: 471919 - RNA, 22 nt, Human
cucccagguuacaucugagccu

SEQ ID NO: 471920 - RNA, 22 nt, Human
gcaguccucucauuggccuccu

SEQ ID NO: 471921 - RNA, 22 nt, Human
cagucacauggaugauggauag

SEQ ID NO: 471922 - RNA, 22 nt, Human
gcccauggacacccaagugcca

SEQ ID NO: 471923 - RNA, 22 nt, Human
aaaggccaugguuggaguguuu

SEQ ID NO: 471924 - RNA, 22 nt, Human
gccaccagguuagauccagccu

SEQ ID NO: 471925 - RNA, 17 nt, Human
ccaggugggaggugggg

SEQ ID NO: 471926 - RNA, 22 nt, Human
agagcugagaauguggcuuccu

SEQ ID NO: 471927 - RNA, 22 nt, Human
uggcugcuuguuuuagugaggc

SEQ ID NO: 471928 - RNA, 22 nt, Human
ucaaggugcugugcugugcuag

SEQ ID NO: 471929 - RNA, 22 nt, Human
ucuuuuggguucuuaugauuua

SEQ ID NO: 471930 - RNA, 22 nt, Human
auguggaaugaacaaaggaggc

SEQ ID NO: 471931 - RNA, 22 nt, Human
aggccucacucucagagcuucu

SEQ ID NO: 471932 - RNA, 22 nt, Human
ugucccagacacaguaugcgcu

SEQ ID NO: 471933 - RNA, 22 nt, Human
cuggggcuucaaugcuucggug

SEQ ID NO: 471934 - RNA, 22 nt, Human
cauuuguaucugggcugcugug

SEQ ID NO: 471935 - RNA, 22 nt, Human
ugcaaacuauugguagagaugg

SEQ ID NO: 471936 - RNA, 22 nt, Human
caugagauaauuuuucuccagu

SEQ ID NO: 471937 - RNA, 22 nt, Human
ucucacuuuccagacuuuucaa

SEQ ID NO: 471938 - RNA, 22 nt, Human
gaauucuuuucuuucugaaagu

SEQ ID NO: 471939 - RNA, 22 nt, Human
ccuggcugcauuuugcuggaug

SEQ ID NO: 471940 - RNA, 22 nt, Human
agcuccugaaaagcgcuugcuu

SEQ ID NO: 471941 - RNA, 18 nt, Human
caggagcaggaguugaac

SEQ ID NO: 471942 - RNA, 22 nt, Human
guggagacuucuacuagagacc

SEQ ID NO: 471943 - RNA, 22 nt, Human
ccugcaguuuguugugaccccg

SEQ ID NO: 471944 - RNA, 22 nt, Human
gcucugugcaguucagggacac

SEQ ID NO: 471945 - RNA, 22 nt, Human
uuuuuuaguuaggucagaaugu

SEQ ID NO: 471946 - RNA, 22 nt, Human
uggugcugauaauggcaggauu

SEQ ID NO: 471947 - RNA, 22 nt, Human
aggugcaggagcugugcaggga

SEQ ID NO: 471948 - RNA, 22 nt, Human
acaaacuaccuacagauguuca

SEQ ID NO: 471949 - RNA, 22 nt, Human
cacagcuggugcacuagcucug

SEQ ID NO: 471950 - RNA, 22 nt, Human
acacugaauaauugagaguuga

SEQ ID NO: 471951 - RNA, 22 nt, Human
ggaggcugagaaguccaagauc

SEQ ID NO: 471952 - RNA, 22 nt, Human
gaacauuuaugaugcaauaccu

SEQ ID NO: 471953 - RNA, 17 nt, Human
ugaggccugcaucagug

SEQ ID NO: 471954 - RNA, 22 nt, Human
aggaggaggugggacacaguga

SEQ ID NO: 471955 - RNA, 20 nt, Human
gaagccagaggggaaaggag

SEQ ID NO: 471956 - RNA, 22 nt, Human
accaucagucacauguagagaa

SEQ ID NO: 471957 - RNA, 18 nt, Human
cagagcagagguggagcg

SEQ ID NO: 471958 - RNA, 22 nt, Human
gucagugucuuaacagagauua

SEQ ID NO: 471959 - RNA, 22 nt, Human
uuuccucugagugagcugggag

SEQ ID NO: 471960 - RNA, 20 nt, Human
gugggcagcaggcauacugg

SEQ ID NO: 471961 - RNA, 23 nt, Human
gcuguacaggaaccaguuuggag

SEQ ID NO: 471962 - RNA, 22 nt, Human
acccaggagcaggcugggcagu

SEQ ID NO: 471963 - RNA, 22 nt, Human
gaaggccaguuuugagauaggu

SEQ ID NO: 471964 - RNA, 22 nt, Human
agggucagguuaagggagucau

SEQ ID NO: 471965 - RNA, 22 nt, Human
aggaagcccuugucauuucugu

SEQ ID NO: 471966 - RNA, 22 nt, Human
gcugggcagccuggccgcugcc

SEQ ID NO: 471967 - RNA, 22 nt, Human
acacaucagaaauaugaaugag

SEQ ID NO: 471968 - RNA, 21 nt, Human
uagcuuuaauauucccacauu

SEQ ID NO: 471969 - RNA, 22 nt, Human
ugaacauauucaccucuaaaua

SEQ ID NO: 471970 - RNA, 22 nt, Human
uuugaaagucaaccuuccaguu

SEQ ID NO: 471971 - RNA, 22 nt, Human
uguuccuaaauaugaauggaga

SEQ ID NO: 471972 - RNA, 22 nt, Human
cacuggggugggccugguagag

SEQ ID NO: 471973 - RNA, 22 nt, Human
uugaucagguugcuguggugua

SEQ ID NO: 471974 - RNA, 22 nt, Human
acagaacugagaauucucuauc

SEQ ID NO: 471975 - RNA, 22 nt, Human
aggcucugguuggcaaguaaag

SEQ ID NO: 471976 - RNA, 22 nt, Human
aagaacauguuaaaagauucac

SEQ ID NO: 471977 - RNA, 22 nt, Human
gcagccugaggcccuuucuggc

SEQ ID NO: 471978 - RNA, 18 nt, Human
ggagagugagaucaaaca

SEQ ID NO: 471979 - RNA, 22 nt, Human
ugagccugcugucgcuggaccc

SEQ ID NO: 471980 - RNA, 22 nt, Human
ggcugccuacuuucccagaguu

SEQ ID NO: 471981 - RNA, 22 nt, Human
ugcagcuucuuguccugugauu

SEQ ID NO: 471982 - RNA, 22 nt, Human
uggcuucugcuuucaguggagg

SEQ ID NO: 471983 - RNA, 18 nt, Human
cugcugcaggcacucagg

SEQ ID NO: 471984 - RNA, 22 nt, Human
cugcuuccauggucuggagacu

SEQ ID NO: 471985 - RNA, 19 nt, Human
gcaggcaguggcauucgga

SEQ ID NO: 471986 - RNA, 22 nt, Human
gucucagauaacauguauucua

SEQ ID NO: 471987 - RNA, 21 nt, Human
ccuucucuugcuucagcuuca

SEQ ID NO: 471988 - RNA, 22 nt, Human
caguggagagacuuuuacucuu

SEQ ID NO: 471989 - RNA, 22 nt, Human
ucauccagccucaucaggagcu

SEQ ID NO: 471990 - RNA, 22 nt, Human
uaauuuuaacugugcuguuugg

SEQ ID NO: 471991 - RNA, 17 nt, Human
agcugccagggagugug

SEQ ID NO: 471992 - RNA, 22 nt, Human
gcucaggagcugacagccucaa

SEQ ID NO: 471993 - RNA, 21 nt, Human
aggcugcuggcucaggguccu

SEQ ID NO: 471994 - RNA, 18 nt, Human
uccagcgugcuccagggc

SEQ ID NO: 471995 - RNA, 22 nt, Human
agaugguguuuccccaggugga

SEQ ID NO: 471996 - RNA, 23 nt, Human
ccagcccuccaccagcucuaggc

SEQ ID NO: 471997 - RNA, 21 nt, Human
gagagggcauuauaggaagug

SEQ ID NO: 471998 - RNA, 22 nt, Human
gcccuggccuucaucucagaca

SEQ ID NO: 471999 - RNA, 21 nt, Human
cagggcacacagaggauggua

SEQ ID NO: 472000 - RNA, 22 nt, Human
gcagggcaaugaucccgagagg

SEQ ID NO: 472001 - RNA, 22 nt, Human
ggcuugcuucuuguccaggaau

SEQ ID NO: 472002 - RNA, 22 nt, Human
agcagagcuauucuugugcaau

SEQ ID NO: 472003 - RNA, 22 nt, Human
uccucaggagagcuccuaugcc

SEQ ID NO: 472004 - RNA, 22 nt, Human
agggcuagaguugagaugggga

SEQ ID NO: 472005 - RNA, 22 nt, Human
gggugggaucuguggagccuca

SEQ ID NO: 472006 - RNA, 22 nt, Human
auggacaggcugagcuuccuca

SEQ ID NO: 472007 - RNA, 22 nt, Human
acguuuucagccuuaauguaga

SEQ ID NO: 472008 - RNA, 22 nt, Human
ccccaggcagggccuaacagag

SEQ ID NO: 472009 - RNA, 22 nt, Human
aagcaucucuauguggagagug

SEQ ID NO: 472010 - RNA, 22 nt, Human
ggccaggcuggucucagacuuc

SEQ ID NO: 472011 - RNA, 22 nt, Human
aaguucaaggcucuagaguucc

SEQ ID NO: 472012 - RNA, 22 nt, Human
acagagaugcaaguguguauuu

SEQ ID NO: 472013 - RNA, 22 nt, Human
agcaggguauguuagagcugua

SEQ ID NO: 472014 - RNA, 22 nt, Human
agccuggauucgugcauccaca

SEQ ID NO: 472015 - RNA, 22 nt, Human
ucugccugccagucugguccuc

SEQ ID NO: 472016 - RNA, 22 nt, Human
agggucugacugaauggaaaag

SEQ ID NO: 472017 - RNA, 22 nt, Human
gcuccuggcuccaggcagccaa

SEQ ID NO: 472018 - RNA, 22 nt, Human
agcaccuucacaggcucucagg

SEQ ID NO: 472019 - RNA, 22 nt, Human
uauguacauggagagcaauuga

SEQ ID NO: 472020 - RNA, 22 nt, Human
ggcacugaauuucuuggcaucu

SEQ ID NO: 472021 - RNA, 22 nt, Human
guguggcugugggagauguuca

SEQ ID NO: 472022 - RNA, 22 nt, Human
caggcuugggagcagagccacu

SEQ ID NO: 472023 - RNA, 22 nt, Human
uaaguuuuaagcaaucugauaa

SEQ ID NO: 472024 - RNA, 22 nt, Human
cugaguccagggacagaggcgu

SEQ ID NO: 472025 - RNA, 22 nt, Human
aggcagcagugauaagauagga

SEQ ID NO: 472026 - RNA, 22 nt, Human
caggagcucucaucgucagggc

SEQ ID NO: 472027 - RNA, 22 nt, Human
ggcagcaguccauggcccaagg

SEQ ID NO: 472028 - RNA, 22 nt, Human
gggugcaggcagcccaggcagg

SEQ ID NO: 472029 - RNA, 22 nt, Human
aaggcaggaugggaaaagauuu

SEQ ID NO: 472030 - RNA, 22 nt, Human
acagccagaggagccaggcugg

SEQ ID NO: 472031 - RNA, 22 nt, Human
cugagcuggucuauggacuugg

SEQ ID NO: 472032 - RNA, 21 nt, Human
uaaaacuguaacuuuguccug

SEQ ID NO: 472033 - RNA, 22 nt, Human
gugcauguuaaugguguacaaa

SEQ ID NO: 472034 - RNA, 22 nt, Human
cagauuuagaguggggcuugga

SEQ ID NO: 472035 - RNA, 22 nt, Human
ccaaaauguuugaaugcaugug

SEQ ID NO: 472036 - RNA, 22 nt, Human
ugcagggaaaacccaggaugcu

SEQ ID NO: 472037 - RNA, 21 nt, Human
ccugucuuggacugaggcacc

SEQ ID NO: 472038 - RNA, 22 nt, Human
ggguacaaagauuucauaagau

SEQ ID NO: 472039 - RNA, 20 nt, Human
ucagagagagggugccacuu

SEQ ID NO: 472040 - RNA, 22 nt, Human
gcaaggcugugcacuuugcauu

SEQ ID NO: 472041 - RNA, 22 nt, Human
gcucccugaaaagaacaaaguc

SEQ ID NO: 472042 - RNA, 22 nt, Human
agcugcucuuugaaggacacuu

SEQ ID NO: 472043 - RNA, 22 nt, Human
aagaagaugguuaacuuucagu

SEQ ID NO: 472044 - RNA, 22 nt, Human
auuauguaacugugguucagca

SEQ ID NO: 472045 - RNA, 22 nt, Human
cuuacagagaagaaaauguagu

SEQ ID NO: 472046 - RNA, 22 nt, Human
agggcucugggguggcagagau

SEQ ID NO: 472047 - RNA, 22 nt, Human
caaugguggugucagaagagau

SEQ ID NO: 472048 - RNA, 22 nt, Human
ggagcugugcugggugaucagg

SEQ ID NO: 472049 - RNA, 22 nt, Human
aucagcaagacuaggggaauac

SEQ ID NO: 472050 - RNA, 22 nt, Human
ugcugcuccugccuggcuccca

SEQ ID NO: 472051 - RNA, 22 nt, Human
cuggagccaugucuugacugcu

SEQ ID NO: 472052 - RNA, 22 nt, Human
cuuccuggccauugccauggca

SEQ ID NO: 472053 - RNA, 22 nt, Human
uagauuuccucuuccucauucc

SEQ ID NO: 472054 - RNA, 22 nt, Human
gguggcagaauaauugaagguc

SEQ ID NO: 472055 - RNA, 22 nt, Human
cagccccucccucaggcaggug

SEQ ID NO: 472056 - RNA, 22 nt, Human
ggaggccaaggcgggcggauca

SEQ ID NO: 472057 - RNA, 22 nt, Human
ugaaugauuugggugcauucag

SEQ ID NO: 472058 - RNA, 22 nt, Human
ugaggcagguggauuacaaggu

SEQ ID NO: 472059 - RNA, 22 nt, Human
ucagcuuuuuggauugcccaag

SEQ ID NO: 472060 - RNA, 22 nt, Human
ccugagggaaggaugcuaccca

SEQ ID NO: 472061 - RNA, 22 nt, Human
gccugaugagcuuccagcugag

SEQ ID NO: 472062 - RNA, 22 nt, Human
aagagcauauuaauaguggaga

SEQ ID NO: 472063 - RNA, 22 nt, Human
agggauguaaauucuucuucuu

SEQ ID NO: 472064 - RNA, 22 nt, Human
ucuuucagccacuuaccugucu

SEQ ID NO: 472065 - RNA, 22 nt, Human
caguauuuguucccuaucaaug

SEQ ID NO: 472066 - RNA, 22 nt, Human
agcucugacauugauucucagc

SEQ ID NO: 472067 - RNA, 22 nt, Human
uaaaugcaagugcuccugggag

SEQ ID NO: 472068 - RNA, 22 nt, Human
uuuucauuuuuguagaugcaag

SEQ ID NO: 472069 - RNA, 22 nt, Human
gacacagagauaggccuguguu

SEQ ID NO: 472070 - RNA, 22 nt, Human
aaaauaucagcaaagggugaca

SEQ ID NO: 472071 - RNA, 22 nt, Human
uuaaagggccgauuuccaggcc

SEQ ID NO: 472072 - RNA, 22 nt, Human
gugaggcagcaggagccucugu

SEQ ID NO: 472073 - RNA, 22 nt, Human
aggaggaggcuggaguacaccc

SEQ ID NO: 472074 - RNA, 22 nt, Human
ucuuugcuccacacucuagaga

SEQ ID NO: 472075 - RNA, 22 nt, Human
agccacagcccacaggacucuu

SEQ ID NO: 472076 - RNA, 22 nt, Human
gcauacagagaggauguggcau

SEQ ID NO: 472077 - RNA, 18 nt, Human
cugcugugucgucugggc

SEQ ID NO: 472078 - RNA, 22 nt, Human
cuuucacagcacaagccugccu

SEQ ID NO: 472079 - RNA, 19 nt, Human
gucagcaccauggacaggg

SEQ ID NO: 472080 - RNA, 22 nt, Human
ugccucugugugcaggugagca

SEQ ID NO: 472081 - RNA, 22 nt, Human
ucagagugggagaaugugccaa

SEQ ID NO: 472082 - RNA, 22 nt, Human
ggcagugagcuggagggaagga

SEQ ID NO: 472083 - RNA, 22 nt, Human
gcagcuggcucagagagguggg

SEQ ID NO: 472084 - RNA, 22 nt, Human
uuugcaaauauguguuucuauu

SEQ ID NO: 472085 - RNA, 22 nt, Human
cagcaggaggugaguagcaggu

SEQ ID NO: 472086 - RNA, 22 nt, Human
gcucugagcacugugcggcugg

SEQ ID NO: 472087 - RNA, 22 nt, Human
uccagccuuucuacucacugag

SEQ ID NO: 472088 - RNA, 22 nt, Human
aggcacugacaauucuggacug

SEQ ID NO: 472089 - RNA, 19 nt, Human
aggacccuuauccuggcuu

SEQ ID NO: 472090 - RNA, 20 nt, Human
ccugucugcaauggagguca

SEQ ID NO: 472091 - RNA, 22 nt, Human
aagaugauaggacuugcuuaag

SEQ ID NO: 472092 - RNA, 20 nt, Human
cauuaugguugggcacagug

SEQ ID NO: 472093 - RNA, 22 nt, Human
aggcuucacgaugggugaggug

SEQ ID NO: 472094 - RNA, 22 nt, Human
uaaacaaggguuacugagcaug

SEQ ID NO: 472095 - RNA, 22 nt, Human
aaggugucggcagagccgcuuc

SEQ ID NO: 472096 - RNA, 22 nt, Human
ugggcuggcugaacuucaaccu

SEQ ID NO: 472097 - RNA, 22 nt, Human
auggcagccuguggacagucaa

SEQ ID NO: 472098 - RNA, 22 nt, Human
caagagcuuuagaaaugcucau

SEQ ID NO: 472099 - RNA, 20 nt, Human
ccugccugccucggcucauu

SEQ ID NO: 472100 - RNA, 22 nt, Human
gacaagacaccucucuccaucc

SEQ ID NO: 472101 - RNA, 22 nt, Human
gaaaggucuuccggucuuccag

SEQ ID NO: 472102 - RNA, 22 nt, Human
ucuggcucauacaagccugcaa

SEQ ID NO: 472103 - RNA, 22 nt, Human
cuggugcaggaaggagcuggca

SEQ ID NO: 472104 - RNA, 22 nt, Human
ucagggacagggugcugcugcg

SEQ ID NO: 472105 - RNA, 18 nt, Human
ugaauuaguuugugguuu

SEQ ID NO: 472106 - RNA, 22 nt, Human
gccagcagguugucaaggagcu

SEQ ID NO: 472107 - RNA, 22 nt, Human
ccguggaguugugcugaguaug

SEQ ID NO: 472108 - RNA, 22 nt, Human
uagcuuuaaaaaucaucaaagc

SEQ ID NO: 472109 - RNA, 22 nt, Human
gugucaugggagucagaaguga

SEQ ID NO: 472110 - RNA, 21 nt, Human
uggaaagauucaaagaccagg

SEQ ID NO: 472111 - RNA, 22 nt, Human
aguggcagagaccccagccagc

SEQ ID NO: 472112 - RNA, 22 nt, Human
uagaaaggauauugagaugaau

SEQ ID NO: 472113 - RNA, 22 nt, Human
ccugggcagugcuggaguugaa

SEQ ID NO: 472114 - RNA, 22 nt, Human
auccccagaaaauaggugccua

SEQ ID NO: 472115 - RNA, 22 nt, Human
ugaguccaauaggggccuggaa

SEQ ID NO: 472116 - RNA, 22 nt, Human
uaaaugugucuauggacccgcc

SEQ ID NO: 472117 - RNA, 22 nt, Human
ugcccacauggugccauggcca

SEQ ID NO: 472118 - RNA, 22 nt, Human
cuuucaaugugccugccuuggg

SEQ ID NO: 472119 - RNA, 22 nt, Human
acccagccuacaaagcucaccu

SEQ ID NO: 472120 - RNA, 18 nt, Human
uggaggcagaguucuggc

SEQ ID NO: 472121 - RNA, 20 nt, Human
gcaugaggaaucauugcagc

SEQ ID NO: 472122 - RNA, 21 nt, Human
gugguuauuuucauuagcauc

SEQ ID NO: 472123 - RNA, 22 nt, Human
ugcagggaagcaaggguggcuc

SEQ ID NO: 472124 - RNA, 21 nt, Human
ggcagcugaccgcgcggugca

SEQ ID NO: 472125 - RNA, 19 nt, Human
cuguggcugaccucuggcc

SEQ ID NO: 472126 - RNA, 22 nt, Human
aagacauuacuggaaucugacu

SEQ ID NO: 472127 - RNA, 22 nt, Human
ugcagaagacacaagguaacgu

SEQ ID NO: 472128 - RNA, 22 nt, Human
gcuguacaaggccucugccauc

SEQ ID NO: 472129 - RNA, 22 nt, Human
uaacagaauagcagaaacagaa

SEQ ID NO: 472130 - RNA, 22 nt, Human
agggagaaugaccaagguauau

SEQ ID NO: 472131 - RNA, 19 nt, Human
uggggcuguguuuugaccc

SEQ ID NO: 472132 - RNA, 20 nt, Human
aggagcugaauuagaggguu

SEQ ID NO: 472133 - RNA, 22 nt, Human
ugagcugggaguggugaugagg

SEQ ID NO: 472134 - RNA, 22 nt, Human
aggcacuggguaauuaguagcu

SEQ ID NO: 472135 - RNA, 22 nt, Human
ugggccugugaugcugggcuau

SEQ ID NO: 472136 - RNA, 22 nt, Human
caggcacugugcaagggucucg

SEQ ID NO: 472137 - RNA, 19 nt, Human
ugcagaagacacaguggug

SEQ ID NO: 472138 - RNA, 22 nt, Human
ucaaaugcggucauggcuuuua

SEQ ID NO: 472139 - RNA, 22 nt, Human
uagaaacucaggauacucuucc

SEQ ID NO: 472140 - RNA, 22 nt, Human
aggcacaggaaugucauccagu

SEQ ID NO: 472141 - RNA, 22 nt, Human
ucacugaauacuugucucaucc

SEQ ID NO: 472142 - RNA, 22 nt, Human
ugugugacccccagugaagccu

SEQ ID NO: 472143 - RNA, 22 nt, Human
cacugcauggaugauggcugua

SEQ ID NO: 472144 - RNA, 18 nt, Human
aucuuuccauagcauguu

SEQ ID NO: 472145 - RNA, 22 nt, Human
gcuuccuggagggagagagcug

SEQ ID NO: 472146 - RNA, 22 nt, Human
ggagucagccugucagagugua

SEQ ID NO: 472147 - RNA, 22 nt, Human
cagagcaugaauaaaaguuaca

SEQ ID NO: 472148 - RNA, 22 nt, Human
caugcuuucuguccaaauguua

SEQ ID NO: 472149 - RNA, 22 nt, Human
uugcuuccaguccaagucuguu

SEQ ID NO: 472150 - RNA, 20 nt, Human
cagagcuguuauggaugaug

SEQ ID NO: 472151 - RNA, 20 nt, Human
aauaaaagaagccuucaccc

SEQ ID NO: 472152 - RNA, 22 nt, Human
uucaggauggaguaccuuuuau

SEQ ID NO: 472153 - RNA, 22 nt, Human
ucccagccauuccuuuaggugu

SEQ ID NO: 472154 - RNA, 22 nt, Human
ucugugaacaucacauugacag

SEQ ID NO: 472155 - RNA, 22 nt, Human
ugggcagaggcagcagaaaccu

SEQ ID NO: 472156 - RNA, 22 nt, Human
uuuuaucuucauuccuaucuac

SEQ ID NO: 472157 - RNA, 22 nt, Human
aggaccagccuccaggucucuu

SEQ ID NO: 472158 - RNA, 21 nt, Human
gcagaggaaugguauacauaa

SEQ ID NO: 472159 - RNA, 22 nt, Human
caguagccacuagacacaugua

SEQ ID NO: 472160 - RNA, 22 nt, Human
agccauccucccaccucagccu

SEQ ID NO: 472161 - RNA, 22 nt, Human
gagcucaggagcaucagaagaa

SEQ ID NO: 472162 - RNA, 22 nt, Human
cccagcaguaaccaguggaaau

SEQ ID NO: 472163 - RNA, 22 nt, Human
accagggcacaggagucugaag

SEQ ID NO: 472164 - RNA, 22 nt, Human
cagugggcugugauggauucac

SEQ ID NO: 472165 - RNA, 22 nt, Human
aagaguuaagcaacagauacca

SEQ ID NO: 472166 - RNA, 23 nt, Human
cagaagcaccuguugacugcugc

SEQ ID NO: 472167 - RNA, 22 nt, Human
cccuggaguccggagcucaccu

SEQ ID NO: 472168 - RNA, 22 nt, Human
uuccauauguauauagcuguua

SEQ ID NO: 472169 - RNA, 18 nt, Human
uggagccagcucuaggau

SEQ ID NO: 472170 - RNA, 22 nt, Human
acauuucuaguuguucaucucc

SEQ ID NO: 472171 - RNA, 22 nt, Human
aggucccaggcauagcuggucu

SEQ ID NO: 472172 - RNA, 22 nt, Human
gcuguauuuaacaacuggcuca

SEQ ID NO: 472173 - RNA, 22 nt, Human
cuggagccauguauagccuaug

SEQ ID NO: 472174 - RNA, 22 nt, Human
ggcuucagugacuggugcccuc

SEQ ID NO: 472175 - RNA, 22 nt, Human
agagccaggaugucuucugggg

SEQ ID NO: 472176 - RNA, 22 nt, Human
ucucccaguccucugugcuuac

SEQ ID NO: 472177 - RNA, 22 nt, Human
gcuccucuucucccacugaaug

SEQ ID NO: 472178 - RNA, 19 nt, Human
cuccucagucccagagguc

SEQ ID NO: 472179 - RNA, 22 nt, Human
agagccagcaacucuagcccug

SEQ ID NO: 472180 - RNA, 22 nt, Human
gaagccacaacuuuuucuuagc

SEQ ID NO: 472181 - RNA, 22 nt, Human
cggcuggggcuguccccaugac

SEQ ID NO: 472182 - RNA, 22 nt, Human
uacauauagacaguuacucuag

SEQ ID NO: 472183 - RNA, 21 nt, Human
ucaggggcuguguuuuccauc

SEQ ID NO: 472184 - RNA, 18 nt, Human
cugaggcuuagagagguu

SEQ ID NO: 472185 - RNA, 22 nt, Human
agggcugagugggagagaguug

SEQ ID NO: 472186 - RNA, 18 nt, Human
ugacagaaccuggagccu

SEQ ID NO: 472187 - RNA, 22 nt, Human
caggcugucugaauggaggccc

SEQ ID NO: 472188 - RNA, 22 nt, Human
auaaauuuauaauuguuuccug

SEQ ID NO: 472189 - RNA, 19 nt, Human
guuucauuaagauaggaaa

SEQ ID NO: 472190 - RNA, 22 nt, Human
ugaguacucggagugcuuugga

SEQ ID NO: 472191 - RNA, 22 nt, Human
uguggcuuaagaaugccuuuaa

SEQ ID NO: 472192 - RNA, 22 nt, Human
uuucuacauuuguaaccagauu

SEQ ID NO: 472193 - RNA, 22 nt, Human
cugccagguuggcgcucgcucu

SEQ ID NO: 472194 - RNA, 22 nt, Human
gagagucacugucugcauuucc

SEQ ID NO: 472195 - RNA, 22 nt, Human
gaagagcuaaaggcacaggcuu

SEQ ID NO: 472196 - RNA, 22 nt, Human
uuucuacaugucaauccaaacc

SEQ ID NO: 472197 - RNA, 22 nt, Human
ucaggcagguuggcugcagguc

SEQ ID NO: 472198 - RNA, 22 nt, Human
auagaacagaaacagaugcaca

SEQ ID NO: 472199 - RNA, 22 nt, Human
gcuguggaaaugccuaacauga

SEQ ID NO: 472200 - RNA, 22 nt, Human
gcuggagauaguaggauccaua

SEQ ID NO: 472201 - RNA, 22 nt, Human
uaaauucccaacucugcucuuc

SEQ ID NO: 472202 - RNA, 22 nt, Human
uggagcugagaaguggagcucu

SEQ ID NO: 472203 - RNA, 22 nt, Human
auacauguucguguacauguuc

SEQ ID NO: 472204 - RNA, 22 nt, Human
gugggcaaggucccugccagcu

SEQ ID NO: 472205 - RNA, 22 nt, Human
ggccuuggugcucuguguugca

SEQ ID NO: 472206 - RNA, 22 nt, Human
gagaggaguagacacuuugguu

SEQ ID NO: 472207 - RNA, 22 nt, Human
augugaaagagguguucagugg

SEQ ID NO: 472208 - RNA, 22 nt, Human
gcugucccaugguugcaagaug

SEQ ID NO: 472209 - RNA, 22 nt, Human
agcuuuguggcuuugcaagacu

SEQ ID NO: 472210 - RNA, 23 nt, Human
gccaggcuccggucuguggccac

SEQ ID NO: 472211 - RNA, 22 nt, Human
augcaacaaaugcuacgaaucg

SEQ ID NO: 472212 - RNA, 22 nt, Human
gaggggcugcccuggugucagg

SEQ ID NO: 472213 - RNA, 22 nt, Human
ggagccugggcauuaguaauuu

SEQ ID NO: 472214 - RNA, 22 nt, Human
cucccucugucuuguccagaaa

SEQ ID NO: 472215 - RNA, 22 nt, Human
uucaagaugcacaguggcauuc

SEQ ID NO: 472216 - RNA, 22 nt, Human
aaugauugcaaacauugagaac

SEQ ID NO: 472217 - RNA, 22 nt, Human
cugugucccccucagccaggug

SEQ ID NO: 472218 - RNA, 22 nt, Human
gccccagguugccugucccagg

SEQ ID NO: 472219 - RNA, 22 nt, Human
uggcucuggggacaguaagucc

SEQ ID NO: 472220 - RNA, 22 nt, Human
agccucugucaagcuuuucaaa

SEQ ID NO: 472221 - RNA, 22 nt, Human
cccaguggaaggaguagaagac

SEQ ID NO: 472222 - RNA, 22 nt, Human
ugggcagacgcuguuggaaggc

SEQ ID NO: 472223 - RNA, 22 nt, Human
caaggcaguuccccagagggcu

SEQ ID NO: 472224 - RNA, 22 nt, Human
ccagcagaagcucccgcugggu

SEQ ID NO: 472225 - RNA, 22 nt, Human
gagggaggcaucaugaauccag

SEQ ID NO: 472226 - RNA, 22 nt, Human
ggcccuguccuggcugucuccg

SEQ ID NO: 472227 - RNA, 22 nt, Human
ggcuggagugggcuccagaguu

SEQ ID NO: 472228 - RNA, 22 nt, Human
gagcugcccugagcuuugcaug

SEQ ID NO: 472229 - RNA, 22 nt, Human
cugagaggugacagcgugcugg

SEQ ID NO: 472230 - RNA, 20 nt, Human
aggcucagauacccagggaa

SEQ ID NO: 472231 - RNA, 20 nt, Human
aggaaaaauggaaacuggag

SEQ ID NO: 472232 - RNA, 20 nt, Human
gcaaggcacagugaggaggg

SEQ ID NO: 472233 - RNA, 17 nt, Human
acucaggaucugggagu

SEQ ID NO: 472234 - RNA, 20 nt, Human
uggggccuguuucugugguu

SEQ ID NO: 472235 - RNA, 22 nt, Human
uagagcuauuuagagcauuuua

SEQ ID NO: 472236 - RNA, 22 nt, Human
acccagggaccccgcugacgcc

SEQ ID NO: 472237 - RNA, 23 nt, Human
gugauuucagggaacagaaucag

SEQ ID NO: 472238 - RNA, 22 nt, Human
uccuuggcaugccgucuucucc

SEQ ID NO: 472239 - RNA, 22 nt, Human
uagaaaagaauuuuauuugaua

SEQ ID NO: 472240 - RNA, 19 nt, Human
caaguucuggagauuaggg

SEQ ID NO: 472241 - RNA, 22 nt, Human
ucugucacucuagagauggcag

SEQ ID NO: 472242 - RNA, 20 nt, Human
cagcucugggaaagaggcca

SEQ ID NO: 472243 - RNA, 22 nt, Human
ugcuuuauuggaaccucauccu

SEQ ID NO: 472244 - RNA, 19 nt, Human
ucaaugcaugaaaucagcc

SEQ ID NO: 472245 - RNA, 22 nt, Human
cccaggcugaguuagagguguc

SEQ ID NO: 472246 - RNA, 22 nt, Human
agaagccauaguaucucagggu

SEQ ID NO: 472247 - RNA, 22 nt, Human
augggaggaucacuugaggcca

SEQ ID NO: 472248 - RNA, 22 nt, Human
uaaguucauaagcuuauucuua

SEQ ID NO: 472249 - RNA, 22 nt, Human
uuugcauuuugauaagaucacu

SEQ ID NO: 472250 - RNA, 22 nt, Human
cugagcacugggcacauagcug

SEQ ID NO: 472251 - RNA, 22 nt, Human
gacuuuggcaucuagacauugu

SEQ ID NO: 472252 - RNA, 22 nt, Human
gaguggagaucgugccacugca

SEQ ID NO: 472253 - RNA, 22 nt, Human
cuggcagcuuagcacucugguu

SEQ ID NO: 472254 - RNA, 22 nt, Human
ggccugugagcccuugcaugua

SEQ ID NO: 472255 - RNA, 22 nt, Human
cuacauuuuucaccgagccucu

SEQ ID NO: 472256 - RNA, 21 nt, Human
ugaggcucuguugugccugca

SEQ ID NO: 472257 - RNA, 22 nt, Human
aaggccagccugagagcuaaca

SEQ ID NO: 472258 - RNA, 22 nt, Human
caucagcacuaugauuaaagua

SEQ ID NO: 472259 - RNA, 22 nt, Human
cccugccucugaagcugcucag

SEQ ID NO: 472260 - RNA, 22 nt, Human
uguagaaauuaguaagaucaac

SEQ ID NO: 472261 - RNA, 22 nt, Human
ugggcugaguguggaacuaguu

SEQ ID NO: 472262 - RNA, 22 nt, Human
ugagcccaggaguuggaggcug

SEQ ID NO: 472263 - RNA, 22 nt, Human
ggcagucagugugguucauaaa

SEQ ID NO: 472264 - RNA, 22 nt, Human
acagagcaauucuuggguguuu

SEQ ID NO: 472265 - RNA, 22 nt, Human
aaaugcacaaaguaaguguaau

SEQ ID NO: 472266 - RNA, 23 nt, Human
gggagccaggaccucgcgcccca

SEQ ID NO: 472267 - RNA, 22 nt, Human
agggcagaaguacagacacuua

SEQ ID NO: 472268 - RNA, 22 nt, Human
agcagggcuugccgcuuguccu

SEQ ID NO: 472269 - RNA, 22 nt, Human
agggaaauuaaugugagcaaug

SEQ ID NO: 472270 - RNA, 22 nt, Human
cuguucucuggcgguggcuguu

SEQ ID NO: 472271 - RNA, 22 nt, Human
acagggcaugugcaagagacau

SEQ ID NO: 472272 - RNA, 22 nt, Human
agacagggucuugaucagagcu

SEQ ID NO: 472273 - RNA, 22 nt, Human
aaggcagcagugcacgacugau

SEQ ID NO: 472274 - RNA, 22 nt, Human
aggggugauuugggacaggaca

SEQ ID NO: 472275 - RNA, 22 nt, Human
caggcacucauucagagaggug

SEQ ID NO: 472276 - RNA, 22 nt, Human
cugcccagaaucacucacucga

SEQ ID NO: 472277 - RNA, 23 nt, Human
agugcugaauugaaagcuccagg

SEQ ID NO: 472278 - RNA, 22 nt, Human
cuguaauucacuagggucagcg

SEQ ID NO: 472279 - RNA, 22 nt, Human
ccccagcugcauacuugccaag

SEQ ID NO: 472280 - RNA, 22 nt, Human
ugggcagaaugugggauccaga

SEQ ID NO: 472281 - RNA, 18 nt, Human
ggcuuugcugggguuucu

SEQ ID NO: 472282 - RNA, 20 nt, Human
uccaguuuuggagacauucu

SEQ ID NO: 472283 - RNA, 22 nt, Human
ccugauggagcccugcugcaug

SEQ ID NO: 472284 - RNA, 22 nt, Human
ggcugcuucucacucauuugca

SEQ ID NO: 472285 - RNA, 22 nt, Human
cagcugccaagaaucuuuucua

SEQ ID NO: 472286 - RNA, 22 nt, Human
cagcuuuccagagaccugcccc

SEQ ID NO: 472287 - RNA, 22 nt, Human
aggcagugagugugacuucaca

SEQ ID NO: 472288 - RNA, 18 nt, Human
ggcagcaagaagggaggg

SEQ ID NO: 472289 - RNA, 22 nt, Human
ccaggccuagccccugagggua

SEQ ID NO: 472290 - RNA, 22 nt, Human
gcugccacgaucucugcuguag

SEQ ID NO: 472291 - RNA, 22 nt, Human
cuuguauuccccuaucucuaaa

SEQ ID NO: 472292 - RNA, 22 nt, Human
uaaguucauuagacuacagaua

SEQ ID NO: 472293 - RNA, 22 nt, Human
uuugggaacucuaucauggaaa

SEQ ID NO: 472294 - RNA, 22 nt, Human
aggaauucaagaccagcugggc

SEQ ID NO: 472295 - RNA, 22 nt, Human
gccccucccagucaggagcacu

SEQ ID NO: 472296 - RNA, 22 nt, Human
uggcugaggcuuuucuuaaaga

SEQ ID NO: 472297 - RNA, 22 nt, Human
ccuguauuagguagacaacuau

SEQ ID NO: 472298 - RNA, 22 nt, Human
cgggcagugcccagcggggcag

SEQ ID NO: 472299 - RNA, 22 nt, Human
aauuuagaauucgcuagcuaau

SEQ ID NO: 472300 - RNA, 22 nt, Human
agugaaaucagguuuugacugc

SEQ ID NO: 472301 - RNA, 22 nt, Human
cagggcagcuuccuuuguuagg

SEQ ID NO: 472302 - RNA, 23 nt, Human
ugggucagcugccuccaggacaa

SEQ ID NO: 472303 - RNA, 22 nt, Human
acagcuguggucuccuuagugu

SEQ ID NO: 472304 - RNA, 22 nt, Human
uggcugcaguucacaggagcaa

SEQ ID NO: 472305 - RNA, 20 nt, Human
aacagggggcugcagagggc

SEQ ID NO: 472306 - RNA, 22 nt, Human
cugggcucagcccaugcugucc

SEQ ID NO: 472307 - RNA, 22 nt, Human
caguguuugcuuaaguuauaug

SEQ ID NO: 472308 - RNA, 22 nt, Human
uuucacaaugcaauccuacuuc

SEQ ID NO: 472309 - RNA, 22 nt, Human
caaaugcaggucagcagguguc

SEQ ID NO: 472310 - RNA, 22 nt, Human
ccagccuucugagcugccugga

SEQ ID NO: 472311 - RNA, 22 nt, Human
gagugcaucguggccauuuuaa

SEQ ID NO: 472312 - RNA, 22 nt, Human
ucaagucuugaugagacaaacc

SEQ ID NO: 472313 - RNA, 22 nt, Human
aggcacuguucccaguuauccu

SEQ ID NO: 472314 - RNA, 23 nt, Human
cuuucauugugguuucacagagc

SEQ ID NO: 472315 - RNA, 22 nt, Human
gagccuggauagccuuguucca

SEQ ID NO: 472316 - RNA, 20 nt, Human
aggcacuguugucuguaucc

SEQ ID NO: 472317 - RNA, 22 nt, Human
gaagggugugugugagggacac

SEQ ID NO: 472318 - RNA, 22 nt, Human
aagcagugcgcucaucuaaggg

SEQ ID NO: 472319 - RNA, 22 nt, Human
caggugucaaaauacuaagugg

SEQ ID NO: 472320 - RNA, 22 nt, Human
uagcauuuggacauugucaccu

SEQ ID NO: 472321 - RNA, 21 nt, Human
gcucagaguauugcacuguuu

SEQ ID NO: 472322 - RNA, 22 nt, Human
gauuuauuggucuuucauuggu

SEQ ID NO: 472323 - RNA, 22 nt, Human
caggcagcugaggacuuugcua

SEQ ID NO: 472324 - RNA, 22 nt, Human
ugggcugcuguuacaggggcug

SEQ ID NO: 472325 - RNA, 22 nt, Human
aggccugggcaagaaggggcgu

SEQ ID NO: 472326 - RNA, 22 nt, Human
uuaaauuccagccucauaauag

SEQ ID NO: 472327 - RNA, 22 nt, Human
uccaugggaagauuuugagugg

SEQ ID NO: 472328 - RNA, 22 nt, Human
ggcuuuaugcacagcagauggu

SEQ ID NO: 472329 - RNA, 22 nt, Human
uggagcugggguuugaaucugg

SEQ ID NO: 472330 - RNA, 19 nt, Human
agggcugcucuggccuggg

SEQ ID NO: 472331 - RNA, 22 nt, Human
agggucugacaaugugacuuag

SEQ ID NO: 472332 - RNA, 22 nt, Human
auacuuuggggguuaguguaga

SEQ ID NO: 472333 - RNA, 22 nt, Human
agccaggccuuagggagaggca

SEQ ID NO: 472334 - RNA, 22 nt, Human
caggccuggggcuggcuuccag

SEQ ID NO: 472335 - RNA, 22 nt, Human
aagggcagccugacucacgguc

SEQ ID NO: 472336 - RNA, 22 nt, Human
ucaggcagcuccaggaauggua

SEQ ID NO: 472337 - RNA, 22 nt, Human
aaauguucuacuuugauaauua

SEQ ID NO: 472338 - RNA, 22 nt, Human
gcugccucaggcaccuccuggc

SEQ ID NO: 472339 - RNA, 19 nt, Human
acacagggaucagaggguu

SEQ ID NO: 472340 - RNA, 22 nt, Human
cagccaggcccccgagucguug

SEQ ID NO: 472341 - RNA, 22 nt, Human
guguuuuaucagacaaaguaua

SEQ ID NO: 472342 - RNA, 22 nt, Human
caggcacuggccagucagcaca

SEQ ID NO: 472343 - RNA, 22 nt, Human
gagggauggugugagaggcuca

SEQ ID NO: 472344 - RNA, 22 nt, Human
gagaggccaaaaucccugcccc

SEQ ID NO: 472345 - RNA, 22 nt, Human
gaagcagcucagauugacugaa

SEQ ID NO: 472346 - RNA, 22 nt, Human
gggaccugccauugcucacagg

SEQ ID NO: 472347 - RNA, 22 nt, Human
agaugcagaaaaacuaagugau

SEQ ID NO: 472348 - RNA, 22 nt, Human
acagaguagcucaagaagauug

SEQ ID NO: 472349 - RNA, 22 nt, Human
agggccagaggcaccuugcagc

SEQ ID NO: 472350 - RNA, 22 nt, Human
aaagauuucacaucccaagccu

SEQ ID NO: 472351 - RNA, 22 nt, Human
gccuggaggggccaggguggua

SEQ ID NO: 472352 - RNA, 22 nt, Human
uguucauuuggcccuuuuguau

SEQ ID NO: 472353 - RNA, 22 nt, Human
cugggcuacguguugacagcau

SEQ ID NO: 472354 - RNA, 22 nt, Human
gcagaagcuguucgaaggccgc

SEQ ID NO: 472355 - RNA, 22 nt, Human
cucaacagcucugccauacucc

SEQ ID NO: 472356 - RNA, 22 nt, Human
gggccccaaaaugccaggcucu

SEQ ID NO: 472357 - RNA, 22 nt, Human
aaguucaaggcagguccugagg

SEQ ID NO: 472358 - RNA, 22 nt, Human
gggucucucucggcuccacgcg

SEQ ID NO: 472359 - RNA, 19 nt, Human
ccugcagggaugagagguu

SEQ ID NO: 472360 - RNA, 22 nt, Human
ggauggcauguugggcucuguu

SEQ ID NO: 472361 - RNA, 22 nt, Human
ugcugugguucccagaguggau

SEQ ID NO: 472362 - RNA, 22 nt, Human
guuagggaucaggaacaagagc

SEQ ID NO: 472363 - RNA, 22 nt, Human
uccaggcauuggagagauaaug

SEQ ID NO: 472364 - RNA, 22 nt, Human
cugcugugcacccaggaaggcu

SEQ ID NO: 472365 - RNA, 22 nt, Human
agcaccugcuaugugucaggga

SEQ ID NO: 472366 - RNA, 22 nt, Human
caggcagcgcucguggccuggc

SEQ ID NO: 472367 - RNA, 22 nt, Human
uccagggaagagcagaggcuac

SEQ ID NO: 472368 - RNA, 22 nt, Human
aaggccaugaccacuugcugug

SEQ ID NO: 472369 - RNA, 22 nt, Human
aaguuugacagaaguuucuaau

SEQ ID NO: 472370 - RNA, 22 nt, Human
cugccuggguucaaguccuguu

SEQ ID NO: 472371 - RNA, 22 nt, Human
cuauugcauuugcaucuucauc

SEQ ID NO: 472372 - RNA, 22 nt, Human
auuuucuauucugcugguuuag

SEQ ID NO: 472373 - RNA, 22 nt, Human
uggcugagggggcaguucagga

SEQ ID NO: 472374 - RNA, 22 nt, Human
ugaguagcggcuauguguaacu

SEQ ID NO: 472375 - RNA, 22 nt, Human
agccacagcuccuugguggaga

SEQ ID NO: 472376 - RNA, 22 nt, Human
cacaggaggaggccagagcgua

SEQ ID NO: 472377 - RNA, 22 nt, Human
gacagccucaugaggagcaaaa

SEQ ID NO: 472378 - RNA, 22 nt, Human
uuauuuuguagcucugaucuuu

SEQ ID NO: 472379 - RNA, 22 nt, Human
ucagaguggugguuuugccuuc

SEQ ID NO: 472380 - RNA, 22 nt, Human
acaggcagguccugucccagcu

SEQ ID NO: 472381 - RNA, 22 nt, Human
auaagguaugaaaaguaaaugg

SEQ ID NO: 472382 - RNA, 22 nt, Human
ucugaaaguaucuggaucuuuu

SEQ ID NO: 472383 - RNA, 22 nt, Human
uaaggccaaguucauauacaac

SEQ ID NO: 472384 - RNA, 22 nt, Human
agcagagucugugugcacuuua

SEQ ID NO: 472385 - RNA, 22 nt, Human
aggggugaaagagggcccucaa

SEQ ID NO: 472386 - RNA, 22 nt, Human
cuguccuuacugcuucuggcuu

SEQ ID NO: 472387 - RNA, 20 nt, Human
cugugcuuuggaaccuggaa

SEQ ID NO: 472388 - RNA, 22 nt, Human
cauugcacuccaucuugggcaa

SEQ ID NO: 472389 - RNA, 19 nt, Human
ucauuguugguuugucggg

SEQ ID NO: 472390 - RNA, 22 nt, Human
acccuggguucccgcagcacca

SEQ ID NO: 472391 - RNA, 22 nt, Human
gccaaaucuggauuuagcaaga

SEQ ID NO: 472392 - RNA, 22 nt, Human
ggaggaccugcuggcccugcaa

SEQ ID NO: 472393 - RNA, 22 nt, Human
gaacagaagaggcuggugccac

SEQ ID NO: 472394 - RNA, 22 nt, Human
acaguaauuaaaauggaucugc

SEQ ID NO: 472395 - RNA, 22 nt, Human
caggcagcaggagcccugcucg

SEQ ID NO: 472396 - RNA, 22 nt, Human
uuacauuuugggguaaggauaa

SEQ ID NO: 472397 - RNA, 22 nt, Human
cuacuuuaauuuucugcagaga

SEQ ID NO: 472398 - RNA, 22 nt, Human
gcuuuaaaccucuacucugucc

SEQ ID NO: 472399 - RNA, 22 nt, Human
ccuccaggaacuugagagacac

SEQ ID NO: 472400 - RNA, 22 nt, Human
caggugcuguccugcacauguc

SEQ ID NO: 472401 - RNA, 22 nt, Human
ucuacugcacuggugucucauc

SEQ ID NO: 472402 - RNA, 21 nt, Human
uuugcauuuuacaugugggga

SEQ ID NO: 472403 - RNA, 16 nt, Human
gcacacacaucaauga

SEQ ID NO: 472404 - RNA, 22 nt, Human
ucucgacagccuggcacagugg

SEQ ID NO: 472405 - RNA, 22 nt, Human
cccucugcaggcuggaccugcc

SEQ ID NO: 472406 - RNA, 22 nt, Human
ugagcuucuuuauuuggccaga

SEQ ID NO: 472407 - RNA, 23 nt, Human
agagcuuagggaauucacaugag

SEQ ID NO: 472408 - RNA, 22 nt, Human
ugggcccugacuucaagcaucc

SEQ ID NO: 472409 - RNA, 22 nt, Human
uauagaagagacaugugcauag

SEQ ID NO: 472410 - RNA, 22 nt, Human
gucacaggccuggaugaggggc

SEQ ID NO: 472411 - RNA, 20 nt, Human
ggaagcagagaacuguuuuc

SEQ ID NO: 472412 - RNA, 19 nt, Human
ugggaguggggaagguccu

SEQ ID NO: 472413 - RNA, 22 nt, Human
uauuuccaagcugaauccaaug

SEQ ID NO: 472414 - RNA, 22 nt, Human
agaaguaggcagggcuguauca

SEQ ID NO: 472415 - RNA, 22 nt, Human
agugaccauuuucagcuagagg

SEQ ID NO: 472416 - RNA, 22 nt, Human
gcagaauguaggccuucagugu

SEQ ID NO: 472417 - RNA, 22 nt, Human
acacugaauauacaaugaauau

SEQ ID NO: 472418 - RNA, 22 nt, Human
acaccagggccuagccagggcg

SEQ ID NO: 472419 - RNA, 22 nt, Human
gcugucacaagcaucuggggca

SEQ ID NO: 472420 - RNA, 22 nt, Human
gcugggaggaauuuggggaaua

SEQ ID NO: 472421 - RNA, 23 nt, Human
cagggcugguagggaagagcgug

SEQ ID NO: 472422 - RNA, 22 nt, Human
ucaaugauaguacaaucagccu

SEQ ID NO: 472423 - RNA, 22 nt, Human
cagccugcagggcugccuguug

SEQ ID NO: 472424 - RNA, 22 nt, Human
ccagcucuagccccauguggcu

SEQ ID NO: 472425 - RNA, 22 nt, Human
acaaauuuauugaagggcauau

SEQ ID NO: 472426 - RNA, 23 nt, Human
uccaagggcuacaaacacagacc

SEQ ID NO: 472427 - RNA, 22 nt, Human
cagaccagcucuaugaacccaa

SEQ ID NO: 472428 - RNA, 22 nt, Human
ccuucugcuggucaucccagug

SEQ ID NO: 472429 - RNA, 22 nt, Human
gguuucaaaguggacaguuagu

SEQ ID NO: 472430 - RNA, 23 nt, Human
aaggucacagaacuuagcaagcc

SEQ ID NO: 472431 - RNA, 18 nt, Human
gcagugaagaaagagcuu

SEQ ID NO: 472432 - RNA, 22 nt, Human
gcccugagggguggugucugua

SEQ ID NO: 472433 - RNA, 22 nt, Human
cagggcucgcucuugcccuucg

SEQ ID NO: 472434 - RNA, 22 nt, Human
guaaaauugcaauuacuuuugc

SEQ ID NO: 472435 - RNA, 22 nt, Human
uuuaccauccucuuuuagaauu

SEQ ID NO: 472436 - RNA, 23 nt, Human
aggagaagagauuuccacaugca

SEQ ID NO: 472437 - RNA, 22 nt, Human
uuaauaaacaggugcagcugaa

SEQ ID NO: 472438 - RNA, 22 nt, Human
cagaaacuucuggugucaaaua

SEQ ID NO: 472439 - RNA, 22 nt, Human
gggcucucaaggcagggcccca

SEQ ID NO: 472440 - RNA, 22 nt, Human
gcugcaggcauuuuccugggca

SEQ ID NO: 472441 - RNA, 22 nt, Human
aguuuuuccugauuuuacagaa

SEQ ID NO: 472442 - RNA, 19 nt, Human
uggcaggcccaggauggac

SEQ ID NO: 472443 - RNA, 22 nt, Human
cugguucauccccuuccaggaa

SEQ ID NO: 472444 - RNA, 22 nt, Human
agcaugcugguguucauggcag

SEQ ID NO: 472445 - RNA, 22 nt, Human
auuuacagaugaugcuauuuga

SEQ ID NO: 472446 - RNA, 22 nt, Human
acaugcauucucuaaaagcaaa

SEQ ID NO: 472447 - RNA, 22 nt, Human
ugcaauaaggaguaauaguaaa

SEQ ID NO: 472448 - RNA, 22 nt, Human
agcaguggcuggauggugugcu

SEQ ID NO: 472449 - RNA, 22 nt, Human
cuguugucccugggagcucagc

SEQ ID NO: 472450 - RNA, 22 nt, Human
agguggguccuggcucugccau

SEQ ID NO: 472451 - RNA, 22 nt, Human
aaucacaauuacuuuugcacca

SEQ ID NO: 472452 - RNA, 22 nt, Human
gcugugugaaaacugggccugg

SEQ ID NO: 472453 - RNA, 21 nt, Human
uuuucccacugaaagcuccca

SEQ ID NO: 472454 - RNA, 22 nt, Human
aucaggauagucuguaaauugu

SEQ ID NO: 472455 - RNA, 22 nt, Human
uggguaaacugggucuggagag

SEQ ID NO: 472456 - RNA, 22 nt, Human
uccuggagccacggagcuuuca

SEQ ID NO: 472457 - RNA, 22 nt, Human
gggcagguggagggcccagcca

SEQ ID NO: 472458 - RNA, 21 nt, Human
gagcugggcgaggcuccgggg

SEQ ID NO: 472459 - RNA, 22 nt, Human
agcagggcuccauuucacugcc

SEQ ID NO: 472460 - RNA, 17 nt, Human
gcagcagagagacccuc

SEQ ID NO: 472461 - RNA, 22 nt, Human
uagcacauaacuuagaauaguu

SEQ ID NO: 472462 - RNA, 22 nt, Human
augggaggaagagaagaugucu

SEQ ID NO: 472463 - RNA, 22 nt, Human
gugcagguguuuuggcugccag

SEQ ID NO: 472464 - RNA, 22 nt, Human
ucccaggccauaaaacucagag

SEQ ID NO: 472465 - RNA, 23 nt, Human
gugcucugcggucugcuagucug

SEQ ID NO: 472466 - RNA, 23 nt, Human
ccacagagcugccaauuccugug

SEQ ID NO: 472467 - RNA, 22 nt, Human
cagcccuguccagcagagggug

SEQ ID NO: 472468 - RNA, 22 nt, Human
uuucucugaggcuggccucccu

SEQ ID NO: 472469 - RNA, 22 nt, Human
gggaaggacauucugggcucag

SEQ ID NO: 472470 - RNA, 22 nt, Human
gcuggccugucuagagccuuac

SEQ ID NO: 472471 - RNA, 22 nt, Human
uuagucaauagugaauauagag

SEQ ID NO: 472472 - RNA, 22 nt, Human
cucuucagauaaaagggauauu

SEQ ID NO: 472473 - RNA, 17 nt, Human
agaaagaggauccacag

SEQ ID NO: 472474 - RNA, 22 nt, Human
augcaucauggaaaacucaguu

SEQ ID NO: 472475 - RNA, 22 nt, Human
caaaguuaucaacugcaacauu

SEQ ID NO: 472476 - RNA, 20 nt, Human
gcccacucuaauccacuguc

SEQ ID NO: 472477 - RNA, 18 nt, Human
cagaagcaggcagugcag

SEQ ID NO: 472478 - RNA, 22 nt, Human
acuuuuuacaggguguauacca

SEQ ID NO: 472479 - RNA, 23 nt, Human
ccugucugugcuggguggacaca

SEQ ID NO: 472480 - RNA, 22 nt, Human
cugggcuggcgcauccgacacg

SEQ ID NO: 472481 - RNA, 22 nt, Human
auccuugagaaaauaaaugacc

SEQ ID NO: 472482 - RNA, 22 nt, Human
ggaaaaggccauuguuucucug

SEQ ID NO: 472483 - RNA, 22 nt, Human
acugggccuggauuggcguguc

SEQ ID NO: 472484 - RNA, 22 nt, Human
ucagggcauacucuucaagguc

SEQ ID NO: 472485 - RNA, 22 nt, Human
uguguuccuucgucuucccuuc

SEQ ID NO: 472486 - RNA, 22 nt, Human
aucuuccuucacuuucucccac

SEQ ID NO: 472487 - RNA, 22 nt, Human
gagagcugauagaugagcuacu

SEQ ID NO: 472488 - RNA, 22 nt, Human
cacuggggaaaacaggcuucuu

SEQ ID NO: 472489 - RNA, 22 nt, Human
aaaugcuagggagaaacucucc

SEQ ID NO: 472490 - RNA, 22 nt, Human
uccaaagggaagcgcuuucugu

SEQ ID NO: 472491 - RNA, 22 nt, Human
aaucagucauuagcucugaccu

SEQ ID NO: 472492 - RNA, 22 nt, Human
ugcucccagggacucuggcugg

SEQ ID NO: 472493 - RNA, 19 nt, Human
caaggguugggucugucau

SEQ ID NO: 472494 - RNA, 22 nt, Human
gaaacccaaacuaagacaguag

SEQ ID NO: 472495 - RNA, 22 nt, Human
aggaguggaauuacuggguucu

SEQ ID NO: 472496 - RNA, 22 nt, Human
ccuguacacggucuaugccucc

SEQ ID NO: 472497 - RNA, 22 nt, Human
cagggccucuccuccaggaacu

SEQ ID NO: 472498 - RNA, 22 nt, Human
ggauaagaaaauuguaauaacu

SEQ ID NO: 472499 - RNA, 22 nt, Human
ggcacagagcccagcuuccuag

SEQ ID NO: 472500 - RNA, 22 nt, Human
ucucugaguaagugacaguuca

SEQ ID NO: 472501 - RNA, 22 nt, Human
uuugcauuugcaaauaaugaaa

SEQ ID NO: 472502 - RNA, 23 nt, Human
cuguggcugaguccuguuggagu

SEQ ID NO: 472503 - RNA, 22 nt, Human
gugccucagcaccgccugcagc

SEQ ID NO: 472504 - RNA, 22 nt, Human
gaaucucaguggaagcaggaag

SEQ ID NO: 472505 - RNA, 18 nt, Human
ucagagguacagaaaagu

SEQ ID NO: 472506 - RNA, 22 nt, Human
cuggcagcguguuuaugaacau

SEQ ID NO: 472507 - RNA, 22 nt, Human
agucucagccacacagaccuau

SEQ ID NO: 472508 - RNA, 22 nt, Human
uggccagaaccugcaguaggcc

SEQ ID NO: 472509 - RNA, 20 nt, Human
aggcugagggugauuguguc

SEQ ID NO: 472510 - RNA, 22 nt, Human
cauaagaaauaaugaugaugac

SEQ ID NO: 472511 - RNA, 22 nt, Human
agcagcaucuucuaaguaaggc

SEQ ID NO: 472512 - RNA, 22 nt, Human
cagcuggaucccugcagaacuu

SEQ ID NO: 472513 - RNA, 22 nt, Human
ugggccuggaguuuguccagag

SEQ ID NO: 472514 - RNA, 22 nt, Human
ccagggcagaaaaagagggaau

SEQ ID NO: 472515 - RNA, 22 nt, Human
uggggacauagccagucuggcu

SEQ ID NO: 472516 - RNA, 22 nt, Human
gccauuuucugucuuguuuauu

SEQ ID NO: 472517 - RNA, 22 nt, Human
ggcuuuaugcagggauagaaau

SEQ ID NO: 472518 - RNA, 22 nt, Human
cccaggcagggacgugcucugg

SEQ ID NO: 472519 - RNA, 22 nt, Human
cccaggagguagagguugcagu

SEQ ID NO: 472520 - RNA, 22 nt, Human
gcagagccgugaauggauuuca

SEQ ID NO: 472521 - RNA, 19 nt, Human
uggcugagcuggacugagg

SEQ ID NO: 472522 - RNA, 22 nt, Human
ggaggccaaggcaggcggauca

SEQ ID NO: 472523 - RNA, 22 nt, Human
cagcugccacuugcucucggcu

SEQ ID NO: 472524 - RNA, 22 nt, Human
guggcugcagcccagcggcacg

SEQ ID NO: 472525 - RNA, 22 nt, Human
gagacagcagggccagggccug

SEQ ID NO: 472526 - RNA, 22 nt, Human
gaggugggaugugugugcuacu

SEQ ID NO: 472527 - RNA, 22 nt, Human
gagaaagacguaggcugggagg

SEQ ID NO: 472528 - RNA, 22 nt, Human
ugggcugcccaagguggccaug

SEQ ID NO: 472529 - RNA, 22 nt, Human
ugugggcacuaaugacaugcag

SEQ ID NO: 472530 - RNA, 22 nt, Human
caucccugcccucaugccuaua

SEQ ID NO: 472531 - RNA, 22 nt, Human
acagggcaaccucugggagacu

SEQ ID NO: 472532 - RNA, 22 nt, Human
uuacauuuuaguuaaccuguga

SEQ ID NO: 472533 - RNA, 22 nt, Human
gcacagaaguaaaauacaaguc

SEQ ID NO: 472534 - RNA, 22 nt, Human
uuaagucauuucugauuauaga

SEQ ID NO: 472535 - RNA, 20 nt, Human
cacaggccuugugagcagac

SEQ ID NO: 472536 - RNA, 22 nt, Human
cugagcaggauauucacagcag

SEQ ID NO: 472537 - RNA, 22 nt, Human
aggguggccaugagggagagau

SEQ ID NO: 472538 - RNA, 22 nt, Human
uagaggcauuaaugaauaaaca

SEQ ID NO: 472539 - RNA, 22 nt, Human
uggcagucggacuucuaucuca

SEQ ID NO: 472540 - RNA, 22 nt, Human
cuguccuguagcuccaucaguc

SEQ ID NO: 472541 - RNA, 22 nt, Human
ggcuccuguccuccuggagcuc

SEQ ID NO: 472542 - RNA, 22 nt, Human
gggagagagagcucauguugaa

SEQ ID NO: 472543 - RNA, 18 nt, Human
ucugucuguacaaguauc

SEQ ID NO: 472544 - RNA, 22 nt, Human
gaggcucacuaggcauccuggg

SEQ ID NO: 472545 - RNA, 22 nt, Human
uagcugccuuugggcuccugcu

SEQ ID NO: 472546 - RNA, 22 nt, Human
cauuagggacugaggaauaagg

SEQ ID NO: 472547 - RNA, 22 nt, Human
ugcauuugucuugucucaugaa

SEQ ID NO: 472548 - RNA, 22 nt, Human
augcuguagaucuuagccucua

SEQ ID NO: 472549 - RNA, 18 nt, Human
aggcacagagcauacaua

SEQ ID NO: 472550 - RNA, 18 nt, Human
uccucucuuuccccaggg

SEQ ID NO: 472551 - RNA, 19 nt, Human
ggccuggauuuagggcucc

SEQ ID NO: 472552 - RNA, 19 nt, Human
gccucugcuggggacaggc

SEQ ID NO: 472553 - RNA, 22 nt, Human
uaagcauucaaugcuuagcacu

SEQ ID NO: 472554 - RNA, 19 nt, Human
agcagcuggagguggagug

SEQ ID NO: 472555 - RNA, 22 nt, Human
uggcagagaacacggcugaucu

SEQ ID NO: 472556 - RNA, 22 nt, Human
aggcagguguuaacccucugag

SEQ ID NO: 472557 - RNA, 22 nt, Human
cccagcagaccgcugugauggc

SEQ ID NO: 472558 - RNA, 22 nt, Human
acuuccaaauaccaucacauug

SEQ ID NO: 472559 - RNA, 22 nt, Human
gguggcuggaggagcugaugga

SEQ ID NO: 472560 - RNA, 22 nt, Human
cucuggaguggguggccgggag

SEQ ID NO: 472561 - RNA, 22 nt, Human
gcugcucuacccaugcaucugu

SEQ ID NO: 472562 - RNA, 22 nt, Human
cucugcugcccaggccugcuag

SEQ ID NO: 472563 - RNA, 22 nt, Human
uuucugcugugcuuucuugcgu

SEQ ID NO: 472564 - RNA, 22 nt, Human
cuguagccaguuuggccucacc

SEQ ID NO: 472565 - RNA, 22 nt, Human
ugcugccaugcagagcaacaga

SEQ ID NO: 472566 - RNA, 22 nt, Human
gggcccuggauuuaagcaugga

SEQ ID NO: 472567 - RNA, 22 nt, Human
ugccuggcaaugccagaagcca

SEQ ID NO: 472568 - RNA, 22 nt, Human
ccuguacaagcucuuggugaca

SEQ ID NO: 472569 - RNA, 22 nt, Human
acugcuuuucuaagauucugug

SEQ ID NO: 472570 - RNA, 22 nt, Human
gaaaauguuuguccggagcuga

SEQ ID NO: 472571 - RNA, 22 nt, Human
ucagaggaggcauuuaaacaga

SEQ ID NO: 472572 - RNA, 22 nt, Human
cauuguauugaggauacuuaag

SEQ ID NO: 472573 - RNA, 22 nt, Human
aauaagaauuuacuugucaaga

SEQ ID NO: 472574 - RNA, 22 nt, Human
ggguggcacaggugcagagggu

SEQ ID NO: 472575 - RNA, 22 nt, Human
agucaacaaaaauguggagccu

SEQ ID NO: 472576 - RNA, 22 nt, Human
acagauuugacugguaccuggc

SEQ ID NO: 472577 - RNA, 22 nt, Human
ucauugcaagcucauuuaucug

SEQ ID NO: 472578 - RNA, 22 nt, Human
aggaaucccgcaccagcugcug

SEQ ID NO: 472579 - RNA, 22 nt, Human
ugguuuauuucucugaaagguu

SEQ ID NO: 472580 - RNA, 22 nt, Human
uuuauccauucaccaguugaac

SEQ ID NO: 472581 - RNA, 20 nt, Human
cucuccuugccgacuuggca

SEQ ID NO: 472582 - RNA, 22 nt, Human
aaaaguuaccucuguaauauaa

SEQ ID NO: 472583 - RNA, 22 nt, Human
gucuggaggaggaagaaggcac

SEQ ID NO: 472584 - RNA, 22 nt, Human
uccaugagacagauacuguaag

SEQ ID NO: 472585 - RNA, 22 nt, Human
uccugcagccauuagaggucaa

SEQ ID NO: 472586 - RNA, 22 nt, Human
agcugcugcgccucacccuggc

SEQ ID NO: 472587 - RNA, 22 nt, Human
augggaggcagacacuaaguuc

SEQ ID NO: 472588 - RNA, 22 nt, Human
gcaggugguccccguggagugg

SEQ ID NO: 472589 - RNA, 22 nt, Human
uuguauuagcuguaaauuuucu

SEQ ID NO: 472590 - RNA, 22 nt, Human
ccagcugguguuccuuaggacc

SEQ ID NO: 472591 - RNA, 22 nt, Human
agaugaaaagauaagcagcaau

SEQ ID NO: 472592 - RNA, 22 nt, Human
ccucucuguaagggucccuccc

SEQ ID NO: 472593 - RNA, 22 nt, Human
uccuucagaggacggcagccag

SEQ ID NO: 472594 - RNA, 22 nt, Human
ugcugagcgcauccggcggccg

SEQ ID NO: 472595 - RNA, 22 nt, Human
augcugugccuggaaagcggcu

SEQ ID NO: 472596 - RNA, 22 nt, Human
ucauugcauuuauucacuggca

SEQ ID NO: 472597 - RNA, 22 nt, Human
cuccagcugccaccagauguuu

SEQ ID NO: 472598 - RNA, 22 nt, Human
cagcugccugucuggaggcaau

SEQ ID NO: 472599 - RNA, 22 nt, Human
uuguggcagaccaugagucuaa

SEQ ID NO: 472600 - RNA, 18 nt, Human
ccuggcuuccaucuuggu

SEQ ID NO: 472601 - RNA, 22 nt, Human
ggguguguuccuaaggaaacca

SEQ ID NO: 472602 - RNA, 22 nt, Human
gccaccucuuugucucugccgc

SEQ ID NO: 472603 - RNA, 22 nt, Human
cucacuguuuaauagcuggauc

SEQ ID NO: 472604 - RNA, 22 nt, Human
ggguggcuccuaugggcauagc

SEQ ID NO: 472605 - RNA, 22 nt, Human
agaggggcucauauccugucau

SEQ ID NO: 472606 - RNA, 22 nt, Human
aaguccagcagugcuuguugau

SEQ ID NO: 472607 - RNA, 22 nt, Human
gggcuucucccuaaggacucug

SEQ ID NO: 472608 - RNA, 22 nt, Human
aaauccuaaaaguuugacuuaa

SEQ ID NO: 472609 - RNA, 22 nt, Human
uccuauugguagacauuucugu

SEQ ID NO: 472610 - RNA, 22 nt, Human
ugggcucugaagucagucugcu

SEQ ID NO: 472611 - RNA, 22 nt, Human
agucaguguucuccggagaggc

SEQ ID NO: 472612 - RNA, 22 nt, Human
ugccaggcuuagagcaggggcu

SEQ ID NO: 472613 - RNA, 22 nt, Human
cacagcauaaugaaauauacuu

SEQ ID NO: 472614 - RNA, 22 nt, Human
cccagguggguuggccucuguc

SEQ ID NO: 472615 - RNA, 22 nt, Human
aagaaaacguuuugaggaguuu

SEQ ID NO: 472616 - RNA, 22 nt, Human
cuggcucaggguggucuggguc

SEQ ID NO: 472617 - RNA, 22 nt, Human
acagcuuuucugauagauccug

SEQ ID NO: 472618 - RNA, 22 nt, Human
uuuauugcauacacaaauguca

SEQ ID NO: 472619 - RNA, 21 nt, Human
gagcauggcuuacaucagcag

SEQ ID NO: 472620 - RNA, 22 nt, Human
cugaggcauguuacaggacaua

SEQ ID NO: 472621 - RNA, 17 nt, Human
aggcagcucagaacauc

SEQ ID NO: 472622 - RNA, 22 nt, Human
gagcugccugugugccaugaug

SEQ ID NO: 472623 - RNA, 17 nt, Human
gagaguguauuggaugc

SEQ ID NO: 472624 - RNA, 21 nt, Human
ucugagaacuucugcugcagc

SEQ ID NO: 472625 - RNA, 22 nt, Human
gcugguuagaaaacagagcuca

SEQ ID NO: 472626 - RNA, 22 nt, Human
cauucauuuaugaaauaucuau

SEQ ID NO: 472627 - RNA, 22 nt, Human
ugcagcugguuuagaacuagau

SEQ ID NO: 472628 - RNA, 22 nt, Human
caaaggcuuccacugcauccuu

SEQ ID NO: 472629 - RNA, 22 nt, Human
gcucaggaccgaggggugggaa

SEQ ID NO: 472630 - RNA, 21 nt, Human
acaguucaugauaacuccauc

SEQ ID NO: 472631 - RNA, 19 nt, Human
aggcugcaagguggugggc

SEQ ID NO: 472632 - RNA, 22 nt, Human
uggaggcaucagagugcuuggc

SEQ ID NO: 472633 - RNA, 22 nt, Human
ccugagaccaaguugcagccau

SEQ ID NO: 472634 - RNA, 22 nt, Human
ggagacagugguagggccuaag

SEQ ID NO: 472635 - RNA, 22 nt, Human
agaggcuccuagccacuggcuu

SEQ ID NO: 472636 - RNA, 22 nt, Human
agacaaagacagcaucucaggu

SEQ ID NO: 472637 - RNA, 23 nt, Human
uggcagugaucaaaagcuuacau

SEQ ID NO: 472638 - RNA, 22 nt, Human
uaaguucaguuggucgaaguag

SEQ ID NO: 472639 - RNA, 22 nt, Human
uucaggagaauuccaagaagua

SEQ ID NO: 472640 - RNA, 22 nt, Human
gcugcugguccucagagcucau

SEQ ID NO: 472641 - RNA, 22 nt, Human
cagcagcugggaaggaggcuga

SEQ ID NO: 472642 - RNA, 19 nt, Human
gaagaagcuugagaaguag

SEQ ID NO: 472643 - RNA, 22 nt, Human
ucagugaucuaaggguauggcc

SEQ ID NO: 472644 - RNA, 21 nt, Human
gaaaggucuuaacuuacagag

SEQ ID NO: 472645 - RNA, 22 nt, Human
uuucuauucuggaucuguggca

SEQ ID NO: 472646 - RNA, 22 nt, Human
agaagccaccagcugaggaaga

SEQ ID NO: 472647 - RNA, 22 nt, Human
uacaaaaguaauuacgguuuuu

SEQ ID NO: 472648 - RNA, 22 nt, Human
gggcuggcaggaccugggcuga

SEQ ID NO: 472649 - RNA, 22 nt, Human
ucuaaaaaagucuguucacuug

SEQ ID NO: 472650 - RNA, 22 nt, Human
uggcucaguuugggggauugaa

SEQ ID NO: 472651 - RNA, 22 nt, Human
ugagcauggugggugcagagca

SEQ ID NO: 472652 - RNA, 22 nt, Human
agaguccaugaagacagcugag

SEQ ID NO: 472653 - RNA, 18 nt, Human
aggagccuuugcacugga

SEQ ID NO: 472654 - RNA, 22 nt, Human
gagaggccauggcugugcagug

SEQ ID NO: 472655 - RNA, 22 nt, Human
cacccagcuuuugcauccuccg

SEQ ID NO: 472656 - RNA, 22 nt, Human
aacagugagaagguggacagga

SEQ ID NO: 472657 - RNA, 22 nt, Human
gcagggcacaaggacgcacagg

SEQ ID NO: 472658 - RNA, 22 nt, Human
caugcacaaagguaagaugcgu

SEQ ID NO: 472659 - RNA, 19 nt, Human
gucacauuugucucccagg

SEQ ID NO: 472660 - RNA, 22 nt, Human
auuccaaaggcuggccuggagg

SEQ ID NO: 472661 - RNA, 22 nt, Human
aaaucagugcucauuugaaagg

SEQ ID NO: 472662 - RNA, 22 nt, Human
augucccagcugagagacaacu

SEQ ID NO: 472663 - RNA, 22 nt, Human
agccugguguggggcugcagag

SEQ ID NO: 472664 - RNA, 22 nt, Human
uacaaagcuguauagccugguc

SEQ ID NO: 472665 - RNA, 22 nt, Human
ucagcuuuccugcagcuaaggg

SEQ ID NO: 472666 - RNA, 22 nt, Human
gcuguacauucuguggguuugg

SEQ ID NO: 472667 - RNA, 22 nt, Human
aaguucaagagugacauauuag

SEQ ID NO: 472668 - RNA, 22 nt, Human
auuuccaagaaagcuuuaggau

SEQ ID NO: 472669 - RNA, 22 nt, Human
caaaugcauaguuuauaagaag

SEQ ID NO: 472670 - RNA, 22 nt, Human
ugcugccaaaugcgagcucugu

SEQ ID NO: 472671 - RNA, 22 nt, Human
uggcucaggcuugaaaauagau

SEQ ID NO: 472672 - RNA, 22 nt, Human
ccuugcaggggaacaggcagug

SEQ ID NO: 472673 - RNA, 22 nt, Human
ggacacaagcuccggggcugca

SEQ ID NO: 472674 - RNA, 22 nt, Human
agggaguuccgaucugugcacc

SEQ ID NO: 472675 - RNA, 22 nt, Human
acagugucuccugguacccagu

SEQ ID NO: 472676 - RNA, 18 nt, Human
agccuggaggguugaagu

SEQ ID NO: 472677 - RNA, 22 nt, Human
ugaagccacacuagcuuguccu

SEQ ID NO: 472678 - RNA, 22 nt, Human
cugggcagugcagcuauagaac

SEQ ID NO: 472679 - RNA, 22 nt, Human
cuggagagaaaugacaaagcua

SEQ ID NO: 472680 - RNA, 20 nt, Human
aggcugccaggucucacauc

SEQ ID NO: 472681 - RNA, 22 nt, Human
ggacacagcugcagccacaccc

SEQ ID NO: 472682 - RNA, 22 nt, Human
uccugccuucauacugcuguau

SEQ ID NO: 472683 - RNA, 22 nt, Human
aaugaacaaaauaugcuuugca

SEQ ID NO: 472684 - RNA, 22 nt, Human
aaauccuaccaagaaauucccu

SEQ ID NO: 472685 - RNA, 21 nt, Human
ccuggcugcacaguugcuggu

SEQ ID NO: 472686 - RNA, 22 nt, Human
gagggcaguagccucguacccu

SEQ ID NO: 472687 - RNA, 22 nt, Human
aaggcacugacugugcagggga

SEQ ID NO: 472688 - RNA, 22 nt, Human
aaggcccuaauagagcacauau

SEQ ID NO: 472689 - RNA, 22 nt, Human
uaaggcagaaauaugagcaggg

SEQ ID NO: 472690 - RNA, 22 nt, Human
acagcuuuguuuucccugcuga

SEQ ID NO: 472691 - RNA, 23 nt, Human
agggcugaaugcagagaagcaga

SEQ ID NO: 472692 - RNA, 22 nt, Human
cuggggcugcgguggaggagcc

SEQ ID NO: 472693 - RNA, 22 nt, Human
aaguggagccagggaaacugaa

SEQ ID NO: 472694 - RNA, 22 nt, Human
gccuuuuuuguugcucugucac

SEQ ID NO: 472695 - RNA, 22 nt, Human
cagcuuuguggccuugaccucg

SEQ ID NO: 472696 - RNA, 22 nt, Human
ucagagagcagaacuuuuuuac

SEQ ID NO: 472697 - RNA, 22 nt, Human
gauuucaaggaguuuucacagu

SEQ ID NO: 472698 - RNA, 22 nt, Human
gaaggcuguuucugguagugau

SEQ ID NO: 472699 - RNA, 22 nt, Human
aaaauuuugcccuauccuucau

SEQ ID NO: 472700 - RNA, 22 nt, Human
aggcuucuuagauuggcuggag

SEQ ID NO: 472701 - RNA, 22 nt, Human
acauuucuauagugcaucuguu

SEQ ID NO: 472702 - RNA, 19 nt, Human
ugccagcauuaggcugaag

SEQ ID NO: 472703 - RNA, 22 nt, Human
aucagagaccggucaagucaug

SEQ ID NO: 472704 - RNA, 22 nt, Human
cugggcagccucacacaauguu

SEQ ID NO: 472705 - RNA, 23 nt, Human
cuggcucuguagguggcauccuu

SEQ ID NO: 472706 - RNA, 22 nt, Human
uauuucuggcuuugagggugau

SEQ ID NO: 472707 - RNA, 22 nt, Human
acaggcucucagccaguuggca

SEQ ID NO: 472708 - RNA, 22 nt, Human
gugccuggcacacagaaggcaa

SEQ ID NO: 472709 - RNA, 22 nt, Human
acugccuugaaagauuguugag

SEQ ID NO: 472710 - RNA, 22 nt, Human
ugcacacacgcggcacaucugu

SEQ ID NO: 472711 - RNA, 22 nt, Human
uuuugauaucaugaugaacaga

SEQ ID NO: 472712 - RNA, 20 nt, Human
uuccuguauacaaagaguuc

SEQ ID NO: 472713 - RNA, 22 nt, Human
ucaguuuuuaagaguuaugcga

SEQ ID NO: 472714 - RNA, 22 nt, Human
uugcauugugauuacagaggug

SEQ ID NO: 472715 - RNA, 23 nt, Human
ggaaagagaggaguugugcauag

SEQ ID NO: 472716 - RNA, 22 nt, Human
aggccuggcuuugguuugcuga

SEQ ID NO: 472717 - RNA, 22 nt, Human
ccugccugaaggucagccaccc

SEQ ID NO: 472718 - RNA, 22 nt, Human
gaguuguucaacgugugugaaa

SEQ ID NO: 472719 - RNA, 22 nt, Human
cagaguggcagucccaggccca

SEQ ID NO: 472720 - RNA, 22 nt, Human
ucuguggccuguguccaagugc

SEQ ID NO: 472721 - RNA, 23 nt, Human
ugaaggccuggaggacgcguugu

SEQ ID NO: 472722 - RNA, 21 nt, Human
cucaaagaccaaaaguguaga

SEQ ID NO: 472723 - RNA, 22 nt, Human
ccagcagacacacaggcguggg

SEQ ID NO: 472724 - RNA, 22 nt, Human
aaguucaaguaguguuacaugg

SEQ ID NO: 472725 - RNA, 22 nt, Human
uggugcuguggaggggcagaag

SEQ ID NO: 472726 - RNA, 22 nt, Human
gacaggaggcagagcucaggug

SEQ ID NO: 472727 - RNA, 22 nt, Human
uccgcccgcacguauggagugg

SEQ ID NO: 472728 - RNA, 22 nt, Human
auguaacuucugugaaucugac

SEQ ID NO: 472729 - RNA, 22 nt, Human
cccauuuaucccaagguuacuc

SEQ ID NO: 472730 - RNA, 22 nt, Human
ucucagagggaaaggccaauuu

SEQ ID NO: 472731 - RNA, 22 nt, Human
auuugucugcuugcugccuucc

SEQ ID NO: 472732 - RNA, 22 nt, Human
uccuugaaaggggcugcagggc

SEQ ID NO: 472733 - RNA, 22 nt, Human
cagcagcugauggggaagugau

SEQ ID NO: 472734 - RNA, 22 nt, Human
caggcagaugcugacaagaguu

SEQ ID NO: 472735 - RNA, 22 nt, Human
cucagaguccauaguuuacagu

SEQ ID NO: 472736 - RNA, 22 nt, Human
gaggaagggcugccugccgggc

SEQ ID NO: 472737 - RNA, 22 nt, Human
ugugaaagcaagucuaguucuc

SEQ ID NO: 472738 - RNA, 22 nt, Human
ugcuuuauucgacaucugguag

SEQ ID NO: 472739 - RNA, 22 nt, Human
acaguaauauugaugcucguca

SEQ ID NO: 472740 - RNA, 22 nt, Human
ugcuuuauaaccauuucugugg

SEQ ID NO: 472741 - RNA, 20 nt, Human
gucaucgccggcagcaaaga

SEQ ID NO: 472742 - RNA, 22 nt, Human
cuggcaggcggcagagcccagg

SEQ ID NO: 472743 - RNA, 22 nt, Human
gccugguggugugcucaagugg

SEQ ID NO: 472744 - RNA, 22 nt, Human
aagagguugucugugaugaguu

SEQ ID NO: 472745 - RNA, 18 nt, Human
gucauugcaacauacugu

SEQ ID NO: 472746 - RNA, 15 nt, Human
aaucuggcggcaagu

SEQ ID NO: 472747 - RNA, 22 nt, Human
uuccugagggacuuuugagauu

SEQ ID NO: 472748 - RNA, 22 nt, Human
gagcagcugcagugcagacccu

SEQ ID NO: 472749 - RNA, 22 nt, Human
cagggucuuauaaggccaauuu

SEQ ID NO: 472750 - RNA, 22 nt, Human
gaagcagcuaggaucuucauuu

SEQ ID NO: 472751 - RNA, 22 nt, Human
uacuguacugucuuuuuugcug

SEQ ID NO: 472752 - RNA, 22 nt, Human
gggaagguauuuagcugcugaa

SEQ ID NO: 472753 - RNA, 20 nt, Human
cugagcccccagccugcagg

SEQ ID NO: 472754 - RNA, 22 nt, Human
uggaggcaguaacugagcaaca

SEQ ID NO: 472755 - RNA, 22 nt, Human
auaaacacuucuagggcacaca

SEQ ID NO: 472756 - RNA, 22 nt, Human
gcacagccagcaucugagggau

SEQ ID NO: 472757 - RNA, 22 nt, Human
agcaggaaggggaugaugggca

SEQ ID NO: 472758 - RNA, 22 nt, Human
ucuuucucucuaaucaagcaca

SEQ ID NO: 472759 - RNA, 22 nt, Human
gaggccaggguaccaucaacau

SEQ ID NO: 472760 - RNA, 22 nt, Human
aggcuucagguuugcuuugcag

SEQ ID NO: 472761 - RNA, 22 nt, Human
gguccagggaacuuugaaggau

SEQ ID NO: 472762 - RNA, 22 nt, Human
uccucagacacccugcuggcuu

SEQ ID NO: 472763 - RNA, 22 nt, Human
cuuaauuucaaacugcuaguga

SEQ ID NO: 472764 - RNA, 22 nt, Human
ugcaguggugguaaagaugcuc

SEQ ID NO: 472765 - RNA, 22 nt, Human
uacaugaacaaaauagcagaaa

SEQ ID NO: 472766 - RNA, 22 nt, Human
uucacauuagugguucuauaua

SEQ ID NO: 472767 - RNA, 22 nt, Human
gcagcagaggcccuacucuuug

SEQ ID NO: 472768 - RNA, 22 nt, Human
gaaggccuaggaaggaagccuu

SEQ ID NO: 472769 - RNA, 22 nt, Human
agcucccaauugacuugaacua

SEQ ID NO: 472770 - RNA, 22 nt, Human
uaguggaguagaaaccaaagaa

SEQ ID NO: 472771 - RNA, 22 nt, Human
ucacuccucauugcugcccauu

SEQ ID NO: 472772 - RNA, 22 nt, Human
agcuuaggaggaugaugaacau

SEQ ID NO: 472773 - RNA, 22 nt, Human
augaaggcaguuaaacgucauc

SEQ ID NO: 472774 - RNA, 22 nt, Human
gccugagagacccauggggcaa

SEQ ID NO: 472775 - RNA, 22 nt, Human
gcagcagagaacacaaugaugg

SEQ ID NO: 472776 - RNA, 22 nt, Human
cagcaguggcugcaggcagcug

SEQ ID NO: 472777 - RNA, 22 nt, Human
uccucugcucagcauuccucac

SEQ ID NO: 472778 - RNA, 22 nt, Human
uguggaaaagaauaagggagau

SEQ ID NO: 472779 - RNA, 22 nt, Human
uggcugaggcuggagugcagug

SEQ ID NO: 472780 - RNA, 22 nt, Human
uuguuucaugaguguaaaggga

SEQ ID NO: 472781 - RNA, 22 nt, Human
uuuguaaagucuguucugaguu

SEQ ID NO: 472782 - RNA, 22 nt, Human
ugcagaagauggucugagcacc

SEQ ID NO: 472783 - RNA, 22 nt, Human
aucuagaaguggcaugaauuac

SEQ ID NO: 472784 - RNA, 22 nt, Human
gcugcagcagcugcaggguugu

SEQ ID NO: 472785 - RNA, 17 nt, Human
uuccucucacauuuuuu

SEQ ID NO: 472786 - RNA, 18 nt, Human
cagaugagaugcaaucuc

SEQ ID NO: 472787 - RNA, 22 nt, Human
ccugccuggcuuccagaagaga

SEQ ID NO: 472788 - RNA, 22 nt, Human
gcugccuguggcccuucugggu

SEQ ID NO: 472789 - RNA, 22 nt, Human
gcagggcugcugaaacuuguuu

SEQ ID NO: 472790 - RNA, 22 nt, Human
accauguuggccaagcuggucu

SEQ ID NO: 472791 - RNA, 22 nt, Human
gccaggcuguggggaacuugaa

SEQ ID NO: 472792 - RNA, 22 nt, Human
ccagagaggggaagggcuugcc

SEQ ID NO: 472793 - RNA, 22 nt, Human
augggcaguaacaguggcaguc

SEQ ID NO: 472794 - RNA, 22 nt, Human
cagaggaaaguauuucuggaag

SEQ ID NO: 472795 - RNA, 22 nt, Human
gugcuaggauuacaggcauggg

SEQ ID NO: 472796 - RNA, 22 nt, Human
ugaaaucuccucuuuauauauc

SEQ ID NO: 472797 - RNA, 18 nt, Human
uccugcagcuucuaugua

SEQ ID NO: 472798 - RNA, 22 nt, Human
cuuaauuuuuguaguagaugga

SEQ ID NO: 472799 - RNA, 22 nt, Human
cagcacaguacaaggcacggau

SEQ ID NO: 472800 - RNA, 22 nt, Human
aaaagucagucucuccuagcuc

SEQ ID NO: 472801 - RNA, 22 nt, Human
agggccugcucuaucacucuca

SEQ ID NO: 472802 - RNA, 22 nt, Human
uauucacaguugauuuacaguu

SEQ ID NO: 472803 - RNA, 22 nt, Human
cugggagggguagccaauccua

SEQ ID NO: 472804 - RNA, 22 nt, Human
acagcagcaauagcagugacau

SEQ ID NO: 472805 - RNA, 23 nt, Human
uccaggcaugagcucuggaugga

SEQ ID NO: 472806 - RNA, 22 nt, Human
gcucaggaucagccaccucuuu

SEQ ID NO: 472807 - RNA, 22 nt, Human
ccuaggccuuacuuuccugugc

SEQ ID NO: 472808 - RNA, 22 nt, Human
caugucuggguauaugcauaug

SEQ ID NO: 472809 - RNA, 22 nt, Human
ugccacagaggugaagcccacu

SEQ ID NO: 472810 - RNA, 22 nt, Human
uaugcacacauuagcacagggu

SEQ ID NO: 472811 - RNA, 22 nt, Human
cacaucuucuuaacuccaaagu

SEQ ID NO: 472812 - RNA, 22 nt, Human
ggagcuguucaggacugcuuca

SEQ ID NO: 472813 - RNA, 22 nt, Human
guugggaaggcaagaaguagaa

SEQ ID NO: 472814 - RNA, 22 nt, Human
agugacucacuagcucucagug

SEQ ID NO: 472815 - RNA, 22 nt, Human
aaggcacugcuuugcugcgccc

SEQ ID NO: 472816 - RNA, 22 nt, Human
ucaggaggccaccaggaccugu

SEQ ID NO: 472817 - RNA, 22 nt, Human
guccucugcuucaugcccugau

SEQ ID NO: 472818 - RNA, 19 nt, Human
ggugugaagugaggaguua

SEQ ID NO: 472819 - RNA, 22 nt, Human
gaggaagaagggauuagaacuc

SEQ ID NO: 472820 - RNA, 22 nt, Human
aggcuggagggcaauggcaaga

SEQ ID NO: 472821 - RNA, 19 nt, Human
ugcuuccucaccaucuccc

SEQ ID NO: 472822 - RNA, 22 nt, Human
gcuugggauaugcugauguaaa

SEQ ID NO: 472823 - RNA, 22 nt, Human
cucugggcacauuuuccaggac

SEQ ID NO: 472824 - RNA, 22 nt, Human
aagaugcagcuuuacaauaagg

SEQ ID NO: 472825 - RNA, 22 nt, Human
caagggaguuacugagggcggg

SEQ ID NO: 472826 - RNA, 22 nt, Human
aucuggcucauucagggaacgg

SEQ ID NO: 472827 - RNA, 22 nt, Human
ccugccaggcuuugggcuucug

SEQ ID NO: 472828 - RNA, 22 nt, Human
gcaaaugcucuccuuggucagg

SEQ ID NO: 472829 - RNA, 18 nt, Human
aaauguacuguccauggc

SEQ ID NO: 472830 - RNA, 22 nt, Human
agagccugaggaugucccagcu

SEQ ID NO: 472831 - RNA, 22 nt, Human
aagaauguucauuaaacuguug

SEQ ID NO: 472832 - RNA, 22 nt, Human
cagccccucacagagcuguccu

SEQ ID NO: 472833 - RNA, 22 nt, Human
ggcugccaggagaagcucagug

SEQ ID NO: 472834 - RNA, 22 nt, Human
ccuggcuggcaagaucgugaag

SEQ ID NO: 472835 - RNA, 22 nt, Human
ggccugcuauuggugggcagac

SEQ ID NO: 472836 - RNA, 22 nt, Human
ggcgugggaaguggggcuucug

SEQ ID NO: 472837 - RNA, 23 nt, Human
ugcauuauccucucugaagacca

SEQ ID NO: 472838 - RNA, 23 nt, Human
ucagggacaugaugugucauauc

SEQ ID NO: 472839 - RNA, 22 nt, Human
ucuguaucuaauuuuacaguag

SEQ ID NO: 472840 - RNA, 22 nt, Human
cucaggauggaagccuacagga

SEQ ID NO: 472841 - RNA, 21 nt, Human
ugugucacuaacuagaggcua

SEQ ID NO: 472842 - RNA, 22 nt, Human
guauuaggaggaacacaggccu

SEQ ID NO: 472843 - RNA, 22 nt, Human
uagggcucagaguccaguuucu

SEQ ID NO: 472844 - RNA, 22 nt, Human
guggccugucagaagccguggg

SEQ ID NO: 472845 - RNA, 22 nt, Human
uggggugggcaugcgcuguccu

SEQ ID NO: 472846 - RNA, 22 nt, Human
ggaggcagaacuucccgucagu

SEQ ID NO: 472847 - RNA, 22 nt, Human
cauguacaaaaggcaaaugccu

SEQ ID NO: 472848 - RNA, 22 nt, Human
agggcagcucucaccucuggcc

SEQ ID NO: 472849 - RNA, 22 nt, Human
ggcaggcagaggcugagacagg

SEQ ID NO: 472850 - RNA, 22 nt, Human
cagcuuggaggaggaucuaaga

SEQ ID NO: 472851 - RNA, 22 nt, Human
gcaggcaguuauuuaguagaau

SEQ ID NO: 472852 - RNA, 19 nt, Human
ccaggccuccugggagguc

SEQ ID NO: 472853 - RNA, 22 nt, Human
ugucucagaggcaggaagagcc

SEQ ID NO: 472854 - RNA, 22 nt, Human
uuuauccauaucauuaaaaucu

SEQ ID NO: 472855 - RNA, 22 nt, Human
augcacagacccaaaggccauc

SEQ ID NO: 472856 - RNA, 22 nt, Human
ccaaaugcuccacugacuuugg

SEQ ID NO: 472857 - RNA, 22 nt, Human
gagggguguggagccaucaguu

SEQ ID NO: 472858 - RNA, 22 nt, Human
ugacuucaaaggcucuacuccu

SEQ ID NO: 472859 - RNA, 22 nt, Human
ggagggcugccagguggagcgg

SEQ ID NO: 472860 - RNA, 22 nt, Human
ugaugaauaaacuugagaguca

SEQ ID NO: 472861 - RNA, 22 nt, Human
accccaagacaguagaagagaa

SEQ ID NO: 472862 - RNA, 22 nt, Human
aucaaaguucguaacugauaac

SEQ ID NO: 472863 - RNA, 22 nt, Human
agugcugucuccuucccccggg

SEQ ID NO: 472864 - RNA, 22 nt, Human
aggcugugacagggucauggag

SEQ ID NO: 472865 - RNA, 22 nt, Human
ucucaagagggaggcaaucaug

SEQ ID NO: 472866 - RNA, 22 nt, Human
cugcagcuccccugagaucaag

SEQ ID NO: 472867 - RNA, 22 nt, Human
uuaaugcagaaaucaaacugac

SEQ ID NO: 472868 - RNA, 20 nt, Human
gggagucuggaugaaagaug

SEQ ID NO: 472869 - RNA, 22 nt, Human
cagcagcuggugagacacagcc

SEQ ID NO: 472870 - RNA, 22 nt, Human
agaaaacauuacauaggugugu

SEQ ID NO: 472871 - RNA, 23 nt, Human
aguacauucgaaaaauucuguga

SEQ ID NO: 472872 - RNA, 22 nt, Human
gagugcaguuggggugagggga

SEQ ID NO: 472873 - RNA, 21 nt, Human
acaugcauagagagauuucug

SEQ ID NO: 472874 - RNA, 22 nt, Human
uggcagcuuccugcucauagga

SEQ ID NO: 472875 - RNA, 22 nt, Human
gccuaauaacuagcuguguaac

SEQ ID NO: 472876 - RNA, 22 nt, Human
ucagagugguagccuauuuucu

SEQ ID NO: 472877 - RNA, 22 nt, Human
uggaaggagcuaaggaccuggg

SEQ ID NO: 472878 - RNA, 22 nt, Human
uuccaaaggaauggggagcuau

SEQ ID NO: 472879 - RNA, 22 nt, Human
ggcaggugaccuggccucccag

SEQ ID NO: 472880 - RNA, 22 nt, Human
ccaggcagccaagugugugugu

SEQ ID NO: 472881 - RNA, 22 nt, Human
guaauugacucagcucuguuca

SEQ ID NO: 472882 - RNA, 22 nt, Human
guuuuccacuggauuguuugga

SEQ ID NO: 472883 - RNA, 16 nt, Human
uggcagagguucagcc

SEQ ID NO: 472884 - RNA, 22 nt, Human
auacuaaaguauagaacuuagu

SEQ ID NO: 472885 - RNA, 21 nt, Human
ucaggcagugcaaauacaugg

SEQ ID NO: 472886 - RNA, 22 nt, Human
gcggcaggaagagcgcagcccc

SEQ ID NO: 472887 - RNA, 22 nt, Human
cauguacauucuguagauggag

SEQ ID NO: 472888 - RNA, 22 nt, Human
auaaggcauauagucacuuuuu

SEQ ID NO: 472889 - RNA, 22 nt, Human
cagagguaccagcagccucugg

SEQ ID NO: 472890 - RNA, 22 nt, Human
agugaaauggaugcugcuacug

SEQ ID NO: 472891 - RNA, 22 nt, Human
aaugccucuuggaagaagacuu

SEQ ID NO: 472892 - RNA, 22 nt, Human
agguggggugagcugcagacua

SEQ ID NO: 472893 - RNA, 22 nt, Human
gcugucacucuccggccuuccc

SEQ ID NO: 472894 - RNA, 22 nt, Human
ugccugagugauguggcagcca

SEQ ID NO: 472895 - RNA, 22 nt, Human
uggggguguccuggugcacaca

SEQ ID NO: 472896 - RNA, 22 nt, Human
gggcagccucggugccugcugc

SEQ ID NO: 472897 - RNA, 22 nt, Human
ucaaugauagacaagaucuaag

SEQ ID NO: 472898 - RNA, 22 nt, Human
uguauguaaaguuuguaauaga

SEQ ID NO: 472899 - RNA, 22 nt, Human
gaaagagaaccugggccuagau

SEQ ID NO: 472900 - RNA, 22 nt, Human
uccugcagguggaugauucucu

SEQ ID NO: 472901 - RNA, 22 nt, Human
gcagcuuggugaaaggugaugg

SEQ ID NO: 472902 - RNA, 22 nt, Human
aagcacagaaaaggagcaugga

SEQ ID NO: 472903 - RNA, 22 nt, Human
cagagacagaaaauggaucuag

SEQ ID NO: 472904 - RNA, 22 nt, Human
gcagcugaagcugcaguuccag

SEQ ID NO: 472905 - RNA, 22 nt, Human
auggcagaauuaggauuucaag

SEQ ID NO: 472906 - RNA, 22 nt, Human
gcugggagccccgagccagcgc

SEQ ID NO: 472907 - RNA, 22 nt, Human
aggcugcucugcgaagucagcu

SEQ ID NO: 472908 - RNA, 22 nt, Human
cugggagagaagcgaagcuggg

SEQ ID NO: 472909 - RNA, 22 nt, Human
uccuuuggagcuugacugguag

SEQ ID NO: 472910 - RNA, 22 nt, Human
gaguucaguaguuauagucuag

SEQ ID NO: 472911 - RNA, 22 nt, Human
gaaaucugaaucuucuguuggu

SEQ ID NO: 472912 - RNA, 22 nt, Human
uggcagcagccauggaaggccc

SEQ ID NO: 472913 - RNA, 22 nt, Human
cagaagaaaguggggagacaag

SEQ ID NO: 472914 - RNA, 22 nt, Human
cuggcucccucgcugaggugcu

SEQ ID NO: 472915 - RNA, 22 nt, Human
uaccuuuugcuuauuaugacac

SEQ ID NO: 472916 - RNA, 19 nt, Human
agagaggcugugugaggga

SEQ ID NO: 472917 - RNA, 22 nt, Human
uguggcucucaugcacucccag

SEQ ID NO: 472918 - RNA, 22 nt, Human
auguccagaguguccuggaaag

SEQ ID NO: 472919 - RNA, 22 nt, Human
cagaaggcaaacaaaaggauuu

SEQ ID NO: 472920 - RNA, 22 nt, Human
cagggagaaaucuccaggaggu

SEQ ID NO: 472921 - RNA, 22 nt, Human
aaaguuuccugcuaagugcuau

SEQ ID NO: 472922 - RNA, 22 nt, Human
gagagggccgggggccagcucc

SEQ ID NO: 472923 - RNA, 22 nt, Human
ggcagccaugcacgcugccugg

SEQ ID NO: 472924 - RNA, 22 nt, Human
caggagccgccaggcacguugg

SEQ ID NO: 472925 - RNA, 15 nt, Human
ugggcagaucacuug

SEQ ID NO: 472926 - RNA, 22 nt, Human
ggccaggaagggaagaucagca

SEQ ID NO: 472927 - RNA, 22 nt, Human
ugccagggugucaggagagcua

SEQ ID NO: 472928 - RNA, 22 nt, Human
cuguacaucucugaggacagua

SEQ ID NO: 472929 - RNA, 22 nt, Human
ugaugguuuuauuaauaggacc

SEQ ID NO: 472930 - RNA, 22 nt, Human
cugcugagguccuugcucagac

SEQ ID NO: 472931 - RNA, 22 nt, Human
accugcaguggccacuccuaau

SEQ ID NO: 472932 - RNA, 22 nt, Human
cagaggccuuucuacagugaua

SEQ ID NO: 472933 - RNA, 18 nt, Human
gcccugguggagcuggug

SEQ ID NO: 472934 - RNA, 22 nt, Human
ugaaagguuauuuaggucugcu

SEQ ID NO: 472935 - RNA, 22 nt, Human
aaaaguuuaagacucauucuag

SEQ ID NO: 472936 - RNA, 22 nt, Human
cccacaggcuagggguagggca

SEQ ID NO: 472937 - RNA, 22 nt, Human
uuugcauuaguuuagauuucaa

SEQ ID NO: 472938 - RNA, 22 nt, Human
cuggaauguagagacagcuuag

SEQ ID NO: 472939 - RNA, 21 nt, Human
aaguggagaagaaaagcugga

SEQ ID NO: 472940 - RNA, 22 nt, Human
ugaggcucacaaaucugcauuu

SEQ ID NO: 472941 - RNA, 22 nt, Human
ggcugcuguuucagagacuguu

SEQ ID NO: 472942 - RNA, 22 nt, Human
uggcucaggguccccaaauggu

SEQ ID NO: 472943 - RNA, 22 nt, Human
uuugaguugcuuauuuaauagg

SEQ ID NO: 472944 - RNA, 22 nt, Human
cagcaggcugcgauugcucauu

SEQ ID NO: 472945 - RNA, 22 nt, Human
ggaggaguguggggcacucugc

SEQ ID NO: 472946 - RNA, 22 nt, Human
uuaauuuuuauguauagugugu

SEQ ID NO: 472947 - RNA, 22 nt, Human
cuugcugggguaagucugugcu

SEQ ID NO: 472948 - RNA, 22 nt, Human
caguuucuuggaugccaauuuc

SEQ ID NO: 472949 - RNA, 17 nt, Human
ugagacagggcaggccc

SEQ ID NO: 472950 - RNA, 22 nt, Human
ucccagggcagcuguccagaag

SEQ ID NO: 472951 - RNA, 22 nt, Human
cuggcuuccucaggagcagugg

SEQ ID NO: 472952 - RNA, 22 nt, Human
ccagaaaaugcagaacauagaa

SEQ ID NO: 472953 - RNA, 22 nt, Human
ugguacuuggaggcagaaaaau

SEQ ID NO: 472954 - RNA, 22 nt, Human
acuuuguauaagacaauaaaga

SEQ ID NO: 472955 - RNA, 20 nt, Human
guguuucaugugauacaaug

SEQ ID NO: 472956 - RNA, 22 nt, Human
ucugcuggccuuagcaggucua

SEQ ID NO: 472957 - RNA, 22 nt, Human
ugucucugagaugacucccacc

SEQ ID NO: 472958 - RNA, 22 nt, Human
ggcugcucugccuuccagcugg

SEQ ID NO: 472959 - RNA, 22 nt, Human
agaauucugacaauagaauugg

SEQ ID NO: 472960 - RNA, 22 nt, Human
ucuaccacuuauuagcucugug

SEQ ID NO: 472961 - RNA, 22 nt, Human
cuuagggagaaugccucugcag

SEQ ID NO: 472962 - RNA, 22 nt, Human
cuggcaggaagaggaaagguca

SEQ ID NO: 472963 - RNA, 22 nt, Human
uacuuucuagcucuccccaguu

SEQ ID NO: 472964 - RNA, 22 nt, Human
auguguaggugaaucgaggcug

SEQ ID NO: 472965 - RNA, 22 nt, Human
ccagcuuuauagcuucaaagga

SEQ ID NO: 472966 - RNA, 22 nt, Human
gcaggagcuggaaagugauguu

SEQ ID NO: 472967 - RNA, 22 nt, Human
uaaggaaacaacuuguauuuuu

SEQ ID NO: 472968 - RNA, 22 nt, Human
ugcuccauucucuagccagugc

SEQ ID NO: 472969 - RNA, 22 nt, Human
ucacaggguuuggaagccuccu

SEQ ID NO: 472970 - RNA, 22 nt, Human
uugaaaggguuaaagugguaaa

SEQ ID NO: 472971 - RNA, 22 nt, Human
agcugucucugguauuauguga

SEQ ID NO: 472972 - RNA, 18 nt, Human
aagaggaggagcagguug

SEQ ID NO: 472973 - RNA, 22 nt, Human
cagacccucgggugaguuggcc

SEQ ID NO: 472974 - RNA, 20 nt, Human
ugcagggcugccucccagcu

SEQ ID NO: 472975 - RNA, 22 nt, Human
cugggcacuuuggggagccuac

SEQ ID NO: 472976 - RNA, 18 nt, Human
aaagaaggauuggagagc

SEQ ID NO: 472977 - RNA, 22 nt, Human
uggagccuguguuucugcccag

SEQ ID NO: 472978 - RNA, 22 nt, Human
aggcucaggaggagcugccgga

SEQ ID NO: 472979 - RNA, 22 nt, Human
ugaaagcuguccacuaggcugu

SEQ ID NO: 472980 - RNA, 22 nt, Human
aguaaaaauugaggugcaaaau

SEQ ID NO: 472981 - RNA, 22 nt, Human
ugggcucuccuggaggacaaca

SEQ ID NO: 472982 - RNA, 22 nt, Human
cuggagcucuccagagccccgu

SEQ ID NO: 472983 - RNA, 22 nt, Human
ucugucacccgagcaggcgaga

SEQ ID NO: 472984 - RNA, 22 nt, Human
gugugcaguagagaaagagcag

SEQ ID NO: 472985 - RNA, 22 nt, Human
aacaucagaauauccauguugg

SEQ ID NO: 472986 - RNA, 22 nt, Human
agguguguauaaacauacauau

SEQ ID NO: 472987 - RNA, 22 nt, Human
uaacagaaacagauaaguguaa

SEQ ID NO: 472988 - RNA, 22 nt, Human
ucugggugcccuuugcucuguu

SEQ ID NO: 472989 - RNA, 22 nt, Human
uuccagcuaacucacaucccuu

SEQ ID NO: 472990 - RNA, 22 nt, Human
caggagcucuuaaggaugugau

SEQ ID NO: 472991 - RNA, 22 nt, Human
gcuuuauuuugugagggauuac

SEQ ID NO: 472992 - RNA, 22 nt, Human
augucccaagauacagcuagag

SEQ ID NO: 472993 - RNA, 22 nt, Human
augcaguaaaauaggagguaau

SEQ ID NO: 472994 - RNA, 22 nt, Human
aggcacugauucuguuuuccau

SEQ ID NO: 472995 - RNA, 22 nt, Human
auguguacaaccaagcacuaaa

SEQ ID NO: 472996 - RNA, 20 nt, Human
ggcaccaggcuaggauugga

SEQ ID NO: 472997 - RNA, 22 nt, Human
aaaacauguccauacagaaacu

SEQ ID NO: 472998 - RNA, 22 nt, Human
ucagagaacacagaggugaugu

SEQ ID NO: 472999 - RNA, 19 nt, Human
ccaggccuggcgucuccgc

SEQ ID NO: 473000 - RNA, 22 nt, Human
aggcaugugacccuggacucag

SEQ ID NO: 473001 - RNA, 22 nt, Human
caucaucaaaagugacagagaa

SEQ ID NO: 473002 - RNA, 21 nt, Human
uccuguaagcuuggguggcuc

SEQ ID NO: 473003 - RNA, 21 nt, Human
ugggagagggcucagcuaccc

SEQ ID NO: 473004 - RNA, 20 nt, Human
cccucugcacauggcugugg

SEQ ID NO: 473005 - RNA, 22 nt, Human
ccagaagaccccguccaccucc

SEQ ID NO: 473006 - RNA, 22 nt, Human
guuccauaucacagcagacgaa

SEQ ID NO: 473007 - RNA, 22 nt, Human
cuggagccagccagggcccucu

SEQ ID NO: 473008 - RNA, 22 nt, Human
gcuuggaaguaggauugggaga

SEQ ID NO: 473009 - RNA, 21 nt, Human
aagaacuauugagguacacag

SEQ ID NO: 473010 - RNA, 21 nt, Human
aggcucagagaucaaacagua

SEQ ID NO: 473011 - RNA, 22 nt, Human
cugucucuguugccuguaggug

SEQ ID NO: 473012 - RNA, 22 nt, Human
gcugccugucccaggaugagga

SEQ ID NO: 473013 - RNA, 22 nt, Human
gggcugugggacccggcacuuu

SEQ ID NO: 473014 - RNA, 22 nt, Human
uggcacugccaaccugcuaggu

SEQ ID NO: 473015 - RNA, 22 nt, Human
ucagaggucacacagcaaguuu

SEQ ID NO: 473016 - RNA, 22 nt, Human
gagacacagagaggcuguguga

SEQ ID NO: 473017 - RNA, 20 nt, Human
gcugggggugugcugaguga

SEQ ID NO: 473018 - RNA, 22 nt, Human
cagauaaaggcuuacuaguagu

SEQ ID NO: 473019 - RNA, 22 nt, Human
ugugcuucagguugucgccacg

SEQ ID NO: 473020 - RNA, 22 nt, Human
aggcagugcagaguccucuucu

SEQ ID NO: 473021 - RNA, 22 nt, Human
ugcaccauuaauuuaugugaga

SEQ ID NO: 473022 - RNA, 22 nt, Human
agagccagagaccuggguucac

SEQ ID NO: 473023 - RNA, 22 nt, Human
gggcucuguccauuccuucaua

SEQ ID NO: 473024 - RNA, 23 nt, Human
gcagagcugcccuauugccuugg

SEQ ID NO: 473025 - RNA, 21 nt, Human
gcugcaucaaucuacccaggg

SEQ ID NO: 473026 - RNA, 22 nt, Human
ccagggugagaaaaggcuggau

SEQ ID NO: 473027 - RNA, 22 nt, Human
cucagcagcagggaagagguca

SEQ ID NO: 473028 - RNA, 22 nt, Human
cagcaguggccaucuguguggu

SEQ ID NO: 473029 - RNA, 18 nt, Human
gcagcugacacuggaguu

SEQ ID NO: 473030 - RNA, 22 nt, Human
uaaaucaguuucucuuauuggu

SEQ ID NO: 473031 - RNA, 19 nt, Human
ucaguggagaaaggggaag

SEQ ID NO: 473032 - RNA, 22 nt, Human
aagcugccugccacgcuagaua

SEQ ID NO: 473033 - RNA, 22 nt, Human
cuggagcauccaugcccagggu

SEQ ID NO: 473034 - RNA, 22 nt, Human
gucagaggaggcugaguaggaa

SEQ ID NO: 473035 - RNA, 22 nt, Human
uccuugaagagugggcggucga

SEQ ID NO: 473036 - RNA, 22 nt, Human
acagccugcagccccaggucgc

SEQ ID NO: 473037 - RNA, 22 nt, Human
ugggccugauucuugaauccug

SEQ ID NO: 473038 - RNA, 22 nt, Human
aagcacaaugaacaucuuagau

SEQ ID NO: 473039 - RNA, 22 nt, Human
acagcuugcaauggcuuucaac

SEQ ID NO: 473040 - RNA, 22 nt, Human
ccagccacagcuuccagcuccu

SEQ ID NO: 473041 - RNA, 22 nt, Human
acagagccacuuuggugccuac

SEQ ID NO: 473042 - RNA, 22 nt, Human
ucuuuccuaggugauaugcaau

SEQ ID NO: 473043 - RNA, 21 nt, Human
ccuggccaaucugauaggguu

SEQ ID NO: 473044 - RNA, 18 nt, Human
ggagccagucugucucug

SEQ ID NO: 473045 - RNA, 22 nt, Human
acuuugugcccaacagaaagaa

SEQ ID NO: 473046 - RNA, 22 nt, Human
agagccugaggccaggaaaaug

SEQ ID NO: 473047 - RNA, 22 nt, Human
acaguaauaaguguuggugagg

SEQ ID NO: 473048 - RNA, 22 nt, Human
ccaaagucugcauuuuaacaug

SEQ ID NO: 473049 - RNA, 22 nt, Human
caggcugcagugcaguggcuau

SEQ ID NO: 473050 - RNA, 19 nt, Human
cugaggugcaguaagaggc

SEQ ID NO: 473051 - RNA, 22 nt, Human
aaggugucacugggacaggaaa

SEQ ID NO: 473052 - RNA, 22 nt, Human
aggcacugcuucuaaguaggaa

SEQ ID NO: 473053 - RNA, 22 nt, Human
aggggcaguuccaaguuuugug

SEQ ID NO: 473054 - RNA, 22 nt, Human
agaggccagggacacugcucaa

SEQ ID NO: 473055 - RNA, 22 nt, Human
uugcauugaaaauauauuuuaa

SEQ ID NO: 473056 - RNA, 22 nt, Human
aagugguaggaagagagcacug

SEQ ID NO: 473057 - RNA, 22 nt, Human
gggcugaccccaccccucacuc

SEQ ID NO: 473058 - RNA, 22 nt, Human
uggcuuccugcauggauccucu

SEQ ID NO: 473059 - RNA, 22 nt, Human
ucugcucuaguugcuuccugcc

SEQ ID NO: 473060 - RNA, 22 nt, Human
aggccagcaagaaagagagucu

SEQ ID NO: 473061 - RNA, 22 nt, Human
ggacuggccggcgcugaggccc

SEQ ID NO: 473062 - RNA, 22 nt, Human
gggaguggagagcaauggauga

SEQ ID NO: 473063 - RNA, 22 nt, Human
gagaaggcugauccuuggaguu

SEQ ID NO: 473064 - RNA, 22 nt, Human
cacccaggacaggccagaugug

SEQ ID NO: 473065 - RNA, 22 nt, Human
cauuuacagugagaguuuuuac

SEQ ID NO: 473066 - RNA, 22 nt, Human
ggaaagaccugagauaggaaua

SEQ ID NO: 473067 - RNA, 22 nt, Human
gcacacagccagcugagggcua

SEQ ID NO: 473068 - RNA, 22 nt, Human
ggaggcuccuaagcugacuuga

SEQ ID NO: 473069 - RNA, 22 nt, Human
uggcuuccacugugugcccccu

SEQ ID NO: 473070 - RNA, 22 nt, Human
cugcagagcuaggcugagugaa

SEQ ID NO: 473071 - RNA, 22 nt, Human
uguccacaucacucacuuguca

SEQ ID NO: 473072 - RNA, 22 nt, Human
acuuugaaacuaaaauucauua

SEQ ID NO: 473073 - RNA, 22 nt, Human
cucaggaggugguagaggcccu

SEQ ID NO: 473074 - RNA, 22 nt, Human
uuauguaccugaauuaguaaag

SEQ ID NO: 473075 - RNA, 22 nt, Human
cggggcugcucguccuccugug

SEQ ID NO: 473076 - RNA, 20 nt, Human
aaagucuguuuaucucugga

SEQ ID NO: 473077 - RNA, 22 nt, Human
aggcagcagacuguuaaucaga

SEQ ID NO: 473078 - RNA, 22 nt, Human
ccuggcuuccuggagcucacaa

SEQ ID NO: 473079 - RNA, 18 nt, Human
gguggcucagucaugggg

SEQ ID NO: 473080 - RNA, 18 nt, Human
uggcagccagcugcuccu

SEQ ID NO: 473081 - RNA, 22 nt, Human
ugcuggaggcaguggaggugcc

SEQ ID NO: 473082 - RNA, 22 nt, Human
ggcacugaaguggguguugggu

SEQ ID NO: 473083 - RNA, 22 nt, Human
ggcugccugaggcagugagaga

SEQ ID NO: 473084 - RNA, 22 nt, Human
uauuucugggaguucagaaauu

SEQ ID NO: 473085 - RNA, 22 nt, Human
ucuccacucugagugccuuuca

SEQ ID NO: 473086 - RNA, 22 nt, Human
ucucugagcccagugucccccu

SEQ ID NO: 473087 - RNA, 22 nt, Human
cauugcacgggcgucugucugu

SEQ ID NO: 473088 - RNA, 22 nt, Human
gcagcuuugaagacuuauuugc

SEQ ID NO: 473089 - RNA, 22 nt, Human
agggcaaguugagugugcgugg

SEQ ID NO: 473090 - RNA, 20 nt, Human
ggcagggcaucaacagcucu

SEQ ID NO: 473091 - RNA, 22 nt, Human
uccaucuguuuacuauaaagau

SEQ ID NO: 473092 - RNA, 22 nt, Human
cuuccucccccacacacucacu

SEQ ID NO: 473093 - RNA, 22 nt, Human
agagccuggcucccagcuaccg

SEQ ID NO: 473094 - RNA, 22 nt, Human
cugcuuuagacaacugcuggga

SEQ ID NO: 473095 - RNA, 22 nt, Human
ucaccccuacauuucccuugcu

SEQ ID NO: 473096 - RNA, 21 nt, Human
gauuucacuuaccuucauuua

SEQ ID NO: 473097 - RNA, 20 nt, Human
cugcucugcuuugcaggugg

SEQ ID NO: 473098 - RNA, 22 nt, Human
ugaagccacagagcaucugccu

SEQ ID NO: 473099 - RNA, 22 nt, Human
augaagcugaccuugucuugcu

SEQ ID NO: 473100 - RNA, 22 nt, Human
aucagcaagauguaauuucuau

SEQ ID NO: 473101 - RNA, 22 nt, Human
uuuucucuacaaaauaaccagc

SEQ ID NO: 473102 - RNA, 22 nt, Human
ugcugccaccccucaccagagc

SEQ ID NO: 473103 - RNA, 22 nt, Human
caggcagccuucucgucucaca

SEQ ID NO: 473104 - RNA, 22 nt, Human
accaggcacuccugaggucuga

SEQ ID NO: 473105 - RNA, 22 nt, Human
aguggcagagcugugucuugaa

SEQ ID NO: 473106 - RNA, 22 nt, Human
acccugggucauauacagugug

SEQ ID NO: 473107 - RNA, 22 nt, Human
uaaaugugucuuuuuaaggccu

SEQ ID NO: 473108 - RNA, 22 nt, Human
ggcagcuggguuggccagaaac

SEQ ID NO: 473109 - RNA, 22 nt, Human
gagcuuccugaugccgaccagu

SEQ ID NO: 473110 - RNA, 22 nt, Human
auaaaacuuauuagaauugugu

SEQ ID NO: 473111 - RNA, 18 nt, Human
cucaccauucugcccaau

SEQ ID NO: 473112 - RNA, 18 nt, Human
uggugaaggguggaggag

SEQ ID NO: 473113 - RNA, 20 nt, Human
gccaggcacuguucucaaua

SEQ ID NO: 473114 - RNA, 22 nt, Human
ggcucagguuuccuucccagcu

SEQ ID NO: 473115 - RNA, 22 nt, Human
gggagcugagcuggaagagaau

SEQ ID NO: 473116 - RNA, 22 nt, Human
ucugcuguaaagaauuucugcc

SEQ ID NO: 473117 - RNA, 22 nt, Human
caccagggacaaugcuaggggu

SEQ ID NO: 473118 - RNA, 22 nt, Human
ugggcaagucacuucugucuuu

SEQ ID NO: 473119 - RNA, 22 nt, Human
agggaagaagcugguaguaggu

SEQ ID NO: 473120 - RNA, 22 nt, Human
ucaguuuucauuucaugagcag

SEQ ID NO: 473121 - RNA, 22 nt, Human
gccaggcugcuggcugcugucc

SEQ ID NO: 473122 - RNA, 22 nt, Human
gaggaagcagggcuuggcugag

SEQ ID NO: 473123 - RNA, 22 nt, Human
aacaguaucuuuuaucagaaau

SEQ ID NO: 473124 - RNA, 22 nt, Human
gucugaggaagaugcaggggga

SEQ ID NO: 473125 - RNA, 22 nt, Human
gggaccugggccagaggacagu

SEQ ID NO: 473126 - RNA, 22 nt, Human
ugcagcucauugguguccuggu

SEQ ID NO: 473127 - RNA, 22 nt, Human
ucaggcagaggauggggagcgu

SEQ ID NO: 473128 - RNA, 22 nt, Human
gcccucugcacagcucugagca

SEQ ID NO: 473129 - RNA, 22 nt, Human
aacuuucaggcaaugaauauuu

SEQ ID NO: 473130 - RNA, 22 nt, Human
gcagcuggaagugacacucugu

SEQ ID NO: 473131 - RNA, 22 nt, Human
ugagaaccaugaaaagcuguca

SEQ ID NO: 473132 - RNA, 22 nt, Human
ugugucaauuuucauuccuacu

SEQ ID NO: 473133 - RNA, 23 nt, Human
cugcuguguuggucucgauggga

SEQ ID NO: 473134 - RNA, 22 nt, Human
uggccuggggaagaccaugggc

SEQ ID NO: 473135 - RNA, 22 nt, Human
augaggcaucuaacauugcaaa

SEQ ID NO: 473136 - RNA, 22 nt, Human
uggcugggugcuauccaguacu

SEQ ID NO: 473137 - RNA, 22 nt, Human
uggagggcaucuguggucaggc

SEQ ID NO: 473138 - RNA, 22 nt, Human
ugaaggaaaugacggcagaaga

SEQ ID NO: 473139 - RNA, 22 nt, Human
cugagaggcggagcuugcagug

SEQ ID NO: 473140 - RNA, 22 nt, Human
aaaauuuccaccaucuuugugu

SEQ ID NO: 473141 - RNA, 22 nt, Human
cccagcccugaccuauuggaaa

SEQ ID NO: 473142 - RNA, 17 nt, Human
auuuccucagggcugag

SEQ ID NO: 473143 - RNA, 22 nt, Human
cugcucugacccuuucaccuuc

SEQ ID NO: 473144 - RNA, 22 nt, Human
cagggccagcgucucgggcuau

SEQ ID NO: 473145 - RNA, 22 nt, Human
agagcuggguggacuuguaguu

SEQ ID NO: 473146 - RNA, 22 nt, Human
aguuuuucugcuggucucacua

SEQ ID NO: 473147 - RNA, 22 nt, Human
gagaaagggaacuuacagagug

SEQ ID NO: 473148 - RNA, 22 nt, Human
gagugcagaugaacagaagauu

SEQ ID NO: 473149 - RNA, 22 nt, Human
aggcucagauucacauuugguu

SEQ ID NO: 473150 - RNA, 22 nt, Human
cucugagaggugagaagcagca

SEQ ID NO: 473151 - RNA, 20 nt, Human
gccuggcacccggggcuggc

SEQ ID NO: 473152 - RNA, 22 nt, Human
uagcugccagaccauucuuacu

SEQ ID NO: 473153 - RNA, 22 nt, Human
ugcucagggacaauggagaggg

SEQ ID NO: 473154 - RNA, 22 nt, Human
ccugcagacacuuguccagcaa

SEQ ID NO: 473155 - RNA, 22 nt, Human
agccaagcaccacuggcacucg

SEQ ID NO: 473156 - RNA, 22 nt, Human
cugaagcaaaugaaacagcucu

SEQ ID NO: 473157 - RNA, 22 nt, Human
uagaaaucagcaggcauaugua

SEQ ID NO: 473158 - RNA, 22 nt, Human
aaaaguucccugguuagaaaag

SEQ ID NO: 473159 - RNA, 22 nt, Human
ugcuugagacacauaugaauuu

SEQ ID NO: 473160 - RNA, 22 nt, Human
ucagaacauugacauucuuauu

SEQ ID NO: 473161 - RNA, 21 nt, Human
aauuagggugccucuuauaau

SEQ ID NO: 473162 - RNA, 22 nt, Human
augcugugucaccuuaggauuu

SEQ ID NO: 473163 - RNA, 22 nt, Human
accaaggaguuugguauuuuag

SEQ ID NO: 473164 - RNA, 22 nt, Human
cuuuauguccaccagacugcaa

SEQ ID NO: 473165 - RNA, 22 nt, Human
ccauaaggagccagacauucca

SEQ ID NO: 473166 - RNA, 22 nt, Human
gcuggcagacugggggcagaac

SEQ ID NO: 473167 - RNA, 22 nt, Human
gccaggcucagcagucaaccug

SEQ ID NO: 473168 - RNA, 22 nt, Human
ggaaccaggaguuacacgaguu

SEQ ID NO: 473169 - RNA, 22 nt, Human
gugugcagucugcuaggcaggg

SEQ ID NO: 473170 - RNA, 22 nt, Human
cauuagggccaccauaacaaaa

SEQ ID NO: 473171 - RNA, 22 nt, Human
gaacccaguccaggugcagccu

SEQ ID NO: 473172 - RNA, 22 nt, Human
cuggccagguuuugaacaguug

SEQ ID NO: 473173 - RNA, 22 nt, Human
cuuagaaaucgaacucagguua

SEQ ID NO: 473174 - RNA, 22 nt, Human
uuaaagaguaaucauaggucaa

SEQ ID NO: 473175 - RNA, 18 nt, Human
cagaaguccuucaaggcc

SEQ ID NO: 473176 - RNA, 20 nt, Human
ccaggccugggccugcucua

SEQ ID NO: 473177 - RNA, 22 nt, Human
uuccaguucccaugaggauuaa

SEQ ID NO: 473178 - RNA, 22 nt, Human
agggccagcuagagcccucgcc

SEQ ID NO: 473179 - RNA, 22 nt, Human
gggagcuguaagggacagguag

SEQ ID NO: 473180 - RNA, 22 nt, Human
guucagggagggacagaugaag

SEQ ID NO: 473181 - RNA, 22 nt, Human
cuucccugauaagagccucaga

SEQ ID NO: 473182 - RNA, 22 nt, Human
augaaaacggaccagagcuauu

SEQ ID NO: 473183 - RNA, 22 nt, Human
cagaggccucacuuccagccag

SEQ ID NO: 473184 - RNA, 22 nt, Human
cauccagggcagccauggccug

SEQ ID NO: 473185 - RNA, 19 nt, Human
agccagggugagaaggagc

SEQ ID NO: 473186 - RNA, 22 nt, Human
aucuggcuuaccuagggugccu

SEQ ID NO: 473187 - RNA, 22 nt, Human
cggcugugucuucacaggagcc

SEQ ID NO: 473188 - RNA, 22 nt, Human
gcagugaagccagaucugaaau

SEQ ID NO: 473189 - RNA, 22 nt, Human
agagccugggcagcuccucugg

SEQ ID NO: 473190 - RNA, 22 nt, Human
cugccuggggaaugugaggauu

SEQ ID NO: 473191 - RNA, 22 nt, Human
gaggcacaucacuuggugcauu

SEQ ID NO: 473192 - RNA, 22 nt, Human
gggcccagcgugguuccaucug

SEQ ID NO: 473193 - RNA, 22 nt, Human
ugguuacacagcauguggacuu

SEQ ID NO: 473194 - RNA, 22 nt, Human
uuuauuccaugugucuaugacc

SEQ ID NO: 473195 - RNA, 22 nt, Human
gcagcugauggaaguccuauug

SEQ ID NO: 473196 - RNA, 22 nt, Human
gccuggcaggggccugggagug

SEQ ID NO: 473197 - RNA, 22 nt, Human
agcagagcggggccuccggaag

SEQ ID NO: 473198 - RNA, 18 nt, Human
ugagaggcagguagagga

SEQ ID NO: 473199 - RNA, 22 nt, Human
aguaggaggcgggagcaugaag

SEQ ID NO: 473200 - RNA, 22 nt, Human
ggccucaguuucuucaacugua

SEQ ID NO: 473201 - RNA, 22 nt, Human
agcugggagcagagccacagcc

SEQ ID NO: 473202 - RNA, 22 nt, Human
aguguggcugcguagggcucuc

SEQ ID NO: 473203 - RNA, 22 nt, Human
ccugcaggggagagacuucuag

SEQ ID NO: 473204 - RNA, 16 nt, Human
gaggcuggcagauguc

SEQ ID NO: 473205 - RNA, 22 nt, Human
ggaugcaggacggcauggaugu

SEQ ID NO: 473206 - RNA, 22 nt, Human
ccugagaggcccucucacuguc

SEQ ID NO: 473207 - RNA, 22 nt, Human
ucaaaguuuguggcaauuuauu

SEQ ID NO: 473208 - RNA, 23 nt, Human
uggauaaagcugugcugcauagg

SEQ ID NO: 473209 - RNA, 20 nt, Human
uagggcucauuaugaucucc

SEQ ID NO: 473210 - RNA, 22 nt, Human
augaggcagcugcuggagaacg

SEQ ID NO: 473211 - RNA, 22 nt, Human
caagaugaaacuacagggagga

SEQ ID NO: 473212 - RNA, 22 nt, Human
gcacacacuguuuuccucacau

SEQ ID NO: 473213 - RNA, 22 nt, Human
ugggcagggaucucuuuugcaa

SEQ ID NO: 473214 - RNA, 19 nt, Human
uagcugccuguuaccucca

SEQ ID NO: 473215 - RNA, 22 nt, Human
acagcuggcaggggggcaugaa

SEQ ID NO: 473216 - RNA, 22 nt, Human
gggggaagacugggcuagugau

SEQ ID NO: 473217 - RNA, 22 nt, Human
agccccucuguggcucugccuc

SEQ ID NO: 473218 - RNA, 22 nt, Human
ggaggccaaggcagguggaucg

SEQ ID NO: 473219 - RNA, 22 nt, Human
ggcaggagggcggacaaugacc

SEQ ID NO: 473220 - RNA, 22 nt, Human
gcagcuuuguaaaguaugaagc

SEQ ID NO: 473221 - RNA, 22 nt, Human
ccagagaggccuuggcaagaca

SEQ ID NO: 473222 - RNA, 22 nt, Human
cacaagagagugcgcguugcaa

SEQ ID NO: 473223 - RNA, 22 nt, Human
cagggcucaggcucugggauuc

SEQ ID NO: 473224 - RNA, 21 nt, Human
guuugcaugaacaagucagcc

SEQ ID NO: 473225 - RNA, 22 nt, Human
aagggcugcaauccaaaacacu

SEQ ID NO: 473226 - RNA, 22 nt, Human
agccucucuuuauucccagcua

SEQ ID NO: 473227 - RNA, 22 nt, Human
ugcccaggaucuggcgaugcuc

SEQ ID NO: 473228 - RNA, 22 nt, Human
caauuucugggccucacacaag

SEQ ID NO: 473229 - RNA, 22 nt, Human
agagggaaugugauugcaccau

SEQ ID NO: 473230 - RNA, 22 nt, Human
aggcucagcugguggugaucgc

SEQ ID NO: 473231 - RNA, 22 nt, Human
augcucugggcaggagcccugg

SEQ ID NO: 473232 - RNA, 22 nt, Human
cccagccucuggauucugcccu

SEQ ID NO: 473233 - RNA, 22 nt, Human
uugggcugaaguagagggcaga

SEQ ID NO: 473234 - RNA, 22 nt, Human
uguugauuaguguuuagacuua

SEQ ID NO: 473235 - RNA, 22 nt, Human
uccaggcugggcugaagggugc

SEQ ID NO: 473236 - RNA, 22 nt, Human
ccagggucuuggagaggagugc

SEQ ID NO: 473237 - RNA, 22 nt, Human
cacccagggcugugccugccca

SEQ ID NO: 473238 - RNA, 22 nt, Human
gacccuggaguuaguccugugu

SEQ ID NO: 473239 - RNA, 22 nt, Human
guggagacgggacagaagcuaa

SEQ ID NO: 473240 - RNA, 22 nt, Human
ggaagaagggucauuggcagcc

SEQ ID NO: 473241 - RNA, 22 nt, Human
aaggcagccucugccagccggg

SEQ ID NO: 473242 - RNA, 21 nt, Human
ugggcacugagggugcugcuc

SEQ ID NO: 473243 - RNA, 22 nt, Human
ugugaaggagaugaagggagug

SEQ ID NO: 473244 - RNA, 22 nt, Human
aaugaucuggcucaggauauca

SEQ ID NO: 473245 - RNA, 22 nt, Human
gccuugcuuugcuucuggacag

SEQ ID NO: 473246 - RNA, 22 nt, Human
cauguuaaugaauuuuugcagu

SEQ ID NO: 473247 - RNA, 20 nt, Human
uggagccaaggugugucugg

SEQ ID NO: 473248 - RNA, 22 nt, Human
acauuucuggaguuucucaaca

SEQ ID NO: 473249 - RNA, 22 nt, Human
cagcagagcauuugguaggagg

SEQ ID NO: 473250 - RNA, 20 nt, Human
gucagaggacccuagagcga

SEQ ID NO: 473251 - RNA, 22 nt, Human
gcuggcuccucuguccucacgg

SEQ ID NO: 473252 - RNA, 22 nt, Human
agaaaugggccuugggacacaa

SEQ ID NO: 473253 - RNA, 22 nt, Human
ugagcagaacacgggauccaug

SEQ ID NO: 473254 - RNA, 22 nt, Human
uggcccugcuggccaaaggcua

SEQ ID NO: 473255 - RNA, 22 nt, Human
aaaaccaggcguuuccuauuau

SEQ ID NO: 473256 - RNA, 22 nt, Human
uucugugcccauuuuaaaaugg

SEQ ID NO: 473257 - RNA, 22 nt, Human
uggguagagcaggcuggggcuu

SEQ ID NO: 473258 - RNA, 22 nt, Human
uggaggaaguggcuggccagaa

SEQ ID NO: 473259 - RNA, 22 nt, Human
ccugccugucccucaguccaca

SEQ ID NO: 473260 - RNA, 22 nt, Human
ucucugagcugcuucuugcaua

SEQ ID NO: 473261 - RNA, 22 nt, Human
ggaggcccagagaggugaagug

SEQ ID NO: 473262 - RNA, 22 nt, Human
guaucacuuuugagagugagaa

SEQ ID NO: 473263 - RNA, 22 nt, Human
gcuguggaugcuauggaucauc

SEQ ID NO: 473264 - RNA, 17 nt, Human
agcagcuggguugaucu

SEQ ID NO: 473265 - RNA, 17 nt, Human
ccugggaggaguuauga

SEQ ID NO: 473266 - RNA, 22 nt, Human
gcagagcaccaaagugaaagau

SEQ ID NO: 473267 - RNA, 22 nt, Human
auguacauuuagaucauuucug

SEQ ID NO: 473268 - RNA, 22 nt, Human
acugucugcuggccccugguua

SEQ ID NO: 473269 - RNA, 22 nt, Human
ucugagcuuuuauuaucaaccu

SEQ ID NO: 473270 - RNA, 22 nt, Human
uggggacacagagccaaacuau

SEQ ID NO: 473271 - RNA, 22 nt, Human
cauguacaguuuuucuguccug

SEQ ID NO: 473272 - RNA, 22 nt, Human
guggcugguuuccugcaugcaa

SEQ ID NO: 473273 - RNA, 22 nt, Human
cccuguccuggaugggagcacu

SEQ ID NO: 473274 - RNA, 22 nt, Human
gcucuguacgcaggaugagggg

SEQ ID NO: 473275 - RNA, 22 nt, Human
cugggcaggagggcucuaugga

SEQ ID NO: 473276 - RNA, 22 nt, Human
cccuggcaaaacacucucuuga

SEQ ID NO: 473277 - RNA, 18 nt, Human
ggcugugcguggaggcug

SEQ ID NO: 473278 - RNA, 22 nt, Human
uguaucaaggguuuauguaagc

SEQ ID NO: 473279 - RNA, 22 nt, Human
ggcagcugauuagcaucaagga

SEQ ID NO: 473280 - RNA, 22 nt, Human
uccagggaaggugugaggcugg

SEQ ID NO: 473281 - RNA, 22 nt, Human
uacuuccuguuuccaugucugu

SEQ ID NO: 473282 - RNA, 23 nt, Human
ugggggugcacgggccacaucuu

SEQ ID NO: 473283 - RNA, 22 nt, Human
cagucucugugccagauccugg

SEQ ID NO: 473284 - RNA, 22 nt, Human
agagauaugaguaguugugaca

SEQ ID NO: 473285 - RNA, 22 nt, Human
cugggugguuuugaugugaauu

SEQ ID NO: 473286 - RNA, 22 nt, Human
agcaggaguguccccuggcugu

SEQ ID NO: 473287 - RNA, 22 nt, Human
agguggggaaaccagcgauccc

SEQ ID NO: 473288 - RNA, 22 nt, Human
ucucuuaaaagauuuuaaugac

SEQ ID NO: 473289 - RNA, 19 nt, Human
uggccagguacugucugcu

SEQ ID NO: 473290 - RNA, 21 nt, Human
uguuuauggaaaagagacaaa

SEQ ID NO: 473291 - RNA, 22 nt, Human
augagacuaccuguaauguggc

SEQ ID NO: 473292 - RNA, 22 nt, Human
ccugccagugaagcugacgggc

SEQ ID NO: 473293 - RNA, 22 nt, Human
agccaggaauuggacaacacau

SEQ ID NO: 473294 - RNA, 22 nt, Human
gcucaagggaugggagugggug

SEQ ID NO: 473295 - RNA, 22 nt, Human
cauuuguacagaacagcuuuau

SEQ ID NO: 473296 - RNA, 17 nt, Human
gggcagggacuccuggg

SEQ ID NO: 473297 - RNA, 22 nt, Human
acugucacuccaacugagucgu

SEQ ID NO: 473298 - RNA, 21 nt, Human
aggggacagaguagcuccagg

SEQ ID NO: 473299 - RNA, 22 nt, Human
ucaaaugcucuuugcagagagg

SEQ ID NO: 473300 - RNA, 22 nt, Human
ccagucacuggaaaaugggaau

SEQ ID NO: 473301 - RNA, 22 nt, Human
aggaagugaaagggaaggaguu

SEQ ID NO: 473302 - RNA, 22 nt, Human
gcugcagcucgccuuccggccu

SEQ ID NO: 473303 - RNA, 22 nt, Human
ugccaggcccagcagggcggcc

SEQ ID NO: 473304 - RNA, 23 nt, Human
aguguuccaguugguugagagug

SEQ ID NO: 473305 - RNA, 22 nt, Human
ggcucuggugugaagcagccuc

SEQ ID NO: 473306 - RNA, 22 nt, Human
gagggcugauaaaugcgcaugg

SEQ ID NO: 473307 - RNA, 22 nt, Human
ugcacuccaggcugggugacag

SEQ ID NO: 473308 - RNA, 22 nt, Human
ccagagcagauguggccuuggu

SEQ ID NO: 473309 - RNA, 22 nt, Human
cagcccagcagggucuggcccu

SEQ ID NO: 473310 - RNA, 22 nt, Human
augcuguguuugagaaccuagg

SEQ ID NO: 473311 - RNA, 22 nt, Human
ucccagggacugggcuaggcuu

SEQ ID NO: 473312 - RNA, 22 nt, Human
guucacauccuugugaggauuu

SEQ ID NO: 473313 - RNA, 22 nt, Human
ucagcauaucuugagcuucaug

SEQ ID NO: 473314 - RNA, 22 nt, Human
ugugugcauucacaugcaugcc

SEQ ID NO: 473315 - RNA, 22 nt, Human
gaaggagacccugaagaugcug

SEQ ID NO: 473316 - RNA, 23 nt, Human
gggcugcuccaggccaaggcugg

SEQ ID NO: 473317 - RNA, 22 nt, Human
gcagcugccccgacugugaguc

SEQ ID NO: 473318 - RNA, 22 nt, Human
ucagccugcuccaagugcugcc

SEQ ID NO: 473319 - RNA, 22 nt, Human
caaugauucugcaacugugugc

SEQ ID NO: 473320 - RNA, 20 nt, Human
agucccuuuggucagguauu

SEQ ID NO: 473321 - RNA, 22 nt, Human
aggcugagucgggaggaucacu

SEQ ID NO: 473322 - RNA, 23 nt, Human
gccugggacucaggaggagcuca

SEQ ID NO: 473323 - RNA, 22 nt, Human
cggcagagcggcgagccccucc

SEQ ID NO: 473324 - RNA, 22 nt, Human
uagagcuggccgggacagcugg

SEQ ID NO: 473325 - RNA, 22 nt, Human
augcucuggaguacgugaaauu

SEQ ID NO: 473326 - RNA, 22 nt, Human
uuguuacaucuuauguaagugg

SEQ ID NO: 473327 - RNA, 22 nt, Human
uggcacugggacagaugcucuc

SEQ ID NO: 473328 - RNA, 19 nt, Human
ugagagugaggaaggcuuc

SEQ ID NO: 473329 - RNA, 22 nt, Human
ugccugaggagucagggcaggu

SEQ ID NO: 473330 - RNA, 22 nt, Human
ggugaaggcacaagagggcaag

SEQ ID NO: 473331 - RNA, 22 nt, Human
acuggcagccacaacuggcagg

SEQ ID NO: 473332 - RNA, 22 nt, Human
ggagucaggagcaggcugggcu

SEQ ID NO: 473333 - RNA, 22 nt, Human
acaaagguggaccauguggcuu

SEQ ID NO: 473334 - RNA, 22 nt, Human
augauacaucuucaugucagug

SEQ ID NO: 473335 - RNA, 20 nt, Human
uccaggcagacagcuauggg

SEQ ID NO: 473336 - RNA, 22 nt, Human
ugggaaugugagcauucauuca

SEQ ID NO: 473337 - RNA, 22 nt, Human
ugagcuggucuugaguguagcu

SEQ ID NO: 473338 - RNA, 22 nt, Human
cagagcaguaaaucuggggcac

SEQ ID NO: 473339 - RNA, 22 nt, Human
ggcucagguugggucacaugac

SEQ ID NO: 473340 - RNA, 22 nt, Human
accugccuucucaaggacauga

SEQ ID NO: 473341 - RNA, 22 nt, Human
acaaguggguccuacauaaagc

SEQ ID NO: 473342 - RNA, 22 nt, Human
ccuguggcugccacuuggguga

SEQ ID NO: 473343 - RNA, 22 nt, Human
ugauuuuuagcuauucugaaga

SEQ ID NO: 473344 - RNA, 22 nt, Human
ccugugcccucagccuggcucu

SEQ ID NO: 473345 - RNA, 22 nt, Human
gggagggaaagcuugaucuguc

SEQ ID NO: 473346 - RNA, 22 nt, Human
uguuuguucccucucuuuccug

SEQ ID NO: 473347 - RNA, 22 nt, Human
aguuuucuguucuacaauuuga

SEQ ID NO: 473348 - RNA, 22 nt, Human
cuuuuuccagcuucaggguggg

SEQ ID NO: 473349 - RNA, 22 nt, Human
gggaguggguuuggccuaggcc

SEQ ID NO: 473350 - RNA, 22 nt, Human
acuuugcacuaaguuacucauu

SEQ ID NO: 473351 - RNA, 22 nt, Human
cugucccagauguucucagcac

SEQ ID NO: 473352 - RNA, 22 nt, Human
uucacaggauauaugugcaggg

SEQ ID NO: 473353 - RNA, 22 nt, Human
ggcaguggguuccccaaggcac

SEQ ID NO: 473354 - RNA, 22 nt, Human
ucaguggaguauggaugaaguc

SEQ ID NO: 473355 - RNA, 22 nt, Human
ugcaggcaggggaugagcagcc

SEQ ID NO: 473356 - RNA, 22 nt, Human
ucagagcuuaucucuugcugga

SEQ ID NO: 473357 - RNA, 22 nt, Human
gagucacaaagccuuucuuauu

SEQ ID NO: 473358 - RNA, 22 nt, Human
gcagacuggucuucagccuugg

SEQ ID NO: 473359 - RNA, 22 nt, Human
gacauaauccuccucaccuacu

SEQ ID NO: 473360 - RNA, 22 nt, Human
cugaagcaaaggaucgagcuaa

SEQ ID NO: 473361 - RNA, 20 nt, Human
cugcugugauucccuccucc

SEQ ID NO: 473362 - RNA, 22 nt, Human
cauacuuugggauaagagugga

SEQ ID NO: 473363 - RNA, 22 nt, Human
ccaguggacaauuucugaggaa

SEQ ID NO: 473364 - RNA, 23 nt, Human
uaaagacagccuucaggauucug

SEQ ID NO: 473365 - RNA, 21 nt, Human
gccacugcacuccagccuggg

SEQ ID NO: 473366 - RNA, 22 nt, Human
aggaccagaggccagagucagc

SEQ ID NO: 473367 - RNA, 20 nt, Human
acccagcucugugcccuggg

SEQ ID NO: 473368 - RNA, 22 nt, Human
agggcccuagggaaugagacau

SEQ ID NO: 473369 - RNA, 21 nt, Human
aggaaaggccagcacguaggg

SEQ ID NO: 473370 - RNA, 22 nt, Human
gcugagcugcuguucauccugc

SEQ ID NO: 473371 - RNA, 22 nt, Human
uaguccauuuucacacugcuga

SEQ ID NO: 473372 - RNA, 22 nt, Human
uggcuuccaaaggaaugggccu

SEQ ID NO: 473373 - RNA, 18 nt, Human
ggcugagguugacuagaa

SEQ ID NO: 473374 - RNA, 22 nt, Human
guggcagcggcccaggccgucu

SEQ ID NO: 473375 - RNA, 21 nt, Human
cgcagagcgaacuugcggcgc

SEQ ID NO: 473376 - RNA, 22 nt, Human
cauuuagacauuugauuugggg

SEQ ID NO: 473377 - RNA, 22 nt, Human
cuggcagguuuggugucuggug

SEQ ID NO: 473378 - RNA, 22 nt, Human
cagagccauuauggagacuugc

SEQ ID NO: 473379 - RNA, 22 nt, Human
agugccuggaccccaugacaua

SEQ ID NO: 473380 - RNA, 22 nt, Human
uuggcuuccaggaucucagcag

SEQ ID NO: 473381 - RNA, 22 nt, Human
gggacuggaguagaggccggug

SEQ ID NO: 473382 - RNA, 22 nt, Human
ugggcagagaucuggaucaaac

SEQ ID NO: 473383 - RNA, 22 nt, Human
ccucuuccacugggccccaucc

SEQ ID NO: 473384 - RNA, 22 nt, Human
caagagcauuuaguuagcuggu

SEQ ID NO: 473385 - RNA, 22 nt, Human
gcguggugcugcccugcacaca

SEQ ID NO: 473386 - RNA, 22 nt, Human
agccucugauggcucccaagga

SEQ ID NO: 473387 - RNA, 18 nt, Human
gagcccugagucugcaca

SEQ ID NO: 473388 - RNA, 22 nt, Human
ccugaggggcugcaggccagcu

SEQ ID NO: 473389 - RNA, 22 nt, Human
agccaggcagggcucucgcucu

SEQ ID NO: 473390 - RNA, 22 nt, Human
cagcccagcacuaaguagauuu

SEQ ID NO: 473391 - RNA, 22 nt, Human
aaacauugcuaaauaaugcugc

SEQ ID NO: 473392 - RNA, 22 nt, Human
gccucugcggagcuguacauca

SEQ ID NO: 473393 - RNA, 21 nt, Human
gcagacugcccugcugucccc

SEQ ID NO: 473394 - RNA, 20 nt, Human
aggcugaguucuaugcacuu

SEQ ID NO: 473395 - RNA, 22 nt, Human
uuuaauuuuccugguaggccug

SEQ ID NO: 473396 - RNA, 19 nt, Human
acaaacugaguacacuugu

SEQ ID NO: 473397 - RNA, 22 nt, Human
ucagggacuaggugcugccuga

SEQ ID NO: 473398 - RNA, 22 nt, Human
cacaagucuguggucuccaaca

SEQ ID NO: 473399 - RNA, 22 nt, Human
aucccaugagaccacguuggcu

SEQ ID NO: 473400 - RNA, 22 nt, Human
uuucagaugcaauuaauuuuca

SEQ ID NO: 473401 - RNA, 22 nt, Human
agggccugacacccuugccagc

SEQ ID NO: 473402 - RNA, 22 nt, Human
ggaggugggagacauaggcggc

SEQ ID NO: 473403 - RNA, 22 nt, Human
uacaugcuccacuuucuccugu

SEQ ID NO: 473404 - RNA, 22 nt, Human
acauuucucauucuccccuaac

SEQ ID NO: 473405 - RNA, 22 nt, Human
augaaaaguucgaucuagaagg

SEQ ID NO: 473406 - RNA, 22 nt, Human
cacagggcagguacucucagag

SEQ ID NO: 473407 - RNA, 22 nt, Human
agagcccucucauuggcuuauu

SEQ ID NO: 473408 - RNA, 22 nt, Human
guggcagguuauaagcaucuca

SEQ ID NO: 473409 - RNA, 22 nt, Human
ugccugggaaccaauccuggcu

SEQ ID NO: 473410 - RNA, 22 nt, Human
cagagccaggccugcccucuuu

SEQ ID NO: 473411 - RNA, 22 nt, Human
aaagauucgagcgauguauaaa

SEQ ID NO: 473412 - RNA, 22 nt, Human
ggcaggaggaagaguuagcacc

SEQ ID NO: 473413 - RNA, 20 nt, Human
caccaggcgcucugagaaca

SEQ ID NO: 473414 - RNA, 22 nt, Human
cccagccuuugcuuccugguuc

SEQ ID NO: 473415 - RNA, 22 nt, Human
gaaaugugugacaaguuucaau

SEQ ID NO: 473416 - RNA, 23 nt, Human
uccucccaaauuucagccucauu

SEQ ID NO: 473417 - RNA, 22 nt, Human
cugugcaguggcagcguguggg

SEQ ID NO: 473418 - RNA, 22 nt, Human
acacuguaaauugagugcguga

SEQ ID NO: 473419 - RNA, 21 nt, Human
aaacugaagagacaggaacuu

SEQ ID NO: 473420 - RNA, 22 nt, Human
auuucuacaguacacaugcauu

SEQ ID NO: 473421 - RNA, 22 nt, Human
uaguuacagcaggcaggauaua

SEQ ID NO: 473422 - RNA, 22 nt, Human
gcagauggcugagccugcagau

SEQ ID NO: 473423 - RNA, 22 nt, Human
auacaucucauguaagagauaa

SEQ ID NO: 473424 - RNA, 18 nt, Human
auccuugaugagaggucu

SEQ ID NO: 473425 - RNA, 22 nt, Human
gcagcugggccccagccucucc

SEQ ID NO: 473426 - RNA, 20 nt, Human
cucugcagcaaggccugggu

SEQ ID NO: 473427 - RNA, 22 nt, Human
gcucccagcaauugaggcagcc

SEQ ID NO: 473428 - RNA, 22 nt, Human
ucugucacaauuugcuuacucu

SEQ ID NO: 473429 - RNA, 22 nt, Human
gcagagccuugcgucaugugcc

SEQ ID NO: 473430 - RNA, 22 nt, Human
uucaagguaugguagcugguca

SEQ ID NO: 473431 - RNA, 22 nt, Human
aaagccacugcauguguaguau

SEQ ID NO: 473432 - RNA, 17 nt, Human
cauguguaugugggagu

SEQ ID NO: 473433 - RNA, 22 nt, Human
uuccuucucagcccucgaggau

SEQ ID NO: 473434 - RNA, 22 nt, Human
uugugaaauguuucaaaauagu

SEQ ID NO: 473435 - RNA, 21 nt, Human
cagagcugaaggguguagugu

SEQ ID NO: 473436 - RNA, 23 nt, Human
uucauuugucuacuucacuuguu

SEQ ID NO: 473437 - RNA, 21 nt, Human
ugauuuccaucuuaaaauaaa

SEQ ID NO: 473438 - RNA, 22 nt, Human
gggaugucacugugccuggcac

SEQ ID NO: 473439 - RNA, 22 nt, Human
gccuggagggcucuagagaggc

SEQ ID NO: 473440 - RNA, 22 nt, Human
ucugggcuuuacacugugcuua

SEQ ID NO: 473441 - RNA, 19 nt, Human
cacagggcaggucucaugu

SEQ ID NO: 473442 - RNA, 22 nt, Human
accugcagguguuuccacacuu

SEQ ID NO: 473443 - RNA, 22 nt, Human
aggagccaggaaaccugcucug

SEQ ID NO: 473444 - RNA, 22 nt, Human
ccugcucagagcgucuugugug

SEQ ID NO: 473445 - RNA, 22 nt, Human
gagggaccuuuacacagacauu

SEQ ID NO: 473446 - RNA, 19 nt, Human
gcuucccaccagccagccc

SEQ ID NO: 473447 - RNA, 22 nt, Human
uggccugcuuucauuugaugcu

SEQ ID NO: 473448 - RNA, 22 nt, Human
cugggguggauggguccaaguu

SEQ ID NO: 473449 - RNA, 17 nt, Human
ggcugcugugcuggugc

SEQ ID NO: 473450 - RNA, 19 nt, Human
ugaaacaaacuuaaaagga

SEQ ID NO: 473451 - RNA, 22 nt, Human
ugagguaggugguaagagauac

SEQ ID NO: 473452 - RNA, 22 nt, Human
acuguacacagugguguacugu

SEQ ID NO: 473453 - RNA, 22 nt, Human
uaguuuuuucaacaaauggugc

SEQ ID NO: 473454 - RNA, 22 nt, Human
gggagggaucugcuaggcaaug

SEQ ID NO: 473455 - RNA, 22 nt, Human
ggcuuuauuaacucauccguaa

SEQ ID NO: 473456 - RNA, 22 nt, Human
cccaguggagauaggagugugg

SEQ ID NO: 473457 - RNA, 21 nt, Human
uccugcaggaggccugagagg

SEQ ID NO: 473458 - RNA, 22 nt, Human
auuauucuuaugucaucauggc

SEQ ID NO: 473459 - RNA, 22 nt, Human
uuucacauaaauauuaugccua

SEQ ID NO: 473460 - RNA, 22 nt, Human
ucaggauaaaauguaauggcaa

SEQ ID NO: 473461 - RNA, 22 nt, Human
gcagugguggagcuuacauauc

SEQ ID NO: 473462 - RNA, 22 nt, Human
ccugccagcauggcuuaucucc

SEQ ID NO: 473463 - RNA, 22 nt, Human
uggccugauuuugcuaagagaa

SEQ ID NO: 473464 - RNA, 22 nt, Human
gcugaguugaaagcagaggaua

SEQ ID NO: 473465 - RNA, 22 nt, Human
ccuggaaggugaugguacagca

SEQ ID NO: 473466 - RNA, 22 nt, Human
ggcccaucucuugcucuggguu

SEQ ID NO: 473467 - RNA, 22 nt, Human
gggugggagucuggcccucaaa

SEQ ID NO: 473468 - RNA, 18 nt, Human
agggucagugucacuggc

SEQ ID NO: 473469 - RNA, 22 nt, Human
caggagccccaggcugacaaua

SEQ ID NO: 473470 - RNA, 22 nt, Human
cuguccccgcgaguccagagcu

SEQ ID NO: 473471 - RNA, 22 nt, Human
gcugcccaguucugcugcugcc

SEQ ID NO: 473472 - RNA, 22 nt, Human
aaggaagaagacucuuuacucc

SEQ ID NO: 473473 - RNA, 22 nt, Human
uguaugugcuugagaagguggg

SEQ ID NO: 473474 - RNA, 19 nt, Human
aguguguacugaaagcacu

SEQ ID NO: 473475 - RNA, 18 nt, Human
agagcagcggcaucacac

SEQ ID NO: 473476 - RNA, 22 nt, Human
caggaguggugugagggacucc

SEQ ID NO: 473477 - RNA, 22 nt, Human
aacaggcaggagaauucugccu

SEQ ID NO: 473478 - RNA, 17 nt, Human
ucaugcccaacuauuac

SEQ ID NO: 473479 - RNA, 22 nt, Human
cuggugccuccucccugugcuu

SEQ ID NO: 473480 - RNA, 22 nt, Human
gagcuuuacuucugacuggugc

SEQ ID NO: 473481 - RNA, 20 nt, Human
aaggcacuaugucugcuagc

SEQ ID NO: 473482 - RNA, 22 nt, Human
acaugcuuucuagguccuucug

SEQ ID NO: 473483 - RNA, 22 nt, Human
gucuccugagacugcagucacc

SEQ ID NO: 473484 - RNA, 22 nt, Human
agaggaaguaaucaggaccugc

SEQ ID NO: 473485 - RNA, 22 nt, Human
uucaagaugccagggacgcggc

SEQ ID NO: 473486 - RNA, 22 nt, Human
caguggaggcucaagugugcuu

SEQ ID NO: 473487 - RNA, 22 nt, Human
cagcugcaggaacaaaaaugug

SEQ ID NO: 473488 - RNA, 22 nt, Human
cugccucucaggucccugagau

SEQ ID NO: 473489 - RNA, 22 nt, Human
ucagagaggauuuuaauaagug

SEQ ID NO: 473490 - RNA, 22 nt, Human
gcagccacagaggagggaugca

SEQ ID NO: 473491 - RNA, 19 nt, Human
uugaaauuguuugauaugg

SEQ ID NO: 473492 - RNA, 22 nt, Human
uggccuugggcagguggccugc

SEQ ID NO: 473493 - RNA, 22 nt, Human
caggaggcagaggaugcccagu

SEQ ID NO: 473494 - RNA, 22 nt, Human
ccucuugccaaucagcuacaga

SEQ ID NO: 473495 - RNA, 22 nt, Human
agccucucugaugugacagcua

SEQ ID NO: 473496 - RNA, 22 nt, Human
ccaaggagcugcaggcacuugu

SEQ ID NO: 473497 - RNA, 22 nt, Human
cagggcuguaaauuagugcuga

SEQ ID NO: 473498 - RNA, 22 nt, Human
acagcuguggccacuugcaucc

SEQ ID NO: 473499 - RNA, 22 nt, Human
ucuggagcgaggucccugucug

SEQ ID NO: 473500 - RNA, 19 nt, Human
agacacacuugauaugugu

SEQ ID NO: 473501 - RNA, 22 nt, Human
augcagaaggagccaugcuugc

SEQ ID NO: 473502 - RNA, 21 nt, Human
agcaacucugacuagaugagg

SEQ ID NO: 473503 - RNA, 22 nt, Human
ucuggcuccaccuccuuuacua

SEQ ID NO: 473504 - RNA, 22 nt, Human
gcuggccucuggagaagggcuu

SEQ ID NO: 473505 - RNA, 22 nt, Human
agcucccagucuccucuccaug

SEQ ID NO: 473506 - RNA, 21 nt, Human
gagugucuaauccaggcuguc

SEQ ID NO: 473507 - RNA, 22 nt, Human
aggagucagauaugggaaaguu

SEQ ID NO: 473508 - RNA, 21 nt, Human
ugcagcugacacugguaugcc

SEQ ID NO: 473509 - RNA, 22 nt, Human
gaggaccacagaugagccugca

SEQ ID NO: 473510 - RNA, 20 nt, Human
gcucccagccugcagucccc

SEQ ID NO: 473511 - RNA, 22 nt, Human
agagaagacuuacagccacagu

SEQ ID NO: 473512 - RNA, 22 nt, Human
ucaacacucuuuggcacaguua

SEQ ID NO: 473513 - RNA, 22 nt, Human
uagggcaguuauaacauuagug

SEQ ID NO: 473514 - RNA, 22 nt, Human
caggggcucccugggugccagu

SEQ ID NO: 473515 - RNA, 22 nt, Human
uuguaaaugaccuuuucuaauu

SEQ ID NO: 473516 - RNA, 22 nt, Human
ccagggugugggcgucggcacg

SEQ ID NO: 473517 - RNA, 22 nt, Human
uagcagugccaggauuuugcug

SEQ ID NO: 473518 - RNA, 22 nt, Human
caaugugguggcagaugucagu

SEQ ID NO: 473519 - RNA, 22 nt, Human
cuggccugggagcugcuagcgu

SEQ ID NO: 473520 - RNA, 22 nt, Human
ugcagaaggaggaggaaaucca

SEQ ID NO: 473521 - RNA, 18 nt, Human
gugcugugggcaguggcc

SEQ ID NO: 473522 - RNA, 22 nt, Human
uaucuguuccaggcacucagcu

SEQ ID NO: 473523 - RNA, 22 nt, Human
caaugugucaggaaaagggcca

SEQ ID NO: 473524 - RNA, 22 nt, Human
uuccucuccucacaugagucac

SEQ ID NO: 473525 - RNA, 22 nt, Human
agcugcccuuaauaggcauuca

SEQ ID NO: 473526 - RNA, 22 nt, Human
gacagagugcagggcuagaaga

SEQ ID NO: 473527 - RNA, 22 nt, Human
caguggucugugcuucuguaca

SEQ ID NO: 473528 - RNA, 22 nt, Human
gagggcagaaaauuaugcggug

SEQ ID NO: 473529 - RNA, 22 nt, Human
ucucugguggcuccaucaguag

SEQ ID NO: 473530 - RNA, 22 nt, Human
agagcugcccacacagcagauu

SEQ ID NO: 473531 - RNA, 22 nt, Human
cucagagucccuucccucgugg

SEQ ID NO: 473532 - RNA, 22 nt, Human
gacagcaggagaucaugauaga

SEQ ID NO: 473533 - RNA, 22 nt, Human
acagugugguuugagcacuggg

SEQ ID NO: 473534 - RNA, 22 nt, Human
cagcaggaaacuuaaagguaau

SEQ ID NO: 473535 - RNA, 22 nt, Human
uaaagguaguuuuaaaggugcu

SEQ ID NO: 473536 - RNA, 22 nt, Human
ugccaggcgauugcuaucagca

SEQ ID NO: 473537 - RNA, 22 nt, Human
ugcuuuauguuaucagaagggu

SEQ ID NO: 473538 - RNA, 22 nt, Human
ggagagcugguagcuggcucca

SEQ ID NO: 473539 - RNA, 22 nt, Human
uggcucagcgcggccuggucuu

SEQ ID NO: 473540 - RNA, 21 nt, Human
gaggccacuaauaggggcaga

SEQ ID NO: 473541 - RNA, 22 nt, Human
ugggcagaaggaagagccaccu

SEQ ID NO: 473542 - RNA, 22 nt, Human
cugaggugagcuucccugggcu

SEQ ID NO: 473543 - RNA, 22 nt, Human
gcugucugcaucucuagagcuu

SEQ ID NO: 473544 - RNA, 22 nt, Human
gucucagggacugcuucugggg

SEQ ID NO: 473545 - RNA, 22 nt, Human
ccagcagggaaaaacccaccaa

SEQ ID NO: 473546 - RNA, 22 nt, Human
gcagcuuuaaacauuggaaaua

SEQ ID NO: 473547 - RNA, 22 nt, Human
agacuguaauugacaugucagc

SEQ ID NO: 473548 - RNA, 17 nt, Human
acaagcaguggccaugg

SEQ ID NO: 473549 - RNA, 22 nt, Human
uggccgggccgggcgccuccac

SEQ ID NO: 473550 - RNA, 22 nt, Human
aaucaguuaggguguuaaugag

SEQ ID NO: 473551 - RNA, 22 nt, Human
gccucugcccauccaccaucag

SEQ ID NO: 473552 - RNA, 22 nt, Human
aagagaaggauucugagccugg

SEQ ID NO: 473553 - RNA, 22 nt, Human
gggagccagcagggcauggagc

SEQ ID NO: 473554 - RNA, 22 nt, Human
cgccucagccguggucaucuuc

SEQ ID NO: 473555 - RNA, 22 nt, Human
ugcugucccuaagucucuucaa

SEQ ID NO: 473556 - RNA, 22 nt, Human
ucugaggcccugcaggcagugu

SEQ ID NO: 473557 - RNA, 20 nt, Human
agcagcauuguucuagagca

SEQ ID NO: 473558 - RNA, 22 nt, Human
gagucugaugucccccaggcca

SEQ ID NO: 473559 - RNA, 22 nt, Human
cugaagcacagcauauaaauaa

SEQ ID NO: 473560 - RNA, 22 nt, Human
ggcagccauacucagaccuggg

SEQ ID NO: 473561 - RNA, 22 nt, Human
ugugcccauuacacagaggcau

SEQ ID NO: 473562 - RNA, 22 nt, Human
aacauugccaugguuaauuuua

SEQ ID NO: 473563 - RNA, 22 nt, Human
uggcugcugcuuggucuucuuc

SEQ ID NO: 473564 - RNA, 22 nt, Human
acacacaacucauuguguaaua

SEQ ID NO: 473565 - RNA, 22 nt, Human
ccaggagucuggaugagguguc

SEQ ID NO: 473566 - RNA, 22 nt, Human
acagagccuccaggagugcugg

SEQ ID NO: 473567 - RNA, 22 nt, Human
aauuuguuacacagcaauauaa

SEQ ID NO: 473568 - RNA, 22 nt, Human
ucagcaguggcucucaugcagu

SEQ ID NO: 473569 - RNA, 22 nt, Human
gcagcuuucuaagcuuuauugc

SEQ ID NO: 473570 - RNA, 22 nt, Human
ugggccugaaggagcugcgccc

SEQ ID NO: 473571 - RNA, 22 nt, Human
guccugucccccaaggcugugg

SEQ ID NO: 473572 - RNA, 19 nt, Human
cagaguacaccagauagga

SEQ ID NO: 473573 - RNA, 22 nt, Human
gccuguccacuaaacagccaag

SEQ ID NO: 473574 - RNA, 22 nt, Human
gcuggcuuugcacugggugcau

SEQ ID NO: 473575 - RNA, 22 nt, Human
aaacuguauauuuauggcaugu

SEQ ID NO: 473576 - RNA, 19 nt, Human
uacuuuuucaggacagagu

SEQ ID NO: 473577 - RNA, 22 nt, Human
cugagaggaugcugcaguggag

SEQ ID NO: 473578 - RNA, 22 nt, Human
cuuuauguccuugaagaguugu

SEQ ID NO: 473579 - RNA, 22 nt, Human
uucagucagugacuaagcaguu

SEQ ID NO: 473580 - RNA, 22 nt, Human
aaauguguuucgaaaacuggug

SEQ ID NO: 473581 - RNA, 22 nt, Human
uugaaaguuuauggagucugca

SEQ ID NO: 473582 - RNA, 22 nt, Human
cagucccagacauaguaaggga

SEQ ID NO: 473583 - RNA, 22 nt, Human
gcacugaaugccaaaguguagg

SEQ ID NO: 473584 - RNA, 22 nt, Human
cauaauaucuccgauuacuugc

SEQ ID NO: 473585 - RNA, 22 nt, Human
gcccugagacugagcauggguu

SEQ ID NO: 473586 - RNA, 22 nt, Human
ugaggcagauauuuauuggguu

SEQ ID NO: 473587 - RNA, 22 nt, Human
agggcagcacagcugugcuccu

SEQ ID NO: 473588 - RNA, 22 nt, Human
uaggggaacuggcacagggcag

SEQ ID NO: 473589 - RNA, 22 nt, Human
gcagaggcaaucagguaugugg

SEQ ID NO: 473590 - RNA, 22 nt, Human
ggcucuggagacauguggagag

SEQ ID NO: 473591 - RNA, 22 nt, Human
uuaugcaacaggugagcagaca

SEQ ID NO: 473592 - RNA, 22 nt, Human
aggccaggaccauuagcccaga

SEQ ID NO: 473593 - RNA, 22 nt, Human
uccugcagagccgcccucaggu

SEQ ID NO: 473594 - RNA, 22 nt, Human
acuccuggggauccauuccuuu

SEQ ID NO: 473595 - RNA, 22 nt, Human
auccugggcagugugucacucu

SEQ ID NO: 473596 - RNA, 22 nt, Human
agccaccaccacugaaagguua

SEQ ID NO: 473597 - RNA, 22 nt, Human
agagcagccugugaugaugcac

SEQ ID NO: 473598 - RNA, 22 nt, Human
cggggcuguagcacagcugagc

SEQ ID NO: 473599 - RNA, 22 nt, Human
cugggaugucuauagaacacuu

SEQ ID NO: 473600 - RNA, 22 nt, Human
acaugggaucaaugaggcaggc

SEQ ID NO: 473601 - RNA, 22 nt, Human
aaggccaugcacauccuaggca

SEQ ID NO: 473602 - RNA, 22 nt, Human
aguuaaagucugaaauagagaa

SEQ ID NO: 473603 - RNA, 22 nt, Human
uguauguguauguacauaugca

SEQ ID NO: 473604 - RNA, 22 nt, Human
aggcugggaaauguagucuucc

SEQ ID NO: 473605 - RNA, 22 nt, Human
agugcacagcgugauguauugg

SEQ ID NO: 473606 - RNA, 22 nt, Human
aagagcaucgguggagccccca

SEQ ID NO: 473607 - RNA, 22 nt, Human
gagaaggacuacacaucuggcc

SEQ ID NO: 473608 - RNA, 22 nt, Human
ugcuuaaacauacuauuuauau

SEQ ID NO: 473609 - RNA, 22 nt, Human
cuucuccucugaguccugggag

SEQ ID NO: 473610 - RNA, 22 nt, Human
cugccaggggccucacaggcca

SEQ ID NO: 473611 - RNA, 22 nt, Human
uauguacacacacaugcaugua

SEQ ID NO: 473612 - RNA, 22 nt, Human
uucacagaauggcaaguuaugg

SEQ ID NO: 473613 - RNA, 22 nt, Human
ccuggcacgaagggcugagguu

SEQ ID NO: 473614 - RNA, 22 nt, Human
gggcagcugcagggauggugac

SEQ ID NO: 473615 - RNA, 18 nt, Human
guuaauuuugaaguucau

SEQ ID NO: 473616 - RNA, 18 nt, Human
gcucugcccaggcugccc

SEQ ID NO: 473617 - RNA, 22 nt, Human
ccaggagccugggccaggcugg

SEQ ID NO: 473618 - RNA, 21 nt, Human
uccagaccucccucuccuagc

SEQ ID NO: 473619 - RNA, 22 nt, Human
gggcugagauuggugcccuguc

SEQ ID NO: 473620 - RNA, 22 nt, Human
ugggcagggagcuggaaccaca

SEQ ID NO: 473621 - RNA, 22 nt, Human
gcugcccaggguggagccggcu

SEQ ID NO: 473622 - RNA, 18 nt, Human
acagcagguuucauucuu

SEQ ID NO: 473623 - RNA, 22 nt, Human
uuucacaugguacugccuguuu

SEQ ID NO: 473624 - RNA, 22 nt, Human
gcaggaugaaggcagaggcuga

SEQ ID NO: 473625 - RNA, 22 nt, Human
uccugagaugagacagugcugc

SEQ ID NO: 473626 - RNA, 22 nt, Human
uucccaguauuaccuucaggaa

SEQ ID NO: 473627 - RNA, 22 nt, Human
auucuccagcucacuguccaua

SEQ ID NO: 473628 - RNA, 22 nt, Human
aaguuugagaagcuuauagaua

SEQ ID NO: 473629 - RNA, 22 nt, Human
gaugagggccugguggcugugc

SEQ ID NO: 473630 - RNA, 22 nt, Human
gaugccuccaaaugagggcaga

SEQ ID NO: 473631 - RNA, 22 nt, Human
uggccagguugggcuuugcagc

SEQ ID NO: 473632 - RNA, 21 nt, Human
aagcuucccugcucuccaggg

SEQ ID NO: 473633 - RNA, 22 nt, Human
cucuuuccaggguaccccaggu

SEQ ID NO: 473634 - RNA, 22 nt, Human
caguccuguguuaaacaagagc

SEQ ID NO: 473635 - RNA, 22 nt, Human
gaaggaaaacagaucugccuga

SEQ ID NO: 473636 - RNA, 22 nt, Human
ugaguccaagagccagugggaa

SEQ ID NO: 473637 - RNA, 20 nt, Human
agauggugaaggccagggag

SEQ ID NO: 473638 - RNA, 18 nt, Human
ccucagggagagagacgc

SEQ ID NO: 473639 - RNA, 22 nt, Human
gcugcuuccuuuccugcugacc

SEQ ID NO: 473640 - RNA, 22 nt, Human
cccagcuccuuggaugggcagg

SEQ ID NO: 473641 - RNA, 22 nt, Human
cagagcugucauuugccaguga

SEQ ID NO: 473642 - RNA, 22 nt, Human
ugagugccugaacauagaguag

SEQ ID NO: 473643 - RNA, 22 nt, Human
uuccagggcuaauuccugugga

SEQ ID NO: 473644 - RNA, 22 nt, Human
gcuggccauggggagugaggag

SEQ ID NO: 473645 - RNA, 20 nt, Human
aggagaaauucgggacaccu

SEQ ID NO: 473646 - RNA, 22 nt, Human
agaggucagaacaggaaagugu

SEQ ID NO: 473647 - RNA, 22 nt, Human
gccagagcagaauagaguggcc

SEQ ID NO: 473648 - RNA, 22 nt, Human
aaugucugagucucuguauccc

SEQ ID NO: 473649 - RNA, 22 nt, Human
gcccaggccggagagcagugcu

SEQ ID NO: 473650 - RNA, 22 nt, Human
aggcagcagucaugaggaaaga

SEQ ID NO: 473651 - RNA, 22 nt, Human
agcccagcagaaaguccagccu

SEQ ID NO: 473652 - RNA, 22 nt, Human
aggaaaaagaguugcugccuuc

SEQ ID NO: 473653 - RNA, 22 nt, Human
caggguggcccuguggucucau

SEQ ID NO: 473654 - RNA, 18 nt, Human
ugggauggagaguaacug

SEQ ID NO: 473655 - RNA, 22 nt, Human
uuuuccucugcagagcaguuag

SEQ ID NO: 473656 - RNA, 22 nt, Human
auggaaagcuaagccauuuacc

SEQ ID NO: 473657 - RNA, 22 nt, Human
gcccagcaccucucucaggguu

SEQ ID NO: 473658 - RNA, 22 nt, Human
ucuuccucucuaauugaucaga

SEQ ID NO: 473659 - RNA, 22 nt, Human
cugggcacauuuugacuagugu

SEQ ID NO: 473660 - RNA, 22 nt, Human
augccuguaaucccagugcuuu

SEQ ID NO: 473661 - RNA, 23 nt, Human
auuugagaaaguauuuuuaagac

SEQ ID NO: 473662 - RNA, 22 nt, Human
ugccaggcacgugagaguggcc

SEQ ID NO: 473663 - RNA, 21 nt, Human
uggaccuguccuucucgcugu

SEQ ID NO: 473664 - RNA, 22 nt, Human
guugacagcuggugagcugcua

SEQ ID NO: 473665 - RNA, 22 nt, Human
aucaguuucugugaagaacaca

SEQ ID NO: 473666 - RNA, 22 nt, Human
gucaaacaaauuaacauaucca

SEQ ID NO: 473667 - RNA, 22 nt, Human
ugaagaauguugcagugagcau

SEQ ID NO: 473668 - RNA, 22 nt, Human
ucuggccaggauggcaagacca

SEQ ID NO: 473669 - RNA, 22 nt, Human
gaaaggucaguuccacuuccau

SEQ ID NO: 473670 - RNA, 22 nt, Human
gagauucuguagucaggcaucu

SEQ ID NO: 473671 - RNA, 22 nt, Human
ucaguuuuuaaaugauauaauu

SEQ ID NO: 473672 - RNA, 22 nt, Human
uagggacccucccugcucuaac

SEQ ID NO: 473673 - RNA, 22 nt, Human
aguguuucucagaagggccuau

SEQ ID NO: 473674 - RNA, 22 nt, Human
gcaggcagagguggaggagaca

SEQ ID NO: 473675 - RNA, 22 nt, Human
ccccagccuuccaugggaauug

SEQ ID NO: 473676 - RNA, 21 nt, Human
uuucugucucugccacuaguu

SEQ ID NO: 473677 - RNA, 22 nt, Human
ucccagagauuuccucuccuuc

SEQ ID NO: 473678 - RNA, 22 nt, Human
cccugagagugagugccaccuu

SEQ ID NO: 473679 - RNA, 22 nt, Human
uuguuuuggagaugagcuaaaa

SEQ ID NO: 473680 - RNA, 22 nt, Human
uggcagaggagaauuaagauua

SEQ ID NO: 473681 - RNA, 22 nt, Human
gcaggcagguggcaucuuguga

SEQ ID NO: 473682 - RNA, 22 nt, Human
ccaguggaaauguggucaggau

SEQ ID NO: 473683 - RNA, 22 nt, Human
ugcugcacgauaaauaauuucu

SEQ ID NO: 473684 - RNA, 21 nt, Human
auacuuugaauuacagccuug

SEQ ID NO: 473685 - RNA, 22 nt, Human
acauuucucagggaguuuugcu

SEQ ID NO: 473686 - RNA, 21 nt, Human
guauugcagaguuaugugcuc

SEQ ID NO: 473687 - RNA, 22 nt, Human
ccuccagguguuacauaugacu

SEQ ID NO: 473688 - RNA, 22 nt, Human
ugauugacuuuagaauagcacu

SEQ ID NO: 473689 - RNA, 22 nt, Human
ugcugaggucaccuugcugcua

SEQ ID NO: 473690 - RNA, 22 nt, Human
gcugcccagcaggccccagggg

SEQ ID NO: 473691 - RNA, 22 nt, Human
gggcuggggcucaauaauuugu

SEQ ID NO: 473692 - RNA, 22 nt, Human
aguggcaggaaaguggaagaga

SEQ ID NO: 473693 - RNA, 22 nt, Human
auugaauagaugcauuauacua

SEQ ID NO: 473694 - RNA, 22 nt, Human
ggcagcugagcauggcuaccuu

SEQ ID NO: 473695 - RNA, 22 nt, Human
agagccugcuaccucauuccag

SEQ ID NO: 473696 - RNA, 22 nt, Human
uccuucaguuaaagaucucaca

SEQ ID NO: 473697 - RNA, 22 nt, Human
caggaacauuuaaccacagggu

SEQ ID NO: 473698 - RNA, 22 nt, Human
cugcccugggauggucugugcg

SEQ ID NO: 473699 - RNA, 22 nt, Human
ucagucuccuuuccucuagaca

SEQ ID NO: 473700 - RNA, 23 nt, Human
uggcaccaggcauucuaggggua

SEQ ID NO: 473701 - RNA, 22 nt, Human
uggccuggcagagcaaggccug

SEQ ID NO: 473702 - RNA, 22 nt, Human
gggaccugcgccacucacuguc

SEQ ID NO: 473703 - RNA, 22 nt, Human
cugucaguucuuccagauagag

SEQ ID NO: 473704 - RNA, 22 nt, Human
gcugccucuguagcuuuggacc

SEQ ID NO: 473705 - RNA, 22 nt, Human
cagugcagguuuagggcugggg

SEQ ID NO: 473706 - RNA, 22 nt, Human
gacaaaacacauuaguuuaaaa

SEQ ID NO: 473707 - RNA, 22 nt, Human
ccaggagcagggcuggcugcac

SEQ ID NO: 473708 - RNA, 22 nt, Human
ugccaggccaaugaaggcaggg

SEQ ID NO: 473709 - RNA, 22 nt, Human
uggcagggccugcucaucaucc

SEQ ID NO: 473710 - RNA, 22 nt, Human
gucacacuagggccaaguggag

SEQ ID NO: 473711 - RNA, 22 nt, Human
aguauguagugcaaucagucag

SEQ ID NO: 473712 - RNA, 21 nt, Human
uaaaugugagcagggcugggc

SEQ ID NO: 473713 - RNA, 22 nt, Human
uucaggagcuggcugcgaagga

SEQ ID NO: 473714 - RNA, 22 nt, Human
cugggaggcacuauucaggagg

SEQ ID NO: 473715 - RNA, 22 nt, Human
aucuggcuauuucuggucgggg

SEQ ID NO: 473716 - RNA, 20 nt, Human
auucuacaagaauaagcaug

SEQ ID NO: 473717 - RNA, 22 nt, Human
cugugcaagacuuacuuuaaua

SEQ ID NO: 473718 - RNA, 20 nt, Human
agugacagagacuguguggc

SEQ ID NO: 473719 - RNA, 22 nt, Human
uuucacauaugguuguugauug

SEQ ID NO: 473720 - RNA, 22 nt, Human
gcagaaggucuggcacuucagg

SEQ ID NO: 473721 - RNA, 22 nt, Human
aggagcagcccacuccuguccu

SEQ ID NO: 473722 - RNA, 22 nt, Human
uaaaacugaauacauacugagg

SEQ ID NO: 473723 - RNA, 22 nt, Human
ucaggcugcuguacugugaaug

SEQ ID NO: 473724 - RNA, 22 nt, Human
ggcaguggaggacccugugucu

SEQ ID NO: 473725 - RNA, 22 nt, Human
ucagcuuugcaaguuagaaaau

SEQ ID NO: 473726 - RNA, 22 nt, Human
ugugccagaaaauaugcugagg

SEQ ID NO: 473727 - RNA, 22 nt, Human
gcagggcacacaagaaugauaa

SEQ ID NO: 473728 - RNA, 22 nt, Human
cagaguguggcaucuuccaacu

SEQ ID NO: 473729 - RNA, 17 nt, Human
uucucuuccuggauagu

SEQ ID NO: 473730 - RNA, 22 nt, Human
gccaccagccccaugcgcugug

SEQ ID NO: 473731 - RNA, 22 nt, Human
cugaggaguuuggguuguucaa

SEQ ID NO: 473732 - RNA, 17 nt, Human
cucacggaggaugaauc

SEQ ID NO: 473733 - RNA, 22 nt, Human
aggccaaguagcuagcauugaa

SEQ ID NO: 473734 - RNA, 22 nt, Human
cucuggaggccuaaggaagugg

SEQ ID NO: 473735 - RNA, 22 nt, Human
ccagguguaggacaccaaggga

SEQ ID NO: 473736 - RNA, 21 nt, Human
aagccucaagcagaagacaga

SEQ ID NO: 473737 - RNA, 22 nt, Human
ugcuggcccaugaagacgcagu

SEQ ID NO: 473738 - RNA, 22 nt, Human
ccugucagaugaaguaauugug

SEQ ID NO: 473739 - RNA, 22 nt, Human
acagcuguauccccagagcuca

SEQ ID NO: 473740 - RNA, 22 nt, Human
ucuucaaacugaaaauuuagaa

SEQ ID NO: 473741 - RNA, 22 nt, Human
ucagcuggauguggaagugcua

SEQ ID NO: 473742 - RNA, 22 nt, Human
acagacaaguaguucagacaag

SEQ ID NO: 473743 - RNA, 22 nt, Human
cagaggccauauuucuucacuc

SEQ ID NO: 473744 - RNA, 23 nt, Human
aagcuuccuucacgucuccuggg

SEQ ID NO: 473745 - RNA, 22 nt, Human
ggcagggaaacagcugauccca

SEQ ID NO: 473746 - RNA, 21 nt, Human
aguguccuugaucuugccuug

SEQ ID NO: 473747 - RNA, 22 nt, Human
uuuugaaagaguccugcuacag

SEQ ID NO: 473748 - RNA, 22 nt, Human
ggaagccaugagggacaguucu

SEQ ID NO: 473749 - RNA, 22 nt, Human
cagggccagagagggcuggcug

SEQ ID NO: 473750 - RNA, 22 nt, Human
augcugaggacaaagagaucaa

SEQ ID NO: 473751 - RNA, 22 nt, Human
gaggcagaaguugcagugagca

SEQ ID NO: 473752 - RNA, 22 nt, Human
cuccagucuaguagagccugcu

SEQ ID NO: 473753 - RNA, 22 nt, Human
cguggccuuugagugagcuccc

SEQ ID NO: 473754 - RNA, 22 nt, Human
guucaaggaagggaggaaagcc

SEQ ID NO: 473755 - RNA, 22 nt, Human
ggagcagggaauuacagcgcag

SEQ ID NO: 473756 - RNA, 21 nt, Human
cccaagggaggcaggauaagg

SEQ ID NO: 473757 - RNA, 22 nt, Human
gcagagacuccacugucuugug

SEQ ID NO: 473758 - RNA, 22 nt, Human
ugccagcaguagcaguaggcca

SEQ ID NO: 473759 - RNA, 22 nt, Human
uugcauaaagauuuuauugcau

SEQ ID NO: 473760 - RNA, 22 nt, Human
ugcagcucauugcuggggucug

SEQ ID NO: 473761 - RNA, 22 nt, Human
acauguguauagccuguauaga

SEQ ID NO: 473762 - RNA, 21 nt, Human
cuguuucuugugaagugacac

SEQ ID NO: 473763 - RNA, 21 nt, Human
uucaaagagugggcauuguca

SEQ ID NO: 473764 - RNA, 22 nt, Human
ccaggagcaggagcuggacaga

SEQ ID NO: 473765 - RNA, 23 nt, Human
ugagaagccauuagagcaggugg

SEQ ID NO: 473766 - RNA, 20 nt, Human
uucuuucaucuacacguugu

SEQ ID NO: 473767 - RNA, 22 nt, Human
aggaaaugcugaugcuccugga

SEQ ID NO: 473768 - RNA, 16 nt, Human
ggagagugucugcaaa

SEQ ID NO: 473769 - RNA, 21 nt, Human
ugaggcuguuguaccagggag

SEQ ID NO: 473770 - RNA, 22 nt, Human
ggccagaaaguuaagcuguggc

SEQ ID NO: 473771 - RNA, 22 nt, Human
guggcuugaccaucccugcuac

SEQ ID NO: 473772 - RNA, 22 nt, Human
uggggcagaguaggauuuuggc

SEQ ID NO: 473773 - RNA, 22 nt, Human
gcugcagccaaauucauuguca

SEQ ID NO: 473774 - RNA, 22 nt, Human
cgagcaugaugacggcuguggc

SEQ ID NO: 473775 - RNA, 22 nt, Human
augugaggaagaaagagguaag

SEQ ID NO: 473776 - RNA, 22 nt, Human
caggggccaggcugucugcugu

SEQ ID NO: 473777 - RNA, 22 nt, Human
aagaacaguugggaggugagcc

SEQ ID NO: 473778 - RNA, 22 nt, Human
ggcugcuggcauugagguaggu

SEQ ID NO: 473779 - RNA, 22 nt, Human
ggcccagcacagugcuuggggg

SEQ ID NO: 473780 - RNA, 22 nt, Human
acaugauauuaaugucuuauuu

SEQ ID NO: 473781 - RNA, 22 nt, Human
cuuuauguuggggugucuuagu

SEQ ID NO: 473782 - RNA, 22 nt, Human
gcugccaauccagcugugggag

SEQ ID NO: 473783 - RNA, 22 nt, Human
uggcagggugggcuucagcccc

SEQ ID NO: 473784 - RNA, 22 nt, Human
auugaaaaauucacaauucugg

SEQ ID NO: 473785 - RNA, 22 nt, Human
gccugggagggcagcagugugg

SEQ ID NO: 473786 - RNA, 22 nt, Human
cagggcugaacugagcuuguga

SEQ ID NO: 473787 - RNA, 22 nt, Human
ugaaggaauggaggaucagagc

SEQ ID NO: 473788 - RNA, 22 nt, Human
agaaaugugagccccuuaucaa

SEQ ID NO: 473789 - RNA, 22 nt, Human
ccuagaugggauggcggccggg

SEQ ID NO: 473790 - RNA, 22 nt, Human
ggcugcugguggaaugguaggc

SEQ ID NO: 473791 - RNA, 22 nt, Human
uccauuuuagagaugaagaaac

SEQ ID NO: 473792 - RNA, 22 nt, Human
accucugcaaugcaaugucaug

SEQ ID NO: 473793 - RNA, 22 nt, Human
auauuucaugggguuccauacu

SEQ ID NO: 473794 - RNA, 22 nt, Human
ccagacccugcucuggggcucu

SEQ ID NO: 473795 - RNA, 22 nt, Human
gggcugggcaugguguucccuc

SEQ ID NO: 473796 - RNA, 22 nt, Human
ucagggcacaggccuguggguu

SEQ ID NO: 473797 - RNA, 22 nt, Human
ucauugcaccccagucccagcu

SEQ ID NO: 473798 - RNA, 22 nt, Human
aaauguauugcauaggauauuu

SEQ ID NO: 473799 - RNA, 21 nt, Human
agcagaacagucgagcacugc

SEQ ID NO: 473800 - RNA, 22 nt, Human
auuauauugaguauaaccagag

SEQ ID NO: 473801 - RNA, 22 nt, Human
uugcucugauuagguggaaaca

SEQ ID NO: 473802 - RNA, 22 nt, Human
aaugugguuaacccauuuaaga

SEQ ID NO: 473803 - RNA, 22 nt, Human
gguucacacuuucaugauuuca

SEQ ID NO: 473804 - RNA, 22 nt, Human
ggcugcaggaugcccagccgug

SEQ ID NO: 473805 - RNA, 22 nt, Human
uggggcaguuaauaaacauucu

SEQ ID NO: 473806 - RNA, 22 nt, Human
cugaggcuuugugugcaugccu

SEQ ID NO: 473807 - RNA, 22 nt, Human
ugcaggggcuugucugggccug

SEQ ID NO: 473808 - RNA, 20 nt, Human
caccacagaauuggggacag

SEQ ID NO: 473809 - RNA, 22 nt, Human
cagcaggauuugaaaggaagag

SEQ ID NO: 473810 - RNA, 22 nt, Human
cagccagccucucaaccaugca

SEQ ID NO: 473811 - RNA, 20 nt, Human
agaaggcuccuuuugccaag

SEQ ID NO: 473812 - RNA, 22 nt, Human
accuuucauuaaagucuguagu

SEQ ID NO: 473813 - RNA, 22 nt, Human
cagcugugggccugacguggca

SEQ ID NO: 473814 - RNA, 22 nt, Human
ugagaggccccagcucuuggcc

SEQ ID NO: 473815 - RNA, 22 nt, Human
augaggcuaugaauggggagau

SEQ ID NO: 473816 - RNA, 22 nt, Human
acugggaguucuccaugucccu

SEQ ID NO: 473817 - RNA, 22 nt, Human
acucugccaucccaggugcugu

SEQ ID NO: 473818 - RNA, 22 nt, Human
cucagagcccaggguacacccg

SEQ ID NO: 473819 - RNA, 22 nt, Human
ccaaggcuggagugcaguggcg

SEQ ID NO: 473820 - RNA, 22 nt, Human
aaacucuuccuuucuuuaaagu

SEQ ID NO: 473821 - RNA, 22 nt, Human
aaaaaucuaugacugcuucucc

SEQ ID NO: 473822 - RNA, 22 nt, Human
ucaggcaggacaauuauuuagg

SEQ ID NO: 473823 - RNA, 22 nt, Human
cuggcuccauccuugagcucug

SEQ ID NO: 473824 - RNA, 22 nt, Human
cugagauggaguuuugcucuug

SEQ ID NO: 473825 - RNA, 23 nt, Human
uccaggcacgcauuucuucuagc

SEQ ID NO: 473826 - RNA, 20 nt, Human
gggaguggugguagccugug

SEQ ID NO: 473827 - RNA, 22 nt, Human
cagagccugccucuggcugugg

SEQ ID NO: 473828 - RNA, 22 nt, Human
ccagcuuucucagaggcuucua

SEQ ID NO: 473829 - RNA, 22 nt, Human
ggcucugcaugugagugggugg

SEQ ID NO: 473830 - RNA, 22 nt, Human
gaagggagaagguugggugacg

SEQ ID NO: 473831 - RNA, 22 nt, Human
acacugugcagauucccuguga

SEQ ID NO: 473832 - RNA, 22 nt, Human
caugcuuugggucagaaaugcc

SEQ ID NO: 473833 - RNA, 22 nt, Human
agccaggaaugcaugcucugcu

SEQ ID NO: 473834 - RNA, 22 nt, Human
gaggccuggcucugcccuccug

SEQ ID NO: 473835 - RNA, 22 nt, Human
ggcaggagaaaggucucuucuu

SEQ ID NO: 473836 - RNA, 21 nt, Human
agaauucuuaaguauucuaau

SEQ ID NO: 473837 - RNA, 22 nt, Human
cacagcagagggagccauugaa

SEQ ID NO: 473838 - RNA, 22 nt, Human
ucccccacucuaaaggagccuu

SEQ ID NO: 473839 - RNA, 22 nt, Human
gagcugccuguugcauagcaac

SEQ ID NO: 473840 - RNA, 22 nt, Human
uacaaagccugguagauaucug

SEQ ID NO: 473841 - RNA, 22 nt, Human
gcagugaaucuggcaagaauuu

SEQ ID NO: 473842 - RNA, 22 nt, Human
caacauauaauauuugaguucu

SEQ ID NO: 473843 - RNA, 22 nt, Human
gggcaugagaggcaggcaagug

SEQ ID NO: 473844 - RNA, 22 nt, Human
aauguguauaugaacauacagg

SEQ ID NO: 473845 - RNA, 22 nt, Human
agguuuucagcuguauccugag

SEQ ID NO: 473846 - RNA, 23 nt, Human
uuucacaaugagcauuacagaau

SEQ ID NO: 473847 - RNA, 22 nt, Human
agcagaaccugcagaccugucu

SEQ ID NO: 473848 - RNA, 22 nt, Human
cagcugccccgcuggcugacca

SEQ ID NO: 473849 - RNA, 22 nt, Human
ucacacagauugguagagcuga

SEQ ID NO: 473850 - RNA, 22 nt, Human
aggcugagagcaacgugucaga

SEQ ID NO: 473851 - RNA, 22 nt, Human
ggggcagaguagcuggggugug

SEQ ID NO: 473852 - RNA, 22 nt, Human
uccugagagcagaguccaggug

SEQ ID NO: 473853 - RNA, 22 nt, Human
gaguccaguucuuuccagcagu

SEQ ID NO: 473854 - RNA, 22 nt, Human
gccucugcucucagguagccuc

SEQ ID NO: 473855 - RNA, 22 nt, Human
uuauuuaggagaaggaacccug

SEQ ID NO: 473856 - RNA, 23 nt, Human
uggcucuguggaucccucaggag

SEQ ID NO: 473857 - RNA, 22 nt, Human
auuauguagguuaggugguugu

SEQ ID NO: 473858 - RNA, 22 nt, Human
ggagcugggacccugucaucug

SEQ ID NO: 473859 - RNA, 22 nt, Human
cagaggaaggcucugggaaugu

SEQ ID NO: 473860 - RNA, 22 nt, Human
uucacagacuuuccauagauug

SEQ ID NO: 473861 - RNA, 22 nt, Human
gucccaggugggcuccaccucu

SEQ ID NO: 473862 - RNA, 23 nt, Human
cuggggcuuucaaaucugggcag

SEQ ID NO: 473863 - RNA, 22 nt, Human
caagcagacaguaggccuagaa

SEQ ID NO: 473864 - RNA, 22 nt, Human
cagcucugugcaggccugggga

SEQ ID NO: 473865 - RNA, 22 nt, Human
aacaaauggggccuuguaugaa

SEQ ID NO: 473866 - RNA, 22 nt, Human
caggugccgggaaugcagcaau

SEQ ID NO: 473867 - RNA, 22 nt, Human
auccucaguguuucugacaucu

SEQ ID NO: 473868 - RNA, 22 nt, Human
cccaggacucuucacugcagcc

SEQ ID NO: 473869 - RNA, 22 nt, Human
ccuguccuccaagagcacaucu

SEQ ID NO: 473870 - RNA, 22 nt, Human
cagaaugagauaacccagauug

SEQ ID NO: 473871 - RNA, 22 nt, Human
aauauguuccacuuaaagcugg

SEQ ID NO: 473872 - RNA, 22 nt, Human
agauggggcugaaaguuccaau

SEQ ID NO: 473873 - RNA, 22 nt, Human
cgcauacauagaaacacacaga

SEQ ID NO: 473874 - RNA, 22 nt, Human
uccagcagggaauuaguagucu

SEQ ID NO: 473875 - RNA, 22 nt, Human
cuuucucuguguuucacaugcu

SEQ ID NO: 473876 - RNA, 22 nt, Human
gccuucccaagacgccugaguu

SEQ ID NO: 473877 - RNA, 22 nt, Human
ugacagggcuagaggcaaugca

SEQ ID NO: 473878 - RNA, 22 nt, Human
acaaagucucuaauaaucuucu

SEQ ID NO: 473879 - RNA, 22 nt, Human
ugaggcaggaugcuugcacagg

SEQ ID NO: 473880 - RNA, 23 nt, Human
cacaccaggagccgucugggcca

SEQ ID NO: 473881 - RNA, 22 nt, Human
ucucugagcgcauuccuccggc

SEQ ID NO: 473882 - RNA, 22 nt, Human
ucagggcagaauccaaagaauu

SEQ ID NO: 473883 - RNA, 17 nt, Human
ggcagcugccacuuuuu

SEQ ID NO: 473884 - RNA, 22 nt, Human
caugcacaacauacucaagagg

SEQ ID NO: 473885 - RNA, 22 nt, Human
agcaguccaacugagguggcau

SEQ ID NO: 473886 - RNA, 22 nt, Human
ucaggcagguggcuggcuaugg

SEQ ID NO: 473887 - RNA, 22 nt, Human
aaaugcacagaggccagagagg

SEQ ID NO: 473888 - RNA, 22 nt, Human
aucuggcucccuuggaauccgu

SEQ ID NO: 473889 - RNA, 22 nt, Human
aagaaacugaaaguggcuucau

SEQ ID NO: 473890 - RNA, 22 nt, Human
aaagccaguucuuagagaaagc

SEQ ID NO: 473891 - RNA, 22 nt, Human
uuuuaagaugcuaguauuucag

SEQ ID NO: 473892 - RNA, 18 nt, Human
ccucacagacuuccaugu

SEQ ID NO: 473893 - RNA, 22 nt, Human
cacagccuugagcgaggacaag

SEQ ID NO: 473894 - RNA, 22 nt, Human
ugaaguccuagaacuccuggua

SEQ ID NO: 473895 - RNA, 22 nt, Human
aagccaguguccagaaugggca

SEQ ID NO: 473896 - RNA, 22 nt, Human
aaggagcuuguucgccuuccuc

SEQ ID NO: 473897 - RNA, 22 nt, Human
ggcuugggagcaggcaugugac

SEQ ID NO: 473898 - RNA, 22 nt, Human
ucugaaaauguugacuuuguuu

SEQ ID NO: 473899 - RNA, 22 nt, Human
gugcuuucugcugcauuccucu

SEQ ID NO: 473900 - RNA, 22 nt, Human
ucccacuggacgucugugcugg

SEQ ID NO: 473901 - RNA, 22 nt, Human
cugcagggugacguugcccacc

SEQ ID NO: 473902 - RNA, 20 nt, Human
ccaccuggccaaggcugugc

SEQ ID NO: 473903 - RNA, 22 nt, Human
uguuucaggaccuaucuuuuag

SEQ ID NO: 473904 - RNA, 22 nt, Human
cugagauggaguuucgcucuuc

SEQ ID NO: 473905 - RNA, 22 nt, Human
aggggaaggccagccuguagag

SEQ ID NO: 473906 - RNA, 22 nt, Human
cacaggcuccggccuugcagcc

SEQ ID NO: 473907 - RNA, 22 nt, Human
uggccuggccacauccagcagg

SEQ ID NO: 473908 - RNA, 22 nt, Human
ugaggggagaagcagcagccug

SEQ ID NO: 473909 - RNA, 22 nt, Human
aaggcacucagccuugggacag

SEQ ID NO: 473910 - RNA, 23 nt, Human
gccauggcugccccacaggccuc

SEQ ID NO: 473911 - RNA, 21 nt, Human
ucucugggaggacuugugaga

SEQ ID NO: 473912 - RNA, 22 nt, Human
ucagcuuggacagcuugguuga

SEQ ID NO: 473913 - RNA, 20 nt, Human
ugcucaggauggagaggugu

SEQ ID NO: 473914 - RNA, 22 nt, Human
agaaauaugcugauuagaugaa

SEQ ID NO: 473915 - RNA, 22 nt, Human
caaggccacguucugcaugcgg

SEQ ID NO: 473916 - RNA, 20 nt, Human
gagggcucguggauggauaa

SEQ ID NO: 473917 - RNA, 22 nt, Human
auucuuggagcagucaaagaag

SEQ ID NO: 473918 - RNA, 22 nt, Human
uugcaacaucugaacauuuauc

SEQ ID NO: 473919 - RNA, 22 nt, Human
caaaugcauagaaagaugaaac

SEQ ID NO: 473920 - RNA, 22 nt, Human
cccuggccagcucaugucugag

SEQ ID NO: 473921 - RNA, 19 nt, Human
ggccaccucucuucccagg

SEQ ID NO: 473922 - RNA, 23 nt, Human
acacauuuuucccguucugaggu

SEQ ID NO: 473923 - RNA, 22 nt, Human
aaaugcagguaguauuuauuuu

SEQ ID NO: 473924 - RNA, 21 nt, Human
uuucacaaaaguaugugacaa

SEQ ID NO: 473925 - RNA, 22 nt, Human
agagcagauggccagggggccu

SEQ ID NO: 473926 - RNA, 22 nt, Human
ccucugccugcacaucauccug

SEQ ID NO: 473927 - RNA, 22 nt, Human
ggggccagcaauguugaggaau

SEQ ID NO: 473928 - RNA, 22 nt, Human
uccuucagccaugggcucucca

SEQ ID NO: 473929 - RNA, 22 nt, Human
agugcccuggcccagcuggacc

SEQ ID NO: 473930 - RNA, 22 nt, Human
uccugucugcucacagagcugg

SEQ ID NO: 473931 - RNA, 22 nt, Human
uuuacaaccucauauucugaug

SEQ ID NO: 473932 - RNA, 22 nt, Human
ugccuggcaacuguggugggcu

SEQ ID NO: 473933 - RNA, 22 nt, Human
uuugggcaguagauguaucacu

SEQ ID NO: 473934 - RNA, 22 nt, Human
agggcugcugcuccgggcccag

SEQ ID NO: 473935 - RNA, 22 nt, Human
cuggccuuggaagggagcccgu

SEQ ID NO: 473936 - RNA, 23 nt, Human
agggguggucaguacccgcagug

SEQ ID NO: 473937 - RNA, 22 nt, Human
uggcagccacaucucguggauu

SEQ ID NO: 473938 - RNA, 22 nt, Human
cacagaaucugugacuccaaga

SEQ ID NO: 473939 - RNA, 22 nt, Human
uaucuuuagaggaagagaaucu

SEQ ID NO: 473940 - RNA, 22 nt, Human
acaaaaguguaggaauuccuua

SEQ ID NO: 473941 - RNA, 22 nt, Human
agcagccagagucugaacauua

SEQ ID NO: 473942 - RNA, 22 nt, Human
cggcugagcagugcugauggaa

SEQ ID NO: 473943 - RNA, 22 nt, Human
uggccucucuaccaggcagccu

SEQ ID NO: 473944 - RNA, 19 nt, Human
cugugcuuuaaacuccuau

SEQ ID NO: 473945 - RNA, 22 nt, Human
ccugaggcuuaaucugucccaa

SEQ ID NO: 473946 - RNA, 22 nt, Human
aagcagcacaguaauauuggug

SEQ ID NO: 473947 - RNA, 22 nt, Human
uguacaauagcuauuaucucca

SEQ ID NO: 473948 - RNA, 22 nt, Human
agcuguggggcaggcagcgagg

SEQ ID NO: 473949 - RNA, 17 nt, Human
uuccccugaccaagccu

SEQ ID NO: 473950 - RNA, 22 nt, Human
aggccugaggaccuucuggagg

SEQ ID NO: 473951 - RNA, 21 nt, Human
uuucccagcugaaaauaaaug

SEQ ID NO: 473952 - RNA, 22 nt, Human
aggcccagagcaggaaaggguu

SEQ ID NO: 473953 - RNA, 22 nt, Human
uuuuucauauuccccucucugg

SEQ ID NO: 473954 - RNA, 22 nt, Human
gggcugcuuauacugaugauaa

SEQ ID NO: 473955 - RNA, 22 nt, Human
cucucuucccgugaguguugca

SEQ ID NO: 473956 - RNA, 22 nt, Human
gaggaaacauuguagaagcagu

SEQ ID NO: 473957 - RNA, 22 nt, Human
aacuuuauuguuaggggcuaaa

SEQ ID NO: 473958 - RNA, 22 nt, Human
accccagcucugagccacacca

SEQ ID NO: 473959 - RNA, 22 nt, Human
agggagaaaauuggaugcacaa

SEQ ID NO: 473960 - RNA, 22 nt, Human
aagccagggauuccugagggag

SEQ ID NO: 473961 - RNA, 22 nt, Human
agccuggcccugcugaacucug

SEQ ID NO: 473962 - RNA, 20 nt, Human
cacugaagacuucuugcuca

SEQ ID NO: 473963 - RNA, 22 nt, Human
ucaaaagucugcauucuucaca

SEQ ID NO: 473964 - RNA, 22 nt, Human
cagcugccuguauuguccucau

SEQ ID NO: 473965 - RNA, 22 nt, Human
uccuuugacuucuugcagucca

SEQ ID NO: 473966 - RNA, 22 nt, Human
guccuggcccacuggcaggcug

SEQ ID NO: 473967 - RNA, 22 nt, Human
guuugcauauuugcacaggaau

SEQ ID NO: 473968 - RNA, 22 nt, Human
uggcccugucccuggagccugg

SEQ ID NO: 473969 - RNA, 22 nt, Human
guuguauucuucaauaucagag

SEQ ID NO: 473970 - RNA, 22 nt, Human
gccagggagucugggccacaga

SEQ ID NO: 473971 - RNA, 22 nt, Human
ggcuuuauuucacuguaccaua

SEQ ID NO: 473972 - RNA, 22 nt, Human
gcucucugggugugucuagaua

SEQ ID NO: 473973 - RNA, 22 nt, Human
aaguggacuaauacaaggacua

SEQ ID NO: 473974 - RNA, 22 nt, Human
ugcugggcuaggguggagcucu

SEQ ID NO: 473975 - RNA, 22 nt, Human
gcuguguccucacacagccuuu

SEQ ID NO: 473976 - RNA, 22 nt, Human
ccuggcagcuguuuggcuuggc

SEQ ID NO: 473977 - RNA, 22 nt, Human
gcucugagucucagcuaccaca

SEQ ID NO: 473978 - RNA, 22 nt, Human
agggcagauggaacuuccccga

SEQ ID NO: 473979 - RNA, 22 nt, Human
ugcauuguaggauguuuagcag

SEQ ID NO: 473980 - RNA, 22 nt, Human
agggcuggccacaugauuuggu

SEQ ID NO: 473981 - RNA, 20 nt, Human
gccugcagguuggaugggau

SEQ ID NO: 473982 - RNA, 22 nt, Human
gggcaguuuauucuagaugguu

SEQ ID NO: 473983 - RNA, 22 nt, Human
uuaucacuuaugagcuuuuugc

SEQ ID NO: 473984 - RNA, 22 nt, Human
uaggaaaagcacaggauguucu

SEQ ID NO: 473985 - RNA, 20 nt, Human
auaaaauaacugccacaaga

SEQ ID NO: 473986 - RNA, 22 nt, Human
cugcccugucuuuuucugauga

SEQ ID NO: 473987 - RNA, 22 nt, Human
ugcuuuauagacaaggaaguag

SEQ ID NO: 473988 - RNA, 22 nt, Human
ggacacagauaaucacacagau

SEQ ID NO: 473989 - RNA, 16 nt, Human
ccaccugcagcucuca

SEQ ID NO: 473990 - RNA, 22 nt, Human
cuggccuuggugcuugcagaca

SEQ ID NO: 473991 - RNA, 22 nt, Human
ggggcucaguucggacagccug

SEQ ID NO: 473992 - RNA, 22 nt, Human
aggaccugacauuguguuuucu

SEQ ID NO: 473993 - RNA, 22 nt, Human
acaggcagcacuaaucucuggu

SEQ ID NO: 473994 - RNA, 22 nt, Human
cagcuucugagcaagccagggg

SEQ ID NO: 473995 - RNA, 22 nt, Human
gccuggagagcacugugcgcuu

SEQ ID NO: 473996 - RNA, 22 nt, Human
agauggaguuaguaccagaguc

SEQ ID NO: 473997 - RNA, 22 nt, Human
auucuggauuaucaguccacca

SEQ ID NO: 473998 - RNA, 22 nt, Human
aggggcugacuggaaagugcca

SEQ ID NO: 473999 - RNA, 22 nt, Human
auugagaauccauuugagauga

SEQ ID NO: 474000 - RNA, 23 nt, Human
ccaggcaguagcuauugaaguga

SEQ ID NO: 474001 - RNA, 20 nt, Human
ccagcauguacacaugugga

SEQ ID NO: 474002 - RNA, 22 nt, Human
uaacagaagaugaaacuucuuu

SEQ ID NO: 474003 - RNA, 22 nt, Human
auuuugaaaagcauuugaguaa

SEQ ID NO: 474004 - RNA, 22 nt, Human
ugggcagaguugugaugaacug

SEQ ID NO: 474005 - RNA, 23 nt, Human
ugcaggggaggcuuaaagcaggu

SEQ ID NO: 474006 - RNA, 22 nt, Human
gcuguggccgucagggaaaugg

SEQ ID NO: 474007 - RNA, 20 nt, Human
aacauugcuucaauguaacc

SEQ ID NO: 474008 - RNA, 22 nt, Human
gaaugaauucagcacauggaau

SEQ ID NO: 474009 - RNA, 22 nt, Human
ucaagaaagggcuucaccagga

SEQ ID NO: 474010 - RNA, 22 nt, Human
acaaaguccugguguauggcca

SEQ ID NO: 474011 - RNA, 22 nt, Human
ugaaggcauugaugaaggaauc

SEQ ID NO: 474012 - RNA, 22 nt, Human
acuguaaauuuugguugcaggu

SEQ ID NO: 474013 - RNA, 22 nt, Human
aucagagaaguuucacuggcau

SEQ ID NO: 474014 - RNA, 22 nt, Human
aucauuccacauguaccacuag

SEQ ID NO: 474015 - RNA, 22 nt, Human
acuguauaaggcauagguaagc

SEQ ID NO: 474016 - RNA, 22 nt, Human
ugccucugaggaagauuguguu

SEQ ID NO: 474017 - RNA, 22 nt, Human
ucaugccacuuacaaaauaaug

SEQ ID NO: 474018 - RNA, 22 nt, Human
uccuugaagaaugauucuugga

SEQ ID NO: 474019 - RNA, 22 nt, Human
ucccuccuggugagcaggggcu

SEQ ID NO: 474020 - RNA, 22 nt, Human
caagaaaugggauuugacugcc

SEQ ID NO: 474021 - RNA, 22 nt, Human
agucucugucguagaucagcgu

SEQ ID NO: 474022 - RNA, 22 nt, Human
uccuggccugucuggaguagcu

SEQ ID NO: 474023 - RNA, 22 nt, Human
agggccugggguagcuuacugc

SEQ ID NO: 474024 - RNA, 22 nt, Human
cagagugaaauaggggaucaag

SEQ ID NO: 474025 - RNA, 22 nt, Human
ugauuuccccagucuugcugcu

SEQ ID NO: 474026 - RNA, 22 nt, Human
ucucucagcuuugagaccugcu

SEQ ID NO: 474027 - RNA, 22 nt, Human
agcagcuucuuucacuccugga

SEQ ID NO: 474028 - RNA, 22 nt, Human
caaagaugcugauguuggauca

SEQ ID NO: 474029 - RNA, 22 nt, Human
ugauuaacugucuauuaaucau

SEQ ID NO: 474030 - RNA, 22 nt, Human
aaauccuaauaaugcacuagug

SEQ ID NO: 474031 - RNA, 22 nt, Human
ggcugccugcucaggugcggcg

SEQ ID NO: 474032 - RNA, 22 nt, Human
gccuggagaaaggaagguggga

SEQ ID NO: 474033 - RNA, 22 nt, Human
gucuggggaagucagggcauca

SEQ ID NO: 474034 - RNA, 23 nt, Human
ugaugggaaggaacgacuaccac

SEQ ID NO: 474035 - RNA, 22 nt, Human
uuucuaguucucugccaaaaaa

SEQ ID NO: 474036 - RNA, 22 nt, Human
auaugugugaugcauggacuaa

SEQ ID NO: 474037 - RNA, 22 nt, Human
cucuuccuacagucugcuaugc

SEQ ID NO: 474038 - RNA, 21 nt, Human
gaaaagcaagggaguagaaca

SEQ ID NO: 474039 - RNA, 22 nt, Human
ucugagagucucugaggcagau

SEQ ID NO: 474040 - RNA, 22 nt, Human
aagucacagcuaaauagcuaag

SEQ ID NO: 474041 - RNA, 22 nt, Human
uccauauuaacuaaaacuagaa

SEQ ID NO: 474042 - RNA, 18 nt, Human
ugggcugccuggccucug

SEQ ID NO: 474043 - RNA, 19 nt, Human
uagcagcugccaaaggaga

SEQ ID NO: 474044 - RNA, 22 nt, Human
ucugccugcaguguggcagggc

SEQ ID NO: 474045 - RNA, 22 nt, Human
uaaauguguuguggaugaaguu

SEQ ID NO: 474046 - RNA, 22 nt, Human
auacaagacucagcacagacgg

SEQ ID NO: 474047 - RNA, 22 nt, Human
gcucugagaggugcagcaguaa

SEQ ID NO: 474048 - RNA, 22 nt, Human
uaugcauauagaugcacacaca

SEQ ID NO: 474049 - RNA, 22 nt, Human
caggaggcuuugggauccaagu

SEQ ID NO: 474050 - RNA, 18 nt, Human
gguggccuugacuucucu

SEQ ID NO: 474051 - RNA, 22 nt, Human
aaguuucauguggagguagacu

SEQ ID NO: 474052 - RNA, 22 nt, Human
gcucagagaugucugcugccuu

SEQ ID NO: 474053 - RNA, 22 nt, Human
guccucugcccaggucaagguu

SEQ ID NO: 474054 - RNA, 22 nt, Human
uaagaacaagauguuccuguuu

SEQ ID NO: 474055 - RNA, 22 nt, Human
guuagggagucagguggcucuu

SEQ ID NO: 474056 - RNA, 22 nt, Human
cagcuccagcccaggcagcucc

SEQ ID NO: 474057 - RNA, 22 nt, Human
ugccugucuuuccucccucgua

SEQ ID NO: 474058 - RNA, 22 nt, Human
gccaggcagcagcgaggauggu

SEQ ID NO: 474059 - RNA, 22 nt, Human
gcacccagaauaaggacaggac

SEQ ID NO: 474060 - RNA, 17 nt, Human
agccugcugaucucaca

SEQ ID NO: 474061 - RNA, 22 nt, Human
cagggcucaggaaaucagacgu

SEQ ID NO: 474062 - RNA, 22 nt, Human
ggcagcacugcagcuuguuggg

SEQ ID NO: 474063 - RNA, 22 nt, Human
uggcuuccugcacagugucugc

SEQ ID NO: 474064 - RNA, 22 nt, Human
cagagcuggcucugcauguaca

SEQ ID NO: 474065 - RNA, 22 nt, Human
ggagcugugcagugacuacaga

SEQ ID NO: 474066 - RNA, 22 nt, Human
uggcucaguagcagugugguca

SEQ ID NO: 474067 - RNA, 22 nt, Human
ggucucuguugccuccaucaag

SEQ ID NO: 474068 - RNA, 22 nt, Human
aggagucagauuguuugaaugu

SEQ ID NO: 474069 - RNA, 22 nt, Human
aggcaagaacagacaugggagu

SEQ ID NO: 474070 - RNA, 22 nt, Human
gaugcagaaaguagacaccauc

SEQ ID NO: 474071 - RNA, 22 nt, Human
uucuuacagcccuauuacuaaa

SEQ ID NO: 474072 - RNA, 22 nt, Human
aaaugcagauugucauucagga

SEQ ID NO: 474073 - RNA, 22 nt, Human
gugugggcugcagaggcacagc

SEQ ID NO: 474074 - RNA, 22 nt, Human
gcagcguggggcugagucagcu

SEQ ID NO: 474075 - RNA, 22 nt, Human
ucugaggccccugggcaggaug

SEQ ID NO: 474076 - RNA, 22 nt, Human
uugaagagugccuuccagacau

SEQ ID NO: 474077 - RNA, 22 nt, Human
cagggccauaucuugugcacca

SEQ ID NO: 474078 - RNA, 22 nt, Human
ccagcauggcaccugagaugag

SEQ ID NO: 474079 - RNA, 22 nt, Human
gcagacagccagacugcacugg

SEQ ID NO: 474080 - RNA, 22 nt, Human
gugggccucuugaggguggcua

SEQ ID NO: 474081 - RNA, 19 nt, Human
ggugaccaccuggucagug

SEQ ID NO: 474082 - RNA, 22 nt, Human
agcaauauuucagcuagcaggu

SEQ ID NO: 474083 - RNA, 22 nt, Human
ggagauuuauagcacacuucag

SEQ ID NO: 474084 - RNA, 22 nt, Human
agccaggcuaaaugagccauga

SEQ ID NO: 474085 - RNA, 22 nt, Human
uggagcaggugcucaggguaau

SEQ ID NO: 474086 - RNA, 22 nt, Human
acaaagucaaauugcagccgcc

SEQ ID NO: 474087 - RNA, 18 nt, Human
caugucugcgccacaagg

SEQ ID NO: 474088 - RNA, 21 nt, Human
aucaccagcagaagcugcaga

SEQ ID NO: 474089 - RNA, 22 nt, Human
aaggcugaauucaaggguaggc

SEQ ID NO: 474090 - RNA, 23 nt, Human
ggcugagacuacaggcgcuugcc

SEQ ID NO: 474091 - RNA, 20 nt, Human
agaggcuuccuugggaggag

SEQ ID NO: 474092 - RNA, 22 nt, Human
ucaggcaggcucagaggaaaac

SEQ ID NO: 474093 - RNA, 22 nt, Human
agugaaauaugcccauugcugu

SEQ ID NO: 474094 - RNA, 22 nt, Human
ucaggagcugcacugggcccac

SEQ ID NO: 474095 - RNA, 22 nt, Human
uucugucuucccacugaggagc

SEQ ID NO: 474096 - RNA, 22 nt, Human
cuguuuauuacacuggauagca

SEQ ID NO: 474097 - RNA, 22 nt, Human
uggcuggggccacaguuuuccu

SEQ ID NO: 474098 - RNA, 22 nt, Human
acaugauuuuuaaagagauaau

SEQ ID NO: 474099 - RNA, 22 nt, Human
aagcaauauacugauaugauua

SEQ ID NO: 474100 - RNA, 19 nt, Human
agcuguggggccuagcacc

SEQ ID NO: 474101 - RNA, 22 nt, Human
aacuagaaccacuuguauuucc

SEQ ID NO: 474102 - RNA, 22 nt, Human
gggcagcagcaggaggucucug

SEQ ID NO: 474103 - RNA, 22 nt, Human
ucacuuauugcucaucucaugc

SEQ ID NO: 474104 - RNA, 22 nt, Human
gaaaauguuagcuucauaguca

SEQ ID NO: 474105 - RNA, 22 nt, Human
cggcagcaaaggaagccagguc

SEQ ID NO: 474106 - RNA, 22 nt, Human
uggcugaguuccuggcacacgg

SEQ ID NO: 474107 - RNA, 20 nt, Human
gugcaauggcgcaaucucgg

SEQ ID NO: 474108 - RNA, 17 nt, Human
cucuccuuccucugagg

SEQ ID NO: 474109 - RNA, 22 nt, Human
gccuggagacaaggacaaaggg

SEQ ID NO: 474110 - RNA, 20 nt, Human
gcacugaaauucaauguuug

SEQ ID NO: 474111 - RNA, 22 nt, Human
gccugccuguuggcugaggugc

SEQ ID NO: 474112 - RNA, 22 nt, Human
acauuucuaucauccuguaaug

SEQ ID NO: 474113 - RNA, 22 nt, Human
gaagagcuauguccagggagca

SEQ ID NO: 474114 - RNA, 22 nt, Human
ugugcagcucuagagccaagcc

SEQ ID NO: 474115 - RNA, 22 nt, Human
ccagagaguaggaggcauuauu

SEQ ID NO: 474116 - RNA, 22 nt, Human
cugcugugugaccauggacagg

SEQ ID NO: 474117 - RNA, 22 nt, Human
uccaggcacgaggcccugugca

SEQ ID NO: 474118 - RNA, 22 nt, Human
ccagcuuuaucaagucugagcu

SEQ ID NO: 474119 - RNA, 22 nt, Human
guuugcauaucugugaaaugga

SEQ ID NO: 474120 - RNA, 22 nt, Human
cuuucauucuuagauauuagug

SEQ ID NO: 474121 - RNA, 22 nt, Human
acaacugucaguaaagaauauu

SEQ ID NO: 474122 - RNA, 21 nt, Human
ugggggagaauugguugcuuu

SEQ ID NO: 474123 - RNA, 22 nt, Human
cucacagguaccagcacccucc

SEQ ID NO: 474124 - RNA, 22 nt, Human
cugcucugcagcuuggacuccc

SEQ ID NO: 474125 - RNA, 22 nt, Human
cacauuuaauccuuuauaagua

SEQ ID NO: 474126 - RNA, 22 nt, Human
gugcugagcugcagaugcgcuc

SEQ ID NO: 474127 - RNA, 22 nt, Human
caauaauauccugugcuguuug

SEQ ID NO: 474128 - RNA, 22 nt, Human
agggccaggaucacagccaaga

SEQ ID NO: 474129 - RNA, 23 nt, Human
uucaagauacgguuuccaggcug

SEQ ID NO: 474130 - RNA, 22 nt, Human
augggaggcagcagagcccagc

SEQ ID NO: 474131 - RNA, 22 nt, Human
ucaccacugaacagaccuuugg

SEQ ID NO: 474132 - RNA, 22 nt, Human
gaggccuggcugucagucccca

SEQ ID NO: 474133 - RNA, 22 nt, Human
agcagggccugagugaccuaac

SEQ ID NO: 474134 - RNA, 20 nt, Human
uguucacaguaguugcugcu

SEQ ID NO: 474135 - RNA, 22 nt, Human
cucugcaugccuugcucagaca

SEQ ID NO: 474136 - RNA, 22 nt, Human
guggccugccagcagauggcgc

SEQ ID NO: 474137 - RNA, 22 nt, Human
ugcuggaggaguuuacuguggc

SEQ ID NO: 474138 - RNA, 22 nt, Human
ccagagcaauucucacagaacu

SEQ ID NO: 474139 - RNA, 22 nt, Human
caggcagaguuagugauuuagg

SEQ ID NO: 474140 - RNA, 22 nt, Human
gcucuugucaaaaauuaguuga

SEQ ID NO: 474141 - RNA, 22 nt, Human
uggaccugggguggccuccucu

SEQ ID NO: 474142 - RNA, 23 nt, Human
ccucccaggcugcgagucccgag

SEQ ID NO: 474143 - RNA, 22 nt, Human
aggcacuguggaagacaugguu

SEQ ID NO: 474144 - RNA, 22 nt, Human
uggaggcagucaaaugacugac

SEQ ID NO: 474145 - RNA, 22 nt, Human
agcaaaguagcugcuguucuua

SEQ ID NO: 474146 - RNA, 22 nt, Human
uaucuugagagacaacacagca

SEQ ID NO: 474147 - RNA, 22 nt, Human
uggcugaacuaaugugcuguuu

SEQ ID NO: 474148 - RNA, 18 nt, Human
cagcagagacauucaaaa

SEQ ID NO: 474149 - RNA, 22 nt, Human
ugaagugaccuggggcagugua

SEQ ID NO: 474150 - RNA, 22 nt, Human
agcucccagcuccuuugagaga

SEQ ID NO: 474151 - RNA, 22 nt, Human
agcugguuagcaaucuaaguga

SEQ ID NO: 474152 - RNA, 22 nt, Human
cauagagugauguaagguaugu

SEQ ID NO: 474153 - RNA, 22 nt, Human
ugcauuaucuuuaauguucuca

SEQ ID NO: 474154 - RNA, 21 nt, Human
cucacaggaugcaguguuacu

SEQ ID NO: 474155 - RNA, 22 nt, Human
uggaagaauaggauagaagaac

SEQ ID NO: 474156 - RNA, 19 nt, Human
ccagagcccgccagauggg

SEQ ID NO: 474157 - RNA, 22 nt, Human
auguacauuuuccuaauguuuu

SEQ ID NO: 474158 - RNA, 22 nt, Human
ccagagagagaggucaauggca

SEQ ID NO: 474159 - RNA, 22 nt, Human
acccacgaagaugagcggcaug

SEQ ID NO: 474160 - RNA, 22 nt, Human
gucaccagucccagcuccugaa

SEQ ID NO: 474161 - RNA, 22 nt, Human
cgggcagauugggaagguucau

SEQ ID NO: 474162 - RNA, 23 nt, Human
uggcucagggucucuuaugaagu

SEQ ID NO: 474163 - RNA, 22 nt, Human
cuccauugaacauccucucaga

SEQ ID NO: 474164 - RNA, 22 nt, Human
cuagucacucagcacugacaaa

SEQ ID NO: 474165 - RNA, 22 nt, Human
gcugucuucacuuccugguuuc

SEQ ID NO: 474166 - RNA, 22 nt, Human
acagccagaggugguccugggu

SEQ ID NO: 474167 - RNA, 22 nt, Human
aagucagcacuccaggaagcca

SEQ ID NO: 474168 - RNA, 22 nt, Human
acacaggagauauguaauggcu

SEQ ID NO: 474169 - RNA, 22 nt, Human
uccuucagggcugaccacaggc

SEQ ID NO: 474170 - RNA, 22 nt, Human
acacacacaagcagguugugga

SEQ ID NO: 474171 - RNA, 22 nt, Human
aggcaguuucugggacagcaua

SEQ ID NO: 474172 - RNA, 22 nt, Human
cauucacucagcgaugccagua

SEQ ID NO: 474173 - RNA, 22 nt, Human
ccuggcugaaccaaugaagugg

SEQ ID NO: 474174 - RNA, 19 nt, Human
uggaagaggaagggaaaua

SEQ ID NO: 474175 - RNA, 22 nt, Human
cuuauuuugcugaugacccagg

SEQ ID NO: 474176 - RNA, 22 nt, Human
cccugcagugugaccucaccua

SEQ ID NO: 474177 - RNA, 22 nt, Human
cagggagcuggcuggcgugagu

SEQ ID NO: 474178 - RNA, 22 nt, Human
ggucuuccgagaggccugugcu

SEQ ID NO: 474179 - RNA, 22 nt, Human
acagaggccgccucucucacgg

SEQ ID NO: 474180 - RNA, 19 nt, Human
uguuggugcggauguggag

SEQ ID NO: 474181 - RNA, 22 nt, Human
gaaauucaggacaaagacucuu

SEQ ID NO: 474182 - RNA, 22 nt, Human
uggucucugacucugaagaccc

SEQ ID NO: 474183 - RNA, 22 nt, Human
ugucugucugcaagccagaaag

SEQ ID NO: 474184 - RNA, 22 nt, Human
ucaguggauuggaugagaucug

SEQ ID NO: 474185 - RNA, 22 nt, Human
cagaaggcuuuguggaguagac

SEQ ID NO: 474186 - RNA, 22 nt, Human
uccuguggaagacaguguuggg

SEQ ID NO: 474187 - RNA, 22 nt, Human
ccuccaguacuccaguccagcg

SEQ ID NO: 474188 - RNA, 22 nt, Human
ggucauuguucuuuucugugau

SEQ ID NO: 474189 - RNA, 23 nt, Human
cuuuccuuucuuugacacccagc

SEQ ID NO: 474190 - RNA, 22 nt, Human
aggugucuuugcggcccgccgc

SEQ ID NO: 474191 - RNA, 18 nt, Human
gggcucacacaggucauc

SEQ ID NO: 474192 - RNA, 22 nt, Human
agaaugcauuuuguguagcuau

SEQ ID NO: 474193 - RNA, 22 nt, Human
cuggccacaacuagcccaggac

SEQ ID NO: 474194 - RNA, 22 nt, Human
aagcugccuagaguugaauguc

SEQ ID NO: 474195 - RNA, 22 nt, Human
ucucugagcccaauguagcaau

SEQ ID NO: 474196 - RNA, 22 nt, Human
cagucccaucucccagguggcu

SEQ ID NO: 474197 - RNA, 22 nt, Human
ugugucagagguagagauggca

SEQ ID NO: 474198 - RNA, 22 nt, Human
auguaguauuuggaaauguaaa

SEQ ID NO: 474199 - RNA, 22 nt, Human
acuguccauucacucauauuca

SEQ ID NO: 474200 - RNA, 22 nt, Human
cagucacauugcccugcauuua

SEQ ID NO: 474201 - RNA, 22 nt, Human
uacaggaggauuaucaaaggau

SEQ ID NO: 474202 - RNA, 22 nt, Human
ucugggcccuaaaccagcucua

SEQ ID NO: 474203 - RNA, 19 nt, Human
cucuuaaauugucucuugc

SEQ ID NO: 474204 - RNA, 22 nt, Human
agaagaaaugugaaggccacug

SEQ ID NO: 474205 - RNA, 22 nt, Human
ggaugcaggaguugaagaagga

SEQ ID NO: 474206 - RNA, 22 nt, Human
uuagcaucugcuguaagcuuau

SEQ ID NO: 474207 - RNA, 22 nt, Human
cccugccuucuuggccuuuaaa

SEQ ID NO: 474208 - RNA, 22 nt, Human
cuucccacuaguaucacagagc

SEQ ID NO: 474209 - RNA, 22 nt, Human
cucagaguccccaguggguuug

SEQ ID NO: 474210 - RNA, 22 nt, Human
ucugggcuugguuagggcuguu

SEQ ID NO: 474211 - RNA, 20 nt, Human
cuuguacaugauaaagauuu

SEQ ID NO: 474212 - RNA, 22 nt, Human
ggggccuguagagcuucaggga

SEQ ID NO: 474213 - RNA, 22 nt, Human
acauuaucccuggcacaacugc

SEQ ID NO: 474214 - RNA, 22 nt, Human
ggccucuguuuggagccaggau

SEQ ID NO: 474215 - RNA, 22 nt, Human
uaugcacauucacacaaaaaug

SEQ ID NO: 474216 - RNA, 22 nt, Human
agaaggaguguacaggucaugc

SEQ ID NO: 474217 - RNA, 22 nt, Human
gaggaaggcuaaggggcuuaga

SEQ ID NO: 474218 - RNA, 20 nt, Human
ugucauuguuucuaggaccu

SEQ ID NO: 474219 - RNA, 22 nt, Human
uuuccuucaucaucugagagcu

SEQ ID NO: 474220 - RNA, 22 nt, Human
uggcuucuuagaccaguggccu

SEQ ID NO: 474221 - RNA, 22 nt, Human
acagguggccccgagggagugg

SEQ ID NO: 474222 - RNA, 22 nt, Human
gcccaugcucucaggcgggccu

SEQ ID NO: 474223 - RNA, 22 nt, Human
ugcuuccagcucucuguaaggu

SEQ ID NO: 474224 - RNA, 22 nt, Human
aaguugaagcaugaaccaaggu

SEQ ID NO: 474225 - RNA, 22 nt, Human
gggucuggcaugcugagaugga

SEQ ID NO: 474226 - RNA, 22 nt, Human
uauucacagcugccgcacucag

SEQ ID NO: 474227 - RNA, 22 nt, Human
aggccugucuggggcucagcca

SEQ ID NO: 474228 - RNA, 22 nt, Human
uccugucugucuuuggucccuu

SEQ ID NO: 474229 - RNA, 22 nt, Human
uucuaacucuguuauguguuuc

SEQ ID NO: 474230 - RNA, 22 nt, Human
aggaccuggaucacagagaucu

SEQ ID NO: 474231 - RNA, 22 nt, Human
gaagucugacucuuuguaagcu

SEQ ID NO: 474232 - RNA, 22 nt, Human
cccaggcagugcugaucccuca

SEQ ID NO: 474233 - RNA, 22 nt, Human
uggcucuguuuguuaacuagac

SEQ ID NO: 474234 - RNA, 22 nt, Human
ugugcaguuucuauguugucca

SEQ ID NO: 474235 - RNA, 17 nt, Human
ccucccacaccgcccug

SEQ ID NO: 474236 - RNA, 22 nt, Human
caguugaugggacucauguggg

SEQ ID NO: 474237 - RNA, 22 nt, Human
cagauuuaccuaacuccaaguu

SEQ ID NO: 474238 - RNA, 21 nt, Human
uggagcugccacuuguccucc

SEQ ID NO: 474239 - RNA, 22 nt, Human
auaagagcuagucuuuuccuug

SEQ ID NO: 474240 - RNA, 22 nt, Human
gauucugagcugguguuuuacg

SEQ ID NO: 474241 - RNA, 22 nt, Human
cugagucucccggcaguggagg

SEQ ID NO: 474242 - RNA, 22 nt, Human
auugaaagcauggauuuggauu

SEQ ID NO: 474243 - RNA, 22 nt, Human
gcauuccuacaggcugcuauga

SEQ ID NO: 474244 - RNA, 22 nt, Human
cauucugcauuuggaaggggca

SEQ ID NO: 474245 - RNA, 22 nt, Human
gggcugagcacauacugacagc

SEQ ID NO: 474246 - RNA, 21 nt, Human
uggcagggguaguaguacagc

SEQ ID NO: 474247 - RNA, 22 nt, Human
aagggcagcugacagaugcuua

SEQ ID NO: 474248 - RNA, 22 nt, Human
gcucugcugucuucuugcaggc

SEQ ID NO: 474249 - RNA, 22 nt, Human
ccugcuuaacauugccaugaca

SEQ ID NO: 474250 - RNA, 22 nt, Human
aaguucaaggugauaguggcag

SEQ ID NO: 474251 - RNA, 22 nt, Human
uuccuuguuuguagcucuggga

SEQ ID NO: 474252 - RNA, 23 nt, Human
uggacgccgacuuuggaggcgcu

SEQ ID NO: 474253 - RNA, 17 nt, Human
gcuggcugacccaugcc

SEQ ID NO: 474254 - RNA, 22 nt, Human
ggccugucucacccccgggugc

SEQ ID NO: 474255 - RNA, 22 nt, Human
uggagcuggaauuugagcugga

SEQ ID NO: 474256 - RNA, 22 nt, Human
ucuauacaugugcacacacauc

SEQ ID NO: 474257 - RNA, 22 nt, Human
acagggcagguggcuacugguc

SEQ ID NO: 474258 - RNA, 22 nt, Human
ugcuggccaauggcagaggcgg

SEQ ID NO: 474259 - RNA, 22 nt, Human
uaaagguaugucuuaaucaaac

SEQ ID NO: 474260 - RNA, 22 nt, Human
uuugaaaggugucgagaugugu

SEQ ID NO: 474261 - RNA, 17 nt, Human
gccaaaggguuccaauc

SEQ ID NO: 474262 - RNA, 19 nt, Human
cucucacucgccacauccu

SEQ ID NO: 474263 - RNA, 22 nt, Human
ucaguuuugauuccugguucuc

SEQ ID NO: 474264 - RNA, 22 nt, Human
ggccucucuccagucagugcag

SEQ ID NO: 474265 - RNA, 22 nt, Human
guggaggguuugcaaugugcag

SEQ ID NO: 474266 - RNA, 22 nt, Human
agaagccaauccuugucucucu

SEQ ID NO: 474267 - RNA, 19 nt, Human
gccugggaugggcagaacu

SEQ ID NO: 474268 - RNA, 22 nt, Human
cagagcuggggacuguuggaug

SEQ ID NO: 474269 - RNA, 22 nt, Human
aaugauggauuuagacaagcug

SEQ ID NO: 474270 - RNA, 22 nt, Human
uuuuauucucaagacaauggga

SEQ ID NO: 474271 - RNA, 22 nt, Human
cugcucugagaggcucuuccua

SEQ ID NO: 474272 - RNA, 19 nt, Human
gccugcagaaaaggcaggg

SEQ ID NO: 474273 - RNA, 16 nt, Human
uguuagcugugcauua

SEQ ID NO: 474274 - RNA, 22 nt, Human
auguaguguagagauuagucuc

SEQ ID NO: 474275 - RNA, 22 nt, Human
cccagcagauggcuaugugcua

SEQ ID NO: 474276 - RNA, 22 nt, Human
ucaaugauuagaguuuagugug

SEQ ID NO: 474277 - RNA, 22 nt, Human
gaagaacaccugcugcccagug

SEQ ID NO: 474278 - RNA, 22 nt, Human
cccugcagagccagcccugacc

SEQ ID NO: 474279 - RNA, 22 nt, Human
aggacccagaggcagaggacgu

SEQ ID NO: 474280 - RNA, 19 nt, Human
agcagagcccugaagaucc

SEQ ID NO: 474281 - RNA, 22 nt, Human
agaguguuucagucuuccuaga

SEQ ID NO: 474282 - RNA, 22 nt, Human
uggagugaaguaaagaggacaa

SEQ ID NO: 474283 - RNA, 22 nt, Human
guaagagcacugucuccugcug

SEQ ID NO: 474284 - RNA, 22 nt, Human
cagcaucaccgccauuucugau

SEQ ID NO: 474285 - RNA, 23 nt, Human
auuuccuacuauaaaagagguaa

SEQ ID NO: 474286 - RNA, 22 nt, Human
uacuuuggauccuuacaauagc

SEQ ID NO: 474287 - RNA, 22 nt, Human
gagagugaggccugggaaucua

SEQ ID NO: 474288 - RNA, 22 nt, Human
ugcucuguauucuauggcaguu

SEQ ID NO: 474289 - RNA, 20 nt, Human
agacccuguguccuguggcc

SEQ ID NO: 474290 - RNA, 22 nt, Human
cugaggcacagugaacuucucc

SEQ ID NO: 474291 - RNA, 22 nt, Human
cacugcuuuuuuggcuauguac

SEQ ID NO: 474292 - RNA, 22 nt, Human
ugaaacaaaccaguaauuuugu

SEQ ID NO: 474293 - RNA, 22 nt, Human
gagguagccacagauagagacu

SEQ ID NO: 474294 - RNA, 22 nt, Human
ugaaaucugucccacuuuagcu

SEQ ID NO: 474295 - RNA, 22 nt, Human
ggaggggccggcugccugccac

SEQ ID NO: 474296 - RNA, 22 nt, Human
cauuuauucucagauccuuguc

SEQ ID NO: 474297 - RNA, 22 nt, Human
ggaccugcucucccaguucucu

SEQ ID NO: 474298 - RNA, 23 nt, Human
gggaccagcuagggcugugaccu

SEQ ID NO: 474299 - RNA, 22 nt, Human
gcaggggaguccacucuaugca

SEQ ID NO: 474300 - RNA, 22 nt, Human
auagauacauuagguaacuugu

SEQ ID NO: 474301 - RNA, 22 nt, Human
cugcucuggcguacucggcauc

SEQ ID NO: 474302 - RNA, 22 nt, Human
cuggggcucacuuuggucaggc

SEQ ID NO: 474303 - RNA, 22 nt, Human
ggaggcaggaaagacagguuca

SEQ ID NO: 474304 - RNA, 22 nt, Human
gccuccuggccuuugcuccuca

SEQ ID NO: 474305 - RNA, 18 nt, Human
cugugcagcaaacugagc

SEQ ID NO: 474306 - RNA, 22 nt, Human
cacaguggauugggugaugccc

SEQ ID NO: 474307 - RNA, 22 nt, Human
agcagaagaaagccacaugacu

SEQ ID NO: 474308 - RNA, 22 nt, Human
gaggcugguucugaaguacugu

SEQ ID NO: 474309 - RNA, 22 nt, Human
cuggcaggagcauucacagagg

SEQ ID NO: 474310 - RNA, 22 nt, Human
ggcucccaggagggccuggagg

SEQ ID NO: 474311 - RNA, 22 nt, Human
aucucagacauguuguccauga

SEQ ID NO: 474312 - RNA, 22 nt, Human
ucaaaggcugcuugucuucugg

SEQ ID NO: 474313 - RNA, 22 nt, Human
ccuccaggauaagucagggccu

SEQ ID NO: 474314 - RNA, 22 nt, Human
caggacagagcccagacugugu

SEQ ID NO: 474315 - RNA, 22 nt, Human
ccuggagcacauggcaggaggc

SEQ ID NO: 474316 - RNA, 22 nt, Human
aaauguucccaauaugaagcug

SEQ ID NO: 474317 - RNA, 22 nt, Human
ugucccaggcugaaguacagug

SEQ ID NO: 474318 - RNA, 22 nt, Human
aaacaguauuaucaauauauuu

SEQ ID NO: 474319 - RNA, 23 nt, Human
ucagcugcuuccuccugccugcc

SEQ ID NO: 474320 - RNA, 22 nt, Human
uuuauuauguacaggcacuaua

SEQ ID NO: 474321 - RNA, 22 nt, Human
ucaaaugcaggucuggucuugg

SEQ ID NO: 474322 - RNA, 22 nt, Human
cugcagggcccgccugagcccu

SEQ ID NO: 474323 - RNA, 22 nt, Human
cuggagccuagguugaccuggg

SEQ ID NO: 474324 - RNA, 22 nt, Human
ucagagguaagggcugagagga

SEQ ID NO: 474325 - RNA, 22 nt, Human
agcugguucauucauucauggu

SEQ ID NO: 474326 - RNA, 22 nt, Human
ugucauguguucuuaaauacau

SEQ ID NO: 474327 - RNA, 22 nt, Human
ucagggcaagucucagaagguu

SEQ ID NO: 474328 - RNA, 22 nt, Human
cagaagcaaaugccuugcugag

SEQ ID NO: 474329 - RNA, 22 nt, Human
cucacaggagaaagucaugguc

SEQ ID NO: 474330 - RNA, 22 nt, Human
uggaggcaguuuaagucugaga

SEQ ID NO: 474331 - RNA, 22 nt, Human
auagaaauggcagcuggugcua

SEQ ID NO: 474332 - RNA, 22 nt, Human
uacuuucuguccuucuguuaaa

SEQ ID NO: 474333 - RNA, 22 nt, Human
gguggccucugcaggccucgac

SEQ ID NO: 474334 - RNA, 22 nt, Human
uggcucagcauucacuggucuu

SEQ ID NO: 474335 - RNA, 22 nt, Human
cucagaaucugccaaguucagg

SEQ ID NO: 474336 - RNA, 19 nt, Human
gcuccugggccucacucau

SEQ ID NO: 474337 - RNA, 22 nt, Human
auuacaguaacagcuacaaugc

SEQ ID NO: 474338 - RNA, 22 nt, Human
ggcagcucugaugaugcucugg

SEQ ID NO: 474339 - RNA, 22 nt, Human
uuucugaagggcagcagacucu

SEQ ID NO: 474340 - RNA, 22 nt, Human
ggagcuguugcgcaugcgcucg

SEQ ID NO: 474341 - RNA, 22 nt, Human
aagcugccagcugagcugaggc

SEQ ID NO: 474342 - RNA, 22 nt, Human
cucgcaggacagugcuaggacu

SEQ ID NO: 474343 - RNA, 22 nt, Human
agggucaguucugugagguguu

SEQ ID NO: 474344 - RNA, 22 nt, Human
ucuccuuuaagauuuccucagg

SEQ ID NO: 474345 - RNA, 22 nt, Human
auguaucaauuaucugucugca

SEQ ID NO: 474346 - RNA, 19 nt, Human
uucaggauugacccuacug

SEQ ID NO: 474347 - RNA, 22 nt, Human
cccagccuggugcacugugggg

SEQ ID NO: 474348 - RNA, 22 nt, Human
gggucccaggaaggagcagugu

SEQ ID NO: 474349 - RNA, 18 nt, Human
gcagcuuuugauucaccc

SEQ ID NO: 474350 - RNA, 22 nt, Human
agggaaaguaagcauuucauua

SEQ ID NO: 474351 - RNA, 22 nt, Human
aaugggagagaacacaaagucc

SEQ ID NO: 474352 - RNA, 17 nt, Human
uccuucagugccucugc

SEQ ID NO: 474353 - RNA, 22 nt, Human
ucccaaagcuacucuucugacu

SEQ ID NO: 474354 - RNA, 22 nt, Human
auugaaaauauaauucuaggag

SEQ ID NO: 474355 - RNA, 22 nt, Human
agaggcccucucucuccugaug

SEQ ID NO: 474356 - RNA, 22 nt, Human
agccauggcgccacuagaggga

SEQ ID NO: 474357 - RNA, 22 nt, Human
uucuuuaaaauagugagaaaga

SEQ ID NO: 474358 - RNA, 19 nt, Human
cuugguuaugguaugaugc

SEQ ID NO: 474359 - RNA, 22 nt, Human
aaaggugacacucugccagcug

SEQ ID NO: 474360 - RNA, 22 nt, Human
uagugcacacgcauguagcagu

SEQ ID NO: 474361 - RNA, 22 nt, Human
ucccagccacagguguagcccu

SEQ ID NO: 474362 - RNA, 22 nt, Human
aagugacaaaaggguauccaaa

SEQ ID NO: 474363 - RNA, 22 nt, Human
uucagcagugcagacacccagu

SEQ ID NO: 474364 - RNA, 20 nt, Human
ugaaaggugggaauuguggg

SEQ ID NO: 474365 - RNA, 22 nt, Human
cuggcucccagcuuucagggag

SEQ ID NO: 474366 - RNA, 22 nt, Human
uggaccugcguaggugcugggc

SEQ ID NO: 474367 - RNA, 22 nt, Human
ugaaaaaacaaguuggcccauu

SEQ ID NO: 474368 - RNA, 22 nt, Human
cugagcgcaugguugcugggga

SEQ ID NO: 474369 - RNA, 22 nt, Human
ccaccagcagugugcaaggauu

SEQ ID NO: 474370 - RNA, 21 nt, Human
cacaggugggucagugaggcc

SEQ ID NO: 474371 - RNA, 22 nt, Human
gggcacagagggucuugaagaa

SEQ ID NO: 474372 - RNA, 22 nt, Human
uccagggauguccuguagcacu

SEQ ID NO: 474373 - RNA, 22 nt, Human
cagggcuggcuguggcaaucuc

SEQ ID NO: 474374 - RNA, 22 nt, Human
cagcuguguagaugcaggguca

SEQ ID NO: 474375 - RNA, 22 nt, Human
auauuucuugagcaccugguau

SEQ ID NO: 474376 - RNA, 22 nt, Human
gagggcugcuggaaaaaugcag

SEQ ID NO: 474377 - RNA, 22 nt, Human
uuuguuuagaugguaaaucagu

SEQ ID NO: 474378 - RNA, 22 nt, Human
cagugaggugcccagccugccc

SEQ ID NO: 474379 - RNA, 22 nt, Human
uucaggaucaaguugccaguag

SEQ ID NO: 474380 - RNA, 22 nt, Human
uacaaaguauauuucuagcugu

SEQ ID NO: 474381 - RNA, 22 nt, Human
ucuccucucuuaccugguacaa

SEQ ID NO: 474382 - RNA, 22 nt, Human
auuugucuucaguagguucuuc

SEQ ID NO: 474383 - RNA, 22 nt, Human
uuggccuuguuaaggaggcccu

SEQ ID NO: 474384 - RNA, 22 nt, Human
uuuaaauucugucugccgcuua

SEQ ID NO: 474385 - RNA, 22 nt, Human
cacugaagcuuucauucucuug

SEQ ID NO: 474386 - RNA, 22 nt, Human
gagagggcugccuggugugagg

SEQ ID NO: 474387 - RNA, 22 nt, Human
uuagaaagcuuuccauagucaa

SEQ ID NO: 474388 - RNA, 22 nt, Human
gagcaggccagcaauggaaggg

SEQ ID NO: 474389 - RNA, 22 nt, Human
uuguugucauuguagaggauuu

SEQ ID NO: 474390 - RNA, 22 nt, Human
cagcaagauuuuuaaagcaagg

SEQ ID NO: 474391 - RNA, 22 nt, Human
gacccagcuuaagucacauguu

SEQ ID NO: 474392 - RNA, 22 nt, Human
uccaggaggugaggggaccaaa

SEQ ID NO: 474393 - RNA, 20 nt, Human
ucccaaggaugccugggugu

SEQ ID NO: 474394 - RNA, 22 nt, Human
cugguccuugacgcgugggagg

SEQ ID NO: 474395 - RNA, 22 nt, Human
ugaguccauguggaggggaggu

SEQ ID NO: 474396 - RNA, 21 nt, Human
ggacaccagucacacuggauu

SEQ ID NO: 474397 - RNA, 22 nt, Human
aaauguguuucuuugugaaugg

SEQ ID NO: 474398 - RNA, 22 nt, Human
uaugcauacaaugagauauucc

SEQ ID NO: 474399 - RNA, 22 nt, Human
acagagagguaaaauauauagu

SEQ ID NO: 474400 - RNA, 22 nt, Human
uacaggaagcacucaagaaaug

SEQ ID NO: 474401 - RNA, 22 nt, Human
auaaggcagaaaugauucuagu

SEQ ID NO: 474402 - RNA, 22 nt, Human
uccuggccgccgcguggggccg

SEQ ID NO: 474403 - RNA, 22 nt, Human
cauugcucaggcccagcaggaa

SEQ ID NO: 474404 - RNA, 22 nt, Human
gaugguuugguaaaaguauguu

SEQ ID NO: 474405 - RNA, 22 nt, Human
gaugauggacaaagcauuggug

SEQ ID NO: 474406 - RNA, 22 nt, Human
cagcuuccaucuccacugcccu

SEQ ID NO: 474407 - RNA, 22 nt, Human
aggaggccccuccuggguugcu

SEQ ID NO: 474408 - RNA, 22 nt, Human
agccuggcuguaaccucauggu

SEQ ID NO: 474409 - RNA, 22 nt, Human
uugcagcagggugaauucacuc

SEQ ID NO: 474410 - RNA, 22 nt, Human
ggagggagucagcugauuagaa

SEQ ID NO: 474411 - RNA, 22 nt, Human
cuacagaaaaucagccacaggc

SEQ ID NO: 474412 - RNA, 22 nt, Human
uucauuaguucugaagaugucu

SEQ ID NO: 474413 - RNA, 22 nt, Human
cagugucuuauuuguagcucag

SEQ ID NO: 474414 - RNA, 22 nt, Human
cuguuuaucccuuuggucagca

SEQ ID NO: 474415 - RNA, 22 nt, Human
cucuguccuaugcuugauagaa

SEQ ID NO: 474416 - RNA, 22 nt, Human
ugcagggcccuugggguugaac

SEQ ID NO: 474417 - RNA, 22 nt, Human
uucaggaugcagagguuguagu

SEQ ID NO: 474418 - RNA, 22 nt, Human
caguccaggccuggaggagcca

SEQ ID NO: 474419 - RNA, 22 nt, Human
uggcuggggccugaauccugca

SEQ ID NO: 474420 - RNA, 22 nt, Human
uuagauaauguagagauaugag

SEQ ID NO: 474421 - RNA, 22 nt, Human
acugaaagauaaaucaguuagc

SEQ ID NO: 474422 - RNA, 22 nt, Human
auuauguauuugguauaguuug

SEQ ID NO: 474423 - RNA, 22 nt, Human
agguggcucugacagcucuggu

SEQ ID NO: 474424 - RNA, 22 nt, Human
caggggcuuuuccucuauaagg

SEQ ID NO: 474425 - RNA, 23 nt, Human
ccugggcauuggcugcagcuucu

SEQ ID NO: 474426 - RNA, 22 nt, Human
ucucaggaucuaauacauggua

SEQ ID NO: 474427 - RNA, 22 nt, Human
aaaaaccuuucccauacuaaga

SEQ ID NO: 474428 - RNA, 22 nt, Human
ccuggccucagccuagggcuga

SEQ ID NO: 474429 - RNA, 22 nt, Human
ggcuucuccccuuugagucuuc

SEQ ID NO: 474430 - RNA, 18 nt, Human
gccugccuagagcuugcc

SEQ ID NO: 474431 - RNA, 22 nt, Human
accauguguuuuacacauggua

SEQ ID NO: 474432 - RNA, 22 nt, Human
aucuacagcugucugcacagua

SEQ ID NO: 474433 - RNA, 22 nt, Human
gggccuggggacaccaccauga

SEQ ID NO: 474434 - RNA, 22 nt, Human
ucccacugcuuugcucugcuca

SEQ ID NO: 474435 - RNA, 22 nt, Human
ggcucaguguuuguggaacaua

SEQ ID NO: 474436 - RNA, 22 nt, Human
cugguccuccuugccuucagau

SEQ ID NO: 474437 - RNA, 16 nt, Human
cagaguguaaacagga

SEQ ID NO: 474438 - RNA, 18 nt, Human
uggcucagauggcuuuaa

SEQ ID NO: 474439 - RNA, 22 nt, Human
ucauuacaguguuuauaugucu

SEQ ID NO: 474440 - RNA, 22 nt, Human
accaggcaaaaccacaggagca

SEQ ID NO: 474441 - RNA, 19 nt, Human
uuuacucuccaaggugagu

SEQ ID NO: 474442 - RNA, 22 nt, Human
agugcaugccuuccuguggaug

SEQ ID NO: 474443 - RNA, 22 nt, Human
agaggcugagaaacccucuucu

SEQ ID NO: 474444 - RNA, 23 nt, Human
aggaacugaggccuagggaggua

SEQ ID NO: 474445 - RNA, 22 nt, Human
gcagcugggacacugaggccag

SEQ ID NO: 474446 - RNA, 22 nt, Human
aggagaguaccauugggccgca

SEQ ID NO: 474447 - RNA, 22 nt, Human
gggagggaggugcugguucacg

SEQ ID NO: 474448 - RNA, 21 nt, Human
uuugaaagcccuauguuuuca

SEQ ID NO: 474449 - RNA, 22 nt, Human
ugcagccaggaaauauuugcug

SEQ ID NO: 474450 - RNA, 22 nt, Human
gagcacagcuggagguagcauu

SEQ ID NO: 474451 - RNA, 23 nt, Human
agcuggguggccugcgugaagcu

SEQ ID NO: 474452 - RNA, 22 nt, Human
uccagcuuauagguagauuuaa

SEQ ID NO: 474453 - RNA, 22 nt, Human
agacaaguucugugggucaccu

SEQ ID NO: 474454 - RNA, 22 nt, Human
cagaagcauugacuccuugcuc

SEQ ID NO: 474455 - RNA, 22 nt, Human
cucaguuucugacauuaaaauc

SEQ ID NO: 474456 - RNA, 22 nt, Human
ucauugcaguagggagagaccc

SEQ ID NO: 474457 - RNA, 22 nt, Human
auaauauaauccuacuucccau

SEQ ID NO: 474458 - RNA, 22 nt, Human
gcaucuaaauaaacgugggagu

SEQ ID NO: 474459 - RNA, 22 nt, Human
uccuucagucuucugagccaua

SEQ ID NO: 474460 - RNA, 22 nt, Human
uccuggccucacaguccugggu

SEQ ID NO: 474461 - RNA, 22 nt, Human
uaacacugauuuguucucaggg

SEQ ID NO: 474462 - RNA, 22 nt, Human
agggccagggaagcuguauuuu

SEQ ID NO: 474463 - RNA, 22 nt, Human
cagcugggagcuccauuagaua

SEQ ID NO: 474464 - RNA, 22 nt, Human
cuggaaggcucugcugccuguc

SEQ ID NO: 474465 - RNA, 22 nt, Human
uccuggagcuuccuucauggua

SEQ ID NO: 474466 - RNA, 22 nt, Human
uggccugggugcugcugacauc

SEQ ID NO: 474467 - RNA, 20 nt, Human
agccagaagaaggcuggaga

SEQ ID NO: 474468 - RNA, 22 nt, Human
ugcuggccaacaaggcuccaag

SEQ ID NO: 474469 - RNA, 22 nt, Human
guuugcauaaaguggaugcagg

SEQ ID NO: 474470 - RNA, 20 nt, Human
ggccuuggccucuuugcagc

SEQ ID NO: 474471 - RNA, 21 nt, Human
gcaggcuggucaaaccucagu

SEQ ID NO: 474472 - RNA, 23 nt, Human
uaagaacagacaagcauuuacau

SEQ ID NO: 474473 - RNA, 22 nt, Human
accuggcaugaagcaugccuua

SEQ ID NO: 474474 - RNA, 22 nt, Human
gcccuuccaacccagagggcaa

SEQ ID NO: 474475 - RNA, 22 nt, Human
aguggcaggcagaagcuucuca

SEQ ID NO: 474476 - RNA, 18 nt, Human
ccgggcuuuggugacaca

SEQ ID NO: 474477 - RNA, 22 nt, Human
gcugugcuggaaggggaccugc

SEQ ID NO: 474478 - RNA, 22 nt, Human
cacagcuuguuuagugacucac

SEQ ID NO: 474479 - RNA, 22 nt, Human
ucucuucugaaaccugucuuua

SEQ ID NO: 474480 - RNA, 22 nt, Human
ccagccugguucagaauuggcu

SEQ ID NO: 474481 - RNA, 22 nt, Human
ccucugcucccuggugucugag

SEQ ID NO: 474482 - RNA, 22 nt, Human
gaacccaggcuuuugaggcugu

SEQ ID NO: 474483 - RNA, 22 nt, Human
gcugccuguccugaggaguccg

SEQ ID NO: 474484 - RNA, 22 nt, Human
cccuggagggcagacagaugcc

SEQ ID NO: 474485 - RNA, 20 nt, Human
cccugagacaaaggaggggc

SEQ ID NO: 474486 - RNA, 22 nt, Human
guagaagugaugucauguuaua

SEQ ID NO: 474487 - RNA, 20 nt, Human
cucaggauugucuagccccu

SEQ ID NO: 474488 - RNA, 22 nt, Human
gcuguacaaauuccacaagaga

SEQ ID NO: 474489 - RNA, 22 nt, Human
gggccuggcaugcagccccguu

SEQ ID NO: 474490 - RNA, 22 nt, Human
cccaggcagccugcagggaagg

SEQ ID NO: 474491 - RNA, 22 nt, Human
uuggaggcaaugggaaggaggc

SEQ ID NO: 474492 - RNA, 22 nt, Human
uggaggcauaggccugggcccu

SEQ ID NO: 474493 - RNA, 22 nt, Human
aggccugagguuccugugcuca

SEQ ID NO: 474494 - RNA, 22 nt, Human
uagcagcuuaaguaauuagaau

SEQ ID NO: 474495 - RNA, 20 nt, Human
cguaaggcaagugcugcauc

SEQ ID NO: 474496 - RNA, 22 nt, Human
aggaugggccugggauaugcuu

SEQ ID NO: 474497 - RNA, 22 nt, Human
cuuacaaaggagaggagauagg

SEQ ID NO: 474498 - RNA, 22 nt, Human
uugcaaaagccgaggcacucca

SEQ ID NO: 474499 - RNA, 22 nt, Human
gacagcagacagaacuaccugc

SEQ ID NO: 474500 - RNA, 22 nt, Human
gugauuucuaaucaucugaaug

SEQ ID NO: 474501 - RNA, 22 nt, Human
gaagagcuuagacagaaucaaa

SEQ ID NO: 474502 - RNA, 22 nt, Human
uguguacaggccuugcuagacu

SEQ ID NO: 474503 - RNA, 22 nt, Human
acagagcauauaaagugcuuug

SEQ ID NO: 474504 - RNA, 21 nt, Human
agcagcagaucuggugagggc

SEQ ID NO: 474505 - RNA, 22 nt, Human
aggcuccuaucgcuuucagcaa

SEQ ID NO: 474506 - RNA, 18 nt, Human
gcaggugccacugcuguu

SEQ ID NO: 474507 - RNA, 22 nt, Human
ugaaagguguccaauauuucuc

SEQ ID NO: 474508 - RNA, 22 nt, Human
ucugggcucuuaguguacccuc

SEQ ID NO: 474509 - RNA, 22 nt, Human
uuagccaugugggaaaaacagc

SEQ ID NO: 474510 - RNA, 20 nt, Human
gcagagcuguucugugggga

SEQ ID NO: 474511 - RNA, 22 nt, Human
ugaggcuccagccaggccagca

SEQ ID NO: 474512 - RNA, 22 nt, Human
uuauuuaaaagugguaagauuc

SEQ ID NO: 474513 - RNA, 22 nt, Human
auaugugugccauuucagcagu

SEQ ID NO: 474514 - RNA, 22 nt, Human
auugacaagcaguaugucuuag

SEQ ID NO: 474515 - RNA, 22 nt, Human
guuauuuuaacuucucaguaau

SEQ ID NO: 474516 - RNA, 22 nt, Human
gugucaugggguuuguuauaca

SEQ ID NO: 474517 - RNA, 22 nt, Human
uccaggcagggcagccaucaag

SEQ ID NO: 474518 - RNA, 23 nt, Human
gagguacagcaccagugaauagg

SEQ ID NO: 474519 - RNA, 22 nt, Human
aaggggaaaaaguguuaggagu

SEQ ID NO: 474520 - RNA, 22 nt, Human
aggugcuggagucugggcagga

SEQ ID NO: 474521 - RNA, 22 nt, Human
cccagcaggcauguugggagga

SEQ ID NO: 474522 - RNA, 23 nt, Human
gugugccaagcacugugccagga

SEQ ID NO: 474523 - RNA, 22 nt, Human
cagcucucacacccuccuccca

SEQ ID NO: 474524 - RNA, 21 nt, Human
uggcagaguugaguaguuaug

SEQ ID NO: 474525 - RNA, 22 nt, Human
uagggcucagagaaguggggcc

SEQ ID NO: 474526 - RNA, 22 nt, Human
caguacuuugaagauauuuuag

SEQ ID NO: 474527 - RNA, 22 nt, Human
agcugggaugauaaccucaguc

SEQ ID NO: 474528 - RNA, 22 nt, Human
augcugaagagugcacaggcua

SEQ ID NO: 474529 - RNA, 22 nt, Human
guacauuucucuuguucuuauu

SEQ ID NO: 474530 - RNA, 22 nt, Human
ccucugggagacugcuacugag

SEQ ID NO: 474531 - RNA, 22 nt, Human
cuuccugcauugugccagaguu

SEQ ID NO: 474532 - RNA, 22 nt, Human
aguggcagagguugacugcagu

SEQ ID NO: 474533 - RNA, 22 nt, Human
ucacacgugagguucuauccug

SEQ ID NO: 474534 - RNA, 22 nt, Human
ucauugucuugauaugauuguc

SEQ ID NO: 474535 - RNA, 22 nt, Human
gcagugacagggcugcugccuu

SEQ ID NO: 474536 - RNA, 22 nt, Human
auggacaggaacucccuuggca

SEQ ID NO: 474537 - RNA, 22 nt, Human
ugcacccucaucagucaaaugg

SEQ ID NO: 474538 - RNA, 22 nt, Human
ccugucugcagauaucucaggu

SEQ ID NO: 474539 - RNA, 22 nt, Human
gccugccuuuguaugacccuga

SEQ ID NO: 474540 - RNA, 22 nt, Human
aacaggcaaacugugggauccc

SEQ ID NO: 474541 - RNA, 22 nt, Human
cuggccuagcucucugcuugaa

SEQ ID NO: 474542 - RNA, 22 nt, Human
ggagccagagggaugcaguuga

SEQ ID NO: 474543 - RNA, 22 nt, Human
aaauuaguacauugcaaagucc

SEQ ID NO: 474544 - RNA, 21 nt, Human
gcagccagacgggauucaguu

SEQ ID NO: 474545 - RNA, 22 nt, Human
cagcagcaguggcugcagaaca

SEQ ID NO: 474546 - RNA, 22 nt, Human
ugcuggcucaguuugcagacuc

SEQ ID NO: 474547 - RNA, 22 nt, Human
aggauccuuuuucugcuguuug

SEQ ID NO: 474548 - RNA, 22 nt, Human
ccugcagguugcagaggcggaa

SEQ ID NO: 474549 - RNA, 22 nt, Human
agccacgucccugucaggguca

SEQ ID NO: 474550 - RNA, 22 nt, Human
uagcagcuuccagagagggcag

SEQ ID NO: 474551 - RNA, 22 nt, Human
ugaggcagaaaauagcaguuca

SEQ ID NO: 474552 - RNA, 22 nt, Human
acaaugcaccagcaucuucacc

SEQ ID NO: 474553 - RNA, 22 nt, Human
accagguggccccagcgugguu

SEQ ID NO: 474554 - RNA, 22 nt, Human
ugugccagccucuggcuguguc

SEQ ID NO: 474555 - RNA, 22 nt, Human
gauccuugcacuugacuuggca

SEQ ID NO: 474556 - RNA, 22 nt, Human
ucaggcagaauuaucaaaagau

SEQ ID NO: 474557 - RNA, 22 nt, Human
cuggcucacuagcccugcccug

SEQ ID NO: 474558 - RNA, 20 nt, Human
ucucagcauaagaacccuuc

SEQ ID NO: 474559 - RNA, 22 nt, Human
gggggcuguccugugcauugua

SEQ ID NO: 474560 - RNA, 22 nt, Human
auuagggcuggaugcaaggaaa

SEQ ID NO: 474561 - RNA, 21 nt, Human
uggcacugcuuagcagguucc

SEQ ID NO: 474562 - RNA, 22 nt, Human
gagccuguguuuccuguagcca

SEQ ID NO: 474563 - RNA, 22 nt, Human
auuccaaagacagaagcagcug

SEQ ID NO: 474564 - RNA, 20 nt, Human
ugugcccaauguccagguuc

SEQ ID NO: 474565 - RNA, 22 nt, Human
aggcaggcaaccaccugggaag

SEQ ID NO: 474566 - RNA, 22 nt, Human
aaggccugaacaugaggagaug

SEQ ID NO: 474567 - RNA, 22 nt, Human
gagcagcucgagaaggaagcag

SEQ ID NO: 474568 - RNA, 22 nt, Human
gcuccagaugaaaggccagagg

SEQ ID NO: 474569 - RNA, 22 nt, Human
cauggcccucuucuggagcaau

SEQ ID NO: 474570 - RNA, 22 nt, Human
ugaggcagguaagcaaguuuug

SEQ ID NO: 474571 - RNA, 23 nt, Human
aagaauaaaugacauuaaaggug

SEQ ID NO: 474572 - RNA, 22 nt, Human
gcugcugcgcuugucuacuguu

SEQ ID NO: 474573 - RNA, 22 nt, Human
uggcugaggagggucuucuggu

SEQ ID NO: 474574 - RNA, 22 nt, Human
aauggccagcugggagaguuga

SEQ ID NO: 474575 - RNA, 22 nt, Human
cuuugcauacaauuuuuagaaa

SEQ ID NO: 474576 - RNA, 22 nt, Human
agccugccuugggcugcuugag

SEQ ID NO: 474577 - RNA, 22 nt, Human
ucucuccuuaucauuguguuua

SEQ ID NO: 474578 - RNA, 22 nt, Human
ucuggcuccacuuucuucauuu

SEQ ID NO: 474579 - RNA, 22 nt, Human
aaugggaagucacuacuguuac

SEQ ID NO: 474580 - RNA, 22 nt, Human
uaaaugcaguuaguacuugcca

SEQ ID NO: 474581 - RNA, 22 nt, Human
uggcucagugcauucacaguaa

SEQ ID NO: 474582 - RNA, 22 nt, Human
agaagaaacugucggggauauu

SEQ ID NO: 474583 - RNA, 22 nt, Human
ucaguggagcuaagcaugagau

SEQ ID NO: 474584 - RNA, 22 nt, Human
gagggcagugaauuuugaagcu

SEQ ID NO: 474585 - RNA, 23 nt, Human
ucuggcuccauccuuggggaucc

SEQ ID NO: 474586 - RNA, 22 nt, Human
aggucaccauggcaugcuccac

SEQ ID NO: 474587 - RNA, 22 nt, Human
ucagcugccuuucccaugcuag

SEQ ID NO: 474588 - RNA, 22 nt, Human
ggcaugggagugagcaaccuua

SEQ ID NO: 474589 - RNA, 22 nt, Human
uccagcagcccgaaggcccauc

SEQ ID NO: 474590 - RNA, 22 nt, Human
acagcagcacuauugacauuuu

SEQ ID NO: 474591 - RNA, 22 nt, Human
ggauggagguucucagaugcuc

SEQ ID NO: 474592 - RNA, 22 nt, Human
uccuggagaauccugccaccug

SEQ ID NO: 474593 - RNA, 22 nt, Human
gggagagguuacccgagcaacu

SEQ ID NO: 474594 - RNA, 22 nt, Human
agcuuccugaugcaagagggcu

SEQ ID NO: 474595 - RNA, 22 nt, Human
ucaugucaguuucuucuauaaa

SEQ ID NO: 474596 - RNA, 22 nt, Human
auccuugagccaaugacugauu

SEQ ID NO: 474597 - RNA, 22 nt, Human
cccaggaggccaagguugcagu

SEQ ID NO: 474598 - RNA, 22 nt, Human
gaggcucagagggacuuucaag

SEQ ID NO: 474599 - RNA, 22 nt, Human
acuuucucaaaucagacuuuaa

SEQ ID NO: 474600 - RNA, 21 nt, Human
aaaugaaugugguagugcaag

SEQ ID NO: 474601 - RNA, 22 nt, Human
uggagagcgugcuuagcacucu

SEQ ID NO: 474602 - RNA, 22 nt, Human
aaauuucuaagcagccacuucc

SEQ ID NO: 474603 - RNA, 20 nt, Human
cauuuguuagcuuucuacug

SEQ ID NO: 474604 - RNA, 22 nt, Human
uagcagggccaggcugggaacc

SEQ ID NO: 474605 - RNA, 22 nt, Human
cuggcucaugugaugagggcaa

SEQ ID NO: 474606 - RNA, 22 nt, Human
aggagucaggaccaaauggaaa

SEQ ID NO: 474607 - RNA, 22 nt, Human
gcugaagcccacguggcuugua

SEQ ID NO: 474608 - RNA, 22 nt, Human
agugaaauugcuguaagaggaa

SEQ ID NO: 474609 - RNA, 22 nt, Human
auuuuuuagaaccuggccugau

SEQ ID NO: 474610 - RNA, 22 nt, Human
ucccagagcucugacaccagcu

SEQ ID NO: 474611 - RNA, 22 nt, Human
ggccucgcggcuucugguggcu

SEQ ID NO: 474612 - RNA, 19 nt, Human
cuguccuuggcugcacugu

SEQ ID NO: 474613 - RNA, 22 nt, Human
cccuggagucagguuggccugg

SEQ ID NO: 474614 - RNA, 22 nt, Human
agaagccagcuucagcugcccg

SEQ ID NO: 474615 - RNA, 22 nt, Human
cagagagcuuagugugcugcau

SEQ ID NO: 474616 - RNA, 22 nt, Human
gauuucaaaaguagauccauca

SEQ ID NO: 474617 - RNA, 22 nt, Human
cccuggcagaaugucucugggc

SEQ ID NO: 474618 - RNA, 22 nt, Human
uucuaguuuagggcucuucaac

SEQ ID NO: 474619 - RNA, 17 nt, Human
cuggagccaagagggcc

SEQ ID NO: 474620 - RNA, 22 nt, Human
gcagugccuugcuucucugucu

SEQ ID NO: 474621 - RNA, 22 nt, Human
cacugcucgcugcagcauggcc

SEQ ID NO: 474622 - RNA, 22 nt, Human
uuaaacagagucugaaauguaa

SEQ ID NO: 474623 - RNA, 22 nt, Human
gcagaagggaauaaggagcuuu

SEQ ID NO: 474624 - RNA, 22 nt, Human
ccagcccugucaccaacuggag

SEQ ID NO: 474625 - RNA, 22 nt, Human
gucucagaguccuacuuauucc

SEQ ID NO: 474626 - RNA, 22 nt, Human
guccucagggaauguggcgggu

SEQ ID NO: 474627 - RNA, 22 nt, Human
gagcuuugcuggaagccugggg

SEQ ID NO: 474628 - RNA, 17 nt, Human
cccagagaugcugccuu

SEQ ID NO: 474629 - RNA, 19 nt, Human
agguggucuaggcuggaga

SEQ ID NO: 474630 - RNA, 23 nt, Human
agcagccagagauccucggcccu

SEQ ID NO: 474631 - RNA, 19 nt, Human
cagaccuguccagccugug

SEQ ID NO: 474632 - RNA, 22 nt, Human
agcagccauccuuagagaaaga

SEQ ID NO: 474633 - RNA, 22 nt, Human
gcugccugauguccagcaggac

SEQ ID NO: 474634 - RNA, 22 nt, Human
ucucacagugcaggucugucuc

SEQ ID NO: 474635 - RNA, 22 nt, Human
uccaggcagcccuuccugacuc

SEQ ID NO: 474636 - RNA, 22 nt, Human
ccucaugguacuuacuguagcu

SEQ ID NO: 474637 - RNA, 18 nt, Human
ucuuggaguaaugaucaa

SEQ ID NO: 474638 - RNA, 22 nt, Human
cauaucccauuggccaggacau

SEQ ID NO: 474639 - RNA, 22 nt, Human
acacagccaggguaguaaggcu

SEQ ID NO: 474640 - RNA, 22 nt, Human
ugcuuuauguggcugauacuca

SEQ ID NO: 474641 - RNA, 22 nt, Human
ggagccaguauuuaguggucuu

SEQ ID NO: 474642 - RNA, 22 nt, Human
auccaaagcccuaaguuaacug

SEQ ID NO: 474643 - RNA, 22 nt, Human
ucugagaguagagcugccucuu

SEQ ID NO: 474644 - RNA, 22 nt, Human
agccuggagaggcgccauacac

SEQ ID NO: 474645 - RNA, 22 nt, Human
acauuucuuuucaucucuauau

SEQ ID NO: 474646 - RNA, 22 nt, Human
ccucuggguaucuguggaagua

SEQ ID NO: 474647 - RNA, 22 nt, Human
aacaaagucguugccuagaaga

SEQ ID NO: 474648 - RNA, 21 nt, Human
gggugcuguggucaugcagga

SEQ ID NO: 474649 - RNA, 21 nt, Human
ggacuuacauagguaaggggu

SEQ ID NO: 474650 - RNA, 22 nt, Human
gggaucagcaagccacugcacc

SEQ ID NO: 474651 - RNA, 22 nt, Human
uuccuguauuuugcgaauuuuc

SEQ ID NO: 474652 - RNA, 22 nt, Human
ccaggccuggccaggggaugcc

SEQ ID NO: 474653 - RNA, 22 nt, Human
acagagcuaaauuucaauccca

SEQ ID NO: 474654 - RNA, 22 nt, Human
cagcaugguggagcugcucuuu

SEQ ID NO: 474655 - RNA, 21 nt, Human
agagacugucacugcaguacc

SEQ ID NO: 474656 - RNA, 22 nt, Human
cuuauuuuaagucaguuugggu

SEQ ID NO: 474657 - RNA, 22 nt, Human
ggucagccuuggauuugguagc

SEQ ID NO: 474658 - RNA, 22 nt, Human
cagauccacccuuguagugaca

SEQ ID NO: 474659 - RNA, 22 nt, Human
agucccagaugacccagcuacu

SEQ ID NO: 474660 - RNA, 22 nt, Human
ggccuuggugccauggccaguu

SEQ ID NO: 474661 - RNA, 17 nt, Human
guccugggaggagagag

SEQ ID NO: 474662 - RNA, 22 nt, Human
gggugacauuucccaaugagcc

SEQ ID NO: 474663 - RNA, 17 nt, Human
aggugcuggagcaucag

SEQ ID NO: 474664 - RNA, 22 nt, Human
cccccuggcaggcuggccucuc

SEQ ID NO: 474665 - RNA, 22 nt, Human
agguggggaggagugucucuuu

SEQ ID NO: 474666 - RNA, 22 nt, Human
acaggacauguaccaggugguc

SEQ ID NO: 474667 - RNA, 22 nt, Human
ccagcuccaggacugggagcug

SEQ ID NO: 474668 - RNA, 22 nt, Human
uguagcucuccagccagcaagg

SEQ ID NO: 474669 - RNA, 22 nt, Human
uuccauaauaaccugagagaaa

SEQ ID NO: 474670 - RNA, 22 nt, Human
aaaggcuccuucucccaugacc

SEQ ID NO: 474671 - RNA, 22 nt, Human
ggacaggguaaguacuagugug

SEQ ID NO: 474672 - RNA, 22 nt, Human
ggccucucuccuuggcuugcag

SEQ ID NO: 474673 - RNA, 22 nt, Human
uugagaagaggcuuuguaggaa

SEQ ID NO: 474674 - RNA, 20 nt, Human
gucucaaguaucucacaguc

SEQ ID NO: 474675 - RNA, 22 nt, Human
uucaggaggugagcaagaaggg

SEQ ID NO: 474676 - RNA, 22 nt, Human
aaaguguugggauuacaggugu

SEQ ID NO: 474677 - RNA, 22 nt, Human
aaauaauuauagcgagucuauc

SEQ ID NO: 474678 - RNA, 17 nt, Human
ucuguccagggagugug

SEQ ID NO: 474679 - RNA, 22 nt, Human
aggacccugaggucuccuguga

SEQ ID NO: 474680 - RNA, 22 nt, Human
gcuucccacagcuggacugggg

SEQ ID NO: 474681 - RNA, 22 nt, Human
cagcucuggcgucagggagcga

SEQ ID NO: 474682 - RNA, 22 nt, Human
cucuggagcaccgggcuaucca

SEQ ID NO: 474683 - RNA, 17 nt, Human
uccaggcagcaacugag

SEQ ID NO: 474684 - RNA, 22 nt, Human
gccucccuggcccacagcagcg

SEQ ID NO: 474685 - RNA, 22 nt, Human
ccaaggagcucauauucuuguu

SEQ ID NO: 474686 - RNA, 22 nt, Human
cagcuucccuuggcugagcaga

SEQ ID NO: 474687 - RNA, 22 nt, Human
gaccucagugaauggucaugua

SEQ ID NO: 474688 - RNA, 22 nt, Human
ggccuggccuccagaugugggc

SEQ ID NO: 474689 - RNA, 22 nt, Human
auaugccauuagcuagaaauaa

SEQ ID NO: 474690 - RNA, 22 nt, Human
uucaggauucugugucugacaa

SEQ ID NO: 474691 - RNA, 22 nt, Human
acagauuuauugaagcugcugc

SEQ ID NO: 474692 - RNA, 22 nt, Human
agcauuuaauuacaguuuaauu

SEQ ID NO: 474693 - RNA, 22 nt, Human
cucucccccacagcagccuucu

SEQ ID NO: 474694 - RNA, 22 nt, Human
uauugaggaucuccugcuaauu

SEQ ID NO: 474695 - RNA, 22 nt, Human
agaagugagugugacucagcag

SEQ ID NO: 474696 - RNA, 22 nt, Human
gccugcagcugcuuccacacac

SEQ ID NO: 474697 - RNA, 22 nt, Human
gugcuuccaucuagagggucac

SEQ ID NO: 474698 - RNA, 22 nt, Human
gccaggcaauguguuagaagcg

SEQ ID NO: 474699 - RNA, 22 nt, Human
auuuucaucauggguuuaacau

SEQ ID NO: 474700 - RNA, 22 nt, Human
ucacaucucccuggaggacaca

SEQ ID NO: 474701 - RNA, 22 nt, Human
ucagggcaaagggcagaguuug

SEQ ID NO: 474702 - RNA, 22 nt, Human
cugagggcccugaagcuuggca

SEQ ID NO: 474703 - RNA, 22 nt, Human
ugcugccuuugggaccuggccu

SEQ ID NO: 474704 - RNA, 22 nt, Human
caggugcucccagagaagugcu

SEQ ID NO: 474705 - RNA, 22 nt, Human
caaaugcuaacuucuuuccaaa

SEQ ID NO: 474706 - RNA, 22 nt, Human
auguaucaugcaggguccauga

SEQ ID NO: 474707 - RNA, 22 nt, Human
gguuucaacuucaaccucucca

SEQ ID NO: 474708 - RNA, 22 nt, Human
agagccaggaaguggcgugggg

SEQ ID NO: 474709 - RNA, 22 nt, Human
uaagaauuguguugaauagagu

SEQ ID NO: 474710 - RNA, 22 nt, Human
uugcaggggaaggagcagagcu

SEQ ID NO: 474711 - RNA, 22 nt, Human
gccagcaguccugcugugugcc

SEQ ID NO: 474712 - RNA, 22 nt, Human
cugcugagcccuggcacaggug

SEQ ID NO: 474713 - RNA, 22 nt, Human
gggcugcuuuuuucuuagcaga

SEQ ID NO: 474714 - RNA, 22 nt, Human
ucaggccacuucacaggugauu

SEQ ID NO: 474715 - RNA, 22 nt, Human
gcugcaggagcuggagcugugg

SEQ ID NO: 474716 - RNA, 22 nt, Human
ccaggcagggcucaaggaaccu

SEQ ID NO: 474717 - RNA, 23 nt, Human
auaaggcauaaagguacauugga

SEQ ID NO: 474718 - RNA, 22 nt, Human
ccaggcagagugcuccagaaag

SEQ ID NO: 474719 - RNA, 18 nt, Human
cagucccaaaccuuagga

SEQ ID NO: 474720 - RNA, 22 nt, Human
aggagggagcuuaagccaggca

SEQ ID NO: 474721 - RNA, 22 nt, Human
caggcugcggucggcucugguc

SEQ ID NO: 474722 - RNA, 22 nt, Human
gaugugggguugagggaccagc

SEQ ID NO: 474723 - RNA, 22 nt, Human
cccugcagaaccacagacaaac

SEQ ID NO: 474724 - RNA, 21 nt, Human
caggaaaagcggaagucuagc

SEQ ID NO: 474725 - RNA, 22 nt, Human
ccagugcccagcugcccaggca

SEQ ID NO: 474726 - RNA, 22 nt, Human
gcaaggcugagcacauuugcau

SEQ ID NO: 474727 - RNA, 22 nt, Human
gccuggaguuguggugaagcca

SEQ ID NO: 474728 - RNA, 20 nt, Human
aggcacuggauuucuuauau

SEQ ID NO: 474729 - RNA, 22 nt, Human
agggucccgaaggagacagcaa

SEQ ID NO: 474730 - RNA, 22 nt, Human
caauagcagcuucugaaugcaa

SEQ ID NO: 474731 - RNA, 22 nt, Human
ccugagugcuuccagagucaug

SEQ ID NO: 474732 - RNA, 22 nt, Human
agccacagcaacaagugcaauu

SEQ ID NO: 474733 - RNA, 22 nt, Human
uugacagcaaagauugugccua

SEQ ID NO: 474734 - RNA, 20 nt, Human
ggcucugcuugugagcagcc

SEQ ID NO: 474735 - RNA, 22 nt, Human
caaaggcugccacuguggcugu

SEQ ID NO: 474736 - RNA, 22 nt, Human
gacagccaugcacuucugcugu

SEQ ID NO: 474737 - RNA, 20 nt, Human
gccagcacagggagcaguuc

SEQ ID NO: 474738 - RNA, 22 nt, Human
aggaagccugcaggugacugcu

SEQ ID NO: 474739 - RNA, 22 nt, Human
uccaggcagucauuaaucucua

SEQ ID NO: 474740 - RNA, 22 nt, Human
gucuggagccacccuaagcauu

SEQ ID NO: 474741 - RNA, 22 nt, Human
uuucuuucaauucuccuaaugc

SEQ ID NO: 474742 - RNA, 22 nt, Human
acagggcaccugagguaggaag

SEQ ID NO: 474743 - RNA, 19 nt, Human
gcuuuuuguugucaaaggu

SEQ ID NO: 474744 - RNA, 22 nt, Human
gaagcagcgaaguggaagggac

SEQ ID NO: 474745 - RNA, 22 nt, Human
augugcaaauccaaugugaaug

SEQ ID NO: 474746 - RNA, 22 nt, Human
agucaguuaaccucacagcauc

SEQ ID NO: 474747 - RNA, 22 nt, Human
agaugcugcuccacaggccagg

SEQ ID NO: 474748 - RNA, 22 nt, Human
ugcauuguuugauaggugaauu

SEQ ID NO: 474749 - RNA, 22 nt, Human
caaagguauucucauuuuggaa

SEQ ID NO: 474750 - RNA, 22 nt, Human
cagcaggcagccauuucacugu

SEQ ID NO: 474751 - RNA, 22 nt, Human
gcccagcacagcuggaagaguc

SEQ ID NO: 474752 - RNA, 22 nt, Human
ugcugucccccgugucugggcu

SEQ ID NO: 474753 - RNA, 22 nt, Human
ugaaggccuaacuuccagugcu

SEQ ID NO: 474754 - RNA, 22 nt, Human
ugcucuggaguggcuugugcac

SEQ ID NO: 474755 - RNA, 22 nt, Human
gagcugccagacaugggaauga

SEQ ID NO: 474756 - RNA, 22 nt, Human
gagcucccuggagguucagaua

SEQ ID NO: 474757 - RNA, 22 nt, Human
ccaggauggggagcagauagaa

SEQ ID NO: 474758 - RNA, 23 nt, Human
agaugaggcuucuccauguuggu

SEQ ID NO: 474759 - RNA, 22 nt, Human
gagcccaggcagagguugcagu

SEQ ID NO: 474760 - RNA, 22 nt, Human
gugcagcugugugagagcucca

SEQ ID NO: 474761 - RNA, 22 nt, Human
agccuauuccaggaugagcuca

SEQ ID NO: 474762 - RNA, 19 nt, Human
guggccucggagcgcgcgg

SEQ ID NO: 474763 - RNA, 22 nt, Human
agcugucuaccugcagaguccu

SEQ ID NO: 474764 - RNA, 22 nt, Human
uggagcaggacugcugcccuca

SEQ ID NO: 474765 - RNA, 22 nt, Human
agcagggggaguuagacuagau

SEQ ID NO: 474766 - RNA, 22 nt, Human
agguggccggugccagccgggc

SEQ ID NO: 474767 - RNA, 22 nt, Human
gacaagacuauguagaaaguau

SEQ ID NO: 474768 - RNA, 22 nt, Human
uacauggguagguuaagucaua

SEQ ID NO: 474769 - RNA, 22 nt, Human
cagaccagaaggaagccgacaa

SEQ ID NO: 474770 - RNA, 22 nt, Human
caggccucccggugcacacuga

SEQ ID NO: 474771 - RNA, 22 nt, Human
ucugccugagggagcugaggaa

SEQ ID NO: 474772 - RNA, 22 nt, Human
acguguucaauuuccaucugac

SEQ ID NO: 474773 - RNA, 22 nt, Human
cucugagcuccuggaagcgugc

SEQ ID NO: 474774 - RNA, 22 nt, Human
agagacaccgcgcaucauggcu

SEQ ID NO: 474775 - RNA, 22 nt, Human
agcccagaggcugggcgugcau

SEQ ID NO: 474776 - RNA, 22 nt, Human
ggguccagcuacaucagggugg

SEQ ID NO: 474777 - RNA, 22 nt, Human
acagaauucuaguauguggcuu

SEQ ID NO: 474778 - RNA, 22 nt, Human
aggccucacauugggcuucaag

SEQ ID NO: 474779 - RNA, 22 nt, Human
cugcuuccaugcaauggcaguc

SEQ ID NO: 474780 - RNA, 22 nt, Human
gucacuguauccagguuccagc

SEQ ID NO: 474781 - RNA, 22 nt, Human
gcucaggagcucuugguggcgc

SEQ ID NO: 474782 - RNA, 22 nt, Human
ggccgggcaggucucagccagc

SEQ ID NO: 474783 - RNA, 22 nt, Human
aggcgugggaggaucugaggcc

SEQ ID NO: 474784 - RNA, 20 nt, Human
ucugcccaccccggcuccca

SEQ ID NO: 474785 - RNA, 22 nt, Human
agcugucugucuccugaggaga

SEQ ID NO: 474786 - RNA, 22 nt, Human
gcuccucugucaaaugagagug

SEQ ID NO: 474787 - RNA, 22 nt, Human
caggucccgccccgggcugacc

SEQ ID NO: 474788 - RNA, 18 nt, Human
gggcauggaugcagcauc

SEQ ID NO: 474789 - RNA, 22 nt, Human
aggcagcaagauuauuuaaucc

SEQ ID NO: 474790 - RNA, 22 nt, Human
gagcucagauucuggugucaga

SEQ ID NO: 474791 - RNA, 22 nt, Human
aagcuggaacaucuugaggaag

SEQ ID NO: 474792 - RNA, 22 nt, Human
gucccuggaucugggacagcug

SEQ ID NO: 474793 - RNA, 22 nt, Human
ugcuggccgugagcucucggga

SEQ ID NO: 474794 - RNA, 22 nt, Human
caggaugaagggcaaaggcaag

SEQ ID NO: 474795 - RNA, 22 nt, Human
uuauuucauguaaaauuuaugu

SEQ ID NO: 474796 - RNA, 22 nt, Human
uuguuuugcuaaagggucauca

SEQ ID NO: 474797 - RNA, 22 nt, Human
ucaguuuucucaucuguaauuu

SEQ ID NO: 474798 - RNA, 22 nt, Human
aggcucaguauagcuggcaagu

SEQ ID NO: 474799 - RNA, 22 nt, Human
aggaccuguguuuuccuugaau

SEQ ID NO: 474800 - RNA, 22 nt, Human
ugcuggcuguauaugugagagu

SEQ ID NO: 474801 - RNA, 22 nt, Human
ugggugcuucgucagcucugag

SEQ ID NO: 474802 - RNA, 18 nt, Human
cuuguucuucucuuggcg

SEQ ID NO: 474803 - RNA, 22 nt, Human
acagcuuuuuacuaauagauug

SEQ ID NO: 474804 - RNA, 22 nt, Human
gccugggugucgaucacuagug

SEQ ID NO: 474805 - RNA, 22 nt, Human
ggcuccuguggcaagacagcuu

SEQ ID NO: 474806 - RNA, 18 nt, Human
cuuuaugugcagagcuuu

SEQ ID NO: 474807 - RNA, 22 nt, Human
cagguggagcugacugagggca

SEQ ID NO: 474808 - RNA, 22 nt, Human
aggcagcccacaggacacagga

SEQ ID NO: 474809 - RNA, 22 nt, Human
uggccugccucccggcuucuuu

SEQ ID NO: 474810 - RNA, 23 nt, Human
cccagagcacagccuccagaugc

SEQ ID NO: 474811 - RNA, 23 nt, Human
cucccuggaguuucuggaagaug

SEQ ID NO: 474812 - RNA, 22 nt, Human
aauuugauuuucuuaaaccaua

SEQ ID NO: 474813 - RNA, 22 nt, Human
caaaguuuaaaguagauuucag

SEQ ID NO: 474814 - RNA, 22 nt, Human
ccucgcggcacucgggccggau

SEQ ID NO: 474815 - RNA, 22 nt, Human
cacuguacugugaauaaggagg

SEQ ID NO: 474816 - RNA, 22 nt, Human
ugcuguggcaguuuauguauag

SEQ ID NO: 474817 - RNA, 22 nt, Human
cccuggaggcaaagguugcagu

SEQ ID NO: 474818 - RNA, 18 nt, Human
cucagagaugcccuuauu

SEQ ID NO: 474819 - RNA, 22 nt, Human
cucuguccuugcacaguuccua

SEQ ID NO: 474820 - RNA, 22 nt, Human
caaaugaagggagcugaagucu

SEQ ID NO: 474821 - RNA, 18 nt, Human
uguuccaaggaaggaauc

SEQ ID NO: 474822 - RNA, 22 nt, Human
ucaggugggaccugcuaggaca

SEQ ID NO: 474823 - RNA, 22 nt, Human
uccuggaggcaaaugaagacuc

SEQ ID NO: 474824 - RNA, 22 nt, Human
ccuucauugcaucuuuaagaga

SEQ ID NO: 474825 - RNA, 22 nt, Human
gcuggcaggguucucacugaaa

SEQ ID NO: 474826 - RNA, 16 nt, Human
agcagggcgggaagga

SEQ ID NO: 474827 - RNA, 22 nt, Human
cagaaggcauagaugaaggccu

SEQ ID NO: 474828 - RNA, 20 nt, Human
uggcccuguuuucuccaggc

SEQ ID NO: 474829 - RNA, 23 nt, Human
uccagcagagccuuccaggaggg

SEQ ID NO: 474830 - RNA, 22 nt, Human
auugaaagagaauguagcucuu

SEQ ID NO: 474831 - RNA, 22 nt, Human
uuccucaguuagugccugaggc

SEQ ID NO: 474832 - RNA, 22 nt, Human
uguuccaugucuuuguaggacu

SEQ ID NO: 474833 - RNA, 22 nt, Human
gcacccaggcuugggcagcaac

SEQ ID NO: 474834 - RNA, 22 nt, Human
cagggacagccuugggguggcg

SEQ ID NO: 474835 - RNA, 22 nt, Human
cagccagcuucagauccaagcc

SEQ ID NO: 474836 - RNA, 22 nt, Human
cagcuggguuuaguggggugug

SEQ ID NO: 474837 - RNA, 22 nt, Human
gacugccagaaugugaggccug

SEQ ID NO: 474838 - RNA, 22 nt, Human
ggagccuggccuggcucugugu

SEQ ID NO: 474839 - RNA, 22 nt, Human
aaacugaaacaucaucauguug

SEQ ID NO: 474840 - RNA, 22 nt, Human
cagauggaacacagaaaggaga

SEQ ID NO: 474841 - RNA, 22 nt, Human
ggaaagagcccagcagugcuug

SEQ ID NO: 474842 - RNA, 22 nt, Human
ccuucucuacuccugaugcaug

SEQ ID NO: 474843 - RNA, 22 nt, Human
aucaaaguaggcauauguuuuu

SEQ ID NO: 474844 - RNA, 22 nt, Human
aaggcugagagucacaguccua

SEQ ID NO: 474845 - RNA, 22 nt, Human
uaaggcaccuguccaggcuggg

SEQ ID NO: 474846 - RNA, 22 nt, Human
aggcccuguccauggugcugaa

SEQ ID NO: 474847 - RNA, 22 nt, Human
cucugagcugaaacaugagcau

SEQ ID NO: 474848 - RNA, 22 nt, Human
uauuuugacgauuuuaugcaaa

SEQ ID NO: 474849 - RNA, 22 nt, Human
uggacaggaucugagacugaga

SEQ ID NO: 474850 - RNA, 22 nt, Human
caggaaaaaugccaggagucag

SEQ ID NO: 474851 - RNA, 23 nt, Human
acucacaaagcaggaucauguug

SEQ ID NO: 474852 - RNA, 22 nt, Human
uccaugccaggcagucgaugca

SEQ ID NO: 474853 - RNA, 22 nt, Human
agcugccaaguuggaguagcaa

SEQ ID NO: 474854 - RNA, 22 nt, Human
acaaaguuaacaguuggauagu

SEQ ID NO: 474855 - RNA, 22 nt, Human
caccagguggaaaugucacagc

SEQ ID NO: 474856 - RNA, 22 nt, Human
ugcugcauuuaucuucucaaac

SEQ ID NO: 474857 - RNA, 22 nt, Human
cacucaggguacaauggagggc

SEQ ID NO: 474858 - RNA, 22 nt, Human
uccuggaggggacagcaugggc

SEQ ID NO: 474859 - RNA, 22 nt, Human
gaggagcuggcagcgucuccgc

SEQ ID NO: 474860 - RNA, 22 nt, Human
ugccaggccaauucuauuugac

SEQ ID NO: 474861 - RNA, 19 nt, Human
aucuuacagagcagaguac

SEQ ID NO: 474862 - RNA, 22 nt, Human
uccaggcauaaugcccaguggu

SEQ ID NO: 474863 - RNA, 22 nt, Human
ccaggugcucuugccagggcug

SEQ ID NO: 474864 - RNA, 22 nt, Human
ucaggaucaggggccuuuccuu

SEQ ID NO: 474865 - RNA, 22 nt, Human
uaaggccaauuacauauguuca

SEQ ID NO: 474866 - RNA, 18 nt, Human
cauuguacaaugcuuuau

SEQ ID NO: 474867 - RNA, 22 nt, Human
uucaggauuauacucucuuccc

SEQ ID NO: 474868 - RNA, 23 nt, Human
aggcccugccugucccucuuuuu

SEQ ID NO: 474869 - RNA, 18 nt, Human
gcuggcugcacuucugcu

SEQ ID NO: 474870 - RNA, 22 nt, Human
ggccccuggcaccaggcugauu

SEQ ID NO: 474871 - RNA, 22 nt, Human
uucucuuaucuggcauuauugg

SEQ ID NO: 474872 - RNA, 22 nt, Human
uuugaaaauuagacacaggcua

SEQ ID NO: 474873 - RNA, 21 nt, Human
acagagcauaaugguguggca

SEQ ID NO: 474874 - RNA, 22 nt, Human
ucaaaguuuuugagaauuacau

SEQ ID NO: 474875 - RNA, 21 nt, Human
ccuucuccacagggucuccgg

SEQ ID NO: 474876 - RNA, 22 nt, Human
aggcugagccacggggcuggcu

SEQ ID NO: 474877 - RNA, 22 nt, Human
cuuucacauaauugaccuugaa

SEQ ID NO: 474878 - RNA, 22 nt, Human
ucagaaauacuaucagcuuuug

SEQ ID NO: 474879 - RNA, 22 nt, Human
cuggcagcaguuaugaaacaau

SEQ ID NO: 474880 - RNA, 19 nt, Human
cgcaggagccgaggugacc

SEQ ID NO: 474881 - RNA, 22 nt, Human
agccaggaagaaggucacacca

SEQ ID NO: 474882 - RNA, 22 nt, Human
aaggcucucugauggcagcagu

SEQ ID NO: 474883 - RNA, 22 nt, Human
uggcucagaugcucuuccagug

SEQ ID NO: 474884 - RNA, 19 nt, Human
gagcccucuccauggccac

SEQ ID NO: 474885 - RNA, 22 nt, Human
gaggaaaauaacaacuaagggc

SEQ ID NO: 474886 - RNA, 22 nt, Human
ugggccuguugccugaguccau

SEQ ID NO: 474887 - RNA, 22 nt, Human
agggccuggaacugugggcagg

SEQ ID NO: 474888 - RNA, 22 nt, Human
ccuuuccuuuuuagugugggag

SEQ ID NO: 474889 - RNA, 22 nt, Human
gcccucucuucugcagccucca

SEQ ID NO: 474890 - RNA, 22 nt, Human
caggagaaacauaauuuucugg

SEQ ID NO: 474891 - RNA, 22 nt, Human
ugcuuaaaauaguucauuuuug

SEQ ID NO: 474892 - RNA, 22 nt, Human
uucaggaugacaccauguccag

SEQ ID NO: 474893 - RNA, 22 nt, Human
aagggcagcuauuaucgucauc

SEQ ID NO: 474894 - RNA, 22 nt, Human
gggcccacuggcugucugaccc

SEQ ID NO: 474895 - RNA, 22 nt, Human
cagggcugugcccaucuucccc

SEQ ID NO: 474896 - RNA, 22 nt, Human
ccagagaggccaaggucguggu

SEQ ID NO: 474897 - RNA, 22 nt, Human
cuggcagcuucaggacacucgg

SEQ ID NO: 474898 - RNA, 22 nt, Human
ggcagcaguaggagcuaaucuu

SEQ ID NO: 474899 - RNA, 22 nt, Human
ucaguuuuaagguuugagaauu

SEQ ID NO: 474900 - RNA, 19 nt, Human
augagcuggcauuucaggu

SEQ ID NO: 474901 - RNA, 20 nt, Human
acagccagaggaggcagaca

SEQ ID NO: 474902 - RNA, 22 nt, Human
ggccugcuccgggggcugagcu

SEQ ID NO: 474903 - RNA, 22 nt, Human
agggugggcuagacucuucccc

SEQ ID NO: 474904 - RNA, 19 nt, Human
ggucacagggguuacaagg

SEQ ID NO: 474905 - RNA, 21 nt, Human
agauuguauggaggugagagg

SEQ ID NO: 474906 - RNA, 19 nt, Human
gcccugcaggagguggggc

SEQ ID NO: 474907 - RNA, 22 nt, Human
gcagggacugugaucucacaga

SEQ ID NO: 474908 - RNA, 22 nt, Human
ccugggcagggcuggacucuca

SEQ ID NO: 474909 - RNA, 22 nt, Human
aguccaaagcagaugagggcca

SEQ ID NO: 474910 - RNA, 22 nt, Human
agucucagaguaccugagggac

SEQ ID NO: 474911 - RNA, 22 nt, Human
ugcuuuauucagucucugccau

SEQ ID NO: 474912 - RNA, 22 nt, Human
cggcagagcccugagucagccu

SEQ ID NO: 474913 - RNA, 22 nt, Human
ggcugcugguagggguaggaag

SEQ ID NO: 474914 - RNA, 22 nt, Human
caaggccaguccauuuuggaag

SEQ ID NO: 474915 - RNA, 23 nt, Human
ucuuuccucagcacacaccaaga

SEQ ID NO: 474916 - RNA, 22 nt, Human
caaacugagcaucagaaaguuu

SEQ ID NO: 474917 - RNA, 22 nt, Human
gccuggugugcgccgcgcagcu

SEQ ID NO: 474918 - RNA, 22 nt, Human
gugucccaauguucaggacggc

SEQ ID NO: 474919 - RNA, 19 nt, Human
uucacauuggaagaaguag

SEQ ID NO: 474920 - RNA, 19 nt, Human
ccugucugucuucagcuag

SEQ ID NO: 474921 - RNA, 22 nt, Human
aaugaacacagcccucuacuuu

SEQ ID NO: 474922 - RNA, 22 nt, Human
agcuuccuuggcgcugaggccu

SEQ ID NO: 474923 - RNA, 22 nt, Human
aaugggaaagagacuagaugcu

SEQ ID NO: 474924 - RNA, 22 nt, Human
cuuauuagugucugucugaguu

SEQ ID NO: 474925 - RNA, 22 nt, Human
ugaaaguuacaggaaaacagau

SEQ ID NO: 474926 - RNA, 22 nt, Human
agugugaccuuauuuggaaaca

SEQ ID NO: 474927 - RNA, 22 nt, Human
ugggagcaccuugagggcagaa

SEQ ID NO: 474928 - RNA, 22 nt, Human
uuuagggaauagaagaucugaa

SEQ ID NO: 474929 - RNA, 22 nt, Human
ugggaccaagucauuucuuuag

SEQ ID NO: 474930 - RNA, 22 nt, Human
gcacaggcacagagggccacug

SEQ ID NO: 474931 - RNA, 22 nt, Human
cacugaagccacuggaagagga

SEQ ID NO: 474932 - RNA, 22 nt, Human
agcagaacugaugagacuugag

SEQ ID NO: 474933 - RNA, 22 nt, Human
agccuggaagaaccugaagucu

SEQ ID NO: 474934 - RNA, 22 nt, Human
acaaaugcuuaguucaccaaaa

SEQ ID NO: 474935 - RNA, 22 nt, Human
guggccuuuccugaagaaauga

SEQ ID NO: 474936 - RNA, 22 nt, Human
cagggccuccuaaggcaucuaa

SEQ ID NO: 474937 - RNA, 22 nt, Human
guuugcauguguacuuaauugg

SEQ ID NO: 474938 - RNA, 22 nt, Human
uggcucugucaaacugcacaca

SEQ ID NO: 474939 - RNA, 22 nt, Human
ucacaggcuccagggccuggau

SEQ ID NO: 474940 - RNA, 22 nt, Human
ccagcagcgauagggugagugc

SEQ ID NO: 474941 - RNA, 20 nt, Human
acaguggaaauugaugucug

SEQ ID NO: 474942 - RNA, 22 nt, Human
cuuucacacacauacauuugga

SEQ ID NO: 474943 - RNA, 22 nt, Human
aagccagccagugccagucuua

SEQ ID NO: 474944 - RNA, 22 nt, Human
ccuccagcugccucagucucuu

SEQ ID NO: 474945 - RNA, 22 nt, Human
agggcugccugcucugcauuga

SEQ ID NO: 474946 - RNA, 22 nt, Human
ggcagggaguggagacucccua

SEQ ID NO: 474947 - RNA, 22 nt, Human
acagaguuaauggauaggcagg

SEQ ID NO: 474948 - RNA, 22 nt, Human
gccucugcucggacuuugccuc

SEQ ID NO: 474949 - RNA, 22 nt, Human
acuguucauuuggauuucucug

SEQ ID NO: 474950 - RNA, 22 nt, Human
ugggaggcuuccagaccuugcu

SEQ ID NO: 474951 - RNA, 22 nt, Human
guuacacaggaaaacauuagca

SEQ ID NO: 474952 - RNA, 22 nt, Human
gccugagaguugaaguucagug

SEQ ID NO: 474953 - RNA, 22 nt, Human
aaaauguaaagcuugaguguag

SEQ ID NO: 474954 - RNA, 19 nt, Human
cccuggcaggcaagccugg

SEQ ID NO: 474955 - RNA, 22 nt, Human
uucuguguggguagcuccuguu

SEQ ID NO: 474956 - RNA, 22 nt, Human
acagagcuguacaugugccaug

SEQ ID NO: 474957 - RNA, 22 nt, Human
gcaccugguuuauauaaucaua

SEQ ID NO: 474958 - RNA, 22 nt, Human
ggccagagaauaugccuuacgu

SEQ ID NO: 474959 - RNA, 20 nt, Human
cugagcugagcuccaugggu

SEQ ID NO: 474960 - RNA, 21 nt, Human
ccccugggagcccugucagua

SEQ ID NO: 474961 - RNA, 23 nt, Human
agcagcaaaaauuuaucuuucug

SEQ ID NO: 474962 - RNA, 22 nt, Human
gggcugagggguaucucauggg

SEQ ID NO: 474963 - RNA, 22 nt, Human
uugaaaguuaucuagauucuga

SEQ ID NO: 474964 - RNA, 22 nt, Human
ccaggaagcggugagggcugcc

SEQ ID NO: 474965 - RNA, 22 nt, Human
uuugcuauuuuucugugcagcu

SEQ ID NO: 474966 - RNA, 22 nt, Human
cagagagaggccacugcuauua

SEQ ID NO: 474967 - RNA, 22 nt, Human
cgggcagcggcguggccauggu

SEQ ID NO: 474968 - RNA, 22 nt, Human
uuugcauuaucucacuuauaua

SEQ ID NO: 474969 - RNA, 22 nt, Human
uucagagagaccaaguggcgug

SEQ ID NO: 474970 - RNA, 22 nt, Human
gcaaagucucaagacccaagug

SEQ ID NO: 474971 - RNA, 22 nt, Human
cuuaagaauauugaaguugugg

SEQ ID NO: 474972 - RNA, 19 nt, Human
gaggaggcuucagcuuucu

SEQ ID NO: 474973 - RNA, 22 nt, Human
cagguggggcagcugugggagc

SEQ ID NO: 474974 - RNA, 17 nt, Human
uuaaaggaugcucucuc

SEQ ID NO: 474975 - RNA, 22 nt, Human
ugggcagauuaaugcaguggcu

SEQ ID NO: 474976 - RNA, 22 nt, Human
ugccaggccacguagcuucaag

SEQ ID NO: 474977 - RNA, 18 nt, Human
ugaccugcgcuucacggu

SEQ ID NO: 474978 - RNA, 22 nt, Human
uacauuguucaugcaugagaaa

SEQ ID NO: 474979 - RNA, 22 nt, Human
gcucugagagugggugauucug

SEQ ID NO: 474980 - RNA, 22 nt, Human
gcagggucgcucuaggagauca

SEQ ID NO: 474981 - RNA, 22 nt, Human
aggccagaugucgggcuagaag

SEQ ID NO: 474982 - RNA, 22 nt, Human
cacagggcuaaaugaaggguug

SEQ ID NO: 474983 - RNA, 22 nt, Human
uaguggaggccuguugugugca

SEQ ID NO: 474984 - RNA, 20 nt, Human
uccaggagaacugggagccg

SEQ ID NO: 474985 - RNA, 22 nt, Human
agcagcucugagaggccagcac

SEQ ID NO: 474986 - RNA, 22 nt, Human
agcuggugcugaagcucuugag

SEQ ID NO: 474987 - RNA, 22 nt, Human
cacaucagggcugcuugggggu

SEQ ID NO: 474988 - RNA, 22 nt, Human
ggagccuguggccgucacgacu

SEQ ID NO: 474989 - RNA, 22 nt, Human
ccacugaaggucaacauagagc

SEQ ID NO: 474990 - RNA, 22 nt, Human
gacauaaaccuugagauauuaa

SEQ ID NO: 474991 - RNA, 22 nt, Human
uacuguacugcaguucugcaaa

SEQ ID NO: 474992 - RNA, 22 nt, Human
cuggcucacaggugagaugcau

SEQ ID NO: 474993 - RNA, 22 nt, Human
gcucccagacugaccagaggug

SEQ ID NO: 474994 - RNA, 22 nt, Human
ggaggaagugcaguucuacuac

SEQ ID NO: 474995 - RNA, 20 nt, Human
uccuggccuucucgggcagu

SEQ ID NO: 474996 - RNA, 22 nt, Human
cccuggagugugacgaggcauu

SEQ ID NO: 474997 - RNA, 21 nt, Human
ggggcagagcuaggcccugca

SEQ ID NO: 474998 - RNA, 22 nt, Human
guggccugaugccagcccugug

SEQ ID NO: 474999 - RNA, 22 nt, Human
caguaugucuacuggacaaagu

SEQ ID NO: 475000 - RNA, 22 nt, Human
gaaugcagauggcugguguaug

SEQ ID NO: 475001 - RNA, 22 nt, Human
agcagcaacuuauuuuucuuau

SEQ ID NO: 475002 - RNA, 22 nt, Human
gaccauuucuaggaaucagacu

SEQ ID NO: 475003 - RNA, 15 nt, Human
ugauuuccuacuaac

SEQ ID NO: 475004 - RNA, 22 nt, Human
aggacccugagcgggcaugccg

SEQ ID NO: 475005 - RNA, 22 nt, Human
ucuuggagaauggcagagaagc

SEQ ID NO: 475006 - RNA, 22 nt, Human
ggccuugggcuggcugcaguau

SEQ ID NO: 475007 - RNA, 20 nt, Human
ugacucugcaaccgucucuc

SEQ ID NO: 475008 - RNA, 22 nt, Human
uccuucaguucaauuaguccgu

SEQ ID NO: 475009 - RNA, 22 nt, Human
ccagggugcucuguggcgucgc

SEQ ID NO: 475010 - RNA, 22 nt, Human
caaggccauaagagauacaaaa

SEQ ID NO: 475011 - RNA, 22 nt, Human
agcugggaggugggcagugaga

SEQ ID NO: 475012 - RNA, 22 nt, Human
gagacguggccuuugccugagc

SEQ ID NO: 475013 - RNA, 22 nt, Human
ggucaggguauaaucaagugag

SEQ ID NO: 475014 - RNA, 17 nt, Human
ucagcaaagacaaagga

SEQ ID NO: 475015 - RNA, 22 nt, Human
acugccaggauggcacuagagg

SEQ ID NO: 475016 - RNA, 22 nt, Human
agcuugccucuuaaucaccuca

SEQ ID NO: 475017 - RNA, 18 nt, Human
cccacggugcuguagggc

SEQ ID NO: 475018 - RNA, 22 nt, Human
aaaugcaugagaaaguauucug

SEQ ID NO: 475019 - RNA, 22 nt, Human
cucugggcaccaaagagcagcu

SEQ ID NO: 475020 - RNA, 22 nt, Human
ccugccugcuuucugcuuugca

SEQ ID NO: 475021 - RNA, 22 nt, Human
agucucuuuaaucacagugucu

SEQ ID NO: 475022 - RNA, 22 nt, Human
gaaggcugucagagaggagggc

SEQ ID NO: 475023 - RNA, 19 nt, Human
uggcuccugccugccuucu

SEQ ID NO: 475024 - RNA, 22 nt, Human
gcauguuuugcaacaagugacc

SEQ ID NO: 475025 - RNA, 23 nt, Human
ugcucugggaggcccuggagagc

SEQ ID NO: 475026 - RNA, 22 nt, Human
cugugaccuccaggaaggggug

SEQ ID NO: 475027 - RNA, 22 nt, Human
uccucaggucaaagcaggagaa

SEQ ID NO: 475028 - RNA, 22 nt, Human
aaguccagguccucauuccauc

SEQ ID NO: 475029 - RNA, 22 nt, Human
uaaaguucuggugagagguaag

SEQ ID NO: 475030 - RNA, 20 nt, Human
uccagcugggaacagcugau

SEQ ID NO: 475031 - RNA, 22 nt, Human
aggagaaggaagugcaucacua

SEQ ID NO: 475032 - RNA, 22 nt, Human
aaaugguauuuacucuguauua

SEQ ID NO: 475033 - RNA, 22 nt, Human
ucagagaguuggaaagaauuaa

SEQ ID NO: 475034 - RNA, 22 nt, Human
cuauugaauagcccaaaucauu

SEQ ID NO: 475035 - RNA, 22 nt, Human
cagacuugacggcagcugcuuu

SEQ ID NO: 475036 - RNA, 22 nt, Human
gucccagagagcacuaguccau

SEQ ID NO: 475037 - RNA, 22 nt, Human
acccaggguagagugcaguggc

SEQ ID NO: 475038 - RNA, 22 nt, Human
gggagcaggagccugccugcca

SEQ ID NO: 475039 - RNA, 22 nt, Human
ucaaaccaccuuguuacugggg

SEQ ID NO: 475040 - RNA, 22 nt, Human
ugcccuguuccugccuccagcu

SEQ ID NO: 475041 - RNA, 22 nt, Human
ggcugagccaugggcacugcag

SEQ ID NO: 475042 - RNA, 22 nt, Human
ucucugagacaguagccucugc

SEQ ID NO: 475043 - RNA, 22 nt, Human
uuuauucugugcuacaugaaga

SEQ ID NO: 475044 - RNA, 22 nt, Human
ucuuagaaaugaaguucuuucu

SEQ ID NO: 475045 - RNA, 19 nt, Human
gcauaaaaugucaaugugu

SEQ ID NO: 475046 - RNA, 22 nt, Human
cugagggccuuggcuccugccc

SEQ ID NO: 475047 - RNA, 22 nt, Human
aaauguguguauguacauauau

SEQ ID NO: 475048 - RNA, 22 nt, Human
cucaaguaagaaacagaauugg

SEQ ID NO: 475049 - RNA, 22 nt, Human
cccagcccccgagugucuggaa

SEQ ID NO: 475050 - RNA, 22 nt, Human
uggaggaaucagggcuuaggcu

SEQ ID NO: 475051 - RNA, 22 nt, Human
ccagggccucguguucugagug

SEQ ID NO: 475052 - RNA, 21 nt, Human
ugguggagugugcugagcaug

SEQ ID NO: 475053 - RNA, 22 nt, Human
aaggccugggaguacugggaca

SEQ ID NO: 475054 - RNA, 22 nt, Human
uucucuucaucucaguaaaugu

SEQ ID NO: 475055 - RNA, 22 nt, Human
uggcagcaaguucuugggaggu

SEQ ID NO: 475056 - RNA, 22 nt, Human
cuacauggagaagaaaauucuu

SEQ ID NO: 475057 - RNA, 20 nt, Human
ucucugcuguccacauuugc

SEQ ID NO: 475058 - RNA, 22 nt, Human
caagucaaagacuagaacuagu

SEQ ID NO: 475059 - RNA, 22 nt, Human
ucccagagacaucauuucuccg

SEQ ID NO: 475060 - RNA, 22 nt, Human
uuccucucgcucuccggggccc

SEQ ID NO: 475061 - RNA, 19 nt, Human
acagaaauuaguuauuuuc

SEQ ID NO: 475062 - RNA, 22 nt, Human
cgggcagaucacacagggcuug

SEQ ID NO: 475063 - RNA, 22 nt, Human
gccugucugcagggcugucauu

SEQ ID NO: 475064 - RNA, 22 nt, Human
cagcugaggucaaagaagcagg

SEQ ID NO: 475065 - RNA, 21 nt, Human
aggcucagagagaaacucuug

SEQ ID NO: 475066 - RNA, 22 nt, Human
agucccagugagaugagccacg

SEQ ID NO: 475067 - RNA, 22 nt, Human
cucucugggcccaguuggcacc

SEQ ID NO: 475068 - RNA, 22 nt, Human
acuguacauguaaacauuguca

SEQ ID NO: 475069 - RNA, 22 nt, Human
augguacaaaauguauaaaguc

SEQ ID NO: 475070 - RNA, 20 nt, Human
cccaggugucugaagcucug

SEQ ID NO: 475071 - RNA, 22 nt, Human
ugggcucucuggcaggaaggcu

SEQ ID NO: 475072 - RNA, 22 nt, Human
cugccgagugggucaugaggca

SEQ ID NO: 475073 - RNA, 22 nt, Human
uuggaugaagucuagcuuuagu

SEQ ID NO: 475074 - RNA, 22 nt, Human
uuccucagagggcgcuggggaa

SEQ ID NO: 475075 - RNA, 22 nt, Human
aagacaagcaucaaaucaggca

SEQ ID NO: 475076 - RNA, 22 nt, Human
aagcaauaagccagauuuggau

SEQ ID NO: 475077 - RNA, 22 nt, Human
caaggccugccucuggcagaaa

SEQ ID NO: 475078 - RNA, 22 nt, Human
agggucagagaucggccaugug

SEQ ID NO: 475079 - RNA, 22 nt, Human
aagcugaggcccauggcaaggu

SEQ ID NO: 475080 - RNA, 22 nt, Human
ccaggccucccuuuuccagcca

SEQ ID NO: 475081 - RNA, 22 nt, Human
gaugcugagagguggagggaac

SEQ ID NO: 475082 - RNA, 23 nt, Human
ugggcagcuucugcaugcccacc

SEQ ID NO: 475083 - RNA, 22 nt, Human
gggcagagaaauggacaguugg

SEQ ID NO: 475084 - RNA, 22 nt, Human
gucuuucuuaauucaagugcuu

SEQ ID NO: 475085 - RNA, 22 nt, Human
uguuacacagcagaauagcaag

SEQ ID NO: 475086 - RNA, 22 nt, Human
ucuuugcauggacauguguuuu

SEQ ID NO: 475087 - RNA, 22 nt, Human
uuuucacacaaggugauaaguu

SEQ ID NO: 475088 - RNA, 22 nt, Human
cucugaauggacacuccagugu

SEQ ID NO: 475089 - RNA, 22 nt, Human
ggccacuccgcugcuacuggaa

SEQ ID NO: 475090 - RNA, 22 nt, Human
uccagucauuuccauuguuccc

SEQ ID NO: 475091 - RNA, 21 nt, Human
aagagcuggaucaaggauaag

SEQ ID NO: 475092 - RNA, 19 nt, Human
ugucucugaaagaugagcu

SEQ ID NO: 475093 - RNA, 22 nt, Human
caggcugccgugaagcaggccu

SEQ ID NO: 475094 - RNA, 19 nt, Human
uuagaaacuguugacacug

SEQ ID NO: 475095 - RNA, 22 nt, Human
gccuucagcccugacuggccag

SEQ ID NO: 475096 - RNA, 22 nt, Human
agggugcagaaggagccuagga

SEQ ID NO: 475097 - RNA, 21 nt, Human
aggcagcaggauccagggaca

SEQ ID NO: 475098 - RNA, 22 nt, Human
uuucauaaccucaagcuacagu

SEQ ID NO: 475099 - RNA, 22 nt, Human
uuucuaaaugguggcugcauug

SEQ ID NO: 475100 - RNA, 22 nt, Human
uagauuuuacuucugucauuac

SEQ ID NO: 475101 - RNA, 22 nt, Human
auagucuuagaucagauaaagu

SEQ ID NO: 475102 - RNA, 20 nt, Human
gugccuggagaagaggcugu

SEQ ID NO: 475103 - RNA, 22 nt, Human
gcuucucucucagacugcaagc

SEQ ID NO: 475104 - RNA, 22 nt, Human
cugggaggugcagcaaaaauca

SEQ ID NO: 475105 - RNA, 22 nt, Human
acauguggucaaucuguguagg

SEQ ID NO: 475106 - RNA, 20 nt, Human
ccuccuggucaggugugcag

SEQ ID NO: 475107 - RNA, 22 nt, Human
ggugaaggucuacugugugcca

SEQ ID NO: 475108 - RNA, 22 nt, Human
cccugccuacaggguuuucuuu

SEQ ID NO: 475109 - RNA, 22 nt, Human
ucucagagauucagggagaagu

SEQ ID NO: 475110 - RNA, 22 nt, Human
agggucaggagacacuggcaac

SEQ ID NO: 475111 - RNA, 22 nt, Human
agcugccaucugaagaacugca

SEQ ID NO: 475112 - RNA, 22 nt, Human
ugagcccaggaguaugaggcug

SEQ ID NO: 475113 - RNA, 22 nt, Human
agucccagaucuccauucgguc

SEQ ID NO: 475114 - RNA, 22 nt, Human
agcagggcuucugugccugugc

SEQ ID NO: 475115 - RNA, 22 nt, Human
agcagccaggaaucugcagagc

SEQ ID NO: 475116 - RNA, 22 nt, Human
ugugcauguauugauuuguacc

SEQ ID NO: 475117 - RNA, 22 nt, Human
aucaguuuauacuuauaaaucu

SEQ ID NO: 475118 - RNA, 17 nt, Human
ucaggcugugccuggua

SEQ ID NO: 475119 - RNA, 22 nt, Human
ggaggccaucuggcuggaggcu

SEQ ID NO: 475120 - RNA, 22 nt, Human
uggagccauaacccuuucguac

SEQ ID NO: 475121 - RNA, 17 nt, Human
ugaagaugcauggcagc

SEQ ID NO: 475122 - RNA, 19 nt, Human
caggagagcaugcacuuug

SEQ ID NO: 475123 - RNA, 22 nt, Human
gaggcugcuguuagcccugggc

SEQ ID NO: 475124 - RNA, 18 nt, Human
gccugcaggcacgggggu

SEQ ID NO: 475125 - RNA, 22 nt, Human
uuuucucaggugcuuaucuaag

SEQ ID NO: 475126 - RNA, 22 nt, Human
ggaaaaggccacagggacacau

SEQ ID NO: 475127 - RNA, 22 nt, Human
uuuaaaaucagaugggaguugg

SEQ ID NO: 475128 - RNA, 22 nt, Human
gccagguguccucacagugagg

SEQ ID NO: 475129 - RNA, 19 nt, Human
uggagacugagagugagca

SEQ ID NO: 475130 - RNA, 22 nt, Human
cagcuggaggagcagcuuccag

SEQ ID NO: 475131 - RNA, 22 nt, Human
ucaaaugcacguagagaaaaua

SEQ ID NO: 475132 - RNA, 22 nt, Human
uugauacagcagccugugaucc

SEQ ID NO: 475133 - RNA, 22 nt, Human
cgcugggcgccgaccugcuggc

SEQ ID NO: 475134 - RNA, 22 nt, Human
uagcuuuagaaauauucucaga

SEQ ID NO: 475135 - RNA, 22 nt, Human
acuuucuaggucucaguccuuu

SEQ ID NO: 475136 - RNA, 22 nt, Human
caugucuuuguuaugcucacca

SEQ ID NO: 475137 - RNA, 18 nt, Human
uggcagagugucuguucu

SEQ ID NO: 475138 - RNA, 22 nt, Human
gccucacugcagccccaggaag

SEQ ID NO: 475139 - RNA, 22 nt, Human
ccaggugugauuuggcaguguc

SEQ ID NO: 475140 - RNA, 23 nt, Human
gcagauggccccagagugcugcc

SEQ ID NO: 475141 - RNA, 22 nt, Human
gagacacaaacauuuauuccac

SEQ ID NO: 475142 - RNA, 22 nt, Human
agagcugggacuuggacucaau

SEQ ID NO: 475143 - RNA, 22 nt, Human
gcaguggggcgcugggaguugg

SEQ ID NO: 475144 - RNA, 22 nt, Human
accaggagccacaggaggagcc

SEQ ID NO: 475145 - RNA, 22 nt, Human
acauugaugaaaagguaucauu

SEQ ID NO: 475146 - RNA, 22 nt, Human
cugccaggccuccgcugucccc

SEQ ID NO: 475147 - RNA, 22 nt, Human
agcugcagauucuaucuagaag

SEQ ID NO: 475148 - RNA, 18 nt, Human
ugagagugugugcucuug

SEQ ID NO: 475149 - RNA, 22 nt, Human
guagggacccacagucuauauu

SEQ ID NO: 475150 - RNA, 22 nt, Human
gcugagagcaguguggccuuaa

SEQ ID NO: 475151 - RNA, 22 nt, Human
aagacagaccacgugacagggc

SEQ ID NO: 475152 - RNA, 22 nt, Human
agugggcagcccaggaggucuu

SEQ ID NO: 475153 - RNA, 22 nt, Human
gagggcugaagauuguggcccc

SEQ ID NO: 475154 - RNA, 22 nt, Human
gaaugcacacgugugugcaugc

SEQ ID NO: 475155 - RNA, 22 nt, Human
uuuagggaaauugaggguuaag

SEQ ID NO: 475156 - RNA, 22 nt, Human
uauguuaaauguuugauguuua

SEQ ID NO: 475157 - RNA, 22 nt, Human
gacagggcauggugcagaguuc

SEQ ID NO: 475158 - RNA, 22 nt, Human
acuuaaaaagaaucuuuucacg

SEQ ID NO: 475159 - RNA, 22 nt, Human
aagggcugcauuugauguguca

SEQ ID NO: 475160 - RNA, 22 nt, Human
ggcugcagguugguuggcagcu

SEQ ID NO: 475161 - RNA, 22 nt, Human
agucucagcaagcauggcuagu

SEQ ID NO: 475162 - RNA, 22 nt, Human
ugcacagagagaugagacacgu

SEQ ID NO: 475163 - RNA, 22 nt, Human
acauuugagaugccuuuuaggu

SEQ ID NO: 475164 - RNA, 22 nt, Human
cuguggaccugcucuuagagac

SEQ ID NO: 475165 - RNA, 22 nt, Human
gguggggcccuggcacugguau

SEQ ID NO: 475166 - RNA, 22 nt, Human
ccagggcucaggcucccagugg

SEQ ID NO: 475167 - RNA, 22 nt, Human
ugcucucucaggccuggcccac

SEQ ID NO: 475168 - RNA, 22 nt, Human
cuggccugcugggugagguccu

SEQ ID NO: 475169 - RNA, 22 nt, Human
accaggcugugaagugagacua

SEQ ID NO: 475170 - RNA, 22 nt, Human
agggcuggcuccguuaccuuga

SEQ ID NO: 475171 - RNA, 23 nt, Human
ugggaguguugggaucucugcuc

SEQ ID NO: 475172 - RNA, 22 nt, Human
ugcccugucuaagcugucagua

SEQ ID NO: 475173 - RNA, 22 nt, Human
uagauuucaggcuggcuugcgg

SEQ ID NO: 475174 - RNA, 22 nt, Human
agguauauauucugguccuuau

SEQ ID NO: 475175 - RNA, 22 nt, Human
gggcucuggaaggugcaccaug

SEQ ID NO: 475176 - RNA, 18 nt, Human
aggaagcaggaggaaggc

SEQ ID NO: 475177 - RNA, 22 nt, Human
gaagagcuuaguuguccuagaa

SEQ ID NO: 475178 - RNA, 22 nt, Human
uuauugccugauugaggucauu

SEQ ID NO: 475179 - RNA, 22 nt, Human
aggucaggguauucacgucugu

SEQ ID NO: 475180 - RNA, 22 nt, Human
aaccauuugcaguuacugagac

SEQ ID NO: 475181 - RNA, 22 nt, Human
ugucaaauuuuuauugcaguau

SEQ ID NO: 475182 - RNA, 22 nt, Human
ggaggccauaguuugggaguca

SEQ ID NO: 475183 - RNA, 22 nt, Human
ccugggaggcggagguugcagg

SEQ ID NO: 475184 - RNA, 17 nt, Human
ccuuucucuuucaucuc

SEQ ID NO: 475185 - RNA, 22 nt, Human
ucugcaucauuuuucagagccg

SEQ ID NO: 475186 - RNA, 22 nt, Human
ucaaaugcuguauuguaguaau

SEQ ID NO: 475187 - RNA, 21 nt, Human
ugccagcauguaggcuaguug

SEQ ID NO: 475188 - RNA, 22 nt, Human
aggcugugcacagggcaccugc

SEQ ID NO: 475189 - RNA, 23 nt, Human
ggcacugaagcuacaauggugag

SEQ ID NO: 475190 - RNA, 22 nt, Human
uuuugucuaagaacuuugcaaa

SEQ ID NO: 475191 - RNA, 22 nt, Human
uggcacuggaaucguagccuug

SEQ ID NO: 475192 - RNA, 21 nt, Human
acuuugggcacuuuccugccc

SEQ ID NO: 475193 - RNA, 22 nt, Human
agguggagaagagaugggcagu

SEQ ID NO: 475194 - RNA, 22 nt, Human
cuccucccucuuugccacacau

SEQ ID NO: 475195 - RNA, 22 nt, Human
guuagguagaaguuuacuuuga

SEQ ID NO: 475196 - RNA, 22 nt, Human
agcuggagaauguggaugaucc

SEQ ID NO: 475197 - RNA, 22 nt, Human
gaggagagaagcuaacggugcu

SEQ ID NO: 475198 - RNA, 22 nt, Human
aauuugauucccugcaccuguu

SEQ ID NO: 475199 - RNA, 22 nt, Human
ucacacacauggauaguauuuu

SEQ ID NO: 475200 - RNA, 22 nt, Human
cauugcuguuaauugucucuag

SEQ ID NO: 475201 - RNA, 22 nt, Human
agcuuccuacaaccaucucaga

SEQ ID NO: 475202 - RNA, 22 nt, Human
ggcagggaagcuggcaucacgg

SEQ ID NO: 475203 - RNA, 22 nt, Human
cccucugccugcgcccuggugu

SEQ ID NO: 475204 - RNA, 22 nt, Human
ggcuguggcagcuggaaguggu

SEQ ID NO: 475205 - RNA, 22 nt, Human
uggcucugagacacaggcucuc

SEQ ID NO: 475206 - RNA, 19 nt, Human
ggaugagggucaggcauag

SEQ ID NO: 475207 - RNA, 20 nt, Human
ugaugguucuuuccggguug

SEQ ID NO: 475208 - RNA, 22 nt, Human
gugugccagacaugaugcuaug

SEQ ID NO: 475209 - RNA, 22 nt, Human
caaaggcuuugcuaugaugcau

SEQ ID NO: 475210 - RNA, 22 nt, Human
uccugccucaggcucuggagua

SEQ ID NO: 475211 - RNA, 22 nt, Human
caccugagcacuggggccgccc

SEQ ID NO: 475212 - RNA, 22 nt, Human
gcagccacuaguuuuccuguuu

SEQ ID NO: 475213 - RNA, 22 nt, Human
ugucucagggcagcagcagggg

SEQ ID NO: 475214 - RNA, 23 nt, Human
uccuccuuuugcuugugcuuccc

SEQ ID NO: 475215 - RNA, 22 nt, Human
uguauuccaaaaugcugaggau

SEQ ID NO: 475216 - RNA, 22 nt, Human
auguagcaugaggcacugugcc

SEQ ID NO: 475217 - RNA, 22 nt, Human
uccucuggggcgugguccugga

SEQ ID NO: 475218 - RNA, 22 nt, Human
uggcugaguaaguugugauaug

SEQ ID NO: 475219 - RNA, 22 nt, Human
ugguaaagaaggcuagaucuga

SEQ ID NO: 475220 - RNA, 22 nt, Human
uuucuacagguugauggguuug

SEQ ID NO: 475221 - RNA, 22 nt, Human
uagcugcugcagcacagggagg

SEQ ID NO: 475222 - RNA, 22 nt, Human
gugcaggggccuccccuugcug

SEQ ID NO: 475223 - RNA, 22 nt, Human
cacugaaucucaaggggagggu

SEQ ID NO: 475224 - RNA, 22 nt, Human
caggaccccauauucacugaac

SEQ ID NO: 475225 - RNA, 22 nt, Human
aauuucaagucuugaagaagua

SEQ ID NO: 475226 - RNA, 22 nt, Human
auugucuucuggucuuaucuuu

SEQ ID NO: 475227 - RNA, 22 nt, Human
gggcccuggggccugauuugca

SEQ ID NO: 475228 - RNA, 23 nt, Human
ggacagggcccugcccuauggcc

SEQ ID NO: 475229 - RNA, 22 nt, Human
agucagugaaggcauugcucaa

SEQ ID NO: 475230 - RNA, 22 nt, Human
uugugucugggggagugacauc

SEQ ID NO: 475231 - RNA, 22 nt, Human
uggcagcuacagacagagguga

SEQ ID NO: 475232 - RNA, 22 nt, Human
gcaguggcuaggagucuggcgu

SEQ ID NO: 475233 - RNA, 22 nt, Human
aggcaggugggucacuugaguc

SEQ ID NO: 475234 - RNA, 22 nt, Human
aagcagaaguugaucuaccaua

SEQ ID NO: 475235 - RNA, 17 nt, Human
ccagagcuacugagacu

SEQ ID NO: 475236 - RNA, 22 nt, Human
uccuugaauccuagcauccuau

SEQ ID NO: 475237 - RNA, 22 nt, Human
ucauugcagaaauaaaggugaa

SEQ ID NO: 475238 - RNA, 22 nt, Human
aaugcacaugucuuggccucac

SEQ ID NO: 475239 - RNA, 22 nt, Human
gguggcaggcccugagcauccc

SEQ ID NO: 475240 - RNA, 22 nt, Human
aggagaaggaggccccucacac

SEQ ID NO: 475241 - RNA, 22 nt, Human
ugccacacucacuucuguggac

SEQ ID NO: 475242 - RNA, 19 nt, Human
gaaggcugaaaugaagcac

SEQ ID NO: 475243 - RNA, 19 nt, Human
cagaacagaggucauggcc

SEQ ID NO: 475244 - RNA, 22 nt, Human
cucaaggaaagucuggagaaga

SEQ ID NO: 475245 - RNA, 22 nt, Human
uaccaggcagcugcacagaggc

SEQ ID NO: 475246 - RNA, 22 nt, Human
uggcucaggccacuucuuuuau

SEQ ID NO: 475247 - RNA, 23 nt, Human
caggacaugggaggaaguauggc

SEQ ID NO: 475248 - RNA, 22 nt, Human
cugcccugccuggccagugugg

SEQ ID NO: 475249 - RNA, 22 nt, Human
aagauuucuuacuuauugaugc

SEQ ID NO: 475250 - RNA, 22 nt, Human
ugggcuggagcuuguugcuucc

SEQ ID NO: 475251 - RNA, 22 nt, Human
aaaggcaggcuuucacaucuca

SEQ ID NO: 475252 - RNA, 22 nt, Human
uucccaugccuggccccuaucc

SEQ ID NO: 475253 - RNA, 22 nt, Human
caguacuuauuucuauuuaggg

SEQ ID NO: 475254 - RNA, 22 nt, Human
gcagcugccuauucagggcuug

SEQ ID NO: 475255 - RNA, 22 nt, Human
cugagcugagccaaaucugucu

SEQ ID NO: 475256 - RNA, 22 nt, Human
cuuaauuuaagccuagaaugca

SEQ ID NO: 475257 - RNA, 22 nt, Human
uacccagcuucaagucaggacu

SEQ ID NO: 475258 - RNA, 22 nt, Human
aagggcagaauagagaagaugg

SEQ ID NO: 475259 - RNA, 22 nt, Human
agcagcauguaugagggugaac

SEQ ID NO: 475260 - RNA, 23 nt, Human
uuucauaugguguggaugaagaa

SEQ ID NO: 475261 - RNA, 22 nt, Human
gagagcugugguuugaccaggc

SEQ ID NO: 475262 - RNA, 22 nt, Human
aguggagacaggacagucgaua

SEQ ID NO: 475263 - RNA, 22 nt, Human
cugcagugaaaucaggaagcaa

SEQ ID NO: 475264 - RNA, 22 nt, Human
aaauuuucucucuaagacuuaa

SEQ ID NO: 475265 - RNA, 22 nt, Human
acccucccauuuccauguagca

SEQ ID NO: 475266 - RNA, 22 nt, Human
aaagacugggacugcagcaggc

SEQ ID NO: 475267 - RNA, 22 nt, Human
aagggcuguaagccaaguaaag

SEQ ID NO: 475268 - RNA, 22 nt, Human
aagccagcauuuucccauuccu

SEQ ID NO: 475269 - RNA, 22 nt, Human
cuagaaauacaggcacgugcca

SEQ ID NO: 475270 - RNA, 22 nt, Human
acugugcaaugaguaauaaacu

SEQ ID NO: 475271 - RNA, 22 nt, Human
ccuggcucuguccucgcgcaaa

SEQ ID NO: 475272 - RNA, 22 nt, Human
ucagaagaagagacuccacagc

SEQ ID NO: 475273 - RNA, 22 nt, Human
ugaguucucacccauucuucuu

SEQ ID NO: 475274 - RNA, 22 nt, Human
uuauuauuuuguguacagcaaa

SEQ ID NO: 475275 - RNA, 22 nt, Human
uaaccauauuuuccauuaaguu

SEQ ID NO: 475276 - RNA, 20 nt, Human
ugaaggccagcagcauaggg

SEQ ID NO: 475277 - RNA, 22 nt, Human
auaucuuuguaugguucagcag

SEQ ID NO: 475278 - RNA, 19 nt, Human
uccaggaggcugccauuga

SEQ ID NO: 475279 - RNA, 22 nt, Human
ugccaggggaccuagggauguc

SEQ ID NO: 475280 - RNA, 22 nt, Human
cuugaaagaagggucuuuuaau

SEQ ID NO: 475281 - RNA, 22 nt, Human
ugagcccagagaucugagcuau

SEQ ID NO: 475282 - RNA, 19 nt, Human
ugagcuggcugagccucuc

SEQ ID NO: 475283 - RNA, 22 nt, Human
agaggcugcacuugcucaugau

SEQ ID NO: 475284 - RNA, 22 nt, Human
aauaugcauguauacaugugua

SEQ ID NO: 475285 - RNA, 21 nt, Human
accaucuuccaugcauuauau

SEQ ID NO: 475286 - RNA, 20 nt, Human
ucuggcucuuugcuccuccc

SEQ ID NO: 475287 - RNA, 22 nt, Human
agggcugaguggugcagucaaa

SEQ ID NO: 475288 - RNA, 22 nt, Human
uaaacaucugucauguguuuau

SEQ ID NO: 475289 - RNA, 22 nt, Human
cacaugggcguaauguccaugg

SEQ ID NO: 475290 - RNA, 22 nt, Human
cugagccacugcuuguucagug

SEQ ID NO: 475291 - RNA, 23 nt, Human
gccaggcacaugguggacacgca

SEQ ID NO: 475292 - RNA, 22 nt, Human
caggagcaaggagcagugggau

SEQ ID NO: 475293 - RNA, 22 nt, Human
aaagaacaucggagugggcggg

SEQ ID NO: 475294 - RNA, 22 nt, Human
ugccucagucuaaagucucuca

SEQ ID NO: 475295 - RNA, 22 nt, Human
cugcagaggucuugcugauggu

SEQ ID NO: 475296 - RNA, 22 nt, Human
uucaggaucauuuguuuuaucu

SEQ ID NO: 475297 - RNA, 22 nt, Human
ggagaccagaaggaagcuucga

SEQ ID NO: 475298 - RNA, 22 nt, Human
ggaaagaggauaguggguaggu

SEQ ID NO: 475299 - RNA, 22 nt, Human
cagaccucaguccucaguagga

SEQ ID NO: 475300 - RNA, 21 nt, Human
cuugaaagguagagucuacag

SEQ ID NO: 475301 - RNA, 22 nt, Human
agccacagcauguguguaugua

SEQ ID NO: 475302 - RNA, 22 nt, Human
uuucaauguaacauuuccaggc

SEQ ID NO: 475303 - RNA, 22 nt, Human
gcuccucuccucggagucgggg

SEQ ID NO: 475304 - RNA, 22 nt, Human
ggacaggaugcugaagaugaag

SEQ ID NO: 475305 - RNA, 22 nt, Human
gaaacuuuuaaaccucaugagu

SEQ ID NO: 475306 - RNA, 22 nt, Human
aacuguaagacaaaugacuucu

SEQ ID NO: 475307 - RNA, 22 nt, Human
uacagaagcugagacacugaga

SEQ ID NO: 475308 - RNA, 22 nt, Human
gagggucccgagcccugucaga

SEQ ID NO: 475309 - RNA, 22 nt, Human
uacuuacagagcuuauaaguua

SEQ ID NO: 475310 - RNA, 22 nt, Human
gccucaggacuggcauacucau

SEQ ID NO: 475311 - RNA, 22 nt, Human
ucaggauguccaaaauccagcc

SEQ ID NO: 475312 - RNA, 22 nt, Human
uguaccuuuuucugugcaugcu

SEQ ID NO: 475313 - RNA, 22 nt, Human
cagugcagccaaggacaggcac

SEQ ID NO: 475314 - RNA, 22 nt, Human
auacaagaucacuccagaaaau

SEQ ID NO: 475315 - RNA, 22 nt, Human
auuauuaggacuacugggguug

SEQ ID NO: 475316 - RNA, 22 nt, Human
gcaggagagccagcaggcuucc

SEQ ID NO: 475317 - RNA, 22 nt, Human
aaaugcaauuguauguacucca

SEQ ID NO: 475318 - RNA, 22 nt, Human
uggcagaggcucugugauguug

SEQ ID NO: 475319 - RNA, 22 nt, Human
cugcugugaguuuggaggucua

SEQ ID NO: 475320 - RNA, 22 nt, Human
cagcugagucugagguucuuug

SEQ ID NO: 475321 - RNA, 22 nt, Human
agggcugcaucugccuggugaa

SEQ ID NO: 475322 - RNA, 18 nt, Human
gggcuguguucaugccca

SEQ ID NO: 475323 - RNA, 22 nt, Human
uaauacuuaccuugcagagucu

SEQ ID NO: 475324 - RNA, 20 nt, Human
acagaauaugcugguugugg

SEQ ID NO: 475325 - RNA, 22 nt, Human
uccaaaaaacguuugaauaguu

SEQ ID NO: 475326 - RNA, 22 nt, Human
ucuucucaguuucucuaggaug

SEQ ID NO: 475327 - RNA, 22 nt, Human
uucuaguugagggagacaaaua

SEQ ID NO: 475328 - RNA, 22 nt, Human
auaucacaaacaagucuguacu

SEQ ID NO: 475329 - RNA, 22 nt, Human
ugcccagggauaagccuagaga

SEQ ID NO: 475330 - RNA, 23 nt, Human
agcuucauugaccuccgcagggg

SEQ ID NO: 475331 - RNA, 21 nt, Human
gaugaagcaaucuuucuguug

SEQ ID NO: 475332 - RNA, 22 nt, Human
gcaccuggcugcccagguggag

SEQ ID NO: 475333 - RNA, 22 nt, Human
augaggcagaaaaaagucggag

SEQ ID NO: 475334 - RNA, 20 nt, Human
agaggccaguuaggagucua

SEQ ID NO: 475335 - RNA, 22 nt, Human
aagggcuccacuugaaucacac

SEQ ID NO: 475336 - RNA, 22 nt, Human
ucuuuugugauucuucaguuac

SEQ ID NO: 475337 - RNA, 22 nt, Human
uggagcugacucacaccagcua

SEQ ID NO: 475338 - RNA, 22 nt, Human
gcagcguggggacaggagcuca

SEQ ID NO: 475339 - RNA, 22 nt, Human
agcugaaggcuagaacagcugg

SEQ ID NO: 475340 - RNA, 22 nt, Human
ccaggcaggcuagaauguaaau

SEQ ID NO: 475341 - RNA, 22 nt, Human
agggucagugaugagggagccc

SEQ ID NO: 475342 - RNA, 22 nt, Human
ccuuugggugaauuccucucuu

SEQ ID NO: 475343 - RNA, 22 nt, Human
uggcucagcaagacauugaccu

SEQ ID NO: 475344 - RNA, 22 nt, Human
uggcugccuuucaccucaucuc

SEQ ID NO: 475345 - RNA, 22 nt, Human
ucuuuauuuaagucuguuguaa

SEQ ID NO: 475346 - RNA, 22 nt, Human
auucaaguucuucugucuuugc

SEQ ID NO: 475347 - RNA, 22 nt, Human
aaaagagguuaaccaggugugu

SEQ ID NO: 475348 - RNA, 22 nt, Human
ccagcugcaggggagcagugga

SEQ ID NO: 475349 - RNA, 22 nt, Human
uuuagggacaagggucuggggu

SEQ ID NO: 475350 - RNA, 22 nt, Human
acagggcagugucuugaaaaau

SEQ ID NO: 475351 - RNA, 22 nt, Human
ccugcccuagagaugacacaau

SEQ ID NO: 475352 - RNA, 22 nt, Human
ucuuuauuucugaaucccccau

SEQ ID NO: 475353 - RNA, 22 nt, Human
ggcaggagauaaaauauuaguu

SEQ ID NO: 475354 - RNA, 19 nt, Human
ucucagagcccuagaggcc

SEQ ID NO: 475355 - RNA, 22 nt, Human
aaagucaaaaugcucuccuguc

SEQ ID NO: 475356 - RNA, 22 nt, Human
aauuuuauuagaaggcaagggg

SEQ ID NO: 475357 - RNA, 22 nt, Human
aaaugaacucuuccugcauccc

SEQ ID NO: 475358 - RNA, 22 nt, Human
uaaggcacccauguucauacag

SEQ ID NO: 475359 - RNA, 22 nt, Human
uucaggaugcucagaguagucu

SEQ ID NO: 475360 - RNA, 22 nt, Human
cucuccuccaacagcccugccg

SEQ ID NO: 475361 - RNA, 21 nt, Human
gcugcugccccuagugaggcc

SEQ ID NO: 475362 - RNA, 22 nt, Human
gcucagagauguucaguagcuu

SEQ ID NO: 475363 - RNA, 19 nt, Human
ugccuggcaccagcuccac

SEQ ID NO: 475364 - RNA, 22 nt, Human
aaaggccaccaacaugaagcau

SEQ ID NO: 475365 - RNA, 22 nt, Human
aagccacugagauuucacugca

SEQ ID NO: 475366 - RNA, 22 nt, Human
ggcugaaggaugaaagcugcag

SEQ ID NO: 475367 - RNA, 22 nt, Human
gcaggcagucaucuuucauauu

SEQ ID NO: 475368 - RNA, 22 nt, Human
ucuuacauauagcaugaguaca

SEQ ID NO: 475369 - RNA, 23 nt, Human
ugucauugugacuacagaaccag

SEQ ID NO: 475370 - RNA, 22 nt, Human
cuggcucauccagguguugcuc

SEQ ID NO: 475371 - RNA, 22 nt, Human
gccaccagcagaaaaggggcca

SEQ ID NO: 475372 - RNA, 22 nt, Human
cucuggagcgcugcuucccgcg

SEQ ID NO: 475373 - RNA, 22 nt, Human
acuuuggaucugauguaaucag

SEQ ID NO: 475374 - RNA, 22 nt, Human
cagggccuuauccugccauuga

SEQ ID NO: 475375 - RNA, 22 nt, Human
ugaagccaucccucagauggcc

SEQ ID NO: 475376 - RNA, 22 nt, Human
cucaggaugaaagucaugguga

SEQ ID NO: 475377 - RNA, 22 nt, Human
uagcagggaagaugaucagaau

SEQ ID NO: 475378 - RNA, 22 nt, Human
auuaaaagcuucccaagaguua

SEQ ID NO: 475379 - RNA, 22 nt, Human
ccuggagcuuuuccauccugga

SEQ ID NO: 475380 - RNA, 19 nt, Human
agugaaauggaguauucaa

SEQ ID NO: 475381 - RNA, 22 nt, Human
aaaguguacuaugucaugaaca

SEQ ID NO: 475382 - RNA, 22 nt, Human
ccagaggcuggguucaccucag

SEQ ID NO: 475383 - RNA, 22 nt, Human
agccacagagguugaugugguu

SEQ ID NO: 475384 - RNA, 22 nt, Human
gccugccuagaauugcagcuuu

SEQ ID NO: 475385 - RNA, 22 nt, Human
ucugccuggauuuuggaaagcu

SEQ ID NO: 475386 - RNA, 22 nt, Human
cauccaggcaccacaaccagcu

SEQ ID NO: 475387 - RNA, 22 nt, Human
agacaggcagaggcugcagagg

SEQ ID NO: 475388 - RNA, 22 nt, Human
uaaauguguguagccaucugug

SEQ ID NO: 475389 - RNA, 22 nt, Human
gugccagggggcacugaacaga

SEQ ID NO: 475390 - RNA, 22 nt, Human
cuuaaagaugucaaggcuguuu

SEQ ID NO: 475391 - RNA, 22 nt, Human
uuagccauuuuauacaagugua

SEQ ID NO: 475392 - RNA, 21 nt, Human
uaagaacauuaucuucuuccu

SEQ ID NO: 475393 - RNA, 22 nt, Human
gagcagggccacuucuguaccu

SEQ ID NO: 475394 - RNA, 22 nt, Human
cuggagcagguuuaggaguccc

SEQ ID NO: 475395 - RNA, 22 nt, Human
agaagcaguuauuuuuugcaca

SEQ ID NO: 475396 - RNA, 22 nt, Human
ggcagagcuugcagugagccga

SEQ ID NO: 475397 - RNA, 22 nt, Human
ugcugccuugaccuccugggcu

SEQ ID NO: 475398 - RNA, 22 nt, Human
ugaagccaucaggaagccagca

SEQ ID NO: 475399 - RNA, 22 nt, Human
gcucugucauuuugcagacacu

SEQ ID NO: 475400 - RNA, 22 nt, Human
ucagccagguaauguggagaug

SEQ ID NO: 475401 - RNA, 20 nt, Human
aggcucagagcaguaguaca

SEQ ID NO: 475402 - RNA, 22 nt, Human
aaggguggauuucugagcucua

SEQ ID NO: 475403 - RNA, 22 nt, Human
ucugggagggagccucagaauc

SEQ ID NO: 475404 - RNA, 22 nt, Human
uggccucugugggagcugagca

SEQ ID NO: 475405 - RNA, 22 nt, Human
uaaggccaauuaacaaccaggg

SEQ ID NO: 475406 - RNA, 22 nt, Human
cagcuggcagcccuggcccugc

SEQ ID NO: 475407 - RNA, 22 nt, Human
cucuggccagagccugcgggaa

SEQ ID NO: 475408 - RNA, 20 nt, Human
ugcuuuaugcuauacuuugu

SEQ ID NO: 475409 - RNA, 22 nt, Human
cuccagggaggucugcaggacu

SEQ ID NO: 475410 - RNA, 22 nt, Human
gcuggccauucucuuugagaug

SEQ ID NO: 475411 - RNA, 22 nt, Human
ccacacagucaguuuccaagaa

SEQ ID NO: 475412 - RNA, 22 nt, Human
gggccaugagagguucaucaac

SEQ ID NO: 475413 - RNA, 22 nt, Human
ucuggcucaggagcuguguuca

SEQ ID NO: 475414 - RNA, 23 nt, Human
gcugucaguuguuuuugucucua

SEQ ID NO: 475415 - RNA, 22 nt, Human
uuugaaagccuggcuuuucucu

SEQ ID NO: 475416 - RNA, 20 nt, Human
gaguuccccauuucuccugg

SEQ ID NO: 475417 - RNA, 22 nt, Human
acagagguguuccagaccuagg

SEQ ID NO: 475418 - RNA, 22 nt, Human
uagggcaguuucauguuaucuu

SEQ ID NO: 475419 - RNA, 23 nt, Human
cccagcuuucccacugccgagag

SEQ ID NO: 475420 - RNA, 22 nt, Human
cugggggcaagcagacagcugu

SEQ ID NO: 475421 - RNA, 22 nt, Human
ugcucuggguccugggccuccu

SEQ ID NO: 475422 - RNA, 22 nt, Human
cagggccaagccccuuuggcug

SEQ ID NO: 475423 - RNA, 22 nt, Human
ggcugccugcuccuccugcacg

SEQ ID NO: 475424 - RNA, 22 nt, Human
gcacugaaaauguuggauucca

SEQ ID NO: 475425 - RNA, 22 nt, Human
cagagccagcuguccuuggcau

SEQ ID NO: 475426 - RNA, 22 nt, Human
ugagcuggaaucuucuugacug

SEQ ID NO: 475427 - RNA, 22 nt, Human
agauguuccagccaaugggaau

SEQ ID NO: 475428 - RNA, 22 nt, Human
ugggaauggaugcuaagugcua

SEQ ID NO: 475429 - RNA, 20 nt, Human
ucacauccucucccaacaug

SEQ ID NO: 475430 - RNA, 22 nt, Human
uuucauaauacuguacaugaaa

SEQ ID NO: 475431 - RNA, 22 nt, Human
aagacuuucucccaaauccuca

SEQ ID NO: 475432 - RNA, 22 nt, Human
ggucccugaagaggccuggggu

SEQ ID NO: 475433 - RNA, 18 nt, Human
aggcccuggccucgaaca

SEQ ID NO: 475434 - RNA, 19 nt, Human
ucucacaucagcuccuagc

SEQ ID NO: 475435 - RNA, 22 nt, Human
gggcugcuuuuaagggucucag

SEQ ID NO: 475436 - RNA, 22 nt, Human
caaggccaguucaccaagggca

SEQ ID NO: 475437 - RNA, 22 nt, Human
ggcagcaggagccaucugguag

SEQ ID NO: 475438 - RNA, 22 nt, Human
ugcuuuauuuuaaauaugccau

SEQ ID NO: 475439 - RNA, 22 nt, Human
agucaguggcuccgagccuggu

SEQ ID NO: 475440 - RNA, 22 nt, Human
uggccacccagcugacgccuuc

SEQ ID NO: 475441 - RNA, 22 nt, Human
ccauuguaaagaguauacuuug

SEQ ID NO: 475442 - RNA, 22 nt, Human
aaggugugaagagaugggaaga

SEQ ID NO: 475443 - RNA, 23 nt, Human
uugucugugcuuuuccaguugcu

SEQ ID NO: 475444 - RNA, 22 nt, Human
guggcugcagagccagcaagcu

SEQ ID NO: 475445 - RNA, 22 nt, Human
uaaaacugcuugguauggucua

SEQ ID NO: 475446 - RNA, 22 nt, Human
uggccuggaaccuggcagggac

SEQ ID NO: 475447 - RNA, 22 nt, Human
ccuggcagcuaagugcuuugag

SEQ ID NO: 475448 - RNA, 22 nt, Human
ggagcugaaggggugggcucag

SEQ ID NO: 475449 - RNA, 22 nt, Human
ugagccuguccugugcauguga

SEQ ID NO: 475450 - RNA, 22 nt, Human
ugagggcugcuuccagagcuag

SEQ ID NO: 475451 - RNA, 23 nt, Human
aggcugcagaagaauagggucau

SEQ ID NO: 475452 - RNA, 22 nt, Human
gcaucuuucuguccauucagca

SEQ ID NO: 475453 - RNA, 23 nt, Human
cauuucugggagauuuauaaaau

SEQ ID NO: 475454 - RNA, 22 nt, Human
caaauguguaaggaaguguuag

SEQ ID NO: 475455 - RNA, 22 nt, Human
ucugccugcggcugcagguggc

SEQ ID NO: 475456 - RNA, 22 nt, Human
uuguuucauggggauguuuauu

SEQ ID NO: 475457 - RNA, 22 nt, Human
aggaaaaauaaggcagcagggc

SEQ ID NO: 475458 - RNA, 22 nt, Human
ucugucuccucugaggugccag

SEQ ID NO: 475459 - RNA, 20 nt, Human
gggcuagaccagggcagagg

SEQ ID NO: 475460 - RNA, 22 nt, Human
ucucccaguggugcagaaagca

SEQ ID NO: 475461 - RNA, 22 nt, Human
auggcagggcagccucucagag

SEQ ID NO: 475462 - RNA, 22 nt, Human
uccagcuggggcaguggcuggg

SEQ ID NO: 475463 - RNA, 22 nt, Human
ggaggggcagccauggaacucc

SEQ ID NO: 475464 - RNA, 20 nt, Human
gccagcccugacacaggagc

SEQ ID NO: 475465 - RNA, 22 nt, Human
ggcagcugggucacaccgaucu

SEQ ID NO: 475466 - RNA, 22 nt, Human
ccagggcugcugugggacucca

SEQ ID NO: 475467 - RNA, 22 nt, Human
cuucagaacuauaaaaaguacu

SEQ ID NO: 475468 - RNA, 20 nt, Human
gagggcaggcacccauuuca

SEQ ID NO: 475469 - RNA, 22 nt, Human
acaugucaauuuaguacucuua

SEQ ID NO: 475470 - RNA, 22 nt, Human
uccugggagagugggacuguau

SEQ ID NO: 475471 - RNA, 22 nt, Human
gcaaggcugcugccacccaucu

SEQ ID NO: 475472 - RNA, 22 nt, Human
acauccagaucucagcauggcu

SEQ ID NO: 475473 - RNA, 22 nt, Human
ugcugggcuagaagcugaggcc

SEQ ID NO: 475474 - RNA, 22 nt, Human
aucugccucuucuucauugcga

SEQ ID NO: 475475 - RNA, 22 nt, Human
ugaauaugugacuuugauuuca

SEQ ID NO: 475476 - RNA, 22 nt, Human
uagcagaaccagcagucaauuu

SEQ ID NO: 475477 - RNA, 22 nt, Human
cagucucucugaaguauuaaga

SEQ ID NO: 475478 - RNA, 22 nt, Human
augcugugucaggaauuugaua

SEQ ID NO: 475479 - RNA, 22 nt, Human
ggucagagggugggcugccugu

SEQ ID NO: 475480 - RNA, 22 nt, Human
uucauguguauggaacauuuuu

SEQ ID NO: 475481 - RNA, 22 nt, Human
ggcuggcuuucucuccgcaccu

SEQ ID NO: 475482 - RNA, 21 nt, Human
uccucugcucucauaccacaa

SEQ ID NO: 475483 - RNA, 22 nt, Human
acaaaaagcuccauuacugucc

SEQ ID NO: 475484 - RNA, 22 nt, Human
ggucucagcaguugcuuugacu

SEQ ID NO: 475485 - RNA, 22 nt, Human
ugcaauaaguuguguuaucacu

SEQ ID NO: 475486 - RNA, 22 nt, Human
uggcagaguucgcuccuauuca

SEQ ID NO: 475487 - RNA, 22 nt, Human
gguuggaggugggaauagcuag

SEQ ID NO: 475488 - RNA, 20 nt, Human
gccugccucagcuagcugag

SEQ ID NO: 475489 - RNA, 22 nt, Human
ccagcuggucugugcucauguu

SEQ ID NO: 475490 - RNA, 22 nt, Human
cagaggcucaccagccuuucac

SEQ ID NO: 475491 - RNA, 22 nt, Human
cuggggcuggugaggcaggcuc

SEQ ID NO: 475492 - RNA, 21 nt, Human
ggcuuuaugcucacccagccu

SEQ ID NO: 475493 - RNA, 22 nt, Human
gcagagaguugggcugcgccag

SEQ ID NO: 475494 - RNA, 22 nt, Human
aagagcuggcccaaucugagca

SEQ ID NO: 475495 - RNA, 22 nt, Human
cagaguggcacucugcuggaug

SEQ ID NO: 475496 - RNA, 19 nt, Human
gcaggguguugacuguccc

SEQ ID NO: 475497 - RNA, 22 nt, Human
uggaaagacauucagccgcugg

SEQ ID NO: 475498 - RNA, 22 nt, Human
ucuuagcauuucauaacaacug

SEQ ID NO: 475499 - RNA, 22 nt, Human
aagcagaauuuaauagaaaggu

SEQ ID NO: 475500 - RNA, 22 nt, Human
gccagagguaucaaagauagua

SEQ ID NO: 475501 - RNA, 22 nt, Human
aagggcucccugccugaggugg

SEQ ID NO: 475502 - RNA, 22 nt, Human
aucgagggugaguacagcggac

SEQ ID NO: 475503 - RNA, 22 nt, Human
cauggcagagaaggggaacugg

SEQ ID NO: 475504 - RNA, 22 nt, Human
aaccugcaguuuuuauucugag

SEQ ID NO: 475505 - RNA, 22 nt, Human
uuacaagauaaccugaugcugu

SEQ ID NO: 475506 - RNA, 22 nt, Human
auguggaggaaaugaguguaca

SEQ ID NO: 475507 - RNA, 22 nt, Human
caaggccagagccagcgauaag

SEQ ID NO: 475508 - RNA, 22 nt, Human
uccucagggggccaacccagcc

SEQ ID NO: 475509 - RNA, 22 nt, Human
aaugcuguaaagaugcuaucug

SEQ ID NO: 475510 - RNA, 22 nt, Human
agugcacuggcaccaucucagc

SEQ ID NO: 475511 - RNA, 22 nt, Human
auguguccacaggugugagaga

SEQ ID NO: 475512 - RNA, 20 nt, Human
gccuggaggcagagauaaag

SEQ ID NO: 475513 - RNA, 22 nt, Human
aggagccccucuucaguccugg

SEQ ID NO: 475514 - RNA, 22 nt, Human
aacacuguacuggaagauggac

SEQ ID NO: 475515 - RNA, 22 nt, Human
ugucagugguagacccagaggu

SEQ ID NO: 475516 - RNA, 17 nt, Human
agauggcaggaggcaga

SEQ ID NO: 475517 - RNA, 22 nt, Human
ccuuucucuuugcugaucaugu

SEQ ID NO: 475518 - RNA, 22 nt, Human
aucugccugagucuagguuuuc

SEQ ID NO: 475519 - RNA, 21 nt, Human
gggagcuggaaacugggugac

SEQ ID NO: 475520 - RNA, 22 nt, Human
gcaggagcagucaggggcagcu

SEQ ID NO: 475521 - RNA, 22 nt, Human
accugagaaugggggcaugugu

SEQ ID NO: 475522 - RNA, 22 nt, Human
ugucccagguccuagaugacca

SEQ ID NO: 475523 - RNA, 22 nt, Human
ccagggucucugcugccugaga

SEQ ID NO: 475524 - RNA, 22 nt, Human
ggcugccuucagacuccagcuu

SEQ ID NO: 475525 - RNA, 22 nt, Human
agccccaguaagggagggccug

SEQ ID NO: 475526 - RNA, 22 nt, Human
agauuuccaucuuuuucaugug

SEQ ID NO: 475527 - RNA, 22 nt, Human
ucuuuacaaucuaagcauaguu

SEQ ID NO: 475528 - RNA, 22 nt, Human
caguggaaaucagagugagagu

SEQ ID NO: 475529 - RNA, 22 nt, Human
ucucccacgguacaggauaaac

SEQ ID NO: 475530 - RNA, 18 nt, Human
gaaaggagagacaguagg

SEQ ID NO: 475531 - RNA, 22 nt, Human
cagguaggauggaagggcucaa

SEQ ID NO: 475532 - RNA, 23 nt, Human
ccuccugggcacaggccugaugg

SEQ ID NO: 475533 - RNA, 20 nt, Human
ccaggcacugucccaugcag

SEQ ID NO: 475534 - RNA, 22 nt, Human
gugcucuccuggcugcccugac

SEQ ID NO: 475535 - RNA, 22 nt, Human
aagaauucacugguagagucaa

SEQ ID NO: 475536 - RNA, 22 nt, Human
cagacagacagccguggccacc

SEQ ID NO: 475537 - RNA, 22 nt, Human
cccagugccaggcacaggcagc

SEQ ID NO: 475538 - RNA, 22 nt, Human
acuaaaaacuacugccaauagc

SEQ ID NO: 475539 - RNA, 22 nt, Human
gccugcuggcuguccauugcag

SEQ ID NO: 475540 - RNA, 22 nt, Human
cucuggagguggagguugcagu

SEQ ID NO: 475541 - RNA, 22 nt, Human
ucucagagagaugaaacuucca

SEQ ID NO: 475542 - RNA, 22 nt, Human
cccagggacagcuagguggggc

SEQ ID NO: 475543 - RNA, 22 nt, Human
uggcccugaggggcugugcccc

SEQ ID NO: 475544 - RNA, 22 nt, Human
ccuggcugggguagaagugagg

SEQ ID NO: 475545 - RNA, 22 nt, Human
gagggccaacuagcaccacuuu

SEQ ID NO: 475546 - RNA, 22 nt, Human
gucagcagugucagcucugggg

SEQ ID NO: 475547 - RNA, 22 nt, Human
gaaagacauaguugcaagaugg

SEQ ID NO: 475548 - RNA, 22 nt, Human
guggccucuguuggcuccuagg

SEQ ID NO: 475549 - RNA, 22 nt, Human
uggcugagggggcucugcucag

SEQ ID NO: 475550 - RNA, 22 nt, Human
guuucauuaccugacccaugag

SEQ ID NO: 475551 - RNA, 22 nt, Human
uggaaagaaaguaaaggcguau

SEQ ID NO: 475552 - RNA, 22 nt, Human
ccagcuuuggaguguuguugcu

SEQ ID NO: 475553 - RNA, 22 nt, Human
ccaagaugaucuuuacaguguu

SEQ ID NO: 475554 - RNA, 20 nt, Human
cuguccccgaggucaccagg

SEQ ID NO: 475555 - RNA, 22 nt, Human
aaguccagugcuuuagauucca

SEQ ID NO: 475556 - RNA, 22 nt, Human
uaacagaauuugcuaaacuccg

SEQ ID NO: 475557 - RNA, 19 nt, Human
cucugccucuggcuguggc

SEQ ID NO: 475558 - RNA, 22 nt, Human
gcaguguuguuaaaagauuaga

SEQ ID NO: 475559 - RNA, 22 nt, Human
gaagcccagggcguggccgggc

SEQ ID NO: 475560 - RNA, 22 nt, Human
ccucccacauugaggacaugcu

SEQ ID NO: 475561 - RNA, 22 nt, Human
aaaguguagagacuuuggaacc

SEQ ID NO: 475562 - RNA, 22 nt, Human
cugaaggauuuaguucuuugcu

SEQ ID NO: 475563 - RNA, 22 nt, Human
aaaugugucauauucaaaguca

SEQ ID NO: 475564 - RNA, 22 nt, Human
gccuucugcgcucgugucuccg

SEQ ID NO: 475565 - RNA, 22 nt, Human
ggcucaccauuuucacucucug

SEQ ID NO: 475566 - RNA, 22 nt, Human
uggcugcucaagggaggaggcu

SEQ ID NO: 475567 - RNA, 22 nt, Human
aggcugugauuccaccacucuc

SEQ ID NO: 475568 - RNA, 22 nt, Human
cacaggaaugaacagggaaaga

SEQ ID NO: 475569 - RNA, 22 nt, Human
gcagggaggaagagaugcuucc

SEQ ID NO: 475570 - RNA, 17 nt, Human
ugagaaguaggcaucau

SEQ ID NO: 475571 - RNA, 22 nt, Human
gccaggcucucagugacugccc

SEQ ID NO: 475572 - RNA, 22 nt, Human
guccucaggaaagcagauaaca

SEQ ID NO: 475573 - RNA, 22 nt, Human
auccuuggaugugucuuuuugu

SEQ ID NO: 475574 - RNA, 22 nt, Human
auuugucucugcacuuuacuca

SEQ ID NO: 475575 - RNA, 22 nt, Human
ggaaggucgagcugcaucuggc

SEQ ID NO: 475576 - RNA, 22 nt, Human
gauacauuuuaucuccuaacag

SEQ ID NO: 475577 - RNA, 22 nt, Human
cccagccagccucuucccauau

SEQ ID NO: 475578 - RNA, 22 nt, Human
agagagcccgggccagggcaca

SEQ ID NO: 475579 - RNA, 22 nt, Human
aguugaagguuggcugauccau

SEQ ID NO: 475580 - RNA, 22 nt, Human
agggccucugacgcccccagcc

SEQ ID NO: 475581 - RNA, 22 nt, Human
aucuaagauguauugagcacuu

SEQ ID NO: 475582 - RNA, 22 nt, Human
ucucuggaagcgcagaucuguu

SEQ ID NO: 475583 - RNA, 21 nt, Human
aggaaguggccagauugggaa

SEQ ID NO: 475584 - RNA, 22 nt, Human
ugguaauuaauuugauagguuc

SEQ ID NO: 475585 - RNA, 22 nt, Human
uuguuuucuccacugcaucuua

SEQ ID NO: 475586 - RNA, 19 nt, Human
agccuggcuuugcucugcu

SEQ ID NO: 475587 - RNA, 22 nt, Human
aggcacugugcugaugucuuau

SEQ ID NO: 475588 - RNA, 22 nt, Human
cuggaagguuccucccagcucc

SEQ ID NO: 475589 - RNA, 22 nt, Human
acacuacaaucucagaacuaua

SEQ ID NO: 475590 - RNA, 21 nt, Human
uggccucccacacuuccaugg

SEQ ID NO: 475591 - RNA, 22 nt, Human
gugccagcucuccccacaucug

SEQ ID NO: 475592 - RNA, 22 nt, Human
guauuugauagauuucaaagga

SEQ ID NO: 475593 - RNA, 22 nt, Human
uaugcacauuaucuaauccauu

SEQ ID NO: 475594 - RNA, 22 nt, Human
caggggaaggagccuugaaacu

SEQ ID NO: 475595 - RNA, 22 nt, Human
cagagcugcaaaugccccuccg

SEQ ID NO: 475596 - RNA, 22 nt, Human
gcaguccaaaguggcucucacc

SEQ ID NO: 475597 - RNA, 22 nt, Human
gugugcaggccacaggccaggg

SEQ ID NO: 475598 - RNA, 23 nt, Human
uuccuuaacuguuaagauugucu

SEQ ID NO: 475599 - RNA, 22 nt, Human
gggacagaaggaagugagcaca

SEQ ID NO: 475600 - RNA, 22 nt, Human
gagcagugaagacagaaguaca

SEQ ID NO: 475601 - RNA, 22 nt, Human
ccagcucccugaagccuggucu

SEQ ID NO: 475602 - RNA, 22 nt, Human
uagcuuuacaaagugcugcacc

SEQ ID NO: 475603 - RNA, 22 nt, Human
gccuuugcaccaucagugcaau

SEQ ID NO: 475604 - RNA, 22 nt, Human
accaggcacucuuguggcagug

SEQ ID NO: 475605 - RNA, 22 nt, Human
gccucccuguucuuccacaaua

SEQ ID NO: 475606 - RNA, 22 nt, Human
ccgggcgggggcucucgucacc

SEQ ID NO: 475607 - RNA, 22 nt, Human
uaagaacauaaauucauacggg

SEQ ID NO: 475608 - RNA, 22 nt, Human
cagaggaggccaccgcauaggc

SEQ ID NO: 475609 - RNA, 22 nt, Human
ucaaagucauggcuaguaauga

SEQ ID NO: 475610 - RNA, 22 nt, Human
uaggcugggaagaaagauucuc

SEQ ID NO: 475611 - RNA, 22 nt, Human
acugcagcaaagcccgugucuu

SEQ ID NO: 475612 - RNA, 22 nt, Human
uguccucuaauuggccucuugc

SEQ ID NO: 475613 - RNA, 22 nt, Human
ugauuucaaguagugacaugcu

SEQ ID NO: 475614 - RNA, 20 nt, Human
gccugcagagaaggucagag

SEQ ID NO: 475615 - RNA, 22 nt, Human
caggaacagcaccaggagcuag

SEQ ID NO: 475616 - RNA, 18 nt, Human
acaaauguagugucuuaa

SEQ ID NO: 475617 - RNA, 22 nt, Human
aggccugggacgggagccguga

SEQ ID NO: 475618 - RNA, 22 nt, Human
acagggccagccugggaccugg

SEQ ID NO: 475619 - RNA, 22 nt, Human
cugucaguaggcucccaucauu

SEQ ID NO: 475620 - RNA, 17 nt, Human
gagccacccugugcgag

SEQ ID NO: 475621 - RNA, 22 nt, Human
uugcagaggcaaaaaugaacuc

SEQ ID NO: 475622 - RNA, 22 nt, Human
uacccaggagaaacagcagggc

SEQ ID NO: 475623 - RNA, 22 nt, Human
aaagaguucuaugaucuuucca

SEQ ID NO: 475624 - RNA, 21 nt, Human
gcacagggacagaucaucaca

SEQ ID NO: 475625 - RNA, 22 nt, Human
uggcugagccacuuguucagau

SEQ ID NO: 475626 - RNA, 22 nt, Human
aagcuuuaaggaauuuuaugga

SEQ ID NO: 475627 - RNA, 22 nt, Human
gaggcucagagggagcaugguc

SEQ ID NO: 475628 - RNA, 22 nt, Human
ucucaggggauucacuggcacc

SEQ ID NO: 475629 - RNA, 22 nt, Human
gcagcauuucucaaaggguggu

SEQ ID NO: 475630 - RNA, 22 nt, Human
gccagccugugcuuggccaggc

SEQ ID NO: 475631 - RNA, 21 nt, Human
gcagccagccgagaccaugcc

SEQ ID NO: 475632 - RNA, 22 nt, Human
gccugggagugcacagugaggu

SEQ ID NO: 475633 - RNA, 22 nt, Human
cagcagcagccccaggaagguu

SEQ ID NO: 475634 - RNA, 22 nt, Human
gccucuggucccucaugcugug

SEQ ID NO: 475635 - RNA, 22 nt, Human
gaucauuuacuuguucuggacu

SEQ ID NO: 475636 - RNA, 22 nt, Human
cagaagaauggugucugagcuc

SEQ ID NO: 475637 - RNA, 22 nt, Human
uaggugugggcucaggaaugug

SEQ ID NO: 475638 - RNA, 22 nt, Human
cucugugauuuugugagccaga

SEQ ID NO: 475639 - RNA, 22 nt, Human
uggcugcuagccagagcuucag

SEQ ID NO: 475640 - RNA, 22 nt, Human
cagagggcacaugguuuccuca

SEQ ID NO: 475641 - RNA, 22 nt, Human
ugccaggcugucaauucaccca

SEQ ID NO: 475642 - RNA, 22 nt, Human
cccagcucuuuuagcggcaucu

SEQ ID NO: 475643 - RNA, 22 nt, Human
agucaccaacaugguucccagg

SEQ ID NO: 475644 - RNA, 22 nt, Human
ggcagcaugagccuggugaauu

SEQ ID NO: 475645 - RNA, 22 nt, Human
cucagaaguucagccuagagua

SEQ ID NO: 475646 - RNA, 22 nt, Human
ggcuuuauauuguuugagcaga

SEQ ID NO: 475647 - RNA, 19 nt, Human
ccagcagguucauuucagg

SEQ ID NO: 475648 - RNA, 22 nt, Human
cauacauugcucauucaguauc

SEQ ID NO: 475649 - RNA, 22 nt, Human
ggcagccagcaaugagaaguuu

SEQ ID NO: 475650 - RNA, 22 nt, Human
ggcucuggucagugaggggccu

SEQ ID NO: 475651 - RNA, 22 nt, Human
ucaggggcugugcauuucccag

SEQ ID NO: 475652 - RNA, 22 nt, Human
cuguccuaugaguacucacuag

SEQ ID NO: 475653 - RNA, 22 nt, Human
ccaaggaggccccaggucagcu

SEQ ID NO: 475654 - RNA, 22 nt, Human
uagcagagaggggacaguggca

SEQ ID NO: 475655 - RNA, 22 nt, Human
gcacuaaaccaacauguaauaa

SEQ ID NO: 475656 - RNA, 22 nt, Human
gggccagguggaccccagccuc

SEQ ID NO: 475657 - RNA, 23 nt, Human
uggcagagacccagaaucuacau

SEQ ID NO: 475658 - RNA, 22 nt, Human
cacagaggaaaggcaguuggua

SEQ ID NO: 475659 - RNA, 22 nt, Human
ggcagugguuagaaacaugagc

SEQ ID NO: 475660 - RNA, 22 nt, Human
uuuccuuccuugcuagccugag

SEQ ID NO: 475661 - RNA, 22 nt, Human
ggagcugcauuuagggagccuu

SEQ ID NO: 475662 - RNA, 22 nt, Human
cugccucuccccagaguggccc

SEQ ID NO: 475663 - RNA, 22 nt, Human
ucuacugugguccuuguaacca

SEQ ID NO: 475664 - RNA, 22 nt, Human
aaugucugccugaacuuuauau

SEQ ID NO: 475665 - RNA, 22 nt, Human
caggguggcacucagcgcaucu

SEQ ID NO: 475666 - RNA, 22 nt, Human
gaggcucacgacgggacgaacu

SEQ ID NO: 475667 - RNA, 22 nt, Human
auuguaaguagaaauguuaugg

SEQ ID NO: 475668 - RNA, 22 nt, Human
uguggcugucuguucuccuagg

SEQ ID NO: 475669 - RNA, 22 nt, Human
gcacccaguuugucucaggguu

SEQ ID NO: 475670 - RNA, 22 nt, Human
uggaaguggcagaaaaugaaca

SEQ ID NO: 475671 - RNA, 22 nt, Human
caaggccauauugccuguaugu

SEQ ID NO: 475672 - RNA, 22 nt, Human
guaauuaggaauaaaaugggaa

SEQ ID NO: 475673 - RNA, 22 nt, Human
uccucaugccgggucucacgcu

SEQ ID NO: 475674 - RNA, 22 nt, Human
ugaaggccucugguacaugcca

SEQ ID NO: 475675 - RNA, 22 nt, Human
gcaaagcugggugugaaugcac

SEQ ID NO: 475676 - RNA, 18 nt, Human
aggccagcccugcuacug

SEQ ID NO: 475677 - RNA, 22 nt, Human
cuacacaguucugccuaauggc

SEQ ID NO: 475678 - RNA, 22 nt, Human
uaaugcaguacugauauaaaca

SEQ ID NO: 475679 - RNA, 19 nt, Human
acagagcucucugcuucug

SEQ ID NO: 475680 - RNA, 17 nt, Human
gcaaucucagucuccuu

SEQ ID NO: 475681 - RNA, 22 nt, Human
ugcaguggaagagguggagauc

SEQ ID NO: 475682 - RNA, 22 nt, Human
ugaccaaaggugguuuauuugg

SEQ ID NO: 475683 - RNA, 22 nt, Human
aggccacaguacuuugcagacc

SEQ ID NO: 475684 - RNA, 22 nt, Human
aaugcugcucucauaauuauag

SEQ ID NO: 475685 - RNA, 22 nt, Human
gcucccaguucccaaagugacc

SEQ ID NO: 475686 - RNA, 22 nt, Human
acccaggaggcagagguugcag

SEQ ID NO: 475687 - RNA, 22 nt, Human
uguaacaaaauaccuuggauug

SEQ ID NO: 475688 - RNA, 18 nt, Human
gcugagguggugucagag

SEQ ID NO: 475689 - RNA, 22 nt, Human
cacagaauuaagggagaaauau

SEQ ID NO: 475690 - RNA, 22 nt, Human
aucuagaaaguguugaagauca

SEQ ID NO: 475691 - RNA, 22 nt, Human
uucaaaauuguucuaagcucug

SEQ ID NO: 475692 - RNA, 22 nt, Human
gaguggagcaaaagagguagau

SEQ ID NO: 475693 - RNA, 22 nt, Human
cacacauugaauucauucuugu

SEQ ID NO: 475694 - RNA, 22 nt, Human
ugcagaagaccuuccagggcug

SEQ ID NO: 475695 - RNA, 22 nt, Human
ugggcagagaguagaggcaacg

SEQ ID NO: 475696 - RNA, 22 nt, Human
guguggcugauugacaugguca

SEQ ID NO: 475697 - RNA, 22 nt, Human
caggcagcucaaccuugggagc

SEQ ID NO: 475698 - RNA, 22 nt, Human
ggagaggcuuggcccagccugg

SEQ ID NO: 475699 - RNA, 22 nt, Human
gugcuucucuucacacccaacu

SEQ ID NO: 475700 - RNA, 22 nt, Human
ccaucccuccuccaccagcuag

SEQ ID NO: 475701 - RNA, 17 nt, Human
gcuuccugugcugggga

SEQ ID NO: 475702 - RNA, 22 nt, Human
cuguggaguggggaguacuggu

SEQ ID NO: 475703 - RNA, 22 nt, Human
cugccaggccucaucccagcca

SEQ ID NO: 475704 - RNA, 20 nt, Human
uaugaguauuacuuucagga

SEQ ID NO: 475705 - RNA, 22 nt, Human
gaguuauucuagguccuuugua

SEQ ID NO: 475706 - RNA, 22 nt, Human
uugcaucuagggcaacccagag

SEQ ID NO: 475707 - RNA, 22 nt, Human
aaaugucugagacuucugaacu

SEQ ID NO: 475708 - RNA, 22 nt, Human
uuauacauguguuuugagauga

SEQ ID NO: 475709 - RNA, 22 nt, Human
cuacauuuguucuauagcuuuu

SEQ ID NO: 475710 - RNA, 22 nt, Human
augcuuuuaugucacaugguca

SEQ ID NO: 475711 - RNA, 22 nt, Human
cccaggaggcagaaguugcagu

SEQ ID NO: 475712 - RNA, 22 nt, Human
aggcccaguccucugccgucug

SEQ ID NO: 475713 - RNA, 22 nt, Human
cccagggaaugacucuggccuu

SEQ ID NO: 475714 - RNA, 22 nt, Human
ucgugucagaucagagguuccu

SEQ ID NO: 475715 - RNA, 22 nt, Human
ugucccagcagcuggguucucu

SEQ ID NO: 475716 - RNA, 22 nt, Human
gugucccaggccucuggaauua

SEQ ID NO: 475717 - RNA, 22 nt, Human
acugugcacaauucuaaguccu

SEQ ID NO: 475718 - RNA, 22 nt, Human
ccagcuccuucugucuguggag

SEQ ID NO: 475719 - RNA, 22 nt, Human
aauucauccaugaacaauucca

SEQ ID NO: 475720 - RNA, 22 nt, Human
ugguggcuucugaggauggcga

SEQ ID NO: 475721 - RNA, 22 nt, Human
gaggcaggguguugauuacaga

SEQ ID NO: 475722 - RNA, 22 nt, Human
gccaggcuggcaaaaggaaacc

SEQ ID NO: 475723 - RNA, 22 nt, Human
ugagccagaggaggcugugugg

SEQ ID NO: 475724 - RNA, 22 nt, Human
ugugccauuucuauucugcagc

SEQ ID NO: 475725 - RNA, 23 nt, Human
uggggcugauggagacggaccag

SEQ ID NO: 475726 - RNA, 22 nt, Human
ucucauguauugcccuggugug

SEQ ID NO: 475727 - RNA, 22 nt, Human
ccagcaggagagaacauuuccc

SEQ ID NO: 475728 - RNA, 22 nt, Human
auguacauuuguaguaauauca

SEQ ID NO: 475729 - RNA, 22 nt, Human
aggcagguccccuggaaggcac

SEQ ID NO: 475730 - RNA, 22 nt, Human
acacuguagcugagggcaugcg

SEQ ID NO: 475731 - RNA, 22 nt, Human
ugagagagccugaaucucuuac

SEQ ID NO: 475732 - RNA, 22 nt, Human
gaggcugguaggaaaggaaaca

SEQ ID NO: 475733 - RNA, 22 nt, Human
gaggacaggagacucacuguuu

SEQ ID NO: 475734 - RNA, 22 nt, Human
acuuugcugcagguuuaaagag

SEQ ID NO: 475735 - RNA, 22 nt, Human
guccucuguuagaaaugugcuu

SEQ ID NO: 475736 - RNA, 22 nt, Human
ucauccaguaugacuggugucu

SEQ ID NO: 475737 - RNA, 22 nt, Human
gccucugcaccaguacugugcc

SEQ ID NO: 475738 - RNA, 23 nt, Human
ccugcagcugcuggggcuccacc

SEQ ID NO: 475739 - RNA, 20 nt, Human
aggaacuggaagggaggaaa

SEQ ID NO: 475740 - RNA, 22 nt, Human
ugaagacacauacaagggaaug

SEQ ID NO: 475741 - RNA, 19 nt, Human
ccugugacuaucuuuguaa

SEQ ID NO: 475742 - RNA, 22 nt, Human
acagaguaucuaucaggaguau

SEQ ID NO: 475743 - RNA, 22 nt, Human
agggcagaggcggacacggaag

SEQ ID NO: 475744 - RNA, 21 nt, Human
gccagggaagagaguuggcug

SEQ ID NO: 475745 - RNA, 22 nt, Human
cagcuuauucaguaagcacaua

SEQ ID NO: 475746 - RNA, 22 nt, Human
cugcccagaagccagaugggca

SEQ ID NO: 475747 - RNA, 23 nt, Human
aggcagugucucuuauccugucc

SEQ ID NO: 475748 - RNA, 19 nt, Human
ugaggggcucacagucuca

SEQ ID NO: 475749 - RNA, 20 nt, Human
ggccuuggguuucgccuguu

SEQ ID NO: 475750 - RNA, 22 nt, Human
ugcauccuuaaccagcaucacu

SEQ ID NO: 475751 - RNA, 22 nt, Human
acagaggcagugugagauacug

SEQ ID NO: 475752 - RNA, 22 nt, Human
gcugccaguguggcaugaugca

SEQ ID NO: 475753 - RNA, 21 nt, Human
uuguucuuccagaagcaaagu

SEQ ID NO: 475754 - RNA, 22 nt, Human
uuagaaacccagacucuuaggu

SEQ ID NO: 475755 - RNA, 22 nt, Human
ucauuucaaguucugacagcua

SEQ ID NO: 475756 - RNA, 22 nt, Human
ugugaccucaucuuaacuggaa

SEQ ID NO: 475757 - RNA, 22 nt, Human
acagaauugauggaaaucucag

SEQ ID NO: 475758 - RNA, 22 nt, Human
cagggagcuggcuggcugugcc

SEQ ID NO: 475759 - RNA, 22 nt, Human
uucugucucccugauguagagc

SEQ ID NO: 475760 - RNA, 22 nt, Human
agagcuguagcuuccuagagcc

SEQ ID NO: 475761 - RNA, 22 nt, Human
aaggcacuuaacgugggaggau

SEQ ID NO: 475762 - RNA, 22 nt, Human
aaagaagguagggcuggugacu

SEQ ID NO: 475763 - RNA, 22 nt, Human
agagggcugccucagucagcua

SEQ ID NO: 475764 - RNA, 22 nt, Human
aagggcucugugcuugucccau

SEQ ID NO: 475765 - RNA, 22 nt, Human
cagugcaugaaacaauaugcag

SEQ ID NO: 475766 - RNA, 17 nt, Human
uucaaugauuaaugcau

SEQ ID NO: 475767 - RNA, 22 nt, Human
ccacucugauuuuggcuccacu

SEQ ID NO: 475768 - RNA, 22 nt, Human
ucuucuuccuccacagggccca

SEQ ID NO: 475769 - RNA, 22 nt, Human
agcagcuguggaaaaguaacua

SEQ ID NO: 475770 - RNA, 22 nt, Human
gcuggggucugugaggagggcu

SEQ ID NO: 475771 - RNA, 19 nt, Human
ugucucagugucccuuccu

SEQ ID NO: 475772 - RNA, 22 nt, Human
uuaucauugucgcagucuaauu

SEQ ID NO: 475773 - RNA, 22 nt, Human
ucauccaguucacauggugagu

SEQ ID NO: 475774 - RNA, 22 nt, Human
cagcaugacagucugcagcaga

SEQ ID NO: 475775 - RNA, 23 nt, Human
caggcaggaugaggacuacacuc

SEQ ID NO: 475776 - RNA, 22 nt, Human
ggucacugcucuaaacaaaagu

SEQ ID NO: 475777 - RNA, 22 nt, Human
aaaugcacagguuuuaaauccu

SEQ ID NO: 475778 - RNA, 22 nt, Human
uggagccaaugaacauuugcug

SEQ ID NO: 475779 - RNA, 22 nt, Human
guucuugccagcauccucaggu

SEQ ID NO: 475780 - RNA, 17 nt, Human
uccuucagggccucaca

SEQ ID NO: 475781 - RNA, 22 nt, Human
aacaugaaaaccuccacagcaa

SEQ ID NO: 475782 - RNA, 22 nt, Human
aucaguuugauaauaaggcuug

SEQ ID NO: 475783 - RNA, 22 nt, Human
gcugggagcaaagccaugcaua

SEQ ID NO: 475784 - RNA, 22 nt, Human
gcugccugcucggcuccuggga

SEQ ID NO: 475785 - RNA, 22 nt, Human
ugagccaguggaagauggcagu

SEQ ID NO: 475786 - RNA, 22 nt, Human
ccagagagauugcuucuaaaga

SEQ ID NO: 475787 - RNA, 22 nt, Human
cagucacacaaguggacuuggg

SEQ ID NO: 475788 - RNA, 22 nt, Human
agcuuuaugggagcuuagauaa

SEQ ID NO: 475789 - RNA, 22 nt, Human
acaaagucugaaaccugaggca

SEQ ID NO: 475790 - RNA, 20 nt, Human
ucacaggggaccaggagcag

SEQ ID NO: 475791 - RNA, 22 nt, Human
caggccuggguucaaaucccuu

SEQ ID NO: 475792 - RNA, 22 nt, Human
agucagugaaaacuagaauguu

SEQ ID NO: 475793 - RNA, 18 nt, Human
aggcagcagcaucuucuc

SEQ ID NO: 475794 - RNA, 22 nt, Human
gcucccagucugauggaggaga

SEQ ID NO: 475795 - RNA, 22 nt, Human
cugccacuuacuaggcauggug

SEQ ID NO: 475796 - RNA, 19 nt, Human
cagcugcaccgugaccauc

SEQ ID NO: 475797 - RNA, 22 nt, Human
uacagaguggugagaucuuuug

SEQ ID NO: 475798 - RNA, 21 nt, Human
aacaaagggaugcucaucuuu

SEQ ID NO: 475799 - RNA, 22 nt, Human
ggugaagggccuuaggagacag

SEQ ID NO: 475800 - RNA, 22 nt, Human
gcgagggcacgcgguugaaggc

SEQ ID NO: 475801 - RNA, 22 nt, Human
cggagcugccugccaagccugc

SEQ ID NO: 475802 - RNA, 22 nt, Human
caacauuucaaggucuuuagga

SEQ ID NO: 475803 - RNA, 23 nt, Human
ugagaagccaggggagcgugagg

SEQ ID NO: 475804 - RNA, 22 nt, Human
uugcucugacuggagugcagug

SEQ ID NO: 475805 - RNA, 22 nt, Human
uccauuuuucaugacuccucaa

SEQ ID NO: 475806 - RNA, 22 nt, Human
acauuugaggauguuaagaaug

SEQ ID NO: 475807 - RNA, 22 nt, Human
uggagcugagagccaggcuggc

SEQ ID NO: 475808 - RNA, 22 nt, Human
ggcuccacccugcuuccagaag

SEQ ID NO: 475809 - RNA, 22 nt, Human
acauuucuuagccuaguuccag

SEQ ID NO: 475810 - RNA, 22 nt, Human
ccagcugcugugcagggaggcu

SEQ ID NO: 475811 - RNA, 20 nt, Human
cccagggaccugagcuccau

SEQ ID NO: 475812 - RNA, 22 nt, Human
aagucaaucacaugcacacuga

SEQ ID NO: 475813 - RNA, 22 nt, Human
uaguggagguggucugugaacu

SEQ ID NO: 475814 - RNA, 22 nt, Human
uucacagucacccuucuccaug

SEQ ID NO: 475815 - RNA, 22 nt, Human
agugcuccuauggaucaguugu

SEQ ID NO: 475816 - RNA, 22 nt, Human
auggaaaggcuguggaaacuua

SEQ ID NO: 475817 - RNA, 22 nt, Human
uguggcaggaagagcuucugag

SEQ ID NO: 475818 - RNA, 22 nt, Human
agaaugcaguuugaaauaaggu

SEQ ID NO: 475819 - RNA, 22 nt, Human
ucaaagucacaacucucuaauu

SEQ ID NO: 475820 - RNA, 22 nt, Human
cauauuucagucuaagaugugu

SEQ ID NO: 475821 - RNA, 22 nt, Human
caugggcaccuuaaaaugaggc

SEQ ID NO: 475822 - RNA, 22 nt, Human
cguguggucccggcaaggcaag

SEQ ID NO: 475823 - RNA, 22 nt, Human
ucacaggagggagagacaccca

SEQ ID NO: 475824 - RNA, 22 nt, Human
uccugggcuugcuccuccagcu

SEQ ID NO: 475825 - RNA, 22 nt, Human
cugagaaggaagccuccacucu

SEQ ID NO: 475826 - RNA, 22 nt, Human
agugggaggcggcugacgggcg

SEQ ID NO: 475827 - RNA, 22 nt, Human
cccaggagguggagcuugcagu

SEQ ID NO: 475828 - RNA, 22 nt, Human
gggaggaaggcuugggugagua

SEQ ID NO: 475829 - RNA, 22 nt, Human
auguaacauugaauuauauagu

SEQ ID NO: 475830 - RNA, 20 nt, Human
uccagccacuuccgcugguc

SEQ ID NO: 475831 - RNA, 22 nt, Human
gccugcagauauauaggauggu

SEQ ID NO: 475832 - RNA, 22 nt, Human
guaaaguucuacuagaaucaac

SEQ ID NO: 475833 - RNA, 22 nt, Human
uguugagacugagggagucagc

SEQ ID NO: 475834 - RNA, 18 nt, Human
ugaacagaugaguugaag

SEQ ID NO: 475835 - RNA, 22 nt, Human
gaacaaacacaucccagcagug

SEQ ID NO: 475836 - RNA, 22 nt, Human
ugaagccacuuuccagaaucac

SEQ ID NO: 475837 - RNA, 22 nt, Human
aguguccccuacagaggcauuc

SEQ ID NO: 475838 - RNA, 22 nt, Human
ugccagaagugcuuuauaagug

SEQ ID NO: 475839 - RNA, 22 nt, Human
uagaacagaguuccagugauca

SEQ ID NO: 475840 - RNA, 22 nt, Human
cugcucugcaaggcacagugau

SEQ ID NO: 475841 - RNA, 22 nt, Human
uggccugggccugccggugcaa

SEQ ID NO: 475842 - RNA, 22 nt, Human
ucagcaaugagaacuggcauuu

SEQ ID NO: 475843 - RNA, 22 nt, Human
aauauaaauuccugggcccagc

SEQ ID NO: 475844 - RNA, 22 nt, Human
cucuguccuccaccugcuuuca

SEQ ID NO: 475845 - RNA, 22 nt, Human
gccaggcagccacccucugcga

SEQ ID NO: 475846 - RNA, 22 nt, Human
ucauuuucaaguuugaacagga

SEQ ID NO: 475847 - RNA, 23 nt, Human
ucagagaaguuguaggcugggga

SEQ ID NO: 475848 - RNA, 22 nt, Human
acaggcucuggggcaggauggc

SEQ ID NO: 475849 - RNA, 22 nt, Human
ucuccuucgaggcccagcuccc

SEQ ID NO: 475850 - RNA, 22 nt, Human
uuugugaaaugaagucacaacu

SEQ ID NO: 475851 - RNA, 22 nt, Human
uucuaguuaaaguauguauuag

SEQ ID NO: 475852 - RNA, 18 nt, Human
ccugagcccugcuuacuu

SEQ ID NO: 475853 - RNA, 22 nt, Human
agagcugugcuuugcaccacgu

SEQ ID NO: 475854 - RNA, 22 nt, Human
ugaggcagugauguuuaagcac

SEQ ID NO: 475855 - RNA, 22 nt, Human
aaggcacugaacuuaaauucug

SEQ ID NO: 475856 - RNA, 22 nt, Human
ggcuucauggaggaggugaguc

SEQ ID NO: 475857 - RNA, 18 nt, Human
ugucauugccagggaagc

SEQ ID NO: 475858 - RNA, 22 nt, Human
cucuggagggaggcugagcugg

SEQ ID NO: 475859 - RNA, 22 nt, Human
ucaugcaaggcugaaacauggu

SEQ ID NO: 475860 - RNA, 22 nt, Human
ucagggacugcagagggaagcu

SEQ ID NO: 475861 - RNA, 22 nt, Human
accaugaugggaagcucagggc

SEQ ID NO: 475862 - RNA, 22 nt, Human
gcugccaugguccaggcuccag

SEQ ID NO: 475863 - RNA, 23 nt, Human
ggagccuggcauaugagacgcau

SEQ ID NO: 475864 - RNA, 22 nt, Human
agauggguaacuggagucugcu

SEQ ID NO: 475865 - RNA, 22 nt, Human
guguuuggucagacguccgggg

SEQ ID NO: 475866 - RNA, 22 nt, Human
ucagcccugaggacagaggcag

SEQ ID NO: 475867 - RNA, 22 nt, Human
uugagaagaaauaguuugcaau

SEQ ID NO: 475868 - RNA, 22 nt, Human
acagagcaauaacagggagagg

SEQ ID NO: 475869 - RNA, 22 nt, Human
ccagugggugcugggcucugcc

SEQ ID NO: 475870 - RNA, 22 nt, Human
gcugucugcugggucgcucagg

SEQ ID NO: 475871 - RNA, 22 nt, Human
cuucauuaaugucuauaaguuu

SEQ ID NO: 475872 - RNA, 22 nt, Human
cauugaaauauggaaacugaug

SEQ ID NO: 475873 - RNA, 22 nt, Human
gggcaggugccagcucccuguc

SEQ ID NO: 475874 - RNA, 22 nt, Human
cagcugaguuacucugaggucu

SEQ ID NO: 475875 - RNA, 22 nt, Human
agcucagggcgaucugucucgg

SEQ ID NO: 475876 - RNA, 22 nt, Human
cucacugucuguacuagcugau

SEQ ID NO: 475877 - RNA, 22 nt, Human
gcucccaggaugaggagccagg

SEQ ID NO: 475878 - RNA, 23 nt, Human
ggucccaguggagaggccucacc

SEQ ID NO: 475879 - RNA, 22 nt, Human
ggccugcuucucagugagcuug

SEQ ID NO: 475880 - RNA, 22 nt, Human
ugucucugugacuccuuccgcc

SEQ ID NO: 475881 - RNA, 22 nt, Human
gucccugcaucaccacgggacu

SEQ ID NO: 475882 - RNA, 22 nt, Human
agagccaggcggcugggcaccu

SEQ ID NO: 475883 - RNA, 22 nt, Human
uaaggccagcaugaaugcagca

SEQ ID NO: 475884 - RNA, 22 nt, Human
cucagcagagaccagggaggaa

SEQ ID NO: 475885 - RNA, 22 nt, Human
gggcaguugauggaggucugga

SEQ ID NO: 475886 - RNA, 18 nt, Human
cucagggcaucagucugg

SEQ ID NO: 475887 - RNA, 22 nt, Human
ugaaggcacuugccuaggggca

SEQ ID NO: 475888 - RNA, 22 nt, Human
aagagcuggauggaaucuggga

SEQ ID NO: 475889 - RNA, 22 nt, Human
ccaggugugccagcagggacug

SEQ ID NO: 475890 - RNA, 22 nt, Human
gaggacagugugaucugccagc

SEQ ID NO: 475891 - RNA, 22 nt, Human
auggaaagccaguguuccauca

SEQ ID NO: 475892 - RNA, 22 nt, Human
ccaggaggcagaaguugcagug

SEQ ID NO: 475893 - RNA, 22 nt, Human
ccugcagguaaggcuaacugcc

SEQ ID NO: 475894 - RNA, 22 nt, Human
agcagcagaggucagaaaggua

SEQ ID NO: 475895 - RNA, 22 nt, Human
gcaggugaaugauggacuagga

SEQ ID NO: 475896 - RNA, 22 nt, Human
gagcucuggcagggcaggucug

SEQ ID NO: 475897 - RNA, 22 nt, Human
acauuuaggauguuuugagaga

SEQ ID NO: 475898 - RNA, 22 nt, Human
aaaugaacaguugcauucucug

SEQ ID NO: 475899 - RNA, 22 nt, Human
accacuguaucuccagcacauu

SEQ ID NO: 475900 - RNA, 22 nt, Human
aggcugaggcaagaggaucacu

SEQ ID NO: 475901 - RNA, 17 nt, Human
ucugggcuucagugguc

SEQ ID NO: 475902 - RNA, 22 nt, Human
uggcagcuguguccagguagaa

SEQ ID NO: 475903 - RNA, 22 nt, Human
cagggccaugaggcacaggguc

SEQ ID NO: 475904 - RNA, 19 nt, Human
ugacaggcuguugccuuga

SEQ ID NO: 475905 - RNA, 22 nt, Human
gaggcucaaaccuggacagagc

SEQ ID NO: 475906 - RNA, 22 nt, Human
aucaguuuugggggacauacug

SEQ ID NO: 475907 - RNA, 22 nt, Human
aguggaccagaagacugaagcu

SEQ ID NO: 475908 - RNA, 22 nt, Human
aaaaaaucagaucuuugguuaa

SEQ ID NO: 475909 - RNA, 22 nt, Human
agcagcucuuaacaaagcaugg

SEQ ID NO: 475910 - RNA, 22 nt, Human
gcagagcauguccucaggacag

SEQ ID NO: 475911 - RNA, 22 nt, Human
ccaggaguuugaggcugcagug

SEQ ID NO: 475912 - RNA, 22 nt, Human
aggcugaggagggauguugcuu

SEQ ID NO: 475913 - RNA, 22 nt, Human
ucuggcuccacaccucacugca

SEQ ID NO: 475914 - RNA, 22 nt, Human
uggcccugacagguccugggca

SEQ ID NO: 475915 - RNA, 22 nt, Human
ugaggcagucacccccuccugc

SEQ ID NO: 475916 - RNA, 22 nt, Human
ugccaaggguaugggcaagaua

SEQ ID NO: 475917 - RNA, 17 nt, Human
cagacagauauccuggg

SEQ ID NO: 475918 - RNA, 22 nt, Human
uuugagaaaugggcucugugcu

SEQ ID NO: 475919 - RNA, 22 nt, Human
aaggccugggaggccucucuuc

SEQ ID NO: 475920 - RNA, 22 nt, Human
caggauggucagaugcauuguc

SEQ ID NO: 475921 - RNA, 22 nt, Human
cugucuuugguccugucuguua

SEQ ID NO: 475922 - RNA, 22 nt, Human
ugagccugguugcagugucugg

SEQ ID NO: 475923 - RNA, 22 nt, Human
cggcagagugugugcgugcaug

SEQ ID NO: 475924 - RNA, 22 nt, Human
aggagaaagacuggacagccaa

SEQ ID NO: 475925 - RNA, 22 nt, Human
ccugccugacagagaagguuca

SEQ ID NO: 475926 - RNA, 22 nt, Human
agucucugccagcuuguccucu

SEQ ID NO: 475927 - RNA, 22 nt, Human
uagucuuuuuaauaaauaaugc

SEQ ID NO: 475928 - RNA, 22 nt, Human
gaccauuuuuacagagcauuca

SEQ ID NO: 475929 - RNA, 22 nt, Human
uuuauucuugagagugagaaga

SEQ ID NO: 475930 - RNA, 22 nt, Human
aguguuccacacaucuggggaa

SEQ ID NO: 475931 - RNA, 22 nt, Human
ucucagaguuugaaucuggagu

SEQ ID NO: 475932 - RNA, 22 nt, Human
gcagccagaagacucagaacaa

SEQ ID NO: 475933 - RNA, 22 nt, Human
ugaaggugucuuugugaacauc

SEQ ID NO: 475934 - RNA, 22 nt, Human
ucagggcaccaaaaaagaugcc

SEQ ID NO: 475935 - RNA, 21 nt, Human
agcugggccucagccugcagu

SEQ ID NO: 475936 - RNA, 22 nt, Human
acucaggaauggggcugggacu

SEQ ID NO: 475937 - RNA, 22 nt, Human
uugcagagccaugaggcuggcu

SEQ ID NO: 475938 - RNA, 22 nt, Human
uuuucuuacugucugugauccu

SEQ ID NO: 475939 - RNA, 22 nt, Human
ggcagcagaacuggcccuguau

SEQ ID NO: 475940 - RNA, 22 nt, Human
ugggcagaucuuugguggcuag

SEQ ID NO: 475941 - RNA, 22 nt, Human
gccucuggggcagcugagucau

SEQ ID NO: 475942 - RNA, 22 nt, Human
gccugagccgccugagcggcgg

SEQ ID NO: 475943 - RNA, 22 nt, Human
cagugcagaggugcaagcaugu

SEQ ID NO: 475944 - RNA, 22 nt, Human
gcugucacaaauauuucucagc

SEQ ID NO: 475945 - RNA, 22 nt, Human
cugcugccggcgagccucccuu

SEQ ID NO: 475946 - RNA, 22 nt, Human
gacccggcuccaggcccagcag

SEQ ID NO: 475947 - RNA, 22 nt, Human
agugugaguaauucagggaggg

SEQ ID NO: 475948 - RNA, 22 nt, Human
cucaggauagcugcgcagccug

SEQ ID NO: 475949 - RNA, 22 nt, Human
aggcacugggaauaugcugagg

SEQ ID NO: 475950 - RNA, 22 nt, Human
acagcaaaggacgaacacucug

SEQ ID NO: 475951 - RNA, 22 nt, Human
gaaaccagcuagaggcagaggg

SEQ ID NO: 475952 - RNA, 22 nt, Human
gccagccuucuguggccugcaa

SEQ ID NO: 475953 - RNA, 22 nt, Human
gcuggccugggcagaggcuaug

SEQ ID NO: 475954 - RNA, 22 nt, Human
uccugaggaaaguucaugaaug

SEQ ID NO: 475955 - RNA, 22 nt, Human
gcacaugagcugcugggauggg

SEQ ID NO: 475956 - RNA, 20 nt, Human
cucucccagcacagcuuccu

SEQ ID NO: 475957 - RNA, 22 nt, Human
ccugccuguacuagagacccag

SEQ ID NO: 475958 - RNA, 22 nt, Human
acaggacaggcugggcuagacu

SEQ ID NO: 475959 - RNA, 17 nt, Human
ccagagaguaguuagga

SEQ ID NO: 475960 - RNA, 15 nt, Human
aggcacugugggacc

SEQ ID NO: 475961 - RNA, 22 nt, Human
aaucaguucuacaucuuaucca

SEQ ID NO: 475962 - RNA, 22 nt, Human
agagggcaugcuugguggccug

SEQ ID NO: 475963 - RNA, 22 nt, Human
agcccaugcaacaggccuagcg

SEQ ID NO: 475964 - RNA, 22 nt, Human
cgcuggggcuuuuugcuugaga

SEQ ID NO: 475965 - RNA, 22 nt, Human
ucuuuccucugagcuccuguag

SEQ ID NO: 475966 - RNA, 22 nt, Human
ugaccuauuagauuuccuugcc

SEQ ID NO: 475967 - RNA, 22 nt, Human
auuauuuuaugugcggccugau

SEQ ID NO: 475968 - RNA, 22 nt, Human
ggguccagcgacagcaggcuca

SEQ ID NO: 475969 - RNA, 22 nt, Human
gccuggcuccuaaggacuggcu

SEQ ID NO: 475970 - RNA, 22 nt, Human
gaccugccugagcugccucugc

SEQ ID NO: 475971 - RNA, 22 nt, Human
agugcaauagcaaagaacaaca

SEQ ID NO: 475972 - RNA, 22 nt, Human
agguuuaugccuuggagcuggg

SEQ ID NO: 475973 - RNA, 22 nt, Human
gauggcaggcaggugaguagag

SEQ ID NO: 475974 - RNA, 22 nt, Human
ugguaucagagccaucuguauu

SEQ ID NO: 475975 - RNA, 22 nt, Human
cagagugagggccugcaccugc

SEQ ID NO: 475976 - RNA, 22 nt, Human
aaagaacagauguguggugcau

SEQ ID NO: 475977 - RNA, 22 nt, Human
ugucagggcaugcgguccagcc

SEQ ID NO: 475978 - RNA, 22 nt, Human
aaucagaaaauucaguggaauu

SEQ ID NO: 475979 - RNA, 22 nt, Human
gccuucagcggccgcucgcugc

SEQ ID NO: 475980 - RNA, 22 nt, Human
agacaucauguuacagauuaag

SEQ ID NO: 475981 - RNA, 22 nt, Human
ucuacuuuucccuauacaguuu

SEQ ID NO: 475982 - RNA, 21 nt, Human
acauuuucuguuuuaggaagu

SEQ ID NO: 475983 - RNA, 22 nt, Human
gagcagaacaggccggguggga

SEQ ID NO: 475984 - RNA, 22 nt, Human
ugacagggugauuaugagagcu

SEQ ID NO: 475985 - RNA, 22 nt, Human
caguuucugggcguucacaggu

SEQ ID NO: 475986 - RNA, 22 nt, Human
ggccauggaccccgagcugacc

SEQ ID NO: 475987 - RNA, 22 nt, Human
aaaucugggagcagcucggcca

SEQ ID NO: 475988 - RNA, 21 nt, Human
uuuagggaggauauuuaacuu

SEQ ID NO: 475989 - RNA, 22 nt, Human
cugugcccuggccaggccucuc

SEQ ID NO: 475990 - RNA, 22 nt, Human
agaaaguucacugguauauuuu

SEQ ID NO: 475991 - RNA, 22 nt, Human
uggcugagagcaauugacucug

SEQ ID NO: 475992 - RNA, 22 nt, Human
acagagauguggaugagggauu

SEQ ID NO: 475993 - RNA, 22 nt, Human
aggucacauggauaaugaucag

SEQ ID NO: 475994 - RNA, 22 nt, Human
ggccagagagcagccaggauuc

SEQ ID NO: 475995 - RNA, 22 nt, Human
ugcagaaggccugacauugcac

SEQ ID NO: 475996 - RNA, 22 nt, Human
auguuuuauauuuugcagcagu

SEQ ID NO: 475997 - RNA, 22 nt, Human
guccucuggccuuucccaggac

SEQ ID NO: 475998 - RNA, 20 nt, Human
gaggcucugggcauggcgcc

SEQ ID NO: 475999 - RNA, 21 nt, Human
ccugagccuguuuauccagaa

SEQ ID NO: 476000 - RNA, 22 nt, Human
uggccugguaccacauagauuu

SEQ ID NO: 476001 - RNA, 22 nt, Human
ugcagcuguuacggacccuguc

SEQ ID NO: 476002 - RNA, 22 nt, Human
uauggaaaguguuuucuucugu

SEQ ID NO: 476003 - RNA, 20 nt, Human
cacaggcuauaugagagcca

SEQ ID NO: 476004 - RNA, 22 nt, Human
uggcucuggcgugaagcccaga

SEQ ID NO: 476005 - RNA, 22 nt, Human
ccaggguggaggcuggauggag

SEQ ID NO: 476006 - RNA, 19 nt, Human
augauacaggugaaaauug

SEQ ID NO: 476007 - RNA, 22 nt, Human
agaggcuccaccuucucugucc

SEQ ID NO: 476008 - RNA, 22 nt, Human
aagccaagaguuaacuauuugu

SEQ ID NO: 476009 - RNA, 22 nt, Human
agccuccaaaugucaggucccg

SEQ ID NO: 476010 - RNA, 20 nt, Human
guauuaggagguaaauguaa

SEQ ID NO: 476011 - RNA, 22 nt, Human
uaugagaaaauaaauaucuguu

SEQ ID NO: 476012 - RNA, 22 nt, Human
ucucagagugacaaugagaauu

SEQ ID NO: 476013 - RNA, 22 nt, Human
uagacacaucaaguauaguuaa

SEQ ID NO: 476014 - RNA, 22 nt, Human
cugugugcugaaaugcagugag

SEQ ID NO: 476015 - RNA, 22 nt, Human
ugcccaggauugugaggucagg

SEQ ID NO: 476016 - RNA, 23 nt, Human
agaagcagcuucuggaguaucgg

SEQ ID NO: 476017 - RNA, 22 nt, Human
ugagccuggguggucgaggcug

SEQ ID NO: 476018 - RNA, 22 nt, Human
uggaaggcaacggagugagcug

SEQ ID NO: 476019 - RNA, 22 nt, Human
cugggcacacagugacucugca

SEQ ID NO: 476020 - RNA, 22 nt, Human
ggcaguagccagggacuggcag

SEQ ID NO: 476021 - RNA, 22 nt, Human
cucagggccaaggaugcuguug

SEQ ID NO: 476022 - RNA, 22 nt, Human
ccaagggaaaccgagaggcugg

SEQ ID NO: 476023 - RNA, 22 nt, Human
gccaggugcauggcugagucuc

SEQ ID NO: 476024 - RNA, 22 nt, Human
cccaggcugaugggaugggcca

SEQ ID NO: 476025 - RNA, 22 nt, Human
uucacauuaucaggauuguuuc

SEQ ID NO: 476026 - RNA, 22 nt, Human
cuucucucugcauaggcauggg

SEQ ID NO: 476027 - RNA, 22 nt, Human
cuagaaauauuuuacagucaag

SEQ ID NO: 476028 - RNA, 22 nt, Human
gcauuucuuccuggugugagcc

SEQ ID NO: 476029 - RNA, 20 nt, Human
uuucagugguuugugccuag

SEQ ID NO: 476030 - RNA, 22 nt, Human
aauugcuaaagauuauguuuuc

SEQ ID NO: 476031 - RNA, 22 nt, Human
accugcagccacuucucuccuu

SEQ ID NO: 476032 - RNA, 22 nt, Human
uccaggcuggacaugaggcggg

SEQ ID NO: 476033 - RNA, 22 nt, Human
uggcagugccccuugaccagug

SEQ ID NO: 476034 - RNA, 22 nt, Human
caggaacacaaugagucucaaa

SEQ ID NO: 476035 - RNA, 22 nt, Human
cagagccccccuucugaucaca

SEQ ID NO: 476036 - RNA, 22 nt, Human
ggggcagauggaacagagcaca

SEQ ID NO: 476037 - RNA, 21 nt, Human
gagccuucccucugcccuuuc

SEQ ID NO: 476038 - RNA, 22 nt, Human
cacugcagaucagaggcugaga

SEQ ID NO: 476039 - RNA, 22 nt, Human
agaggcuggauugagcauagac

SEQ ID NO: 476040 - RNA, 22 nt, Human
ggggaccuggccacccauccuu

SEQ ID NO: 476041 - RNA, 22 nt, Human
uccagccaagccuugguagcug

SEQ ID NO: 476042 - RNA, 23 nt, Human
uguaaaaugggguaguguuacca

SEQ ID NO: 476043 - RNA, 22 nt, Human
cuucccagacgggguggcagcc

SEQ ID NO: 476044 - RNA, 22 nt, Human
cuccuggacauggagcggagga

SEQ ID NO: 476045 - RNA, 22 nt, Human
uaucugcaucugcauguguauu

SEQ ID NO: 476046 - RNA, 22 nt, Human
aacacuguggucuuuucaguaa

SEQ ID NO: 476047 - RNA, 22 nt, Human
caggugucuaauucucaccccc

SEQ ID NO: 476048 - RNA, 22 nt, Human
gacuacucaaacuuucucuaua

SEQ ID NO: 476049 - RNA, 22 nt, Human
ucaggcagaccaccgugggcag

SEQ ID NO: 476050 - RNA, 22 nt, Human
ugaagcaggaaacuucuuguuu

SEQ ID NO: 476051 - RNA, 22 nt, Human
gcuggccuugugucugaggaag

SEQ ID NO: 476052 - RNA, 22 nt, Human
cccaggcagagagcuggugagc

SEQ ID NO: 476053 - RNA, 23 nt, Human
gaagccacacaaaggucgccaag

SEQ ID NO: 476054 - RNA, 20 nt, Human
agccugccagcuggcccaga

SEQ ID NO: 476055 - RNA, 22 nt, Human
aaccccgcucaggcugggugag

SEQ ID NO: 476056 - RNA, 22 nt, Human
ugcagcucugaacagucaugaa

SEQ ID NO: 476057 - RNA, 22 nt, Human
uuccuguauucuaaagggaaag

SEQ ID NO: 476058 - RNA, 22 nt, Human
gagggaccccaggcuggcccuu

SEQ ID NO: 476059 - RNA, 23 nt, Human
acagagaucuugacuuguaugga

SEQ ID NO: 476060 - RNA, 22 nt, Human
cuugaaagucagcagaguggau

SEQ ID NO: 476061 - RNA, 22 nt, Human
cacaggagguuaggaagugguc

SEQ ID NO: 476062 - RNA, 22 nt, Human
agagacaggaguucuguuucca

SEQ ID NO: 476063 - RNA, 22 nt, Human
uggggaggacgggcgccuuccu

SEQ ID NO: 476064 - RNA, 22 nt, Human
cucuggcuucuaccuugcaguu

SEQ ID NO: 476065 - RNA, 22 nt, Human
ucagaggaauaaugcugcauuu

SEQ ID NO: 476066 - RNA, 22 nt, Human
uacauguauugauuucucuucu

SEQ ID NO: 476067 - RNA, 22 nt, Human
caguuucuacgaaggucaaccc

SEQ ID NO: 476068 - RNA, 22 nt, Human
cagcucccgccaucgggaggca

SEQ ID NO: 476069 - RNA, 22 nt, Human
ggagugacucacagcugggaca

SEQ ID NO: 476070 - RNA, 22 nt, Human
guccucuuagccacuuaauuau

SEQ ID NO: 476071 - RNA, 22 nt, Human
agcuuuaucuucaccugggaau

SEQ ID NO: 476072 - RNA, 22 nt, Human
agcagcaucugguucugaugug

SEQ ID NO: 476073 - RNA, 22 nt, Human
agugugugcaugcauucgugca

SEQ ID NO: 476074 - RNA, 22 nt, Human
aaagcuuuucaguauguucaug

SEQ ID NO: 476075 - RNA, 22 nt, Human
ugaugggacugccagcugcuga

SEQ ID NO: 476076 - RNA, 22 nt, Human
uacauguaauuuucauaguaag

SEQ ID NO: 476077 - RNA, 22 nt, Human
cucucuguuaugcuuucaugaa

SEQ ID NO: 476078 - RNA, 22 nt, Human
gcugucucauacaaggcccugc

SEQ ID NO: 476079 - RNA, 22 nt, Human
aaugcacacauuugguacugaa

SEQ ID NO: 476080 - RNA, 22 nt, Human
cagagcagagugauuguucugg

SEQ ID NO: 476081 - RNA, 22 nt, Human
aacaaacaaacauuuugucauc

SEQ ID NO: 476082 - RNA, 22 nt, Human
agaaagcuuaugaaugggcaag

SEQ ID NO: 476083 - RNA, 22 nt, Human
aaaguguugauaugugacaucc

SEQ ID NO: 476084 - RNA, 22 nt, Human
ucacagcuaagcuuggucacug

SEQ ID NO: 476085 - RNA, 22 nt, Human
cuccucuggcuuccuggaggca

SEQ ID NO: 476086 - RNA, 23 nt, Human
uggcucagcuaguuuuccauuuc

SEQ ID NO: 476087 - RNA, 22 nt, Human
ucucagagaccugaacucccug

SEQ ID NO: 476088 - RNA, 22 nt, Human
ugauuuccacagucaggggugc

SEQ ID NO: 476089 - RNA, 22 nt, Human
uuuccuuccaaaugcccgggag

SEQ ID NO: 476090 - RNA, 22 nt, Human
aaguuuaacuugaauucuuucu

SEQ ID NO: 476091 - RNA, 22 nt, Human
ugcaagaggaauucuagaagca

SEQ ID NO: 476092 - RNA, 22 nt, Human
agaccaagacuauaaugagagg

SEQ ID NO: 476093 - RNA, 22 nt, Human
cuggcuccuccaaggccuggag

SEQ ID NO: 476094 - RNA, 22 nt, Human
augggcaguuaggaggccagga

SEQ ID NO: 476095 - RNA, 22 nt, Human
gguggcagucuuaagagaucuu

SEQ ID NO: 476096 - RNA, 20 nt, Human
cccugcagccaugggagugg

SEQ ID NO: 476097 - RNA, 22 nt, Human
auuguggcuagacagucacaau

SEQ ID NO: 476098 - RNA, 22 nt, Human
ggcuccucucuggccgcucccg

SEQ ID NO: 476099 - RNA, 22 nt, Human
ucucagagcaucauuuucuuag

SEQ ID NO: 476100 - RNA, 22 nt, Human
gagcagaugugugccaggaugc

SEQ ID NO: 476101 - RNA, 22 nt, Human
gugggacucuucuuuggcagug

SEQ ID NO: 476102 - RNA, 19 nt, Human
agcuggggcgguguguguu

SEQ ID NO: 476103 - RNA, 22 nt, Human
cccuggagggacagcugcucua

SEQ ID NO: 476104 - RNA, 22 nt, Human
uugcauugaucccagcuugggc

SEQ ID NO: 476105 - RNA, 22 nt, Human
uccucaggauguggaguagaau

SEQ ID NO: 476106 - RNA, 22 nt, Human
ggaggccaaagugugggcggcu

SEQ ID NO: 476107 - RNA, 22 nt, Human
auuagggaaggauuuggccuga

SEQ ID NO: 476108 - RNA, 19 nt, Human
ccuguacauuauucucccc

SEQ ID NO: 476109 - RNA, 22 nt, Human
ucauugcaguugaguuguguua

SEQ ID NO: 476110 - RNA, 22 nt, Human
aguuucuauguaagcuacguga

SEQ ID NO: 476111 - RNA, 22 nt, Human
uuuauguacauauccacaagga

SEQ ID NO: 476112 - RNA, 22 nt, Human
gcacccagcccagggcgugaug

SEQ ID NO: 476113 - RNA, 22 nt, Human
ccagcucuggcuucuugcuggg

SEQ ID NO: 476114 - RNA, 19 nt, Human
ccagagagcuagguacaga

SEQ ID NO: 476115 - RNA, 22 nt, Human
agugauggagcuuccucugcua

SEQ ID NO: 476116 - RNA, 21 nt, Human
agcuuguguguaucacagugu

SEQ ID NO: 476117 - RNA, 22 nt, Human
auucagcaguuccugcuucagu

SEQ ID NO: 476118 - RNA, 22 nt, Human
ccagggccaguaagauuggcau

SEQ ID NO: 476119 - RNA, 19 nt, Human
cuggaaugagaacaugccc

SEQ ID NO: 476120 - RNA, 22 nt, Human
acagaauauugguuacuguugc

SEQ ID NO: 476121 - RNA, 22 nt, Human
auuguguaauuuucagcucaua

SEQ ID NO: 476122 - RNA, 19 nt, Human
cucuggagcagacacugga

SEQ ID NO: 476123 - RNA, 22 nt, Human
cugggcagcugugcaaacaaua

SEQ ID NO: 476124 - RNA, 22 nt, Human
uucaagaucuuccaaaggauac

SEQ ID NO: 476125 - RNA, 22 nt, Human
uuggcucaggaccccugugacu

SEQ ID NO: 476126 - RNA, 22 nt, Human
ccauuuguucgcccagcuccaa

SEQ ID NO: 476127 - RNA, 22 nt, Human
ggagccaguuuagaccucaguu

SEQ ID NO: 476128 - RNA, 22 nt, Human
ugcucccaaacgaccuacugug

SEQ ID NO: 476129 - RNA, 22 nt, Human
agcugcccuucucuugcccuug

SEQ ID NO: 476130 - RNA, 22 nt, Human
ugucucugccagcuagcagaau

SEQ ID NO: 476131 - RNA, 22 nt, Human
cauugcccaguaggaucaccag

SEQ ID NO: 476132 - RNA, 22 nt, Human
uccugggaagagaccugagcau

SEQ ID NO: 476133 - RNA, 23 nt, Human
ucccagccucuucucuugcauac

SEQ ID NO: 476134 - RNA, 22 nt, Human
aagacacagcgaaauguuccug

SEQ ID NO: 476135 - RNA, 22 nt, Human
aaauguaguauguugcauguau

SEQ ID NO: 476136 - RNA, 22 nt, Human
gccagcagccacagaagucacu

SEQ ID NO: 476137 - RNA, 22 nt, Human
gaaggagagagacaucgucccu

SEQ ID NO: 476138 - RNA, 22 nt, Human
auggacagugugaagcagauag

SEQ ID NO: 476139 - RNA, 20 nt, Human
uccagggcuagggagcucau

SEQ ID NO: 476140 - RNA, 22 nt, Human
ggcagauguuauaugaucugag

SEQ ID NO: 476141 - RNA, 22 nt, Human
aagaacagauucagccugaacu

SEQ ID NO: 476142 - RNA, 22 nt, Human
acugcuuuuagaaaucuauaga

SEQ ID NO: 476143 - RNA, 22 nt, Human
cagagcggccacuagagggcgc

SEQ ID NO: 476144 - RNA, 22 nt, Human
ccucugagagaaggccuucagc

SEQ ID NO: 476145 - RNA, 22 nt, Human
cagggcucgcugccagcuucag

SEQ ID NO: 476146 - RNA, 22 nt, Human
gucucagagagcuacucucuua

SEQ ID NO: 476147 - RNA, 22 nt, Human
cagaggcagaauggagauuugg

SEQ ID NO: 476148 - RNA, 22 nt, Human
gcucaggaaacagcagggcuug

SEQ ID NO: 476149 - RNA, 22 nt, Human
agcucccaggcagucaugagga

SEQ ID NO: 476150 - RNA, 22 nt, Human
cuguacaucccgagagccagua

SEQ ID NO: 476151 - RNA, 22 nt, Human
agcuuccucaccucagaggucu

SEQ ID NO: 476152 - RNA, 22 nt, Human
uggaccugcuggaugggcaggu

SEQ ID NO: 476153 - RNA, 23 nt, Human
cuggccuccgacacuggccaaga

SEQ ID NO: 476154 - RNA, 22 nt, Human
agaggaugguugaggaagaccu

SEQ ID NO: 476155 - RNA, 22 nt, Human
gggcacuguguucagagugcag

SEQ ID NO: 476156 - RNA, 22 nt, Human
uccuguaguugcuaaguuuguu

SEQ ID NO: 476157 - RNA, 22 nt, Human
gagguuagaggucagugcaguc

SEQ ID NO: 476158 - RNA, 21 nt, Human
cagaaguaaggguaacuucuc

SEQ ID NO: 476159 - RNA, 22 nt, Human
uuccucagaaaauacuguccaa

SEQ ID NO: 476160 - RNA, 22 nt, Human
ucucaggagccacagcgggagu

SEQ ID NO: 476161 - RNA, 22 nt, Human
ggccuucacgugaccuggcgug

SEQ ID NO: 476162 - RNA, 22 nt, Human
uuuucauugagcaccugaguaa

SEQ ID NO: 476163 - RNA, 22 nt, Human
auuuaucaccaguuagcugacu

SEQ ID NO: 476164 - RNA, 22 nt, Human
ucuggccuacuggaguccauga

SEQ ID NO: 476165 - RNA, 23 nt, Human
aggaaggagguccuaacaguauc

SEQ ID NO: 476166 - RNA, 22 nt, Human
caaagguaaagaucugcugugg

SEQ ID NO: 476167 - RNA, 22 nt, Human
gggcacugcuggaggcucccug

SEQ ID NO: 476168 - RNA, 22 nt, Human
ccugggcaaaugccagagacaa

SEQ ID NO: 476169 - RNA, 22 nt, Human
agagugggugaucucuguuguc

SEQ ID NO: 476170 - RNA, 22 nt, Human
gcugcugugugggagacaggcg

SEQ ID NO: 476171 - RNA, 22 nt, Human
cuauuacauuucuggacauuca

SEQ ID NO: 476172 - RNA, 22 nt, Human
uggcagcuggagggcaauggcc

SEQ ID NO: 476173 - RNA, 22 nt, Human
gggcuguggagccgcgagggcu

SEQ ID NO: 476174 - RNA, 23 nt, Human
uacauuguggauggaguccuggg

SEQ ID NO: 476175 - RNA, 22 nt, Human
acuuuggguaagccaggugcua

SEQ ID NO: 476176 - RNA, 22 nt, Human
ggaaggaggggcaaagcaguuc

SEQ ID NO: 476177 - RNA, 22 nt, Human
ugacaauacagagagagcaaaa

SEQ ID NO: 476178 - RNA, 22 nt, Human
ccugugccauccugagcauccc

SEQ ID NO: 476179 - RNA, 22 nt, Human
uggcccugugugcaggcugcac

SEQ ID NO: 476180 - RNA, 22 nt, Human
ggugccaggcucccagcucagg

SEQ ID NO: 476181 - RNA, 22 nt, Human
gcagggcagccacaggcccccu

SEQ ID NO: 476182 - RNA, 22 nt, Human
ugcaagggcuuagggggcugug

SEQ ID NO: 476183 - RNA, 22 nt, Human
cacugaguucccugacauuuca

SEQ ID NO: 476184 - RNA, 22 nt, Human
ucuccucaccaccagcagcaga

SEQ ID NO: 476185 - RNA, 22 nt, Human
cagugcaggcugggggcccugc

SEQ ID NO: 476186 - RNA, 19 nt, Human
uggcagaggcaguuuguac

SEQ ID NO: 476187 - RNA, 22 nt, Human
cuggcucaauuuguacugcugu

SEQ ID NO: 476188 - RNA, 22 nt, Human
gcuguccaugucuggccucagu

SEQ ID NO: 476189 - RNA, 22 nt, Human
ccagguggacggcgaguacagg

SEQ ID NO: 476190 - RNA, 18 nt, Human
ccuggaccugucuccuuu

SEQ ID NO: 476191 - RNA, 22 nt, Human
augaagucugcacaugcaugug

SEQ ID NO: 476192 - RNA, 22 nt, Human
ugcaagcacucaaugcaaacag

SEQ ID NO: 476193 - RNA, 22 nt, Human
uuucacaaacugaggagacaau

SEQ ID NO: 476194 - RNA, 22 nt, Human
aacaaaugaccugauuucuucc

SEQ ID NO: 476195 - RNA, 23 nt, Human
agguucaggagauggaggaacaa

SEQ ID NO: 476196 - RNA, 20 nt, Human
ggcugugcccuuccguggcc

SEQ ID NO: 476197 - RNA, 22 nt, Human
uacaaagucaccagcuucuugc

SEQ ID NO: 476198 - RNA, 17 nt, Human
agagagagcaugccacc

SEQ ID NO: 476199 - RNA, 22 nt, Human
agguggagacccagagaaggcg

SEQ ID NO: 476200 - RNA, 21 nt, Human
uuacaaagcaagugcuguguc

SEQ ID NO: 476201 - RNA, 22 nt, Human
acaagaauuauuucuaguuaac

SEQ ID NO: 476202 - RNA, 22 nt, Human
aaauguguuuagaugguuuauu

SEQ ID NO: 476203 - RNA, 22 nt, Human
gcccagcagcugguggagaagg

SEQ ID NO: 476204 - RNA, 22 nt, Human
caaagugcuaggauuacaggcc

SEQ ID NO: 476205 - RNA, 19 nt, Human
agcuggagauuggagggca

SEQ ID NO: 476206 - RNA, 22 nt, Human
ccagcagcucccucaggguccg

SEQ ID NO: 476207 - RNA, 22 nt, Human
auuugagaugguaaauaacuuu

SEQ ID NO: 476208 - RNA, 22 nt, Human
uuccuguaguugugcaauguac

SEQ ID NO: 476209 - RNA, 22 nt, Human
gagcagcuccagccgcaugacu

SEQ ID NO: 476210 - RNA, 22 nt, Human
auguuucaugacugagcaaaau

SEQ ID NO: 476211 - RNA, 22 nt, Human
cagagcugcgcuuuuuccuggu

SEQ ID NO: 476212 - RNA, 22 nt, Human
guuauuagaagugaaggauugu

SEQ ID NO: 476213 - RNA, 22 nt, Human
guacucucuugaaggccuuucu

SEQ ID NO: 476214 - RNA, 22 nt, Human
cucagaagaacccaggguccca

SEQ ID NO: 476215 - RNA, 22 nt, Human
aaggaccuauauugucagagga

SEQ ID NO: 476216 - RNA, 19 nt, Human
uccccagcaccucugaguc

SEQ ID NO: 476217 - RNA, 22 nt, Human
aacucagcauccugcacagaga

SEQ ID NO: 476218 - RNA, 22 nt, Human
cuccagggaggagcacggguuc

SEQ ID NO: 476219 - RNA, 22 nt, Human
ugaagccuuguguggccucucu

SEQ ID NO: 476220 - RNA, 22 nt, Human
auguucuaaucccugcuaugua

SEQ ID NO: 476221 - RNA, 22 nt, Human
ccugcugggccugagcaaugag

SEQ ID NO: 476222 - RNA, 22 nt, Human
aucaggauuauuaaaucuggau

SEQ ID NO: 476223 - RNA, 22 nt, Human
cugggcacagcguugggcucuu

SEQ ID NO: 476224 - RNA, 22 nt, Human
ucccuggguccugcuugcucuc

SEQ ID NO: 476225 - RNA, 21 nt, Human
uccugccuuaguccagagcag

SEQ ID NO: 476226 - RNA, 22 nt, Human
agcugagcacauucaaacaggu

SEQ ID NO: 476227 - RNA, 19 nt, Human
cagaguccuugaccagucc

SEQ ID NO: 476228 - RNA, 22 nt, Human
ggcugugcgggcagccguggga

SEQ ID NO: 476229 - RNA, 22 nt, Human
cuucucucccuggcacucagac

SEQ ID NO: 476230 - RNA, 22 nt, Human
agugaggcuaauaggcaauggu

SEQ ID NO: 476231 - RNA, 22 nt, Human
gcuggccaguguggugaccacc

SEQ ID NO: 476232 - RNA, 22 nt, Human
cagugcagaggccagggaggau

SEQ ID NO: 476233 - RNA, 22 nt, Human
caguguuuguauagaauaugca

SEQ ID NO: 476234 - RNA, 22 nt, Human
uggucaggcugcucugcggcgu

SEQ ID NO: 476235 - RNA, 19 nt, Human
ucugucacuggggguauuc

SEQ ID NO: 476236 - RNA, 22 nt, Human
gcagagaaaguuuuguccucag

SEQ ID NO: 476237 - RNA, 22 nt, Human
augggcagcugcagcaguggug

SEQ ID NO: 476238 - RNA, 22 nt, Human
acaagauuuuaugacucuuuuu

SEQ ID NO: 476239 - RNA, 21 nt, Human
agagagaaggccauauggucc

SEQ ID NO: 476240 - RNA, 22 nt, Human
cccagcuucugagggggccuug

SEQ ID NO: 476241 - RNA, 22 nt, Human
gcucaggauuucauccaugugu

SEQ ID NO: 476242 - RNA, 22 nt, Human
caaagugcuggaauuacaggug

SEQ ID NO: 476243 - RNA, 22 nt, Human
aguuauauaacuaucuagaugc

SEQ ID NO: 476244 - RNA, 22 nt, Human
caggaaugacccaacaguuuca

SEQ ID NO: 476245 - RNA, 22 nt, Human
uuucauguuuucuuaaauggca

SEQ ID NO: 476246 - RNA, 21 nt, Human
ccacaggggcuccccugucag

SEQ ID NO: 476247 - RNA, 22 nt, Human
aaguccaguuucauuugagguc

SEQ ID NO: 476248 - RNA, 22 nt, Human
gccaugccugugucuccaggcc

SEQ ID NO: 476249 - RNA, 22 nt, Human
gugccaggcccagggagcgggg

SEQ ID NO: 476250 - RNA, 22 nt, Human
uucuuuuacauuaagauuucag

SEQ ID NO: 476251 - RNA, 22 nt, Human
aacuguacgauaauaaauuugu

SEQ ID NO: 476252 - RNA, 22 nt, Human
caacagaaggaagcagggucag

SEQ ID NO: 476253 - RNA, 22 nt, Human
gcuucucgggccugaugucguc

SEQ ID NO: 476254 - RNA, 22 nt, Human
aaugaacaucaaaugccuacca

SEQ ID NO: 476255 - RNA, 22 nt, Human
cacauuucugugagucaauauu

SEQ ID NO: 476256 - RNA, 22 nt, Human
agcccuccucacaucagcgucc

SEQ ID NO: 476257 - RNA, 22 nt, Human
gcaguggggaaugcuggggaga

SEQ ID NO: 476258 - RNA, 22 nt, Human
cccugcagaccaaugccauaga

SEQ ID NO: 476259 - RNA, 22 nt, Human
ugcagccaucuuucuuggagga

SEQ ID NO: 476260 - RNA, 22 nt, Human
ucaggaugguccuuuaugagaa

SEQ ID NO: 476261 - RNA, 22 nt, Human
uagcacaucuggcgcuuauagg

SEQ ID NO: 476262 - RNA, 22 nt, Human
gaggggcuggcuguggucccau

SEQ ID NO: 476263 - RNA, 22 nt, Human
uccugggcccaggcugccaggg

SEQ ID NO: 476264 - RNA, 22 nt, Human
caccuagggcaucccugcccca

SEQ ID NO: 476265 - RNA, 22 nt, Human
uagcuuuaccauagaagaguau

SEQ ID NO: 476266 - RNA, 22 nt, Human
guggccucugugcuccugccua

SEQ ID NO: 476267 - RNA, 17 nt, Human
uuccuggaagucauucc

SEQ ID NO: 476268 - RNA, 22 nt, Human
gaugggaggaaccugggucccu

SEQ ID NO: 476269 - RNA, 22 nt, Human
ccuggaaggcaggcauggauug

SEQ ID NO: 476270 - RNA, 22 nt, Human
ggauggagaugaccauggugac

SEQ ID NO: 476271 - RNA, 19 nt, Human
ucuggcuccugccaggcug

SEQ ID NO: 476272 - RNA, 21 nt, Human
uucagcaguccucuagagaua

SEQ ID NO: 476273 - RNA, 22 nt, Human
cuggcagcugcccgagaugccc

SEQ ID NO: 476274 - RNA, 22 nt, Human
ugaguccaccuuaguauauggg

SEQ ID NO: 476275 - RNA, 22 nt, Human
acaugcauacaagcacauguag

SEQ ID NO: 476276 - RNA, 22 nt, Human
agucaaagcuacaggcauuuga

SEQ ID NO: 476277 - RNA, 22 nt, Human
uguauacaggauuacucauagc

SEQ ID NO: 476278 - RNA, 22 nt, Human
uagcaguggaaucuuuugucca

SEQ ID NO: 476279 - RNA, 22 nt, Human
cugccuccugccgugcagcuuc

SEQ ID NO: 476280 - RNA, 22 nt, Human
auuauuucucacucacauaaua

SEQ ID NO: 476281 - RNA, 22 nt, Human
uccucagaugcucuuggacgcc

SEQ ID NO: 476282 - RNA, 22 nt, Human
uuuuccucuguauuugaaaugc

SEQ ID NO: 476283 - RNA, 22 nt, Human
gucagcaccucuuuggggagcu

SEQ ID NO: 476284 - RNA, 19 nt, Human
uagaaugcccacuuaaaaa

SEQ ID NO: 476285 - RNA, 22 nt, Human
agagugggccucugagucccag

SEQ ID NO: 476286 - RNA, 22 nt, Human
uuuugcuugagugcacaaaaug

SEQ ID NO: 476287 - RNA, 22 nt, Human
agugggcaugaucuggugucug

SEQ ID NO: 476288 - RNA, 22 nt, Human
cccagcccagcguucgaggggu

SEQ ID NO: 476289 - RNA, 22 nt, Human
aggcagagcuggguuuugaaau

SEQ ID NO: 476290 - RNA, 22 nt, Human
auuuaugauuagccuauuguug

SEQ ID NO: 476291 - RNA, 22 nt, Human
gggcccuggacguggcggcaga

SEQ ID NO: 476292 - RNA, 22 nt, Human
agccuccacagaugcaaagggc

SEQ ID NO: 476293 - RNA, 22 nt, Human
agagcagcacguuguccccaca

SEQ ID NO: 476294 - RNA, 22 nt, Human
aggauccuccuuagaaaagacc

SEQ ID NO: 476295 - RNA, 22 nt, Human
agggucagagucaggugcagua

SEQ ID NO: 476296 - RNA, 22 nt, Human
uggcuuccgccgcgggccucgg

SEQ ID NO: 476297 - RNA, 22 nt, Human
cugccuggcauggagaagagaa

SEQ ID NO: 476298 - RNA, 22 nt, Human
agucacaguuccuacccaguaa

SEQ ID NO: 476299 - RNA, 22 nt, Human
agaagcuugaaggagcagugac

SEQ ID NO: 476300 - RNA, 22 nt, Human
gcagagaggauauuauugucca

SEQ ID NO: 476301 - RNA, 22 nt, Human
gcucagagcuugaaguuccacu

SEQ ID NO: 476302 - RNA, 22 nt, Human
gcugcucuccauggccgugagu

SEQ ID NO: 476303 - RNA, 22 nt, Human
gcuccagguauuugcccuuuua

SEQ ID NO: 476304 - RNA, 22 nt, Human
ggagccagagucugcaguguaa

SEQ ID NO: 476305 - RNA, 22 nt, Human
ugaaggccagggauuugcagcc

SEQ ID NO: 476306 - RNA, 21 nt, Human
cacaagacacauaggguguuu

SEQ ID NO: 476307 - RNA, 22 nt, Human
guggagaccuccuaggaugugu

SEQ ID NO: 476308 - RNA, 22 nt, Human
agggcagcagcuccuccuagcu

SEQ ID NO: 476309 - RNA, 22 nt, Human
uuaguuaguggggcugucaguc

SEQ ID NO: 476310 - RNA, 22 nt, Human
accugccucuaagcagcaggug

SEQ ID NO: 476311 - RNA, 22 nt, Human
uccugcagacauuuacaccuuu

SEQ ID NO: 476312 - RNA, 22 nt, Human
gcuugcuggugccugcaggcuc

SEQ ID NO: 476313 - RNA, 22 nt, Human
cuguuuuugugcugugucuccc

SEQ ID NO: 476314 - RNA, 22 nt, Human
augaaaacuuuagccucauuag

SEQ ID NO: 476315 - RNA, 22 nt, Human
uguuucauguggacauaguugu

SEQ ID NO: 476316 - RNA, 22 nt, Human
aucacgucaugguuugaucugg

SEQ ID NO: 476317 - RNA, 22 nt, Human
ccugucugcggaggaguggaag

SEQ ID NO: 476318 - RNA, 22 nt, Human
acugagcugugacaaugcuuaa

SEQ ID NO: 476319 - RNA, 20 nt, Human
ucagguagaucuuugagguc

SEQ ID NO: 476320 - RNA, 18 nt, Human
cccagcuuagcgccccuc

SEQ ID NO: 476321 - RNA, 22 nt, Human
ucuggcucccuggagcuccaca

SEQ ID NO: 476322 - RNA, 22 nt, Human
uggaauggaaacaaacugagga

SEQ ID NO: 476323 - RNA, 16 nt, Human
agcagccagcacugga

SEQ ID NO: 476324 - RNA, 22 nt, Human
ggacuucuaagugccagacacu

SEQ ID NO: 476325 - RNA, 22 nt, Human
aggcagcaugcucugcuucuac

SEQ ID NO: 476326 - RNA, 22 nt, Human
caggcagaagaaguggaaggac

SEQ ID NO: 476327 - RNA, 22 nt, Human
agaggcagaaguguucaaaccc

SEQ ID NO: 476328 - RNA, 22 nt, Human
uggagaaggacagccugagaaa

SEQ ID NO: 476329 - RNA, 22 nt, Human
aggcagcauuucugcuuaucca

SEQ ID NO: 476330 - RNA, 22 nt, Human
uauuuguugaguuguuaugucu

SEQ ID NO: 476331 - RNA, 22 nt, Human
ucugaacagaaaagaugcacaa

SEQ ID NO: 476332 - RNA, 22 nt, Human
ucauugcaggcauuccccugcc

SEQ ID NO: 476333 - RNA, 22 nt, Human
uuucacaaguaaaguccuaagu

SEQ ID NO: 476334 - RNA, 22 nt, Human
caaggagauaaaauguugagcu

SEQ ID NO: 476335 - RNA, 22 nt, Human
guggcagagggugagcuggacu

SEQ ID NO: 476336 - RNA, 22 nt, Human
cuggcagcgguuugcagccugg

SEQ ID NO: 476337 - RNA, 23 nt, Human
auacauacagucuuacugacuuu

SEQ ID NO: 476338 - RNA, 22 nt, Human
guuucauuuacaucuguaggua

SEQ ID NO: 476339 - RNA, 22 nt, Human
gggcacugaaugccaagcuagg

SEQ ID NO: 476340 - RNA, 22 nt, Human
agggcugacacaccuuauccuc

SEQ ID NO: 476341 - RNA, 22 nt, Human
ucuguggauuuuaguguucaug

SEQ ID NO: 476342 - RNA, 22 nt, Human
uugguuuaggaacuggcuugga

SEQ ID NO: 476343 - RNA, 22 nt, Human
aacaggagaguaaauauaugau

SEQ ID NO: 476344 - RNA, 17 nt, Human
uguggccuucugagcuu

SEQ ID NO: 476345 - RNA, 22 nt, Human
ggcugggcugcugggucagagc

SEQ ID NO: 476346 - RNA, 22 nt, Human
ugggcagacgggagcuugccuu

SEQ ID NO: 476347 - RNA, 22 nt, Human
aggcugagugcuccccuagaug

SEQ ID NO: 476348 - RNA, 22 nt, Human
cucuccagccacagaagcugcu

SEQ ID NO: 476349 - RNA, 22 nt, Human
agcagcauggaugggccucagc

SEQ ID NO: 476350 - RNA, 22 nt, Human
uuguaacagcuguuuauauagu

SEQ ID NO: 476351 - RNA, 22 nt, Human
caggaaagaaaugagaacacca

SEQ ID NO: 476352 - RNA, 19 nt, Human
cccagcuugaccaccugcu

SEQ ID NO: 476353 - RNA, 19 nt, Human
ucaggcaguuauucacaaa

SEQ ID NO: 476354 - RNA, 22 nt, Human
uauaguaaaauuuucauuuaug

SEQ ID NO: 476355 - RNA, 22 nt, Human
gcagagccccucaagccagccu

SEQ ID NO: 476356 - RNA, 22 nt, Human
uuugaacaugcugcaugauaau

SEQ ID NO: 476357 - RNA, 22 nt, Human
augcuauacauaugacaucaca

SEQ ID NO: 476358 - RNA, 22 nt, Human
gccugggaacucugaucuccug

SEQ ID NO: 476359 - RNA, 23 nt, Human
uccugagaugagacagugcugcc

SEQ ID NO: 476360 - RNA, 22 nt, Human
agcaugaagacuucagagcuag

SEQ ID NO: 476361 - RNA, 22 nt, Human
auaaggcagucccuuaacaagg

SEQ ID NO: 476362 - RNA, 22 nt, Human
cugcccugacugaccuuuugaa

SEQ ID NO: 476363 - RNA, 22 nt, Human
agaauuuuugauuaucuacucg

SEQ ID NO: 476364 - RNA, 22 nt, Human
uuccucagccaaggcugggauc

SEQ ID NO: 476365 - RNA, 22 nt, Human
acacugugucuagcauuuuaca

SEQ ID NO: 476366 - RNA, 22 nt, Human
uccagagccuauauguucaacu

SEQ ID NO: 476367 - RNA, 22 nt, Human
aagagccagugggaaagucuug

SEQ ID NO: 476368 - RNA, 22 nt, Human
ugcagagaaaccaguggaggac

SEQ ID NO: 476369 - RNA, 22 nt, Human
aaguaaaacacacaguccaccg

SEQ ID NO: 476370 - RNA, 22 nt, Human
aguguuccuugcuuucccagag

SEQ ID NO: 476371 - RNA, 22 nt, Human
gggggacuaacuggauccugga

SEQ ID NO: 476372 - RNA, 22 nt, Human
uaaauucugaucaaguuccuuc

SEQ ID NO: 476373 - RNA, 22 nt, Human
ggaggccaugaggcucuaggug

SEQ ID NO: 476374 - RNA, 22 nt, Human
gguagcagggcugugagucaga

SEQ ID NO: 476375 - RNA, 22 nt, Human
auuucacucucccugccacuua

SEQ ID NO: 476376 - RNA, 22 nt, Human
agagaauuacagaagaauguca

SEQ ID NO: 476377 - RNA, 22 nt, Human
gugccugguuuggggaauguuc

SEQ ID NO: 476378 - RNA, 22 nt, Human
auccaggguguggagagagcuc

SEQ ID NO: 476379 - RNA, 22 nt, Human
uuugaaagcaccauuugaguag

SEQ ID NO: 476380 - RNA, 22 nt, Human
uucacaauagcuggcaucaucu

SEQ ID NO: 476381 - RNA, 22 nt, Human
aguggcaguuugggagcuacag

SEQ ID NO: 476382 - RNA, 22 nt, Human
gaaagguugggugaauggugga

SEQ ID NO: 476383 - RNA, 22 nt, Human
ugcaggagcagagauggcugga

SEQ ID NO: 476384 - RNA, 22 nt, Human
ucuggcagggguucugcacuug

SEQ ID NO: 476385 - RNA, 22 nt, Human
ccucaggcuuacgggcaaugga

SEQ ID NO: 476386 - RNA, 22 nt, Human
uuuuuaagagauucuccagucu

SEQ ID NO: 476387 - RNA, 22 nt, Human
agagucugaggcagcugcagcc

SEQ ID NO: 476388 - RNA, 22 nt, Human
gaggccagaaugagcugaaugc

SEQ ID NO: 476389 - RNA, 22 nt, Human
gaggcagcggcucacagagaaa

SEQ ID NO: 476390 - RNA, 22 nt, Human
gugcuuccccaagccacagccu

SEQ ID NO: 476391 - RNA, 22 nt, Human
cagcugccuucugcgggaaguc

SEQ ID NO: 476392 - RNA, 22 nt, Human
agggcuccuaugccccauggac

SEQ ID NO: 476393 - RNA, 22 nt, Human
agucucugcaugaugcagcaca

SEQ ID NO: 476394 - RNA, 22 nt, Human
agaagccaaaugccagugaccu

SEQ ID NO: 476395 - RNA, 22 nt, Human
gcagcugguuaaugggagaauu

SEQ ID NO: 476396 - RNA, 22 nt, Human
agcuggugcucaggggcaugga

SEQ ID NO: 476397 - RNA, 22 nt, Human
gaggccaaucaauagggcaaua

SEQ ID NO: 476398 - RNA, 22 nt, Human
ccuggcagacugugagggcagg

SEQ ID NO: 476399 - RNA, 22 nt, Human
ggccuggcauggggacuaaggg

SEQ ID NO: 476400 - RNA, 22 nt, Human
aggcccugcccagugccacaag

SEQ ID NO: 476401 - RNA, 22 nt, Human
ccagcuuuagguugccugccag

SEQ ID NO: 476402 - RNA, 22 nt, Human
aggcaguguauugcuagcggcu

SEQ ID NO: 476403 - RNA, 22 nt, Human
uguaaucauuacaguacaugga

SEQ ID NO: 476404 - RNA, 22 nt, Human
cuuuccaacucuagugaaauuu

SEQ ID NO: 476405 - RNA, 22 nt, Human
ugggccacacacagaagaauca

SEQ ID NO: 476406 - RNA, 22 nt, Human
gcaggaagaugagcucagguaa

SEQ ID NO: 476407 - RNA, 19 nt, Human
cccaaggcccugggcaggc

SEQ ID NO: 476408 - RNA, 22 nt, Human
cugcccugucugcagccuggcu

SEQ ID NO: 476409 - RNA, 22 nt, Human
ucuucagagacucugagccccu

SEQ ID NO: 476410 - RNA, 20 nt, Human
gucugaggagcagugggaaa

SEQ ID NO: 476411 - RNA, 22 nt, Human
augauuucuauauaaacuuaaa

SEQ ID NO: 476412 - RNA, 22 nt, Human
caguggguaggaaaggcucuuc

SEQ ID NO: 476413 - RNA, 17 nt, Human
uagagcugguucaggag

SEQ ID NO: 476414 - RNA, 22 nt, Human
gagguucacaggcuaucacagu

SEQ ID NO: 476415 - RNA, 21 nt, Human
acagcagacaggcuuaggacc

SEQ ID NO: 476416 - RNA, 22 nt, Human
aggcagaggaaggguggauuug

SEQ ID NO: 476417 - RNA, 23 nt, Human
gggauauggaccuuggaggaguc

SEQ ID NO: 476418 - RNA, 22 nt, Human
uggaggaaguggacaguugugu

SEQ ID NO: 476419 - RNA, 22 nt, Human
uuauuacacugaaagaauugcg

SEQ ID NO: 476420 - RNA, 19 nt, Human
ucuuucauuucuagcucug

SEQ ID NO: 476421 - RNA, 22 nt, Human
cuggccagaguuggagggugug

SEQ ID NO: 476422 - RNA, 22 nt, Human
ggccucuggcaggcaggcccuc

SEQ ID NO: 476423 - RNA, 22 nt, Human
caggaggcuccuagggcucugu

SEQ ID NO: 476424 - RNA, 22 nt, Human
ugcagggcauaggguccaguuu

SEQ ID NO: 476425 - RNA, 22 nt, Human
cucucugguuucagcgaagggg

SEQ ID NO: 476426 - RNA, 19 nt, Human
ccugugugggguagagauc

SEQ ID NO: 476427 - RNA, 22 nt, Human
gucucagaccacccucuuuggc

SEQ ID NO: 476428 - RNA, 22 nt, Human
cugcuuccauaaauaaugugcu

SEQ ID NO: 476429 - RNA, 22 nt, Human
gcucccaccuccagccugaguu

SEQ ID NO: 476430 - RNA, 22 nt, Human
guggccugggguuuguucugag

SEQ ID NO: 476431 - RNA, 22 nt, Human
cacuuagucucaccaguucagu

SEQ ID NO: 476432 - RNA, 22 nt, Human
acccagcaaagauaaacuuaug

SEQ ID NO: 476433 - RNA, 22 nt, Human
acagcuggaggccccauugucc

SEQ ID NO: 476434 - RNA, 22 nt, Human
ugggauggcauccugggccuug

SEQ ID NO: 476435 - RNA, 22 nt, Human
agccaggcagacucucuuucuu

SEQ ID NO: 476436 - RNA, 22 nt, Human
uuccauauuuguguggcaaaag

SEQ ID NO: 476437 - RNA, 22 nt, Human
gccaccagggggcuccagugag

SEQ ID NO: 476438 - RNA, 22 nt, Human
agcugccugcuuaugagcucca

SEQ ID NO: 476439 - RNA, 22 nt, Human
uggcccugacugauguggaggg

SEQ ID NO: 476440 - RNA, 22 nt, Human
gcaguggaagccucuuuaagca

SEQ ID NO: 476441 - RNA, 22 nt, Human
aaagggaggggcgauaagccgg

SEQ ID NO: 476442 - RNA, 22 nt, Human
aaaugcuguguuuuaacauaga

SEQ ID NO: 476443 - RNA, 22 nt, Human
aaggccaucuacuuacggaauu

SEQ ID NO: 476444 - RNA, 22 nt, Human
agagccccugguggagugagaa

SEQ ID NO: 476445 - RNA, 22 nt, Human
ugcaguggaaucuggagagcag

SEQ ID NO: 476446 - RNA, 22 nt, Human
ucagcaauaugauaggcuuugu

SEQ ID NO: 476447 - RNA, 22 nt, Human
gugucccaaagauuagaaauca

SEQ ID NO: 476448 - RNA, 22 nt, Human
aggagaguucacacuggucaga

SEQ ID NO: 476449 - RNA, 22 nt, Human
gcaggagccacuucagggaugc

SEQ ID NO: 476450 - RNA, 22 nt, Human
ucugccuucgcugcucccugaa

SEQ ID NO: 476451 - RNA, 22 nt, Human
ugcagggcacacgcacgggugu

SEQ ID NO: 476452 - RNA, 22 nt, Human
acuggacagaggaaauauggag

SEQ ID NO: 476453 - RNA, 22 nt, Human
guggauggacaugggcaagagg

SEQ ID NO: 476454 - RNA, 22 nt, Human
agcuguguguuuccacugagcu

SEQ ID NO: 476455 - RNA, 22 nt, Human
aaagagcucacaguccacugga

SEQ ID NO: 476456 - RNA, 22 nt, Human
gccaggcauuuguuaggugcug

SEQ ID NO: 476457 - RNA, 22 nt, Human
gcagagccugggggucugcgga

SEQ ID NO: 476458 - RNA, 18 nt, Human
agcugcagaccaggaggu

SEQ ID NO: 476459 - RNA, 22 nt, Human
agaaaaaucuuggcgcuugucu

SEQ ID NO: 476460 - RNA, 22 nt, Human
cugguuccaggauggaucuuuc

SEQ ID NO: 476461 - RNA, 22 nt, Human
agaggagugggaagcagugcaa

SEQ ID NO: 476462 - RNA, 22 nt, Human
aacagaauaguugauguacagu

SEQ ID NO: 476463 - RNA, 22 nt, Human
uuagggacaaauuugcagaacc

SEQ ID NO: 476464 - RNA, 22 nt, Human
agucucugcugguugugccuau

SEQ ID NO: 476465 - RNA, 22 nt, Human
gcucugggauuaccagccuuag

SEQ ID NO: 476466 - RNA, 22 nt, Human
cugagguguugaugaccuaugc

SEQ ID NO: 476467 - RNA, 22 nt, Human
auaguggugagcugcauuuaug

SEQ ID NO: 476468 - RNA, 22 nt, Human
uggcagaaagaaccaugugcaa

SEQ ID NO: 476469 - RNA, 22 nt, Human
ggcaggucagguccaugaccaa

SEQ ID NO: 476470 - RNA, 22 nt, Human
uuucacaaguuucaggauucug

SEQ ID NO: 476471 - RNA, 22 nt, Human
gcucugcugaagccccuugcau

SEQ ID NO: 476472 - RNA, 22 nt, Human
agaaaugugaauuucauuuccu

SEQ ID NO: 476473 - RNA, 22 nt, Human
accaaggagacaaagguguauu

SEQ ID NO: 476474 - RNA, 22 nt, Human
ucugcaggaaaaaagugccugg

SEQ ID NO: 476475 - RNA, 22 nt, Human
cagaauuuuucgaauguacugu

SEQ ID NO: 476476 - RNA, 22 nt, Human
ucccaaggccaggcaucuagaa

SEQ ID NO: 476477 - RNA, 22 nt, Human
ucuggagcuggagggcaaggca

SEQ ID NO: 476478 - RNA, 22 nt, Human
uccucugccaaagggaguugcc

SEQ ID NO: 476479 - RNA, 22 nt, Human
ccuccacaggagcugcagugcu

SEQ ID NO: 476480 - RNA, 21 nt, Human
ccugggccaaauucccuggac

SEQ ID NO: 476481 - RNA, 22 nt, Human
uggaggcaacugaagauguagu

SEQ ID NO: 476482 - RNA, 22 nt, Human
ugauguucuguauaucauauag

SEQ ID NO: 476483 - RNA, 17 nt, Human
aguggcaggcagauggg

SEQ ID NO: 476484 - RNA, 22 nt, Human
uggcugcugagaaggcagcugu

SEQ ID NO: 476485 - RNA, 22 nt, Human
cucaggagagucuuauaucucc

SEQ ID NO: 476486 - RNA, 22 nt, Human
uccaagaagucaucuaaacugu

SEQ ID NO: 476487 - RNA, 22 nt, Human
aaccaggacaauuuugaaagua

SEQ ID NO: 476488 - RNA, 22 nt, Human
ucuuguccuaagagcuggauuc

SEQ ID NO: 476489 - RNA, 22 nt, Human
ucacugcaaggaggcuucucaa

SEQ ID NO: 476490 - RNA, 21 nt, Human
aacugcuggucuuuucugucu

SEQ ID NO: 476491 - RNA, 22 nt, Human
gagcuguccuaccaggaguccu

SEQ ID NO: 476492 - RNA, 22 nt, Human
aagcugcagacccccugucuca

SEQ ID NO: 476493 - RNA, 22 nt, Human
aacauuuaugguagucauugca

SEQ ID NO: 476494 - RNA, 22 nt, Human
cacugagaggucucauuuccaa

SEQ ID NO: 476495 - RNA, 22 nt, Human
gaggcagcuuggggcugugggu

SEQ ID NO: 476496 - RNA, 22 nt, Human
gggauggacuuggggacuccag

SEQ ID NO: 476497 - RNA, 18 nt, Human
acagaacucaggggcacc

SEQ ID NO: 476498 - RNA, 22 nt, Human
uugcugaaguuaaugcuugcaa

SEQ ID NO: 476499 - RNA, 22 nt, Human
aaguuugagagccuuuaguaua

SEQ ID NO: 476500 - RNA, 23 nt, Human
gcaggugguucgaacagaaguuu

SEQ ID NO: 476501 - RNA, 22 nt, Human
agggcagcuagcuguagaaaga

SEQ ID NO: 476502 - RNA, 22 nt, Human
cauugcaccacauugcaucccu

SEQ ID NO: 476503 - RNA, 22 nt, Human
ggcagcaaauauugucagcugu

SEQ ID NO: 476504 - RNA, 21 nt, Human
ugacauuuccaauauaaagcc

SEQ ID NO: 476505 - RNA, 19 nt, Human
cugugcaggccgggcugag

SEQ ID NO: 476506 - RNA, 22 nt, Human
uuuccucuuccgagggggaggc

SEQ ID NO: 476507 - RNA, 22 nt, Human
gaaagaggaaggagauguauua

SEQ ID NO: 476508 - RNA, 22 nt, Human
cuggugguucaggagaauggcu

SEQ ID NO: 476509 - RNA, 22 nt, Human
agcaguggcugaagauguuccu

SEQ ID NO: 476510 - RNA, 22 nt, Human
ugggagcccaagggagcugccg

SEQ ID NO: 476511 - RNA, 22 nt, Human
cagucucucagcuuucagcugu

SEQ ID NO: 476512 - RNA, 22 nt, Human
acacaugcugauaagaauauaa

SEQ ID NO: 476513 - RNA, 22 nt, Human
uuuaaucaggcaaagcauaaua

SEQ ID NO: 476514 - RNA, 22 nt, Human
gagcagcugguaggugaaccca

SEQ ID NO: 476515 - RNA, 22 nt, Human
gguggguuuggaagagcaggcu

SEQ ID NO: 476516 - RNA, 22 nt, Human
uagagaaaagcagggaucagga

SEQ ID NO: 476517 - RNA, 22 nt, Human
aagagcuggauugugcugcaga

SEQ ID NO: 476518 - RNA, 22 nt, Human
ggagaugcuuuccaguggggau

SEQ ID NO: 476519 - RNA, 22 nt, Human
agcaaacagugugcuaagaaau

SEQ ID NO: 476520 - RNA, 22 nt, Human
uuagggcuuuucugaauaggcc

SEQ ID NO: 476521 - RNA, 17 nt, Human
uagcugccccgaaugcu

SEQ ID NO: 476522 - RNA, 22 nt, Human
uugacaaaggaccuugcuauuu

SEQ ID NO: 476523 - RNA, 22 nt, Human
gggcuggugaggcugcccugca

SEQ ID NO: 476524 - RNA, 20 nt, Human
uguauauuuucugguguaaa

SEQ ID NO: 476525 - RNA, 22 nt, Human
gcugcucugaaaaugacuguug

SEQ ID NO: 476526 - RNA, 22 nt, Human
gcugaaggaggcucugguacua

SEQ ID NO: 476527 - RNA, 22 nt, Human
guuuuccuucucagccauugcc

SEQ ID NO: 476528 - RNA, 22 nt, Human
agggcuccaggggcugggugac

SEQ ID NO: 476529 - RNA, 22 nt, Human
aggcaagcauugggaacagggc

SEQ ID NO: 476530 - RNA, 22 nt, Human
gaacagcuucuugggagcuggg

SEQ ID NO: 476531 - RNA, 22 nt, Human
uucugucacuuaggaggucaua

SEQ ID NO: 476532 - RNA, 22 nt, Human
cugaggcugaagagggccuacg

SEQ ID NO: 476533 - RNA, 22 nt, Human
aagcuccccgaaacccaccucu

SEQ ID NO: 476534 - RNA, 22 nt, Human
gagcucagcacuaaaaucaugu

SEQ ID NO: 476535 - RNA, 22 nt, Human
aggaccaguaugagagcaucug

SEQ ID NO: 476536 - RNA, 22 nt, Human
cucagcagugacaagagaguau

SEQ ID NO: 476537 - RNA, 22 nt, Human
aggcugucugaccccagagccc

SEQ ID NO: 476538 - RNA, 22 nt, Human
gcucagaaaagugaggcucagu

SEQ ID NO: 476539 - RNA, 22 nt, Human
ccagguguggggaggacucaca

SEQ ID NO: 476540 - RNA, 18 nt, Human
ucucuuuuccccucauug

SEQ ID NO: 476541 - RNA, 22 nt, Human
aaggccagacaggaccacaucu

SEQ ID NO: 476542 - RNA, 22 nt, Human
agggccacaguggggccugaga

SEQ ID NO: 476543 - RNA, 22 nt, Human
gcagagguggcaucugggcucu

SEQ ID NO: 476544 - RNA, 22 nt, Human
ucaggggaaaucucucagcgaa

SEQ ID NO: 476545 - RNA, 18 nt, Human
augggaggggccaagaga

SEQ ID NO: 476546 - RNA, 22 nt, Human
aggguccaucaaggacugcaca

SEQ ID NO: 476547 - RNA, 22 nt, Human
aguugcagacgcagagauguug

SEQ ID NO: 476548 - RNA, 22 nt, Human
uguuuuuccaugugcagaacaa

SEQ ID NO: 476549 - RNA, 22 nt, Human
gaggguccccaugcagagcuca

SEQ ID NO: 476550 - RNA, 22 nt, Human
uucaggaugaaagugugcaaca

SEQ ID NO: 476551 - RNA, 22 nt, Human
caaugauggcuaggcagcugcu

SEQ ID NO: 476552 - RNA, 22 nt, Human
cugagcugcucccgcugcagcg

SEQ ID NO: 476553 - RNA, 22 nt, Human
ucacaugcuugaggaaagaaaa

SEQ ID NO: 476554 - RNA, 22 nt, Human
uccuucagcuuauuucuuagga

SEQ ID NO: 476555 - RNA, 22 nt, Human
cacugggcaauucugagccuaa

SEQ ID NO: 476556 - RNA, 22 nt, Human
cgccaggcuugguagcucaugc

SEQ ID NO: 476557 - RNA, 22 nt, Human
agcaggugacccaagcaggcug

SEQ ID NO: 476558 - RNA, 22 nt, Human
auuucucagcacuuccuaucuc

SEQ ID NO: 476559 - RNA, 23 nt, Human
uggcugagcccacuaucuuggcc

SEQ ID NO: 476560 - RNA, 22 nt, Human
aagccucaccuuuuagaagcua

SEQ ID NO: 476561 - RNA, 22 nt, Human
ugggcugaguggcagccagagu

SEQ ID NO: 476562 - RNA, 23 nt, Human
uggagaugccccacucccugucu

SEQ ID NO: 476563 - RNA, 22 nt, Human
gaaggccaagaggcuccaagau

SEQ ID NO: 476564 - RNA, 22 nt, Human
gcuuccugucccucagccauga

SEQ ID NO: 476565 - RNA, 22 nt, Human
cagcacuggggggauucggagc

SEQ ID NO: 476566 - RNA, 22 nt, Human
aaaaucugcuuccuuuuacaga

SEQ ID NO: 476567 - RNA, 22 nt, Human
uguacauacauagauauacaca

SEQ ID NO: 476568 - RNA, 22 nt, Human
cagagcuguugcggggcuuggc

SEQ ID NO: 476569 - RNA, 22 nt, Human
aucaguuuguauaugaaacacu

SEQ ID NO: 476570 - RNA, 22 nt, Human
ucaucucaaaacccaaggggca

SEQ ID NO: 476571 - RNA, 22 nt, Human
aaaucaguucucccuuucuuca

SEQ ID NO: 476572 - RNA, 22 nt, Human
ucagagagguuaaauaucuugu

SEQ ID NO: 476573 - RNA, 22 nt, Human
ugggccugacucaccugccucc

SEQ ID NO: 476574 - RNA, 21 nt, Human
aacauuucugggagaacucac

SEQ ID NO: 476575 - RNA, 22 nt, Human
ucccagccuuucuuuucugcug

SEQ ID NO: 476576 - RNA, 22 nt, Human
uuaacauuucuuuuccacucau

SEQ ID NO: 476577 - RNA, 23 nt, Human
gggagaauaugaggaugauggug

SEQ ID NO: 476578 - RNA, 22 nt, Human
augcuauacucaaagaaauuca

SEQ ID NO: 476579 - RNA, 22 nt, Human
gcugcucugugacagccuccgg

SEQ ID NO: 476580 - RNA, 22 nt, Human
cagucuucuaaccuagcagccu

SEQ ID NO: 476581 - RNA, 22 nt, Human
aacauuucuucugaaacugagu

SEQ ID NO: 476582 - RNA, 22 nt, Human
agguacagcaauauaagagguc

SEQ ID NO: 476583 - RNA, 22 nt, Human
auaugaagucagacaaacuggg

SEQ ID NO: 476584 - RNA, 22 nt, Human
uccaggcauguggccaguacuc

SEQ ID NO: 476585 - RNA, 22 nt, Human
cugcuggggucagagcacuggg

SEQ ID NO: 476586 - RNA, 22 nt, Human
uccagcagguuggucaggugca

SEQ ID NO: 476587 - RNA, 22 nt, Human
aggcaaaauuacaaaguuauua

SEQ ID NO: 476588 - RNA, 22 nt, Human
ccuggccuuaagggcagggagc

SEQ ID NO: 476589 - RNA, 22 nt, Human
agaugguuuugucuuuaugauu

SEQ ID NO: 476590 - RNA, 22 nt, Human
ggggcagcuaccggaaguaggg

SEQ ID NO: 476591 - RNA, 22 nt, Human
cagggcucccaaauaucucuuc

SEQ ID NO: 476592 - RNA, 22 nt, Human
ggagcugggguuggcaucuucc

SEQ ID NO: 476593 - RNA, 20 nt, Human
ccagguggugccuggagagg

SEQ ID NO: 476594 - RNA, 22 nt, Human
aacagacagaaaaaugugaucu

SEQ ID NO: 476595 - RNA, 18 nt, Human
auuuugaacaaugcugua

SEQ ID NO: 476596 - RNA, 22 nt, Human
aggagggugauccgggcugguc

SEQ ID NO: 476597 - RNA, 22 nt, Human
gaguccaggcucagaaacccgu

SEQ ID NO: 476598 - RNA, 22 nt, Human
ggccugaggccaccagcagccc

SEQ ID NO: 476599 - RNA, 22 nt, Human
cugacucccaaagaggacgcgu

SEQ ID NO: 476600 - RNA, 22 nt, Human
cagagccauccaggugccuguu

SEQ ID NO: 476601 - RNA, 22 nt, Human
acauaaaggugacuaacaucuu

SEQ ID NO: 476602 - RNA, 22 nt, Human
cuccaggagcugugucuuucuu

SEQ ID NO: 476603 - RNA, 22 nt, Human
caugucuguguacacaugcaca

SEQ ID NO: 476604 - RNA, 21 nt, Human
acucaggagacuaacuauguc

SEQ ID NO: 476605 - RNA, 22 nt, Human
cagggacauugguggccagguu

SEQ ID NO: 476606 - RNA, 22 nt, Human
ccagcccuucccaacuggccag

SEQ ID NO: 476607 - RNA, 22 nt, Human
acagccuguuugaucuggugcu

SEQ ID NO: 476608 - RNA, 22 nt, Human
uggcucagaacuacuucuaguu

SEQ ID NO: 476609 - RNA, 22 nt, Human
ucauuucuauugcuacugucug

SEQ ID NO: 476610 - RNA, 22 nt, Human
uuuguaaaaggaggaagcaugg

SEQ ID NO: 476611 - RNA, 22 nt, Human
gcuucgggguccaagcgcgugu

SEQ ID NO: 476612 - RNA, 22 nt, Human
cacaggagugcugcuauuguug

SEQ ID NO: 476613 - RNA, 22 nt, Human
aacagcagggggaccugcuggu

SEQ ID NO: 476614 - RNA, 22 nt, Human
gagggcucaacuacuacuaggc

SEQ ID NO: 476615 - RNA, 22 nt, Human
accucugcucaagaccccuccg

SEQ ID NO: 476616 - RNA, 22 nt, Human
aacagaaugcaggggaugcugc

SEQ ID NO: 476617 - RNA, 22 nt, Human
uucauguaauuccauaagguaa

SEQ ID NO: 476618 - RNA, 22 nt, Human
gugcaaugugcuucgugccaug

SEQ ID NO: 476619 - RNA, 21 nt, Human
gcagccacugccuucaacaau

SEQ ID NO: 476620 - RNA, 22 nt, Human
cagagccaaaccucagggcccg

SEQ ID NO: 476621 - RNA, 22 nt, Human
augaggcaggauuaagcuauca

SEQ ID NO: 476622 - RNA, 22 nt, Human
uggcuugucauguaucugaggc

SEQ ID NO: 476623 - RNA, 22 nt, Human
ugagaagcugcugacuuagccu

SEQ ID NO: 476624 - RNA, 22 nt, Human
uccuggaguauuucuguggugu

SEQ ID NO: 476625 - RNA, 22 nt, Human
agccugagccccauccagcuga

SEQ ID NO: 476626 - RNA, 22 nt, Human
aggagcugagggagcgcccuug

SEQ ID NO: 476627 - RNA, 22 nt, Human
gggaccuggggacuccuuguuc

SEQ ID NO: 476628 - RNA, 22 nt, Human
accucugcaguagggcugugcc

SEQ ID NO: 476629 - RNA, 22 nt, Human
cagaggcuaagaugagugggug

SEQ ID NO: 476630 - RNA, 22 nt, Human
gggcucugggaugcucuuagag

SEQ ID NO: 476631 - RNA, 22 nt, Human
gggaagcagcauugugcuggcu

SEQ ID NO: 476632 - RNA, 22 nt, Human
cuguccugcaguugggggcagg

SEQ ID NO: 476633 - RNA, 22 nt, Human
cuguccucuguccucagcagga

SEQ ID NO: 476634 - RNA, 22 nt, Human
aauguacaaaagucagccaacu

SEQ ID NO: 476635 - RNA, 22 nt, Human
agagccuggaccugagcuacaa

SEQ ID NO: 476636 - RNA, 22 nt, Human
aggagucauugagagggguccu

SEQ ID NO: 476637 - RNA, 22 nt, Human
ccaggcugcucacaagcugccc

SEQ ID NO: 476638 - RNA, 22 nt, Human
gcccagagagaugcuguagacc

SEQ ID NO: 476639 - RNA, 22 nt, Human
guggcagggugcucaucaugca

SEQ ID NO: 476640 - RNA, 23 nt, Human
uggcuggcagaaacugaagcaug

SEQ ID NO: 476641 - RNA, 22 nt, Human
ccagagagaguacugggcucug

SEQ ID NO: 476642 - RNA, 22 nt, Human
gcuggagccauuggcuuggccu

SEQ ID NO: 476643 - RNA, 18 nt, Human
uggagccauugccaccau

SEQ ID NO: 476644 - RNA, 22 nt, Human
uccauugucuuugguccuagcc

SEQ ID NO: 476645 - RNA, 22 nt, Human
ucucucagaggccaggguccug

SEQ ID NO: 476646 - RNA, 22 nt, Human
cagcuguguaugagagcaugcu

SEQ ID NO: 476647 - RNA, 22 nt, Human
agucacuguucugucaugucaa

SEQ ID NO: 476648 - RNA, 20 nt, Human
ucucccaggcucagggaaga

SEQ ID NO: 476649 - RNA, 22 nt, Human
agccucuguagaaagcagugug

SEQ ID NO: 476650 - RNA, 22 nt, Human
gggauggggggaagcguccaug

SEQ ID NO: 476651 - RNA, 22 nt, Human
uucauuccugagcccauauuua

SEQ ID NO: 476652 - RNA, 22 nt, Human
ugggcacuguagcuggugcugg

SEQ ID NO: 476653 - RNA, 22 nt, Human
caggagacuauggcccaaggcc

SEQ ID NO: 476654 - RNA, 22 nt, Human
gcccucagaguuccccacagug

SEQ ID NO: 476655 - RNA, 22 nt, Human
ccagagcuccagggcuacagaa

SEQ ID NO: 476656 - RNA, 22 nt, Human
cauguaaaacacucagaacagu

SEQ ID NO: 476657 - RNA, 22 nt, Human
gucccuggaauggacucugcgc

SEQ ID NO: 476658 - RNA, 22 nt, Human
ugagccugggagauggaggcug

SEQ ID NO: 476659 - RNA, 21 nt, Human
acagugugcuucucucccucc

SEQ ID NO: 476660 - RNA, 22 nt, Human
cugcugugcuuguggccacccg

SEQ ID NO: 476661 - RNA, 22 nt, Human
caguguggagggagagagccug

SEQ ID NO: 476662 - RNA, 20 nt, Human
uggcaggaggcagcagugga

SEQ ID NO: 476663 - RNA, 22 nt, Human
ugcauuguugaugaguugaaua

SEQ ID NO: 476664 - RNA, 22 nt, Human
ucuggagccuuggaugggaaag

SEQ ID NO: 476665 - RNA, 22 nt, Human
ggcagcuccucaaaaaauuaaa

SEQ ID NO: 476666 - RNA, 22 nt, Human
ucucuucuagcuucuugugguu

SEQ ID NO: 476667 - RNA, 22 nt, Human
cacagcuggggaagcugaggcc

SEQ ID NO: 476668 - RNA, 22 nt, Human
uccaggaggccucauuuccugu

SEQ ID NO: 476669 - RNA, 22 nt, Human
ggcucuggaaaguguccuugau

SEQ ID NO: 476670 - RNA, 22 nt, Human
ucugaaaugcaggcaauuugcu

SEQ ID NO: 476671 - RNA, 22 nt, Human
acugggaggcaucuggagcuga

SEQ ID NO: 476672 - RNA, 22 nt, Human
uuuaaaaaacuagucugagucu

SEQ ID NO: 476673 - RNA, 22 nt, Human
acuuugcaauacuuaauacaaa

SEQ ID NO: 476674 - RNA, 22 nt, Human
ccagagaggcaaaacuccuucc

SEQ ID NO: 476675 - RNA, 22 nt, Human
gagcagcuagauaaagcccuuc

SEQ ID NO: 476676 - RNA, 22 nt, Human
cccaggcacagauuaucccaau

SEQ ID NO: 476677 - RNA, 22 nt, Human
gaaaagagaacaucugaggauc

SEQ ID NO: 476678 - RNA, 22 nt, Human
ccuggcugggccugauuucuca

SEQ ID NO: 476679 - RNA, 22 nt, Human
ggcucagguuuaaagugcuuua

SEQ ID NO: 476680 - RNA, 22 nt, Human
gcagagccugugucugagcaaa

SEQ ID NO: 476681 - RNA, 22 nt, Human
aagagggaggugcgggugcaga

SEQ ID NO: 476682 - RNA, 23 nt, Human
cagaggcaucggauucaacauca

SEQ ID NO: 476683 - RNA, 22 nt, Human
cucagcccagcccaggaccagg

SEQ ID NO: 476684 - RNA, 22 nt, Human
uagcuuuaaugaguugguaaga

SEQ ID NO: 476685 - RNA, 22 nt, Human
guauuauuggguaguaugguaa

SEQ ID NO: 476686 - RNA, 20 nt, Human
ugcagcuucaccugugucau

SEQ ID NO: 476687 - RNA, 22 nt, Human
ggagcugaugacgucaccaugg

SEQ ID NO: 476688 - RNA, 22 nt, Human
ccaucccuucaccacagcagua

SEQ ID NO: 476689 - RNA, 22 nt, Human
augggaggguggaaaggcucug

SEQ ID NO: 476690 - RNA, 22 nt, Human
ggugaguugggguucacagguc

SEQ ID NO: 476691 - RNA, 22 nt, Human
cugggacagcugagacaggaga

SEQ ID NO: 476692 - RNA, 22 nt, Human
acuuucucccacccacccgucu

SEQ ID NO: 476693 - RNA, 22 nt, Human
ccucuuugugccugcaggcugc

SEQ ID NO: 476694 - RNA, 22 nt, Human
acccaggguagaaccucagagc

SEQ ID NO: 476695 - RNA, 22 nt, Human
agggcaguucaacuucauagug

SEQ ID NO: 476696 - RNA, 22 nt, Human
auuugucuuugagugcccugcu

SEQ ID NO: 476697 - RNA, 22 nt, Human
ugaacagaucaauagaacugac

SEQ ID NO: 476698 - RNA, 22 nt, Human
gaggccuggaauuccagccugg

SEQ ID NO: 476699 - RNA, 22 nt, Human
ccagggcugguggcugcagagg

SEQ ID NO: 476700 - RNA, 22 nt, Human
uacauuguuuuuucuugccauc

SEQ ID NO: 476701 - RNA, 22 nt, Human
agccagcugccuuucacaucug

SEQ ID NO: 476702 - RNA, 22 nt, Human
gccagagccacuuuugggugau

SEQ ID NO: 476703 - RNA, 22 nt, Human
ccugggcuuucaaaaccagccu

SEQ ID NO: 476704 - RNA, 22 nt, Human
uggcuuucucccccagcuucuc

SEQ ID NO: 476705 - RNA, 22 nt, Human
ucuaccacuaagugugcuuuga

SEQ ID NO: 476706 - RNA, 19 nt, Human
ccagcccugucacuucuug

SEQ ID NO: 476707 - RNA, 21 nt, Human
cagugagguccccagccuagg

SEQ ID NO: 476708 - RNA, 22 nt, Human
augggcuguccuaguccagccc

SEQ ID NO: 476709 - RNA, 22 nt, Human
cugugucucuccuuacaagacu

SEQ ID NO: 476710 - RNA, 22 nt, Human
gcuccucuauuccccacauuuu

SEQ ID NO: 476711 - RNA, 22 nt, Human
auguaagguucagaguauguga

SEQ ID NO: 476712 - RNA, 22 nt, Human
ggagugaaguggcgcgaucucg

SEQ ID NO: 476713 - RNA, 22 nt, Human
acgcagaagggccuggcgugcc

SEQ ID NO: 476714 - RNA, 22 nt, Human
uagcagggaaggugugcugagc

SEQ ID NO: 476715 - RNA, 22 nt, Human
aaucaguuucuuggcaaguuua

SEQ ID NO: 476716 - RNA, 22 nt, Human
uugauacaggccuucuagauga

SEQ ID NO: 476717 - RNA, 20 nt, Human
ucccuggaggugguggcauc

SEQ ID NO: 476718 - RNA, 22 nt, Human
ugaaugaugcaguauaaugaua

SEQ ID NO: 476719 - RNA, 22 nt, Human
ucaguuuuucuauacuuuguag

SEQ ID NO: 476720 - RNA, 22 nt, Human
agucccagccuguaggauuggg

SEQ ID NO: 476721 - RNA, 22 nt, Human
cugcagugcaagcccagaugga

SEQ ID NO: 476722 - RNA, 22 nt, Human
gcuugcucaacccccgucucuc

SEQ ID NO: 476723 - RNA, 18 nt, Human
cccagcuggugggucagu

SEQ ID NO: 476724 - RNA, 22 nt, Human
ggcuucugagugcucugcuguu

SEQ ID NO: 476725 - RNA, 22 nt, Human
uguaggauuuucaccagaccuu

SEQ ID NO: 476726 - RNA, 22 nt, Human
ggggaaggauugaguugaccca

SEQ ID NO: 476727 - RNA, 22 nt, Human
ucaggcuggaaugcaguggggc

SEQ ID NO: 476728 - RNA, 22 nt, Human
aaacaucaccauuuuaccuaau

SEQ ID NO: 476729 - RNA, 19 nt, Human
gagcagcugcacccauuga

SEQ ID NO: 476730 - RNA, 22 nt, Human
ugcugccauggucgcugguguc

SEQ ID NO: 476731 - RNA, 22 nt, Human
aggcgcaggguuuggacccagg

SEQ ID NO: 476732 - RNA, 22 nt, Human
gagcuuaggccagggacaggga

SEQ ID NO: 476733 - RNA, 22 nt, Human
ugggagaagcagcagccaagug

SEQ ID NO: 476734 - RNA, 22 nt, Human
agaguccauaugugggaggagu

SEQ ID NO: 476735 - RNA, 22 nt, Human
gagguggguguaucacagguca

SEQ ID NO: 476736 - RNA, 22 nt, Human
ucucagggccccaaaggcuagu

SEQ ID NO: 476737 - RNA, 17 nt, Human
gacaagacagaauucau

SEQ ID NO: 476738 - RNA, 22 nt, Human
uagaaacauguucuguucuguu

SEQ ID NO: 476739 - RNA, 22 nt, Human
ugcagggccuucuagaccaugg

SEQ ID NO: 476740 - RNA, 22 nt, Human
ucagugucuugggcuugaaugc

SEQ ID NO: 476741 - RNA, 20 nt, Human
uaaggcuguuuuguauuccu

SEQ ID NO: 476742 - RNA, 22 nt, Human
acagucuugagcaucagccaga

SEQ ID NO: 476743 - RNA, 22 nt, Human
gggcugcugccaccagguggau

SEQ ID NO: 476744 - RNA, 22 nt, Human
aggcuggaguacaguggcuauu

SEQ ID NO: 476745 - RNA, 22 nt, Human
uaugcacgucuauuuaugaaga

SEQ ID NO: 476746 - RNA, 22 nt, Human
acaacacagcaaaaccccaucu

SEQ ID NO: 476747 - RNA, 22 nt, Human
agaauuagaggccauguacuug

SEQ ID NO: 476748 - RNA, 22 nt, Human
gcagagcaguacucucuugacu

SEQ ID NO: 476749 - RNA, 22 nt, Human
agcuuuauauuuaaugaauucu

SEQ ID NO: 476750 - RNA, 22 nt, Human
cugugccuaagaugcaugucuc

SEQ ID NO: 476751 - RNA, 22 nt, Human
auaugcauuuaccuggcauaua

SEQ ID NO: 476752 - RNA, 22 nt, Human
uagggcugccuauggcuagaua

SEQ ID NO: 476753 - RNA, 22 nt, Human
caggguacagaguuuucuaaac

SEQ ID NO: 476754 - RNA, 22 nt, Human
cugaagaugucugagaugcuca

SEQ ID NO: 476755 - RNA, 22 nt, Human
cccugcagccggccagcucauu

SEQ ID NO: 476756 - RNA, 22 nt, Human
gccaggcagcugggagggugcc

SEQ ID NO: 476757 - RNA, 23 nt, Human
cacugcagcguggucuggcagga

SEQ ID NO: 476758 - RNA, 22 nt, Human
caguguguggauccucccagga

SEQ ID NO: 476759 - RNA, 22 nt, Human
gcauggcagugaggauggugcu

SEQ ID NO: 476760 - RNA, 22 nt, Human
ucuuggagacucuuguauauuu

SEQ ID NO: 476761 - RNA, 22 nt, Human
cugucagguuggucucagagcu

SEQ ID NO: 476762 - RNA, 20 nt, Human
ccuaggcaugcugagucucc

SEQ ID NO: 476763 - RNA, 22 nt, Human
uagaggcagaagaaauugacaa

SEQ ID NO: 476764 - RNA, 22 nt, Human
agcuggagaaaccugggagggu

SEQ ID NO: 476765 - RNA, 19 nt, Human
auuccucaaggacagaaau

SEQ ID NO: 476766 - RNA, 22 nt, Human
ucccagauuguugauggcuuaa

SEQ ID NO: 476767 - RNA, 22 nt, Human
uccuugaacagagggccugggu

SEQ ID NO: 476768 - RNA, 22 nt, Human
ggccuggaaugcuuuccuacca

SEQ ID NO: 476769 - RNA, 22 nt, Human
cagggcucaccacugggauccu

SEQ ID NO: 476770 - RNA, 22 nt, Human
aggccuuaccauagcuguagca

SEQ ID NO: 476771 - RNA, 22 nt, Human
gagcuguccgccccugggccga

SEQ ID NO: 476772 - RNA, 22 nt, Human
ugaagcaggaaccagcagcauu

SEQ ID NO: 476773 - RNA, 22 nt, Human
ggaaagccaggugcucuggugu

SEQ ID NO: 476774 - RNA, 22 nt, Human
agccaguguuaagugacugguu

SEQ ID NO: 476775 - RNA, 22 nt, Human
gggccucucccuucucacgcau

SEQ ID NO: 476776 - RNA, 22 nt, Human
gagggcuccauuccccgugccc

SEQ ID NO: 476777 - RNA, 22 nt, Human
gcugucugggaugucacugcug

SEQ ID NO: 476778 - RNA, 22 nt, Human
cagcugugcuagaagccacgaa

SEQ ID NO: 476779 - RNA, 22 nt, Human
agccaggccagacucacacccu

SEQ ID NO: 476780 - RNA, 22 nt, Human
gugcagcagggggaagacagug

SEQ ID NO: 476781 - RNA, 23 nt, Human
gccucagagaaacagcugcacac

SEQ ID NO: 476782 - RNA, 22 nt, Human
cagggcuggauccuccagacuc

SEQ ID NO: 476783 - RNA, 22 nt, Human
uccagugguaguaaagaggucu

SEQ ID NO: 476784 - RNA, 22 nt, Human
agagcuuagaauuucagaugau

SEQ ID NO: 476785 - RNA, 22 nt, Human
gagcugagccuggguggaccgc

SEQ ID NO: 476786 - RNA, 22 nt, Human
ggccaugguuggggaagacaug

SEQ ID NO: 476787 - RNA, 22 nt, Human
caguacuuaacuuauaggagag

SEQ ID NO: 476788 - RNA, 22 nt, Human
agccaacuaggagauuaaggua

SEQ ID NO: 476789 - RNA, 22 nt, Human
cagggcuccccgcaccgcagcc

SEQ ID NO: 476790 - RNA, 22 nt, Human
aaggagucucagcugggccuga

SEQ ID NO: 476791 - RNA, 23 nt, Human
uggagcugacagucagagggagg

SEQ ID NO: 476792 - RNA, 22 nt, Human
agccucucuccagcuuggcaga

SEQ ID NO: 476793 - RNA, 19 nt, Human
agauggggaagagugugag

SEQ ID NO: 476794 - RNA, 21 nt, Human
uccuuccuugagguccuuucc

SEQ ID NO: 476795 - RNA, 22 nt, Human
agauacaugucaagagacuuau

SEQ ID NO: 476796 - RNA, 22 nt, Human
ccaaaguccauaguuuacauua

SEQ ID NO: 476797 - RNA, 22 nt, Human
uggcucugggcaccguguccac

SEQ ID NO: 476798 - RNA, 22 nt, Human
gaagagcuccaaaaacagugag

SEQ ID NO: 476799 - RNA, 22 nt, Human
gggcugccaagccugccugccu

SEQ ID NO: 476800 - RNA, 22 nt, Human
uuaagaauggaaugaggaauuu

SEQ ID NO: 476801 - RNA, 22 nt, Human
auuccaguucuccucucuaaag

SEQ ID NO: 476802 - RNA, 22 nt, Human
guuuuuccuugcugaggacccg

SEQ ID NO: 476803 - RNA, 22 nt, Human
cugggcagagcuaacaccugag

SEQ ID NO: 476804 - RNA, 22 nt, Human
agggcugccauuucuggcccaa

SEQ ID NO: 476805 - RNA, 22 nt, Human
uucuggaguauuccuggcaccu

SEQ ID NO: 476806 - RNA, 22 nt, Human
cuggagagaccgaaagaggcug

SEQ ID NO: 476807 - RNA, 22 nt, Human
caaagguauaaguuaauauaca

SEQ ID NO: 476808 - RNA, 22 nt, Human
ugccugaugcaggaguaucaga

SEQ ID NO: 476809 - RNA, 22 nt, Human
caaagugcugagauuacaggua

SEQ ID NO: 476810 - RNA, 22 nt, Human
uccuaguucucugccagucgcu

SEQ ID NO: 476811 - RNA, 22 nt, Human
uuccaaagucauguugcugaua

SEQ ID NO: 476812 - RNA, 22 nt, Human
auguagagcaguguuguccaau

SEQ ID NO: 476813 - RNA, 22 nt, Human
uugcauugaugucuauacgcug

SEQ ID NO: 476814 - RNA, 22 nt, Human
uuuagggaugucagaacaggga

SEQ ID NO: 476815 - RNA, 22 nt, Human
cagggccuucguaaguguccgg

SEQ ID NO: 476816 - RNA, 22 nt, Human
gcaggcugugaggcucagaugg

SEQ ID NO: 476817 - RNA, 21 nt, Human
acagcaagccuuccuuucagg

SEQ ID NO: 476818 - RNA, 22 nt, Human
agacagcauggagcugauaaca

SEQ ID NO: 476819 - RNA, 22 nt, Human
cccagagccucauucuguuggg

SEQ ID NO: 476820 - RNA, 22 nt, Human
ucucugagaaguuccuuuguga

SEQ ID NO: 476821 - RNA, 22 nt, Human
acacagggcggaaagcaugaga

SEQ ID NO: 476822 - RNA, 22 nt, Human
uaauuucuggagggagaaagag

SEQ ID NO: 476823 - RNA, 22 nt, Human
cuaaaugcccuacaaugacugg

SEQ ID NO: 476824 - RNA, 22 nt, Human
uccugaaaauaauuucacaaga

SEQ ID NO: 476825 - RNA, 22 nt, Human
uuucauaauagugcaguuuguu

SEQ ID NO: 476826 - RNA, 22 nt, Human
agccccuuccaguucucagauc

SEQ ID NO: 476827 - RNA, 22 nt, Human
uacugugacagaguacuuaaac

SEQ ID NO: 476828 - RNA, 22 nt, Human
ccuggggcucaagauggcgccg

SEQ ID NO: 476829 - RNA, 22 nt, Human
gaaggagggugcggaucugagc

SEQ ID NO: 476830 - RNA, 22 nt, Human
aggugccagcucucaggcagga

SEQ ID NO: 476831 - RNA, 22 nt, Human
aggcugagcugaccugguuugg

SEQ ID NO: 476832 - RNA, 22 nt, Human
ucccuggccauuccucuaggcc

SEQ ID NO: 476833 - RNA, 22 nt, Human
aagguacagaaauuaacaagga

SEQ ID NO: 476834 - RNA, 22 nt, Human
uggacagcgaaagugccuggga

SEQ ID NO: 476835 - RNA, 22 nt, Human
aggaugaauaacugaaauggug

SEQ ID NO: 476836 - RNA, 22 nt, Human
gugcaguggcagauccuagcuc

SEQ ID NO: 476837 - RNA, 22 nt, Human
uggccuggaagagaggucgagg

SEQ ID NO: 476838 - RNA, 22 nt, Human
ugcuuuuaagaacaaugcugcu

SEQ ID NO: 476839 - RNA, 18 nt, Human
ccuggcagccaugcgcgc

SEQ ID NO: 476840 - RNA, 22 nt, Human
acccuguaugcuauaucccuaa

SEQ ID NO: 476841 - RNA, 22 nt, Human
gcuggcuguguuccuucugcca

SEQ ID NO: 476842 - RNA, 22 nt, Human
uaacagaaauagaaaugagagu

SEQ ID NO: 476843 - RNA, 22 nt, Human
acagaggccccgugggagagcc

SEQ ID NO: 476844 - RNA, 22 nt, Human
gaggcuggaggucaaagaugaa

SEQ ID NO: 476845 - RNA, 17 nt, Human
ggcuggagcagcucccc

SEQ ID NO: 476846 - RNA, 22 nt, Human
agaauuguugggguaauaaaag

SEQ ID NO: 476847 - RNA, 17 nt, Human
uccagagcacagagcuc

SEQ ID NO: 476848 - RNA, 22 nt, Human
uauuugaaaguguacaaaaacu

SEQ ID NO: 476849 - RNA, 22 nt, Human
ucuggcucuuugggugauugua

SEQ ID NO: 476850 - RNA, 22 nt, Human
aaugucugccagaacugaucau

SEQ ID NO: 476851 - RNA, 19 nt, Human
ggagaagcccaggaauccu

SEQ ID NO: 476852 - RNA, 22 nt, Human
aucuauuaugcugagaaacugu

SEQ ID NO: 476853 - RNA, 22 nt, Human
gucaggauuugaacucaggucu

SEQ ID NO: 476854 - RNA, 22 nt, Human
cugccagcaaugugaccaugcu

SEQ ID NO: 476855 - RNA, 22 nt, Human
acaggcuguugggguccagggu

SEQ ID NO: 476856 - RNA, 22 nt, Human
gaaaggagaggguuaaggagcu

SEQ ID NO: 476857 - RNA, 22 nt, Human
gguggccaggccagcucuggcc

SEQ ID NO: 476858 - RNA, 22 nt, Human
cacauguuuggcaugucaccaa

SEQ ID NO: 476859 - RNA, 22 nt, Human
ccugccaggccagugagcuucc

SEQ ID NO: 476860 - RNA, 19 nt, Human
acccagagcccuuugcagg

SEQ ID NO: 476861 - RNA, 22 nt, Human
aagggcuccaagagguagcugg

SEQ ID NO: 476862 - RNA, 22 nt, Human
gcaggguaggugacagguaguc

SEQ ID NO: 476863 - RNA, 22 nt, Human
aucuuucagagcuccaucaggg

SEQ ID NO: 476864 - RNA, 22 nt, Human
ggcuggaaguccaagaucaaga

SEQ ID NO: 476865 - RNA, 22 nt, Human
aagcgccacgagaagcuggacc

SEQ ID NO: 476866 - RNA, 22 nt, Human
aaggucauuuuuuccucuguug

SEQ ID NO: 476867 - RNA, 22 nt, Human
gcacugaaauuauaugcauuug

SEQ ID NO: 476868 - RNA, 22 nt, Human
gcagagcagugcuugcccagcg

SEQ ID NO: 476869 - RNA, 22 nt, Human
uucagucuccucauuuuacaaa

SEQ ID NO: 476870 - RNA, 17 nt, Human
cucugcagugcauggcu

SEQ ID NO: 476871 - RNA, 22 nt, Human
agccuucacugggaccuuggau

SEQ ID NO: 476872 - RNA, 22 nt, Human
cugagcauggccgguccauggu

SEQ ID NO: 476873 - RNA, 22 nt, Human
guuugcauguauuaagucaaua

SEQ ID NO: 476874 - RNA, 22 nt, Human
uaagccacuagucuguuaugaa

SEQ ID NO: 476875 - RNA, 22 nt, Human
agggcagccugagugcuggccc

SEQ ID NO: 476876 - RNA, 20 nt, Human
uaggcagagcugugcagccu

SEQ ID NO: 476877 - RNA, 22 nt, Human
gaagagcugugauucaggcuua

SEQ ID NO: 476878 - RNA, 22 nt, Human
ugucuuuagaaagaagcagaca

SEQ ID NO: 476879 - RNA, 22 nt, Human
gccaggugggagacagacagca

SEQ ID NO: 476880 - RNA, 22 nt, Human
agccuggauccuaggcucagcu

SEQ ID NO: 476881 - RNA, 21 nt, Human
ucagaguguguuacagcaagc

SEQ ID NO: 476882 - RNA, 22 nt, Human
ucaaaggcaccaaggucacugc

SEQ ID NO: 476883 - RNA, 22 nt, Human
cauugcacuuuggguccaggac

SEQ ID NO: 476884 - RNA, 20 nt, Human
cugcccagccacugagggau

SEQ ID NO: 476885 - RNA, 22 nt, Human
cccaugccuucugacucacagg

SEQ ID NO: 476886 - RNA, 22 nt, Human
ucacuuaaaaauucuaguuaug

SEQ ID NO: 476887 - RNA, 22 nt, Human
ugaagccagcuuuggaagacac

SEQ ID NO: 476888 - RNA, 22 nt, Human
ucagcccugggacccagggaug

SEQ ID NO: 476889 - RNA, 22 nt, Human
cccaggccagaacuugguugcu

SEQ ID NO: 476890 - RNA, 22 nt, Human
gggcaugguggugcacaccugu

SEQ ID NO: 476891 - RNA, 20 nt, Human
aggcagagcgcacuuuuaga

SEQ ID NO: 476892 - RNA, 22 nt, Human
aaaugcauuuuuaauuagaccc

SEQ ID NO: 476893 - RNA, 22 nt, Human
gcucagccgaacuucagagcag

SEQ ID NO: 476894 - RNA, 22 nt, Human
gaagcucucaaacucuccccuu

SEQ ID NO: 476895 - RNA, 22 nt, Human
ugcucccaggcucuguggucug

SEQ ID NO: 476896 - RNA, 22 nt, Human
ugagccagccuugcagcugugc

SEQ ID NO: 476897 - RNA, 22 nt, Human
aaguuuaagguggaaguggugg

SEQ ID NO: 476898 - RNA, 22 nt, Human
cuggagccggcgagccccagcc

SEQ ID NO: 476899 - RNA, 22 nt, Human
ucccagaggcuccagucucuau

SEQ ID NO: 476900 - RNA, 22 nt, Human
aagucacacuagacaacugagg

SEQ ID NO: 476901 - RNA, 22 nt, Human
cagugaaguuuaaaguguagau

SEQ ID NO: 476902 - RNA, 22 nt, Human
ucucuggaauuggcugaggcaa

SEQ ID NO: 476903 - RNA, 22 nt, Human
gccaggcagcuagcaaccccug

SEQ ID NO: 476904 - RNA, 22 nt, Human
cucucuggaagggggagcugau

SEQ ID NO: 476905 - RNA, 22 nt, Human
agagccaggugcugcuguuuga

SEQ ID NO: 476906 - RNA, 22 nt, Human
ugaggcaguugagcuuccugag

SEQ ID NO: 476907 - RNA, 22 nt, Human
gaggcacaccagggagucuugu

SEQ ID NO: 476908 - RNA, 22 nt, Human
gcagagugggagcccagggcug

SEQ ID NO: 476909 - RNA, 22 nt, Human
cccacucccugcacgccugccg

SEQ ID NO: 476910 - RNA, 22 nt, Human
uggcucugcaccucaguguacc

SEQ ID NO: 476911 - RNA, 22 nt, Human
gggcagguuggcaucccgggca

SEQ ID NO: 476912 - RNA, 21 nt, Human
gcagcagaggcuugacagaca

SEQ ID NO: 476913 - RNA, 23 nt, Human
aggcacugaaugugucagugagu

SEQ ID NO: 476914 - RNA, 22 nt, Human
uagaaaugauuuugaugcuuca

SEQ ID NO: 476915 - RNA, 22 nt, Human
agagcugcaggguggacccagg

SEQ ID NO: 476916 - RNA, 22 nt, Human
caaggaaacaugaaaugcauug

SEQ ID NO: 476917 - RNA, 22 nt, Human
uauuauguagaguaaggguuaa

SEQ ID NO: 476918 - RNA, 22 nt, Human
aggccuccuggcuccaggccuu

SEQ ID NO: 476919 - RNA, 22 nt, Human
agggugucagccacggaauggg

SEQ ID NO: 476920 - RNA, 22 nt, Human
aggcagugugggccaagcuucc

SEQ ID NO: 476921 - RNA, 22 nt, Human
ggaagagccuggggugucaggc

SEQ ID NO: 476922 - RNA, 22 nt, Human
gcaggcagaucaccugucagga

SEQ ID NO: 476923 - RNA, 22 nt, Human
ccugacucuggccaggccagcu

SEQ ID NO: 476924 - RNA, 22 nt, Human
agcuggggguuggauaagggua

SEQ ID NO: 476925 - RNA, 22 nt, Human
cugcugggcuccucaugugacu

SEQ ID NO: 476926 - RNA, 22 nt, Human
gagaagcagguuuagcagacaa

SEQ ID NO: 476927 - RNA, 22 nt, Human
guuuuguugcugcagagcucaa

SEQ ID NO: 476928 - RNA, 22 nt, Human
gccagcugcuggaacagcgcga

SEQ ID NO: 476929 - RNA, 22 nt, Human
guucauuuaugauguaacaugu

SEQ ID NO: 476930 - RNA, 22 nt, Human
gcagcuguggguuccaagucua

SEQ ID NO: 476931 - RNA, 22 nt, Human
ugaggccacuuccccacagccc

SEQ ID NO: 476932 - RNA, 22 nt, Human
uguagcauguaaauugguuauu

SEQ ID NO: 476933 - RNA, 22 nt, Human
cagagcaggcccacugcccucc

SEQ ID NO: 476934 - RNA, 22 nt, Human
gagaagcaauuuccaacugugc

SEQ ID NO: 476935 - RNA, 22 nt, Human
ucucagagccuaacuaaccuaa

SEQ ID NO: 476936 - RNA, 22 nt, Human
aagagcugcaucuaagccauga

SEQ ID NO: 476937 - RNA, 22 nt, Human
agaaaagguugaaaguaggauu

SEQ ID NO: 476938 - RNA, 22 nt, Human
uaugcacauauaaccugcacug

SEQ ID NO: 476939 - RNA, 22 nt, Human
gagaaguuucugguuugcauag

SEQ ID NO: 476940 - RNA, 22 nt, Human
ggugaaggaggaagcugaugga

SEQ ID NO: 476941 - RNA, 22 nt, Human
cugccugcaugcugccauagcu

SEQ ID NO: 476942 - RNA, 22 nt, Human
acaaaggugcgucccuucagcu

SEQ ID NO: 476943 - RNA, 22 nt, Human
gucccuuggcucacaaacagcu

SEQ ID NO: 476944 - RNA, 22 nt, Human
cagggcccauggcucagguagg

SEQ ID NO: 476945 - RNA, 22 nt, Human
gcuggcucccauugguccuucc

SEQ ID NO: 476946 - RNA, 22 nt, Human
ugcucuguugugcaugugggau

SEQ ID NO: 476947 - RNA, 22 nt, Human
uccuugaauugugccacuuacc

SEQ ID NO: 476948 - RNA, 22 nt, Human
gcaaaaaaugcuuguugcuuag

SEQ ID NO: 476949 - RNA, 22 nt, Human
uuacaguuuaguccaagccaga

SEQ ID NO: 476950 - RNA, 22 nt, Human
uccaggcaucccccaggacaga

SEQ ID NO: 476951 - RNA, 22 nt, Human
ugcugugagguugagaaggaag

SEQ ID NO: 476952 - RNA, 22 nt, Human
uagaaauguugguauuaacauu

SEQ ID NO: 476953 - RNA, 22 nt, Human
gggcaagcucuucagaagcucu

SEQ ID NO: 476954 - RNA, 22 nt, Human
acagcugugagggucacuugua

SEQ ID NO: 476955 - RNA, 22 nt, Human
uucacaggcuuggagguggggg

SEQ ID NO: 476956 - RNA, 22 nt, Human
cagaguguuagcgcugguuggg

SEQ ID NO: 476957 - RNA, 23 nt, Human
aaguucaagucacagccugucuu

SEQ ID NO: 476958 - RNA, 22 nt, Human
cucugagagcggucuguggcuu

SEQ ID NO: 476959 - RNA, 18 nt, Human
aaggcuucaaagaguaga

SEQ ID NO: 476960 - RNA, 22 nt, Human
aggugcuggaguagaagaaaaa

SEQ ID NO: 476961 - RNA, 22 nt, Human
agagcagcuggggcagagacca

SEQ ID NO: 476962 - RNA, 22 nt, Human
aggcaguuguugcugagcagcu

SEQ ID NO: 476963 - RNA, 22 nt, Human
gccuggcacucacugaagaggc

SEQ ID NO: 476964 - RNA, 22 nt, Human
cgcugggggaacagcgagggug

SEQ ID NO: 476965 - RNA, 22 nt, Human
aggcugagcaaagggccuuacc

SEQ ID NO: 476966 - RNA, 22 nt, Human
aggcagguuucccggcugucaa

SEQ ID NO: 476967 - RNA, 22 nt, Human
acaggcugccuaccaaguauca

SEQ ID NO: 476968 - RNA, 22 nt, Human
cauugcacuccacccuaggcaa

SEQ ID NO: 476969 - RNA, 22 nt, Human
cuggcucagacagcugugcagu

SEQ ID NO: 476970 - RNA, 22 nt, Human
agaggccaguggcugugcuguc

SEQ ID NO: 476971 - RNA, 22 nt, Human
ucaggcugccuaucagacugug

SEQ ID NO: 476972 - RNA, 22 nt, Human
gaaggccacggaauggagcugg

SEQ ID NO: 476973 - RNA, 22 nt, Human
ucuucauuuuauagcaucugug

SEQ ID NO: 476974 - RNA, 22 nt, Human
ccugggagcuguggaaaggcug

SEQ ID NO: 476975 - RNA, 22 nt, Human
ccagggcagcgccccuccacgc

SEQ ID NO: 476976 - RNA, 21 nt, Human
gcucccugcucagcuccuggg

SEQ ID NO: 476977 - RNA, 22 nt, Human
gccccugggagcagagccacca

SEQ ID NO: 476978 - RNA, 22 nt, Human
cucagggggaaucaggucacag

SEQ ID NO: 476979 - RNA, 22 nt, Human
ccagagccagagaggugccugc

SEQ ID NO: 476980 - RNA, 22 nt, Human
caggagacaauggcuguggggc

SEQ ID NO: 476981 - RNA, 22 nt, Human
ugauucacagacuucacaaggc

SEQ ID NO: 476982 - RNA, 22 nt, Human
gcaguguuuacauauuagaaac

SEQ ID NO: 476983 - RNA, 22 nt, Human
ucucagagaacaguuggugcuu

SEQ ID NO: 476984 - RNA, 19 nt, Human
guggccagggcaggggcug

SEQ ID NO: 476985 - RNA, 22 nt, Human
ugagaguauuuuggcauuauca

SEQ ID NO: 476986 - RNA, 22 nt, Human
aggcucaguucacgucaacuuu

SEQ ID NO: 476987 - RNA, 20 nt, Human
guaaaauauggucuuugggu

SEQ ID NO: 476988 - RNA, 22 nt, Human
aguccggggucuggacaccugg

SEQ ID NO: 476989 - RNA, 22 nt, Human
aacagaacccgagugugaaucu

SEQ ID NO: 476990 - RNA, 22 nt, Human
ugggaccuguuacauugaguua

SEQ ID NO: 476991 - RNA, 22 nt, Human
uugaacauuaacuucagucuau

SEQ ID NO: 476992 - RNA, 22 nt, Human
cugagagcagggacuugagcca

SEQ ID NO: 476993 - RNA, 22 nt, Human
agugauuugggugucagaaagu

SEQ ID NO: 476994 - RNA, 19 nt, Human
gagggcucauuugaacaau

SEQ ID NO: 476995 - RNA, 22 nt, Human
ggagcagccacgucucagggca

SEQ ID NO: 476996 - RNA, 22 nt, Human
uccugcaggggcugaggaacca

SEQ ID NO: 476997 - RNA, 22 nt, Human
accaaaaauuguggggcugaau

SEQ ID NO: 476998 - RNA, 22 nt, Human
cucuggagugcagccugguggc

SEQ ID NO: 476999 - RNA, 22 nt, Human
cuguccagaaagggggcaacaa

SEQ ID NO: 477000 - RNA, 22 nt, Human
gaagaacugugacagaagcagu

SEQ ID NO: 477001 - RNA, 22 nt, Human
gagaaagggauaauuugaagag

SEQ ID NO: 477002 - RNA, 22 nt, Human
uugucuuaaauggauggacaau

SEQ ID NO: 477003 - RNA, 22 nt, Human
aggaggcugguucaggccauau

SEQ ID NO: 477004 - RNA, 22 nt, Human
cuccuuccugguuagcaccuua

SEQ ID NO: 477005 - RNA, 22 nt, Human
aggcugagcugguagugaguac

SEQ ID NO: 477006 - RNA, 22 nt, Human
agaaagaacgcacuugugcugc

SEQ ID NO: 477007 - RNA, 22 nt, Human
agucucagaaaauaugcuuuuu

SEQ ID NO: 477008 - RNA, 22 nt, Human
ccuggcuuuuguuuauaaauuc

SEQ ID NO: 477009 - RNA, 22 nt, Human
ggcaccuggagguuuacuggau

SEQ ID NO: 477010 - RNA, 22 nt, Human
gcacagggagcaggucucuggu

SEQ ID NO: 477011 - RNA, 22 nt, Human
caggcagaaauuuuguuucauu

SEQ ID NO: 477012 - RNA, 22 nt, Human
gagaaggcuggucuuaagucga

SEQ ID NO: 477013 - RNA, 21 nt, Human
ugccagcauuaaacagucauu

SEQ ID NO: 477014 - RNA, 22 nt, Human
ggcugcugugaccucaggugau

SEQ ID NO: 477015 - RNA, 19 nt, Human
gcagccaggugcucuaccu

SEQ ID NO: 477016 - RNA, 22 nt, Human
ugcagcauuauucacaguagcc

SEQ ID NO: 477017 - RNA, 22 nt, Human
ucacugcaaccucugccuuccg

SEQ ID NO: 477018 - RNA, 22 nt, Human
auuuucauuuugcagggugaga

SEQ ID NO: 477019 - RNA, 22 nt, Human
ugguggcuguugcagaacugag

SEQ ID NO: 477020 - RNA, 22 nt, Human
uaagaacaguagaacaguaggu

SEQ ID NO: 477021 - RNA, 22 nt, Human
uugucugugaaauggaaauagu

SEQ ID NO: 477022 - RNA, 22 nt, Human
cagggccagccauccugcuggg

SEQ ID NO: 477023 - RNA, 22 nt, Human
cccaggcugauguucagcgggu

SEQ ID NO: 477024 - RNA, 22 nt, Human
uguacaguauauuucaaagcca

SEQ ID NO: 477025 - RNA, 22 nt, Human
gggugggguucaggaaucuuca

SEQ ID NO: 477026 - RNA, 22 nt, Human
agugugagccuacaggccaaag

SEQ ID NO: 477027 - RNA, 22 nt, Human
ccaaugauggugcccacgauga

SEQ ID NO: 477028 - RNA, 21 nt, Human
gcugagagguugggaaguuca

SEQ ID NO: 477029 - RNA, 22 nt, Human
aucaggaagaagaauguguugg

SEQ ID NO: 477030 - RNA, 22 nt, Human
aaaguguaaaagcauguuaggg

SEQ ID NO: 477031 - RNA, 22 nt, Human
cacugcuuuaaggcugaguaac

SEQ ID NO: 477032 - RNA, 22 nt, Human
caguugcuacaguucaagugug

SEQ ID NO: 477033 - RNA, 22 nt, Human
cucagagaagucuuugcuaaac

SEQ ID NO: 477034 - RNA, 22 nt, Human
cucuggacacuggcaugggguc

SEQ ID NO: 477035 - RNA, 23 nt, Human
ggcuggcccggggcugcuccuga

SEQ ID NO: 477036 - RNA, 22 nt, Human
aaauguagaccuauagggaccu

SEQ ID NO: 477037 - RNA, 22 nt, Human
uggaugcuguaggacacgcucu

SEQ ID NO: 477038 - RNA, 22 nt, Human
uggcacugagcagccgcggcag

SEQ ID NO: 477039 - RNA, 22 nt, Human
caguagcacuagauaugugugg

SEQ ID NO: 477040 - RNA, 22 nt, Human
agggaaggagguuagaacccac

SEQ ID NO: 477041 - RNA, 22 nt, Human
gaggagaagcuaagaaacacag

SEQ ID NO: 477042 - RNA, 19 nt, Human
ggcagacacaguugacaug

SEQ ID NO: 477043 - RNA, 20 nt, Human
aagggcagagggaacagacu

SEQ ID NO: 477044 - RNA, 22 nt, Human
uugcagagagguuaggaacuca

SEQ ID NO: 477045 - RNA, 22 nt, Human
caaaguccuagaacagugcuug

SEQ ID NO: 477046 - RNA, 22 nt, Human
ucccaggcuaggccucugcguu

SEQ ID NO: 477047 - RNA, 22 nt, Human
ggagagaaauugagguagcaag

SEQ ID NO: 477048 - RNA, 22 nt, Human
ccuggcaggccccuccuggauu

SEQ ID NO: 477049 - RNA, 19 nt, Human
cagaaauagcgaaguguaa

SEQ ID NO: 477050 - RNA, 22 nt, Human
gaaguggaagccaucggcaguc

SEQ ID NO: 477051 - RNA, 22 nt, Human
gcaggccuuggcaaugagccug

SEQ ID NO: 477052 - RNA, 22 nt, Human
gcagcuggugcaaaugucacuc

SEQ ID NO: 477053 - RNA, 22 nt, Human
guuugauucaagaacaaagagu

SEQ ID NO: 477054 - RNA, 22 nt, Human
agugcuguccaguuucacaggu

SEQ ID NO: 477055 - RNA, 22 nt, Human
agagccuggggauuggcaaggg

SEQ ID NO: 477056 - RNA, 22 nt, Human
aaucuguucuacucuauucaga

SEQ ID NO: 477057 - RNA, 22 nt, Human
acauuguagacuuuucauaugu

SEQ ID NO: 477058 - RNA, 22 nt, Human
uacauaaugagcuaguuaaguu

SEQ ID NO: 477059 - RNA, 22 nt, Human
augcacagcagugaguucagug

SEQ ID NO: 477060 - RNA, 22 nt, Human
uggcagagaacacacaugauuc

SEQ ID NO: 477061 - RNA, 22 nt, Human
augugaggcagcacggagauua

SEQ ID NO: 477062 - RNA, 22 nt, Human
cugggccagggaggugucugua

SEQ ID NO: 477063 - RNA, 23 nt, Human
accaugaugggagugcaaauaag

SEQ ID NO: 477064 - RNA, 22 nt, Human
accauuuaauaaguauuuccau

SEQ ID NO: 477065 - RNA, 22 nt, Human
gccuggaguacuccuugaagug

SEQ ID NO: 477066 - RNA, 22 nt, Human
ucugucacuuuuauuuacugaa

SEQ ID NO: 477067 - RNA, 22 nt, Human
ccccuuccgucucuugaguguc

SEQ ID NO: 477068 - RNA, 22 nt, Human
gccuggcacauugcaguggauu

SEQ ID NO: 477069 - RNA, 22 nt, Human
gcaggccugacuguagggggca

SEQ ID NO: 477070 - RNA, 22 nt, Human
uggcugaaucugcagcaggaag

SEQ ID NO: 477071 - RNA, 22 nt, Human
auguaaggcugccuaugacacu

SEQ ID NO: 477072 - RNA, 22 nt, Human
gugcugucaauugcuuucagua

SEQ ID NO: 477073 - RNA, 22 nt, Human
ggggaccugggcuucaaggguu

SEQ ID NO: 477074 - RNA, 21 nt, Human
ugccaggccugagcugggguc

SEQ ID NO: 477075 - RNA, 22 nt, Human
ugaggcaguauuuuagugacuu

SEQ ID NO: 477076 - RNA, 19 nt, Human
aaaguuuuauucucauuug

SEQ ID NO: 477077 - RNA, 22 nt, Human
cccugcagacgucuugaugccu

SEQ ID NO: 477078 - RNA, 19 nt, Human
ugaguucugugguucucaa

SEQ ID NO: 477079 - RNA, 20 nt, Human
cucugcuuuaggagagucag

SEQ ID NO: 477080 - RNA, 20 nt, Human
gaaaugugaccucuucugug

SEQ ID NO: 477081 - RNA, 22 nt, Human
aaaguuacuaucacaaugaaau

SEQ ID NO: 477082 - RNA, 22 nt, Human
uaagcuauuccugaagaagguu

SEQ ID NO: 477083 - RNA, 22 nt, Human
augaaacaaaccucuauggagu

SEQ ID NO: 477084 - RNA, 22 nt, Human
gggaccuggucuagcacugagc

SEQ ID NO: 477085 - RNA, 22 nt, Human
cagacuggccacaucugcacug

SEQ ID NO: 477086 - RNA, 22 nt, Human
gcugggcugagcuagacuuggc

SEQ ID NO: 477087 - RNA, 22 nt, Human
aaggucauuuaacaauuuauga

SEQ ID NO: 477088 - RNA, 21 nt, Human
uagggcaggcauuggaagaga

SEQ ID NO: 477089 - RNA, 22 nt, Human
uuauccaaacuggugaaucauu

SEQ ID NO: 477090 - RNA, 22 nt, Human
uauuuguauuucaugcaguaaa

SEQ ID NO: 477091 - RNA, 22 nt, Human
aauguacaaggguuccaguuuu

SEQ ID NO: 477092 - RNA, 22 nt, Human
ugaagccaaucugccaggcaga

SEQ ID NO: 477093 - RNA, 22 nt, Human
caggacagaaauaaggaauaua

SEQ ID NO: 477094 - RNA, 22 nt, Human
ccuguguguaggccaggggagu

SEQ ID NO: 477095 - RNA, 22 nt, Human
gagagcuguguucauucuacca

SEQ ID NO: 477096 - RNA, 22 nt, Human
uggagcccagggugagaaggag

SEQ ID NO: 477097 - RNA, 22 nt, Human
ucagaggagaccaaggggaaua

SEQ ID NO: 477098 - RNA, 22 nt, Human
gaggaaaagagacagguuauug

SEQ ID NO: 477099 - RNA, 22 nt, Human
uuauuuugguaaauguuugccu

SEQ ID NO: 477100 - RNA, 22 nt, Human
gugcauugcgaugcagacgacc

SEQ ID NO: 477101 - RNA, 22 nt, Human
agagucugaaugcucagaguug

SEQ ID NO: 477102 - RNA, 22 nt, Human
aggaguguggccagggcucugg

SEQ ID NO: 477103 - RNA, 22 nt, Human
auccaaaccuggacaugagugg

SEQ ID NO: 477104 - RNA, 22 nt, Human
cugcccaguuugggagccuuuc

SEQ ID NO: 477105 - RNA, 22 nt, Human
uuuguuaaauauuuauugagug

SEQ ID NO: 477106 - RNA, 22 nt, Human
auuauguagcuaaaaauugugu

SEQ ID NO: 477107 - RNA, 22 nt, Human
gagaccaggaaguacagcagcc

SEQ ID NO: 477108 - RNA, 22 nt, Human
ucaaagucauggcaggcucaga

SEQ ID NO: 477109 - RNA, 22 nt, Human
agagccugcuguguaagucaca

SEQ ID NO: 477110 - RNA, 22 nt, Human
agaaggccuaacuugggggcaa

SEQ ID NO: 477111 - RNA, 22 nt, Human
agcagggcacuggaaggcacug

SEQ ID NO: 477112 - RNA, 21 nt, Human
cugagggccgcagcugggcuc

SEQ ID NO: 477113 - RNA, 22 nt, Human
ggcuagaguggaacuggagcgg

SEQ ID NO: 477114 - RNA, 22 nt, Human
cagaagucacccucagaauaac

SEQ ID NO: 477115 - RNA, 22 nt, Human
ucauccuuuugcaugggaaggc

SEQ ID NO: 477116 - RNA, 22 nt, Human
acccagagccagggucaggagc

SEQ ID NO: 477117 - RNA, 22 nt, Human
ggugcagugguguggcaaaggg

SEQ ID NO: 477118 - RNA, 22 nt, Human
cagcagcugcgugcccaggccg

SEQ ID NO: 477119 - RNA, 22 nt, Human
ccucgaccuccccaggcucagg

SEQ ID NO: 477120 - RNA, 22 nt, Human
ugggcugcagggguugagagcu

SEQ ID NO: 477121 - RNA, 22 nt, Human
uuagcucagaaaauuuaaacuu

SEQ ID NO: 477122 - RNA, 22 nt, Human
ugccaggcccugugcuggaugc

SEQ ID NO: 477123 - RNA, 23 nt, Human
auucuucauuaucuucuagaaaa

SEQ ID NO: 477124 - RNA, 22 nt, Human
ugugucagaaggcaauggggau

SEQ ID NO: 477125 - RNA, 22 nt, Human
aggccucuucagggagcaugga

SEQ ID NO: 477126 - RNA, 22 nt, Human
cauuucuagggaucauaaagua

SEQ ID NO: 477127 - RNA, 22 nt, Human
cagaggguugucaggcgccuug

SEQ ID NO: 477128 - RNA, 22 nt, Human
gccugaggaaugcuccugacuu

SEQ ID NO: 477129 - RNA, 22 nt, Human
ucauucagguugggcaaguguc

SEQ ID NO: 477130 - RNA, 22 nt, Human
caggugggagcgaggagcuacu

SEQ ID NO: 477131 - RNA, 22 nt, Human
gagggccagcagccucagcaug

SEQ ID NO: 477132 - RNA, 22 nt, Human
agggacuugaugucagggagau

SEQ ID NO: 477133 - RNA, 22 nt, Human
gugucccaggagaggagacaau

SEQ ID NO: 477134 - RNA, 22 nt, Human
ucaucaguuuagaaaaaauaug

SEQ ID NO: 477135 - RNA, 22 nt, Human
uucucagugaaguuuagaacau

SEQ ID NO: 477136 - RNA, 22 nt, Human
agggccaguaccaggugggugg

SEQ ID NO: 477137 - RNA, 22 nt, Human
gagagcuggccagcuucaguau

SEQ ID NO: 477138 - RNA, 22 nt, Human
cugugaggcccugggugcugga

SEQ ID NO: 477139 - RNA, 22 nt, Human
uacauguuauuucacuauuggu

SEQ ID NO: 477140 - RNA, 22 nt, Human
uggaggagggcuggugucugua

SEQ ID NO: 477141 - RNA, 22 nt, Human
gcugccucccccauggcuggaa

SEQ ID NO: 477142 - RNA, 22 nt, Human
ccugggcuucugucuagauguu

SEQ ID NO: 477143 - RNA, 22 nt, Human
ucagggcacguuucugcaaugc

SEQ ID NO: 477144 - RNA, 22 nt, Human
agcagggcagguaaggaucaga

SEQ ID NO: 477145 - RNA, 22 nt, Human
caaggccacuccagagacuggu

SEQ ID NO: 477146 - RNA, 23 nt, Human
gucagggcuggggucagagugac

SEQ ID NO: 477147 - RNA, 22 nt, Human
uccaggacuagcauuucugaua

SEQ ID NO: 477148 - RNA, 22 nt, Human
gggaaccagccgcuuccgccuc

SEQ ID NO: 477149 - RNA, 22 nt, Human
cuggaagggucuacuuagcaga

SEQ ID NO: 477150 - RNA, 22 nt, Human
ugcucugggcaacagccucccu

SEQ ID NO: 477151 - RNA, 22 nt, Human
cgucuuccucuuacgaugcgcu

SEQ ID NO: 477152 - RNA, 22 nt, Human
acaggcuggugguccuggccau

SEQ ID NO: 477153 - RNA, 22 nt, Human
uuucacauuuuauacuuaagcc

SEQ ID NO: 477154 - RNA, 22 nt, Human
cagcagcccacgcgugcugucc

SEQ ID NO: 477155 - RNA, 22 nt, Human
auauacuuggagacuaucauug

SEQ ID NO: 477156 - RNA, 22 nt, Human
aggcugggaagguaaaguugua

SEQ ID NO: 477157 - RNA, 22 nt, Human
uccauuggucucugugcccagg

SEQ ID NO: 477158 - RNA, 22 nt, Human
gccuggaggguugagguuuugu

SEQ ID NO: 477159 - RNA, 22 nt, Human
aaaugcaccuugcugugagacu

SEQ ID NO: 477160 - RNA, 22 nt, Human
ugggacagagugagcuuuggcc

SEQ ID NO: 477161 - RNA, 22 nt, Human
ugcucugcaagcaggagcaaga

SEQ ID NO: 477162 - RNA, 22 nt, Human
aggaagcaaaaggcagggucua

SEQ ID NO: 477163 - RNA, 22 nt, Human
cuacccaggcuggagugcagua

SEQ ID NO: 477164 - RNA, 22 nt, Human
auucuguauggaaaagcacuau

SEQ ID NO: 477165 - RNA, 22 nt, Human
guggccuggaaaggcuggucug

SEQ ID NO: 477166 - RNA, 22 nt, Human
uuuuaaguuaauauaauugagg

SEQ ID NO: 477167 - RNA, 22 nt, Human
aagaugcagcuuccacuuuugc

SEQ ID NO: 477168 - RNA, 22 nt, Human
cugaggaggggccugagugaga

SEQ ID NO: 477169 - RNA, 22 nt, Human
agaagcugccuacaugaccagc

SEQ ID NO: 477170 - RNA, 22 nt, Human
aguucacauuccgagguacugg

SEQ ID NO: 477171 - RNA, 23 nt, Human
aggugccaacugagagcugagag

SEQ ID NO: 477172 - RNA, 22 nt, Human
gcucaaggcaggcagacaugag

SEQ ID NO: 477173 - RNA, 22 nt, Human
ugggcuccucgucacucgcugu

SEQ ID NO: 477174 - RNA, 22 nt, Human
ugcccagcacugugccagucac

SEQ ID NO: 477175 - RNA, 22 nt, Human
uggcucugugucucccagcagc

SEQ ID NO: 477176 - RNA, 22 nt, Human
cauuguuauagcauuacacacc

SEQ ID NO: 477177 - RNA, 22 nt, Human
acaaagugcacaagaugagaac

SEQ ID NO: 477178 - RNA, 22 nt, Human
gcuggaccaggugugcacaggc

SEQ ID NO: 477179 - RNA, 22 nt, Human
ccagaggcauguucaaagcaau

SEQ ID NO: 477180 - RNA, 22 nt, Human
cugucuuuucauacuuucccuc

SEQ ID NO: 477181 - RNA, 22 nt, Human
gcagaggagaugaagauacuuu

SEQ ID NO: 477182 - RNA, 22 nt, Human
aagaauguucuuguagucauga

SEQ ID NO: 477183 - RNA, 22 nt, Human
ccagcugggauuaagggaaaau

SEQ ID NO: 477184 - RNA, 22 nt, Human
uugcuuuguggugguucuucca

SEQ ID NO: 477185 - RNA, 22 nt, Human
cccaggcaggagugugguggcu

SEQ ID NO: 477186 - RNA, 22 nt, Human
agagccugucaauuguaaagag

SEQ ID NO: 477187 - RNA, 22 nt, Human
ggcccaaggcccaggucgagcu

SEQ ID NO: 477188 - RNA, 19 nt, Human
ucuggcuccgccucuuagu

SEQ ID NO: 477189 - RNA, 22 nt, Human
agggcucccgcgguguccggga

SEQ ID NO: 477190 - RNA, 22 nt, Human
gcaaaggcuagagacacaggga

SEQ ID NO: 477191 - RNA, 22 nt, Human
gcaggaguguauuugcauguaa

SEQ ID NO: 477192 - RNA, 22 nt, Human
cagggugccaaagaacaaauau

SEQ ID NO: 477193 - RNA, 22 nt, Human
uccacuuuagcaaugauugaau

SEQ ID NO: 477194 - RNA, 22 nt, Human
gauuucuguaacacuucagaua

SEQ ID NO: 477195 - RNA, 22 nt, Human
cccuccccacaaagcuucacac

SEQ ID NO: 477196 - RNA, 22 nt, Human
uucacauuggugauauguuucu

SEQ ID NO: 477197 - RNA, 22 nt, Human
ucugcagaauucgaggaagaaa

SEQ ID NO: 477198 - RNA, 22 nt, Human
aggugucugugaugggagcgau

SEQ ID NO: 477199 - RNA, 22 nt, Human
cucugucccagacccaccucuc

SEQ ID NO: 477200 - RNA, 22 nt, Human
ucaggagggugacaggcccugg

SEQ ID NO: 477201 - RNA, 22 nt, Human
gcugagaguccaggaaaacauc

SEQ ID NO: 477202 - RNA, 23 nt, Human
ucugucaccuauggcugcucuuc

SEQ ID NO: 477203 - RNA, 22 nt, Human
agagccagcauuugacacuggc

SEQ ID NO: 477204 - RNA, 22 nt, Human
auuaaauuggacgcugggggaa

SEQ ID NO: 477205 - RNA, 22 nt, Human
caggcagagucagauuagacuu

SEQ ID NO: 477206 - RNA, 22 nt, Human
ccugggagagccaucuguggcc

SEQ ID NO: 477207 - RNA, 19 nt, Human
gggaaauucacuugcuucc

SEQ ID NO: 477208 - RNA, 20 nt, Human
aagagaagaagucuuugaaa

SEQ ID NO: 477209 - RNA, 17 nt, Human
ggccuugggcugcucuu

SEQ ID NO: 477210 - RNA, 22 nt, Human
uuaguuuucccaucuuuauggu

SEQ ID NO: 477211 - RNA, 22 nt, Human
uggaggcaccacuggcugcccg

SEQ ID NO: 477212 - RNA, 22 nt, Human
gcuccacuugcagcuaggcuug

SEQ ID NO: 477213 - RNA, 22 nt, Human
cauauaaauacaacauguguua

SEQ ID NO: 477214 - RNA, 23 nt, Human
aggauguaggauguauggcagag

SEQ ID NO: 477215 - RNA, 22 nt, Human
ugccacacauugucagguuagu

SEQ ID NO: 477216 - RNA, 22 nt, Human
gcagauggcucagacacugggg

SEQ ID NO: 477217 - RNA, 22 nt, Human
ccaggacccugcaaacccuguu

SEQ ID NO: 477218 - RNA, 22 nt, Human
cuuguacaggaauccaugguau

SEQ ID NO: 477219 - RNA, 22 nt, Human
cugggcagugguggcccuuccc

SEQ ID NO: 477220 - RNA, 22 nt, Human
gugucaugcacacucaguguug

SEQ ID NO: 477221 - RNA, 22 nt, Human
acaggcaggcgggacagcccga

SEQ ID NO: 477222 - RNA, 21 nt, Human
uccauaagagaccaucuccua

SEQ ID NO: 477223 - RNA, 22 nt, Human
ucuuugcaacucccauuuccau

SEQ ID NO: 477224 - RNA, 18 nt, Human
agugucuggauauuuggg

SEQ ID NO: 477225 - RNA, 22 nt, Human
uagaaagcuugggguguuuaaa

SEQ ID NO: 477226 - RNA, 16 nt, Human
ugggcagaugagaaga

SEQ ID NO: 477227 - RNA, 22 nt, Human
gcaggagugacauggaugugga

SEQ ID NO: 477228 - RNA, 20 nt, Human
gcugccuguuucuguaagua

SEQ ID NO: 477229 - RNA, 22 nt, Human
agcugagcucaggcugauguaa

SEQ ID NO: 477230 - RNA, 22 nt, Human
cacaggagcuguggggcagugu

SEQ ID NO: 477231 - RNA, 22 nt, Human
caggguggcaggcaccauggcc

SEQ ID NO: 477232 - RNA, 22 nt, Human
uaaaugugagugaugcggugaa

SEQ ID NO: 477233 - RNA, 19 nt, Human
gggaccugacuaauuggca

SEQ ID NO: 477234 - RNA, 23 nt, Human
acuuaaaugguucuuuaucucag

SEQ ID NO: 477235 - RNA, 22 nt, Human
acuuugcaaugggcagaaccca

SEQ ID NO: 477236 - RNA, 22 nt, Human
uacauuccauguguguguauuc

SEQ ID NO: 477237 - RNA, 22 nt, Human
cagagcugguguuacaagucca

SEQ ID NO: 477238 - RNA, 22 nt, Human
aguauuucuaguugguucuacu

SEQ ID NO: 477239 - RNA, 22 nt, Human
uggcaggggaggugcuugcuua

SEQ ID NO: 477240 - RNA, 22 nt, Human
cagccugcccuggaagcccagc

SEQ ID NO: 477241 - RNA, 22 nt, Human
aucuuucaguuucauaccaauu

SEQ ID NO: 477242 - RNA, 22 nt, Human
cccaagggagugccuggucaac

SEQ ID NO: 477243 - RNA, 22 nt, Human
gcucugcuguguuuguucagca

SEQ ID NO: 477244 - RNA, 22 nt, Human
ggcuggcuugccaagcucaggg

SEQ ID NO: 477245 - RNA, 22 nt, Human
aggccuggccccaguugcuagg

SEQ ID NO: 477246 - RNA, 18 nt, Human
gcuuuauuucuuggggaa

SEQ ID NO: 477247 - RNA, 22 nt, Human
uccuggaggcaaaugagcacau

SEQ ID NO: 477248 - RNA, 22 nt, Human
aucagcugaaaaacaggcagca

SEQ ID NO: 477249 - RNA, 22 nt, Human
gcaggaugagugaguacauuua

SEQ ID NO: 477250 - RNA, 22 nt, Human
aaaggucaagcuggacucaggu

SEQ ID NO: 477251 - RNA, 21 nt, Human
acagucuccccagaucucucc

SEQ ID NO: 477252 - RNA, 22 nt, Human
ugacccugcuucuuggugcagg

SEQ ID NO: 477253 - RNA, 22 nt, Human
ugcagcuucuccaucuccuugu

SEQ ID NO: 477254 - RNA, 22 nt, Human
cagaagaggacuggguagcuca

SEQ ID NO: 477255 - RNA, 22 nt, Human
cucaggaugcaauuccaucaag

SEQ ID NO: 477256 - RNA, 22 nt, Human
ugaggcaggagaaucaccggaa

SEQ ID NO: 477257 - RNA, 22 nt, Human
ccugggcuggaguacagcagug

SEQ ID NO: 477258 - RNA, 22 nt, Human
gagcccuggcagucugggaugg

SEQ ID NO: 477259 - RNA, 22 nt, Human
gcagagcucaugccugcaccuc

SEQ ID NO: 477260 - RNA, 22 nt, Human
ugggacuugccucgagggcugc

SEQ ID NO: 477261 - RNA, 22 nt, Human
uaaaaaguagugagaauggcgc

SEQ ID NO: 477262 - RNA, 22 nt, Human
uauguacaguccuuaacuuaaa

SEQ ID NO: 477263 - RNA, 22 nt, Human
ccagcugcuugggaaaaugucu

SEQ ID NO: 477264 - RNA, 20 nt, Human
ugggccuguggcagaagucu

SEQ ID NO: 477265 - RNA, 22 nt, Human
aagggcucacccaacucacuuc

SEQ ID NO: 477266 - RNA, 22 nt, Human
gccuggagcucuccacuugggg

SEQ ID NO: 477267 - RNA, 22 nt, Human
uugagucaguaauuccauuucu

SEQ ID NO: 477268 - RNA, 22 nt, Human
cucccagagaccaagcugagaa

SEQ ID NO: 477269 - RNA, 21 nt, Human
gcucccuggcugugugaccug

SEQ ID NO: 477270 - RNA, 18 nt, Human
cugucaccgccaccacac

SEQ ID NO: 477271 - RNA, 22 nt, Human
aagggcucuucuauuuauggcc

SEQ ID NO: 477272 - RNA, 22 nt, Human
auaacagagagcuacugaacug

SEQ ID NO: 477273 - RNA, 22 nt, Human
gaugaggcucaugcacccugcg

SEQ ID NO: 477274 - RNA, 22 nt, Human
agcuggccuuagugagcaccug

SEQ ID NO: 477275 - RNA, 22 nt, Human
cagaaauucccauuucagauuc

SEQ ID NO: 477276 - RNA, 22 nt, Human
agccagcagggcuuagaggaca

SEQ ID NO: 477277 - RNA, 22 nt, Human
agagaaaagaguucaggcuuug

SEQ ID NO: 477278 - RNA, 22 nt, Human
ucuguacaccaggggccauucu

SEQ ID NO: 477279 - RNA, 22 nt, Human
caggcccauucuaggcuugcua

SEQ ID NO: 477280 - RNA, 22 nt, Human
gggaccuggcaccuuugcucug

SEQ ID NO: 477281 - RNA, 22 nt, Human
aggcugucaucuuugcaggcag

SEQ ID NO: 477282 - RNA, 22 nt, Human
uauauagaaaagcagauguugg

SEQ ID NO: 477283 - RNA, 22 nt, Human
uaaaguucagugcaugaaugug

SEQ ID NO: 477284 - RNA, 22 nt, Human
caauauucaguggaaaagccau

SEQ ID NO: 477285 - RNA, 22 nt, Human
agaaaucacaggaggcagaagg

SEQ ID NO: 477286 - RNA, 22 nt, Human
cuguggcugcagccuugguccu

SEQ ID NO: 477287 - RNA, 22 nt, Human
aaauuguugaucuacaguaagg

SEQ ID NO: 477288 - RNA, 22 nt, Human
gccaccagugggggccugggca

SEQ ID NO: 477289 - RNA, 20 nt, Human
gacaggagaguuagguaggu

SEQ ID NO: 477290 - RNA, 22 nt, Human
ggcauggcucggagucagaaca

SEQ ID NO: 477291 - RNA, 22 nt, Human
ccugucauacuaacguaguggg

SEQ ID NO: 477292 - RNA, 22 nt, Human
cugcuggccuagcccauccucu

SEQ ID NO: 477293 - RNA, 22 nt, Human
cagggcacaguuauggaggugg

SEQ ID NO: 477294 - RNA, 22 nt, Human
cugccuugaaaaugaagcuuua

SEQ ID NO: 477295 - RNA, 22 nt, Human
aucagcaagcauuuauugagug

SEQ ID NO: 477296 - RNA, 22 nt, Human
uucaggauucuuucagacuggg

SEQ ID NO: 477297 - RNA, 22 nt, Human
ugaggcaggaauggggaaaagu

SEQ ID NO: 477298 - RNA, 22 nt, Human
ggagccagggaagcugcuuccu

SEQ ID NO: 477299 - RNA, 22 nt, Human
ugaacccaggagguugcaguga

SEQ ID NO: 477300 - RNA, 22 nt, Human
guccucuggugaaagcauuccc

SEQ ID NO: 477301 - RNA, 22 nt, Human
ugccaggcugaacagggucuua

SEQ ID NO: 477302 - RNA, 18 nt, Human
agcuggggccucuggucc

SEQ ID NO: 477303 - RNA, 22 nt, Human
ccuguacaucugcucucauugc

SEQ ID NO: 477304 - RNA, 22 nt, Human
cccaggucugccagccuguggg

SEQ ID NO: 477305 - RNA, 22 nt, Human
auacaucuaugccuuucugaca

SEQ ID NO: 477306 - RNA, 22 nt, Human
acuggcugaaguuuacuuuuug

SEQ ID NO: 477307 - RNA, 22 nt, Human
agcugguggauuaugcuguaca

SEQ ID NO: 477308 - RNA, 22 nt, Human
cagggccaagcugcagcaucug

SEQ ID NO: 477309 - RNA, 22 nt, Human
gcugccuguugaagggucugug

SEQ ID NO: 477310 - RNA, 22 nt, Human
acaaauguggacauggauaaug

SEQ ID NO: 477311 - RNA, 22 nt, Human
ugcauuucagaagaaaauucgg

SEQ ID NO: 477312 - RNA, 22 nt, Human
agcuguggcaaccuugucagac

SEQ ID NO: 477313 - RNA, 22 nt, Human
agagccuguuuugugggagaug

SEQ ID NO: 477314 - RNA, 22 nt, Human
ccugccaggacauugcuugaag

SEQ ID NO: 477315 - RNA, 22 nt, Human
cugagcugggacucaguagcaa

SEQ ID NO: 477316 - RNA, 19 nt, Human
uggggccuccugucccugg

SEQ ID NO: 477317 - RNA, 22 nt, Human
ccugggcaacauagugagaccc

SEQ ID NO: 477318 - RNA, 22 nt, Human
ccagagcugcauccagcagguu

SEQ ID NO: 477319 - RNA, 17 nt, Human
aaguccagaguugagca

SEQ ID NO: 477320 - RNA, 22 nt, Human
uaaguaaauuuauaaugugauu

SEQ ID NO: 477321 - RNA, 22 nt, Human
cacaugcauaaggauaauuacu

SEQ ID NO: 477322 - RNA, 20 nt, Human
ggcugccuccuuccuuuccu

SEQ ID NO: 477323 - RNA, 23 nt, Human
auauuagggagauuagcccucua

SEQ ID NO: 477324 - RNA, 22 nt, Human
ggagauagacuuggugagccac

SEQ ID NO: 477325 - RNA, 20 nt, Human
cugggcagguguuugaucuc

SEQ ID NO: 477326 - RNA, 22 nt, Human
cuggccuggcagggagggcaug

SEQ ID NO: 477327 - RNA, 22 nt, Human
aggucauuguuaagucaccaua

SEQ ID NO: 477328 - RNA, 22 nt, Human
gcaggggcugagcaccagcggg

SEQ ID NO: 477329 - RNA, 22 nt, Human
uguggcccagaugagugugcua

SEQ ID NO: 477330 - RNA, 22 nt, Human
ucucagaguuuacggggcugaa

SEQ ID NO: 477331 - RNA, 22 nt, Human
caguagcauguaauaaagacag

SEQ ID NO: 477332 - RNA, 22 nt, Human
acacuuuacagcuuccuuugca

SEQ ID NO: 477333 - RNA, 22 nt, Human
agagggagcccagucauagcug

SEQ ID NO: 477334 - RNA, 22 nt, Human
cacaucagguagaccuacagag

SEQ ID NO: 477335 - RNA, 18 nt, Human
uggcaggaaaugcacuuu

SEQ ID NO: 477336 - RNA, 23 nt, Human
ucagaggaucaucaaacguuuuc

SEQ ID NO: 477337 - RNA, 22 nt, Human
gcccaggcuagcguagagugca

SEQ ID NO: 477338 - RNA, 22 nt, Human
agucacccuccaacucuccacu

SEQ ID NO: 477339 - RNA, 22 nt, Human
augggcagagcuggugggaggc

SEQ ID NO: 477340 - RNA, 22 nt, Human
cgccuggaaccucuaggaccag

SEQ ID NO: 477341 - RNA, 22 nt, Human
uccaagggcagccauagaacuu

SEQ ID NO: 477342 - RNA, 22 nt, Human
ggcccagcugugcuuccagccc

SEQ ID NO: 477343 - RNA, 22 nt, Human
ucucuggguuuuuguccuguac

SEQ ID NO: 477344 - RNA, 22 nt, Human
gaaauucacuguauuucuuggg

SEQ ID NO: 477345 - RNA, 23 nt, Human
aaagacugcugagaauuuuagga

SEQ ID NO: 477346 - RNA, 22 nt, Human
cagugagggaagaucucagcac

SEQ ID NO: 477347 - RNA, 22 nt, Human
uauaagaaacaaggcaaauuuu

SEQ ID NO: 477348 - RNA, 22 nt, Human
agcuggccuguuagagcugagu

SEQ ID NO: 477349 - RNA, 22 nt, Human
cacugggcguguccugggugag

SEQ ID NO: 477350 - RNA, 22 nt, Human
gagucacaaaagaugcccaggg

SEQ ID NO: 477351 - RNA, 22 nt, Human
gcagggacaacugugcaccuga

SEQ ID NO: 477352 - RNA, 23 nt, Human
ugagcaucacaggagaaccaggc

SEQ ID NO: 477353 - RNA, 22 nt, Human
caucaaauggcaagugaaagcu

SEQ ID NO: 477354 - RNA, 19 nt, Human
ccaggccugcgggcguugg

SEQ ID NO: 477355 - RNA, 19 nt, Human
uggaggagaggaaaaguca

SEQ ID NO: 477356 - RNA, 22 nt, Human
acaguccuguacaggccauauc

SEQ ID NO: 477357 - RNA, 22 nt, Human
ucccagccugacagugcaucaa

SEQ ID NO: 477358 - RNA, 21 nt, Human
agugaaauugcaucagaggga

SEQ ID NO: 477359 - RNA, 22 nt, Human
cugagcugggaguggauagugg

SEQ ID NO: 477360 - RNA, 21 nt, Human
gugcucugggcagcagagggc

SEQ ID NO: 477361 - RNA, 22 nt, Human
ggccugcuuuccgagccugcag

SEQ ID NO: 477362 - RNA, 22 nt, Human
aagaauguuaguuucugauaca

SEQ ID NO: 477363 - RNA, 22 nt, Human
uuucugcucgcucucaaucagg

SEQ ID NO: 477364 - RNA, 22 nt, Human
cuggcagguccagcuggacuca

SEQ ID NO: 477365 - RNA, 22 nt, Human
cauaccuuucucaagcacaugu

SEQ ID NO: 477366 - RNA, 22 nt, Human
uuuauauagagauuugugcaug

SEQ ID NO: 477367 - RNA, 23 nt, Human
ucucagaggauuccugggccuug

SEQ ID NO: 477368 - RNA, 22 nt, Human
acccugagggguauagcagaag

SEQ ID NO: 477369 - RNA, 22 nt, Human
uuccucaugggguuccuucaga

SEQ ID NO: 477370 - RNA, 22 nt, Human
gcagcuggucuggccuagagua

SEQ ID NO: 477371 - RNA, 22 nt, Human
uuccagaauuuuguucugcuug

SEQ ID NO: 477372 - RNA, 22 nt, Human
caaggaaaacagaugaucaaca

SEQ ID NO: 477373 - RNA, 22 nt, Human
acaggccugugugcacacgagg

SEQ ID NO: 477374 - RNA, 22 nt, Human
gcacagaacagagaaauagcca

SEQ ID NO: 477375 - RNA, 18 nt, Human
cagaaaucacaccagcac

SEQ ID NO: 477376 - RNA, 22 nt, Human
cccagcaguuguuggugcacau

SEQ ID NO: 477377 - RNA, 22 nt, Human
uggccuuggacagagcgcuccu

SEQ ID NO: 477378 - RNA, 22 nt, Human
cagaaguaagauuacugugaga

SEQ ID NO: 477379 - RNA, 22 nt, Human
caggcagccugcggucugcaca

SEQ ID NO: 477380 - RNA, 22 nt, Human
ucucagagauguuagggaagag

SEQ ID NO: 477381 - RNA, 22 nt, Human
uaggcuggaacuuaggcagagg

SEQ ID NO: 477382 - RNA, 22 nt, Human
agcagcauccccggccuccacc

SEQ ID NO: 477383 - RNA, 22 nt, Human
aauaaauguuaagauugucuca

SEQ ID NO: 477384 - RNA, 19 nt, Human
ggcauccagaacuaccagu

SEQ ID NO: 477385 - RNA, 22 nt, Human
ccugcucugguuuagucagucu

SEQ ID NO: 477386 - RNA, 22 nt, Human
guggagccaggggcuguaggua

SEQ ID NO: 477387 - RNA, 22 nt, Human
auuaagacugcccauguuuuua

SEQ ID NO: 477388 - RNA, 22 nt, Human
ccccaccagcacccucucuauc

SEQ ID NO: 477389 - RNA, 22 nt, Human
aggagggcaggcuggcugccua

SEQ ID NO: 477390 - RNA, 22 nt, Human
uguguccauucaggcacugacc

SEQ ID NO: 477391 - RNA, 19 nt, Human
uggcagggagaguuugaag

SEQ ID NO: 477392 - RNA, 22 nt, Human
acagccuggacuggcucucugc

SEQ ID NO: 477393 - RNA, 22 nt, Human
aggugaguuacaggaggagguc

SEQ ID NO: 477394 - RNA, 22 nt, Human
aguuuauguaaaauuaguaaug

SEQ ID NO: 477395 - RNA, 22 nt, Human
ugcugucaguuggcaggaugag

SEQ ID NO: 477396 - RNA, 19 nt, Human
cugcugggugcugagggag

SEQ ID NO: 477397 - RNA, 22 nt, Human
ugcugcucuguaaagugaugag

SEQ ID NO: 477398 - RNA, 22 nt, Human
cuagcaucagaugagaagcugu

SEQ ID NO: 477399 - RNA, 22 nt, Human
ugccagugggugugcagagacu

SEQ ID NO: 477400 - RNA, 22 nt, Human
acacagggggcauucuaggagu

SEQ ID NO: 477401 - RNA, 21 nt, Human
ucuugaaaauuguagcaguuu

SEQ ID NO: 477402 - RNA, 22 nt, Human
gcagccagguuugaggaccacu

SEQ ID NO: 477403 - RNA, 22 nt, Human
uguggucucguuauguugccca

SEQ ID NO: 477404 - RNA, 22 nt, Human
ucaugacaucuguuuaucucaa

SEQ ID NO: 477405 - RNA, 22 nt, Human
uguccaggucagcagcagggac

SEQ ID NO: 477406 - RNA, 22 nt, Human
ucagcagcagcucagcauguuu

SEQ ID NO: 477407 - RNA, 22 nt, Human
gcagggcaggauuugaacccag

SEQ ID NO: 477408 - RNA, 22 nt, Human
gaggcucaguuauuuuagccug

SEQ ID NO: 477409 - RNA, 22 nt, Human
gcucucagguacaaagcugugu

SEQ ID NO: 477410 - RNA, 22 nt, Human
gccuucaggaggguuccagaca

SEQ ID NO: 477411 - RNA, 22 nt, Human
aaagccagugguaugagagaaa

SEQ ID NO: 477412 - RNA, 22 nt, Human
gagggcuguggggcaugaccag

SEQ ID NO: 477413 - RNA, 22 nt, Human
cuguccuugcuggccagguaug

SEQ ID NO: 477414 - RNA, 19 nt, Human
acaaagcugugagcagcuu

SEQ ID NO: 477415 - RNA, 22 nt, Human
gugcucuggcuggucucccggu

SEQ ID NO: 477416 - RNA, 22 nt, Human
ucuggccacccgaggccccugc

SEQ ID NO: 477417 - RNA, 22 nt, Human
gauugaaacauaggcagucgag

SEQ ID NO: 477418 - RNA, 22 nt, Human
uccagcagaccaucaaggcuca

SEQ ID NO: 477419 - RNA, 22 nt, Human
ggcuggcucagggcuugagaga

SEQ ID NO: 477420 - RNA, 22 nt, Human
ccucccaccauuuagagagagc

SEQ ID NO: 477421 - RNA, 22 nt, Human
ccucaggauacaggagccacag

SEQ ID NO: 477422 - RNA, 22 nt, Human
aauguguagauguugcauuccu

SEQ ID NO: 477423 - RNA, 22 nt, Human
uggcugaaggaagauucuucua

SEQ ID NO: 477424 - RNA, 22 nt, Human
uacaguauuaugagugauugaa

SEQ ID NO: 477425 - RNA, 19 nt, Human
gaaggagagcugaguuagg

SEQ ID NO: 477426 - RNA, 22 nt, Human
cagcugugaauugucuuaucua

SEQ ID NO: 477427 - RNA, 22 nt, Human
uauuaguagcuugaaauuggug

SEQ ID NO: 477428 - RNA, 22 nt, Human
gcacugaaugcuuuuacuguaa

SEQ ID NO: 477429 - RNA, 15 nt, Human
cagucccagggaccc

SEQ ID NO: 477430 - RNA, 22 nt, Human
cuguccagcuuggcuccugggg

SEQ ID NO: 477431 - RNA, 22 nt, Human
auuucucacucacaguccaugu

SEQ ID NO: 477432 - RNA, 22 nt, Human
caugucuugcccugauuaguag

SEQ ID NO: 477433 - RNA, 20 nt, Human
uaagaacaagacuaggaagc

SEQ ID NO: 477434 - RNA, 22 nt, Human
ugggcagaggacagggaagauc

SEQ ID NO: 477435 - RNA, 22 nt, Human
agaaacagcauuagcaucaauu

SEQ ID NO: 477436 - RNA, 22 nt, Human
aaguuacuggcaagggcugcag

SEQ ID NO: 477437 - RNA, 22 nt, Human
acuucuggugucauacugcauu

SEQ ID NO: 477438 - RNA, 22 nt, Human
uuauguaauuuguuugcucuuc

SEQ ID NO: 477439 - RNA, 22 nt, Human
ugaagcagagaauuugacaguc

SEQ ID NO: 477440 - RNA, 23 nt, Human
aaaguguagccagguuaagaacc

SEQ ID NO: 477441 - RNA, 22 nt, Human
ucauuucucugagucugauaau

SEQ ID NO: 477442 - RNA, 22 nt, Human
gaagccaggggccugacaggca

SEQ ID NO: 477443 - RNA, 22 nt, Human
ugccuuggugcuucuucaugug

SEQ ID NO: 477444 - RNA, 22 nt, Human
uuuaaauuauaguuaaugucug

SEQ ID NO: 477445 - RNA, 22 nt, Human
caggcagccugagggaucuggg

SEQ ID NO: 477446 - RNA, 22 nt, Human
ugaaagguagcuggccucauag

SEQ ID NO: 477447 - RNA, 22 nt, Human
uggcucuggauuaaucuaggaa

SEQ ID NO: 477448 - RNA, 22 nt, Human
cgaugguucuggcugcuuguau

SEQ ID NO: 477449 - RNA, 22 nt, Human
ccacaggaccagaggagaucac

SEQ ID NO: 477450 - RNA, 22 nt, Human
guccaggucuggacccugagcc

SEQ ID NO: 477451 - RNA, 22 nt, Human
ugcuauaagaauuauauuacuc

SEQ ID NO: 477452 - RNA, 23 nt, Human
cuuuuaacuugaucugagaccag

SEQ ID NO: 477453 - RNA, 19 nt, Human
uguggccaugguucagcug

SEQ ID NO: 477454 - RNA, 22 nt, Human
ccugccagcccgcguucaugcc

SEQ ID NO: 477455 - RNA, 22 nt, Human
gaagaacaagcagugcuuuccu

SEQ ID NO: 477456 - RNA, 22 nt, Human
gcugccuuugugagccaagggg

SEQ ID NO: 477457 - RNA, 22 nt, Human
uuauguacucugcaauguuuga

SEQ ID NO: 477458 - RNA, 22 nt, Human
acaguaccugcucucaagcaaa

SEQ ID NO: 477459 - RNA, 21 nt, Human
uggccaaaaccauauuauuaa

SEQ ID NO: 477460 - RNA, 22 nt, Human
agcauuuauuucuuagaaauug

SEQ ID NO: 477461 - RNA, 22 nt, Human
uggcucagaaggcugccuucac

SEQ ID NO: 477462 - RNA, 22 nt, Human
caagagcuagacuuugucagga

SEQ ID NO: 477463 - RNA, 22 nt, Human
cagagcauaauugacaugaggu

SEQ ID NO: 477464 - RNA, 22 nt, Human
cucaggauuuaaaggggcacuc

SEQ ID NO: 477465 - RNA, 22 nt, Human
ucagaggacagcagcuaaauaa

SEQ ID NO: 477466 - RNA, 22 nt, Human
cugggaggcccacguugggaag

SEQ ID NO: 477467 - RNA, 22 nt, Human
acacauuuacauguuuacguau

SEQ ID NO: 477468 - RNA, 22 nt, Human
cuggcucuaucuccaaggcugg

SEQ ID NO: 477469 - RNA, 22 nt, Human
aaauacagaguugcuuaaaagc

SEQ ID NO: 477470 - RNA, 22 nt, Human
ccagcaccuugaucuuggaguu

SEQ ID NO: 477471 - RNA, 22 nt, Human
ggcugcuuuaucggcugcugaa

SEQ ID NO: 477472 - RNA, 19 nt, Human
ccagaggacuguuaaugaa

SEQ ID NO: 477473 - RNA, 22 nt, Human
uuuagggaagaagcccauggcc

SEQ ID NO: 477474 - RNA, 22 nt, Human
cuggagagggagcccuggcagu

SEQ ID NO: 477475 - RNA, 21 nt, Human
ucucugugucuuuaagcugga

SEQ ID NO: 477476 - RNA, 22 nt, Human
cagagccagaacuagaccuugu

SEQ ID NO: 477477 - RNA, 20 nt, Human
ccuuuauuauuuguaugaug

SEQ ID NO: 477478 - RNA, 22 nt, Human
aaagcccauguggaaguacagg

SEQ ID NO: 477479 - RNA, 22 nt, Human
ccagcagcagcguccaaggaga

SEQ ID NO: 477480 - RNA, 22 nt, Human
guggcuucuggcugggccucag

SEQ ID NO: 477481 - RNA, 21 nt, Human
agaaaauggcguuuuagauuu

SEQ ID NO: 477482 - RNA, 22 nt, Human
ucaggagauguaaccuuagcug

SEQ ID NO: 477483 - RNA, 22 nt, Human
guacauuggcaacucucuuaga

SEQ ID NO: 477484 - RNA, 22 nt, Human
uagauuucgcugcaucucaauc

SEQ ID NO: 477485 - RNA, 22 nt, Human
gacuuucucuccucccaggugu

SEQ ID NO: 477486 - RNA, 22 nt, Human
acagaguauuggaaaggcagug

SEQ ID NO: 477487 - RNA, 20 nt, Human
aguagcagugugacauugac

SEQ ID NO: 477488 - RNA, 22 nt, Human
gccuggagcucaugugggcauu

SEQ ID NO: 477489 - RNA, 22 nt, Human
cccuucagcugagugggacagc

SEQ ID NO: 477490 - RNA, 22 nt, Human
uauguacaugauuucauuugcu

SEQ ID NO: 477491 - RNA, 22 nt, Human
aagcagccuggacuugggcugg

SEQ ID NO: 477492 - RNA, 22 nt, Human
ugugaaggagcaugcagagggg

SEQ ID NO: 477493 - RNA, 22 nt, Human
gagccagcgccuugccucuggg

SEQ ID NO: 477494 - RNA, 22 nt, Human
gcagagcuucuguccuucagga

SEQ ID NO: 477495 - RNA, 22 nt, Human
gcagggugugucucauacaguu

SEQ ID NO: 477496 - RNA, 22 nt, Human
aguuucuaacauauagcauugg

SEQ ID NO: 477497 - RNA, 22 nt, Human
gcuggcccagggucaccuagga

SEQ ID NO: 477498 - RNA, 22 nt, Human
uacauguuuacuccaagucagg

SEQ ID NO: 477499 - RNA, 22 nt, Human
ugcaggagcugugcggugaggg

SEQ ID NO: 477500 - RNA, 23 nt, Human
gccuggagaaaagcugcaguuca

SEQ ID NO: 477501 - RNA, 22 nt, Human
gcaggccagcugugcagauggg

SEQ ID NO: 477502 - RNA, 22 nt, Human
ucccagaguuuccuguguccca

SEQ ID NO: 477503 - RNA, 22 nt, Human
aagcccagaugggagcauuuca

SEQ ID NO: 477504 - RNA, 22 nt, Human
agcagggcagugaucagaaagg

SEQ ID NO: 477505 - RNA, 22 nt, Human
uucaagauaauaggaaugaaaa

SEQ ID NO: 477506 - RNA, 22 nt, Human
cagcuuuagagaaaacauauuu

SEQ ID NO: 477507 - RNA, 22 nt, Human
aacuguucuucauuuucaguau

SEQ ID NO: 477508 - RNA, 22 nt, Human
agcugcaggcccaugcucaguc

SEQ ID NO: 477509 - RNA, 22 nt, Human
uagccggguguugugucaugca

SEQ ID NO: 477510 - RNA, 22 nt, Human
gagauguacaauguguauuaau

SEQ ID NO: 477511 - RNA, 22 nt, Human
caaagguaguauauauauuguu

SEQ ID NO: 477512 - RNA, 22 nt, Human
gagcucagcccaaagagcagug

SEQ ID NO: 477513 - RNA, 22 nt, Human
guaucuuuugguggaaaaauaa

SEQ ID NO: 477514 - RNA, 22 nt, Human
gguuucaacucagcuaguaagg

SEQ ID NO: 477515 - RNA, 21 nt, Human
uaagccaccaugugaaaccag

SEQ ID NO: 477516 - RNA, 22 nt, Human
gaaggccauugcguccugggau

SEQ ID NO: 477517 - RNA, 22 nt, Human
cugugcuugacagugggaagca

SEQ ID NO: 477518 - RNA, 22 nt, Human
agggacagaugaaugacugagu

SEQ ID NO: 477519 - RNA, 22 nt, Human
ggcaugggccgaggugccuccu

SEQ ID NO: 477520 - RNA, 22 nt, Human
auuuauuauugugguuacuucu

SEQ ID NO: 477521 - RNA, 22 nt, Human
aucagcaaguccuguuaauucu

SEQ ID NO: 477522 - RNA, 22 nt, Human
gggcaguguggucgugccuuug

SEQ ID NO: 477523 - RNA, 22 nt, Human
guuucgucaggcuuauucuauc

SEQ ID NO: 477524 - RNA, 22 nt, Human
gcagggagguuugcugaccugg

SEQ ID NO: 477525 - RNA, 22 nt, Human
caguggugaagagcaggggcuc

SEQ ID NO: 477526 - RNA, 22 nt, Human
ggcuagaauaauugacuucauu

SEQ ID NO: 477527 - RNA, 22 nt, Human
ugaugaaauguugaggcaguga

SEQ ID NO: 477528 - RNA, 22 nt, Human
uccagcucaggguuggcucaag

SEQ ID NO: 477529 - RNA, 22 nt, Human
cugaggaugguguggucuucuc

SEQ ID NO: 477530 - RNA, 22 nt, Human
aggcucagucccggcccgcgcc

SEQ ID NO: 477531 - RNA, 22 nt, Human
ugggaaauguguuucuggacca

SEQ ID NO: 477532 - RNA, 22 nt, Human
ucugccuggaugauggcagggc

SEQ ID NO: 477533 - RNA, 22 nt, Human
aaggcaguuaauuuggcuagaa

SEQ ID NO: 477534 - RNA, 22 nt, Human
ccaggccugugcaaggagggag

SEQ ID NO: 477535 - RNA, 22 nt, Human
ugcacacacaugaaguagcaug

SEQ ID NO: 477536 - RNA, 22 nt, Human
gggauuugugggauggccagug

SEQ ID NO: 477537 - RNA, 22 nt, Human
aucauguuccagaaacagugau

SEQ ID NO: 477538 - RNA, 22 nt, Human
ggggauggaggcgugugguccu

SEQ ID NO: 477539 - RNA, 22 nt, Human
agcugcugugugcucaggcagg

SEQ ID NO: 477540 - RNA, 22 nt, Human
gaggggaaagugugaggcugcg

SEQ ID NO: 477541 - RNA, 22 nt, Human
aagccuuccugagugcaaggcc

SEQ ID NO: 477542 - RNA, 22 nt, Human
gagggcagagacagugauucac

SEQ ID NO: 477543 - RNA, 22 nt, Human
aagggcuggagacugggucuuc

SEQ ID NO: 477544 - RNA, 22 nt, Human
ccagcuggagccaagguggacu

SEQ ID NO: 477545 - RNA, 22 nt, Human
gcaggcuggucugaccaucccu

SEQ ID NO: 477546 - RNA, 22 nt, Human
auucuacaacccaauaauaauu

SEQ ID NO: 477547 - RNA, 22 nt, Human
uguguuccugccuggcucuggu

SEQ ID NO: 477548 - RNA, 22 nt, Human
cacugaagguaggaccaaggcu

SEQ ID NO: 477549 - RNA, 22 nt, Human
uaguccagccuuggguguagcc

SEQ ID NO: 477550 - RNA, 22 nt, Human
acauuucugcauguaggguaau

SEQ ID NO: 477551 - RNA, 22 nt, Human
auuuggcaacauuaauugaauc

SEQ ID NO: 477552 - RNA, 22 nt, Human
uucuuuccacagaggggaugau

SEQ ID NO: 477553 - RNA, 22 nt, Human
ugugcuucuugcagcuccugua

SEQ ID NO: 477554 - RNA, 22 nt, Human
guguguccaggcgggagucaag

SEQ ID NO: 477555 - RNA, 22 nt, Human
uaauguguugaauauuuguaca

SEQ ID NO: 477556 - RNA, 18 nt, Human
uguuuauuuuucucuuac

SEQ ID NO: 477557 - RNA, 22 nt, Human
uuaucguacgcuucagaaauuu

SEQ ID NO: 477558 - RNA, 22 nt, Human
gugcucuguguauuaggauguc

SEQ ID NO: 477559 - RNA, 19 nt, Human
ggaccagguccugggcagc

SEQ ID NO: 477560 - RNA, 23 nt, Human
auugaugacuugauuacacuuuu

SEQ ID NO: 477561 - RNA, 22 nt, Human
cacugugucaguuugguuagac

SEQ ID NO: 477562 - RNA, 22 nt, Human
ugccugucuucaggagugucac

SEQ ID NO: 477563 - RNA, 22 nt, Human
aacccuggggcagcugcuaggg

SEQ ID NO: 477564 - RNA, 22 nt, Human
gcagggcucauucuaguacaau

SEQ ID NO: 477565 - RNA, 22 nt, Human
ucagcagaggggaaggcaucug

SEQ ID NO: 477566 - RNA, 19 nt, Human
gcucugugaugcugagggg

SEQ ID NO: 477567 - RNA, 22 nt, Human
agugcugaagacuggcuaggga

SEQ ID NO: 477568 - RNA, 22 nt, Human
agccacagggggugagggacaa

SEQ ID NO: 477569 - RNA, 22 nt, Human
ccaggguaccccaagggcaggu

SEQ ID NO: 477570 - RNA, 22 nt, Human
gugcagugagcagugcagcacc

SEQ ID NO: 477571 - RNA, 22 nt, Human
accagagauggggcuucucugu

SEQ ID NO: 477572 - RNA, 22 nt, Human
cagcuuuuuagaaucuagggca

SEQ ID NO: 477573 - RNA, 22 nt, Human
agcuguucccucacugcaguca

SEQ ID NO: 477574 - RNA, 22 nt, Human
ugagcuguagcagaugcuguug

SEQ ID NO: 477575 - RNA, 18 nt, Human
gccugggaggaggaaaug

SEQ ID NO: 477576 - RNA, 22 nt, Human
uugguuuagagagugugguuac

SEQ ID NO: 477577 - RNA, 22 nt, Human
aggccugaaguguggagugggg

SEQ ID NO: 477578 - RNA, 22 nt, Human
gggcagcagaggaucccuuaau

SEQ ID NO: 477579 - RNA, 22 nt, Human
ggaccagagcucgggcuucuca

SEQ ID NO: 477580 - RNA, 22 nt, Human
aagugaguggccuggagaggug

SEQ ID NO: 477581 - RNA, 22 nt, Human
cugcugggucuaugcaagugga

SEQ ID NO: 477582 - RNA, 22 nt, Human
cuggccagggugcgaucguggu

SEQ ID NO: 477583 - RNA, 22 nt, Human
gcacccagggacuuggcuggcc

SEQ ID NO: 477584 - RNA, 22 nt, Human
cagucccaccaggaucgcucuu

SEQ ID NO: 477585 - RNA, 22 nt, Human
augaggcaugugaggagaaggg

SEQ ID NO: 477586 - RNA, 22 nt, Human
cuggggugucucgucugccauu

SEQ ID NO: 477587 - RNA, 22 nt, Human
uccucaggugacuagguaucuu

SEQ ID NO: 477588 - RNA, 22 nt, Human
agcccagguugaggcugcagug

SEQ ID NO: 477589 - RNA, 22 nt, Human
uccagccaagggagguuacuag

SEQ ID NO: 477590 - RNA, 22 nt, Human
agggaucaaaaaauguacaugc

SEQ ID NO: 477591 - RNA, 22 nt, Human
uccuuuuuauaguuagagaaac

SEQ ID NO: 477592 - RNA, 22 nt, Human
cagaaacuauguaagaaaguga

SEQ ID NO: 477593 - RNA, 23 nt, Human
ucacagggcacuggcugggguug

SEQ ID NO: 477594 - RNA, 22 nt, Human
augacacaauuuuagagcugaa

SEQ ID NO: 477595 - RNA, 22 nt, Human
guuuauuauucaacuucauguu

SEQ ID NO: 477596 - RNA, 22 nt, Human
aggcagcuggcagcacccaggg

SEQ ID NO: 477597 - RNA, 22 nt, Human
uggugaagucagcggagcccgg

SEQ ID NO: 477598 - RNA, 22 nt, Human
cagcaauaguguguuuguuuca

SEQ ID NO: 477599 - RNA, 22 nt, Human
uggggugccgacagggagggca

SEQ ID NO: 477600 - RNA, 22 nt, Human
ggccuugggaggagggucagaa

SEQ ID NO: 477601 - RNA, 22 nt, Human
augugcaugcacuuacaugugu

SEQ ID NO: 477602 - RNA, 22 nt, Human
augaguaagaccauaauuuuug

SEQ ID NO: 477603 - RNA, 22 nt, Human
ugccaggcuguccugggccugg

SEQ ID NO: 477604 - RNA, 22 nt, Human
gcagcugcaggcaggcuugcug

SEQ ID NO: 477605 - RNA, 22 nt, Human
ccaggcauccauugcuuccucu

SEQ ID NO: 477606 - RNA, 22 nt, Human
aaaaauagcuucucuugucccu

SEQ ID NO: 477607 - RNA, 22 nt, Human
agcuggguguguaucagauaaa

SEQ ID NO: 477608 - RNA, 22 nt, Human
ggggcccagcaccccuccucgc

SEQ ID NO: 477609 - RNA, 22 nt, Human
ugggaccugcccuggccccauc

SEQ ID NO: 477610 - RNA, 22 nt, Human
agcagcauauugugucuucaua

SEQ ID NO: 477611 - RNA, 22 nt, Human
ccugcucagccccagcucaccc

SEQ ID NO: 477612 - RNA, 22 nt, Human
gcagggcuguggacacuuuggu

SEQ ID NO: 477613 - RNA, 22 nt, Human
cccccaggcucugacacaggag

SEQ ID NO: 477614 - RNA, 22 nt, Human
guggcugcagagggcacagcau

SEQ ID NO: 477615 - RNA, 18 nt, Human
caaagcucacguuccauc

SEQ ID NO: 477616 - RNA, 22 nt, Human
aggugcuagguguguaguggag

SEQ ID NO: 477617 - RNA, 22 nt, Human
ugggccuggagcccuggagagu

SEQ ID NO: 477618 - RNA, 22 nt, Human
caugggcuacagaagcaugcug

SEQ ID NO: 477619 - RNA, 22 nt, Human
caggaaagagcugccaggcagg

SEQ ID NO: 477620 - RNA, 22 nt, Human
ccuggcaguuuugcccaggauu

SEQ ID NO: 477621 - RNA, 18 nt, Human
gagguccugcucuagccc

SEQ ID NO: 477622 - RNA, 22 nt, Human
caccugcagggggagucaagag

SEQ ID NO: 477623 - RNA, 19 nt, Human
acagaagcauagaaaagga

SEQ ID NO: 477624 - RNA, 22 nt, Human
gugccuggcaugcgccggugcu

SEQ ID NO: 477625 - RNA, 22 nt, Human
cacucuccagcacaccccauuu

SEQ ID NO: 477626 - RNA, 22 nt, Human
uaaaggcuucugcagggacuga

SEQ ID NO: 477627 - RNA, 22 nt, Human
ccucucucuccugcacacacac

SEQ ID NO: 477628 - RNA, 22 nt, Human
ucagaccauccugcuguuagug

SEQ ID NO: 477629 - RNA, 22 nt, Human
cucuuaguuuaucuuugacaaa

SEQ ID NO: 477630 - RNA, 22 nt, Human
uugggguguuggauggagcaag

SEQ ID NO: 477631 - RNA, 22 nt, Human
ugcagggaacuuggacagcuag

SEQ ID NO: 477632 - RNA, 22 nt, Human
uuuguacauccuaauucugagu

SEQ ID NO: 477633 - RNA, 21 nt, Human
aggcagcucaggcccagagag

SEQ ID NO: 477634 - RNA, 22 nt, Human
ugacagcauaacacuggucuug

SEQ ID NO: 477635 - RNA, 22 nt, Human
uaaggucauggugaauaauaag

SEQ ID NO: 477636 - RNA, 22 nt, Human
gagaaacuuggaguuauucugg

SEQ ID NO: 477637 - RNA, 22 nt, Human
ggccugggcccacugucaagag

SEQ ID NO: 477638 - RNA, 22 nt, Human
agcuuuauucaugauuucaggg

SEQ ID NO: 477639 - RNA, 22 nt, Human
gugucauguagaaauugaugaa

SEQ ID NO: 477640 - RNA, 22 nt, Human
gcccagcaggggauggcagcuc

SEQ ID NO: 477641 - RNA, 22 nt, Human
cacuuggaggaaggccuauuca

SEQ ID NO: 477642 - RNA, 22 nt, Human
uauuugcaacauaaaacucuga

SEQ ID NO: 477643 - RNA, 21 nt, Human
auucagaaagggaauaaacuc

SEQ ID NO: 477644 - RNA, 22 nt, Human
gcauggcauuugaagguagaag

SEQ ID NO: 477645 - RNA, 22 nt, Human
cccugggcaagcccuauuuucc

SEQ ID NO: 477646 - RNA, 23 nt, Human
acugagccagggccugggucagc

SEQ ID NO: 477647 - RNA, 22 nt, Human
cacagcuugggcucugacaaua

SEQ ID NO: 477648 - RNA, 22 nt, Human
cuccacagccccuccaguggca

SEQ ID NO: 477649 - RNA, 22 nt, Human
cagugcuccugauguacccuug

SEQ ID NO: 477650 - RNA, 22 nt, Human
caggcagcguccugcuuccugu

SEQ ID NO: 477651 - RNA, 22 nt, Human
cugcugcucagugucaucaugu

SEQ ID NO: 477652 - RNA, 22 nt, Human
agggcacaagacucugagcccc

SEQ ID NO: 477653 - RNA, 22 nt, Human
gcagggccagugcagagaggaa

SEQ ID NO: 477654 - RNA, 22 nt, Human
cggcuggugucgggcacagcaa

SEQ ID NO: 477655 - RNA, 22 nt, Human
aacauguagcagaaacgacuaa

SEQ ID NO: 477656 - RNA, 22 nt, Human
ucucuuauuuugccuuugacaa

SEQ ID NO: 477657 - RNA, 22 nt, Human
aagcagccacuggccaguuaua

SEQ ID NO: 477658 - RNA, 22 nt, Human
ucugagaggauuccugucccga

SEQ ID NO: 477659 - RNA, 22 nt, Human
gacagacauuuccugauccaau

SEQ ID NO: 477660 - RNA, 22 nt, Human
gacccagccugguuuuuauagg

SEQ ID NO: 477661 - RNA, 22 nt, Human
aggucaaaccacagcucuaggc

SEQ ID NO: 477662 - RNA, 22 nt, Human
cuggaggcugaguugggucucc

SEQ ID NO: 477663 - RNA, 22 nt, Human
ucacaagauacaguuagaagca

SEQ ID NO: 477664 - RNA, 22 nt, Human
ggcucugcccagaugaagagga

SEQ ID NO: 477665 - RNA, 22 nt, Human
gugagcaggauuucauggugua

SEQ ID NO: 477666 - RNA, 22 nt, Human
guuuauuagaguuuucugucug

SEQ ID NO: 477667 - RNA, 22 nt, Human
gggagccuugggagugccagcc

SEQ ID NO: 477668 - RNA, 22 nt, Human
aaacuuuaagacaguccucaag

SEQ ID NO: 477669 - RNA, 21 nt, Human
cagacccucuagaggccaccu

SEQ ID NO: 477670 - RNA, 21 nt, Human
cacucaggguaugugccaggc

SEQ ID NO: 477671 - RNA, 22 nt, Human
cugagguggaacagaggugaag

SEQ ID NO: 477672 - RNA, 22 nt, Human
gguggccuccagggcauaggug

SEQ ID NO: 477673 - RNA, 22 nt, Human
agaaaucugacugcugugcaca

SEQ ID NO: 477674 - RNA, 22 nt, Human
ccagcaggggaauauuuuuagg

SEQ ID NO: 477675 - RNA, 22 nt, Human
cagcuugcaguacuuguuuuug

SEQ ID NO: 477676 - RNA, 22 nt, Human
aggcucugaucagguggcugug

SEQ ID NO: 477677 - RNA, 22 nt, Human
cacagggcaccaguuggccauc

SEQ ID NO: 477678 - RNA, 22 nt, Human
aagucauugguagcuugauagg

SEQ ID NO: 477679 - RNA, 22 nt, Human
ucaaaguaaaaguauagaguuu

SEQ ID NO: 477680 - RNA, 22 nt, Human
uccaggcauguugggaagauga

SEQ ID NO: 477681 - RNA, 22 nt, Human
cccuggagguggagguugcagg

SEQ ID NO: 477682 - RNA, 22 nt, Human
gugggcuggacccuccugcucc

SEQ ID NO: 477683 - RNA, 22 nt, Human
auggcagccugagcagaggaau

SEQ ID NO: 477684 - RNA, 22 nt, Human
gcagcuuucugggacagaaagg

SEQ ID NO: 477685 - RNA, 22 nt, Human
aggacugggugcagagggcauc

SEQ ID NO: 477686 - RNA, 19 nt, Human
uagagcugcuuccuggcag

SEQ ID NO: 477687 - RNA, 22 nt, Human
ccagcuuuccugcgaguugauu

SEQ ID NO: 477688 - RNA, 22 nt, Human
cagcugcccauccugggaaaug

SEQ ID NO: 477689 - RNA, 22 nt, Human
ccuggcagcuccuccccggcgg

SEQ ID NO: 477690 - RNA, 22 nt, Human
gcuguacaucacaauuugcugu

SEQ ID NO: 477691 - RNA, 22 nt, Human
auaguaacuggcauguuuauga

SEQ ID NO: 477692 - RNA, 22 nt, Human
cagcacugcugcuguacacaca

SEQ ID NO: 477693 - RNA, 22 nt, Human
cuuuucaugccagcccaucaca

SEQ ID NO: 477694 - RNA, 22 nt, Human
guugaguggguuaggaugcuga

SEQ ID NO: 477695 - RNA, 22 nt, Human
auucaaguggcugcuauguuaa

SEQ ID NO: 477696 - RNA, 22 nt, Human
cagguuuagguggacgugcagg

SEQ ID NO: 477697 - RNA, 22 nt, Human
cugaggugcuagggucccugcu

SEQ ID NO: 477698 - RNA, 22 nt, Human
uaaggaaaguacauguuuugac

SEQ ID NO: 477699 - RNA, 22 nt, Human
ugccugucuuaauaucuggaaa

SEQ ID NO: 477700 - RNA, 22 nt, Human
uagggcagcugcaucaggcacu

SEQ ID NO: 477701 - RNA, 18 nt, Human
uccagagguguuggagcc

SEQ ID NO: 477702 - RNA, 22 nt, Human
ggggccugcgagguucaacuuc

SEQ ID NO: 477703 - RNA, 22 nt, Human
agggaagaaaauccaucgcugc

SEQ ID NO: 477704 - RNA, 22 nt, Human
uuacuuuguucucaagauaugu

SEQ ID NO: 477705 - RNA, 22 nt, Human
guggggcaugcacgcugcuccu

SEQ ID NO: 477706 - RNA, 22 nt, Human
agggcuccugaggcccuucugg

SEQ ID NO: 477707 - RNA, 22 nt, Human
cagcugccacaggacuuucuga

SEQ ID NO: 477708 - RNA, 22 nt, Human
ugaagcaggaucguuugcuuca

SEQ ID NO: 477709 - RNA, 22 nt, Human
auaguacacauccuacaauguu

SEQ ID NO: 477710 - RNA, 22 nt, Human
uagaaacccauguuuauucagu

SEQ ID NO: 477711 - RNA, 22 nt, Human
ugccaggcccucccacagauua

SEQ ID NO: 477712 - RNA, 22 nt, Human
ugccaaggagcuggaucagggc

SEQ ID NO: 477713 - RNA, 22 nt, Human
aguuuuucugggaggcacugcu

SEQ ID NO: 477714 - RNA, 22 nt, Human
gaagccucaacaucucugcguc

SEQ ID NO: 477715 - RNA, 22 nt, Human
auuguacagaugagguaaguga

SEQ ID NO: 477716 - RNA, 22 nt, Human
auauucuuccaaaacaucauuu

SEQ ID NO: 477717 - RNA, 20 nt, Human
gcccuggagccuuguccugg

SEQ ID NO: 477718 - RNA, 22 nt, Human
accugccucagugcagcuggau

SEQ ID NO: 477719 - RNA, 22 nt, Human
cccacucuggcucccuucuagu

SEQ ID NO: 477720 - RNA, 22 nt, Human
aaguucaauggaaaagcuuuag

SEQ ID NO: 477721 - RNA, 22 nt, Human
uguuuucuauuaccugagauug

SEQ ID NO: 477722 - RNA, 22 nt, Human
gcagaggccaucaacuuugcca

SEQ ID NO: 477723 - RNA, 22 nt, Human
cucagagaggcaguggaaguca

SEQ ID NO: 477724 - RNA, 22 nt, Human
aagaacauuuuguagaaugaca

SEQ ID NO: 477725 - RNA, 22 nt, Human
aaggcacugaaaaauugugugu

SEQ ID NO: 477726 - RNA, 22 nt, Human
uucaaagugcauguuccucaga

SEQ ID NO: 477727 - RNA, 20 nt, Human
cagcuuggaugagaggcuga

SEQ ID NO: 477728 - RNA, 19 nt, Human
ucucagaggaaaaauugcu

SEQ ID NO: 477729 - RNA, 17 nt, Human
aggaaacauuuucuuuc

SEQ ID NO: 477730 - RNA, 22 nt, Human
acacagggcaaugcuuugaccu

SEQ ID NO: 477731 - RNA, 22 nt, Human
gagggcugccacguugggcgag

SEQ ID NO: 477732 - RNA, 22 nt, Human
ugggcuacucugggagccuaac

SEQ ID NO: 477733 - RNA, 22 nt, Human
cagucccacaagaucuccacaa

SEQ ID NO: 477734 - RNA, 18 nt, Human
uggagcugagugcugugc

SEQ ID NO: 477735 - RNA, 22 nt, Human
ggcuucuuccugugaacauguu

SEQ ID NO: 477736 - RNA, 22 nt, Human
auucucaguucacuaguuucuu

SEQ ID NO: 477737 - RNA, 22 nt, Human
uggacagguuugggugccuguu

SEQ ID NO: 477738 - RNA, 22 nt, Human
cagucucagaggugggaguggg

SEQ ID NO: 477739 - RNA, 22 nt, Human
caguuucuacgacuuaagcaca

SEQ ID NO: 477740 - RNA, 22 nt, Human
agcuguggaagacugucagggu

SEQ ID NO: 477741 - RNA, 22 nt, Human
augcaucuauucccaagggcag

SEQ ID NO: 477742 - RNA, 22 nt, Human
uggcaugauaggaggugcagaa

SEQ ID NO: 477743 - RNA, 22 nt, Human
uuuaucuuuggaucuucagaaa

SEQ ID NO: 477744 - RNA, 22 nt, Human
uuugggaagaggaaucucugga

SEQ ID NO: 477745 - RNA, 22 nt, Human
agaugggcgcccuggacugagg

SEQ ID NO: 477746 - RNA, 22 nt, Human
agacccugcaccucucgugggc

SEQ ID NO: 477747 - RNA, 20 nt, Human
ucuguacacucaucuucugc

SEQ ID NO: 477748 - RNA, 22 nt, Human
guguggcuaccucagaggagca

SEQ ID NO: 477749 - RNA, 22 nt, Human
uguucccauuuucugcauaauc

SEQ ID NO: 477750 - RNA, 22 nt, Human
cucagggucugguccuuagauu

SEQ ID NO: 477751 - RNA, 22 nt, Human
cacccaggcuggagugcagggg

SEQ ID NO: 477752 - RNA, 22 nt, Human
gggcacuggaaggcucucaggc

SEQ ID NO: 477753 - RNA, 22 nt, Human
cuugcaggauuuugcugcugua

SEQ ID NO: 477754 - RNA, 22 nt, Human
ugugccuggaucucugugacaa

SEQ ID NO: 477755 - RNA, 22 nt, Human
uugggcuggcagagguggucuu

SEQ ID NO: 477756 - RNA, 22 nt, Human
ugcuucuggaaacaguggcugu

SEQ ID NO: 477757 - RNA, 22 nt, Human
agccaggcggggcagguuuccu

SEQ ID NO: 477758 - RNA, 22 nt, Human
uagcuuuaauaagcugcugaau

SEQ ID NO: 477759 - RNA, 22 nt, Human
aucugaagggaaguggaaggca

SEQ ID NO: 477760 - RNA, 22 nt, Human
cacagcugugagaagggagccu

SEQ ID NO: 477761 - RNA, 22 nt, Human
ugggcccaagagagucuccaac

SEQ ID NO: 477762 - RNA, 22 nt, Human
uuugaaaggguuaugagacuga

SEQ ID NO: 477763 - RNA, 22 nt, Human
gaaggcaacaccaggaugcacu

SEQ ID NO: 477764 - RNA, 22 nt, Human
gaggcucagagagguccacaua

SEQ ID NO: 477765 - RNA, 20 nt, Human
ucugaggcugagcucuacuu

SEQ ID NO: 477766 - RNA, 22 nt, Human
agaggaggccaggcccacaccu

SEQ ID NO: 477767 - RNA, 22 nt, Human
cucugcagaauuugagcugcuc

SEQ ID NO: 477768 - RNA, 22 nt, Human
caggcacugugcugagcucugc

SEQ ID NO: 477769 - RNA, 22 nt, Human
gccagguggagguugcagugag

SEQ ID NO: 477770 - RNA, 22 nt, Human
auggccugggcccgcuucagau

SEQ ID NO: 477771 - RNA, 22 nt, Human
uauaauuuuaagugguaaauua

SEQ ID NO: 477772 - RNA, 22 nt, Human
gcucugggaacugacugccuuc

SEQ ID NO: 477773 - RNA, 22 nt, Human
ccuggcugccgagugugcagcg

SEQ ID NO: 477774 - RNA, 22 nt, Human
gcccagccuccaagcuccaagg

SEQ ID NO: 477775 - RNA, 19 nt, Human
cugaagucuuuucagcugg

SEQ ID NO: 477776 - RNA, 22 nt, Human
gccuggcccagggcuccgcagg

SEQ ID NO: 477777 - RNA, 22 nt, Human
ggagccagcagggugacacuga

SEQ ID NO: 477778 - RNA, 22 nt, Human
ccaaaguccauaguuuacuuua

SEQ ID NO: 477779 - RNA, 22 nt, Human
auuccaaagcacaucagaacua

SEQ ID NO: 477780 - RNA, 21 nt, Human
uccacaaguuagaaggaaauu

SEQ ID NO: 477781 - RNA, 22 nt, Human
cagcugaguguuggcauguuca

SEQ ID NO: 477782 - RNA, 23 nt, Human
uugaaggagaaagcuuucuuggu

SEQ ID NO: 477783 - RNA, 22 nt, Human
aacauugcagcuuaauugcagg

SEQ ID NO: 477784 - RNA, 22 nt, Human
aagagcuguaugccauaugauu

SEQ ID NO: 477785 - RNA, 22 nt, Human
agggcagcccuucugggagggc

SEQ ID NO: 477786 - RNA, 22 nt, Human
uccagccaacugccuagggagc

SEQ ID NO: 477787 - RNA, 22 nt, Human
gugucccagcagcacauuggcu

SEQ ID NO: 477788 - RNA, 22 nt, Human
cagggccugccugguuccugga

SEQ ID NO: 477789 - RNA, 22 nt, Human
ccauccugcauugcuauucaga

SEQ ID NO: 477790 - RNA, 22 nt, Human
ggcugccauaacugauaccaua

SEQ ID NO: 477791 - RNA, 20 nt, Human
gguagcagcugcugucaucc

SEQ ID NO: 477792 - RNA, 22 nt, Human
cagccucuaagcacagccucuc

SEQ ID NO: 477793 - RNA, 22 nt, Human
cucacugcaaguuccaccuacc

SEQ ID NO: 477794 - RNA, 21 nt, Human
acagggcaugcagcuggcugu

SEQ ID NO: 477795 - RNA, 22 nt, Human
gagggcugugaaggagcggguu

SEQ ID NO: 477796 - RNA, 19 nt, Human
uuuggcacucugaaguguu

SEQ ID NO: 477797 - RNA, 22 nt, Human
aggcacugugcuucuuauaugu

SEQ ID NO: 477798 - RNA, 22 nt, Human
cagggcuggauuucauuucuag

SEQ ID NO: 477799 - RNA, 22 nt, Human
gccagaaagaggaggaccuggg

SEQ ID NO: 477800 - RNA, 22 nt, Human
acuuucuuaggcuguauaaaug

SEQ ID NO: 477801 - RNA, 22 nt, Human
uucuuucccuuccagcagcucc

SEQ ID NO: 477802 - RNA, 22 nt, Human
gaaagccauagcccagcuuuac

SEQ ID NO: 477803 - RNA, 22 nt, Human
cuucugcaauaaguuuuggucc

SEQ ID NO: 477804 - RNA, 22 nt, Human
ugcagcagacugaguaugagaa

SEQ ID NO: 477805 - RNA, 22 nt, Human
agggcugcugaggaagccuugc

SEQ ID NO: 477806 - RNA, 22 nt, Human
agcugguguccuccuggagcug

SEQ ID NO: 477807 - RNA, 22 nt, Human
gggcagaggggcgcuucccucu

SEQ ID NO: 477808 - RNA, 22 nt, Human
uuuucaucucugcuuuguaccu

SEQ ID NO: 477809 - RNA, 22 nt, Human
ugcuuuauuuauaaaauagcaa

SEQ ID NO: 477810 - RNA, 22 nt, Human
gcuggcuguuggagguaccugc

SEQ ID NO: 477811 - RNA, 22 nt, Human
agggcugcccagugugagagcu

SEQ ID NO: 477812 - RNA, 22 nt, Human
ucugggagagcacguggcugac

SEQ ID NO: 477813 - RNA, 22 nt, Human
gccagccccuuagggcucuccc

SEQ ID NO: 477814 - RNA, 22 nt, Human
uaaaaguggauaagcuguagga

SEQ ID NO: 477815 - RNA, 22 nt, Human
uagcauuuauggucaugugucc

SEQ ID NO: 477816 - RNA, 22 nt, Human
aaaagcucuuucugcuguagau

SEQ ID NO: 477817 - RNA, 22 nt, Human
cauaacuagagugaaauguuga

SEQ ID NO: 477818 - RNA, 22 nt, Human
gccacaugucaugugcucagua

SEQ ID NO: 477819 - RNA, 22 nt, Human
auggagacgcaagggaccuagg

SEQ ID NO: 477820 - RNA, 22 nt, Human
agcagagguuuguuggaaaccu

SEQ ID NO: 477821 - RNA, 22 nt, Human
gugccaggugcuaagcugugcu

SEQ ID NO: 477822 - RNA, 23 nt, Human
aggaaagcauucauuuuuaccau

SEQ ID NO: 477823 - RNA, 22 nt, Human
aucucccagccacagcauucuu

SEQ ID NO: 477824 - RNA, 22 nt, Human
agggcagcagcccauggcucug

SEQ ID NO: 477825 - RNA, 22 nt, Human
caggcacugugcuagauccuug

SEQ ID NO: 477826 - RNA, 22 nt, Human
gaagcagcaaaucugcaguauc

SEQ ID NO: 477827 - RNA, 22 nt, Human
ucacuguugaccuggaaguggg

SEQ ID NO: 477828 - RNA, 22 nt, Human
uuuguucacugagcaaugauua

SEQ ID NO: 477829 - RNA, 22 nt, Human
ucauuucuguugugcaucacug

SEQ ID NO: 477830 - RNA, 22 nt, Human
uauaucaccaaaaacaguucug

SEQ ID NO: 477831 - RNA, 22 nt, Human
cuguaaauaugaagaauauaug

SEQ ID NO: 477832 - RNA, 22 nt, Human
gacccaggguauccagagcugc

SEQ ID NO: 477833 - RNA, 22 nt, Human
gauuuccuaauguggaucucug

SEQ ID NO: 477834 - RNA, 22 nt, Human
gcucuggagauggagccuugag

SEQ ID NO: 477835 - RNA, 22 nt, Human
ggcuggcuggcugguagacaag

SEQ ID NO: 477836 - RNA, 22 nt, Human
agguggcuccucccauggcugg

SEQ ID NO: 477837 - RNA, 18 nt, Human
gcccagaggucugggccc

SEQ ID NO: 477838 - RNA, 22 nt, Human
ugcacaucuuucagcaucauac

SEQ ID NO: 477839 - RNA, 22 nt, Human
aacauuaauuacagucaaacau

SEQ ID NO: 477840 - RNA, 22 nt, Human
acagaauuaaaguguuugugga

SEQ ID NO: 477841 - RNA, 21 nt, Human
aggcacuguuugugguuuggg

SEQ ID NO: 477842 - RNA, 22 nt, Human
gccucugcgccucagccgaccu

SEQ ID NO: 477843 - RNA, 22 nt, Human
cagcugaauucuucagacucca

SEQ ID NO: 477844 - RNA, 22 nt, Human
gaggucaggcuugcagcagggu

SEQ ID NO: 477845 - RNA, 22 nt, Human
aaauaauugaguuggucaauau

SEQ ID NO: 477846 - RNA, 22 nt, Human
gggcagugguccaggcuacagc

SEQ ID NO: 477847 - RNA, 22 nt, Human
augugguugaagaauuacaucu

SEQ ID NO: 477848 - RNA, 22 nt, Human
ggaugcaggggcagcagagccu

SEQ ID NO: 477849 - RNA, 22 nt, Human
ugucuuuaaaauuaaacacauc

SEQ ID NO: 477850 - RNA, 22 nt, Human
cccugcugucaggugcugggag

SEQ ID NO: 477851 - RNA, 22 nt, Human
agcugaggaggaaugaugggua

SEQ ID NO: 477852 - RNA, 22 nt, Human
gggaauuauagcugucacaggc

SEQ ID NO: 477853 - RNA, 22 nt, Human
caaaggagguaaugggugugag

SEQ ID NO: 477854 - RNA, 22 nt, Human
gagccaggguuugaaacuagac

SEQ ID NO: 477855 - RNA, 22 nt, Human
cacuggugacuucugagcugga

SEQ ID NO: 477856 - RNA, 22 nt, Human
ggaccugccagaacucaggcua

SEQ ID NO: 477857 - RNA, 22 nt, Human
ucagggacauuuagacacugau

SEQ ID NO: 477858 - RNA, 22 nt, Human
acagagguguguguaggacagu

SEQ ID NO: 477859 - RNA, 23 nt, Human
cagggcugggcuugguguuaggc

SEQ ID NO: 477860 - RNA, 22 nt, Human
uuccuguaugucagugaagagc

SEQ ID NO: 477861 - RNA, 22 nt, Human
uuguuucagcuguaugcuaugu

SEQ ID NO: 477862 - RNA, 22 nt, Human
cuggccagacuacacaugugug

SEQ ID NO: 477863 - RNA, 22 nt, Human
caagcagagacuagauagcugu

SEQ ID NO: 477864 - RNA, 22 nt, Human
aggcugaggggcgagggacccu

SEQ ID NO: 477865 - RNA, 22 nt, Human
cuuccaaacccaggguaugggc

SEQ ID NO: 477866 - RNA, 22 nt, Human
ucugucugagggagugacauuu

SEQ ID NO: 477867 - RNA, 22 nt, Human
ugcucuguaaggucagaaaagg

SEQ ID NO: 477868 - RNA, 22 nt, Human
gaugcacaugugaguauagaag

SEQ ID NO: 477869 - RNA, 22 nt, Human
agcugaguuaauucaucacuua

SEQ ID NO: 477870 - RNA, 20 nt, Human
agagaauucccuuuggagau

SEQ ID NO: 477871 - RNA, 22 nt, Human
gagcuggugaucagcuggagga

SEQ ID NO: 477872 - RNA, 22 nt, Human
cugucuguuuuaccuucuccag

SEQ ID NO: 477873 - RNA, 20 nt, Human
cagagaccugucuucacaga

SEQ ID NO: 477874 - RNA, 22 nt, Human
uccugcagcugcagaccugggg

SEQ ID NO: 477875 - RNA, 22 nt, Human
gccagucugcucccacaaguuc

SEQ ID NO: 477876 - RNA, 22 nt, Human
ugaggcaggaguucaggcugcg

SEQ ID NO: 477877 - RNA, 22 nt, Human
guaaacaugcuguguacucagc

SEQ ID NO: 477878 - RNA, 22 nt, Human
cagagagagugggguguggauu

SEQ ID NO: 477879 - RNA, 22 nt, Human
cagucccaaggaggaagcaguc

SEQ ID NO: 477880 - RNA, 22 nt, Human
ucccugggccacagcugugagc

SEQ ID NO: 477881 - RNA, 22 nt, Human
ucaguggauauuucuguggcug

SEQ ID NO: 477882 - RNA, 22 nt, Human
ccuggcugugcauugccggccc

SEQ ID NO: 477883 - RNA, 22 nt, Human
ugggauaguggccaggaccccc

SEQ ID NO: 477884 - RNA, 22 nt, Human
cccuggaggaaaaucugaggcu

SEQ ID NO: 477885 - RNA, 22 nt, Human
cuggcuccaucacugggugaug

SEQ ID NO: 477886 - RNA, 22 nt, Human
aggaggggcauagaaauguaau

SEQ ID NO: 477887 - RNA, 22 nt, Human
gaacauuuccagaaaggaacua

SEQ ID NO: 477888 - RNA, 22 nt, Human
cagaugaggcaaccucauugcu

SEQ ID NO: 477889 - RNA, 22 nt, Human
ggacagaggguugacagaguau

SEQ ID NO: 477890 - RNA, 19 nt, Human
agcuguggaugugggauuu

SEQ ID NO: 477891 - RNA, 22 nt, Human
gagccucguggcggccacugcg

SEQ ID NO: 477892 - RNA, 22 nt, Human
ugcagaagcagagccgguggcc

SEQ ID NO: 477893 - RNA, 22 nt, Human
gagagaagaaagccaugguccu

SEQ ID NO: 477894 - RNA, 21 nt, Human
accucaagcaacaaccaaggu

SEQ ID NO: 477895 - RNA, 22 nt, Human
uucuggagaucugccuauggga

SEQ ID NO: 477896 - RNA, 22 nt, Human
ugaaaugcuguagagacuguau

SEQ ID NO: 477897 - RNA, 22 nt, Human
agugucauuuuguccaucuucu

SEQ ID NO: 477898 - RNA, 21 nt, Human
gcaggguccuuuccauuccua

SEQ ID NO: 477899 - RNA, 22 nt, Human
uggggcucaccuaggcuggaag

SEQ ID NO: 477900 - RNA, 22 nt, Human
uggcucaggugugagcugaaga

SEQ ID NO: 477901 - RNA, 22 nt, Human
aacaaauggaacacaaaucuuu

SEQ ID NO: 477902 - RNA, 22 nt, Human
ugaugguugauuauaaaucagu

SEQ ID NO: 477903 - RNA, 22 nt, Human
caaauguguuuuuucuucuaca

SEQ ID NO: 477904 - RNA, 22 nt, Human
uggcucuguuuuaugaguacca

SEQ ID NO: 477905 - RNA, 22 nt, Human
cugcagcuuuggaaaccuguuu

SEQ ID NO: 477906 - RNA, 22 nt, Human
uuugucaucccuuuugaaacug

SEQ ID NO: 477907 - RNA, 22 nt, Human
ggcaccaggcugggcauaggcc

SEQ ID NO: 477908 - RNA, 22 nt, Human
aggccuuccucggagacaggga

SEQ ID NO: 477909 - RNA, 22 nt, Human
ucagccucucugaguccagacc

SEQ ID NO: 477910 - RNA, 22 nt, Human
uuaugcuaagugcaacaagcca

SEQ ID NO: 477911 - RNA, 22 nt, Human
gcucugcuggagggaaagagaa

SEQ ID NO: 477912 - RNA, 22 nt, Human
aggcccugcccagagcuccucg

SEQ ID NO: 477913 - RNA, 22 nt, Human
agcuccugcacccagccuugag

SEQ ID NO: 477914 - RNA, 22 nt, Human
gcagggaccugccacugcuguc

SEQ ID NO: 477915 - RNA, 22 nt, Human
ugggcugagcacugaggaagga

SEQ ID NO: 477916 - RNA, 22 nt, Human
gcugccugguuucucagcugca

SEQ ID NO: 477917 - RNA, 22 nt, Human
acacauaugguugcugcaguga

SEQ ID NO: 477918 - RNA, 22 nt, Human
gccuggagaccugcuccucuac

SEQ ID NO: 477919 - RNA, 22 nt, Human
ccaggccucuggcugcuuaguc

SEQ ID NO: 477920 - RNA, 22 nt, Human
ucacucagguucaugucuuugu

SEQ ID NO: 477921 - RNA, 19 nt, Human
auagucuuuccaauuauac

SEQ ID NO: 477922 - RNA, 22 nt, Human
ggcagcuguaagaugagugaau

SEQ ID NO: 477923 - RNA, 22 nt, Human
ccagaagaggacacagugugga

SEQ ID NO: 477924 - RNA, 22 nt, Human
agcagcauguugggaugugaaa

SEQ ID NO: 477925 - RNA, 22 nt, Human
cuggcugcaggaugaggcugcc

SEQ ID NO: 477926 - RNA, 18 nt, Human
ugucucugaauuccagug

SEQ ID NO: 477927 - RNA, 22 nt, Human
ggccagaggccauccuccugcu

SEQ ID NO: 477928 - RNA, 22 nt, Human
cugggaguugacgaggcuugua

SEQ ID NO: 477929 - RNA, 20 nt, Human
agcuggccuguccuaggccu

SEQ ID NO: 477930 - RNA, 22 nt, Human
ggguccagaguugaagagguua

SEQ ID NO: 477931 - RNA, 22 nt, Human
agauuucagguuggggcagaag

SEQ ID NO: 477932 - RNA, 22 nt, Human
ugcccaggguggagugcagcgg

SEQ ID NO: 477933 - RNA, 22 nt, Human
ggggcggggcucugagaagcau

SEQ ID NO: 477934 - RNA, 22 nt, Human
ggcugagggccagggcuagucu

SEQ ID NO: 477935 - RNA, 22 nt, Human
ggccugagcuugggcagcguau

SEQ ID NO: 477936 - RNA, 22 nt, Human
gagcacagccaaaguaagaagg

SEQ ID NO: 477937 - RNA, 22 nt, Human
guagccauuggcaaugaagccu

SEQ ID NO: 477938 - RNA, 22 nt, Human
cgcagaagagguugucuagucc

SEQ ID NO: 477939 - RNA, 22 nt, Human
aggagccaagcagaacuaagga

SEQ ID NO: 477940 - RNA, 22 nt, Human
cagcucugaagaaaggugucua

SEQ ID NO: 477941 - RNA, 22 nt, Human
agaagagccuggggaccauggc

SEQ ID NO: 477942 - RNA, 22 nt, Human
cagaggacaauagaauggaaag

SEQ ID NO: 477943 - RNA, 22 nt, Human
ucaggcaguagaauugcuugaa

SEQ ID NO: 477944 - RNA, 23 nt, Human
agagccugaaagacuucuggcac

SEQ ID NO: 477945 - RNA, 22 nt, Human
uagcuuuaggcacguuugaauu

SEQ ID NO: 477946 - RNA, 22 nt, Human
cugucaucacaguugagcagcc

SEQ ID NO: 477947 - RNA, 22 nt, Human
gaaaggaaauauucuaagcacu

SEQ ID NO: 477948 - RNA, 22 nt, Human
uguguauuaccauuuuacagcu

SEQ ID NO: 477949 - RNA, 22 nt, Human
uuccauuuauucuuguccagau

SEQ ID NO: 477950 - RNA, 22 nt, Human
ggcuccugaaagacuaugggaa

SEQ ID NO: 477951 - RNA, 22 nt, Human
cuugggagacacaagaagacau

SEQ ID NO: 477952 - RNA, 22 nt, Human
ucugagagccucuagccuaagu

SEQ ID NO: 477953 - RNA, 20 nt, Human
ggcacuggaagcacacagga

SEQ ID NO: 477954 - RNA, 22 nt, Human
gcuuccuaaaugcacagggcag

SEQ ID NO: 477955 - RNA, 22 nt, Human
cugccagcagaggccagcgcug

SEQ ID NO: 477956 - RNA, 22 nt, Human
uucacaaaacacuauuuucugg

SEQ ID NO: 477957 - RNA, 19 nt, Human
agcuccugggcucugggcc

SEQ ID NO: 477958 - RNA, 22 nt, Human
ugguuuugcuccaguauaaaua

SEQ ID NO: 477959 - RNA, 22 nt, Human
acaggccucaagacacccaggu

SEQ ID NO: 477960 - RNA, 22 nt, Human
gaaacuguauguaguuuuuggg

SEQ ID NO: 477961 - RNA, 22 nt, Human
ggucccagaauugguuagcaca

SEQ ID NO: 477962 - RNA, 22 nt, Human
aacaguaaaaaucauuuaguug

SEQ ID NO: 477963 - RNA, 22 nt, Human
gugacucacacaggccugggcu

SEQ ID NO: 477964 - RNA, 22 nt, Human
ugacagaacagguugggagcaa

SEQ ID NO: 477965 - RNA, 22 nt, Human
acauuucugagcagggagcugu

SEQ ID NO: 477966 - RNA, 22 nt, Human
cauuucuagacaaguccuggag

SEQ ID NO: 477967 - RNA, 22 nt, Human
accuggcacuacaggcaccugu

SEQ ID NO: 477968 - RNA, 22 nt, Human
cugaagccaugugcucacuggu

SEQ ID NO: 477969 - RNA, 22 nt, Human
uggccucugcaauggauucacc

SEQ ID NO: 477970 - RNA, 22 nt, Human
aaagaagggacagacugccucu

SEQ ID NO: 477971 - RNA, 23 nt, Human
uuugaaaguaucaacucgccuga

SEQ ID NO: 477972 - RNA, 22 nt, Human
guggcagugugaggauccugcu

SEQ ID NO: 477973 - RNA, 22 nt, Human
ugggcuggcguggagaguuuag

SEQ ID NO: 477974 - RNA, 22 nt, Human
auaaggcagugacuucaucuau

SEQ ID NO: 477975 - RNA, 22 nt, Human
ucuguucuauuggucuaugugu

SEQ ID NO: 477976 - RNA, 22 nt, Human
aaaggccacugcaagggaaggu

SEQ ID NO: 477977 - RNA, 22 nt, Human
uaagaacaagcuggggguucca

SEQ ID NO: 477978 - RNA, 22 nt, Human
ccuccugggcuccugucugcac

SEQ ID NO: 477979 - RNA, 22 nt, Human
cagcaggaagguuuccccugca

SEQ ID NO: 477980 - RNA, 22 nt, Human
uugaauaguuuuggauagcaua

SEQ ID NO: 477981 - RNA, 22 nt, Human
aggcuggcgacaucuggcgggc

SEQ ID NO: 477982 - RNA, 22 nt, Human
gcugccugaagugucuacacug

SEQ ID NO: 477983 - RNA, 22 nt, Human
agccaggccagcugucuugagu

SEQ ID NO: 477984 - RNA, 22 nt, Human
ccagcccuguaaggaugaggca

SEQ ID NO: 477985 - RNA, 22 nt, Human
gaaaucugaacaacagcuguca

SEQ ID NO: 477986 - RNA, 22 nt, Human
augcuguguuuuaaauggaaau

SEQ ID NO: 477987 - RNA, 22 nt, Human
gcccagcuggcuuccagcacau

SEQ ID NO: 477988 - RNA, 22 nt, Human
aaggucauggcaaauuacuuuu

SEQ ID NO: 477989 - RNA, 22 nt, Human
cuuucucaaugccggaaggcac

SEQ ID NO: 477990 - RNA, 22 nt, Human
uggccugguuauauugcuauca

SEQ ID NO: 477991 - RNA, 22 nt, Human
gggcagagguucaacuucaaca

SEQ ID NO: 477992 - RNA, 22 nt, Human
agggcagagcugucuaaauggc

SEQ ID NO: 477993 - RNA, 22 nt, Human
uucuacaugguugcucagaggg

SEQ ID NO: 477994 - RNA, 21 nt, Human
agcagaggcagaauguaugca

SEQ ID NO: 477995 - RNA, 17 nt, Human
gccucugcuugugucau

SEQ ID NO: 477996 - RNA, 22 nt, Human
ccagggcacuuaggcccagccc

SEQ ID NO: 477997 - RNA, 22 nt, Human
aggggccugguuggccucuguu

SEQ ID NO: 477998 - RNA, 19 nt, Human
gccagcagaaugaugaggc

SEQ ID NO: 477999 - RNA, 22 nt, Human
uggccugucuuguugugcuaga

SEQ ID NO: 478000 - RNA, 22 nt, Human
acagagagggagugauaaaucc

SEQ ID NO: 478001 - RNA, 22 nt, Human
uugguuuacuaggauucaaauu

SEQ ID NO: 478002 - RNA, 20 nt, Human
agcaagaguaaggacagcga

SEQ ID NO: 478003 - RNA, 22 nt, Human
agaccaugggcucugaagagca

SEQ ID NO: 478004 - RNA, 22 nt, Human
agagcugggugaagugccauca

SEQ ID NO: 478005 - RNA, 22 nt, Human
cccaggucugugccagcucuga

SEQ ID NO: 478006 - RNA, 22 nt, Human
ugacauuuaagccucugauuuc

SEQ ID NO: 478007 - RNA, 22 nt, Human
agcuggcuccagaaggagucgu

SEQ ID NO: 478008 - RNA, 22 nt, Human
guggauggauuuugaggaaugg

SEQ ID NO: 478009 - RNA, 22 nt, Human
aaggguugaagauaaauaaggu

SEQ ID NO: 478010 - RNA, 22 nt, Human
cacuguaucuuuuccaaagucu

SEQ ID NO: 478011 - RNA, 22 nt, Human
auuuaugacuggugaauagaac

SEQ ID NO: 478012 - RNA, 22 nt, Human
gggcaaguccggugcccagagc

SEQ ID NO: 478013 - RNA, 22 nt, Human
ccugggaggcagagguugcagu

SEQ ID NO: 478014 - RNA, 22 nt, Human
gccuaauaugcaaaauugauac

SEQ ID NO: 478015 - RNA, 22 nt, Human
caguggcaaugggacagagcac

SEQ ID NO: 478016 - RNA, 22 nt, Human
cccugcagcauucucuaacugg

SEQ ID NO: 478017 - RNA, 22 nt, Human
agggcacagccuaaagccuaug

SEQ ID NO: 478018 - RNA, 22 nt, Human
ggugucccaggccagcugugug

SEQ ID NO: 478019 - RNA, 22 nt, Human
aaggagagagcuuugcuggaac

SEQ ID NO: 478020 - RNA, 19 nt, Human
cuggugcuugagugaguca

SEQ ID NO: 478021 - RNA, 23 nt, Human
ugcugggcagagcuggugcugag

SEQ ID NO: 478022 - RNA, 22 nt, Human
ugccaggcugcccuccagucug

SEQ ID NO: 478023 - RNA, 22 nt, Human
acaaaugccauauauaaauucu

SEQ ID NO: 478024 - RNA, 20 nt, Human
ccagagcugauggcugcccg

SEQ ID NO: 478025 - RNA, 22 nt, Human
gcagaugguggggcaggaaaau

SEQ ID NO: 478026 - RNA, 21 nt, Human
cugguguagcacucaggugcu

SEQ ID NO: 478027 - RNA, 22 nt, Human
ucuggcugcugcgugagugcuu

SEQ ID NO: 478028 - RNA, 22 nt, Human
aaacuguaagagaauaaacuac

SEQ ID NO: 478029 - RNA, 21 nt, Human
acacugugucauaaugcuuaa

SEQ ID NO: 478030 - RNA, 19 nt, Human
caguggccuggaggucucu

SEQ ID NO: 478031 - RNA, 20 nt, Human
ugcuugucaugcacucaggc

SEQ ID NO: 478032 - RNA, 22 nt, Human
ugaagccagucaauguuaaguu

SEQ ID NO: 478033 - RNA, 22 nt, Human
uuugagaagcaucugguccacu

SEQ ID NO: 478034 - RNA, 22 nt, Human
gugagaguguuuggaaauagaa

SEQ ID NO: 478035 - RNA, 22 nt, Human
ucuguccauuuuccauuuuggc

SEQ ID NO: 478036 - RNA, 20 nt, Human
ugcugcaguuucaugggacu

SEQ ID NO: 478037 - RNA, 22 nt, Human
gcugauuauuacaugucugugg

SEQ ID NO: 478038 - RNA, 22 nt, Human
aaaagacaucuauuucaggcag

SEQ ID NO: 478039 - RNA, 22 nt, Human
gcagagugaagcaguauggaaa

SEQ ID NO: 478040 - RNA, 22 nt, Human
cugggcugugguguggcccaaa

SEQ ID NO: 478041 - RNA, 22 nt, Human
auauauuugagaauauucauga

SEQ ID NO: 478042 - RNA, 22 nt, Human
agguggagugaaggaaaggcag

SEQ ID NO: 478043 - RNA, 22 nt, Human
agaaaucaugacuaagagcagu

SEQ ID NO: 478044 - RNA, 23 nt, Human
acagugugguggacaaggagcag

SEQ ID NO: 478045 - RNA, 22 nt, Human
aguuucauauuaccaugucacc

SEQ ID NO: 478046 - RNA, 22 nt, Human
caguguuuaaucauugugaauu

SEQ ID NO: 478047 - RNA, 22 nt, Human
ccaggggcuggugcugagcugg

SEQ ID NO: 478048 - RNA, 22 nt, Human
agcauuuaggagaauuugagaa

SEQ ID NO: 478049 - RNA, 22 nt, Human
cuuagaaauaaugguuucaguu

SEQ ID NO: 478050 - RNA, 22 nt, Human
gcuggccucaucacugacuucu

SEQ ID NO: 478051 - RNA, 22 nt, Human
gggcuugcugauuugggcagga

SEQ ID NO: 478052 - RNA, 22 nt, Human
ucuccaagcagggcugcaaggc

SEQ ID NO: 478053 - RNA, 22 nt, Human
caggcuggagugcaguugugca

SEQ ID NO: 478054 - RNA, 22 nt, Human
gccaggcugcuccagggaggcc

SEQ ID NO: 478055 - RNA, 17 nt, Human
aguguuuccuuaucauu

SEQ ID NO: 478056 - RNA, 18 nt, Human
cccagcccaccauuucuc

SEQ ID NO: 478057 - RNA, 22 nt, Human
guaagcaucugucucuucugca

SEQ ID NO: 478058 - RNA, 22 nt, Human
ucuugcacuucaugaauauguu

SEQ ID NO: 478059 - RNA, 22 nt, Human
uggcucagcugucacagccugg

SEQ ID NO: 478060 - RNA, 22 nt, Human
ugagcaucuuuuuacagguuua

SEQ ID NO: 478061 - RNA, 22 nt, Human
aaguguuaaaagauuaaaugcu

SEQ ID NO: 478062 - RNA, 22 nt, Human
ccagcuggcaggagagucaggg

SEQ ID NO: 478063 - RNA, 20 nt, Human
cccuggagagaagcuccacg

SEQ ID NO: 478064 - RNA, 22 nt, Human
gcagggcuauuggaaggagaug

SEQ ID NO: 478065 - RNA, 22 nt, Human
cuugccuucuguuccuauagaa

SEQ ID NO: 478066 - RNA, 22 nt, Human
aaaguuuuagaacuaggaagca

SEQ ID NO: 478067 - RNA, 22 nt, Human
acaaaggcagccaaucaucugc

SEQ ID NO: 478068 - RNA, 22 nt, Human
gucaggaugggcagccaaacua

SEQ ID NO: 478069 - RNA, 22 nt, Human
uccugucagugaggcagaugaa

SEQ ID NO: 478070 - RNA, 23 nt, Human
aggcagagccaaggucaaaaccc

SEQ ID NO: 478071 - RNA, 22 nt, Human
ucuggcucucaacaaauauuua

SEQ ID NO: 478072 - RNA, 22 nt, Human
acagagagcugugauugaguua

SEQ ID NO: 478073 - RNA, 22 nt, Human
agugauggugagugagaagcuc

SEQ ID NO: 478074 - RNA, 22 nt, Human
cuacccagcaccuaggcugccu

SEQ ID NO: 478075 - RNA, 22 nt, Human
agggcccaggacagcaucaggg

SEQ ID NO: 478076 - RNA, 22 nt, Human
cuggccgguauuugccucuggg

SEQ ID NO: 478077 - RNA, 22 nt, Human
ggccugcacagagguggcucua

SEQ ID NO: 478078 - RNA, 22 nt, Human
cuuccugaacaaugccaucaau

SEQ ID NO: 478079 - RNA, 22 nt, Human
caaaggcuucaucucagagcag

SEQ ID NO: 478080 - RNA, 22 nt, Human
ucugaaauguucucuuguuuug

SEQ ID NO: 478081 - RNA, 22 nt, Human
gagcugccuacauugccaagag

SEQ ID NO: 478082 - RNA, 19 nt, Human
gccugccuggguuucugag

SEQ ID NO: 478083 - RNA, 20 nt, Human
cugggaggucuuccaaauca

SEQ ID NO: 478084 - RNA, 22 nt, Human
agagacaggauaucugcucaug

SEQ ID NO: 478085 - RNA, 22 nt, Human
aggauccuguauggagaagcug

SEQ ID NO: 478086 - RNA, 22 nt, Human
ucuucucccaucuccaggcagg

SEQ ID NO: 478087 - RNA, 22 nt, Human
aagaaauuaaggaaugcaacga

SEQ ID NO: 478088 - RNA, 22 nt, Human
cagccagagaaagggcacugcc

SEQ ID NO: 478089 - RNA, 22 nt, Human
uucugaggcacuggcucuccca

SEQ ID NO: 478090 - RNA, 22 nt, Human
caguuccuaugggcaaaacaca

SEQ ID NO: 478091 - RNA, 22 nt, Human
ggcuuuauuaagcaggguaagu

SEQ ID NO: 478092 - RNA, 22 nt, Human
uuucaaauggagucgugaaaug

SEQ ID NO: 478093 - RNA, 22 nt, Human
ugcagggaaaguguuggcagca

SEQ ID NO: 478094 - RNA, 22 nt, Human
gagagcuguaauagucaugucu

SEQ ID NO: 478095 - RNA, 22 nt, Human
cuguuuucccuggaguucagca

SEQ ID NO: 478096 - RNA, 22 nt, Human
uuuccaauaaagugucauuguu

SEQ ID NO: 478097 - RNA, 22 nt, Human
uccaguucuaggucacucucug

SEQ ID NO: 478098 - RNA, 22 nt, Human
ccucugaggucauggacuuggc

SEQ ID NO: 478099 - RNA, 22 nt, Human
gacccagaaggagugcccuaga

SEQ ID NO: 478100 - RNA, 19 nt, Human
agaggccucagcagcuggc

SEQ ID NO: 478101 - RNA, 22 nt, Human
ggcacugggagaggugagacgg

SEQ ID NO: 478102 - RNA, 19 nt, Human
cucugccucccuccugggu

SEQ ID NO: 478103 - RNA, 22 nt, Human
ugagcccagucugucugacaug

SEQ ID NO: 478104 - RNA, 22 nt, Human
ccagaagucaggaaugagucuu

SEQ ID NO: 478105 - RNA, 21 nt, Human
gggaaauuaggauugcucauc

SEQ ID NO: 478106 - RNA, 22 nt, Human
cacagcagaaauaugaaggcag

SEQ ID NO: 478107 - RNA, 22 nt, Human
gccaggcaugggcuucugggcg

SEQ ID NO: 478108 - RNA, 23 nt, Human
ugcugggguaguuuguggcacag

SEQ ID NO: 478109 - RNA, 22 nt, Human
cugggaggcaccgcgucgugcu

SEQ ID NO: 478110 - RNA, 22 nt, Human
uagggcucacugagaugaauau

SEQ ID NO: 478111 - RNA, 22 nt, Human
uucaaaacagcuagauauugga

SEQ ID NO: 478112 - RNA, 22 nt, Human
auguacaguuucuagacucaaa

SEQ ID NO: 478113 - RNA, 22 nt, Human
agacagaacagaauaauuguug

SEQ ID NO: 478114 - RNA, 20 nt, Human
auaauuuacccugcaccacu

SEQ ID NO: 478115 - RNA, 22 nt, Human
uggcucagcugacucggcuucu

SEQ ID NO: 478116 - RNA, 22 nt, Human
ucucagucagccuugauguccc

SEQ ID NO: 478117 - RNA, 22 nt, Human
uggccaccccuuucucugcacu

SEQ ID NO: 478118 - RNA, 22 nt, Human
uuuucauuguuccucgagcauu

SEQ ID NO: 478119 - RNA, 22 nt, Human
cacagggcagaggguccguggc

SEQ ID NO: 478120 - RNA, 19 nt, Human
gggcuccuugggccucucu

SEQ ID NO: 478121 - RNA, 21 nt, Human
ucagaguggaagacaguuuga

SEQ ID NO: 478122 - RNA, 22 nt, Human
ugagccagauaagggcucacgc

SEQ ID NO: 478123 - RNA, 22 nt, Human
ucucucagaggaagaggcagug

SEQ ID NO: 478124 - RNA, 22 nt, Human
ucccugcagacguccugcgggu

SEQ ID NO: 478125 - RNA, 22 nt, Human
ggggaugguggcauuuguaaaa

SEQ ID NO: 478126 - RNA, 22 nt, Human
caggugcugcguggcggagcug

SEQ ID NO: 478127 - RNA, 22 nt, Human
uagggcagaguccaggaugggc

SEQ ID NO: 478128 - RNA, 22 nt, Human
ugaggaaguugaucucaucagu

SEQ ID NO: 478129 - RNA, 22 nt, Human
cuggccugaggccgccuucaga

SEQ ID NO: 478130 - RNA, 22 nt, Human
ugugccaggcacuugcccaggc

SEQ ID NO: 478131 - RNA, 22 nt, Human
acuaaauaguuuugacagaaca

SEQ ID NO: 478132 - RNA, 20 nt, Human
uauuucugggcaaccauuua

SEQ ID NO: 478133 - RNA, 22 nt, Human
uccuugaagcaacgugcagaca

SEQ ID NO: 478134 - RNA, 22 nt, Human
gagggcugcaaugagacagaga

SEQ ID NO: 478135 - RNA, 22 nt, Human
uguguccuucugggagucccag

SEQ ID NO: 478136 - RNA, 22 nt, Human
gcucugcugcuuacuagauggu

SEQ ID NO: 478137 - RNA, 22 nt, Human
aagauuucugcuuuuggaggca

SEQ ID NO: 478138 - RNA, 22 nt, Human
ccauguggugggaaggagaaug

SEQ ID NO: 478139 - RNA, 22 nt, Human
acagccaggagccaugggcagg

SEQ ID NO: 478140 - RNA, 22 nt, Human
aagacauugucauuuuauaauu

SEQ ID NO: 478141 - RNA, 22 nt, Human
uggcucagccagcccuaggaac

SEQ ID NO: 478142 - RNA, 17 nt, Human
gcaagggaugggagauu

SEQ ID NO: 478143 - RNA, 22 nt, Human
aggaccauccuaagguaggcaa

SEQ ID NO: 478144 - RNA, 22 nt, Human
guggccugccgugugguauggg

SEQ ID NO: 478145 - RNA, 22 nt, Human
cugcagaggguuugagcauccu

SEQ ID NO: 478146 - RNA, 22 nt, Human
ccugucuggaacauggccuguu

SEQ ID NO: 478147 - RNA, 22 nt, Human
ucugccugcuaacuccugcacc

SEQ ID NO: 478148 - RNA, 22 nt, Human
caggugggagcggagacugauu

SEQ ID NO: 478149 - RNA, 22 nt, Human
aacuguaauuuuuacauaguaa

SEQ ID NO: 478150 - RNA, 22 nt, Human
gcugucuccauagcuguguguc

SEQ ID NO: 478151 - RNA, 22 nt, Human
guguuccauguuugagguaguu

SEQ ID NO: 478152 - RNA, 22 nt, Human
ucugggagagcugcugucagag

SEQ ID NO: 478153 - RNA, 21 nt, Human
uggcccuggccacggcugcca

SEQ ID NO: 478154 - RNA, 22 nt, Human
uggcuaggcuccaagagcugga

SEQ ID NO: 478155 - RNA, 22 nt, Human
gaguuauuucagaaggaaagau

SEQ ID NO: 478156 - RNA, 22 nt, Human
agcuuuaugcuuccuacaagcu

SEQ ID NO: 478157 - RNA, 22 nt, Human
ccagccuuacugcccuucagug

SEQ ID NO: 478158 - RNA, 22 nt, Human
auguuacauaguccuuauuugu

SEQ ID NO: 478159 - RNA, 22 nt, Human
gcuggccugaccagccacaggc

SEQ ID NO: 478160 - RNA, 22 nt, Human
gggcagugguuacacagcugag

SEQ ID NO: 478161 - RNA, 22 nt, Human
ccuguggcucucuuuggagguc

SEQ ID NO: 478162 - RNA, 22 nt, Human
aagguacaaaguauuauuuaaa

SEQ ID NO: 478163 - RNA, 22 nt, Human
ggggcagagucuggacuguugu

SEQ ID NO: 478164 - RNA, 22 nt, Human
cccuccagcucaaagcaaccgg

SEQ ID NO: 478165 - RNA, 22 nt, Human
ucuggagauaagacagacagau

SEQ ID NO: 478166 - RNA, 22 nt, Human
auugaaaaaugacuauugcuua

SEQ ID NO: 478167 - RNA, 22 nt, Human
cucagagaaaugucacaacaau

SEQ ID NO: 478168 - RNA, 22 nt, Human
gccaggcaggugucggagcccu

SEQ ID NO: 478169 - RNA, 22 nt, Human
ggcugggcaggucugcacaggg

SEQ ID NO: 478170 - RNA, 22 nt, Human
uuucuuauauucugucauuguu

SEQ ID NO: 478171 - RNA, 23 nt, Human
ucccuggaggcagguccagggcc

SEQ ID NO: 478172 - RNA, 22 nt, Human
gagccuggagcuggaacgaagc

SEQ ID NO: 478173 - RNA, 22 nt, Human
agcagggcagugcuucagcucu

SEQ ID NO: 478174 - RNA, 22 nt, Human
uaggcaggugugcacugcccac

SEQ ID NO: 478175 - RNA, 22 nt, Human
gcaaaggccacuggggcgaugg

SEQ ID NO: 478176 - RNA, 22 nt, Human
acagcagccugcagcccugugu

SEQ ID NO: 478177 - RNA, 22 nt, Human
acagaacugcaggaggaaaagc

SEQ ID NO: 478178 - RNA, 22 nt, Human
caggcagggagcuggaaaggau

SEQ ID NO: 478179 - RNA, 22 nt, Human
gccuggcaggccugggccagca

SEQ ID NO: 478180 - RNA, 22 nt, Human
uccagugguuugaaaggggugu

SEQ ID NO: 478181 - RNA, 22 nt, Human
acuuucuccagaaaaccaagga

SEQ ID NO: 478182 - RNA, 22 nt, Human
cccagcuugucugauucagccu

SEQ ID NO: 478183 - RNA, 19 nt, Human
ggcagaagguguaggggga

SEQ ID NO: 478184 - RNA, 22 nt, Human
gaauuugaaaagugaugggaau

SEQ ID NO: 478185 - RNA, 22 nt, Human
uugaaaggcacaggcaccuggg

SEQ ID NO: 478186 - RNA, 22 nt, Human
gggcuggcaucgguugcugaga

SEQ ID NO: 478187 - RNA, 22 nt, Human
uccugccugagcguggaggagg

SEQ ID NO: 478188 - RNA, 22 nt, Human
acacugaaugcuguuuagaaau

SEQ ID NO: 478189 - RNA, 22 nt, Human
agagugaaguucaucgugcagc

SEQ ID NO: 478190 - RNA, 22 nt, Human
uugugaguagugccgcaauaaa

SEQ ID NO: 478191 - RNA, 22 nt, Human
uguguacucaauugagccauuu

SEQ ID NO: 478192 - RNA, 22 nt, Human
guguggcugccagccaagaggc

SEQ ID NO: 478193 - RNA, 22 nt, Human
acaauucuggguauuuauauag

SEQ ID NO: 478194 - RNA, 22 nt, Human
acauguuagaaaugcagaaucu

SEQ ID NO: 478195 - RNA, 22 nt, Human
uggcagggccuaccccaauauc

SEQ ID NO: 478196 - RNA, 21 nt, Human
uguaugcacgcacaugcacac

SEQ ID NO: 478197 - RNA, 20 nt, Human
accagguggcugaugacacc

SEQ ID NO: 478198 - RNA, 22 nt, Human
uuuccucuucuggcaggcaggg

SEQ ID NO: 478199 - RNA, 22 nt, Human
aaagggagcauggcugcaggga

SEQ ID NO: 478200 - RNA, 22 nt, Human
auuguacaaugccuggaacauu

SEQ ID NO: 478201 - RNA, 19 nt, Human
ugcauaaauuauauacuuu

SEQ ID NO: 478202 - RNA, 22 nt, Human
cugcccucuagaggaggacuga

SEQ ID NO: 478203 - RNA, 22 nt, Human
gcagggcucugcuguaguccua

SEQ ID NO: 478204 - RNA, 21 nt, Human
ugcccacagcaaaugcagagg

SEQ ID NO: 478205 - RNA, 22 nt, Human
acuugguugaugucauaagguu

SEQ ID NO: 478206 - RNA, 22 nt, Human
agggcccucuggcaggccaggc

SEQ ID NO: 478207 - RNA, 20 nt, Human
agugugcauuuagagucugc

SEQ ID NO: 478208 - RNA, 22 nt, Human
gcagagccaggagcccaggauc

SEQ ID NO: 478209 - RNA, 19 nt, Human
aggcaggugcagagguccc

SEQ ID NO: 478210 - RNA, 22 nt, Human
ccagagggccuuuggaguuauc

SEQ ID NO: 478211 - RNA, 22 nt, Human
caggcccagugaucagggcucu

SEQ ID NO: 478212 - RNA, 22 nt, Human
aagaaaugcagaaaugugcugg

SEQ ID NO: 478213 - RNA, 22 nt, Human
ucauuuauaaggaugcaauuaa

SEQ ID NO: 478214 - RNA, 22 nt, Human
uuugaaguccaucuggcccagu

SEQ ID NO: 478215 - RNA, 22 nt, Human
gaaucacgguauucugcacggg

SEQ ID NO: 478216 - RNA, 22 nt, Human
uaggaaaaauacagaauuauau

SEQ ID NO: 478217 - RNA, 22 nt, Human
ggcugcagaggcgaucugaggu

SEQ ID NO: 478218 - RNA, 22 nt, Human
ccagcugagaaguguaaaguga

SEQ ID NO: 478219 - RNA, 22 nt, Human
gagagcccugcuccuaucccag

SEQ ID NO: 478220 - RNA, 22 nt, Human
gagucccaugaugauagccaca

SEQ ID NO: 478221 - RNA, 22 nt, Human
ggcucaggaccugggauugcca

SEQ ID NO: 478222 - RNA, 22 nt, Human
uggcuucuugggaugggucauu

SEQ ID NO: 478223 - RNA, 22 nt, Human
uucuacacucacccagcuguaa

SEQ ID NO: 478224 - RNA, 19 nt, Human
aucugccuuagugcugcug

SEQ ID NO: 478225 - RNA, 18 nt, Human
cauuaugugguuauagaa

SEQ ID NO: 478226 - RNA, 22 nt, Human
guccucugaaguugugcaaugc

SEQ ID NO: 478227 - RNA, 22 nt, Human
cggggcugcgcucuuccugccg

SEQ ID NO: 478228 - RNA, 22 nt, Human
gaauucugguccuguccaaggu

SEQ ID NO: 478229 - RNA, 22 nt, Human
ucuggccuauuucugucagauc

SEQ ID NO: 478230 - RNA, 22 nt, Human
ccuccagggcagacggggagca

SEQ ID NO: 478231 - RNA, 22 nt, Human
ggccucugccucaucugggcac

SEQ ID NO: 478232 - RNA, 22 nt, Human
cagcaggcguugggagaaagac

SEQ ID NO: 478233 - RNA, 22 nt, Human
ugggcuccagcaccugugcucu

SEQ ID NO: 478234 - RNA, 22 nt, Human
cuucaguuuaucccaucaucca

SEQ ID NO: 478235 - RNA, 20 nt, Human
caggccagagguuugauggc

SEQ ID NO: 478236 - RNA, 22 nt, Human
agcugcugagccaggcugaugu

SEQ ID NO: 478237 - RNA, 22 nt, Human
gagaggcuaugagguucugugu

SEQ ID NO: 478238 - RNA, 22 nt, Human
uugaaagaggcaaaguuugauc

SEQ ID NO: 478239 - RNA, 22 nt, Human
gggcugagccauuugaaccuug

SEQ ID NO: 478240 - RNA, 22 nt, Human
ccuuucucuaucgacccaucgc

SEQ ID NO: 478241 - RNA, 22 nt, Human
uaaauuguuuucuagaaguugu

SEQ ID NO: 478242 - RNA, 22 nt, Human
gcacacccucucaccagcacug

SEQ ID NO: 478243 - RNA, 22 nt, Human
cuggcagcauuaacagagagca

SEQ ID NO: 478244 - RNA, 22 nt, Human
ccugcagggugcugccacagau

SEQ ID NO: 478245 - RNA, 22 nt, Human
ccaggccuuccaguacgcagaa

SEQ ID NO: 478246 - RNA, 20 nt, Human
cuuugccuauucucugccug

SEQ ID NO: 478247 - RNA, 22 nt, Human
acuguggaugccaaaggggagg

SEQ ID NO: 478248 - RNA, 22 nt, Human
auggggcuguucucugcccugc

SEQ ID NO: 478249 - RNA, 22 nt, Human
auucacagggacaaugggagag

SEQ ID NO: 478250 - RNA, 22 nt, Human
agucccaguucgguucuuccuc

SEQ ID NO: 478251 - RNA, 22 nt, Human
ucuagaaauuuugccuuguauu

SEQ ID NO: 478252 - RNA, 22 nt, Human
guacuuccguggacuaauuguu

SEQ ID NO: 478253 - RNA, 19 nt, Human
ccucugccagcccgccucu

SEQ ID NO: 478254 - RNA, 22 nt, Human
caaaugaagaaccuucucaccu

SEQ ID NO: 478255 - RNA, 22 nt, Human
aggucauuuuugccuucuauuu

SEQ ID NO: 478256 - RNA, 22 nt, Human
uaaauguguaaaccuccauuac

SEQ ID NO: 478257 - RNA, 22 nt, Human
ccagcagccaccuucucgaaau

SEQ ID NO: 478258 - RNA, 22 nt, Human
gaggcugaggguuagagaguca

SEQ ID NO: 478259 - RNA, 22 nt, Human
agcaugaaagcauaggacaguc

SEQ ID NO: 478260 - RNA, 22 nt, Human
cauugcugugggcauuugcugc

SEQ ID NO: 478261 - RNA, 22 nt, Human
gccugucaauuuuguguacaau

SEQ ID NO: 478262 - RNA, 22 nt, Human
aaacaugagcauuucuguuuaa

SEQ ID NO: 478263 - RNA, 22 nt, Human
cuccugggcucaagugauccuc

SEQ ID NO: 478264 - RNA, 22 nt, Human
cauuuguauguuccuccuuagg

SEQ ID NO: 478265 - RNA, 22 nt, Human
uucuaguucauauucucaaaga

SEQ ID NO: 478266 - RNA, 22 nt, Human
uggagcagcacaagaaagggga

SEQ ID NO: 478267 - RNA, 20 nt, Human
cucucuggaaggugggagcc

SEQ ID NO: 478268 - RNA, 22 nt, Human
uugcacagaugagggugaugcu

SEQ ID NO: 478269 - RNA, 22 nt, Human
ugggcagcauccuccacaguca

SEQ ID NO: 478270 - RNA, 22 nt, Human
ggagcugcucagagccaguccc

SEQ ID NO: 478271 - RNA, 22 nt, Human
agcuguccuggcucaggcugug

SEQ ID NO: 478272 - RNA, 22 nt, Human
uuguuacacauaauaacauuuu

SEQ ID NO: 478273 - RNA, 22 nt, Human
uuuuuccaccguacuuccugag

SEQ ID NO: 478274 - RNA, 22 nt, Human
ugcuuuauucaggguuuacccc

SEQ ID NO: 478275 - RNA, 22 nt, Human
ucacacacauaaucuaagauua

SEQ ID NO: 478276 - RNA, 22 nt, Human
aagccacuauggugauucucaa

SEQ ID NO: 478277 - RNA, 22 nt, Human
aggcagcauccagaggagaaug

SEQ ID NO: 478278 - RNA, 22 nt, Human
cacucugacuggcccugcagga

SEQ ID NO: 478279 - RNA, 22 nt, Human
cagcuggcagaaccugcaucca

SEQ ID NO: 478280 - RNA, 22 nt, Human
agaggcagcagucauacuacag

SEQ ID NO: 478281 - RNA, 22 nt, Human
ggagcuggucagccuugagcau

SEQ ID NO: 478282 - RNA, 22 nt, Human
ucuggccauggcaagccgagug

SEQ ID NO: 478283 - RNA, 22 nt, Human
uuaugaaagacauuucuguugg

SEQ ID NO: 478284 - RNA, 22 nt, Human
gaggaagaaagcauaggugggg

SEQ ID NO: 478285 - RNA, 22 nt, Human
gccugccuuugugaggaagcgg

SEQ ID NO: 478286 - RNA, 22 nt, Human
caggcaggugcagauuccucuu

SEQ ID NO: 478287 - RNA, 22 nt, Human
gaagggugcauggagggaaguc

SEQ ID NO: 478288 - RNA, 22 nt, Human
caaagacugcauaacacaugaa

SEQ ID NO: 478289 - RNA, 22 nt, Human
ccagggugggaggcugaaggcg

SEQ ID NO: 478290 - RNA, 22 nt, Human
agcugccaucagccuuuggaug

SEQ ID NO: 478291 - RNA, 22 nt, Human
ccugacgaaaggcgugcuggag

SEQ ID NO: 478292 - RNA, 22 nt, Human
gaggccaggagugcuguaaguu

SEQ ID NO: 478293 - RNA, 22 nt, Human
ugcccaggcuccucgcagccuu

SEQ ID NO: 478294 - RNA, 22 nt, Human
gucaugccuggcuucuuagaca

SEQ ID NO: 478295 - RNA, 22 nt, Human
cccagguguuuguggcagaggu

SEQ ID NO: 478296 - RNA, 22 nt, Human
ggcccucccugagccagguggg

SEQ ID NO: 478297 - RNA, 22 nt, Human
ugcagcaggagccaggccuggu

SEQ ID NO: 478298 - RNA, 22 nt, Human
ugccagucucacccuggguccu

SEQ ID NO: 478299 - RNA, 23 nt, Human
ccaaagucgaagucuaguccaga

SEQ ID NO: 478300 - RNA, 22 nt, Human
ugcauaaacagauacuucaugu

SEQ ID NO: 478301 - RNA, 22 nt, Human
ucugcaggccucgacaaggcca

SEQ ID NO: 478302 - RNA, 21 nt, Human
gggugggaggacacagcaggc

SEQ ID NO: 478303 - RNA, 21 nt, Human
gcagggacaaagcuucaggag

SEQ ID NO: 478304 - RNA, 22 nt, Human
uguacauagaucuugaaaauua

SEQ ID NO: 478305 - RNA, 22 nt, Human
ugguaaaguguacugaauauga

SEQ ID NO: 478306 - RNA, 22 nt, Human
agcugcccuggcggagcugcuc

SEQ ID NO: 478307 - RNA, 22 nt, Human
aaaacaggugucagcaaacuau

SEQ ID NO: 478308 - RNA, 22 nt, Human
ggcacugacugugcagcgcacc

SEQ ID NO: 478309 - RNA, 22 nt, Human
ugaggcagaaauuccuguuuuc

SEQ ID NO: 478310 - RNA, 22 nt, Human
cugagcagccccaccagccauu

SEQ ID NO: 478311 - RNA, 22 nt, Human
ugucuguacaaauuuucugugu

SEQ ID NO: 478312 - RNA, 22 nt, Human
ucagagguaguagcagaguuga

SEQ ID NO: 478313 - RNA, 22 nt, Human
aggcaccuugagagcaggagcu

SEQ ID NO: 478314 - RNA, 22 nt, Human
gcuuccuagaucugugguacuc

SEQ ID NO: 478315 - RNA, 22 nt, Human
ccuuucagaugggcauggaccg

SEQ ID NO: 478316 - RNA, 22 nt, Human
cacagcuucugagugaggauuu

SEQ ID NO: 478317 - RNA, 22 nt, Human
caagagcucccagaccugggca

SEQ ID NO: 478318 - RNA, 22 nt, Human
ucagauggcacacagagccugc

SEQ ID NO: 478319 - RNA, 22 nt, Human
ggaggagacggagugauuagug

SEQ ID NO: 478320 - RNA, 22 nt, Human
agcaugcacaugacuggcuuaa

SEQ ID NO: 478321 - RNA, 22 nt, Human
ccagggcaggagaaagacucac

SEQ ID NO: 478322 - RNA, 22 nt, Human
aucuggcucacuuagucuagga

SEQ ID NO: 478323 - RNA, 22 nt, Human
gcugagaguguaggauguuuac

SEQ ID NO: 478324 - RNA, 21 nt, Human
gcugucucuggcuccugggaa

SEQ ID NO: 478325 - RNA, 22 nt, Human
ccagagaguaaacauuuuccgg

SEQ ID NO: 478326 - RNA, 22 nt, Human
auugaggcagcauaguucaggg

SEQ ID NO: 478327 - RNA, 22 nt, Human
aagcugcccuguguuagaguuc

SEQ ID NO: 478328 - RNA, 22 nt, Human
ggcagcuccuccuagucugccc

SEQ ID NO: 478329 - RNA, 22 nt, Human
ugaagcaaacgcuucuguuccu

SEQ ID NO: 478330 - RNA, 22 nt, Human
ggagucccagcaaagccuuccc

SEQ ID NO: 478331 - RNA, 22 nt, Human
agaggucauaucucagaagaga

SEQ ID NO: 478332 - RNA, 22 nt, Human
ugaggcaguauucuccauucca

SEQ ID NO: 478333 - RNA, 22 nt, Human
agagcuguucagcagccagguu

SEQ ID NO: 478334 - RNA, 22 nt, Human
uaccugcacagccagccaugug

SEQ ID NO: 478335 - RNA, 21 nt, Human
auuuccaaggguaccuaagau

SEQ ID NO: 478336 - RNA, 21 nt, Human
uccaggaguggcugggcaggg

SEQ ID NO: 478337 - RNA, 22 nt, Human
cccugagaugccucacccuagu

SEQ ID NO: 478338 - RNA, 22 nt, Human
aucuacaggcugaggugggagg

SEQ ID NO: 478339 - RNA, 22 nt, Human
acugugcuuucucuggaggcau

SEQ ID NO: 478340 - RNA, 22 nt, Human
ucacuggggccuuuggucagga

SEQ ID NO: 478341 - RNA, 19 nt, Human
cuuauuagagugagagcuu

SEQ ID NO: 478342 - RNA, 22 nt, Human
gcuuuguguagaaggaggaugg

SEQ ID NO: 478343 - RNA, 22 nt, Human
auuaaacaauguaaaguucuug

SEQ ID NO: 478344 - RNA, 22 nt, Human
agaugcugucacacacacuguu

SEQ ID NO: 478345 - RNA, 18 nt, Human
caguuuuuauaucuggca

SEQ ID NO: 478346 - RNA, 22 nt, Human
uggcucagagagggagugugga

SEQ ID NO: 478347 - RNA, 22 nt, Human
ggcucagacucccaggcccucu

SEQ ID NO: 478348 - RNA, 22 nt, Human
cugcccugagucaugccagaug

SEQ ID NO: 478349 - RNA, 22 nt, Human
aaaauccucuaauucuagaaua

SEQ ID NO: 478350 - RNA, 22 nt, Human
ugucccauggauaccaggcuau

SEQ ID NO: 478351 - RNA, 22 nt, Human
ggccucuguucugcauuccucc

SEQ ID NO: 478352 - RNA, 22 nt, Human
gcuggugagcaaaggagaagga

SEQ ID NO: 478353 - RNA, 20 nt, Human
ccugccuguguuugugauga

SEQ ID NO: 478354 - RNA, 22 nt, Human
ugggcagacauugaguuuguuc

SEQ ID NO: 478355 - RNA, 22 nt, Human
uaguaacagauuuauacagucu

SEQ ID NO: 478356 - RNA, 22 nt, Human
guggcccugucccaggccuccu

SEQ ID NO: 478357 - RNA, 22 nt, Human
cacaggagagcugggaggugcc

SEQ ID NO: 478358 - RNA, 20 nt, Human
ucagauuuuucuaacuuuga

SEQ ID NO: 478359 - RNA, 22 nt, Human
cuggcagcuggaggcuagaggc

SEQ ID NO: 478360 - RNA, 22 nt, Human
agaccacagucaggcuccuggu

SEQ ID NO: 478361 - RNA, 22 nt, Human
acuccuggguugcaguccucaa

SEQ ID NO: 478362 - RNA, 19 nt, Human
ucaaagcaagcauguucug

SEQ ID NO: 478363 - RNA, 22 nt, Human
ugcucuucggggccacugcuug

SEQ ID NO: 478364 - RNA, 22 nt, Human
aaggcagccgugugacugcaug

SEQ ID NO: 478365 - RNA, 22 nt, Human
ggagcagagcauuucacagccu

SEQ ID NO: 478366 - RNA, 22 nt, Human
cagcagcuuugccaagucagcc

SEQ ID NO: 478367 - RNA, 22 nt, Human
ucacagaaggcaucacagaaga

SEQ ID NO: 478368 - RNA, 22 nt, Human
uucacaggaggguggaugcaug

SEQ ID NO: 478369 - RNA, 22 nt, Human
cucugugagggucuguacagaa

SEQ ID NO: 478370 - RNA, 19 nt, Human
uaguggagugacaaguucu

SEQ ID NO: 478371 - RNA, 22 nt, Human
ggcuggaaguccaagaucaagg

SEQ ID NO: 478372 - RNA, 22 nt, Human
ggaugcuggggaccaaucucug

SEQ ID NO: 478373 - RNA, 22 nt, Human
ucuggcucuguguccccaccca

SEQ ID NO: 478374 - RNA, 22 nt, Human
agggcucuguccccagaggccc

SEQ ID NO: 478375 - RNA, 22 nt, Human
agcagagccaggucucucugua

SEQ ID NO: 478376 - RNA, 22 nt, Human
uggcugggccgggccuugugcc

SEQ ID NO: 478377 - RNA, 22 nt, Human
uggagcagagaugguggccuuc

SEQ ID NO: 478378 - RNA, 22 nt, Human
uugaagcaaggcgaaucuugug

SEQ ID NO: 478379 - RNA, 22 nt, Human
gucuugaucuccugaccuugug

SEQ ID NO: 478380 - RNA, 22 nt, Human
acugaaggaagcgggcaggggu

SEQ ID NO: 478381 - RNA, 22 nt, Human
cauuuagagucuugcaauuuua

SEQ ID NO: 478382 - RNA, 22 nt, Human
aauauaauuuuauuccuagagu

SEQ ID NO: 478383 - RNA, 22 nt, Human
aaguccaucucugccccacaca

SEQ ID NO: 478384 - RNA, 22 nt, Human
ccucuccaguuuuaacgugacc

SEQ ID NO: 478385 - RNA, 22 nt, Human
ccagcugcugugaggaccacag

SEQ ID NO: 478386 - RNA, 22 nt, Human
cagugaggaagcugucuggacc

SEQ ID NO: 478387 - RNA, 22 nt, Human
gauccuugcaacucugugaggu

SEQ ID NO: 478388 - RNA, 22 nt, Human
gucucuuuuauggugaguugau

SEQ ID NO: 478389 - RNA, 22 nt, Human
ucagggcauguauguuucuuua

SEQ ID NO: 478390 - RNA, 22 nt, Human
uuuauuguuguuagucauaagu

SEQ ID NO: 478391 - RNA, 22 nt, Human
gucaccagcaccaaugccacau

SEQ ID NO: 478392 - RNA, 21 nt, Human
ucacaucuauguuaagcaaac

SEQ ID NO: 478393 - RNA, 22 nt, Human
gucaggaugcuauuguuauuaa

SEQ ID NO: 478394 - RNA, 22 nt, Human
ucucugguuauuaacuaacucc

SEQ ID NO: 478395 - RNA, 22 nt, Human
cugaaggacacgugaggagcca

SEQ ID NO: 478396 - RNA, 22 nt, Human
uaaaggcucguauuguugugug

SEQ ID NO: 478397 - RNA, 21 nt, Human
aggcagaaagagcccaggcug

SEQ ID NO: 478398 - RNA, 23 nt, Human
uuguuuuuagagguggcaugaga

SEQ ID NO: 478399 - RNA, 22 nt, Human
cugcuucugggaugauggagua

SEQ ID NO: 478400 - RNA, 22 nt, Human
uuguacuugccauagaacaaca

SEQ ID NO: 478401 - RNA, 22 nt, Human
gcaaaugaguuguaacauaaaa

SEQ ID NO: 478402 - RNA, 22 nt, Human
cuggccuuuuguuucuggagaa

SEQ ID NO: 478403 - RNA, 22 nt, Human
aagggaggaggauuuauuguac

SEQ ID NO: 478404 - RNA, 20 nt, Human
cccucccagaugcuucccaa

SEQ ID NO: 478405 - RNA, 17 nt, Human
cgagggcuugcuggcuc

SEQ ID NO: 478406 - RNA, 22 nt, Human
cauggggagacaccuagggaaa

SEQ ID NO: 478407 - RNA, 22 nt, Human
auguaauuugcccucaaguuaa

SEQ ID NO: 478408 - RNA, 22 nt, Human
ucagcugcucuguugagcugaa

SEQ ID NO: 478409 - RNA, 22 nt, Human
ugagguggcuagggaggcacuc

SEQ ID NO: 478410 - RNA, 22 nt, Human
gaggcaguuugccaugccagga

SEQ ID NO: 478411 - RNA, 22 nt, Human
ucucagggaccaugaugaugac

SEQ ID NO: 478412 - RNA, 22 nt, Human
ccacagggaacaugacagccuu

SEQ ID NO: 478413 - RNA, 22 nt, Human
gccuccuggauuuuagugccau

SEQ ID NO: 478414 - RNA, 22 nt, Human
aaggcugaggagggccugcagg

SEQ ID NO: 478415 - RNA, 23 nt, Human
cauguacacacagcuguacagug

SEQ ID NO: 478416 - RNA, 22 nt, Human
ugaaggaaugagggaguggguc

SEQ ID NO: 478417 - RNA, 22 nt, Human
uuacuuugaugaucaaugagcg

SEQ ID NO: 478418 - RNA, 22 nt, Human
auaccuuuuagacauguaguug

SEQ ID NO: 478419 - RNA, 22 nt, Human
uaugcauagguaucuauacuca

SEQ ID NO: 478420 - RNA, 22 nt, Human
gggaaggagguggcuugaagug

SEQ ID NO: 478421 - RNA, 19 nt, Human
ggaaacaggggccagagga

SEQ ID NO: 478422 - RNA, 22 nt, Human
agccagagcagggaauuggaca

SEQ ID NO: 478423 - RNA, 22 nt, Human
gcuggcucagggacuagaguuu

SEQ ID NO: 478424 - RNA, 22 nt, Human
ggcugugaacccuggcagugug

SEQ ID NO: 478425 - RNA, 22 nt, Human
aaaagcagagacucuggagcua

SEQ ID NO: 478426 - RNA, 20 nt, Human
agcugguuaucuuaauucuu

SEQ ID NO: 478427 - RNA, 22 nt, Human
ucaagagagugcugcuuggggu

SEQ ID NO: 478428 - RNA, 22 nt, Human
gggcugaaaggccgccucagau

SEQ ID NO: 478429 - RNA, 22 nt, Human
uauacuuuccugcaacuuugau

SEQ ID NO: 478430 - RNA, 22 nt, Human
caggaacacaaguucagggaug

SEQ ID NO: 478431 - RNA, 22 nt, Human
ugcuggcccaguauggacugca

SEQ ID NO: 478432 - RNA, 22 nt, Human
gcugccuggcuuuaguccacuu

SEQ ID NO: 478433 - RNA, 22 nt, Human
ugucccaguucccaggguugcu

SEQ ID NO: 478434 - RNA, 22 nt, Human
agggcugaccuaagcuccacuu

SEQ ID NO: 478435 - RNA, 18 nt, Human
gaaaugugauucuagggc

SEQ ID NO: 478436 - RNA, 22 nt, Human
uccaguggugguuugaagggca

SEQ ID NO: 478437 - RNA, 22 nt, Human
ggcagggcccugauuccugggg

SEQ ID NO: 478438 - RNA, 22 nt, Human
ccugggcaacauagugagaccu

SEQ ID NO: 478439 - RNA, 22 nt, Human
uggcagggaauacagauguuua

SEQ ID NO: 478440 - RNA, 22 nt, Human
cagcuccugcagcugcugccgu

SEQ ID NO: 478441 - RNA, 22 nt, Human
gggcauggaggucugucugcag

SEQ ID NO: 478442 - RNA, 22 nt, Human
uuagaaauacaagugagguuga

SEQ ID NO: 478443 - RNA, 22 nt, Human
aaggacuccaauucuuucaucu

SEQ ID NO: 478444 - RNA, 22 nt, Human
gcugagguggagauugcaguga

SEQ ID NO: 478445 - RNA, 22 nt, Human
agauaugacuagaagcucauuu

SEQ ID NO: 478446 - RNA, 22 nt, Human
aaaguucugggggagaagaacg

SEQ ID NO: 478447 - RNA, 22 nt, Human
ugggugaggaugaugaggcagc

SEQ ID NO: 478448 - RNA, 22 nt, Human
gaggcugcuuugaugacaggag

SEQ ID NO: 478449 - RNA, 22 nt, Human
cugggagcggcugucacugguu

SEQ ID NO: 478450 - RNA, 22 nt, Human
uuucuauugaucuaauaaacau

SEQ ID NO: 478451 - RNA, 22 nt, Human
uauuucccagggagcaacaagc

SEQ ID NO: 478452 - RNA, 22 nt, Human
ucaaauguucccuguacuggcc

SEQ ID NO: 478453 - RNA, 22 nt, Human
cuccagugggggugagccuaga

SEQ ID NO: 478454 - RNA, 22 nt, Human
uccucagggcggccuccgucuu

SEQ ID NO: 478455 - RNA, 22 nt, Human
uggcagaguucgcugugccuuu

SEQ ID NO: 478456 - RNA, 22 nt, Human
cccucugcugccuggcuggguc

SEQ ID NO: 478457 - RNA, 22 nt, Human
acugcagacucuacaguuauaa

SEQ ID NO: 478458 - RNA, 22 nt, Human
acuguucauuuguccuguaucu

SEQ ID NO: 478459 - RNA, 21 nt, Human
gcacagcaugaguguuggcau

SEQ ID NO: 478460 - RNA, 22 nt, Human
uggaggugagugugguacagca

SEQ ID NO: 478461 - RNA, 22 nt, Human
augauugaaaaugacauugcca

SEQ ID NO: 478462 - RNA, 22 nt, Human
aacuuuaaggcuauaaauuaug

SEQ ID NO: 478463 - RNA, 22 nt, Human
acugggccggugcagaguaguu

SEQ ID NO: 478464 - RNA, 22 nt, Human
acagguggcauaggcaguuuga

SEQ ID NO: 478465 - RNA, 22 nt, Human
ugcagagguguugcugagauaa

SEQ ID NO: 478466 - RNA, 22 nt, Human
gagccuucaucgcagccuuguu

SEQ ID NO: 478467 - RNA, 22 nt, Human
cuuccucaugugcaaugcaagc

SEQ ID NO: 478468 - RNA, 18 nt, Human
ggcucaggcuauccuaac

SEQ ID NO: 478469 - RNA, 22 nt, Human
uggagcccagacacuggcauug

SEQ ID NO: 478470 - RNA, 22 nt, Human
gggccagugaacaaugagggaa

SEQ ID NO: 478471 - RNA, 22 nt, Human
uggaagcaucacuucuugccug

SEQ ID NO: 478472 - RNA, 22 nt, Human
gcagaggacacaggagggcaag

SEQ ID NO: 478473 - RNA, 22 nt, Human
aacucaguguguuucuuaguau

SEQ ID NO: 478474 - RNA, 22 nt, Human
ucuuugcaugugcuucuuggcc

SEQ ID NO: 478475 - RNA, 22 nt, Human
cacauuucucuaccucacacaa

SEQ ID NO: 478476 - RNA, 22 nt, Human
acauuucugcaucucagagcua

SEQ ID NO: 478477 - RNA, 22 nt, Human
cuuguggcccauggcuuccugc

SEQ ID NO: 478478 - RNA, 22 nt, Human
ggguuucaugguucucacaaug

SEQ ID NO: 478479 - RNA, 22 nt, Human
aaaagagucuuaggcagucaua

SEQ ID NO: 478480 - RNA, 22 nt, Human
ggaggccaggaaggcucggaga

SEQ ID NO: 478481 - RNA, 21 nt, Human
cauugucgacauuuuccccuc

SEQ ID NO: 478482 - RNA, 22 nt, Human
cuggagcccaggccuggugucu

SEQ ID NO: 478483 - RNA, 22 nt, Human
uggcagagagagugcagucgac

SEQ ID NO: 478484 - RNA, 22 nt, Human
accaguccgcggagcuccgggg

SEQ ID NO: 478485 - RNA, 20 nt, Human
acaggagaucugaggaaagg

SEQ ID NO: 478486 - RNA, 22 nt, Human
ggcugccuccucgagacaggau

SEQ ID NO: 478487 - RNA, 22 nt, Human
uucuuucucaacaugaauguuu

SEQ ID NO: 478488 - RNA, 22 nt, Human
cagcaggauagguuucuuugga

SEQ ID NO: 478489 - RNA, 22 nt, Human
uuaaauuuuagaaacagacucu

SEQ ID NO: 478490 - RNA, 20 nt, Human
cugcagggugagugggcgau

SEQ ID NO: 478491 - RNA, 22 nt, Human
auggcaggcccagguguucauu

SEQ ID NO: 478492 - RNA, 22 nt, Human
uccaggcaaggauaauaaacau

SEQ ID NO: 478493 - RNA, 22 nt, Human
ugccucagcugaggccgcucca

SEQ ID NO: 478494 - RNA, 22 nt, Human
ugaaggagcucaaugaugaugc

SEQ ID NO: 478495 - RNA, 22 nt, Human
cagcaucccucaggggccucug

SEQ ID NO: 478496 - RNA, 22 nt, Human
uaauuucuagggacuaaggugc

SEQ ID NO: 478497 - RNA, 22 nt, Human
ucagcuuucuauguugcuaaac

SEQ ID NO: 478498 - RNA, 22 nt, Human
ccagcaggagaugccugugucu

SEQ ID NO: 478499 - RNA, 22 nt, Human
uuccucuccucccaccagguga

SEQ ID NO: 478500 - RNA, 22 nt, Human
uggcaucucaaacaggcagauu

SEQ ID NO: 478501 - RNA, 22 nt, Human
gcugucaggccaugugggccuu

SEQ ID NO: 478502 - RNA, 22 nt, Human
aagaauuuuccagcaugucagu

SEQ ID NO: 478503 - RNA, 22 nt, Human
aaggcacuguacuaguuaguua

SEQ ID NO: 478504 - RNA, 22 nt, Human
ugggcagguuguuauuugacau

SEQ ID NO: 478505 - RNA, 22 nt, Human
gaguggggcccacugcugggug

SEQ ID NO: 478506 - RNA, 20 nt, Human
auugucagccuucagaggag

SEQ ID NO: 478507 - RNA, 22 nt, Human
ggguuccuccaguuccuagagc

SEQ ID NO: 478508 - RNA, 21 nt, Human
ggauggauagggaagagauuu

SEQ ID NO: 478509 - RNA, 22 nt, Human
ggggcaggagcccuucuucagc

SEQ ID NO: 478510 - RNA, 22 nt, Human
aucaggaaauacuuauuuauaa

SEQ ID NO: 478511 - RNA, 22 nt, Human
cugggaggauacacaagaucag

SEQ ID NO: 478512 - RNA, 22 nt, Human
uuuauuuggcauccagggagaa

SEQ ID NO: 478513 - RNA, 22 nt, Human
aagucauuaucucuucuaaucu

SEQ ID NO: 478514 - RNA, 22 nt, Human
agggcugagacuaaggccagau

SEQ ID NO: 478515 - RNA, 22 nt, Human
aggcugagcggggucccagagc

SEQ ID NO: 478516 - RNA, 22 nt, Human
caagagcuggguggcaagcuag

SEQ ID NO: 478517 - RNA, 22 nt, Human
cagcagggggcagcgcagauca

SEQ ID NO: 478518 - RNA, 22 nt, Human
cggucaggugcagcguuggcac

SEQ ID NO: 478519 - RNA, 22 nt, Human
gguggguauaguuagggccucu

SEQ ID NO: 478520 - RNA, 22 nt, Human
ggaccugcccuggcucagaugc

SEQ ID NO: 478521 - RNA, 22 nt, Human
cccagggauuauaaaggugaaa

SEQ ID NO: 478522 - RNA, 22 nt, Human
guuauauauaguauuucucuga

SEQ ID NO: 478523 - RNA, 22 nt, Human
ggcuguggucauuaggagguug

SEQ ID NO: 478524 - RNA, 22 nt, Human
uccauggggcccaggaugagag

SEQ ID NO: 478525 - RNA, 19 nt, Human
ucaaaggcuuuuaggagac

SEQ ID NO: 478526 - RNA, 22 nt, Human
agcaggugggcaugaaagcuga

SEQ ID NO: 478527 - RNA, 22 nt, Human
agcucacagaaauccugcagga

SEQ ID NO: 478528 - RNA, 23 nt, Human
uauuagggccaggacuggcaaau

SEQ ID NO: 478529 - RNA, 18 nt, Human
acaaaggucugcaagacc

SEQ ID NO: 478530 - RNA, 22 nt, Human
gcuggccuuugaggaagcugcg

SEQ ID NO: 478531 - RNA, 22 nt, Human
ccaggagcagauauggacauaa

SEQ ID NO: 478532 - RNA, 22 nt, Human
caagauggaguccgggaaugug

SEQ ID NO: 478533 - RNA, 22 nt, Human
ucagucucuggggcuucuguuu

SEQ ID NO: 478534 - RNA, 22 nt, Human
ugugaaaggagccauagacagu

SEQ ID NO: 478535 - RNA, 22 nt, Human
uuuuugaaggcugaugugauua

SEQ ID NO: 478536 - RNA, 22 nt, Human
ucaguuuucucauuuaugagau

SEQ ID NO: 478537 - RNA, 22 nt, Human
aaauguguuugauaggaauauu

SEQ ID NO: 478538 - RNA, 22 nt, Human
ucucccagaaguccucaguaca

SEQ ID NO: 478539 - RNA, 22 nt, Human
gcugagccccccugcguggguc

SEQ ID NO: 478540 - RNA, 22 nt, Human
ucagcugaaguggagaagcaga

SEQ ID NO: 478541 - RNA, 22 nt, Human
agaagaaaugaggccguucugc

SEQ ID NO: 478542 - RNA, 23 nt, Human
aaguaacagggauaauagcaguu

SEQ ID NO: 478543 - RNA, 22 nt, Human
gcuggcagagacaagaagacua

SEQ ID NO: 478544 - RNA, 22 nt, Human
gggggacuggaccguccugggu

SEQ ID NO: 478545 - RNA, 22 nt, Human
gaggccuggugugucucccgcu

SEQ ID NO: 478546 - RNA, 22 nt, Human
caguagcagggauuauuuuagg

SEQ ID NO: 478547 - RNA, 23 nt, Human
uggcucugugucacauacaggau

SEQ ID NO: 478548 - RNA, 22 nt, Human
ucccagagcccaaguuggagag

SEQ ID NO: 478549 - RNA, 21 nt, Human
ccuggcagaagccugauaugc

SEQ ID NO: 478550 - RNA, 22 nt, Human
gaaggcugagcagacaggccaa

SEQ ID NO: 478551 - RNA, 22 nt, Human
gcugcuucucugauggagucca

SEQ ID NO: 478552 - RNA, 19 nt, Human
ugcagccacgugagagacu

SEQ ID NO: 478553 - RNA, 22 nt, Human
agcugcugagagucugccgggc

SEQ ID NO: 478554 - RNA, 22 nt, Human
agagcugccgagcuggggccau

SEQ ID NO: 478555 - RNA, 22 nt, Human
agagcugugaaaaugagguuug

SEQ ID NO: 478556 - RNA, 22 nt, Human
ucagcuuugggggucucaggag

SEQ ID NO: 478557 - RNA, 22 nt, Human
agggaggcaggaaaguugucug

SEQ ID NO: 478558 - RNA, 22 nt, Human
uggcagaaguucacuaguagcu

SEQ ID NO: 478559 - RNA, 22 nt, Human
uccagccuaggggaacagcugc

SEQ ID NO: 478560 - RNA, 22 nt, Human
cucugcauuuuaacagaugauu

SEQ ID NO: 478561 - RNA, 22 nt, Human
acugucuuccaggucuggaggu

SEQ ID NO: 478562 - RNA, 22 nt, Human
ucagggcaaugucccucagaag

SEQ ID NO: 478563 - RNA, 22 nt, Human
ugcacacaguucucaggaaaga

SEQ ID NO: 478564 - RNA, 22 nt, Human
guggccuggauagacuccaucu

SEQ ID NO: 478565 - RNA, 22 nt, Human
uaugugaauacagcaguggaug

SEQ ID NO: 478566 - RNA, 22 nt, Human
cacugcccagcgucuuaggcac

SEQ ID NO: 478567 - RNA, 22 nt, Human
uguauuagagcaguagaauuau

SEQ ID NO: 478568 - RNA, 22 nt, Human
cuggaagaggaagccagcugga

SEQ ID NO: 478569 - RNA, 22 nt, Human
gcugccuugaacuuggccuggg

SEQ ID NO: 478570 - RNA, 22 nt, Human
cucugugcccuacugcucagcu

SEQ ID NO: 478571 - RNA, 21 nt, Human
ugggcagauggcaguguggcu

SEQ ID NO: 478572 - RNA, 22 nt, Human
ucagagugaggcgucaacauga

SEQ ID NO: 478573 - RNA, 22 nt, Human
ggcaggcugcuugggucauguc

SEQ ID NO: 478574 - RNA, 22 nt, Human
cagagggcucuuggcugccugc

SEQ ID NO: 478575 - RNA, 22 nt, Human
ccugggcauucuuugaguucuc

SEQ ID NO: 478576 - RNA, 22 nt, Human
aggcugcagugcagguaggauu

SEQ ID NO: 478577 - RNA, 22 nt, Human
gagcacccuuugcacaucaguc

SEQ ID NO: 478578 - RNA, 22 nt, Human
ugaaaaggagccuuagguaggu

SEQ ID NO: 478579 - RNA, 22 nt, Human
uccagaccaugugagaggcgca

SEQ ID NO: 478580 - RNA, 22 nt, Human
augauggugagguugagcacag

SEQ ID NO: 478581 - RNA, 22 nt, Human
cuuuauuccuacaagauuuucu

SEQ ID NO: 478582 - RNA, 22 nt, Human
gcagcugccgugagcucacgcc

SEQ ID NO: 478583 - RNA, 22 nt, Human
uugacagcuauuuugcuuugau

SEQ ID NO: 478584 - RNA, 22 nt, Human
cugcucugaagccaggauucug

SEQ ID NO: 478585 - RNA, 22 nt, Human
gccugagaaggauaggaagcga

SEQ ID NO: 478586 - RNA, 22 nt, Human
cucugaagggagggccaagccc

SEQ ID NO: 478587 - RNA, 22 nt, Human
ccuggcucucugcagauccugg

SEQ ID NO: 478588 - RNA, 22 nt, Human
ggagugucagaaacaguguccu

SEQ ID NO: 478589 - RNA, 22 nt, Human
ucaauucaacacaugcacauug

SEQ ID NO: 478590 - RNA, 22 nt, Human
aagaguuuucuauaaucuuggc

SEQ ID NO: 478591 - RNA, 22 nt, Human
cugggagguggagguugcauug

SEQ ID NO: 478592 - RNA, 22 nt, Human
cccaggaccgcgcggcugagcg

SEQ ID NO: 478593 - RNA, 19 nt, Human
aaaaggaauauucuuuggg

SEQ ID NO: 478594 - RNA, 22 nt, Human
ucuuuccuguaacugcuguuca

SEQ ID NO: 478595 - RNA, 22 nt, Human
ugggcagacuaaggucaaagcu

SEQ ID NO: 478596 - RNA, 22 nt, Human
uccauucauucauugaugaaca

SEQ ID NO: 478597 - RNA, 22 nt, Human
ggagccaggcaaucuguacuuu

SEQ ID NO: 478598 - RNA, 22 nt, Human
aauguuaaaaccuucagugcuu

SEQ ID NO: 478599 - RNA, 22 nt, Human
caaggaaaaagcgagcucgggg

SEQ ID NO: 478600 - RNA, 23 nt, Human
agacccagagacuggcucugcuc

SEQ ID NO: 478601 - RNA, 22 nt, Human
uagggcucugcucaucaguugu

SEQ ID NO: 478602 - RNA, 22 nt, Human
ggccugcugacccaaguccugu

SEQ ID NO: 478603 - RNA, 22 nt, Human
ugucccuggaacuauggcucca

SEQ ID NO: 478604 - RNA, 22 nt, Human
ccucacagggccaggccccuca

SEQ ID NO: 478605 - RNA, 22 nt, Human
guggguggaggcgucgagggca

SEQ ID NO: 478606 - RNA, 22 nt, Human
uuaugacauaugaguacaagua

SEQ ID NO: 478607 - RNA, 22 nt, Human
acuuccugcaaucguccacucc

SEQ ID NO: 478608 - RNA, 22 nt, Human
ccucaggggcuuuucguuguug

SEQ ID NO: 478609 - RNA, 20 nt, Human
gcacugaagguuccagggga

SEQ ID NO: 478610 - RNA, 22 nt, Human
uagccaggucacacuguguguu

SEQ ID NO: 478611 - RNA, 22 nt, Human
ugccaggccucaggagucucca

SEQ ID NO: 478612 - RNA, 22 nt, Human
guaaucucagcuacuugggagg

SEQ ID NO: 478613 - RNA, 22 nt, Human
uggaagcagugauucuugucug

SEQ ID NO: 478614 - RNA, 22 nt, Human
ugccugaguuuaacccucagag

SEQ ID NO: 478615 - RNA, 22 nt, Human
guucaaagcuccugguacagua

SEQ ID NO: 478616 - RNA, 22 nt, Human
cugggcagguauacaaaaaaug

SEQ ID NO: 478617 - RNA, 20 nt, Human
aaaagcagccagagauggua

SEQ ID NO: 478618 - RNA, 22 nt, Human
uuccauaaaggugauaguauac

SEQ ID NO: 478619 - RNA, 22 nt, Human
ugaaagggguugaguuacagcu

SEQ ID NO: 478620 - RNA, 22 nt, Human
acucaggaaaugaagacugguu

SEQ ID NO: 478621 - RNA, 22 nt, Human
uuuuccucugcaauaaaagcag

SEQ ID NO: 478622 - RNA, 22 nt, Human
uuggcuucucuuaacccuaaag

SEQ ID NO: 478623 - RNA, 22 nt, Human
ugggcuccggcggccucaggcu

SEQ ID NO: 478624 - RNA, 22 nt, Human
aaauuucuugaggcucucuagc

SEQ ID NO: 478625 - RNA, 22 nt, Human
aacaugaaacccaaacagaaua

SEQ ID NO: 478626 - RNA, 22 nt, Human
acagaguacauucagagacuau

SEQ ID NO: 478627 - RNA, 22 nt, Human
uacauaguauucacauuguuuu

SEQ ID NO: 478628 - RNA, 22 nt, Human
aagauucuacaguagguacauu

SEQ ID NO: 478629 - RNA, 22 nt, Human
gcucccuccaugaggcagaccg

SEQ ID NO: 478630 - RNA, 22 nt, Human
ccuguacuagggucucauugcc

SEQ ID NO: 478631 - RNA, 22 nt, Human
gagcugugagggacacauugcu

SEQ ID NO: 478632 - RNA, 23 nt, Human
uugcauguagcccaugaguaacu

SEQ ID NO: 478633 - RNA, 22 nt, Human
agugaaaugacugaaucagaua

SEQ ID NO: 478634 - RNA, 22 nt, Human
gcugagucuugagcacugagca

SEQ ID NO: 478635 - RNA, 22 nt, Human
uuucacauucagauauagacuu

SEQ ID NO: 478636 - RNA, 22 nt, Human
ggcucugcagugacuugagggg

SEQ ID NO: 478637 - RNA, 22 nt, Human
ugucaccagcugcuccucagga

SEQ ID NO: 478638 - RNA, 22 nt, Human
cugugcaagcccaagauaaaac

SEQ ID NO: 478639 - RNA, 22 nt, Human
agcagugggugacagagcugag

SEQ ID NO: 478640 - RNA, 22 nt, Human
acaggccacaguggagucucug

SEQ ID NO: 478641 - RNA, 22 nt, Human
cacagcuuaugccacugauugg

SEQ ID NO: 478642 - RNA, 22 nt, Human
gaggcacauauauacagagccc

SEQ ID NO: 478643 - RNA, 22 nt, Human
accaucagagcacaguccgugc

SEQ ID NO: 478644 - RNA, 22 nt, Human
caggaggaaaugugacccugcu

SEQ ID NO: 478645 - RNA, 22 nt, Human
uccucuggggucagggcacuac

SEQ ID NO: 478646 - RNA, 22 nt, Human
uuauuuugagagaaugugugcu

SEQ ID NO: 478647 - RNA, 22 nt, Human
agcauugccugccuauugcuaa

SEQ ID NO: 478648 - RNA, 22 nt, Human
ugucccauggacacaacuucuu

SEQ ID NO: 478649 - RNA, 22 nt, Human
cuuuggcaaugaaacacaagaa

SEQ ID NO: 478650 - RNA, 22 nt, Human
aggcucauucuugccucugagc

SEQ ID NO: 478651 - RNA, 22 nt, Human
caggacccaaccucccugcucu

SEQ ID NO: 478652 - RNA, 22 nt, Human
guucauauuacuuugagugcag

SEQ ID NO: 478653 - RNA, 22 nt, Human
acagccagguaaaggcauggca

SEQ ID NO: 478654 - RNA, 22 nt, Human
agcagggggccacagucacagc

SEQ ID NO: 478655 - RNA, 22 nt, Human
gcaggauggugcccuuucugcc

SEQ ID NO: 478656 - RNA, 20 nt, Human
uacauucaaaacaaacucug

SEQ ID NO: 478657 - RNA, 20 nt, Human
caucagugccugacaggucc

SEQ ID NO: 478658 - RNA, 23 nt, Human
uagggcagcugggagggacaugc

SEQ ID NO: 478659 - RNA, 22 nt, Human
acauucuagaagucuuugcaau

SEQ ID NO: 478660 - RNA, 22 nt, Human
ccucccugcgcuccugcggcgg

SEQ ID NO: 478661 - RNA, 22 nt, Human
aacaaauguguggcaguguggg

SEQ ID NO: 478662 - RNA, 22 nt, Human
cagcucccagagugaccagcag

SEQ ID NO: 478663 - RNA, 22 nt, Human
caggagcagaggguggucagca

SEQ ID NO: 478664 - RNA, 22 nt, Human
acauaccauacauggugagaug

SEQ ID NO: 478665 - RNA, 22 nt, Human
uggcccugcuuaugucucucuu

SEQ ID NO: 478666 - RNA, 22 nt, Human
cugugcugauucagcacaggcc

SEQ ID NO: 478667 - RNA, 22 nt, Human
gcugagcuagaaaaggaccaca

SEQ ID NO: 478668 - RNA, 22 nt, Human
gccugcagggugaugggcugcc

SEQ ID NO: 478669 - RNA, 22 nt, Human
cugugugugucugcagcauacu

SEQ ID NO: 478670 - RNA, 22 nt, Human
uugaaagaagaagcugcgaugu

SEQ ID NO: 478671 - RNA, 22 nt, Human
gcugagagugagcacuggauau

SEQ ID NO: 478672 - RNA, 17 nt, Human
cacaggugugguuugag

SEQ ID NO: 478673 - RNA, 22 nt, Human
uggcagcugaggggaggcuuug

SEQ ID NO: 478674 - RNA, 22 nt, Human
guggcagcugguaugcagacag

SEQ ID NO: 478675 - RNA, 22 nt, Human
cagagcucuauguucauggagg

SEQ ID NO: 478676 - RNA, 22 nt, Human
gauggcagcagcagccagggau

SEQ ID NO: 478677 - RNA, 22 nt, Human
aaggcugauuagacugauagcu

SEQ ID NO: 478678 - RNA, 22 nt, Human
agcaggcagccauuuggaaggc

SEQ ID NO: 478679 - RNA, 22 nt, Human
aucucagggcuggagcccugga

SEQ ID NO: 478680 - RNA, 22 nt, Human
agaagcagcuuucaaggugauu

SEQ ID NO: 478681 - RNA, 22 nt, Human
cucuuaaauaacaucauugcuu

SEQ ID NO: 478682 - RNA, 22 nt, Human
cacaguggcagguguggguugu

SEQ ID NO: 478683 - RNA, 22 nt, Human
uggcagcaauuagcuagagcug

SEQ ID NO: 478684 - RNA, 22 nt, Human
cccaggucccgccccagcucua

SEQ ID NO: 478685 - RNA, 22 nt, Human
ggcuucccagcagagggcgcac

SEQ ID NO: 478686 - RNA, 22 nt, Human
gggcugacucugcacugagcca

SEQ ID NO: 478687 - RNA, 22 nt, Human
augcagagacagauguggcaug

SEQ ID NO: 478688 - RNA, 18 nt, Human
uuucacagauucaugacu

SEQ ID NO: 478689 - RNA, 22 nt, Human
aaggccugcucagcugucugug

SEQ ID NO: 478690 - RNA, 22 nt, Human
uucugaaaggcagguuguuugc

SEQ ID NO: 478691 - RNA, 22 nt, Human
agacagagauacuauguuguca

SEQ ID NO: 478692 - RNA, 22 nt, Human
uuucuguaauuaaaagggcagg

SEQ ID NO: 478693 - RNA, 22 nt, Human
uccuugaaugaauguucucucc

SEQ ID NO: 478694 - RNA, 22 nt, Human
gcucucuggguggugggcaaca

SEQ ID NO: 478695 - RNA, 22 nt, Human
ggccucucauguccugggcuuc

SEQ ID NO: 478696 - RNA, 22 nt, Human
acuuugcagggcuugauaucca

SEQ ID NO: 478697 - RNA, 23 nt, Human
ggggaaguggcagugagugaggc

SEQ ID NO: 478698 - RNA, 22 nt, Human
cuuauguaaaacggaaagggaa

SEQ ID NO: 478699 - RNA, 22 nt, Human
aaguucaagaucaagguuccag

SEQ ID NO: 478700 - RNA, 22 nt, Human
aaggcacugagccagccgucuc

SEQ ID NO: 478701 - RNA, 22 nt, Human
uggaggccagagguacugggac

SEQ ID NO: 478702 - RNA, 22 nt, Human
gccugccuucggugcgcagcgg

SEQ ID NO: 478703 - RNA, 22 nt, Human
agggucagggagugaguauuua

SEQ ID NO: 478704 - RNA, 22 nt, Human
ucaguuuuguauguuguaaguc

SEQ ID NO: 478705 - RNA, 21 nt, Human
aggugcagagccagggaccag

SEQ ID NO: 478706 - RNA, 22 nt, Human
gggcugaggaacauauuuuguu

SEQ ID NO: 478707 - RNA, 22 nt, Human
aucacaaaggcugcuucaugau

SEQ ID NO: 478708 - RNA, 22 nt, Human
ccuggaggagcgcugaccagcu

SEQ ID NO: 478709 - RNA, 22 nt, Human
agcccaaggcuucccugcuggc

SEQ ID NO: 478710 - RNA, 22 nt, Human
acaguggaagaagcacugaacu

SEQ ID NO: 478711 - RNA, 22 nt, Human
uucuggaggccccuuccuucuc

SEQ ID NO: 478712 - RNA, 22 nt, Human
acuuggcaaguaucuauaaagu

SEQ ID NO: 478713 - RNA, 22 nt, Human
ugaauaaucuuggguauuaaua

SEQ ID NO: 478714 - RNA, 22 nt, Human
cugcaggggccucgagcacagg

SEQ ID NO: 478715 - RNA, 22 nt, Human
auugacaauguauuuguaucug

SEQ ID NO: 478716 - RNA, 22 nt, Human
uuacauuuggcuauguccucua

SEQ ID NO: 478717 - RNA, 22 nt, Human
aaggaagacuugagaagguucc

SEQ ID NO: 478718 - RNA, 22 nt, Human
cugggcagaauuuuaggauggc

SEQ ID NO: 478719 - RNA, 21 nt, Human
ugagccaggcugacggcugug

SEQ ID NO: 478720 - RNA, 22 nt, Human
caggguggaaaagcuaguugga

SEQ ID NO: 478721 - RNA, 22 nt, Human
cccucccaggaguggccagaga

SEQ ID NO: 478722 - RNA, 22 nt, Human
ggcacucagagauucaggcugu

SEQ ID NO: 478723 - RNA, 22 nt, Human
gccuuucaguuccaucaaagga

SEQ ID NO: 478724 - RNA, 22 nt, Human
auuuguacaaauuuauguuagu

SEQ ID NO: 478725 - RNA, 22 nt, Human
augggcugugagguccggcagg

SEQ ID NO: 478726 - RNA, 22 nt, Human
cagcugaagaaagagugguuag

SEQ ID NO: 478727 - RNA, 22 nt, Human
cgugagcaaaauggacacuccc

SEQ ID NO: 478728 - RNA, 22 nt, Human
gagucgagcagaaagccgucgg

SEQ ID NO: 478729 - RNA, 22 nt, Human
aaugaacaggugaaugucagau

SEQ ID NO: 478730 - RNA, 21 nt, Human
uuacuuuugcaccaaccuaau

SEQ ID NO: 478731 - RNA, 22 nt, Human
cuuacauuuaaucaugugucau

SEQ ID NO: 478732 - RNA, 15 nt, Human
uucaggauaugacuc

SEQ ID NO: 478733 - RNA, 20 nt, Human
ugugugcacacaugacauuc

SEQ ID NO: 478734 - RNA, 22 nt, Human
agccugucugucuccaaagcug

SEQ ID NO: 478735 - RNA, 22 nt, Human
gccugccuggagcuugagguga

SEQ ID NO: 478736 - RNA, 23 nt, Human
ugaagugaaauuucacaagggac

SEQ ID NO: 478737 - RNA, 22 nt, Human
gugugcagcagagacaggacuc

SEQ ID NO: 478738 - RNA, 17 nt, Human
ggugagaccucccacuc

SEQ ID NO: 478739 - RNA, 22 nt, Human
aaaauacacauacuaggggaaa

SEQ ID NO: 478740 - RNA, 22 nt, Human
caggaugagaggcccagggaag

SEQ ID NO: 478741 - RNA, 22 nt, Human
cacacaggaugaagcagcagaa

SEQ ID NO: 478742 - RNA, 22 nt, Human
uuuaagaugguauuuuauaaag

SEQ ID NO: 478743 - RNA, 19 nt, Human
ccugggagucagcugaagg

SEQ ID NO: 478744 - RNA, 22 nt, Human
cuucagaggggacucaaaguca

SEQ ID NO: 478745 - RNA, 22 nt, Human
ugggccugggucuuugcugcca

SEQ ID NO: 478746 - RNA, 22 nt, Human
cauagcaacagcaucaagucaa

SEQ ID NO: 478747 - RNA, 22 nt, Human
ugaggcaggacauggacaacug

SEQ ID NO: 478748 - RNA, 23 nt, Human
ucucaggacacacaugucuauca

SEQ ID NO: 478749 - RNA, 22 nt, Human
aaggcagcaccgccuccugaaa

SEQ ID NO: 478750 - RNA, 22 nt, Human
uguagcacagagcuuugacacu

SEQ ID NO: 478751 - RNA, 22 nt, Human
ucacagggauggaauagaaaua

SEQ ID NO: 478752 - RNA, 22 nt, Human
gaggccaaguuggagaccaggu

SEQ ID NO: 478753 - RNA, 20 nt, Human
ucauugcacauaauggaagc

SEQ ID NO: 478754 - RNA, 22 nt, Human
uguaauggaagugggauugcau

SEQ ID NO: 478755 - RNA, 22 nt, Human
uggggccuggucagagcugcac

SEQ ID NO: 478756 - RNA, 17 nt, Human
gcugcagcgguaggcag

SEQ ID NO: 478757 - RNA, 22 nt, Human
gcauuuaaauuugaacuucaga

SEQ ID NO: 478758 - RNA, 22 nt, Human
ggcagcuccaaaaggaaacacu

SEQ ID NO: 478759 - RNA, 22 nt, Human
cuggagugaggucugggagccu

SEQ ID NO: 478760 - RNA, 22 nt, Human
ucagcuccucaugcaggggaua

SEQ ID NO: 478761 - RNA, 22 nt, Human
ccagggcagccaacccagaugc

SEQ ID NO: 478762 - RNA, 22 nt, Human
cuacagacccaccuuggaagaa

SEQ ID NO: 478763 - RNA, 22 nt, Human
caaaauucugcauuucuaauaa

SEQ ID NO: 478764 - RNA, 22 nt, Human
ggagccaggggaccuucacaga

SEQ ID NO: 478765 - RNA, 18 nt, Human
gagagcugcuaccuagcu

SEQ ID NO: 478766 - RNA, 22 nt, Human
ggcagcuccucucagcaaaaga

SEQ ID NO: 478767 - RNA, 22 nt, Human
ggugugccuggggcuuagcugc

SEQ ID NO: 478768 - RNA, 22 nt, Human
guggguggaucaccugagguca

SEQ ID NO: 478769 - RNA, 22 nt, Human
uuuuccucuguuauuaguguga

SEQ ID NO: 478770 - RNA, 22 nt, Human
accagagcucuucagcacagga

SEQ ID NO: 478771 - RNA, 22 nt, Human
ccaggcuggauuuugcaguuca

SEQ ID NO: 478772 - RNA, 22 nt, Human
aaaacucugcaguuaguuucua

SEQ ID NO: 478773 - RNA, 22 nt, Human
ugcagugguugagagcccagac

SEQ ID NO: 478774 - RNA, 22 nt, Human
uuaaugcuugucuagaucuucu

SEQ ID NO: 478775 - RNA, 23 nt, Human
cacacccaucacuaagagcuccu

SEQ ID NO: 478776 - RNA, 19 nt, Human
ugaggccaaggucacagau

SEQ ID NO: 478777 - RNA, 19 nt, Human
agaaaucucgagauuuguu

SEQ ID NO: 478778 - RNA, 22 nt, Human
uacaaaugaaccaacuuugaug

SEQ ID NO: 478779 - RNA, 22 nt, Human
uauguguuugacacccugcaag

SEQ ID NO: 478780 - RNA, 22 nt, Human
gccugcagccucaagggcugag

SEQ ID NO: 478781 - RNA, 22 nt, Human
uggccuggggaccugugagacc

SEQ ID NO: 478782 - RNA, 22 nt, Human
auguccaggaucuauccccaga

SEQ ID NO: 478783 - RNA, 22 nt, Human
cagggcuguggcuuugugcugu

SEQ ID NO: 478784 - RNA, 23 nt, Human
uagagcagggaaaucugucagag

SEQ ID NO: 478785 - RNA, 22 nt, Human
uuuucauuguaaaucaggaaac

SEQ ID NO: 478786 - RNA, 17 nt, Human
ugcauuguaggcuagcc

SEQ ID NO: 478787 - RNA, 22 nt, Human
agcuucuggaagccuggcagca

SEQ ID NO: 478788 - RNA, 22 nt, Human
ucaucaaagucaaagaaugacu

SEQ ID NO: 478789 - RNA, 22 nt, Human
cuggugggagcagcaggcagcu

SEQ ID NO: 478790 - RNA, 22 nt, Human
ugcaggagaaaguacggagcgu

SEQ ID NO: 478791 - RNA, 22 nt, Human
aucaggaaugaauacuuuugga

SEQ ID NO: 478792 - RNA, 22 nt, Human
uggaguuccuuugaaaggcucu

SEQ ID NO: 478793 - RNA, 22 nt, Human
cagggcucccucuggcucccag

SEQ ID NO: 478794 - RNA, 22 nt, Human
cugucccaggagcuguaagaca

SEQ ID NO: 478795 - RNA, 22 nt, Human
uagcagggucucaggagucagg

SEQ ID NO: 478796 - RNA, 22 nt, Human
ugggagcugggguuggacgucu

SEQ ID NO: 478797 - RNA, 22 nt, Human
guucagcccacagagggggccg

SEQ ID NO: 478798 - RNA, 22 nt, Human
uggcuccaucauccaugcaaga

SEQ ID NO: 478799 - RNA, 18 nt, Human
ugcuuuaugcuuauauaa

SEQ ID NO: 478800 - RNA, 22 nt, Human
gccagggggucagcaggcacuu

SEQ ID NO: 478801 - RNA, 22 nt, Human
cccaggugggcaccucgaggaa

SEQ ID NO: 478802 - RNA, 22 nt, Human
uaagugcaauguuuuacuuaaa

SEQ ID NO: 478803 - RNA, 20 nt, Human
auuccauaguuggcacuuuu

SEQ ID NO: 478804 - RNA, 22 nt, Human
gugcaggagguaacauagcaaa

SEQ ID NO: 478805 - RNA, 22 nt, Human
aggugaaguugaggaggcagaa

SEQ ID NO: 478806 - RNA, 22 nt, Human
caggacaguuugcuuugcccug

SEQ ID NO: 478807 - RNA, 22 nt, Human
gggcugagggccaauuccuacu

SEQ ID NO: 478808 - RNA, 23 nt, Human
aggagccaggaaccagcuucccc

SEQ ID NO: 478809 - RNA, 17 nt, Human
cagugaggccuuuccuc

SEQ ID NO: 478810 - RNA, 21 nt, Human
agcagccauuucacagagacu

SEQ ID NO: 478811 - RNA, 22 nt, Human
aagccaggggcugcuuaggaga

SEQ ID NO: 478812 - RNA, 22 nt, Human
accaaggaagaaucuauuugag

SEQ ID NO: 478813 - RNA, 22 nt, Human
ugcugucuguuuacuggcuaua

SEQ ID NO: 478814 - RNA, 23 nt, Human
acaugggagggacauggaggcug

SEQ ID NO: 478815 - RNA, 22 nt, Human
uccagcuugacaaaugauuuua

SEQ ID NO: 478816 - RNA, 22 nt, Human
uucacauugguucuugauagcu

SEQ ID NO: 478817 - RNA, 22 nt, Human
ucuggcucaaaauacguacucu

SEQ ID NO: 478818 - RNA, 22 nt, Human
aggagggcuaggaaaaccagga

SEQ ID NO: 478819 - RNA, 22 nt, Human
uccagucaucucccuucacauu

SEQ ID NO: 478820 - RNA, 22 nt, Human
uggaaagaugaagauguuuaag

SEQ ID NO: 478821 - RNA, 22 nt, Human
uucuuucacucaagaaggaucu

SEQ ID NO: 478822 - RNA, 22 nt, Human
ucaggaugagcucauaacuaug

SEQ ID NO: 478823 - RNA, 22 nt, Human
guggcugcuguccucucugguu

SEQ ID NO: 478824 - RNA, 22 nt, Human
gcucuguccagcgugcacagaa

SEQ ID NO: 478825 - RNA, 22 nt, Human
aauauuuguuaguguuuuaaug

SEQ ID NO: 478826 - RNA, 22 nt, Human
agggucuguggaugcaucuggg

SEQ ID NO: 478827 - RNA, 22 nt, Human
ccugggcagguguggcuucccc

SEQ ID NO: 478828 - RNA, 22 nt, Human
ggcuucugguaaagaccacacc

SEQ ID NO: 478829 - RNA, 21 nt, Human
ugcuuuaugggaaaaauguca

SEQ ID NO: 478830 - RNA, 22 nt, Human
agccuggauccauguggcuacc

SEQ ID NO: 478831 - RNA, 22 nt, Human
cccugccuuguuggagccuaug

SEQ ID NO: 478832 - RNA, 20 nt, Human
acaauauguagaugaauagc

SEQ ID NO: 478833 - RNA, 22 nt, Human
ucagaguguuuuacuaaacaag

SEQ ID NO: 478834 - RNA, 22 nt, Human
gcuaggagauugagcucugaag

SEQ ID NO: 478835 - RNA, 22 nt, Human
cugagccuguguuucucuggca

SEQ ID NO: 478836 - RNA, 22 nt, Human
ucaccugggagggcugugguag

SEQ ID NO: 478837 - RNA, 19 nt, Human
agccagugagccucugggu

SEQ ID NO: 478838 - RNA, 22 nt, Human
gccuccugagaagccacaggcu

SEQ ID NO: 478839 - RNA, 22 nt, Human
ugaugaaaauaugauucugagg

SEQ ID NO: 478840 - RNA, 22 nt, Human
caaaguuaugaaugauaagauu

SEQ ID NO: 478841 - RNA, 22 nt, Human
aggcucagugauguaaaauaua

SEQ ID NO: 478842 - RNA, 22 nt, Human
ucacuuagauggggaucaucac

SEQ ID NO: 478843 - RNA, 22 nt, Human
aaaugucuuucuucugcuacgu

SEQ ID NO: 478844 - RNA, 22 nt, Human
agacaaaggauuaaugaugaug

SEQ ID NO: 478845 - RNA, 22 nt, Human
gggagggaaggaggcgccgugu

SEQ ID NO: 478846 - RNA, 22 nt, Human
gcacggcuaauuuuuguauuuu

SEQ ID NO: 478847 - RNA, 22 nt, Human
ucauaaaacacaccagguaguu

SEQ ID NO: 478848 - RNA, 22 nt, Human
cagccuucugaaugaacguacu

SEQ ID NO: 478849 - RNA, 22 nt, Human
ucccuggaacagagagacaacg

SEQ ID NO: 478850 - RNA, 22 nt, Human
ugaacgcagguccacauggcuc

SEQ ID NO: 478851 - RNA, 22 nt, Human
agucuucccugugccagagugu

SEQ ID NO: 478852 - RNA, 22 nt, Human
cagcucucuaaggucuugcuuu

SEQ ID NO: 478853 - RNA, 22 nt, Human
cuguauuuucaugccuacguac

SEQ ID NO: 478854 - RNA, 22 nt, Human
ucugucacuuauuaagauggau

SEQ ID NO: 478855 - RNA, 22 nt, Human
augcaguaaauguuaagaaaaa

SEQ ID NO: 478856 - RNA, 22 nt, Human
ggcccagaauacuuuguaaaau

SEQ ID NO: 478857 - RNA, 22 nt, Human
cagagcuggacuuaaauauauu

SEQ ID NO: 478858 - RNA, 22 nt, Human
ccaggcugcuuagccuuaucuu

SEQ ID NO: 478859 - RNA, 22 nt, Human
uguaagauauucagcuuauuga

SEQ ID NO: 478860 - RNA, 22 nt, Human
uaaguuuucuggaauaacuugg

SEQ ID NO: 478861 - RNA, 22 nt, Human
guggcagcaaaauccugcauuc

SEQ ID NO: 478862 - RNA, 22 nt, Human
gcagugcuuuagucuguccuuu

SEQ ID NO: 478863 - RNA, 22 nt, Human
ugucucuggcccaugagcagag

SEQ ID NO: 478864 - RNA, 22 nt, Human
uuggccuuaaccucucugugcc

SEQ ID NO: 478865 - RNA, 21 nt, Human
ugccagggauuuacagagccu

SEQ ID NO: 478866 - RNA, 22 nt, Human
cucagagagggcaccagggcca

SEQ ID NO: 478867 - RNA, 22 nt, Human
gggacccugggaggcuggcgca

SEQ ID NO: 478868 - RNA, 22 nt, Human
ccagugccugugggcauggugc

SEQ ID NO: 478869 - RNA, 20 nt, Human
cagcaguggaugagaguuuu

SEQ ID NO: 478870 - RNA, 22 nt, Human
auccuucaaggggcugacagcu

SEQ ID NO: 478871 - RNA, 20 nt, Human
uguuucuuuuaaugagcggc

SEQ ID NO: 478872 - RNA, 22 nt, Human
ccagcugcccaagaggcauccu

SEQ ID NO: 478873 - RNA, 22 nt, Human
aagugauuucugccugcauguu

SEQ ID NO: 478874 - RNA, 22 nt, Human
uugaggagcaggaugggaggcu

SEQ ID NO: 478875 - RNA, 22 nt, Human
gaggaagccccauugaagccag

SEQ ID NO: 478876 - RNA, 22 nt, Human
ugggaccucucuugagagagca

SEQ ID NO: 478877 - RNA, 22 nt, Human
gccugagauucccggagccgug

SEQ ID NO: 478878 - RNA, 22 nt, Human
uucuaguguccuuggacuugcu

SEQ ID NO: 478879 - RNA, 22 nt, Human
uagcagggguagauagagugug

SEQ ID NO: 478880 - RNA, 22 nt, Human
ucauaauacaaagaguucugca

SEQ ID NO: 478881 - RNA, 22 nt, Human
ugccagcacaaguuaagagauc

SEQ ID NO: 478882 - RNA, 22 nt, Human
caaaguccauaguuuacaauag

SEQ ID NO: 478883 - RNA, 22 nt, Human
cuguggcuaggaagcuguggga

SEQ ID NO: 478884 - RNA, 22 nt, Human
ccagcaggagacuagcaacaua

SEQ ID NO: 478885 - RNA, 22 nt, Human
ucuccucuauuucuguauguau

SEQ ID NO: 478886 - RNA, 22 nt, Human
aggugccagaugcacagcugaa

SEQ ID NO: 478887 - RNA, 22 nt, Human
agccucucuuucugguggcuaa

SEQ ID NO: 478888 - RNA, 22 nt, Human
ucaggcacugcuuucugauaug

SEQ ID NO: 478889 - RNA, 22 nt, Human
gagagaagggggauaugagccu

SEQ ID NO: 478890 - RNA, 23 nt, Human
aacaauagguuuuggcagaauag

SEQ ID NO: 478891 - RNA, 22 nt, Human
aaagacuuggcuuaugauuugc

SEQ ID NO: 478892 - RNA, 22 nt, Human
cugagcugguucucuugugaaa

SEQ ID NO: 478893 - RNA, 22 nt, Human
gaggugggagggcagucccuaa

SEQ ID NO: 478894 - RNA, 22 nt, Human
gcugggagaggcccugaaguga

SEQ ID NO: 478895 - RNA, 22 nt, Human
agggccaccucucuggguuccc

SEQ ID NO: 478896 - RNA, 22 nt, Human
cuuagaugaagucacagaaccc

SEQ ID NO: 478897 - RNA, 22 nt, Human
uagaaacauauaggauggcagg

SEQ ID NO: 478898 - RNA, 22 nt, Human
ugucacaguuuguacuuuauag

SEQ ID NO: 478899 - RNA, 22 nt, Human
cucagagaaccuaagcggagga

SEQ ID NO: 478900 - RNA, 20 nt, Human
agaagcugauacugauggaa

SEQ ID NO: 478901 - RNA, 22 nt, Human
guguugaugacauuuuagaaac

SEQ ID NO: 478902 - RNA, 22 nt, Human
ucccuggcugggggcugccuug

SEQ ID NO: 478903 - RNA, 22 nt, Human
auuugcagagcucugaauuuug

SEQ ID NO: 478904 - RNA, 20 nt, Human
aggagaugauccagagucag

SEQ ID NO: 478905 - RNA, 22 nt, Human
ucagagugcagggaguagcagc

SEQ ID NO: 478906 - RNA, 22 nt, Human
augcuguguccuagugaaagaa

SEQ ID NO: 478907 - RNA, 22 nt, Human
cauggaaggcaaaagacacaga

SEQ ID NO: 478908 - RNA, 22 nt, Human
ccaggagcaccaggccugugcc

SEQ ID NO: 478909 - RNA, 22 nt, Human
uacauaguuccauuuacaggaa

SEQ ID NO: 478910 - RNA, 22 nt, Human
aagcccagcaucccugcaccag

SEQ ID NO: 478911 - RNA, 22 nt, Human
acuguacaugcaucuugucuau

SEQ ID NO: 478912 - RNA, 22 nt, Human
gcagggcaugggcccugucugc

SEQ ID NO: 478913 - RNA, 22 nt, Human
auucuuggcaaggagauuuaaa

SEQ ID NO: 478914 - RNA, 18 nt, Human
gcaggagauggguggggu

SEQ ID NO: 478915 - RNA, 22 nt, Human
cacugaaggacaguaggaaggg

SEQ ID NO: 478916 - RNA, 23 nt, Human
aguuuguaaagaaauauuugcac

SEQ ID NO: 478917 - RNA, 22 nt, Human
cacauugaaaugacccaauaau

SEQ ID NO: 478918 - RNA, 22 nt, Human
agagcuggauggucaagauggc

SEQ ID NO: 478919 - RNA, 22 nt, Human
uucagagauggaaggcagaaug

SEQ ID NO: 478920 - RNA, 22 nt, Human
gcaaaaacugcaauuacuuuug

SEQ ID NO: 478921 - RNA, 22 nt, Human
gcauccagucuuggcuccugga

SEQ ID NO: 478922 - RNA, 20 nt, Human
gugcauuucaccuguacugu

SEQ ID NO: 478923 - RNA, 22 nt, Human
ucacugcucucuaagcaucgcc

SEQ ID NO: 478924 - RNA, 22 nt, Human
guccagugacaaguagcuggcc

SEQ ID NO: 478925 - RNA, 20 nt, Human
aaaguguaagcauauaauua

SEQ ID NO: 478926 - RNA, 22 nt, Human
gccugcuggauguggccaggcc

SEQ ID NO: 478927 - RNA, 22 nt, Human
gccucugcaggugcgguuaucc

SEQ ID NO: 478928 - RNA, 22 nt, Human
agaaaucauucccaaacccaua

SEQ ID NO: 478929 - RNA, 22 nt, Human
agcagggcaugaauaaggguuu

SEQ ID NO: 478930 - RNA, 21 nt, Human
ggcuccugcuuugugaggggc

SEQ ID NO: 478931 - RNA, 22 nt, Human
aggccucagugaucaucaucag

SEQ ID NO: 478932 - RNA, 22 nt, Human
gugcaggguagcgacggcagga

SEQ ID NO: 478933 - RNA, 22 nt, Human
cuggcuuucucugugguguuca

SEQ ID NO: 478934 - RNA, 22 nt, Human
augcaguacauacaaacacuga

SEQ ID NO: 478935 - RNA, 22 nt, Human
agaaaaggauugauggaucaga

SEQ ID NO: 478936 - RNA, 22 nt, Human
gaugccucuuuuggcugaauua

SEQ ID NO: 478937 - RNA, 22 nt, Human
auguauguuaguguauuaucua

SEQ ID NO: 478938 - RNA, 22 nt, Human
aagguuaaauagguauuuucca

SEQ ID NO: 478939 - RNA, 22 nt, Human
ggcugagacuagagugaggcau

SEQ ID NO: 478940 - RNA, 16 nt, Human
ccacagggcaaggggc

SEQ ID NO: 478941 - RNA, 22 nt, Human
uugaagcaaauucugugcagua

SEQ ID NO: 478942 - RNA, 22 nt, Human
ucucagagggaaacaugaguga

SEQ ID NO: 478943 - RNA, 22 nt, Human
cagugccaugucugagccccua

SEQ ID NO: 478944 - RNA, 22 nt, Human
gagagcugggcuuugggugaag

SEQ ID NO: 478945 - RNA, 22 nt, Human
ugaagccauaggacagaggaua

SEQ ID NO: 478946 - RNA, 22 nt, Human
aagccaguguuuuugagaguug

SEQ ID NO: 478947 - RNA, 22 nt, Human
gcagagcagcaaauggaaagga

SEQ ID NO: 478948 - RNA, 21 nt, Human
ugucagcaacaauacuuucuc

SEQ ID NO: 478949 - RNA, 22 nt, Human
agaguguuuuucugucaaggac

SEQ ID NO: 478950 - RNA, 22 nt, Human
auggaaagggaagcaaggaaca

SEQ ID NO: 478951 - RNA, 22 nt, Human
acaucucaugaaugauaaauca

SEQ ID NO: 478952 - RNA, 22 nt, Human
acuggagcccguggaggcgcag

SEQ ID NO: 478953 - RNA, 22 nt, Human
auuagggaaacugacuugucuc

SEQ ID NO: 478954 - RNA, 22 nt, Human
uccugcagucugcacucugccu

SEQ ID NO: 478955 - RNA, 23 nt, Human
agcccagcagagaaccuaggucc

SEQ ID NO: 478956 - RNA, 22 nt, Human
ggcuuuauuuugcaugaaugcu

SEQ ID NO: 478957 - RNA, 22 nt, Human
gcuuccugauauucauacuguu

SEQ ID NO: 478958 - RNA, 22 nt, Human
aggaaggguucuuugugaaaga

SEQ ID NO: 478959 - RNA, 22 nt, Human
gggacagacccaugggccaggu

SEQ ID NO: 478960 - RNA, 22 nt, Human
gagagaggccuccauguacuga

SEQ ID NO: 478961 - RNA, 22 nt, Human
cagccaggagccucugcaacua

SEQ ID NO: 478962 - RNA, 22 nt, Human
aaaggcuaugagauagaagaua

SEQ ID NO: 478963 - RNA, 22 nt, Human
caggaaagguagucacaaugua

SEQ ID NO: 478964 - RNA, 22 nt, Human
aucaauucuuaggaaaauagcu

SEQ ID NO: 478965 - RNA, 22 nt, Human
ggccugagucacaucaggagag

SEQ ID NO: 478966 - RNA, 22 nt, Human
aauuagggaggacaaagguaca

SEQ ID NO: 478967 - RNA, 22 nt, Human
auuucccuccagggaaagcuua

SEQ ID NO: 478968 - RNA, 22 nt, Human
auucauuuagguauucacuuac

SEQ ID NO: 478969 - RNA, 19 nt, Human
ugaagcagcaaacucucag

SEQ ID NO: 478970 - RNA, 22 nt, Human
uaaggcacgcauaagagggggc

SEQ ID NO: 478971 - RNA, 22 nt, Human
uuggccacacucacuagagccc

SEQ ID NO: 478972 - RNA, 22 nt, Human
uuuaauuuguauuucuagaggg

SEQ ID NO: 478973 - RNA, 22 nt, Human
guccucuggaagaugaguucuu

SEQ ID NO: 478974 - RNA, 22 nt, Human
agcuggcccucgagagccaauu

SEQ ID NO: 478975 - RNA, 22 nt, Human
gcugguccacucccuggaggcu

SEQ ID NO: 478976 - RNA, 22 nt, Human
uugcagagugguugugaggauu

SEQ ID NO: 478977 - RNA, 22 nt, Human
ccagccagcugcccuuggggcc

SEQ ID NO: 478978 - RNA, 22 nt, Human
uggcugagaaguucugguggga

SEQ ID NO: 478979 - RNA, 22 nt, Human
gccagguggucuggcuccagag

SEQ ID NO: 478980 - RNA, 22 nt, Human
ucugggcacugcugagccugua

SEQ ID NO: 478981 - RNA, 22 nt, Human
gagucacauuaauuuaauuuua

SEQ ID NO: 478982 - RNA, 22 nt, Human
ccaaaguccauaguuuacauaa

SEQ ID NO: 478983 - RNA, 22 nt, Human
aagagcuggagcugcuacagga

SEQ ID NO: 478984 - RNA, 22 nt, Human
agucccagacuccaguuuucug

SEQ ID NO: 478985 - RNA, 22 nt, Human
cagcugccugcaacacaagcuu

SEQ ID NO: 478986 - RNA, 22 nt, Human
augauugcagcccuacagcugu

SEQ ID NO: 478987 - RNA, 19 nt, Human
ggaagagaggaaaggugga

SEQ ID NO: 478988 - RNA, 22 nt, Human
ccuguacaagagccaucuggau

SEQ ID NO: 478989 - RNA, 22 nt, Human
caggccugaguguggaagucuu

SEQ ID NO: 478990 - RNA, 22 nt, Human
agcagagccugggcuaggggug

SEQ ID NO: 478991 - RNA, 22 nt, Human
acaggcugcugagccauuugcu

SEQ ID NO: 478992 - RNA, 22 nt, Human
uauuuugucuucugcucaucac

SEQ ID NO: 478993 - RNA, 22 nt, Human
auaccuguguauccacaagcgu

SEQ ID NO: 478994 - RNA, 22 nt, Human
agcugcuaugacaacaccagcc

SEQ ID NO: 478995 - RNA, 22 nt, Human
ggugacugguuuaucuggcagu

SEQ ID NO: 478996 - RNA, 22 nt, Human
cucaggaguuggaggcuacagu

SEQ ID NO: 478997 - RNA, 22 nt, Human
ggcugggcuccgggagcaugcg

SEQ ID NO: 478998 - RNA, 22 nt, Human
ugccucugggugaccaaggagc

SEQ ID NO: 478999 - RNA, 22 nt, Human
gcagcugaauguccauugcugc

SEQ ID NO: 479000 - RNA, 20 nt, Human
augccucuaauuuugcaaac

SEQ ID NO: 479001 - RNA, 22 nt, Human
caaaguuuggcucucaugacau

SEQ ID NO: 479002 - RNA, 22 nt, Human
cuacagguaugugcaugacauc

SEQ ID NO: 479003 - RNA, 23 nt, Human
gugagcagcccacuaggaaugcc

SEQ ID NO: 479004 - RNA, 22 nt, Human
cuucuuaaugacagauuaaaau

SEQ ID NO: 479005 - RNA, 22 nt, Human
ucccuggcuguguucaggugcg

SEQ ID NO: 479006 - RNA, 22 nt, Human
gagccaaggguugccauggaga

SEQ ID NO: 479007 - RNA, 22 nt, Human
acagagcuucccagccugagca

SEQ ID NO: 479008 - RNA, 22 nt, Human
aacucuauuuacccuacuaaac

SEQ ID NO: 479009 - RNA, 22 nt, Human
ucauugcagugauguuguaugu

SEQ ID NO: 479010 - RNA, 18 nt, Human
gggcaucauucacaaagu

SEQ ID NO: 479011 - RNA, 22 nt, Human
agcagccauuuaaaaugaauug

SEQ ID NO: 479012 - RNA, 22 nt, Human
gcagcuuucuuuuugcaugucu

SEQ ID NO: 479013 - RNA, 21 nt, Human
uggcucugaaagagugcugca

SEQ ID NO: 479014 - RNA, 22 nt, Human
ccuggcagcgccgaagcuggcc

SEQ ID NO: 479015 - RNA, 22 nt, Human
cacaggagaacccacagauucu

SEQ ID NO: 479016 - RNA, 22 nt, Human
cccugcagaucagugagaacuu

SEQ ID NO: 479017 - RNA, 20 nt, Human
uucauucauuccacaacuuc

SEQ ID NO: 479018 - RNA, 22 nt, Human
aaauauguaagauuagcacuag

SEQ ID NO: 479019 - RNA, 22 nt, Human
uuuggaaaguguacaaauuuga

SEQ ID NO: 479020 - RNA, 22 nt, Human
gugaggugguacaauauuaacu

SEQ ID NO: 479021 - RNA, 18 nt, Human
cagggccccagaauuauc

SEQ ID NO: 479022 - RNA, 22 nt, Human
ggaagccaggcugggggaucug

SEQ ID NO: 479023 - RNA, 22 nt, Human
aucaguuuggaacauucaggcc

SEQ ID NO: 479024 - RNA, 22 nt, Human
uggaggaaaaaaccaggcagag

SEQ ID NO: 479025 - RNA, 22 nt, Human
ucagaggugguaaaggacagca

SEQ ID NO: 479026 - RNA, 22 nt, Human
aggagcuggguuccuuuggugg

SEQ ID NO: 479027 - RNA, 22 nt, Human
aaaggucagcugccaucguucu

SEQ ID NO: 479028 - RNA, 22 nt, Human
acagagcuuaauucaggagcuu

SEQ ID NO: 479029 - RNA, 22 nt, Human
agggagcuguggucagcucagu

SEQ ID NO: 479030 - RNA, 20 nt, Human
caggaugauuggacacgaug

SEQ ID NO: 479031 - RNA, 20 nt, Human
uggcuccucuuggcuguggc

SEQ ID NO: 479032 - RNA, 22 nt, Human
cugagcagcaacccagagccuc

SEQ ID NO: 479033 - RNA, 17 nt, Human
ggagagugggaauggcc

SEQ ID NO: 479034 - RNA, 22 nt, Human
agggcaguucagccacaggcuc

SEQ ID NO: 479035 - RNA, 22 nt, Human
acaaagugaauugcaucgaguu

SEQ ID NO: 479036 - RNA, 22 nt, Human
caguggccugagccaggcuucc

SEQ ID NO: 479037 - RNA, 22 nt, Human
gacucugcuacaggccgagguu

SEQ ID NO: 479038 - RNA, 22 nt, Human
gcaaggcuuugugaauuuuaaa

SEQ ID NO: 479039 - RNA, 22 nt, Human
agcccuagagcuggaggucagu

SEQ ID NO: 479040 - RNA, 22 nt, Human
aguuuaugaaacacagauuuga

SEQ ID NO: 479041 - RNA, 22 nt, Human
agagggaucacccuguuucugg

SEQ ID NO: 479042 - RNA, 22 nt, Human
ugauuuccugugcgcccuuagg

SEQ ID NO: 479043 - RNA, 19 nt, Human
ugucacugucauggcccag

SEQ ID NO: 479044 - RNA, 22 nt, Human
acauacauaugacaacuuuccu

SEQ ID NO: 479045 - RNA, 22 nt, Human
agagugaaguuuuugaaaguga

SEQ ID NO: 479046 - RNA, 20 nt, Human
uauaacaguguugggugugu

SEQ ID NO: 479047 - RNA, 22 nt, Human
cugggaggacaacuuggagcuc

SEQ ID NO: 479048 - RNA, 22 nt, Human
uacauggugguggcacuugacu

SEQ ID NO: 479049 - RNA, 22 nt, Human
cagcuuuaggacucauaauaaa

SEQ ID NO: 479050 - RNA, 22 nt, Human
ugugcuucugcagagacuauuu

SEQ ID NO: 479051 - RNA, 22 nt, Human
ugcagcuguaacagaggccuca

SEQ ID NO: 479052 - RNA, 22 nt, Human
cagagguagaaggcaugcagug

SEQ ID NO: 479053 - RNA, 22 nt, Human
uuucauaaacaguagaagacua

SEQ ID NO: 479054 - RNA, 22 nt, Human
gggagccacagugaggugcaug

SEQ ID NO: 479055 - RNA, 22 nt, Human
uuuauauccaucuuugaaguaa

SEQ ID NO: 479056 - RNA, 22 nt, Human
ccugagugccaugagagcaccc

SEQ ID NO: 479057 - RNA, 21 nt, Human
ggagggcagcccagacuggcu

SEQ ID NO: 479058 - RNA, 22 nt, Human
uagucucuggagacucuagggg

SEQ ID NO: 479059 - RNA, 21 nt, Human
uaaagaagaugaaugugauca

SEQ ID NO: 479060 - RNA, 22 nt, Human
cagggcuguuagcugcugcucu

SEQ ID NO: 479061 - RNA, 18 nt, Human
ggagagugacagagucgu

SEQ ID NO: 479062 - RNA, 22 nt, Human
acauuugucuucuuucagauua

SEQ ID NO: 479063 - RNA, 22 nt, Human
ucucagggugaggaaagaauuu

SEQ ID NO: 479064 - RNA, 23 nt, Human
cagggcccugcucaauuucucca

SEQ ID NO: 479065 - RNA, 22 nt, Human
uugacaauugggagauauaaag

SEQ ID NO: 479066 - RNA, 18 nt, Human
uggcagcaggaagccauu

SEQ ID NO: 479067 - RNA, 22 nt, Human
gcagagugauggaaugugggug

SEQ ID NO: 479068 - RNA, 22 nt, Human
gugggcagacagugcuuugcag

SEQ ID NO: 479069 - RNA, 22 nt, Human
uagacagauuucuuguuagaca

SEQ ID NO: 479070 - RNA, 22 nt, Human
gagcugccaguguaugaauucu

SEQ ID NO: 479071 - RNA, 22 nt, Human
aaacuguaggagggaaaggaag

SEQ ID NO: 479072 - RNA, 20 nt, Human
gggcuggcgcauggggaaag

SEQ ID NO: 479073 - RNA, 22 nt, Human
agaagugccgaaaggaagacag

SEQ ID NO: 479074 - RNA, 22 nt, Human
cucuccucagaacaggcccucu

SEQ ID NO: 479075 - RNA, 20 nt, Human
accaggagauggaggcaggg

SEQ ID NO: 479076 - RNA, 22 nt, Human
cagcuuuggcccagucgggagg

SEQ ID NO: 479077 - RNA, 22 nt, Human
gcugcccugucugcagcaggac

SEQ ID NO: 479078 - RNA, 22 nt, Human
agaugauggccauguccucucc

SEQ ID NO: 479079 - RNA, 21 nt, Human
gagacagcccagugccagggc

SEQ ID NO: 479080 - RNA, 17 nt, Human
cagugcagagcccuuuc

SEQ ID NO: 479081 - RNA, 22 nt, Human
uaaggcacuucaauguuuagaa

SEQ ID NO: 479082 - RNA, 22 nt, Human
cucuugaagcaggggccaguuc

SEQ ID NO: 479083 - RNA, 22 nt, Human
uuugcauuguaauauuuaguuc

SEQ ID NO: 479084 - RNA, 22 nt, Human
uccuucaggccucauucucaua

SEQ ID NO: 479085 - RNA, 22 nt, Human
guguccuuauuucugucucuca

SEQ ID NO: 479086 - RNA, 22 nt, Human
uccagagggcgauggcuggggg

SEQ ID NO: 479087 - RNA, 22 nt, Human
aggcugaggcagguggaucacc

SEQ ID NO: 479088 - RNA, 22 nt, Human
gcagcaggcuuuucauaccuug

SEQ ID NO: 479089 - RNA, 22 nt, Human
uggcucugccacuaacuuggua

SEQ ID NO: 479090 - RNA, 22 nt, Human
aagggcaggcacccacccucac

SEQ ID NO: 479091 - RNA, 22 nt, Human
ugucauugaggaaaacuaggug

SEQ ID NO: 479092 - RNA, 22 nt, Human
uggggacacagagguucguugg

SEQ ID NO: 479093 - RNA, 22 nt, Human
cugccagcacugccuccugagg

SEQ ID NO: 479094 - RNA, 22 nt, Human
aggcaggugcuuaugacuugcu

SEQ ID NO: 479095 - RNA, 22 nt, Human
uuaugcuaguauaguccuuaga

SEQ ID NO: 479096 - RNA, 22 nt, Human
accaggcuggagugcaguggcg

SEQ ID NO: 479097 - RNA, 22 nt, Human
agcagcuuacauguggccuauc

SEQ ID NO: 479098 - RNA, 22 nt, Human
uugaagcagagaaauacuugaa

SEQ ID NO: 479099 - RNA, 22 nt, Human
acccaggagguggaggcugcag

SEQ ID NO: 479100 - RNA, 22 nt, Human
agggaagagcuugcaagaaacc

SEQ ID NO: 479101 - RNA, 22 nt, Human
agaagccaaucagcucucugcu

SEQ ID NO: 479102 - RNA, 22 nt, Human
caggugggccaugaaaaaugac

SEQ ID NO: 479103 - RNA, 22 nt, Human
uugcagcuucuaccacuguuuc

SEQ ID NO: 479104 - RNA, 22 nt, Human
uuuacaaguuuacagaaugaug

SEQ ID NO: 479105 - RNA, 22 nt, Human
agaaaucucaguaucucaggga

SEQ ID NO: 479106 - RNA, 22 nt, Human
cccugcagccuugcaugccuuc

SEQ ID NO: 479107 - RNA, 22 nt, Human
cauugacaucaggcuuggccaa

SEQ ID NO: 479108 - RNA, 22 nt, Human
aaagacuagcauuuauauguac

SEQ ID NO: 479109 - RNA, 23 nt, Human
gccugggacugguagugugaccu

SEQ ID NO: 479110 - RNA, 22 nt, Human
gugaagagcuguugcagagauu

SEQ ID NO: 479111 - RNA, 23 nt, Human
agaauuguaaauagaauauaccu

SEQ ID NO: 479112 - RNA, 22 nt, Human
gccugcagacguguuuuccuca

SEQ ID NO: 479113 - RNA, 22 nt, Human
uuugucauaucacacaauuuug

SEQ ID NO: 479114 - RNA, 23 nt, Human
agggcaugaagcagaggacgugg

SEQ ID NO: 479115 - RNA, 20 nt, Human
ccugggguacacuggcaugu

SEQ ID NO: 479116 - RNA, 22 nt, Human
uguggcaggcaagauguacaga

SEQ ID NO: 479117 - RNA, 22 nt, Human
uaggcuggaggaagcagugccu

SEQ ID NO: 479118 - RNA, 22 nt, Human
cagggcagagggaaacuccuuu

SEQ ID NO: 479119 - RNA, 22 nt, Human
auuucuacugugagaaacauga

SEQ ID NO: 479120 - RNA, 18 nt, Human
agaguguucucagugaaa

SEQ ID NO: 479121 - RNA, 22 nt, Human
acauuucuuucuauucaguagc

SEQ ID NO: 479122 - RNA, 22 nt, Human
uuucuagaggcuccaggggagu

SEQ ID NO: 479123 - RNA, 22 nt, Human
uugcugaaaacaguggguauug

SEQ ID NO: 479124 - RNA, 22 nt, Human
ggaggaagcacacggcuuguau

SEQ ID NO: 479125 - RNA, 22 nt, Human
gaagaaagauuggcaugcuuca

SEQ ID NO: 479126 - RNA, 22 nt, Human
uuagggacagcucuguagguga

SEQ ID NO: 479127 - RNA, 22 nt, Human
guggaaguagauuugagaaggu

SEQ ID NO: 479128 - RNA, 22 nt, Human
ggcagaagaaaggcuaagucuc

SEQ ID NO: 479129 - RNA, 22 nt, Human
guaaaugugcuucuuuuaacuu

SEQ ID NO: 479130 - RNA, 22 nt, Human
aaauuuaagaagugugugcgug

SEQ ID NO: 479131 - RNA, 22 nt, Human
ggggcagggagguuaucgccga

SEQ ID NO: 479132 - RNA, 22 nt, Human
gugucacaagagcccaggaaac

SEQ ID NO: 479133 - RNA, 22 nt, Human
acccaggagccgugagagguua

SEQ ID NO: 479134 - RNA, 22 nt, Human
aagauuucagaguuugggggaa

SEQ ID NO: 479135 - RNA, 22 nt, Human
ucaggauggcuucugcaucaaa

SEQ ID NO: 479136 - RNA, 22 nt, Human
gucccagggagguucagggcuu

SEQ ID NO: 479137 - RNA, 22 nt, Human
acacugugagcugaagggcugc

SEQ ID NO: 479138 - RNA, 22 nt, Human
uuccaggggcagcagugauggu

SEQ ID NO: 479139 - RNA, 22 nt, Human
agucaauuaucucuaggucauc

SEQ ID NO: 479140 - RNA, 22 nt, Human
cugcuucuccaaaguaggacuu

SEQ ID NO: 479141 - RNA, 22 nt, Human
ccagcuugaagaugugcugguu

SEQ ID NO: 479142 - RNA, 18 nt, Human
ccucaggggaccuggcag

SEQ ID NO: 479143 - RNA, 22 nt, Human
ugaggcucagaagugccaagug

SEQ ID NO: 479144 - RNA, 22 nt, Human
uuucaaauaccauaaaccuaau

SEQ ID NO: 479145 - RNA, 22 nt, Human
gagcagcugagcuggaaugaga

SEQ ID NO: 479146 - RNA, 22 nt, Human
acugugugggccgcucacuggg

SEQ ID NO: 479147 - RNA, 22 nt, Human
ugaagcagauggucuggucauu

SEQ ID NO: 479148 - RNA, 17 nt, Human
ccucacagggaccagac

SEQ ID NO: 479149 - RNA, 22 nt, Human
agaaauguacgauguuaugcag

SEQ ID NO: 479150 - RNA, 22 nt, Human
uccaggagaggccugaccaggu

SEQ ID NO: 479151 - RNA, 22 nt, Human
ucucagagaaaugugucaccau

SEQ ID NO: 479152 - RNA, 22 nt, Human
ucaggaguaaagacagaguucc

SEQ ID NO: 479153 - RNA, 22 nt, Human
cugccugugccaccgccucauu

SEQ ID NO: 479154 - RNA, 22 nt, Human
ugugccuacugauagagccaag

SEQ ID NO: 479155 - RNA, 20 nt, Human
guugaaaguaauaugaugcu

SEQ ID NO: 479156 - RNA, 17 nt, Human
agccccucagcgucacc

SEQ ID NO: 479157 - RNA, 22 nt, Human
ugaucaguguugguucuaucua

SEQ ID NO: 479158 - RNA, 22 nt, Human
acauucaugucccacuucuagc

SEQ ID NO: 479159 - RNA, 20 nt, Human
gggcagccucgggagugggu

SEQ ID NO: 479160 - RNA, 22 nt, Human
agggugccugcugcagguucag

SEQ ID NO: 479161 - RNA, 22 nt, Human
acuccagggcuccaucccuugu

SEQ ID NO: 479162 - RNA, 22 nt, Human
ucagucuucccuccagugcaac

SEQ ID NO: 479163 - RNA, 22 nt, Human
uucauugugaacacauucugcc

SEQ ID NO: 479164 - RNA, 22 nt, Human
uugaccauaccuccaggcaguu

SEQ ID NO: 479165 - RNA, 22 nt, Human
aaggcaguaggaucuuccacag

SEQ ID NO: 479166 - RNA, 22 nt, Human
aagggcuggccacauucugggu

SEQ ID NO: 479167 - RNA, 22 nt, Human
gaaggccacaaaaaaugucaua

SEQ ID NO: 479168 - RNA, 22 nt, Human
cccuggggcugagggauggccg

SEQ ID NO: 479169 - RNA, 22 nt, Human
aaagccagggacagugugcaug

SEQ ID NO: 479170 - RNA, 22 nt, Human
uagcuuuaagaugagaugugga

SEQ ID NO: 479171 - RNA, 22 nt, Human
ucaauuaugccauugcaauauu

SEQ ID NO: 479172 - RNA, 19 nt, Human
cuggcagccugucuguguc

SEQ ID NO: 479173 - RNA, 22 nt, Human
aggcucaggcaggaauggcgga

SEQ ID NO: 479174 - RNA, 22 nt, Human
ccugagggaggguauaggcugu

SEQ ID NO: 479175 - RNA, 21 nt, Human
ugcuucucuagaucaacuacu

SEQ ID NO: 479176 - RNA, 17 nt, Human
ugcauuguuggaaauuu

SEQ ID NO: 479177 - RNA, 22 nt, Human
agaggugacauaggagaggcuc

SEQ ID NO: 479178 - RNA, 22 nt, Human
cagaagcauuccagcaaauagu

SEQ ID NO: 479179 - RNA, 22 nt, Human
aguguccccuccaagggccugg

SEQ ID NO: 479180 - RNA, 22 nt, Human
caggaaugacugcagauggggc

SEQ ID NO: 479181 - RNA, 18 nt, Human
cucucugggugaggacaa

SEQ ID NO: 479182 - RNA, 22 nt, Human
ugaaggcagcaugcacacuagu

SEQ ID NO: 479183 - RNA, 22 nt, Human
ugcauuguugaccaguugugca

SEQ ID NO: 479184 - RNA, 21 nt, Human
ggccugaguauaggacaggcc

SEQ ID NO: 479185 - RNA, 22 nt, Human
agugaccaacaaugcugagaag

SEQ ID NO: 479186 - RNA, 22 nt, Human
ucccggcgcugggagguggguc

SEQ ID NO: 479187 - RNA, 22 nt, Human
uguacauuuagagcucaauaga

SEQ ID NO: 479188 - RNA, 22 nt, Human
auuucugauaaacguaagcugc

SEQ ID NO: 479189 - RNA, 21 nt, Human
auggagccuaagaguggaggu

SEQ ID NO: 479190 - RNA, 22 nt, Human
uggcagcugauuagauggugcc

SEQ ID NO: 479191 - RNA, 22 nt, Human
cugcuguguuucacaccucugg

SEQ ID NO: 479192 - RNA, 22 nt, Human
uguuugcucugacuaucuugcg

SEQ ID NO: 479193 - RNA, 22 nt, Human
gagggcugauaacaggaauaca

SEQ ID NO: 479194 - RNA, 22 nt, Human
auguccuucuccucuuaccugc

SEQ ID NO: 479195 - RNA, 22 nt, Human
uuuguacauauauaaaaucugu

SEQ ID NO: 479196 - RNA, 22 nt, Human
gguccccagcaguggcugcuuc

SEQ ID NO: 479197 - RNA, 22 nt, Human
gccugagcuacuagggagucug

SEQ ID NO: 479198 - RNA, 22 nt, Human
aggauccuuuggccacuucuua

SEQ ID NO: 479199 - RNA, 22 nt, Human
cccagcaggucggugcugccug

SEQ ID NO: 479200 - RNA, 22 nt, Human
auacauuagaaucugguacuca

SEQ ID NO: 479201 - RNA, 22 nt, Human
guggccuggaguuugauguagg

SEQ ID NO: 479202 - RNA, 23 nt, Human
uggggagaguuacccuggaagcg

SEQ ID NO: 479203 - RNA, 22 nt, Human
guuauaaaggugauaaugguca

SEQ ID NO: 479204 - RNA, 22 nt, Human
aaugcacaaaaauuguauguaa

SEQ ID NO: 479205 - RNA, 22 nt, Human
acagaaauaacuuuuuauguuu

SEQ ID NO: 479206 - RNA, 22 nt, Human
gaauuucuggacccuuugagaa

SEQ ID NO: 479207 - RNA, 22 nt, Human
uuugacaggacuaacauauggc

SEQ ID NO: 479208 - RNA, 19 nt, Human
auuucaagagguuuauugg

SEQ ID NO: 479209 - RNA, 22 nt, Human
ggaaaguggugguggaaagagg

SEQ ID NO: 479210 - RNA, 22 nt, Human
ccagugcccagucucccugguc

SEQ ID NO: 479211 - RNA, 22 nt, Human
cagcaggacccaggaauccugc

SEQ ID NO: 479212 - RNA, 22 nt, Human
uggcucagauaauucaaggggc

SEQ ID NO: 479213 - RNA, 22 nt, Human
cuggagugauacucagaaugug

SEQ ID NO: 479214 - RNA, 22 nt, Human
ugaaugauacagaauuauguag

SEQ ID NO: 479215 - RNA, 22 nt, Human
uggcugaguuacgaacagagca

SEQ ID NO: 479216 - RNA, 22 nt, Human
ggcagccagagggcagcuggau

SEQ ID NO: 479217 - RNA, 22 nt, Human
agcaggaggguuuuguagaguc

SEQ ID NO: 479218 - RNA, 22 nt, Human
guauuaggugguggaauuguag

SEQ ID NO: 479219 - RNA, 22 nt, Human
uccagggaccucccugagagcu

SEQ ID NO: 479220 - RNA, 22 nt, Human
gcccagcacuaaaagcuuugcu

SEQ ID NO: 479221 - RNA, 22 nt, Human
cugguuuagcuguaagguuccc

SEQ ID NO: 479222 - RNA, 22 nt, Human
gaauacaaauaauaccaaggug

SEQ ID NO: 479223 - RNA, 22 nt, Human
uccucaggaugugggguagaau

SEQ ID NO: 479224 - RNA, 22 nt, Human
aaucagaauuuauugaaucuuu

SEQ ID NO: 479225 - RNA, 22 nt, Human
uaguaucuuucuauauuuccca

SEQ ID NO: 479226 - RNA, 23 nt, Human
cucugcaggagagugggcagggc

SEQ ID NO: 479227 - RNA, 22 nt, Human
cagcuguggagggaggaaaugc

SEQ ID NO: 479228 - RNA, 22 nt, Human
gcagaagcccggucagcgcacg

SEQ ID NO: 479229 - RNA, 22 nt, Human
cucccaagauaaauaaggcagu

SEQ ID NO: 479230 - RNA, 23 nt, Human
aagcugccagucugaagccuggg

SEQ ID NO: 479231 - RNA, 22 nt, Human
gccuaggaguggggauggcggu

SEQ ID NO: 479232 - RNA, 22 nt, Human
gaaaauguuuccuguuauuugc

SEQ ID NO: 479233 - RNA, 22 nt, Human
ccagcuuuccaggguugacugg

SEQ ID NO: 479234 - RNA, 22 nt, Human
uauuuauaaucugccaaagaga

SEQ ID NO: 479235 - RNA, 22 nt, Human
uaguuaggguucugcagagaca

SEQ ID NO: 479236 - RNA, 22 nt, Human
uggcugccuagucccucagccu

SEQ ID NO: 479237 - RNA, 22 nt, Human
gccuguguggaugcgccggugc

SEQ ID NO: 479238 - RNA, 22 nt, Human
aggaagccuggggcugcccucg

SEQ ID NO: 479239 - RNA, 22 nt, Human
gccagguggcugagcagcugca

SEQ ID NO: 479240 - RNA, 22 nt, Human
agguaacacuacuuaguauacu

SEQ ID NO: 479241 - RNA, 19 nt, Human
uguuuuguuaaagcagucc

SEQ ID NO: 479242 - RNA, 22 nt, Human
ugcugggcuugaaagcugcuaa

SEQ ID NO: 479243 - RNA, 22 nt, Human
agggaggagaauggacuccuuc

SEQ ID NO: 479244 - RNA, 22 nt, Human
aagugacaccucuucccuuucc

SEQ ID NO: 479245 - RNA, 22 nt, Human
gcaguaggagaagaggaugcuu

SEQ ID NO: 479246 - RNA, 22 nt, Human
agcuuuaucacaauauuggcua

SEQ ID NO: 479247 - RNA, 22 nt, Human
gcuguggcuguacagagaccau

SEQ ID NO: 479248 - RNA, 22 nt, Human
agggcagcaaugcagcugcugc

SEQ ID NO: 479249 - RNA, 22 nt, Human
cuucaagaagacagcagagcau

SEQ ID NO: 479250 - RNA, 22 nt, Human
cagcagugugcaggugugcugg

SEQ ID NO: 479251 - RNA, 22 nt, Human
gugcagggagcccagaaggucc

SEQ ID NO: 479252 - RNA, 22 nt, Human
uucuucaauuauuggaaagaaa

SEQ ID NO: 479253 - RNA, 22 nt, Human
uccuggcccgaucccugugaag

SEQ ID NO: 479254 - RNA, 22 nt, Human
cagggcuguggaaaacuggugc

SEQ ID NO: 479255 - RNA, 22 nt, Human
accgaaggaaacuggaaccguu

SEQ ID NO: 479256 - RNA, 21 nt, Human
acagauuuuauaucucugcug

SEQ ID NO: 479257 - RNA, 21 nt, Human
gagcucucaggcaagaagcag

SEQ ID NO: 479258 - RNA, 22 nt, Human
ugcagggauuagaggccgggga

SEQ ID NO: 479259 - RNA, 22 nt, Human
agggcagagagaugaaugggau

SEQ ID NO: 479260 - RNA, 22 nt, Human
aucugguuuggggauccuugug

SEQ ID NO: 479261 - RNA, 22 nt, Human
gauucuuacuucuaagcaagcu

SEQ ID NO: 479262 - RNA, 22 nt, Human
uccugccucuuuucuuauucca

SEQ ID NO: 479263 - RNA, 22 nt, Human
gauuucaaggauguuagaggug

SEQ ID NO: 479264 - RNA, 22 nt, Human
uggaggcauuuuagguugucac

SEQ ID NO: 479265 - RNA, 22 nt, Human
ugcucccaggcauucucuguug

SEQ ID NO: 479266 - RNA, 22 nt, Human
ggcacugagcugccuuggggca

SEQ ID NO: 479267 - RNA, 22 nt, Human
aaggcuaugaucuuuuucauga

SEQ ID NO: 479268 - RNA, 19 nt, Human
ccagucccauacaggagau

SEQ ID NO: 479269 - RNA, 22 nt, Human
guucacaucacuucacugaacc

SEQ ID NO: 479270 - RNA, 22 nt, Human
aaagacugcaaaaacgcacaga

SEQ ID NO: 479271 - RNA, 22 nt, Human
agcagccagagaaugaugcagu

SEQ ID NO: 479272 - RNA, 22 nt, Human
ucucagagaggggccgggccuu

SEQ ID NO: 479273 - RNA, 22 nt, Human
uaucuacuccucuuucagaugc

SEQ ID NO: 479274 - RNA, 22 nt, Human
uucaggauucucucccauuuac

SEQ ID NO: 479275 - RNA, 22 nt, Human
uuccucucucuugccagaaugu

SEQ ID NO: 479276 - RNA, 22 nt, Human
ggcuuccuggggccuccugcaa

SEQ ID NO: 479277 - RNA, 22 nt, Human
cuguggcauugccgaggcuggc

SEQ ID NO: 479278 - RNA, 20 nt, Human
ucccaagggcugagaggauc

SEQ ID NO: 479279 - RNA, 22 nt, Human
uagaaauguuagauguauugag

SEQ ID NO: 479280 - RNA, 22 nt, Human
augucuuucuuauggucuguug

SEQ ID NO: 479281 - RNA, 23 nt, Human
acagagguccaaacaguauaagc

SEQ ID NO: 479282 - RNA, 22 nt, Human
ucagagugaggcccagcaaucu

SEQ ID NO: 479283 - RNA, 22 nt, Human
cauuuauugaguggccacagug

SEQ ID NO: 479284 - RNA, 17 nt, Human
aaguccagccugcagcu

SEQ ID NO: 479285 - RNA, 22 nt, Human
cagguggggcgcccucaggcag

SEQ ID NO: 479286 - RNA, 22 nt, Human
agcaggguuccaggaguugcag

SEQ ID NO: 479287 - RNA, 21 nt, Human
agagccugagaucuuccagca

SEQ ID NO: 479288 - RNA, 19 nt, Human
gcugugggacagcagggug

SEQ ID NO: 479289 - RNA, 22 nt, Human
ugagagucucagaccuccuggu

SEQ ID NO: 479290 - RNA, 22 nt, Human
ugcugugggcaguacauaagcu

SEQ ID NO: 479291 - RNA, 22 nt, Human
gaaaugcaggcuuggauucagc

SEQ ID NO: 479292 - RNA, 22 nt, Human
gaggccacgguuuuccuugggg

SEQ ID NO: 479293 - RNA, 22 nt, Human
agggcaugcuggaggagagaca

SEQ ID NO: 479294 - RNA, 22 nt, Human
augcuucagugcuaccuucaaa

SEQ ID NO: 479295 - RNA, 22 nt, Human
aagggcugccagggggugccag

SEQ ID NO: 479296 - RNA, 22 nt, Human
agcagcugagccccagcuguga

SEQ ID NO: 479297 - RNA, 22 nt, Human
ugaggcaggaaguuauauaaug

SEQ ID NO: 479298 - RNA, 22 nt, Human
acagcugggugcugcucagagc

SEQ ID NO: 479299 - RNA, 22 nt, Human
auguccagagccggccugcuga

SEQ ID NO: 479300 - RNA, 20 nt, Human
agagccuugaggaagaugau

SEQ ID NO: 479301 - RNA, 22 nt, Human
ggcucugcuggauugaggccag

SEQ ID NO: 479302 - RNA, 22 nt, Human
cugcugagcaucagggcugccc

SEQ ID NO: 479303 - RNA, 19 nt, Human
agcauuuggaauucuacac

SEQ ID NO: 479304 - RNA, 22 nt, Human
uggcagcuccuggggccagcac

SEQ ID NO: 479305 - RNA, 22 nt, Human
uaauuuacuugcaaauaacaau

SEQ ID NO: 479306 - RNA, 22 nt, Human
ucccagaggaaauggcagcuga

SEQ ID NO: 479307 - RNA, 22 nt, Human
acucaggaaauugagauaaugg

SEQ ID NO: 479308 - RNA, 22 nt, Human
aagagcugcccaaggugaacag

SEQ ID NO: 479309 - RNA, 22 nt, Human
auaaacaguagagaaagguggu

SEQ ID NO: 479310 - RNA, 22 nt, Human
cugaggccagcugcagagcucu

SEQ ID NO: 479311 - RNA, 22 nt, Human
cccaaggccucuccuuggcuug

SEQ ID NO: 479312 - RNA, 22 nt, Human
cacucacuuauuucuaacagaa

SEQ ID NO: 479313 - RNA, 22 nt, Human
gccugcagggcccuuguggguc

SEQ ID NO: 479314 - RNA, 22 nt, Human
aguuauauuccauagauucaga

SEQ ID NO: 479315 - RNA, 22 nt, Human
cucaggccauucuuccagcugc

SEQ ID NO: 479316 - RNA, 23 nt, Human
ugcuguccaacagacuggccaug

SEQ ID NO: 479317 - RNA, 21 nt, Human
ugggaccuagcuuugcacagg

SEQ ID NO: 479318 - RNA, 22 nt, Human
uaauuuaauuccauggauucua

SEQ ID NO: 479319 - RNA, 22 nt, Human
gguuugcaugugauguugggca

SEQ ID NO: 479320 - RNA, 22 nt, Human
gcagcugagcgugaggaagagu

SEQ ID NO: 479321 - RNA, 22 nt, Human
uaccugcagcgggaauccauua

SEQ ID NO: 479322 - RNA, 22 nt, Human
ggguggaggagaacaggcccca

SEQ ID NO: 479323 - RNA, 22 nt, Human
uccuuggcuuucuggagcuucu

SEQ ID NO: 479324 - RNA, 22 nt, Human
agcauuuaguuaguaaauguuu

SEQ ID NO: 479325 - RNA, 22 nt, Human
aguggcagccgagcaggagaug

SEQ ID NO: 479326 - RNA, 23 nt, Human
acacaauagaguacuauucagcc

SEQ ID NO: 479327 - RNA, 22 nt, Human
caagauggacauaaggagagaa

SEQ ID NO: 479328 - RNA, 22 nt, Human
uuugaaagggaaauaaacuccu

SEQ ID NO: 479329 - RNA, 22 nt, Human
augccuggacugacaugcacug

SEQ ID NO: 479330 - RNA, 22 nt, Human
uccaggcauuccagccauucca

SEQ ID NO: 479331 - RNA, 22 nt, Human
cacugccuggaaggagagacau

SEQ ID NO: 479332 - RNA, 22 nt, Human
uccagggcugacuugggagagg

SEQ ID NO: 479333 - RNA, 22 nt, Human
ccuggccugcucggcucuuaag

SEQ ID NO: 479334 - RNA, 22 nt, Human
aggcacuguggguguggccgga

SEQ ID NO: 479335 - RNA, 22 nt, Human
uccagggagauacuggcugcca

SEQ ID NO: 479336 - RNA, 22 nt, Human
ucuggaguccagauccauuugg

SEQ ID NO: 479337 - RNA, 22 nt, Human
aguggcaguggggcagggcccu

SEQ ID NO: 479338 - RNA, 19 nt, Human
accugcaguaauaauuccu

SEQ ID NO: 479339 - RNA, 22 nt, Human
gcaugcugcaccagagccucuc

SEQ ID NO: 479340 - RNA, 22 nt, Human
uuugaaagagcugauacaugaa

SEQ ID NO: 479341 - RNA, 22 nt, Human
cagagugaacagugggaugugc

SEQ ID NO: 479342 - RNA, 22 nt, Human
ccagucuggcaggagggggaac

SEQ ID NO: 479343 - RNA, 22 nt, Human
cugggccagcaacugcaaugga

SEQ ID NO: 479344 - RNA, 22 nt, Human
aauggccagcaacaggagugaa

SEQ ID NO: 479345 - RNA, 22 nt, Human
ugcagggcaucuuugaagugug

SEQ ID NO: 479346 - RNA, 22 nt, Human
uacauauacugagugauuugcu

SEQ ID NO: 479347 - RNA, 22 nt, Human
ggugggcacccgagacuggauc

SEQ ID NO: 479348 - RNA, 22 nt, Human
aggaccaacauagcagcagugg

SEQ ID NO: 479349 - RNA, 22 nt, Human
ucaauucugguccucaggaacu

SEQ ID NO: 479350 - RNA, 23 nt, Human
uuugcaaauuggacacaaccaca

SEQ ID NO: 479351 - RNA, 22 nt, Human
uggugccuugggccuacagcgc

SEQ ID NO: 479352 - RNA, 22 nt, Human
uuaauacagucuccagaaguaa

SEQ ID NO: 479353 - RNA, 22 nt, Human
auuauucaacacuugagaaauu

SEQ ID NO: 479354 - RNA, 22 nt, Human
augcugugauuguagaaauauu

SEQ ID NO: 479355 - RNA, 19 nt, Human
agaaucaggucaggugaca

SEQ ID NO: 479356 - RNA, 22 nt, Human
cacaguccuacagagaucagag

SEQ ID NO: 479357 - RNA, 21 nt, Human
cuguccaguaauuccuggcac

SEQ ID NO: 479358 - RNA, 22 nt, Human
cacugcuuaguugguaaaugug

SEQ ID NO: 479359 - RNA, 22 nt, Human
cuggccugagaaugcuacccuu

SEQ ID NO: 479360 - RNA, 22 nt, Human
aaaagaggagugguuuaugaca

SEQ ID NO: 479361 - RNA, 22 nt, Human
gcuguccucuuggacucagggc

SEQ ID NO: 479362 - RNA, 22 nt, Human
aggagccaagauggggcaagua

SEQ ID NO: 479363 - RNA, 22 nt, Human
acagcagcuggguucccaccau

SEQ ID NO: 479364 - RNA, 22 nt, Human
cugcuuuggcucagugacauca

SEQ ID NO: 479365 - RNA, 22 nt, Human
uugaagcauuguggcuuguauu

SEQ ID NO: 479366 - RNA, 22 nt, Human
aauaugcauuaacuguguacau

SEQ ID NO: 479367 - RNA, 22 nt, Human
acagcagagacacucaggaggc

SEQ ID NO: 479368 - RNA, 22 nt, Human
aggcugccuguuccaaucuccu

SEQ ID NO: 479369 - RNA, 22 nt, Human
gccugggugaauuugauccuaa

SEQ ID NO: 479370 - RNA, 22 nt, Human
cuggugggaggcaagguggaag

SEQ ID NO: 479371 - RNA, 23 nt, Human
gguggcaggaguggaugcugagc

SEQ ID NO: 479372 - RNA, 22 nt, Human
ggcccugggaugcucagcagug

SEQ ID NO: 479373 - RNA, 22 nt, Human
ggacuccucuagaaguugaggc

SEQ ID NO: 479374 - RNA, 22 nt, Human
ccagggcaggggcuggaguuca

SEQ ID NO: 479375 - RNA, 22 nt, Human
cuucuuuccuuccuccaguggc

SEQ ID NO: 479376 - RNA, 22 nt, Human
ccaggguggggcaggcccacug

SEQ ID NO: 479377 - RNA, 18 nt, Human
uguggcaggggugggaga

SEQ ID NO: 479378 - RNA, 22 nt, Human
ccugcagaaaggguccccagga

SEQ ID NO: 479379 - RNA, 22 nt, Human
ucacaggacccugaggguggcg

SEQ ID NO: 479380 - RNA, 22 nt, Human
uacagauacagaucuagauaca

SEQ ID NO: 479381 - RNA, 22 nt, Human
agaugugguaguugaagggaag

SEQ ID NO: 479382 - RNA, 22 nt, Human
agggcuggcaucucuaaugcug

SEQ ID NO: 479383 - RNA, 22 nt, Human
gcccaggcuggagugcaguagc

SEQ ID NO: 479384 - RNA, 22 nt, Human
caacagaagguguacuacugaa

SEQ ID NO: 479385 - RNA, 22 nt, Human
caguuucuauggcugggcucug

SEQ ID NO: 479386 - RNA, 23 nt, Human
aucaagauaauccagaugaccua

SEQ ID NO: 479387 - RNA, 22 nt, Human
guuuuacacaccuaugaaagac

SEQ ID NO: 479388 - RNA, 22 nt, Human
auugacaaauggauguugacau

SEQ ID NO: 479389 - RNA, 22 nt, Human
gcuguacauucugcacaggccc

SEQ ID NO: 479390 - RNA, 22 nt, Human
uuucuuuguuguuaucacauca

SEQ ID NO: 479391 - RNA, 22 nt, Human
uccucaggcugccuggaagacu

SEQ ID NO: 479392 - RNA, 22 nt, Human
uucacaggugacuggggauaac

SEQ ID NO: 479393 - RNA, 22 nt, Human
caccagguuccgggcagagcug

SEQ ID NO: 479394 - RNA, 22 nt, Human
gagggcucuacucaccacccug

SEQ ID NO: 479395 - RNA, 22 nt, Human
gcaggcugggguagccccacuu

SEQ ID NO: 479396 - RNA, 22 nt, Human
agauuuccugcacugccuuuga

SEQ ID NO: 479397 - RNA, 22 nt, Human
aggacagagggaccagagccca

SEQ ID NO: 479398 - RNA, 22 nt, Human
agagcugaaaaagcugacccgg

SEQ ID NO: 479399 - RNA, 22 nt, Human
ugcaggugccucuugagcuugu

SEQ ID NO: 479400 - RNA, 22 nt, Human
ucaggaaagaguguauccauca

SEQ ID NO: 479401 - RNA, 20 nt, Human
ucacuaguaaccaucugcuu

SEQ ID NO: 479402 - RNA, 22 nt, Human
cagugcagguggcagaggacag

SEQ ID NO: 479403 - RNA, 22 nt, Human
aggcuccaugcaaaggcuguuu

SEQ ID NO: 479404 - RNA, 22 nt, Human
cuaguucuagaucccugaggaa

SEQ ID NO: 479405 - RNA, 22 nt, Human
cuggcugcuuguagacucgacu

SEQ ID NO: 479406 - RNA, 21 nt, Human
acagaacuguauagugauaaa

SEQ ID NO: 479407 - RNA, 22 nt, Human
aacccgggaggcagagguugug

SEQ ID NO: 479408 - RNA, 20 nt, Human
agcccuguuuccuggagaga

SEQ ID NO: 479409 - RNA, 21 nt, Human
aaggaaaagcuuggucucuga

SEQ ID NO: 479410 - RNA, 22 nt, Human
auacagaagaacuauagccacu

SEQ ID NO: 479411 - RNA, 22 nt, Human
gcagugggagcuuaggcagugc

SEQ ID NO: 479412 - RNA, 22 nt, Human
gcauuuagcuuuaaaauauuuc

SEQ ID NO: 479413 - RNA, 21 nt, Human
cccaggucguggucuucccag

SEQ ID NO: 479414 - RNA, 22 nt, Human
acugugcaugaaccgaaacaaa

SEQ ID NO: 479415 - RNA, 22 nt, Human
caggcugagcucuggccugggc

SEQ ID NO: 479416 - RNA, 22 nt, Human
acguuuucagugacugugcuuc

SEQ ID NO: 479417 - RNA, 22 nt, Human
aggaaaaaagucugugauuaua

SEQ ID NO: 479418 - RNA, 22 nt, Human
ucugggggcgaccagggacugc

SEQ ID NO: 479419 - RNA, 22 nt, Human
agcagggcccacuaggggagau

SEQ ID NO: 479420 - RNA, 22 nt, Human
gccugagcccaggugugcagag

SEQ ID NO: 479421 - RNA, 20 nt, Human
aucaggauucuugcuuuguu

SEQ ID NO: 479422 - RNA, 22 nt, Human
cagcuggccugaucccuguggc

SEQ ID NO: 479423 - RNA, 22 nt, Human
agggaugguggagguugcaagu

SEQ ID NO: 479424 - RNA, 22 nt, Human
augagcuucccagacaggaugg

SEQ ID NO: 479425 - RNA, 22 nt, Human
cagggcaggaauuugacauugc

SEQ ID NO: 479426 - RNA, 22 nt, Human
ucuucacaccgggcagcaggaa

SEQ ID NO: 479427 - RNA, 22 nt, Human
cugaggccuaagacaugaauga

SEQ ID NO: 479428 - RNA, 22 nt, Human
gugcaugaagacucagaaaguc

SEQ ID NO: 479429 - RNA, 22 nt, Human
cccagcacuuugaauaugucac

SEQ ID NO: 479430 - RNA, 22 nt, Human
ucaccaggcaacuauguacucc

SEQ ID NO: 479431 - RNA, 22 nt, Human
uggagcaggaagucuauggcug

SEQ ID NO: 479432 - RNA, 20 nt, Human
cuuuggcaaugagaacaggg

SEQ ID NO: 479433 - RNA, 22 nt, Human
aguggcagacacaaugugggca

SEQ ID NO: 479434 - RNA, 22 nt, Human
uaauuuauuucaacugccaagg

SEQ ID NO: 479435 - RNA, 22 nt, Human
ggcagcagcaagguuggagcug

SEQ ID NO: 479436 - RNA, 22 nt, Human
aaggaggaauuucagggugaau

SEQ ID NO: 479437 - RNA, 22 nt, Human
aaacaucaauugcaucucccaa

SEQ ID NO: 479438 - RNA, 22 nt, Human
agccuggagcuugaguuaugag

SEQ ID NO: 479439 - RNA, 22 nt, Human
gagcugccggcccacaguacua

SEQ ID NO: 479440 - RNA, 22 nt, Human
uguuuuaugagccauauaaccu

SEQ ID NO: 479441 - RNA, 22 nt, Human
guuuucuuugaaugcuucuaga

SEQ ID NO: 479442 - RNA, 22 nt, Human
ucagaacauuuaaaaagugguu

SEQ ID NO: 479443 - RNA, 22 nt, Human
cugaggcugggcauggggucca

SEQ ID NO: 479444 - RNA, 17 nt, Human
aggcugcugggccaggg

SEQ ID NO: 479445 - RNA, 22 nt, Human
ugggggucaggaugaggccuug

SEQ ID NO: 479446 - RNA, 22 nt, Human
auuaagggccaauccuccagcc

SEQ ID NO: 479447 - RNA, 22 nt, Human
acuguacacacuucucugucuu

SEQ ID NO: 479448 - RNA, 22 nt, Human
agcacagguacggagaugcuac

SEQ ID NO: 479449 - RNA, 22 nt, Human
uacuacauuaauaaaacauuca

SEQ ID NO: 479450 - RNA, 22 nt, Human
ugcucuguaacaaauugacaug

SEQ ID NO: 479451 - RNA, 22 nt, Human
ccagcaggacuuuggaaauaug

SEQ ID NO: 479452 - RNA, 22 nt, Human
uccagaguacggaagagucauc

SEQ ID NO: 479453 - RNA, 22 nt, Human
agucugcacucagguggagguc

SEQ ID NO: 479454 - RNA, 22 nt, Human
ccagaggaaaaauaucucccua

SEQ ID NO: 479455 - RNA, 22 nt, Human
auguccagccaaccacuggauu

SEQ ID NO: 479456 - RNA, 22 nt, Human
uggcugaguuucaugcaucaug

SEQ ID NO: 479457 - RNA, 22 nt, Human
gaggccugucgcuaggccucug

SEQ ID NO: 479458 - RNA, 22 nt, Human
ucaggcuggagugcaguggcgc

SEQ ID NO: 479459 - RNA, 22 nt, Human
ucccagagaaagucaaggucuu

SEQ ID NO: 479460 - RNA, 22 nt, Human
uuucaugugcaauuagcaauau

SEQ ID NO: 479461 - RNA, 22 nt, Human
guuccacaaaauguacccaguu

SEQ ID NO: 479462 - RNA, 23 nt, Human
aucagucuugguagcugugccca

SEQ ID NO: 479463 - RNA, 22 nt, Human
uagcuuuagugaaaaauaucag

SEQ ID NO: 479464 - RNA, 22 nt, Human
cugccuggaccggcagcccucc

SEQ ID NO: 479465 - RNA, 22 nt, Human
auaaacagaguaguugcuacug

SEQ ID NO: 479466 - RNA, 20 nt, Human
gcucccugguagaaauguuu

SEQ ID NO: 479467 - RNA, 17 nt, Human
gcauccaguaacaugcc

SEQ ID NO: 479468 - RNA, 22 nt, Human
cugcagagguugguucuaagau

SEQ ID NO: 479469 - RNA, 22 nt, Human
gccuugccucagccauggaaac

SEQ ID NO: 479470 - RNA, 19 nt, Human
ccuuggaguuccaggugga

SEQ ID NO: 479471 - RNA, 22 nt, Human
gauuuucauuauagcuaguuuc

SEQ ID NO: 479472 - RNA, 22 nt, Human
augggaguuuucucugaugcuc

SEQ ID NO: 479473 - RNA, 22 nt, Human
agggcuacugccugccuucagg

SEQ ID NO: 479474 - RNA, 17 nt, Human
caaggccagcaucuuca

SEQ ID NO: 479475 - RNA, 22 nt, Human
agaaaugcauuagcacauauag

SEQ ID NO: 479476 - RNA, 22 nt, Human
aguguauugauuggaacagccu

SEQ ID NO: 479477 - RNA, 22 nt, Human
gguuugcauucugaaaggcuca

SEQ ID NO: 479478 - RNA, 22 nt, Human
cuucagggugacgcaggcugca

SEQ ID NO: 479479 - RNA, 22 nt, Human
gcaguggcuaagcucgcaugca

SEQ ID NO: 479480 - RNA, 22 nt, Human
gggagcugagggaccucugugg

SEQ ID NO: 479481 - RNA, 22 nt, Human
agcagggcuuugucucugugaa

SEQ ID NO: 479482 - RNA, 22 nt, Human
uauuaucauugguaauaugguc

SEQ ID NO: 479483 - RNA, 22 nt, Human
aaaaguaauugaugcaaucgua

SEQ ID NO: 479484 - RNA, 22 nt, Human
auagcuguuagauuggggucga

SEQ ID NO: 479485 - RNA, 22 nt, Human
caggggcugugggcggagccuc

SEQ ID NO: 479486 - RNA, 19 nt, Human
uccuucagucagaucuggg

SEQ ID NO: 479487 - RNA, 22 nt, Human
ucaggaugguguggaggaaaua

SEQ ID NO: 479488 - RNA, 22 nt, Human
acccaggggcagccuugcugug

SEQ ID NO: 479489 - RNA, 21 nt, Human
ggugucaguuuuggucauuag

SEQ ID NO: 479490 - RNA, 19 nt, Human
ugggcuuccccagggcaga

SEQ ID NO: 479491 - RNA, 22 nt, Human
agggguggccugccuuacuccc

SEQ ID NO: 479492 - RNA, 22 nt, Human
uucccaggcugugcuaccagag

SEQ ID NO: 479493 - RNA, 22 nt, Human
ggcucacgcaauuaucccggcc

SEQ ID NO: 479494 - RNA, 22 nt, Human
uugcaccaaaugaguuaaaauu

SEQ ID NO: 479495 - RNA, 22 nt, Human
gguggggucacgacagagggaa

SEQ ID NO: 479496 - RNA, 22 nt, Human
gcaggcugaugacuggaguugg

SEQ ID NO: 479497 - RNA, 22 nt, Human
aauguguguucggggcccagag

SEQ ID NO: 479498 - RNA, 22 nt, Human
aucagcaaaaaugccuucagaa

SEQ ID NO: 479499 - RNA, 19 nt, Human
cugcagggaugugcagagu

SEQ ID NO: 479500 - RNA, 22 nt, Human
uuuccacuguagagauguugaa

SEQ ID NO: 479501 - RNA, 22 nt, Human
gaagaaggugccagaggcuuac

SEQ ID NO: 479502 - RNA, 22 nt, Human
ugugccaugaggcucugauaug

SEQ ID NO: 479503 - RNA, 22 nt, Human
gagacacacacaggagguggca

SEQ ID NO: 479504 - RNA, 22 nt, Human
gugcauauaugcacauaugugu

SEQ ID NO: 479505 - RNA, 22 nt, Human
uguaugcagcaaaacaauuagu

SEQ ID NO: 479506 - RNA, 22 nt, Human
agucagcagccuggccaggaga

SEQ ID NO: 479507 - RNA, 23 nt, Human
ccucccaccuauuucacuuucuu

SEQ ID NO: 479508 - RNA, 22 nt, Human
ccaggagcaacuugaaggcaag

SEQ ID NO: 479509 - RNA, 22 nt, Human
gaaugugugacucuauugagca

SEQ ID NO: 479510 - RNA, 22 nt, Human
agauacauauagaaaacaucaa

SEQ ID NO: 479511 - RNA, 22 nt, Human
gcugaagagagaugcguccagc

SEQ ID NO: 479512 - RNA, 22 nt, Human
cagaaugcaaauuuuauaauau

SEQ ID NO: 479513 - RNA, 22 nt, Human
gcugucucggggcuuucuccug

SEQ ID NO: 479514 - RNA, 22 nt, Human
gcaggcaguuugcuuuucccuc

SEQ ID NO: 479515 - RNA, 22 nt, Human
cccagaaggucgaggcugcagu

SEQ ID NO: 479516 - RNA, 22 nt, Human
cccaggaggucgaagcugcagu

SEQ ID NO: 479517 - RNA, 22 nt, Human
caagggugguauugggagcaua

SEQ ID NO: 479518 - RNA, 22 nt, Human
agcagcauggagaaaccguuca

SEQ ID NO: 479519 - RNA, 22 nt, Human
agucucuuuugcgaagaguguu

SEQ ID NO: 479520 - RNA, 22 nt, Human
acauacuuuuuaaaagauugcu

SEQ ID NO: 479521 - RNA, 22 nt, Human
agaagcugacagaugcagcagg

SEQ ID NO: 479522 - RNA, 22 nt, Human
acagacuguuugguucaugucu

SEQ ID NO: 479523 - RNA, 22 nt, Human
ucuggcucugaauucacuucug

SEQ ID NO: 479524 - RNA, 22 nt, Human
ucggagcuguagaugaaacccu

SEQ ID NO: 479525 - RNA, 22 nt, Human
gcagggcugcagagggcacugu

SEQ ID NO: 479526 - RNA, 22 nt, Human
agggcugacagugaggagucaa

SEQ ID NO: 479527 - RNA, 22 nt, Human
cugccuguuuucugauagauuu

SEQ ID NO: 479528 - RNA, 22 nt, Human
caggacugauguuccuccagcc

SEQ ID NO: 479529 - RNA, 22 nt, Human
cagcaggaggcauggcuucccu

SEQ ID NO: 479530 - RNA, 22 nt, Human
uccuuuccagccucaccucagc

SEQ ID NO: 479531 - RNA, 22 nt, Human
guacccagaggcaugaucccag

SEQ ID NO: 479532 - RNA, 22 nt, Human
uuucuauuggcgucacuguugu

SEQ ID NO: 479533 - RNA, 22 nt, Human
cccagcuaccucugcuaggaga

SEQ ID NO: 479534 - RNA, 18 nt, Human
caugggugacagguggau

SEQ ID NO: 479535 - RNA, 22 nt, Human
agcccccaaaagugcuuaugau

SEQ ID NO: 479536 - RNA, 22 nt, Human
gagggccaauggauuucaacug

SEQ ID NO: 479537 - RNA, 22 nt, Human
gcacagcaauuucuauaagcuc

SEQ ID NO: 479538 - RNA, 22 nt, Human
uggcugaggucuggggcuucug

SEQ ID NO: 479539 - RNA, 22 nt, Human
ucuaauccuugcuaccugggug

SEQ ID NO: 479540 - RNA, 20 nt, Human
uguuaaaggacacuugcuuu

SEQ ID NO: 479541 - RNA, 20 nt, Human
uauuugaaauggccaagugu

SEQ ID NO: 479542 - RNA, 22 nt, Human
cacuacuugaaagaauuacaga

SEQ ID NO: 479543 - RNA, 22 nt, Human
agcagccagaaagggcagucga

SEQ ID NO: 479544 - RNA, 22 nt, Human
gaaaugcauaaucuuaguagau

SEQ ID NO: 479545 - RNA, 22 nt, Human
cugcuuuguguggucccuccag

SEQ ID NO: 479546 - RNA, 20 nt, Human
uuugucuguuaaguguuucu

SEQ ID NO: 479547 - RNA, 22 nt, Human
agagagcauggcacagaggggu

SEQ ID NO: 479548 - RNA, 22 nt, Human
cugagccauaagggaggcuggg

SEQ ID NO: 479549 - RNA, 22 nt, Human
auugcaccuuggguuuugaaag

SEQ ID NO: 479550 - RNA, 22 nt, Human
gggaguguugagcgcccugcca

SEQ ID NO: 479551 - RNA, 18 nt, Human
acagacaaaauggaaaug

SEQ ID NO: 479552 - RNA, 22 nt, Human
guguccuuuuaugugacugguu

SEQ ID NO: 479553 - RNA, 22 nt, Human
cagcuugggucaggugccugcu

SEQ ID NO: 479554 - RNA, 22 nt, Human
gccuggaggggacagucucugg

SEQ ID NO: 479555 - RNA, 22 nt, Human
gcagggacagggcagggccuuu

SEQ ID NO: 479556 - RNA, 20 nt, Human
acugccuugguucaguaggu

SEQ ID NO: 479557 - RNA, 22 nt, Human
ggacuggacucucaggcucaca

SEQ ID NO: 479558 - RNA, 22 nt, Human
uggcucagaagaaaagguaaac

SEQ ID NO: 479559 - RNA, 22 nt, Human
uuuguucauuuugagcucauca

SEQ ID NO: 479560 - RNA, 22 nt, Human
cauuuguuaaccaguguggauu

SEQ ID NO: 479561 - RNA, 22 nt, Human
agaggccuaauugcuacccuuu

SEQ ID NO: 479562 - RNA, 22 nt, Human
aaaaugcaugagaaugugcucg

SEQ ID NO: 479563 - RNA, 22 nt, Human
acacagggcagagagcuggcuc

SEQ ID NO: 479564 - RNA, 22 nt, Human
ggccucucucccuggcuugcag

SEQ ID NO: 479565 - RNA, 22 nt, Human
uggcugagugauauuugcaaag

SEQ ID NO: 479566 - RNA, 22 nt, Human
cagggcugucuccaaaggcccc

SEQ ID NO: 479567 - RNA, 22 nt, Human
cagugaggcucugcugagcggu

SEQ ID NO: 479568 - RNA, 22 nt, Human
ccaggccauucccagaguugcu

SEQ ID NO: 479569 - RNA, 22 nt, Human
uuagaaaucugcugccaugcaa

SEQ ID NO: 479570 - RNA, 22 nt, Human
agccucucuguuagucacuggg

SEQ ID NO: 479571 - RNA, 22 nt, Human
ccauaagguugaaaacuguaca

SEQ ID NO: 479572 - RNA, 22 nt, Human
gagacugcauuguccaaggguu

SEQ ID NO: 479573 - RNA, 22 nt, Human
aggaaacuccccuacaucucaa

SEQ ID NO: 479574 - RNA, 22 nt, Human
agauggggcucaguguggaggc

SEQ ID NO: 479575 - RNA, 22 nt, Human
uguuaaauguuccuuuacugga

SEQ ID NO: 479576 - RNA, 22 nt, Human
uguuuaaucuauaaaauggaga

SEQ ID NO: 479577 - RNA, 22 nt, Human
uuagauaacaguagaauaucaa

SEQ ID NO: 479578 - RNA, 22 nt, Human
ucuccuccuuuuuucaacauag

SEQ ID NO: 479579 - RNA, 22 nt, Human
ucccagagcugauaagccuuua

SEQ ID NO: 479580 - RNA, 22 nt, Human
aguuauuucaguaacauaauag

SEQ ID NO: 479581 - RNA, 22 nt, Human
cucuuuccucagccacagucua

SEQ ID NO: 479582 - RNA, 22 nt, Human
ucuuccucuagaucugaggccc

SEQ ID NO: 479583 - RNA, 22 nt, Human
ucaguggauugacaugaaaaag

SEQ ID NO: 479584 - RNA, 22 nt, Human
acaugauuggacuccuuccccu

SEQ ID NO: 479585 - RNA, 22 nt, Human
uccucuggcccagcugccucug

SEQ ID NO: 479586 - RNA, 22 nt, Human
uagggcucugagaguucagccu

SEQ ID NO: 479587 - RNA, 18 nt, Human
ugucucaggcugaaacag

SEQ ID NO: 479588 - RNA, 19 nt, Human
ugggcagguucaguaaugg

SEQ ID NO: 479589 - RNA, 22 nt, Human
augaagcugguuuuggcuuggg

SEQ ID NO: 479590 - RNA, 23 nt, Human
ggccauggagacuuagaaugggc

SEQ ID NO: 479591 - RNA, 22 nt, Human
auucaguaggucuagaauaaga

SEQ ID NO: 479592 - RNA, 22 nt, Human
uagaaauccccagucucauagu

SEQ ID NO: 479593 - RNA, 22 nt, Human
uguucuugggaaucuuacaguu

SEQ ID NO: 479594 - RNA, 22 nt, Human
gaggaggaaguucucuguaggc

SEQ ID NO: 479595 - RNA, 22 nt, Human
cagaguggcgacccccucagcu

SEQ ID NO: 479596 - RNA, 22 nt, Human
guucccauacaguaucagugcu

SEQ ID NO: 479597 - RNA, 22 nt, Human
ucucaggacuuugggaagcuca

SEQ ID NO: 479598 - RNA, 22 nt, Human
accugagggcccaaacuuggua

SEQ ID NO: 479599 - RNA, 22 nt, Human
cacagcugcacagaggaggugc

SEQ ID NO: 479600 - RNA, 21 nt, Human
ugguuugcggccaaaguuaaa

SEQ ID NO: 479601 - RNA, 22 nt, Human
gugccugugcggacucagggaa

SEQ ID NO: 479602 - RNA, 22 nt, Human
ugcauuuuuaacaaggcuaauu

SEQ ID NO: 479603 - RNA, 22 nt, Human
aagauacugaugauguaggcua

SEQ ID NO: 479604 - RNA, 22 nt, Human
uugaagcauuucuuugagcuuc

SEQ ID NO: 479605 - RNA, 22 nt, Human
gugucccagccccacaggccug

SEQ ID NO: 479606 - RNA, 20 nt, Human
ucugcucagcccucaguggc

SEQ ID NO: 479607 - RNA, 22 nt, Human
aggcucagggacggggccccuu

SEQ ID NO: 479608 - RNA, 22 nt, Human
aggagcagaccguaguccugca

SEQ ID NO: 479609 - RNA, 22 nt, Human
cagagaaagaagcccauucauu

SEQ ID NO: 479610 - RNA, 22 nt, Human
cuaaaugccuuuccuaccuaac

SEQ ID NO: 479611 - RNA, 17 nt, Human
gguguauggggagggaa

SEQ ID NO: 479612 - RNA, 22 nt, Human
uacaaaguuuucuuggauugag

SEQ ID NO: 479613 - RNA, 22 nt, Human
cuguuaaucugcuugcaugaug

SEQ ID NO: 479614 - RNA, 22 nt, Human
accaucuuaguggccagcucuc

SEQ ID NO: 479615 - RNA, 21 nt, Human
acagaugggaugagcacacug

SEQ ID NO: 479616 - RNA, 22 nt, Human
ugcugccagccaggccauggag

SEQ ID NO: 479617 - RNA, 22 nt, Human
gaggccugaggcugccuggagc

SEQ ID NO: 479618 - RNA, 22 nt, Human
ugaggcuguucuaccagggcca

SEQ ID NO: 479619 - RNA, 22 nt, Human
aggaagcccaagucucaucuuc

SEQ ID NO: 479620 - RNA, 22 nt, Human
ucucuguacaguacaugccgug

SEQ ID NO: 479621 - RNA, 22 nt, Human
gccacagggcagaugcgcagag

SEQ ID NO: 479622 - RNA, 22 nt, Human
uguauuagaucugagaacuucu

SEQ ID NO: 479623 - RNA, 22 nt, Human
uuguacaaguauuaugugaaca

SEQ ID NO: 479624 - RNA, 22 nt, Human
uuucaaagguggaagagugaau

SEQ ID NO: 479625 - RNA, 22 nt, Human
caggagaagucucuagggggug

SEQ ID NO: 479626 - RNA, 22 nt, Human
ccucagagaaagguauggcuga

SEQ ID NO: 479627 - RNA, 22 nt, Human
agcucagcuuccucuccaugcu

SEQ ID NO: 479628 - RNA, 22 nt, Human
gcagggcagaaggugcugagga

SEQ ID NO: 479629 - RNA, 19 nt, Human
ugggcagcucccucugucc

SEQ ID NO: 479630 - RNA, 22 nt, Human
auaaggcacacauagauagggu

SEQ ID NO: 479631 - RNA, 22 nt, Human
cccacacauuuuucacuuaccg

SEQ ID NO: 479632 - RNA, 22 nt, Human
ggggugggcgugcagggacacc

SEQ ID NO: 479633 - RNA, 22 nt, Human
ccugucugcaugagugagcaua

SEQ ID NO: 479634 - RNA, 22 nt, Human
uccaggcaugucugaguccuuc

SEQ ID NO: 479635 - RNA, 22 nt, Human
auaaaaguaggaccaacuuaca

SEQ ID NO: 479636 - RNA, 20 nt, Human
cccugagaccagagagcagc

SEQ ID NO: 479637 - RNA, 22 nt, Human
cccagcagcuugcacagugcug

SEQ ID NO: 479638 - RNA, 22 nt, Human
gugggcagugguuugcgcgguc

SEQ ID NO: 479639 - RNA, 22 nt, Human
uaacagaaaggcucaggugcuc

SEQ ID NO: 479640 - RNA, 22 nt, Human
cuggcagcccaaccuagagucu

SEQ ID NO: 479641 - RNA, 22 nt, Human
gcacagggagacagccguggcc

SEQ ID NO: 479642 - RNA, 22 nt, Human
ccugggcaauauagugaggccc

SEQ ID NO: 479643 - RNA, 22 nt, Human
aauguguagggugccuguuuuu

SEQ ID NO: 479644 - RNA, 22 nt, Human
aggcuguccucucuugcucagu

SEQ ID NO: 479645 - RNA, 22 nt, Human
ugcauuguugaauauuucauag

SEQ ID NO: 479646 - RNA, 22 nt, Human
uuucacagguacaaacacuccu

SEQ ID NO: 479647 - RNA, 23 nt, Human
uuacuuuugcaccaaccuaauau

SEQ ID NO: 479648 - RNA, 17 nt, Human
cucagaguugcuuuguc

SEQ ID NO: 479649 - RNA, 22 nt, Human
ucuguccuguuuccuccugaca

SEQ ID NO: 479650 - RNA, 22 nt, Human
ugccugggccucugaggaaggc

SEQ ID NO: 479651 - RNA, 22 nt, Human
uuccaaagaaauugaccaagac

SEQ ID NO: 479652 - RNA, 22 nt, Human
cugggagcccgcguccuggugg

SEQ ID NO: 479653 - RNA, 21 nt, Human
aggcucccagaaaugggcauc

SEQ ID NO: 479654 - RNA, 22 nt, Human
aguggggagguccaggccaccc

SEQ ID NO: 479655 - RNA, 22 nt, Human
gacaugcaacaauuuggcauuu

SEQ ID NO: 479656 - RNA, 22 nt, Human
guaucuuuuacaccaggaaauu

SEQ ID NO: 479657 - RNA, 22 nt, Human
caguagacacauuaauauggaa

SEQ ID NO: 479658 - RNA, 22 nt, Human
uccagaccuagggcaccccagu

SEQ ID NO: 479659 - RNA, 22 nt, Human
auacauguaacugcauuguaau

SEQ ID NO: 479660 - RNA, 22 nt, Human
gggcagcucuggcugugggaag

SEQ ID NO: 479661 - RNA, 22 nt, Human
agaagccaauucugugugaguc

SEQ ID NO: 479662 - RNA, 22 nt, Human
ccagagggcaaaaugaagcuua

SEQ ID NO: 479663 - RNA, 22 nt, Human
cugggcugcgggcgccccucca

SEQ ID NO: 479664 - RNA, 22 nt, Human
ccugucucuuucaaucugagag

SEQ ID NO: 479665 - RNA, 23 nt, Human
cccugcagucagggugagauggu

SEQ ID NO: 479666 - RNA, 22 nt, Human
ugaaacaaaaguauguagcuug

SEQ ID NO: 479667 - RNA, 22 nt, Human
gccaggcuggugcaaggauauu

SEQ ID NO: 479668 - RNA, 22 nt, Human
caccagggcucugagcucugaa

SEQ ID NO: 479669 - RNA, 22 nt, Human
ggccugccucacagucagcacc

SEQ ID NO: 479670 - RNA, 22 nt, Human
gcugagagaucaaggcaggauu

SEQ ID NO: 479671 - RNA, 22 nt, Human
aacagaaaagguagguggcuuu

SEQ ID NO: 479672 - RNA, 22 nt, Human
uuauuagguuauucucuguacu

SEQ ID NO: 479673 - RNA, 22 nt, Human
aucuggcucgcuaggcucuggg

SEQ ID NO: 479674 - RNA, 22 nt, Human
ugcuccagugagcuggccaucc

SEQ ID NO: 479675 - RNA, 22 nt, Human
cagguccugcagggagaguaaa

SEQ ID NO: 479676 - RNA, 18 nt, Human
gaagggagcuggaaugca

SEQ ID NO: 479677 - RNA, 22 nt, Human
ggcugugagcaggcagaaugcu

SEQ ID NO: 479678 - RNA, 22 nt, Human
cagagcauuuggaagccacgug

SEQ ID NO: 479679 - RNA, 22 nt, Human
gggcauggugaugugcaccugu

SEQ ID NO: 479680 - RNA, 22 nt, Human
aucaguuuaaaugggcuguugg

SEQ ID NO: 479681 - RNA, 18 nt, Human
aagaacugagguccuaga

SEQ ID NO: 479682 - RNA, 22 nt, Human
agcucccugagaugccacagca

SEQ ID NO: 479683 - RNA, 22 nt, Human
acacaggaagucagcacugaug

SEQ ID NO: 479684 - RNA, 22 nt, Human
aguggcagaagccaagucugca

SEQ ID NO: 479685 - RNA, 22 nt, Human
agcagagguguuuauuauggga

SEQ ID NO: 479686 - RNA, 22 nt, Human
auagcagaaaccaagcuucuuc

SEQ ID NO: 479687 - RNA, 22 nt, Human
ggcugccuucccugagccccgg

SEQ ID NO: 479688 - RNA, 17 nt, Human
cugaagauaauggcaac

SEQ ID NO: 479689 - RNA, 22 nt, Human
caguggaagcuggcugugaaga

SEQ ID NO: 479690 - RNA, 22 nt, Human
uguuacuuaucucacgugaugc

SEQ ID NO: 479691 - RNA, 22 nt, Human
ggagucaccaaguaggagucuu

SEQ ID NO: 479692 - RNA, 22 nt, Human
aucaggaugacuauaaggcugc

SEQ ID NO: 479693 - RNA, 18 nt, Human
agacccucuaagggcagu

SEQ ID NO: 479694 - RNA, 22 nt, Human
ugucuguaagguguuuauguua

SEQ ID NO: 479695 - RNA, 22 nt, Human
ucucuggaauuuugagagugac

SEQ ID NO: 479696 - RNA, 17 nt, Human
uggcuucccugggccac

SEQ ID NO: 479697 - RNA, 22 nt, Human
agccuccaguagcugaagagac

SEQ ID NO: 479698 - RNA, 22 nt, Human
ccugucucccuggcauggcuca

SEQ ID NO: 479699 - RNA, 22 nt, Human
uacaagaugacaggugcaugau

SEQ ID NO: 479700 - RNA, 22 nt, Human
aggcugaggcgggaggaucacu

SEQ ID NO: 479701 - RNA, 22 nt, Human
cagcuggacuuuugauagaagu

SEQ ID NO: 479702 - RNA, 22 nt, Human
ugccuaggaaaccucaugcuuc

SEQ ID NO: 479703 - RNA, 22 nt, Human
aauucuagcauugugaaaauau

SEQ ID NO: 479704 - RNA, 22 nt, Human
ggcacugggcaccggcugaggg

SEQ ID NO: 479705 - RNA, 22 nt, Human
auucaaguccagcuucucuaca

SEQ ID NO: 479706 - RNA, 22 nt, Human
uguauauucugccuaaaagcuu

SEQ ID NO: 479707 - RNA, 22 nt, Human
ugggagaugguucugagacuuu

SEQ ID NO: 479708 - RNA, 22 nt, Human
aagagcauggaauggagaucca

SEQ ID NO: 479709 - RNA, 22 nt, Human
acugcccuguaacugccaggua

SEQ ID NO: 479710 - RNA, 22 nt, Human
ugauuucuuccuugucauuaga

SEQ ID NO: 479711 - RNA, 22 nt, Human
gcuguucugcgucccaggcugg

SEQ ID NO: 479712 - RNA, 22 nt, Human
aggcuggcccuacuggcugccu

SEQ ID NO: 479713 - RNA, 22 nt, Human
ggucccaggagaauaggugcaa

SEQ ID NO: 479714 - RNA, 22 nt, Human
aagcaggauggaucuaguguuc

SEQ ID NO: 479715 - RNA, 21 nt, Human
cagaggcagguccugggacgg

SEQ ID NO: 479716 - RNA, 22 nt, Human
auaugcacacucugcccacaga

SEQ ID NO: 479717 - RNA, 22 nt, Human
accauuuuggguauuuucagag

SEQ ID NO: 479718 - RNA, 22 nt, Human
gcugccaguaguuggagcucca

SEQ ID NO: 479719 - RNA, 22 nt, Human
cugccuuccaaccccagacucc

SEQ ID NO: 479720 - RNA, 23 nt, Human
ucuccagugucucuucauugagu

SEQ ID NO: 479721 - RNA, 22 nt, Human
acuuccuguuaugugugccucu

SEQ ID NO: 479722 - RNA, 22 nt, Human
ccaaagugcugggguuacaggc

SEQ ID NO: 479723 - RNA, 22 nt, Human
aggcuuuaaguggccuacagcu

SEQ ID NO: 479724 - RNA, 22 nt, Human
ugcuggcuacugauggcaggcc

SEQ ID NO: 479725 - RNA, 22 nt, Human
accucugccacuuucuaacucu

SEQ ID NO: 479726 - RNA, 22 nt, Human
auuucacaaagaacagaugcag

SEQ ID NO: 479727 - RNA, 22 nt, Human
cagggcucccugcagccucugu

SEQ ID NO: 479728 - RNA, 22 nt, Human
cagaauggcuuuuauggcucag

SEQ ID NO: 479729 - RNA, 22 nt, Human
aggccuggguguucaccagaag

SEQ ID NO: 479730 - RNA, 22 nt, Human
ccagccucacuggcaucaccua

SEQ ID NO: 479731 - RNA, 22 nt, Human
uucuuuccaaccagauauuggu

SEQ ID NO: 479732 - RNA, 22 nt, Human
ugggaguguucuuggcuugcuu

SEQ ID NO: 479733 - RNA, 18 nt, Human
uggguggcuagggaguuu

SEQ ID NO: 479734 - RNA, 22 nt, Human
ugggaggagcccucugggaagg

SEQ ID NO: 479735 - RNA, 22 nt, Human
ucagggacgugagcucagaguc

SEQ ID NO: 479736 - RNA, 22 nt, Human
cugagcuuggccaggaaugaau

SEQ ID NO: 479737 - RNA, 22 nt, Human
ugcugccaagcccgugcuccug

SEQ ID NO: 479738 - RNA, 19 nt, Human
aggcagcacccaguccuug

SEQ ID NO: 479739 - RNA, 22 nt, Human
acaggcugacuuccugccaugu

SEQ ID NO: 479740 - RNA, 22 nt, Human
caaaugcaugagaaauaagagg

SEQ ID NO: 479741 - RNA, 22 nt, Human
aaagucugagcagaauuucuca

SEQ ID NO: 479742 - RNA, 22 nt, Human
ggcagggugccuggcuccuguu

SEQ ID NO: 479743 - RNA, 22 nt, Human
acugaguguaggacuuugaguu

SEQ ID NO: 479744 - RNA, 22 nt, Human
gagggcugaugcuuacuuauuu

SEQ ID NO: 479745 - RNA, 22 nt, Human
cacaggcucuucucacuugauu

SEQ ID NO: 479746 - RNA, 22 nt, Human
cacagccugcugcacucaagaa

SEQ ID NO: 479747 - RNA, 22 nt, Human
uggcagagguaauucaaauccc

SEQ ID NO: 479748 - RNA, 17 nt, Human
gggcugacaguggccuc

SEQ ID NO: 479749 - RNA, 21 nt, Human
agaaaaaccagcauguuuuca

SEQ ID NO: 479750 - RNA, 18 nt, Human
gccagagggaagcaggug

SEQ ID NO: 479751 - RNA, 22 nt, Human
ugggaggcagguaggugaugau

SEQ ID NO: 479752 - RNA, 22 nt, Human
cuguuuauaaauagaggggagu

SEQ ID NO: 479753 - RNA, 22 nt, Human
ugcuuuauucccuucugaugug

SEQ ID NO: 479754 - RNA, 22 nt, Human
agcagcucuggcacuguagcau

SEQ ID NO: 479755 - RNA, 22 nt, Human
uuguuaaaaauagauuuccagg

SEQ ID NO: 479756 - RNA, 22 nt, Human
cugagcugggaguagagacucu

SEQ ID NO: 479757 - RNA, 22 nt, Human
agggcugccugacuccagagcc

SEQ ID NO: 479758 - RNA, 22 nt, Human
ccauaaucuggcuuugagagag

SEQ ID NO: 479759 - RNA, 23 nt, Human
uggccugcagaguuucugcuggg

SEQ ID NO: 479760 - RNA, 22 nt, Human
uccuuccucggggacccagauc

SEQ ID NO: 479761 - RNA, 22 nt, Human
ugucagcagcugguuugcuguu

SEQ ID NO: 479762 - RNA, 21 nt, Human
ggagucauuagucauuuccuu

SEQ ID NO: 479763 - RNA, 22 nt, Human
uagcauuuggcaccaguuauuu

SEQ ID NO: 479764 - RNA, 21 nt, Human
uccagggaacuucucaggaau

SEQ ID NO: 479765 - RNA, 22 nt, Human
ugucuagggagcugcucaggcu

SEQ ID NO: 479766 - RNA, 22 nt, Human
cccaggccccagggcuugucag

SEQ ID NO: 479767 - RNA, 22 nt, Human
gcuuccuucuaccacaucaugc

SEQ ID NO: 479768 - RNA, 21 nt, Human
aaagugguaaggauuauuuug

SEQ ID NO: 479769 - RNA, 22 nt, Human
gucccacaccuugaggggucuu

SEQ ID NO: 479770 - RNA, 22 nt, Human
agagggcccauguugggcugcu

SEQ ID NO: 479771 - RNA, 22 nt, Human
ugagugaggaagcgguggagga

SEQ ID NO: 479772 - RNA, 22 nt, Human
gaggcucagggaguauaugaau

SEQ ID NO: 479773 - RNA, 22 nt, Human
ucuuagaaauuccccaguggcu

SEQ ID NO: 479774 - RNA, 22 nt, Human
aggguaggguaaaugaugcauc

SEQ ID NO: 479775 - RNA, 22 nt, Human
ucccaaggcacagggcagggac

SEQ ID NO: 479776 - RNA, 22 nt, Human
cuggaaguauaggggagaugau

SEQ ID NO: 479777 - RNA, 22 nt, Human
ggcucugcgcgguaaagugacu

SEQ ID NO: 479778 - RNA, 22 nt, Human
cugcaggauucucccaguugga

SEQ ID NO: 479779 - RNA, 22 nt, Human
cagggccagccgcagcauccac

SEQ ID NO: 479780 - RNA, 22 nt, Human
cccaggcagcccuucugacgca

SEQ ID NO: 479781 - RNA, 22 nt, Human
agcagccaaccuuacauucauc

SEQ ID NO: 479782 - RNA, 18 nt, Human
gugacagcugcuagcuca

SEQ ID NO: 479783 - RNA, 22 nt, Human
cagagccugcucacgucucugu

SEQ ID NO: 479784 - RNA, 22 nt, Human
ugcaggccggcccuaggccuca

SEQ ID NO: 479785 - RNA, 22 nt, Human
gacaggguacgggcuaggcaca

SEQ ID NO: 479786 - RNA, 22 nt, Human
ugucucugaggugagggucagc

SEQ ID NO: 479787 - RNA, 22 nt, Human
cuuaauuuaaaauaguucaggc

SEQ ID NO: 479788 - RNA, 22 nt, Human
uuagaaagaacuuuagauauca

SEQ ID NO: 479789 - RNA, 22 nt, Human
gacauucacagguaaacauucc

SEQ ID NO: 479790 - RNA, 22 nt, Human
ggccugcugcuaugacuuccug

SEQ ID NO: 479791 - RNA, 22 nt, Human
aggugcagcaugaguccaacgg

SEQ ID NO: 479792 - RNA, 22 nt, Human
gagcuggcaggaggcuccccga

SEQ ID NO: 479793 - RNA, 22 nt, Human
ggccucaguuucuccauggguu

SEQ ID NO: 479794 - RNA, 21 nt, Human
uggcugaguggaugcaugaau

SEQ ID NO: 479795 - RNA, 22 nt, Human
ucaggagcagcaugggugagag

SEQ ID NO: 479796 - RNA, 22 nt, Human
cugugccaggcccagcugacuu

SEQ ID NO: 479797 - RNA, 22 nt, Human
ggcugagcacuuuaggcaggag

SEQ ID NO: 479798 - RNA, 22 nt, Human
uacaagagguauauagaaacag

SEQ ID NO: 479799 - RNA, 22 nt, Human
aaggcgacacaggcagcaggcc

SEQ ID NO: 479800 - RNA, 22 nt, Human
augaaacaugagaaauggagag

SEQ ID NO: 479801 - RNA, 22 nt, Human
ugggccacuugaaaguggaugu

SEQ ID NO: 479802 - RNA, 22 nt, Human
guggggcaguggccugggagca

SEQ ID NO: 479803 - RNA, 22 nt, Human
ucccaggacaggccacauggaa

SEQ ID NO: 479804 - RNA, 22 nt, Human
cugcugugggcaggguagcugg

SEQ ID NO: 479805 - RNA, 22 nt, Human
aaagauuuaugaaguucaauua

SEQ ID NO: 479806 - RNA, 22 nt, Human
cuuccuguugucacagucugcg

SEQ ID NO: 479807 - RNA, 22 nt, Human
cuuauuagaaagaaaagacaug

SEQ ID NO: 479808 - RNA, 22 nt, Human
cugcccugagggccuguguguu

SEQ ID NO: 479809 - RNA, 22 nt, Human
cauuucuaagaaggcugcacau

SEQ ID NO: 479810 - RNA, 22 nt, Human
aaauguuccuuuggauuaaacu

SEQ ID NO: 479811 - RNA, 22 nt, Human
acacaggggaaaguggagcuga

SEQ ID NO: 479812 - RNA, 22 nt, Human
gaaaugugaccuacuuccuugu

SEQ ID NO: 479813 - RNA, 22 nt, Human
uggagcaggcaucuuucucucu

SEQ ID NO: 479814 - RNA, 22 nt, Human
cuuggccucuucucaggguggg

SEQ ID NO: 479815 - RNA, 23 nt, Human
ccagcugugccuggcccaggagc

SEQ ID NO: 479816 - RNA, 22 nt, Human
auaaggaaugauguaucaguuu

SEQ ID NO: 479817 - RNA, 22 nt, Human
cauuuuauccucugggaagcua

SEQ ID NO: 479818 - RNA, 22 nt, Human
cuucuuaacuguauauacuaug

SEQ ID NO: 479819 - RNA, 21 nt, Human
uucaaugaaaacaaagugagg

SEQ ID NO: 479820 - RNA, 22 nt, Human
augaagcuaaacccugcagcca

SEQ ID NO: 479821 - RNA, 22 nt, Human
aagaacagguucuagaaccauu

SEQ ID NO: 479822 - RNA, 21 nt, Human
ucucuggaauuagaccauguu

SEQ ID NO: 479823 - RNA, 22 nt, Human
gcaaaugcuaaaguguagagac

SEQ ID NO: 479824 - RNA, 22 nt, Human
ucccugggcaucacguugcuuc

SEQ ID NO: 479825 - RNA, 22 nt, Human
cccaggacucggcacucuccuu

SEQ ID NO: 479826 - RNA, 22 nt, Human
caggguccaucuuucaucacug

SEQ ID NO: 479827 - RNA, 22 nt, Human
ugggcagacugagcccuguccc

SEQ ID NO: 479828 - RNA, 22 nt, Human
uucauauaaauggaaucagaau

SEQ ID NO: 479829 - RNA, 22 nt, Human
caugaaugcuggguucauguaa

SEQ ID NO: 479830 - RNA, 22 nt, Human
uggaagggagugacagucagag

SEQ ID NO: 479831 - RNA, 22 nt, Human
agcugcuccuuuccugcaggcg

SEQ ID NO: 479832 - RNA, 22 nt, Human
auguagcagaagauguuuuccu

SEQ ID NO: 479833 - RNA, 22 nt, Human
cuggggcccaucgagggcugag

SEQ ID NO: 479834 - RNA, 22 nt, Human
aggcugggcuccgcccaacucc

SEQ ID NO: 479835 - RNA, 22 nt, Human
gccaggcuggccagcaccuucu

SEQ ID NO: 479836 - RNA, 22 nt, Human
guauuagguuggugcaaaauug

SEQ ID NO: 479837 - RNA, 22 nt, Human
uccuucagcuacucaguuucca

SEQ ID NO: 479838 - RNA, 22 nt, Human
cauuucugauuacagaauacua

SEQ ID NO: 479839 - RNA, 22 nt, Human
uguacuugaacuugacuguaga

SEQ ID NO: 479840 - RNA, 22 nt, Human
ucagaacaauugggaaccauua

SEQ ID NO: 479841 - RNA, 22 nt, Human
ucuggcucugacacuacuguua

SEQ ID NO: 479842 - RNA, 22 nt, Human
gcagcugcagguggucccaugc

SEQ ID NO: 479843 - RNA, 22 nt, Human
uggcuucagacuucugcuacgu

SEQ ID NO: 479844 - RNA, 22 nt, Human
aaaaugaggucaauauccuuuu

SEQ ID NO: 479845 - RNA, 22 nt, Human
cauacauuuugcauauuuacca

SEQ ID NO: 479846 - RNA, 22 nt, Human
agaaacuucagcuauucuuuug

SEQ ID NO: 479847 - RNA, 22 nt, Human
ucugagaguccaucuccaagcc

SEQ ID NO: 479848 - RNA, 22 nt, Human
gcagcugagagaagaacagggc

SEQ ID NO: 479849 - RNA, 22 nt, Human
caaagccauagaguagauaaga

SEQ ID NO: 479850 - RNA, 17 nt, Human
guuugcaugguguuaac

SEQ ID NO: 479851 - RNA, 22 nt, Human
ugcagggaaagggcacugggcu

SEQ ID NO: 479852 - RNA, 22 nt, Human
ggcuggguuauuuauggccaag

SEQ ID NO: 479853 - RNA, 22 nt, Human
cuuauguauaauguuccacaua

SEQ ID NO: 479854 - RNA, 22 nt, Human
auggcaagcaagcugaagagau

SEQ ID NO: 479855 - RNA, 19 nt, Human
agcagagcagggccguggg

SEQ ID NO: 479856 - RNA, 22 nt, Human
ggcagcuggggcagugcccugu

SEQ ID NO: 479857 - RNA, 22 nt, Human
uuguuucugaguuuucauguau

SEQ ID NO: 479858 - RNA, 22 nt, Human
aauuuuauuaacuggauguagc

SEQ ID NO: 479859 - RNA, 22 nt, Human
gcuggccugcugggcaccaccg

SEQ ID NO: 479860 - RNA, 19 nt, Human
aggcagaggcuuggcuagc

SEQ ID NO: 479861 - RNA, 22 nt, Human
gugugccaccagucaaggugaa

SEQ ID NO: 479862 - RNA, 22 nt, Human
uccagcuugccuggucuuuugg

SEQ ID NO: 479863 - RNA, 22 nt, Human
aggccuggccugggcggcauug

SEQ ID NO: 479864 - RNA, 22 nt, Human
aaggcagagggcuggaucagag

SEQ ID NO: 479865 - RNA, 22 nt, Human
ugccuguccugaggaugagggu

SEQ ID NO: 479866 - RNA, 22 nt, Human
cacccaggcagguggcugagaa

SEQ ID NO: 479867 - RNA, 22 nt, Human
agcaauauaaauguuggguaga

SEQ ID NO: 479868 - RNA, 22 nt, Human
cagggcuggguuaaaagcaggg

SEQ ID NO: 479869 - RNA, 19 nt, Human
ggcugucuggcguguggau

SEQ ID NO: 479870 - RNA, 22 nt, Human
uagaaaauagggccuguggagc

SEQ ID NO: 479871 - RNA, 22 nt, Human
ggagaugguggaagcuggugca

SEQ ID NO: 479872 - RNA, 20 nt, Human
uguuccaugacuauuuggau

SEQ ID NO: 479873 - RNA, 23 nt, Human
aggugcagcccuggaccugcccc

SEQ ID NO: 479874 - RNA, 22 nt, Human
gggcuccaacggugagcaugga

SEQ ID NO: 479875 - RNA, 20 nt, Human
ccucaggaugagggugagca

SEQ ID NO: 479876 - RNA, 22 nt, Human
gcugggagucgcgucuguggcc

SEQ ID NO: 479877 - RNA, 22 nt, Human
uuuauugacccaaagcgagagu

SEQ ID NO: 479878 - RNA, 22 nt, Human
caguaggaaggaugcagaaaaa

SEQ ID NO: 479879 - RNA, 22 nt, Human
ccagggaggguccuguggcuuc

SEQ ID NO: 479880 - RNA, 22 nt, Human
uaugugcaguuugcucuuaaca

SEQ ID NO: 479881 - RNA, 22 nt, Human
gaaugaauagguguccagaugg

SEQ ID NO: 479882 - RNA, 22 nt, Human
aaugucugcucuacucaggagg

SEQ ID NO: 479883 - RNA, 17 nt, Human
uugggagagaaagguau

SEQ ID NO: 479884 - RNA, 20 nt, Human
aggcucagcugagcucuugg

SEQ ID NO: 479885 - RNA, 22 nt, Human
agcaggugaauuccuggaugug

SEQ ID NO: 479886 - RNA, 22 nt, Human
gaagcagcuagcccacuaguca

SEQ ID NO: 479887 - RNA, 22 nt, Human
uuuacucuugcuacacaacugu

SEQ ID NO: 479888 - RNA, 22 nt, Human
auguguaaaaagugcuuaauau

SEQ ID NO: 479889 - RNA, 22 nt, Human
cugggagauugcuagagaugca

SEQ ID NO: 479890 - RNA, 22 nt, Human
aaaagggacuacucucagcucc

SEQ ID NO: 479891 - RNA, 22 nt, Human
aggcccuggguuagggcccacu

SEQ ID NO: 479892 - RNA, 22 nt, Human
uggcugagggcacuaugaagcc

SEQ ID NO: 479893 - RNA, 19 nt, Human
acauggcaucccaggaggu

SEQ ID NO: 479894 - RNA, 22 nt, Human
agcuaggaaauugaggcugaga

SEQ ID NO: 479895 - RNA, 22 nt, Human
aucuucaacuugaucauuugaa

SEQ ID NO: 479896 - RNA, 22 nt, Human
uccuggguccauggcagccgaa

SEQ ID NO: 479897 - RNA, 22 nt, Human
ugaagcaacuggacaaguuggc

SEQ ID NO: 479898 - RNA, 22 nt, Human
ugccuggguguaaagggccaac

SEQ ID NO: 479899 - RNA, 22 nt, Human
cugccugugugugccugcagaa

SEQ ID NO: 479900 - RNA, 22 nt, Human
cuuauguaugcuacuuuguggu

SEQ ID NO: 479901 - RNA, 22 nt, Human
uucaugugaucacagauuguaa

SEQ ID NO: 479902 - RNA, 22 nt, Human
gggcuggucuggcuuagucagg

SEQ ID NO: 479903 - RNA, 21 nt, Human
ccacauucucauucugacugc

SEQ ID NO: 479904 - RNA, 22 nt, Human
ggcagaccucuccagccccaca

SEQ ID NO: 479905 - RNA, 22 nt, Human
aggucauuaaaguuaaaugagg

SEQ ID NO: 479906 - RNA, 22 nt, Human
agcagcugcagggagggucugc

SEQ ID NO: 479907 - RNA, 22 nt, Human
uguggccucaaggcugcccuca

SEQ ID NO: 479908 - RNA, 22 nt, Human
gggcacuggaggccaaggagcu

SEQ ID NO: 479909 - RNA, 22 nt, Human
cagagguauugcaaaagccuag

SEQ ID NO: 479910 - RNA, 22 nt, Human
uguuuauugagugccuacuaua

SEQ ID NO: 479911 - RNA, 22 nt, Human
auauuaggaguuaaauguauua

SEQ ID NO: 479912 - RNA, 22 nt, Human
ugucucugauaaguaguucagu

SEQ ID NO: 479913 - RNA, 22 nt, Human
agauuucaaugugagcauuagu

SEQ ID NO: 479914 - RNA, 22 nt, Human
cuuaaauuggaugaguuaaguu

SEQ ID NO: 479915 - RNA, 22 nt, Human
ccacagggcacagacaggaagc

SEQ ID NO: 479916 - RNA, 22 nt, Human
agggccagcacuccuggcagga

SEQ ID NO: 479917 - RNA, 22 nt, Human
gggcucugcgcucagcuccagc

SEQ ID NO: 479918 - RNA, 22 nt, Human
uucuugcaggucacucacugag

SEQ ID NO: 479919 - RNA, 22 nt, Human
ucccugcucagcucaccuggca

SEQ ID NO: 479920 - RNA, 22 nt, Human
auucuucacuguuucagaauga

SEQ ID NO: 479921 - RNA, 22 nt, Human
ccagccuggguguuagaagaca

SEQ ID NO: 479922 - RNA, 22 nt, Human
cugagccaugagccugcgccca

SEQ ID NO: 479923 - RNA, 22 nt, Human
cagcugagcaucacuagucugg

SEQ ID NO: 479924 - RNA, 22 nt, Human
gggaggugauggcaagcagcgg

SEQ ID NO: 479925 - RNA, 22 nt, Human
aaaagacauaugugggcauucu

SEQ ID NO: 479926 - RNA, 22 nt, Human
ggcagugaaugaaacagaggcu

SEQ ID NO: 479927 - RNA, 22 nt, Human
gcugugugacugagagccuggc

SEQ ID NO: 479928 - RNA, 22 nt, Human
cuauuaggcuuccauuucaugc

SEQ ID NO: 479929 - RNA, 22 nt, Human
gcuggugcauuagcugcaguuc

SEQ ID NO: 479930 - RNA, 22 nt, Human
gcaggagcaaacugcagugugg

SEQ ID NO: 479931 - RNA, 22 nt, Human
augcccgauaccuaguuaacuc

SEQ ID NO: 479932 - RNA, 22 nt, Human
gcugucccgaaccccugguaau

SEQ ID NO: 479933 - RNA, 22 nt, Human
gcugagagugggugcagugcuu

SEQ ID NO: 479934 - RNA, 22 nt, Human
ggccagggccuggggacugucc

SEQ ID NO: 479935 - RNA, 22 nt, Human
uacuuccagcaaucugcauauu

SEQ ID NO: 479936 - RNA, 22 nt, Human
caguuuuucaaaauuacaugau

SEQ ID NO: 479937 - RNA, 22 nt, Human
ugcagaagugagucaugaggaa

SEQ ID NO: 479938 - RNA, 22 nt, Human
aaaaauguuaucuacuguccga

SEQ ID NO: 479939 - RNA, 22 nt, Human
guguaaggccccagguucuuua

SEQ ID NO: 479940 - RNA, 22 nt, Human
agaacagcaguuaugguucauu

SEQ ID NO: 479941 - RNA, 22 nt, Human
cagcuauuuucucauuaaggau

SEQ ID NO: 479942 - RNA, 22 nt, Human
aucuguaaaugcaaauguagcu

SEQ ID NO: 479943 - RNA, 22 nt, Human
cccauucauccucgcuuccuuc

SEQ ID NO: 479944 - RNA, 20 nt, Human
gagauggcuaagugcugaac

SEQ ID NO: 479945 - RNA, 22 nt, Human
ccucagggaggccucuguggcu

SEQ ID NO: 479946 - RNA, 22 nt, Human
ugcuguagcccugcacagugca

SEQ ID NO: 479947 - RNA, 22 nt, Human
ugaugggaaaaugaggccuggg

SEQ ID NO: 479948 - RNA, 22 nt, Human
uccaggcaaaaaccaacuacag

SEQ ID NO: 479949 - RNA, 18 nt, Human
cggcagagugcuucuagc

SEQ ID NO: 479950 - RNA, 22 nt, Human
cacagggccacuuucccaguaa

SEQ ID NO: 479951 - RNA, 22 nt, Human
caggcagagugagguggucuaa

SEQ ID NO: 479952 - RNA, 22 nt, Human
cgcugccaggauccccugccgg

SEQ ID NO: 479953 - RNA, 22 nt, Human
ccugggcaucucaugcaccugc

SEQ ID NO: 479954 - RNA, 22 nt, Human
gagagugagauaauuucacaua

SEQ ID NO: 479955 - RNA, 22 nt, Human
ggcuucucucuucacauggcuu

SEQ ID NO: 479956 - RNA, 19 nt, Human
acagaaauguaagugagac

SEQ ID NO: 479957 - RNA, 22 nt, Human
ugaaggccagcagagugaaggc

SEQ ID NO: 479958 - RNA, 22 nt, Human
agccaggcugcaguuggcuggc

SEQ ID NO: 479959 - RNA, 22 nt, Human
cagccagcugaauguaccauga

SEQ ID NO: 479960 - RNA, 22 nt, Human
caugggaggucugcaaggugcu

SEQ ID NO: 479961 - RNA, 22 nt, Human
ucccaguguggcaggccaugga

SEQ ID NO: 479962 - RNA, 22 nt, Human
accugccuaucagcugccugcu

SEQ ID NO: 479963 - RNA, 22 nt, Human
cucaggcuugggaggaggccca

SEQ ID NO: 479964 - RNA, 22 nt, Human
gccuggagacagcagaggcggc

SEQ ID NO: 479965 - RNA, 22 nt, Human
uuugaaaggaauuaggaugaca

SEQ ID NO: 479966 - RNA, 22 nt, Human
gggcucugggauucagagcaag

SEQ ID NO: 479967 - RNA, 22 nt, Human
gcuuuuauuucuucacaaaagu

SEQ ID NO: 479968 - RNA, 22 nt, Human
ucucagaggcccgacguucucc

SEQ ID NO: 479969 - RNA, 22 nt, Human
aauguguacuuuuucaugcuca

SEQ ID NO: 479970 - RNA, 22 nt, Human
cagacagaccugcaagggcaca

SEQ ID NO: 479971 - RNA, 22 nt, Human
auguuauuaaaguacagauucu

SEQ ID NO: 479972 - RNA, 22 nt, Human
gaaggccacuuuguguugagaa

SEQ ID NO: 479973 - RNA, 22 nt, Human
auugucgcuuauuuaggugcuu

SEQ ID NO: 479974 - RNA, 23 nt, Human
ucuugaaaagccuacagcaguuc

SEQ ID NO: 479975 - RNA, 22 nt, Human
aggggagcuaacaccagagccc

SEQ ID NO: 479976 - RNA, 22 nt, Human
cccagcugcaccucuauggccu

SEQ ID NO: 479977 - RNA, 22 nt, Human
uacauauuugucuuuguacugu

SEQ ID NO: 479978 - RNA, 22 nt, Human
uuaugcuaaaugaaucaaguca

SEQ ID NO: 479979 - RNA, 22 nt, Human
gccugaagaacagcugugagga

SEQ ID NO: 479980 - RNA, 22 nt, Human
augcacuugcguguuugcaaau

SEQ ID NO: 479981 - RNA, 22 nt, Human
ugggacuuguguggcaguauuu

SEQ ID NO: 479982 - RNA, 22 nt, Human
guccuuugaaggcaaaaggaga

SEQ ID NO: 479983 - RNA, 22 nt, Human
gacccugccaugagugacaggg

SEQ ID NO: 479984 - RNA, 22 nt, Human
uuuuuccuuggaugugucucuc

SEQ ID NO: 479985 - RNA, 22 nt, Human
uuucccaaguguaaacauggca

SEQ ID NO: 479986 - RNA, 22 nt, Human
uuagccauauagaaaaagagcu

SEQ ID NO: 479987 - RNA, 22 nt, Human
augcaguagauaggcacuuuua

SEQ ID NO: 479988 - RNA, 22 nt, Human
gaaaccucuuagccucucuuug

SEQ ID NO: 479989 - RNA, 22 nt, Human
cuugccuguggcuaguuggcuc

SEQ ID NO: 479990 - RNA, 22 nt, Human
ccaggagccacucaggcccaca

SEQ ID NO: 479991 - RNA, 22 nt, Human
cuagggcacuaggacucaugug

SEQ ID NO: 479992 - RNA, 22 nt, Human
cugugacagagcuugagugaga

SEQ ID NO: 479993 - RNA, 22 nt, Human
ucuuugcaaauguuauuaucuu

SEQ ID NO: 479994 - RNA, 22 nt, Human
cuggcugguuacuauuucuggu

SEQ ID NO: 479995 - RNA, 22 nt, Human
ucucaggaagauuagggcuaag

SEQ ID NO: 479996 - RNA, 22 nt, Human
ggccugaggcgucccagcugug

SEQ ID NO: 479997 - RNA, 22 nt, Human
guggcugcucgggcuccggccc

SEQ ID NO: 479998 - RNA, 21 nt, Human
ccagaggccucucuuggccac

SEQ ID NO: 479999 - RNA, 22 nt, Human
gccuggcaggccucaugagggg

SEQ ID NO: 480000 - RNA, 22 nt, Human
aggcugaggcagguggaucacu

SEQ ID NO: 480001 - RNA, 20 nt, Human
ggaagccagcauccuugagg

SEQ ID NO: 480002 - RNA, 22 nt, Human
uuucaguguaagguuuccagga

SEQ ID NO: 480003 - RNA, 22 nt, Human
gagcuggugugugcccgagcac

SEQ ID NO: 480004 - RNA, 22 nt, Human
aacaacuugcguucagagaugu

SEQ ID NO: 480005 - RNA, 23 nt, Human
aaaugcagggucgcagguuacag

SEQ ID NO: 480006 - RNA, 22 nt, Human
uccaggcaaagccuuguagacg

SEQ ID NO: 480007 - RNA, 21 nt, Human
uccugcagaaugccuuccuac

SEQ ID NO: 480008 - RNA, 22 nt, Human
auucagcauaaucaguagcuug

SEQ ID NO: 480009 - RNA, 22 nt, Human
auacuguuucucuucuacauga

SEQ ID NO: 480010 - RNA, 22 nt, Human
ugacagaaugugacucucagau

SEQ ID NO: 480011 - RNA, 22 nt, Human
cugcugucuuuauuucacugcu

SEQ ID NO: 480012 - RNA, 22 nt, Human
aggagcugaagucucugcacuc

SEQ ID NO: 480013 - RNA, 22 nt, Human
agaaugcuccagagcugaaaga

SEQ ID NO: 480014 - RNA, 22 nt, Human
cauuuguaguaucuguuuauau

SEQ ID NO: 480015 - RNA, 22 nt, Human
ugaggccaaugacccugggcag

SEQ ID NO: 480016 - RNA, 22 nt, Human
aggacagaccuaggacuggagc

SEQ ID NO: 480017 - RNA, 22 nt, Human
gcuucauuacugacagucugug

SEQ ID NO: 480018 - RNA, 22 nt, Human
aucaggaugaagcuguagcgaa

SEQ ID NO: 480019 - RNA, 22 nt, Human
uagcugccuaugugauaagaga

SEQ ID NO: 480020 - RNA, 22 nt, Human
gcugaggccucagaaggcugag

SEQ ID NO: 480021 - RNA, 17 nt, Human
ccagguggaaucgugga

SEQ ID NO: 480022 - RNA, 22 nt, Human
ggcagugaaaaaguauguuucc

SEQ ID NO: 480023 - RNA, 20 nt, Human
gagagcuggggaugaggcug

SEQ ID NO: 480024 - RNA, 22 nt, Human
cucuggccugcuuccucaggua

SEQ ID NO: 480025 - RNA, 22 nt, Human
uuguuucaggaugguuuguuac

SEQ ID NO: 480026 - RNA, 22 nt, Human
ccagcugcagguguuccagaug

SEQ ID NO: 480027 - RNA, 22 nt, Human
guaaaucccauccuuucucugg

SEQ ID NO: 480028 - RNA, 22 nt, Human
guuuuauaauugcuucauaaga

SEQ ID NO: 480029 - RNA, 22 nt, Human
cagcuuuaccaauauuuggaaa

SEQ ID NO: 480030 - RNA, 22 nt, Human
acagauccugguuacagccauu

SEQ ID NO: 480031 - RNA, 22 nt, Human
ggccagaggugguacauagcuu

SEQ ID NO: 480032 - RNA, 22 nt, Human
ccaaagagcuagaauuauaggc

SEQ ID NO: 480033 - RNA, 22 nt, Human
agggcugcaccggggcuucgcg

SEQ ID NO: 480034 - RNA, 22 nt, Human
gcugucuguggugucagcugac

SEQ ID NO: 480035 - RNA, 22 nt, Human
agacucugugcuccuugcuuuc

SEQ ID NO: 480036 - RNA, 22 nt, Human
aaaaacugcaauuacuuuuguc

SEQ ID NO: 480037 - RNA, 22 nt, Human
agccagaggccagccugccuca

SEQ ID NO: 480038 - RNA, 22 nt, Human
uggcugagaaugggaugaugcc

SEQ ID NO: 480039 - RNA, 22 nt, Human
cagcugggugaucuugggcagg

SEQ ID NO: 480040 - RNA, 22 nt, Human
ccucuggcuguaccacuggcac

SEQ ID NO: 480041 - RNA, 22 nt, Human
agccaagcugaucuccugcuga

SEQ ID NO: 480042 - RNA, 22 nt, Human
gaggagagggcugcgggcccac

SEQ ID NO: 480043 - RNA, 22 nt, Human
cggagccugcuuguugcagcug

SEQ ID NO: 480044 - RNA, 22 nt, Human
acauuuaaauaugccuuauauu

SEQ ID NO: 480045 - RNA, 22 nt, Human
ugggcacuauggcucugugcac

SEQ ID NO: 480046 - RNA, 21 nt, Human
uuuagggaccaggucauaggc

SEQ ID NO: 480047 - RNA, 22 nt, Human
ugggcagaaaucaguaucagau

SEQ ID NO: 480048 - RNA, 22 nt, Human
acacagggaggaggugcugugc

SEQ ID NO: 480049 - RNA, 16 nt, Human
aggcucagaggcugga

SEQ ID NO: 480050 - RNA, 22 nt, Human
gccuggagcccaguguggggcu

SEQ ID NO: 480051 - RNA, 22 nt, Human
aaggcaguagguguuucaaacu

SEQ ID NO: 480052 - RNA, 22 nt, Human
agaggcugucccuugcuauucc

SEQ ID NO: 480053 - RNA, 22 nt, Human
auuuauuaugggauuuggcuca

SEQ ID NO: 480054 - RNA, 22 nt, Human
cuauuaaacacuacugugcacu

SEQ ID NO: 480055 - RNA, 22 nt, Human
cuggagugaagcuuauuuuuca

SEQ ID NO: 480056 - RNA, 22 nt, Human
ggcucuggugggaagguuagau

SEQ ID NO: 480057 - RNA, 22 nt, Human
gggcugcuguagagaacauguu

SEQ ID NO: 480058 - RNA, 22 nt, Human
uggcuagcccuuguggggagag

SEQ ID NO: 480059 - RNA, 22 nt, Human
uaggccauucuuggagcuuacu

SEQ ID NO: 480060 - RNA, 22 nt, Human
ccagcugucacucagaaaggcc

SEQ ID NO: 480061 - RNA, 22 nt, Human
gcuggccacacugcugauggag

SEQ ID NO: 480062 - RNA, 22 nt, Human
acugucugcccugagaugccag

SEQ ID NO: 480063 - RNA, 22 nt, Human
caggcagcccugcaccaagugu

SEQ ID NO: 480064 - RNA, 22 nt, Human
aggcacaguggcucacaccugu

SEQ ID NO: 480065 - RNA, 22 nt, Human
cagggccacacggaagggaaca

SEQ ID NO: 480066 - RNA, 22 nt, Human
ucaggcagagggagaagccaag

SEQ ID NO: 480067 - RNA, 22 nt, Human
gcagggacaucuucagaucacu

SEQ ID NO: 480068 - RNA, 22 nt, Human
caccagggcagcagccuagucu

SEQ ID NO: 480069 - RNA, 20 nt, Human
uggcaucucucaauuguagg

SEQ ID NO: 480070 - RNA, 22 nt, Human
gaaggcuggcuuucugagagca

SEQ ID NO: 480071 - RNA, 22 nt, Human
uugucuguaaagacggccacca

SEQ ID NO: 480072 - RNA, 22 nt, Human
gcagggccuuagcagcggcugc

SEQ ID NO: 480073 - RNA, 22 nt, Human
ggugcagaaggaagggagcugg

SEQ ID NO: 480074 - RNA, 22 nt, Human
gagauauguuagaaagcuauug

SEQ ID NO: 480075 - RNA, 22 nt, Human
ccaggcuuucccagccucucca

SEQ ID NO: 480076 - RNA, 18 nt, Human
agcagggcauuuugccau

SEQ ID NO: 480077 - RNA, 22 nt, Human
cccucagcuccacccucagcag

SEQ ID NO: 480078 - RNA, 22 nt, Human
gcucagagcaucccagugaaug

SEQ ID NO: 480079 - RNA, 22 nt, Human
gggaccugccaaggccacccag

SEQ ID NO: 480080 - RNA, 22 nt, Human
auguaucagauaaagcaugugg

SEQ ID NO: 480081 - RNA, 22 nt, Human
gcaccuggacagugacccuagc

SEQ ID NO: 480082 - RNA, 22 nt, Human
cagggagcuuucccaggacccu

SEQ ID NO: 480083 - RNA, 22 nt, Human
ccagagagcuacaaggcauaaa

SEQ ID NO: 480084 - RNA, 22 nt, Human
cugcaggcucgaagacacggau

SEQ ID NO: 480085 - RNA, 22 nt, Human
ccagcaggguugguuucuucug

SEQ ID NO: 480086 - RNA, 22 nt, Human
uucaguuucagucuugcaaaaa

SEQ ID NO: 480087 - RNA, 22 nt, Human
auucaguucuaaggucagugcc

SEQ ID NO: 480088 - RNA, 22 nt, Human
gccacccccaaguagguggucu

SEQ ID NO: 480089 - RNA, 22 nt, Human
gcauggcaaauaucgagggcag

SEQ ID NO: 480090 - RNA, 22 nt, Human
gagcuggcuccgccaugcugcu

SEQ ID NO: 480091 - RNA, 22 nt, Human
gcucugggugaacuuggagcaa

SEQ ID NO: 480092 - RNA, 22 nt, Human
cugagaguguggcuuccaggcc

SEQ ID NO: 480093 - RNA, 22 nt, Human
aucaaaguuucccagaaguugu

SEQ ID NO: 480094 - RNA, 20 nt, Human
cugcaggguuagaggcucca

SEQ ID NO: 480095 - RNA, 22 nt, Human
ugggcugccggcaggcucugcc

SEQ ID NO: 480096 - RNA, 22 nt, Human
ugccaggcuaaguggaggacuu

SEQ ID NO: 480097 - RNA, 18 nt, Human
cuucagugacagucuggc

SEQ ID NO: 480098 - RNA, 22 nt, Human
gcacagccacugagugagaacc

SEQ ID NO: 480099 - RNA, 21 nt, Human
cccagggaagccgcagucacc

SEQ ID NO: 480100 - RNA, 22 nt, Human
aucacauugccagugauuaccc

SEQ ID NO: 480101 - RNA, 22 nt, Human
ucagaaauuuucucaguaguuc

SEQ ID NO: 480102 - RNA, 22 nt, Human
cagaccugagguugaguaccag

SEQ ID NO: 480103 - RNA, 18 nt, Human
aguggucuguuauaucau

SEQ ID NO: 480104 - RNA, 22 nt, Human
ggcucaggggccaggccugucc

SEQ ID NO: 480105 - RNA, 22 nt, Human
gagcacaggcuuugguggacac

SEQ ID NO: 480106 - RNA, 22 nt, Human
gagaggccaccugacgagcagu

SEQ ID NO: 480107 - RNA, 22 nt, Human
ccagggcugagcugugaccaug

SEQ ID NO: 480108 - RNA, 22 nt, Human
ggagaagcaggugcuuuggguc

SEQ ID NO: 480109 - RNA, 22 nt, Human
aggagagaauguuccaggcuug

SEQ ID NO: 480110 - RNA, 22 nt, Human
guuauaaauaccuaauaggauu

SEQ ID NO: 480111 - RNA, 22 nt, Human
cagagguagccgagugcaaucg

SEQ ID NO: 480112 - RNA, 22 nt, Human
agccaaggacacggagccuccu

SEQ ID NO: 480113 - RNA, 22 nt, Human
gccucugcacuguggcacacca

SEQ ID NO: 480114 - RNA, 22 nt, Human
ugaaacaagggaccguccuuuc

SEQ ID NO: 480115 - RNA, 22 nt, Human
ugaagggcaaccccaggcccag

SEQ ID NO: 480116 - RNA, 22 nt, Human
uucacauuugcccuuaugugug

SEQ ID NO: 480117 - RNA, 22 nt, Human
ggcucagaaacuaaaggcgcug

SEQ ID NO: 480118 - RNA, 22 nt, Human
uaauuuuaugacaguguauuuu

SEQ ID NO: 480119 - RNA, 22 nt, Human
agcaggcuaagggaccuguuua

SEQ ID NO: 480120 - RNA, 22 nt, Human
aguggcagggcuggcugcugca

SEQ ID NO: 480121 - RNA, 22 nt, Human
ggaagccacccagcuuugauag

SEQ ID NO: 480122 - RNA, 22 nt, Human
gaaggaaaggucucaugccuuu

SEQ ID NO: 480123 - RNA, 22 nt, Human
ccugggcaggaugggcccggug

SEQ ID NO: 480124 - RNA, 22 nt, Human
ucugccuguugcuagaauguca

SEQ ID NO: 480125 - RNA, 22 nt, Human
aaaaaugugaccacaggguguu

SEQ ID NO: 480126 - RNA, 22 nt, Human
cagcagugaugugugaggguuc

SEQ ID NO: 480127 - RNA, 22 nt, Human
cacauggggcgcugcauuggcc

SEQ ID NO: 480128 - RNA, 22 nt, Human
agauacauuguucuaagcauug

SEQ ID NO: 480129 - RNA, 22 nt, Human
ggcugcuugcuguuucuuggau

SEQ ID NO: 480130 - RNA, 22 nt, Human
ucauaacagcuaagucccuuuc

SEQ ID NO: 480131 - RNA, 22 nt, Human
cucacagaugcugugggucagg

SEQ ID NO: 480132 - RNA, 22 nt, Human
agacagcaugauacaugaugcu

SEQ ID NO: 480133 - RNA, 20 nt, Human
uuucacaucugucccuuuaa

SEQ ID NO: 480134 - RNA, 22 nt, Human
ccuucugcucccuggccagggc

SEQ ID NO: 480135 - RNA, 22 nt, Human
acucccacuccagaguagaagc

SEQ ID NO: 480136 - RNA, 22 nt, Human
gaaggcuaaaggggcagagguu

SEQ ID NO: 480137 - RNA, 22 nt, Human
ccugggagugugccaucucugu

SEQ ID NO: 480138 - RNA, 22 nt, Human
agggcucugagcuggaccaccu

SEQ ID NO: 480139 - RNA, 22 nt, Human
cuccagggaaaggggcguccgc

SEQ ID NO: 480140 - RNA, 22 nt, Human
ccuggccuggcacucccucugc

SEQ ID NO: 480141 - RNA, 22 nt, Human
ugucucaguucccuucucugga

SEQ ID NO: 480142 - RNA, 22 nt, Human
cugcugugcaggugccuaugau

SEQ ID NO: 480143 - RNA, 22 nt, Human
cacagguguucuugcagugaaa

SEQ ID NO: 480144 - RNA, 22 nt, Human
augcuuuacaguuuuccaaaca

SEQ ID NO: 480145 - RNA, 22 nt, Human
agucccuucucaaagugugcgg

SEQ ID NO: 480146 - RNA, 22 nt, Human
cugggcaguaugaauauucaaa

SEQ ID NO: 480147 - RNA, 22 nt, Human
cuugucagccaauuguggauuu

SEQ ID NO: 480148 - RNA, 22 nt, Human
gccagaagacuggagucagcug

SEQ ID NO: 480149 - RNA, 22 nt, Human
aaagccacguggccuggggagc

SEQ ID NO: 480150 - RNA, 22 nt, Human
uuucauugcagagucugugugc

SEQ ID NO: 480151 - RNA, 22 nt, Human
caaaugcaggucauaaccugag

SEQ ID NO: 480152 - RNA, 22 nt, Human
acagaccaaguuuccagcaggu

SEQ ID NO: 480153 - RNA, 21 nt, Human
ucugucugguuuuagaguggc

SEQ ID NO: 480154 - RNA, 22 nt, Human
aagggcucgguagcaguccuga

SEQ ID NO: 480155 - RNA, 18 nt, Human
cccagugcucacugccuc

SEQ ID NO: 480156 - RNA, 22 nt, Human
ccugugucuuccccacuggugu

SEQ ID NO: 480157 - RNA, 22 nt, Human
agccauugaguuuuaugugcua

SEQ ID NO: 480158 - RNA, 22 nt, Human
ugccagccagguucugaggcua

SEQ ID NO: 480159 - RNA, 22 nt, Human
cccagcaucccagugggcagca

SEQ ID NO: 480160 - RNA, 22 nt, Human
acauuucucuugaugucucuau

SEQ ID NO: 480161 - RNA, 22 nt, Human
aagauuuaccacuuuauucaag

SEQ ID NO: 480162 - RNA, 22 nt, Human
gggccagagcuuggcagcuggg

SEQ ID NO: 480163 - RNA, 19 nt, Human
agaggcagucuccaacagg

SEQ ID NO: 480164 - RNA, 22 nt, Human
gaggcaugucuggccuguccca

SEQ ID NO: 480165 - RNA, 22 nt, Human
ucuuacagaaaauagauaacau

SEQ ID NO: 480166 - RNA, 22 nt, Human
aggcagaugguaacugugauau

SEQ ID NO: 480167 - RNA, 22 nt, Human
agccagugggauuagagccucu

SEQ ID NO: 480168 - RNA, 22 nt, Human
aggugcagaaaaaaguccuuua

SEQ ID NO: 480169 - RNA, 22 nt, Human
ugcuggaggggccugaccagga

SEQ ID NO: 480170 - RNA, 22 nt, Human
uuugcagcaaggagagagcauu

SEQ ID NO: 480171 - RNA, 22 nt, Human
uucauuccuucuguaccuugcc

SEQ ID NO: 480172 - RNA, 23 nt, Human
uuaggcacuuaguagggccagag

SEQ ID NO: 480173 - RNA, 22 nt, Human
aaacaucauaggcaugcaugau

SEQ ID NO: 480174 - RNA, 23 nt, Human
ggaguuggauuguacuugcugcu

SEQ ID NO: 480175 - RNA, 22 nt, Human
agaauaguggcaaugacugcac

SEQ ID NO: 480176 - RNA, 22 nt, Human
cucaccaggaacagcugcggag

SEQ ID NO: 480177 - RNA, 21 nt, Human
acaggcuuuagaaaaugacuc

SEQ ID NO: 480178 - RNA, 22 nt, Human
ugggggaagagcuuguuaaagu

SEQ ID NO: 480179 - RNA, 22 nt, Human
cagaggaggcgguauacacugc

SEQ ID NO: 480180 - RNA, 22 nt, Human
cugccagcucgccacaaugaca

SEQ ID NO: 480181 - RNA, 22 nt, Human
caggaugguggcaugaucagaa

SEQ ID NO: 480182 - RNA, 22 nt, Human
ugggaggacuugugggcuucau

SEQ ID NO: 480183 - RNA, 22 nt, Human
cuccaggccauggcugcggagg

SEQ ID NO: 480184 - RNA, 22 nt, Human
agccuucaguaaauccacugug

SEQ ID NO: 480185 - RNA, 22 nt, Human
gcugagcugggacaguccuggg

SEQ ID NO: 480186 - RNA, 22 nt, Human
gauuauauaauggaagcucuug

SEQ ID NO: 480187 - RNA, 20 nt, Human
agugcaagaaagcacagcug

SEQ ID NO: 480188 - RNA, 22 nt, Human
uagagcuggaauuugcagcaag

SEQ ID NO: 480189 - RNA, 22 nt, Human
agagccuguaacaucuuucuua

SEQ ID NO: 480190 - RNA, 22 nt, Human
acagcuuuuaugggaccagcca

SEQ ID NO: 480191 - RNA, 22 nt, Human
caguuucuuaucuucaaaauug

SEQ ID NO: 480192 - RNA, 22 nt, Human
gcaaaaaccacaauuacuuuua

SEQ ID NO: 480193 - RNA, 22 nt, Human
ccagcuccagguagaugggcag

SEQ ID NO: 480194 - RNA, 20 nt, Human
ggcugcugugggcagagagg

SEQ ID NO: 480195 - RNA, 22 nt, Human
ugcagggaaucuguggcuggac

SEQ ID NO: 480196 - RNA, 22 nt, Human
aauguauaaaguguuaauaacu

SEQ ID NO: 480197 - RNA, 22 nt, Human
ugcuuaaacccugaucaugugu

SEQ ID NO: 480198 - RNA, 23 nt, Human
gggugggccaaauuagguagccu

SEQ ID NO: 480199 - RNA, 22 nt, Human
auguguagaacuguaaugccca

SEQ ID NO: 480200 - RNA, 22 nt, Human
cugugggcugaaagugcucccg

SEQ ID NO: 480201 - RNA, 20 nt, Human
ccuggaagagcuccccaggc

SEQ ID NO: 480202 - RNA, 22 nt, Human
ggcugggcaaacaagacucuuc

SEQ ID NO: 480203 - RNA, 19 nt, Human
agcagccaucgaccaugga

SEQ ID NO: 480204 - RNA, 22 nt, Human
cagggcugaagaaauucaaaag

SEQ ID NO: 480205 - RNA, 18 nt, Human
cagaggagagacauucag

SEQ ID NO: 480206 - RNA, 22 nt, Human
acagcagggggagcuguuggac

SEQ ID NO: 480207 - RNA, 22 nt, Human
aaaagguuuugaguacaaauau

SEQ ID NO: 480208 - RNA, 20 nt, Human
aggcugggguguuuugccca

SEQ ID NO: 480209 - RNA, 22 nt, Human
ucuuuacacaagacaagaauaa

SEQ ID NO: 480210 - RNA, 20 nt, Human
accuuucaaaugauucagca

SEQ ID NO: 480211 - RNA, 22 nt, Human
aggccugagcagaggaguggac

SEQ ID NO: 480212 - RNA, 23 nt, Human
uggccucuccccaccuggcagaa

SEQ ID NO: 480213 - RNA, 22 nt, Human
gcucuguguccacagcuggaaa

SEQ ID NO: 480214 - RNA, 22 nt, Human
aaaaguaauugcaauuuuguag

SEQ ID NO: 480215 - RNA, 18 nt, Human
uguacaguuaugagcauu

SEQ ID NO: 480216 - RNA, 22 nt, Human
agagugaaguaauuguuaggau

SEQ ID NO: 480217 - RNA, 22 nt, Human
cagguggaucucuaaggacuga

SEQ ID NO: 480218 - RNA, 22 nt, Human
uacauuuauaaggcuucucugu

SEQ ID NO: 480219 - RNA, 22 nt, Human
gagccagggcugugagcugagc

SEQ ID NO: 480220 - RNA, 21 nt, Human
ucagaacaauuccaugccucc

SEQ ID NO: 480221 - RNA, 22 nt, Human
cagagccacugucugccaggca

SEQ ID NO: 480222 - RNA, 22 nt, Human
cagagccccucagcucucuccc

SEQ ID NO: 480223 - RNA, 22 nt, Human
aagaugcuuauugcuccugcag

SEQ ID NO: 480224 - RNA, 22 nt, Human
cuggaaugccucccugucagag

SEQ ID NO: 480225 - RNA, 22 nt, Human
caguguggcugagacagaggcu

SEQ ID NO: 480226 - RNA, 22 nt, Human
cagugguauuugagagaaugga

SEQ ID NO: 480227 - RNA, 22 nt, Human
ucgccagggaugcuguaaggaa

SEQ ID NO: 480228 - RNA, 22 nt, Human
agggcugaagggaggugcucau

SEQ ID NO: 480229 - RNA, 22 nt, Human
gggaggaaaugugcagcgaauu

SEQ ID NO: 480230 - RNA, 22 nt, Human
gggacuggaacuacuggugcag

SEQ ID NO: 480231 - RNA, 22 nt, Human
gcugggagugggcaagaugaga

SEQ ID NO: 480232 - RNA, 22 nt, Human
uugccucccagcaugggcagcu

SEQ ID NO: 480233 - RNA, 22 nt, Human
auggcagggaccaagcugucau

SEQ ID NO: 480234 - RNA, 22 nt, Human
guccacauaggaacccagcuuc

SEQ ID NO: 480235 - RNA, 23 nt, Human
ggccuguguuuugucugaaguac

SEQ ID NO: 480236 - RNA, 22 nt, Human
accagacacugugaagacaggc

SEQ ID NO: 480237 - RNA, 21 nt, Human
ugcucaugcaaugcaugucca

SEQ ID NO: 480238 - RNA, 22 nt, Human
cugucacacugauaucaggcuu

SEQ ID NO: 480239 - RNA, 22 nt, Human
guggagcccugguagggacccc

SEQ ID NO: 480240 - RNA, 23 nt, Human
guggagccacaucacaggcuccu

SEQ ID NO: 480241 - RNA, 22 nt, Human
augauacaagcaaaacuaauca

SEQ ID NO: 480242 - RNA, 22 nt, Human
caggaggcagagguugcagcga

SEQ ID NO: 480243 - RNA, 22 nt, Human
uccugccucacaguugaaguuu

SEQ ID NO: 480244 - RNA, 22 nt, Human
ugggcugcagagcccggccuuc

SEQ ID NO: 480245 - RNA, 22 nt, Human
cccagcacaggcaauuccauac

SEQ ID NO: 480246 - RNA, 22 nt, Human
uuauuuauggcacuguuggugg

SEQ ID NO: 480247 - RNA, 22 nt, Human
ucacauuuuccuugguaucugu

SEQ ID NO: 480248 - RNA, 22 nt, Human
cugcagcuauauuuucccacag

SEQ ID NO: 480249 - RNA, 22 nt, Human
aaagcucacaguaauacaaggc

SEQ ID NO: 480250 - RNA, 22 nt, Human
uaaauguaccuucugccuuacu

SEQ ID NO: 480251 - RNA, 20 nt, Human
gccuguccugagugucaugg

SEQ ID NO: 480252 - RNA, 22 nt, Human
cuugucugugucggauaaaacu

SEQ ID NO: 480253 - RNA, 22 nt, Human
cccucugaccuccugccacagu

SEQ ID NO: 480254 - RNA, 22 nt, Human
ggguccagacacuccagaggaa

SEQ ID NO: 480255 - RNA, 22 nt, Human
ggcugcucuucuuggcgaccuc

SEQ ID NO: 480256 - RNA, 20 nt, Human
cagccuccacucacucagcu

SEQ ID NO: 480257 - RNA, 22 nt, Human
cagcuggcaaguggagcagggu

SEQ ID NO: 480258 - RNA, 22 nt, Human
agggaccuugauggguuuggga

SEQ ID NO: 480259 - RNA, 22 nt, Human
uucauucccaagaguaaacaua

SEQ ID NO: 480260 - RNA, 22 nt, Human
uaguaugggaagaacuuuguag

SEQ ID NO: 480261 - RNA, 22 nt, Human
augcugagacuggagcagcugg

SEQ ID NO: 480262 - RNA, 19 nt, Human
cagagcugcuggccucguc

SEQ ID NO: 480263 - RNA, 22 nt, Human
acugaaggguaaugugggagcc

SEQ ID NO: 480264 - RNA, 19 nt, Human
aucagcaagguaggaugug

SEQ ID NO: 480265 - RNA, 22 nt, Human
uggcugaauaaaauaugguguu

SEQ ID NO: 480266 - RNA, 22 nt, Human
aagaagagaaaugugcugcugg

SEQ ID NO: 480267 - RNA, 22 nt, Human
agcagccacacgccuccuucuc

SEQ ID NO: 480268 - RNA, 22 nt, Human
uuacaucuaaacugugaacaau

SEQ ID NO: 480269 - RNA, 22 nt, Human
uccugaaaaauuacauguucag

SEQ ID NO: 480270 - RNA, 22 nt, Human
ugcagggaaugcuugcagcaug

SEQ ID NO: 480271 - RNA, 22 nt, Human
gaaccaaguaggauacaaggag

SEQ ID NO: 480272 - RNA, 21 nt, Human
gaguggaacgcucuucacacc

SEQ ID NO: 480273 - RNA, 22 nt, Human
gggcuagaaauucugcagugga

SEQ ID NO: 480274 - RNA, 22 nt, Human
ggcaggagcucagguugguucc

SEQ ID NO: 480275 - RNA, 22 nt, Human
gccaguggcaugcggcagggac

SEQ ID NO: 480276 - RNA, 22 nt, Human
ccuggaaguuggagguugcagu

SEQ ID NO: 480277 - RNA, 22 nt, Human
ggaggccuagccagcuccaguu

SEQ ID NO: 480278 - RNA, 20 nt, Human
uggcaggaauagggccagag

SEQ ID NO: 480279 - RNA, 22 nt, Human
guacccaggcacgccuugcuga

SEQ ID NO: 480280 - RNA, 22 nt, Human
aggagcugggcugcugcuggga

SEQ ID NO: 480281 - RNA, 22 nt, Human
agggccuggugaccuggguccu

SEQ ID NO: 480282 - RNA, 23 nt, Human
cagagcugauuaaacuuaaucuc

SEQ ID NO: 480283 - RNA, 22 nt, Human
agagccuggagguucugcugaa

SEQ ID NO: 480284 - RNA, 22 nt, Human
uaaguuuaaauguacaugaagc

SEQ ID NO: 480285 - RNA, 22 nt, Human
agaacagaugugggcagaccug

SEQ ID NO: 480286 - RNA, 22 nt, Human
ucccugcacagccgagccaugc

SEQ ID NO: 480287 - RNA, 22 nt, Human
agcugguaugaacaggauagga

SEQ ID NO: 480288 - RNA, 22 nt, Human
agccccaguccgcugcgggcgg

SEQ ID NO: 480289 - RNA, 22 nt, Human
agaggcuccuucacucuggcac

SEQ ID NO: 480290 - RNA, 22 nt, Human
ugaggcagcauucuucaagaca

SEQ ID NO: 480291 - RNA, 22 nt, Human
cagccagugugaccgaggagga

SEQ ID NO: 480292 - RNA, 22 nt, Human
ggccaccucugcccuacugagu

SEQ ID NO: 480293 - RNA, 22 nt, Human
ugccuucaaucaggauggucuc

SEQ ID NO: 480294 - RNA, 22 nt, Human
agagcuguuuggacaucugagu

SEQ ID NO: 480295 - RNA, 22 nt, Human
ugaugggaggugcugcaggacc

SEQ ID NO: 480296 - RNA, 22 nt, Human
agggcuggcuaggugcguuccc

SEQ ID NO: 480297 - RNA, 22 nt, Human
uccuuugguuguagacaggaau

SEQ ID NO: 480298 - RNA, 22 nt, Human
cagcugccuaugaccuagccuc

SEQ ID NO: 480299 - RNA, 22 nt, Human
uuuccucugucaugacagcuga

SEQ ID NO: 480300 - RNA, 22 nt, Human
agccuggacagcuacggagaac

SEQ ID NO: 480301 - RNA, 22 nt, Human
ugaagcaguucucagaaguggg

SEQ ID NO: 480302 - RNA, 18 nt, Human
cccagcuccacuucccuc

SEQ ID NO: 480303 - RNA, 22 nt, Human
ucucagucuuugcaaggaugcu

SEQ ID NO: 480304 - RNA, 22 nt, Human
gcucagagggaacaaggggcug

SEQ ID NO: 480305 - RNA, 22 nt, Human
gguuggggcgagcuggaggccc

SEQ ID NO: 480306 - RNA, 22 nt, Human
ugcugccucagcuuccugggcu

SEQ ID NO: 480307 - RNA, 22 nt, Human
agacaggacacaagcugcauaa

SEQ ID NO: 480308 - RNA, 22 nt, Human
cagggccauuggcguggcuguc

SEQ ID NO: 480309 - RNA, 20 nt, Human
uggcagaguugucccaccca

SEQ ID NO: 480310 - RNA, 22 nt, Human
ugcuuuauggauuuguguccug

SEQ ID NO: 480311 - RNA, 22 nt, Human
uccugccucuugccuucuucac

SEQ ID NO: 480312 - RNA, 22 nt, Human
gugggcuucuguuagggaggcu

SEQ ID NO: 480313 - RNA, 22 nt, Human
gaauucugggagagaucugaca

SEQ ID NO: 480314 - RNA, 22 nt, Human
agcagcagaagggagacccagg

SEQ ID NO: 480315 - RNA, 22 nt, Human
uagaggugacacugagaccaua

SEQ ID NO: 480316 - RNA, 22 nt, Human
uuagaaaauuugcuucuuugga

SEQ ID NO: 480317 - RNA, 23 nt, Human
cccuggaguaaauucuuggaagg

SEQ ID NO: 480318 - RNA, 22 nt, Human
cucucuggcuuggcacggagau

SEQ ID NO: 480319 - RNA, 19 nt, Human
ugagcaugcgagcugagaa

SEQ ID NO: 480320 - RNA, 23 nt, Human
ucucaagaggaagcagggcucau

SEQ ID NO: 480321 - RNA, 22 nt, Human
uucucauggugucuuuauacau

SEQ ID NO: 480322 - RNA, 21 nt, Human
uaaaucucuguauucuucagu

SEQ ID NO: 480323 - RNA, 22 nt, Human
gcuguacauuuguguacacuug

SEQ ID NO: 480324 - RNA, 22 nt, Human
ggcucaggccuguaauccuagc

SEQ ID NO: 480325 - RNA, 22 nt, Human
aagguacaguuuuaagaauaag

SEQ ID NO: 480326 - RNA, 22 nt, Human
gcagugcuaaguagcuggccca

SEQ ID NO: 480327 - RNA, 22 nt, Human
gcugucugcaagccaggaaaug

SEQ ID NO: 480328 - RNA, 22 nt, Human
uugcagcugcaguaaauguuca

SEQ ID NO: 480329 - RNA, 22 nt, Human
uggagcaggacggggaguggua

SEQ ID NO: 480330 - RNA, 22 nt, Human
caaggagaguaauugaaugaga

SEQ ID NO: 480331 - RNA, 22 nt, Human
caggggcaagaaugcugucagc

SEQ ID NO: 480332 - RNA, 22 nt, Human
acaggugugagaacaugccuug

SEQ ID NO: 480333 - RNA, 22 nt, Human
aguacuucagaggcugcccagg

SEQ ID NO: 480334 - RNA, 22 nt, Human
uaacaucuuuagcagcucgaac

SEQ ID NO: 480335 - RNA, 22 nt, Human
agcugcagucaagcugggccac

SEQ ID NO: 480336 - RNA, 22 nt, Human
acuguacaaccucugccccugu

SEQ ID NO: 480337 - RNA, 22 nt, Human
ccugccugucaucgccugcgcc

SEQ ID NO: 480338 - RNA, 22 nt, Human
cagggcugguuugucgaagaaa

SEQ ID NO: 480339 - RNA, 22 nt, Human
ccugagcuggaagagcuugugc

SEQ ID NO: 480340 - RNA, 22 nt, Human
ccugggaggcggagguugcagu

SEQ ID NO: 480341 - RNA, 22 nt, Human
cugaggcuggcguuugaggaag

SEQ ID NO: 480342 - RNA, 22 nt, Human
aaagacacacagugcuucaguu

SEQ ID NO: 480343 - RNA, 22 nt, Human
cuggagcuaauaauccaucuga

SEQ ID NO: 480344 - RNA, 22 nt, Human
ccugucugagccagggugggca

SEQ ID NO: 480345 - RNA, 22 nt, Human
gcugccugaucauacaccaggg

SEQ ID NO: 480346 - RNA, 22 nt, Human
uuucauuuugguuaugccauaa

SEQ ID NO: 480347 - RNA, 22 nt, Human
uugacaauguccuuugaauuuc

SEQ ID NO: 480348 - RNA, 22 nt, Human
auaucuuuuagagcaagcuugu

SEQ ID NO: 480349 - RNA, 22 nt, Human
uucagagcaucucuaaagccag

SEQ ID NO: 480350 - RNA, 22 nt, Human
gcuccaggagagggaagcagau

SEQ ID NO: 480351 - RNA, 22 nt, Human
cauugcacagcccuguggugau

SEQ ID NO: 480352 - RNA, 22 nt, Human
cacagggcaggccccaggccuc

SEQ ID NO: 480353 - RNA, 20 nt, Human
uacagucagggcacaggcag

SEQ ID NO: 480354 - RNA, 22 nt, Human
uagccuucucaagacaaaguug

SEQ ID NO: 480355 - RNA, 22 nt, Human
cagcccuggugccaagguuccc

SEQ ID NO: 480356 - RNA, 22 nt, Human
ccugggagagucuguggucucc

SEQ ID NO: 480357 - RNA, 22 nt, Human
aaguggagucccuacaaccagc

SEQ ID NO: 480358 - RNA, 22 nt, Human
cccuggagcugcuugcauguug

SEQ ID NO: 480359 - RNA, 22 nt, Human
uugugcauuucucugagugugu

SEQ ID NO: 480360 - RNA, 22 nt, Human
cccugcaguccuuucuuggcuc

SEQ ID NO: 480361 - RNA, 21 nt, Human
ugagagccuccaaccggcuac

SEQ ID NO: 480362 - RNA, 22 nt, Human
ucacaucuuauuagaguaucuc

SEQ ID NO: 480363 - RNA, 22 nt, Human
gagccagguuugaaucucaguc

SEQ ID NO: 480364 - RNA, 22 nt, Human
cauguuaauaugcauugaguac

SEQ ID NO: 480365 - RNA, 22 nt, Human
aguauuuccuggcuuaucugcu

SEQ ID NO: 480366 - RNA, 22 nt, Human
aggccagaaauuuggaguaugu

SEQ ID NO: 480367 - RNA, 22 nt, Human
ggagcacuauaauagagauuuu

SEQ ID NO: 480368 - RNA, 22 nt, Human
gcaggaagaggcucgaagcccc

SEQ ID NO: 480369 - RNA, 22 nt, Human
ccacagggucagccacucugca

SEQ ID NO: 480370 - RNA, 22 nt, Human
caccaggcugaaccagagggga

SEQ ID NO: 480371 - RNA, 22 nt, Human
acaaaggcauagugaauguuuu

SEQ ID NO: 480372 - RNA, 20 nt, Human
ccagcuuucccugcagcauc

SEQ ID NO: 480373 - RNA, 22 nt, Human
ccagagccucgcccggagccuc

SEQ ID NO: 480374 - RNA, 22 nt, Human
aggggccucgcaggaccgcucc

SEQ ID NO: 480375 - RNA, 22 nt, Human
gagcaggaugggagcuggggcc

SEQ ID NO: 480376 - RNA, 22 nt, Human
cauuuguaguuaaaaaugucuc

SEQ ID NO: 480377 - RNA, 22 nt, Human
aaauucuaugucaauguuuauu

SEQ ID NO: 480378 - RNA, 18 nt, Human
agcagcugucagaaugcc

SEQ ID NO: 480379 - RNA, 21 nt, Human
gcagcaguguucuagaauacu

SEQ ID NO: 480380 - RNA, 22 nt, Human
cauguuaaaauauacauucuga

SEQ ID NO: 480381 - RNA, 22 nt, Human
ggguggaguagaaagaugaauu

SEQ ID NO: 480382 - RNA, 22 nt, Human
gccaagagaaugugagagaaau

SEQ ID NO: 480383 - RNA, 22 nt, Human
cucuccagaucugcugagccag

SEQ ID NO: 480384 - RNA, 22 nt, Human
uccagccuaauguucuucccac

SEQ ID NO: 480385 - RNA, 22 nt, Human
ucccagagacagagccuccucc

SEQ ID NO: 480386 - RNA, 22 nt, Human
gcaggcuggaggcuguucuggg

SEQ ID NO: 480387 - RNA, 22 nt, Human
ugaguucuaguggcugcagauu

SEQ ID NO: 480388 - RNA, 22 nt, Human
cagagccaaaugcugugguuau

SEQ ID NO: 480389 - RNA, 22 nt, Human
agggagcaugggugaagcaggc

SEQ ID NO: 480390 - RNA, 21 nt, Human
agaagccuggguggagguggg

SEQ ID NO: 480391 - RNA, 22 nt, Human
aggucaaguuuagauagaguua

SEQ ID NO: 480392 - RNA, 22 nt, Human
aaggaagggaaauagugauguc

SEQ ID NO: 480393 - RNA, 22 nt, Human
gccugcagaggugcugcuagcu

SEQ ID NO: 480394 - RNA, 22 nt, Human
agggcagugggaaagccugcuc

SEQ ID NO: 480395 - RNA, 22 nt, Human
cagcauggagacaaagugggca

SEQ ID NO: 480396 - RNA, 22 nt, Human
ugcagcauugcaaagcagucuu

SEQ ID NO: 480397 - RNA, 22 nt, Human
uggcucaguaaucgagucuccu

SEQ ID NO: 480398 - RNA, 22 nt, Human
aauuaggggaggacguaucaua

SEQ ID NO: 480399 - RNA, 22 nt, Human
ucagguggcuucggggaguggc

SEQ ID NO: 480400 - RNA, 22 nt, Human
uucuugcucaaugucuguuuaa

SEQ ID NO: 480401 - RNA, 22 nt, Human
gucaggcugccagucuuuauug

SEQ ID NO: 480402 - RNA, 22 nt, Human
ucagccuggcaggauggccugg

SEQ ID NO: 480403 - RNA, 22 nt, Human
gagcagugguugaacagaggca

SEQ ID NO: 480404 - RNA, 22 nt, Human
uggcucagagcagggacucugg

SEQ ID NO: 480405 - RNA, 22 nt, Human
gccugguggacacugggcauca

SEQ ID NO: 480406 - RNA, 22 nt, Human
uucaagauggccccagugagcc

SEQ ID NO: 480407 - RNA, 22 nt, Human
aaaagcaguuaucugggaggaa

SEQ ID NO: 480408 - RNA, 22 nt, Human
gcagguguggaguggggugagc

SEQ ID NO: 480409 - RNA, 22 nt, Human
agucucagaaaagaagcaugga

SEQ ID NO: 480410 - RNA, 22 nt, Human
uauaauccauucauugauuucu

SEQ ID NO: 480411 - RNA, 22 nt, Human
uuggagcccugaggaucuggau

SEQ ID NO: 480412 - RNA, 22 nt, Human
cagugcagaacacauggaaaau

SEQ ID NO: 480413 - RNA, 22 nt, Human
gagcugggcacacgccacuuga

SEQ ID NO: 480414 - RNA, 22 nt, Human
uguuuucauuugauguaacaaa

SEQ ID NO: 480415 - RNA, 20 nt, Human
gcagggcaucuuggccccca

SEQ ID NO: 480416 - RNA, 22 nt, Human
cugaaggagguagagugacaua

SEQ ID NO: 480417 - RNA, 22 nt, Human
cagcagcaacaacggaagccuu

SEQ ID NO: 480418 - RNA, 22 nt, Human
aggcacugacucaagggagcca

SEQ ID NO: 480419 - RNA, 22 nt, Human
auucuucauguugaagcuguca

SEQ ID NO: 480420 - RNA, 22 nt, Human
ugcagagggacagccacagcuc

SEQ ID NO: 480421 - RNA, 17 nt, Human
gguggccugcaguggcu

SEQ ID NO: 480422 - RNA, 22 nt, Human
ccagagcccgggaccuggacuu

SEQ ID NO: 480423 - RNA, 22 nt, Human
aaaugcagcagcuaauugaaaa

SEQ ID NO: 480424 - RNA, 22 nt, Human
uagugaaauuuaugcacagcua

SEQ ID NO: 480425 - RNA, 21 nt, Human
ggcccugguuacgccuccucu

SEQ ID NO: 480426 - RNA, 23 nt, Human
ugcugguguuuuugggaccaggg

SEQ ID NO: 480427 - RNA, 22 nt, Human
gccacaggcacuuaagggcugg

SEQ ID NO: 480428 - RNA, 22 nt, Human
ccucugcugcuguugagcaccg

SEQ ID NO: 480429 - RNA, 22 nt, Human
gcaggagcugcucuccugacga

SEQ ID NO: 480430 - RNA, 19 nt, Human
agaggcugucaccuguagc

SEQ ID NO: 480431 - RNA, 22 nt, Human
acaguggagaagcaaaugcagu

SEQ ID NO: 480432 - RNA, 22 nt, Human
ugcuuaaaaugaugauuauuuu

SEQ ID NO: 480433 - RNA, 22 nt, Human
ucugucaccgagggcauccaaa

SEQ ID NO: 480434 - RNA, 22 nt, Human
acagagcauuugggacagagag

SEQ ID NO: 480435 - RNA, 22 nt, Human
aagaggaagucuccauggagag

SEQ ID NO: 480436 - RNA, 22 nt, Human
cagagccacuuggagaugagaa

SEQ ID NO: 480437 - RNA, 22 nt, Human
uuacaagugucagguacuggca

SEQ ID NO: 480438 - RNA, 22 nt, Human
auucagaaauagaaaauuugau

SEQ ID NO: 480439 - RNA, 22 nt, Human
ggucccaggcugcgggcuggug

SEQ ID NO: 480440 - RNA, 22 nt, Human
cuggcccuucucuugcuuccug

SEQ ID NO: 480441 - RNA, 19 nt, Human
ugaagcaauaccauuuuug

SEQ ID NO: 480442 - RNA, 22 nt, Human
aggcugggaaauguauuccagc

SEQ ID NO: 480443 - RNA, 22 nt, Human
aaggagagguuguccguguugu

SEQ ID NO: 480444 - RNA, 20 nt, Human
ucauuucuugggguuccaag

SEQ ID NO: 480445 - RNA, 22 nt, Human
ucaccaggauugggcuguaggc

SEQ ID NO: 480446 - RNA, 22 nt, Human
uggccucugggaaagcagauuc

SEQ ID NO: 480447 - RNA, 23 nt, Human
aggcccaacucugugagggcugc

SEQ ID NO: 480448 - RNA, 22 nt, Human
cugggcugcaguuccugguccu

SEQ ID NO: 480449 - RNA, 22 nt, Human
acaggcaggcuucggccagagc

SEQ ID NO: 480450 - RNA, 22 nt, Human
cacaaaugacugaaacgacugu

SEQ ID NO: 480451 - RNA, 22 nt, Human
aggcaggucacaugcuuggcga

SEQ ID NO: 480452 - RNA, 22 nt, Human
gggcucucaugaguguguggua

SEQ ID NO: 480453 - RNA, 22 nt, Human
aggugauguccacagcuugcag

SEQ ID NO: 480454 - RNA, 22 nt, Human
ucacauuugcaauugcauuguu

SEQ ID NO: 480455 - RNA, 22 nt, Human
caguccugcccaggcugacaga

SEQ ID NO: 480456 - RNA, 22 nt, Human
uucauugucucuguuugccuuc

SEQ ID NO: 480457 - RNA, 22 nt, Human
uccguauuugacuauugcaccg

SEQ ID NO: 480458 - RNA, 22 nt, Human
aaggcaggaugcggacccaucu

SEQ ID NO: 480459 - RNA, 22 nt, Human
agcagcauacacaucauguuga

SEQ ID NO: 480460 - RNA, 22 nt, Human
uuuugagauggagucuugcucu

SEQ ID NO: 480461 - RNA, 22 nt, Human
ucaggauccauagacucccaaa

SEQ ID NO: 480462 - RNA, 22 nt, Human
uggcucaggggucuggcucugu

SEQ ID NO: 480463 - RNA, 22 nt, Human
uuucuguuaggcaucauuuuaa

SEQ ID NO: 480464 - RNA, 22 nt, Human
gcauuucugugcauacacauga

SEQ ID NO: 480465 - RNA, 22 nt, Human
cagcuccccucuguggggcagu

SEQ ID NO: 480466 - RNA, 22 nt, Human
caggcugggcuccggagauaaa

SEQ ID NO: 480467 - RNA, 22 nt, Human
cacagaauaaauugguaucaga

SEQ ID NO: 480468 - RNA, 22 nt, Human
gugccugugccaggggugugcu

SEQ ID NO: 480469 - RNA, 18 nt, Human
ucagcuggggcugcagcc

SEQ ID NO: 480470 - RNA, 18 nt, Human
uccagagcuacuguggug

SEQ ID NO: 480471 - RNA, 22 nt, Human
agaauucucuuccauugaaaca

SEQ ID NO: 480472 - RNA, 22 nt, Human
uaggggugaggccaggcaucag

SEQ ID NO: 480473 - RNA, 17 nt, Human
aggcauggucuggggug

SEQ ID NO: 480474 - RNA, 22 nt, Human
cagcaggggaacugugggccag

SEQ ID NO: 480475 - RNA, 22 nt, Human
aguugaaauuagaguccuggcu

SEQ ID NO: 480476 - RNA, 22 nt, Human
agcugacuucuugauccaauga

SEQ ID NO: 480477 - RNA, 22 nt, Human
agugaaauagcauuuaugaagc

SEQ ID NO: 480478 - RNA, 22 nt, Human
ggcugaguugagaggauuacuu

SEQ ID NO: 480479 - RNA, 22 nt, Human
gggcuacauugugagagaaguu

SEQ ID NO: 480480 - RNA, 22 nt, Human
cagggcaguaccgcccucuggc

SEQ ID NO: 480481 - RNA, 22 nt, Human
ugcucugucaagaaaagaugcc

SEQ ID NO: 480482 - RNA, 22 nt, Human
aggcagcauuugaauccagguc

SEQ ID NO: 480483 - RNA, 22 nt, Human
ugagcuuacgugggaacagacu

SEQ ID NO: 480484 - RNA, 22 nt, Human
cccaggaguuugaguucagcau

SEQ ID NO: 480485 - RNA, 22 nt, Human
ucaggagcuugguagugugauu

SEQ ID NO: 480486 - RNA, 22 nt, Human
gcaggaagcauagaagaaugcc

SEQ ID NO: 480487 - RNA, 22 nt, Human
cugagauggccacugggucuca

SEQ ID NO: 480488 - RNA, 22 nt, Human
aagcccagaugugagaacugag

SEQ ID NO: 480489 - RNA, 22 nt, Human
caauguguuugcauauuaaaau

SEQ ID NO: 480490 - RNA, 22 nt, Human
ugcagccauuuucugccaaugc

SEQ ID NO: 480491 - RNA, 19 nt, Human
acucaagucuaaugaaauc

SEQ ID NO: 480492 - RNA, 22 nt, Human
gcagcuuuguggagaggcccau

SEQ ID NO: 480493 - RNA, 22 nt, Human
aagccucuggggccucaucugu

SEQ ID NO: 480494 - RNA, 21 nt, Human
ggagaaggacaauguugagua

SEQ ID NO: 480495 - RNA, 22 nt, Human
aaggcucccucuucucgagugu

SEQ ID NO: 480496 - RNA, 22 nt, Human
aucaguuucuaccauguggaau

SEQ ID NO: 480497 - RNA, 22 nt, Human
gaaggucaccuccccucucugg

SEQ ID NO: 480498 - RNA, 20 nt, Human
aauguauauuuuaugccagg

SEQ ID NO: 480499 - RNA, 22 nt, Human
gcucuggacuggggccugagaa

SEQ ID NO: 480500 - RNA, 22 nt, Human
gacugucauucuagugcccaug

SEQ ID NO: 480501 - RNA, 22 nt, Human
caggagacaaguuagcagcuga

SEQ ID NO: 480502 - RNA, 22 nt, Human
ucuguacaguaccagauaguaa

SEQ ID NO: 480503 - RNA, 21 nt, Human
cgggcuggccgggcccucacc

SEQ ID NO: 480504 - RNA, 22 nt, Human
cagagacuggagugcaguggcg

SEQ ID NO: 480505 - RNA, 22 nt, Human
agggaccucauguaaguggauu

SEQ ID NO: 480506 - RNA, 22 nt, Human
uggggccugagguggagcugca

SEQ ID NO: 480507 - RNA, 22 nt, Human
cauccugguuaccccauaguca

SEQ ID NO: 480508 - RNA, 22 nt, Human
agaaauacuaggaauauucaua

SEQ ID NO: 480509 - RNA, 22 nt, Human
cuguccugauggugccacuggu

SEQ ID NO: 480510 - RNA, 22 nt, Human
uguggcucucagauccuccaau

SEQ ID NO: 480511 - RNA, 22 nt, Human
gagggcugcugccagauaugcc

SEQ ID NO: 480512 - RNA, 22 nt, Human
aggcacugcagauuacaggcgc

SEQ ID NO: 480513 - RNA, 22 nt, Human
uucaggagaaaguucaguacuu

SEQ ID NO: 480514 - RNA, 22 nt, Human
cauugcacucuggcuggaacgg

SEQ ID NO: 480515 - RNA, 17 nt, Human
gcucccugaggacagcu

SEQ ID NO: 480516 - RNA, 22 nt, Human
ugcucagugagucugugacagg

SEQ ID NO: 480517 - RNA, 22 nt, Human
caggggcucugagauugucuaa

SEQ ID NO: 480518 - RNA, 19 nt, Human
ugagaaggcaguggggagc

SEQ ID NO: 480519 - RNA, 22 nt, Human
gagaaagcuucuuucccacagg

SEQ ID NO: 480520 - RNA, 22 nt, Human
uuucacaauuuuaaggagcaaa

SEQ ID NO: 480521 - RNA, 22 nt, Human
uauguacagggauagaacuuga

SEQ ID NO: 480522 - RNA, 22 nt, Human
ccagcagcuguggcuuugccuc

SEQ ID NO: 480523 - RNA, 22 nt, Human
aggcacugaagugguaaaugua

SEQ ID NO: 480524 - RNA, 22 nt, Human
agccugcuggaccaagcucaug

SEQ ID NO: 480525 - RNA, 22 nt, Human
ggccucggcccacugcugcggu

SEQ ID NO: 480526 - RNA, 22 nt, Human
augauuuccaguuguugcuaag

SEQ ID NO: 480527 - RNA, 22 nt, Human
ggcaggaggugaguggcgggug

SEQ ID NO: 480528 - RNA, 22 nt, Human
gggacagcuguagugcuuggcu

SEQ ID NO: 480529 - RNA, 22 nt, Human
aggggugaaggcccgauaggag

SEQ ID NO: 480530 - RNA, 19 nt, Human
uggaccugugcccauggcu

SEQ ID NO: 480531 - RNA, 22 nt, Human
uuugcauuauauuuauagaaga

SEQ ID NO: 480532 - RNA, 22 nt, Human
agaggagguccuuuucugaugu

SEQ ID NO: 480533 - RNA, 22 nt, Human
augcauaauguauguauugacu

SEQ ID NO: 480534 - RNA, 22 nt, Human
gcuggggagggcgucaaggcca

SEQ ID NO: 480535 - RNA, 22 nt, Human
agaggaggcucugggaucgucc

SEQ ID NO: 480536 - RNA, 22 nt, Human
gugccugggcaugagcuuguug

SEQ ID NO: 480537 - RNA, 22 nt, Human
gggugcugacuggggccugaaa

SEQ ID NO: 480538 - RNA, 22 nt, Human
uucucuucuguucagugcccaa

SEQ ID NO: 480539 - RNA, 22 nt, Human
guguuaaccagcuaaacuuugc

SEQ ID NO: 480540 - RNA, 22 nt, Human
gccuuggccaacaccuugcaaa

SEQ ID NO: 480541 - RNA, 22 nt, Human
cagggcagaaggcacucuacuc

SEQ ID NO: 480542 - RNA, 22 nt, Human
gcugucugcugugcacugagca

SEQ ID NO: 480543 - RNA, 22 nt, Human
aaauguguauaugaaacaugau

SEQ ID NO: 480544 - RNA, 22 nt, Human
uucugcagcccaacaguaguuu

SEQ ID NO: 480545 - RNA, 22 nt, Human
aucugccugcaguggagguggg

SEQ ID NO: 480546 - RNA, 22 nt, Human
ugcuagaaaucugaaacuagca

SEQ ID NO: 480547 - RNA, 22 nt, Human
ucauugcagcuucagguguuca

SEQ ID NO: 480548 - RNA, 22 nt, Human
uauuuagaacagacaauagaaa

SEQ ID NO: 480549 - RNA, 22 nt, Human
cacaccagagguuaccugcaaa

SEQ ID NO: 480550 - RNA, 22 nt, Human
ugugacaucgcugugucuguuu

SEQ ID NO: 480551 - RNA, 22 nt, Human
aaaugugugcacaaagacagcu

SEQ ID NO: 480552 - RNA, 22 nt, Human
guaucuuuccacaucuucagua

SEQ ID NO: 480553 - RNA, 22 nt, Human
ggccuguguccuccuugcccug

SEQ ID NO: 480554 - RNA, 22 nt, Human
uuucuaguccucaugcaucauu

SEQ ID NO: 480555 - RNA, 23 nt, Human
uggggccaagugaggaagggucu

SEQ ID NO: 480556 - RNA, 22 nt, Human
uuguggcucgugagauguuagg

SEQ ID NO: 480557 - RNA, 20 nt, Human
ggcucuggaaucuggugggc

SEQ ID NO: 480558 - RNA, 22 nt, Human
ucaggauguuaauauagcauua

SEQ ID NO: 480559 - RNA, 22 nt, Human
uuuccuuugcccaauacauguc

SEQ ID NO: 480560 - RNA, 22 nt, Human
guuauguaaucuaacacucagu

SEQ ID NO: 480561 - RNA, 22 nt, Human
gcuucuggaggagcugggcuga

SEQ ID NO: 480562 - RNA, 22 nt, Human
gccagcagguggagagaucaag

SEQ ID NO: 480563 - RNA, 22 nt, Human
aacaaauguaaaaugcagaugc

SEQ ID NO: 480564 - RNA, 22 nt, Human
gacauuucaaucucauuauggg

SEQ ID NO: 480565 - RNA, 22 nt, Human
gaguguuccagaaacuggcccu

SEQ ID NO: 480566 - RNA, 22 nt, Human
gcugugugcucacguaguggaa

SEQ ID NO: 480567 - RNA, 22 nt, Human
cacagcuucuccuugauaucgc

SEQ ID NO: 480568 - RNA, 22 nt, Human
ccagcuccccucagcagguaau

SEQ ID NO: 480569 - RNA, 22 nt, Human
augcacgccccacacuggugug

SEQ ID NO: 480570 - RNA, 22 nt, Human
gccagaagggguggauccaggc

SEQ ID NO: 480571 - RNA, 22 nt, Human
ggaaggagggcggcaaugauga

SEQ ID NO: 480572 - RNA, 22 nt, Human
cccuguccuuggcugugaggcu

SEQ ID NO: 480573 - RNA, 22 nt, Human
ccucugaguccucccugguugc

SEQ ID NO: 480574 - RNA, 22 nt, Human
ucacuguaucauguugcacuua

SEQ ID NO: 480575 - RNA, 21 nt, Human
ugcagccauucagcccuaugc

SEQ ID NO: 480576 - RNA, 21 nt, Human
uuagaaagcucacuacaguua

SEQ ID NO: 480577 - RNA, 22 nt, Human
ccaggccagcaggcacaccugc

SEQ ID NO: 480578 - RNA, 22 nt, Human
ucucaggaaauaggauuugagu

SEQ ID NO: 480579 - RNA, 22 nt, Human
agggaggaccaaugugugguua

SEQ ID NO: 480580 - RNA, 22 nt, Human
gaagcccacguuuggugaugua

SEQ ID NO: 480581 - RNA, 22 nt, Human
agagaacacgugcaucugcaau

SEQ ID NO: 480582 - RNA, 22 nt, Human
ccagcuggagcucgcagauagg

SEQ ID NO: 480583 - RNA, 22 nt, Human
ucucagaguuuuuuuccaggac

SEQ ID NO: 480584 - RNA, 22 nt, Human
caguauguuugggagacaugac

SEQ ID NO: 480585 - RNA, 22 nt, Human
cagcucaaguuucccaggucag

SEQ ID NO: 480586 - RNA, 22 nt, Human
ugaggcaggacugagcgggaug

SEQ ID NO: 480587 - RNA, 22 nt, Human
ucuggagcuuccucauuuacag

SEQ ID NO: 480588 - RNA, 22 nt, Human
uccucccacauaggacaauggg

SEQ ID NO: 480589 - RNA, 22 nt, Human
ccugccagucacuaugucaccu

SEQ ID NO: 480590 - RNA, 22 nt, Human
cagccugcuagggcaaugccuu

SEQ ID NO: 480591 - RNA, 22 nt, Human
gagaggcauggaacagauucuu

SEQ ID NO: 480592 - RNA, 22 nt, Human
acagagagaaacaaucagcagc

SEQ ID NO: 480593 - RNA, 22 nt, Human
aggcagagaaaaaccagauaug

SEQ ID NO: 480594 - RNA, 22 nt, Human
agauuaugcuggcugcuacaag

SEQ ID NO: 480595 - RNA, 22 nt, Human
gagcugccugaacaagcagcag

SEQ ID NO: 480596 - RNA, 22 nt, Human
agggaccugucaaugacaguua

SEQ ID NO: 480597 - RNA, 22 nt, Human
uccuugaaaagaaugucuccau

SEQ ID NO: 480598 - RNA, 22 nt, Human
ccucaggggugcccacagcugc

SEQ ID NO: 480599 - RNA, 22 nt, Human
aggcacaguuucauccccgggc

SEQ ID NO: 480600 - RNA, 22 nt, Human
uccuguggucuggaaggaaugg

SEQ ID NO: 480601 - RNA, 18 nt, Human
aagcugcccucaggcagg

SEQ ID NO: 480602 - RNA, 22 nt, Human
gccaggcaggccacgcuguguu

SEQ ID NO: 480603 - RNA, 22 nt, Human
uccuugaaugaagagaggugac

SEQ ID NO: 480604 - RNA, 22 nt, Human
cacugcuucuggaggaauuugg

SEQ ID NO: 480605 - RNA, 22 nt, Human
ucagaggaucaugucccuacuc

SEQ ID NO: 480606 - RNA, 22 nt, Human
ccagagugacgugaagugugaa

SEQ ID NO: 480607 - RNA, 19 nt, Human
ucccgcccacugagcgugc

SEQ ID NO: 480608 - RNA, 22 nt, Human
agcagcucacaggauuccugaa

SEQ ID NO: 480609 - RNA, 22 nt, Human
ugagccuguggggugacaacca

SEQ ID NO: 480610 - RNA, 17 nt, Human
ugguggcuggagucagg

SEQ ID NO: 480611 - RNA, 22 nt, Human
cagcucugggugacaggagggc

SEQ ID NO: 480612 - RNA, 22 nt, Human
ggguacuuaauauuuacggggu

SEQ ID NO: 480613 - RNA, 22 nt, Human
caggcaggagccagggauucca

SEQ ID NO: 480614 - RNA, 22 nt, Human
ugugcuucaucacuucucaguu

SEQ ID NO: 480615 - RNA, 22 nt, Human
uguagaaagcucuucugaaauc

SEQ ID NO: 480616 - RNA, 22 nt, Human
guggcugcuacagagcuggagg

SEQ ID NO: 480617 - RNA, 22 nt, Human
aagguacaccaaaguucaaguu

SEQ ID NO: 480618 - RNA, 22 nt, Human
agcaggcuuucaagagucuucu

SEQ ID NO: 480619 - RNA, 22 nt, Human
cagcaauaagguaagcuucucc

SEQ ID NO: 480620 - RNA, 22 nt, Human
cccuuccuccucgccugucaga

SEQ ID NO: 480621 - RNA, 22 nt, Human
uccaguggguugcugagggagg

SEQ ID NO: 480622 - RNA, 22 nt, Human
uccuggcccggccgggccugcu

SEQ ID NO: 480623 - RNA, 22 nt, Human
aggcagccuuuagacagucugc

SEQ ID NO: 480624 - RNA, 22 nt, Human
uggagcugggaguccugggcug

SEQ ID NO: 480625 - RNA, 22 nt, Human
cacugccugugagcugugugcc

SEQ ID NO: 480626 - RNA, 22 nt, Human
cccagagcugagucugauauau

SEQ ID NO: 480627 - RNA, 22 nt, Human
uggcucagugaagagauaacuu

SEQ ID NO: 480628 - RNA, 22 nt, Human
ggcucugccugcccagcagcac

SEQ ID NO: 480629 - RNA, 22 nt, Human
aaggcagauauaaagacuagag

SEQ ID NO: 480630 - RNA, 22 nt, Human
aggcacuguacuagguacaggg

SEQ ID NO: 480631 - RNA, 22 nt, Human
cuggugucugcucccucacagc

SEQ ID NO: 480632 - RNA, 22 nt, Human
ucccagcauaacaaacugcccg

SEQ ID NO: 480633 - RNA, 22 nt, Human
cucaggagguuuccugucuagg

SEQ ID NO: 480634 - RNA, 22 nt, Human
ucacacguccuugcuacuccuc

SEQ ID NO: 480635 - RNA, 22 nt, Human
auuuagaaauuccaaaaguauu

SEQ ID NO: 480636 - RNA, 22 nt, Human
cagggcugagaauuuagagaca

SEQ ID NO: 480637 - RNA, 22 nt, Human
acacaaacagucuauagcacca

SEQ ID NO: 480638 - RNA, 22 nt, Human
cgaggcagaggcugaaacggcu

SEQ ID NO: 480639 - RNA, 22 nt, Human
ugccaggcauguaguagacuug

SEQ ID NO: 480640 - RNA, 22 nt, Human
uggcccugacuuggaggccuga

SEQ ID NO: 480641 - RNA, 22 nt, Human
gccucccugagucacccaagca

SEQ ID NO: 480642 - RNA, 19 nt, Human
gcugcucugggucucaucu

SEQ ID NO: 480643 - RNA, 22 nt, Human
uaacagaaauauuuccagguga

SEQ ID NO: 480644 - RNA, 22 nt, Human
agaagccauguuuaguaggaug

SEQ ID NO: 480645 - RNA, 19 nt, Human
augauggucccauucaccu

SEQ ID NO: 480646 - RNA, 22 nt, Human
gucucccaaccccugugcccag

SEQ ID NO: 480647 - RNA, 22 nt, Human
gcugccuggagcucagccugcc

SEQ ID NO: 480648 - RNA, 22 nt, Human
ggcugcuggggacgugggagag

SEQ ID NO: 480649 - RNA, 22 nt, Human
cauacauaugcauguguguaua

SEQ ID NO: 480650 - RNA, 22 nt, Human
cugaggccucuguucaccagaa

SEQ ID NO: 480651 - RNA, 22 nt, Human
aguggcagcugucaugcccuag

SEQ ID NO: 480652 - RNA, 22 nt, Human
guucuuaagaccacaauaaaaa

SEQ ID NO: 480653 - RNA, 22 nt, Human
uauuugcaaagaacuacacuag

SEQ ID NO: 480654 - RNA, 22 nt, Human
augggaggcaggcucagaaccg

SEQ ID NO: 480655 - RNA, 22 nt, Human
gggcugcacagaucuucaaggg

SEQ ID NO: 480656 - RNA, 22 nt, Human
aggcucaguuugguuuccauug

SEQ ID NO: 480657 - RNA, 22 nt, Human
gucccaggaguugcugggccuu

SEQ ID NO: 480658 - RNA, 22 nt, Human
augaggcaggagugcaguggca

SEQ ID NO: 480659 - RNA, 22 nt, Human
acuccugguuuguguccuggcu

SEQ ID NO: 480660 - RNA, 22 nt, Human
ggggcugguggugguuucucca

SEQ ID NO: 480661 - RNA, 22 nt, Human
aauggcugccagggcaggaggu

SEQ ID NO: 480662 - RNA, 22 nt, Human
caucugccuaaguggcccuguu

SEQ ID NO: 480663 - RNA, 22 nt, Human
cacagcuuccauuagaaugaga

SEQ ID NO: 480664 - RNA, 21 nt, Human
ucucuggaguuagcagagaga

SEQ ID NO: 480665 - RNA, 22 nt, Human
ugugacaugugucaucuuuucu

SEQ ID NO: 480666 - RNA, 22 nt, Human
gaggcccaggucaagcagccac

SEQ ID NO: 480667 - RNA, 22 nt, Human
ucagcugagcuccagcucauag

SEQ ID NO: 480668 - RNA, 22 nt, Human
ucagcuuugccaccagcuguaa

SEQ ID NO: 480669 - RNA, 21 nt, Human
agagaagggacucuuccaguc

SEQ ID NO: 480670 - RNA, 22 nt, Human
gguuugcacgauauuuccaugg

SEQ ID NO: 480671 - RNA, 21 nt, Human
agggagcuauuuauaguaagc

SEQ ID NO: 480672 - RNA, 22 nt, Human
uagaugaccuuguguuaggcaa

SEQ ID NO: 480673 - RNA, 22 nt, Human
gaggucaauaauaugugcuuua

SEQ ID NO: 480674 - RNA, 22 nt, Human
gggcuggcucccagguguugaa

SEQ ID NO: 480675 - RNA, 22 nt, Human
ccaguggccaugcacgagcagc

SEQ ID NO: 480676 - RNA, 18 nt, Human
ucucagaggccauccuag

SEQ ID NO: 480677 - RNA, 22 nt, Human
cacagaggacuguagcggggag

SEQ ID NO: 480678 - RNA, 22 nt, Human
aauaguguuguucacucaggag

SEQ ID NO: 480679 - RNA, 22 nt, Human
gaggagagagggacugucugca

SEQ ID NO: 480680 - RNA, 22 nt, Human
uauguagaagcugcucaaagaa

SEQ ID NO: 480681 - RNA, 22 nt, Human
ccaggugggaggaaagcagaga

SEQ ID NO: 480682 - RNA, 22 nt, Human
aaggaagagaauccuucucaga

SEQ ID NO: 480683 - RNA, 22 nt, Human
agcaauaugacauugcuacauc

SEQ ID NO: 480684 - RNA, 22 nt, Human
cuaguccacuguccugccucca

SEQ ID NO: 480685 - RNA, 22 nt, Human
acccagaggcggagguugcagu

SEQ ID NO: 480686 - RNA, 22 nt, Human
gaggccugguuuccagcauccu

SEQ ID NO: 480687 - RNA, 22 nt, Human
ucuguacaugaguugagaauca

SEQ ID NO: 480688 - RNA, 22 nt, Human
agggaccugcucacugccuggc

SEQ ID NO: 480689 - RNA, 22 nt, Human
aagcugccuuccaugugaggaa

SEQ ID NO: 480690 - RNA, 22 nt, Human
augaugguaaauucaguauccg

SEQ ID NO: 480691 - RNA, 22 nt, Human
gcuggcauuacaggagagaacc

SEQ ID NO: 480692 - RNA, 22 nt, Human
aacaaaugauaccaguucucaa

SEQ ID NO: 480693 - RNA, 22 nt, Human
gggggcuggaauauccaucaac

SEQ ID NO: 480694 - RNA, 22 nt, Human
aaaauccuuagccgagugaggu

SEQ ID NO: 480695 - RNA, 22 nt, Human
acugcagccuugaacucugggc

SEQ ID NO: 480696 - RNA, 22 nt, Human
ucagaggacaagcucccuggug

SEQ ID NO: 480697 - RNA, 22 nt, Human
agagaaaacucauugagguguc

SEQ ID NO: 480698 - RNA, 22 nt, Human
auguuacacauaggcauaaaug

SEQ ID NO: 480699 - RNA, 22 nt, Human
ggccuugguaaagggaugcaug

SEQ ID NO: 480700 - RNA, 22 nt, Human
augguuuguguggcccagauga

SEQ ID NO: 480701 - RNA, 22 nt, Human
aaggggaaguagcaccagaggu

SEQ ID NO: 480702 - RNA, 22 nt, Human
aaugaugguuucaucacuugaa

SEQ ID NO: 480703 - RNA, 22 nt, Human
agaauaaaucaaauguccugag

SEQ ID NO: 480704 - RNA, 22 nt, Human
cuggcucccguuguccuugaag

SEQ ID NO: 480705 - RNA, 22 nt, Human
ugcuucaggaagaaacgccagg

SEQ ID NO: 480706 - RNA, 22 nt, Human
gcuccugucuuggggcacuggc

SEQ ID NO: 480707 - RNA, 19 nt, Human
ucauucaggaccaguggau

SEQ ID NO: 480708 - RNA, 22 nt, Human
ucucaagcuuguugguauguuu

SEQ ID NO: 480709 - RNA, 22 nt, Human
gagagucuaggaaccucauaua

SEQ ID NO: 480710 - RNA, 22 nt, Human
cauuccuuaacguggggagucu

SEQ ID NO: 480711 - RNA, 22 nt, Human
ugcugccagagagacagggacu

SEQ ID NO: 480712 - RNA, 22 nt, Human
ccugccuggcugucagcagagc

SEQ ID NO: 480713 - RNA, 22 nt, Human
ugggccuggacaaggccacuag

SEQ ID NO: 480714 - RNA, 22 nt, Human
ggaguuggugagcaccaggcuu

SEQ ID NO: 480715 - RNA, 22 nt, Human
gcuccugggcucuaccuugcua

SEQ ID NO: 480716 - RNA, 22 nt, Human
caggacauugauccauuggcac

SEQ ID NO: 480717 - RNA, 22 nt, Human
cugcaguguucuggaaugcauu

SEQ ID NO: 480718 - RNA, 22 nt, Human
ggcugccuccugcugggcugga

SEQ ID NO: 480719 - RNA, 20 nt, Human
caguccaaucagaggccacc

SEQ ID NO: 480720 - RNA, 22 nt, Human
ucacagaauagcacuguaagcg

SEQ ID NO: 480721 - RNA, 22 nt, Human
gagcugaguuaccuccagauca

SEQ ID NO: 480722 - RNA, 22 nt, Human
agaaauguauucuguauguuuu

SEQ ID NO: 480723 - RNA, 22 nt, Human
gggagaagaaugugucaauugu

SEQ ID NO: 480724 - RNA, 22 nt, Human
aggcacugauucucagaguuac

SEQ ID NO: 480725 - RNA, 22 nt, Human
uggcucaguuucugcccagcug

SEQ ID NO: 480726 - RNA, 23 nt, Human
aggaggaaaaguuaucugcugag

SEQ ID NO: 480727 - RNA, 22 nt, Human
uagagcugaguugacuccauuu

SEQ ID NO: 480728 - RNA, 22 nt, Human
cuguggcuaugguguacauacu

SEQ ID NO: 480729 - RNA, 22 nt, Human
ugauuuccaguugcugggugcu

SEQ ID NO: 480730 - RNA, 22 nt, Human
agaugcugugaggaagcuagga

SEQ ID NO: 480731 - RNA, 22 nt, Human
cugggggcaauggucagagugu

SEQ ID NO: 480732 - RNA, 21 nt, Human
acagcagagaucaagacuaag

SEQ ID NO: 480733 - RNA, 22 nt, Human
ugccucugcugcuguggcauca

SEQ ID NO: 480734 - RNA, 22 nt, Human
caccugcaaggagcuuucauuu

SEQ ID NO: 480735 - RNA, 22 nt, Human
uccugcagugugucuccugcac

SEQ ID NO: 480736 - RNA, 22 nt, Human
ucaggggacuuaggagagaagu

SEQ ID NO: 480737 - RNA, 22 nt, Human
cccagcauggagugaggacuca

SEQ ID NO: 480738 - RNA, 22 nt, Human
ucagcaggcgguuccuuguggg

SEQ ID NO: 480739 - RNA, 22 nt, Human
guauuagguuggugcaaaagua

SEQ ID NO: 480740 - RNA, 22 nt, Human
ucugccuugagguccucagcuc

SEQ ID NO: 480741 - RNA, 22 nt, Human
gcagacaggcccaguggaggga

SEQ ID NO: 480742 - RNA, 22 nt, Human
gccagagccggcuucacaggau

SEQ ID NO: 480743 - RNA, 22 nt, Human
cagagccaggguugcaccccug

SEQ ID NO: 480744 - RNA, 20 nt, Human
ucucugagcuucucuugggg

SEQ ID NO: 480745 - RNA, 22 nt, Human
aucaggauuacacggggaugcu

SEQ ID NO: 480746 - RNA, 22 nt, Human
gcacacagauuaggaaacagaa

SEQ ID NO: 480747 - RNA, 20 nt, Human
gccugagcuauugccaggau

SEQ ID NO: 480748 - RNA, 22 nt, Human
ucuggagagucacagugccaga

SEQ ID NO: 480749 - RNA, 22 nt, Human
guggcaggucccauuggagcag

SEQ ID NO: 480750 - RNA, 22 nt, Human
caguauguacucuuaucaugua

SEQ ID NO: 480751 - RNA, 17 nt, Human
gagauggguggaucacc

SEQ ID NO: 480752 - RNA, 22 nt, Human
aggccugaggaccagauaaaug

SEQ ID NO: 480753 - RNA, 22 nt, Human
gucucuggguuaagcagugcau

SEQ ID NO: 480754 - RNA, 22 nt, Human
uuucucaaggugucauguauuu

SEQ ID NO: 480755 - RNA, 22 nt, Human
cuuucucugugugguaaagggc

SEQ ID NO: 480756 - RNA, 22 nt, Human
ucauuuaauagcuuuugucuuu

SEQ ID NO: 480757 - RNA, 22 nt, Human
uuguggaaauacagacuccaag

SEQ ID NO: 480758 - RNA, 22 nt, Human
cacaccuguaauaccagcuacu

SEQ ID NO: 480759 - RNA, 22 nt, Human
cuagagaggcagauguccugug

SEQ ID NO: 480760 - RNA, 22 nt, Human
ccagcagcuuuauuggcucucc

SEQ ID NO: 480761 - RNA, 22 nt, Human
ggcaccugcucaucuggacuca

SEQ ID NO: 480762 - RNA, 22 nt, Human
cacugcaguaacucuaggacug

SEQ ID NO: 480763 - RNA, 22 nt, Human
gacaagacagcuugcagacaac

SEQ ID NO: 480764 - RNA, 22 nt, Human
aagacuguacauuuuccagucu

SEQ ID NO: 480765 - RNA, 18 nt, Human
gucacuguguuucugagc

SEQ ID NO: 480766 - RNA, 22 nt, Human
agaaauuccuaagguacacaag

SEQ ID NO: 480767 - RNA, 22 nt, Human
ugguccagaugccuuggcuuua

SEQ ID NO: 480768 - RNA, 23 nt, Human
aaaguugauuugcaguuuaagag

SEQ ID NO: 480769 - RNA, 22 nt, Human
guuuuccauggaggucugaccu

SEQ ID NO: 480770 - RNA, 22 nt, Human
aguuuuuccguggcuacgauaa

SEQ ID NO: 480771 - RNA, 22 nt, Human
cuucauuaaccaaaaugcaaua

SEQ ID NO: 480772 - RNA, 22 nt, Human
acauuucuuccacaugcugcug

SEQ ID NO: 480773 - RNA, 22 nt, Human
gggcugcugcccaggaggcacc

SEQ ID NO: 480774 - RNA, 22 nt, Human
ucucaggguuuguacaagugua

SEQ ID NO: 480775 - RNA, 22 nt, Human
agggcuccaggggaccaucagu

SEQ ID NO: 480776 - RNA, 22 nt, Human
cagguggcaugacugccuacaa

SEQ ID NO: 480777 - RNA, 22 nt, Human
ucucagagugguggucccucug

SEQ ID NO: 480778 - RNA, 19 nt, Human
ggcugccuggagcgagggc

SEQ ID NO: 480779 - RNA, 22 nt, Human
gcucccacaaccuucuugcucc

SEQ ID NO: 480780 - RNA, 22 nt, Human
cagcuucuggcguggagccuga

SEQ ID NO: 480781 - RNA, 22 nt, Human
acaggcagggaccuuggcuaag

SEQ ID NO: 480782 - RNA, 22 nt, Human
uuccuauuuccaugaaacacaa

SEQ ID NO: 480783 - RNA, 22 nt, Human
aaaaaugaaacggcugguuggc

SEQ ID NO: 480784 - RNA, 19 nt, Human
ucugaggguccagaugcau

SEQ ID NO: 480785 - RNA, 22 nt, Human
cacaguccagacuccuggaguu

SEQ ID NO: 480786 - RNA, 21 nt, Human
gcagaugggagucaucaggcu

SEQ ID NO: 480787 - RNA, 22 nt, Human
cguagguggcucagcaccuggg

SEQ ID NO: 480788 - RNA, 22 nt, Human
ugucacauaggcaaaauguuuu

SEQ ID NO: 480789 - RNA, 22 nt, Human
cauuauggcagccaggauauug

SEQ ID NO: 480790 - RNA, 22 nt, Human
uuuuuccuuagggguuacucac

SEQ ID NO: 480791 - RNA, 22 nt, Human
uggagcagcaucacuuugagcu

SEQ ID NO: 480792 - RNA, 18 nt, Human
cguuuuuccgggauugca

SEQ ID NO: 480793 - RNA, 22 nt, Human
ucucugagguuguuuccagcac

SEQ ID NO: 480794 - RNA, 22 nt, Human
uccagggacagcgcuggagcua

SEQ ID NO: 480795 - RNA, 22 nt, Human
cauuuucagcacccaucugaaa

SEQ ID NO: 480796 - RNA, 22 nt, Human
gcccagugguaaaagcaggccu

SEQ ID NO: 480797 - RNA, 22 nt, Human
ccagaggugccacagaaagagc

SEQ ID NO: 480798 - RNA, 22 nt, Human
ccugucugcaugaucccugcca

SEQ ID NO: 480799 - RNA, 22 nt, Human
gcucaaagaauauucagaauga

SEQ ID NO: 480800 - RNA, 22 nt, Human
cagccagggucaggcagcuucu

SEQ ID NO: 480801 - RNA, 22 nt, Human
ugaugcugagccugggacugac

SEQ ID NO: 480802 - RNA, 22 nt, Human
ccugagcugaacuaagcaguuu

SEQ ID NO: 480803 - RNA, 22 nt, Human
cauuuucaugaguuucuguuca

SEQ ID NO: 480804 - RNA, 22 nt, Human
ugaagcaggguggccagauugu

SEQ ID NO: 480805 - RNA, 22 nt, Human
agaaaaggcuugaagagguuuu

SEQ ID NO: 480806 - RNA, 22 nt, Human
acauuucucccugcaugccugc

SEQ ID NO: 480807 - RNA, 22 nt, Human
ucauacaucuuguauaucuauc

SEQ ID NO: 480808 - RNA, 22 nt, Human
gggcagagacucagaaacagaa

SEQ ID NO: 480809 - RNA, 22 nt, Human
auuuucaugacuaccuuaaaua

SEQ ID NO: 480810 - RNA, 22 nt, Human
ccagcagagggucuuggccauu

SEQ ID NO: 480811 - RNA, 22 nt, Human
cugccacuagcuuucacaucuu

SEQ ID NO: 480812 - RNA, 22 nt, Human
ucuuuugagggccagaggaaga

SEQ ID NO: 480813 - RNA, 22 nt, Human
gccugccugcugucaucugccu

SEQ ID NO: 480814 - RNA, 22 nt, Human
gaggagaaauuauccuuggugu

SEQ ID NO: 480815 - RNA, 22 nt, Human
gugcucaggaagcuguuccugc

SEQ ID NO: 480816 - RNA, 22 nt, Human
gcacagggcugccaggcggcuu

SEQ ID NO: 480817 - RNA, 22 nt, Human
ugccugucuuggaguccuggcc

SEQ ID NO: 480818 - RNA, 22 nt, Human
uaaaauguagcuucuaggcugg

SEQ ID NO: 480819 - RNA, 21 nt, Human
uuagcaaagcaaacacaugcu

SEQ ID NO: 480820 - RNA, 22 nt, Human
uccccagccgugaaggagagga

SEQ ID NO: 480821 - RNA, 22 nt, Human
gaagaagcaggaguguguagca

SEQ ID NO: 480822 - RNA, 22 nt, Human
uccugagaaggcacagcuugca

SEQ ID NO: 480823 - RNA, 22 nt, Human
ugcagggcuccuggcuccaauc

SEQ ID NO: 480824 - RNA, 22 nt, Human
cuucccuuggugaacagagcau

SEQ ID NO: 480825 - RNA, 22 nt, Human
aggagguggccugagcgugccc

SEQ ID NO: 480826 - RNA, 22 nt, Human
ugcagggcuacaggacuacaac

SEQ ID NO: 480827 - RNA, 22 nt, Human
caguaugagaguugaaucaagg

SEQ ID NO: 480828 - RNA, 22 nt, Human
ucaggaguccugccugcagccu

SEQ ID NO: 480829 - RNA, 19 nt, Human
agucucaguguacagaggc

SEQ ID NO: 480830 - RNA, 22 nt, Human
gagggcuccacacgggcccagc

SEQ ID NO: 480831 - RNA, 20 nt, Human
caaugcacacagcugcuucu

SEQ ID NO: 480832 - RNA, 21 nt, Human
uauuugcugccaucuuugagg

SEQ ID NO: 480833 - RNA, 22 nt, Human
gccagggcaggggagcaucugc

SEQ ID NO: 480834 - RNA, 22 nt, Human
gccucugccaagggggcugcgg

SEQ ID NO: 480835 - RNA, 22 nt, Human
uggcucagccauucguguugcc

SEQ ID NO: 480836 - RNA, 22 nt, Human
gaucauuuugaugcccuuuuag

SEQ ID NO: 480837 - RNA, 22 nt, Human
gcuggccugcgagggcaggcug

SEQ ID NO: 480838 - RNA, 22 nt, Human
ggagaggugaauggcugcucua

SEQ ID NO: 480839 - RNA, 22 nt, Human
ugugggcaggcccgggucugag

SEQ ID NO: 480840 - RNA, 20 nt, Human
ugcagggccuaaaaagggaa

SEQ ID NO: 480841 - RNA, 22 nt, Human
ugggggacugcacuggcgucag

SEQ ID NO: 480842 - RNA, 22 nt, Human
ggcaugggguguauguggcacg

SEQ ID NO: 480843 - RNA, 22 nt, Human
cugucauugagccugucagggc

SEQ ID NO: 480844 - RNA, 21 nt, Human
agcagcaucagccucaccuga

SEQ ID NO: 480845 - RNA, 22 nt, Human
cugccaggcacgugcagcauca

SEQ ID NO: 480846 - RNA, 19 nt, Human
gccacuccugaugcugccc

SEQ ID NO: 480847 - RNA, 22 nt, Human
agcccagccggauucccaguuc

SEQ ID NO: 480848 - RNA, 22 nt, Human
guuuuauaggugaaauauuacu

SEQ ID NO: 480849 - RNA, 22 nt, Human
auggcagauggcuggagcaggu

SEQ ID NO: 480850 - RNA, 22 nt, Human
uggaaagaauuccuaugguuca

SEQ ID NO: 480851 - RNA, 22 nt, Human
uugcugaagugaagguauguuu

SEQ ID NO: 480852 - RNA, 17 nt, Human
gcacugaacaauccugu

SEQ ID NO: 480853 - RNA, 22 nt, Human
ggagugggaacaaugacauggu

SEQ ID NO: 480854 - RNA, 22 nt, Human
ccacagagacaggguccuugcu

SEQ ID NO: 480855 - RNA, 22 nt, Human
ggcagggaggaggugaaaguga

SEQ ID NO: 480856 - RNA, 22 nt, Human
gagcugagaucgugccauugca

SEQ ID NO: 480857 - RNA, 22 nt, Human
gcuggcaccugcaccaagcagg

SEQ ID NO: 480858 - RNA, 22 nt, Human
ccuggcuguggcggugcucuca

SEQ ID NO: 480859 - RNA, 22 nt, Human
ccagcuccugggucuuagucag

SEQ ID NO: 480860 - RNA, 22 nt, Human
uccucugcuggaagggcaagag

SEQ ID NO: 480861 - RNA, 22 nt, Human
aggcaguuuaggcagcgauuua

SEQ ID NO: 480862 - RNA, 22 nt, Human
gcacagguugcaaaaguucaca

SEQ ID NO: 480863 - RNA, 22 nt, Human
uuuaauuuuccucuuccuggag

SEQ ID NO: 480864 - RNA, 22 nt, Human
agggcugaugcaccauguagcc

SEQ ID NO: 480865 - RNA, 22 nt, Human
gccggggcuggggagagacaug

SEQ ID NO: 480866 - RNA, 22 nt, Human
ggucauugucagagccuguacu

SEQ ID NO: 480867 - RNA, 22 nt, Human
ugccugggggacuaaggccaaa

SEQ ID NO: 480868 - RNA, 22 nt, Human
uggcugaguucuccaggaguag

SEQ ID NO: 480869 - RNA, 22 nt, Human
accuuaaaacugacacauggag

SEQ ID NO: 480870 - RNA, 22 nt, Human
agcugaagaaaugggaagcauu

SEQ ID NO: 480871 - RNA, 22 nt, Human
aaguggagcuauaggcucagau

SEQ ID NO: 480872 - RNA, 22 nt, Human
cauggccucaaaggacugcaga

SEQ ID NO: 480873 - RNA, 22 nt, Human
aauuagggaaaauuuacuugua

SEQ ID NO: 480874 - RNA, 22 nt, Human
caggaaggcccaccuguccugu

SEQ ID NO: 480875 - RNA, 22 nt, Human
cuguacauaaaggaauaggugu

SEQ ID NO: 480876 - RNA, 22 nt, Human
aaggagaaaugguagaugugca

SEQ ID NO: 480877 - RNA, 21 nt, Human
agggaaagaaaaugagcuaau

SEQ ID NO: 480878 - RNA, 22 nt, Human
aaguuaugaaauuuggacagcu

SEQ ID NO: 480879 - RNA, 22 nt, Human
caggaugggugucggccagcac

SEQ ID NO: 480880 - RNA, 22 nt, Human
ucuuagaaugucaacugauguu

SEQ ID NO: 480881 - RNA, 23 nt, Human
acagccaguucaccucuccuugg

SEQ ID NO: 480882 - RNA, 22 nt, Human
ccacagaguuacaaaacaguca

SEQ ID NO: 480883 - RNA, 22 nt, Human
acccucaacaaauucacucuau

SEQ ID NO: 480884 - RNA, 22 nt, Human
agagugauucuaguuagggaau

SEQ ID NO: 480885 - RNA, 22 nt, Human
ggaggccagggacccagucagc

SEQ ID NO: 480886 - RNA, 22 nt, Human
aaggccaggacaccaggggacu

SEQ ID NO: 480887 - RNA, 17 nt, Human
uggcaagaauggaaaug

SEQ ID NO: 480888 - RNA, 22 nt, Human
cugcaagauuggaagaugcaau

SEQ ID NO: 480889 - RNA, 22 nt, Human
cuggcagcauggagccugugcu

SEQ ID NO: 480890 - RNA, 22 nt, Human
gccuggguuccaugaucuccag

SEQ ID NO: 480891 - RNA, 22 nt, Human
caggggcuguuugccucaggcc

SEQ ID NO: 480892 - RNA, 22 nt, Human
cagagcagggugcaccuugggc

SEQ ID NO: 480893 - RNA, 22 nt, Human
agcuguguggugucugacagcu

SEQ ID NO: 480894 - RNA, 22 nt, Human
ccuuuuucccuggagggacagc

SEQ ID NO: 480895 - RNA, 22 nt, Human
uuguccuuggaugaagcuggga

SEQ ID NO: 480896 - RNA, 22 nt, Human
ucagagugaccuuacauggucu

SEQ ID NO: 480897 - RNA, 22 nt, Human
cuuaaauucuuaaugcccucau

SEQ ID NO: 480898 - RNA, 22 nt, Human
ugcuggaggccugacuguguuu

SEQ ID NO: 480899 - RNA, 22 nt, Human
aucagagaaauggagggcgcuu

SEQ ID NO: 480900 - RNA, 22 nt, Human
uccaggcaugucccaagccgga

SEQ ID NO: 480901 - RNA, 22 nt, Human
auuuuucucuuuccacugagau

SEQ ID NO: 480902 - RNA, 22 nt, Human
cagagcagguaucuuuggugaa

SEQ ID NO: 480903 - RNA, 22 nt, Human
acagaggucauggagaguucuc

SEQ ID NO: 480904 - RNA, 22 nt, Human
gccaguggcccucuggagaagg

SEQ ID NO: 480905 - RNA, 22 nt, Human
ugccugcugcuaagcucuuugu

SEQ ID NO: 480906 - RNA, 22 nt, Human
ugucuuuauauauuuggaaaau

SEQ ID NO: 480907 - RNA, 22 nt, Human
gcagggaccuugcccacccucc

SEQ ID NO: 480908 - RNA, 22 nt, Human
uguaugcuuuccaaaaaugcug

SEQ ID NO: 480909 - RNA, 22 nt, Human
accugcaggggugcucucuggg

SEQ ID NO: 480910 - RNA, 22 nt, Human
aaaaagauguccugaaguuuag

SEQ ID NO: 480911 - RNA, 22 nt, Human
ugauuuccacgugcacccaggu

SEQ ID NO: 480912 - RNA, 19 nt, Human
ucaggaguuaguugugcuc

SEQ ID NO: 480913 - RNA, 22 nt, Human
uaugaguacaaggacucugucu

SEQ ID NO: 480914 - RNA, 22 nt, Human
agggacacaugugauuauuuau

SEQ ID NO: 480915 - RNA, 22 nt, Human
gaugaagccugacuucucggug

SEQ ID NO: 480916 - RNA, 22 nt, Human
ucagagccccuccgcuguccca

SEQ ID NO: 480917 - RNA, 22 nt, Human
ggcuucagugagcugagcucac

SEQ ID NO: 480918 - RNA, 22 nt, Human
ugucacuucaggaaugcaggga

SEQ ID NO: 480919 - RNA, 22 nt, Human
ugaaaguugcacauaagagaau

SEQ ID NO: 480920 - RNA, 22 nt, Human
uucaagaugacccagucacacg

SEQ ID NO: 480921 - RNA, 22 nt, Human
uggugguuaugcgcuuuguggg

SEQ ID NO: 480922 - RNA, 20 nt, Human
caucaucacaugagccaauu

SEQ ID NO: 480923 - RNA, 22 nt, Human
aagcaaaagguuacacuucugg

SEQ ID NO: 480924 - RNA, 22 nt, Human
gcagugugaccgagcuugcuuc

SEQ ID NO: 480925 - RNA, 22 nt, Human
ccagcagaggggcggagugcag

SEQ ID NO: 480926 - RNA, 22 nt, Human
ucaagucuggagaucuggaacu

SEQ ID NO: 480927 - RNA, 22 nt, Human
aucaguuuuuauuaauguagcu

SEQ ID NO: 480928 - RNA, 22 nt, Human
uguggcagcuggagguggagaa

SEQ ID NO: 480929 - RNA, 22 nt, Human
agccuggcacugccccauccau

SEQ ID NO: 480930 - RNA, 19 nt, Human
gaaaggcugcugcuaccug

SEQ ID NO: 480931 - RNA, 22 nt, Human
acucucucacagcuuggcugau

SEQ ID NO: 480932 - RNA, 22 nt, Human
aaaugucuaucuggcauauucc

SEQ ID NO: 480933 - RNA, 22 nt, Human
agcugccucagcaacacagacc

SEQ ID NO: 480934 - RNA, 22 nt, Human
accgggaaguccugcacugggc

SEQ ID NO: 480935 - RNA, 22 nt, Human
uugcugaauugaauccuuuggu

SEQ ID NO: 480936 - RNA, 22 nt, Human
auaauuuacuaagcucuaccuu

SEQ ID NO: 480937 - RNA, 22 nt, Human
ucucccacagucucccauggcu

SEQ ID NO: 480938 - RNA, 22 nt, Human
cuucccagaccuuagagugcag

SEQ ID NO: 480939 - RNA, 22 nt, Human
acagccugcugccugcuucuug

SEQ ID NO: 480940 - RNA, 20 nt, Human
aacacugugcgugguaggug

SEQ ID NO: 480941 - RNA, 22 nt, Human
cccagcccaucucaaaggucua

SEQ ID NO: 480942 - RNA, 22 nt, Human
auuuuaucugcuuacuuucagg

SEQ ID NO: 480943 - RNA, 19 nt, Human
augucuguugaauuucaua

SEQ ID NO: 480944 - RNA, 18 nt, Human
uauauuucacacauauuc

SEQ ID NO: 480945 - RNA, 22 nt, Human
aaaaauaggucaaccguguaug

SEQ ID NO: 480946 - RNA, 20 nt, Human
uucaggauucuagaccacac

SEQ ID NO: 480947 - RNA, 22 nt, Human
gcagggugaaggucacauagaa

SEQ ID NO: 480948 - RNA, 22 nt, Human
caggggcagucugugugcgugg

SEQ ID NO: 480949 - RNA, 17 nt, Human
cugucugcgcaugaggu

SEQ ID NO: 480950 - RNA, 22 nt, Human
aacaugauggggaagaacaaga

SEQ ID NO: 480951 - RNA, 22 nt, Human
cugcugcaggaugggcacucug

SEQ ID NO: 480952 - RNA, 22 nt, Human
guugaaagcuuuucauuuaguu

SEQ ID NO: 480953 - RNA, 22 nt, Human
ugccaggcucaggaugucccug

SEQ ID NO: 480954 - RNA, 22 nt, Human
aaagauuugaguucugcuuaua

SEQ ID NO: 480955 - RNA, 22 nt, Human
ucucaccauggugcuugcuuau

SEQ ID NO: 480956 - RNA, 22 nt, Human
gcaaguacaaacgcaucggcug

SEQ ID NO: 480957 - RNA, 22 nt, Human
gccugagauucugcauuucuaa

SEQ ID NO: 480958 - RNA, 22 nt, Human
ucccacugugccuguuguaauc

SEQ ID NO: 480959 - RNA, 22 nt, Human
ggcagcucaccucugguccagg

SEQ ID NO: 480960 - RNA, 22 nt, Human
accagcagaguugaggaggaca

SEQ ID NO: 480961 - RNA, 22 nt, Human
agggaguguaaauggugcucag

SEQ ID NO: 480962 - RNA, 22 nt, Human
uacauuaucuuguuaucuuuca

SEQ ID NO: 480963 - RNA, 22 nt, Human
gggcuucuagaccagcagugag

SEQ ID NO: 480964 - RNA, 22 nt, Human
ucucagaguuccucuggagucc

SEQ ID NO: 480965 - RNA, 22 nt, Human
gggccugacugagagcuccuca

SEQ ID NO: 480966 - RNA, 22 nt, Human
aaggcugagacagcacaggucc

SEQ ID NO: 480967 - RNA, 22 nt, Human
agcuuuuaguacguuaaaauug

SEQ ID NO: 480968 - RNA, 22 nt, Human
ugaaaaggguagaucccuaagu

SEQ ID NO: 480969 - RNA, 22 nt, Human
aggcugaguuucucauucucgc

SEQ ID NO: 480970 - RNA, 22 nt, Human
ucaggcugcuggccagcaggcu

SEQ ID NO: 480971 - RNA, 22 nt, Human
uggcagagaauaaaucuugacu

SEQ ID NO: 480972 - RNA, 22 nt, Human
auuuauguaucuguguagauca

SEQ ID NO: 480973 - RNA, 22 nt, Human
ccugucagcugauggcuaugua

SEQ ID NO: 480974 - RNA, 21 nt, Human
cugccuugaaugguacuggga

SEQ ID NO: 480975 - RNA, 22 nt, Human
accagggcugacaaucugaugg

SEQ ID NO: 480976 - RNA, 22 nt, Human
cucugggcaaguuucuucauga

SEQ ID NO: 480977 - RNA, 22 nt, Human
ucaguuuucaauuucaucagag

SEQ ID NO: 480978 - RNA, 22 nt, Human
agcagcugaucaaagcacuuau

SEQ ID NO: 480979 - RNA, 22 nt, Human
agcugcucugauaaaccuacuu

SEQ ID NO: 480980 - RNA, 18 nt, Human
aggcuucccaggcaggcc

SEQ ID NO: 480981 - RNA, 22 nt, Human
ucauugcagacuaacaaucuca

SEQ ID NO: 480982 - RNA, 22 nt, Human
ucagcagggaggcucugugccc

SEQ ID NO: 480983 - RNA, 22 nt, Human
uccugggcugugugccacucug

SEQ ID NO: 480984 - RNA, 22 nt, Human
ucuguacauuuggggaccccag

SEQ ID NO: 480985 - RNA, 22 nt, Human
caggcugaucagggcugggaug

SEQ ID NO: 480986 - RNA, 22 nt, Human
cagaggccaccuguggccacug

SEQ ID NO: 480987 - RNA, 22 nt, Human
gagucaguaauggauaugucau

SEQ ID NO: 480988 - RNA, 22 nt, Human
caucacuguccaaaguucaguu

SEQ ID NO: 480989 - RNA, 22 nt, Human
gccugcaguucugugcuaggca

SEQ ID NO: 480990 - RNA, 23 nt, Human
cuugcagggcuggaggcuuagaa

SEQ ID NO: 480991 - RNA, 22 nt, Human
ucugaagaacugaguaaacaug

SEQ ID NO: 480992 - RNA, 22 nt, Human
gacacagggggauguguggacg

SEQ ID NO: 480993 - RNA, 19 nt, Human
cuggggcuuugguacugcc

SEQ ID NO: 480994 - RNA, 22 nt, Human
ggcugcaggcagaggcugucug

SEQ ID NO: 480995 - RNA, 22 nt, Human
uacaguaacauguuguacaagc

SEQ ID NO: 480996 - RNA, 22 nt, Human
uauguguaggaggaggacaggg

SEQ ID NO: 480997 - RNA, 17 nt, Human
guccuacccauggucua

SEQ ID NO: 480998 - RNA, 22 nt, Human
aggcucaggucucaggucuggc

SEQ ID NO: 480999 - RNA, 22 nt, Human
gcuggccuucugcagaguucug

SEQ ID NO: 481000 - RNA, 22 nt, Human
ccaaggcuucccagagaugcuc

SEQ ID NO: 481001 - RNA, 22 nt, Human
gaggagcaugggaaggcucugg

SEQ ID NO: 481002 - RNA, 22 nt, Human
uucucauucugacucaguguag

SEQ ID NO: 481003 - RNA, 22 nt, Human
agaaggcagaugggacggagca

SEQ ID NO: 481004 - RNA, 22 nt, Human
uucacuuaacaucauaucauga

SEQ ID NO: 481005 - RNA, 22 nt, Human
ggucccagcugcucaagaggcu

SEQ ID NO: 481006 - RNA, 22 nt, Human
cugugacuguguuggaugcaca

SEQ ID NO: 481007 - RNA, 22 nt, Human
gggcugugcugaguaggaggug

SEQ ID NO: 481008 - RNA, 22 nt, Human
ccugggugacccgugagcgucc

SEQ ID NO: 481009 - RNA, 21 nt, Human
uuaagagcuuagcaguaggcc

SEQ ID NO: 481010 - RNA, 19 nt, Human
aggagaagacucucucccc

SEQ ID NO: 481011 - RNA, 22 nt, Human
caggaugagguagaggcagaua

SEQ ID NO: 481012 - RNA, 22 nt, Human
aggcccagggcugcucucugaa

SEQ ID NO: 481013 - RNA, 22 nt, Human
gcagcuggacccacacggcuua

SEQ ID NO: 481014 - RNA, 22 nt, Human
ucacaccuguaaucccaggccu

SEQ ID NO: 481015 - RNA, 16 nt, Human
ggcaccagugaacaca

SEQ ID NO: 481016 - RNA, 22 nt, Human
aaacuguaaacacagcaguaca

SEQ ID NO: 481017 - RNA, 22 nt, Human
uggagcaggccggaaguggcuu

SEQ ID NO: 481018 - RNA, 21 nt, Human
gagugcaggucugaugccauc

SEQ ID NO: 481019 - RNA, 22 nt, Human
aaaugcacaggagaaccaauuc

SEQ ID NO: 481020 - RNA, 22 nt, Human
agggacacacuccaguguuauu

SEQ ID NO: 481021 - RNA, 22 nt, Human
ggcuucaccgcgggguugcagg

SEQ ID NO: 481022 - RNA, 22 nt, Human
uggcuccuaucaaggagugggu

SEQ ID NO: 481023 - RNA, 22 nt, Human
ggccuuggggaggauggugucc

SEQ ID NO: 481024 - RNA, 22 nt, Human
gaaaucuuuauggaaauaacaa

SEQ ID NO: 481025 - RNA, 21 nt, Human
agcagaggggacauguuugau

SEQ ID NO: 481026 - RNA, 23 nt, Human
augcaguauaugucaguaguuua

SEQ ID NO: 481027 - RNA, 18 nt, Human
ugugguggagcugccuuc

SEQ ID NO: 481028 - RNA, 22 nt, Human
ugggccuguggcuuggcucuag

SEQ ID NO: 481029 - RNA, 22 nt, Human
ugguuucccauuaucugcagga

SEQ ID NO: 481030 - RNA, 22 nt, Human
gccacacuuauucucaugcaca

SEQ ID NO: 481031 - RNA, 22 nt, Human
caggagccagcugucccaacca

SEQ ID NO: 481032 - RNA, 22 nt, Human
cuccuucccuucaaguguuccu

SEQ ID NO: 481033 - RNA, 22 nt, Human
gagggcugauguugccaccuca

SEQ ID NO: 481034 - RNA, 22 nt, Human
gagcucuguguagccugagggu

SEQ ID NO: 481035 - RNA, 22 nt, Human
gcaccugggguacacagcuaca

SEQ ID NO: 481036 - RNA, 22 nt, Human
agauacauugaguuuccuccug

SEQ ID NO: 481037 - RNA, 22 nt, Human
ugguaauuuacgcauuucugua

SEQ ID NO: 481038 - RNA, 22 nt, Human
ccuuucucauuuuaagcauuag

SEQ ID NO: 481039 - RNA, 22 nt, Human
uccgccaggacugagggcccau

SEQ ID NO: 481040 - RNA, 22 nt, Human
aaggcagaaauucaacuacugg

SEQ ID NO: 481041 - RNA, 22 nt, Human
uguauuuucugaagauaaucaa

SEQ ID NO: 481042 - RNA, 22 nt, Human
acccagcaugacaccugcacau

SEQ ID NO: 481043 - RNA, 22 nt, Human
ucaacagaagugauagcuauua

SEQ ID NO: 481044 - RNA, 22 nt, Human
gcucacagccggcuggcagggg

SEQ ID NO: 481045 - RNA, 22 nt, Human
ugaggcagcccacuuuccuuag

SEQ ID NO: 481046 - RNA, 22 nt, Human
gcugugcagguccccacugccu

SEQ ID NO: 481047 - RNA, 22 nt, Human
ccaggcccugcuccucacacca

SEQ ID NO: 481048 - RNA, 22 nt, Human
aaccauuugccauuaucuuaag

SEQ ID NO: 481049 - RNA, 22 nt, Human
cugccuggaaggagcaagggga

SEQ ID NO: 481050 - RNA, 22 nt, Human
cuggcaggaaguuagaugguaa

SEQ ID NO: 481051 - RNA, 22 nt, Human
auccuugagccuuaucuuuugu

SEQ ID NO: 481052 - RNA, 22 nt, Human
gaggccagcgcgcagcacuuuu

SEQ ID NO: 481053 - RNA, 22 nt, Human
uuccuggugguggugacagcac

SEQ ID NO: 481054 - RNA, 17 nt, Human
ucaggcugggugcagug

SEQ ID NO: 481055 - RNA, 22 nt, Human
uggagcugaacuuugaggccag

SEQ ID NO: 481056 - RNA, 22 nt, Human
uaugcacaguuacaagaauauc

SEQ ID NO: 481057 - RNA, 22 nt, Human
cugcacagagcagggcagacac

SEQ ID NO: 481058 - RNA, 22 nt, Human
ucuggcuccacucugugcaugc

SEQ ID NO: 481059 - RNA, 22 nt, Human
caggaggcaguuucagaaguca

SEQ ID NO: 481060 - RNA, 22 nt, Human
cccagccugucuuucccaauga

SEQ ID NO: 481061 - RNA, 22 nt, Human
agaaugcaagauaaacuuuauu

SEQ ID NO: 481062 - RNA, 22 nt, Human
cccagcucucucaguucugcuu

SEQ ID NO: 481063 - RNA, 22 nt, Human
gggggucccaagcugggcugcu

SEQ ID NO: 481064 - RNA, 22 nt, Human
uaaagguagugugacauauugu

SEQ ID NO: 481065 - RNA, 22 nt, Human
ucaccuuagcuagaggaagaga

SEQ ID NO: 481066 - RNA, 22 nt, Human
gcuaccugagcaagagcuucaa

SEQ ID NO: 481067 - RNA, 22 nt, Human
cagcagagguuggaacaguucu

SEQ ID NO: 481068 - RNA, 22 nt, Human
uaagacaauucuucagucacaa

SEQ ID NO: 481069 - RNA, 22 nt, Human
gcauuuguguucuuccuagagc

SEQ ID NO: 481070 - RNA, 22 nt, Human
cagagccagcaguggggacagg

SEQ ID NO: 481071 - RNA, 22 nt, Human
uuccaguugguagaauguaagg

SEQ ID NO: 481072 - RNA, 22 nt, Human
auucuggccuuggcucugucac

SEQ ID NO: 481073 - RNA, 22 nt, Human
cucaggaucgcuugcccuaggg

SEQ ID NO: 481074 - RNA, 22 nt, Human
aggcagaaaauagucauccaaa

SEQ ID NO: 481075 - RNA, 22 nt, Human
cacagcuucccaaaguggaccu

SEQ ID NO: 481076 - RNA, 22 nt, Human
ccagggcaucacauccaguguu

SEQ ID NO: 481077 - RNA, 22 nt, Human
ucuggcucuguguccucaccca

SEQ ID NO: 481078 - RNA, 18 nt, Human
ccagcaugccagaggcug

SEQ ID NO: 481079 - RNA, 22 nt, Human
uggagggcaugcuguccauggg

SEQ ID NO: 481080 - RNA, 22 nt, Human
agggccugcaucaggagcuugg

SEQ ID NO: 481081 - RNA, 22 nt, Human
cuuauguaaacuacagauaaua

SEQ ID NO: 481082 - RNA, 22 nt, Human
ugaggaggucagagucuggcug

SEQ ID NO: 481083 - RNA, 22 nt, Human
cuguagccagaagcagaaggcc

SEQ ID NO: 481084 - RNA, 22 nt, Human
agucuucucauuucacaugcuu

SEQ ID NO: 481085 - RNA, 22 nt, Human
ccugguguugugaaguagccgu

SEQ ID NO: 481086 - RNA, 22 nt, Human
ucagcuuuccuugcuuuagauu

SEQ ID NO: 481087 - RNA, 22 nt, Human
guggcagagguuccucagugug

SEQ ID NO: 481088 - RNA, 22 nt, Human
uaugaagauauaucugaucucu

SEQ ID NO: 481089 - RNA, 22 nt, Human
gcuuugcauuguuuaaucagga

SEQ ID NO: 481090 - RNA, 22 nt, Human
cugugaauuaaguauuguuauc

SEQ ID NO: 481091 - RNA, 22 nt, Human
cucuuccucucaugcggucaua

SEQ ID NO: 481092 - RNA, 22 nt, Human
aggccagcuguuacuagagcca

SEQ ID NO: 481093 - RNA, 22 nt, Human
ucaaagucuaucuguaauuacu

SEQ ID NO: 481094 - RNA, 22 nt, Human
ccacuugugaaauaaucaaaua

SEQ ID NO: 481095 - RNA, 22 nt, Human
ucugaagggcugaguggaggag

SEQ ID NO: 481096 - RNA, 22 nt, Human
cagagugaaaacugagcucaaa

SEQ ID NO: 481097 - RNA, 22 nt, Human
auccugggaagcugacauugaa

SEQ ID NO: 481098 - RNA, 22 nt, Human
auucagugugagguuuucaagu

SEQ ID NO: 481099 - RNA, 22 nt, Human
cccuggguucuggcugggcugc

SEQ ID NO: 481100 - RNA, 22 nt, Human
gaggcugggaaguccaagacca

SEQ ID NO: 481101 - RNA, 20 nt, Human
ugggagcuggugaggucuca

SEQ ID NO: 481102 - RNA, 17 nt, Human
aucuggaagcuagcuga

SEQ ID NO: 481103 - RNA, 22 nt, Human
agagccuguacuuuucugugaa

SEQ ID NO: 481104 - RNA, 22 nt, Human
guuuuuaucuaauagcaguuau

SEQ ID NO: 481105 - RNA, 22 nt, Human
caggaaccuaaugaaggcucac

SEQ ID NO: 481106 - RNA, 22 nt, Human
aauuucaauuacuuuugcacca

SEQ ID NO: 481107 - RNA, 22 nt, Human
gcuggagccuucugcucuguug

SEQ ID NO: 481108 - RNA, 22 nt, Human
gaaaggugccccauaggcagga

SEQ ID NO: 481109 - RNA, 22 nt, Human
ggccucugcccucacuccuguc

SEQ ID NO: 481110 - RNA, 22 nt, Human
gaggcucaguuaugucaucagg

SEQ ID NO: 481111 - RNA, 22 nt, Human
agguauuauuagcaucucuauu

SEQ ID NO: 481112 - RNA, 22 nt, Human
uccagucaggcugaauucaagg

SEQ ID NO: 481113 - RNA, 22 nt, Human
ugucauaaaacacaagcuguug

SEQ ID NO: 481114 - RNA, 22 nt, Human
auuuaguguguauugcuauuau

SEQ ID NO: 481115 - RNA, 19 nt, Human
uuucaauggcuuagagaaa

SEQ ID NO: 481116 - RNA, 22 nt, Human
ugccacaccaacaucuuucagc

SEQ ID NO: 481117 - RNA, 22 nt, Human
aaguucuaauuuugcauucagg

SEQ ID NO: 481118 - RNA, 22 nt, Human
caaaugcagucccuuuguugcu

SEQ ID NO: 481119 - RNA, 22 nt, Human
acuuaguauuuuucagcuuuga

SEQ ID NO: 481120 - RNA, 22 nt, Human
gcugucugucuucacaucucgc

SEQ ID NO: 481121 - RNA, 22 nt, Human
ucuuuuggaaaugaugugcagg

SEQ ID NO: 481122 - RNA, 22 nt, Human
cucccuggcuuuguccugaggc

SEQ ID NO: 481123 - RNA, 22 nt, Human
gccaguggucacugaggaagaa

SEQ ID NO: 481124 - RNA, 19 nt, Human
cucuggccucuggaugcug

SEQ ID NO: 481125 - RNA, 22 nt, Human
ucuguacaacaaagggaugaga

SEQ ID NO: 481126 - RNA, 22 nt, Human
cagcaugcaaguccagaugugg

SEQ ID NO: 481127 - RNA, 21 nt, Human
cacuggaauuuucugugacau

SEQ ID NO: 481128 - RNA, 22 nt, Human
cagcuuucaucagugacacuca

SEQ ID NO: 481129 - RNA, 22 nt, Human
uggcuggacagugggcagugga

SEQ ID NO: 481130 - RNA, 22 nt, Human
cuguguccugcgucaagccaau

SEQ ID NO: 481131 - RNA, 22 nt, Human
uguccuuuucuuuagugcagcu

SEQ ID NO: 481132 - RNA, 18 nt, Human
agggaucaucacugcagc

SEQ ID NO: 481133 - RNA, 22 nt, Human
uucagagaugacaccugguguu

SEQ ID NO: 481134 - RNA, 19 nt, Human
agccacagaacuugcagga

SEQ ID NO: 481135 - RNA, 20 nt, Human
uacugggcaagcccacagac

SEQ ID NO: 481136 - RNA, 22 nt, Human
ggcuccugauaggagaaugcgg

SEQ ID NO: 481137 - RNA, 22 nt, Human
uccuuuuugguccaaggugacc

SEQ ID NO: 481138 - RNA, 22 nt, Human
gguuccccaggcggcccuugga

SEQ ID NO: 481139 - RNA, 22 nt, Human
ccuggcagucaggggaguccuu

SEQ ID NO: 481140 - RNA, 22 nt, Human
guugaaagaucauguggcugcc

SEQ ID NO: 481141 - RNA, 22 nt, Human
agggagguccaucccugcagag

SEQ ID NO: 481142 - RNA, 22 nt, Human
caguggaggccuugggaccuuu

SEQ ID NO: 481143 - RNA, 22 nt, Human
acaccauacucauguugguucc

SEQ ID NO: 481144 - RNA, 22 nt, Human
uggcugagcugcagcguggcuu

SEQ ID NO: 481145 - RNA, 22 nt, Human
ugaguccacuuuaaaaugucag

SEQ ID NO: 481146 - RNA, 22 nt, Human
acacugaauguuuaagaacuug

SEQ ID NO: 481147 - RNA, 20 nt, Human
gccugagcuccgccuccugu

SEQ ID NO: 481148 - RNA, 22 nt, Human
uuuuucaucugauugauaacuc

SEQ ID NO: 481149 - RNA, 22 nt, Human
gcagcagagcuuuguccuggcu

SEQ ID NO: 481150 - RNA, 22 nt, Human
ugaggcucagagcaccugcucc

SEQ ID NO: 481151 - RNA, 22 nt, Human
ugccugucuccucugcagggug

SEQ ID NO: 481152 - RNA, 19 nt, Human
uucuaccuuacuguaggcu

SEQ ID NO: 481153 - RNA, 22 nt, Human
acucaggaaaaauguagugaua

SEQ ID NO: 481154 - RNA, 23 nt, Human
agcagugaguaaacagauaggau

SEQ ID NO: 481155 - RNA, 22 nt, Human
agcagggcaguuaaaggguccu

SEQ ID NO: 481156 - RNA, 22 nt, Human
agucucaggcagaggaaggcua

SEQ ID NO: 481157 - RNA, 22 nt, Human
cuuaaauuuucaucuacaagaa

SEQ ID NO: 481158 - RNA, 22 nt, Human
gcaugucaugucauguaggaau

SEQ ID NO: 481159 - RNA, 22 nt, Human
uaagaacagauaaaguuucccc

SEQ ID NO: 481160 - RNA, 22 nt, Human
gcucugucuucagcacacagua

SEQ ID NO: 481161 - RNA, 22 nt, Human
ccuccugguccagcaucucuuu

SEQ ID NO: 481162 - RNA, 22 nt, Human
ugaaggcuguuggauggggaag

SEQ ID NO: 481163 - RNA, 20 nt, Human
ugucaugcauuagaugaaga

SEQ ID NO: 481164 - RNA, 19 nt, Human
uggcaucuguaaaauggug

SEQ ID NO: 481165 - RNA, 22 nt, Human
aucaggaugacaacugcugggu

SEQ ID NO: 481166 - RNA, 22 nt, Human
caguuucucucaauaagcaucg

SEQ ID NO: 481167 - RNA, 22 nt, Human
ggcugcugcccaccccugcaug

SEQ ID NO: 481168 - RNA, 19 nt, Human
aaggcagaaguuggauaug

SEQ ID NO: 481169 - RNA, 18 nt, Human
ccagagcuggcuccucgc

SEQ ID NO: 481170 - RNA, 18 nt, Human
ucugucucuguccuugcu

SEQ ID NO: 481171 - RNA, 20 nt, Human
auguagaugaaagcaaaggc

SEQ ID NO: 481172 - RNA, 22 nt, Human
gauuucaaagguucugcaugcc

SEQ ID NO: 481173 - RNA, 22 nt, Human
uaggugucugcucuuauuuaac

SEQ ID NO: 481174 - RNA, 22 nt, Human
cugcuguggaugcaggaccuca

SEQ ID NO: 481175 - RNA, 22 nt, Human
acaggggcuccgaaggugaggg

SEQ ID NO: 481176 - RNA, 22 nt, Human
gcaggggaguggaugauggauu

SEQ ID NO: 481177 - RNA, 22 nt, Human
cuucucuucccagggacacagg

SEQ ID NO: 481178 - RNA, 22 nt, Human
uuguauauauucuuaaagaugu

SEQ ID NO: 481179 - RNA, 22 nt, Human
gcugcaggggggucuggacuug

SEQ ID NO: 481180 - RNA, 22 nt, Human
caauuucuuguuaauucucagg

SEQ ID NO: 481181 - RNA, 20 nt, Human
gggguuggcuggcacaggga

SEQ ID NO: 481182 - RNA, 19 nt, Human
acaagggcaggcaagguga

SEQ ID NO: 481183 - RNA, 22 nt, Human
gcaggaaagguugagacuuugc

SEQ ID NO: 481184 - RNA, 22 nt, Human
uaaggccaggcuguggucggca

SEQ ID NO: 481185 - RNA, 22 nt, Human
uggagcagagaugggagcccaa

SEQ ID NO: 481186 - RNA, 22 nt, Human
gcugucuguucgagcguguguu

SEQ ID NO: 481187 - RNA, 22 nt, Human
cuacugaguccuucagcugcca

SEQ ID NO: 481188 - RNA, 22 nt, Human
ccugccugggcucacuugccag

SEQ ID NO: 481189 - RNA, 22 nt, Human
gggcugcugcugccagcgacac

SEQ ID NO: 481190 - RNA, 22 nt, Human
aagccagguguuuaggccagcg

SEQ ID NO: 481191 - RNA, 22 nt, Human
uuuauuauucucuggagaaugu

SEQ ID NO: 481192 - RNA, 18 nt, Human
acacacacaccuguguau

SEQ ID NO: 481193 - RNA, 22 nt, Human
aaaguuagaaugauaucaacga

SEQ ID NO: 481194 - RNA, 22 nt, Human
uugugguuaaccgcacauuuuu

SEQ ID NO: 481195 - RNA, 22 nt, Human
ggcagaggaagcuggaaguggg

SEQ ID NO: 481196 - RNA, 22 nt, Human
agcaugaaaggcgugccaacuu

SEQ ID NO: 481197 - RNA, 22 nt, Human
auauauuuacucuccuguugca

SEQ ID NO: 481198 - RNA, 22 nt, Human
ggcugcuggaagacugaacaag

SEQ ID NO: 481199 - RNA, 22 nt, Human
agugggcagugcgcucggaugc

SEQ ID NO: 481200 - RNA, 22 nt, Human
uaaauguauaggcacuaaaccu

SEQ ID NO: 481201 - RNA, 20 nt, Human
agagccuggaaaaagacauc

SEQ ID NO: 481202 - RNA, 22 nt, Human
agaaagcacucugucuuuuacc

SEQ ID NO: 481203 - RNA, 22 nt, Human
uuaaaaccaucagcuguaagau

SEQ ID NO: 481204 - RNA, 22 nt, Human
auuugucuuuggaccugugaga

SEQ ID NO: 481205 - RNA, 22 nt, Human
caagagcugaggcuggagaggu

SEQ ID NO: 481206 - RNA, 22 nt, Human
gaagucugcugcucaggaguuu

SEQ ID NO: 481207 - RNA, 22 nt, Human
uccagcagaaaagagguaggga

SEQ ID NO: 481208 - RNA, 22 nt, Human
gcagaaggauccgcaggugcaa

SEQ ID NO: 481209 - RNA, 23 nt, Human
aaauuauugcucuucaauugccu

SEQ ID NO: 481210 - RNA, 22 nt, Human
agagcccucuucacugccccuu

SEQ ID NO: 481211 - RNA, 22 nt, Human
gacccaggguuucugcacaggg

SEQ ID NO: 481212 - RNA, 22 nt, Human
ugcaauaacuacuuuaauguug

SEQ ID NO: 481213 - RNA, 22 nt, Human
agccagccaguucacuaggaaa

SEQ ID NO: 481214 - RNA, 22 nt, Human
caggccugauacacugaacucu

SEQ ID NO: 481215 - RNA, 22 nt, Human
gccuggugaaaggcagagagcg

SEQ ID NO: 481216 - RNA, 22 nt, Human
ccagacuguggaguuccuggug

SEQ ID NO: 481217 - RNA, 23 nt, Human
uuacaguaggaguuggaaaacca

SEQ ID NO: 481218 - RNA, 15 nt, Human
uccaggcauucauuc

SEQ ID NO: 481219 - RNA, 22 nt, Human
ccuauugacaauucucuucucc

SEQ ID NO: 481220 - RNA, 22 nt, Human
agcuucuguucaucuuccaggc

SEQ ID NO: 481221 - RNA, 22 nt, Human
aaggcaguaaaaucuaccuugc

SEQ ID NO: 481222 - RNA, 16 nt, Human
gagccaggugccuuga

SEQ ID NO: 481223 - RNA, 19 nt, Human
ugggccugcaucugggucu

SEQ ID NO: 481224 - RNA, 22 nt, Human
agccaggauggucucgaucggc

SEQ ID NO: 481225 - RNA, 22 nt, Human
gccaggcaguucaaguacacca

SEQ ID NO: 481226 - RNA, 21 nt, Human
ggcagugaugugaagugcauc

SEQ ID NO: 481227 - RNA, 22 nt, Human
acaggcacugucaagucaugaa

SEQ ID NO: 481228 - RNA, 22 nt, Human
cagagacaguuucacagggucu

SEQ ID NO: 481229 - RNA, 19 nt, Human
agcagccauagacaauaug

SEQ ID NO: 481230 - RNA, 22 nt, Human
agaugagggguagaaaggacuu

SEQ ID NO: 481231 - RNA, 22 nt, Human
agagaugucgccuugcccaggg

SEQ ID NO: 481232 - RNA, 22 nt, Human
ucccagagccaagcuauggaug

SEQ ID NO: 481233 - RNA, 22 nt, Human
gggccucugugcagaggggccu

SEQ ID NO: 481234 - RNA, 22 nt, Human
ggccucugccccagccacaccu

SEQ ID NO: 481235 - RNA, 22 nt, Human
agugaaaugauaguguaaauac

SEQ ID NO: 481236 - RNA, 20 nt, Human
caggccucugggggcccugg

SEQ ID NO: 481237 - RNA, 22 nt, Human
ggcugccagugagugcagaccg

SEQ ID NO: 481238 - RNA, 22 nt, Human
uagcuaucuguguccagaucca

SEQ ID NO: 481239 - RNA, 22 nt, Human
cccaaggcauggcaugguggca

SEQ ID NO: 481240 - RNA, 22 nt, Human
agucucugagguucagaugccu

SEQ ID NO: 481241 - RNA, 22 nt, Human
cagaguaaggagcugucaaacg

SEQ ID NO: 481242 - RNA, 22 nt, Human
uugaaaggugaacaugaugcac

SEQ ID NO: 481243 - RNA, 22 nt, Human
gaaaucugcccagugcacuggu

SEQ ID NO: 481244 - RNA, 22 nt, Human
agauuuagugguggaauuuugg

SEQ ID NO: 481245 - RNA, 22 nt, Human
uuuccuaugauauucuaugugu

SEQ ID NO: 481246 - RNA, 22 nt, Human
auugaaaguccuaucuaaggga

SEQ ID NO: 481247 - RNA, 22 nt, Human
cgcagcagccccgugguaggug

SEQ ID NO: 481248 - RNA, 22 nt, Human
cagggagaagucuggucagucc

SEQ ID NO: 481249 - RNA, 22 nt, Human
gggcugacgaaggccaugugug

SEQ ID NO: 481250 - RNA, 22 nt, Human
gccugggagagggauagugcag

SEQ ID NO: 481251 - RNA, 22 nt, Human
ugcuaucucuauauccauuuau

SEQ ID NO: 481252 - RNA, 22 nt, Human
agggaccucuucuugcagcuga

SEQ ID NO: 481253 - RNA, 22 nt, Human
uuugcuuguucaagauuucugu

SEQ ID NO: 481254 - RNA, 22 nt, Human
aauugugcuaugauuaugaaag

SEQ ID NO: 481255 - RNA, 22 nt, Human
uuuugcuuuuguaacacagugu

SEQ ID NO: 481256 - RNA, 22 nt, Human
uagaaaucagguuuuuagaaag

SEQ ID NO: 481257 - RNA, 22 nt, Human
ggaggccaguccuggccgggcu

SEQ ID NO: 481258 - RNA, 22 nt, Human
gugaaggacuagcauggagggc

SEQ ID NO: 481259 - RNA, 22 nt, Human
ucuucagagugaaagucuguga

SEQ ID NO: 481260 - RNA, 22 nt, Human
gcugggaggaucucucccuguc

SEQ ID NO: 481261 - RNA, 22 nt, Human
aagucagagcaacugagacauu

SEQ ID NO: 481262 - RNA, 22 nt, Human
gaggaggcacuaguuagugaca

SEQ ID NO: 481263 - RNA, 22 nt, Human
ugaggccaggaucccaggcucu

SEQ ID NO: 481264 - RNA, 22 nt, Human
acagagcacugcccugugccgc

SEQ ID NO: 481265 - RNA, 22 nt, Human
aaguggagagcccuggaggucu

SEQ ID NO: 481266 - RNA, 22 nt, Human
guuauuuuaucucugagagguu

SEQ ID NO: 481267 - RNA, 21 nt, Human
gaacauuuggguuguuucuac

SEQ ID NO: 481268 - RNA, 22 nt, Human
cuggaggcacccuuagagaggc

SEQ ID NO: 481269 - RNA, 22 nt, Human
aaguuauuuccucgugacugaa

SEQ ID NO: 481270 - RNA, 22 nt, Human
cuggcugccacuucagggucuu

SEQ ID NO: 481271 - RNA, 22 nt, Human
agauacaucuugaacuucuaga

SEQ ID NO: 481272 - RNA, 22 nt, Human
gguuuauuaaugugaacuguau

SEQ ID NO: 481273 - RNA, 22 nt, Human
cugccucuugacagaucguggc

SEQ ID NO: 481274 - RNA, 22 nt, Human
cccuggagcuagucugagcaga

SEQ ID NO: 481275 - RNA, 22 nt, Human
agcugagccagcagcaacagga

SEQ ID NO: 481276 - RNA, 19 nt, Human
gcagcugugggaagagcca

SEQ ID NO: 481277 - RNA, 22 nt, Human
ccccaggacacauggaccaagu

SEQ ID NO: 481278 - RNA, 22 nt, Human
agccugugugcuuuggacaggg

SEQ ID NO: 481279 - RNA, 22 nt, Human
cagggcuagugacaccccaguc

SEQ ID NO: 481280 - RNA, 22 nt, Human
cucugcagaggcccaaggcuga

SEQ ID NO: 481281 - RNA, 22 nt, Human
guguuuccucacuucucugacu

SEQ ID NO: 481282 - RNA, 22 nt, Human
uccucacauggugagccacaca

SEQ ID NO: 481283 - RNA, 22 nt, Human
ccugugcauccgguggucauug

SEQ ID NO: 481284 - RNA, 19 nt, Human
ugcucaggccaaggagccc

SEQ ID NO: 481285 - RNA, 22 nt, Human
gccaggcacaguucuaggugcu

SEQ ID NO: 481286 - RNA, 22 nt, Human
gcaaugauauugaagugaugaa

SEQ ID NO: 481287 - RNA, 22 nt, Human
uggcuggcuagugggcaggauu

SEQ ID NO: 481288 - RNA, 22 nt, Human
cugaaugucgaucagcuugggu

SEQ ID NO: 481289 - RNA, 22 nt, Human
agagccugugggagaugcagcu

SEQ ID NO: 481290 - RNA, 19 nt, Human
agacaaguuuccagaagcc

SEQ ID NO: 481291 - RNA, 22 nt, Human
acucacauuucaucaggccaag

SEQ ID NO: 481292 - RNA, 22 nt, Human
acaguuucuccauuuacaccuu

SEQ ID NO: 481293 - RNA, 22 nt, Human
uucaggauaguggugaguggca

SEQ ID NO: 481294 - RNA, 22 nt, Human
ccucccucuguuagagcugucu

SEQ ID NO: 481295 - RNA, 22 nt, Human
agccuggaggaggaguugagca

SEQ ID NO: 481296 - RNA, 22 nt, Human
cugcuucuaagaaccugcagcu

SEQ ID NO: 481297 - RNA, 22 nt, Human
ugaggcagggaguuuaauuguc

SEQ ID NO: 481298 - RNA, 22 nt, Human
ccucacucugcacccugcagca

SEQ ID NO: 481299 - RNA, 22 nt, Human
ccugggagguggagguugcagu

SEQ ID NO: 481300 - RNA, 22 nt, Human
cuacaggucaguaagaccuaga

SEQ ID NO: 481301 - RNA, 22 nt, Human
ccugggagggcaagugcugaug

SEQ ID NO: 481302 - RNA, 22 nt, Human
gaggaaaauggaguguaauuaa

SEQ ID NO: 481303 - RNA, 22 nt, Human
cuaaaauuaccuaccaguuuag

SEQ ID NO: 481304 - RNA, 22 nt, Human
ggucucugacuuagagauggau

SEQ ID NO: 481305 - RNA, 22 nt, Human
gccuggcaggccuguuggggcu

SEQ ID NO: 481306 - RNA, 22 nt, Human
cuuuucaugagucuguuauggg

SEQ ID NO: 481307 - RNA, 18 nt, Human
uggcucuggacuugcucc

SEQ ID NO: 481308 - RNA, 22 nt, Human
ggcagcucugugucugggaagc

SEQ ID NO: 481309 - RNA, 22 nt, Human
ccuuucucuggcagcaggacag

SEQ ID NO: 481310 - RNA, 22 nt, Human
accagaguaauguguggaaauu

SEQ ID NO: 481311 - RNA, 22 nt, Human
aggcugaggcagguggaucauu

SEQ ID NO: 481312 - RNA, 22 nt, Human
gaagagcugcucagaacaugau

SEQ ID NO: 481313 - RNA, 17 nt, Human
aggcuggcucacaggga

SEQ ID NO: 481314 - RNA, 22 nt, Human
ugcuuucaaaggcuuucuagau

SEQ ID NO: 481315 - RNA, 23 nt, Human
agcaauaagaagggauacaugug

SEQ ID NO: 481316 - RNA, 22 nt, Human
uugggaaggcguggaagcagaa

SEQ ID NO: 481317 - RNA, 22 nt, Human
ugcugucugcaacaguacuaca

SEQ ID NO: 481318 - RNA, 22 nt, Human
cugggccugguagggcuugaaa

SEQ ID NO: 481319 - RNA, 22 nt, Human
uucacagaugccugaugugugg

SEQ ID NO: 481320 - RNA, 22 nt, Human
cugggccuagcaacagaggagu

SEQ ID NO: 481321 - RNA, 22 nt, Human
guacauuuuacuuuguuugaau

SEQ ID NO: 481322 - RNA, 23 nt, Human
uuauuuugucagaagggacuuuu

SEQ ID NO: 481323 - RNA, 22 nt, Human
caccugagugucaguauucuca

SEQ ID NO: 481324 - RNA, 22 nt, Human
gggcacugugcuaggugcugag

SEQ ID NO: 481325 - RNA, 22 nt, Human
acugugugaaacaucaaugugu

SEQ ID NO: 481326 - RNA, 22 nt, Human
cugccugugcaugcagucagaa

SEQ ID NO: 481327 - RNA, 22 nt, Human
uucaauucaauucuaaauauau

SEQ ID NO: 481328 - RNA, 18 nt, Human
gucaccuggaucagauua

SEQ ID NO: 481329 - RNA, 22 nt, Human
aggcaguguguagcuggaagag

SEQ ID NO: 481330 - RNA, 22 nt, Human
uucauucccuuauauuagcauu

SEQ ID NO: 481331 - RNA, 22 nt, Human
agggcagccucucagccuaggu

SEQ ID NO: 481332 - RNA, 19 nt, Human
uccucaggggcucacagac

SEQ ID NO: 481333 - RNA, 22 nt, Human
agguuuauguuuggugcaggag

SEQ ID NO: 481334 - RNA, 22 nt, Human
aggcaggagugacccugacagg

SEQ ID NO: 481335 - RNA, 19 nt, Human
uccauaagcuuguguucau

SEQ ID NO: 481336 - RNA, 22 nt, Human
agugugagcccuggaguggugc

SEQ ID NO: 481337 - RNA, 22 nt, Human
ccaggccuucugaggacacucu

SEQ ID NO: 481338 - RNA, 19 nt, Human
cuuuucaucaacagccaau

SEQ ID NO: 481339 - RNA, 22 nt, Human
ucagcugccccaguggccccag

SEQ ID NO: 481340 - RNA, 22 nt, Human
gucccugggaugcccuucuggg

SEQ ID NO: 481341 - RNA, 20 nt, Human
gauuucaaagcagaguggcc

SEQ ID NO: 481342 - RNA, 17 nt, Human
cagucgaggaggaccug

SEQ ID NO: 481343 - RNA, 22 nt, Human
ggcucuggcaaggggaggcuac

SEQ ID NO: 481344 - RNA, 20 nt, Human
agcaggaaugaugcuuucau

SEQ ID NO: 481345 - RNA, 22 nt, Human
ucucugaaggggagcuguuuaa

SEQ ID NO: 481346 - RNA, 22 nt, Human
uucacaggaauguaggggucuu

SEQ ID NO: 481347 - RNA, 22 nt, Human
agcagggcucugccaugggccc

SEQ ID NO: 481348 - RNA, 22 nt, Human
acccagagcugggcuuggcaaa

SEQ ID NO: 481349 - RNA, 22 nt, Human
agggccucuaccauccaagguu

SEQ ID NO: 481350 - RNA, 22 nt, Human
uggaagggggaagacagcucug

SEQ ID NO: 481351 - RNA, 22 nt, Human
uugcauuguaggauguuagaag

SEQ ID NO: 481352 - RNA, 22 nt, Human
guuauaaaugacugcaaaaguu

SEQ ID NO: 481353 - RNA, 18 nt, Human
aggcuucuuggcucaguc

SEQ ID NO: 481354 - RNA, 22 nt, Human
uacauguaagacaugagacucu

SEQ ID NO: 481355 - RNA, 19 nt, Human
auaaggcagugacuuuuuu

SEQ ID NO: 481356 - RNA, 22 nt, Human
ugcuuuauggagcccaucucau

SEQ ID NO: 481357 - RNA, 22 nt, Human
gcacagggccuggcacauaaga

SEQ ID NO: 481358 - RNA, 19 nt, Human
ugaagcaggcagagaagau

SEQ ID NO: 481359 - RNA, 20 nt, Human
gucagugucuucaguaguga

SEQ ID NO: 481360 - RNA, 19 nt, Human
gagguggguccccgcagcc

SEQ ID NO: 481361 - RNA, 17 nt, Human
gacaggcucagugacga

SEQ ID NO: 481362 - RNA, 22 nt, Human
ccacugucugcaggccucagca

SEQ ID NO: 481363 - RNA, 23 nt, Human
ccucagggucuagcagagagaag

SEQ ID NO: 481364 - RNA, 22 nt, Human
ggccagggggcuucagacucca

SEQ ID NO: 481365 - RNA, 22 nt, Human
ucuggagcuuguuucagauggu

SEQ ID NO: 481366 - RNA, 23 nt, Human
agcuuugugaaagcagacauggg

SEQ ID NO: 481367 - RNA, 20 nt, Human
ugcagagcuggcuggcuccu

SEQ ID NO: 481368 - RNA, 22 nt, Human
gccagggcugugcagguuuguu

SEQ ID NO: 481369 - RNA, 22 nt, Human
ugggcagccaucccagccucuc

SEQ ID NO: 481370 - RNA, 22 nt, Human
gaggcucagagaagucauggua

SEQ ID NO: 481371 - RNA, 22 nt, Human
aacagcaauagcacuauucauu

SEQ ID NO: 481372 - RNA, 22 nt, Human
uugaaaguccuucuugaguuac

SEQ ID NO: 481373 - RNA, 22 nt, Human
ccagcugcgggcaucgagaguu

SEQ ID NO: 481374 - RNA, 22 nt, Human
uuugcauugcagugguuuacag

SEQ ID NO: 481375 - RNA, 19 nt, Human
aggcugugagggaggacuc

SEQ ID NO: 481376 - RNA, 21 nt, Human
acagcagggcuggcaugacag

SEQ ID NO: 481377 - RNA, 22 nt, Human
guguaauugaaauugagaacca

SEQ ID NO: 481378 - RNA, 22 nt, Human
gggcugcacguauucugcucac

SEQ ID NO: 481379 - RNA, 22 nt, Human
guucauuuuacuguaaauagca

SEQ ID NO: 481380 - RNA, 22 nt, Human
gggcagguggcagggucucugg

SEQ ID NO: 481381 - RNA, 22 nt, Human
cauggcaggugcagauucugug

SEQ ID NO: 481382 - RNA, 22 nt, Human
uaaaugcaguacaaauuguucu

SEQ ID NO: 481383 - RNA, 22 nt, Human
gcuguucucuguaacaugcauu

SEQ ID NO: 481384 - RNA, 22 nt, Human
uucaaucauuuuuacauagucc

SEQ ID NO: 481385 - RNA, 22 nt, Human
acagaaagaagguguauuugag

SEQ ID NO: 481386 - RNA, 20 nt, Human
auauguguacguguauacau

SEQ ID NO: 481387 - RNA, 22 nt, Human
cagugcccuuccaggacugcag

SEQ ID NO: 481388 - RNA, 22 nt, Human
uaaggguucagaaugcaguggu

SEQ ID NO: 481389 - RNA, 22 nt, Human
aggcccugaagucggccccuca

SEQ ID NO: 481390 - RNA, 22 nt, Human
gggauggcuuuguggcugacuc

SEQ ID NO: 481391 - RNA, 22 nt, Human
agccuccaucccaugcacaaag

SEQ ID NO: 481392 - RNA, 22 nt, Human
auuucucagugaaaugacaggc

SEQ ID NO: 481393 - RNA, 22 nt, Human
cagagggcucaguccugcugga

SEQ ID NO: 481394 - RNA, 22 nt, Human
ucacugcagacaaccucaguca

SEQ ID NO: 481395 - RNA, 22 nt, Human
guuuucaugucuauugggcaua

SEQ ID NO: 481396 - RNA, 22 nt, Human
agcugccuggagucauuuccug

SEQ ID NO: 481397 - RNA, 22 nt, Human
cugggccaucagaggggcugga

SEQ ID NO: 481398 - RNA, 22 nt, Human
gugccugggguugagcuaugaa

SEQ ID NO: 481399 - RNA, 22 nt, Human
acuuccugggcaugcagagucc

SEQ ID NO: 481400 - RNA, 22 nt, Human
aggucacccguuugacuaucca

SEQ ID NO: 481401 - RNA, 22 nt, Human
ccugggcucaagugauccuccu

SEQ ID NO: 481402 - RNA, 22 nt, Human
accaggcuugaugauuugcuua

SEQ ID NO: 481403 - RNA, 22 nt, Human
aaaaucaguacacuuuauuuug

SEQ ID NO: 481404 - RNA, 22 nt, Human
ggcaggcaggagcgugcuuggg

SEQ ID NO: 481405 - RNA, 22 nt, Human
uguccugggaaugggaugcagu

SEQ ID NO: 481406 - RNA, 22 nt, Human
aauuuagauugauaaacaugga

SEQ ID NO: 481407 - RNA, 22 nt, Human
uucagagagaaaccagugggaa

SEQ ID NO: 481408 - RNA, 22 nt, Human
gaugggggccagggccugcuuu

SEQ ID NO: 481409 - RNA, 22 nt, Human
ucuggcucucauacucgccagu

SEQ ID NO: 481410 - RNA, 22 nt, Human
ccagagccuggcaucugcauaa

SEQ ID NO: 481411 - RNA, 22 nt, Human
caagaaggcuauaugggccagg

SEQ ID NO: 481412 - RNA, 22 nt, Human
gagacagaguuucacucuuguu

SEQ ID NO: 481413 - RNA, 22 nt, Human
guauuugauacaugaaauggug

SEQ ID NO: 481414 - RNA, 22 nt, Human
ugaaaaggaguccuuguuuuca

SEQ ID NO: 481415 - RNA, 22 nt, Human
ggcaaaaaccgcaauaacuucu

SEQ ID NO: 481416 - RNA, 22 nt, Human
uuagccauggacugaauugacu

SEQ ID NO: 481417 - RNA, 22 nt, Human
gcuguucccauguggggcucag

SEQ ID NO: 481418 - RNA, 22 nt, Human
ugucacaaacauacauuauaga

SEQ ID NO: 481419 - RNA, 22 nt, Human
gcuuuuauugucuuuacgacga

SEQ ID NO: 481420 - RNA, 22 nt, Human
uauuaggguaaauuugacaugc

SEQ ID NO: 481421 - RNA, 22 nt, Human
caggccugggcuucggggcuga

SEQ ID NO: 481422 - RNA, 22 nt, Human
gcugugcagauguagggagugg

SEQ ID NO: 481423 - RNA, 21 nt, Human
cugaggcagcacagcuaguca

SEQ ID NO: 481424 - RNA, 22 nt, Human
cuuauuauaaaauccuguuuga

SEQ ID NO: 481425 - RNA, 22 nt, Human
uggcuggcuuguucacugacug

SEQ ID NO: 481426 - RNA, 20 nt, Human
uccaguggccugaaucugga

SEQ ID NO: 481427 - RNA, 23 nt, Human
acaguuauagcugugaauaacau

SEQ ID NO: 481428 - RNA, 22 nt, Human
acucuugucucaacuuuuguau

SEQ ID NO: 481429 - RNA, 21 nt, Human
agaugcugugcuccaggagca

SEQ ID NO: 481430 - RNA, 22 nt, Human
ucaaaugcuucuacuccuaaga

SEQ ID NO: 481431 - RNA, 22 nt, Human
guaggaagcucugaggcuaguu

SEQ ID NO: 481432 - RNA, 22 nt, Human
cuggccagcauuuuugcuuuag

SEQ ID NO: 481433 - RNA, 22 nt, Human
acuggaagccaguugacaauca

SEQ ID NO: 481434 - RNA, 22 nt, Human
agucaggauaugccuugugggc

SEQ ID NO: 481435 - RNA, 17 nt, Human
uccuggcucugccacug

SEQ ID NO: 481436 - RNA, 22 nt, Human
ugcagggaggccccgcagcccu

SEQ ID NO: 481437 - RNA, 22 nt, Human
cucaggauugugccuagggaga

SEQ ID NO: 481438 - RNA, 22 nt, Human
augaugguggguaauguguaaa

SEQ ID NO: 481439 - RNA, 22 nt, Human
ggauggcagucugcaugagaaa

SEQ ID NO: 481440 - RNA, 17 nt, Human
ucugucuugacugucac

SEQ ID NO: 481441 - RNA, 22 nt, Human
gaaguucaggugggaauugagc

SEQ ID NO: 481442 - RNA, 22 nt, Human
uuuaucacagaauaagaaguca

SEQ ID NO: 481443 - RNA, 22 nt, Human
auuguauuuccagcuugaaugu

SEQ ID NO: 481444 - RNA, 22 nt, Human
ugaggcaggaggauugcaggau

SEQ ID NO: 481445 - RNA, 22 nt, Human
agaagccauucccuguaggcuc

SEQ ID NO: 481446 - RNA, 22 nt, Human
ggcugccaggagggaggccagu

SEQ ID NO: 481447 - RNA, 22 nt, Human
ugaaauuccaggagaguuaaaa

SEQ ID NO: 481448 - RNA, 22 nt, Human
caucacagauguuguguggagu

SEQ ID NO: 481449 - RNA, 22 nt, Human
uaaagguacgaagugagggauu

SEQ ID NO: 481450 - RNA, 22 nt, Human
uccugcagccacugcaggcaga

SEQ ID NO: 481451 - RNA, 22 nt, Human
gaaaagcuaggccaguucagcu

SEQ ID NO: 481452 - RNA, 22 nt, Human
cacagcuggugacagagcccag

SEQ ID NO: 481453 - RNA, 22 nt, Human
aggucacacaacugucagaggc

SEQ ID NO: 481454 - RNA, 22 nt, Human
uccugccuagcaggugaccuau

SEQ ID NO: 481455 - RNA, 22 nt, Human
uggccugaggcucggcaugggu

SEQ ID NO: 481456 - RNA, 22 nt, Human
acguggagagaauagggcacca

SEQ ID NO: 481457 - RNA, 22 nt, Human
aggcuucuacguggucccaggg

SEQ ID NO: 481458 - RNA, 17 nt, Human
gcagugaaaagagauca

SEQ ID NO: 481459 - RNA, 22 nt, Human
cauuuguauagugcuuagacca

SEQ ID NO: 481460 - RNA, 19 nt, Human
cagcaauaaugccagaugg

SEQ ID NO: 481461 - RNA, 22 nt, Human
gcaccugggacccagaggcacc

SEQ ID NO: 481462 - RNA, 22 nt, Human
gagaggcugaaaucacaggagc

SEQ ID NO: 481463 - RNA, 22 nt, Human
aaauccuaaugacaaguuuagu

SEQ ID NO: 481464 - RNA, 22 nt, Human
uggagcuggcuuguggaaguug

SEQ ID NO: 481465 - RNA, 22 nt, Human
aaaggccauuacuugcuuuuag

SEQ ID NO: 481466 - RNA, 22 nt, Human
auucagcaaugagcuuggauuu

SEQ ID NO: 481467 - RNA, 22 nt, Human
gugucauggaaaauugcaaugg

SEQ ID NO: 481468 - RNA, 22 nt, Human
uuagccaugcccuagaagagga

SEQ ID NO: 481469 - RNA, 22 nt, Human
ccagagcccagggucaugcagg

SEQ ID NO: 481470 - RNA, 22 nt, Human
ggccugagcagacagcaugaug

SEQ ID NO: 481471 - RNA, 22 nt, Human
ugcuggagaucauuaauguuca

SEQ ID NO: 481472 - RNA, 22 nt, Human
acagucucuccacacugcaggg

SEQ ID NO: 481473 - RNA, 22 nt, Human
ugaaggagcugauguaaggggu

SEQ ID NO: 481474 - RNA, 22 nt, Human
acugcuuuagaccuagagcucu

SEQ ID NO: 481475 - RNA, 21 nt, Human
ggucuuccaaauaaggagaaa

SEQ ID NO: 481476 - RNA, 22 nt, Human
ugcagggauuauguagggguug

SEQ ID NO: 481477 - RNA, 22 nt, Human
ugagaagcugcuugugcuguau

SEQ ID NO: 481478 - RNA, 22 nt, Human
ucuuugcaugcauuuucccuua

SEQ ID NO: 481479 - RNA, 22 nt, Human
gcaguguuaggaauaaaaauga

SEQ ID NO: 481480 - RNA, 22 nt, Human
uucacauugugcagauuauggu

SEQ ID NO: 481481 - RNA, 22 nt, Human
cuggguggcuguccagccagcc

SEQ ID NO: 481482 - RNA, 22 nt, Human
aaaguuugcaauuuauguuaau

SEQ ID NO: 481483 - RNA, 22 nt, Human
agcuggcagagcauuuguggcc

SEQ ID NO: 481484 - RNA, 22 nt, Human
gucagaggaauggaugagugau

SEQ ID NO: 481485 - RNA, 18 nt, Human
uucaccagugugaugggu

SEQ ID NO: 481486 - RNA, 22 nt, Human
caggaugggauguagugggccc

SEQ ID NO: 481487 - RNA, 22 nt, Human
aaaucaguuguuauauuaaaga

SEQ ID NO: 481488 - RNA, 22 nt, Human
aaagaaggaccuggaggaggau

SEQ ID NO: 481489 - RNA, 20 nt, Human
gugaccagaagacagugggu

SEQ ID NO: 481490 - RNA, 22 nt, Human
acagggcagcaacuuugugccu

SEQ ID NO: 481491 - RNA, 22 nt, Human
uuuuaccugaaccacacaguau

SEQ ID NO: 481492 - RNA, 22 nt, Human
gaaaucugcggugaggccugag

SEQ ID NO: 481493 - RNA, 22 nt, Human
uagagugguuaacaguuuagaa

SEQ ID NO: 481494 - RNA, 22 nt, Human
uucaaaggcaggauagcagcug

SEQ ID NO: 481495 - RNA, 22 nt, Human
cugagccaaaaagcagagcuug

SEQ ID NO: 481496 - RNA, 22 nt, Human
uugcauguuauuuaaucuguau

SEQ ID NO: 481497 - RNA, 22 nt, Human
aggucauuuccuuagaggcaga

SEQ ID NO: 481498 - RNA, 22 nt, Human
ugaaccagagucuccagugguu

SEQ ID NO: 481499 - RNA, 22 nt, Human
acugcaucugaaacauggguca

SEQ ID NO: 481500 - RNA, 22 nt, Human
uccuuuuuaagucguuguggua

SEQ ID NO: 481501 - RNA, 22 nt, Human
ucucagaguuuagagcugagcc

SEQ ID NO: 481502 - RNA, 22 nt, Human
gccagguggcugagugacugag

SEQ ID NO: 481503 - RNA, 22 nt, Human
cugagccagcgggcucacuuuu

SEQ ID NO: 481504 - RNA, 22 nt, Human
uggccuggugcucaggcaguag

SEQ ID NO: 481505 - RNA, 21 nt, Human
aagccagcccacagugguuug

SEQ ID NO: 481506 - RNA, 22 nt, Human
uaugagcuuccaguguugcaug

SEQ ID NO: 481507 - RNA, 22 nt, Human
ggcucugcugguaagaugccuc

SEQ ID NO: 481508 - RNA, 22 nt, Human
gccagagguucaacaacugucu

SEQ ID NO: 481509 - RNA, 22 nt, Human
gagaggagucccuaucacaguu

SEQ ID NO: 481510 - RNA, 22 nt, Human
ucagcuuugaucucaggcaauc

SEQ ID NO: 481511 - RNA, 21 nt, Human
auggagucaggggaaugggcc

SEQ ID NO: 481512 - RNA, 22 nt, Human
ccugucucuguuaccacauuug

SEQ ID NO: 481513 - RNA, 22 nt, Human
cccugcagggaggauucugaag

SEQ ID NO: 481514 - RNA, 22 nt, Human
cucugugccucaguuuucuucu

SEQ ID NO: 481515 - RNA, 22 nt, Human
agucccagugagaugaaccagg

SEQ ID NO: 481516 - RNA, 23 nt, Human
cagcaggagggugccugggcugc

SEQ ID NO: 481517 - RNA, 22 nt, Human
ucuguuccaguagaaaggugca

SEQ ID NO: 481518 - RNA, 22 nt, Human
uuuggaaaguugucacuuuaga

SEQ ID NO: 481519 - RNA, 22 nt, Human
acauuucuaauuuaauguaaca

SEQ ID NO: 481520 - RNA, 22 nt, Human
uauuugauagagauaaaugaua

SEQ ID NO: 481521 - RNA, 22 nt, Human
aggaggggcaaugauagucugg

SEQ ID NO: 481522 - RNA, 22 nt, Human
aggccugacuugaauuuagggc

SEQ ID NO: 481523 - RNA, 22 nt, Human
cccaccaguacagaugguagau

SEQ ID NO: 481524 - RNA, 22 nt, Human
aaauuagucgguuuaggaauuu

SEQ ID NO: 481525 - RNA, 21 nt, Human
ucagggcagcugcucuucaga

SEQ ID NO: 481526 - RNA, 22 nt, Human
uuccacuuaguggaagggcaug

SEQ ID NO: 481527 - RNA, 22 nt, Human
aaacuucauggauaauauaaag

SEQ ID NO: 481528 - RNA, 22 nt, Human
aagcugccaaugguaagcugcu

SEQ ID NO: 481529 - RNA, 22 nt, Human
ggaggcucugcuccguguguuc

SEQ ID NO: 481530 - RNA, 22 nt, Human
auuucucaguuccuacuguuua

SEQ ID NO: 481531 - RNA, 21 nt, Human
cagcaaaucauugggcagacu

SEQ ID NO: 481532 - RNA, 22 nt, Human
uggccuuccuggugacucauga

SEQ ID NO: 481533 - RNA, 22 nt, Human
auacauacauguacacauaaau

SEQ ID NO: 481534 - RNA, 22 nt, Human
caggcaccccaggugagcacug

SEQ ID NO: 481535 - RNA, 22 nt, Human
aguccaggaguugggugacauu

SEQ ID NO: 481536 - RNA, 22 nt, Human
acaagagauuaucuacagauga

SEQ ID NO: 481537 - RNA, 22 nt, Human
cuccaggccagggaaguggaca

SEQ ID NO: 481538 - RNA, 22 nt, Human
cuuuggcaugguccucacuaua

SEQ ID NO: 481539 - RNA, 22 nt, Human
gagguacaugaggauacacagg

SEQ ID NO: 481540 - RNA, 22 nt, Human
caggguggggcuggcuaucaaa

SEQ ID NO: 481541 - RNA, 22 nt, Human
ugaggaaguuguuucucuucua

SEQ ID NO: 481542 - RNA, 22 nt, Human
ggcuucaccaggugcaugcaug

SEQ ID NO: 481543 - RNA, 22 nt, Human
agcuucuugaccaagccuguaa

SEQ ID NO: 481544 - RNA, 22 nt, Human
aagugccugaccuagccuggag

SEQ ID NO: 481545 - RNA, 18 nt, Human
cugaaggauccaggugua

SEQ ID NO: 481546 - RNA, 22 nt, Human
acucugaggagugacuagaggu

SEQ ID NO: 481547 - RNA, 22 nt, Human
acagagagaauuggguuuacag

SEQ ID NO: 481548 - RNA, 22 nt, Human
uggcaguggcucagagugcaga

SEQ ID NO: 481549 - RNA, 22 nt, Human
ggcagcagggucuagauugaug

SEQ ID NO: 481550 - RNA, 21 nt, Human
uugcaccaugauaaauucaga

SEQ ID NO: 481551 - RNA, 22 nt, Human
aagggacccuggaucaaaugga

SEQ ID NO: 481552 - RNA, 22 nt, Human
aaucaguuaaauauugaguaca

SEQ ID NO: 481553 - RNA, 22 nt, Human
cagaguacugggagaacagaag

SEQ ID NO: 481554 - RNA, 22 nt, Human
ggagcauguggggugagcaggg

SEQ ID NO: 481555 - RNA, 21 nt, Human
aaauguguuccauaaugcuuu

SEQ ID NO: 481556 - RNA, 22 nt, Human
cacugaaggcugcagcucagcc

SEQ ID NO: 481557 - RNA, 22 nt, Human
ucaggcugguccccacagugga

SEQ ID NO: 481558 - RNA, 20 nt, Human
uccagcugucuuucagagac

SEQ ID NO: 481559 - RNA, 20 nt, Human
ggggcugcaugcagagaaga

SEQ ID NO: 481560 - RNA, 22 nt, Human
agcugauuccacuuuuucccca

SEQ ID NO: 481561 - RNA, 22 nt, Human
cuggcuucugggccagggcaga

SEQ ID NO: 481562 - RNA, 22 nt, Human
aagaacaacugcuuuaaaagca

SEQ ID NO: 481563 - RNA, 22 nt, Human
cuguggagcuuguggcaguggg

SEQ ID NO: 481564 - RNA, 22 nt, Human
agaauccugaugaaaaggagag

SEQ ID NO: 481565 - RNA, 22 nt, Human
gccuuccuuuuaccaccagcca

SEQ ID NO: 481566 - RNA, 22 nt, Human
ccugccugcggcccgcggggag

SEQ ID NO: 481567 - RNA, 22 nt, Human
gaauguaauagucaguagaaca

SEQ ID NO: 481568 - RNA, 22 nt, Human
caggugcccagcuccugcugug

SEQ ID NO: 481569 - RNA, 19 nt, Human
uguagcaguuuaaaacaac

SEQ ID NO: 481570 - RNA, 22 nt, Human
uugaaggaggcuccuuuuuaaa

SEQ ID NO: 481571 - RNA, 22 nt, Human
gcccagcuccucugcagacccu

SEQ ID NO: 481572 - RNA, 22 nt, Human
auguaacaaaugguauacaugu

SEQ ID NO: 481573 - RNA, 22 nt, Human
agcaggguuuggggauuggcac

SEQ ID NO: 481574 - RNA, 23 nt, Human
ucaguuuuggcuguucaguguug

SEQ ID NO: 481575 - RNA, 22 nt, Human
uccuguggcguuaucaugugau

SEQ ID NO: 481576 - RNA, 20 nt, Human
gucucagaauggauuugcau

SEQ ID NO: 481577 - RNA, 22 nt, Human
ggagcugcacgcucugaagccu

SEQ ID NO: 481578 - RNA, 22 nt, Human
caaagcaaggcucaguuugaac

SEQ ID NO: 481579 - RNA, 19 nt, Human
agagaaggauccuaugguu

SEQ ID NO: 481580 - RNA, 22 nt, Human
ucagagaaguaagguggggugc

SEQ ID NO: 481581 - RNA, 22 nt, Human
cucucugcuguauccuuaggcu

SEQ ID NO: 481582 - RNA, 22 nt, Human
cucagagauauagucccugcuu

SEQ ID NO: 481583 - RNA, 22 nt, Human
ccaggccugcaucugcugcgca

SEQ ID NO: 481584 - RNA, 22 nt, Human
uucugcaucugaauuuaaguac

SEQ ID NO: 481585 - RNA, 22 nt, Human
agugcaaaauucagaagcaauu

SEQ ID NO: 481586 - RNA, 22 nt, Human
auuuuccaaaauaauuguuacu

SEQ ID NO: 481587 - RNA, 22 nt, Human
acccugccgugggcugcuugug

SEQ ID NO: 481588 - RNA, 22 nt, Human
guguaaggugaaaucaacaaau

SEQ ID NO: 481589 - RNA, 22 nt, Human
uggcagagcccagaacugagca

SEQ ID NO: 481590 - RNA, 22 nt, Human
aggaccugacuggcuccugcuu

SEQ ID NO: 481591 - RNA, 22 nt, Human
cuggcccagagagcagagcuua

SEQ ID NO: 481592 - RNA, 22 nt, Human
gagugggcaccgugggcacacu

SEQ ID NO: 481593 - RNA, 22 nt, Human
aagggccauaacuugcaguguu

SEQ ID NO: 481594 - RNA, 22 nt, Human
uggcucagccuggcccuuucau

SEQ ID NO: 481595 - RNA, 22 nt, Human
cccuccagagcuugaccugcug

SEQ ID NO: 481596 - RNA, 22 nt, Human
ccagucagccaagcugcagcgg

SEQ ID NO: 481597 - RNA, 22 nt, Human
uggcgugcccuccagacuuggc

SEQ ID NO: 481598 - RNA, 22 nt, Human
uggcugagccuuuggggcuuuc

SEQ ID NO: 481599 - RNA, 22 nt, Human
ucccagaggacuguuggugcua

SEQ ID NO: 481600 - RNA, 22 nt, Human
aucaccaggcaaaaugucagag

SEQ ID NO: 481601 - RNA, 22 nt, Human
uccugccucuccaugcuaacua

SEQ ID NO: 481602 - RNA, 22 nt, Human
cagggccuuuuagcaucuucuc

SEQ ID NO: 481603 - RNA, 22 nt, Human
augcauugucugguuucauuuu

SEQ ID NO: 481604 - RNA, 22 nt, Human
aagagcaucaaugacucgcagu

SEQ ID NO: 481605 - RNA, 22 nt, Human
ggucccagcuggucacugucag

SEQ ID NO: 481606 - RNA, 22 nt, Human
acugucaccaucagagcgggaa

SEQ ID NO: 481607 - RNA, 22 nt, Human
acugugugcccugacgccaggg

SEQ ID NO: 481608 - RNA, 22 nt, Human
ggaagccagaaagugagaauau

SEQ ID NO: 481609 - RNA, 21 nt, Human
uugaaaguaaauucagcagcu

SEQ ID NO: 481610 - RNA, 22 nt, Human
agagugguacuucuuuuucuuc

SEQ ID NO: 481611 - RNA, 22 nt, Human
ccucauggaccucagacugucc

SEQ ID NO: 481612 - RNA, 22 nt, Human
aaguauauuuuuugaagcauau

SEQ ID NO: 481613 - RNA, 22 nt, Human
cccagggagguagcaggagaaa

SEQ ID NO: 481614 - RNA, 22 nt, Human
gggcaugguggcaggcaccugu

SEQ ID NO: 481615 - RNA, 22 nt, Human
guggcucuaggugagcauggag

SEQ ID NO: 481616 - RNA, 22 nt, Human
gggcacugcuuugcucugucac

SEQ ID NO: 481617 - RNA, 22 nt, Human
caaggcugugcaggguccauau

SEQ ID NO: 481618 - RNA, 22 nt, Human
cauuuguagcuauuuacuguau

SEQ ID NO: 481619 - RNA, 22 nt, Human
gcacccaggccggcgacugcag

SEQ ID NO: 481620 - RNA, 21 nt, Human
ugggaugggucugggaccagc

SEQ ID NO: 481621 - RNA, 22 nt, Human
cacagcugaaguagccaugugg

SEQ ID NO: 481622 - RNA, 22 nt, Human
uuuauuauagugguggggacug

SEQ ID NO: 481623 - RNA, 22 nt, Human
ugcuuuauugcaucaguguggg

SEQ ID NO: 481624 - RNA, 22 nt, Human
gcaucuucacacaaagccagug

SEQ ID NO: 481625 - RNA, 16 nt, Human
cuacccagugagaagg

SEQ ID NO: 481626 - RNA, 22 nt, Human
uugaaggacauccuauuucuag

SEQ ID NO: 481627 - RNA, 21 nt, Human
gagugcagcaagguagagucu

SEQ ID NO: 481628 - RNA, 22 nt, Human
caucacagggggcuagaagucu

SEQ ID NO: 481629 - RNA, 22 nt, Human
cugccucucagccugaccgcca

SEQ ID NO: 481630 - RNA, 22 nt, Human
uugaacagcuguuacauuguua

SEQ ID NO: 481631 - RNA, 21 nt, Human
acagaguaguugaaacagaga

SEQ ID NO: 481632 - RNA, 22 nt, Human
agaagccacaggccucgucugg

SEQ ID NO: 481633 - RNA, 19 nt, Human
uggcugggugccaauggcc

SEQ ID NO: 481634 - RNA, 17 nt, Human
agaugcuggccacaugu

SEQ ID NO: 481635 - RNA, 22 nt, Human
cgcugccaggucaccaggggua

SEQ ID NO: 481636 - RNA, 21 nt, Human
ggcagcccgcccucuccuggc

SEQ ID NO: 481637 - RNA, 22 nt, Human
gggauggggucaacauguaccu

SEQ ID NO: 481638 - RNA, 22 nt, Human
acagaccaaaaaaggauauugg

SEQ ID NO: 481639 - RNA, 22 nt, Human
ggccaggagcaagccaggcucu

SEQ ID NO: 481640 - RNA, 20 nt, Human
cugugccuaaaccuccgggu

SEQ ID NO: 481641 - RNA, 17 nt, Human
uggcucugaggcugaau

SEQ ID NO: 481642 - RNA, 22 nt, Human
ucagcuuuuuacaugugaaaua

SEQ ID NO: 481643 - RNA, 22 nt, Human
uggcagagucugggcuugggca

SEQ ID NO: 481644 - RNA, 22 nt, Human
gccuggagaagauggaacuagc

SEQ ID NO: 481645 - RNA, 22 nt, Human
acacugaagagcacuuucaaag

SEQ ID NO: 481646 - RNA, 22 nt, Human
gcagggacgcagcacucuccgu

SEQ ID NO: 481647 - RNA, 22 nt, Human
aggcuucccaagcagcugcaaa

SEQ ID NO: 481648 - RNA, 22 nt, Human
uugaaaaaauugguagaggaug

SEQ ID NO: 481649 - RNA, 22 nt, Human
uccuguguuacugccuggagcg

SEQ ID NO: 481650 - RNA, 22 nt, Human
ccagcugaggcagccacacagg

SEQ ID NO: 481651 - RNA, 22 nt, Human
gcaggagucacugacuuggucc

SEQ ID NO: 481652 - RNA, 19 nt, Human
ucgagucaagacacuaggc

SEQ ID NO: 481653 - RNA, 22 nt, Human
accugagcaugccaggagagug

SEQ ID NO: 481654 - RNA, 22 nt, Human
cauuucugucacguucuuuuau

SEQ ID NO: 481655 - RNA, 22 nt, Human
gcaagcugcuuaagcucauugu

SEQ ID NO: 481656 - RNA, 20 nt, Human
aaaaacaguaaugcugaaga

SEQ ID NO: 481657 - RNA, 22 nt, Human
gcaaggacucccugggucauuc

SEQ ID NO: 481658 - RNA, 22 nt, Human
cagacccugggccacagaggag

SEQ ID NO: 481659 - RNA, 22 nt, Human
auaaacaguaaaugugagcagu

SEQ ID NO: 481660 - RNA, 22 nt, Human
uauagaaguaagcauugugaug

SEQ ID NO: 481661 - RNA, 22 nt, Human
gcucugcugagauaucugggag

SEQ ID NO: 481662 - RNA, 22 nt, Human
ggcgcaggccuuggauccuggu

SEQ ID NO: 481663 - RNA, 22 nt, Human
caaggccaagguuuugugaacu

SEQ ID NO: 481664 - RNA, 22 nt, Human
ccuuggcccuagccucaggcaa

SEQ ID NO: 481665 - RNA, 20 nt, Human
cugggcugcccagcuauggg

SEQ ID NO: 481666 - RNA, 22 nt, Human
uugcuauuuugagagucauagu

SEQ ID NO: 481667 - RNA, 22 nt, Human
agggcugagcccaggcauguag

SEQ ID NO: 481668 - RNA, 22 nt, Human
uagcuuuccuuguugccugugc

SEQ ID NO: 481669 - RNA, 22 nt, Human
gcaggagccaggccgagcuggu

SEQ ID NO: 481670 - RNA, 22 nt, Human
gcucccucugcucaggcacuug

SEQ ID NO: 481671 - RNA, 22 nt, Human
aagcuggacucugccauuuacu

SEQ ID NO: 481672 - RNA, 22 nt, Human
ggugaggaauuggggacugacc

SEQ ID NO: 481673 - RNA, 22 nt, Human
cucaggauguacuacagaaggc

SEQ ID NO: 481674 - RNA, 22 nt, Human
gaagcagcuggugagauggagc

SEQ ID NO: 481675 - RNA, 22 nt, Human
ucacugaagacugggcucuaaa

SEQ ID NO: 481676 - RNA, 22 nt, Human
cauacuuuugcccugacauucu

SEQ ID NO: 481677 - RNA, 22 nt, Human
ugucauuuaguccucugugugu

SEQ ID NO: 481678 - RNA, 22 nt, Human
uucuuucccagaagauauguuu

SEQ ID NO: 481679 - RNA, 22 nt, Human
cacaaugcguacauauaucaaa

SEQ ID NO: 481680 - RNA, 22 nt, Human
gagcccagguucugcuuccagc

SEQ ID NO: 481681 - RNA, 22 nt, Human
gacagaggcaagaccagaagcc

SEQ ID NO: 481682 - RNA, 22 nt, Human
aggaccuguaccucagcaucua

SEQ ID NO: 481683 - RNA, 22 nt, Human
caaauguguagagcuuuugggg

SEQ ID NO: 481684 - RNA, 22 nt, Human
aggccucaggaagguaaagaag

SEQ ID NO: 481685 - RNA, 22 nt, Human
uaaggaaagugccaugauuucu

SEQ ID NO: 481686 - RNA, 22 nt, Human
cauuagaagaacaguuauauua

SEQ ID NO: 481687 - RNA, 22 nt, Human
gggagggaggugaugcuuggcu

SEQ ID NO: 481688 - RNA, 22 nt, Human
gggccuggugcuucugacuccu

SEQ ID NO: 481689 - RNA, 22 nt, Human
auaaaagaaguuuugguacuug

SEQ ID NO: 481690 - RNA, 22 nt, Human
cuggggaggcagggcugccccu

SEQ ID NO: 481691 - RNA, 22 nt, Human
ugcaggcuuuagccccauggcu

SEQ ID NO: 481692 - RNA, 23 nt, Human
agagcaucaugaugcuaagucug

SEQ ID NO: 481693 - RNA, 22 nt, Human
ugcacuggggucccagcgcacg

SEQ ID NO: 481694 - RNA, 22 nt, Human
gaggccuguagucauggaugua

SEQ ID NO: 481695 - RNA, 22 nt, Human
guggcuucacauggcauuuggc

SEQ ID NO: 481696 - RNA, 22 nt, Human
agcccaagcauaggagggaggc

SEQ ID NO: 481697 - RNA, 22 nt, Human
cuacauuuugugauuaugaaau

SEQ ID NO: 481698 - RNA, 21 nt, Human
acagacagggccagugucccc

SEQ ID NO: 481699 - RNA, 22 nt, Human
uuuauuagauuaucaaagaggu

SEQ ID NO: 481700 - RNA, 22 nt, Human
ugcaaaauaaugaacgauuuuu

SEQ ID NO: 481701 - RNA, 22 nt, Human
ccagguggaggugugagguccu

SEQ ID NO: 481702 - RNA, 22 nt, Human
ucccaggauguuggcggcaggu

SEQ ID NO: 481703 - RNA, 22 nt, Human
gcucuguguugucagaggcacc

SEQ ID NO: 481704 - RNA, 22 nt, Human
cuggggugugcucagagcaggg

SEQ ID NO: 481705 - RNA, 22 nt, Human
gcagccagggagagaaccaggg

SEQ ID NO: 481706 - RNA, 22 nt, Human
ucugcgcugccuugauccuugg

SEQ ID NO: 481707 - RNA, 22 nt, Human
caggguggaagcuguagagugg

SEQ ID NO: 481708 - RNA, 22 nt, Human
uuauuuugccacaggugaccuu

SEQ ID NO: 481709 - RNA, 22 nt, Human
cagcaauaacucaaagccauuu

SEQ ID NO: 481710 - RNA, 22 nt, Human
ccugugaggucaucugugguaa

SEQ ID NO: 481711 - RNA, 22 nt, Human
uacccagcuccucagaagacca

SEQ ID NO: 481712 - RNA, 18 nt, Human
gagaggcccggcugugcc

SEQ ID NO: 481713 - RNA, 22 nt, Human
ugaggcagccugcauuaaagag

SEQ ID NO: 481714 - RNA, 22 nt, Human
ucagaggagaugguuaccaggg

SEQ ID NO: 481715 - RNA, 22 nt, Human
acacaguaugaaaagucuaguu

SEQ ID NO: 481716 - RNA, 22 nt, Human
guggagcccugccuugcucaug

SEQ ID NO: 481717 - RNA, 22 nt, Human
ggccagcagucacagggucaga

SEQ ID NO: 481718 - RNA, 21 nt, Human
gcaaggcuuuuguguuuccca

SEQ ID NO: 481719 - RNA, 19 nt, Human
aucugaaguaggugcagcu

SEQ ID NO: 481720 - RNA, 22 nt, Human
uuccagaaaucuuucagcucaa

SEQ ID NO: 481721 - RNA, 21 nt, Human
agcuggcagauauggugucug

SEQ ID NO: 481722 - RNA, 22 nt, Human
agcagccagugggagugauaca

SEQ ID NO: 481723 - RNA, 22 nt, Human
ccagaggaggggggucuuucug

SEQ ID NO: 481724 - RNA, 22 nt, Human
ugccaggcuuuggucaaaggcu

SEQ ID NO: 481725 - RNA, 22 nt, Human
ccauaagguuuggggccaugca

SEQ ID NO: 481726 - RNA, 22 nt, Human
ucagcuuuugucagaaauugua

SEQ ID NO: 481727 - RNA, 22 nt, Human
cagcuuugugcaaugcagucuc

SEQ ID NO: 481728 - RNA, 22 nt, Human
ucaacacuauccaggcaaucuu

SEQ ID NO: 481729 - RNA, 22 nt, Human
guacuuccagccaagugagaca

SEQ ID NO: 481730 - RNA, 21 nt, Human
augggcagaggcagagaggcu

SEQ ID NO: 481731 - RNA, 22 nt, Human
caacaguguugcaaucugaaaa

SEQ ID NO: 481732 - RNA, 22 nt, Human
cugugucccuugucccagagcc

SEQ ID NO: 481733 - RNA, 22 nt, Human
uuugaaagggacaaagucacug

SEQ ID NO: 481734 - RNA, 22 nt, Human
gggccacauugaagggugggua

SEQ ID NO: 481735 - RNA, 22 nt, Human
cagcaggacguccaagugcuau

SEQ ID NO: 481736 - RNA, 22 nt, Human
cauuuguuaauuacuauuaucu

SEQ ID NO: 481737 - RNA, 22 nt, Human
cagaggcagacccuccagggcg

SEQ ID NO: 481738 - RNA, 22 nt, Human
ugcauacacaugugcacauacg

SEQ ID NO: 481739 - RNA, 22 nt, Human
ucugcagcuucuugccagagag

SEQ ID NO: 481740 - RNA, 23 nt, Human
uucuuauuuacuuuggaaucucc

SEQ ID NO: 481741 - RNA, 22 nt, Human
agucaggagcugcugcauugua

SEQ ID NO: 481742 - RNA, 22 nt, Human
gccacccugagcugggccaggg

SEQ ID NO: 481743 - RNA, 22 nt, Human
ugauuuccuagcugacaugaaa

SEQ ID NO: 481744 - RNA, 21 nt, Human
cagagcuguccaaacccugac

SEQ ID NO: 481745 - RNA, 22 nt, Human
gcagaggauagcauaugaaccu

SEQ ID NO: 481746 - RNA, 18 nt, Human
gcaaggcucaggccaggc

SEQ ID NO: 481747 - RNA, 22 nt, Human
uucugugaaucuuuuuucccac

SEQ ID NO: 481748 - RNA, 22 nt, Human
gcagcuggcccugacacgcaga

SEQ ID NO: 481749 - RNA, 22 nt, Human
gcucagggaacuuuuugcaggc

SEQ ID NO: 481750 - RNA, 22 nt, Human
gcuggcugaggucuagcucuuu

SEQ ID NO: 481751 - RNA, 21 nt, Human
ccaggguccagcugccauggu

SEQ ID NO: 481752 - RNA, 22 nt, Human
ucagcuuuggucacauugaguu

SEQ ID NO: 481753 - RNA, 22 nt, Human
uucacaguggcugugccauuug

SEQ ID NO: 481754 - RNA, 22 nt, Human
ggugggugagcccugggagcug

SEQ ID NO: 481755 - RNA, 22 nt, Human
cagccugggcuccagagucccu

SEQ ID NO: 481756 - RNA, 22 nt, Human
ggcagggcuugucucugugaug

SEQ ID NO: 481757 - RNA, 20 nt, Human
ucagugauuaucucugagug

SEQ ID NO: 481758 - RNA, 22 nt, Human
gucucagauucagacaucuaca

SEQ ID NO: 481759 - RNA, 22 nt, Human
aucuuugaagaggacuugaagu

SEQ ID NO: 481760 - RNA, 22 nt, Human
ugccugggagugaccaagacuc

SEQ ID NO: 481761 - RNA, 22 nt, Human
gcaaauacauguugagcaccua

SEQ ID NO: 481762 - RNA, 22 nt, Human
gccgaagcugccgucugguccu

SEQ ID NO: 481763 - RNA, 22 nt, Human
acagccagggucucaggaggcg

SEQ ID NO: 481764 - RNA, 22 nt, Human
aggcaggaaaaucgcuugaacc

SEQ ID NO: 481765 - RNA, 18 nt, Human
uccuccuuuggccuuuuc

SEQ ID NO: 481766 - RNA, 22 nt, Human
cuguauuucccacauucucuau

SEQ ID NO: 481767 - RNA, 22 nt, Human
uuuauuaugauggacaccuucg

SEQ ID NO: 481768 - RNA, 21 nt, Human
gcaggggauagaaauggucug

SEQ ID NO: 481769 - RNA, 22 nt, Human
uggccuggugucugcgaggccu

SEQ ID NO: 481770 - RNA, 20 nt, Human
cugccaugauugauagagug

SEQ ID NO: 481771 - RNA, 22 nt, Human
caugggcuuuggaggcuggagg

SEQ ID NO: 481772 - RNA, 20 nt, Human
uccuucaggcagggccuagu

SEQ ID NO: 481773 - RNA, 19 nt, Human
acaggcagaauugggugug

SEQ ID NO: 481774 - RNA, 22 nt, Human
ucuggcucaucucuccagguaa

SEQ ID NO: 481775 - RNA, 22 nt, Human
gaggccuggagccgccuaggcg

SEQ ID NO: 481776 - RNA, 22 nt, Human
ugaaggaagaauaggcaguguu

SEQ ID NO: 481777 - RNA, 22 nt, Human
aggaccugaaauucuugcuuuu

SEQ ID NO: 481778 - RNA, 22 nt, Human
ugucacagggauaccauggggc

SEQ ID NO: 481779 - RNA, 22 nt, Human
guccugggcccaggggcugccu

SEQ ID NO: 481780 - RNA, 23 nt, Human
ccuggcagcaaacgaggagguua

SEQ ID NO: 481781 - RNA, 22 nt, Human
gaggggcuggcacgauggcugc

SEQ ID NO: 481782 - RNA, 22 nt, Human
gcaaaggcuucuuuuauucucc

SEQ ID NO: 481783 - RNA, 22 nt, Human
agucccagugacuuggccagaa

SEQ ID NO: 481784 - RNA, 22 nt, Human
acccuggacuggggcugaggcu

SEQ ID NO: 481785 - RNA, 22 nt, Human
gucuuguuugggauguggaugg

SEQ ID NO: 481786 - RNA, 22 nt, Human
uuuuauuaucuuugaaugggac

SEQ ID NO: 481787 - RNA, 22 nt, Human
cuuccucacggugcaacaggaa

SEQ ID NO: 481788 - RNA, 20 nt, Human
uuggcucugaucaguggagc

SEQ ID NO: 481789 - RNA, 22 nt, Human
aggaggcccuagagcucuagag

SEQ ID NO: 481790 - RNA, 22 nt, Human
ggcugccuugacccuggcuccg

SEQ ID NO: 481791 - RNA, 22 nt, Human
uuauuaaugaguacaaguuauu

SEQ ID NO: 481792 - RNA, 22 nt, Human
uguaguaagugcgcaauaaaua

SEQ ID NO: 481793 - RNA, 22 nt, Human
augagcugugggauuccagagg

SEQ ID NO: 481794 - RNA, 22 nt, Human
agcugcagcguucauuuuucca

SEQ ID NO: 481795 - RNA, 20 nt, Human
agcaccagugggggcagccc

SEQ ID NO: 481796 - RNA, 22 nt, Human
caggugaccuuuguccuaaguu

SEQ ID NO: 481797 - RNA, 22 nt, Human
caugcuuuaccaaagcagugau

SEQ ID NO: 481798 - RNA, 22 nt, Human
ugacucuguaccugucugccuu

SEQ ID NO: 481799 - RNA, 22 nt, Human
uggcagaguuauggguauuuau

SEQ ID NO: 481800 - RNA, 22 nt, Human
ccagaggaguugaggcuuuggg

SEQ ID NO: 481801 - RNA, 18 nt, Human
caggaugagugaugggga

SEQ ID NO: 481802 - RNA, 22 nt, Human
ggucauugaaaucagaaggguu

SEQ ID NO: 481803 - RNA, 22 nt, Human
agcagccacagcagaucugagu

SEQ ID NO: 481804 - RNA, 22 nt, Human
uccuccagugucuggggccuug

SEQ ID NO: 481805 - RNA, 22 nt, Human
auugucuuuggugcuuccagga

SEQ ID NO: 481806 - RNA, 22 nt, Human
cagggcaguuuuacuucucucu

SEQ ID NO: 481807 - RNA, 22 nt, Human
auacaaaguauuaauccuggau

SEQ ID NO: 481808 - RNA, 22 nt, Human
ugagcccagagcccuuguaggg

SEQ ID NO: 481809 - RNA, 22 nt, Human
gcccaggauucuuucuuccuua

SEQ ID NO: 481810 - RNA, 22 nt, Human
gcucaggacccaggugugaccu

SEQ ID NO: 481811 - RNA, 22 nt, Human
cugugcuuccaggauggcagcu

SEQ ID NO: 481812 - RNA, 22 nt, Human
gagagugagauccuccugggga

SEQ ID NO: 481813 - RNA, 22 nt, Human
aggcagagcuaggaagaauugu

SEQ ID NO: 481814 - RNA, 22 nt, Human
uccaggcacagaguuggucagu

SEQ ID NO: 481815 - RNA, 22 nt, Human
cucucccagucaggcucaggau

SEQ ID NO: 481816 - RNA, 22 nt, Human
uccuggcccuguggccugcagu

SEQ ID NO: 481817 - RNA, 22 nt, Human
ggccagagaagucagacccuug

SEQ ID NO: 481818 - RNA, 21 nt, Human
cugugcuuuuuaagugugaug

SEQ ID NO: 481819 - RNA, 22 nt, Human
ucccagagcucuggagguugga

SEQ ID NO: 481820 - RNA, 22 nt, Human
aacaguaaugugguguuggguu

SEQ ID NO: 481821 - RNA, 22 nt, Human
cuggccuuuagccccagugucu

SEQ ID NO: 481822 - RNA, 22 nt, Human
auuuccaccggcucaggaaguu

SEQ ID NO: 481823 - RNA, 22 nt, Human
ugggacagggaaucugaucccc

SEQ ID NO: 481824 - RNA, 22 nt, Human
agggacugagcuaggaucuagu

SEQ ID NO: 481825 - RNA, 22 nt, Human
uccagggaugccagccauguug

SEQ ID NO: 481826 - RNA, 22 nt, Human
guacauuucauuuaaaugaugu

SEQ ID NO: 481827 - RNA, 22 nt, Human
agcucugcaggcacagcugagg

SEQ ID NO: 481828 - RNA, 22 nt, Human
caguuaaaggcccaauaucugg

SEQ ID NO: 481829 - RNA, 22 nt, Human
uguguacuugaaagggcagguc

SEQ ID NO: 481830 - RNA, 22 nt, Human
cuggugugauugagcccaggug

SEQ ID NO: 481831 - RNA, 20 nt, Human
cagagccaagagcagcaucu

SEQ ID NO: 481832 - RNA, 22 nt, Human
cacagaguggaggcuuggccug

SEQ ID NO: 481833 - RNA, 22 nt, Human
agugggaccggugcuauuccag

SEQ ID NO: 481834 - RNA, 22 nt, Human
aauuagagaucaguucuuugac

SEQ ID NO: 481835 - RNA, 22 nt, Human
uaaaucuccuguuuuucaucua

SEQ ID NO: 481836 - RNA, 22 nt, Human
cugaggcugggcugaggguaua

SEQ ID NO: 481837 - RNA, 22 nt, Human
gguggguauugaauacaggugu

SEQ ID NO: 481838 - RNA, 22 nt, Human
ugcugucuuccaggauggugaa

SEQ ID NO: 481839 - RNA, 22 nt, Human
gcagcugaaagggaucucuaca

SEQ ID NO: 481840 - RNA, 22 nt, Human
uaaguggaagguuauaugcuaa

SEQ ID NO: 481841 - RNA, 22 nt, Human
ccucugcagcagagagccagag

SEQ ID NO: 481842 - RNA, 22 nt, Human
cauccugcggggagcagagggc

SEQ ID NO: 481843 - RNA, 22 nt, Human
ccugagagcauuccacacugaa

SEQ ID NO: 481844 - RNA, 22 nt, Human
cagcaggguuaagugacucacc

SEQ ID NO: 481845 - RNA, 22 nt, Human
auacaaagcuaaauaugguuuc

SEQ ID NO: 481846 - RNA, 22 nt, Human
guuccaggcaagugggauagga

SEQ ID NO: 481847 - RNA, 22 nt, Human
uucucaggugaggcugaggcug

SEQ ID NO: 481848 - RNA, 22 nt, Human
agagccagccuucucagcuuac

SEQ ID NO: 481849 - RNA, 22 nt, Human
caugggcucuucuggacugcac

SEQ ID NO: 481850 - RNA, 22 nt, Human
aggcaggagcaagcccuacaag

SEQ ID NO: 481851 - RNA, 22 nt, Human
aagggcaggagaagacggauau

SEQ ID NO: 481852 - RNA, 22 nt, Human
ugggacagugugccuugcuccu

SEQ ID NO: 481853 - RNA, 22 nt, Human
uagagcuagcuucaaaaugcga

SEQ ID NO: 481854 - RNA, 22 nt, Human
gggcaggugcccagggccagag

SEQ ID NO: 481855 - RNA, 22 nt, Human
ggggaggcugaugugggcaaag

SEQ ID NO: 481856 - RNA, 22 nt, Human
gagagugaugaaugguuaaaca

SEQ ID NO: 481857 - RNA, 19 nt, Human
ucaaggcucccugagggau

SEQ ID NO: 481858 - RNA, 22 nt, Human
aaaugcacugaacacauguugu

SEQ ID NO: 481859 - RNA, 22 nt, Human
gucaccaggucugaugcagcca

SEQ ID NO: 481860 - RNA, 22 nt, Human
aggcugaugcuggcugaggcug

SEQ ID NO: 481861 - RNA, 22 nt, Human
agcucccagaaggcccugcgcc

SEQ ID NO: 481862 - RNA, 22 nt, Human
agagaagagcaaugauaaauuu

SEQ ID NO: 481863 - RNA, 22 nt, Human
ucaaaguagggguaagccaggc

SEQ ID NO: 481864 - RNA, 22 nt, Human
cacaggcuuccaguccccagcu

SEQ ID NO: 481865 - RNA, 22 nt, Human
gggcacuguggggcccaugcug

SEQ ID NO: 481866 - RNA, 18 nt, Human
gccaggcaggguggggaa

SEQ ID NO: 481867 - RNA, 22 nt, Human
uucaagaucgaguuuaaaguga

SEQ ID NO: 481868 - RNA, 22 nt, Human
uguggccuccuguuccugggua

SEQ ID NO: 481869 - RNA, 22 nt, Human
ggugaggaaagauggugacagu

SEQ ID NO: 481870 - RNA, 22 nt, Human
gcuggccugggcagccugucgg

SEQ ID NO: 481871 - RNA, 20 nt, Human
cagucccaauccagggccag

SEQ ID NO: 481872 - RNA, 19 nt, Human
ccaggccaucccaguuccc

SEQ ID NO: 481873 - RNA, 22 nt, Human
ggcaggcaguguggugugaaac

SEQ ID NO: 481874 - RNA, 22 nt, Human
gaggcccuccagcugucagcug

SEQ ID NO: 481875 - RNA, 22 nt, Human
uuggaaagcaagcuggacauac

SEQ ID NO: 481876 - RNA, 22 nt, Human
ccagcugguuaaaauagagaaa

SEQ ID NO: 481877 - RNA, 21 nt, Human
accagcaggagaucagaagga

SEQ ID NO: 481878 - RNA, 22 nt, Human
cuuaacagagagaaguguugcu

SEQ ID NO: 481879 - RNA, 22 nt, Human
ucccacucccaggcaggccucu

SEQ ID NO: 481880 - RNA, 22 nt, Human
cacaugggugugccuggaggaa

SEQ ID NO: 481881 - RNA, 22 nt, Human
ugaaugaguuuggcugcuguuc

SEQ ID NO: 481882 - RNA, 18 nt, Human
uguagagccagguuugcc

SEQ ID NO: 481883 - RNA, 22 nt, Human
uggcagcagacaaaaggccauu

SEQ ID NO: 481884 - RNA, 22 nt, Human
ucagcuggagaugagaaccgaa

SEQ ID NO: 481885 - RNA, 22 nt, Human
aggcuccuuguucaucauccau

SEQ ID NO: 481886 - RNA, 20 nt, Human
acuuucucgguuucucaccu

SEQ ID NO: 481887 - RNA, 20 nt, Human
ugcucugucuaaaacuuccc

SEQ ID NO: 481888 - RNA, 22 nt, Human
aaugcacagcguuccaugcuug

SEQ ID NO: 481889 - RNA, 23 nt, Human
uugcuuagagaccuccucaucag

SEQ ID NO: 481890 - RNA, 22 nt, Human
aagcagcauaauugcuauuuua

SEQ ID NO: 481891 - RNA, 22 nt, Human
gaaggcugcgaggggagugccg

SEQ ID NO: 481892 - RNA, 22 nt, Human
ucagcagggagaggagaaugca

SEQ ID NO: 481893 - RNA, 22 nt, Human
uggccugggucacaccaggguc

SEQ ID NO: 481894 - RNA, 18 nt, Human
cacaggcaggugauaggu

SEQ ID NO: 481895 - RNA, 17 nt, Human
aucuggcugcuucuaga

SEQ ID NO: 481896 - RNA, 22 nt, Human
agccugguuuaagcauuuuaua

SEQ ID NO: 481897 - RNA, 22 nt, Human
gcaggccucuguugagggccuu

SEQ ID NO: 481898 - RNA, 22 nt, Human
ggagccugagcggcccagggcc

SEQ ID NO: 481899 - RNA, 17 nt, Human
aggccagaugaggcaag

SEQ ID NO: 481900 - RNA, 22 nt, Human
ccugccugcaccuucucugggg

SEQ ID NO: 481901 - RNA, 22 nt, Human
ugugggaggaauuagaauggga

SEQ ID NO: 481902 - RNA, 22 nt, Human
aagggcagggaguuugugucua

SEQ ID NO: 481903 - RNA, 18 nt, Human
acauuucuccuucugacc

SEQ ID NO: 481904 - RNA, 22 nt, Human
uggcaggaggaugaggcggcua

SEQ ID NO: 481905 - RNA, 20 nt, Human
agaauucuuacccuuugaug

SEQ ID NO: 481906 - RNA, 22 nt, Human
aggccagcaccagagucaagaa

SEQ ID NO: 481907 - RNA, 22 nt, Human
aauuaguaaccuaauuccaucu

SEQ ID NO: 481908 - RNA, 22 nt, Human
cuugugcaauugacauugaauc

SEQ ID NO: 481909 - RNA, 22 nt, Human
agaagccagucgcucucccgca

SEQ ID NO: 481910 - RNA, 22 nt, Human
uagcugccauugcuccaggaag

SEQ ID NO: 481911 - RNA, 20 nt, Human
cagagcugggauuugaacac

SEQ ID NO: 481912 - RNA, 19 nt, Human
ucaguggaugaacauguuu

SEQ ID NO: 481913 - RNA, 22 nt, Human
caggaggaggugagguagaacu

SEQ ID NO: 481914 - RNA, 22 nt, Human
ggagugaguacuggaguagcug

SEQ ID NO: 481915 - RNA, 22 nt, Human
ucauuuguucucauucucuacu

SEQ ID NO: 481916 - RNA, 22 nt, Human
ucucuggaguauaaccagggau

SEQ ID NO: 481917 - RNA, 22 nt, Human
uggggcagggaugggaaacuau

SEQ ID NO: 481918 - RNA, 22 nt, Human
ucaggcugagaaaaucuggacc

SEQ ID NO: 481919 - RNA, 22 nt, Human
gcagggcugggugggagacaga

SEQ ID NO: 481920 - RNA, 18 nt, Human
ccagguggugacagagau

SEQ ID NO: 481921 - RNA, 22 nt, Human
uucacagauguauuggaacucc

SEQ ID NO: 481922 - RNA, 22 nt, Human
gcucccugacucaguuccugag

SEQ ID NO: 481923 - RNA, 22 nt, Human
acauuuuuuagagucccacauu

SEQ ID NO: 481924 - RNA, 22 nt, Human
gcagcuuucuugcccuaaucuu

SEQ ID NO: 481925 - RNA, 22 nt, Human
uacacacagaggccaugggauu

SEQ ID NO: 481926 - RNA, 22 nt, Human
cucuggcuuugcucaugcaucc

SEQ ID NO: 481927 - RNA, 22 nt, Human
cccaggcacacugaagugacau

SEQ ID NO: 481928 - RNA, 22 nt, Human
gggaguggauuauguggaccca

SEQ ID NO: 481929 - RNA, 22 nt, Human
uauugaaauucuucauguccuc

SEQ ID NO: 481930 - RNA, 22 nt, Human
aagauuucugcuccugagagaa

SEQ ID NO: 481931 - RNA, 22 nt, Human
gacccaggcccaaggcugccag

SEQ ID NO: 481932 - RNA, 22 nt, Human
acuuguguaacacagaaagaac

SEQ ID NO: 481933 - RNA, 22 nt, Human
gcucuuccauuucucuugaacu

SEQ ID NO: 481934 - RNA, 22 nt, Human
uaauuuaauccaaguguuacau

SEQ ID NO: 481935 - RNA, 20 nt, Human
cucuuaaauguaaaguaggc

SEQ ID NO: 481936 - RNA, 22 nt, Human
gacccagcuaaccaggugggga

SEQ ID NO: 481937 - RNA, 22 nt, Human
cugaggcugcccagggccaggu

SEQ ID NO: 481938 - RNA, 22 nt, Human
ucugcagaaguggcugggccac

SEQ ID NO: 481939 - RNA, 22 nt, Human
aaugcacauguuguaauaaaua

SEQ ID NO: 481940 - RNA, 22 nt, Human
accugaggccuccccagcagac

SEQ ID NO: 481941 - RNA, 22 nt, Human
ggaaagagcuaaaagggugaga

SEQ ID NO: 481942 - RNA, 22 nt, Human
uggguagaggaauugggcuacc

SEQ ID NO: 481943 - RNA, 18 nt, Human
auggucucauacugggag

SEQ ID NO: 481944 - RNA, 22 nt, Human
aaguggugguaugaaccgaggg

SEQ ID NO: 481945 - RNA, 22 nt, Human
uaccugagcccagugcagcaua

SEQ ID NO: 481946 - RNA, 23 nt, Human
uggcuucugccccauucucucca

SEQ ID NO: 481947 - RNA, 22 nt, Human
agggggcccuugcaggugagcg

SEQ ID NO: 481948 - RNA, 22 nt, Human
ucccuggggauguuggccugcc

SEQ ID NO: 481949 - RNA, 22 nt, Human
ggcugggcucgcugauuggcug

SEQ ID NO: 481950 - RNA, 22 nt, Human
ggcuggcacugaggagagcucu

SEQ ID NO: 481951 - RNA, 22 nt, Human
ugggcacuggaagccugcugug

SEQ ID NO: 481952 - RNA, 22 nt, Human
ugggagcucagaaagggagguc

SEQ ID NO: 481953 - RNA, 22 nt, Human
gaagccaguguuugaagaauuu

SEQ ID NO: 481954 - RNA, 22 nt, Human
gaaugcacucacccaucacuca

SEQ ID NO: 481955 - RNA, 22 nt, Human
auuuuucucuccacuccauuaa

SEQ ID NO: 481956 - RNA, 22 nt, Human
cuucuuaaucccuuauauauuu

SEQ ID NO: 481957 - RNA, 22 nt, Human
cggcagcuccgcgccguaggac

SEQ ID NO: 481958 - RNA, 20 nt, Human
cacguuuuuccacuagcaaa

SEQ ID NO: 481959 - RNA, 22 nt, Human
cugcuguguuggcauuggauag

SEQ ID NO: 481960 - RNA, 22 nt, Human
gcugagguggcugccuuaguaa

SEQ ID NO: 481961 - RNA, 22 nt, Human
gggagguucuguucgcacuuga

SEQ ID NO: 481962 - RNA, 22 nt, Human
ugcccacaggaagacaccagcg

SEQ ID NO: 481963 - RNA, 19 nt, Human
ucaucucacagggccuggc

SEQ ID NO: 481964 - RNA, 22 nt, Human
aggcagagcugauguucuguga

SEQ ID NO: 481965 - RNA, 22 nt, Human
acauuucuccuacuuguuauuu

SEQ ID NO: 481966 - RNA, 22 nt, Human
gaggccuggucuaugagauguu

SEQ ID NO: 481967 - RNA, 22 nt, Human
gcuuuauguaaguccaaaggca

SEQ ID NO: 481968 - RNA, 22 nt, Human
gaggccugaaaggggaccuaug

SEQ ID NO: 481969 - RNA, 19 nt, Human
ucugugcugggaggcagca

SEQ ID NO: 481970 - RNA, 22 nt, Human
cuggcugggagcgagcugcuca

SEQ ID NO: 481971 - RNA, 22 nt, Human
uccauaagcagguucuuccuga

SEQ ID NO: 481972 - RNA, 22 nt, Human
gcugguuaggugagggugcgcc

SEQ ID NO: 481973 - RNA, 22 nt, Human
ugucaacacaccuaucucaauu

SEQ ID NO: 481974 - RNA, 16 nt, Human
ccuuucucugccuucc

SEQ ID NO: 481975 - RNA, 22 nt, Human
gcugagugauugauauuuuagu

SEQ ID NO: 481976 - RNA, 22 nt, Human
cauuucugcagaauugcucuuc

SEQ ID NO: 481977 - RNA, 22 nt, Human
ucuggcaggcaaucggcucugg

SEQ ID NO: 481978 - RNA, 22 nt, Human
aggguggcaguuacuggagcaa

SEQ ID NO: 481979 - RNA, 22 nt, Human
uuuuuggguccaggcuguaucu

SEQ ID NO: 481980 - RNA, 22 nt, Human
gagcgggaggaacggcucgggc

SEQ ID NO: 481981 - RNA, 22 nt, Human
uggcucuguugagguauggauu

SEQ ID NO: 481982 - RNA, 23 nt, Human
agccuucaggcaaugucaguaga

SEQ ID NO: 481983 - RNA, 22 nt, Human
agaauaaacugcuuuagggcag

SEQ ID NO: 481984 - RNA, 22 nt, Human
uugcagggcaggaccauggaca

SEQ ID NO: 481985 - RNA, 22 nt, Human
ggcugccugggagcccuccucu

SEQ ID NO: 481986 - RNA, 22 nt, Human
cagggccugcuuccuucuuguu

SEQ ID NO: 481987 - RNA, 22 nt, Human
uggcuggcaaggcuggagucag

SEQ ID NO: 481988 - RNA, 22 nt, Human
agugaguggacccugcaaggaa

SEQ ID NO: 481989 - RNA, 19 nt, Human
gaucuuugccaauuuaagc

SEQ ID NO: 481990 - RNA, 22 nt, Human
ugggaggaaugucacugagcca

SEQ ID NO: 481991 - RNA, 22 nt, Human
ggcaggugugagaucgaggcca

SEQ ID NO: 481992 - RNA, 22 nt, Human
guuugcauuucuugaacuauau

SEQ ID NO: 481993 - RNA, 22 nt, Human
cuagagggauguuaggauagca

SEQ ID NO: 481994 - RNA, 22 nt, Human
cagaggccccagaacuagcucu

SEQ ID NO: 481995 - RNA, 22 nt, Human
agcucccauuaucuucugaaac

SEQ ID NO: 481996 - RNA, 17 nt, Human
aaaauucuguaaagagg

SEQ ID NO: 481997 - RNA, 22 nt, Human
aggcugagcuggcccuugaaau

SEQ ID NO: 481998 - RNA, 22 nt, Human
gaagaacacuucaugauucauu

SEQ ID NO: 481999 - RNA, 22 nt, Human
gguggccucgguggugcacagg

SEQ ID NO: 482000 - RNA, 22 nt, Human
cucucagacugaagggccugug

SEQ ID NO: 482001 - RNA, 22 nt, Human
ugcaccauacccauuccccucu

SEQ ID NO: 482002 - RNA, 22 nt, Human
cuggaguguaaagagcauagaa

SEQ ID NO: 482003 - RNA, 22 nt, Human
uggcccugcuaugauccugcaa

SEQ ID NO: 482004 - RNA, 22 nt, Human
aggucauuccagccauuccccu

SEQ ID NO: 482005 - RNA, 22 nt, Human
uggcuggcccugggagugcaga

SEQ ID NO: 482006 - RNA, 22 nt, Human
gcugucagaaggugaaggguaa

SEQ ID NO: 482007 - RNA, 22 nt, Human
uagagcuggaaaacugcaggua

SEQ ID NO: 482008 - RNA, 22 nt, Human
gcagucaguaaggcagccagaa

SEQ ID NO: 482009 - RNA, 22 nt, Human
aagacauuuauuugaaucaauu

SEQ ID NO: 482010 - RNA, 22 nt, Human
caggggcugagaaggaacgucc

SEQ ID NO: 482011 - RNA, 22 nt, Human
ugggaccugcuccuggaaugag

SEQ ID NO: 482012 - RNA, 22 nt, Human
aggagccaugagugacaucaca

SEQ ID NO: 482013 - RNA, 22 nt, Human
ugaagcaguuacuggguguuaa

SEQ ID NO: 482014 - RNA, 22 nt, Human
agugaaauccuggucaacaggu

SEQ ID NO: 482015 - RNA, 22 nt, Human
ccaggugugcucugcaguggau

SEQ ID NO: 482016 - RNA, 22 nt, Human
aucaggauggguuuggcuuagg

SEQ ID NO: 482017 - RNA, 22 nt, Human
agaggcaggaagagcugauuuu

SEQ ID NO: 482018 - RNA, 22 nt, Human
aaagguuaagguguucaagaaa

SEQ ID NO: 482019 - RNA, 22 nt, Human
aucagucuguguuagaaaagag

SEQ ID NO: 482020 - RNA, 22 nt, Human
ugucagaggcucagggucucag

SEQ ID NO: 482021 - RNA, 22 nt, Human
acaggggaauuuacugucauua

SEQ ID NO: 482022 - RNA, 22 nt, Human
uagggaccuuagaauuguaugu

SEQ ID NO: 482023 - RNA, 22 nt, Human
ugaguccauugauggauaguga

SEQ ID NO: 482024 - RNA, 16 nt, Human
gcaggcagaucacaug

SEQ ID NO: 482025 - RNA, 22 nt, Human
ccagagccccugagcuucccug

SEQ ID NO: 482026 - RNA, 22 nt, Human
ggaggccaggguggguggaucg

SEQ ID NO: 482027 - RNA, 17 nt, Human
acaggcagaucaccuga

SEQ ID NO: 482028 - RNA, 22 nt, Human
cagccugcauuuguaucuguau

SEQ ID NO: 482029 - RNA, 22 nt, Human
aaagcagcagcacguggaagag

SEQ ID NO: 482030 - RNA, 22 nt, Human
ucaguauccacaaaugcucaaa

SEQ ID NO: 482031 - RNA, 22 nt, Human
gggcagguggcaaagccagagg

SEQ ID NO: 482032 - RNA, 22 nt, Human
ggaggccaaggugggcggauca

SEQ ID NO: 482033 - RNA, 22 nt, Human
auuauuagacuuauaugguagu

SEQ ID NO: 482034 - RNA, 22 nt, Human
uaugcacaauaugaucuauuug

SEQ ID NO: 482035 - RNA, 22 nt, Human
ucaguguaaguuauguagaugu

SEQ ID NO: 482036 - RNA, 22 nt, Human
acauuguauaaugauuaucaca

SEQ ID NO: 482037 - RNA, 22 nt, Human
acaguggaugugauguccaggu

SEQ ID NO: 482038 - RNA, 20 nt, Human
ugccaugguaacagagugug

SEQ ID NO: 482039 - RNA, 22 nt, Human
guggauggauugaggcaguggg

SEQ ID NO: 482040 - RNA, 22 nt, Human
cuggagccacugggucuuguau

SEQ ID NO: 482041 - RNA, 22 nt, Human
gugugcaggugucagugcagcu

SEQ ID NO: 482042 - RNA, 22 nt, Human
cugccuguuagucuagcaguua

SEQ ID NO: 482043 - RNA, 23 nt, Human
ucugggcaccuuguugacaugau

SEQ ID NO: 482044 - RNA, 22 nt, Human
aaaguuucaauagaggaagugg

SEQ ID NO: 482045 - RNA, 22 nt, Human
gaugcacuugccccuccucaga

SEQ ID NO: 482046 - RNA, 22 nt, Human
ugucccagcacuuugggagucu

SEQ ID NO: 482047 - RNA, 22 nt, Human
uaaacaugugagugugcauaua

SEQ ID NO: 482048 - RNA, 22 nt, Human
caagaacauugugaucacuuca

SEQ ID NO: 482049 - RNA, 22 nt, Human
gcccagcacauugcugaggacc

SEQ ID NO: 482050 - RNA, 22 nt, Human
cuggccuggggccucagcugcu

SEQ ID NO: 482051 - RNA, 22 nt, Human
gucuccugagccuugacugcaa

SEQ ID NO: 482052 - RNA, 22 nt, Human
cugccuggccugaucuccacgc

SEQ ID NO: 482053 - RNA, 22 nt, Human
cacaggcuugucagcaugaggc

SEQ ID NO: 482054 - RNA, 22 nt, Human
cccagccucugggcucacccaa

SEQ ID NO: 482055 - RNA, 21 nt, Human
aauaaaacaguuggugucaau

SEQ ID NO: 482056 - RNA, 22 nt, Human
agaggggcucaagcaguggucu

SEQ ID NO: 482057 - RNA, 22 nt, Human
aaauauguauggaguucaugaa

SEQ ID NO: 482058 - RNA, 22 nt, Human
gccucugcugacaagauggaca

SEQ ID NO: 482059 - RNA, 22 nt, Human
agugcagagaccuggucaggca

SEQ ID NO: 482060 - RNA, 22 nt, Human
ggccaggcacugugugagauau

SEQ ID NO: 482061 - RNA, 17 nt, Human
ggccuuggggccucagu

SEQ ID NO: 482062 - RNA, 22 nt, Human
uuccauaauaggcuuaagugaa

SEQ ID NO: 482063 - RNA, 22 nt, Human
auugacaagacaauggcucuua

SEQ ID NO: 482064 - RNA, 22 nt, Human
aagggcagcuuaaauugguagc

SEQ ID NO: 482065 - RNA, 22 nt, Human
aucagcaaggcaaucacugcag

SEQ ID NO: 482066 - RNA, 22 nt, Human
uggcagagaugaagaguuguuu

SEQ ID NO: 482067 - RNA, 22 nt, Human
uucuuucagaacacaagugauu

SEQ ID NO: 482068 - RNA, 22 nt, Human
gcagaggcauuucugacgcugc

SEQ ID NO: 482069 - RNA, 22 nt, Human
auuugucuagugguauucacgu

SEQ ID NO: 482070 - RNA, 22 nt, Human
agcaggaaggcuuuggggguuc

SEQ ID NO: 482071 - RNA, 22 nt, Human
ugccagaguuacaugaggguca

SEQ ID NO: 482072 - RNA, 22 nt, Human
agguaggguuaauggagauaua

SEQ ID NO: 482073 - RNA, 22 nt, Human
uggcagcuugaaugcagucuuu

SEQ ID NO: 482074 - RNA, 22 nt, Human
guccuggggaauacagaagccg

SEQ ID NO: 482075 - RNA, 22 nt, Human
ucagcuuuuaaaaacaagaagu

SEQ ID NO: 482076 - RNA, 22 nt, Human
uucagaaagugaaucuuguuau

SEQ ID NO: 482077 - RNA, 22 nt, Human
ggaggccaaggaggagcuugcc

SEQ ID NO: 482078 - RNA, 22 nt, Human
aggcagaggagaaugaucuucc

SEQ ID NO: 482079 - RNA, 22 nt, Human
ucacagacauggugagguaaca

SEQ ID NO: 482080 - RNA, 22 nt, Human
ugccagcccaccuuggggccuc

SEQ ID NO: 482081 - RNA, 22 nt, Human
uuuucauuuacauuagggaaga

SEQ ID NO: 482082 - RNA, 21 nt, Human
agcugagcccagaagacuggu

SEQ ID NO: 482083 - RNA, 21 nt, Human
aguucauacugaguaacaaaa

SEQ ID NO: 482084 - RNA, 22 nt, Human
aaagcagcagcaccugcauuuc

SEQ ID NO: 482085 - RNA, 22 nt, Human
gccuguccuggaugcucugcaa

SEQ ID NO: 482086 - RNA, 22 nt, Human
auaugaagaauuccaauuugga

SEQ ID NO: 482087 - RNA, 22 nt, Human
cugagccagggccacacaugga

SEQ ID NO: 482088 - RNA, 22 nt, Human
ugucucugguauuaggugaaaa

SEQ ID NO: 482089 - RNA, 22 nt, Human
agcuggguggagggcccacggu

SEQ ID NO: 482090 - RNA, 22 nt, Human
gcugccucugcacagcucacuc

SEQ ID NO: 482091 - RNA, 17 nt, Human
agcugagcuggccaggg

SEQ ID NO: 482092 - RNA, 22 nt, Human
uaucuacaggugucagguaaga

SEQ ID NO: 482093 - RNA, 22 nt, Human
aggcagccugguuugaauggaa

SEQ ID NO: 482094 - RNA, 22 nt, Human
gucugucucucuccagagugca

SEQ ID NO: 482095 - RNA, 22 nt, Human
aagugagugguaaggagcaugg

SEQ ID NO: 482096 - RNA, 22 nt, Human
gagcccucucuguaggcaagua

SEQ ID NO: 482097 - RNA, 22 nt, Human
aucuggcucuuccuggaguucc

SEQ ID NO: 482098 - RNA, 22 nt, Human
cacugcuuauaaauucuaggca

SEQ ID NO: 482099 - RNA, 22 nt, Human
uuugaaaguucuucugacacua

SEQ ID NO: 482100 - RNA, 22 nt, Human
ccaucuccacugucccugucaa

SEQ ID NO: 482101 - RNA, 22 nt, Human
agcuuuauggugccucacuuga

SEQ ID NO: 482102 - RNA, 22 nt, Human
uuucacauuuguuuuaagaagu

SEQ ID NO: 482103 - RNA, 22 nt, Human
acuauacauugaauguuaaggu

SEQ ID NO: 482104 - RNA, 22 nt, Human
acaauucucucauaucuuauua

SEQ ID NO: 482105 - RNA, 22 nt, Human
uuguaaauaguaguaagaugcc

SEQ ID NO: 482106 - RNA, 22 nt, Human
guccucagucaguuuggugggg

SEQ ID NO: 482107 - RNA, 22 nt, Human
gaacaauagugguaacaaagcc

SEQ ID NO: 482108 - RNA, 22 nt, Human
gggccacacagaaccuccuggu

SEQ ID NO: 482109 - RNA, 22 nt, Human
gcagggcagcucacugugguuc

SEQ ID NO: 482110 - RNA, 22 nt, Human
guuauguaugagggaaugauua

SEQ ID NO: 482111 - RNA, 22 nt, Human
cucugaccauucccuugauuuu

SEQ ID NO: 482112 - RNA, 22 nt, Human
uguuugaauuuugcuaacgugu

SEQ ID NO: 482113 - RNA, 20 nt, Human
caggcacacucauuccugcu

SEQ ID NO: 482114 - RNA, 22 nt, Human
ucuagaaacaugacauugaucu

SEQ ID NO: 482115 - RNA, 22 nt, Human
accuuucaaaguggcuaucacu

SEQ ID NO: 482116 - RNA, 22 nt, Human
aaggcaguacuuuauguccaua

SEQ ID NO: 482117 - RNA, 22 nt, Human
cagccaccauacagcagaagcu

SEQ ID NO: 482118 - RNA, 22 nt, Human
aggagcugcaaauauuaguaau

SEQ ID NO: 482119 - RNA, 22 nt, Human
ccucagaguaggucucagcugu

SEQ ID NO: 482120 - RNA, 22 nt, Human
uaugcacacaucgcagcaggaa

SEQ ID NO: 482121 - RNA, 22 nt, Human
uuuuccuauaugcaaagaaugc

SEQ ID NO: 482122 - RNA, 22 nt, Human
cccaggcagcggggucuccuug

SEQ ID NO: 482123 - RNA, 16 nt, Human
gagggcagaggcggaa

SEQ ID NO: 482124 - RNA, 22 nt, Human
aggggcagccucacaauccucu

SEQ ID NO: 482125 - RNA, 22 nt, Human
uccucacaagcaagcacaggua

SEQ ID NO: 482126 - RNA, 22 nt, Human
gucaggauguuuauucuccagu

SEQ ID NO: 482127 - RNA, 22 nt, Human
acagggcagagaggcaggcuug

SEQ ID NO: 482128 - RNA, 22 nt, Human
agggugccuggaagccacucac

SEQ ID NO: 482129 - RNA, 22 nt, Human
gucagaggggacaagacacaga

SEQ ID NO: 482130 - RNA, 22 nt, Human
uggcucaguuucaguccugguu

SEQ ID NO: 482131 - RNA, 19 nt, Human
ucauaaggagagaggaaau

SEQ ID NO: 482132 - RNA, 22 nt, Human
gccaggcauuauuccgaucccu

SEQ ID NO: 482133 - RNA, 22 nt, Human
gugcagggcuggcaccggaggc

SEQ ID NO: 482134 - RNA, 22 nt, Human
augucuuuggcuuugacauggc

SEQ ID NO: 482135 - RNA, 22 nt, Human
cuggaugcuuccucucugcuag

SEQ ID NO: 482136 - RNA, 16 nt, Human
cuuccucuucacuggc

SEQ ID NO: 482137 - RNA, 22 nt, Human
ucuggaaguuagaggaggaaag

SEQ ID NO: 482138 - RNA, 22 nt, Human
aggcacugaaggaagcuugcgc

SEQ ID NO: 482139 - RNA, 22 nt, Human
ggcuuuaucaaaugagacccug

SEQ ID NO: 482140 - RNA, 18 nt, Human
aggggcagcuugugugga

SEQ ID NO: 482141 - RNA, 22 nt, Human
uugaaagucacaauggcauuaa

SEQ ID NO: 482142 - RNA, 22 nt, Human
cuggacagaaaaggccacugga

SEQ ID NO: 482143 - RNA, 22 nt, Human
aggcugagauagguggaucauu

SEQ ID NO: 482144 - RNA, 22 nt, Human
aguggcagagccaaguagagcc

SEQ ID NO: 482145 - RNA, 22 nt, Human
cauuuacauuuaagguuaauau

SEQ ID NO: 482146 - RNA, 22 nt, Human
gucaggggccaugggccaagga

SEQ ID NO: 482147 - RNA, 22 nt, Human
caggaagagguaucaccgagca

SEQ ID NO: 482148 - RNA, 23 nt, Human
agggaaaguaguaauggccuuug

SEQ ID NO: 482149 - RNA, 22 nt, Human
uucauucaucucuaaaaugccu

SEQ ID NO: 482150 - RNA, 22 nt, Human
ugaagcccugugucagcuucca

SEQ ID NO: 482151 - RNA, 22 nt, Human
cuggcuuucauuucaagcacgu

SEQ ID NO: 482152 - RNA, 22 nt, Human
cagagcugcacauucuaugaug

SEQ ID NO: 482153 - RNA, 23 nt, Human
acucagagaccccgggaagugac

SEQ ID NO: 482154 - RNA, 22 nt, Human
uuuuucugccauucaaagagga

SEQ ID NO: 482155 - RNA, 22 nt, Human
guguaucaaagcacagacuuca

SEQ ID NO: 482156 - RNA, 22 nt, Human
cagcaggagcagucagacuccu

SEQ ID NO: 482157 - RNA, 22 nt, Human
gggaccugaggcccugcuccac

SEQ ID NO: 482158 - RNA, 22 nt, Human
auaacagauacucucugugagg

SEQ ID NO: 482159 - RNA, 19 nt, Human
uggcagaggacaaggacuu

SEQ ID NO: 482160 - RNA, 22 nt, Human
ucaggggcuugaggugcauguc

SEQ ID NO: 482161 - RNA, 22 nt, Human
aguguugucaaacggcucagca

SEQ ID NO: 482162 - RNA, 22 nt, Human
uggaguucucaggugagggcuu

SEQ ID NO: 482163 - RNA, 22 nt, Human
acuugcauuauauuuaucacaa

SEQ ID NO: 482164 - RNA, 22 nt, Human
aguguuucuggcaaaugaaagu

SEQ ID NO: 482165 - RNA, 22 nt, Human
uauugacaauuugugaaacuau

SEQ ID NO: 482166 - RNA, 22 nt, Human
uggcucaguuaggucagaaaca

SEQ ID NO: 482167 - RNA, 22 nt, Human
aggugccaauuuucagugaaca

SEQ ID NO: 482168 - RNA, 22 nt, Human
agcagggcugugcuccuuccga

SEQ ID NO: 482169 - RNA, 22 nt, Human
gcaggcaggagcccaacugccu

SEQ ID NO: 482170 - RNA, 22 nt, Human
caagccugucucaccagugcua

SEQ ID NO: 482171 - RNA, 22 nt, Human
uggcucaggccuacgacgccuu

SEQ ID NO: 482172 - RNA, 22 nt, Human
uguuaucugagcaacgucgacg

SEQ ID NO: 482173 - RNA, 22 nt, Human
cuggagcagcagguggccaggg

SEQ ID NO: 482174 - RNA, 22 nt, Human
ugggccugaguuugggaacugg

SEQ ID NO: 482175 - RNA, 21 nt, Human
uccuccuucaaguccuggccu

SEQ ID NO: 482176 - RNA, 22 nt, Human
uuugcauugcauuaaguauucu

SEQ ID NO: 482177 - RNA, 22 nt, Human
aggcucugugacaaucaagcug

SEQ ID NO: 482178 - RNA, 22 nt, Human
ucaugcacaugugucaccauca

SEQ ID NO: 482179 - RNA, 22 nt, Human
gcaggggcuacucugagcuucc

SEQ ID NO: 482180 - RNA, 22 nt, Human
aaucaguuguucacucugaaaa

SEQ ID NO: 482181 - RNA, 20 nt, Human
cagaggcauuuucagacucu

SEQ ID NO: 482182 - RNA, 22 nt, Human
agccucugcacgggcacgggug

SEQ ID NO: 482183 - RNA, 22 nt, Human
cuucaagagaaugcagggaugu

SEQ ID NO: 482184 - RNA, 22 nt, Human
acauuuguaugcguuuuuacug

SEQ ID NO: 482185 - RNA, 22 nt, Human
ucauucuccucuggaaaaggca

SEQ ID NO: 482186 - RNA, 22 nt, Human
uggccugguccuugucaaggca

SEQ ID NO: 482187 - RNA, 22 nt, Human
cugcagcugucucuacugggca

SEQ ID NO: 482188 - RNA, 23 nt, Human
uggcucugagcuuccugguggcc

SEQ ID NO: 482189 - RNA, 22 nt, Human
uucauguauuuaucauguaaau

SEQ ID NO: 482190 - RNA, 22 nt, Human
cugagcucuaaugucagccuug

SEQ ID NO: 482191 - RNA, 22 nt, Human
ucagccuuguggcccugcucca

SEQ ID NO: 482192 - RNA, 22 nt, Human
uaaugaauaaacuugagaguca

SEQ ID NO: 482193 - RNA, 22 nt, Human
aggccuggugaaugaaguaucu

SEQ ID NO: 482194 - RNA, 22 nt, Human
auuagcugaccucuaaggagcc

SEQ ID NO: 482195 - RNA, 22 nt, Human
ccagggcaaaugagaucauagc

SEQ ID NO: 482196 - RNA, 22 nt, Human
agacucaagcagauaggaauua

SEQ ID NO: 482197 - RNA, 22 nt, Human
agggcagagauuaauuaagaca

SEQ ID NO: 482198 - RNA, 21 nt, Human
cucuugugucagagccagagg

SEQ ID NO: 482199 - RNA, 22 nt, Human
aaacauuugcaacucgguuugg

SEQ ID NO: 482200 - RNA, 22 nt, Human
cagcugagcucccaggccauca

SEQ ID NO: 482201 - RNA, 22 nt, Human
uuagccauuaauguccugugca

SEQ ID NO: 482202 - RNA, 22 nt, Human
cugagcuuccaguuccuccagg

SEQ ID NO: 482203 - RNA, 22 nt, Human
aaaaguguccagauuaugaaga

SEQ ID NO: 482204 - RNA, 22 nt, Human
cgcccagggcaggaggccgcuc

SEQ ID NO: 482205 - RNA, 22 nt, Human
gacaucauagggugggaggaaa

SEQ ID NO: 482206 - RNA, 22 nt, Human
uagggcuguuuaaaagugaggu

SEQ ID NO: 482207 - RNA, 22 nt, Human
ccaaguacucucaccaaagcuu

SEQ ID NO: 482208 - RNA, 22 nt, Human
ucuggcucagggcucugaggga

SEQ ID NO: 482209 - RNA, 22 nt, Human
uucuucauggguucuuuuagga

SEQ ID NO: 482210 - RNA, 20 nt, Human
guccugggagccacagcaca

SEQ ID NO: 482211 - RNA, 22 nt, Human
aaagcaguauauugguaguugu

SEQ ID NO: 482212 - RNA, 22 nt, Human
accuuuuuguucuguucucagc

SEQ ID NO: 482213 - RNA, 22 nt, Human
ccuggcagguggagguugcagu

SEQ ID NO: 482214 - RNA, 22 nt, Human
agggcugacaguaaaaguauga

SEQ ID NO: 482215 - RNA, 22 nt, Human
gcuggcagguccaagauagagc

SEQ ID NO: 482216 - RNA, 22 nt, Human
cagcugugagcagccaguugcc

SEQ ID NO: 482217 - RNA, 22 nt, Human
auacaugucaucauauguuugu

SEQ ID NO: 482218 - RNA, 22 nt, Human
aucccuggacggcgccucccca

SEQ ID NO: 482219 - RNA, 22 nt, Human
uggccugguuguugcugccguu

SEQ ID NO: 482220 - RNA, 22 nt, Human
gucccagaggcuuuggccacag

SEQ ID NO: 482221 - RNA, 22 nt, Human
ccagugcauaaucaauacagcc

SEQ ID NO: 482222 - RNA, 22 nt, Human
uguggccagcagguggcugugu

SEQ ID NO: 482223 - RNA, 22 nt, Human
agcaggaacgaguucaugggga

SEQ ID NO: 482224 - RNA, 22 nt, Human
gcagcuggauuucaagagggag

SEQ ID NO: 482225 - RNA, 22 nt, Human
uucaauucugcucugaucuuag

SEQ ID NO: 482226 - RNA, 22 nt, Human
acucugaggcaggucagggcag

SEQ ID NO: 482227 - RNA, 22 nt, Human
gguguccuugcagaaggcggcg

SEQ ID NO: 482228 - RNA, 22 nt, Human
gcucaggaaggcucaaccagga

SEQ ID NO: 482229 - RNA, 22 nt, Human
aaaguuugaaugauauauuagu

SEQ ID NO: 482230 - RNA, 21 nt, Human
uucauaaaccauucucaugca

SEQ ID NO: 482231 - RNA, 22 nt, Human
aggguagggcccggagacagac

SEQ ID NO: 482232 - RNA, 22 nt, Human
ugucucugggugauucaguccu

SEQ ID NO: 482233 - RNA, 22 nt, Human
caggcuugauuauucagacaau

SEQ ID NO: 482234 - RNA, 22 nt, Human
uuaacagagugccuggcaugua

SEQ ID NO: 482235 - RNA, 22 nt, Human
cacagggcagagaccugggugc

SEQ ID NO: 482236 - RNA, 22 nt, Human
gcaggggcaggagaucucaggc

SEQ ID NO: 482237 - RNA, 22 nt, Human
uuaaagaugcagcuuuagagaa

SEQ ID NO: 482238 - RNA, 22 nt, Human
cagcugggcuaagaguagaggc

SEQ ID NO: 482239 - RNA, 22 nt, Human
gccugggaagacuaagugggag

SEQ ID NO: 482240 - RNA, 22 nt, Human
uauuucuugaguggucaguuuc

SEQ ID NO: 482241 - RNA, 22 nt, Human
ugggaugggaucucgcuguguc

SEQ ID NO: 482242 - RNA, 18 nt, Human
gggcaagcggcugucacc

SEQ ID NO: 482243 - RNA, 22 nt, Human
ccauggcauuuuaugugucuua

SEQ ID NO: 482244 - RNA, 22 nt, Human
agugaaauuuguuuagauaggu

SEQ ID NO: 482245 - RNA, 22 nt, Human
agcucccagggcugggcaaguu

SEQ ID NO: 482246 - RNA, 22 nt, Human
caggugggaccaugauagggca

SEQ ID NO: 482247 - RNA, 22 nt, Human
agcugugguucugggcagcgac

SEQ ID NO: 482248 - RNA, 22 nt, Human
cauuucauaguugucacaauaa

SEQ ID NO: 482249 - RNA, 16 nt, Human
ucagggcagaauggca

SEQ ID NO: 482250 - RNA, 22 nt, Human
ccagcuuguuugaagcucguca

SEQ ID NO: 482251 - RNA, 23 nt, Human
gggagccauggguggucauggag

SEQ ID NO: 482252 - RNA, 22 nt, Human
cuguugucuucauugucauauc

SEQ ID NO: 482253 - RNA, 22 nt, Human
agccagcuggagaccacuguuu

SEQ ID NO: 482254 - RNA, 22 nt, Human
ucugccugaaauucacauguaa

SEQ ID NO: 482255 - RNA, 22 nt, Human
uccaggcuggaaaugucaaacu

SEQ ID NO: 482256 - RNA, 21 nt, Human
agcagcugggcaacauggagg

SEQ ID NO: 482257 - RNA, 22 nt, Human
uaugaagaaguucugugaaaug

SEQ ID NO: 482258 - RNA, 22 nt, Human
cagcccucagguccucagcagc

SEQ ID NO: 482259 - RNA, 19 nt, Human
ggcuggaguggccaucugu

SEQ ID NO: 482260 - RNA, 22 nt, Human
agcagcauguucauuacauuau

SEQ ID NO: 482261 - RNA, 22 nt, Human
ugugugccagccuacgaggagc

SEQ ID NO: 482262 - RNA, 22 nt, Human
ccuuguccucugguuuccuguu

SEQ ID NO: 482263 - RNA, 22 nt, Human
ccacaaguuucagcacccagag

SEQ ID NO: 482264 - RNA, 22 nt, Human
cagugguggaaugaggaauugu

SEQ ID NO: 482265 - RNA, 22 nt, Human
gugggccuugcagggugcaggg

SEQ ID NO: 482266 - RNA, 22 nt, Human
accaggggugucaacagcauuu

SEQ ID NO: 482267 - RNA, 22 nt, Human
gcccagcagaucucagugucuc

SEQ ID NO: 482268 - RNA, 22 nt, Human
cugucauuuaagacauucugga

SEQ ID NO: 482269 - RNA, 22 nt, Human
cugucuccuccacugcauggga

SEQ ID NO: 482270 - RNA, 22 nt, Human
gauuucuucauucauuagaugg

SEQ ID NO: 482271 - RNA, 22 nt, Human
ggagauggcucugcaaggucua

SEQ ID NO: 482272 - RNA, 22 nt, Human
aaagccuucaaguagauguaag

SEQ ID NO: 482273 - RNA, 22 nt, Human
caagagcugugaccucauucac

SEQ ID NO: 482274 - RNA, 22 nt, Human
gcagcuggggccacacuuaggc

SEQ ID NO: 482275 - RNA, 22 nt, Human
ccuggcugguggcagcgacaag

SEQ ID NO: 482276 - RNA, 19 nt, Human
cagagccucagagcuagaa

SEQ ID NO: 482277 - RNA, 22 nt, Human
agcugacugaugaagaggccuu

SEQ ID NO: 482278 - RNA, 22 nt, Human
ccuggugcuuaccagagcuuuu

SEQ ID NO: 482279 - RNA, 22 nt, Human
uaaagcaggccacauaugugau

SEQ ID NO: 482280 - RNA, 22 nt, Human
ucuggcucuccagugcucuuag

SEQ ID NO: 482281 - RNA, 22 nt, Human
aauggcugggaguguauuuugg

SEQ ID NO: 482282 - RNA, 22 nt, Human
gaaauugucagcuucuuucagu

SEQ ID NO: 482283 - RNA, 20 nt, Human
uauuuagauucaaguaugga

SEQ ID NO: 482284 - RNA, 22 nt, Human
gucacuggggccacaugcagaa

SEQ ID NO: 482285 - RNA, 22 nt, Human
gccuucaggaaaucaguccuug

SEQ ID NO: 482286 - RNA, 22 nt, Human
gcagggucugaggccacagagg

SEQ ID NO: 482287 - RNA, 22 nt, Human
gagaugaauguaaacaaaggca

SEQ ID NO: 482288 - RNA, 19 nt, Human
gguaaaagugagcuucagg

SEQ ID NO: 482289 - RNA, 22 nt, Human
caguuucuucaucaguuaagca

SEQ ID NO: 482290 - RNA, 22 nt, Human
caggggaagaugccaagggaga

SEQ ID NO: 482291 - RNA, 22 nt, Human
aaagccaaaugaaagaugguuc

SEQ ID NO: 482292 - RNA, 22 nt, Human
gauuuucaugauaaacuuguga

SEQ ID NO: 482293 - RNA, 22 nt, Human
caguguacuuggaauguaacag

SEQ ID NO: 482294 - RNA, 22 nt, Human
aguggagaauaugcagaaagcc

SEQ ID NO: 482295 - RNA, 22 nt, Human
ugauuuccuaggucuggagaag

SEQ ID NO: 482296 - RNA, 22 nt, Human
uucuagaugauaaaccagcagc

SEQ ID NO: 482297 - RNA, 22 nt, Human
cagcuugugcaaagguccuggg

SEQ ID NO: 482298 - RNA, 22 nt, Human
uccaggcuagaagucacaggcc

SEQ ID NO: 482299 - RNA, 22 nt, Human
cuauuucugccuaaugaccugu

SEQ ID NO: 482300 - RNA, 22 nt, Human
ucaagagaagugcuccacagua

SEQ ID NO: 482301 - RNA, 22 nt, Human
agcagaggaggauuuaguuagg

SEQ ID NO: 482302 - RNA, 22 nt, Human
accugggagucacaccugagaa

SEQ ID NO: 482303 - RNA, 22 nt, Human
acaguggaauggugggccugca

SEQ ID NO: 482304 - RNA, 22 nt, Human
gugcagagaaaugagaagucga

SEQ ID NO: 482305 - RNA, 19 nt, Human
agggucaggacaaggacuu

SEQ ID NO: 482306 - RNA, 22 nt, Human
uggggugguaauacaccguucu

SEQ ID NO: 482307 - RNA, 19 nt, Human
gcuguauuaaagauacaug

SEQ ID NO: 482308 - RNA, 22 nt, Human
agauuucaauggauauugcaag

SEQ ID NO: 482309 - RNA, 22 nt, Human
gaguggggcguggauccagcgu

SEQ ID NO: 482310 - RNA, 22 nt, Human
ccuggccucuccgaguaaccug

SEQ ID NO: 482311 - RNA, 22 nt, Human
agaggccagcagugccuaucug

SEQ ID NO: 482312 - RNA, 22 nt, Human
aaacacaccuuuggaacuguga

SEQ ID NO: 482313 - RNA, 22 nt, Human
caguggguggcuaaguggcuga

SEQ ID NO: 482314 - RNA, 22 nt, Human
cugggccagauccagccucaca

SEQ ID NO: 482315 - RNA, 22 nt, Human
cagggcucaucugugugaccag

SEQ ID NO: 482316 - RNA, 22 nt, Human
ucaaaguccuugcuuuuucugu

SEQ ID NO: 482317 - RNA, 22 nt, Human
ucaugaaaauagaucagaaauu

SEQ ID NO: 482318 - RNA, 20 nt, Human
uugauaggcagcuugucagg

SEQ ID NO: 482319 - RNA, 22 nt, Human
gucugagaaucuugcauaucau

SEQ ID NO: 482320 - RNA, 22 nt, Human
ucucaggaauagaguggcagca

SEQ ID NO: 482321 - RNA, 22 nt, Human
ugcugguggagaaaguggaggu

SEQ ID NO: 482322 - RNA, 21 nt, Human
gggccacaccuucugcagacc

SEQ ID NO: 482323 - RNA, 22 nt, Human
agggcaugugggagaggagccu

SEQ ID NO: 482324 - RNA, 22 nt, Human
uugcucugaacccagggcacca

SEQ ID NO: 482325 - RNA, 21 nt, Human
agcagcugcaguuucuaucug

SEQ ID NO: 482326 - RNA, 22 nt, Human
agugcagagagcaauacucuac

SEQ ID NO: 482327 - RNA, 22 nt, Human
uuacaaagaguguucuuuucca

SEQ ID NO: 482328 - RNA, 22 nt, Human
ugcuugggaauguggagucaga

SEQ ID NO: 482329 - RNA, 22 nt, Human
ccagaagggcuauugcagugac

SEQ ID NO: 482330 - RNA, 17 nt, Human
agguggcugcugcgccu

SEQ ID NO: 482331 - RNA, 22 nt, Human
guauuaggagguggagccuuug

SEQ ID NO: 482332 - RNA, 22 nt, Human
uuagaucuuaggcaaauguguu

SEQ ID NO: 482333 - RNA, 22 nt, Human
acuguacaacugcugagcagaa

SEQ ID NO: 482334 - RNA, 22 nt, Human
auuucacucauucauguuacuu

SEQ ID NO: 482335 - RNA, 22 nt, Human
cuuacauugugugcaugagggg

SEQ ID NO: 482336 - RNA, 22 nt, Human
auagauauuugaguuguuucca

SEQ ID NO: 482337 - RNA, 20 nt, Human
ugcuggggacauacagggug

SEQ ID NO: 482338 - RNA, 22 nt, Human
gacauucacaguuuccgauggu

SEQ ID NO: 482339 - RNA, 22 nt, Human
uaaggcaccauaauauauuuaa

SEQ ID NO: 482340 - RNA, 21 nt, Human
uucuacaggaugaaugaaaac

SEQ ID NO: 482341 - RNA, 22 nt, Human
ucucucagggggaaggcugaag

SEQ ID NO: 482342 - RNA, 22 nt, Human
ggagcuguuggcagcuaucuug

SEQ ID NO: 482343 - RNA, 22 nt, Human
cagagcuguuacuauucaugaa

SEQ ID NO: 482344 - RNA, 22 nt, Human
agugccaggagcaaggagcucc

SEQ ID NO: 482345 - RNA, 22 nt, Human
uuugaaagacagaauauuuuug

SEQ ID NO: 482346 - RNA, 22 nt, Human
aaacuucagugaaugacuuaug

SEQ ID NO: 482347 - RNA, 17 nt, Human
ugcauguccuuuguucc

SEQ ID NO: 482348 - RNA, 22 nt, Human
augacagaaggccucccugaca

SEQ ID NO: 482349 - RNA, 22 nt, Human
gugugcagggggccagcgcagc

SEQ ID NO: 482350 - RNA, 22 nt, Human
ccagggcagugggagaaggugc

SEQ ID NO: 482351 - RNA, 22 nt, Human
ggagacagugacuuagagacug

SEQ ID NO: 482352 - RNA, 22 nt, Human
ccuggcagcaggugggcccgug

SEQ ID NO: 482353 - RNA, 22 nt, Human
gggcugagugucccaggccgaa

SEQ ID NO: 482354 - RNA, 21 nt, Human
ucccacucuaaauggacugaa

SEQ ID NO: 482355 - RNA, 22 nt, Human
ggggacaguuaaagaccaagac

SEQ ID NO: 482356 - RNA, 22 nt, Human
ggccucugcaacuggcuguggc

SEQ ID NO: 482357 - RNA, 22 nt, Human
aggccagaaaugucagggagug

SEQ ID NO: 482358 - RNA, 22 nt, Human
ccacagaggacaacugccuggc

SEQ ID NO: 482359 - RNA, 22 nt, Human
agaugcugugucuguucccuug

SEQ ID NO: 482360 - RNA, 22 nt, Human
aaugauuggcacuagauacaca

SEQ ID NO: 482361 - RNA, 22 nt, Human
agauguaaacucucaugucauu

SEQ ID NO: 482362 - RNA, 22 nt, Human
agagcugcaccuaugcagaccu

SEQ ID NO: 482363 - RNA, 22 nt, Human
ccugggcagggagaccaggcuc

SEQ ID NO: 482364 - RNA, 22 nt, Human
guugggaagcagauggaugagc

SEQ ID NO: 482365 - RNA, 18 nt, Human
accugccuguucuucucu

SEQ ID NO: 482366 - RNA, 22 nt, Human
aacaaaugauuguugguuggag

SEQ ID NO: 482367 - RNA, 22 nt, Human
cuguuuucaaagagagagaaug

SEQ ID NO: 482368 - RNA, 22 nt, Human
ucagugcuucggcgagcaccua

SEQ ID NO: 482369 - RNA, 22 nt, Human
ggugucuguugccuccugguua

SEQ ID NO: 482370 - RNA, 22 nt, Human
gccugccugcugugugcaaguu

SEQ ID NO: 482371 - RNA, 22 nt, Human
gcuguggccuggcgcagagcug

SEQ ID NO: 482372 - RNA, 22 nt, Human
gagccaccuucaacucaggaau

SEQ ID NO: 482373 - RNA, 22 nt, Human
ggucccaggaagugcggcggcg

SEQ ID NO: 482374 - RNA, 22 nt, Human
ucaggaauccagacagggcaca

SEQ ID NO: 482375 - RNA, 22 nt, Human
gagagaagaauguuccgaggcc

SEQ ID NO: 482376 - RNA, 22 nt, Human
cugcugugagugguucuugccu

SEQ ID NO: 482377 - RNA, 22 nt, Human
acagggccaggugagaggugcu

SEQ ID NO: 482378 - RNA, 22 nt, Human
aguauuucugcucaugaaagag

SEQ ID NO: 482379 - RNA, 22 nt, Human
ugggccugggagggcagacgcu

SEQ ID NO: 482380 - RNA, 22 nt, Human
aaguguuuauuuauaacgaucu

SEQ ID NO: 482381 - RNA, 18 nt, Human
gugagcagagagcaucac

SEQ ID NO: 482382 - RNA, 22 nt, Human
gcucugucaacagcuagcugug

SEQ ID NO: 482383 - RNA, 19 nt, Human
auuuccaagaauuggagag

SEQ ID NO: 482384 - RNA, 22 nt, Human
aagagcugcacauauuuauauc

SEQ ID NO: 482385 - RNA, 22 nt, Human
acauacuaugaauacauguguc

SEQ ID NO: 482386 - RNA, 22 nt, Human
ugcucuggggagcuccucugcg

SEQ ID NO: 482387 - RNA, 21 nt, Human
ccaggcuccugaggcugguca

SEQ ID NO: 482388 - RNA, 22 nt, Human
cggcugaggaucuccaggccug

SEQ ID NO: 482389 - RNA, 22 nt, Human
caggccugucugcacaugaggc

SEQ ID NO: 482390 - RNA, 22 nt, Human
agagggcauuaacucugucuug

SEQ ID NO: 482391 - RNA, 22 nt, Human
ugcugccacauuuaaagagggg

SEQ ID NO: 482392 - RNA, 22 nt, Human
auccaaaucaugucagaagaac

SEQ ID NO: 482393 - RNA, 22 nt, Human
aggagcugucagagugccagag

SEQ ID NO: 482394 - RNA, 22 nt, Human
ucagaggaccuuacugagaacc

SEQ ID NO: 482395 - RNA, 22 nt, Human
caggagcccguugcuccggcgg

SEQ ID NO: 482396 - RNA, 22 nt, Human
uaaucacaucaggguaaauggg

SEQ ID NO: 482397 - RNA, 22 nt, Human
gcagauggcagcccaggcuggg

SEQ ID NO: 482398 - RNA, 22 nt, Human
agggcuccuaugaugcucugcc

SEQ ID NO: 482399 - RNA, 22 nt, Human
uggagccugagucagcggaggc

SEQ ID NO: 482400 - RNA, 22 nt, Human
ucccagcgcggggggaggaucc

SEQ ID NO: 482401 - RNA, 22 nt, Human
agcaauauuuaaagguuugcaa

SEQ ID NO: 482402 - RNA, 22 nt, Human
cgcuggccauagccuccugugu

SEQ ID NO: 482403 - RNA, 22 nt, Human
ugcugccacaaauucagcugcc

SEQ ID NO: 482404 - RNA, 22 nt, Human
ugccuggguucccaccccaaag

SEQ ID NO: 482405 - RNA, 22 nt, Human
gggcugagagcuggaaucugag

SEQ ID NO: 482406 - RNA, 22 nt, Human
caggucagaggcgcagccccca

SEQ ID NO: 482407 - RNA, 22 nt, Human
uacacacaugcauuugccuuau

SEQ ID NO: 482408 - RNA, 22 nt, Human
agcagagcgccugcucagaggg

SEQ ID NO: 482409 - RNA, 21 nt, Human
agaaaaacacgauauaagccc

SEQ ID NO: 482410 - RNA, 19 nt, Human
aggaaagguggccuuagca

SEQ ID NO: 482411 - RNA, 22 nt, Human
uagaaaguaaaucaguuuuauu

SEQ ID NO: 482412 - RNA, 22 nt, Human
uguccucaaggagcuucagucu

SEQ ID NO: 482413 - RNA, 22 nt, Human
cuggugagacgguugacaggag

SEQ ID NO: 482414 - RNA, 22 nt, Human
ugcucacagcccagaacauaau

SEQ ID NO: 482415 - RNA, 22 nt, Human
aaaaaugcuuggacuuaauaaa

SEQ ID NO: 482416 - RNA, 22 nt, Human
ucagcaguguaguuuaucauuc

SEQ ID NO: 482417 - RNA, 16 nt, Human
gcagaggaaaggggag

SEQ ID NO: 482418 - RNA, 21 nt, Human
uggcaggcagcuggaagcuug

SEQ ID NO: 482419 - RNA, 22 nt, Human
acugucugcaaaacucauacuc

SEQ ID NO: 482420 - RNA, 20 nt, Human
aggcucaggguguuuaggaa

SEQ ID NO: 482421 - RNA, 22 nt, Human
caggcauggugagaacucagcc

SEQ ID NO: 482422 - RNA, 22 nt, Human
cuccagggaugagacagaguag

SEQ ID NO: 482423 - RNA, 22 nt, Human
ccuggagcccaaggcagugaga

SEQ ID NO: 482424 - RNA, 22 nt, Human
uucuucaaaauccagcaugauu

SEQ ID NO: 482425 - RNA, 22 nt, Human
auuuguaauuucuuaucugugu

SEQ ID NO: 482426 - RNA, 22 nt, Human
agcugucuuucugccuccugau

SEQ ID NO: 482427 - RNA, 22 nt, Human
aguggcagagcaggugcuggaa

SEQ ID NO: 482428 - RNA, 22 nt, Human
uuccucaggcuucccuuugucc

SEQ ID NO: 482429 - RNA, 22 nt, Human
acaggccugagauuuugcauuu

SEQ ID NO: 482430 - RNA, 22 nt, Human
augggaggaugcucgggugcuc

SEQ ID NO: 482431 - RNA, 22 nt, Human
cugccucaugcugccugcagcc

SEQ ID NO: 482432 - RNA, 22 nt, Human
uugucuuuggaaauuuaauguu

SEQ ID NO: 482433 - RNA, 22 nt, Human
aaagccagcaaggugaguuuca

SEQ ID NO: 482434 - RNA, 22 nt, Human
cagccaggagcucccccugcuc

SEQ ID NO: 482435 - RNA, 22 nt, Human
agaggccacuuugccugugaug

SEQ ID NO: 482436 - RNA, 22 nt, Human
uagcugccaaaagggugggcua

SEQ ID NO: 482437 - RNA, 22 nt, Human
cagggccaguucucgcagcagu

SEQ ID NO: 482438 - RNA, 22 nt, Human
ucagaggagaaguugggaaaau

SEQ ID NO: 482439 - RNA, 22 nt, Human
acuguggcgucaggaagaaauu

SEQ ID NO: 482440 - RNA, 22 nt, Human
ggugggcaggucacucugccuc

SEQ ID NO: 482441 - RNA, 22 nt, Human
gagcuuuaccuuagguucuguu

SEQ ID NO: 482442 - RNA, 22 nt, Human
aacaaccaaaaagaugaaugua

SEQ ID NO: 482443 - RNA, 22 nt, Human
cucaggagaugacagaagguau

SEQ ID NO: 482444 - RNA, 22 nt, Human
agaagggccagcuggacaccug

SEQ ID NO: 482445 - RNA, 22 nt, Human
ucgagucauguucucccauuaa

SEQ ID NO: 482446 - RNA, 22 nt, Human
uagagcugcuggacuguaacag

SEQ ID NO: 482447 - RNA, 22 nt, Human
cugcucuggucucuucauguuu

SEQ ID NO: 482448 - RNA, 22 nt, Human
aaaugugcuugugaucagcugu

SEQ ID NO: 482449 - RNA, 22 nt, Human
ccucuggcaacuucacagccca

SEQ ID NO: 482450 - RNA, 22 nt, Human
uucucuuauucuggauaugcag

SEQ ID NO: 482451 - RNA, 22 nt, Human
uagccaggcgaggucagugucg

SEQ ID NO: 482452 - RNA, 20 nt, Human
gcugccagugccugaugcuu

SEQ ID NO: 482453 - RNA, 19 nt, Human
ccagguggaacugagguag

SEQ ID NO: 482454 - RNA, 22 nt, Human
uuugcauuuccagaguagcaga

SEQ ID NO: 482455 - RNA, 22 nt, Human
cccaggcuggagugcaauggca

SEQ ID NO: 482456 - RNA, 22 nt, Human
aggaaagcucccaguagggcuc

SEQ ID NO: 482457 - RNA, 22 nt, Human
cucaggaggaugacugccuugg

SEQ ID NO: 482458 - RNA, 22 nt, Human
agcagggcaaagucaggcuaac

SEQ ID NO: 482459 - RNA, 19 nt, Human
aggcagcauucuggggcuu

SEQ ID NO: 482460 - RNA, 22 nt, Human
gcaggcagagucaauuugaucc

SEQ ID NO: 482461 - RNA, 22 nt, Human
uugcaagacacuuggaagcaca

SEQ ID NO: 482462 - RNA, 22 nt, Human
uuguacaaaggauuuggaagag

SEQ ID NO: 482463 - RNA, 22 nt, Human
guaagggauuugaacauagguu

SEQ ID NO: 482464 - RNA, 22 nt, Human
acugaaggucucagcaaggaug

SEQ ID NO: 482465 - RNA, 22 nt, Human
cagagccuaaaacgacuccacu

SEQ ID NO: 482466 - RNA, 16 nt, Human
gggcugggggauucug

SEQ ID NO: 482467 - RNA, 22 nt, Human
aaaugcagaucccugaaucuca

SEQ ID NO: 482468 - RNA, 22 nt, Human
gugccugcugcagagucgcugu

SEQ ID NO: 482469 - RNA, 22 nt, Human
ccaggguuuaaauucugacuau

SEQ ID NO: 482470 - RNA, 22 nt, Human
cccuuccucccaggcuucugug

SEQ ID NO: 482471 - RNA, 22 nt, Human
gcagaggagugauuaugccgug

SEQ ID NO: 482472 - RNA, 22 nt, Human
agugaaaacacuaguucuugcc

SEQ ID NO: 482473 - RNA, 22 nt, Human
uuaguuagucccugguaccuuu

SEQ ID NO: 482474 - RNA, 22 nt, Human
gcugcucuugaggggcucacug

SEQ ID NO: 482475 - RNA, 22 nt, Human
auucuagaugcuguaaguagca

SEQ ID NO: 482476 - RNA, 22 nt, Human
cagcuggcccuuugguagccuu

SEQ ID NO: 482477 - RNA, 22 nt, Human
gcagagcuaucuucuggauuug

SEQ ID NO: 482478 - RNA, 22 nt, Human
acaugauuaaaagauuuuaaag

SEQ ID NO: 482479 - RNA, 22 nt, Human
cagaguguugaccauaagccca

SEQ ID NO: 482480 - RNA, 22 nt, Human
ugggauggagccugaguauagu

SEQ ID NO: 482481 - RNA, 22 nt, Human
uggcagcacaagguggcccaug

SEQ ID NO: 482482 - RNA, 22 nt, Human
uaaacaagcugucugauauucu

SEQ ID NO: 482483 - RNA, 22 nt, Human
agagcuguggauaguccuggau

SEQ ID NO: 482484 - RNA, 22 nt, Human
cagcugagaccagaaugcaggu

SEQ ID NO: 482485 - RNA, 22 nt, Human
ucaaacuagccugacugguauu

SEQ ID NO: 482486 - RNA, 22 nt, Human
gccuggucucuuucaugucagu

SEQ ID NO: 482487 - RNA, 22 nt, Human
gggcagcucucacagcagccaa

SEQ ID NO: 482488 - RNA, 22 nt, Human
aaucuuucccuauuaaaugugg

SEQ ID NO: 482489 - RNA, 22 nt, Human
ccagagagggcgccaccuggag

SEQ ID NO: 482490 - RNA, 21 nt, Human
cagaggcaggcucugugugug

SEQ ID NO: 482491 - RNA, 22 nt, Human
guauuagggccaaaggcaggaa

SEQ ID NO: 482492 - RNA, 22 nt, Human
agagggcuggacgcagguugga

SEQ ID NO: 482493 - RNA, 22 nt, Human
agggggugcuacuuccagaguu

SEQ ID NO: 482494 - RNA, 22 nt, Human
uggggagugaugccucggauaa

SEQ ID NO: 482495 - RNA, 22 nt, Human
uucaggauggcggauguugggg

SEQ ID NO: 482496 - RNA, 22 nt, Human
guagggacaauauguuauuaga

SEQ ID NO: 482497 - RNA, 22 nt, Human
agggcugacaaauggcagugac

SEQ ID NO: 482498 - RNA, 22 nt, Human
ccuggcagacagcacugaagcu

SEQ ID NO: 482499 - RNA, 21 nt, Human
agucccaggggugagugaugu

SEQ ID NO: 482500 - RNA, 22 nt, Human
uugggcucaggaguuugagacc

SEQ ID NO: 482501 - RNA, 22 nt, Human
cagucccaguuugagacucugg

SEQ ID NO: 482502 - RNA, 22 nt, Human
aggcagccagauggcagccugc

SEQ ID NO: 482503 - RNA, 22 nt, Human
gaggggaagacuucuggacagu

SEQ ID NO: 482504 - RNA, 22 nt, Human
gcauggcaagaucaggagacca

SEQ ID NO: 482505 - RNA, 22 nt, Human
ggggauggauuccgggucccug

SEQ ID NO: 482506 - RNA, 22 nt, Human
uuauuuucuccucagaaagugg

SEQ ID NO: 482507 - RNA, 22 nt, Human
acauuucuuccuaauuaucccu

SEQ ID NO: 482508 - RNA, 22 nt, Human
uguguacacaaugauugcagag

SEQ ID NO: 482509 - RNA, 22 nt, Human
cccagacucaucccugggagcu

SEQ ID NO: 482510 - RNA, 22 nt, Human
auguaacuguuauauuuuguug

SEQ ID NO: 482511 - RNA, 22 nt, Human
gccugccugaaggcuguaccag

SEQ ID NO: 482512 - RNA, 20 nt, Human
ccucucugaagaggucaucu

SEQ ID NO: 482513 - RNA, 22 nt, Human
ucacaacucuuuccauuuaaua

SEQ ID NO: 482514 - RNA, 22 nt, Human
uaauuucuaauucauuuucagu

SEQ ID NO: 482515 - RNA, 22 nt, Human
aaagaggaaccaagagcacgug

SEQ ID NO: 482516 - RNA, 22 nt, Human
gccaggcagcaggaagccagug

SEQ ID NO: 482517 - RNA, 22 nt, Human
aagaggaacugggggcugaguc

SEQ ID NO: 482518 - RNA, 22 nt, Human
ugauggcuaucccuggaagggc

SEQ ID NO: 482519 - RNA, 22 nt, Human
ggugccaggcuguagucagggu

SEQ ID NO: 482520 - RNA, 22 nt, Human
agagaggcugggcguagggcuu

SEQ ID NO: 482521 - RNA, 22 nt, Human
uucuuuccccauggaguucgga

SEQ ID NO: 482522 - RNA, 22 nt, Human
ucucacucauuuccuaggucuu

SEQ ID NO: 482523 - RNA, 23 nt, Human
gagagcugacugucaagacuguu

SEQ ID NO: 482524 - RNA, 21 nt, Human
ugaaugaggaggauggcauuu

SEQ ID NO: 482525 - RNA, 22 nt, Human
ugcuggggguucagaugaguaa

SEQ ID NO: 482526 - RNA, 22 nt, Human
gccagcuggagacuggcagggg

SEQ ID NO: 482527 - RNA, 22 nt, Human
uggagccagcccaggccccucu

SEQ ID NO: 482528 - RNA, 22 nt, Human
agaggccuccgaaaggugggcu

SEQ ID NO: 482529 - RNA, 22 nt, Human
uuugaaauaugaggcauuauga

SEQ ID NO: 482530 - RNA, 22 nt, Human
ucaggcugcccguucagggcuc

SEQ ID NO: 482531 - RNA, 22 nt, Human
ucugucacuauuggccagaaca

SEQ ID NO: 482532 - RNA, 22 nt, Human
guuugcauuccaauuuagggga

SEQ ID NO: 482533 - RNA, 22 nt, Human
agagugaaaagcuagagcagua

SEQ ID NO: 482534 - RNA, 22 nt, Human
aauucuauaggcaagcuauuuu

SEQ ID NO: 482535 - RNA, 22 nt, Human
gaggcuggugguuaguuccauu

SEQ ID NO: 482536 - RNA, 22 nt, Human
cugcccugcccaggccuugggc

SEQ ID NO: 482537 - RNA, 22 nt, Human
aagccagggucaggggccuccu

SEQ ID NO: 482538 - RNA, 22 nt, Human
gagucugagaacugggcucagu

SEQ ID NO: 482539 - RNA, 22 nt, Human
ugcaguggaggccgugagacag

SEQ ID NO: 482540 - RNA, 22 nt, Human
agguaguguagcugagugggau

SEQ ID NO: 482541 - RNA, 22 nt, Human
ugacagcugagccccaggcaag

SEQ ID NO: 482542 - RNA, 22 nt, Human
ugcacacaaguuggagaaugaa

SEQ ID NO: 482543 - RNA, 22 nt, Human
aucuggaaaacacaguguagac

SEQ ID NO: 482544 - RNA, 22 nt, Human
caguguuccaggcggcagugaa

SEQ ID NO: 482545 - RNA, 22 nt, Human
gagcuuccacucuagaaggagu

SEQ ID NO: 482546 - RNA, 22 nt, Human
gggggcaguaaccucaaagugu

SEQ ID NO: 482547 - RNA, 22 nt, Human
gaggaaugucagcacaggccuc

SEQ ID NO: 482548 - RNA, 22 nt, Human
ggugacuggagggacccaggcc

SEQ ID NO: 482549 - RNA, 22 nt, Human
cuggcuggucaucagcaguacg

SEQ ID NO: 482550 - RNA, 22 nt, Human
aaucuggcauguaagcuuagag

SEQ ID NO: 482551 - RNA, 22 nt, Human
cacaggguuguucugaggauuc

SEQ ID NO: 482552 - RNA, 22 nt, Human
uccagagcagguggucagaagg

SEQ ID NO: 482553 - RNA, 22 nt, Human
ugcagggccaugguggcggcug

SEQ ID NO: 482554 - RNA, 21 nt, Human
ugaagccugaggcauagcccc

SEQ ID NO: 482555 - RNA, 22 nt, Human
ccugccuguaagauggguacaa

SEQ ID NO: 482556 - RNA, 22 nt, Human
cuuccucccggcccaugcucug

SEQ ID NO: 482557 - RNA, 22 nt, Human
aggaggccgggauucuggagau

SEQ ID NO: 482558 - RNA, 22 nt, Human
ggcaaaaaccauaauuacuuuu

SEQ ID NO: 482559 - RNA, 22 nt, Human
cugaaggagcauagucaguuuu

SEQ ID NO: 482560 - RNA, 22 nt, Human
aaggggaauagaguggguugug

SEQ ID NO: 482561 - RNA, 19 nt, Human
gaggaggaaaacuagugua

SEQ ID NO: 482562 - RNA, 22 nt, Human
uuaaguccuugguaauuuucuu

SEQ ID NO: 482563 - RNA, 22 nt, Human
agucucuuggcauucugaaaca

SEQ ID NO: 482564 - RNA, 22 nt, Human
aggcugcuuucauggccgcccc

SEQ ID NO: 482565 - RNA, 22 nt, Human
cccagccaaggugcugguguug

SEQ ID NO: 482566 - RNA, 22 nt, Human
ccaguccuggccaguaacauga

SEQ ID NO: 482567 - RNA, 17 nt, Human
ugccagccugucccagg

SEQ ID NO: 482568 - RNA, 22 nt, Human
gagcuggcuaauacugacuuau

SEQ ID NO: 482569 - RNA, 22 nt, Human
aggcuucagaaagaguaauugg

SEQ ID NO: 482570 - RNA, 22 nt, Human
cucagaagaacaaaggcucuac

SEQ ID NO: 482571 - RNA, 22 nt, Human
uggcuggcgccgggcuagccac

SEQ ID NO: 482572 - RNA, 22 nt, Human
cuucuuaaugcauaaacugugu

SEQ ID NO: 482573 - RNA, 20 nt, Human
ucagccagcuaacaugggga

SEQ ID NO: 482574 - RNA, 22 nt, Human
cucaggauccaucuccugcccu

SEQ ID NO: 482575 - RNA, 23 nt, Human
ugugaagguggguccaagggcug

SEQ ID NO: 482576 - RNA, 22 nt, Human
uuucagugcuucuguuuaccgg

SEQ ID NO: 482577 - RNA, 22 nt, Human
caggcacuggggaugcugggau

SEQ ID NO: 482578 - RNA, 22 nt, Human
gcuuuuucaaaugaaagcuggu

SEQ ID NO: 482579 - RNA, 22 nt, Human
uccucuggauauaagccucacc

SEQ ID NO: 482580 - RNA, 22 nt, Human
ggcaaaaacagcaaugacuuuu

SEQ ID NO: 482581 - RNA, 18 nt, Human
uggagcaggaagccuggc

SEQ ID NO: 482582 - RNA, 21 nt, Human
gcagagccugagguucuugag

SEQ ID NO: 482583 - RNA, 22 nt, Human
uacugugaauacaaaauaaauu

SEQ ID NO: 482584 - RNA, 22 nt, Human
aaucuggcauuugagaguagga

SEQ ID NO: 482585 - RNA, 22 nt, Human
ccaagggcucugacuugccugc

SEQ ID NO: 482586 - RNA, 22 nt, Human
ucacuugccuagcccaguucag

SEQ ID NO: 482587 - RNA, 22 nt, Human
gacagaagaggaacuuggacag

SEQ ID NO: 482588 - RNA, 22 nt, Human
agaacuguccuuggaggagagu

SEQ ID NO: 482589 - RNA, 22 nt, Human
uagaucugauacaauucaucug

SEQ ID NO: 482590 - RNA, 22 nt, Human
uaggcagcugcaaacuucgguc

SEQ ID NO: 482591 - RNA, 22 nt, Human
ugggcugcugucugcacaugcu

SEQ ID NO: 482592 - RNA, 22 nt, Human
cagaaauguucuaaugauucag

SEQ ID NO: 482593 - RNA, 22 nt, Human
cugccuugaggagguuguggga

SEQ ID NO: 482594 - RNA, 22 nt, Human
caggaagagaacauggaggcug

SEQ ID NO: 482595 - RNA, 22 nt, Human
cugcuuugaggggcucuguaua

SEQ ID NO: 482596 - RNA, 22 nt, Human
ggacucagcagccaggaguggc

SEQ ID NO: 482597 - RNA, 22 nt, Human
agcugacucuggccucuggucc

SEQ ID NO: 482598 - RNA, 22 nt, Human
agcagcaucucuuauugcagug

SEQ ID NO: 482599 - RNA, 19 nt, Human
ugcagaggguaggaaggcc

SEQ ID NO: 482600 - RNA, 22 nt, Human
agggccagcccauaaugccaaa

SEQ ID NO: 482601 - RNA, 19 nt, Human
agcuuccauauucucuagu

SEQ ID NO: 482602 - RNA, 22 nt, Human
caggagcugggucuggaagcag

SEQ ID NO: 482603 - RNA, 22 nt, Human
cauucucaauaguagaugagua

SEQ ID NO: 482604 - RNA, 22 nt, Human
ugauugaacugagcuucaagau

SEQ ID NO: 482605 - RNA, 22 nt, Human
caggcagcugacugucagauau

SEQ ID NO: 482606 - RNA, 22 nt, Human
ucaagauaccaccauuauaugu

SEQ ID NO: 482607 - RNA, 22 nt, Human
acuuccuggcguagcugacauu

SEQ ID NO: 482608 - RNA, 22 nt, Human
gugcauuugacgaauacucacu

SEQ ID NO: 482609 - RNA, 22 nt, Human
aaucaguuguccaaaguucaca

SEQ ID NO: 482610 - RNA, 22 nt, Human
cagggcagccaggccccguggg

SEQ ID NO: 482611 - RNA, 22 nt, Human
aagcagagccaccagcuuugga

SEQ ID NO: 482612 - RNA, 22 nt, Human
uaagaacagugacagccaacau

SEQ ID NO: 482613 - RNA, 22 nt, Human
auaaguucagguaaagaaauca

SEQ ID NO: 482614 - RNA, 22 nt, Human
acagcaggauuuggcgauguug

SEQ ID NO: 482615 - RNA, 22 nt, Human
auuauuagauucuuaauuguaa

SEQ ID NO: 482616 - RNA, 22 nt, Human
ugcauuauuugcaugugccugu

SEQ ID NO: 482617 - RNA, 22 nt, Human
ggcagaguugguggagucaguu

SEQ ID NO: 482618 - RNA, 22 nt, Human
ugcagggcuaagucagagccug

SEQ ID NO: 482619 - RNA, 22 nt, Human
cagggaguuuuuguuccucuag

SEQ ID NO: 482620 - RNA, 18 nt, Human
uggcucugcagccagaug

SEQ ID NO: 482621 - RNA, 22 nt, Human
ugaauaaacuaugaggaggaau

SEQ ID NO: 482622 - RNA, 22 nt, Human
caggagugaaaugaggcccagg

SEQ ID NO: 482623 - RNA, 23 nt, Human
cccagcagauuguaaagugucca

SEQ ID NO: 482624 - RNA, 22 nt, Human
gugaaggcuacaagagaucaag

SEQ ID NO: 482625 - RNA, 22 nt, Human
aggcuuccuggaggaagaggua

SEQ ID NO: 482626 - RNA, 22 nt, Human
ugaugcugcugggaguggugcu

SEQ ID NO: 482627 - RNA, 22 nt, Human
accugaggcuguuagucuaggu

SEQ ID NO: 482628 - RNA, 22 nt, Human
ugucccagucaaggcugucauc

SEQ ID NO: 482629 - RNA, 22 nt, Human
ugcccuguuaucuuggaagagu

SEQ ID NO: 482630 - RNA, 22 nt, Human
gcaggaggaucacuugagccca

SEQ ID NO: 482631 - RNA, 22 nt, Human
aaggccagcuuguagggcuggu

SEQ ID NO: 482632 - RNA, 22 nt, Human
gcugucaggaacaugccuuggu

SEQ ID NO: 482633 - RNA, 22 nt, Human
gccugugcauagcagcggacuc

SEQ ID NO: 482634 - RNA, 22 nt, Human
cccagcauccucagggagcggg

SEQ ID NO: 482635 - RNA, 22 nt, Human
gcuuccugagaaacaaucugau

SEQ ID NO: 482636 - RNA, 22 nt, Human
agucuccuuggccucaaugccu

SEQ ID NO: 482637 - RNA, 22 nt, Human
agcagcugggcucagagcuggg

SEQ ID NO: 482638 - RNA, 22 nt, Human
aggcucccaagcacugacccca

SEQ ID NO: 482639 - RNA, 22 nt, Human
gccagcaguauguccuggcagu

SEQ ID NO: 482640 - RNA, 22 nt, Human
agcagccaagguaaccugugcu

SEQ ID NO: 482641 - RNA, 22 nt, Human
aggguggagggagucccugagc

SEQ ID NO: 482642 - RNA, 22 nt, Human
ugugcagcuaguccuggacuug

SEQ ID NO: 482643 - RNA, 22 nt, Human
agguacagggugaaaguuuaug

SEQ ID NO: 482644 - RNA, 22 nt, Human
uggauuaaagauuaaaaugaca

SEQ ID NO: 482645 - RNA, 22 nt, Human
gaugcacugcaguauauacugu

SEQ ID NO: 482646 - RNA, 22 nt, Human
aaaaguauuggccaccauuucu

SEQ ID NO: 482647 - RNA, 22 nt, Human
cagcagcaggcgcacggccguc

SEQ ID NO: 482648 - RNA, 22 nt, Human
uuccuguccgcaauggccuggg

SEQ ID NO: 482649 - RNA, 22 nt, Human
gcuguccugggaacaggcacua

SEQ ID NO: 482650 - RNA, 22 nt, Human
gggagggacacaaagaguuccc

SEQ ID NO: 482651 - RNA, 22 nt, Human
aaucgguugaacccaggaagug

SEQ ID NO: 482652 - RNA, 22 nt, Human
ucaggcugcagcugucagcagc

SEQ ID NO: 482653 - RNA, 22 nt, Human
ucugcagauuuaucagcagcug

SEQ ID NO: 482654 - RNA, 18 nt, Human
gggcacuggggacuggag

SEQ ID NO: 482655 - RNA, 19 nt, Human
gcucugagaggggcauggg

SEQ ID NO: 482656 - RNA, 23 nt, Human
cccagcgcugagcccugcaggca

SEQ ID NO: 482657 - RNA, 22 nt, Human
cuggggacuugcagacacaauu

SEQ ID NO: 482658 - RNA, 22 nt, Human
ugcuggggcucugaccacucca

SEQ ID NO: 482659 - RNA, 22 nt, Human
gaggaguggaguugcuggguug

SEQ ID NO: 482660 - RNA, 22 nt, Human
gagugaaaaaggaagggccaua

SEQ ID NO: 482661 - RNA, 22 nt, Human
cagcaggaccauugaggcauca

SEQ ID NO: 482662 - RNA, 22 nt, Human
ccagcccucacugaggccucuc

SEQ ID NO: 482663 - RNA, 22 nt, Human
gcccuggaaucucuccauggga

SEQ ID NO: 482664 - RNA, 22 nt, Human
aguucccaggugaugcugaugu

SEQ ID NO: 482665 - RNA, 22 nt, Human
caguacuuggucaaggaagcag

SEQ ID NO: 482666 - RNA, 22 nt, Human
aaaauggucucagcuggcacca

SEQ ID NO: 482667 - RNA, 22 nt, Human
aggcaggcucaggcccaugcuu

SEQ ID NO: 482668 - RNA, 22 nt, Human
ugccacccagccaggaguggga

SEQ ID NO: 482669 - RNA, 20 nt, Human
cccagagccauagccagaca

SEQ ID NO: 482670 - RNA, 18 nt, Human
ggaaaccacaggguucug

SEQ ID NO: 482671 - RNA, 22 nt, Human
augacagaggagugcaggugau

SEQ ID NO: 482672 - RNA, 21 nt, Human
guauucuuuaugaagugaaaa

SEQ ID NO: 482673 - RNA, 22 nt, Human
cagggcagagccaggauuucaa

SEQ ID NO: 482674 - RNA, 22 nt, Human
gagaggaguaggcugauggugc

SEQ ID NO: 482675 - RNA, 22 nt, Human
uuaugcaaaggggccucuuccu

SEQ ID NO: 482676 - RNA, 22 nt, Human
aguucucagcuuaguaugcugu

SEQ ID NO: 482677 - RNA, 22 nt, Human
ccaggcugagcaugauuggagc

SEQ ID NO: 482678 - RNA, 22 nt, Human
uggccugccccgagauccuggc

SEQ ID NO: 482679 - RNA, 22 nt, Human
cugcucuguuaauuaaacuuug

SEQ ID NO: 482680 - RNA, 22 nt, Human
ccagaaggcggagauugcagug

SEQ ID NO: 482681 - RNA, 22 nt, Human
caaaggcaguuacugaaugaag

SEQ ID NO: 482682 - RNA, 22 nt, Human
uccuggugucgccuggucaguu

SEQ ID NO: 482683 - RNA, 22 nt, Human
caggauggccccggggcugugc

SEQ ID NO: 482684 - RNA, 19 nt, Human
uugaaagauuagcuuucua

SEQ ID NO: 482685 - RNA, 22 nt, Human
guauuuauaggggaaugagagu

SEQ ID NO: 482686 - RNA, 22 nt, Human
uggggcagcagaccuuucuugg

SEQ ID NO: 482687 - RNA, 22 nt, Human
ugucccagaucacaggagggga

SEQ ID NO: 482688 - RNA, 22 nt, Human
gaggcaguggucugaugcaagg

SEQ ID NO: 482689 - RNA, 22 nt, Human
ucaagcaggguagcaagcuggu

SEQ ID NO: 482690 - RNA, 22 nt, Human
accagcucagaagccagaaaga

SEQ ID NO: 482691 - RNA, 22 nt, Human
agcugcucuugggugacuucaa

SEQ ID NO: 482692 - RNA, 22 nt, Human
ccugcccagcuucaccucaggc

SEQ ID NO: 482693 - RNA, 22 nt, Human
agcuggagccagugugaggcuu

SEQ ID NO: 482694 - RNA, 22 nt, Human
aaugauguauuaguacaacaca

SEQ ID NO: 482695 - RNA, 22 nt, Human
gugugcagaagacacaagacau

SEQ ID NO: 482696 - RNA, 21 nt, Human
aucuggaagaacugguaagug

SEQ ID NO: 482697 - RNA, 22 nt, Human
auaugcauaugucaaaacuuau

SEQ ID NO: 482698 - RNA, 22 nt, Human
aguuuuucuccccuggcuucau

SEQ ID NO: 482699 - RNA, 22 nt, Human
agggcagagcacugaauuggga

SEQ ID NO: 482700 - RNA, 20 nt, Human
ucagaggcugccagcugggg

SEQ ID NO: 482701 - RNA, 22 nt, Human
uuccaggacaagauguuucagg

SEQ ID NO: 482702 - RNA, 22 nt, Human
acagugaaugcccaagaaaagu

SEQ ID NO: 482703 - RNA, 22 nt, Human
gcaggugggggucggugcaucu

SEQ ID NO: 482704 - RNA, 19 nt, Human
ugagaggcuuaaggcagcu

SEQ ID NO: 482705 - RNA, 22 nt, Human
uuacaggggacauuggggacau

SEQ ID NO: 482706 - RNA, 22 nt, Human
cauugcacaucugagaagagau

SEQ ID NO: 482707 - RNA, 22 nt, Human
ucaccaggcuccuguuaagaug

SEQ ID NO: 482708 - RNA, 22 nt, Human
ugucuccucauacugucauauu

SEQ ID NO: 482709 - RNA, 22 nt, Human
ugcugccaggucuugcugucca

SEQ ID NO: 482710 - RNA, 22 nt, Human
ugucaugcccaggagcaaggua

SEQ ID NO: 482711 - RNA, 21 nt, Human
cauuucuauugaugagaaaag

SEQ ID NO: 482712 - RNA, 22 nt, Human
ccaccaggacagcccugagggg

SEQ ID NO: 482713 - RNA, 19 nt, Human
auuugaaagcugugcuugc

SEQ ID NO: 482714 - RNA, 22 nt, Human
uauuucuuguuauucucguuga

SEQ ID NO: 482715 - RNA, 18 nt, Human
aggcaggugcuggaaguc

SEQ ID NO: 482716 - RNA, 22 nt, Human
ucacauuuucauauucucugag

SEQ ID NO: 482717 - RNA, 23 nt, Human
acagcaagaggaccagaugugag

SEQ ID NO: 482718 - RNA, 22 nt, Human
ccaggccaaauucagucagcag

SEQ ID NO: 482719 - RNA, 21 nt, Human
aaacugaccuugccugagaca

SEQ ID NO: 482720 - RNA, 22 nt, Human
aauuucaaugcacucaugguug

SEQ ID NO: 482721 - RNA, 22 nt, Human
acauuuaaccaaacuguuuaau

SEQ ID NO: 482722 - RNA, 20 nt, Human
ccugggcuccaggagccccg

SEQ ID NO: 482723 - RNA, 22 nt, Human
acacugcagaugaaagcauaag

SEQ ID NO: 482724 - RNA, 22 nt, Human
ucuuuacaucacaauuguaugg

SEQ ID NO: 482725 - RNA, 22 nt, Human
ucuguccucuuugaagcugcuc

SEQ ID NO: 482726 - RNA, 22 nt, Human
agucucugcaugccugcugugc

SEQ ID NO: 482727 - RNA, 22 nt, Human
agcugucagugcugugccugua

SEQ ID NO: 482728 - RNA, 22 nt, Human
gcuucuauuauuuggagcugag

SEQ ID NO: 482729 - RNA, 22 nt, Human
cuguacucaagguaaaccagga

SEQ ID NO: 482730 - RNA, 22 nt, Human
ugggcacaaacaucugccuguu

SEQ ID NO: 482731 - RNA, 22 nt, Human
gccuggagggauagaaugcaag

SEQ ID NO: 482732 - RNA, 22 nt, Human
acugagcucuugacugggaguu

SEQ ID NO: 482733 - RNA, 21 nt, Human
guccagagagccggcuccuga

SEQ ID NO: 482734 - RNA, 22 nt, Human
ucugccuguucaagucuucuag

SEQ ID NO: 482735 - RNA, 19 nt, Human
uugguggugguuuugguuc

SEQ ID NO: 482736 - RNA, 22 nt, Human
ucccaggugaugcugaggccac

SEQ ID NO: 482737 - RNA, 22 nt, Human
cuuauaaaguccaucugaacaa

SEQ ID NO: 482738 - RNA, 22 nt, Human
acagcuuuucaauucugcugag

SEQ ID NO: 482739 - RNA, 22 nt, Human
uggcugagguaacuaugaauaa

SEQ ID NO: 482740 - RNA, 22 nt, Human
uuucucauagucaugccucuua

SEQ ID NO: 482741 - RNA, 22 nt, Human
gcucaggaaaacagucuaguaa

SEQ ID NO: 482742 - RNA, 22 nt, Human
uacagagaguacagcauccaca

SEQ ID NO: 482743 - RNA, 22 nt, Human
agcagggccaacaguaaacacc

SEQ ID NO: 482744 - RNA, 22 nt, Human
gcuguggcugaccaccaggggg

SEQ ID NO: 482745 - RNA, 22 nt, Human
agcuuuaugaggagaccuuagu

SEQ ID NO: 482746 - RNA, 22 nt, Human
cuggcucaguucuugguuuuca

SEQ ID NO: 482747 - RNA, 22 nt, Human
gagcucugacugcugggugaca

SEQ ID NO: 482748 - RNA, 22 nt, Human
ucaggcugugggcacuggccau

SEQ ID NO: 482749 - RNA, 22 nt, Human
uggcucagauuuuuguaggcuu

SEQ ID NO: 482750 - RNA, 23 nt, Human
ccugugugcccuuaauucacagc

SEQ ID NO: 482751 - RNA, 22 nt, Human
cugcccuguuuggacagcccgg

SEQ ID NO: 482752 - RNA, 22 nt, Human
cuugaaagucacaugcagcccu

SEQ ID NO: 482753 - RNA, 22 nt, Human
agggcuggagccacagcuggga

SEQ ID NO: 482754 - RNA, 22 nt, Human
cagcugccagcuucucuccauc

SEQ ID NO: 482755 - RNA, 22 nt, Human
ugaagaagccaauugguaggcu

SEQ ID NO: 482756 - RNA, 22 nt, Human
agccacagucaaccuguccaua

SEQ ID NO: 482757 - RNA, 22 nt, Human
gagagugucgggggccccagga

SEQ ID NO: 482758 - RNA, 22 nt, Human
uaugacaagguggaguaugagu

SEQ ID NO: 482759 - RNA, 22 nt, Human
guggccagaagacugcaaugcu

SEQ ID NO: 482760 - RNA, 22 nt, Human
caggauggagggagggcuguua

SEQ ID NO: 482761 - RNA, 22 nt, Human
acaguguccuuguggucccugu

SEQ ID NO: 482762 - RNA, 22 nt, Human
aacuuaaacccacucauguaga

SEQ ID NO: 482763 - RNA, 22 nt, Human
uuucuuccuuaccuuacuagag

SEQ ID NO: 482764 - RNA, 22 nt, Human
uggagcauauucuggagcuugg

SEQ ID NO: 482765 - RNA, 22 nt, Human
gaggcagcaugguaccuuggag

SEQ ID NO: 482766 - RNA, 22 nt, Human
ccacugcccccugaagaccagg

SEQ ID NO: 482767 - RNA, 22 nt, Human
guaaaauucuagcaucugaaag

SEQ ID NO: 482768 - RNA, 22 nt, Human
gaggaaccaaaucagcuugcac

SEQ ID NO: 482769 - RNA, 22 nt, Human
ggcucugggucuguggggagcg

SEQ ID NO: 482770 - RNA, 22 nt, Human
aggagucauaaaugugaacaaa

SEQ ID NO: 482771 - RNA, 22 nt, Human
ggccaggagauggacaccacau

SEQ ID NO: 482772 - RNA, 22 nt, Human
uuuugaaagccagguuuguaug

SEQ ID NO: 482773 - RNA, 22 nt, Human
ucccagcauuaaugccugucag

SEQ ID NO: 482774 - RNA, 22 nt, Human
gcauuuauuucuuuacugcauc

SEQ ID NO: 482775 - RNA, 22 nt, Human
cuugcaggcagggccuccugga

SEQ ID NO: 482776 - RNA, 22 nt, Human
gccugagacagugugguccaau

SEQ ID NO: 482777 - RNA, 22 nt, Human
uuccucuuucucugugcuaugu

SEQ ID NO: 482778 - RNA, 22 nt, Human
aggagagagaacacuugggucc

SEQ ID NO: 482779 - RNA, 22 nt, Human
ugucucagaguaucccugaacu

SEQ ID NO: 482780 - RNA, 22 nt, Human
uuuuaucagcagggauaacaag

SEQ ID NO: 482781 - RNA, 22 nt, Human
cugcaggaauucaaagugagcu

SEQ ID NO: 482782 - RNA, 22 nt, Human
ucagcugccucucccuggaaga

SEQ ID NO: 482783 - RNA, 20 nt, Human
uggagcuccagcguccaugu

SEQ ID NO: 482784 - RNA, 22 nt, Human
cagcaggguauacagggaauuu

SEQ ID NO: 482785 - RNA, 22 nt, Human
agaucacaguggcaacucccuu

SEQ ID NO: 482786 - RNA, 22 nt, Human
cacagggcagugcugcccacuc

SEQ ID NO: 482787 - RNA, 22 nt, Human
aggcugggcaccguuuugaucc

SEQ ID NO: 482788 - RNA, 22 nt, Human
aucuggcuuucuuaaugacuua

SEQ ID NO: 482789 - RNA, 22 nt, Human
ucuuucuacaucauuugcuucu

SEQ ID NO: 482790 - RNA, 22 nt, Human
cuuggucauuucuuguccuguu

SEQ ID NO: 482791 - RNA, 22 nt, Human
aggauccugcgcuuugggggag

SEQ ID NO: 482792 - RNA, 22 nt, Human
cagagcuguauuuaucuuucca

SEQ ID NO: 482793 - RNA, 22 nt, Human
uggcagaguggaccauacucaa

SEQ ID NO: 482794 - RNA, 18 nt, Human
acugugguuuauguguag

SEQ ID NO: 482795 - RNA, 22 nt, Human
acccagcuguuucccgugucau

SEQ ID NO: 482796 - RNA, 22 nt, Human
acucugcuuauugcugcaggca

SEQ ID NO: 482797 - RNA, 22 nt, Human
aggcugaaaacgagauggcaau

SEQ ID NO: 482798 - RNA, 22 nt, Human
gauggggaugagaagugagcag

SEQ ID NO: 482799 - RNA, 22 nt, Human
ucaaaggcuugugguucuggga

SEQ ID NO: 482800 - RNA, 23 nt, Human
cacuccuguuucuaagccagcau

SEQ ID NO: 482801 - RNA, 21 nt, Human
caugaagccgguucccuguuu

SEQ ID NO: 482802 - RNA, 22 nt, Human
cagcagcucccauccgcugagc

SEQ ID NO: 482803 - RNA, 22 nt, Human
agcgugaaggcgggcagucggc

SEQ ID NO: 482804 - RNA, 21 nt, Human
cucaggauggcggccuggugg

SEQ ID NO: 482805 - RNA, 21 nt, Human
uggcugagccaggugugugga

SEQ ID NO: 482806 - RNA, 22 nt, Human
cuggagaggcugggaacagguu

SEQ ID NO: 482807 - RNA, 22 nt, Human
gugugccaacaaaagacagugc

SEQ ID NO: 482808 - RNA, 22 nt, Human
ugcagagguuuccaggcaaguu

SEQ ID NO: 482809 - RNA, 22 nt, Human
uggcacugccuggcagggcccc

SEQ ID NO: 482810 - RNA, 22 nt, Human
augucuuucucacagccaguuc

SEQ ID NO: 482811 - RNA, 22 nt, Human
ugaggcucaagaaagauuuguu

SEQ ID NO: 482812 - RNA, 22 nt, Human
ccaaggagcaaggcucaacaag

SEQ ID NO: 482813 - RNA, 22 nt, Human
ucauugaauuucacagcuuuau

SEQ ID NO: 482814 - RNA, 22 nt, Human
augaaacugggauaacuauagc

SEQ ID NO: 482815 - RNA, 22 nt, Human
gagggcagagucuaaugaugca

SEQ ID NO: 482816 - RNA, 22 nt, Human
ccagggcauccucacaucgcag

SEQ ID NO: 482817 - RNA, 22 nt, Human
aguccaaggagagacagcauuu

SEQ ID NO: 482818 - RNA, 22 nt, Human
gucccagaaacauauugcuggu

SEQ ID NO: 482819 - RNA, 22 nt, Human
ucacauuuauuucaaaguuacu

SEQ ID NO: 482820 - RNA, 22 nt, Human
aaauuauuaugccccucuauaa

SEQ ID NO: 482821 - RNA, 22 nt, Human
auuuugaaaccaaguuauuucc

SEQ ID NO: 482822 - RNA, 22 nt, Human
ccauggccgccgcugcucagga

SEQ ID NO: 482823 - RNA, 22 nt, Human
uccaagaucuacagcaguuuag

SEQ ID NO: 482824 - RNA, 22 nt, Human
ugaagcagagugaaggugaauu

SEQ ID NO: 482825 - RNA, 22 nt, Human
cagcuccccaugguuccugaag

SEQ ID NO: 482826 - RNA, 22 nt, Human
ggccccacgggggaguccuagu

SEQ ID NO: 482827 - RNA, 22 nt, Human
aaagagcuucauuuccauuuau

SEQ ID NO: 482828 - RNA, 22 nt, Human
ccagggcaugggaagaacugaa

SEQ ID NO: 482829 - RNA, 22 nt, Human
agcaauaacagaaaacuuuccu

SEQ ID NO: 482830 - RNA, 22 nt, Human
guguccaucagcagccacugug

SEQ ID NO: 482831 - RNA, 17 nt, Human
acagggcagaaacagcu

SEQ ID NO: 482832 - RNA, 22 nt, Human
acagaauacuacagacugguua

SEQ ID NO: 482833 - RNA, 22 nt, Human
uacaaagucagaauaacaggug

SEQ ID NO: 482834 - RNA, 22 nt, Human
ggagaagcagcuucuugaugaa

SEQ ID NO: 482835 - RNA, 22 nt, Human
acaguaaaucaacagaauaucu

SEQ ID NO: 482836 - RNA, 22 nt, Human
gucagagagggcacgugcacac

SEQ ID NO: 482837 - RNA, 20 nt, Human
aagagcauaguacaggaaga

SEQ ID NO: 482838 - RNA, 22 nt, Human
ucccagagcagaugugcuaaag

SEQ ID NO: 482839 - RNA, 20 nt, Human
gggugagauguaggagaggg

SEQ ID NO: 482840 - RNA, 23 nt, Human
ucaggauauugugugccaaggug

SEQ ID NO: 482841 - RNA, 22 nt, Human
auaugucgcuacaucauuagau

SEQ ID NO: 482842 - RNA, 22 nt, Human
augucuaaaagauaaaguuuaa

SEQ ID NO: 482843 - RNA, 22 nt, Human
ugaggcagggagaguggauaug

SEQ ID NO: 482844 - RNA, 22 nt, Human
cacagagagcuacgugcagcgu

SEQ ID NO: 482845 - RNA, 22 nt, Human
gggcugagaauucagcuuuccu

SEQ ID NO: 482846 - RNA, 22 nt, Human
uaaaucccuacaucuguguuuu

SEQ ID NO: 482847 - RNA, 22 nt, Human
cagagcuggagaaguggauuua

SEQ ID NO: 482848 - RNA, 19 nt, Human
cucagcuguagcucaugug

SEQ ID NO: 482849 - RNA, 22 nt, Human
ggcagggcaggaaagucaggaa

SEQ ID NO: 482850 - RNA, 22 nt, Human
gaaggccacaagagaaguuaag

SEQ ID NO: 482851 - RNA, 22 nt, Human
aggcugucucaccucaggaggg

SEQ ID NO: 482852 - RNA, 22 nt, Human
ccuuggaggacugcugcuucuu

SEQ ID NO: 482853 - RNA, 22 nt, Human
ugccaggagagugcaugcaggg

SEQ ID NO: 482854 - RNA, 20 nt, Human
cccuccagcaaccaggacuu

SEQ ID NO: 482855 - RNA, 22 nt, Human
ugggcagaauugugguaguuaa

SEQ ID NO: 482856 - RNA, 18 nt, Human
ugcccagaaaagcaggga

SEQ ID NO: 482857 - RNA, 22 nt, Human
ucucagggcgcagugaggcagu

SEQ ID NO: 482858 - RNA, 22 nt, Human
gcucucugccuuucucaaugac

SEQ ID NO: 482859 - RNA, 22 nt, Human
auuuauuaagcaucugcuaugu

SEQ ID NO: 482860 - RNA, 22 nt, Human
gaugggcguggcgcguuuggug

SEQ ID NO: 482861 - RNA, 22 nt, Human
ccugggcauaaaucacuccaag

SEQ ID NO: 482862 - RNA, 22 nt, Human
aucugccuccaaguccaugugu

SEQ ID NO: 482863 - RNA, 22 nt, Human
aguauacauauauuagccuucg

SEQ ID NO: 482864 - RNA, 22 nt, Human
gcagccacacuguuacagaaug

SEQ ID NO: 482865 - RNA, 23 nt, Human
ccucagcauggcaggagcccagc

SEQ ID NO: 482866 - RNA, 22 nt, Human
ggccucuggucaagacaagcau

SEQ ID NO: 482867 - RNA, 22 nt, Human
aguuuagaguucaaauuaguuc

SEQ ID NO: 482868 - RNA, 22 nt, Human
uauuucugaggcccaggaagug

SEQ ID NO: 482869 - RNA, 22 nt, Human
uucucuagguuuuagaugaaga

SEQ ID NO: 482870 - RNA, 22 nt, Human
uggcagaggaggcucagauuga

SEQ ID NO: 482871 - RNA, 22 nt, Human
cuggacagaaagggcugcugug

SEQ ID NO: 482872 - RNA, 17 nt, Human
uggagcugcguguguuc

SEQ ID NO: 482873 - RNA, 22 nt, Human
uggcucaguggcagccgcagcu

SEQ ID NO: 482874 - RNA, 22 nt, Human
auaauuuaaauuaguaugugau

SEQ ID NO: 482875 - RNA, 22 nt, Human
ugcagggagggcccagcaaucu

SEQ ID NO: 482876 - RNA, 22 nt, Human
uaccacuacauuugcuaauggc

SEQ ID NO: 482877 - RNA, 22 nt, Human
aggugucugggcuuuggaguca

SEQ ID NO: 482878 - RNA, 22 nt, Human
uuguaacaaucugucauaaaug

SEQ ID NO: 482879 - RNA, 17 nt, Human
agggacagcaguuuagg

SEQ ID NO: 482880 - RNA, 22 nt, Human
ccaggaagccucagaugcugag

SEQ ID NO: 482881 - RNA, 22 nt, Human
cagagcugugauaaauagauau

SEQ ID NO: 482882 - RNA, 22 nt, Human
aggcaucugaguuugcaagcuu

SEQ ID NO: 482883 - RNA, 22 nt, Human
gccuucugauugcuggacugac

SEQ ID NO: 482884 - RNA, 22 nt, Human
gcccugcugucuucagaguaua

SEQ ID NO: 482885 - RNA, 22 nt, Human
acacccagagcgccagugccga

SEQ ID NO: 482886 - RNA, 22 nt, Human
cuggagguaauguuauuuuugu

SEQ ID NO: 482887 - RNA, 22 nt, Human
aguuacaaccaugacacaagca

SEQ ID NO: 482888 - RNA, 22 nt, Human
ccagagucuaugaguccucauu

SEQ ID NO: 482889 - RNA, 22 nt, Human
gaggaacccagcugggguugcc

SEQ ID NO: 482890 - RNA, 22 nt, Human
uaaggccauuauggugggcccg

SEQ ID NO: 482891 - RNA, 20 nt, Human
uuuuuccuucucuacaggca

SEQ ID NO: 482892 - RNA, 22 nt, Human
uuucacaaucaaauggugaaau

SEQ ID NO: 482893 - RNA, 22 nt, Human
ucuggccaacaaaaacuaaguc

SEQ ID NO: 482894 - RNA, 22 nt, Human
augcaguguuuggaagcuuaag

SEQ ID NO: 482895 - RNA, 22 nt, Human
aacagaaaucauuuagggcucu

SEQ ID NO: 482896 - RNA, 22 nt, Human
acaagagacaagagguucuucu

SEQ ID NO: 482897 - RNA, 22 nt, Human
ugaggaaacuuacaaggcagaa

SEQ ID NO: 482898 - RNA, 22 nt, Human
accagggcaaauguuuguacuc

SEQ ID NO: 482899 - RNA, 22 nt, Human
gaggcucaacccacagggguug

SEQ ID NO: 482900 - RNA, 22 nt, Human
uuuguuuacucauucauugaug

SEQ ID NO: 482901 - RNA, 22 nt, Human
agauuucucuuucccuggcuga

SEQ ID NO: 482902 - RNA, 22 nt, Human
ugcugcacaauuggaaaguauc

SEQ ID NO: 482903 - RNA, 22 nt, Human
ccugccagggccuuggaagaaa

SEQ ID NO: 482904 - RNA, 22 nt, Human
ugcagccaucgcagagucugua

SEQ ID NO: 482905 - RNA, 22 nt, Human
gguguagcucugugucccacug

SEQ ID NO: 482906 - RNA, 22 nt, Human
uauucauaguaaacaaaagugg

SEQ ID NO: 482907 - RNA, 22 nt, Human
ccuuuauucaauuaguccuaau

SEQ ID NO: 482908 - RNA, 22 nt, Human
ggagaagccacacauugggugu

SEQ ID NO: 482909 - RNA, 22 nt, Human
cugggccuuggauugacacugu

SEQ ID NO: 482910 - RNA, 22 nt, Human
aaaugaccagaauacaggcuuc

SEQ ID NO: 482911 - RNA, 22 nt, Human
gggagagaugcugauugccaau

SEQ ID NO: 482912 - RNA, 22 nt, Human
ccuggagcaggagcugcagagg

SEQ ID NO: 482913 - RNA, 22 nt, Human
agagacaggguuuugucguguu

SEQ ID NO: 482914 - RNA, 22 nt, Human
ccaguggacuucucccuguggu

SEQ ID NO: 482915 - RNA, 22 nt, Human
acccugagucagacagccugac

SEQ ID NO: 482916 - RNA, 22 nt, Human
cagggugcagugucgcugcuag

SEQ ID NO: 482917 - RNA, 22 nt, Human
cagggcagggauguugcggcag

SEQ ID NO: 482918 - RNA, 22 nt, Human
ccacagggugucaucagcuuga

SEQ ID NO: 482919 - RNA, 23 nt, Human
gccucugcucugcguuggggacu

SEQ ID NO: 482920 - RNA, 22 nt, Human
acagcagccuuguugguuucga

SEQ ID NO: 482921 - RNA, 22 nt, Human
guuguauagagggcaugaaucu

SEQ ID NO: 482922 - RNA, 22 nt, Human
aucauaaagugcuaucugauug

SEQ ID NO: 482923 - RNA, 22 nt, Human
uggcugagagucauccugugug

SEQ ID NO: 482924 - RNA, 22 nt, Human
gaggcucugugaugugccaggc

SEQ ID NO: 482925 - RNA, 22 nt, Human
aaagcaaugaugguagacacgu

SEQ ID NO: 482926 - RNA, 19 nt, Human
gcuuuaguuuacucaucua

SEQ ID NO: 482927 - RNA, 22 nt, Human
augaggcagucuggccugaggg

SEQ ID NO: 482928 - RNA, 17 nt, Human
agugaaauuuacauugc

SEQ ID NO: 482929 - RNA, 22 nt, Human
gcaguaaaaaaggauaugugca

SEQ ID NO: 482930 - RNA, 22 nt, Human
auugaaagaguuuucugcugca

SEQ ID NO: 482931 - RNA, 21 nt, Human
agagaauugccuuagauguuc

SEQ ID NO: 482932 - RNA, 22 nt, Human
cagugcagucaaggaagaacca

SEQ ID NO: 482933 - RNA, 22 nt, Human
ucuccugugcacccucccugug

SEQ ID NO: 482934 - RNA, 22 nt, Human
acagccuggccugaguuaaggc

SEQ ID NO: 482935 - RNA, 19 nt, Human
gugaggauacugcucagag

SEQ ID NO: 482936 - RNA, 21 nt, Human
uauacaugugugcauacgugu

SEQ ID NO: 482937 - RNA, 22 nt, Human
uauaauuuuagaagagauggaa

SEQ ID NO: 482938 - RNA, 22 nt, Human
cagaguccuggacacagagaca

SEQ ID NO: 482939 - RNA, 22 nt, Human
uuacaaagcguugagacaagua

SEQ ID NO: 482940 - RNA, 22 nt, Human
ugugaagcuggauccuggagcu

SEQ ID NO: 482941 - RNA, 22 nt, Human
ugugaagguaaggaggggcaag

SEQ ID NO: 482942 - RNA, 22 nt, Human
ucugaacauccagcaaugcaca

SEQ ID NO: 482943 - RNA, 22 nt, Human
agggccuggaacuggagaccac

SEQ ID NO: 482944 - RNA, 22 nt, Human
ucagaaauguaagcugaugacu

SEQ ID NO: 482945 - RNA, 22 nt, Human
cagcagugucuccagcaucaca

SEQ ID NO: 482946 - RNA, 22 nt, Human
ggcccugagcugaaguacugug

SEQ ID NO: 482947 - RNA, 22 nt, Human
gacuguacuugagagaggaacu

SEQ ID NO: 482948 - RNA, 22 nt, Human
gucuggaguggggccugagaau

SEQ ID NO: 482949 - RNA, 21 nt, Human
cccuugccugcacuccucggc

SEQ ID NO: 482950 - RNA, 22 nt, Human
cuggcagggugggcuuugcuuu

SEQ ID NO: 482951 - RNA, 22 nt, Human
cagagcuggagggaacccuggc

SEQ ID NO: 482952 - RNA, 22 nt, Human
aagagguaaccauagcaaccac

SEQ ID NO: 482953 - RNA, 22 nt, Human
ccucagggccaucucugucccu

SEQ ID NO: 482954 - RNA, 17 nt, Human
cagggcugucugccuag

SEQ ID NO: 482955 - RNA, 22 nt, Human
cagcaggauaugguggagagag

SEQ ID NO: 482956 - RNA, 18 nt, Human
acauacauucugucugca

SEQ ID NO: 482957 - RNA, 22 nt, Human
ucauuacagagauauaaucuac

SEQ ID NO: 482958 - RNA, 22 nt, Human
cucuggaauguuuacaugcccu

SEQ ID NO: 482959 - RNA, 22 nt, Human
ucugccagugguuuggcccuga

SEQ ID NO: 482960 - RNA, 17 nt, Human
gaauuucuuggucaaaa

SEQ ID NO: 482961 - RNA, 22 nt, Human
gccuaggagacaagcgugaaag

SEQ ID NO: 482962 - RNA, 22 nt, Human
aggcacugaccugcuuccuuga

SEQ ID NO: 482963 - RNA, 22 nt, Human
aggcccuggcacugccugggag

SEQ ID NO: 482964 - RNA, 22 nt, Human
ucuggccugggccugccggugc

SEQ ID NO: 482965 - RNA, 22 nt, Human
auuuucauggcuucugcucagu

SEQ ID NO: 482966 - RNA, 22 nt, Human
gcuggcagggacagcugcgugu

SEQ ID NO: 482967 - RNA, 22 nt, Human
uaguuauuauuguuacuaucag

SEQ ID NO: 482968 - RNA, 22 nt, Human
aagggcucugcugucucucccc

SEQ ID NO: 482969 - RNA, 22 nt, Human
ucagaacagaagcuggcuauaa

SEQ ID NO: 482970 - RNA, 22 nt, Human
ggaugcacgaaggcgccucgga

SEQ ID NO: 482971 - RNA, 22 nt, Human
gaggcucaccuagggagcacug

SEQ ID NO: 482972 - RNA, 22 nt, Human
ucaggcugaaggaggccuaucu

SEQ ID NO: 482973 - RNA, 20 nt, Human
ugccaggcugcacgccugcc

SEQ ID NO: 482974 - RNA, 22 nt, Human
uccuggagauaauugcagugaa

SEQ ID NO: 482975 - RNA, 22 nt, Human
ccucaggggucacugugaggag

SEQ ID NO: 482976 - RNA, 19 nt, Human
agccuggagggcuggucac

SEQ ID NO: 482977 - RNA, 22 nt, Human
ucacauacacuaggauauuuuu

SEQ ID NO: 482978 - RNA, 22 nt, Human
gugagcaggauaggggcucccu

SEQ ID NO: 482979 - RNA, 22 nt, Human
ccuggagccccucuggccagcc

SEQ ID NO: 482980 - RNA, 22 nt, Human
uucccaguuagucauuuuuaca

SEQ ID NO: 482981 - RNA, 22 nt, Human
ucccaggguccucuucuggaau

SEQ ID NO: 482982 - RNA, 22 nt, Human
gucaaguuuauccgcucauuca

SEQ ID NO: 482983 - RNA, 21 nt, Human
aggagcuguguuagcuggucg

SEQ ID NO: 482984 - RNA, 22 nt, Human
uuaauuuuaaccuguuuguguc

SEQ ID NO: 482985 - RNA, 22 nt, Human
ucugucaccauucagcuugaau

SEQ ID NO: 482986 - RNA, 22 nt, Human
aaguuacaggagaaagagauca

SEQ ID NO: 482987 - RNA, 22 nt, Human
ucugagcauugaauuuucuucc

SEQ ID NO: 482988 - RNA, 22 nt, Human
gcaggcuccaggccggccccuu

SEQ ID NO: 482989 - RNA, 22 nt, Human
ccaaguacagauuccuccacug

SEQ ID NO: 482990 - RNA, 22 nt, Human
ggguaccaagcugcuugggggc

SEQ ID NO: 482991 - RNA, 22 nt, Human
acugucuuguguuaaagaacca

SEQ ID NO: 482992 - RNA, 22 nt, Human
uccagcuuugagauuuuaugga

SEQ ID NO: 482993 - RNA, 22 nt, Human
auucuucugccuacuuucaucc

SEQ ID NO: 482994 - RNA, 20 nt, Human
agguggcuccugcugggggu

SEQ ID NO: 482995 - RNA, 22 nt, Human
uggcucagcgguggcagcagac

SEQ ID NO: 482996 - RNA, 22 nt, Human
ccuggcagcagcacaugccuuc

SEQ ID NO: 482997 - RNA, 22 nt, Human
cugagccaaccacagcaggagc

SEQ ID NO: 482998 - RNA, 22 nt, Human
guuucauucggcagcucauaag

SEQ ID NO: 482999 - RNA, 22 nt, Human
ucugucugcaccuaagcacagu

SEQ ID NO: 483000 - RNA, 22 nt, Human
gccagggcucgcggucccucgu

SEQ ID NO: 483001 - RNA, 22 nt, Human
guuuacaaauauuuuaaauggu

SEQ ID NO: 483002 - RNA, 22 nt, Human
acauuuacagugcuagacaauc

SEQ ID NO: 483003 - RNA, 22 nt, Human
aggagcugagucagcccgacag

SEQ ID NO: 483004 - RNA, 22 nt, Human
aggcucagcccaagguggagag

SEQ ID NO: 483005 - RNA, 22 nt, Human
gcugucugagaacaugguggaa

SEQ ID NO: 483006 - RNA, 22 nt, Human
cucugagaaagcugugagcuaa

SEQ ID NO: 483007 - RNA, 22 nt, Human
guccuggggauuauagaguguu

SEQ ID NO: 483008 - RNA, 22 nt, Human
cagaguguauucugcaguugca

SEQ ID NO: 483009 - RNA, 22 nt, Human
cuuauguauauuuggaacguac

SEQ ID NO: 483010 - RNA, 22 nt, Human
auuauuaggugcucucugacaa

SEQ ID NO: 483011 - RNA, 22 nt, Human
cucccaagggguaagggagcug

SEQ ID NO: 483012 - RNA, 22 nt, Human
ggccccaggaccuccacggucc

SEQ ID NO: 483013 - RNA, 22 nt, Human
ucagagaaaugaaguagggauu

SEQ ID NO: 483014 - RNA, 22 nt, Human
uggaccugagccuggcccugcc

SEQ ID NO: 483015 - RNA, 22 nt, Human
uccuugaagcuuguaucuaaua

SEQ ID NO: 483016 - RNA, 20 nt, Human
ccacaggaguccagucgacc

SEQ ID NO: 483017 - RNA, 22 nt, Human
gccagggaggcuguaggguccu

SEQ ID NO: 483018 - RNA, 22 nt, Human
caguuuuugccauuaagaguaa

SEQ ID NO: 483019 - RNA, 22 nt, Human
uacaaaguagaaauucaguaaa

SEQ ID NO: 483020 - RNA, 22 nt, Human
ggcagagaugugggucagaauc

SEQ ID NO: 483021 - RNA, 22 nt, Human
agcugagagguggcaagcugua

SEQ ID NO: 483022 - RNA, 22 nt, Human
gggauggcucaaaggagucagg

SEQ ID NO: 483023 - RNA, 22 nt, Human
accaaggaagagauucucaguu

SEQ ID NO: 483024 - RNA, 22 nt, Human
uagcagcugugaguaaaagcca

SEQ ID NO: 483025 - RNA, 20 nt, Human
ccuggcugcauucaggacgg

SEQ ID NO: 483026 - RNA, 22 nt, Human
gcauuguccugcuucugagugu

SEQ ID NO: 483027 - RNA, 21 nt, Human
uaaggccaagucuauuucugu

SEQ ID NO: 483028 - RNA, 22 nt, Human
accaggcagucaccguccagga

SEQ ID NO: 483029 - RNA, 22 nt, Human
agcuuuauauaaaagaguacau

SEQ ID NO: 483030 - RNA, 22 nt, Human
uccaggcuggccucgcgugaca

SEQ ID NO: 483031 - RNA, 22 nt, Human
uuucauguuuauggaaaaugag

SEQ ID NO: 483032 - RNA, 22 nt, Human
gcacccagaggucagcagugcu

SEQ ID NO: 483033 - RNA, 22 nt, Human
cuucuuuacuuucuagaaauaa

SEQ ID NO: 483034 - RNA, 22 nt, Human
gaggccugguuugcaugagaau

SEQ ID NO: 483035 - RNA, 22 nt, Human
gagccuggauugucaccgacuu

SEQ ID NO: 483036 - RNA, 22 nt, Human
gcucccagcuggagccucaaca

SEQ ID NO: 483037 - RNA, 22 nt, Human
aggccagguuccucaaucuuga

SEQ ID NO: 483038 - RNA, 22 nt, Human
cucccagggccaucgagucacu

SEQ ID NO: 483039 - RNA, 22 nt, Human
uaagaacaucuguccccagauu

SEQ ID NO: 483040 - RNA, 22 nt, Human
gccagcucagugccaggccccu

SEQ ID NO: 483041 - RNA, 22 nt, Human
uaggccagaggagcagcuuugg

SEQ ID NO: 483042 - RNA, 22 nt, Human
uuuccucuuugugacacagcug

SEQ ID NO: 483043 - RNA, 22 nt, Human
cagucucuaaaucaaucugaau

SEQ ID NO: 483044 - RNA, 22 nt, Human
agcagcaugaugacagagucuc

SEQ ID NO: 483045 - RNA, 22 nt, Human
cucacaggcaucucaucaggcu

SEQ ID NO: 483046 - RNA, 22 nt, Human
auacauguuguaccauauguuu

SEQ ID NO: 483047 - RNA, 17 nt, Human
ggcaccagacggagagu

SEQ ID NO: 483048 - RNA, 22 nt, Human
cccugcagcuuuugcauaguca

SEQ ID NO: 483049 - RNA, 22 nt, Human
aggucauuggggacuaucuccg

SEQ ID NO: 483050 - RNA, 21 nt, Human
agaugaggauacugaggccua

SEQ ID NO: 483051 - RNA, 21 nt, Human
cugcucuggggaccggcugug

SEQ ID NO: 483052 - RNA, 22 nt, Human
gguguccaucaggcugugcuuc

SEQ ID NO: 483053 - RNA, 22 nt, Human
cagggcaguaacgggaacaucu

SEQ ID NO: 483054 - RNA, 22 nt, Human
aguaaaauuucugcugaggaga

SEQ ID NO: 483055 - RNA, 19 nt, Human
ccaggccucuggggccugu

SEQ ID NO: 483056 - RNA, 22 nt, Human
aaaauccacaacgcucauuuca

SEQ ID NO: 483057 - RNA, 22 nt, Human
uggcaggaaaaagggccagagg

SEQ ID NO: 483058 - RNA, 18 nt, Human
gacccagcagaugggcuu

SEQ ID NO: 483059 - RNA, 22 nt, Human
agaccauagggaccucagguug

SEQ ID NO: 483060 - RNA, 22 nt, Human
ugaggcuggcaaggcugguauu

SEQ ID NO: 483061 - RNA, 22 nt, Human
acagagaaagugggcugaagau

SEQ ID NO: 483062 - RNA, 21 nt, Human
ugaggcucaucuuauguggcu

SEQ ID NO: 483063 - RNA, 22 nt, Human
cugaggucaauuaaucaacaac

SEQ ID NO: 483064 - RNA, 22 nt, Human
cagagcugcuucccaguuugug

SEQ ID NO: 483065 - RNA, 22 nt, Human
cugagaaaggaccucaaacagg

SEQ ID NO: 483066 - RNA, 22 nt, Human
aggcuuccgaguagcugggacu

SEQ ID NO: 483067 - RNA, 22 nt, Human
gagcuuuagcugagaccugcuu

SEQ ID NO: 483068 - RNA, 22 nt, Human
uugggcaaaguguuucuggagc

SEQ ID NO: 483069 - RNA, 22 nt, Human
cucacugcccugaaguuggguu

SEQ ID NO: 483070 - RNA, 22 nt, Human
gagaggagguggcuaugacagc

SEQ ID NO: 483071 - RNA, 22 nt, Human
aggagcagaacuguuguggagg

SEQ ID NO: 483072 - RNA, 22 nt, Human
guccucugacucagccuuggga

SEQ ID NO: 483073 - RNA, 22 nt, Human
uggauaaacucacuguaaguug

SEQ ID NO: 483074 - RNA, 22 nt, Human
cagggccugagggcugcucugc

SEQ ID NO: 483075 - RNA, 22 nt, Human
ucauuucuaucuaugcagcuuc

SEQ ID NO: 483076 - RNA, 22 nt, Human
aaggaagagucuagaacaggca

SEQ ID NO: 483077 - RNA, 22 nt, Human
ucaugacaacuauauuauucca

SEQ ID NO: 483078 - RNA, 18 nt, Human
cugaggcuggcaggagcc

SEQ ID NO: 483079 - RNA, 22 nt, Human
agcaagcuaccuagauagucua

SEQ ID NO: 483080 - RNA, 22 nt, Human
gacaggggucccucugggcugu

SEQ ID NO: 483081 - RNA, 22 nt, Human
uugaaagggauauaucuuucug

SEQ ID NO: 483082 - RNA, 22 nt, Human
auagugguuggauaugucagag

SEQ ID NO: 483083 - RNA, 22 nt, Human
augaggcaucugcagucacuag

SEQ ID NO: 483084 - RNA, 22 nt, Human
cuggagccgcauggagcaggga

SEQ ID NO: 483085 - RNA, 22 nt, Human
acccagcuaacccuacccugga

SEQ ID NO: 483086 - RNA, 20 nt, Human
acuggagccaucucagccua

SEQ ID NO: 483087 - RNA, 22 nt, Human
gccuccccugcaauuguccuug

SEQ ID NO: 483088 - RNA, 19 nt, Human
acacugaauguagaauugg

SEQ ID NO: 483089 - RNA, 22 nt, Human
gccaccagggggugcaaggucc

SEQ ID NO: 483090 - RNA, 22 nt, Human
aaaggccacuugaaggauuuuu

SEQ ID NO: 483091 - RNA, 22 nt, Human
gagagucuagugcaccuaguuu

SEQ ID NO: 483092 - RNA, 22 nt, Human
cuguguccucccgcugcaccca

SEQ ID NO: 483093 - RNA, 22 nt, Human
ccaggcaggcgauggugcagug

SEQ ID NO: 483094 - RNA, 22 nt, Human
ggcacugagaggcucuuccuaa

SEQ ID NO: 483095 - RNA, 22 nt, Human
aagaaugucguugguauuuuaa

SEQ ID NO: 483096 - RNA, 20 nt, Human
uguggcaggaugagggcgga

SEQ ID NO: 483097 - RNA, 22 nt, Human
ugggggagauugugcaucucua

SEQ ID NO: 483098 - RNA, 22 nt, Human
gccuggcaaggcccuguugacu

SEQ ID NO: 483099 - RNA, 23 nt, Human
agcagggccagaauacuugcugu

SEQ ID NO: 483100 - RNA, 22 nt, Human
gcugaaggcccggaggacaggg

SEQ ID NO: 483101 - RNA, 22 nt, Human
uggcugccuagugucugagcag

SEQ ID NO: 483102 - RNA, 22 nt, Human
ccagccuccauguagauagcug

SEQ ID NO: 483103 - RNA, 22 nt, Human
caggccugugaguugaggcccc

SEQ ID NO: 483104 - RNA, 22 nt, Human
agggccagagucuguguagaua

SEQ ID NO: 483105 - RNA, 22 nt, Human
caagcccaggauuccccaguua

SEQ ID NO: 483106 - RNA, 22 nt, Human
gagcaacaguuuaugguuuuuc

SEQ ID NO: 483107 - RNA, 22 nt, Human
ucccagagucagagguggggcc

SEQ ID NO: 483108 - RNA, 22 nt, Human
cucuuaaaaacuugauauauuu

SEQ ID NO: 483109 - RNA, 22 nt, Human
gcuggcugcgucaucacagggc

SEQ ID NO: 483110 - RNA, 22 nt, Human
acagaggaaggcugagcugccc

SEQ ID NO: 483111 - RNA, 22 nt, Human
aaaaaucacuuuuauaggcagc

SEQ ID NO: 483112 - RNA, 22 nt, Human
aucuggcuuuuacugaauugcu

SEQ ID NO: 483113 - RNA, 22 nt, Human
augaggcaguacacacaaagcc

SEQ ID NO: 483114 - RNA, 22 nt, Human
gcugccugcacagagcugcuuu

SEQ ID NO: 483115 - RNA, 22 nt, Human
ucagagccaaucauggugcauu

SEQ ID NO: 483116 - RNA, 22 nt, Human
gaccagagaaaggcacuggaag

SEQ ID NO: 483117 - RNA, 17 nt, Human
ucuuuccugccaugcuc

SEQ ID NO: 483118 - RNA, 22 nt, Human
gcugcagcaagcccuccagggg

SEQ ID NO: 483119 - RNA, 22 nt, Human
aagaugauguuguguuuucacu

SEQ ID NO: 483120 - RNA, 22 nt, Human
aggcaguuguagagagggcucu

SEQ ID NO: 483121 - RNA, 22 nt, Human
cugaaggauuagagagcacuua

SEQ ID NO: 483122 - RNA, 22 nt, Human
uccuggagagugggcgagcaca

SEQ ID NO: 483123 - RNA, 22 nt, Human
gauuucaaguaucuugggcgag

SEQ ID NO: 483124 - RNA, 22 nt, Human
uucagagacagcaaccaggaca

SEQ ID NO: 483125 - RNA, 22 nt, Human
ugcugcacucaccaacagauaa

SEQ ID NO: 483126 - RNA, 22 nt, Human
cacagguggcuccaaguuagag

SEQ ID NO: 483127 - RNA, 22 nt, Human
guguuuccuaguuuaaugaaug

SEQ ID NO: 483128 - RNA, 22 nt, Human
gagccagguuggaggcugcagu

SEQ ID NO: 483129 - RNA, 18 nt, Human
gguggcaggucagaugcc

SEQ ID NO: 483130 - RNA, 22 nt, Human
auuucacaucuaucucagauuu

SEQ ID NO: 483131 - RNA, 22 nt, Human
aucuggcuuacgaagcacuggu

SEQ ID NO: 483132 - RNA, 22 nt, Human
ucacauuuuaucuauuuuaagu

SEQ ID NO: 483133 - RNA, 22 nt, Human
cauuuucucaaugaacccucuu

SEQ ID NO: 483134 - RNA, 22 nt, Human
auaguuguguggggauucuggu

SEQ ID NO: 483135 - RNA, 22 nt, Human
ucaagagauugaauaauaacug

SEQ ID NO: 483136 - RNA, 22 nt, Human
cccagggcccuggacagcuaca

SEQ ID NO: 483137 - RNA, 22 nt, Human
gcacugcagccucagauggugg

SEQ ID NO: 483138 - RNA, 22 nt, Human
cagcuuggcuuccgcuuuacug

SEQ ID NO: 483139 - RNA, 22 nt, Human
uccucugccccagaugaaauuu

SEQ ID NO: 483140 - RNA, 22 nt, Human
gccuccugaaaggaagagcucc

SEQ ID NO: 483141 - RNA, 22 nt, Human
auuuaacaagacagagaacugg

SEQ ID NO: 483142 - RNA, 22 nt, Human
uccucagaaaccccugugaggu

SEQ ID NO: 483143 - RNA, 19 nt, Human
agacagagacugaaauaga

SEQ ID NO: 483144 - RNA, 22 nt, Human
agaagccagaauauucauggau

SEQ ID NO: 483145 - RNA, 22 nt, Human
ugcagggcacggugcgcguggg

SEQ ID NO: 483146 - RNA, 22 nt, Human
cugcccuguggcucugagucau

SEQ ID NO: 483147 - RNA, 22 nt, Human
gucauugcaguggcaaaucaca

SEQ ID NO: 483148 - RNA, 22 nt, Human
caguccugugucccuugguggg

SEQ ID NO: 483149 - RNA, 22 nt, Human
uucuuuccucccagccuuugga

SEQ ID NO: 483150 - RNA, 22 nt, Human
aaaugccucugcuguacacaau

SEQ ID NO: 483151 - RNA, 22 nt, Human
ccagggugaggaggcucccacg

SEQ ID NO: 483152 - RNA, 20 nt, Human
cagcugccuggcucugggau

SEQ ID NO: 483153 - RNA, 22 nt, Human
gaggcucagagugguuaaauaa

SEQ ID NO: 483154 - RNA, 22 nt, Human
uuaugggagcaauuggggaggu

SEQ ID NO: 483155 - RNA, 22 nt, Human
ucacauuuguucuugaaucuaa

SEQ ID NO: 483156 - RNA, 22 nt, Human
uacuguauuugauaagugaagu

SEQ ID NO: 483157 - RNA, 22 nt, Human
cuguacaggucaaugauaagau

SEQ ID NO: 483158 - RNA, 22 nt, Human
ccaaagugcugagauuacaggu

SEQ ID NO: 483159 - RNA, 22 nt, Human
agaggaugauuuuaaggacacu

SEQ ID NO: 483160 - RNA, 22 nt, Human
gagcagcuggacaggccucccu

SEQ ID NO: 483161 - RNA, 22 nt, Human
ugcccuuggguaacuugcugau

SEQ ID NO: 483162 - RNA, 22 nt, Human
cuguaaaacugcuuaaguaugc

SEQ ID NO: 483163 - RNA, 22 nt, Human
ccagguguagcacugcucacag

SEQ ID NO: 483164 - RNA, 22 nt, Human
accaucuuaaggggacuucuua

SEQ ID NO: 483165 - RNA, 22 nt, Human
gcagagcccuggggguauggug

SEQ ID NO: 483166 - RNA, 22 nt, Human
gcugcucuggcucugcaguguc

SEQ ID NO: 483167 - RNA, 22 nt, Human
agugcaauguguacagaaaaau

SEQ ID NO: 483168 - RNA, 22 nt, Human
cagacagcugcuuucuugcugu

SEQ ID NO: 483169 - RNA, 22 nt, Human
augucuuucaaauucugccuag

SEQ ID NO: 483170 - RNA, 22 nt, Human
ugcaauaaagugcuauaaaucc

SEQ ID NO: 483171 - RNA, 22 nt, Human
ugcccauguuucucuguauccc

SEQ ID NO: 483172 - RNA, 22 nt, Human
agcccagcaaagggagguucag

SEQ ID NO: 483173 - RNA, 22 nt, Human
gaggcagagucacaaagagucu

SEQ ID NO: 483174 - RNA, 22 nt, Human
ucacaggcuugugaacauugca

SEQ ID NO: 483175 - RNA, 22 nt, Human
cugcagggaccacaagcagguu

SEQ ID NO: 483176 - RNA, 22 nt, Human
uggcugggggugcuauagcugc

SEQ ID NO: 483177 - RNA, 22 nt, Human
cugggccauggaagucucugcc

SEQ ID NO: 483178 - RNA, 22 nt, Human
aaugauggucauggcaacuuuu

SEQ ID NO: 483179 - RNA, 22 nt, Human
auacuaagcucauuacauuuug

SEQ ID NO: 483180 - RNA, 21 nt, Human
ggccucugucauccugggaag

SEQ ID NO: 483181 - RNA, 22 nt, Human
aggagguggcugaacuugaggg

SEQ ID NO: 483182 - RNA, 22 nt, Human
uccacauucucuguuacagaua

SEQ ID NO: 483183 - RNA, 22 nt, Human
agagacagaggcaauauagcuu

SEQ ID NO: 483184 - RNA, 22 nt, Human
caaaagaagcucuuggggcuag

SEQ ID NO: 483185 - RNA, 23 nt, Human
gcccaugcuguugggcccgagca

SEQ ID NO: 483186 - RNA, 22 nt, Human
ugcucauuggcgaucugaggga

SEQ ID NO: 483187 - RNA, 22 nt, Human
ugugaaggcagagccagugaaa

SEQ ID NO: 483188 - RNA, 23 nt, Human
agugagcagcuguagggcaagga

SEQ ID NO: 483189 - RNA, 22 nt, Human
cugcaggguuuuucaaggacaa

SEQ ID NO: 483190 - RNA, 22 nt, Human
uguggccuugcagccuggaggu

SEQ ID NO: 483191 - RNA, 22 nt, Human
auacuuuggucacuauuauugg

SEQ ID NO: 483192 - RNA, 17 nt, Human
ucagagggaugagcagg

SEQ ID NO: 483193 - RNA, 22 nt, Human
cccaagaucuuucgugcacuaa

SEQ ID NO: 483194 - RNA, 22 nt, Human
auggagugggccaauuuuagug

SEQ ID NO: 483195 - RNA, 22 nt, Human
acauaugcucaucugcauuccc

SEQ ID NO: 483196 - RNA, 22 nt, Human
ggcuucuccagguacugagcau

SEQ ID NO: 483197 - RNA, 22 nt, Human
uccuugaauggacauuacacug

SEQ ID NO: 483198 - RNA, 22 nt, Human
aauggacaggagagcauaguca

SEQ ID NO: 483199 - RNA, 22 nt, Human
ucaggcagagcuguggagcucu

SEQ ID NO: 483200 - RNA, 22 nt, Human
ucagggcauggcugcacuuggc

SEQ ID NO: 483201 - RNA, 22 nt, Human
ggcugggagcuggacaggccgg

SEQ ID NO: 483202 - RNA, 22 nt, Human
ucagagaguuuucacuagggug

SEQ ID NO: 483203 - RNA, 22 nt, Human
gaugugagugguagcugggauu

SEQ ID NO: 483204 - RNA, 22 nt, Human
aaguucaaggaagccuccaguu

SEQ ID NO: 483205 - RNA, 20 nt, Human
uggagccacagucagguucc

SEQ ID NO: 483206 - RNA, 22 nt, Human
uguguacaagaguguuuacugu

SEQ ID NO: 483207 - RNA, 22 nt, Human
uggcucaggauaauuuucccaa

SEQ ID NO: 483208 - RNA, 22 nt, Human
ccucacuggccagccaggggug

SEQ ID NO: 483209 - RNA, 22 nt, Human
ucacagacaauuguuuuggugu

SEQ ID NO: 483210 - RNA, 22 nt, Human
uuccagagaaaagguuuauuuc

SEQ ID NO: 483211 - RNA, 22 nt, Human
ucagugcagaauagugaugcau

SEQ ID NO: 483212 - RNA, 22 nt, Human
cucaucugauaaaucacucuua

SEQ ID NO: 483213 - RNA, 22 nt, Human
uggcacagacagaucaggaguc

SEQ ID NO: 483214 - RNA, 22 nt, Human
ccuggcaggcuggggacagugc

SEQ ID NO: 483215 - RNA, 22 nt, Human
ucuggcuccuggcuccacugcc

SEQ ID NO: 483216 - RNA, 22 nt, Human
agggcagaaaucgauuacaccu

SEQ ID NO: 483217 - RNA, 22 nt, Human
ucuuccugaaacccuguuccag

SEQ ID NO: 483218 - RNA, 22 nt, Human
acaaaugcagcauaaagugaac

SEQ ID NO: 483219 - RNA, 22 nt, Human
gugugcagggcugccugugccg

SEQ ID NO: 483220 - RNA, 22 nt, Human
aggaagccuggcauuaaaaagc

SEQ ID NO: 483221 - RNA, 22 nt, Human
auuuguuccacacauauuuacu

SEQ ID NO: 483222 - RNA, 22 nt, Human
uugccaggagcucaucugaggg

SEQ ID NO: 483223 - RNA, 22 nt, Human
ccuguacauggccaucuuuacc

SEQ ID NO: 483224 - RNA, 22 nt, Human
ugucccagacauaaguggacau

SEQ ID NO: 483225 - RNA, 22 nt, Human
cucccuggaggugagcuggcac

SEQ ID NO: 483226 - RNA, 21 nt, Human
auccuugaucagaagagugcu

SEQ ID NO: 483227 - RNA, 20 nt, Human
ugcagggcucugcuucucuc

SEQ ID NO: 483228 - RNA, 23 nt, Human
uggcagcagaucuuaaagugacc

SEQ ID NO: 483229 - RNA, 22 nt, Human
gcuuuaaauggcuugcccaagu

SEQ ID NO: 483230 - RNA, 22 nt, Human
acagcacaaucugagucccaga

SEQ ID NO: 483231 - RNA, 22 nt, Human
aguccaguguguucuggcagca

SEQ ID NO: 483232 - RNA, 22 nt, Human
ugccaggcgugguggugcgcac

SEQ ID NO: 483233 - RNA, 20 nt, Human
gcauugaguauagacagaug

SEQ ID NO: 483234 - RNA, 22 nt, Human
uucaggauccccuugaugggcu

SEQ ID NO: 483235 - RNA, 22 nt, Human
uccugggcuguggccccgggca

SEQ ID NO: 483236 - RNA, 22 nt, Human
ccagggcaacgcugucucagag

SEQ ID NO: 483237 - RNA, 22 nt, Human
ugcucagacaagcugaacagua

SEQ ID NO: 483238 - RNA, 22 nt, Human
gcagggcaaauguggaaaggag

SEQ ID NO: 483239 - RNA, 22 nt, Human
caguagcacucugucagugaag

SEQ ID NO: 483240 - RNA, 22 nt, Human
cuggugccauucuguggccuag

SEQ ID NO: 483241 - RNA, 22 nt, Human
agcagcuggggccugugacgau

SEQ ID NO: 483242 - RNA, 22 nt, Human
gugcgccagcucaaggggaggc

SEQ ID NO: 483243 - RNA, 22 nt, Human
ugcuucaggagaugucaccaug

SEQ ID NO: 483244 - RNA, 23 nt, Human
ucugagagaacaaugccuccuau

SEQ ID NO: 483245 - RNA, 22 nt, Human
uuccucagacccucauugugag

SEQ ID NO: 483246 - RNA, 22 nt, Human
uaauccaauggcacaauguaug

SEQ ID NO: 483247 - RNA, 22 nt, Human
uuuauguaaguggaaugaugcc

SEQ ID NO: 483248 - RNA, 22 nt, Human
gggcagaggcucuggcccaucc

SEQ ID NO: 483249 - RNA, 22 nt, Human
ccuguggcacaugcagggauuc

SEQ ID NO: 483250 - RNA, 22 nt, Human
ucuauaaauuaugcagucucag

SEQ ID NO: 483251 - RNA, 22 nt, Human
ugcagaggagcuggaaggcugg

SEQ ID NO: 483252 - RNA, 22 nt, Human
cuuccugcaggacagccaucug

SEQ ID NO: 483253 - RNA, 22 nt, Human
aggccuggccuuuauguucaag

SEQ ID NO: 483254 - RNA, 22 nt, Human
uaaaugcagauuccugagccua

SEQ ID NO: 483255 - RNA, 17 nt, Human
ggaaaaggaugauacag

SEQ ID NO: 483256 - RNA, 22 nt, Human
caagaugggcaccccagcaccu

SEQ ID NO: 483257 - RNA, 22 nt, Human
agagaagggccuguauguaauc

SEQ ID NO: 483258 - RNA, 17 nt, Human
gcaguggagggguaguu

SEQ ID NO: 483259 - RNA, 22 nt, Human
cauuaugugggaaaauguucuu

SEQ ID NO: 483260 - RNA, 22 nt, Human
uagggcugugucuccaggacca

SEQ ID NO: 483261 - RNA, 22 nt, Human
gccagcagcccagaaggacuuu

SEQ ID NO: 483262 - RNA, 22 nt, Human
agaggccuaaccaagauguccu

SEQ ID NO: 483263 - RNA, 22 nt, Human
aacaaguaaguuuauauauauu

SEQ ID NO: 483264 - RNA, 22 nt, Human
agcauaaaggucaacguuuuag

SEQ ID NO: 483265 - RNA, 23 nt, Human
cauguacagaguuugauaaagug

SEQ ID NO: 483266 - RNA, 22 nt, Human
caugugucaaaugauguagcug

SEQ ID NO: 483267 - RNA, 22 nt, Human
ucuucaaagaauuuuaguaauu

SEQ ID NO: 483268 - RNA, 22 nt, Human
ucacauucucagcaucuauaca

SEQ ID NO: 483269 - RNA, 22 nt, Human
agugaaauuccuggucuuuguu

SEQ ID NO: 483270 - RNA, 22 nt, Human
cagggcucugccuugagggaug

SEQ ID NO: 483271 - RNA, 22 nt, Human
acccagcuggaugcauggaggc

SEQ ID NO: 483272 - RNA, 22 nt, Human
cuccugaguaguagcauuguca

SEQ ID NO: 483273 - RNA, 22 nt, Human
ccacugagaccuuuuggaggag

SEQ ID NO: 483274 - RNA, 22 nt, Human
gaugcugaagugaagugaucuu

SEQ ID NO: 483275 - RNA, 22 nt, Human
ggcugcagcggauuggggauug

SEQ ID NO: 483276 - RNA, 22 nt, Human
agcugagcugcagaugacugua

SEQ ID NO: 483277 - RNA, 22 nt, Human
cagagccagcccacuguucccg

SEQ ID NO: 483278 - RNA, 22 nt, Human
gaaacaaucaucaugugauuug

SEQ ID NO: 483279 - RNA, 22 nt, Human
ucagcuuucucagaggccuaac

SEQ ID NO: 483280 - RNA, 22 nt, Human
agggagacacaugaggaaguca

SEQ ID NO: 483281 - RNA, 22 nt, Human
ucccagaguucaaugggaaggu

SEQ ID NO: 483282 - RNA, 22 nt, Human
ugagccuggagucguggagggg

SEQ ID NO: 483283 - RNA, 22 nt, Human
uggcagcaauuugugauguuga

SEQ ID NO: 483284 - RNA, 22 nt, Human
cauuucuacagcuucuucagaa

SEQ ID NO: 483285 - RNA, 21 nt, Human
gucagcagauccagcacuugu

SEQ ID NO: 483286 - RNA, 22 nt, Human
uuucacaucagagguagauuag

SEQ ID NO: 483287 - RNA, 18 nt, Human
uucagcagcagacacacu

SEQ ID NO: 483288 - RNA, 22 nt, Human
gagccagcugagcugcacuguc

SEQ ID NO: 483289 - RNA, 22 nt, Human
gcucucugguuccagucaggaa

SEQ ID NO: 483290 - RNA, 22 nt, Human
uugcuuccucgaggccagcgug

SEQ ID NO: 483291 - RNA, 22 nt, Human
ucccaggcugggggccugaagu

SEQ ID NO: 483292 - RNA, 22 nt, Human
aaauugugcucacacugauauu

SEQ ID NO: 483293 - RNA, 22 nt, Human
aggcaguuuauccccagagccu

SEQ ID NO: 483294 - RNA, 23 nt, Human
agcaggaaaccgagggugauguu

SEQ ID NO: 483295 - RNA, 22 nt, Human
ugcauguuaagaaaauauugag

SEQ ID NO: 483296 - RNA, 22 nt, Human
caggccucuauggucagcugag

SEQ ID NO: 483297 - RNA, 22 nt, Human
ugcacacacucugcauauacuu

SEQ ID NO: 483298 - RNA, 18 nt, Human
gagaggagccagaauuuu

SEQ ID NO: 483299 - RNA, 22 nt, Human
ugaggcucagaaauguaaguuu

SEQ ID NO: 483300 - RNA, 19 nt, Human
ugccugucaguagaucuca

SEQ ID NO: 483301 - RNA, 22 nt, Human
accugccuaguugguucugccc

SEQ ID NO: 483302 - RNA, 22 nt, Human
ugggcaggggcccugcuuccgu

SEQ ID NO: 483303 - RNA, 22 nt, Human
cacagaggcaaccuucuggggu

SEQ ID NO: 483304 - RNA, 22 nt, Human
ggcuucucucccccagcuccac

SEQ ID NO: 483305 - RNA, 21 nt, Human
gccacguuucagucuucucag

SEQ ID NO: 483306 - RNA, 22 nt, Human
ucccagggacucucugccuucc

SEQ ID NO: 483307 - RNA, 22 nt, Human
ggucugagcuugagcccaugcu

SEQ ID NO: 483308 - RNA, 21 nt, Human
ggcagccucuguggaagggga

SEQ ID NO: 483309 - RNA, 22 nt, Human
gcagugaacauaacacagaagg

SEQ ID NO: 483310 - RNA, 22 nt, Human
ggcugccucuggaagcuggaga

SEQ ID NO: 483311 - RNA, 22 nt, Human
agcaccugcacaguggaggaaa

SEQ ID NO: 483312 - RNA, 22 nt, Human
ugucccagauacuggacauaga

SEQ ID NO: 483313 - RNA, 20 nt, Human
aggcacuggggauagguaag

SEQ ID NO: 483314 - RNA, 22 nt, Human
auuuccacauaagggaaauaag

SEQ ID NO: 483315 - RNA, 22 nt, Human
ucucccuggagcccugaagcau

SEQ ID NO: 483316 - RNA, 22 nt, Human
gagcuuuaagggauaaaaugau

SEQ ID NO: 483317 - RNA, 18 nt, Human
ggacaucaucaggugcuu

SEQ ID NO: 483318 - RNA, 22 nt, Human
gcugagcugaggcagggcuggg

SEQ ID NO: 483319 - RNA, 22 nt, Human
ucccagagugugggcaucaagg

SEQ ID NO: 483320 - RNA, 21 nt, Human
aacauuucaggauccaaauug

SEQ ID NO: 483321 - RNA, 21 nt, Human
ccagagagagggaaguggguu

SEQ ID NO: 483322 - RNA, 22 nt, Human
gccaggcacugcucuaagcccu

SEQ ID NO: 483323 - RNA, 22 nt, Human
aggcacagcacaccuggccccc

SEQ ID NO: 483324 - RNA, 22 nt, Human
ucuaguucuagaucccugagga

SEQ ID NO: 483325 - RNA, 22 nt, Human
ggugcagcugcagccugggagc

SEQ ID NO: 483326 - RNA, 22 nt, Human
cuccagugcgcaggacagcccc

SEQ ID NO: 483327 - RNA, 22 nt, Human
cauuuauuggcauguaguaggu

SEQ ID NO: 483328 - RNA, 16 nt, Human
uagggcugggaaggag

SEQ ID NO: 483329 - RNA, 22 nt, Human
guggcugggcuccgagcggcuu

SEQ ID NO: 483330 - RNA, 22 nt, Human
uccaggcauaagccuugagugu

SEQ ID NO: 483331 - RNA, 22 nt, Human
agccuggaccaggggccucaga

SEQ ID NO: 483332 - RNA, 22 nt, Human
aggaccugccaggugcaaagca

SEQ ID NO: 483333 - RNA, 22 nt, Human
cagcugccacaccucuuucucu

SEQ ID NO: 483334 - RNA, 18 nt, Human
gaucgggggcgccccaag

SEQ ID NO: 483335 - RNA, 22 nt, Human
agcagguguagggcucuuugua

SEQ ID NO: 483336 - RNA, 22 nt, Human
auaauucagguuuucuggcaca

SEQ ID NO: 483337 - RNA, 23 nt, Human
ggcagagagcauggcuggggccc

SEQ ID NO: 483338 - RNA, 22 nt, Human
agccuguccagaggacagggcu

SEQ ID NO: 483339 - RNA, 22 nt, Human
agcugcuguggggcucggccug

SEQ ID NO: 483340 - RNA, 18 nt, Human
gucuggaggucaggagcu

SEQ ID NO: 483341 - RNA, 22 nt, Human
uccaggagguagugcuuaauuu

SEQ ID NO: 483342 - RNA, 16 nt, Human
uggcugagagaggguu

SEQ ID NO: 483343 - RNA, 22 nt, Human
augccagucaaagaagaugaca

SEQ ID NO: 483344 - RNA, 22 nt, Human
caguggauuagccagagcugga

SEQ ID NO: 483345 - RNA, 19 nt, Human
ucuggagcugaugcaggug

SEQ ID NO: 483346 - RNA, 22 nt, Human
aagcagaaaaacugagcuccaa

SEQ ID NO: 483347 - RNA, 22 nt, Human
ucaggggacagccagcuggagg

SEQ ID NO: 483348 - RNA, 22 nt, Human
ugucucaggcccaagccaguaa

SEQ ID NO: 483349 - RNA, 22 nt, Human
auauuaggcaaggagauuauuu

SEQ ID NO: 483350 - RNA, 22 nt, Human
uguaggccuauguccagcaauu

SEQ ID NO: 483351 - RNA, 22 nt, Human
uuaaacagacaguaaaugaaac

SEQ ID NO: 483352 - RNA, 22 nt, Human
ccuaugccugucacucugcgcu

SEQ ID NO: 483353 - RNA, 20 nt, Human
gcauccagacacccagcugc

SEQ ID NO: 483354 - RNA, 22 nt, Human
cuuuauguucaguacaaugcuu

SEQ ID NO: 483355 - RNA, 18 nt, Human
aagccagagaccacugcc

SEQ ID NO: 483356 - RNA, 22 nt, Human
ugguuuaccccuguccuauauc

SEQ ID NO: 483357 - RNA, 22 nt, Human
uuuacauugcauuagguauuau

SEQ ID NO: 483358 - RNA, 21 nt, Human
agagaagaggacuuucucaca

SEQ ID NO: 483359 - RNA, 22 nt, Human
gaaucauuuagcucugcaugga

SEQ ID NO: 483360 - RNA, 22 nt, Human
ucucaggcuaccuugcacaagg

SEQ ID NO: 483361 - RNA, 22 nt, Human
acccuuucuuacucacacgcuc

SEQ ID NO: 483362 - RNA, 22 nt, Human
cagggcccagucccugcuguca

SEQ ID NO: 483363 - RNA, 22 nt, Human
aaacuguaaauacuaguaagug

SEQ ID NO: 483364 - RNA, 20 nt, Human
ucauccaggacaggaguggc

SEQ ID NO: 483365 - RNA, 22 nt, Human
gccaggaguucagaugcauguu

SEQ ID NO: 483366 - RNA, 19 nt, Human
gacucacaccuuccgcugu

SEQ ID NO: 483367 - RNA, 22 nt, Human
ucucuucuugauuuucacugga

SEQ ID NO: 483368 - RNA, 22 nt, Human
gagccagcuacauggucugcaa

SEQ ID NO: 483369 - RNA, 22 nt, Human
ucccagggucaguggugaggcc

SEQ ID NO: 483370 - RNA, 22 nt, Human
acccaggcugcuucucaguggc

SEQ ID NO: 483371 - RNA, 22 nt, Human
ugcagucuggauguccucagau

SEQ ID NO: 483372 - RNA, 22 nt, Human
uggucaacaggcagggaugaaa

SEQ ID NO: 483373 - RNA, 22 nt, Human
ucauuuccucaaauucaagguu

SEQ ID NO: 483374 - RNA, 22 nt, Human
uagaauaugugguaggaucugg

SEQ ID NO: 483375 - RNA, 22 nt, Human
ugaugcuucacgcugaauaugc

SEQ ID NO: 483376 - RNA, 20 nt, Human
uccuugaaagugggguauau

SEQ ID NO: 483377 - RNA, 20 nt, Human
gcaggcagggaaugggggug

SEQ ID NO: 483378 - RNA, 22 nt, Human
aaaugcagguucuugagccaag

SEQ ID NO: 483379 - RNA, 22 nt, Human
gggggcaguaaggauauggaaa

SEQ ID NO: 483380 - RNA, 22 nt, Human
gugcagauccugauugcaguuc

SEQ ID NO: 483381 - RNA, 22 nt, Human
aaguguuuacuuaaagucaugg

SEQ ID NO: 483382 - RNA, 22 nt, Human
ucuggagcuggcagggcccugg

SEQ ID NO: 483383 - RNA, 23 nt, Human
agcacagacuagaaaggucuuuc

SEQ ID NO: 483384 - RNA, 17 nt, Human
aggcaggagauuggaga

SEQ ID NO: 483385 - RNA, 22 nt, Human
cagagguacaagcuaaguuggg

SEQ ID NO: 483386 - RNA, 23 nt, Human
gaguguucauagcaggcucuugc

SEQ ID NO: 483387 - RNA, 22 nt, Human
accugagccuagggagguugag

SEQ ID NO: 483388 - RNA, 22 nt, Human
cucaggaggaggaaguucauug

SEQ ID NO: 483389 - RNA, 22 nt, Human
uuagauauguuuuugcuaaugc

SEQ ID NO: 483390 - RNA, 20 nt, Human
cccuggccuguuucaugccc

SEQ ID NO: 483391 - RNA, 22 nt, Human
uucaauucuaaacuaauauucu

SEQ ID NO: 483392 - RNA, 22 nt, Human
ggaggagacccugugucaguuu

SEQ ID NO: 483393 - RNA, 22 nt, Human
ggagcagccgcgucucagggca

SEQ ID NO: 483394 - RNA, 22 nt, Human
cuuggucauuuggggcugcuau

SEQ ID NO: 483395 - RNA, 22 nt, Human
caguuauuaugaggucauuagg

SEQ ID NO: 483396 - RNA, 22 nt, Human
acuuaaaaacagauccagcagg

SEQ ID NO: 483397 - RNA, 23 nt, Human
gcucugagggcuuaucccuccca

SEQ ID NO: 483398 - RNA, 22 nt, Human
uacaaacuuguuuuaaguaagu

SEQ ID NO: 483399 - RNA, 22 nt, Human
agauguggauccuaggguagaa

SEQ ID NO: 483400 - RNA, 22 nt, Human
agccucugugacucacagguca

SEQ ID NO: 483401 - RNA, 21 nt, Human
gcagccacagccaccaagcua

SEQ ID NO: 483402 - RNA, 22 nt, Human
caggugggccgggguuuguucu

SEQ ID NO: 483403 - RNA, 22 nt, Human
cagggugcgccacucagaugua

SEQ ID NO: 483404 - RNA, 22 nt, Human
aaaucugguucaguaaguccuc

SEQ ID NO: 483405 - RNA, 20 nt, Human
cugcugugugugccucagcc

SEQ ID NO: 483406 - RNA, 22 nt, Human
aaaaugugaucuacaaaugcaa

SEQ ID NO: 483407 - RNA, 22 nt, Human
ccuggagauuauuugguccaau

SEQ ID NO: 483408 - RNA, 22 nt, Human
uuuauacuccacucugcaagcg

SEQ ID NO: 483409 - RNA, 22 nt, Human
gggccuguguguucaggagccu

SEQ ID NO: 483410 - RNA, 22 nt, Human
ugcccaagcagaggagugauuc

SEQ ID NO: 483411 - RNA, 22 nt, Human
uggcaggguggcaacuuuuggu

SEQ ID NO: 483412 - RNA, 22 nt, Human
uaaagccacuucauucuagucu

SEQ ID NO: 483413 - RNA, 22 nt, Human
uauguacacauacacuuguaau

SEQ ID NO: 483414 - RNA, 22 nt, Human
ucuucuuccucauuuauacaua

SEQ ID NO: 483415 - RNA, 21 nt, Human
agagcugggacuugccugaga

SEQ ID NO: 483416 - RNA, 19 nt, Human
gcuguacaguaaggagaca

SEQ ID NO: 483417 - RNA, 22 nt, Human
cagugaggaguccagggcagag

SEQ ID NO: 483418 - RNA, 22 nt, Human
cucaggagcuuccucagcccau

SEQ ID NO: 483419 - RNA, 22 nt, Human
cgucccaguuccagccgcgcug

SEQ ID NO: 483420 - RNA, 22 nt, Human
cugcccugggaguaccuguccu

SEQ ID NO: 483421 - RNA, 22 nt, Human
agggagaagguuuagcugugag

SEQ ID NO: 483422 - RNA, 22 nt, Human
ucuauuugcugguugcuucugu

SEQ ID NO: 483423 - RNA, 22 nt, Human
ggugcugguucaggguggcugu

SEQ ID NO: 483424 - RNA, 22 nt, Human
aaguccagaacuccugugauag

SEQ ID NO: 483425 - RNA, 22 nt, Human
gacuucaaaggucaaacaucgc

SEQ ID NO: 483426 - RNA, 19 nt, Human
ggaggccuggguauuugcc

SEQ ID NO: 483427 - RNA, 22 nt, Human
acuguacauauggauucuaaga

SEQ ID NO: 483428 - RNA, 22 nt, Human
ggaggccaccugaccugcuguu

SEQ ID NO: 483429 - RNA, 22 nt, Human
ccucucccacguggcagaggcu

SEQ ID NO: 483430 - RNA, 23 nt, Human
ucccagggaaggugagcgaggcu

SEQ ID NO: 483431 - RNA, 22 nt, Human
cagccuguagaauacaguaaau

SEQ ID NO: 483432 - RNA, 17 nt, Human
acagagguuauacagac

SEQ ID NO: 483433 - RNA, 22 nt, Human
caaaagauacuugcaucuaacu

SEQ ID NO: 483434 - RNA, 22 nt, Human
ggagccagaggcugcugcugug

SEQ ID NO: 483435 - RNA, 22 nt, Human
gaaaauuauugaaaauggcucu

SEQ ID NO: 483436 - RNA, 22 nt, Human
cccugccuugggguccacaccg

SEQ ID NO: 483437 - RNA, 22 nt, Human
gucccauaaguagugcaacuug

SEQ ID NO: 483438 - RNA, 22 nt, Human
cagcccaaagccccaggcuaga

SEQ ID NO: 483439 - RNA, 22 nt, Human
ccucucaucauuaucgcuuugu

SEQ ID NO: 483440 - RNA, 22 nt, Human
agacuguagggauagaggucuu

SEQ ID NO: 483441 - RNA, 22 nt, Human
cauuugcagagggugacacucu

SEQ ID NO: 483442 - RNA, 22 nt, Human
aaaaugaacagaacaaugggga

SEQ ID NO: 483443 - RNA, 22 nt, Human
gucaggauuaaugggaguaugc

SEQ ID NO: 483444 - RNA, 22 nt, Human
ggccucagugggccgcugcagg

SEQ ID NO: 483445 - RNA, 20 nt, Human
uucuuaaagaccucacuuug

SEQ ID NO: 483446 - RNA, 22 nt, Human
aguucuagaagacuuuuccauu

SEQ ID NO: 483447 - RNA, 22 nt, Human
aggcucugcagaccccagcugu

SEQ ID NO: 483448 - RNA, 22 nt, Human
uacauaauugucuuuguccuca

SEQ ID NO: 483449 - RNA, 22 nt, Human
gcucagagauggggaaugaaaa

SEQ ID NO: 483450 - RNA, 22 nt, Human
gcaugggcaagaggacuggggg

SEQ ID NO: 483451 - RNA, 19 nt, Human
aguagcagaaagugcagug

SEQ ID NO: 483452 - RNA, 22 nt, Human
cuauuauuagauaaucuacuug

SEQ ID NO: 483453 - RNA, 22 nt, Human
cuggguggaaagugcugagaau

SEQ ID NO: 483454 - RNA, 22 nt, Human
cugggugguucuaacuguugau

SEQ ID NO: 483455 - RNA, 22 nt, Human
cacagggcuucucauggggugc

SEQ ID NO: 483456 - RNA, 22 nt, Human
gcugucuggaggcucugaggga

SEQ ID NO: 483457 - RNA, 22 nt, Human
gggcaggaggcuaauucugcau

SEQ ID NO: 483458 - RNA, 22 nt, Human
ggcgcucaguguugccccagag

SEQ ID NO: 483459 - RNA, 21 nt, Human
gcaggaugcaucuuggugucu

SEQ ID NO: 483460 - RNA, 22 nt, Human
ucagagaugcagugccaccuac

SEQ ID NO: 483461 - RNA, 22 nt, Human
cugugcuugcggguguggagcc

SEQ ID NO: 483462 - RNA, 22 nt, Human
agggccugucagcgguguccug

SEQ ID NO: 483463 - RNA, 22 nt, Human
uucaucuugauggcuuccuaau

SEQ ID NO: 483464 - RNA, 22 nt, Human
aggcuccuugcucacaggcuca

SEQ ID NO: 483465 - RNA, 22 nt, Human
aucuaagaguuaacaucaagaa

SEQ ID NO: 483466 - RNA, 22 nt, Human
uuuaaagaaauuccucaucuuu

SEQ ID NO: 483467 - RNA, 22 nt, Human
ccaggaggcagagguuacagug

SEQ ID NO: 483468 - RNA, 22 nt, Human
aaauaauguuaggccuuugcuc

SEQ ID NO: 483469 - RNA, 22 nt, Human
gugccagggaguggaggagcuu

SEQ ID NO: 483470 - RNA, 22 nt, Human
cauugucacccaaagcucauag

SEQ ID NO: 483471 - RNA, 22 nt, Human
cagcucuguaaauuccuucauc

SEQ ID NO: 483472 - RNA, 22 nt, Human
caccaggugcuggaggacauca

SEQ ID NO: 483473 - RNA, 22 nt, Human
guuagggagggugcauaugugu

SEQ ID NO: 483474 - RNA, 22 nt, Human
caacagagagaccagaaacagg

SEQ ID NO: 483475 - RNA, 22 nt, Human
cuggcuuuuagugugaagacuu

SEQ ID NO: 483476 - RNA, 22 nt, Human
gaauuagguaauagaacuagua

SEQ ID NO: 483477 - RNA, 22 nt, Human
ucaaagagcuauucaguugugg

SEQ ID NO: 483478 - RNA, 22 nt, Human
uccaggcaguuuuccagguugu

SEQ ID NO: 483479 - RNA, 21 nt, Human
ccuggcuucagggugcacugg

SEQ ID NO: 483480 - RNA, 22 nt, Human
acuggcagcuguaggaugcaug

SEQ ID NO: 483481 - RNA, 22 nt, Human
acuguccaagcaugccuggcuu

SEQ ID NO: 483482 - RNA, 22 nt, Human
ggaagggccucgggcgugggac

SEQ ID NO: 483483 - RNA, 22 nt, Human
ccauuugucaccucugcacucc

SEQ ID NO: 483484 - RNA, 22 nt, Human
ucuaggagaaccaucagggagg

SEQ ID NO: 483485 - RNA, 22 nt, Human
cacuguguaagaagaugggcuu

SEQ ID NO: 483486 - RNA, 22 nt, Human
gggcuucucuuaugcuaacugg

SEQ ID NO: 483487 - RNA, 22 nt, Human
aacaaauguguuuuguaauuaa

SEQ ID NO: 483488 - RNA, 22 nt, Human
uaagacacaugcguacaagaua

SEQ ID NO: 483489 - RNA, 22 nt, Human
uuucaauguaugucuuucugag

SEQ ID NO: 483490 - RNA, 22 nt, Human
caugcacuuaccugaaauucaa

SEQ ID NO: 483491 - RNA, 22 nt, Human
auuugauuagcuguguaauuuu

SEQ ID NO: 483492 - RNA, 22 nt, Human
cagcuuugcaggcuggucagug

SEQ ID NO: 483493 - RNA, 22 nt, Human
uacugccuggagcauuggugcu

SEQ ID NO: 483494 - RNA, 22 nt, Human
uaauacuuuugccuuguauuca

SEQ ID NO: 483495 - RNA, 22 nt, Human
aaaugcauguagaauaauagag

SEQ ID NO: 483496 - RNA, 22 nt, Human
ggccucagaccggagcuggcca

SEQ ID NO: 483497 - RNA, 22 nt, Human
cugggaggcggagguuguagug

SEQ ID NO: 483498 - RNA, 22 nt, Human
gagagcuggauucuggauaggu

SEQ ID NO: 483499 - RNA, 22 nt, Human
uaggacaggugaggggcugugg

SEQ ID NO: 483500 - RNA, 22 nt, Human
accaugaugcauccuuaaggaa

SEQ ID NO: 483501 - RNA, 22 nt, Human
ccuaagaauuaaugaauacacc

SEQ ID NO: 483502 - RNA, 22 nt, Human
acuguggcucaucaggcuggug

SEQ ID NO: 483503 - RNA, 22 nt, Human
ugcaguggcgccaucucagcuc

SEQ ID NO: 483504 - RNA, 22 nt, Human
ccagcuuucugggugguuucug

SEQ ID NO: 483505 - RNA, 22 nt, Human
ugaggcagcaauuguauuguau

SEQ ID NO: 483506 - RNA, 22 nt, Human
ccugucugaaggcagggggaug

SEQ ID NO: 483507 - RNA, 20 nt, Human
ggguggaguugcggucugug

SEQ ID NO: 483508 - RNA, 19 nt, Human
ucuaacagaagugucgucc

SEQ ID NO: 483509 - RNA, 22 nt, Human
uccugagauucugcauuucuaa

SEQ ID NO: 483510 - RNA, 22 nt, Human
gccugagagucugcauuucuaa

SEQ ID NO: 483511 - RNA, 22 nt, Human
aggagcuggaguccaggcaagu

SEQ ID NO: 483512 - RNA, 22 nt, Human
uagggcucagcucuagcuccug

SEQ ID NO: 483513 - RNA, 22 nt, Human
aggccuggugugccggaugcag

SEQ ID NO: 483514 - RNA, 22 nt, Human
aauaaacugcucaauugcauca

SEQ ID NO: 483515 - RNA, 22 nt, Human
cugucugcuagaacaucuauac

SEQ ID NO: 483516 - RNA, 22 nt, Human
ugcagucuuccagcugcacaaa

SEQ ID NO: 483517 - RNA, 22 nt, Human
agcuuuaucagaggagucucua

SEQ ID NO: 483518 - RNA, 22 nt, Human
cugcagggcagaagggcauaga

SEQ ID NO: 483519 - RNA, 22 nt, Human
agguggcaggaggucagagaaa

SEQ ID NO: 483520 - RNA, 22 nt, Human
guaggcagucucucaggugauc

SEQ ID NO: 483521 - RNA, 22 nt, Human
auucaagagcccauguuuccug

SEQ ID NO: 483522 - RNA, 22 nt, Human
uaaggccaaggggccauagucu

SEQ ID NO: 483523 - RNA, 22 nt, Human
ugcagggccgcuggaggucaug

SEQ ID NO: 483524 - RNA, 22 nt, Human
uuccucaucugugcaccucacu

SEQ ID NO: 483525 - RNA, 22 nt, Human
agugaguggguuacagauggga

SEQ ID NO: 483526 - RNA, 17 nt, Human
uuauuuuuugggcugag

SEQ ID NO: 483527 - RNA, 22 nt, Human
aguggccagugcugcucugggg

SEQ ID NO: 483528 - RNA, 22 nt, Human
aagaagaaguguuauuuuuaga

SEQ ID NO: 483529 - RNA, 22 nt, Human
ggaggcagaauagagugugggu

SEQ ID NO: 483530 - RNA, 21 nt, Human
ggcacugagccagauggacuc

SEQ ID NO: 483531 - RNA, 22 nt, Human
uuuagaaauucaucuauggccu

SEQ ID NO: 483532 - RNA, 21 nt, Human
uuacuuuugcagcaaccuaau

SEQ ID NO: 483533 - RNA, 19 nt, Human
acuuugcaugugugucuaa

SEQ ID NO: 483534 - RNA, 21 nt, Human
ucacaugcccauuacuggagc

SEQ ID NO: 483535 - RNA, 22 nt, Human
cugccuggucucaggcaugggg

SEQ ID NO: 483536 - RNA, 22 nt, Human
guaacugaggcagcuuuuaaga

SEQ ID NO: 483537 - RNA, 22 nt, Human
acugggaggcaaagagcaagga

SEQ ID NO: 483538 - RNA, 22 nt, Human
agugagggaugaagaacugcgg

SEQ ID NO: 483539 - RNA, 22 nt, Human
ugggggugacuaucucgggaau

SEQ ID NO: 483540 - RNA, 22 nt, Human
ggaccugaacauaaaacgaggc

SEQ ID NO: 483541 - RNA, 22 nt, Human
gcuggcagucccaucagcuggg

SEQ ID NO: 483542 - RNA, 22 nt, Human
uguguacauaucuauccuagau

SEQ ID NO: 483543 - RNA, 22 nt, Human
aaauggauggaauugacauuua

SEQ ID NO: 483544 - RNA, 22 nt, Human
ucucccagugucuggcagucag

SEQ ID NO: 483545 - RNA, 22 nt, Human
uaaaugugaccuucauuuuaua

SEQ ID NO: 483546 - RNA, 22 nt, Human
accaggcaguauggugcugcaa

SEQ ID NO: 483547 - RNA, 22 nt, Human
aacaucuuuuuguuugcugaaa

SEQ ID NO: 483548 - RNA, 22 nt, Human
ggcuccacugcugaccacucca

SEQ ID NO: 483549 - RNA, 18 nt, Human
gugccaggaggcgcagcc

SEQ ID NO: 483550 - RNA, 22 nt, Human
augggcagaguggggacaggaa

SEQ ID NO: 483551 - RNA, 22 nt, Human
caagggccuccaccuugcucgu

SEQ ID NO: 483552 - RNA, 22 nt, Human
gaggcagcugaaggagugacag

SEQ ID NO: 483553 - RNA, 21 nt, Human
ccugugugucugacugggcua

SEQ ID NO: 483554 - RNA, 22 nt, Human
gugauuccuauuaguacaugca

SEQ ID NO: 483555 - RNA, 22 nt, Human
agagaacaaauuaaaggugguu

SEQ ID NO: 483556 - RNA, 22 nt, Human
caccaggcuggagugcagaggu

SEQ ID NO: 483557 - RNA, 22 nt, Human
caguagcaggcaggugcuuuug

SEQ ID NO: 483558 - RNA, 22 nt, Human
gccuucugaucgcuggacugac

SEQ ID NO: 483559 - RNA, 22 nt, Human
cagagggagcccuccaggagca

SEQ ID NO: 483560 - RNA, 19 nt, Human
gcugugugaccuugggcaa

SEQ ID NO: 483561 - RNA, 22 nt, Human
guguccagggccguguugucuu

SEQ ID NO: 483562 - RNA, 22 nt, Human
aaugcuguauaucuuagcuaau

SEQ ID NO: 483563 - RNA, 22 nt, Human
gaggcugauucggggaacagca

SEQ ID NO: 483564 - RNA, 22 nt, Human
ggauuucuuccuuccucagaag

SEQ ID NO: 483565 - RNA, 22 nt, Human
ccaguuuuuccagugcuuucug

SEQ ID NO: 483566 - RNA, 22 nt, Human
aagauuuagggccaguuuacau

SEQ ID NO: 483567 - RNA, 22 nt, Human
gaggggcucuuuaauaguaaca

SEQ ID NO: 483568 - RNA, 22 nt, Human
cugggcagcuguaucagggagu

SEQ ID NO: 483569 - RNA, 22 nt, Human
ggagccugcgggagcucccauu

SEQ ID NO: 483570 - RNA, 22 nt, Human
gaaggcugaguggguacggagg

SEQ ID NO: 483571 - RNA, 22 nt, Human
aggcacugaaagguggccagag

SEQ ID NO: 483572 - RNA, 22 nt, Human
gucauuucuguuucuucagugc

SEQ ID NO: 483573 - RNA, 22 nt, Human
ccagugcacagccaggcaggug

SEQ ID NO: 483574 - RNA, 22 nt, Human
ggagccuuccagacugcccaca

SEQ ID NO: 483575 - RNA, 22 nt, Human
uaguggagaguuguuuugugca

SEQ ID NO: 483576 - RNA, 22 nt, Human
gggcuggcaucaguugccgaga

SEQ ID NO: 483577 - RNA, 22 nt, Human
cuuguccuuuacuugagacuca

SEQ ID NO: 483578 - RNA, 19 nt, Human
ccuuugaaucaggacacuu

SEQ ID NO: 483579 - RNA, 22 nt, Human
uuugcauuuguucaaguauuga

SEQ ID NO: 483580 - RNA, 22 nt, Human
ccuggcugcuauagcagcaugu

SEQ ID NO: 483581 - RNA, 21 nt, Human
uguggcagauguugggaggca

SEQ ID NO: 483582 - RNA, 22 nt, Human
augcacaagaggcuagaaaaga

SEQ ID NO: 483583 - RNA, 22 nt, Human
gcagcauuuguggaaugggccc

SEQ ID NO: 483584 - RNA, 21 nt, Human
uggcucugagccucauggcug

SEQ ID NO: 483585 - RNA, 22 nt, Human
agcaggagagcagugcgugguc

SEQ ID NO: 483586 - RNA, 22 nt, Human
cagagcaguccuugucaaucag

SEQ ID NO: 483587 - RNA, 22 nt, Human
cauucugugauucuaaaucccu

SEQ ID NO: 483588 - RNA, 22 nt, Human
ggccuggcucuugcccagccug

SEQ ID NO: 483589 - RNA, 22 nt, Human
caggagcuacucagguuggguu

SEQ ID NO: 483590 - RNA, 22 nt, Human
cuguacaaguccuucaucaggg

SEQ ID NO: 483591 - RNA, 22 nt, Human
ucagaggaacacuguuucaugc

SEQ ID NO: 483592 - RNA, 22 nt, Human
agcaggaaagaaaaaucugugu

SEQ ID NO: 483593 - RNA, 22 nt, Human
ggagggagcauccccuugcuga

SEQ ID NO: 483594 - RNA, 22 nt, Human
gucugcugcagagcauggcuuu

SEQ ID NO: 483595 - RNA, 22 nt, Human
acugagcugcaagucagggagg

SEQ ID NO: 483596 - RNA, 22 nt, Human
uggccucuuacgacauagccuu

SEQ ID NO: 483597 - RNA, 22 nt, Human
aagggcugaaugaaggguugaa

SEQ ID NO: 483598 - RNA, 22 nt, Human
caggagcaugcugaugccagaa

SEQ ID NO: 483599 - RNA, 22 nt, Human
uugauaaaaugauaucuucuuu

SEQ ID NO: 483600 - RNA, 23 nt, Human
acacaaggguaacugccagccau

SEQ ID NO: 483601 - RNA, 22 nt, Human
aggggcuguggaaaccaacucu

SEQ ID NO: 483602 - RNA, 22 nt, Human
auuuccauacacccauuucuga

SEQ ID NO: 483603 - RNA, 22 nt, Human
ugugucccuuggaaccucagcu

SEQ ID NO: 483604 - RNA, 21 nt, Human
cagugcucaaucugacagugg

SEQ ID NO: 483605 - RNA, 22 nt, Human
aaagcaaugggucuaagguaaa

SEQ ID NO: 483606 - RNA, 22 nt, Human
cucagaguucuccugggaggug

SEQ ID NO: 483607 - RNA, 22 nt, Human
gccuuugccugcgacguggcug

SEQ ID NO: 483608 - RNA, 22 nt, Human
uagaaacugauagucuugugcu

SEQ ID NO: 483609 - RNA, 22 nt, Human
cacacaugagucuccccauugg

SEQ ID NO: 483610 - RNA, 22 nt, Human
ucaucacauguguagucauccc

SEQ ID NO: 483611 - RNA, 22 nt, Human
acagauugaucuugagaauuau

SEQ ID NO: 483612 - RNA, 22 nt, Human
ugguggccaauucacagggcuc

SEQ ID NO: 483613 - RNA, 22 nt, Human
ucacugcucuccaauguggagu

SEQ ID NO: 483614 - RNA, 22 nt, Human
gagugagggcagcaggggcugc

SEQ ID NO: 483615 - RNA, 22 nt, Human
uuugaaagaaaccagugaguga

SEQ ID NO: 483616 - RNA, 22 nt, Human
ucaaguauaucuagucauuagg

SEQ ID NO: 483617 - RNA, 19 nt, Human
ccagcagacacagcugccc

SEQ ID NO: 483618 - RNA, 22 nt, Human
gcucugugccacaugcaguguu

SEQ ID NO: 483619 - RNA, 22 nt, Human
cagccaggccuggugaccaaag

SEQ ID NO: 483620 - RNA, 22 nt, Human
caugaauauacauccugauggc

SEQ ID NO: 483621 - RNA, 22 nt, Human
ucugggagauccaagcagaacu

SEQ ID NO: 483622 - RNA, 22 nt, Human
ggcagagcugcaugagcacuca

SEQ ID NO: 483623 - RNA, 20 nt, Human
cagggcucugggccuggccu

SEQ ID NO: 483624 - RNA, 22 nt, Human
cacccagcauuggcuaagagag

SEQ ID NO: 483625 - RNA, 22 nt, Human
ggagcacccugcucagccaagc

SEQ ID NO: 483626 - RNA, 22 nt, Human
ugaagcaggugaauggaugucg

SEQ ID NO: 483627 - RNA, 22 nt, Human
cgaggcaggcaggcggaggaua

SEQ ID NO: 483628 - RNA, 18 nt, Human
aguaguggguuuagcuuc

SEQ ID NO: 483629 - RNA, 22 nt, Human
ugggccaggcaugugaucagca

SEQ ID NO: 483630 - RNA, 22 nt, Human
uuugcauuguuucaaaagugaa

SEQ ID NO: 483631 - RNA, 22 nt, Human
caaugauugcuauuuacauaaa

SEQ ID NO: 483632 - RNA, 21 nt, Human
auugaaagucaacaaucaguu

SEQ ID NO: 483633 - RNA, 23 nt, Human
ucacaggggccagcgcucugugg

SEQ ID NO: 483634 - RNA, 22 nt, Human
uuuacuuugugucaagucaaga

SEQ ID NO: 483635 - RNA, 22 nt, Human
uacuuuaaaaacugauaauuca

SEQ ID NO: 483636 - RNA, 22 nt, Human
uaacagaagagcaggcagcccu

SEQ ID NO: 483637 - RNA, 22 nt, Human
cccugaggggaguggugaggug

SEQ ID NO: 483638 - RNA, 22 nt, Human
cugaagagcucuccuguccccu

SEQ ID NO: 483639 - RNA, 22 nt, Human
gguggagcuguggacaggaagg

SEQ ID NO: 483640 - RNA, 20 nt, Human
gcugucuggauuagaagccu

SEQ ID NO: 483641 - RNA, 22 nt, Human
cugagagucagcuucuccuccu

SEQ ID NO: 483642 - RNA, 22 nt, Human
uugaaaggugcugugugcugau

SEQ ID NO: 483643 - RNA, 22 nt, Human
auucugucuuuuuaaaauaaua

SEQ ID NO: 483644 - RNA, 22 nt, Human
ucugggugaugaaaugcacugu

SEQ ID NO: 483645 - RNA, 22 nt, Human
aucagcaaucaaauugcagagu

SEQ ID NO: 483646 - RNA, 22 nt, Human
uuucuucucacccaggacagag

SEQ ID NO: 483647 - RNA, 18 nt, Human
gggaucaggcugccuagg

SEQ ID NO: 483648 - RNA, 22 nt, Human
cugagaggcacaaggcauuucg

SEQ ID NO: 483649 - RNA, 22 nt, Human
gccugugcuuaacugacgugag

SEQ ID NO: 483650 - RNA, 22 nt, Human
auauuagggucucuaaauucua

SEQ ID NO: 483651 - RNA, 19 nt, Human
aggugcaggucacagggga

SEQ ID NO: 483652 - RNA, 22 nt, Human
acacaugagaaacaucaguugu

SEQ ID NO: 483653 - RNA, 22 nt, Human
uggcucagcuuuccccaucugg

SEQ ID NO: 483654 - RNA, 22 nt, Human
gagcugucuggggacucugggu

SEQ ID NO: 483655 - RNA, 22 nt, Human
uuaacagagaacauagaaguag

SEQ ID NO: 483656 - RNA, 22 nt, Human
aggcugugcaauuaggguaaga

SEQ ID NO: 483657 - RNA, 20 nt, Human
cuaucuccuggcgugccuuc

SEQ ID NO: 483658 - RNA, 22 nt, Human
cacacaggagagugcuggaggu

SEQ ID NO: 483659 - RNA, 22 nt, Human
agugcauauaugaagaguauga

SEQ ID NO: 483660 - RNA, 22 nt, Human
ucagggcagccuaaggcaccuc

SEQ ID NO: 483661 - RNA, 22 nt, Human
uaaggccagccagcaaaucugu

SEQ ID NO: 483662 - RNA, 22 nt, Human
cagcugaguuuccaagucugcc

SEQ ID NO: 483663 - RNA, 22 nt, Human
aucuggcuccuacacuugaaga

SEQ ID NO: 483664 - RNA, 22 nt, Human
ucucccagaggaucccagugga

SEQ ID NO: 483665 - RNA, 22 nt, Human
agcuuuauuugucauucacggc

SEQ ID NO: 483666 - RNA, 22 nt, Human
ucccugggccuccugcuaugca

SEQ ID NO: 483667 - RNA, 22 nt, Human
aaggacagaaacagauugcugg

SEQ ID NO: 483668 - RNA, 22 nt, Human
accagagcuggcagaguaucaa

SEQ ID NO: 483669 - RNA, 22 nt, Human
augcuuuuccaggagaaauaua

SEQ ID NO: 483670 - RNA, 22 nt, Human
uuggauccaucucaggcauagg

SEQ ID NO: 483671 - RNA, 22 nt, Human
agcagcuccugccaugagugcu

SEQ ID NO: 483672 - RNA, 22 nt, Human
acaugauuuuaguaucauaaua

SEQ ID NO: 483673 - RNA, 22 nt, Human
gcacagggaggcuggccuggcc

SEQ ID NO: 483674 - RNA, 22 nt, Human
caauuucuggaacuaauucuga

SEQ ID NO: 483675 - RNA, 22 nt, Human
ggcuucugccacgagagggaag

SEQ ID NO: 483676 - RNA, 22 nt, Human
uugcagagcaguaggaauauag

SEQ ID NO: 483677 - RNA, 22 nt, Human
cagagcugguaagugguagagg

SEQ ID NO: 483678 - RNA, 22 nt, Human
agcuggccuccgggugccuggg

SEQ ID NO: 483679 - RNA, 22 nt, Human
agucccagaucuacaggaggga

SEQ ID NO: 483680 - RNA, 22 nt, Human
auauuugucaauucacuguuca

SEQ ID NO: 483681 - RNA, 22 nt, Human
uaggcaggcugaauguagauuu

SEQ ID NO: 483682 - RNA, 22 nt, Human
aagggaggccagagguuuugca

SEQ ID NO: 483683 - RNA, 22 nt, Human
gcucccuguucucagccaugau

SEQ ID NO: 483684 - RNA, 22 nt, Human
agaggccagguccagaguuugu

SEQ ID NO: 483685 - RNA, 22 nt, Human
ucccagacaaucauuggccacc

SEQ ID NO: 483686 - RNA, 22 nt, Human
ggcugcaguuugucuuuugcuu

SEQ ID NO: 483687 - RNA, 22 nt, Human
caguggcuguuucuggaaggca

SEQ ID NO: 483688 - RNA, 22 nt, Human
aggcagguguuaccucugguuu

SEQ ID NO: 483689 - RNA, 22 nt, Human
ugucaugccaggaaauaguccc

SEQ ID NO: 483690 - RNA, 22 nt, Human
gagcaugguuccauagguuggu

SEQ ID NO: 483691 - RNA, 20 nt, Human
accuugaacccgccagccau

SEQ ID NO: 483692 - RNA, 22 nt, Human
cauuuguaucauauguaucuua

SEQ ID NO: 483693 - RNA, 22 nt, Human
cugugccuggggggcagagcug

SEQ ID NO: 483694 - RNA, 22 nt, Human
ugccagagaagacccagucacu

SEQ ID NO: 483695 - RNA, 22 nt, Human
cugccucuguugggcauggucu

SEQ ID NO: 483696 - RNA, 22 nt, Human
uucacauuauaaucaguucugc

SEQ ID NO: 483697 - RNA, 22 nt, Human
cucuugggagugcucuggagaa

SEQ ID NO: 483698 - RNA, 23 nt, Human
uccugcagauaagcugguugaca

SEQ ID NO: 483699 - RNA, 22 nt, Human
ucuggccugaaaguccaugcuu

SEQ ID NO: 483700 - RNA, 23 nt, Human
cuagggcaguauuucacagacac

SEQ ID NO: 483701 - RNA, 22 nt, Human
cagcuugggaguuugguuuuau

SEQ ID NO: 483702 - RNA, 22 nt, Human
cccccagccagcagugcucagc

SEQ ID NO: 483703 - RNA, 22 nt, Human
uuauuuauucauucugucuguc

SEQ ID NO: 483704 - RNA, 22 nt, Human
gcugucccgcugacuuccagcu

SEQ ID NO: 483705 - RNA, 22 nt, Human
ggaugcugacuuuggagcaugg

SEQ ID NO: 483706 - RNA, 22 nt, Human
cuacaagauuuuuaaaacugua

SEQ ID NO: 483707 - RNA, 22 nt, Human
agcacagauucugaagaguccu

SEQ ID NO: 483708 - RNA, 22 nt, Human
gccucucucuacccaguaugau

SEQ ID NO: 483709 - RNA, 22 nt, Human
ggcuucccaaggagccaggaug

SEQ ID NO: 483710 - RNA, 18 nt, Human
uccugccugcgggcuccc

SEQ ID NO: 483711 - RNA, 22 nt, Human
auggaguucugccagcgcugcu

SEQ ID NO: 483712 - RNA, 22 nt, Human
ggcucaggagaggggcuaaaag

SEQ ID NO: 483713 - RNA, 22 nt, Human
aucuacagugcacaggacagcc

SEQ ID NO: 483714 - RNA, 20 nt, Human
cagaaggucuaagcuuuaga

SEQ ID NO: 483715 - RNA, 22 nt, Human
cucagggcaguauggcugagag

SEQ ID NO: 483716 - RNA, 22 nt, Human
gagugugggcacgggggccuug

SEQ ID NO: 483717 - RNA, 22 nt, Human
ugucagagagcaggcaguagaa

SEQ ID NO: 483718 - RNA, 22 nt, Human
gcucucugaggugcuggcagag

SEQ ID NO: 483719 - RNA, 22 nt, Human
cgaggcagacaaaaguuggaag

SEQ ID NO: 483720 - RNA, 18 nt, Human
acauuucuaggugaaagc

SEQ ID NO: 483721 - RNA, 22 nt, Human
cugcugggcagaggcugcauga

SEQ ID NO: 483722 - RNA, 22 nt, Human
gaggccuggcugggaggaggug

SEQ ID NO: 483723 - RNA, 22 nt, Human
ugguggccuugauggcaucugc

SEQ ID NO: 483724 - RNA, 22 nt, Human
cagacaggcuagccagacucac

SEQ ID NO: 483725 - RNA, 22 nt, Human
gggcacuguacacugugcaugg

SEQ ID NO: 483726 - RNA, 22 nt, Human
auguguuuguaccuuuaaauau

SEQ ID NO: 483727 - RNA, 22 nt, Human
aguccuucaagaaaucuggaaa

SEQ ID NO: 483728 - RNA, 22 nt, Human
caagugucuauaucagugcuug

SEQ ID NO: 483729 - RNA, 22 nt, Human
ggcaggagcucuccaguuugcc

SEQ ID NO: 483730 - RNA, 22 nt, Human
aaguuguauauaccgcuuuaag

SEQ ID NO: 483731 - RNA, 22 nt, Human
cagaggcaggauaagaacugcg

SEQ ID NO: 483732 - RNA, 22 nt, Human
gugugcaugcauagacaccaca

SEQ ID NO: 483733 - RNA, 22 nt, Human
cacacuagucuauccauuagcu

SEQ ID NO: 483734 - RNA, 22 nt, Human
ggagaggaaaugccagcacuuc

SEQ ID NO: 483735 - RNA, 22 nt, Human
cuggccaacuugcuuguuggca

SEQ ID NO: 483736 - RNA, 19 nt, Human
gcuggcagauguggccgug

SEQ ID NO: 483737 - RNA, 22 nt, Human
ugcugcucucagccaccaggaa

SEQ ID NO: 483738 - RNA, 20 nt, Human
ucacaucuggcagcugauga

SEQ ID NO: 483739 - RNA, 22 nt, Human
gagagcugcauucucagacaca

SEQ ID NO: 483740 - RNA, 22 nt, Human
caggguagacaguaggugucug

SEQ ID NO: 483741 - RNA, 21 nt, Human
aagagcugucaggaaggcugc

SEQ ID NO: 483742 - RNA, 21 nt, Human
uccauuguuuucccaggguuu

SEQ ID NO: 483743 - RNA, 22 nt, Human
cugaaggauucaaaauggcagg

SEQ ID NO: 483744 - RNA, 22 nt, Human
augcaguacagauaauucuaca

SEQ ID NO: 483745 - RNA, 20 nt, Human
aagagcugacucacaguggu

SEQ ID NO: 483746 - RNA, 20 nt, Human
uggagcuguaaucuugucug

SEQ ID NO: 483747 - RNA, 23 nt, Human
caguggagacucaugcuuccuua

SEQ ID NO: 483748 - RNA, 21 nt, Human
gcaugccugcaucuuaguguu

SEQ ID NO: 483749 - RNA, 22 nt, Human
uuguuacagcagugauuucaga

SEQ ID NO: 483750 - RNA, 22 nt, Human
gcucagaggagcaucauaagga

SEQ ID NO: 483751 - RNA, 21 nt, Human
aucagaaguuuuggucaguag

SEQ ID NO: 483752 - RNA, 23 nt, Human
aacaccaaggcucagagagauaa

SEQ ID NO: 483753 - RNA, 22 nt, Human
caggguugcaugcaucuguggg

SEQ ID NO: 483754 - RNA, 22 nt, Human
uggaggaaguugcuggaaguca

SEQ ID NO: 483755 - RNA, 22 nt, Human
gagggaaagguuaauacaugau

SEQ ID NO: 483756 - RNA, 18 nt, Human
ggaaaaggagugucuagc

SEQ ID NO: 483757 - RNA, 22 nt, Human
uggacucagugcugccauuccc

SEQ ID NO: 483758 - RNA, 22 nt, Human
ucaggcugcaucuguaagggug

SEQ ID NO: 483759 - RNA, 22 nt, Human
acuuuauuuccuauugcaucca

SEQ ID NO: 483760 - RNA, 22 nt, Human
aaaggucagacuuaggcugggc

SEQ ID NO: 483761 - RNA, 22 nt, Human
aggcaggcuagucgcuugagcc

SEQ ID NO: 483762 - RNA, 21 nt, Human
cagagcagcguucugcugugg

SEQ ID NO: 483763 - RNA, 22 nt, Human
ucauggagacuuugagccuguu

SEQ ID NO: 483764 - RNA, 22 nt, Human
acuuaaaaccagacagcgucau

SEQ ID NO: 483765 - RNA, 22 nt, Human
cccagcucucugcucuuagccu

SEQ ID NO: 483766 - RNA, 22 nt, Human
gccaggcuggaaagaacagaca

SEQ ID NO: 483767 - RNA, 22 nt, Human
uaaaaucauucuggugucagua

SEQ ID NO: 483768 - RNA, 22 nt, Human
cuauuuaucuauuucugaauga

SEQ ID NO: 483769 - RNA, 22 nt, Human
cugugacuagaccugcaggaga

SEQ ID NO: 483770 - RNA, 22 nt, Human
uagaacagaggguugcccagau

SEQ ID NO: 483771 - RNA, 22 nt, Human
ucaggccacggcucacugagac

SEQ ID NO: 483772 - RNA, 22 nt, Human
aguggcaguagaugagcugguu

SEQ ID NO: 483773 - RNA, 22 nt, Human
uucugucugauggugccagaac

SEQ ID NO: 483774 - RNA, 22 nt, Human
auugacaaggaaacuauaccag

SEQ ID NO: 483775 - RNA, 22 nt, Human
ggcacagggagccgcaguugca

SEQ ID NO: 483776 - RNA, 22 nt, Human
ggagaaggaagaaagcuacuau

SEQ ID NO: 483777 - RNA, 22 nt, Human
gguggagcuggaccaggagagg

SEQ ID NO: 483778 - RNA, 22 nt, Human
ucaccaggauuccuaucaguag

SEQ ID NO: 483779 - RNA, 22 nt, Human
cucaggguaaugaaagacgaau

SEQ ID NO: 483780 - RNA, 22 nt, Human
ggcugucucugugacugccacc

SEQ ID NO: 483781 - RNA, 22 nt, Human
gugcccugaguggguaggagag

SEQ ID NO: 483782 - RNA, 22 nt, Human
aagagccagcuagugaagaggc

SEQ ID NO: 483783 - RNA, 22 nt, Human
cuacagcagagcuacacuaacu

SEQ ID NO: 483784 - RNA, 22 nt, Human
gaaggaaaucugugauuuaugc

SEQ ID NO: 483785 - RNA, 19 nt, Human
auaaggcaggaggaaauuu

SEQ ID NO: 483786 - RNA, 22 nt, Human
uggcacuggcgcaggauggcgg

SEQ ID NO: 483787 - RNA, 19 nt, Human
agugcagggagcacccuca

SEQ ID NO: 483788 - RNA, 22 nt, Human
gggcaagcacagcgagcgugcg

SEQ ID NO: 483789 - RNA, 22 nt, Human
augucuuuauaaauguauaaug

SEQ ID NO: 483790 - RNA, 22 nt, Human
auugacaauuagcccuuaggug

SEQ ID NO: 483791 - RNA, 22 nt, Human
gagccuggauugaagugggugg

SEQ ID NO: 483792 - RNA, 22 nt, Human
uccagacccaugacccugggga

SEQ ID NO: 483793 - RNA, 22 nt, Human
cugagccagagggagucggguc

SEQ ID NO: 483794 - RNA, 22 nt, Human
agagccacggcaggccuaggaa

SEQ ID NO: 483795 - RNA, 22 nt, Human
ccagucugaggccuggugaggg

SEQ ID NO: 483796 - RNA, 22 nt, Human
agguagaggccuccaggcagca

SEQ ID NO: 483797 - RNA, 22 nt, Human
ugguccugagcaccagccugac

SEQ ID NO: 483798 - RNA, 22 nt, Human
gcugcccauuccacuggauggu

SEQ ID NO: 483799 - RNA, 22 nt, Human
caggauggucucgaucuccuga

SEQ ID NO: 483800 - RNA, 22 nt, Human
gaaagccaucuggcugcuggga

SEQ ID NO: 483801 - RNA, 22 nt, Human
aguacuuuacuucuuacaguuu

SEQ ID NO: 483802 - RNA, 22 nt, Human
ugauuucccuguagccucugaa

SEQ ID NO: 483803 - RNA, 22 nt, Human
uucuuacuaguauguuucagca

SEQ ID NO: 483804 - RNA, 22 nt, Human
caaggccacugcucagguuucc

SEQ ID NO: 483805 - RNA, 22 nt, Human
ucaucugucccaggcuuuuuuc

SEQ ID NO: 483806 - RNA, 22 nt, Human
uaggcagaaaggaaggcaaguu

SEQ ID NO: 483807 - RNA, 22 nt, Human
uccugcagcucugagaagcauc

SEQ ID NO: 483808 - RNA, 22 nt, Human
auuaauuuuaccuuuguaaaca

SEQ ID NO: 483809 - RNA, 22 nt, Human
uaucuauuccaaauaucagcgu

SEQ ID NO: 483810 - RNA, 22 nt, Human
cugggccagucucggccgcucu

SEQ ID NO: 483811 - RNA, 22 nt, Human
aauguguacaugacagauagaa

SEQ ID NO: 483812 - RNA, 22 nt, Human
uuagauaaauuaagacuuuaca

SEQ ID NO: 483813 - RNA, 17 nt, Human
aaucuguuuacagucag

SEQ ID NO: 483814 - RNA, 22 nt, Human
ugcuauugugaacagugccaca

SEQ ID NO: 483815 - RNA, 22 nt, Human
caagggcagcagccucaagcgg

SEQ ID NO: 483816 - RNA, 22 nt, Human
gcuccuggucuggagcuucaag

SEQ ID NO: 483817 - RNA, 22 nt, Human
cagagccaugguaugggcuugu

SEQ ID NO: 483818 - RNA, 22 nt, Human
gcaccaggcuuagagccccagg

SEQ ID NO: 483819 - RNA, 22 nt, Human
cuggcucauagagcagcuccaa

SEQ ID NO: 483820 - RNA, 22 nt, Human
cucacuguccaacaggcuuuac

SEQ ID NO: 483821 - RNA, 22 nt, Human
cuggcagcucuacucagagccu

SEQ ID NO: 483822 - RNA, 22 nt, Human
gccugcuguuaacugcaggaau

SEQ ID NO: 483823 - RNA, 22 nt, Human
cauguuauuuauccauuaaaca

SEQ ID NO: 483824 - RNA, 22 nt, Human
cagccagguucaaguccuuaua

SEQ ID NO: 483825 - RNA, 21 nt, Human
caguguggugaccagggucuc

SEQ ID NO: 483826 - RNA, 22 nt, Human
caggacaguauaggcuuuagga

SEQ ID NO: 483827 - RNA, 22 nt, Human
uaagcauaacuaaaaaugauuu

SEQ ID NO: 483828 - RNA, 22 nt, Human
gaaaugcagaaccugagaccau

SEQ ID NO: 483829 - RNA, 22 nt, Human
cucagccccaauucuccccauu

SEQ ID NO: 483830 - RNA, 22 nt, Human
gagagcuggguucaaguagcug

SEQ ID NO: 483831 - RNA, 22 nt, Human
cccagcuccuuacagggccgaa

SEQ ID NO: 483832 - RNA, 22 nt, Human
caggaacaauguaagucucauu

SEQ ID NO: 483833 - RNA, 22 nt, Human
acaggugguaaaauggacuguc

SEQ ID NO: 483834 - RNA, 22 nt, Human
guggccaggacauugccaggca

SEQ ID NO: 483835 - RNA, 22 nt, Human
uuuccucugggcccugccaccc

SEQ ID NO: 483836 - RNA, 20 nt, Human
guggccuguccuguuguggg

SEQ ID NO: 483837 - RNA, 22 nt, Human
cagagcuggccugugauuuuug

SEQ ID NO: 483838 - RNA, 16 nt, Human
agccaggcugccucgg

SEQ ID NO: 483839 - RNA, 22 nt, Human
uguacaugugucuguauaucuu

SEQ ID NO: 483840 - RNA, 22 nt, Human
gcguaaggccucuggucucgga

SEQ ID NO: 483841 - RNA, 22 nt, Human
cagucccaugagcccagaacau

SEQ ID NO: 483842 - RNA, 22 nt, Human
guauccuuugcggaaauuucua

SEQ ID NO: 483843 - RNA, 22 nt, Human
uauuuguauguguguacauaua

SEQ ID NO: 483844 - RNA, 22 nt, Human
accucccagcucugagcuuggg

SEQ ID NO: 483845 - RNA, 22 nt, Human
gcaggagagucugugccagguu

SEQ ID NO: 483846 - RNA, 22 nt, Human
acaggcagagaacucagccaga

SEQ ID NO: 483847 - RNA, 22 nt, Human
agccaucauuucugucacuggc

SEQ ID NO: 483848 - RNA, 22 nt, Human
gcagccucaaacuccccagcuc

SEQ ID NO: 483849 - RNA, 16 nt, Human
cagccugcagugguca

SEQ ID NO: 483850 - RNA, 22 nt, Human
cuggagagauccuccugaaaaa

SEQ ID NO: 483851 - RNA, 22 nt, Human
gagugcaguaucuucugugucc

SEQ ID NO: 483852 - RNA, 22 nt, Human
ccuggaagauucaccacuacca

SEQ ID NO: 483853 - RNA, 23 nt, Human
uuuuccagaaucgacucuguaga

SEQ ID NO: 483854 - RNA, 22 nt, Human
uuucagauggagguuuaggaca

SEQ ID NO: 483855 - RNA, 22 nt, Human
agagcuggacgucugagcccua

SEQ ID NO: 483856 - RNA, 22 nt, Human
cugggccucauccucagaguuu

SEQ ID NO: 483857 - RNA, 22 nt, Human
uuuccucuuuguaccuugacua

SEQ ID NO: 483858 - RNA, 18 nt, Human
cuuucagauggauaugcu

SEQ ID NO: 483859 - RNA, 22 nt, Human
uuuacacauaccucuuuaaagu

SEQ ID NO: 483860 - RNA, 22 nt, Human
ccaggcagcucugauuuauguc

SEQ ID NO: 483861 - RNA, 22 nt, Human
gugucauuaaccaccaugcaaa

SEQ ID NO: 483862 - RNA, 22 nt, Human
ccuuccaggugcaggcaagccu

SEQ ID NO: 483863 - RNA, 22 nt, Human
agaauguagucuuggagauuua

SEQ ID NO: 483864 - RNA, 22 nt, Human
ugggcuguccagcaccugggcu

SEQ ID NO: 483865 - RNA, 19 nt, Human
ggcugucucggcccagcca

SEQ ID NO: 483866 - RNA, 22 nt, Human
ucugggcugggagcguguggac

SEQ ID NO: 483867 - RNA, 22 nt, Human
ccaggcugcagucaaggggcau

SEQ ID NO: 483868 - RNA, 22 nt, Human
aggucagcugcugauaggcagc

SEQ ID NO: 483869 - RNA, 22 nt, Human
aggcccagcccguccucgugcu

SEQ ID NO: 483870 - RNA, 22 nt, Human
ugccugggccuucccaccucug

SEQ ID NO: 483871 - RNA, 22 nt, Human
uuacuuuggauggucaagaaag

SEQ ID NO: 483872 - RNA, 22 nt, Human
ucagaggguggcugggagcauc

SEQ ID NO: 483873 - RNA, 19 nt, Human
acagggcagcaauaggaua

SEQ ID NO: 483874 - RNA, 20 nt, Human
ggaccagguggggcgguggc

SEQ ID NO: 483875 - RNA, 22 nt, Human
cccagaggugcuucagaggugc

SEQ ID NO: 483876 - RNA, 18 nt, Human
ggccugaggauuucagca

SEQ ID NO: 483877 - RNA, 22 nt, Human
ugcagugggccggaggccaggg

SEQ ID NO: 483878 - RNA, 22 nt, Human
auaaacagcuccauuuagugcc

SEQ ID NO: 483879 - RNA, 22 nt, Human
gaggucagucagaccaggguuu

SEQ ID NO: 483880 - RNA, 22 nt, Human
gucagcugucuccccagagugg

SEQ ID NO: 483881 - RNA, 17 nt, Human
aggagucucagaugagc

SEQ ID NO: 483882 - RNA, 20 nt, Human
gcugccuuguccugcuuggu

SEQ ID NO: 483883 - RNA, 22 nt, Human
gaaugcacuuccaacaucuauu

SEQ ID NO: 483884 - RNA, 22 nt, Human
cuccucacuuuccagacugggc

SEQ ID NO: 483885 - RNA, 22 nt, Human
aauucugugcaggcagagcuau

SEQ ID NO: 483886 - RNA, 22 nt, Human
ugggcagagucguggggaauag

SEQ ID NO: 483887 - RNA, 22 nt, Human
guaacacagaaaugaaauucca

SEQ ID NO: 483888 - RNA, 22 nt, Human
cagacuuucaaggagugaaggc

SEQ ID NO: 483889 - RNA, 22 nt, Human
agaggcugaaugaugucaucau

SEQ ID NO: 483890 - RNA, 21 nt, Human
ucugggcccaugcugccucac

SEQ ID NO: 483891 - RNA, 22 nt, Human
cuucuugcaauuuucaucuuau

SEQ ID NO: 483892 - RNA, 22 nt, Human
auacuuacuuuucuucagacua

SEQ ID NO: 483893 - RNA, 22 nt, Human
auacaaguugugauaauguaaa

SEQ ID NO: 483894 - RNA, 22 nt, Human
auaaggcagaaauagggaaagu

SEQ ID NO: 483895 - RNA, 22 nt, Human
cuggccuguccugacccagccu

SEQ ID NO: 483896 - RNA, 22 nt, Human
ccugcccagcuucccgagugca

SEQ ID NO: 483897 - RNA, 21 nt, Human
ucagagagucacagugaacug

SEQ ID NO: 483898 - RNA, 20 nt, Human
gcuuuuucuaauagcagucc

SEQ ID NO: 483899 - RNA, 22 nt, Human
caagagcugcaaauagcgugac

SEQ ID NO: 483900 - RNA, 22 nt, Human
aauuucaaacuaauaggaacca

SEQ ID NO: 483901 - RNA, 22 nt, Human
gagcugcuggcuccucagguua

SEQ ID NO: 483902 - RNA, 21 nt, Human
auuuucauuuccaggggagga

SEQ ID NO: 483903 - RNA, 22 nt, Human
ucaguuuuuacggucacaggga

SEQ ID NO: 483904 - RNA, 22 nt, Human
gggauggggagcuggaaagggg

SEQ ID NO: 483905 - RNA, 22 nt, Human
cagcaggacauggaggaguaaa

SEQ ID NO: 483906 - RNA, 20 nt, Human
uauuuguauuugggaaaguu

SEQ ID NO: 483907 - RNA, 22 nt, Human
gcaggcagagagggguuuccag

SEQ ID NO: 483908 - RNA, 22 nt, Human
ucauuuguugcuguuaccugag

SEQ ID NO: 483909 - RNA, 22 nt, Human
aucugccuggcuccaggugagc

SEQ ID NO: 483910 - RNA, 22 nt, Human
ugaagcagaggggucuugagcu

SEQ ID NO: 483911 - RNA, 22 nt, Human
ccugagacaugaaccaggcucc

SEQ ID NO: 483912 - RNA, 19 nt, Human
ucagaggauuuggcuauga

SEQ ID NO: 483913 - RNA, 22 nt, Human
caggaccuggaaugcuugugaa

SEQ ID NO: 483914 - RNA, 20 nt, Human
uaucaaucagaaagaagacu

SEQ ID NO: 483915 - RNA, 22 nt, Human
caccagcuuugcccacugccca

SEQ ID NO: 483916 - RNA, 22 nt, Human
ucaaaaguuucacauagagaua

SEQ ID NO: 483917 - RNA, 23 nt, Human
ugagcugguauuguccaucucca

SEQ ID NO: 483918 - RNA, 22 nt, Human
ggcaucuguccaucucuccagc

SEQ ID NO: 483919 - RNA, 22 nt, Human
aaguaacaaugcuguugaauug

SEQ ID NO: 483920 - RNA, 22 nt, Human
cacauaauacauguuccacuua

SEQ ID NO: 483921 - RNA, 22 nt, Human
acuucauuguaauauuauagca

SEQ ID NO: 483922 - RNA, 22 nt, Human
aacaaucaaguuucuaaaugac

SEQ ID NO: 483923 - RNA, 22 nt, Human
ggucucagacuggcaggcagug

SEQ ID NO: 483924 - RNA, 22 nt, Human
gacauaaaauucaauaauuugu

SEQ ID NO: 483925 - RNA, 22 nt, Human
ucagccagugccuugaucuugc

SEQ ID NO: 483926 - RNA, 22 nt, Human
ucacugucugaaagaaauggcc

SEQ ID NO: 483927 - RNA, 22 nt, Human
uguuaggguccugugcaggggc

SEQ ID NO: 483928 - RNA, 20 nt, Human
uccucagaagacauuugggg

SEQ ID NO: 483929 - RNA, 22 nt, Human
uuucucaaguucagauauuuga

SEQ ID NO: 483930 - RNA, 22 nt, Human
agugagcauucguuuggaaccc

SEQ ID NO: 483931 - RNA, 22 nt, Human
ggugcagaggagccagcugggg

SEQ ID NO: 483932 - RNA, 22 nt, Human
caguccugagccaaucaugaug

SEQ ID NO: 483933 - RNA, 22 nt, Human
cagggcaggacagauacauuac

SEQ ID NO: 483934 - RNA, 22 nt, Human
cucaggauagauuguccucuca

SEQ ID NO: 483935 - RNA, 22 nt, Human
caggauggucuucauuuggcuc

SEQ ID NO: 483936 - RNA, 22 nt, Human
cagccagggagggcaaaugaga

SEQ ID NO: 483937 - RNA, 22 nt, Human
ugggagcaagcuggugcuggag

SEQ ID NO: 483938 - RNA, 22 nt, Human
agaggccggccgagcccauggg

SEQ ID NO: 483939 - RNA, 22 nt, Human
agcccuggcccggcugugcuuu

SEQ ID NO: 483940 - RNA, 23 nt, Human
gugcaugugucuuuacaguagca

SEQ ID NO: 483941 - RNA, 22 nt, Human
ccugaagggacuccagagagca

SEQ ID NO: 483942 - RNA, 22 nt, Human
cagagcugggcauggugaaagg

SEQ ID NO: 483943 - RNA, 22 nt, Human
ucucccacuggccuuguaugau

SEQ ID NO: 483944 - RNA, 22 nt, Human
aggggagaguuaaugugaaugu

SEQ ID NO: 483945 - RNA, 22 nt, Human
ucccuuaaaacucauguguugu

SEQ ID NO: 483946 - RNA, 22 nt, Human
agagcagaggcauggccguggg

SEQ ID NO: 483947 - RNA, 22 nt, Human
cugggacacccaaggaaagagc

SEQ ID NO: 483948 - RNA, 22 nt, Human
ugccugcucuuaccacucuccc

SEQ ID NO: 483949 - RNA, 22 nt, Human
aaggcacucauucaaggagaua

SEQ ID NO: 483950 - RNA, 20 nt, Human
gcagggcaagggauaugaaa

SEQ ID NO: 483951 - RNA, 22 nt, Human
ucaagagaaggggaaauagacu

SEQ ID NO: 483952 - RNA, 22 nt, Human
uggcagagcuggcugcggauga

SEQ ID NO: 483953 - RNA, 22 nt, Human
ucugagccaauuucugugucca

SEQ ID NO: 483954 - RNA, 19 nt, Human
agcaaauauaauaguguuc

SEQ ID NO: 483955 - RNA, 22 nt, Human
uuugacagcuuguuacaaaguu

SEQ ID NO: 483956 - RNA, 21 nt, Human
ccugagggugguugugaagau

SEQ ID NO: 483957 - RNA, 22 nt, Human
ggagagcagggaggcugcucug

SEQ ID NO: 483958 - RNA, 22 nt, Human
gcauggaauucccuuaugggcc

SEQ ID NO: 483959 - RNA, 22 nt, Human
uuuauguaauuucauaggugug

SEQ ID NO: 483960 - RNA, 22 nt, Human
caagagcuggagaggcagucua

SEQ ID NO: 483961 - RNA, 22 nt, Human
ugaaccaggaggcagccagcac

SEQ ID NO: 483962 - RNA, 22 nt, Human
uccugcugagcgucugucauuu

SEQ ID NO: 483963 - RNA, 22 nt, Human
agugugggugagggaggcccuc

SEQ ID NO: 483964 - RNA, 22 nt, Human
gccugugacucgucuugggcca

SEQ ID NO: 483965 - RNA, 22 nt, Human
aaaacuguaucuucuugggacu

SEQ ID NO: 483966 - RNA, 22 nt, Human
cagaggcauauaauugcugggg

SEQ ID NO: 483967 - RNA, 22 nt, Human
gcuggcagccaagugaagaggg

SEQ ID NO: 483968 - RNA, 22 nt, Human
gccuucugauaucucuuggcau

SEQ ID NO: 483969 - RNA, 22 nt, Human
uugauuuauagaauguucaagc

SEQ ID NO: 483970 - RNA, 22 nt, Human
cugcagagcagccaguccccca

SEQ ID NO: 483971 - RNA, 22 nt, Human
uacaaagugugcccaugcugag

SEQ ID NO: 483972 - RNA, 22 nt, Human
ugcccaaguguuuggcugaguc

SEQ ID NO: 483973 - RNA, 21 nt, Human
agaguaauuccugcuggaaag

SEQ ID NO: 483974 - RNA, 22 nt, Human
cccuuucccuucuggcucaggg

SEQ ID NO: 483975 - RNA, 22 nt, Human
accaaaggcagagcugaacacu

SEQ ID NO: 483976 - RNA, 22 nt, Human
aagaaucauccugcaagagucu

SEQ ID NO: 483977 - RNA, 22 nt, Human
uccauccauguaggaagauggu

SEQ ID NO: 483978 - RNA, 21 nt, Human
aaaaugugagcgugaugcuua

SEQ ID NO: 483979 - RNA, 22 nt, Human
uggcuucaucugcagcacugcc

SEQ ID NO: 483980 - RNA, 22 nt, Human
ugcaggccucacaccuggcacc

SEQ ID NO: 483981 - RNA, 22 nt, Human
cuccagugagugagcaggcgac

SEQ ID NO: 483982 - RNA, 22 nt, Human
gccucugcaauuacauugugcc

SEQ ID NO: 483983 - RNA, 22 nt, Human
caucugcuguuccuuggacuca

SEQ ID NO: 483984 - RNA, 20 nt, Human
auacacauauucuugcaacu

SEQ ID NO: 483985 - RNA, 22 nt, Human
acacaugcauaagccuucccuu

SEQ ID NO: 483986 - RNA, 22 nt, Human
ucagcaguuuuauaugcagcuu

SEQ ID NO: 483987 - RNA, 22 nt, Human
ugccucugugggccuuccuggc

SEQ ID NO: 483988 - RNA, 22 nt, Human
gcaaaaaccacaauuacuuuug

SEQ ID NO: 483989 - RNA, 22 nt, Human
cuggggugagcagaaacagggg

SEQ ID NO: 483990 - RNA, 22 nt, Human
gaaauucugugucccagagugc

SEQ ID NO: 483991 - RNA, 22 nt, Human
cugcucugaguauuaacggagg

SEQ ID NO: 483992 - RNA, 22 nt, Human
cagcauggggcuuggagucagc

SEQ ID NO: 483993 - RNA, 20 nt, Human
accccagccccucuaucuga

SEQ ID NO: 483994 - RNA, 22 nt, Human
gugcuuuccauccucccugcug

SEQ ID NO: 483995 - RNA, 22 nt, Human
cuguauuuaguuaaaaugcuaa

SEQ ID NO: 483996 - RNA, 22 nt, Human
auuguauuagcacaauacaauu

SEQ ID NO: 483997 - RNA, 20 nt, Human
ugccaggcacggagugcaug

SEQ ID NO: 483998 - RNA, 22 nt, Human
ccaaaggcggaacugagucucu

SEQ ID NO: 483999 - RNA, 22 nt, Human
cuggucugagggcucuugaggc

SEQ ID NO: 484000 - RNA, 22 nt, Human
ggagccuggcaaugcugcgucc

SEQ ID NO: 484001 - RNA, 22 nt, Human
uauaacaguuuaggugguguca

SEQ ID NO: 484002 - RNA, 22 nt, Human
aaagucauguaaugauaugauu

SEQ ID NO: 484003 - RNA, 22 nt, Human
uuuaguagaaugauacagggca

SEQ ID NO: 484004 - RNA, 22 nt, Human
uaacagaaguuguucauugugg

SEQ ID NO: 484005 - RNA, 22 nt, Human
gccuggguccacugaucaugcu

SEQ ID NO: 484006 - RNA, 22 nt, Human
cuacauuucccagcugccuucc

SEQ ID NO: 484007 - RNA, 22 nt, Human
cugggccugggaggccaggucu

SEQ ID NO: 484008 - RNA, 22 nt, Human
agagccugugauugucaucacc

SEQ ID NO: 484009 - RNA, 22 nt, Human
gagccugcccagcccuguccac

SEQ ID NO: 484010 - RNA, 22 nt, Human
caggccugacccugagcuucac

SEQ ID NO: 484011 - RNA, 19 nt, Human
cacaucagcagggcugugg

SEQ ID NO: 484012 - RNA, 22 nt, Human
agggccagaugaagccacaagc

SEQ ID NO: 484013 - RNA, 20 nt, Human
aagggagaauaaugauugua

SEQ ID NO: 484014 - RNA, 22 nt, Human
uuuuagauugggaaauguaaag

SEQ ID NO: 484015 - RNA, 22 nt, Human
cccucuggcucuucucaggccg

SEQ ID NO: 484016 - RNA, 22 nt, Human
uggcagcaaaaccagaaucaga

SEQ ID NO: 484017 - RNA, 22 nt, Human
cucccugggccucaguuucucu

SEQ ID NO: 484018 - RNA, 22 nt, Human
gucccagggaugcagacaugag

SEQ ID NO: 484019 - RNA, 20 nt, Human
aagcagaagcugcucucagc

SEQ ID NO: 484020 - RNA, 22 nt, Human
gcagugcugaucccauggcaga

SEQ ID NO: 484021 - RNA, 22 nt, Human
uucaacacaggaacaugauaua

SEQ ID NO: 484022 - RNA, 22 nt, Human
ccaggaugacccccacuuuccu

SEQ ID NO: 484023 - RNA, 22 nt, Human
cccagacuccucuggcuggugg

SEQ ID NO: 484024 - RNA, 22 nt, Human
ucucacugggucacagcagagg

SEQ ID NO: 484025 - RNA, 22 nt, Human
aaaucugggucaagguggagug

SEQ ID NO: 484026 - RNA, 22 nt, Human
caguuuauaugucagagcugua

SEQ ID NO: 484027 - RNA, 22 nt, Human
ucuauuucgcauauaaguuuug

SEQ ID NO: 484028 - RNA, 22 nt, Human
cacaugcaucugucauguuugg

SEQ ID NO: 484029 - RNA, 22 nt, Human
accugcaggcacaggugugcgc

SEQ ID NO: 484030 - RNA, 22 nt, Human
acuggcucagaguuccuagaga

SEQ ID NO: 484031 - RNA, 22 nt, Human
ggcugcaggcaggguauccacu

SEQ ID NO: 484032 - RNA, 22 nt, Human
uacauuccacuagugacuggcg

SEQ ID NO: 484033 - RNA, 22 nt, Human
cucagggacguuagaggacagg

SEQ ID NO: 484034 - RNA, 18 nt, Human
caggucagccuggccuca

SEQ ID NO: 484035 - RNA, 22 nt, Human
ggaggaggggugacugaaugcu

SEQ ID NO: 484036 - RNA, 22 nt, Human
uucuaccuacccucugcauaca

SEQ ID NO: 484037 - RNA, 22 nt, Human
cugagcugcggcaggcaccugg

SEQ ID NO: 484038 - RNA, 22 nt, Human
gagucugagucuaauggcccca

SEQ ID NO: 484039 - RNA, 22 nt, Human
cuggggcugcggacgggagccc

SEQ ID NO: 484040 - RNA, 22 nt, Human
ugccagaagauucucuaucaga

SEQ ID NO: 484041 - RNA, 23 nt, Human
agaccugcaucugauaggcccug

SEQ ID NO: 484042 - RNA, 22 nt, Human
aaaaaugaauucuucaguggca

SEQ ID NO: 484043 - RNA, 22 nt, Human
acuggcaguuugagaaugcauu

SEQ ID NO: 484044 - RNA, 22 nt, Human
ugugacagaucuuuaaauaaug

SEQ ID NO: 484045 - RNA, 22 nt, Human
ugcaugcagcuggugauaagaa

SEQ ID NO: 484046 - RNA, 23 nt, Human
uggcugagguccagguaguuuca

SEQ ID NO: 484047 - RNA, 22 nt, Human
ugagacaguucugcagcugggu

SEQ ID NO: 484048 - RNA, 22 nt, Human
ucauuuguucaucugcucuucu

SEQ ID NO: 484049 - RNA, 22 nt, Human
uuacucagucucccauacauug

SEQ ID NO: 484050 - RNA, 19 nt, Human
gaguuauugccagggcaug

SEQ ID NO: 484051 - RNA, 20 nt, Human
ugggcagcacugcuggcugg

SEQ ID NO: 484052 - RNA, 21 nt, Human
agacagaacaacugcucucca

SEQ ID NO: 484053 - RNA, 22 nt, Human
uccagggagauggcagaggcug

SEQ ID NO: 484054 - RNA, 22 nt, Human
gcagcuuugucacggagugucg

SEQ ID NO: 484055 - RNA, 22 nt, Human
uggggcugugagacuacaggau

SEQ ID NO: 484056 - RNA, 22 nt, Human
cugcuuuguggaaucacacugg

SEQ ID NO: 484057 - RNA, 22 nt, Human
ucagggcaucaucaugaauaua

SEQ ID NO: 484058 - RNA, 22 nt, Human
aaggcuuuuaacuacuguuuua

SEQ ID NO: 484059 - RNA, 22 nt, Human
gaauccaggguuguuugagcua

SEQ ID NO: 484060 - RNA, 22 nt, Human
uaccugcaaaguuccuuuugcc

SEQ ID NO: 484061 - RNA, 22 nt, Human
cucccaggggaacuaucaagua

SEQ ID NO: 484062 - RNA, 22 nt, Human
uggugugggcguggcaggcaag

SEQ ID NO: 484063 - RNA, 22 nt, Human
aggagucacucagggcuucauc

SEQ ID NO: 484064 - RNA, 22 nt, Human
ucacaguaucacacaaggauua

SEQ ID NO: 484065 - RNA, 22 nt, Human
ggucagggggaucugugaggua

SEQ ID NO: 484066 - RNA, 22 nt, Human
cagagcaucgcgcagagagccu

SEQ ID NO: 484067 - RNA, 22 nt, Human
ucaggcagcauuaaacuucagc

SEQ ID NO: 484068 - RNA, 22 nt, Human
aguggcagaucucuggucugga

SEQ ID NO: 484069 - RNA, 22 nt, Human
agucaauucuuuucaacucaag

SEQ ID NO: 484070 - RNA, 22 nt, Human
aguaaacauaauuuaccuguag

SEQ ID NO: 484071 - RNA, 22 nt, Human
ugaggcuuagagaagaugggau

SEQ ID NO: 484072 - RNA, 22 nt, Human
cgggcuggcugcagcugcugga

SEQ ID NO: 484073 - RNA, 22 nt, Human
agcugccuguccuaggccauca

SEQ ID NO: 484074 - RNA, 22 nt, Human
gcagcugcuguggcaucaagcu

SEQ ID NO: 484075 - RNA, 22 nt, Human
uccugccuguuuaccuguacuu

SEQ ID NO: 484076 - RNA, 22 nt, Human
ccagggccaagagaccucgagg

SEQ ID NO: 484077 - RNA, 22 nt, Human
gagguggccucaagcagucuuc

SEQ ID NO: 484078 - RNA, 22 nt, Human
ggcccagccggcgagucucgcg

SEQ ID NO: 484079 - RNA, 22 nt, Human
cccagcagccagaaugaggagc

SEQ ID NO: 484080 - RNA, 22 nt, Human
agacaucaaugaucagagguag

SEQ ID NO: 484081 - RNA, 18 nt, Human
guucaaggucaagagaga

SEQ ID NO: 484082 - RNA, 17 nt, Human
acaggccugcuugcacu

SEQ ID NO: 484083 - RNA, 22 nt, Human
ccuuuggguucaaucucggucu

SEQ ID NO: 484084 - RNA, 22 nt, Human
cuuagaaauuguuacucauuca

SEQ ID NO: 484085 - RNA, 22 nt, Human
ugucagaacucuauugaugucc

SEQ ID NO: 484086 - RNA, 22 nt, Human
ugaggcaguucuuacuuguauu

SEQ ID NO: 484087 - RNA, 18 nt, Human
ucagcuuuugaaaaccaa

SEQ ID NO: 484088 - RNA, 22 nt, Human
uuuguuuucaaugugucauuca

SEQ ID NO: 484089 - RNA, 22 nt, Human
aguccagggcucucugugggau

SEQ ID NO: 484090 - RNA, 22 nt, Human
guuggccugaauggucaagagg

SEQ ID NO: 484091 - RNA, 22 nt, Human
ugguccuggggaucugcaguga

SEQ ID NO: 484092 - RNA, 21 nt, Human
aaggcagaagcauggaaugag

SEQ ID NO: 484093 - RNA, 22 nt, Human
cucuggaguucuucaagcuacu

SEQ ID NO: 484094 - RNA, 22 nt, Human
uccaucagauucccuccugaga

SEQ ID NO: 484095 - RNA, 22 nt, Human
aagugacacauggcacuucuau

SEQ ID NO: 484096 - RNA, 22 nt, Human
agcagcaucuucuguucuccgc

SEQ ID NO: 484097 - RNA, 22 nt, Human
guaguucugcagugucaccuga

SEQ ID NO: 484098 - RNA, 22 nt, Human
aaaccaucagauaauucauacu

SEQ ID NO: 484099 - RNA, 22 nt, Human
ccaguggguaggccauggugag

SEQ ID NO: 484100 - RNA, 22 nt, Human
gcagacagacugcagugauuuu

SEQ ID NO: 484101 - RNA, 22 nt, Human
gcugucugucucugugacuuaa

SEQ ID NO: 484102 - RNA, 18 nt, Human
gcagcugcaguuguagcu

SEQ ID NO: 484103 - RNA, 22 nt, Human
cuggguggaucgcagccccagg

SEQ ID NO: 484104 - RNA, 22 nt, Human
guggagccaggaucuccgcaca

SEQ ID NO: 484105 - RNA, 22 nt, Human
gugccugcagcaauccauggca

SEQ ID NO: 484106 - RNA, 21 nt, Human
gggcgaggccugauguggcuc

SEQ ID NO: 484107 - RNA, 22 nt, Human
aaaugcauaucaaagacuugaa

SEQ ID NO: 484108 - RNA, 22 nt, Human
ucagagugugacuuggucauga

SEQ ID NO: 484109 - RNA, 22 nt, Human
uucuuugaguuaguacagucca

SEQ ID NO: 484110 - RNA, 22 nt, Human
caagcugguaucagcuagagcg

SEQ ID NO: 484111 - RNA, 22 nt, Human
uacuuagagcgauaauuuauac

SEQ ID NO: 484112 - RNA, 22 nt, Human
gagcagcuuaugucaagccaga

SEQ ID NO: 484113 - RNA, 22 nt, Human
cugacucagcagcugaugaucc

SEQ ID NO: 484114 - RNA, 22 nt, Human
gcacccagagggcagggucucc

SEQ ID NO: 484115 - RNA, 22 nt, Human
gaggggcagagguagagaacaa

SEQ ID NO: 484116 - RNA, 22 nt, Human
cagcaggauuggauacaucuca

SEQ ID NO: 484117 - RNA, 21 nt, Human
ugaaaucugaugggacaaaug

SEQ ID NO: 484118 - RNA, 22 nt, Human
ugauuuccaaaaggcuucuaag

SEQ ID NO: 484119 - RNA, 22 nt, Human
gacccaggguggucaccugaaa

SEQ ID NO: 484120 - RNA, 22 nt, Human
gugcaugugucuuuauaguaga

SEQ ID NO: 484121 - RNA, 19 nt, Human
gcugugccucucuccugcu

SEQ ID NO: 484122 - RNA, 22 nt, Human
ugaggaugacgauggcaauggc

SEQ ID NO: 484123 - RNA, 17 nt, Human
gaaagguccuagaaauc

SEQ ID NO: 484124 - RNA, 22 nt, Human
aaagccagaguguguuagagac

SEQ ID NO: 484125 - RNA, 19 nt, Human
acauuuagaauguacuugc

SEQ ID NO: 484126 - RNA, 22 nt, Human
cacuguacccauuuaaauaaau

SEQ ID NO: 484127 - RNA, 22 nt, Human
aggcucuggcaacagcuggugu

SEQ ID NO: 484128 - RNA, 22 nt, Human
cauuucugugacacuuccaucu

SEQ ID NO: 484129 - RNA, 22 nt, Human
uuuccucuccggggccuccagg

SEQ ID NO: 484130 - RNA, 22 nt, Human
ccuucagaccuagacaggaauc

SEQ ID NO: 484131 - RNA, 22 nt, Human
ccagugcaggugagcaccaggu

SEQ ID NO: 484132 - RNA, 22 nt, Human
uacauguaggugacauuuuaau

SEQ ID NO: 484133 - RNA, 22 nt, Human
aagccagauagaagaacucauu

SEQ ID NO: 484134 - RNA, 22 nt, Human
uggcaggguuggccaccuuacc

SEQ ID NO: 484135 - RNA, 18 nt, Human
cugccuguugcugagagg

SEQ ID NO: 484136 - RNA, 22 nt, Human
agccuggccacucagggccuga

SEQ ID NO: 484137 - RNA, 22 nt, Human
ugggagagugcucaaugugcaa

SEQ ID NO: 484138 - RNA, 22 nt, Human
uauuuucuguggaggaccagau

SEQ ID NO: 484139 - RNA, 22 nt, Human
ugccugccaugcagaaagcuga

SEQ ID NO: 484140 - RNA, 22 nt, Human
ugcugggggugucucaccaggc

SEQ ID NO: 484141 - RNA, 22 nt, Human
ugggcugccagcucuccagaug

SEQ ID NO: 484142 - RNA, 22 nt, Human
cugugcuuaccugcccagguga

SEQ ID NO: 484143 - RNA, 22 nt, Human
cugaaggauguguggugggagu

SEQ ID NO: 484144 - RNA, 22 nt, Human
uuugcaauuugugcugcaaaug

SEQ ID NO: 484145 - RNA, 22 nt, Human
gcccacagcucguuccucuccu

SEQ ID NO: 484146 - RNA, 22 nt, Human
acuguguguuugucuagcacag

SEQ ID NO: 484147 - RNA, 20 nt, Human
uaugaagauaugugaacagc

SEQ ID NO: 484148 - RNA, 22 nt, Human
aguguuucccaguaggaugaaa

SEQ ID NO: 484149 - RNA, 22 nt, Human
caguacuuugcaucauuccacu

SEQ ID NO: 484150 - RNA, 19 nt, Human
aagggcugggcaccucacu

SEQ ID NO: 484151 - RNA, 22 nt, Human
cagagcucagagcagggcacuc

SEQ ID NO: 484152 - RNA, 22 nt, Human
aggagcugcauggauaccuggu

SEQ ID NO: 484153 - RNA, 22 nt, Human
agacucugauaagcaacucuug

SEQ ID NO: 484154 - RNA, 22 nt, Human
gcagggccagggcucaggcugu

SEQ ID NO: 484155 - RNA, 22 nt, Human
ugaaaucuuauacuuugguagu

SEQ ID NO: 484156 - RNA, 22 nt, Human
gccucgaggcugagaaggcaca

SEQ ID NO: 484157 - RNA, 22 nt, Human
gggcugagaaguugaucccaag

SEQ ID NO: 484158 - RNA, 22 nt, Human
uacauucaacaugucacuaugu

SEQ ID NO: 484159 - RNA, 22 nt, Human
ugaaagguuaaaaguaguauug

SEQ ID NO: 484160 - RNA, 22 nt, Human
ggcuccuguccccucagcugcu

SEQ ID NO: 484161 - RNA, 22 nt, Human
ggcucaagcagucugccugccu

SEQ ID NO: 484162 - RNA, 22 nt, Human
agcaggugagcacagccaggcu

SEQ ID NO: 484163 - RNA, 22 nt, Human
uucaagucaaggaaagaggucu

SEQ ID NO: 484164 - RNA, 19 nt, Human
ucugcuggcagaauucccu

SEQ ID NO: 484165 - RNA, 22 nt, Human
ccaggcugccgaggaaagaaag

SEQ ID NO: 484166 - RNA, 22 nt, Human
agagcccugaagcagagcuaaa

SEQ ID NO: 484167 - RNA, 21 nt, Human
aaggagccuaggaggcucagg

SEQ ID NO: 484168 - RNA, 22 nt, Human
uggcugagaaaaaagagcuaua

SEQ ID NO: 484169 - RNA, 22 nt, Human
cagcaauaagccagguuagaca

SEQ ID NO: 484170 - RNA, 23 nt, Human
agaguccacaagauuuuccagug

SEQ ID NO: 484171 - RNA, 18 nt, Human
uggccuggagacaacucu

SEQ ID NO: 484172 - RNA, 22 nt, Human
ccuagagcucugcuuuaucuaa

SEQ ID NO: 484173 - RNA, 22 nt, Human
aaagauuucagaagccugugcc

SEQ ID NO: 484174 - RNA, 22 nt, Human
aaaucuggccccuugccuauuu

SEQ ID NO: 484175 - RNA, 20 nt, Human
aggcagacaaggagucuguu

SEQ ID NO: 484176 - RNA, 22 nt, Human
gcccagcugcacccuggugggu

SEQ ID NO: 484177 - RNA, 22 nt, Human
gcugaguguaaugauggcagag

SEQ ID NO: 484178 - RNA, 22 nt, Human
ugguccagacauuucugaggua

SEQ ID NO: 484179 - RNA, 22 nt, Human
ccuggguggcagagguugcagu

SEQ ID NO: 484180 - RNA, 22 nt, Human
ccuggagcacucucccuggcug

SEQ ID NO: 484181 - RNA, 22 nt, Human
aucuggcugacuuugugggaca

SEQ ID NO: 484182 - RNA, 22 nt, Human
ggcuagaacuuuacacuuugca

SEQ ID NO: 484183 - RNA, 17 nt, Human
ugaaggaaggaugaugu

SEQ ID NO: 484184 - RNA, 21 nt, Human
ggucagggggugccuccaggu

SEQ ID NO: 484185 - RNA, 22 nt, Human
agccacagugcaagagagaaaa

SEQ ID NO: 484186 - RNA, 22 nt, Human
acuguacuguguauuguagaau

SEQ ID NO: 484187 - RNA, 22 nt, Human
auggcagagggauugaacagcu

SEQ ID NO: 484188 - RNA, 22 nt, Human
auuuccuauagauauggugagu

SEQ ID NO: 484189 - RNA, 22 nt, Human
aggcugagccugggcguggugg

SEQ ID NO: 484190 - RNA, 22 nt, Human
caguggcugugaccagggaccu

SEQ ID NO: 484191 - RNA, 22 nt, Human
gugcagugaaaaaagaaugucc

SEQ ID NO: 484192 - RNA, 19 nt, Human
gugauuucuuuccacaagc

SEQ ID NO: 484193 - RNA, 22 nt, Human
guauacauagaugaugaacaag

SEQ ID NO: 484194 - RNA, 22 nt, Human
cacaggaggaggugcccgggcc

SEQ ID NO: 484195 - RNA, 20 nt, Human
ugucagugccugaggcacag

SEQ ID NO: 484196 - RNA, 22 nt, Human
gucaccagugcuaagaggugga

SEQ ID NO: 484197 - RNA, 22 nt, Human
ggcugaaguguaguggcucacu

SEQ ID NO: 484198 - RNA, 22 nt, Human
acagcaagccagcuugucacug

SEQ ID NO: 484199 - RNA, 22 nt, Human
cuucccacagaauucaaucagu

SEQ ID NO: 484200 - RNA, 22 nt, Human
acagggccucagccagggcaga

SEQ ID NO: 484201 - RNA, 22 nt, Human
cccagcuugcgggcggcaggag

SEQ ID NO: 484202 - RNA, 22 nt, Human
accaggggaugguuggcacugu

SEQ ID NO: 484203 - RNA, 22 nt, Human
uccugggccuguacuccauccg

SEQ ID NO: 484204 - RNA, 22 nt, Human
cucccagguuccgacgccucuu

SEQ ID NO: 484205 - RNA, 22 nt, Human
ucucaagaucucaagauggccc

SEQ ID NO: 484206 - RNA, 22 nt, Human
ccaaaguccuuucuccaccugc

SEQ ID NO: 484207 - RNA, 21 nt, Human
gccauuguuuucuaccuggag

SEQ ID NO: 484208 - RNA, 20 nt, Human
aauuuacucacagaaugaau

SEQ ID NO: 484209 - RNA, 22 nt, Human
ggcagcucugcuccacaugagu

SEQ ID NO: 484210 - RNA, 22 nt, Human
ucagagugugagacauauugga

SEQ ID NO: 484211 - RNA, 21 nt, Human
uccucugcagugagguggccu

SEQ ID NO: 484212 - RNA, 22 nt, Human
ggcugcugggaauaugccagcu

SEQ ID NO: 484213 - RNA, 22 nt, Human
gagcacugauuuauuuuugucu

SEQ ID NO: 484214 - RNA, 22 nt, Human
aauguguguauuucuaggcgag

SEQ ID NO: 484215 - RNA, 21 nt, Human
caaagccaggcaacucucucc

SEQ ID NO: 484216 - RNA, 22 nt, Human
gggcagauggggcacaggcuga

SEQ ID NO: 484217 - RNA, 22 nt, Human
cacacaugucucuccaugcucu

SEQ ID NO: 484218 - RNA, 22 nt, Human
augcugaauugaugcgagggag

SEQ ID NO: 484219 - RNA, 22 nt, Human
uccugagauaaaucucauguga

SEQ ID NO: 484220 - RNA, 22 nt, Human
ucauuugugugagugauuugac

SEQ ID NO: 484221 - RNA, 21 nt, Human
ucacuagugccuucugucauu

SEQ ID NO: 484222 - RNA, 22 nt, Human
gugcugcucacaucuggaggua

SEQ ID NO: 484223 - RNA, 23 nt, Human
ugauuuccagugagucaguggga

SEQ ID NO: 484224 - RNA, 22 nt, Human
aagcugccauagaacgagaggu

SEQ ID NO: 484225 - RNA, 23 nt, Human
aaucuggcugauguuuuuucucu

SEQ ID NO: 484226 - RNA, 22 nt, Human
cgagaguuagcuaggagucaca

SEQ ID NO: 484227 - RNA, 22 nt, Human
aagugaagaaauacaugagaau

SEQ ID NO: 484228 - RNA, 22 nt, Human
cauuauguucaguagcuuaaaa

SEQ ID NO: 484229 - RNA, 22 nt, Human
guggagcaaucagagggucagu

SEQ ID NO: 484230 - RNA, 19 nt, Human
ucccuuccugucgggcucc

SEQ ID NO: 484231 - RNA, 22 nt, Human
ucagggacuuacaaaccagaag

SEQ ID NO: 484232 - RNA, 21 nt, Human
agcuuccugcagugggagguc

SEQ ID NO: 484233 - RNA, 22 nt, Human
ggaggagacaguaaaaagcacg

SEQ ID NO: 484234 - RNA, 22 nt, Human
agaccagcugccucccagggcc

SEQ ID NO: 484235 - RNA, 22 nt, Human
aucccugcccucauggagcuua

SEQ ID NO: 484236 - RNA, 22 nt, Human
caagagcucagaaacccuugcu

SEQ ID NO: 484237 - RNA, 22 nt, Human
ugggccacggggguggagagcu

SEQ ID NO: 484238 - RNA, 22 nt, Human
augucacagcucccauuccucc

SEQ ID NO: 484239 - RNA, 17 nt, Human
cagcuuuaugcuacugu

SEQ ID NO: 484240 - RNA, 22 nt, Human
ucauuuuucacacagggucacc

SEQ ID NO: 484241 - RNA, 22 nt, Human
uggccuggcccugaggcccugu

SEQ ID NO: 484242 - RNA, 21 nt, Human
gcccagcaaggugagaaggcc

SEQ ID NO: 484243 - RNA, 22 nt, Human
gaugauuuuaugucuugucauu

SEQ ID NO: 484244 - RNA, 22 nt, Human
ggagaaggugcuggucacugug

SEQ ID NO: 484245 - RNA, 22 nt, Human
ugaaaucuucacuaagucucuu

SEQ ID NO: 484246 - RNA, 22 nt, Human
ccacagggacuguuaaaacccu

SEQ ID NO: 484247 - RNA, 22 nt, Human
cccucugccugggaccaagucc

SEQ ID NO: 484248 - RNA, 22 nt, Human
ugggccuggcccuguggaggag

SEQ ID NO: 484249 - RNA, 21 nt, Human
uagcacuucgcuguaauuggg

SEQ ID NO: 484250 - RNA, 22 nt, Human
uaagaacaguguuucaucucua

SEQ ID NO: 484251 - RNA, 22 nt, Human
gauacaaauucaugucugaauu

SEQ ID NO: 484252 - RNA, 22 nt, Human
uuagaaaucaccucugaagauc

SEQ ID NO: 484253 - RNA, 22 nt, Human
ggcugagcucaggggcagcagg

SEQ ID NO: 484254 - RNA, 22 nt, Human
auaaggcaucucucaguuagca

SEQ ID NO: 484255 - RNA, 20 nt, Human
uauuuacaacuuagagccuc

SEQ ID NO: 484256 - RNA, 22 nt, Human
gaacagcugcuagagaucugug

SEQ ID NO: 484257 - RNA, 22 nt, Human
acacacaauuaguuuuaugcuu

SEQ ID NO: 484258 - RNA, 22 nt, Human
ugccaggcaacugcccagccau

SEQ ID NO: 484259 - RNA, 23 nt, Human
aaaaaaccauguaggcacucagu

SEQ ID NO: 484260 - RNA, 22 nt, Human
auugucuguacuuuaaaaaugu

SEQ ID NO: 484261 - RNA, 22 nt, Human
augggggccugaacaggcaaaa

SEQ ID NO: 484262 - RNA, 22 nt, Human
cgacccuacagacagugcugag

SEQ ID NO: 484263 - RNA, 22 nt, Human
gcagagcuguuaauggagcuga

SEQ ID NO: 484264 - RNA, 22 nt, Human
acaguggaauuuguagaugugu

SEQ ID NO: 484265 - RNA, 22 nt, Human
uggacucagaaguguucuuuua

SEQ ID NO: 484266 - RNA, 20 nt, Human
aguggggagucaggagugcc

SEQ ID NO: 484267 - RNA, 22 nt, Human
gcagcaggcacggucucgacau

SEQ ID NO: 484268 - RNA, 22 nt, Human
ucauuuguggaagugauugugg

SEQ ID NO: 484269 - RNA, 22 nt, Human
aauguuacgaucaacaacacau

SEQ ID NO: 484270 - RNA, 22 nt, Human
aagccaggaagagagccuucac

SEQ ID NO: 484271 - RNA, 22 nt, Human
ggugaggcagguggcugcugag

SEQ ID NO: 484272 - RNA, 22 nt, Human
ugggcuggugagggaucauuua

SEQ ID NO: 484273 - RNA, 22 nt, Human
augagcuguaagguggcuuccu

SEQ ID NO: 484274 - RNA, 22 nt, Human
agcaaagucaguggaaccaucc

SEQ ID NO: 484275 - RNA, 22 nt, Human
gagacugcauagauggccacaa

SEQ ID NO: 484276 - RNA, 22 nt, Human
aggaggcuguggagcacuccau

SEQ ID NO: 484277 - RNA, 22 nt, Human
agcauuuaugacuaauguaaaa

SEQ ID NO: 484278 - RNA, 22 nt, Human
aggcucaguucuguggugagcc

SEQ ID NO: 484279 - RNA, 22 nt, Human
cagaagagaugaaauaguauua

SEQ ID NO: 484280 - RNA, 22 nt, Human
uguacacaauucuuaacauaca

SEQ ID NO: 484281 - RNA, 17 nt, Human
aagauuucauuagcuga

SEQ ID NO: 484282 - RNA, 22 nt, Human
aggccagacagcuagaaacagg

SEQ ID NO: 484283 - RNA, 22 nt, Human
cagccagcuggcacugugagua

SEQ ID NO: 484284 - RNA, 22 nt, Human
uggcucagcuuacuuuugaggg

SEQ ID NO: 484285 - RNA, 22 nt, Human
ggcucugguugaccaugauggc

SEQ ID NO: 484286 - RNA, 22 nt, Human
uauauguaagcuauguaagagu

SEQ ID NO: 484287 - RNA, 22 nt, Human
gcagggucuugagaggcagcca

SEQ ID NO: 484288 - RNA, 22 nt, Human
gcagcuuuuuggaugucaguua

SEQ ID NO: 484289 - RNA, 22 nt, Human
ggcucaccauggccucccugcu

SEQ ID NO: 484290 - RNA, 22 nt, Human
aaaugcaaggccaugugaagga

SEQ ID NO: 484291 - RNA, 22 nt, Human
cauugcacugcagcccgggcaa

SEQ ID NO: 484292 - RNA, 19 nt, Human
agugucaucagcuacucag

SEQ ID NO: 484293 - RNA, 22 nt, Human
agcuugauuucucugcagugug

SEQ ID NO: 484294 - RNA, 22 nt, Human
cugucaccuguucacugcagca

SEQ ID NO: 484295 - RNA, 22 nt, Human
cuuguaauuauaauguacuguu

SEQ ID NO: 484296 - RNA, 22 nt, Human
gggucaggcucagcagggcagc

SEQ ID NO: 484297 - RNA, 22 nt, Human
uucuacuuuagcaugcucauuc

SEQ ID NO: 484298 - RNA, 22 nt, Human
uugaagauggaucgccacucuc

SEQ ID NO: 484299 - RNA, 22 nt, Human
cccuggcauaaaacuucuccag

SEQ ID NO: 484300 - RNA, 20 nt, Human
acauugauuauguuuguaga

SEQ ID NO: 484301 - RNA, 22 nt, Human
cucucaggcuugggucguggca

SEQ ID NO: 484302 - RNA, 22 nt, Human
cagggacaugacuggucucugu

SEQ ID NO: 484303 - RNA, 21 nt, Human
uggcagagugcagucuauaca

SEQ ID NO: 484304 - RNA, 22 nt, Human
uuugacagauccuuaacucagc

SEQ ID NO: 484305 - RNA, 22 nt, Human
cuccuuccccuacucagcaucc

SEQ ID NO: 484306 - RNA, 22 nt, Human
acucacuuuccauucaagcacc

SEQ ID NO: 484307 - RNA, 22 nt, Human
caagacaagaucuaagcaugcu

SEQ ID NO: 484308 - RNA, 22 nt, Human
cugcucugugguccaugagaca

SEQ ID NO: 484309 - RNA, 22 nt, Human
agccagggauggcagugcccag

SEQ ID NO: 484310 - RNA, 22 nt, Human
uuucauaugggcauuggcaaua

SEQ ID NO: 484311 - RNA, 22 nt, Human
uacauucuggaaaggcacagac

SEQ ID NO: 484312 - RNA, 22 nt, Human
gaaguggaauuacugggucaua

SEQ ID NO: 484313 - RNA, 19 nt, Human
cagagcagugguuccugaa

SEQ ID NO: 484314 - RNA, 22 nt, Human
gaaggaaaaauacucuguaagg

SEQ ID NO: 484315 - RNA, 22 nt, Human
agggcagccaugagccuucagg

SEQ ID NO: 484316 - RNA, 22 nt, Human
agggcucccgugaggugacugc

SEQ ID NO: 484317 - RNA, 22 nt, Human
agcuaggacagguagagauggg

SEQ ID NO: 484318 - RNA, 19 nt, Human
ccaguagagacagcugcag

SEQ ID NO: 484319 - RNA, 22 nt, Human
gaucaaaagcuggguucuaaaa

SEQ ID NO: 484320 - RNA, 22 nt, Human
ccacagggcacaagggagguug

SEQ ID NO: 484321 - RNA, 22 nt, Human
agggacacugaugagaaauucu

SEQ ID NO: 484322 - RNA, 22 nt, Human
augauugaccaucugcugggcu

SEQ ID NO: 484323 - RNA, 22 nt, Human
ugucaccaguuccaggaaauaa

SEQ ID NO: 484324 - RNA, 22 nt, Human
ccugggagguggagguugcagc

SEQ ID NO: 484325 - RNA, 22 nt, Human
acuguguggaaauuugugaggg

SEQ ID NO: 484326 - RNA, 22 nt, Human
agccagaguugaaugugagucu

SEQ ID NO: 484327 - RNA, 22 nt, Human
uuccaguuaaggaagcuauucu

SEQ ID NO: 484328 - RNA, 22 nt, Human
gcaccugcaggaugagccaggg

SEQ ID NO: 484329 - RNA, 22 nt, Human
auggacagugugucuguuucca

SEQ ID NO: 484330 - RNA, 22 nt, Human
gugguaauagagcuccaaacua

SEQ ID NO: 484331 - RNA, 22 nt, Human
aggcucagggacucccucccuc

SEQ ID NO: 484332 - RNA, 19 nt, Human
ucaaaugccaaugucacag

SEQ ID NO: 484333 - RNA, 23 nt, Human
ggcucugugcugggccugcagga

SEQ ID NO: 484334 - RNA, 22 nt, Human
gccuggugcuaugagggccagc

SEQ ID NO: 484335 - RNA, 22 nt, Human
acagacagauuuugucugaugu

SEQ ID NO: 484336 - RNA, 22 nt, Human
ggaggccaaggcagguggauca

SEQ ID NO: 484337 - RNA, 22 nt, Human
gugucacaugguuuacugcagc

SEQ ID NO: 484338 - RNA, 22 nt, Human
gacagggcgcccagccuguuuc

SEQ ID NO: 484339 - RNA, 22 nt, Human
aaggccagaguacuagaggcug

SEQ ID NO: 484340 - RNA, 22 nt, Human
ucagaggacuaccuucuccagu

SEQ ID NO: 484341 - RNA, 22 nt, Human
agcaaggcagucagcuggcugg

SEQ ID NO: 484342 - RNA, 22 nt, Human
cggcagagacggcgcuuugaac

SEQ ID NO: 484343 - RNA, 22 nt, Human
aggagugggggcgagaaguuaa

SEQ ID NO: 484344 - RNA, 22 nt, Human
acagagcuaauguugcauaggc

SEQ ID NO: 484345 - RNA, 22 nt, Human
ugggguggauagaaagugaugu

SEQ ID NO: 484346 - RNA, 22 nt, Human
aagggcucucugcauugaaauu

SEQ ID NO: 484347 - RNA, 22 nt, Human
ggcgcuggccacgguggcucug

SEQ ID NO: 484348 - RNA, 22 nt, Human
ucagagucauugcaaguagaag

SEQ ID NO: 484349 - RNA, 22 nt, Human
gcuggcucuucaguggagauag

SEQ ID NO: 484350 - RNA, 22 nt, Human
aaugagcuagaccugcuuccuc

SEQ ID NO: 484351 - RNA, 22 nt, Human
ccaggcagagggaauagcaagu

SEQ ID NO: 484352 - RNA, 20 nt, Human
ccugaggguuuguguucuuu

SEQ ID NO: 484353 - RNA, 22 nt, Human
caggaggagcauuagcgucuca

SEQ ID NO: 484354 - RNA, 22 nt, Human
ucugucuuagcaucuuugcuca

SEQ ID NO: 484355 - RNA, 22 nt, Human
accucuggccuucaggcaucau

SEQ ID NO: 484356 - RNA, 22 nt, Human
cauuuauucauuugcuagggcu

SEQ ID NO: 484357 - RNA, 22 nt, Human
ccucagcugcuucccuggagcc

SEQ ID NO: 484358 - RNA, 22 nt, Human
ccuccugggccuugcucuguga

SEQ ID NO: 484359 - RNA, 22 nt, Human
gggcugacaguuuccccugaaa

SEQ ID NO: 484360 - RNA, 22 nt, Human
uccauggguagcccugguugag

SEQ ID NO: 484361 - RNA, 22 nt, Human
cuggcagcgcagcaugaagucg

SEQ ID NO: 484362 - RNA, 22 nt, Human
uggcccuguggaggucagugag

SEQ ID NO: 484363 - RNA, 22 nt, Human
ugaggcaggaguuaaugugcuc

SEQ ID NO: 484364 - RNA, 17 nt, Human
gcuuccucaugcaguuc

SEQ ID NO: 484365 - RNA, 22 nt, Human
gcacacaguauaugcucauuaa

SEQ ID NO: 484366 - RNA, 22 nt, Human
uggcagcagggccccuggagga

SEQ ID NO: 484367 - RNA, 22 nt, Human
caggccuggcugcagcucgccu

SEQ ID NO: 484368 - RNA, 22 nt, Human
acacuaauuaagcugcuuuacu

SEQ ID NO: 484369 - RNA, 22 nt, Human
agaguuaagacguacaugagug

SEQ ID NO: 484370 - RNA, 22 nt, Human
aggacaggauugagcugaacug

SEQ ID NO: 484371 - RNA, 22 nt, Human
gcagacaauuuauuagcagauu

SEQ ID NO: 484372 - RNA, 22 nt, Human
agggcuccgggcaggcgaugga

SEQ ID NO: 484373 - RNA, 22 nt, Human
aggccaggcaacauucugaagu

SEQ ID NO: 484374 - RNA, 22 nt, Human
caaggagaaaacggcuucugaa

SEQ ID NO: 484375 - RNA, 22 nt, Human
agacuuugagcucuuagagaag

SEQ ID NO: 484376 - RNA, 22 nt, Human
aaaguucaugguguuauagaaa

SEQ ID NO: 484377 - RNA, 22 nt, Human
gcuguauuccugcacuguauag

SEQ ID NO: 484378 - RNA, 17 nt, Human
gccugcaggcccgcaga

SEQ ID NO: 484379 - RNA, 22 nt, Human
auuuauuaugggauuuggcaca

SEQ ID NO: 484380 - RNA, 22 nt, Human
agcaggagcugugggaagaugg

SEQ ID NO: 484381 - RNA, 22 nt, Human
uuaaacauuuauggaggcagca

SEQ ID NO: 484382 - RNA, 22 nt, Human
ccagagagaaauggauuugagu

SEQ ID NO: 484383 - RNA, 22 nt, Human
gcugucagugaggugagacaug

SEQ ID NO: 484384 - RNA, 22 nt, Human
cugaaugaggaaaagagugagg

SEQ ID NO: 484385 - RNA, 22 nt, Human
gggaaauugugugagaucuuug

SEQ ID NO: 484386 - RNA, 22 nt, Human
gaggccugcagcguggucccug

SEQ ID NO: 484387 - RNA, 23 nt, Human
ccaggccucucagagggugugcc

SEQ ID NO: 484388 - RNA, 22 nt, Human
ugcaugcauaaauguacacaca

SEQ ID NO: 484389 - RNA, 22 nt, Human
ugcagcugaggccagcuaugcc

SEQ ID NO: 484390 - RNA, 22 nt, Human
ccugcagaccacacucaguccu

SEQ ID NO: 484391 - RNA, 22 nt, Human
cugaaggagaaggccacuguuc

SEQ ID NO: 484392 - RNA, 22 nt, Human
ucaaugauaucagcaggaugug

SEQ ID NO: 484393 - RNA, 22 nt, Human
acauuucucauaggagagccac

SEQ ID NO: 484394 - RNA, 22 nt, Human
ccucauggccuugagcugaggg

SEQ ID NO: 484395 - RNA, 22 nt, Human
agaccaagaaaggaugaggauc

SEQ ID NO: 484396 - RNA, 20 nt, Human
ugaagcagccuugauucugu

SEQ ID NO: 484397 - RNA, 22 nt, Human
ugccuacauuccuugcuuaugg

SEQ ID NO: 484398 - RNA, 22 nt, Human
accaggaggccuggagcacaaa

SEQ ID NO: 484399 - RNA, 22 nt, Human
aaugcacauaaauauggucuua

SEQ ID NO: 484400 - RNA, 23 nt, Human
aggcuuccuaucuuagagcuggg

SEQ ID NO: 484401 - RNA, 22 nt, Human
ggcagaaggccucccagcuccu

SEQ ID NO: 484402 - RNA, 22 nt, Human
uggggcuggggaucuugagccu

SEQ ID NO: 484403 - RNA, 22 nt, Human
agcacccucagccuuauccaga

SEQ ID NO: 484404 - RNA, 22 nt, Human
gacaggcuuccuaagugccaga

SEQ ID NO: 484405 - RNA, 23 nt, Human
ccagcucccaggucugaggacug

SEQ ID NO: 484406 - RNA, 22 nt, Human
ggcugcagagcugggugggccu

SEQ ID NO: 484407 - RNA, 22 nt, Human
cagagccucagaauccugugga

SEQ ID NO: 484408 - RNA, 22 nt, Human
caccagcuacagacuacugugu

SEQ ID NO: 484409 - RNA, 22 nt, Human
uggcagcaguagccaccccagc

SEQ ID NO: 484410 - RNA, 22 nt, Human
aaggagugcaugacucagagua

SEQ ID NO: 484411 - RNA, 22 nt, Human
gcccucucggcauagcaggggc

SEQ ID NO: 484412 - RNA, 17 nt, Human
cccagcuggcagugccg

SEQ ID NO: 484413 - RNA, 22 nt, Human
uagggcaggggaggaaucugaa

SEQ ID NO: 484414 - RNA, 22 nt, Human
ucugaggcuaagagacagaggc

SEQ ID NO: 484415 - RNA, 22 nt, Human
acaggcugcccgcuccccaccu

SEQ ID NO: 484416 - RNA, 17 nt, Human
agguggguggaucaccu

SEQ ID NO: 484417 - RNA, 22 nt, Human
ugccaaauugcccuauaaauga

SEQ ID NO: 484418 - RNA, 22 nt, Human
gcagagaccccgcagugaggcc

SEQ ID NO: 484419 - RNA, 21 nt, Human
ucuuguccuugcucucccacu

SEQ ID NO: 484420 - RNA, 22 nt, Human
auuccauuguguaaggauaucg

SEQ ID NO: 484421 - RNA, 23 nt, Human
gcugagguacauuuacaggaaga

SEQ ID NO: 484422 - RNA, 22 nt, Human
caggaucccuggccuccgccca

SEQ ID NO: 484423 - RNA, 22 nt, Human
gugggagcuuuggcaucaggcu

SEQ ID NO: 484424 - RNA, 22 nt, Human
uuuuuaagcuccuuugauguca

SEQ ID NO: 484425 - RNA, 22 nt, Human
uauuccuauuucuaaacauaug

SEQ ID NO: 484426 - RNA, 22 nt, Human
ugcugggggcuuucuggauacc

SEQ ID NO: 484427 - RNA, 22 nt, Human
gcuggaaggcuaggcucaguug

SEQ ID NO: 484428 - RNA, 22 nt, Human
acagcagcauaaacugacuaag

SEQ ID NO: 484429 - RNA, 22 nt, Human
acuucuugggacccuggcaccg

SEQ ID NO: 484430 - RNA, 22 nt, Human
agagcauccaucggccaggacc

SEQ ID NO: 484431 - RNA, 22 nt, Human
uccagccaccaccuugauugcc

SEQ ID NO: 484432 - RNA, 22 nt, Human
cagcagagcuuauguuggguca

SEQ ID NO: 484433 - RNA, 22 nt, Human
gccaccucggcuuucucugcuc

SEQ ID NO: 484434 - RNA, 22 nt, Human
acagaaauugggcaaauggaag

SEQ ID NO: 484435 - RNA, 22 nt, Human
ucccagagcaguacuccaggag

SEQ ID NO: 484436 - RNA, 22 nt, Human
gcagauggugccaugucuugug

SEQ ID NO: 484437 - RNA, 22 nt, Human
gacuguacgucauugaaggcca

SEQ ID NO: 484438 - RNA, 22 nt, Human
uggcucaggaucuaagcagaau

SEQ ID NO: 484439 - RNA, 21 nt, Human
ugcucacagaugugcucagug

SEQ ID NO: 484440 - RNA, 22 nt, Human
gaaaggagggaaacagagcggu

SEQ ID NO: 484441 - RNA, 22 nt, Human
aaacagaaauuuccucaugcuc

SEQ ID NO: 484442 - RNA, 23 nt, Human
aguuuuucugcaugguucuguau

SEQ ID NO: 484443 - RNA, 22 nt, Human
ugggaguggggcauagaaggua

SEQ ID NO: 484444 - RNA, 22 nt, Human
gcugccuucaguucugauucau

SEQ ID NO: 484445 - RNA, 22 nt, Human
acuuuuaugauaaucaauguuc

SEQ ID NO: 484446 - RNA, 22 nt, Human
auuuaaaugcuuaagaggguuu

SEQ ID NO: 484447 - RNA, 22 nt, Human
ucccagccuuccuuguggugaa

SEQ ID NO: 484448 - RNA, 22 nt, Human
gcagcccagguguagcucuuug

SEQ ID NO: 484449 - RNA, 19 nt, Human
gcagccaccgcggcggccg

SEQ ID NO: 484450 - RNA, 22 nt, Human
ccagcuggcacuguggcugccc

SEQ ID NO: 484451 - RNA, 22 nt, Human
gcugccugggcaggaggcgcug

SEQ ID NO: 484452 - RNA, 22 nt, Human
aaggcacuacgcugcuggggcg

SEQ ID NO: 484453 - RNA, 22 nt, Human
uaacugauauugaaaaacauca

SEQ ID NO: 484454 - RNA, 22 nt, Human
gagacacaggugguuccuguca

SEQ ID NO: 484455 - RNA, 16 nt, Human
gagaagagcccggcag

SEQ ID NO: 484456 - RNA, 22 nt, Human
ugcagggacaggcucuggggau

SEQ ID NO: 484457 - RNA, 22 nt, Human
uccugcagagucccacugauuu

SEQ ID NO: 484458 - RNA, 22 nt, Human
ugcuccuuccucauccugugca

SEQ ID NO: 484459 - RNA, 22 nt, Human
cuguuuaucuaggaguugcagg

SEQ ID NO: 484460 - RNA, 22 nt, Human
cugccaaggcuggggaggacaa

SEQ ID NO: 484461 - RNA, 22 nt, Human
gcugccucugcgacucugggcg

SEQ ID NO: 484462 - RNA, 20 nt, Human
uuccagagaucugcauuuua

SEQ ID NO: 484463 - RNA, 23 nt, Human
cugcagucgccggccugggugcc

SEQ ID NO: 484464 - RNA, 22 nt, Human
uuucucuaaauagggaggcuua

SEQ ID NO: 484465 - RNA, 22 nt, Human
gcaccaggcagcugagcaggcc

SEQ ID NO: 484466 - RNA, 23 nt, Human
ugcucccaggugacgcugcuguu

SEQ ID NO: 484467 - RNA, 22 nt, Human
caucaucaaaacaaauggaguc

SEQ ID NO: 484468 - RNA, 22 nt, Human
ugaagacagaccaaggagaaug

SEQ ID NO: 484469 - RNA, 22 nt, Human
gaguccaguguuuaccaggggu

SEQ ID NO: 484470 - RNA, 22 nt, Human
ucuggcuccaggaccgggcaca

SEQ ID NO: 484471 - RNA, 22 nt, Human
auguucuguuuuguaauucaua

SEQ ID NO: 484472 - RNA, 22 nt, Human
ccacccuuggguucggaggccg

SEQ ID NO: 484473 - RNA, 22 nt, Human
gccuggagggucccucucugga

SEQ ID NO: 484474 - RNA, 22 nt, Human
caagagcuacccugugccauau

SEQ ID NO: 484475 - RNA, 20 nt, Human
cagcccuccaguggaggcag

SEQ ID NO: 484476 - RNA, 22 nt, Human
ggcugagccuggagcaucuggu

SEQ ID NO: 484477 - RNA, 22 nt, Human
cucaguuucuucauauuguagg

SEQ ID NO: 484478 - RNA, 22 nt, Human
agagucuuccaggcagccugag

SEQ ID NO: 484479 - RNA, 20 nt, Human
ggagaugcagcccaggugcc

SEQ ID NO: 484480 - RNA, 22 nt, Human
agccucugcuggcccuggcacu

SEQ ID NO: 484481 - RNA, 22 nt, Human
ccagagucuuuauauuccugaa

SEQ ID NO: 484482 - RNA, 22 nt, Human
aagacccacaaggcugaauguu

SEQ ID NO: 484483 - RNA, 22 nt, Human
cauugaaaccuaacauaggcug

SEQ ID NO: 484484 - RNA, 20 nt, Human
ugagugauggaggcggguca

SEQ ID NO: 484485 - RNA, 22 nt, Human
acucagaguuugcguuccauac

SEQ ID NO: 484486 - RNA, 22 nt, Human
gcuggggagcuagaccucagca

SEQ ID NO: 484487 - RNA, 22 nt, Human
agggccaccagagcagggcagu

SEQ ID NO: 484488 - RNA, 22 nt, Human
ucagaggagggacucagaccca

SEQ ID NO: 484489 - RNA, 22 nt, Human
gcugucaccaaagcaggcacug

SEQ ID NO: 484490 - RNA, 22 nt, Human
ugucagagcaaggccaggccag

SEQ ID NO: 484491 - RNA, 22 nt, Human
ugcaggcuguaaucugaggcua

SEQ ID NO: 484492 - RNA, 22 nt, Human
uucuaguuuucaguccaccagg

SEQ ID NO: 484493 - RNA, 21 nt, Human
agcugccacccuagcuucuga

SEQ ID NO: 484494 - RNA, 22 nt, Human
ggcucaggacugcagcguagag

SEQ ID NO: 484495 - RNA, 22 nt, Human
cccugcaggggaccugcagccu

SEQ ID NO: 484496 - RNA, 22 nt, Human
gggcugcuuccuggggaaugcu

SEQ ID NO: 484497 - RNA, 22 nt, Human
cagucucuugcuucauuaguug

SEQ ID NO: 484498 - RNA, 22 nt, Human
uguuuuucaaauauugcucugu

SEQ ID NO: 484499 - RNA, 22 nt, Human
aauuaacagagggcuuauuacu

SEQ ID NO: 484500 - RNA, 22 nt, Human
cacucccuucaggagccuagga

SEQ ID NO: 484501 - RNA, 22 nt, Human
cugaaauuccauuucagccaca

SEQ ID NO: 484502 - RNA, 20 nt, Human
gcagcugcccccagucccug

SEQ ID NO: 484503 - RNA, 22 nt, Human
uuucuguagggauuucacaguu

SEQ ID NO: 484504 - RNA, 19 nt, Human
cugagcagcggcagcacuu

SEQ ID NO: 484505 - RNA, 22 nt, Human
gacaggcuuugagucccagaac

SEQ ID NO: 484506 - RNA, 22 nt, Human
auaaaaguuuccaaucaugccu

SEQ ID NO: 484507 - RNA, 22 nt, Human
ugccaggcuccggaacgacagu

SEQ ID NO: 484508 - RNA, 22 nt, Human
agcagggcuccugaaagccgcg

SEQ ID NO: 484509 - RNA, 22 nt, Human
gaugcaggauagcuucacccag

SEQ ID NO: 484510 - RNA, 22 nt, Human
caggagcccagaguccucagcu

SEQ ID NO: 484511 - RNA, 22 nt, Human
cacugcagcaccaugcagggcu

SEQ ID NO: 484512 - RNA, 22 nt, Human
cagcugaagagaggugcugagu

SEQ ID NO: 484513 - RNA, 22 nt, Human
ccucagaggugaacaucagugc

SEQ ID NO: 484514 - RNA, 22 nt, Human
gaggcucagagacuuuaaguuu

SEQ ID NO: 484515 - RNA, 22 nt, Human
ccaccagcuucagcagccgcgg

SEQ ID NO: 484516 - RNA, 22 nt, Human
gcagaggaucaggcucuggaaa

SEQ ID NO: 484517 - RNA, 22 nt, Human
ugggcagaguagcucagaagaa

SEQ ID NO: 484518 - RNA, 22 nt, Human
uccauuuuagaagaaaauccac

SEQ ID NO: 484519 - RNA, 22 nt, Human
guguccuuauaagaagagaugc

SEQ ID NO: 484520 - RNA, 22 nt, Human
uagggcucuggugggcucuguu

SEQ ID NO: 484521 - RNA, 22 nt, Human
gccuuggcugaugugcgaauga

SEQ ID NO: 484522 - RNA, 22 nt, Human
aaauauaauuucugccucaaua

SEQ ID NO: 484523 - RNA, 22 nt, Human
guguacauagaauugugcuuug

SEQ ID NO: 484524 - RNA, 22 nt, Human
uccagggcuggguuggcucagc

SEQ ID NO: 484525 - RNA, 22 nt, Human
caaaacugucuagagagagaag

SEQ ID NO: 484526 - RNA, 17 nt, Human
gguucaguucugcauuc

SEQ ID NO: 484527 - RNA, 22 nt, Human
uagaauaugauuaauuuucuua

SEQ ID NO: 484528 - RNA, 22 nt, Human
caaggccaguuucuccuaguca

SEQ ID NO: 484529 - RNA, 22 nt, Human
uauuucugaauccaaaagguca

SEQ ID NO: 484530 - RNA, 22 nt, Human
uauaucuuauaugugcagguac

SEQ ID NO: 484531 - RNA, 22 nt, Human
cuccuguauguugggcuucaca

SEQ ID NO: 484532 - RNA, 22 nt, Human
gcucugcuggaaguucucugga

SEQ ID NO: 484533 - RNA, 22 nt, Human
uggcagugggaagcuggaaguc

SEQ ID NO: 484534 - RNA, 22 nt, Human
uugaagcauuugcuauagcauu

SEQ ID NO: 484535 - RNA, 22 nt, Human
gggaagggagggaccucagucu

SEQ ID NO: 484536 - RNA, 22 nt, Human
ucuggcucacuucaggcuucac

SEQ ID NO: 484537 - RNA, 22 nt, Human
gagggucccugcucagggccag

SEQ ID NO: 484538 - RNA, 22 nt, Human
uaaauguguuagucaugguuuu

SEQ ID NO: 484539 - RNA, 22 nt, Human
uauugaugcuuggauugggcca

SEQ ID NO: 484540 - RNA, 22 nt, Human
ugcauuaugcuacccagaagcu

SEQ ID NO: 484541 - RNA, 21 nt, Human
cuccugggcuaagauauagug

SEQ ID NO: 484542 - RNA, 22 nt, Human
ggaggcugcugccucacguggg

SEQ ID NO: 484543 - RNA, 22 nt, Human
uuauuuacaacucuucucuucc

SEQ ID NO: 484544 - RNA, 22 nt, Human
cagcccuuuccuucucagcuuu

SEQ ID NO: 484545 - RNA, 22 nt, Human
agagugcaaccgaaacaagcag

SEQ ID NO: 484546 - RNA, 22 nt, Human
gcaaggagacuguagggccaag

SEQ ID NO: 484547 - RNA, 22 nt, Human
ugcucuggagggugaagcuuuu

SEQ ID NO: 484548 - RNA, 20 nt, Human
aaaauauguauaacucuucu

SEQ ID NO: 484549 - RNA, 22 nt, Human
ggcacugagaacaggcugacuu

SEQ ID NO: 484550 - RNA, 22 nt, Human
ccagagcugauuccugggacuu

SEQ ID NO: 484551 - RNA, 22 nt, Human
aggugccagugcuguggucccc

SEQ ID NO: 484552 - RNA, 22 nt, Human
cucagaauuuagggcucugagg

SEQ ID NO: 484553 - RNA, 22 nt, Human
gcagguggagcaguagucuggu

SEQ ID NO: 484554 - RNA, 22 nt, Human
guggggggacguuggucacuuu

SEQ ID NO: 484555 - RNA, 22 nt, Human
gaggagcacaugaggcugaggg

SEQ ID NO: 484556 - RNA, 22 nt, Human
cauuuagaaacuguuuuuaaca

SEQ ID NO: 484557 - RNA, 22 nt, Human
ccagcuggugacauccccaacc

SEQ ID NO: 484558 - RNA, 22 nt, Human
cagggcugaaaucaagguguag

SEQ ID NO: 484559 - RNA, 22 nt, Human
acaugaaaagacuaucugauua

SEQ ID NO: 484560 - RNA, 22 nt, Human
agugaagaggaaguggggcaca

SEQ ID NO: 484561 - RNA, 22 nt, Human
gcccggcagucacacacccagg

SEQ ID NO: 484562 - RNA, 21 nt, Human
agacagagugcagucuacaua

SEQ ID NO: 484563 - RNA, 21 nt, Human
agaaaaguagaguuuucagag

SEQ ID NO: 484564 - RNA, 22 nt, Human
uucauucauuacgugccaggca

SEQ ID NO: 484565 - RNA, 22 nt, Human
uggcucagaggggaagugguuu

SEQ ID NO: 484566 - RNA, 22 nt, Human
agggacuggcucucugagcagg

SEQ ID NO: 484567 - RNA, 22 nt, Human
ucagcuuucucaaagaagcugg

SEQ ID NO: 484568 - RNA, 22 nt, Human
gcuggcugggucccugagaggc

SEQ ID NO: 484569 - RNA, 22 nt, Human
cuggcucaggaaaguugcugcu

SEQ ID NO: 484570 - RNA, 22 nt, Human
gggguggauuccuacaggucca

SEQ ID NO: 484571 - RNA, 22 nt, Human
acucugagcaucccaagucuua

SEQ ID NO: 484572 - RNA, 22 nt, Human
agaagugcuccagugaguuggg

SEQ ID NO: 484573 - RNA, 23 nt, Human
ucuguacacaucagcaucuccca

SEQ ID NO: 484574 - RNA, 22 nt, Human
aaaguuugagugauuugacaca

SEQ ID NO: 484575 - RNA, 22 nt, Human
caaagucccagcugcuuagaga

SEQ ID NO: 484576 - RNA, 22 nt, Human
guagcccaccuggggagggcga

SEQ ID NO: 484577 - RNA, 21 nt, Human
ucagcuuugcaacugcacauc

SEQ ID NO: 484578 - RNA, 22 nt, Human
caagaugccccugguagggauc

SEQ ID NO: 484579 - RNA, 22 nt, Human
aaaggaagauugagcuuuucca

SEQ ID NO: 484580 - RNA, 22 nt, Human
cccagcaucuccaggcauggcc

SEQ ID NO: 484581 - RNA, 22 nt, Human
ucuuuccuuagaauaauucuuu

SEQ ID NO: 484582 - RNA, 22 nt, Human
cauuuacuguugaaucccuagc

SEQ ID NO: 484583 - RNA, 22 nt, Human
agccagggacgcugcaggcuac

SEQ ID NO: 484584 - RNA, 22 nt, Human
aaggcacuugcccagagcugca

SEQ ID NO: 484585 - RNA, 22 nt, Human
guuauuuucauuggcucagacu

SEQ ID NO: 484586 - RNA, 22 nt, Human
cagggcucagggacugcagaaa

SEQ ID NO: 484587 - RNA, 22 nt, Human
uauaacacucagaaagaaucau

SEQ ID NO: 484588 - RNA, 22 nt, Human
ucuggauggucagcucuuccug

SEQ ID NO: 484589 - RNA, 22 nt, Human
gagccaggucgggccgcggcga

SEQ ID NO: 484590 - RNA, 22 nt, Human
uuccgcuggggccgccuggcgg

SEQ ID NO: 484591 - RNA, 22 nt, Human
aagcagccaccucaucuccacu

SEQ ID NO: 484592 - RNA, 22 nt, Human
gagagguccauuccccugucag

SEQ ID NO: 484593 - RNA, 22 nt, Human
uggacagguugaguaggaggag

SEQ ID NO: 484594 - RNA, 22 nt, Human
uccucacagucaacacuuugag

SEQ ID NO: 484595 - RNA, 22 nt, Human
ugcuaaauaaguggaauagaca

SEQ ID NO: 484596 - RNA, 22 nt, Human
ucuaugaaaagucuauucauuc

SEQ ID NO: 484597 - RNA, 22 nt, Human
aagcuggagaguuaggugaaua

SEQ ID NO: 484598 - RNA, 22 nt, Human
ggcugccucaaagcucaagcuc

SEQ ID NO: 484599 - RNA, 22 nt, Human
aaggccuggauuuagguuguga

SEQ ID NO: 484600 - RNA, 18 nt, Human
uuucacaaccuccagagg

SEQ ID NO: 484601 - RNA, 22 nt, Human
acaaagucuuuuacaacaguca

SEQ ID NO: 484602 - RNA, 23 nt, Human
uccagggauuaaugaagucaguc

SEQ ID NO: 484603 - RNA, 22 nt, Human
gcugagaggcacuaucuccgga

SEQ ID NO: 484604 - RNA, 22 nt, Human
aggcuuuaauuaucuacaggag

SEQ ID NO: 484605 - RNA, 22 nt, Human
ucuuuggauaucgcuagaccgu

SEQ ID NO: 484606 - RNA, 22 nt, Human
uucaagauggcugcaaauacuu

SEQ ID NO: 484607 - RNA, 22 nt, Human
aggucauuccuugucuucuugc

SEQ ID NO: 484608 - RNA, 22 nt, Human
uuuuuccuagugcuuucuggua

SEQ ID NO: 484609 - RNA, 22 nt, Human
uggccacagccucugccaguuc

SEQ ID NO: 484610 - RNA, 22 nt, Human
gcauucaucuuccuccaugcag

SEQ ID NO: 484611 - RNA, 22 nt, Human
ugcuuccuugagcucuccaauc

SEQ ID NO: 484612 - RNA, 22 nt, Human
aauuagggaaguauuuaguagu

SEQ ID NO: 484613 - RNA, 17 nt, Human
agcagcuggcacaggag

SEQ ID NO: 484614 - RNA, 22 nt, Human
uuauuuuuaaaaguucacacag

SEQ ID NO: 484615 - RNA, 22 nt, Human
ggccaagauggaaggagagaug

SEQ ID NO: 484616 - RNA, 22 nt, Human
cagagaccccgcugcccuucug

SEQ ID NO: 484617 - RNA, 22 nt, Human
cucugggcaaagaugccucauc

SEQ ID NO: 484618 - RNA, 22 nt, Human
gcauaauauacaugcuugaucc

SEQ ID NO: 484619 - RNA, 21 nt, Human
cugcaucucauagaacauguc

SEQ ID NO: 484620 - RNA, 22 nt, Human
guguacaugagaaaucaacuuu

SEQ ID NO: 484621 - RNA, 22 nt, Human
ucugaaaugcaaauuugacuga

SEQ ID NO: 484622 - RNA, 23 nt, Human
uggcuccaugaaaauuacgagga

SEQ ID NO: 484623 - RNA, 22 nt, Human
augauggugggagaugacccag

SEQ ID NO: 484624 - RNA, 22 nt, Human
uucuaucauacuugaauacauu

SEQ ID NO: 484625 - RNA, 22 nt, Human
ucacaggguguacaucaccuau

SEQ ID NO: 484626 - RNA, 22 nt, Human
cucagagaaaaggagcaagggu

SEQ ID NO: 484627 - RNA, 22 nt, Human
cugucuguuucugauucaaccu

SEQ ID NO: 484628 - RNA, 22 nt, Human
ugagaugaauaacuccugcuaa

SEQ ID NO: 484629 - RNA, 22 nt, Human
gggagaaggaggacugugcugu

SEQ ID NO: 484630 - RNA, 22 nt, Human
agcccucauggaacagcuccua

SEQ ID NO: 484631 - RNA, 22 nt, Human
agguggguaucaugagagauua

SEQ ID NO: 484632 - RNA, 22 nt, Human
ugcuuccuucccguucuucucc

SEQ ID NO: 484633 - RNA, 22 nt, Human
ugaggcucaaggucugguggag

SEQ ID NO: 484634 - RNA, 22 nt, Human
uccauguggccagacacuggca

SEQ ID NO: 484635 - RNA, 22 nt, Human
uuuccucuucuucccaugucau

SEQ ID NO: 484636 - RNA, 20 nt, Human
ggagcugcccugggcuggag

SEQ ID NO: 484637 - RNA, 22 nt, Human
gaagccaagugcaaaugccuua

SEQ ID NO: 484638 - RNA, 22 nt, Human
cccagcuccagagccagaaaca

SEQ ID NO: 484639 - RNA, 22 nt, Human
gaggcugcaggcaaugcugccc

SEQ ID NO: 484640 - RNA, 22 nt, Human
ucagaggauugccucagcgagc

SEQ ID NO: 484641 - RNA, 22 nt, Human
gccauccucugagcacuaggca

SEQ ID NO: 484642 - RNA, 22 nt, Human
gacagggcgagacucagucuca

SEQ ID NO: 484643 - RNA, 22 nt, Human
cuggguggcagagccugcagug

SEQ ID NO: 484644 - RNA, 22 nt, Human
cagcucccuauggugaggcgac

SEQ ID NO: 484645 - RNA, 22 nt, Human
ucauuuguaccauuuuuuaaga

SEQ ID NO: 484646 - RNA, 22 nt, Human
ucagaacagaagaaggaacacg

SEQ ID NO: 484647 - RNA, 22 nt, Human
agcagcauuaagggaacugcag

SEQ ID NO: 484648 - RNA, 20 nt, Human
accauaauguuaauuacaaa

SEQ ID NO: 484649 - RNA, 22 nt, Human
uuaaacagguuuuugaauggcc

SEQ ID NO: 484650 - RNA, 22 nt, Human
uuucagaucauuuuuuaaguac

SEQ ID NO: 484651 - RNA, 22 nt, Human
caguauuuauggcuugaguauu

SEQ ID NO: 484652 - RNA, 22 nt, Human
uguauuuaagcuuuaccuaaaa

SEQ ID NO: 484653 - RNA, 22 nt, Human
agcaggugacagggcuguggug

SEQ ID NO: 484654 - RNA, 22 nt, Human
ccuccugggacaggcuggcaca

SEQ ID NO: 484655 - RNA, 22 nt, Human
gaggggcugggcagucccugga

SEQ ID NO: 484656 - RNA, 22 nt, Human
ugugaaagucaaauuaauugaa

SEQ ID NO: 484657 - RNA, 22 nt, Human
cuggccucaccucagacuuacu

SEQ ID NO: 484658 - RNA, 22 nt, Human
auggggugaccaugagcauuua

SEQ ID NO: 484659 - RNA, 22 nt, Human
ggccugagaaccauggggccaa

SEQ ID NO: 484660 - RNA, 22 nt, Human
guuuaauuuuagguugucaagc

SEQ ID NO: 484661 - RNA, 22 nt, Human
ugcagggaauccagucuagggu

SEQ ID NO: 484662 - RNA, 20 nt, Human
auguccagugacuggaccau

SEQ ID NO: 484663 - RNA, 22 nt, Human
aucuucaaagcacaucguuugu

SEQ ID NO: 484664 - RNA, 22 nt, Human
agggggcaucagguccuggcuc

SEQ ID NO: 484665 - RNA, 22 nt, Human
gcagagccaggagagacccuug

SEQ ID NO: 484666 - RNA, 22 nt, Human
ugcagaccucccauggcugccu

SEQ ID NO: 484667 - RNA, 22 nt, Human
ugaaaggugacauuucuuggau

SEQ ID NO: 484668 - RNA, 22 nt, Human
gcugccuguguggccacucacu

SEQ ID NO: 484669 - RNA, 22 nt, Human
ucacugcaaucucugccuucca

SEQ ID NO: 484670 - RNA, 22 nt, Human
auccaguucucagugcuuacag

SEQ ID NO: 484671 - RNA, 22 nt, Human
ugccacacagcuguaugaggga

SEQ ID NO: 484672 - RNA, 18 nt, Human
uagggcucuagggaguga

SEQ ID NO: 484673 - RNA, 22 nt, Human
agcuucuggaaggcaaggcuug

SEQ ID NO: 484674 - RNA, 22 nt, Human
aaggcccuggccccagcuucuu

SEQ ID NO: 484675 - RNA, 22 nt, Human
gcucccagcauugcugcugaau

SEQ ID NO: 484676 - RNA, 22 nt, Human
uagaaaugcaguguacuguguc

SEQ ID NO: 484677 - RNA, 22 nt, Human
uguccucacaggaaugaacuuu

SEQ ID NO: 484678 - RNA, 22 nt, Human
gcagcuggagccagccagacac

SEQ ID NO: 484679 - RNA, 22 nt, Human
ucagagucucccccaguuuggg

SEQ ID NO: 484680 - RNA, 22 nt, Human
auauuaggugcucaauacaugc

SEQ ID NO: 484681 - RNA, 23 nt, Human
uugugggcagauuccauggggag

SEQ ID NO: 484682 - RNA, 22 nt, Human
ugggcaggugcuauuuuccaug

SEQ ID NO: 484683 - RNA, 22 nt, Human
cuggcucuucagugcuugguuc

SEQ ID NO: 484684 - RNA, 22 nt, Human
aguuucuguuaccauauuugac

SEQ ID NO: 484685 - RNA, 22 nt, Human
gcagagcucuguucuuaucucc

SEQ ID NO: 484686 - RNA, 22 nt, Human
gcuggcagaauuucuucuugcu

SEQ ID NO: 484687 - RNA, 22 nt, Human
cuccaggguuccccgauccacu

SEQ ID NO: 484688 - RNA, 22 nt, Human
caggugggagccacagcguaca

SEQ ID NO: 484689 - RNA, 22 nt, Human
caggcuggaguuaccuuuaggg

SEQ ID NO: 484690 - RNA, 22 nt, Human
ugcuagaauaccuaccuggagg

SEQ ID NO: 484691 - RNA, 22 nt, Human
uccugcaggcuugaguccucag

SEQ ID NO: 484692 - RNA, 22 nt, Human
aucuggaauccuuguggacaau

SEQ ID NO: 484693 - RNA, 22 nt, Human
aaggaaaggaugagcaugcauu

SEQ ID NO: 484694 - RNA, 17 nt, Human
gcugagugcagggaguc

SEQ ID NO: 484695 - RNA, 22 nt, Human
aguuaacaaguuggcaaucaac

SEQ ID NO: 484696 - RNA, 22 nt, Human
gggggcuggacuuucccacaca

SEQ ID NO: 484697 - RNA, 20 nt, Human
uccugcagucgcuagcgccc

SEQ ID NO: 484698 - RNA, 22 nt, Human
gucaggaucucccaguacauau

SEQ ID NO: 484699 - RNA, 22 nt, Human
ugucacauaauuuaucuguagg

SEQ ID NO: 484700 - RNA, 22 nt, Human
cagugcaguggcugagcuggag

SEQ ID NO: 484701 - RNA, 22 nt, Human
cacacaugaaucccuaguaccu

SEQ ID NO: 484702 - RNA, 22 nt, Human
cugggguggaggagcuccccug

SEQ ID NO: 484703 - RNA, 20 nt, Human
aggagccauugacugcagca

SEQ ID NO: 484704 - RNA, 22 nt, Human
ccugagagagaagcgaccuggu

SEQ ID NO: 484705 - RNA, 22 nt, Human
uuugugcagauguauauuugug

SEQ ID NO: 484706 - RNA, 22 nt, Human
agugcauuauauguuucaaugg

SEQ ID NO: 484707 - RNA, 22 nt, Human
aaaguucucuaugguguaaaaa

SEQ ID NO: 484708 - RNA, 22 nt, Human
caguggaauauauaggggauuu

SEQ ID NO: 484709 - RNA, 18 nt, Human
aaugcacacauuuacucc

SEQ ID NO: 484710 - RNA, 22 nt, Human
uggagcuggaauuucugggccu

SEQ ID NO: 484711 - RNA, 22 nt, Human
ucucuuaauuuuggaauagugu

SEQ ID NO: 484712 - RNA, 22 nt, Human
ucugccuggguguggagcagag

SEQ ID NO: 484713 - RNA, 22 nt, Human
ugugcucuggaguugccuucac

SEQ ID NO: 484714 - RNA, 22 nt, Human
cagcccugagagaaccaucuau

SEQ ID NO: 484715 - RNA, 22 nt, Human
aggccuccugcagggaugagug

SEQ ID NO: 484716 - RNA, 22 nt, Human
gggcugagugaccucaggccaa

SEQ ID NO: 484717 - RNA, 22 nt, Human
uccuccuucgggacugcuugac

SEQ ID NO: 484718 - RNA, 19 nt, Human
cacacccaugcuugccaag

SEQ ID NO: 484719 - RNA, 22 nt, Human
uguugauuugugggcugcaaaa

SEQ ID NO: 484720 - RNA, 22 nt, Human
gagugcaggccugagcaccauc

SEQ ID NO: 484721 - RNA, 22 nt, Human
cagggagggacaauugucaccu

SEQ ID NO: 484722 - RNA, 22 nt, Human
uauuucaugugcaccauaauuc

SEQ ID NO: 484723 - RNA, 22 nt, Human
ccugggaagagcugacaggagg

SEQ ID NO: 484724 - RNA, 22 nt, Human
ugcugaaggcaggggagguggc

SEQ ID NO: 484725 - RNA, 22 nt, Human
ugugaaaggggucacagggaaa

SEQ ID NO: 484726 - RNA, 22 nt, Human
augccaggccccacgcugggca

SEQ ID NO: 484727 - RNA, 22 nt, Human
ugugugcagccucugucuuugg

SEQ ID NO: 484728 - RNA, 22 nt, Human
auucaguuaaaaacuguacuuc

SEQ ID NO: 484729 - RNA, 22 nt, Human
uugcagcuucgagucuaucugu

SEQ ID NO: 484730 - RNA, 22 nt, Human
acuguacacgugucauuuacag

SEQ ID NO: 484731 - RNA, 20 nt, Human
cacaagagaauacacacugg

SEQ ID NO: 484732 - RNA, 22 nt, Human
gcagcccagagcgcaggacccc

SEQ ID NO: 484733 - RNA, 22 nt, Human
cagaggcugcucuggguggcau

SEQ ID NO: 484734 - RNA, 22 nt, Human
uucacaaagcuggagcauuucc

SEQ ID NO: 484735 - RNA, 22 nt, Human
cauguacacucauguaacuaua

SEQ ID NO: 484736 - RNA, 20 nt, Human
uacagaaacaggacuuuugg

SEQ ID NO: 484737 - RNA, 22 nt, Human
ccuggaggcucugggagggcag

SEQ ID NO: 484738 - RNA, 22 nt, Human
agucucagggccacccggggaa

SEQ ID NO: 484739 - RNA, 22 nt, Human
ucugucaggagauuggcagcug

SEQ ID NO: 484740 - RNA, 22 nt, Human
ccucaggaaccacauugcugcu

SEQ ID NO: 484741 - RNA, 22 nt, Human
ucagcuuucucuucuaucgaua

SEQ ID NO: 484742 - RNA, 22 nt, Human
aggcugcguuagccucacuccc

SEQ ID NO: 484743 - RNA, 22 nt, Human
gaggcagcagaacauggaagag

SEQ ID NO: 484744 - RNA, 22 nt, Human
ucugucugcgcuugcccuggug

SEQ ID NO: 484745 - RNA, 22 nt, Human
gucaggauuauuuuauuaaaag

SEQ ID NO: 484746 - RNA, 22 nt, Human
ccuggagguggagguugcagug

SEQ ID NO: 484747 - RNA, 22 nt, Human
caaggcugcugcgggucgcacc

SEQ ID NO: 484748 - RNA, 21 nt, Human
ugauuuccagaaaauuggccc

SEQ ID NO: 484749 - RNA, 22 nt, Human
caggcagauuugcugcccucca

SEQ ID NO: 484750 - RNA, 22 nt, Human
uacaaagugagcaaccucuuuu

SEQ ID NO: 484751 - RNA, 16 nt, Human
gggagggaguuggugg

SEQ ID NO: 484752 - RNA, 22 nt, Human
agaggaggcuggguccagauaa

SEQ ID NO: 484753 - RNA, 22 nt, Human
aaugcuagugugauauguaagg

SEQ ID NO: 484754 - RNA, 22 nt, Human
ucccagagugagccaggggcag

SEQ ID NO: 484755 - RNA, 22 nt, Human
caggaugcacuaggaaccaggg

SEQ ID NO: 484756 - RNA, 22 nt, Human
auucaguuucauggcacagcua

SEQ ID NO: 484757 - RNA, 22 nt, Human
ggcacugagcgggcucugagcg

SEQ ID NO: 484758 - RNA, 22 nt, Human
ccuggagcucacugggagccgg

SEQ ID NO: 484759 - RNA, 18 nt, Human
ucagaggagauaccuaaa

SEQ ID NO: 484760 - RNA, 22 nt, Human
uuacaugguuguuggaaaugcu

SEQ ID NO: 484761 - RNA, 22 nt, Human
ccagcuccucuucccaguguca

SEQ ID NO: 484762 - RNA, 22 nt, Human
cuggagcaggcuugucccagcu

SEQ ID NO: 484763 - RNA, 22 nt, Human
uggagccaaggccaguucucag

SEQ ID NO: 484764 - RNA, 22 nt, Human
caugagaaguggccuucaaaaa

SEQ ID NO: 484765 - RNA, 22 nt, Human
ccagcagguguagggcucaugg

SEQ ID NO: 484766 - RNA, 22 nt, Human
gcugccuggaauaacggcuggc

SEQ ID NO: 484767 - RNA, 22 nt, Human
ggcagugaacagaaaugcagaa

SEQ ID NO: 484768 - RNA, 22 nt, Human
agaacagcagcacgucaagcug

SEQ ID NO: 484769 - RNA, 22 nt, Human
augcaagauguauagaagacuu

SEQ ID NO: 484770 - RNA, 18 nt, Human
guccugagcucugcugua

SEQ ID NO: 484771 - RNA, 21 nt, Human
auuauuauuucuguguccagc

SEQ ID NO: 484772 - RNA, 22 nt, Human
uggcacugggaugcuacuguua

SEQ ID NO: 484773 - RNA, 22 nt, Human
gucccuggucuaccguggcuuc

SEQ ID NO: 484774 - RNA, 22 nt, Human
cagggagaucuuggcuccuggu

SEQ ID NO: 484775 - RNA, 21 nt, Human
uaucuacuggugucuuucaga

SEQ ID NO: 484776 - RNA, 22 nt, Human
ugcauuguuuagaacucuuugg

SEQ ID NO: 484777 - RNA, 21 nt, Human
agccuggcccagggggaggcu

SEQ ID NO: 484778 - RNA, 21 nt, Human
uacaagaccggauucgggccc

SEQ ID NO: 484779 - RNA, 21 nt, Human
guggccugauuaugaaugggu

SEQ ID NO: 484780 - RNA, 22 nt, Human
aucacauucuuucaaagcaguc

SEQ ID NO: 484781 - RNA, 22 nt, Human
gggaagggacuuguuuaagguc

SEQ ID NO: 484782 - RNA, 22 nt, Human
aaagucaaugauuucuccugga

SEQ ID NO: 484783 - RNA, 23 nt, Human
ggagugcaauggcgccaucucgg

SEQ ID NO: 484784 - RNA, 22 nt, Human
cuccagggagcugcgggagcca

SEQ ID NO: 484785 - RNA, 22 nt, Human
cagaggcucagauggcccuggc

SEQ ID NO: 484786 - RNA, 22 nt, Human
ggaagccaguugcuuggugugg

SEQ ID NO: 484787 - RNA, 22 nt, Human
ucaggcaggcagagggcaaaug

SEQ ID NO: 484788 - RNA, 17 nt, Human
uuucuccuuccaucuca

SEQ ID NO: 484789 - RNA, 22 nt, Human
uggccaggggaguuccccucca

SEQ ID NO: 484790 - RNA, 22 nt, Human
ggucccaguugcccaggucagg

SEQ ID NO: 484791 - RNA, 23 nt, Human
ugcagggcaaguuagagacccca

SEQ ID NO: 484792 - RNA, 22 nt, Human
acauuucucagguaagucauuu

SEQ ID NO: 484793 - RNA, 22 nt, Human
ucacuuauaaaaugcaagaucu

SEQ ID NO: 484794 - RNA, 22 nt, Human
auguacaguggaaacuaacaaa

SEQ ID NO: 484795 - RNA, 23 nt, Human
uccuuccuuugagaggcuccauc

SEQ ID NO: 484796 - RNA, 22 nt, Human
ccacaggcugcugcaggucccg

SEQ ID NO: 484797 - RNA, 22 nt, Human
aaggccaggagacuuggaguca

SEQ ID NO: 484798 - RNA, 22 nt, Human
uggaaacuaagacuagagagac

SEQ ID NO: 484799 - RNA, 23 nt, Human
agggcccaagccuggacagcagg

SEQ ID NO: 484800 - RNA, 22 nt, Human
ggaugcugggagacagcaggca

SEQ ID NO: 484801 - RNA, 22 nt, Human
cccacagguccccaugaacucg

SEQ ID NO: 484802 - RNA, 22 nt, Human
ggugggcagcucuuggcaggca

SEQ ID NO: 484803 - RNA, 22 nt, Human
aaggcuuuuguuccuauuuagu

SEQ ID NO: 484804 - RNA, 22 nt, Human
cccaggagguggagguugcagu

SEQ ID NO: 484805 - RNA, 22 nt, Human
ucccuguccugggcaaucccag

SEQ ID NO: 484806 - RNA, 22 nt, Human
agaggcaggagguugacuugag

SEQ ID NO: 484807 - RNA, 22 nt, Human
ugagcaguaacagcucacaggg

SEQ ID NO: 484808 - RNA, 22 nt, Human
cuauuacaauucugcaaggagu

SEQ ID NO: 484809 - RNA, 22 nt, Human
ccuggaguuuuuugguugacuc

SEQ ID NO: 484810 - RNA, 22 nt, Human
ccagcucuuuuggcugagugag

SEQ ID NO: 484811 - RNA, 21 nt, Human
uuugagaauuggucagagugc

SEQ ID NO: 484812 - RNA, 19 nt, Human
aauuagggagucgguuaag

SEQ ID NO: 484813 - RNA, 22 nt, Human
cacugaaggcuaggauuagaug

SEQ ID NO: 484814 - RNA, 21 nt, Human
aggcagccagucaugcucccu

SEQ ID NO: 484815 - RNA, 22 nt, Human
gagcacagaaucuucccaugca

SEQ ID NO: 484816 - RNA, 22 nt, Human
agauggggcagaauggagccau

SEQ ID NO: 484817 - RNA, 22 nt, Human
acagggcagaaauguugcaucu

SEQ ID NO: 484818 - RNA, 22 nt, Human
aagagcuggaguuugcagcccu

SEQ ID NO: 484819 - RNA, 22 nt, Human
uguuuuaaucucccauugcucu

SEQ ID NO: 484820 - RNA, 22 nt, Human
uccucccugaguggggacagcu

SEQ ID NO: 484821 - RNA, 22 nt, Human
cauggcugcgagaagagugggu

SEQ ID NO: 484822 - RNA, 20 nt, Human
cugaacacagaauaagcaca

SEQ ID NO: 484823 - RNA, 22 nt, Human
gugaggcagagaugccaaaacu

SEQ ID NO: 484824 - RNA, 20 nt, Human
aguaggggaaugcaagagca

SEQ ID NO: 484825 - RNA, 22 nt, Human
gggcuggcgggaaaggcaauuc

SEQ ID NO: 484826 - RNA, 22 nt, Human
ugaagccaccgaaccagaagag

SEQ ID NO: 484827 - RNA, 22 nt, Human
gcaguggcaugaugugggcuca

SEQ ID NO: 484828 - RNA, 22 nt, Human
aaauccuaaggagaauaugauu

SEQ ID NO: 484829 - RNA, 22 nt, Human
ucagaggaauuugcuuuucaug

SEQ ID NO: 484830 - RNA, 22 nt, Human
gccuggagcagacgugucccgg

SEQ ID NO: 484831 - RNA, 22 nt, Human
uccaggcaaagggacuagcagg

SEQ ID NO: 484832 - RNA, 22 nt, Human
cugucugucaaguucaucucca

SEQ ID NO: 484833 - RNA, 22 nt, Human
cuuuggaagugaccacaauccu

SEQ ID NO: 484834 - RNA, 22 nt, Human
acucaggaagaaagcagcuggu

SEQ ID NO: 484835 - RNA, 22 nt, Human
guuuuuccugcugacuuggguc

SEQ ID NO: 484836 - RNA, 22 nt, Human
ucccuagucgcaucuguggaga

SEQ ID NO: 484837 - RNA, 22 nt, Human
caggagugagaugcgaucacuu

SEQ ID NO: 484838 - RNA, 22 nt, Human
aggacuucuccgauaagucaga

SEQ ID NO: 484839 - RNA, 22 nt, Human
ugaggcaggacuugcauaaagu

SEQ ID NO: 484840 - RNA, 22 nt, Human
ugcaggaauagcuacagagcug

SEQ ID NO: 484841 - RNA, 22 nt, Human
ccaggugguucaggucaccaua

SEQ ID NO: 484842 - RNA, 22 nt, Human
augcuuuauuauuuugcaggga

SEQ ID NO: 484843 - RNA, 22 nt, Human
caccaggcugcccaggacaggg

SEQ ID NO: 484844 - RNA, 22 nt, Human
ucagagaggcaauacuguuuaa

SEQ ID NO: 484845 - RNA, 23 nt, Human
cccuggccuuggggcacaggcug

SEQ ID NO: 484846 - RNA, 22 nt, Human
gcugcccugugguccagcaggu

SEQ ID NO: 484847 - RNA, 22 nt, Human
uuccuccacgugacaggagcca

SEQ ID NO: 484848 - RNA, 22 nt, Human
uguggccuggaaggggcugcuc

SEQ ID NO: 484849 - RNA, 22 nt, Human
guaggcagauaggagugcagcc

SEQ ID NO: 484850 - RNA, 22 nt, Human
ucauuuguugaacuuuagugcg

SEQ ID NO: 484851 - RNA, 20 nt, Human
auacaaagagauugauguau

SEQ ID NO: 484852 - RNA, 22 nt, Human
acuguacaaauauugcaaaaua

SEQ ID NO: 484853 - RNA, 22 nt, Human
ugucccucauugacgcugugcc

SEQ ID NO: 484854 - RNA, 22 nt, Human
aggggcugccuggcuuggcacu

SEQ ID NO: 484855 - RNA, 22 nt, Human
gccaggcugacucccccggccu

SEQ ID NO: 484856 - RNA, 22 nt, Human
gaggggcuggguagggcaaccc

SEQ ID NO: 484857 - RNA, 20 nt, Human
gcuuccuucccagcccccac

SEQ ID NO: 484858 - RNA, 22 nt, Human
aggccagggucccacacucgca

SEQ ID NO: 484859 - RNA, 21 nt, Human
ucuggagcccuaagcugagaa

SEQ ID NO: 484860 - RNA, 22 nt, Human
guaaaguucuauuugaauuuag

SEQ ID NO: 484861 - RNA, 22 nt, Human
acaaaggugagcagaagacaca

SEQ ID NO: 484862 - RNA, 22 nt, Human
ugcauugcaguuaacucaguau

SEQ ID NO: 484863 - RNA, 22 nt, Human
agagccaguuacaacuguggag

SEQ ID NO: 484864 - RNA, 22 nt, Human
agaauucuggaguugggaggaa

SEQ ID NO: 484865 - RNA, 17 nt, Human
cccugccaccaggaagc

SEQ ID NO: 484866 - RNA, 22 nt, Human
agggcuggaggguacuaguuua

SEQ ID NO: 484867 - RNA, 19 nt, Human
ugcucauggggacuucucc

SEQ ID NO: 484868 - RNA, 22 nt, Human
gguuugguuuuggccaucuucc

SEQ ID NO: 484869 - RNA, 22 nt, Human
cauuaucucuucuauaugcuag

SEQ ID NO: 484870 - RNA, 20 nt, Human
cuuggccuacuuagcuuugu

SEQ ID NO: 484871 - RNA, 22 nt, Human
uggcccugcuguaucaucugcu

SEQ ID NO: 484872 - RNA, 22 nt, Human
ucaguuuuuguuugccagauag

SEQ ID NO: 484873 - RNA, 22 nt, Human
gauuuucugagccuucaaauuu

SEQ ID NO: 484874 - RNA, 22 nt, Human
acucccagguugccuggcaggc

SEQ ID NO: 484875 - RNA, 22 nt, Human
ugggugggagcgcccugucugg

SEQ ID NO: 484876 - RNA, 22 nt, Human
ggagagaauuccauggacaugu

SEQ ID NO: 484877 - RNA, 20 nt, Human
ggcagcaggaguuuccucuu

SEQ ID NO: 484878 - RNA, 22 nt, Human
uggccagcccuucagccaugcc

SEQ ID NO: 484879 - RNA, 22 nt, Human
gcugugagcugccugugucaca

SEQ ID NO: 484880 - RNA, 21 nt, Human
cagagguggccugaccucuga

SEQ ID NO: 484881 - RNA, 22 nt, Human
gcccugucggaacugcgaccuc

SEQ ID NO: 484882 - RNA, 22 nt, Human
uggagcaggugccaggugugug

SEQ ID NO: 484883 - RNA, 22 nt, Human
auacauacguacauacguaugu

SEQ ID NO: 484884 - RNA, 22 nt, Human
cuugaaagcacuccuuugacug

SEQ ID NO: 484885 - RNA, 22 nt, Human
guuucaaagcacagcucacauu

SEQ ID NO: 484886 - RNA, 22 nt, Human
gagaagcaaucgugacaucucc

SEQ ID NO: 484887 - RNA, 22 nt, Human
acuguguggaccacucugaggc

SEQ ID NO: 484888 - RNA, 22 nt, Human
acacaccaugauuuauuuaccc

SEQ ID NO: 484889 - RNA, 22 nt, Human
ugggccuguugggguugaguua

SEQ ID NO: 484890 - RNA, 21 nt, Human
ugcaggaaagugcugcgaccc

SEQ ID NO: 484891 - RNA, 22 nt, Human
gccagaaacauacacaucacuu

SEQ ID NO: 484892 - RNA, 20 nt, Human
aggccaggaaauguaguucu

SEQ ID NO: 484893 - RNA, 22 nt, Human
gaugcagggcuggcaggagcuu

SEQ ID NO: 484894 - RNA, 22 nt, Human
cauguuuucuaggcuuucacaa

SEQ ID NO: 484895 - RNA, 22 nt, Human
acaucuguuugagaaaaagaag

SEQ ID NO: 484896 - RNA, 22 nt, Human
caaggccaagucucugugaaga

SEQ ID NO: 484897 - RNA, 20 nt, Human
cccaggcagagcuagcggca

SEQ ID NO: 484898 - RNA, 22 nt, Human
agagcuggcugguagcccugau

SEQ ID NO: 484899 - RNA, 22 nt, Human
gcguccagggaaggcccagcug

SEQ ID NO: 484900 - RNA, 22 nt, Human
cucugcuuggaacuggacagaa

SEQ ID NO: 484901 - RNA, 22 nt, Human
ccucaggauccgcaggugcagu

SEQ ID NO: 484902 - RNA, 22 nt, Human
aaguucaagcucugccuaaaau

SEQ ID NO: 484903 - RNA, 22 nt, Human
agccucugcuuaugcaaaggua

SEQ ID NO: 484904 - RNA, 20 nt, Human
ucagaugggagugagccauc

SEQ ID NO: 484905 - RNA, 22 nt, Human
uacaggcauguagcauggugau

SEQ ID NO: 484906 - RNA, 22 nt, Human
ugggcugcuuccucagcugaga

SEQ ID NO: 484907 - RNA, 21 nt, Human
ucacuuauaauguauuugcug

SEQ ID NO: 484908 - RNA, 22 nt, Human
gggucuggacggcugcaggaag

SEQ ID NO: 484909 - RNA, 22 nt, Human
gaggcugggaaguccaagauca

SEQ ID NO: 484910 - RNA, 22 nt, Human
acagauauaaacuauaguagug

SEQ ID NO: 484911 - RNA, 22 nt, Human
uccucucagugugguuguggga

SEQ ID NO: 484912 - RNA, 22 nt, Human
ucuggagaacuugcaagaggau

SEQ ID NO: 484913 - RNA, 17 nt, Human
ucuggccuuccugaacu

SEQ ID NO: 484914 - RNA, 22 nt, Human
ccaggcagagggauccccaucc

SEQ ID NO: 484915 - RNA, 22 nt, Human
ugagcaguaggucugaauagug

SEQ ID NO: 484916 - RNA, 22 nt, Human
uucuggaaguguuagaaucugg

SEQ ID NO: 484917 - RNA, 22 nt, Human
gcugagggcuguaacagcagag

SEQ ID NO: 484918 - RNA, 22 nt, Human
cugaggcucccucgggucugcu

SEQ ID NO: 484919 - RNA, 20 nt, Human
uccugagauuuaagggguuc

SEQ ID NO: 484920 - RNA, 22 nt, Human
agccccacacucucucugagaa

SEQ ID NO: 484921 - RNA, 23 nt, Human
gggcagguuuuuauaggcuucag

SEQ ID NO: 484922 - RNA, 22 nt, Human
ugggcugcuucuauuggugguc

SEQ ID NO: 484923 - RNA, 20 nt, Human
uguacacaguacuuuacaau

SEQ ID NO: 484924 - RNA, 22 nt, Human
agcuuccuguugagagagggag

SEQ ID NO: 484925 - RNA, 20 nt, Human
ccagucccugagcaccaggg

SEQ ID NO: 484926 - RNA, 22 nt, Human
gcuucucuggccugcagggcau

SEQ ID NO: 484927 - RNA, 22 nt, Human
uagaaaucuacuuagacuuucu

SEQ ID NO: 484928 - RNA, 22 nt, Human
aggaagcucggagagggcaaau

SEQ ID NO: 484929 - RNA, 22 nt, Human
gugcugucguggaacugggcug

SEQ ID NO: 484930 - RNA, 21 nt, Human
agaauaaugguaucauuugcu

SEQ ID NO: 484931 - RNA, 22 nt, Human
ggcucagaccucccagcuccag

SEQ ID NO: 484932 - RNA, 22 nt, Human
uucuaauuguguuugcauaucu

SEQ ID NO: 484933 - RNA, 22 nt, Human
accaggcagcugggggugaugu

SEQ ID NO: 484934 - RNA, 19 nt, Human
aucugccuguuaucacaua

SEQ ID NO: 484935 - RNA, 22 nt, Human
aucuggcucucucauuuacaaa

SEQ ID NO: 484936 - RNA, 22 nt, Human
ugucuuuagagucacaaaacca

SEQ ID NO: 484937 - RNA, 22 nt, Human
augguuuguaacccaauacucc

SEQ ID NO: 484938 - RNA, 22 nt, Human
gguuccaccuggcgagggguau

SEQ ID NO: 484939 - RNA, 22 nt, Human
cugggagcuagcucugagcuga

SEQ ID NO: 484940 - RNA, 22 nt, Human
uccuucagauuccugcuucugg

SEQ ID NO: 484941 - RNA, 22 nt, Human
cccuucccuucugggagaucca

SEQ ID NO: 484942 - RNA, 22 nt, Human
agucaguguagaaagcccaggc

SEQ ID NO: 484943 - RNA, 21 nt, Human
aggccucuucauggccaugau

SEQ ID NO: 484944 - RNA, 22 nt, Human
agaggcucugccgccucaggua

SEQ ID NO: 484945 - RNA, 22 nt, Human
uagcugcccaucuuuccuuuag

SEQ ID NO: 484946 - RNA, 22 nt, Human
ucagggcacugucaccugauau

SEQ ID NO: 484947 - RNA, 22 nt, Human
cuggagcuggcuuccuuccacu

SEQ ID NO: 484948 - RNA, 22 nt, Human
uaccuugggcuauuaucuuuga

SEQ ID NO: 484949 - RNA, 19 nt, Human
cauaauacaguggaucuga

SEQ ID NO: 484950 - RNA, 22 nt, Human
cagagcugcucaugguggccag

SEQ ID NO: 484951 - RNA, 22 nt, Human
ggcugugggaugcauaggagcu

SEQ ID NO: 484952 - RNA, 22 nt, Human
ggagggugcauuuuacccugug

SEQ ID NO: 484953 - RNA, 22 nt, Human
ugggcaggaugcguugauucuu

SEQ ID NO: 484954 - RNA, 22 nt, Human
caaaugcuggcccugcuacuua

SEQ ID NO: 484955 - RNA, 22 nt, Human
ugcaggcugggaagagggacaa

SEQ ID NO: 484956 - RNA, 22 nt, Human
acagucuugcuguauggucagg

SEQ ID NO: 484957 - RNA, 22 nt, Human
uggcucaggagggaucuuugcu

SEQ ID NO: 484958 - RNA, 22 nt, Human
ugucaugcagguuuguuauaga

SEQ ID NO: 484959 - RNA, 22 nt, Human
agucucugugagcucccaaugg

SEQ ID NO: 484960 - RNA, 22 nt, Human
ggaagggcaauaaaaucucagg

SEQ ID NO: 484961 - RNA, 22 nt, Human
gccaggcuccaggcccuccuga

SEQ ID NO: 484962 - RNA, 22 nt, Human
ugcagcauucuuggccacuacu

SEQ ID NO: 484963 - RNA, 22 nt, Human
ucaaggcuaaacuuucagagua

SEQ ID NO: 484964 - RNA, 22 nt, Human
ucugucuuugagaucucagccu

SEQ ID NO: 484965 - RNA, 22 nt, Human
ggucaggggcugcucuacagag

SEQ ID NO: 484966 - RNA, 22 nt, Human
ucaaagcuuagauaauuucuuu

SEQ ID NO: 484967 - RNA, 22 nt, Human
uggcuggcaguaggcuaguggc

SEQ ID NO: 484968 - RNA, 22 nt, Human
gugcccaggcccaaggcaccac

SEQ ID NO: 484969 - RNA, 22 nt, Human
agauacauuaguaguuacuugu

SEQ ID NO: 484970 - RNA, 22 nt, Human
caggcccagcccagcccuucga

SEQ ID NO: 484971 - RNA, 22 nt, Human
aucagcaagauugugucuugua

SEQ ID NO: 484972 - RNA, 22 nt, Human
ugcuuuaucaaagcuauaguga

SEQ ID NO: 484973 - RNA, 20 nt, Human
cuggcaggagcgagucuacc

SEQ ID NO: 484974 - RNA, 22 nt, Human
cugcagggaugugaggcccguu

SEQ ID NO: 484975 - RNA, 22 nt, Human
cugggcuggagugcaauggcgc

SEQ ID NO: 484976 - RNA, 22 nt, Human
uguauuuucuucuggaagcuua

SEQ ID NO: 484977 - RNA, 22 nt, Human
aaacaaguguaaacuagucugu

SEQ ID NO: 484978 - RNA, 22 nt, Human
cccagacauaacagcagagagg

SEQ ID NO: 484979 - RNA, 21 nt, Human
agcaggaggcagucacagcuc

SEQ ID NO: 484980 - RNA, 22 nt, Human
cuccagugagcgcggggcaugg

SEQ ID NO: 484981 - RNA, 22 nt, Human
ucucagaguaauucuuuaaggu

SEQ ID NO: 484982 - RNA, 22 nt, Human
agggcugacaguggcguggcgu

SEQ ID NO: 484983 - RNA, 22 nt, Human
gagccaggcaccuucuguguug

SEQ ID NO: 484984 - RNA, 22 nt, Human
agcuggagaucaugcugauacu

SEQ ID NO: 484985 - RNA, 22 nt, Human
acagggcauuuccucuaugugu

SEQ ID NO: 484986 - RNA, 22 nt, Human
agaagccaugguaugcaacuac

SEQ ID NO: 484987 - RNA, 22 nt, Human
acaacaggguaaggcaggccau

SEQ ID NO: 484988 - RNA, 22 nt, Human
aaugauuuggcaaaggaaucca

SEQ ID NO: 484989 - RNA, 22 nt, Human
cugccuggaaugccagcuucuc

SEQ ID NO: 484990 - RNA, 22 nt, Human
uggagaagcuguagguggacuc

SEQ ID NO: 484991 - RNA, 22 nt, Human
uaaaucacuccuaauaaucagu

SEQ ID NO: 484992 - RNA, 22 nt, Human
uuucagaugugugucucugaag

SEQ ID NO: 484993 - RNA, 22 nt, Human
gaaaguuuauagguuauauaau

SEQ ID NO: 484994 - RNA, 22 nt, Human
agaaauguuuauggcugccuau

SEQ ID NO: 484995 - RNA, 22 nt, Human
uggcccuguguccugcugccag

SEQ ID NO: 484996 - RNA, 22 nt, Human
aggcagcaaagaaaugaugcug

SEQ ID NO: 484997 - RNA, 22 nt, Human
cacuuggaggcccccugugccc

SEQ ID NO: 484998 - RNA, 21 nt, Human
ugauccuuucccccauguugc

SEQ ID NO: 484999 - RNA, 22 nt, Human
aaggcugcuuuuaacaugcaua

SEQ ID NO: 485000 - RNA, 22 nt, Human
cccaggcagaauuaguguuuca

SEQ ID NO: 485001 - RNA, 22 nt, Human
ggagugaaucacuagaugcaga

SEQ ID NO: 485002 - RNA, 22 nt, Human
auggcucauuuaucuugcagcc

SEQ ID NO: 485003 - RNA, 22 nt, Human
aagaaaagaaaccugaggcuuu

SEQ ID NO: 485004 - RNA, 22 nt, Human
uuauuagcugggcuucagggug

SEQ ID NO: 485005 - RNA, 22 nt, Human
aauguacaaaccuucuuuguag

SEQ ID NO: 485006 - RNA, 22 nt, Human
caggcacagaguuauucauuua

SEQ ID NO: 485007 - RNA, 22 nt, Human
cagggcagugaagaacacacgu

SEQ ID NO: 485008 - RNA, 22 nt, Human
ggccucacccaucggugccuuu

SEQ ID NO: 485009 - RNA, 22 nt, Human
agggcagcauugccuuucucca

SEQ ID NO: 485010 - RNA, 22 nt, Human
uccucugcuccaucuuuacugu

SEQ ID NO: 485011 - RNA, 20 nt, Human
gagauuuccaaucaugccca

SEQ ID NO: 485012 - RNA, 22 nt, Human
uccaggcugauccaugaagaau

SEQ ID NO: 485013 - RNA, 22 nt, Human
ugcaggugguuuggacacugcu

SEQ ID NO: 485014 - RNA, 22 nt, Human
cuccagcuucccucagcugugg

SEQ ID NO: 485015 - RNA, 22 nt, Human
ucucagagcucacaccuccugg

SEQ ID NO: 485016 - RNA, 22 nt, Human
uuugcauuucucguaaggaaac

SEQ ID NO: 485017 - RNA, 20 nt, Human
aagcaauauagugcaaaugu

SEQ ID NO: 485018 - RNA, 22 nt, Human
agagugaaggccagguuacagu

SEQ ID NO: 485019 - RNA, 22 nt, Human
cauuuguuggucagauuguagu

SEQ ID NO: 485020 - RNA, 22 nt, Human
ucucucugccaacucacagcca

SEQ ID NO: 485021 - RNA, 22 nt, Human
ugcuuuauaucucucuucuuag

SEQ ID NO: 485022 - RNA, 22 nt, Human
ucauccaguaccauggaaggca

SEQ ID NO: 485023 - RNA, 22 nt, Human
uacuuguuaucaucuuuuccuu

SEQ ID NO: 485024 - RNA, 22 nt, Human
ccagcuuuugcacuggacuggg

SEQ ID NO: 485025 - RNA, 22 nt, Human
ccagccaggcuggcuguggagg

SEQ ID NO: 485026 - RNA, 22 nt, Human
cagaaauggagcccaggaaucu

SEQ ID NO: 485027 - RNA, 22 nt, Human
caggguuucaccauguuagcag

SEQ ID NO: 485028 - RNA, 22 nt, Human
gaguccaguuguucacagaggc

SEQ ID NO: 485029 - RNA, 22 nt, Human
ugcaggaauuuuuugcagaaag

SEQ ID NO: 485030 - RNA, 22 nt, Human
accaaggagaaggugcaagcuu

SEQ ID NO: 485031 - RNA, 20 nt, Human
ucucaggguucagcaaagua

SEQ ID NO: 485032 - RNA, 22 nt, Human
aggccuagaggaauggccaggg

SEQ ID NO: 485033 - RNA, 22 nt, Human
ugcaaacaggagaguaaguaua

SEQ ID NO: 485034 - RNA, 22 nt, Human
ucagguguuagaagaaauuuca

SEQ ID NO: 485035 - RNA, 22 nt, Human
gagccaggcccguacuugcugu

SEQ ID NO: 485036 - RNA, 22 nt, Human
acugaaggcuuaacucuuucau

SEQ ID NO: 485037 - RNA, 22 nt, Human
gaggggcuugaggcccugaugg

SEQ ID NO: 485038 - RNA, 22 nt, Human
uacaguaaagcugcuaugaauu

SEQ ID NO: 485039 - RNA, 19 nt, Human
uggcagggagugauauuag

SEQ ID NO: 485040 - RNA, 22 nt, Human
ugcccaaguccuccaccgaggu

SEQ ID NO: 485041 - RNA, 22 nt, Human
ggacagcccauacacaugucug

SEQ ID NO: 485042 - RNA, 22 nt, Human
uagugauuaaaggcagaauguu

SEQ ID NO: 485043 - RNA, 22 nt, Human
gggugaagcuccugcaggggcc

SEQ ID NO: 485044 - RNA, 22 nt, Human
cccaggaggcagagguugcagu

SEQ ID NO: 485045 - RNA, 22 nt, Human
uagagaaauaagcuuugccuug

SEQ ID NO: 485046 - RNA, 22 nt, Human
aagagcuggcucuugcagcagc

SEQ ID NO: 485047 - RNA, 22 nt, Human
ugucccagggaaggcccagcac

SEQ ID NO: 485048 - RNA, 22 nt, Human
agggacccauagagagaccagu

SEQ ID NO: 485049 - RNA, 22 nt, Human
agcagcauagaagcugggagga

SEQ ID NO: 485050 - RNA, 22 nt, Human
cuuuccuagauggccaucuuuc

SEQ ID NO: 485051 - RNA, 22 nt, Human
ucccaggaaaacacucgaggac

SEQ ID NO: 485052 - RNA, 22 nt, Human
uauuuaaaaagaggccagcugg

SEQ ID NO: 485053 - RNA, 22 nt, Human
uaaaaguuuuaguuguacauaa

SEQ ID NO: 485054 - RNA, 22 nt, Human
uauucacaaaaugagguccuca

SEQ ID NO: 485055 - RNA, 22 nt, Human
uuagauaaauugcaacuugauu

SEQ ID NO: 485056 - RNA, 22 nt, Human
cccuggcaugcaugucccuggc

SEQ ID NO: 485057 - RNA, 22 nt, Human
uggccucuuaggacauccucua

SEQ ID NO: 485058 - RNA, 22 nt, Human
ucaggcugguggucagauggcu

SEQ ID NO: 485059 - RNA, 20 nt, Human
cuguagggugcagcaggcuc

SEQ ID NO: 485060 - RNA, 18 nt, Human
uggcagggaggaaauaua

SEQ ID NO: 485061 - RNA, 22 nt, Human
agcagggcagcuuuuuucagaa

SEQ ID NO: 485062 - RNA, 22 nt, Human
ugaagcagcuucuuucugucaa

SEQ ID NO: 485063 - RNA, 22 nt, Human
aagauggaguaguguaaugguu

SEQ ID NO: 485064 - RNA, 22 nt, Human
uccaauaacaucuaaaaacuua

SEQ ID NO: 485065 - RNA, 23 nt, Human
agggcuccuuguugauuagcauu

SEQ ID NO: 485066 - RNA, 22 nt, Human
cacugaagaugcgacuagugcu

SEQ ID NO: 485067 - RNA, 22 nt, Human
ccugggugaaaucucuccugca

SEQ ID NO: 485068 - RNA, 22 nt, Human
ccaguucugacacaagcacagu

SEQ ID NO: 485069 - RNA, 22 nt, Human
ugagcuucaaaauaugugaauc

SEQ ID NO: 485070 - RNA, 22 nt, Human
ggagagugggagcaacuguugc

SEQ ID NO: 485071 - RNA, 22 nt, Human
gggcaugccugcgcagugcaug

SEQ ID NO: 485072 - RNA, 22 nt, Human
cagaggcucuuccucacugccc

SEQ ID NO: 485073 - RNA, 22 nt, Human
uuuccauauuuggucuuuggga

SEQ ID NO: 485074 - RNA, 22 nt, Human
augaaggauggcuggcugcccu

SEQ ID NO: 485075 - RNA, 22 nt, Human
augaacacauguacacauuucu

SEQ ID NO: 485076 - RNA, 22 nt, Human
uggccuggcugcccugucugga

SEQ ID NO: 485077 - RNA, 22 nt, Human
ccagggcacguugggacaguac

SEQ ID NO: 485078 - RNA, 22 nt, Human
uggaagagggagcuggguggcc

SEQ ID NO: 485079 - RNA, 22 nt, Human
caggugggcguggcgagaaggc

SEQ ID NO: 485080 - RNA, 22 nt, Human
aagggcaggugggcauuucugg

SEQ ID NO: 485081 - RNA, 22 nt, Human
aaguguagauuauggagugucu

SEQ ID NO: 485082 - RNA, 22 nt, Human
aaguucaagucuccugaguaua

SEQ ID NO: 485083 - RNA, 22 nt, Human
caggagugcagguggugaggca

SEQ ID NO: 485084 - RNA, 21 nt, Human
uuugaaagugggugauucuuu

SEQ ID NO: 485085 - RNA, 22 nt, Human
aaagcugcugccaaucaggcuu

SEQ ID NO: 485086 - RNA, 22 nt, Human
aagauuuccuucaguagagcua

SEQ ID NO: 485087 - RNA, 22 nt, Human
aggcuuguggauuggagcgagu

SEQ ID NO: 485088 - RNA, 22 nt, Human
gaugguuuggaaugaaguagcu

SEQ ID NO: 485089 - RNA, 22 nt, Human
caggccagguggcaggcaaaac

SEQ ID NO: 485090 - RNA, 22 nt, Human
ccucagaugucuuaaggcacug

SEQ ID NO: 485091 - RNA, 22 nt, Human
ggggugggguuacucauugugc

SEQ ID NO: 485092 - RNA, 22 nt, Human
uacaacauguaaagugguuuaa

SEQ ID NO: 485093 - RNA, 22 nt, Human
aauuucuccaagaaugcuuaga

SEQ ID NO: 485094 - RNA, 22 nt, Human
ugccucuguugagccuuggcug

SEQ ID NO: 485095 - RNA, 22 nt, Human
aagggaaaucauauggugcagu

SEQ ID NO: 485096 - RNA, 22 nt, Human
uuucuauuuacagugcuaggua

SEQ ID NO: 485097 - RNA, 22 nt, Human
ucuggagccacaaaccucagcu

SEQ ID NO: 485098 - RNA, 22 nt, Human
ccuguguggccaggcuggaguc

SEQ ID NO: 485099 - RNA, 22 nt, Human
uggccucuggcugaggacuaac

SEQ ID NO: 485100 - RNA, 22 nt, Human
accaggcagagcugggccuuaa

SEQ ID NO: 485101 - RNA, 22 nt, Human
ccaguggaguuuuuauacccag

SEQ ID NO: 485102 - RNA, 22 nt, Human
ggcugccauaacagaguaccac

SEQ ID NO: 485103 - RNA, 22 nt, Human
cauuucuauggcaaugggaaaa

SEQ ID NO: 485104 - RNA, 22 nt, Human
gguugccggggcaggacuggaa

SEQ ID NO: 485105 - RNA, 22 nt, Human
cagagcugacccaaggauugaa

SEQ ID NO: 485106 - RNA, 22 nt, Human
ccucccagugccuccagagcag

SEQ ID NO: 485107 - RNA, 22 nt, Human
uggucgaccaguuggaaaguaa

SEQ ID NO: 485108 - RNA, 17 nt, Human
agccgggcauggaccag

SEQ ID NO: 485109 - RNA, 22 nt, Human
gggcaggagagaacagucaugg

SEQ ID NO: 485110 - RNA, 20 nt, Human
ugaaggccauuuguuccaga

SEQ ID NO: 485111 - RNA, 22 nt, Human
accugcagcugagaaaaugacu

SEQ ID NO: 485112 - RNA, 22 nt, Human
ucaucuucuauuaauagggaga

SEQ ID NO: 485113 - RNA, 22 nt, Human
agaaaucaauaucuauauguug

SEQ ID NO: 485114 - RNA, 22 nt, Human
ccuggcagcgugccgagcugcg

SEQ ID NO: 485115 - RNA, 22 nt, Human
uauuuugagguauuuuugagcu

SEQ ID NO: 485116 - RNA, 22 nt, Human
cagcagggcccccgggugcgcc

SEQ ID NO: 485117 - RNA, 22 nt, Human
agcugcugcggaaagaugccac

SEQ ID NO: 485118 - RNA, 22 nt, Human
auucauuccaggucagucagac

SEQ ID NO: 485119 - RNA, 22 nt, Human
aaaugcacagaaaggaugugga

SEQ ID NO: 485120 - RNA, 22 nt, Human
cagaagcagugagagaugugca

SEQ ID NO: 485121 - RNA, 21 nt, Human
gagacagacuuucguccccug

SEQ ID NO: 485122 - RNA, 22 nt, Human
gcugccacucugagcuugcuuc

SEQ ID NO: 485123 - RNA, 21 nt, Human
uuuauuuauauaggacacaug

SEQ ID NO: 485124 - RNA, 22 nt, Human
aaaugcacacaccaggaaacua

SEQ ID NO: 485125 - RNA, 22 nt, Human
aaaucaaaagacauguguuuua

SEQ ID NO: 485126 - RNA, 22 nt, Human
ugcuggggauccguaccaaccc

SEQ ID NO: 485127 - RNA, 22 nt, Human
cccucugcucaggugcauaggc

SEQ ID NO: 485128 - RNA, 22 nt, Human
uuaguaauguguuaauaugaau

SEQ ID NO: 485129 - RNA, 22 nt, Human
aaauguguuccuuugcuacaga

SEQ ID NO: 485130 - RNA, 22 nt, Human
guugaaagagcauggacuugaa

SEQ ID NO: 485131 - RNA, 22 nt, Human
aucuggguucaccaugcuccug

SEQ ID NO: 485132 - RNA, 23 nt, Human
cugucuccugggcuagguggaau

SEQ ID NO: 485133 - RNA, 22 nt, Human
ccacaggggcccacgagccgcu

SEQ ID NO: 485134 - RNA, 22 nt, Human
aaguggaggccgaguucacgca

SEQ ID NO: 485135 - RNA, 22 nt, Human
cuguaaaacacuguaguaucug

SEQ ID NO: 485136 - RNA, 22 nt, Human
gcagggcagaccuccagccuau

SEQ ID NO: 485137 - RNA, 19 nt, Human
uugcauuguaguuggacug

SEQ ID NO: 485138 - RNA, 22 nt, Human
augggaugcauggcuguggcca

SEQ ID NO: 485139 - RNA, 22 nt, Human
ggcagggcagcgcugauuaggg

SEQ ID NO: 485140 - RNA, 20 nt, Human
gcugaccccugcugucaugc

SEQ ID NO: 485141 - RNA, 22 nt, Human
agcuuuaucccuugcccaucga

SEQ ID NO: 485142 - RNA, 22 nt, Human
cagaccuggaaaacaggcuugc

SEQ ID NO: 485143 - RNA, 22 nt, Human
agcagcauggcugacuaaagac

SEQ ID NO: 485144 - RNA, 22 nt, Human
acacagaaccucauagccucuc

SEQ ID NO: 485145 - RNA, 22 nt, Human
ucaggcugaggucaucugcauc

SEQ ID NO: 485146 - RNA, 22 nt, Human
ggccaggccaagaggguuggaa

SEQ ID NO: 485147 - RNA, 22 nt, Human
gcccauggcagaacugugagca

SEQ ID NO: 485148 - RNA, 18 nt, Human
uuccauaauguauguaac

SEQ ID NO: 485149 - RNA, 22 nt, Human
aaggaaagacauauaaaugacu

SEQ ID NO: 485150 - RNA, 22 nt, Human
uuguccuuaccucaaucuggaa

SEQ ID NO: 485151 - RNA, 22 nt, Human
cagccagggagcaaagaguuga

SEQ ID NO: 485152 - RNA, 22 nt, Human
aaaugugucaguuucauucucu

SEQ ID NO: 485153 - RNA, 22 nt, Human
uugugcaauuuaaaaucuuccu

SEQ ID NO: 485154 - RNA, 22 nt, Human
aagcagcauucagugaaaugug

SEQ ID NO: 485155 - RNA, 22 nt, Human
aggccagagaggggaccagccu

SEQ ID NO: 485156 - RNA, 22 nt, Human
ugaggcaggagguugagaacug

SEQ ID NO: 485157 - RNA, 22 nt, Human
uagggacaaagagcugaggccu

SEQ ID NO: 485158 - RNA, 22 nt, Human
ucugcagcgugcaggcuggugc

SEQ ID NO: 485159 - RNA, 22 nt, Human
ugcuuuauaggggauugcaggc

SEQ ID NO: 485160 - RNA, 22 nt, Human
gaauucugguuuugaaaugaau

SEQ ID NO: 485161 - RNA, 22 nt, Human
gcuggccugaccugaggcuggg

SEQ ID NO: 485162 - RNA, 22 nt, Human
ggaggugaggccguagggugug

SEQ ID NO: 485163 - RNA, 22 nt, Human
ccagagcccagcacacggugcu

SEQ ID NO: 485164 - RNA, 22 nt, Human
gcuguacaggguuauccuuucc

SEQ ID NO: 485165 - RNA, 22 nt, Human
uccugggguccugacugcuucc

SEQ ID NO: 485166 - RNA, 22 nt, Human
aguguuguaugggaugacugcu

SEQ ID NO: 485167 - RNA, 22 nt, Human
uacaguagaauuuuuaguaacu

SEQ ID NO: 485168 - RNA, 22 nt, Human
cugaaggaagcagguggccugu

SEQ ID NO: 485169 - RNA, 22 nt, Human
caaggcaggcaguucacuugag

SEQ ID NO: 485170 - RNA, 22 nt, Human
ggcuccuggggaggugagcuug

SEQ ID NO: 485171 - RNA, 22 nt, Human
ucacugggagaugugggaaggg

SEQ ID NO: 485172 - RNA, 19 nt, Human
uggcuuccaucucucucau

SEQ ID NO: 485173 - RNA, 23 nt, Human
auggagcugguacuagcuaccuc

SEQ ID NO: 485174 - RNA, 22 nt, Human
gggagcugguuccugcccucca

SEQ ID NO: 485175 - RNA, 20 nt, Human
uuguuucugcuauuuucuaa

SEQ ID NO: 485176 - RNA, 22 nt, Human
agcuggaggggccagcaggugu

SEQ ID NO: 485177 - RNA, 22 nt, Human
aaauacagauuccagggucuua

SEQ ID NO: 485178 - RNA, 22 nt, Human
gcaagcuggcuguuagaggaug

SEQ ID NO: 485179 - RNA, 22 nt, Human
cucaggauuuacuaauuucaag

SEQ ID NO: 485180 - RNA, 22 nt, Human
agggcccuaaggaaggcacaca

SEQ ID NO: 485181 - RNA, 22 nt, Human
agaauuagucacaauuauagga

SEQ ID NO: 485182 - RNA, 22 nt, Human
gggcugaccaaugccuugcuuu

SEQ ID NO: 485183 - RNA, 18 nt, Human
acagggagggcgcugggg

SEQ ID NO: 485184 - RNA, 21 nt, Human
gcacagugccaggcacacagu

SEQ ID NO: 485185 - RNA, 22 nt, Human
aggagcugcuuaaaugguuggu

SEQ ID NO: 485186 - RNA, 22 nt, Human
gucaggauuggggucaugaguc

SEQ ID NO: 485187 - RNA, 22 nt, Human
ucuccuuugaaaguuaggacug

SEQ ID NO: 485188 - RNA, 20 nt, Human
uuugagaccagucugcccaa

SEQ ID NO: 485189 - RNA, 22 nt, Human
ucucagaggucuucagccucug

SEQ ID NO: 485190 - RNA, 19 nt, Human
uccugcagguggcuugcag

SEQ ID NO: 485191 - RNA, 22 nt, Human
ccagcacugcucucagacugag

SEQ ID NO: 485192 - RNA, 22 nt, Human
cacucugagaaguacaagcucc

SEQ ID NO: 485193 - RNA, 22 nt, Human
gcucccugcacucugcagcccu

SEQ ID NO: 485194 - RNA, 22 nt, Human
acagcuuuaguguggguggugc

SEQ ID NO: 485195 - RNA, 22 nt, Human
uaugcacaccuggguccuuguc

SEQ ID NO: 485196 - RNA, 22 nt, Human
cuaguucuuaacuguuaugauu

SEQ ID NO: 485197 - RNA, 23 nt, Human
cagugcagggcaacucagacucc

SEQ ID NO: 485198 - RNA, 22 nt, Human
aagaugauagaucugucaaugu

SEQ ID NO: 485199 - RNA, 22 nt, Human
uggaggagaauuuauggucgaa

SEQ ID NO: 485200 - RNA, 22 nt, Human
aggcagcagagguugaggaaag

SEQ ID NO: 485201 - RNA, 23 nt, Human
ucguugaauagcaauagcacaac

SEQ ID NO: 485202 - RNA, 22 nt, Human
auauucacugagcauaaagcca

SEQ ID NO: 485203 - RNA, 22 nt, Human
ggggaggaagcuggaacacggg

SEQ ID NO: 485204 - RNA, 22 nt, Human
gggcgccgugggaaacagccgg

SEQ ID NO: 485205 - RNA, 19 nt, Human
ccagagacauuggcaucuu

SEQ ID NO: 485206 - RNA, 22 nt, Human
uacaaaugaccauagccacuua

SEQ ID NO: 485207 - RNA, 22 nt, Human
ccacuguuuuucaguuaacuuu

SEQ ID NO: 485208 - RNA, 22 nt, Human
ugagggaggcccuuugagcaga

SEQ ID NO: 485209 - RNA, 22 nt, Human
gaugccugcauuucaggagagu

SEQ ID NO: 485210 - RNA, 22 nt, Human
uccagggaucuuuagagucuuu

SEQ ID NO: 485211 - RNA, 19 nt, Human
ggagccuggagcacgugcc

SEQ ID NO: 485212 - RNA, 22 nt, Human
gcaugugucuccccaguggagg

SEQ ID NO: 485213 - RNA, 23 nt, Human
cccagaccuugugcugcccuugg

SEQ ID NO: 485214 - RNA, 22 nt, Human
agcccggcuuccccgguugcua

SEQ ID NO: 485215 - RNA, 22 nt, Human
auggggugagacuaggauuaaa

SEQ ID NO: 485216 - RNA, 22 nt, Human
cugccacuuucacccagugcuc

SEQ ID NO: 485217 - RNA, 22 nt, Human
agcagggcugcagugugucuuu

SEQ ID NO: 485218 - RNA, 22 nt, Human
ugaguaauaaacugucuugcuc

SEQ ID NO: 485219 - RNA, 21 nt, Human
ucucacaauaugaugccagau

SEQ ID NO: 485220 - RNA, 22 nt, Human
acauucuguuuccccaaagaga

SEQ ID NO: 485221 - RNA, 22 nt, Human
aacccagccguguagcugccgc

SEQ ID NO: 485222 - RNA, 22 nt, Human
agauguguuucuaguuccugca

SEQ ID NO: 485223 - RNA, 16 nt, Human
cagcuuuaugucagug

SEQ ID NO: 485224 - RNA, 22 nt, Human
agcagagaagacacaggcuuca

SEQ ID NO: 485225 - RNA, 22 nt, Human
acaggggauugauuggaagucu

SEQ ID NO: 485226 - RNA, 22 nt, Human
ccccuuccacagugcuuccuaa

SEQ ID NO: 485227 - RNA, 22 nt, Human
gcugauccuuuuaugucuagcu

SEQ ID NO: 485228 - RNA, 22 nt, Human
ggucccaguccucucccugcua

SEQ ID NO: 485229 - RNA, 22 nt, Human
ugccagcuccgaggagcugcag

SEQ ID NO: 485230 - RNA, 22 nt, Human
cugagggcaugaacauuccaua

SEQ ID NO: 485231 - RNA, 22 nt, Human
aggcugccucgugagcucgcug

SEQ ID NO: 485232 - RNA, 22 nt, Human
uuaagucacuuaucuaaagaca

SEQ ID NO: 485233 - RNA, 22 nt, Human
ggguggggcccaggaaaucuau

SEQ ID NO: 485234 - RNA, 22 nt, Human
gggcagggguagcauuccaagu

SEQ ID NO: 485235 - RNA, 22 nt, Human
ugcagggacacgaagacaaaua

SEQ ID NO: 485236 - RNA, 22 nt, Human
auugaaagcacaaagaacaagu

SEQ ID NO: 485237 - RNA, 22 nt, Human
cccagcuccaagggacagcgaa

SEQ ID NO: 485238 - RNA, 22 nt, Human
uaagcugugggagauuggcaua

SEQ ID NO: 485239 - RNA, 22 nt, Human
auuccaaacagugcugcagacu

SEQ ID NO: 485240 - RNA, 22 nt, Human
acagguggcuuauuggcugauu

SEQ ID NO: 485241 - RNA, 22 nt, Human
gccucugcugcaagccugguug

SEQ ID NO: 485242 - RNA, 22 nt, Human
aaaggucaaaaucgugacauug

SEQ ID NO: 485243 - RNA, 22 nt, Human
uugucugucccagcuugugcau

SEQ ID NO: 485244 - RNA, 22 nt, Human
agcugccagggacugggcaugg

SEQ ID NO: 485245 - RNA, 18 nt, Human
uccugccugugccccagg

SEQ ID NO: 485246 - RNA, 22 nt, Human
ucugagcuggagcccaucaccu

SEQ ID NO: 485247 - RNA, 22 nt, Human
gagcugcagcggcugacgcaac

SEQ ID NO: 485248 - RNA, 22 nt, Human
gccacaugcaauugcagcacgu

SEQ ID NO: 485249 - RNA, 22 nt, Human
uccuuucaccaaaaaguguugu

SEQ ID NO: 485250 - RNA, 22 nt, Human
uguccugcaacugaaggagaag

SEQ ID NO: 485251 - RNA, 22 nt, Human
accaugggucagccaccucagc

SEQ ID NO: 485252 - RNA, 21 nt, Human
uggagcugaauuuuuggcauc

SEQ ID NO: 485253 - RNA, 22 nt, Human
aagcugccagauucagucugcu

SEQ ID NO: 485254 - RNA, 22 nt, Human
gaaggcacugaacuccuucugg

SEQ ID NO: 485255 - RNA, 22 nt, Human
ccugaggcccuggcugugcuga

SEQ ID NO: 485256 - RNA, 21 nt, Human
gggcaggucucugaugucaac

SEQ ID NO: 485257 - RNA, 22 nt, Human
ugagccagaguggagugugccu

SEQ ID NO: 485258 - RNA, 22 nt, Human
ccugggcuugcaucugugcugg

SEQ ID NO: 485259 - RNA, 22 nt, Human
aucaggaugcugucaguuacca

SEQ ID NO: 485260 - RNA, 22 nt, Human
caucucaugggcaugccaagcu

SEQ ID NO: 485261 - RNA, 22 nt, Human
agugucugaaccaccggggcau

SEQ ID NO: 485262 - RNA, 22 nt, Human
cccuggugguacggcacuggca

SEQ ID NO: 485263 - RNA, 22 nt, Human
agcugccauccgaggugucaga

SEQ ID NO: 485264 - RNA, 22 nt, Human
uuugauuuacuggauauucuca

SEQ ID NO: 485265 - RNA, 22 nt, Human
accuuucacgguaucagacauc

SEQ ID NO: 485266 - RNA, 22 nt, Human
uccagccaugcaugacaaucac

SEQ ID NO: 485267 - RNA, 22 nt, Human
aaaugcauugguuucuacuugu

SEQ ID NO: 485268 - RNA, 22 nt, Human
acaggugauucaggcucuggga

SEQ ID NO: 485269 - RNA, 22 nt, Human
ccagagagguagcuuacccucu

SEQ ID NO: 485270 - RNA, 22 nt, Human
cuucaucaacucuaacaaaugu

SEQ ID NO: 485271 - RNA, 22 nt, Human
acauugaucagccucccaugca

SEQ ID NO: 485272 - RNA, 21 nt, Human
aaggccugcuuacugcuaguu

SEQ ID NO: 485273 - RNA, 22 nt, Human
auguguauacuugugcuuacuc

SEQ ID NO: 485274 - RNA, 22 nt, Human
uccaggcaggguuaaggguccu

SEQ ID NO: 485275 - RNA, 21 nt, Human
aaauuucugcaagccucaacu

SEQ ID NO: 485276 - RNA, 22 nt, Human
uagcugucaccagaaauggcca

SEQ ID NO: 485277 - RNA, 22 nt, Human
agucagcagugaaagcacagcc

SEQ ID NO: 485278 - RNA, 23 nt, Human
aggaggccugaaacugaggcuga

SEQ ID NO: 485279 - RNA, 22 nt, Human
agcagagccagaauuggaccag

SEQ ID NO: 485280 - RNA, 22 nt, Human
cuggagcucuguguguuccuga

SEQ ID NO: 485281 - RNA, 22 nt, Human
ggagaaggaauauuggaguagg

SEQ ID NO: 485282 - RNA, 23 nt, Human
agaggcaggaguggcuugcccgg

SEQ ID NO: 485283 - RNA, 22 nt, Human
aacugcauucagaaagcucacu

SEQ ID NO: 485284 - RNA, 19 nt, Human
ucagggcaguccggucccc

SEQ ID NO: 485285 - RNA, 22 nt, Human
aaacugaauucccaagggcaug

SEQ ID NO: 485286 - RNA, 19 nt, Human
cuggcucuuggguggagga

SEQ ID NO: 485287 - RNA, 22 nt, Human
aucuggcucaccuggguaaaua

SEQ ID NO: 485288 - RNA, 22 nt, Human
ugcucuccggcuuccguggccu

SEQ ID NO: 485289 - RNA, 22 nt, Human
gcuggagcugcagccugggccu

SEQ ID NO: 485290 - RNA, 22 nt, Human
ugagcagggacuuugaguguag

SEQ ID NO: 485291 - RNA, 17 nt, Human
ccugucuuguuucugcc

SEQ ID NO: 485292 - RNA, 22 nt, Human
auguuucaaauauauagaguug

SEQ ID NO: 485293 - RNA, 22 nt, Human
gaggcugcacuggcuaaaggcu

SEQ ID NO: 485294 - RNA, 21 nt, Human
ggagucagggucuggcugggg

SEQ ID NO: 485295 - RNA, 22 nt, Human
gaaaaugugccuuuggguauug

SEQ ID NO: 485296 - RNA, 22 nt, Human
uuuaaaauuuagaccucuccac

SEQ ID NO: 485297 - RNA, 22 nt, Human
gaggggcagaaugugaucaggg

SEQ ID NO: 485298 - RNA, 22 nt, Human
ucucccaggucauacacagaga

SEQ ID NO: 485299 - RNA, 22 nt, Human
cagaauuuagcacaauguaugg

SEQ ID NO: 485300 - RNA, 22 nt, Human
cuuccaaagcacuuuauggacc

SEQ ID NO: 485301 - RNA, 22 nt, Human
ggcaggcaagucugcucuguga

SEQ ID NO: 485302 - RNA, 22 nt, Human
gcagcccaaaaaagagguagau

SEQ ID NO: 485303 - RNA, 22 nt, Human
uggcagcacuugaacuugagcc

SEQ ID NO: 485304 - RNA, 22 nt, Human
ugcaggcuggaggagggacuaa

SEQ ID NO: 485305 - RNA, 22 nt, Human
agcuguggcagcacuuuggagu

SEQ ID NO: 485306 - RNA, 19 nt, Human
uugaggggccaggggagau

SEQ ID NO: 485307 - RNA, 22 nt, Human
ggccucugguucguggugaccu

SEQ ID NO: 485308 - RNA, 22 nt, Human
accuggagucauuugaggagua

SEQ ID NO: 485309 - RNA, 22 nt, Human
gagaaaauagcauguguaguau

SEQ ID NO: 485310 - RNA, 22 nt, Human
ggaccagagaagugagcaccug

SEQ ID NO: 485311 - RNA, 22 nt, Human
aauaauuauuugagagcagacc

SEQ ID NO: 485312 - RNA, 22 nt, Human
gagccuggccuccugccucagc

SEQ ID NO: 485313 - RNA, 22 nt, Human
guccucugggcuuugagcaguc

SEQ ID NO: 485314 - RNA, 22 nt, Human
uuucuuguaagauguuuauuaa

SEQ ID NO: 485315 - RNA, 22 nt, Human
auuaaauuagcaaacugugaaa

SEQ ID NO: 485316 - RNA, 22 nt, Human
ucuggcucccagccugcucuca

SEQ ID NO: 485317 - RNA, 22 nt, Human
gagggcuccucacauucucuau

SEQ ID NO: 485318 - RNA, 22 nt, Human
gaagcagcagcuggggacaguu

SEQ ID NO: 485319 - RNA, 22 nt, Human
ggagaugccagaauugcaaauu

SEQ ID NO: 485320 - RNA, 18 nt, Human
cagggcuguggggucacu

SEQ ID NO: 485321 - RNA, 22 nt, Human
cuuucuuauaccugucagggcc

SEQ ID NO: 485322 - RNA, 22 nt, Human
uucuaguuuugccuuaucaaca

SEQ ID NO: 485323 - RNA, 22 nt, Human
aagacugucugggacaagauga

SEQ ID NO: 485324 - RNA, 22 nt, Human
gcugaagcugcagcaggaggaa

SEQ ID NO: 485325 - RNA, 22 nt, Human
cacagguguaugaauaugucca

SEQ ID NO: 485326 - RNA, 19 nt, Human
cugcucaggucagucuguc

SEQ ID NO: 485327 - RNA, 20 nt, Human
caguagcaauaauuagaagc

SEQ ID NO: 485328 - RNA, 22 nt, Human
gaaggagcuaaagggagcccug

SEQ ID NO: 485329 - RNA, 22 nt, Human
ugguggcaauguccuggagaag

SEQ ID NO: 485330 - RNA, 22 nt, Human
acuucucuucauagguggcaau

SEQ ID NO: 485331 - RNA, 22 nt, Human
cugcucuggggaagccagaugu

SEQ ID NO: 485332 - RNA, 22 nt, Human
aggagugaguguccucagcaga

SEQ ID NO: 485333 - RNA, 22 nt, Human
gcagugggcaacaagagcugga

SEQ ID NO: 485334 - RNA, 22 nt, Human
uucuuaaaacuuauggacaggu

SEQ ID NO: 485335 - RNA, 22 nt, Human
cagcugccccuccagggcuggg

SEQ ID NO: 485336 - RNA, 23 nt, Human
uguagcaucucuuauuucucagc

SEQ ID NO: 485337 - RNA, 21 nt, Human
uuuguucaggggcaaaguuaa

SEQ ID NO: 485338 - RNA, 22 nt, Human
ccacagagagugucagccuuug

SEQ ID NO: 485339 - RNA, 22 nt, Human
gagaaacuaacaucugaaggug

SEQ ID NO: 485340 - RNA, 22 nt, Human
caucuggcuagcuaucauugug

SEQ ID NO: 485341 - RNA, 22 nt, Human
uccagugguacauggagacacu

SEQ ID NO: 485342 - RNA, 22 nt, Human
gaggaggcuggcgccgccugcc

SEQ ID NO: 485343 - RNA, 22 nt, Human
cagacagaaggcuccuugaggu

SEQ ID NO: 485344 - RNA, 22 nt, Human
gauuucaaccuaacaguaugac

SEQ ID NO: 485345 - RNA, 22 nt, Human
cucugagcagaggccguggcua

SEQ ID NO: 485346 - RNA, 22 nt, Human
uguauuuuuaggaaugcgcuau

SEQ ID NO: 485347 - RNA, 22 nt, Human
gccccagcucugccacaacuag

SEQ ID NO: 485348 - RNA, 22 nt, Human
ggcaggcaggucuucauggccc

SEQ ID NO: 485349 - RNA, 22 nt, Human
cugcagagcauaaaucugaaua

SEQ ID NO: 485350 - RNA, 22 nt, Human
uugcucuguaauaaucuggggu

SEQ ID NO: 485351 - RNA, 22 nt, Human
ucuauuuuauacucaaaucuuc

SEQ ID NO: 485352 - RNA, 22 nt, Human
aagacugugucuauggcuacuc

SEQ ID NO: 485353 - RNA, 22 nt, Human
cuccccagguucaggagguggg

SEQ ID NO: 485354 - RNA, 22 nt, Human
cagggagaggcaucauagggaa

SEQ ID NO: 485355 - RNA, 19 nt, Human
uuugaaagaguuuuauugg

SEQ ID NO: 485356 - RNA, 19 nt, Human
cugguccugacugaggggu

SEQ ID NO: 485357 - RNA, 22 nt, Human
gcgaaaaauguguaaauauguu

SEQ ID NO: 485358 - RNA, 22 nt, Human
gggcugacaccacccaggcgca

SEQ ID NO: 485359 - RNA, 22 nt, Human
ggugauuuucgaguuucauguu

SEQ ID NO: 485360 - RNA, 21 nt, Human
ccucugcucgggcaugcguuu

SEQ ID NO: 485361 - RNA, 22 nt, Human
cuaucuuucgauucuagcuuaa

SEQ ID NO: 485362 - RNA, 22 nt, Human
gguggccuuucaguggaucagg

SEQ ID NO: 485363 - RNA, 22 nt, Human
cugccuuggaaaaugugguaau

SEQ ID NO: 485364 - RNA, 22 nt, Human
agcaccuggucuccuggcgcug

SEQ ID NO: 485365 - RNA, 22 nt, Human
ugaaagcucugucaucauuccu

SEQ ID NO: 485366 - RNA, 22 nt, Human
cagagaaagggugaauuccuuc

SEQ ID NO: 485367 - RNA, 22 nt, Human
cccaggcagucuggcucuaaag

SEQ ID NO: 485368 - RNA, 20 nt, Human
acugcuucuuucucugaccu

SEQ ID NO: 485369 - RNA, 22 nt, Human
ucaggaugaccacgagccucua

SEQ ID NO: 485370 - RNA, 22 nt, Human
ggaugcugcuaucaggcuucga

SEQ ID NO: 485371 - RNA, 22 nt, Human
acagacagggcaccugccuccu

SEQ ID NO: 485372 - RNA, 20 nt, Human
aaagucuuaugguuaauuuu

SEQ ID NO: 485373 - RNA, 17 nt, Human
aggaagggcaaguuucu

SEQ ID NO: 485374 - RNA, 22 nt, Human
gcacccagccagcaucucagag

SEQ ID NO: 485375 - RNA, 22 nt, Human
ccugcagagccacgugccagcg

SEQ ID NO: 485376 - RNA, 22 nt, Human
ugcagaagcagagaguugccaa

SEQ ID NO: 485377 - RNA, 22 nt, Human
ucauuuucacacauaaauagca

SEQ ID NO: 485378 - RNA, 22 nt, Human
uuugacaguaauaaagcacaag

SEQ ID NO: 485379 - RNA, 22 nt, Human
cuggcugcuggccugaggaugc

SEQ ID NO: 485380 - RNA, 22 nt, Human
gaccauuugcuaguaaauugca

SEQ ID NO: 485381 - RNA, 22 nt, Human
gccuggugguauccuggcaaga

SEQ ID NO: 485382 - RNA, 22 nt, Human
uucgaguuggcuuuauuaaacu

SEQ ID NO: 485383 - RNA, 22 nt, Human
acagauuuaggacuguagcgau

SEQ ID NO: 485384 - RNA, 22 nt, Human
gcagcuggggaggucgugggga

SEQ ID NO: 485385 - RNA, 21 nt, Human
gccagccuguuuaccuguggu

SEQ ID NO: 485386 - RNA, 21 nt, Human
gugguucuagagaaacagaau

SEQ ID NO: 485387 - RNA, 19 nt, Human
agucccaggcccgaaagag

SEQ ID NO: 485388 - RNA, 22 nt, Human
ucugcucuccauacuuccgcac

SEQ ID NO: 485389 - RNA, 20 nt, Human
uugcauuggaugugcaggug

SEQ ID NO: 485390 - RNA, 22 nt, Human
ucaucacauaugucaugauuug

SEQ ID NO: 485391 - RNA, 22 nt, Human
agaccgagaaguucuccaggcc

SEQ ID NO: 485392 - RNA, 22 nt, Human
auacauuagcucauaugauuaa

SEQ ID NO: 485393 - RNA, 22 nt, Human
cggcagagcuuccugcucagcg

SEQ ID NO: 485394 - RNA, 22 nt, Human
ccagcuuucauaucaugaggua

SEQ ID NO: 485395 - RNA, 22 nt, Human
aguacauuuauuaaugguaaaa

SEQ ID NO: 485396 - RNA, 22 nt, Human
aguggacucuucccagugcuug

SEQ ID NO: 485397 - RNA, 22 nt, Human
ugcugccacugguagucucauu

SEQ ID NO: 485398 - RNA, 21 nt, Human
ucagcagcaucugccuagagu

SEQ ID NO: 485399 - RNA, 22 nt, Human
ccagcccugccagagagagcug

SEQ ID NO: 485400 - RNA, 22 nt, Human
uugaccuauguuucuucaucug

SEQ ID NO: 485401 - RNA, 22 nt, Human
agcugcccugggucuugcugcu

SEQ ID NO: 485402 - RNA, 22 nt, Human
uauucacauucucaggccuggu

SEQ ID NO: 485403 - RNA, 22 nt, Human
accuggccauccagcuggcauc

SEQ ID NO: 485404 - RNA, 22 nt, Human
gggacugggagauccuccuggc

SEQ ID NO: 485405 - RNA, 22 nt, Human
gagcacugagcuggaauuggag

SEQ ID NO: 485406 - RNA, 22 nt, Human
gcaggcagagaaggaacauuua

SEQ ID NO: 485407 - RNA, 22 nt, Human
cacagcugccauggcugcacuu

SEQ ID NO: 485408 - RNA, 17 nt, Human
gccuggcccagccuggc

SEQ ID NO: 485409 - RNA, 22 nt, Human
uguaggacauguacuuguaaca

SEQ ID NO: 485410 - RNA, 22 nt, Human
uacccagcaaucccuagagguu

SEQ ID NO: 485411 - RNA, 22 nt, Human
gaaugugucacccugucccaug

SEQ ID NO: 485412 - RNA, 23 nt, Human
ugcagagggacugaagccagcuu

SEQ ID NO: 485413 - RNA, 22 nt, Human
ccugagccugaguggugcaggg

SEQ ID NO: 485414 - RNA, 22 nt, Human
ucagggcaucucuuaaguggug

SEQ ID NO: 485415 - RNA, 22 nt, Human
auucccaucgucaacuucacug

SEQ ID NO: 485416 - RNA, 22 nt, Human
gaaccucagugaaacuggaggu

SEQ ID NO: 485417 - RNA, 22 nt, Human
ugcuuuauuaagagagaaauuu

SEQ ID NO: 485418 - RNA, 22 nt, Human
uauguacaccggggaagguggg

SEQ ID NO: 485419 - RNA, 22 nt, Human
aucacugucgucaucugagauu

SEQ ID NO: 485420 - RNA, 22 nt, Human
ucaucaguguccuuaucacuua

SEQ ID NO: 485421 - RNA, 22 nt, Human
auguccaguuucuacacacaua

SEQ ID NO: 485422 - RNA, 22 nt, Human
uguuauugagguuacuuauaag

SEQ ID NO: 485423 - RNA, 21 nt, Human
ccuauugaauauaggaagauu

SEQ ID NO: 485424 - RNA, 21 nt, Human
ggccugagcaccuguccaccu

SEQ ID NO: 485425 - RNA, 22 nt, Human
gcaugggcuuucucagaguucu

SEQ ID NO: 485426 - RNA, 22 nt, Human
agcagggcuuuggcuggcuuuc

SEQ ID NO: 485427 - RNA, 22 nt, Human
ccucagggaaugggaggcuggg

SEQ ID NO: 485428 - RNA, 22 nt, Human
ugaaggaaugaguauacuguuu

SEQ ID NO: 485429 - RNA, 22 nt, Human
aauuagggagccaucauaaggu

SEQ ID NO: 485430 - RNA, 21 nt, Human
guuauuuuaagugagcuuugc

SEQ ID NO: 485431 - RNA, 22 nt, Human
cacucugcgcugggcgccagcg

SEQ ID NO: 485432 - RNA, 22 nt, Human
uguuuuguuuaugagagcacag

SEQ ID NO: 485433 - RNA, 22 nt, Human
aaggaaccauuugugugcaugg

SEQ ID NO: 485434 - RNA, 20 nt, Human
caggaggcaaggucaagguc

SEQ ID NO: 485435 - RNA, 22 nt, Human
gcugugcaguaguagguacagu

SEQ ID NO: 485436 - RNA, 18 nt, Human
agagaugguguagaguuu

SEQ ID NO: 485437 - RNA, 22 nt, Human
gaggcugaauggccagaagcca

SEQ ID NO: 485438 - RNA, 22 nt, Human
uggggcagcuccaucuauucca

SEQ ID NO: 485439 - RNA, 22 nt, Human
uuuuagaaauacugauuuagug

SEQ ID NO: 485440 - RNA, 22 nt, Human
cauuuauucaugaucuguagcu

SEQ ID NO: 485441 - RNA, 22 nt, Human
gagugugucggucagcguggcg

SEQ ID NO: 485442 - RNA, 22 nt, Human
ucauacauaacuuguacaguga

SEQ ID NO: 485443 - RNA, 22 nt, Human
gaaaagggcaagagagagggca

SEQ ID NO: 485444 - RNA, 17 nt, Human
agcagaagucagaggga

SEQ ID NO: 485445 - RNA, 22 nt, Human
uuuaccaaauagauuaugucag

SEQ ID NO: 485446 - RNA, 22 nt, Human
gaaggccugugguagugagacg

SEQ ID NO: 485447 - RNA, 22 nt, Human
ugcauuauaacugaauguuguu

SEQ ID NO: 485448 - RNA, 21 nt, Human
gguugguguguccaguggcca

SEQ ID NO: 485449 - RNA, 22 nt, Human
cagaggcacaagaaagcaaggc

SEQ ID NO: 485450 - RNA, 22 nt, Human
uccugguggcuuucccugccuu

SEQ ID NO: 485451 - RNA, 22 nt, Human
ucucugaguucuccuccagccc

SEQ ID NO: 485452 - RNA, 22 nt, Human
aggcagggugaugauaaugauu

SEQ ID NO: 485453 - RNA, 22 nt, Human
aauuaugagguagauaucacau

SEQ ID NO: 485454 - RNA, 23 nt, Human
ccagggccccuacaccacugucc

SEQ ID NO: 485455 - RNA, 22 nt, Human
ugcaccugagaggucucugagg

SEQ ID NO: 485456 - RNA, 22 nt, Human
aaaaacugguaacuauucccca

SEQ ID NO: 485457 - RNA, 22 nt, Human
gggcugagacgauggggucuuc

SEQ ID NO: 485458 - RNA, 23 nt, Human
ucugucacuuucugcuguggagu

SEQ ID NO: 485459 - RNA, 22 nt, Human
auccacagucuuagccaucaaa

SEQ ID NO: 485460 - RNA, 22 nt, Human
gucaggauuuacaaacuucagu

SEQ ID NO: 485461 - RNA, 22 nt, Human
aaaugguaagacaacacauuau

SEQ ID NO: 485462 - RNA, 22 nt, Human
gccuggagugcaguggcgugau

SEQ ID NO: 485463 - RNA, 22 nt, Human
aauguacaucucaguguaguac

SEQ ID NO: 485464 - RNA, 22 nt, Human
gcaggaguuaggcgucguggau

SEQ ID NO: 485465 - RNA, 22 nt, Human
uuuccacugggcacggggccag

SEQ ID NO: 485466 - RNA, 22 nt, Human
gagagugauucccucccauaga

SEQ ID NO: 485467 - RNA, 22 nt, Human
cagcuuuaccuuuaggaguaac

SEQ ID NO: 485468 - RNA, 22 nt, Human
agaagccaacagggcaggagag

SEQ ID NO: 485469 - RNA, 18 nt, Human
ucauuuguuuugcaugaa

SEQ ID NO: 485470 - RNA, 22 nt, Human
acuggcaguggcagcagaaaga

SEQ ID NO: 485471 - RNA, 22 nt, Human
aggcacugaauauccaguaaaa

SEQ ID NO: 485472 - RNA, 22 nt, Human
caaagagcuguucagugucgcu

SEQ ID NO: 485473 - RNA, 22 nt, Human
uuuuccucugagcuuugaauaa

SEQ ID NO: 485474 - RNA, 22 nt, Human
ugccaggcagugucagauugag

SEQ ID NO: 485475 - RNA, 22 nt, Human
aaaauccugcugacucgagaug

SEQ ID NO: 485476 - RNA, 22 nt, Human
uguggugagaaacugguagauu

SEQ ID NO: 485477 - RNA, 22 nt, Human
aguccagugucaaggugccauu

SEQ ID NO: 485478 - RNA, 22 nt, Human
aagggcugaaagaccuugggca

SEQ ID NO: 485479 - RNA, 22 nt, Human
aagaauuauugcaauacuagau

SEQ ID NO: 485480 - RNA, 22 nt, Human
gagcagugacuggagcaugaga

SEQ ID NO: 485481 - RNA, 22 nt, Human
ugagccugaguucaaggcugca

SEQ ID NO: 485482 - RNA, 22 nt, Human
acagagcaugcucaguguguga

SEQ ID NO: 485483 - RNA, 22 nt, Human
ccaggguggcguagaugcuggg

SEQ ID NO: 485484 - RNA, 22 nt, Human
cucucugggggccaugccaaga

SEQ ID NO: 485485 - RNA, 22 nt, Human
aucagugcuaaagcaaaugccc

SEQ ID NO: 485486 - RNA, 22 nt, Human
gugcccugguccccagcauaua

SEQ ID NO: 485487 - RNA, 22 nt, Human
uuugcauuacuugacuuuaguu

SEQ ID NO: 485488 - RNA, 22 nt, Human
uggccaggcagguagaacggcc

SEQ ID NO: 485489 - RNA, 22 nt, Human
agccucugacugucagcaaggu

SEQ ID NO: 485490 - RNA, 18 nt, Human
cugucuuuuuucucucca

SEQ ID NO: 485491 - RNA, 22 nt, Human
gggggaagaaagaacauggcau

SEQ ID NO: 485492 - RNA, 22 nt, Human
cagcugagaagugauagcugca

SEQ ID NO: 485493 - RNA, 22 nt, Human
gucacacucagaaugacuagag

SEQ ID NO: 485494 - RNA, 22 nt, Human
cugggcacaaguggcccuggau

SEQ ID NO: 485495 - RNA, 22 nt, Human
uccaggcagagcaacaaaauau

SEQ ID NO: 485496 - RNA, 22 nt, Human
agccauugaauuuagugccuuu

SEQ ID NO: 485497 - RNA, 22 nt, Human
ugcagggcaguggagguugagu

SEQ ID NO: 485498 - RNA, 19 nt, Human
ggcuggcaagugacagugu

SEQ ID NO: 485499 - RNA, 22 nt, Human
gagcagaacuacucacauaucg

SEQ ID NO: 485500 - RNA, 21 nt, Human
uucaaaguuugccuaaagauu

SEQ ID NO: 485501 - RNA, 22 nt, Human
uauugaaaugaaugacagugau

SEQ ID NO: 485502 - RNA, 22 nt, Human
gccaggcugaggcucuggaaga

SEQ ID NO: 485503 - RNA, 22 nt, Human
agccugcaggaugggcagcacc

SEQ ID NO: 485504 - RNA, 22 nt, Human
guucuccauucagcuuccugug

SEQ ID NO: 485505 - RNA, 22 nt, Human
uguucuuucaguuagacacagu

SEQ ID NO: 485506 - RNA, 21 nt, Human
ugcauaaagaaauacaaauac

SEQ ID NO: 485507 - RNA, 22 nt, Human
gagcaggcauucuaguggcuga

SEQ ID NO: 485508 - RNA, 22 nt, Human
uauuucuguaacucagggucug

SEQ ID NO: 485509 - RNA, 22 nt, Human
gcuggugccuuguuguuguuac

SEQ ID NO: 485510 - RNA, 22 nt, Human
cugcccuggcagccuaccaugg

SEQ ID NO: 485511 - RNA, 22 nt, Human
aggcuucuaggguuggcagcgg

SEQ ID NO: 485512 - RNA, 22 nt, Human
augcaguaaauguucuaguuug

SEQ ID NO: 485513 - RNA, 22 nt, Human
agggcagagggugccucaccug

SEQ ID NO: 485514 - RNA, 22 nt, Human
aaguccagcucuaaauaucuga

SEQ ID NO: 485515 - RNA, 22 nt, Human
ugugaggagaggcccagcuccc

SEQ ID NO: 485516 - RNA, 19 nt, Human
gagcugccuuuugaagacc

SEQ ID NO: 485517 - RNA, 22 nt, Human
gcccagaaguugaggcugcagu

SEQ ID NO: 485518 - RNA, 22 nt, Human
ccaguguucauaauuuuacacu

SEQ ID NO: 485519 - RNA, 20 nt, Human
uccuggccucccuggggcuc

SEQ ID NO: 485520 - RNA, 22 nt, Human
uguguuuugaacucaucuacug

SEQ ID NO: 485521 - RNA, 22 nt, Human
aagauuuccuggauguaauucc

SEQ ID NO: 485522 - RNA, 22 nt, Human
gagaaagauggaaucuuacagg

SEQ ID NO: 485523 - RNA, 22 nt, Human
ugucucaguauacgaaacacuu

SEQ ID NO: 485524 - RNA, 22 nt, Human
uuauguauggauggcugaaagu

SEQ ID NO: 485525 - RNA, 22 nt, Human
ugaauccagagcuauuucgucc

SEQ ID NO: 485526 - RNA, 23 nt, Human
acuuuagauaaauuaugugcaca

SEQ ID NO: 485527 - RNA, 22 nt, Human
guuucuuuugugaucaccaacc

SEQ ID NO: 485528 - RNA, 22 nt, Human
agggguggagaguguugccagu

SEQ ID NO: 485529 - RNA, 22 nt, Human
ucagggcagguuaacuugggug

SEQ ID NO: 485530 - RNA, 22 nt, Human
agcucugggccaggaacccuaa

SEQ ID NO: 485531 - RNA, 23 nt, Human
ucaugcccaggcuccagauguca

SEQ ID NO: 485532 - RNA, 22 nt, Human
ugaggcaggagaauggcgggaa

SEQ ID NO: 485533 - RNA, 22 nt, Human
gggcaggaugcaguuucagaga

SEQ ID NO: 485534 - RNA, 22 nt, Human
cugccaucugagccaaaagugc

SEQ ID NO: 485535 - RNA, 21 nt, Human
ccagcagcucaaggaucucuu

SEQ ID NO: 485536 - RNA, 22 nt, Human
gcuggagcugaguucccugggc

SEQ ID NO: 485537 - RNA, 22 nt, Human
gcugccacuuggucaugucaug

SEQ ID NO: 485538 - RNA, 22 nt, Human
ccuuccuggagcccaugcagau

SEQ ID NO: 485539 - RNA, 22 nt, Human
ccacagccauuccagggaggcu

SEQ ID NO: 485540 - RNA, 22 nt, Human
uauagagguggaaacugagguu

SEQ ID NO: 485541 - RNA, 22 nt, Human
ucccagagucuucuccuguaau

SEQ ID NO: 485542 - RNA, 22 nt, Human
uuuuccuuucaucaggacaaag

SEQ ID NO: 485543 - RNA, 23 nt, Human
gcugggcuuacucuuucagugag

SEQ ID NO: 485544 - RNA, 22 nt, Human
ugacaccacaacuagccauuga

SEQ ID NO: 485545 - RNA, 22 nt, Human
gccagggaaacugcagaccagc

SEQ ID NO: 485546 - RNA, 22 nt, Human
agcagaggacaguucuuaggaa

SEQ ID NO: 485547 - RNA, 22 nt, Human
uaaguucaaugaacucaguucu

SEQ ID NO: 485548 - RNA, 22 nt, Human
ccagcccugccucucagggccc

SEQ ID NO: 485549 - RNA, 22 nt, Human
uaaauguggagacucaggaguc

SEQ ID NO: 485550 - RNA, 22 nt, Human
cuucuaggcuucucagggggca

SEQ ID NO: 485551 - RNA, 20 nt, Human
uuucauugucagaaucuuau

SEQ ID NO: 485552 - RNA, 23 nt, Human
ucagagagcuguugagagcugcc

SEQ ID NO: 485553 - RNA, 20 nt, Human
ugugaaagcaguagaaugac

SEQ ID NO: 485554 - RNA, 22 nt, Human
agcuuuauuaacucuccaggug

SEQ ID NO: 485555 - RNA, 22 nt, Human
uggcucugugcuucuaguaucu

SEQ ID NO: 485556 - RNA, 22 nt, Human
uuauuauagauuaugcaagauu

SEQ ID NO: 485557 - RNA, 22 nt, Human
aggucauugaaguuauuuucuu

SEQ ID NO: 485558 - RNA, 22 nt, Human
agacaacaccaaaugcuagugu

SEQ ID NO: 485559 - RNA, 22 nt, Human
ucacauaaauuauacaauuuca

SEQ ID NO: 485560 - RNA, 22 nt, Human
acccugggcuuggccugcucag

SEQ ID NO: 485561 - RNA, 23 nt, Human
agggccacugggaaggauuacug

SEQ ID NO: 485562 - RNA, 21 nt, Human
gugucaugguugacuuuggca

SEQ ID NO: 485563 - RNA, 22 nt, Human
ccacagaaaguugucuagagua

SEQ ID NO: 485564 - RNA, 22 nt, Human
gaaggagaggauugugaggcug

SEQ ID NO: 485565 - RNA, 18 nt, Human
uuaagagcugaaagggga

SEQ ID NO: 485566 - RNA, 22 nt, Human
ugccuggcaagaggggcuggcu

SEQ ID NO: 485567 - RNA, 22 nt, Human
ucagagagcuggugggcagagg

SEQ ID NO: 485568 - RNA, 22 nt, Human
uuucccaagaaaaauaauugga

SEQ ID NO: 485569 - RNA, 22 nt, Human
guggccuggaugagcuucgaca

SEQ ID NO: 485570 - RNA, 22 nt, Human
ggcugcagaaguacuuccggau

SEQ ID NO: 485571 - RNA, 22 nt, Human
cuagggacugggaccuuaguua

SEQ ID NO: 485572 - RNA, 22 nt, Human
cuggccuggagccucugggugg

SEQ ID NO: 485573 - RNA, 22 nt, Human
acuguccauaauauuggugaac

SEQ ID NO: 485574 - RNA, 22 nt, Human
ucacaguaaaagcauggaagag

SEQ ID NO: 485575 - RNA, 22 nt, Human
acuguacacauucgucaagacu

SEQ ID NO: 485576 - RNA, 22 nt, Human
agggaguuagaaauccaggaua

SEQ ID NO: 485577 - RNA, 22 nt, Human
aguaacuaugcuugagaaucag

SEQ ID NO: 485578 - RNA, 18 nt, Human
gagcagaggcucaacugg

SEQ ID NO: 485579 - RNA, 21 nt, Human
guggcccugccgcagugucca

SEQ ID NO: 485580 - RNA, 22 nt, Human
ucuccuggucaccucagaaguc

SEQ ID NO: 485581 - RNA, 22 nt, Human
cucucugaggcaggccuguggg

SEQ ID NO: 485582 - RNA, 22 nt, Human
acuguguccucauguggcagaa

SEQ ID NO: 485583 - RNA, 22 nt, Human
gagagugaaggcuucccagcaa

SEQ ID NO: 485584 - RNA, 22 nt, Human
acagauuuguucuuuugggcua

SEQ ID NO: 485585 - RNA, 17 nt, Human
ucagcaggggccaagcu

SEQ ID NO: 485586 - RNA, 22 nt, Human
uuaacagacauauauauuugua

SEQ ID NO: 485587 - RNA, 22 nt, Human
uaggcagauguuaacaggaaaa

SEQ ID NO: 485588 - RNA, 22 nt, Human
gggcucucgauuagacccuggg

SEQ ID NO: 485589 - RNA, 22 nt, Human
aggcugggaaaccugaaguugu

SEQ ID NO: 485590 - RNA, 21 nt, Human
aaagagguuaauauuguaagu

SEQ ID NO: 485591 - RNA, 22 nt, Human
cagagcuggagcuugaauggag

SEQ ID NO: 485592 - RNA, 22 nt, Human
aagggcagagggaaucccacau

SEQ ID NO: 485593 - RNA, 22 nt, Human
ucugcugcacaaauucaucucu

SEQ ID NO: 485594 - RNA, 22 nt, Human
ugauuuccaugaagcugaaggc

SEQ ID NO: 485595 - RNA, 20 nt, Human
gucaggauuaguaaacucug

SEQ ID NO: 485596 - RNA, 22 nt, Human
ggaccugcauuuuaacaagauc

SEQ ID NO: 485597 - RNA, 22 nt, Human
auuuguagugaagugaaaauaa

SEQ ID NO: 485598 - RNA, 23 nt, Human
gacacaggagcacccagcugagc

SEQ ID NO: 485599 - RNA, 22 nt, Human
gaggcugcccaacuggagugga

SEQ ID NO: 485600 - RNA, 22 nt, Human
gagggggagaugugcacacacu

SEQ ID NO: 485601 - RNA, 22 nt, Human
uuuaugaacuacagauauaacu

SEQ ID NO: 485602 - RNA, 20 nt, Human
acagcagauaccacaacuau

SEQ ID NO: 485603 - RNA, 22 nt, Human
agcucccagaguccucugccca

SEQ ID NO: 485604 - RNA, 22 nt, Human
gggcugugagaguggggcugcu

SEQ ID NO: 485605 - RNA, 18 nt, Human
ucugggcuucccgaggcu

SEQ ID NO: 485606 - RNA, 22 nt, Human
uucaagauccagcacaacagug

SEQ ID NO: 485607 - RNA, 22 nt, Human
cugcugcauuacucuucucaag

SEQ ID NO: 485608 - RNA, 22 nt, Human
ugagccuggggccugggcagcg

SEQ ID NO: 485609 - RNA, 19 nt, Human
ucccagagucuagagguug

SEQ ID NO: 485610 - RNA, 22 nt, Human
uagccucucuccuccacaaccu

SEQ ID NO: 485611 - RNA, 22 nt, Human
cagagcccagggccuacguccc

SEQ ID NO: 485612 - RNA, 22 nt, Human
cauaauuucuguaucagcacca

SEQ ID NO: 485613 - RNA, 22 nt, Human
aagggccuccuggggagccugg

SEQ ID NO: 485614 - RNA, 22 nt, Human
accagagaaaacacagcaggcu

SEQ ID NO: 485615 - RNA, 22 nt, Human
acacagccgugaaucugcuucu

SEQ ID NO: 485616 - RNA, 20 nt, Human
ccagacagcaccugccuggu

SEQ ID NO: 485617 - RNA, 22 nt, Human
uggcagcaguggagguagaaag

SEQ ID NO: 485618 - RNA, 22 nt, Human
agccaggaaccagcuacagucu

SEQ ID NO: 485619 - RNA, 22 nt, Human
agggagaacaguugcagcagac

SEQ ID NO: 485620 - RNA, 19 nt, Human
aacuagaaagguuuugaga

SEQ ID NO: 485621 - RNA, 22 nt, Human
guuugcauuuauuagucuucug

SEQ ID NO: 485622 - RNA, 22 nt, Human
uggcucuggugcgggcuccugc

SEQ ID NO: 485623 - RNA, 18 nt, Human
ugagaggcuauuuuuugc

SEQ ID NO: 485624 - RNA, 22 nt, Human
agcagugaaacagcugcauaug

SEQ ID NO: 485625 - RNA, 22 nt, Human
ggccuugggauguggcugcagc

SEQ ID NO: 485626 - RNA, 22 nt, Human
auaacagaguugggaagugaaa

SEQ ID NO: 485627 - RNA, 22 nt, Human
gcuggcuguaucaccuggccag

SEQ ID NO: 485628 - RNA, 22 nt, Human
cagcauuuucuuaauguaggug

SEQ ID NO: 485629 - RNA, 22 nt, Human
ucuguagcaagugagaggcauu

SEQ ID NO: 485630 - RNA, 17 nt, Human
aggccucccuccaggcc

SEQ ID NO: 485631 - RNA, 22 nt, Human
auauguguacgugcaguauaua

SEQ ID NO: 485632 - RNA, 19 nt, Human
acauuuaaauucagaucuc

SEQ ID NO: 485633 - RNA, 22 nt, Human
ccuggcugucguuuugugaaau

SEQ ID NO: 485634 - RNA, 22 nt, Human
uguaugcuuguguauaauauaa

SEQ ID NO: 485635 - RNA, 19 nt, Human
ggcugggucuggcagguuc

SEQ ID NO: 485636 - RNA, 22 nt, Human
uuuuccuucugauacuccauuu

SEQ ID NO: 485637 - RNA, 22 nt, Human
agcacaggaccaaggaagcugu

SEQ ID NO: 485638 - RNA, 22 nt, Human
gcagagcugggucuguauccaa

SEQ ID NO: 485639 - RNA, 22 nt, Human
aaguucaagucugcaucuuuuu

SEQ ID NO: 485640 - RNA, 22 nt, Human
cagcuccuauuagacacugaau

SEQ ID NO: 485641 - RNA, 23 nt, Human
ucagagaggcccccugcagagau

SEQ ID NO: 485642 - RNA, 22 nt, Human
gcccaucaucacuguggaggcu

SEQ ID NO: 485643 - RNA, 22 nt, Human
augggguggaguccgggcagcg

SEQ ID NO: 485644 - RNA, 22 nt, Human
uguggccuccccacuucugggg

SEQ ID NO: 485645 - RNA, 22 nt, Human
ucagaggucccuagcaggagug

SEQ ID NO: 485646 - RNA, 22 nt, Human
uucuaugccauguucagcuacu

SEQ ID NO: 485647 - RNA, 22 nt, Human
cacauaaguggguuccauugca

SEQ ID NO: 485648 - RNA, 19 nt, Human
uaaaaugucuguggucagu

SEQ ID NO: 485649 - RNA, 22 nt, Human
uggguggcacuucuggggucca

SEQ ID NO: 485650 - RNA, 22 nt, Human
uaguggaggggaugcaaagcuu

SEQ ID NO: 485651 - RNA, 22 nt, Human
aggucauuacaauuaucauuuu

SEQ ID NO: 485652 - RNA, 22 nt, Human
ggucucagaucuuuauuaaggc

SEQ ID NO: 485653 - RNA, 22 nt, Human
ucauuuguacuugugugcuugu

SEQ ID NO: 485654 - RNA, 22 nt, Human
ucugcucagugcuuaucucuaa

SEQ ID NO: 485655 - RNA, 22 nt, Human
agaauucuccuucagggcagga

SEQ ID NO: 485656 - RNA, 19 nt, Human
ucucccagcugagaagggc

SEQ ID NO: 485657 - RNA, 22 nt, Human
cagcaggcccagaguuucaugg

SEQ ID NO: 485658 - RNA, 22 nt, Human
cugggagcugucaggagcgugu

SEQ ID NO: 485659 - RNA, 22 nt, Human
cccuggagggauuucucaauca

SEQ ID NO: 485660 - RNA, 23 nt, Human
agacagaggcugaggcuggccgc

SEQ ID NO: 485661 - RNA, 22 nt, Human
cucucugagugagggacaagcu

SEQ ID NO: 485662 - RNA, 22 nt, Human
uuuuaucaaucauuaagacauu

SEQ ID NO: 485663 - RNA, 22 nt, Human
gcagcccaauggacugagacag

SEQ ID NO: 485664 - RNA, 22 nt, Human
ugccuuccuggagcugaaggcu

SEQ ID NO: 485665 - RNA, 22 nt, Human
gucccuaguggaaagacaugau

SEQ ID NO: 485666 - RNA, 20 nt, Human
gugcaauggcucagucucag

SEQ ID NO: 485667 - RNA, 22 nt, Human
uggcaguguauagguggcuccu

SEQ ID NO: 485668 - RNA, 22 nt, Human
gagagggcucuguguggguacu

SEQ ID NO: 485669 - RNA, 17 nt, Human
cauuuguugaucaguug

SEQ ID NO: 485670 - RNA, 22 nt, Human
ugggacacccucacgccugcac

SEQ ID NO: 485671 - RNA, 22 nt, Human
aggcacugacagauucuguguc

SEQ ID NO: 485672 - RNA, 22 nt, Human
acauuuaaugauccuacuguga

SEQ ID NO: 485673 - RNA, 22 nt, Human
caauuucuaacauuccauggau

SEQ ID NO: 485674 - RNA, 22 nt, Human
agacucugauucccucauguca

SEQ ID NO: 485675 - RNA, 22 nt, Human
agcagccaaaugaagauuuuac

SEQ ID NO: 485676 - RNA, 19 nt, Human
ucugaaguccagggcauac

SEQ ID NO: 485677 - RNA, 20 nt, Human
ggucccugcccucugucauc

SEQ ID NO: 485678 - RNA, 22 nt, Human
acuacuuugggccauuuguuua

SEQ ID NO: 485679 - RNA, 22 nt, Human
aaagguuugcauggaauuuacc

SEQ ID NO: 485680 - RNA, 22 nt, Human
caggauagaaaggccauggagu

SEQ ID NO: 485681 - RNA, 22 nt, Human
uguuuauucauggcuaaugaaa

SEQ ID NO: 485682 - RNA, 22 nt, Human
cagaagaguagcugaacaaguu

SEQ ID NO: 485683 - RNA, 22 nt, Human
agcagcuggugagcaagcucag

SEQ ID NO: 485684 - RNA, 22 nt, Human
auuguaauuuuagagaaagugg

SEQ ID NO: 485685 - RNA, 22 nt, Human
augaguaaaaccacuauuuaca

SEQ ID NO: 485686 - RNA, 22 nt, Human
ugagagugaaaugucacauguc

SEQ ID NO: 485687 - RNA, 22 nt, Human
uccagcaguccaugugagacac

SEQ ID NO: 485688 - RNA, 22 nt, Human
ggagccuugggcgcucucccau

SEQ ID NO: 485689 - RNA, 22 nt, Human
aaacucuguagcuaaacauaau

SEQ ID NO: 485690 - RNA, 22 nt, Human
cugucaggggcggguggagcgg

SEQ ID NO: 485691 - RNA, 22 nt, Human
cacccagccuucacacaggagu

SEQ ID NO: 485692 - RNA, 22 nt, Human
uauuuugacuauuaaaccaaca

SEQ ID NO: 485693 - RNA, 22 nt, Human
cugggcacuugcucacagcucu

SEQ ID NO: 485694 - RNA, 22 nt, Human
uuauccaacaugacuuaugucc

SEQ ID NO: 485695 - RNA, 22 nt, Human
agauaacuuuuggguauucaug

SEQ ID NO: 485696 - RNA, 22 nt, Human
cacucugcagcugaagggcugg

SEQ ID NO: 485697 - RNA, 22 nt, Human
auguccagggcacacagcagug

SEQ ID NO: 485698 - RNA, 17 nt, Human
uucaagauauugaaaug

SEQ ID NO: 485699 - RNA, 22 nt, Human
ucaguggaacugucugggugag

SEQ ID NO: 485700 - RNA, 22 nt, Human
uggggcuguccuuagucugaga

SEQ ID NO: 485701 - RNA, 22 nt, Human
ccucugggugggaggccgggcg

SEQ ID NO: 485702 - RNA, 20 nt, Human
uuggucagugguucaguuug

SEQ ID NO: 485703 - RNA, 22 nt, Human
ccagccaguccagcauuggugu

SEQ ID NO: 485704 - RNA, 22 nt, Human
uucauuacugcgguagucacac

SEQ ID NO: 485705 - RNA, 19 nt, Human
aagcagcccuggcaagagc

SEQ ID NO: 485706 - RNA, 22 nt, Human
cucuggaauuaaggaagccugu

SEQ ID NO: 485707 - RNA, 22 nt, Human
ggcugucugugguggagcguug

SEQ ID NO: 485708 - RNA, 22 nt, Human
uggguaggccaggaagcagugu

SEQ ID NO: 485709 - RNA, 22 nt, Human
gcugugcagccaagugccucug

SEQ ID NO: 485710 - RNA, 22 nt, Human
gccugucucuuggaacuuggua

SEQ ID NO: 485711 - RNA, 22 nt, Human
caggcagcugcuggguucagcc

SEQ ID NO: 485712 - RNA, 22 nt, Human
cuggagcugucuucacaggccu

SEQ ID NO: 485713 - RNA, 22 nt, Human
cuccagggggcauccacacagc

SEQ ID NO: 485714 - RNA, 22 nt, Human
cugccucuauucacugaggcag

SEQ ID NO: 485715 - RNA, 22 nt, Human
ucccagaggucucugcugguuc

SEQ ID NO: 485716 - RNA, 22 nt, Human
uccaggcaaagugcugggcugc

SEQ ID NO: 485717 - RNA, 22 nt, Human
cugggagucuggccucuggucc

SEQ ID NO: 485718 - RNA, 22 nt, Human
ggcagaggaaggaugaauucac

SEQ ID NO: 485719 - RNA, 22 nt, Human
aaauggaucuguggaauacauu

SEQ ID NO: 485720 - RNA, 22 nt, Human
uggccuuguguuuuagagaaag

SEQ ID NO: 485721 - RNA, 22 nt, Human
gcugagcuagcuaucucagucu

SEQ ID NO: 485722 - RNA, 22 nt, Human
cuggacagaaaccaguccuggg

SEQ ID NO: 485723 - RNA, 22 nt, Human
ugggccugccccaggcuucagc

SEQ ID NO: 485724 - RNA, 22 nt, Human
agggacccugaugacugaggag

SEQ ID NO: 485725 - RNA, 22 nt, Human
agccccaggcccggacgccucu

SEQ ID NO: 485726 - RNA, 22 nt, Human
augguguagcaugugauaugac

SEQ ID NO: 485727 - RNA, 22 nt, Human
aucaggaucacagaaacuuuua

SEQ ID NO: 485728 - RNA, 22 nt, Human
caggccagugugcuucccaggc

SEQ ID NO: 485729 - RNA, 22 nt, Human
uccagggcuuggcugggacggu

SEQ ID NO: 485730 - RNA, 22 nt, Human
cugaggugcuauggaggauacg

SEQ ID NO: 485731 - RNA, 22 nt, Human
cagccugcucucagauguugag

SEQ ID NO: 485732 - RNA, 22 nt, Human
augaggcaaucaugguccaguu

SEQ ID NO: 485733 - RNA, 21 nt, Human
aggagggcacaaggccaggaa

SEQ ID NO: 485734 - RNA, 22 nt, Human
agagcuuauaucuuggccaucc

SEQ ID NO: 485735 - RNA, 22 nt, Human
agcucuggaauaaugaugugau

SEQ ID NO: 485736 - RNA, 22 nt, Human
gccaaaucuugcacacucuugu

SEQ ID NO: 485737 - RNA, 22 nt, Human
ccuggaugauccaugucaugga

SEQ ID NO: 485738 - RNA, 22 nt, Human
ggagggcaucaaucaggccugg

SEQ ID NO: 485739 - RNA, 21 nt, Human
agggucaggaaccaggguacc

SEQ ID NO: 485740 - RNA, 22 nt, Human
gucccacugggcaacuagaaaa

SEQ ID NO: 485741 - RNA, 22 nt, Human
agaaaguucugugaguuguuca

SEQ ID NO: 485742 - RNA, 22 nt, Human
ucacuguauuugcugaugcaua

SEQ ID NO: 485743 - RNA, 22 nt, Human
aaaucaguucacguucugaggu

SEQ ID NO: 485744 - RNA, 19 nt, Human
ggagaggcuggagggaugc

SEQ ID NO: 485745 - RNA, 22 nt, Human
aagagcaucuauuucacagugg

SEQ ID NO: 485746 - RNA, 22 nt, Human
uggggaagggcacccuggagac

SEQ ID NO: 485747 - RNA, 22 nt, Human
gugggaugcaguggugaguggc

SEQ ID NO: 485748 - RNA, 22 nt, Human
agcagcugagaugguaagauuc

SEQ ID NO: 485749 - RNA, 22 nt, Human
uccagaccauggauggcugcaa

SEQ ID NO: 485750 - RNA, 22 nt, Human
uauuuuguuaauaauccagucc

SEQ ID NO: 485751 - RNA, 22 nt, Human
cccagcucucgcacuuacuagc

SEQ ID NO: 485752 - RNA, 19 nt, Human
agggaaggauucugucauu

SEQ ID NO: 485753 - RNA, 22 nt, Human
guacaugucaaaaaaugcauaa

SEQ ID NO: 485754 - RNA, 22 nt, Human
ucucagggcagcaaggaagcau

SEQ ID NO: 485755 - RNA, 21 nt, Human
uuucaauguguucuuuguagu

SEQ ID NO: 485756 - RNA, 22 nt, Human
aggcugaggaucguacuuucca

SEQ ID NO: 485757 - RNA, 22 nt, Human
uggagaaggccggccaggagug

SEQ ID NO: 485758 - RNA, 22 nt, Human
uaauuauaacaguuacaucuua

SEQ ID NO: 485759 - RNA, 19 nt, Human
gcauuucucuuuacagcca

SEQ ID NO: 485760 - RNA, 22 nt, Human
gaagcccagcaaacugugauca

SEQ ID NO: 485761 - RNA, 22 nt, Human
ccagagcuaaacacacaggcug

SEQ ID NO: 485762 - RNA, 22 nt, Human
uccuggccuugcuccugaugcc

SEQ ID NO: 485763 - RNA, 22 nt, Human
uuuucaagggcagggaaaucau

SEQ ID NO: 485764 - RNA, 22 nt, Human
ggggacccucaggacugcgucu

SEQ ID NO: 485765 - RNA, 21 nt, Human
uggcucaguugcugggcacag

SEQ ID NO: 485766 - RNA, 22 nt, Human
ucaguguccggagccugagugc

SEQ ID NO: 485767 - RNA, 22 nt, Human
agagcagugcugaagaguaggg

SEQ ID NO: 485768 - RNA, 22 nt, Human
uuuaaauuuagaagaaacacug

SEQ ID NO: 485769 - RNA, 22 nt, Human
caucaguguggcaguucacugu

SEQ ID NO: 485770 - RNA, 20 nt, Human
gauuacaaaaugaaaugcau

SEQ ID NO: 485771 - RNA, 22 nt, Human
agucccagcuacucaagaggcu

SEQ ID NO: 485772 - RNA, 22 nt, Human
uauuucuauuccccaggcaagu

SEQ ID NO: 485773 - RNA, 19 nt, Human
ugcaagugucuuggacaag

SEQ ID NO: 485774 - RNA, 22 nt, Human
agcuggccuucggugucacugg

SEQ ID NO: 485775 - RNA, 22 nt, Human
ccagaggaugcuggucagccuc

SEQ ID NO: 485776 - RNA, 22 nt, Human
auguucaaacuuuuuacacacc

SEQ ID NO: 485777 - RNA, 22 nt, Human
ucacauuuucuacuacuguacg

SEQ ID NO: 485778 - RNA, 22 nt, Human
uagggcuauucugaguaauaau

SEQ ID NO: 485779 - RNA, 22 nt, Human
ucuuugcagaauuuaacuuugc

SEQ ID NO: 485780 - RNA, 22 nt, Human
caggcugcagcagcaguggccc

SEQ ID NO: 485781 - RNA, 22 nt, Human
cagggugccuguccucagcaaa

SEQ ID NO: 485782 - RNA, 22 nt, Human
ugccaggaggaggugggacaga

SEQ ID NO: 485783 - RNA, 22 nt, Human
acacaguaccccaaggcugggc

SEQ ID NO: 485784 - RNA, 22 nt, Human
ccaucagcaugggagcaugggc

SEQ ID NO: 485785 - RNA, 22 nt, Human
uccaggaggaggaaggcugcca

SEQ ID NO: 485786 - RNA, 21 nt, Human
ccaaaggcuauguaucuucug

SEQ ID NO: 485787 - RNA, 22 nt, Human
caggccucuccuuagucuggca

SEQ ID NO: 485788 - RNA, 22 nt, Human
gugccuggagcuaauguguaua

SEQ ID NO: 485789 - RNA, 22 nt, Human
gggugggguguaucggauccua

SEQ ID NO: 485790 - RNA, 22 nt, Human
agcagcucuguuuaccuggagg

SEQ ID NO: 485791 - RNA, 22 nt, Human
aguucaggcauaaggcaugaac

SEQ ID NO: 485792 - RNA, 22 nt, Human
caguucagcuagaagaaacaaa

SEQ ID NO: 485793 - RNA, 22 nt, Human
gcagagccagaauggccaggac

SEQ ID NO: 485794 - RNA, 22 nt, Human
gccuguuggugacuuucuguug

SEQ ID NO: 485795 - RNA, 22 nt, Human
ugaaacaaauuuggaaaaucua

SEQ ID NO: 485796 - RNA, 22 nt, Human
ccugagguggcugcagcacugc

SEQ ID NO: 485797 - RNA, 22 nt, Human
gguacaaggagugaagguuugg

SEQ ID NO: 485798 - RNA, 22 nt, Human
cagaggccuauccaguguccau

SEQ ID NO: 485799 - RNA, 22 nt, Human
cauucauuuacuuucaacagcu

SEQ ID NO: 485800 - RNA, 22 nt, Human
cuccucugucuggcccugagcc

SEQ ID NO: 485801 - RNA, 22 nt, Human
aaucaggaugacugucauuuca

SEQ ID NO: 485802 - RNA, 22 nt, Human
agccucaguuucaggccuccuc

SEQ ID NO: 485803 - RNA, 22 nt, Human
cuggcuggccggagcgaggcgg

SEQ ID NO: 485804 - RNA, 21 nt, Human
aaugugugcuauuuaucuuuu

SEQ ID NO: 485805 - RNA, 22 nt, Human
cauguuuuguguacagaauauu

SEQ ID NO: 485806 - RNA, 22 nt, Human
ugucuuuagccagcagucuucu

SEQ ID NO: 485807 - RNA, 22 nt, Human
aguaaugucccuuaaauguggu

SEQ ID NO: 485808 - RNA, 22 nt, Human
gcugccugccuaguuccacagu

SEQ ID NO: 485809 - RNA, 22 nt, Human
agagccugggaauuugcauguu

SEQ ID NO: 485810 - RNA, 19 nt, Human
ucccuggcgccucucgggc

SEQ ID NO: 485811 - RNA, 22 nt, Human
agagccuggacuuuucugagcc

SEQ ID NO: 485812 - RNA, 22 nt, Human
cucccuggaggcccagaccugg

SEQ ID NO: 485813 - RNA, 22 nt, Human
auaaaauuugcuacuguuaaau

SEQ ID NO: 485814 - RNA, 22 nt, Human
aacaguaacgagauguccuaac

SEQ ID NO: 485815 - RNA, 22 nt, Human
agggucugacuccucuggcaag

SEQ ID NO: 485816 - RNA, 22 nt, Human
guagcuuauuagggauaauagu

SEQ ID NO: 485817 - RNA, 22 nt, Human
agcuaagacuuagugacuuagu

SEQ ID NO: 485818 - RNA, 20 nt, Human
aguguuccggaagacuggca

SEQ ID NO: 485819 - RNA, 22 nt, Human
uuagaaaggagcuuauuucuuu

SEQ ID NO: 485820 - RNA, 22 nt, Human
cccagguggcagaagcugcagu

SEQ ID NO: 485821 - RNA, 22 nt, Human
gcagugguccaguucacaccca

SEQ ID NO: 485822 - RNA, 23 nt, Human
ccagccucugggucuucauccag

SEQ ID NO: 485823 - RNA, 22 nt, Human
auucacaauuagaaguagauaa

SEQ ID NO: 485824 - RNA, 22 nt, Human
uguggaaaauuggaacguuccu

SEQ ID NO: 485825 - RNA, 22 nt, Human
guauucuugguuaucaaaauac

SEQ ID NO: 485826 - RNA, 22 nt, Human
agccagccgggggaccacagug

SEQ ID NO: 485827 - RNA, 22 nt, Human
cuuagaaaugcagauucucagg

SEQ ID NO: 485828 - RNA, 21 nt, Human
cagaggcugagagggcaaucu

SEQ ID NO: 485829 - RNA, 22 nt, Human
ucauggcacuuagcacaguccu

SEQ ID NO: 485830 - RNA, 22 nt, Human
cucccuggcacagcgagagguu

SEQ ID NO: 485831 - RNA, 22 nt, Human
ggggcagagcauagcuccaauu

SEQ ID NO: 485832 - RNA, 21 nt, Human
aagaagcaauuuauuggaagg

SEQ ID NO: 485833 - RNA, 22 nt, Human
ucugugcucuucucaguaucac

SEQ ID NO: 485834 - RNA, 22 nt, Human
ggagccugugcccaagcccaga

SEQ ID NO: 485835 - RNA, 21 nt, Human
ggcagccugacccccagagag

SEQ ID NO: 485836 - RNA, 22 nt, Human
aaggcacuagcaagcugccugg

SEQ ID NO: 485837 - RNA, 22 nt, Human
gggcagugacaaaggggaugaa

SEQ ID NO: 485838 - RNA, 22 nt, Human
aacuguaaagguugagugguaa

SEQ ID NO: 485839 - RNA, 22 nt, Human
agggaaggaaaagcugucgcuu

SEQ ID NO: 485840 - RNA, 22 nt, Human
gagccuccuccuggugugccga

SEQ ID NO: 485841 - RNA, 22 nt, Human
gcuggccaggugcuuugguucu

SEQ ID NO: 485842 - RNA, 22 nt, Human
cggcuggguagaggugccgggu

SEQ ID NO: 485843 - RNA, 22 nt, Human
agcccuucaaccugccuacucc

SEQ ID NO: 485844 - RNA, 22 nt, Human
ggcauccaguucugaucaacaa

SEQ ID NO: 485845 - RNA, 22 nt, Human
aaugggagguaguaugggaggu

SEQ ID NO: 485846 - RNA, 22 nt, Human
agcaucuggugagggccuaguu

SEQ ID NO: 485847 - RNA, 22 nt, Human
gugcauuugugcaugcacaugu

SEQ ID NO: 485848 - RNA, 22 nt, Human
auguaucagaaauagcauuggc

SEQ ID NO: 485849 - RNA, 22 nt, Human
agccacagcgaaccucucuucc

SEQ ID NO: 485850 - RNA, 22 nt, Human
cccagcuugcccaggacugagg

SEQ ID NO: 485851 - RNA, 22 nt, Human
uguauagaguuggaagaugacu

SEQ ID NO: 485852 - RNA, 22 nt, Human
gcucucugucguuaugcuucau

SEQ ID NO: 485853 - RNA, 22 nt, Human
gggcugagcuguucugaguuua

SEQ ID NO: 485854 - RNA, 22 nt, Human
uauaauccugcuucacauugaa

SEQ ID NO: 485855 - RNA, 22 nt, Human
gcagcagaugcuuucauggaca

SEQ ID NO: 485856 - RNA, 22 nt, Human
agcuuuaccugccuuggggcac

SEQ ID NO: 485857 - RNA, 22 nt, Human
gccccuggcuggccagcuccuc

SEQ ID NO: 485858 - RNA, 22 nt, Human
acagauauaugauuguguaaau

SEQ ID NO: 485859 - RNA, 22 nt, Human
uuaauaaaguaugaauuggaaa

SEQ ID NO: 485860 - RNA, 22 nt, Human
agggccagcugcagaauuagca

SEQ ID NO: 485861 - RNA, 22 nt, Human
agggccugggccagcacccuuu

SEQ ID NO: 485862 - RNA, 22 nt, Human
uagggcagccacccaggcugcu

SEQ ID NO: 485863 - RNA, 22 nt, Human
agcucccagagcucgagaguaa

SEQ ID NO: 485864 - RNA, 22 nt, Human
aucagagauuguaguaugugca

SEQ ID NO: 485865 - RNA, 22 nt, Human
caguaaaagauggaaauagaau

SEQ ID NO: 485866 - RNA, 22 nt, Human
auuauaaaccuuugaggguggg

SEQ ID NO: 485867 - RNA, 21 nt, Human
aaaguucaugcuuuaauauuc

SEQ ID NO: 485868 - RNA, 22 nt, Human
ccagucacagguguguuuauau

SEQ ID NO: 485869 - RNA, 22 nt, Human
cagggcccaagacacaaugagg

SEQ ID NO: 485870 - RNA, 22 nt, Human
gcagugggaagguuggcacaug

SEQ ID NO: 485871 - RNA, 22 nt, Human
ucucuucuuguguuuuccugcc

SEQ ID NO: 485872 - RNA, 22 nt, Human
cccaggcuggauuucgguggca

SEQ ID NO: 485873 - RNA, 22 nt, Human
ugcagcagguuccaaaggguua

SEQ ID NO: 485874 - RNA, 22 nt, Human
gaagaaggugcuacacagggca

SEQ ID NO: 485875 - RNA, 22 nt, Human
ccuuaaaagaacuaucucuucu

SEQ ID NO: 485876 - RNA, 22 nt, Human
aguggcagaagucacuggguag

SEQ ID NO: 485877 - RNA, 19 nt, Human
ugucccagacuccgugucu

SEQ ID NO: 485878 - RNA, 22 nt, Human
aggcagcagggccacuggcuga

SEQ ID NO: 485879 - RNA, 22 nt, Human
gcagauggugggggaggaguac

SEQ ID NO: 485880 - RNA, 22 nt, Human
ccagcagagcauggggaggaag

SEQ ID NO: 485881 - RNA, 22 nt, Human
agggcuccgggccaccggccug

SEQ ID NO: 485882 - RNA, 22 nt, Human
agggaggugguuccccagugga

SEQ ID NO: 485883 - RNA, 22 nt, Human
ucagucucaucaacucuauucc

SEQ ID NO: 485884 - RNA, 22 nt, Human
auguccuuugcuucucuggucc

SEQ ID NO: 485885 - RNA, 22 nt, Human
gcuggccagggcugcucgcgga

SEQ ID NO: 485886 - RNA, 22 nt, Human
gguggggccugcuccagcggcc

SEQ ID NO: 485887 - RNA, 22 nt, Human
ggucaggguuccagguaucuuc

SEQ ID NO: 485888 - RNA, 22 nt, Human
auccaaagauggaaagaacuuu

SEQ ID NO: 485889 - RNA, 22 nt, Human
cacagggcuuugauggcugagu

SEQ ID NO: 485890 - RNA, 20 nt, Human
gcccaagguccagaaggggg

SEQ ID NO: 485891 - RNA, 19 nt, Human
ccucccacggauuccuucc

SEQ ID NO: 485892 - RNA, 22 nt, Human
gggcagguuauuggaguaggga

SEQ ID NO: 485893 - RNA, 22 nt, Human
caagcuggcugggagaggcacg

SEQ ID NO: 485894 - RNA, 22 nt, Human
cccagcuccgagcuccgagccg

SEQ ID NO: 485895 - RNA, 22 nt, Human
gagcuuccauggacgccaucug

SEQ ID NO: 485896 - RNA, 22 nt, Human
cuuucacagcugugcuuaugau

SEQ ID NO: 485897 - RNA, 22 nt, Human
caauuucucgaacucuaaucca

SEQ ID NO: 485898 - RNA, 22 nt, Human
agcagccacagucugggacagg

SEQ ID NO: 485899 - RNA, 22 nt, Human
ggcugugccucaaggcuacuca

SEQ ID NO: 485900 - RNA, 22 nt, Human
ucuggccuuaucuguccaagcc

SEQ ID NO: 485901 - RNA, 22 nt, Human
aaggucauuguugcauguucuc

SEQ ID NO: 485902 - RNA, 22 nt, Human
cucccagagagcaggugggccg

SEQ ID NO: 485903 - RNA, 16 nt, Human
aggcagagauuuaccc

SEQ ID NO: 485904 - RNA, 22 nt, Human
ggaggaagagguuguucucuca

SEQ ID NO: 485905 - RNA, 17 nt, Human
uuccaguuuaguauugu

SEQ ID NO: 485906 - RNA, 22 nt, Human
guuuccauggcucuguuaaugg

SEQ ID NO: 485907 - RNA, 22 nt, Human
acaaaugcaaguuuuaugucaa

SEQ ID NO: 485908 - RNA, 22 nt, Human
gccucugcccuccugggacugc

SEQ ID NO: 485909 - RNA, 22 nt, Human
cagggcucccuugcaaggaggg

SEQ ID NO: 485910 - RNA, 20 nt, Human
aggaagccaaaggcugucuu

SEQ ID NO: 485911 - RNA, 22 nt, Human
ccagcaugagacgaugaugaag

SEQ ID NO: 485912 - RNA, 22 nt, Human
cuucaagauccauagauauugc

SEQ ID NO: 485913 - RNA, 22 nt, Human
acuggcagagguuggacaccau

SEQ ID NO: 485914 - RNA, 22 nt, Human
augcuuuuccuaaaaugaugcc

SEQ ID NO: 485915 - RNA, 22 nt, Human
uacauacacaaauauacuguuu

SEQ ID NO: 485916 - RNA, 22 nt, Human
cucccacuccuggcucaccaca

SEQ ID NO: 485917 - RNA, 22 nt, Human
gguagcacauugcauuaggaga

SEQ ID NO: 485918 - RNA, 22 nt, Human
ugucaccucuuuggcugcagcu

SEQ ID NO: 485919 - RNA, 22 nt, Human
uguaggaguccaaucaggagac

SEQ ID NO: 485920 - RNA, 22 nt, Human
ucaguggauuguagaaggcuua

SEQ ID NO: 485921 - RNA, 22 nt, Human
aggucaaggccaaaagaguggu

SEQ ID NO: 485922 - RNA, 22 nt, Human
gaaaugcaaauucucucucgcu

SEQ ID NO: 485923 - RNA, 22 nt, Human
ggcuuucuaugaacucaaaggc

SEQ ID NO: 485924 - RNA, 22 nt, Human
acaugcaugucuaugggcaggu

SEQ ID NO: 485925 - RNA, 22 nt, Human
cugagggagggacuuugagacu

SEQ ID NO: 485926 - RNA, 22 nt, Human
ugugccuucucaguccugcuca

SEQ ID NO: 485927 - RNA, 22 nt, Human
aaacaaacauagguuugaaagu

SEQ ID NO: 485928 - RNA, 22 nt, Human
cagcccuggaacagcugacuca

SEQ ID NO: 485929 - RNA, 22 nt, Human
aaaucacuaaguuauagugugg

SEQ ID NO: 485930 - RNA, 22 nt, Human
ccuuucucuuggauaccgauug

SEQ ID NO: 485931 - RNA, 20 nt, Human
cccaggagugagcagcuuua

SEQ ID NO: 485932 - RNA, 22 nt, Human
gcagaggagcaaguugcuacag

SEQ ID NO: 485933 - RNA, 22 nt, Human
gagaaagauguaggcugggagg

SEQ ID NO: 485934 - RNA, 22 nt, Human
uccugcagcauccgucgucugu

SEQ ID NO: 485935 - RNA, 22 nt, Human
ccagagccggauugugaagugc

SEQ ID NO: 485936 - RNA, 21 nt, Human
cauuagggcagaagcaggaag

SEQ ID NO: 485937 - RNA, 23 nt, Human
uggcccugugcaugcugcuuccc

SEQ ID NO: 485938 - RNA, 22 nt, Human
cccaggcauuuucaacuuuagu

SEQ ID NO: 485939 - RNA, 21 nt, Human
ugucagagcuuguaggacauu

SEQ ID NO: 485940 - RNA, 22 nt, Human
ccucagagguuuucauucugua

SEQ ID NO: 485941 - RNA, 22 nt, Human
uagagcauuuagaggggcagga

SEQ ID NO: 485942 - RNA, 22 nt, Human
agccuggccugggcaggcacau

SEQ ID NO: 485943 - RNA, 22 nt, Human
uugaggagucaggggcacggaa

SEQ ID NO: 485944 - RNA, 22 nt, Human
uggccugcccagagcagcucug

SEQ ID NO: 485945 - RNA, 22 nt, Human
cuugaaagcuuugcgucuucua

SEQ ID NO: 485946 - RNA, 22 nt, Human
cagugcugggcagaggagagcg

SEQ ID NO: 485947 - RNA, 22 nt, Human
uagagcugauaaugaggccaag

SEQ ID NO: 485948 - RNA, 22 nt, Human
cauuaucugccauugacaccau

SEQ ID NO: 485949 - RNA, 22 nt, Human
aguuuuauuccaaugugcagca

SEQ ID NO: 485950 - RNA, 22 nt, Human
ucucauugguauauacaugugu

SEQ ID NO: 485951 - RNA, 19 nt, Human
ccagcagcuuugauucucu

SEQ ID NO: 485952 - RNA, 22 nt, Human
gaggaggcacuugagcagaugu

SEQ ID NO: 485953 - RNA, 23 nt, Human
aaacaugcagcacaugaaugcua

SEQ ID NO: 485954 - RNA, 22 nt, Human
gcugcagcuuuaggauccagug

SEQ ID NO: 485955 - RNA, 22 nt, Human
cagggugacugcccuggccacu

SEQ ID NO: 485956 - RNA, 22 nt, Human
agcagcuguacuuucaucuguu

SEQ ID NO: 485957 - RNA, 22 nt, Human
gaagccacccuccuuccagccc

SEQ ID NO: 485958 - RNA, 22 nt, Human
agcugccacugagggugcacag

SEQ ID NO: 485959 - RNA, 22 nt, Human
ugccugugucacagugauguuu

SEQ ID NO: 485960 - RNA, 22 nt, Human
gcuggccucuacaggccggcca

SEQ ID NO: 485961 - RNA, 22 nt, Human
cagggcaggaugcugugauuau

SEQ ID NO: 485962 - RNA, 22 nt, Human
acagaauucucucugcagaggc

SEQ ID NO: 485963 - RNA, 22 nt, Human
ucagggcaagauugguuaauaa

SEQ ID NO: 485964 - RNA, 22 nt, Human
guuauguaugggggccuuauga

SEQ ID NO: 485965 - RNA, 22 nt, Human
gugagggcagcuuggucagugu

SEQ ID NO: 485966 - RNA, 22 nt, Human
gggaccuggacaugugugugcu

SEQ ID NO: 485967 - RNA, 22 nt, Human
gcagggcuaauggggcaaguag

SEQ ID NO: 485968 - RNA, 19 nt, Human
cucagagaggggcagugcc

SEQ ID NO: 485969 - RNA, 22 nt, Human
gaggccugguagccgagcccca

SEQ ID NO: 485970 - RNA, 22 nt, Human
uguggcugcucaggugcagacc

SEQ ID NO: 485971 - RNA, 22 nt, Human
agcugugggauuugggugugcc

SEQ ID NO: 485972 - RNA, 22 nt, Human
cagcaguggaacuacccaggga

SEQ ID NO: 485973 - RNA, 22 nt, Human
acugccauuggucaaaugagug

SEQ ID NO: 485974 - RNA, 22 nt, Human
acaggagugaaucuggcacuua

SEQ ID NO: 485975 - RNA, 22 nt, Human
uucacagggccacuggcaggag

SEQ ID NO: 485976 - RNA, 22 nt, Human
gccucugggcucugccccuggc

SEQ ID NO: 485977 - RNA, 22 nt, Human
uggcucugggaaucuguugcuu

SEQ ID NO: 485978 - RNA, 22 nt, Human
cuguuuauacgacagguggagg

SEQ ID NO: 485979 - RNA, 22 nt, Human
uuuuaaucaugcuucuaugucc

SEQ ID NO: 485980 - RNA, 22 nt, Human
ccugucaguugcugucagggau

SEQ ID NO: 485981 - RNA, 22 nt, Human
ucuccugguuuguuaaauaauu

SEQ ID NO: 485982 - RNA, 22 nt, Human
ccagguggcuucugcccgaugu

SEQ ID NO: 485983 - RNA, 22 nt, Human
uggcugagaccaucagggugua

SEQ ID NO: 485984 - RNA, 22 nt, Human
uaugcacacaggcuuaauucau

SEQ ID NO: 485985 - RNA, 22 nt, Human
agcagugaugcaugacagccua

SEQ ID NO: 485986 - RNA, 22 nt, Human
aaaggccacacagagcagggag

SEQ ID NO: 485987 - RNA, 22 nt, Human
cagagcauuaaaaccagcucug

SEQ ID NO: 485988 - RNA, 22 nt, Human
cuggagccccagacagggagag

SEQ ID NO: 485989 - RNA, 22 nt, Human
ucuccuggauggaccuucucuu

SEQ ID NO: 485990 - RNA, 22 nt, Human
ugcugucugauucagggugauu

SEQ ID NO: 485991 - RNA, 22 nt, Human
cagucccagacccagaaggugg

SEQ ID NO: 485992 - RNA, 22 nt, Human
cagugcauagauccugaggccu

SEQ ID NO: 485993 - RNA, 22 nt, Human
ucucuguaguugggcagcugcu

SEQ ID NO: 485994 - RNA, 23 nt, Human
gaggccacauuccccugcuugag

SEQ ID NO: 485995 - RNA, 22 nt, Human
ggugcuggacacguggcacucc

SEQ ID NO: 485996 - RNA, 22 nt, Human
cagacacaccaggcccauucug

SEQ ID NO: 485997 - RNA, 22 nt, Human
aggcugagguaggaggaucgcu

SEQ ID NO: 485998 - RNA, 22 nt, Human
ggggcagcucccgagggcagga

SEQ ID NO: 485999 - RNA, 22 nt, Human
caagggcucacggucugcuggg

SEQ ID NO: 486000 - RNA, 22 nt, Human
uggaggaaaauuacuggggucu

SEQ ID NO: 486001 - RNA, 22 nt, Human
ccagcugucugguuccagagcc

SEQ ID NO: 486002 - RNA, 22 nt, Human
gcagggaccucacuacccccag

SEQ ID NO: 486003 - RNA, 22 nt, Human
ggggcagaaguagugccccuga

SEQ ID NO: 486004 - RNA, 22 nt, Human
caggggcucuaaugcaugauca

SEQ ID NO: 486005 - RNA, 17 nt, Human
uuugaaaggaugucagu

SEQ ID NO: 486006 - RNA, 20 nt, Human
ugaggcaggagaauggcaug

SEQ ID NO: 486007 - RNA, 22 nt, Human
acacauuucucuuuuuguaagu

SEQ ID NO: 486008 - RNA, 22 nt, Human
cauaauuuuuuuaagucagaac

SEQ ID NO: 486009 - RNA, 22 nt, Human
gcagccugaugaucuggguugu

SEQ ID NO: 486010 - RNA, 20 nt, Human
ugaggcucagagagguugag

SEQ ID NO: 486011 - RNA, 22 nt, Human
gagggcucacugagaaagcagu

SEQ ID NO: 486012 - RNA, 22 nt, Human
augaaggcuguguggagccccc

SEQ ID NO: 486013 - RNA, 22 nt, Human
ugaggaagggugugacggcacc

SEQ ID NO: 486014 - RNA, 21 nt, Human
ugcaggagucugugagucagg

SEQ ID NO: 486015 - RNA, 22 nt, Human
ugucaccaugccagcuucugcc

SEQ ID NO: 486016 - RNA, 22 nt, Human
caggaaccuaaagagacauuac

SEQ ID NO: 486017 - RNA, 19 nt, Human
accaggccucagaggcccu

SEQ ID NO: 486018 - RNA, 22 nt, Human
ugaggcaggagaaucacaugaa

SEQ ID NO: 486019 - RNA, 22 nt, Human
ugcagggccagacuggguugga

SEQ ID NO: 486020 - RNA, 22 nt, Human
accccagaggcggaggcugcag

SEQ ID NO: 486021 - RNA, 20 nt, Human
accaauguuagcuuaguacu

SEQ ID NO: 486022 - RNA, 22 nt, Human
ccaggaaugaaauguagauaaa

SEQ ID NO: 486023 - RNA, 22 nt, Human
aaagcagggaugaggcuagagg

SEQ ID NO: 486024 - RNA, 22 nt, Human
cugcccugugaggguccuuggg

SEQ ID NO: 486025 - RNA, 22 nt, Human
cugaggcucaagggcagguggg

SEQ ID NO: 486026 - RNA, 22 nt, Human
ucuccgaucacagguuuucaau

SEQ ID NO: 486027 - RNA, 22 nt, Human
agggaggaguccucaaagucau

SEQ ID NO: 486028 - RNA, 22 nt, Human
uuuuuccuaagcaguggagcug

SEQ ID NO: 486029 - RNA, 22 nt, Human
ucuucacaugaccuucaugucu

SEQ ID NO: 486030 - RNA, 20 nt, Human
guggccucucacauucugag

SEQ ID NO: 486031 - RNA, 22 nt, Human
guggccaggccgacugccaggc

SEQ ID NO: 486032 - RNA, 22 nt, Human
uuaaaaugcagauucugauuca

SEQ ID NO: 486033 - RNA, 22 nt, Human
gggcacagaagucuaagacauc

SEQ ID NO: 486034 - RNA, 22 nt, Human
ccagcuuuucagaaucugccug

SEQ ID NO: 486035 - RNA, 20 nt, Human
uagauuucauacuucucuuu

SEQ ID NO: 486036 - RNA, 22 nt, Human
cagcagcaaggugaggguggag

SEQ ID NO: 486037 - RNA, 22 nt, Human
acacaggggcucggcugggugc

SEQ ID NO: 486038 - RNA, 22 nt, Human
guggcacagugggagagcccca

SEQ ID NO: 486039 - RNA, 22 nt, Human
cauuacaugguccaggauauau

SEQ ID NO: 486040 - RNA, 22 nt, Human
cagaguucaaagccugcuggga

SEQ ID NO: 486041 - RNA, 22 nt, Human
uauucacauguacauaugcuca

SEQ ID NO: 486042 - RNA, 22 nt, Human
ccagagccuaagaucugauccu

SEQ ID NO: 486043 - RNA, 22 nt, Human
cccagcauuucugggcugcacu

SEQ ID NO: 486044 - RNA, 22 nt, Human
acauuucuuugcuagacagcag

SEQ ID NO: 486045 - RNA, 22 nt, Human
cucaggagacaguguccacaug

SEQ ID NO: 486046 - RNA, 22 nt, Human
ucuguacaaaggcuauuuggag

SEQ ID NO: 486047 - RNA, 22 nt, Human
ccccuuccaggaagcagaaucg

SEQ ID NO: 486048 - RNA, 22 nt, Human
uuagcuaaacuguaacuagaau

SEQ ID NO: 486049 - RNA, 22 nt, Human
cugcuccacaccuccauuuccu

SEQ ID NO: 486050 - RNA, 20 nt, Human
cagcuuuagaucuuugauua

SEQ ID NO: 486051 - RNA, 22 nt, Human
uugucccaggacuugcauagau

SEQ ID NO: 486052 - RNA, 22 nt, Human
aggccugggucucgugccuacc

SEQ ID NO: 486053 - RNA, 22 nt, Human
cugauuccaaagccaaagcuau

SEQ ID NO: 486054 - RNA, 22 nt, Human
aaauguauccuacuuccugagu

SEQ ID NO: 486055 - RNA, 17 nt, Human
agcacuaaaaugcuucc

SEQ ID NO: 486056 - RNA, 22 nt, Human
agagcugaggauccagcugagc

SEQ ID NO: 486057 - RNA, 23 nt, Human
cccauuuucauguuaacuccugg

SEQ ID NO: 486058 - RNA, 23 nt, Human
agaugagccaacaccuccaugcc

SEQ ID NO: 486059 - RNA, 22 nt, Human
cagugcccaagaugugccaugc

SEQ ID NO: 486060 - RNA, 22 nt, Human
ugcuuuauaacuuaguuuaugg

SEQ ID NO: 486061 - RNA, 22 nt, Human
caugaaaaauuuacuguuaaca

SEQ ID NO: 486062 - RNA, 18 nt, Human
gcagagugcgucucugug

SEQ ID NO: 486063 - RNA, 22 nt, Human
acugaaggaaacuuuuguguuu

SEQ ID NO: 486064 - RNA, 22 nt, Human
ggcucuggugaggguaggagau

SEQ ID NO: 486065 - RNA, 22 nt, Human
ucauuucuccgaccugcugucc

SEQ ID NO: 486066 - RNA, 22 nt, Human
gagauggggaauaggagcaagc

SEQ ID NO: 486067 - RNA, 21 nt, Human
uuuuuucuugcgugaggccug

SEQ ID NO: 486068 - RNA, 22 nt, Human
ugucccaggccucauguugcca

SEQ ID NO: 486069 - RNA, 22 nt, Human
cacugucuuuugugaagacaau

SEQ ID NO: 486070 - RNA, 22 nt, Human
agguggggccaaaugcuacagu

SEQ ID NO: 486071 - RNA, 22 nt, Human
uugcauugauguuccuucuugc

SEQ ID NO: 486072 - RNA, 22 nt, Human
aaggcccuggcaggaagcagga

SEQ ID NO: 486073 - RNA, 22 nt, Human
uccaggcacuauauauacuuuu

SEQ ID NO: 486074 - RNA, 22 nt, Human
aaugagacacgugaagcagaug

SEQ ID NO: 486075 - RNA, 22 nt, Human
ugucugagugugccugggcauu

SEQ ID NO: 486076 - RNA, 22 nt, Human
aagauucucagagugaaagaau

SEQ ID NO: 486077 - RNA, 22 nt, Human
gggcaguagcuucguaggcauc

SEQ ID NO: 486078 - RNA, 22 nt, Human
gugccugguuuggggaguguuc

SEQ ID NO: 486079 - RNA, 22 nt, Human
cugcagcuguagaggacagugg

SEQ ID NO: 486080 - RNA, 22 nt, Human
gccuggagaggaagccggugga

SEQ ID NO: 486081 - RNA, 22 nt, Human
gggagggaagguaccuguguga

SEQ ID NO: 486082 - RNA, 20 nt, Human
uacuugaauguugcagcagu

SEQ ID NO: 486083 - RNA, 22 nt, Human
agucucugggcaugguugugac

SEQ ID NO: 486084 - RNA, 22 nt, Human
ucuuuccuacuuuauugugaac

SEQ ID NO: 486085 - RNA, 22 nt, Human
uccucugcuguucugguucuuu

SEQ ID NO: 486086 - RNA, 22 nt, Human
ggcagggucuggacugaaagcu

SEQ ID NO: 486087 - RNA, 22 nt, Human
cugcuguguuccuccugcaucu

SEQ ID NO: 486088 - RNA, 22 nt, Human
agggcccauagaucgucagcuu

SEQ ID NO: 486089 - RNA, 22 nt, Human
aucaaaguccaucagaagguag

SEQ ID NO: 486090 - RNA, 22 nt, Human
acucucagaggguggcagcaau

SEQ ID NO: 486091 - RNA, 22 nt, Human
gaaaugugcagaauguguuaga

SEQ ID NO: 486092 - RNA, 22 nt, Human
uugcauugggagugaggagacc

SEQ ID NO: 486093 - RNA, 22 nt, Human
gcugcagcagaaguucucagag

SEQ ID NO: 486094 - RNA, 22 nt, Human
gagcaggcuugcagagaagggg

SEQ ID NO: 486095 - RNA, 22 nt, Human
gguuucaacuaaaucaagaagg

SEQ ID NO: 486096 - RNA, 22 nt, Human
ccuggccuccuggccuucucau

SEQ ID NO: 486097 - RNA, 22 nt, Human
ugaggugaagaguggagcucag

SEQ ID NO: 486098 - RNA, 22 nt, Human
uccuuuccaugcuucuagaggc

SEQ ID NO: 486099 - RNA, 22 nt, Human
guuuagaauucuaacuuuaagg

SEQ ID NO: 486100 - RNA, 22 nt, Human
aaagguuaguucuuagaagugc

SEQ ID NO: 486101 - RNA, 23 nt, Human
ggggccugcaccggucugcgcgg

SEQ ID NO: 486102 - RNA, 22 nt, Human
ggcacagggaggcccuggugug

SEQ ID NO: 486103 - RNA, 22 nt, Human
aagucuguuugagugucacacu

SEQ ID NO: 486104 - RNA, 22 nt, Human
ucccaggaucugagggcagaga

SEQ ID NO: 486105 - RNA, 22 nt, Human
ccacccagcagaggaggcaaga

SEQ ID NO: 486106 - RNA, 20 nt, Human
ugcagcugcaggaggguggg

SEQ ID NO: 486107 - RNA, 22 nt, Human
aggcccaguagugcugccuuua

SEQ ID NO: 486108 - RNA, 22 nt, Human
aagucaauuaguaaacuuggaa

SEQ ID NO: 486109 - RNA, 22 nt, Human
uucauaguguuuccuuccagug

SEQ ID NO: 486110 - RNA, 20 nt, Human
gggagaagggcugaugagag

SEQ ID NO: 486111 - RNA, 22 nt, Human
gcaaagguagccaaggagcuca

SEQ ID NO: 486112 - RNA, 22 nt, Human
ucacaugcuacugagccagacc

SEQ ID NO: 486113 - RNA, 20 nt, Human
uccuuuggccuuagagcugu

SEQ ID NO: 486114 - RNA, 18 nt, Human
aaaaugcaggcgacaugg

SEQ ID NO: 486115 - RNA, 22 nt, Human
uuccugaugcacacagucauuu

SEQ ID NO: 486116 - RNA, 22 nt, Human
aaagagcuaacauugccgagau

SEQ ID NO: 486117 - RNA, 22 nt, Human
aauuuuaucucuaagcaggcuu

SEQ ID NO: 486118 - RNA, 22 nt, Human
ugacauuuuaucaauaucacag

SEQ ID NO: 486119 - RNA, 22 nt, Human
cagugggaagggcagaggcuuu

SEQ ID NO: 486120 - RNA, 17 nt, Human
ucauuuguugugacuag

SEQ ID NO: 486121 - RNA, 22 nt, Human
uugaaaguagcagcugcauaug

SEQ ID NO: 486122 - RNA, 22 nt, Human
aggcugaggcuuuccuuggaga

SEQ ID NO: 486123 - RNA, 22 nt, Human
aguacuuugcacuuugcucaga

SEQ ID NO: 486124 - RNA, 22 nt, Human
gccugcagccucagagaauuuu

SEQ ID NO: 486125 - RNA, 17 nt, Human
cugagcauccgugcucu

SEQ ID NO: 486126 - RNA, 22 nt, Human
ugagaaagugggugccuagcaa

SEQ ID NO: 486127 - RNA, 22 nt, Human
ugccuugguucucuacuuggag

SEQ ID NO: 486128 - RNA, 22 nt, Human
gugaggugggcuggccagagac

SEQ ID NO: 486129 - RNA, 22 nt, Human
uugaaaggaauacagaggccua

SEQ ID NO: 486130 - RNA, 18 nt, Human
agcagagcccaugcauuc

SEQ ID NO: 486131 - RNA, 22 nt, Human
aggccugcagcaggagcaaacc

SEQ ID NO: 486132 - RNA, 21 nt, Human
agccugggaggcggagguugc

SEQ ID NO: 486133 - RNA, 22 nt, Human
guucucucugcuuccaagaugg

SEQ ID NO: 486134 - RNA, 21 nt, Human
uagagaaaagaagcuguuccu

SEQ ID NO: 486135 - RNA, 22 nt, Human
acuccuggggcugccaucacag

SEQ ID NO: 486136 - RNA, 22 nt, Human
augaggcucucaggggagcugu

SEQ ID NO: 486137 - RNA, 19 nt, Human
cagugcccgacgcaggucu

SEQ ID NO: 486138 - RNA, 22 nt, Human
gcugucaguuuuacccacagac

SEQ ID NO: 486139 - RNA, 22 nt, Human
cuggcuggccggaggcaucccu

SEQ ID NO: 486140 - RNA, 22 nt, Human
cucagagucugcauuucuguca

SEQ ID NO: 486141 - RNA, 19 nt, Human
cucuccagcuccaguagcu

SEQ ID NO: 486142 - RNA, 21 nt, Human
aaaaagcuggggcaugcaugc

SEQ ID NO: 486143 - RNA, 19 nt, Human
agugguagaugagcaggag

SEQ ID NO: 486144 - RNA, 22 nt, Human
cuccaggggccagaagccuggc

SEQ ID NO: 486145 - RNA, 22 nt, Human
cagggcccaggccacuggguug

SEQ ID NO: 486146 - RNA, 22 nt, Human
cucuggagaacuccuugugucu

SEQ ID NO: 486147 - RNA, 22 nt, Human
agaaaauuagauuuuacugugu

SEQ ID NO: 486148 - RNA, 17 nt, Human
uuuucucucuuggauuc

SEQ ID NO: 486149 - RNA, 22 nt, Human
gcucccacugcagcccugagcc

SEQ ID NO: 486150 - RNA, 22 nt, Human
agggggaggcugugcugcgucu

SEQ ID NO: 486151 - RNA, 22 nt, Human
ggacucuguuuuccugaucacu

SEQ ID NO: 486152 - RNA, 22 nt, Human
agcagcugguaggaguggccac

SEQ ID NO: 486153 - RNA, 22 nt, Human
ccauccuaucugaccuacuugu

SEQ ID NO: 486154 - RNA, 22 nt, Human
ggcagaggagcuggaaacaugg

SEQ ID NO: 486155 - RNA, 22 nt, Human
gacagaguuguugauguaugcu

SEQ ID NO: 486156 - RNA, 22 nt, Human
caggccugcaggaaaggcuccc

SEQ ID NO: 486157 - RNA, 22 nt, Human
ugugaugguucacugggcauga

SEQ ID NO: 486158 - RNA, 19 nt, Human
gggcaguggcacuagggag

SEQ ID NO: 486159 - RNA, 22 nt, Human
gcugucacauuuggagcacugg

SEQ ID NO: 486160 - RNA, 22 nt, Human
gccuggcuccuaagagcacaac

SEQ ID NO: 486161 - RNA, 22 nt, Human
auggggcugggauucuccucgg

SEQ ID NO: 486162 - RNA, 22 nt, Human
cccagccucuggguucugccgg

SEQ ID NO: 486163 - RNA, 22 nt, Human
ucaggagagaaagaauacaauu

SEQ ID NO: 486164 - RNA, 22 nt, Human
gugacagaguuuuagaucucau

SEQ ID NO: 486165 - RNA, 22 nt, Human
agcuggggcugcagagaacagg

SEQ ID NO: 486166 - RNA, 22 nt, Human
uugggcugaacccugcagcuga

SEQ ID NO: 486167 - RNA, 18 nt, Human
gcuccuggaccaggucac

SEQ ID NO: 486168 - RNA, 22 nt, Human
guggccucaugucuauaaagag

SEQ ID NO: 486169 - RNA, 22 nt, Human
gacaagacugguuuauuuaagg

SEQ ID NO: 486170 - RNA, 22 nt, Human
gaagcccuauccucuccuggga

SEQ ID NO: 486171 - RNA, 20 nt, Human
gcugaagauucccaugcaag

SEQ ID NO: 486172 - RNA, 23 nt, Human
ggccuccuggucuaggcuagacu

SEQ ID NO: 486173 - RNA, 22 nt, Human
cacauaauaaauguuccugaug

SEQ ID NO: 486174 - RNA, 22 nt, Human
auuuuucucucacacuuaccag

SEQ ID NO: 486175 - RNA, 21 nt, Human
ucuuugcaucaguuguuuucu

SEQ ID NO: 486176 - RNA, 22 nt, Human
gaggagaaauuuggggaccuga

SEQ ID NO: 486177 - RNA, 22 nt, Human
uccauuuucaucucauguauaa

SEQ ID NO: 486178 - RNA, 22 nt, Human
ccaguugguuucaaugggacag

SEQ ID NO: 486179 - RNA, 22 nt, Human
uuucauuacguguuugacuugu

SEQ ID NO: 486180 - RNA, 22 nt, Human
cucuccagaauaugccgccgug

SEQ ID NO: 486181 - RNA, 22 nt, Human
gcugucuugcucacucuugcag

SEQ ID NO: 486182 - RNA, 23 nt, Human
uaguuauuuucucuguaauuugc

SEQ ID NO: 486183 - RNA, 22 nt, Human
cagccugacaccagcuuugggc

SEQ ID NO: 486184 - RNA, 22 nt, Human
ugccaggcaggacccuagaacc

SEQ ID NO: 486185 - RNA, 22 nt, Human
agcagggcucuguggagggugg

SEQ ID NO: 486186 - RNA, 22 nt, Human
acagaaggcggggacaaggcgg

SEQ ID NO: 486187 - RNA, 22 nt, Human
augggagugacagggccacugg

SEQ ID NO: 486188 - RNA, 22 nt, Human
aguaaugugccugaaauacuug

SEQ ID NO: 486189 - RNA, 22 nt, Human
cuuauaguaugauguugagaau

SEQ ID NO: 486190 - RNA, 22 nt, Human
ucucuuccaguaagagucuuua

SEQ ID NO: 486191 - RNA, 22 nt, Human
cacagaaaaaggcuugaaaauc

SEQ ID NO: 486192 - RNA, 22 nt, Human
cugcagagcaaguaacauccuc

SEQ ID NO: 486193 - RNA, 22 nt, Human
cguguacagucuaucuuuuuuc

SEQ ID NO: 486194 - RNA, 22 nt, Human
uauuacugagguuuuauggagu

SEQ ID NO: 486195 - RNA, 22 nt, Human
cucagggcuugaguguccagga

SEQ ID NO: 486196 - RNA, 22 nt, Human
aagaaauuaaugugccauuacu

SEQ ID NO: 486197 - RNA, 22 nt, Human
cagcugucuaaguugagcagga

SEQ ID NO: 486198 - RNA, 22 nt, Human
ucugagagguuaagcaauuuga

SEQ ID NO: 486199 - RNA, 22 nt, Human
gggugggccugucuggccaugu

SEQ ID NO: 486200 - RNA, 22 nt, Human
uuaggaaaaucaugagagauga

SEQ ID NO: 486201 - RNA, 20 nt, Human
ugcagaagaacguucugguu

SEQ ID NO: 486202 - RNA, 18 nt, Human
ucugagggugcgggagcu

SEQ ID NO: 486203 - RNA, 18 nt, Human
gcugcugguggagggagc

SEQ ID NO: 486204 - RNA, 20 nt, Human
ucagggcaugggacagcccc

SEQ ID NO: 486205 - RNA, 22 nt, Human
ggggcaggagguguucucuuuu

SEQ ID NO: 486206 - RNA, 18 nt, Human
gggaagccgggaagccgg

SEQ ID NO: 486207 - RNA, 22 nt, Human
gaaacaugucugacaauuuacc

SEQ ID NO: 486208 - RNA, 22 nt, Human
ggcugccugugcccaggcacac

SEQ ID NO: 486209 - RNA, 22 nt, Human
uuucauugucaauaaacuguau

SEQ ID NO: 486210 - RNA, 23 nt, Human
acaaaugcccauacaucuaguuc

SEQ ID NO: 486211 - RNA, 22 nt, Human
ugcagaagaauguaggcauaag

SEQ ID NO: 486212 - RNA, 22 nt, Human
uggucucuucuuccaagauggc

SEQ ID NO: 486213 - RNA, 22 nt, Human
agggccagggaaacgaucagca

SEQ ID NO: 486214 - RNA, 22 nt, Human
ucuuuauuuuaugcuugugcaa

SEQ ID NO: 486215 - RNA, 19 nt, Human
uaaggccaaaaguaagugu

SEQ ID NO: 486216 - RNA, 22 nt, Human
uggagauggguuaauggagaga

SEQ ID NO: 486217 - RNA, 22 nt, Human
uuccauaaugagauucccagcc

SEQ ID NO: 486218 - RNA, 22 nt, Human
ggucucagcccucgccagcagc

SEQ ID NO: 486219 - RNA, 21 nt, Human
ucagggcagugggagguuccu

SEQ ID NO: 486220 - RNA, 22 nt, Human
augggugugaaaauggucaucu

SEQ ID NO: 486221 - RNA, 21 nt, Human
ccagcuuucccaagucccuuu

SEQ ID NO: 486222 - RNA, 22 nt, Human
agauaauuugaguaaauuaauu

SEQ ID NO: 486223 - RNA, 22 nt, Human
cuuuggaauaauuuccuggagu

SEQ ID NO: 486224 - RNA, 22 nt, Human
uguaaaaccaaaucaaucuagu

SEQ ID NO: 486225 - RNA, 22 nt, Human
ggcuuccuggagaaggucugag

SEQ ID NO: 486226 - RNA, 22 nt, Human
cagccucucuguaucucaggau

SEQ ID NO: 486227 - RNA, 19 nt, Human
gggcuucugggaucaagag

SEQ ID NO: 486228 - RNA, 22 nt, Human
gcagcuguguaaugagcccaca

SEQ ID NO: 486229 - RNA, 22 nt, Human
uaguaucuauuaguaacaagag

SEQ ID NO: 486230 - RNA, 22 nt, Human
gcagaggccaggccaccagcaa

SEQ ID NO: 486231 - RNA, 21 nt, Human
agcagaggcugccuggugacu

SEQ ID NO: 486232 - RNA, 22 nt, Human
aaacagcugucauuguuuuaaa

SEQ ID NO: 486233 - RNA, 22 nt, Human
cugccucugguuuuggucccug

SEQ ID NO: 486234 - RNA, 22 nt, Human
ucauuguuauguuuugcugucu

SEQ ID NO: 486235 - RNA, 22 nt, Human
uguacaguaggaacuuguuauu

SEQ ID NO: 486236 - RNA, 22 nt, Human
ccagggcaauaggaacacuuuu

SEQ ID NO: 486237 - RNA, 22 nt, Human
guccuggguccccgcaggucag

SEQ ID NO: 486238 - RNA, 22 nt, Human
ggcagcagggcugucucccuac

SEQ ID NO: 486239 - RNA, 22 nt, Human
cggggacacacuggcagcuccu

SEQ ID NO: 486240 - RNA, 22 nt, Human
cuguggugagcaacugacugaa

SEQ ID NO: 486241 - RNA, 22 nt, Human
auguagcaucuauccugauaaa

SEQ ID NO: 486242 - RNA, 22 nt, Human
agauuugcggcuuuacuuugca

SEQ ID NO: 486243 - RNA, 22 nt, Human
ugggcaggauaauaucucaugu

SEQ ID NO: 486244 - RNA, 22 nt, Human
aguccccucuaacccaacuuua

SEQ ID NO: 486245 - RNA, 22 nt, Human
uguggccaccagagcugcuauu

SEQ ID NO: 486246 - RNA, 22 nt, Human
uggaccugaagaauaggaagua

SEQ ID NO: 486247 - RNA, 21 nt, Human
gggccuggcugcgcaggacgg

SEQ ID NO: 486248 - RNA, 22 nt, Human
gaacuguaguuaauacuacaca

SEQ ID NO: 486249 - RNA, 22 nt, Human
ucagcugaguucuagagcacuc

SEQ ID NO: 486250 - RNA, 22 nt, Human
gcacacaggcaguuuccagcca

SEQ ID NO: 486251 - RNA, 22 nt, Human
uggcagaguuggagguggaaga

SEQ ID NO: 486252 - RNA, 23 nt, Human
aaauauucuuuuuuaguaagugc

SEQ ID NO: 486253 - RNA, 22 nt, Human
caggccucaggggcucaggcug

SEQ ID NO: 486254 - RNA, 22 nt, Human
ucagaggacgcacuaggguugu

SEQ ID NO: 486255 - RNA, 22 nt, Human
agggcuccuccccggccuccac

SEQ ID NO: 486256 - RNA, 22 nt, Human
gagggugguggcuuaaggugcu

SEQ ID NO: 486257 - RNA, 20 nt, Human
agcaggaaaagugccagucu

SEQ ID NO: 486258 - RNA, 22 nt, Human
uacaguagacaauguuaguaug

SEQ ID NO: 486259 - RNA, 22 nt, Human
caagaacaguuugccaaauugg

SEQ ID NO: 486260 - RNA, 22 nt, Human
ugacaugcuuguuuuccuugaa

SEQ ID NO: 486261 - RNA, 22 nt, Human
gcucucuggaggccauggacag

SEQ ID NO: 486262 - RNA, 22 nt, Human
gagagcugcagccgagaggggg

SEQ ID NO: 486263 - RNA, 22 nt, Human
ucagagagaaauaguuuuugac

SEQ ID NO: 486264 - RNA, 22 nt, Human
ucccagggacaccaagcuguuu

SEQ ID NO: 486265 - RNA, 22 nt, Human
gcccugugcgacucuagagguu

SEQ ID NO: 486266 - RNA, 22 nt, Human
agagccugucugccuuucuacc

SEQ ID NO: 486267 - RNA, 23 nt, Human
aggcagcagguuguccaggguga

SEQ ID NO: 486268 - RNA, 22 nt, Human
caguuucuguuuuaaauagcag

SEQ ID NO: 486269 - RNA, 22 nt, Human
uggaagugcucuucugaccaac

SEQ ID NO: 486270 - RNA, 22 nt, Human
ugcaggugcguuuucaagccuc

SEQ ID NO: 486271 - RNA, 22 nt, Human
gcaugagggggguuaggaaguu

SEQ ID NO: 486272 - RNA, 22 nt, Human
ccuccuggugggcgcuucuggc

SEQ ID NO: 486273 - RNA, 22 nt, Human
gugcaugugcauccauguguac

SEQ ID NO: 486274 - RNA, 22 nt, Human
gcaggggcuaaggacacagaga

SEQ ID NO: 486275 - RNA, 22 nt, Human
gaauuguacgcuuuacauaggu

SEQ ID NO: 486276 - RNA, 22 nt, Human
cauuuguaggaugcuucuuguu

SEQ ID NO: 486277 - RNA, 19 nt, Human
accaggcuuauggucagug

SEQ ID NO: 486278 - RNA, 22 nt, Human
cuccucacacccacugcaacca

SEQ ID NO: 486279 - RNA, 22 nt, Human
ugcagcccuuccuuccucuggg

SEQ ID NO: 486280 - RNA, 22 nt, Human
uucacauaaugauacaaagcuu

SEQ ID NO: 486281 - RNA, 22 nt, Human
ugaggaagcaaaggcuugugug

SEQ ID NO: 486282 - RNA, 22 nt, Human
cagagcuguccaaacccugaca

SEQ ID NO: 486283 - RNA, 22 nt, Human
cuuccucugcggcgccgggcgc

SEQ ID NO: 486284 - RNA, 22 nt, Human
ucccaaggugcucggcaacagg

SEQ ID NO: 486285 - RNA, 22 nt, Human
gggcacagcugcuacccagugc

SEQ ID NO: 486286 - RNA, 22 nt, Human
gaguuauuuguagggauuauau

SEQ ID NO: 486287 - RNA, 22 nt, Human
uccugcagaccucagucagguc

SEQ ID NO: 486288 - RNA, 22 nt, Human
caaaggcaacauauacuuguuu

SEQ ID NO: 486289 - RNA, 22 nt, Human
cucaaggacuuauucaugccug

SEQ ID NO: 486290 - RNA, 22 nt, Human
cucagagcaaugaacaugcaaa

SEQ ID NO: 486291 - RNA, 22 nt, Human
uuacaaguauuuaagaugcugu

SEQ ID NO: 486292 - RNA, 22 nt, Human
gcccagcuuuuugaggcaggca

SEQ ID NO: 486293 - RNA, 22 nt, Human
ccccagccagcaggaccucuga

SEQ ID NO: 486294 - RNA, 18 nt, Human
agaaggagcuaugggcag

SEQ ID NO: 486295 - RNA, 22 nt, Human
ucugucacccaggcuggagugc

SEQ ID NO: 486296 - RNA, 22 nt, Human
cugcagaguggagccucggcug

SEQ ID NO: 486297 - RNA, 22 nt, Human
ugccacacuccccugcugcagu

SEQ ID NO: 486298 - RNA, 22 nt, Human
gcagagcuccccaagacaccaa

SEQ ID NO: 486299 - RNA, 22 nt, Human
ucagggcauccauugccuguug

SEQ ID NO: 486300 - RNA, 22 nt, Human
ucagggcauucaagaggccugg

SEQ ID NO: 486301 - RNA, 22 nt, Human
uggagcagggcaucacugugcg

SEQ ID NO: 486302 - RNA, 22 nt, Human
gaaaucugaacucuguauccuu

SEQ ID NO: 486303 - RNA, 22 nt, Human
gcaggcaguugcaguuuucuag

SEQ ID NO: 486304 - RNA, 22 nt, Human
ggagcagagcucuucaucugca

SEQ ID NO: 486305 - RNA, 22 nt, Human
gaaaugcagauucugauucugu

SEQ ID NO: 486306 - RNA, 22 nt, Human
aagcagggugucuugacccaug

SEQ ID NO: 486307 - RNA, 22 nt, Human
uauuucugucagccagauaugg

SEQ ID NO: 486308 - RNA, 22 nt, Human
ggcccugugguuuugcaaaguc

SEQ ID NO: 486309 - RNA, 22 nt, Human
gcuggcagagagcuggugagga

SEQ ID NO: 486310 - RNA, 22 nt, Human
cugccucugcgucccacagagu

SEQ ID NO: 486311 - RNA, 22 nt, Human
gaagccaguacugugcucugca

SEQ ID NO: 486312 - RNA, 22 nt, Human
cugagccauccauaccagcuua

SEQ ID NO: 486313 - RNA, 22 nt, Human
ugaaagcacucacuucugcucu

SEQ ID NO: 486314 - RNA, 22 nt, Human
guggcgcagaggguggcagaga

SEQ ID NO: 486315 - RNA, 22 nt, Human
ucagaagcauguggggagccug

SEQ ID NO: 486316 - RNA, 22 nt, Human
augaggcacaucacagccaaug

SEQ ID NO: 486317 - RNA, 22 nt, Human
ucagagagguuggugauaagaa

SEQ ID NO: 486318 - RNA, 22 nt, Human
agcugcugaaugacacugcaag

SEQ ID NO: 486319 - RNA, 22 nt, Human
uucuacuuuggacauaaaggac

SEQ ID NO: 486320 - RNA, 22 nt, Human
ucccaggcuggggccaggugac

SEQ ID NO: 486321 - RNA, 22 nt, Human
guuauugcaguauagaggucua

SEQ ID NO: 486322 - RNA, 22 nt, Human
agugccuugugugugggcagcc

SEQ ID NO: 486323 - RNA, 22 nt, Human
ucaccagucuuucuuaccauug

SEQ ID NO: 486324 - RNA, 22 nt, Human
gcagcuggagcaucuucucauc

SEQ ID NO: 486325 - RNA, 22 nt, Human
acagaggaagcauauagcacaa

SEQ ID NO: 486326 - RNA, 17 nt, Human
gcuuuggaaggguagac

SEQ ID NO: 486327 - RNA, 22 nt, Human
augcacccagugucuggacuau

SEQ ID NO: 486328 - RNA, 22 nt, Human
ucagagcugcccaugcaagggg

SEQ ID NO: 486329 - RNA, 22 nt, Human
acuuuggggaacuuuucuccuc

SEQ ID NO: 486330 - RNA, 22 nt, Human
gugucccaaucuacuuuucccu

SEQ ID NO: 486331 - RNA, 22 nt, Human
accagagcuuacaugcuagaaa

SEQ ID NO: 486332 - RNA, 21 nt, Human
ucauuugugaucugauuucca

SEQ ID NO: 486333 - RNA, 22 nt, Human
cagcuggcgggcagagccgcca

SEQ ID NO: 486334 - RNA, 22 nt, Human
gccagcucagaugcaggaagga

SEQ ID NO: 486335 - RNA, 22 nt, Human
gcuggucacucugggagcugcu

SEQ ID NO: 486336 - RNA, 22 nt, Human
uuugggaaacuuaggggucaga

SEQ ID NO: 486337 - RNA, 22 nt, Human
agcagggccuggcacuccuggg

SEQ ID NO: 486338 - RNA, 22 nt, Human
aaagaaauagauggcauuuaaa

SEQ ID NO: 486339 - RNA, 22 nt, Human
cagugauggauauggagaaguc

SEQ ID NO: 486340 - RNA, 22 nt, Human
gggccuccggggugagcugugg

SEQ ID NO: 486341 - RNA, 22 nt, Human
gcucacugccauucucuagaug

SEQ ID NO: 486342 - RNA, 22 nt, Human
gacagggcaagacucugucuaa

SEQ ID NO: 486343 - RNA, 22 nt, Human
uccagggaugguaaugagcagu

SEQ ID NO: 486344 - RNA, 22 nt, Human
ugucccaguuuugcagguuaga

SEQ ID NO: 486345 - RNA, 23 nt, Human
aagcugccuucgcaguuggucug

SEQ ID NO: 486346 - RNA, 21 nt, Human
agcucagccgggcacaguggc

SEQ ID NO: 486347 - RNA, 22 nt, Human
aguuauucauuuauucuguaca

SEQ ID NO: 486348 - RNA, 22 nt, Human
uuucuacaguacugauuucaua

SEQ ID NO: 486349 - RNA, 22 nt, Human
gugcaugugucuuuauaguagc

SEQ ID NO: 486350 - RNA, 22 nt, Human
uugcagggaccugcagaaagcu

SEQ ID NO: 486351 - RNA, 22 nt, Human
cuggcugcaggaaggagugggc

SEQ ID NO: 486352 - RNA, 21 nt, Human
ugucagaaauaagcaugugau

SEQ ID NO: 486353 - RNA, 22 nt, Human
gaaggagagggucaaggauaau

SEQ ID NO: 486354 - RNA, 22 nt, Human
agcugaggcucugagagggaag

SEQ ID NO: 486355 - RNA, 22 nt, Human
guugaaaguggagaaccugguu

SEQ ID NO: 486356 - RNA, 22 nt, Human
uacaguaucuucuggcaagcau

SEQ ID NO: 486357 - RNA, 22 nt, Human
agcgggugcugugucagcccuc

SEQ ID NO: 486358 - RNA, 20 nt, Human
uuacucaguuccugccaugc

SEQ ID NO: 486359 - RNA, 22 nt, Human
cuuccugguuugaagcucgccg

SEQ ID NO: 486360 - RNA, 22 nt, Human
agggcugguauguccaugaaag

SEQ ID NO: 486361 - RNA, 22 nt, Human
gagacauggcaaaagcacuggu

SEQ ID NO: 486362 - RNA, 22 nt, Human
acuuagaacaggcagaauucca

SEQ ID NO: 486363 - RNA, 22 nt, Human
auacagaaaaugaugcagaguu

SEQ ID NO: 486364 - RNA, 22 nt, Human
ugucaugccaccguuucccaga

SEQ ID NO: 486365 - RNA, 22 nt, Human
guuauguauugggaaauccaag

SEQ ID NO: 486366 - RNA, 22 nt, Human
ucugaggcauacccaggccccc

SEQ ID NO: 486367 - RNA, 22 nt, Human
aggcugcuucagcugcagggag

SEQ ID NO: 486368 - RNA, 19 nt, Human
ggcucagggcgcugccgcc

SEQ ID NO: 486369 - RNA, 22 nt, Human
uuguuuguaugcugagaagaau

SEQ ID NO: 486370 - RNA, 22 nt, Human
gucacuguuuccuauuauauuu

SEQ ID NO: 486371 - RNA, 22 nt, Human
aacagaauugcugcugccaaug

SEQ ID NO: 486372 - RNA, 22 nt, Human
ugagccaggcucaagugauccu

SEQ ID NO: 486373 - RNA, 22 nt, Human
aggggagccccugguccuggug

SEQ ID NO: 486374 - RNA, 22 nt, Human
agacuguacuuucugcagcucu

SEQ ID NO: 486375 - RNA, 22 nt, Human
agaggccuuucuguugagugaa

SEQ ID NO: 486376 - RNA, 22 nt, Human
cuccagggcagcauggcagugg

SEQ ID NO: 486377 - RNA, 22 nt, Human
ggggcugggauuugaacccagg

SEQ ID NO: 486378 - RNA, 22 nt, Human
gggagccaugcuggucuucuuu

SEQ ID NO: 486379 - RNA, 22 nt, Human
agaacugguggugaucaguuau

SEQ ID NO: 486380 - RNA, 22 nt, Human
gaggaagcugcguggcauuuca

SEQ ID NO: 486381 - RNA, 22 nt, Human
aaguuuuaacaaguacuuacua

SEQ ID NO: 486382 - RNA, 22 nt, Human
gagcucccaggccccagcaagg

SEQ ID NO: 486383 - RNA, 22 nt, Human
aucuggcuggauucuuagcguu

SEQ ID NO: 486384 - RNA, 22 nt, Human
ugucaugcuuauguuacauacu

SEQ ID NO: 486385 - RNA, 22 nt, Human
gacagguggggaaacuaaggua

SEQ ID NO: 486386 - RNA, 22 nt, Human
ggcuuccuuucacuacccucag

SEQ ID NO: 486387 - RNA, 22 nt, Human
cugaaacauugcaauaacaaag

SEQ ID NO: 486388 - RNA, 22 nt, Human
cagcagcuucuguugaucagaa

SEQ ID NO: 486389 - RNA, 23 nt, Human
aguuccagaaaaaugcucaagca

SEQ ID NO: 486390 - RNA, 22 nt, Human
uucuggagcuaaaguccacucu

SEQ ID NO: 486391 - RNA, 22 nt, Human
uugaauucauuucucauugagu

SEQ ID NO: 486392 - RNA, 22 nt, Human
gcucaggaaauaguuuaguguu

SEQ ID NO: 486393 - RNA, 22 nt, Human
ugaaaucugcaugcaaaguccu

SEQ ID NO: 486394 - RNA, 22 nt, Human
ggaggaugagcuacgaggagcu

SEQ ID NO: 486395 - RNA, 22 nt, Human
gaagcagcugccagagaugucu

SEQ ID NO: 486396 - RNA, 22 nt, Human
ggagcuggcuacagagaacucc

SEQ ID NO: 486397 - RNA, 22 nt, Human
caguacuugggggguucuaagu

SEQ ID NO: 486398 - RNA, 22 nt, Human
uggggcuccuccuggcaggagg

SEQ ID NO: 486399 - RNA, 22 nt, Human
ucaggacagccagggugcagac

SEQ ID NO: 486400 - RNA, 22 nt, Human
cugaggcagagggcagaccaga

SEQ ID NO: 486401 - RNA, 22 nt, Human
uucaagaugucuucacaauagu

SEQ ID NO: 486402 - RNA, 22 nt, Human
cugggccuggcguuccaggcug

SEQ ID NO: 486403 - RNA, 22 nt, Human
gggaggcuggcucuggccacag

SEQ ID NO: 486404 - RNA, 22 nt, Human
uccugagauguggagcuccaug

SEQ ID NO: 486405 - RNA, 22 nt, Human
aagcagaauuucccacuaguug

SEQ ID NO: 486406 - RNA, 22 nt, Human
cagggcugcuggccgugcccuc

SEQ ID NO: 486407 - RNA, 22 nt, Human
cucucugguacauagaguuugg

SEQ ID NO: 486408 - RNA, 22 nt, Human
aguggcagagugcacucaggca

SEQ ID NO: 486409 - RNA, 22 nt, Human
ccuccaaguuugacucaggaca

SEQ ID NO: 486410 - RNA, 20 nt, Human
aaaggaauauaugaaguaua

SEQ ID NO: 486411 - RNA, 22 nt, Human
gccagcugguaggcaccuagcc

SEQ ID NO: 486412 - RNA, 22 nt, Human
cuggccucauagccaagcugug

SEQ ID NO: 486413 - RNA, 23 nt, Human
cauggcagcaagagcucauggcc

SEQ ID NO: 486414 - RNA, 22 nt, Human
ugaggccagucucaucacaggc

SEQ ID NO: 486415 - RNA, 21 nt, Human
aggucccagguuugggcagca

SEQ ID NO: 486416 - RNA, 22 nt, Human
aaagauuugaaauuaggcauca

SEQ ID NO: 486417 - RNA, 22 nt, Human
guccagggaaauagcgacaggg

SEQ ID NO: 486418 - RNA, 22 nt, Human
gccagguguaguggccacaccu

SEQ ID NO: 486419 - RNA, 22 nt, Human
aggugucuucagggugagacag

SEQ ID NO: 486420 - RNA, 22 nt, Human
agccagcaggugagugcagccu

SEQ ID NO: 486421 - RNA, 22 nt, Human
uugaagcagcucaggaggcuua

SEQ ID NO: 486422 - RNA, 22 nt, Human
gcuggcuguguuucaucucuga

SEQ ID NO: 486423 - RNA, 22 nt, Human
ggcagauggaagaggcuggguc

SEQ ID NO: 486424 - RNA, 22 nt, Human
guugaaugaaucauucuaugua

SEQ ID NO: 486425 - RNA, 17 nt, Human
agggucaggugaaguuc

SEQ ID NO: 486426 - RNA, 22 nt, Human
uacagaaaucacaucgcuuuga

SEQ ID NO: 486427 - RNA, 22 nt, Human
ggccaggcugguuccuugaccu

SEQ ID NO: 486428 - RNA, 22 nt, Human
gguaacaguauguagaguaaga

SEQ ID NO: 486429 - RNA, 20 nt, Human
agcuggagaagggcccuucc

SEQ ID NO: 486430 - RNA, 22 nt, Human
caagaugaucccugaaggcagc

SEQ ID NO: 486431 - RNA, 22 nt, Human
gccagcccagcuccaggggaaa

SEQ ID NO: 486432 - RNA, 22 nt, Human
ccagcuucucucugaugcagcu

SEQ ID NO: 486433 - RNA, 22 nt, Human
gagccugagugcugccuccccu

SEQ ID NO: 486434 - RNA, 22 nt, Human
ccaguccagugccaugcauggc

SEQ ID NO: 486435 - RNA, 22 nt, Human
aggcugaggcggguagaucacc

SEQ ID NO: 486436 - RNA, 22 nt, Human
acaggcagguaauuuacauauu

SEQ ID NO: 486437 - RNA, 22 nt, Human
gcugucuggguugagggcccug

SEQ ID NO: 486438 - RNA, 22 nt, Human
gcagccagccccucugaccucu

SEQ ID NO: 486439 - RNA, 22 nt, Human
accugccuauggagccacaugg

SEQ ID NO: 486440 - RNA, 22 nt, Human
cuauugaaaguguacaauucaa

SEQ ID NO: 486441 - RNA, 22 nt, Human
gcaguggauggccagcaggggc

SEQ ID NO: 486442 - RNA, 22 nt, Human
ugaaggccagcucuuuaucagc

SEQ ID NO: 486443 - RNA, 23 nt, Human
gaggcagcuccugcagugcccug

SEQ ID NO: 486444 - RNA, 22 nt, Human
gccaggcuggucuugaacuccu

SEQ ID NO: 486445 - RNA, 22 nt, Human
gcuggccuccugcuagauggaa

SEQ ID NO: 486446 - RNA, 22 nt, Human
gggagccaaggagagaggccuu

SEQ ID NO: 486447 - RNA, 22 nt, Human
ucagaggauagaaauacuuauu

SEQ ID NO: 486448 - RNA, 22 nt, Human
ugucucagaauggcucauaaua

SEQ ID NO: 486449 - RNA, 22 nt, Human
caggcagaaggaaguaccaggc

SEQ ID NO: 486450 - RNA, 22 nt, Human
caggccuccacuccacgcagac

SEQ ID NO: 486451 - RNA, 22 nt, Human
ucccuggagauaacuucuggga

SEQ ID NO: 486452 - RNA, 22 nt, Human
caagcuccuuacauccacaggg

SEQ ID NO: 486453 - RNA, 22 nt, Human
gaggcucagggaaacagcgcag

SEQ ID NO: 486454 - RNA, 22 nt, Human
agggcagaaauauugauacugu

SEQ ID NO: 486455 - RNA, 22 nt, Human
acucaggagggaucagcuauca

SEQ ID NO: 486456 - RNA, 22 nt, Human
caggguggggaaauagcgcccu

SEQ ID NO: 486457 - RNA, 20 nt, Human
uucuggaggcuacaagucug

SEQ ID NO: 486458 - RNA, 22 nt, Human
acauuuaaauaccuauguuucu

SEQ ID NO: 486459 - RNA, 22 nt, Human
ugcugaggagguggcugugcuu

SEQ ID NO: 486460 - RNA, 22 nt, Human
ucaggaucggccuuuuuuuaag

SEQ ID NO: 486461 - RNA, 22 nt, Human
aguuuccaaauauuguuuuagc

SEQ ID NO: 486462 - RNA, 22 nt, Human
aucuggcugcugugcuuaagcu

SEQ ID NO: 486463 - RNA, 22 nt, Human
gcaggccuccccugcuggagcu

SEQ ID NO: 486464 - RNA, 22 nt, Human
uucaaugagcccaagaacguga

SEQ ID NO: 486465 - RNA, 22 nt, Human
aucuggcuuuuaccccacggcc

SEQ ID NO: 486466 - RNA, 21 nt, Human
ucucugggcccuccugugggg

SEQ ID NO: 486467 - RNA, 22 nt, Human
aagaggcagcccgcugaggcug

SEQ ID NO: 486468 - RNA, 22 nt, Human
uuaacagauguuuauggagcau

SEQ ID NO: 486469 - RNA, 22 nt, Human
ugaaaucuacccuauucagggu

SEQ ID NO: 486470 - RNA, 22 nt, Human
aagggcucugugugccucccca

SEQ ID NO: 486471 - RNA, 22 nt, Human
ucuggcucuaacuaggcaucag

SEQ ID NO: 486472 - RNA, 22 nt, Human
agcagggguaacagaaggaaag

SEQ ID NO: 486473 - RNA, 21 nt, Human
gccugccugcgugacccucuu

SEQ ID NO: 486474 - RNA, 22 nt, Human
auaugcaagcacauagaauacu

SEQ ID NO: 486475 - RNA, 22 nt, Human
cauugcuuugugcauauuuaaa

SEQ ID NO: 486476 - RNA, 21 nt, Human
ugaggcaggggugcuuuuguc

SEQ ID NO: 486477 - RNA, 22 nt, Human
gaggcagcgggucaggaccgug

SEQ ID NO: 486478 - RNA, 22 nt, Human
ccacugucuuuuccaggcugaa

SEQ ID NO: 486479 - RNA, 22 nt, Human
gcucuccaaacccuguggcuuu

SEQ ID NO: 486480 - RNA, 21 nt, Human
aggcuguccuuugccagcccu

SEQ ID NO: 486481 - RNA, 21 nt, Human
gcugcucgagauccagugcuu

SEQ ID NO: 486482 - RNA, 22 nt, Human
cagaggguugaugugaggcuua

SEQ ID NO: 486483 - RNA, 22 nt, Human
uagcuuuaggaugguucucuug

SEQ ID NO: 486484 - RNA, 22 nt, Human
auugcagcuggucaggguaauu

SEQ ID NO: 486485 - RNA, 19 nt, Human
acacagggcuagaguuaca

SEQ ID NO: 486486 - RNA, 22 nt, Human
gccugccucaaaaucccaguuc

SEQ ID NO: 486487 - RNA, 22 nt, Human
aaggcaggagcuguaucuuauu

SEQ ID NO: 486488 - RNA, 19 nt, Human
caugagcugcucacuuccc

SEQ ID NO: 486489 - RNA, 22 nt, Human
cagggcucuucaucacacagua

SEQ ID NO: 486490 - RNA, 22 nt, Human
gcugucacacauggccccagcu

SEQ ID NO: 486491 - RNA, 22 nt, Human
caugggcaguuggcagggcuca

SEQ ID NO: 486492 - RNA, 22 nt, Human
gccuuaggggucagacagagcu

SEQ ID NO: 486493 - RNA, 22 nt, Human
auggauaauggugauaguugca

SEQ ID NO: 486494 - RNA, 22 nt, Human
aauuaggaauaaaugaguacuu

SEQ ID NO: 486495 - RNA, 22 nt, Human
auccagggauaaaaguaagguu

SEQ ID NO: 486496 - RNA, 22 nt, Human
uauuucugauugcucaugaggc

SEQ ID NO: 486497 - RNA, 22 nt, Human
caggggcuguggcacauggugu

SEQ ID NO: 486498 - RNA, 21 nt, Human
uccuucaguucugcacuuucu

SEQ ID NO: 486499 - RNA, 22 nt, Human
cagagagagucaaaucuuugcu

SEQ ID NO: 486500 - RNA, 22 nt, Human
gggcuggaucuccugcaggcag

SEQ ID NO: 486501 - RNA, 22 nt, Human
gggcuggcucugucuagaaagg

SEQ ID NO: 486502 - RNA, 22 nt, Human
uuccucucaacaugccugccgg

SEQ ID NO: 486503 - RNA, 18 nt, Human
acaguaaagaaaggaauu

SEQ ID NO: 486504 - RNA, 22 nt, Human
auuuuccagccuuucuagaacu

SEQ ID NO: 486505 - RNA, 22 nt, Human
uugauuucuuacucuuccaagg

SEQ ID NO: 486506 - RNA, 22 nt, Human
gccaggcagagccccgugcagc

SEQ ID NO: 486507 - RNA, 22 nt, Human
ugggcaaguaucggacucugag

SEQ ID NO: 486508 - RNA, 22 nt, Human
ggcugcagggcagcuggugugg

SEQ ID NO: 486509 - RNA, 22 nt, Human
gcaggaugggagcuucacuuug

SEQ ID NO: 486510 - RNA, 22 nt, Human
gagccugccucuagucucuaga

SEQ ID NO: 486511 - RNA, 22 nt, Human
caggaaugaggucguaaguguc

SEQ ID NO: 486512 - RNA, 23 nt, Human
agccacuucuaucuugcuccugg

SEQ ID NO: 486513 - RNA, 22 nt, Human
agccagagcugaugucauucuc

SEQ ID NO: 486514 - RNA, 22 nt, Human
ccagagacgucggucagggcgc

SEQ ID NO: 486515 - RNA, 20 nt, Human
uccaggcagcucagaguguc

SEQ ID NO: 486516 - RNA, 22 nt, Human
uggaaggggagcuggaaagggg

SEQ ID NO: 486517 - RNA, 22 nt, Human
agagguagagguugcagugagc

SEQ ID NO: 486518 - RNA, 22 nt, Human
uagaaaugcccagauucugcua

SEQ ID NO: 486519 - RNA, 22 nt, Human
cacccacauggaaauucacagu

SEQ ID NO: 486520 - RNA, 22 nt, Human
ggccugcucugcagccucuaca

SEQ ID NO: 486521 - RNA, 22 nt, Human
caggcagcaucagucugcugua

SEQ ID NO: 486522 - RNA, 22 nt, Human
agccaggcgcaguggcuuaugc

SEQ ID NO: 486523 - RNA, 22 nt, Human
uuagugucuucuucauccucug

SEQ ID NO: 486524 - RNA, 22 nt, Human
cucaugauguagcgaaugagaa

SEQ ID NO: 486525 - RNA, 22 nt, Human
gggacuucauagcuaggcacuu

SEQ ID NO: 486526 - RNA, 22 nt, Human
aagaaauguagagccuaguaaa

SEQ ID NO: 486527 - RNA, 22 nt, Human
agcugcccccagggcugugcuu

SEQ ID NO: 486528 - RNA, 20 nt, Human
gaggccucagccucagcucc

SEQ ID NO: 486529 - RNA, 22 nt, Human
ucucugagcaugccauauugcu

SEQ ID NO: 486530 - RNA, 22 nt, Human
caguggcaugguugacugcagu

SEQ ID NO: 486531 - RNA, 21 nt, Human
ccagccucagaucagggagcu

SEQ ID NO: 486532 - RNA, 18 nt, Human
agcuggcccuggcugccg

SEQ ID NO: 486533 - RNA, 22 nt, Human
caguauuuucaggauuuggaag

SEQ ID NO: 486534 - RNA, 22 nt, Human
auguagcagauauuugugcaca

SEQ ID NO: 486535 - RNA, 22 nt, Human
cagcagagcugugugggaaggg

SEQ ID NO: 486536 - RNA, 22 nt, Human
uauguacauaacaugaaaugca

SEQ ID NO: 486537 - RNA, 22 nt, Human
guaucuuucccaccaaucacaa

SEQ ID NO: 486538 - RNA, 22 nt, Human
ugaggcagcuuuuucugugugu

SEQ ID NO: 486539 - RNA, 22 nt, Human
cagguaagagacggauuggccc

SEQ ID NO: 486540 - RNA, 22 nt, Human
uccuuccuggggucucugcugc

SEQ ID NO: 486541 - RNA, 20 nt, Human
aucagcaacugccacucagu

SEQ ID NO: 486542 - RNA, 22 nt, Human
uggcugucagcugccuggugcg

SEQ ID NO: 486543 - RNA, 23 nt, Human
caguacuuaguguagcguuaauu

SEQ ID NO: 486544 - RNA, 23 nt, Human
gccucuggagccccagugcucag

SEQ ID NO: 486545 - RNA, 22 nt, Human
ccuggcaguggugaagaagagg

SEQ ID NO: 486546 - RNA, 22 nt, Human
caguccuggggaccaggcugag

SEQ ID NO: 486547 - RNA, 22 nt, Human
aaagaacaauguggaaucuccu

SEQ ID NO: 486548 - RNA, 22 nt, Human
guguguccucaguaguggcaug

SEQ ID NO: 486549 - RNA, 22 nt, Human
gcaggguccauggaggcagccc

SEQ ID NO: 486550 - RNA, 19 nt, Human
gggcagaauggcaucucag

SEQ ID NO: 486551 - RNA, 22 nt, Human
guuauguaucuugauugggugg

SEQ ID NO: 486552 - RNA, 22 nt, Human
caggugggcuugggagaacacu

SEQ ID NO: 486553 - RNA, 22 nt, Human
cuggcuuccaugcuguaguggc

SEQ ID NO: 486554 - RNA, 22 nt, Human
ucugguuagccaauaaugccaa

SEQ ID NO: 486555 - RNA, 22 nt, Human
uauaaaguuucgaaagauguau

SEQ ID NO: 486556 - RNA, 22 nt, Human
ccuggagcuuggucacgcugcg

SEQ ID NO: 486557 - RNA, 22 nt, Human
aggcuggcuuggcucuccugug

SEQ ID NO: 486558 - RNA, 22 nt, Human
ccaccagcuuugccacccugcu

SEQ ID NO: 486559 - RNA, 22 nt, Human
gguuccacgguguuuggaggca

SEQ ID NO: 486560 - RNA, 22 nt, Human
agucccagccuaggcugugcug

SEQ ID NO: 486561 - RNA, 22 nt, Human
augaggcagauguugcaugagg

SEQ ID NO: 486562 - RNA, 22 nt, Human
ggucucaggagacuggagagca

SEQ ID NO: 486563 - RNA, 19 nt, Human
uagucuuuauucuuaauuu

SEQ ID NO: 486564 - RNA, 22 nt, Human
cccuggagcaucucugcugucu

SEQ ID NO: 486565 - RNA, 19 nt, Human
uuacaucugcaacacuggu

SEQ ID NO: 486566 - RNA, 22 nt, Human
gggaaggagccugcuugcuaga

SEQ ID NO: 486567 - RNA, 22 nt, Human
gcagaugaggaagcuaaugcug

SEQ ID NO: 486568 - RNA, 22 nt, Human
uguacuuccccaaugacagcac

SEQ ID NO: 486569 - RNA, 22 nt, Human
aaguugagaugucauaggagac

SEQ ID NO: 486570 - RNA, 22 nt, Human
gcugcaggcgccugcggucucu

SEQ ID NO: 486571 - RNA, 22 nt, Human
gaggcagagacuccaccuucag

SEQ ID NO: 486572 - RNA, 23 nt, Human
ugcuucucugcuugacaguucug

SEQ ID NO: 486573 - RNA, 22 nt, Human
uuagaaaggaaucuucauuuca

SEQ ID NO: 486574 - RNA, 22 nt, Human
gaauuaguguugaaaucagggc

SEQ ID NO: 486575 - RNA, 22 nt, Human
accccagcccugcuucugggag

SEQ ID NO: 486576 - RNA, 22 nt, Human
caggggcuagcacuuaauguuu

SEQ ID NO: 486577 - RNA, 22 nt, Human
cucauggauauaagaacuguuu

SEQ ID NO: 486578 - RNA, 18 nt, Human
ccugcagcccaggaggcc

SEQ ID NO: 486579 - RNA, 22 nt, Human
gcagggcucaacaggacacccc

SEQ ID NO: 486580 - RNA, 22 nt, Human
uugaauaguguuuucaguauac

SEQ ID NO: 486581 - RNA, 22 nt, Human
aaaugucuuuaucucauguaac

SEQ ID NO: 486582 - RNA, 21 nt, Human
uccucagggccccagagcacu

SEQ ID NO: 486583 - RNA, 20 nt, Human
cagaccugcacccacuucga

SEQ ID NO: 486584 - RNA, 22 nt, Human
cagcaaucgggugauaugcaau

SEQ ID NO: 486585 - RNA, 22 nt, Human
gcucccagaaccaaggcugggg

SEQ ID NO: 486586 - RNA, 17 nt, Human
ucucuuucccuuucugc

SEQ ID NO: 486587 - RNA, 22 nt, Human
ucaggugguccuaagugccauc

SEQ ID NO: 486588 - RNA, 22 nt, Human
gagacaaaaguuggagugcaag

SEQ ID NO: 486589 - RNA, 22 nt, Human
aucagagacaaaaccagcacuu

SEQ ID NO: 486590 - RNA, 22 nt, Human
ugccacacagucugguagaaua

SEQ ID NO: 486591 - RNA, 22 nt, Human
aguggcaggcggagauguagga

SEQ ID NO: 486592 - RNA, 22 nt, Human
gcucuccacugaccacggggca

SEQ ID NO: 486593 - RNA, 18 nt, Human
cagcugccagcucaugga

SEQ ID NO: 486594 - RNA, 22 nt, Human
cugcccugcuugaugacagcga

SEQ ID NO: 486595 - RNA, 22 nt, Human
aggcucugcagugcuggaggac

SEQ ID NO: 486596 - RNA, 22 nt, Human
gccuuccugcagcucugagcgu

SEQ ID NO: 486597 - RNA, 22 nt, Human
uggagcugguaaacagugacau

SEQ ID NO: 486598 - RNA, 22 nt, Human
gaaucauuggaaccacauccaa

SEQ ID NO: 486599 - RNA, 22 nt, Human
cuuggcagauccaaaaaugaca

SEQ ID NO: 486600 - RNA, 22 nt, Human
gaagcagcuuucuggugaggag

SEQ ID NO: 486601 - RNA, 23 nt, Human
agcagccauagggaagcaauaca

SEQ ID NO: 486602 - RNA, 22 nt, Human
aguacagaccugucucuuccug

SEQ ID NO: 486603 - RNA, 22 nt, Human
gaguguggugaacaggagcacc

SEQ ID NO: 486604 - RNA, 22 nt, Human
caagauggagaagcagcaaggg

SEQ ID NO: 486605 - RNA, 22 nt, Human
guugaaaguagaugcuauuugg

SEQ ID NO: 486606 - RNA, 22 nt, Human
agaaaauauucauugagaggcu

SEQ ID NO: 486607 - RNA, 18 nt, Human
gaggccugagaaccaggu

SEQ ID NO: 486608 - RNA, 22 nt, Human
gaggcucauugcauugugcauu

SEQ ID NO: 486609 - RNA, 22 nt, Human
aaaggccacacugcucuuucuc

SEQ ID NO: 486610 - RNA, 22 nt, Human
cagggguggcugcagcagaggu

SEQ ID NO: 486611 - RNA, 22 nt, Human
agagcugagcaccaagcauggu

SEQ ID NO: 486612 - RNA, 22 nt, Human
agugggcaggcagggugcgcag

SEQ ID NO: 486613 - RNA, 22 nt, Human
agcaaucaccaccucuauauuu

SEQ ID NO: 486614 - RNA, 23 nt, Human
uggcucugagagguucagaugcu

SEQ ID NO: 486615 - RNA, 22 nt, Human
gcagggugccgacuucagggau

SEQ ID NO: 486616 - RNA, 22 nt, Human
uuccaggaauucagcucucagu

SEQ ID NO: 486617 - RNA, 22 nt, Human
uggcccugacacgugguacugg

SEQ ID NO: 486618 - RNA, 21 nt, Human
ugcugccauagaccugaggga

SEQ ID NO: 486619 - RNA, 22 nt, Human
cucugaacucuugggcagcaug

SEQ ID NO: 486620 - RNA, 22 nt, Human
cagaguguuucuuugggugggu

SEQ ID NO: 486621 - RNA, 17 nt, Human
agccaggcauaugaagu

SEQ ID NO: 486622 - RNA, 22 nt, Human
cagagcagcagagcuuccaugg

SEQ ID NO: 486623 - RNA, 22 nt, Human
gcucugagauugagccuuuggu

SEQ ID NO: 486624 - RNA, 19 nt, Human
ugcagggcugcgccugggg

SEQ ID NO: 486625 - RNA, 22 nt, Human
uuggcagggccaggcucucucu

SEQ ID NO: 486626 - RNA, 22 nt, Human
gaagcagccacggggagacaga

SEQ ID NO: 486627 - RNA, 22 nt, Human
aggcccugggcaguucuguagc

SEQ ID NO: 486628 - RNA, 22 nt, Human
agacuguaauuuguggccuccu

SEQ ID NO: 486629 - RNA, 22 nt, Human
aaaaaugucauuauggaacuga

SEQ ID NO: 486630 - RNA, 22 nt, Human
auaugcauguacgugugcacaa

SEQ ID NO: 486631 - RNA, 19 nt, Human
gcgaggaagucacuguggc

SEQ ID NO: 486632 - RNA, 22 nt, Human
ucugcugcugagcacacuccua

SEQ ID NO: 486633 - RNA, 22 nt, Human
ccagcucucagcgggagacuca

SEQ ID NO: 486634 - RNA, 22 nt, Human
cacagggccuugugugacugca

SEQ ID NO: 486635 - RNA, 22 nt, Human
uagcuguguagacacucagagc

SEQ ID NO: 486636 - RNA, 22 nt, Human
uaauccaggguauucuaguuuc

SEQ ID NO: 486637 - RNA, 20 nt, Human
agggucagagagcgugagug

SEQ ID NO: 486638 - RNA, 22 nt, Human
gcaaggcagcgcggaguagcua

SEQ ID NO: 486639 - RNA, 22 nt, Human
ugagccagucugucugggugaa

SEQ ID NO: 486640 - RNA, 22 nt, Human
uucaggauccccaccgcguuua

SEQ ID NO: 486641 - RNA, 22 nt, Human
uggcucagaguucaucuuuuag

SEQ ID NO: 486642 - RNA, 22 nt, Human
uggagaagauuggucaccauuc

SEQ ID NO: 486643 - RNA, 22 nt, Human
gcauagucaguaggauucucaa

SEQ ID NO: 486644 - RNA, 22 nt, Human
agaagccauagucugggaggca

SEQ ID NO: 486645 - RNA, 22 nt, Human
ucugggagguaaccaugcugau

SEQ ID NO: 486646 - RNA, 22 nt, Human
uuucacauaucaacucuauccu

SEQ ID NO: 486647 - RNA, 22 nt, Human
cuccaguggcaaguccgggcgg

SEQ ID NO: 486648 - RNA, 19 nt, Human
gguagaagggaaguguuuu

SEQ ID NO: 486649 - RNA, 22 nt, Human
uguguauuucuggaacagacua

SEQ ID NO: 486650 - RNA, 22 nt, Human
gagcuuuaggagaaggagguca

SEQ ID NO: 486651 - RNA, 22 nt, Human
ccagcccugaacccugcugcau

SEQ ID NO: 486652 - RNA, 22 nt, Human
aggcccugcuuuccagagcuca

SEQ ID NO: 486653 - RNA, 22 nt, Human
acugcaggagacacagcugcug

SEQ ID NO: 486654 - RNA, 22 nt, Human
ugguuugcccacucgagugauu

SEQ ID NO: 486655 - RNA, 22 nt, Human
gucagaggggcagcugccaggc

SEQ ID NO: 486656 - RNA, 22 nt, Human
cagcagaggaaagcaaaucuaa

SEQ ID NO: 486657 - RNA, 22 nt, Human
cagggccacccucugcugggug

SEQ ID NO: 486658 - RNA, 22 nt, Human
ggaguucacugugcaggcucug

SEQ ID NO: 486659 - RNA, 20 nt, Human
acaauagauuugagcaaagu

SEQ ID NO: 486660 - RNA, 22 nt, Human
uuacaguaugaucaacuuuuca

SEQ ID NO: 486661 - RNA, 22 nt, Human
aaggaaccuggaguagagggag

SEQ ID NO: 486662 - RNA, 22 nt, Human
uagcauuucccaaaugcauuug

SEQ ID NO: 486663 - RNA, 22 nt, Human
gccuucaguagugucagcugua

SEQ ID NO: 486664 - RNA, 22 nt, Human
ucucuggagggcuccaggcggg

SEQ ID NO: 486665 - RNA, 22 nt, Human
acagaguaggugcugucgacug

SEQ ID NO: 486666 - RNA, 23 nt, Human
uuuauuuauuuaggcugagggau

SEQ ID NO: 486667 - RNA, 22 nt, Human
uuccauaauuaaguggagagaa

SEQ ID NO: 486668 - RNA, 20 nt, Human
agggucaguagcacagagcu

SEQ ID NO: 486669 - RNA, 18 nt, Human
guaggucaguaccaagca

SEQ ID NO: 486670 - RNA, 22 nt, Human
agccugcuucccuuugugcccc

SEQ ID NO: 486671 - RNA, 22 nt, Human
aaggcagaaagggaugugagug

SEQ ID NO: 486672 - RNA, 22 nt, Human
ccagcgcuucccaucagggagg

SEQ ID NO: 486673 - RNA, 22 nt, Human
ccagcagagucuaggaaggagg

SEQ ID NO: 486674 - RNA, 22 nt, Human
gagugucugaauuagagcacaa

SEQ ID NO: 486675 - RNA, 22 nt, Human
ggcucuggugcccuggcuccca

SEQ ID NO: 486676 - RNA, 19 nt, Human
uccuccuuacuuccucuug

SEQ ID NO: 486677 - RNA, 17 nt, Human
gagagcugcugcuuccg

SEQ ID NO: 486678 - RNA, 22 nt, Human
uggaaagaaaaacaggccauga

SEQ ID NO: 486679 - RNA, 22 nt, Human
acagcuuuguguuaaugggaag

SEQ ID NO: 486680 - RNA, 22 nt, Human
ggcuggagauaugucuggaaca

SEQ ID NO: 486681 - RNA, 22 nt, Human
gaaaaaugcuccaaaucugugg

SEQ ID NO: 486682 - RNA, 22 nt, Human
cagaggcauacucccagucuug

SEQ ID NO: 486683 - RNA, 22 nt, Human
aguggggacuuaugccagcauu

SEQ ID NO: 486684 - RNA, 22 nt, Human
auacaaagacaaaucucaaucu

SEQ ID NO: 486685 - RNA, 22 nt, Human
aggggugugcauccuggaggau

SEQ ID NO: 486686 - RNA, 22 nt, Human
uacaggcacugaaaugcuuauu

SEQ ID NO: 486687 - RNA, 22 nt, Human
agauggagaccuuggaugaacu

SEQ ID NO: 486688 - RNA, 22 nt, Human
ccagggcagggaccacgugucu

SEQ ID NO: 486689 - RNA, 22 nt, Human
uuggcugaagguuaagugcugg

SEQ ID NO: 486690 - RNA, 22 nt, Human
cagcagugcuucagugugagau

SEQ ID NO: 486691 - RNA, 22 nt, Human
augaugguuguccuaggugcau

SEQ ID NO: 486692 - RNA, 22 nt, Human
ugccugucucugacugccauua

SEQ ID NO: 486693 - RNA, 22 nt, Human
uuagccauuaaauuacaaggug

SEQ ID NO: 486694 - RNA, 22 nt, Human
uccuugaauauaauaacaguag

SEQ ID NO: 486695 - RNA, 22 nt, Human
uggcucugaucagauguccagu

SEQ ID NO: 486696 - RNA, 22 nt, Human
ucggggucuuugacacgcucug

SEQ ID NO: 486697 - RNA, 22 nt, Human
auccuugacacacuccaguacu

SEQ ID NO: 486698 - RNA, 22 nt, Human
agccagcaugaagacagaggcc

SEQ ID NO: 486699 - RNA, 22 nt, Human
ggaggagcacuucugagcucag

SEQ ID NO: 486700 - RNA, 22 nt, Human
ucuuccagcaaugugaaaucac

SEQ ID NO: 486701 - RNA, 22 nt, Human
ucuuuucuggacucugcaugga

SEQ ID NO: 486702 - RNA, 20 nt, Human
ucccaggcuccacccuagac

SEQ ID NO: 486703 - RNA, 22 nt, Human
aaugucugaaaaucagacugca

SEQ ID NO: 486704 - RNA, 20 nt, Human
augugagggguugaaguggg

SEQ ID NO: 486705 - RNA, 22 nt, Human
aaaaagguugauccagauuagg

SEQ ID NO: 486706 - RNA, 22 nt, Human
uuuccuaagguagugauaauuu

SEQ ID NO: 486707 - RNA, 22 nt, Human
cuggaaggucuguccccacugc

SEQ ID NO: 486708 - RNA, 22 nt, Human
uuuuucaugagacuagaaguca

SEQ ID NO: 486709 - RNA, 21 nt, Human
aucccagcacccaggagugca

SEQ ID NO: 486710 - RNA, 22 nt, Human
caggcuggagugaguguagugg

SEQ ID NO: 486711 - RNA, 22 nt, Human
gaguccuucuggcuggcaggau

SEQ ID NO: 486712 - RNA, 22 nt, Human
aaguguauauaugacuuauaaa

SEQ ID NO: 486713 - RNA, 22 nt, Human
ggaggccaaggagggcggauca

SEQ ID NO: 486714 - RNA, 22 nt, Human
ugaugauguuuaucuugguauu

SEQ ID NO: 486715 - RNA, 22 nt, Human
ggcuggccuguguggccgccac

SEQ ID NO: 486716 - RNA, 22 nt, Human
uaugcacagaaguuugcugaau

SEQ ID NO: 486717 - RNA, 22 nt, Human
aaacagaaggguagguaaacau

SEQ ID NO: 486718 - RNA, 22 nt, Human
cagggccacuguagaugaggag

SEQ ID NO: 486719 - RNA, 22 nt, Human
ggcucaggaugagccuucucau

SEQ ID NO: 486720 - RNA, 22 nt, Human
acaggcagguugagaaacauuu

SEQ ID NO: 486721 - RNA, 21 nt, Human
cugcucugacagugaggccag

SEQ ID NO: 486722 - RNA, 22 nt, Human
uggagccaugccuggccuuucc

SEQ ID NO: 486723 - RNA, 22 nt, Human
cuccuuccugccccagugauaa

SEQ ID NO: 486724 - RNA, 22 nt, Human
aggccugaaggaagaugagcug

SEQ ID NO: 486725 - RNA, 23 nt, Human
ugcagccacucaggagcucagug

SEQ ID NO: 486726 - RNA, 22 nt, Human
agaagccacuggagguugagau

SEQ ID NO: 486727 - RNA, 23 nt, Human
ucuccuccuagauacagucaugg

SEQ ID NO: 486728 - RNA, 22 nt, Human
ugcagaguaaaagcagaugcua

SEQ ID NO: 486729 - RNA, 19 nt, Human
cugagagaugcuucacaca

SEQ ID NO: 486730 - RNA, 22 nt, Human
gagggagugccagagggccagc

SEQ ID NO: 486731 - RNA, 22 nt, Human
aaacaugcauucaagaaaaucu

SEQ ID NO: 486732 - RNA, 22 nt, Human
ggcauccaaauaccaagaugua

SEQ ID NO: 486733 - RNA, 22 nt, Human
auagugggaauuacgauauacu

SEQ ID NO: 486734 - RNA, 22 nt, Human
cuguacauauacauuuuuuucc

SEQ ID NO: 486735 - RNA, 22 nt, Human
ggccucucuggcauggcugccc

SEQ ID NO: 486736 - RNA, 22 nt, Human
gcacagaagagcuuuggaauga

SEQ ID NO: 486737 - RNA, 22 nt, Human
cugggcuguucugccccugggu

SEQ ID NO: 486738 - RNA, 22 nt, Human
auuaaauuaaguggcuaauuua

SEQ ID NO: 486739 - RNA, 22 nt, Human
agacccucuccaugcccacugc

SEQ ID NO: 486740 - RNA, 22 nt, Human
gcagggcagggcaagaacuggg

SEQ ID NO: 486741 - RNA, 22 nt, Human
ggcaggugcucugugggccugg

SEQ ID NO: 486742 - RNA, 22 nt, Human
cagcuuuaguaacccacugcuc

SEQ ID NO: 486743 - RNA, 22 nt, Human
agaggaggcagcuuaacucagu

SEQ ID NO: 486744 - RNA, 22 nt, Human
ugaaauauuuagagaguaaguu

SEQ ID NO: 486745 - RNA, 22 nt, Human
aggcccagagagccaguuagug

SEQ ID NO: 486746 - RNA, 22 nt, Human
gaggagggagcuggaagcucuu

SEQ ID NO: 486747 - RNA, 22 nt, Human
ucaaugaugcugaagguagcgu

SEQ ID NO: 486748 - RNA, 21 nt, Human
ucugucucuccacugcccugc

SEQ ID NO: 486749 - RNA, 22 nt, Human
gcagagcacccugcagugguau

SEQ ID NO: 486750 - RNA, 22 nt, Human
aauguguagcauuuaaugcagu

SEQ ID NO: 486751 - RNA, 22 nt, Human
gcagcacauauaaacaaagaga

SEQ ID NO: 486752 - RNA, 19 nt, Human
ggacacagaaagcugcauu

SEQ ID NO: 486753 - RNA, 19 nt, Human
agggaguuuauauuugcac

SEQ ID NO: 486754 - RNA, 22 nt, Human
uaacacacugaaggugagaugg

SEQ ID NO: 486755 - RNA, 22 nt, Human
aucagcaaucucguguauuagg

SEQ ID NO: 486756 - RNA, 22 nt, Human
cagcaucuaaucuucaugccgg

SEQ ID NO: 486757 - RNA, 22 nt, Human
aagcagcagaccugauuuugaa

SEQ ID NO: 486758 - RNA, 22 nt, Human
caguguggugugcacagcuuag

SEQ ID NO: 486759 - RNA, 22 nt, Human
ccggcucggcgaccaggcugaa

SEQ ID NO: 486760 - RNA, 18 nt, Human
ugacucacccugucagug

SEQ ID NO: 486761 - RNA, 22 nt, Human
caaagcucaugcucuuagccau

SEQ ID NO: 486762 - RNA, 22 nt, Human
gcauuccugagaaugcagagug

SEQ ID NO: 486763 - RNA, 22 nt, Human
cacugcaguuccccagugcgca

SEQ ID NO: 486764 - RNA, 22 nt, Human
agaucucaccucuguguauuau

SEQ ID NO: 486765 - RNA, 22 nt, Human
cagucaccaccagguggcagua

SEQ ID NO: 486766 - RNA, 22 nt, Human
gggagcugaauggcaauggaga

SEQ ID NO: 486767 - RNA, 23 nt, Human
acagacaacacugaugagagaaa

SEQ ID NO: 486768 - RNA, 22 nt, Human
cagagccaacgccaccugccca

SEQ ID NO: 486769 - RNA, 22 nt, Human
uggccugcagaggcuguggggc

SEQ ID NO: 486770 - RNA, 22 nt, Human
uagcagagcagggaucagagcc

SEQ ID NO: 486771 - RNA, 21 nt, Human
agaggccuuacaggauagacc

SEQ ID NO: 486772 - RNA, 22 nt, Human
uagaaguuaaaggaauacagaa

SEQ ID NO: 486773 - RNA, 22 nt, Human
ucucuuaauaaguaaauacuga

SEQ ID NO: 486774 - RNA, 22 nt, Human
ucccuggcagcuaagggugguc

SEQ ID NO: 486775 - RNA, 22 nt, Human
uaaagaacacagggaauagcac

SEQ ID NO: 486776 - RNA, 22 nt, Human
ccagggugugagaaggaaguag

SEQ ID NO: 486777 - RNA, 22 nt, Human
ccagggugggguccaggaacca

SEQ ID NO: 486778 - RNA, 22 nt, Human
gugaggggaguaaagccauguu

SEQ ID NO: 486779 - RNA, 22 nt, Human
aaaucaguuggaacacaagcag

SEQ ID NO: 486780 - RNA, 22 nt, Human
acauagcuuaaaugagaagaua

SEQ ID NO: 486781 - RNA, 23 nt, Human
aaccagauaaauggcuccagggc

SEQ ID NO: 486782 - RNA, 22 nt, Human
ucugucacugagcucaggauuc

SEQ ID NO: 486783 - RNA, 22 nt, Human
aucaggauagugguuaccuggg

SEQ ID NO: 486784 - RNA, 22 nt, Human
guuugcauggaagacagugagu

SEQ ID NO: 486785 - RNA, 22 nt, Human
aaauguuccauuauuguguaau

SEQ ID NO: 486786 - RNA, 18 nt, Human
acagaggcagacauguau

SEQ ID NO: 486787 - RNA, 22 nt, Human
cugaugcuauaagccacagugg

SEQ ID NO: 486788 - RNA, 22 nt, Human
ugcagccaccaccucugcugaa

SEQ ID NO: 486789 - RNA, 22 nt, Human
agaccugcagggccaggccugc

SEQ ID NO: 486790 - RNA, 22 nt, Human
accacugcccauggugaaaacu

SEQ ID NO: 486791 - RNA, 22 nt, Human
gacaagacaugugaugacauca

SEQ ID NO: 486792 - RNA, 21 nt, Human
ugcagaggcacaaacaagccc

SEQ ID NO: 486793 - RNA, 22 nt, Human
cacugaaggaaggacuacugca

SEQ ID NO: 486794 - RNA, 22 nt, Human
gcucccaccuuugcuaucagua

SEQ ID NO: 486795 - RNA, 20 nt, Human
ucauuacagugcuaagaugu

SEQ ID NO: 486796 - RNA, 22 nt, Human
gcuggggcugggcugaggaaga

SEQ ID NO: 486797 - RNA, 22 nt, Human
ugacacaggcagcucccagcac

SEQ ID NO: 486798 - RNA, 22 nt, Human
ccaggcugugguuuagauagag

SEQ ID NO: 486799 - RNA, 20 nt, Human
ggcagagcuaugucuguugc

SEQ ID NO: 486800 - RNA, 22 nt, Human
uaacagaaaagaacugaguuug

SEQ ID NO: 486801 - RNA, 20 nt, Human
uucugcuugcaaauaucaag

SEQ ID NO: 486802 - RNA, 22 nt, Human
aacaggcaacaguugacucuga

SEQ ID NO: 486803 - RNA, 22 nt, Human
gcagggcagugugucugugggg

SEQ ID NO: 486804 - RNA, 22 nt, Human
acagugugugcuuucccuuacg

SEQ ID NO: 486805 - RNA, 22 nt, Human
cuggggccacaacggcgcacgc

SEQ ID NO: 486806 - RNA, 22 nt, Human
gcaagcaagcagguagagcuga

SEQ ID NO: 486807 - RNA, 22 nt, Human
uccaggcucucaggugucagca

SEQ ID NO: 486808 - RNA, 22 nt, Human
uggacaacauagugagaccuca

SEQ ID NO: 486809 - RNA, 22 nt, Human
ugccugcuaggcccugcugggu

SEQ ID NO: 486810 - RNA, 22 nt, Human
ggggggugcugaucaguggagc

SEQ ID NO: 486811 - RNA, 22 nt, Human
guccucuguagggcugggccac

SEQ ID NO: 486812 - RNA, 22 nt, Human
aagcucugcucagcagacuagg

SEQ ID NO: 486813 - RNA, 22 nt, Human
uugauagguuuuauguauaguu

SEQ ID NO: 486814 - RNA, 22 nt, Human
uuucuuauacuauauugucauc

SEQ ID NO: 486815 - RNA, 22 nt, Human
gucucccaucguuugugaggaa

SEQ ID NO: 486816 - RNA, 22 nt, Human
gagaggcugacuggcuguccug

SEQ ID NO: 486817 - RNA, 22 nt, Human
acagagauggcacagagaaggu

SEQ ID NO: 486818 - RNA, 20 nt, Human
uccaagcccuccuuccauuc

SEQ ID NO: 486819 - RNA, 22 nt, Human
cccaggcaguagaaagaagagg

SEQ ID NO: 486820 - RNA, 22 nt, Human
gcagauggaaagugcuugaggg

SEQ ID NO: 486821 - RNA, 22 nt, Human
caccagcagaagacugagggug

SEQ ID NO: 486822 - RNA, 22 nt, Human
aggcagcaugggccccagcucc

SEQ ID NO: 486823 - RNA, 22 nt, Human
ccuggagcaaaaaucuaaggag

SEQ ID NO: 486824 - RNA, 22 nt, Human
cagagacauuaagugccaugau

SEQ ID NO: 486825 - RNA, 22 nt, Human
acucugaaugugcauguaaauc

SEQ ID NO: 486826 - RNA, 22 nt, Human
aggcuggcuggcaggggacaca

SEQ ID NO: 486827 - RNA, 22 nt, Human
gaggcagaggaagguggucucu

SEQ ID NO: 486828 - RNA, 22 nt, Human
gaggcagcagggcugguuccuu

SEQ ID NO: 486829 - RNA, 18 nt, Human
ugcucuggucucacuugg

SEQ ID NO: 486830 - RNA, 22 nt, Human
uuugucagucaugucugcuuuu

SEQ ID NO: 486831 - RNA, 22 nt, Human
uccuucaguuaucacaguacug

SEQ ID NO: 486832 - RNA, 22 nt, Human
cccagcuugcaaauggguugcu

SEQ ID NO: 486833 - RNA, 22 nt, Human
aaggaagauauaucaagcuuaa

SEQ ID NO: 486834 - RNA, 22 nt, Human
gggcaggucugggucagccuga

SEQ ID NO: 486835 - RNA, 22 nt, Human
gcaggaagccuuaccaagccca

SEQ ID NO: 486836 - RNA, 22 nt, Human
uauccaauucaccauugauggg

SEQ ID NO: 486837 - RNA, 22 nt, Human
uuuuuguagucauuagaagagg

SEQ ID NO: 486838 - RNA, 22 nt, Human
gcccagcugucuggcagggaug

SEQ ID NO: 486839 - RNA, 22 nt, Human
aauaauuuuagcucagaguugu

SEQ ID NO: 486840 - RNA, 22 nt, Human
aaaggccagguuggcugguauu

SEQ ID NO: 486841 - RNA, 22 nt, Human
augaguucaauuguuucaguca

SEQ ID NO: 486842 - RNA, 22 nt, Human
gaaaggccagcucacagaugag

SEQ ID NO: 486843 - RNA, 22 nt, Human
aucacaggugguaggaaaagaa

SEQ ID NO: 486844 - RNA, 22 nt, Human
uagcagcucugauucugggccc

SEQ ID NO: 486845 - RNA, 21 nt, Human
uagggcucuauuuuuauuuca

SEQ ID NO: 486846 - RNA, 22 nt, Human
gucagcacuuuuccgaggcaga

SEQ ID NO: 486847 - RNA, 22 nt, Human
cugggaggugaacagaaaaacu

SEQ ID NO: 486848 - RNA, 22 nt, Human
acuuuugguucuguaacuguga

SEQ ID NO: 486849 - RNA, 22 nt, Human
agcaguggaccucagugcuauu

SEQ ID NO: 486850 - RNA, 22 nt, Human
cugggcugcaucaaagaggcau

SEQ ID NO: 486851 - RNA, 22 nt, Human
cugugcuucgcaacuccaaggu

SEQ ID NO: 486852 - RNA, 22 nt, Human
aaggcagcccuggcucagccug

SEQ ID NO: 486853 - RNA, 22 nt, Human
acuguggccugcuguaugggcu

SEQ ID NO: 486854 - RNA, 22 nt, Human
cagaaauggaauuuuccaucac

SEQ ID NO: 486855 - RNA, 22 nt, Human
uucacuuauagggauguuauug

SEQ ID NO: 486856 - RNA, 22 nt, Human
uaaugugugucaucaguagagu

SEQ ID NO: 486857 - RNA, 22 nt, Human
aguguccaacucagcuugucaa

SEQ ID NO: 486858 - RNA, 22 nt, Human
aaaggucauugaaaaggaggaa

SEQ ID NO: 486859 - RNA, 22 nt, Human
uaacagcucuguguggcuguaa

SEQ ID NO: 486860 - RNA, 22 nt, Human
aaauugugagcuauagaucuag

SEQ ID NO: 486861 - RNA, 22 nt, Human
agacccugucaguguuaggaaa

SEQ ID NO: 486862 - RNA, 22 nt, Human
ccagcuuuuagugggcuuauua

SEQ ID NO: 486863 - RNA, 21 nt, Human
gccucugcugucuuauuguga

SEQ ID NO: 486864 - RNA, 22 nt, Human
agaauaauacugaaaugcugaa

SEQ ID NO: 486865 - RNA, 22 nt, Human
gaagaagguggcccagggguag

SEQ ID NO: 486866 - RNA, 22 nt, Human
gucaggauuauaauccccaugg

SEQ ID NO: 486867 - RNA, 22 nt, Human
ucacaacuugaagcugauuuaa

SEQ ID NO: 486868 - RNA, 22 nt, Human
uaaaugugcacagguuagaagg

SEQ ID NO: 486869 - RNA, 22 nt, Human
aaaaaugcugugguagcugugu

SEQ ID NO: 486870 - RNA, 22 nt, Human
cugccugcugccuguggagggu

SEQ ID NO: 486871 - RNA, 22 nt, Human
ucaaaggcauugccaauaagua

SEQ ID NO: 486872 - RNA, 22 nt, Human
gccugcagaacugugaggcaau

SEQ ID NO: 486873 - RNA, 23 nt, Human
ugacacauuuccuuuccacugca

SEQ ID NO: 486874 - RNA, 22 nt, Human
uggcagagucaucacaucugga

SEQ ID NO: 486875 - RNA, 22 nt, Human
ggugaccucaccuggucccacc

SEQ ID NO: 486876 - RNA, 22 nt, Human
ggcagcaguggcugcuauuguc

SEQ ID NO: 486877 - RNA, 21 nt, Human
agcugcuuucagcuccuagag

SEQ ID NO: 486878 - RNA, 22 nt, Human
acuuggagagcauugcugggga

SEQ ID NO: 486879 - RNA, 22 nt, Human
caagaaauuucuuaagaacuaa

SEQ ID NO: 486880 - RNA, 22 nt, Human
ucugagagcuguagaagccuau

SEQ ID NO: 486881 - RNA, 22 nt, Human
uccaggagguuuggaggaagca

SEQ ID NO: 486882 - RNA, 22 nt, Human
ccugcaggcugcaggccaguuc

SEQ ID NO: 486883 - RNA, 22 nt, Human
cugggccucaaucucagaguuu

SEQ ID NO: 486884 - RNA, 22 nt, Human
agccucugguccucccucagcu

SEQ ID NO: 486885 - RNA, 22 nt, Human
cacaagacuuauuuguguagaa

SEQ ID NO: 486886 - RNA, 22 nt, Human
guggugcaggccagcaggggcg

SEQ ID NO: 486887 - RNA, 22 nt, Human
cccugagcccauaguugacauu

SEQ ID NO: 486888 - RNA, 22 nt, Human
aggcugagacugugcauuagug

SEQ ID NO: 486889 - RNA, 22 nt, Human
auaucuuuguuuuugccaagau

SEQ ID NO: 486890 - RNA, 22 nt, Human
ccucacuuuccuuucuccuggg

SEQ ID NO: 486891 - RNA, 22 nt, Human
ugcagggcuauaacuccauucu

SEQ ID NO: 486892 - RNA, 22 nt, Human
uaauuuuacuuccugagcaccu

SEQ ID NO: 486893 - RNA, 22 nt, Human
uuugaaaggaaguuaauacuuu

SEQ ID NO: 486894 - RNA, 17 nt, Human
uuucagauucacuuucu

SEQ ID NO: 486895 - RNA, 22 nt, Human
ucccaggcaaaggcagcucauu

SEQ ID NO: 486896 - RNA, 22 nt, Human
cacaggugcuccucggggagcu

SEQ ID NO: 486897 - RNA, 22 nt, Human
caagagagaugcagcucacuca

SEQ ID NO: 486898 - RNA, 21 nt, Human
agagucugcauuucugacaag

SEQ ID NO: 486899 - RNA, 22 nt, Human
ggcugagcaauuuugaugacau

SEQ ID NO: 486900 - RNA, 23 nt, Human
agaggccaacuucuugccccucc

SEQ ID NO: 486901 - RNA, 22 nt, Human
aagggcugcuguagaagcagag

SEQ ID NO: 486902 - RNA, 19 nt, Human
aauguaguguuaugucaac

SEQ ID NO: 486903 - RNA, 22 nt, Human
uacccaggaggaaacugaggcu

SEQ ID NO: 486904 - RNA, 22 nt, Human
aggaagccaugguggacgucua

SEQ ID NO: 486905 - RNA, 22 nt, Human
cagagcagaagcgguccucaca

SEQ ID NO: 486906 - RNA, 22 nt, Human
auaaagauuucuuuuucucuac

SEQ ID NO: 486907 - RNA, 22 nt, Human
ucucuggggauggaccugggag

SEQ ID NO: 486908 - RNA, 21 nt, Human
ggcaggauggcaguggacccc

SEQ ID NO: 486909 - RNA, 22 nt, Human
cugccuggcuaaacucaagucg

SEQ ID NO: 486910 - RNA, 22 nt, Human
gacuucuauuaauaccucuacu

SEQ ID NO: 486911 - RNA, 22 nt, Human
gcugcccucccagggcaagcuu

SEQ ID NO: 486912 - RNA, 22 nt, Human
ugggggugaaagucuggacagu

SEQ ID NO: 486913 - RNA, 22 nt, Human
acagacauuuucuguauugccu

SEQ ID NO: 486914 - RNA, 22 nt, Human
cugagcugggcucucuugaggg

SEQ ID NO: 486915 - RNA, 22 nt, Human
auccugugcaaugacugcaucu

SEQ ID NO: 486916 - RNA, 22 nt, Human
ccagguggugaaagugggcccu

SEQ ID NO: 486917 - RNA, 19 nt, Human
cagaggcaccagguauaga

SEQ ID NO: 486918 - RNA, 22 nt, Human
ucugcagcuugcacaggcaggc

SEQ ID NO: 486919 - RNA, 22 nt, Human
auggccuggccagagcucugcu

SEQ ID NO: 486920 - RNA, 23 nt, Human
ugcagcugccucuggcgggccgg

SEQ ID NO: 486921 - RNA, 20 nt, Human
ugcuuccuggccacugcggg

SEQ ID NO: 486922 - RNA, 22 nt, Human
ucaugcccagagcaguaaauua

SEQ ID NO: 486923 - RNA, 22 nt, Human
aggacugacuuuugccaugaaa

SEQ ID NO: 486924 - RNA, 22 nt, Human
uauuucuuucagguauguguug

SEQ ID NO: 486925 - RNA, 22 nt, Human
acagccauagaugcuuauguaa

SEQ ID NO: 486926 - RNA, 21 nt, Human
uggcucugcucagagcagucc

SEQ ID NO: 486927 - RNA, 22 nt, Human
cacuguacuggguugaaggacg

SEQ ID NO: 486928 - RNA, 22 nt, Human
ucugucacccagagugcagugg

SEQ ID NO: 486929 - RNA, 22 nt, Human
cagagacagggcagggagugug

SEQ ID NO: 486930 - RNA, 22 nt, Human
ggcucuggagcacagacgucug

SEQ ID NO: 486931 - RNA, 22 nt, Human
ucauugcacuccagccugggca

SEQ ID NO: 486932 - RNA, 22 nt, Human
uuauuaggaaaaggucagaugu

SEQ ID NO: 486933 - RNA, 21 nt, Human
ucacagacuggucagugaggc

SEQ ID NO: 486934 - RNA, 22 nt, Human
cuggagcugcuguccuugggug

SEQ ID NO: 486935 - RNA, 22 nt, Human
gcagagugagccgaggcugcuc

SEQ ID NO: 486936 - RNA, 22 nt, Human
ggucagguuuuuaggagugacc

SEQ ID NO: 486937 - RNA, 22 nt, Human
ugcuggcccuggcucagggaac

SEQ ID NO: 486938 - RNA, 22 nt, Human
agagccagcauuugggcccugc

SEQ ID NO: 486939 - RNA, 22 nt, Human
gccuucaguaguauccucauga

SEQ ID NO: 486940 - RNA, 22 nt, Human
ggcagugagucccggagaggcc

SEQ ID NO: 486941 - RNA, 22 nt, Human
ugcucugguccucccucggcgc

SEQ ID NO: 486942 - RNA, 22 nt, Human
uccuggaguugugcagugcaca

SEQ ID NO: 486943 - RNA, 22 nt, Human
cucaggggaccuggcuccgagu

SEQ ID NO: 486944 - RNA, 19 nt, Human
gcaucagagcagaaggggu

SEQ ID NO: 486945 - RNA, 22 nt, Human
ugagagugauugguucgaaugu

SEQ ID NO: 486946 - RNA, 22 nt, Human
ugguccaggguguaguacagag

SEQ ID NO: 486947 - RNA, 22 nt, Human
agggaggaaggauguuccaaag

SEQ ID NO: 486948 - RNA, 19 nt, Human
guagggacagugguucuga

SEQ ID NO: 486949 - RNA, 22 nt, Human
uugaggagcacuagucagguau

SEQ ID NO: 486950 - RNA, 22 nt, Human
cccaggagguggagguugcagc

SEQ ID NO: 486951 - RNA, 22 nt, Human
ugcagaagaaugagcuuggagu

SEQ ID NO: 486952 - RNA, 22 nt, Human
agugacugggcagggcagggcc

SEQ ID NO: 486953 - RNA, 22 nt, Human
caagauggguguugugaugguu

SEQ ID NO: 486954 - RNA, 22 nt, Human
agggcagaccacgugcaaggau

SEQ ID NO: 486955 - RNA, 20 nt, Human
uccaugaguuagagacuaua

SEQ ID NO: 486956 - RNA, 22 nt, Human
uucaaugauuuuuagggaucau

SEQ ID NO: 486957 - RNA, 22 nt, Human
accaggcaugauguggagcaca

SEQ ID NO: 486958 - RNA, 22 nt, Human
agcacagaguugcagagagcgu

SEQ ID NO: 486959 - RNA, 22 nt, Human
aggaggaauacaauccagcagc

SEQ ID NO: 486960 - RNA, 22 nt, Human
uacuuugucauucuaaccuucc

SEQ ID NO: 486961 - RNA, 18 nt, Human
acucaggaaaugaugaca

SEQ ID NO: 486962 - RNA, 22 nt, Human
uggcucagagccuugagagcug

SEQ ID NO: 486963 - RNA, 22 nt, Human
agcagcauucucugguaugggg

SEQ ID NO: 486964 - RNA, 22 nt, Human
uuaggaaauuaugguuucagau

SEQ ID NO: 486965 - RNA, 22 nt, Human
uggcagagagacucuccuugau

SEQ ID NO: 486966 - RNA, 22 nt, Human
agcugccaaguuucucaguuua

SEQ ID NO: 486967 - RNA, 22 nt, Human
gcccacacaccagcucaggagg

SEQ ID NO: 486968 - RNA, 22 nt, Human
cagccagugguugaagaugcag

SEQ ID NO: 486969 - RNA, 22 nt, Human
cccuggaggcggagcuugcagu

SEQ ID NO: 486970 - RNA, 22 nt, Human
augaggcauuccacucaaacuc

SEQ ID NO: 486971 - RNA, 22 nt, Human
uuccucagccagcacuuagggg

SEQ ID NO: 486972 - RNA, 22 nt, Human
ucagaagagcuggugcugccug

SEQ ID NO: 486973 - RNA, 22 nt, Human
cacccagcacagagggaggcga

SEQ ID NO: 486974 - RNA, 22 nt, Human
gccugagaaggacacagcaggu

SEQ ID NO: 486975 - RNA, 22 nt, Human
cacaggagauugaucuauuggu

SEQ ID NO: 486976 - RNA, 22 nt, Human
aauuccugucuuaacaguucug

SEQ ID NO: 486977 - RNA, 19 nt, Human
aauucuguuucagcagauc

SEQ ID NO: 486978 - RNA, 22 nt, Human
ccagcuggugggucuuucucug

SEQ ID NO: 486979 - RNA, 23 nt, Human
ggccucuguguucugcccacaug

SEQ ID NO: 486980 - RNA, 22 nt, Human
gcccugggauuggguggaggcu

SEQ ID NO: 486981 - RNA, 22 nt, Human
agaggccaucugcucugugggg

SEQ ID NO: 486982 - RNA, 22 nt, Human
uuagggcaggcaugagagaacu

SEQ ID NO: 486983 - RNA, 22 nt, Human
acagagguaggacaugagauau

SEQ ID NO: 486984 - RNA, 22 nt, Human
cuggggggagcugcguccagca

SEQ ID NO: 486985 - RNA, 22 nt, Human
gagugguaggcaguguuaggaa

SEQ ID NO: 486986 - RNA, 22 nt, Human
cccagcagggucucugugucua

SEQ ID NO: 486987 - RNA, 22 nt, Human
aagcuuuagagaugaguuccuu

SEQ ID NO: 486988 - RNA, 23 nt, Human
uugcuucugugcaauucaguacu

SEQ ID NO: 486989 - RNA, 22 nt, Human
ugguacacauguccaaggucag

SEQ ID NO: 486990 - RNA, 22 nt, Human
cagaaauguuuauauguggugu

SEQ ID NO: 486991 - RNA, 22 nt, Human
uaauccaaaacugaaucugugg

SEQ ID NO: 486992 - RNA, 22 nt, Human
ugguaaauauguccauucucuu

SEQ ID NO: 486993 - RNA, 22 nt, Human
agcugagcauuugauccaccuc

SEQ ID NO: 486994 - RNA, 22 nt, Human
gcagccuguuguaccagccugu

SEQ ID NO: 486995 - RNA, 22 nt, Human
auacaucuuccuuuuaaaaugc

SEQ ID NO: 486996 - RNA, 22 nt, Human
gcuguggccaacaaaccacuuu

SEQ ID NO: 486997 - RNA, 20 nt, Human
ucaaaggcaaaggugggugu

SEQ ID NO: 486998 - RNA, 22 nt, Human
ugcugugcuggcggcagaggcc

SEQ ID NO: 486999 - RNA, 22 nt, Human
gcugaggccccagggugauggg

SEQ ID NO: 487000 - RNA, 22 nt, Human
uuugaaaguguuuacuugggaa

SEQ ID NO: 487001 - RNA, 22 nt, Human
uucauuccuucccuaagcaacu

SEQ ID NO: 487002 - RNA, 20 nt, Human
ggggcagguuuuuauggcua

SEQ ID NO: 487003 - RNA, 22 nt, Human
cagaacauuccaugugcccugc

SEQ ID NO: 487004 - RNA, 22 nt, Human
cugagagguaagcagcgcagug

SEQ ID NO: 487005 - RNA, 22 nt, Human
agaaaugacacacaugagacau

SEQ ID NO: 487006 - RNA, 22 nt, Human
guuaauuugcagcuuucgagcu

SEQ ID NO: 487007 - RNA, 22 nt, Human
uggccuguggcuuaaggucugu

SEQ ID NO: 487008 - RNA, 22 nt, Human
aggcucagccugggccuagagc

SEQ ID NO: 487009 - RNA, 22 nt, Human
gacaauuucucaauauagaaac

SEQ ID NO: 487010 - RNA, 22 nt, Human
cagugcauaaucuaaauggggg

SEQ ID NO: 487011 - RNA, 20 nt, Human
uguugauuggugucaucuca

SEQ ID NO: 487012 - RNA, 22 nt, Human
ugggcugcggauaggccucgga

SEQ ID NO: 487013 - RNA, 22 nt, Human
uggcagaguaggauggcccugu

SEQ ID NO: 487014 - RNA, 23 nt, Human
uucuuucaagaaguucacagugc

SEQ ID NO: 487015 - RNA, 22 nt, Human
cagcccuggccccagguggucu

SEQ ID NO: 487016 - RNA, 22 nt, Human
agacuucucaguuuuauuagua

SEQ ID NO: 487017 - RNA, 22 nt, Human
ccagcugacgaugccuggucuc

SEQ ID NO: 487018 - RNA, 21 nt, Human
uucuuuccccagaggacuaaa

SEQ ID NO: 487019 - RNA, 22 nt, Human
ccucugccaccucccacgaggc

SEQ ID NO: 487020 - RNA, 22 nt, Human
ccaggagcuggagggugcagug

SEQ ID NO: 487021 - RNA, 20 nt, Human
uccugguggauacugcuuaa

SEQ ID NO: 487022 - RNA, 22 nt, Human
gggcugagccacagcuuuuguu

SEQ ID NO: 487023 - RNA, 22 nt, Human
cucaggaugcaggucacaggac

SEQ ID NO: 487024 - RNA, 22 nt, Human
ucccaggguuacagccagggca

SEQ ID NO: 487025 - RNA, 22 nt, Human
ggccucugguucacagggagga

SEQ ID NO: 487026 - RNA, 20 nt, Human
acagaaagagagaaugucag

SEQ ID NO: 487027 - RNA, 22 nt, Human
agcagugggggaguguuaguuu

SEQ ID NO: 487028 - RNA, 22 nt, Human
agaauuguaagcaauuugauua

SEQ ID NO: 487029 - RNA, 22 nt, Human
caggcagcugggucaccguccc

SEQ ID NO: 487030 - RNA, 22 nt, Human
uuugaaagaauuuauguacuuu

SEQ ID NO: 487031 - RNA, 22 nt, Human
uucuugauuucaugcaguuaag

SEQ ID NO: 487032 - RNA, 22 nt, Human
auaagaaacauuauucuuucca

SEQ ID NO: 487033 - RNA, 22 nt, Human
aagagggcugcaaucuuauugc

SEQ ID NO: 487034 - RNA, 20 nt, Human
cuccaggggaagagccuucc

SEQ ID NO: 487035 - RNA, 22 nt, Human
ccugccucaucaacuugucgug

SEQ ID NO: 487036 - RNA, 20 nt, Human
ucccaggcugggcuccagcu

SEQ ID NO: 487037 - RNA, 22 nt, Human
ugaaggagggaagaaggcucug

SEQ ID NO: 487038 - RNA, 22 nt, Human
gccuggagaauuaaaaggaagg

SEQ ID NO: 487039 - RNA, 22 nt, Human
cagccacguagcccuuggccgu

SEQ ID NO: 487040 - RNA, 22 nt, Human
ccaggccugauugggaaucuug

SEQ ID NO: 487041 - RNA, 22 nt, Human
caggugccucaggaugagacaa

SEQ ID NO: 487042 - RNA, 22 nt, Human
aaguaaaagcuuuaccaugcgc

SEQ ID NO: 487043 - RNA, 22 nt, Human
ucaggagucugugcaguuccac

SEQ ID NO: 487044 - RNA, 22 nt, Human
caggaggaggguacaccaucag

SEQ ID NO: 487045 - RNA, 22 nt, Human
agcaggaaggucugugugaguc

SEQ ID NO: 487046 - RNA, 20 nt, Human
agucccagaucaaauuucug

SEQ ID NO: 487047 - RNA, 22 nt, Human
ggaaccaguggaaugauaugcu

SEQ ID NO: 487048 - RNA, 22 nt, Human
aaagcagguugcaauuacagug

SEQ ID NO: 487049 - RNA, 22 nt, Human
cuggccugaucucaugcugucc

SEQ ID NO: 487050 - RNA, 22 nt, Human
agcugccaggccccugagaacc

SEQ ID NO: 487051 - RNA, 22 nt, Human
aaaucagucccucuuggaauuu

SEQ ID NO: 487052 - RNA, 22 nt, Human
gccagccugugggggcucugug

SEQ ID NO: 487053 - RNA, 22 nt, Human
agcagcagauccaaaaaaugug

SEQ ID NO: 487054 - RNA, 22 nt, Human
auuccaaaaggauguuagaaug

SEQ ID NO: 487055 - RNA, 22 nt, Human
ccaggcucaggugcgagagaca

SEQ ID NO: 487056 - RNA, 22 nt, Human
cagugcuguuguaagcucauug

SEQ ID NO: 487057 - RNA, 22 nt, Human
uaccucaugcuguacagcacgu

SEQ ID NO: 487058 - RNA, 22 nt, Human
uagggcuauaagagaauaagac

SEQ ID NO: 487059 - RNA, 22 nt, Human
uguucuugagccuuuagaccua

SEQ ID NO: 487060 - RNA, 22 nt, Human
cagacacagcaauucuguguug

SEQ ID NO: 487061 - RNA, 22 nt, Human
ggccccugcggacugccuagag

SEQ ID NO: 487062 - RNA, 22 nt, Human
aggcucagccccugggaggaga

SEQ ID NO: 487063 - RNA, 22 nt, Human
cagcuuugauucuuucugccau

SEQ ID NO: 487064 - RNA, 22 nt, Human
ucucuuuuauguacacccugac

SEQ ID NO: 487065 - RNA, 22 nt, Human
auucuccacacauccagaccuu

SEQ ID NO: 487066 - RNA, 22 nt, Human
ggucccaggcucccucuugucc

SEQ ID NO: 487067 - RNA, 22 nt, Human
uuugaacaagagcuucacauua

SEQ ID NO: 487068 - RNA, 22 nt, Human
ccugggugucaugggcagcugg

SEQ ID NO: 487069 - RNA, 22 nt, Human
ugaaaaaccucaguccgcuuua

SEQ ID NO: 487070 - RNA, 22 nt, Human
aggagagagcugagcuuugcug

SEQ ID NO: 487071 - RNA, 17 nt, Human
agcagcugaagcagcca

SEQ ID NO: 487072 - RNA, 22 nt, Human
ugcagaggaccauuguccugga

SEQ ID NO: 487073 - RNA, 22 nt, Human
uggcugaggagagggcggaagu

SEQ ID NO: 487074 - RNA, 22 nt, Human
aaauucuuucauggcuaauaag

SEQ ID NO: 487075 - RNA, 22 nt, Human
gcuggguggaucggaggcucug

SEQ ID NO: 487076 - RNA, 22 nt, Human
uggguggaauaaaucaguucug

SEQ ID NO: 487077 - RNA, 22 nt, Human
ccugggucacucaggcaggcgg

SEQ ID NO: 487078 - RNA, 22 nt, Human
agcucucaagauaagaaagaac

SEQ ID NO: 487079 - RNA, 22 nt, Human
agggaggucuuugaggggcuua

SEQ ID NO: 487080 - RNA, 21 nt, Human
cuggacugaggagacagucgc

SEQ ID NO: 487081 - RNA, 22 nt, Human
uagcccagagucccaauuccag

SEQ ID NO: 487082 - RNA, 22 nt, Human
aggggacacggcuucuccaggg

SEQ ID NO: 487083 - RNA, 22 nt, Human
aaggcugugucagaagcucccu

SEQ ID NO: 487084 - RNA, 22 nt, Human
uauuuccugcauggugauguaa

SEQ ID NO: 487085 - RNA, 22 nt, Human
ugaggaagccaaacagcuacac

SEQ ID NO: 487086 - RNA, 22 nt, Human
agcagggcagcugaugcgcacg

SEQ ID NO: 487087 - RNA, 22 nt, Human
accaggagccauagagucaggc

SEQ ID NO: 487088 - RNA, 20 nt, Human
caagcccucuuuagccugcc

SEQ ID NO: 487089 - RNA, 22 nt, Human
aggggcuggcuuaucugagagu

SEQ ID NO: 487090 - RNA, 22 nt, Human
ccacacugaaccucagugucuu

SEQ ID NO: 487091 - RNA, 22 nt, Human
augaaauaucuugaagaaauuc

SEQ ID NO: 487092 - RNA, 22 nt, Human
agcugucuccagauacaggauu

SEQ ID NO: 487093 - RNA, 22 nt, Human
ccaggcucugagccucacucuu

SEQ ID NO: 487094 - RNA, 22 nt, Human
uucuaguucccacauaguugcc

SEQ ID NO: 487095 - RNA, 22 nt, Human
agaaaagggcaggagggauaca

SEQ ID NO: 487096 - RNA, 22 nt, Human
uguaugcaaauuuauuagcaca

SEQ ID NO: 487097 - RNA, 22 nt, Human
agaggagcugggaggcccucgu

SEQ ID NO: 487098 - RNA, 22 nt, Human
ccaucccuucucuggccagcag

SEQ ID NO: 487099 - RNA, 23 nt, Human
agcuggaggcugucuacucccaa

SEQ ID NO: 487100 - RNA, 22 nt, Human
cugagccuuauucaccagcccu

SEQ ID NO: 487101 - RNA, 19 nt, Human
ggcugccuuuccuuaccag

SEQ ID NO: 487102 - RNA, 22 nt, Human
cuggccugaggucggcuguagg

SEQ ID NO: 487103 - RNA, 22 nt, Human
uggcagcauguuauguaaggaa

SEQ ID NO: 487104 - RNA, 22 nt, Human
cagcucugugggagcguaugug

SEQ ID NO: 487105 - RNA, 22 nt, Human
ggccugugucugugccuguccu

SEQ ID NO: 487106 - RNA, 22 nt, Human
aaauagcacagcagcugaggcu

SEQ ID NO: 487107 - RNA, 22 nt, Human
agcugccagcaucccggaaggg

SEQ ID NO: 487108 - RNA, 22 nt, Human
uccucuggcucuuucccuagga

SEQ ID NO: 487109 - RNA, 22 nt, Human
ccucugcaccauagccuucagc

SEQ ID NO: 487110 - RNA, 22 nt, Human
guggaggacaaaagaagccuuu

SEQ ID NO: 487111 - RNA, 22 nt, Human
uuaacauuguccuuagcagauu

SEQ ID NO: 487112 - RNA, 18 nt, Human
aucucccauuggccaagg

SEQ ID NO: 487113 - RNA, 22 nt, Human
caguggagaggcaugcuuggca

SEQ ID NO: 487114 - RNA, 22 nt, Human
ugucaguguauacauacaguau

SEQ ID NO: 487115 - RNA, 22 nt, Human
agagcuggggccagagucaagg

SEQ ID NO: 487116 - RNA, 21 nt, Human
ccagacuggccuaugugguag

SEQ ID NO: 487117 - RNA, 22 nt, Human
aagcugccuugcugaggagaaa

SEQ ID NO: 487118 - RNA, 22 nt, Human
agcaggggcaggguuuugugcu

SEQ ID NO: 487119 - RNA, 22 nt, Human
gagcugggacauggguccucuc

SEQ ID NO: 487120 - RNA, 22 nt, Human
cagggcucagaagacagaccuc

SEQ ID NO: 487121 - RNA, 22 nt, Human
gcaggugauucacccugggccu

SEQ ID NO: 487122 - RNA, 22 nt, Human
aagagcuggucacagguccauu

SEQ ID NO: 487123 - RNA, 22 nt, Human
ugaaaucuuuaguuucuguccc

SEQ ID NO: 487124 - RNA, 22 nt, Human
ccagggcuggguuugucggugu

SEQ ID NO: 487125 - RNA, 22 nt, Human
aguuuauagcccagauucaugg

SEQ ID NO: 487126 - RNA, 22 nt, Human
gcucucugccauaugaggauac

SEQ ID NO: 487127 - RNA, 22 nt, Human
uccugcagcugauaaauacagu

SEQ ID NO: 487128 - RNA, 23 nt, Human
cugaggccugcugcguucagguu

SEQ ID NO: 487129 - RNA, 22 nt, Human
cagguccccuccccuaccaggc

SEQ ID NO: 487130 - RNA, 22 nt, Human
guuuauuauacaacaaaagcua

SEQ ID NO: 487131 - RNA, 22 nt, Human
guauuuucaugauuucagacca

SEQ ID NO: 487132 - RNA, 22 nt, Human
gggagcuggagcuggaagacuc

SEQ ID NO: 487133 - RNA, 22 nt, Human
ucacagaaauaagauaguuauu

SEQ ID NO: 487134 - RNA, 23 nt, Human
aucaagucaucagcaaaauacau

SEQ ID NO: 487135 - RNA, 22 nt, Human
auccagcuuugucuggucuucg

SEQ ID NO: 487136 - RNA, 22 nt, Human
auguuacaauucaaaaugcugc

SEQ ID NO: 487137 - RNA, 23 nt, Human
agccucuuuucuccugcccugca

SEQ ID NO: 487138 - RNA, 22 nt, Human
ugggcuccaauuuguccuuuca

SEQ ID NO: 487139 - RNA, 22 nt, Human
uggcccucagucuugcuccugc

SEQ ID NO: 487140 - RNA, 22 nt, Human
cuguccagucuuuagcaagcug

SEQ ID NO: 487141 - RNA, 22 nt, Human
ugggccagcaauugcugcucag

SEQ ID NO: 487142 - RNA, 22 nt, Human
gagauuggccuggcuugccaac

SEQ ID NO: 487143 - RNA, 23 nt, Human
cagggccaggcagcagcugucac

SEQ ID NO: 487144 - RNA, 22 nt, Human
uuccauaaucaccuuauucuuu

SEQ ID NO: 487145 - RNA, 22 nt, Human
gggcugagugggccucuuacuu

SEQ ID NO: 487146 - RNA, 22 nt, Human
uaauuucacugauaugaaguca

SEQ ID NO: 487147 - RNA, 22 nt, Human
uccaggaggguuuucugccuuc

SEQ ID NO: 487148 - RNA, 22 nt, Human
cagucccuaguggagcucacag

SEQ ID NO: 487149 - RNA, 21 nt, Human
gauugaaaccauggcagugag

SEQ ID NO: 487150 - RNA, 22 nt, Human
uccacugcagcuucugauggaa

SEQ ID NO: 487151 - RNA, 22 nt, Human
caggcuugcugcuagagcacuu

SEQ ID NO: 487152 - RNA, 22 nt, Human
ggcaggguccacaccugggaaa

SEQ ID NO: 487153 - RNA, 22 nt, Human
agcuggcauacuuugcuaggaa

SEQ ID NO: 487154 - RNA, 22 nt, Human
agccagugcaacagcagugaag

SEQ ID NO: 487155 - RNA, 22 nt, Human
uccaugagggacacuggaugcu

SEQ ID NO: 487156 - RNA, 22 nt, Human
gggcugucaugugucagugacc

SEQ ID NO: 487157 - RNA, 22 nt, Human
cuggagcuaggaaguccaagau

SEQ ID NO: 487158 - RNA, 22 nt, Human
ugcuucucccaaccagggccug

SEQ ID NO: 487159 - RNA, 22 nt, Human
ggcucugcccagguggacagca

SEQ ID NO: 487160 - RNA, 22 nt, Human
gggcuaggcuuggccagcacug

SEQ ID NO: 487161 - RNA, 22 nt, Human
acugagcugcuugaagugaacu

SEQ ID NO: 487162 - RNA, 22 nt, Human
agccccugggaguagcugcugc

SEQ ID NO: 487163 - RNA, 22 nt, Human
auucuguauuucuaauaagauc

SEQ ID NO: 487164 - RNA, 22 nt, Human
cgagaguggacagggcgcagcu

SEQ ID NO: 487165 - RNA, 22 nt, Human
gcagcuuuagaaacaagggcug

SEQ ID NO: 487166 - RNA, 22 nt, Human
uagggcucgggcacaggacagg

SEQ ID NO: 487167 - RNA, 22 nt, Human
uccaggcaugguguaauuuugc

SEQ ID NO: 487168 - RNA, 22 nt, Human
agucaccaucuguggcagccug

SEQ ID NO: 487169 - RNA, 22 nt, Human
ggcagggagagcaugcugauaa

SEQ ID NO: 487170 - RNA, 22 nt, Human
aauaauuuugagagccuggaaa

SEQ ID NO: 487171 - RNA, 22 nt, Human
agcugggcagacugcagugguu

SEQ ID NO: 487172 - RNA, 22 nt, Human
cuucacauguuggaguccuuug

SEQ ID NO: 487173 - RNA, 22 nt, Human
uggagcucaaaggccuguggga

SEQ ID NO: 487174 - RNA, 22 nt, Human
ucugccuuggcaaccacagcuu

SEQ ID NO: 487175 - RNA, 20 nt, Human
uuuacauuuugaaacaguga

SEQ ID NO: 487176 - RNA, 22 nt, Human
ugucauuuucuaaucuguuguc

SEQ ID NO: 487177 - RNA, 19 nt, Human
gcugucugaugcugagguc

SEQ ID NO: 487178 - RNA, 22 nt, Human
caugaagcacagcucucuuuuu

SEQ ID NO: 487179 - RNA, 22 nt, Human
gaccaaggaagaggggagccag

SEQ ID NO: 487180 - RNA, 22 nt, Human
agcugcuacugcucugccagag

SEQ ID NO: 487181 - RNA, 19 nt, Human
gagcugagaguagcacugg

SEQ ID NO: 487182 - RNA, 22 nt, Human
caggccuggcccccggcacacc

SEQ ID NO: 487183 - RNA, 22 nt, Human
ugcuguuauacuuagcugguua

SEQ ID NO: 487184 - RNA, 22 nt, Human
gagggcucugucuggaagggaa

SEQ ID NO: 487185 - RNA, 22 nt, Human
gaaaaagugaccuugguagcua

SEQ ID NO: 487186 - RNA, 22 nt, Human
cucagaauuacaucccauuuua

SEQ ID NO: 487187 - RNA, 22 nt, Human
cuggaaugagcagggcuuaugg

SEQ ID NO: 487188 - RNA, 23 nt, Human
ucugcucugaaguucggcugagc

SEQ ID NO: 487189 - RNA, 22 nt, Human
ucccagcacgucugcuguuucu

SEQ ID NO: 487190 - RNA, 22 nt, Human
ucagcagucacauguuguccca

SEQ ID NO: 487191 - RNA, 18 nt, Human
cgaggcaggcggaucacg

SEQ ID NO: 487192 - RNA, 21 nt, Human
aggcucagcagguguauaaag

SEQ ID NO: 487193 - RNA, 22 nt, Human
gcaguggauccaaugguaucuu

SEQ ID NO: 487194 - RNA, 22 nt, Human
cagcauggggaucacuguaggc

SEQ ID NO: 487195 - RNA, 22 nt, Human
caguacuuguccucagguguua

SEQ ID NO: 487196 - RNA, 22 nt, Human
aguuggagugaacaugagauug

SEQ ID NO: 487197 - RNA, 19 nt, Human
ucaaagucugagucacuuu

SEQ ID NO: 487198 - RNA, 22 nt, Human
auguaucaacaaauuguacagu

SEQ ID NO: 487199 - RNA, 22 nt, Human
uggcugagaccuucccaaauuc

SEQ ID NO: 487200 - RNA, 19 nt, Human
cugucaggggcuggauguu

SEQ ID NO: 487201 - RNA, 22 nt, Human
ugaccugcagucaagaggggaa

SEQ ID NO: 487202 - RNA, 19 nt, Human
cugaggcccauguaccaug

SEQ ID NO: 487203 - RNA, 19 nt, Human
auuuacugccuaaaaucuc

SEQ ID NO: 487204 - RNA, 22 nt, Human
agccuggcacugaggcagggcg

SEQ ID NO: 487205 - RNA, 20 nt, Human
auuuggcaugaaguauugau

SEQ ID NO: 487206 - RNA, 22 nt, Human
cagagccugccaccuuucuccc

SEQ ID NO: 487207 - RNA, 20 nt, Human
ugaaaaggucaggagacaug

SEQ ID NO: 487208 - RNA, 22 nt, Human
ucacagugaugacgugggagca

SEQ ID NO: 487209 - RNA, 23 nt, Human
cuacaagagcaagcauggacaag

SEQ ID NO: 487210 - RNA, 22 nt, Human
agacaggcuuugcuguauauca

SEQ ID NO: 487211 - RNA, 19 nt, Human
gccugagccagccaugcaa

SEQ ID NO: 487212 - RNA, 22 nt, Human
acugcuuacaaaaggaaagaau

SEQ ID NO: 487213 - RNA, 22 nt, Human
aggcacugaagaacucuuuuug

SEQ ID NO: 487214 - RNA, 22 nt, Human
cuuaacagauacaucugugguu

SEQ ID NO: 487215 - RNA, 22 nt, Human
aacugcauuugcauaaguccau

SEQ ID NO: 487216 - RNA, 22 nt, Human
gccuggaggaauguagcugagg

SEQ ID NO: 487217 - RNA, 22 nt, Human
ucagggaccccucugaguggag

SEQ ID NO: 487218 - RNA, 22 nt, Human
acacagggucuagaguuaggcc

SEQ ID NO: 487219 - RNA, 22 nt, Human
uuauucuucuucucuugccagg

SEQ ID NO: 487220 - RNA, 22 nt, Human
gacacauagaucuaucucacuc

SEQ ID NO: 487221 - RNA, 22 nt, Human
gcucugugggugaguagaaucu

SEQ ID NO: 487222 - RNA, 22 nt, Human
acaguguuuuagaaaagcuuga

SEQ ID NO: 487223 - RNA, 19 nt, Human
ggcuccuguggcugcagcc

SEQ ID NO: 487224 - RNA, 22 nt, Human
accuuuuuucagaacucuaaag

SEQ ID NO: 487225 - RNA, 22 nt, Human
gacacagcacuguacaaggaau

SEQ ID NO: 487226 - RNA, 22 nt, Human
acuaagaccuagauacuagggg

SEQ ID NO: 487227 - RNA, 22 nt, Human
uuugaaaauuuaagugcuacac

SEQ ID NO: 487228 - RNA, 22 nt, Human
cugggccugucagggcuuuuug

SEQ ID NO: 487229 - RNA, 22 nt, Human
ccagccuggagggcaguggugg

SEQ ID NO: 487230 - RNA, 22 nt, Human
aaagccuuggucaucugguucc

SEQ ID NO: 487231 - RNA, 22 nt, Human
aguuccagcugugaccagaaaa

SEQ ID NO: 487232 - RNA, 16 nt, Human
uccaggcauaucugag

SEQ ID NO: 487233 - RNA, 21 nt, Human
gcugugcacauaguagaagug

SEQ ID NO: 487234 - RNA, 23 nt, Human
gcauugucuccccacuucugggc

SEQ ID NO: 487235 - RNA, 19 nt, Human
gcugcuggcucuggcugga

SEQ ID NO: 487236 - RNA, 22 nt, Human
ugggcuguggagcaccuuugca

SEQ ID NO: 487237 - RNA, 22 nt, Human
aaguguuuggggaucauuuuaa

SEQ ID NO: 487238 - RNA, 22 nt, Human
cuccugagcucugaggaagcuu

SEQ ID NO: 487239 - RNA, 22 nt, Human
cugggcugagccugggcugugu

SEQ ID NO: 487240 - RNA, 22 nt, Human
uauacagaaccgccugaagucu

SEQ ID NO: 487241 - RNA, 22 nt, Human
acaggcugcugggcuccgugcu

SEQ ID NO: 487242 - RNA, 22 nt, Human
gccagcucccaagugagccccu

SEQ ID NO: 487243 - RNA, 22 nt, Human
uaggagaggugaauggcacacu

SEQ ID NO: 487244 - RNA, 22 nt, Human
gccuaggaguacagaaugguuu

SEQ ID NO: 487245 - RNA, 22 nt, Human
uguccucuuccagugcuccuuc

SEQ ID NO: 487246 - RNA, 20 nt, Human
cagcaggaaaagugccucag

SEQ ID NO: 487247 - RNA, 23 nt, Human
agccagggcacugguggagauug

SEQ ID NO: 487248 - RNA, 22 nt, Human
gcuuucuugguucugcaggggc

SEQ ID NO: 487249 - RNA, 22 nt, Human
gcagggaagacccggagcagcg

SEQ ID NO: 487250 - RNA, 22 nt, Human
cuuucacaguccugacugagcg

SEQ ID NO: 487251 - RNA, 22 nt, Human
uuagaaaaaggcuguggucuua

SEQ ID NO: 487252 - RNA, 22 nt, Human
cagugagggcccccuuccaggu

SEQ ID NO: 487253 - RNA, 22 nt, Human
aaagccagcucugagcugcacc

SEQ ID NO: 487254 - RNA, 22 nt, Human
ggccucugaggacagccuuggc

SEQ ID NO: 487255 - RNA, 22 nt, Human
cucaggauuaaggaaucuaaau

SEQ ID NO: 487256 - RNA, 20 nt, Human
ucucaggccccaguuuucuu

SEQ ID NO: 487257 - RNA, 22 nt, Human
cagagcagaaaccugggugauu

SEQ ID NO: 487258 - RNA, 22 nt, Human
gcagccaccucccauggcgggg

SEQ ID NO: 487259 - RNA, 22 nt, Human
ucucugcucugugccucaguuu

SEQ ID NO: 487260 - RNA, 22 nt, Human
ucucccaggcugcccuguggac

SEQ ID NO: 487261 - RNA, 22 nt, Human
uugaagcaugguacuuguucaa

SEQ ID NO: 487262 - RNA, 22 nt, Human
uuucaaugacacaaaagagaaa

SEQ ID NO: 487263 - RNA, 22 nt, Human
cacaaaaguaggaggcaggcgg

SEQ ID NO: 487264 - RNA, 22 nt, Human
uggcccugccacucacugcuga

SEQ ID NO: 487265 - RNA, 22 nt, Human
aagggcuggaucucucugagca

SEQ ID NO: 487266 - RNA, 22 nt, Human
aauguguauacuggcaauuaag

SEQ ID NO: 487267 - RNA, 22 nt, Human
ucucacugcaaauauuauguau

SEQ ID NO: 487268 - RNA, 23 nt, Human
gagugcagaauagacaugcagug

SEQ ID NO: 487269 - RNA, 22 nt, Human
ccugucuguccucucaugagcc

SEQ ID NO: 487270 - RNA, 22 nt, Human
gccugcaggcuguaguuuguga

SEQ ID NO: 487271 - RNA, 22 nt, Human
uucauaaugagguccuagaggc

SEQ ID NO: 487272 - RNA, 22 nt, Human
ccugagggcgccgagcucccag

SEQ ID NO: 487273 - RNA, 22 nt, Human
cagcagcaaaucuagaagagga

SEQ ID NO: 487274 - RNA, 18 nt, Human
cuguccaguagacucugc

SEQ ID NO: 487275 - RNA, 23 nt, Human
acagggcauugcuggccucgagg

SEQ ID NO: 487276 - RNA, 22 nt, Human
ccugggagugucagacuugcuu

SEQ ID NO: 487277 - RNA, 22 nt, Human
ugucuuuucuacuguaagcaua

SEQ ID NO: 487278 - RNA, 22 nt, Human
ucccagggugcgccugcccucg

SEQ ID NO: 487279 - RNA, 22 nt, Human
agaaaucuaagaugcucaagga

SEQ ID NO: 487280 - RNA, 22 nt, Human
aagaugcaugcugaagcuggcu

SEQ ID NO: 487281 - RNA, 22 nt, Human
cagguggguguaugaaugcaaa

SEQ ID NO: 487282 - RNA, 22 nt, Human
cccaggcacaccccgaacggaa

SEQ ID NO: 487283 - RNA, 22 nt, Human
guggcccucugauagggucagg

SEQ ID NO: 487284 - RNA, 22 nt, Human
caggaaggcgcggcugugccug

SEQ ID NO: 487285 - RNA, 22 nt, Human
cacagacccagaagggaugaag

SEQ ID NO: 487286 - RNA, 22 nt, Human
agcagggcuguguagguaauga

SEQ ID NO: 487287 - RNA, 22 nt, Human
cagggcuggcucaugaaaaguu

SEQ ID NO: 487288 - RNA, 19 nt, Human
ucaggacugacuugaaguc

SEQ ID NO: 487289 - RNA, 22 nt, Human
uggcagagaaccugggcuuugu

SEQ ID NO: 487290 - RNA, 22 nt, Human
gucaaguuaagauaaggucaug

SEQ ID NO: 487291 - RNA, 22 nt, Human
caagagcuagaaauugguuaga

SEQ ID NO: 487292 - RNA, 22 nt, Human
cuguggcaggaagggacuagca

SEQ ID NO: 487293 - RNA, 22 nt, Human
auggccuggggagcaugggaag

SEQ ID NO: 487294 - RNA, 22 nt, Human
cagcuuugccaaguaaggucuu

SEQ ID NO: 487295 - RNA, 22 nt, Human
gaaggcuggaaggcaaguagga

SEQ ID NO: 487296 - RNA, 22 nt, Human
uuuucauuguuacuaugagcua

SEQ ID NO: 487297 - RNA, 22 nt, Human
ccugcagcuccggauuucuggg

SEQ ID NO: 487298 - RNA, 22 nt, Human
ugagccuggcggaagcagcgug

SEQ ID NO: 487299 - RNA, 18 nt, Human
ucucugaauauuuuaugu

SEQ ID NO: 487300 - RNA, 22 nt, Human
agugaaaugauucugagcaaga

SEQ ID NO: 487301 - RNA, 22 nt, Human
ggucagcagugcagggcagagc

SEQ ID NO: 487302 - RNA, 20 nt, Human
ccagagcagccacugaaguu

SEQ ID NO: 487303 - RNA, 22 nt, Human
ugggcugcugagaaugagagag

SEQ ID NO: 487304 - RNA, 22 nt, Human
aauguacaauaagacaaagagg

SEQ ID NO: 487305 - RNA, 20 nt, Human
cagagaccaggccagguguc

SEQ ID NO: 487306 - RNA, 22 nt, Human
gggcaguggcucacgccuguaa

SEQ ID NO: 487307 - RNA, 22 nt, Human
acugccuuauaugcugugugug

SEQ ID NO: 487308 - RNA, 22 nt, Human
cuguguggacugguugaggccc

SEQ ID NO: 487309 - RNA, 22 nt, Human
gggcuccaccuagggacacugg

SEQ ID NO: 487310 - RNA, 22 nt, Human
uccuucagcucucuauuuagau

SEQ ID NO: 487311 - RNA, 22 nt, Human
cagaggaagagauacaagcccu

SEQ ID NO: 487312 - RNA, 22 nt, Human
ggcuggccucaggguccucgcu

SEQ ID NO: 487313 - RNA, 18 nt, Human
cucugcuaaugggcagcu

SEQ ID NO: 487314 - RNA, 22 nt, Human
cgcagggccgcgagcgggacca

SEQ ID NO: 487315 - RNA, 22 nt, Human
gagccugaauuugaccugcuua

SEQ ID NO: 487316 - RNA, 22 nt, Human
aaauccuaagcagaggaauuua

SEQ ID NO: 487317 - RNA, 22 nt, Human
guuguacagcauccagugcaga

SEQ ID NO: 487318 - RNA, 22 nt, Human
aaugcacauauauguguauaca

SEQ ID NO: 487319 - RNA, 22 nt, Human
uggccagguguggguucucaga

SEQ ID NO: 487320 - RNA, 22 nt, Human
ggcuggucacaccacugcaggg

SEQ ID NO: 487321 - RNA, 22 nt, Human
caaugauguuuagauaaaaucc

SEQ ID NO: 487322 - RNA, 22 nt, Human
uagcagcucacagccucccauu

SEQ ID NO: 487323 - RNA, 22 nt, Human
acucugccccgaguucugggaa

SEQ ID NO: 487324 - RNA, 22 nt, Human
ugcuggcuggccuggccuggac

SEQ ID NO: 487325 - RNA, 22 nt, Human
gauuucaagcccccagagauuc

SEQ ID NO: 487326 - RNA, 22 nt, Human
ucaggagauggucuuuauaggc

SEQ ID NO: 487327 - RNA, 22 nt, Human
aagaacugugcuccaggcucca

SEQ ID NO: 487328 - RNA, 19 nt, Human
uggcucugucgaaggcaca

SEQ ID NO: 487329 - RNA, 17 nt, Human
uggacccuugggccucc

SEQ ID NO: 487330 - RNA, 22 nt, Human
uugcauuguugcaaugaaguau

SEQ ID NO: 487331 - RNA, 22 nt, Human
caaauccagaucccagucguag

SEQ ID NO: 487332 - RNA, 22 nt, Human
gaguaagagcuggcuuuggugu

SEQ ID NO: 487333 - RNA, 22 nt, Human
cagggccaaguuggugccuuuu

SEQ ID NO: 487334 - RNA, 22 nt, Human
aagagagagcauucuucuguua

SEQ ID NO: 487335 - RNA, 22 nt, Human
ugcucugguaacucacuuccau

SEQ ID NO: 487336 - RNA, 22 nt, Human
ucucagggccucccucuguuuc

SEQ ID NO: 487337 - RNA, 22 nt, Human
gauuuuucaguauaaaauauau

SEQ ID NO: 487338 - RNA, 22 nt, Human
cugagagccuccuguuggcuag

SEQ ID NO: 487339 - RNA, 22 nt, Human
uuucuggcagcgggacaggggu

SEQ ID NO: 487340 - RNA, 22 nt, Human
gucccagaggacagggucacau

SEQ ID NO: 487341 - RNA, 22 nt, Human
gccuggagcucggcugagggcg

SEQ ID NO: 487342 - RNA, 22 nt, Human
uucaagauggcaccagugagug

SEQ ID NO: 487343 - RNA, 19 nt, Human
cagcugccuuuucuuugca

SEQ ID NO: 487344 - RNA, 22 nt, Human
accaggcagcaccaaagccggu

SEQ ID NO: 487345 - RNA, 21 nt, Human
ggagcugcaggagccgaaggc

SEQ ID NO: 487346 - RNA, 22 nt, Human
agauuucagaugcucggcaguu

SEQ ID NO: 487347 - RNA, 22 nt, Human
gagcucauccccaugguccguc

SEQ ID NO: 487348 - RNA, 22 nt, Human
gcuggcagaagagcugguucaa

SEQ ID NO: 487349 - RNA, 22 nt, Human
agcagcugcagagggcuccccc

SEQ ID NO: 487350 - RNA, 19 nt, Human
uacauuuguguacacuugu

SEQ ID NO: 487351 - RNA, 22 nt, Human
gugcucacugugagacguccug

SEQ ID NO: 487352 - RNA, 22 nt, Human
cagagcucagagcugccaggca

SEQ ID NO: 487353 - RNA, 22 nt, Human
agggagagguugaaaccucagu

SEQ ID NO: 487354 - RNA, 22 nt, Human
aggggcugggacagagccaagc

SEQ ID NO: 487355 - RNA, 22 nt, Human
aggugaguugguaggaaguuug

SEQ ID NO: 487356 - RNA, 22 nt, Human
ggugaaggucagagcaggaaaa

SEQ ID NO: 487357 - RNA, 22 nt, Human
uucucucauucaaauuaaagug

SEQ ID NO: 487358 - RNA, 22 nt, Human
gaggaggaggaaguggaaccca

SEQ ID NO: 487359 - RNA, 22 nt, Human
aggcugagaaagugggaagaug

SEQ ID NO: 487360 - RNA, 22 nt, Human
ccugccugcaaaaugggacaag

SEQ ID NO: 487361 - RNA, 22 nt, Human
gggcuggaggagauccagaggc

SEQ ID NO: 487362 - RNA, 22 nt, Human
aagggcucugggcuacgcacug

SEQ ID NO: 487363 - RNA, 22 nt, Human
ucuuaagcagagaagaaguuga

SEQ ID NO: 487364 - RNA, 22 nt, Human
uuuauccagaaucaggauuuuu

SEQ ID NO: 487365 - RNA, 22 nt, Human
ugcagggcuuccucuuggaguu

SEQ ID NO: 487366 - RNA, 20 nt, Human
gaagcagcuucauguagaca

SEQ ID NO: 487367 - RNA, 17 nt, Human
acacagggagagggagc

SEQ ID NO: 487368 - RNA, 22 nt, Human
gacagggccgcagauggagacu

SEQ ID NO: 487369 - RNA, 22 nt, Human
uggagaauucuauguugagggg

SEQ ID NO: 487370 - RNA, 22 nt, Human
gcagggcagcugaagcuaggug

SEQ ID NO: 487371 - RNA, 22 nt, Human
ucugggcucugucagcaccucu

SEQ ID NO: 487372 - RNA, 22 nt, Human
aaguccuuggagaauagaaagg

SEQ ID NO: 487373 - RNA, 22 nt, Human
agggcgacaauggagagcguuu

SEQ ID NO: 487374 - RNA, 22 nt, Human
agaaauguuguggguuuuguua

SEQ ID NO: 487375 - RNA, 22 nt, Human
ccuggcagcauugguagagauu

SEQ ID NO: 487376 - RNA, 22 nt, Human
gaacaguaaauuuaugcagcac

SEQ ID NO: 487377 - RNA, 22 nt, Human
ugggccuggguuccuccugggc

SEQ ID NO: 487378 - RNA, 22 nt, Human
cuauuagguaugugguugcuau

SEQ ID NO: 487379 - RNA, 22 nt, Human
uagaaacagaaaacuguaauag

SEQ ID NO: 487380 - RNA, 22 nt, Human
ucuggagcaacagagcaggaca

SEQ ID NO: 487381 - RNA, 22 nt, Human
cagggcuccccagagagccucu

SEQ ID NO: 487382 - RNA, 22 nt, Human
uagcugucagcaaucaaguggu

SEQ ID NO: 487383 - RNA, 22 nt, Human
uggccugacugucaggcuguau

SEQ ID NO: 487384 - RNA, 22 nt, Human
gcugagagaaaagugagguucu

SEQ ID NO: 487385 - RNA, 22 nt, Human
gggcugggauugcuugcuguga

SEQ ID NO: 487386 - RNA, 22 nt, Human
agggacuauuuacccaucucac

SEQ ID NO: 487387 - RNA, 22 nt, Human
cagcugccaugacauguccugc

SEQ ID NO: 487388 - RNA, 22 nt, Human
cagccaucaguaaagacagcuu

SEQ ID NO: 487389 - RNA, 22 nt, Human
ggugaggcccagugaucugugu

SEQ ID NO: 487390 - RNA, 22 nt, Human
aggugcugccccgagaaggaug

SEQ ID NO: 487391 - RNA, 22 nt, Human
caguggguccuaaguacaguuc

SEQ ID NO: 487392 - RNA, 22 nt, Human
ggucccugcugaagccuuggug

SEQ ID NO: 487393 - RNA, 22 nt, Human
ucuucuccagugcuucugcaca

SEQ ID NO: 487394 - RNA, 22 nt, Human
agugcagccgagaucaggugcu

SEQ ID NO: 487395 - RNA, 22 nt, Human
aucaggauccaccuugagccug

SEQ ID NO: 487396 - RNA, 22 nt, Human
ugggugagugggaaaagcccag

SEQ ID NO: 487397 - RNA, 16 nt, Human
uggaaggggucuccgg

SEQ ID NO: 487398 - RNA, 22 nt, Human
cggggcaggagucccuguagag

SEQ ID NO: 487399 - RNA, 22 nt, Human
uggcucagucauggaugaguaa

SEQ ID NO: 487400 - RNA, 22 nt, Human
uacaguucacaguaucauaaau

SEQ ID NO: 487401 - RNA, 22 nt, Human
uagccucuggaauccuuucucu

SEQ ID NO: 487402 - RNA, 22 nt, Human
ugggcucauggcccagcacugg

SEQ ID NO: 487403 - RNA, 22 nt, Human
cuccucuggaaauuccucugcc

SEQ ID NO: 487404 - RNA, 22 nt, Human
caaggcaggaagccugucuuau

SEQ ID NO: 487405 - RNA, 22 nt, Human
aaauuucuggaagugucagagu

SEQ ID NO: 487406 - RNA, 22 nt, Human
uaaacauggauucugaucacag

SEQ ID NO: 487407 - RNA, 22 nt, Human
ucugagcuacgaugccugucac

SEQ ID NO: 487408 - RNA, 22 nt, Human
ggcuuuauguuuuucauguggu

SEQ ID NO: 487409 - RNA, 22 nt, Human
uggcugagcucccuguguguug

SEQ ID NO: 487410 - RNA, 22 nt, Human
cuggagccccaggcugugcaga

SEQ ID NO: 487411 - RNA, 22 nt, Human
ucuaggagcaugaagggaaggc

SEQ ID NO: 487412 - RNA, 22 nt, Human
ucuccucugcgcggcagugccc

SEQ ID NO: 487413 - RNA, 22 nt, Human
aggcugaggcuggcagcuccag

SEQ ID NO: 487414 - RNA, 22 nt, Human
ccacacagggggaugaguuauu

SEQ ID NO: 487415 - RNA, 22 nt, Human
agggugcauguuugcaagagug

SEQ ID NO: 487416 - RNA, 22 nt, Human
cccaggcacauccacucuguga

SEQ ID NO: 487417 - RNA, 23 nt, Human
ugccagaggcagucacaguggug

SEQ ID NO: 487418 - RNA, 22 nt, Human
gacagggaggagcagagcuucu

SEQ ID NO: 487419 - RNA, 22 nt, Human
ggcgaggccgggacaggcugga

SEQ ID NO: 487420 - RNA, 22 nt, Human
gaggcgagaagcuggagauggu

SEQ ID NO: 487421 - RNA, 22 nt, Human
uggcugggcccccaccugccuc

SEQ ID NO: 487422 - RNA, 22 nt, Human
auggcccaggccuccuguggcu

SEQ ID NO: 487423 - RNA, 22 nt, Human
cauuucugggagacaugcuaga

SEQ ID NO: 487424 - RNA, 22 nt, Human
gggaucagaaacauagcccuga

SEQ ID NO: 487425 - RNA, 17 nt, Human
uguuuucauucauugcu

SEQ ID NO: 487426 - RNA, 22 nt, Human
ccagcaggaaagugacguuuga

SEQ ID NO: 487427 - RNA, 22 nt, Human
ccagaccacccuggccaugcac

SEQ ID NO: 487428 - RNA, 22 nt, Human
cagggguguuuuuggccaggag

SEQ ID NO: 487429 - RNA, 22 nt, Human
uggucaguugcaucagagaagu

SEQ ID NO: 487430 - RNA, 22 nt, Human
ugcagcugcuugauucaucuug

SEQ ID NO: 487431 - RNA, 22 nt, Human
agccuccuggaguuucugggau

SEQ ID NO: 487432 - RNA, 22 nt, Human
ucucaggaagugauauugagac

SEQ ID NO: 487433 - RNA, 22 nt, Human
gugugccaggaacuggcugcug

SEQ ID NO: 487434 - RNA, 22 nt, Human
gcaagauguuaacauagggaga

SEQ ID NO: 487435 - RNA, 22 nt, Human
cugggccuagaggaagcugaca

SEQ ID NO: 487436 - RNA, 22 nt, Human
uugaaucauuacaauagauaag

SEQ ID NO: 487437 - RNA, 22 nt, Human
caaaugugacuuuugggcuucu

SEQ ID NO: 487438 - RNA, 22 nt, Human
agggcugggcugcuuguuguca

SEQ ID NO: 487439 - RNA, 22 nt, Human
uuucacaacguuguggugagag

SEQ ID NO: 487440 - RNA, 22 nt, Human
agaagcagacucugaggcaagg

SEQ ID NO: 487441 - RNA, 22 nt, Human
uccugguggugccagcugcagg

SEQ ID NO: 487442 - RNA, 22 nt, Human
cugucucugucuuaacucccag

SEQ ID NO: 487443 - RNA, 22 nt, Human
ggcagggguccugguguugacu

SEQ ID NO: 487444 - RNA, 22 nt, Human
aucaguuuaacugucaagagcc

SEQ ID NO: 487445 - RNA, 22 nt, Human
ccucccuggccagagcagcagc

SEQ ID NO: 487446 - RNA, 22 nt, Human
ggcugcuguacugaugucaguu

SEQ ID NO: 487447 - RNA, 20 nt, Human
agggcagcuugaggagccgg

SEQ ID NO: 487448 - RNA, 22 nt, Human
uccugagggcgauucagcaggu

SEQ ID NO: 487449 - RNA, 22 nt, Human
gccugagcaggcguggaccaug

SEQ ID NO: 487450 - RNA, 22 nt, Human
gggcuucucuuuagugagcuga

SEQ ID NO: 487451 - RNA, 19 nt, Human
caguggagauuggaggagg

SEQ ID NO: 487452 - RNA, 22 nt, Human
ccugaagcaaggguaggcaggu

SEQ ID NO: 487453 - RNA, 22 nt, Human
caguggggaggccaggauagaa

SEQ ID NO: 487454 - RNA, 22 nt, Human
uuaacaugucuugacuucaucu

SEQ ID NO: 487455 - RNA, 22 nt, Human
ggcagagguagcuggaaccagg

SEQ ID NO: 487456 - RNA, 22 nt, Human
uuuccucugaugcugacuugga

SEQ ID NO: 487457 - RNA, 22 nt, Human
auuuucugguugagguuuaaca

SEQ ID NO: 487458 - RNA, 22 nt, Human
uggccugggcaugaagcaucgu

SEQ ID NO: 487459 - RNA, 22 nt, Human
cccugcaggcucagacuggagu

SEQ ID NO: 487460 - RNA, 22 nt, Human
uuaauuuucucaucugugaaau

SEQ ID NO: 487461 - RNA, 22 nt, Human
gcugagcucccagcaguaucug

SEQ ID NO: 487462 - RNA, 22 nt, Human
cuggagccggaccagggacggu

SEQ ID NO: 487463 - RNA, 18 nt, Human
ugaggcagucagugaugg

SEQ ID NO: 487464 - RNA, 22 nt, Human
gagaagucauuugaccaccuag

SEQ ID NO: 487465 - RNA, 22 nt, Human
cccagcucugcagaccugcccu

SEQ ID NO: 487466 - RNA, 22 nt, Human
uggcagagugcagaagaggcau

SEQ ID NO: 487467 - RNA, 22 nt, Human
acagggucaagggugcuacaag

SEQ ID NO: 487468 - RNA, 22 nt, Human
agcagcauuccuggcuucuauc

SEQ ID NO: 487469 - RNA, 22 nt, Human
ccucccaccguaucucaguggc

SEQ ID NO: 487470 - RNA, 22 nt, Human
aagaauguggguggauaugaug

SEQ ID NO: 487471 - RNA, 18 nt, Human
cccagccucuccuuucua

SEQ ID NO: 487472 - RNA, 22 nt, Human
cuucugugcuucacaguugcca

SEQ ID NO: 487473 - RNA, 21 nt, Human
aaguaaaucagagaaauaacc

SEQ ID NO: 487474 - RNA, 22 nt, Human
gcagagcugucuaagucacuuc

SEQ ID NO: 487475 - RNA, 22 nt, Human
augcaguacugauacaugccac

SEQ ID NO: 487476 - RNA, 22 nt, Human
cagcaucuuucucuucuggagu

SEQ ID NO: 487477 - RNA, 22 nt, Human
uuaaacagucccagaggcugac

SEQ ID NO: 487478 - RNA, 22 nt, Human
uguauuuugugaggaucacucu

SEQ ID NO: 487479 - RNA, 22 nt, Human
cucuggccgcagcucagcucug

SEQ ID NO: 487480 - RNA, 22 nt, Human
ccugggucuugguucaugcucu

SEQ ID NO: 487481 - RNA, 22 nt, Human
ucagagagugcaaaauauagcu

SEQ ID NO: 487482 - RNA, 22 nt, Human
uuauggcauauuccucauugua

SEQ ID NO: 487483 - RNA, 22 nt, Human
agcagcauuaugauauaucuua

SEQ ID NO: 487484 - RNA, 22 nt, Human
agucucugcacaguaagaagca

SEQ ID NO: 487485 - RNA, 22 nt, Human
gcacagggcccugugcguaggu

SEQ ID NO: 487486 - RNA, 19 nt, Human
ugaaauggcaguugcuaaa

SEQ ID NO: 487487 - RNA, 22 nt, Human
aaaugguguuucuaaugcuaga

SEQ ID NO: 487488 - RNA, 22 nt, Human
ugcagaaguauuccaggcccca

SEQ ID NO: 487489 - RNA, 22 nt, Human
gcauugucaaaagugguaugac

SEQ ID NO: 487490 - RNA, 22 nt, Human
gagaggucaucucccaucagca

SEQ ID NO: 487491 - RNA, 22 nt, Human
ccuguacagugaaugaauguga

SEQ ID NO: 487492 - RNA, 22 nt, Human
uaguacuuaucucugucauugu

SEQ ID NO: 487493 - RNA, 22 nt, Human
gccugucugcgucacgcuuauu

SEQ ID NO: 487494 - RNA, 22 nt, Human
uuccuaaaagaauacacuggau

SEQ ID NO: 487495 - RNA, 22 nt, Human
gcccccucuuuggagccagcca

SEQ ID NO: 487496 - RNA, 22 nt, Human
uagucaaaccucagaauacccc

SEQ ID NO: 487497 - RNA, 22 nt, Human
augcaccugaacuccaucagcu

SEQ ID NO: 487498 - RNA, 22 nt, Human
cagcugcccugccuugcccuua

SEQ ID NO: 487499 - RNA, 22 nt, Human
cuggcccagucucagaguguca

SEQ ID NO: 487500 - RNA, 22 nt, Human
gccugccuuuuggaggcacauu

SEQ ID NO: 487501 - RNA, 22 nt, Human
cagggacaauggcagagccuga

SEQ ID NO: 487502 - RNA, 22 nt, Human
agaguguuauuugcucuguauu

SEQ ID NO: 487503 - RNA, 22 nt, Human
gucuuuauuugagauugucauu

SEQ ID NO: 487504 - RNA, 18 nt, Human
uaaaugcauguuaauaac

SEQ ID NO: 487505 - RNA, 22 nt, Human
ucagcagugcagggugaggcag

SEQ ID NO: 487506 - RNA, 22 nt, Human
augcccaaugucacaauuuuug

SEQ ID NO: 487507 - RNA, 22 nt, Human
gaaggcugcugggaaguguggu

SEQ ID NO: 487508 - RNA, 22 nt, Human
agacacaggauucugcauuucu

SEQ ID NO: 487509 - RNA, 22 nt, Human
aggccagcucacccuggcuccu

SEQ ID NO: 487510 - RNA, 21 nt, Human
ccugccaggaaacugaguguc

SEQ ID NO: 487511 - RNA, 20 nt, Human
cauauauaccuagaagugga

SEQ ID NO: 487512 - RNA, 22 nt, Human
uucaaauuaccacauuugcuua

SEQ ID NO: 487513 - RNA, 22 nt, Human
agaagugccauacuguggucca

SEQ ID NO: 487514 - RNA, 22 nt, Human
agccuggaauuaaggaaaugca

SEQ ID NO: 487515 - RNA, 22 nt, Human
uaaggccaccguuauagaacca

SEQ ID NO: 487516 - RNA, 22 nt, Human
uacacuuuuuacuacagauucu

SEQ ID NO: 487517 - RNA, 22 nt, Human
uucagagccacuucaagucuaa

SEQ ID NO: 487518 - RNA, 22 nt, Human
caaggccaaagggccacuguca

SEQ ID NO: 487519 - RNA, 22 nt, Human
aucacauuguuagcauagacug

SEQ ID NO: 487520 - RNA, 22 nt, Human
guacauguugguuguuuccagu

SEQ ID NO: 487521 - RNA, 22 nt, Human
acaugauucuugauaggcauug

SEQ ID NO: 487522 - RNA, 22 nt, Human
ugacauuuaucuucuacaauga

SEQ ID NO: 487523 - RNA, 18 nt, Human
ugcuggcaacuacuauug

SEQ ID NO: 487524 - RNA, 19 nt, Human
ucucugcuucucuuggcau

SEQ ID NO: 487525 - RNA, 20 nt, Human
ccuggcuuugcaucugugau

SEQ ID NO: 487526 - RNA, 22 nt, Human
ccucucuguguggccucuccau

SEQ ID NO: 487527 - RNA, 22 nt, Human
ucagggcucaccagccucugcc

SEQ ID NO: 487528 - RNA, 22 nt, Human
agcagagcugcaguggccugcu

SEQ ID NO: 487529 - RNA, 22 nt, Human
cucaggaggccauucucaaggu

SEQ ID NO: 487530 - RNA, 22 nt, Human
ggggagugacgcagggccauag

SEQ ID NO: 487531 - RNA, 22 nt, Human
aaaagguaguugccaaauaagg

SEQ ID NO: 487532 - RNA, 22 nt, Human
uauugaaauccauuacguucuu

SEQ ID NO: 487533 - RNA, 17 nt, Human
ucaggauccaggguucu

SEQ ID NO: 487534 - RNA, 22 nt, Human
gagaaggggugauguggguaau

SEQ ID NO: 487535 - RNA, 22 nt, Human
gcugagugagguccagagcuug

SEQ ID NO: 487536 - RNA, 22 nt, Human
aaacaguagaaguguauuuuau

SEQ ID NO: 487537 - RNA, 22 nt, Human
ggaggugguggcagugacaauu

SEQ ID NO: 487538 - RNA, 22 nt, Human
cacauguaguaagcaggcaaug

SEQ ID NO: 487539 - RNA, 22 nt, Human
ggagccuguggcugcuugaagc

SEQ ID NO: 487540 - RNA, 22 nt, Human
cuggcccauggugagcucuggg

SEQ ID NO: 487541 - RNA, 22 nt, Human
cugucuccagggcaggugcagg

SEQ ID NO: 487542 - RNA, 22 nt, Human
cuacuucugugaugaaacuaca

SEQ ID NO: 487543 - RNA, 22 nt, Human
caaaaacugcaauuacuuuuac

SEQ ID NO: 487544 - RNA, 22 nt, Human
uguacaaugccgagacuaacuc

SEQ ID NO: 487545 - RNA, 22 nt, Human
ucccagcccagauuugugugac

SEQ ID NO: 487546 - RNA, 22 nt, Human
gccaggggacgcggagcgacga

SEQ ID NO: 487547 - RNA, 22 nt, Human
cagaaaaccugacucuagaacu

SEQ ID NO: 487548 - RNA, 17 nt, Human
cugaggcccagggccca

SEQ ID NO: 487549 - RNA, 19 nt, Human
cugccuguuauggagagaa

SEQ ID NO: 487550 - RNA, 22 nt, Human
aggcuggguaccugucauaugc

SEQ ID NO: 487551 - RNA, 22 nt, Human
gagcuuggugaugccuccuggu

SEQ ID NO: 487552 - RNA, 22 nt, Human
guacaaaguggaccugauagua

SEQ ID NO: 487553 - RNA, 22 nt, Human
aaugcaguuucauuuguagaau

SEQ ID NO: 487554 - RNA, 22 nt, Human
uccacagaauguaagauccaca

SEQ ID NO: 487555 - RNA, 22 nt, Human
guuuucauuacugcugugauuu

SEQ ID NO: 487556 - RNA, 22 nt, Human
caauaugcaagcuauuaaguau

SEQ ID NO: 487557 - RNA, 22 nt, Human
ccagcucugccaagcgucagcu

SEQ ID NO: 487558 - RNA, 22 nt, Human
uugcagagaucagcagguuuga

SEQ ID NO: 487559 - RNA, 22 nt, Human
gaggagguuccggguggagaag

SEQ ID NO: 487560 - RNA, 22 nt, Human
ugaaggugaaugucuaugggga

SEQ ID NO: 487561 - RNA, 22 nt, Human
cgccugggaguccacaccugcu

SEQ ID NO: 487562 - RNA, 21 nt, Human
cccugcaggccagggcugagc

SEQ ID NO: 487563 - RNA, 22 nt, Human
uccugcaguuacaucccagcca

SEQ ID NO: 487564 - RNA, 19 nt, Human
aagaagcaauaagcuguga

SEQ ID NO: 487565 - RNA, 22 nt, Human
agagcuguucaacguagcaaug

SEQ ID NO: 487566 - RNA, 22 nt, Human
ccaaagucagugcucagucguc

SEQ ID NO: 487567 - RNA, 19 nt, Human
ggccaggcugacugugguc

SEQ ID NO: 487568 - RNA, 22 nt, Human
ggggaccuaggcucugucucuu

SEQ ID NO: 487569 - RNA, 22 nt, Human
uaacagaaaggggacagaaaua

SEQ ID NO: 487570 - RNA, 22 nt, Human
cugccucuggccucaggcccag

SEQ ID NO: 487571 - RNA, 21 nt, Human
ccagcugucuguccuuaggca

SEQ ID NO: 487572 - RNA, 22 nt, Human
ugcauuccuccaccuccugcac

SEQ ID NO: 487573 - RNA, 22 nt, Human
agucuucagagaaauuaacucu

SEQ ID NO: 487574 - RNA, 22 nt, Human
auguuauuuuggaaaauacaaa

SEQ ID NO: 487575 - RNA, 22 nt, Human
gggagagagaaaacguggcgca

SEQ ID NO: 487576 - RNA, 22 nt, Human
acucaggaaaugagaggcucuc

SEQ ID NO: 487577 - RNA, 22 nt, Human
uggcagcauuuuuuccagaaca

SEQ ID NO: 487578 - RNA, 22 nt, Human
ugcugcucaaugagaugccauc

SEQ ID NO: 487579 - RNA, 17 nt, Human
uauguaguacuuauaaa

SEQ ID NO: 487580 - RNA, 22 nt, Human
ucauuuaauaauuuuugaguag

SEQ ID NO: 487581 - RNA, 22 nt, Human
cuagaaaaauacuuuauuguga

SEQ ID NO: 487582 - RNA, 22 nt, Human
acugcuuuucagagucugccug

SEQ ID NO: 487583 - RNA, 22 nt, Human
uucuccgcuaaguucucugcag

SEQ ID NO: 487584 - RNA, 22 nt, Human
ccaaggcaggggaucaaaguuu

SEQ ID NO: 487585 - RNA, 22 nt, Human
aggcccuguuaugagccacugu

SEQ ID NO: 487586 - RNA, 22 nt, Human
uggaaugacagagagucugaau

SEQ ID NO: 487587 - RNA, 22 nt, Human
ggaggccaucagggagggcauu

SEQ ID NO: 487588 - RNA, 22 nt, Human
agcugccccaugagaggcaggu

SEQ ID NO: 487589 - RNA, 22 nt, Human
uccuccucuaucagacagugcc

SEQ ID NO: 487590 - RNA, 22 nt, Human
guccaguguguuuaucuuggau

SEQ ID NO: 487591 - RNA, 22 nt, Human
agcagccacccagcugcucauu

SEQ ID NO: 487592 - RNA, 21 nt, Human
agggccugugcucuccagguc

SEQ ID NO: 487593 - RNA, 22 nt, Human
uucuaccauugggaaaacagcc

SEQ ID NO: 487594 - RNA, 22 nt, Human
cucugguguccuuuagaauuua

SEQ ID NO: 487595 - RNA, 22 nt, Human
cuucaggauuuaggaagaugaa

SEQ ID NO: 487596 - RNA, 22 nt, Human
uucuaccagaccccagacuugu

SEQ ID NO: 487597 - RNA, 22 nt, Human
ucuggcucggauuugucuagca

SEQ ID NO: 487598 - RNA, 22 nt, Human
gccauuuagggaggcaagguga

SEQ ID NO: 487599 - RNA, 22 nt, Human
uuucacauacaguguauaguag

SEQ ID NO: 487600 - RNA, 22 nt, Human
aacauuucagcaaauaagaaca

SEQ ID NO: 487601 - RNA, 22 nt, Human
ugacacagauuagagacauacc

SEQ ID NO: 487602 - RNA, 22 nt, Human
cccuccagccauggacccaggu

SEQ ID NO: 487603 - RNA, 20 nt, Human
cuuagaaauuuuuacccugg

SEQ ID NO: 487604 - RNA, 19 nt, Human
ugagacagggauucaggug

SEQ ID NO: 487605 - RNA, 22 nt, Human
ccuuuugcucucccauccagaa

SEQ ID NO: 487606 - RNA, 22 nt, Human
uauuagggaacugcaagacuaa

SEQ ID NO: 487607 - RNA, 22 nt, Human
ggaggcucccacgcagcucaca

SEQ ID NO: 487608 - RNA, 22 nt, Human
cuggccugugggcugucuccgg

SEQ ID NO: 487609 - RNA, 22 nt, Human
agcagcauuuaaggauccaagu

SEQ ID NO: 487610 - RNA, 22 nt, Human
aagcaagacagaaguuacugcc

SEQ ID NO: 487611 - RNA, 22 nt, Human
cagaauaugacaagauuuuccu

SEQ ID NO: 487612 - RNA, 23 nt, Human
ccuucagaagaaguaacaggggc

SEQ ID NO: 487613 - RNA, 19 nt, Human
augucccaccgccccugag

SEQ ID NO: 487614 - RNA, 22 nt, Human
gcaugguggccuuaggguagcc

SEQ ID NO: 487615 - RNA, 22 nt, Human
cugaggagagaucacguggugu

SEQ ID NO: 487616 - RNA, 22 nt, Human
gccagagcugagugagguucuu

SEQ ID NO: 487617 - RNA, 22 nt, Human
auaaaaacugacccauccuuug

SEQ ID NO: 487618 - RNA, 22 nt, Human
cacaggcagccuuguagaagaa

SEQ ID NO: 487619 - RNA, 22 nt, Human
agccuucagcaguucaggugcc

SEQ ID NO: 487620 - RNA, 22 nt, Human
agauacaaaagauaagauuuag

SEQ ID NO: 487621 - RNA, 22 nt, Human
uguugaagauaaaguucucauu

SEQ ID NO: 487622 - RNA, 22 nt, Human
ugucacauugaauaugauuuau

SEQ ID NO: 487623 - RNA, 22 nt, Human
cuucuugcugggggccucagug

SEQ ID NO: 487624 - RNA, 22 nt, Human
aagggcuggaauaucucuuaga

SEQ ID NO: 487625 - RNA, 22 nt, Human
agggcagagacaugcuuccuga

SEQ ID NO: 487626 - RNA, 22 nt, Human
ccagagagucgaugggggacac

SEQ ID NO: 487627 - RNA, 22 nt, Human
ggcuucccuuuccgagaggaga

SEQ ID NO: 487628 - RNA, 22 nt, Human
gaaaggccauuucugaggguuu

SEQ ID NO: 487629 - RNA, 22 nt, Human
cugggugaguugaugaaggaga

SEQ ID NO: 487630 - RNA, 22 nt, Human
uccugcagccuugggcuggagc

SEQ ID NO: 487631 - RNA, 22 nt, Human
uuucacacuagucagaauacca

SEQ ID NO: 487632 - RNA, 22 nt, Human
cagucuggaggucagcuggcuu

SEQ ID NO: 487633 - RNA, 22 nt, Human
caggcagcuagauuuauaacaa

SEQ ID NO: 487634 - RNA, 22 nt, Human
aggccuguuccaggccccuuuu

SEQ ID NO: 487635 - RNA, 22 nt, Human
uuugugaagggaacagaagugu

SEQ ID NO: 487636 - RNA, 22 nt, Human
aagaugcgguugaccauggugu

SEQ ID NO: 487637 - RNA, 22 nt, Human
uagucucugcuuugcccuuggc

SEQ ID NO: 487638 - RNA, 22 nt, Human
ccugccaggagcuggugcugca

SEQ ID NO: 487639 - RNA, 22 nt, Human
cugaggcaguuuaauuuuugaa

SEQ ID NO: 487640 - RNA, 22 nt, Human
gagccuggggacccuccugagu

SEQ ID NO: 487641 - RNA, 22 nt, Human
cuauugaauuaacuauuaaagu

SEQ ID NO: 487642 - RNA, 22 nt, Human
aucaggaucaugcuggguggga

SEQ ID NO: 487643 - RNA, 22 nt, Human
auugcacaaacacagucagacu

SEQ ID NO: 487644 - RNA, 22 nt, Human
cccuggaggcggauguugcagu

SEQ ID NO: 487645 - RNA, 22 nt, Human
ggcauguuucaucacaucaaga

SEQ ID NO: 487646 - RNA, 22 nt, Human
gaggcccaguccugcaagcacg

SEQ ID NO: 487647 - RNA, 22 nt, Human
ccacagcugaccgcaggugagc

SEQ ID NO: 487648 - RNA, 22 nt, Human
ucacaguuauagucuguagaau

SEQ ID NO: 487649 - RNA, 22 nt, Human
ccacagcaugcaggccugacac

SEQ ID NO: 487650 - RNA, 22 nt, Human
ucaggagaaucagggcuguccu

SEQ ID NO: 487651 - RNA, 22 nt, Human
acauuuuaauaugcuuagugug

SEQ ID NO: 487652 - RNA, 22 nt, Human
gucccugcccuccugggacuca

SEQ ID NO: 487653 - RNA, 22 nt, Human
uucacauuucauaccacagcuu

SEQ ID NO: 487654 - RNA, 22 nt, Human
uacagagacuuuauggcacaaa

SEQ ID NO: 487655 - RNA, 22 nt, Human
aagcuuccugaaugcucauuua

SEQ ID NO: 487656 - RNA, 22 nt, Human
cugcuggagguuggagcaugca

SEQ ID NO: 487657 - RNA, 22 nt, Human
cagguacauucguagacccauu

SEQ ID NO: 487658 - RNA, 17 nt, Human
cuggagccuccaacucc

SEQ ID NO: 487659 - RNA, 22 nt, Human
ccugagugaauucccucacugu

SEQ ID NO: 487660 - RNA, 22 nt, Human
cuggcuggcaaguagaacacaa

SEQ ID NO: 487661 - RNA, 22 nt, Human
uccugaggcacaauccuagaau

SEQ ID NO: 487662 - RNA, 22 nt, Human
auuucacucuuaauugcuuccu

SEQ ID NO: 487663 - RNA, 22 nt, Human
ggcccugggcagaggagugggc

SEQ ID NO: 487664 - RNA, 22 nt, Human
uugcucagcacuggagccagcu

SEQ ID NO: 487665 - RNA, 22 nt, Human
uugcauaaaagaguauaucuua

SEQ ID NO: 487666 - RNA, 22 nt, Human
uugugaaacauucauggauuug

SEQ ID NO: 487667 - RNA, 22 nt, Human
uucucagauccaucagaagucc

SEQ ID NO: 487668 - RNA, 22 nt, Human
ccauggagcgggugagugagug

SEQ ID NO: 487669 - RNA, 22 nt, Human
ucacauuuguguuuuauuagag

SEQ ID NO: 487670 - RNA, 20 nt, Human
guauuagguguuccucuuuc

SEQ ID NO: 487671 - RNA, 20 nt, Human
cuguggcaucugucauggug

SEQ ID NO: 487672 - RNA, 22 nt, Human
acaggccugacacacagagggc

SEQ ID NO: 487673 - RNA, 20 nt, Human
ccucaguguccuggacuggg

SEQ ID NO: 487674 - RNA, 22 nt, Human
cccugccugugggcaucaacau

SEQ ID NO: 487675 - RNA, 22 nt, Human
ggcuccuggcaucuggugggua

SEQ ID NO: 487676 - RNA, 22 nt, Human
ggucaugcugugaaucagugcu

SEQ ID NO: 487677 - RNA, 22 nt, Human
gagcucugggaaacaaagugua

SEQ ID NO: 487678 - RNA, 22 nt, Human
ucugucuccugccagugccucu

SEQ ID NO: 487679 - RNA, 22 nt, Human
ucuguacauuuguguugugaau

SEQ ID NO: 487680 - RNA, 22 nt, Human
ugcaagagguaaaaugaaagga

SEQ ID NO: 487681 - RNA, 22 nt, Human
uaggaaaagucuagauugauga

SEQ ID NO: 487682 - RNA, 22 nt, Human
ccccaccugugcgucugccgca

SEQ ID NO: 487683 - RNA, 23 nt, Human
ugggaccuguuugcccacagaug

SEQ ID NO: 487684 - RNA, 22 nt, Human
agucccagcucagaaccacuag

SEQ ID NO: 487685 - RNA, 22 nt, Human
gggccugggaacuugcauuuag

SEQ ID NO: 487686 - RNA, 22 nt, Human
cugaagaggacgcagcagcaag

SEQ ID NO: 487687 - RNA, 17 nt, Human
aauagcugcucagagag

SEQ ID NO: 487688 - RNA, 23 nt, Human
gcucagagguuuuucucuggaug

SEQ ID NO: 487689 - RNA, 22 nt, Human
gagcugcuucugugugccgggu

SEQ ID NO: 487690 - RNA, 22 nt, Human
gggcagugucggggcccaggga

SEQ ID NO: 487691 - RNA, 22 nt, Human
ugucagugaguuaguugcaagu

SEQ ID NO: 487692 - RNA, 22 nt, Human
uagcuuuaagacauggugaaug

SEQ ID NO: 487693 - RNA, 23 nt, Human
cuggaagugcuuuuauagcuuug

SEQ ID NO: 487694 - RNA, 22 nt, Human
gacuguguccaugugcuggauu

SEQ ID NO: 487695 - RNA, 22 nt, Human
uacagggguaacaguggggaau

SEQ ID NO: 487696 - RNA, 22 nt, Human
cucugagcccgcugcagcccca

SEQ ID NO: 487697 - RNA, 22 nt, Human
ccucagggucugaggagaccgu

SEQ ID NO: 487698 - RNA, 22 nt, Human
aacuguaaggcuuagaacagca

SEQ ID NO: 487699 - RNA, 22 nt, Human
gcucccagggcagcgcagaaga

SEQ ID NO: 487700 - RNA, 22 nt, Human
uaccuuggguugaguucauucu

SEQ ID NO: 487701 - RNA, 22 nt, Human
ggaagggcaaaagagaugaacu

SEQ ID NO: 487702 - RNA, 22 nt, Human
ugaagcugugggcaguggagcc

SEQ ID NO: 487703 - RNA, 22 nt, Human
uuguaacagcugcuuaauagag

SEQ ID NO: 487704 - RNA, 22 nt, Human
auuuccaaaaccacuuauugcc

SEQ ID NO: 487705 - RNA, 22 nt, Human
uuucuguauuuaaaagaucugg

SEQ ID NO: 487706 - RNA, 22 nt, Human
ggauccuuaacuaucacaguga

SEQ ID NO: 487707 - RNA, 22 nt, Human
uggcugagaaaaugguuuuagg

SEQ ID NO: 487708 - RNA, 22 nt, Human
agagugaagguugacacuucac

SEQ ID NO: 487709 - RNA, 22 nt, Human
gaugcacagugacccugccagu

SEQ ID NO: 487710 - RNA, 22 nt, Human
uggcaggagacacauggcauag

SEQ ID NO: 487711 - RNA, 22 nt, Human
cagcuggcuggucagugcacaa

SEQ ID NO: 487712 - RNA, 22 nt, Human
aggcaggccccugagaauagac

SEQ ID NO: 487713 - RNA, 22 nt, Human
acacuucuauucccugcacaaa

SEQ ID NO: 487714 - RNA, 22 nt, Human
agggccugagcuggcugaccuc

SEQ ID NO: 487715 - RNA, 19 nt, Human
gcacugaagaguuggucac

SEQ ID NO: 487716 - RNA, 21 nt, Human
agcuggugucagagcucuggg

SEQ ID NO: 487717 - RNA, 22 nt, Human
ucuggcuuucauuuguuuaaag

SEQ ID NO: 487718 - RNA, 22 nt, Human
agcaguggagcgagauguuuaa

SEQ ID NO: 487719 - RNA, 22 nt, Human
uggcccugcagaacuagccugg

SEQ ID NO: 487720 - RNA, 22 nt, Human
ggcaguggcuccucucuacucc

SEQ ID NO: 487721 - RNA, 19 nt, Human
uggcuucuguuuucauguu

SEQ ID NO: 487722 - RNA, 22 nt, Human
gcagggcuguucaggagggugg

SEQ ID NO: 487723 - RNA, 22 nt, Human
gcuccucucccagagcugcagg

SEQ ID NO: 487724 - RNA, 22 nt, Human
agcacccuccaacuucccugua

SEQ ID NO: 487725 - RNA, 22 nt, Human
ucagguggcuuggagggggacg

SEQ ID NO: 487726 - RNA, 22 nt, Human
agucauauguggcauuuucuaa

SEQ ID NO: 487727 - RNA, 22 nt, Human
aggacuccauguguccuggaga

SEQ ID NO: 487728 - RNA, 22 nt, Human
cuacauaaauauuuaugugucu

SEQ ID NO: 487729 - RNA, 22 nt, Human
cagggcucacucggcuggcguc

SEQ ID NO: 487730 - RNA, 20 nt, Human
agccaggcucaagcuccccc

SEQ ID NO: 487731 - RNA, 22 nt, Human
uaaagguaacaugaacugcuuu

SEQ ID NO: 487732 - RNA, 20 nt, Human
ccagcugagccaaggggaga

SEQ ID NO: 487733 - RNA, 22 nt, Human
uuugcauucuagaaaaauuucu

SEQ ID NO: 487734 - RNA, 22 nt, Human
accucugccaagaugugcuccc

SEQ ID NO: 487735 - RNA, 22 nt, Human
cagcugugcuguauuaagcucu

SEQ ID NO: 487736 - RNA, 22 nt, Human
cagcauggcuugaguguuuccu

SEQ ID NO: 487737 - RNA, 22 nt, Human
uccucaggaucuaggagugcuu

SEQ ID NO: 487738 - RNA, 22 nt, Human
gcugggcuugguuucccugcuu

SEQ ID NO: 487739 - RNA, 22 nt, Human
ccagagcagggcagcagggcuc

SEQ ID NO: 487740 - RNA, 22 nt, Human
ggugcccaccugucuuccugga

SEQ ID NO: 487741 - RNA, 22 nt, Human
acuuuuuuauaaggaagaagau

SEQ ID NO: 487742 - RNA, 22 nt, Human
cugagcugaaacuugagaggcu

SEQ ID NO: 487743 - RNA, 22 nt, Human
aguuucuagccucacuguuuag

SEQ ID NO: 487744 - RNA, 22 nt, Human
gagaaccucuccacaagucugg

SEQ ID NO: 487745 - RNA, 22 nt, Human
aguagaaagaaggcacugggcc

SEQ ID NO: 487746 - RNA, 22 nt, Human
ccucccuuggccauagccagcc

SEQ ID NO: 487747 - RNA, 22 nt, Human
gagagugaggcaucaggggcag

SEQ ID NO: 487748 - RNA, 22 nt, Human
aaagguaguacuucuagaaggg

SEQ ID NO: 487749 - RNA, 22 nt, Human
aagcugccacacggugaguacu

SEQ ID NO: 487750 - RNA, 22 nt, Human
ugugaaagauacuaggcagagg

SEQ ID NO: 487751 - RNA, 22 nt, Human
uacuguuuucuauaauggcugu

SEQ ID NO: 487752 - RNA, 22 nt, Human
cugcaggcaucuaacugugggc

SEQ ID NO: 487753 - RNA, 22 nt, Human
uuugaaaguccuaggagagucc

SEQ ID NO: 487754 - RNA, 22 nt, Human
agggcagagaaauguaguugag

SEQ ID NO: 487755 - RNA, 22 nt, Human
auacaaagcuuucugucuggua

SEQ ID NO: 487756 - RNA, 22 nt, Human
agauguaguagugggucuuuua

SEQ ID NO: 487757 - RNA, 22 nt, Human
caggguggaauggaaugcuggc

SEQ ID NO: 487758 - RNA, 22 nt, Human
ggcagaguggagugcggccucc

SEQ ID NO: 487759 - RNA, 22 nt, Human
aaagaacuuauccuagaauuug

SEQ ID NO: 487760 - RNA, 22 nt, Human
ugaggcucagagaagugcuguu

SEQ ID NO: 487761 - RNA, 22 nt, Human
uagaaaucauuuagaaguauug

SEQ ID NO: 487762 - RNA, 19 nt, Human
ggagaagcaucuagaaaua

SEQ ID NO: 487763 - RNA, 22 nt, Human
uucuuaaagaggcaaaacacag

SEQ ID NO: 487764 - RNA, 22 nt, Human
auguccagaguaaagcacauuc

SEQ ID NO: 487765 - RNA, 22 nt, Human
acagaaauauucguggugcuug

SEQ ID NO: 487766 - RNA, 22 nt, Human
cagagcauugagggucugccaa

SEQ ID NO: 487767 - RNA, 21 nt, Human
ccugcagcaccagaaggagau

SEQ ID NO: 487768 - RNA, 22 nt, Human
cauggcagugauucagccuuug

SEQ ID NO: 487769 - RNA, 22 nt, Human
ggagggcucaauugacuccuga

SEQ ID NO: 487770 - RNA, 22 nt, Human
uugcagcuuagugauguuaucu

SEQ ID NO: 487771 - RNA, 22 nt, Human
cagagcuggguuugggaaaccu

SEQ ID NO: 487772 - RNA, 22 nt, Human
cuacauuuuaauaagcugcuua

SEQ ID NO: 487773 - RNA, 22 nt, Human
ucugugacuugcgggaggagaa

SEQ ID NO: 487774 - RNA, 20 nt, Human
ucagagucaucaaagauggu

SEQ ID NO: 487775 - RNA, 18 nt, Human
ggcuguggacaagauuag

SEQ ID NO: 487776 - RNA, 22 nt, Human
gcugaagggagugcugagucug

SEQ ID NO: 487777 - RNA, 22 nt, Human
ggugaagguggaacgcagagca

SEQ ID NO: 487778 - RNA, 22 nt, Human
ccucuccuugcacccgucccgc

SEQ ID NO: 487779 - RNA, 22 nt, Human
gcagcuuggauuucuguaguuu

SEQ ID NO: 487780 - RNA, 22 nt, Human
aagccaguccucuacugggcac

SEQ ID NO: 487781 - RNA, 22 nt, Human
cuguggcauugugaggacugca

SEQ ID NO: 487782 - RNA, 22 nt, Human
ccagagccucaacacagguccu

SEQ ID NO: 487783 - RNA, 22 nt, Human
gccuggcccagggcucuuguug

SEQ ID NO: 487784 - RNA, 22 nt, Human
ggcacugauuccauucaugaag

SEQ ID NO: 487785 - RNA, 22 nt, Human
ugaaggcccuaucuccauauac

SEQ ID NO: 487786 - RNA, 22 nt, Human
gccacugcacuccagcccaggc

SEQ ID NO: 487787 - RNA, 22 nt, Human
ggccaggcugcccugggagcag

SEQ ID NO: 487788 - RNA, 22 nt, Human
uugcacuccagcccgagcaaca

SEQ ID NO: 487789 - RNA, 22 nt, Human
uuauuuauuguguaccuacugu

SEQ ID NO: 487790 - RNA, 22 nt, Human
ucugcaggacugaggccuguuu

SEQ ID NO: 487791 - RNA, 22 nt, Human
caggcugcagaggccuuucaug

SEQ ID NO: 487792 - RNA, 21 nt, Human
uugaagcaaggguggcucuga

SEQ ID NO: 487793 - RNA, 19 nt, Human
uccugggcugggccagguc

SEQ ID NO: 487794 - RNA, 22 nt, Human
ugcagggccuugggucuuucuu

SEQ ID NO: 487795 - RNA, 22 nt, Human
uuaguaaauaaagucuacuuuc

SEQ ID NO: 487796 - RNA, 22 nt, Human
uagggcagccuuauagcuccca

SEQ ID NO: 487797 - RNA, 22 nt, Human
ucucagagggaggauuacugcc

SEQ ID NO: 487798 - RNA, 22 nt, Human
ggcuguggccagcggggcugag

SEQ ID NO: 487799 - RNA, 22 nt, Human
gccagcuggagugagagugggc

SEQ ID NO: 487800 - RNA, 22 nt, Human
uacaagacgagggaaguucuuu

SEQ ID NO: 487801 - RNA, 22 nt, Human
agcaggaaguagucuguaagca

SEQ ID NO: 487802 - RNA, 22 nt, Human
gaggcucacuuucauccucuuc

SEQ ID NO: 487803 - RNA, 22 nt, Human
gcugccaugccacagcacucac

SEQ ID NO: 487804 - RNA, 22 nt, Human
uaaugcacaugacugaacuauu

SEQ ID NO: 487805 - RNA, 22 nt, Human
guuuuauaggcuguugcuauau

SEQ ID NO: 487806 - RNA, 22 nt, Human
agaaauguuacaguuguuauuu

SEQ ID NO: 487807 - RNA, 23 nt, Human
augcucugggcugugggaccugc

SEQ ID NO: 487808 - RNA, 22 nt, Human
ccaggacuuauuacaguauaac

SEQ ID NO: 487809 - RNA, 22 nt, Human
cagcccugcacgcugccuccgc

SEQ ID NO: 487810 - RNA, 22 nt, Human
uugagggucuggaucugcugcu

SEQ ID NO: 487811 - RNA, 20 nt, Human
aguaccuuuuguauguuacc

SEQ ID NO: 487812 - RNA, 20 nt, Human
gucuccacuggggguuaacc

SEQ ID NO: 487813 - RNA, 22 nt, Human
ggaggcucgcuggucgcacagc

SEQ ID NO: 487814 - RNA, 20 nt, Human
agaagccaagugacauguuu

SEQ ID NO: 487815 - RNA, 22 nt, Human
ccagaauagaaggcagcuguca

SEQ ID NO: 487816 - RNA, 22 nt, Human
uaggcagagguaugguaaggac

SEQ ID NO: 487817 - RNA, 22 nt, Human
gaguccagacaccauaccugau

SEQ ID NO: 487818 - RNA, 22 nt, Human
uaagaaauuuaguuauagaaug

SEQ ID NO: 487819 - RNA, 22 nt, Human
aaacucuggagauguuuaugca

SEQ ID NO: 487820 - RNA, 22 nt, Human
ucaggcagaugcagggauggau

SEQ ID NO: 487821 - RNA, 18 nt, Human
gaugggagcaagagaaga

SEQ ID NO: 487822 - RNA, 22 nt, Human
gaggccuggguuggaggugcau

SEQ ID NO: 487823 - RNA, 22 nt, Human
guguuuccaguucagaaagcaa

SEQ ID NO: 487824 - RNA, 22 nt, Human
aggacaguguggaagagggugc

SEQ ID NO: 487825 - RNA, 22 nt, Human
cagaggugcauacaggucauua

SEQ ID NO: 487826 - RNA, 22 nt, Human
uuugcauuucuaaugagcuccg

SEQ ID NO: 487827 - RNA, 22 nt, Human
uuugcauuuguuuagaaccuga

SEQ ID NO: 487828 - RNA, 20 nt, Human
gugugaagcccucaggagga

SEQ ID NO: 487829 - RNA, 22 nt, Human
ccaggcuggagugcaauggugc

SEQ ID NO: 487830 - RNA, 22 nt, Human
uggcaagagggaugcaagguuu

SEQ ID NO: 487831 - RNA, 19 nt, Human
auagaaaggguuaaagaca

SEQ ID NO: 487832 - RNA, 22 nt, Human
gagagcugcaagguagggcggg

SEQ ID NO: 487833 - RNA, 22 nt, Human
aaaaucugguaauuugaaugug

SEQ ID NO: 487834 - RNA, 22 nt, Human
ugucucaggggcauugaaauaa

SEQ ID NO: 487835 - RNA, 22 nt, Human
ggggcuccagucuucacauuuu

SEQ ID NO: 487836 - RNA, 20 nt, Human
gagccugggaagucuaaggu

SEQ ID NO: 487837 - RNA, 22 nt, Human
ugugcagggaagggcaugcuau

SEQ ID NO: 487838 - RNA, 22 nt, Human
ugugccugucacccucagagag

SEQ ID NO: 487839 - RNA, 22 nt, Human
ugggcaggcaagugaauaccuu

SEQ ID NO: 487840 - RNA, 22 nt, Human
cacccagcagcacuuaagacua

SEQ ID NO: 487841 - RNA, 22 nt, Human
uauauguguggauucuuguaga

SEQ ID NO: 487842 - RNA, 22 nt, Human
ucugaaggucugagaaccagga

SEQ ID NO: 487843 - RNA, 22 nt, Human
uggcugagugaacauguccauu

SEQ ID NO: 487844 - RNA, 22 nt, Human
auuuauuaccucggaguuucug

SEQ ID NO: 487845 - RNA, 22 nt, Human
aacagcaugcuggguaacauug

SEQ ID NO: 487846 - RNA, 19 nt, Human
acuuucuccaggaccuguu

SEQ ID NO: 487847 - RNA, 22 nt, Human
ucauguuauugacucauaauau

SEQ ID NO: 487848 - RNA, 22 nt, Human
gcagaggcuccauuuuacagau

SEQ ID NO: 487849 - RNA, 22 nt, Human
ggggcagaaagcccacagagug

SEQ ID NO: 487850 - RNA, 20 nt, Human
cucuggcuccgcgugaccgc

SEQ ID NO: 487851 - RNA, 22 nt, Human
uauuggugggggcagagagaga

SEQ ID NO: 487852 - RNA, 22 nt, Human
agugcugucccgacaacugagg

SEQ ID NO: 487853 - RNA, 22 nt, Human
gaggcucacugggcaaagacuc

SEQ ID NO: 487854 - RNA, 22 nt, Human
cugagagaaucaugcugcaggu

SEQ ID NO: 487855 - RNA, 20 nt, Human
cgcccaggagggcccaugug

SEQ ID NO: 487856 - RNA, 22 nt, Human
cgugucaucugagccuugggcg

SEQ ID NO: 487857 - RNA, 22 nt, Human
augggaugaacuugaucugcuu

SEQ ID NO: 487858 - RNA, 22 nt, Human
agggaaaggcugaugcuguggg

SEQ ID NO: 487859 - RNA, 17 nt, Human
gcugagaggcagcacag

SEQ ID NO: 487860 - RNA, 22 nt, Human
aggcucagcaucugauucauau

SEQ ID NO: 487861 - RNA, 22 nt, Human
cugcucuggcuguguacuucag

SEQ ID NO: 487862 - RNA, 22 nt, Human
uuuuauuggagugauaccaagc

SEQ ID NO: 487863 - RNA, 22 nt, Human
caggaagauuagaccaagagcu

SEQ ID NO: 487864 - RNA, 22 nt, Human
gcccaugcacuuucugugaugg

SEQ ID NO: 487865 - RNA, 22 nt, Human
cagcagagacgguaagcagaac

SEQ ID NO: 487866 - RNA, 22 nt, Human
agcagaacauuuucagggcugu

SEQ ID NO: 487867 - RNA, 22 nt, Human
cucacugacgaggaagcugaga

SEQ ID NO: 487868 - RNA, 22 nt, Human
caggcaggucagugaagaagga

SEQ ID NO: 487869 - RNA, 22 nt, Human
aggagcugacuuguaaagcauu

SEQ ID NO: 487870 - RNA, 22 nt, Human
cugccuuugcccuugacacugu

SEQ ID NO: 487871 - RNA, 22 nt, Human
cacauggaagagauacagugag

SEQ ID NO: 487872 - RNA, 22 nt, Human
uggagggcucuuucaccuggua

SEQ ID NO: 487873 - RNA, 22 nt, Human
uucuuugcccuuaaugaaauaa

SEQ ID NO: 487874 - RNA, 22 nt, Human
auccaguuuaugucauauucuu

SEQ ID NO: 487875 - RNA, 22 nt, Human
uggaaagagguagaggaucugg

SEQ ID NO: 487876 - RNA, 22 nt, Human
guggccuggcgagcuggcgcgg

SEQ ID NO: 487877 - RNA, 22 nt, Human
aaaugcacaauaaaguaaaggc

SEQ ID NO: 487878 - RNA, 22 nt, Human
cagcccuggcuagggcgagggc

SEQ ID NO: 487879 - RNA, 22 nt, Human
cagggagcuggugccagccgac

SEQ ID NO: 487880 - RNA, 22 nt, Human
ggcccagcccgagucagccuuc

SEQ ID NO: 487881 - RNA, 22 nt, Human
acaucacagagcccagauaaag

SEQ ID NO: 487882 - RNA, 22 nt, Human
uggugcaagucucugaggaggg

SEQ ID NO: 487883 - RNA, 22 nt, Human
gcuguggcuugcagcuggggcu

SEQ ID NO: 487884 - RNA, 22 nt, Human
aagcagccagccaucaugcccg

SEQ ID NO: 487885 - RNA, 22 nt, Human
agaugaagacucaggagcaggu

SEQ ID NO: 487886 - RNA, 22 nt, Human
gcugugcuauaucucugagugu

SEQ ID NO: 487887 - RNA, 20 nt, Human
uucacagaggacucagguca

SEQ ID NO: 487888 - RNA, 22 nt, Human
ucauuguuucugcuuuucauga

SEQ ID NO: 487889 - RNA, 19 nt, Human
caucuggaugauucuccug

SEQ ID NO: 487890 - RNA, 22 nt, Human
uggcagaggaaaaagucacugg

SEQ ID NO: 487891 - RNA, 19 nt, Human
agacucugccacucuucuc

SEQ ID NO: 487892 - RNA, 22 nt, Human
ucaucuaagagucuuacauuua

SEQ ID NO: 487893 - RNA, 22 nt, Human
uuugcaaauaccaugaaacuug

SEQ ID NO: 487894 - RNA, 22 nt, Human
ugauuuccuggcuuuggaguuc

SEQ ID NO: 487895 - RNA, 22 nt, Human
ugagaagcaguuucaguaagaa

SEQ ID NO: 487896 - RNA, 22 nt, Human
gugccugccccacuccucagca

SEQ ID NO: 487897 - RNA, 22 nt, Human
gaggaggaaacccuguuccucu

SEQ ID NO: 487898 - RNA, 22 nt, Human
guccucugggcagcugccccac

SEQ ID NO: 487899 - RNA, 22 nt, Human
uggcagcuccggguaggggcug

SEQ ID NO: 487900 - RNA, 20 nt, Human
aguuauaguaucuagccaug

SEQ ID NO: 487901 - RNA, 22 nt, Human
uggcucugcugaaccuagugca

SEQ ID NO: 487902 - RNA, 22 nt, Human
uuauucagauuggcuacaggau

SEQ ID NO: 487903 - RNA, 22 nt, Human
ccaggggaaacagggagcacuc

SEQ ID NO: 487904 - RNA, 22 nt, Human
gucaggauuuuaaaaucccagu

SEQ ID NO: 487905 - RNA, 22 nt, Human
ccugagagcagcuuccugcuua

SEQ ID NO: 487906 - RNA, 22 nt, Human
agagggcugcugcacagugcuc

SEQ ID NO: 487907 - RNA, 22 nt, Human
gccuggccugaacuaggaggug

SEQ ID NO: 487908 - RNA, 22 nt, Human
ggagugggcagcacugcccugu

SEQ ID NO: 487909 - RNA, 22 nt, Human
cagacaugauguaagcagaggc

SEQ ID NO: 487910 - RNA, 22 nt, Human
agcaucuggucaugagugagaa

SEQ ID NO: 487911 - RNA, 22 nt, Human
ggccagagagccgcuguuagga

SEQ ID NO: 487912 - RNA, 22 nt, Human
auaugauuccacuauuguaugg

SEQ ID NO: 487913 - RNA, 21 nt, Human
cugcuuuacuucagaggaucu

SEQ ID NO: 487914 - RNA, 22 nt, Human
caguacuucuuggaaacuggau

SEQ ID NO: 487915 - RNA, 22 nt, Human
gccuggaguggacuuggccccu

SEQ ID NO: 487916 - RNA, 22 nt, Human
uuauucagucugucuagggagu

SEQ ID NO: 487917 - RNA, 22 nt, Human
ccugucugaggaggugcucuuu

SEQ ID NO: 487918 - RNA, 22 nt, Human
aaaugcacucugcuucugugac

SEQ ID NO: 487919 - RNA, 22 nt, Human
aaggaggagcggaggcuuguug

SEQ ID NO: 487920 - RNA, 22 nt, Human
cagggccucauccucagagauu

SEQ ID NO: 487921 - RNA, 22 nt, Human
ccucugcucugguccaugugcu

SEQ ID NO: 487922 - RNA, 22 nt, Human
agggccugggauguccuccuag

SEQ ID NO: 487923 - RNA, 22 nt, Human
gagagggccagggugagaacua

SEQ ID NO: 487924 - RNA, 22 nt, Human
gggcugccuuucuucugggagc

SEQ ID NO: 487925 - RNA, 22 nt, Human
gcucaagagagaugcaguucuu

SEQ ID NO: 487926 - RNA, 23 nt, Human
ugucacauuuaguuggcauuguu

SEQ ID NO: 487927 - RNA, 22 nt, Human
gauggcacacagacauccccgc

SEQ ID NO: 487928 - RNA, 22 nt, Human
agccagcuggugggucagcugg

SEQ ID NO: 487929 - RNA, 22 nt, Human
agggaggauaguagucaguuua

SEQ ID NO: 487930 - RNA, 22 nt, Human
cuuguagaauugaaauggucuc

SEQ ID NO: 487931 - RNA, 20 nt, Human
agaguaacuggcacauaggg

SEQ ID NO: 487932 - RNA, 22 nt, Human
uaguaaaaguuuaguugaaagu

SEQ ID NO: 487933 - RNA, 22 nt, Human
cuggcucucugagauauugagu

SEQ ID NO: 487934 - RNA, 22 nt, Human
uaguggagaaguggagucugug

SEQ ID NO: 487935 - RNA, 22 nt, Human
aaaugcaucagcucauaagaga

SEQ ID NO: 487936 - RNA, 22 nt, Human
ggauccuucuuugaccucacag

SEQ ID NO: 487937 - RNA, 22 nt, Human
aagucuggaagucucaguuuuc

SEQ ID NO: 487938 - RNA, 22 nt, Human
cagcuugaaauauuaggagaug

SEQ ID NO: 487939 - RNA, 22 nt, Human
uugauguacagaauuguucaca

SEQ ID NO: 487940 - RNA, 22 nt, Human
agaagccauugaagcagaccuc

SEQ ID NO: 487941 - RNA, 19 nt, Human
uuugugaagaaaaugaugc

SEQ ID NO: 487942 - RNA, 22 nt, Human
aguucuuuugugaacauaugcu

SEQ ID NO: 487943 - RNA, 22 nt, Human
gcuggggaggcagcagagaaca

SEQ ID NO: 487944 - RNA, 22 nt, Human
ugcgcaggagcucugccaggag

SEQ ID NO: 487945 - RNA, 22 nt, Human
caggucagagucccccuguccu

SEQ ID NO: 487946 - RNA, 22 nt, Human
uaguccaguaaaacagcuaacg

SEQ ID NO: 487947 - RNA, 22 nt, Human
aggccugagccccagguuuguu

SEQ ID NO: 487948 - RNA, 20 nt, Human
acuggacacugaggugagcu

SEQ ID NO: 487949 - RNA, 22 nt, Human
ggauggcaggacaaggacccag

SEQ ID NO: 487950 - RNA, 22 nt, Human
cagagccuuccuagcagacucu

SEQ ID NO: 487951 - RNA, 22 nt, Human
aucaggaucagggcuagcagag

SEQ ID NO: 487952 - RNA, 22 nt, Human
aauccagguggcggagguugug

SEQ ID NO: 487953 - RNA, 22 nt, Human
aaagaggauggaguagucagcu

SEQ ID NO: 487954 - RNA, 21 nt, Human
ucuccaguauccuucucugag

SEQ ID NO: 487955 - RNA, 19 nt, Human
gcucagagggcccugugcu

SEQ ID NO: 487956 - RNA, 22 nt, Human
ccaggagcaaagaucacuggga

SEQ ID NO: 487957 - RNA, 22 nt, Human
cuucugggcauucagcugcaca

SEQ ID NO: 487958 - RNA, 22 nt, Human
cucacugugaccucagcagaca

SEQ ID NO: 487959 - RNA, 19 nt, Human
uccaaaggacccaccucca

SEQ ID NO: 487960 - RNA, 22 nt, Human
ccuggauucaagucuuucuuuc

SEQ ID NO: 487961 - RNA, 22 nt, Human
ggggccagcacugugccuuugu

SEQ ID NO: 487962 - RNA, 22 nt, Human
aaaguucagugccuucuauaca

SEQ ID NO: 487963 - RNA, 22 nt, Human
acugcagggcauccuggccaag

SEQ ID NO: 487964 - RNA, 22 nt, Human
acagagcugggugcccccugga

SEQ ID NO: 487965 - RNA, 22 nt, Human
cuggggcugcagcgaucuucau

SEQ ID NO: 487966 - RNA, 22 nt, Human
aggccagguggucaugcuugcu

SEQ ID NO: 487967 - RNA, 22 nt, Human
gcagcuuucuacuuccuacagc

SEQ ID NO: 487968 - RNA, 22 nt, Human
guccuggggauacagaagugaa

SEQ ID NO: 487969 - RNA, 22 nt, Human
cauggccugccuccuccuggug

SEQ ID NO: 487970 - RNA, 22 nt, Human
ccagccaggcauugcaaacuga

SEQ ID NO: 487971 - RNA, 22 nt, Human
gcugcagugagccaagaucgug

SEQ ID NO: 487972 - RNA, 22 nt, Human
ugucugguggguugacaggcag

SEQ ID NO: 487973 - RNA, 22 nt, Human
ccagcagcccacaggcgucccu

SEQ ID NO: 487974 - RNA, 22 nt, Human
ucugagagagggucagaugcua

SEQ ID NO: 487975 - RNA, 22 nt, Human
cacauaauugaacgugaugagu

SEQ ID NO: 487976 - RNA, 22 nt, Human
ugaggcucaagaaucugcauuu

SEQ ID NO: 487977 - RNA, 22 nt, Human
ucagaggaugcuguucuuuaau

SEQ ID NO: 487978 - RNA, 22 nt, Human
aagcgccaugguuccugcgcag

SEQ ID NO: 487979 - RNA, 20 nt, Human
cuggguggcaagcaaggggg

SEQ ID NO: 487980 - RNA, 22 nt, Human
cagaggcugccagccaugugca

SEQ ID NO: 487981 - RNA, 22 nt, Human
ccagcucuuggugcacuuacau

SEQ ID NO: 487982 - RNA, 22 nt, Human
ucuggcucaggucagacaggga

SEQ ID NO: 487983 - RNA, 22 nt, Human
ccaggacuucgaggcuacagug

SEQ ID NO: 487984 - RNA, 22 nt, Human
ugaauggucacugagcaucugu

SEQ ID NO: 487985 - RNA, 22 nt, Human
cagaaccaggaacugauggaga

SEQ ID NO: 487986 - RNA, 22 nt, Human
cauuguuaccaucuuuuaccua

SEQ ID NO: 487987 - RNA, 22 nt, Human
gagcagagacaguacaacuggc

SEQ ID NO: 487988 - RNA, 22 nt, Human
caggauccccaggucgccgucc

SEQ ID NO: 487989 - RNA, 22 nt, Human
uuugcauuuuagauuuaggccu

SEQ ID NO: 487990 - RNA, 22 nt, Human
cuauuagguaugcagccuauuu

SEQ ID NO: 487991 - RNA, 22 nt, Human
uccucagacuucccuuugugua

SEQ ID NO: 487992 - RNA, 22 nt, Human
uggagagcaagucgcagacaug

SEQ ID NO: 487993 - RNA, 22 nt, Human
guagggacuuguuuuacuagua

SEQ ID NO: 487994 - RNA, 22 nt, Human
ccugccuggaucagccauccug

SEQ ID NO: 487995 - RNA, 22 nt, Human
accaggcaacugugaaugggcu

SEQ ID NO: 487996 - RNA, 22 nt, Human
aaggucauugguucugaauucu

SEQ ID NO: 487997 - RNA, 22 nt, Human
ggucagggcucuuccaguggcu

SEQ ID NO: 487998 - RNA, 22 nt, Human
uuguuucaaauauuucagaaua

SEQ ID NO: 487999 - RNA, 22 nt, Human
caggcagccaggggaccugucc

SEQ ID NO: 488000 - RNA, 22 nt, Human
acaggcagcgucauugcugcuc

SEQ ID NO: 488001 - RNA, 22 nt, Human
ugauuuccucuacuagcaauua

SEQ ID NO: 488002 - RNA, 22 nt, Human
acacacuguugcucauccaggc

SEQ ID NO: 488003 - RNA, 22 nt, Human
uuuuaucugcuucauuaguuga

SEQ ID NO: 488004 - RNA, 22 nt, Human
caccuggcuggaagugcuccgg

SEQ ID NO: 488005 - RNA, 22 nt, Human
aggaccuguagggccugcaucc

SEQ ID NO: 488006 - RNA, 22 nt, Human
acaaaggcagagaauucaacau

SEQ ID NO: 488007 - RNA, 22 nt, Human
uaaaugcaaugugcuuuaccag

SEQ ID NO: 488008 - RNA, 22 nt, Human
ucuggccagugaaaugcagaau

SEQ ID NO: 488009 - RNA, 22 nt, Human
gcagcaggagaguuuguccugc

SEQ ID NO: 488010 - RNA, 22 nt, Human
ggggccagcuucgcgugcucuu

SEQ ID NO: 488011 - RNA, 22 nt, Human
uggcagcugucuguggggucuc

SEQ ID NO: 488012 - RNA, 22 nt, Human
agugucauaugccacugcaucc

SEQ ID NO: 488013 - RNA, 22 nt, Human
guaggaaagggagugaagggaa

SEQ ID NO: 488014 - RNA, 23 nt, Human
uggcugagauccuacuguuugcu

SEQ ID NO: 488015 - RNA, 22 nt, Human
ccucuggggguccucagagucu

SEQ ID NO: 488016 - RNA, 22 nt, Human
cucacuggcaagacuacaggug

SEQ ID NO: 488017 - RNA, 22 nt, Human
aagugguagacaaagauaauug

SEQ ID NO: 488018 - RNA, 22 nt, Human
ccugugucagccccugccucca

SEQ ID NO: 488019 - RNA, 22 nt, Human
aggugucuggauggguguccuu

SEQ ID NO: 488020 - RNA, 22 nt, Human
agcaccuguggcucaugcucgu

SEQ ID NO: 488021 - RNA, 22 nt, Human
uccugccugcaaucccagcacu

SEQ ID NO: 488022 - RNA, 22 nt, Human
gaggcagagugcaccccaggag

SEQ ID NO: 488023 - RNA, 22 nt, Human
gcagcagaguuugggagauggu

SEQ ID NO: 488024 - RNA, 22 nt, Human
cugaaggacuuggugauaguug

SEQ ID NO: 488025 - RNA, 22 nt, Human
uguaacaguaagccugugagcu

SEQ ID NO: 488026 - RNA, 22 nt, Human
uuuauuugucuugccauuuagu

SEQ ID NO: 488027 - RNA, 22 nt, Human
aagacuguaugagacaauauaa

SEQ ID NO: 488028 - RNA, 22 nt, Human
ucaggggagguugaaucgucuc

SEQ ID NO: 488029 - RNA, 22 nt, Human
ccugucaggguuugccucagaa

SEQ ID NO: 488030 - RNA, 22 nt, Human
agcugagcuaguaguuccagug

SEQ ID NO: 488031 - RNA, 22 nt, Human
ucuguaucacccguucccagaa

SEQ ID NO: 488032 - RNA, 22 nt, Human
cacccuagcugucauuucaguu

SEQ ID NO: 488033 - RNA, 19 nt, Human
auacacauacguaaacuga

SEQ ID NO: 488034 - RNA, 22 nt, Human
ggcucagggaaugaggaagaau

SEQ ID NO: 488035 - RNA, 22 nt, Human
ucucaggggccuggaguccugg

SEQ ID NO: 488036 - RNA, 22 nt, Human
agguacagaugaaagucuaguu

SEQ ID NO: 488037 - RNA, 22 nt, Human
uuucucaucuggaaacagugcu

SEQ ID NO: 488038 - RNA, 22 nt, Human
ccagggcauguaacuaauggug

SEQ ID NO: 488039 - RNA, 22 nt, Human
caggcagcagccacucugguau

SEQ ID NO: 488040 - RNA, 22 nt, Human
uccuuugguucucuaagaugcu

SEQ ID NO: 488041 - RNA, 22 nt, Human
gcugcucugcuguguaagcagg

SEQ ID NO: 488042 - RNA, 22 nt, Human
uucagagaagcaaaggcagauu

SEQ ID NO: 488043 - RNA, 22 nt, Human
cuggcucaauaaauauuagcug

SEQ ID NO: 488044 - RNA, 22 nt, Human
gcuggccacauugugccguccu

SEQ ID NO: 488045 - RNA, 21 nt, Human
uuagaagcuaaugcagcuggu

SEQ ID NO: 488046 - RNA, 20 nt, Human
ggagagcagggaagacagua

SEQ ID NO: 488047 - RNA, 22 nt, Human
uagggcagagcuuguacacgau

SEQ ID NO: 488048 - RNA, 22 nt, Human
uuacaaagagugccagagugug

SEQ ID NO: 488049 - RNA, 22 nt, Human
acagcuuuugaaaaauuacugg

SEQ ID NO: 488050 - RNA, 22 nt, Human
agggcuccaaggaaguguagcu

SEQ ID NO: 488051 - RNA, 22 nt, Human
ccauggaguuccucuggucuau

SEQ ID NO: 488052 - RNA, 22 nt, Human
acaguggaugacauccuuuugc

SEQ ID NO: 488053 - RNA, 23 nt, Human
ggcaccaggccauggagcgggag

SEQ ID NO: 488054 - RNA, 22 nt, Human
ugagcccuaagggucaagcagg

SEQ ID NO: 488055 - RNA, 22 nt, Human
aguggcaguggcugggcagagc

SEQ ID NO: 488056 - RNA, 22 nt, Human
auaauacaugguugaucuuuuc

SEQ ID NO: 488057 - RNA, 22 nt, Human
cagccagaaccuaggaugagcu

SEQ ID NO: 488058 - RNA, 22 nt, Human
cauucauuagaauagauaugua

SEQ ID NO: 488059 - RNA, 22 nt, Human
cagcugccccauaaaucacagu

SEQ ID NO: 488060 - RNA, 22 nt, Human
uuauuauugugaccugagaaug

SEQ ID NO: 488061 - RNA, 22 nt, Human
ccgggccucgggacaccgggua

SEQ ID NO: 488062 - RNA, 22 nt, Human
auaauuuacaacugcuuuuaau

SEQ ID NO: 488063 - RNA, 22 nt, Human
cccaaggccuucaagccagcuc

SEQ ID NO: 488064 - RNA, 22 nt, Human
cagggccuccccggcagucuuu

SEQ ID NO: 488065 - RNA, 22 nt, Human
uaauuuaauuucaugccagccu

SEQ ID NO: 488066 - RNA, 20 nt, Human
cuccagggaacagacuggag

SEQ ID NO: 488067 - RNA, 22 nt, Human
agaaguuaccacauacuucucu

SEQ ID NO: 488068 - RNA, 22 nt, Human
aagggcucccaacucaucuuuu

SEQ ID NO: 488069 - RNA, 22 nt, Human
ucccagagguugagucacuuau

SEQ ID NO: 488070 - RNA, 22 nt, Human
uggcagggccugaaucuuauac

SEQ ID NO: 488071 - RNA, 22 nt, Human
uggaagccaggcccgcuccuaa

SEQ ID NO: 488072 - RNA, 23 nt, Human
uggcucucucagugcugcagagg

SEQ ID NO: 488073 - RNA, 22 nt, Human
ggcugccugaggcugaggcccg

SEQ ID NO: 488074 - RNA, 22 nt, Human
aauuaguauugcgauucauuag

SEQ ID NO: 488075 - RNA, 22 nt, Human
acuaaggaauaugacaaacuca

SEQ ID NO: 488076 - RNA, 22 nt, Human
gcugggagcccuggucugcucc

SEQ ID NO: 488077 - RNA, 21 nt, Human
aaagaacaggcagauguucuu

SEQ ID NO: 488078 - RNA, 22 nt, Human
cucuggagcauuucaccuacau

SEQ ID NO: 488079 - RNA, 22 nt, Human
cuuagggaaucuuagagcugga

SEQ ID NO: 488080 - RNA, 22 nt, Human
cagcaauauacacagucuaugg

SEQ ID NO: 488081 - RNA, 21 nt, Human
cucuggaggcaagggagagug

SEQ ID NO: 488082 - RNA, 22 nt, Human
uacuuuuuagcacagugugugc

SEQ ID NO: 488083 - RNA, 22 nt, Human
uucauugugauucuuggcuagc

SEQ ID NO: 488084 - RNA, 22 nt, Human
gaggaagaauugguuauuggag

SEQ ID NO: 488085 - RNA, 21 nt, Human
guggcccugguguggcugcac

SEQ ID NO: 488086 - RNA, 22 nt, Human
agccuggcuaaauucucccaug

SEQ ID NO: 488087 - RNA, 22 nt, Human
ugcuuuaucugugagaaccuga

SEQ ID NO: 488088 - RNA, 22 nt, Human
gucugucaucugagauggagug

SEQ ID NO: 488089 - RNA, 22 nt, Human
ucucugaagauauuuauuauua

SEQ ID NO: 488090 - RNA, 22 nt, Human
ugcccugcagugagugcgucug

SEQ ID NO: 488091 - RNA, 22 nt, Human
aaccaggacaauuugaauagaa

SEQ ID NO: 488092 - RNA, 22 nt, Human
aaaugucuuucaauagagaaau

SEQ ID NO: 488093 - RNA, 22 nt, Human
cuggaagguucuuugugugccu

SEQ ID NO: 488094 - RNA, 22 nt, Human
ugagccaggaguuugaggcugu

SEQ ID NO: 488095 - RNA, 22 nt, Human
agcugccagaugacagugcuau

SEQ ID NO: 488096 - RNA, 21 nt, Human
ccucuggcuugugcugugccc

SEQ ID NO: 488097 - RNA, 22 nt, Human
ggagccuguuaguugagugcuc

SEQ ID NO: 488098 - RNA, 23 nt, Human
auaauaacgucugucuugucucu

SEQ ID NO: 488099 - RNA, 22 nt, Human
ugggcagggucucuguuaucag

SEQ ID NO: 488100 - RNA, 22 nt, Human
gcugucagcgcccaaggagcuc

SEQ ID NO: 488101 - RNA, 22 nt, Human
ccaaggagaaugacaccaugga

SEQ ID NO: 488102 - RNA, 22 nt, Human
guccagagauggacgagcagau

SEQ ID NO: 488103 - RNA, 22 nt, Human
gcucaggaucccaggggugugc

SEQ ID NO: 488104 - RNA, 22 nt, Human
uccugcagccaagggucaucga

SEQ ID NO: 488105 - RNA, 22 nt, Human
aagcaguguucccagcuggccc

SEQ ID NO: 488106 - RNA, 22 nt, Human
agggcucugagugggaaagagg

SEQ ID NO: 488107 - RNA, 22 nt, Human
ggccagaggccacagcuguguc

SEQ ID NO: 488108 - RNA, 22 nt, Human
caggcacuucugcugcuugucu

SEQ ID NO: 488109 - RNA, 20 nt, Human
agugccagggcaggugagag

SEQ ID NO: 488110 - RNA, 22 nt, Human
agcuugaguuuuggaugaagug

SEQ ID NO: 488111 - RNA, 22 nt, Human
ugcagaggagucagccugggca

SEQ ID NO: 488112 - RNA, 22 nt, Human
uaauccacaauagagauuaucu

SEQ ID NO: 488113 - RNA, 22 nt, Human
ucagcuggcaguucagaggcug

SEQ ID NO: 488114 - RNA, 22 nt, Human
aaugagcugcugcuguuccacc

SEQ ID NO: 488115 - RNA, 22 nt, Human
gggugggccacugagcagcgug

SEQ ID NO: 488116 - RNA, 22 nt, Human
aguguguguuugggcgguuuau

SEQ ID NO: 488117 - RNA, 22 nt, Human
uagugaaacaguuaucaaucug

SEQ ID NO: 488118 - RNA, 22 nt, Human
ugggcucugcaucagugcccau

SEQ ID NO: 488119 - RNA, 19 nt, Human
ucucuggggacacuuucac

SEQ ID NO: 488120 - RNA, 22 nt, Human
gaagcagcaaguauaggacagg

SEQ ID NO: 488121 - RNA, 22 nt, Human
gcagggcauagaggcacggagg

SEQ ID NO: 488122 - RNA, 22 nt, Human
agggccagccaggcccuacaaa

SEQ ID NO: 488123 - RNA, 21 nt, Human
guagggacagagaguugguga

SEQ ID NO: 488124 - RNA, 22 nt, Human
agcuuuauagaaaggaucagug

SEQ ID NO: 488125 - RNA, 22 nt, Human
uguucccaagauaagauuauga

SEQ ID NO: 488126 - RNA, 22 nt, Human
ugucuucaucuccaugcacaga

SEQ ID NO: 488127 - RNA, 22 nt, Human
ccagucugugugccagccugcg

SEQ ID NO: 488128 - RNA, 23 nt, Human
agaaaagcuuggacacauggccu

SEQ ID NO: 488129 - RNA, 22 nt, Human
ggggcagagaauaaaaaccuaa

SEQ ID NO: 488130 - RNA, 22 nt, Human
gcccagcuuuucacuuccacac

SEQ ID NO: 488131 - RNA, 22 nt, Human
agaggaaaaugaguuccagaau

SEQ ID NO: 488132 - RNA, 22 nt, Human
aucuggcugagcgaggcccaca

SEQ ID NO: 488133 - RNA, 22 nt, Human
gagccugaaauacaggucacug

SEQ ID NO: 488134 - RNA, 22 nt, Human
cagcaaaagccagcauaagcuc

SEQ ID NO: 488135 - RNA, 22 nt, Human
uucauauauaugcacuacguac

SEQ ID NO: 488136 - RNA, 22 nt, Human
aauauuucuccuucguuauagc

SEQ ID NO: 488137 - RNA, 22 nt, Human
cuuuucauuguuuguacaugca

SEQ ID NO: 488138 - RNA, 17 nt, Human
ugcugccaagucccaac

SEQ ID NO: 488139 - RNA, 22 nt, Human
cagaagcacuaggaggaaacgu

SEQ ID NO: 488140 - RNA, 22 nt, Human
cuuugcaauagaggcacacaug

SEQ ID NO: 488141 - RNA, 21 nt, Human
agccugcaauguagguaccgg

SEQ ID NO: 488142 - RNA, 22 nt, Human
ugcauauuuuauaaagauggaa

SEQ ID NO: 488143 - RNA, 22 nt, Human
gccugcagugagugcagaaggu

SEQ ID NO: 488144 - RNA, 22 nt, Human
ugggcuggcugaggcauucacu

SEQ ID NO: 488145 - RNA, 22 nt, Human
aggacuuagaacauuauguacu

SEQ ID NO: 488146 - RNA, 22 nt, Human
ucuggcccagccccugagguca

SEQ ID NO: 488147 - RNA, 22 nt, Human
aagaaacuguugcgugacagcg

SEQ ID NO: 488148 - RNA, 22 nt, Human
gcccagcaggacagagugguuu

SEQ ID NO: 488149 - RNA, 22 nt, Human
ggagcugcuuugaucugaagaa

SEQ ID NO: 488150 - RNA, 22 nt, Human
ggucccugguucccucugagcu

SEQ ID NO: 488151 - RNA, 22 nt, Human
cuggaagugggguuggcuugaa

SEQ ID NO: 488152 - RNA, 22 nt, Human
uacaguaaccagucuacuuaga

SEQ ID NO: 488153 - RNA, 22 nt, Human
guuugucuuaauuaggcaucga

SEQ ID NO: 488154 - RNA, 22 nt, Human
aucaguuuuguucacuacuaua

SEQ ID NO: 488155 - RNA, 22 nt, Human
cucaggcccacagcagacccac

SEQ ID NO: 488156 - RNA, 22 nt, Human
gagcagcucugggugacccagu

SEQ ID NO: 488157 - RNA, 22 nt, Human
acauauuuccaugcagcauguc

SEQ ID NO: 488158 - RNA, 22 nt, Human
cguuggagacacuugaggacuu

SEQ ID NO: 488159 - RNA, 22 nt, Human
ggcaguggguggaucucaggga

SEQ ID NO: 488160 - RNA, 22 nt, Human
uuugcauuuauaaguuggugga

SEQ ID NO: 488161 - RNA, 22 nt, Human
aggcugccaaagcuucugucuc

SEQ ID NO: 488162 - RNA, 22 nt, Human
acauuucucuuagaguuggacu

SEQ ID NO: 488163 - RNA, 22 nt, Human
gaacaguaucaguagugccagu

SEQ ID NO: 488164 - RNA, 22 nt, Human
cagauggccagaggcagcugca

SEQ ID NO: 488165 - RNA, 22 nt, Human
cauuuguaauacugacuugcag

SEQ ID NO: 488166 - RNA, 22 nt, Human
ugagagggcccagagcacacca

SEQ ID NO: 488167 - RNA, 22 nt, Human
uugcauaaaugcuuaaaauuug

SEQ ID NO: 488168 - RNA, 22 nt, Human
aagauguaucaguuaagucuuc

SEQ ID NO: 488169 - RNA, 22 nt, Human
uugaacaguuuugucagguuca

SEQ ID NO: 488170 - RNA, 22 nt, Human
ccaaaggccaagcucagguaaa

SEQ ID NO: 488171 - RNA, 22 nt, Human
gaagccagcaguggagaaagga

SEQ ID NO: 488172 - RNA, 22 nt, Human
ucucaggccccugaguuucucu

SEQ ID NO: 488173 - RNA, 22 nt, Human
ucaucacucauuggacaacaga

SEQ ID NO: 488174 - RNA, 22 nt, Human
gccaccaggagcccaguccaaa

SEQ ID NO: 488175 - RNA, 22 nt, Human
ugaggaagaacaagaauuuaga

SEQ ID NO: 488176 - RNA, 22 nt, Human
cagcuugcuaauuuugacuuca

SEQ ID NO: 488177 - RNA, 22 nt, Human
cugggaggauucauugagguga

SEQ ID NO: 488178 - RNA, 22 nt, Human
ucagcagauggguuguguuggc

SEQ ID NO: 488179 - RNA, 22 nt, Human
agcugccuccauggucaaagau

SEQ ID NO: 488180 - RNA, 22 nt, Human
gcugccuccugaaagcgcucug

SEQ ID NO: 488181 - RNA, 22 nt, Human
uccaucaccacagaggacagag

SEQ ID NO: 488182 - RNA, 22 nt, Human
gccugcagggccugggccuacc

SEQ ID NO: 488183 - RNA, 22 nt, Human
gggcagagagcuggaacuccuu

SEQ ID NO: 488184 - RNA, 22 nt, Human
ugggcugcugcggugcucuugg

SEQ ID NO: 488185 - RNA, 21 nt, Human
cucuggagucaagagcuucca

SEQ ID NO: 488186 - RNA, 22 nt, Human
ccagccacugggccacugccag

SEQ ID NO: 488187 - RNA, 22 nt, Human
cuccuugguguaguacugagca

SEQ ID NO: 488188 - RNA, 22 nt, Human
ugcaccccauuuuacauuuaca

SEQ ID NO: 488189 - RNA, 22 nt, Human
uaucaacauuaauauuuucugg

SEQ ID NO: 488190 - RNA, 22 nt, Human
cauugcacuccagcuugggcaa

SEQ ID NO: 488191 - RNA, 21 nt, Human
guuuuaagggagaaaaccuag

SEQ ID NO: 488192 - RNA, 22 nt, Human
gcagacuguaucaaugucagua

SEQ ID NO: 488193 - RNA, 22 nt, Human
caaacuguucucugugggauuc

SEQ ID NO: 488194 - RNA, 22 nt, Human
acacugcucacuucuucccuug

SEQ ID NO: 488195 - RNA, 22 nt, Human
agggcgaggagacggaggcaca

SEQ ID NO: 488196 - RNA, 22 nt, Human
agaacuuaggaacaacagcuua

SEQ ID NO: 488197 - RNA, 22 nt, Human
uucuccccugacccugaugagg

SEQ ID NO: 488198 - RNA, 17 nt, Human
accaggcaacacgccca

SEQ ID NO: 488199 - RNA, 22 nt, Human
agucccuguacuuuccacugcc

SEQ ID NO: 488200 - RNA, 22 nt, Human
gcaggaguguggugggacaucc

SEQ ID NO: 488201 - RNA, 22 nt, Human
aggcagagagcaguggccgucu

SEQ ID NO: 488202 - RNA, 22 nt, Human
uccaggcauagaaggcacgcac

SEQ ID NO: 488203 - RNA, 22 nt, Human
gccaggcauucuagaaguagug

SEQ ID NO: 488204 - RNA, 22 nt, Human
acagcagagugugagauagcca

SEQ ID NO: 488205 - RNA, 22 nt, Human
aaaucuaggcucauccuggucc

SEQ ID NO: 488206 - RNA, 22 nt, Human
gucccagaugucuggaacuccc

SEQ ID NO: 488207 - RNA, 23 nt, Human
agagcuuucuaaaauguaaaucu

SEQ ID NO: 488208 - RNA, 22 nt, Human
ucuguaaucaagauauuugaga

SEQ ID NO: 488209 - RNA, 22 nt, Human
guguauaacuaucuaucuagua

SEQ ID NO: 488210 - RNA, 22 nt, Human
uuuauuagugcuuguaucacug

SEQ ID NO: 488211 - RNA, 22 nt, Human
uaaaguuuggcagacaauaaca

SEQ ID NO: 488212 - RNA, 22 nt, Human
agguaaagacagugaaagaggg

SEQ ID NO: 488213 - RNA, 22 nt, Human
cagggccaggcugauggccugg

SEQ ID NO: 488214 - RNA, 22 nt, Human
ggcaggcuggcuuuguuccagg

SEQ ID NO: 488215 - RNA, 22 nt, Human
agcagcucaaagccugcaagga

SEQ ID NO: 488216 - RNA, 21 nt, Human
gcaaguacuaucaucauuauc

SEQ ID NO: 488217 - RNA, 23 nt, Human
gccucugcagccuaguuaguguc

SEQ ID NO: 488218 - RNA, 22 nt, Human
uccugggcugcagggaagagca

SEQ ID NO: 488219 - RNA, 22 nt, Human
agccuggccaggccugcccagg

SEQ ID NO: 488220 - RNA, 18 nt, Human
ucagagagaauaguaauu

SEQ ID NO: 488221 - RNA, 22 nt, Human
cagugucuccagaugcuccaau

SEQ ID NO: 488222 - RNA, 22 nt, Human
aggaaacuguccccucauccua

SEQ ID NO: 488223 - RNA, 22 nt, Human
agaguguaauaagggcaagggc

SEQ ID NO: 488224 - RNA, 22 nt, Human
guuccuauauagccuuaaggau

SEQ ID NO: 488225 - RNA, 22 nt, Human
gggaccuggcgagggucacaca

SEQ ID NO: 488226 - RNA, 22 nt, Human
uguuucuuuguagauauucuuu

SEQ ID NO: 488227 - RNA, 20 nt, Human
acauccuggugacuagaacu

SEQ ID NO: 488228 - RNA, 22 nt, Human
ucagcagggccuccuugugcag

SEQ ID NO: 488229 - RNA, 22 nt, Human
ccagaggacuugggggcugaau

SEQ ID NO: 488230 - RNA, 22 nt, Human
gcucacuggccugaagaggacg

SEQ ID NO: 488231 - RNA, 20 nt, Human
ccugucuccucuuaccuggc

SEQ ID NO: 488232 - RNA, 22 nt, Human
gagcagugagugaauguugccu

SEQ ID NO: 488233 - RNA, 22 nt, Human
caguacuugggaaugcugggga

SEQ ID NO: 488234 - RNA, 22 nt, Human
acccaggaugauaauguucaca

SEQ ID NO: 488235 - RNA, 22 nt, Human
gcugagacuggcagcaggaagu

SEQ ID NO: 488236 - RNA, 22 nt, Human
uggguacuccuauuaguucagu

SEQ ID NO: 488237 - RNA, 22 nt, Human
ucaagcaucuuggucuacgauc

SEQ ID NO: 488238 - RNA, 22 nt, Human
ccuccuuuccuguuuuccugag

SEQ ID NO: 488239 - RNA, 22 nt, Human
cagguggggagaguguggagca

SEQ ID NO: 488240 - RNA, 18 nt, Human
agaagccacgaggagucc

SEQ ID NO: 488241 - RNA, 22 nt, Human
ccagcuuuuccucucauugcuu

SEQ ID NO: 488242 - RNA, 22 nt, Human
uccugccuaccuugcggaggug

SEQ ID NO: 488243 - RNA, 22 nt, Human
uuuaugagcaaugcugagggga

SEQ ID NO: 488244 - RNA, 22 nt, Human
acuuucucaggaauucacagac

SEQ ID NO: 488245 - RNA, 22 nt, Human
gcucagaggcacgaccucuugg

SEQ ID NO: 488246 - RNA, 23 nt, Human
ccugcucaggcgugugcccugcu

SEQ ID NO: 488247 - RNA, 22 nt, Human
cugggcagugguggcaucuuug

SEQ ID NO: 488248 - RNA, 19 nt, Human
caagugaagccugggaugg

SEQ ID NO: 488249 - RNA, 20 nt, Human
ucagugauuuugaagaggaa

SEQ ID NO: 488250 - RNA, 22 nt, Human
cagcucugcugggaggaugcag

SEQ ID NO: 488251 - RNA, 22 nt, Human
uagaaaagauaacauucugugc

SEQ ID NO: 488252 - RNA, 22 nt, Human
ugaaggcccagccacagaaugg

SEQ ID NO: 488253 - RNA, 22 nt, Human
agaggcugggaaggguccccgg

SEQ ID NO: 488254 - RNA, 22 nt, Human
ugaggccagugacauauauuaa

SEQ ID NO: 488255 - RNA, 22 nt, Human
ggagaguggauuccagcuguau

SEQ ID NO: 488256 - RNA, 21 nt, Human
agguggggcugcaccucugcu

SEQ ID NO: 488257 - RNA, 22 nt, Human
ucucagggagggcgagucagcg

SEQ ID NO: 488258 - RNA, 22 nt, Human
cuuggggcugucacucuggcau

SEQ ID NO: 488259 - RNA, 22 nt, Human
gcagaagaccaugguggaaaga

SEQ ID NO: 488260 - RNA, 22 nt, Human
aaaugucuguuagucauaucau

SEQ ID NO: 488261 - RNA, 17 nt, Human
uauacacagacagacug

SEQ ID NO: 488262 - RNA, 23 nt, Human
agcauggaauaggaaagaggcag

SEQ ID NO: 488263 - RNA, 22 nt, Human
acccuggggguggccagugcca

SEQ ID NO: 488264 - RNA, 22 nt, Human
ucuugggauugcccugcaguuc

SEQ ID NO: 488265 - RNA, 22 nt, Human
agugaccaaucaugguuagauu

SEQ ID NO: 488266 - RNA, 19 nt, Human
ucaguuuuagucaucaguu

SEQ ID NO: 488267 - RNA, 22 nt, Human
agacagcaggggagucugguuu

SEQ ID NO: 488268 - RNA, 22 nt, Human
ucugagccguauggcuuggcua

SEQ ID NO: 488269 - RNA, 22 nt, Human
gcccagaguucaaggcugcagu

SEQ ID NO: 488270 - RNA, 22 nt, Human
aaacaacuucugcacuaugggu

SEQ ID NO: 488271 - RNA, 22 nt, Human
gaaaguuugccucucucuugag

SEQ ID NO: 488272 - RNA, 22 nt, Human
gcuggccauggccugcgccauc

SEQ ID NO: 488273 - RNA, 22 nt, Human
agcuccuccugugccaggccag

SEQ ID NO: 488274 - RNA, 22 nt, Human
ucuuuauugcuacugguuuguc

SEQ ID NO: 488275 - RNA, 22 nt, Human
cuguagcaaguuauucaauaaa

SEQ ID NO: 488276 - RNA, 22 nt, Human
ugaagcaggcauugacugauga

SEQ ID NO: 488277 - RNA, 22 nt, Human
gguggaaggccuggaaggaggc

SEQ ID NO: 488278 - RNA, 17 nt, Human
auuucacuuagcaugag

SEQ ID NO: 488279 - RNA, 22 nt, Human
cuggauuuaauuaacuguugcu

SEQ ID NO: 488280 - RNA, 22 nt, Human
cugcuuuguaaaauagacauaa

SEQ ID NO: 488281 - RNA, 22 nt, Human
acagagcuuaggaugacuccca

SEQ ID NO: 488282 - RNA, 20 nt, Human
ugccagggccagcagaggcu

SEQ ID NO: 488283 - RNA, 22 nt, Human
uggcaggauuugcccggaagga

SEQ ID NO: 488284 - RNA, 22 nt, Human
cucucugaggaaggagcaucug

SEQ ID NO: 488285 - RNA, 22 nt, Human
cugacccauauaagaguggagg

SEQ ID NO: 488286 - RNA, 20 nt, Human
cccagccccuaccuguugcc

SEQ ID NO: 488287 - RNA, 22 nt, Human
agcugcucucacuggacgccug

SEQ ID NO: 488288 - RNA, 22 nt, Human
cugagccaguagucagggacaa

SEQ ID NO: 488289 - RNA, 22 nt, Human
caggcugaggcaguaggguuug

SEQ ID NO: 488290 - RNA, 22 nt, Human
ccucccacuucuugcugagguc

SEQ ID NO: 488291 - RNA, 22 nt, Human
agaguggagagaaacaacucug

SEQ ID NO: 488292 - RNA, 22 nt, Human
ucucugcugagaagggcuggca

SEQ ID NO: 488293 - RNA, 22 nt, Human
aaagaacaaauuagcuguuuua

SEQ ID NO: 488294 - RNA, 22 nt, Human
ccagccuggacugggucuugug

SEQ ID NO: 488295 - RNA, 22 nt, Human
ccaggccucaccugcccaccua

SEQ ID NO: 488296 - RNA, 22 nt, Human
gaggggcugggguugacuccaa

SEQ ID NO: 488297 - RNA, 22 nt, Human
ggggauggugggaaggcaaucu

SEQ ID NO: 488298 - RNA, 22 nt, Human
aggcagcaauugaaaucauugu

SEQ ID NO: 488299 - RNA, 23 nt, Human
auguuauuauuagcagucuugcc

SEQ ID NO: 488300 - RNA, 22 nt, Human
ucugcagcuuuuugguggggug

SEQ ID NO: 488301 - RNA, 22 nt, Human
agcaccugcuuaaugugcagug

SEQ ID NO: 488302 - RNA, 22 nt, Human
gaagccccaaacccucgccauc

SEQ ID NO: 488303 - RNA, 22 nt, Human
cacucaggcugugucaggagga

SEQ ID NO: 488304 - RNA, 22 nt, Human
cccagccucagcuuuacuucca

SEQ ID NO: 488305 - RNA, 22 nt, Human
cuggcagcucugagucccuucu

SEQ ID NO: 488306 - RNA, 22 nt, Human
caaggccaugagcagcgagugu

SEQ ID NO: 488307 - RNA, 22 nt, Human
cugccaggacugacgucuucag

SEQ ID NO: 488308 - RNA, 22 nt, Human
acaguggauauauuaaaugaga

SEQ ID NO: 488309 - RNA, 22 nt, Human
uuggcuucuggcagucuggacg

SEQ ID NO: 488310 - RNA, 22 nt, Human
cuguuauuuagaacauggaauc

SEQ ID NO: 488311 - RNA, 22 nt, Human
agggcacaucugcugggaaugg

SEQ ID NO: 488312 - RNA, 22 nt, Human
uggggcuggcuauugucucccu

SEQ ID NO: 488313 - RNA, 22 nt, Human
uagagcuguaucaaagagccuu

SEQ ID NO: 488314 - RNA, 22 nt, Human
ucccuggacagccuugccuggg

SEQ ID NO: 488315 - RNA, 22 nt, Human
ccuuagagaguacugggcugcc

SEQ ID NO: 488316 - RNA, 22 nt, Human
gcagcuuuaaaggaggcucuga

SEQ ID NO: 488317 - RNA, 22 nt, Human
gagccugaugaaacaggcagac

SEQ ID NO: 488318 - RNA, 22 nt, Human
uaguggagaggauguggagaaa

SEQ ID NO: 488319 - RNA, 22 nt, Human
aggcugagggcuccugagggca

SEQ ID NO: 488320 - RNA, 22 nt, Human
gaaggccauuuuuagguagaau

SEQ ID NO: 488321 - RNA, 22 nt, Human
cugcucucuguuccccuggauc

SEQ ID NO: 488322 - RNA, 22 nt, Human
uguauacauuuaacuagauaga

SEQ ID NO: 488323 - RNA, 22 nt, Human
agcugggucuugggccaggaga

SEQ ID NO: 488324 - RNA, 22 nt, Human
ugcaccauguaaguggccacgu

SEQ ID NO: 488325 - RNA, 22 nt, Human
uuuucuuauggugaagcacaaa

SEQ ID NO: 488326 - RNA, 22 nt, Human
ccagggcagcagaauuggggca

SEQ ID NO: 488327 - RNA, 22 nt, Human
gagauuggauuuaauggccaaa

SEQ ID NO: 488328 - RNA, 22 nt, Human
ucuggcuccguguccgcuccca

SEQ ID NO: 488329 - RNA, 22 nt, Human
ugauuucccucaucauaacaga

SEQ ID NO: 488330 - RNA, 22 nt, Human
cagggcucgcucgcucgcucgc

SEQ ID NO: 488331 - RNA, 22 nt, Human
cacaggcugcccgcagcuggga

SEQ ID NO: 488332 - RNA, 22 nt, Human
uggagccaggagccugggaguc

SEQ ID NO: 488333 - RNA, 22 nt, Human
agggacagucuacuguucacug

SEQ ID NO: 488334 - RNA, 22 nt, Human
ccagggugaccagcuggccuag

SEQ ID NO: 488335 - RNA, 20 nt, Human
cuguggcucaugcaucugcc

SEQ ID NO: 488336 - RNA, 22 nt, Human
ccucaggguggcaucagaucuu

SEQ ID NO: 488337 - RNA, 20 nt, Human
ccagagaguagguuagugau

SEQ ID NO: 488338 - RNA, 22 nt, Human
guccucuguguaggcugcagac

SEQ ID NO: 488339 - RNA, 22 nt, Human
uucacagggcagcagcugagcc

SEQ ID NO: 488340 - RNA, 22 nt, Human
auccucagaccucagcaaagcc

SEQ ID NO: 488341 - RNA, 22 nt, Human
auuguacaugcagugagucauc

SEQ ID NO: 488342 - RNA, 19 nt, Human
auaaggcaauuggauuugg

SEQ ID NO: 488343 - RNA, 22 nt, Human
cacguuuuaugacagaagaagc

SEQ ID NO: 488344 - RNA, 22 nt, Human
cuggccuuuaaaaugaccuuau

SEQ ID NO: 488345 - RNA, 22 nt, Human
uuuucuaacaucuaguaauuug

SEQ ID NO: 488346 - RNA, 22 nt, Human
guccagcugaucuugacccagc

SEQ ID NO: 488347 - RNA, 22 nt, Human
cagaggcacagcuucuuuuaau

SEQ ID NO: 488348 - RNA, 22 nt, Human
agauacauagcugugagcacac

SEQ ID NO: 488349 - RNA, 22 nt, Human
guggugcauccuugaguaagcu

SEQ ID NO: 488350 - RNA, 22 nt, Human
cucagggcuggaaagccaggaa

SEQ ID NO: 488351 - RNA, 22 nt, Human
ggucccaggauugguugcgcag

SEQ ID NO: 488352 - RNA, 20 nt, Human
aacacagauaccaaagguug

SEQ ID NO: 488353 - RNA, 22 nt, Human
gaaaacuaacggaaaaguuagg

SEQ ID NO: 488354 - RNA, 22 nt, Human
gggcucagccccauugaaccag

SEQ ID NO: 488355 - RNA, 22 nt, Human
cuccagggagcuuggaaagacc

SEQ ID NO: 488356 - RNA, 22 nt, Human
uggacucaaguccaaguucacg

SEQ ID NO: 488357 - RNA, 22 nt, Human
uggaggaugccauccaggauac

SEQ ID NO: 488358 - RNA, 22 nt, Human
cagggacugagauccagacugu

SEQ ID NO: 488359 - RNA, 22 nt, Human
ucacaugcucaccuaagccaca

SEQ ID NO: 488360 - RNA, 22 nt, Human
uuauuagggugguuuauguucu

SEQ ID NO: 488361 - RNA, 22 nt, Human
uuugaaagcaggugugggaggg

SEQ ID NO: 488362 - RNA, 21 nt, Human
accaggcuugugggagggagc

SEQ ID NO: 488363 - RNA, 22 nt, Human
gccaguggcuugccaggcagga

SEQ ID NO: 488364 - RNA, 22 nt, Human
agccagagagccccagguucua

SEQ ID NO: 488365 - RNA, 22 nt, Human
ccaggcaucacgggcauguggc

SEQ ID NO: 488366 - RNA, 22 nt, Human
aagagcugauuaagucaugagg

SEQ ID NO: 488367 - RNA, 19 nt, Human
gcaggcacagcccugggug

SEQ ID NO: 488368 - RNA, 22 nt, Human
ggcagugaugucaaacagugaa

SEQ ID NO: 488369 - RNA, 22 nt, Human
cagcugcccaagccccagaugu

SEQ ID NO: 488370 - RNA, 22 nt, Human
uugaaggacaucuuguuucuag

SEQ ID NO: 488371 - RNA, 22 nt, Human
gcagugaaacaauaggaucaaa

SEQ ID NO: 488372 - RNA, 22 nt, Human
agucccagagaggucggggcca

SEQ ID NO: 488373 - RNA, 22 nt, Human
gcuggggagcaagaguagugag

SEQ ID NO: 488374 - RNA, 22 nt, Human
ucaucaaagcgcuuggaguagg

SEQ ID NO: 488375 - RNA, 20 nt, Human
cagggccacgcuccaaggca

SEQ ID NO: 488376 - RNA, 17 nt, Human
uuagcaaaauagcacuu

SEQ ID NO: 488377 - RNA, 22 nt, Human
agagauucauguuuacuguagg

SEQ ID NO: 488378 - RNA, 22 nt, Human
gcccuuccuuagacagcaggau

SEQ ID NO: 488379 - RNA, 22 nt, Human
ccuuggagcggucagcacuggu

SEQ ID NO: 488380 - RNA, 22 nt, Human
auuucuucaggucagaaauaga

SEQ ID NO: 488381 - RNA, 19 nt, Human
aggcucugagcuccuggag

SEQ ID NO: 488382 - RNA, 22 nt, Human
acugucucucuagcaguucagg

SEQ ID NO: 488383 - RNA, 18 nt, Human
gagacacaagggccugga

SEQ ID NO: 488384 - RNA, 19 nt, Human
caggaaugagguaauggcu

SEQ ID NO: 488385 - RNA, 22 nt, Human
uucaaucauuagaaucucaggc

SEQ ID NO: 488386 - RNA, 21 nt, Human
uuucugaaggcaacaucuauc

SEQ ID NO: 488387 - RNA, 22 nt, Human
ggcucagagaccugcgaucuga

SEQ ID NO: 488388 - RNA, 22 nt, Human
cccaggcuggagugcaauggug

SEQ ID NO: 488389 - RNA, 22 nt, Human
ggccugaggcaauagucagaca

SEQ ID NO: 488390 - RNA, 22 nt, Human
augucuuucgcaucaguagcua

SEQ ID NO: 488391 - RNA, 22 nt, Human
ugcagaagaaaacagcugugug

SEQ ID NO: 488392 - RNA, 22 nt, Human
auuuuuccaugauacuuaucug

SEQ ID NO: 488393 - RNA, 22 nt, Human
aucaaaguggaaguuuacuagg

SEQ ID NO: 488394 - RNA, 22 nt, Human
uagggacacugcucaugaguuc

SEQ ID NO: 488395 - RNA, 22 nt, Human
aaguugaaugcguacgugacau

SEQ ID NO: 488396 - RNA, 22 nt, Human
uggccugccugggagcagcagg

SEQ ID NO: 488397 - RNA, 22 nt, Human
gcagggugauagugaggcucag

SEQ ID NO: 488398 - RNA, 22 nt, Human
ucuggcucuauaacuccuagcu

SEQ ID NO: 488399 - RNA, 22 nt, Human
uucucuggaacugaaacaagau

SEQ ID NO: 488400 - RNA, 22 nt, Human
aacucaguucuuuccacaaugc

SEQ ID NO: 488401 - RNA, 22 nt, Human
agagcucaagacgcucacagua

SEQ ID NO: 488402 - RNA, 22 nt, Human
caggccacaaguuggguucaag

SEQ ID NO: 488403 - RNA, 22 nt, Human
uuuguuagagugugggaggcug

SEQ ID NO: 488404 - RNA, 22 nt, Human
ucagaagccggaagugcuccuc

SEQ ID NO: 488405 - RNA, 22 nt, Human
ucucagaggugcccuggcaucu

SEQ ID NO: 488406 - RNA, 22 nt, Human
gaggaaccacucugagaagcca

SEQ ID NO: 488407 - RNA, 22 nt, Human
ucccagcagggccgaccagccu

SEQ ID NO: 488408 - RNA, 22 nt, Human
uggcaggagguuuucuccagga

SEQ ID NO: 488409 - RNA, 22 nt, Human
agccacaggaaacagagacagc

SEQ ID NO: 488410 - RNA, 19 nt, Human
uuagccauccacagugaaa

SEQ ID NO: 488411 - RNA, 22 nt, Human
auaaggcagucacuggaauguu

SEQ ID NO: 488412 - RNA, 22 nt, Human
agaccaagugcaggugccacua

SEQ ID NO: 488413 - RNA, 18 nt, Human
uucacaggaaaugucuuu

SEQ ID NO: 488414 - RNA, 22 nt, Human
ucagagagccucaggcacugcc

SEQ ID NO: 488415 - RNA, 22 nt, Human
ucaccgccuugcccggccgggc

SEQ ID NO: 488416 - RNA, 19 nt, Human
ucucaauguucagaaagcu

SEQ ID NO: 488417 - RNA, 20 nt, Human
ugggcugaggaucaggugcc

SEQ ID NO: 488418 - RNA, 22 nt, Human
ccuuuuucaauauagaauugca

SEQ ID NO: 488419 - RNA, 22 nt, Human
agcccaagcuaugaggugaccu

SEQ ID NO: 488420 - RNA, 22 nt, Human
cagcuguggagauggggugcau

SEQ ID NO: 488421 - RNA, 22 nt, Human
agugcugacucugggcacagug

SEQ ID NO: 488422 - RNA, 22 nt, Human
ugugcugguacaugugaggaug

SEQ ID NO: 488423 - RNA, 23 nt, Human
guggccuccccggaaugccucgc

SEQ ID NO: 488424 - RNA, 22 nt, Human
aguaacaagugccaacguuaga

SEQ ID NO: 488425 - RNA, 22 nt, Human
ggggagaguccuuuccaguucc

SEQ ID NO: 488426 - RNA, 22 nt, Human
ggugccagccuagugcaguggu

SEQ ID NO: 488427 - RNA, 22 nt, Human
ugcugcuccccagcacacagca

SEQ ID NO: 488428 - RNA, 22 nt, Human
agcucacaguguccuuccucaa

SEQ ID NO: 488429 - RNA, 22 nt, Human
uaugcacacauguaugcaugug

SEQ ID NO: 488430 - RNA, 20 nt, Human
uggaccugucucuuuaggga

SEQ ID NO: 488431 - RNA, 22 nt, Human
cuggagggugagccucaucucu

SEQ ID NO: 488432 - RNA, 19 nt, Human
uggcugggcgugccuccgu

SEQ ID NO: 488433 - RNA, 22 nt, Human
ucccagagaagagcuggaugga

SEQ ID NO: 488434 - RNA, 22 nt, Human
gugcugaguagaaugaaugccu

SEQ ID NO: 488435 - RNA, 22 nt, Human
uaauuucuucaucucugcagcu

SEQ ID NO: 488436 - RNA, 22 nt, Human
gacucagugauuugacaugccu

SEQ ID NO: 488437 - RNA, 22 nt, Human
aaauuauuacaagcuaguuggc

SEQ ID NO: 488438 - RNA, 22 nt, Human
gcagccacugggagugcuuaua

SEQ ID NO: 488439 - RNA, 22 nt, Human
cccugcagaucuaggguccuuc

SEQ ID NO: 488440 - RNA, 21 nt, Human
cugugcuucuuccuaagccag

SEQ ID NO: 488441 - RNA, 22 nt, Human
gcagagccaggcuggggcaggu

SEQ ID NO: 488442 - RNA, 22 nt, Human
agagccaggaucuguuuugggg

SEQ ID NO: 488443 - RNA, 22 nt, Human
uaagauaugguaggaaguuugg

SEQ ID NO: 488444 - RNA, 17 nt, Human
ugagcaguagaagaugc

SEQ ID NO: 488445 - RNA, 22 nt, Human
ucugaaggugcuagagaaagcu

SEQ ID NO: 488446 - RNA, 22 nt, Human
agguccagcuguugcagccucc

SEQ ID NO: 488447 - RNA, 22 nt, Human
uaguuaggaauagcagcgacuc

SEQ ID NO: 488448 - RNA, 22 nt, Human
uggcagcagggaggccaguguu

SEQ ID NO: 488449 - RNA, 22 nt, Human
gaggcugccccuuccucagcug

SEQ ID NO: 488450 - RNA, 22 nt, Human
aacaacugaaaagcuuuuucug

SEQ ID NO: 488451 - RNA, 22 nt, Human
ucacguuuuacugagugagaua

SEQ ID NO: 488452 - RNA, 22 nt, Human
gggaaauugucaacacucucaa

SEQ ID NO: 488453 - RNA, 22 nt, Human
caggcagcucgaugccuuguug

SEQ ID NO: 488454 - RNA, 21 nt, Human
gcagagccggggcgagaaggc

SEQ ID NO: 488455 - RNA, 22 nt, Human
ccuccuagaggaaccccagggc

SEQ ID NO: 488456 - RNA, 22 nt, Human
ccagucccagcucugccaugcu

SEQ ID NO: 488457 - RNA, 22 nt, Human
uaggccagcccuuaguccuguc

SEQ ID NO: 488458 - RNA, 22 nt, Human
gaaaggcaguacagcugagccu

SEQ ID NO: 488459 - RNA, 22 nt, Human
cagcugcuguucaguuuuguuu

SEQ ID NO: 488460 - RNA, 22 nt, Human
uccaugucuucaugugucuaac

SEQ ID NO: 488461 - RNA, 22 nt, Human
ccaggagguggagauugcagug

SEQ ID NO: 488462 - RNA, 22 nt, Human
gauuucaccugaucuugucauc

SEQ ID NO: 488463 - RNA, 22 nt, Human
gcccugugccagucacgcugug

SEQ ID NO: 488464 - RNA, 23 nt, Human
uugaaagguagcuggcagcuaga

SEQ ID NO: 488465 - RNA, 22 nt, Human
aguguuugucccguuagaaaug

SEQ ID NO: 488466 - RNA, 22 nt, Human
gaauucugucgcuuacuagaug

SEQ ID NO: 488467 - RNA, 22 nt, Human
uucagugugugauaccugcugu

SEQ ID NO: 488468 - RNA, 22 nt, Human
gauuuauuuuuaaucagcaggg

SEQ ID NO: 488469 - RNA, 22 nt, Human
uuugcauugccucugacuuaug

SEQ ID NO: 488470 - RNA, 22 nt, Human
cccuggagugccggaaucaaga

SEQ ID NO: 488471 - RNA, 22 nt, Human
agugacugacaccuguaauccc

SEQ ID NO: 488472 - RNA, 22 nt, Human
ugggagcacccugaggagcuuc

SEQ ID NO: 488473 - RNA, 23 nt, Human
aggagccaggugcagcccuugug

SEQ ID NO: 488474 - RNA, 22 nt, Human
uccugugccuccaccugcuccg

SEQ ID NO: 488475 - RNA, 22 nt, Human
gcgguagcucaagcuuguaauc

SEQ ID NO: 488476 - RNA, 22 nt, Human
ucugucucaaguucuugcacuc

SEQ ID NO: 488477 - RNA, 22 nt, Human
uuucuacauucaaaaacuacca

SEQ ID NO: 488478 - RNA, 22 nt, Human
gcagccacucucauuccacgug

SEQ ID NO: 488479 - RNA, 22 nt, Human
aagcugcccucauucccagugc

SEQ ID NO: 488480 - RNA, 22 nt, Human
gcucugcucuaacauuccugac

SEQ ID NO: 488481 - RNA, 22 nt, Human
uggagccagagcgcagccuggg

SEQ ID NO: 488482 - RNA, 22 nt, Human
aggucacacuuggaucauagaa

SEQ ID NO: 488483 - RNA, 22 nt, Human
ggaaggaggaugcucuggccuu

SEQ ID NO: 488484 - RNA, 22 nt, Human
agcugccacaugcccaagggca

SEQ ID NO: 488485 - RNA, 22 nt, Human
uauguacaaucagcaguucaua

SEQ ID NO: 488486 - RNA, 21 nt, Human
agccaggcaagcacccccacu

SEQ ID NO: 488487 - RNA, 22 nt, Human
agcaccaucagaugcaauaucu

SEQ ID NO: 488488 - RNA, 22 nt, Human
cccagacugcagagcgggcaga

SEQ ID NO: 488489 - RNA, 22 nt, Human
uccaggcuagguuuacaggaca

SEQ ID NO: 488490 - RNA, 22 nt, Human
acugauacaucuguggaagugg

SEQ ID NO: 488491 - RNA, 22 nt, Human
uggcagagccuugccaaacucc

SEQ ID NO: 488492 - RNA, 22 nt, Human
ugcagaagcugcaggucagugg

SEQ ID NO: 488493 - RNA, 22 nt, Human
caggaggccaacugugggacuu

SEQ ID NO: 488494 - RNA, 22 nt, Human
agguaaggcuguaagcuaagcc

SEQ ID NO: 488495 - RNA, 22 nt, Human
cagcuuuauugagguauaauug

SEQ ID NO: 488496 - RNA, 22 nt, Human
guacaaaaguuauugcgguuuu

SEQ ID NO: 488497 - RNA, 22 nt, Human
ucacaugcccuguauuuaccag

SEQ ID NO: 488498 - RNA, 22 nt, Human
cuccucccugcgauugcucugc

SEQ ID NO: 488499 - RNA, 22 nt, Human
gcucagagcacucagacucagc

SEQ ID NO: 488500 - RNA, 22 nt, Human
auuuagaaguuggagggcaaga

SEQ ID NO: 488501 - RNA, 22 nt, Human
agcaggugcauggcgagcgcgg

SEQ ID NO: 488502 - RNA, 19 nt, Human
gggcuuggggcugaagccu

SEQ ID NO: 488503 - RNA, 22 nt, Human
gcagaagcugggcagcgaggug

SEQ ID NO: 488504 - RNA, 22 nt, Human
acauuucuugaugccucuguga

SEQ ID NO: 488505 - RNA, 22 nt, Human
ggcucugcuucagaaggcucau

SEQ ID NO: 488506 - RNA, 19 nt, Human
ugcagcucagggcaggggc

SEQ ID NO: 488507 - RNA, 20 nt, Human
ugcagcugguuucacaggga

SEQ ID NO: 488508 - RNA, 22 nt, Human
agggcagacuaggauggaagug

SEQ ID NO: 488509 - RNA, 22 nt, Human
ccaggcucugucuggucagaag

SEQ ID NO: 488510 - RNA, 22 nt, Human
gggagucugggcuagacuccuu

SEQ ID NO: 488511 - RNA, 22 nt, Human
aguggagaagaggauggucucc

SEQ ID NO: 488512 - RNA, 22 nt, Human
ugcagggccccucugcaugagu

SEQ ID NO: 488513 - RNA, 22 nt, Human
ggagauaguccaggugaaggga

SEQ ID NO: 488514 - RNA, 22 nt, Human
acagcuggaggucugugagcac

SEQ ID NO: 488515 - RNA, 18 nt, Human
gggcccuggcguccgccc

SEQ ID NO: 488516 - RNA, 22 nt, Human
ucccagaaaaaggaggcuauga

SEQ ID NO: 488517 - RNA, 22 nt, Human
ggcucuggcguccaauggagcg

SEQ ID NO: 488518 - RNA, 22 nt, Human
gaggaguguauuccacaccacu

SEQ ID NO: 488519 - RNA, 21 nt, Human
uucaagauauuuaaaaggugg

SEQ ID NO: 488520 - RNA, 22 nt, Human
ucucccaggugggugccuggag

SEQ ID NO: 488521 - RNA, 22 nt, Human
cagagaaacucagauagcugau

SEQ ID NO: 488522 - RNA, 22 nt, Human
ugagagugguucagcucagaag

SEQ ID NO: 488523 - RNA, 22 nt, Human
ugaagaugucagcagggguggu

SEQ ID NO: 488524 - RNA, 22 nt, Human
cucuguagaaacagggcagaag

SEQ ID NO: 488525 - RNA, 22 nt, Human
uuauuaggaacucaggauuuuu

SEQ ID NO: 488526 - RNA, 21 nt, Human
guuuucaugauagagucugua

SEQ ID NO: 488527 - RNA, 23 nt, Human
uggcccugaaucuguccuggagg

SEQ ID NO: 488528 - RNA, 22 nt, Human
ugcaggugugguuccucagcca

SEQ ID NO: 488529 - RNA, 22 nt, Human
gcugcucuuuucagagaugaga

SEQ ID NO: 488530 - RNA, 22 nt, Human
gacaugcaugaaugcaggucuc

SEQ ID NO: 488531 - RNA, 22 nt, Human
uacauugugauguuucaauaca

SEQ ID NO: 488532 - RNA, 18 nt, Human
cacaggcucccagugagg

SEQ ID NO: 488533 - RNA, 22 nt, Human
ugcagugguguccagguguacu

SEQ ID NO: 488534 - RNA, 22 nt, Human
aaaugcaggaaauuaugcuuuu

SEQ ID NO: 488535 - RNA, 22 nt, Human
ucuagaaaaaaacugcugugga

SEQ ID NO: 488536 - RNA, 22 nt, Human
guccugggaaggaagccaggga

SEQ ID NO: 488537 - RNA, 22 nt, Human
acagagagaggcccgaggcugc

SEQ ID NO: 488538 - RNA, 20 nt, Human
ggggcaguggcucaugccug

SEQ ID NO: 488539 - RNA, 19 nt, Human
aggcagcaggccagggaug

SEQ ID NO: 488540 - RNA, 22 nt, Human
gagcuuuaagggcacuggucuu

SEQ ID NO: 488541 - RNA, 19 nt, Human
ucaaaggcaaggaggaacu

SEQ ID NO: 488542 - RNA, 22 nt, Human
ucuuugcaucccuuccauaguu

SEQ ID NO: 488543 - RNA, 22 nt, Human
ucagagaguuacacaaauuguu

SEQ ID NO: 488544 - RNA, 22 nt, Human
acccaggccugagagacaggag

SEQ ID NO: 488545 - RNA, 22 nt, Human
ccaucagcuccaguaucuucug

SEQ ID NO: 488546 - RNA, 22 nt, Human
ucucccaggcuggagugcagug

SEQ ID NO: 488547 - RNA, 22 nt, Human
gcaccacaucaaugaggggagc

SEQ ID NO: 488548 - RNA, 22 nt, Human
gaguuauuggguggaaagguag

SEQ ID NO: 488549 - RNA, 22 nt, Human
cugagaauuacucugaugagua

SEQ ID NO: 488550 - RNA, 21 nt, Human
acagccugucaucucaugguc

SEQ ID NO: 488551 - RNA, 22 nt, Human
cuggcagguggauggggacucc

SEQ ID NO: 488552 - RNA, 22 nt, Human
agaaauacuuuguaaaucucac

SEQ ID NO: 488553 - RNA, 22 nt, Human
agacaaagaaaccguagaagca

SEQ ID NO: 488554 - RNA, 22 nt, Human
guccucaguaagagggccucug

SEQ ID NO: 488555 - RNA, 22 nt, Human
gagcucauucauucauugccug

SEQ ID NO: 488556 - RNA, 22 nt, Human
agcugcagagguuugugcaaca

SEQ ID NO: 488557 - RNA, 22 nt, Human
cuuaacagcaagaucuguguca

SEQ ID NO: 488558 - RNA, 22 nt, Human
ggggcagccuccaggaaagcug

SEQ ID NO: 488559 - RNA, 22 nt, Human
ucugagaggcagaccuuccuaa

SEQ ID NO: 488560 - RNA, 22 nt, Human
agcagcauaucagagaaaguca

SEQ ID NO: 488561 - RNA, 22 nt, Human
ugucagagcaaugagguucagc

SEQ ID NO: 488562 - RNA, 22 nt, Human
agaaacugaauuauuucugagg

SEQ ID NO: 488563 - RNA, 22 nt, Human
cagguggguacaucacagagac

SEQ ID NO: 488564 - RNA, 22 nt, Human
gcacagaacuucucuuaguagg

SEQ ID NO: 488565 - RNA, 22 nt, Human
aagcugcccaagacugaagcau

SEQ ID NO: 488566 - RNA, 22 nt, Human
ggcucccugccuguccucaguc

SEQ ID NO: 488567 - RNA, 22 nt, Human
ucacuucacacccacuaucaug

SEQ ID NO: 488568 - RNA, 22 nt, Human
uacauagcaaggaaaugacaga

SEQ ID NO: 488569 - RNA, 22 nt, Human
ccagcuccaaguuugggcauca

SEQ ID NO: 488570 - RNA, 20 nt, Human
agcauuugaaauaugacuau

SEQ ID NO: 488571 - RNA, 22 nt, Human
agagcagauggagcuggaagag

SEQ ID NO: 488572 - RNA, 19 nt, Human
cccagagcauccugaacuu

SEQ ID NO: 488573 - RNA, 22 nt, Human
ggacagagcccugguggccuaa

SEQ ID NO: 488574 - RNA, 22 nt, Human
aaagccuugagauccuauaguu

SEQ ID NO: 488575 - RNA, 22 nt, Human
agugcacaccuuaguacaaagu

SEQ ID NO: 488576 - RNA, 22 nt, Human
ccaggguguagggauuccagau

SEQ ID NO: 488577 - RNA, 22 nt, Human
agagcagagggcucugggacaa

SEQ ID NO: 488578 - RNA, 22 nt, Human
uucacaauaggagcaugcaaau

SEQ ID NO: 488579 - RNA, 22 nt, Human
aggagccaguuccaccccagga

SEQ ID NO: 488580 - RNA, 22 nt, Human
ugcuucugggcaaaugugugug

SEQ ID NO: 488581 - RNA, 22 nt, Human
agccaggauuggcugagccuua

SEQ ID NO: 488582 - RNA, 22 nt, Human
aaggcuuucagcuaacuugauu

SEQ ID NO: 488583 - RNA, 23 nt, Human
agucaguguaaguuuggaaugca

SEQ ID NO: 488584 - RNA, 22 nt, Human
uuccagcaggcagacaggagau

SEQ ID NO: 488585 - RNA, 22 nt, Human
acuuucauuuguaauaaacuuc

SEQ ID NO: 488586 - RNA, 22 nt, Human
cuggagugaagucuggcagcuu

SEQ ID NO: 488587 - RNA, 22 nt, Human
cauuucuguucucuuccuguac

SEQ ID NO: 488588 - RNA, 22 nt, Human
ggcucuggguucugcaaugcgu

SEQ ID NO: 488589 - RNA, 20 nt, Human
acaggggcagcacaauaaug

SEQ ID NO: 488590 - RNA, 22 nt, Human
gagcacagggaauagacagaua

SEQ ID NO: 488591 - RNA, 22 nt, Human
gaggaugugucuggucugggca

SEQ ID NO: 488592 - RNA, 22 nt, Human
cagcuggggcagccacgugcgg

SEQ ID NO: 488593 - RNA, 22 nt, Human
augaggcaaggaucagguaagg

SEQ ID NO: 488594 - RNA, 20 nt, Human
gcagagccucacugcaaggg

SEQ ID NO: 488595 - RNA, 22 nt, Human
ggcugggccagggccuguggac

SEQ ID NO: 488596 - RNA, 22 nt, Human
cagugagguggauggauggccu

SEQ ID NO: 488597 - RNA, 23 nt, Human
acagcugcaccuggccgccuggc

SEQ ID NO: 488598 - RNA, 22 nt, Human
acagcugugaaaauccacagga

SEQ ID NO: 488599 - RNA, 22 nt, Human
ccuggagcacagcccaguccca

SEQ ID NO: 488600 - RNA, 22 nt, Human
aauuaacaaauguagcugugau

SEQ ID NO: 488601 - RNA, 20 nt, Human
ccuggagccuggaaggaguc

SEQ ID NO: 488602 - RNA, 22 nt, Human
cagaaguggccucagagggagu

SEQ ID NO: 488603 - RNA, 22 nt, Human
guaugcaucgacucaagucuga

SEQ ID NO: 488604 - RNA, 22 nt, Human
aggcugcuuccuuacguggcug

SEQ ID NO: 488605 - RNA, 22 nt, Human
gggcuggagccagcuguggcug

SEQ ID NO: 488606 - RNA, 22 nt, Human
gagcagggagacaacucuggug

SEQ ID NO: 488607 - RNA, 22 nt, Human
gugggaugguagguagguaaua

SEQ ID NO: 488608 - RNA, 22 nt, Human
cauggcaggaggcugcuggcag

SEQ ID NO: 488609 - RNA, 22 nt, Human
gcauggcauuaacaagauggaa

SEQ ID NO: 488610 - RNA, 22 nt, Human
aggcaagggggcgccaccuucc

SEQ ID NO: 488611 - RNA, 22 nt, Human
ugccaggcccugcgggguccca

SEQ ID NO: 488612 - RNA, 22 nt, Human
ugggcuccuugggagcaaguga

SEQ ID NO: 488613 - RNA, 22 nt, Human
ggggccagguccagcuuccaaa

SEQ ID NO: 488614 - RNA, 22 nt, Human
ggucacaggggagaagagugau

SEQ ID NO: 488615 - RNA, 22 nt, Human
aagcacuuagaagagugccugc

SEQ ID NO: 488616 - RNA, 22 nt, Human
gcagggacaccuuugugaagcu

SEQ ID NO: 488617 - RNA, 22 nt, Human
aagggcaggcagagaucauaua

SEQ ID NO: 488618 - RNA, 22 nt, Human
ggcaggguggcagaggcucaga

SEQ ID NO: 488619 - RNA, 22 nt, Human
guccucagagugggcagguccu

SEQ ID NO: 488620 - RNA, 22 nt, Human
ggcccuguuagagcucccacaa

SEQ ID NO: 488621 - RNA, 22 nt, Human
uggagggaacccaggcugcucu

SEQ ID NO: 488622 - RNA, 22 nt, Human
uguagaaagaauauguuucaua

SEQ ID NO: 488623 - RNA, 22 nt, Human
ucuuuacaguccucugucaauc

SEQ ID NO: 488624 - RNA, 22 nt, Human
ugagcuuacuucuguacacaga

SEQ ID NO: 488625 - RNA, 22 nt, Human
gaaggaagugcucauacuaguu

SEQ ID NO: 488626 - RNA, 22 nt, Human
uggcuggggagccccgacuccc

SEQ ID NO: 488627 - RNA, 22 nt, Human
guuuggggucugcagagcggcg

SEQ ID NO: 488628 - RNA, 18 nt, Human
ccuggagcuccacagcaa

SEQ ID NO: 488629 - RNA, 22 nt, Human
uggcucaguuccaucaucugga

SEQ ID NO: 488630 - RNA, 18 nt, Human
agucucagcggaggagua

SEQ ID NO: 488631 - RNA, 22 nt, Human
uauugaguuacagaaaauacuu

SEQ ID NO: 488632 - RNA, 22 nt, Human
agaacagaggccuuauguuuca

SEQ ID NO: 488633 - RNA, 22 nt, Human
auuguuaugaaaauaagauguu

SEQ ID NO: 488634 - RNA, 22 nt, Human
caggauggugugagugugagga

SEQ ID NO: 488635 - RNA, 22 nt, Human
gcagugauuggaucagagaugg

SEQ ID NO: 488636 - RNA, 22 nt, Human
gggcuggaggugagcaggacag

SEQ ID NO: 488637 - RNA, 22 nt, Human
cagaugagaguggccaggguuc

SEQ ID NO: 488638 - RNA, 22 nt, Human
uuguaacaggcacucugugcca

SEQ ID NO: 488639 - RNA, 22 nt, Human
augggaggaaggaggcccuuga

SEQ ID NO: 488640 - RNA, 22 nt, Human
guguccacggcugagaaugauu

SEQ ID NO: 488641 - RNA, 19 nt, Human
guccaguguuuuccaguca

SEQ ID NO: 488642 - RNA, 21 nt, Human
aagcaggacauaugaugcccu

SEQ ID NO: 488643 - RNA, 22 nt, Human
caggcagcauuuacucugauga

SEQ ID NO: 488644 - RNA, 22 nt, Human
ucacaggaaccaucagagaaau

SEQ ID NO: 488645 - RNA, 22 nt, Human
gcugagagcaaagcaugucuag

SEQ ID NO: 488646 - RNA, 22 nt, Human
ugcagcugauuaaagggcagac

SEQ ID NO: 488647 - RNA, 22 nt, Human
aggacuucaucaccuguauaaa

SEQ ID NO: 488648 - RNA, 22 nt, Human
ccugccugcagaaaguaucucc

SEQ ID NO: 488649 - RNA, 22 nt, Human
ccaggcugggcggggaaccugg

SEQ ID NO: 488650 - RNA, 22 nt, Human
uccuucaggguugaggccgacu

SEQ ID NO: 488651 - RNA, 22 nt, Human
ccaagggcugcugaggugucca

SEQ ID NO: 488652 - RNA, 22 nt, Human
gcagccacuuugcaaccaagag

SEQ ID NO: 488653 - RNA, 22 nt, Human
aggcaauccccugaggauacuu

SEQ ID NO: 488654 - RNA, 22 nt, Human
uaaaggcucacuggcuuggggu

SEQ ID NO: 488655 - RNA, 22 nt, Human
aagcaggcauuccagagacaau

SEQ ID NO: 488656 - RNA, 22 nt, Human
gcagccacccucaaggcugaau

SEQ ID NO: 488657 - RNA, 22 nt, Human
ugcugccaccugguggcugaag

SEQ ID NO: 488658 - RNA, 22 nt, Human
ucccagccggugccuggguccc

SEQ ID NO: 488659 - RNA, 22 nt, Human
aauuagggaaaacauuugcuuu

SEQ ID NO: 488660 - RNA, 22 nt, Human
agcuguggaguaggggguugga

SEQ ID NO: 488661 - RNA, 22 nt, Human
aagaaauauugggccuuauaaa

SEQ ID NO: 488662 - RNA, 22 nt, Human
auuuccucaugaucauaaugca

SEQ ID NO: 488663 - RNA, 17 nt, Human
accagccucuccugggg

SEQ ID NO: 488664 - RNA, 22 nt, Human
cugcccuggucccauggcugau

SEQ ID NO: 488665 - RNA, 22 nt, Human
ggaggcacuucccgucucagcc

SEQ ID NO: 488666 - RNA, 22 nt, Human
gccuccugguugcuucuccaac

SEQ ID NO: 488667 - RNA, 18 nt, Human
gcugccugcauuccucac

SEQ ID NO: 488668 - RNA, 22 nt, Human
caggaagcugagcugcacugca

SEQ ID NO: 488669 - RNA, 22 nt, Human
ucaccagggcuccagccagccu

SEQ ID NO: 488670 - RNA, 22 nt, Human
cccuucucuuucacucacuauu

SEQ ID NO: 488671 - RNA, 21 nt, Human
aggugcaggccucaagcccca

SEQ ID NO: 488672 - RNA, 22 nt, Human
guuauuaguaagacucgcacau

SEQ ID NO: 488673 - RNA, 22 nt, Human
agaagauuuagguugacgcuau

SEQ ID NO: 488674 - RNA, 22 nt, Human
cuuucagagguuacucaggaaa

SEQ ID NO: 488675 - RNA, 22 nt, Human
acugaaggaaagccuuugcaug

SEQ ID NO: 488676 - RNA, 22 nt, Human
cggcagggcuccaugcauuucu

SEQ ID NO: 488677 - RNA, 19 nt, Human
uccugcagaccagaccugu

SEQ ID NO: 488678 - RNA, 22 nt, Human
caugcacagugauaucugaaga

SEQ ID NO: 488679 - RNA, 22 nt, Human
ucaguuuucucaucugugaaau

SEQ ID NO: 488680 - RNA, 16 nt, Human
ugggaccuguggccaa

SEQ ID NO: 488681 - RNA, 22 nt, Human
uucaagaucuggguuuucagcu

SEQ ID NO: 488682 - RNA, 22 nt, Human
agaggagguggugaugcuuuaa

SEQ ID NO: 488683 - RNA, 22 nt, Human
gaggugagaagggggucagaug

SEQ ID NO: 488684 - RNA, 22 nt, Human
caucagcagucacaugaugcug

SEQ ID NO: 488685 - RNA, 22 nt, Human
ggcugccacgucgaggguccaa

SEQ ID NO: 488686 - RNA, 22 nt, Human
uuacuucuuacaaaagaaauau

SEQ ID NO: 488687 - RNA, 22 nt, Human
cugccagcucaaagcgcagcua

SEQ ID NO: 488688 - RNA, 22 nt, Human
aggagugagcuuuggggucaga

SEQ ID NO: 488689 - RNA, 21 nt, Human
cacuauuuauauaugccagcu

SEQ ID NO: 488690 - RNA, 22 nt, Human
auuaaauuggaucugcauaguu

SEQ ID NO: 488691 - RNA, 20 nt, Human
agccaggccucaaguuaagu

SEQ ID NO: 488692 - RNA, 22 nt, Human
uggcagaaguacacaagcaugc

SEQ ID NO: 488693 - RNA, 22 nt, Human
ggucccaggaaucuguguucua

SEQ ID NO: 488694 - RNA, 22 nt, Human
cagcuccugccugggcagcugu

SEQ ID NO: 488695 - RNA, 20 nt, Human
accucugcaucaauccuuug

SEQ ID NO: 488696 - RNA, 22 nt, Human
uugcaaaggggaauaaagcaau

SEQ ID NO: 488697 - RNA, 22 nt, Human
gcucuggaagcaucugagagga

SEQ ID NO: 488698 - RNA, 22 nt, Human
agguaagggucacaguucauau

SEQ ID NO: 488699 - RNA, 22 nt, Human
caguguuucugaguuccagcuc

SEQ ID NO: 488700 - RNA, 22 nt, Human
ccaggcagcaaauuuucugaau

SEQ ID NO: 488701 - RNA, 22 nt, Human
aaagggcugucaaauaagcaac

SEQ ID NO: 488702 - RNA, 22 nt, Human
cugucccucaucaccucugggu

SEQ ID NO: 488703 - RNA, 22 nt, Human
agagcaggcauaaagcuuugaa

SEQ ID NO: 488704 - RNA, 22 nt, Human
ugcagccaauucauucauucuu

SEQ ID NO: 488705 - RNA, 22 nt, Human
uuugacaaaggaaaaaugcaca

SEQ ID NO: 488706 - RNA, 22 nt, Human
ccugggugaugugcugcccucg

SEQ ID NO: 488707 - RNA, 22 nt, Human
cagucccaggguugguucagcu

SEQ ID NO: 488708 - RNA, 22 nt, Human
cagcuucuucaguccuggagcu

SEQ ID NO: 488709 - RNA, 22 nt, Human
cagaggaagcuggguguggagu

SEQ ID NO: 488710 - RNA, 22 nt, Human
cucuccaggacuuuggcccaau

SEQ ID NO: 488711 - RNA, 19 nt, Human
ccuggaggugaagguucuc

SEQ ID NO: 488712 - RNA, 22 nt, Human
gcucugaggcugugaggugcug

SEQ ID NO: 488713 - RNA, 22 nt, Human
uugauacaggcucuauuucauc

SEQ ID NO: 488714 - RNA, 22 nt, Human
ugccuggguccaggccaagccu

SEQ ID NO: 488715 - RNA, 22 nt, Human
gggaccugaggagggguuucag

SEQ ID NO: 488716 - RNA, 22 nt, Human
ggagagagaugccgccuugcuc

SEQ ID NO: 488717 - RNA, 22 nt, Human
caggcacuguguuaggcacugu

SEQ ID NO: 488718 - RNA, 17 nt, Human
gcagccagugcagcagg

SEQ ID NO: 488719 - RNA, 22 nt, Human
gggcugacaaccaucugacaag

SEQ ID NO: 488720 - RNA, 22 nt, Human
cagccuccugggacacucaccg

SEQ ID NO: 488721 - RNA, 22 nt, Human
caucagagugguggccuggugu

SEQ ID NO: 488722 - RNA, 22 nt, Human
gcugccagcucacucuccugag

SEQ ID NO: 488723 - RNA, 22 nt, Human
gcagagcucaagguguucagcu

SEQ ID NO: 488724 - RNA, 22 nt, Human
ucaggaaagaagaugcucagug

SEQ ID NO: 488725 - RNA, 22 nt, Human
gaguccaguaguuaggacagag

SEQ ID NO: 488726 - RNA, 21 nt, Human
cagaggccucaugcucugugc

SEQ ID NO: 488727 - RNA, 22 nt, Human
cagcagcuacuuggagcagcag

SEQ ID NO: 488728 - RNA, 22 nt, Human
uguacacugcaggaugcauugc

SEQ ID NO: 488729 - RNA, 22 nt, Human
gaggagaaagcagugauuugug

SEQ ID NO: 488730 - RNA, 20 nt, Human
gcugaggucauuaugccuca

SEQ ID NO: 488731 - RNA, 22 nt, Human
gacagcagggacauguaggaag

SEQ ID NO: 488732 - RNA, 22 nt, Human
gauuuccucacuaacauccauc

SEQ ID NO: 488733 - RNA, 20 nt, Human
acuuuggggucuuucucaga

SEQ ID NO: 488734 - RNA, 23 nt, Human
uuuuaauuuggacauaagaagau

SEQ ID NO: 488735 - RNA, 22 nt, Human
aggaaggagggcagauauuaag

SEQ ID NO: 488736 - RNA, 23 nt, Human
gacagagugagaccuugucuuac

SEQ ID NO: 488737 - RNA, 22 nt, Human
gcauccagagguagccacugug

SEQ ID NO: 488738 - RNA, 22 nt, Human
gcauguguggaggagaugugcu

SEQ ID NO: 488739 - RNA, 22 nt, Human
augugaaacugaagcauccaua

SEQ ID NO: 488740 - RNA, 19 nt, Human
uuagggacaugaauucuag

SEQ ID NO: 488741 - RNA, 22 nt, Human
ucucugggaaugggccugggua

SEQ ID NO: 488742 - RNA, 22 nt, Human
gagguagcaugcuggaagggac

SEQ ID NO: 488743 - RNA, 22 nt, Human
ggccaggcgaugaccccuccac

SEQ ID NO: 488744 - RNA, 22 nt, Human
aagccagguguugugguaagag

SEQ ID NO: 488745 - RNA, 22 nt, Human
gggagccacaguuuauagugau

SEQ ID NO: 488746 - RNA, 22 nt, Human
gugauuucaaauauagagugag

SEQ ID NO: 488747 - RNA, 22 nt, Human
ucuucagauugcacugagcaag

SEQ ID NO: 488748 - RNA, 22 nt, Human
cauuugaugacucaacucauaa

SEQ ID NO: 488749 - RNA, 22 nt, Human
aagugggaauagaaaugaaggu

SEQ ID NO: 488750 - RNA, 22 nt, Human
agggccaggaacaccugaaggg

SEQ ID NO: 488751 - RNA, 22 nt, Human
ucugaggcuucagacuguacug

SEQ ID NO: 488752 - RNA, 22 nt, Human
caaugugugcuuacaggccagu

SEQ ID NO: 488753 - RNA, 22 nt, Human
gccaccuguuucgcuugcccag

SEQ ID NO: 488754 - RNA, 22 nt, Human
uaggccaggacagagcuuccag

SEQ ID NO: 488755 - RNA, 22 nt, Human
uuaaauuagucaagcuucucug

SEQ ID NO: 488756 - RNA, 22 nt, Human
cucuccucugaaguggugaccc

SEQ ID NO: 488757 - RNA, 20 nt, Human
gugggcagaugugugcaugg

SEQ ID NO: 488758 - RNA, 22 nt, Human
ugcaggagacauaauagggacu

SEQ ID NO: 488759 - RNA, 22 nt, Human
aauaacaggcucaucagaugcu

SEQ ID NO: 488760 - RNA, 22 nt, Human
cugcugcugagagcucagccug

SEQ ID NO: 488761 - RNA, 22 nt, Human
ccagggcauguccaagacuuag

SEQ ID NO: 488762 - RNA, 22 nt, Human
aggacaguccgggguccuccac

SEQ ID NO: 488763 - RNA, 22 nt, Human
cugcugcauuccucuuuaugag

SEQ ID NO: 488764 - RNA, 22 nt, Human
ccagaggagggcucugaugagg

SEQ ID NO: 488765 - RNA, 22 nt, Human
uccugcagagacagaggccuca

SEQ ID NO: 488766 - RNA, 17 nt, Human
agugacuuggaaagagc

SEQ ID NO: 488767 - RNA, 21 nt, Human
aaaggccauaaucacggagca

SEQ ID NO: 488768 - RNA, 22 nt, Human
uucaaguucauguguagucagu

SEQ ID NO: 488769 - RNA, 22 nt, Human
agucccaggcagccgagccggu

SEQ ID NO: 488770 - RNA, 22 nt, Human
gcaggguauaauacuuagguga

SEQ ID NO: 488771 - RNA, 22 nt, Human
agggagcucaguuggaagcggu

SEQ ID NO: 488772 - RNA, 22 nt, Human
ucagaguguggugagaugugca

SEQ ID NO: 488773 - RNA, 22 nt, Human
gaggccugcuuuggcacucugg

SEQ ID NO: 488774 - RNA, 22 nt, Human
caugagcugcugggagccuguc

SEQ ID NO: 488775 - RNA, 22 nt, Human
uggcuccuucauucuccugcca

SEQ ID NO: 488776 - RNA, 21 nt, Human
ucuuuccugcccaguugcccu

SEQ ID NO: 488777 - RNA, 22 nt, Human
ugugggcucccccucacucugu

SEQ ID NO: 488778 - RNA, 19 nt, Human
agggccugcagcucaagcu

SEQ ID NO: 488779 - RNA, 22 nt, Human
cuuuggaacauacugcugagcu

SEQ ID NO: 488780 - RNA, 22 nt, Human
ccuggccugugaaucugagagc

SEQ ID NO: 488781 - RNA, 22 nt, Human
uugaaaggccuguuuauccagc

SEQ ID NO: 488782 - RNA, 22 nt, Human
acagcagcuaaaggugucuccu

SEQ ID NO: 488783 - RNA, 22 nt, Human
ugggcagauguccucugaagug

SEQ ID NO: 488784 - RNA, 22 nt, Human
auagaaaacagauguccuuaaa

SEQ ID NO: 488785 - RNA, 22 nt, Human
gagcccuccauggagccaggca

SEQ ID NO: 488786 - RNA, 22 nt, Human
ucaaggagcccacagucuaaug

SEQ ID NO: 488787 - RNA, 22 nt, Human
gggaagggagggccuccaguca

SEQ ID NO: 488788 - RNA, 22 nt, Human
aggagaaguaaggcuagaugau

SEQ ID NO: 488789 - RNA, 22 nt, Human
ugaaagaacuagcaucuucaag

SEQ ID NO: 488790 - RNA, 22 nt, Human
cagagcugagucuucaagguug

SEQ ID NO: 488791 - RNA, 23 nt, Human
gagggcucugagugcuugggcca

SEQ ID NO: 488792 - RNA, 22 nt, Human
agcagccauagauagcaugcaa

SEQ ID NO: 488793 - RNA, 22 nt, Human
auucuccaucaccacuggcacu

SEQ ID NO: 488794 - RNA, 22 nt, Human
ccucagagguguggcaucucug

SEQ ID NO: 488795 - RNA, 22 nt, Human
aagaacaguguccugggacucg

SEQ ID NO: 488796 - RNA, 22 nt, Human
agagaaggucacuaaggaccca

SEQ ID NO: 488797 - RNA, 22 nt, Human
uacuguacucaacaugugaguu

SEQ ID NO: 488798 - RNA, 22 nt, Human
ucagccugcgucauggugacac

SEQ ID NO: 488799 - RNA, 22 nt, Human
gggacuggcacagggcugggag

SEQ ID NO: 488800 - RNA, 22 nt, Human
ucuguuuaggcaaaauagcuac

SEQ ID NO: 488801 - RNA, 22 nt, Human
cucaggacccgguccagguggg

SEQ ID NO: 488802 - RNA, 22 nt, Human
gauaugaaguggcauugugaag

SEQ ID NO: 488803 - RNA, 22 nt, Human
acaguggagcucagaugaaaau

SEQ ID NO: 488804 - RNA, 22 nt, Human
ccacccuggacaggccucugag

SEQ ID NO: 488805 - RNA, 22 nt, Human
gggcucagacaucccuccugga

SEQ ID NO: 488806 - RNA, 22 nt, Human
aggaaacagugaacuuggcagg

SEQ ID NO: 488807 - RNA, 22 nt, Human
uaaagguagcaugaaacugcaa

SEQ ID NO: 488808 - RNA, 22 nt, Human
accaaggagccacauacaaccu

SEQ ID NO: 488809 - RNA, 22 nt, Human
cacugaagccugggaguaagac

SEQ ID NO: 488810 - RNA, 22 nt, Human
cugugcauugucuugucuguag

SEQ ID NO: 488811 - RNA, 22 nt, Human
cagcacacagugacucgcaccu

SEQ ID NO: 488812 - RNA, 23 nt, Human
gagcugggauacaggcuuacugc

SEQ ID NO: 488813 - RNA, 22 nt, Human
acacuuuguuguggcauauacg

SEQ ID NO: 488814 - RNA, 22 nt, Human
aagcugccaccagcccagggca

SEQ ID NO: 488815 - RNA, 22 nt, Human
uccuuccugcaggccaaguccu

SEQ ID NO: 488816 - RNA, 22 nt, Human
uggcugagagaagacggggaag

SEQ ID NO: 488817 - RNA, 22 nt, Human
guggcuucugcggugugcgcag

SEQ ID NO: 488818 - RNA, 22 nt, Human
cacauaaucaccaaguccuuuc

SEQ ID NO: 488819 - RNA, 22 nt, Human
uacuuuuugucucuuugaaugu

SEQ ID NO: 488820 - RNA, 22 nt, Human
cagguccuggcaucaggcaggu

SEQ ID NO: 488821 - RNA, 22 nt, Human
aaguguguauuguuuaugcugc

SEQ ID NO: 488822 - RNA, 22 nt, Human
auacuguuuugugacuuaucuu

SEQ ID NO: 488823 - RNA, 22 nt, Human
gggcagcagagcccugccgagu

SEQ ID NO: 488824 - RNA, 22 nt, Human
cccuggaggagcuuagagcuug

SEQ ID NO: 488825 - RNA, 22 nt, Human
aagggaggggauguaagccugg

SEQ ID NO: 488826 - RNA, 22 nt, Human
aauaauuuccagccaacuggaa

SEQ ID NO: 488827 - RNA, 22 nt, Human
gucaugccagcggagcucggga

SEQ ID NO: 488828 - RNA, 22 nt, Human
guccugggccugcugaggcuga

SEQ ID NO: 488829 - RNA, 22 nt, Human
uuguucaugguuguaaguuuga

SEQ ID NO: 488830 - RNA, 22 nt, Human
cagggccaccguguuugcugcu

SEQ ID NO: 488831 - RNA, 22 nt, Human
agagccagcaagugaauaguga

SEQ ID NO: 488832 - RNA, 22 nt, Human
cugaggccucucuccugggcuu

SEQ ID NO: 488833 - RNA, 22 nt, Human
uuucugaauaacucuaugauau

SEQ ID NO: 488834 - RNA, 22 nt, Human
cucagaguggggcucccugagg

SEQ ID NO: 488835 - RNA, 22 nt, Human
uccugcaggccagaggggugag

SEQ ID NO: 488836 - RNA, 22 nt, Human
cccagcagugacccagugauac

SEQ ID NO: 488837 - RNA, 22 nt, Human
ugaggcagugcugggaagccug

SEQ ID NO: 488838 - RNA, 22 nt, Human
gguggcagcgucuaucugacau

SEQ ID NO: 488839 - RNA, 21 nt, Human
acaugucucuaaucucaguga

SEQ ID NO: 488840 - RNA, 22 nt, Human
gcugggagccguaccugucacg

SEQ ID NO: 488841 - RNA, 22 nt, Human
agugguaacuaaguccugcuua

SEQ ID NO: 488842 - RNA, 22 nt, Human
acugccaaugguaguuugaugg

SEQ ID NO: 488843 - RNA, 22 nt, Human
ugccaggcucagccccuaucuu

SEQ ID NO: 488844 - RNA, 22 nt, Human
ggcagccuccagggcacuggug

SEQ ID NO: 488845 - RNA, 22 nt, Human
aggcacugugcagucccaagca

SEQ ID NO: 488846 - RNA, 23 nt, Human
ucagugauguugaaccuagcagu

SEQ ID NO: 488847 - RNA, 22 nt, Human
auaaacugaagggaacacugag

SEQ ID NO: 488848 - RNA, 22 nt, Human
uccuugaaaaucuugguuuaga

SEQ ID NO: 488849 - RNA, 22 nt, Human
ugagggaguuggguguauagga

SEQ ID NO: 488850 - RNA, 19 nt, Human
agacagagcucaguggguu

SEQ ID NO: 488851 - RNA, 22 nt, Human
uggcucugaccagguagaggag

SEQ ID NO: 488852 - RNA, 22 nt, Human
acaguggaaagaacauggauuu

SEQ ID NO: 488853 - RNA, 22 nt, Human
aggcuauuuccacucuucucau

SEQ ID NO: 488854 - RNA, 22 nt, Human
acagaaugcguagugcauguug

SEQ ID NO: 488855 - RNA, 22 nt, Human
ucugguaaccuuuaucccuccu

SEQ ID NO: 488856 - RNA, 22 nt, Human
uugggggaagaggauagacagu

SEQ ID NO: 488857 - RNA, 22 nt, Human
gccagggaacccaagggccuca

SEQ ID NO: 488858 - RNA, 23 nt, Human
ucuuuacauacugaugaguucuc

SEQ ID NO: 488859 - RNA, 22 nt, Human
gugcaggggaucagguugcagc

SEQ ID NO: 488860 - RNA, 22 nt, Human
auuucuuuucaagagggugcuu

SEQ ID NO: 488861 - RNA, 22 nt, Human
auuucagcccaguaugagcccc

SEQ ID NO: 488862 - RNA, 22 nt, Human
aucuggaagccagauacucagu

SEQ ID NO: 488863 - RNA, 22 nt, Human
ucuugccucuuccccuuuccau

SEQ ID NO: 488864 - RNA, 22 nt, Human
ugcuuuggccacuagaauucag

SEQ ID NO: 488865 - RNA, 22 nt, Human
ugcagccuugccuccucccagc

SEQ ID NO: 488866 - RNA, 22 nt, Human
agccaggggauucaucagggac

SEQ ID NO: 488867 - RNA, 18 nt, Human
gaggauggaaggagaugc

SEQ ID NO: 488868 - RNA, 22 nt, Human
acagggcccuugccagcacaag

SEQ ID NO: 488869 - RNA, 22 nt, Human
agagccuggucugagauaggac

SEQ ID NO: 488870 - RNA, 22 nt, Human
aaacuguaaagcaggugaguag

SEQ ID NO: 488871 - RNA, 19 nt, Human
caggaugaucccaugacac

SEQ ID NO: 488872 - RNA, 22 nt, Human
gagcaggcucugccuguguguc

SEQ ID NO: 488873 - RNA, 22 nt, Human
aaaugcacagagccuuagagau

SEQ ID NO: 488874 - RNA, 23 nt, Human
gccugccugaccugugcaaaguc

SEQ ID NO: 488875 - RNA, 22 nt, Human
aggugcagcugacaccaugugg

SEQ ID NO: 488876 - RNA, 22 nt, Human
gccagacacuccccugggcagg

SEQ ID NO: 488877 - RNA, 22 nt, Human
acagggucauuuuaugaucugu

SEQ ID NO: 488878 - RNA, 22 nt, Human
gcagccccaggagacgcccagg

SEQ ID NO: 488879 - RNA, 22 nt, Human
uuucuccaauguaucagcacac

SEQ ID NO: 488880 - RNA, 23 nt, Human
cagcugaagcagccugggcugga

SEQ ID NO: 488881 - RNA, 22 nt, Human
cuaaaauuaucaagauaauucc

SEQ ID NO: 488882 - RNA, 22 nt, Human
uuuagaguugaguauucauugg

SEQ ID NO: 488883 - RNA, 22 nt, Human
ggagaggcgaugagucacagcc

SEQ ID NO: 488884 - RNA, 22 nt, Human
aaaggccaagcaugagguggac

SEQ ID NO: 488885 - RNA, 22 nt, Human
cuccucugucuaccacgagggu

SEQ ID NO: 488886 - RNA, 19 nt, Human
uccaggcauccuucaggcu

SEQ ID NO: 488887 - RNA, 22 nt, Human
cagcaggaaguacuagcuuuga

SEQ ID NO: 488888 - RNA, 22 nt, Human
augaagucuagcaagcauugaa

SEQ ID NO: 488889 - RNA, 22 nt, Human
agcagggcuuugcagacuuggg

SEQ ID NO: 488890 - RNA, 22 nt, Human
ucagacaguuugcagugugccu

SEQ ID NO: 488891 - RNA, 22 nt, Human
cuagggacagaaagaggguaga

SEQ ID NO: 488892 - RNA, 22 nt, Human
ucaggcagaaaaaucacuaauu

SEQ ID NO: 488893 - RNA, 22 nt, Human
cauuuguuuagaagucuuuaua

SEQ ID NO: 488894 - RNA, 23 nt, Human
ugagcccaggaggucaaggcugc

SEQ ID NO: 488895 - RNA, 22 nt, Human
aagauuuacuagcauaauagcu

SEQ ID NO: 488896 - RNA, 22 nt, Human
uugaaaggugacauuguuagag

SEQ ID NO: 488897 - RNA, 22 nt, Human
ggcuggaaaagacaaagcuauu

SEQ ID NO: 488898 - RNA, 22 nt, Human
aguuacuugagacguuuaugaa

SEQ ID NO: 488899 - RNA, 23 nt, Human
uugauacagaagaaucaguuugu

SEQ ID NO: 488900 - RNA, 22 nt, Human
guuuuauaugucucugcugaca

SEQ ID NO: 488901 - RNA, 22 nt, Human
cugagcugguggaagcaugcag

SEQ ID NO: 488902 - RNA, 22 nt, Human
gaaaucugucuuuguuugaaua

SEQ ID NO: 488903 - RNA, 22 nt, Human
guggcucucgccagccugcggg

SEQ ID NO: 488904 - RNA, 22 nt, Human
caugccaguuuugagaugcacc

SEQ ID NO: 488905 - RNA, 22 nt, Human
agucccagcccaguccuguaag

SEQ ID NO: 488906 - RNA, 22 nt, Human
aggcugaggugugcugugaucg

SEQ ID NO: 488907 - RNA, 22 nt, Human
agccugagugcuuaggacuguu

SEQ ID NO: 488908 - RNA, 22 nt, Human
ggcuccugggaugggacugagc

SEQ ID NO: 488909 - RNA, 22 nt, Human
agcccugggaggccagcuugua

SEQ ID NO: 488910 - RNA, 22 nt, Human
agaguccagaaaacagugugcu

SEQ ID NO: 488911 - RNA, 22 nt, Human
agaggccaugcuagaggccugg

SEQ ID NO: 488912 - RNA, 22 nt, Human
uggagacugugcuaagggaguu

SEQ ID NO: 488913 - RNA, 22 nt, Human
agagccugcaucaggcuugggg

SEQ ID NO: 488914 - RNA, 22 nt, Human
gaugguuuaugauagaugggaa

SEQ ID NO: 488915 - RNA, 22 nt, Human
guuugaaaaaagcaguauguaa

SEQ ID NO: 488916 - RNA, 22 nt, Human
ucaguaacuuacuuauucaccu

SEQ ID NO: 488917 - RNA, 22 nt, Human
gcugcccuaauaucacauguua

SEQ ID NO: 488918 - RNA, 22 nt, Human
ugcagggagcucuggggugcag

SEQ ID NO: 488919 - RNA, 22 nt, Human
ggcuucuguccucuggaucugu

SEQ ID NO: 488920 - RNA, 22 nt, Human
cccugcagagggaugggggcag

SEQ ID NO: 488921 - RNA, 22 nt, Human
gguucaguuuacauuaaaaucu

SEQ ID NO: 488922 - RNA, 22 nt, Human
uggcugagguuaugcugguugu

SEQ ID NO: 488923 - RNA, 22 nt, Human
acaauguaggauauguacuugu

SEQ ID NO: 488924 - RNA, 22 nt, Human
ccugcagggaaucgaggcagaa

SEQ ID NO: 488925 - RNA, 23 nt, Human
uggcagcuguguaagagaaagca

SEQ ID NO: 488926 - RNA, 22 nt, Human
aagacagagggaagcaaugaug

SEQ ID NO: 488927 - RNA, 18 nt, Human
agcagaauucuaggguuc

SEQ ID NO: 488928 - RNA, 22 nt, Human
ucagagugcagcgggaggcugg

SEQ ID NO: 488929 - RNA, 22 nt, Human
ccucccucuuucagucccacag

SEQ ID NO: 488930 - RNA, 22 nt, Human
gccuuccuuacaccugcucagc

SEQ ID NO: 488931 - RNA, 22 nt, Human
ccuggcagaauauuaaagugca

SEQ ID NO: 488932 - RNA, 22 nt, Human
agcagggcuggauuuggcaaga

SEQ ID NO: 488933 - RNA, 19 nt, Human
gcuggggccugaccagaca

SEQ ID NO: 488934 - RNA, 22 nt, Human
gaggaagaagcaaaccagcuaa

SEQ ID NO: 488935 - RNA, 22 nt, Human
caggacagguguucuagaucag

SEQ ID NO: 488936 - RNA, 22 nt, Human
ccugccuggagcugagugugga

SEQ ID NO: 488937 - RNA, 22 nt, Human
ugcagugugaccuguagcgagc

SEQ ID NO: 488938 - RNA, 22 nt, Human
cagcuggcauaccugggcccgg

SEQ ID NO: 488939 - RNA, 22 nt, Human
agugggggccaacgagggcagc

SEQ ID NO: 488940 - RNA, 22 nt, Human
uccaggcaagggaggagcaugg

SEQ ID NO: 488941 - RNA, 22 nt, Human
agccaaagaucagugugcaagu

SEQ ID NO: 488942 - RNA, 22 nt, Human
auacuguaucacuugugaguga

SEQ ID NO: 488943 - RNA, 22 nt, Human
gcuuggccagcagccgggaugc

SEQ ID NO: 488944 - RNA, 22 nt, Human
ucuucaaauccuacagugucug

SEQ ID NO: 488945 - RNA, 20 nt, Human
gcuguugccaguacagaugg

SEQ ID NO: 488946 - RNA, 20 nt, Human
gaaauucucguauuaguuua

SEQ ID NO: 488947 - RNA, 23 nt, Human
gccagccuugcucuccugcagcc

SEQ ID NO: 488948 - RNA, 22 nt, Human
cucugcaggggaggcaugcacu

SEQ ID NO: 488949 - RNA, 22 nt, Human
agggcugcaggcaagauauggc

SEQ ID NO: 488950 - RNA, 22 nt, Human
aggagccuccuucucaugugca

SEQ ID NO: 488951 - RNA, 22 nt, Human
ucugaggcauaaccuguucugc

SEQ ID NO: 488952 - RNA, 22 nt, Human
ucagggcaggacaguguaggcc

SEQ ID NO: 488953 - RNA, 22 nt, Human
uuuccuuccagguuccuaaggc

SEQ ID NO: 488954 - RNA, 22 nt, Human
ugucccaguuuaucugggacug

SEQ ID NO: 488955 - RNA, 22 nt, Human
ucuguggcacgauugcacugca

SEQ ID NO: 488956 - RNA, 22 nt, Human
caagggcucuuuugaggaaugu

SEQ ID NO: 488957 - RNA, 22 nt, Human
ccaaggcuccucagcuggucuu

SEQ ID NO: 488958 - RNA, 22 nt, Human
uuuugaaagggugauuuggcuu

SEQ ID NO: 488959 - RNA, 22 nt, Human
aaagccuugcccgucacuggga

SEQ ID NO: 488960 - RNA, 22 nt, Human
ucagauggguuuugaaggaugu

SEQ ID NO: 488961 - RNA, 22 nt, Human
gugcaugucggggugcauguca

SEQ ID NO: 488962 - RNA, 22 nt, Human
uggguggcggccugguucugag

SEQ ID NO: 488963 - RNA, 21 nt, Human
ggcagcacuaccugaagcaua

SEQ ID NO: 488964 - RNA, 21 nt, Human
ccagcuccaggaccuuggauc

SEQ ID NO: 488965 - RNA, 22 nt, Human
caguguggugagauuccaggug

SEQ ID NO: 488966 - RNA, 22 nt, Human
ucuuuuauuaggcugaaauggg

SEQ ID NO: 488967 - RNA, 22 nt, Human
cacaggggcaaacuguagggga

SEQ ID NO: 488968 - RNA, 22 nt, Human
cagucacuggaauagcugagga

SEQ ID NO: 488969 - RNA, 22 nt, Human
gugccagcaguuauggugauuu

SEQ ID NO: 488970 - RNA, 22 nt, Human
aaaggaagaugccaggacucug

SEQ ID NO: 488971 - RNA, 22 nt, Human
uaugcauaugaccccaagcuug

SEQ ID NO: 488972 - RNA, 22 nt, Human
uuuccucuccaccaggaggucu

SEQ ID NO: 488973 - RNA, 22 nt, Human
cagcugcccaggccaccuggag

SEQ ID NO: 488974 - RNA, 22 nt, Human
uacauaauaaggggcauggugu

SEQ ID NO: 488975 - RNA, 22 nt, Human
aucaaguuuucuuaguugacug

SEQ ID NO: 488976 - RNA, 22 nt, Human
caugcagugacucagacacagg

SEQ ID NO: 488977 - RNA, 22 nt, Human
ugggcagagucauacaggagac

SEQ ID NO: 488978 - RNA, 22 nt, Human
cuggcaggucucgcugacgugu

SEQ ID NO: 488979 - RNA, 22 nt, Human
aguuuguaucaauuugcuuuau

SEQ ID NO: 488980 - RNA, 22 nt, Human
cagcaggcucugaguggcugcc

SEQ ID NO: 488981 - RNA, 19 nt, Human
agggcuaggcacauagggc

SEQ ID NO: 488982 - RNA, 22 nt, Human
agguggaacguucaggugcuag

SEQ ID NO: 488983 - RNA, 22 nt, Human
aagcugccugggaggaagggcu

SEQ ID NO: 488984 - RNA, 22 nt, Human
cuggagccacuuuuuauccuuu

SEQ ID NO: 488985 - RNA, 22 nt, Human
aagggagguaaagcuauuuaaa

SEQ ID NO: 488986 - RNA, 22 nt, Human
uucuggagagaaaccuuacaaa

SEQ ID NO: 488987 - RNA, 22 nt, Human
ugacagaaagaauaugucaauc

SEQ ID NO: 488988 - RNA, 22 nt, Human
augcagcaguuuacaaagcaau

SEQ ID NO: 488989 - RNA, 22 nt, Human
guuauguacuuuuuaaaucuug

SEQ ID NO: 488990 - RNA, 22 nt, Human
ggucucagcuggaguccuuggu

SEQ ID NO: 488991 - RNA, 22 nt, Human
gaaugcuaagcaugugggaguu

SEQ ID NO: 488992 - RNA, 22 nt, Human
aucugacaaccuauugacuuga

SEQ ID NO: 488993 - RNA, 22 nt, Human
ucagaaugaaauuucuuucaga

SEQ ID NO: 488994 - RNA, 22 nt, Human
acagccagggcauugucgccga

SEQ ID NO: 488995 - RNA, 22 nt, Human
ugggacaguuguccuccacucu

SEQ ID NO: 488996 - RNA, 22 nt, Human
agcagcugaccagugaguccug

SEQ ID NO: 488997 - RNA, 22 nt, Human
cuguggcuuucucugccuccuu

SEQ ID NO: 488998 - RNA, 22 nt, Human
agcagagcccuuccauggccuu

SEQ ID NO: 488999 - RNA, 22 nt, Human
uugauuaaacaggcauauucaa

SEQ ID NO: 489000 - RNA, 20 nt, Human
agcagcuguguuuucauccu

SEQ ID NO: 489001 - RNA, 22 nt, Human
uccaggcaucuguauuuuuuaa

SEQ ID NO: 489002 - RNA, 22 nt, Human
uagggcaggugaagaaaagcua

SEQ ID NO: 489003 - RNA, 22 nt, Human
uaagaacauuuucggaaagaua

SEQ ID NO: 489004 - RNA, 22 nt, Human
cugggaguguucuaggucacau

SEQ ID NO: 489005 - RNA, 22 nt, Human
cugcugugcagacagacucucu

SEQ ID NO: 489006 - RNA, 21 nt, Human
cagcuuugucugucuucgggg

SEQ ID NO: 489007 - RNA, 23 nt, Human
ugggccuggaaagccuuagagag

SEQ ID NO: 489008 - RNA, 20 nt, Human
uccugcaguuccuaggaggg

SEQ ID NO: 489009 - RNA, 22 nt, Human
caggguggcacaucacagcauu

SEQ ID NO: 489010 - RNA, 22 nt, Human
aacaugauuuaguauaaugcag

SEQ ID NO: 489011 - RNA, 22 nt, Human
ugcauauuauguguaucugucu

SEQ ID NO: 489012 - RNA, 23 nt, Human
ugggcaucuccucugugccaggc

SEQ ID NO: 489013 - RNA, 22 nt, Human
cucuuucaguucugauagucuc

SEQ ID NO: 489014 - RNA, 22 nt, Human
agaaaucagaacccugaaguuc

SEQ ID NO: 489015 - RNA, 22 nt, Human
aaucuggcucagaagaagauga

SEQ ID NO: 489016 - RNA, 22 nt, Human
ggagcagacauaaccuuacaga

SEQ ID NO: 489017 - RNA, 22 nt, Human
cagagccaggucuaggagucuc

SEQ ID NO: 489018 - RNA, 22 nt, Human
ggagaugcuauguaguuugguu

SEQ ID NO: 489019 - RNA, 22 nt, Human
ggagcugggaauuggaucaucu

SEQ ID NO: 489020 - RNA, 22 nt, Human
acugucuguccugcucuccgug

SEQ ID NO: 489021 - RNA, 22 nt, Human
ugggcagcagcaaagccagacu

SEQ ID NO: 489022 - RNA, 21 nt, Human
cagaggggcuagccuggcugc

SEQ ID NO: 489023 - RNA, 22 nt, Human
uggcucagcagguuagaaacua

SEQ ID NO: 489024 - RNA, 22 nt, Human
acaguggaaagaaacgaauuag

SEQ ID NO: 489025 - RNA, 22 nt, Human
ugcccugugugugcaagcacug

SEQ ID NO: 489026 - RNA, 22 nt, Human
uaggccaguggcagguugugug

SEQ ID NO: 489027 - RNA, 22 nt, Human
ugugaaggcagcagcucugucc

SEQ ID NO: 489028 - RNA, 22 nt, Human
ggggcacacuuuugguagauau

SEQ ID NO: 489029 - RNA, 22 nt, Human
acagggccucagcugauucugg

SEQ ID NO: 489030 - RNA, 22 nt, Human
acccagcucuuugauggucuug

SEQ ID NO: 489031 - RNA, 22 nt, Human
ggcagugaaucugagagccugg

SEQ ID NO: 489032 - RNA, 22 nt, Human
agcucccagaagccagagucgg

SEQ ID NO: 489033 - RNA, 22 nt, Human
agcugcagugaacuguuuuguc

SEQ ID NO: 489034 - RNA, 22 nt, Human
gcuggccauagaagccaaagag

SEQ ID NO: 489035 - RNA, 20 nt, Human
uugcagcagugaggugaagg

SEQ ID NO: 489036 - RNA, 22 nt, Human
uaucuuuaacuugcaguauuua

SEQ ID NO: 489037 - RNA, 22 nt, Human
gugaauggggcaggaaggaugg

SEQ ID NO: 489038 - RNA, 22 nt, Human
cauuaagauuuuuuucuacugg

SEQ ID NO: 489039 - RNA, 22 nt, Human
aaaucuguaagcaauugcucag

SEQ ID NO: 489040 - RNA, 22 nt, Human
cagggcucuuccggagcaggga

SEQ ID NO: 489041 - RNA, 22 nt, Human
cugggagcccugacuagccugg

SEQ ID NO: 489042 - RNA, 22 nt, Human
ugggaccugcucuuggaaugag

SEQ ID NO: 489043 - RNA, 22 nt, Human
uggagaagucaaagugaacagg

SEQ ID NO: 489044 - RNA, 22 nt, Human
gauuuccuagacauggggcaga

SEQ ID NO: 489045 - RNA, 22 nt, Human
caaaugcaaaauauaacccugu

SEQ ID NO: 489046 - RNA, 22 nt, Human
caccaucagcagcaggugucaa

SEQ ID NO: 489047 - RNA, 22 nt, Human
aagggcuccauccuuauaaaug

SEQ ID NO: 489048 - RNA, 22 nt, Human
guuagaaacacauucuuauuga

SEQ ID NO: 489049 - RNA, 22 nt, Human
cuggggcucucuggaaugcuug

SEQ ID NO: 489050 - RNA, 22 nt, Human
aagugagauuauauguacggga

SEQ ID NO: 489051 - RNA, 19 nt, Human
cuggaaugauagagaccuc

SEQ ID NO: 489052 - RNA, 22 nt, Human
caggagcaguuagaagcccacu

SEQ ID NO: 489053 - RNA, 22 nt, Human
ccacccagccagaugcaggaag

SEQ ID NO: 489054 - RNA, 22 nt, Human
cucugggcaaguaugauagaaa

SEQ ID NO: 489055 - RNA, 22 nt, Human
cacuguacagcauuaacaaggc

SEQ ID NO: 489056 - RNA, 22 nt, Human
ucaguggagagcuuccaggauu

SEQ ID NO: 489057 - RNA, 22 nt, Human
cuuacauugucuuaguuuucaa

SEQ ID NO: 489058 - RNA, 22 nt, Human
caaaguauauuggauugaaugg

SEQ ID NO: 489059 - RNA, 21 nt, Human
uccaaaucccauucuguaguc

SEQ ID NO: 489060 - RNA, 19 nt, Human
agacucugugugagacuuu

SEQ ID NO: 489061 - RNA, 22 nt, Human
aagggagacaguugugugagga

SEQ ID NO: 489062 - RNA, 22 nt, Human
uaagaagcuucugcuaaugccu

SEQ ID NO: 489063 - RNA, 22 nt, Human
aaguucuacuguggguaaaaug

SEQ ID NO: 489064 - RNA, 22 nt, Human
cagaggcuguguaggcagacug

SEQ ID NO: 489065 - RNA, 22 nt, Human
ugacagaaauaguucuuaauuu

SEQ ID NO: 489066 - RNA, 22 nt, Human
caagaauuguacaaacugggug

SEQ ID NO: 489067 - RNA, 22 nt, Human
uguguauucagcaagcgaaaca

SEQ ID NO: 489068 - RNA, 22 nt, Human
acagugucugacacauuguagc

SEQ ID NO: 489069 - RNA, 22 nt, Human
guuuauuaacugucaagugauu

SEQ ID NO: 489070 - RNA, 22 nt, Human
agagacuggagaugggcagugu

SEQ ID NO: 489071 - RNA, 21 nt, Human
ugcuggccucaagggugacuu

SEQ ID NO: 489072 - RNA, 23 nt, Human
ccagcuccgugagccucgggcuc

SEQ ID NO: 489073 - RNA, 22 nt, Human
gcagauggacuguaugaccuga

SEQ ID NO: 489074 - RNA, 22 nt, Human
ucauguaaguauagaaagcagu

SEQ ID NO: 489075 - RNA, 21 nt, Human
gcagcuggucucagagcuugc

SEQ ID NO: 489076 - RNA, 22 nt, Human
ugaccaaagaguugcuuguauu

SEQ ID NO: 489077 - RNA, 22 nt, Human
cccucuacagggaagcgcuuuc

SEQ ID NO: 489078 - RNA, 18 nt, Human
uccauuguucuacuguga

SEQ ID NO: 489079 - RNA, 22 nt, Human
ugacacagaaauuaagcuguca

SEQ ID NO: 489080 - RNA, 22 nt, Human
acuguacuuuucuuggcuagau

SEQ ID NO: 489081 - RNA, 22 nt, Human
aggcagcagccacaaggccuga

SEQ ID NO: 489082 - RNA, 22 nt, Human
ccagggagccuggugugucagc

SEQ ID NO: 489083 - RNA, 19 nt, Human
guggccugcgcugggugcg

SEQ ID NO: 489084 - RNA, 22 nt, Human
augucuuuuaugauuacgggau

SEQ ID NO: 489085 - RNA, 22 nt, Human
gccaggcauuuauugauugaau

SEQ ID NO: 489086 - RNA, 18 nt, Human
gugacugccccaaaaggc

SEQ ID NO: 489087 - RNA, 22 nt, Human
aauguuaaguuuagauuauaac

SEQ ID NO: 489088 - RNA, 23 nt, Human
agguggagcugugcagccggggc

SEQ ID NO: 489089 - RNA, 22 nt, Human
cucugguuucgcaggaaauaga

SEQ ID NO: 489090 - RNA, 22 nt, Human
ugucaaguuguuaaguucuggg

SEQ ID NO: 489091 - RNA, 22 nt, Human
gcggggggcagcagucgcucag

SEQ ID NO: 489092 - RNA, 22 nt, Human
ugauuuacaguagugucuaaac

SEQ ID NO: 489093 - RNA, 19 nt, Human
auacacguguauacauaca

SEQ ID NO: 489094 - RNA, 22 nt, Human
cuccagagagaaaggaggccgc

SEQ ID NO: 489095 - RNA, 22 nt, Human
acaguguuacuugauaguguau

SEQ ID NO: 489096 - RNA, 22 nt, Human
ucaauuuauguggcuauucauu

SEQ ID NO: 489097 - RNA, 22 nt, Human
cacaguuuuaucuuauacugau

SEQ ID NO: 489098 - RNA, 22 nt, Human
gucuugcacuuaccuaagaacu

SEQ ID NO: 489099 - RNA, 22 nt, Human
cuccagaggcgacuugcaucac

SEQ ID NO: 489100 - RNA, 22 nt, Human
acccggagucggagguugcagu

SEQ ID NO: 489101 - RNA, 22 nt, Human
ucugcuguuuacugugugauau

SEQ ID NO: 489102 - RNA, 22 nt, Human
caacuguaauauuggaagauca

SEQ ID NO: 489103 - RNA, 22 nt, Human
gaauguuaaugcacuucuagcu

SEQ ID NO: 489104 - RNA, 18 nt, Human
ggaaaaggagugucuagc

SEQ ID NO: 489105 - RNA, 22 nt, Human
guuuauuggguauuguggagcc

SEQ ID NO: 489106 - RNA, 22 nt, Human
acacacagaaggaagccccacu

SEQ ID NO: 489107 - RNA, 22 nt, Human
aaauugcaaaaguacuuuuagg

SEQ ID NO: 489108 - RNA, 22 nt, Human
uagagcucuccuuccucugugg

SEQ ID NO: 489109 - RNA, 22 nt, Human
ugcucuguucaguguaucuugu

SEQ ID NO: 489110 - RNA, 22 nt, Human
cagcuggcgacucuccucgaug

SEQ ID NO: 489111 - RNA, 22 nt, Human
uucuucauucccuuacuuccga

SEQ ID NO: 489112 - RNA, 22 nt, Human
cauugagcgacccugcaugacu

SEQ ID NO: 489113 - RNA, 22 nt, Human
aucaugcagcaacaagcaaggc

SEQ ID NO: 489114 - RNA, 22 nt, Human
ucucauaauuguuucccagcua

SEQ ID NO: 489115 - RNA, 22 nt, Human
aaaaugcucaucagcgauggcu

SEQ ID NO: 489116 - RNA, 20 nt, Human
acagagauccucucuuuauc

SEQ ID NO: 489117 - RNA, 22 nt, Human
aucagagcuaguacuugcaggu

SEQ ID NO: 489118 - RNA, 22 nt, Human
cucagagaagauggaugaggua

SEQ ID NO: 489119 - RNA, 22 nt, Human
gcucuggcuacuguggcuaccg

SEQ ID NO: 489120 - RNA, 22 nt, Human
uuccaaggcugcuauuuguuuc

SEQ ID NO: 489121 - RNA, 22 nt, Human
auagacgcggccgcugaugcag

SEQ ID NO: 489122 - RNA, 22 nt, Human
cacaguuuugucuugguuucca

SEQ ID NO: 489123 - RNA, 22 nt, Human
cugggugagcuggccagagggu

SEQ ID NO: 489124 - RNA, 22 nt, Human
cuauuuucccauaugguugaca

SEQ ID NO: 489125 - RNA, 22 nt, Human
cagcaugaauguguucguaggg

SEQ ID NO: 489126 - RNA, 22 nt, Human
ugugagacguaggccaucgagg

SEQ ID NO: 489127 - RNA, 22 nt, Human
gugcuaugauuggacagaauag

SEQ ID NO: 489128 - RNA, 21 nt, Human
aauuucagacccauuuugccu

SEQ ID NO: 489129 - RNA, 22 nt, Human
uugagauagguggaaucucuuu

SEQ ID NO: 489130 - RNA, 21 nt, Human
aaacugaccuugccugagaca

SEQ ID NO: 489131 - RNA, 22 nt, Human
agccagugucgugugacaugag

SEQ ID NO: 489132 - RNA, 22 nt, Human
agagaccuuccugacuccagag

SEQ ID NO: 489133 - RNA, 22 nt, Human
gccagccccagacauccuaucg

SEQ ID NO: 489134 - RNA, 22 nt, Human
gcugggugauucauuuccauaa

SEQ ID NO: 489135 - RNA, 22 nt, Human
aggcaguggcuuuuguuguguu

SEQ ID NO: 489136 - RNA, 22 nt, Human
ugggugugagcccgggagccgc

SEQ ID NO: 489137 - RNA, 22 nt, Human
acagagggucugggcacaggac

SEQ ID NO: 489138 - RNA, 18 nt, Human
uccaccgcgugcaccucu

SEQ ID NO: 489139 - RNA, 22 nt, Human
aaauugcuugagauuagucucc

SEQ ID NO: 489140 - RNA, 22 nt, Human
aaugucaacacaagagaaaugc

SEQ ID NO: 489141 - RNA, 22 nt, Human
auguacaaucuaucacaagaag

SEQ ID NO: 489142 - RNA, 22 nt, Human
caucugcaggggaagccaguuu

SEQ ID NO: 489143 - RNA, 22 nt, Human
ugguuaaaugcuccgaucuugg

SEQ ID NO: 489144 - RNA, 22 nt, Human
guucuuaaagauucaucaagca

SEQ ID NO: 489145 - RNA, 22 nt, Human
ucagaacauccugguuuaaaau

SEQ ID NO: 489146 - RNA, 22 nt, Human
acagauccugguuacagccauu

SEQ ID NO: 489147 - RNA, 22 nt, Human
uagcuguucucuguaaauugga

SEQ ID NO: 489148 - RNA, 22 nt, Human
ggaagcaaauuccagaaccaca

SEQ ID NO: 489149 - RNA, 22 nt, Human
agaguuuacagaaauaagcugu

SEQ ID NO: 489150 - RNA, 22 nt, Human
aaauuaacuaucacuuuuguga

SEQ ID NO: 489151 - RNA, 22 nt, Human
ggugggucuuguggggcagcuu

SEQ ID NO: 489152 - RNA, 22 nt, Human
cuacagaauucaacaaaugguu

SEQ ID NO: 489153 - RNA, 22 nt, Human
aaggcaguuaauuuggcuagaa

SEQ ID NO: 489154 - RNA, 22 nt, Human
ccuuuuaagggagacuagagau

SEQ ID NO: 489155 - RNA, 22 nt, Human
gaggugggaugugugugcuacu

SEQ ID NO: 489156 - RNA, 22 nt, Human
guccuggugcuggucauugucg

SEQ ID NO: 489157 - RNA, 22 nt, Human
uauggauauaaucagacuggaa

SEQ ID NO: 489158 - RNA, 22 nt, Human
aguguuaaggcugguugcuaua

SEQ ID NO: 489159 - RNA, 22 nt, Human
aacaguaugugagauuuacaca

SEQ ID NO: 489160 - RNA, 22 nt, Human
uguuuuaagggucaacugucac

SEQ ID NO: 489161 - RNA, 22 nt, Human
acagcugggaacucacacagca

SEQ ID NO: 489162 - RNA, 22 nt, Human
guuaaugcaaagcagagggcaa

SEQ ID NO: 489163 - RNA, 22 nt, Human
cuguguccaauggccuuagcag

SEQ ID NO: 489164 - RNA, 22 nt, Human
ggccaaggcucuugagggcuga

SEQ ID NO: 489165 - RNA, 22 nt, Human
accugccagaaugcuaguccug

SEQ ID NO: 489166 - RNA, 22 nt, Human
uccagugguggcucccggaccu

SEQ ID NO: 489167 - RNA, 22 nt, Human
acaccuuuuauucgccaggcac

SEQ ID NO: 489168 - RNA, 22 nt, Human
gggaaacuuucacaauguccag

SEQ ID NO: 489169 - RNA, 22 nt, Human
uucaaacacugcuuugagaggg

SEQ ID NO: 489170 - RNA, 22 nt, Human
aucuaaagugucauaaguagcu

SEQ ID NO: 489171 - RNA, 22 nt, Human
gccagugccugcugcucagggc

SEQ ID NO: 489172 - RNA, 22 nt, Human
aagucuucagacuggagagauu

SEQ ID NO: 489173 - RNA, 22 nt, Human
auccgcuuaucucagcuggcag

SEQ ID NO: 489174 - RNA, 22 nt, Human
uugacccgaguccuucuugggg

SEQ ID NO: 489175 - RNA, 22 nt, Human
aaggcauggcaggguuuacaca

SEQ ID NO: 489176 - RNA, 22 nt, Human
uguucuggugaggccauggggu

SEQ ID NO: 489177 - RNA, 20 nt, Human
gggugugugcagggccuggu

SEQ ID NO: 489178 - RNA, 22 nt, Human
cacugguugccucuuucuguuc

SEQ ID NO: 489179 - RNA, 22 nt, Human
ggagguggagcuggaaguucca

SEQ ID NO: 489180 - RNA, 22 nt, Human
cagagcagcagagcuuccaugg

SEQ ID NO: 489181 - RNA, 22 nt, Human
cucaaaauccauaaaaucaggu

SEQ ID NO: 489182 - RNA, 22 nt, Human
gcccagcaccucucucaggguu

SEQ ID NO: 489183 - RNA, 22 nt, Human
cuguccauggcaaugaugcaga

SEQ ID NO: 489184 - RNA, 22 nt, Human
uauucacaaaaugagguccuca

SEQ ID NO: 489185 - RNA, 22 nt, Human
cucagagagacaaugugggaca

SEQ ID NO: 489186 - RNA, 22 nt, Human
uugucgggcuuacgcagggcca

SEQ ID NO: 489187 - RNA, 22 nt, Human
uguaagcuucaaauaucuguga

SEQ ID NO: 489188 - RNA, 22 nt, Human
gugggugucaguaucuuuaacg

SEQ ID NO: 489189 - RNA, 22 nt, Human
uucuccacccacucuuuuguug

SEQ ID NO: 489190 - RNA, 22 nt, Human
guuuacaacaucuuguccuuca

SEQ ID NO: 489191 - RNA, 22 nt, Human
guacauauccuuuacguuuugu

SEQ ID NO: 489192 - RNA, 22 nt, Human
auguaguauuuggaaauguaaa

SEQ ID NO: 489193 - RNA, 22 nt, Human
uaugccuaccuccaaaauauau

SEQ ID NO: 489194 - RNA, 22 nt, Human
uucccuucuaguuuugagagac

SEQ ID NO: 489195 - RNA, 22 nt, Human
cacaccuuaggccugagcgcuu

SEQ ID NO: 489196 - RNA, 22 nt, Human
ucaaaggcuugugguucuggga

SEQ ID NO: 489197 - RNA, 22 nt, Human
gccagaggggcucgaaggcgcg

SEQ ID NO: 489198 - RNA, 22 nt, Human
ggcaguggcuccucucuacucc

SEQ ID NO: 489199 - RNA, 22 nt, Human
gggcauuucuugucaauguagg

SEQ ID NO: 489200 - RNA, 22 nt, Human
gcacaguauuuaguagaaugag

SEQ ID NO: 489201 - RNA, 22 nt, Human
cuaaagucauacaaggugggag

SEQ ID NO: 489202 - RNA, 17 nt, Human
auucaugaacauguccu

SEQ ID NO: 489203 - RNA, 22 nt, Human
ucugggagaguagauaaaggaa

SEQ ID NO: 489204 - RNA, 17 nt, Human
uaagggggaaacggagc

SEQ ID NO: 489205 - RNA, 22 nt, Human
gcguuggggaccccgaagcugg

SEQ ID NO: 489206 - RNA, 20 nt, Human
gcagcagacagacaggggac

SEQ ID NO: 489207 - RNA, 20 nt, Human
ugggaucgaaucaagucugu

SEQ ID NO: 489208 - RNA, 22 nt, Human
uuugacaacugugcaguuugua

SEQ ID NO: 489209 - RNA, 22 nt, Human
gaaguauuucugaguugcccag

SEQ ID NO: 489210 - RNA, 22 nt, Human
cuucuaauucuuauguaagcuu

SEQ ID NO: 489211 - RNA, 18 nt, Human
augggcagguaagaucca

SEQ ID NO: 489212 - RNA, 20 nt, Human
ccagguggugccuggagagg

SEQ ID NO: 489213 - RNA, 22 nt, Human
uaaggagagaauuuagagguuu

SEQ ID NO: 489214 - RNA, 20 nt, Human
ggccugagcauggcuggcag

SEQ ID NO: 489215 - RNA, 22 nt, Human
gggcuguaggagcuggaauggg

SEQ ID NO: 489216 - RNA, 22 nt, Human
aggcaguugaguggcuuuuuca

SEQ ID NO: 489217 - RNA, 22 nt, Human
acuggcuuugagggaauagcua

SEQ ID NO: 489218 - RNA, 22 nt, Human
acuuuuaaggggccuugauuua

SEQ ID NO: 489219 - RNA, 18 nt, Human
uauaaacacacuuagguu

SEQ ID NO: 489220 - RNA, 22 nt, Human
aaggggaguuagugauaaaacc

SEQ ID NO: 489221 - RNA, 22 nt, Human
ggccagccuggggcucccagac

SEQ ID NO: 489222 - RNA, 22 nt, Human
uacauguuauuucacuauuggu

SEQ ID NO: 489223 - RNA, 22 nt, Human
ucguuaaucagcaccagaauuc

SEQ ID NO: 489224 - RNA, 22 nt, Human
cacauuuaugggcugggaggca

SEQ ID NO: 489225 - RNA, 22 nt, Human
uaauuuugucacagugacaugc

SEQ ID NO: 489226 - RNA, 22 nt, Human
cuggagggcugcagcgaggcug

SEQ ID NO: 489227 - RNA, 22 nt, Human
uguaaagaaagacgcagaguua

SEQ ID NO: 489228 - RNA, 22 nt, Human
gggacaauggaggccucucucc

SEQ ID NO: 489229 - RNA, 22 nt, Human
gacauuuauuggauuuuacgag

SEQ ID NO: 489230 - RNA, 22 nt, Human
gccaggaccucagaugcagggc

SEQ ID NO: 489231 - RNA, 22 nt, Human
gaggggcucuugggcaugaagg

SEQ ID NO: 489232 - RNA, 20 nt, Human
cuguuugcuaucaugagcug

SEQ ID NO: 489233 - RNA, 21 nt, Human
uaaacauaaccuuguauggcu

SEQ ID NO: 489234 - RNA, 22 nt, Human
cugugaauguuauaucucaaug

SEQ ID NO: 489235 - RNA, 22 nt, Human
cacccucaagcaguggcacgug

SEQ ID NO: 489236 - RNA, 22 nt, Human
agccaggucaggaaagguccca

SEQ ID NO: 489237 - RNA, 20 nt, Human
gaacagucuucugagccaca

SEQ ID NO: 489238 - RNA, 22 nt, Human
ugaguggacgugaggcugagua

SEQ ID NO: 489239 - RNA, 22 nt, Human
ucuauuaaugauucaauagugu

SEQ ID NO: 489240 - RNA, 22 nt, Human
uuugcuugauuaggauauggaa

SEQ ID NO: 489241 - RNA, 22 nt, Human
uucucugguuugcuguuucuga

SEQ ID NO: 489242 - RNA, 19 nt, Human
uccuggggaggggcauggc

SEQ ID NO: 489243 - RNA, 20 nt, Human
uccugggguaagccaugguc

SEQ ID NO: 489244 - RNA, 22 nt, Human
uaucuguagucucaugguuccu

SEQ ID NO: 489245 - RNA, 22 nt, Human
uuguccagcgaccaggcucugu

SEQ ID NO: 489246 - RNA, 22 nt, Human
agccagugcagcuggaaauuca

SEQ ID NO: 489247 - RNA, 22 nt, Human
uguacacauuaagcucuuuaga

SEQ ID NO: 489248 - RNA, 22 nt, Human
uaaaacuagugguugggacuaa

SEQ ID NO: 489249 - RNA, 22 nt, Human
gaggggcugggguugacuccaa

SEQ ID NO: 489250 - RNA, 22 nt, Human
ugucauuggugaucugaugccu

SEQ ID NO: 489251 - RNA, 19 nt, Human
ucaaagucugagucacuuu

SEQ ID NO: 489252 - RNA, 20 nt, Human
acuagaaagucacugggggg

SEQ ID NO: 489253 - RNA, 22 nt, Human
cgcugggcgcgcuccgaacccg

SEQ ID NO: 489254 - RNA, 20 nt, Human
aaaaacaguaaugcugaaga

SEQ ID NO: 489255 - RNA, 19 nt, Human
cugggacaaugaaagcauc

SEQ ID NO: 489256 - RNA, 22 nt, Human
guccagaguagucgaguauucu

SEQ ID NO: 489257 - RNA, 20 nt, Human
gggugugggcccggccaggc

SEQ ID NO: 489258 - RNA, 22 nt, Human
cgucauuuguaaaugaucaaga

SEQ ID NO: 489259 - RNA, 22 nt, Human
uuacuguagcuugacauauguc

SEQ ID NO: 489260 - RNA, 22 nt, Human
aacccgggagguggagguuaug

SEQ ID NO: 489261 - RNA, 22 nt, Human
gaguggggcccacugcugggug

SEQ ID NO: 489262 - RNA, 23 nt, Human
aguacauuugacccaaauaagcu

SEQ ID NO: 489263 - RNA, 20 nt, Human
ugggguccuggaggggaucc

SEQ ID NO: 489264 - RNA, 22 nt, Human
auguaacauaugugaucgcauu

SEQ ID NO: 489265 - RNA, 22 nt, Human
gggcggggcuuccguccuccac

SEQ ID NO: 489266 - RNA, 17 nt, Human
gcccgugggcuacggua

SEQ ID NO: 489267 - RNA, 22 nt, Human
uuucccaggcuggaaugcagug

SEQ ID NO: 489268 - RNA, 22 nt, Human
ucuguucagaagaggugaaagu

SEQ ID NO: 489269 - RNA, 22 nt, Human
auuguuacuggguuaauuugga

SEQ ID NO: 489270 - RNA, 22 nt, Human
uugagcagaucgggcugugggg

SEQ ID NO: 489271 - RNA, 22 nt, Human
uggugcugccaccuccucugcu

SEQ ID NO: 489272 - RNA, 22 nt, Human
ucugcuggaaaaccagggaauu

SEQ ID NO: 489273 - RNA, 22 nt, Human
acagagacaauauuuguaaagu

SEQ ID NO: 489274 - RNA, 22 nt, Human
augaacaguacaaagcacagac

SEQ ID NO: 489275 - RNA, 22 nt, Human
uauucacagcugccgcacucag

SEQ ID NO: 489276 - RNA, 22 nt, Human
ggacugucuccuugcugguagg

SEQ ID NO: 489277 - RNA, 22 nt, Human
gauuugucuauauucaaauaug

SEQ ID NO: 489278 - RNA, 22 nt, Human
ccuguauggcuauuccuuggac

SEQ ID NO: 489279 - RNA, 22 nt, Human
cuggugcuguagccugauugag

SEQ ID NO: 489280 - RNA, 19 nt, Human
agcagagcagggccguggg

SEQ ID NO: 489281 - RNA, 18 nt, Human
gggcuuuacagaguggag

SEQ ID NO: 489282 - RNA, 22 nt, Human
uccaggaggacugagggggcug

SEQ ID NO: 489283 - RNA, 22 nt, Human
uuugcagagugcagaagcaucu

SEQ ID NO: 489284 - RNA, 22 nt, Human
auguacauuauucgagugaugg

SEQ ID NO: 489285 - RNA, 22 nt, Human
gaggagcuucagaggaaucuua

SEQ ID NO: 489286 - RNA, 22 nt, Human
ccaaaauauuagugcuuaagua

SEQ ID NO: 489287 - RNA, 22 nt, Human
uguccugugaccuggcaccaca

SEQ ID NO: 489288 - RNA, 22 nt, Human
uguggaauguccucagcauccu

SEQ ID NO: 489289 - RNA, 22 nt, Human
cuugugaaaugccagauaaucu

SEQ ID NO: 489290 - RNA, 20 nt, Human
cugcuccacccggcucucag

SEQ ID NO: 489291 - RNA, 22 nt, Human
gugugcgccgacacagccaggu

SEQ ID NO: 489292 - RNA, 22 nt, Human
gcugucaggaacaugccuuggu

SEQ ID NO: 489293 - RNA, 22 nt, Human
auuguauacaagcuuaauuguu

SEQ ID NO: 489294 - RNA, 22 nt, Human
ucccugggguaucgcugaggca

SEQ ID NO: 489295 - RNA, 22 nt, Human
uuguaacaguagcugucagcuc

SEQ ID NO: 489296 - RNA, 20 nt, Human
aaagauacuuuuuguaaugg

SEQ ID NO: 489297 - RNA, 22 nt, Human
ggcaguggugggaggcucgcuc

SEQ ID NO: 489298 - RNA, 22 nt, Human
agcuuucuauauaugaguugcu

SEQ ID NO: 489299 - RNA, 22 nt, Human
aauuauguuugcuuuagaugga

SEQ ID NO: 489300 - RNA, 22 nt, Human
auggugguagaagcacuaugug

SEQ ID NO: 489301 - RNA, 22 nt, Human
aauaguguauuuuucaaaauua

SEQ ID NO: 489302 - RNA, 22 nt, Human
guaaacugaauuggauacugug

SEQ ID NO: 489303 - RNA, 22 nt, Human
aauucauacucuauauugcuuu

SEQ ID NO: 489304 - RNA, 22 nt, Human
cauggcaggugcagauucugug

SEQ ID NO: 489305 - RNA, 22 nt, Human
gaucucaaagcaguguggguug

SEQ ID NO: 489306 - RNA, 22 nt, Human
ugcugugagaccauuuguugag

SEQ ID NO: 489307 - RNA, 22 nt, Human
gaaauguuggacacuugaaauu

SEQ ID NO: 489308 - RNA, 22 nt, Human
ucuuuuaucuguuguguaacaa

SEQ ID NO: 489309 - RNA, 22 nt, Human
uuauuuuguagcucugaucuuu

SEQ ID NO: 489310 - RNA, 22 nt, Human
cuguaaccuccucuuuccauuc

SEQ ID NO: 489311 - RNA, 22 nt, Human
aaaacauuuuacugccaucuca

SEQ ID NO: 489312 - RNA, 22 nt, Human
caguggguccugcgucugccag

SEQ ID NO: 489313 - RNA, 22 nt, Human
ugguaugcuuauuaucuucaac

SEQ ID NO: 489314 - RNA, 22 nt, Human
acaguguuucacuuaaccguuu

SEQ ID NO: 489315 - RNA, 22 nt, Human
auuccucagcaggccuuuuguu

SEQ ID NO: 489316 - RNA, 22 nt, Human
acaugacagugacuuuauaaga

SEQ ID NO: 489317 - RNA, 17 nt, Human
aacaguuaaugggggaa

SEQ ID NO: 489318 - RNA, 22 nt, Human
gccccacuguggaaccuaaguc

SEQ ID NO: 489319 - RNA, 19 nt, Human
gagcagcuuccuaucuggu

SEQ ID NO: 489320 - RNA, 22 nt, Human
agcggcgccggagggaggugcg

SEQ ID NO: 489321 - RNA, 22 nt, Human
aauaaguacuuggggauaacuu

SEQ ID NO: 489322 - RNA, 22 nt, Human
uaugcgugccucugucugucug

SEQ ID NO: 489323 - RNA, 22 nt, Human
cugaaagcaaaguaauucuuaa

SEQ ID NO: 489324 - RNA, 22 nt, Human
cacggccacugcagcaccccag

SEQ ID NO: 489325 - RNA, 22 nt, Human
cucccagggucuaggcugcugg

SEQ ID NO: 489326 - RNA, 21 nt, Human
acaaauuguuuauauaggaag

SEQ ID NO: 489327 - RNA, 22 nt, Human
auguccagaguaaagcacauuc

SEQ ID NO: 489328 - RNA, 22 nt, Human
aaagucuuaauguaaguuuagu

SEQ ID NO: 489329 - RNA, 21 nt, Human
ggcagcucagcagauggggac

SEQ ID NO: 489330 - RNA, 22 nt, Human
uugcaaucagcaguguuuucac

SEQ ID NO: 489331 - RNA, 22 nt, Human
acaguucuguccuagacuucgu

SEQ ID NO: 489332 - RNA, 22 nt, Human
gcaugagacuagcucaugagca

SEQ ID NO: 489333 - RNA, 18 nt, Human
aaacauggcuuaaaggcu

SEQ ID NO: 489334 - RNA, 22 nt, Human
uccaguggugguuugaagggca

SEQ ID NO: 489335 - RNA, 19 nt, Human
gggucccacugcccgucug

SEQ ID NO: 489336 - RNA, 22 nt, Human
uguucugcaaugcugccuccuu

SEQ ID NO: 489337 - RNA, 22 nt, Human
ggcagcaggguagccauuucuc

SEQ ID NO: 489338 - RNA, 22 nt, Human
uuuaaaccuaucuaagaaauag

SEQ ID NO: 489339 - RNA, 22 nt, Human
uggggcuccuccuggcaggagg

SEQ ID NO: 489340 - RNA, 22 nt, Human
ggggucacacuguggugacugg

SEQ ID NO: 489341 - RNA, 22 nt, Human
uucagaaagugaaucuuguuau

SEQ ID NO: 489342 - RNA, 22 nt, Human
uuuacagagaauguacauaaag

SEQ ID NO: 489343 - RNA, 22 nt, Human
gaucggguggguucugccauca

SEQ ID NO: 489344 - RNA, 22 nt, Human
uguguuucugagaaucccaccu

SEQ ID NO: 489345 - RNA, 22 nt, Human
uaaauacuuuuacuccacugau

SEQ ID NO: 489346 - RNA, 20 nt, Human
cucuuuucacucucaguggu

SEQ ID NO: 489347 - RNA, 22 nt, Human
aauagcaaaugcucauuugaaa

SEQ ID NO: 489348 - RNA, 22 nt, Human
ucaggagaguguucaguggagg

SEQ ID NO: 489349 - RNA, 22 nt, Human
cacacuguccccuucuccccag

SEQ ID NO: 489350 - RNA, 22 nt, Human
uccgcgcucucacccgcucccg

SEQ ID NO: 489351 - RNA, 22 nt, Human
ucuggauggucagcucuuccug

SEQ ID NO: 489352 - RNA, 22 nt, Human
uucagaaaggcugugccagcca

SEQ ID NO: 489353 - RNA, 20 nt, Human
cugaccagcagccugucucc

SEQ ID NO: 489354 - RNA, 22 nt, Human
auugcacaucugcacuacagcc

SEQ ID NO: 489355 - RNA, 22 nt, Human
ucccacacagcccgcucaccgg

SEQ ID NO: 489356 - RNA, 22 nt, Human
ccccaacccugguuccguggcg

SEQ ID NO: 489357 - RNA, 22 nt, Human
uggggugugcucagagcagggg

SEQ ID NO: 489358 - RNA, 22 nt, Human
uuugaaauguaucaguauaggu

SEQ ID NO: 489359 - RNA, 22 nt, Human
ugaaauguggagaugguaagua

SEQ ID NO: 489360 - RNA, 22 nt, Human
uguggaagaacuucuugcuugg

SEQ ID NO: 489361 - RNA, 22 nt, Human
cauguguauuauucuuguggaa

SEQ ID NO: 489362 - RNA, 22 nt, Human
gaggcauaaguagaagagauug

SEQ ID NO: 489363 - RNA, 22 nt, Human
gguagacaacuuuguaauagcc

SEQ ID NO: 489364 - RNA, 22 nt, Human
auuuacugagguaaauaaacug

SEQ ID NO: 489365 - RNA, 22 nt, Human
gcggcccgagcaggacgggugg

SEQ ID NO: 489366 - RNA, 22 nt, Human
accaggcccuccagcugcgugg

SEQ ID NO: 489367 - RNA, 22 nt, Human
cuggagcucagcccagguucca

SEQ ID NO: 489368 - RNA, 22 nt, Human
uaagccugcaugaaccaugaga

SEQ ID NO: 489369 - RNA, 22 nt, Human
auacuucuuuagcauauugaac

SEQ ID NO: 489370 - RNA, 22 nt, Human
acagcuggccgaggcucaggga

SEQ ID NO: 489371 - RNA, 22 nt, Human
cuugaaagucagcagaguggau

SEQ ID NO: 489372 - RNA, 22 nt, Human
cuggaagcgucggaggaagggc

SEQ ID NO: 489373 - RNA, 22 nt, Human
uugcauauccuccaacacaugg

SEQ ID NO: 489374 - RNA, 22 nt, Human
aucuucaaggaaaaaauacagu

SEQ ID NO: 489375 - RNA, 20 nt, Human
auuagcuuggagacaguggc

SEQ ID NO: 489376 - RNA, 22 nt, Human
gaagcgcggcgucggcgugggu

SEQ ID NO: 489377 - RNA, 22 nt, Human
cuggagcucuguguguuccuga

SEQ ID NO: 489378 - RNA, 17 nt, Human
ucugccaguuuuagaau

SEQ ID NO: 489379 - RNA, 22 nt, Human
ugugucuuuggcgaugucugga

SEQ ID NO: 489380 - RNA, 22 nt, Human
agccuauucaucugaucuugaa

SEQ ID NO: 489381 - RNA, 22 nt, Human
uuccaaguuaggcgagcuggug

SEQ ID NO: 489382 - RNA, 22 nt, Human
uccuggggaggucgaggcugag

SEQ ID NO: 489383 - RNA, 22 nt, Human
auuauguagcuaaaaauugugu

SEQ ID NO: 489384 - RNA, 22 nt, Human
ggauguuuauccuaucuuaguu

SEQ ID NO: 489385 - RNA, 22 nt, Human
uaucacauacuucucauccagg

SEQ ID NO: 489386 - RNA, 22 nt, Human
cuaaauguuuuaucuuccuggc

SEQ ID NO: 489387 - RNA, 22 nt, Human
cacauuuaaagguugaagcuga

SEQ ID NO: 489388 - RNA, 22 nt, Human
acagcuucgaggaucucauccc

SEQ ID NO: 489389 - RNA, 22 nt, Human
ggcuucuuagaauuugacuuac

SEQ ID NO: 489390 - RNA, 22 nt, Human
ccuuuuauauggcucaucacag

SEQ ID NO: 489391 - RNA, 22 nt, Human
gaaaccuuugccgauggggucc

SEQ ID NO: 489392 - RNA, 22 nt, Human
acaaaggugagcagaagacaca

SEQ ID NO: 489393 - RNA, 22 nt, Human
aaucuguugucaggaauccaca

SEQ ID NO: 489394 - RNA, 22 nt, Human
cagaaacacuguauuuagggaa

SEQ ID NO: 489395 - RNA, 22 nt, Human
cuuucugaggagacgggcuuug

SEQ ID NO: 489396 - RNA, 18 nt, Human
ucugagggugcgggagcu

SEQ ID NO: 489397 - RNA, 22 nt, Human
uuccuuuucuucuaccacaugu

SEQ ID NO: 489398 - RNA, 18 nt, Human
cugccagugugcucuccg

SEQ ID NO: 489399 - RNA, 22 nt, Human
gauuguacuuauugagcuaaac

SEQ ID NO: 489400 - RNA, 22 nt, Human
uacaguaaccagucuacuuaga

SEQ ID NO: 489401 - RNA, 22 nt, Human
agcaauguuggccuauauaccu

SEQ ID NO: 489402 - RNA, 22 nt, Human
uguguuuuggaaggaacaugca

SEQ ID NO: 489403 - RNA, 22 nt, Human
auugaagacuugguauccgugg

SEQ ID NO: 489404 - RNA, 22 nt, Human
uccaggagcucauccacgucaa

SEQ ID NO: 489405 - RNA, 22 nt, Human
ucagcccggguucgcaaacacu

SEQ ID NO: 489406 - RNA, 22 nt, Human
ggcgcucaguguugccccagag

SEQ ID NO: 489407 - RNA, 22 nt, Human
caauguuuuuccuuccuuaaua

SEQ ID NO: 489408 - RNA, 22 nt, Human
ggccgggcuguggagaaggggu

SEQ ID NO: 489409 - RNA, 22 nt, Human
ugguuuacucuguaaaccagga

SEQ ID NO: 489410 - RNA, 22 nt, Human
guucuucaaagugacaacuaaa

SEQ ID NO: 489411 - RNA, 22 nt, Human
aaccagacucuccaaaggcaaa

SEQ ID NO: 489412 - RNA, 22 nt, Human
acagugcaaauaggacugucuu

SEQ ID NO: 489413 - RNA, 22 nt, Human
cagguguugcaguugaagacug

SEQ ID NO: 489414 - RNA, 22 nt, Human
auacaacagaaaaugauuauuc

SEQ ID NO: 489415 - RNA, 22 nt, Human
aaguccagguccucauuccauc

SEQ ID NO: 489416 - RNA, 20 nt, Human
augcacccucagggucccug

SEQ ID NO: 489417 - RNA, 22 nt, Human
uuaaaagaauccuguuauccuc

SEQ ID NO: 489418 - RNA, 17 nt, Human
uguguaaguugcauaga

SEQ ID NO: 489419 - RNA, 22 nt, Human
ugggguccucucacuuggaggg

SEQ ID NO: 489420 - RNA, 22 nt, Human
ugaaaugccuaugaagucagga

SEQ ID NO: 489421 - RNA, 22 nt, Human
uuacaauuacuugaucucagcu

SEQ ID NO: 489422 - RNA, 22 nt, Human
aauucaaggaucuguuaaaucu

SEQ ID NO: 489423 - RNA, 22 nt, Human
ucuaaugcuugacugggggcuu

SEQ ID NO: 489424 - RNA, 22 nt, Human
cuccccacgccuggacuaagag

SEQ ID NO: 489425 - RNA, 19 nt, Human
cgcacagccugccaggcgc

SEQ ID NO: 489426 - RNA, 20 nt, Human
ucagugggaaagugagagug

SEQ ID NO: 489427 - RNA, 22 nt, Human
ggacagacuuuacagccccggg

SEQ ID NO: 489428 - RNA, 22 nt, Human
ggugggugagcccugggagcug

SEQ ID NO: 489429 - RNA, 21 nt, Human
gcaauucgcuaugaugguggc

SEQ ID NO: 489430 - RNA, 22 nt, Human
aucuggcucccuuggaauccgu

SEQ ID NO: 489431 - RNA, 22 nt, Human
cugagggagcugcuggccuugg

SEQ ID NO: 489432 - RNA, 22 nt, Human
caauuuuuaaacuaugaaguug

SEQ ID NO: 489433 - RNA, 22 nt, Human
aacuuaaacaagcucccaaguu

SEQ ID NO: 489434 - RNA, 22 nt, Human
acaacuuuaauggguuucagcu

SEQ ID NO: 489435 - RNA, 22 nt, Human
caguguuuagcacagugcuugg

SEQ ID NO: 489436 - RNA, 22 nt, Human
uuuucaguuccaucucugcucu

SEQ ID NO: 489437 - RNA, 22 nt, Human
ggcagcagaacuggcccuguau

SEQ ID NO: 489438 - RNA, 22 nt, Human
ccaggacacgauuuuuagucug

SEQ ID NO: 489439 - RNA, 22 nt, Human
guuaaaugcagauucugacuca

SEQ ID NO: 489440 - RNA, 22 nt, Human
aacacaguuucugcauugguag

SEQ ID NO: 489441 - RNA, 22 nt, Human
cucuccaggcgagguccuacug

SEQ ID NO: 489442 - RNA, 22 nt, Human
aggcauuacaucuaaauauuua

SEQ ID NO: 489443 - RNA, 22 nt, Human
uaaaguucuuagaacaaggccu

SEQ ID NO: 489444 - RNA, 22 nt, Human
aauuccagcugauugacuuucc

SEQ ID NO: 489445 - RNA, 22 nt, Human
gaauuguacugcaaucagggga

SEQ ID NO: 489446 - RNA, 22 nt, Human
guuuugaauacuacuagaacuu

SEQ ID NO: 489447 - RNA, 22 nt, Human
guggcauuuuagaacagcugac

SEQ ID NO: 489448 - RNA, 22 nt, Human
aaagugacaaccauuuauuaag

SEQ ID NO: 489449 - RNA, 18 nt, Human
ucuuccaacacugacacc

SEQ ID NO: 489450 - RNA, 22 nt, Human
guuucuccucugugucuuguuu

SEQ ID NO: 489451 - RNA, 22 nt, Human
accauccuuuaguuugcguuuc

SEQ ID NO: 489452 - RNA, 22 nt, Human
augauuuguuaacagacuuaau

SEQ ID NO: 489453 - RNA, 22 nt, Human
ucuaguuagugguugauacugu

SEQ ID NO: 489454 - RNA, 22 nt, Human
ucuggaaggggaucugugguca

SEQ ID NO: 489455 - RNA, 20 nt, Human
uuugauugccccucugacuu

SEQ ID NO: 489456 - RNA, 22 nt, Human
agggaagcagcagccgccuguc

SEQ ID NO: 489457 - RNA, 18 nt, Human
auuugcaggcaugcaggc

SEQ ID NO: 489458 - RNA, 22 nt, Human
agaacagaggccuuauguuuca

SEQ ID NO: 489459 - RNA, 22 nt, Human
aaugacaguggcacagucacuu

SEQ ID NO: 489460 - RNA, 22 nt, Human
ugugacagugccagcuucauag

SEQ ID NO: 489461 - RNA, 22 nt, Human
caaguaugagaaagcuauuacc

SEQ ID NO: 489462 - RNA, 22 nt, Human
ugucauauagaauguucuauga

SEQ ID NO: 489463 - RNA, 22 nt, Human
ccaucuucucuugaaccuccuu

SEQ ID NO: 489464 - RNA, 22 nt, Human
ucauccagccucaucaggagcu

SEQ ID NO: 489465 - RNA, 22 nt, Human
uuuguguuguacuucugugcau

SEQ ID NO: 489466 - RNA, 22 nt, Human
caguauuucauucagaauuguu

SEQ ID NO: 489467 - RNA, 22 nt, Human
agcauggcuuuggaggauagca

SEQ ID NO: 489468 - RNA, 22 nt, Human
gcccaguggcaucuucacugcu

SEQ ID NO: 489469 - RNA, 22 nt, Human
ccgugugcacgcgccggugcug

SEQ ID NO: 489470 - RNA, 22 nt, Human
uaucuuaaaaaucgaagcagau

SEQ ID NO: 489471 - RNA, 22 nt, Human
aaguuacaggagaaagagauca

SEQ ID NO: 489472 - RNA, 22 nt, Human
ugcaaauauuccaugcuguuca

SEQ ID NO: 489473 - RNA, 22 nt, Human
acaagauagcuuagaagauuca

SEQ ID NO: 489474 - RNA, 22 nt, Human
ucuuauaccccuaaacugcagc

SEQ ID NO: 489475 - RNA, 22 nt, Human
uucugauugcugaugaggccca

SEQ ID NO: 489476 - RNA, 22 nt, Human
ugaagacaguuuuacucaugag

SEQ ID NO: 489477 - RNA, 22 nt, Human
uuuggagagaugaaguucugug

SEQ ID NO: 489478 - RNA, 22 nt, Human
auauaguuggguuucauucuac

SEQ ID NO: 489479 - RNA, 22 nt, Human
ucuguaaacacccguaagcuuu

SEQ ID NO: 489480 - RNA, 22 nt, Human
ccagcuggaacggcagcccagc

SEQ ID NO: 489481 - RNA, 22 nt, Human
caauguacaaaauaauuacaca

SEQ ID NO: 489482 - RNA, 22 nt, Human
uaguauuuccuguaagcuauag

SEQ ID NO: 489483 - RNA, 22 nt, Human
gacagucccccagcagcaaacc

SEQ ID NO: 489484 - RNA, 22 nt, Human
gucugcccugcagacaugccuc

SEQ ID NO: 489485 - RNA, 22 nt, Human
aucuucaaagcacaucguuugu

SEQ ID NO: 489486 - RNA, 22 nt, Human
ucucugguuauuaacuaacucc

SEQ ID NO: 489487 - RNA, 23 nt, Human
uguguucagucaaggaucagagu

SEQ ID NO: 489488 - RNA, 22 nt, Human
uuuacuucugcauuuccccuag

SEQ ID NO: 489489 - RNA, 18 nt, Human
aguaaauguuaaauauug

SEQ ID NO: 489490 - RNA, 21 nt, Human
uuucaagggacccuggggauc

SEQ ID NO: 489491 - RNA, 22 nt, Human
uucagucuuguugaaaacuugg

SEQ ID NO: 489492 - RNA, 20 nt, Human
agugauuuguuaguacauug

SEQ ID NO: 489493 - RNA, 22 nt, Human
ugaguguuguaaccauaugauu

SEQ ID NO: 489494 - RNA, 22 nt, Human
gaaacuguauguaguuuuuggg

SEQ ID NO: 489495 - RNA, 22 nt, Human
cgaggaggaaacgcggagaacu

SEQ ID NO: 489496 - RNA, 22 nt, Human
auuccaaagccugaauaaugga

SEQ ID NO: 489497 - RNA, 22 nt, Human
uuucuacacuucgugguguuuu

SEQ ID NO: 489498 - RNA, 23 nt, Human
aaacuacauuuauaguuuuucuc

SEQ ID NO: 489499 - RNA, 22 nt, Human
acagagacacggaagcuaaaga

SEQ ID NO: 489500 - RNA, 22 nt, Human
acggccgaugacuccagcaugg

SEQ ID NO: 489501 - RNA, 22 nt, Human
guugcagcaucacugcugagug

SEQ ID NO: 489502 - RNA, 22 nt, Human
gagugugucggucagcguggcg

SEQ ID NO: 489503 - RNA, 22 nt, Human
agucaguaugacuuauaguucu

SEQ ID NO: 489504 - RNA, 20 nt, Human
ugcuggaggcgccggcgcuc

SEQ ID NO: 489505 - RNA, 20 nt, Human
uucacagaggacucagguca

SEQ ID NO: 489506 - RNA, 22 nt, Human
ucuuuugagggccagaggaaga

SEQ ID NO: 489507 - RNA, 22 nt, Human
ccagguggacggcgaguacagg

SEQ ID NO: 489508 - RNA, 20 nt, Human
cuugaguucagagcugucau

SEQ ID NO: 489509 - RNA, 22 nt, Human
acccggaggcgggggaugcagu

SEQ ID NO: 489510 - RNA, 22 nt, Human
ucugaauucuuagaauuaaagg

SEQ ID NO: 489511 - RNA, 22 nt, Human
aagacacuuucuaaauagaagu

SEQ ID NO: 489512 - RNA, 22 nt, Human
gaauacaaauaauaccaaggug

SEQ ID NO: 489513 - RNA, 22 nt, Human
agacacauuuucagcucugcca

SEQ ID NO: 489514 - RNA, 22 nt, Human
guaauucugugugaaucuauua

SEQ ID NO: 489515 - RNA, 22 nt, Human
auagucuuagaaucuugagugu

SEQ ID NO: 489516 - RNA, 21 nt, Human
cccagaaguuccauggggggc

SEQ ID NO: 489517 - RNA, 22 nt, Human
guuuuaguggguggccacugau

SEQ ID NO: 489518 - RNA, 22 nt, Human
caggugggagccacagcguaca

SEQ ID NO: 489519 - RNA, 22 nt, Human
guucucugccggcaccuacccg

SEQ ID NO: 489520 - RNA, 22 nt, Human
agguggucuuguggaugccgca

SEQ ID NO: 489521 - RNA, 22 nt, Human
auguuugaaauuguaaguauau

SEQ ID NO: 489522 - RNA, 22 nt, Human
acucuguuugcagguagcucag

SEQ ID NO: 489523 - RNA, 20 nt, Human
cuuguuaaauaugcagguag

SEQ ID NO: 489524 - RNA, 22 nt, Human
uaaaucccuacaucuguguuuu

SEQ ID NO: 489525 - RNA, 16 nt, Human
ugcggcaacuugcggc

SEQ ID NO: 489526 - RNA, 22 nt, Human
gguuguaguuggagguuguaua

SEQ ID NO: 489527 - RNA, 22 nt, Human
gcggggggcaggcaguacguug

SEQ ID NO: 489528 - RNA, 22 nt, Human
agacacuguguacagaaaaaga

SEQ ID NO: 489529 - RNA, 22 nt, Human
uugauggacagggaccacuguc

SEQ ID NO: 489530 - RNA, 22 nt, Human
caagagcuggguggcaagcuag

SEQ ID NO: 489531 - RNA, 22 nt, Human
uagcugucagcaaucaaguggu

SEQ ID NO: 489532 - RNA, 23 nt, Human
agcaacagugggugaguguugcu

SEQ ID NO: 489533 - RNA, 22 nt, Human
gugcauauguguguauacaaac

SEQ ID NO: 489534 - RNA, 22 nt, Human
uuguugcaagccuggaaucugg

SEQ ID NO: 489535 - RNA, 22 nt, Human
guuguuuuugaacggugguggc

SEQ ID NO: 489536 - RNA, 21 nt, Human
aucuuaaaaggucuuaacuuu

SEQ ID NO: 489537 - RNA, 22 nt, Human
uuguauuaaaauguguuucugu

SEQ ID NO: 489538 - RNA, 19 nt, Human
cagcaaacacuguaaaugg

SEQ ID NO: 489539 - RNA, 22 nt, Human
aguuuccacuggagacacugug

SEQ ID NO: 489540 - RNA, 22 nt, Human
cuggagucggcgccccaacaga

SEQ ID NO: 489541 - RNA, 22 nt, Human
gugcuggggagauaggaagaga

SEQ ID NO: 489542 - RNA, 22 nt, Human
uauuuggauagacagggagaug

SEQ ID NO: 489543 - RNA, 22 nt, Human
gaauaauugugaugcuugaagu

SEQ ID NO: 489544 - RNA, 22 nt, Human
gucuuuuuuacaccuuacauca

SEQ ID NO: 489545 - RNA, 22 nt, Human
uacaggcucuugucagacguau

SEQ ID NO: 489546 - RNA, 22 nt, Human
agggcagagauuaauuaagaca

SEQ ID NO: 489547 - RNA, 22 nt, Human
caaauguuugguggcauuuugu

SEQ ID NO: 489548 - RNA, 22 nt, Human
uuuuaauccucuugguaucuua

SEQ ID NO: 489549 - RNA, 22 nt, Human
ggagcugcucagagccaguccc

SEQ ID NO: 489550 - RNA, 23 nt, Human
uggugggcccugcuugcucacug

SEQ ID NO: 489551 - RNA, 22 nt, Human
agaaucugcauuuuaacaagau

SEQ ID NO: 489552 - RNA, 23 nt, Human
uuguucuuggaucuuccugaagc

SEQ ID NO: 489553 - RNA, 22 nt, Human
aggcuuuugcucuggcuccucu

SEQ ID NO: 489554 - RNA, 20 nt, Human
ucauccaggacaggaguggc

SEQ ID NO: 489555 - RNA, 22 nt, Human
aaugauguuuuuaaagaacaua

SEQ ID NO: 489556 - RNA, 22 nt, Human
auggcuucugucuuggaaauuu

SEQ ID NO: 489557 - RNA, 22 nt, Human
auagcaaaggacaauagucagu

SEQ ID NO: 489558 - RNA, 22 nt, Human
uguucuuagguauuugacaguc

SEQ ID NO: 489559 - RNA, 22 nt, Human
ugcauaaauauuguugggagua

SEQ ID NO: 489560 - RNA, 22 nt, Human
uacagcgaaaauuuagcuugau

SEQ ID NO: 489561 - RNA, 17 nt, Human
ucuccuggcucuaucag

SEQ ID NO: 489562 - RNA, 21 nt, Human
uaggugggagccccaguaugc

SEQ ID NO: 489563 - RNA, 22 nt, Human
augccaucaaugacagaguuag

SEQ ID NO: 489564 - RNA, 22 nt, Human
augaaacucuagcuuucagcac

SEQ ID NO: 489565 - RNA, 22 nt, Human
aucacaguuuuaccauuuggua

SEQ ID NO: 489566 - RNA, 22 nt, Human
cccguguggaugcgcuggugcu

SEQ ID NO: 489567 - RNA, 22 nt, Human
cauggccagauucuuucuucuc

SEQ ID NO: 489568 - RNA, 22 nt, Human
uaaaaucaugacagauugacau

SEQ ID NO: 489569 - RNA, 22 nt, Human
auauacacuguuucaguugaag

SEQ ID NO: 489570 - RNA, 22 nt, Human
ugguccugagcaccagccugac

SEQ ID NO: 489571 - RNA, 22 nt, Human
uacauggauguuauccuuacug

SEQ ID NO: 489572 - RNA, 22 nt, Human
aaaagagccacuuaugaccuca

SEQ ID NO: 489573 - RNA, 22 nt, Human
gggagagcgcgcuagggccgag

SEQ ID NO: 489574 - RNA, 22 nt, Human
gccggggcuggggagagacaug

SEQ ID NO: 489575 - RNA, 16 nt, Human
ggcagcagcuccgugc

SEQ ID NO: 489576 - RNA, 22 nt, Human
gagguccacugaggcaacaggg

SEQ ID NO: 489577 - RNA, 23 nt, Human
gggaaaucaaaagauauuucuuc

SEQ ID NO: 489578 - RNA, 20 nt, Human
ggucacuguggcugcaggau

SEQ ID NO: 489579 - RNA, 22 nt, Human
auuguugacuugauuacucaac

SEQ ID NO: 489580 - RNA, 22 nt, Human
uuuccaaagguggcaggaacaa

SEQ ID NO: 489581 - RNA, 22 nt, Human
acaggacagucuaguaacagua

SEQ ID NO: 489582 - RNA, 22 nt, Human
uuuguguuggaagaaaugcuac

SEQ ID NO: 489583 - RNA, 22 nt, Human
uguaauguuagaaacaauugcu

SEQ ID NO: 489584 - RNA, 22 nt, Human
uaaaccuuauuugaauaccaac

SEQ ID NO: 489585 - RNA, 22 nt, Human
cuguuuauucucaucuaaaaug

SEQ ID NO: 489586 - RNA, 22 nt, Human
cagcacauggauggaguuagga

SEQ ID NO: 489587 - RNA, 22 nt, Human
aguacuuuuuguucaauugugc

SEQ ID NO: 489588 - RNA, 22 nt, Human
ggggucccugcaccagcauguc

SEQ ID NO: 489589 - RNA, 22 nt, Human
gcucaugggcccagagcagccc

SEQ ID NO: 489590 - RNA, 22 nt, Human
acucuguaauucugaagcaccu

SEQ ID NO: 489591 - RNA, 22 nt, Human
gcugccaccguggagaugagug

SEQ ID NO: 489592 - RNA, 22 nt, Human
agacagcgaggacagaggggug

SEQ ID NO: 489593 - RNA, 22 nt, Human
ugcuaauaaacuccaggcugag

SEQ ID NO: 489594 - RNA, 23 nt, Human
auaauaacgucugucuugucucu

SEQ ID NO: 489595 - RNA, 22 nt, Human
ggugugucugccaggaacugca

SEQ ID NO: 489596 - RNA, 22 nt, Human
ggcuggacuugguccuguuuug

SEQ ID NO: 489597 - RNA, 22 nt, Human
acagcuggaggucugugagcac

SEQ ID NO: 489598 - RNA, 22 nt, Human
aagauuuaccacuuuauucaag

SEQ ID NO: 489599 - RNA, 22 nt, Human
aucauccauggcugaucauaaa

SEQ ID NO: 489600 - RNA, 22 nt, Human
augugggccgugcggguguccu

SEQ ID NO: 489601 - RNA, 22 nt, Human
uggcauuuuguagcuguguauc

SEQ ID NO: 489602 - RNA, 22 nt, Human
gagacagagagguacucaacau

SEQ ID NO: 489603 - RNA, 22 nt, Human
aaaugcaugugcuauagaugug

SEQ ID NO: 489604 - RNA, 22 nt, Human
guucaguuauuucugaagauau

SEQ ID NO: 489605 - RNA, 19 nt, Human
ccgucauggagaguggggu

SEQ ID NO: 489606 - RNA, 22 nt, Human
gacauacagcccucucccuggu

SEQ ID NO: 489607 - RNA, 22 nt, Human
ccuguacuuguauuaaaggucc

SEQ ID NO: 489608 - RNA, 22 nt, Human
acagagccuccaggagugcugg

SEQ ID NO: 489609 - RNA, 21 nt, Human
ugcauauauaagugcauacac

SEQ ID NO: 489610 - RNA, 22 nt, Human
agcagugugggcugcacgcugg

SEQ ID NO: 489611 - RNA, 22 nt, Human
guugugcaaacacuggggucug

SEQ ID NO: 489612 - RNA, 22 nt, Human
guguuuggucagacguccgggg

SEQ ID NO: 489613 - RNA, 22 nt, Human
gaauguuauugaacuacgagcu

SEQ ID NO: 489614 - RNA, 22 nt, Human
agauguuuauaacucaugagug

SEQ ID NO: 489615 - RNA, 22 nt, Human
cacuguuuuacauguuauuuaa

SEQ ID NO: 489616 - RNA, 22 nt, Human
uuaccuuguaaaacauauuccu

SEQ ID NO: 489617 - RNA, 22 nt, Human
ugcacagagggaggcauaaaau

SEQ ID NO: 489618 - RNA, 22 nt, Human
gcaggaguguggugggacaucc

SEQ ID NO: 489619 - RNA, 22 nt, Human
gcagcccaggaggcgggagccc

SEQ ID NO: 489620 - RNA, 22 nt, Human
guguacacuugaacugacgguu

SEQ ID NO: 489621 - RNA, 22 nt, Human
uaaggcuuuggucaccauggag

SEQ ID NO: 489622 - RNA, 22 nt, Human
uacugaaagagugguggacucu

SEQ ID NO: 489623 - RNA, 22 nt, Human
aauggcagagacuguugaaaua

SEQ ID NO: 489624 - RNA, 22 nt, Human
ugggcaaaugcuuuuuagucaa

SEQ ID NO: 489625 - RNA, 18 nt, Human
ggguccccagcugcaggg

SEQ ID NO: 489626 - RNA, 22 nt, Human
auaacugagugagcagcgacuc

SEQ ID NO: 489627 - RNA, 22 nt, Human
uuauuuaaaauguagguuggga

SEQ ID NO: 489628 - RNA, 22 nt, Human
agauguuuuuccaggucuaauu

SEQ ID NO: 489629 - RNA, 22 nt, Human
ugcugcgggacccacugugggc

SEQ ID NO: 489630 - RNA, 22 nt, Human
cuccgcuuguguauaccuccaa

SEQ ID NO: 489631 - RNA, 22 nt, Human
cgccccagccaguugagcggcg

SEQ ID NO: 489632 - RNA, 22 nt, Human
ucccagaacccugccagguccu

SEQ ID NO: 489633 - RNA, 22 nt, Human
uuccauacgacugaggucucgg

SEQ ID NO: 489634 - RNA, 22 nt, Human
gugcaugucuuuggaggccucc

SEQ ID NO: 489635 - RNA, 22 nt, Human
ugacauuugagagagauauaca

SEQ ID NO: 489636 - RNA, 22 nt, Human
uggaaaauauuuaggugaauga

SEQ ID NO: 489637 - RNA, 22 nt, Human
cauuuacauuuaagguuaauau

SEQ ID NO: 489638 - RNA, 22 nt, Human
aaaacuuucagggauacagaaa

SEQ ID NO: 489639 - RNA, 22 nt, Human
ucacaauacucacucaauggcu

SEQ ID NO: 489640 - RNA, 22 nt, Human
uguaccacucuacuaaggguuc

SEQ ID NO: 489641 - RNA, 22 nt, Human
ggcucacgcaauuaucccggcc

SEQ ID NO: 489642 - RNA, 22 nt, Human
ucuccaggcuuaaucucagcuu

SEQ ID NO: 489643 - RNA, 22 nt, Human
gugacagaaacagggcuagaau

SEQ ID NO: 489644 - RNA, 22 nt, Human
uucugauuguuggaggaugcuu

SEQ ID NO: 489645 - RNA, 22 nt, Human
gcugucugcugggucgcucagg

SEQ ID NO: 489646 - RNA, 20 nt, Human
cgggacacucaagcucuggg

SEQ ID NO: 489647 - RNA, 22 nt, Human
ucagacaccgucuauuuugccu

SEQ ID NO: 489648 - RNA, 22 nt, Human
aaaccggguccagaucuucagg

SEQ ID NO: 489649 - RNA, 22 nt, Human
guugcaaaugggaagaugguua

SEQ ID NO: 489650 - RNA, 22 nt, Human
aaugaaacuaguagaaucuuug

SEQ ID NO: 489651 - RNA, 22 nt, Human
ugugaagaucaggguccuagag

SEQ ID NO: 489652 - RNA, 22 nt, Human
ggacauggaaguauggagugga

SEQ ID NO: 489653 - RNA, 22 nt, Human
agcuggguguagggcuggacaa

SEQ ID NO: 489654 - RNA, 22 nt, Human
auuuugacauugcggcauugcu

SEQ ID NO: 489655 - RNA, 22 nt, Human
aguaaaaucaccaucucuuugu

SEQ ID NO: 489656 - RNA, 22 nt, Human
ucacccuucccagcuguccgcc

SEQ ID NO: 489657 - RNA, 22 nt, Human
auacaccaccuuggaucuuuca

SEQ ID NO: 489658 - RNA, 22 nt, Human
uucucugaguacguuucagugu

SEQ ID NO: 489659 - RNA, 22 nt, Human
uaucuguauucugacagucacu

SEQ ID NO: 489660 - RNA, 22 nt, Human
aggcauuuaaagauguaagacu

SEQ ID NO: 489661 - RNA, 22 nt, Human
uaacacauagauauuuuaacuu

SEQ ID NO: 489662 - RNA, 22 nt, Human
uuuugguaauuaaguagauauu

SEQ ID NO: 489663 - RNA, 22 nt, Human
uuccggaauggcaggguagcuc

SEQ ID NO: 489664 - RNA, 18 nt, Human
ucagggaaucuuggccuu

SEQ ID NO: 489665 - RNA, 22 nt, Human
auuggagccccagaagcaaggu

SEQ ID NO: 489666 - RNA, 22 nt, Human
gcagccuccgcacugcgagucc

SEQ ID NO: 489667 - RNA, 22 nt, Human
cuguauaugugcauacacacac

SEQ ID NO: 489668 - RNA, 23 nt, Human
uuaagacuggcugaacuuaguag

SEQ ID NO: 489669 - RNA, 22 nt, Human
uuguugcugcucaaccucuaua

SEQ ID NO: 489670 - RNA, 22 nt, Human
gggcuuuaggggccagugacca

SEQ ID NO: 489671 - RNA, 17 nt, Human
gcuccagaauucuaguc

SEQ ID NO: 489672 - RNA, 22 nt, Human
uucacagaauugucuugacugg

SEQ ID NO: 489673 - RNA, 22 nt, Human
gguguuguacauucuguggauu

SEQ ID NO: 489674 - RNA, 22 nt, Human
cagaggccuggcuuggacaccu

SEQ ID NO: 489675 - RNA, 22 nt, Human
gcaguggccacauggaggagga

SEQ ID NO: 489676 - RNA, 22 nt, Human
agaccagugaguaggccuuaga

SEQ ID NO: 489677 - RNA, 22 nt, Human
cuggcuuuuuucccauuaugca

SEQ ID NO: 489678 - RNA, 22 nt, Human
uuguccuuaccucaaucuggaa

SEQ ID NO: 489679 - RNA, 22 nt, Human
aaugcugugauuuauuaaguau

SEQ ID NO: 489680 - RNA, 22 nt, Human
aucucccaaauuagccucuuga

SEQ ID NO: 489681 - RNA, 22 nt, Human
agcuggguacacguugucacaa

SEQ ID NO: 489682 - RNA, 22 nt, Human
cauuaacacuuuggauuuagac

SEQ ID NO: 489683 - RNA, 22 nt, Human
acauagcuuaaaugagaagaua

SEQ ID NO: 489684 - RNA, 22 nt, Human
ccgggagguggagauugcggug

SEQ ID NO: 489685 - RNA, 22 nt, Human
cuggagcucuccagagccccgu

SEQ ID NO: 489686 - RNA, 20 nt, Human
acagaugaggaugcggaggc

SEQ ID NO: 489687 - RNA, 22 nt, Human
gccuggcaaggcccuguugacu

SEQ ID NO: 489688 - RNA, 22 nt, Human
aaagugcugggauuacaggugu

SEQ ID NO: 489689 - RNA, 22 nt, Human
accaguuaaagaauaugaggcc

SEQ ID NO: 489690 - RNA, 22 nt, Human
auuaauaucccccgccguucug

SEQ ID NO: 489691 - RNA, 22 nt, Human
gauguauagcuuuaacugaccc

SEQ ID NO: 489692 - RNA, 22 nt, Human
ccagagacaaggagcuggaguc

SEQ ID NO: 489693 - RNA, 22 nt, Human
ugcaucauuaagguacaguugg

SEQ ID NO: 489694 - RNA, 22 nt, Human
aaacacaucauucaugucguca

SEQ ID NO: 489695 - RNA, 21 nt, Human
ugucagcaacaauacuuucuc

SEQ ID NO: 489696 - RNA, 22 nt, Human
ggagacucaccccgcauucuag

SEQ ID NO: 489697 - RNA, 22 nt, Human
uauagcagcaugauuuauaguc

SEQ ID NO: 489698 - RNA, 22 nt, Human
aauacagauggcaugugaagau

SEQ ID NO: 489699 - RNA, 22 nt, Human
agugacauuauuuuguguacua

SEQ ID NO: 489700 - RNA, 22 nt, Human
agauuucaauggauauugcaag

SEQ ID NO: 489701 - RNA, 22 nt, Human
auauuuguuuggcagaguucag

SEQ ID NO: 489702 - RNA, 22 nt, Human
ugcuggaguggcacuguguggc

SEQ ID NO: 489703 - RNA, 22 nt, Human
caaacauuuguuggaaccccug

SEQ ID NO: 489704 - RNA, 17 nt, Human
cagucacaggucuuuuc

SEQ ID NO: 489705 - RNA, 22 nt, Human
uuuguucaccuagcaaacuuuu

SEQ ID NO: 489706 - RNA, 19 nt, Human
cauaauacaguggaucuga

SEQ ID NO: 489707 - RNA, 22 nt, Human
aagcccgguugggaacguggug

SEQ ID NO: 489708 - RNA, 23 nt, Human
uguacacuuggucaagguacuua

SEQ ID NO: 489709 - RNA, 22 nt, Human
agcugggugcccgaagccacgu

SEQ ID NO: 489710 - RNA, 23 nt, Human
uccaguuaaugguucccagucug

SEQ ID NO: 489711 - RNA, 22 nt, Human
ugacaggcuugcuaagacauag

SEQ ID NO: 489712 - RNA, 22 nt, Human
uaaaugcaguacaaauuguucu

SEQ ID NO: 489713 - RNA, 22 nt, Human
aaauucuguccugaaugccauu

SEQ ID NO: 489714 - RNA, 22 nt, Human
ucugguuucccaguuccuccgu

SEQ ID NO: 489715 - RNA, 22 nt, Human
uuggaaauguagaaaagcagau

SEQ ID NO: 489716 - RNA, 22 nt, Human
ccuucuagcaaaucaacauaaa

SEQ ID NO: 489717 - RNA, 22 nt, Human
augaaaacagccuccugugaua

SEQ ID NO: 489718 - RNA, 22 nt, Human
agacccuugcagucugguuguc

SEQ ID NO: 489719 - RNA, 18 nt, Human
gccagcccuccaaccucc

SEQ ID NO: 489720 - RNA, 22 nt, Human
aggcaguguggagggcuguugc

SEQ ID NO: 489721 - RNA, 22 nt, Human
auugaacauuguucuaggaggc

SEQ ID NO: 489722 - RNA, 22 nt, Human
ugugugcucgauggcccugcag

SEQ ID NO: 489723 - RNA, 22 nt, Human
uuugaagauaaauauggagaaa

SEQ ID NO: 489724 - RNA, 22 nt, Human
ugacuuuggacuagugauuuaa

SEQ ID NO: 489725 - RNA, 22 nt, Human
uguaucauauggggaagcuuca

SEQ ID NO: 489726 - RNA, 22 nt, Human
uugggauacaucuugcugagcc

SEQ ID NO: 489727 - RNA, 22 nt, Human
ccagugugcauuaucauguguc

SEQ ID NO: 489728 - RNA, 22 nt, Human
cgggagccucugggucacacug

SEQ ID NO: 489729 - RNA, 22 nt, Human
ugaaaacacuuuaguuuagguc

SEQ ID NO: 489730 - RNA, 22 nt, Human
gagguggcugcuugcugggaaa

SEQ ID NO: 489731 - RNA, 22 nt, Human
uaagaaacauuuuuaugacagu

SEQ ID NO: 489732 - RNA, 22 nt, Human
gccccuucguggaagugcauuc

SEQ ID NO: 489733 - RNA, 22 nt, Human
auguccaggaagucuuaacuca

SEQ ID NO: 489734 - RNA, 22 nt, Human
aguucaauuguuuuguaaaagu

SEQ ID NO: 489735 - RNA, 22 nt, Human
cucugcaggcacccaggguggg

SEQ ID NO: 489736 - RNA, 22 nt, Human
uuucgggaaaaacugguaagac

SEQ ID NO: 489737 - RNA, 22 nt, Human
cuccagauuccguuuauucagg

SEQ ID NO: 489738 - RNA, 22 nt, Human
ugauaguaucugauuauuucac

SEQ ID NO: 489739 - RNA, 22 nt, Human
aggcuuucgaugaacgcuugcu

SEQ ID NO: 489740 - RNA, 22 nt, Human
uuacaguuaaugugacuaacca

SEQ ID NO: 489741 - RNA, 22 nt, Human
ggugauuuccuuuugcaaaguc

SEQ ID NO: 489742 - RNA, 22 nt, Human
gucccaggggagcucucugauu

SEQ ID NO: 489743 - RNA, 22 nt, Human
acagccaggaauucuggagaag

SEQ ID NO: 489744 - RNA, 22 nt, Human
agugaaaaccuaaucaugcagu

SEQ ID NO: 489745 - RNA, 22 nt, Human
cgcccacgaaguagguggcauu

SEQ ID NO: 489746 - RNA, 22 nt, Human
cagacguuggaggaaauauacc

SEQ ID NO: 489747 - RNA, 22 nt, Human
uaaagcauguuucaguaagguu

SEQ ID NO: 489748 - RNA, 22 nt, Human
gcugcuuugucuguaaaaugga

SEQ ID NO: 489749 - RNA, 22 nt, Human
ucucuguaagcugccuucucgu

SEQ ID NO: 489750 - RNA, 22 nt, Human
cgccaguggcagcuggaacagg

SEQ ID NO: 489751 - RNA, 22 nt, Human
ugguaaaugucuaacaaucacu

SEQ ID NO: 489752 - RNA, 22 nt, Human
gcagcagugugggcugaaccua

SEQ ID NO: 489753 - RNA, 17 nt, Human
uuuguucguuaguccgg

SEQ ID NO: 489754 - RNA, 22 nt, Human
cugggauccacgggcucccaag

SEQ ID NO: 489755 - RNA, 22 nt, Human
uuuggaaaugagaagccaccuu

SEQ ID NO: 489756 - RNA, 20 nt, Human
ucaggguuucccauucuugg

SEQ ID NO: 489757 - RNA, 22 nt, Human
uuuaaacuaacaguacacguug

SEQ ID NO: 489758 - RNA, 22 nt, Human
gauccacagcugcgguaggaga

SEQ ID NO: 489759 - RNA, 22 nt, Human
cccgaccucgcaaagcgcacuc

SEQ ID NO: 489760 - RNA, 22 nt, Human
aagcaaaagguuacacuucugg

SEQ ID NO: 489761 - RNA, 22 nt, Human
uguauauacacacucccauguu

SEQ ID NO: 489762 - RNA, 22 nt, Human
agaugguucagaauuauaaaga

SEQ ID NO: 489763 - RNA, 22 nt, Human
gcuggguggaucggaggcucug

SEQ ID NO: 489764 - RNA, 22 nt, Human
gaugauuacacuuuuaaaacag

SEQ ID NO: 489765 - RNA, 23 nt, Human
ugcaaaauuugcagaguucgaug

SEQ ID NO: 489766 - RNA, 22 nt, Human
guuuccaagucucucaacaccc

SEQ ID NO: 489767 - RNA, 22 nt, Human
cagacagagucuucccaucagu

SEQ ID NO: 489768 - RNA, 22 nt, Human
caggguggaacaggcaauacuu

SEQ ID NO: 489769 - RNA, 22 nt, Human
acauuuaaugauccuacuguga

SEQ ID NO: 489770 - RNA, 22 nt, Human
gcgagaaacuaagugcccuuug

SEQ ID NO: 489771 - RNA, 22 nt, Human
aauugguuugaauaaauaaaga

SEQ ID NO: 489772 - RNA, 22 nt, Human
agcugaaacuucccauuaauug

SEQ ID NO: 489773 - RNA, 22 nt, Human
uaaguauuggccuauagcuaga

SEQ ID NO: 489774 - RNA, 22 nt, Human
cccuucagcugagugggacagc

SEQ ID NO: 489775 - RNA, 18 nt, Human
ucaugcaaacgcuucaua

SEQ ID NO: 489776 - RNA, 22 nt, Human
gggggcuggacuuucccacaca

SEQ ID NO: 489777 - RNA, 21 nt, Human
caagacauaugaguacucugg

SEQ ID NO: 489778 - RNA, 17 nt, Human
acuuguauugugcuuua

SEQ ID NO: 489779 - RNA, 20 nt, Human
uguauuuaaugaaggcuuuu

SEQ ID NO: 489780 - RNA, 22 nt, Human
cagcgguggcaaggugacugug

SEQ ID NO: 489781 - RNA, 22 nt, Human
gcagacaucaagcacaggccca

SEQ ID NO: 489782 - RNA, 22 nt, Human
ggcacugggugagggucacugg

SEQ ID NO: 489783 - RNA, 22 nt, Human
uccguuuucacacugcuauaaa

SEQ ID NO: 489784 - RNA, 22 nt, Human
ucauuuacacuucacaaaugga

SEQ ID NO: 489785 - RNA, 22 nt, Human
aaauacaguggcagcagauaau

SEQ ID NO: 489786 - RNA, 22 nt, Human
agagcagaggcauggccguggg

SEQ ID NO: 489787 - RNA, 22 nt, Human
aggggcuuguggaguugcuggu

SEQ ID NO: 489788 - RNA, 22 nt, Human
aagcugccugggaggaagggcu

SEQ ID NO: 489789 - RNA, 22 nt, Human
guuaacaacacugugagugcug

SEQ ID NO: 489790 - RNA, 22 nt, Human
acagacacaggcguggagucgc

SEQ ID NO: 489791 - RNA, 22 nt, Human
gaagcccuggggucagugucgu

SEQ ID NO: 489792 - RNA, 22 nt, Human
ugagucaccucucagaagccac

SEQ ID NO: 489793 - RNA, 21 nt, Human
uuuguucaggggcaaaguuaa

SEQ ID NO: 489794 - RNA, 19 nt, Human
uuugauagggcauaauaua

SEQ ID NO: 489795 - RNA, 20 nt, Human
uacaauauucccacuuugcu

SEQ ID NO: 489796 - RNA, 22 nt, Human
augcaguuagguaauagucuca

SEQ ID NO: 489797 - RNA, 22 nt, Human
cuuccugcaacaccuguguugc

SEQ ID NO: 489798 - RNA, 22 nt, Human
ugagaauacugcauuguuagga

SEQ ID NO: 489799 - RNA, 20 nt, Human
aucggcuugccuggaaacaa

SEQ ID NO: 489800 - RNA, 22 nt, Human
gagggcucaacuacuacuaggc

SEQ ID NO: 489801 - RNA, 22 nt, Human
aggugggacccguggggugcga

SEQ ID NO: 489802 - RNA, 22 nt, Human
aucuaugugggaaucauaauag

SEQ ID NO: 489803 - RNA, 22 nt, Human
ugcuuuggcccaacauugaugc

SEQ ID NO: 489804 - RNA, 22 nt, Human
auauaugaagaagucuugauua

SEQ ID NO: 489805 - RNA, 22 nt, Human herpesvirus 3
acucccauuggcaugauaaacg

SEQ ID NO: 489806 - RNA, 15 nt, Human herpesvirus 3
agagcccacacaauc

SEQ ID NO: 489807 - RNA, 21 nt, Human herpesvirus 3
aaaagcagaugaugugccgau

SEQ ID NO: 489808 - RNA, 22 nt, Human herpesvirus 3
ggauacuuggcucuguauuaaa

SEQ ID NO: 489809 - RNA, 22 nt, Human herpesvirus 3
uauugcagacauuuguuucgau

SEQ ID NO: 489810 - RNA, 22 nt, Human herpesvirus 3
ucaggcgggcguaggcuagcga

SEQ ID NO: 489811 - RNA, 22 nt, Human herpesvirus 3
uggaacaauuccaucagagucu

SEQ ID NO: 489812 - RNA, 22 nt, Human herpesvirus 3
guccagccguguuacugguaau

SEQ ID NO: 489813 - RNA, 22 nt, Human herpesvirus 3
cuguuuucccuuggcucuugug

SEQ ID NO: 489814 - RNA, 22 nt, Human herpesvirus 3
aucgggguucuggaucgcggca

SEQ ID NO: 489815 - RNA, 22 nt, Human herpesvirus 3
cgccugugaaauaacggucgcg

SEQ ID NO: 489816 - RNA, 22 nt, Human herpesvirus 3
ugucucuggcgccccgguuccc

SEQ ID NO: 489817 - RNA, 22 nt, Human herpesvirus 3
uucuaggauucgaacgacgaca

SEQ ID NO: 489818 - RNA, 22 nt, Human herpesvirus 3
uuuggagacggcgguaaaggcu

SEQ ID NO: 489819 - RNA, 22 nt, Human herpesvirus 3
gcaucauguuuccuugggcggg

SEQ ID NO: 489820 - RNA, 22 nt, Human herpesvirus 3
ccgaggcugguuagagagcgcu

SEQ ID NO: 489821 - RNA, 22 nt, Human herpesvirus 3
cuaauuuaauagggcuaugucc

SEQ ID NO: 489822 - RNA, 22 nt, Human herpesvirus 3
cauauacuguguuuuuauccau

SEQ ID NO: 489823 - RNA, 22 nt, Human herpesvirus 3
ccaaguccccguucauauugca

SEQ ID NO: 489824 - RNA, 22 nt, Human herpesvirus 3
gguugugucggucucuccaagc

SEQ ID NO: 489825 - RNA, 22 nt, Human herpesvirus 3
gaguguuuuuucuagcucuugg

SEQ ID NO: 489826 - RNA, 22 nt, Human herpesvirus 3
gauuuucuuccacugacaccuc

SEQ ID NO: 489827 - RNA, 22 nt, Human herpesvirus 3
gggguuuuggauuaagaucucc

SEQ ID NO: 489828 - RNA, 22 nt, Human herpesvirus 3
uuugcuuggguuucuauguccg

SEQ ID NO: 489829 - RNA, 22 nt, Human herpesvirus 3
uggguuaacgcucuuaacacgg

SEQ ID NO: 489830 - RNA, 22 nt, Human herpesvirus 3
ugcuucuugaaaaaggccacac

SEQ ID NO: 489831 - RNA, 22 nt, Human herpesvirus 3
ugggaggggugccgauccgggc

SEQ ID NO: 489832 - RNA, 22 nt, Human herpesvirus 3
ggauccacgcgggugcacgucu

SEQ ID NO: 489833 - RNA, 22 nt, Human herpesvirus 3
ggagccacacaauauucgcgaa

SEQ ID NO: 489834 - RNA, 22 nt, Human herpesvirus 3
gcugggcuaaauguggcgaggu

SEQ ID NO: 489835 - RNA, 22 nt, Human herpesvirus 3
uccgaaccguuccaugcgucuu

SEQ ID NO: 489836 - RNA, 22 nt, Human herpesvirus 3
uccccggacgguccaaaccgca

SEQ ID NO: 489837 - RNA, 22 nt, Human herpesvirus 3
gaguguuuuuucuagcucuugg

SEQ ID NO: 489838 - RNA, 22 nt, Human herpesvirus 3
cgcguauguaaaucggugaaga

SEQ ID NO: 489839 - RNA, 22 nt, Human herpesvirus 3
cggcuauuggguaucacuguca

SEQ ID NO: 489840 - RNA, 22 nt, Human herpesvirus 3
uggaacaauuccaucagagucu

SEQ ID NO: 489841 - RNA, 22 nt, Human herpesvirus 3
acgaaacguguuuuuagcuaag

SEQ ID NO: 489842 - RNA, 22 nt, Human herpesvirus 3
uacgauucagacguuuuuucuc

SEQ ID NO: 489843 - RNA, 22 nt, Human herpesvirus 3
guguuguuguuuccaaacggaa

SEQ ID NO: 489844 - RNA, 19 nt, Human herpesvirus 3
guguuuacgugcgauggua

SEQ ID NO: 489845 - RNA, 22 nt, Human herpesvirus 3
uacaccuucucguuggcgucgc

SEQ ID NO: 489846 - RNA, 22 nt, Human herpesvirus 3
gucugacgugguaagugcggcu

SEQ ID NO: 489847 - RNA, 22 nt, Human herpesvirus 3
uuuaucaugccaaugggagugu

SEQ ID NO: 489848 - RNA, 22 nt, Human herpesvirus 3
uuagaccguuuguuaaccggag

SEQ ID NO: 489849 - RNA, 22 nt, Human herpesvirus 3
uugaagacagggauacggaggg

SEQ ID NO: 489850 - RNA, 22 nt, Human herpesvirus 3
uucuaggauucgaacgacgaca

SEQ ID NO: 489851 - RNA, 18 nt, Human herpesvirus 3
uuggacuuccguucucgg

SEQ ID NO: 489852 - RNA, 22 nt, Human herpesvirus 3
aucgggguucuggaucgcggca

SEQ ID NO: 489853 - RNA, 22 nt, Human herpesvirus 3
ccgguacuccgggucgagggug

SEQ ID NO: 489854 - RNA, 22 nt, Human herpesvirus 3
ccgaggcugguuagagagcgcu

SEQ ID NO: 489855 - RNA, 20 nt, Human herpesvirus 3
aguugcauguuaacgucgac

SEQ ID NO: 489856 - RNA, 22 nt, Human herpesvirus 3
ucguggggggcgguaugaucaa

SEQ ID NO: 489857 - RNA, 22 nt, Human herpesvirus 3
ucguaauucgaaugcagguggu

SEQ ID NO: 489858 - RNA, 22 nt, Human herpesvirus 3
ucggcgcgcugcugaugugguu

SEQ ID NO: 489859 - RNA, 22 nt, Human herpesvirus 3
gguugugucggucucuccaagc

SEQ ID NO: 489860 - RNA, 22 nt, Human herpesvirus 3
ggauacuuggcucuguauuaaa

SEQ ID NO: 489861 - RNA, 22 nt, Human herpesvirus 3
aaacguuaccgcaaaucaaucu

SEQ ID NO: 489862 - RNA, 21 nt, Human herpesvirus 3
aaaagcagaugaugugccgau

SEQ ID NO: 489863 - RNA, 22 nt, Human herpesvirus 3
aagcguuuaauuguuaugccgu

SEQ ID NO: 489864 - RNA, 19 nt, Human herpesvirus 3
ugggaauaauugugcaaac

SEQ ID NO: 489865 - RNA, 22 nt, Human herpesvirus 3
uguauguuggagauagagcgua

SEQ ID NO: 489866 - RNA, 22 nt, Human herpesvirus 3
uguauugauaccacggcggcua

SEQ ID NO: 489867 - RNA, 22 nt, Human herpesvirus 3
cagcagaugaugcuggaguccg

SEQ ID NO: 489868 - RNA, 22 nt, Human herpesvirus 3
ccaaguccccguucauauugca

SEQ ID NO: 489869 - RNA, 21 nt, Human herpesvirus 3
agacgcauggaacgguucgga

SEQ ID NO: 489870 - RNA, 22 nt, Human herpesvirus 3
agaauacguuuaaugucgucuu

SEQ ID NO: 489871 - RNA, 22 nt, Human herpesvirus 3
acucccauuggcaugauaaacg

SEQ ID NO: 489872 - RNA, 22 nt, Human herpesvirus 3
acucuuguagugugagcaaugc

SEQ ID NO: 489873 - RNA, 22 nt, Human herpesvirus 3
gccguguuacugguaauggcgg

SEQ ID NO: 489874 - RNA, 22 nt, Human herpesvirus 3
gccaagauuugcgguaaugcga

SEQ ID NO: 489875 - RNA, 22 nt, Human herpesvirus 3
gauuuucuuccacugacaccuc

SEQ ID NO: 489876 - RNA, 22 nt, Human herpesvirus 3
gcauguugcucgaagagcacau

SEQ ID NO: 489877 - RNA, 22 nt, Human herpesvirus 3
gaaccgggcgcgguaguaacag

SEQ ID NO: 489878 - RNA, 18 nt, Human herpesvirus 3
cuuauauuuuuggaagau

SEQ ID NO: 489879 - RNA, 22 nt, Human herpesvirus 3
cugaccacgagucuccgauucu

SEQ ID NO: 489880 - RNA, 22 nt, Human herpesvirus 3
cguguauaucuguccauggagu

SEQ ID NO: 489881 - RNA, 22 nt, Human herpesvirus 3
cuaauuuaauagggcuaugucc

SEQ ID NO: 489882 - RNA, 22 nt, Human
uggccuggcugcccugucugga

SEQ ID NO: 489883 - RNA, 22 nt, Human
cuguaugauuccauuucuauaa

SEQ ID NO: 489884 - RNA, 22 nt, Human
augugacaguguuugacagaug

SEQ ID NO: 489885 - RNA, 22 nt, Human
uugauguacagaauuguucaca

SEQ ID NO: 489886 - RNA, 22 nt, Human
ugagccaggcucaagugauccu

SEQ ID NO: 489887 - RNA, 22 nt, Human
aaauauagugacacuuauaguc

SEQ ID NO: 489888 - RNA, 22 nt, Human
gccguuagauaauaacaagcau

SEQ ID NO: 489889 - RNA, 22 nt, Human
uggggaaacuauuuccuugucc

SEQ ID NO: 489890 - RNA, 22 nt, Human
acugcguggggagcugugacua

SEQ ID NO: 489891 - RNA, 22 nt, Human
cugggcugcaggaguggggcaa

SEQ ID NO: 489892 - RNA, 22 nt, Human
aaugauauuuauugaauagaug

SEQ ID NO: 489893 - RNA, 23 nt, Human
ucccagccucuucucuugcauac

SEQ ID NO: 489894 - RNA, 22 nt, Human
ucugggcuauauggucucugcu

SEQ ID NO: 489895 - RNA, 21 nt, Human
uauuagcuucuggugcuguuu

SEQ ID NO: 489896 - RNA, 22 nt, Human
uucagcaccuggaauagcaccu

SEQ ID NO: 489897 - RNA, 22 nt, Human
uagcuucaugcuucaccacgcu

SEQ ID NO: 489898 - RNA, 22 nt, Human
guguacaaaaugucuccaugga

SEQ ID NO: 489899 - RNA, 22 nt, Human
guuaaauucgaugauggauaaa

SEQ ID NO: 489900 - RNA, 22 nt, Human
gcuccuggcucuggccaaggga

SEQ ID NO: 489901 - RNA, 22 nt, Human
uugcugaauugaauccuuuggu

SEQ ID NO: 489902 - RNA, 22 nt, Human
uauguacauacaugugcauacg

SEQ ID NO: 489903 - RNA, 22 nt, Human
cugauauucuuugagcugcuaa

SEQ ID NO: 489904 - RNA, 22 nt, Human
augaauugaggaaaacagucgu

SEQ ID NO: 489905 - RNA, 21 nt, Human
uguccaagguaugcacugggg

SEQ ID NO: 489906 - RNA, 22 nt, Human
cuucagcaucuuuuucuugggg

SEQ ID NO: 489907 - RNA, 22 nt, Human
cuuguuuuggaacagagugaau

SEQ ID NO: 489908 - RNA, 22 nt, Human
auuuagugaccugaacugaaac

SEQ ID NO: 489909 - RNA, 23 nt, Human
uuuagcuucccuuuaguuagggg

SEQ ID NO: 489910 - RNA, 22 nt, Human
guccugguuuucacagaccuuu

SEQ ID NO: 489911 - RNA, 22 nt, Human
cagcagcagauucagcgucugg

SEQ ID NO: 489912 - RNA, 22 nt, Human
aggacaugaagaaagggcaagg

SEQ ID NO: 489913 - RNA, 22 nt, Human
gccucuggaguugcuuguaaau

SEQ ID NO: 489914 - RNA, 22 nt, Human
agagccaguuacaacuguggag

SEQ ID NO: 489915 - RNA, 22 nt, Human
gcacuaguguucuucaguaaua

SEQ ID NO: 489916 - RNA, 22 nt, Human
aucuugugugaugaugagaaag

SEQ ID NO: 489917 - RNA, 22 nt, Human
cagcacuaggauauacauuucc

SEQ ID NO: 489918 - RNA, 22 nt, Human
gcuggcucugaugggcuccagg

SEQ ID NO: 489919 - RNA, 22 nt, Human
aggugacugguuuaucuggcag

SEQ ID NO: 489920 - RNA, 22 nt, Human
gaauuacaaagugagacaagcu

SEQ ID NO: 489921 - RNA, 22 nt, Human
gcacauguugcuaguuacuugc

SEQ ID NO: 489922 - RNA, 22 nt, Human
acugccugcuccuggcuccaca

SEQ ID NO: 489923 - RNA, 22 nt, Human
uagauauaagguccuuagaaca

SEQ ID NO: 489924 - RNA, 22 nt, Human
ugauguuuaauacuaugcuuuu

SEQ ID NO: 489925 - RNA, 22 nt, Human
auugcugacucaauaauugaag

SEQ ID NO: 489926 - RNA, 22 nt, Human
uauuucugucagccagauaugg

SEQ ID NO: 489927 - RNA, 22 nt, Human
ugcagcaccacaccuggcuaau

SEQ ID NO: 489928 - RNA, 22 nt, Human
uuguaaaugaccuuuucuaauu

SEQ ID NO: 489929 - RNA, 22 nt, Human
gcucuguggcaggaggucuugu

SEQ ID NO: 489930 - RNA, 22 nt, Human
gcacacagauuaggaaacagaa

SEQ ID NO: 489931 - RNA, 22 nt, Human
auuagcuuccuauaguaagggg

SEQ ID NO: 489932 - RNA, 22 nt, Human
ugggcaggagagaagcuaaaga

SEQ ID NO: 489933 - RNA, 22 nt, Human
acagagucugacagguaggcgc

SEQ ID NO: 489934 - RNA, 22 nt, Human
ucugggccucaccugcugcuca

SEQ ID NO: 489935 - RNA, 22 nt, Human
ucugauuagagcauucuugagu

SEQ ID NO: 489936 - RNA, 22 nt, Human
cuagucacucagcacugacaaa

SEQ ID NO: 489937 - RNA, 22 nt, Human
ccuuagcaacacuuagcaacug

SEQ ID NO: 489938 - RNA, 22 nt, Human
ccugucugaggaggugcucuuu

SEQ ID NO: 489939 - RNA, 22 nt, Human
uggcaggaaauacccugccuag

SEQ ID NO: 489940 - RNA, 22 nt, Human
uguccugggucccugcuagaag

SEQ ID NO: 489941 - RNA, 22 nt, Human
guuagcaugauuccugcucauu

SEQ ID NO: 489942 - RNA, 22 nt, Human
cuccuggaggauagugacuggg

SEQ ID NO: 489943 - RNA, 22 nt, Human
gcccuuagggccacugucacug

SEQ ID NO: 489944 - RNA, 22 nt, Human
cuauuuguacagcauuaguaau

SEQ ID NO: 489945 - RNA, 22 nt, Human
agggcuggaggguacuaguuua

SEQ ID NO: 489946 - RNA, 22 nt, Human
gcaggcaggagcccaacugccu

SEQ ID NO: 489947 - RNA, 22 nt, Human
uuguauuaauugaaaugaaugc

SEQ ID NO: 489948 - RNA, 22 nt, Human
aagacacacacauaugcugagu

SEQ ID NO: 489949 - RNA, 22 nt, Human
uauugugaguucagacuaaaaa

SEQ ID NO: 489950 - RNA, 22 nt, Human
cucugagguccuucccagcucu

SEQ ID NO: 489951 - RNA, 22 nt, Human
ugaaugaucuaguuuuguagac

SEQ ID NO: 489952 - RNA, 22 nt, Human
agagccaggugcugcuguuuga

SEQ ID NO: 489953 - RNA, 19 nt, Human
cuggccuguguccugugcu

SEQ ID NO: 489954 - RNA, 22 nt, Human
auuugugaauuaagcaugucaa

SEQ ID NO: 489955 - RNA, 19 nt, Human
ccagccucucuuccacccc

SEQ ID NO: 489956 - RNA, 22 nt, Human
cuagucacgucuuucaguuacc

SEQ ID NO: 489957 - RNA, 22 nt, Human
augaaugagugcuagguuuguc

SEQ ID NO: 489958 - RNA, 22 nt, Human
cuggcucccgucugguggccau

SEQ ID NO: 489959 - RNA, 22 nt, Human
uugcagcuucuaccacuguuuc

SEQ ID NO: 489960 - RNA, 22 nt, Human
uugugauaaaacauuagacauu

SEQ ID NO: 489961 - RNA, 22 nt, Human
cagcagcaacaauagcggucac

SEQ ID NO: 489962 - RNA, 21 nt, Human
gcuccuggugcugcguggcgc

SEQ ID NO: 489963 - RNA, 22 nt, Human
aaacacugguaugauguauagu

SEQ ID NO: 489964 - RNA, 22 nt, Human
ccagcucugcuugcccagucag

SEQ ID NO: 489965 - RNA, 19 nt, Human
uggaaacuccugauauuag

SEQ ID NO: 489966 - RNA, 22 nt, Human
gagggggcucccugaagccagu

SEQ ID NO: 489967 - RNA, 22 nt, Human
augcccugcucucgggaaggga

SEQ ID NO: 489968 - RNA, 22 nt, Human
agcagcacgaguccacaaaucc

SEQ ID NO: 489969 - RNA, 22 nt, Human
ucuuguuuugaacucaucagga

SEQ ID NO: 489970 - RNA, 18 nt, Human
guguccuggcugcggcgc

SEQ ID NO: 489971 - RNA, 22 nt, Human
agagccagaccauugccgugca

SEQ ID NO: 489972 - RNA, 22 nt, Human
cucagcaccccgacaggacauu

SEQ ID NO: 489973 - RNA, 22 nt, Human
cuagucacacaguaaggacggg

SEQ ID NO: 489974 - RNA, 22 nt, Human
acacagugguguuuacaaaauu

SEQ ID NO: 489975 - RNA, 22 nt, Human
acacauguuuguguagucaguu

SEQ ID NO: 489976 - RNA, 22 nt, Human
cucugcccacgucuugcccaga

SEQ ID NO: 489977 - RNA, 20 nt, Human
ugauauuucuggaaguggag

SEQ ID NO: 489978 - RNA, 22 nt, Human
ucaggacagccagggugcagac

SEQ ID NO: 489979 - RNA, 22 nt, Human
uauguacaucuugagcaaugaa

SEQ ID NO: 489980 - RNA, 22 nt, Human
cuucuccucugaguccugggag

SEQ ID NO: 489981 - RNA, 22 nt, Human
cugagauggucucuuuguuacu

SEQ ID NO: 489982 - RNA, 22 nt, Human
ccuuagcagggccgggccuggg

SEQ ID NO: 489983 - RNA, 22 nt, Human
guauuagcaagaguugugauuu

SEQ ID NO: 489984 - RNA, 22 nt, Human
ugucaauaguuuugaguucucu

SEQ ID NO: 489985 - RNA, 20 nt, Human
uacaggaaucaagacugcau

SEQ ID NO: 489986 - RNA, 22 nt, Human
augaaauaucuugaagaaauuc

SEQ ID NO: 489987 - RNA, 22 nt, Human
ccaaagugauaugugcuguaag

SEQ ID NO: 489988 - RNA, 22 nt, Human
auuauuagacuuauaugguagu

SEQ ID NO: 489989 - RNA, 20 nt, Human
accuggcuuccucuuggcau

SEQ ID NO: 489990 - RNA, 22 nt, Human
ccugucuguauugguuugcuau

SEQ ID NO: 489991 - RNA, 22 nt, Human
gggguuaacaguauugcucaug

SEQ ID NO: 489992 - RNA, 22 nt, Human
aagcuucaucugaugccgaacu

SEQ ID NO: 489993 - RNA, 22 nt, Human
auuagcuuauuguaaggugaaa

SEQ ID NO: 489994 - RNA, 22 nt, Human
cuuguuuuaaacuguuguggcu

SEQ ID NO: 489995 - RNA, 22 nt, Human
auuaauaaaauaccacuuuguu

SEQ ID NO: 489996 - RNA, 22 nt, Human
cuuuagaaaucuggauguauuu

SEQ ID NO: 489997 - RNA, 22 nt, Human
gcuucagcuuugucuccuuggg

SEQ ID NO: 489998 - RNA, 22 nt, Human
caggcacacauccgugagagau

SEQ ID NO: 489999 - RNA, 22 nt, Human
gcggcccgagcaggacgggugg

SEQ ID NO: 490000 - RNA, 22 nt, Human
uguguccuguccccuugcugcu

SEQ ID NO: 490001 - RNA, 22 nt, Human
uucuggcugcagucccuguaau

SEQ ID NO: 490002 - RNA, 22 nt, Human
caguaagucaacaaacaugggg

SEQ ID NO: 490003 - RNA, 22 nt, Human
ucuguacaguaccagauaguaa

SEQ ID NO: 490004 - RNA, 22 nt, Human
gccuggcuuuugccucauguuc

SEQ ID NO: 490005 - RNA, 22 nt, Human
agagccaggaaguggcgugggg

SEQ ID NO: 490006 - RNA, 22 nt, Human
uuuuauuaguggcuagaugggg

SEQ ID NO: 490007 - RNA, 22 nt, Human
uggcccugaggacccagugugg

SEQ ID NO: 490008 - RNA, 22 nt, Human
aaaugauggaaaugaggcugaa

SEQ ID NO: 490009 - RNA, 21 nt, Human
acacagaggcaucaucacuuu

SEQ ID NO: 490010 - RNA, 22 nt, Human
cugaaucauggucauuaguuua

SEQ ID NO: 490011 - RNA, 22 nt, Human
uuaauaauaaugagcccauuuu

SEQ ID NO: 490012 - RNA, 18 nt, Human
uuaauguggcuuacuaug

SEQ ID NO: 490013 - RNA, 22 nt, Human
ugcugaauugguaguacuguug

SEQ ID NO: 490014 - RNA, 22 nt, Human
gaaugaguuaauauuugcuugg

SEQ ID NO: 490015 - RNA, 22 nt, Human
uccuggcuaguuuugcugaaau

SEQ ID NO: 490016 - RNA, 22 nt, Human
uuacaaagcguugagacaagua

SEQ ID NO: 490017 - RNA, 22 nt, Human
ugcuaauguuucauuuuuagau

SEQ ID NO: 490018 - RNA, 22 nt, Human
uauuuauguggaccauaagccu

SEQ ID NO: 490019 - RNA, 22 nt, Human
acaggcacugucaagucaugaa

SEQ ID NO: 490020 - RNA, 22 nt, Human
ucauuguuucugcuuuucauga

SEQ ID NO: 490021 - RNA, 22 nt, Human
cuuguuuuuaagagauguuuac

SEQ ID NO: 490022 - RNA, 23 nt, Human
uaugugugggucuacuagaaguc

SEQ ID NO: 490023 - RNA, 22 nt, Human
cauuuguaggaugcuucuuguu

SEQ ID NO: 490024 - RNA, 22 nt, Human
uuuuagaaguucacuuggguuu

SEQ ID NO: 490025 - RNA, 22 nt, Human
cucagcacacucccaucuaauu

SEQ ID NO: 490026 - RNA, 22 nt, Human
uuaaauuccagccucauaauag

SEQ ID NO: 490027 - RNA, 22 nt, Human
ugaaugauaugugaaaaggaac

SEQ ID NO: 490028 - RNA, 22 nt, Human
uccuuagcaacacuguuauaau

SEQ ID NO: 490029 - RNA, 22 nt, Human
ugcugaaucauaugguaauucu

SEQ ID NO: 490030 - RNA, 22 nt, Human
auuacaguaacagcuacaaugc

SEQ ID NO: 490031 - RNA, 22 nt, Human
uacagaguuuuccugccaagaa

SEQ ID NO: 490032 - RNA, 17 nt, Human
cagacagauauccuggg

SEQ ID NO: 490033 - RNA, 22 nt, Human
uucagcacuggacagcgagucu

SEQ ID NO: 490034 - RNA, 22 nt, Human
gugcccugagcuuaugcauucu

SEQ ID NO: 490035 - RNA, 22 nt, Human
ucuggcuucccacucugccggg

SEQ ID NO: 490036 - RNA, 22 nt, Human
augcccuguggcaguacauauu

SEQ ID NO: 490037 - RNA, 23 nt, Human
aaauuauugcucuucaauugccu

SEQ ID NO: 490038 - RNA, 22 nt, Human
cacuaguccugguuucaugcua

SEQ ID NO: 490039 - RNA, 22 nt, Human
acaggcuuacuguuucauaggg

SEQ ID NO: 490040 - RNA, 22 nt, Human
gccugguggugugcucaagugg

SEQ ID NO: 490041 - RNA, 22 nt, Human
gugucaauaaauagcggugugg

SEQ ID NO: 490042 - RNA, 22 nt, Human
cuggccuggucuggccucucca

SEQ ID NO: 490043 - RNA, 22 nt, Human
aauuagcugucaaugaggaucu

SEQ ID NO: 490044 - RNA, 22 nt, Human
ugccaccuaguggucuuuaguc

SEQ ID NO: 490045 - RNA, 23 nt, Human
gugugccaagcacugugccagga

SEQ ID NO: 490046 - RNA, 22 nt, Human
gugaaugacuguuuucagcauu

SEQ ID NO: 490047 - RNA, 22 nt, Human
uagcuauuuggaaaauuccaau

SEQ ID NO: 490048 - RNA, 22 nt, Human
gcacaggcuccggaggagagcu

SEQ ID NO: 490049 - RNA, 22 nt, Human
uuagucacuucuuccuucauca

SEQ ID NO: 490050 - RNA, 22 nt, Human
aaacaguuucauuuucaugacc

SEQ ID NO: 490051 - RNA, 22 nt, Human
accuguuuaccugcaccuguuu

SEQ ID NO: 490052 - RNA, 22 nt, Human
guuuagaauucuaacuuuaagg

SEQ ID NO: 490053 - RNA, 22 nt, Human
auuauuuguguccacagaauac

SEQ ID NO: 490054 - RNA, 22 nt, Human
ccaggccucaccugcccaccua

SEQ ID NO: 490055 - RNA, 22 nt, Human
ggacacacaaguuaucuaauga

SEQ ID NO: 490056 - RNA, 22 nt, Human
ucacacagcuuggaguuauggu

SEQ ID NO: 490057 - RNA, 22 nt, Human
auuagcuucugugcauggacuu

SEQ ID NO: 490058 - RNA, 22 nt, Human
uugaaauggcagcagcugaccu

SEQ ID NO: 490059 - RNA, 22 nt, Human
guuuagaaugaaacuuuugagc

SEQ ID NO: 490060 - RNA, 22 nt, Human
acacacagcgccuaccaugugc

SEQ ID NO: 490061 - RNA, 22 nt, Human
gugcccugggccuucagggcca

SEQ ID NO: 490062 - RNA, 19 nt, Human
cacaacuucgcuugauucc

SEQ ID NO: 490063 - RNA, 22 nt, Human
cccuggcuuaaaaaccucauau

SEQ ID NO: 490064 - RNA, 22 nt, Human
auuagcuuuaaaccacagcagu

SEQ ID NO: 490065 - RNA, 22 nt, Human
ccugggcuccacuccaagagca

SEQ ID NO: 490066 - RNA, 22 nt, Human
accuggcugguugugauuccca

SEQ ID NO: 490067 - RNA, 22 nt, Human
uggaaacuagagaguuuguauu

SEQ ID NO: 490068 - RNA, 22 nt, Human
gccugccuuuguaugacccuga

SEQ ID NO: 490069 - RNA, 22 nt, Human
gucccuggucuaccguggcuuc

SEQ ID NO: 490070 - RNA, 22 nt, Human
ucugggccucaguuucuucauc

SEQ ID NO: 490071 - RNA, 22 nt, Human
uguguacacaaguauauauaca

SEQ ID NO: 490072 - RNA, 22 nt, Human
augguacagauaauacaugcug

SEQ ID NO: 490073 - RNA, 20 nt, Human
aauuagcuuaagucaaucag

SEQ ID NO: 490074 - RNA, 22 nt, Human
cuuuagaauuugauauaaucaa

SEQ ID NO: 490075 - RNA, 22 nt, Human
caagcagagagguuagaacaca

SEQ ID NO: 490076 - RNA, 22 nt, Human
cugggucugggccuccuggagu

SEQ ID NO: 490077 - RNA, 22 nt, Human
ucugggccgcugcguuccauga

SEQ ID NO: 490078 - RNA, 22 nt, Human
uugcugaaaguggcaagaagua

SEQ ID NO: 490079 - RNA, 23 nt, Human
acugccugugccgaucucucuca

SEQ ID NO: 490080 - RNA, 22 nt, Human
agaaaugacacacaugagacau

SEQ ID NO: 490081 - RNA, 22 nt, Human
gcugagugauugauauuuuagu

SEQ ID NO: 490082 - RNA, 22 nt, Human
uucuuacaaguauuccaggucc

SEQ ID NO: 490083 - RNA, 22 nt, Human
auugcugacuuuaauauuauau

SEQ ID NO: 490084 - RNA, 22 nt, Human
augaacaaugacuacauauuga

SEQ ID NO: 490085 - RNA, 22 nt, Human
uguugugacccagaccaagaag

SEQ ID NO: 490086 - RNA, 22 nt, Human
ggccuguccagccugccuggcu

SEQ ID NO: 490087 - RNA, 22 nt, Human
gcuggcuguguuucaucucuga

SEQ ID NO: 490088 - RNA, 22 nt, Human
ugugcugacaagaucagaaggu

SEQ ID NO: 490089 - RNA, 22 nt, Human
uucuucaaccaucuacauaaac

SEQ ID NO: 490090 - RNA, 22 nt, Human
gccucuggggcagcugagucau

SEQ ID NO: 490091 - RNA, 22 nt, Human
ucuuguuucuguauauaaugac

SEQ ID NO: 490092 - RNA, 22 nt, Human
cagagacaguuucacagggucu

SEQ ID NO: 490093 - RNA, 22 nt, Human
cagacacagauaugcauauggc

SEQ ID NO: 490094 - RNA, 19 nt, Human
uucuuacaacacccuggga

SEQ ID NO: 490095 - RNA, 22 nt, Human
uguacauacauagauauacaca

SEQ ID NO: 490096 - RNA, 22 nt, Human
acagagaugucagauuggcagc

SEQ ID NO: 490097 - RNA, 23 nt, Human
uugauuuagcugggauugcaugc

SEQ ID NO: 490098 - RNA, 22 nt, Human
ggcccugagcugaaguacugug

SEQ ID NO: 490099 - RNA, 22 nt, Human
auuuugauaaucauguuagaga

SEQ ID NO: 490100 - RNA, 22 nt, Human
aacagacagaaaaaugugaucu

SEQ ID NO: 490101 - RNA, 22 nt, Human
ccugggccucacccagcucuug

SEQ ID NO: 490102 - RNA, 22 nt, Human
uccuggcugaguucccaagucg

SEQ ID NO: 490103 - RNA, 18 nt, Human
uaaugauaagccuugaag

SEQ ID NO: 490104 - RNA, 22 nt, Human
aaaaaugaaacggcugguuggc

SEQ ID NO: 490105 - RNA, 22 nt, Human
cccagccucuggauucugcccu

SEQ ID NO: 490106 - RNA, 22 nt, Human
cagagacauguggccugcacgu

SEQ ID NO: 490107 - RNA, 22 nt, Human
ugguccugucucaaggagccuu

SEQ ID NO: 490108 - RNA, 22 nt, Human
ucuuguuucuucuaagcagcag

SEQ ID NO: 490109 - RNA, 22 nt, Human
ccacuaguuuaauaccuuccuu

SEQ ID NO: 490110 - RNA, 22 nt, Human
aaucuugaguguuacucucauu

SEQ ID NO: 490111 - RNA, 22 nt, Human
uuuagcuugaaaguuuuggagg

SEQ ID NO: 490112 - RNA, 22 nt, Human
cuuagcuucucugcaucugugu

SEQ ID NO: 490113 - RNA, 22 nt, Human
acaugcuaugagagauuacuuc

SEQ ID NO: 490114 - RNA, 22 nt, Human
accaggguugagucagcugcgu

SEQ ID NO: 490115 - RNA, 22 nt, Human
gugcccuggaugacuuuggucu

SEQ ID NO: 490116 - RNA, 22 nt, Human
gaggccuggaccagccacagag

SEQ ID NO: 490117 - RNA, 22 nt, Human
cugaguggguuucugcuuguca

SEQ ID NO: 490118 - RNA, 22 nt, Human
ugggcaaaugucacuuucuuuu

SEQ ID NO: 490119 - RNA, 23 nt, Human
ugguaauagggagcagaagguag

SEQ ID NO: 490120 - RNA, 22 nt, Human
uugauguaaagugauucauggg

SEQ ID NO: 490121 - RNA, 22 nt, Human
gcuucaugaaaaucacugguca

SEQ ID NO: 490122 - RNA, 22 nt, Human
augcuuggaugcugccauggga

SEQ ID NO: 490123 - RNA, 22 nt, Human
ugccugaacaugaauaguuuau

SEQ ID NO: 490124 - RNA, 22 nt, Human
aauuuguggccacauuguggaa

SEQ ID NO: 490125 - RNA, 22 nt, Human
gcccuuagguacuacuuauucu

SEQ ID NO: 490126 - RNA, 22 nt, Human
gccuggcuauggccucccccau

SEQ ID NO: 490127 - RNA, 20 nt, Human
aacauugaaagucuagaaga

SEQ ID NO: 490128 - RNA, 22 nt, Human
aauaauuagugggacagagaac

SEQ ID NO: 490129 - RNA, 22 nt, Human
auauuugugguaaagguaagaa

SEQ ID NO: 490130 - RNA, 22 nt, Human
cuggcugguucccugcuccagg

SEQ ID NO: 490131 - RNA, 22 nt, Human
uguaaugagaaagagagugaau

SEQ ID NO: 490132 - RNA, 22 nt, Human
auagauuagcccuauaguuuua

SEQ ID NO: 490133 - RNA, 22 nt, Human
aauaauauuccucugugugcgu

SEQ ID NO: 490134 - RNA, 22 nt, Human
auucucaauuuugccaaagggu

SEQ ID NO: 490135 - RNA, 22 nt, Human
uccuguggucuggaaggaaugg

SEQ ID NO: 490136 - RNA, 22 nt, Human
ucauuuaugcaggaauggcaua

SEQ ID NO: 490137 - RNA, 22 nt, Human
ccugggcucaagugaugguccc

SEQ ID NO: 490138 - RNA, 23 nt, Human
guuuucaacacaauaaauguaac

SEQ ID NO: 490139 - RNA, 19 nt, Human
auaaauaaaaagugggaga

SEQ ID NO: 490140 - RNA, 22 nt, Human
cugggucuggcuacugcuuccu

SEQ ID NO: 490141 - RNA, 22 nt, Human
uacuaggaagcagcugcauugg

SEQ ID NO: 490142 - RNA, 22 nt, Human
gacacagaaggucacauguuca

SEQ ID NO: 490143 - RNA, 22 nt, Human
ccuggguuaguaucuguuucca

SEQ ID NO: 490144 - RNA, 22 nt, Human
ugaugauuucauuucuagcugu

SEQ ID NO: 490145 - RNA, 22 nt, Human
cguguacacgcacacguguccu

SEQ ID NO: 490146 - RNA, 22 nt, Human
ggcugccuucauagaccauggg

SEQ ID NO: 490147 - RNA, 22 nt, Human
auuuugugaacccucaagcaau

SEQ ID NO: 490148 - RNA, 22 nt, Human
uguuccugaaugccuggcuggc

SEQ ID NO: 490149 - RNA, 22 nt, Human
uugcugaaaucuaugacauccu

SEQ ID NO: 490150 - RNA, 22 nt, Human
agucacaugggauuagaaccca

SEQ ID NO: 490151 - RNA, 22 nt, Human
gucccuggguagcucaguggcu

SEQ ID NO: 490152 - RNA, 22 nt, Human
uuaucacuuaugagcuuuuugc

SEQ ID NO: 490153 - RNA, 22 nt, Human
ugaaacuuuugagguucuucca

SEQ ID NO: 490154 - RNA, 19 nt, Human
caacaguacugguuugucc

SEQ ID NO: 490155 - RNA, 22 nt, Human
uuugugaauggaauccacagac

SEQ ID NO: 490156 - RNA, 22 nt, Human
uuacaguuuaguccaagccaga

SEQ ID NO: 490157 - RNA, 22 nt, Human
acaggacagguaggauucgcag

SEQ ID NO: 490158 - RNA, 22 nt, Human
aucuuucuaugguacuuucucc

SEQ ID NO: 490159 - RNA, 22 nt, Human
uucauguaccguguaccaggca

SEQ ID NO: 490160 - RNA, 22 nt, Human
gcuucagcccaucccaguacau

SEQ ID NO: 490161 - RNA, 22 nt, Human
gugaaugaaaggaugauucuuu

SEQ ID NO: 490162 - RNA, 19 nt, Human
cuguccugguuuggucccu

SEQ ID NO: 490163 - RNA, 22 nt, Human
uugcagcuuagugauguuaucu

SEQ ID NO: 490164 - RNA, 22 nt, Human
guccucugcuucaugcccugau

SEQ ID NO: 490165 - RNA, 22 nt, Human
ucuuuuagaaaaguugaaugua

SEQ ID NO: 490166 - RNA, 22 nt, Human
uacacagaaauuguguagggau

SEQ ID NO: 490167 - RNA, 22 nt, Human
acacauguuuccaaaagcaccc

SEQ ID NO: 490168 - RNA, 22 nt, Human
ccuggcucgcugaccucagggg

SEQ ID NO: 490169 - RNA, 19 nt, Human
ccaggccuggcgucuccgc

SEQ ID NO: 490170 - RNA, 22 nt, Human
auguccuggucuagcuuccggg

SEQ ID NO: 490171 - RNA, 22 nt, Human
aauuagcuuuccgccaucacac

SEQ ID NO: 490172 - RNA, 22 nt, Human
uccuggcuccugaucugucacu

SEQ ID NO: 490173 - RNA, 22 nt, Human
cccuuagcucaauuucuugccc

SEQ ID NO: 490174 - RNA, 22 nt, Human
acuuagcauuauguaauuacua

SEQ ID NO: 490175 - RNA, 22 nt, Human
cuggcuccaaauucugauguuc

SEQ ID NO: 490176 - RNA, 22 nt, Human
gggaaacuuucacaauguccag

SEQ ID NO: 490177 - RNA, 20 nt, Human
ucagccuugaaugcuugaaa

SEQ ID NO: 490178 - RNA, 22 nt, Human
auugugaauagugccgcaguaa

SEQ ID NO: 490179 - RNA, 18 nt, Human
gcucuggcucaccuccag

SEQ ID NO: 490180 - RNA, 22 nt, Human
ugaaacuuauucaguuucuacc

SEQ ID NO: 490181 - RNA, 22 nt, Human
cugaauaauacagacuagcuuc

SEQ ID NO: 490182 - RNA, 22 nt, Human
gcauuaauguaagacccacucc

SEQ ID NO: 490183 - RNA, 22 nt, Human
ggagccagagggaugcaguuga

SEQ ID NO: 490184 - RNA, 22 nt, Human
cuguccugcccacccugcaggg

SEQ ID NO: 490185 - RNA, 22 nt, Human
ugaucacaagucugaagaauga

SEQ ID NO: 490186 - RNA, 21 nt, Human
gcugggccuguacuugcccug

SEQ ID NO: 490187 - RNA, 22 nt, Human
uauguguaaucaaacacaugcu

SEQ ID NO: 490188 - RNA, 22 nt, Human
ucauaaaugcagugucauaaau

SEQ ID NO: 490189 - RNA, 22 nt, Human
guguccugcauuggcucugccc

SEQ ID NO: 490190 - RNA, 19 nt, Human
ccccuuagggguuaagccu

SEQ ID NO: 490191 - RNA, 22 nt, Human
cugucuuuucauacuuucccuc

SEQ ID NO: 490192 - RNA, 22 nt, Human
uaaaugauuuauguaugugaaa

SEQ ID NO: 490193 - RNA, 20 nt, Human
uuuauuggccuuucaggaac

SEQ ID NO: 490194 - RNA, 22 nt, Human
cuuguuuugaaagcaguggcca

SEQ ID NO: 490195 - RNA, 22 nt, Human
uguugaguauauaccuacaagu

SEQ ID NO: 490196 - RNA, 19 nt, Human
uguccuguccugcucugac

SEQ ID NO: 490197 - RNA, 22 nt, Human
gugaaugacauauuuuguacug

SEQ ID NO: 490198 - RNA, 22 nt, Human
gcauuuaaauuugaacuucaga

SEQ ID NO: 490199 - RNA, 22 nt, Human
gccuguggccacugcgucugca

SEQ ID NO: 490200 - RNA, 22 nt, Human
uaguuuguaaugaggagaagua

SEQ ID NO: 490201 - RNA, 22 nt, Human
acacauguuuacagucuucagu

SEQ ID NO: 490202 - RNA, 22 nt, Human
uuuuagaaauacugauuuagug

SEQ ID NO: 490203 - RNA, 22 nt, Human
acugucaccuaaauuuucauug

SEQ ID NO: 490204 - RNA, 22 nt, Human
ucagccuuugaagggcugcagg

SEQ ID NO: 490205 - RNA, 22 nt, Human
agggugaaucucacaacucuua

SEQ ID NO: 490206 - RNA, 22 nt, Human
uaaaaugaucucucauguucuu

SEQ ID NO: 490207 - RNA, 22 nt, Human
gcuuccagggcucagucacugc

SEQ ID NO: 490208 - RNA, 22 nt, Human
cugcccugcucuccgggaucuu

SEQ ID NO: 490209 - RNA, 22 nt, Human
uccuggcugucacucggguuga

SEQ ID NO: 490210 - RNA, 22 nt, Human
gaauauauuggugaaaauaguu

SEQ ID NO: 490211 - RNA, 22 nt, Human
acagagucucagggaugaaagc

SEQ ID NO: 490212 - RNA, 22 nt, Human
gggaaacuggggacugaaucug

SEQ ID NO: 490213 - RNA, 22 nt, Human
cuguaugaaauugucauuuuua

SEQ ID NO: 490214 - RNA, 21 nt, Human
uuacaugguuuaucauaugga

SEQ ID NO: 490215 - RNA, 22 nt, Human
guugcugauggcaagauuccag

SEQ ID NO: 490216 - RNA, 22 nt, Human
ugauauggcuaaagaaaguuuc

SEQ ID NO: 490217 - RNA, 20 nt, Human
cuuagcuucuaagguucugg

SEQ ID NO: 490218 - RNA, 22 nt, Human
ucuuuaauauaaaggaaugaau

SEQ ID NO: 490219 - RNA, 22 nt, Human
ggaacuccugcuccaagcagcu

SEQ ID NO: 490220 - RNA, 22 nt, Human
gcucuggcuacuguggcuaccg

SEQ ID NO: 490221 - RNA, 22 nt, Human
cccuuagcuccaagggguuugg

SEQ ID NO: 490222 - RNA, 22 nt, Human
uauuagcuucugguuuuguucu

SEQ ID NO: 490223 - RNA, 22 nt, Human
ggaaagcucagaucuuguugga

SEQ ID NO: 490224 - RNA, 20 nt, Human
ucugggcuucccccagcucc

SEQ ID NO: 490225 - RNA, 22 nt, Human
uucagcacuguuauggauuugc

SEQ ID NO: 490226 - RNA, 17 nt, Human
auuugugauguaacguc

SEQ ID NO: 490227 - RNA, 22 nt, Human
uuaaauuagucaagcuucucug

SEQ ID NO: 490228 - RNA, 22 nt, Human
uucuuacagaguuuacagagcc

SEQ ID NO: 490229 - RNA, 22 nt, Human
uccugugucucagcgugaagca

SEQ ID NO: 490230 - RNA, 22 nt, Human
auaagcuuugcuggagagaccu

SEQ ID NO: 490231 - RNA, 22 nt, Human
uuagccauuuuauucagcaggu

SEQ ID NO: 490232 - RNA, 22 nt, Human
gcugccugcacagagcugcuuu

SEQ ID NO: 490233 - RNA, 22 nt, Human
gaauacauuggaaaucagaaua

SEQ ID NO: 490234 - RNA, 22 nt, Human
caggacacuacagaugggaggg

SEQ ID NO: 490235 - RNA, 22 nt, Human
uugcccugcggguccugcgcaa

SEQ ID NO: 490236 - RNA, 22 nt, Human
augauauuugcaaugugcuugc

SEQ ID NO: 490237 - RNA, 22 nt, Human
agcuucagugucaggcccgugg

SEQ ID NO: 490238 - RNA, 22 nt, Human
augauauuauucuagcccagag

SEQ ID NO: 490239 - RNA, 18 nt, Human
aaaauaacaaaguuggcu

SEQ ID NO: 490240 - RNA, 22 nt, Human
guagcauucugaguucgcagag

SEQ ID NO: 490241 - RNA, 22 nt, Human
ccagccucacuggcaucaccua

SEQ ID NO: 490242 - RNA, 22 nt, Human
uggcuccucccugugugugcgu

SEQ ID NO: 490243 - RNA, 22 nt, Human
gcagaggugaccagcagcaggg

SEQ ID NO: 490244 - RNA, 22 nt, Human
gccuggcuuggggcucaguggu

SEQ ID NO: 490245 - RNA, 22 nt, Human
cauuugugugggaacccaucag

SEQ ID NO: 490246 - RNA, 22 nt, Human
guccuggugccaccugcgggau

SEQ ID NO: 490247 - RNA, 22 nt, Human
ugugcacauucuaggacuagua

SEQ ID NO: 490248 - RNA, 17 nt, Human
gucaacaggauuucuuu

SEQ ID NO: 490249 - RNA, 19 nt, Human
uccagccugcuguuucucu

SEQ ID NO: 490250 - RNA, 22 nt, Human
caugugugggacccuuagguug

SEQ ID NO: 490251 - RNA, 22 nt, Human
aucugugaucaagacagacagu

SEQ ID NO: 490252 - RNA, 19 nt, Human
ugggcagguucaguaaugg

SEQ ID NO: 490253 - RNA, 22 nt, Human
agaaugauagcuaguauuuacu

SEQ ID NO: 490254 - RNA, 23 nt, Human
acagacauuccauaauguacacc

SEQ ID NO: 490255 - RNA, 22 nt, Human
ugcugaauaaauaaagucuauu

SEQ ID NO: 490256 - RNA, 22 nt, Human
cugggccaucagaggggcugga

SEQ ID NO: 490257 - RNA, 22 nt, Human
aaggccugcucagcugucugug

SEQ ID NO: 490258 - RNA, 22 nt, Human
uauguguguaugacagacagag

SEQ ID NO: 490259 - RNA, 22 nt, Human
uucuggcuccagaugcuucugu

SEQ ID NO: 490260 - RNA, 22 nt, Human
gacagacaggaggcauucaggg

SEQ ID NO: 490261 - RNA, 18 nt, Human
gcacagagcccaggcucu

SEQ ID NO: 490262 - RNA, 22 nt, Human
gcuggcagcauuagacccuggg

SEQ ID NO: 490263 - RNA, 17 nt, Human
guaaggcuugcagaugc

SEQ ID NO: 490264 - RNA, 22 nt, Human
agcuucagguggucuuguuucu

SEQ ID NO: 490265 - RNA, 22 nt, Human
gcuuagcaucuuacaaugcuga

SEQ ID NO: 490266 - RNA, 22 nt, Human
cugggcccaggcggcucucgga

SEQ ID NO: 490267 - RNA, 22 nt, Human
uuuguaaaggccugaauuucag

SEQ ID NO: 490268 - RNA, 19 nt, Human
agcaggcagguggcccagg

SEQ ID NO: 490269 - RNA, 18 nt, Human
ucauuuguuuugcaugaa

SEQ ID NO: 490270 - RNA, 22 nt, Human
gcugcuggcaucuagggggugg

SEQ ID NO: 490271 - RNA, 22 nt, Human
agggccugugaauucucccugc

SEQ ID NO: 490272 - RNA, 22 nt, Human
uuagcauucugccuccuauauc

SEQ ID NO: 490273 - RNA, 22 nt, Human
ccuucagccuagaacuugagag

SEQ ID NO: 490274 - RNA, 22 nt, Human
acaguauaccauugugacuuug

SEQ ID NO: 490275 - RNA, 22 nt, Human
augauguuaccaguacuuagag

SEQ ID NO: 490276 - RNA, 22 nt, Human
uuuuagaaucagguugucuggg

SEQ ID NO: 490277 - RNA, 22 nt, Human
uguguccauucaggcacugacc

SEQ ID NO: 490278 - RNA, 22 nt, Human
uagcuucaguggcccuagacac

SEQ ID NO: 490279 - RNA, 22 nt, Human
cccagccugaucucggccagcu

SEQ ID NO: 490280 - RNA, 17 nt, Human
cagucacaggucuuuuc

SEQ ID NO: 490281 - RNA, 22 nt, Human
uuucuacagcuggugcaacuuu

SEQ ID NO: 490282 - RNA, 22 nt, Human
acuagucauuuaggugauauua

SEQ ID NO: 490283 - RNA, 21 nt, Human
guggcucugccaggacugaaa

SEQ ID NO: 490284 - RNA, 22 nt, Human
uucagugucaauuuuuaaauau

SEQ ID NO: 490285 - RNA, 22 nt, Human
gagcuccacuuagcaaggccac

SEQ ID NO: 490286 - RNA, 22 nt, Human
cucuguuuggcgcugcuccuuc

SEQ ID NO: 490287 - RNA, 22 nt, Human
cuauuauuuccucaucuauaaa

SEQ ID NO: 490288 - RNA, 22 nt, Human
cagcacugcugcuguacacaca

SEQ ID NO: 490289 - RNA, 22 nt, Human
gcacaaggagcaguguaugaaa

SEQ ID NO: 490290 - RNA, 22 nt, Human
uuugcugaccccauucugaguc

SEQ ID NO: 490291 - RNA, 22 nt, Human
uucauguaggcugcaaugcaca

SEQ ID NO: 490292 - RNA, 22 nt, Human
agcaggcaggcccagcggcugg

SEQ ID NO: 490293 - RNA, 23 nt, Human
uauuugcuacugguaauucugga

SEQ ID NO: 490294 - RNA, 22 nt, Human
ccagcacucugucccagcuucc

SEQ ID NO: 490295 - RNA, 21 nt, Human
ucugaugguagaugagaugug

SEQ ID NO: 490296 - RNA, 22 nt, Human
gcuggcugaguucugucgucug

SEQ ID NO: 490297 - RNA, 22 nt, Human
auuuaugacuggugaauagaac

SEQ ID NO: 490298 - RNA, 22 nt, Human
uauuuuugccucucagauaaaa

SEQ ID NO: 490299 - RNA, 22 nt, Human
guaacauuauucaugagauaca

SEQ ID NO: 490300 - RNA, 22 nt, Human
agacagaacagaauaauuguug

SEQ ID NO: 490301 - RNA, 22 nt, Human
ucagcacuauacauuuugaaua

SEQ ID NO: 490302 - RNA, 22 nt, Human
agcuucaguuuucuauuguuaa

SEQ ID NO: 490303 - RNA, 22 nt, Human
auauuugucaucugccuuaguu

SEQ ID NO: 490304 - RNA, 22 nt, Human
uuuugugaauaguuuaucuaag

SEQ ID NO: 490305 - RNA, 22 nt, Human
uggcuucaagucuagguucuac

SEQ ID NO: 490306 - RNA, 22 nt, Human
uuauuuacaacucuucucuucc

SEQ ID NO: 490307 - RNA, 22 nt, Human
cauuuguaguuaaaaaugucuc

SEQ ID NO: 490308 - RNA, 22 nt, Human
gagacacacccaagguuaugag

SEQ ID NO: 490309 - RNA, 22 nt, Human
gcaucuaauccaguccagcauc

SEQ ID NO: 490310 - RNA, 22 nt, Human
uuuugugauggcauuacauuua

SEQ ID NO: 490311 - RNA, 22 nt, Human
ucaagaauuuggauaagaaaug

SEQ ID NO: 490312 - RNA, 22 nt, Human
uacagaagcugagacacugaga

SEQ ID NO: 490313 - RNA, 22 nt, Human
uggcuccuuuccgggucuccag

SEQ ID NO: 490314 - RNA, 19 nt, Human
cuuaugcagcugagcuugg

SEQ ID NO: 490315 - RNA, 22 nt, Human
cugcccugcagcuccacggacu

SEQ ID NO: 490316 - RNA, 22 nt, Human
caugaaauguuagaauuagaca

SEQ ID NO: 490317 - RNA, 22 nt, Human
cugcccugcuggagaucacagu

SEQ ID NO: 490318 - RNA, 21 nt, Human
gcucaggcucuugacagagca

SEQ ID NO: 490319 - RNA, 22 nt, Human
uuagcauuucaguacacauguu

SEQ ID NO: 490320 - RNA, 22 nt, Human
uuuaauuuguauuucuagaggg

SEQ ID NO: 490321 - RNA, 22 nt, Human
cuguccuguacuuugaggcccu

SEQ ID NO: 490322 - RNA, 22 nt, Human
gugugccaccacugacaggauu

SEQ ID NO: 490323 - RNA, 21 nt, Human
cggaaacucggcucugguucc

SEQ ID NO: 490324 - RNA, 22 nt, Human
uagcacuacuuagguacagcca

SEQ ID NO: 490325 - RNA, 20 nt, Human
aagcuucacuucauuugauc

SEQ ID NO: 490326 - RNA, 22 nt, Human
uaugugcauaugcauacacaca

SEQ ID NO: 490327 - RNA, 22 nt, Human
aucuugugcugacaaaacacau

SEQ ID NO: 490328 - RNA, 22 nt, Human
uguccuggaaaaauggagaguu

SEQ ID NO: 490329 - RNA, 22 nt, Human
gggaaacugcaacucagagagg

SEQ ID NO: 490330 - RNA, 22 nt, Human
gccuggcugccggccuuggcaa

SEQ ID NO: 490331 - RNA, 22 nt, Human
ucucugggaaugggccugggua

SEQ ID NO: 490332 - RNA, 22 nt, Human
uuuaaauuuguguuuagagggu

SEQ ID NO: 490333 - RNA, 22 nt, Human
uuugugaacacugcgcagaacu

SEQ ID NO: 490334 - RNA, 22 nt, Human
agguccuguccuuggucucuga

SEQ ID NO: 490335 - RNA, 22 nt, Human
uacaggaagucucaguacagua

SEQ ID NO: 490336 - RNA, 22 nt, Human
uccuggcuaacacggugacacc

SEQ ID NO: 490337 - RNA, 22 nt, Human
gaggguggccuuuagagcccau

SEQ ID NO: 490338 - RNA, 22 nt, Human
agagggggaaaauagagguguu

SEQ ID NO: 490339 - RNA, 22 nt, Human
ugucagggcuggacacagcugc

SEQ ID NO: 490340 - RNA, 22 nt, Human
uagucacaugaucacaggaucg

SEQ ID NO: 490341 - RNA, 22 nt, Human
augcccuggacuagcuauacuu

SEQ ID NO: 490342 - RNA, 22 nt, Human
cucuggcuguuugcagcucaag

SEQ ID NO: 490343 - RNA, 21 nt, Human
gggaaacucugcuuaacagag

SEQ ID NO: 490344 - RNA, 22 nt, Human
auauuuguugaguucuuaugau

SEQ ID NO: 490345 - RNA, 22 nt, Human
gucugggcaagggagauggcgc

SEQ ID NO: 490346 - RNA, 23 nt, Human
gcucuggcagcuugugucagcac

SEQ ID NO: 490347 - RNA, 22 nt, Human
cagcccugcacgcugccuccgc

SEQ ID NO: 490348 - RNA, 22 nt, Human
gcuggcuguguuccuucugcca

SEQ ID NO: 490349 - RNA, 22 nt, Human
aaauacauacacuguacguggc

SEQ ID NO: 490350 - RNA, 22 nt, Human
uugcugaaggccucuugggguu

SEQ ID NO: 490351 - RNA, 22 nt, Human
uucuuacauauuuucauauggu

SEQ ID NO: 490352 - RNA, 22 nt, Human
uacauagaggguaauagcauca

SEQ ID NO: 490353 - RNA, 22 nt, Human
auuagcuuuaaagacuuugauu

SEQ ID NO: 490354 - RNA, 21 nt, Human
cuuguuuugaaaggacuggcc

SEQ ID NO: 490355 - RNA, 22 nt, Human
cacauuauucuaaagagguacu

SEQ ID NO: 490356 - RNA, 22 nt, Human
aaagacauuagcuuagauguca

SEQ ID NO: 490357 - RNA, 22 nt, Human
uccuuggcaagcugcaauggga

SEQ ID NO: 490358 - RNA, 22 nt, Human
cauguguguggacgagcguggc

SEQ ID NO: 490359 - RNA, 22 nt, Human
ugauauuuuucacuggccucug

SEQ ID NO: 490360 - RNA, 22 nt, Human
agagccaggcaggcaauguuga

SEQ ID NO: 490361 - RNA, 22 nt, Human
auacauuagcucauaugauuaa

SEQ ID NO: 490362 - RNA, 22 nt, Human
agagccaguuguuaagcacuua

SEQ ID NO: 490363 - RNA, 22 nt, Human
gcuauugugacagcuuuucgcc

SEQ ID NO: 490364 - RNA, 22 nt, Human
ucagcacugucuauuagugaga

SEQ ID NO: 490365 - RNA, 22 nt, Human
uguguacacaugacaggcaccc

SEQ ID NO: 490366 - RNA, 22 nt, Human
gacacagaaugggugcucagua

SEQ ID NO: 490367 - RNA, 22 nt, Human
uugcugaagugaagguauguuu

SEQ ID NO: 490368 - RNA, 22 nt, Human
uccuuagacaaagagugggcuu

SEQ ID NO: 490369 - RNA, 22 nt, Human
uaauuacagagguuugccaguu

SEQ ID NO: 490370 - RNA, 22 nt, Human
gcuacagguauauagaugaaac

SEQ ID NO: 490371 - RNA, 22 nt, Human
uagaaugaccuccucuuagcuu

SEQ ID NO: 490372 - RNA, 22 nt, Human
uaauuauuaugacaacaauugc

SEQ ID NO: 490373 - RNA, 22 nt, Human
aggaagcuuggggcagggcuac

SEQ ID NO: 490374 - RNA, 22 nt, Human
uuuauucuugagagugagaaga

SEQ ID NO: 490375 - RNA, 19 nt, Human
guguacagcucagugaauu

SEQ ID NO: 490376 - RNA, 15 nt, Human
auuauuugugcucag

SEQ ID NO: 490377 - RNA, 22 nt, Human
gcugccuggagcucagccugcc

SEQ ID NO: 490378 - RNA, 22 nt, Human
agagccagcauuugacacuggc

SEQ ID NO: 490379 - RNA, 22 nt, Human
ccuggcugagggaccucgggua

SEQ ID NO: 490380 - RNA, 22 nt, Human
auuuguugaauaaauuaguauu

SEQ ID NO: 490381 - RNA, 22 nt, Human
gaccacagauuccuaaguggca

SEQ ID NO: 490382 - RNA, 22 nt, Human
guccagccccugacucccaggc

SEQ ID NO: 490383 - RNA, 22 nt, Human
gaauaacagcaaguuugcaggc

SEQ ID NO: 490384 - RNA, 22 nt, Human
ucuggcugcguggccuuuagca

SEQ ID NO: 490385 - RNA, 22 nt, Human
ucagcacucgcuaccuaguaaa

SEQ ID NO: 490386 - RNA, 22 nt, Human
ugccugggaucugugcccuuug

SEQ ID NO: 490387 - RNA, 21 nt, Human
ucugucuuccucagccuaagg

SEQ ID NO: 490388 - RNA, 22 nt, Human
acaaaauagaguucuccccugg

SEQ ID NO: 490389 - RNA, 22 nt, Human
aggcagcauuucugcuuaucca

SEQ ID NO: 490390 - RNA, 22 nt, Human
ggcugccuacuuucccagaguu

SEQ ID NO: 490391 - RNA, 22 nt, Human
cauuguuauagcauuacacacc

SEQ ID NO: 490392 - RNA, 22 nt, Human
agcuucaggaacaggcagccug

SEQ ID NO: 490393 - RNA, 20 nt, Human
gcacagagaugagcaaagua

SEQ ID NO: 490394 - RNA, 22 nt, Human
cucaguccuuauuugccucuac

SEQ ID NO: 490395 - RNA, 22 nt, Human
ugccaggcuccggaacgacagu

SEQ ID NO: 490396 - RNA, 22 nt, Human
uucauuugggaugagucagaag

SEQ ID NO: 490397 - RNA, 22 nt, Human
uugcagcugcaguaaauguuca

SEQ ID NO: 490398 - RNA, 22 nt, Human
cuucauuucaggcugaagaaua

SEQ ID NO: 490399 - RNA, 22 nt, Human
cagcacaucuccaagaauuucu

SEQ ID NO: 490400 - RNA, 22 nt, Human
uagcauuauuuccucuuuuugu

SEQ ID NO: 490401 - RNA, 22 nt, Human
cugcccugugaggguccuuggg

SEQ ID NO: 490402 - RNA, 23 nt, Human
ggcuccuggauucaaauccugcc

SEQ ID NO: 490403 - RNA, 22 nt, Human
auuucugauaaacguaagcugc

SEQ ID NO: 490404 - RNA, 22 nt, Human
guuagcaugacuuagaaucagg

SEQ ID NO: 490405 - RNA, 22 nt, Human
gugauaagacaguaggcacaag

SEQ ID NO: 490406 - RNA, 22 nt, Human
guauuagcugccuuggagcuaa

SEQ ID NO: 490407 - RNA, 22 nt, Human
gguuuuaacuacagaauugcaa

SEQ ID NO: 490408 - RNA, 22 nt, Human
gaaaugaugucugugcugccac

SEQ ID NO: 490409 - RNA, 22 nt, Human
cuccugucagaagcauccugag

SEQ ID NO: 490410 - RNA, 22 nt, Human
cugcccuguuuggacagcccgg

SEQ ID NO: 490411 - RNA, 22 nt, Human
cauuagcaggcacuaagaaggu

SEQ ID NO: 490412 - RNA, 22 nt, Human
gugcccuggcucacagugucuc

SEQ ID NO: 490413 - RNA, 22 nt, Human
acuuguuuacaagcaguucuga

SEQ ID NO: 490414 - RNA, 22 nt, Human
caggcacacugucuacacugag

SEQ ID NO: 490415 - RNA, 20 nt, Human
acacaugucaagcuaaaggc

SEQ ID NO: 490416 - RNA, 22 nt, Human
uuuugugagcuccuuggaggua

SEQ ID NO: 490417 - RNA, 22 nt, Human
uugauauucugagaagcugaag

SEQ ID NO: 490418 - RNA, 22 nt, Human
uuuaaauguguucuuaguagcu

SEQ ID NO: 490419 - RNA, 22 nt, Human
uuauuuguaucaaggacgguug

SEQ ID NO: 490420 - RNA, 23 nt, Human
uagcagcauuuuuagccucuguc

SEQ ID NO: 490421 - RNA, 20 nt, Human
caucuugaaggucuuccaca

SEQ ID NO: 490422 - RNA, 22 nt, Human
ggaaacuuggaugccagcacuc

SEQ ID NO: 490423 - RNA, 23 nt, Human
ucacuagucaagugccuuugagu

SEQ ID NO: 490424 - RNA, 22 nt, Human
agaaaauauucauugagaggcu

SEQ ID NO: 490425 - RNA, 22 nt, Human
ccuggcucaggcacgcauggcu

SEQ ID NO: 490426 - RNA, 22 nt, Human
auaguguguuagugacauaggc

SEQ ID NO: 490427 - RNA, 22 nt, Human
cugaaugaguggauuuuucauu

SEQ ID NO: 490428 - RNA, 22 nt, Human
cauaguaaauaaugcagaugau

SEQ ID NO: 490429 - RNA, 23 nt, Human
agcaggcaucuguggcacaaggc

SEQ ID NO: 490430 - RNA, 22 nt, Human
uguccuggagacacaagguggu

SEQ ID NO: 490431 - RNA, 22 nt, Human
gugcccuggggugaaccccugg

SEQ ID NO: 490432 - RNA, 19 nt, Human
aaugacugaguacauuguc

SEQ ID NO: 490433 - RNA, 22 nt, Human
caguagucuuuuuccuccuaga

SEQ ID NO: 490434 - RNA, 18 nt, Human
uucagcagcagacacacu

SEQ ID NO: 490435 - RNA, 22 nt, Human
cuuuacaaagcaauuuugucuc

SEQ ID NO: 490436 - RNA, 22 nt, Human
aagcacuaggucacacaaguua

SEQ ID NO: 490437 - RNA, 22 nt, Human
ccucuggggugagugggccacu

SEQ ID NO: 490438 - RNA, 21 nt, Human
ucacuagugccuucugucauu

SEQ ID NO: 490439 - RNA, 22 nt, Human
uuuugugacacuucuugagaca

SEQ ID NO: 490440 - RNA, 22 nt, Human
cuggcuucugggccagggcaga

SEQ ID NO: 490441 - RNA, 22 nt, Human
ucugaauguuaggaaacuuucu

SEQ ID NO: 490442 - RNA, 22 nt, Human
cagagacacuuaacaggaaugg

SEQ ID NO: 490443 - RNA, 22 nt, Human
ugcuucaggagaugucaccaug

SEQ ID NO: 490444 - RNA, 22 nt, Human
aaaacauuuuacugccaucuca

SEQ ID NO: 490445 - RNA, 22 nt, Human
uuauuacacugaaagaauugcg

SEQ ID NO: 490446 - RNA, 22 nt, Human
ccucugggcagguagcagcagc

SEQ ID NO: 490447 - RNA, 20 nt, Human
caaagacaugcuaggggugg

SEQ ID NO: 490448 - RNA, 22 nt, Human
gaauuacaugacccugaguaga

SEQ ID NO: 490449 - RNA, 22 nt, Human
cagagccacuuggagaugagaa

SEQ ID NO: 490450 - RNA, 22 nt, Human
agcuucauggaaccugaggcua

SEQ ID NO: 490451 - RNA, 22 nt, Human
cugcccuggucccauggcugau

SEQ ID NO: 490452 - RNA, 22 nt, Human
uaugauaugcacuuuaucagaa

SEQ ID NO: 490453 - RNA, 22 nt, Human
ugaagcuggaaguuagguagac

SEQ ID NO: 490454 - RNA, 17 nt, Human
uuuagaauacaauguuu

SEQ ID NO: 490455 - RNA, 22 nt, Human
ggaaucuuugaaggauuuuaag

SEQ ID NO: 490456 - RNA, 22 nt, Human
accuagaauuuaaaacauugcu

SEQ ID NO: 490457 - RNA, 22 nt, Human
guccucugggcuuugagcaguc

SEQ ID NO: 490458 - RNA, 21 nt, Human
gccuggcuagaagcuccuagc

SEQ ID NO: 490459 - RNA, 22 nt, Human
cugaggucuauuuugaaacugc

SEQ ID NO: 490460 - RNA, 22 nt, Human
ucucaucugccauuugcaggag

SEQ ID NO: 490461 - RNA, 22 nt, Human
uagcauuagucagauauguuuu

SEQ ID NO: 490462 - RNA, 22 nt, Human
acugggccaggugugggugagu

SEQ ID NO: 490463 - RNA, 22 nt, Human
gauaauuauaggcuaagccacu

SEQ ID NO: 490464 - RNA, 23 nt, Human
augugcacaucuccuuguccacc

SEQ ID NO: 490465 - RNA, 22 nt, Human
augcccuggggcuaccucugag

SEQ ID NO: 490466 - RNA, 22 nt, Human
gugccuggaaugcgccucggcg

SEQ ID NO: 490467 - RNA, 22 nt, Human
aggaaacuucagaguuuugguc

SEQ ID NO: 490468 - RNA, 22 nt, Human
uggcuccucuucuggguguccc

SEQ ID NO: 490469 - RNA, 23 nt, Human
uguaccaggaguuucagcagacu

SEQ ID NO: 490470 - RNA, 22 nt, Human
cauacauauguggaugucauau

SEQ ID NO: 490471 - RNA, 22 nt, Human
gcuuagcaaugugacaagaugc

SEQ ID NO: 490472 - RNA, 22 nt, Human
gcucucagaaguaacuugucca

SEQ ID NO: 490473 - RNA, 23 nt, Human
cugggcuguccugaggucaccuc

SEQ ID NO: 490474 - RNA, 22 nt, Human
ugagccaggcccagugggguca

SEQ ID NO: 490475 - RNA, 22 nt, Human
uuuagcaucgaaguaaauuuag

SEQ ID NO: 490476 - RNA, 22 nt, Human
cacaccucagccauguggaggc

SEQ ID NO: 490477 - RNA, 23 nt, Human
uacagaaggaguagucacuaaga

SEQ ID NO: 490478 - RNA, 22 nt, Human
guguccugccacccugggcuuu

SEQ ID NO: 490479 - RNA, 22 nt, Human
uauuuagaacagacaauagaaa

SEQ ID NO: 490480 - RNA, 22 nt, Human
cauaacauguacauauaaaugc

SEQ ID NO: 490481 - RNA, 22 nt, Human
cuuagcuuuuccagcuucuaga

SEQ ID NO: 490482 - RNA, 22 nt, Human
cugccuggguucaaguccuguu

SEQ ID NO: 490483 - RNA, 22 nt, Human
cuggcucauagagcagcuccaa

SEQ ID NO: 490484 - RNA, 22 nt, Human
cacacagaaccgcucgccacuu

SEQ ID NO: 490485 - RNA, 20 nt, Human
auguccuguugcugccccag

SEQ ID NO: 490486 - RNA, 22 nt, Human
uucagcacuuuguuuugcucau

SEQ ID NO: 490487 - RNA, 22 nt, Human
ucauuuguucaucugcucuucu

SEQ ID NO: 490488 - RNA, 22 nt, Human
uccagccuugccacuuuucugu

SEQ ID NO: 490489 - RNA, 21 nt, Human
gccuggcucucacuggccugg

SEQ ID NO: 490490 - RNA, 18 nt, Human
gcugaaugucugcuuugc

SEQ ID NO: 490491 - RNA, 22 nt, Human
acacaguaaauauguauugaau

SEQ ID NO: 490492 - RNA, 22 nt, Human
agagccugugauugucaucacc

SEQ ID NO: 490493 - RNA, 22 nt, Human
aauaauuauuugagagcagacc

SEQ ID NO: 490494 - RNA, 22 nt, Human
caggucagaggcgcagccccca

SEQ ID NO: 490495 - RNA, 22 nt, Human
guuccugaugcuuugaaauuca

SEQ ID NO: 490496 - RNA, 21 nt, Human
ccugggagaucagcugccuuc

SEQ ID NO: 490497 - RNA, 22 nt, Human
auuauuaggugcucucugacaa

SEQ ID NO: 490498 - RNA, 22 nt, Human
ugcccuuaugaaagaggcccaa

SEQ ID NO: 490499 - RNA, 22 nt, Human
uaauuuugucacagugacaugc

SEQ ID NO: 490500 - RNA, 22 nt, Human
agccuguggaucccugcacugg

SEQ ID NO: 490501 - RNA, 22 nt, Human
gugcccugaaagaguuaauuca

SEQ ID NO: 490502 - RNA, 22 nt, Human
aagcaaaugugggugcagaauu

SEQ ID NO: 490503 - RNA, 22 nt, Human
gccuggcugcuuagccuacuuc

SEQ ID NO: 490504 - RNA, 22 nt, Human
uccuggcuccagcagcucuucc

SEQ ID NO: 490505 - RNA, 22 nt, Human
cuuaaauuuucaucuacaagaa

SEQ ID NO: 490506 - RNA, 22 nt, Human
agaauacaauuguucaguaaua

SEQ ID NO: 490507 - RNA, 22 nt, Human
gcugccuccaaucugugccccg

SEQ ID NO: 490508 - RNA, 22 nt, Human
uggcacagaaaaaugcuccauu

SEQ ID NO: 490509 - RNA, 22 nt, Human
caaugauaauggcuguauuuau

SEQ ID NO: 490510 - RNA, 22 nt, Human
caaaugauaccuauuacuaggc

SEQ ID NO: 490511 - RNA, 19 nt, Human
ugugauaagcagaauucca

SEQ ID NO: 490512 - RNA, 22 nt, Human
gaaaucuuuuccaauuguuuag

SEQ ID NO: 490513 - RNA, 22 nt, Human
uuaggcaugcaagauuaagcuc

SEQ ID NO: 490514 - RNA, 22 nt, Human
ucugggcuuuacacugugcuua

SEQ ID NO: 490515 - RNA, 22 nt, Human
uucccuucuaguuuugagagac

SEQ ID NO: 490516 - RNA, 22 nt, Human
uccuguguuacugccuggagcg

SEQ ID NO: 490517 - RNA, 22 nt, Human
gugcccugacacaccuggugug

SEQ ID NO: 490518 - RNA, 22 nt, Human
aagcuucagugugagcauguaa

SEQ ID NO: 490519 - RNA, 22 nt, Human
cagugggugaugaguccugggg

SEQ ID NO: 490520 - RNA, 22 nt, Human
ugagccaugggacuccaaggga

SEQ ID NO: 490521 - RNA, 22 nt, Human
gugcccuguugcacacuugagg

SEQ ID NO: 490522 - RNA, 22 nt, Human
cagcuucuuagucuuuccuugu

SEQ ID NO: 490523 - RNA, 22 nt, Human
gugugcaugcauagacaccaca

SEQ ID NO: 490524 - RNA, 22 nt, Human
ugagccagucugucugggugaa

SEQ ID NO: 490525 - RNA, 22 nt, Human
cuucagcaacuuuggaauguuu

SEQ ID NO: 490526 - RNA, 22 nt, Human
agcugaagcucagcccaguagu

SEQ ID NO: 490527 - RNA, 22 nt, Human
ucugucuuagccaucucaggcu

SEQ ID NO: 490528 - RNA, 22 nt, Human
uuguccuggcccaaaugucaac

SEQ ID NO: 490529 - RNA, 22 nt, Human
gauauuuuugcagacaccuggg

SEQ ID NO: 490530 - RNA, 22 nt, Human
uccuggcucucuacaaaccaga

SEQ ID NO: 490531 - RNA, 22 nt, Human
gggccaaggggagcuggaaggg

SEQ ID NO: 490532 - RNA, 22 nt, Human
caucuugaugcuuugacagguu

SEQ ID NO: 490533 - RNA, 22 nt, Human
uccuggcucuaaguccugagug

SEQ ID NO: 490534 - RNA, 19 nt, Human
agccagaguggcccagggg

SEQ ID NO: 490535 - RNA, 22 nt, Human
ucuggcugcugcgugagugcuu

SEQ ID NO: 490536 - RNA, 22 nt, Human
guugugaauagugccgcaauaa

SEQ ID NO: 490537 - RNA, 22 nt, Human
ucaugccaaaauccaguggcuu

SEQ ID NO: 490538 - RNA, 22 nt, Human
guccuggccucuggggguaugg

SEQ ID NO: 490539 - RNA, 22 nt, Human
uguacauagaucuugaaaauua

SEQ ID NO: 490540 - RNA, 22 nt, Human
uuacuuuggauggucaagaaag

SEQ ID NO: 490541 - RNA, 22 nt, Human
accagggcagccgagguguguc

SEQ ID NO: 490542 - RNA, 22 nt, Human
cccuuagccaggaaaucgaccu

SEQ ID NO: 490543 - RNA, 22 nt, Human
uggccuggcccugaggcccugu

SEQ ID NO: 490544 - RNA, 22 nt, Human
ugagccaggcacugcuccugga

SEQ ID NO: 490545 - RNA, 22 nt, Human
gucagggcacagugacagcucc

SEQ ID NO: 490546 - RNA, 22 nt, Human
ucugcccacugcucugcugccc

SEQ ID NO: 490547 - RNA, 22 nt, Human
auguccuguuuuggcuugcucu

SEQ ID NO: 490548 - RNA, 22 nt, Human
cuuugugauaguguuaagacca

SEQ ID NO: 490549 - RNA, 22 nt, Human
guugcugaaagcccugacuggc

SEQ ID NO: 490550 - RNA, 22 nt, Human
uuuguugaguuacagagaugaa

SEQ ID NO: 490551 - RNA, 22 nt, Human
gcugaaguugccuauuuuaaua

SEQ ID NO: 490552 - RNA, 18 nt, Human
cccuuagccuuuccucuc

SEQ ID NO: 490553 - RNA, 22 nt, Human
agcuucagcuugcagcugugau

SEQ ID NO: 490554 - RNA, 22 nt, Human
cacagaaauuauuaggaugcuu

SEQ ID NO: 490555 - RNA, 22 nt, Human
gauaagcuaacccaagcccuuu

SEQ ID NO: 490556 - RNA, 22 nt, Human
uccuggcucgauugcuaccaau

SEQ ID NO: 490557 - RNA, 22 nt, Human
aauaacuucauguaacauuuaa

SEQ ID NO: 490558 - RNA, 22 nt, Human
caaaaugaugugauuuuauugu

SEQ ID NO: 490559 - RNA, 22 nt, Human
uucuuuuacauuaagauuucag

SEQ ID NO: 490560 - RNA, 22 nt, Human
ugcugaaugggugauuuuggag

SEQ ID NO: 490561 - RNA, 22 nt, Human
uguguacaucucuucucacauu

SEQ ID NO: 490562 - RNA, 22 nt, Human
augccaggaacaaacaguggug

SEQ ID NO: 490563 - RNA, 22 nt, Human
gaaacauuuguugaguacuugc

SEQ ID NO: 490564 - RNA, 22 nt, Human
uucuuucucaacaugaauguuu

SEQ ID NO: 490565 - RNA, 22 nt, Human
aaucuucauuuugacaagauuc

SEQ ID NO: 490566 - RNA, 22 nt, Human
augaugugugcugaucaagcuu

SEQ ID NO: 490567 - RNA, 22 nt, Human
uuuauuuggcaucucugccaag

SEQ ID NO: 490568 - RNA, 22 nt, Human
auauuuguaaaauucugugucu

SEQ ID NO: 490569 - RNA, 22 nt, Human
auugcugaaaguauuuuaugac

SEQ ID NO: 490570 - RNA, 22 nt, Human
cccagguccccaccugucugcu

SEQ ID NO: 490571 - RNA, 22 nt, Human
cuuguuuucuucugcagucuau

SEQ ID NO: 490572 - RNA, 22 nt, Human
aggcagguuacaaaaacuuuau

SEQ ID NO: 490573 - RNA, 22 nt, Human
ugaaugauguauaauauugaga

SEQ ID NO: 490574 - RNA, 22 nt, Human
ucagcacugaaauucuucacau

SEQ ID NO: 490575 - RNA, 22 nt, Human
cauaauuauaaacgcaaguuca

SEQ ID NO: 490576 - RNA, 22 nt, Human
accaggaggccuggagcacaaa

SEQ ID NO: 490577 - RNA, 22 nt, Human
uuccagcccgcgacuuguucag

SEQ ID NO: 490578 - RNA, 22 nt, Human
uuucacaucagagguagauuag

SEQ ID NO: 490579 - RNA, 22 nt, Human
uuugugaacaaacaugaagaug

SEQ ID NO: 490580 - RNA, 22 nt, Human
gagacacaguuaucaggcauac

SEQ ID NO: 490581 - RNA, 22 nt, Human
agacagaccauggcuauucaga

SEQ ID NO: 490582 - RNA, 18 nt, Human
ugggcugccuggccucug

SEQ ID NO: 490583 - RNA, 22 nt, Human
agucagggguuggacggggcca

SEQ ID NO: 490584 - RNA, 22 nt, Human
cagcacuaugacauuuaauucu

SEQ ID NO: 490585 - RNA, 22 nt, Human
agauuacagcaugggaauggga

SEQ ID NO: 490586 - RNA, 22 nt, Human
gcuggcuuugcacugggugcau

SEQ ID NO: 490587 - RNA, 22 nt, Human
gcugccugguuucucagcugca

SEQ ID NO: 490588 - RNA, 22 nt, Human
guugcugaaauuaauauuggag

SEQ ID NO: 490589 - RNA, 22 nt, Human
auuagcauugcuacucucaaga

SEQ ID NO: 490590 - RNA, 22 nt, Human
ugcccuggcuggagugcagugg

SEQ ID NO: 490591 - RNA, 22 nt, Human
uccuuagcugugaaaugagaau

SEQ ID NO: 490592 - RNA, 22 nt, Human
augcuuuuccaggagaaauaua

SEQ ID NO: 490593 - RNA, 22 nt, Human
ugucucugaaauauguggcucc

SEQ ID NO: 490594 - RNA, 22 nt, Human
cucagggcaguauggcugagag

SEQ ID NO: 490595 - RNA, 22 nt, Human
ugcugaaucaaaacaaagguuu

SEQ ID NO: 490596 - RNA, 22 nt, Human
aagcagauuggggauuuccaug

SEQ ID NO: 490597 - RNA, 22 nt, Human
acagauguggaguuugcaugau

SEQ ID NO: 490598 - RNA, 22 nt, Human
guauuagcuguuagcuacauca

SEQ ID NO: 490599 - RNA, 22 nt, Human
auucagcacaucuuuguacagc

SEQ ID NO: 490600 - RNA, 22 nt, Human
caugauauaaaguaguagauaa

SEQ ID NO: 490601 - RNA, 22 nt, Human
gauuagcucuagaucugggcua

SEQ ID NO: 490602 - RNA, 22 nt, Human
auuugucaaaacacagagaaca

SEQ ID NO: 490603 - RNA, 22 nt, Human
ugaggauggcagugugcucagc

SEQ ID NO: 490604 - RNA, 22 nt, Human
uuuauuagauuaucaaagaggu

SEQ ID NO: 490605 - RNA, 22 nt, Human
ggagccagaaaugcugugguug

SEQ ID NO: 490606 - RNA, 22 nt, Human
aaugacuaauaaguuuuacugu

SEQ ID NO: 490607 - RNA, 20 nt, Human
ugcauuaaguggcauugagc

SEQ ID NO: 490608 - RNA, 22 nt, Human
cacaggaccaauucacauucca

SEQ ID NO: 490609 - RNA, 20 nt, Human
agcauuugaaauaugacuau

SEQ ID NO: 490610 - RNA, 22 nt, Human
uuuaaauucugucugccgcuua

SEQ ID NO: 490611 - RNA, 22 nt, Human
gggaaacugaauucaggacucu

SEQ ID NO: 490612 - RNA, 22 nt, Human
ucucugggguagggcccaggac

SEQ ID NO: 490613 - RNA, 21 nt, Human
ugcuggcugaaaggcacagag

SEQ ID NO: 490614 - RNA, 18 nt, Human
uuauuuguuacagcacau

SEQ ID NO: 490615 - RNA, 22 nt, Human
uaucagcaucuccucaaagaua

SEQ ID NO: 490616 - RNA, 22 nt, Human
augugcagcuuuucuagagaag

SEQ ID NO: 490617 - RNA, 22 nt, Human
gugcugauugggagcugggauu

SEQ ID NO: 490618 - RNA, 22 nt, Human
auuuaauuuacauuugacagag

SEQ ID NO: 490619 - RNA, 22 nt, Human
ggcagagucagaggugguucug

SEQ ID NO: 490620 - RNA, 22 nt, Human
uacagagaguacagcauccaca

SEQ ID NO: 490621 - RNA, 22 nt, Human
gcuggauuggagcaauagaguc

SEQ ID NO: 490622 - RNA, 22 nt, Human
aaaugcucuccaaaaugaaagu

SEQ ID NO: 490623 - RNA, 22 nt, Human
aauaagacacacaacugucaag

SEQ ID NO: 490624 - RNA, 22 nt, Human
ucauuuguugcuguuaccugag

SEQ ID NO: 490625 - RNA, 22 nt, Human
cagcagcagagauacugguuuc

SEQ ID NO: 490626 - RNA, 22 nt, Human
aaaaaugaauucuucaguggca

SEQ ID NO: 490627 - RNA, 22 nt, Human
uuaccaagcucugcauguuaag

SEQ ID NO: 490628 - RNA, 22 nt, Human
ugugccuacugauagagccaag

SEQ ID NO: 490629 - RNA, 22 nt, Human
uguccuggaucaugccucugaa

SEQ ID NO: 490630 - RNA, 22 nt, Human
uccuagaacuccaggacagucc

SEQ ID NO: 490631 - RNA, 22 nt, Human
uagcacuauuuuucacuauccu

SEQ ID NO: 490632 - RNA, 22 nt, Human
auuagcuuugguggaaaggagu

SEQ ID NO: 490633 - RNA, 22 nt, Human
ucucugggaucagguggcccag

SEQ ID NO: 490634 - RNA, 22 nt, Human
uguccugggucaaccaggucga

SEQ ID NO: 490635 - RNA, 22 nt, Human
accuggcuucagagucuggcca

SEQ ID NO: 490636 - RNA, 22 nt, Human
cagaugugccuccagggcuuug

SEQ ID NO: 490637 - RNA, 22 nt, Human
caaacauugcuaccagagguuu

SEQ ID NO: 490638 - RNA, 22 nt, Human
cagcagcacucugcgggucccc

SEQ ID NO: 490639 - RNA, 22 nt, Human
cagcagcaguggcugcagaaca

SEQ ID NO: 490640 - RNA, 22 nt, Human
uuguuuguaugcugagaagaau

SEQ ID NO: 490641 - RNA, 22 nt, Human
gccucuggucccucaugcugug

SEQ ID NO: 490642 - RNA, 22 nt, Human
ugauauuugcugacugcauugu

SEQ ID NO: 490643 - RNA, 23 nt, Human
ucugggccacuugucugcacuuc

SEQ ID NO: 490644 - RNA, 22 nt, Human
uugcccugucuuaagcuggcaa

SEQ ID NO: 490645 - RNA, 22 nt, Human
aauaagcugcuaggaacuuagu

SEQ ID NO: 490646 - RNA, 22 nt, Human
cauuuguaucugggcugcugug

SEQ ID NO: 490647 - RNA, 22 nt, Human
cagcacuaauccugcaauuucu

SEQ ID NO: 490648 - RNA, 22 nt, Human
ugcugaaugggauauguugagc

SEQ ID NO: 490649 - RNA, 22 nt, Human
agagccaggccaggccggggca

SEQ ID NO: 490650 - RNA, 22 nt, Human
uguccuggguggaugcuucauu

SEQ ID NO: 490651 - RNA, 22 nt, Human
uccuagaagauggaucagagaa

SEQ ID NO: 490652 - RNA, 22 nt, Human
cugcccuggguuuuaugggagu

SEQ ID NO: 490653 - RNA, 22 nt, Human
acacuaguggaaauugauuugu

SEQ ID NO: 490654 - RNA, 22 nt, Human
ucugaaugcacuuaguuaccaa

SEQ ID NO: 490655 - RNA, 22 nt, Human
ccuggacucaggcugugggcac

SEQ ID NO: 490656 - RNA, 22 nt, Human
uuacaaaguucugaguucaaac

SEQ ID NO: 490657 - RNA, 22 nt, Human
cauuuauugguuaggccagcag

SEQ ID NO: 490658 - RNA, 22 nt, Human
ugauauuuuaugagcuuucaua

SEQ ID NO: 490659 - RNA, 23 nt, Human
aaguagauaacacuguucugaga

SEQ ID NO: 490660 - RNA, 22 nt, Human
ugugugugcaggagagcaggug

SEQ ID NO: 490661 - RNA, 22 nt, Human
uggcuccuucauucuccugcca

SEQ ID NO: 490662 - RNA, 22 nt, Human
uguccugugccaccuuccugag

SEQ ID NO: 490663 - RNA, 22 nt, Human
gccuggcugaggccucugcuaa

SEQ ID NO: 490664 - RNA, 22 nt, Human
uccuggcuccuggagaccugcu

SEQ ID NO: 490665 - RNA, 22 nt, Human
gggaaacuagaagcaggguuau

SEQ ID NO: 490666 - RNA, 20 nt, Human
uccagcacccucacagagaa

SEQ ID NO: 490667 - RNA, 23 nt, Human
ugaaugauuguacugagcuuuua

SEQ ID NO: 490668 - RNA, 20 nt, Human
acaugaacagggcuacagca

SEQ ID NO: 490669 - RNA, 22 nt, Human
uuagcauuuucugggcugaaau

SEQ ID NO: 490670 - RNA, 22 nt, Human
uauguguggcagcugggagugu

SEQ ID NO: 490671 - RNA, 22 nt, Human
agcauguaaagcucuuagcacc

SEQ ID NO: 490672 - RNA, 22 nt, Human
acaggugguaaaauggacuguc

SEQ ID NO: 490673 - RNA, 22 nt, Human
cucugggcaggacgccaggccu

SEQ ID NO: 490674 - RNA, 22 nt, Human
auguguacaaccaagcacuaaa

SEQ ID NO: 490675 - RNA, 22 nt, Human
cuggcuccucaggacugcggga

SEQ ID NO: 490676 - RNA, 21 nt, Human
ugcacagggcccaggagagcc

SEQ ID NO: 490677 - RNA, 22 nt, Human
uguacacaaccuacagucugcu

SEQ ID NO: 490678 - RNA, 22 nt, Human
gaauagauccucauuuauugau

SEQ ID NO: 490679 - RNA, 22 nt, Human
auuauuugaguuccucucuacc

SEQ ID NO: 490680 - RNA, 22 nt, Human
acugggcccagugguguggcug

SEQ ID NO: 490681 - RNA, 22 nt, Human
gcuucagccucacacugauauc

SEQ ID NO: 490682 - RNA, 22 nt, Human
aaugauauagcagacauagccu

SEQ ID NO: 490683 - RNA, 22 nt, Human
aguccaaggccauacaguugug

SEQ ID NO: 490684 - RNA, 22 nt, Human
gcacagagccugguaccgagaa

SEQ ID NO: 490685 - RNA, 22 nt, Human
cacagauaccuagugaaacaua

SEQ ID NO: 490686 - RNA, 22 nt, Human
uuuguuuucaaugugucauuca

SEQ ID NO: 490687 - RNA, 22 nt, Human
cugcccuggccacugugcccag

SEQ ID NO: 490688 - RNA, 22 nt, Human
uugcugaaagguagcugugugg

SEQ ID NO: 490689 - RNA, 23 nt, Human
uuugugaaaguguugagaggaga

SEQ ID NO: 490690 - RNA, 22 nt, Human
uuguuuuaagccagucugccua

SEQ ID NO: 490691 - RNA, 22 nt, Human
agguccugucuaucacccucgc

SEQ ID NO: 490692 - RNA, 22 nt, Human
ucacacagauugguagagcuga

SEQ ID NO: 490693 - RNA, 22 nt, Human
acagagacaggcagacagucuu

SEQ ID NO: 490694 - RNA, 22 nt, Human
cacaguaaccccaggacuggga

SEQ ID NO: 490695 - RNA, 22 nt, Human
acacccuuguccauagcagaug

SEQ ID NO: 490696 - RNA, 22 nt, Human
acuuugcagggcuugauaucca

SEQ ID NO: 490697 - RNA, 22 nt, Human
aagucacaagcauauaugcauu

SEQ ID NO: 490698 - RNA, 20 nt, Human
auuuggcaugaaguauugau

SEQ ID NO: 490699 - RNA, 22 nt, Human
uccugucuuaaugaucucgugc

SEQ ID NO: 490700 - RNA, 22 nt, Human
ucugggcucuuaguguacccuc

SEQ ID NO: 490701 - RNA, 23 nt, Human
aggaagcuaaguguggcugcgga

SEQ ID NO: 490702 - RNA, 22 nt, Human
aauagauacuacuuagauguag

SEQ ID NO: 490703 - RNA, 21 nt, Human
uucugccuucgaggucucagg

SEQ ID NO: 490704 - RNA, 22 nt, Human
gaccacagaagccuugauaggg

SEQ ID NO: 490705 - RNA, 22 nt, Human
cugcccugacugaccuuuugaa

SEQ ID NO: 490706 - RNA, 22 nt, Human
gggaaacuucugcuaaaaccag

SEQ ID NO: 490707 - RNA, 22 nt, Human
caucagucccacggagcagccc

SEQ ID NO: 490708 - RNA, 22 nt, Human
aaagcagaggugauaugacuua

SEQ ID NO: 490709 - RNA, 21 nt, Human
ucauuugugaucugauuucca

SEQ ID NO: 490710 - RNA, 22 nt, Human
auguccagaggugagucagagc

SEQ ID NO: 490711 - RNA, 22 nt, Human
agcugcagcuuccuaguccagc

SEQ ID NO: 490712 - RNA, 22 nt, Human
gagcccgagcgcguacccggcg

SEQ ID NO: 490713 - RNA, 18 nt, Human
cacaggaaggggaauauc

SEQ ID NO: 490714 - RNA, 22 nt, Human
ccagcucuaaacggcucugugg

SEQ ID NO: 490715 - RNA, 22 nt, Human
aggccaggccuuucuccauucc

SEQ ID NO: 490716 - RNA, 22 nt, Human
gaaugauauauuagcagauuuu

SEQ ID NO: 490717 - RNA, 22 nt, Human
uguacagauaaagacuguaaau

SEQ ID NO: 490718 - RNA, 22 nt, Human
cuucagcagaugugcuagagau

SEQ ID NO: 490719 - RNA, 22 nt, Human
ccugggcucaccaugccuugga

SEQ ID NO: 490720 - RNA, 23 nt, Human
ugguccugccaacggugccccuc

SEQ ID NO: 490721 - RNA, 20 nt, Human
acacaugugcguguucagua

SEQ ID NO: 490722 - RNA, 22 nt, Human
ugcugaauuuacauuuuuguag

SEQ ID NO: 490723 - RNA, 20 nt, Human
uuagcuuuggcaauagugac

SEQ ID NO: 490724 - RNA, 22 nt, Human
gaauaacauuuuuuccuuuaca

SEQ ID NO: 490725 - RNA, 22 nt, Human
auuugugggacuauaaugcagg

SEQ ID NO: 490726 - RNA, 22 nt, Human
ucagcacugauagaagucaaua

SEQ ID NO: 490727 - RNA, 22 nt, Human
cuuagcagaauuccaagcuuga

SEQ ID NO: 490728 - RNA, 22 nt, Human
uggcccugcugggucagagcug

SEQ ID NO: 490729 - RNA, 22 nt, Human
ggaaacuuguuauuguauuuuc

SEQ ID NO: 490730 - RNA, 17 nt, Human
agcaggcacgucagcac

SEQ ID NO: 490731 - RNA, 22 nt, Human
gucugggcucccagggucggcg

SEQ ID NO: 490732 - RNA, 22 nt, Human
ugaaugaugguguguucuugcc

SEQ ID NO: 490733 - RNA, 22 nt, Human
gccuuagcaucuuaaagcugug

SEQ ID NO: 490734 - RNA, 21 nt, Human
uccuggcuuuaugcuaccucu

SEQ ID NO: 490735 - RNA, 17 nt, Human
uuacaacgucaucucug

SEQ ID NO: 490736 - RNA, 22 nt, Human
ugugugccagauacaagcacug

SEQ ID NO: 490737 - RNA, 22 nt, Human
uacaggguauagguacagauga

SEQ ID NO: 490738 - RNA, 22 nt, Human
augcugaacugagauguaacuu

SEQ ID NO: 490739 - RNA, 22 nt, Human
ugucuuuagaaagaagcagaca

SEQ ID NO: 490740 - RNA, 22 nt, Human
cagcagcaaggugaggguggag

SEQ ID NO: 490741 - RNA, 22 nt, Human
auguagcugcagaugauaaugc

SEQ ID NO: 490742 - RNA, 22 nt, Human
ugacacacagggggauggaguu

SEQ ID NO: 490743 - RNA, 22 nt, Human
gaauaacauuggaacccugaag

SEQ ID NO: 490744 - RNA, 22 nt, Human
cugaaugauauaagaucuuucu

SEQ ID NO: 490745 - RNA, 22 nt, Human
ggcacaagguuuaaauaacauc

SEQ ID NO: 490746 - RNA, 22 nt, Human
uccuggcuuagguuuccagaac

SEQ ID NO: 490747 - RNA, 18 nt, Human
ucagucuauuguauaaga

SEQ ID NO: 490748 - RNA, 22 nt, Human
ccagcacuccugucucaagucu

SEQ ID NO: 490749 - RNA, 22 nt, Human
uggaaauuaaaauuccucuuaa

SEQ ID NO: 490750 - RNA, 22 nt, Human
cagcagcagccccaggaagguu

SEQ ID NO: 490751 - RNA, 22 nt, Human
cagagccagcaguggggacagg

SEQ ID NO: 490752 - RNA, 22 nt, Human
uguccuggccaaggccuugcuu

SEQ ID NO: 490753 - RNA, 22 nt, Human
guguacauauugagucugcuga

SEQ ID NO: 490754 - RNA, 22 nt, Human
cagucacacaaguggacuuggg

SEQ ID NO: 490755 - RNA, 22 nt, Human
ucugggccugucucagagcugg

SEQ ID NO: 490756 - RNA, 22 nt, Human
agcagcaccuguccucgcugcu

SEQ ID NO: 490757 - RNA, 22 nt, Human
gcugccuguccugaggaguccg

SEQ ID NO: 490758 - RNA, 22 nt, Human
ucaguccucucuggguuucuua

SEQ ID NO: 490759 - RNA, 22 nt, Human
ugcugaaugugcucccuuuuaa

SEQ ID NO: 490760 - RNA, 21 nt, Human
augaaugauuucuacucuuaa

SEQ ID NO: 490761 - RNA, 22 nt, Human
agagccaggcucccauggggca

SEQ ID NO: 490762 - RNA, 22 nt, Human
ugggcuggcugaggcauucacu

SEQ ID NO: 490763 - RNA, 22 nt, Human
uguacagagacuaccauuaaua

SEQ ID NO: 490764 - RNA, 22 nt, Human
uagucacaaccuucaaguuguc

SEQ ID NO: 490765 - RNA, 22 nt, Human
ucaagacauauuaaaugugcga

SEQ ID NO: 490766 - RNA, 22 nt, Human
auuagcaugccaagcuuuuaga

SEQ ID NO: 490767 - RNA, 22 nt, Human
uuuaucuuuggaucuucagaaa

SEQ ID NO: 490768 - RNA, 22 nt, Human
gucuggcuuuauauuugcuauu

SEQ ID NO: 490769 - RNA, 22 nt, Human
ccagcagcuuuauuggcucucc

SEQ ID NO: 490770 - RNA, 22 nt, Human
ugucccugauccacuggacccc

SEQ ID NO: 490771 - RNA, 22 nt, Human
cugcccugugcacaggaaacug

SEQ ID NO: 490772 - RNA, 22 nt, Human
uuugugaaaugaagucacaacu

SEQ ID NO: 490773 - RNA, 22 nt, Human
aguauaugccagagagauagcu

SEQ ID NO: 490774 - RNA, 22 nt, Human
ccagccugaaaugccucauccu

SEQ ID NO: 490775 - RNA, 22 nt, Human
uuuuagaaguucaugugggauu

SEQ ID NO: 490776 - RNA, 22 nt, Human
auguuuuauguuccacucaagg

SEQ ID NO: 490777 - RNA, 21 nt, Human
caauuacagauggcucagggg

SEQ ID NO: 490778 - RNA, 22 nt, Human
uuaagaagguacucaaagaucu

SEQ ID NO: 490779 - RNA, 22 nt, Human
agucacaggguacacaaggauu

SEQ ID NO: 490780 - RNA, 22 nt, Human
augcccugccaagcaggcuaaa

SEQ ID NO: 490781 - RNA, 22 nt, Human
uucuuuuaauagagauccugug

SEQ ID NO: 490782 - RNA, 22 nt, Human
augcuugggacucccuguagca

SEQ ID NO: 490783 - RNA, 22 nt, Human
ugauuacaguauuugagaucca

SEQ ID NO: 490784 - RNA, 17 nt, Human
aggcagguaagaguuau

SEQ ID NO: 490785 - RNA, 22 nt, Human
aaguaacaucugaacaugaugu

SEQ ID NO: 490786 - RNA, 22 nt, Human
uuuguaaauagcaguacucaug

SEQ ID NO: 490787 - RNA, 22 nt, Human
cagucacauagguauacacaua

SEQ ID NO: 490788 - RNA, 22 nt, Human
gcacagaggaagcacagacucu

SEQ ID NO: 490789 - RNA, 20 nt, Human
ugguccugucccacccacuc

SEQ ID NO: 490790 - RNA, 22 nt, Human
ugggcaggggcccugcuuccgu

SEQ ID NO: 490791 - RNA, 22 nt, Human
uuuuuguggugcagacuaaagc

SEQ ID NO: 490792 - RNA, 22 nt, Human
aagaauguggguggauaugaug

SEQ ID NO: 490793 - RNA, 22 nt, Human
ugcaaagaagccuuugccuucu

SEQ ID NO: 490794 - RNA, 20 nt, Human
agcacuagguguggcaggug

SEQ ID NO: 490795 - RNA, 22 nt, Human
acaacacauguguauaugugug

SEQ ID NO: 490796 - RNA, 22 nt, Human
ccugaggucacaacuugcuuau

SEQ ID NO: 490797 - RNA, 22 nt, Human
cuucagcagccucuugcauaaa

SEQ ID NO: 490798 - RNA, 22 nt, Human
gcagggguggaggcuguccugu

SEQ ID NO: 490799 - RNA, 22 nt, Human
uugcccuguggggccuccagcc

SEQ ID NO: 490800 - RNA, 22 nt, Human
aaagacauggcaagagaugggg

SEQ ID NO: 490801 - RNA, 22 nt, Human
uuacauaguuaaauaguacagc

SEQ ID NO: 490802 - RNA, 22 nt, Human
agagccaggcggcugggcaccu

SEQ ID NO: 490803 - RNA, 22 nt, Human
gucccugcaucaccacgggacu

SEQ ID NO: 490804 - RNA, 22 nt, Human
gccuucugauugcuggacugac

SEQ ID NO: 490805 - RNA, 22 nt, Human
cuuuagaaggguaacggaauua

SEQ ID NO: 490806 - RNA, 22 nt, Human
gccuguggccgacugagagccu

SEQ ID NO: 490807 - RNA, 22 nt, Human
acugggccacauagaccugcug

SEQ ID NO: 490808 - RNA, 22 nt, Human
ugggcuccguugccuggggcag

SEQ ID NO: 490809 - RNA, 20 nt, Human
uaugauaauuacaaaauagu

SEQ ID NO: 490810 - RNA, 22 nt, Human
aaucuucauaaaaaucuaguag

SEQ ID NO: 490811 - RNA, 22 nt, Human
uggaaacucuaccucucuaaga

SEQ ID NO: 490812 - RNA, 22 nt, Human
ucuggccugaaaguccaugcuu

SEQ ID NO: 490813 - RNA, 22 nt, Human
cagcuucauugccugaugucuu

SEQ ID NO: 490814 - RNA, 18 nt, Human
uucuggcucacucaugcu

SEQ ID NO: 490815 - RNA, 22 nt, Human
cuuguuuuggcuaguaugaugu

SEQ ID NO: 490816 - RNA, 22 nt, Human
gacagacacaauugauccauga

SEQ ID NO: 490817 - RNA, 22 nt, Human
uugcugaaguaugaaaaagaca

SEQ ID NO: 490818 - RNA, 22 nt, Human
caggccucaugguguguccuuc

SEQ ID NO: 490819 - RNA, 22 nt, Human
ugguccuggccuugaccccagg

SEQ ID NO: 490820 - RNA, 18 nt, Human
guccacagcccucacagc

SEQ ID NO: 490821 - RNA, 22 nt, Human
aggaaacuggguaugguuauac

SEQ ID NO: 490822 - RNA, 22 nt, Human
ugaagcugugggcaguggagcc

SEQ ID NO: 490823 - RNA, 22 nt, Human
cuuugugaugaggccuaagaca

SEQ ID NO: 490824 - RNA, 22 nt, Human
agagccaggcucuaccuggguu

SEQ ID NO: 490825 - RNA, 22 nt, Human
auaugugugaugcauggacuaa

SEQ ID NO: 490826 - RNA, 22 nt, Human
auguccaggaagucuuaacuca

SEQ ID NO: 490827 - RNA, 22 nt, Human
uagauaauuuggcaucauauug

SEQ ID NO: 490828 - RNA, 22 nt, Human
gcugccugcucacccggccugg

SEQ ID NO: 490829 - RNA, 22 nt, Human
uccuagaacagcccaccuggaa

SEQ ID NO: 490830 - RNA, 22 nt, Human
gaauaauagcagaaauuagcag

SEQ ID NO: 490831 - RNA, 19 nt, Human
agagccagacagcauagga

SEQ ID NO: 490832 - RNA, 19 nt, Human
ccagcccugucacuucuug

SEQ ID NO: 490833 - RNA, 22 nt, Human
cacacaugguagcagguacaag

SEQ ID NO: 490834 - RNA, 22 nt, Human
ucauuuguggaagugauugugg

SEQ ID NO: 490835 - RNA, 22 nt, Human
guauuugucuuguuggucucca

SEQ ID NO: 490836 - RNA, 20 nt, Human
ugccuugggacagugccugu

SEQ ID NO: 490837 - RNA, 22 nt, Human
uucuuucucacucuuuaggaag

SEQ ID NO: 490838 - RNA, 22 nt, Human
uccugggcagaaugggauggcu

SEQ ID NO: 490839 - RNA, 22 nt, Human
gcacacaguagggauucaauga

SEQ ID NO: 490840 - RNA, 22 nt, Human
cucaguccgucccgcuaggugc

SEQ ID NO: 490841 - RNA, 22 nt, Human
uuagcauuguacauuugugcuu

SEQ ID NO: 490842 - RNA, 22 nt, Human
cacagguauauguguauauacu

SEQ ID NO: 490843 - RNA, 22 nt, Human
uuacaaagauuauauucaguua

SEQ ID NO: 490844 - RNA, 22 nt, Human
agacuacauaugccacaugaag

SEQ ID NO: 490845 - RNA, 22 nt, Human
auuugugauaauuuguuacagc

SEQ ID NO: 490846 - RNA, 22 nt, Human
gucacuguauccagguuccagc

SEQ ID NO: 490847 - RNA, 22 nt, Human
aucccagauagugacccucagg

SEQ ID NO: 490848 - RNA, 20 nt, Human
aguguacagacacuagaaau

SEQ ID NO: 490849 - RNA, 22 nt, Human
ccagcacugcucucagacugag

SEQ ID NO: 490850 - RNA, 17 nt, Human
gcacauguguucuuuua

SEQ ID NO: 490851 - RNA, 22 nt, Human
ucugggccugauggcuaaagcc

SEQ ID NO: 490852 - RNA, 22 nt, Human
ucuggcugauucccugggacug

SEQ ID NO: 490853 - RNA, 22 nt, Human
uuccuuuagugucauauacuuu

SEQ ID NO: 490854 - RNA, 22 nt, Human
augcagcugugggcaagaaaug

SEQ ID NO: 490855 - RNA, 23 nt, Human
auguccugcauaguugcuucugu

SEQ ID NO: 490856 - RNA, 22 nt, Human
ugaaaugagcauuuauucuuua

SEQ ID NO: 490857 - RNA, 22 nt, Human
gucugggcaccuggccugggaa

SEQ ID NO: 490858 - RNA, 22 nt, Human
uguccuggggcgacuuggggcc

SEQ ID NO: 490859 - RNA, 22 nt, Human
uuauuuguuuucugagaaguau

SEQ ID NO: 490860 - RNA, 22 nt, Human
cuggcucccuggacauggggcc

SEQ ID NO: 490861 - RNA, 22 nt, Human
ugcacaggugagacucaggaag

SEQ ID NO: 490862 - RNA, 22 nt, Human
uuaaaugaugcauaucauuuag

SEQ ID NO: 490863 - RNA, 22 nt, Human
auuagcuucaaagccaucaacc

SEQ ID NO: 490864 - RNA, 22 nt, Human
acagguguugacucacaggccc

SEQ ID NO: 490865 - RNA, 22 nt, Human
aguggcagagcaggugcuggaa

SEQ ID NO: 490866 - RNA, 22 nt, Human
agcugauacauuucuuguagcc

SEQ ID NO: 490867 - RNA, 22 nt, Human
auuagcuuaucacacaagcugc

SEQ ID NO: 490868 - RNA, 22 nt, Human
agggaaacuagacugccuuucu

SEQ ID NO: 490869 - RNA, 22 nt, Human
cugggccuuugcuuauuaauuu

SEQ ID NO: 490870 - RNA, 22 nt, Human
auuagcauaaguguucggugca

SEQ ID NO: 490871 - RNA, 22 nt, Human
gugauauuuuuaaagauuaagg

SEQ ID NO: 490872 - RNA, 22 nt, Human
ugcugauauauucuaguuuucu

SEQ ID NO: 490873 - RNA, 22 nt, Human
ugauucuguucuccuugagaau

SEQ ID NO: 490874 - RNA, 22 nt, Human
acagacauuuuaagacacuuua

SEQ ID NO: 490875 - RNA, 22 nt, Human
ggcugcugugaccucaggugau

SEQ ID NO: 490876 - RNA, 22 nt, Human
cugaaagaauaagauguuuaca

SEQ ID NO: 490877 - RNA, 22 nt, Human
guuuagaagccaagauuugggu

SEQ ID NO: 490878 - RNA, 22 nt, Human
guaaauaacugguaauuggggu

SEQ ID NO: 490879 - RNA, 22 nt, Human
gccuggcuugccagcccuggcg

SEQ ID NO: 490880 - RNA, 22 nt, Human
gugcccugaguggguaggagag

SEQ ID NO: 490881 - RNA, 22 nt, Human
gagccuggccuccugccucagc

SEQ ID NO: 490882 - RNA, 22 nt, Human
ucagcacuuugaagcagaagga

SEQ ID NO: 490883 - RNA, 22 nt, Human
ccagucuguacuuugcucuguu

SEQ ID NO: 490884 - RNA, 21 nt, Human
gccagccuguuuaccuguggu

SEQ ID NO: 490885 - RNA, 22 nt, Human
uuguccugauuuugcaacuucu

SEQ ID NO: 490886 - RNA, 22 nt, Human
uacagaagcuuuugaaaagaug

SEQ ID NO: 490887 - RNA, 20 nt, Human
cuuagcuaguaagaagcugu

SEQ ID NO: 490888 - RNA, 22 nt, Human
cuuagcagaagcuucagcuuca

SEQ ID NO: 490889 - RNA, 22 nt, Human
uuucauuauacagcuucauaaa

SEQ ID NO: 490890 - RNA, 22 nt, Human
cccaguggggagcugagguuca

SEQ ID NO: 490891 - RNA, 22 nt, Human
aaguugagaugucauaggagac

SEQ ID NO: 490892 - RNA, 22 nt, Human
augugugcaucaaugauagauc

SEQ ID NO: 490893 - RNA, 22 nt, Human
acugccuggccuggccucacug

SEQ ID NO: 490894 - RNA, 22 nt, Human
uuacauaaaaguucacguaggc

SEQ ID NO: 490895 - RNA, 22 nt, Human
uuaaaugaggcugauguagauu

SEQ ID NO: 490896 - RNA, 22 nt, Human
gugccugggacuugcuccggau

SEQ ID NO: 490897 - RNA, 22 nt, Human
gcuucagccgggcacuuaauga

SEQ ID NO: 490898 - RNA, 22 nt, Human
uugcccuggggcuggccuggca

SEQ ID NO: 490899 - RNA, 22 nt, Human
uugaaugaagucccuuuuuacu

SEQ ID NO: 490900 - RNA, 22 nt, Human
gaccacagacuggaaagagggc

SEQ ID NO: 490901 - RNA, 22 nt, Human
aaugaagaaauggacaucuuua

SEQ ID NO: 490902 - RNA, 22 nt, Human
auuauuagugauguuguuacug

SEQ ID NO: 490903 - RNA, 22 nt, Human
uacaaugagcuguacaucucca

SEQ ID NO: 490904 - RNA, 22 nt, Human
agaaaguuaaacagugauaaga

SEQ ID NO: 490905 - RNA, 22 nt, Human
guguccuguuucccugucuaua

SEQ ID NO: 490906 - RNA, 22 nt, Human
agacauaagugcuaugacauug

SEQ ID NO: 490907 - RNA, 22 nt, Human
gaucuugaaauaucuuuuccua

SEQ ID NO: 490908 - RNA, 22 nt, Human
ucagcacuuggauuucagagau

SEQ ID NO: 490909 - RNA, 22 nt, Human
ucauuauuuuggacuggagugu

SEQ ID NO: 490910 - RNA, 22 nt, Human
ugacagagcauguagugacagc

SEQ ID NO: 490911 - RNA, 22 nt, Human
gggcaggagagaacagucaugg

SEQ ID NO: 490912 - RNA, 22 nt, Human
uguccuggggacaagaggcccu

SEQ ID NO: 490913 - RNA, 22 nt, Human
aaacacugugggacaucuuacu

SEQ ID NO: 490914 - RNA, 22 nt, Human
cugcccugggccaggaagcggc

SEQ ID NO: 490915 - RNA, 22 nt, Human
uugucugacuucuuuaguuacu

SEQ ID NO: 490916 - RNA, 22 nt, Human
aggacuuagaacauuauguacu

SEQ ID NO: 490917 - RNA, 22 nt, Human
augcccugugguucaugugaga

SEQ ID NO: 490918 - RNA, 22 nt, Human
uaucauuuuacugugacauuuu

SEQ ID NO: 490919 - RNA, 22 nt, Human
acagguguagcaggagcaucaa

SEQ ID NO: 490920 - RNA, 22 nt, Human
uguccuguucuugcuguguccu

SEQ ID NO: 490921 - RNA, 21 nt, Human
ugaaugaugccccagaguugu

SEQ ID NO: 490922 - RNA, 21 nt, Human
auuuagaaggaaauuuugcaa

SEQ ID NO: 490923 - RNA, 22 nt, Human
cacauuuaaagguugaagcuga

SEQ ID NO: 490924 - RNA, 22 nt, Human
acaggacaggcugggcuagacu

SEQ ID NO: 490925 - RNA, 22 nt, Human
uacacaugacaguggacugaga

SEQ ID NO: 490926 - RNA, 22 nt, Human
gggcugccaagccugccugccu

SEQ ID NO: 490927 - RNA, 22 nt, Human
caggcacaagaagcaaauguua

SEQ ID NO: 490928 - RNA, 22 nt, Human
ucacacaggguucuggucucau

SEQ ID NO: 490929 - RNA, 22 nt, Human
cacugauuaagucugcuagagg

SEQ ID NO: 490930 - RNA, 22 nt, Human
uagccacaugcagacuuucaug

SEQ ID NO: 490931 - RNA, 22 nt, Human
ccugguguugccaaucugugcc

SEQ ID NO: 490932 - RNA, 22 nt, Human
uuuauucuagcucagaauaguu

SEQ ID NO: 490933 - RNA, 22 nt, Human
ugcugaauaagacguggcuugu

SEQ ID NO: 490934 - RNA, 22 nt, Human
uguguacacacagauauauaca

SEQ ID NO: 490935 - RNA, 22 nt, Human
gcagcagcucugaaugggcccc

SEQ ID NO: 490936 - RNA, 22 nt, Human
ucugaauguaucgaauugaggc

SEQ ID NO: 490937 - RNA, 20 nt, Human
uaucuaaaugcuuacauuac

SEQ ID NO: 490938 - RNA, 19 nt, Human
cuuauuagagugagagcuu

SEQ ID NO: 490939 - RNA, 22 nt, Human
gccuggcucugaguuucucucc

SEQ ID NO: 490940 - RNA, 22 nt, Human
uugcccugucucacuauguuaa

SEQ ID NO: 490941 - RNA, 22 nt, Human
uugcugaagaaaaaauauguua

SEQ ID NO: 490942 - RNA, 22 nt, Human
gugcuccucacaguguggcccu

SEQ ID NO: 490943 - RNA, 20 nt, Human
uccuaauaaccugaagaaau

SEQ ID NO: 490944 - RNA, 22 nt, Human
ccuuacaaugcaguuuacuuag

SEQ ID NO: 490945 - RNA, 22 nt, Human
guauuuguaguagcauagaauu

SEQ ID NO: 490946 - RNA, 22 nt, Human
aguccuggcucuacgggcuuca

SEQ ID NO: 490947 - RNA, 22 nt, Human
uugcccugcagcggugaguggu

SEQ ID NO: 490948 - RNA, 22 nt, Human
gaagcuucguggcucuucaaau

SEQ ID NO: 490949 - RNA, 23 nt, Human
ugaaacauuuaggguagaauuuc

SEQ ID NO: 490950 - RNA, 22 nt, Human
auucuguguuaggauagauggu

SEQ ID NO: 490951 - RNA, 22 nt, Human
cuuaggauuuaauuucagacuc

SEQ ID NO: 490952 - RNA, 22 nt, Human
ugcuuauuaaacaugcauauuc

SEQ ID NO: 490953 - RNA, 22 nt, Human
uugcuaauaaaguuuuuaugug

SEQ ID NO: 490954 - RNA, 22 nt, Human
uuuugugagcugagaaauguau

SEQ ID NO: 490955 - RNA, 22 nt, Human
ugagagguaggaaaugaacaag

SEQ ID NO: 490956 - RNA, 22 nt, Human
agucacauuugggggugucaaa

SEQ ID NO: 490957 - RNA, 22 nt, Human
guguacaguaagugaaucuagg

SEQ ID NO: 490958 - RNA, 22 nt, Human
uauuuggacaccaaguagaagu

SEQ ID NO: 490959 - RNA, 22 nt, Human
cuucagcaccauagcuccuucu

SEQ ID NO: 490960 - RNA, 22 nt, Human
uagucacacaauuguguacauu

SEQ ID NO: 490961 - RNA, 21 nt, Human
uguccuggucacugcucuccc

SEQ ID NO: 490962 - RNA, 22 nt, Human
cccagccugucuuucccaauga

SEQ ID NO: 490963 - RNA, 22 nt, Human
cagccucuaagcacagccucuc

SEQ ID NO: 490964 - RNA, 22 nt, Human
uuuguagaacuauacuuacauu

SEQ ID NO: 490965 - RNA, 22 nt, Human
auuagcuuuauuugaaauagga

SEQ ID NO: 490966 - RNA, 22 nt, Human
gagcuccagcaucucugccaaa

SEQ ID NO: 490967 - RNA, 22 nt, Human
ucaucacucauuggacaacaga

SEQ ID NO: 490968 - RNA, 22 nt, Human
cugcccugaccugccucagagu

SEQ ID NO: 490969 - RNA, 22 nt, Human
uauuugucuuucuuauaagaau

SEQ ID NO: 490970 - RNA, 22 nt, Human
aaaacaguuuuugcuaacugcu

SEQ ID NO: 490971 - RNA, 22 nt, Human
ugugcauagacuuucaccaccu

SEQ ID NO: 490972 - RNA, 22 nt, Human
uuguccugucaggcugggggcu

SEQ ID NO: 490973 - RNA, 21 nt, Human
ugaaugaucugguugccuuuu

SEQ ID NO: 490974 - RNA, 22 nt, Human
acauauauuacuaguaaagaca

SEQ ID NO: 490975 - RNA, 22 nt, Human
cauaauaucuccgauuacuugc

SEQ ID NO: 490976 - RNA, 22 nt, Human
auguccagaguguccuggaaag

SEQ ID NO: 490977 - RNA, 22 nt, Human
ucauguacauguaagucagaaa

SEQ ID NO: 490978 - RNA, 22 nt, Human
uuagcuuaauuaaauaaucagu

SEQ ID NO: 490979 - RNA, 22 nt, Human
aguucagcuucccaggucacug

SEQ ID NO: 490980 - RNA, 22 nt, Human
ggcugcggaucuaaggcuggga

SEQ ID NO: 490981 - RNA, 22 nt, Human
ugccaccuggacaaccuuaugc

SEQ ID NO: 490982 - RNA, 22 nt, Human
uccuggcuuccugcucuuguca

SEQ ID NO: 490983 - RNA, 22 nt, Human
gccuucugugcuccuggccuuu

SEQ ID NO: 490984 - RNA, 18 nt, Human
ccuguguguguugcaggc

SEQ ID NO: 490985 - RNA, 22 nt, Human
cuggcuccugaggcuuggcccc

SEQ ID NO: 490986 - RNA, 22 nt, Human
uuucacauaugguuguugauug

SEQ ID NO: 490987 - RNA, 23 nt, Human
uuguauuuuuaguagagacaggg

SEQ ID NO: 490988 - RNA, 22 nt, Human
ggcugcucuccaucccaggccu

SEQ ID NO: 490989 - RNA, 20 nt, Human
uccugagugcaguuggcuug

SEQ ID NO: 490990 - RNA, 22 nt, Human
uagcuauuguugguaguuaccc

SEQ ID NO: 490991 - RNA, 22 nt, Human
aguguacaaaaugauagauaaa

SEQ ID NO: 490992 - RNA, 22 nt, Human
cuggcucccaugagcucucacg

SEQ ID NO: 490993 - RNA, 22 nt, Human
uguuuuaagcucuagaagggga

SEQ ID NO: 490994 - RNA, 22 nt, Human
cagauguggaaugcagcaggcu

SEQ ID NO: 490995 - RNA, 22 nt, Human
cauuugugcuuuuauaaaauag

SEQ ID NO: 490996 - RNA, 22 nt, Human
ggaaacuuggcauaauuuuaag

SEQ ID NO: 490997 - RNA, 22 nt, Human
uucuugauuagucucaugccaa

SEQ ID NO: 490998 - RNA, 22 nt, Human
uauaauuaguaaauggcagauu

SEQ ID NO: 490999 - RNA, 22 nt, Human
gucaugccagcggagcucggga

SEQ ID NO: 491000 - RNA, 22 nt, Human
auuuguguuguauuaagcugcu

SEQ ID NO: 491001 - RNA, 22 nt, Human
gcacacagcuagauuaccauuc

SEQ ID NO: 491002 - RNA, 22 nt, Human
ggcuucaggggcccagucagca

SEQ ID NO: 491003 - RNA, 22 nt, Human
auucauuuagguauucacuuac

SEQ ID NO: 491004 - RNA, 22 nt, Human
uguccugggaaugggaugcagu

SEQ ID NO: 491005 - RNA, 22 nt, Human
aaaaugaugcuguaauuuggca

SEQ ID NO: 491006 - RNA, 22 nt, Human
uccuagaaugcaccucugcugu

SEQ ID NO: 491007 - RNA, 22 nt, Human
cugcccugugguuguggguucu

SEQ ID NO: 491008 - RNA, 22 nt, Human
uauuagcuuuagccuuuggaug

SEQ ID NO: 491009 - RNA, 22 nt, Human
acuuggcaaguaucuauaaagu

SEQ ID NO: 491010 - RNA, 20 nt, Human
aaaaugaugggcagggcagg

SEQ ID NO: 491011 - RNA, 22 nt, Human
ccuuagcauuagaagcuguggg

SEQ ID NO: 491012 - RNA, 22 nt, Human
augugcaggauccaggcuccua

SEQ ID NO: 491013 - RNA, 22 nt, Human
cacaugugcaguuacaugaauu

SEQ ID NO: 491014 - RNA, 22 nt, Human
guaacauuuacaguuccuagag

SEQ ID NO: 491015 - RNA, 19 nt, Human
cuguggccuccaggaggga

SEQ ID NO: 491016 - RNA, 22 nt, Human
aagcuucaguggacuguagugu

SEQ ID NO: 491017 - RNA, 22 nt, Human
cuguagcaaguuauucaauaaa

SEQ ID NO: 491018 - RNA, 22 nt, Human
cugccugcacugccuggcucca

SEQ ID NO: 491019 - RNA, 22 nt, Human
auaagccugauucacuugucau

SEQ ID NO: 491020 - RNA, 22 nt, Human
agucuucacucuucacuacuau

SEQ ID NO: 491021 - RNA, 22 nt, Human
aaguugaaucaguaacacaguu

SEQ ID NO: 491022 - RNA, 22 nt, Human
uggcuccguuguacaggcugga

SEQ ID NO: 491023 - RNA, 22 nt, Human
uuuagugauucauuuagaaaaa

SEQ ID NO: 491024 - RNA, 23 nt, Human
cugcccugaucuugaucuauugu

SEQ ID NO: 491025 - RNA, 22 nt, Human
uguccuggaguuauaaugccug

SEQ ID NO: 491026 - RNA, 22 nt, Human
ugccaggcauuugacagacacu

SEQ ID NO: 491027 - RNA, 22 nt, Human
ucaugccaauuucugcauggcu

SEQ ID NO: 491028 - RNA, 22 nt, Human
ugugugugugcgcgcacgcaua

SEQ ID NO: 491029 - RNA, 22 nt, Human
uuagcaucugcuguaagcuuau

SEQ ID NO: 491030 - RNA, 22 nt, Human
cugaggccgucugggucugcag

SEQ ID NO: 491031 - RNA, 22 nt, Human
auacuugagguagcaacuuaag

SEQ ID NO: 491032 - RNA, 18 nt, Human
cugucuuuuuucucucca

SEQ ID NO: 491033 - RNA, 22 nt, Human
uuuguuugccacacaaaacagu

SEQ ID NO: 491034 - RNA, 22 nt, Human
cacagcagaaaguguaggagga

SEQ ID NO: 491035 - RNA, 22 nt, Human
cucagcacuuuggaaggcugau

SEQ ID NO: 491036 - RNA, 22 nt, Human
uaucacuacaccuggcuaauua

SEQ ID NO: 491037 - RNA, 22 nt, Human
uggacuccagugucuguguucu

SEQ ID NO: 491038 - RNA, 22 nt, Human
auauuagcagugaucaaaaugg

SEQ ID NO: 491039 - RNA, 22 nt, Human
uuguccugaggacuguuaucag

SEQ ID NO: 491040 - RNA, 18 nt, Human
uauucuguccuaugaagc

SEQ ID NO: 491041 - RNA, 22 nt, Human
gcacaggaggccgaugcucaug

SEQ ID NO: 491042 - RNA, 22 nt, Human
acaggcacuuugacaugccauc

SEQ ID NO: 491043 - RNA, 22 nt, Human
auauuuguaguggguaagaagu

SEQ ID NO: 491044 - RNA, 20 nt, Human
augcccuguccucuucuguu

SEQ ID NO: 491045 - RNA, 22 nt, Human
auguuauuaaaguacagauucu

SEQ ID NO: 491046 - RNA, 22 nt, Human
cagagccaucaugauauggagu

SEQ ID NO: 491047 - RNA, 22 nt, Human
augcccuggacuucuaguauuc

SEQ ID NO: 491048 - RNA, 22 nt, Human
uccucuggggcgugguccugga

SEQ ID NO: 491049 - RNA, 22 nt, Human
aguggcagagucaggguuugga

SEQ ID NO: 491050 - RNA, 22 nt, Human
aggcacagauuuggggaaagca

SEQ ID NO: 491051 - RNA, 22 nt, Human
caucacagguccugaugacauu

SEQ ID NO: 491052 - RNA, 22 nt, Human
gccuggcugcucagccacucac

SEQ ID NO: 491053 - RNA, 22 nt, Human
gaccacagcagugcaagaggag

SEQ ID NO: 491054 - RNA, 22 nt, Human
uuaauuaaauucaugagcauug

SEQ ID NO: 491055 - RNA, 22 nt, Human
ggcuccuggaggcaccacuggu

SEQ ID NO: 491056 - RNA, 22 nt, Human
cugaaugaggaaaagagugagg

SEQ ID NO: 491057 - RNA, 22 nt, Human
acagagucucaaaccuacaaag

SEQ ID NO: 491058 - RNA, 22 nt, Human
uauacaaguaaugcugaaugau

SEQ ID NO: 491059 - RNA, 22 nt, Human
ccuuugggguccugccugggcu

SEQ ID NO: 491060 - RNA, 22 nt, Human
uuuucauuguuccucgagcauu

SEQ ID NO: 491061 - RNA, 19 nt, Human
ggcuucagggaguuagcau

SEQ ID NO: 491062 - RNA, 22 nt, Human
ugcuagugugugagauguucaa

SEQ ID NO: 491063 - RNA, 22 nt, Human
gugugcaggcuugaggauuagg

SEQ ID NO: 491064 - RNA, 22 nt, Human
gugcugaauugugcucuuuaca

SEQ ID NO: 491065 - RNA, 22 nt, Human
ggucugcccuggguggaggcgc

SEQ ID NO: 491066 - RNA, 20 nt, Human
agacccuguguccuguggcc

SEQ ID NO: 491067 - RNA, 22 nt, Human
auucauguuagcccacauguag

SEQ ID NO: 491068 - RNA, 22 nt, Human
ccugaaugccugacauuucacu

SEQ ID NO: 491069 - RNA, 22 nt, Human
guugcugaaggcaugccagaga

SEQ ID NO: 491070 - RNA, 22 nt, Human
guggcucucgccagccugcggg

SEQ ID NO: 491071 - RNA, 22 nt, Human
acagaaauugggcaaauggaag

SEQ ID NO: 491072 - RNA, 22 nt, Human
uugauuacuauguguugaaagc

SEQ ID NO: 491073 - RNA, 22 nt, Human
agccuauuccaggaugagcuca

SEQ ID NO: 491074 - RNA, 22 nt, Human
gugggcugcccuugaggucagc

SEQ ID NO: 491075 - RNA, 22 nt, Human
gugcccugaucgcuaggcuccc

SEQ ID NO: 491076 - RNA, 22 nt, Human
gaucuugagcaaguuguguaac

SEQ ID NO: 491077 - RNA, 22 nt, Human
cuacagaggacacaaagaucuu

SEQ ID NO: 491078 - RNA, 22 nt, Human
uuugaugaguuuaauaacagcc

SEQ ID NO: 491079 - RNA, 22 nt, Human
auauuuguuuggcagaguucag

SEQ ID NO: 491080 - RNA, 22 nt, Human
gcccuuagccuuauagccucua

SEQ ID NO: 491081 - RNA, 22 nt, Human
ggagcugcacgcucugaagccu

SEQ ID NO: 491082 - RNA, 22 nt, Human
ccugugucaucagcuguggcua

SEQ ID NO: 491083 - RNA, 22 nt, Human
cauuugcagagggugacacucu

SEQ ID NO: 491084 - RNA, 22 nt, Human
augcagcuucaggauuaugaug

SEQ ID NO: 491085 - RNA, 22 nt, Human
ccugggccaggcuugggaaugc

SEQ ID NO: 491086 - RNA, 22 nt, Human
acauagaacuucccagugagca

SEQ ID NO: 491087 - RNA, 22 nt, Human
uucagcaccacuuccagagaag

SEQ ID NO: 491088 - RNA, 22 nt, Human
uugcauuagugucauaaggugg

SEQ ID NO: 491089 - RNA, 22 nt, Human
uugcuaaaggauuuuguauuua

SEQ ID NO: 491090 - RNA, 22 nt, Human
guccacagggauggccacacau

SEQ ID NO: 491091 - RNA, 22 nt, Human
agaaacuucagcuauucuuuug

SEQ ID NO: 491092 - RNA, 22 nt, Human
ucccuggcagcuaagggugguc

SEQ ID NO: 491093 - RNA, 22 nt, Human
ucauuugugugagugauuugac

SEQ ID NO: 491094 - RNA, 22 nt, Human
agaaauggaaauccaagcaacu

SEQ ID NO: 491095 - RNA, 22 nt, Human
cgcauccagggcgcaggaucug

SEQ ID NO: 491096 - RNA, 22 nt, Human
ugcauuaaaaugugccucucuu

SEQ ID NO: 491097 - RNA, 22 nt, Human
ucugggccagugauuuuuccag

SEQ ID NO: 491098 - RNA, 22 nt, Human
uuuucauuuacauuagggaaga

SEQ ID NO: 491099 - RNA, 22 nt, Human
cuuauuugcccauguuucuuua

SEQ ID NO: 491100 - RNA, 22 nt, Human
uuaucugucuaucaagacuagc

SEQ ID NO: 491101 - RNA, 22 nt, Human
uggcuccugcagaccaucugga

SEQ ID NO: 491102 - RNA, 17 nt, Human
guccuggugugugagga

SEQ ID NO: 491103 - RNA, 22 nt, Human
gaauauauuucucuuaccuuua

SEQ ID NO: 491104 - RNA, 22 nt, Human
caucuugaagguuucuuuagcu

SEQ ID NO: 491105 - RNA, 22 nt, Human
auucuacaaaagaacuggaucu

SEQ ID NO: 491106 - RNA, 23 nt, Human
cagaugugcaacucuaggcaaug

SEQ ID NO: 491107 - RNA, 23 nt, Human
guccuagugcuuggugcccaggc

SEQ ID NO: 491108 - RNA, 22 nt, Human
auuuuguggcagaugcagaacc

SEQ ID NO: 491109 - RNA, 22 nt, Human
ugaacagaucaauagaacugac

SEQ ID NO: 491110 - RNA, 22 nt, Human
gcuaaugacugaguuuuuagca

SEQ ID NO: 491111 - RNA, 22 nt, Human
ugcacaggugguccaucugcac

SEQ ID NO: 491112 - RNA, 22 nt, Human
ucugcugacauuuaugaauaga

SEQ ID NO: 491113 - RNA, 22 nt, Human
aacggcuguggcuggcggcagc

SEQ ID NO: 491114 - RNA, 22 nt, Human
ucacuagucaucaacuuccauu

SEQ ID NO: 491115 - RNA, 22 nt, Human
aagcuuacaguuccacguagca

SEQ ID NO: 491116 - RNA, 22 nt, Human
uacuagucuucugcuauucccu

SEQ ID NO: 491117 - RNA, 23 nt, Human
aguaacaugcaaauaacagucug

SEQ ID NO: 491118 - RNA, 23 nt, Human
uccuggcucugcacuugcuaaug

SEQ ID NO: 491119 - RNA, 19 nt, Human
agcauuuggaauucuacac

SEQ ID NO: 491120 - RNA, 22 nt, Human
acaguggugagugacugauagg

SEQ ID NO: 491121 - RNA, 22 nt, Human
ugcaaggcuugcaauggugauc

SEQ ID NO: 491122 - RNA, 22 nt, Human
cuugagcacagcggcuucagga

SEQ ID NO: 491123 - RNA, 22 nt, Human
cuuauuuguacuaauaaaucug

SEQ ID NO: 491124 - RNA, 20 nt, Human
agcuucaggcucaagagaac

SEQ ID NO: 491125 - RNA, 22 nt, Human
gcugggcuucaccuccagaguu

SEQ ID NO: 491126 - RNA, 22 nt, Human
agagccaggaugucuucugggg

SEQ ID NO: 491127 - RNA, 22 nt, Human
guccugguagggcucugugucu

SEQ ID NO: 491128 - RNA, 23 nt, Human
ugaaugauggugcuccucaucuu

SEQ ID NO: 491129 - RNA, 19 nt, Human
cgccuggcaggcccugcgc

SEQ ID NO: 491130 - RNA, 22 nt, Human
aauuugugaaucugucucuuga

SEQ ID NO: 491131 - RNA, 22 nt, Human
uggcuucugcuuucaguggagg

SEQ ID NO: 491132 - RNA, 21 nt, Human
uggcaggcagcuggaagcuug

SEQ ID NO: 491133 - RNA, 22 nt, Human
gcagcagcccagggcucucaga

SEQ ID NO: 491134 - RNA, 22 nt, Human
ugagaggugaggcaugaggcau

SEQ ID NO: 491135 - RNA, 22 nt, Human
auuauuugcuuggcucaucuaa

SEQ ID NO: 491136 - RNA, 22 nt, Human
uuaacauuguccuuagcagauu

SEQ ID NO: 491137 - RNA, 19 nt, Human
acugccugaggcucacagg

SEQ ID NO: 491138 - RNA, 22 nt, Human
guggcucuguaaaaugccugca

SEQ ID NO: 491139 - RNA, 22 nt, Human
auguaucacagcaauguaguca

SEQ ID NO: 491140 - RNA, 22 nt, Human
auuuauuaugggauuuggcaca

SEQ ID NO: 491141 - RNA, 22 nt, Human
ucuauuuguucucaggaucauc

SEQ ID NO: 491142 - RNA, 22 nt, Human
ucacauguuaggucgggcaagg

SEQ ID NO: 491143 - RNA, 22 nt, Human
cuccugugguacucccagggcc

SEQ ID NO: 491144 - RNA, 22 nt, Human
agccucugucaagcuuuucaaa

SEQ ID NO: 491145 - RNA, 22 nt, Human
accuucugaccaguuaucuuga

SEQ ID NO: 491146 - RNA, 22 nt, Human
gaagacaucauggagaggauag

SEQ ID NO: 491147 - RNA, 22 nt, Human
uuauuuguggcauccauguugg

SEQ ID NO: 491148 - RNA, 22 nt, Human
cugcccugggauggucugugcg

SEQ ID NO: 491149 - RNA, 22 nt, Human
uguguacaaacuaacaacauau

SEQ ID NO: 491150 - RNA, 22 nt, Human
cauuuguauagugcuuagacca

SEQ ID NO: 491151 - RNA, 22 nt, Human
uucagcacccucugaggcaucc

SEQ ID NO: 491152 - RNA, 22 nt, Human
auucagcauaaucaguagcuug

SEQ ID NO: 491153 - RNA, 22 nt, Human
agaauuacauaaauacaugaau

SEQ ID NO: 491154 - RNA, 22 nt, Human
cugcccucccaguugguccgug

SEQ ID NO: 491155 - RNA, 22 nt, Human
ugucucugcugcaccuucuggg

SEQ ID NO: 491156 - RNA, 18 nt, Human
ccucggagccuccguguc

SEQ ID NO: 491157 - RNA, 22 nt, Human
cucagucucuugggcugugaag

SEQ ID NO: 491158 - RNA, 20 nt, Human
cugggcucgguggcccuggc

SEQ ID NO: 491159 - RNA, 22 nt, Human
ugugggaggaacacagccagaa

SEQ ID NO: 491160 - RNA, 22 nt, Human
uguaccacucuacuaaggguuc

SEQ ID NO: 491161 - RNA, 22 nt, Human
uguccuggccuccagaaagucg

SEQ ID NO: 491162 - RNA, 18 nt, Human
uccuuagcugagcuuguc

SEQ ID NO: 491163 - RNA, 22 nt, Human
cccucuggcucuucucaggccg

SEQ ID NO: 491164 - RNA, 21 nt, Human
augugcagcaagcagcaugcu

SEQ ID NO: 491165 - RNA, 22 nt, Human
uuuauuugaaucaggggagaau

SEQ ID NO: 491166 - RNA, 20 nt, Human
gucuuuauguuuuaugaccu

SEQ ID NO: 491167 - RNA, 22 nt, Human
auguuuuauuaccaacuuguac

SEQ ID NO: 491168 - RNA, 20 nt, Human
uauuuacaacuuagagccuc

SEQ ID NO: 491169 - RNA, 22 nt, Human
augcugaaugaaagaaauuagu

SEQ ID NO: 491170 - RNA, 22 nt, Human
ugcuucagugugucauuauuua

SEQ ID NO: 491171 - RNA, 22 nt, Human
ugagccagagagguugaggcua

SEQ ID NO: 491172 - RNA, 22 nt, Human
cugggcccacgagggcucuggg

SEQ ID NO: 491173 - RNA, 22 nt, Human
aaguccauucuuccagccagcu

SEQ ID NO: 491174 - RNA, 22 nt, Human
cuguccuggccgcccuugugag

SEQ ID NO: 491175 - RNA, 22 nt, Human
ucagaggagcaaaagaggggau

SEQ ID NO: 491176 - RNA, 20 nt, Human
agguccuguuccuugucucc

SEQ ID NO: 491177 - RNA, 22 nt, Human
acagauguaaucuauucacauu

SEQ ID NO: 491178 - RNA, 22 nt, Human
gcagcagcaggcgcucggccgu

SEQ ID NO: 491179 - RNA, 22 nt, Human
gccagccugugcuuggccaggc

SEQ ID NO: 491180 - RNA, 22 nt, Human
gcagccaggggcugugaccugu

SEQ ID NO: 491181 - RNA, 22 nt, Human
ccuuagcagggagucuguccag

SEQ ID NO: 491182 - RNA, 22 nt, Human
ugccagccagggaagcucaccc

SEQ ID NO: 491183 - RNA, 22 nt, Human
cacacagguauauauauguaca

SEQ ID NO: 491184 - RNA, 22 nt, Human
ucugggccaacccuuccauggg

SEQ ID NO: 491185 - RNA, 22 nt, Human
gcccuuaggcaagcagaagccc

SEQ ID NO: 491186 - RNA, 16 nt, Human
uuguccugucucacug

SEQ ID NO: 491187 - RNA, 22 nt, Human
uagucacaguacaggauaaaga

SEQ ID NO: 491188 - RNA, 22 nt, Human
uaagcuucaaagaacauauugg

SEQ ID NO: 491189 - RNA, 22 nt, Human
ucccagggauuaggacauggau

SEQ ID NO: 491190 - RNA, 22 nt, Human
cuguggagugcuuggcucagug

SEQ ID NO: 491191 - RNA, 19 nt, Human
ucauuuguuaguagaaguu

SEQ ID NO: 491192 - RNA, 22 nt, Human
cauguaauccuggggagaugaa

SEQ ID NO: 491193 - RNA, 22 nt, Human
cacaggaaugaacagggaaaga

SEQ ID NO: 491194 - RNA, 22 nt, Human
caggcacacccacuggugcaga

SEQ ID NO: 491195 - RNA, 22 nt, Human
uuuagcuucauuuggcgugauu

SEQ ID NO: 491196 - RNA, 22 nt, Human
cugcccugcuugaugacagcga

SEQ ID NO: 491197 - RNA, 22 nt, Human
cugcccugcuaaugaguuccaa

SEQ ID NO: 491198 - RNA, 22 nt, Human
caucacugaaccccaacuuucu

SEQ ID NO: 491199 - RNA, 22 nt, Human
cugccuguggucugugaucuaa

SEQ ID NO: 491200 - RNA, 22 nt, Human
uuuauguuugacaaugaucugg

SEQ ID NO: 491201 - RNA, 22 nt, Human
guacagagaagguuacauauga

SEQ ID NO: 491202 - RNA, 22 nt, Human
uauuagcuguguaacucugguu

SEQ ID NO: 491203 - RNA, 22 nt, Human
uccugggcaaagaggggcagug

SEQ ID NO: 491204 - RNA, 22 nt, Human
uucugggcccacuguagcaucc

SEQ ID NO: 491205 - RNA, 22 nt, Human
auuagcuuaucccauuucugaa

SEQ ID NO: 491206 - RNA, 22 nt, Human
cauggacagugggacagugugu

SEQ ID NO: 491207 - RNA, 22 nt, Human
cagcaaggguuauaucaaagau

SEQ ID NO: 491208 - RNA, 22 nt, Human
caaggccugacugcuugucuaa

SEQ ID NO: 491209 - RNA, 22 nt, Human
cacaugugugcugaggacugug

SEQ ID NO: 491210 - RNA, 22 nt, Human
uguccugggucaaauccugguc

SEQ ID NO: 491211 - RNA, 22 nt, Human
ggcuccuguccccucagcugcu

SEQ ID NO: 491212 - RNA, 22 nt, Human
uguuuuaaagccauugccuuuc

SEQ ID NO: 491213 - RNA, 21 nt, Human
ugccuuggcaaaugaccauga

SEQ ID NO: 491214 - RNA, 22 nt, Human
ggaaacuaaagagguguuuuug

SEQ ID NO: 491215 - RNA, 22 nt, Human
cagaaaugacaaaguaagagga

SEQ ID NO: 491216 - RNA, 22 nt, Human
ugggcuggcugaacuucaaccu

SEQ ID NO: 491217 - RNA, 22 nt, Human
ugcugaauauagagcaagaagu

SEQ ID NO: 491218 - RNA, 22 nt, Human
caguacauuucauaugauucua

SEQ ID NO: 491219 - RNA, 20 nt, Human
gugcccugugggcuauuuuc

SEQ ID NO: 491220 - RNA, 22 nt, Human
gcucuggccagacccucagugg

SEQ ID NO: 491221 - RNA, 22 nt, Human
ccuguugucucuuccuguugac

SEQ ID NO: 491222 - RNA, 22 nt, Human
aguccguggccagacucaagag

SEQ ID NO: 491223 - RNA, 22 nt, Human
uguccuccagcagcaugguaug

SEQ ID NO: 491224 - RNA, 22 nt, Human
cucugggcuuguugaccugcac

SEQ ID NO: 491225 - RNA, 22 nt, Human
uuuguagaggguaauugacaga

SEQ ID NO: 491226 - RNA, 22 nt, Human
gagacacacacaggagguggca

SEQ ID NO: 491227 - RNA, 22 nt, Human
guuuagaaaauagugaagcaag

SEQ ID NO: 491228 - RNA, 22 nt, Human
ucugggccuuggaguggggaga

SEQ ID NO: 491229 - RNA, 22 nt, Human
uacacauguauuuauguguaca

SEQ ID NO: 491230 - RNA, 22 nt, Human
ucugggcuuggauuggcucugc

SEQ ID NO: 491231 - RNA, 22 nt, Human
caaaugauacuguuuuuagucu

SEQ ID NO: 491232 - RNA, 22 nt, Human
uuguccugcaaccucacauggc

SEQ ID NO: 491233 - RNA, 22 nt, Human
cuguacaucccgagagccagua

SEQ ID NO: 491234 - RNA, 22 nt, Human
gaaaaugagccucagcuacauu

SEQ ID NO: 491235 - RNA, 22 nt, Human
uauuucugggaguucagaaauu

SEQ ID NO: 491236 - RNA, 22 nt, Human
augagagguuucgucagaggaa

SEQ ID NO: 491237 - RNA, 19 nt, Human
uugaaauuguuugauaugg

SEQ ID NO: 491238 - RNA, 22 nt, Human
uuugugacuugcuucucagaau

SEQ ID NO: 491239 - RNA, 22 nt, Human
gguccugggaagaugcucauga

SEQ ID NO: 491240 - RNA, 21 nt, Human
acagaugugauaugcagucuu

SEQ ID NO: 491241 - RNA, 22 nt, Human
ugaggauggaaugcugugcaag

SEQ ID NO: 491242 - RNA, 22 nt, Human
aagcuucaggcccacccauguc

SEQ ID NO: 491243 - RNA, 18 nt, Human
accuggcugugugagcug

SEQ ID NO: 491244 - RNA, 22 nt, Human
cccgagugucuacucacuccca

SEQ ID NO: 491245 - RNA, 22 nt, Human
augcccugagcaggccuucaag

SEQ ID NO: 491246 - RNA, 22 nt, Human
gccagccuucuguggccugcaa

SEQ ID NO: 491247 - RNA, 22 nt, Human
ugauuacacagcaguaauuuca

SEQ ID NO: 491248 - RNA, 22 nt, Human
uauuugugagacugacugaagu

SEQ ID NO: 491249 - RNA, 19 nt, Human
gggaaauucacuugcuucc

SEQ ID NO: 491250 - RNA, 22 nt, Human
acauguguacauauauaugugc

SEQ ID NO: 491251 - RNA, 22 nt, Human
uuauuagcugggcuucagggug

SEQ ID NO: 491252 - RNA, 22 nt, Human
cagcuucagcgugacaccagug

SEQ ID NO: 491253 - RNA, 22 nt, Human
uuggcucaggaccccugugacu

SEQ ID NO: 491254 - RNA, 22 nt, Human
agcuucagggacuuguggcaga

SEQ ID NO: 491255 - RNA, 17 nt, Human
uugcccugauuuuuaac

SEQ ID NO: 491256 - RNA, 22 nt, Human
ccaguccugcucccugaccacc

SEQ ID NO: 491257 - RNA, 22 nt, Human
gggagacuagugcuauguuuuc

SEQ ID NO: 491258 - RNA, 22 nt, Human
guguccugggucucugauucuu

SEQ ID NO: 491259 - RNA, 22 nt, Human
ggagccaggcauaucggggcac

SEQ ID NO: 491260 - RNA, 22 nt, Human
uagucacaggaaguuucaaugu

SEQ ID NO: 491261 - RNA, 22 nt, Human
ucuggcugucauuggaggcccc

SEQ ID NO: 491262 - RNA, 22 nt, Human
uucagcauagcagcuucaggac

SEQ ID NO: 491263 - RNA, 22 nt, Human
agagccugggcagcuccucugg

SEQ ID NO: 491264 - RNA, 22 nt, Human
gaaggauuugagauuauccuag

SEQ ID NO: 491265 - RNA, 23 nt, Human
cccuucagcgagggcauuaaggu

SEQ ID NO: 491266 - RNA, 22 nt, Human
ccugggcuugcaucugugcugg

SEQ ID NO: 491267 - RNA, 17 nt, Human
gccuucucugcccucac

SEQ ID NO: 491268 - RNA, 22 nt, Human
uguccuggacaacagccccuag

SEQ ID NO: 491269 - RNA, 22 nt, Human
uccuggcugccgucguccugcg

SEQ ID NO: 491270 - RNA, 22 nt, Human
uuuaaauuuagaagaaacacug

SEQ ID NO: 491271 - RNA, 22 nt, Human
ugauuacaaaagauuguuugaa

SEQ ID NO: 491272 - RNA, 22 nt, Human
gccucugucauagcucauguga

SEQ ID NO: 491273 - RNA, 22 nt, Human
aguccugguucugauucugaca

SEQ ID NO: 491274 - RNA, 20 nt, Human
acacaguagaugagugacug

SEQ ID NO: 491275 - RNA, 22 nt, Human
acacuaguagaauaguguuugc

SEQ ID NO: 491276 - RNA, 22 nt, Human
ggcugggucccagcugggagga

SEQ ID NO: 491277 - RNA, 22 nt, Human
cuggcuccauccuugagcucug

SEQ ID NO: 491278 - RNA, 22 nt, Human
acugggccuacccagauuggca

SEQ ID NO: 491279 - RNA, 22 nt, Human
ugaaucauggauaaauagcuua

SEQ ID NO: 491280 - RNA, 22 nt, Human
aauuuguguuaguccacguuca

SEQ ID NO: 491281 - RNA, 22 nt, Human
uuauguugggaaaagucagauu

SEQ ID NO: 491282 - RNA, 22 nt, Human
aggacacaugcacacccugcgu

SEQ ID NO: 491283 - RNA, 22 nt, Human
uccuggcuuuucuuggcucauc

SEQ ID NO: 491284 - RNA, 18 nt, Human
gcagagcagaagcucaag

SEQ ID NO: 491285 - RNA, 22 nt, Human
cuaauuguaagcuccuugaggg

SEQ ID NO: 491286 - RNA, 22 nt, Human
acuuagcaguuuagaauauguc

SEQ ID NO: 491287 - RNA, 22 nt, Human
uuauuuaaaagugguaagauuc

SEQ ID NO: 491288 - RNA, 22 nt, Human
aguaucauguuggaauuaauca

SEQ ID NO: 491289 - RNA, 22 nt, Human
cuguccugaaguuuucaugaga

SEQ ID NO: 491290 - RNA, 22 nt, Human
cagucacauugcccugcauuua

SEQ ID NO: 491291 - RNA, 22 nt, Human
ccaggacaagccagagggacag

SEQ ID NO: 491292 - RNA, 22 nt, Human
acauuucagauucaugaaguga

SEQ ID NO: 491293 - RNA, 22 nt, Human
aaacauuguacauucuguagcu

SEQ ID NO: 491294 - RNA, 22 nt, Human
cggccaagccggggccccgaag

SEQ ID NO: 491295 - RNA, 22 nt, Human
ugagcacagcucgcaccagcuu

SEQ ID NO: 491296 - RNA, 22 nt, Human
ccuccuggugggcgcuucuggc

SEQ ID NO: 491297 - RNA, 22 nt, Human
uuuaguagaaauauuugggccu

SEQ ID NO: 491298 - RNA, 22 nt, Human
gcuggcuguaucaccuggccag

SEQ ID NO: 491299 - RNA, 22 nt, Human
cccagccucagcuuuacuucca

SEQ ID NO: 491300 - RNA, 22 nt, Human
uguccuggugcuccagguggcu

SEQ ID NO: 491301 - RNA, 22 nt, Human
uauuaauaagugacuacuagcu

SEQ ID NO: 491302 - RNA, 22 nt, Human
auguccugggcuggguuauguu

SEQ ID NO: 491303 - RNA, 22 nt, Human
uguuugugguuauaauaaguau

SEQ ID NO: 491304 - RNA, 22 nt, Human
caccagguggaaaugucacagc

SEQ ID NO: 491305 - RNA, 22 nt, Human
uccuggcuucugucuccuuauu

SEQ ID NO: 491306 - RNA, 22 nt, Human
agcacuuaacugacaguacuau

SEQ ID NO: 491307 - RNA, 22 nt, Human
uccacgugagcuucgugugcag

SEQ ID NO: 491308 - RNA, 22 nt, Human
agccacagcaacaagugcaauu

SEQ ID NO: 491309 - RNA, 22 nt, Human
aucauuaaauauaagcuucaca

SEQ ID NO: 491310 - RNA, 22 nt, Human
gcacagagagggaagguaacuu

SEQ ID NO: 491311 - RNA, 22 nt, Human
acacagaguuugacacauggga

SEQ ID NO: 491312 - RNA, 22 nt, Human
cagagccuggcgaugucaugga

SEQ ID NO: 491313 - RNA, 22 nt, Human
uugcagaaaacaguuuucuugu

SEQ ID NO: 491314 - RNA, 22 nt, Human
ccagccuuugcaucccccaucu

SEQ ID NO: 491315 - RNA, 22 nt, Human
agagccuguaacaucuuucuua

SEQ ID NO: 491316 - RNA, 22 nt, Human
agcauuagguguguuucagagg

SEQ ID NO: 491317 - RNA, 22 nt, Human
ccaugccuuucacugaaccagu

SEQ ID NO: 491318 - RNA, 22 nt, Human
cacagcagucuuucacuaaaua

SEQ ID NO: 491319 - RNA, 22 nt, Human
acaggugucuaaggcagacagc

SEQ ID NO: 491320 - RNA, 19 nt, Human
agucacagggaagaggaac

SEQ ID NO: 491321 - RNA, 22 nt, Human
acauucauuccaggucagucag

SEQ ID NO: 491322 - RNA, 22 nt, Human
auuguuaugaaaauaagauguu

SEQ ID NO: 491323 - RNA, 22 nt, Human
cuuagcuuuguccuaggucucu

SEQ ID NO: 491324 - RNA, 22 nt, Human
acauguguacuuuuaaggaugu

SEQ ID NO: 491325 - RNA, 22 nt, Human
ucauuuauaaggaugcaauuaa

SEQ ID NO: 491326 - RNA, 22 nt, Human
gugcugaauccacucuuaggaa

SEQ ID NO: 491327 - RNA, 22 nt, Human
gccuggcugcugguucugagga

SEQ ID NO: 491328 - RNA, 20 nt, Human
aucacuggagaaggaaaccu

SEQ ID NO: 491329 - RNA, 22 nt, Human
uuuagcuuguuggaacaauuga

SEQ ID NO: 491330 - RNA, 22 nt, Human
cagagccaaaugcugugguuau

SEQ ID NO: 491331 - RNA, 22 nt, Human
ugcugaaugguaaagaaguaua

SEQ ID NO: 491332 - RNA, 22 nt, Human
cucagcacaucuuuacauuucc

SEQ ID NO: 491333 - RNA, 22 nt, Human
agcuucagauuuaucuuucugu

SEQ ID NO: 491334 - RNA, 22 nt, Human
uggaaacugggaguuaaaugua

SEQ ID NO: 491335 - RNA, 22 nt, Human
guuuagaauggcaaaauuaagu

SEQ ID NO: 491336 - RNA, 22 nt, Human
gagucacauuaauuuaauuuua

SEQ ID NO: 491337 - RNA, 22 nt, Human
gcuacagacugagcauggcucu

SEQ ID NO: 491338 - RNA, 22 nt, Human
ugcccuuaggaaggcucaccaa

SEQ ID NO: 491339 - RNA, 22 nt, Human
gcccagguuggagagcaguggc

SEQ ID NO: 491340 - RNA, 22 nt, Human
acacaguaccccaaggcugggc

SEQ ID NO: 491341 - RNA, 22 nt, Human
ggucccuggggaacuaggcugu

SEQ ID NO: 491342 - RNA, 22 nt, Human
gccuucugaucgcuggacugac

SEQ ID NO: 491343 - RNA, 22 nt, Human
agagccaguuaagcacuuacag

SEQ ID NO: 491344 - RNA, 22 nt, Human
ccucggagaaaggcagcuccac

SEQ ID NO: 491345 - RNA, 22 nt, Human
ugugaauguauaguuuguauau

SEQ ID NO: 491346 - RNA, 22 nt, Human
ucucuuuaaagacucagagauu

SEQ ID NO: 491347 - RNA, 22 nt, Human
ugcugaauuaaacucuaugugg

SEQ ID NO: 491348 - RNA, 22 nt, Human
ucagaggacuaccuucuccagu

SEQ ID NO: 491349 - RNA, 22 nt, Human
uauuugucacugcacuugaaau

SEQ ID NO: 491350 - RNA, 22 nt, Human
uaguacaguuuuggcacaugga

SEQ ID NO: 491351 - RNA, 20 nt, Human
auuagcuuggagacaguggc

SEQ ID NO: 491352 - RNA, 22 nt, Human
cugaggucagaguuuagucugg

SEQ ID NO: 491353 - RNA, 22 nt, Human
uacagagacuuuauggcacaaa

SEQ ID NO: 491354 - RNA, 22 nt, Human
auauuaaugggauuuagucagg

SEQ ID NO: 491355 - RNA, 22 nt, Human
cuguccugggggugguccuugc

SEQ ID NO: 491356 - RNA, 16 nt, Human
uaugugugugggagug

SEQ ID NO: 491357 - RNA, 22 nt, Human
cagcuucaacugcacagucaac

SEQ ID NO: 491358 - RNA, 22 nt, Human
acuuucaacuuggugggagagc

SEQ ID NO: 491359 - RNA, 22 nt, Human
augaaugaaugagaguagguca

SEQ ID NO: 491360 - RNA, 22 nt, Human
acacuagucucuucuugacuug

SEQ ID NO: 491361 - RNA, 22 nt, Human
ugugugcauucacaugcaugcc

SEQ ID NO: 491362 - RNA, 22 nt, Human
agagcacagaagaauaggugcu

SEQ ID NO: 491363 - RNA, 23 nt, Human
gccagccuugcucuccugcagcc

SEQ ID NO: 491364 - RNA, 22 nt, Human
agaagucaaugaugagagugcu

SEQ ID NO: 491365 - RNA, 22 nt, Human
uuaaaugagauguucagauauu

SEQ ID NO: 491366 - RNA, 22 nt, Human
augugucauuauccagaauaac

SEQ ID NO: 491367 - RNA, 22 nt, Human
augcccugugacucuccuggac

SEQ ID NO: 491368 - RNA, 22 nt, Human
gcuccugcaggacccaggagac

SEQ ID NO: 491369 - RNA, 22 nt, Human
cagaaauggagcccaggaaucu

SEQ ID NO: 491370 - RNA, 23 nt, Human
augcccugugcagaaauguggaa

SEQ ID NO: 491371 - RNA, 22 nt, Human
uugcugagcaguguuuaauugu

SEQ ID NO: 491372 - RNA, 22 nt, Human
agucuugguccaggcucauuuc

SEQ ID NO: 491373 - RNA, 22 nt, Human
gugcccugcaugccccggguau

SEQ ID NO: 491374 - RNA, 22 nt, Human
gcguggcuuagagugggguacc

SEQ ID NO: 491375 - RNA, 22 nt, Human
ucaugccaaacugaacacaguu

SEQ ID NO: 491376 - RNA, 22 nt, Human
gcugaagguaugaguuuuaucu

SEQ ID NO: 491377 - RNA, 22 nt, Human
cacacccuugcuaacacuuguu

SEQ ID NO: 491378 - RNA, 22 nt, Human
cugcaugaagucuuuuuuauag

SEQ ID NO: 491379 - RNA, 22 nt, Human
aguugugagaaacagaaugagc

SEQ ID NO: 491380 - RNA, 22 nt, Human
acagagucaugguagucaaagg

SEQ ID NO: 491381 - RNA, 22 nt, Human
uaauaacaauuguaggacauga

SEQ ID NO: 491382 - RNA, 22 nt, Human
uugcagcuucgagucuaucugu

SEQ ID NO: 491383 - RNA, 22 nt, Human
agagcacacugacgucagucug

SEQ ID NO: 491384 - RNA, 22 nt, Human
augauauuuuaguaaagugaua

SEQ ID NO: 491385 - RNA, 22 nt, Human
uauuuuguauuuaugcaagaaa

SEQ ID NO: 491386 - RNA, 22 nt, Human
aaaacauugaauugcacacuau

SEQ ID NO: 491387 - RNA, 19 nt, Human
ugugugcccucaccacaua

SEQ ID NO: 491388 - RNA, 22 nt, Human
gccuucuguccaaccccacgau

SEQ ID NO: 491389 - RNA, 22 nt, Human
uuucauuaaagucaaaucuggu

SEQ ID NO: 491390 - RNA, 22 nt, Human
ucagcccuuccuggagcuuuua

SEQ ID NO: 491391 - RNA, 22 nt, Human
cauuuaaucuggcucaugagca

SEQ ID NO: 491392 - RNA, 22 nt, Human
gugugcagaagacacaagacau

SEQ ID NO: 491393 - RNA, 22 nt, Human
gaacuguaguuaauacuacaca

SEQ ID NO: 491394 - RNA, 22 nt, Human
ucuagucauauuuuuucaguau

SEQ ID NO: 491395 - RNA, 22 nt, Human
uguauuugaguuaugaaagaga

SEQ ID NO: 491396 - RNA, 22 nt, Human
ggaacacugccuuuuauuuucc

SEQ ID NO: 491397 - RNA, 22 nt, Human
uuagccauuugaggucuucauu

SEQ ID NO: 491398 - RNA, 22 nt, Human
uaucauaaguuaauuaaacagu

SEQ ID NO: 491399 - RNA, 22 nt, Human
gguaaacuaaccauuuuaauuu

SEQ ID NO: 491400 - RNA, 20 nt, Human
auguccugcuucuccucacc

SEQ ID NO: 491401 - RNA, 22 nt, Human
augugugccugagugauggacu

SEQ ID NO: 491402 - RNA, 22 nt, Human
gacagacacagggccaugauug

SEQ ID NO: 491403 - RNA, 22 nt, Human
cugcccugcuuguuuccagugg

SEQ ID NO: 491404 - RNA, 22 nt, Human
augauguugauaaauuacuuua

SEQ ID NO: 491405 - RNA, 22 nt, Human
cauuaauauuguucuucuuuag

SEQ ID NO: 491406 - RNA, 22 nt, Human
uccuguggagaggacuggaggu

SEQ ID NO: 491407 - RNA, 22 nt, Human
ucauuaauuugcuuagacuuau

SEQ ID NO: 491408 - RNA, 22 nt, Human
cugauauucauuauggagcucc

SEQ ID NO: 491409 - RNA, 22 nt, Human
gauauuuuuaggugaugcaggc

SEQ ID NO: 491410 - RNA, 22 nt, Human
uugcccugucaguagaagugca

SEQ ID NO: 491411 - RNA, 22 nt, Human
aggaaacuaacuuaucuuuaua

SEQ ID NO: 491412 - RNA, 22 nt, Human
ccugcccugucacuggcuaggg

SEQ ID NO: 491413 - RNA, 22 nt, Human
uuugugcagugguuaagaccau

SEQ ID NO: 491414 - RNA, 22 nt, Human
cccagccuacucugccauagca

SEQ ID NO: 491415 - RNA, 22 nt, Human
uugcugaaaacaggucaucagg

SEQ ID NO: 491416 - RNA, 19 nt, Human
agacaugagacacaggaug

SEQ ID NO: 491417 - RNA, 22 nt, Human
cugucuuuuacuaucauuuacu

SEQ ID NO: 491418 - RNA, 22 nt, Human
ucacugcuauauuggauacuga

SEQ ID NO: 491419 - RNA, 20 nt, Human
agcuccaugaaguagucacu

SEQ ID NO: 491420 - RNA, 22 nt, Human
auaagcuuuugauucacuucag

SEQ ID NO: 491421 - RNA, 22 nt, Human
uucuggcucuccccugcugggu

SEQ ID NO: 491422 - RNA, 22 nt, Human
ugauacuuuucuuuuagacuaa

SEQ ID NO: 491423 - RNA, 22 nt, Human
guccuggcuagucguccgcgac

SEQ ID NO: 491424 - RNA, 22 nt, Human
cagagcacugcuuggaggauuu

SEQ ID NO: 491425 - RNA, 22 nt, Human
agacacagaacacaaaagcaua

SEQ ID NO: 491426 - RNA, 22 nt, Human
ucagggcugacugcuacucucc

SEQ ID NO: 491427 - RNA, 22 nt, Human
ccucuggggguccucagagucu

SEQ ID NO: 491428 - RNA, 22 nt, Human
uuguuuuaguagguacacugag

SEQ ID NO: 491429 - RNA, 22 nt, Human
agagcacagugcaggauccccg

SEQ ID NO: 491430 - RNA, 20 nt, Human
auaauuauuuacuuuugugc

SEQ ID NO: 491431 - RNA, 22 nt, Human
ugugcacauaaaacaguacuag

SEQ ID NO: 491432 - RNA, 22 nt, Human
gggaaacucaggcauuuccacu

SEQ ID NO: 491433 - RNA, 22 nt, Human
uaacaguauugaagauaaacua

SEQ ID NO: 491434 - RNA, 22 nt, Human
augcugaagaguucaugauuau

SEQ ID NO: 491435 - RNA, 20 nt, Human
cuuuagaagaacccaagcau

SEQ ID NO: 491436 - RNA, 22 nt, Human
uccuguggaagacaguguuggg

SEQ ID NO: 491437 - RNA, 22 nt, Human
uuuugugagcccauaaaugcca

SEQ ID NO: 491438 - RNA, 22 nt, Human
gugacagauuugcugcgcaugg

SEQ ID NO: 491439 - RNA, 22 nt, Human
uucauucacccaggaaacaucu

SEQ ID NO: 491440 - RNA, 22 nt, Human
guccugguggagucucugggga

SEQ ID NO: 491441 - RNA, 22 nt, Human
ucucugggauaaacugggccag

SEQ ID NO: 491442 - RNA, 22 nt, Human
auuuagaacuuuguuugccaau

SEQ ID NO: 491443 - RNA, 22 nt, Human
ggggaaacauguuguucagacc

SEQ ID NO: 491444 - RNA, 22 nt, Human
uacaugugguagggagggcagu

SEQ ID NO: 491445 - RNA, 22 nt, Human
cugacccuagcaucucugugca

SEQ ID NO: 491446 - RNA, 22 nt, Human
ucuuagcaaauacuacuuagaa

SEQ ID NO: 491447 - RNA, 22 nt, Human
acacagaguuauuaugugaacu

SEQ ID NO: 491448 - RNA, 22 nt, Human
cuauuugucaguuuggcuuuaa

SEQ ID NO: 491449 - RNA, 22 nt, Human
uuuauuguguugaaacugaauu

SEQ ID NO: 491450 - RNA, 22 nt, Human
gcccuuauaaacaaggcuucag

SEQ ID NO: 491451 - RNA, 22 nt, Human
uuguauuuggguaguauagaga

SEQ ID NO: 491452 - RNA, 22 nt, Human
ccuggcucccugcacagggcuc

SEQ ID NO: 491453 - RNA, 22 nt, Human
uguccugggaaaucccuuaggc

SEQ ID NO: 491454 - RNA, 22 nt, Human
gacacagagacuugcaguugua

SEQ ID NO: 491455 - RNA, 22 nt, Human
gcuggcugggucccugagaggc

SEQ ID NO: 491456 - RNA, 22 nt, Human
ucucuuuaaguauaaucuuaua

SEQ ID NO: 491457 - RNA, 22 nt, Human
uuuguagacgucagaaguuacu

SEQ ID NO: 491458 - RNA, 22 nt, Human
ugucugaaacuuaugauauacu

SEQ ID NO: 491459 - RNA, 22 nt, Human
ugggcugcggauaggccucgga

SEQ ID NO: 491460 - RNA, 22 nt, Human
ugcccuuacacauggaaaggga

SEQ ID NO: 491461 - RNA, 21 nt, Human
accuucugaauuaccuaccaa

SEQ ID NO: 491462 - RNA, 22 nt, Human
gaucacaugaauggaauagaag

SEQ ID NO: 491463 - RNA, 22 nt, Human
uagcacuauauguuagcuauua

SEQ ID NO: 491464 - RNA, 22 nt, Human
auguguaggugaaucgaggcug

SEQ ID NO: 491465 - RNA, 22 nt, Human
uggacucaaguccaaguucacg

SEQ ID NO: 491466 - RNA, 22 nt, Human
ugcuucagaggaaaggcaaaag

SEQ ID NO: 491467 - RNA, 22 nt, Human
ugcugaauaaagauauauuuuc

SEQ ID NO: 491468 - RNA, 22 nt, Human
uuuugugagaugcguaugaaug

SEQ ID NO: 491469 - RNA, 22 nt, Human
uuuauuagugcuuguaucacug

SEQ ID NO: 491470 - RNA, 20 nt, Human
ccugucuccucuuaccuggc

SEQ ID NO: 491471 - RNA, 20 nt, Human
uguuucugacgguaggagag

SEQ ID NO: 491472 - RNA, 22 nt, Human
augugggccgugcggguguccu

SEQ ID NO: 491473 - RNA, 22 nt, Human
guuuagaacacggaaauacuga

SEQ ID NO: 491474 - RNA, 22 nt, Human
auuagcuuaguguuuccguaau

SEQ ID NO: 491475 - RNA, 22 nt, Human
gugugccaacaaaagacagugc

SEQ ID NO: 491476 - RNA, 22 nt, Human
gucuggcuguccagcuuaucua

SEQ ID NO: 491477 - RNA, 22 nt, Human
ccugggccuggcgggucggcuc

SEQ ID NO: 491478 - RNA, 22 nt, Human
cuuagcaugcaguguucugccc

SEQ ID NO: 491479 - RNA, 17 nt, Human
ugcacaagagacaauag

SEQ ID NO: 491480 - RNA, 22 nt, Human
ucuggcugggaagggggcccga

SEQ ID NO: 491481 - RNA, 22 nt, Human
agcagcacacgggagaaagaca

SEQ ID NO: 491482 - RNA, 22 nt, Human
uguugauuaguguuuagacuua

SEQ ID NO: 491483 - RNA, 22 nt, Human
gccugggugucgaucacuagug

SEQ ID NO: 491484 - RNA, 22 nt, Human
acuauucaagugcucauucaga

SEQ ID NO: 491485 - RNA, 23 nt, Human
auguuauuauuagcagucuugcc

SEQ ID NO: 491486 - RNA, 22 nt, Human
agggcagcucucaccucuggcc

SEQ ID NO: 491487 - RNA, 22 nt, Human
accaaacaaaauugugcacugu

SEQ ID NO: 491488 - RNA, 22 nt, Human
guggcacaggguuguuggucau

SEQ ID NO: 491489 - RNA, 22 nt, Human
cugcccuguggcucugagucau

SEQ ID NO: 491490 - RNA, 22 nt, Human
agcacuagccuguuuugcugug

SEQ ID NO: 491491 - RNA, 22 nt, Human
ggggucugggcuuagcuggaau

SEQ ID NO: 491492 - RNA, 22 nt, Human
gcuggguuuucuuccgggccua

SEQ ID NO: 491493 - RNA, 22 nt, Human
cccagccucuguuugcuccucu

SEQ ID NO: 491494 - RNA, 22 nt, Human
aaggccugggaggccucucuuc

SEQ ID NO: 491495 - RNA, 22 nt, Human
agcaggcacgcucccugcgcga

SEQ ID NO: 491496 - RNA, 22 nt, Human
aaucuugagggacucaugaggu

SEQ ID NO: 491497 - RNA, 22 nt, Human
uguguacagcaugguccagcag

SEQ ID NO: 491498 - RNA, 22 nt, Human
agccuguguuuuuucuauugca

SEQ ID NO: 491499 - RNA, 21 nt, Human
cuucagcaaauacuuggcagg

SEQ ID NO: 491500 - RNA, 22 nt, Human
guccucugucccuggggcacgg

SEQ ID NO: 491501 - RNA, 22 nt, Human
uguguccaucugacaggagagg

SEQ ID NO: 491502 - RNA, 22 nt, Human
ccaggacagggagacgggagcc

SEQ ID NO: 491503 - RNA, 18 nt, Human
gcuggcugcacuucugcu

SEQ ID NO: 491504 - RNA, 22 nt, Human
uuacaaggaggauagcauuucc

SEQ ID NO: 491505 - RNA, 22 nt, Human
cugggcugucccagggcggcag

SEQ ID NO: 491506 - RNA, 22 nt, Human
cugaaugacugaagucacaauu

SEQ ID NO: 491507 - RNA, 22 nt, Human
ucagcacugaaucuggauuugc

SEQ ID NO: 491508 - RNA, 22 nt, Human
uuucacauuuaggcgugaauug

SEQ ID NO: 491509 - RNA, 22 nt, Human
uugcccugcguuaccaucucuu

SEQ ID NO: 491510 - RNA, 22 nt, Human
acuuaaaaagaaucuuuucacg

SEQ ID NO: 491511 - RNA, 22 nt, Human
cuguguuuugauuaaaaagcaa

SEQ ID NO: 491512 - RNA, 22 nt, Human
uucaccuguguuuuguggcuga

SEQ ID NO: 491513 - RNA, 22 nt, Human
auacauauaugguacuuccugg

SEQ ID NO: 491514 - RNA, 22 nt, Human
ugcccuguggguaucugauggc

SEQ ID NO: 491515 - RNA, 22 nt, Human
gcacacaggcaguuuccagcca

SEQ ID NO: 491516 - RNA, 22 nt, Human
ucuuuuaguaauaaauauuugu

SEQ ID NO: 491517 - RNA, 22 nt, Human
uauguguauugagcauuguuac

SEQ ID NO: 491518 - RNA, 22 nt, Human
acacaagaaguuaaugggcaaa

SEQ ID NO: 491519 - RNA, 22 nt, Human
gcuggcugccuuacuuugugga

SEQ ID NO: 491520 - RNA, 22 nt, Human
gaaacauuguguucuacagauu

SEQ ID NO: 491521 - RNA, 22 nt, Human
aucuugaucaaggcuaucauga

SEQ ID NO: 491522 - RNA, 20 nt, Human
uuauuuguuuacuuuggucc

SEQ ID NO: 491523 - RNA, 22 nt, Human
acagagaccaguuacagcgucc

SEQ ID NO: 491524 - RNA, 22 nt, Human
uggagcugaacuuugaggccag

SEQ ID NO: 491525 - RNA, 19 nt, Human
ggcuccuguggcugcagcc

SEQ ID NO: 491526 - RNA, 22 nt, Human
auuuaauuuucucaacagugcu

SEQ ID NO: 491527 - RNA, 22 nt, Human
auuuaugacaaccaaagaguga

SEQ ID NO: 491528 - RNA, 22 nt, Human
gcacuaguucuacugccagcaa

SEQ ID NO: 491529 - RNA, 22 nt, Human
auuuaaaugcuuaagaggguuu

SEQ ID NO: 491530 - RNA, 22 nt, Human
aagaaacuguugcgugacagcg

SEQ ID NO: 491531 - RNA, 22 nt, Human
agcaguuauauuacucucaggu

SEQ ID NO: 491532 - RNA, 22 nt, Human
ugaaugaugcauuuguuuccca

SEQ ID NO: 491533 - RNA, 22 nt, Human
uuacaaucugauugucucaucu

SEQ ID NO: 491534 - RNA, 22 nt, Human
aagcagaucugauagggcccug

SEQ ID NO: 491535 - RNA, 22 nt, Human
cacacccucgugcucccucccg

SEQ ID NO: 491536 - RNA, 17 nt, Human
cccuggcucuaggugga

SEQ ID NO: 491537 - RNA, 22 nt, Human
agugcauuugggguaguggaag

SEQ ID NO: 491538 - RNA, 22 nt, Human
uacauuaucuuguuaucuuuca

SEQ ID NO: 491539 - RNA, 22 nt, Human
ugaggaugacgauggcaauggc

SEQ ID NO: 491540 - RNA, 22 nt, Human
gccuuaauugcagagcaauaua

SEQ ID NO: 491541 - RNA, 22 nt, Human
cugggcccuauggaagaaaggg

SEQ ID NO: 491542 - RNA, 22 nt, Human
ucuuagcauuucauaacaacug

SEQ ID NO: 491543 - RNA, 22 nt, Human
gccuucugauaucucuuggcau

SEQ ID NO: 491544 - RNA, 22 nt, Human
guccuggcugguucuguggggc

SEQ ID NO: 491545 - RNA, 22 nt, Human
ucuagaaugacaugcaagagua

SEQ ID NO: 491546 - RNA, 16 nt, Human
auuguuuucaauuaga

SEQ ID NO: 491547 - RNA, 22 nt, Human
aagcuucaguucuggggcaaug

SEQ ID NO: 491548 - RNA, 22 nt, Human
ccaugugcuugcucuggcaccu

SEQ ID NO: 491549 - RNA, 22 nt, Human
uagcauuucacugaucuucacu

SEQ ID NO: 491550 - RNA, 22 nt, Human
uuuaucuuuaggacuuugcaga

SEQ ID NO: 491551 - RNA, 22 nt, Human
cugcccuguagcuguucuagca

SEQ ID NO: 491552 - RNA, 22 nt, Human
uauguuguggggugcaucaaaa

SEQ ID NO: 491553 - RNA, 22 nt, Human
cccagccuuccacccuggacua

SEQ ID NO: 491554 - RNA, 22 nt, Human
caguauguuugggagacaugac

SEQ ID NO: 491555 - RNA, 22 nt, Human
acacaguauuacaauaggugcu

SEQ ID NO: 491556 - RNA, 22 nt, Human
uuguccuguuacuuguuuggau

SEQ ID NO: 491557 - RNA, 22 nt, Human
guuucugagcacuuuuauugca

SEQ ID NO: 491558 - RNA, 22 nt, Human
gacacagaugaucaggugugga

SEQ ID NO: 491559 - RNA, 22 nt, Human
uggcaaaggaaaugauuuaaga

SEQ ID NO: 491560 - RNA, 22 nt, Human
ucucaggaucuaauacauggua

SEQ ID NO: 491561 - RNA, 22 nt, Human
cugauauuauugaagcuggagu

SEQ ID NO: 491562 - RNA, 22 nt, Human
gaauuacagccagaagaaugaa

SEQ ID NO: 491563 - RNA, 22 nt, Human
aagauuuucagcuaauggugca

SEQ ID NO: 491564 - RNA, 23 nt, Human
uccagccucuugcucucacaugc

SEQ ID NO: 491565 - RNA, 22 nt, Human
uggcugccuagugucugagcag

SEQ ID NO: 491566 - RNA, 21 nt, Human
agcccuuaggacauaagagag

SEQ ID NO: 491567 - RNA, 22 nt, Human
aaauuagucgguuuaggaauuu

SEQ ID NO: 491568 - RNA, 17 nt, Human
ugcuccuguggcagccu

SEQ ID NO: 491569 - RNA, 22 nt, Human
uuguccugagauaaggaacaga

SEQ ID NO: 491570 - RNA, 22 nt, Human
cagcagcaucaggucugugguu

SEQ ID NO: 491571 - RNA, 22 nt, Human
agagcacaaauuuuaaggaggc

SEQ ID NO: 491572 - RNA, 22 nt, Human
auuuauuauugugguuacuucu

SEQ ID NO: 491573 - RNA, 22 nt, Human
gagcuucagaauuuaacagacu

SEQ ID NO: 491574 - RNA, 22 nt, Human
acugggccugauugggucggag

SEQ ID NO: 491575 - RNA, 23 nt, Human
ugcugggcagagcuggugcugag

SEQ ID NO: 491576 - RNA, 22 nt, Human
uagcugaagggcauuuaauaaa

SEQ ID NO: 491577 - RNA, 23 nt, Human
cuucagcagaaacauaaauucuc

SEQ ID NO: 491578 - RNA, 22 nt, Human
guguacaggaugacuguacuua

SEQ ID NO: 491579 - RNA, 19 nt, Human
aauaagcuuggguaaaacu

SEQ ID NO: 491580 - RNA, 21 nt, Human
uuagcaaagcaaacacaugcu

SEQ ID NO: 491581 - RNA, 22 nt, Human
uuuauuugucuugccauuuagu

SEQ ID NO: 491582 - RNA, 22 nt, Human
uuuaucugagcugauagauagu

SEQ ID NO: 491583 - RNA, 22 nt, Human
gaguggguaaaggugcuuggcu

SEQ ID NO: 491584 - RNA, 22 nt, Human
ucaauaauggcaggauaaauuu

SEQ ID NO: 491585 - RNA, 19 nt, Human
aggucugcagcugcaguuu

SEQ ID NO: 491586 - RNA, 22 nt, Human
ccucugggugggaggccgggcg

SEQ ID NO: 491587 - RNA, 22 nt, Human
cauuugaaauucuuagaacaaa

SEQ ID NO: 491588 - RNA, 22 nt, Human
uauuucuguaugcauaaaagga

SEQ ID NO: 491589 - RNA, 22 nt, Human
agucacaguuucccugagagag

SEQ ID NO: 491590 - RNA, 22 nt, Human
aggaagcuaaccagggagugag

SEQ ID NO: 491591 - RNA, 22 nt, Human
uuucugcagguauugcauaagu

SEQ ID NO: 491592 - RNA, 22 nt, Human
ucuuuaagccaagauauauuua

SEQ ID NO: 491593 - RNA, 22 nt, Human
ccugagcuuuaaaagccaugua

SEQ ID NO: 491594 - RNA, 22 nt, Human
uucacaguggcugugccauuug

SEQ ID NO: 491595 - RNA, 22 nt, Human
cuggcccuggagggcugugcga

SEQ ID NO: 491596 - RNA, 22 nt, Human
auagcauauaaguuauaaaacu

SEQ ID NO: 491597 - RNA, 22 nt, Human
cuaagacaugcccugcaugaua

SEQ ID NO: 491598 - RNA, 18 nt, Human
uuuauauggauagagacc

SEQ ID NO: 491599 - RNA, 22 nt, Human
ccuuagcaacugucauagagca

SEQ ID NO: 491600 - RNA, 22 nt, Human
guuaauaaagguauagaaucag

SEQ ID NO: 491601 - RNA, 22 nt, Human
agcauuaagccuggcucagagg

SEQ ID NO: 491602 - RNA, 22 nt, Human
uagcauuaucugucuuaucauu

SEQ ID NO: 491603 - RNA, 22 nt, Human
cagcagcaacaacggaagccuu

SEQ ID NO: 491604 - RNA, 22 nt, Human
auuuagaaccccuuccaaccug

SEQ ID NO: 491605 - RNA, 22 nt, Human
gcuacagagcucugugaagaga

SEQ ID NO: 491606 - RNA, 22 nt, Human
aggagccaguggaguuccugcc

SEQ ID NO: 491607 - RNA, 22 nt, Human
cucuggcugccucucaggccug

SEQ ID NO: 491608 - RNA, 23 nt, Human
cugaggucugcaauucuaguagu

SEQ ID NO: 491609 - RNA, 22 nt, Human
cuucagcagaugcaaaaccccu

SEQ ID NO: 491610 - RNA, 22 nt, Human
uucuuacagauuuggugaauga

SEQ ID NO: 491611 - RNA, 22 nt, Human
gaggccugggagccuguccucc

SEQ ID NO: 491612 - RNA, 22 nt, Human
cuguggcucucagaggcugcug

SEQ ID NO: 491613 - RNA, 22 nt, Human
auuagugauaugugacuagacc

SEQ ID NO: 491614 - RNA, 22 nt, Human
uccuggcuggaauuucucacuc

SEQ ID NO: 491615 - RNA, 22 nt, Human
uuucuuagcgaugcuugauaaa

SEQ ID NO: 491616 - RNA, 22 nt, Human
auuuggcaacauuaauugaauc

SEQ ID NO: 491617 - RNA, 22 nt, Human
uuauuugcccauguuuagcaga

SEQ ID NO: 491618 - RNA, 22 nt, Human
gcugcugggauccugggucuca

SEQ ID NO: 491619 - RNA, 22 nt, Human
uguccugugaccuggcaccaca

SEQ ID NO: 491620 - RNA, 22 nt, Human
uccuggcuuccacuccucuguu

SEQ ID NO: 491621 - RNA, 21 nt, Human
gcuucagcaaggcuugcuggu

SEQ ID NO: 491622 - RNA, 22 nt, Human
uugugugacuccuagaguagag

SEQ ID NO: 491623 - RNA, 22 nt, Human
uuuugugacagaaagauuaagu

SEQ ID NO: 491624 - RNA, 22 nt, Human
acagacagacagagaacuauuc

SEQ ID NO: 491625 - RNA, 22 nt, Human
cuggggcccugggucugcccuc

SEQ ID NO: 491626 - RNA, 22 nt, Human
uuugugaauagguuggcuucca

SEQ ID NO: 491627 - RNA, 22 nt, Human
cauguguggucuguggcuaucu

SEQ ID NO: 491628 - RNA, 22 nt, Human
auauuugucaauucacuguuca

SEQ ID NO: 491629 - RNA, 22 nt, Human
caugugugaaucuugugaucau

SEQ ID NO: 491630 - RNA, 22 nt, Human
uugcugaaugcaaguuggauag

SEQ ID NO: 491631 - RNA, 22 nt, Human
cuuagccagcuaacuuaagcac

SEQ ID NO: 491632 - RNA, 22 nt, Human
ucagcacuuuuacucucuuugc

SEQ ID NO: 491633 - RNA, 22 nt, Human
uuacaaagcaggucagcugaaa

SEQ ID NO: 491634 - RNA, 22 nt, Human
uguguacauauacacaaauaca

SEQ ID NO: 491635 - RNA, 22 nt, Human
cuggcuccacucccugccugac

SEQ ID NO: 491636 - RNA, 22 nt, Human
uauuagcuccaguacuguugcc

SEQ ID NO: 491637 - RNA, 22 nt, Human
aagucacaaagugcuguacaug

SEQ ID NO: 491638 - RNA, 21 nt, Human
gagccuucccucugcccuuuc

SEQ ID NO: 491639 - RNA, 22 nt, Human
agcauuaauaagaaauggcucc

SEQ ID NO: 491640 - RNA, 22 nt, Human
cugccagcaaugugaccaugcu

SEQ ID NO: 491641 - RNA, 22 nt, Human
auuuagaagcuaauuuuucaga

SEQ ID NO: 491642 - RNA, 22 nt, Human
uuguuuuaucuuucuacagacu

SEQ ID NO: 491643 - RNA, 22 nt, Human
gacuagucauuugcauuccguc

SEQ ID NO: 491644 - RNA, 22 nt, Human
gcuggguuuccagcaggcagga

SEQ ID NO: 491645 - RNA, 22 nt, Human
gucccugcaucugcaggccaug

SEQ ID NO: 491646 - RNA, 22 nt, Human
ugcugaauucuaccauccauuu

SEQ ID NO: 491647 - RNA, 22 nt, Human
aguccuggugacacuccucuuc

SEQ ID NO: 491648 - RNA, 22 nt, Human
ugaaugauuucuuaggcaauug

SEQ ID NO: 491649 - RNA, 22 nt, Human
cuggcuccauuacucagcaucu

SEQ ID NO: 491650 - RNA, 23 nt, Human
ugauuacaggaaguucaaguguu

SEQ ID NO: 491651 - RNA, 18 nt, Human
aggcacagagcauacaua

SEQ ID NO: 491652 - RNA, 22 nt, Human
augcccugcaucaagugacacu

SEQ ID NO: 491653 - RNA, 22 nt, Human
uuagcauucucauuugcauaaa

SEQ ID NO: 491654 - RNA, 22 nt, Human
uuuagcuuugaaggauaugguu

SEQ ID NO: 491655 - RNA, 22 nt, Human
ucuagcugaggguaggagaccu

SEQ ID NO: 491656 - RNA, 22 nt, Human
cugcccugagucaugccagaug

SEQ ID NO: 491657 - RNA, 22 nt, Human
uaagcauucaaugcuuagcacu

SEQ ID NO: 491658 - RNA, 22 nt, Human
uguccagggauggggucaggga

SEQ ID NO: 491659 - RNA, 22 nt, Human
cuagcacagcccauucagucua

SEQ ID NO: 491660 - RNA, 22 nt, Human
aaacauuguaauuuuagcaugg

SEQ ID NO: 491661 - RNA, 22 nt, Human
acugccugccuuccagguacug

SEQ ID NO: 491662 - RNA, 22 nt, Human
uacaaaugaguuguaugaacca

SEQ ID NO: 491663 - RNA, 22 nt, Human
gacacagagauaggccuguguu

SEQ ID NO: 491664 - RNA, 22 nt, Human
uuacaugggcuugugaguccuu

SEQ ID NO: 491665 - RNA, 22 nt, Human
uuguuuuauucugcaauuuccc

SEQ ID NO: 491666 - RNA, 22 nt, Human
ucauuaaucccgggguccaggg

SEQ ID NO: 491667 - RNA, 22 nt, Human
cugucuuuucuucucauugaug

SEQ ID NO: 491668 - RNA, 22 nt, Human
agacacaguauaagcacaacaa

SEQ ID NO: 491669 - RNA, 23 nt, Human
ccaagacuguuaggaguggggag

SEQ ID NO: 491670 - RNA, 22 nt, Human
gcucuugucaaaaauuaguuga

SEQ ID NO: 491671 - RNA, 22 nt, Human
cugccugugccaaugcuccuuu

SEQ ID NO: 491672 - RNA, 22 nt, Human
auugcugaaaugaaaggauaug

SEQ ID NO: 491673 - RNA, 22 nt, Human
acaacagagcuggacugagagg

SEQ ID NO: 491674 - RNA, 19 nt, Human
ucuggcugccaaggauuga

SEQ ID NO: 491675 - RNA, 22 nt, Human
acauauguguuguacaugcaug

SEQ ID NO: 491676 - RNA, 22 nt, Human
auagcauuuacuuuucagaaau

SEQ ID NO: 491677 - RNA, 17 nt, Human
cuuguuuuccacuggga

SEQ ID NO: 491678 - RNA, 22 nt, Human
ugggcugcccaagguggccaug

SEQ ID NO: 491679 - RNA, 22 nt, Human
gcaguggcuaagcucgcaugca

SEQ ID NO: 491680 - RNA, 21 nt, Human
ugaaagaggauguggucauuc

SEQ ID NO: 491681 - RNA, 22 nt, Human
guguccugggcauuaggcuuag

SEQ ID NO: 491682 - RNA, 22 nt, Human
auuugcugaaucaaugaauuuu

SEQ ID NO: 491683 - RNA, 22 nt, Human
auguacagccacuucacaguua

SEQ ID NO: 491684 - RNA, 22 nt, Human
uguccuggugcuucuugggauu

SEQ ID NO: 491685 - RNA, 22 nt, Human
gauucaagaccuagcucagcca

SEQ ID NO: 491686 - RNA, 19 nt, Human
cucagcacuuuuacacagg

SEQ ID NO: 491687 - RNA, 22 nt, Human
gcacaugucuuauucacuguua

SEQ ID NO: 491688 - RNA, 22 nt, Human
gugcccugugaacuguaaggaa

SEQ ID NO: 491689 - RNA, 22 nt, Human
gaaacauucagucaacaguguu

SEQ ID NO: 491690 - RNA, 22 nt, Human
uauuugaugguucuaaaacagc

SEQ ID NO: 491691 - RNA, 22 nt, Human
gugugcaggccacaggccaggg

SEQ ID NO: 491692 - RNA, 22 nt, Human
ccucugggaagccaguccugcu

SEQ ID NO: 491693 - RNA, 22 nt, Human
cacauguguauaugugaggggg

SEQ ID NO: 491694 - RNA, 23 nt, Human
ccuggguuucagagcugcuuuuc

SEQ ID NO: 491695 - RNA, 22 nt, Human
aacuagucagugauucucagaa

SEQ ID NO: 491696 - RNA, 22 nt, Human
uccuuagccagggcagcucaaa

SEQ ID NO: 491697 - RNA, 22 nt, Human
ugccaggccaaugaaggcaggg

SEQ ID NO: 491698 - RNA, 22 nt, Human
acugggccuggauuggcguguc

SEQ ID NO: 491699 - RNA, 22 nt, Human
auuuauuaugggauuuggcuca

SEQ ID NO: 491700 - RNA, 22 nt, Human
aaaaugauauccugacuuuuau

SEQ ID NO: 491701 - RNA, 20 nt, Human
cucauguggcaccaggcacu

SEQ ID NO: 491702 - RNA, 20 nt, Human
uuguuuuaaauccuggauga

SEQ ID NO: 491703 - RNA, 22 nt, Human
caugccuguauuucugaucuau

SEQ ID NO: 491704 - RNA, 22 nt, Human
uagaauaaguugaugauauaug

SEQ ID NO: 491705 - RNA, 22 nt, Human
uauuuguccuuauuaagaucug

SEQ ID NO: 491706 - RNA, 22 nt, Human
ccaaggacuggacacacagguu

SEQ ID NO: 491707 - RNA, 22 nt, Human
uacuccugcugauccugccagc

SEQ ID NO: 491708 - RNA, 22 nt, Human
caugugugaagacugcgggcca

SEQ ID NO: 491709 - RNA, 22 nt, Human
cagacaugauguaagcagaggc

SEQ ID NO: 491710 - RNA, 20 nt, Human
cagagccaagagcagcaucu

SEQ ID NO: 491711 - RNA, 22 nt, Human
gauauuuucagucuccuuucaa

SEQ ID NO: 491712 - RNA, 22 nt, Human
ucugggccuauagaagucuacc

SEQ ID NO: 491713 - RNA, 22 nt, Human
aauuaaaagauaacccaugagu

SEQ ID NO: 491714 - RNA, 23 nt, Human
agcauuagagaugccagcccugu

SEQ ID NO: 491715 - RNA, 22 nt, Human
cuuauuugagagaaaagaaacu

SEQ ID NO: 491716 - RNA, 22 nt, Human
guguuuuauuggugcagucaga

SEQ ID NO: 491717 - RNA, 22 nt, Human
ugcugaaagaccguauuuaucu

SEQ ID NO: 491718 - RNA, 22 nt, Human
gcugggccgaccugggcugcag

SEQ ID NO: 491719 - RNA, 22 nt, Human
aaauuauuaugccccucuauaa

SEQ ID NO: 491720 - RNA, 22 nt, Human
uagccauugacuuaaagcuuau

SEQ ID NO: 491721 - RNA, 21 nt, Human
agaagucaauugaacugaaau

SEQ ID NO: 491722 - RNA, 22 nt, Human
uuuaucuggacugugauauaaa

SEQ ID NO: 491723 - RNA, 23 nt, Human
uguguacacaauagaugagguuu

SEQ ID NO: 491724 - RNA, 18 nt, Human
cagacacucugcucugca

SEQ ID NO: 491725 - RNA, 22 nt, Human
uuuggugauagugcagagaaau

SEQ ID NO: 491726 - RNA, 22 nt, Human
guuagcauuuguuuaauaucag

SEQ ID NO: 491727 - RNA, 22 nt, Human
agacacagauuuuggaaaagau

SEQ ID NO: 491728 - RNA, 22 nt, Human
cugccugugccaccgccucauu

SEQ ID NO: 491729 - RNA, 22 nt, Human
agcaguaagcaacugagcuugc

SEQ ID NO: 491730 - RNA, 22 nt, Human
uggcuccuaggauggugccugg

SEQ ID NO: 491731 - RNA, 22 nt, Human
gcuacaggagcugucacaugcu

SEQ ID NO: 491732 - RNA, 22 nt, Human
uguuuuaaucucccauugcucu

SEQ ID NO: 491733 - RNA, 22 nt, Human
ucugggcugggagcguguggac

SEQ ID NO: 491734 - RNA, 20 nt, Human
cugcccugcccuggguccug

SEQ ID NO: 491735 - RNA, 22 nt, Human
ugugcagagcccacaggcagcu

SEQ ID NO: 491736 - RNA, 22 nt, Human
caauaauauccugugcuguuug

SEQ ID NO: 491737 - RNA, 22 nt, Human
ccucuggccuaggccgggagag

SEQ ID NO: 491738 - RNA, 22 nt, Human
uauuagcucaugauuucggugg

SEQ ID NO: 491739 - RNA, 22 nt, Human
augcccugaaagauucaaaggc

SEQ ID NO: 491740 - RNA, 19 nt, Human
uguggucucuguucucagg

SEQ ID NO: 491741 - RNA, 23 nt, Human
accuggcugcucaaccugcaggg

SEQ ID NO: 491742 - RNA, 22 nt, Human
acaccauacucauguugguucc

SEQ ID NO: 491743 - RNA, 22 nt, Human
cacacaugugugcagcuuagaa

SEQ ID NO: 491744 - RNA, 22 nt, Human
agagccagguguagucucggag

SEQ ID NO: 491745 - RNA, 22 nt, Human
aaagacauggaacuagagaugg

SEQ ID NO: 491746 - RNA, 22 nt, Human
caucuugacugggauaagggau

SEQ ID NO: 491747 - RNA, 22 nt, Human
cugggcuggacacacuuaaccu

SEQ ID NO: 491748 - RNA, 22 nt, Human
uuaauuaauuaguuaagcaugu

SEQ ID NO: 491749 - RNA, 18 nt, Human
cagcauuagcagcuucca

SEQ ID NO: 491750 - RNA, 22 nt, Human
gcccugcucuggucucugcccg

SEQ ID NO: 491751 - RNA, 22 nt, Human
aguggcagagccaggguuggga

SEQ ID NO: 491752 - RNA, 22 nt, Human
uccuggcucuucugaguuuucu

SEQ ID NO: 491753 - RNA, 22 nt, Human
cagcagcauugcucuggauucc

SEQ ID NO: 491754 - RNA, 22 nt, Human
cacaugugcaaauacugaggcu

SEQ ID NO: 491755 - RNA, 22 nt, Human
ccucuggcuuacuguuggguuu

SEQ ID NO: 491756 - RNA, 22 nt, Human
uggcuacaucacagagaauucc

SEQ ID NO: 491757 - RNA, 22 nt, Human
augugcacacagugucaugcaa

SEQ ID NO: 491758 - RNA, 22 nt, Human
gcagcacugauccuaaacuuag

SEQ ID NO: 491759 - RNA, 22 nt, Human
cccuggcugcuaccagguagcu

SEQ ID NO: 491760 - RNA, 22 nt, Human
cuguggugagcaacugacugaa

SEQ ID NO: 491761 - RNA, 22 nt, Human
augcccugggagugcuguacca

SEQ ID NO: 491762 - RNA, 22 nt, Human
gaaugauauuauuucgugcugg

SEQ ID NO: 491763 - RNA, 22 nt, Human
uugauauuagaguauuuguuug

SEQ ID NO: 491764 - RNA, 22 nt, Human
uuauuguuuggguauaauuuga

SEQ ID NO: 491765 - RNA, 22 nt, Human
ugggccacucuucccugggucu

SEQ ID NO: 491766 - RNA, 22 nt, Human
cagagucaugggccgucaggca

SEQ ID NO: 491767 - RNA, 22 nt, Human
guguccugaucaauugagcugg

SEQ ID NO: 491768 - RNA, 22 nt, Human
ugggcugcuguuacaggggcug

SEQ ID NO: 491769 - RNA, 22 nt, Human
cauuuaaugccuuugccaucca

SEQ ID NO: 491770 - RNA, 22 nt, Human
ugugugucuggaagcucaggga

SEQ ID NO: 491771 - RNA, 22 nt, Human
gcagcagcucaguucugggagg

SEQ ID NO: 491772 - RNA, 22 nt, Human
gagggcaguagccucguacccu

SEQ ID NO: 491773 - RNA, 22 nt, Human
gagcuucacgggggacagcauu

SEQ ID NO: 491774 - RNA, 22 nt, Human
ugaauaaucuuggguauuaaua

SEQ ID NO: 491775 - RNA, 22 nt, Human
ccuuagcaaauuggcaucuucu

SEQ ID NO: 491776 - RNA, 22 nt, Human
gauauuuuuaguauuucugccu

SEQ ID NO: 491777 - RNA, 22 nt, Human
uaacaguaaaguaaguuagcuu

SEQ ID NO: 491778 - RNA, 22 nt, Human
uucagcacugacugagugguua

SEQ ID NO: 491779 - RNA, 22 nt, Human
aggaaacugauguuuuuuacaa

SEQ ID NO: 491780 - RNA, 22 nt, Human
gcucuggcuacuccacccuguu

SEQ ID NO: 491781 - RNA, 22 nt, Human
auaagcucuggacagccacauu

SEQ ID NO: 491782 - RNA, 19 nt, Human
uuucugcagcccagcagca

SEQ ID NO: 491783 - RNA, 20 nt, Human
uuacaaagaggcaucgcuuu

SEQ ID NO: 491784 - RNA, 18 nt, Human
guuucaugcaugugaaac

SEQ ID NO: 491785 - RNA, 22 nt, Human
ggcaaacuacauuuuugaaaua

SEQ ID NO: 491786 - RNA, 22 nt, Human
uauagcauauacagauaagcug

SEQ ID NO: 491787 - RNA, 22 nt, Human
agagccacaguggauaggagcc

SEQ ID NO: 491788 - RNA, 22 nt, Human
uugaaugauccuaucuagcaca

SEQ ID NO: 491789 - RNA, 22 nt, Human
cuggcucccucucccugaguca

SEQ ID NO: 491790 - RNA, 22 nt, Human
ggggaaacugaggcacagacag

SEQ ID NO: 491791 - RNA, 22 nt, Human
uacuuguguucuacuagagaaa

SEQ ID NO: 491792 - RNA, 22 nt, Human
cagggaugggauggagucaguu

SEQ ID NO: 491793 - RNA, 22 nt, Human
cugcccuggaaaacguaucuua

SEQ ID NO: 491794 - RNA, 22 nt, Human
auauuguguguacaaguaguua

SEQ ID NO: 491795 - RNA, 22 nt, Human
ucauuuguugaacuuuagugcg

SEQ ID NO: 491796 - RNA, 22 nt, Human
agcaggcauagaguagcacuca

SEQ ID NO: 491797 - RNA, 22 nt, Human
uuacaggugggaaaacuaagcu

SEQ ID NO: 491798 - RNA, 22 nt, Human
gauuuguggugugaggaagagc

SEQ ID NO: 491799 - RNA, 22 nt, Human
cccuuagcucacaagcuaaagc

SEQ ID NO: 491800 - RNA, 22 nt, Human
auacuuaugauaaauaauugcu

SEQ ID NO: 491801 - RNA, 23 nt, Human
uuguccugccgaucucugagaau

SEQ ID NO: 491802 - RNA, 22 nt, Human
ccagggcaucacauccaguguu

SEQ ID NO: 491803 - RNA, 22 nt, Human
aauguauuugauguauuagccu

SEQ ID NO: 491804 - RNA, 22 nt, Human
uugcugaaaagcuggccuuugu

SEQ ID NO: 491805 - RNA, 22 nt, Human
auuagcuugguaugccauaaag

SEQ ID NO: 491806 - RNA, 22 nt, Human
gcaguggcuaggagucuggcgu

SEQ ID NO: 491807 - RNA, 22 nt, Human
uuauuuguggcauaugagacga

SEQ ID NO: 491808 - RNA, 21 nt, Human
agagccugagaucuuccagca

SEQ ID NO: 491809 - RNA, 22 nt, Human
ugccaggcccucccacagauua

SEQ ID NO: 491810 - RNA, 23 nt, Human
ggugggagauuauccagaauuau

SEQ ID NO: 491811 - RNA, 22 nt, Human
ugcugaauucucauucccugga

SEQ ID NO: 491812 - RNA, 22 nt, Human
cguggcugguggaccugagggc

SEQ ID NO: 491813 - RNA, 22 nt, Human
ugaugacaaacuuuccugaugc

SEQ ID NO: 491814 - RNA, 22 nt, Human
ucacuagucgcggggggaggua

SEQ ID NO: 491815 - RNA, 22 nt, Human
ugggcuccagcaccugugcucu

SEQ ID NO: 491816 - RNA, 22 nt, Human
ccuuggcugaggagggagcuga

SEQ ID NO: 491817 - RNA, 22 nt, Human
ucagcacugucuuuuauuugaa

SEQ ID NO: 491818 - RNA, 22 nt, Human
agcugccacagagccuggccag

SEQ ID NO: 491819 - RNA, 22 nt, Human
ccagguguuuggccugcaugau

SEQ ID NO: 491820 - RNA, 22 nt, Human
aggccagugcagcuggaacaga

SEQ ID NO: 491821 - RNA, 22 nt, Human
guuguugaucacaugcauaucu

SEQ ID NO: 491822 - RNA, 22 nt, Human
cauuuguauguuccuccuuagg

SEQ ID NO: 491823 - RNA, 22 nt, Human
ugcugaauaauaagauuacuca

SEQ ID NO: 491824 - RNA, 22 nt, Human
caggacacagaauaaggcaguu

SEQ ID NO: 491825 - RNA, 22 nt, Human
caggccagagcgcgugguuggg

SEQ ID NO: 491826 - RNA, 22 nt, Human
agccacagagguugaugugguu

SEQ ID NO: 491827 - RNA, 22 nt, Human
ugcugaaugcugcaugccguau

SEQ ID NO: 491828 - RNA, 22 nt, Human
uuauucuucuucucuugccagg

SEQ ID NO: 491829 - RNA, 22 nt, Human
uucugggcacacaggcccuggu

SEQ ID NO: 491830 - RNA, 21 nt, Human
cuguccucagauguggacgag

SEQ ID NO: 491831 - RNA, 22 nt, Human
ucugggcccuaaaccagcucua

SEQ ID NO: 491832 - RNA, 21 nt, Human
cacaugugaauuacugaacug

SEQ ID NO: 491833 - RNA, 22 nt, Human
agagccaggacugugucucacu

SEQ ID NO: 491834 - RNA, 22 nt, Human
ccuggcucagaccccaguucug

SEQ ID NO: 491835 - RNA, 22 nt, Human
cacaguguaguuaaugugacau

SEQ ID NO: 491836 - RNA, 22 nt, Human
uguccugggaacucacagucca

SEQ ID NO: 491837 - RNA, 19 nt, Human
uagcuucacguggucuaga

SEQ ID NO: 491838 - RNA, 22 nt, Human
ggaaccuuaguguucuuuuacc

SEQ ID NO: 491839 - RNA, 22 nt, Human
cagcccuuguuucuaaagcugc

SEQ ID NO: 491840 - RNA, 22 nt, Human
ugacugaaauugcauuuuaaaa

SEQ ID NO: 491841 - RNA, 22 nt, Human
cuaaauaaucccucuggucuua

SEQ ID NO: 491842 - RNA, 22 nt, Human
agccuugaaugcgcugcauugg

SEQ ID NO: 491843 - RNA, 22 nt, Human
agagccagcauuugggcccugc

SEQ ID NO: 491844 - RNA, 22 nt, Human
gcuggcuguuggagguaccugc

SEQ ID NO: 491845 - RNA, 22 nt, Human
uuguuuguaaggcucuuagaau

SEQ ID NO: 491846 - RNA, 22 nt, Human
gugcccuggagggguugaaggg

SEQ ID NO: 491847 - RNA, 22 nt, Human
gaacuccagaugacucaggaac

SEQ ID NO: 491848 - RNA, 22 nt, Human
agagccaggaucuguuuugggg

SEQ ID NO: 491849 - RNA, 22 nt, Human
auagaauagcauagaaaauuga

SEQ ID NO: 491850 - RNA, 19 nt, Human
aauaauguucaugagauug

SEQ ID NO: 491851 - RNA, 22 nt, Human
caguggguaggaaaggcucuuc

SEQ ID NO: 491852 - RNA, 22 nt, Human
agagccagcaagugaauaguga

SEQ ID NO: 491853 - RNA, 22 nt, Human
cugccuguuuccucuugcuccc

SEQ ID NO: 491854 - RNA, 22 nt, Human
acagagucauucacugaugaag

SEQ ID NO: 491855 - RNA, 22 nt, Human
uuuauuggauauuuacaagaua

SEQ ID NO: 491856 - RNA, 22 nt, Human
augugugugugcgcgcgcagga

SEQ ID NO: 491857 - RNA, 22 nt, Human
uuugcugauauuuugcugauac

SEQ ID NO: 491858 - RNA, 22 nt, Human
uauguacagggauagaacuuga

SEQ ID NO: 491859 - RNA, 22 nt, Human
auaauuaucucagacacuuguu

SEQ ID NO: 491860 - RNA, 22 nt, Human
caucucugguucagucucugug

SEQ ID NO: 491861 - RNA, 22 nt, Human
cuauuacauuucuggacauuca

SEQ ID NO: 491862 - RNA, 22 nt, Human
ccugagcucaaagggugccugg

SEQ ID NO: 491863 - RNA, 22 nt, Human
ggcuccugccgucuuuucugag

SEQ ID NO: 491864 - RNA, 22 nt, Human
uguaaugauguacuuagaagga

SEQ ID NO: 491865 - RNA, 22 nt, Human
gaauaauauugacuuugcaggc

SEQ ID NO: 491866 - RNA, 22 nt, Human
aaugcaaugcagcaccuccuug

SEQ ID NO: 491867 - RNA, 22 nt, Human
uucuuacauuacuuuacaugug

SEQ ID NO: 491868 - RNA, 22 nt, Human
auuaaauuaaguggcuaauuua

SEQ ID NO: 491869 - RNA, 22 nt, Human
ugaaugaucuccgauuaguccu

SEQ ID NO: 491870 - RNA, 22 nt, Human
gucuggcuuuugcccuguguuu

SEQ ID NO: 491871 - RNA, 22 nt, Human
uuacaaagcgcuuuaccucuga

SEQ ID NO: 491872 - RNA, 17 nt, Human
ucagcauacacagagaa

SEQ ID NO: 491873 - RNA, 22 nt, Human
gcuccuggcaggcagugugugu

SEQ ID NO: 491874 - RNA, 22 nt, Human
ugauuuaggaaacagcuacagg

SEQ ID NO: 491875 - RNA, 22 nt, Human
cauuacaaaguuauaaacaguu

SEQ ID NO: 491876 - RNA, 22 nt, Human
uguuuuaagggucaacugucac

SEQ ID NO: 491877 - RNA, 22 nt, Human
gcucaggccucggacacacaau

SEQ ID NO: 491878 - RNA, 22 nt, Human
gcugggcccugggugcccuagc

SEQ ID NO: 491879 - RNA, 22 nt, Human
ccugggucuucagucugcuggu

SEQ ID NO: 491880 - RNA, 20 nt, Human
agucacaggccuggaacaug

SEQ ID NO: 491881 - RNA, 22 nt, Human
cccuagaacacgcagacacuga

SEQ ID NO: 491882 - RNA, 22 nt, Human
gagagcauguggucuaguuuua

SEQ ID NO: 491883 - RNA, 22 nt, Human
cauuuagagaagauuacaagga

SEQ ID NO: 491884 - RNA, 22 nt, Human
ucuuuuagagcauuucugauuc

SEQ ID NO: 491885 - RNA, 22 nt, Human
agaucacaguggcaacucccuu

SEQ ID NO: 491886 - RNA, 21 nt, Human
ucauuuauugagaaaugacug

SEQ ID NO: 491887 - RNA, 22 nt, Human
auuugucaauaagaugaacaua

SEQ ID NO: 491888 - RNA, 22 nt, Human
agaaaugacaagacugaucagg

SEQ ID NO: 491889 - RNA, 22 nt, Human
uucuggcuuauccuaacucuaa

SEQ ID NO: 491890 - RNA, 22 nt, Human
cuuagcuucacugggucucagu

SEQ ID NO: 491891 - RNA, 22 nt, Human
cuauuuguacagcauucgaguu

SEQ ID NO: 491892 - RNA, 22 nt, Human
cauggcacugagcagguaugca

SEQ ID NO: 491893 - RNA, 22 nt, Human
aagaacaacugcuuuaaaagca

SEQ ID NO: 491894 - RNA, 22 nt, Human
aauuagcuuauguguacuuuuc

SEQ ID NO: 491895 - RNA, 22 nt, Human
cauuacaaccccaaauuacaaa

SEQ ID NO: 491896 - RNA, 22 nt, Human
guguccugggggacuucagguu

SEQ ID NO: 491897 - RNA, 22 nt, Human
augcccugaggaaugucacgcu

SEQ ID NO: 491898 - RNA, 22 nt, Human
aaugauaugcaaauuaucauca

SEQ ID NO: 491899 - RNA, 21 nt, Human
agacuucuagaagugagauag

SEQ ID NO: 491900 - RNA, 18 nt, Human
uggcuucuugagcuaaca

SEQ ID NO: 491901 - RNA, 22 nt, Human
aaacagugacugguacauaaua

SEQ ID NO: 491902 - RNA, 22 nt, Human
uuuagcauauccuauaaaacua

SEQ ID NO: 491903 - RNA, 22 nt, Human
uacacccuucuccugagugugu

SEQ ID NO: 491904 - RNA, 22 nt, Human
uauuugcugaaucugauucaga

SEQ ID NO: 491905 - RNA, 22 nt, Human
gccagccugugggggcucugug

SEQ ID NO: 491906 - RNA, 22 nt, Human
gagaacuuucuguguuuuuauc

SEQ ID NO: 491907 - RNA, 22 nt, Human
aguauaauuagauaucaaaagu

SEQ ID NO: 491908 - RNA, 22 nt, Human
auuuagaaauuccaaaaguauu

SEQ ID NO: 491909 - RNA, 22 nt, Human
cugggccagggaggugucugua

SEQ ID NO: 491910 - RNA, 22 nt, Human
gaggccugggagaacuguuuuu

SEQ ID NO: 491911 - RNA, 22 nt, Human
aagaacuuccuaauauauuuuc

SEQ ID NO: 491912 - RNA, 16 nt, Human
uugcccugaggggagg

SEQ ID NO: 491913 - RNA, 19 nt, Human
acagaaauguaagugagac

SEQ ID NO: 491914 - RNA, 22 nt, Human
cuccugucaauaggcuccuggc

SEQ ID NO: 491915 - RNA, 22 nt, Human
cuuagcuucauuauugguggcc

SEQ ID NO: 491916 - RNA, 22 nt, Human
cuuaaauuggaugaguuaaguu

SEQ ID NO: 491917 - RNA, 22 nt, Human
ccugggcuucugucuagauguu

SEQ ID NO: 491918 - RNA, 22 nt, Human
gcagcagcugacagugggugcc

SEQ ID NO: 491919 - RNA, 22 nt, Human
cagccacagcugggugccugac

SEQ ID NO: 491920 - RNA, 22 nt, Human
ccugagcuggcagugaccugga

SEQ ID NO: 491921 - RNA, 22 nt, Human
gccaggguucgaauccguaugg

SEQ ID NO: 491922 - RNA, 22 nt, Human
cugauaugaugggugauuuuca

SEQ ID NO: 491923 - RNA, 22 nt, Human
cauguacaaggaugcucagagu

SEQ ID NO: 491924 - RNA, 22 nt, Human
aggccagggcacugcucuuuag

SEQ ID NO: 491925 - RNA, 22 nt, Human
cuuuauuagauguagacuuucu

SEQ ID NO: 491926 - RNA, 22 nt, Human
cuuagcaugugguguccuugua

SEQ ID NO: 491927 - RNA, 22 nt, Human
auuaaauuuucacuaggcuccc

SEQ ID NO: 491928 - RNA, 22 nt, Human
agcacuagagccaaaauuuggg

SEQ ID NO: 491929 - RNA, 22 nt, Human
cuguuuuaucucaagaguucaa

SEQ ID NO: 491930 - RNA, 22 nt, Human
uuuagcauuacuaaaaugaaaa

SEQ ID NO: 491931 - RNA, 22 nt, Human
auuuaauuuauagauguggaua

SEQ ID NO: 491932 - RNA, 22 nt, Human
agcacuagcuuuaagcauucug

SEQ ID NO: 491933 - RNA, 22 nt, Human
uuuuuugucuugaagaaauggu

SEQ ID NO: 491934 - RNA, 22 nt, Human
auuuauugagagggaggggaau

SEQ ID NO: 491935 - RNA, 22 nt, Human
cauaauuacugauaugcugauu

SEQ ID NO: 491936 - RNA, 22 nt, Human
gagcuccaccaccuucaggcag

SEQ ID NO: 491937 - RNA, 21 nt, Human
uuagcuuucuagaaucuuugu

SEQ ID NO: 491938 - RNA, 22 nt, Human
ccaguccugccacccugucuau

SEQ ID NO: 491939 - RNA, 22 nt, Human
aguccuggcauauagguccuca

SEQ ID NO: 491940 - RNA, 20 nt, Human
aaaugaugggaauaaucuau

SEQ ID NO: 491941 - RNA, 22 nt, Human
uaacaguauagccuaacauuuc

SEQ ID NO: 491942 - RNA, 21 nt, Human
ugugugcauaugcauguacau

SEQ ID NO: 491943 - RNA, 22 nt, Human
aagucacagaacccauuguaac

SEQ ID NO: 491944 - RNA, 22 nt, Human
gugcccuguucauuucucuccc

SEQ ID NO: 491945 - RNA, 22 nt, Human
augugcaguugguggccaggag

SEQ ID NO: 491946 - RNA, 22 nt, Human
aguggcagaagucacuggguag

SEQ ID NO: 491947 - RNA, 22 nt, Human
aauuagcuucagcuuguggggc

SEQ ID NO: 491948 - RNA, 22 nt, Human
ugcuccugcugcaugcaucucc

SEQ ID NO: 491949 - RNA, 22 nt, Human
uacagagacccacaagagacug

SEQ ID NO: 491950 - RNA, 22 nt, Human
cagcagcaaaucuagaagagga

SEQ ID NO: 491951 - RNA, 22 nt, Human
aauagcauccuaaaacauacuu

SEQ ID NO: 491952 - RNA, 22 nt, Human
gucagggcuccacucacccucc

SEQ ID NO: 491953 - RNA, 22 nt, Human
cugcccuggcagccuaccaugg

SEQ ID NO: 491954 - RNA, 22 nt, Human
guccaucuguaggagggacaca

SEQ ID NO: 491955 - RNA, 22 nt, Human
cacuggcugagcuucucuaggg

SEQ ID NO: 491956 - RNA, 22 nt, Human
uugauuuauagaauguucaagc

SEQ ID NO: 491957 - RNA, 22 nt, Human
ugauaugugaagcuauuaguuc

SEQ ID NO: 491958 - RNA, 22 nt, Human
uauacuuaugcuaaaaaauguu

SEQ ID NO: 491959 - RNA, 20 nt, Human
accauuaauguaagcuuugu

SEQ ID NO: 491960 - RNA, 22 nt, Human
cccuggcucuucaccaccugcc

SEQ ID NO: 491961 - RNA, 22 nt, Human
uugugaaugcuuaauauguuuc

SEQ ID NO: 491962 - RNA, 19 nt, Human
agacacacuugauaugugu

SEQ ID NO: 491963 - RNA, 22 nt, Human
gcuggcugaggucuagcucuuu

SEQ ID NO: 491964 - RNA, 22 nt, Human
uuguccugugauuucagggccu

SEQ ID NO: 491965 - RNA, 22 nt, Human
gaugauauuuugacuggagaau

SEQ ID NO: 491966 - RNA, 22 nt, Human
aaagcuucuauucacuuacuug

SEQ ID NO: 491967 - RNA, 22 nt, Human
gcacaugugagaguagaggccu

SEQ ID NO: 491968 - RNA, 22 nt, Human
ccuggguuauuuuggucuagug

SEQ ID NO: 491969 - RNA, 22 nt, Human
aaugaugugaguuuuuauucuc

SEQ ID NO: 491970 - RNA, 22 nt, Human
uuauaauucuggcauaggcugu

SEQ ID NO: 491971 - RNA, 22 nt, Human
cagagacccuucucaguggcca

SEQ ID NO: 491972 - RNA, 22 nt, Human
uuacaauggguauacuuccauu

SEQ ID NO: 491973 - RNA, 22 nt, Human
aucaaaauggaagaauuuggcu

SEQ ID NO: 491974 - RNA, 22 nt, Human
cugcccugcccaggccuugggc

SEQ ID NO: 491975 - RNA, 20 nt, Human
caaggccuggaucuaguugc

SEQ ID NO: 491976 - RNA, 22 nt, Human
cccuggcucugccucagagccc

SEQ ID NO: 491977 - RNA, 22 nt, Human
auuaaauuagcaaacugugaaa

SEQ ID NO: 491978 - RNA, 22 nt, Human
uugcugaaguugcucagcucca

SEQ ID NO: 491979 - RNA, 22 nt, Human
agaccaugaccugccacuaagc

SEQ ID NO: 491980 - RNA, 22 nt, Human
uacagagauuuauugcuaaggc

SEQ ID NO: 491981 - RNA, 22 nt, Human
cugaaaauguuacacaggaaga

SEQ ID NO: 491982 - RNA, 22 nt, Human
ugcaaggcuauucacauguauu

SEQ ID NO: 491983 - RNA, 22 nt, Human
guccagcccgggcuccgccagc

SEQ ID NO: 491984 - RNA, 22 nt, Human
uucacugaauuaauuuccuucu

SEQ ID NO: 491985 - RNA, 22 nt, Human
cugaaugagggauucugagggc

SEQ ID NO: 491986 - RNA, 22 nt, Human
guucagcacaggugcucagaca

SEQ ID NO: 491987 - RNA, 22 nt, Human
ucugucuuggccagccaucugg

SEQ ID NO: 491988 - RNA, 22 nt, Human
ggcacagggggcugaggacuag

SEQ ID NO: 491989 - RNA, 22 nt, Human
cuguggcucaaaaucccaugau

SEQ ID NO: 491990 - RNA, 22 nt, Human
cugugucuucugcuuacagucu

SEQ ID NO: 491991 - RNA, 22 nt, Human
caguggguggcuaaguggcuga

SEQ ID NO: 491992 - RNA, 22 nt, Human
aguuucuugaagacugauguuu

SEQ ID NO: 491993 - RNA, 22 nt, Human
cuuagcagauaaaaaccuucag

SEQ ID NO: 491994 - RNA, 20 nt, Human
gagcuucaacucagcaaaca

SEQ ID NO: 491995 - RNA, 20 nt, Human
auguuuuauaaaagaacggg

SEQ ID NO: 491996 - RNA, 22 nt, Human
guaauaagaaacagcaauuauu

SEQ ID NO: 491997 - RNA, 22 nt, Human
uagaaugagaaaguguagcagg

SEQ ID NO: 491998 - RNA, 21 nt, Human
guuuagaaguagucuggcuca

SEQ ID NO: 491999 - RNA, 22 nt, Human
auuuguagugaagugaaaauaa

SEQ ID NO: 492000 - RNA, 22 nt, Human
uuucuuauacuauauugucauc

SEQ ID NO: 492001 - RNA, 22 nt, Human
ugaaugauauauugggaauaau

SEQ ID NO: 492002 - RNA, 22 nt, Human
uauuucugaggcccaggaagug

SEQ ID NO: 492003 - RNA, 17 nt, Human
gcagccagugcagcagg

SEQ ID NO: 492004 - RNA, 22 nt, Human
uuuauuuggcauccagggagaa

SEQ ID NO: 492005 - RNA, 22 nt, Human
caggcacaaauuucuagauaag

SEQ ID NO: 492006 - RNA, 22 nt, Human
cugcccugggugcuggggaucc

SEQ ID NO: 492007 - RNA, 22 nt, Human
ggccaaggaugguggcucuggu

SEQ ID NO: 492008 - RNA, 22 nt, Human
gugcccugaggucuucacuuug

SEQ ID NO: 492009 - RNA, 22 nt, Human
uccuuagcuuacaagucuucug

SEQ ID NO: 492010 - RNA, 22 nt, Human
ucacacagguuugcaaugauuu

SEQ ID NO: 492011 - RNA, 22 nt, Human
ucauuuguucucauucucuacu

SEQ ID NO: 492012 - RNA, 22 nt, Human
gucugccugcuaguggcugccu

SEQ ID NO: 492013 - RNA, 22 nt, Human
gaaugauagagcugccuucgga

SEQ ID NO: 492014 - RNA, 22 nt, Human
uuguaaauaguaguaagaugcc

SEQ ID NO: 492015 - RNA, 22 nt, Human
ugcagauucaaaugaaaugcaa

SEQ ID NO: 492016 - RNA, 22 nt, Human
uaguuuguagaaaucuagaaau

SEQ ID NO: 492017 - RNA, 22 nt, Human
acugggccggugcagaguaguu

SEQ ID NO: 492018 - RNA, 22 nt, Human
cuauuugucacaacugguguuu

SEQ ID NO: 492019 - RNA, 22 nt, Human
aagcagaugccaagauuuacca

SEQ ID NO: 492020 - RNA, 22 nt, Human
cugcccugcuucugagggaagc

SEQ ID NO: 492021 - RNA, 23 nt, Human
gcuucuagucaauuucaccagga

SEQ ID NO: 492022 - RNA, 22 nt, Human
ucagccuugcuucuggacuggu

SEQ ID NO: 492023 - RNA, 21 nt, Human
gugcccuguucccacaugccc

SEQ ID NO: 492024 - RNA, 18 nt, Human
augcccuguugacuucag

SEQ ID NO: 492025 - RNA, 22 nt, Human
agccugguuuaagcauuuuaua

SEQ ID NO: 492026 - RNA, 22 nt, Human
aaauacauuuacagucguggcu

SEQ ID NO: 492027 - RNA, 22 nt, Human
uguaggaaaaacaaugaucugc

SEQ ID NO: 492028 - RNA, 22 nt, Human
uccuagaaucuuuguaagauug

SEQ ID NO: 492029 - RNA, 22 nt, Human
caugugugguuaccuacuugac

SEQ ID NO: 492030 - RNA, 22 nt, Human
cauuguuaccaucuuuuaccua

SEQ ID NO: 492031 - RNA, 22 nt, Human
uuaguuuucccaucuuuauggu

SEQ ID NO: 492032 - RNA, 22 nt, Human
gcuggcagguaaagccccgggg

SEQ ID NO: 492033 - RNA, 22 nt, Human
acagguguacaaugcaugacag

SEQ ID NO: 492034 - RNA, 22 nt, Human
uauguacauguuaaagggcaaa

SEQ ID NO: 492035 - RNA, 22 nt, Human
cacugaguucccugacauuuca

SEQ ID NO: 492036 - RNA, 22 nt, Human
cuauuuguaagagccccacacc

SEQ ID NO: 492037 - RNA, 22 nt, Human
cuauuuguaaagugccuggugu

SEQ ID NO: 492038 - RNA, 22 nt, Human
gugcuacagacugaguacacuu

SEQ ID NO: 492039 - RNA, 22 nt, Human
auuaaauuggacgcugggggaa

SEQ ID NO: 492040 - RNA, 22 nt, Human
ugggggcuccaggcuccaggga

SEQ ID NO: 492041 - RNA, 22 nt, Human
ugcccuuauaaaggaggccuga

SEQ ID NO: 492042 - RNA, 22 nt, Human
uggagucugugaugcucugggu

SEQ ID NO: 492043 - RNA, 22 nt, Human
uuacaagauaaccugaugcugu

SEQ ID NO: 492044 - RNA, 22 nt, Human
agcaggcaccagggcucguccu

SEQ ID NO: 492045 - RNA, 22 nt, Human
ccugggccuugaccucgugggc

SEQ ID NO: 492046 - RNA, 22 nt, Human
uuauuuguaaggcagggccagu

SEQ ID NO: 492047 - RNA, 22 nt, Human
cugagcauuugugcagcuucuc

SEQ ID NO: 492048 - RNA, 17 nt, Human
ugccagccugucccagg

SEQ ID NO: 492049 - RNA, 22 nt, Human
ggccucacccaucggugccuuu

SEQ ID NO: 492050 - RNA, 22 nt, Human
ugcauuaaaaccaucgaccauc

SEQ ID NO: 492051 - RNA, 22 nt, Human
uauuuagugauagaagcaagga

SEQ ID NO: 492052 - RNA, 22 nt, Human
ugcugagucguauuauuuuuua

SEQ ID NO: 492053 - RNA, 22 nt, Human
aagacaugacugcacagccaaa

SEQ ID NO: 492054 - RNA, 22 nt, Human
guccugguccugccuccccaug

SEQ ID NO: 492055 - RNA, 22 nt, Human
uccuuagcaggcauucaggacc

SEQ ID NO: 492056 - RNA, 22 nt, Human
uuuagcuuuaccucauagauuu

SEQ ID NO: 492057 - RNA, 22 nt, Human
uugauauuuugcacgcuuggua

SEQ ID NO: 492058 - RNA, 22 nt, Human
ucugggccggagccgacggcag

SEQ ID NO: 492059 - RNA, 18 nt, Human
gcacauguaagaguaaag

SEQ ID NO: 492060 - RNA, 22 nt, Human
uccuggcucaggccccuggugc

SEQ ID NO: 492061 - RNA, 22 nt, Human
guguccugguuccuuguggcug

SEQ ID NO: 492062 - RNA, 22 nt, Human
aaauuaguacauugcaaagucc

SEQ ID NO: 492063 - RNA, 22 nt, Human
uggacucagugcugccauuccc

SEQ ID NO: 492064 - RNA, 22 nt, Human
acacaagauuguguauugaauu

SEQ ID NO: 492065 - RNA, 22 nt, Human
ucggggucuuugacacgcucug

SEQ ID NO: 492066 - RNA, 22 nt, Human
ccaggauggggagcagauagaa

SEQ ID NO: 492067 - RNA, 22 nt, Human
cuuuagaauuucauguuugguc

SEQ ID NO: 492068 - RNA, 22 nt, Human
augcugaaaauuggauuugaau

SEQ ID NO: 492069 - RNA, 22 nt, Human
ucuuuacaucacaauuguaugg

SEQ ID NO: 492070 - RNA, 22 nt, Human
uuuaaaaaacuagucugagucu

SEQ ID NO: 492071 - RNA, 22 nt, Human
aguccuggguccagcagguccu

SEQ ID NO: 492072 - RNA, 22 nt, Human
acagagucuuacguggugauaa

SEQ ID NO: 492073 - RNA, 22 nt, Human
cugggcucuagaaaggaaagaa

SEQ ID NO: 492074 - RNA, 22 nt, Human
aagaaugagcucaaagaucuua

SEQ ID NO: 492075 - RNA, 22 nt, Human
ucacagacuguguugcuacuca

SEQ ID NO: 492076 - RNA, 22 nt, Human
ucugggcccugagauguucuuc

SEQ ID NO: 492077 - RNA, 23 nt, Human
ucauaaauauuagcacaguagga

SEQ ID NO: 492078 - RNA, 22 nt, Human
aguacauacuucaaauguacuu

SEQ ID NO: 492079 - RNA, 23 nt, Human
aaacuugcuauggcugaaaucau

SEQ ID NO: 492080 - RNA, 22 nt, Human
cauugcaacuucaaacuccugg

SEQ ID NO: 492081 - RNA, 22 nt, Human
uugaaugagaaguuauugccau

SEQ ID NO: 492082 - RNA, 22 nt, Human
ugcacaggccuugaagggagag

SEQ ID NO: 492083 - RNA, 22 nt, Human
cauuuucagcacccaucugaaa

SEQ ID NO: 492084 - RNA, 18 nt, Human
acagacacuuaguaugag

SEQ ID NO: 492085 - RNA, 22 nt, Human
auagucacugccuuccauuugu

SEQ ID NO: 492086 - RNA, 22 nt, Human
caugugucuuuauggagccaca

SEQ ID NO: 492087 - RNA, 22 nt, Human
gggccuggugcuucugacuccu

SEQ ID NO: 492088 - RNA, 22 nt, Human
auagcauuauuuacaauuagua

SEQ ID NO: 492089 - RNA, 22 nt, Human
aaauaacagucagggacaacau

SEQ ID NO: 492090 - RNA, 22 nt, Human
ggcugcggccgcgggucugugc

SEQ ID NO: 492091 - RNA, 22 nt, Human
uuguccuguuuagggauaagga

SEQ ID NO: 492092 - RNA, 22 nt, Human
guacaacaggauugauguacca

SEQ ID NO: 492093 - RNA, 22 nt, Human
augucacagcaggaguauucuu

SEQ ID NO: 492094 - RNA, 22 nt, Human
gaggccugcuuuggcacucugg

SEQ ID NO: 492095 - RNA, 22 nt, Human
cauuuguaucauauguaucuua

SEQ ID NO: 492096 - RNA, 22 nt, Human
uugcugaaguauugugaauccu

SEQ ID NO: 492097 - RNA, 22 nt, Human
aauuuguguuauaccugcuccu

SEQ ID NO: 492098 - RNA, 22 nt, Human
ugcgcccagccaagucuggcac

SEQ ID NO: 492099 - RNA, 22 nt, Human
cugccccugccaggcagcuguc

SEQ ID NO: 492100 - RNA, 22 nt, Human
gauauuuucauucggaugcuca

SEQ ID NO: 492101 - RNA, 22 nt, Human
uguacagacuuugcagugugca

SEQ ID NO: 492102 - RNA, 22 nt, Human
uuuuauuaucuuugaaugggac

SEQ ID NO: 492103 - RNA, 22 nt, Human
cccagugucugggccugcaggg

SEQ ID NO: 492104 - RNA, 22 nt, Human
uuauuuguaaagguccauagua

SEQ ID NO: 492105 - RNA, 22 nt, Human
uccccugcagaugagggcagug

SEQ ID NO: 492106 - RNA, 22 nt, Human
gugaacagauaauagaaaugaa

SEQ ID NO: 492107 - RNA, 22 nt, Human
agcagcacccagagccaugucu

SEQ ID NO: 492108 - RNA, 22 nt, Human
uaaauuguuuucuagaaguugu

SEQ ID NO: 492109 - RNA, 22 nt, Human
aaauagacaggcuuaaauagga

SEQ ID NO: 492110 - RNA, 22 nt, Human
guccuagugccuggaagcuggg

SEQ ID NO: 492111 - RNA, 22 nt, Human
caaugaaaaugaggacuccugu

SEQ ID NO: 492112 - RNA, 23 nt, Human
guaaugaugggaauuuacuuaga

SEQ ID NO: 492113 - RNA, 22 nt, Human
cuggcugugcugacugagaggg

SEQ ID NO: 492114 - RNA, 22 nt, Human
uccugcugcuaccuggcccacg

SEQ ID NO: 492115 - RNA, 22 nt, Human
uauuuguauguguguacauaua

SEQ ID NO: 492116 - RNA, 22 nt, Human
gccaggugcaccugcccuggcc

SEQ ID NO: 492117 - RNA, 22 nt, Human
auuuagaaguuggagggcaaga

SEQ ID NO: 492118 - RNA, 22 nt, Human
aaagacuuggcuuaugauuugc

SEQ ID NO: 492119 - RNA, 22 nt, Human
uauuuguguggguaucuauaua

SEQ ID NO: 492120 - RNA, 22 nt, Human
gagacacaaacacauuuagagg

SEQ ID NO: 492121 - RNA, 22 nt, Human
uccuuagcccacuaauacuuau

SEQ ID NO: 492122 - RNA, 22 nt, Human
uaaguuucuccaaagcacagaa

SEQ ID NO: 492123 - RNA, 22 nt, Human
uaauacaucauucaucuaagga

SEQ ID NO: 492124 - RNA, 22 nt, Human
cucugcccucgcacaucugcca

SEQ ID NO: 492125 - RNA, 22 nt, Human
ugauuacacuauuugggaauag

SEQ ID NO: 492126 - RNA, 22 nt, Human
augcccugcugcuggggcagug

SEQ ID NO: 492127 - RNA, 22 nt, Human
gggaaacuguccaguucucccc

SEQ ID NO: 492128 - RNA, 22 nt, Human
cauuaauaaacauuucagaaga

SEQ ID NO: 492129 - RNA, 22 nt, Human
ggagccaguauuuaguggucuu

SEQ ID NO: 492130 - RNA, 22 nt, Human
agucacaugcauuuucuucaau

SEQ ID NO: 492131 - RNA, 22 nt, Human
uuugugaauucuuggaagauug

SEQ ID NO: 492132 - RNA, 22 nt, Human
gugcccugaugcaauugucuca

SEQ ID NO: 492133 - RNA, 22 nt, Human
uuauguguauaauuacaggaag

SEQ ID NO: 492134 - RNA, 22 nt, Human
agccacagcauguguguaugua

SEQ ID NO: 492135 - RNA, 18 nt, Human
cucucugggugaggacaa

SEQ ID NO: 492136 - RNA, 21 nt, Human
gugcacaguccugcacacagg

SEQ ID NO: 492137 - RNA, 22 nt, Human
uuuguagaacuguagaacaaug

SEQ ID NO: 492138 - RNA, 22 nt, Human
agccuuaaaugcuagauucaua

SEQ ID NO: 492139 - RNA, 22 nt, Human
uccauguguuuuccuguccaca

SEQ ID NO: 492140 - RNA, 22 nt, Human
ugggcagggagcuggaaccaca

SEQ ID NO: 492141 - RNA, 22 nt, Human
uguccugggaggcgggguccag

SEQ ID NO: 492142 - RNA, 22 nt, Human
aauaagcuggagcuauauugag

SEQ ID NO: 492143 - RNA, 22 nt, Human
cauguguaaggcucacaggcag

SEQ ID NO: 492144 - RNA, 22 nt, Human
acagaaauucugggacagaaaa

SEQ ID NO: 492145 - RNA, 22 nt, Human
uuguccugugucuguuuggauu

SEQ ID NO: 492146 - RNA, 22 nt, Human
uccauguggcaauaggagacag

SEQ ID NO: 492147 - RNA, 22 nt, Human
cucuggcuggcaccugaucuga

SEQ ID NO: 492148 - RNA, 22 nt, Human
cugcccugccuggccagugugg

SEQ ID NO: 492149 - RNA, 22 nt, Human
ugccuccuucaggagggcccgg

SEQ ID NO: 492150 - RNA, 22 nt, Human
ugcugaaugaauggaugguugc

SEQ ID NO: 492151 - RNA, 21 nt, Human
uucauuuguuauagacaaagu

SEQ ID NO: 492152 - RNA, 22 nt, Human
aaagaauacuccuuuugccuug

SEQ ID NO: 492153 - RNA, 22 nt, Human
uggcuccuggcagguguuucaa

SEQ ID NO: 492154 - RNA, 17 nt, Human
agcacuaaaaugcuucc

SEQ ID NO: 492155 - RNA, 22 nt, Human
gagcagcuugcgcugucuucac

SEQ ID NO: 492156 - RNA, 22 nt, Human
uugcccugaagaacgucccaga

SEQ ID NO: 492157 - RNA, 22 nt, Human
ucaguccucacuugguucuaag

SEQ ID NO: 492158 - RNA, 22 nt, Human
ugauuacauugguaauguuuau

SEQ ID NO: 492159 - RNA, 22 nt, Human
ucugggugcccuuugcucuguu

SEQ ID NO: 492160 - RNA, 19 nt, Human
aagcauuagccaaagcauu

SEQ ID NO: 492161 - RNA, 22 nt, Human
gcaaacauguugugagauacca

SEQ ID NO: 492162 - RNA, 22 nt, Human
ugauauggaaggaagauguaca

SEQ ID NO: 492163 - RNA, 21 nt, Human
uucccuucugguuuugagaga

SEQ ID NO: 492164 - RNA, 22 nt, Human
aggaaacugggccucagguuag

SEQ ID NO: 492165 - RNA, 21 nt, Human
auuagcuucaaaagcuugucu

SEQ ID NO: 492166 - RNA, 22 nt, Human
ucagcacugauguuucagaaga

SEQ ID NO: 492167 - RNA, 22 nt, Human
cuucuccuuauaugucccguuc

SEQ ID NO: 492168 - RNA, 19 nt, Human
uuuauuugagacaugccuu

SEQ ID NO: 492169 - RNA, 22 nt, Human
uacagagagauaaguguaaaag

SEQ ID NO: 492170 - RNA, 22 nt, Human
ucauuuguaccauuuuuuaaga

SEQ ID NO: 492171 - RNA, 22 nt, Human
gcccuuagucagcacuuucacu

SEQ ID NO: 492172 - RNA, 22 nt, Human
gggccuguaugggucucagaua

SEQ ID NO: 492173 - RNA, 22 nt, Human
uuagccuuagaagcuuagcaaa

SEQ ID NO: 492174 - RNA, 22 nt, Human
uuugaugaugaugauaaaguuu

SEQ ID NO: 492175 - RNA, 22 nt, Human
uucugugacuccucagagauuu

SEQ ID NO: 492176 - RNA, 22 nt, Human
ggcacauggagacuuggcauca

SEQ ID NO: 492177 - RNA, 22 nt, Human
uccuggcuuccacaccugucau

SEQ ID NO: 492178 - RNA, 22 nt, Human
uuaaauuuuagaaacagacucu

SEQ ID NO: 492179 - RNA, 22 nt, Human
uuuuuuguuggguagaacggaa

SEQ ID NO: 492180 - RNA, 22 nt, Human
ucugggcccacucaacuucacu

SEQ ID NO: 492181 - RNA, 22 nt, Human
aauuucuccaagaaugcuuaga

SEQ ID NO: 492182 - RNA, 22 nt, Human
guguacauagaauugugcuuug

SEQ ID NO: 492183 - RNA, 22 nt, Human
ccuuagcauggcugugcugugu

SEQ ID NO: 492184 - RNA, 22 nt, Human
acaugugugacaacagagguga

SEQ ID NO: 492185 - RNA, 22 nt, Human
uccuggcugcaccagugacccu

SEQ ID NO: 492186 - RNA, 22 nt, Human
gugcugaagugaaauucaucaa

SEQ ID NO: 492187 - RNA, 22 nt, Human
agucucugucguagaucagcgu

SEQ ID NO: 492188 - RNA, 22 nt, Human
uaaaugauaauaaugcuagugu

SEQ ID NO: 492189 - RNA, 22 nt, Human
gaucuugagcaaguugcauccc

SEQ ID NO: 492190 - RNA, 22 nt, Human
cccuuagcuggugagcccagcg

SEQ ID NO: 492191 - RNA, 22 nt, Human
ucagcacuuuuuaaagcagcau

SEQ ID NO: 492192 - RNA, 21 nt, Human
uggcugccuggcucugugguu

SEQ ID NO: 492193 - RNA, 22 nt, Human
ucuuagcacagcuauauaaguu

SEQ ID NO: 492194 - RNA, 22 nt, Human
ugaacagauggcccagcagagg

SEQ ID NO: 492195 - RNA, 22 nt, Human
gucuggcuagagacacccuccc

SEQ ID NO: 492196 - RNA, 22 nt, Human
uuauuugugaaucauuuaucua

SEQ ID NO: 492197 - RNA, 22 nt, Human
cacaguguuccagagcaguggu

SEQ ID NO: 492198 - RNA, 22 nt, Human
gaaguugauagaguacaugauu

SEQ ID NO: 492199 - RNA, 22 nt, Human
ugagccaggaguuugaggcugu

SEQ ID NO: 492200 - RNA, 22 nt, Human
guccuggcccacuggcaggcug

SEQ ID NO: 492201 - RNA, 22 nt, Human
accagggcuuacagcaguagcu

SEQ ID NO: 492202 - RNA, 20 nt, Human
ucagccuucucauccugggg

SEQ ID NO: 492203 - RNA, 22 nt, Human
uuacaugggccauuuagacaug

SEQ ID NO: 492204 - RNA, 22 nt, Human
acuuugugcccaacagaaagaa

SEQ ID NO: 492205 - RNA, 22 nt, Human
uagcauuccaucacucagcacc

SEQ ID NO: 492206 - RNA, 22 nt, Human
ucagcacuguguccagucuccc

SEQ ID NO: 492207 - RNA, 22 nt, Human
auuauuuggaauaggcauugca

SEQ ID NO: 492208 - RNA, 22 nt, Human
auuugugaucgugcgugaugaa

SEQ ID NO: 492209 - RNA, 22 nt, Human
uugcccugccucccugagguga

SEQ ID NO: 492210 - RNA, 18 nt, Human
cucauguguggucccagc

SEQ ID NO: 492211 - RNA, 22 nt, Human
cucuggcucccgcagcccccau

SEQ ID NO: 492212 - RNA, 22 nt, Human
ugggcugcuucuauuggugguc

SEQ ID NO: 492213 - RNA, 22 nt, Human
auguuuuauauuuugcagcagu

SEQ ID NO: 492214 - RNA, 22 nt, Human
augcuuuuaugucacaugguca

SEQ ID NO: 492215 - RNA, 22 nt, Human
gugggcuggacccuccugcucc

SEQ ID NO: 492216 - RNA, 22 nt, Human
ccuggcuuccauauggcacaua

SEQ ID NO: 492217 - RNA, 22 nt, Human
uguccugggccggcgacugguc

SEQ ID NO: 492218 - RNA, 22 nt, Human
uccuggcuccacugagcaggcc

SEQ ID NO: 492219 - RNA, 22 nt, Human
cugaaugaaaucaaggacugag

SEQ ID NO: 492220 - RNA, 22 nt, Human
uuuuaauuuugcaaaucuggug

SEQ ID NO: 492221 - RNA, 22 nt, Human
aacauucaaaacccaguucagu

SEQ ID NO: 492222 - RNA, 22 nt, Human
uccuggcucugcugccuccuag

SEQ ID NO: 492223 - RNA, 22 nt, Human
gggucugccugcugugaaguca

SEQ ID NO: 492224 - RNA, 22 nt, Human
auucuuuucccaacugcuuuaa

SEQ ID NO: 492225 - RNA, 22 nt, Human
agagacagaucugagggaccuc

SEQ ID NO: 492226 - RNA, 22 nt, Human
ucuggccucuugggaugcuccc

SEQ ID NO: 492227 - RNA, 18 nt, Human
uuguuuuaagacucuguc

SEQ ID NO: 492228 - RNA, 22 nt, Human
ccucagucugucugaucugcca

SEQ ID NO: 492229 - RNA, 22 nt, Human
ggcagagugcucugggcagggg

SEQ ID NO: 492230 - RNA, 22 nt, Human
uuagcauuucuggaaucacaag

SEQ ID NO: 492231 - RNA, 22 nt, Human
ugagccagaguggagugugccu

SEQ ID NO: 492232 - RNA, 22 nt, Human
uguccuggagugcuugggggaa

SEQ ID NO: 492233 - RNA, 22 nt, Human
gcagccagccccucugaccucu

SEQ ID NO: 492234 - RNA, 22 nt, Human
gugcccugguccccagcauaua

SEQ ID NO: 492235 - RNA, 22 nt, Human
augugugcuacaggugugggaa

SEQ ID NO: 492236 - RNA, 22 nt, Human
uacaggaacugggcaggacauu

SEQ ID NO: 492237 - RNA, 22 nt, Human
uacagagaugccgaagagugaa

SEQ ID NO: 492238 - RNA, 22 nt, Human
ucacauguguggcagugcaagu

SEQ ID NO: 492239 - RNA, 22 nt, Human
cuuggccugacauguggcaggg

SEQ ID NO: 492240 - RNA, 22 nt, Human
ugcaaugagaauauauuaacca

SEQ ID NO: 492241 - RNA, 22 nt, Human
gugugucagagcucagagaagu

SEQ ID NO: 492242 - RNA, 22 nt, Human
cugcugaaguuguuggucuuuu

SEQ ID NO: 492243 - RNA, 22 nt, Human
uauuggugggggcagagagaga

SEQ ID NO: 492244 - RNA, 22 nt, Human
gcuggcuggcgggugcguccuc

SEQ ID NO: 492245 - RNA, 22 nt, Human
ugccuggcacagagcagguggc

SEQ ID NO: 492246 - RNA, 22 nt, Human
uguccuagauccagcugugcug

SEQ ID NO: 492247 - RNA, 22 nt, Human
caagcagagacuagauagcugu

SEQ ID NO: 492248 - RNA, 22 nt, Human
uugcuuauuugauuaaaugucu

SEQ ID NO: 492249 - RNA, 22 nt, Human
uuugugaagggaacagaagugu

SEQ ID NO: 492250 - RNA, 22 nt, Human
aacauucaaguucugguuuaug

SEQ ID NO: 492251 - RNA, 22 nt, Human
ucuuauuuuuuaaugacagaga

SEQ ID NO: 492252 - RNA, 22 nt, Human
ugcccaggguggagugcagcgg

SEQ ID NO: 492253 - RNA, 22 nt, Human
ugucugcuacuugguucuacca

SEQ ID NO: 492254 - RNA, 22 nt, Human
uguacaagcaaauagaccuuca

SEQ ID NO: 492255 - RNA, 20 nt, Human
acguggccaccaguggcuua

SEQ ID NO: 492256 - RNA, 22 nt, Human
cugcccugagggccuguguguu

SEQ ID NO: 492257 - RNA, 22 nt, Human
aagcuucaaugagauaauuguu

SEQ ID NO: 492258 - RNA, 23 nt, Human
agguccuggacauaugugcauca

SEQ ID NO: 492259 - RNA, 22 nt, Human
gauauuuucgcagggagaauuc

SEQ ID NO: 492260 - RNA, 20 nt, Human
ugcacagggugggaagcaac

SEQ ID NO: 492261 - RNA, 22 nt, Human
acaucucagaacugaguaaccg

SEQ ID NO: 492262 - RNA, 22 nt, Human
uuaauaaguaguaguuauuguu

SEQ ID NO: 492263 - RNA, 22 nt, Human
ggcugccugcucaggugcggcg

SEQ ID NO: 492264 - RNA, 22 nt, Human
caggcacuggccagucagcaca

SEQ ID NO: 492265 - RNA, 23 nt, Human
ucuuguuuccuuugcgcuaucca

SEQ ID NO: 492266 - RNA, 18 nt, Human
uggcuccugccuccugca

SEQ ID NO: 492267 - RNA, 22 nt, Human
cauguguguccaugugacuaag

SEQ ID NO: 492268 - RNA, 19 nt, Human
caggccucuggucugcugu

SEQ ID NO: 492269 - RNA, 22 nt, Human
ucugugcuuucccugccuucuu

SEQ ID NO: 492270 - RNA, 22 nt, Human
uguaaugagucacuuaccuuaa

SEQ ID NO: 492271 - RNA, 22 nt, Human
gguccuggcagcucugugucca

SEQ ID NO: 492272 - RNA, 22 nt, Human
ucucuggguuuuuguccuguac

SEQ ID NO: 492273 - RNA, 22 nt, Human
cauugaauccuuccuucagaag

SEQ ID NO: 492274 - RNA, 22 nt, Human
uggcuucuggcuggugagaaau

SEQ ID NO: 492275 - RNA, 22 nt, Human
cucuggcuccauuucccuaugu

SEQ ID NO: 492276 - RNA, 22 nt, Human
aaaauaacuucuacuauuugca

SEQ ID NO: 492277 - RNA, 22 nt, Human
ucugacccguggcucugccucc

SEQ ID NO: 492278 - RNA, 19 nt, Human
gucccugggcagaggcacc

SEQ ID NO: 492279 - RNA, 22 nt, Human
uuuaauauccaguggauacaaa

SEQ ID NO: 492280 - RNA, 22 nt, Human
agacaucagcuugugugcaggg

SEQ ID NO: 492281 - RNA, 22 nt, Human
gucccugggucuaaggcaguaa

SEQ ID NO: 492282 - RNA, 22 nt, Human
uauuuggaaaggacauguaagu

SEQ ID NO: 492283 - RNA, 22 nt, Human
agaaaugaagcaggaguuauua

SEQ ID NO: 492284 - RNA, 22 nt, Human
ugauauuuaagcaaaaauaugg

SEQ ID NO: 492285 - RNA, 22 nt, Human
uucuggcuugaccccuacuucc

SEQ ID NO: 492286 - RNA, 22 nt, Human
agcccugcaggaugagggaggu

SEQ ID NO: 492287 - RNA, 22 nt, Human
acuccugugggcauggcacccc

SEQ ID NO: 492288 - RNA, 21 nt, Human
uacagaugaggagaccaaggc

SEQ ID NO: 492289 - RNA, 22 nt, Human
acagcacuuauucagcacagug

SEQ ID NO: 492290 - RNA, 22 nt, Human
uuagcauucuucuggggggcac

SEQ ID NO: 492291 - RNA, 22 nt, Human
uuuauucugugcuacaugaaga

SEQ ID NO: 492292 - RNA, 22 nt, Human
agagcacaggcucuggagucua

SEQ ID NO: 492293 - RNA, 22 nt, Human
agagccagagaccuggguucac

SEQ ID NO: 492294 - RNA, 22 nt, Human
aagacauugucauuuuauaauu

SEQ ID NO: 492295 - RNA, 22 nt, Human
cauuuguaguaucuguuuauau

SEQ ID NO: 492296 - RNA, 22 nt, Human
caguggguggccucuugaguca

SEQ ID NO: 492297 - RNA, 22 nt, Human
auuugcugagcucaaagaaaag

SEQ ID NO: 492298 - RNA, 20 nt, Human
cagagacccaggcuucagcu

SEQ ID NO: 492299 - RNA, 22 nt, Human
cuugcugagauaaaugcugucu

SEQ ID NO: 492300 - RNA, 22 nt, Human
ucuuggcuccucacagcaucag

SEQ ID NO: 492301 - RNA, 22 nt, Human
acacaugugucugcaugcagug

SEQ ID NO: 492302 - RNA, 22 nt, Human
agugcaggccccaggccaggcc

SEQ ID NO: 492303 - RNA, 21 nt, Human
aauuuugaaggaagauuaagg

SEQ ID NO: 492304 - RNA, 22 nt, Human
gcuucagagauuucacuaguuu

SEQ ID NO: 492305 - RNA, 22 nt, Human
uucucacaggauuucuuuuagu

SEQ ID NO: 492306 - RNA, 22 nt, Human
ggcucucuccuuggcuuucaga

SEQ ID NO: 492307 - RNA, 18 nt, Human
cccagccucuccuuucua

SEQ ID NO: 492308 - RNA, 23 nt, Human
caugugugacaguaucacuguuu

SEQ ID NO: 492309 - RNA, 22 nt, Human
uuuuagaaggaaugcuauggug

SEQ ID NO: 492310 - RNA, 22 nt, Human
cacagauagaccuuaugagauu

SEQ ID NO: 492311 - RNA, 22 nt, Human
guuuauuauucaacuucauguu

SEQ ID NO: 492312 - RNA, 22 nt, Human
cacuggauuuccaggaauacuc

SEQ ID NO: 492313 - RNA, 22 nt, Human
caaacauucaaguacaagucuu

SEQ ID NO: 492314 - RNA, 22 nt, Human
uuacaaagaaaauuaggcauuu

SEQ ID NO: 492315 - RNA, 22 nt, Human
agagccagauggagccgugugu

SEQ ID NO: 492316 - RNA, 22 nt, Human
auugauaaauugcaauggggcu

SEQ ID NO: 492317 - RNA, 22 nt, Human
auuagcuucugaagcccuugaa

SEQ ID NO: 492318 - RNA, 22 nt, Human
augcuuggcguuucacuuccug

SEQ ID NO: 492319 - RNA, 22 nt, Human
ugaaaugacagucuuaagcucu

SEQ ID NO: 492320 - RNA, 22 nt, Human
uuuuagaagugccuauccuaug

SEQ ID NO: 492321 - RNA, 22 nt, Human
auuaaauuggaucugcauaguu

SEQ ID NO: 492322 - RNA, 22 nt, Human
gaaauaaccucaugcaccauga

SEQ ID NO: 492323 - RNA, 22 nt, Human
uauuucugaauccaaaagguca

SEQ ID NO: 492324 - RNA, 22 nt, Human
gauauuuugagaaauccuauga

SEQ ID NO: 492325 - RNA, 22 nt, Human
agacacaguguugaaggcuagu

SEQ ID NO: 492326 - RNA, 22 nt, Human
uucagcacaagacuagacaggu

SEQ ID NO: 492327 - RNA, 22 nt, Human
cucuggcuuguuaaugcauauu

SEQ ID NO: 492328 - RNA, 22 nt, Human
ugcuggaugcuugauuuugagg

SEQ ID NO: 492329 - RNA, 22 nt, Human
aaucagcuaaauaaacuaguca

SEQ ID NO: 492330 - RNA, 22 nt, Human
augauauauguguugagcuugc

SEQ ID NO: 492331 - RNA, 22 nt, Human
uccuagaauagugugucuggag

SEQ ID NO: 492332 - RNA, 22 nt, Human
cugcccugucugcagccuggcu

SEQ ID NO: 492333 - RNA, 22 nt, Human
uuuaauuguuguggguacauag

SEQ ID NO: 492334 - RNA, 22 nt, Human
aaaugucugucucaugaggaaa

SEQ ID NO: 492335 - RNA, 22 nt, Human
agucagggccuggccugcugaa

SEQ ID NO: 492336 - RNA, 19 nt, Human
cacuagucuagaugggaug

SEQ ID NO: 492337 - RNA, 22 nt, Human
aguacaaguagaaugcuacaag

SEQ ID NO: 492338 - RNA, 22 nt, Human
uuacaaaguguuaugauaaaca

SEQ ID NO: 492339 - RNA, 22 nt, Human
auaagcuuuuaaagcuacuuug

SEQ ID NO: 492340 - RNA, 22 nt, Human
aucaacagugaagagaucaaga

SEQ ID NO: 492341 - RNA, 22 nt, Human
uggccugguuguugcugccguu

SEQ ID NO: 492342 - RNA, 22 nt, Human
ccuggcagcgugccgagcugcg

SEQ ID NO: 492343 - RNA, 22 nt, Human
guugcugauuaacacuuugagu

SEQ ID NO: 492344 - RNA, 22 nt, Human
ugaggaugagaugagauaacac

SEQ ID NO: 492345 - RNA, 22 nt, Human
cugauauucuauuuugcuugcu

SEQ ID NO: 492346 - RNA, 22 nt, Human
gugaaugauagcuucucuuugg

SEQ ID NO: 492347 - RNA, 22 nt, Human
uuagcacuuugauucaugcaga

SEQ ID NO: 492348 - RNA, 22 nt, Human
cagagacauuaagugccaugau

SEQ ID NO: 492349 - RNA, 22 nt, Human
acuagaaaguuuccagaguuau

SEQ ID NO: 492350 - RNA, 22 nt, Human
cagagcacccaaggagcauuug

SEQ ID NO: 492351 - RNA, 22 nt, Human
auuauuagauucuuaauuguaa

SEQ ID NO: 492352 - RNA, 22 nt, Human
gcacagagugggugagaugugg

SEQ ID NO: 492353 - RNA, 22 nt, Human
agcaggcaggaaggcagcacug

SEQ ID NO: 492354 - RNA, 22 nt, Human
uccuggcucggcuuggggacuu

SEQ ID NO: 492355 - RNA, 22 nt, Human
uuguccugcagguggcugggag

SEQ ID NO: 492356 - RNA, 19 nt, Human
ccacuuugcuucucugggu

SEQ ID NO: 492357 - RNA, 22 nt, Human
ggaaugauggugccuagauuau

SEQ ID NO: 492358 - RNA, 22 nt, Human
aagcuucacauugaacuugggu

SEQ ID NO: 492359 - RNA, 22 nt, Human
cuaggcuguaaagagcuaggag

SEQ ID NO: 492360 - RNA, 22 nt, Human
cuuuaauuaggaaguauaauga

SEQ ID NO: 492361 - RNA, 22 nt, Human
uucugugaaacuaaagagagga

SEQ ID NO: 492362 - RNA, 22 nt, Human
caucugcuguuccuuggacuca

SEQ ID NO: 492363 - RNA, 22 nt, Human
ggcucucugaggaaacccuucc

SEQ ID NO: 492364 - RNA, 22 nt, Human
acuuguuuuaucugucaauaga

SEQ ID NO: 492365 - RNA, 22 nt, Human
uauggcuggaauacugaaaggc

SEQ ID NO: 492366 - RNA, 22 nt, Human
caaaugauccuugcaagcugug

SEQ ID NO: 492367 - RNA, 21 nt, Human
uuacaaagcuacagauguugc

SEQ ID NO: 492368 - RNA, 22 nt, Human
uagccauuuuuauuaaugcugg

SEQ ID NO: 492369 - RNA, 22 nt, Human
ugggccaguuucucauugaaau

SEQ ID NO: 492370 - RNA, 22 nt, Human
aacaguaaaaaucauuuaguug

SEQ ID NO: 492371 - RNA, 22 nt, Human
uccuguguaaauagaucugguu

SEQ ID NO: 492372 - RNA, 22 nt, Human
ucccuggccauuccucuaggcc

SEQ ID NO: 492373 - RNA, 22 nt, Human
gugugcagggggccagcgcagc

SEQ ID NO: 492374 - RNA, 22 nt, Human
acagugcucaugugacauggug

SEQ ID NO: 492375 - RNA, 23 nt, Human
agcuccagcugacgugggcagcc

SEQ ID NO: 492376 - RNA, 22 nt, Human
gaaugauaaauggaagcagcau

SEQ ID NO: 492377 - RNA, 22 nt, Human
ggcuguggucugggugcucccc

SEQ ID NO: 492378 - RNA, 22 nt, Human
auuagcuuuggauucagaagau

SEQ ID NO: 492379 - RNA, 22 nt, Human
gcacuagucuaggugcuaagau

SEQ ID NO: 492380 - RNA, 22 nt, Human
agcacuagacauguaagugagc

SEQ ID NO: 492381 - RNA, 17 nt, Human
cccucuggggagggagg

SEQ ID NO: 492382 - RNA, 22 nt, Human
ucugggccagaucuagggaucu

SEQ ID NO: 492383 - RNA, 22 nt, Human
uucacagugagcuaugucuugu

SEQ ID NO: 492384 - RNA, 22 nt, Human
ugcccugguuacacuggagucc

SEQ ID NO: 492385 - RNA, 22 nt, Human
gcacagagguggaggacaaaua

SEQ ID NO: 492386 - RNA, 22 nt, Human
uuugagguuagcuagcagauca

SEQ ID NO: 492387 - RNA, 22 nt, Human
uacacauguccaaggugucacc

SEQ ID NO: 492388 - RNA, 22 nt, Human
gccuggcucccucugcagcucc

SEQ ID NO: 492389 - RNA, 23 nt, Human
augcccuguagaggcugcugacc

SEQ ID NO: 492390 - RNA, 22 nt, Human
uuugacaaaggaaaaaugcaca

SEQ ID NO: 492391 - RNA, 22 nt, Human
gcaguccauugacagaggucuu

SEQ ID NO: 492392 - RNA, 22 nt, Human
cacaguaagaaaugaagaggua

SEQ ID NO: 492393 - RNA, 23 nt, Human
uccugccagaugacuccuuucuu

SEQ ID NO: 492394 - RNA, 22 nt, Human
uugauuuguaggaauggagacc

SEQ ID NO: 492395 - RNA, 22 nt, Human
uucacaguggcccucucugagu

SEQ ID NO: 492396 - RNA, 22 nt, Human
guagucacaaaccauucauaug

SEQ ID NO: 492397 - RNA, 22 nt, Human
uuaauuaacuagccaaccacua

SEQ ID NO: 492398 - RNA, 22 nt, Human
accuucuggucugccugacagc

SEQ ID NO: 492399 - RNA, 22 nt, Human
uggagagccuggagucccugau

SEQ ID NO: 492400 - RNA, 22 nt, Human
ucacauguguuuucucaccaac

SEQ ID NO: 492401 - RNA, 22 nt, Human
ucuuguuuggauuuugggcagu

SEQ ID NO: 492402 - RNA, 22 nt, Human
cuuucuugcauaauuugaaacc

SEQ ID NO: 492403 - RNA, 22 nt, Human
uguggagcucagaaguagcagu

SEQ ID NO: 492404 - RNA, 22 nt, Human
cccagccugugacagccguccu

SEQ ID NO: 492405 - RNA, 23 nt, Human
acugccugcuacuaugcccacgg

SEQ ID NO: 492406 - RNA, 22 nt, Human
cccagccucuggguucugccgg

SEQ ID NO: 492407 - RNA, 22 nt, Human
auaagcuuccuguuagaaaccg

SEQ ID NO: 492408 - RNA, 22 nt, Human
accagggcggcuugaggaggca

SEQ ID NO: 492409 - RNA, 23 nt, Human
uuuagcaugaagcagcuggagaa

SEQ ID NO: 492410 - RNA, 22 nt, Human
uucagcacaguucaagauggua

SEQ ID NO: 492411 - RNA, 22 nt, Human
gucuggcuuugcucagaugcug

SEQ ID NO: 492412 - RNA, 22 nt, Human
acuacagaagucuuauuagaga

SEQ ID NO: 492413 - RNA, 22 nt, Human
uguccagggggcuuaccuggag

SEQ ID NO: 492414 - RNA, 22 nt, Human
uaauaauagcaguagcugccac

SEQ ID NO: 492415 - RNA, 22 nt, Human
uguuuuaagagcgcacuuuaua

SEQ ID NO: 492416 - RNA, 22 nt, Human
ugcccuggugaagugcucuccu

SEQ ID NO: 492417 - RNA, 22 nt, Human
gcacaggaaaugacucauguua

SEQ ID NO: 492418 - RNA, 22 nt, Human
agguccugaggguucgucugca

SEQ ID NO: 492419 - RNA, 22 nt, Human
uauuagcuuguuuggcaggaug

SEQ ID NO: 492420 - RNA, 22 nt, Human
cucugggcuccuucagcccuuu

SEQ ID NO: 492421 - RNA, 22 nt, Human
cagagucauaucagagaauaug

SEQ ID NO: 492422 - RNA, 22 nt, Human
uucuuugugcugaagaagcccu

SEQ ID NO: 492423 - RNA, 22 nt, Human
cuguccugauggugccacuggu

SEQ ID NO: 492424 - RNA, 22 nt, Human
ugcugaaucccacccuccagug

SEQ ID NO: 492425 - RNA, 22 nt, Human
ucagcacuuacuaguggccuuu

SEQ ID NO: 492426 - RNA, 22 nt, Human
caaaugauagagccgauuauca

SEQ ID NO: 492427 - RNA, 22 nt, Human
uuucagcacuuuaggcagcagg

SEQ ID NO: 492428 - RNA, 22 nt, Human
ccacaggaaguuaugaguacua

SEQ ID NO: 492429 - RNA, 22 nt, Human
cuggccugugggcugucuccgg

SEQ ID NO: 492430 - RNA, 22 nt, Human
cuccucuggaaauuccucugcc

SEQ ID NO: 492431 - RNA, 22 nt, Human
gugugcagcagagacaggacuc

SEQ ID NO: 492432 - RNA, 20 nt, Human
cagguccagcacgugcacgg

SEQ ID NO: 492433 - RNA, 22 nt, Human
ccugggcuuacgaccucugacu

SEQ ID NO: 492434 - RNA, 20 nt, Human
acaaaauagguacuggguag

SEQ ID NO: 492435 - RNA, 22 nt, Human
uguaaagaaauagcauuuguag

SEQ ID NO: 492436 - RNA, 22 nt, Human
uuuaaauuauaguuaaugucug

SEQ ID NO: 492437 - RNA, 22 nt, Human
ucucuuguaauuuaaaaaaucu

SEQ ID NO: 492438 - RNA, 22 nt, Human
acugccuguuuggcauggcccc

SEQ ID NO: 492439 - RNA, 17 nt, Human
uauuagcuagcuuccag

SEQ ID NO: 492440 - RNA, 19 nt, Human
auuagcaugcuugaggaug

SEQ ID NO: 492441 - RNA, 22 nt, Human
cucucugagugagggacaagcu

SEQ ID NO: 492442 - RNA, 22 nt, Human
aagcugucaauguaucuagucu

SEQ ID NO: 492443 - RNA, 22 nt, Human
cuggccucagagggucauggug

SEQ ID NO: 492444 - RNA, 22 nt, Human
agcauuaagagagacugaacug

SEQ ID NO: 492445 - RNA, 22 nt, Human
cugccugugauuuuucucuagu

SEQ ID NO: 492446 - RNA, 22 nt, Human
auguccuggggucuucucuuca

SEQ ID NO: 492447 - RNA, 22 nt, Human
cccuggcugcuuguagucuggc

SEQ ID NO: 492448 - RNA, 22 nt, Human
guccugugugagugcaccaccu

SEQ ID NO: 492449 - RNA, 22 nt, Human
guccuggcuuaguucgcuguaa

SEQ ID NO: 492450 - RNA, 22 nt, Human
agcuccagaagccugcaaggua

SEQ ID NO: 492451 - RNA, 22 nt, Human
uuaugagcuaaguuguggcccc

SEQ ID NO: 492452 - RNA, 22 nt, Human
cucagcacugacccaggagaug

SEQ ID NO: 492453 - RNA, 22 nt, Human
ugaaugauuaaaacccggacua

SEQ ID NO: 492454 - RNA, 22 nt, Human
acaggacaacucagcagccagc

SEQ ID NO: 492455 - RNA, 22 nt, Human
ccagggcagcagaauuggggca

SEQ ID NO: 492456 - RNA, 19 nt, Human
cuauuagcuugggcaucau

SEQ ID NO: 492457 - RNA, 22 nt, Human
cugcccuguccuucccgccggc

SEQ ID NO: 492458 - RNA, 22 nt, Human
uuaaauugucauuugagcaaug

SEQ ID NO: 492459 - RNA, 22 nt, Human
guucuuuaaguggagaaggaaa

SEQ ID NO: 492460 - RNA, 22 nt, Human
gaccacagcuacaagggcaagg

SEQ ID NO: 492461 - RNA, 22 nt, Human
uggcuucuggccaggcacagga

SEQ ID NO: 492462 - RNA, 22 nt, Human
gcacagaaaugucuacacaugu

SEQ ID NO: 492463 - RNA, 22 nt, Human
agagugggccucugagucccag

SEQ ID NO: 492464 - RNA, 22 nt, Human
uuauucugacuaauguauaacu

SEQ ID NO: 492465 - RNA, 22 nt, Human
cauaauuagucauguuaugcau

SEQ ID NO: 492466 - RNA, 22 nt, Human
cugcccugauaugauuuagaac

SEQ ID NO: 492467 - RNA, 22 nt, Human
cugcccugucuuuuucugauga

SEQ ID NO: 492468 - RNA, 22 nt, Human
cuuaaauucuuaaugcccucau

SEQ ID NO: 492469 - RNA, 22 nt, Human
uuuguagacuaccaguaauugu

SEQ ID NO: 492470 - RNA, 22 nt, Human
ucauguguguuucauguaugga

SEQ ID NO: 492471 - RNA, 22 nt, Human
accuuagcuguuaaaacuaagu

SEQ ID NO: 492472 - RNA, 22 nt, Human
uugcugaacccugcccucuaau

SEQ ID NO: 492473 - RNA, 22 nt, Human
acagcacuggucccgcaagccu

SEQ ID NO: 492474 - RNA, 22 nt, Human
auauuuguauuucgugugugua

SEQ ID NO: 492475 - RNA, 22 nt, Human
uguagcauuuuauguaauaagu

SEQ ID NO: 492476 - RNA, 22 nt, Human
agggcugguauguccaugaaag

SEQ ID NO: 492477 - RNA, 22 nt, Human
aaagcuucuaggccuauugcuu

SEQ ID NO: 492478 - RNA, 20 nt, Human
uaacaguaagugauguuaca

SEQ ID NO: 492479 - RNA, 22 nt, Human
uaaaaugacuuccuccaacauc

SEQ ID NO: 492480 - RNA, 22 nt, Human
cugcuugggguuaggguguccu

SEQ ID NO: 492481 - RNA, 22 nt, Human
auuuaauuugugucuuuagcug

SEQ ID NO: 492482 - RNA, 22 nt, Human
cauguguggagggcaugcaugg

SEQ ID NO: 492483 - RNA, 22 nt, Human
ugcacuagccacauuucaaaug

SEQ ID NO: 492484 - RNA, 22 nt, Human
uuugugaauaagagaaugacag

SEQ ID NO: 492485 - RNA, 22 nt, Human
agcagacagguaggaggauaaa

SEQ ID NO: 492486 - RNA, 22 nt, Human
uuguuuuaaccuaguguuuaug

SEQ ID NO: 492487 - RNA, 22 nt, Human
gccaggugcauggcugagucuc

SEQ ID NO: 492488 - RNA, 22 nt, Human
uugauuugauugaugaacuaag

SEQ ID NO: 492489 - RNA, 22 nt, Human
aggaaacuuucuuuugcuucau

SEQ ID NO: 492490 - RNA, 22 nt, Human
auuauuauuguugauguuaggg

SEQ ID NO: 492491 - RNA, 22 nt, Human
gagacacagcagauauucaauc

SEQ ID NO: 492492 - RNA, 22 nt, Human
uacacagaaccugguguacagu

SEQ ID NO: 492493 - RNA, 22 nt, Human
acacagguacacauauguaccu

SEQ ID NO: 492494 - RNA, 22 nt, Human
uuagcauuucauuucaagagga

SEQ ID NO: 492495 - RNA, 23 nt, Human
uauuuggaaagagggaagaagac

SEQ ID NO: 492496 - RNA, 22 nt, Human
augaaugacugucuacuuuggg

SEQ ID NO: 492497 - RNA, 22 nt, Human
acagagguaggacaugagauau

SEQ ID NO: 492498 - RNA, 22 nt, Human
aaaaugaauaaguuaacccagg

SEQ ID NO: 492499 - RNA, 22 nt, Human
uuaauuaugagaaagggaaaag

SEQ ID NO: 492500 - RNA, 22 nt, Human
gacagacaugggacuucauacu

SEQ ID NO: 492501 - RNA, 22 nt, Human
aauaauuacccaucuuuuugua

SEQ ID NO: 492502 - RNA, 22 nt, Human
agagccagccuucucagcuuac

SEQ ID NO: 492503 - RNA, 22 nt, Human
cauaauuaggcaguugaucauu

SEQ ID NO: 492504 - RNA, 22 nt, Human
acacaugugauucuaagacagc

SEQ ID NO: 492505 - RNA, 22 nt, Human
guguacaguuagccaccaaauu

SEQ ID NO: 492506 - RNA, 22 nt, Human
augaaugaagaacaucugugcc

SEQ ID NO: 492507 - RNA, 22 nt, Human
agagacauggagaggcaaaguu

SEQ ID NO: 492508 - RNA, 22 nt, Human
gauuugugcucauuuuccauua

SEQ ID NO: 492509 - RNA, 22 nt, Human
ggcuccuggggaggugagcuug

SEQ ID NO: 492510 - RNA, 22 nt, Human
aaauuauuacaagcuaguuggc

SEQ ID NO: 492511 - RNA, 22 nt, Human
uucagacaauaagagucaucuc

SEQ ID NO: 492512 - RNA, 22 nt, Human
ucccagccuggacccugccagu

SEQ ID NO: 492513 - RNA, 18 nt, Human
gguccugggccuggcuca

SEQ ID NO: 492514 - RNA, 22 nt, Human
uauugguguacuuauagcagag

SEQ ID NO: 492515 - RNA, 22 nt, Human
ggcacacagauggagcacuagc

SEQ ID NO: 492516 - RNA, 22 nt, Human
caucuugagacaugaaaggugu

SEQ ID NO: 492517 - RNA, 22 nt, Human
cuguggcuggccugucugacau

SEQ ID NO: 492518 - RNA, 22 nt, Human
auuuagugaaacccauaaagca

SEQ ID NO: 492519 - RNA, 22 nt, Human
uccuggcuguuagagaggcaag

SEQ ID NO: 492520 - RNA, 22 nt, Human
uugaaugaguguuuuacucaug

SEQ ID NO: 492521 - RNA, 22 nt, Human
caaagacugcauaacacaugaa

SEQ ID NO: 492522 - RNA, 22 nt, Human
cagcagcaugaauucgagccac

SEQ ID NO: 492523 - RNA, 22 nt, Human
cauaauuaaauucugggcaaga

SEQ ID NO: 492524 - RNA, 22 nt, Human
aagcuucauuucaacucagggg

SEQ ID NO: 492525 - RNA, 22 nt, Human
aaacaugcuggauuuagaauau

SEQ ID NO: 492526 - RNA, 22 nt, Human
cuucuggggauggagcccagaa

SEQ ID NO: 492527 - RNA, 22 nt, Human
uugcugaaaacaguggguauug

SEQ ID NO: 492528 - RNA, 22 nt, Human
cacuguugaagauacuuccucu

SEQ ID NO: 492529 - RNA, 22 nt, Human
aaggagguuaucccaguggacu

SEQ ID NO: 492530 - RNA, 22 nt, Human
uccuagaauaaucuuugacugc

SEQ ID NO: 492531 - RNA, 19 nt, Human
gcccucaggcagcuccauc

SEQ ID NO: 492532 - RNA, 22 nt, Human
uaauaagcguagaagguauauc

SEQ ID NO: 492533 - RNA, 22 nt, Human
ucaaucacguguuccauguucu

SEQ ID NO: 492534 - RNA, 22 nt, Human
uuguuuuaaugagggagguuga

SEQ ID NO: 492535 - RNA, 22 nt, Human
ugggcugccggcaggcucugcc

SEQ ID NO: 492536 - RNA, 22 nt, Human
auuagcuuaggcaugaagagaa

SEQ ID NO: 492537 - RNA, 21 nt, Human
ugcugaaucugccauauuuuc

SEQ ID NO: 492538 - RNA, 22 nt, Human
cauuuguagcuauuuacuguau

SEQ ID NO: 492539 - RNA, 20 nt, Human
uggaugucaaauuaggcugg

SEQ ID NO: 492540 - RNA, 22 nt, Human
cagacagaggcuguaugagggc

SEQ ID NO: 492541 - RNA, 22 nt, Human
ugaaugaugcaguauaaugaua

SEQ ID NO: 492542 - RNA, 23 nt, Human
uucauuuaggaguucauaagagc

SEQ ID NO: 492543 - RNA, 20 nt, Human
agcuucagcccuaggauugc

SEQ ID NO: 492544 - RNA, 22 nt, Human
aucagcacaacguacagagaaa

SEQ ID NO: 492545 - RNA, 22 nt, Human
auauuuguuagagucuaugugu

SEQ ID NO: 492546 - RNA, 22 nt, Human
caaaugaugcauggcuagugag

SEQ ID NO: 492547 - RNA, 22 nt, Human
uguguguggggaggcagcagau

SEQ ID NO: 492548 - RNA, 22 nt, Human
aggacauguaaauggagaggga

SEQ ID NO: 492549 - RNA, 22 nt, Human
gcugaaugaauguauuuuaaaa

SEQ ID NO: 492550 - RNA, 22 nt, Human
gccuggcuggucacugccuggc

SEQ ID NO: 492551 - RNA, 22 nt, Human
uccuggcuaaugcugcugaugg

SEQ ID NO: 492552 - RNA, 22 nt, Human
cuuauuugaauguaugaguuuu

SEQ ID NO: 492553 - RNA, 22 nt, Human
cugggcugucaauggcccucug

SEQ ID NO: 492554 - RNA, 22 nt, Human
cccauucuucaugguuuccugu

SEQ ID NO: 492555 - RNA, 22 nt, Human
uacuuuuagccuauuugauucu

SEQ ID NO: 492556 - RNA, 20 nt, Human
ugccuuggagcagccaaggu

SEQ ID NO: 492557 - RNA, 22 nt, Human
acagguggcuuauuggcugauu

SEQ ID NO: 492558 - RNA, 22 nt, Human
cuucagcaccucagcuggagag

SEQ ID NO: 492559 - RNA, 22 nt, Human
ugggccaacaggaggucuagga

SEQ ID NO: 492560 - RNA, 22 nt, Human
uccaugugcuuccucaggggaa

SEQ ID NO: 492561 - RNA, 22 nt, Human
acagaacaagaccugcuuauug

SEQ ID NO: 492562 - RNA, 22 nt, Human
uuagucacaugcccaucucuga

SEQ ID NO: 492563 - RNA, 22 nt, Human
ucuuuaauuguggaagagcagc

SEQ ID NO: 492564 - RNA, 22 nt, Human
auuuaaauuuucugauggagag

SEQ ID NO: 492565 - RNA, 22 nt, Human
aaacauugagcacuugcuauuu

SEQ ID NO: 492566 - RNA, 22 nt, Human
acacaguaggauaguuugagga

SEQ ID NO: 492567 - RNA, 22 nt, Human
ucacauguauaugcagcacagc

SEQ ID NO: 492568 - RNA, 22 nt, Human
ccaggccucccuuuuccagcca

SEQ ID NO: 492569 - RNA, 22 nt, Human
cugggcugcaguuccugguccu

SEQ ID NO: 492570 - RNA, 22 nt, Human
aggcaacaggaaaccacaugau

SEQ ID NO: 492571 - RNA, 22 nt, Human
uaaagcaggccacauaugugau

SEQ ID NO: 492572 - RNA, 22 nt, Human
uuagcauucucugugugcauaa

SEQ ID NO: 492573 - RNA, 22 nt, Human
caggccacagcuaaagaggauu

SEQ ID NO: 492574 - RNA, 22 nt, Human
cagcacaucuucugaucuuuug

SEQ ID NO: 492575 - RNA, 22 nt, Human
gcacagagucacuagcuaagca

SEQ ID NO: 492576 - RNA, 22 nt, Human
ugggcacagagucccaucugcc

SEQ ID NO: 492577 - RNA, 22 nt, Human
uggcuucauguaguuugaguug

SEQ ID NO: 492578 - RNA, 22 nt, Human
gccuggcucugagggagcuccu

SEQ ID NO: 492579 - RNA, 20 nt, Human
gcuuagcaggcauaguagcu

SEQ ID NO: 492580 - RNA, 22 nt, Human
gcaguuaaaaauaaaccuucau

SEQ ID NO: 492581 - RNA, 22 nt, Human
ugugaaugucuagguuuuaugu

SEQ ID NO: 492582 - RNA, 22 nt, Human
gcacagagcuggcccuccaggc

SEQ ID NO: 492583 - RNA, 22 nt, Human
cagguacauucguagacccauu

SEQ ID NO: 492584 - RNA, 22 nt, Human
ugggggcuagaacccagggauu

SEQ ID NO: 492585 - RNA, 22 nt, Human
aaagcagagaucauggcuugua

SEQ ID NO: 492586 - RNA, 22 nt, Human
auagauuauuugcucauuacuu

SEQ ID NO: 492587 - RNA, 22 nt, Human
ucuuggcugcagagccggcaag

SEQ ID NO: 492588 - RNA, 22 nt, Human
uggaccucacugucugcuggua

SEQ ID NO: 492589 - RNA, 22 nt, Human
uccugggcuuaguggcuagguc

SEQ ID NO: 492590 - RNA, 22 nt, Human
guccagccagcugguccuugcc

SEQ ID NO: 492591 - RNA, 21 nt, Human
cccgcacagcgguaggccgcc

SEQ ID NO: 492592 - RNA, 22 nt, Human
cuagucacuguaauaaucugcu

SEQ ID NO: 492593 - RNA, 22 nt, Human
cugcccuguaucuucucccaau

SEQ ID NO: 492594 - RNA, 22 nt, Human
cagagacaggaaucagcugcag

SEQ ID NO: 492595 - RNA, 22 nt, Human
cugcauccauguugcugcaaag

SEQ ID NO: 492596 - RNA, 22 nt, Human
cugcugucuaguaucuuaaaaa

SEQ ID NO: 492597 - RNA, 19 nt, Human
uuugugaagaaaaugaugc

SEQ ID NO: 492598 - RNA, 22 nt, Human
gaaaugauuuuaguuuaucaug

SEQ ID NO: 492599 - RNA, 22 nt, Human
auaagcuugauguaacuaacca

SEQ ID NO: 492600 - RNA, 22 nt, Human
ugccagccuccugauaucaucc

SEQ ID NO: 492601 - RNA, 22 nt, Human
ggccaggcuggucucagacuuc

SEQ ID NO: 492602 - RNA, 22 nt, Human
ugucccugguggaggcuggcag

SEQ ID NO: 492603 - RNA, 22 nt, Human
agagcacaaauuaguuggucuu

SEQ ID NO: 492604 - RNA, 22 nt, Human
aaaguaucaagggaagcauuuu

SEQ ID NO: 492605 - RNA, 22 nt, Human
cugcugaaaacaauaaugauga

SEQ ID NO: 492606 - RNA, 22 nt, Human
auguuuuacccuuugcacaaac

SEQ ID NO: 492607 - RNA, 22 nt, Human
gagccuggauagccuuguucca

SEQ ID NO: 492608 - RNA, 22 nt, Human
agacaucaaugaucagagguag

SEQ ID NO: 492609 - RNA, 22 nt, Human
gagcuucagagaccacuuaacu

SEQ ID NO: 492610 - RNA, 22 nt, Human
ugcaaggcccagacaagagcuc

SEQ ID NO: 492611 - RNA, 19 nt, Human
uugcugaaggaagccucug

SEQ ID NO: 492612 - RNA, 22 nt, Human
cugaugauagugauuuauugag

SEQ ID NO: 492613 - RNA, 22 nt, Human
gugugcaugugcuugcacagau

SEQ ID NO: 492614 - RNA, 22 nt, Human
accuggcuuguuucuaccuccu

SEQ ID NO: 492615 - RNA, 20 nt, Human
ugugcccugcagacuucuuu

SEQ ID NO: 492616 - RNA, 23 nt, Human
gcugaauguaauguucuuugggu

SEQ ID NO: 492617 - RNA, 22 nt, Human
cauuuguguccgucccaguucu

SEQ ID NO: 492618 - RNA, 22 nt, Human
acaggacagucuaguaacagua

SEQ ID NO: 492619 - RNA, 18 nt, Human
cugccccuucucugagau

SEQ ID NO: 492620 - RNA, 22 nt, Human
acuuagcaauuugauuaaaaga

SEQ ID NO: 492621 - RNA, 22 nt, Human
ugucuuuacuuagaaguucagg

SEQ ID NO: 492622 - RNA, 22 nt, Human
auauuugugguuuuuggcuccu

SEQ ID NO: 492623 - RNA, 22 nt, Human
accuggcuucuaaucauggcuc

SEQ ID NO: 492624 - RNA, 22 nt, Human
gccuuagccugcacuuccuguu

SEQ ID NO: 492625 - RNA, 22 nt, Human
gaggccuggaauuccagccugg

SEQ ID NO: 492626 - RNA, 22 nt, Human
caaagaguuuuuucauauaaug

SEQ ID NO: 492627 - RNA, 22 nt, Human
uuguccugauuuauaaaaugaa

SEQ ID NO: 492628 - RNA, 22 nt, Human
ugaaugauacagaauuauguag

SEQ ID NO: 492629 - RNA, 22 nt, Human
cagcagcagcuuaguggucccc

SEQ ID NO: 492630 - RNA, 22 nt, Human
cagagccucucagaggucagac

SEQ ID NO: 492631 - RNA, 22 nt, Human
guggcacagagauggggcauga

SEQ ID NO: 492632 - RNA, 22 nt, Human
uuugcugaguugaaguuugagg

SEQ ID NO: 492633 - RNA, 22 nt, Human
agccacagggggugagggacaa

SEQ ID NO: 492634 - RNA, 22 nt, Human
gcauugaauccuaucaggcaaa

SEQ ID NO: 492635 - RNA, 22 nt, Human
gguaacuugaguguguuguuca

SEQ ID NO: 492636 - RNA, 22 nt, Human
gcaugugucuccccaguggagg

SEQ ID NO: 492637 - RNA, 22 nt, Human
aaacaguuuucucauuuagugu

SEQ ID NO: 492638 - RNA, 22 nt, Human
ugaaugauuugggugcauucag

SEQ ID NO: 492639 - RNA, 22 nt, Human
guagggagcccagagcccagug

SEQ ID NO: 492640 - RNA, 22 nt, Human
cacacagacagcucucugaaga

SEQ ID NO: 492641 - RNA, 22 nt, Human
gugcccugucucuugucuccag

SEQ ID NO: 492642 - RNA, 22 nt, Human
ucuuagcauuuguuaauaccca

SEQ ID NO: 492643 - RNA, 22 nt, Human
cugugggcuccugcagcucagg

SEQ ID NO: 492644 - RNA, 22 nt, Human
uauguguguuucaguggaaaug

SEQ ID NO: 492645 - RNA, 22 nt, Human
aggugcagcugguggagucugg

SEQ ID NO: 492646 - RNA, 19 nt, Human
uccugggcugggccagguc

SEQ ID NO: 492647 - RNA, 22 nt, Human
cugagcugcucccgcugcagcg

SEQ ID NO: 492648 - RNA, 23 nt, Human
auguuuuaugucucuagcugcca

SEQ ID NO: 492649 - RNA, 22 nt, Human
gguccuggcagucuuugguugu

SEQ ID NO: 492650 - RNA, 22 nt, Human
uaugauauucuaaauugacacc

SEQ ID NO: 492651 - RNA, 22 nt, Human
aaacaguuuauaacaugauacu

SEQ ID NO: 492652 - RNA, 22 nt, Human
uguggaggauucugaugccagc

SEQ ID NO: 492653 - RNA, 22 nt, Human
uugucacauguaguucauucuc

SEQ ID NO: 492654 - RNA, 22 nt, Human
ggccggccuuugcgagcauucu

SEQ ID NO: 492655 - RNA, 22 nt, Human
caugugugaguauaucuuaucc

SEQ ID NO: 492656 - RNA, 22 nt, Human
uuugaaauaugaggcauuauga

SEQ ID NO: 492657 - RNA, 22 nt, Human
acacaguaugacauuggcagag

SEQ ID NO: 492658 - RNA, 22 nt, Human
cauuuguaauacugacuugcag

SEQ ID NO: 492659 - RNA, 22 nt, Human
cugaaugaaugguuugucuuau

SEQ ID NO: 492660 - RNA, 21 nt, Human
aaacugaccuugccugagaca

SEQ ID NO: 492661 - RNA, 22 nt, Human
ucugggcuugguuagggcuguu

SEQ ID NO: 492662 - RNA, 22 nt, Human
ugaaugaugaggggagaauaau

SEQ ID NO: 492663 - RNA, 22 nt, Human
cugcccugggaguaccuguccu

SEQ ID NO: 492664 - RNA, 22 nt, Human
ggcuucagugagcugagcucac

SEQ ID NO: 492665 - RNA, 22 nt, Human
agagccagcaacucuagcccug

SEQ ID NO: 492666 - RNA, 22 nt, Human
uugcugaaguuaaugcuugcaa

SEQ ID NO: 492667 - RNA, 22 nt, Human
uccugcuguuuucuggcccaca

SEQ ID NO: 492668 - RNA, 22 nt, Human
uaauuuuguauugccauuguag

SEQ ID NO: 492669 - RNA, 22 nt, Human
uauguacacacacaugcaugua

SEQ ID NO: 492670 - RNA, 23 nt, Human
gccucuggagccccagugcucag

SEQ ID NO: 492671 - RNA, 22 nt, Human
uuguuuuaacgacucagcuugu

SEQ ID NO: 492672 - RNA, 22 nt, Human
uccugugugggcaggaugagaa

SEQ ID NO: 492673 - RNA, 22 nt, Human
agccacaggaaacagagacagc

SEQ ID NO: 492674 - RNA, 20 nt, Human
uccaagcccuccuuccauuc

SEQ ID NO: 492675 - RNA, 22 nt, Human
aauuagcuuuaccuaggauugu

SEQ ID NO: 492676 - RNA, 22 nt, Human
cagcccugaaacaaccuccucu

SEQ ID NO: 492677 - RNA, 22 nt, Human
uacacagaagccagaaggccug

SEQ ID NO: 492678 - RNA, 22 nt, Human
aauggcagaaugggccagaagc

SEQ ID NO: 492679 - RNA, 21 nt, Human
aaaaaugaaguuguucaggaa

SEQ ID NO: 492680 - RNA, 22 nt, Human
uuagcugacugugugauuuggc

SEQ ID NO: 492681 - RNA, 22 nt, Human
ccugcgucgugugggcagugac

SEQ ID NO: 492682 - RNA, 22 nt, Human
gagucacaaagccuuucuuauu

SEQ ID NO: 492683 - RNA, 22 nt, Human
ccagcacucuauugaauauucu

SEQ ID NO: 492684 - RNA, 22 nt, Human
cuguggagcuuguggcaguggg

SEQ ID NO: 492685 - RNA, 22 nt, Human
agucaaagaugaccgaguuccu

SEQ ID NO: 492686 - RNA, 22 nt, Human
gcacuagucaagugaacaauuu

SEQ ID NO: 492687 - RNA, 22 nt, Human
cccagccucugggcucacccaa

SEQ ID NO: 492688 - RNA, 22 nt, Human
uuucaaauagaaucuuuccaaa

SEQ ID NO: 492689 - RNA, 22 nt, Human
aaauggaagaagugcaauacug

SEQ ID NO: 492690 - RNA, 20 nt, Human
uugaaugaaugucuggcuca

SEQ ID NO: 492691 - RNA, 19 nt, Human
ucuagucagucagucauuc

SEQ ID NO: 492692 - RNA, 22 nt, Human
aaacaaacaauuaguugugugg

SEQ ID NO: 492693 - RNA, 22 nt, Human
ucagcacuggcgcugggcaggu

SEQ ID NO: 492694 - RNA, 22 nt, Human
ucuuucaaugugaaaccaugua

SEQ ID NO: 492695 - RNA, 22 nt, Human
cccugcucuuagugccugugug

SEQ ID NO: 492696 - RNA, 19 nt, Human
uaauaagcaauauggaagu

SEQ ID NO: 492697 - RNA, 22 nt, Human
uguauuagagcauauaauuuga

SEQ ID NO: 492698 - RNA, 19 nt, Human
ucugaaugggaugaguugg

SEQ ID NO: 492699 - RNA, 19 nt, Human
cuucagcaucuccggagcu

SEQ ID NO: 492700 - RNA, 22 nt, Human
guucagcaaguacucaguccac

SEQ ID NO: 492701 - RNA, 22 nt, Human
cagagcaccagugggagacaag

SEQ ID NO: 492702 - RNA, 22 nt, Human
acaaggaccaugaggcagaccc

SEQ ID NO: 492703 - RNA, 19 nt, Human
gcagccaggugcucuaccu

SEQ ID NO: 492704 - RNA, 22 nt, Human
uaucuaaaggauuuaauuuagu

SEQ ID NO: 492705 - RNA, 22 nt, Human
cuggccuggagccucugggugg

SEQ ID NO: 492706 - RNA, 18 nt, Human
agcuccaucugucagcau

SEQ ID NO: 492707 - RNA, 22 nt, Human
uagcauuaaagguaagacauua

SEQ ID NO: 492708 - RNA, 22 nt, Human
acuuagcagguacuuucauauu

SEQ ID NO: 492709 - RNA, 22 nt, Human
cauaauuagagaauucauguua

SEQ ID NO: 492710 - RNA, 21 nt, Human
gcugaagaacucuuuauuuuc

SEQ ID NO: 492711 - RNA, 22 nt, Human
guccugggcggagggcugcugu

SEQ ID NO: 492712 - RNA, 17 nt, Human
agcuucaguugcaaaac

SEQ ID NO: 492713 - RNA, 22 nt, Human
aaugacaugcuuuuuaauuaua

SEQ ID NO: 492714 - RNA, 22 nt, Human
cugccagcucgccacaaugaca

SEQ ID NO: 492715 - RNA, 22 nt, Human
cagagacaaccugguagagaaa

SEQ ID NO: 492716 - RNA, 22 nt, Human
gaaauaacagcucuggaagagu

SEQ ID NO: 492717 - RNA, 22 nt, Human
agagucaccuuuuccucaggau

SEQ ID NO: 492718 - RNA, 22 nt, Human
cugaauggcgaguuaguuaguu

SEQ ID NO: 492719 - RNA, 22 nt, Human
cugaaugauaaucuuuugcugg

SEQ ID NO: 492720 - RNA, 22 nt, Human
ucuuggcuacuuaggaggauuc

SEQ ID NO: 492721 - RNA, 17 nt, Human
uccuggcucugccacug

SEQ ID NO: 492722 - RNA, 22 nt, Human
uuguccuggagguuaauagagu

SEQ ID NO: 492723 - RNA, 22 nt, Human
caucacugucaccaucuuuccu

SEQ ID NO: 492724 - RNA, 22 nt, Human
ugcugaauuccagggccccacu

SEQ ID NO: 492725 - RNA, 22 nt, Human
uugaaugaggaagagcacuggc

SEQ ID NO: 492726 - RNA, 22 nt, Human
caugugugugagggaaacaugu

SEQ ID NO: 492727 - RNA, 22 nt, Human
ccuccucugugcagcugugggu

SEQ ID NO: 492728 - RNA, 20 nt, Human
ucaagacagacauggaguuu

SEQ ID NO: 492729 - RNA, 22 nt, Human
ugucagugaguuggguccugag

SEQ ID NO: 492730 - RNA, 22 nt, Human
gcuguuggcgaggagcucagcu

SEQ ID NO: 492731 - RNA, 22 nt, Human
guccuuggcugggcuugccucg

SEQ ID NO: 492732 - RNA, 22 nt, Human
agggccagcacuccuggcagga

SEQ ID NO: 492733 - RNA, 22 nt, Human
uucauuuguugacagagacaug

SEQ ID NO: 492734 - RNA, 22 nt, Human
uucuuauucuugaaauguggga

SEQ ID NO: 492735 - RNA, 22 nt, Human
gcacacagacuaaccauauuuc

SEQ ID NO: 492736 - RNA, 22 nt, Human
uggaaacugugguauuucuuua

SEQ ID NO: 492737 - RNA, 22 nt, Human
augcccugcugccaucuggccg

SEQ ID NO: 492738 - RNA, 22 nt, Human
aacauuucauaacuugacuuuu

SEQ ID NO: 492739 - RNA, 22 nt, Human
acagauguuagcaaugaugaug

SEQ ID NO: 492740 - RNA, 22 nt, Human
ucugggcuuuugcacuggccau

SEQ ID NO: 492741 - RNA, 22 nt, Human
aaagacaugacacauuggagag

SEQ ID NO: 492742 - RNA, 22 nt, Human
aggaagcugggguguucuucau

SEQ ID NO: 492743 - RNA, 22 nt, Human
gagacacaaucucauuuacauu

SEQ ID NO: 492744 - RNA, 22 nt, Human
agauauuuguaucuugcuauug

SEQ ID NO: 492745 - RNA, 22 nt, Human
ugcacagggagggggccagcuc

SEQ ID NO: 492746 - RNA, 22 nt, Human
ggagccagugcccucuggugga

SEQ ID NO: 492747 - RNA, 22 nt, Human
aagcagcauaugacagcaucca

SEQ ID NO: 492748 - RNA, 22 nt, Human
cauagugucugguaacauagua

SEQ ID NO: 492749 - RNA, 17 nt, Human
uuacaacaauucaugag

SEQ ID NO: 492750 - RNA, 22 nt, Human
ccucugugggccgggccugcug

SEQ ID NO: 492751 - RNA, 23 nt, Human
uugcacaguguauacacauauuu

SEQ ID NO: 492752 - RNA, 22 nt, Human
gugcauuugugcaugcacaugu

SEQ ID NO: 492753 - RNA, 22 nt, Human
gaaucauagaacauuaauagaa

SEQ ID NO: 492754 - RNA, 22 nt, Human
ccagcccuugaggucuguccau

SEQ ID NO: 492755 - RNA, 22 nt, Human
auuaagugacuaaaguaaugcu

SEQ ID NO: 492756 - RNA, 22 nt, Human
cuguaaauaugaagaauauaug

SEQ ID NO: 492757 - RNA, 22 nt, Human
acgugcaucuuuccauaugugg

SEQ ID NO: 492758 - RNA, 22 nt, Human
guggggagcagccuuagccccu

SEQ ID NO: 492759 - RNA, 22 nt, Human
cuuagcuuuguuuaacacaggg

SEQ ID NO: 492760 - RNA, 22 nt, Human
ggagccagcucccuccuuguga

SEQ ID NO: 492761 - RNA, 22 nt, Human
ccagcucuggcuucuugcuggg

SEQ ID NO: 492762 - RNA, 22 nt, Human
agcauauaggaaauguugaauc

SEQ ID NO: 492763 - RNA, 20 nt, Human
uauuuguauuugggaaaguu

SEQ ID NO: 492764 - RNA, 22 nt, Human
gcugggcuccaggccaggguga

SEQ ID NO: 492765 - RNA, 22 nt, Human
uaggugggugacuuccaugggg

SEQ ID NO: 492766 - RNA, 22 nt, Human
gucaugccuggcuucuuagaca

SEQ ID NO: 492767 - RNA, 22 nt, Human
cauuuguacagaacagcuuuau

SEQ ID NO: 492768 - RNA, 22 nt, Human
cuuguuuucuaaaacaucauuu

SEQ ID NO: 492769 - RNA, 22 nt, Human
uaaugcuuaauuuucacaagcc

SEQ ID NO: 492770 - RNA, 22 nt, Human
aucuguaacaucaguagcagaa

SEQ ID NO: 492771 - RNA, 22 nt, Human
ggcuuuaguguagguuucuguu

SEQ ID NO: 492772 - RNA, 22 nt, Human
cucuggcuuugcucaugcaucc

SEQ ID NO: 492773 - RNA, 19 nt, Human
aggcagcauucuggggcuu

SEQ ID NO: 492774 - RNA, 22 nt, Human
ucagcacaggucuugcaaaaca

SEQ ID NO: 492775 - RNA, 22 nt, Human
uagcauuagagauagaaauagu

SEQ ID NO: 492776 - RNA, 22 nt, Human
cucugcccgcggaugccacguc

SEQ ID NO: 492777 - RNA, 22 nt, Human
uaauuacagguccaaaacaauc

SEQ ID NO: 492778 - RNA, 22 nt, Human
cugggcucagcaggccaaggcc

SEQ ID NO: 492779 - RNA, 22 nt, Human
accuggcuuccaaucuaggagc

SEQ ID NO: 492780 - RNA, 22 nt, Human
acaaaugagaauguagacagag

SEQ ID NO: 492781 - RNA, 22 nt, Human
uuuccagucucagcccuguaac

SEQ ID NO: 492782 - RNA, 22 nt, Human
aagcuucauauaugugugaguc

SEQ ID NO: 492783 - RNA, 22 nt, Human
ccagggcaacgcugucucagag

SEQ ID NO: 492784 - RNA, 22 nt, Human
uuucugcaaacuuccacgucuc

SEQ ID NO: 492785 - RNA, 22 nt, Human
ccuggcuccaaagcugugacuc

SEQ ID NO: 492786 - RNA, 22 nt, Human
cugggcugagccugggcugugu

SEQ ID NO: 492787 - RNA, 20 nt, Human
aaacauucauguacaaguga

SEQ ID NO: 492788 - RNA, 22 nt, Human
agguccugaagauuuuacuaga

SEQ ID NO: 492789 - RNA, 22 nt, Human
agagcacaguaucugcacauca

SEQ ID NO: 492790 - RNA, 22 nt, Human
cuguggagaugcagaccaggcc

SEQ ID NO: 492791 - RNA, 22 nt, Human
gcugcucugggucugcccagcu

SEQ ID NO: 492792 - RNA, 22 nt, Human
caggccucuauggucagcugag

SEQ ID NO: 492793 - RNA, 22 nt, Human
gccuucugcgcucgugucuccg

SEQ ID NO: 492794 - RNA, 22 nt, Human
aauuagcuaauuaauuguagcc

SEQ ID NO: 492795 - RNA, 22 nt, Human
ggcuucagaggggagguagugc

SEQ ID NO: 492796 - RNA, 23 nt, Human
ugauuacaagggccaaagaaagg

SEQ ID NO: 492797 - RNA, 22 nt, Human
auuauuugacuugagaacaggu

SEQ ID NO: 492798 - RNA, 22 nt, Human
uaacacaaaagaauaugugugu

SEQ ID NO: 492799 - RNA, 22 nt, Human
gcagggcagcuuagucccuguc

SEQ ID NO: 492800 - RNA, 22 nt, Human
uggcagccuggaaucucucagc

SEQ ID NO: 492801 - RNA, 22 nt, Human
uuuuagaaagaucccuggcagg

SEQ ID NO: 492802 - RNA, 22 nt, Human
uacagagagagggguuaccagg

SEQ ID NO: 492803 - RNA, 21 nt, Human
ucugggcccaugcugccucac

SEQ ID NO: 492804 - RNA, 22 nt, Human
uccuuagccggagcagcucauc

SEQ ID NO: 492805 - RNA, 22 nt, Human
uugcugaagcugccaaaccagu

SEQ ID NO: 492806 - RNA, 22 nt, Human
gggaaacucacaggugcagggg

SEQ ID NO: 492807 - RNA, 22 nt, Human
cccagccuuugcuuccugguuc

SEQ ID NO: 492808 - RNA, 22 nt, Human
uguacaaggccaucuacaugcu

SEQ ID NO: 492809 - RNA, 22 nt, Human
uucuuuuaaugucuggcuuuca

SEQ ID NO: 492810 - RNA, 22 nt, Human
uaaaugacauucuuaagucuug

SEQ ID NO: 492811 - RNA, 22 nt, Human
guacauauccuuuacguuuugu

SEQ ID NO: 492812 - RNA, 22 nt, Human
aagaguggagcuggaaaguggg

SEQ ID NO: 492813 - RNA, 22 nt, Human
cugggcccacgagggcucuggg

SEQ ID NO: 492814 - RNA, 21 nt, Human
ucauccagguccugcuucuuc

SEQ ID NO: 492815 - RNA, 22 nt, Human
aggcugcagaggugcugccaga

SEQ ID NO: 492816 - RNA, 22 nt, Human
ucagaagcauccauuucaccac

SEQ ID NO: 492817 - RNA, 22 nt, Human
ugccagagaggagaaagcauuu

SEQ ID NO: 492818 - RNA, 22 nt, Human
gacauuuauuggauuuuacgag

SEQ ID NO: 492819 - RNA, 22 nt, Human
acuuuuaaggggccuugauuua

SEQ ID NO: 492820 - RNA, 22 nt, Human
gcucaugggcccagagcagccc

SEQ ID NO: 492821 - RNA, 20 nt, Human
aggcccuccccacuguugcu

SEQ ID NO: 492822 - RNA, 22 nt, Human
ugcccucagcagcagcuccugc

SEQ ID NO: 492823 - RNA, 22 nt, Human
aggucuacaugcuuaauauauc

SEQ ID NO: 492824 - RNA, 22 nt, Human
acacacagaaggaagccccacu

SEQ ID NO: 492825 - RNA, 22 nt, Human
ugcuugucucucugugcccacu

SEQ ID NO: 492826 - RNA, 22 nt, Human
uugcuggaagguggcuggaauc

SEQ ID NO: 492827 - RNA, 22 nt, Human
gaagccaaguccucgaguuuca

SEQ ID NO: 492828 - RNA, 22 nt, Human
gucuggagccacugcugcugcu

SEQ ID NO: 492829 - RNA, 22 nt, Human
aucucccaaauuagccucuuga

SEQ ID NO: 492830 - RNA, 22 nt, Human
aggcccauaguagcucugggca

SEQ ID NO: 492831 - RNA, 22 nt, Human
aggguccugggugcaguugcuu

SEQ ID NO: 492832 - RNA, 17 nt, Human
uccuggccuggugugug

SEQ ID NO: 492833 - RNA, 22 nt, Human
caggccacagcuaaagaggauu

SEQ ID NO: 492834 - RNA, 22 nt, Human
ggaagaggcugaggccaugcug

SEQ ID NO: 492835 - RNA, 19 nt, Human
cucugccauuugcugccug

SEQ ID NO: 492836 - RNA, 22 nt, Human
uuugcuugauuaggauauggaa

SEQ ID NO: 492837 - RNA, 22 nt, Human
ugugaagcgugugcaggggaca

SEQ ID NO: 492838 - RNA, 22 nt, Human
uugggucaugggaucccagcau

SEQ ID NO: 492839 - RNA, 22 nt, Human
gagcaccgccuccacgaugccc

SEQ ID NO: 492840 - RNA, 22 nt, Human
ucuggaaggggaucugugguca

SEQ ID NO: 492841 - RNA, 22 nt, Human
uggcacugaagcuggaaagccu

SEQ ID NO: 492842 - RNA, 22 nt, Human
aagagagaacucccuucgccag

SEQ ID NO: 492843 - RNA, 22 nt, Human
accccagaggcggaggcugcag

SEQ ID NO: 492844 - RNA, 22 nt, Human
ucuccuggcauuugguugagua

SEQ ID NO: 492845 - RNA, 22 nt, Human
cucgccccggcacaguguccgu

SEQ ID NO: 492846 - RNA, 22 nt, Human
ucgggcucgcucuccuagcgga

SEQ ID NO: 492847 - RNA, 22 nt, Human
agugucugcgggcagaggagcg

SEQ ID NO: 492848 - RNA, 22 nt, Human
gcaaggagcaccuuucuggaac

SEQ ID NO: 492849 - RNA, 19 nt, Human
gggugaggaagagcguugc

SEQ ID NO: 492850 - RNA, 22 nt, Human
gcagagucagguccaaggacug

SEQ ID NO: 492851 - RNA, 22 nt, Human
cacucucacaugcccugucagu

SEQ ID NO: 492852 - RNA, 22 nt, Human
aauaucaucucucuuuucugca

SEQ ID NO: 492853 - RNA, 20 nt, Human
ccagguggugccuggagagg

SEQ ID NO: 492854 - RNA, 22 nt, Human
aguaacuuaagcaauuguguau

SEQ ID NO: 492855 - RNA, 22 nt, Human
uaguauuuccuguaagcuauag

SEQ ID NO: 492856 - RNA, 22 nt, Human
cgcagcugcugcucugaaacag

SEQ ID NO: 492857 - RNA, 22 nt, Human
cuuggcugaacuccaggaugca

SEQ ID NO: 492858 - RNA, 22 nt, Human
uacccacugucauauucagggu

SEQ ID NO: 492859 - RNA, 22 nt, Human
agcaccagcucaaggugcaccu

SEQ ID NO: 492860 - RNA, 22 nt, Human
ugucggccacgagggagccgcg

SEQ ID NO: 492861 - RNA, 22 nt, Human
uguaccgccuugugggguuggg

SEQ ID NO: 492862 - RNA, 22 nt, Human
agcucagaacugcagacaugug

SEQ ID NO: 492863 - RNA, 22 nt, Human
uucuguaauucuguuaguuuca

SEQ ID NO: 492864 - RNA, 22 nt, Human
uaaaguuuauuggcaccaccau

SEQ ID NO: 492865 - RNA, 22 nt, Human
aguuggcuucaaaggcagagag

SEQ ID NO: 492866 - RNA, 22 nt, Human
agcaaauaauugucuuugaggg

SEQ ID NO: 492867 - RNA, 21 nt, Human
agaugaggauacugaggccua

SEQ ID NO: 492868 - RNA, 22 nt, Human
uccaggagggggagccgugccg

SEQ ID NO: 492869 - RNA, 22 nt, Human
gguuguaguuggagguuguaua

SEQ ID NO: 492870 - RNA, 23 nt, Human
uggagaauucagucuuuguuuug

SEQ ID NO: 492871 - RNA, 22 nt, Human
acugugugccaggcgcuggucu

SEQ ID NO: 492872 - RNA, 22 nt, Human
agcugaacgugcuucugcagca

SEQ ID NO: 492873 - RNA, 22 nt, Human
aagggccagggcucuagagaua

SEQ ID NO: 492874 - RNA, 22 nt, Human
gcagagcugucuaagucacuuc

SEQ ID NO: 492875 - RNA, 22 nt, Human
uugagacacaaggcacaguaag

SEQ ID NO: 492876 - RNA, 22 nt, Human
agcuccugaaaauccagacugg

SEQ ID NO: 492877 - RNA, 22 nt, Human
aaaacauuuuacugccaucuca

SEQ ID NO: 492878 - RNA, 22 nt, Human
ggaggaggggugacugaaugcu

SEQ ID NO: 492879 - RNA, 22 nt, Human
ccuggggagaagagcuuccccc

SEQ ID NO: 492880 - RNA, 22 nt, Human
ggcuaaggacgggcaaguccca

SEQ ID NO: 492881 - RNA, 22 nt, Human
gccacaggaaagcacccuggag

SEQ ID NO: 492882 - RNA, 20 nt, Human
uccuccuugcagagcccaga

SEQ ID NO: 492883 - RNA, 23 nt, Human
uguguucagucaaggaucagagu

SEQ ID NO: 492884 - RNA, 22 nt, Human
caauguacaaaauaauuacaca

SEQ ID NO: 492885 - RNA, 21 nt, Human
agaaggcaaaagcagacaucu

SEQ ID NO: 492886 - RNA, 22 nt, Human
uuccagaacaauguggacguau

SEQ ID NO: 492887 - RNA, 18 nt, Human
agcugaggggacugaaga

SEQ ID NO: 492888 - RNA, 22 nt, Human
caguuuuacccaagcuuauuuu

SEQ ID NO: 492889 - RNA, 22 nt, Human
agaguguguggggcugagguca

SEQ ID NO: 492890 - RNA, 22 nt, Human
ucccagauuccugcucuuauau

SEQ ID NO: 492891 - RNA, 18 nt, Human
cccacggugcuguagggc

SEQ ID NO: 492892 - RNA, 18 nt, Human
ccucagggagagagacgc

SEQ ID NO: 492893 - RNA, 22 nt, Human
cgcuuuggagucccugcuuuac

SEQ ID NO: 492894 - RNA, 23 nt, Human
gcugccaaggaggcaggggugcc

SEQ ID NO: 492895 - RNA, 22 nt, Human
gccuucugauugcuggacugac

SEQ ID NO: 492896 - RNA, 22 nt, Human
aaggcaguuaauuuggcuagaa

SEQ ID NO: 492897 - RNA, 22 nt, Human
gaaccuggcagcccuauaucug

SEQ ID NO: 492898 - RNA, 22 nt, Human
gggggcgccgccgcucaucuca

SEQ ID NO: 492899 - RNA, 19 nt, Human
ccugugucccacguagaug

SEQ ID NO: 492900 - RNA, 22 nt, Human
gggggcuggacuuucccacaca

SEQ ID NO: 492901 - RNA, 22 nt, Human
gccaaucaggaggcuguacauc

SEQ ID NO: 492902 - RNA, 22 nt, Human
gcccagcgagcagagguggacg

SEQ ID NO: 492903 - RNA, 22 nt, Human
uuggaaaugcauuuguuauuau

SEQ ID NO: 492904 - RNA, 22 nt, Human
ugggggagccuucacaguagcu

SEQ ID NO: 492905 - RNA, 22 nt, Human
cccaggaguaagugacauuguu

SEQ ID NO: 492906 - RNA, 23 nt, Human
uagacugcaggcuccuugagggc

SEQ ID NO: 492907 - RNA, 22 nt, Human
ucugggaguuucugugggagcu

SEQ ID NO: 492908 - RNA, 22 nt, Human
ugcucgagguccccaccggcuc

SEQ ID NO: 492909 - RNA, 22 nt, Human
gccuggcuucccuuggagcauu

SEQ ID NO: 492910 - RNA, 22 nt, Human
gcuucuggugaggccucaggaa

SEQ ID NO: 492911 - RNA, 22 nt, Human
aucuucaaagcacaucguuugu

SEQ ID NO: 492912 - RNA, 22 nt, Human
uagaagaugccuuaaaguugaa

SEQ ID NO: 492913 - RNA, 22 nt, Human
caaauguuugguggcauuuugu

SEQ ID NO: 492914 - RNA, 22 nt, Human
ggaaggguuuaagcaggagagu

SEQ ID NO: 492915 - RNA, 22 nt, Human
cuggccagccucccagguaccc

SEQ ID NO: 492916 - RNA, 22 nt, Human
agugggaauuuucucccaggga

SEQ ID NO: 492917 - RNA, 20 nt, Human
cugcuccacccggcucucag

SEQ ID NO: 492918 - RNA, 22 nt, Human
ggagaggggaacuuguugcuug

SEQ ID NO: 492919 - RNA, 19 nt, Human
ugggcuuccccagggcaga

SEQ ID NO: 492920 - RNA, 22 nt, Human
aaggggggcaccugcaugcccg

SEQ ID NO: 492921 - RNA, 22 nt, Human
agcggcgccgagcuuggccagg

SEQ ID NO: 492922 - RNA, 19 nt, Human
uccuugacuguauucagag

SEQ ID NO: 492923 - RNA, 22 nt, Human
ucguggaucaccgcgucugugu

SEQ ID NO: 492924 - RNA, 22 nt, Human
cugucaccucugcccuuugccc

SEQ ID NO: 492925 - RNA, 22 nt, Human
gcucgguggccagccugaggcc

SEQ ID NO: 492926 - RNA, 21 nt, Human
acccugcuuuaugccguccuc

SEQ ID NO: 492927 - RNA, 22 nt, Human
uccagcuccugaguucacugcu

SEQ ID NO: 492928 - RNA, 22 nt, Human
cagaugaggcaaccucauugcu

SEQ ID NO: 492929 - RNA, 22 nt, Human
cuccuuggguucuuucgguucc

SEQ ID NO: 492930 - RNA, 22 nt, Human
gagccugagcaaugugauguuu

SEQ ID NO: 492931 - RNA, 22 nt, Human
gcaucugauccaauagauauau

SEQ ID NO: 492932 - RNA, 22 nt, Human
uucuuugcccauguuuccuaag

SEQ ID NO: 492933 - RNA, 22 nt, Human
ccugggaaggugaggcccugga

SEQ ID NO: 492934 - RNA, 22 nt, Human
aguguauuugccuauaaaaaug

SEQ ID NO: 492935 - RNA, 22 nt, Human
gccccagcagcaaugcgguuga

SEQ ID NO: 492936 - RNA, 22 nt, Human
uuucgggaaaaacugguaagac

SEQ ID NO: 492937 - RNA, 18 nt, Human
agggcugaugaguuuggg

SEQ ID NO: 492938 - RNA, 22 nt, Human
acagggagucugaggggauagu

SEQ ID NO: 492939 - RNA, 22 nt, Human
aaucaggagugugcacuuugau

SEQ ID NO: 492940 - RNA, 22 nt, Human
acccgcuuccggagcugcagug

SEQ ID NO: 492941 - RNA, 22 nt, Human
agccugugagggaugcugcagu

SEQ ID NO: 492942 - RNA, 18 nt, Human
cagaaaguuauuuacucu

SEQ ID NO: 492943 - RNA, 22 nt, Human
augcaacuacccccaggauuuu

SEQ ID NO: 492944 - RNA, 22 nt, Human
cgcacuggagcuggaacgaguc

SEQ ID NO: 492945 - RNA, 22 nt, Human
ugcuuuggcccaacauugaugc

SEQ ID NO: 492946 - RNA, 22 nt, Human
acauucuacaguuaaccauuag

SEQ ID NO: 492947 - RNA, 22 nt, Human
aguucugggaggugcacgucca

SEQ ID NO: 492948 - RNA, 22 nt, Human
auuauugcaagcagugaaggga

SEQ ID NO: 492949 - RNA, 22 nt, Human
agguucccagagauagagcugu

SEQ ID NO: 492950 - RNA, 20 nt, Human
augcacccucagggucccug

SEQ ID NO: 492951 - RNA, 22 nt, Human
gaagauuaccugagaccacuug

SEQ ID NO: 492952 - RNA, 22 nt, Human
ggccgggcuguggagaaggggu

SEQ ID NO: 492953 - RNA, 22 nt, Human
aguguugucaaacggcucagca

SEQ ID NO: 492954 - RNA, 22 nt, Human
ugaauagagcugcaguggacau

SEQ ID NO: 492955 - RNA, 22 nt, Human
uggccccugaggagcgucagcc

SEQ ID NO: 492956 - RNA, 22 nt, Human
uuccuccagccuggagcacuuc

SEQ ID NO: 492957 - RNA, 22 nt, Human
gccuggagcucggcugagggcg

SEQ ID NO: 492958 - RNA, 22 nt, Human
aaacucuacauggucgcaaaaa

SEQ ID NO: 492959 - RNA, 22 nt, Human
ccucagucuauuuccagcaggu

SEQ ID NO: 492960 - RNA, 22 nt, Human
cggcgcaggcagaccgcgggcu

SEQ ID NO: 492961 - RNA, 22 nt, Human
gguagacaacuuuguaauagcc

SEQ ID NO: 492962 - RNA, 21 nt, Human
auucugaguugucagucuuca

SEQ ID NO: 492963 - RNA, 22 nt, Human
gggcuucuugagcugccggccc

SEQ ID NO: 492964 - RNA, 18 nt, Human
uccuuucaccccuucucu

SEQ ID NO: 492965 - RNA, 22 nt, Human
ggcggcgcguagccggagacuu

SEQ ID NO: 492966 - RNA, 22 nt, Human
gggcuccagccaggugucccca

SEQ ID NO: 492967 - RNA, 22 nt, Human
uagggcucugagaguucagccu

SEQ ID NO: 492968 - RNA, 22 nt, Human
ucuguggcaaacacagugacca

SEQ ID NO: 492969 - RNA, 22 nt, Human
ccugggcugcucauggggauga

SEQ ID NO: 492970 - RNA, 22 nt, Human
cagucucuggugaguugacagu

SEQ ID NO: 492971 - RNA, 22 nt, Human
aagccgggccugagaaaugaca

SEQ ID NO: 492972 - RNA, 22 nt, Human
gcuggccugaccugaggcuggg

SEQ ID NO: 492973 - RNA, 22 nt, Human
gaaaggagaggguuaaggagcu

SEQ ID NO: 492974 - RNA, 22 nt, Human
agccugugcuguguuugcucca

SEQ ID NO: 492975 - RNA, 22 nt, Human
gcugaggcucaauccccuucug

SEQ ID NO: 492976 - RNA, 22 nt, Human
cggagccugcuuguugcagcug

SEQ ID NO: 492977 - RNA, 17 nt, Human
gcguguccccgcgucuc

SEQ ID NO: 492978 - RNA, 22 nt, Human
ggaagcuguuaucaucuguauc

SEQ ID NO: 492979 - RNA, 22 nt, Human
uggcuuuugaaaaggugaugua

SEQ ID NO: 492980 - RNA, 21 nt, Human
cccuugccugcacuccucggc

SEQ ID NO: 492981 - RNA, 23 nt, Human
uguacacuuggucaagguacuua

SEQ ID NO: 492982 - RNA, 22 nt, Human
gauucugaaauuaacagacugg

SEQ ID NO: 492983 - RNA, 22 nt, Human
uccaaggucagcgagagucacu

SEQ ID NO: 492984 - RNA, 22 nt, Human
gggccuuggcgaaguguggugg

SEQ ID NO: 492985 - RNA, 22 nt, Human
ugccaggccucaggagucucca

SEQ ID NO: 492986 - RNA, 22 nt, Human
gcagaagcccggucagcgcacg

SEQ ID NO: 492987 - RNA, 22 nt, Human
ccugcagacacuuguccagcaa

SEQ ID NO: 492988 - RNA, 22 nt, Human
cugcacagccugucugggggcc

SEQ ID NO: 492989 - RNA, 22 nt, Human
agguagcuggugcugggcuccu

SEQ ID NO: 492990 - RNA, 22 nt, Human
cuggccagggugcgaucguggu

SEQ ID NO: 492991 - RNA, 22 nt, Human
ccugaccaacguggugaaaccc

SEQ ID NO: 492992 - RNA, 22 nt, Human
ccaggcccugccugugguuccu

SEQ ID NO: 492993 - RNA, 22 nt, Human
cagcuccagcccaggcagcucc

SEQ ID NO: 492994 - RNA, 21 nt, Human
aaguccaauaccuaaggcucc

SEQ ID NO: 492995 - RNA, 22 nt, Human
gaugugugugcccugggccugc

SEQ ID NO: 492996 - RNA, 22 nt, Human
ggaggugacuggaucaugggca

SEQ ID NO: 492997 - RNA, 22 nt, Human
caggugggagccacagcguaca

SEQ ID NO: 492998 - RNA, 20 nt, Human
uccagccacuuccgcugguc

SEQ ID NO: 492999 - RNA, 22 nt, Human
acaccacaaguaacucuuuucc

SEQ ID NO: 493000 - RNA, 22 nt, Human
cccacugcugcucuccauggca

SEQ ID NO: 493001 - RNA, 22 nt, Human
ccuggccauagggcccaggaaa

SEQ ID NO: 493002 - RNA, 22 nt, Human
uguuuuaagggucaacugucac

SEQ ID NO: 493003 - RNA, 22 nt, Human
agccaggucaggaaagguccca

SEQ ID NO: 493004 - RNA, 22 nt, Human
ugugugcacaaagaguacaugg

SEQ ID NO: 493005 - RNA, 22 nt, Human
ggccucugccccgcggggcucg

SEQ ID NO: 493006 - RNA, 22 nt, Human
cgugcagcggagcuggucacug

SEQ ID NO: 493007 - RNA, 21 nt, Human
ucagagggcccuggaggcuca

SEQ ID NO: 493008 - RNA, 19 nt, Human
caucuggaugauucuccug

SEQ ID NO: 493009 - RNA, 22 nt, Human
gcagaggggaagcugaggaauu

SEQ ID NO: 493010 - RNA, 22 nt, Human
uuuggcgucucucaggagcuca

SEQ ID NO: 493011 - RNA, 23 nt, Human
agggcacugaagcuggaauuggg

SEQ ID NO: 493012 - RNA, 22 nt, Human
gccccgucguggggccagggau

SEQ ID NO: 493013 - RNA, 22 nt, Human
agcgcuggugaucucuauuuug

SEQ ID NO: 493014 - RNA, 22 nt, Human
ggccgcggauuuucccgcuggc

SEQ ID NO: 493015 - RNA, 22 nt, Human
acaaguuucauuguuuagaacc

SEQ ID NO: 493016 - RNA, 22 nt, Human
gggcccuggacguggcggcaga

SEQ ID NO: 493017 - RNA, 22 nt, Human
acacuggacucagaggccagaa

SEQ ID NO: 493018 - RNA, 22 nt, Human
uugcuggaguagaaaacuuaac

SEQ ID NO: 493019 - RNA, 22 nt, Human
aggacagagggaccagagccca

SEQ ID NO: 493020 - RNA, 22 nt, Human
gaggcucagagggacuuucaag

SEQ ID NO: 493021 - RNA, 22 nt, Human
uccugagauaggaguugaaggc

SEQ ID NO: 493022 - RNA, 22 nt, Human
guguuucccuggcacaagaacc

SEQ ID NO: 493023 - RNA, 22 nt, Human
agccccaguccgcugcgggcgg

SEQ ID NO: 493024 - RNA, 22 nt, Human
cuggagaacagagcuguuuaga

SEQ ID NO: 493025 - RNA, 22 nt, Human
augcuuccagauugguaggggu

SEQ ID NO: 493026 - RNA, 22 nt, Human
ugcuccugaacacagcccuaug

SEQ ID NO: 493027 - RNA, 22 nt, Human
aaauugcaaaaguacuuuuagg

SEQ ID NO: 493028 - RNA, 18 nt, Human
gagaggagccagaauuuu

SEQ ID NO: 493029 - RNA, 22 nt, Human
cagaccuggaaaacaggcuugc

SEQ ID NO: 493030 - RNA, 22 nt, Human
uacaucucaucugugcucuccg

SEQ ID NO: 493031 - RNA, 22 nt, Human
ggccugcuucucugggcuuucu

SEQ ID NO: 493032 - RNA, 22 nt, Human
ugggagcaagcuggugcuggag

SEQ ID NO: 493033 - RNA, 18 nt, Human
gagagcccagcagguggu

SEQ ID NO: 493034 - RNA, 22 nt, Human
uccacccugcuuuugucuuuga

SEQ ID NO: 493035 - RNA, 22 nt, Human
ucucaucugccauuugcaggag

SEQ ID NO: 493036 - RNA, 22 nt, Human
ccccacaccugccgggcagcag

SEQ ID NO: 493037 - RNA, 22 nt, Human
aggaagagcuggaccagaggac

SEQ ID NO: 493038 - RNA, 22 nt, Human
ucuuuuccuugaugguuaaaua

SEQ ID NO: 493039 - RNA, 22 nt, Human
aagcauuuuagauaaagcauca

SEQ ID NO: 493040 - RNA, 22 nt, Human
ugggcugcuucuauuggugguc

SEQ ID NO: 493041 - RNA, 22 nt, Human
gucuagggcuccucagugacaa

SEQ ID NO: 493042 - RNA, 22 nt, Human
augugggccgugcggguguccu

SEQ ID NO: 493043 - RNA, 22 nt, Human
guaugucaugagccuugugcgu

SEQ ID NO: 493044 - RNA, 22 nt, Human
agucauguguucaucuuucauu

SEQ ID NO: 493045 - RNA, 22 nt, Human
ccaggcaaagcccaugcaagag

SEQ ID NO: 493046 - RNA, 22 nt, Human
ggggaccuggccacccauccuu

SEQ ID NO: 493047 - RNA, 22 nt, Human
uugagacugagucucgcccugu

SEQ ID NO: 493048 - RNA, 22 nt, Human
ggcaucagcccgguccugggcu

SEQ ID NO: 493049 - RNA, 22 nt, Human
auuaauaucccccgccguucug

SEQ ID NO: 493050 - RNA, 22 nt, Human
uugucgggcuuacgcagggcca

SEQ ID NO: 493051 - RNA, 21 nt, Human
cccgugccuucagcaguccug

SEQ ID NO: 493052 - RNA, 22 nt, Human
uucguuuaguccacaaaugcau

SEQ ID NO: 493053 - RNA, 22 nt, Human
acaagcgggccacagugcuggu

SEQ ID NO: 493054 - RNA, 22 nt, Human
ccaugcagugcuggagcugauu

SEQ ID NO: 493055 - RNA, 22 nt, Human
cuguggcuaggaagcuguggga

SEQ ID NO: 493056 - RNA, 21 nt, Human
uccuccuguagaggguccugg

SEQ ID NO: 493057 - RNA, 22 nt, Human
cuucaugcugauauccucgaug

SEQ ID NO: 493058 - RNA, 20 nt, Human
gcucagggccugggucugga

SEQ ID NO: 493059 - RNA, 18 nt, Human
cuacauucauaggaaagg

SEQ ID NO: 493060 - RNA, 21 nt, Human
ggccuuggcgggggccgaauu

SEQ ID NO: 493061 - RNA, 22 nt, Human
ccuguggccgcgucgggcggcg

SEQ ID NO: 493062 - RNA, 22 nt, Human
accuggaggcagagguugcagu

SEQ ID NO: 493063 - RNA, 22 nt, Human
ugcuugacuuaguuucucauuu

SEQ ID NO: 493064 - RNA, 22 nt, Human
ccugaggaugccagcaugggug

SEQ ID NO: 493065 - RNA, 22 nt, Human
cccaccagaccugcaccggcac

SEQ ID NO: 493066 - RNA, 22 nt, Human
aagcccagcaucccugcaccag

SEQ ID NO: 493067 - RNA, 22 nt, Human
cugcugucuuuauuucacugcu

SEQ ID NO: 493068 - RNA, 22 nt, Human
agaucaaggacaugaagaggcu

SEQ ID NO: 493069 - RNA, 22 nt, Human
agugggagcggcagucggggac

SEQ ID NO: 493070 - RNA, 22 nt, Human
ucggggauggugucugagggag

SEQ ID NO: 493071 - RNA, 22 nt, Human
cugcccaucuggccacacacag

SEQ ID NO: 493072 - RNA, 22 nt, Human
gccagcagcucuugggcgggca

SEQ ID NO: 493073 - RNA, 22 nt, Human
gaguuucuucauggugcagagg

SEQ ID NO: 493074 - RNA, 22 nt, Human
ucuuggcaguucuugugcuuuu

SEQ ID NO: 493075 - RNA, 21 nt, Human
ugagcaccagcugcaugcccc

SEQ ID NO: 493076 - RNA, 22 nt, Human
aguguucuagcgcugugcuugu

SEQ ID NO: 493077 - RNA, 22 nt, Human
acaagucaguggaauuaauauu

SEQ ID NO: 493078 - RNA, 22 nt, Human
uacuuugagaugaugcugaucg

SEQ ID NO: 493079 - RNA, 20 nt, Human
cagcucugggcaggucgagg

SEQ ID NO: 493080 - RNA, 22 nt, Human
gucuggaggaggaagaaggcac

SEQ ID NO: 493081 - RNA, 22 nt, Human
ucacccuucccagcuguccgcc

SEQ ID NO: 493082 - RNA, 22 nt, Human
agggccagcagcuuggccaacc

SEQ ID NO: 493083 - RNA, 22 nt, Human
gaggucaggggagaggcugaug

SEQ ID NO: 493084 - RNA, 23 nt, Human
ggacaugucucuggguauuuuga

SEQ ID NO: 493085 - RNA, 22 nt, Human
caggccgggcacugcgcuaggu

SEQ ID NO: 493086 - RNA, 22 nt, Human
aucaucaucuaaauugugucgc

SEQ ID NO: 493087 - RNA, 22 nt, Human
ugcaaaaagagcgaggagcccu

SEQ ID NO: 493088 - RNA, 22 nt, Human
acagcaucccugaagauaacca

SEQ ID NO: 493089 - RNA, 22 nt, Human
ucauccugaagaaccugcuucc

SEQ ID NO: 493090 - RNA, 22 nt, Human
acauuucuccuacuuguuauuu

SEQ ID NO: 493091 - RNA, 22 nt, Human
gcugucccgaaccccugguaau

SEQ ID NO: 493092 - RNA, 20 nt, Human
agcuggcccccgguggccug

SEQ ID NO: 493093 - RNA, 18 nt, Human
accugauuggcgcagccc

SEQ ID NO: 493094 - RNA, 22 nt, Human
cuagggccaaaggcugugaugc

SEQ ID NO: 493095 - RNA, 22 nt, Human
ggccuuccauugcucuuuucua

SEQ ID NO: 493096 - RNA, 22 nt, Human
aaucccuccccaggcaaguccu

SEQ ID NO: 493097 - RNA, 22 nt, Human
agagggcgcccaggcccacgcc

SEQ ID NO: 493098 - RNA, 22 nt, Human
cagcagcaggcgcacggccguc

SEQ ID NO: 493099 - RNA, 22 nt, Human
uggcaaggccacaggugcaguu

SEQ ID NO: 493100 - RNA, 22 nt, Human
ggcagccagagggcagcuggau

SEQ ID NO: 493101 - RNA, 22 nt, Human
aguuuccacuggagacacugug

SEQ ID NO: 493102 - RNA, 22 nt, Human
gauguauagcuuuaacugaccc

SEQ ID NO: 493103 - RNA, 23 nt, Human
agcccagcagagaaccuaggucc

SEQ ID NO: 493104 - RNA, 22 nt, Human
uccuucagaggacggcagccag

SEQ ID NO: 493105 - RNA, 22 nt, Human
cgggcacucagggucgaggugg

SEQ ID NO: 493106 - RNA, 22 nt, Human
gggggaaaguggagguucguga

SEQ ID NO: 493107 - RNA, 22 nt, Human
cuggagcucagcccagguucca

SEQ ID NO: 493108 - RNA, 22 nt, Human
caugucacaauucuuaauggga

SEQ ID NO: 493109 - RNA, 22 nt, Human
ggcgcucaguguugccccagag

SEQ ID NO: 493110 - RNA, 22 nt, Human
ucuuccagauacuuccugacuu

SEQ ID NO: 493111 - RNA, 22 nt, Human
uguagggaggaaggguuggaaa

SEQ ID NO: 493112 - RNA, 22 nt, Human
uccuucccaggugucgccgccu

SEQ ID NO: 493113 - RNA, 22 nt, Human
ccuggagacccacuucugccaa

SEQ ID NO: 493114 - RNA, 22 nt, Human
cuggagaggcugggaacagguu

SEQ ID NO: 493115 - RNA, 22 nt, Human
gccagagaggccuuagaaucca

SEQ ID NO: 493116 - RNA, 22 nt, Human
ugugagacguaggccaucgagg

SEQ ID NO: 493117 - RNA, 22 nt, Human
gcucugugccccugccguggac

SEQ ID NO: 493118 - RNA, 22 nt, Human
uccucccugcacucagugaagu

SEQ ID NO: 493119 - RNA, 22 nt, Human
aaauguucccaauaugaagcug

SEQ ID NO: 493120 - RNA, 22 nt, Human
gugaccaucaucucagcuaguu

SEQ ID NO: 493121 - RNA, 22 nt, Human
uucccagauuggagggcagggg

SEQ ID NO: 493122 - RNA, 22 nt, Human
gggagccccaccucggugcccg

SEQ ID NO: 493123 - RNA, 22 nt, Human
gcuucauagcauucauugccug

SEQ ID NO: 493124 - RNA, 22 nt, Human
agccacccuaccagcccugaaa

SEQ ID NO: 493125 - RNA, 22 nt, Human
cggggccuagucuaccucggca

SEQ ID NO: 493126 - RNA, 22 nt, Human
ucaggccuagggagaaaauuca

SEQ ID NO: 493127 - RNA, 22 nt, Human
uggcuguagaaucagagacuug

SEQ ID NO: 493128 - RNA, 18 nt, Human
gacaaaaguacagacaga

SEQ ID NO: 493129 - RNA, 22 nt, Human
gacuggcucuaucuccuuggcg

SEQ ID NO: 493130 - RNA, 22 nt, Human
uguggaagaacuucuugcuugg

SEQ ID NO: 493131 - RNA, 22 nt, Human
gcuggguuuucuuccgggccua

SEQ ID NO: 493132 - RNA, 22 nt, Human
cccgggaggaggaaguugcagu

SEQ ID NO: 493133 - RNA, 22 nt, Human
aggagccauugcaggauggcag

SEQ ID NO: 493134 - RNA, 22 nt, Human
caccugagcaacccugugcggg

SEQ ID NO: 493135 - RNA, 22 nt, Human
cauggccagauucuuucuucuc

SEQ ID NO: 493136 - RNA, 22 nt, Human
cugagggccuucuaugcugagc

SEQ ID NO: 493137 - RNA, 22 nt, Human
uggccuugcccagcgccuaggu

SEQ ID NO: 493138 - RNA, 22 nt, Human
ucagaagguacugaagacaugg

SEQ ID NO: 493139 - RNA, 22 nt, Human
gugcagcugugguggagccagg

SEQ ID NO: 493140 - RNA, 22 nt, Human
ucugaauucuuagaauuaaagg

SEQ ID NO: 493141 - RNA, 22 nt, Human
ugccuguggaaaggcuggugcu

SEQ ID NO: 493142 - RNA, 22 nt, Human
gaaacauuuguugaguacuugc

SEQ ID NO: 493143 - RNA, 22 nt, Human
uuugcuggagaugagcgugggu

SEQ ID NO: 493144 - RNA, 22 nt, Human
ugcaugcagcuggucgggcgcc

SEQ ID NO: 493145 - RNA, 22 nt, Human
uggagcagccuuuucuaagcaa

SEQ ID NO: 493146 - RNA, 22 nt, Human
gguccccguggaggcuggagcg

SEQ ID NO: 493147 - RNA, 22 nt, Human
aggcaguguguagcuggaagag

SEQ ID NO: 493148 - RNA, 22 nt, Human
cccaggaggcagaaguugcagu

SEQ ID NO: 493149 - RNA, 22 nt, Human
ccugugauauuguucauaauau

SEQ ID NO: 493150 - RNA, 22 nt, Human
cacucacccgguccuucccagu

SEQ ID NO: 493151 - RNA, 22 nt, Human
ggcuggacuugguccuguuuug

SEQ ID NO: 493152 - RNA, 22 nt, Human
aaagaugucauacacauuaaga

SEQ ID NO: 493153 - RNA, 22 nt, Human
gaagcuucgaaagagugauuuc

SEQ ID NO: 493154 - RNA, 19 nt, Human
uggcucugucgaaggcaca

SEQ ID NO: 493155 - RNA, 21 nt, Human
gccaccucaaucuucuagcgc

SEQ ID NO: 493156 - RNA, 22 nt, Human
agcuccugaaaagcgcuugcuu

SEQ ID NO: 493157 - RNA, 22 nt, Human
ccacagcaugcaggccugacac

SEQ ID NO: 493158 - RNA, 22 nt, Human
uuucugugauaggcugcgacgc

SEQ ID NO: 493159 - RNA, 22 nt, Human
gguguuguacauucuguggauu

SEQ ID NO: 493160 - RNA, 22 nt, Human
aaagcacauuacaagcucaguc

SEQ ID NO: 493161 - RNA, 22 nt, Human
uuguuuaaagaacuucugacuu

SEQ ID NO: 493162 - RNA, 22 nt, Human
caccucucauuucuacagauuc

SEQ ID NO: 493163 - RNA, 22 nt, Human
aucauuuaguggggcauuggaa

SEQ ID NO: 493164 - RNA, 22 nt, Human
auuuccagcagcauauuugucu

SEQ ID NO: 493165 - RNA, 22 nt, Human
uguguggcaagcuguaugcuag

SEQ ID NO: 493166 - RNA, 22 nt, Human
uggccucuccuggcagcaucca

SEQ ID NO: 493167 - RNA, 22 nt, Human
acaggaucgcccuguugcccag

SEQ ID NO: 493168 - RNA, 22 nt, Human
augcugccuccucuucagccgc

SEQ ID NO: 493169 - RNA, 22 nt, Human
agggugugcuguugggucuuuc

SEQ ID NO: 493170 - RNA, 22 nt, Human
aguuauguccucagcaaaucaa

SEQ ID NO: 493171 - RNA, 22 nt, Human
aucaacuuguccuugauguuaa

SEQ ID NO: 493172 - RNA, 22 nt, Human
cucgagagauccucuugccacc

SEQ ID NO: 493173 - RNA, 22 nt, Human
augaacaguacaaagcacagac

SEQ ID NO: 493174 - RNA, 22 nt, Human
gacaggugcuaagggaccuggc

SEQ ID NO: 493175 - RNA, 19 nt, Human
uccuggggaggggcauggc

SEQ ID NO: 493176 - RNA, 22 nt, Human
gcggcccggguccccagcagca

SEQ ID NO: 493177 - RNA, 22 nt, Human
gccaggaccucagaugcagggc

SEQ ID NO: 493178 - RNA, 22 nt, Human
aaaugcucgccuuggccgagac

SEQ ID NO: 493179 - RNA, 22 nt, Human
uacugcugagcuggguagaagg

SEQ ID NO: 493180 - RNA, 22 nt, Human
uggugaagucagcggagcccgg

SEQ ID NO: 493181 - RNA, 22 nt, Human
agccagcauauauauaguugaa

SEQ ID NO: 493182 - RNA, 22 nt, Human
ugucaaguuguuaaguucuggg

SEQ ID NO: 493183 - RNA, 22 nt, Human
accaggcccuccagcugcgugg

SEQ ID NO: 493184 - RNA, 22 nt, Human
cagcuggaggagcagcuuccag

SEQ ID NO: 493185 - RNA, 22 nt, Human
gcuaugggaugugcuguggaug

SEQ ID NO: 493186 - RNA, 22 nt, Human
acccggaggcgggggaugcagu

SEQ ID NO: 493187 - RNA, 22 nt, Human
ugauucaguacuuucucuaacu

SEQ ID NO: 493188 - RNA, 22 nt, Human
ucuccccaguauggauucucug

SEQ ID NO: 493189 - RNA, 22 nt, Human
ucccugggguaucgcugaggca

SEQ ID NO: 493190 - RNA, 22 nt, Human
aggccuuccucggagacaggga

SEQ ID NO: 493191 - RNA, 22 nt, Human
gaguggggcccacugcugggug

SEQ ID NO: 493192 - RNA, 17 nt, Human
uagauuaaacacggcca

SEQ ID NO: 493193 - RNA, 22 nt, Human
ccuccugggccuugcucuguga

SEQ ID NO: 493194 - RNA, 22 nt, Human
caugggcucuucuggacugcac

SEQ ID NO: 493195 - RNA, 22 nt, Human
gaagguuuuguuugcaaaucau

SEQ ID NO: 493196 - RNA, 22 nt, Human
uccagguccuacuggcccauag

SEQ ID NO: 493197 - RNA, 22 nt, Human
gcugggcugcgucggggaagcc

SEQ ID NO: 493198 - RNA, 22 nt, Human
uccuggccucugagucaagaac

SEQ ID NO: 493199 - RNA, 22 nt, Human
ccucguccacaauccuugcaca

SEQ ID NO: 493200 - RNA, 22 nt, Human
ggcagaggaagcuggaaguggg

SEQ ID NO: 493201 - RNA, 19 nt, Human
uggugcgcuguuccugagc

SEQ ID NO: 493202 - RNA, 22 nt, Human
aagcauuucagguagagauauu

SEQ ID NO: 493203 - RNA, 18 nt, Human
uggcagccagcugcuccu

SEQ ID NO: 493204 - RNA, 21 nt, Human
uggcccuggccacggcugcca

SEQ ID NO: 493205 - RNA, 22 nt, Human
auuggccagacuuauccuucag

SEQ ID NO: 493206 - RNA, 22 nt, Human
accaggaguuuugaccaggggc

SEQ ID NO: 493207 - RNA, 22 nt, Human
cccaugcacccucuaagaagga

SEQ ID NO: 493208 - RNA, 17 nt, Human
acuuguauugugcuuua

SEQ ID NO: 493209 - RNA, 22 nt, Human
guucuucaaagugacaacuaaa

SEQ ID NO: 493210 - RNA, 22 nt, Human
uugggauacaucuugcugagcc

SEQ ID NO: 493211 - RNA, 22 nt, Human
aguguccaacucagcuugucaa

SEQ ID NO: 493212 - RNA, 22 nt, Human
agagcgagucuggggcucggau

SEQ ID NO: 493213 - RNA, 22 nt, Human
agccuggacagcuacggagaac

SEQ ID NO: 493214 - RNA, 22 nt, Human
agaauaagccugacgaaaccua

SEQ ID NO: 493215 - RNA, 21 nt, Human
ucgaccugcugggcucgggcu

SEQ ID NO: 493216 - RNA, 22 nt, Human
aggcucagcaucugauucauau

SEQ ID NO: 493217 - RNA, 22 nt, Human
guucuccaggggcuguucaucu

SEQ ID NO: 493218 - RNA, 22 nt, Human
aggccagggcacugcucuuuag

SEQ ID NO: 493219 - RNA, 21 nt, Human
ccuggagacaaagacagggug

SEQ ID NO: 493220 - RNA, 19 nt, Human
acacaccagugccugugac

SEQ ID NO: 493221 - RNA, 20 nt, Human
guccugggagccacagcaca

SEQ ID NO: 493222 - RNA, 22 nt, Human
auucccauagccauccggagag

SEQ ID NO: 493223 - RNA, 22 nt, Human
cccaugacucucauucacaguc

SEQ ID NO: 493224 - RNA, 22 nt, Human
aaggagucugggccauucagag

SEQ ID NO: 493225 - RNA, 20 nt, Human
ucugugugccaucaccuaac

SEQ ID NO: 493226 - RNA, 22 nt, Human
uacagugaguggcagagccaga

SEQ ID NO: 493227 - RNA, 22 nt, Human
uuuacaaggcaguuauuuuccu

SEQ ID NO: 493228 - RNA, 22 nt, Human
gcguggcuuagagugggguacc

SEQ ID NO: 493229 - RNA, 17 nt, Human
ucugcagggggccgugu

SEQ ID NO: 493230 - RNA, 20 nt, Human
uggccucugagaugccacgg

SEQ ID NO: 493231 - RNA, 23 nt, Human
aguguucagcauguaguaaauac

SEQ ID NO: 493232 - RNA, 19 nt, Human
ugcuugccugccuuuccca

SEQ ID NO: 493233 - RNA, 22 nt, Human
ugcccuggcuccucccacgcug

SEQ ID NO: 493234 - RNA, 23 nt, Human
ccucaaauguagccuuuuuccca

SEQ ID NO: 493235 - RNA, 22 nt, Human
gggcucaucaagccucuccgcc

SEQ ID NO: 493236 - RNA, 22 nt, Human
acagagggucugggcacaggac

SEQ ID NO: 493237 - RNA, 22 nt, Human
cagggccucugugggcucucuc

SEQ ID NO: 493238 - RNA, 22 nt, Human
ugggccagauccauggcaauaa

SEQ ID NO: 493239 - RNA, 22 nt, Human
gcugccaucuccugaggacagg

SEQ ID NO: 493240 - RNA, 22 nt, Human
gggcucggcaucuguggacucu

SEQ ID NO: 493241 - RNA, 22 nt, Human
ccagcugcugcaccgugcaugg

SEQ ID NO: 493242 - RNA, 22 nt, Human
uggagccagcaggacucagagg

SEQ ID NO: 493243 - RNA, 22 nt, Human
cucugcguggcugggcccaggg

SEQ ID NO: 493244 - RNA, 22 nt, Human
gccagguaugaauuacgcacga

SEQ ID NO: 493245 - RNA, 22 nt, Human
ucaucuccauacggucucgcag

SEQ ID NO: 493246 - RNA, 22 nt, Human
cgccccagccaguugagcggcg

SEQ ID NO: 493247 - RNA, 22 nt, Human
ccagagagggcgccaccuggag

SEQ ID NO: 493248 - RNA, 21 nt, Human
uggacauuuacccuucaggga

SEQ ID NO: 493249 - RNA, 22 nt, Human
acacaucagaaauaugaaugag

SEQ ID NO: 493250 - RNA, 22 nt, Human
ugguggggccagacuucagcuc

SEQ ID NO: 493251 - RNA, 22 nt, Human
gcgcugccucugcucuccccac

SEQ ID NO: 493252 - RNA, 22 nt, Human
ccugcucaacgaauauggcgau

SEQ ID NO: 493253 - RNA, 22 nt, Human
cuccagaggcgacuugcaucac

SEQ ID NO: 493254 - RNA, 22 nt, Human
cgcgcugcagacagcggaggcc

SEQ ID NO: 493255 - RNA, 22 nt, Human
cccgaccucgcaaagcgcacuc

SEQ ID NO: 493256 - RNA, 19 nt, Human
gggccucacccacaccucc

SEQ ID NO: 493257 - RNA, 22 nt, Human
cacuuggaggaaggccuauuca

SEQ ID NO: 493258 - RNA, 22 nt, Human
gcgaguccacuggggggcgcag

SEQ ID NO: 493259 - RNA, 22 nt, Human
accaaauaggcuuccuggguug

SEQ ID NO: 493260 - RNA, 22 nt, Human
cccaccacgugcuuugcuggag

SEQ ID NO: 493261 - RNA, 22 nt, Human
gaggggcugggguugacuccaa

SEQ ID NO: 493262 - RNA, 22 nt, Human
ccugcgcgucugggucugucuc

SEQ ID NO: 493263 - RNA, 20 nt, Human
cucuuuucacucucaguggu

SEQ ID NO: 493264 - RNA, 22 nt, Human
ccugugacucugucugaugguc

SEQ ID NO: 493265 - RNA, 22 nt, Human
ugucuuggccacuaggagugcc

SEQ ID NO: 493266 - RNA, 22 nt, Human
auccuggguaaguuccuuuuaa

SEQ ID NO: 493267 - RNA, 22 nt, Human
augcaggaagagcccuggagcu

SEQ ID NO: 493268 - RNA, 22 nt, Human
gagcagcaggccagguugcagg

SEQ ID NO: 493269 - RNA, 22 nt, Human
aggcagagaaaaaccagauaug

SEQ ID NO: 493270 - RNA, 22 nt, Human
gcuaagggauaggcugccuccu

SEQ ID NO: 493271 - RNA, 22 nt, Human
ugcacccacuuagcugaaguuc

SEQ ID NO: 493272 - RNA, 23 nt, Human
cguguccuucagggagagugugg

SEQ ID NO: 493273 - RNA, 22 nt, Human
augcggagccccaagcuugaag

SEQ ID NO: 493274 - RNA, 22 nt, Human
cauuggcuccugugggacauga

SEQ ID NO: 493275 - RNA, 22 nt, Human
gcaguaaauugagagucauguu

SEQ ID NO: 493276 - RNA, 22 nt, Human
uccaggauugucagccagaagg

SEQ ID NO: 493277 - RNA, 22 nt, Human
gugaccagacagagucuagccc

SEQ ID NO: 493278 - RNA, 22 nt, Human
gaccacuggggugagggccauc

SEQ ID NO: 493279 - RNA, 22 nt, Human
cuagcagaagcuccuugagggu

SEQ ID NO: 493280 - RNA, 22 nt, Human
uucugagguccaugcaguacug

SEQ ID NO: 493281 - RNA, 22 nt, Human
cuggagucggcgccccaacaga

SEQ ID NO: 493282 - RNA, 22 nt, Human
guacacucccccugugaaguug

SEQ ID NO: 493283 - RNA, 22 nt, Human
uuaugggcgaugcaaaccugau

SEQ ID NO: 493284 - RNA, 22 nt, Human
cagagccaaaccucagggcccg

SEQ ID NO: 493285 - RNA, 22 nt, Human
aguacuuuuuguucaauugugc

SEQ ID NO: 493286 - RNA, 22 nt, Human
ggucauagagcuggaaauuggc

SEQ ID NO: 493287 - RNA, 22 nt, Human
auggggagcucaccaccuguuu

SEQ ID NO: 493288 - RNA, 22 nt, Human
cucaucuggcuucaguaacagu

SEQ ID NO: 493289 - RNA, 22 nt, Human
gguggcaagggcagccaguaac

SEQ ID NO: 493290 - RNA, 20 nt, Human
ucaggguuucccauucuugg

SEQ ID NO: 493291 - RNA, 22 nt, Human
gagagagacauguaaacgcggu

SEQ ID NO: 493292 - RNA, 22 nt, Human
uugucaggaacuaugauuaugc

SEQ ID NO: 493293 - RNA, 22 nt, Human
acaaagugaaaagcaucgaauu

SEQ ID NO: 493294 - RNA, 22 nt, Human
augugauacuccuucuagugga

SEQ ID NO: 493295 - RNA, 22 nt, Human
uggggcaugugaaccuggaugu

SEQ ID NO: 493296 - RNA, 22 nt, Human
gcaccagccugagccucuugca

SEQ ID NO: 493297 - RNA, 22 nt, Human
ucagguagugguuaaguucugu

SEQ ID NO: 493298 - RNA, 22 nt, Human
agcccugaccuguccuguucug

SEQ ID NO: 493299 - RNA, 22 nt, Human
uugcacgcuugcgguuccugcc

SEQ ID NO: 493300 - RNA, 22 nt, Human
ccagacuggggcuccuugaggg

SEQ ID NO: 493301 - RNA, 22 nt, Human
cauuuuacgacauagggcaggc

SEQ ID NO: 493302 - RNA, 22 nt, Human
gcgcuccucccggcccuggugg

SEQ ID NO: 493303 - RNA, 22 nt, Human
cuucucggccguguggaugcgc

SEQ ID NO: 493304 - RNA, 22 nt, Human
agcggcgccggagggaggugcg

SEQ ID NO: 493305 - RNA, 22 nt, Human
cucugggguggaggaggcugac

SEQ ID NO: 493306 - RNA, 22 nt, Human
gaccuccguguacaccucccag

SEQ ID NO: 493307 - RNA, 22 nt, Human
ggggcuuccagcgcccgccggu

SEQ ID NO: 493308 - RNA, 22 nt, Human
auaguguguaaagugcagugau

SEQ ID NO: 493309 - RNA, 22 nt, Human
acagacuccccagguuaucuca

SEQ ID NO: 493310 - RNA, 20 nt, Human
ggccggggagcucuccaggg

SEQ ID NO: 493311 - RNA, 22 nt, Human
cuugccagggacucagucaggg

SEQ ID NO: 493312 - RNA, 22 nt, Human
cauaggcucuucagagaacuga

SEQ ID NO: 493313 - RNA, 19 nt, Human
gaauggguucuguagggag

SEQ ID NO: 493314 - RNA, 22 nt, Human
agaaaucugacugcugugcaca

SEQ ID NO: 493315 - RNA, 22 nt, Human
caguuuuaugaaugcuuauuag

SEQ ID NO: 493316 - RNA, 22 nt, Human
gcaggcuuauggggagacagag

SEQ ID NO: 493317 - RNA, 22 nt, Human
ggcagguguggugaccagagau

SEQ ID NO: 493318 - RNA, 22 nt, Human
cuggacacuggggaugcgcagu

SEQ ID NO: 493319 - RNA, 22 nt, Human
agccagugucgugugacaugag

SEQ ID NO: 493320 - RNA, 22 nt, Human
caagcagauauuuuagucaaga

SEQ ID NO: 493321 - RNA, 22 nt, Human
cacugggagcagcuccaacauu

SEQ ID NO: 493322 - RNA, 22 nt, Human
ggucccugcccaaagcccuugg

SEQ ID NO: 493323 - RNA, 22 nt, Human
caggccugugacaccgugucug

SEQ ID NO: 493324 - RNA, 22 nt, Human
cagcugacaagaguccuuggag

SEQ ID NO: 493325 - RNA, 23 nt, Human
acugccugugccgaucucucuca

SEQ ID NO: 493326 - RNA, 22 nt, Human
gaaagcagaugaaauugcaaca

SEQ ID NO: 493327 - RNA, 22 nt, Human
cugaugcucuggauguagucaa

SEQ ID NO: 493328 - RNA, 22 nt, Human
auggccagcaagguagggcaau

SEQ ID NO: 493329 - RNA, 22 nt, Human
gccuucugaucgcuggacugac

SEQ ID NO: 493330 - RNA, 22 nt, Human
cguggggcggguggacacuugc

SEQ ID NO: 493331 - RNA, 22 nt, Human
gccccagcguggcuguguuagg

SEQ ID NO: 493332 - RNA, 22 nt, Human
cagguguugcaguugaagacug

SEQ ID NO: 493333 - RNA, 22 nt, Human
cagaguccugcaccagcuccag

SEQ ID NO: 493334 - RNA, 22 nt, Human
gaucggguggguucugccauca

SEQ ID NO: 493335 - RNA, 22 nt, Human
ugacucauauuucauggauacg

SEQ ID NO: 493336 - RNA, 22 nt, Human
aggacaggauugagcugaacug

SEQ ID NO: 493337 - RNA, 22 nt, Human
uuccugguaacaaucucaaagu

SEQ ID NO: 493338 - RNA, 22 nt, Human
aacaugaugacauuguaagcuu

SEQ ID NO: 493339 - RNA, 22 nt, Human
agcuuuggcaucugacuagccg

SEQ ID NO: 493340 - RNA, 22 nt, Human
aggacucaucccugcuugucag

SEQ ID NO: 493341 - RNA, 22 nt, Human
ggugcggagacuccaugaggcc

SEQ ID NO: 493342 - RNA, 22 nt, Human
cccuugagccuggaggagcucu

SEQ ID NO: 493343 - RNA, 21 nt, Human
uggagagugauuucagugugg

SEQ ID NO: 493344 - RNA, 22 nt, Human
ggugagaggcagugcuguggaa

SEQ ID NO: 493345 - RNA, 22 nt, Human
cuugaaagucagcagaguggau

SEQ ID NO: 493346 - RNA, 22 nt, Human
acuuugccuucuuacuguguug

SEQ ID NO: 493347 - RNA, 23 nt, Human
gggugcugccuguagucaugcug

SEQ ID NO: 493348 - RNA, 22 nt, Human
gugccugguuuggggaauguuc

SEQ ID NO: 493349 - RNA, 22 nt, Human
agguggucuuguggaugccgca

SEQ ID NO: 493350 - RNA, 22 nt, Human
accugccagaaugcuaguccug

SEQ ID NO: 493351 - RNA, 22 nt, Human
agccucucuguuagucacuggg

SEQ ID NO: 493352 - RNA, 22 nt, Human
acagccaacgucuuucuuacuu

SEQ ID NO: 493353 - RNA, 22 nt, Human
aaguuugucucauuugaucuuc

SEQ ID NO: 493354 - RNA, 22 nt, Human
ggagaggguagggguccugccc

SEQ ID NO: 493355 - RNA, 22 nt, Human
uuguagucuaggauagauuuuu

SEQ ID NO: 493356 - RNA, 22 nt, Human
aagcagaaaaacugagcuccaa

SEQ ID NO: 493357 - RNA, 22 nt, Human
augcaauaguaauucuagucug

SEQ ID NO: 493358 - RNA, 22 nt, Human
ugcacauggccugagugccuga

SEQ ID NO: 493359 - RNA, 22 nt, Human
gucagcaggguccccuugagug

SEQ ID NO: 493360 - RNA, 22 nt, Human
gccagagggauuccuggugugu

SEQ ID NO: 493361 - RNA, 22 nt, Human
aacccgggagguggagguuaug

SEQ ID NO: 493362 - RNA, 22 nt, Human
augauugaaaaugacauugcca

SEQ ID NO: 493363 - RNA, 22 nt, Human
ccuggccuccuggccuucucau

SEQ ID NO: 493364 - RNA, 22 nt, Human
aagggggaaauccuagcgccgc

SEQ ID NO: 493365 - RNA, 22 nt, Human
cugggagaugacucagagcagg

SEQ ID NO: 493366 - RNA, 18 nt, Human
ggugagggagcuggaagc

SEQ ID NO: 493367 - RNA, 17 nt, Human
ggccugcaccuccugcu

SEQ ID NO: 493368 - RNA, 22 nt, Human
agcgcuugccgcacuccaagca

SEQ ID NO: 493369 - RNA, 22 nt, Human
uguggccaccagagcugcuauu

SEQ ID NO: 493370 - RNA, 22 nt, Human
ugaacaggugccuucagggagu

SEQ ID NO: 493371 - RNA, 22 nt, Human
cugguggaauggcagagggaac

SEQ ID NO: 493372 - RNA, 18 nt, Human
uccaggcuccaggcuaac

SEQ ID NO: 493373 - RNA, 22 nt, Human
uccucauucuuggugcaucaaa

SEQ ID NO: 493374 - RNA, 22 nt, Human
gcugccgacccacagggguuaa

SEQ ID NO: 493375 - RNA, 23 nt, Human
ugucuggauucgacugugguugg

SEQ ID NO: 493376 - RNA, 22 nt, Human
ugggugccaaccucugguggcc

SEQ ID NO: 493377 - RNA, 22 nt, Human
ggccaaggcucuugagggcuga

SEQ ID NO: 493378 - RNA, 22 nt, Human
gcaggggcugagcaccagcggg

SEQ ID NO: 493379 - RNA, 22 nt, Human
ugcagcaccuauggacacuugu

SEQ ID NO: 493380 - RNA, 22 nt, Human
ugcaugacaauugccgucaagu

SEQ ID NO: 493381 - RNA, 19 nt, Human
ggaggcuucuuggggucgg

SEQ ID NO: 493382 - RNA, 22 nt, Human
aggcgaagggaccagacgguag

SEQ ID NO: 493383 - RNA, 22 nt, Human
uggaaggggccaggcgcggagu

SEQ ID NO: 493384 - RNA, 22 nt, Human
ucucucugcagcccgggacacu

SEQ ID NO: 493385 - RNA, 23 nt, Human
gcauccagagcucaguccccuuu

SEQ ID NO: 493386 - RNA, 22 nt, Human
uguccagcugaaggcagccuca

SEQ ID NO: 493387 - RNA, 22 nt, Human
uaggugcaggucacaagggaug

SEQ ID NO: 493388 - RNA, 16 nt, Human
aggcucagaggcugga

SEQ ID NO: 493389 - RNA, 22 nt, Human
cuucucugucacaggguuacgu

SEQ ID NO: 493390 - RNA, 22 nt, Human
accuccuccaaggagccauagg

SEQ ID NO: 493391 - RNA, 22 nt, Human
cugggaccugugugccugggcc

SEQ ID NO: 493392 - RNA, 22 nt, Human
agcugugaccuucaagagcuac

SEQ ID NO: 493393 - RNA, 22 nt, Human
ccagagaggccuuggcaagaca

SEQ ID NO: 493394 - RNA, 22 nt, Human
uauucacaaaaugagguccuca

SEQ ID NO: 493395 - RNA, 22 nt, Human
ccucccagaugugcccaaugga

SEQ ID NO: 493396 - RNA, 22 nt, Human
gcuggguggaucggaggcucug

SEQ ID NO: 493397 - RNA, 21 nt, Human
gcaggguuugugcugugaguu

SEQ ID NO: 493398 - RNA, 22 nt, Human
uugcaaucagcaguguuuucac

SEQ ID NO: 493399 - RNA, 22 nt, Human
cuggcuuucauggcgcaguuga

SEQ ID NO: 493400 - RNA, 22 nt, Human
agaguuuacagaaauaagcugu

SEQ ID NO: 493401 - RNA, 22 nt, Human
ggugugucugccaggaacugca

SEQ ID NO: 493402 - RNA, 17 nt, Human
aacaguuaaugggggaa

SEQ ID NO: 493403 - RNA, 17 nt, Human
ugggggcccuguguaga

SEQ ID NO: 493404 - RNA, 22 nt, Human
cacgccuggacggcggagggug

SEQ ID NO: 493405 - RNA, 22 nt, Human
gcggccuuguggcggagcaggc

SEQ ID NO: 493406 - RNA, 22 nt, Human
gcagaagcugggcagcgaggug

SEQ ID NO: 493407 - RNA, 22 nt, Human
ugaacaugcuguugauggccug

SEQ ID NO: 493408 - RNA, 22 nt, Human
ucaggccccaucccagacuuau

SEQ ID NO: 493409 - RNA, 22 nt, Human
augaggccacaguuauagauuu

SEQ ID NO: 493410 - RNA, 22 nt, Human
uucacauaaucugcagcaagcg

SEQ ID NO: 493411 - RNA, 22 nt, Human
ggcggugguugagaggacggcg

SEQ ID NO: 493412 - RNA, 22 nt, Human
aggcaaucaguguagaguaaca

SEQ ID NO: 493413 - RNA, 22 nt, Human
agccacagucuguagccagcuu

SEQ ID NO: 493414 - RNA, 21 nt, Human
cuuuggcaagggagaagucac

SEQ ID NO: 493415 - RNA, 22 nt, Human
cugcccugcagcuccacggacu

SEQ ID NO: 493416 - RNA, 22 nt, Human
ggagucugugucuugaagcagu

SEQ ID NO: 493417 - RNA, 22 nt, Human
ccuaggccgcccggugcguggg

SEQ ID NO: 493418 - RNA, 22 nt, Human
ucacugaauuucaagcuagugg

SEQ ID NO: 493419 - RNA, 22 nt, Human
cugggccacaagccugugugau

SEQ ID NO: 493420 - RNA, 22 nt, Human
caaccugaugugcaugccacgg

SEQ ID NO: 493421 - RNA, 22 nt, Human
gcucugugcaguucagggacac

SEQ ID NO: 493422 - RNA, 22 nt, Human
guuucuccucugugucuuguuu

SEQ ID NO: 493423 - RNA, 22 nt, Human
augcacaagguagauuauuauu

SEQ ID NO: 493424 - RNA, 22 nt, Human
aauucauacucuauauugcuuu

SEQ ID NO: 493425 - RNA, 22 nt, Human
uugucucuacagagaguaguag

SEQ ID NO: 493426 - RNA, 22 nt, Human
uggguguguccauauuuugacu

SEQ ID NO: 493427 - RNA, 17 nt, Human
agccugcugaucucaca

SEQ ID NO: 493428 - RNA, 22 nt, Human
gcucagagauguucaguagcuu

SEQ ID NO: 493429 - RNA, 22 nt, Human
ccagaaugugugaaauuugaug

SEQ ID NO: 493430 - RNA, 22 nt, Human
cucagcuucuaccuccugagug

SEQ ID NO: 493431 - RNA, 22 nt, Human
ccggcucggcgaccaggcugaa

SEQ ID NO: 493432 - RNA, 22 nt, Human
gugggugucaguaucuuuaacg

SEQ ID NO: 493433 - RNA, 22 nt, Human
uaggccacagagaggagauuuc

SEQ ID NO: 493434 - RNA, 22 nt, Human
gagacagagagguacucaacau

SEQ ID NO: 493435 - RNA, 17 nt, Human
gcccgugggcuacggua

SEQ ID NO: 493436 - RNA, 22 nt, Human
cuguggccagagcgccguugac

SEQ ID NO: 493437 - RNA, 20 nt, Human
gggcucugcauccaucagcc

SEQ ID NO: 493438 - RNA, 22 nt, Human
uccucacagcugguucauucag

SEQ ID NO: 493439 - RNA, 22 nt, Human
guggaaggaauuaacagacuag

SEQ ID NO: 493440 - RNA, 22 nt, Human
gccugagauucccggagccgug

SEQ ID NO: 493441 - RNA, 22 nt, Human
ccaggcagccugcuccauucug

SEQ ID NO: 493442 - RNA, 22 nt, Human
aggagucauugagagggguccu

SEQ ID NO: 493443 - RNA, 22 nt, Human
cuggucagggcucuuugggagc

SEQ ID NO: 493444 - RNA, 20 nt, Human
gugugaccuccuguggaugc

SEQ ID NO: 493445 - RNA, 21 nt, Human
agcaucugaggcaguuuccua

SEQ ID NO: 493446 - RNA, 22 nt, Human
cugggccucacccuagaccaau

SEQ ID NO: 493447 - RNA, 22 nt, Human
ggggaagaaauagaacauuuug

SEQ ID NO: 493448 - RNA, 22 nt, Human
uuucugaggaauuaauacagaa

SEQ ID NO: 493449 - RNA, 22 nt, Human
uggguagggagcuggaauccua

SEQ ID NO: 493450 - RNA, 23 nt, Human
cauuugauccucacaauaaaugg

SEQ ID NO: 493451 - RNA, 22 nt, Human
gccacaggucggcuagaggguc

SEQ ID NO: 493452 - RNA, 21 nt, Human
ucaggaagagccaguucaugc

SEQ ID NO: 493453 - RNA, 22 nt, Human
cugcaucaguggauaugauggu

SEQ ID NO: 493454 - RNA, 22 nt, Human
aggggagguguccccaaaucuc

SEQ ID NO: 493455 - RNA, 18 nt, Human
uccauccucugcucuuca

SEQ ID NO: 493456 - RNA, 22 nt, Human
caucaggaauaaaugaggcugu

SEQ ID NO: 493457 - RNA, 22 nt, Human
gcugccaauccagcugugggag

SEQ ID NO: 493458 - RNA, 23 nt, Human
cugagggcuggucugaagucugc

SEQ ID NO: 493459 - RNA, 22 nt, Human
cuccagauuccguuuauucagg

SEQ ID NO: 493460 - RNA, 22 nt, Human
cugcuucacccugccugagaac

SEQ ID NO: 493461 - RNA, 22 nt, Human
gcuacaggggucaguccuuugc

SEQ ID NO: 493462 - RNA, 22 nt, Human
gggcuaagcagagugggaacag

SEQ ID NO: 493463 - RNA, 22 nt, Human
ccgaggcuggccucagggcugu

SEQ ID NO: 493464 - RNA, 22 nt, Human
ucuggacaggggcgcuuugggg

SEQ ID NO: 493465 - RNA, 22 nt, Human
gcagagcacccugcagugguau

SEQ ID NO: 493466 - RNA, 22 nt, Human
ggagcagggaauuacagcgcag

SEQ ID NO: 493467 - RNA, 22 nt, Human
gaugaguucuuucuauucuauu

SEQ ID NO: 493468 - RNA, 22 nt, Human
ucuccagaguaaccuuggagca

SEQ ID NO: 493469 - RNA, 22 nt, Human
cccugcacagccuggcucucuu

SEQ ID NO: 493470 - RNA, 20 nt, Human
ggggcccaagcccucuugcc

SEQ ID NO: 493471 - RNA, 22 nt, Human
caguggguccugcgucugccag

SEQ ID NO: 493472 - RNA, 22 nt, Human
ggugucagugaagguagaguuu

SEQ ID NO: 493473 - RNA, 22 nt, Human
gaacuuuaauuagcuuuugucu

SEQ ID NO: 493474 - RNA, 22 nt, Human
accagaagcuggagcacaagga

SEQ ID NO: 493475 - RNA, 22 nt, Human
aggacugggugcagagggcauc

SEQ ID NO: 493476 - RNA, 19 nt, Human
gcuuccagcacugcaggag

SEQ ID NO: 493477 - RNA, 22 nt, Human
ccucuucuaggacguccuugug

SEQ ID NO: 493478 - RNA, 21 nt, Human
ucucuccucaagcucgacccc

SEQ ID NO: 493479 - RNA, 22 nt, Human
aggcucccaagcacugacccca

SEQ ID NO: 493480 - RNA, 22 nt, Human
ggugaccucaccuggucccacc

SEQ ID NO: 493481 - RNA, 22 nt, Human
uucaguaagcacuucuagagcu

SEQ ID NO: 493482 - RNA, 22 nt, Human
ugcgccugcgcaaagguuucug

SEQ ID NO: 493483 - RNA, 22 nt, Human
acaugcacccaguuacacucuc

SEQ ID NO: 493484 - RNA, 22 nt, Human
ugauuugaaaccuuuggcaaga

SEQ ID NO: 493485 - RNA, 22 nt, Human
gcauucuugguggagugcuaaa

SEQ ID NO: 493486 - RNA, 22 nt, Human
uuggauggagguucaagcacua

SEQ ID NO: 493487 - RNA, 22 nt, Human
acccggagucggagguugcagu

SEQ ID NO: 493488 - RNA, 22 nt, Human
ccugaaaugaguucugcucacu

SEQ ID NO: 493489 - RNA, 22 nt, Human
aauagcaaaugcucauuugaaa

SEQ ID NO: 493490 - RNA, 22 nt, Human
ugagcugcuucuuauaaugugu

SEQ ID NO: 493491 - RNA, 22 nt, Human
gcccagcugcacccuggugggu

SEQ ID NO: 493492 - RNA, 22 nt, Human
ggacauugaagcuggaaaggga

SEQ ID NO: 493493 - RNA, 22 nt, Human
caugcuggucagccaguggaug

SEQ ID NO: 493494 - RNA, 22 nt, Human
cagacaggguccuguccgucac

SEQ ID NO: 493495 - RNA, 22 nt, Human
agggcuccuaugccccauggac

SEQ ID NO: 493496 - RNA, 22 nt, Human
cuccagcagaaagggcgagugg

SEQ ID NO: 493497 - RNA, 21 nt, Human
caaaagagacugauucuugga

SEQ ID NO: 493498 - RNA, 22 nt, Human
cuggugcuguagccugauugag

SEQ ID NO: 493499 - RNA, 22 nt, Human
cacggccacugcagcaccccag

SEQ ID NO: 493500 - RNA, 22 nt, Human
acugguuuuggaaaucaguaca

SEQ ID NO: 493501 - RNA, 22 nt, Human
gugggggcaggcagugcuagga

SEQ ID NO: 493502 - RNA, 22 nt, Human
ggaccugaacauaaaacgaggc

SEQ ID NO: 493503 - RNA, 22 nt, Human
agauggcagggguaccuggaag

SEQ ID NO: 493504 - RNA, 22 nt, Human
accagagcuggcagaguaucaa

SEQ ID NO: 493505 - RNA, 22 nt, Human
ucaggccaggagaucagauuga

SEQ ID NO: 493506 - RNA, 22 nt, Human
cagucucuugcuucauuaguug

SEQ ID NO: 493507 - RNA, 22 nt, Human
aaggccaucuacuuacggaauu

SEQ ID NO: 493508 - RNA, 22 nt, Human
uggcugggagcuggaacugggc

SEQ ID NO: 493509 - RNA, 22 nt, Human
ucugcgcccugucgccugcucc

SEQ ID NO: 493510 - RNA, 22 nt, Human
ggcaauuacguauuagucaugu

SEQ ID NO: 493511 - RNA, 22 nt, Human
cccugaaaguacacugggacgg

SEQ ID NO: 493512 - RNA, 20 nt, Human
acguggccaccaguggcuua

SEQ ID NO: 493513 - RNA, 22 nt, Human
uuguugcugcucaaccucuaua

SEQ ID NO: 493514 - RNA, 22 nt, Human
gucugcugacagagcauggacc

SEQ ID NO: 493515 - RNA, 22 nt, Human
ccucuaaauuguuugaaguugg

SEQ ID NO: 493516 - RNA, 22 nt, Human
aggcucucucugccagccgugc

SEQ ID NO: 493517 - RNA, 22 nt, Human
ugcugcgggacccacugugggc

SEQ ID NO: 493518 - RNA, 22 nt, Human
agagccuguucggaggcgcccc

SEQ ID NO: 493519 - RNA, 22 nt, Human
uuagaaaaaggcuguggucuua

SEQ ID NO: 493520 - RNA, 22 nt, Human
gguagacugagcuccuugagga

SEQ ID NO: 493521 - RNA, 22 nt, Human
aggagucaccugcccaaaguca

SEQ ID NO: 493522 - RNA, 22 nt, Human
agagcuauuucuuaaaagcugu

SEQ ID NO: 493523 - RNA, 22 nt, Human
ggcagaggagcuggaaacaugg

SEQ ID NO: 493524 - RNA, 15 nt, Human
gccccaggaaucaaa

SEQ ID NO: 493525 - RNA, 22 nt, Human
acggccgaugacuccagcaugg

SEQ ID NO: 493526 - RNA, 22 nt, Human
aucauccauggcugaucauaaa

SEQ ID NO: 493527 - RNA, 22 nt, Human
ccauggccugaaggagugcauc

SEQ ID NO: 493528 - RNA, 22 nt, Human
ggggucugggcuuagcuggaau

SEQ ID NO: 493529 - RNA, 22 nt, Human
gcagcugcgaagaagucuaucu

SEQ ID NO: 493530 - RNA, 22 nt, Human
cccaggaguuagagguuguggu

SEQ ID NO: 493531 - RNA, 22 nt, Human
aguccggggucuggacaccugg

SEQ ID NO: 493532 - RNA, 22 nt, Human
gcaaaacagucgaugccuccca

SEQ ID NO: 493533 - RNA, 22 nt, Human
aggcucgcaugcccugcaccac

SEQ ID NO: 493534 - RNA, 22 nt, Human
ccaggacacgauuuuuagucug

SEQ ID NO: 493535 - RNA, 18 nt, Human
gccagcccuccaaccucc

SEQ ID NO: 493536 - RNA, 22 nt, Human
ucucauuuacuuccacaggcug

SEQ ID NO: 493537 - RNA, 22 nt, Human
cccuguccugcuaggcccuggu

SEQ ID NO: 493538 - RNA, 22 nt, Human
guccaucuaaguauccagccug

SEQ ID NO: 493539 - RNA, 22 nt, Human
aagaaaagguaaccgcuuaucu

SEQ ID NO: 493540 - RNA, 22 nt, Human
gugccaccagaugcuguugcua

SEQ ID NO: 493541 - RNA, 22 nt, Human
ccucauucucgcguguguuucu

SEQ ID NO: 493542 - RNA, 22 nt, Human
gagcugagggucuaggaggguu

SEQ ID NO: 493543 - RNA, 22 nt, Human
agaauccuggagaagcuguacc

SEQ ID NO: 493544 - RNA, 22 nt, Human
ccaagaggggaagggccgcagc

SEQ ID NO: 493545 - RNA, 22 nt, Human
uuugccaguauuuuauugauga

SEQ ID NO: 493546 - RNA, 22 nt, Human
ucaguguagcagacuuguagcc

SEQ ID NO: 493547 - RNA, 22 nt, Human
cgucaggguugagcagguagau

SEQ ID NO: 493548 - RNA, 22 nt, Human
ccucuuccuucucacuguggaa

SEQ ID NO: 493549 - RNA, 22 nt, Human
gggcuuggcuggggccaccaga

SEQ ID NO: 493550 - RNA, 21 nt, Human
aggcaugagcccugcauggac

SEQ ID NO: 493551 - RNA, 22 nt, Human
gcccagggcugcaaguggacgc

SEQ ID NO: 493552 - RNA, 21 nt, Human
cagaggggcuagccuggcugc

SEQ ID NO: 493553 - RNA, 22 nt, Human
agggugcccaccgcuucugccc

SEQ ID NO: 493554 - RNA, 23 nt, Human
uggcucuguggaucccucaggag

SEQ ID NO: 493555 - RNA, 22 nt, Human
agugagaguauuaaugugaacu

SEQ ID NO: 493556 - RNA, 22 nt, Human
uuuggagagaugaaguucugug

SEQ ID NO: 493557 - RNA, 22 nt, Human
ucugcccaggaggucccauggg

SEQ ID NO: 493558 - RNA, 22 nt, Human
agaagcagaaggaagcagggcc

SEQ ID NO: 493559 - RNA, 22 nt, Human
cuauuuucccauaugguugaca

SEQ ID NO: 493560 - RNA, 22 nt, Human
ggggucccugcaccagcauguc

SEQ ID NO: 493561 - RNA, 23 nt, Human
caccccacccugaggaggaggga

SEQ ID NO: 493562 - RNA, 22 nt, Human
ugagaauacugcauuguuagga

SEQ ID NO: 493563 - RNA, 22 nt, Human
cuguggaguccuggggaaugga

SEQ ID NO: 493564 - RNA, 22 nt, Human
aggugcccaugagcuccauggc

SEQ ID NO: 493565 - RNA, 22 nt, Human
ggagaagggaacugaguuuuug

SEQ ID NO: 493566 - RNA, 22 nt, Human
gagucucugaccagggugccaa

SEQ ID NO: 493567 - RNA, 22 nt, Human
caggggacacuccugcuugggc

SEQ ID NO: 493568 - RNA, 22 nt, Human
gaugggcaucaaacaugacgug

SEQ ID NO: 493569 - RNA, 22 nt, Human
uaugcgugccucugucugucug

SEQ ID NO: 493570 - RNA, 22 nt, Human
uagcugggacuacuggcccugc

SEQ ID NO: 493571 - RNA, 22 nt, Human
auggucacuucacccaugagcu

SEQ ID NO: 493572 - RNA, 22 nt, Human
aggcaguguggagggcuguugc

SEQ ID NO: 493573 - RNA, 18 nt, Human
gccugccagccgagggac

SEQ ID NO: 493574 - RNA, 22 nt, Human
cagagcugacccaaggauugaa

SEQ ID NO: 493575 - RNA, 22 nt, Human
aggggcagccucacaauccucu

SEQ ID NO: 493576 - RNA, 20 nt, Human
acuagaaagucacugggggg

SEQ ID NO: 493577 - RNA, 22 nt, Human
uauuaugguuguagguuaacaa

SEQ ID NO: 493578 - RNA, 22 nt, Human
ucucugucucccguguguccgg

SEQ ID NO: 493579 - RNA, 22 nt, Human
auugucgucaauggacacauag

SEQ ID NO: 493580 - RNA, 22 nt, Human
ugaguguuguaaccauaugauu

SEQ ID NO: 493581 - RNA, 22 nt, Human
cuugcuacuaugccuggcuaau

SEQ ID NO: 493582 - RNA, 23 nt, Human
ggaggcacuuaggcagagcagag

SEQ ID NO: 493583 - RNA, 22 nt, Human
ccugggugaugugcugcccucg

SEQ ID NO: 493584 - RNA, 22 nt, Human
cccucuggcucuucucaggccg

SEQ ID NO: 493585 - RNA, 22 nt, Human
ugcuccguucuucugcuucuug

SEQ ID NO: 493586 - RNA, 22 nt, Human
caagucugaccucugggugaag

SEQ ID NO: 493587 - RNA, 22 nt, Human
cuucuggguauuccagauaccu

SEQ ID NO: 493588 - RNA, 22 nt, Human
auguaguauuuggaaauguaaa

SEQ ID NO: 493589 - RNA, 22 nt, Human
agguggcuaugaggaugcaguc

SEQ ID NO: 493590 - RNA, 22 nt, Human
ccuggggaccugccucagcccu

SEQ ID NO: 493591 - RNA, 22 nt, Human
ggugaccagggucaguagcuuu

SEQ ID NO: 493592 - RNA, 22 nt, Human
aggccugaggaccagauaaaug

SEQ ID NO: 493593 - RNA, 22 nt, Human
gcucugagucacacugcccugu

SEQ ID NO: 493594 - RNA, 22 nt, Human
uccucuccaggugagccgaaau

SEQ ID NO: 493595 - RNA, 23 nt, Human
ccacuggagaaaguggcaggugg

SEQ ID NO: 493596 - RNA, 22 nt, Human
acagauccugguuacagccauu

SEQ ID NO: 493597 - RNA, 22 nt, Human
ucugaaauuuuaguuauagaaa

SEQ ID NO: 493598 - RNA, 22 nt, Human
guccagagaguaaaggggguaa

SEQ ID NO: 493599 - RNA, 22 nt, Human
ggacuggucugagagggauuca

SEQ ID NO: 493600 - RNA, 22 nt, Human
cugcucucuguuccccuggauc

SEQ ID NO: 493601 - RNA, 22 nt, Human
ccagcaggagacuagcaacaua

SEQ ID NO: 493602 - RNA, 22 nt, Human
uuugaagauaaauauggagaaa

SEQ ID NO: 493603 - RNA, 22 nt, Human
gcagcagcggggccccugcgcg

SEQ ID NO: 493604 - RNA, 23 nt, Human
gguucugccgcuuacugcugugc

SEQ ID NO: 493605 - RNA, 22 nt, Human
uguggugccgagagucuggacg

SEQ ID NO: 493606 - RNA, 16 nt, Human
ggcagcagcuccgugc

SEQ ID NO: 493607 - RNA, 22 nt, Human
ggcagccuccagggcacuggug

SEQ ID NO: 493608 - RNA, 22 nt, Human
ggcggccugugggucggccuca

SEQ ID NO: 493609 - RNA, 22 nt, Human
uccaggaggacugagggggcug

SEQ ID NO: 493610 - RNA, 22 nt, Human
uuggaggacuaguuaagagacc

SEQ ID NO: 493611 - RNA, 22 nt, Human
caguuaaacagauugaguguua

SEQ ID NO: 493612 - RNA, 22 nt, Human
caauuuuuaaacuaugaaguug

SEQ ID NO: 493613 - RNA, 20 nt, Human
ucauccaguugguuuauggu

SEQ ID NO: 493614 - RNA, 22 nt, Human
agagaccuuccugacuccagag

SEQ ID NO: 493615 - RNA, 22 nt, Human
uggaucugcucuaugaacugcu

SEQ ID NO: 493616 - RNA, 22 nt, Human
gaaagagaaccugggccuagau

SEQ ID NO: 493617 - RNA, 22 nt, Human
accaguuaaagaauaugaggcc

SEQ ID NO: 493618 - RNA, 21 nt, Human
guucaauagcucuuugaaugc

SEQ ID NO: 493619 - RNA, 21 nt, Human
acucaucuuuuuggagaccag

SEQ ID NO: 493620 - RNA, 22 nt, Human
aagcucuuuccacuaaaccacu

SEQ ID NO: 493621 - RNA, 22 nt, Human
uggacccaccccagggccugcu

SEQ ID NO: 493622 - RNA, 22 nt, Human
ucuacaacgugguuuuguugua

SEQ ID NO: 493623 - RNA, 22 nt, Human
uccucagcaaacacuucacucu

SEQ ID NO: 493624 - RNA, 22 nt, Human
gcggggggcagcagucgcucag

SEQ ID NO: 493625 - RNA, 22 nt, Human
ccacugugcccagccucauggg

SEQ ID NO: 493626 - RNA, 22 nt, Human
ucuccaggggcagggucuggag

SEQ ID NO: 493627 - RNA, 22 nt, Human
uugagacucgagucucucagac

SEQ ID NO: 493628 - RNA, 22 nt, Human
uccucuucaaaauagcucugaa

SEQ ID NO: 493629 - RNA, 20 nt, Human
ggccugagcauggcuggcag

SEQ ID NO: 493630 - RNA, 22 nt, Human
uaucuguagucucaugguuccu

SEQ ID NO: 493631 - RNA, 19 nt, Human
agcucaggcccaucguccc

SEQ ID NO: 493632 - RNA, 22 nt, Human
aucccaggcggcacagguugca

SEQ ID NO: 493633 - RNA, 22 nt, Human
ucuguggcauguugcacuugua

SEQ ID NO: 493634 - RNA, 23 nt, Human
auaugucaugcaccagcacuuua

SEQ ID NO: 493635 - RNA, 22 nt, Human
caggccagcagggccuccgugg

SEQ ID NO: 493636 - RNA, 22 nt, Human
aggcugagguaggaggaucgcu

SEQ ID NO: 493637 - RNA, 22 nt, Human
gugcucuggccaagcgcgugcg

SEQ ID NO: 493638 - RNA, 22 nt, Human
ggguuguagagcuggaagggga

SEQ ID NO: 493639 - RNA, 22 nt, Human
aacuuucagaauccuaugcauu

SEQ ID NO: 493640 - RNA, 20 nt, Human
ccagagcugauggcugcccg

SEQ ID NO: 493641 - RNA, 22 nt, Human
uagcauuuagaacaccuugaga

SEQ ID NO: 493642 - RNA, 22 nt, Human
cccaggucgucagcaguguggu

SEQ ID NO: 493643 - RNA, 22 nt, Human
ucucugagguuguuuccagcac

SEQ ID NO: 493644 - RNA, 22 nt, Human
ccagguggacggcgaguacagg

SEQ ID NO: 493645 - RNA, 22 nt, Human
cugcgggcugucaggcgugcca

SEQ ID NO: 493646 - RNA, 22 nt, Human
accccacuccucuguuuuaacu

SEQ ID NO: 493647 - RNA, 19 nt, Human
ugccuggcaccagcuccac

SEQ ID NO: 493648 - RNA, 22 nt, Human
ucccugccuccuggcagugcca

SEQ ID NO: 493649 - RNA, 22 nt, Human
aggccacucagggggccaagau

SEQ ID NO: 493650 - RNA, 22 nt, Human
ugcucccaggcauucucuguug

SEQ ID NO: 493651 - RNA, 22 nt, Human
accuggaccugccaccuaugag

SEQ ID NO: 493652 - RNA, 22 nt, Human
gugcaggacagcacaucuccug

SEQ ID NO: 493653 - RNA, 22 nt, Human
ggacagacuuuacagccccggg

SEQ ID NO: 493654 - RNA, 22 nt, Human
gcagcaaucuucacagugucau

SEQ ID NO: 493655 - RNA, 22 nt, Human
ccuucuagcaaaucaacauaaa

SEQ ID NO: 493656 - RNA, 22 nt, Human
ccacugauucugccaggucucu

SEQ ID NO: 493657 - RNA, 22 nt, Human
cucaggcuaagaaggccaagug

SEQ ID NO: 493658 - RNA, 22 nt, Human
uuucuagguguucacagagcau

SEQ ID NO: 493659 - RNA, 22 nt, Human
ugcccuccacaguggcuccacc

SEQ ID NO: 493660 - RNA, 22 nt, Human
gaauguuuaaaaggugcaguuu

SEQ ID NO: 493661 - RNA, 22 nt, Human
aggagacaguuuggacguguag

SEQ ID NO: 493662 - RNA, 22 nt, Human
ucugaggacagugcugugccug

SEQ ID NO: 493663 - RNA, 22 nt, Human
agcaugucuaacucuucagggu

SEQ ID NO: 493664 - RNA, 22 nt, Human
gguuccaggcauggcaggaugu

SEQ ID NO: 493665 - RNA, 22 nt, Human
uggcugaggcacagcugccgcc

SEQ ID NO: 493666 - RNA, 22 nt, Human
cgugcggccucggggcccggcu

SEQ ID NO: 493667 - RNA, 19 nt, Human
agcagggagugguuguggg

SEQ ID NO: 493668 - RNA, 22 nt, Human
caaagcccagaggccucacuuu

SEQ ID NO: 493669 - RNA, 22 nt, Human
uucacagcucauacuguucuca

SEQ ID NO: 493670 - RNA, 22 nt, Human
gcugggugauucauuuccauaa

SEQ ID NO: 493671 - RNA, 22 nt, Human
ugagaccuuggacuccauccuu

SEQ ID NO: 493672 - RNA, 21 nt, Human
acauguccccuaugcuuaagg

SEQ ID NO: 493673 - RNA, 22 nt, Human
caagaaguugacagccagguga

SEQ ID NO: 493674 - RNA, 22 nt, Human
cgggaagguggagguugcagug

SEQ ID NO: 493675 - RNA, 22 nt, Human
agagauuccuuuggggaaagca

SEQ ID NO: 493676 - RNA, 22 nt, Human
cuguccagcgacuaggggaugg

SEQ ID NO: 493677 - RNA, 22 nt, Human
ucaucagcuccaugagguacuc

SEQ ID NO: 493678 - RNA, 19 nt, Human
ugugaaagcuaguguucuu

SEQ ID NO: 493679 - RNA, 22 nt, Human
gcaggcaggcuuccuugaacug

SEQ ID NO: 493680 - RNA, 22 nt, Human
gcucccacgcaauucuuuucag

SEQ ID NO: 493681 - RNA, 22 nt, Human
ccugaggacagugugaccaugg

SEQ ID NO: 493682 - RNA, 22 nt, Human
cagggccaagccccuuuggcug

SEQ ID NO: 493683 - RNA, 22 nt, Human
ccugcaagagcggagaagccag

SEQ ID NO: 493684 - RNA, 22 nt, Human
aaaaagacagaggaugaggcag

SEQ ID NO: 493685 - RNA, 22 nt, Human
uuuaaauuuagaagaaacacug

SEQ ID NO: 493686 - RNA, 22 nt, Human
agccuggccacucagggccuga

SEQ ID NO: 493687 - RNA, 22 nt, Human
guagggacaauauguuauuaga

SEQ ID NO: 493688 - RNA, 22 nt, Human
ucuauuuguucucaggaucauc

SEQ ID NO: 493689 - RNA, 22 nt, Human
uggcuucuugucuaauuuguua

SEQ ID NO: 493690 - RNA, 22 nt, Human
cccucuacagggaagcgcuuuc

SEQ ID NO: 493691 - RNA, 22 nt, Human
gagauuuccauauuuuguaaca

SEQ ID NO: 493692 - RNA, 22 nt, Human
acaggcaggcuucggccagagc

SEQ ID NO: 493693 - RNA, 22 nt, Human
cgcagcagccccgugguaggug

SEQ ID NO: 493694 - RNA, 22 nt, Human
ucuugagugcgcuuggguguuc

SEQ ID NO: 493695 - RNA, 22 nt, Human
uagggacaaagagcugaggccu

SEQ ID NO: 493696 - RNA, 22 nt, Human
ucuauaauccuauuucaacugc

SEQ ID NO: 493697 - RNA, 22 nt, Human
ucuggcuccacaccucacugca

SEQ ID NO: 493698 - RNA, 22 nt, Human
aauucaaucuaagaaaugauca

SEQ ID NO: 493699 - RNA, 22 nt, Human
ugaaggaauggaggaucagagc

SEQ ID NO: 493700 - RNA, 19 nt, Human
ucugggcagggccagcacc

SEQ ID NO: 493701 - RNA, 22 nt, Human
gcaggggaguggcaggcccgga

SEQ ID NO: 493702 - RNA, 22 nt, Human
guuagaaagugucugcuugggu

SEQ ID NO: 493703 - RNA, 22 nt, Human
ucugagagucucugaggcagau

SEQ ID NO: 493704 - RNA, 22 nt, Human
cauugcuuugugcauauuuaaa

SEQ ID NO: 493705 - RNA, 22 nt, Human
ccaggccuggccaggggaugcc

SEQ ID NO: 493706 - RNA, 22 nt, Human
gcuuuggaaggggcugguggag

SEQ ID NO: 493707 - RNA, 22 nt, Human
uuugcauuuccagaguagcaga

SEQ ID NO: 493708 - RNA, 22 nt, Human
aaugacaagacauagucucuga

SEQ ID NO: 493709 - RNA, 22 nt, Human
ucuggcucauaggaaggccauu

SEQ ID NO: 493710 - RNA, 22 nt, Human
ggcagcuccucaaaaaauuaaa

SEQ ID NO: 493711 - RNA, 22 nt, Human
cccugggagaaguugagggcug

SEQ ID NO: 493712 - RNA, 22 nt, Human
caggucccgccccgggcugacc

SEQ ID NO: 493713 - RNA, 22 nt, Human
cagcacugcuucgcagccaggg

SEQ ID NO: 493714 - RNA, 22 nt, Human
gagagcuggguucaaguagcug

SEQ ID NO: 493715 - RNA, 22 nt, Human
cagagugaaauaggggaucaag

SEQ ID NO: 493716 - RNA, 23 nt, Human
cuccucguaacucuguggugggu

SEQ ID NO: 493717 - RNA, 22 nt, Human
ugcuggcuguauaugugagagu

SEQ ID NO: 493718 - RNA, 22 nt, Human
acagggcagagggcaguuggua

SEQ ID NO: 493719 - RNA, 22 nt, Human
guuuuccuucucagccauugcc

SEQ ID NO: 493720 - RNA, 22 nt, Human
ugcuggccaacaaggcuccaag

SEQ ID NO: 493721 - RNA, 22 nt, Human
uggagcugguaaacagugacau

SEQ ID NO: 493722 - RNA, 22 nt, Human
cccagagauguccugagugaua

SEQ ID NO: 493723 - RNA, 22 nt, Human
ggcucaggccuguaauccuagc

SEQ ID NO: 493724 - RNA, 22 nt, Human
caagauggacauaaggagagaa

SEQ ID NO: 493725 - RNA, 21 nt, Human
uuagcaaagcaaacacaugcu

SEQ ID NO: 493726 - RNA, 22 nt, Human
ucucaggcuaccuugcacaagg

SEQ ID NO: 493727 - RNA, 22 nt, Human
uucuggcuguaugauauuuaau

SEQ ID NO: 493728 - RNA, 22 nt, Human
ucagaggagccaaaguucugag

SEQ ID NO: 493729 - RNA, 22 nt, Human
ucauuuguacuugugugcuugu

SEQ ID NO: 493730 - RNA, 22 nt, Human
gaauucuuuucuuucugaaagu

SEQ ID NO: 493731 - RNA, 22 nt, Human
ucucacuuuccagacuuuucaa

SEQ ID NO: 493732 - RNA, 22 nt, Human
ccauggaguuccucuggucuau

SEQ ID NO: 493733 - RNA, 22 nt, Human
ugccccucuaggcccuguucua

SEQ ID NO: 493734 - RNA, 22 nt, Human
auaacagaugugaagugcuaau

SEQ ID NO: 493735 - RNA, 22 nt, Human
caggagccacauuccaccuuga

SEQ ID NO: 493736 - RNA, 20 nt, Human
agcuggagaagggcccuucc

SEQ ID NO: 493737 - RNA, 22 nt, Human
gacaggggucccucugggcugu

SEQ ID NO: 493738 - RNA, 22 nt, Human
ccugggcuuugagggcaggaug

SEQ ID NO: 493739 - RNA, 19 nt, Human
uucugggcagcacaugaau

SEQ ID NO: 493740 - RNA, 22 nt, Human
uagagcagccuucagagcaguu

SEQ ID NO: 493741 - RNA, 22 nt, Human
uggcaggucaugaguggccacc

SEQ ID NO: 493742 - RNA, 22 nt, Human
uuccaagagcuuuaauuguuga

SEQ ID NO: 493743 - RNA, 22 nt, Human
uuucuaaggugagguagaaaau

SEQ ID NO: 493744 - RNA, 22 nt, Human
gagguauguaugcuacauucuu

SEQ ID NO: 493745 - RNA, 22 nt, Human
ugccuugguucucuacuuggag

SEQ ID NO: 493746 - RNA, 21 nt, Human
gagcauggcuuacaucagcag

SEQ ID NO: 493747 - RNA, 22 nt, Human
acccagcuaacccuacccugga

SEQ ID NO: 493748 - RNA, 22 nt, Human
cuuuagaauuugauauaaucaa

SEQ ID NO: 493749 - RNA, 20 nt, Human
agaaucugacccagagagac

SEQ ID NO: 493750 - RNA, 22 nt, Human
ucccagauuguugauggcuuaa

SEQ ID NO: 493751 - RNA, 22 nt, Human
ugggcucucuuuaccucauaac

SEQ ID NO: 493752 - RNA, 22 nt, Human
cagcugccaagaaucuuuucua

SEQ ID NO: 493753 - RNA, 22 nt, Human
uaucuauuccaaauaucagcgu

SEQ ID NO: 493754 - RNA, 22 nt, Human
uuguacaaauaggaaccucuga

SEQ ID NO: 493755 - RNA, 20 nt, Human
ucccuccugcagauagagaa

SEQ ID NO: 493756 - RNA, 22 nt, Human
uaauccacaauagagauuaucu

SEQ ID NO: 493757 - RNA, 22 nt, Human
guucuugccagcauccucaggu

SEQ ID NO: 493758 - RNA, 22 nt, Human
uuauuugugaaucauuuaucua

SEQ ID NO: 493759 - RNA, 22 nt, Human
agaacuguccuuggaggagagu

SEQ ID NO: 493760 - RNA, 22 nt, Human
cauuaugugggaaaauguucuu

SEQ ID NO: 493761 - RNA, 20 nt, Human
ccacaggaguccagucgacc

SEQ ID NO: 493762 - RNA, 21 nt, Human
uucucuggcuucuguagcugg

SEQ ID NO: 493763 - RNA, 22 nt, Human
aguuuagaguucaaauuaguuc

SEQ ID NO: 493764 - RNA, 18 nt, Human
uggcucugcagccagaug

SEQ ID NO: 493765 - RNA, 22 nt, Human
ccuggcucuagaggccacuccu

SEQ ID NO: 493766 - RNA, 22 nt, Human
cuggagcucuccagagccccgu

SEQ ID NO: 493767 - RNA, 22 nt, Human
aagguuuuuuuccaguaucucu

SEQ ID NO: 493768 - RNA, 22 nt, Human
ggcuggcuuucucuccgcaccu

SEQ ID NO: 493769 - RNA, 22 nt, Human
ugcugccuucuaggcgugcccu

SEQ ID NO: 493770 - RNA, 22 nt, Human
uuaaauuauuucuagugaggug

SEQ ID NO: 493771 - RNA, 22 nt, Human
ugucaaugaagauaugaauaau

SEQ ID NO: 493772 - RNA, 22 nt, Human
gcuucugguagaauucaauaga

SEQ ID NO: 493773 - RNA, 20 nt, Human
aaaugcuguaauguuuggga

SEQ ID NO: 493774 - RNA, 22 nt, Human
caaauucucaagguuuauccca

SEQ ID NO: 493775 - RNA, 22 nt, Human
ucaaguaguacccaaugcgugg

SEQ ID NO: 493776 - RNA, 22 nt, Human
uagccucucuccuccacaaccu

SEQ ID NO: 493777 - RNA, 22 nt, Human
cuccuuccugguuagcaccuua

SEQ ID NO: 493778 - RNA, 19 nt, Human
cugguccugacugaggggu

SEQ ID NO: 493779 - RNA, 22 nt, Human
caggguggggcuggcuaucaaa

SEQ ID NO: 493780 - RNA, 22 nt, Human
uaaaaugaucucucauguucuu

SEQ ID NO: 493781 - RNA, 22 nt, Human
gcucugagauugagccuuuggu

SEQ ID NO: 493782 - RNA, 22 nt, Human
cuacauaaucuggauuugucug

SEQ ID NO: 493783 - RNA, 22 nt, Human
ggucucugcucagaugccacuu

SEQ ID NO: 493784 - RNA, 22 nt, Human
ucuguacacuucagcaugcauc

SEQ ID NO: 493785 - RNA, 22 nt, Human
ugauuaacugucuauuaaucau

SEQ ID NO: 493786 - RNA, 22 nt, Human
ggcacuuugauuuugagaugca

SEQ ID NO: 493787 - RNA, 22 nt, Human
cuuccucaggcauuagcuggac

SEQ ID NO: 493788 - RNA, 22 nt, Human
uuuuauuaguggcuagaugggg

SEQ ID NO: 493789 - RNA, 22 nt, Human
aucaaaguaggcauauguuuuu

SEQ ID NO: 493790 - RNA, 21 nt, Human
aggugggagaccauguagguc

SEQ ID NO: 493791 - RNA, 22 nt, Human
uagagcuggaaaacugcaggua

SEQ ID NO: 493792 - RNA, 22 nt, Human
gaaggcccagcuugaaugcugc

SEQ ID NO: 493793 - RNA, 22 nt, Human
cauggcacugagcagguaugca

SEQ ID NO: 493794 - RNA, 22 nt, Human
cauauaaauacaacauguguua

SEQ ID NO: 493795 - RNA, 22 nt, Human
cugcccaggggagugcugucgg

SEQ ID NO: 493796 - RNA, 22 nt, Human
gaaugaauagguguccagaugg

SEQ ID NO: 493797 - RNA, 21 nt, Human
cccgcacagcgguaggccgcc

SEQ ID NO: 493798 - RNA, 22 nt, Human
gucugaggucauuagcucucuu

SEQ ID NO: 493799 - RNA, 22 nt, Human
cauuuagagaagauuacaagga

SEQ ID NO: 493800 - RNA, 22 nt, Human
uggcagguuggccuuugguuca

SEQ ID NO: 493801 - RNA, 22 nt, Human
ggcagugaaugaaacagaggcu

SEQ ID NO: 493802 - RNA, 17 nt, Human
ggucuggggccauuggc

SEQ ID NO: 493803 - RNA, 17 nt, Human
auggcuuccauugacca

SEQ ID NO: 493804 - RNA, 22 nt, Human
cagggccaccguguuugcugcu

SEQ ID NO: 493805 - RNA, 22 nt, Human
aaagugcugaaauuacaggggu

SEQ ID NO: 493806 - RNA, 21 nt, Human
aaaaugugagcgugaugcuua

SEQ ID NO: 493807 - RNA, 22 nt, Human
ugcaaggguagaagugauggca

SEQ ID NO: 493808 - RNA, 22 nt, Human
gucuggcuuuugcccuguguuu

SEQ ID NO: 493809 - RNA, 22 nt, Human
cuggggacgucgggcaguguuc

SEQ ID NO: 493810 - RNA, 22 nt, Human
auccuugagccuuaucuuuugu

SEQ ID NO: 493811 - RNA, 17 nt, Human
gacaagacagaauucau

SEQ ID NO: 493812 - RNA, 22 nt, Human
cucagggacuuggauccuggcc

SEQ ID NO: 493813 - RNA, 22 nt, Human
gcuccuggcucuggccaaggga

SEQ ID NO: 493814 - RNA, 22 nt, Human
cagcaggauuggauacaucuca

SEQ ID NO: 493815 - RNA, 22 nt, Human
agagccaguuguuaagcacuua

SEQ ID NO: 493816 - RNA, 22 nt, Human
agggugcagaaggagccuagga

SEQ ID NO: 493817 - RNA, 22 nt, Human
acaugcuacacagagcuccucg

SEQ ID NO: 493818 - RNA, 22 nt, Human
uggcugggagcuggaacugggc

SEQ ID NO: 493819 - RNA, 22 nt, Human
ucauuuacacuucacaaaugga

SEQ ID NO: 493820 - RNA, 22 nt, Human
gaggcagaaguugcagugagca

SEQ ID NO: 493821 - RNA, 21 nt, Human
gcccucaggggaggauggccu

SEQ ID NO: 493822 - RNA, 22 nt, Human
cccaccucucagagagccuugc

SEQ ID NO: 493823 - RNA, 20 nt, Human
uuguugagcucuucaaagaa

SEQ ID NO: 493824 - RNA, 22 nt, Human
caaaguauauuggauugaaugg

SEQ ID NO: 493825 - RNA, 22 nt, Human
cucugggugugacagcaccugg

SEQ ID NO: 493826 - RNA, 20 nt, Human
ucauuucuugggguuccaag

SEQ ID NO: 493827 - RNA, 22 nt, Human
uccauuuuguagguaugcuaca

SEQ ID NO: 493828 - RNA, 22 nt, Human
aguccggggucuggacaccugg

SEQ ID NO: 493829 - RNA, 23 nt, Human
cagggcugguagggaagagcgug

SEQ ID NO: 493830 - RNA, 22 nt, Human
ugggggcuagaacccagggauu

SEQ ID NO: 493831 - RNA, 22 nt, Human
aaugcauuuuauuauaugugac

SEQ ID NO: 493832 - RNA, 22 nt, Human
caugaagcccucaucagucuga

SEQ ID NO: 493833 - RNA, 22 nt, Human
gugccagcaguuauggugauuu

SEQ ID NO: 493834 - RNA, 22 nt, Human
uccagggagauggcagaggcug

SEQ ID NO: 493835 - RNA, 22 nt, Human
aguucacauuccgagguacugg

SEQ ID NO: 493836 - RNA, 22 nt, Human
uugacguccucgauggggaacu

SEQ ID NO: 493837 - RNA, 22 nt, Human
ggcuccugauaggagaaugcgg

SEQ ID NO: 493838 - RNA, 22 nt, Human
uuguauuagcuguaaauuuucu

SEQ ID NO: 493839 - RNA, 22 nt, Human
cuuuggaacauacugcugagcu

SEQ ID NO: 493840 - RNA, 22 nt, Human
uaacuugauaaguauucucugc

SEQ ID NO: 493841 - RNA, 17 nt, Human
caggucugaggccaggc

SEQ ID NO: 493842 - RNA, 22 nt, Human
ugagaaagguauuucaugcacu

SEQ ID NO: 493843 - RNA, 19 nt, Human
aaaaggaauauucuuuggg

SEQ ID NO: 493844 - RNA, 22 nt, Human
caggaggaaaugugacccugcu

SEQ ID NO: 493845 - RNA, 19 nt, Human
ugggagaggcaacagagua

SEQ ID NO: 493846 - RNA, 22 nt, Human
ggcacuuugccuuuaugcacug

SEQ ID NO: 493847 - RNA, 22 nt, Human
cuggagccggcgagccccagcc

SEQ ID NO: 493848 - RNA, 22 nt, Human
agcauggggcuccgcaaugaac

SEQ ID NO: 493849 - RNA, 22 nt, Human
ccucaggggucacugugaggag

SEQ ID NO: 493850 - RNA, 22 nt, Human
augcccugugguucaugugaga

SEQ ID NO: 493851 - RNA, 22 nt, Human
uggagaggaaagugcaguuuug

SEQ ID NO: 493852 - RNA, 22 nt, Human
ccagcaucuaacgcuccuggga

SEQ ID NO: 493853 - RNA, 22 nt, Human
agggacaguuacaucaucagac

SEQ ID NO: 493854 - RNA, 22 nt, Human
agugugagaacggacuaauaaa

SEQ ID NO: 493855 - RNA, 22 nt, Human
acuuuucaaaugggaaacucag

SEQ ID NO: 493856 - RNA, 22 nt, Human
gagccaggucgggccgcggcga

SEQ ID NO: 493857 - RNA, 22 nt, Human
ucaaagcagcacauucgcaagc

SEQ ID NO: 493858 - RNA, 22 nt, Human
uacacaucccagacucccagga

SEQ ID NO: 493859 - RNA, 22 nt, Human
uccugcagccaagggucaucga

SEQ ID NO: 493860 - RNA, 22 nt, Human
cagggcggggucugccggcccu

SEQ ID NO: 493861 - RNA, 22 nt, Human
ccucugccaccucccacgaggc

SEQ ID NO: 493862 - RNA, 22 nt, Human
gaaaugaugucugugcugccac

SEQ ID NO: 493863 - RNA, 17 nt, Human
gcucuggcacaggauug

SEQ ID NO: 493864 - RNA, 22 nt, Human
cacagcccugcgccccaguuug

SEQ ID NO: 493865 - RNA, 22 nt, Human
guucacaucacuucacugaacc

SEQ ID NO: 493866 - RNA, 22 nt, Human
cugaggcacugucagcugaggc

SEQ ID NO: 493867 - RNA, 22 nt, Human
uaacagagauagaaauguaaag

SEQ ID NO: 493868 - RNA, 22 nt, Human
cagggcugcuggccgugcccuc

SEQ ID NO: 493869 - RNA, 22 nt, Human
ccagcaucagcacccaaggagc

SEQ ID NO: 493870 - RNA, 22 nt, Human
gaagcuccguacuaugacuuuu

SEQ ID NO: 493871 - RNA, 19 nt, Human
ccucccacggauuccuucc

SEQ ID NO: 493872 - RNA, 22 nt, Human
gggcagguuauuggaguaggga

SEQ ID NO: 493873 - RNA, 22 nt, Human
agguauuauuagcaucucuauu

SEQ ID NO: 493874 - RNA, 22 nt, Human
uaggaaauuuuacuggucuggg

SEQ ID NO: 493875 - RNA, 20 nt, Human
uucauucauuccacaacuuc

SEQ ID NO: 493876 - RNA, 22 nt, Human
aaaauggcuuaauaggcaauaa

SEQ ID NO: 493877 - RNA, 22 nt, Human
gagccuggagcuggaacgaagc

SEQ ID NO: 493878 - RNA, 22 nt, Human
gugccugggacuugcuccggau

SEQ ID NO: 493879 - RNA, 22 nt, Human
ucugaggccuugggacagaagu

SEQ ID NO: 493880 - RNA, 22 nt, Human
ucacaugcucaccuaagccaca

SEQ ID NO: 493881 - RNA, 22 nt, Human
uucuuacagaguuuacagagcc

SEQ ID NO: 493882 - RNA, 22 nt, Human
aucucugguccaaauguuaccu

SEQ ID NO: 493883 - RNA, 22 nt, Human
aacagcuuugagcaguucugua

SEQ ID NO: 493884 - RNA, 22 nt, Human
uucugcagcaugaggcuggagc

SEQ ID NO: 493885 - RNA, 22 nt, Human
uagaauaaguugaugauauaug

SEQ ID NO: 493886 - RNA, 22 nt, Human
uuaaaugaggcugauguagauu

SEQ ID NO: 493887 - RNA, 22 nt, Human
agcuuuaugcuuccuacaagcu

SEQ ID NO: 493888 - RNA, 22 nt, Human
cagcuuccaucuccacugcccu

SEQ ID NO: 493889 - RNA, 22 nt, Human
uuaacaugucuugacuucaucu

SEQ ID NO: 493890 - RNA, 22 nt, Human
ucaagagaaggggaaauagacu

SEQ ID NO: 493891 - RNA, 22 nt, Human
auaugagaauuggaaaauauca

SEQ ID NO: 493892 - RNA, 22 nt, Human
cauugcaccacauugcaucccu

SEQ ID NO: 493893 - RNA, 22 nt, Human
gagaagggggcucgaguguccu

SEQ ID NO: 493894 - RNA, 22 nt, Human
auaacagagagcuacugaacug

SEQ ID NO: 493895 - RNA, 22 nt, Human
gguccccagcaguggcugcuuc

SEQ ID NO: 493896 - RNA, 22 nt, Human
uuugcaaauauguguuucuauu

SEQ ID NO: 493897 - RNA, 22 nt, Human
uguauuaacauuaauaaaaugg

SEQ ID NO: 493898 - RNA, 22 nt, Human
acucuggcagcagaaccagugu

SEQ ID NO: 493899 - RNA, 22 nt, Human
ucuuaacaagcuccucagugcu

SEQ ID NO: 493900 - RNA, 22 nt, Human
gcccuuccuuagacagcaggau

SEQ ID NO: 493901 - RNA, 23 nt, Human
aggaagaggcaauuucucuuaga

SEQ ID NO: 493902 - RNA, 22 nt, Human
guuuccugcgugugccacucau

SEQ ID NO: 493903 - RNA, 22 nt, Human
cugggcuagaaggaccaggaug

SEQ ID NO: 493904 - RNA, 22 nt, Human
ggaaagcuuuguacuugaaaac

SEQ ID NO: 493905 - RNA, 22 nt, Human
uaugcuuucauucauaugugag

SEQ ID NO: 493906 - RNA, 22 nt, Human
gaagccccaaacccucgccauc

SEQ ID NO: 493907 - RNA, 22 nt, Human
auuugugaauuaagcaugucaa

SEQ ID NO: 493908 - RNA, 22 nt, Human
aaauuagaucaguggauuuucu

SEQ ID NO: 493909 - RNA, 22 nt, Human
uggcccugacugauguggaggg

SEQ ID NO: 493910 - RNA, 22 nt, Human
cuucuuuccuuccuccaguggc

SEQ ID NO: 493911 - RNA, 22 nt, Human
aaauguguuuagaugguuuauu

SEQ ID NO: 493912 - RNA, 22 nt, Human
aaacaugagcaucucuucaagc

SEQ ID NO: 493913 - RNA, 22 nt, Human
gugccagggggcacugaacaga

SEQ ID NO: 493914 - RNA, 19 nt, Human
ucucuggggacacuuucac

SEQ ID NO: 493915 - RNA, 18 nt, Human
gucuggaggucaggagcu

SEQ ID NO: 493916 - RNA, 23 nt, Human
auccacauuacaguaucauacaa

SEQ ID NO: 493917 - RNA, 22 nt, Human
ugaaaugacagucuuaagcucu

SEQ ID NO: 493918 - RNA, 22 nt, Human
aagagcaucgguggagccccca

SEQ ID NO: 493919 - RNA, 22 nt, Human
ggccugucucacccccgggugc

SEQ ID NO: 493920 - RNA, 22 nt, Human
uccaaguugauguuucuuaaau

SEQ ID NO: 493921 - RNA, 18 nt, Human
auccugggccagucuuuc

SEQ ID NO: 493922 - RNA, 22 nt, Human
cuucaggaaaaucucuaaggau

SEQ ID NO: 493923 - RNA, 22 nt, Human
agucccagugagaugaaccagg

SEQ ID NO: 493924 - RNA, 20 nt, Human
cuuuggcaaugagaacaggg

SEQ ID NO: 493925 - RNA, 22 nt, Human
cccacucuggcucccuucuagu

SEQ ID NO: 493926 - RNA, 22 nt, Human
agcugugggauuugggugugcc

SEQ ID NO: 493927 - RNA, 22 nt, Human
cuuggggcugucacucuggcau

SEQ ID NO: 493928 - RNA, 20 nt, Human
accauaauguuaauuacaaa

SEQ ID NO: 493929 - RNA, 22 nt, Human
cuucuucccagcuucccucacc

SEQ ID NO: 493930 - RNA, 22 nt, Human
caaagguaguauauauauuguu

SEQ ID NO: 493931 - RNA, 22 nt, Human
cucuggcuggcugggccucagu

SEQ ID NO: 493932 - RNA, 22 nt, Human
cagaggcugccagccaugugca

SEQ ID NO: 493933 - RNA, 22 nt, Human
aggcucugugauccacaaugag

SEQ ID NO: 493934 - RNA, 22 nt, Human
gcccuggaaucucuccauggga

SEQ ID NO: 493935 - RNA, 22 nt, Human
accagcagaguugaggaggaca

SEQ ID NO: 493936 - RNA, 22 nt, Human
acagaugaguuagaauaggcag

SEQ ID NO: 493937 - RNA, 22 nt, Human
ucagggcauucaagaggccugg

SEQ ID NO: 493938 - RNA, 22 nt, Human
guggcaggucccauuggagcag

SEQ ID NO: 493939 - RNA, 22 nt, Human
ucuccuuuaagauuuccucagg

SEQ ID NO: 493940 - RNA, 22 nt, Human
caguauuuguuacagcauuagc

SEQ ID NO: 493941 - RNA, 22 nt, Human
cagaaacuauguaagaaaguga

SEQ ID NO: 493942 - RNA, 19 nt, Human
uguugaagauuauuugugg

SEQ ID NO: 493943 - RNA, 20 nt, Human
ucaggcuccgcauuaacuua

SEQ ID NO: 493944 - RNA, 22 nt, Human
ucauaaagauacuaagugaguu

SEQ ID NO: 493945 - RNA, 22 nt, Human
cccacccugggcuacacaucca

SEQ ID NO: 493946 - RNA, 19 nt, Human
ugcuucuggggcuucucca

SEQ ID NO: 493947 - RNA, 22 nt, Human
cagagggcucggcggccgcucc

SEQ ID NO: 493948 - RNA, 22 nt, Human
uggccucugugggagcugagca

SEQ ID NO: 493949 - RNA, 22 nt, Human
ugaaugaugaggggagaauaau

SEQ ID NO: 493950 - RNA, 22 nt, Human
uccuggcuccagcagcucuucc

SEQ ID NO: 493951 - RNA, 22 nt, Human
gcuggccagggcugcucgcgga

SEQ ID NO: 493952 - RNA, 22 nt, Human
cugguacaaaaugcugauauca

SEQ ID NO: 493953 - RNA, 22 nt, Human
ccccaggcagggccuaacagag

SEQ ID NO: 493954 - RNA, 22 nt, Human
aggcagcagggccacuggcuga

SEQ ID NO: 493955 - RNA, 17 nt, Human
ggcaggugcggggccgc

SEQ ID NO: 493956 - RNA, 22 nt, Human
gucugagacugggcacauaccu

SEQ ID NO: 493957 - RNA, 22 nt, Human
augauugaccaucugcugggcu

SEQ ID NO: 493958 - RNA, 22 nt, Human
gaagacaucauggagaggauag

SEQ ID NO: 493959 - RNA, 22 nt, Human
uuuagcuuuaccucauagauuu

SEQ ID NO: 493960 - RNA, 22 nt, Human
ggagaggguagggguccugccc

SEQ ID NO: 493961 - RNA, 22 nt, Human
cagguccuuuaguguccagaac

SEQ ID NO: 493962 - RNA, 18 nt, Human
agggaucaucacugcagc

SEQ ID NO: 493963 - RNA, 22 nt, Human
ugggccuggacaaggccacuag

SEQ ID NO: 493964 - RNA, 21 nt, Human
acacaaaccuccucagccugg

SEQ ID NO: 493965 - RNA, 22 nt, Human
guagccauuggcaaugaagccu

SEQ ID NO: 493966 - RNA, 22 nt, Human
uuugacagacauuuacuacauu

SEQ ID NO: 493967 - RNA, 22 nt, Human
ucuaggagcuuaaaggaggcca

SEQ ID NO: 493968 - RNA, 19 nt, Human
gcuccugggccucacucau

SEQ ID NO: 493969 - RNA, 22 nt, Human
gggaagggagggaccucagucu

SEQ ID NO: 493970 - RNA, 22 nt, Human
gccuggaguggacuuggccccu

SEQ ID NO: 493971 - RNA, 22 nt, Human
gaaggauuugagauuauccuag

SEQ ID NO: 493972 - RNA, 19 nt, Human
gcuguacaguaaggagaca

SEQ ID NO: 493973 - RNA, 22 nt, Human
aaugcaccuaccuugauucugc

SEQ ID NO: 493974 - RNA, 22 nt, Human
cuucauguucugccuguggaag

SEQ ID NO: 493975 - RNA, 22 nt, Human
uucuucugacacugaugcugua

SEQ ID NO: 493976 - RNA, 22 nt, Human
cuugaaucuggcuuugccacuu

SEQ ID NO: 493977 - RNA, 21 nt, Human
uuucugucucugccacuaguu

SEQ ID NO: 493978 - RNA, 22 nt, Human
cugcccucccaguugguccgug

SEQ ID NO: 493979 - RNA, 22 nt, Human
cuuuccaaugcauuuccaaugu

SEQ ID NO: 493980 - RNA, 22 nt, Human
aagagguaaccauagcaaccac

SEQ ID NO: 493981 - RNA, 22 nt, Human
uacaaaaggaagagggaucuua

SEQ ID NO: 493982 - RNA, 22 nt, Human
augaaugagugcuagguuuguc

SEQ ID NO: 493983 - RNA, 22 nt, Human
auguuaaaugguuuauuauuaa

SEQ ID NO: 493984 - RNA, 22 nt, Human
uccuuggcuuucuggagcuucu

SEQ ID NO: 493985 - RNA, 22 nt, Human
gaagcagcaaguauaggacagg

SEQ ID NO: 493986 - RNA, 22 nt, Human
uaaauguguuagucaugguuuu

SEQ ID NO: 493987 - RNA, 22 nt, Human
guauagaaacccagaaagauag

SEQ ID NO: 493988 - RNA, 22 nt, Human
cuggguguagauggaaguuugg

SEQ ID NO: 493989 - RNA, 22 nt, Human
uguccuggaaaaauggagaguu

SEQ ID NO: 493990 - RNA, 22 nt, Human
uucccucuccuacucaggaaag

SEQ ID NO: 493991 - RNA, 22 nt, Human
agccaaggagugcagguggcuu

SEQ ID NO: 493992 - RNA, 19 nt, Human
gcccuccucacugagcucu

SEQ ID NO: 493993 - RNA, 22 nt, Human
ggcgccagcccaggccgucgug

SEQ ID NO: 493994 - RNA, 18 nt, Human
gcugcugguggagggagc

SEQ ID NO: 493995 - RNA, 22 nt, Human
uuuauguaguuacggacuauca

SEQ ID NO: 493996 - RNA, 22 nt, Human
aaggagaaggguaaucaacaca

SEQ ID NO: 493997 - RNA, 22 nt, Human
ccuccugggccuugcucuguga

SEQ ID NO: 493998 - RNA, 22 nt, Human
ugaucccaaucuuuccugcucc

SEQ ID NO: 493999 - RNA, 22 nt, Human
uuucuuguaagauguuuauuaa

SEQ ID NO: 494000 - RNA, 22 nt, Human
guguggcuguuuagugacuuuc

SEQ ID NO: 494001 - RNA, 22 nt, Human
caggacugauguuccuccagcc

SEQ ID NO: 494002 - RNA, 21 nt, Human
gaaaagcaagggaguagaaca

SEQ ID NO: 494003 - RNA, 22 nt, Human
cccaggcugaugggaugggcca

SEQ ID NO: 494004 - RNA, 22 nt, Human
acuccagggcuccaucccuugu

SEQ ID NO: 494005 - RNA, 22 nt, Human
uguggcugccacccugaagccg

SEQ ID NO: 494006 - RNA, 22 nt, Human
ucacugggagaugugggaaggg

SEQ ID NO: 494007 - RNA, 22 nt, Human
ugggcugcuuccucagcugaga

SEQ ID NO: 494008 - RNA, 22 nt, Human
aaauuuaagaagugugugcgug

SEQ ID NO: 494009 - RNA, 22 nt, Human
ccagcccugccucucagggccc

SEQ ID NO: 494010 - RNA, 22 nt, Human
uguuucaggaccuaucuuuuag

SEQ ID NO: 494011 - RNA, 22 nt, Human
cagcuggcaaguggagcagggu

SEQ ID NO: 494012 - RNA, 22 nt, Human
uuucauugcagagucugugugc

SEQ ID NO: 494013 - RNA, 22 nt, Human
aguuuauguagaauuggcaaua

SEQ ID NO: 494014 - RNA, 20 nt, Human
acuguucaagggccuggugg

SEQ ID NO: 494015 - RNA, 22 nt, Human
cugauauucauuauggagcucc

SEQ ID NO: 494016 - RNA, 22 nt, Human
aaaguuuggauccagcaaaaga

SEQ ID NO: 494017 - RNA, 22 nt, Human
aacuuucugaaaagcuugauca

SEQ ID NO: 494018 - RNA, 22 nt, Human
gcacagggcaacaggucuguua

SEQ ID NO: 494019 - RNA, 22 nt, Human
ucagaacaauugggaaccauua

SEQ ID NO: 494020 - RNA, 20 nt, Human
uggagcugugguaaggagca

SEQ ID NO: 494021 - RNA, 22 nt, Human
ccugagcuggaagagcuugugc

SEQ ID NO: 494022 - RNA, 22 nt, Human
uuucagagguaugcugcuuauc

SEQ ID NO: 494023 - RNA, 22 nt, Human
cuggcagcgcagcaugaagucg

SEQ ID NO: 494024 - RNA, 17 nt, Human
gucaacaggauuucuuu

SEQ ID NO: 494025 - RNA, 22 nt, Human
ccucuggggucuagcaauagca

SEQ ID NO: 494026 - RNA, 20 nt, Human
ccuaggcaugcugagucucc

SEQ ID NO: 494027 - RNA, 22 nt, Human
aucagagugggucuggcaugag

SEQ ID NO: 494028 - RNA, 22 nt, Human
gggagggccaggcucacccagg

SEQ ID NO: 494029 - RNA, 22 nt, Human
ucuguugcaaugugcaugguga

SEQ ID NO: 494030 - RNA, 22 nt, Human
uguagauuuuggagucuacaag

SEQ ID NO: 494031 - RNA, 22 nt, Human
gagcacugagcuggaauuggag

SEQ ID NO: 494032 - RNA, 22 nt, Human
ugcauuguuugauaggugaauu

SEQ ID NO: 494033 - RNA, 22 nt, Human
ccaguguucauaauuuuacacu

SEQ ID NO: 494034 - RNA, 22 nt, Human
aaauauguauggaguucaugaa

SEQ ID NO: 494035 - RNA, 22 nt, Human
aaccccgcucaggcugggugag

SEQ ID NO: 494036 - RNA, 22 nt, Human
ucacugcaaucucugccuucca

SEQ ID NO: 494037 - RNA, 22 nt, Human
agauuucacaugcugcucuauu

SEQ ID NO: 494038 - RNA, 22 nt, Human
aggagucacucagggcuucauc

SEQ ID NO: 494039 - RNA, 22 nt, Human
cccucugcucaggugcauaggc

SEQ ID NO: 494040 - RNA, 22 nt, Human
ggaaggcagugaaggggcugau

SEQ ID NO: 494041 - RNA, 22 nt, Human
ugggcagacauugaguuuguuc

SEQ ID NO: 494042 - RNA, 22 nt, Human
gggacugggagauccuccuggc

SEQ ID NO: 494043 - RNA, 22 nt, Human
cuggagccgcauggagcaggga

SEQ ID NO: 494044 - RNA, 22 nt, Human
acauucugaaaaacaguguuuu

SEQ ID NO: 494045 - RNA, 22 nt, Human
gggcacaggaauuugggaugug

SEQ ID NO: 494046 - RNA, 22 nt, Human
ggugggggagacuuggucaaga

SEQ ID NO: 494047 - RNA, 22 nt, Human
cucuucaguaaaugacacuguu

SEQ ID NO: 494048 - RNA, 22 nt, Human
cauuuguuaauuacuauuaucu

SEQ ID NO: 494049 - RNA, 21 nt, Human
ucccagggccaggugccauca

SEQ ID NO: 494050 - RNA, 22 nt, Human
uucucuggauguuucucaguca

SEQ ID NO: 494051 - RNA, 22 nt, Human
gugcccugaucgcuaggcuccc

SEQ ID NO: 494052 - RNA, 22 nt, Human
caaaagauacuugcaucuaacu

SEQ ID NO: 494053 - RNA, 22 nt, Human
auucagcacaucuuuguacagc

SEQ ID NO: 494054 - RNA, 22 nt, Human
uuugcauuacuugacuuuaguu

SEQ ID NO: 494055 - RNA, 20 nt, Human
ugcagcuucaccugugucau

SEQ ID NO: 494056 - RNA, 22 nt, Human
cccaggcacagauuaucccaau

SEQ ID NO: 494057 - RNA, 19 nt, Human
ggccuugcucuguggcagc

SEQ ID NO: 494058 - RNA, 22 nt, Human
ggucuggcaggugaggacucag

SEQ ID NO: 494059 - RNA, 22 nt, Human
gugcccaggcccaaggcaccac

SEQ ID NO: 494060 - RNA, 22 nt, Human
ggcucuucugguugucacauuu

SEQ ID NO: 494061 - RNA, 22 nt, Human
gggaccuggggacuccuuguuc

SEQ ID NO: 494062 - RNA, 22 nt, Human
ucagugcacagagauuuuuguu

SEQ ID NO: 494063 - RNA, 22 nt, Human
ggcagccauacucagaccuggg

SEQ ID NO: 494064 - RNA, 22 nt, Human
aggcacugcuucuaaguaggaa

SEQ ID NO: 494065 - RNA, 22 nt, Human
guccacagagggcugggcaggc

SEQ ID NO: 494066 - RNA, 22 nt, Human
aggcauggauggauccagggcu

SEQ ID NO: 494067 - RNA, 22 nt, Human
agcagaugaaucccagauaaag

SEQ ID NO: 494068 - RNA, 22 nt, Human
agagccugcagcugugaagaaa

SEQ ID NO: 494069 - RNA, 22 nt, Human
aaaggccacuugaaggauuuuu

SEQ ID NO: 494070 - RNA, 22 nt, Human
ccccuccuggccacacugucag

SEQ ID NO: 494071 - RNA, 20 nt, Human
acuuucucgguuucucaccu

SEQ ID NO: 494072 - RNA, 22 nt, Human
uggagaauuaggccaaaucucc

SEQ ID NO: 494073 - RNA, 22 nt, Human
cuuccagguccuucuugagaag

SEQ ID NO: 494074 - RNA, 23 nt, Human
uugcacaguguauacacauauuu

SEQ ID NO: 494075 - RNA, 23 nt, Human
uguuccagauacgccuuuuccuc

SEQ ID NO: 494076 - RNA, 22 nt, Human
cagggccaguucucgcagcagu

SEQ ID NO: 494077 - RNA, 22 nt, Human
agugauggagcuuccucugcua

SEQ ID NO: 494078 - RNA, 22 nt, Human
agaugaaagauuuuuauagaga

SEQ ID NO: 494079 - RNA, 22 nt, Human
agaacuuaggaacaacagcuua

SEQ ID NO: 494080 - RNA, 22 nt, Human
aaaauagauucuaggaugucuu

SEQ ID NO: 494081 - RNA, 22 nt, Human
cugggccugucagggcuuuuug

SEQ ID NO: 494082 - RNA, 19 nt, Human
gugggccaggcagaaggcu

SEQ ID NO: 494083 - RNA, 22 nt, Human
guggcauugacauguaaacagu

SEQ ID NO: 494084 - RNA, 22 nt, Human
cucucuggaagggggagcugau

SEQ ID NO: 494085 - RNA, 22 nt, Human
gaccugagauuuugaggcucau

SEQ ID NO: 494086 - RNA, 22 nt, Human
gacuguggucuguucuccaggu

SEQ ID NO: 494087 - RNA, 22 nt, Human
ucaggcacugcuuucugauaug

SEQ ID NO: 494088 - RNA, 22 nt, Human
cagcucuggcagagcccaaccc

SEQ ID NO: 494089 - RNA, 22 nt, Human
gauggcacacagacauccccgc

SEQ ID NO: 494090 - RNA, 22 nt, Human
caaugauaauggcuguauuuau

SEQ ID NO: 494091 - RNA, 22 nt, Human
guggagccaggggcuguaggua

SEQ ID NO: 494092 - RNA, 22 nt, Human
uggagaauucuauguugagggg

SEQ ID NO: 494093 - RNA, 22 nt, Human
ggaucuucagccagcaggugcc

SEQ ID NO: 494094 - RNA, 22 nt, Human
cugggcacaggggagcagaguc

SEQ ID NO: 494095 - RNA, 22 nt, Human
acagaaugcguagugcauguug

SEQ ID NO: 494096 - RNA, 22 nt, Human
ugggccugaaggagcugcgccc

SEQ ID NO: 494097 - RNA, 22 nt, Human
gcucugugccacaugcaguguu

SEQ ID NO: 494098 - RNA, 22 nt, Human
aaagccuucuucggucugugau

SEQ ID NO: 494099 - RNA, 22 nt, Human
acaagaauuuacauguagugga

SEQ ID NO: 494100 - RNA, 22 nt, Human
agucugugaaaagauaggaagu

SEQ ID NO: 494101 - RNA, 22 nt, Human
cuggcagcccaaccuagagucu

SEQ ID NO: 494102 - RNA, 22 nt, Human
cagggcuucgcuccuggugcac

SEQ ID NO: 494103 - RNA, 22 nt, Human
aacuagucagugauucucagaa

SEQ ID NO: 494104 - RNA, 20 nt, Human
gcugucugacaguucccaga

SEQ ID NO: 494105 - RNA, 22 nt, Human
aagugugggaaguagguggcga

SEQ ID NO: 494106 - RNA, 22 nt, Human
aggucucaagagaaaaguggug

SEQ ID NO: 494107 - RNA, 22 nt, Human
gagagggccgggggccagcucc

SEQ ID NO: 494108 - RNA, 22 nt, Human
ugagcccaggaguaugaggcug

SEQ ID NO: 494109 - RNA, 22 nt, Human
aauguguuuuaugagagaauau

SEQ ID NO: 494110 - RNA, 22 nt, Human
agaggaaucugucuagacacaa

SEQ ID NO: 494111 - RNA, 22 nt, Human
gaaagugccucaguccucuuau

SEQ ID NO: 494112 - RNA, 22 nt, Human
gggaccuggacaugugugugcu

SEQ ID NO: 494113 - RNA, 22 nt, Human
aggcagguuuacucuuauuugg

SEQ ID NO: 494114 - RNA, 22 nt, Human
uaggaaaugcugucuuauugua

SEQ ID NO: 494115 - RNA, 22 nt, Human
auuuaauuuacauuugacagag

SEQ ID NO: 494116 - RNA, 20 nt, Human
gcuuccaccugaagcgcacc

SEQ ID NO: 494117 - RNA, 21 nt, Human
ugacugaggcuucuucacaca

SEQ ID NO: 494118 - RNA, 22 nt, Human
auggacaggaacucccuuggca

SEQ ID NO: 494119 - RNA, 22 nt, Human
ucacauucucagcaucuauaca

SEQ ID NO: 494120 - RNA, 22 nt, Human
gggaaggcaggauucucuggug

SEQ ID NO: 494121 - RNA, 22 nt, Human
cugccuggccugaucuccacgc

SEQ ID NO: 494122 - RNA, 22 nt, Human
ucaggguugcugugaucagucc

SEQ ID NO: 494123 - RNA, 22 nt, Human
cucuuuguggaacggcaguguc

SEQ ID NO: 494124 - RNA, 22 nt, Human
cauugaaaaacguugacugagu

SEQ ID NO: 494125 - RNA, 22 nt, Human
gaggcaccagacauggccucau

SEQ ID NO: 494126 - RNA, 23 nt, Human
aggucuggacccuuggccccugc

SEQ ID NO: 494127 - RNA, 22 nt, Human
uauuaggguaaauuugacaugc

SEQ ID NO: 494128 - RNA, 22 nt, Human
cucagcugcagccuggcuggca

SEQ ID NO: 494129 - RNA, 22 nt, Human
cagcagcacucugcgggucccc

SEQ ID NO: 494130 - RNA, 22 nt, Human
cuucuuugaaaaaggcagucag

SEQ ID NO: 494131 - RNA, 22 nt, Human
ggacacagauaaucacacagau

SEQ ID NO: 494132 - RNA, 22 nt, Human
cccccaaaguuugcacggauaa

SEQ ID NO: 494133 - RNA, 22 nt, Human
ccagguccuguuuucaccacag

SEQ ID NO: 494134 - RNA, 22 nt, Human
gagggcuccacacgggcccagc

SEQ ID NO: 494135 - RNA, 22 nt, Human
uguauacauuuaacuagauaga

SEQ ID NO: 494136 - RNA, 22 nt, Human
ucagggacgugagcucagaguc

SEQ ID NO: 494137 - RNA, 22 nt, Human
gggacagacccaugggccaggu

SEQ ID NO: 494138 - RNA, 22 nt, Human
uuuacaagucuguugaucccaa

SEQ ID NO: 494139 - RNA, 22 nt, Human
ugcauuguugaauauuucauag

SEQ ID NO: 494140 - RNA, 22 nt, Human
ugaguaauaaacugucuugcuc

SEQ ID NO: 494141 - RNA, 22 nt, Human
ugcagccaggaaauauuugcug

SEQ ID NO: 494142 - RNA, 22 nt, Human
aggcucugugacaaucaagcug

SEQ ID NO: 494143 - RNA, 22 nt, Human
gcagaggccaggccaccagcaa

SEQ ID NO: 494144 - RNA, 22 nt, Human
caaugauucugcaacugugugc

SEQ ID NO: 494145 - RNA, 19 nt, Human
uguagcaguuuaaaacaac

SEQ ID NO: 494146 - RNA, 22 nt, Human
uuuauuuauccuucuggauugc

SEQ ID NO: 494147 - RNA, 22 nt, Human
guguccugggcugguagagcug

SEQ ID NO: 494148 - RNA, 22 nt, Human
ugcuagugugugagauguucaa

SEQ ID NO: 494149 - RNA, 19 nt, Human
aagcaauguugugaaucua

SEQ ID NO: 494150 - RNA, 22 nt, Human
uuagccauuuuauacaagugua

SEQ ID NO: 494151 - RNA, 21 nt, Human
ugagaaguaugucuucagcca

SEQ ID NO: 494152 - RNA, 22 nt, Human
ugagucuguauguccagauuua

SEQ ID NO: 494153 - RNA, 22 nt, Human
gcucugugggugaguagaaucu

SEQ ID NO: 494154 - RNA, 23 nt, Human
cuucagcagaaacauaaauucuc

SEQ ID NO: 494155 - RNA, 22 nt, Human
ucccaggaggugcuuccuagga

SEQ ID NO: 494156 - RNA, 22 nt, Human
caguagacacauuaauauggaa

SEQ ID NO: 494157 - RNA, 22 nt, Human
ggugaggggagagugaaagaaa

SEQ ID NO: 494158 - RNA, 22 nt, Human
agcugacugaugaagaggccuu

SEQ ID NO: 494159 - RNA, 22 nt, Human
ggagagcugguagcuggcucca

SEQ ID NO: 494160 - RNA, 22 nt, Human
gcucaguguucaucuguaugca

SEQ ID NO: 494161 - RNA, 22 nt, Human
uaguaaguagcuaauauuuacu

SEQ ID NO: 494162 - RNA, 22 nt, Human
agacaaagacagcaucucaggu

SEQ ID NO: 494163 - RNA, 22 nt, Human
aaagccuuggucaucugguucc

SEQ ID NO: 494164 - RNA, 22 nt, Human
guccucugacucagccuuggga

SEQ ID NO: 494165 - RNA, 22 nt, Human
ggguggaggagaacaggcccca

SEQ ID NO: 494166 - RNA, 22 nt, Human
ugccugucuuggaguccuggcc

SEQ ID NO: 494167 - RNA, 22 nt, Human
ccagagugacgugaagugugaa

SEQ ID NO: 494168 - RNA, 22 nt, Human
auucuuggagcagucaaagaag

SEQ ID NO: 494169 - RNA, 22 nt, Human
ccuggcagaauauuaaagugca

SEQ ID NO: 494170 - RNA, 22 nt, Human
agaggccacuuugccugugaug

SEQ ID NO: 494171 - RNA, 22 nt, Human
ccuggguuaguaucuguuucca

SEQ ID NO: 494172 - RNA, 22 nt, Human
ucaauuaugccauugcaauauu

SEQ ID NO: 494173 - RNA, 22 nt, Human
cacagaauuaagggagaaauau

SEQ ID NO: 494174 - RNA, 22 nt, Human
uucuuuuuggauagcugaugaa

SEQ ID NO: 494175 - RNA, 18 nt, Human
uguagagccagguuugcc

SEQ ID NO: 494176 - RNA, 22 nt, Human
ucuacugugguccuuguaacca

SEQ ID NO: 494177 - RNA, 22 nt, Human
gcucacuggccugaagaggacg

SEQ ID NO: 494178 - RNA, 22 nt, Human
ucaggcucccugcugggcucug

SEQ ID NO: 494179 - RNA, 22 nt, Human
augggaggaucacuugaggcca

SEQ ID NO: 494180 - RNA, 22 nt, Human
gagggcaggggucuugcacggu

SEQ ID NO: 494181 - RNA, 22 nt, Human
cccaggacuaaugagcucuacg

SEQ ID NO: 494182 - RNA, 16 nt, Human
uggaggcaucuggccc

SEQ ID NO: 494183 - RNA, 22 nt, Human
ucucugggagccaggaugacac

SEQ ID NO: 494184 - RNA, 20 nt, Human
cacagagucuugcagcguuc

SEQ ID NO: 494185 - RNA, 22 nt, Human
gcucagaggcacgaccucuugg

SEQ ID NO: 494186 - RNA, 22 nt, Human
uuccuggggggauagauuucac

SEQ ID NO: 494187 - RNA, 22 nt, Human
ggcagauggaagaggcuggguc

SEQ ID NO: 494188 - RNA, 22 nt, Human
gggaaacuuucacaauguccag

SEQ ID NO: 494189 - RNA, 22 nt, Human
cuggcccagagcucuggccuuu

SEQ ID NO: 494190 - RNA, 22 nt, Human
cugaggccucuguucaccagaa

SEQ ID NO: 494191 - RNA, 22 nt, Human
uucacaauaggagcaugcaaau

SEQ ID NO: 494192 - RNA, 22 nt, Human
gugcucuguguauuaggauguc

SEQ ID NO: 494193 - RNA, 22 nt, Human
ccugggcauucuuugaguucuc

SEQ ID NO: 494194 - RNA, 19 nt, Human
acagaagcauagaaaagga

SEQ ID NO: 494195 - RNA, 22 nt, Human
aaaguagauuucucauggcgaa

SEQ ID NO: 494196 - RNA, 22 nt, Human
gguugguaacucccugugcagu

SEQ ID NO: 494197 - RNA, 22 nt, Human
cagaccccgaguuugcagaguu

SEQ ID NO: 494198 - RNA, 22 nt, Human
gugugcauguggaagcauguau

SEQ ID NO: 494199 - RNA, 22 nt, Human
ggcaggcuccagagcccucucc

SEQ ID NO: 494200 - RNA, 22 nt, Human
aggagaggguggcauuaaguuu

SEQ ID NO: 494201 - RNA, 22 nt, Human
uguaggauuuucaccagaccuu

SEQ ID NO: 494202 - RNA, 22 nt, Human
uuuaauguagcgugaaaugauu

SEQ ID NO: 494203 - RNA, 22 nt, Human
caagaugaaacuacagggagga

SEQ ID NO: 494204 - RNA, 22 nt, Human
ccuggcucugguucccucagcu

SEQ ID NO: 494205 - RNA, 22 nt, Human
gcaaacauaauaugaagacacu

SEQ ID NO: 494206 - RNA, 22 nt, Human
aaacucuuuccacgauuacuuu

SEQ ID NO: 494207 - RNA, 22 nt, Human
cagagcuucugacagcugcugc

SEQ ID NO: 494208 - RNA, 22 nt, Human
ccaggaucuggguccaugggac

SEQ ID NO: 494209 - RNA, 22 nt, Human
aggacaugaagaaagggcaagg

SEQ ID NO: 494210 - RNA, 22 nt, Human
ggcucuggggggaagucuguug

SEQ ID NO: 494211 - RNA, 22 nt, Human
gaugagaaggcucagauccaaa

SEQ ID NO: 494212 - RNA, 22 nt, Human
ugauuucauaguauauacauga

SEQ ID NO: 494213 - RNA, 21 nt, Human
aguucauacugaguaacaaaa

SEQ ID NO: 494214 - RNA, 23 nt, Human
uguggcugagaaauugacaacuu

SEQ ID NO: 494215 - RNA, 22 nt, Human
ucagugcacaaugacgguggcu

SEQ ID NO: 494216 - RNA, 23 nt, Human
ucagagagcuguugagagcugcc

SEQ ID NO: 494217 - RNA, 19 nt, Human
cucucacucgccacauccu

SEQ ID NO: 494218 - RNA, 22 nt, Human
uggcacagacagcacagcaaug

SEQ ID NO: 494219 - RNA, 22 nt, Human
ucaaaucaccaaacucacuggc

SEQ ID NO: 494220 - RNA, 22 nt, Human
auucuacacaaagcaagaagac

SEQ ID NO: 494221 - RNA, 21 nt, Human
acauacauaccuuaccaccuu

SEQ ID NO: 494222 - RNA, 20 nt, Human
gagauuuccaaucaugccca

SEQ ID NO: 494223 - RNA, 22 nt, Human
ccagggucuuggagaggagugc

SEQ ID NO: 494224 - RNA, 17 nt, Human
uuccccugaccaagccu

SEQ ID NO: 494225 - RNA, 18 nt, Human
cuacauucauaggaaagg

SEQ ID NO: 494226 - RNA, 22 nt, Human
ugugugccagauacaagcacug

SEQ ID NO: 494227 - RNA, 22 nt, Human
augggaggguggaaaggcucug

SEQ ID NO: 494228 - RNA, 22 nt, Human
uuuugccugagauccgagucug

SEQ ID NO: 494229 - RNA, 17 nt, Human
cucugggcagccugggg

SEQ ID NO: 494230 - RNA, 17 nt, Human
uguuaauuccaaugaua

SEQ ID NO: 494231 - RNA, 22 nt, Human
ucaguuuugaaaacauugaaug

SEQ ID NO: 494232 - RNA, 22 nt, Human
aguuuucucacaucaaaaauga

SEQ ID NO: 494233 - RNA, 22 nt, Human
acagaauuaaaguguuugugga

SEQ ID NO: 494234 - RNA, 19 nt, Human
acagugcaugggaccuggu

SEQ ID NO: 494235 - RNA, 23 nt, Human
uucuuuguggauaaucuccagug

SEQ ID NO: 494236 - RNA, 20 nt, Human
ugcagaagaacguucugguu

SEQ ID NO: 494237 - RNA, 20 nt, Human
caugccugcugguaucuggc

SEQ ID NO: 494238 - RNA, 22 nt, Human
ccacugucagaggggcugugcc

SEQ ID NO: 494239 - RNA, 22 nt, Human
guguaugagccuccagcugggc

SEQ ID NO: 494240 - RNA, 22 nt, Human
uauucacauguacauaugcuca

SEQ ID NO: 494241 - RNA, 21 nt, Human
uaaggccaagucuauuucugu

SEQ ID NO: 494242 - RNA, 22 nt, Human
aagauguuuagguaaaaaguuu

SEQ ID NO: 494243 - RNA, 22 nt, Human
uccuuuuugguccaaggugacc

SEQ ID NO: 494244 - RNA, 22 nt, Human
ucugcauauuguuaauggaaug

SEQ ID NO: 494245 - RNA, 22 nt, Human
ggauacagcggcuucugcgcga

SEQ ID NO: 494246 - RNA, 22 nt, Human
uucaggaucauuuguuuuaucu

SEQ ID NO: 494247 - RNA, 22 nt, Human
cccuggaggaaaaucugaggcu

SEQ ID NO: 494248 - RNA, 22 nt, Human
gcugagguaggagguugcagug

SEQ ID NO: 494249 - RNA, 22 nt, Human
aagcuuuaugaucucucagcua

SEQ ID NO: 494250 - RNA, 22 nt, Human
cugacucagcagcugaugaucc

SEQ ID NO: 494251 - RNA, 22 nt, Human
gcugggagcaaguacucaucuu

SEQ ID NO: 494252 - RNA, 22 nt, Human
auucagucaaaccacuggucau

SEQ ID NO: 494253 - RNA, 22 nt, Human
aacuuucaggcaaugaauauuu

SEQ ID NO: 494254 - RNA, 22 nt, Human
gaggcaggcagauugcuugagg

SEQ ID NO: 494255 - RNA, 18 nt, Human
cuguucuagaacuccugu

SEQ ID NO: 494256 - RNA, 21 nt, Human
uggcccuggccacggcugcca

SEQ ID NO: 494257 - RNA, 22 nt, Human
gggcuuuaugagauugagaucu

SEQ ID NO: 494258 - RNA, 22 nt, Human
uagggcagagcuuguacacgau

SEQ ID NO: 494259 - RNA, 22 nt, Human
guccagcugaucuugacccagc

SEQ ID NO: 494260 - RNA, 22 nt, Human
ugggcuccguugccuggggcag

SEQ ID NO: 494261 - RNA, 22 nt, Human
cacaguguaguuaaugugacau

SEQ ID NO: 494262 - RNA, 22 nt, Human
aggugcagcugacaccaugugg

SEQ ID NO: 494263 - RNA, 22 nt, Human
gcagaacauuucacaguaucuu

SEQ ID NO: 494264 - RNA, 22 nt, Human
gagcaacaguuuaugguuuuuc

SEQ ID NO: 494265 - RNA, 22 nt, Human
uguggcugugccgucacacgug

SEQ ID NO: 494266 - RNA, 22 nt, Human
agaaaucuuggagucuguggua

SEQ ID NO: 494267 - RNA, 22 nt, Human
uggcucagcgguggcagcagac

SEQ ID NO: 494268 - RNA, 22 nt, Human
ccugcccagcuucaccucaggc

SEQ ID NO: 494269 - RNA, 22 nt, Human
auguacaaucuaucacaagaag

SEQ ID NO: 494270 - RNA, 22 nt, Human
uaucuacuccucuuucagaugc

SEQ ID NO: 494271 - RNA, 23 nt, Human
ugggcuucugagaaagcaccuaa

SEQ ID NO: 494272 - RNA, 22 nt, Human
uauaucuuauaugugcagguac

SEQ ID NO: 494273 - RNA, 22 nt, Human
gugggcuggacccuccugcucc

SEQ ID NO: 494274 - RNA, 22 nt, Human
aaggcacuuaacgugggaggau

SEQ ID NO: 494275 - RNA, 22 nt, Human
aggacugggugcagagggcauc

SEQ ID NO: 494276 - RNA, 22 nt, Human
aaaguuugagugauuugacaca

SEQ ID NO: 494277 - RNA, 20 nt, Human
cagcaggaaaagugccucag

SEQ ID NO: 494278 - RNA, 22 nt, Human
guguccugggcauuaggcuuag

SEQ ID NO: 494279 - RNA, 22 nt, Human
ucauaauacaaagaguucugca

SEQ ID NO: 494280 - RNA, 22 nt, Human
ucaagcggacugagauacucug

SEQ ID NO: 494281 - RNA, 22 nt, Human
uguaguaagugcgcaauaaaua

SEQ ID NO: 494282 - RNA, 22 nt, Human
cugggcuccuaaccauccaggu

SEQ ID NO: 494283 - RNA, 15 nt, Human
cuguggcuaaccuaa

SEQ ID NO: 494284 - RNA, 22 nt, Human
uuuuggucagguuggucucgaa

SEQ ID NO: 494285 - RNA, 22 nt, Human
uuucagaucauuuuuuaaguac

SEQ ID NO: 494286 - RNA, 22 nt, Human
ucagccagguaauguggagaug

SEQ ID NO: 494287 - RNA, 22 nt, Human
uuucauguuuauggaaaaugag

SEQ ID NO: 494288 - RNA, 22 nt, Human
uugugcauuucucugagugugu

SEQ ID NO: 494289 - RNA, 22 nt, Human
agauuugcggcuuuacuuugca

SEQ ID NO: 494290 - RNA, 22 nt, Human
ucugucacccgagcaggcgaga

SEQ ID NO: 494291 - RNA, 22 nt, Human
uaggcugacuuguuucauaaag

SEQ ID NO: 494292 - RNA, 17 nt, Human
ggccagaggcggggcug

SEQ ID NO: 494293 - RNA, 22 nt, Human
ugagcugucugaauggugagga

SEQ ID NO: 494294 - RNA, 21 nt, Human
cacacagugaucuauccacau

SEQ ID NO: 494295 - RNA, 22 nt, Human
uucauagugauuguucagauag

SEQ ID NO: 494296 - RNA, 22 nt, Human
ucauuguuucugcuuuucauga

SEQ ID NO: 494297 - RNA, 22 nt, Human
gaaaccuuugccgauggggucc

SEQ ID NO: 494298 - RNA, 22 nt, Human
ggcugccucaaagcucaagcuc

SEQ ID NO: 494299 - RNA, 22 nt, Human
ggaggggcagccauggaacucc

SEQ ID NO: 494300 - RNA, 22 nt, Human
caggcugcagugcaguggcuau

SEQ ID NO: 494301 - RNA, 22 nt, Human
ccagcccugccagagagagcug

SEQ ID NO: 494302 - RNA, 22 nt, Human
acugcacuucacccugggugac

SEQ ID NO: 494303 - RNA, 20 nt, Human
ucagugauuaucucugagug

SEQ ID NO: 494304 - RNA, 22 nt, Human
auggaaauguaacuucugauuc

SEQ ID NO: 494305 - RNA, 22 nt, Human
uuucaguguaagguuuccagga

SEQ ID NO: 494306 - RNA, 22 nt, Human
gccaggcucuugguuauguuuu

SEQ ID NO: 494307 - RNA, 22 nt, Human
gaaucauuuauuuuugacagca

SEQ ID NO: 494308 - RNA, 22 nt, Human
acauguuagaaaugcagaaucu

SEQ ID NO: 494309 - RNA, 17 nt, Human
ucagagggaugagcagg

SEQ ID NO: 494310 - RNA, 22 nt, Human
auacuaagcucauuacauuuug

SEQ ID NO: 494311 - RNA, 22 nt, Human
ucccuggaacagagagacaacg

SEQ ID NO: 494312 - RNA, 22 nt, Human
gcaagaccuaucuaguugcugu

SEQ ID NO: 494313 - RNA, 22 nt, Human
cagcugcccugccuugcccuua

SEQ ID NO: 494314 - RNA, 22 nt, Human
ggacuggguaggagcccagggc

SEQ ID NO: 494315 - RNA, 22 nt, Human
uggcuucaagucuagguucuac

SEQ ID NO: 494316 - RNA, 22 nt, Human
acaguguuucacuuaaccguuu

SEQ ID NO: 494317 - RNA, 22 nt, Human
agugccaaacaguacauaacau

SEQ ID NO: 494318 - RNA, 22 nt, Human
ucuuggagaauggcagagaagc

SEQ ID NO: 494319 - RNA, 22 nt, Human
guggccuggauagacuccaucu

SEQ ID NO: 494320 - RNA, 22 nt, Human
ucccagccuggacccugccagu

SEQ ID NO: 494321 - RNA, 21 nt, Human
uagggggcagugggaugcuua

SEQ ID NO: 494322 - RNA, 23 nt, Human
acaaaguaauuccugcuuccaaa

SEQ ID NO: 494323 - RNA, 19 nt, Human
uccucagugacaaccucag

SEQ ID NO: 494324 - RNA, 22 nt, Human
gagggcucugaaaggaggucac

SEQ ID NO: 494325 - RNA, 22 nt, Human
cagaagcaaaugccuugcugag

SEQ ID NO: 494326 - RNA, 22 nt, Human
cccuggugguacggcacuggca

SEQ ID NO: 494327 - RNA, 22 nt, Human
cauugcacuccacccuaggcaa

SEQ ID NO: 494328 - RNA, 22 nt, Human
ugucucugcugcaccuucuggg

SEQ ID NO: 494329 - RNA, 22 nt, Human
cauggccugccuccuccuggug

SEQ ID NO: 494330 - RNA, 22 nt, Human
uguucaaaugaucuucuuaaau

SEQ ID NO: 494331 - RNA, 22 nt, Human
agugagaguauuaaugugaacu

SEQ ID NO: 494332 - RNA, 22 nt, Human
ucugggagagcugcugucagag

SEQ ID NO: 494333 - RNA, 22 nt, Human
aggcccaguagugcugccuuua

SEQ ID NO: 494334 - RNA, 22 nt, Human
accuggcuuguuucuaccuccu

SEQ ID NO: 494335 - RNA, 22 nt, Human
uauauaauuuucugccauaucc

SEQ ID NO: 494336 - RNA, 22 nt, Human
agguccuggucuugagucuuaa

SEQ ID NO: 494337 - RNA, 22 nt, Human
aaggagaaaugguagaugugca

SEQ ID NO: 494338 - RNA, 23 nt, Human
ccuggguuucagagcugcuuuuc

SEQ ID NO: 494339 - RNA, 22 nt, Human
cugggauccacgggcucccaag

SEQ ID NO: 494340 - RNA, 22 nt, Human
gcugcaggaugaggcucugcuc

SEQ ID NO: 494341 - RNA, 22 nt, Human
cugagcagaagggugcacgugc

SEQ ID NO: 494342 - RNA, 22 nt, Human
cagccugcccuggaagcccagc

SEQ ID NO: 494343 - RNA, 22 nt, Human
gcaguguuuacauauuagaaac

SEQ ID NO: 494344 - RNA, 22 nt, Human
aaguuagagauuccaucaugcu

SEQ ID NO: 494345 - RNA, 18 nt, Human
accuggcugugugagcug

SEQ ID NO: 494346 - RNA, 22 nt, Human
uggcagguuaugcgggccacau

SEQ ID NO: 494347 - RNA, 22 nt, Human
agugggugggugucugacaguu

SEQ ID NO: 494348 - RNA, 22 nt, Human
ucagccaguauuugagugcuca

SEQ ID NO: 494349 - RNA, 22 nt, Human
ggguacuuaauauuuacggggu

SEQ ID NO: 494350 - RNA, 18 nt, Human
ucuaggagaguaccuacc

SEQ ID NO: 494351 - RNA, 22 nt, Human
cuuagccagcuaacuuaagcac

SEQ ID NO: 494352 - RNA, 22 nt, Human
cagcucugccucuggggcugag

SEQ ID NO: 494353 - RNA, 22 nt, Human
ucuccgaucacagguuuucaau

SEQ ID NO: 494354 - RNA, 22 nt, Human
accuggcaugaagcaugccuua

SEQ ID NO: 494355 - RNA, 22 nt, Human
uccaguggaacagauguugccu

SEQ ID NO: 494356 - RNA, 22 nt, Human
ugcaggcuccacguuguugucc

SEQ ID NO: 494357 - RNA, 22 nt, Human
ugugucagagguagagauggca

SEQ ID NO: 494358 - RNA, 22 nt, Human
uugaaggacaucuuguuucuag

SEQ ID NO: 494359 - RNA, 17 nt, Human
ugaggccugcaucagug

SEQ ID NO: 494360 - RNA, 22 nt, Human
cccauucuucaugguuuccugu

SEQ ID NO: 494361 - RNA, 22 nt, Human
cagcugggugaucuugggcagg

SEQ ID NO: 494362 - RNA, 22 nt, Human
aguggcagagucaggguuugga

SEQ ID NO: 494363 - RNA, 22 nt, Human
auuaauuuuaccuuuguaaaca

SEQ ID NO: 494364 - RNA, 22 nt, Human
augcuccuuggcuucaaagcca

SEQ ID NO: 494365 - RNA, 22 nt, Human
aagcugccagauucagucugcu

SEQ ID NO: 494366 - RNA, 22 nt, Human
gagggcuccucacauucucuau

SEQ ID NO: 494367 - RNA, 22 nt, Human
aagccaggcugcacuugcuggg

SEQ ID NO: 494368 - RNA, 21 nt, Human
ggcuggacaucccaggagacu

SEQ ID NO: 494369 - RNA, 22 nt, Human
ccagagaguaggaggcauuauu

SEQ ID NO: 494370 - RNA, 22 nt, Human
aauuagggaaaauuuacuugua

SEQ ID NO: 494371 - RNA, 22 nt, Human
ugcauuaagaauuucugaggau

SEQ ID NO: 494372 - RNA, 22 nt, Human
ggagcugcacgcucugaagccu

SEQ ID NO: 494373 - RNA, 22 nt, Human
guuuauuauucaacuucauguu

SEQ ID NO: 494374 - RNA, 22 nt, Human
uugacaagaaucguugccuugg

SEQ ID NO: 494375 - RNA, 22 nt, Human
acuguacacgugucauuuacag

SEQ ID NO: 494376 - RNA, 22 nt, Human
augcaaauuaacauauaguaga

SEQ ID NO: 494377 - RNA, 20 nt, Human
uuccuguauacaaagaguuc

SEQ ID NO: 494378 - RNA, 22 nt, Human
ucccagaggacuguuggugcua

SEQ ID NO: 494379 - RNA, 22 nt, Human
gggucuccauguuaacaucacu

SEQ ID NO: 494380 - RNA, 22 nt, Human
ccaggcugcuguugguguccgc

SEQ ID NO: 494381 - RNA, 22 nt, Human
uccagugguaguaaagaggucu

SEQ ID NO: 494382 - RNA, 22 nt, Human
cugagcaccuguuauagguuag

SEQ ID NO: 494383 - RNA, 22 nt, Human
aguaugaauugcuuugccugua

SEQ ID NO: 494384 - RNA, 22 nt, Human
guacagucuucuuaaugcuuuu

SEQ ID NO: 494385 - RNA, 22 nt, Human
agaaggcuggcccuggguggcc

SEQ ID NO: 494386 - RNA, 22 nt, Human
ccucugaguccucccugguugc

SEQ ID NO: 494387 - RNA, 22 nt, Human
ggcauagcggcucagcguccag

SEQ ID NO: 494388 - RNA, 22 nt, Human
cccugaggcacaggccacguau

SEQ ID NO: 494389 - RNA, 21 nt, Human
guguggauaugugacaggugg

SEQ ID NO: 494390 - RNA, 17 nt, Human
gcuggcugacccaugcc

SEQ ID NO: 494391 - RNA, 22 nt, Human
ucacugucugaaagaaauggcc

SEQ ID NO: 494392 - RNA, 22 nt, Human
uaggguccugccuacagagaca

SEQ ID NO: 494393 - RNA, 22 nt, Human
ucagggaccccucugaguggag

SEQ ID NO: 494394 - RNA, 22 nt, Human
aacaguaagagauguuuuaucu

SEQ ID NO: 494395 - RNA, 22 nt, Human
ugugcacauucuaggacuagua

SEQ ID NO: 494396 - RNA, 22 nt, Human
agcagccagagaaugaugcagu

SEQ ID NO: 494397 - RNA, 22 nt, Human
cuguacaaguccuucaucaggg

SEQ ID NO: 494398 - RNA, 22 nt, Human
cugcagccuccugggguacaug

SEQ ID NO: 494399 - RNA, 22 nt, Human
ccaaggagcugcaggcacuugu

SEQ ID NO: 494400 - RNA, 22 nt, Human
uaggagagcugaacuauugucu

SEQ ID NO: 494401 - RNA, 20 nt, Human
acagaaagagagaaugucag

SEQ ID NO: 494402 - RNA, 23 nt, Human
cagaaagcccuuuccccacagua

SEQ ID NO: 494403 - RNA, 19 nt, Human
agacaugagacacaggaug

SEQ ID NO: 494404 - RNA, 22 nt, Human
aggagccaagauggggcaagua

SEQ ID NO: 494405 - RNA, 22 nt, Human
uacccaggggcugagcagaggu

SEQ ID NO: 494406 - RNA, 22 nt, Human
uggcccgaccucugcucaugca

SEQ ID NO: 494407 - RNA, 22 nt, Human
ucagagaguuacacaaauuguu

SEQ ID NO: 494408 - RNA, 22 nt, Human
acacuuuacagcuuccuuugca

SEQ ID NO: 494409 - RNA, 22 nt, Human
cagugcagguuuagggcugggg

SEQ ID NO: 494410 - RNA, 22 nt, Human
uuucuuuguuguuaucacauca

SEQ ID NO: 494411 - RNA, 22 nt, Human
agagccccucgguggagggguc

SEQ ID NO: 494412 - RNA, 19 nt, Human
aggagaaguagcagaaauu

SEQ ID NO: 494413 - RNA, 22 nt, Human
guuucuguaagacugaauugac

SEQ ID NO: 494414 - RNA, 22 nt, Human
uugagaagaauguguugaguuu

SEQ ID NO: 494415 - RNA, 22 nt, Human
gaaggccugugguagugagacg

SEQ ID NO: 494416 - RNA, 22 nt, Human
uggacuccagugucuguguucu

SEQ ID NO: 494417 - RNA, 22 nt, Human
ggcagggaagcuggcaucacgg

SEQ ID NO: 494418 - RNA, 22 nt, Human
caguacuuuucuggcuuucuac

SEQ ID NO: 494419 - RNA, 23 nt, Human
ugcaggggaggcuuaaagcaggu

SEQ ID NO: 494420 - RNA, 22 nt, Human
uuccaggaggcauucuuaguuu

SEQ ID NO: 494421 - RNA, 22 nt, Human
ugugaagguaagguuugcuuga

SEQ ID NO: 494422 - RNA, 22 nt, Human
aguggcugauguaggcaguggg

SEQ ID NO: 494423 - RNA, 22 nt, Human
ugcucuguaacaaauugacaug

SEQ ID NO: 494424 - RNA, 22 nt, Human
caacagaagguguacuacugaa

SEQ ID NO: 494425 - RNA, 22 nt, Human
ggggcccagcaccccuccucgc

SEQ ID NO: 494426 - RNA, 22 nt, Human
ucuuuauuuuaugcuugugcaa

SEQ ID NO: 494427 - RNA, 22 nt, Human
aaugaugggaaggagaaaagca

SEQ ID NO: 494428 - RNA, 22 nt, Human
caggccucaugguguguccuuc

SEQ ID NO: 494429 - RNA, 22 nt, Human
aaaaaucacuuuuauaggcagc

SEQ ID NO: 494430 - RNA, 21 nt, Human
uggaaagauucaaagaccagg

SEQ ID NO: 494431 - RNA, 22 nt, Human
uaacucugcuuguucucugagu

SEQ ID NO: 494432 - RNA, 22 nt, Human
ucaguguucagggaccaggucc

SEQ ID NO: 494433 - RNA, 22 nt, Human
agaguuggccaaaaggggcauu

SEQ ID NO: 494434 - RNA, 22 nt, Human
cucaggcaaggcccgcauucuc

SEQ ID NO: 494435 - RNA, 22 nt, Human
uaggacaggaucaugaugcugg

SEQ ID NO: 494436 - RNA, 22 nt, Human
ucaauucugguccucaggaacu

SEQ ID NO: 494437 - RNA, 22 nt, Human
cagcaggcccaggugcugguga

SEQ ID NO: 494438 - RNA, 22 nt, Human
ugaagcaggaaccagcagcauu

SEQ ID NO: 494439 - RNA, 22 nt, Human
agcagccaggaaucugcagagc

SEQ ID NO: 494440 - RNA, 17 nt, Human
ucgguuugccaggcuuc

SEQ ID NO: 494441 - RNA, 22 nt, Human
uggcggggcagcucuggcuucu

SEQ ID NO: 494442 - RNA, 22 nt, Human
ccugucugagccagggugggca

SEQ ID NO: 494443 - RNA, 22 nt, Human
acuguccauucacucauauuca

SEQ ID NO: 494444 - RNA, 22 nt, Human
gccuucugaucgcuggacugac

SEQ ID NO: 494445 - RNA, 22 nt, Human
acacaugugauucuaagacagc

SEQ ID NO: 494446 - RNA, 22 nt, Human
ugggagagucuaaaaccgaggu

SEQ ID NO: 494447 - RNA, 22 nt, Human
auaugaagaauuccaauuugga

SEQ ID NO: 494448 - RNA, 22 nt, Human
cagcaucaccgccauuucugau

SEQ ID NO: 494449 - RNA, 22 nt, Human
ugggcugaaaugcuguggacua

SEQ ID NO: 494450 - RNA, 22 nt, Human
cagcugcuguucaguuuuguuu

SEQ ID NO: 494451 - RNA, 22 nt, Human
uucucucaguuaaacuuuguga

SEQ ID NO: 494452 - RNA, 22 nt, Human
ggacuggccggcgcugaggccc

SEQ ID NO: 494453 - RNA, 22 nt, Human
cugcagagcuaggcugagugaa

SEQ ID NO: 494454 - RNA, 16 nt, Human
ugguggggaggacagc

SEQ ID NO: 494455 - RNA, 22 nt, Human
ccagugcacagccaggcaggug

SEQ ID NO: 494456 - RNA, 22 nt, Human
aaauaugagggugaugcccaga

SEQ ID NO: 494457 - RNA, 22 nt, Human
ucuggccccuggucucuggugu

SEQ ID NO: 494458 - RNA, 22 nt, Human
caaauaucuuuggcaaagagaa

SEQ ID NO: 494459 - RNA, 23 nt, Human
agcauaaaccucuguggcuuuag

SEQ ID NO: 494460 - RNA, 22 nt, Human
gcuggcugggucccugagaggc

SEQ ID NO: 494461 - RNA, 22 nt, Human
uuucaucucucuaaaagacagu

SEQ ID NO: 494462 - RNA, 22 nt, Human
ugggucuguagggcuguccaau

SEQ ID NO: 494463 - RNA, 23 nt, Human
aucaaacuggugagaaugucagu

SEQ ID NO: 494464 - RNA, 22 nt, Human
aaucuucauaaaaaucuaguag

SEQ ID NO: 494465 - RNA, 22 nt, Human
agggccugcucuaucacucuca

SEQ ID NO: 494466 - RNA, 19 nt, Human
ucaugcaguggggggugug

SEQ ID NO: 494467 - RNA, 22 nt, Human
cauuugaaauucuuagaacaaa

SEQ ID NO: 494468 - RNA, 22 nt, Human
cagcccuuguuucuaaagcugc

SEQ ID NO: 494469 - RNA, 21 nt, Human
ugaaaucugaugggacaaaug

SEQ ID NO: 494470 - RNA, 22 nt, Human
aagauguuaggguggaagggau

SEQ ID NO: 494471 - RNA, 22 nt, Human
uggcucucagcucccagcagcc

SEQ ID NO: 494472 - RNA, 22 nt, Human
caaauacuacgauucuugcagu

SEQ ID NO: 494473 - RNA, 22 nt, Human
uuucuuuugaauaguguguggu

SEQ ID NO: 494474 - RNA, 22 nt, Human
ugaggauggcagugugcucagc

SEQ ID NO: 494475 - RNA, 22 nt, Human
gaaacagcuuuaagugauacug

SEQ ID NO: 494476 - RNA, 22 nt, Human
caauacugaguuuacauucauc

SEQ ID NO: 494477 - RNA, 22 nt, Human
ugaggcagggagaguggauaug

SEQ ID NO: 494478 - RNA, 22 nt, Human
ucucagugcagagaggcuaucu

SEQ ID NO: 494479 - RNA, 22 nt, Human
ucaggcccagagucacggaucc

SEQ ID NO: 494480 - RNA, 22 nt, Human
ggcagguggcacugcugcuccc

SEQ ID NO: 494481 - RNA, 22 nt, Human
ugaagacacauacaagggaaug

SEQ ID NO: 494482 - RNA, 22 nt, Human
gcucuguguucccuccaggcuc

SEQ ID NO: 494483 - RNA, 22 nt, Human
cugcagagcagccaguccccca

SEQ ID NO: 494484 - RNA, 22 nt, Human
uggagcagcaucacuuugagcu

SEQ ID NO: 494485 - RNA, 20 nt, Human
uccuugaaagugggguauau

SEQ ID NO: 494486 - RNA, 22 nt, Human
cuggcugcaggaaggagugggc

SEQ ID NO: 494487 - RNA, 22 nt, Human
uuguacaaguauuaugugaaca

SEQ ID NO: 494488 - RNA, 22 nt, Human
ccagcaggcagucauauccuuu

SEQ ID NO: 494489 - RNA, 22 nt, Human
uuuaagagcuaguaugucauuu

SEQ ID NO: 494490 - RNA, 22 nt, Human
uuuccucuuauacaguguuuau

SEQ ID NO: 494491 - RNA, 20 nt, Human
ugcagagcuggcuggcuccu

SEQ ID NO: 494492 - RNA, 22 nt, Human
uauauucaaugauuaguaucag

SEQ ID NO: 494493 - RNA, 22 nt, Human
aggcagguuggggaaaagcacu

SEQ ID NO: 494494 - RNA, 22 nt, Human
agagauggagagcacuggggcu

SEQ ID NO: 494495 - RNA, 22 nt, Human
ugcaggugucucugucuagcgu

SEQ ID NO: 494496 - RNA, 22 nt, Human
acauuucucagggaguuuugcu

SEQ ID NO: 494497 - RNA, 22 nt, Human
gagcugccggcccacaguacua

SEQ ID NO: 494498 - RNA, 22 nt, Human
caagcagagacuagauagcugu

SEQ ID NO: 494499 - RNA, 22 nt, Human
caguucuggaggcuccacaucu

SEQ ID NO: 494500 - RNA, 23 nt, Human
ucucugcauguccugagcacauc

SEQ ID NO: 494501 - RNA, 22 nt, Human
cagggcaguuuuacuucucucu

SEQ ID NO: 494502 - RNA, 22 nt, Human
uucaggaaucaaccaagucauu

SEQ ID NO: 494503 - RNA, 22 nt, Human
uccuucaggccucauucucaua

SEQ ID NO: 494504 - RNA, 22 nt, Human
caggcugacaacugagcauuuu

SEQ ID NO: 494505 - RNA, 22 nt, Human
gcuccuggcuucacugacauca

SEQ ID NO: 494506 - RNA, 22 nt, Human
ucuggcucccagccugcucuca

SEQ ID NO: 494507 - RNA, 22 nt, Human
aaugagaagccuagguguacug

SEQ ID NO: 494508 - RNA, 22 nt, Human
ugccccucuccugugauccaag

SEQ ID NO: 494509 - RNA, 22 nt, Human
ucccugggcacaaucugcuggc

SEQ ID NO: 494510 - RNA, 22 nt, Human
ggaggaggcaaguaccagaugc

SEQ ID NO: 494511 - RNA, 22 nt, Human
aagaauguggguggauaugaug

SEQ ID NO: 494512 - RNA, 22 nt, Human
auuacaagggucugacuggagg

SEQ ID NO: 494513 - RNA, 22 nt, Human
acuguucacccagcacuagcag

SEQ ID NO: 494514 - RNA, 22 nt, Human
ucucauugguauauacaugugu

SEQ ID NO: 494515 - RNA, 22 nt, Human
cugcugggucuaugcaagugga

SEQ ID NO: 494516 - RNA, 22 nt, Human
cuguccuguagcuccaucaguc

SEQ ID NO: 494517 - RNA, 22 nt, Human
cugcaagauuggaagaugcaau

SEQ ID NO: 494518 - RNA, 22 nt, Human
agaaaucaugacuaagagcagu

SEQ ID NO: 494519 - RNA, 22 nt, Human
uuucauuucauagaauuguguu

SEQ ID NO: 494520 - RNA, 21 nt, Human
ucacaugcccauuacuggagc

SEQ ID NO: 494521 - RNA, 22 nt, Human
gaagcagcuagcccacuaguca

SEQ ID NO: 494522 - RNA, 22 nt, Human
aaagucacuuccuucugucagc

SEQ ID NO: 494523 - RNA, 22 nt, Human
ugcuucuggcagauugagugag

SEQ ID NO: 494524 - RNA, 22 nt, Human
cagaagaaaguggggagacaag

SEQ ID NO: 494525 - RNA, 22 nt, Human
agguucaggcugcacaccugag

SEQ ID NO: 494526 - RNA, 22 nt, Human
ugcauacauaaagugcuaucau

SEQ ID NO: 494527 - RNA, 18 nt, Human
gguggccuugacuucucu

SEQ ID NO: 494528 - RNA, 22 nt, Human
uagauacaggcucucugagccu

SEQ ID NO: 494529 - RNA, 22 nt, Human
gcacggcuaauuuuuguauuuu

SEQ ID NO: 494530 - RNA, 22 nt, Human
uugaaaguuaucuagauucuga

SEQ ID NO: 494531 - RNA, 22 nt, Human
caggaggcuccuagggcucugu

SEQ ID NO: 494532 - RNA, 23 nt, Human
gccucagagaaacagcugcacac

SEQ ID NO: 494533 - RNA, 22 nt, Human
uccugggguuuuggccgcagcu

SEQ ID NO: 494534 - RNA, 22 nt, Human
ucccagaguauuagcaauugcu

SEQ ID NO: 494535 - RNA, 22 nt, Human
agcaccuggagggcugggaccu

SEQ ID NO: 494536 - RNA, 22 nt, Human
ugggcugccggcaggcucugcc

SEQ ID NO: 494537 - RNA, 22 nt, Human
uuauuccaguaaucucuguaau

SEQ ID NO: 494538 - RNA, 23 nt, Human
uguaaaaugggguaguguuacca

SEQ ID NO: 494539 - RNA, 22 nt, Human
agggcuggcuccguuaccuuga

SEQ ID NO: 494540 - RNA, 22 nt, Human
uucacaaaacacuauuuucugg

SEQ ID NO: 494541 - RNA, 22 nt, Human
ugugcaaaguguacaaauuaau

SEQ ID NO: 494542 - RNA, 22 nt, Human
uccucugccaaagggaguugcc

SEQ ID NO: 494543 - RNA, 22 nt, Human
ggcaggacucucaggaccaagc

SEQ ID NO: 494544 - RNA, 22 nt, Human
cugcuucuccaaaguaggacuu

SEQ ID NO: 494545 - RNA, 22 nt, Human
aggaguuauggcagaaucaaau

SEQ ID NO: 494546 - RNA, 20 nt, Human
accccagccccucuaucuga

SEQ ID NO: 494547 - RNA, 22 nt, Human
auagacauauggcuuuguuucu

SEQ ID NO: 494548 - RNA, 22 nt, Human
gugaaguuuuaguauauguaga

SEQ ID NO: 494549 - RNA, 22 nt, Human
ucugugcuuucccugccuucuu

SEQ ID NO: 494550 - RNA, 22 nt, Human
gugcccagcuccaccucacaga

SEQ ID NO: 494551 - RNA, 22 nt, Human
aaaaauagcuucucuugucccu

SEQ ID NO: 494552 - RNA, 22 nt, Human
auggggugagacuaggauuaaa

SEQ ID NO: 494553 - RNA, 22 nt, Human
uugcaaaugaccauugccacau

SEQ ID NO: 494554 - RNA, 18 nt, Human
gcucaguguguuaacacu

SEQ ID NO: 494555 - RNA, 22 nt, Human
gcucugcugggugggcaguuau

SEQ ID NO: 494556 - RNA, 22 nt, Human
uggaguuccuuugaaaggcucu

SEQ ID NO: 494557 - RNA, 22 nt, Human
ugguccuggggugcaggcugac

SEQ ID NO: 494558 - RNA, 22 nt, Human
uuggagguuugaaaauaugugu

SEQ ID NO: 494559 - RNA, 22 nt, Human
uggcucagaacuacuucuaguu

SEQ ID NO: 494560 - RNA, 22 nt, Human
acaggggaauuuacugucauua

SEQ ID NO: 494561 - RNA, 22 nt, Human
uguggcucuccuccugcugccc

SEQ ID NO: 494562 - RNA, 22 nt, Human
gugugccagacaugaugcuaug

SEQ ID NO: 494563 - RNA, 22 nt, Human
uggcuuccgccgcgggccucgg

SEQ ID NO: 494564 - RNA, 22 nt, Human
uggcuucugagucuccugacau

SEQ ID NO: 494565 - RNA, 22 nt, Human
uuucacaucagagguagauuag

SEQ ID NO: 494566 - RNA, 22 nt, Human
augagacaugacuucaggccuu

SEQ ID NO: 494567 - RNA, 22 nt, Human
uuuccucugggcccugccaccc

SEQ ID NO: 494568 - RNA, 22 nt, Human
acagcuccuaacaaaggcucuc

SEQ ID NO: 494569 - RNA, 22 nt, Human
guaaucucagcuacuugggagg

SEQ ID NO: 494570 - RNA, 22 nt, Human
caggucgccagcaggaacguca

SEQ ID NO: 494571 - RNA, 22 nt, Human
accacccccuuggguguggaag

SEQ ID NO: 494572 - RNA, 22 nt, Human
cauaagaaauaaugaugaugac

SEQ ID NO: 494573 - RNA, 22 nt, Human
ccaggcagagugcuccagaaag

SEQ ID NO: 494574 - RNA, 22 nt, Human
agugaggggcagcugagugggc

SEQ ID NO: 494575 - RNA, 22 nt, Human
caguggccuuuccugcugcuca

SEQ ID NO: 494576 - RNA, 22 nt, Human
cagucccaugagcccagaacau

SEQ ID NO: 494577 - RNA, 22 nt, Human
ucucugaaggggagcuguuuaa

SEQ ID NO: 494578 - RNA, 22 nt, Human
uacagcuuaaaaaagccaacuu

SEQ ID NO: 494579 - RNA, 20 nt, Human
ucugcucagcccucaguggc

SEQ ID NO: 494580 - RNA, 22 nt, Human
aaagcacauaguagaaggauuu

SEQ ID NO: 494581 - RNA, 22 nt, Human
aaucauaauuguauacauucau

SEQ ID NO: 494582 - RNA, 22 nt, Human
gguggcagagacauaggacaua

SEQ ID NO: 494583 - RNA, 22 nt, Human
aacccaggguggagguugcagu

SEQ ID NO: 494584 - RNA, 22 nt, Human
caguccaggccuggaggagcca

SEQ ID NO: 494585 - RNA, 22 nt, Human
ggacaaagcucugcugccuccc

SEQ ID NO: 494586 - RNA, 19 nt, Human
gcagauccaaaagucacau

SEQ ID NO: 494587 - RNA, 22 nt, Human
ugcauaaacuucucugguguga

SEQ ID NO: 494588 - RNA, 22 nt, Human
cugcccuggaaaacguaucuua

SEQ ID NO: 494589 - RNA, 22 nt, Human
agggcugccugcucugcauuga

SEQ ID NO: 494590 - RNA, 22 nt, Human
gggagggaaggaggcgccgugu

SEQ ID NO: 494591 - RNA, 22 nt, Human
ucauacaucuuguauaucuauc

SEQ ID NO: 494592 - RNA, 22 nt, Human
agagcugggugaagugccauca

SEQ ID NO: 494593 - RNA, 22 nt, Human
ugcaucagaguuugcugcugcu

SEQ ID NO: 494594 - RNA, 22 nt, Human
ucucagagggaaaggccaauuu

SEQ ID NO: 494595 - RNA, 22 nt, Human
uaaagugcugggauuauaggcc

SEQ ID NO: 494596 - RNA, 22 nt, Human
gcaggaugggagcuucacucug

SEQ ID NO: 494597 - RNA, 22 nt, Human
gcacagccacugagugagaacc

SEQ ID NO: 494598 - RNA, 22 nt, Human
gcacacaugcaugcacaggagu

SEQ ID NO: 494599 - RNA, 22 nt, Human
acauugaucagccucccaugca

SEQ ID NO: 494600 - RNA, 22 nt, Human
gcucucugguuccagucaggaa

SEQ ID NO: 494601 - RNA, 22 nt, Human
gugugccaggaacuggcugcug

SEQ ID NO: 494602 - RNA, 22 nt, Human
agcucugacauugauucucagc

SEQ ID NO: 494603 - RNA, 20 nt, Human
uucuggaggcuacaagucug

SEQ ID NO: 494604 - RNA, 22 nt, Human
uucuuucccaguagaugugaaa

SEQ ID NO: 494605 - RNA, 22 nt, Human
uacuuuuuaugauaagaacuga

SEQ ID NO: 494606 - RNA, 22 nt, Human
agcagcucagaggcaccagggc

SEQ ID NO: 494607 - RNA, 22 nt, Human
uucuuaaaacuuauggacaggu

SEQ ID NO: 494608 - RNA, 22 nt, Human
cacaguccugccagagggccuu

SEQ ID NO: 494609 - RNA, 22 nt, Human
ugcauuguugaccaguugugca

SEQ ID NO: 494610 - RNA, 22 nt, Human
uugaaugaggaagagcacuggc

SEQ ID NO: 494611 - RNA, 20 nt, Human
aguguacagacacuagaaau

SEQ ID NO: 494612 - RNA, 22 nt, Human
uuuguauaagaacauucuagca

SEQ ID NO: 494613 - RNA, 22 nt, Human
gcucuggcucaaaccaccggcu

SEQ ID NO: 494614 - RNA, 22 nt, Human
ucaaaguccuugcuuuuucugu

SEQ ID NO: 494615 - RNA, 22 nt, Human
cuuauuuguacuaauaaaucug

SEQ ID NO: 494616 - RNA, 22 nt, Human
uggcuuccagagcugcuccacc

SEQ ID NO: 494617 - RNA, 22 nt, Human
gcaaauacauguugagcaccua

SEQ ID NO: 494618 - RNA, 22 nt, Human
cacuguacuggguugaaggacg

SEQ ID NO: 494619 - RNA, 22 nt, Human
ccuaggcccauuaauuccccuu

SEQ ID NO: 494620 - RNA, 23 nt, Human
uaugagaauuaagugcgagugcc

SEQ ID NO: 494621 - RNA, 22 nt, Human
uacagagaugccgaagagugaa

SEQ ID NO: 494622 - RNA, 22 nt, Human
ccucucccacguggcagaggcu

SEQ ID NO: 494623 - RNA, 22 nt, Human
agcuucagguggucuuguuucu

SEQ ID NO: 494624 - RNA, 22 nt, Human
ccagccacugggccacugccag

SEQ ID NO: 494625 - RNA, 22 nt, Human
ucugucuuagcaucuuugcuca

SEQ ID NO: 494626 - RNA, 22 nt, Human
ucugucacuauuggccagaaca

SEQ ID NO: 494627 - RNA, 22 nt, Human
ugcauuucagaagaaaauucgg

SEQ ID NO: 494628 - RNA, 22 nt, Human
uagagguauuuuugauggucau

SEQ ID NO: 494629 - RNA, 22 nt, Human
agaaguuaccacauacuucucu

SEQ ID NO: 494630 - RNA, 22 nt, Human
agagccuguuuugugggagaug

SEQ ID NO: 494631 - RNA, 21 nt, Human
gcagccagacgggauucaguu

SEQ ID NO: 494632 - RNA, 22 nt, Human
agccugccuugggcugcuugag

SEQ ID NO: 494633 - RNA, 22 nt, Human
uucacaauagcuggcaucaucu

SEQ ID NO: 494634 - RNA, 22 nt, Human
uagcagcacagaaagccuggag

SEQ ID NO: 494635 - RNA, 22 nt, Human
cauguguggagggcaugcaugg

SEQ ID NO: 494636 - RNA, 22 nt, Human
aacaaccaaaaagaugaaugua

SEQ ID NO: 494637 - RNA, 22 nt, Human
cccacacacuggcugcugccaa

SEQ ID NO: 494638 - RNA, 22 nt, Human
agauuuccaucuuuuucaugug

SEQ ID NO: 494639 - RNA, 22 nt, Human
gaaugcacacgugugugcaugc

SEQ ID NO: 494640 - RNA, 22 nt, Human
agacugggccauuuccccagcu

SEQ ID NO: 494641 - RNA, 22 nt, Human
aaaaugaggaacggaucauggc

SEQ ID NO: 494642 - RNA, 22 nt, Human
aaucuuuuucacaagaaagcac

SEQ ID NO: 494643 - RNA, 22 nt, Human
uccucuggcucuuucccuagga

SEQ ID NO: 494644 - RNA, 22 nt, Human
acaguguccuuguggucccugu

SEQ ID NO: 494645 - RNA, 22 nt, Human
agaggcuccuucacucuggcac

SEQ ID NO: 494646 - RNA, 22 nt, Human
aggcucuggcaacagcuggugu

SEQ ID NO: 494647 - RNA, 20 nt, Human
uauuuacaacuuagagccuc

SEQ ID NO: 494648 - RNA, 22 nt, Human
ucauuuaauagcuuuugucuuu

SEQ ID NO: 494649 - RNA, 22 nt, Human
cccaggcagggacgugcucugg

SEQ ID NO: 494650 - RNA, 22 nt, Human
gagugggggguccgucucagug

SEQ ID NO: 494651 - RNA, 22 nt, Human
ccuguucaaugcccuggcuuca

SEQ ID NO: 494652 - RNA, 21 nt, Human
uguccuggucacugcucuccc

SEQ ID NO: 494653 - RNA, 22 nt, Human
aggaccuguguuuuccuugaau

SEQ ID NO: 494654 - RNA, 22 nt, Human
aggcuccauaccaucuccggag

SEQ ID NO: 494655 - RNA, 22 nt, Human
acugggccagaucagagcaacu

SEQ ID NO: 494656 - RNA, 22 nt, Human
gcagagccccauugcuggcggg

SEQ ID NO: 494657 - RNA, 22 nt, Human
gccuuccugcagcucugagcgu

SEQ ID NO: 494658 - RNA, 22 nt, Human
gccuguuuggcugcugacauug

SEQ ID NO: 494659 - RNA, 22 nt, Human
cagagcagacguugagauuaag

SEQ ID NO: 494660 - RNA, 22 nt, Human
ucuuuuuauauugacaaaaggu

SEQ ID NO: 494661 - RNA, 22 nt, Human
uauuuguauguguguacauaua

SEQ ID NO: 494662 - RNA, 22 nt, Human
ucagaguggugguuuugccuuc

SEQ ID NO: 494663 - RNA, 22 nt, Human
cagugggugaugaguccugggg

SEQ ID NO: 494664 - RNA, 22 nt, Human
guggcugcucgggcuccggccc

SEQ ID NO: 494665 - RNA, 17 nt, Human
agcugccuugcuugagc

SEQ ID NO: 494666 - RNA, 23 nt, Human
uggcagcagaucuuaaagugacc

SEQ ID NO: 494667 - RNA, 22 nt, Human
aggaagcugggguguucuucau

SEQ ID NO: 494668 - RNA, 22 nt, Human
gagcuucacgggggacagcauu

SEQ ID NO: 494669 - RNA, 22 nt, Human
ugcacagggagggggccagcuc

SEQ ID NO: 494670 - RNA, 22 nt, Human
cugguggagggacaggcuuagc

SEQ ID NO: 494671 - RNA, 22 nt, Human
aagggaaacuuucacaaugucc

SEQ ID NO: 494672 - RNA, 22 nt, Human
aagagcauggaauggagaucca

SEQ ID NO: 494673 - RNA, 22 nt, Human
acauuaacacuggugcuggugu

SEQ ID NO: 494674 - RNA, 22 nt, Human
gugagagcugcuccagaucucu

SEQ ID NO: 494675 - RNA, 22 nt, Human
cagcccuggugagguuggcuau

SEQ ID NO: 494676 - RNA, 22 nt, Human
gcugucuguggugucagcugac

SEQ ID NO: 494677 - RNA, 22 nt, Human
gcagguagugaucgagggugac

SEQ ID NO: 494678 - RNA, 22 nt, Human
agccacagugcaagagagaaaa

SEQ ID NO: 494679 - RNA, 22 nt, Human
ggcugccugcucaggugcggcg

SEQ ID NO: 494680 - RNA, 22 nt, Human
ucagugcagaauagugaugcau

SEQ ID NO: 494681 - RNA, 22 nt, Human
uaaagacauaggaucagggaga

SEQ ID NO: 494682 - RNA, 22 nt, Human
guauuuucaagagcaguaguau

SEQ ID NO: 494683 - RNA, 22 nt, Human
agcaaucagcuucuuuguguuu

SEQ ID NO: 494684 - RNA, 22 nt, Human
gcuguuccugcuuagaggucgg

SEQ ID NO: 494685 - RNA, 18 nt, Human
gccaggcaggguggggaa

SEQ ID NO: 494686 - RNA, 22 nt, Human
ccaggagcgcgugaacaggcug

SEQ ID NO: 494687 - RNA, 22 nt, Human
cuuguuuugaaagcaguggcca

SEQ ID NO: 494688 - RNA, 22 nt, Human
uuagaaaauuugcuucuuugga

SEQ ID NO: 494689 - RNA, 22 nt, Human
ugaagcagcaaaugaugggaga

SEQ ID NO: 494690 - RNA, 22 nt, Human
ggggcuggcucacuaagagacu

SEQ ID NO: 494691 - RNA, 22 nt, Human
cugcagcuguagaggacagugg

SEQ ID NO: 494692 - RNA, 22 nt, Human
acagaagagcacauuuaguaug

SEQ ID NO: 494693 - RNA, 22 nt, Human
gauuuguuucaaguuagcaucu

SEQ ID NO: 494694 - RNA, 22 nt, Human
guccuugcuugagacaggcagu

SEQ ID NO: 494695 - RNA, 20 nt, Human
caaagacaugcuaggggugg

SEQ ID NO: 494696 - RNA, 22 nt, Human
agcuaggaaauugaggcugaga

SEQ ID NO: 494697 - RNA, 22 nt, Human
uucuuguaauuuggagaaauga

SEQ ID NO: 494698 - RNA, 22 nt, Human
gccucucuccuuggcuugcagu

SEQ ID NO: 494699 - RNA, 22 nt, Human
cugugucucuccuuacaagacu

SEQ ID NO: 494700 - RNA, 22 nt, Human
gacacagagggcaccagauaug

SEQ ID NO: 494701 - RNA, 22 nt, Human
gaggcccaggucaagcagccac

SEQ ID NO: 494702 - RNA, 22 nt, Human
ucacaucucccuggaggacaca

SEQ ID NO: 494703 - RNA, 22 nt, Human
agaggccuccgaaaggugggcu

SEQ ID NO: 494704 - RNA, 20 nt, Human
ugggagcuggugaggucuca

SEQ ID NO: 494705 - RNA, 22 nt, Human
uauuuaaaaagaggccagcugg

SEQ ID NO: 494706 - RNA, 22 nt, Human
aaagucaaaaugcucuccuguc

SEQ ID NO: 494707 - RNA, 22 nt, Human
ucaugcccagagcaguaaauua

SEQ ID NO: 494708 - RNA, 22 nt, Human
gcucccugcacucugcagcccu

SEQ ID NO: 494709 - RNA, 22 nt, Human
ccagguggaggugugagguccu

SEQ ID NO: 494710 - RNA, 22 nt, Human
gaaagaggaaggagauguauua

SEQ ID NO: 494711 - RNA, 22 nt, Human
cucugguguccuuuagaauuua

SEQ ID NO: 494712 - RNA, 22 nt, Human
gcucugagccgggggccugucc

SEQ ID NO: 494713 - RNA, 19 nt, Human
uccagacuguccaggcuau

SEQ ID NO: 494714 - RNA, 22 nt, Human
cugggcugcaguuccugguccu

SEQ ID NO: 494715 - RNA, 22 nt, Human
ugauuacaaaagauuguuugaa

SEQ ID NO: 494716 - RNA, 20 nt, Human
cagcuuuagaucuuugauua

SEQ ID NO: 494717 - RNA, 21 nt, Human
gccuggcagguggaagggcuc

SEQ ID NO: 494718 - RNA, 22 nt, Human
uauauaugagcaugugaggaca

SEQ ID NO: 494719 - RNA, 22 nt, Human
ccuggcugagggaccucgggua

SEQ ID NO: 494720 - RNA, 22 nt, Human
gaauuuacaaguugaauaacaa

SEQ ID NO: 494721 - RNA, 22 nt, Human
ccacagaguugaugcaauaaga

SEQ ID NO: 494722 - RNA, 20 nt, Human
agcccuguuuccuggagaga

SEQ ID NO: 494723 - RNA, 22 nt, Human
gaaagugcagucagacaaggca

SEQ ID NO: 494724 - RNA, 22 nt, Human
gauauuuuuaguauuucugccu

SEQ ID NO: 494725 - RNA, 22 nt, Human
gccagcucagaugcaggaagga

SEQ ID NO: 494726 - RNA, 22 nt, Human
agaaggguagggacuuauccaa

SEQ ID NO: 494727 - RNA, 22 nt, Human
aaguuucauguggagguagacu

SEQ ID NO: 494728 - RNA, 22 nt, Human
ucuccuuugaaaguuaggacug

SEQ ID NO: 494729 - RNA, 22 nt, Human
ugaaggaagaauaggcaguguu

SEQ ID NO: 494730 - RNA, 23 nt, Human
uugauacagaagaaucaguuugu

SEQ ID NO: 494731 - RNA, 22 nt, Human
uucuccgcuaaguucucugcag

SEQ ID NO: 494732 - RNA, 22 nt, Human
gcaccaggcuuagagccccagg

SEQ ID NO: 494733 - RNA, 22 nt, Human
ccugcugugaaacuggcauaug

SEQ ID NO: 494734 - RNA, 22 nt, Human
uuugaaagccuggcuuuucucu

SEQ ID NO: 494735 - RNA, 22 nt, Human
ucugucugaggaguuuuugacc

SEQ ID NO: 494736 - RNA, 22 nt, Human
caugggaggucugcaaggugcu

SEQ ID NO: 494737 - RNA, 22 nt, Human
ggcaaaaacagcaaugacuuuu

SEQ ID NO: 494738 - RNA, 22 nt, Human
agaagccauguuuaguaggaug

SEQ ID NO: 494739 - RNA, 22 nt, Human
ugggggagcgacagacauaauu

SEQ ID NO: 494740 - RNA, 19 nt, Human
auuguacauugaguuuggc

SEQ ID NO: 494741 - RNA, 22 nt, Human
augaagucugcacaugcaugug

SEQ ID NO: 494742 - RNA, 22 nt, Human
uaugagaaaggagaaugacuuu

SEQ ID NO: 494743 - RNA, 22 nt, Human
acugugugggccgcucacuggg

SEQ ID NO: 494744 - RNA, 22 nt, Human
ugugaaagucaaauuaauugaa

SEQ ID NO: 494745 - RNA, 22 nt, Human
ugccuguccugaggaugagggu

SEQ ID NO: 494746 - RNA, 22 nt, Human
aaggcaguagguguuucaaacu

SEQ ID NO: 494747 - RNA, 22 nt, Human
ccagcuccaggacugggagcug

SEQ ID NO: 494748 - RNA, 21 nt, Human
accugccacauugcagacuug

SEQ ID NO: 494749 - RNA, 21 nt, Human
ugcuugggggcuucaggagcu

SEQ ID NO: 494750 - RNA, 22 nt, Human
gggcuggcucugucuagaaagg

SEQ ID NO: 494751 - RNA, 22 nt, Human
ccuggcucagaccccaguucug

SEQ ID NO: 494752 - RNA, 22 nt, Human
ccuuuaaagacugcauaacuuc

SEQ ID NO: 494753 - RNA, 22 nt, Human
aucuaaagugucauaaguagcu

SEQ ID NO: 494754 - RNA, 22 nt, Human
ugagccugguugcagugucugg

SEQ ID NO: 494755 - RNA, 22 nt, Human
ccaguguucaauacauauuugu

SEQ ID NO: 494756 - RNA, 22 nt, Human
gccaggugcauggcugagucuc

SEQ ID NO: 494757 - RNA, 22 nt, Human
ugcagaagugagucaugaggaa

SEQ ID NO: 494758 - RNA, 22 nt, Human
cagaggaagcagacacaucuug

SEQ ID NO: 494759 - RNA, 22 nt, Human
auuccuugcacaucagauaguu

SEQ ID NO: 494760 - RNA, 22 nt, Human
uccucacaagcaagcacaggua

SEQ ID NO: 494761 - RNA, 22 nt, Human
uaacagaaauagaaaugagagu

SEQ ID NO: 494762 - RNA, 22 nt, Human
cugugccuuuguagcugugccu

SEQ ID NO: 494763 - RNA, 22 nt, Human
cagucccuaguggagcucacag

SEQ ID NO: 494764 - RNA, 22 nt, Human
auguguacaaccaagcacuaaa

SEQ ID NO: 494765 - RNA, 22 nt, Human
ugcaggucuccauuggcagacu

SEQ ID NO: 494766 - RNA, 19 nt, Human
gcaugcuugguggcuucug

SEQ ID NO: 494767 - RNA, 22 nt, Human
ccugggucacucaggcaggcgg

SEQ ID NO: 494768 - RNA, 22 nt, Human
ugcagcauugcaaagcagucuu

SEQ ID NO: 494769 - RNA, 16 nt, Human
gggagggaguuggugg

SEQ ID NO: 494770 - RNA, 22 nt, Human
guaagccuggaauuuuugacuu

SEQ ID NO: 494771 - RNA, 17 nt, Human
agguucagguuacauuc

SEQ ID NO: 494772 - RNA, 22 nt, Human
uggggagugaugccucggauaa

SEQ ID NO: 494773 - RNA, 22 nt, Human
auuuauuaugggauuuggcaca

SEQ ID NO: 494774 - RNA, 22 nt, Human
ucaggaaggagcuggccugcca

SEQ ID NO: 494775 - RNA, 22 nt, Human
ugaagcagauggucuggucauu

SEQ ID NO: 494776 - RNA, 22 nt, Human
cuucuggguugcaggucuuggc

SEQ ID NO: 494777 - RNA, 22 nt, Human
acugucuguccugcucuccgug

SEQ ID NO: 494778 - RNA, 21 nt, Human
agcagccauggaugguaugua

SEQ ID NO: 494779 - RNA, 22 nt, Human
cagaaauacccagcauuuggag

SEQ ID NO: 494780 - RNA, 22 nt, Human
uuuauguaaguggaaugaugcc

SEQ ID NO: 494781 - RNA, 22 nt, Human
uauaaaugccaggacuuuagau

SEQ ID NO: 494782 - RNA, 22 nt, Human
ccacucugauuuuggcuccacu

SEQ ID NO: 494783 - RNA, 22 nt, Human
cucagggacguuagaggacagg

SEQ ID NO: 494784 - RNA, 22 nt, Human
aaugggagagaacacaaagucc

SEQ ID NO: 494785 - RNA, 22 nt, Human
uagaaagugaagguuaauuaau

SEQ ID NO: 494786 - RNA, 22 nt, Human
cuuuauguucaguacaaugcuu

SEQ ID NO: 494787 - RNA, 22 nt, Human
ugggccucggggaagcccgugu

SEQ ID NO: 494788 - RNA, 19 nt, Human
uggcuuccaucucucucau

SEQ ID NO: 494789 - RNA, 22 nt, Human
agccagggacgcugcaggcuac

SEQ ID NO: 494790 - RNA, 22 nt, Human
ugagucuuuucauuguguggau

SEQ ID NO: 494791 - RNA, 22 nt, Human
ccacuguagagauuugaaugcc

SEQ ID NO: 494792 - RNA, 22 nt, Human
aaaagauuguuagggagaaugu

SEQ ID NO: 494793 - RNA, 22 nt, Human
uuuuaauacugcuauuguagga

SEQ ID NO: 494794 - RNA, 22 nt, Human
aagggagacaguugugugagga

SEQ ID NO: 494795 - RNA, 22 nt, Human
gcuggccugcgagggcaggcug

SEQ ID NO: 494796 - RNA, 21 nt, Human
cagacccucuagaggccaccu

SEQ ID NO: 494797 - RNA, 22 nt, Human
agcucccaggcagucaugagga

SEQ ID NO: 494798 - RNA, 22 nt, Human
agaagagccuggggaccauggc

SEQ ID NO: 494799 - RNA, 22 nt, Human
cggggcuguagcacagcugagc

SEQ ID NO: 494800 - RNA, 22 nt, Human
ucuguuccauguuuuguuccau

SEQ ID NO: 494801 - RNA, 22 nt, Human
aucacuguguauguauaugcag

SEQ ID NO: 494802 - RNA, 22 nt, Human
gugggccagcuuuucuccuggg

SEQ ID NO: 494803 - RNA, 22 nt, Human
ugcacacauucuauggggcuga

SEQ ID NO: 494804 - RNA, 22 nt, Human
uuucuucucgacaccuuauccc

SEQ ID NO: 494805 - RNA, 20 nt, Human
cuguaucagguuacaaagua

SEQ ID NO: 494806 - RNA, 22 nt, Human
ucacaguaaaagcauggaagag

SEQ ID NO: 494807 - RNA, 22 nt, Human
aauaaguugccuguugaaucau

SEQ ID NO: 494808 - RNA, 22 nt, Human
ugugggcaggcccgggucugag

SEQ ID NO: 494809 - RNA, 22 nt, Human
guuucauauaccaagcacuuga

SEQ ID NO: 494810 - RNA, 22 nt, Human
cagauagcaaauggguaagcua

SEQ ID NO: 494811 - RNA, 22 nt, Human
cucagagcccaggguacacccg

SEQ ID NO: 494812 - RNA, 22 nt, Human
agcaaaauaagguaauuuauug

SEQ ID NO: 494813 - RNA, 22 nt, Human
aagacauuuauuugaaucaauu

SEQ ID NO: 494814 - RNA, 21 nt, Human
ccuucucuugcuucagcuuca

SEQ ID NO: 494815 - RNA, 22 nt, Human
agcuuguuaaggaugcauauua

SEQ ID NO: 494816 - RNA, 22 nt, Human
gggcaugagagggcagcuggca

SEQ ID NO: 494817 - RNA, 22 nt, Human
gugucaauaaauagcggugugg

SEQ ID NO: 494818 - RNA, 21 nt, Human
aucacauuggcuguuauuauu

SEQ ID NO: 494819 - RNA, 22 nt, Human
aagugagauuauauguacggga

SEQ ID NO: 494820 - RNA, 22 nt, Human
gucaggauuauuuuauuaaaag

SEQ ID NO: 494821 - RNA, 22 nt, Human
acaggcaggcgggacagcccga

SEQ ID NO: 494822 - RNA, 22 nt, Human
uuucagagucagcuccucucua

SEQ ID NO: 494823 - RNA, 22 nt, Human
aaaugauugucaaaguucuguu

SEQ ID NO: 494824 - RNA, 20 nt, Human
ggcagcucacuacuuucugu

SEQ ID NO: 494825 - RNA, 22 nt, Human
aaaaugaauaaguuaacccagg

SEQ ID NO: 494826 - RNA, 22 nt, Human
agaaaugcucuuccugaccaga

SEQ ID NO: 494827 - RNA, 22 nt, Human
cccagcaucuccaggcauggcc

SEQ ID NO: 494828 - RNA, 20 nt, Human
gccagcugcccuuccacccu

SEQ ID NO: 494829 - RNA, 22 nt, Human
aaaggccagguuggcugguauu

SEQ ID NO: 494830 - RNA, 22 nt, Human
cauaauuaggcaguugaucauu

SEQ ID NO: 494831 - RNA, 22 nt, Human
cugugggccuagucuggccuag

SEQ ID NO: 494832 - RNA, 22 nt, Human
agcaaggcagucagcuggcugg

SEQ ID NO: 494833 - RNA, 22 nt, Human
ugcccugguagacacagacugu

SEQ ID NO: 494834 - RNA, 22 nt, Human
acugaaggaaacuuuuguguuu

SEQ ID NO: 494835 - RNA, 22 nt, Human
acauuucuucccuuuagcagaa

SEQ ID NO: 494836 - RNA, 22 nt, Human
uauuucagacacugaucuugca

SEQ ID NO: 494837 - RNA, 22 nt, Human
aaaaaaucagaucuuugguuaa

SEQ ID NO: 494838 - RNA, 22 nt, Human
auauuaauuauuuacacaugag

SEQ ID NO: 494839 - RNA, 22 nt, Human
ggcuucauggaggaggugaguc

SEQ ID NO: 494840 - RNA, 20 nt, Human
ccaagagcaugcaugaggaa

SEQ ID NO: 494841 - RNA, 22 nt, Human
aguggaccagaagacugaagcu

SEQ ID NO: 494842 - RNA, 22 nt, Human
aggaagaggguggcagauaauc

SEQ ID NO: 494843 - RNA, 22 nt, Human
gaggagggccuggugucccuuc

SEQ ID NO: 494844 - RNA, 22 nt, Human
uugucccaggacuugcauagau

SEQ ID NO: 494845 - RNA, 22 nt, Human
acuguucaaguuuuaugcugga

SEQ ID NO: 494846 - RNA, 22 nt, Human
acaguguuauuucugaguaaug

SEQ ID NO: 494847 - RNA, 22 nt, Human
ucccagagaaagucaaggucuu

SEQ ID NO: 494848 - RNA, 22 nt, Human
agucauuaagacaacuggagua

SEQ ID NO: 494849 - RNA, 22 nt, Human
ggccucuguucugcauuccucc

SEQ ID NO: 494850 - RNA, 22 nt, Human
aagcaauguguuaaugaaugag

SEQ ID NO: 494851 - RNA, 22 nt, Human
guucacacuuuugauaugugaa

SEQ ID NO: 494852 - RNA, 22 nt, Human
gugccugggguugagcuaugaa

SEQ ID NO: 494853 - RNA, 22 nt, Human
gcuccaguggacugggggaggc

SEQ ID NO: 494854 - RNA, 22 nt, Human
cuggccagccugucgaugcccu

SEQ ID NO: 494855 - RNA, 22 nt, Human
cucaggauccaucuccugcccu

SEQ ID NO: 494856 - RNA, 20 nt, Human
ugggauuguuuuuuagcuuc

SEQ ID NO: 494857 - RNA, 22 nt, Human
gucuggcuguccagcuuaucua

SEQ ID NO: 494858 - RNA, 20 nt, Human
uuucuguaaggcauuaaucu

SEQ ID NO: 494859 - RNA, 22 nt, Human
aggggcucaguuacuuuggcag

SEQ ID NO: 494860 - RNA, 22 nt, Human
aggccuggcuuugguuugcuga

SEQ ID NO: 494861 - RNA, 22 nt, Human
acagugugaugggccugccuga

SEQ ID NO: 494862 - RNA, 22 nt, Human
ugcauuccuuugucuguuaaag

SEQ ID NO: 494863 - RNA, 22 nt, Human
gcagcugggacacugaggccag

SEQ ID NO: 494864 - RNA, 22 nt, Human
ucugcuguugagcacaagugaa

SEQ ID NO: 494865 - RNA, 22 nt, Human
gcugcccugugguccagcaggu

SEQ ID NO: 494866 - RNA, 22 nt, Human
cagggcuguuagcugcugcucu

SEQ ID NO: 494867 - RNA, 22 nt, Human
uccugagagcagaguccaggug

SEQ ID NO: 494868 - RNA, 22 nt, Human
uuuuagaaauacugauuuagug

SEQ ID NO: 494869 - RNA, 22 nt, Human
ggagaagggcaugguaguuuua

SEQ ID NO: 494870 - RNA, 22 nt, Human
ugauugaauucaaaugcaaucu

SEQ ID NO: 494871 - RNA, 23 nt, Human
cccaggcuacaaauuaugcucug

SEQ ID NO: 494872 - RNA, 22 nt, Human
ggcucagguuuccuucccagcu

SEQ ID NO: 494873 - RNA, 22 nt, Human
uagauuucucauucauagauug

SEQ ID NO: 494874 - RNA, 22 nt, Human
gcagacaggcccaguggaggga

SEQ ID NO: 494875 - RNA, 22 nt, Human
cauacauugcucauucaguauc

SEQ ID NO: 494876 - RNA, 22 nt, Human
ucagugcuugccucuggaggag

SEQ ID NO: 494877 - RNA, 22 nt, Human
gagagaagaaagccaugguccu

SEQ ID NO: 494878 - RNA, 22 nt, Human
ugccaggcagugucagauugag

SEQ ID NO: 494879 - RNA, 22 nt, Human
auuuuucucucacacuuaccag

SEQ ID NO: 494880 - RNA, 22 nt, Human
aaaucagaaaauauggagagga

SEQ ID NO: 494881 - RNA, 22 nt, Human
gcuaggaggaagaaugugaauu

SEQ ID NO: 494882 - RNA, 22 nt, Human
uccuggccaggaugaccuaaca

SEQ ID NO: 494883 - RNA, 22 nt, Human
ggcggggccucgcgaacggccu

SEQ ID NO: 494884 - RNA, 22 nt, Human
agucucuuaaugggcagaaagu

SEQ ID NO: 494885 - RNA, 22 nt, Human
gcucuggguagccacugccugg

SEQ ID NO: 494886 - RNA, 22 nt, Human
uguggggaucuucuagcuuuuc

SEQ ID NO: 494887 - RNA, 22 nt, Human
cugaggcacccaucuucuccug

SEQ ID NO: 494888 - RNA, 22 nt, Human
cuuuggcaugguccucacuaua

SEQ ID NO: 494889 - RNA, 22 nt, Human
cugaggcugaagagggccuacg

SEQ ID NO: 494890 - RNA, 22 nt, Human
guauuagggccaaaggcaggaa

SEQ ID NO: 494891 - RNA, 20 nt, Human
cugugcuuuggaaccuggaa

SEQ ID NO: 494892 - RNA, 22 nt, Human
aggcugccucgugagcucgcug

SEQ ID NO: 494893 - RNA, 22 nt, Human
acaguuugcccugacauucucc

SEQ ID NO: 494894 - RNA, 22 nt, Human
ccugauggagcccugcugcaug

SEQ ID NO: 494895 - RNA, 22 nt, Human
uguguacacacagauauauaca

SEQ ID NO: 494896 - RNA, 22 nt, Human
gcaguggauccaaugguaucuu

SEQ ID NO: 494897 - RNA, 22 nt, Human
uggggcaguggcuuuucacccu

SEQ ID NO: 494898 - RNA, 22 nt, Human
ccugagagcgaguggccucaug

SEQ ID NO: 494899 - RNA, 22 nt, Human
ugccaggccucaggagucucca

SEQ ID NO: 494900 - RNA, 22 nt, Human
ccagggcuggugggagaugcug

SEQ ID NO: 494901 - RNA, 22 nt, Human
aggccccaaagcagugcaagua

SEQ ID NO: 494902 - RNA, 22 nt, Human
ugggacugcucuugcugggguc

SEQ ID NO: 494903 - RNA, 22 nt, Human
cucucuggaccucaacuauuuu

SEQ ID NO: 494904 - RNA, 22 nt, Human
ucagguccuuacugugcucccu

SEQ ID NO: 494905 - RNA, 22 nt, Human
agaggcugagaaacccucuucu

SEQ ID NO: 494906 - RNA, 22 nt, Human
caaagguaaagaucugcugugg

SEQ ID NO: 494907 - RNA, 22 nt, Human
acagccaggaauucuggagaag

SEQ ID NO: 494908 - RNA, 22 nt, Human
cugcucugacccuuucaccuuc

SEQ ID NO: 494909 - RNA, 22 nt, Human
aaaauacuguggaguguugaaa

SEQ ID NO: 494910 - RNA, 22 nt, Human
agcugcucaggagagccagguc

SEQ ID NO: 494911 - RNA, 22 nt, Human
agcagcaauggaaagcaacaca

SEQ ID NO: 494912 - RNA, 20 nt, Human
gccagaggccggcaggggcu

SEQ ID NO: 494913 - RNA, 18 nt, Human
ccuguguguguugcaggc

SEQ ID NO: 494914 - RNA, 23 nt, Human
ggccacuuugugucaguaugugc

SEQ ID NO: 494915 - RNA, 22 nt, Human
uccugggcugugugccacucug

SEQ ID NO: 494916 - RNA, 22 nt, Human
gcacagaacccuaucuuucgga

SEQ ID NO: 494917 - RNA, 22 nt, Human
uccucaguggggcauucauuau

SEQ ID NO: 494918 - RNA, 23 nt, Human
ugaugggaaggaacgacuaccac

SEQ ID NO: 494919 - RNA, 22 nt, Human
cuguggcucuccaauggaggga

SEQ ID NO: 494920 - RNA, 22 nt, Human
caagaaaugggauuugacugcc

SEQ ID NO: 494921 - RNA, 23 nt, Human
auaauaacgucugucuugucucu

SEQ ID NO: 494922 - RNA, 22 nt, Human
aacauacagugagcaguggacu

SEQ ID NO: 494923 - RNA, 22 nt, Human
aaaugcacaaaguaaguguaau

SEQ ID NO: 494924 - RNA, 22 nt, Human
accagagaaaacacagcaggcu

SEQ ID NO: 494925 - RNA, 22 nt, Human
cauaguaaauaaugcagaugau

SEQ ID NO: 494926 - RNA, 22 nt, Human
uugagaagguggucauuugcaa

SEQ ID NO: 494927 - RNA, 22 nt, Human
ggcagucagugugguucauaaa

SEQ ID NO: 494928 - RNA, 22 nt, Human
auuuagaaccccuuccaaccug

SEQ ID NO: 494929 - RNA, 22 nt, Human
ccucagucugucugaucugcca

SEQ ID NO: 494930 - RNA, 22 nt, Human
ugaggugaccgcagaugggaag

SEQ ID NO: 494931 - RNA, 22 nt, Human
uggcaggcaaguucagcuccac

SEQ ID NO: 494932 - RNA, 22 nt, Human
aggcuccaccagucaggugcau

SEQ ID NO: 494933 - RNA, 22 nt, Human
gaugaaaugcugagccugaguu

SEQ ID NO: 494934 - RNA, 22 nt, Human
uuucagagaauuagaagcugau

SEQ ID NO: 494935 - RNA, 22 nt, Human
ugggggcugugcacaggcucac

SEQ ID NO: 494936 - RNA, 18 nt, Human
ccucuggguuuuguuccc

SEQ ID NO: 494937 - RNA, 22 nt, Human
ccagggaggguccuguggcuuc

SEQ ID NO: 494938 - RNA, 20 nt, Human
aggaaagccugugugagucu

SEQ ID NO: 494939 - RNA, 22 nt, Human
ccagcucuagccccauguggcu

SEQ ID NO: 494940 - RNA, 22 nt, Human
uuuuuugucuugaagaaauggu

SEQ ID NO: 494941 - RNA, 22 nt, Human
cuauuagguuggugcaaaagua

SEQ ID NO: 494942 - RNA, 22 nt, Human
uucauuugggaugagucagaag

SEQ ID NO: 494943 - RNA, 19 nt, Human
uggccaccucugcuguucu

SEQ ID NO: 494944 - RNA, 22 nt, Human
acuggagcccguggaggcgcag

SEQ ID NO: 494945 - RNA, 22 nt, Human
aauugugcuaugauuaugaaag

SEQ ID NO: 494946 - RNA, 22 nt, Human
ucugcagaaggaaucagcugag

SEQ ID NO: 494947 - RNA, 22 nt, Human
uucccucuccaggagcccugag

SEQ ID NO: 494948 - RNA, 22 nt, Human
ugcaagggcuuagggggcugug

SEQ ID NO: 494949 - RNA, 22 nt, Human
cuggaucuucagagaucaccag

SEQ ID NO: 494950 - RNA, 22 nt, Human
uucaggaugaaagugugcaaca

SEQ ID NO: 494951 - RNA, 18 nt, Human
ccauuucaugauuauuac

SEQ ID NO: 494952 - RNA, 22 nt, Human
agcaggggcuccuccacagcca

SEQ ID NO: 494953 - RNA, 18 nt, Human
cuccugggcugcagaugc

SEQ ID NO: 494954 - RNA, 19 nt, Human
cuuugcuuguuucuguguc

SEQ ID NO: 494955 - RNA, 22 nt, Human
cuccucugucuaccacgagggu

SEQ ID NO: 494956 - RNA, 22 nt, Human
agaaaguucugugaguuguuca

SEQ ID NO: 494957 - RNA, 22 nt, Human
gaauacaagccaggcacaaggc

SEQ ID NO: 494958 - RNA, 22 nt, Human
auuucaaguguugagcucauaa

SEQ ID NO: 494959 - RNA, 22 nt, Human
ugagggaguuggguguauagga

SEQ ID NO: 494960 - RNA, 19 nt, Human
cagaggcaccagguauaga

SEQ ID NO: 494961 - RNA, 22 nt, Human
agagggggugucagcacugcag

SEQ ID NO: 494962 - RNA, 22 nt, Human
gguggcugaagcagucuucggg

SEQ ID NO: 494963 - RNA, 22 nt, Human
cacacagacagcucucugaaga

SEQ ID NO: 494964 - RNA, 22 nt, Human
agcugcucugauaaaccuacuu

SEQ ID NO: 494965 - RNA, 22 nt, Human
acagcauucccuuuggcugcuu

SEQ ID NO: 494966 - RNA, 22 nt, Human
uguaugaagacuucuucugugu

SEQ ID NO: 494967 - RNA, 22 nt, Human
cugggccuggacgggcagaucu

SEQ ID NO: 494968 - RNA, 22 nt, Human
cuggagcucagcccagguucca

SEQ ID NO: 494969 - RNA, 22 nt, Human
cucaccccuguaauuccagcac

SEQ ID NO: 494970 - RNA, 22 nt, Human
uccccacagcagaagaucugag

SEQ ID NO: 494971 - RNA, 22 nt, Human
uguuuauucauggcuaaugaaa

SEQ ID NO: 494972 - RNA, 22 nt, Human
cagcuauuuugccuaucauggu

SEQ ID NO: 494973 - RNA, 22 nt, Human
aggucauuaaaguuaaaugagg

SEQ ID NO: 494974 - RNA, 22 nt, Human
agaagcaggccucacagaucug

SEQ ID NO: 494975 - RNA, 22 nt, Human
ggcaggugcgcauguugcauua

SEQ ID NO: 494976 - RNA, 22 nt, Human
aagguccuuuugcagugugauc

SEQ ID NO: 494977 - RNA, 22 nt, Human
uuuuaucaaucauuaagacauu

SEQ ID NO: 494978 - RNA, 22 nt, Human
cuguauaacaucuuuuguuucc

SEQ ID NO: 494979 - RNA, 22 nt, Human
cuuggcagagggcugggcucag

SEQ ID NO: 494980 - RNA, 22 nt, Human
ugagccccggaguuucaggcug

SEQ ID NO: 494981 - RNA, 22 nt, Human
uuucagaaagcaucaucaaagu

SEQ ID NO: 494982 - RNA, 22 nt, Human
uccugcagucugcacucugccu

SEQ ID NO: 494983 - RNA, 22 nt, Human
gagagguaauuugaagugcaaa

SEQ ID NO: 494984 - RNA, 22 nt, Human
uccuccuccucacagucaccug

SEQ ID NO: 494985 - RNA, 22 nt, Human
caggcauggugagaacucagcc

SEQ ID NO: 494986 - RNA, 22 nt, Human
auaaagauuucuuuuucucuac

SEQ ID NO: 494987 - RNA, 22 nt, Human
gucuggcuuugcucagaugcug

SEQ ID NO: 494988 - RNA, 22 nt, Human
ucccagcuacucuagaggcuga

SEQ ID NO: 494989 - RNA, 22 nt, Human
gcuggggaggcagcagagaaca

SEQ ID NO: 494990 - RNA, 22 nt, Human
aaaggucaaaaucgugacauug

SEQ ID NO: 494991 - RNA, 22 nt, Human
gggggcuguccugugcauugua

SEQ ID NO: 494992 - RNA, 21 nt, Human
gagacagcccagugccagggc

SEQ ID NO: 494993 - RNA, 22 nt, Human
auuuuguuauagaacucuguga

SEQ ID NO: 494994 - RNA, 22 nt, Human
acacagguacacauauguaccu

SEQ ID NO: 494995 - RNA, 22 nt, Human
cugagcagcacagggcgccagg

SEQ ID NO: 494996 - RNA, 22 nt, Human
ugcccuggagucaguggcuauu

SEQ ID NO: 494997 - RNA, 22 nt, Human
ggcuggcuugccaagcucaggg

SEQ ID NO: 494998 - RNA, 22 nt, Human
cagguccaacuauuuaucugug

SEQ ID NO: 494999 - RNA, 22 nt, Human
gaaucucauucuaacuaguagg

SEQ ID NO: 495000 - RNA, 22 nt, Human
acuguguggaaauuugugaggg

SEQ ID NO: 495001 - RNA, 22 nt, Human
ccuggggaccugccucagcccu

SEQ ID NO: 495002 - RNA, 22 nt, Human
agcagagucugugugcacuuua

SEQ ID NO: 495003 - RNA, 22 nt, Human
cuggguggaaagugcugagaau

SEQ ID NO: 495004 - RNA, 22 nt, Human
gacacagaugaucaggugugga

SEQ ID NO: 495005 - RNA, 22 nt, Human
cacagagcugaaccugggucau

SEQ ID NO: 495006 - RNA, 22 nt, Human
gcaggcaggagcccaacugccu

SEQ ID NO: 495007 - RNA, 22 nt, Human
ucuguaggacagagaaaugggg

SEQ ID NO: 495008 - RNA, 22 nt, Human
gccucugcugcaagccugguug

SEQ ID NO: 495009 - RNA, 22 nt, Human
uggagugaaguaaagaggacaa

SEQ ID NO: 495010 - RNA, 22 nt, Human
ggaaagagggacccagcuuggu

SEQ ID NO: 495011 - RNA, 22 nt, Human
gucaggaagcaagguugggcau

SEQ ID NO: 495012 - RNA, 22 nt, Human
gcugccugauuuacauagugaa

SEQ ID NO: 495013 - RNA, 22 nt, Human
uggauuugcuaccuucugauau

SEQ ID NO: 495014 - RNA, 21 nt, Human
ucaguaaaccuaaagauugua

SEQ ID NO: 495015 - RNA, 22 nt, Human
ccugucucuuucaaucugagag

SEQ ID NO: 495016 - RNA, 22 nt, Human
ggccugcuuuccgagccugcag

SEQ ID NO: 495017 - RNA, 21 nt, Human
accucaagcaacaaccaaggu

SEQ ID NO: 495018 - RNA, 22 nt, Human
ggcucccuggcccuggggacac

SEQ ID NO: 495019 - RNA, 22 nt, Human
gucucagaguccuacuuauucc

SEQ ID NO: 495020 - RNA, 22 nt, Human
aacagaauugcugcugccaaug

SEQ ID NO: 495021 - RNA, 22 nt, Human
ccaugggaauugggagguccca

SEQ ID NO: 495022 - RNA, 22 nt, Human
agagugaaaagcuagagcagua

SEQ ID NO: 495023 - RNA, 22 nt, Human
cagaggccaccuguggccacug

SEQ ID NO: 495024 - RNA, 22 nt, Human
agccagccaguucacuaggaaa

SEQ ID NO: 495025 - RNA, 22 nt, Human
gaaauacaaagccagccauuuu

SEQ ID NO: 495026 - RNA, 22 nt, Human
auugacaagcaguaugucuuag

SEQ ID NO: 495027 - RNA, 22 nt, Human
agugucaacucggaauaaggau

SEQ ID NO: 495028 - RNA, 22 nt, Human
uagacacaagagaaggguauaa

SEQ ID NO: 495029 - RNA, 22 nt, Human
gggcggcgucggcgaggccauc

SEQ ID NO: 495030 - RNA, 22 nt, Human
augaaggcuguguagauggaug

SEQ ID NO: 495031 - RNA, 22 nt, Human
ggccucaguuucuccauggguu

SEQ ID NO: 495032 - RNA, 22 nt, Human
aagacacacacauaugcugagu

SEQ ID NO: 495033 - RNA, 22 nt, Human
aggcuacagauacagaggcuac

SEQ ID NO: 495034 - RNA, 22 nt, Human
ugucagcaguaucucuaucuca

SEQ ID NO: 495035 - RNA, 22 nt, Human
gugucccaauguucaggacggc

SEQ ID NO: 495036 - RNA, 21 nt, Human
guggcucugccaggacugaaa

SEQ ID NO: 495037 - RNA, 22 nt, Human
cauuugaaugagauugcuguaa

SEQ ID NO: 495038 - RNA, 19 nt, Human
ugcuggaggguagugaguc

SEQ ID NO: 495039 - RNA, 22 nt, Human
gacuguggcaggcucagcacug

SEQ ID NO: 495040 - RNA, 22 nt, Human
acagcagcuggguucccaccau

SEQ ID NO: 495041 - RNA, 22 nt, Human
ggcagugagaggucuccugguc

SEQ ID NO: 495042 - RNA, 18 nt, Human
uuuccuuguaugaacaua

SEQ ID NO: 495043 - RNA, 22 nt, Human
ucucugggcuaaaaucaaggug

SEQ ID NO: 495044 - RNA, 22 nt, Human
gcaguccaaaguggcucucacc

SEQ ID NO: 495045 - RNA, 22 nt, Human
uaaaaguauacuuucaaaggag

SEQ ID NO: 495046 - RNA, 22 nt, Human
gcagccugaugaucuggguugu

SEQ ID NO: 495047 - RNA, 22 nt, Human
guagcuucaaguacucucccug

SEQ ID NO: 495048 - RNA, 22 nt, Human
agcagcuggggccugugacgau

SEQ ID NO: 495049 - RNA, 22 nt, Human
agguuucuggauuuauuauggc

SEQ ID NO: 495050 - RNA, 22 nt, Human
aaugggaaagagacuagaugcu

SEQ ID NO: 495051 - RNA, 21 nt, Human
gggcuggacaugguggcucau

SEQ ID NO: 495052 - RNA, 22 nt, Human
uccaggagguaugaguggcccc

SEQ ID NO: 495053 - RNA, 22 nt, Human
cauucauuuaugaaauaucuau

SEQ ID NO: 495054 - RNA, 22 nt, Human
acauugaagcugugaaaucaaa

SEQ ID NO: 495055 - RNA, 22 nt, Human
aacuacauagaaauuaguauuu

SEQ ID NO: 495056 - RNA, 22 nt, Human
caguuaccagaucgcaggaggu

SEQ ID NO: 495057 - RNA, 22 nt, Human
ccagguggaaggucugugcucu

SEQ ID NO: 495058 - RNA, 20 nt, Human
guauuaggagguaaauguaa

SEQ ID NO: 495059 - RNA, 18 nt, Human
aggcuucuuggcucaguc

SEQ ID NO: 495060 - RNA, 22 nt, Human
ugagcuggcacuuuuccuggga

SEQ ID NO: 495061 - RNA, 22 nt, Human
ggggucccugcaccagcauguc

SEQ ID NO: 495062 - RNA, 22 nt, Human
auguggcugccaccugccugaa

SEQ ID NO: 495063 - RNA, 20 nt, Human
cuggcccaggaugauggcgc

SEQ ID NO: 495064 - RNA, 22 nt, Human
agaaauguauagugaauuuuuc

SEQ ID NO: 495065 - RNA, 22 nt, Human
agccccacacucucucugagaa

SEQ ID NO: 495066 - RNA, 22 nt, Human
cuggaaggugacugucuugaau

SEQ ID NO: 495067 - RNA, 22 nt, Human
aggcugcuucagcugcagggag

SEQ ID NO: 495068 - RNA, 22 nt, Human
ucuggccccgcaugcacuuuau

SEQ ID NO: 495069 - RNA, 22 nt, Human
uggaguucucaggugagggcuu

SEQ ID NO: 495070 - RNA, 22 nt, Human
ggcaguagccagggacuggcag

SEQ ID NO: 495071 - RNA, 22 nt, Human
ucugaggcauacccaggccccc

SEQ ID NO: 495072 - RNA, 22 nt, Human
cacuggcaugugaggcgguggc

SEQ ID NO: 495073 - RNA, 22 nt, Human
gaguguuccagaaacuggcccu

SEQ ID NO: 495074 - RNA, 22 nt, Human
aaggccugaacaugaggagaug

SEQ ID NO: 495075 - RNA, 22 nt, Human
gcucucugucguuaugcuucau

SEQ ID NO: 495076 - RNA, 22 nt, Human
ucccagccacagguguagcccu

SEQ ID NO: 495077 - RNA, 22 nt, Human
ugccugugcccuucuuggcauu

SEQ ID NO: 495078 - RNA, 22 nt, Human
ugaggcagugauguuuaagcac

SEQ ID NO: 495079 - RNA, 22 nt, Human
gcuucuggaggagcugggcuga

SEQ ID NO: 495080 - RNA, 22 nt, Human
aagugcuuuacaaaugucuguu

SEQ ID NO: 495081 - RNA, 15 nt, Human
cacacagacagcuug

SEQ ID NO: 495082 - RNA, 22 nt, Human
caggaugagguagaggcagaua

SEQ ID NO: 495083 - RNA, 22 nt, Human
uucugagcugcaacacuaacau

SEQ ID NO: 495084 - RNA, 22 nt, Human
gucacuuuauuaauuuugguga

SEQ ID NO: 495085 - RNA, 22 nt, Human
aagcagcuucccuggcuccugg

SEQ ID NO: 495086 - RNA, 22 nt, Human
ugagguucaguucuuggccaca

SEQ ID NO: 495087 - RNA, 23 nt, Human
ugggccuggccucccaguccagc

SEQ ID NO: 495088 - RNA, 22 nt, Human
auagacuugguuaguaaauuug

SEQ ID NO: 495089 - RNA, 22 nt, Human
ggcugaggcucaugccaucuug

SEQ ID NO: 495090 - RNA, 22 nt, Human
caggggcucugagauugucuaa

SEQ ID NO: 495091 - RNA, 22 nt, Human
cauggcccucuucuggagcaau

SEQ ID NO: 495092 - RNA, 22 nt, Human
ucaguguuuaccguauguuguu

SEQ ID NO: 495093 - RNA, 19 nt, Human
uggagguccaggaguaggg

SEQ ID NO: 495094 - RNA, 22 nt, Human
uuugaaaggguuaugagacuga

SEQ ID NO: 495095 - RNA, 22 nt, Human
cagcccuggcccaggugccuua

SEQ ID NO: 495096 - RNA, 22 nt, Human
gcuggaaggcuaggcucaguug

SEQ ID NO: 495097 - RNA, 22 nt, Human
uaccagccucaguugugagccc

SEQ ID NO: 495098 - RNA, 22 nt, Human
uuugaauaaacgguuaauguuc

SEQ ID NO: 495099 - RNA, 19 nt, Human
agguggucuaggcuggaga

SEQ ID NO: 495100 - RNA, 22 nt, Human
uaaaguuuggcagacaauaaca

SEQ ID NO: 495101 - RNA, 22 nt, Human
uccucaguauuguggagcagau

SEQ ID NO: 495102 - RNA, 22 nt, Human
cuguguccugcgucaagccaau

SEQ ID NO: 495103 - RNA, 22 nt, Human
aaaggucagcugccaucguucu

SEQ ID NO: 495104 - RNA, 22 nt, Human
cagaagcacauguuuacaugua

SEQ ID NO: 495105 - RNA, 22 nt, Human
ugcucuggcuggagcaaugacu

SEQ ID NO: 495106 - RNA, 22 nt, Human
gcuggagaguaguaagcaguua

SEQ ID NO: 495107 - RNA, 22 nt, Human
uugcuuccucuaguuucuugaa

SEQ ID NO: 495108 - RNA, 22 nt, Human
gccaggcugguuauuuaaugag

SEQ ID NO: 495109 - RNA, 22 nt, Human
uuaggaaauuaugguuucagau

SEQ ID NO: 495110 - RNA, 22 nt, Human
caggcacugugcuagauccuug

SEQ ID NO: 495111 - RNA, 22 nt, Human
uugucugaaucuggagcucucu

SEQ ID NO: 495112 - RNA, 22 nt, Human
uguguucuuaaaagcagugaua

SEQ ID NO: 495113 - RNA, 22 nt, Human
uguccacaucacucacuuguca

SEQ ID NO: 495114 - RNA, 22 nt, Human
uccucaggucaaagcaggagaa

SEQ ID NO: 495115 - RNA, 22 nt, Human
ggccaccugggaucucauccug

SEQ ID NO: 495116 - RNA, 17 nt, Human
ccagagaguaguuagga

SEQ ID NO: 495117 - RNA, 22 nt, Human
acagaugaauuuuaauuguguu

SEQ ID NO: 495118 - RNA, 22 nt, Human
caguaugucuacuggacaaagu

SEQ ID NO: 495119 - RNA, 22 nt, Human
gccuggcaggggccugggagug

SEQ ID NO: 495120 - RNA, 22 nt, Human
acugggcucauaaugucauaga

SEQ ID NO: 495121 - RNA, 22 nt, Human
ucugagaguacgggcugcgcgc

SEQ ID NO: 495122 - RNA, 22 nt, Human
gcagaggcuguagggaagguug

SEQ ID NO: 495123 - RNA, 22 nt, Human
augauauuuuaguaaagugaua

SEQ ID NO: 495124 - RNA, 22 nt, Human
aagauguucuauuuucacuuuu

SEQ ID NO: 495125 - RNA, 22 nt, Human
acuguuuucuuagcucccugcu

SEQ ID NO: 495126 - RNA, 22 nt, Human
cugugucggacgugggcagcag

SEQ ID NO: 495127 - RNA, 21 nt, Human
uaaagaagaugaaugugauca

SEQ ID NO: 495128 - RNA, 22 nt, Human
acacacuguaaggacuaucacu

SEQ ID NO: 495129 - RNA, 22 nt, Human
cucacugucuguacuagcugau

SEQ ID NO: 495130 - RNA, 22 nt, Human
ucugugugugccuguuaauauu

SEQ ID NO: 495131 - RNA, 22 nt, Human
gcuggaggcaguucagacacca

SEQ ID NO: 495132 - RNA, 23 nt, Human
aggagccaggugcagcccuugug

SEQ ID NO: 495133 - RNA, 22 nt, Human
agcucccugagaugccacagca

SEQ ID NO: 495134 - RNA, 22 nt, Human
guguuaaccagcuaaacuuugc

SEQ ID NO: 495135 - RNA, 22 nt, Human
cugagcacagaaauaagauauu

SEQ ID NO: 495136 - RNA, 22 nt, Human
cagcaguggccaucuguguggu

SEQ ID NO: 495137 - RNA, 22 nt, Human
cucagcagcagggaagagguca

SEQ ID NO: 495138 - RNA, 22 nt, Human
ucacuuaaaaauucuaguuaug

SEQ ID NO: 495139 - RNA, 22 nt, Human
ggcaggagggcggacaaugacc

SEQ ID NO: 495140 - RNA, 20 nt, Human
ccagucccugagcaccaggg

SEQ ID NO: 495141 - RNA, 22 nt, Human
uuuaaauucugucugccgcuua

SEQ ID NO: 495142 - RNA, 22 nt, Human
ugcugaaugugcucccuuuuaa

SEQ ID NO: 495143 - RNA, 22 nt, Human
gcagggacagggcagggccuuu

SEQ ID NO: 495144 - RNA, 22 nt, Human
ccucccguauauguccugggcu

SEQ ID NO: 495145 - RNA, 22 nt, Human
uaggaaauauuugaacauagga

SEQ ID NO: 495146 - RNA, 22 nt, Human
uugaagcaaggcgaaucuugug

SEQ ID NO: 495147 - RNA, 22 nt, Human
cagcuuuggcccagucgggagg

SEQ ID NO: 495148 - RNA, 22 nt, Human
ucacuggggccuuuggucagga

SEQ ID NO: 495149 - RNA, 22 nt, Human
aucuggcuuacgaagcacuggu

SEQ ID NO: 495150 - RNA, 22 nt, Human
aauuagggagccaucauaaggu

SEQ ID NO: 495151 - RNA, 21 nt, Human
ucauuugugaucugauuucca

SEQ ID NO: 495152 - RNA, 22 nt, Human
aaauccuaaggagaauaugauu

SEQ ID NO: 495153 - RNA, 22 nt, Human
ugcaggugcugugucaagagag

SEQ ID NO: 495154 - RNA, 22 nt, Human
auauucuugugauuauaaagua

SEQ ID NO: 495155 - RNA, 22 nt, Human
ucagaagcauguggggagccug

SEQ ID NO: 495156 - RNA, 22 nt, Human
cauguacaguuuuucuguccug

SEQ ID NO: 495157 - RNA, 22 nt, Human
uggcuucugggacuugugagca

SEQ ID NO: 495158 - RNA, 22 nt, Human
cugcuuugaaaauaaacuuguc

SEQ ID NO: 495159 - RNA, 22 nt, Human
ccggcucggcgaccaggcugaa

SEQ ID NO: 495160 - RNA, 22 nt, Human
ucagagccaaucauggugcauu

SEQ ID NO: 495161 - RNA, 22 nt, Human
gccccuugucuccaggccccaa

SEQ ID NO: 495162 - RNA, 22 nt, Human
caaagcuauaaauucagacaga

SEQ ID NO: 495163 - RNA, 22 nt, Human
gaggcucagagagguccacaua

SEQ ID NO: 495164 - RNA, 22 nt, Human
ccagggugcucuguggcgucgc

SEQ ID NO: 495165 - RNA, 22 nt, Human
aagacugugucuauggcuacuc

SEQ ID NO: 495166 - RNA, 22 nt, Human
uuugcauugcauacaaggaacu

SEQ ID NO: 495167 - RNA, 22 nt, Human
cuuccccaaguagagaggggag

SEQ ID NO: 495168 - RNA, 22 nt, Human
gaauuguacgcuuuacauaggu

SEQ ID NO: 495169 - RNA, 22 nt, Human
caaguccucgcuucuagcugug

SEQ ID NO: 495170 - RNA, 22 nt, Human
ggacucuguuuuccugaucacu

SEQ ID NO: 495171 - RNA, 22 nt, Human
ucccccuccaauugccauguua

SEQ ID NO: 495172 - RNA, 22 nt, Human
ccugccugaaggucagccaccc

SEQ ID NO: 495173 - RNA, 22 nt, Human
gcugaaugaauguauuuuaaaa

SEQ ID NO: 495174 - RNA, 22 nt, Human
uuaaagcaccuccuuggaugug

SEQ ID NO: 495175 - RNA, 22 nt, Human
cuuccugcauugugccagaguu

SEQ ID NO: 495176 - RNA, 22 nt, Human
acaaguaggugcacuucaauag

SEQ ID NO: 495177 - RNA, 22 nt, Human
ggcagagugcucugggcagggg

SEQ ID NO: 495178 - RNA, 22 nt, Human
ccucuucuaggacguccuugug

SEQ ID NO: 495179 - RNA, 19 nt, Human
gacuuuggaaaugcuguuu

SEQ ID NO: 495180 - RNA, 23 nt, Human
uccaggagaauuccagggcccgg

SEQ ID NO: 495181 - RNA, 22 nt, Human
gcucuggggcccagggaucaca

SEQ ID NO: 495182 - RNA, 22 nt, Human
uagagaauggccuugaaguagu

SEQ ID NO: 495183 - RNA, 22 nt, Human
cauuugcagagggugacacucu

SEQ ID NO: 495184 - RNA, 22 nt, Human
ccuugcucaagcuagugacggg

SEQ ID NO: 495185 - RNA, 22 nt, Human
aaagcagagaucauggcuugua

SEQ ID NO: 495186 - RNA, 22 nt, Human
agaaucaacugaaaauugguga

SEQ ID NO: 495187 - RNA, 22 nt, Human
cagauggaacacagaaaggaga

SEQ ID NO: 495188 - RNA, 22 nt, Human
uguggcugaucaaagcgcucag

SEQ ID NO: 495189 - RNA, 22 nt, Human
uacaaaguagaaauucaguaaa

SEQ ID NO: 495190 - RNA, 22 nt, Human
gcugagguggcugccuuaguaa

SEQ ID NO: 495191 - RNA, 22 nt, Human
ggaucugggguagagcaguggg

SEQ ID NO: 495192 - RNA, 22 nt, Human
gccuccugaaaggaagagcucc

SEQ ID NO: 495193 - RNA, 22 nt, Human
uggggccugagguggagcugca

SEQ ID NO: 495194 - RNA, 22 nt, Human
gagccaaggguugccauggaga

SEQ ID NO: 495195 - RNA, 22 nt, Human
ccagggugugggcgucggcacg

SEQ ID NO: 495196 - RNA, 22 nt, Human
acccaggagguggaggcugcag

SEQ ID NO: 495197 - RNA, 22 nt, Human
guccuggggauuauagaguguu

SEQ ID NO: 495198 - RNA, 19 nt, Human
cucugccucccuccugggu

SEQ ID NO: 495199 - RNA, 22 nt, Human
uuuuggaugagcccagauuucu

SEQ ID NO: 495200 - RNA, 22 nt, Human
auucuacaacccaauaauaauu

SEQ ID NO: 495201 - RNA, 22 nt, Human
augcaguaaauguucuaguuug

SEQ ID NO: 495202 - RNA, 22 nt, Human
uccauguggccagacacuggca

SEQ ID NO: 495203 - RNA, 22 nt, Human
aaguucaaucagaugaaaaagc

SEQ ID NO: 495204 - RNA, 22 nt, Human
agcagcacgaguccacaaaucc

SEQ ID NO: 495205 - RNA, 22 nt, Human
uacacacaugcauuugccuuau

SEQ ID NO: 495206 - RNA, 22 nt, Human
uggcaaggcugugggggcagag

SEQ ID NO: 495207 - RNA, 22 nt, Human
agccccuugcacuuccccacgc

SEQ ID NO: 495208 - RNA, 22 nt, Human
cagggcucaccacugggauccu

SEQ ID NO: 495209 - RNA, 22 nt, Human
agcuccaggauaagacaggugc

SEQ ID NO: 495210 - RNA, 22 nt, Human
ugggaggcuuccagaccuugcu

SEQ ID NO: 495211 - RNA, 22 nt, Human
gagagcugucagcguagcaccg

SEQ ID NO: 495212 - RNA, 22 nt, Human
uacauucccccaauuaccaaug

SEQ ID NO: 495213 - RNA, 22 nt, Human
cagaggcgaggcagcugaaccu

SEQ ID NO: 495214 - RNA, 22 nt, Human
aggacuucuccgauaagucaga

SEQ ID NO: 495215 - RNA, 22 nt, Human
uggaaggcuuggaauacuucca

SEQ ID NO: 495216 - RNA, 22 nt, Human
uauuucuguaugcauaaaagga

SEQ ID NO: 495217 - RNA, 22 nt, Human
uguggccuccuguuccugggua

SEQ ID NO: 495218 - RNA, 22 nt, Human
aggggagaauuucaacucaggu

SEQ ID NO: 495219 - RNA, 22 nt, Human
acauuuaaauaccuauguuucu

SEQ ID NO: 495220 - RNA, 22 nt, Human
ucaauauucuucuuuaguagga

SEQ ID NO: 495221 - RNA, 22 nt, Human
ggagccugagcggcccagggcc

SEQ ID NO: 495222 - RNA, 22 nt, Human
uguuccaauaaggaguugaaau

SEQ ID NO: 495223 - RNA, 22 nt, Human
uggagaauggaauguugugcag

SEQ ID NO: 495224 - RNA, 22 nt, Human
accaagcucucuucccggcucu

SEQ ID NO: 495225 - RNA, 22 nt, Human
caaaugcaugagaaauaagagg

SEQ ID NO: 495226 - RNA, 22 nt, Human
cccuggaguccggagcucaccu

SEQ ID NO: 495227 - RNA, 22 nt, Human
ugcugaggagguggcugugcuu

SEQ ID NO: 495228 - RNA, 21 nt, Human
cucuggaguuugaaggcuggg

SEQ ID NO: 495229 - RNA, 22 nt, Human
auggacagugugucuguuucca

SEQ ID NO: 495230 - RNA, 22 nt, Human
ucccuggcagcuaagggugguc

SEQ ID NO: 495231 - RNA, 22 nt, Human
gagccaggggucagcuccgagg

SEQ ID NO: 495232 - RNA, 19 nt, Human
ucucugcuucucuuggcau

SEQ ID NO: 495233 - RNA, 23 nt, Human
auaugucaugcaccagcacuuua

SEQ ID NO: 495234 - RNA, 22 nt, Human
caagaacauugugaucacuuca

SEQ ID NO: 495235 - RNA, 22 nt, Human
agcagcugucccuuaacaucag

SEQ ID NO: 495236 - RNA, 22 nt, Human
gggcugacaguuuccccugaaa

SEQ ID NO: 495237 - RNA, 21 nt, Human
ggagucuguggaugcuguuuc

SEQ ID NO: 495238 - RNA, 22 nt, Human
gcagcauccuuggccuccaccc

SEQ ID NO: 495239 - RNA, 22 nt, Human
gcagacagcauguugggcuauu

SEQ ID NO: 495240 - RNA, 22 nt, Human
cagaaaugacaaaguaagagga

SEQ ID NO: 495241 - RNA, 22 nt, Human
cugcccugaccugccucagagu

SEQ ID NO: 495242 - RNA, 23 nt, Human
agcuuuggugaugugacagauaa

SEQ ID NO: 495243 - RNA, 22 nt, Human
agcagcauguugggaugugaaa

SEQ ID NO: 495244 - RNA, 22 nt, Human
cuuuauuccuacaagauuuucu

SEQ ID NO: 495245 - RNA, 22 nt, Human
ccugggcuuccacgagcagagg

SEQ ID NO: 495246 - RNA, 22 nt, Human
gugugcaugcauagacaccaca

SEQ ID NO: 495247 - RNA, 22 nt, Human
uucaauagaaaugacauucuuu

SEQ ID NO: 495248 - RNA, 22 nt, Human
uaggccaugcagcaaagaggcu

SEQ ID NO: 495249 - RNA, 22 nt, Human
uguauuagagcaguagaauuau

SEQ ID NO: 495250 - RNA, 22 nt, Human
acagccagggucucaggaggcg

SEQ ID NO: 495251 - RNA, 22 nt, Human
uuuaaaaucagaugggaguugg

SEQ ID NO: 495252 - RNA, 22 nt, Human
gugucaugggguuuguuauaca

SEQ ID NO: 495253 - RNA, 22 nt, Human
acuuaaaaacagauccagcagg

SEQ ID NO: 495254 - RNA, 22 nt, Human
gcugucacauuuggagcacugg

SEQ ID NO: 495255 - RNA, 22 nt, Human
gaggaaggcuaaggggcuuaga

SEQ ID NO: 495256 - RNA, 22 nt, Human
gguggcagucuuaagagaucuu

SEQ ID NO: 495257 - RNA, 22 nt, Human
gcugccugggcaggaggcgcug

SEQ ID NO: 495258 - RNA, 22 nt, Human
aggccucagugaucaucaucag

SEQ ID NO: 495259 - RNA, 19 nt, Human
uggcuuccugacucucauc

SEQ ID NO: 495260 - RNA, 22 nt, Human
agaggcucuaauaccagcaugg

SEQ ID NO: 495261 - RNA, 19 nt, Human
gggcccagcauggaggguu

SEQ ID NO: 495262 - RNA, 22 nt, Human
cugggucucuuaccaugugacu

SEQ ID NO: 495263 - RNA, 22 nt, Human
ugagcagaguuguuucuccuga

SEQ ID NO: 495264 - RNA, 22 nt, Human
aaagauguuaugaaauaacuau

SEQ ID NO: 495265 - RNA, 22 nt, Human
auaugugugaugcauggacuaa

SEQ ID NO: 495266 - RNA, 22 nt, Human
cucugugccucaguuuucuucu

SEQ ID NO: 495267 - RNA, 22 nt, Human
ucugugugguaguuucagugaa

SEQ ID NO: 495268 - RNA, 22 nt, Human
cagagaccccgcugcccuucug

SEQ ID NO: 495269 - RNA, 22 nt, Human
ugccuggaugugcuggccucac

SEQ ID NO: 495270 - RNA, 21 nt, Human
gcucaggcucuugacagagca

SEQ ID NO: 495271 - RNA, 22 nt, Human
auaacagacuuagaguuacaag

SEQ ID NO: 495272 - RNA, 22 nt, Human
ugggccaccugcucuguuucua

SEQ ID NO: 495273 - RNA, 22 nt, Human
cauuuguaguuaaaaaugucuc

SEQ ID NO: 495274 - RNA, 22 nt, Human
acagguggggaggcugagguuc

SEQ ID NO: 495275 - RNA, 22 nt, Human
uuagagccaguuacaaggucaa

SEQ ID NO: 495276 - RNA, 22 nt, Human
guacauguugguuguuuccagu

SEQ ID NO: 495277 - RNA, 22 nt, Human
caaaaguaauugugguuuuugc

SEQ ID NO: 495278 - RNA, 22 nt, Human
gcucagugcagccuuucuguau

SEQ ID NO: 495279 - RNA, 22 nt, Human
auacuguuuugugacuuaucuu

SEQ ID NO: 495280 - RNA, 22 nt, Human
auggagggaaaaguggagagcc

SEQ ID NO: 495281 - RNA, 22 nt, Human
agcagcucuggcacuguagcau

SEQ ID NO: 495282 - RNA, 22 nt, Human
ccuggagcacauggcaggaggc

SEQ ID NO: 495283 - RNA, 22 nt, Human
cuguaugaaauuaaguaaacag

SEQ ID NO: 495284 - RNA, 22 nt, Human
ccaccuccaccuauugccagcc

SEQ ID NO: 495285 - RNA, 22 nt, Human
gcaggagugacauggaugugga

SEQ ID NO: 495286 - RNA, 22 nt, Human
cucagcacuuuggaaggcugau

SEQ ID NO: 495287 - RNA, 22 nt, Human
caggaggagcauuagcgucuca

SEQ ID NO: 495288 - RNA, 22 nt, Human
cuccccagguucaggagguggg

SEQ ID NO: 495289 - RNA, 22 nt, Human
cuggaucuugcugcauugagaa

SEQ ID NO: 495290 - RNA, 22 nt, Human
guccuggaauccuagaacagug

SEQ ID NO: 495291 - RNA, 22 nt, Human
cagggcucccugcagccucugu

SEQ ID NO: 495292 - RNA, 19 nt, Human
cagaggccagaagcacagg

SEQ ID NO: 495293 - RNA, 22 nt, Human
cuuauguaugcuacuuuguggu

SEQ ID NO: 495294 - RNA, 21 nt, Human
ucagggcagugggagguuccu

SEQ ID NO: 495295 - RNA, 22 nt, Human
uagcacuauuuuucacuauccu

SEQ ID NO: 495296 - RNA, 22 nt, Human
aaugagcuagaccugcuuccuc

SEQ ID NO: 495297 - RNA, 22 nt, Human
gacagccaucagcacacgcugc

SEQ ID NO: 495298 - RNA, 22 nt, Human
cugggccugguguggcaccugc

SEQ ID NO: 495299 - RNA, 22 nt, Human
gaaacuuuuaaaccucaugagu

SEQ ID NO: 495300 - RNA, 22 nt, Human
aauuuacaguugcugaugguac

SEQ ID NO: 495301 - RNA, 22 nt, Human
gcugccuuuuaaagccucgcuu

SEQ ID NO: 495302 - RNA, 20 nt, Human
aacauugaaagucuagaaga

SEQ ID NO: 495303 - RNA, 22 nt, Human
uaauucagggccagaaucccca

SEQ ID NO: 495304 - RNA, 23 nt, Human
ccucagcauggcaggagcccagc

SEQ ID NO: 495305 - RNA, 22 nt, Human
ugucucaggcccaagccaguaa

SEQ ID NO: 495306 - RNA, 22 nt, Human
aucaggauuauuaaaucuggau

SEQ ID NO: 495307 - RNA, 22 nt, Human
uagcuuaaggaguaccagauca

SEQ ID NO: 495308 - RNA, 22 nt, Human
accauguuggccaagcuggucu

SEQ ID NO: 495309 - RNA, 22 nt, Human
cauuagggccaccauaacaaaa

SEQ ID NO: 495310 - RNA, 22 nt, Human
aaacaacuucugcacuaugggu

SEQ ID NO: 495311 - RNA, 22 nt, Human
guauuuuuaguagagucggggu

SEQ ID NO: 495312 - RNA, 22 nt, Human
ugagagggcccagagcacacca

SEQ ID NO: 495313 - RNA, 22 nt, Human
ccuggggaaaagcaggcauuua

SEQ ID NO: 495314 - RNA, 22 nt, Human
auuuuuuagaaccuggccugau

SEQ ID NO: 495315 - RNA, 22 nt, Human
ccucagugagaugcucagcgaa

SEQ ID NO: 495316 - RNA, 22 nt, Human
uacaugcaugucacagaaugaa

SEQ ID NO: 495317 - RNA, 22 nt, Human
acauucugugagucauguuuua

SEQ ID NO: 495318 - RNA, 22 nt, Human
uaggaaggaggccaucuuggcg

SEQ ID NO: 495319 - RNA, 22 nt, Human
ugacuggauugucauuacgacg

SEQ ID NO: 495320 - RNA, 19 nt, Human
cugggccagaaucagcuca

SEQ ID NO: 495321 - RNA, 21 nt, Human
ucuguacuuugcuuccaugcu

SEQ ID NO: 495322 - RNA, 22 nt, Human
gguugccggggcaggacuggaa

SEQ ID NO: 495323 - RNA, 22 nt, Human
ccuggaagauucaccacuacca

SEQ ID NO: 495324 - RNA, 22 nt, Human
aauuugauucccugcaccuguu

SEQ ID NO: 495325 - RNA, 21 nt, Human
aucuuuauuacgcagagaaga

SEQ ID NO: 495326 - RNA, 22 nt, Human
uuaaacauuuauggaggcagca

SEQ ID NO: 495327 - RNA, 22 nt, Human
cacuucaauuaacuucagcauu

SEQ ID NO: 495328 - RNA, 22 nt, Human
cuucuuaacuguauauacuaug

SEQ ID NO: 495329 - RNA, 22 nt, Human
gcuggcuggcgggugcguccuc

SEQ ID NO: 495330 - RNA, 22 nt, Human
agcuuccugaugcaagagggcu

SEQ ID NO: 495331 - RNA, 22 nt, Human
ucucccacagucucccauggcu

SEQ ID NO: 495332 - RNA, 22 nt, Human
gcuucucuggccugcagggcau

SEQ ID NO: 495333 - RNA, 22 nt, Human
gggcuggcgggaaaggcaauuc

SEQ ID NO: 495334 - RNA, 22 nt, Human
aagauucacagagugaaugaaa

SEQ ID NO: 495335 - RNA, 21 nt, Human
ucucccaaggagguccugagg

SEQ ID NO: 495336 - RNA, 22 nt, Human
acagggucauuuuaugaucugu

SEQ ID NO: 495337 - RNA, 22 nt, Human
gaggcaugcagagcuggagcag

SEQ ID NO: 495338 - RNA, 22 nt, Human
ugaggcagauauuuauuggguu

SEQ ID NO: 495339 - RNA, 22 nt, Human
ucugggcagccucaggccaggg

SEQ ID NO: 495340 - RNA, 22 nt, Human
cagcuucuuagucuuuccuugu

SEQ ID NO: 495341 - RNA, 22 nt, Human
ggcuccagaugucuccuggcaa

SEQ ID NO: 495342 - RNA, 22 nt, Human
gcaaagucugcaucuggaucag

SEQ ID NO: 495343 - RNA, 22 nt, Human
acauuucugcauguaggguaau

SEQ ID NO: 495344 - RNA, 22 nt, Human
uuccauuuauucuuguccagau

SEQ ID NO: 495345 - RNA, 22 nt, Human
gcacagcaauuucuauaagcuc

SEQ ID NO: 495346 - RNA, 22 nt, Human
uggaaggcaggaccugccuugg

SEQ ID NO: 495347 - RNA, 22 nt, Human
ugcaggcuauccuuugcugcaa

SEQ ID NO: 495348 - RNA, 22 nt, Human
augcuuuagugucaaguuuggg

SEQ ID NO: 495349 - RNA, 22 nt, Human
auucuuuuaagccccagggauu

SEQ ID NO: 495350 - RNA, 22 nt, Human
cagcugaacauguagagcaucu

SEQ ID NO: 495351 - RNA, 22 nt, Human
guaagggauuugaacauagguu

SEQ ID NO: 495352 - RNA, 22 nt, Human
cagaggcacagugcgggccacu

SEQ ID NO: 495353 - RNA, 22 nt, Human
uucacauuggugauauguuucu

SEQ ID NO: 495354 - RNA, 22 nt, Human
cugccagcacugccuccugagg

SEQ ID NO: 495355 - RNA, 22 nt, Human
ggagcuguguuauccauuccca

SEQ ID NO: 495356 - RNA, 22 nt, Human
caguacuuugaagauauuuuag

SEQ ID NO: 495357 - RNA, 22 nt, Human
ccugggagagucuguggucucc

SEQ ID NO: 495358 - RNA, 22 nt, Human
aaugugaacuuugucauguaac

SEQ ID NO: 495359 - RNA, 22 nt, Human
uguauuuucugaagauaaucaa

SEQ ID NO: 495360 - RNA, 22 nt, Human
cugcugugcagacagacucucu

SEQ ID NO: 495361 - RNA, 22 nt, Human
ccugcagguuucccccggacgg

SEQ ID NO: 495362 - RNA, 22 nt, Human
uaugcacauauaaccugcacug

SEQ ID NO: 495363 - RNA, 22 nt, Human
aauaucaguauauuguaucagu

SEQ ID NO: 495364 - RNA, 22 nt, Human
uuugcauuuauaaguuggugga

SEQ ID NO: 495365 - RNA, 19 nt, Human
agcaggcagguggcccagg

SEQ ID NO: 495366 - RNA, 22 nt, Human
gccuggagaauuaaaaggaagg

SEQ ID NO: 495367 - RNA, 22 nt, Human
ucagucuucccuccagugcaac

SEQ ID NO: 495368 - RNA, 22 nt, Human
aacagcauaccaauguacauau

SEQ ID NO: 495369 - RNA, 22 nt, Human
ccaaaguccauaguuuacuuua

SEQ ID NO: 495370 - RNA, 22 nt, Human
aacaaaugauaccaguucucaa

SEQ ID NO: 495371 - RNA, 22 nt, Human
cucccugugucuucacuuggcc

SEQ ID NO: 495372 - RNA, 22 nt, Human
uucagggacuuagugucaguuu

SEQ ID NO: 495373 - RNA, 22 nt, Human
ggagcugcuuugaucugaagaa

SEQ ID NO: 495374 - RNA, 22 nt, Human
cuuuuggccucaaaggaaagaa

SEQ ID NO: 495375 - RNA, 22 nt, Human
gaagagcuuagacagaaucaaa

SEQ ID NO: 495376 - RNA, 22 nt, Human
gcagccaccucccauggcgggg

SEQ ID NO: 495377 - RNA, 18 nt, Human
cucaggccuuucccugug

SEQ ID NO: 495378 - RNA, 22 nt, Human
cuggcucauccagguguugcuc

SEQ ID NO: 495379 - RNA, 22 nt, Human
gggcugcugccaaucacagccu

SEQ ID NO: 495380 - RNA, 17 nt, Human
cucugcagugcauggcu

SEQ ID NO: 495381 - RNA, 22 nt, Human
cuccugggcuucgaaggcuccc

SEQ ID NO: 495382 - RNA, 22 nt, Human
agagaaggucacuaaggaccca

SEQ ID NO: 495383 - RNA, 22 nt, Human
cagagcuguccaaacccugaca

SEQ ID NO: 495384 - RNA, 22 nt, Human
aggucaaggcugcagugagcug

SEQ ID NO: 495385 - RNA, 22 nt, Human
ccaggccuccugugaguggacc

SEQ ID NO: 495386 - RNA, 22 nt, Human
ugguccaggcacccuucuagag

SEQ ID NO: 495387 - RNA, 19 nt, Human
gagcagcuuccuaucuggu

SEQ ID NO: 495388 - RNA, 20 nt, Human
ucagugauuuugaagaggaa

SEQ ID NO: 495389 - RNA, 22 nt, Human
ugucugaaggcagguggagaac

SEQ ID NO: 495390 - RNA, 22 nt, Human
uggagagcacaguuccugcuuc

SEQ ID NO: 495391 - RNA, 22 nt, Human
cagccugcuagggcaaugccuu

SEQ ID NO: 495392 - RNA, 22 nt, Human
gagucuggcccugaugcaucau

SEQ ID NO: 495393 - RNA, 22 nt, Human
ugcacuagccacauuucaaaug

SEQ ID NO: 495394 - RNA, 22 nt, Human
agcuuuagagagccaagacuca

SEQ ID NO: 495395 - RNA, 19 nt, Human
augauacaggugaaaauug

SEQ ID NO: 495396 - RNA, 22 nt, Human
ccaggucccuggaauuuaugag

SEQ ID NO: 495397 - RNA, 22 nt, Human
cuuagcagaauuccaagcuuga

SEQ ID NO: 495398 - RNA, 22 nt, Human
cagcugaguguuggcauguuca

SEQ ID NO: 495399 - RNA, 18 nt, Human
ggcaggcucucuggguca

SEQ ID NO: 495400 - RNA, 22 nt, Human
ucagaaauuuucucaguaguuc

SEQ ID NO: 495401 - RNA, 22 nt, Human
agccucucuuuauucccagcua

SEQ ID NO: 495402 - RNA, 22 nt, Human
cagcauggcuugaguguuuccu

SEQ ID NO: 495403 - RNA, 22 nt, Human
aucaaauacaaagggcauaagg

SEQ ID NO: 495404 - RNA, 21 nt, Human
agcagcaucagccucaccuga

SEQ ID NO: 495405 - RNA, 19 nt, Human
uucccagagccaugaguga

SEQ ID NO: 495406 - RNA, 22 nt, Human
gucccugguuugcccaggacca

SEQ ID NO: 495407 - RNA, 20 nt, Human
ccuguucacugcgcaguuuc

SEQ ID NO: 495408 - RNA, 22 nt, Human
acauuucuauagugcaucuguu

SEQ ID NO: 495409 - RNA, 22 nt, Human
uccaucauggcagcagcaguga

SEQ ID NO: 495410 - RNA, 22 nt, Human
aucagcaagauguaauuucuau

SEQ ID NO: 495411 - RNA, 22 nt, Human
gcugcccaggguggagccggcu

SEQ ID NO: 495412 - RNA, 22 nt, Human
gggaucugggacaacagguggu

SEQ ID NO: 495413 - RNA, 19 nt, Human
uguggucucuguucucagg

SEQ ID NO: 495414 - RNA, 21 nt, Human
gccauuguuuucuaccuggag

SEQ ID NO: 495415 - RNA, 22 nt, Human
acuugaaaagcucagcaguagu

SEQ ID NO: 495416 - RNA, 22 nt, Human
ggccugcugacccaaguccugu

SEQ ID NO: 495417 - RNA, 22 nt, Human
gcagagcccuggggguauggug

SEQ ID NO: 495418 - RNA, 22 nt, Human
aguacagaccugucucuuccug

SEQ ID NO: 495419 - RNA, 22 nt, Human
augaagcuaaacccugcagcca

SEQ ID NO: 495420 - RNA, 22 nt, Human
gcugggcuccaggccaggguga

SEQ ID NO: 495421 - RNA, 22 nt, Human
guuccuuguaauuuguuaagga

SEQ ID NO: 495422 - RNA, 20 nt, Human
aggaggggauagaaucaaag

SEQ ID NO: 495423 - RNA, 22 nt, Human
gguggccauaggaccagccugg

SEQ ID NO: 495424 - RNA, 22 nt, Human
ucaggagcagcaugggugagag

SEQ ID NO: 495425 - RNA, 22 nt, Human
agaaggguucaggaauauguua

SEQ ID NO: 495426 - RNA, 22 nt, Human
ggcagaguggagugcggccucc

SEQ ID NO: 495427 - RNA, 22 nt, Human
uuagcauucugccuccuauauc

SEQ ID NO: 495428 - RNA, 22 nt, Human
guccagggaaauagcgacaggg

SEQ ID NO: 495429 - RNA, 22 nt, Human
ucagaggccugaaagaauuugg

SEQ ID NO: 495430 - RNA, 22 nt, Human
uuccagagaaaagguuuauuuc

SEQ ID NO: 495431 - RNA, 22 nt, Human
agaggagugggaagcagugcaa

SEQ ID NO: 495432 - RNA, 22 nt, Human
ccaaaccauccaucuccaggcu

SEQ ID NO: 495433 - RNA, 22 nt, Human
cagaggcucuuccucacugccc

SEQ ID NO: 495434 - RNA, 22 nt, Human
acagagagaaacaaucagcagc

SEQ ID NO: 495435 - RNA, 22 nt, Human
gaggcacagaguaggugcacac

SEQ ID NO: 495436 - RNA, 22 nt, Human
gccugggaacucugaucuccug

SEQ ID NO: 495437 - RNA, 22 nt, Human
gcugaaguugccuauuuuaaua

SEQ ID NO: 495438 - RNA, 22 nt, Human
uuucaucugugcugccaagacu

SEQ ID NO: 495439 - RNA, 22 nt, Human
ggcucugcagugacuugagggg

SEQ ID NO: 495440 - RNA, 22 nt, Human
gggcuggcaucaguugccgaga

SEQ ID NO: 495441 - RNA, 22 nt, Human
augaaaugagucaaugcgacua

SEQ ID NO: 495442 - RNA, 22 nt, Human
uggcccugcuggccaaaggcua

SEQ ID NO: 495443 - RNA, 22 nt, Human
uuuguugaguuacagagaugaa

SEQ ID NO: 495444 - RNA, 22 nt, Human
ccacacagucaguuuccaagaa

SEQ ID NO: 495445 - RNA, 22 nt, Human
aaauagacaggcuuaaauagga

SEQ ID NO: 495446 - RNA, 22 nt, Human
uagauaaauuagaaaguuuacu

SEQ ID NO: 495447 - RNA, 22 nt, Human
uagcagcuaccuggcuaagagu

SEQ ID NO: 495448 - RNA, 22 nt, Human
cagcagcuacuuggagcagcag

SEQ ID NO: 495449 - RNA, 22 nt, Human
aggaccugccaggugcaaagca

SEQ ID NO: 495450 - RNA, 22 nt, Human
caccagcagaagacugagggug

SEQ ID NO: 495451 - RNA, 22 nt, Human
aaagacuuggcuuaugauuugc

SEQ ID NO: 495452 - RNA, 22 nt, Human
auguacaggauggugcucaucu

SEQ ID NO: 495453 - RNA, 22 nt, Human
uuguuacagcagugauuucaga

SEQ ID NO: 495454 - RNA, 19 nt, Human
ugcauaaauuauauacuuu

SEQ ID NO: 495455 - RNA, 22 nt, Human
ucagccugcuccaagugcugcc

SEQ ID NO: 495456 - RNA, 22 nt, Human
cccaggcugugcaaacuucaaa

SEQ ID NO: 495457 - RNA, 20 nt, Human
auaauuuacccugcaccacu

SEQ ID NO: 495458 - RNA, 22 nt, Human
acuuggagagcauugcugggga

SEQ ID NO: 495459 - RNA, 22 nt, Human
ugcauuaugcuacccagaagcu

SEQ ID NO: 495460 - RNA, 22 nt, Human
gcagagccugugucugagcaaa

SEQ ID NO: 495461 - RNA, 22 nt, Human
uacagcacugugcauagugguu

SEQ ID NO: 495462 - RNA, 22 nt, Human
uuugcaaaugcucugcagagcu

SEQ ID NO: 495463 - RNA, 22 nt, Human
cccagggcuuuucucacuagac

SEQ ID NO: 495464 - RNA, 22 nt, Human
aggugcaguguuuaaaaguagc

SEQ ID NO: 495465 - RNA, 22 nt, Human
ccacagaaccucagcuuugagc

SEQ ID NO: 495466 - RNA, 22 nt, Human
cuggaggagcauggacuggagu

SEQ ID NO: 495467 - RNA, 22 nt, Human
gcagcuuucuuuuugcaugucu

SEQ ID NO: 495468 - RNA, 22 nt, Human
ccugccuggagcugagugugga

SEQ ID NO: 495469 - RNA, 22 nt, Human
gaaggaaaaauacucuguaagg

SEQ ID NO: 495470 - RNA, 23 nt, Human
uugaaagguagcuggcagcuaga

SEQ ID NO: 495471 - RNA, 22 nt, Human
acacauacauggggaagaugag

SEQ ID NO: 495472 - RNA, 21 nt, Human
auggccacuauggugcagcag

SEQ ID NO: 495473 - RNA, 22 nt, Human
gcccucucuucugcagccucca

SEQ ID NO: 495474 - RNA, 22 nt, Human
ggcagggucuggacugaaagcu

SEQ ID NO: 495475 - RNA, 22 nt, Human
ugaaaugagauaauuuaagugc

SEQ ID NO: 495476 - RNA, 22 nt, Human
uauguacagggauagaacuuga

SEQ ID NO: 495477 - RNA, 22 nt, Human
augcccuggacuucuaguauuc

SEQ ID NO: 495478 - RNA, 22 nt, Human
uuucuacagguugauggguuug

SEQ ID NO: 495479 - RNA, 22 nt, Human
accaggcagagcugggccuuaa

SEQ ID NO: 495480 - RNA, 22 nt, Human
uuauuuugccacaggugaccuu

SEQ ID NO: 495481 - RNA, 22 nt, Human
agccuccaucucccaucuguga

SEQ ID NO: 495482 - RNA, 22 nt, Human
ugagcuggcaggggcucaggga

SEQ ID NO: 495483 - RNA, 22 nt, Human
ccagguguuuggccugcaugau

SEQ ID NO: 495484 - RNA, 22 nt, Human
gaaguagaaagccucguaaaua

SEQ ID NO: 495485 - RNA, 22 nt, Human
uuacagcagugggaaggaguca

SEQ ID NO: 495486 - RNA, 21 nt, Human
acagcagacaggcuuaggacc

SEQ ID NO: 495487 - RNA, 22 nt, Human
ugguccagaagauauucaacca

SEQ ID NO: 495488 - RNA, 22 nt, Human
uucaggauccccaccgcguuua

SEQ ID NO: 495489 - RNA, 22 nt, Human
acagaguaucuaucaggaguau

SEQ ID NO: 495490 - RNA, 22 nt, Human
aauuucaaacuaauaggaacca

SEQ ID NO: 495491 - RNA, 22 nt, Human
gcaggucuggcauagagccugc

SEQ ID NO: 495492 - RNA, 22 nt, Human
aggcaggcccucuggaaaggua

SEQ ID NO: 495493 - RNA, 22 nt, Human
uguggcugcagacacuggagcc

SEQ ID NO: 495494 - RNA, 22 nt, Human
agaaaaaucuuggcgcuugucu

SEQ ID NO: 495495 - RNA, 22 nt, Human
uccuuagccggagcagcucauc

SEQ ID NO: 495496 - RNA, 18 nt, Human
aggucugaggaagagccu

SEQ ID NO: 495497 - RNA, 22 nt, Human
aagcuggagaguuaggugaaua

SEQ ID NO: 495498 - RNA, 22 nt, Human
gcagcguggggacaggagcuca

SEQ ID NO: 495499 - RNA, 22 nt, Human
aucuugugcugacaaaacacau

SEQ ID NO: 495500 - RNA, 22 nt, Human
cugggcucagcaggccaaggcc

SEQ ID NO: 495501 - RNA, 22 nt, Human
uggagcaggugggaugucguga

SEQ ID NO: 495502 - RNA, 22 nt, Human
acugggccaggugugggugagu

SEQ ID NO: 495503 - RNA, 19 nt, Human
aguggcugggcagaagcaa

SEQ ID NO: 495504 - RNA, 22 nt, Human
acagcuuuguguuaaugggaag

SEQ ID NO: 495505 - RNA, 22 nt, Human
gcccucagaguuccccacagug

SEQ ID NO: 495506 - RNA, 19 nt, Human
cugaggcccauguaccaug

SEQ ID NO: 495507 - RNA, 22 nt, Human
uuguuacaucuuauguaagugg

SEQ ID NO: 495508 - RNA, 22 nt, Human
cagcuccugcagcugcugccgu

SEQ ID NO: 495509 - RNA, 22 nt, Human
cccagugucugggccugcaggg

SEQ ID NO: 495510 - RNA, 22 nt, Human
ccaggcagcaaauuuucugaau

SEQ ID NO: 495511 - RNA, 22 nt, Human
ucagcaguggcucucaugcagu

SEQ ID NO: 495512 - RNA, 22 nt, Human
ugauacauaaaccaucauuuug

SEQ ID NO: 495513 - RNA, 22 nt, Human
ccagugugaaccucaccacccu

SEQ ID NO: 495514 - RNA, 22 nt, Human
gagcugugacacgcagcccagg

SEQ ID NO: 495515 - RNA, 22 nt, Human
aucuggcuccuacacuugaaga

SEQ ID NO: 495516 - RNA, 19 nt, Human
cucucagccugucuccuug

SEQ ID NO: 495517 - RNA, 22 nt, Human
ugcaggcucaucucaagaguag

SEQ ID NO: 495518 - RNA, 19 nt, Human
aggcagcauucuggggcuu

SEQ ID NO: 495519 - RNA, 21 nt, Human
uuucuaaggaggaagaaaaga

SEQ ID NO: 495520 - RNA, 22 nt, Human
gaggaaaaugcaacaggaaugc

SEQ ID NO: 495521 - RNA, 23 nt, Human
auuugagaaaguauuuuuaagac

SEQ ID NO: 495522 - RNA, 22 nt, Human
accagggcagccgagguguguc

SEQ ID NO: 495523 - RNA, 22 nt, Human
auaucacaguaguuguuuaguu

SEQ ID NO: 495524 - RNA, 22 nt, Human
acucucagaggguggcagcaau

SEQ ID NO: 495525 - RNA, 22 nt, Human
uguccagguggccucugcugcu

SEQ ID NO: 495526 - RNA, 22 nt, Human
cucugaggcuccaugcaggcuu

SEQ ID NO: 495527 - RNA, 22 nt, Human
aagggcucugugugccucccca

SEQ ID NO: 495528 - RNA, 22 nt, Human
caggaaauugcaacagucugag

SEQ ID NO: 495529 - RNA, 22 nt, Human
uggacaacauagugagaccuca

SEQ ID NO: 495530 - RNA, 22 nt, Human
agaauuuuugauuaucuacucg

SEQ ID NO: 495531 - RNA, 22 nt, Human
uccugccucuccaugcuaacua

SEQ ID NO: 495532 - RNA, 22 nt, Human
aaaaccaggcguuuccuauuau

SEQ ID NO: 495533 - RNA, 22 nt, Human
ccucugggccagccuggacccu

SEQ ID NO: 495534 - RNA, 20 nt, Human
gcugggcuaccacuggcccu

SEQ ID NO: 495535 - RNA, 22 nt, Human
caaaaguaccuugugugcuuug

SEQ ID NO: 495536 - RNA, 22 nt, Human
cugcagcuccccugagaucaag

SEQ ID NO: 495537 - RNA, 23 nt, Human
cuacaagagcaagcauggacaag

SEQ ID NO: 495538 - RNA, 22 nt, Human
gcaugcugcaccagagccucuc

SEQ ID NO: 495539 - RNA, 22 nt, Human
ucagagcuuaucucuugcugga

SEQ ID NO: 495540 - RNA, 22 nt, Human
aggcuaggcugaugccucuucc

SEQ ID NO: 495541 - RNA, 21 nt, Human
gcaggguccuuuccauuccua

SEQ ID NO: 495542 - RNA, 22 nt, Human
ggccucucauguccugggcuuc

SEQ ID NO: 495543 - RNA, 22 nt, Human
aguuacuuucugaucagugugu

SEQ ID NO: 495544 - RNA, 22 nt, Human
cuggagcuuauugggagcagaa

SEQ ID NO: 495545 - RNA, 22 nt, Human
acccucaugaagcuggccugga

SEQ ID NO: 495546 - RNA, 18 nt, Human
uccagagguguuggagcc

SEQ ID NO: 495547 - RNA, 22 nt, Human
guggcagggugcucaucaugca

SEQ ID NO: 495548 - RNA, 22 nt, Human
gccaggcauuuguuaggugcug

SEQ ID NO: 495549 - RNA, 22 nt, Human
gaggcagaggaagguggucucu

SEQ ID NO: 495550 - RNA, 22 nt, Human
gcugucaggccaugugggccuu

SEQ ID NO: 495551 - RNA, 22 nt, Human
uacaggcccauagucccugcuu

SEQ ID NO: 495552 - RNA, 22 nt, Human
aggcagcugaccacaguaugau

SEQ ID NO: 495553 - RNA, 22 nt, Human
augcuuggaugcugccauggga

SEQ ID NO: 495554 - RNA, 19 nt, Human
ugcagcucagggcaggggc

SEQ ID NO: 495555 - RNA, 22 nt, Human
cacugcagcaccaugcagggcu

SEQ ID NO: 495556 - RNA, 22 nt, Human
agagccaguuacaacuguggag

SEQ ID NO: 495557 - RNA, 22 nt, Human
uaaagcauguguuagaagugca

SEQ ID NO: 495558 - RNA, 22 nt, Human
ggaccugccagaacucaggcua

SEQ ID NO: 495559 - RNA, 22 nt, Human
gcugcucugcuguguaagcagg

SEQ ID NO: 495560 - RNA, 22 nt, Human
gccaggucuggguagcagagga

SEQ ID NO: 495561 - RNA, 22 nt, Human
ucaaucacguguuccauguucu

SEQ ID NO: 495562 - RNA, 22 nt, Human
acuguguccuauuuccuugaca

SEQ ID NO: 495563 - RNA, 22 nt, Human
aaauauaauuucugccucaaua

SEQ ID NO: 495564 - RNA, 22 nt, Human
aggccagaaauuuggaguaugu

SEQ ID NO: 495565 - RNA, 22 nt, Human
gggcuggugaggcugcccugca

SEQ ID NO: 495566 - RNA, 22 nt, Human
guugaaaguagaugcuauuugg

SEQ ID NO: 495567 - RNA, 22 nt, Human
augucuuucgcaucaguagcua

SEQ ID NO: 495568 - RNA, 22 nt, Human
aagauguuaaaucuguagaauu

SEQ ID NO: 495569 - RNA, 22 nt, Human
uuacaaagaaaauuaggcauuu

SEQ ID NO: 495570 - RNA, 22 nt, Human
cagggaggaugggcuguuuugc

SEQ ID NO: 495571 - RNA, 22 nt, Human
uuuacaaguuuacagaaugaug

SEQ ID NO: 495572 - RNA, 22 nt, Human
acacagaugcauuacacaucua

SEQ ID NO: 495573 - RNA, 22 nt, Human
uguguucaguaugacauucaca

SEQ ID NO: 495574 - RNA, 22 nt, Human
ccuggggccccgagccagaagc

SEQ ID NO: 495575 - RNA, 22 nt, Human
ccucccugggugacgggcuccu

SEQ ID NO: 495576 - RNA, 22 nt, Human
auuagggaaggauuuggccuga

SEQ ID NO: 495577 - RNA, 22 nt, Human
uggguagaggaauugggcuacc

SEQ ID NO: 495578 - RNA, 22 nt, Human
ugcagggaaagggcacugggcu

SEQ ID NO: 495579 - RNA, 22 nt, Human
ucaguuucacagucugugcaga

SEQ ID NO: 495580 - RNA, 17 nt, Human
gagcagggaugcgguuc

SEQ ID NO: 495581 - RNA, 22 nt, Human
ccugggucccaucccagaguga

SEQ ID NO: 495582 - RNA, 22 nt, Human
guuaauuugcagcuuucgagcu

SEQ ID NO: 495583 - RNA, 22 nt, Human
gcugggaggcagcaccuuuagc

SEQ ID NO: 495584 - RNA, 22 nt, Human
augagcuucccagacaggaugg

SEQ ID NO: 495585 - RNA, 22 nt, Human
ugcuuaaacccugaucaugugu

SEQ ID NO: 495586 - RNA, 22 nt, Human
ggcauggcuggguucuggugag

SEQ ID NO: 495587 - RNA, 22 nt, Human
ggccagagagcagccaggauuc

SEQ ID NO: 495588 - RNA, 20 nt, Human
cugggccauccuuuuacaau

SEQ ID NO: 495589 - RNA, 22 nt, Human
acuaaaguccuguuguagcaua

SEQ ID NO: 495590 - RNA, 22 nt, Human
cagagguagaaggcaugcagug

SEQ ID NO: 495591 - RNA, 22 nt, Human
cagcugaguuuccaagucugcc

SEQ ID NO: 495592 - RNA, 22 nt, Human
agcaguggcuggauggugugcu

SEQ ID NO: 495593 - RNA, 22 nt, Human
gaguuaaaggcaguugaggaaa

SEQ ID NO: 495594 - RNA, 22 nt, Human
aaggaaagauucucucucuaga

SEQ ID NO: 495595 - RNA, 22 nt, Human
gcugcuuccuuuccugcugacc

SEQ ID NO: 495596 - RNA, 22 nt, Human
aaacuucauggauaauauaaag

SEQ ID NO: 495597 - RNA, 21 nt, Human
auuuucauuuccaggggagga

SEQ ID NO: 495598 - RNA, 18 nt, Human
cagaaguccuucaaggcc

SEQ ID NO: 495599 - RNA, 22 nt, Human
ggggcuguugaaguuaguugag

SEQ ID NO: 495600 - RNA, 23 nt, Human
agggcuccuuguugauuagcauu

SEQ ID NO: 495601 - RNA, 21 nt, Human
cgggcuggccgggcccucacc

SEQ ID NO: 495602 - RNA, 22 nt, Human
gaauauuuguaauuacuguuga

SEQ ID NO: 495603 - RNA, 22 nt, Human
cagauguaguagcuuuauugca

SEQ ID NO: 495604 - RNA, 22 nt, Human
cugccaaggcuggggaggacaa

SEQ ID NO: 495605 - RNA, 22 nt, Human
gggcagggguagcauuccaagu

SEQ ID NO: 495606 - RNA, 22 nt, Human
gggcugcuguagagaacauguu

SEQ ID NO: 495607 - RNA, 22 nt, Human
agucacaugcauuuucuucaau

SEQ ID NO: 495608 - RNA, 22 nt, Human
aaacagauaaugcuauaaaugg

SEQ ID NO: 495609 - RNA, 22 nt, Human
acacaucucaggggacacucuc

SEQ ID NO: 495610 - RNA, 22 nt, Human
auccuggguaaguuccuuuuaa

SEQ ID NO: 495611 - RNA, 22 nt, Human
aggaaggagggcagauauuaag

SEQ ID NO: 495612 - RNA, 22 nt, Human
ggcuccugggaugggacugagc

SEQ ID NO: 495613 - RNA, 15 nt, Human
ccaggcucugcacuc

SEQ ID NO: 495614 - RNA, 22 nt, Human
aaacagcugcacugcugauguc

SEQ ID NO: 495615 - RNA, 22 nt, Human
auuugucuuugagugcccugcu

SEQ ID NO: 495616 - RNA, 22 nt, Human
aguggcugcuaugaucaggaca

SEQ ID NO: 495617 - RNA, 22 nt, Human
gucaccagucccagcuccugaa

SEQ ID NO: 495618 - RNA, 22 nt, Human
cugggaaguagaaucagaugag

SEQ ID NO: 495619 - RNA, 22 nt, Human
auugauaucaguuugcugauug

SEQ ID NO: 495620 - RNA, 22 nt, Human
cauguguuaaucuuucugcaaa

SEQ ID NO: 495621 - RNA, 22 nt, Human
acagccauagaugcuuauguaa

SEQ ID NO: 495622 - RNA, 20 nt, Human
cucucccagcacagcuuccu

SEQ ID NO: 495623 - RNA, 22 nt, Human
ucugagggugggagaaggagcu

SEQ ID NO: 495624 - RNA, 22 nt, Human
guaugcaucgacucaagucuga

SEQ ID NO: 495625 - RNA, 22 nt, Human
accaaggagaaggugcaagcuu

SEQ ID NO: 495626 - RNA, 22 nt, Human
aagagggcugcaaucuuauugc

SEQ ID NO: 495627 - RNA, 22 nt, Human
caggagcucuuaaggaugugau

SEQ ID NO: 495628 - RNA, 22 nt, Human
acagcucugagauauuacuauu

SEQ ID NO: 495629 - RNA, 22 nt, Human
agagcaucuaacacauaagccu

SEQ ID NO: 495630 - RNA, 22 nt, Human
ugggccacugcugcggaaggcg

SEQ ID NO: 495631 - RNA, 22 nt, Human
gucccugcaucaccacgggacu

SEQ ID NO: 495632 - RNA, 22 nt, Human
ugaagacucagaagcuaagaua

SEQ ID NO: 495633 - RNA, 22 nt, Human
cuccaggccauggcugcggagg

SEQ ID NO: 495634 - RNA, 22 nt, Human
agagccaggcggcugggcaccu

SEQ ID NO: 495635 - RNA, 22 nt, Human
uggagggauacaaagaugaaaa

SEQ ID NO: 495636 - RNA, 17 nt, Human
ucagcauacacagagaa

SEQ ID NO: 495637 - RNA, 22 nt, Human
uacauguaagacaugagacucu

SEQ ID NO: 495638 - RNA, 22 nt, Human
gcagugugaccgagcuugcuuc

SEQ ID NO: 495639 - RNA, 18 nt, Human
ggacaucaucaggugcuu

SEQ ID NO: 495640 - RNA, 20 nt, Human
ucauuguguugccaauuccc

SEQ ID NO: 495641 - RNA, 22 nt, Human
aggcuuuggggcauucuguguu

SEQ ID NO: 495642 - RNA, 22 nt, Human
gcaggaguguauuugcauguaa

SEQ ID NO: 495643 - RNA, 22 nt, Human
uuuaauuuguauuucuagaggg

SEQ ID NO: 495644 - RNA, 22 nt, Human
agucacuguucugucaugucaa

SEQ ID NO: 495645 - RNA, 19 nt, Human
aaugacugaguacauuguc

SEQ ID NO: 495646 - RNA, 22 nt, Human
uuggcuuccaggaucucagcag

SEQ ID NO: 495647 - RNA, 22 nt, Human
ccuguguggaaaccgcaugacg

SEQ ID NO: 495648 - RNA, 20 nt, Human
cucaggauacugcaaaguug

SEQ ID NO: 495649 - RNA, 22 nt, Human
uggcugccuagugucugagcag

SEQ ID NO: 495650 - RNA, 22 nt, Human
aagugagugaaaaugcagaaua

SEQ ID NO: 495651 - RNA, 22 nt, Human
cacagauaccuagugaaacaua

SEQ ID NO: 495652 - RNA, 22 nt, Human
uggcuuucucccccagcuucuc

SEQ ID NO: 495653 - RNA, 22 nt, Human
cugggccuccucugcccaagcu

SEQ ID NO: 495654 - RNA, 21 nt, Human
uagcuuuaauauucccacauu

SEQ ID NO: 495655 - RNA, 22 nt, Human
gcagcugagagaagaacagggc

SEQ ID NO: 495656 - RNA, 22 nt, Human
acucugggaauccucaccuucc

SEQ ID NO: 495657 - RNA, 22 nt, Human
ugccacagaggugaagcccacu

SEQ ID NO: 495658 - RNA, 22 nt, Human
ccaggaagguaugggaagaaaa

SEQ ID NO: 495659 - RNA, 22 nt, Human
cagcucuggggcagagugacua

SEQ ID NO: 495660 - RNA, 22 nt, Human
uccuucagccaugggcucucca

SEQ ID NO: 495661 - RNA, 22 nt, Human
uucaggauucucucccauuuac

SEQ ID NO: 495662 - RNA, 22 nt, Human
aaguucaaggugauaguggcag

SEQ ID NO: 495663 - RNA, 22 nt, Human
ggucccugguucccucugagcu

SEQ ID NO: 495664 - RNA, 22 nt, Human
cagcucuguugcccuggaaacg

SEQ ID NO: 495665 - RNA, 22 nt, Human
accuuuuuucagaacucuaaag

SEQ ID NO: 495666 - RNA, 22 nt, Human
cagggcuucgauggauggaugg

SEQ ID NO: 495667 - RNA, 22 nt, Human
ccuggccaguuuccaggcccug

SEQ ID NO: 495668 - RNA, 22 nt, Human
gcacagaaccagacaugaggca

SEQ ID NO: 495669 - RNA, 22 nt, Human
ggcugcccucgucuacugccca

SEQ ID NO: 495670 - RNA, 22 nt, Human
acaguguuuuagaaaagcuuga

SEQ ID NO: 495671 - RNA, 22 nt, Human
aggcagagcugauguucuguga

SEQ ID NO: 495672 - RNA, 22 nt, Human
cacagcuucccgugcauggaga

SEQ ID NO: 495673 - RNA, 22 nt, Human
ucucuggccgagagucccuggg

SEQ ID NO: 495674 - RNA, 22 nt, Human
auuucuguauccugcugucaga

SEQ ID NO: 495675 - RNA, 22 nt, Human
uccugcagagccgcccucaggu

SEQ ID NO: 495676 - RNA, 22 nt, Human
cauuugcucugugucaguggca

SEQ ID NO: 495677 - RNA, 22 nt, Human
uccagacccaugacccugggga

SEQ ID NO: 495678 - RNA, 22 nt, Human
aguuuacauaaaaaggcagagg

SEQ ID NO: 495679 - RNA, 22 nt, Human
agccuccaucccaugcacaaag

SEQ ID NO: 495680 - RNA, 22 nt, Human
aaaugcagaucccugaaucuca

SEQ ID NO: 495681 - RNA, 22 nt, Human
ccaucagcuccaguaucuucug

SEQ ID NO: 495682 - RNA, 22 nt, Human
uuguccugaggacuguuaucag

SEQ ID NO: 495683 - RNA, 22 nt, Human
ggaagaagggucauuggcagcc

SEQ ID NO: 495684 - RNA, 22 nt, Human
cugggccaugggccagcgaggc

SEQ ID NO: 495685 - RNA, 22 nt, Human
uaccugcacagccagccaugug

SEQ ID NO: 495686 - RNA, 22 nt, Human
ccugggcucaccaugccuugga

SEQ ID NO: 495687 - RNA, 22 nt, Human
cuguggcuggcucaucauaggu

SEQ ID NO: 495688 - RNA, 20 nt, Human
acaguguuaguuaucaucuc

SEQ ID NO: 495689 - RNA, 22 nt, Human
cccccagccagcagugcucagc

SEQ ID NO: 495690 - RNA, 22 nt, Human
aucacauugccagugauuaccc

SEQ ID NO: 495691 - RNA, 19 nt, Human
uugaaauuguuugauaugg

SEQ ID NO: 495692 - RNA, 22 nt, Human
gagagugagauccuccugggga

SEQ ID NO: 495693 - RNA, 18 nt, Human
ugggcugccuggccucug

SEQ ID NO: 495694 - RNA, 22 nt, Human
uaguacaguuuuggcacaugga

SEQ ID NO: 495695 - RNA, 22 nt, Human
ccugggcugcaugauggcauuu

SEQ ID NO: 495696 - RNA, 22 nt, Human
cuccccaagccuuggcuucucc

SEQ ID NO: 495697 - RNA, 22 nt, Human
guuauauauaguauuucucuga

SEQ ID NO: 495698 - RNA, 22 nt, Human
ggggcuguuuuuggaauggcug

SEQ ID NO: 495699 - RNA, 22 nt, Human
uccaggagguagugcuuaauuu

SEQ ID NO: 495700 - RNA, 22 nt, Human
uccuggcucuucugaguuuucu

SEQ ID NO: 495701 - RNA, 22 nt, Human
caauuucuggaacuaauucuga

SEQ ID NO: 495702 - RNA, 22 nt, Human
auuuguuuaucgucgauuguag

SEQ ID NO: 495703 - RNA, 22 nt, Human
cagcucuguugccaaagugggc

SEQ ID NO: 495704 - RNA, 22 nt, Human
acuugcauuauauuuaucacaa

SEQ ID NO: 495705 - RNA, 22 nt, Human
cagggcagagggaaacuccuuu

SEQ ID NO: 495706 - RNA, 21 nt, Human
cucugcagugcccaccuugcc

SEQ ID NO: 495707 - RNA, 22 nt, Human
acucuggguccugccauucacu

SEQ ID NO: 495708 - RNA, 21 nt, Human
agagaagaggacuuucucaca

SEQ ID NO: 495709 - RNA, 22 nt, Human
ucacagccuggacaguugccug

SEQ ID NO: 495710 - RNA, 22 nt, Human
uuuaaagugcugcuccuauccu

SEQ ID NO: 495711 - RNA, 22 nt, Human
aggaggcugggcacaguggccu

SEQ ID NO: 495712 - RNA, 22 nt, Human
auggcugccccaaauuguugcu

SEQ ID NO: 495713 - RNA, 19 nt, Human
uaaaaugucuguggucagu

SEQ ID NO: 495714 - RNA, 22 nt, Human
auuauauugaguauaaccagag

SEQ ID NO: 495715 - RNA, 22 nt, Human
cugcccugucuuuuucugauga

SEQ ID NO: 495716 - RNA, 22 nt, Human
cugucaucacaguugagcagcc

SEQ ID NO: 495717 - RNA, 22 nt, Human
cagucccagacccagaaggugg

SEQ ID NO: 495718 - RNA, 22 nt, Human
guuagggagucagguggcucuu

SEQ ID NO: 495719 - RNA, 22 nt, Human
cuuuggaggucauagccaagag

SEQ ID NO: 495720 - RNA, 22 nt, Human
cagggcuccaugcagggacucc

SEQ ID NO: 495721 - RNA, 22 nt, Human
cgcaggcugcagccaagaagag

SEQ ID NO: 495722 - RNA, 22 nt, Human
cuggcagguggauggggacucc

SEQ ID NO: 495723 - RNA, 22 nt, Human
aagcugcagacccccugucuca

SEQ ID NO: 495724 - RNA, 22 nt, Human
uauuucccagggagcaacaagc

SEQ ID NO: 495725 - RNA, 22 nt, Human
acaaagguggaccauguggcuu

SEQ ID NO: 495726 - RNA, 22 nt, Human
ucagcuuucuauguugcuaaac

SEQ ID NO: 495727 - RNA, 22 nt, Human
ugaagcaggcauugacugauga

SEQ ID NO: 495728 - RNA, 22 nt, Human
uggcccugugugcaggcugcac

SEQ ID NO: 495729 - RNA, 22 nt, Human
aacuuuaaggcuauaaauuaug

SEQ ID NO: 495730 - RNA, 22 nt, Human
uguguacucaauugagccauuu

SEQ ID NO: 495731 - RNA, 22 nt, Human
gggcugaugaugagcagaggug

SEQ ID NO: 495732 - RNA, 22 nt, Human
gcuggcagucccaucagcuggg

SEQ ID NO: 495733 - RNA, 22 nt, Human
ggcugcggccgcgggucugugc

SEQ ID NO: 495734 - RNA, 22 nt, Human
ugcaggugcuccgggggugccc

SEQ ID NO: 495735 - RNA, 20 nt, Human
cagggcucugggccuggccu

SEQ ID NO: 495736 - RNA, 22 nt, Human
caggagcccagaguccucagcu

SEQ ID NO: 495737 - RNA, 22 nt, Human
agcagagcccuuccauggccuu

SEQ ID NO: 495738 - RNA, 22 nt, Human
ccaggcugugcuuuucauaaau

SEQ ID NO: 495739 - RNA, 22 nt, Human
gagcugagccuggguggaccgc

SEQ ID NO: 495740 - RNA, 22 nt, Human
ggccugcacagagguggcucua

SEQ ID NO: 495741 - RNA, 22 nt, Human
ccaggcugagcaugauuggagc

SEQ ID NO: 495742 - RNA, 22 nt, Human
uggcccaggcgaggugggcaga

SEQ ID NO: 495743 - RNA, 22 nt, Human
ugcagaggagcuggaaggcugg

SEQ ID NO: 495744 - RNA, 22 nt, Human
acagucuuuaauuucuuugugg

SEQ ID NO: 495745 - RNA, 22 nt, Human
ucuguggcacgauugcacugca

SEQ ID NO: 495746 - RNA, 22 nt, Human
ugcagccaccaccucugcugaa

SEQ ID NO: 495747 - RNA, 22 nt, Human
acuuuagauauuccucuguaca

SEQ ID NO: 495748 - RNA, 22 nt, Human
gcugcccacaaccccgugucua

SEQ ID NO: 495749 - RNA, 22 nt, Human
ucauccaguaccauggaaggca

SEQ ID NO: 495750 - RNA, 22 nt, Human
aaauguguuucgaaaacuggug

SEQ ID NO: 495751 - RNA, 22 nt, Human
aacaugaaacccaaacagaaua

SEQ ID NO: 495752 - RNA, 22 nt, Human
acacuguaaauugagugcguga

SEQ ID NO: 495753 - RNA, 22 nt, Human
agcugcuaugacaacaccagcc

SEQ ID NO: 495754 - RNA, 22 nt, Human
aaucaagaguuguguaauauuu

SEQ ID NO: 495755 - RNA, 22 nt, Human
cuggcucaggguggucuggguc

SEQ ID NO: 495756 - RNA, 22 nt, Human
cugggucuuuuucuuccauuga

SEQ ID NO: 495757 - RNA, 22 nt, Human
cuggugccuccucccugugcuu

SEQ ID NO: 495758 - RNA, 22 nt, Human
uagaaauaaaucugcagcuggg

SEQ ID NO: 495759 - RNA, 22 nt, Human
cacaggaauauaaguuugaguu

SEQ ID NO: 495760 - RNA, 22 nt, Human
ugguggcagcaggagggccccu

SEQ ID NO: 495761 - RNA, 22 nt, Human
aggcacaguuucauccccgggc

SEQ ID NO: 495762 - RNA, 22 nt, Human
ugggccacggggguggagagcu

SEQ ID NO: 495763 - RNA, 22 nt, Human
uuacuuuaucuccuagauucca

SEQ ID NO: 495764 - RNA, 22 nt, Human
gccuggcaggccuguuggggcu

SEQ ID NO: 495765 - RNA, 23 nt, Human
acagacaacacugaugagagaaa

SEQ ID NO: 495766 - RNA, 22 nt, Human
gagggaggugauacugaacgua

SEQ ID NO: 495767 - RNA, 18 nt, Human
auacaagaucaaguguuc

SEQ ID NO: 495768 - RNA, 22 nt, Human
uuuuaauucaaagugaauagug

SEQ ID NO: 495769 - RNA, 19 nt, Human
aagcagcccuggcaagagc

SEQ ID NO: 495770 - RNA, 22 nt, Human
acuguacaaccucugccccugu

SEQ ID NO: 495771 - RNA, 22 nt, Human
gaacuccagaugacucaggaac

SEQ ID NO: 495772 - RNA, 22 nt, Human
ugggcucugguuuccuggcugg

SEQ ID NO: 495773 - RNA, 22 nt, Human
cagguacacaggacaaaguacu

SEQ ID NO: 495774 - RNA, 22 nt, Human
gagugguaggcaguguuaggaa

SEQ ID NO: 495775 - RNA, 22 nt, Human
ugcaggcccaguguagaggcuc

SEQ ID NO: 495776 - RNA, 22 nt, Human
cugugcuucgcaacuccaaggu

SEQ ID NO: 495777 - RNA, 22 nt, Human
uccaggucccagacugggcagc

SEQ ID NO: 495778 - RNA, 20 nt, Human
ugguccucacaugccaucuu

SEQ ID NO: 495779 - RNA, 22 nt, Human
ucaggaaagaagaugcucagug

SEQ ID NO: 495780 - RNA, 22 nt, Human
gccugagaaggauaggaagcga

SEQ ID NO: 495781 - RNA, 22 nt, Human
uccuaggaaguggaggcaccug

SEQ ID NO: 495782 - RNA, 22 nt, Human
ucugccagaaguucugagagua

SEQ ID NO: 495783 - RNA, 22 nt, Human
ugauuacauugguaauguuuau

SEQ ID NO: 495784 - RNA, 22 nt, Human
ucagugcauuguucauuguagg

SEQ ID NO: 495785 - RNA, 22 nt, Human
cuggguggcagagccugcagug

SEQ ID NO: 495786 - RNA, 22 nt, Human
aggagcugcaaauauuaguaau

SEQ ID NO: 495787 - RNA, 22 nt, Human
agauguggauccuaggguagaa

SEQ ID NO: 495788 - RNA, 22 nt, Human
uggaaauggaucugaugagucu

SEQ ID NO: 495789 - RNA, 22 nt, Human
gaggcauggccugaggcuagga

SEQ ID NO: 495790 - RNA, 22 nt, Human
agaccaugaccugccacuaagc

SEQ ID NO: 495791 - RNA, 22 nt, Human
cuucccugauaagagccucaga

SEQ ID NO: 495792 - RNA, 22 nt, Human
auauauuugagaauauucauga

SEQ ID NO: 495793 - RNA, 22 nt, Human
uuaugcaacaggugagcagaca

SEQ ID NO: 495794 - RNA, 22 nt, Human
ugcuuuauguggcugauacuca

SEQ ID NO: 495795 - RNA, 22 nt, Human
cuucagcaacuuuggaauguuu

SEQ ID NO: 495796 - RNA, 22 nt, Human
uucaacaucaagaaugcaugga

SEQ ID NO: 495797 - RNA, 22 nt, Human
gugcccuguugcacacuugagg

SEQ ID NO: 495798 - RNA, 22 nt, Human
ccagcccugauuagagaauguc

SEQ ID NO: 495799 - RNA, 22 nt, Human
agcauuaagccuggcucagagg

SEQ ID NO: 495800 - RNA, 22 nt, Human
ucacagaaaucuguuuuuucua

SEQ ID NO: 495801 - RNA, 22 nt, Human
gucauucaacugcacauuaggu

SEQ ID NO: 495802 - RNA, 22 nt, Human
uggcagcauguuauguaaggaa

SEQ ID NO: 495803 - RNA, 22 nt, Human
agugcauauaugaagaguauga

SEQ ID NO: 495804 - RNA, 22 nt, Human
gaugaggcagcucagggggaaa

SEQ ID NO: 495805 - RNA, 23 nt, Human
uggcagugaucaaaagcuuacau

SEQ ID NO: 495806 - RNA, 22 nt, Human
uaaaauagcaugugcagugaaa

SEQ ID NO: 495807 - RNA, 22 nt, Human
uucaagguaugguagcugguca

SEQ ID NO: 495808 - RNA, 22 nt, Human
guaaauauucccucgguuccua

SEQ ID NO: 495809 - RNA, 19 nt, Human
gggcagaauggcaucucag

SEQ ID NO: 495810 - RNA, 22 nt, Human
ggcacagcugaugcagacacac

SEQ ID NO: 495811 - RNA, 22 nt, Human
ccuuggaggacugcugcuucuu

SEQ ID NO: 495812 - RNA, 22 nt, Human
ccugagccuggcucaugcacuc

SEQ ID NO: 495813 - RNA, 22 nt, Human
cagaggaagcuggguguggagu

SEQ ID NO: 495814 - RNA, 22 nt, Human
uuuucauuguuccucgagcauu

SEQ ID NO: 495815 - RNA, 21 nt, Human
uacacaaagcgugguccagag

SEQ ID NO: 495816 - RNA, 22 nt, Human
aagcugccauagaacgagaggu

SEQ ID NO: 495817 - RNA, 22 nt, Human
gcagcagguccgcaucaucauc

SEQ ID NO: 495818 - RNA, 22 nt, Human
uucucuggacuauuugcacucc

SEQ ID NO: 495819 - RNA, 22 nt, Human
gaugccugcauuucaggagagu

SEQ ID NO: 495820 - RNA, 18 nt, Human
uucuuuaauucaguuuga

SEQ ID NO: 495821 - RNA, 22 nt, Human
cuggccacugguggucauaggc

SEQ ID NO: 495822 - RNA, 22 nt, Human
agguggggaggagugucucuuu

SEQ ID NO: 495823 - RNA, 22 nt, Human
ggacagagcccugguggccuaa

SEQ ID NO: 495824 - RNA, 22 nt, Human
ugccagggugucaggagagcua

SEQ ID NO: 495825 - RNA, 21 nt, Human
uccucccugagcuguggggga

SEQ ID NO: 495826 - RNA, 22 nt, Human
gcccacacagcagauccuuugg

SEQ ID NO: 495827 - RNA, 22 nt, Human
ggcaugggguguauguggcacg

SEQ ID NO: 495828 - RNA, 22 nt, Human
ucccugggccuaucuuagcucc

SEQ ID NO: 495829 - RNA, 22 nt, Human
cuccagugucucagagcagaug

SEQ ID NO: 495830 - RNA, 22 nt, Human
agagcagagggcucugggacaa

SEQ ID NO: 495831 - RNA, 22 nt, Human
ggcuggguuauuuauggccaag

SEQ ID NO: 495832 - RNA, 22 nt, Human
cagacacaccaggcccauucug

SEQ ID NO: 495833 - RNA, 22 nt, Human
gggggugaggacaggagcacug

SEQ ID NO: 495834 - RNA, 20 nt, Human
ggcugcaggacucauuggcu

SEQ ID NO: 495835 - RNA, 22 nt, Human
uccuugaauggacauuacacug

SEQ ID NO: 495836 - RNA, 20 nt, Human
ccagguggugccuggagagg

SEQ ID NO: 495837 - RNA, 22 nt, Human
uagcugccauugcuccaggaag

SEQ ID NO: 495838 - RNA, 22 nt, Human
auucuaagcacgcugaagucuu

SEQ ID NO: 495839 - RNA, 22 nt, Human
aggcacugauucuguuuuccau

SEQ ID NO: 495840 - RNA, 22 nt, Human
gcaguguuauguuuucuauaau

SEQ ID NO: 495841 - RNA, 22 nt, Human
auugauaaauugcaauggggcu

SEQ ID NO: 495842 - RNA, 20 nt, Human
cugccuggaggccucuaccu

SEQ ID NO: 495843 - RNA, 22 nt, Human
gccucugcucucagguagccuc

SEQ ID NO: 495844 - RNA, 22 nt, Human
auauucaucguguagaaauacu

SEQ ID NO: 495845 - RNA, 22 nt, Human
cuggcaggcagacuucugcaag

SEQ ID NO: 495846 - RNA, 22 nt, Human
ucaguguuggagauaauugcac

SEQ ID NO: 495847 - RNA, 22 nt, Human
uuccagauguuuaaguucugcu

SEQ ID NO: 495848 - RNA, 22 nt, Human
uuucuaaaggguagauuuggcc

SEQ ID NO: 495849 - RNA, 22 nt, Human
ucaguguuaaucagugguaccu

SEQ ID NO: 495850 - RNA, 22 nt, Human
uagaaaucagcaggcauaugua

SEQ ID NO: 495851 - RNA, 22 nt, Human
gcuuuauguaaguccaaaggca

SEQ ID NO: 495852 - RNA, 22 nt, Human
ugggcacaggggaauggaugaa

SEQ ID NO: 495853 - RNA, 17 nt, Human
ggaaggucaaggggagg

SEQ ID NO: 495854 - RNA, 22 nt, Human
gcagauggcugagccugcagau

SEQ ID NO: 495855 - RNA, 22 nt, Human
aaacaugagcauuucuguuuaa

SEQ ID NO: 495856 - RNA, 22 nt, Human
ccugugugaagguuaggcaggu

SEQ ID NO: 495857 - RNA, 22 nt, Human
ggagaggagauuguggcauuuu

SEQ ID NO: 495858 - RNA, 22 nt, Human
caggcugaggcaguaggguuug

SEQ ID NO: 495859 - RNA, 22 nt, Human
ugggaaaguguugaggugucuu

SEQ ID NO: 495860 - RNA, 22 nt, Human
cagcagcaucaggucugugguu

SEQ ID NO: 495861 - RNA, 22 nt, Human
ugcaggugguuuggacacugcu

SEQ ID NO: 495862 - RNA, 22 nt, Human
agccuucacugggaccuuggau

SEQ ID NO: 495863 - RNA, 19 nt, Human
uccuggggaggggcauggc

SEQ ID NO: 495864 - RNA, 22 nt, Human
uugaaucuauguauucagugua

SEQ ID NO: 495865 - RNA, 22 nt, Human
uacauugcuagaaauguauuuu

SEQ ID NO: 495866 - RNA, 18 nt, Human
gagguccugcucuagccc

SEQ ID NO: 495867 - RNA, 17 nt, Human
uggcucugaggcugaau

SEQ ID NO: 495868 - RNA, 22 nt, Human
ugccucugugugcaggugagca

SEQ ID NO: 495869 - RNA, 22 nt, Human
ggcacugaauuucuuggcaucu

SEQ ID NO: 495870 - RNA, 22 nt, Human
uggguucuuucacuucucaguu

SEQ ID NO: 495871 - RNA, 22 nt, Human
acagauuuggcccagccaaugc

SEQ ID NO: 495872 - RNA, 22 nt, Human
ucucaguggacgugucugucuu

SEQ ID NO: 495873 - RNA, 22 nt, Human
gggagacccccaaugccagguc

SEQ ID NO: 495874 - RNA, 22 nt, Human
ugaucugguccuacugugggca

SEQ ID NO: 495875 - RNA, 22 nt, Human
ccaaggaggccccaggucagcu

SEQ ID NO: 495876 - RNA, 22 nt, Human
cugcaggcugagcgccugccgg

SEQ ID NO: 495877 - RNA, 22 nt, Human
gccuggagacaaggacaaaggg

SEQ ID NO: 495878 - RNA, 22 nt, Human
ucugaggcuucagacuguacug

SEQ ID NO: 495879 - RNA, 22 nt, Human
ugcuuuauucaggguuuacccc

SEQ ID NO: 495880 - RNA, 19 nt, Human
ggucacagggguuacaagg

SEQ ID NO: 495881 - RNA, 22 nt, Human
ggggcagagcauagcuccaauu

SEQ ID NO: 495882 - RNA, 22 nt, Human
auuugugaucgugcgugaugaa

SEQ ID NO: 495883 - RNA, 22 nt, Human
gccaggaaugcauaaaugaccu

SEQ ID NO: 495884 - RNA, 22 nt, Human
ggcacugggcaccggcugaggg

SEQ ID NO: 495885 - RNA, 22 nt, Human
ugggcagagaucuggaucaaac

SEQ ID NO: 495886 - RNA, 20 nt, Human
cugccaugauugauagagug

SEQ ID NO: 495887 - RNA, 22 nt, Human
agucagugacuuuugcugagag

SEQ ID NO: 495888 - RNA, 22 nt, Human
cucccagguuccgacgccucuu

SEQ ID NO: 495889 - RNA, 22 nt, Human
ugcuggaggggccugaccagga

SEQ ID NO: 495890 - RNA, 22 nt, Human
agccauugaauuuagugccuuu

SEQ ID NO: 495891 - RNA, 22 nt, Human
aaggcaggaugggaaaagauuu

SEQ ID NO: 495892 - RNA, 22 nt, Human
uaaaaggagguugaagcuguca

SEQ ID NO: 495893 - RNA, 22 nt, Human
agugccuggaccccaugacaua

SEQ ID NO: 495894 - RNA, 22 nt, Human
gacauucacagguaaacauucc

SEQ ID NO: 495895 - RNA, 22 nt, Human
uucucuggcgguguguuuuccu

SEQ ID NO: 495896 - RNA, 22 nt, Human
auacuuuggucacuauuauugg

SEQ ID NO: 495897 - RNA, 22 nt, Human
uagcugccuaugugauaagaga

SEQ ID NO: 495898 - RNA, 22 nt, Human
cugguuaaaugaaaaaguauua

SEQ ID NO: 495899 - RNA, 22 nt, Human
agaaaugcauuagcacauauag

SEQ ID NO: 495900 - RNA, 17 nt, Human
caguggucugagguaug

SEQ ID NO: 495901 - RNA, 22 nt, Human
uuguaugaguaugguguauagg

SEQ ID NO: 495902 - RNA, 22 nt, Human
gaagagcuaaaggcacaggcuu

SEQ ID NO: 495903 - RNA, 22 nt, Human
ucagcauuucagaaguggcaua

SEQ ID NO: 495904 - RNA, 22 nt, Human
ccugaggucacaacuugcuuau

SEQ ID NO: 495905 - RNA, 22 nt, Human
gcagagcucaagguguucagcu

SEQ ID NO: 495906 - RNA, 21 nt, Human
cauuagggcagaagcaggaag

SEQ ID NO: 495907 - RNA, 22 nt, Human
gcaguggcuaggagucuggcgu

SEQ ID NO: 495908 - RNA, 22 nt, Human
cauuuguagcuauuuacuguau

SEQ ID NO: 495909 - RNA, 21 nt, Human
agcauucaaaagaugccauaa

SEQ ID NO: 495910 - RNA, 22 nt, Human
acuaaaguguuggagaaugagg

SEQ ID NO: 495911 - RNA, 22 nt, Human
gcagcuccuuuaggcugcaaag

SEQ ID NO: 495912 - RNA, 22 nt, Human
uucagcaccacuuccagagaag

SEQ ID NO: 495913 - RNA, 22 nt, Human
ggcuucucgugccgaagcaaga

SEQ ID NO: 495914 - RNA, 22 nt, Human
cauuuguuaaccaguguggauu

SEQ ID NO: 495915 - RNA, 22 nt, Human
auuucucagcacuuccuaucuc

SEQ ID NO: 495916 - RNA, 22 nt, Human
caggaaugacccaacaguuuca

SEQ ID NO: 495917 - RNA, 20 nt, Human
cugcacugaacaugucugag

SEQ ID NO: 495918 - RNA, 22 nt, Human
agagaacacgugcaucugcaau

SEQ ID NO: 495919 - RNA, 22 nt, Human
aagcuuuagagaugaguuccuu

SEQ ID NO: 495920 - RNA, 22 nt, Human
cuguggcuaggauuauuccuga

SEQ ID NO: 495921 - RNA, 19 nt, Human
ggaaacaggggccagagga

SEQ ID NO: 495922 - RNA, 22 nt, Human
ugggcuccaauuuguccuuuca

SEQ ID NO: 495923 - RNA, 22 nt, Human
cucaggaugucggugacuauug

SEQ ID NO: 495924 - RNA, 22 nt, Human
guuucuaaauguucugaguuuu

SEQ ID NO: 495925 - RNA, 22 nt, Human
ggaaacuaaagagguguuuuug

SEQ ID NO: 495926 - RNA, 22 nt, Human
cacuggcugagcuucucuaggg

SEQ ID NO: 495927 - RNA, 22 nt, Human
gugauuucaaauauagagugag

SEQ ID NO: 495928 - RNA, 22 nt, Human
gagugagggcagcaggggcugc

SEQ ID NO: 495929 - RNA, 22 nt, Human
ggcagcugcaaaucugcucugu

SEQ ID NO: 495930 - RNA, 22 nt, Human
auguccagaguaaagcacauuc

SEQ ID NO: 495931 - RNA, 22 nt, Human
uagugcaauuccccauacuaac

SEQ ID NO: 495932 - RNA, 22 nt, Human
agaaggccaauagggugcacug

SEQ ID NO: 495933 - RNA, 16 nt, Human
ccucugggccugcaag

SEQ ID NO: 495934 - RNA, 22 nt, Human
ucaugucaguuucuucuauaaa

SEQ ID NO: 495935 - RNA, 22 nt, Human
agagaagauucuuauaugucuu

SEQ ID NO: 495936 - RNA, 22 nt, Human
uuccuaauggcaaaacauguuu

SEQ ID NO: 495937 - RNA, 22 nt, Human
cccaggcacacugaagugacau

SEQ ID NO: 495938 - RNA, 22 nt, Human
aguuuguaaacuugagcuagcc

SEQ ID NO: 495939 - RNA, 22 nt, Human
cugcugcauuccucuuuaugag

SEQ ID NO: 495940 - RNA, 22 nt, Human
ccacacugaaccucagugucuu

SEQ ID NO: 495941 - RNA, 20 nt, Human
cauuuguuagcuuucuacug

SEQ ID NO: 495942 - RNA, 22 nt, Human
uguacauagaucuugaaaauua

SEQ ID NO: 495943 - RNA, 20 nt, Human
cccugcagccaugggagugg

SEQ ID NO: 495944 - RNA, 21 nt, Human
cagcccagagcaguggggcca

SEQ ID NO: 495945 - RNA, 22 nt, Human
ccucaggguggcaucagaucuu

SEQ ID NO: 495946 - RNA, 22 nt, Human
cugccacuuucacccagugcuc

SEQ ID NO: 495947 - RNA, 22 nt, Human
aggcacagagaaugcccuccau

SEQ ID NO: 495948 - RNA, 18 nt, Human
aagccagagaccacugcc

SEQ ID NO: 495949 - RNA, 22 nt, Human
uauguuuuucaagugcacacua

SEQ ID NO: 495950 - RNA, 22 nt, Human
gaggcuucuguaacccuguccu

SEQ ID NO: 495951 - RNA, 22 nt, Human
aagcagaguccccuucccaugg

SEQ ID NO: 495952 - RNA, 22 nt, Human
uggguccuucaaagcugggucu

SEQ ID NO: 495953 - RNA, 22 nt, Human
uggaggugagugugguacagca

SEQ ID NO: 495954 - RNA, 22 nt, Human
gggccacauugaagggugggua

SEQ ID NO: 495955 - RNA, 22 nt, Human
uuucugcacauuucuaaaguug

SEQ ID NO: 495956 - RNA, 22 nt, Human
cagcccuggaacagcugacuca

SEQ ID NO: 495957 - RNA, 21 nt, Human
uuuuuucuugcgugaggccug

SEQ ID NO: 495958 - RNA, 22 nt, Human
ucccugaaacaucucuguggau

SEQ ID NO: 495959 - RNA, 22 nt, Human
augucuuugccauaguucauau

SEQ ID NO: 495960 - RNA, 20 nt, Human
uggucuggagccagugagga

SEQ ID NO: 495961 - RNA, 22 nt, Human
uuaguaauguguuaauaugaau

SEQ ID NO: 495962 - RNA, 22 nt, Human
ggcacacaaaggcagcauuuga

SEQ ID NO: 495963 - RNA, 22 nt, Human
auauuccauugguuucccuucu

SEQ ID NO: 495964 - RNA, 21 nt, Human
ugagagccuccaaccggcuac

SEQ ID NO: 495965 - RNA, 22 nt, Human
gugaaggaggggccacagauau

SEQ ID NO: 495966 - RNA, 22 nt, Human
gaagagcuuaguuguccuagaa

SEQ ID NO: 495967 - RNA, 22 nt, Human
agauguggccuuugggagauua

SEQ ID NO: 495968 - RNA, 22 nt, Human
uuugaaaggaaguuaauacuuu

SEQ ID NO: 495969 - RNA, 22 nt, Human
agccucugcacgggcacgggug

SEQ ID NO: 495970 - RNA, 22 nt, Human
agggcacaucugcugggaaugg

SEQ ID NO: 495971 - RNA, 22 nt, Human
ggcaggcuuugagaaagagcau

SEQ ID NO: 495972 - RNA, 22 nt, Human
aaacaugcuggauuuagaauau

SEQ ID NO: 495973 - RNA, 20 nt, Human
ggcagcaggaguuuccucuu

SEQ ID NO: 495974 - RNA, 22 nt, Human
aaucuguucuacucuauucaga

SEQ ID NO: 495975 - RNA, 22 nt, Human
cucaagacugaucgcaguggaa

SEQ ID NO: 495976 - RNA, 22 nt, Human
ugggacagugugccuugcuccu

SEQ ID NO: 495977 - RNA, 22 nt, Human
ucucucagcuuugagaccugcu

SEQ ID NO: 495978 - RNA, 22 nt, Human
agagccugcaucaggcuugggg

SEQ ID NO: 495979 - RNA, 22 nt, Human
auugaaagauauacuguucuca

SEQ ID NO: 495980 - RNA, 17 nt, Human
aguggcaggcagauggg

SEQ ID NO: 495981 - RNA, 22 nt, Human
cacagggccacuuucccaguaa

SEQ ID NO: 495982 - RNA, 22 nt, Human
uggcuggcaguaggcuaguggc

SEQ ID NO: 495983 - RNA, 18 nt, Human
ccuggcuuccaucuuggu

SEQ ID NO: 495984 - RNA, 22 nt, Human
cuccugggucauugccagcaaa

SEQ ID NO: 495985 - RNA, 22 nt, Human
gccaggcaggugucggagcccu

SEQ ID NO: 495986 - RNA, 22 nt, Human
uccauucauucauugaugaaca

SEQ ID NO: 495987 - RNA, 18 nt, Human
uugaggaguucacugucu

SEQ ID NO: 495988 - RNA, 22 nt, Human
ugccucugggugaccaaggagc

SEQ ID NO: 495989 - RNA, 22 nt, Human
cugcaggagcaaagccucugcu

SEQ ID NO: 495990 - RNA, 22 nt, Human
cccaguccuaaagcagacgcca

SEQ ID NO: 495991 - RNA, 22 nt, Human
cguaugaaauuuuugacauuug

SEQ ID NO: 495992 - RNA, 21 nt, Human
uucuccccagcgaauccucgg

SEQ ID NO: 495993 - RNA, 22 nt, Human
uuauugcaaaggaagagcuuga

SEQ ID NO: 495994 - RNA, 22 nt, Human
gcacccaggcuugggcagcaac

SEQ ID NO: 495995 - RNA, 22 nt, Human
acauuucucaucuaguagagua

SEQ ID NO: 495996 - RNA, 22 nt, Human
cagggacagccuugggguggcg

SEQ ID NO: 495997 - RNA, 22 nt, Human
ugucucugaggugagggucagc

SEQ ID NO: 495998 - RNA, 22 nt, Human
agaaaucuuuccugaaguguuu

SEQ ID NO: 495999 - RNA, 22 nt, Human
uuggcuucuggcagucuggacg

SEQ ID NO: 496000 - RNA, 22 nt, Human
uuacaguuuaguccaagccaga

SEQ ID NO: 496001 - RNA, 22 nt, Human
ggaagaaagcacacaaacuuga

SEQ ID NO: 496002 - RNA, 23 nt, Human
ugcauuauccucucugaagacca

SEQ ID NO: 496003 - RNA, 22 nt, Human
uacaaaugaccauagccacuua

SEQ ID NO: 496004 - RNA, 22 nt, Human
cuccucacuuuccagacugggc

SEQ ID NO: 496005 - RNA, 19 nt, Human
uugcauuguaguuggacug

SEQ ID NO: 496006 - RNA, 22 nt, Human
augugcaugcacuuacaugugu

SEQ ID NO: 496007 - RNA, 22 nt, Human
ccagauucauagaaacucauag

SEQ ID NO: 496008 - RNA, 22 nt, Human
ugggcuucugauguugagugcu

SEQ ID NO: 496009 - RNA, 22 nt, Human
agagcuggacgucugagcccua

SEQ ID NO: 496010 - RNA, 22 nt, Human
gccacagacagagagucuagug

SEQ ID NO: 496011 - RNA, 22 nt, Human
uggcucugucacugugagcuau

SEQ ID NO: 496012 - RNA, 22 nt, Human
auguuauuaaaguacagauucu

SEQ ID NO: 496013 - RNA, 22 nt, Human
cacacauuaauaucaaaggcuc

SEQ ID NO: 496014 - RNA, 22 nt, Human
aggagagaauguuccaggcuug

SEQ ID NO: 496015 - RNA, 22 nt, Human
aacagcuuugugcucagauuug

SEQ ID NO: 496016 - RNA, 22 nt, Human
augugaggcagcacggagauua

SEQ ID NO: 496017 - RNA, 22 nt, Human
ccccuucucugcaagccugcuc

SEQ ID NO: 496018 - RNA, 22 nt, Human
gaggcucugugaugugccaggc

SEQ ID NO: 496019 - RNA, 22 nt, Human
ucuuagaaaugaaguucuuucu

SEQ ID NO: 496020 - RNA, 22 nt, Human
gaagccaagugcaaaugccuua

SEQ ID NO: 496021 - RNA, 22 nt, Human
aaguucaagaucaagguuccag

SEQ ID NO: 496022 - RNA, 22 nt, Human
aaugcacauguuguaauaaaua

SEQ ID NO: 496023 - RNA, 22 nt, Human
gggcugugaggugagaacuuac

SEQ ID NO: 496024 - RNA, 20 nt, Human
uguugauuggugucaucuca

SEQ ID NO: 496025 - RNA, 22 nt, Human
acuccugguuuguguccuggcu

SEQ ID NO: 496026 - RNA, 23 nt, Human
gccagccuugcucuccugcagcc

SEQ ID NO: 496027 - RNA, 20 nt, Human
agguccugggacuggcagag

SEQ ID NO: 496028 - RNA, 22 nt, Human
agagacugcaaaucauaagaau

SEQ ID NO: 496029 - RNA, 22 nt, Human
gcuuggccagcagccgggaugc

SEQ ID NO: 496030 - RNA, 22 nt, Human
ucaguguuuuuaaagcaauaua

SEQ ID NO: 496031 - RNA, 22 nt, Human
uguaugaaagaacaagggcuua

SEQ ID NO: 496032 - RNA, 22 nt, Human
ucaccaggcuggaaugcagugg

SEQ ID NO: 496033 - RNA, 22 nt, Human
auacuguaucacuugugaguga

SEQ ID NO: 496034 - RNA, 22 nt, Human
uuucagagaacugaguccuugc

SEQ ID NO: 496035 - RNA, 22 nt, Human
gaagauuucuuuaugaaagaug

SEQ ID NO: 496036 - RNA, 17 nt, Human
uauguaguacuuauaaa

SEQ ID NO: 496037 - RNA, 22 nt, Human
aacaaaugaccugauuucuucc

SEQ ID NO: 496038 - RNA, 22 nt, Human
uugugugacuccuagaguagag

SEQ ID NO: 496039 - RNA, 22 nt, Human
aaaaagacuagucgagugcagu

SEQ ID NO: 496040 - RNA, 22 nt, Human
aucaaaguuucccagaaguugu

SEQ ID NO: 496041 - RNA, 22 nt, Human
cccagggaaugacucuggccuu

SEQ ID NO: 496042 - RNA, 22 nt, Human
aacuuuggccacaaguacccug

SEQ ID NO: 496043 - RNA, 22 nt, Human
uguuuacuagccaacauggaga

SEQ ID NO: 496044 - RNA, 22 nt, Human
gcagggucugaggccacagagg

SEQ ID NO: 496045 - RNA, 22 nt, Human
cagcaguaacucccgugcagca

SEQ ID NO: 496046 - RNA, 22 nt, Human
ccugccugcguccucugagggc

SEQ ID NO: 496047 - RNA, 22 nt, Human
uuucacaugguacugccuguuu

SEQ ID NO: 496048 - RNA, 22 nt, Human
caucacuguccucagcauucca

SEQ ID NO: 496049 - RNA, 22 nt, Human
uuggaaagcaagcuggacauac

SEQ ID NO: 496050 - RNA, 22 nt, Human
accuguuuguguuuggacugca

SEQ ID NO: 496051 - RNA, 22 nt, Human
gccaaagcccaggagacagcca

SEQ ID NO: 496052 - RNA, 22 nt, Human
ugucagcaggacauuaaaagcu

SEQ ID NO: 496053 - RNA, 22 nt, Human
cccuguuuauuuuuggagagaa

SEQ ID NO: 496054 - RNA, 20 nt, Human
guggcaggcagugaaggagc

SEQ ID NO: 496055 - RNA, 22 nt, Human
ugcauugcaguuaacucaguau

SEQ ID NO: 496056 - RNA, 22 nt, Human
gcaggcugaguugggaaaccaa

SEQ ID NO: 496057 - RNA, 22 nt, Human
cacagauagaccuuaugagauu

SEQ ID NO: 496058 - RNA, 22 nt, Human
uacagaagcuuuugaaaagaug

SEQ ID NO: 496059 - RNA, 18 nt, Human
ucaguccuccauagagcu

SEQ ID NO: 496060 - RNA, 22 nt, Human
gagguccauuuucacauaugau

SEQ ID NO: 496061 - RNA, 22 nt, Human
gggaucuugaaacagcuggauu

SEQ ID NO: 496062 - RNA, 22 nt, Human
gugccugggcaugagcuuguug

SEQ ID NO: 496063 - RNA, 20 nt, Human
cugcccugcccuggguccug

SEQ ID NO: 496064 - RNA, 22 nt, Human
cuccugggaaaugaaggggcag

SEQ ID NO: 496065 - RNA, 22 nt, Human
acagagcaguucuggagcuggc

SEQ ID NO: 496066 - RNA, 22 nt, Human
gcacagggcugccaggcggcuu

SEQ ID NO: 496067 - RNA, 22 nt, Human
auucuagaugcuguaaguagca

SEQ ID NO: 496068 - RNA, 22 nt, Human
acauuucucuugaugucucuau

SEQ ID NO: 496069 - RNA, 19 nt, Human
ggccuggauuuagggcucc

SEQ ID NO: 496070 - RNA, 22 nt, Human
uuuauucuagcucagaauaguu

SEQ ID NO: 496071 - RNA, 22 nt, Human
aaagguaguacuucuagaaggg

SEQ ID NO: 496072 - RNA, 22 nt, Human
uuugugaauagguuggcuucca

SEQ ID NO: 496073 - RNA, 22 nt, Human
cauugcacaucugagaagagau

SEQ ID NO: 496074 - RNA, 22 nt, Human
aaaugaccagaauacaggcuuc

SEQ ID NO: 496075 - RNA, 22 nt, Human
aggacuuagaacauuauguacu

SEQ ID NO: 496076 - RNA, 22 nt, Human
uccuggaggacagaggcaucuc

SEQ ID NO: 496077 - RNA, 19 nt, Human
agagucugugcucuuccua

SEQ ID NO: 496078 - RNA, 20 nt, Human
gcugccuuguccugcuuggu

SEQ ID NO: 496079 - RNA, 22 nt, Human
gcugucugccgcaggcugccac

SEQ ID NO: 496080 - RNA, 22 nt, Human
cugccagcucaaagcgcagcua

SEQ ID NO: 496081 - RNA, 22 nt, Human
aaaugucugucucaugaggaaa

SEQ ID NO: 496082 - RNA, 22 nt, Human
cuccuggcuaugacuacauuuc

SEQ ID NO: 496083 - RNA, 22 nt, Human
augugagggaaaucagucagaa

SEQ ID NO: 496084 - RNA, 20 nt, Human
cugcaggguuagaggcucca

SEQ ID NO: 496085 - RNA, 22 nt, Human
auuuuuccaugauacuuaucug

SEQ ID NO: 496086 - RNA, 22 nt, Human
uuugucagucaugucugcuuuu

SEQ ID NO: 496087 - RNA, 22 nt, Human
cuguucagaaaaaaucuucaug

SEQ ID NO: 496088 - RNA, 22 nt, Human
acagauuuuaaaugacacuccc

SEQ ID NO: 496089 - RNA, 22 nt, Human
cuuggccucuucucaggguggg

SEQ ID NO: 496090 - RNA, 22 nt, Human
acuguacuuuucuuggcuagau

SEQ ID NO: 496091 - RNA, 22 nt, Human
ccagcagguguagggcucaugg

SEQ ID NO: 496092 - RNA, 20 nt, Human
auguagaugaaagcaaaggc

SEQ ID NO: 496093 - RNA, 22 nt, Human
ugcaguuuugccaggcaaugga

SEQ ID NO: 496094 - RNA, 22 nt, Human
cugacaggguagacagagggca

SEQ ID NO: 496095 - RNA, 22 nt, Human
agguccaucguggaugaacugc

SEQ ID NO: 496096 - RNA, 22 nt, Human
ugcugaauaagacguggcuugu

SEQ ID NO: 496097 - RNA, 22 nt, Human
agggcagaaauauugauacugu

SEQ ID NO: 496098 - RNA, 22 nt, Human
accuguuuucagaaaaugcaga

SEQ ID NO: 496099 - RNA, 23 nt, Human
uucauuugucuacuucacuuguu

SEQ ID NO: 496100 - RNA, 22 nt, Human
uggaaagaugaagauguuuaag

SEQ ID NO: 496101 - RNA, 22 nt, Human
ucugggagcagcucagcagauu

SEQ ID NO: 496102 - RNA, 22 nt, Human
guccuucauuuccugaucucua

SEQ ID NO: 496103 - RNA, 19 nt, Human
acaagggcaggcaagguga

SEQ ID NO: 496104 - RNA, 22 nt, Human
uagaauugggccuaacuuccau

SEQ ID NO: 496105 - RNA, 22 nt, Human
ucuucaaacugaaaauuuagaa

SEQ ID NO: 496106 - RNA, 22 nt, Human
uucacagaugccugaugugugg

SEQ ID NO: 496107 - RNA, 22 nt, Human
caggccucaggggcucaggcug

SEQ ID NO: 496108 - RNA, 22 nt, Human
uguccuggugcuucuugggauu

SEQ ID NO: 496109 - RNA, 22 nt, Human
caggcucccgcuccacugggca

SEQ ID NO: 496110 - RNA, 22 nt, Human
augguuuguguggcccagauga

SEQ ID NO: 496111 - RNA, 22 nt, Human
ggcaggcaacggaccacuaguc

SEQ ID NO: 496112 - RNA, 22 nt, Human
cugcuggagguuggagcaugca

SEQ ID NO: 496113 - RNA, 22 nt, Human
ucugaagagucuugcaagaaag

SEQ ID NO: 496114 - RNA, 22 nt, Human
acugcuuuucagagucugccug

SEQ ID NO: 496115 - RNA, 22 nt, Human
gggaucagcaagccacugcacc

SEQ ID NO: 496116 - RNA, 19 nt, Human
ccagcccacagugacuuuc

SEQ ID NO: 496117 - RNA, 22 nt, Human
uccagggguaccggccaggcag

SEQ ID NO: 496118 - RNA, 22 nt, Human
ccugggucaccaggcccaggca

SEQ ID NO: 496119 - RNA, 22 nt, Human
uacagcauuaacaggcuguuua

SEQ ID NO: 496120 - RNA, 22 nt, Human
gugcacagaaacauacaaugug

SEQ ID NO: 496121 - RNA, 22 nt, Human
ccagucugcugugguaggaaga

SEQ ID NO: 496122 - RNA, 22 nt, Human
cugcuuugauuagaagaguaca

SEQ ID NO: 496123 - RNA, 22 nt, Human
augcacccagugucuggacuau

SEQ ID NO: 496124 - RNA, 22 nt, Human
ggagccagagggaugcaguuga

SEQ ID NO: 496125 - RNA, 22 nt, Human
ucagggcauacucuucaagguc

SEQ ID NO: 496126 - RNA, 22 nt, Human
aaauuagauaugugugagacuc

SEQ ID NO: 496127 - RNA, 22 nt, Human
gaggaaccaaaucagcuugcac

SEQ ID NO: 496128 - RNA, 22 nt, Human
uuugucuuauccaaucucucag

SEQ ID NO: 496129 - RNA, 22 nt, Human
gagcaggccagcaauggaaggg

SEQ ID NO: 496130 - RNA, 22 nt, Human
agaaguuaauuccugaaauucu

SEQ ID NO: 496131 - RNA, 21 nt, Human
gcucagaguauugcacuguuu

SEQ ID NO: 496132 - RNA, 22 nt, Human
ugcauaucuucaaugcuguugc

SEQ ID NO: 496133 - RNA, 22 nt, Human
ccucaaagcgguaugcagacgg

SEQ ID NO: 496134 - RNA, 22 nt, Human
gaaaugcagauucugauucugu

SEQ ID NO: 496135 - RNA, 22 nt, Human
ggaggccaugaggcucuaggug

SEQ ID NO: 496136 - RNA, 23 nt, Human
aaggucacagaacuuagcaagcc

SEQ ID NO: 496137 - RNA, 20 nt, Human
ggcagagcuaugucuguugc

SEQ ID NO: 496138 - RNA, 22 nt, Human
caagggcuucaaguggccaaga

SEQ ID NO: 496139 - RNA, 22 nt, Human
acuguucauuuggauuucucug

SEQ ID NO: 496140 - RNA, 22 nt, Human
cuggagcagguuuaggaguccc

SEQ ID NO: 496141 - RNA, 22 nt, Human
ucuuuccuagaggcugaugagu

SEQ ID NO: 496142 - RNA, 22 nt, Human
cauggccaggccaagagaguac

SEQ ID NO: 496143 - RNA, 22 nt, Human
aacaaauggaacacaaaucuuu

SEQ ID NO: 496144 - RNA, 22 nt, Human
uuuccucugcugccauugcccc

SEQ ID NO: 496145 - RNA, 22 nt, Human
auucagugugagguuuucaagu

SEQ ID NO: 496146 - RNA, 22 nt, Human
guguuuuauuggugcagucaga

SEQ ID NO: 496147 - RNA, 22 nt, Human
uuggguuuugauacaugucuaa

SEQ ID NO: 496148 - RNA, 22 nt, Human
auuguugaggagacucuucaau

SEQ ID NO: 496149 - RNA, 22 nt, Human
aaaguguugaagaaaauguuca

SEQ ID NO: 496150 - RNA, 20 nt, Human
aggguucccuuguucagcag

SEQ ID NO: 496151 - RNA, 22 nt, Human
gaaaacauccagagauagaccu

SEQ ID NO: 496152 - RNA, 22 nt, Human
aagcagcuuuugaagagugagg

SEQ ID NO: 496153 - RNA, 22 nt, Human
acagcaguggugcacugagcca

SEQ ID NO: 496154 - RNA, 22 nt, Human
ucugugacugauggaggcuuuu

SEQ ID NO: 496155 - RNA, 22 nt, Human
aagcuucagugugagcauguaa

SEQ ID NO: 496156 - RNA, 22 nt, Human
uuacaaagagugccagagugug

SEQ ID NO: 496157 - RNA, 22 nt, Human
gccccacagccugcggucucag

SEQ ID NO: 496158 - RNA, 22 nt, Human
ugccaggcacgugagaguggcc

SEQ ID NO: 496159 - RNA, 22 nt, Human
agcuaggacagguagagauggg

SEQ ID NO: 496160 - RNA, 21 nt, Human
aaggucuguaaagugacagga

SEQ ID NO: 496161 - RNA, 18 nt, Human
ggcugagguugacuagaa

SEQ ID NO: 496162 - RNA, 22 nt, Human
ggccccucuuguggcacauacg

SEQ ID NO: 496163 - RNA, 22 nt, Human
ucugggcccuaaaccagcucua

SEQ ID NO: 496164 - RNA, 22 nt, Human
agggcagagagaugaaugggau
